United States Patent Application Publication US 2005/0255487 A1 - sequence listing, part 26

SEQ ID NO: 699713 - RNA, 19 nt, Homo sapiens
  misc_RNA (1)...(19): siRNA sense strand
guaacaguucgucuauuug

SEQ ID NO: 699714 - RNA, 19 nt, Homo sapiens
  misc_RNA (1)...(19): siRNA sense strand
gcuacaggauuaguguguu

SEQ ID NO: 699715 - RNA, 19 nt, Homo sapiens
  misc_RNA (1)...(19): siRNA sense strand
cuggagaggugaaccaaag

SEQ ID NO: 699716 - RNA, 19 nt, Homo sapiens
  misc_RNA (1)...(19): siRNA sense strand
ccagaucccagccuguuug

SEQ ID NO: 699717 - RNA, 19 nt, Homo sapiens
  misc_RNA (1)...(19): siRNA sense strand
gcuacucgauccuuugacu

SEQ ID NO: 699718 - RNA, 19 nt, Homo sapiens
  misc_RNA (1)...(19): siRNA sense strand
ucacaugagguguuuguuc

SEQ ID NO: 699719 - RNA, 19 nt, Homo sapiens
  misc_RNA (1)...(19): siRNA sense strand
uaaaugacaaugccccuua

SEQ ID NO: 699720 - RNA, 19 nt, Homo sapiens
  misc_RNA (1)...(19): siRNA sense strand
gauccagacucagggucaa

SEQ ID NO: 699721 - RNA, 19 nt, Homo sapiens
  misc_RNA (1)...(19): siRNA sense strand
cauggucacugcuucugau

SEQ ID NO: 699722 - RNA, 19 nt, Homo sapiens
  misc_RNA (1)...(19): siRNA sense strand
gagaagcuggacagaaauc

SEQ ID NO: 699723 - RNA, 19 nt, Homo sapiens
  misc_RNA (1)...(19): siRNA sense strand
ugucccagaucuucgagaa

SEQ ID NO: 699724 - RNA, 19 nt, Homo sapiens
  misc_RNA (1)...(19): siRNA sense strand
augcuuggguuuccuauca

SEQ ID NO: 699725 - RNA, 19 nt, Homo sapiens
  misc_RNA (1)...(19): siRNA sense strand
ucaagucugccuucaggaa

SEQ ID NO: 699726 - RNA, 19 nt, Homo sapiens
  misc_RNA (1)...(19): siRNA sense strand
ggugcugacugcugucgau

SEQ ID NO: 699727 - RNA, 19 nt, Homo sapiens
  misc_RNA (1)...(19): siRNA sense strand
gugccugucucaccagauc

SEQ ID NO: 699728 - RNA, 19 nt, Homo sapiens
  misc_RNA (1)...(19): siRNA sense strand
ucaugcuacucgauccuuu

SEQ ID NO: 699729 - RNA, 19 nt, Homo sapiens
  misc_RNA (1)...(19): siRNA sense strand
aauccacccucuuucuuuc

SEQ ID NO: 699730 - RNA, 19 nt, Homo sapiens
  misc_RNA (1)...(19): siRNA sense strand
ggucacugcuucugaugcu

SEQ ID NO: 699731 - RNA, 19 nt, Homo sapiens
  misc_RNA (1)...(19): siRNA sense strand
uggaucugcuggacguaaa

SEQ ID NO: 699732 - RNA, 19 nt, Homo sapiens
  misc_RNA (1)...(19): siRNA sense strand
ucccagaucuucgagaauc

SEQ ID NO: 699733 - RNA, 19 nt, Homo sapiens
  misc_RNA (1)...(19): siRNA sense strand
ggucacaugagguguuugu

SEQ ID NO: 699734 - RNA, 19 nt, Homo sapiens
  misc_RNA (1)...(19): siRNA sense strand
cucaauauuucagauguga

SEQ ID NO: 699735 - RNA, 19 nt, Homo sapiens
  misc_RNA (1)...(19): siRNA sense strand
gggaacccuccucucagua

SEQ ID NO: 699736 - RNA, 19 nt, Homo sapiens
  misc_RNA (1)...(19): siRNA sense strand
ucguggcacuacucucuaa

SEQ ID NO: 699737 - RNA, 19 nt, Homo sapiens
  misc_RNA (1)...(19): siRNA sense strand
gguaguccaccacucucua

SEQ ID NO: 699738 - RNA, 19 nt, Homo sapiens
  misc_RNA (1)...(19): siRNA sense strand
ggugagaagcuggacagaa

SEQ ID NO: 699739 - RNA, 19 nt, Homo sapiens
  misc_RNA (1)...(19): siRNA sense strand
cccuagacuuugagaguga

SEQ ID NO: 699740 - RNA, 19 nt, Homo sapiens
  misc_RNA (1)...(19): siRNA sense strand
caagcugcccacccucuga

SEQ ID NO: 699741 - RNA, 19 nt, Homo sapiens
  misc_RNA (1)...(19): siRNA sense strand
uaccucuguuacucucuua

SEQ ID NO: 699742 - RNA, 19 nt, Homo sapiens
  misc_RNA (1)...(19): siRNA sense strand
gcugaccucccaccacaga

SEQ ID NO: 699743 - RNA, 19 nt, Homo sapiens
  misc_RNA (1)...(19): siRNA sense strand
uguuugcagucucucgaua

SEQ ID NO: 699744 - RNA, 19 nt, Homo sapiens
  misc_RNA (1)...(19): siRNA sense strand
ggaacccuccucucaguac

SEQ ID NO: 699745 - RNA, 19 nt, Homo sapiens
  misc_RNA (1)...(19): siRNA sense strand
gagaggccaaaucuagcua

SEQ ID NO: 699746 - RNA, 19 nt, Homo sapiens
  misc_RNA (1)...(19): siRNA sense strand
gaaugucgcucaagauuuc

SEQ ID NO: 699747 - RNA, 19 nt, Homo sapiens
  misc_RNA (1)...(19): siRNA sense strand
ggaagacacucauccaguu

SEQ ID NO: 699748 - RNA, 19 nt, Homo sapiens
  misc_RNA (1)...(19): siRNA sense strand
gugagaagcuggacagaaa

SEQ ID NO: 699749 - RNA, 19 nt, Homo sapiens
  misc_RNA (1)...(19): siRNA sense strand
ugaaugcgcuuaucuccua

SEQ ID NO: 699750 - RNA, 19 nt, Homo sapiens
  misc_RNA (1)...(19): siRNA sense strand
gagcuccaaugaacacuuu

SEQ ID NO: 699751 - RNA, 19 nt, Homo sapiens
  misc_RNA (1)...(19): siRNA sense strand
uguaacaguucgucuauuu

SEQ ID NO: 699752 - RNA, 19 nt, Homo sapiens
  misc_RNA (1)...(19): siRNA sense strand
ggacuuggauucagguuac

SEQ ID NO: 699753 - RNA, 19 nt, Homo sapiens
  misc_RNA (1)...(19): siRNA sense strand
cacagaagcuggucauugu

SEQ ID NO: 699754 - RNA, 19 nt, Homo sapiens
  misc_RNA (1)...(19): siRNA sense strand
gaucguagaugugaaugau

SEQ ID NO: 699755 - RNA, 19 nt, Homo sapiens
  misc_RNA (1)...(19): siRNA sense strand
gcacugugguggcacuuau

SEQ ID NO: 699756 - RNA, 19 nt, Homo sapiens
  misc_RNA (1)...(19): siRNA sense strand
caagauuuccugcuggaua

SEQ ID NO: 699757 - RNA, 19 nt, Homo sapiens
  misc_RNA (1)...(19): siRNA sense strand
gcccaggaaucgagaugua

SEQ ID NO: 699758 - RNA, 19 nt, Homo sapiens
  misc_RNA (1)...(19): siRNA sense strand
gaugugagccuccgcauuc

SEQ ID NO: 699759 - RNA, 19 nt, Homo sapiens
  misc_RNA (1)...(19): siRNA sense strand
gagagaagcaaucggacua

SEQ ID NO: 699760 - RNA, 19 nt, Homo sapiens
  misc_RNA (1)...(19): siRNA sense strand
cagaugacccuaucaaguu

SEQ ID NO: 699761 - RNA, 19 nt, Homo sapiens
  misc_RNA (1)...(19): siRNA sense strand
ggaaugucgcucaagauuu

SEQ ID NO: 699762 - RNA, 19 nt, Homo sapiens
  misc_RNA (1)...(19): siRNA sense strand
ccucugaucuucucuaugg

SEQ ID NO: 699763 - RNA, 19 nt, Homo sapiens
  misc_RNA (1)...(19): siRNA sense strand
cagcuggacuuggaaauug

SEQ ID NO: 699764 - RNA, 19 nt, Homo sapiens
  misc_RNA (1)...(19): siRNA sense strand
ggagaagccuuuggaucga

SEQ ID NO: 699765 - RNA, 19 nt, Homo sapiens
  misc_RNA (1)...(19): siRNA sense strand
ccaaugggauccuccgaau

SEQ ID NO: 699766 - RNA, 19 nt, Homo sapiens
  misc_RNA (1)...(19): siRNA sense strand
gaggucacaugagguguuu

SEQ ID NO: 699767 - RNA, 19 nt, Homo sapiens
  misc_RNA (1)...(19): siRNA sense strand
gagugagaauuacuaugaa

SEQ ID NO: 699768 - RNA, 19 nt, Homo sapiens
  misc_RNA (1)...(19): siRNA sense strand
gggaaugucgcucaagauu

SEQ ID NO: 699769 - RNA, 19 nt, Homo sapiens
  misc_RNA (1)...(19): siRNA sense strand
guagagaucguagauguga

SEQ ID NO: 699770 - RNA, 19 nt, Homo sapiens
  misc_RNA (1)...(19): siRNA sense strand
gagcagagguagagaucgu

SEQ ID NO: 699771 - RNA, 19 nt, Homo sapiens
  misc_RNA (1)...(19): siRNA sense strand
gcuauaggcugagcuccaa

SEQ ID NO: 699772 - RNA, 19 nt, Homo sapiens
  misc_RNA (1)...(19): siRNA sense strand
agagugagaauuacuauga

SEQ ID NO: 699773 - RNA, 19 nt, Homo sapiens
  misc_RNA (1)...(19): siRNA sense strand
ccaccuggguuacguuugu

SEQ ID NO: 699774 - RNA, 19 nt, Homo sapiens
  misc_RNA (1)...(19): siRNA sense strand
gaagacacucauccaguug

SEQ ID NO: 699775 - RNA, 19 nt, Homo sapiens
  misc_RNA (1)...(19): siRNA sense strand
uguaucagcuuccucuuuc

SEQ ID NO: 699776 - RNA, 19 nt, Homo sapiens
  misc_RNA (1)...(19): siRNA sense strand
ccgcauuccugaccacuug

SEQ ID NO: 699777 - RNA, 19 nt, Homo sapiens
  misc_RNA (1)...(19): siRNA sense strand
gguaaaggauagugguagu

SEQ ID NO: 699778 - RNA, 19 nt, Homo sapiens
  misc_RNA (1)...(19): siRNA sense strand
ccacagaagcuggucauug

SEQ ID NO: 699779 - RNA, 19 nt, Homo sapiens
  misc_RNA (1)...(19): siRNA sense strand
agaugacccuaucaaguuu

SEQ ID NO: 699780 - RNA, 19 nt, Homo sapiens
  misc_RNA (1)...(19): siRNA sense strand
gaauccagcuagggucaga

SEQ ID NO: 699781 - RNA, 19 nt, Homo sapiens
  misc_RNA (1)...(19): siRNA sense strand
cuacaggauuaguguguug

SEQ ID NO: 699782 - RNA, 19 nt, Homo sapiens
  misc_RNA (1)...(19): siRNA sense strand
cccagacacugcaguuuga

SEQ ID NO: 699783 - RNA, 19 nt, Homo sapiens
  misc_RNA (1)...(19): siRNA sense strand
gaagcuggucauuguggua

SEQ ID NO: 699784 - RNA, 19 nt, Homo sapiens
  misc_RNA (1)...(19): siRNA sense strand
uagggaaugucgcucaaga

SEQ ID NO: 699785 - RNA, 19 nt, Homo sapiens
  misc_RNA (1)...(19): siRNA sense strand
uaacaguucgucuauuugu

SEQ ID NO: 699786 - RNA, 19 nt, Homo sapiens
  misc_RNA (1)...(19): siRNA sense strand
ccugaccacuugccauuug

SEQ ID NO: 699787 - RNA, 19 nt, Homo sapiens
  misc_RNA (1)...(19): siRNA sense strand
gcagcuggacuuggaaauu

SEQ ID NO: 699788 - RNA, 19 nt, Homo sapiens
  misc_RNA (1)...(19): siRNA sense strand
gugguaacgucaccuuuua

SEQ ID NO: 699789 - RNA, 19 nt, Homo sapiens
  misc_RNA (1)...(19): siRNA sense strand
gcggacggcuguuccuauc

SEQ ID NO: 699790 - RNA, 19 nt, Homo sapiens
  misc_RNA (1)...(19): siRNA sense strand
ugacugcuguggacuugga

SEQ ID NO: 699791 - RNA, 19 nt, Homo sapiens
  misc_RNA (1)...(19): siRNA sense strand
uaauccacccucuuucuuu

SEQ ID NO: 699792 - RNA, 19 nt, Homo sapiens
  misc_RNA (1)...(19): siRNA sense strand
gauaauccacccucuuucu

SEQ ID NO: 699793 - RNA, 19 nt, Homo sapiens
  misc_RNA (1)...(19): siRNA sense strand
gcugacugcugucgaugga

SEQ ID NO: 699794 - RNA, 19 nt, Homo sapiens
  misc_RNA (1)...(19): siRNA sense strand
ggauucagguuacaaugcu

SEQ ID NO: 699795 - RNA, 19 nt, Homo sapiens
  misc_RNA (1)...(19): siRNA sense strand
acuuugagagugagaauua

SEQ ID NO: 699796 - RNA, 19 nt, Homo sapiens
  misc_RNA (1)...(19): siRNA sense strand
ggagugauagcuucaugau

SEQ ID NO: 699797 - RNA, 19 nt, Homo sapiens
  misc_RNA (1)...(19): siRNA sense strand
ggugacugcuguggacuug

SEQ ID NO: 699798 - RNA, 19 nt, Homo sapiens
  misc_RNA (1)...(19): siRNA sense strand
ggccaaaucuagcuaugac

SEQ ID NO: 699799 - RNA, 19 nt, Homo sapiens
  misc_RNA (1)...(19): siRNA sense strand
ggaaaaggcucaggaugca

SEQ ID NO: 699800 - RNA, 19 nt, Homo sapiens
  misc_RNA (1)...(19): siRNA sense strand
gcugggaacccuccucuca

SEQ ID NO: 699801 - RNA, 19 nt, Homo sapiens
  misc_RNA (1)...(19): siRNA sense strand
aaaucuagcuaugacauca

SEQ ID NO: 699802 - RNA, 19 nt, Homo sapiens
  misc_RNA (1)...(19): siRNA sense strand
gaucgagaggccaaaucua

SEQ ID NO: 699803 - RNA, 19 nt, Homo sapiens
  misc_RNA (1)...(19): siRNA sense strand
uauccgugcuggacguaaa

SEQ ID NO: 699804 - RNA, 19 nt, Homo sapiens
  misc_RNA (1)...(19): siRNA sense strand
ucguagaugugaaugauca

SEQ ID NO: 699805 - RNA, 19 nt, Homo sapiens
  misc_RNA (1)...(19): siRNA sense strand
caauuugcuuugucuccuu

SEQ ID NO: 699806 - RNA, 19 nt, Homo sapiens
  misc_RNA (1)...(19): siRNA sense strand
gaggccaaaucuagcuaug

SEQ ID NO: 699807 - RNA, 19 nt, Homo sapiens
  misc_RNA (1)...(19): siRNA sense strand
gggagcaauucgauuagca

SEQ ID NO: 699808 - RNA, 19 nt, Homo sapiens
  misc_RNA (1)...(19): siRNA sense strand
aggcugagcuccaaugaac

SEQ ID NO: 699809 - RNA, 19 nt, Homo sapiens
  misc_RNA (1)...(19): siRNA sense strand
ggaccucaaugacaaugcu

SEQ ID NO: 699810 - RNA, 19 nt, Homo sapiens
  misc_RNA (1)...(19): siRNA sense strand
agguagagaucguagaugu

SEQ ID NO: 699811 - RNA, 19 nt, Homo sapiens
  misc_RNA (1)...(19): siRNA sense strand
gacccuaucaaguuuguug

SEQ ID NO: 699812 - RNA, 19 nt, Homo sapiens
  misc_RNA (1)...(19): siRNA sense strand
ucagaugacccuaucaagu

SEQ ID NO: 699813 - RNA, 19 nt, Homo sapiens
  misc_RNA (1)...(19): siRNA sense strand
guaacaguucgucuauuug

SEQ ID NO: 699814 - RNA, 19 nt, Homo sapiens
  misc_RNA (1)...(19): siRNA sense strand
gcuacaggauuaguguguu

SEQ ID NO: 699815 - RNA, 19 nt, Homo sapiens
  misc_RNA (1)...(19): siRNA sense strand
cuggagaggugaaccaaag

SEQ ID NO: 699816 - RNA, 19 nt, Homo sapiens
  misc_RNA (1)...(19): siRNA sense strand
ccagaucccagccuguuug

SEQ ID NO: 699817 - RNA, 19 nt, Homo sapiens
  misc_RNA (1)...(19): siRNA sense strand
gcuacucgauccuuugacu

SEQ ID NO: 699818 - RNA, 19 nt, Homo sapiens
  misc_RNA (1)...(19): siRNA sense strand
ucacaugagguguuuguuc

SEQ ID NO: 699819 - RNA, 19 nt, Homo sapiens
  misc_RNA (1)...(19): siRNA sense strand
uaaaugacaaugccccuua

SEQ ID NO: 699820 - RNA, 19 nt, Homo sapiens
  misc_RNA (1)...(19): siRNA sense strand
gauccagacucagggucaa

SEQ ID NO: 699821 - RNA, 19 nt, Homo sapiens
  misc_RNA (1)...(19): siRNA sense strand
cauggucacugcuucugau

SEQ ID NO: 699822 - RNA, 19 nt, Homo sapiens
  misc_RNA (1)...(19): siRNA sense strand
gagaagcuggacagaaauc

SEQ ID NO: 699823 - RNA, 19 nt, Homo sapiens
  misc_RNA (1)...(19): siRNA sense strand
ugucccagaucuucgagaa

SEQ ID NO: 699824 - RNA, 19 nt, Homo sapiens
  misc_RNA (1)...(19): siRNA sense strand
augcuuggguuuccuauca

SEQ ID NO: 699825 - RNA, 19 nt, Homo sapiens
  misc_RNA (1)...(19): siRNA sense strand
ucaagucugccuucaggaa

SEQ ID NO: 699826 - RNA, 19 nt, Homo sapiens
  misc_RNA (1)...(19): siRNA sense strand
ggugcugacugcugucgau

SEQ ID NO: 699827 - RNA, 19 nt, Homo sapiens
  misc_RNA (1)...(19): siRNA sense strand
gugccugucucaccagauc

SEQ ID NO: 699828 - RNA, 19 nt, Homo sapiens
  misc_RNA (1)...(19): siRNA sense strand
ucaugcuacucgauccuuu

SEQ ID NO: 699829 - RNA, 19 nt, Homo sapiens
  misc_RNA (1)...(19): siRNA sense strand
aauccacccucuuucuuuc

SEQ ID NO: 699830 - RNA, 19 nt, Homo sapiens
  misc_RNA (1)...(19): siRNA sense strand
ggucacugcuucugaugcu

SEQ ID NO: 699831 - RNA, 19 nt, Homo sapiens
  misc_RNA (1)...(19): siRNA sense strand
uggaucugcuggacguaaa

SEQ ID NO: 699832 - RNA, 19 nt, Homo sapiens
  misc_RNA (1)...(19): siRNA sense strand
ucccagaucuucgagaauc

SEQ ID NO: 699833 - RNA, 19 nt, Homo sapiens
  misc_RNA (1)...(19): siRNA sense strand
ggucacaugagguguuugu

SEQ ID NO: 699834 - RNA, 19 nt, Homo sapiens
  misc_RNA (1)...(19): siRNA sense strand
cucaauauuucagauguga

SEQ ID NO: 699835 - RNA, 19 nt, Homo sapiens
  misc_RNA (1)...(19): siRNA sense strand
gggaacccuccucucagua

SEQ ID NO: 699836 - RNA, 19 nt, Homo sapiens
  misc_RNA (1)...(19): siRNA sense strand
ucguggcacuacucucuaa

SEQ ID NO: 699837 - RNA, 19 nt, Homo sapiens
  misc_RNA (1)...(19): siRNA sense strand
gguaguccaccacucucua

SEQ ID NO: 699838 - RNA, 19 nt, Homo sapiens
  misc_RNA (1)...(19): siRNA sense strand
ggugagaagcuggacagaa

SEQ ID NO: 699839 - RNA, 19 nt, Homo sapiens
  misc_RNA (1)...(19): siRNA sense strand
cccuagacuuugagaguga

SEQ ID NO: 699840 - RNA, 19 nt, Homo sapiens
  misc_RNA (1)...(19): siRNA sense strand
caagcugcccacccucuga

SEQ ID NO: 699841 - RNA, 19 nt, Homo sapiens
  misc_RNA (1)...(19): siRNA sense strand
uaccucuguuacucucuua

SEQ ID NO: 699842 - RNA, 19 nt, Homo sapiens
  misc_RNA (1)...(19): siRNA sense strand
gcugaccucccaccacaga

SEQ ID NO: 699843 - RNA, 19 nt, Homo sapiens
  misc_RNA (1)...(19): siRNA sense strand
uguuugcagucucucgaua

SEQ ID NO: 699844 - RNA, 19 nt, Homo sapiens
  misc_RNA (1)...(19): siRNA sense strand
ggaacccuccucucaguac

SEQ ID NO: 699845 - RNA, 19 nt, Homo sapiens
  misc_RNA (1)...(19): siRNA sense strand
gagaggccaaaucuagcua

SEQ ID NO: 699846 - RNA, 19 nt, Homo sapiens
  misc_RNA (1)...(19): siRNA sense strand
guucagaccuuacccuuua

SEQ ID NO: 699847 - RNA, 19 nt, Homo sapiens
  misc_RNA (1)...(19): siRNA sense strand
ugacaacucuccuagcuuu

SEQ ID NO: 699848 - RNA, 19 nt, Homo sapiens
  misc_RNA (1)...(19): siRNA sense strand
gaccugccauuucagauua

SEQ ID NO: 699849 - RNA, 19 nt, Homo sapiens
  misc_RNA (1)...(19): siRNA sense strand
gcuaauccguguagaggua

SEQ ID NO: 699850 - RNA, 19 nt, Homo sapiens
  misc_RNA (1)...(19): siRNA sense strand
ggaccacccuuaucucugu

SEQ ID NO: 699851 - RNA, 19 nt, Homo sapiens
  misc_RNA (1)...(19): siRNA sense strand
ggagucacguuucuaugaa

SEQ ID NO: 699852 - RNA, 19 nt, Homo sapiens
  misc_RNA (1)...(19): siRNA sense strand
gaagugagccuugauaucu

SEQ ID NO: 699853 - RNA, 19 nt, Homo sapiens
  misc_RNA (1)...(19): siRNA sense strand
uuacacugcuuacauccua

SEQ ID NO: 699854 - RNA, 19 nt, Homo sapiens
  misc_RNA (1)...(19): siRNA sense strand
ggacucagguagaaauggu

SEQ ID NO: 699855 - RNA, 19 nt, Homo sapiens
  misc_RNA (1)...(19): siRNA sense strand
gacaucagcuggugcuuac

SEQ ID NO: 699856 - RNA, 19 nt, Homo sapiens
  misc_RNA (1)...(19): siRNA sense strand
caacuagacuauucuuuug

SEQ ID NO: 699857 - RNA, 19 nt, Homo sapiens
  misc_RNA (1)...(19): siRNA sense strand
gaggccacaucccacuaua

SEQ ID NO: 699858 - RNA, 19 nt, Homo sapiens
  misc_RNA (1)...(19): siRNA sense strand
gaccgggacucagguagaa

SEQ ID NO: 699859 - RNA, 19 nt, Homo sapiens
  misc_RNA (1)...(19): siRNA sense strand
gaggauggacggaucuuug

SEQ ID NO: 699860 - RNA, 19 nt, Homo sapiens
  misc_RNA (1)...(19): siRNA sense strand
ccaucaggcucaacauuuc

SEQ ID NO: 699861 - RNA, 19 nt, Homo sapiens
  misc_RNA (1)...(19): siRNA sense strand
ccacagugcugcugguucu

SEQ ID NO: 699862 - RNA, 19 nt, Homo sapiens
  misc_RNA (1)...(19): siRNA sense strand
ccacuucucucugaaugug

SEQ ID NO: 699863 - RNA, 19 nt, Homo sapiens
  misc_RNA (1)...(19): siRNA sense strand
ugacuucacuuuucuaaga

SEQ ID NO: 699864 - RNA, 19 nt, Homo sapiens
  misc_RNA (1)...(19): siRNA sense strand
cagcguaccuuugacuaug

SEQ ID NO: 699865 - RNA, 19 nt, Homo sapiens
  misc_RNA (1)...(19): siRNA sense strand
caagugcugugcauguugu

SEQ ID NO: 699866 - RNA, 19 nt, Homo sapiens
  misc_RNA (1)...(19): siRNA sense strand
gcaccaauacugugagcuu

SEQ ID NO: 699867 - RNA, 19 nt, Homo sapiens
  misc_RNA (1)...(19): siRNA sense strand
ggagggccacugugugauu

SEQ ID NO: 699868 - RNA, 19 nt, Homo sapiens
  misc_RNA (1)...(19): siRNA sense strand
gggccuuacuggaggauga

SEQ ID NO: 699869 - RNA, 19 nt, Homo sapiens
  misc_RNA (1)...(19): siRNA sense strand
ggugaagugagccuugaua

SEQ ID NO: 699870 - RNA, 19 nt, Homo sapiens
  misc_RNA (1)...(19): siRNA sense strand
gcuuuacacugcuuacauc

SEQ ID NO: 699871 - RNA, 19 nt, Homo sapiens
  misc_RNA (1)...(19): siRNA sense strand
ccaauacugugagcuuuua

SEQ ID NO: 699872 - RNA, 19 nt, Homo sapiens
  misc_RNA (1)...(19): siRNA sense strand
cuagucaccuucaccuuuc

SEQ ID NO: 699873 - RNA, 19 nt, Homo sapiens
  misc_RNA (1)...(19): siRNA sense strand
ugaggacccugaggaaaug

SEQ ID NO: 699874 - RNA, 19 nt, Homo sapiens
  misc_RNA (1)...(19): siRNA sense strand
gcacuguggcugccucaga

SEQ ID NO: 699875 - RNA, 19 nt, Homo sapiens
  misc_RNA (1)...(19): siRNA sense strand
acaaacaucucaccaucag

SEQ ID NO: 699876 - RNA, 19 nt, Homo sapiens
  misc_RNA (1)...(19): siRNA sense strand
gaauguugcucaggaucug

SEQ ID NO: 699877 - RNA, 19 nt, Homo sapiens
  misc_RNA (1)...(19): siRNA sense strand
ggcaagugcugugcauguu

SEQ ID NO: 699878 - RNA, 19 nt, Homo sapiens
  misc_RNA (1)...(19): siRNA sense strand
gaaccucuuuggccuagac

SEQ ID NO: 699879 - RNA, 19 nt, Homo sapiens
  misc_RNA (1)...(19): siRNA sense strand
ccagugacuuccucauaca

SEQ ID NO: 699880 - RNA, 19 nt, Homo sapiens
  misc_RNA (1)...(19): siRNA sense strand
gcccaaauccagugacuuc

SEQ ID NO: 699881 - RNA, 19 nt, Homo sapiens
  misc_RNA (1)...(19): siRNA sense strand
guagugggguuguuuaaug

SEQ ID NO: 699882 - RNA, 19 nt, Homo sapiens
  misc_RNA (1)...(19): siRNA sense strand
caccaauacugugagcuuu

SEQ ID NO: 699883 - RNA, 19 nt, Homo sapiens
  misc_RNA (1)...(19): siRNA sense strand
gcaagugcugugcauguug

SEQ ID NO: 699884 - RNA, 19 nt, Homo sapiens
  misc_RNA (1)...(19): siRNA sense strand
ugucugggcagcuucguua

SEQ ID NO: 699885 - RNA, 19 nt, Homo sapiens
  misc_RNA (1)...(19): siRNA sense strand
ggaugaggacccugaggaa

SEQ ID NO: 699886 - RNA, 19 nt, Homo sapiens
  misc_RNA (1)...(19): siRNA sense strand
gaaccacuacucgcugcua

SEQ ID NO: 699887 - RNA, 19 nt, Homo sapiens
  misc_RNA (1)...(19): siRNA sense strand
ccuagucaccuucaccuuu

SEQ ID NO: 699888 - RNA, 19 nt, Homo sapiens
  misc_RNA (1)...(19): siRNA sense strand
gaugaggacccugaggaaa

SEQ ID NO: 699889 - RNA, 19 nt, Homo sapiens
  misc_RNA (1)...(19): siRNA sense strand
agacaucagcuggugcuua

SEQ ID NO: 699890 - RNA, 19 nt, Homo sapiens
  misc_RNA (1)...(19): siRNA sense strand
ggacggcacgcucaaguac

SEQ ID NO: 699891 - RNA, 19 nt, Homo sapiens
  misc_RNA (1)...(19): siRNA sense strand
cugaggaaaugcccaaauc

SEQ ID NO: 699892 - RNA, 19 nt, Homo sapiens
  misc_RNA (1)...(19): siRNA sense strand
gcacaccagugggcacagu

SEQ ID NO: 699893 - RNA, 19 nt, Homo sapiens
  misc_RNA (1)...(19): siRNA sense strand
gaugugggcaccaauacug

SEQ ID NO: 699894 - RNA, 19 nt, Homo sapiens
  misc_RNA (1)...(19): siRNA sense strand
gcuucaaccagcagcuuua

SEQ ID NO: 699895 - RNA, 19 nt, Homo sapiens
  misc_RNA (1)...(19): siRNA sense strand
caccuucccuacacaaaca

SEQ ID NO: 699896 - RNA, 19 nt, Homo sapiens
  misc_RNA (1)...(19): siRNA sense strand
ggaucucaaugacaacucu

SEQ ID NO: 699897 - RNA, 19 nt, Homo sapiens
  misc_RNA (1)...(19): siRNA sense strand
gagggccacugugugauuc

SEQ ID NO: 699898 - RNA, 19 nt, Homo sapiens
  misc_RNA (1)...(19): siRNA sense strand
ggaggccacaucccacuau

SEQ ID NO: 699899 - RNA, 19 nt, Homo sapiens
  misc_RNA (1)...(19): siRNA sense strand
aacagccacuucucucuga

SEQ ID NO: 699900 - RNA, 19 nt, Homo sapiens
  misc_RNA (1)...(19): siRNA sense strand
ccacaucccacuauaucau

SEQ ID NO: 699901 - RNA, 19 nt, Homo sapiens
  misc_RNA (1)...(19): siRNA sense strand
ggccacaucccacuauauc

SEQ ID NO: 699902 - RNA, 19 nt, Homo sapiens
  misc_RNA (1)...(19): siRNA sense strand
ccaacuagacuauucuuuu

SEQ ID NO: 699903 - RNA, 19 nt, Homo sapiens
  misc_RNA (1)...(19): siRNA sense strand
gaggagaaugggcgcuauu

SEQ ID NO: 699904 - RNA, 19 nt, Homo sapiens
  misc_RNA (1)...(19): siRNA sense strand
ggacuguuccucgugucua

SEQ ID NO: 699905 - RNA, 19 nt, Homo sapiens
  misc_RNA (1)...(19): siRNA sense strand
cucaggaucugggcuuaaa

SEQ ID NO: 699906 - RNA, 19 nt, Homo sapiens
  misc_RNA (1)...(19): siRNA sense strand
gaggaaaugcccaaaucca

SEQ ID NO: 699907 - RNA, 19 nt, Homo sapiens
  misc_RNA (1)...(19): siRNA sense strand
cgccucaccuacuccauug

SEQ ID NO: 699908 - RNA, 19 nt, Homo sapiens
  misc_RNA (1)...(19): siRNA sense strand
ugaggagucacguuucuau

SEQ ID NO: 699909 - RNA, 19 nt, Homo sapiens
  misc_RNA (1)...(19): siRNA sense strand
uaccuuugacuaugaauug

SEQ ID NO: 699910 - RNA, 19 nt, Homo sapiens
  misc_RNA (1)...(19): siRNA sense strand
gaccgucagucucuuaucc

SEQ ID NO: 699911 - RNA, 19 nt, Homo sapiens
  misc_RNA (1)...(19): siRNA sense strand
aaugacaacucuccuagcu

SEQ ID NO: 699912 - RNA, 19 nt, Homo sapiens
  misc_RNA (1)...(19): siRNA sense strand
gcucuccuacucacuguug

SEQ ID NO: 699913 - RNA, 19 nt, Homo sapiens
  misc_RNA (1)...(19): siRNA sense strand
ggaauguugcucaggaucu

SEQ ID NO: 699914 - RNA, 19 nt, Homo sapiens
  misc_RNA (1)...(19): siRNA sense strand
aaccacuacucgcugcuaa

SEQ ID NO: 699915 - RNA, 19 nt, Homo sapiens
  misc_RNA (1)...(19): siRNA sense strand
agguagaaauggugaagug

SEQ ID NO: 699916 - RNA, 19 nt, Homo sapiens
  misc_RNA (1)...(19): siRNA sense strand
gcagugcggaaccucuuug

SEQ ID NO: 699917 - RNA, 19 nt, Homo sapiens
  misc_RNA (1)...(19): siRNA sense strand
gcuccaaccuuccaauccu

SEQ ID NO: 699918 - RNA, 19 nt, Homo sapiens
  misc_RNA (1)...(19): siRNA sense strand
ccucaccuacuccauugua

SEQ ID NO: 699919 - RNA, 19 nt, Homo sapiens
  misc_RNA (1)...(19): siRNA sense strand
caccuucaccuuucuguca

SEQ ID NO: 699920 - RNA, 19 nt, Homo sapiens
  misc_RNA (1)...(19): siRNA sense strand
gcauguguuuguccuagac

SEQ ID NO: 699921 - RNA, 19 nt, Homo sapiens
  misc_RNA (1)...(19): siRNA sense strand
gcguaccuuugacuaugaa

SEQ ID NO: 699922 - RNA, 19 nt, Homo sapiens
  misc_RNA (1)...(19): siRNA sense strand
aggagucacguuucuauga

SEQ ID NO: 699923 - RNA, 19 nt, Homo sapiens
  misc_RNA (1)...(19): siRNA sense strand
caggaucugggcuuaaaga

SEQ ID NO: 699924 - RNA, 19 nt, Homo sapiens
  misc_RNA (1)...(19): siRNA sense strand
guccuagacgagaaugaua

SEQ ID NO: 699925 - RNA, 19 nt, Homo sapiens
  misc_RNA (1)...(19): siRNA sense strand
gugaagugagccuugauau

SEQ ID NO: 699926 - RNA, 19 nt, Homo sapiens
  misc_RNA (1)...(19): siRNA sense strand
gugaagacccuaaaagaug

SEQ ID NO: 699927 - RNA, 19 nt, Homo sapiens
  misc_RNA (1)...(19): siRNA sense strand
guaccuuugacuaugaauu

SEQ ID NO: 699928 - RNA, 19 nt, Homo sapiens
  misc_RNA (1)...(19): siRNA sense strand
ugaagugagccuugauauc

SEQ ID NO: 699929 - RNA, 19 nt, Homo sapiens
  misc_RNA (1)...(19): siRNA sense strand
cuuccaauccucaguucua

SEQ ID NO: 699930 - RNA, 19 nt, Homo sapiens
  misc_RNA (1)...(19): siRNA sense strand
ugaaugugaagacccuaaa

SEQ ID NO: 699931 - RNA, 19 nt, Homo sapiens
  misc_RNA (1)...(19): siRNA sense strand
gguagaaauggugaaguga

SEQ ID NO: 699932 - RNA, 19 nt, Homo sapiens
  misc_RNA (1)...(19): siRNA sense strand
ggagaaugggcgcuauuuu

SEQ ID NO: 699933 - RNA, 19 nt, Homo sapiens
  misc_RNA (1)...(19): siRNA sense strand
caaggugacagccguggau

SEQ ID NO: 699934 - RNA, 19 nt, Homo sapiens
  misc_RNA (1)...(19): siRNA sense strand
ugaccgagaaagccuaugu

SEQ ID NO: 699935 - RNA, 19 nt, Homo sapiens
  misc_RNA (1)...(19): siRNA sense strand
caccaucaggcucaacauu

SEQ ID NO: 699936 - RNA, 19 nt, Homo sapiens
  misc_RNA (1)...(19): siRNA sense strand
gccacugugugauucaagu

SEQ ID NO: 699937 - RNA, 19 nt, Homo sapiens
  misc_RNA (1)...(19): siRNA sense strand
gcucaggaucugggcuuaa

SEQ ID NO: 699938 - RNA, 19 nt, Homo sapiens
  misc_RNA (1)...(19): siRNA sense strand
gaggagucacguuucuaug

SEQ ID NO: 699939 - RNA, 19 nt, Homo sapiens
  misc_RNA (1)...(19): siRNA sense strand
ccggaugugggcaccaaua

SEQ ID NO: 699940 - RNA, 19 nt, Homo sapiens
  misc_RNA (1)...(19): siRNA sense strand
uccagugacuuccucauac

SEQ ID NO: 699941 - RNA, 19 nt, Homo sapiens
  misc_RNA (1)...(19): siRNA sense strand
acuaugaauugcugcagau

SEQ ID NO: 699942 - RNA, 19 nt, Homo sapiens
  misc_RNA (1)...(19): siRNA sense strand
ccuccuccuuuguguaugu

SEQ ID NO: 699943 - RNA, 19 nt, Homo sapiens
  misc_RNA (1)...(19): siRNA sense strand
cacuguggcugccucagau

SEQ ID NO: 699944 - RNA, 19 nt, Homo sapiens
  misc_RNA (1)...(19): siRNA sense strand
ggagcuaauccguguagag

SEQ ID NO: 699945 - RNA, 19 nt, Homo sapiens
  misc_RNA (1)...(19): siRNA sense strand
ucaucgugcuggacaucaa

SEQ ID NO: 699946 - RNA, 19 nt, Homo sapiens
  misc_RNA (1)...(19): siRNA sense strand
guucagaccuuacccuuua

SEQ ID NO: 699947 - RNA, 19 nt, Homo sapiens
  misc_RNA (1)...(19): siRNA sense strand
ugacaacucuccuagcuuu

SEQ ID NO: 699948 - RNA, 19 nt, Homo sapiens
  misc_RNA (1)...(19): siRNA sense strand
gaccugccauuucagauua

SEQ ID NO: 699949 - RNA, 19 nt, Homo sapiens
  misc_RNA (1)...(19): siRNA sense strand
gcuaauccguguagaggua

SEQ ID NO: 699950 - RNA, 19 nt, Homo sapiens
  misc_RNA (1)...(19): siRNA sense strand
ggaccacccuuaucucugu

SEQ ID NO: 699951 - RNA, 19 nt, Homo sapiens
  misc_RNA (1)...(19): siRNA sense strand
ggagucacguuucuaugaa

SEQ ID NO: 699952 - RNA, 19 nt, Homo sapiens
  misc_RNA (1)...(19): siRNA sense strand
gaagugagccuugauaucu

SEQ ID NO: 699953 - RNA, 19 nt, Homo sapiens
  misc_RNA (1)...(19): siRNA sense strand
uuacacugcuuacauccua

SEQ ID NO: 699954 - RNA, 19 nt, Homo sapiens
  misc_RNA (1)...(19): siRNA sense strand
ggacucagguagaaauggu

SEQ ID NO: 699955 - RNA, 19 nt, Homo sapiens
  misc_RNA (1)...(19): siRNA sense strand
gacaucagcuggugcuuac

SEQ ID NO: 699956 - RNA, 19 nt, Homo sapiens
  misc_RNA (1)...(19): siRNA sense strand
caacuagacuauucuuuug

SEQ ID NO: 699957 - RNA, 19 nt, Homo sapiens
  misc_RNA (1)...(19): siRNA sense strand
gaggccacaucccacuaua

SEQ ID NO: 699958 - RNA, 19 nt, Homo sapiens
  misc_RNA (1)...(19): siRNA sense strand
gaccgggacucagguagaa

SEQ ID NO: 699959 - RNA, 19 nt, Homo sapiens
  misc_RNA (1)...(19): siRNA sense strand
gaggauggacggaucuuug

SEQ ID NO: 699960 - RNA, 19 nt, Homo sapiens
  misc_RNA (1)...(19): siRNA sense strand
ccaucaggcucaacauuuc

SEQ ID NO: 699961 - RNA, 19 nt, Homo sapiens
  misc_RNA (1)...(19): siRNA sense strand
ccacagugcugcugguucu

SEQ ID NO: 699962 - RNA, 19 nt, Homo sapiens
  misc_RNA (1)...(19): siRNA sense strand
ccacuucucucugaaugug

SEQ ID NO: 699963 - RNA, 19 nt, Homo sapiens
  misc_RNA (1)...(19): siRNA sense strand
ugacuucacuuuucuaaga

SEQ ID NO: 699964 - RNA, 19 nt, Homo sapiens
  misc_RNA (1)...(19): siRNA sense strand
cagcguaccuuugacuaug

SEQ ID NO: 699965 - RNA, 19 nt, Homo sapiens
  misc_RNA (1)...(19): siRNA sense strand
caagugcugugcauguugu

SEQ ID NO: 699966 - RNA, 19 nt, Homo sapiens
  misc_RNA (1)...(19): siRNA sense strand
gcaccaauacugugagcuu

SEQ ID NO: 699967 - RNA, 19 nt, Homo sapiens
  misc_RNA (1)...(19): siRNA sense strand
ggagggccacugugugauu

SEQ ID NO: 699968 - RNA, 19 nt, Homo sapiens
  misc_RNA (1)...(19): siRNA sense strand
gggccuuacuggaggauga

SEQ ID NO: 699969 - RNA, 19 nt, Homo sapiens
  misc_RNA (1)...(19): siRNA sense strand
ggugaagugagccuugaua

SEQ ID NO: 699970 - RNA, 19 nt, Homo sapiens
  misc_RNA (1)...(19): siRNA sense strand
gcuuuacacugcuuacauc

SEQ ID NO: 699971 - RNA, 19 nt, Homo sapiens
  misc_RNA (1)...(19): siRNA sense strand
ccaauacugugagcuuuua

SEQ ID NO: 699972 - RNA, 19 nt, Homo sapiens
  misc_RNA (1)...(19): siRNA sense strand
cuagucaccuucaccuuuc

SEQ ID NO: 699973 - RNA, 19 nt, Homo sapiens
  misc_RNA (1)...(19): siRNA sense strand
ugaggacccugaggaaaug

SEQ ID NO: 699974 - RNA, 19 nt, Homo sapiens
  misc_RNA (1)...(19): siRNA sense strand
gcacuguggcugccucaga

SEQ ID NO: 699975 - RNA, 19 nt, Homo sapiens
  misc_RNA (1)...(19): siRNA sense strand
acaaacaucucaccaucag

SEQ ID NO: 699976 - RNA, 19 nt, Homo sapiens
  misc_RNA (1)...(19): siRNA sense strand
gaauguugcucaggaucug

SEQ ID NO: 699977 - RNA, 19 nt, Homo sapiens
  misc_RNA (1)...(19): siRNA sense strand
ggcaagugcugugcauguu

SEQ ID NO: 699978 - RNA, 19 nt, Homo sapiens
  misc_RNA (1)...(19): siRNA sense strand
gaaccucuuuggccuagac

SEQ ID NO: 699979 - RNA, 19 nt, Homo sapiens
  misc_RNA (1)...(19): siRNA sense strand
ccagugacuuccucauaca

SEQ ID NO: 699980 - RNA, 19 nt, Homo sapiens
  misc_RNA (1)...(19): siRNA sense strand
gcccaaauccagugacuuc

SEQ ID NO: 699981 - RNA, 19 nt, Homo sapiens
  misc_RNA (1)...(19): siRNA sense strand
guagugggguuguuuaaug

SEQ ID NO: 699982 - RNA, 19 nt, Homo sapiens
  misc_RNA (1)...(19): siRNA sense strand
caccaauacugugagcuuu

SEQ ID NO: 699983 - RNA, 19 nt, Homo sapiens
  misc_RNA (1)...(19): siRNA sense strand
gcaagugcugugcauguug

SEQ ID NO: 699984 - RNA, 19 nt, Homo sapiens
  misc_RNA (1)...(19): siRNA sense strand
ugucugggcagcuucguua

SEQ ID NO: 699985 - RNA, 19 nt, Homo sapiens
  misc_RNA (1)...(19): siRNA sense strand
ggaugaggacccugaggaa

SEQ ID NO: 699986 - RNA, 19 nt, Homo sapiens
  misc_RNA (1)...(19): siRNA sense strand
gaaccacuacucgcugcua

SEQ ID NO: 699987 - RNA, 19 nt, Homo sapiens
  misc_RNA (1)...(19): siRNA sense strand
ccuagucaccuucaccuuu

SEQ ID NO: 699988 - RNA, 19 nt, Homo sapiens
  misc_RNA (1)...(19): siRNA sense strand
gaugaggacccugaggaaa

SEQ ID NO: 699989 - RNA, 19 nt, Homo sapiens
  misc_RNA (1)...(19): siRNA sense strand
agacaucagcuggugcuua

SEQ ID NO: 699990 - RNA, 19 nt, Homo sapiens
  misc_RNA (1)...(19): siRNA sense strand
ggacggcacgcucaaguac

SEQ ID NO: 699991 - RNA, 19 nt, Homo sapiens
  misc_RNA (1)...(19): siRNA sense strand
cugaggaaaugcccaaauc

SEQ ID NO: 699992 - RNA, 19 nt, Homo sapiens
  misc_RNA (1)...(19): siRNA sense strand
gcacaccagugggcacagu

SEQ ID NO: 699993 - RNA, 19 nt, Homo sapiens
  misc_RNA (1)...(19): siRNA sense strand
gaugugggcaccaauacug

SEQ ID NO: 699994 - RNA, 19 nt, Homo sapiens
  misc_RNA (1)...(19): siRNA sense strand
gcuucaaccagcagcuuua

SEQ ID NO: 699995 - RNA, 19 nt, Homo sapiens
  misc_RNA (1)...(19): siRNA sense strand
caccuucccuacacaaaca

SEQ ID NO: 699996 - RNA, 19 nt, Homo sapiens
  misc_RNA (1)...(19): siRNA sense strand
ggaucucaaugacaacucu

SEQ ID NO: 699997 - RNA, 19 nt, Homo sapiens
  misc_RNA (1)...(19): siRNA sense strand
gagggccacugugugauuc

SEQ ID NO: 699998 - RNA, 19 nt, Homo sapiens
  misc_RNA (1)...(19): siRNA sense strand
ggaggccacaucccacuau

SEQ ID NO: 699999 - RNA, 19 nt, Homo sapiens
  misc_RNA (1)...(19): siRNA sense strand
aacagccacuucucucuga

SEQ ID NO: 700000 - RNA, 19 nt, Homo sapiens
  misc_RNA (1)...(19): siRNA sense strand
ccacaucccacuauaucau

SEQ ID NO: 700001 - RNA, 19 nt, Homo sapiens
  misc_RNA (1)...(19): siRNA sense strand
ggccacaucccacuauauc

SEQ ID NO: 700002 - RNA, 19 nt, Homo sapiens
  misc_RNA (1)...(19): siRNA sense strand
ccaacuagacuauucuuuu

SEQ ID NO: 700003 - RNA, 19 nt, Homo sapiens
  misc_RNA (1)...(19): siRNA sense strand
gaggagaaugggcgcuauu

SEQ ID NO: 700004 - RNA, 19 nt, Homo sapiens
  misc_RNA (1)...(19): siRNA sense strand
ggacuguuccucgugucua

SEQ ID NO: 700005 - RNA, 19 nt, Homo sapiens
  misc_RNA (1)...(19): siRNA sense strand
cucaggaucugggcuuaaa

SEQ ID NO: 700006 - RNA, 19 nt, Homo sapiens
  misc_RNA (1)...(19): siRNA sense strand
gaggaaaugcccaaaucca

SEQ ID NO: 700007 - RNA, 19 nt, Homo sapiens
  misc_RNA (1)...(19): siRNA sense strand
cgccucaccuacuccauug

SEQ ID NO: 700008 - RNA, 19 nt, Homo sapiens
  misc_RNA (1)...(19): siRNA sense strand
ugaggagucacguuucuau

SEQ ID NO: 700009 - RNA, 19 nt, Homo sapiens
  misc_RNA (1)...(19): siRNA sense strand
uaccuuugacuaugaauug

SEQ ID NO: 700010 - RNA, 19 nt, Homo sapiens
  misc_RNA (1)...(19): siRNA sense strand
gaccgucagucucuuaucc

SEQ ID NO: 700011 - RNA, 19 nt, Homo sapiens
  misc_RNA (1)...(19): siRNA sense strand
aaugacaacucuccuagcu

SEQ ID NO: 700012 - RNA, 19 nt, Homo sapiens
  misc_RNA (1)...(19): siRNA sense strand
gcucuccuacucacuguug

SEQ ID NO: 700013 - RNA, 19 nt, Homo sapiens
  misc_RNA (1)...(19): siRNA sense strand
ggaauguugcucaggaucu

SEQ ID NO: 700014 - RNA, 19 nt, Homo sapiens
  misc_RNA (1)...(19): siRNA sense strand
aaccacuacucgcugcuaa

SEQ ID NO: 700015 - RNA, 19 nt, Homo sapiens
  misc_RNA (1)...(19): siRNA sense strand
agguagaaauggugaagug

SEQ ID NO: 700016 - RNA, 19 nt, Homo sapiens
  misc_RNA (1)...(19): siRNA sense strand
gcagugcggaaccucuuug

SEQ ID NO: 700017 - RNA, 19 nt, Homo sapiens
  misc_RNA (1)...(19): siRNA sense strand
gcuccaaccuuccaauccu

SEQ ID NO: 700018 - RNA, 19 nt, Homo sapiens
  misc_RNA (1)...(19): siRNA sense strand
ccucaccuacuccauugua

SEQ ID NO: 700019 - RNA, 19 nt, Homo sapiens
  misc_RNA (1)...(19): siRNA sense strand
caccuucaccuuucuguca

SEQ ID NO: 700020 - RNA, 19 nt, Homo sapiens
  misc_RNA (1)...(19): siRNA sense strand
gcauguguuuguccuagac

SEQ ID NO: 700021 - RNA, 19 nt, Homo sapiens
  misc_RNA (1)...(19): siRNA sense strand
gcguaccuuugacuaugaa

SEQ ID NO: 700022 - RNA, 19 nt, Homo sapiens
  misc_RNA (1)...(19): siRNA sense strand
aggagucacguuucuauga

SEQ ID NO: 700023 - RNA, 19 nt, Homo sapiens
  misc_RNA (1)...(19): siRNA sense strand
caggaucugggcuuaaaga

SEQ ID NO: 700024 - RNA, 19 nt, Homo sapiens
  misc_RNA (1)...(19): siRNA sense strand
guccuagacgagaaugaua

SEQ ID NO: 700025 - RNA, 19 nt, Homo sapiens
  misc_RNA (1)...(19): siRNA sense strand
gugaagugagccuugauau

SEQ ID NO: 700026 - RNA, 19 nt, Homo sapiens
  misc_RNA (1)...(19): siRNA sense strand
gugaagacccuaaaagaug

SEQ ID NO: 700027 - RNA, 19 nt, Homo sapiens
  misc_RNA (1)...(19): siRNA sense strand
guaccuuugacuaugaauu

SEQ ID NO: 700028 - RNA, 19 nt, Homo sapiens
  misc_RNA (1)...(19): siRNA sense strand
ugaagugagccuugauauc

SEQ ID NO: 700029 - RNA, 19 nt, Homo sapiens
  misc_RNA (1)...(19): siRNA sense strand
cuuccaauccucaguucua

SEQ ID NO: 700030 - RNA, 19 nt, Homo sapiens
  misc_RNA (1)...(19): siRNA sense strand
ugaaugugaagacccuaaa

SEQ ID NO: 700031 - RNA, 19 nt, Homo sapiens
  misc_RNA (1)...(19): siRNA sense strand
gguagaaauggugaaguga

SEQ ID NO: 700032 - RNA, 19 nt, Homo sapiens
  misc_RNA (1)...(19): siRNA sense strand
ggagaaugggcgcuauuuu

SEQ ID NO: 700033 - RNA, 19 nt, Homo sapiens
  misc_RNA (1)...(19): siRNA sense strand
caaggugacagccguggau

SEQ ID NO: 700034 - RNA, 19 nt, Homo sapiens
  misc_RNA (1)...(19): siRNA sense strand
ugaccgagaaagccuaugu

SEQ ID NO: 700035 - RNA, 19 nt, Homo sapiens
  misc_RNA (1)...(19): siRNA sense strand
caccaucaggcucaacauu

SEQ ID NO: 700036 - RNA, 19 nt, Homo sapiens
  misc_RNA (1)...(19): siRNA sense strand
gccacugugugauucaagu

SEQ ID NO: 700037 - RNA, 19 nt, Homo sapiens
  misc_RNA (1)...(19): siRNA sense strand
gcucaggaucugggcuuaa

SEQ ID NO: 700038 - RNA, 19 nt, Homo sapiens
  misc_RNA (1)...(19): siRNA sense strand
gaggagucacguuucuaug

SEQ ID NO: 700039 - RNA, 19 nt, Homo sapiens
  misc_RNA (1)...(19): siRNA sense strand
ccggaugugggcaccaaua

SEQ ID NO: 700040 - RNA, 19 nt, Homo sapiens
  misc_RNA (1)...(19): siRNA sense strand
uccagugacuuccucauac

SEQ ID NO: 700041 - RNA, 19 nt, Homo sapiens
  misc_RNA (1)...(19): siRNA sense strand
acuaugaauugcugcagau

SEQ ID NO: 700042 - RNA, 19 nt, Homo sapiens
  misc_RNA (1)...(19): siRNA sense strand
ccuccuccuuuguguaugu

SEQ ID NO: 700043 - RNA, 19 nt, Homo sapiens
  misc_RNA (1)...(19): siRNA sense strand
cacuguggcugccucagau

SEQ ID NO: 700044 - RNA, 19 nt, Homo sapiens
  misc_RNA (1)...(19): siRNA sense strand
ggagcuaauccguguagag

SEQ ID NO: 700045 - RNA, 19 nt, Homo sapiens
  misc_RNA (1)...(19): siRNA sense strand
ucaucgugcuggacaucaa

SEQ ID NO: 700046 - RNA, 19 nt, Homo sapiens
  misc_RNA (1)...(19): siRNA sense strand
ccaauaagcugcacacuaa

SEQ ID NO: 700047 - RNA, 19 nt, Homo sapiens
  misc_RNA (1)...(19): siRNA sense strand
gcagacagcuugauucgua

SEQ ID NO: 700048 - RNA, 19 nt, Homo sapiens
  misc_RNA (1)...(19): siRNA sense strand
ggagauaguucgauacuuu

SEQ ID NO: 700049 - RNA, 19 nt, Homo sapiens
  misc_RNA (1)...(19): siRNA sense strand
ggaagaaacaucagaauuu

SEQ ID NO: 700050 - RNA, 19 nt, Homo sapiens
  misc_RNA (1)...(19): siRNA sense strand
gaagaaacaucagaauuug

SEQ ID NO: 700051 - RNA, 19 nt, Homo sapiens
  misc_RNA (1)...(19): siRNA sense strand
ggaaggagagagaguauua

SEQ ID NO: 700052 - RNA, 19 nt, Homo sapiens
  misc_RNA (1)...(19): siRNA sense strand
gugaagaacucaaagaauu

SEQ ID NO: 700053 - RNA, 19 nt, Homo sapiens
  misc_RNA (1)...(19): siRNA sense strand
gcacguagaucgccacgaa

SEQ ID NO: 700054 - RNA, 19 nt, Homo sapiens
  misc_RNA (1)...(19): siRNA sense strand
acagacaacucuucucuua

SEQ ID NO: 700055 - RNA, 19 nt, Homo sapiens
  misc_RNA (1)...(19): siRNA sense strand
gaagaaaacuccaaaguga

SEQ ID NO: 700056 - RNA, 19 nt, Homo sapiens
  misc_RNA (1)...(19): siRNA sense strand
ggagagagaguauuaauga

SEQ ID NO: 700057 - RNA, 19 nt, Homo sapiens
  misc_RNA (1)...(19): siRNA sense strand
gaagauaagaucaucagua

SEQ ID NO: 700058 - RNA, 19 nt, Homo sapiens
  misc_RNA (1)...(19): siRNA sense strand
gcaagaaguuuccugauag

SEQ ID NO: 700059 - RNA, 19 nt, Homo sapiens
  misc_RNA (1)...(19): siRNA sense strand
gcacagaucgaaaccauaa

SEQ ID NO: 700060 - RNA, 19 nt, Homo sapiens
  misc_RNA (1)...(19): siRNA sense strand
gaagaaaugaugaagauga

SEQ ID NO: 700061 - RNA, 19 nt, Homo sapiens
  misc_RNA (1)...(19): siRNA sense strand
caagaugaguuccuagaaa

SEQ ID NO: 700062 - RNA, 19 nt, Homo sapiens
  misc_RNA (1)...(19): siRNA sense strand
gaagguugcuugccauuca

SEQ ID NO: 700063 - RNA, 19 nt, Homo sapiens
  misc_RNA (1)...(19): siRNA sense strand
aaagagaacuccagucaga

SEQ ID NO: 700064 - RNA, 19 nt, Homo sapiens
  misc_RNA (1)...(19): siRNA sense strand
gaaaugggcuccuccaaaa

SEQ ID NO: 700065 - RNA, 19 nt, Homo sapiens
  misc_RNA (1)...(19): siRNA sense strand
ugaagaacaucuagaagaa

SEQ ID NO: 700066 - RNA, 19 nt, Homo sapiens
  misc_RNA (1)...(19): siRNA sense strand
agacacagaugacaauaaa

SEQ ID NO: 700067 - RNA, 19 nt, Homo sapiens
  misc_RNA (1)...(19): siRNA sense strand
gaacgaagagagaaagaaa

SEQ ID NO: 700068 - RNA, 19 nt, Homo sapiens
  misc_RNA (1)...(19): siRNA sense strand
gcaaaggcauccugaaugg

SEQ ID NO: 700069 - RNA, 19 nt, Homo sapiens
  misc_RNA (1)...(19): siRNA sense strand
gaaagaaaggugaggauga

SEQ ID NO: 700070 - RNA, 19 nt, Homo sapiens
  misc_RNA (1)...(19): siRNA sense strand
gaagaugaauuggugaaga

SEQ ID NO: 700071 - RNA, 19 nt, Homo sapiens
  misc_RNA (1)...(19): siRNA sense strand
gaacuauacugaagagucu

SEQ ID NO: 700072 - RNA, 19 nt, Homo sapiens
  misc_RNA (1)...(19): siRNA sense strand
gauacuggcucuucucaga

SEQ ID NO: 700073 - RNA, 19 nt, Homo sapiens
  misc_RNA (1)...(19): siRNA sense strand
ggaaguggaugaagagaag

SEQ ID NO: 700074 - RNA, 19 nt, Homo sapiens
  misc_RNA (1)...(19): siRNA sense strand
gaugcucaguauccuauua

SEQ ID NO: 700075 - RNA, 19 nt, Homo sapiens
  misc_RNA (1)...(19): siRNA sense strand
gcaggaagcgcaagaaguu

SEQ ID NO: 700076 - RNA, 19 nt, Homo sapiens
  misc_RNA (1)...(19): siRNA sense strand
guagugaucucauugaagu

SEQ ID NO: 700077 - RNA, 19 nt, Homo sapiens
  misc_RNA (1)...(19): siRNA sense strand
gaaagcaaacuuagguaaa

SEQ ID NO: 700078 - RNA, 19 nt, Homo sapiens
  misc_RNA (1)...(19): siRNA sense strand
gaaagagaaaugaaaguga

SEQ ID NO: 700079 - RNA, 19 nt, Homo sapiens
  misc_RNA (1)...(19): siRNA sense strand
ggaaaugggcuccuccaaa

SEQ ID NO: 700080 - RNA, 19 nt, Homo sapiens
  misc_RNA (1)...(19): siRNA sense strand
ggacuacuaugaugugauc

SEQ ID NO: 700081 - RNA, 19 nt, Homo sapiens
  misc_RNA (1)...(19): siRNA sense strand
gcagucagcuaacacacaa

SEQ ID NO: 700082 - RNA, 19 nt, Homo sapiens
  misc_RNA (1)...(19): siRNA sense strand
guacagagcgcccaccaaa

SEQ ID NO: 700083 - RNA, 19 nt, Homo sapiens
  misc_RNA (1)...(19): siRNA sense strand
cgcaagaaguuuccugaua

SEQ ID NO: 700084 - RNA, 19 nt, Homo sapiens
  misc_RNA (1)...(19): siRNA sense strand
ggacauuauucacucuauu

SEQ ID NO: 700085 - RNA, 19 nt, Homo sapiens
  misc_RNA (1)...(19): siRNA sense strand
aaacagaaacggaaagaaa

SEQ ID NO: 700086 - RNA, 19 nt, Homo sapiens
  misc_RNA (1)...(19): siRNA sense strand
agaugaaguuccaggauua

SEQ ID NO: 700087 - RNA, 19 nt, Homo sapiens
  misc_RNA (1)...(19): siRNA sense strand
gaaggagacaguugugaaa

SEQ ID NO: 700088 - RNA, 19 nt, Homo sapiens
  misc_RNA (1)...(19): siRNA sense strand
gcagaagugugaagagauc

SEQ ID NO: 700089 - RNA, 19 nt, Homo sapiens
  misc_RNA (1)...(19): siRNA sense strand
aagaaaugcuugagagauu

SEQ ID NO: 700090 - RNA, 19 nt, Homo sapiens
  misc_RNA (1)...(19): siRNA sense strand
cagaugacuuuguuggaua

SEQ ID NO: 700091 - RNA, 19 nt, Homo sapiens
  misc_RNA (1)...(19): siRNA sense strand
acagagcgcccaccaaaua

SEQ ID NO: 700092 - RNA, 19 nt, Homo sapiens
  misc_RNA (1)...(19): siRNA sense strand
aagaugaugucgcccaaua

SEQ ID NO: 700093 - RNA, 19 nt, Homo sapiens
  misc_RNA (1)...(19): siRNA sense strand
caucugcacuggagaaaug

SEQ ID NO: 700094 - RNA, 19 nt, Homo sapiens
  misc_RNA (1)...(19): siRNA sense strand
ugaagcagaugacuuuguu

SEQ ID NO: 700095 - RNA, 19 nt, Homo sapiens
  misc_RNA (1)...(19): siRNA sense strand
caaauaugcugugggagaa

SEQ ID NO: 700096 - RNA, 19 nt, Homo sapiens
  misc_RNA (1)...(19): siRNA sense strand
uacagaagcugaagacaug

SEQ ID NO: 700097 - RNA, 19 nt, Homo sapiens
  misc_RNA (1)...(19): siRNA sense strand
agaagacuauggugaauug

SEQ ID NO: 700098 - RNA, 19 nt, Homo sapiens
  misc_RNA (1)...(19): siRNA sense strand
gcauucagauugguggaua

SEQ ID NO: 700099 - RNA, 19 nt, Homo sapiens
  misc_RNA (1)...(19): siRNA sense strand
gaagaacaacggaaagaau

SEQ ID NO: 700100 - RNA, 19 nt, Homo sapiens
  misc_RNA (1)...(19): siRNA sense strand
auaaggagauaguucgaua

SEQ ID NO: 700101 - RNA, 19 nt, Homo sapiens
  misc_RNA (1)...(19): siRNA sense strand
agaaaugcuugagagauua

SEQ ID NO: 700102 - RNA, 19 nt, Homo sapiens
  misc_RNA (1)...(19): siRNA sense strand
gcagaugacuuuguuggau

SEQ ID NO: 700103 - RNA, 19 nt, Homo sapiens
  misc_RNA (1)...(19): siRNA sense strand
ggucguagaagaugaauug

SEQ ID NO: 700104 - RNA, 19 nt, Homo sapiens
  misc_RNA (1)...(19): siRNA sense strand
gaaagaaauggaagccaaa

SEQ ID NO: 700105 - RNA, 19 nt, Homo sapiens
  misc_RNA (1)...(19): siRNA sense strand
gaaagaaaugcuugagaga

SEQ ID NO: 700106 - RNA, 19 nt, Homo sapiens
  misc_RNA (1)...(19): siRNA sense strand
gaaggaaggagagagagua

SEQ ID NO: 700107 - RNA, 19 nt, Homo sapiens
  misc_RNA (1)...(19): siRNA sense strand
gagaugaggccgaggacua

SEQ ID NO: 700108 - RNA, 19 nt, Homo sapiens
  misc_RNA (1)...(19): siRNA sense strand
gaaaggugaggaugacaaa

SEQ ID NO: 700109 - RNA, 19 nt, Homo sapiens
  misc_RNA (1)...(19): siRNA sense strand
cagaugaaguuccaggauu

SEQ ID NO: 700110 - RNA, 19 nt, Homo sapiens
  misc_RNA (1)...(19): siRNA sense strand
guaugaggaccaagaguua

SEQ ID NO: 700111 - RNA, 19 nt, Homo sapiens
  misc_RNA (1)...(19): siRNA sense strand
gaacaucuagaagaaauga

SEQ ID NO: 700112 - RNA, 19 nt, Homo sapiens
  misc_RNA (1)...(19): siRNA sense strand
gagauaguucgauacuuua

SEQ ID NO: 700113 - RNA, 19 nt, Homo sapiens
  misc_RNA (1)...(19): siRNA sense strand
ccacugagaagaaaucuga

SEQ ID NO: 700114 - RNA, 19 nt, Homo sapiens
  misc_RNA (1)...(19): siRNA sense strand
gaucgaaaccauaauagau

SEQ ID NO: 700115 - RNA, 19 nt, Homo sapiens
  misc_RNA (1)...(19): siRNA sense strand
auaaugagguacaagauga

SEQ ID NO: 700116 - RNA, 19 nt, Homo sapiens
  misc_RNA (1)...(19): siRNA sense strand
gaacaacggaaagaauauu

SEQ ID NO: 700117 - RNA, 19 nt, Homo sapiens
  misc_RNA (1)...(19): siRNA sense strand
gaggugggcuucuaugucu

SEQ ID NO: 700118 - RNA, 19 nt, Homo sapiens
  misc_RNA (1)...(19): siRNA sense strand
gcaaagggcagaagcaaag

SEQ ID NO: 700119 - RNA, 19 nt, Homo sapiens
  misc_RNA (1)...(19): siRNA sense strand
agacaacucuucucuuagu

SEQ ID NO: 700120 - RNA, 19 nt, Homo sapiens
  misc_RNA (1)...(19): siRNA sense strand
gcagaagacuauggugaau

SEQ ID NO: 700121 - RNA, 19 nt, Homo sapiens
  misc_RNA (1)...(19): siRNA sense strand
gagcucgucucccagaaga

SEQ ID NO: 700122 - RNA, 19 nt, Homo sapiens
  misc_RNA (1)...(19): siRNA sense strand
aaaugaagcagaugacuuu

SEQ ID NO: 700123 - RNA, 19 nt, Homo sapiens
  misc_RNA (1)...(19): siRNA sense strand
gaaaugaugaagaugaugu

SEQ ID NO: 700124 - RNA, 19 nt, Homo sapiens
  misc_RNA (1)...(19): siRNA sense strand
uaacacagccuccuuagag

SEQ ID NO: 700125 - RNA, 19 nt, Homo sapiens
  misc_RNA (1)...(19): siRNA sense strand
ggaguuuccugccugguau

SEQ ID NO: 700126 - RNA, 19 nt, Homo sapiens
  misc_RNA (1)...(19): siRNA sense strand
ggaaauccaggaaagagaa

SEQ ID NO: 700127 - RNA, 19 nt, Homo sapiens
  misc_RNA (1)...(19): siRNA sense strand
gcuggagaccucugaauuu

SEQ ID NO: 700128 - RNA, 19 nt, Homo sapiens
  misc_RNA (1)...(19): siRNA sense strand
guucaccacuaaauccuaa

SEQ ID NO: 700129 - RNA, 19 nt, Homo sapiens
  misc_RNA (1)...(19): siRNA sense strand
gguacaagaugaguuccua

SEQ ID NO: 700130 - RNA, 19 nt, Homo sapiens
  misc_RNA (1)...(19): siRNA sense strand
cagcugcauuugaggauaa

SEQ ID NO: 700131 - RNA, 19 nt, Homo sapiens
  misc_RNA (1)...(19): siRNA sense strand
gacgaagacagaagaagua

SEQ ID NO: 700132 - RNA, 19 nt, Homo sapiens
  misc_RNA (1)...(19): siRNA sense strand
aaaaggagcuggaugaguu

SEQ ID NO: 700133 - RNA, 19 nt, Homo sapiens
  misc_RNA (1)...(19): siRNA sense strand
gaacacacaacauggaaca

SEQ ID NO: 700134 - RNA, 19 nt, Homo sapiens
  misc_RNA (1)...(19): siRNA sense strand
guuccaggauuauucauug

SEQ ID NO: 700135 - RNA, 19 nt, Homo sapiens
  misc_RNA (1)...(19): siRNA sense strand
gaagcugaagacaugauua

SEQ ID NO: 700136 - RNA, 19 nt, Homo sapiens
  misc_RNA (1)...(19): siRNA sense strand
acaggaagcccucaaagaa

SEQ ID NO: 700137 - RNA, 19 nt, Homo sapiens
  misc_RNA (1)...(19): siRNA sense strand
aaugcuaggugcaaaguuu

SEQ ID NO: 700138 - RNA, 19 nt, Homo sapiens
  misc_RNA (1)...(19): siRNA sense strand
ggaacggcuugcuguguug

SEQ ID NO: 700139 - RNA, 19 nt, Homo sapiens
  misc_RNA (1)...(19): siRNA sense strand
caacggaaagaauauuuga

SEQ ID NO: 700140 - RNA, 19 nt, Homo sapiens
  misc_RNA (1)...(19): siRNA sense strand
cacacuaacuuucacauuc

SEQ ID NO: 700141 - RNA, 19 nt, Homo sapiens
  misc_RNA (1)...(19): siRNA sense strand
gaagaacaucuagaagaaa

SEQ ID NO: 700142 - RNA, 19 nt, Homo sapiens
  misc_RNA (1)...(19): siRNA sense strand
caaagaaauccaagacaga

SEQ ID NO: 700143 - RNA, 19 nt, Homo sapiens
  misc_RNA (1)...(19): siRNA sense strand
ggaaagagaaaugaaagug

SEQ ID NO: 700144 - RNA, 19 nt, Homo sapiens
  misc_RNA (1)...(19): siRNA sense strand
gaagagguaccaggacauu

SEQ ID NO: 700145 - RNA, 19 nt, Homo sapiens
  misc_RNA (1)...(19): siRNA sense strand
acgccaagcugaagaagaa

SEQ ID NO: 700146 - RNA, 19 nt, Homo sapiens
  misc_RNA (1)...(19): siRNA sense strand
ccaauaagcugcacacuaa

SEQ ID NO: 700147 - RNA, 19 nt, Homo sapiens
  misc_RNA (1)...(19): siRNA sense strand
gcagacagcuugauucgua

SEQ ID NO: 700148 - RNA, 19 nt, Homo sapiens
  misc_RNA (1)...(19): siRNA sense strand
ggagauaguucgauacuuu

SEQ ID NO: 700149 - RNA, 19 nt, Homo sapiens
  misc_RNA (1)...(19): siRNA sense strand
ggaagaaacaucagaauuu

SEQ ID NO: 700150 - RNA, 19 nt, Homo sapiens
  misc_RNA (1)...(19): siRNA sense strand
gaagaaacaucagaauuug

SEQ ID NO: 700151 - RNA, 19 nt, Homo sapiens
  misc_RNA (1)...(19): siRNA sense strand
ggaaggagagagaguauua

SEQ ID NO: 700152 - RNA, 19 nt, Homo sapiens
  misc_RNA (1)...(19): siRNA sense strand
gugaagaacucaaagaauu

SEQ ID NO: 700153 - RNA, 19 nt, Homo sapiens
  misc_RNA (1)...(19): siRNA sense strand
gcacguagaucgccacgaa

SEQ ID NO: 700154 - RNA, 19 nt, Homo sapiens
  misc_RNA (1)...(19): siRNA sense strand
acagacaacucuucucuua

SEQ ID NO: 700155 - RNA, 19 nt, Homo sapiens
  misc_RNA (1)...(19): siRNA sense strand
gaagaaaacuccaaaguga

SEQ ID NO: 700156 - RNA, 19 nt, Homo sapiens
  misc_RNA (1)...(19): siRNA sense strand
ggagagagaguauuaauga

SEQ ID NO: 700157 - RNA, 19 nt, Homo sapiens
  misc_RNA (1)...(19): siRNA sense strand
gaagauaagaucaucagua

SEQ ID NO: 700158 - RNA, 19 nt, Homo sapiens
  misc_RNA (1)...(19): siRNA sense strand
gcaagaaguuuccugauag

SEQ ID NO: 700159 - RNA, 19 nt, Homo sapiens
  misc_RNA (1)...(19): siRNA sense strand
gcacagaucgaaaccauaa

SEQ ID NO: 700160 - RNA, 19 nt, Homo sapiens
  misc_RNA (1)...(19): siRNA sense strand
gaagaaaugaugaagauga

SEQ ID NO: 700161 - RNA, 19 nt, Homo sapiens
  misc_RNA (1)...(19): siRNA sense strand
caagaugaguuccuagaaa

SEQ ID NO: 700162 - RNA, 19 nt, Homo sapiens
  misc_RNA (1)...(19): siRNA sense strand
gaagguugcuugccauuca

SEQ ID NO: 700163 - RNA, 19 nt, Homo sapiens
  misc_RNA (1)...(19): siRNA sense strand
aaagagaacuccagucaga

SEQ ID NO: 700164 - RNA, 19 nt, Homo sapiens
  misc_RNA (1)...(19): siRNA sense strand
gaaaugggcuccuccaaaa

SEQ ID NO: 700165 - RNA, 19 nt, Homo sapiens
  misc_RNA (1)...(19): siRNA sense strand
ugaagaacaucuagaagaa

SEQ ID NO: 700166 - RNA, 19 nt, Homo sapiens
  misc_RNA (1)...(19): siRNA sense strand
agacacagaugacaauaaa

SEQ ID NO: 700167 - RNA, 19 nt, Homo sapiens
  misc_RNA (1)...(19): siRNA sense strand
gaacgaagagagaaagaaa

SEQ ID NO: 700168 - RNA, 19 nt, Homo sapiens
  misc_RNA (1)...(19): siRNA sense strand
gcaaaggcauccugaaugg

SEQ ID NO: 700169 - RNA, 19 nt, Homo sapiens
  misc_RNA (1)...(19): siRNA sense strand
gaaagaaaggugaggauga

SEQ ID NO: 700170 - RNA, 19 nt, Homo sapiens
  misc_RNA (1)...(19): siRNA sense strand
gaagaugaauuggugaaga

SEQ ID NO: 700171 - RNA, 19 nt, Homo sapiens
  misc_RNA (1)...(19): siRNA sense strand
gaacuauacugaagagucu

SEQ ID NO: 700172 - RNA, 19 nt, Homo sapiens
  misc_RNA (1)...(19): siRNA sense strand
gauacuggcucuucucaga

SEQ ID NO: 700173 - RNA, 19 nt, Homo sapiens
  misc_RNA (1)...(19): siRNA sense strand
ggaaguggaugaagagaag

SEQ ID NO: 700174 - RNA, 19 nt, Homo sapiens
  misc_RNA (1)...(19): siRNA sense strand
gaugcucaguauccuauua

SEQ ID NO: 700175 - RNA, 19 nt, Homo sapiens
  misc_RNA (1)...(19): siRNA sense strand
gcaggaagcgcaagaaguu

SEQ ID NO: 700176 - RNA, 19 nt, Homo sapiens
  misc_RNA (1)...(19): siRNA sense strand
guagugaucucauugaagu

SEQ ID NO: 700177 - RNA, 19 nt, Homo sapiens
  misc_RNA (1)...(19): siRNA sense strand
gaaagcaaacuuagguaaa

SEQ ID NO: 700178 - RNA, 19 nt, Homo sapiens
  misc_RNA (1)...(19): siRNA sense strand
gaaagagaaaugaaaguga

SEQ ID NO: 700179 - RNA, 19 nt, Homo sapiens
  misc_RNA (1)...(19): siRNA sense strand
ggaaaugggcuccuccaaa

SEQ ID NO: 700180 - RNA, 19 nt, Homo sapiens
  misc_RNA (1)...(19): siRNA sense strand
ggacuacuaugaugugauc

SEQ ID NO: 700181 - RNA, 19 nt, Homo sapiens
  misc_RNA (1)...(19): siRNA sense strand
gcagucagcuaacacacaa

SEQ ID NO: 700182 - RNA, 19 nt, Homo sapiens
  misc_RNA (1)...(19): siRNA sense strand
guacagagcgcccaccaaa

SEQ ID NO: 700183 - RNA, 19 nt, Homo sapiens
  misc_RNA (1)...(19): siRNA sense strand
cgcaagaaguuuccugaua

SEQ ID NO: 700184 - RNA, 19 nt, Homo sapiens
  misc_RNA (1)...(19): siRNA sense strand
ggacauuauucacucuauu

SEQ ID NO: 700185 - RNA, 19 nt, Homo sapiens
  misc_RNA (1)...(19): siRNA sense strand
aaacagaaacggaaagaaa

SEQ ID NO: 700186 - RNA, 19 nt, Homo sapiens
  misc_RNA (1)...(19): siRNA sense strand
agaugaaguuccaggauua

SEQ ID NO: 700187 - RNA, 19 nt, Homo sapiens
  misc_RNA (1)...(19): siRNA sense strand
gaaggagacaguugugaaa

SEQ ID NO: 700188 - RNA, 19 nt, Homo sapiens
  misc_RNA (1)...(19): siRNA sense strand
gcagaagugugaagagauc

SEQ ID NO: 700189 - RNA, 19 nt, Homo sapiens
  misc_RNA (1)...(19): siRNA sense strand
aagaaaugcuugagagauu

SEQ ID NO: 700190 - RNA, 19 nt, Homo sapiens
  misc_RNA (1)...(19): siRNA sense strand
cagaugacuuuguuggaua

SEQ ID NO: 700191 - RNA, 19 nt, Homo sapiens
  misc_RNA (1)...(19): siRNA sense strand
acagagcgcccaccaaaua

SEQ ID NO: 700192 - RNA, 19 nt, Homo sapiens
  misc_RNA (1)...(19): siRNA sense strand
aagaugaugucgcccaaua

SEQ ID NO: 700193 - RNA, 19 nt, Homo sapiens
  misc_RNA (1)...(19): siRNA sense strand
caucugcacuggagaaaug

SEQ ID NO: 700194 - RNA, 19 nt, Homo sapiens
  misc_RNA (1)...(19): siRNA sense strand
ugaagcagaugacuuuguu

SEQ ID NO: 700195 - RNA, 19 nt, Homo sapiens
  misc_RNA (1)...(19): siRNA sense strand
caaauaugcugugggagaa

SEQ ID NO: 700196 - RNA, 19 nt, Homo sapiens
  misc_RNA (1)...(19): siRNA sense strand
uacagaagcugaagacaug

SEQ ID NO: 700197 - RNA, 19 nt, Homo sapiens
  misc_RNA (1)...(19): siRNA sense strand
agaagacuauggugaauug

SEQ ID NO: 700198 - RNA, 19 nt, Homo sapiens
  misc_RNA (1)...(19): siRNA sense strand
gcauucagauugguggaua

SEQ ID NO: 700199 - RNA, 19 nt, Homo sapiens
  misc_RNA (1)...(19): siRNA sense strand
gaagaacaacggaaagaau

SEQ ID NO: 700200 - RNA, 19 nt, Homo sapiens
  misc_RNA (1)...(19): siRNA sense strand
auaaggagauaguucgaua

SEQ ID NO: 700201 - RNA, 19 nt, Homo sapiens
  misc_RNA (1)...(19): siRNA sense strand
agaaaugcuugagagauua

SEQ ID NO: 700202 - RNA, 19 nt, Homo sapiens
  misc_RNA (1)...(19): siRNA sense strand
gcagaugacuuuguuggau

SEQ ID NO: 700203 - RNA, 19 nt, Homo sapiens
  misc_RNA (1)...(19): siRNA sense strand
ggucguagaagaugaauug

SEQ ID NO: 700204 - RNA, 19 nt, Homo sapiens
  misc_RNA (1)...(19): siRNA sense strand
gaaagaaauggaagccaaa

SEQ ID NO: 700205 - RNA, 19 nt, Homo sapiens
  misc_RNA (1)...(19): siRNA sense strand
gaaagaaaugcuugagaga

SEQ ID NO: 700206 - RNA, 19 nt, Homo sapiens
  misc_RNA (1)...(19): siRNA sense strand
gaaggaaggagagagagua

SEQ ID NO: 700207 - RNA, 19 nt, Homo sapiens
  misc_RNA (1)...(19): siRNA sense strand
gagaugaggccgaggacua

SEQ ID NO: 700208 - RNA, 19 nt, Homo sapiens
  misc_RNA (1)...(19): siRNA sense strand
gaaaggugaggaugacaaa

SEQ ID NO: 700209 - RNA, 19 nt, Homo sapiens
  misc_RNA (1)...(19): siRNA sense strand
cagaugaaguuccaggauu

SEQ ID NO: 700210 - RNA, 19 nt, Homo sapiens
  misc_RNA (1)...(19): siRNA sense strand
guaugaggaccaagaguua

SEQ ID NO: 700211 - RNA, 19 nt, Homo sapiens
  misc_RNA (1)...(19): siRNA sense strand
gaacaucuagaagaaauga

SEQ ID NO: 700212 - RNA, 19 nt, Homo sapiens
  misc_RNA (1)...(19): siRNA sense strand
gagauaguucgauacuuua

SEQ ID NO: 700213 - RNA, 19 nt, Homo sapiens
  misc_RNA (1)...(19): siRNA sense strand
ccacugagaagaaaucuga

SEQ ID NO: 700214 - RNA, 19 nt, Homo sapiens
  misc_RNA (1)...(19): siRNA sense strand
gaucgaaaccauaauagau

SEQ ID NO: 700215 - RNA, 19 nt, Homo sapiens
  misc_RNA (1)...(19): siRNA sense strand
auaaugagguacaagauga

SEQ ID NO: 700216 - RNA, 19 nt, Homo sapiens
  misc_RNA (1)...(19): siRNA sense strand
gaacaacggaaagaauauu

SEQ ID NO: 700217 - RNA, 19 nt, Homo sapiens
  misc_RNA (1)...(19): siRNA sense strand
gaggugggcuucuaugucu

SEQ ID NO: 700218 - RNA, 19 nt, Homo sapiens
  misc_RNA (1)...(19): siRNA sense strand
gcaaagggcagaagcaaag

SEQ ID NO: 700219 - RNA, 19 nt, Homo sapiens
  misc_RNA (1)...(19): siRNA sense strand
agacaacucuucucuuagu

SEQ ID NO: 700220 - RNA, 19 nt, Homo sapiens
  misc_RNA (1)...(19): siRNA sense strand
gcagaagacuauggugaau

SEQ ID NO: 700221 - RNA, 19 nt, Homo sapiens
  misc_RNA (1)...(19): siRNA sense strand
gagcucgucucccagaaga

SEQ ID NO: 700222 - RNA, 19 nt, Homo sapiens
  misc_RNA (1)...(19): siRNA sense strand
aaaugaagcagaugacuuu

SEQ ID NO: 700223 - RNA, 19 nt, Homo sapiens
  misc_RNA (1)...(19): siRNA sense strand
gaaaugaugaagaugaugu

SEQ ID NO: 700224 - RNA, 19 nt, Homo sapiens
  misc_RNA (1)...(19): siRNA sense strand
uaacacagccuccuuagag

SEQ ID NO: 700225 - RNA, 19 nt, Homo sapiens
  misc_RNA (1)...(19): siRNA sense strand
ggaguuuccugccugguau

SEQ ID NO: 700226 - RNA, 19 nt, Homo sapiens
  misc_RNA (1)...(19): siRNA sense strand
ggaaauccaggaaagagaa

SEQ ID NO: 700227 - RNA, 19 nt, Homo sapiens
  misc_RNA (1)...(19): siRNA sense strand
gcuggagaccucugaauuu

SEQ ID NO: 700228 - RNA, 19 nt, Homo sapiens
  misc_RNA (1)...(19): siRNA sense strand
guucaccacuaaauccuaa

SEQ ID NO: 700229 - RNA, 19 nt, Homo sapiens
  misc_RNA (1)...(19): siRNA sense strand
gguacaagaugaguuccua

SEQ ID NO: 700230 - RNA, 19 nt, Homo sapiens
  misc_RNA (1)...(19): siRNA sense strand
cagcugcauuugaggauaa

SEQ ID NO: 700231 - RNA, 19 nt, Homo sapiens
  misc_RNA (1)...(19): siRNA sense strand
gacgaagacagaagaagua

SEQ ID NO: 700232 - RNA, 19 nt, Homo sapiens
  misc_RNA (1)...(19): siRNA sense strand
aaaaggagcuggaugaguu

SEQ ID NO: 700233 - RNA, 19 nt, Homo sapiens
  misc_RNA (1)...(19): siRNA sense strand
gaacacacaacauggaaca

SEQ ID NO: 700234 - RNA, 19 nt, Homo sapiens
  misc_RNA (1)...(19): siRNA sense strand
guuccaggauuauucauug

SEQ ID NO: 700235 - RNA, 19 nt, Homo sapiens
  misc_RNA (1)...(19): siRNA sense strand
gaagcugaagacaugauua

SEQ ID NO: 700236 - RNA, 19 nt, Homo sapiens
  misc_RNA (1)...(19): siRNA sense strand
acaggaagcccucaaagaa

SEQ ID NO: 700237 - RNA, 19 nt, Homo sapiens
  misc_RNA (1)...(19): siRNA sense strand
aaugcuaggugcaaaguuu

SEQ ID NO: 700238 - RNA, 19 nt, Homo sapiens
  misc_RNA (1)...(19): siRNA sense strand
ggaacggcuugcuguguug

SEQ ID NO: 700239 - RNA, 19 nt, Homo sapiens
  misc_RNA (1)...(19): siRNA sense strand
caacggaaagaauauuuga

SEQ ID NO: 700240 - RNA, 19 nt, Homo sapiens
  misc_RNA (1)...(19): siRNA sense strand
cacacuaacuuucacauuc

SEQ ID NO: 700241 - RNA, 19 nt, Homo sapiens
  misc_RNA (1)...(19): siRNA sense strand
gaagaacaucuagaagaaa

SEQ ID NO: 700242 - RNA, 19 nt, Homo sapiens
  misc_RNA (1)...(19): siRNA sense strand
caaagaaauccaagacaga

SEQ ID NO: 700243 - RNA, 19 nt, Homo sapiens
  misc_RNA (1)...(19): siRNA sense strand
ggaaagagaaaugaaagug

SEQ ID NO: 700244 - RNA, 19 nt, Homo sapiens
  misc_RNA (1)...(19): siRNA sense strand
gaagagguaccaggacauu

SEQ ID NO: 700245 - RNA, 19 nt, Homo sapiens
  misc_RNA (1)...(19): siRNA sense strand
acgccaagcugaagaagaa

SEQ ID NO: 700246 - RNA, 19 nt, Homo sapiens
  misc_RNA (1)...(19): siRNA sense strand
gaacaaugauggaaagguu

SEQ ID NO: 700247 - RNA, 19 nt, Homo sapiens
  misc_RNA (1)...(19): siRNA sense strand
ggaaacaaaugggaacaaa

SEQ ID NO: 700248 - RNA, 19 nt, Homo sapiens
  misc_RNA (1)...(19): siRNA sense strand
ggacuccaccugaagauua

SEQ ID NO: 700249 - RNA, 19 nt, Homo sapiens
  misc_RNA (1)...(19): siRNA sense strand
gaagaacaaugauggaaag

SEQ ID NO: 700250 - RNA, 19 nt, Homo sapiens
  misc_RNA (1)...(19): siRNA sense strand
guacacacaagaagaaaua

SEQ ID NO: 700251 - RNA, 19 nt, Homo sapiens
  misc_RNA (1)...(19): siRNA sense strand
uauaagacuucagggauua

SEQ ID NO: 700252 - RNA, 19 nt, Homo sapiens
  misc_RNA (1)...(19): siRNA sense strand
aaaguauacucuucgcaua

SEQ ID NO: 700253 - RNA, 19 nt, Homo sapiens
  misc_RNA (1)...(19): siRNA sense strand
cuaaacgucuagaugagua

SEQ ID NO: 700254 - RNA, 19 nt, Homo sapiens
  misc_RNA (1)...(19): siRNA sense strand
gcuagaauaugguaucucu

SEQ ID NO: 700255 - RNA, 19 nt, Homo sapiens
  misc_RNA (1)...(19): siRNA sense strand
gggaucauguuguuauaau

SEQ ID NO: 700256 - RNA, 19 nt, Homo sapiens
  misc_RNA (1)...(19): siRNA sense strand
cuauaagacuucagggauu

SEQ ID NO: 700257 - RNA, 19 nt, Homo sapiens
  misc_RNA (1)...(19): siRNA sense strand
gaauaugguaucucuuaga

SEQ ID NO: 700258 - RNA, 19 nt, Homo sapiens
  misc_RNA (1)...(19): siRNA sense strand
gaacacaagacacauugca

SEQ ID NO: 700259 - RNA, 19 nt, Homo sapiens
  misc_RNA (1)...(19): siRNA sense strand
ccagguggauuuagacaag

SEQ ID NO: 700260 - RNA, 19 nt, Homo sapiens
  misc_RNA (1)...(19): siRNA sense strand
ggaucauguuguuauaaug

SEQ ID NO: 700261 - RNA, 19 nt, Homo sapiens
  misc_RNA (1)...(19): siRNA sense strand
gaguauauuccagaagaua

SEQ ID NO: 700262 - RNA, 19 nt, Homo sapiens
  misc_RNA (1)...(19): siRNA sense strand
cacaagacacauugcauuu

SEQ ID NO: 700263 - RNA, 19 nt, Homo sapiens
  misc_RNA (1)...(19): siRNA sense strand
cuacccagguggauuuaga

SEQ ID NO: 700264 - RNA, 19 nt, Homo sapiens
  misc_RNA (1)...(19): siRNA sense strand
gcugcuauggcaucuauaa

SEQ ID NO: 700265 - RNA, 19 nt, Homo sapiens
  misc_RNA (1)...(19): siRNA sense strand
gauccaguggcaauuguaa

SEQ ID NO: 700266 - RNA, 19 nt, Homo sapiens
  misc_RNA (1)...(19): siRNA sense strand
acacaagacacauugcauu

SEQ ID NO: 700267 - RNA, 19 nt, Homo sapiens
  misc_RNA (1)...(19): siRNA sense strand
gcuauggcaucuauaagac

SEQ ID NO: 700268 - RNA, 19 nt, Homo sapiens
  misc_RNA (1)...(19): siRNA sense strand
gacuccaccugaagauuau

SEQ ID NO: 700269 - RNA, 19 nt, Homo sapiens
  misc_RNA (1)...(19): siRNA sense strand
caagacacauugcauuuuc

SEQ ID NO: 700270 - RNA, 19 nt, Homo sapiens
  misc_RNA (1)...(19): siRNA sense strand
cuucagggauuacauaaac

SEQ ID NO: 700271 - RNA, 19 nt, Homo sapiens
  misc_RNA (1)...(19): siRNA sense strand
agacuucagggauuacaua

SEQ ID NO: 700272 - RNA, 19 nt, Homo sapiens
  misc_RNA (1)...(19): siRNA sense strand
uaccuaaacgucuagauga

SEQ ID NO: 700273 - RNA, 19 nt, Homo sapiens
  misc_RNA (1)...(19): siRNA sense strand
ugaguacacacaagaagaa

SEQ ID NO: 700274 - RNA, 19 nt, Homo sapiens
  misc_RNA (1)...(19): siRNA sense strand
gggauccaguggcaauugu

SEQ ID NO: 700275 - RNA, 19 nt, Homo sapiens
  misc_RNA (1)...(19): siRNA sense strand
ucacagaagaacaaugaug

SEQ ID NO: 700276 - RNA, 19 nt, Homo sapiens
  misc_RNA (1)...(19): siRNA sense strand
aauagacgccuucccaaga

SEQ ID NO: 700277 - RNA, 19 nt, Homo sapiens
  misc_RNA (1)...(19): siRNA sense strand
agaagaacaaugauggaaa

SEQ ID NO: 700278 - RNA, 19 nt, Homo sapiens
  misc_RNA (1)...(19): siRNA sense strand
uauggcaucuauaagacuu

SEQ ID NO: 700279 - RNA, 19 nt, Homo sapiens
  misc_RNA (1)...(19): siRNA sense strand
augaguauauuccagaaga

SEQ ID NO: 700280 - RNA, 19 nt, Homo sapiens
  misc_RNA (1)...(19): siRNA sense strand
cagaagaacaaugauggaa

SEQ ID NO: 700281 - RNA, 19 nt, Homo sapiens
  misc_RNA (1)...(19): siRNA sense strand
acauaaaccuguguaccau

SEQ ID NO: 700282 - RNA, 19 nt, Homo sapiens
  misc_RNA (1)...(19): siRNA sense strand
auagacgccuucccaagau

SEQ ID NO: 700283 - RNA, 19 nt, Homo sapiens
  misc_RNA (1)...(19): siRNA sense strand
gaaacaaaugggaacaaaa

SEQ ID NO: 700284 - RNA, 19 nt, Homo sapiens
  misc_RNA (1)...(19): siRNA sense strand
agaauaugguaucucuuag

SEQ ID NO: 700285 - RNA, 19 nt, Homo sapiens
  misc_RNA (1)...(19): siRNA sense strand
gaauuuaguagaggagcuu

SEQ ID NO: 700286 - RNA, 19 nt, Homo sapiens
  misc_RNA (1)...(19): siRNA sense strand
uagaugaguacacacaaga

SEQ ID NO: 700287 - RNA, 19 nt, Homo sapiens
  misc_RNA (1)...(19): siRNA sense strand
cuagaugaguacacacaag

SEQ ID NO: 700288 - RNA, 19 nt, Homo sapiens
  misc_RNA (1)...(19): siRNA sense strand
auaaugaacacaagacaca

SEQ ID NO: 700289 - RNA, 19 nt, Homo sapiens
  misc_RNA (1)...(19): siRNA sense strand
uagacgccuucccaagauu

SEQ ID NO: 700290 - RNA, 19 nt, Homo sapiens
  misc_RNA (1)...(19): siRNA sense strand
uugcugcuauggcaucuau

SEQ ID NO: 700291 - RNA, 19 nt, Homo sapiens
  misc_RNA (1)...(19): siRNA sense strand
ggauccaguggcaauugua

SEQ ID NO: 700292 - RNA, 19 nt, Homo sapiens
  misc_RNA (1)...(19): siRNA sense strand
agaugaguauauuccagaa

SEQ ID NO: 700293 - RNA, 19 nt, Homo sapiens
  misc_RNA (1)...(19): siRNA sense strand
gaugaguacacacaagaag

SEQ ID NO: 700294 - RNA, 19 nt, Homo sapiens
  misc_RNA (1)...(19): siRNA sense strand
gacuucagggauuacauaa

SEQ ID NO: 700295 - RNA, 19 nt, Homo sapiens
  misc_RNA (1)...(19): siRNA sense strand
ugaguauauuccagaagau

SEQ ID NO: 700296 - RNA, 19 nt, Homo sapiens
  misc_RNA (1)...(19): siRNA sense strand
uggcuacccagguggauuu

SEQ ID NO: 700297 - RNA, 19 nt, Homo sapiens
  misc_RNA (1)...(19): siRNA sense strand
acacacaagaagaaauaga

SEQ ID NO: 700298 - RNA, 19 nt, Homo sapiens
  misc_RNA (1)...(19): siRNA sense strand
agguggauuuagacaagua

SEQ ID NO: 700299 - RNA, 19 nt, Homo sapiens
  misc_RNA (1)...(19): siRNA sense strand
gaguacacacaagaagaaa

SEQ ID NO: 700300 - RNA, 19 nt, Homo sapiens
  misc_RNA (1)...(19): siRNA sense strand
gagcuuccucaaccacgaa

SEQ ID NO: 700301 - RNA, 19 nt, Homo sapiens
  misc_RNA (1)...(19): siRNA sense strand
ugagggauccaguggcaau

SEQ ID NO: 700302 - RNA, 19 nt, Homo sapiens
  misc_RNA (1)...(19): siRNA sense strand
gaagaaacauucagacuag

SEQ ID NO: 700303 - RNA, 19 nt, Homo sapiens
  misc_RNA (1)...(19): siRNA sense strand
gaagagagccauuauugaa

SEQ ID NO: 700304 - RNA, 19 nt, Homo sapiens
  misc_RNA (1)...(19): siRNA sense strand
ggaagaaauugcucaaaga

SEQ ID NO: 700305 - RNA, 19 nt, Homo sapiens
  misc_RNA (1)...(19): siRNA sense strand
ggagauaauuggaggcuaa

SEQ ID NO: 700306 - RNA, 19 nt, Homo sapiens
  misc_RNA (1)...(19): siRNA sense strand
gaaagcagauaaacuagau

SEQ ID NO: 700307 - RNA, 19 nt, Homo sapiens
  misc_RNA (1)...(19): siRNA sense strand
aaagauagauccugcauau

SEQ ID NO: 700308 - RNA, 19 nt, Homo sapiens
  misc_RNA (1)...(19): siRNA sense strand
gaaaucagggagaaacuua

SEQ ID NO: 700309 - RNA, 19 nt, Homo sapiens
  misc_RNA (1)...(19): siRNA sense strand
gaaguacagucacaaguug

SEQ ID NO: 700310 - RNA, 19 nt, Homo sapiens
  misc_RNA (1)...(19): siRNA sense strand
gaaaugaugccuauguuga

SEQ ID NO: 700311 - RNA, 19 nt, Homo sapiens
  misc_RNA (1)...(19): siRNA sense strand
ggaacuaaaugaagcuuug

SEQ ID NO: 700312 - RNA, 19 nt, Homo sapiens
  misc_RNA (1)...(19): siRNA sense strand
uagaagaccuuggugauuu

SEQ ID NO: 700313 - RNA, 19 nt, Homo sapiens
  misc_RNA (1)...(19): siRNA sense strand
guuagugccugguacaaua

SEQ ID NO: 700314 - RNA, 19 nt, Homo sapiens
  misc_RNA (1)...(19): siRNA sense strand
uaaagaaucuccugucucu

SEQ ID NO: 700315 - RNA, 19 nt, Homo sapiens
  misc_RNA (1)...(19): siRNA sense strand
uagaacagcuccaagaaga

SEQ ID NO: 700316 - RNA, 19 nt, Homo sapiens
  misc_RNA (1)...(19): siRNA sense strand
gucacaaguugaagaauua

SEQ ID NO: 700317 - RNA, 19 nt, Homo sapiens
  misc_RNA (1)...(19): siRNA sense strand
agaauaggcuggugaauca

SEQ ID NO: 700318 - RNA, 19 nt, Homo sapiens
  misc_RNA (1)...(19): siRNA sense strand
uucaagagcugaugaguaa

SEQ ID NO: 700319 - RNA, 19 nt, Homo sapiens
  misc_RNA (1)...(19): siRNA sense strand
gagccaagauuuaacaaca

SEQ ID NO: 700320 - RNA, 19 nt, Homo sapiens
  misc_RNA (1)...(19): siRNA sense strand
agaaugaacuggagacaga

SEQ ID NO: 700321 - RNA, 19 nt, Homo sapiens
  misc_RNA (1)...(19): siRNA sense strand
gaagaaaacuacagaggaa

SEQ ID NO: 700322 - RNA, 19 nt, Homo sapiens
  misc_RNA (1)...(19): siRNA sense strand
ucacuuggauccagacauu

SEQ ID NO: 700323 - RNA, 19 nt, Homo sapiens
  misc_RNA (1)...(19): siRNA sense strand
gaaagaaagaggaagaaau

SEQ ID NO: 700324 - RNA, 19 nt, Homo sapiens
  misc_RNA (1)...(19): siRNA sense strand
aaaggcagcugaagauaga

SEQ ID NO: 700325 - RNA, 19 nt, Homo sapiens
  misc_RNA (1)...(19): siRNA sense strand
agagagagauggaagagaa

SEQ ID NO: 700326 - RNA, 19 nt, Homo sapiens
  misc_RNA (1)...(19): siRNA sense strand
gaacagcuccaagaagaaa

SEQ ID NO: 700327 - RNA, 19 nt, Homo sapiens
  misc_RNA (1)...(19): siRNA sense strand
gagacauucuucugauaaa

SEQ ID NO: 700328 - RNA, 19 nt, Homo sapiens
  misc_RNA (1)...(19): siRNA sense strand
gcuccagacucaauuagaa

SEQ ID NO: 700329 - RNA, 19 nt, Homo sapiens
  misc_RNA (1)...(19): siRNA sense strand
uaaacuagaaggucaagua

SEQ ID NO: 700330 - RNA, 19 nt, Homo sapiens
  misc_RNA (1)...(19): siRNA sense strand
agauagauccugcauauuu

SEQ ID NO: 700331 - RNA, 19 nt, Homo sapiens
  misc_RNA (1)...(19): siRNA sense strand
ggaaguacagucacaaguu

SEQ ID NO: 700332 - RNA, 19 nt, Homo sapiens
  misc_RNA (1)...(19): siRNA sense strand
gcaaaucuacgcaagaaug

SEQ ID NO: 700333 - RNA, 19 nt, Homo sapiens
  misc_RNA (1)...(19): siRNA sense strand
agaagaccuuggugauuua

SEQ ID NO: 700334 - RNA, 19 nt, Homo sapiens
  misc_RNA (1)...(19): siRNA sense strand
gcucaaagaugccaugaac

SEQ ID NO: 700335 - RNA, 19 nt, Homo sapiens
  misc_RNA (1)...(19): siRNA sense strand
gcgagagccuccucacuug

SEQ ID NO: 700336 - RNA, 19 nt, Homo sapiens
  misc_RNA (1)...(19): siRNA sense strand
gaagaagagagccauuauu

SEQ ID NO: 700337 - RNA, 19 nt, Homo sapiens
  misc_RNA (1)...(19): siRNA sense strand
gcaugagaauaagauguua

SEQ ID NO: 700338 - RNA, 19 nt, Homo sapiens
  misc_RNA (1)...(19): siRNA sense strand
gcucacaacacaaggguua

SEQ ID NO: 700339 - RNA, 19 nt, Homo sapiens
  misc_RNA (1)...(19): siRNA sense strand
ggcagagaaucagguauua

SEQ ID NO: 700340 - RNA, 19 nt, Homo sapiens
  misc_RNA (1)...(19): siRNA sense strand
gauuuaaggcggcagguua

SEQ ID NO: 700341 - RNA, 19 nt, Homo sapiens
  misc_RNA (1)...(19): siRNA sense strand
aaacugaaguaggagauaa

SEQ ID NO: 700342 - RNA, 19 nt, Homo sapiens
  misc_RNA (1)...(19): siRNA sense strand
gaacuucggcaacagaaug

SEQ ID NO: 700343 - RNA, 19 nt, Homo sapiens
  misc_RNA (1)...(19): siRNA sense strand
ggaaugacccugcauaaaa

SEQ ID NO: 700344 - RNA, 19 nt, Homo sapiens
  misc_RNA (1)...(19): siRNA sense strand
gaagaaauugcucaaagau

SEQ ID NO: 700345 - RNA, 19 nt, Homo sapiens
  misc_RNA (1)...(19): siRNA sense strand
aaacaaagagucagagaga

SEQ ID NO: 700346 - RNA, 19 nt, Homo sapiens
  misc_RNA (1)...(19): siRNA sense strand
aaagaaagaggaagaaaug

SEQ ID NO: 700347 - RNA, 19 nt, Homo sapiens
  misc_RNA (1)...(19): siRNA sense strand
cagcagagcuuggaaggau

SEQ ID NO: 700348 - RNA, 19 nt, Homo sapiens
  misc_RNA (1)...(19): siRNA sense strand
gaagauagacuggcaagca

SEQ ID NO: 700349 - RNA, 19 nt, Homo sapiens
  misc_RNA (1)...(19): siRNA sense strand
gaacuggagacagagaaua

SEQ ID NO: 700350 - RNA, 19 nt, Homo sapiens
  misc_RNA (1)...(19): siRNA sense strand
ccaagaagguucggacaau

SEQ ID NO: 700351 - RNA, 19 nt, Homo sapiens
  misc_RNA (1)...(19): siRNA sense strand
caagagacagguaguagaa

SEQ ID NO: 700352 - RNA, 19 nt, Homo sapiens
  misc_RNA (1)...(19): siRNA sense strand
acuagaaggucaaguagaa

SEQ ID NO: 700353 - RNA, 19 nt, Homo sapiens
  misc_RNA (1)...(19): siRNA sense strand
gcaacagaaugaugaacug

SEQ ID NO: 700354 - RNA, 19 nt, Homo sapiens
  misc_RNA (1)...(19): siRNA sense strand
ggcuaaagauaagcaauuu

SEQ ID NO: 700355 - RNA, 19 nt, Homo sapiens
  misc_RNA (1)...(19): siRNA sense strand
gaaagaggaagaaaugaag

SEQ ID NO: 700356 - RNA, 19 nt, Homo sapiens
  misc_RNA (1)...(19): siRNA sense strand
ggaaaccauugaagagcuu

SEQ ID NO: 700357 - RNA, 19 nt, Homo sapiens
  misc_RNA (1)...(19): siRNA sense strand
gaaggaaaccauugaagag

SEQ ID NO: 700358 - RNA, 19 nt, Homo sapiens
  misc_RNA (1)...(19): siRNA sense strand
ugaagaacaucuagagaag

SEQ ID NO: 700359 - RNA, 19 nt, Homo sapiens
  misc_RNA (1)...(19): siRNA sense strand
cuacagaggaacuaaauga

SEQ ID NO: 700360 - RNA, 19 nt, Homo sapiens
  misc_RNA (1)...(19): siRNA sense strand
gaagaaaugaagcaaaugg

SEQ ID NO: 700361 - RNA, 19 nt, Homo sapiens
  misc_RNA (1)...(19): siRNA sense strand
ggagaaacuuauucgucuu

SEQ ID NO: 700362 - RNA, 19 nt, Homo sapiens
  misc_RNA (1)...(19): siRNA sense strand
cagucuagcugcagagauu

SEQ ID NO: 700363 - RNA, 19 nt, Homo sapiens
  misc_RNA (1)...(19): siRNA sense strand
guuaaugccucuuggaagu

SEQ ID NO: 700364 - RNA, 19 nt, Homo sapiens
  misc_RNA (1)...(19): siRNA sense strand
gaggaagaguuaagaaagg

SEQ ID NO: 700365 - RNA, 19 nt, Homo sapiens
  misc_RNA (1)...(19): siRNA sense strand
gaagagaagaauaccaugu

SEQ ID NO: 700366 - RNA, 19 nt, Homo sapiens
  misc_RNA (1)...(19): siRNA sense strand
augaugaacugaccacuuu

SEQ ID NO: 700367 - RNA, 19 nt, Homo sapiens
  misc_RNA (1)...(19): siRNA sense strand
gacagcaaauuaaugacuu

SEQ ID NO: 700368 - RNA, 19 nt, Homo sapiens
  misc_RNA (1)...(19): siRNA sense strand
ccagaaauacaagcucuua

SEQ ID NO: 700369 - RNA, 19 nt, Homo sapiens
  misc_RNA (1)...(19): siRNA sense strand
gcaaauggaagaacgauac

SEQ ID NO: 700370 - RNA, 19 nt, Homo sapiens
  misc_RNA (1)...(19): siRNA sense strand
ggaaaugaugccuauguug

SEQ ID NO: 700371 - RNA, 19 nt, Homo sapiens
  misc_RNA (1)...(19): siRNA sense strand
gccagaccguggaagauuu

SEQ ID NO: 700372 - RNA, 19 nt, Homo sapiens
  misc_RNA (1)...(19): siRNA sense strand
aaaagaagcuugaagaaca

SEQ ID NO: 700373 - RNA, 19 nt, Homo sapiens
  misc_RNA (1)...(19): siRNA sense strand
aagaagagagccauuauug

SEQ ID NO: 700374 - RNA, 19 nt, Homo sapiens
  misc_RNA (1)...(19): siRNA sense strand
gauaauuggaggcuaaaga

SEQ ID NO: 700375 - RNA, 19 nt, Homo sapiens
  misc_RNA (1)...(19): siRNA sense strand
gcagagccuucuagaugau

SEQ ID NO: 700376 - RNA, 19 nt, Homo sapiens
  misc_RNA (1)...(19): siRNA sense strand
gauagauccugcauauuuu

SEQ ID NO: 700377 - RNA, 19 nt, Homo sapiens
  misc_RNA (1)...(19): siRNA sense strand
ggaaagacucaaucaaucu

SEQ ID NO: 700378 - RNA, 19 nt, Homo sapiens
  misc_RNA (1)...(19): siRNA sense strand
gcugugcugugaacuguga

SEQ ID NO: 700379 - RNA, 19 nt, Homo sapiens
  misc_RNA (1)...(19): siRNA sense strand
agagagccauuauugaaga

SEQ ID NO: 700380 - RNA, 19 nt, Homo sapiens
  misc_RNA (1)...(19): siRNA sense strand
caagaagguucggacaaug

SEQ ID NO: 700381 - RNA, 19 nt, Homo sapiens
  misc_RNA (1)...(19): siRNA sense strand
gaagcaagaguacauccaa

SEQ ID NO: 700382 - RNA, 19 nt, Homo sapiens
  misc_RNA (1)...(19): siRNA sense strand
gccaugaacuggauaugca

SEQ ID NO: 700383 - RNA, 19 nt, Homo sapiens
  misc_RNA (1)...(19): siRNA sense strand
gagauggaagagaaauaua

SEQ ID NO: 700384 - RNA, 19 nt, Homo sapiens
  misc_RNA (1)...(19): siRNA sense strand
gagagauggaagagaaaua

SEQ ID NO: 700385 - RNA, 19 nt, Homo sapiens
  misc_RNA (1)...(19): siRNA sense strand
ucaaggagcagcaccagaa

SEQ ID NO: 700386 - RNA, 19 nt, Homo sapiens
  misc_RNA (1)...(19): siRNA sense strand
cagaagaagagagccauua

SEQ ID NO: 700387 - RNA, 19 nt, Homo sapiens
  misc_RNA (1)...(19): siRNA sense strand
gcggcagguuaaacucuua

SEQ ID NO: 700388 - RNA, 19 nt, Homo sapiens
  misc_RNA (1)...(19): siRNA sense strand
ggucaaguagaaucuuaua

SEQ ID NO: 700389 - RNA, 19 nt, Homo sapiens
  misc_RNA (1)...(19): siRNA sense strand
gcugagacauucuucugau

SEQ ID NO: 700390 - RNA, 19 nt, Homo sapiens
  misc_RNA (1)...(19): siRNA sense strand
agaagaaacauucagacua

SEQ ID NO: 700391 - RNA, 19 nt, Homo sapiens
  misc_RNA (1)...(19): siRNA sense strand
uggaaagacucaaucaauc

SEQ ID NO: 700392 - RNA, 19 nt, Homo sapiens
  misc_RNA (1)...(19): siRNA sense strand
gcagagaaucagguauuaa

SEQ ID NO: 700393 - RNA, 19 nt, Homo sapiens
  misc_RNA (1)...(19): siRNA sense strand
aggaagaaaugaagcaaau

SEQ ID NO: 700394 - RNA, 19 nt, Homo sapiens
  misc_RNA (1)...(19): siRNA sense strand
agucacaaguugaagaauu

SEQ ID NO: 700395 - RNA, 19 nt, Homo sapiens
  misc_RNA (1)...(19): siRNA sense strand
gagaauaggcuggugaauc

SEQ ID NO: 700396 - RNA, 19 nt, Homo sapiens
  misc_RNA (1)...(19): siRNA sense strand
aaacagauuauccgaagaa

SEQ ID NO: 700397 - RNA, 19 nt, Homo sapiens
  misc_RNA (1)...(19): siRNA sense strand
aaggucaaguagaaucuua

SEQ ID NO: 700398 - RNA, 19 nt, Homo sapiens
  misc_RNA (1)...(19): siRNA sense strand
gggauucucugaaggaaac

SEQ ID NO: 700399 - RNA, 19 nt, Homo sapiens
  misc_RNA (1)...(19): siRNA sense strand
gcaugaggccaauaaugaa

SEQ ID NO: 700400 - RNA, 19 nt, Homo sapiens
  misc_RNA (1)...(19): siRNA sense strand
ugaaggaaaccauugaaga

SEQ ID NO: 700401 - RNA, 19 nt, Homo sapiens
  misc_RNA (1)...(19): siRNA sense strand
caaaucuacgcaagaauga

SEQ ID NO: 700402 - RNA, 19 nt, Homo sapiens
  misc_RNA (1)...(19): siRNA sense strand
gcaagaaccuuuccaaugg

SEQ ID NO: 700403 - RNA, 19 nt, Homo sapiens
  misc_RNA (1)...(19): siRNA sense strand
ccaaugggcuguugaacuu

SEQ ID NO: 700404 - RNA, 19 nt, Homo sapiens
  misc_RNA (1)...(19): siRNA sense strand
caucuucucugugaauuua

SEQ ID NO: 700405 - RNA, 19 nt, Homo sapiens
  misc_RNA (1)...(19): siRNA sense strand
ccaaagggaucaggaaauu

SEQ ID NO: 700406 - RNA, 19 nt, Homo sapiens
  misc_RNA (1)...(19): siRNA sense strand
gaauuuaguucucuuucug

SEQ ID NO: 700407 - RNA, 19 nt, Homo sapiens
  misc_RNA (1)...(19): siRNA sense strand
gugcaacacugucgaaagu

SEQ ID NO: 700408 - RNA, 19 nt, Homo sapiens
  misc_RNA (1)...(19): siRNA sense strand
gccagacgcuuucccgauu

SEQ ID NO: 700409 - RNA, 19 nt, Homo sapiens
  misc_RNA (1)...(19): siRNA sense strand
ggucauggccuaccucuuc

SEQ ID NO: 700410 - RNA, 19 nt, Homo sapiens
  misc_RNA (1)...(19): siRNA sense strand
gaugugaucucugccuuuc

SEQ ID NO: 700411 - RNA, 19 nt, Homo sapiens
  misc_RNA (1)...(19): siRNA sense strand
ggaaucaggcacagaaauc

SEQ ID NO: 700412 - RNA, 19 nt, Homo sapiens
  misc_RNA (1)...(19): siRNA sense strand
ccaguuaccuucaccuucu

SEQ ID NO: 700413 - RNA, 19 nt, Homo sapiens
  misc_RNA (1)...(19): siRNA sense strand
ugaugcagcucgacuggaa

SEQ ID NO: 700414 - RNA, 19 nt, Homo sapiens
  misc_RNA (1)...(19): siRNA sense strand
aaagggaucaggaaauuga

SEQ ID NO: 700415 - RNA, 19 nt, Homo sapiens
  misc_RNA (1)...(19): siRNA sense strand
agacucuccucccucaaua

SEQ ID NO: 700416 - RNA, 19 nt, Homo sapiens
  misc_RNA (1)...(19): siRNA sense strand
gagcauggccagaauggau

SEQ ID NO: 700417 - RNA, 19 nt, Homo sapiens
  misc_RNA (1)...(19): siRNA sense strand
ucaacagauucaugaagaa

SEQ ID NO: 700418 - RNA, 19 nt, Homo sapiens
  misc_RNA (1)...(19): siRNA sense strand
ggagcaauaugggaaaugg

SEQ ID NO: 700419 - RNA, 19 nt, Homo sapiens
  misc_RNA (1)...(19): siRNA sense strand
acucaagcaucaacagauu

SEQ ID NO: 700420 - RNA, 19 nt, Homo sapiens
  misc_RNA (1)...(19): siRNA sense strand
guaaagccauccagaacac

SEQ ID NO: 700421 - RNA, 19 nt, Homo sapiens
  misc_RNA (1)...(19): siRNA sense strand
gagcaagaaccuuuccaau

SEQ ID NO: 700422 - RNA, 19 nt, Homo sapiens
  misc_RNA (1)...(19): siRNA sense strand
gaaagugucaugcggaaaa

SEQ ID NO: 700423 - RNA, 19 nt, Homo sapiens
  misc_RNA (1)...(19): siRNA sense strand
gcacccaccugagcagcuu

SEQ ID NO: 700424 - RNA, 19 nt, Homo sapiens
  misc_RNA (1)...(19): siRNA sense strand
ucagugaucccgagacaga

SEQ ID NO: 700425 - RNA, 19 nt, Homo sapiens
  misc_RNA (1)...(19): siRNA sense strand
ccuccaggccucaccuuua

SEQ ID NO: 700426 - RNA, 19 nt, Homo sapiens
  misc_RNA (1)...(19): siRNA sense strand
ucuccucccucaauaguga

SEQ ID NO: 700427 - RNA, 19 nt, Homo sapiens
  misc_RNA (1)...(19): siRNA sense strand
ggagacuugugacgacauc

SEQ ID NO: 700428 - RNA, 19 nt, Homo sapiens
  misc_RNA (1)...(19): siRNA sense strand
ccgcgucuuucucgucuuu

SEQ ID NO: 700429 - RNA, 19 nt, Homo sapiens
  misc_RNA (1)...(19): siRNA sense strand
ggccugagcaagaaccuuu

SEQ ID NO: 700430 - RNA, 19 nt, Homo sapiens
  misc_RNA (1)...(19): siRNA sense strand
gcacaauaggcaccagaga

SEQ ID NO: 700431 - RNA, 19 nt, Homo sapiens
  misc_RNA (1)...(19): siRNA sense strand
ggacuccucgugugucaau

SEQ ID NO: 700432 - RNA, 19 nt, Homo sapiens
  misc_RNA (1)...(19): siRNA sense strand
ucacuuuucuccuguguaa

SEQ ID NO: 700433 - RNA, 19 nt, Homo sapiens
  misc_RNA (1)...(19): siRNA sense strand
ggaccugucugcgccaucu

SEQ ID NO: 700434 - RNA, 19 nt, Homo sapiens
  misc_RNA (1)...(19): siRNA sense strand
cgagaacacgugucaagau

SEQ ID NO: 700435 - RNA, 19 nt, Homo sapiens
  misc_RNA (1)...(19): siRNA sense strand
gccgguaccuugcacuauc

SEQ ID NO: 700436 - RNA, 19 nt, Homo sapiens
  misc_RNA (1)...(19): siRNA sense strand
guucagugaucccgagaca

SEQ ID NO: 700437 - RNA, 19 nt, Homo sapiens
  misc_RNA (1)...(19): siRNA sense strand
cuccaggccucaccuuuau

SEQ ID NO: 700438 - RNA, 19 nt, Homo sapiens
  misc_RNA (1)...(19): siRNA sense strand
aaccucagcuccccaguua

SEQ ID NO: 700439 - RNA, 19 nt, Homo sapiens
  misc_RNA (1)...(19): siRNA sense strand
uaugggaaaugguccaaag

SEQ ID NO: 700440 - RNA, 19 nt, Homo sapiens
  misc_RNA (1)...(19): siRNA sense strand
ucuggugacucucuggauu

SEQ ID NO: 700441 - RNA, 19 nt, Homo sapiens
  misc_RNA (1)...(19): siRNA sense strand
guccacagccagacgcuuu

SEQ ID NO: 700442 - RNA, 19 nt, Homo sapiens
  misc_RNA (1)...(19): siRNA sense strand
ccagacgcuuucccgauuc

SEQ ID NO: 700443 - RNA, 19 nt, Homo sapiens
  misc_RNA (1)...(19): siRNA sense strand
aucaacagauucaugaaga

SEQ ID NO: 700444 - RNA, 19 nt, Homo sapiens
  misc_RNA (1)...(19): siRNA sense strand
gucaacuacucaagcauca

SEQ ID NO: 700445 - RNA, 19 nt, Homo sapiens
  misc_RNA (1)...(19): siRNA sense strand
ccucauggcccacuacgau

SEQ ID NO: 700446 - RNA, 19 nt, Homo sapiens
  misc_RNA (1)...(19): siRNA sense strand
caccauccagagcaucuua

SEQ ID NO: 700447 - RNA, 19 nt, Homo sapiens
  misc_RNA (1)...(19): siRNA sense strand
cagaauggauguggucacu

SEQ ID NO: 700448 - RNA, 19 nt, Homo sapiens
  misc_RNA (1)...(19): siRNA sense strand
aaacugagucugagaugca

SEQ ID NO: 700449 - RNA, 19 nt, Homo sapiens
  misc_RNA (1)...(19): siRNA sense strand
gccuaccucuucaccauca

SEQ ID NO: 700450 - RNA, 19 nt, Homo sapiens
  misc_RNA (1)...(19): siRNA sense strand
guaccuugcacuaucucua

SEQ ID NO: 700451 - RNA, 19 nt, Homo sapiens
  misc_RNA (1)...(19): siRNA sense strand
cagcuuugccguccucaug

SEQ ID NO: 700452 - RNA, 19 nt, Homo sapiens
  misc_RNA (1)...(19): siRNA sense strand
gcagggugucuucaucuuc

SEQ ID NO: 700453 - RNA, 19 nt, Homo sapiens
  misc_RNA (1)...(19): siRNA sense strand
gcgagaacacgugucaaga

SEQ ID NO: 700454 - RNA, 19 nt, Homo sapiens
  misc_RNA (1)...(19): siRNA sense strand
caaagggaucaggaaauug

SEQ ID NO: 700455 - RNA, 19 nt, Homo sapiens
  misc_RNA (1)...(19): siRNA sense strand
caucaacgagugugcaaca

SEQ ID NO: 700456 - RNA, 19 nt, Homo sapiens
  misc_RNA (1)...(19): siRNA sense strand
ugugaucucugccuuucug

SEQ ID NO: 700457 - RNA, 19 nt, Homo sapiens
  misc_RNA (1)...(19): siRNA sense strand
agcaagaaccuuuccaaug

SEQ ID NO: 700458 - RNA, 19 nt, Homo sapiens
  misc_RNA (1)...(19): siRNA sense strand
acaauaggcaccagagaca

SEQ ID NO: 700459 - RNA, 19 nt, Homo sapiens
  misc_RNA (1)...(19): siRNA sense strand
gccaucuucucugugaauu

SEQ ID NO: 700460 - RNA, 19 nt, Homo sapiens
  misc_RNA (1)...(19): siRNA sense strand
ccagaaaagggauuuauau

SEQ ID NO: 700461 - RNA, 19 nt, Homo sapiens
  misc_RNA (1)...(19): siRNA sense strand
guggucaacuacucaagca

SEQ ID NO: 700462 - RNA, 19 nt, Homo sapiens
  misc_RNA (1)...(19): siRNA sense strand
uggauggccuagaggaugu

SEQ ID NO: 700463 - RNA, 19 nt, Homo sapiens
  misc_RNA (1)...(19): siRNA sense strand
caacagauucaugaagaag

SEQ ID NO: 700464 - RNA, 19 nt, Homo sapiens
  misc_RNA (1)...(19): siRNA sense strand
ucaagcaucaacagauuca

SEQ ID NO: 700465 - RNA, 19 nt, Homo sapiens
  misc_RNA (1)...(19): siRNA sense strand
gaaucaggcacagaaaucu

SEQ ID NO: 700466 - RNA, 19 nt, Homo sapiens
  misc_RNA (1)...(19): siRNA sense strand
ggaggugcagaagcaagua

SEQ ID NO: 700467 - RNA, 19 nt, Homo sapiens
  misc_RNA (1)...(19): siRNA sense strand
gcagguccgggagcaauau

SEQ ID NO: 700468 - RNA, 19 nt, Homo sapiens
  misc_RNA (1)...(19): siRNA sense strand
agucugagaugcacacacu

SEQ ID NO: 700469 - RNA, 19 nt, Homo sapiens
  misc_RNA (1)...(19): siRNA sense strand
gguccaaagggaucaggaa

SEQ ID NO: 700470 - RNA, 19 nt, Homo sapiens
  misc_RNA (1)...(19): siRNA sense strand
agaaggugcucugugucuu

SEQ ID NO: 700471 - RNA, 19 nt, Homo sapiens
  misc_RNA (1)...(19): siRNA sense strand
guccaaagggaucaggaaa

SEQ ID NO: 700472 - RNA, 19 nt, Homo sapiens
  misc_RNA (1)...(19): siRNA sense strand
gugacucucuggauuuuga

SEQ ID NO: 700473 - RNA, 19 nt, Homo sapiens
  misc_RNA (1)...(19): siRNA sense strand
caacuacucaagcaucaac

SEQ ID NO: 700474 - RNA, 19 nt, Homo sapiens
  misc_RNA (1)...(19): siRNA sense strand
ggaccugggcagagacuac

SEQ ID NO: 700475 - RNA, 19 nt, Homo sapiens
  misc_RNA (1)...(19): siRNA sense strand
uggccuaccucuucaccau

SEQ ID NO: 700476 - RNA, 19 nt, Homo sapiens
  misc_RNA (1)...(19): siRNA sense strand
gucauggccuaccucuuca

SEQ ID NO: 700477 - RNA, 19 nt, Homo sapiens
  misc_RNA (1)...(19): siRNA sense strand
ucucgucuuucucgcauuc

SEQ ID NO: 700478 - RNA, 19 nt, Homo sapiens
  misc_RNA (1)...(19): siRNA sense strand
caucaacagauucaugaag

SEQ ID NO: 700479 - RNA, 19 nt, Homo sapiens
  misc_RNA (1)...(19): siRNA sense strand
gcaucaacagauucaugaa

SEQ ID NO: 700480 - RNA, 19 nt, Homo sapiens
  misc_RNA (1)...(19): siRNA sense strand
ucaagaaugagagcgagaa

SEQ ID NO: 700481 - RNA, 19 nt, Homo sapiens
  misc_RNA (1)...(19): siRNA sense strand
cagacucuccucccucaau

SEQ ID NO: 700482 - RNA, 19 nt, Homo sapiens
  misc_RNA (1)...(19): siRNA sense strand
aaggugcugugcuccauca

SEQ ID NO: 700483 - RNA, 19 nt, Homo sapiens
  misc_RNA (1)...(19): siRNA sense strand
cacaggcugcagcacaaua

SEQ ID NO: 700484 - RNA, 19 nt, Homo sapiens
  misc_RNA (1)...(19): siRNA sense strand
gcaacaacgacacccaaaa

SEQ ID NO: 700485 - RNA, 19 nt, Homo sapiens
  misc_RNA (1)...(19): siRNA sense strand
gaaaacugagucugagaug

SEQ ID NO: 700486 - RNA, 19 nt, Homo sapiens
  misc_RNA (1)...(19): siRNA sense strand
cuacucaagcaucaacaga

SEQ ID NO: 700487 - RNA, 19 nt, Homo sapiens
  misc_RNA (1)...(19): siRNA sense strand
gcaagaaccuuuccaaugg

SEQ ID NO: 700488 - RNA, 19 nt, Homo sapiens
  misc_RNA (1)...(19): siRNA sense strand
ccaaugggcuguugaacuu

SEQ ID NO: 700489 - RNA, 19 nt, Homo sapiens
  misc_RNA (1)...(19): siRNA sense strand
caucuucucugugaauuua

SEQ ID NO: 700490 - RNA, 19 nt, Homo sapiens
  misc_RNA (1)...(19): siRNA sense strand
ccaaagggaucaggaaauu

SEQ ID NO: 700491 - RNA, 19 nt, Homo sapiens
  misc_RNA (1)...(19): siRNA sense strand
gaauuuaguucucuuucug

SEQ ID NO: 700492 - RNA, 19 nt, Homo sapiens
  misc_RNA (1)...(19): siRNA sense strand
gugcaacacugucgaaagu

SEQ ID NO: 700493 - RNA, 19 nt, Homo sapiens
  misc_RNA (1)...(19): siRNA sense strand
gccagacgcuuucccgauu

SEQ ID NO: 700494 - RNA, 19 nt, Homo sapiens
  misc_RNA (1)...(19): siRNA sense strand
ggucauggccuaccucuuc

SEQ ID NO: 700495 - RNA, 19 nt, Homo sapiens
  misc_RNA (1)...(19): siRNA sense strand
gaugugaucucugccuuuc

SEQ ID NO: 700496 - RNA, 19 nt, Homo sapiens
  misc_RNA (1)...(19): siRNA sense strand
ggaaucaggcacagaaauc

SEQ ID NO: 700497 - RNA, 19 nt, Homo sapiens
  misc_RNA (1)...(19): siRNA sense strand
ccaguuaccuucaccuucu

SEQ ID NO: 700498 - RNA, 19 nt, Homo sapiens
  misc_RNA (1)...(19): siRNA sense strand
ugaugcagcucgacuggaa

SEQ ID NO: 700499 - RNA, 19 nt, Homo sapiens
  misc_RNA (1)...(19): siRNA sense strand
aaagggaucaggaaauuga

SEQ ID NO: 700500 - RNA, 19 nt, Homo sapiens
  misc_RNA (1)...(19): siRNA sense strand
agacucuccucccucaaua

SEQ ID NO: 700501 - RNA, 19 nt, Homo sapiens
  misc_RNA (1)...(19): siRNA sense strand
gagcauggccagaauggau

SEQ ID NO: 700502 - RNA, 19 nt, Homo sapiens
  misc_RNA (1)...(19): siRNA sense strand
ucaacagauucaugaagaa

SEQ ID NO: 700503 - RNA, 19 nt, Homo sapiens
  misc_RNA (1)...(19): siRNA sense strand
ggagcaauaugggaaaugg

SEQ ID NO: 700504 - RNA, 19 nt, Homo sapiens
  misc_RNA (1)...(19): siRNA sense strand
acucaagcaucaacagauu

SEQ ID NO: 700505 - RNA, 19 nt, Homo sapiens
  misc_RNA (1)...(19): siRNA sense strand
guaaagccauccagaacac

SEQ ID NO: 700506 - RNA, 19 nt, Homo sapiens
  misc_RNA (1)...(19): siRNA sense strand
gagcaagaaccuuuccaau

SEQ ID NO: 700507 - RNA, 19 nt, Homo sapiens
  misc_RNA (1)...(19): siRNA sense strand
gaaagugucaugcggaaaa

SEQ ID NO: 700508 - RNA, 19 nt, Homo sapiens
  misc_RNA (1)...(19): siRNA sense strand
gcacccaccugagcagcuu

SEQ ID NO: 700509 - RNA, 19 nt, Homo sapiens
  misc_RNA (1)...(19): siRNA sense strand
ucagugaucccgagacaga

SEQ ID NO: 700510 - RNA, 19 nt, Homo sapiens
  misc_RNA (1)...(19): siRNA sense strand
ccuccaggccucaccuuua

SEQ ID NO: 700511 - RNA, 19 nt, Homo sapiens
  misc_RNA (1)...(19): siRNA sense strand
ucuccucccucaauaguga

SEQ ID NO: 700512 - RNA, 19 nt, Homo sapiens
  misc_RNA (1)...(19): siRNA sense strand
ggagacuugugacgacauc

SEQ ID NO: 700513 - RNA, 19 nt, Homo sapiens
  misc_RNA (1)...(19): siRNA sense strand
ccgcgucuuucucgucuuu

SEQ ID NO: 700514 - RNA, 19 nt, Homo sapiens
  misc_RNA (1)...(19): siRNA sense strand
ggccugagcaagaaccuuu

SEQ ID NO: 700515 - RNA, 19 nt, Homo sapiens
  misc_RNA (1)...(19): siRNA sense strand
gcacaauaggcaccagaga

SEQ ID NO: 700516 - RNA, 19 nt, Homo sapiens
  misc_RNA (1)...(19): siRNA sense strand
ggacuccucgugugucaau

SEQ ID NO: 700517 - RNA, 19 nt, Homo sapiens
  misc_RNA (1)...(19): siRNA sense strand
ucacuuuucuccuguguaa

SEQ ID NO: 700518 - RNA, 19 nt, Homo sapiens
  misc_RNA (1)...(19): siRNA sense strand
ggaccugucugcgccaucu

SEQ ID NO: 700519 - RNA, 19 nt, Homo sapiens
  misc_RNA (1)...(19): siRNA sense strand
cgagaacacgugucaagau

SEQ ID NO: 700520 - RNA, 19 nt, Homo sapiens
  misc_RNA (1)...(19): siRNA sense strand
gccgguaccuugcacuauc

SEQ ID NO: 700521 - RNA, 19 nt, Homo sapiens
  misc_RNA (1)...(19): siRNA sense strand
guucagugaucccgagaca

SEQ ID NO: 700522 - RNA, 19 nt, Homo sapiens
  misc_RNA (1)...(19): siRNA sense strand
cuccaggccucaccuuuau

SEQ ID NO: 700523 - RNA, 19 nt, Homo sapiens
  misc_RNA (1)...(19): siRNA sense strand
aaccucagcuccccaguua

SEQ ID NO: 700524 - RNA, 19 nt, Homo sapiens
  misc_RNA (1)...(19): siRNA sense strand
uaugggaaaugguccaaag

SEQ ID NO: 700525 - RNA, 19 nt, Homo sapiens
  misc_RNA (1)...(19): siRNA sense strand
ucuggugacucucuggauu

SEQ ID NO: 700526 - RNA, 19 nt, Homo sapiens
  misc_RNA (1)...(19): siRNA sense strand
guccacagccagacgcuuu

SEQ ID NO: 700527 - RNA, 19 nt, Homo sapiens
  misc_RNA (1)...(19): siRNA sense strand
ccagacgcuuucccgauuc

SEQ ID NO: 700528 - RNA, 19 nt, Homo sapiens
  misc_RNA (1)...(19): siRNA sense strand
aucaacagauucaugaaga

SEQ ID NO: 700529 - RNA, 19 nt, Homo sapiens
  misc_RNA (1)...(19): siRNA sense strand
gucaacuacucaagcauca

SEQ ID NO: 700530 - RNA, 19 nt, Homo sapiens
  misc_RNA (1)...(19): siRNA sense strand
ccucauggcccacuacgau

SEQ ID NO: 700531 - RNA, 19 nt, Homo sapiens
  misc_RNA (1)...(19): siRNA sense strand
caccauccagagcaucuua

SEQ ID NO: 700532 - RNA, 19 nt, Homo sapiens
  misc_RNA (1)...(19): siRNA sense strand
cagaauggauguggucacu

SEQ ID NO: 700533 - RNA, 19 nt, Homo sapiens
  misc_RNA (1)...(19): siRNA sense strand
aaacugagucugagaugca

SEQ ID NO: 700534 - RNA, 19 nt, Homo sapiens
  misc_RNA (1)...(19): siRNA sense strand
gccuaccucuucaccauca

SEQ ID NO: 700535 - RNA, 19 nt, Homo sapiens
  misc_RNA (1)...(19): siRNA sense strand
guaccuugcacuaucucua

SEQ ID NO: 700536 - RNA, 19 nt, Homo sapiens
  misc_RNA (1)...(19): siRNA sense strand
cagcuuugccguccucaug

SEQ ID NO: 700537 - RNA, 19 nt, Homo sapiens
  misc_RNA (1)...(19): siRNA sense strand
gcagggugucuucaucuuc

SEQ ID NO: 700538 - RNA, 19 nt, Homo sapiens
  misc_RNA (1)...(19): siRNA sense strand
gcgagaacacgugucaaga

SEQ ID NO: 700539 - RNA, 19 nt, Homo sapiens
  misc_RNA (1)...(19): siRNA sense strand
caaagggaucaggaaauug

SEQ ID NO: 700540 - RNA, 19 nt, Homo sapiens
  misc_RNA (1)...(19): siRNA sense strand
caucaacgagugugcaaca

SEQ ID NO: 700541 - RNA, 19 nt, Homo sapiens
  misc_RNA (1)...(19): siRNA sense strand
ugugaucucugccuuucug

SEQ ID NO: 700542 - RNA, 19 nt, Homo sapiens
  misc_RNA (1)...(19): siRNA sense strand
agcaagaaccuuuccaaug

SEQ ID NO: 700543 - RNA, 19 nt, Homo sapiens
  misc_RNA (1)...(19): siRNA sense strand
acaauaggcaccagagaca

SEQ ID NO: 700544 - RNA, 19 nt, Homo sapiens
  misc_RNA (1)...(19): siRNA sense strand
gccaucuucucugugaauu

SEQ ID NO: 700545 - RNA, 19 nt, Homo sapiens
  misc_RNA (1)...(19): siRNA sense strand
ccagaaaagggauuuauau

SEQ ID NO: 700546 - RNA, 19 nt, Homo sapiens
  misc_RNA (1)...(19): siRNA sense strand
guggucaacuacucaagca

SEQ ID NO: 700547 - RNA, 19 nt, Homo sapiens
  misc_RNA (1)...(19): siRNA sense strand
uggauggccuagaggaugu

SEQ ID NO: 700548 - RNA, 19 nt, Homo sapiens
  misc_RNA (1)...(19): siRNA sense strand
caacagauucaugaagaag

SEQ ID NO: 700549 - RNA, 19 nt, Homo sapiens
  misc_RNA (1)...(19): siRNA sense strand
ucaagcaucaacagauuca

SEQ ID NO: 700550 - RNA, 19 nt, Homo sapiens
  misc_RNA (1)...(19): siRNA sense strand
gaaucaggcacagaaaucu

SEQ ID NO: 700551 - RNA, 19 nt, Homo sapiens
  misc_RNA (1)...(19): siRNA sense strand
ggaggugcagaagcaagua

SEQ ID NO: 700552 - RNA, 19 nt, Homo sapiens
  misc_RNA (1)...(19): siRNA sense strand
gcagguccgggagcaauau

SEQ ID NO: 700553 - RNA, 19 nt, Homo sapiens
  misc_RNA (1)...(19): siRNA sense strand
agucugagaugcacacacu

SEQ ID NO: 700554 - RNA, 19 nt, Homo sapiens
  misc_RNA (1)...(19): siRNA sense strand
gguccaaagggaucaggaa

SEQ ID NO: 700555 - RNA, 19 nt, Homo sapiens
  misc_RNA (1)...(19): siRNA sense strand
agaaggugcucugugucuu

SEQ ID NO: 700556 - RNA, 19 nt, Homo sapiens
  misc_RNA (1)...(19): siRNA sense strand
guccaaagggaucaggaaa

SEQ ID NO: 700557 - RNA, 19 nt, Homo sapiens
  misc_RNA (1)...(19): siRNA sense strand
gugacucucuggauuuuga

SEQ ID NO: 700558 - RNA, 19 nt, Homo sapiens
  misc_RNA (1)...(19): siRNA sense strand
caacuacucaagcaucaac

SEQ ID NO: 700559 - RNA, 19 nt, Homo sapiens
  misc_RNA (1)...(19): siRNA sense strand
ggaccugggcagagacuac

SEQ ID NO: 700560 - RNA, 19 nt, Homo sapiens
  misc_RNA (1)...(19): siRNA sense strand
uggccuaccucuucaccau

SEQ ID NO: 700561 - RNA, 19 nt, Homo sapiens
  misc_RNA (1)...(19): siRNA sense strand
gucauggccuaccucuuca

SEQ ID NO: 700562 - RNA, 19 nt, Homo sapiens
  misc_RNA (1)...(19): siRNA sense strand
ucucgucuuucucgcauuc

SEQ ID NO: 700563 - RNA, 19 nt, Homo sapiens
  misc_RNA (1)...(19): siRNA sense strand
caucaacagauucaugaag

SEQ ID NO: 700564 - RNA, 19 nt, Homo sapiens
  misc_RNA (1)...(19): siRNA sense strand
gcaucaacagauucaugaa

SEQ ID NO: 700565 - RNA, 19 nt, Homo sapiens
  misc_RNA (1)...(19): siRNA sense strand
ucaagaaugagagcgagaa

SEQ ID NO: 700566 - RNA, 19 nt, Homo sapiens
  misc_RNA (1)...(19): siRNA sense strand
cagacucuccucccucaau

SEQ ID NO: 700567 - RNA, 19 nt, Homo sapiens
  misc_RNA (1)...(19): siRNA sense strand
aaggugcugugcuccauca

SEQ ID NO: 700568 - RNA, 19 nt, Homo sapiens
  misc_RNA (1)...(19): siRNA sense strand
cacaggcugcagcacaaua

SEQ ID NO: 700569 - RNA, 19 nt, Homo sapiens
  misc_RNA (1)...(19): siRNA sense strand
gcaacaacgacacccaaaa

SEQ ID NO: 700570 - RNA, 19 nt, Homo sapiens
  misc_RNA (1)...(19): siRNA sense strand
gaaaacugagucugagaug

SEQ ID NO: 700571 - RNA, 19 nt, Homo sapiens
  misc_RNA (1)...(19): siRNA sense strand
cuacucaagcaucaacaga

SEQ ID NO: 700572 - RNA, 19 nt, Homo sapiens
  misc_RNA (1)...(19): siRNA sense strand
gcaagaaccuuuccaaugg

SEQ ID NO: 700573 - RNA, 19 nt, Homo sapiens
  misc_RNA (1)...(19): siRNA sense strand
ccaaugggcuguugaacuu

SEQ ID NO: 700574 - RNA, 19 nt, Homo sapiens
  misc_RNA (1)...(19): siRNA sense strand
caucuucucugugaauuua

SEQ ID NO: 700575 - RNA, 19 nt, Homo sapiens
  misc_RNA (1)...(19): siRNA sense strand
ccaaagggaucaggaaauu

SEQ ID NO: 700576 - RNA, 19 nt, Homo sapiens
  misc_RNA (1)...(19): siRNA sense strand
gaauuuaguucucuuucug

SEQ ID NO: 700577 - RNA, 19 nt, Homo sapiens
  misc_RNA (1)...(19): siRNA sense strand
gugcaacacugucgaaagu

SEQ ID NO: 700578 - RNA, 19 nt, Homo sapiens
  misc_RNA (1)...(19): siRNA sense strand
gccagacgcuuucccgauu

SEQ ID NO: 700579 - RNA, 19 nt, Homo sapiens
  misc_RNA (1)...(19): siRNA sense strand
ggucauggccuaccucuuc

SEQ ID NO: 700580 - RNA, 19 nt, Homo sapiens
  misc_RNA (1)...(19): siRNA sense strand
gaugugaucucugccuuuc

SEQ ID NO: 700581 - RNA, 19 nt, Homo sapiens
  misc_RNA (1)...(19): siRNA sense strand
ggaaucaggcacagaaauc

SEQ ID NO: 700582 - RNA, 19 nt, Homo sapiens
  misc_RNA (1)...(19): siRNA sense strand
ccaguuaccuucaccuucu

SEQ ID NO: 700583 - RNA, 19 nt, Homo sapiens
  misc_RNA (1)...(19): siRNA sense strand
ugaugcagcucgacuggaa

SEQ ID NO: 700584 - RNA, 19 nt, Homo sapiens
  misc_RNA (1)...(19): siRNA sense strand
aaagggaucaggaaauuga

SEQ ID NO: 700585 - RNA, 19 nt, Homo sapiens
  misc_RNA (1)...(19): siRNA sense strand
agacucuccucccucaaua

SEQ ID NO: 700586 - RNA, 19 nt, Homo sapiens
  misc_RNA (1)...(19): siRNA sense strand
gagcauggccagaauggau

SEQ ID NO: 700587 - RNA, 19 nt, Homo sapiens
  misc_RNA (1)...(19): siRNA sense strand
ucaacagauucaugaagaa

SEQ ID NO: 700588 - RNA, 19 nt, Homo sapiens
  misc_RNA (1)...(19): siRNA sense strand
ggagcaauaugggaaaugg

SEQ ID NO: 700589 - RNA, 19 nt, Homo sapiens
  misc_RNA (1)...(19): siRNA sense strand
acucaagcaucaacagauu

SEQ ID NO: 700590 - RNA, 19 nt, Homo sapiens
  misc_RNA (1)...(19): siRNA sense strand
guaaagccauccagaacac

SEQ ID NO: 700591 - RNA, 19 nt, Homo sapiens
  misc_RNA (1)...(19): siRNA sense strand
gagcaagaaccuuuccaau

SEQ ID NO: 700592 - RNA, 19 nt, Homo sapiens
  misc_RNA (1)...(19): siRNA sense strand
gaaagugucaugcggaaaa

SEQ ID NO: 700593 - RNA, 19 nt, Homo sapiens
  misc_RNA (1)...(19): siRNA sense strand
gcacccaccugagcagcuu

SEQ ID NO: 700594 - RNA, 19 nt, Homo sapiens
  misc_RNA (1)...(19): siRNA sense strand
ucagugaucccgagacaga

SEQ ID NO: 700595 - RNA, 19 nt, Homo sapiens
  misc_RNA (1)...(19): siRNA sense strand
ccuccaggccucaccuuua

SEQ ID NO: 700596 - RNA, 19 nt, Homo sapiens
  misc_RNA (1)...(19): siRNA sense strand
ucuccucccucaauaguga

SEQ ID NO: 700597 - RNA, 19 nt, Homo sapiens
  misc_RNA (1)...(19): siRNA sense strand
ggagacuugugacgacauc

SEQ ID NO: 700598 - RNA, 19 nt, Homo sapiens
  misc_RNA (1)...(19): siRNA sense strand
ccgcgucuuucucgucuuu

SEQ ID NO: 700599 - RNA, 19 nt, Homo sapiens
  misc_RNA (1)...(19): siRNA sense strand
ggccugagcaagaaccuuu

SEQ ID NO: 700600 - RNA, 19 nt, Homo sapiens
  misc_RNA (1)...(19): siRNA sense strand
gcacaauaggcaccagaga

SEQ ID NO: 700601 - RNA, 19 nt, Homo sapiens
  misc_RNA (1)...(19): siRNA sense strand
ggacuccucgugugucaau

SEQ ID NO: 700602 - RNA, 19 nt, Homo sapiens
  misc_RNA (1)...(19): siRNA sense strand
ucacuuuucuccuguguaa

SEQ ID NO: 700603 - RNA, 19 nt, Homo sapiens
  misc_RNA (1)...(19): siRNA sense strand
ggaccugucugcgccaucu

SEQ ID NO: 700604 - RNA, 19 nt, Homo sapiens
  misc_RNA (1)...(19): siRNA sense strand
cgagaacacgugucaagau

SEQ ID NO: 700605 - RNA, 19 nt, Homo sapiens
  misc_RNA (1)...(19): siRNA sense strand
gccgguaccuugcacuauc

SEQ ID NO: 700606 - RNA, 19 nt, Homo sapiens
  misc_RNA (1)...(19): siRNA sense strand
guucagugaucccgagaca

SEQ ID NO: 700607 - RNA, 19 nt, Homo sapiens
  misc_RNA (1)...(19): siRNA sense strand
cuccaggccucaccuuuau

SEQ ID NO: 700608 - RNA, 19 nt, Homo sapiens
  misc_RNA (1)...(19): siRNA sense strand
aaccucagcuccccaguua

SEQ ID NO: 700609 - RNA, 19 nt, Homo sapiens
  misc_RNA (1)...(19): siRNA sense strand
uaugggaaaugguccaaag

SEQ ID NO: 700610 - RNA, 19 nt, Homo sapiens
  misc_RNA (1)...(19): siRNA sense strand
ucuggugacucucuggauu

SEQ ID NO: 700611 - RNA, 19 nt, Homo sapiens
  misc_RNA (1)...(19): siRNA sense strand
guccacagccagacgcuuu

SEQ ID NO: 700612 - RNA, 19 nt, Homo sapiens
  misc_RNA (1)...(19): siRNA sense strand
ccagacgcuuucccgauuc

SEQ ID NO: 700613 - RNA, 19 nt, Homo sapiens
  misc_RNA (1)...(19): siRNA sense strand
aucaacagauucaugaaga

SEQ ID NO: 700614 - RNA, 19 nt, Homo sapiens
  misc_RNA (1)...(19): siRNA sense strand
gucaacuacucaagcauca

SEQ ID NO: 700615 - RNA, 19 nt, Homo sapiens
  misc_RNA (1)...(19): siRNA sense strand
ccucauggcccacuacgau

SEQ ID NO: 700616 - RNA, 19 nt, Homo sapiens
  misc_RNA (1)...(19): siRNA sense strand
caccauccagagcaucuua

SEQ ID NO: 700617 - RNA, 19 nt, Homo sapiens
  misc_RNA (1)...(19): siRNA sense strand
cagaauggauguggucacu

SEQ ID NO: 700618 - RNA, 19 nt, Homo sapiens
  misc_RNA (1)...(19): siRNA sense strand
aaacugagucugagaugca

SEQ ID NO: 700619 - RNA, 19 nt, Homo sapiens
  misc_RNA (1)...(19): siRNA sense strand
gccuaccucuucaccauca

SEQ ID NO: 700620 - RNA, 19 nt, Homo sapiens
  misc_RNA (1)...(19): siRNA sense strand
guaccuugcacuaucucua

SEQ ID NO: 700621 - RNA, 19 nt, Homo sapiens
  misc_RNA (1)...(19): siRNA sense strand
cagcuuugccguccucaug

SEQ ID NO: 700622 - RNA, 19 nt, Homo sapiens
  misc_RNA (1)...(19): siRNA sense strand
gcagggugucuucaucuuc

SEQ ID NO: 700623 - RNA, 19 nt, Homo sapiens
  misc_RNA (1)...(19): siRNA sense strand
gcgagaacacgugucaaga

SEQ ID NO: 700624 - RNA, 19 nt, Homo sapiens
  misc_RNA (1)...(19): siRNA sense strand
caaagggaucaggaaauug

SEQ ID NO: 700625 - RNA, 19 nt, Homo sapiens
  misc_RNA (1)...(19): siRNA sense strand
caucaacgagugugcaaca

SEQ ID NO: 700626 - RNA, 19 nt, Homo sapiens
  misc_RNA (1)...(19): siRNA sense strand
ugugaucucugccuuucug

SEQ ID NO: 700627 - RNA, 19 nt, Homo sapiens
  misc_RNA (1)...(19): siRNA sense strand
agcaagaaccuuuccaaug

SEQ ID NO: 700628 - RNA, 19 nt, Homo sapiens
  misc_RNA (1)...(19): siRNA sense strand
acaauaggcaccagagaca

SEQ ID NO: 700629 - RNA, 19 nt, Homo sapiens
  misc_RNA (1)...(19): siRNA sense strand
gccaucuucucugugaauu

SEQ ID NO: 700630 - RNA, 19 nt, Homo sapiens
  misc_RNA (1)...(19): siRNA sense strand
ccagaaaagggauuuauau

SEQ ID NO: 700631 - RNA, 19 nt, Homo sapiens
  misc_RNA (1)...(19): siRNA sense strand
guggucaacuacucaagca

SEQ ID NO: 700632 - RNA, 19 nt, Homo sapiens
  misc_RNA (1)...(19): siRNA sense strand
uggauggccuagaggaugu

SEQ ID NO: 700633 - RNA, 19 nt, Homo sapiens
  misc_RNA (1)...(19): siRNA sense strand
caacagauucaugaagaag

SEQ ID NO: 700634 - RNA, 19 nt, Homo sapiens
  misc_RNA (1)...(19): siRNA sense strand
ucaagcaucaacagauuca

SEQ ID NO: 700635 - RNA, 19 nt, Homo sapiens
  misc_RNA (1)...(19): siRNA sense strand
gaaucaggcacagaaaucu

SEQ ID NO: 700636 - RNA, 19 nt, Homo sapiens
  misc_RNA (1)...(19): siRNA sense strand
ggaggugcagaagcaagua

SEQ ID NO: 700637 - RNA, 19 nt, Homo sapiens
  misc_RNA (1)...(19): siRNA sense strand
gcagguccgggagcaauau

SEQ ID NO: 700638 - RNA, 19 nt, Homo sapiens
  misc_RNA (1)...(19): siRNA sense strand
agucugagaugcacacacu

SEQ ID NO: 700639 - RNA, 19 nt, Homo sapiens
  misc_RNA (1)...(19): siRNA sense strand
gguccaaagggaucaggaa

SEQ ID NO: 700640 - RNA, 19 nt, Homo sapiens
  misc_RNA (1)...(19): siRNA sense strand
agaaggugcucugugucuu

SEQ ID NO: 700641 - RNA, 19 nt, Homo sapiens
  misc_RNA (1)...(19): siRNA sense strand
guccaaagggaucaggaaa

SEQ ID NO: 700642 - RNA, 19 nt, Homo sapiens
  misc_RNA (1)...(19): siRNA sense strand
gugacucucuggauuuuga

SEQ ID NO: 700643 - RNA, 19 nt, Homo sapiens
  misc_RNA (1)...(19): siRNA sense strand
caacuacucaagcaucaac

SEQ ID NO: 700644 - RNA, 19 nt, Homo sapiens
  misc_RNA (1)...(19): siRNA sense strand
ggaccugggcagagacuac

SEQ ID NO: 700645 - RNA, 19 nt, Homo sapiens
  misc_RNA (1)...(19): siRNA sense strand
uggccuaccucuucaccau

SEQ ID NO: 700646 - RNA, 19 nt, Homo sapiens
  misc_RNA (1)...(19): siRNA sense strand
gucauggccuaccucuuca

SEQ ID NO: 700647 - RNA, 19 nt, Homo sapiens
  misc_RNA (1)...(19): siRNA sense strand
ucucgucuuucucgcauuc

SEQ ID NO: 700648 - RNA, 19 nt, Homo sapiens
  misc_RNA (1)...(19): siRNA sense strand
caucaacagauucaugaag

SEQ ID NO: 700649 - RNA, 19 nt, Homo sapiens
  misc_RNA (1)...(19): siRNA sense strand
gcaucaacagauucaugaa

SEQ ID NO: 700650 - RNA, 19 nt, Homo sapiens
  misc_RNA (1)...(19): siRNA sense strand
ucaagaaugagagcgagaa

SEQ ID NO: 700651 - RNA, 19 nt, Homo sapiens
  misc_RNA (1)...(19): siRNA sense strand
cagacucuccucccucaau

SEQ ID NO: 700652 - RNA, 19 nt, Homo sapiens
  misc_RNA (1)...(19): siRNA sense strand
aaggugcugugcuccauca

SEQ ID NO: 700653 - RNA, 19 nt, Homo sapiens
  misc_RNA (1)...(19): siRNA sense strand
cacaggcugcagcacaaua

SEQ ID NO: 700654 - RNA, 19 nt, Homo sapiens
  misc_RNA (1)...(19): siRNA sense strand
gcaacaacgacacccaaaa

SEQ ID NO: 700655 - RNA, 19 nt, Homo sapiens
  misc_RNA (1)...(19): siRNA sense strand
gaaaacugagucugagaug

SEQ ID NO: 700656 - RNA, 19 nt, Homo sapiens
  misc_RNA (1)...(19): siRNA sense strand
cuacucaagcaucaacaga

SEQ ID NO: 700657 - RNA, 19 nt, Homo sapiens
  misc_RNA (1)...(19): siRNA sense strand
gcaagaaccuuuccaaugg

SEQ ID NO: 700658 - RNA, 19 nt, Homo sapiens
  misc_RNA (1)...(19): siRNA sense strand
ccaaugggcuguugaacuu

SEQ ID NO: 700659 - RNA, 19 nt, Homo sapiens
  misc_RNA (1)...(19): siRNA sense strand
caucuucucugugaauuua

SEQ ID NO: 700660 - RNA, 19 nt, Homo sapiens
  misc_RNA (1)...(19): siRNA sense strand
ccaaagggaucaggaaauu

SEQ ID NO: 700661 - RNA, 19 nt, Homo sapiens
  misc_RNA (1)...(19): siRNA sense strand
gaauuuaguucucuuucug

SEQ ID NO: 700662 - RNA, 19 nt, Homo sapiens
  misc_RNA (1)...(19): siRNA sense strand
gugcaacacugucgaaagu

SEQ ID NO: 700663 - RNA, 19 nt, Homo sapiens
  misc_RNA (1)...(19): siRNA sense strand
gccagacgcuuucccgauu

SEQ ID NO: 700664 - RNA, 19 nt, Homo sapiens
  misc_RNA (1)...(19): siRNA sense strand
ggucauggccuaccucuuc

SEQ ID NO: 700665 - RNA, 19 nt, Homo sapiens
  misc_RNA (1)...(19): siRNA sense strand
gaugugaucucugccuuuc

SEQ ID NO: 700666 - RNA, 19 nt, Homo sapiens
  misc_RNA (1)...(19): siRNA sense strand
ggaaucaggcacagaaauc

SEQ ID NO: 700667 - RNA, 19 nt, Homo sapiens
  misc_RNA (1)...(19): siRNA sense strand
ccaguuaccuucaccuucu

SEQ ID NO: 700668 - RNA, 19 nt, Homo sapiens
  misc_RNA (1)...(19): siRNA sense strand
ugaugcagcucgacuggaa

SEQ ID NO: 700669 - RNA, 19 nt, Homo sapiens
  misc_RNA (1)...(19): siRNA sense strand
aaagggaucaggaaauuga

SEQ ID NO: 700670 - RNA, 19 nt, Homo sapiens
  misc_RNA (1)...(19): siRNA sense strand
agacucuccucccucaaua

SEQ ID NO: 700671 - RNA, 19 nt, Homo sapiens
  misc_RNA (1)...(19): siRNA sense strand
gagcauggccagaauggau

SEQ ID NO: 700672 - RNA, 19 nt, Homo sapiens
  misc_RNA (1)...(19): siRNA sense strand
ucaacagauucaugaagaa

SEQ ID NO: 700673 - RNA, 19 nt, Homo sapiens
  misc_RNA (1)...(19): siRNA sense strand
ggagcaauaugggaaaugg

SEQ ID NO: 700674 - RNA, 19 nt, Homo sapiens
  misc_RNA (1)...(19): siRNA sense strand
acucaagcaucaacagauu

SEQ ID NO: 700675 - RNA, 19 nt, Homo sapiens
  misc_RNA (1)...(19): siRNA sense strand
guaaagccauccagaacac

SEQ ID NO: 700676 - RNA, 19 nt, Homo sapiens
  misc_RNA (1)...(19): siRNA sense strand
gagcaagaaccuuuccaau

SEQ ID NO: 700677 - RNA, 19 nt, Homo sapiens
  misc_RNA (1)...(19): siRNA sense strand
gaaagugucaugcggaaaa

SEQ ID NO: 700678 - RNA, 19 nt, Homo sapiens
  misc_RNA (1)...(19): siRNA sense strand
gcacccaccugagcagcuu

SEQ ID NO: 700679 - RNA, 19 nt, Homo sapiens
  misc_RNA (1)...(19): siRNA sense strand
ucagugaucccgagacaga

SEQ ID NO: 700680 - RNA, 19 nt, Homo sapiens
  misc_RNA (1)...(19): siRNA sense strand
ccuccaggccucaccuuua

SEQ ID NO: 700681 - RNA, 19 nt, Homo sapiens
  misc_RNA (1)...(19): siRNA sense strand
ucuccucccucaauaguga

SEQ ID NO: 700682 - RNA, 19 nt, Homo sapiens
  misc_RNA (1)...(19): siRNA sense strand
ggagacuugugacgacauc

SEQ ID NO: 700683 - RNA, 19 nt, Homo sapiens
  misc_RNA (1)...(19): siRNA sense strand
ccgcgucuuucucgucuuu

SEQ ID NO: 700684 - RNA, 19 nt, Homo sapiens
  misc_RNA (1)...(19): siRNA sense strand
ggccugagcaagaaccuuu

SEQ ID NO: 700685 - RNA, 19 nt, Homo sapiens
  misc_RNA (1)...(19): siRNA sense strand
gcacaauaggcaccagaga

SEQ ID NO: 700686 - RNA, 19 nt, Homo sapiens
  misc_RNA (1)...(19): siRNA sense strand
ggacuccucgugugucaau

SEQ ID NO: 700687 - RNA, 19 nt, Homo sapiens
  misc_RNA (1)...(19): siRNA sense strand
ucacuuuucuccuguguaa

SEQ ID NO: 700688 - RNA, 19 nt, Homo sapiens
  misc_RNA (1)...(19): siRNA sense strand
ggaccugucugcgccaucu

SEQ ID NO: 700689 - RNA, 19 nt, Homo sapiens
  misc_RNA (1)...(19): siRNA sense strand
cgagaacacgugucaagau

SEQ ID NO: 700690 - RNA, 19 nt, Homo sapiens
  misc_RNA (1)...(19): siRNA sense strand
gccgguaccuugcacuauc

SEQ ID NO: 700691 - RNA, 19 nt, Homo sapiens
  misc_RNA (1)...(19): siRNA sense strand
guucagugaucccgagaca

SEQ ID NO: 700692 - RNA, 19 nt, Homo sapiens
  misc_RNA (1)...(19): siRNA sense strand
cuccaggccucaccuuuau

SEQ ID NO: 700693 - RNA, 19 nt, Homo sapiens
  misc_RNA (1)...(19): siRNA sense strand
aaccucagcuccccaguua

SEQ ID NO: 700694 - RNA, 19 nt, Homo sapiens
  misc_RNA (1)...(19): siRNA sense strand
uaugggaaaugguccaaag

SEQ ID NO: 700695 - RNA, 19 nt, Homo sapiens
  misc_RNA (1)...(19): siRNA sense strand
ucuggugacucucuggauu

SEQ ID NO: 700696 - RNA, 19 nt, Homo sapiens
  misc_RNA (1)...(19): siRNA sense strand
guccacagccagacgcuuu

SEQ ID NO: 700697 - RNA, 19 nt, Homo sapiens
  misc_RNA (1)...(19): siRNA sense strand
ccagacgcuuucccgauuc

SEQ ID NO: 700698 - RNA, 19 nt, Homo sapiens
  misc_RNA (1)...(19): siRNA sense strand
aucaacagauucaugaaga

SEQ ID NO: 700699 - RNA, 19 nt, Homo sapiens
  misc_RNA (1)...(19): siRNA sense strand
gucaacuacucaagcauca

SEQ ID NO: 700700 - RNA, 19 nt, Homo sapiens
  misc_RNA (1)...(19): siRNA sense strand
ccucauggcccacuacgau

SEQ ID NO: 700701 - RNA, 19 nt, Homo sapiens
  misc_RNA (1)...(19): siRNA sense strand
caccauccagagcaucuua

SEQ ID NO: 700702 - RNA, 19 nt, Homo sapiens
  misc_RNA (1)...(19): siRNA sense strand
cagaauggauguggucacu

SEQ ID NO: 700703 - RNA, 19 nt, Homo sapiens
  misc_RNA (1)...(19): siRNA sense strand
aaacugagucugagaugca

SEQ ID NO: 700704 - RNA, 19 nt, Homo sapiens
  misc_RNA (1)...(19): siRNA sense strand
gccuaccucuucaccauca

SEQ ID NO: 700705 - RNA, 19 nt, Homo sapiens
  misc_RNA (1)...(19): siRNA sense strand
guaccuugcacuaucucua

SEQ ID NO: 700706 - RNA, 19 nt, Homo sapiens
  misc_RNA (1)...(19): siRNA sense strand
cagcuuugccguccucaug

SEQ ID NO: 700707 - RNA, 19 nt, Homo sapiens
  misc_RNA (1)...(19): siRNA sense strand
gcagggugucuucaucuuc

SEQ ID NO: 700708 - RNA, 19 nt, Homo sapiens
  misc_RNA (1)...(19): siRNA sense strand
gcgagaacacgugucaaga

SEQ ID NO: 700709 - RNA, 19 nt, Homo sapiens
  misc_RNA (1)...(19): siRNA sense strand
caaagggaucaggaaauug

SEQ ID NO: 700710 - RNA, 19 nt, Homo sapiens
  misc_RNA (1)...(19): siRNA sense strand
caucaacgagugugcaaca

SEQ ID NO: 700711 - RNA, 19 nt, Homo sapiens
  misc_RNA (1)...(19): siRNA sense strand
ugugaucucugccuuucug

SEQ ID NO: 700712 - RNA, 19 nt, Homo sapiens
  misc_RNA (1)...(19): siRNA sense strand
agcaagaaccuuuccaaug

SEQ ID NO: 700713 - RNA, 19 nt, Homo sapiens
  misc_RNA (1)...(19): siRNA sense strand
acaauaggcaccagagaca

SEQ ID NO: 700714 - RNA, 19 nt, Homo sapiens
  misc_RNA (1)...(19): siRNA sense strand
gccaucuucucugugaauu

SEQ ID NO: 700715 - RNA, 19 nt, Homo sapiens
  misc_RNA (1)...(19): siRNA sense strand
ccagaaaagggauuuauau

SEQ ID NO: 700716 - RNA, 19 nt, Homo sapiens
  misc_RNA (1)...(19): siRNA sense strand
guggucaacuacucaagca

SEQ ID NO: 700717 - RNA, 19 nt, Homo sapiens
  misc_RNA (1)...(19): siRNA sense strand
uggauggccuagaggaugu

SEQ ID NO: 700718 - RNA, 19 nt, Homo sapiens
  misc_RNA (1)...(19): siRNA sense strand
caacagauucaugaagaag

SEQ ID NO: 700719 - RNA, 19 nt, Homo sapiens
  misc_RNA (1)...(19): siRNA sense strand
ucaagcaucaacagauuca

SEQ ID NO: 700720 - RNA, 19 nt, Homo sapiens
  misc_RNA (1)...(19): siRNA sense strand
gaaucaggcacagaaaucu

SEQ ID NO: 700721 - RNA, 19 nt, Homo sapiens
  misc_RNA (1)...(19): siRNA sense strand
ggaggugcagaagcaagua

SEQ ID NO: 700722 - RNA, 19 nt, Homo sapiens
  misc_RNA (1)...(19): siRNA sense strand
gcagguccgggagcaauau

SEQ ID NO: 700723 - RNA, 19 nt, Homo sapiens
  misc_RNA (1)...(19): siRNA sense strand
agucugagaugcacacacu

SEQ ID NO: 700724 - RNA, 19 nt, Homo sapiens
  misc_RNA (1)...(19): siRNA sense strand
gguccaaagggaucaggaa

SEQ ID NO: 700725 - RNA, 19 nt, Homo sapiens
  misc_RNA (1)...(19): siRNA sense strand
agaaggugcucugugucuu

SEQ ID NO: 700726 - RNA, 19 nt, Homo sapiens
  misc_RNA (1)...(19): siRNA sense strand
guccaaagggaucaggaaa

SEQ ID NO: 700727 - RNA, 19 nt, Homo sapiens
  misc_RNA (1)...(19): siRNA sense strand
gugacucucuggauuuuga

SEQ ID NO: 700728 - RNA, 19 nt, Homo sapiens
  misc_RNA (1)...(19): siRNA sense strand
caacuacucaagcaucaac

SEQ ID NO: 700729 - RNA, 19 nt, Homo sapiens
  misc_RNA (1)...(19): siRNA sense strand
ggaccugggcagagacuac

SEQ ID NO: 700730 - RNA, 19 nt, Homo sapiens
  misc_RNA (1)...(19): siRNA sense strand
uggccuaccucuucaccau

SEQ ID NO: 700731 - RNA, 19 nt, Homo sapiens
  misc_RNA (1)...(19): siRNA sense strand
gucauggccuaccucuuca

SEQ ID NO: 700732 - RNA, 19 nt, Homo sapiens
  misc_RNA (1)...(19): siRNA sense strand
ucucgucuuucucgcauuc

SEQ ID NO: 700733 - RNA, 19 nt, Homo sapiens
  misc_RNA (1)...(19): siRNA sense strand
caucaacagauucaugaag

SEQ ID NO: 700734 - RNA, 19 nt, Homo sapiens
  misc_RNA (1)...(19): siRNA sense strand
gcaucaacagauucaugaa

SEQ ID NO: 700735 - RNA, 19 nt, Homo sapiens
  misc_RNA (1)...(19): siRNA sense strand
ucaagaaugagagcgagaa

SEQ ID NO: 700736 - RNA, 19 nt, Homo sapiens
  misc_RNA (1)...(19): siRNA sense strand
cagacucuccucccucaau

SEQ ID NO: 700737 - RNA, 19 nt, Homo sapiens
  misc_RNA (1)...(19): siRNA sense strand
aaggugcugugcuccauca

SEQ ID NO: 700738 - RNA, 19 nt, Homo sapiens
  misc_RNA (1)...(19): siRNA sense strand
cacaggcugcagcacaaua

SEQ ID NO: 700739 - RNA, 19 nt, Homo sapiens
  misc_RNA (1)...(19): siRNA sense strand
gcaacaacgacacccaaaa

SEQ ID NO: 700740 - RNA, 19 nt, Homo sapiens
  misc_RNA (1)...(19): siRNA sense strand
gaaaacugagucugagaug

SEQ ID NO: 700741 - RNA, 19 nt, Homo sapiens
  misc_RNA (1)...(19): siRNA sense strand
cuacucaagcaucaacaga

SEQ ID NO: 700742 - RNA, 19 nt, Homo sapiens
  misc_RNA (1)...(19): siRNA sense strand
gcaagaaccuuuccaaugg

SEQ ID NO: 700743 - RNA, 19 nt, Homo sapiens
  misc_RNA (1)...(19): siRNA sense strand
ccaaugggcuguugaacuu

SEQ ID NO: 700744 - RNA, 19 nt, Homo sapiens
  misc_RNA (1)...(19): siRNA sense strand
caucuucucugugaauuua

SEQ ID NO: 700745 - RNA, 19 nt, Homo sapiens
  misc_RNA (1)...(19): siRNA sense strand
ccaaagggaucaggaaauu

SEQ ID NO: 700746 - RNA, 19 nt, Homo sapiens
  misc_RNA (1)...(19): siRNA sense strand
gaauuuaguucucuuucug

SEQ ID NO: 700747 - RNA, 19 nt, Homo sapiens
  misc_RNA (1)...(19): siRNA sense strand
gugcaacacugucgaaagu

SEQ ID NO: 700748 - RNA, 19 nt, Homo sapiens
  misc_RNA (1)...(19): siRNA sense strand
gccagacgcuuucccgauu

SEQ ID NO: 700749 - RNA, 19 nt, Homo sapiens
  misc_RNA (1)...(19): siRNA sense strand
ggucauggccuaccucuuc

SEQ ID NO: 700750 - RNA, 19 nt, Homo sapiens
  misc_RNA (1)...(19): siRNA sense strand
gaugugaucucugccuuuc

SEQ ID NO: 700751 - RNA, 19 nt, Homo sapiens
  misc_RNA (1)...(19): siRNA sense strand
ggaaucaggcacagaaauc

SEQ ID NO: 700752 - RNA, 19 nt, Homo sapiens
  misc_RNA (1)...(19): siRNA sense strand
ccaguuaccuucaccuucu

SEQ ID NO: 700753 - RNA, 19 nt, Homo sapiens
  misc_RNA (1)...(19): siRNA sense strand
ugaugcagcucgacuggaa

SEQ ID NO: 700754 - RNA, 19 nt, Homo sapiens
  misc_RNA (1)...(19): siRNA sense strand
aaagggaucaggaaauuga

SEQ ID NO: 700755 - RNA, 19 nt, Homo sapiens
  misc_RNA (1)...(19): siRNA sense strand
agacucuccucccucaaua

SEQ ID NO: 700756 - RNA, 19 nt, Homo sapiens
  misc_RNA (1)...(19): siRNA sense strand
gagcauggccagaauggau

SEQ ID NO: 700757 - RNA, 19 nt, Homo sapiens
  misc_RNA (1)...(19): siRNA sense strand
ucaacagauucaugaagaa

SEQ ID NO: 700758 - RNA, 19 nt, Homo sapiens
  misc_RNA (1)...(19): siRNA sense strand
ggagcaauaugggaaaugg

SEQ ID NO: 700759 - RNA, 19 nt, Homo sapiens
  misc_RNA (1)...(19): siRNA sense strand
acucaagcaucaacagauu

SEQ ID NO: 700760 - RNA, 19 nt, Homo sapiens
  misc_RNA (1)...(19): siRNA sense strand
guaaagccauccagaacac

SEQ ID NO: 700761 - RNA, 19 nt, Homo sapiens
  misc_RNA (1)...(19): siRNA sense strand
gagcaagaaccuuuccaau

SEQ ID NO: 700762 - RNA, 19 nt, Homo sapiens
  misc_RNA (1)...(19): siRNA sense strand
gaaagugucaugcggaaaa

SEQ ID NO: 700763 - RNA, 19 nt, Homo sapiens
  misc_RNA (1)...(19): siRNA sense strand
gcacccaccugagcagcuu

SEQ ID NO: 700764 - RNA, 19 nt, Homo sapiens
  misc_RNA (1)...(19): siRNA sense strand
ucagugaucccgagacaga

SEQ ID NO: 700765 - RNA, 19 nt, Homo sapiens
  misc_RNA (1)...(19): siRNA sense strand
ccuccaggccucaccuuua

SEQ ID NO: 700766 - RNA, 19 nt, Homo sapiens
  misc_RNA (1)...(19): siRNA sense strand
ucuccucccucaauaguga

SEQ ID NO: 700767 - RNA, 19 nt, Homo sapiens
  misc_RNA (1)...(19): siRNA sense strand
ggagacuugugacgacauc

SEQ ID NO: 700768 - RNA, 19 nt, Homo sapiens
  misc_RNA (1)...(19): siRNA sense strand
ccgcgucuuucucgucuuu

SEQ ID NO: 700769 - RNA, 19 nt, Homo sapiens
  misc_RNA (1)...(19): siRNA sense strand
ggccugagcaagaaccuuu

SEQ ID NO: 700770 - RNA, 19 nt, Homo sapiens
  misc_RNA (1)...(19): siRNA sense strand
gcacaauaggcaccagaga

SEQ ID NO: 700771 - RNA, 19 nt, Homo sapiens
  misc_RNA (1)...(19): siRNA sense strand
ggacuccucgugugucaau

SEQ ID NO: 700772 - RNA, 19 nt, Homo sapiens
  misc_RNA (1)...(19): siRNA sense strand
ucacuuuucuccuguguaa

SEQ ID NO: 700773 - RNA, 19 nt, Homo sapiens
  misc_RNA (1)...(19): siRNA sense strand
ggaccugucugcgccaucu

SEQ ID NO: 700774 - RNA, 19 nt, Homo sapiens
  misc_RNA (1)...(19): siRNA sense strand
cgagaacacgugucaagau

SEQ ID NO: 700775 - RNA, 19 nt, Homo sapiens
  misc_RNA (1)...(19): siRNA sense strand
gccgguaccuugcacuauc

SEQ ID NO: 700776 - RNA, 19 nt, Homo sapiens
  misc_RNA (1)...(19): siRNA sense strand
guucagugaucccgagaca

SEQ ID NO: 700777 - RNA, 19 nt, Homo sapiens
  misc_RNA (1)...(19): siRNA sense strand
cuccaggccucaccuuuau

SEQ ID NO: 700778 - RNA, 19 nt, Homo sapiens
  misc_RNA (1)...(19): siRNA sense strand
aaccucagcuccccaguua

SEQ ID NO: 700779 - RNA, 19 nt, Homo sapiens
  misc_RNA (1)...(19): siRNA sense strand
uaugggaaaugguccaaag

SEQ ID NO: 700780 - RNA, 19 nt, Homo sapiens
  misc_RNA (1)...(19): siRNA sense strand
ucuggugacucucuggauu

SEQ ID NO: 700781 - RNA, 19 nt, Homo sapiens
  misc_RNA (1)...(19): siRNA sense strand
guccacagccagacgcuuu

SEQ ID NO: 700782 - RNA, 19 nt, Homo sapiens
  misc_RNA (1)...(19): siRNA sense strand
ccagacgcuuucccgauuc

SEQ ID NO: 700783 - RNA, 19 nt, Homo sapiens
  misc_RNA (1)...(19): siRNA sense strand
aucaacagauucaugaaga

SEQ ID NO: 700784 - RNA, 19 nt, Homo sapiens
  misc_RNA (1)...(19): siRNA sense strand
gucaacuacucaagcauca

SEQ ID NO: 700785 - RNA, 19 nt, Homo sapiens
  misc_RNA (1)...(19): siRNA sense strand
ccucauggcccacuacgau

SEQ ID NO: 700786 - RNA, 19 nt, Homo sapiens
  misc_RNA (1)...(19): siRNA sense strand
caccauccagagcaucuua

SEQ ID NO: 700787 - RNA, 19 nt, Homo sapiens
  misc_RNA (1)...(19): siRNA sense strand
cagaauggauguggucacu

SEQ ID NO: 700788 - RNA, 19 nt, Homo sapiens
  misc_RNA (1)...(19): siRNA sense strand
aaacugagucugagaugca

SEQ ID NO: 700789 - RNA, 19 nt, Homo sapiens
  misc_RNA (1)...(19): siRNA sense strand
gccuaccucuucaccauca

SEQ ID NO: 700790 - RNA, 19 nt, Homo sapiens
  misc_RNA (1)...(19): siRNA sense strand
guaccuugcacuaucucua

SEQ ID NO: 700791 - RNA, 19 nt, Homo sapiens
  misc_RNA (1)...(19): siRNA sense strand
cagcuuugccguccucaug

SEQ ID NO: 700792 - RNA, 19 nt, Homo sapiens
  misc_RNA (1)...(19): siRNA sense strand
gcagggugucuucaucuuc

SEQ ID NO: 700793 - RNA, 19 nt, Homo sapiens
  misc_RNA (1)...(19): siRNA sense strand
gcgagaacacgugucaaga

SEQ ID NO: 700794 - RNA, 19 nt, Homo sapiens
  misc_RNA (1)...(19): siRNA sense strand
caaagggaucaggaaauug

SEQ ID NO: 700795 - RNA, 19 nt, Homo sapiens
  misc_RNA (1)...(19): siRNA sense strand
caucaacgagugugcaaca

SEQ ID NO: 700796 - RNA, 19 nt, Homo sapiens
  misc_RNA (1)...(19): siRNA sense strand
ugugaucucugccuuucug

SEQ ID NO: 700797 - RNA, 19 nt, Homo sapiens
  misc_RNA (1)...(19): siRNA sense strand
agcaagaaccuuuccaaug

SEQ ID NO: 700798 - RNA, 19 nt, Homo sapiens
  misc_RNA (1)...(19): siRNA sense strand
acaauaggcaccagagaca

SEQ ID NO: 700799 - RNA, 19 nt, Homo sapiens
  misc_RNA (1)...(19): siRNA sense strand
gccaucuucucugugaauu

SEQ ID NO: 700800 - RNA, 19 nt, Homo sapiens
  misc_RNA (1)...(19): siRNA sense strand
ccagaaaagggauuuauau

SEQ ID NO: 700801 - RNA, 19 nt, Homo sapiens
  misc_RNA (1)...(19): siRNA sense strand
guggucaacuacucaagca

SEQ ID NO: 700802 - RNA, 19 nt, Homo sapiens
  misc_RNA (1)...(19): siRNA sense strand
uggauggccuagaggaugu

SEQ ID NO: 700803 - RNA, 19 nt, Homo sapiens
  misc_RNA (1)...(19): siRNA sense strand
caacagauucaugaagaag

SEQ ID NO: 700804 - RNA, 19 nt, Homo sapiens
  misc_RNA (1)...(19): siRNA sense strand
ucaagcaucaacagauuca

SEQ ID NO: 700805 - RNA, 19 nt, Homo sapiens
  misc_RNA (1)...(19): siRNA sense strand
gaaucaggcacagaaaucu

SEQ ID NO: 700806 - RNA, 19 nt, Homo sapiens
  misc_RNA (1)...(19): siRNA sense strand
ggaggugcagaagcaagua

SEQ ID NO: 700807 - RNA, 19 nt, Homo sapiens
  misc_RNA (1)...(19): siRNA sense strand
gcagguccgggagcaauau

SEQ ID NO: 700808 - RNA, 19 nt, Homo sapiens
  misc_RNA (1)...(19): siRNA sense strand
agucugagaugcacacacu

SEQ ID NO: 700809 - RNA, 19 nt, Homo sapiens
  misc_RNA (1)...(19): siRNA sense strand
gguccaaagggaucaggaa

SEQ ID NO: 700810 - RNA, 19 nt, Homo sapiens
  misc_RNA (1)...(19): siRNA sense strand
agaaggugcucugugucuu

SEQ ID NO: 700811 - RNA, 19 nt, Homo sapiens
  misc_RNA (1)...(19): siRNA sense strand
guccaaagggaucaggaaa

SEQ ID NO: 700812 - RNA, 19 nt, Homo sapiens
  misc_RNA (1)...(19): siRNA sense strand
gugacucucuggauuuuga

SEQ ID NO: 700813 - RNA, 19 nt, Homo sapiens
  misc_RNA (1)...(19): siRNA sense strand
caacuacucaagcaucaac

SEQ ID NO: 700814 - RNA, 19 nt, Homo sapiens
  misc_RNA (1)...(19): siRNA sense strand
ggaccugggcagagacuac

SEQ ID NO: 700815 - RNA, 19 nt, Homo sapiens
  misc_RNA (1)...(19): siRNA sense strand
uggccuaccucuucaccau

SEQ ID NO: 700816 - RNA, 19 nt, Homo sapiens
  misc_RNA (1)...(19): siRNA sense strand
gucauggccuaccucuuca

SEQ ID NO: 700817 - RNA, 19 nt, Homo sapiens
  misc_RNA (1)...(19): siRNA sense strand
ucucgucuuucucgcauuc

SEQ ID NO: 700818 - RNA, 19 nt, Homo sapiens
  misc_RNA (1)...(19): siRNA sense strand
caucaacagauucaugaag

SEQ ID NO: 700819 - RNA, 19 nt, Homo sapiens
  misc_RNA (1)...(19): siRNA sense strand
gcaucaacagauucaugaa

SEQ ID NO: 700820 - RNA, 19 nt, Homo sapiens
  misc_RNA (1)...(19): siRNA sense strand
ucaagaaugagagcgagaa

SEQ ID NO: 700821 - RNA, 19 nt, Homo sapiens
  misc_RNA (1)...(19): siRNA sense strand
cagacucuccucccucaau

SEQ ID NO: 700822 - RNA, 19 nt, Homo sapiens
  misc_RNA (1)...(19): siRNA sense strand
aaggugcugugcuccauca

SEQ ID NO: 700823 - RNA, 19 nt, Homo sapiens
  misc_RNA (1)...(19): siRNA sense strand
cacaggcugcagcacaaua

SEQ ID NO: 700824 - RNA, 19 nt, Homo sapiens
  misc_RNA (1)...(19): siRNA sense strand
gcaacaacgacacccaaaa

SEQ ID NO: 700825 - RNA, 19 nt, Homo sapiens
  misc_RNA (1)...(19): siRNA sense strand
gaaaacugagucugagaug

SEQ ID NO: 700826 - RNA, 19 nt, Homo sapiens
  misc_RNA (1)...(19): siRNA sense strand
cuacucaagcaucaacaga

SEQ ID NO: 700827 - RNA, 19 nt, Homo sapiens
  misc_RNA (1)...(19): siRNA sense strand
gcaagaaccuuuccaaugg

SEQ ID NO: 700828 - RNA, 19 nt, Homo sapiens
  misc_RNA (1)...(19): siRNA sense strand
ccaaugggcuguugaacuu

SEQ ID NO: 700829 - RNA, 19 nt, Homo sapiens
  misc_RNA (1)...(19): siRNA sense strand
caucuucucugugaauuua

SEQ ID NO: 700830 - RNA, 19 nt, Homo sapiens
  misc_RNA (1)...(19): siRNA sense strand
ccaaagggaucaggaaauu

SEQ ID NO: 700831 - RNA, 19 nt, Homo sapiens
  misc_RNA (1)...(19): siRNA sense strand
gaauuuaguucucuuucug

SEQ ID NO: 700832 - RNA, 19 nt, Homo sapiens
  misc_RNA (1)...(19): siRNA sense strand
gugcaacacugucgaaagu

SEQ ID NO: 700833 - RNA, 19 nt, Homo sapiens
  misc_RNA (1)...(19): siRNA sense strand
gccagacgcuuucccgauu

SEQ ID NO: 700834 - RNA, 19 nt, Homo sapiens
  misc_RNA (1)...(19): siRNA sense strand
ggucauggccuaccucuuc

SEQ ID NO: 700835 - RNA, 19 nt, Homo sapiens
  misc_RNA (1)...(19): siRNA sense strand
gaugugaucucugccuuuc

SEQ ID NO: 700836 - RNA, 19 nt, Homo sapiens
  misc_RNA (1)...(19): siRNA sense strand
ggaaucaggcacagaaauc

SEQ ID NO: 700837 - RNA, 19 nt, Homo sapiens
  misc_RNA (1)...(19): siRNA sense strand
ccaguuaccuucaccuucu

SEQ ID NO: 700838 - RNA, 19 nt, Homo sapiens
  misc_RNA (1)...(19): siRNA sense strand
ugaugcagcucgacuggaa

SEQ ID NO: 700839 - RNA, 19 nt, Homo sapiens
  misc_RNA (1)...(19): siRNA sense strand
aaagggaucaggaaauuga

SEQ ID NO: 700840 - RNA, 19 nt, Homo sapiens
  misc_RNA (1)...(19): siRNA sense strand
agacucuccucccucaaua

SEQ ID NO: 700841 - RNA, 19 nt, Homo sapiens
  misc_RNA (1)...(19): siRNA sense strand
gagcauggccagaauggau

SEQ ID NO: 700842 - RNA, 19 nt, Homo sapiens
  misc_RNA (1)...(19): siRNA sense strand
ucaacagauucaugaagaa

SEQ ID NO: 700843 - RNA, 19 nt, Homo sapiens
  misc_RNA (1)...(19): siRNA sense strand
ggagcaauaugggaaaugg

SEQ ID NO: 700844 - RNA, 19 nt, Homo sapiens
  misc_RNA (1)...(19): siRNA sense strand
acucaagcaucaacagauu

SEQ ID NO: 700845 - RNA, 19 nt, Homo sapiens
  misc_RNA (1)...(19): siRNA sense strand
guaaagccauccagaacac

SEQ ID NO: 700846 - RNA, 19 nt, Homo sapiens
  misc_RNA (1)...(19): siRNA sense strand
gagcaagaaccuuuccaau

SEQ ID NO: 700847 - RNA, 19 nt, Homo sapiens
  misc_RNA (1)...(19): siRNA sense strand
gaaagugucaugcggaaaa

SEQ ID NO: 700848 - RNA, 19 nt, Homo sapiens
  misc_RNA (1)...(19): siRNA sense strand
gcacccaccugagcagcuu

SEQ ID NO: 700849 - RNA, 19 nt, Homo sapiens
  misc_RNA (1)...(19): siRNA sense strand
ucagugaucccgagacaga

SEQ ID NO: 700850 - RNA, 19 nt, Homo sapiens
  misc_RNA (1)...(19): siRNA sense strand
ccuccaggccucaccuuua

SEQ ID NO: 700851 - RNA, 19 nt, Homo sapiens
  misc_RNA (1)...(19): siRNA sense strand
ucuccucccucaauaguga

SEQ ID NO: 700852 - RNA, 19 nt, Homo sapiens
  misc_RNA (1)...(19): siRNA sense strand
ggagacuugugacgacauc

SEQ ID NO: 700853 - RNA, 19 nt, Homo sapiens
  misc_RNA (1)...(19): siRNA sense strand
ccgcgucuuucucgucuuu

SEQ ID NO: 700854 - RNA, 19 nt, Homo sapiens
  misc_RNA (1)...(19): siRNA sense strand
ggccugagcaagaaccuuu

SEQ ID NO: 700855 - RNA, 19 nt, Homo sapiens
  misc_RNA (1)...(19): siRNA sense strand
gcacaauaggcaccagaga

SEQ ID NO: 700856 - RNA, 19 nt, Homo sapiens
  misc_RNA (1)...(19): siRNA sense strand
ggacuccucgugugucaau

SEQ ID NO: 700857 - RNA, 19 nt, Homo sapiens
  misc_RNA (1)...(19): siRNA sense strand
ucacuuuucuccuguguaa

SEQ ID NO: 700858 - RNA, 19 nt, Homo sapiens
  misc_RNA (1)...(19): siRNA sense strand
ggaccugucugcgccaucu

SEQ ID NO: 700859 - RNA, 19 nt, Homo sapiens
  misc_RNA (1)...(19): siRNA sense strand
cgagaacacgugucaagau

SEQ ID NO: 700860 - RNA, 19 nt, Homo sapiens
  misc_RNA (1)...(19): siRNA sense strand
gccgguaccuugcacuauc

SEQ ID NO: 700861 - RNA, 19 nt, Homo sapiens
  misc_RNA (1)...(19): siRNA sense strand
guucagugaucccgagaca

SEQ ID NO: 700862 - RNA, 19 nt, Homo sapiens
  misc_RNA (1)...(19): siRNA sense strand
cuccaggccucaccuuuau

SEQ ID NO: 700863 - RNA, 19 nt, Homo sapiens
  misc_RNA (1)...(19): siRNA sense strand
aaccucagcuccccaguua

SEQ ID NO: 700864 - RNA, 19 nt, Homo sapiens
  misc_RNA (1)...(19): siRNA sense strand
uaugggaaaugguccaaag

SEQ ID NO: 700865 - RNA, 19 nt, Homo sapiens
  misc_RNA (1)...(19): siRNA sense strand
ucuggugacucucuggauu

SEQ ID NO: 700866 - RNA, 19 nt, Homo sapiens
  misc_RNA (1)...(19): siRNA sense strand
guccacagccagacgcuuu

SEQ ID NO: 700867 - RNA, 19 nt, Homo sapiens
  misc_RNA (1)...(19): siRNA sense strand
ccagacgcuuucccgauuc

SEQ ID NO: 700868 - RNA, 19 nt, Homo sapiens
  misc_RNA (1)...(19): siRNA sense strand
aucaacagauucaugaaga

SEQ ID NO: 700869 - RNA, 19 nt, Homo sapiens
  misc_RNA (1)...(19): siRNA sense strand
gucaacuacucaagcauca

SEQ ID NO: 700870 - RNA, 19 nt, Homo sapiens
  misc_RNA (1)...(19): siRNA sense strand
ccucauggcccacuacgau

SEQ ID NO: 700871 - RNA, 19 nt, Homo sapiens
  misc_RNA (1)...(19): siRNA sense strand
caccauccagagcaucuua

SEQ ID NO: 700872 - RNA, 19 nt, Homo sapiens
  misc_RNA (1)...(19): siRNA sense strand
cagaauggauguggucacu

SEQ ID NO: 700873 - RNA, 19 nt, Homo sapiens
  misc_RNA (1)...(19): siRNA sense strand
aaacugagucugagaugca

SEQ ID NO: 700874 - RNA, 19 nt, Homo sapiens
  misc_RNA (1)...(19): siRNA sense strand
gccuaccucuucaccauca

SEQ ID NO: 700875 - RNA, 19 nt, Homo sapiens
  misc_RNA (1)...(19): siRNA sense strand
guaccuugcacuaucucua

SEQ ID NO: 700876 - RNA, 19 nt, Homo sapiens
  misc_RNA (1)...(19): siRNA sense strand
cagcuuugccguccucaug

SEQ ID NO: 700877 - RNA, 19 nt, Homo sapiens
  misc_RNA (1)...(19): siRNA sense strand
gcagggugucuucaucuuc

SEQ ID NO: 700878 - RNA, 19 nt, Homo sapiens
  misc_RNA (1)...(19): siRNA sense strand
gcgagaacacgugucaaga

SEQ ID NO: 700879 - RNA, 19 nt, Homo sapiens
  misc_RNA (1)...(19): siRNA sense strand
caaagggaucaggaaauug

SEQ ID NO: 700880 - RNA, 19 nt, Homo sapiens
  misc_RNA (1)...(19): siRNA sense strand
caucaacgagugugcaaca

SEQ ID NO: 700881 - RNA, 19 nt, Homo sapiens
  misc_RNA (1)...(19): siRNA sense strand
ugugaucucugccuuucug

SEQ ID NO: 700882 - RNA, 19 nt, Homo sapiens
  misc_RNA (1)...(19): siRNA sense strand
agcaagaaccuuuccaaug

SEQ ID NO: 700883 - RNA, 19 nt, Homo sapiens
  misc_RNA (1)...(19): siRNA sense strand
acaauaggcaccagagaca

SEQ ID NO: 700884 - RNA, 19 nt, Homo sapiens
  misc_RNA (1)...(19): siRNA sense strand
gccaucuucucugugaauu

SEQ ID NO: 700885 - RNA, 19 nt, Homo sapiens
  misc_RNA (1)...(19): siRNA sense strand
ccagaaaagggauuuauau

SEQ ID NO: 700886 - RNA, 19 nt, Homo sapiens
  misc_RNA (1)...(19): siRNA sense strand
guggucaacuacucaagca

SEQ ID NO: 700887 - RNA, 19 nt, Homo sapiens
  misc_RNA (1)...(19): siRNA sense strand
uggauggccuagaggaugu

SEQ ID NO: 700888 - RNA, 19 nt, Homo sapiens
  misc_RNA (1)...(19): siRNA sense strand
caacagauucaugaagaag

SEQ ID NO: 700889 - RNA, 19 nt, Homo sapiens
  misc_RNA (1)...(19): siRNA sense strand
ucaagcaucaacagauuca

SEQ ID NO: 700890 - RNA, 19 nt, Homo sapiens
  misc_RNA (1)...(19): siRNA sense strand
gaaucaggcacagaaaucu

SEQ ID NO: 700891 - RNA, 19 nt, Homo sapiens
  misc_RNA (1)...(19): siRNA sense strand
ggaggugcagaagcaagua

SEQ ID NO: 700892 - RNA, 19 nt, Homo sapiens
  misc_RNA (1)...(19): siRNA sense strand
gcagguccgggagcaauau

SEQ ID NO: 700893 - RNA, 19 nt, Homo sapiens
  misc_RNA (1)...(19): siRNA sense strand
agucugagaugcacacacu

SEQ ID NO: 700894 - RNA, 19 nt, Homo sapiens
  misc_RNA (1)...(19): siRNA sense strand
gguccaaagggaucaggaa

SEQ ID NO: 700895 - RNA, 19 nt, Homo sapiens
  misc_RNA (1)...(19): siRNA sense strand
agaaggugcucugugucuu

SEQ ID NO: 700896 - RNA, 19 nt, Homo sapiens
  misc_RNA (1)...(19): siRNA sense strand
guccaaagggaucaggaaa

SEQ ID NO: 700897 - RNA, 19 nt, Homo sapiens
  misc_RNA (1)...(19): siRNA sense strand
gugacucucuggauuuuga

SEQ ID NO: 700898 - RNA, 19 nt, Homo sapiens
  misc_RNA (1)...(19): siRNA sense strand
caacuacucaagcaucaac

SEQ ID NO: 700899 - RNA, 19 nt, Homo sapiens
  misc_RNA (1)...(19): siRNA sense strand
ggaccugggcagagacuac

SEQ ID NO: 700900 - RNA, 19 nt, Homo sapiens
  misc_RNA (1)...(19): siRNA sense strand
uggccuaccucuucaccau

SEQ ID NO: 700901 - RNA, 19 nt, Homo sapiens
  misc_RNA (1)...(19): siRNA sense strand
gucauggccuaccucuuca

SEQ ID NO: 700902 - RNA, 19 nt, Homo sapiens
  misc_RNA (1)...(19): siRNA sense strand
ucucgucuuucucgcauuc

SEQ ID NO: 700903 - RNA, 19 nt, Homo sapiens
  misc_RNA (1)...(19): siRNA sense strand
caucaacagauucaugaag

SEQ ID NO: 700904 - RNA, 19 nt, Homo sapiens
  misc_RNA (1)...(19): siRNA sense strand
gcaucaacagauucaugaa

SEQ ID NO: 700905 - RNA, 19 nt, Homo sapiens
  misc_RNA (1)...(19): siRNA sense strand
ucaagaaugagagcgagaa

SEQ ID NO: 700906 - RNA, 19 nt, Homo sapiens
  misc_RNA (1)...(19): siRNA sense strand
cagacucuccucccucaau

SEQ ID NO: 700907 - RNA, 19 nt, Homo sapiens
  misc_RNA (1)...(19): siRNA sense strand
aaggugcugugcuccauca

SEQ ID NO: 700908 - RNA, 19 nt, Homo sapiens
  misc_RNA (1)...(19): siRNA sense strand
cacaggcugcagcacaaua

SEQ ID NO: 700909 - RNA, 19 nt, Homo sapiens
  misc_RNA (1)...(19): siRNA sense strand
gcaacaacgacacccaaaa

SEQ ID NO: 700910 - RNA, 19 nt, Homo sapiens
  misc_RNA (1)...(19): siRNA sense strand
gaaaacugagucugagaug

SEQ ID NO: 700911 - RNA, 19 nt, Homo sapiens
  misc_RNA (1)...(19): siRNA sense strand
cuacucaagcaucaacaga

SEQ ID NO: 700912 - RNA, 19 nt, Homo sapiens
  misc_RNA (1)...(19): siRNA sense strand
gcaagaaccuuuccaaugg

SEQ ID NO: 700913 - RNA, 19 nt, Homo sapiens
  misc_RNA (1)...(19): siRNA sense strand
ccaaugggcuguugaacuu

SEQ ID NO: 700914 - RNA, 19 nt, Homo sapiens
  misc_RNA (1)...(19): siRNA sense strand
caucuucucugugaauuua

SEQ ID NO: 700915 - RNA, 19 nt, Homo sapiens
  misc_RNA (1)...(19): siRNA sense strand
ccaaagggaucaggaaauu

SEQ ID NO: 700916 - RNA, 19 nt, Homo sapiens
  misc_RNA (1)...(19): siRNA sense strand
gaauuuaguucucuuucug

SEQ ID NO: 700917 - RNA, 19 nt, Homo sapiens
  misc_RNA (1)...(19): siRNA sense strand
gugcaacacugucgaaagu

SEQ ID NO: 700918 - RNA, 19 nt, Homo sapiens
  misc_RNA (1)...(19): siRNA sense strand
gccagacgcuuucccgauu

SEQ ID NO: 700919 - RNA, 19 nt, Homo sapiens
  misc_RNA (1)...(19): siRNA sense strand
ggucauggccuaccucuuc

SEQ ID NO: 700920 - RNA, 19 nt, Homo sapiens
  misc_RNA (1)...(19): siRNA sense strand
gaugugaucucugccuuuc

SEQ ID NO: 700921 - RNA, 19 nt, Homo sapiens
  misc_RNA (1)...(19): siRNA sense strand
ggaaucaggcacagaaauc

SEQ ID NO: 700922 - RNA, 19 nt, Homo sapiens
  misc_RNA (1)...(19): siRNA sense strand
ccaguuaccuucaccuucu

SEQ ID NO: 700923 - RNA, 19 nt, Homo sapiens
  misc_RNA (1)...(19): siRNA sense strand
ugaugcagcucgacuggaa

SEQ ID NO: 700924 - RNA, 19 nt, Homo sapiens
  misc_RNA (1)...(19): siRNA sense strand
aaagggaucaggaaauuga

SEQ ID NO: 700925 - RNA, 19 nt, Homo sapiens
  misc_RNA (1)...(19): siRNA sense strand
agacucuccucccucaaua

SEQ ID NO: 700926 - RNA, 19 nt, Homo sapiens
  misc_RNA (1)...(19): siRNA sense strand
gagcauggccagaauggau

SEQ ID NO: 700927 - RNA, 19 nt, Homo sapiens
  misc_RNA (1)...(19): siRNA sense strand
ucaacagauucaugaagaa

SEQ ID NO: 700928 - RNA, 19 nt, Homo sapiens
  misc_RNA (1)...(19): siRNA sense strand
ggagcaauaugggaaaugg

SEQ ID NO: 700929 - RNA, 19 nt, Homo sapiens
  misc_RNA (1)...(19): siRNA sense strand
acucaagcaucaacagauu

SEQ ID NO: 700930 - RNA, 19 nt, Homo sapiens
  misc_RNA (1)...(19): siRNA sense strand
guaaagccauccagaacac

SEQ ID NO: 700931 - RNA, 19 nt, Homo sapiens
  misc_RNA (1)...(19): siRNA sense strand
gagcaagaaccuuuccaau

SEQ ID NO: 700932 - RNA, 19 nt, Homo sapiens
  misc_RNA (1)...(19): siRNA sense strand
gaaagugucaugcggaaaa

SEQ ID NO: 700933 - RNA, 19 nt, Homo sapiens
  misc_RNA (1)...(19): siRNA sense strand
gcacccaccugagcagcuu

SEQ ID NO: 700934 - RNA, 19 nt, Homo sapiens
  misc_RNA (1)...(19): siRNA sense strand
ucagugaucccgagacaga

SEQ ID NO: 700935 - RNA, 19 nt, Homo sapiens
  misc_RNA (1)...(19): siRNA sense strand
ccuccaggccucaccuuua

SEQ ID NO: 700936 - RNA, 19 nt, Homo sapiens
  misc_RNA (1)...(19): siRNA sense strand
ucuccucccucaauaguga

SEQ ID NO: 700937 - RNA, 19 nt, Homo sapiens
  misc_RNA (1)...(19): siRNA sense strand
ggagacuugugacgacauc

SEQ ID NO: 700938 - RNA, 19 nt, Homo sapiens
  misc_RNA (1)...(19): siRNA sense strand
ccgcgucuuucucgucuuu

SEQ ID NO: 700939 - RNA, 19 nt, Homo sapiens
  misc_RNA (1)...(19): siRNA sense strand
ggccugagcaagaaccuuu

SEQ ID NO: 700940 - RNA, 19 nt, Homo sapiens
  misc_RNA (1)...(19): siRNA sense strand
gcacaauaggcaccagaga

SEQ ID NO: 700941 - RNA, 19 nt, Homo sapiens
  misc_RNA (1)...(19): siRNA sense strand
ggacuccucgugugucaau

SEQ ID NO: 700942 - RNA, 19 nt, Homo sapiens
  misc_RNA (1)...(19): siRNA sense strand
ucacuuuucuccuguguaa

SEQ ID NO: 700943 - RNA, 19 nt, Homo sapiens
  misc_RNA (1)...(19): siRNA sense strand
ggaccugucugcgccaucu

SEQ ID NO: 700944 - RNA, 19 nt, Homo sapiens
  misc_RNA (1)...(19): siRNA sense strand
cgagaacacgugucaagau

SEQ ID NO: 700945 - RNA, 19 nt, Homo sapiens
  misc_RNA (1)...(19): siRNA sense strand
gccgguaccuugcacuauc

SEQ ID NO: 700946 - RNA, 19 nt, Homo sapiens
  misc_RNA (1)...(19): siRNA sense strand
guucagugaucccgagaca

SEQ ID NO: 700947 - RNA, 19 nt, Homo sapiens
  misc_RNA (1)...(19): siRNA sense strand
cuccaggccucaccuuuau

SEQ ID NO: 700948 - RNA, 19 nt, Homo sapiens
  misc_RNA (1)...(19): siRNA sense strand
aaccucagcuccccaguua

SEQ ID NO: 700949 - RNA, 19 nt, Homo sapiens
  misc_RNA (1)...(19): siRNA sense strand
uaugggaaaugguccaaag

SEQ ID NO: 700950 - RNA, 19 nt, Homo sapiens
  misc_RNA (1)...(19): siRNA sense strand
ucuggugacucucuggauu

SEQ ID NO: 700951 - RNA, 19 nt, Homo sapiens
  misc_RNA (1)...(19): siRNA sense strand
guccacagccagacgcuuu

SEQ ID NO: 700952 - RNA, 19 nt, Homo sapiens
  misc_RNA (1)...(19): siRNA sense strand
ccagacgcuuucccgauuc

SEQ ID NO: 700953 - RNA, 19 nt, Homo sapiens
  misc_RNA (1)...(19): siRNA sense strand
aucaacagauucaugaaga

SEQ ID NO: 700954 - RNA, 19 nt, Homo sapiens
  misc_RNA (1)...(19): siRNA sense strand
gucaacuacucaagcauca

SEQ ID NO: 700955 - RNA, 19 nt, Homo sapiens
  misc_RNA (1)...(19): siRNA sense strand
ccucauggcccacuacgau

SEQ ID NO: 700956 - RNA, 19 nt, Homo sapiens
  misc_RNA (1)...(19): siRNA sense strand
caccauccagagcaucuua

SEQ ID NO: 700957 - RNA, 19 nt, Homo sapiens
  misc_RNA (1)...(19): siRNA sense strand
cagaauggauguggucacu

SEQ ID NO: 700958 - RNA, 19 nt, Homo sapiens
  misc_RNA (1)...(19): siRNA sense strand
aaacugagucugagaugca

SEQ ID NO: 700959 - RNA, 19 nt, Homo sapiens
  misc_RNA (1)...(19): siRNA sense strand
gccuaccucuucaccauca

SEQ ID NO: 700960 - RNA, 19 nt, Homo sapiens
  misc_RNA (1)...(19): siRNA sense strand
guaccuugcacuaucucua

SEQ ID NO: 700961 - RNA, 19 nt, Homo sapiens
  misc_RNA (1)...(19): siRNA sense strand
cagcuuugccguccucaug

SEQ ID NO: 700962 - RNA, 19 nt, Homo sapiens
  misc_RNA (1)...(19): siRNA sense strand
gcagggugucuucaucuuc

SEQ ID NO: 700963 - RNA, 19 nt, Homo sapiens
  misc_RNA (1)...(19): siRNA sense strand
gcgagaacacgugucaaga

SEQ ID NO: 700964 - RNA, 19 nt, Homo sapiens
  misc_RNA (1)...(19): siRNA sense strand
caaagggaucaggaaauug

SEQ ID NO: 700965 - RNA, 19 nt, Homo sapiens
  misc_RNA (1)...(19): siRNA sense strand
caucaacgagugugcaaca

SEQ ID NO: 700966 - RNA, 19 nt, Homo sapiens
  misc_RNA (1)...(19): siRNA sense strand
ugugaucucugccuuucug

SEQ ID NO: 700967 - RNA, 19 nt, Homo sapiens
  misc_RNA (1)...(19): siRNA sense strand
agcaagaaccuuuccaaug

SEQ ID NO: 700968 - RNA, 19 nt, Homo sapiens
  misc_RNA (1)...(19): siRNA sense strand
acaauaggcaccagagaca

SEQ ID NO: 700969 - RNA, 19 nt, Homo sapiens
  misc_RNA (1)...(19): siRNA sense strand
gccaucuucucugugaauu

SEQ ID NO: 700970 - RNA, 19 nt, Homo sapiens
  misc_RNA (1)...(19): siRNA sense strand
ccagaaaagggauuuauau

SEQ ID NO: 700971 - RNA, 19 nt, Homo sapiens
  misc_RNA (1)...(19): siRNA sense strand
guggucaacuacucaagca

SEQ ID NO: 700972 - RNA, 19 nt, Homo sapiens
  misc_RNA (1)...(19): siRNA sense strand
uggauggccuagaggaugu

SEQ ID NO: 700973 - RNA, 19 nt, Homo sapiens
  misc_RNA (1)...(19): siRNA sense strand
caacagauucaugaagaag

SEQ ID NO: 700974 - RNA, 19 nt, Homo sapiens
  misc_RNA (1)...(19): siRNA sense strand
ucaagcaucaacagauuca

SEQ ID NO: 700975 - RNA, 19 nt, Homo sapiens
  misc_RNA (1)...(19): siRNA sense strand
gaaucaggcacagaaaucu

SEQ ID NO: 700976 - RNA, 19 nt, Homo sapiens
  misc_RNA (1)...(19): siRNA sense strand
ggaggugcagaagcaagua

SEQ ID NO: 700977 - RNA, 19 nt, Homo sapiens
  misc_RNA (1)...(19): siRNA sense strand
gcagguccgggagcaauau

SEQ ID NO: 700978 - RNA, 19 nt, Homo sapiens
  misc_RNA (1)...(19): siRNA sense strand
agucugagaugcacacacu

SEQ ID NO: 700979 - RNA, 19 nt, Homo sapiens
  misc_RNA (1)...(19): siRNA sense strand
gguccaaagggaucaggaa

SEQ ID NO: 700980 - RNA, 19 nt, Homo sapiens
  misc_RNA (1)...(19): siRNA sense strand
agaaggugcucugugucuu

SEQ ID NO: 700981 - RNA, 19 nt, Homo sapiens
  misc_RNA (1)...(19): siRNA sense strand
guccaaagggaucaggaaa

SEQ ID NO: 700982 - RNA, 19 nt, Homo sapiens
  misc_RNA (1)...(19): siRNA sense strand
gugacucucuggauuuuga

SEQ ID NO: 700983 - RNA, 19 nt, Homo sapiens
  misc_RNA (1)...(19): siRNA sense strand
caacuacucaagcaucaac

SEQ ID NO: 700984 - RNA, 19 nt, Homo sapiens
  misc_RNA (1)...(19): siRNA sense strand
ggaccugggcagagacuac

SEQ ID NO: 700985 - RNA, 19 nt, Homo sapiens
  misc_RNA (1)...(19): siRNA sense strand
uggccuaccucuucaccau

SEQ ID NO: 700986 - RNA, 19 nt, Homo sapiens
  misc_RNA (1)...(19): siRNA sense strand
gucauggccuaccucuuca

SEQ ID NO: 700987 - RNA, 19 nt, Homo sapiens
  misc_RNA (1)...(19): siRNA sense strand
ucucgucuuucucgcauuc

SEQ ID NO: 700988 - RNA, 19 nt, Homo sapiens
  misc_RNA (1)...(19): siRNA sense strand
caucaacagauucaugaag

SEQ ID NO: 700989 - RNA, 19 nt, Homo sapiens
  misc_RNA (1)...(19): siRNA sense strand
gcaucaacagauucaugaa

SEQ ID NO: 700990 - RNA, 19 nt, Homo sapiens
  misc_RNA (1)...(19): siRNA sense strand
ucaagaaugagagcgagaa

SEQ ID NO: 700991 - RNA, 19 nt, Homo sapiens
  misc_RNA (1)...(19): siRNA sense strand
cagacucuccucccucaau

SEQ ID NO: 700992 - RNA, 19 nt, Homo sapiens
  misc_RNA (1)...(19): siRNA sense strand
aaggugcugugcuccauca

SEQ ID NO: 700993 - RNA, 19 nt, Homo sapiens
  misc_RNA (1)...(19): siRNA sense strand
cacaggcugcagcacaaua

SEQ ID NO: 700994 - RNA, 19 nt, Homo sapiens
  misc_RNA (1)...(19): siRNA sense strand
gcaacaacgacacccaaaa

SEQ ID NO: 700995 - RNA, 19 nt, Homo sapiens
  misc_RNA (1)...(19): siRNA sense strand
gaaaacugagucugagaug

SEQ ID NO: 700996 - RNA, 19 nt, Homo sapiens
  misc_RNA (1)...(19): siRNA sense strand
cuacucaagcaucaacaga

SEQ ID NO: 700997 - RNA, 19 nt, Homo sapiens
  misc_RNA (1)...(19): siRNA sense strand
aaacuaagguggacauuua

SEQ ID NO: 700998 - RNA, 19 nt, Homo sapiens
  misc_RNA (1)...(19): siRNA sense strand
gcagaucuaugcucaguuu

SEQ ID NO: 700999 - RNA, 19 nt, Homo sapiens
  misc_RNA (1)...(19): siRNA sense strand
caacaaggacggauacaua

SEQ ID NO: 701000 - RNA, 19 nt, Homo sapiens
  misc_RNA (1)...(19): siRNA sense strand
ggacggauacauaaacaaa

SEQ ID NO: 701001 - RNA, 19 nt, Homo sapiens
  misc_RNA (1)...(19): siRNA sense strand
gaggaacuguccacgagaa

SEQ ID NO: 701002 - RNA, 19 nt, Homo sapiens
  misc_RNA (1)...(19): siRNA sense strand
gaaacuaagguggacauuu

SEQ ID NO: 701003 - RNA, 19 nt, Homo sapiens
  misc_RNA (1)...(19): siRNA sense strand
cgaaagauaagauugaaga

SEQ ID NO: 701004 - RNA, 19 nt, Homo sapiens
  misc_RNA (1)...(19): siRNA sense strand
gguggacauuuaauuugua

SEQ ID NO: 701005 - RNA, 19 nt, Homo sapiens
  misc_RNA (1)...(19): siRNA sense strand
gaagaugagcuggagauga

SEQ ID NO: 701006 - RNA, 19 nt, Homo sapiens
  misc_RNA (1)...(19): siRNA sense strand
aggcgacccucgaaagaua

SEQ ID NO: 701007 - RNA, 19 nt, Homo sapiens
  misc_RNA (1)...(19): siRNA sense strand
cagaccaacuucaccaaga

SEQ ID NO: 701008 - RNA, 19 nt, Homo sapiens
  misc_RNA (1)...(19): siRNA sense strand
uguaugacaucaacaagga

SEQ ID NO: 701009 - RNA, 19 nt, Homo sapiens
  misc_RNA (1)...(19): siRNA sense strand
ucucaucucugcaaaccaa

SEQ ID NO: 701010 - RNA, 19 nt, Homo sapiens
  misc_RNA (1)...(19): siRNA sense strand
caacgaagacacauucaag

SEQ ID NO: 701011 - RNA, 19 nt, Homo sapiens
  misc_RNA (1)...(19): siRNA sense strand
ucaaagccaucuaugacau

SEQ ID NO: 701012 - RNA, 19 nt, Homo sapiens
  misc_RNA (1)...(19): siRNA sense strand
cauauccugugcucaaaga

SEQ ID NO: 701013 - RNA, 19 nt, Homo sapiens
  misc_RNA (1)...(19): siRNA sense strand
uaaccgcucugucgauuuu

SEQ ID NO: 701014 - RNA, 19 nt, Homo sapiens
  misc_RNA (1)...(19): siRNA sense strand
aaacaaagaggagaugaug

SEQ ID NO: 701015 - RNA, 19 nt, Homo sapiens
  misc_RNA (1)...(19): siRNA sense strand
ggucaacgaagacacauuc

SEQ ID NO: 701016 - RNA, 19 nt, Homo sapiens
  misc_RNA (1)...(19): siRNA sense strand
ugaggucucuccagcuguu

SEQ ID NO: 701017 - RNA, 19 nt, Homo sapiens
  misc_RNA (1)...(19): siRNA sense strand
ggagaugccagcacguaug

SEQ ID NO: 701018 - RNA, 19 nt, Homo sapiens
  misc_RNA (1)...(19): siRNA sense strand
acggauacauaaacaaaga

SEQ ID NO: 701019 - RNA, 19 nt, Homo sapiens
  misc_RNA (1)...(19): siRNA sense strand
gcauguggacgucuucuuc

SEQ ID NO: 701020 - RNA, 19 nt, Homo sapiens
  misc_RNA (1)...(19): siRNA sense strand
ggaggacgacaacaucaug

SEQ ID NO: 701021 - RNA, 19 nt, Homo sapiens
  misc_RNA (1)...(19): siRNA sense strand
aagaugagcuggagaugac

SEQ ID NO: 701022 - RNA, 19 nt, Homo sapiens
  misc_RNA (1)...(19): siRNA sense strand
acaaagaggagaugaugga

SEQ ID NO: 701023 - RNA, 19 nt, Homo sapiens
  misc_RNA (1)...(19): siRNA sense strand
aagaggagaugauggacau

SEQ ID NO: 701024 - RNA, 19 nt, Homo sapiens
  misc_RNA (1)...(19): siRNA sense strand
caaaggcgacccucgaaag

SEQ ID NO: 701025 - RNA, 19 nt, Homo sapiens
  misc_RNA (1)...(19): siRNA sense strand
gaacuguccacgagaaacu

SEQ ID NO: 701026 - RNA, 19 nt, Homo sapiens
  misc_RNA (1)...(19): siRNA sense strand
ccagugguguggucaacga

SEQ ID NO: 701027 - RNA, 19 nt, Homo sapiens
  misc_RNA (1)...(19): siRNA sense strand
gaggagaugauggacauug

SEQ ID NO: 701028 - RNA, 19 nt, Homo sapiens
  misc_RNA (1)...(19): siRNA sense strand
uguaaccgcucugucgauu

SEQ ID NO: 701029 - RNA, 19 nt, Homo sapiens
  misc_RNA (1)...(19): siRNA sense strand
aacaaggacggauacauaa

SEQ ID NO: 701030 - RNA, 19 nt, Homo sapiens
  misc_RNA (1)...(19): siRNA sense strand
cuaagguggacauuuaauu

SEQ ID NO: 701031 - RNA, 19 nt, Homo sapiens
  misc_RNA (1)...(19): siRNA sense strand
gggagcugcagguccuuua

SEQ ID NO: 701032 - RNA, 19 nt, Homo sapiens
  misc_RNA (1)...(19): siRNA sense strand
aaagccaucuaugacauga

SEQ ID NO: 701033 - RNA, 19 nt, Homo sapiens
  misc_RNA (1)...(19): siRNA sense strand
gcacguaugcccauuaccu

SEQ ID NO: 701034 - RNA, 19 nt, Homo sapiens
  misc_RNA (1)...(19): siRNA sense strand
ccucgaaagauaagauuga

SEQ ID NO: 701035 - RNA, 19 nt, Homo sapiens
  misc_RNA (1)...(19): siRNA sense strand
guaugcccauuaccucuuc

SEQ ID NO: 701036 - RNA, 19 nt, Homo sapiens
  misc_RNA (1)...(19): siRNA sense strand
gaggacgacaacaucauga

SEQ ID NO: 701037 - RNA, 19 nt, Homo sapiens
  misc_RNA (1)...(19): siRNA sense strand
ccagcacguaugcccauua

SEQ ID NO: 701038 - RNA, 19 nt, Homo sapiens
  misc_RNA (1)...(19): siRNA sense strand
cagcacguaugcccauuac

SEQ ID NO: 701039 - RNA, 19 nt, Homo sapiens
  misc_RNA (1)...(19): siRNA sense strand
gugguguggucaacgaaga

SEQ ID NO: 701040 - RNA, 19 nt, Homo sapiens
  misc_RNA (1)...(19): siRNA sense strand
caaagccaucuaugacaug

SEQ ID NO: 701041 - RNA, 19 nt, Homo sapiens
  misc_RNA (1)...(19): siRNA sense strand
aaaggcgacccucgaaaga

SEQ ID NO: 701042 - RNA, 19 nt, Homo sapiens
  misc_RNA (1)...(19): siRNA sense strand
caaggacggauacauaaac

SEQ ID NO: 701043 - RNA, 19 nt, Homo sapiens
  misc_RNA (1)...(19): siRNA sense strand
acaaggacggauacauaaa

SEQ ID NO: 701044 - RNA, 19 nt, Homo sapiens
  misc_RNA (1)...(19): siRNA sense strand
gagaaacuaagguggacau

SEQ ID NO: 701045 - RNA, 19 nt, Homo sapiens
  misc_RNA (1)...(19): siRNA sense strand
uaaacaaagaggagaugau

SEQ ID NO: 701046 - RNA, 19 nt, Homo sapiens
  misc_RNA (1)...(19): siRNA sense strand
cagacaggcuccgugaagu

SEQ ID NO: 701047 - RNA, 19 nt, Homo sapiens
  misc_RNA (1)...(19): siRNA sense strand
aaggacggauacauaaaca

SEQ ID NO: 701048 - RNA, 19 nt, Homo sapiens
  misc_RNA (1)...(19): siRNA sense strand
agacaggcuccgugaaguu

SEQ ID NO: 701049 - RNA, 19 nt, Homo sapiens
  misc_RNA (1)...(19): siRNA sense strand
ggagcugcagguccuuuau

SEQ ID NO: 701050 - RNA, 19 nt, Homo sapiens
  misc_RNA (1)...(19): siRNA sense strand
guaaccgcucugucgauuu

SEQ ID NO: 701051 - RNA, 19 nt, Homo sapiens
  misc_RNA (1)...(19): siRNA sense strand
agaccaacuucaccaagag

SEQ ID NO: 701052 - RNA, 19 nt, Homo sapiens
  misc_RNA (1)...(19): siRNA sense strand
gagcugcagguccuuuauc

SEQ ID NO: 701053 - RNA, 19 nt, Homo sapiens
  misc_RNA (1)...(19): siRNA sense strand
ggcagcauguggacgucuu

SEQ ID NO: 701054 - RNA, 19 nt, Homo sapiens
  misc_RNA (1)...(19): siRNA sense strand
aagguggacauuuaauuug

SEQ ID NO: 701055 - RNA, 19 nt, Homo sapiens
  misc_RNA (1)...(19): siRNA sense strand
gacaggcuccgugaaguuc

SEQ ID NO: 701056 - RNA, 19 nt, Homo sapiens
  misc_RNA (1)...(19): siRNA sense strand
ucagacaggcuccgugaag

SEQ ID NO: 701057 - RNA, 19 nt, Homo sapiens
  misc_RNA (1)...(19): siRNA sense strand
agguggacauuuaauuugu

SEQ ID NO: 701058 - RNA, 19 nt, Homo sapiens
  misc_RNA (1)...(19): siRNA sense strand
aggagaugauggacauugu

SEQ ID NO: 701059 - RNA, 19 nt, Homo sapiens
  misc_RNA (1)...(19): siRNA sense strand
acaaaggcgacccucgaaa

SEQ ID NO: 701060 - RNA, 19 nt, Homo sapiens
  misc_RNA (1)...(19): siRNA sense strand
ucaggaggacgacaacauc

SEQ ID NO: 701061 - RNA, 19 nt, Homo sapiens
  misc_RNA (1)...(19): siRNA sense strand
cucgaaagauaagauugaa

SEQ ID NO: 701062 - RNA, 19 nt, Homo sapiens
  misc_RNA (1)...(19): siRNA sense strand
ucaacgaagacacauucaa

SEQ ID NO: 701063 - RNA, 19 nt, Homo sapiens
  misc_RNA (1)...(19): siRNA sense strand
acacauucaagcagaucua

SEQ ID NO: 701064 - RNA, 19 nt, Homo sapiens
  misc_RNA (1)...(19): siRNA sense strand
ggaaaggacugugaaaugu

SEQ ID NO: 701065 - RNA, 19 nt, Homo sapiens
  misc_RNA (1)...(19): siRNA sense strand
ggacgacaacuacaacuua

SEQ ID NO: 701066 - RNA, 19 nt, Homo sapiens
  misc_RNA (1)...(19): siRNA sense strand
gaaguucucucuggaaaga

SEQ ID NO: 701067 - RNA, 19 nt, Homo sapiens
  misc_RNA (1)...(19): siRNA sense strand
gggagaauguggaguguaa

SEQ ID NO: 701068 - RNA, 19 nt, Homo sapiens
  misc_RNA (1)...(19): siRNA sense strand
gaaaggacugugaaaugua

SEQ ID NO: 701069 - RNA, 19 nt, Homo sapiens
  misc_RNA (1)...(19): siRNA sense strand
ggaugaagaugaagugcuu

SEQ ID NO: 701070 - RNA, 19 nt, Homo sapiens
  misc_RNA (1)...(19): siRNA sense strand
aauguaagcuggagagaaa

SEQ ID NO: 701071 - RNA, 19 nt, Homo sapiens
  misc_RNA (1)...(19): siRNA sense strand
uaaagcaccgguugaauaa

SEQ ID NO: 701072 - RNA, 19 nt, Homo sapiens
  misc_RNA (1)...(19): siRNA sense strand
caucaucucucaggacuuu

SEQ ID NO: 701073 - RNA, 19 nt, Homo sapiens
  misc_RNA (1)...(19): siRNA sense strand
ggaagaagcgcuuucaaca

SEQ ID NO: 701074 - RNA, 19 nt, Homo sapiens
  misc_RNA (1)...(19): siRNA sense strand
cuaaagcaccgguugaaua

SEQ ID NO: 701075 - RNA, 19 nt, Homo sapiens
  misc_RNA (1)...(19): siRNA sense strand
acaaguaccuggaggagaa

SEQ ID NO: 701076 - RNA, 19 nt, Homo sapiens
  misc_RNA (1)...(19): siRNA sense strand
gaagaugaagugcuuaaug

SEQ ID NO: 701077 - RNA, 19 nt, Homo sapiens
  misc_RNA (1)...(19): siRNA sense strand
gaagaagcgcuuucaacaa

SEQ ID NO: 701078 - RNA, 19 nt, Homo sapiens
  misc_RNA (1)...(19): siRNA sense strand
ccuuagaucuggaugauga

SEQ ID NO: 701079 - RNA, 19 nt, Homo sapiens
  misc_RNA (1)...(19): siRNA sense strand
agaagaacaucaagagguu

SEQ ID NO: 701080 - RNA, 19 nt, Homo sapiens
  misc_RNA (1)...(19): siRNA sense strand
gagcgguacuacaagauga

SEQ ID NO: 701081 - RNA, 19 nt, Homo sapiens
  misc_RNA (1)...(19): siRNA sense strand
gggaaaggacugugaaaug

SEQ ID NO: 701082 - RNA, 19 nt, Homo sapiens
  misc_RNA (1)...(19): siRNA sense strand
gguccgagaacaaguauaa

SEQ ID NO: 701083 - RNA, 19 nt, Homo sapiens
  misc_RNA (1)...(19): siRNA sense strand
uggagacgcugaaggauga

SEQ ID NO: 701084 - RNA, 19 nt, Homo sapiens
  misc_RNA (1)...(19): siRNA sense strand
ccaugucccugaaguguga

SEQ ID NO: 701085 - RNA, 19 nt, Homo sapiens
  misc_RNA (1)...(19): siRNA sense strand
aagaagcgcuuucaacaag

SEQ ID NO: 701086 - RNA, 19 nt, Homo sapiens
  misc_RNA (1)...(19): siRNA sense strand
gcguggagcugcuaaccuu

SEQ ID NO: 701087 - RNA, 19 nt, Homo sapiens
  misc_RNA (1)...(19): siRNA sense strand
ucgcagugcuuaaucgaaa

SEQ ID NO: 701088 - RNA, 19 nt, Homo sapiens
  misc_RNA (1)...(19): siRNA sense strand
gcaagaaccucagccucau

SEQ ID NO: 701089 - RNA, 19 nt, Homo sapiens
  misc_RNA (1)...(19): siRNA sense strand
gcagcacagucgaagaaga

SEQ ID NO: 701090 - RNA, 19 nt, Homo sapiens
  misc_RNA (1)...(19): siRNA sense strand
aagcaccgguugaauaaga

SEQ ID NO: 701091 - RNA, 19 nt, Homo sapiens
  misc_RNA (1)...(19): siRNA sense strand
caagucagauaucgucaca

SEQ ID NO: 701092 - RNA, 19 nt, Homo sapiens
  misc_RNA (1)...(19): siRNA sense strand
cagaggagcugcgagacaa

SEQ ID NO: 701093 - RNA, 19 nt, Homo sapiens
  misc_RNA (1)...(19): siRNA sense strand
ggagaagaacgacgagaug

SEQ ID NO: 701094 - RNA, 19 nt, Homo sapiens
  misc_RNA (1)...(19): siRNA sense strand
gcagguccgagaacaagua

SEQ ID NO: 701095 - RNA, 19 nt, Homo sapiens
  misc_RNA (1)...(19): siRNA sense strand
gcagcagcaucaugucaau

SEQ ID NO: 701096 - RNA, 19 nt, Homo sapiens
  misc_RNA (1)...(19): siRNA sense strand
gagaaugaaaugcugaaga

SEQ ID NO: 701097 - RNA, 19 nt, Homo sapiens
  misc_RNA (1)...(19): siRNA sense strand
cgagaucgaucagcuaaag

SEQ ID NO: 701098 - RNA, 19 nt, Homo sapiens
  misc_RNA (1)...(19): siRNA sense strand
gagaagaacgacgagauga

SEQ ID NO: 701099 - RNA, 19 nt, Homo sapiens
  misc_RNA (1)...(19): siRNA sense strand
ggcaggagcuggucaacag

SEQ ID NO: 701100 - RNA, 19 nt, Homo sapiens
  misc_RNA (1)...(19): siRNA sense strand
agacggagaccaucaucua

SEQ ID NO: 701101 - RNA, 19 nt, Homo sapiens
  misc_RNA (1)...(19): siRNA sense strand
ggacgaggaccagcuguga

SEQ ID NO: 701102 - RNA, 19 nt, Homo sapiens
  misc_RNA (1)...(19): siRNA sense strand
gacgacaacuacaacuuag

SEQ ID NO: 701103 - RNA, 19 nt, Homo sapiens
  misc_RNA (1)...(19): siRNA sense strand
gcuauguggucuucuugga

SEQ ID NO: 701104 - RNA, 19 nt, Homo sapiens
  misc_RNA (1)...(19): siRNA sense strand
gaucaaguccaacaucuac

SEQ ID NO: 701105 - RNA, 19 nt, Homo sapiens
  misc_RNA (1)...(19): siRNA sense strand
gggaucggcugcacaagag

SEQ ID NO: 701106 - RNA, 19 nt, Homo sapiens
  misc_RNA (1)...(19): siRNA sense strand
gagaugaagcucagacaca

SEQ ID NO: 701107 - RNA, 19 nt, Homo sapiens
  misc_RNA (1)...(19): siRNA sense strand
gaugagaagaagcagauga

SEQ ID NO: 701108 - RNA, 19 nt, Homo sapiens
  misc_RNA (1)...(19): siRNA sense strand
ugagcaggaugaagaugaa

SEQ ID NO: 701109 - RNA, 19 nt, Homo sapiens
  misc_RNA (1)...(19): siRNA sense strand
caggagcgguacuacaaga

SEQ ID NO: 701110 - RNA, 19 nt, Homo sapiens
  misc_RNA (1)...(19): siRNA sense strand
gaauguaagcuggagagaa

SEQ ID NO: 701111 - RNA, 19 nt, Homo sapiens
  misc_RNA (1)...(19): siRNA sense strand
agagcgagcugggcaagaa

SEQ ID NO: 701112 - RNA, 19 nt, Homo sapiens
  misc_RNA (1)...(19): siRNA sense strand
gaagugugacgauguugug

SEQ ID NO: 701113 - RNA, 19 nt, Homo sapiens
  misc_RNA (1)...(19): siRNA sense strand
gaagcgaacaucagauuuu

SEQ ID NO: 701114 - RNA, 19 nt, Homo sapiens
  misc_RNA (1)...(19): siRNA sense strand
gcucgacccugggaaagga

SEQ ID NO: 701115 - RNA, 19 nt, Homo sapiens
  misc_RNA (1)...(19): siRNA sense strand
agaaugaaaugcugaagac

SEQ ID NO: 701116 - RNA, 19 nt, Homo sapiens
  misc_RNA (1)...(19): siRNA sense strand
gaaggagcagguucuggaa

SEQ ID NO: 701117 - RNA, 19 nt, Homo sapiens
  misc_RNA (1)...(19): siRNA sense strand
acuacaagaugaaggaaga

SEQ ID NO: 701118 - RNA, 19 nt, Homo sapiens
  misc_RNA (1)...(19): siRNA sense strand
ugacugagaagcaggaaga

SEQ ID NO: 701119 - RNA, 19 nt, Homo sapiens
  misc_RNA (1)...(19): siRNA sense strand
ucacgcacuuccugaugaa

SEQ ID NO: 701120 - RNA, 19 nt, Homo sapiens
  misc_RNA (1)...(19): siRNA sense strand
ggccuucggucaccucugu

SEQ ID NO: 701121 - RNA, 19 nt, Homo sapiens
  misc_RNA (1)...(19): siRNA sense strand
gaacuggagcgggagaaug

SEQ ID NO: 701122 - RNA, 19 nt, Homo sapiens
  misc_RNA (1)...(19): siRNA sense strand
aagaugaagugcuuaaugc

SEQ ID NO: 701123 - RNA, 19 nt, Homo sapiens
  misc_RNA (1)...(19): siRNA sense strand
aaaggacugugaaauguac

SEQ ID NO: 701124 - RNA, 19 nt, Homo sapiens
  misc_RNA (1)...(19): siRNA sense strand
ugaacgaggucaucaagcu

SEQ ID NO: 701125 - RNA, 19 nt, Homo sapiens
  misc_RNA (1)...(19): siRNA sense strand
gagcgggacagcuacaaug

SEQ ID NO: 701126 - RNA, 19 nt, Homo sapiens
  misc_RNA (1)...(19): siRNA sense strand
cagauaucgucacaagaga

SEQ ID NO: 701127 - RNA, 19 nt, Homo sapiens
  misc_RNA (1)...(19): siRNA sense strand
ggaagcuggugaaggacau

SEQ ID NO: 701128 - RNA, 19 nt, Homo sapiens
  misc_RNA (1)...(19): siRNA sense strand
caguaaccaucaucucuca

SEQ ID NO: 701129 - RNA, 19 nt, Homo sapiens
  misc_RNA (1)...(19): siRNA sense strand
ggacacaugcaccaaagag

SEQ ID NO: 701130 - RNA, 19 nt, Homo sapiens
  misc_RNA (1)...(19): siRNA sense strand
gauaucgucacaagagaug

SEQ ID NO: 701131 - RNA, 19 nt, Homo sapiens
  misc_RNA (1)...(19): siRNA sense strand
gaagagcuggacccugaga

SEQ ID NO: 701132 - RNA, 19 nt, Homo sapiens
  misc_RNA (1)...(19): siRNA sense strand
ccugaagugugacgauguu

SEQ ID NO: 701133 - RNA, 19 nt, Homo sapiens
  misc_RNA (1)...(19): siRNA sense strand
aggaaguucucucuggaaa

SEQ ID NO: 701134 - RNA, 19 nt, Homo sapiens
  misc_RNA (1)...(19): siRNA sense strand
ucagauaucgucacaagag

SEQ ID NO: 701135 - RNA, 19 nt, Homo sapiens
  misc_RNA (1)...(19): siRNA sense strand
agucagauaucgucacaag

SEQ ID NO: 701136 - RNA, 19 nt, Homo sapiens
  misc_RNA (1)...(19): siRNA sense strand
gaaacugcagcgccugaug

SEQ ID NO: 701137 - RNA, 19 nt, Homo sapiens
  misc_RNA (1)...(19): siRNA sense strand
acccagaacuguacaaacu

SEQ ID NO: 701138 - RNA, 19 nt, Homo sapiens
  misc_RNA (1)...(19): siRNA sense strand
gaaggacgacaacuacaac

SEQ ID NO: 701139 - RNA, 19 nt, Homo sapiens
  misc_RNA (1)...(19): siRNA sense strand
ugaaggacgacaacuacaa

SEQ ID NO: 701140 - RNA, 19 nt, Homo sapiens
  misc_RNA (1)...(19): siRNA sense strand
aggaagagcgggacagcua

SEQ ID NO: 701141 - RNA, 19 nt, Homo sapiens
  misc_RNA (1)...(19): siRNA sense strand
agauggaggaggaauguaa

SEQ ID NO: 701142 - RNA, 19 nt, Homo sapiens
  misc_RNA (1)...(19): siRNA sense strand
gagcagcgcaagaccaucu

SEQ ID NO: 701143 - RNA, 19 nt, Homo sapiens
  misc_RNA (1)...(19): siRNA sense strand
ccaacuccuucaccaagau

SEQ ID NO: 701144 - RNA, 19 nt, Homo sapiens
  misc_RNA (1)...(19): siRNA sense strand
ugcggcagcuggaggauga

SEQ ID NO: 701145 - RNA, 19 nt, Homo sapiens
  misc_RNA (1)...(19): siRNA sense strand
gcaggaugaagaugaagug

SEQ ID NO: 701146 - RNA, 19 nt, Homo sapiens
  misc_RNA (1)...(19): siRNA sense strand
accggaagcuggugaagga

SEQ ID NO: 701147 - RNA, 19 nt, Homo sapiens
  misc_RNA (1)...(19): siRNA sense strand
gcacaugcucagccgcuau

SEQ ID NO: 701148 - RNA, 19 nt, Homo sapiens
  misc_RNA (1)...(19): siRNA sense strand
uggagagccuagaauuuua

SEQ ID NO: 701149 - RNA, 19 nt, Homo sapiens
  misc_RNA (1)...(19): siRNA sense strand
gaagacggagaccaucauc

SEQ ID NO: 701150 - RNA, 19 nt, Homo sapiens
  misc_RNA (1)...(19): siRNA sense strand
gaucucugcccaucaccaa

SEQ ID NO: 701151 - RNA, 19 nt, Homo sapiens
  misc_RNA (1)...(19): siRNA sense strand
uaagauggaggaggaaugu

SEQ ID NO: 701152 - RNA, 19 nt, Homo sapiens
  misc_RNA (1)...(19): siRNA sense strand
ggagcgguacuacaagaug

SEQ ID NO: 701153 - RNA, 19 nt, Homo sapiens
  misc_RNA (1)...(19): siRNA sense strand
gaagagcgggacagcuaca

SEQ ID NO: 701154 - RNA, 19 nt, Homo sapiens
  misc_RNA (1)...(19): siRNA sense strand
augaaaugcugaagaccaa

SEQ ID NO: 701155 - RNA, 19 nt, Homo sapiens
  misc_RNA (1)...(19): siRNA sense strand
ggugaaggacgacaacuac

SEQ ID NO: 701156 - RNA, 19 nt, Homo sapiens
  misc_RNA (1)...(19): siRNA sense strand
gguacuacaagaugaagga

SEQ ID NO: 701157 - RNA, 19 nt, Homo sapiens
  misc_RNA (1)...(19): siRNA sense strand
gaggacggccugaucacau

SEQ ID NO: 701158 - RNA, 19 nt, Homo sapiens
  misc_RNA (1)...(19): siRNA sense strand
ugaagcgaacaucagauuu

SEQ ID NO: 701159 - RNA, 19 nt, Homo sapiens
  misc_RNA (1)...(19): siRNA sense strand
guacaagcaccgcaugaac

SEQ ID NO: 701160 - RNA, 19 nt, Homo sapiens
  misc_RNA (1)...(19): siRNA sense strand
agaagaacauggcggucau

SEQ ID NO: 701161 - RNA, 19 nt, Homo sapiens
  misc_RNA (1)...(19): siRNA sense strand
ggagcgggagaaugaaaug

SEQ ID NO: 701162 - RNA, 19 nt, Homo sapiens
  misc_RNA (1)...(19): siRNA sense strand
auaagcggaugaacagcaa

SEQ ID NO: 701163 - RNA, 19 nt, Homo sapiens
  misc_RNA (1)...(19): siRNA sense strand
ggcagagugucccguugga

SEQ ID NO: 701164 - RNA, 19 nt, Homo sapiens
  misc_RNA (1)...(19): siRNA sense strand
cagaggaacugcugaauga

SEQ ID NO: 701165 - RNA, 19 nt, Homo sapiens
  misc_RNA (1)...(19): siRNA sense strand
ugaaauaccugcaaaguag

SEQ ID NO: 701166 - RNA, 19 nt, Homo sapiens
  misc_RNA (1)...(19): siRNA sense strand
aagaacaucuccagaggaa

SEQ ID NO: 701167 - RNA, 19 nt, Homo sapiens
  misc_RNA (1)...(19): siRNA sense strand
gaacaucuccagaggaacu

SEQ ID NO: 701168 - RNA, 19 nt, Homo sapiens
  misc_RNA (1)...(19): siRNA sense strand
ccagaggaacugcugaaug

SEQ ID NO: 701169 - RNA, 19 nt, Homo sapiens
  misc_RNA (1)...(19): siRNA sense strand
uugaaauaccugcaaagua

SEQ ID NO: 701170 - RNA, 19 nt, Homo sapiens
  misc_RNA (1)...(19): siRNA sense strand
aaauggaggaggaggaauu

SEQ ID NO: 701171 - RNA, 19 nt, Homo sapiens
  misc_RNA (1)...(19): siRNA sense strand
ccaaauggaggaggaggaa

SEQ ID NO: 701172 - RNA, 19 nt, Homo sapiens
  misc_RNA (1)...(19): siRNA sense strand
cccgcaaccugcuccuaaa

SEQ ID NO: 701173 - RNA, 19 nt, Homo sapiens
  misc_RNA (1)...(19): siRNA sense strand
guugaaauaccugcaaagu

SEQ ID NO: 701174 - RNA, 19 nt, Homo sapiens
  misc_RNA (1)...(19): siRNA sense strand
ugguugaaauaccugcaaa

SEQ ID NO: 701175 - RNA, 19 nt, Homo sapiens
  misc_RNA (1)...(19): siRNA sense strand
cagaggaacuggugaauga

SEQ ID NO: 701176 - RNA, 19 nt, Homo sapiens
  misc_RNA (1)...(19): siRNA sense strand
gaggaggaauucauagaaa

SEQ ID NO: 701177 - RNA, 19 nt, Homo sapiens
  misc_RNA (1)...(19): siRNA sense strand
ggaggaauucauagaaaua

SEQ ID NO: 701178 - RNA, 19 nt, Homo sapiens
  misc_RNA (1)...(19): siRNA sense strand
ggaggaggaggaauucaua

SEQ ID NO: 701179 - RNA, 19 nt, Homo sapiens
  misc_RNA (1)...(19): siRNA sense strand
aagaacaucuccagaggaa

SEQ ID NO: 701180 - RNA, 19 nt, Homo sapiens
  misc_RNA (1)...(19): siRNA sense strand
ucauagaaauaacgacuga

SEQ ID NO: 701181 - RNA, 19 nt, Homo sapiens
  misc_RNA (1)...(19): siRNA sense strand
ggaggaggaauucauagaa

SEQ ID NO: 701182 - RNA, 19 nt, Homo sapiens
  misc_RNA (1)...(19): siRNA sense strand
agaaauaacgacugaaaga

SEQ ID NO: 701183 - RNA, 19 nt, Homo sapiens
  misc_RNA (1)...(19): siRNA sense strand
gaacaucuccagaggaacu

SEQ ID NO: 701184 - RNA, 19 nt, Homo sapiens
  misc_RNA (1)...(19): siRNA sense strand
ccaaugaggccaacaagac

SEQ ID NO: 701185 - RNA, 19 nt, Homo sapiens
  misc_RNA (1)...(19): siRNA sense strand
gaaauaacgacugaaagac

SEQ ID NO: 701186 - RNA, 19 nt, Homo sapiens
  misc_RNA (1)...(19): siRNA sense strand
aaauggaggaggaggaauu

SEQ ID NO: 701187 - RNA, 19 nt, Homo sapiens
  misc_RNA (1)...(19): siRNA sense strand
aggaggaauucauagaaau

SEQ ID NO: 701188 - RNA, 19 nt, Homo sapiens
  misc_RNA (1)...(19): siRNA sense strand
ccaaauggaggaggaggaa

SEQ ID NO: 701189 - RNA, 19 nt, Homo sapiens
  misc_RNA (1)...(19): siRNA sense strand
cccgcaaccugcuccuaaa

SEQ ID NO: 701190 - RNA, 19 nt, Homo sapiens
  misc_RNA (1)...(19): siRNA sense strand
ggaauucauagaaauaacg

SEQ ID NO: 701191 - RNA, 19 nt, Homo sapiens
  misc_RNA (1)...(19): siRNA sense strand
gccaaugaggccaacaaga

SEQ ID NO: 701192 - RNA, 19 nt, Homo sapiens
  misc_RNA (1)...(19): siRNA sense strand
gaggaggaggaauucauag

SEQ ID NO: 701193 - RNA, 19 nt, Homo sapiens
  misc_RNA (1)...(19): siRNA sense strand
ccaugaagauguuugaaua

SEQ ID NO: 701194 - RNA, 19 nt, Homo sapiens
  misc_RNA (1)...(19): siRNA sense strand
guacaugugugcagacaaa

SEQ ID NO: 701195 - RNA, 19 nt, Homo sapiens
  misc_RNA (1)...(19): siRNA sense strand
guacaugggauacaaauuu

SEQ ID NO: 701196 - RNA, 19 nt, Homo sapiens
  misc_RNA (1)...(19): siRNA sense strand
gauacaaauuugagcagua

SEQ ID NO: 701197 - RNA, 19 nt, Homo sapiens
  misc_RNA (1)...(19): siRNA sense strand
gagaggagcugagaagaca

SEQ ID NO: 701198 - RNA, 19 nt, Homo sapiens
  misc_RNA (1)...(19): siRNA sense strand
gaagauguuugaauauguc

SEQ ID NO: 701199 - RNA, 19 nt, Homo sapiens
  misc_RNA (1)...(19): siRNA sense strand
gcacgguuguccaggauga

SEQ ID NO: 701200 - RNA, 19 nt, Homo sapiens
  misc_RNA (1)...(19): siRNA sense strand
ccacagacccugcccucua

SEQ ID NO: 701201 - RNA, 19 nt, Homo sapiens
  misc_RNA (1)...(19): siRNA sense strand
uugaauaugucaggaauga

SEQ ID NO: 701202 - RNA, 19 nt, Homo sapiens
  misc_RNA (1)...(19): siRNA sense strand
uaugguauguggaagcuau

SEQ ID NO: 701203 - RNA, 19 nt, Homo sapiens
  misc_RNA (1)...(19): siRNA sense strand
uacaugggauacaaauuug

SEQ ID NO: 701204 - RNA, 19 nt, Homo sapiens
  misc_RNA (1)...(19): siRNA sense strand
gagcacgguuguccaggau

SEQ ID NO: 701205 - RNA, 19 nt, Homo sapiens
  misc_RNA (1)...(19): siRNA sense strand
caagagaggagcugagaag

SEQ ID NO: 701206 - RNA, 19 nt, Homo sapiens
  misc_RNA (1)...(19): siRNA sense strand
ccucuacucugggcccuuu

SEQ ID NO: 701207 - RNA, 19 nt, Homo sapiens
  misc_RNA (1)...(19): siRNA sense strand
acggauacccggaucgaua

SEQ ID NO: 701208 - RNA, 19 nt, Homo sapiens
  misc_RNA (1)...(19): siRNA sense strand
acaccaagaugcaccuuac

SEQ ID NO: 701209 - RNA, 19 nt, Homo sapiens
  misc_RNA (1)...(19): siRNA sense strand
ucguucaucucuucucuug

SEQ ID NO: 701210 - RNA, 19 nt, Homo sapiens
  misc_RNA (1)...(19): siRNA sense strand
gaagccacccucugcucuu

SEQ ID NO: 701211 - RNA, 19 nt, Homo sapiens
  misc_RNA (1)...(19): siRNA sense strand
uagcugagccucggaacaa

SEQ ID NO: 701212 - RNA, 19 nt, Homo sapiens
  misc_RNA (1)...(19): siRNA sense strand
guuugaauaugucaggaau

SEQ ID NO: 701213 - RNA, 19 nt, Homo sapiens
  misc_RNA (1)...(19): siRNA sense strand
uccgggagcuuauguacau

SEQ ID NO: 701214 - RNA, 19 nt, Homo sapiens
  misc_RNA (1)...(19): siRNA sense strand
caagacucccucucccaaa

SEQ ID NO: 701215 - RNA, 19 nt, Homo sapiens
  misc_RNA (1)...(19): siRNA sense strand
gaggagcugagaagacaga

SEQ ID NO: 701216 - RNA, 19 nt, Homo sapiens
  misc_RNA (1)...(19): siRNA sense strand
acucugggcccuuuccuuu

SEQ ID NO: 701217 - RNA, 19 nt, Homo sapiens
  misc_RNA (1)...(19): siRNA sense strand
aagacucccucucccaaau

SEQ ID NO: 701218 - RNA, 19 nt, Homo sapiens
  misc_RNA (1)...(19): siRNA sense strand
gaccuuuccuaccaugaag

SEQ ID NO: 701219 - RNA, 19 nt, Homo sapiens
  misc_RNA (1)...(19): siRNA sense strand
gcucguucaucucuucucu

SEQ ID NO: 701220 - RNA, 19 nt, Homo sapiens
  misc_RNA (1)...(19): siRNA sense strand
acgaggagguccaggaaag

SEQ ID NO: 701221 - RNA, 19 nt, Homo sapiens
  misc_RNA (1)...(19): siRNA sense strand
agacucccucucccaaaua

SEQ ID NO: 701222 - RNA, 19 nt, Homo sapiens
  misc_RNA (1)...(19): siRNA sense strand
cacagacccugcccucuac

SEQ ID NO: 701223 - RNA, 19 nt, Homo sapiens
  misc_RNA (1)...(19): siRNA sense strand
auacaaauuugagcaguac

SEQ ID NO: 701224 - RNA, 19 nt, Homo sapiens
  misc_RNA (1)...(19): siRNA sense strand
caaauuugagcaguacaug

SEQ ID NO: 701225 - RNA, 19 nt, Homo sapiens
  misc_RNA (1)...(19): siRNA sense strand
caggcucguucaucucuuc

SEQ ID NO: 701226 - RNA, 19 nt, Homo sapiens
  misc_RNA (1)...(19): siRNA sense strand
gacucccucucccaaauag

SEQ ID NO: 701227 - RNA, 19 nt, Homo sapiens
  misc_RNA (1)...(19): siRNA sense strand
acaccaacguggccuucug

SEQ ID NO: 701228 - RNA, 19 nt, Homo sapiens
  misc_RNA (1)...(19): siRNA sense strand
ggccuucugcucugugcua

SEQ ID NO: 701229 - RNA, 19 nt, Homo sapiens
  misc_RNA (1)...(19): siRNA sense strand
cuucggaacugggcugcuu

SEQ ID NO: 701230 - RNA, 19 nt, Homo sapiens
  misc_RNA (1)...(19): siRNA sense strand
ccaugaagauguuugaaua

SEQ ID NO: 701231 - RNA, 19 nt, Homo sapiens
  misc_RNA (1)...(19): siRNA sense strand
guacaugugugcagacaaa

SEQ ID NO: 701232 - RNA, 19 nt, Homo sapiens
  misc_RNA (1)...(19): siRNA sense strand
guacaugggauacaaauuu

SEQ ID NO: 701233 - RNA, 19 nt, Homo sapiens
  misc_RNA (1)...(19): siRNA sense strand
gauacaaauuugagcagua

SEQ ID NO: 701234 - RNA, 19 nt, Homo sapiens
  misc_RNA (1)...(19): siRNA sense strand
gagaggagcugagaagaca

SEQ ID NO: 701235 - RNA, 19 nt, Homo sapiens
  misc_RNA (1)...(19): siRNA sense strand
gaagauguuugaauauguc

SEQ ID NO: 701236 - RNA, 19 nt, Homo sapiens
  misc_RNA (1)...(19): siRNA sense strand
gcacgguuguccaggauga

SEQ ID NO: 701237 - RNA, 19 nt, Homo sapiens
  misc_RNA (1)...(19): siRNA sense strand
ccacagacccugcccucua

SEQ ID NO: 701238 - RNA, 19 nt, Homo sapiens
  misc_RNA (1)...(19): siRNA sense strand
uugaauaugucaggaauga

SEQ ID NO: 701239 - RNA, 19 nt, Homo sapiens
  misc_RNA (1)...(19): siRNA sense strand
uaugguauguggaagcuau

SEQ ID NO: 701240 - RNA, 19 nt, Homo sapiens
  misc_RNA (1)...(19): siRNA sense strand
uacaugggauacaaauuug

SEQ ID NO: 701241 - RNA, 19 nt, Homo sapiens
  misc_RNA (1)...(19): siRNA sense strand
gagcacgguuguccaggau

SEQ ID NO: 701242 - RNA, 19 nt, Homo sapiens
  misc_RNA (1)...(19): siRNA sense strand
caagagaggagcugagaag

SEQ ID NO: 701243 - RNA, 19 nt, Homo sapiens
  misc_RNA (1)...(19): siRNA sense strand
ccucuacucugggcccuuu

SEQ ID NO: 701244 - RNA, 19 nt, Homo sapiens
  misc_RNA (1)...(19): siRNA sense strand
acggauacccggaucgaua

SEQ ID NO: 701245 - RNA, 19 nt, Homo sapiens
  misc_RNA (1)...(19): siRNA sense strand
acaccaagaugcaccuuac

SEQ ID NO: 701246 - RNA, 19 nt, Homo sapiens
  misc_RNA (1)...(19): siRNA sense strand
ucguucaucucuucucuug

SEQ ID NO: 701247 - RNA, 19 nt, Homo sapiens
  misc_RNA (1)...(19): siRNA sense strand
gaagccacccucugcucuu

SEQ ID NO: 701248 - RNA, 19 nt, Homo sapiens
  misc_RNA (1)...(19): siRNA sense strand
uagcugagccucggaacaa

SEQ ID NO: 701249 - RNA, 19 nt, Homo sapiens
  misc_RNA (1)...(19): siRNA sense strand
guuugaauaugucaggaau

SEQ ID NO: 701250 - RNA, 19 nt, Homo sapiens
  misc_RNA (1)...(19): siRNA sense strand
uccgggagcuuauguacau

SEQ ID NO: 701251 - RNA, 19 nt, Homo sapiens
  misc_RNA (1)...(19): siRNA sense strand
caagacucccucucccaaa

SEQ ID NO: 701252 - RNA, 19 nt, Homo sapiens
  misc_RNA (1)...(19): siRNA sense strand
gaggagcugagaagacaga

SEQ ID NO: 701253 - RNA, 19 nt, Homo sapiens
  misc_RNA (1)...(19): siRNA sense strand
acucugggcccuuuccuuu

SEQ ID NO: 701254 - RNA, 19 nt, Homo sapiens
  misc_RNA (1)...(19): siRNA sense strand
aagacucccucucccaaau

SEQ ID NO: 701255 - RNA, 19 nt, Homo sapiens
  misc_RNA (1)...(19): siRNA sense strand
gaccuuuccuaccaugaag

SEQ ID NO: 701256 - RNA, 19 nt, Homo sapiens
  misc_RNA (1)...(19): siRNA sense strand
gcucguucaucucuucucu

SEQ ID NO: 701257 - RNA, 19 nt, Homo sapiens
  misc_RNA (1)...(19): siRNA sense strand
acgaggagguccaggaaag

SEQ ID NO: 701258 - RNA, 19 nt, Homo sapiens
  misc_RNA (1)...(19): siRNA sense strand
agacucccucucccaaaua

SEQ ID NO: 701259 - RNA, 19 nt, Homo sapiens
  misc_RNA (1)...(19): siRNA sense strand
cacagacccugcccucuac

SEQ ID NO: 701260 - RNA, 19 nt, Homo sapiens
  misc_RNA (1)...(19): siRNA sense strand
auacaaauuugagcaguac

SEQ ID NO: 701261 - RNA, 19 nt, Homo sapiens
  misc_RNA (1)...(19): siRNA sense strand
caaauuugagcaguacaug

SEQ ID NO: 701262 - RNA, 19 nt, Homo sapiens
  misc_RNA (1)...(19): siRNA sense strand
caggcucguucaucucuuc

SEQ ID NO: 701263 - RNA, 19 nt, Homo sapiens
  misc_RNA (1)...(19): siRNA sense strand
gacucccucucccaaauag

SEQ ID NO: 701264 - RNA, 19 nt, Homo sapiens
  misc_RNA (1)...(19): siRNA sense strand
acaccaacguggccuucug

SEQ ID NO: 701265 - RNA, 19 nt, Homo sapiens
  misc_RNA (1)...(19): siRNA sense strand
ggccuucugcucugugcua

SEQ ID NO: 701266 - RNA, 19 nt, Homo sapiens
  misc_RNA (1)...(19): siRNA sense strand
cuucggaacugggcugcuu

SEQ ID NO: 701267 - RNA, 19 nt, Homo sapiens
  misc_RNA (1)...(19): siRNA sense strand
gcacagaacugccgaaaca

SEQ ID NO: 701268 - RNA, 19 nt, Homo sapiens
  misc_RNA (1)...(19): siRNA sense strand
ggaagcaacuggcaaagaa

SEQ ID NO: 701269 - RNA, 19 nt, Homo sapiens
  misc_RNA (1)...(19): siRNA sense strand
gcacacaguuagaagauga

SEQ ID NO: 701270 - RNA, 19 nt, Homo sapiens
  misc_RNA (1)...(19): siRNA sense strand
gaagaaugcauccugauaa

SEQ ID NO: 701271 - RNA, 19 nt, Homo sapiens
  misc_RNA (1)...(19): siRNA sense strand
gaucugaccuccugugugu

SEQ ID NO: 701272 - RNA, 19 nt, Homo sapiens
  misc_RNA (1)...(19): siRNA sense strand
gccgaaacauugaacauuu

SEQ ID NO: 701273 - RNA, 19 nt, Homo sapiens
  misc_RNA (1)...(19): siRNA sense strand
gaugaaggccuuauuaaca

SEQ ID NO: 701274 - RNA, 19 nt, Homo sapiens
  misc_RNA (1)...(19): siRNA sense strand
gggcucagcucccucaugu

SEQ ID NO: 701275 - RNA, 19 nt, Homo sapiens
  misc_RNA (1)...(19): siRNA sense strand
ucacugacagcacguguua

SEQ ID NO: 701276 - RNA, 19 nt, Homo sapiens
  misc_RNA (1)...(19): siRNA sense strand
gcucacguaucacggauga

SEQ ID NO: 701277 - RNA, 19 nt, Homo sapiens
  misc_RNA (1)...(19): siRNA sense strand
guuccaagcugaaacaucu

SEQ ID NO: 701278 - RNA, 19 nt, Homo sapiens
  misc_RNA (1)...(19): siRNA sense strand
ugaagaaugcauccugaua

SEQ ID NO: 701279 - RNA, 19 nt, Homo sapiens
  misc_RNA (1)...(19): siRNA sense strand
gcccgaugcucccauuuga

SEQ ID NO: 701280 - RNA, 19 nt, Homo sapiens
  misc_RNA (1)...(19): siRNA sense strand
guuauagccuuagcagauu

SEQ ID NO: 701281 - RNA, 19 nt, Homo sapiens
  misc_RNA (1)...(19): siRNA sense strand
ccgaaacauugaacauuug

SEQ ID NO: 701282 - RNA, 19 nt, Homo sapiens
  misc_RNA (1)...(19): siRNA sense strand
ucagcucccucaugucaaa

SEQ ID NO: 701283 - RNA, 19 nt, Homo sapiens
  misc_RNA (1)...(19): siRNA sense strand
gaaccucucuuggugugau

SEQ ID NO: 701284 - RNA, 19 nt, Homo sapiens
  misc_RNA (1)...(19): siRNA sense strand
gaagguguggugcagauau

SEQ ID NO: 701285 - RNA, 19 nt, Homo sapiens
  misc_RNA (1)...(19): siRNA sense strand
ggacaacugccuccucauc

SEQ ID NO: 701286 - RNA, 19 nt, Homo sapiens
  misc_RNA (1)...(19): siRNA sense strand
gauggaagcaacuggcaaa

SEQ ID NO: 701287 - RNA, 19 nt, Homo sapiens
  misc_RNA (1)...(19): siRNA sense strand
gcucagcucccucauguca

SEQ ID NO: 701288 - RNA, 19 nt, Homo sapiens
  misc_RNA (1)...(19): siRNA sense strand
ugaaggccuuauuaacaaa

SEQ ID NO: 701289 - RNA, 19 nt, Homo sapiens
  misc_RNA (1)...(19): siRNA sense strand
gaagcgaugcgguggauuc

SEQ ID NO: 701290 - RNA, 19 nt, Homo sapiens
  misc_RNA (1)...(19): siRNA sense strand
aaugaugaaggccuuauua

SEQ ID NO: 701291 - RNA, 19 nt, Homo sapiens
  misc_RNA (1)...(19): siRNA sense strand
ugaagaccuuugcacagaa

SEQ ID NO: 701292 - RNA, 19 nt, Homo sapiens
  misc_RNA (1)...(19): siRNA sense strand
gaacugccgaaacauugaa

SEQ ID NO: 701293 - RNA, 19 nt, Homo sapiens
  misc_RNA (1)...(19): siRNA sense strand
gaagaccuuugcacagaac

SEQ ID NO: 701294 - RNA, 19 nt, Homo sapiens
  misc_RNA (1)...(19): siRNA sense strand
uuacagcccuggguuugaa

SEQ ID NO: 701295 - RNA, 19 nt, Homo sapiens
  misc_RNA (1)...(19): siRNA sense strand
augaaggccuuauuaacaa

SEQ ID NO: 701296 - RNA, 19 nt, Homo sapiens
  misc_RNA (1)...(19): siRNA sense strand
gcucggaauugccacgaau

SEQ ID NO: 701297 - RNA, 19 nt, Homo sapiens
  misc_RNA (1)...(19): siRNA sense strand
cagaacugccgaaacauug

SEQ ID NO: 701298 - RNA, 19 nt, Homo sapiens
  misc_RNA (1)...(19): siRNA sense strand
gaacaucuuagcccuggau

SEQ ID NO: 701299 - RNA, 19 nt, Homo sapiens
  misc_RNA (1)...(19): siRNA sense strand
uugaagaccuuugcacaga

SEQ ID NO: 701300 - RNA, 19 nt, Homo sapiens
  misc_RNA (1)...(19): siRNA sense strand
ucauccagcucuccauuca

SEQ ID NO: 701301 - RNA, 19 nt, Homo sapiens
  misc_RNA (1)...(19): siRNA sense strand
gaacuguccgcgacugcaa

SEQ ID NO: 701302 - RNA, 19 nt, Homo sapiens
  misc_RNA (1)...(19): siRNA sense strand
gaagaugaagcucugaaac

SEQ ID NO: 701303 - RNA, 19 nt, Homo sapiens
  misc_RNA (1)...(19): siRNA sense strand
ccucacagaugccucucuu

SEQ ID NO: 701304 - RNA, 19 nt, Homo sapiens
  misc_RNA (1)...(19): siRNA sense strand
gaauuacugccaugagcuu

SEQ ID NO: 701305 - RNA, 19 nt, Homo sapiens
  misc_RNA (1)...(19): siRNA sense strand
aagcaacuggcaaagaaua

SEQ ID NO: 701306 - RNA, 19 nt, Homo sapiens
  misc_RNA (1)...(19): siRNA sense strand
acagaugccucucuuacag

SEQ ID NO: 701307 - RNA, 19 nt, Homo sapiens
  misc_RNA (1)...(19): siRNA sense strand
acugacagcacguguuaua

SEQ ID NO: 701308 - RNA, 19 nt, Homo sapiens
  misc_RNA (1)...(19): siRNA sense strand
gcugaaacaucuggaucug

SEQ ID NO: 701309 - RNA, 19 nt, Homo sapiens
  misc_RNA (1)...(19): siRNA sense strand
ucacuguccuaaacugcaa

SEQ ID NO: 701310 - RNA, 19 nt, Homo sapiens
  misc_RNA (1)...(19): siRNA sense strand
uuacaaacagcuccuugaa

SEQ ID NO: 701311 - RNA, 19 nt, Homo sapiens
  misc_RNA (1)...(19): siRNA sense strand
cgaaacauugaacauuuga

SEQ ID NO: 701312 - RNA, 19 nt, Homo sapiens
  misc_RNA (1)...(19): siRNA sense strand
gugcaggugcugugucauu

SEQ ID NO: 701313 - RNA, 19 nt, Homo sapiens
  misc_RNA (1)...(19): siRNA sense strand
gacaacugccuccucauca

SEQ ID NO: 701314 - RNA, 19 nt, Homo sapiens
  misc_RNA (1)...(19): siRNA sense strand
gaugcucccauuugacuga

SEQ ID NO: 701315 - RNA, 19 nt, Homo sapiens
  misc_RNA (1)...(19): siRNA sense strand
gaagcaacuggcaaagaau

SEQ ID NO: 701316 - RNA, 19 nt, Homo sapiens
  misc_RNA (1)...(19): siRNA sense strand
acagaacugccgaaacauu

SEQ ID NO: 701317 - RNA, 19 nt, Homo sapiens
  misc_RNA (1)...(19): siRNA sense strand
uggaacaccuagagaacug

SEQ ID NO: 701318 - RNA, 19 nt, Homo sapiens
  misc_RNA (1)...(19): siRNA sense strand
gaugugcacagauuuccaa

SEQ ID NO: 701319 - RNA, 19 nt, Homo sapiens
  misc_RNA (1)...(19): siRNA sense strand
gcaacuggcaaagaauaga

SEQ ID NO: 701320 - RNA, 19 nt, Homo sapiens
  misc_RNA (1)...(19): siRNA sense strand
gccgaaaccuggaguaccu

SEQ ID NO: 701321 - RNA, 19 nt, Homo sapiens
  misc_RNA (1)...(19): siRNA sense strand
guaacuuugugccgaugug

SEQ ID NO: 701322 - RNA, 19 nt, Homo sapiens
  misc_RNA (1)...(19): siRNA sense strand
gagccugucccacugugaa

SEQ ID NO: 701323 - RNA, 19 nt, Homo sapiens
  misc_RNA (1)...(19): siRNA sense strand
ucacagaugccucucuuac

SEQ ID NO: 701324 - RNA, 19 nt, Homo sapiens
  misc_RNA (1)...(19): siRNA sense strand
uguccgcgacugcaaauuu

SEQ ID NO: 701325 - RNA, 19 nt, Homo sapiens
  misc_RNA (1)...(19): siRNA sense strand
gccacgaauuggagaagau

SEQ ID NO: 701326 - RNA, 19 nt, Homo sapiens
  misc_RNA (1)...(19): siRNA sense strand
aagaaugcauccugauaac

SEQ ID NO: 701327 - RNA, 19 nt, Homo sapiens
  misc_RNA (1)...(19): siRNA sense strand
uguuauagccuuagcagau

SEQ ID NO: 701328 - RNA, 19 nt, Homo sapiens
  misc_RNA (1)...(19): siRNA sense strand
gaugaagcucugaaacaca

SEQ ID NO: 701329 - RNA, 19 nt, Homo sapiens
  misc_RNA (1)...(19): siRNA sense strand
aagaugaagcucugaaaca

SEQ ID NO: 701330 - RNA, 19 nt, Homo sapiens
  misc_RNA (1)...(19): siRNA sense strand
caacuggcaaagaauagau

SEQ ID NO: 701331 - RNA, 19 nt, Homo sapiens
  misc_RNA (1)...(19): siRNA sense strand
uggagcgccucgagcugua

SEQ ID NO: 701332 - RNA, 19 nt, Homo sapiens
  misc_RNA (1)...(19): siRNA sense strand
gaccuccugugugucuauu

SEQ ID NO: 701333 - RNA, 19 nt, Homo sapiens
  misc_RNA (1)...(19): siRNA sense strand
caaugaugaaggccuuauu

SEQ ID NO: 701334 - RNA, 19 nt, Homo sapiens
  misc_RNA (1)...(19): siRNA sense strand
gaagcucugaaacacauuc

SEQ ID NO: 701335 - RNA, 19 nt, Homo sapiens
  misc_RNA (1)...(19): siRNA sense strand
gggcugcacacaguuagaa

SEQ ID NO: 701336 - RNA, 19 nt, Homo sapiens
  misc_RNA (1)...(19): siRNA sense strand
agaagaugaagcucugaaa

SEQ ID NO: 701337 - RNA, 19 nt, Homo sapiens
  misc_RNA (1)...(19): siRNA sense strand
gcugcccgaugcucccauu

SEQ ID NO: 701338 - RNA, 19 nt, Homo sapiens
  misc_RNA (1)...(19): siRNA sense strand
ugacgcagguuuuacacuu

SEQ ID NO: 701339 - RNA, 19 nt, Homo sapiens
  misc_RNA (1)...(19): siRNA sense strand
uccauucacuguccuaaac

SEQ ID NO: 701340 - RNA, 19 nt, Homo sapiens
  misc_RNA (1)...(19): siRNA sense strand
gaaaccuggaguaccugaa

SEQ ID NO: 701341 - RNA, 19 nt, Homo sapiens
  misc_RNA (1)...(19): siRNA sense strand
cuucuuggauauaguaacu

SEQ ID NO: 701342 - RNA, 19 nt, Homo sapiens
  misc_RNA (1)...(19): siRNA sense strand
augaagcucugaaacacau

SEQ ID NO: 701343 - RNA, 19 nt, Homo sapiens
  misc_RNA (1)...(19): siRNA sense strand
aagguguggugcagauaug

SEQ ID NO: 701344 - RNA, 19 nt, Homo sapiens
  misc_RNA (1)...(19): siRNA sense strand
agaugaagcucugaaacac

SEQ ID NO: 701345 - RNA, 19 nt, Homo sapiens
  misc_RNA (1)...(19): siRNA sense strand
ggggauuccuccuugaaga

SEQ ID NO: 701346 - RNA, 19 nt, Homo sapiens
  misc_RNA (1)...(19): siRNA sense strand
gaaagggaaugaauugcaa

SEQ ID NO: 701347 - RNA, 19 nt, Homo sapiens
  misc_RNA (1)...(19): siRNA sense strand
gggaaugaauugcaacguu

SEQ ID NO: 701348 - RNA, 19 nt, Homo sapiens
  misc_RNA (1)...(19): siRNA sense strand
guagaauguucgcugauga

SEQ ID NO: 701349 - RNA, 19 nt, Homo sapiens
  misc_RNA (1)...(19): siRNA sense strand
uaaccgacaugggaaguuu

SEQ ID NO: 701350 - RNA, 19 nt, Homo sapiens
  misc_RNA (1)...(19): siRNA sense strand
gaaaaugguuggaaguaga

SEQ ID NO: 701351 - RNA, 19 nt, Homo sapiens
  misc_RNA (1)...(19): siRNA sense strand
gaccugcacaaccuuaaua

SEQ ID NO: 701352 - RNA, 19 nt, Homo sapiens
  misc_RNA (1)...(19): siRNA sense strand
ggaaagggaaugaauugca

SEQ ID NO: 701353 - RNA, 19 nt, Homo sapiens
  misc_RNA (1)...(19): siRNA sense strand
cauccgcuaucucuacaaa

SEQ ID NO: 701354 - RNA, 19 nt, Homo sapiens
  misc_RNA (1)...(19): siRNA sense strand
gacaugggaaguuucgaua

SEQ ID NO: 701355 - RNA, 19 nt, Homo sapiens
  misc_RNA (1)...(19): siRNA sense strand
gaugaccugcacaaccuua

SEQ ID NO: 701356 - RNA, 19 nt, Homo sapiens
  misc_RNA (1)...(19): siRNA sense strand
gguuggaaguagaauguuc

SEQ ID NO: 701357 - RNA, 19 nt, Homo sapiens
  misc_RNA (1)...(19): siRNA sense strand
caacguuguauccgaaaga

SEQ ID NO: 701358 - RNA, 19 nt, Homo sapiens
  misc_RNA (1)...(19): siRNA sense strand
gaaaagcaccccaaagaac

SEQ ID NO: 701359 - RNA, 19 nt, Homo sapiens
  misc_RNA (1)...(19): siRNA sense strand
ggaaaaugguuggaaguag

SEQ ID NO: 701360 - RNA, 19 nt, Homo sapiens
  misc_RNA (1)...(19): siRNA sense strand
cggaguguaugacaacauc

SEQ ID NO: 701361 - RNA, 19 nt, Homo sapiens
  misc_RNA (1)...(19): siRNA sense strand
aaacgcauccgcuaucucu

SEQ ID NO: 701362 - RNA, 19 nt, Homo sapiens
  misc_RNA (1)...(19): siRNA sense strand
uaauaaacgcauccgcuau

SEQ ID NO: 701363 - RNA, 19 nt, Homo sapiens
  misc_RNA (1)...(19): siRNA sense strand
gaaugaauugcaacguugu

SEQ ID NO: 701364 - RNA, 19 nt, Homo sapiens
  misc_RNA (1)...(19): siRNA sense strand
guuggaaagggaaugaauu

SEQ ID NO: 701365 - RNA, 19 nt, Homo sapiens
  misc_RNA (1)...(19): siRNA sense strand
gcaacguuguauccgaaag

SEQ ID NO: 701366 - RNA, 19 nt, Homo sapiens
  misc_RNA (1)...(19): siRNA sense strand
gaauugcaacguuguaucc

SEQ ID NO: 701367 - RNA, 19 nt, Homo sapiens
  misc_RNA (1)...(19): siRNA sense strand
gauccugggaaacuuugaa

SEQ ID NO: 701368 - RNA, 19 nt, Homo sapiens
  misc_RNA (1)...(19): siRNA sense strand
cgacaugggaaguuucgau

SEQ ID NO: 701369 - RNA, 19 nt, Homo sapiens
  misc_RNA (1)...(19): siRNA sense strand
uccgcuaucucuacaaaca

SEQ ID NO: 701370 - RNA, 19 nt, Homo sapiens
  misc_RNA (1)...(19): siRNA sense strand
gagguuggaaagggaauga

SEQ ID NO: 701371 - RNA, 19 nt, Homo sapiens
  misc_RNA (1)...(19): siRNA sense strand
caaacacuuuaaccgacau

SEQ ID NO: 701372 - RNA, 19 nt, Homo sapiens
  misc_RNA (1)...(19): siRNA sense strand
aguagaauguucgcugaug

SEQ ID NO: 701373 - RNA, 19 nt, Homo sapiens
  misc_RNA (1)...(19): siRNA sense strand
cuagauugaucgguauaag

SEQ ID NO: 701374 - RNA, 19 nt, Homo sapiens
  misc_RNA (1)...(19): siRNA sense strand
ggccauguucggaguguau

SEQ ID NO: 701375 - RNA, 19 nt, Homo sapiens
  misc_RNA (1)...(19): siRNA sense strand
acaucgggauccugggaaa

SEQ ID NO: 701376 - RNA, 19 nt, Homo sapiens
  misc_RNA (1)...(19): siRNA sense strand
aauaaacgcauccgcuauc

SEQ ID NO: 701377 - RNA, 19 nt, Homo sapiens
  misc_RNA (1)...(19): siRNA sense strand
cugcacaaccuuaauaaac

SEQ ID NO: 701378 - RNA, 19 nt, Homo sapiens
  misc_RNA (1)...(19): siRNA sense strand
uuggaaagggaaugaauug

SEQ ID NO: 701379 - RNA, 19 nt, Homo sapiens
  misc_RNA (1)...(19): siRNA sense strand
ccaaagaaguaguggauuu

SEQ ID NO: 701380 - RNA, 19 nt, Homo sapiens
  misc_RNA (1)...(19): siRNA sense strand
gaaguaagaugggagauuc

SEQ ID NO: 701381 - RNA, 19 nt, Homo sapiens
  misc_RNA (1)...(19): siRNA sense strand
ccaaauguauucccaaguu

SEQ ID NO: 701382 - RNA, 19 nt, Homo sapiens
  misc_RNA (1)...(19): siRNA sense strand
acacagacauugaugaauu

SEQ ID NO: 701383 - RNA, 19 nt, Homo sapiens
  misc_RNA (1)...(19): siRNA sense strand
ugaagacuaugaugugaua

SEQ ID NO: 701384 - RNA, 19 nt, Homo sapiens
  misc_RNA (1)...(19): siRNA sense strand
ugugauagcuagcaugaua

SEQ ID NO: 701385 - RNA, 19 nt, Homo sapiens
  misc_RNA (1)...(19): siRNA sense strand
gcaguugugucaugauuga

SEQ ID NO: 701386 - RNA, 19 nt, Homo sapiens
  misc_RNA (1)...(19): siRNA sense strand
caaccacauugccaaguua

SEQ ID NO: 701387 - RNA, 19 nt, Homo sapiens
  misc_RNA (1)...(19): siRNA sense strand
guucucuucuggaauauua

SEQ ID NO: 701388 - RNA, 19 nt, Homo sapiens
  misc_RNA (1)...(19): siRNA sense strand
gcacagacuugcaaacuac

SEQ ID NO: 701389 - RNA, 19 nt, Homo sapiens
  misc_RNA (1)...(19): siRNA sense strand
uaaacuaccuuaugagcuu

SEQ ID NO: 701390 - RNA, 19 nt, Homo sapiens
  misc_RNA (1)...(19): siRNA sense strand
gaaaugaugaacacccaua

SEQ ID NO: 701391 - RNA, 19 nt, Homo sapiens
  misc_RNA (1)...(19): siRNA sense strand
gaacaacagguguauccua

SEQ ID NO: 701392 - RNA, 19 nt, Homo sapiens
  misc_RNA (1)...(19): siRNA sense strand
ugaauuagaugcaguugug

SEQ ID NO: 701393 - RNA, 19 nt, Homo sapiens
  misc_RNA (1)...(19): siRNA sense strand
ggaaguaaauaguucucuu

SEQ ID NO: 701394 - RNA, 19 nt, Homo sapiens
  misc_RNA (1)...(19): siRNA sense strand
ggauuuagcagguuucuga

SEQ ID NO: 701395 - RNA, 19 nt, Homo sapiens
  misc_RNA (1)...(19): siRNA sense strand
ucucaagacuucacuuauu

SEQ ID NO: 701396 - RNA, 19 nt, Homo sapiens
  misc_RNA (1)...(19): siRNA sense strand
gaaguuauuucugagaugu

SEQ ID NO: 701397 - RNA, 19 nt, Homo sapiens
  misc_RNA (1)...(19): siRNA sense strand
gcugugauccucugcaaua

SEQ ID NO: 701398 - RNA, 19 nt, Homo sapiens
  misc_RNA (1)...(19): siRNA sense strand
gcagguuucugaagguuug

SEQ ID NO: 701399 - RNA, 19 nt, Homo sapiens
  misc_RNA (1)...(19): siRNA sense strand
ggauuucaguucccauuau

SEQ ID NO: 701400 - RNA, 19 nt, Homo sapiens
  misc_RNA (1)...(19): siRNA sense strand
gcagccacuuucuuaauga

SEQ ID NO: 701401 - RNA, 19 nt, Homo sapiens
  misc_RNA (1)...(19): siRNA sense strand
auaguucucuucuggaaua

SEQ ID NO: 701402 - RNA, 19 nt, Homo sapiens
  misc_RNA (1)...(19): siRNA sense strand
uaaacgacuuguucucuau

SEQ ID NO: 701403 - RNA, 19 nt, Homo sapiens
  misc_RNA (1)...(19): siRNA sense strand
ggacauauuaggaacaaga

SEQ ID NO: 701404 - RNA, 19 nt, Homo sapiens
  misc_RNA (1)...(19): siRNA sense strand
gaugaugccuaugcagaaa

SEQ ID NO: 701405 - RNA, 19 nt, Homo sapiens
  misc_RNA (1)...(19): siRNA sense strand
ugacacuucucuggaauuu

SEQ ID NO: 701406 - RNA, 19 nt, Homo sapiens
  misc_RNA (1)...(19): siRNA sense strand
gaauauuacugagaaugga

SEQ ID NO: 701407 - RNA, 19 nt, Homo sapiens
  misc_RNA (1)...(19): siRNA sense strand
gccaaguuaugcagccuua

SEQ ID NO: 701408 - RNA, 19 nt, Homo sapiens
  misc_RNA (1)...(19): siRNA sense strand
gagauucuuuggucagaga

SEQ ID NO: 701409 - RNA, 19 nt, Homo sapiens
  misc_RNA (1)...(19): siRNA sense strand
gaaaacuccuggaaucuug

SEQ ID NO: 701410 - RNA, 19 nt, Homo sapiens
  misc_RNA (1)...(19): siRNA sense strand
ggaauggacagucuuaaca

SEQ ID NO: 701411 - RNA, 19 nt, Homo sapiens
  misc_RNA (1)...(19): siRNA sense strand
cuacaggccuuaaaucucu

SEQ ID NO: 701412 - RNA, 19 nt, Homo sapiens
  misc_RNA (1)...(19): siRNA sense strand
uaccagaccuguguagauu

SEQ ID NO: 701413 - RNA, 19 nt, Homo sapiens
  misc_RNA (1)...(19): siRNA sense strand
gagcugugcuagaacugaa

SEQ ID NO: 701414 - RNA, 19 nt, Homo sapiens
  misc_RNA (1)...(19): siRNA sense strand
uuaaacgacuuguucucua

SEQ ID NO: 701415 - RNA, 19 nt, Homo sapiens
  misc_RNA (1)...(19): siRNA sense strand
ccuauacuauguggaauuu

SEQ ID NO: 701416 - RNA, 19 nt, Homo sapiens
  misc_RNA (1)...(19): siRNA sense strand
gauaggagccaaguguaaa

SEQ ID NO: 701417 - RNA, 19 nt, Homo sapiens
  misc_RNA (1)...(19): siRNA sense strand
cuguggagauguaagaaua

SEQ ID NO: 701418 - RNA, 19 nt, Homo sapiens
  misc_RNA (1)...(19): siRNA sense strand
aaauaguucucuucuggaa

SEQ ID NO: 701419 - RNA, 19 nt, Homo sapiens
  misc_RNA (1)...(19): siRNA sense strand
gaggagaaaugaugaacac

SEQ ID NO: 701420 - RNA, 19 nt, Homo sapiens
  misc_RNA (1)...(19): siRNA sense strand
gaauggacagucuuaacaa

SEQ ID NO: 701421 - RNA, 19 nt, Homo sapiens
  misc_RNA (1)...(19): siRNA sense strand
caaauguauucccaaguuc

SEQ ID NO: 701422 - RNA, 19 nt, Homo sapiens
  misc_RNA (1)...(19): siRNA sense strand
gaacugaaugcaagcuuuc

SEQ ID NO: 701423 - RNA, 19 nt, Homo sapiens
  misc_RNA (1)...(19): siRNA sense strand
gaucuuucuuuacuugaug

SEQ ID NO: 701424 - RNA, 19 nt, Homo sapiens
  misc_RNA (1)...(19): siRNA sense strand
caaguuaugcagccuuaaa

SEQ ID NO: 701425 - RNA, 19 nt, Homo sapiens
  misc_RNA (1)...(19): siRNA sense strand
gauuucaguucccauuaug

SEQ ID NO: 701426 - RNA, 19 nt, Homo sapiens
  misc_RNA (1)...(19): siRNA sense strand
ucaaccacauugccaaguu

SEQ ID NO: 701427 - RNA, 19 nt, Homo sapiens
  misc_RNA (1)...(19): siRNA sense strand
ccaguaugccaaagaagua

SEQ ID NO: 701428 - RNA, 19 nt, Homo sapiens
  misc_RNA (1)...(19): siRNA sense strand
uaagaaaacuccuggaauc

SEQ ID NO: 701429 - RNA, 19 nt, Homo sapiens
  misc_RNA (1)...(19): siRNA sense strand
gaugugauagcuagcauga

SEQ ID NO: 701430 - RNA, 19 nt, Homo sapiens
  misc_RNA (1)...(19): siRNA sense strand
acacuucucuggaauuucu

SEQ ID NO: 701431 - RNA, 19 nt, Homo sapiens
  misc_RNA (1)...(19): siRNA sense strand
cagcuguguuucgaacuua

SEQ ID NO: 701432 - RNA, 19 nt, Homo sapiens
  misc_RNA (1)...(19): siRNA sense strand
agacuucacuuauugacau

SEQ ID NO: 701433 - RNA, 19 nt, Homo sapiens
  misc_RNA (1)...(19): siRNA sense strand
agaacugaaugcaagcuuu

SEQ ID NO: 701434 - RNA, 19 nt, Homo sapiens
  misc_RNA (1)...(19): siRNA sense strand
cacagacauugaugaauug

SEQ ID NO: 701435 - RNA, 19 nt, Homo sapiens
  misc_RNA (1)...(19): siRNA sense strand
gaacaaaaguagagcaaac

SEQ ID NO: 701436 - RNA, 19 nt, Homo sapiens
  misc_RNA (1)...(19): siRNA sense strand
gggaagggccaaauaaugg

SEQ ID NO: 701437 - RNA, 19 nt, Homo sapiens
  misc_RNA (1)...(19): siRNA sense strand
agaggacgccaccuaauuu

SEQ ID NO: 701438 - RNA, 19 nt, Homo sapiens
  misc_RNA (1)...(19): siRNA sense strand
gaugacacuucucuggaau

SEQ ID NO: 701439 - RNA, 19 nt, Homo sapiens
  misc_RNA (1)...(19): siRNA sense strand
aaacuaccuuaugagcuua

SEQ ID NO: 701440 - RNA, 19 nt, Homo sapiens
  misc_RNA (1)...(19): siRNA sense strand
cucaagacuucacuuauug

SEQ ID NO: 701441 - RNA, 19 nt, Homo sapiens
  misc_RNA (1)...(19): siRNA sense strand
ggagcagucauuagaauuc

SEQ ID NO: 701442 - RNA, 19 nt, Homo sapiens
  misc_RNA (1)...(19): siRNA sense strand
ucaccggucuuucccaugu

SEQ ID NO: 701443 - RNA, 19 nt, Homo sapiens
  misc_RNA (1)...(19): siRNA sense strand
uugaugaauuggcauguaa

SEQ ID NO: 701444 - RNA, 19 nt, Homo sapiens
  misc_RNA (1)...(19): siRNA sense strand
gcuaccaccucaagcuuuc

SEQ ID NO: 701445 - RNA, 19 nt, Homo sapiens
  misc_RNA (1)...(19): siRNA sense strand
gaauuaguacgccuugaau

SEQ ID NO: 701446 - RNA, 19 nt, Homo sapiens
  misc_RNA (1)...(19): siRNA sense strand
ucaagaggacgccaccuaa

SEQ ID NO: 701447 - RNA, 19 nt, Homo sapiens
  misc_RNA (1)...(19): siRNA sense strand
uuagaauucucgcuuguuc

SEQ ID NO: 701448 - RNA, 19 nt, Homo sapiens
  misc_RNA (1)...(19): siRNA sense strand
ugacacagacauugaugaa

SEQ ID NO: 701449 - RNA, 19 nt, Homo sapiens
  misc_RNA (1)...(19): siRNA sense strand
ucugagauguguccaaauc

SEQ ID NO: 701450 - RNA, 19 nt, Homo sapiens
  misc_RNA (1)...(19): siRNA sense strand
aaaggaugguuguggaaug

SEQ ID NO: 701451 - RNA, 19 nt, Homo sapiens
  misc_RNA (1)...(19): siRNA sense strand
ggaagugagaauaguaugu

SEQ ID NO: 701452 - RNA, 19 nt, Homo sapiens
  misc_RNA (1)...(19): siRNA sense strand
augcagagguaguccagua

SEQ ID NO: 701453 - RNA, 19 nt, Homo sapiens
  misc_RNA (1)...(19): siRNA sense strand
cacaccagcucccaaacuu

SEQ ID NO: 701454 - RNA, 19 nt, Homo sapiens
  misc_RNA (1)...(19): siRNA sense strand
guggagauguaagaauauu

SEQ ID NO: 701455 - RNA, 19 nt, Homo sapiens
  misc_RNA (1)...(19): siRNA sense strand
gauugaagacuaugaugug

SEQ ID NO: 701456 - RNA, 19 nt, Homo sapiens
  misc_RNA (1)...(19): siRNA sense strand
ugucaugauugaagacuau

SEQ ID NO: 701457 - RNA, 19 nt, Homo sapiens
  misc_RNA (1)...(19): siRNA sense strand
aaucucuccuccugugaua

SEQ ID NO: 701458 - RNA, 19 nt, Homo sapiens
  misc_RNA (1)...(19): siRNA sense strand
gcaauacauccaccucaau

SEQ ID NO: 701459 - RNA, 19 nt, Homo sapiens
  misc_RNA (1)...(19): siRNA sense strand
ccagaccuguguagauuag

SEQ ID NO: 701460 - RNA, 19 nt, Homo sapiens
  misc_RNA (1)...(19): siRNA sense strand
ucagacagcuguguuucga

SEQ ID NO: 701461 - RNA, 19 nt, Homo sapiens
  misc_RNA (1)...(19): siRNA sense strand
cgacuggaaguaaauaguu

SEQ ID NO: 701462 - RNA, 19 nt, Homo sapiens
  misc_RNA (1)...(19): siRNA sense strand
cgaauuaguacgccuugaa

SEQ ID NO: 701463 - RNA, 19 nt, Homo sapiens
  misc_RNA (1)...(19): siRNA sense strand
aauggacagucuuaacaaa

SEQ ID NO: 701464 - RNA, 19 nt, Homo sapiens
  misc_RNA (1)...(19): siRNA sense strand
gaaucaaacagccagacuu

SEQ ID NO: 701465 - RNA, 19 nt, Homo sapiens
  misc_RNA (1)...(19): siRNA sense strand
gaaguaguggauuucaguu

SEQ ID NO: 701466 - RNA, 19 nt, Homo sapiens
  misc_RNA (1)...(19): siRNA sense strand
gauaagcuaccaccucaag

SEQ ID NO: 701467 - RNA, 19 nt, Homo sapiens
  misc_RNA (1)...(19): siRNA sense strand
caucucuguugcaggauuu

SEQ ID NO: 701468 - RNA, 19 nt, Homo sapiens
  misc_RNA (1)...(19): siRNA sense strand
agaugacacuucucuggaa

SEQ ID NO: 701469 - RNA, 19 nt, Homo sapiens
  misc_RNA (1)...(19): siRNA sense strand
gaagugagaauaguauguc

SEQ ID NO: 701470 - RNA, 19 nt, Homo sapiens
  misc_RNA (1)...(19): siRNA sense strand
ccagugcuuucucucaaga

SEQ ID NO: 701471 - RNA, 19 nt, Homo sapiens
  misc_RNA (1)...(19): siRNA sense strand
uucccaagcucgccaguuu

SEQ ID NO: 701472 - RNA, 19 nt, Homo sapiens
  misc_RNA (1)...(19): siRNA sense strand
gagccaggacuauguggaa

SEQ ID NO: 701473 - RNA, 19 nt, Homo sapiens
  misc_RNA (1)...(19): siRNA sense strand
uccaguggcuuaauuuauc

SEQ ID NO: 701474 - RNA, 19 nt, Homo sapiens
  misc_RNA (1)...(19): siRNA sense strand
cagucucgcugcacucuug

SEQ ID NO: 701475 - RNA, 19 nt, Homo sapiens
  misc_RNA (1)...(19): siRNA sense strand
gacuggaaguaaauaguuc

SEQ ID NO: 701476 - RNA, 19 nt, Homo sapiens
  misc_RNA (1)...(19): siRNA sense strand
gggagauucuuuggucaga

SEQ ID NO: 701477 - RNA, 19 nt, Homo sapiens
  misc_RNA (1)...(19): siRNA sense strand
ggaacuuacuuuugaacaa

SEQ ID NO: 701478 - RNA, 19 nt, Homo sapiens
  misc_RNA (1)...(19): siRNA sense strand
gcuacaagaggagaaauga

SEQ ID NO: 701479 - RNA, 19 nt, Homo sapiens
  misc_RNA (1)...(19): siRNA sense strand
ccaaagcguuccuggauaa

SEQ ID NO: 701480 - RNA, 19 nt, Homo sapiens
  misc_RNA (1)...(19): siRNA sense strand
gaucugagcaacauuguaa

SEQ ID NO: 701481 - RNA, 19 nt, Homo sapiens
  misc_RNA (1)...(19): siRNA sense strand
ccacaaccaugccaagaug

SEQ ID NO: 701482 - RNA, 19 nt, Homo sapiens
  misc_RNA (1)...(19): siRNA sense strand
gcgagaacaucgaggaguu

SEQ ID NO: 701483 - RNA, 19 nt, Homo sapiens
  misc_RNA (1)...(19): siRNA sense strand
cccaggaggugucagcaua

SEQ ID NO: 701484 - RNA, 19 nt, Homo sapiens
  misc_RNA (1)...(19): siRNA sense strand
cgacauccgugugcccuuu

SEQ ID NO: 701485 - RNA, 19 nt, Homo sapiens
  misc_RNA (1)...(19): siRNA sense strand
ccugaaacaugaacagaau

SEQ ID NO: 701486 - RNA, 19 nt, Homo sapiens
  misc_RNA (1)...(19): siRNA sense strand
ggaccuggguugucauguc

SEQ ID NO: 701487 - RNA, 19 nt, Homo sapiens
  misc_RNA (1)...(19): siRNA sense strand
gcuaugacccagcaucuga

SEQ ID NO: 701488 - RNA, 19 nt, Homo sapiens
  misc_RNA (1)...(19): siRNA sense strand
ggcaagaccuggugaaagc

SEQ ID NO: 701489 - RNA, 19 nt, Homo sapiens
  misc_RNA (1)...(19): siRNA sense strand
guaaagacggcaccuaaag

SEQ ID NO: 701490 - RNA, 19 nt, Homo sapiens
  misc_RNA (1)...(19): siRNA sense strand
gcaacgacgacgugaaaga

SEQ ID NO: 701491 - RNA, 19 nt, Homo sapiens
  misc_RNA (1)...(19): siRNA sense strand
cgugaaagaugcuauuguc

SEQ ID NO: 701492 - RNA, 19 nt, Homo sapiens
  misc_RNA (1)...(19): siRNA sense strand
acgcuugccugaaacauga

SEQ ID NO: 701493 - RNA, 19 nt, Homo sapiens
  misc_RNA (1)...(19): siRNA sense strand
gcaaugaccaccagaugag

SEQ ID NO: 701494 - RNA, 19 nt, Homo sapiens
  misc_RNA (1)...(19): siRNA sense strand
cagaggaggcagugaaaga

SEQ ID NO: 701495 - RNA, 19 nt, Homo sapiens
  misc_RNA (1)...(19): siRNA sense strand
gcucaucgaagccaccaaa

SEQ ID NO: 701496 - RNA, 19 nt, Homo sapiens
  misc_RNA (1)...(19): siRNA sense strand
cccaggagcccacacauga

SEQ ID NO: 701497 - RNA, 19 nt, Homo sapiens
  misc_RNA (1)...(19): siRNA sense strand
gcuugaaggugcucaucga

SEQ ID NO: 701498 - RNA, 19 nt, Homo sapiens
  misc_RNA (1)...(19): siRNA sense strand
uaaagacggcaccuaaagu

SEQ ID NO: 701499 - RNA, 19 nt, Homo sapiens
  misc_RNA (1)...(19): siRNA sense strand
caacgacgacgugaaagau

SEQ ID NO: 701500 - RNA, 19 nt, Homo sapiens
  misc_RNA (1)...(19): siRNA sense strand
gcucugggauccgcugugu

SEQ ID NO: 701501 - RNA, 19 nt, Homo sapiens
  misc_RNA (1)...(19): siRNA sense strand
cacaugacauccugcagau

SEQ ID NO: 701502 - RNA, 19 nt, Homo sapiens
  misc_RNA (1)...(19): siRNA sense strand
caccaaagcguuccuggau

SEQ ID NO: 701503 - RNA, 19 nt, Homo sapiens
  misc_RNA (1)...(19): siRNA sense strand
accaaagcguuccuggaua

SEQ ID NO: 701504 - RNA, 19 nt, Homo sapiens
  misc_RNA (1)...(19): siRNA sense strand
uggccacgcugacccagaa

SEQ ID NO: 701505 - RNA, 19 nt, Homo sapiens
  misc_RNA (1)...(19): siRNA sense strand
ggagaacaaaggcuugaag

SEQ ID NO: 701506 - RNA, 19 nt, Homo sapiens
  misc_RNA (1)...(19): siRNA sense strand
cgacaacagccgcaucauc

SEQ ID NO: 701507 - RNA, 19 nt, Homo sapiens
  misc_RNA (1)...(19): siRNA sense strand
ugagcaacauuguaaagac

SEQ ID NO: 701508 - RNA, 19 nt, Homo sapiens
  misc_RNA (1)...(19): siRNA sense strand
cgacgugaaagaugcuauu

SEQ ID NO: 701509 - RNA, 19 nt, Homo sapiens
  misc_RNA (1)...(19): siRNA sense strand
gacggcaccuaaagucucu

SEQ ID NO: 701510 - RNA, 19 nt, Homo sapiens
  misc_RNA (1)...(19): siRNA sense strand
gagaacaucgaggaguuug

SEQ ID NO: 701511 - RNA, 19 nt, Homo sapiens
  misc_RNA (1)...(19): siRNA sense strand
ugacccagaaugcugauga

SEQ ID NO: 701512 - RNA, 19 nt, Homo sapiens
  misc_RNA (1)...(19): siRNA sense strand
caaccaugccaagaugauu

SEQ ID NO: 701513 - RNA, 19 nt, Homo sapiens
  misc_RNA (1)...(19): siRNA sense strand
aagaggccguggagcaguu

SEQ ID NO: 701514 - RNA, 19 nt, Homo sapiens
  misc_RNA (1)...(19): siRNA sense strand
ugaaggcacacccgcagaa

SEQ ID NO: 701515 - RNA, 19 nt, Homo sapiens
  misc_RNA (1)...(19): siRNA sense strand
aggcaacgacgacgugaaa

SEQ ID NO: 701516 - RNA, 19 nt, Homo sapiens
  misc_RNA (1)...(19): siRNA sense strand
ggccagaggaggcagugaa

SEQ ID NO: 701517 - RNA, 19 nt, Homo sapiens
  misc_RNA (1)...(19): siRNA sense strand
cgagaacaucgaggaguuu

SEQ ID NO: 701518 - RNA, 19 nt, Homo sapiens
  misc_RNA (1)...(19): siRNA sense strand
uguaaagacggcaccuaaa

SEQ ID NO: 701519 - RNA, 19 nt, Homo sapiens
  misc_RNA (1)...(19): siRNA sense strand
gccagaggaggcagugaaa

SEQ ID NO: 701520 - RNA, 19 nt, Homo sapiens
  misc_RNA (1)...(19): siRNA sense strand
aaagacggcaccuaaaguc

SEQ ID NO: 701521 - RNA, 19 nt, Homo sapiens
  misc_RNA (1)...(19): siRNA sense strand
gcauugcccaggagaccuu

SEQ ID NO: 701522 - RNA, 19 nt, Homo sapiens
  misc_RNA (1)...(19): siRNA sense strand
gccugaaacaugaacagaa

SEQ ID NO: 701523 - RNA, 19 nt, Homo sapiens
  misc_RNA (1)...(19): siRNA sense strand
ccaggagaccuuugaugca

SEQ ID NO: 701524 - RNA, 19 nt, Homo sapiens
  misc_RNA (1)...(19): siRNA sense strand
uuguaaagacggcaccuaa

SEQ ID NO: 701525 - RNA, 19 nt, Homo sapiens
  misc_RNA (1)...(19): siRNA sense strand
gacccagaaugcugaugag

SEQ ID NO: 701526 - RNA, 19 nt, Homo sapiens
  misc_RNA (1)...(19): siRNA sense strand
gaaacgacaucgagaagaa

SEQ ID NO: 701527 - RNA, 19 nt, Homo sapiens
  misc_RNA (1)...(19): siRNA sense strand
gcacgaacgucggaaacga

SEQ ID NO: 701528 - RNA, 19 nt, Homo sapiens
  misc_RNA (1)...(19): siRNA sense strand
gagaagaacaggauaaagc

SEQ ID NO: 701529 - RNA, 19 nt, Homo sapiens
  misc_RNA (1)...(19): siRNA sense strand
gagcauuccaggagagaaa

SEQ ID NO: 701530 - RNA, 19 nt, Homo sapiens
  misc_RNA (1)...(19): siRNA sense strand
gcuucgaccucaugaacaa

SEQ ID NO: 701531 - RNA, 19 nt, Homo sapiens
  misc_RNA (1)...(19): siRNA sense strand
ggaaacgacaucgagaaga

SEQ ID NO: 701532 - RNA, 19 nt, Homo sapiens
  misc_RNA (1)...(19): siRNA sense strand
gaaugggaaagacagaaga

SEQ ID NO: 701533 - RNA, 19 nt, Homo sapiens
  misc_RNA (1)...(19): siRNA sense strand
agacagaagagaagggaaa

SEQ ID NO: 701534 - RNA, 19 nt, Homo sapiens
  misc_RNA (1)...(19): siRNA sense strand
gggaaagacagaagagaag

SEQ ID NO: 701535 - RNA, 19 nt, Homo sapiens
  misc_RNA (1)...(19): siRNA sense strand
ggaaugggaaagacagaag

SEQ ID NO: 701536 - RNA, 19 nt, Homo sapiens
  misc_RNA (1)...(19): siRNA sense strand
ggaccgcuuggagcaguua

SEQ ID NO: 701537 - RNA, 19 nt, Homo sapiens
  misc_RNA (1)...(19): siRNA sense strand
cagaagagaagggaaaugg

SEQ ID NO: 701538 - RNA, 19 nt, Homo sapiens
  misc_RNA (1)...(19): siRNA sense strand
aggacggccucaagcauga

SEQ ID NO: 701539 - RNA, 19 nt, Homo sapiens
  misc_RNA (1)...(19): siRNA sense strand
ggaaauggcaagggagcau

SEQ ID NO: 701540 - RNA, 19 nt, Homo sapiens
  misc_RNA (1)...(19): siRNA sense strand
gcuuggagcaguuagaaag

SEQ ID NO: 701541 - RNA, 19 nt, Homo sapiens
  misc_RNA (1)...(19): siRNA sense strand
ugggaaagacagaagagaa

SEQ ID NO: 701542 - RNA, 19 nt, Homo sapiens
  misc_RNA (1)...(19): siRNA sense strand
uggagcaguuagaaaggaa

SEQ ID NO: 701543 - RNA, 19 nt, Homo sapiens
  misc_RNA (1)...(19): siRNA sense strand
caucgagaagaacaggaua

SEQ ID NO: 701544 - RNA, 19 nt, Homo sapiens
  misc_RNA (1)...(19): siRNA sense strand
ucgagaagaacaggauaaa

SEQ ID NO: 701545 - RNA, 19 nt, Homo sapiens
  misc_RNA (1)...(19): siRNA sense strand
gggcuucgaccucaugaac

SEQ ID NO: 701546 - RNA, 19 nt, Homo sapiens
  misc_RNA (1)...(19): siRNA sense strand
gcuucgaccucaugaacaa

SEQ ID NO: 701547 - RNA, 19 nt, Homo sapiens
  misc_RNA (1)...(19): siRNA sense strand
aggacggccucaagcauga

SEQ ID NO: 701548 - RNA, 19 nt, Homo sapiens
  misc_RNA (1)...(19): siRNA sense strand
gggcuucgaccucaugaac

SEQ ID NO: 701549 - RNA, 19 nt, Homo sapiens
  misc_RNA (1)...(19): siRNA sense strand
gaaacgacaucgagaagaa

SEQ ID NO: 701550 - RNA, 19 nt, Homo sapiens
  misc_RNA (1)...(19): siRNA sense strand
gcacgaacgucggaaacga

SEQ ID NO: 701551 - RNA, 19 nt, Homo sapiens
  misc_RNA (1)...(19): siRNA sense strand
gagaagaacaggauaaagc

SEQ ID NO: 701552 - RNA, 19 nt, Homo sapiens
  misc_RNA (1)...(19): siRNA sense strand
gagcauuccaggagagaaa

SEQ ID NO: 701553 - RNA, 19 nt, Homo sapiens
  misc_RNA (1)...(19): siRNA sense strand
gcuucgaccucaugaacaa

SEQ ID NO: 701554 - RNA, 19 nt, Homo sapiens
  misc_RNA (1)...(19): siRNA sense strand
ggaaacgacaucgagaaga

SEQ ID NO: 701555 - RNA, 19 nt, Homo sapiens
  misc_RNA (1)...(19): siRNA sense strand
gaaugggaaagacagaaga

SEQ ID NO: 701556 - RNA, 19 nt, Homo sapiens
  misc_RNA (1)...(19): siRNA sense strand
agacagaagagaagggaaa

SEQ ID NO: 701557 - RNA, 19 nt, Homo sapiens
  misc_RNA (1)...(19): siRNA sense strand
gggaaagacagaagagaag

SEQ ID NO: 701558 - RNA, 19 nt, Homo sapiens
  misc_RNA (1)...(19): siRNA sense strand
ggaaugggaaagacagaag

SEQ ID NO: 701559 - RNA, 19 nt, Homo sapiens
  misc_RNA (1)...(19): siRNA sense strand
ggaccgcuuggagcaguua

SEQ ID NO: 701560 - RNA, 19 nt, Homo sapiens
  misc_RNA (1)...(19): siRNA sense strand
cagaagagaagggaaaugg

SEQ ID NO: 701561 - RNA, 19 nt, Homo sapiens
  misc_RNA (1)...(19): siRNA sense strand
aggacggccucaagcauga

SEQ ID NO: 701562 - RNA, 19 nt, Homo sapiens
  misc_RNA (1)...(19): siRNA sense strand
ggaaauggcaagggagcau

SEQ ID NO: 701563 - RNA, 19 nt, Homo sapiens
  misc_RNA (1)...(19): siRNA sense strand
gcuuggagcaguuagaaag

SEQ ID NO: 701564 - RNA, 19 nt, Homo sapiens
  misc_RNA (1)...(19): siRNA sense strand
ugggaaagacagaagagaa

SEQ ID NO: 701565 - RNA, 19 nt, Homo sapiens
  misc_RNA (1)...(19): siRNA sense strand
uggagcaguuagaaaggaa

SEQ ID NO: 701566 - RNA, 19 nt, Homo sapiens
  misc_RNA (1)...(19): siRNA sense strand
caucgagaagaacaggaua

SEQ ID NO: 701567 - RNA, 19 nt, Homo sapiens
  misc_RNA (1)...(19): siRNA sense strand
ucgagaagaacaggauaaa

SEQ ID NO: 701568 - RNA, 19 nt, Homo sapiens
  misc_RNA (1)...(19): siRNA sense strand
gggcuucgaccucaugaac

SEQ ID NO: 701569 - RNA, 19 nt, Homo sapiens
  misc_RNA (1)...(19): siRNA sense strand
gaaacgacaucgagaagaa

SEQ ID NO: 701570 - RNA, 19 nt, Homo sapiens
  misc_RNA (1)...(19): siRNA sense strand
gcacgaacgucggaaacga

SEQ ID NO: 701571 - RNA, 19 nt, Homo sapiens
  misc_RNA (1)...(19): siRNA sense strand
gagaagaacaggauaaagc

SEQ ID NO: 701572 - RNA, 19 nt, Homo sapiens
  misc_RNA (1)...(19): siRNA sense strand
gagcauuccaggagagaaa

SEQ ID NO: 701573 - RNA, 19 nt, Homo sapiens
  misc_RNA (1)...(19): siRNA sense strand
gcuucgaccucaugaacaa

SEQ ID NO: 701574 - RNA, 19 nt, Homo sapiens
  misc_RNA (1)...(19): siRNA sense strand
ggaaacgacaucgagaaga

SEQ ID NO: 701575 - RNA, 19 nt, Homo sapiens
  misc_RNA (1)...(19): siRNA sense strand
gaaugggaaagacagaaga

SEQ ID NO: 701576 - RNA, 19 nt, Homo sapiens
  misc_RNA (1)...(19): siRNA sense strand
agacagaagagaagggaaa

SEQ ID NO: 701577 - RNA, 19 nt, Homo sapiens
  misc_RNA (1)...(19): siRNA sense strand
gggaaagacagaagagaag

SEQ ID NO: 701578 - RNA, 19 nt, Homo sapiens
  misc_RNA (1)...(19): siRNA sense strand
ggaaugggaaagacagaag

SEQ ID NO: 701579 - RNA, 19 nt, Homo sapiens
  misc_RNA (1)...(19): siRNA sense strand
ggaccgcuuggagcaguua

SEQ ID NO: 701580 - RNA, 19 nt, Homo sapiens
  misc_RNA (1)...(19): siRNA sense strand
cagaagagaagggaaaugg

SEQ ID NO: 701581 - RNA, 19 nt, Homo sapiens
  misc_RNA (1)...(19): siRNA sense strand
aggacggccucaagcauga

SEQ ID NO: 701582 - RNA, 19 nt, Homo sapiens
  misc_RNA (1)...(19): siRNA sense strand
ggaaauggcaagggagcau

SEQ ID NO: 701583 - RNA, 19 nt, Homo sapiens
  misc_RNA (1)...(19): siRNA sense strand
gcuuggagcaguuagaaag

SEQ ID NO: 701584 - RNA, 19 nt, Homo sapiens
  misc_RNA (1)...(19): siRNA sense strand
ugggaaagacagaagagaa

SEQ ID NO: 701585 - RNA, 19 nt, Homo sapiens
  misc_RNA (1)...(19): siRNA sense strand
uggagcaguuagaaaggaa

SEQ ID NO: 701586 - RNA, 19 nt, Homo sapiens
  misc_RNA (1)...(19): siRNA sense strand
caucgagaagaacaggaua

SEQ ID NO: 701587 - RNA, 19 nt, Homo sapiens
  misc_RNA (1)...(19): siRNA sense strand
ucgagaagaacaggauaaa

SEQ ID NO: 701588 - RNA, 19 nt, Homo sapiens
  misc_RNA (1)...(19): siRNA sense strand
gggcuucgaccucaugaac

SEQ ID NO: 701589 - RNA, 19 nt, Homo sapiens
  misc_RNA (1)...(19): siRNA sense strand
gaaacgacaucgagaagaa

SEQ ID NO: 701590 - RNA, 19 nt, Homo sapiens
  misc_RNA (1)...(19): siRNA sense strand
gcacgaacgucggaaacga

SEQ ID NO: 701591 - RNA, 19 nt, Homo sapiens
  misc_RNA (1)...(19): siRNA sense strand
gagaagaacaggauaaagc

SEQ ID NO: 701592 - RNA, 19 nt, Homo sapiens
  misc_RNA (1)...(19): siRNA sense strand
gagcauuccaggagagaaa

SEQ ID NO: 701593 - RNA, 19 nt, Homo sapiens
  misc_RNA (1)...(19): siRNA sense strand
gcuucgaccucaugaacaa

SEQ ID NO: 701594 - RNA, 19 nt, Homo sapiens
  misc_RNA (1)...(19): siRNA sense strand
ggaaacgacaucgagaaga

SEQ ID NO: 701595 - RNA, 19 nt, Homo sapiens
  misc_RNA (1)...(19): siRNA sense strand
gaaugggaaagacagaaga

SEQ ID NO: 701596 - RNA, 19 nt, Homo sapiens
  misc_RNA (1)...(19): siRNA sense strand
agacagaagagaagggaaa

SEQ ID NO: 701597 - RNA, 19 nt, Homo sapiens
  misc_RNA (1)...(19): siRNA sense strand
gggaaagacagaagagaag

SEQ ID NO: 701598 - RNA, 19 nt, Homo sapiens
  misc_RNA (1)...(19): siRNA sense strand
ggaaugggaaagacagaag

SEQ ID NO: 701599 - RNA, 19 nt, Homo sapiens
  misc_RNA (1)...(19): siRNA sense strand
ggaccgcuuggagcaguua

SEQ ID NO: 701600 - RNA, 19 nt, Homo sapiens
  misc_RNA (1)...(19): siRNA sense strand
cagaagagaagggaaaugg

SEQ ID NO: 701601 - RNA, 19 nt, Homo sapiens
  misc_RNA (1)...(19): siRNA sense strand
aggacggccucaagcauga

SEQ ID NO: 701602 - RNA, 19 nt, Homo sapiens
  misc_RNA (1)...(19): siRNA sense strand
ggaaauggcaagggagcau

SEQ ID NO: 701603 - RNA, 19 nt, Homo sapiens
  misc_RNA (1)...(19): siRNA sense strand
gcuuggagcaguuagaaag

SEQ ID NO: 701604 - RNA, 19 nt, Homo sapiens
  misc_RNA (1)...(19): siRNA sense strand
ugggaaagacagaagagaa

SEQ ID NO: 701605 - RNA, 19 nt, Homo sapiens
  misc_RNA (1)...(19): siRNA sense strand
uggagcaguuagaaaggaa

SEQ ID NO: 701606 - RNA, 19 nt, Homo sapiens
  misc_RNA (1)...(19): siRNA sense strand
caucgagaagaacaggaua

SEQ ID NO: 701607 - RNA, 19 nt, Homo sapiens
  misc_RNA (1)...(19): siRNA sense strand
ucgagaagaacaggauaaa

SEQ ID NO: 701608 - RNA, 19 nt, Homo sapiens
  misc_RNA (1)...(19): siRNA sense strand
gggcuucgaccucaugaac

SEQ ID NO: 701609 - RNA, 19 nt, Homo sapiens
  misc_RNA (1)...(19): siRNA sense strand
gcuucgaccucaugaacaa

SEQ ID NO: 701610 - RNA, 19 nt, Homo sapiens
  misc_RNA (1)...(19): siRNA sense strand
aggacggccucaagcauga

SEQ ID NO: 701611 - RNA, 19 nt, Homo sapiens
  misc_RNA (1)...(19): siRNA sense strand
gggcuucgaccucaugaac

SEQ ID NO: 701612 - RNA, 19 nt, Homo sapiens
  misc_RNA (1)...(19): siRNA sense strand
gagcauuccaggagagaaa

SEQ ID NO: 701613 - RNA, 19 nt, Homo sapiens
  misc_RNA (1)...(19): siRNA sense strand
gcuucgaccucaugaacaa

SEQ ID NO: 701614 - RNA, 19 nt, Homo sapiens
  misc_RNA (1)...(19): siRNA sense strand
agacagaagagaagggaaa

SEQ ID NO: 701615 - RNA, 19 nt, Homo sapiens
  misc_RNA (1)...(19): siRNA sense strand
gggaaagacagaagagaag

SEQ ID NO: 701616 - RNA, 19 nt, Homo sapiens
  misc_RNA (1)...(19): siRNA sense strand
ggaccgcuuggagcaguua

SEQ ID NO: 701617 - RNA, 19 nt, Homo sapiens
  misc_RNA (1)...(19): siRNA sense strand
cagaagagaagggaaaugg

SEQ ID NO: 701618 - RNA, 19 nt, Homo sapiens
  misc_RNA (1)...(19): siRNA sense strand
aggacggccucaagcauga

SEQ ID NO: 701619 - RNA, 19 nt, Homo sapiens
  misc_RNA (1)...(19): siRNA sense strand
gcuuggagcaguuagaaag

SEQ ID NO: 701620 - RNA, 19 nt, Homo sapiens
  misc_RNA (1)...(19): siRNA sense strand
ggaaauggcaagggagcau

SEQ ID NO: 701621 - RNA, 19 nt, Homo sapiens
  misc_RNA (1)...(19): siRNA sense strand
uggagcaguuagaaaggaa

SEQ ID NO: 701622 - RNA, 19 nt, Homo sapiens
  misc_RNA (1)...(19): siRNA sense strand
gggcuucgaccucaugaac

SEQ ID NO: 701623 - RNA, 19 nt, Homo sapiens
  misc_RNA (1)...(19): siRNA sense strand
gaaacgacaucgagaagaa

SEQ ID NO: 701624 - RNA, 19 nt, Homo sapiens
  misc_RNA (1)...(19): siRNA sense strand
gcacgaacgucggaaacga

SEQ ID NO: 701625 - RNA, 19 nt, Homo sapiens
  misc_RNA (1)...(19): siRNA sense strand
gagaagaacaggauaaagc

SEQ ID NO: 701626 - RNA, 19 nt, Homo sapiens
  misc_RNA (1)...(19): siRNA sense strand
gagcauuccaggagagaaa

SEQ ID NO: 701627 - RNA, 19 nt, Homo sapiens
  misc_RNA (1)...(19): siRNA sense strand
gcuucgaccucaugaacaa

SEQ ID NO: 701628 - RNA, 19 nt, Homo sapiens
  misc_RNA (1)...(19): siRNA sense strand
ggaaacgacaucgagaaga

SEQ ID NO: 701629 - RNA, 19 nt, Homo sapiens
  misc_RNA (1)...(19): siRNA sense strand
gaaugggaaagacagaaga

SEQ ID NO: 701630 - RNA, 19 nt, Homo sapiens
  misc_RNA (1)...(19): siRNA sense strand
agacagaagagaagggaaa

SEQ ID NO: 701631 - RNA, 19 nt, Homo sapiens
  misc_RNA (1)...(19): siRNA sense strand
gggaaagacagaagagaag

SEQ ID NO: 701632 - RNA, 19 nt, Homo sapiens
  misc_RNA (1)...(19): siRNA sense strand
ggaaugggaaagacagaag

SEQ ID NO: 701633 - RNA, 19 nt, Homo sapiens
  misc_RNA (1)...(19): siRNA sense strand
ggaccgcuuggagcaguua

SEQ ID NO: 701634 - RNA, 19 nt, Homo sapiens
  misc_RNA (1)...(19): siRNA sense strand
cagaagagaagggaaaugg

SEQ ID NO: 701635 - RNA, 19 nt, Homo sapiens
  misc_RNA (1)...(19): siRNA sense strand
aggacggccucaagcauga

SEQ ID NO: 701636 - RNA, 19 nt, Homo sapiens
  misc_RNA (1)...(19): siRNA sense strand
ggaaauggcaagggagcau

SEQ ID NO: 701637 - RNA, 19 nt, Homo sapiens
  misc_RNA (1)...(19): siRNA sense strand
gcuuggagcaguuagaaag

SEQ ID NO: 701638 - RNA, 19 nt, Homo sapiens
  misc_RNA (1)...(19): siRNA sense strand
ugggaaagacagaagagaa

SEQ ID NO: 701639 - RNA, 19 nt, Homo sapiens
  misc_RNA (1)...(19): siRNA sense strand
uggagcaguuagaaaggaa

SEQ ID NO: 701640 - RNA, 19 nt, Homo sapiens
  misc_RNA (1)...(19): siRNA sense strand
caucgagaagaacaggaua

SEQ ID NO: 701641 - RNA, 19 nt, Homo sapiens
  misc_RNA (1)...(19): siRNA sense strand
ucgagaagaacaggauaaa

SEQ ID NO: 701642 - RNA, 19 nt, Homo sapiens
  misc_RNA (1)...(19): siRNA sense strand
gggcuucgaccucaugaac

SEQ ID NO: 701643 - RNA, 19 nt, Homo sapiens
  misc_RNA (1)...(19): siRNA sense strand
gaaacgacaucgagaagaa

SEQ ID NO: 701644 - RNA, 19 nt, Homo sapiens
  misc_RNA (1)...(19): siRNA sense strand
gcacgaacgucggaaacga

SEQ ID NO: 701645 - RNA, 19 nt, Homo sapiens
  misc_RNA (1)...(19): siRNA sense strand
gagaagaacaggauaaagc

SEQ ID NO: 701646 - RNA, 19 nt, Homo sapiens
  misc_RNA (1)...(19): siRNA sense strand
gagcauuccaggagagaaa

SEQ ID NO: 701647 - RNA, 19 nt, Homo sapiens
  misc_RNA (1)...(19): siRNA sense strand
gcuucgaccucaugaacaa

SEQ ID NO: 701648 - RNA, 19 nt, Homo sapiens
  misc_RNA (1)...(19): siRNA sense strand
ggaaacgacaucgagaaga

SEQ ID NO: 701649 - RNA, 19 nt, Homo sapiens
  misc_RNA (1)...(19): siRNA sense strand
gaaugggaaagacagaaga

SEQ ID NO: 701650 - RNA, 19 nt, Homo sapiens
  misc_RNA (1)...(19): siRNA sense strand
agacagaagagaagggaaa

SEQ ID NO: 701651 - RNA, 19 nt, Homo sapiens
  misc_RNA (1)...(19): siRNA sense strand
gggaaagacagaagagaag

SEQ ID NO: 701652 - RNA, 19 nt, Homo sapiens
  misc_RNA (1)...(19): siRNA sense strand
ggaaugggaaagacagaag

SEQ ID NO: 701653 - RNA, 19 nt, Homo sapiens
  misc_RNA (1)...(19): siRNA sense strand
ggaccgcuuggagcaguua

SEQ ID NO: 701654 - RNA, 19 nt, Homo sapiens
  misc_RNA (1)...(19): siRNA sense strand
cagaagagaagggaaaugg

SEQ ID NO: 701655 - RNA, 19 nt, Homo sapiens
  misc_RNA (1)...(19): siRNA sense strand
aggacggccucaagcauga

SEQ ID NO: 701656 - RNA, 19 nt, Homo sapiens
  misc_RNA (1)...(19): siRNA sense strand
ggaaauggcaagggagcau

SEQ ID NO: 701657 - RNA, 19 nt, Homo sapiens
  misc_RNA (1)...(19): siRNA sense strand
gcuuggagcaguuagaaag

SEQ ID NO: 701658 - RNA, 19 nt, Homo sapiens
  misc_RNA (1)...(19): siRNA sense strand
ugggaaagacagaagagaa

SEQ ID NO: 701659 - RNA, 19 nt, Homo sapiens
  misc_RNA (1)...(19): siRNA sense strand
uggagcaguuagaaaggaa

SEQ ID NO: 701660 - RNA, 19 nt, Homo sapiens
  misc_RNA (1)...(19): siRNA sense strand
caucgagaagaacaggaua

SEQ ID NO: 701661 - RNA, 19 nt, Homo sapiens
  misc_RNA (1)...(19): siRNA sense strand
ucgagaagaacaggauaaa

SEQ ID NO: 701662 - RNA, 19 nt, Homo sapiens
  misc_RNA (1)...(19): siRNA sense strand
gggcuucgaccucaugaac

SEQ ID NO: 701663 - RNA, 19 nt, Homo sapiens
  misc_RNA (1)...(19): siRNA sense strand
gaaacgacaucgagaagaa

SEQ ID NO: 701664 - RNA, 19 nt, Homo sapiens
  misc_RNA (1)...(19): siRNA sense strand
gcacgaacgucggaaacga

SEQ ID NO: 701665 - RNA, 19 nt, Homo sapiens
  misc_RNA (1)...(19): siRNA sense strand
gagaagaacaggauaaagc

SEQ ID NO: 701666 - RNA, 19 nt, Homo sapiens
  misc_RNA (1)...(19): siRNA sense strand
gagcauuccaggagagaaa

SEQ ID NO: 701667 - RNA, 19 nt, Homo sapiens
  misc_RNA (1)...(19): siRNA sense strand
gcuucgaccucaugaacaa

SEQ ID NO: 701668 - RNA, 19 nt, Homo sapiens
  misc_RNA (1)...(19): siRNA sense strand
ggaaacgacaucgagaaga

SEQ ID NO: 701669 - RNA, 19 nt, Homo sapiens
  misc_RNA (1)...(19): siRNA sense strand
gaaugggaaagacagaaga

SEQ ID NO: 701670 - RNA, 19 nt, Homo sapiens
  misc_RNA (1)...(19): siRNA sense strand
agacagaagagaagggaaa

SEQ ID NO: 701671 - RNA, 19 nt, Homo sapiens
  misc_RNA (1)...(19): siRNA sense strand
gggaaagacagaagagaag

SEQ ID NO: 701672 - RNA, 19 nt, Homo sapiens
  misc_RNA (1)...(19): siRNA sense strand
ggaaugggaaagacagaag

SEQ ID NO: 701673 - RNA, 19 nt, Homo sapiens
  misc_RNA (1)...(19): siRNA sense strand
ggaccgcuuggagcaguua

SEQ ID NO: 701674 - RNA, 19 nt, Homo sapiens
  misc_RNA (1)...(19): siRNA sense strand
cagaagagaagggaaaugg

SEQ ID NO: 701675 - RNA, 19 nt, Homo sapiens
  misc_RNA (1)...(19): siRNA sense strand
aggacggccucaagcauga

SEQ ID NO: 701676 - RNA, 19 nt, Homo sapiens
  misc_RNA (1)...(19): siRNA sense strand
ggaaauggcaagggagcau

SEQ ID NO: 701677 - RNA, 19 nt, Homo sapiens
  misc_RNA (1)...(19): siRNA sense strand
gcuuggagcaguuagaaag

SEQ ID NO: 701678 - RNA, 19 nt, Homo sapiens
  misc_RNA (1)...(19): siRNA sense strand
ugggaaagacagaagagaa

SEQ ID NO: 701679 - RNA, 19 nt, Homo sapiens
  misc_RNA (1)...(19): siRNA sense strand
uggagcaguuagaaaggaa

SEQ ID NO: 701680 - RNA, 19 nt, Homo sapiens
  misc_RNA (1)...(19): siRNA sense strand
caucgagaagaacaggaua

SEQ ID NO: 701681 - RNA, 19 nt, Homo sapiens
  misc_RNA (1)...(19): siRNA sense strand
ucgagaagaacaggauaaa

SEQ ID NO: 701682 - RNA, 19 nt, Homo sapiens
  misc_RNA (1)...(19): siRNA sense strand
gggcuucgaccucaugaac

SEQ ID NO: 701683 - RNA, 19 nt, Homo sapiens
  misc_RNA (1)...(19): siRNA sense strand
gcuucgaccucaugaacaa

SEQ ID NO: 701684 - RNA, 19 nt, Homo sapiens
  misc_RNA (1)...(19): siRNA sense strand
aggacggccucaagcauga

SEQ ID NO: 701685 - RNA, 19 nt, Homo sapiens
  misc_RNA (1)...(19): siRNA sense strand
gggcuucgaccucaugaac

SEQ ID NO: 701686 - RNA, 19 nt, Homo sapiens
  misc_RNA (1)...(19): siRNA sense strand
gaaacgacaucgagaagaa

SEQ ID NO: 701687 - RNA, 19 nt, Homo sapiens
  misc_RNA (1)...(19): siRNA sense strand
gcacgaacgucggaaacga

SEQ ID NO: 701688 - RNA, 19 nt, Homo sapiens
  misc_RNA (1)...(19): siRNA sense strand
gagaagaacaggauaaagc

SEQ ID NO: 701689 - RNA, 19 nt, Homo sapiens
  misc_RNA (1)...(19): siRNA sense strand
gagcauuccaggagagaaa

SEQ ID NO: 701690 - RNA, 19 nt, Homo sapiens
  misc_RNA (1)...(19): siRNA sense strand
gcuucgaccucaugaacaa

SEQ ID NO: 701691 - RNA, 19 nt, Homo sapiens
  misc_RNA (1)...(19): siRNA sense strand
ggaaacgacaucgagaaga

SEQ ID NO: 701692 - RNA, 19 nt, Homo sapiens
  misc_RNA (1)...(19): siRNA sense strand
gaaugggaaagacagaaga

SEQ ID NO: 701693 - RNA, 19 nt, Homo sapiens
  misc_RNA (1)...(19): siRNA sense strand
agacagaagagaagggaaa

SEQ ID NO: 701694 - RNA, 19 nt, Homo sapiens
  misc_RNA (1)...(19): siRNA sense strand
gggaaagacagaagagaag

SEQ ID NO: 701695 - RNA, 19 nt, Homo sapiens
  misc_RNA (1)...(19): siRNA sense strand
ggaaugggaaagacagaag

SEQ ID NO: 701696 - RNA, 19 nt, Homo sapiens
  misc_RNA (1)...(19): siRNA sense strand
ggaccgcuuggagcaguua

SEQ ID NO: 701697 - RNA, 19 nt, Homo sapiens
  misc_RNA (1)...(19): siRNA sense strand
cagaagagaagggaaaugg

SEQ ID NO: 701698 - RNA, 19 nt, Homo sapiens
  misc_RNA (1)...(19): siRNA sense strand
aggacggccucaagcauga

SEQ ID NO: 701699 - RNA, 19 nt, Homo sapiens
  misc_RNA (1)...(19): siRNA sense strand
ggaaauggcaagggagcau

SEQ ID NO: 701700 - RNA, 19 nt, Homo sapiens
  misc_RNA (1)...(19): siRNA sense strand
gcuuggagcaguuagaaag

SEQ ID NO: 701701 - RNA, 19 nt, Homo sapiens
  misc_RNA (1)...(19): siRNA sense strand
ugggaaagacagaagagaa

SEQ ID NO: 701702 - RNA, 19 nt, Homo sapiens
  misc_RNA (1)...(19): siRNA sense strand
uggagcaguuagaaaggaa

SEQ ID NO: 701703 - RNA, 19 nt, Homo sapiens
  misc_RNA (1)...(19): siRNA sense strand
caucgagaagaacaggaua

SEQ ID NO: 701704 - RNA, 19 nt, Homo sapiens
  misc_RNA (1)...(19): siRNA sense strand
ucgagaagaacaggauaaa

SEQ ID NO: 701705 - RNA, 19 nt, Homo sapiens
  misc_RNA (1)...(19): siRNA sense strand
gggcuucgaccucaugaac

SEQ ID NO: 701706 - RNA, 19 nt, Homo sapiens
  misc_RNA (1)...(19): siRNA sense strand
gaaacgacaucgagaagaa

SEQ ID NO: 701707 - RNA, 19 nt, Homo sapiens
  misc_RNA (1)...(19): siRNA sense strand
gcacgaacgucggaaacga

SEQ ID NO: 701708 - RNA, 19 nt, Homo sapiens
  misc_RNA (1)...(19): siRNA sense strand
gagaagaacaggauaaagc

SEQ ID NO: 701709 - RNA, 19 nt, Homo sapiens
  misc_RNA (1)...(19): siRNA sense strand
gagcauuccaggagagaaa

SEQ ID NO: 701710 - RNA, 19 nt, Homo sapiens
  misc_RNA (1)...(19): siRNA sense strand
gcuucgaccucaugaacaa

SEQ ID NO: 701711 - RNA, 19 nt, Homo sapiens
  misc_RNA (1)...(19): siRNA sense strand
ggaaacgacaucgagaaga

SEQ ID NO: 701712 - RNA, 19 nt, Homo sapiens
  misc_RNA (1)...(19): siRNA sense strand
gaaugggaaagacagaaga

SEQ ID NO: 701713 - RNA, 19 nt, Homo sapiens
  misc_RNA (1)...(19): siRNA sense strand
agacagaagagaagggaaa

SEQ ID NO: 701714 - RNA, 19 nt, Homo sapiens
  misc_RNA (1)...(19): siRNA sense strand
gggaaagacagaagagaag

SEQ ID NO: 701715 - RNA, 19 nt, Homo sapiens
  misc_RNA (1)...(19): siRNA sense strand
ggaaugggaaagacagaag

SEQ ID NO: 701716 - RNA, 19 nt, Homo sapiens
  misc_RNA (1)...(19): siRNA sense strand
ggaccgcuuggagcaguua

SEQ ID NO: 701717 - RNA, 19 nt, Homo sapiens
  misc_RNA (1)...(19): siRNA sense strand
cagaagagaagggaaaugg

SEQ ID NO: 701718 - RNA, 19 nt, Homo sapiens
  misc_RNA (1)...(19): siRNA sense strand
aggacggccucaagcauga

SEQ ID NO: 701719 - RNA, 19 nt, Homo sapiens
  misc_RNA (1)...(19): siRNA sense strand
ggaaauggcaagggagcau

SEQ ID NO: 701720 - RNA, 19 nt, Homo sapiens
  misc_RNA (1)...(19): siRNA sense strand
gcuuggagcaguuagaaag

SEQ ID NO: 701721 - RNA, 19 nt, Homo sapiens
  misc_RNA (1)...(19): siRNA sense strand
ugggaaagacagaagagaa

SEQ ID NO: 701722 - RNA, 19 nt, Homo sapiens
  misc_RNA (1)...(19): siRNA sense strand
uggagcaguuagaaaggaa

SEQ ID NO: 701723 - RNA, 19 nt, Homo sapiens
  misc_RNA (1)...(19): siRNA sense strand
caucgagaagaacaggaua

SEQ ID NO: 701724 - RNA, 19 nt, Homo sapiens
  misc_RNA (1)...(19): siRNA sense strand
ucgagaagaacaggauaaa

SEQ ID NO: 701725 - RNA, 19 nt, Homo sapiens
  misc_RNA (1)...(19): siRNA sense strand
gggcuucgaccucaugaac

SEQ ID NO: 701726 - RNA, 19 nt, Homo sapiens
  misc_RNA (1)...(19): siRNA sense strand
gaaacgacaucgagaagaa

SEQ ID NO: 701727 - RNA, 19 nt, Homo sapiens
  misc_RNA (1)...(19): siRNA sense strand
gcacgaacgucggaaacga

SEQ ID NO: 701728 - RNA, 19 nt, Homo sapiens
  misc_RNA (1)...(19): siRNA sense strand
gagaagaacaggauaaagc

SEQ ID NO: 701729 - RNA, 19 nt, Homo sapiens
  misc_RNA (1)...(19): siRNA sense strand
gagcauuccaggagagaaa

SEQ ID NO: 701730 - RNA, 19 nt, Homo sapiens
  misc_RNA (1)...(19): siRNA sense strand
gcuucgaccucaugaacaa

SEQ ID NO: 701731 - RNA, 19 nt, Homo sapiens
  misc_RNA (1)...(19): siRNA sense strand
ggaaacgacaucgagaaga

SEQ ID NO: 701732 - RNA, 19 nt, Homo sapiens
  misc_RNA (1)...(19): siRNA sense strand
gaaugggaaagacagaaga

SEQ ID NO: 701733 - RNA, 19 nt, Homo sapiens
  misc_RNA (1)...(19): siRNA sense strand
agacagaagagaagggaaa

SEQ ID NO: 701734 - RNA, 19 nt, Homo sapiens
  misc_RNA (1)...(19): siRNA sense strand
gggaaagacagaagagaag

SEQ ID NO: 701735 - RNA, 19 nt, Homo sapiens
  misc_RNA (1)...(19): siRNA sense strand
ggaaugggaaagacagaag

SEQ ID NO: 701736 - RNA, 19 nt, Homo sapiens
  misc_RNA (1)...(19): siRNA sense strand
ggaccgcuuggagcaguua

SEQ ID NO: 701737 - RNA, 19 nt, Homo sapiens
  misc_RNA (1)...(19): siRNA sense strand
cagaagagaagggaaaugg

SEQ ID NO: 701738 - RNA, 19 nt, Homo sapiens
  misc_RNA (1)...(19): siRNA sense strand
aggacggccucaagcauga

SEQ ID NO: 701739 - RNA, 19 nt, Homo sapiens
  misc_RNA (1)...(19): siRNA sense strand
ggaaauggcaagggagcau

SEQ ID NO: 701740 - RNA, 19 nt, Homo sapiens
  misc_RNA (1)...(19): siRNA sense strand
gcuuggagcaguuagaaag

SEQ ID NO: 701741 - RNA, 19 nt, Homo sapiens
  misc_RNA (1)...(19): siRNA sense strand
ugggaaagacagaagagaa

SEQ ID NO: 701742 - RNA, 19 nt, Homo sapiens
  misc_RNA (1)...(19): siRNA sense strand
uggagcaguuagaaaggaa

SEQ ID NO: 701743 - RNA, 19 nt, Homo sapiens
  misc_RNA (1)...(19): siRNA sense strand
caucgagaagaacaggaua

SEQ ID NO: 701744 - RNA, 19 nt, Homo sapiens
  misc_RNA (1)...(19): siRNA sense strand
ucgagaagaacaggauaaa

SEQ ID NO: 701745 - RNA, 19 nt, Homo sapiens
  misc_RNA (1)...(19): siRNA sense strand
gggcuucgaccucaugaac

SEQ ID NO: 701746 - RNA, 19 nt, Homo sapiens
  misc_RNA (1)...(19): siRNA sense strand
gcuucgaccucaugaacaa

SEQ ID NO: 701747 - RNA, 19 nt, Homo sapiens
  misc_RNA (1)...(19): siRNA sense strand
aggacggccucaagcauga

SEQ ID NO: 701748 - RNA, 19 nt, Homo sapiens
  misc_RNA (1)...(19): siRNA sense strand
gggcuucgaccucaugaac

SEQ ID NO: 701749 - RNA, 19 nt, Homo sapiens
  misc_RNA (1)...(19): siRNA sense strand
gagcauuccaggagagaaa

SEQ ID NO: 701750 - RNA, 19 nt, Homo sapiens
  misc_RNA (1)...(19): siRNA sense strand
gcuucgaccucaugaacaa

SEQ ID NO: 701751 - RNA, 19 nt, Homo sapiens
  misc_RNA (1)...(19): siRNA sense strand
agacagaagagaagggaaa

SEQ ID NO: 701752 - RNA, 19 nt, Homo sapiens
  misc_RNA (1)...(19): siRNA sense strand
gggaaagacagaagagaag

SEQ ID NO: 701753 - RNA, 19 nt, Homo sapiens
  misc_RNA (1)...(19): siRNA sense strand
ggaccgcuuggagcaguua

SEQ ID NO: 701754 - RNA, 19 nt, Homo sapiens
  misc_RNA (1)...(19): siRNA sense strand
cagaagagaagggaaaugg

SEQ ID NO: 701755 - RNA, 19 nt, Homo sapiens
  misc_RNA (1)...(19): siRNA sense strand
aggacggccucaagcauga

SEQ ID NO: 701756 - RNA, 19 nt, Homo sapiens
  misc_RNA (1)...(19): siRNA sense strand
gcuuggagcaguuagaaag

SEQ ID NO: 701757 - RNA, 19 nt, Homo sapiens
  misc_RNA (1)...(19): siRNA sense strand
ggaaauggcaagggagcau

SEQ ID NO: 701758 - RNA, 19 nt, Homo sapiens
  misc_RNA (1)...(19): siRNA sense strand
uggagcaguuagaaaggaa

SEQ ID NO: 701759 - RNA, 19 nt, Homo sapiens
  misc_RNA (1)...(19): siRNA sense strand
gggcuucgaccucaugaac

SEQ ID NO: 701760 - RNA, 19 nt, Homo sapiens
  misc_RNA (1)...(19): siRNA sense strand
gaaacgacaucgagaagaa

SEQ ID NO: 701761 - RNA, 19 nt, Homo sapiens
  misc_RNA (1)...(19): siRNA sense strand
gcacgaacgucggaaacga

SEQ ID NO: 701762 - RNA, 19 nt, Homo sapiens
  misc_RNA (1)...(19): siRNA sense strand
gagaagaacaggauaaagc

SEQ ID NO: 701763 - RNA, 19 nt, Homo sapiens
  misc_RNA (1)...(19): siRNA sense strand
gagcauuccaggagagaaa

SEQ ID NO: 701764 - RNA, 19 nt, Homo sapiens
  misc_RNA (1)...(19): siRNA sense strand
gcuucgaccucaugaacaa

SEQ ID NO: 701765 - RNA, 19 nt, Homo sapiens
  misc_RNA (1)...(19): siRNA sense strand
ggaaacgacaucgagaaga

SEQ ID NO: 701766 - RNA, 19 nt, Homo sapiens
  misc_RNA (1)...(19): siRNA sense strand
gaaugggaaagacagaaga

SEQ ID NO: 701767 - RNA, 19 nt, Homo sapiens
  misc_RNA (1)...(19): siRNA sense strand
agacagaagagaagggaaa

SEQ ID NO: 701768 - RNA, 19 nt, Homo sapiens
  misc_RNA (1)...(19): siRNA sense strand
gggaaagacagaagagaag

SEQ ID NO: 701769 - RNA, 19 nt, Homo sapiens
  misc_RNA (1)...(19): siRNA sense strand
ggaaugggaaagacagaag

SEQ ID NO: 701770 - RNA, 19 nt, Homo sapiens
  misc_RNA (1)...(19): siRNA sense strand
ggaccgcuuggagcaguua

SEQ ID NO: 701771 - RNA, 19 nt, Homo sapiens
  misc_RNA (1)...(19): siRNA sense strand
cagaagagaagggaaaugg

SEQ ID NO: 701772 - RNA, 19 nt, Homo sapiens
  misc_RNA (1)...(19): siRNA sense strand
aggacggccucaagcauga

SEQ ID NO: 701773 - RNA, 19 nt, Homo sapiens
  misc_RNA (1)...(19): siRNA sense strand
ggaaauggcaagggagcau

SEQ ID NO: 701774 - RNA, 19 nt, Homo sapiens
  misc_RNA (1)...(19): siRNA sense strand
gcuuggagcaguuagaaag

SEQ ID NO: 701775 - RNA, 19 nt, Homo sapiens
  misc_RNA (1)...(19): siRNA sense strand
ugggaaagacagaagagaa

SEQ ID NO: 701776 - RNA, 19 nt, Homo sapiens
  misc_RNA (1)...(19): siRNA sense strand
uggagcaguuagaaaggaa

SEQ ID NO: 701777 - RNA, 19 nt, Homo sapiens
  misc_RNA (1)...(19): siRNA sense strand
caucgagaagaacaggaua

SEQ ID NO: 701778 - RNA, 19 nt, Homo sapiens
  misc_RNA (1)...(19): siRNA sense strand
ucgagaagaacaggauaaa

SEQ ID NO: 701779 - RNA, 19 nt, Homo sapiens
  misc_RNA (1)...(19): siRNA sense strand
gggcuucgaccucaugaac

SEQ ID NO: 701780 - RNA, 19 nt, Homo sapiens
  misc_RNA (1)...(19): siRNA sense strand
gaaacgacaucgagaagaa

SEQ ID NO: 701781 - RNA, 19 nt, Homo sapiens
  misc_RNA (1)...(19): siRNA sense strand
gcacgaacgucggaaacga

SEQ ID NO: 701782 - RNA, 19 nt, Homo sapiens
  misc_RNA (1)...(19): siRNA sense strand
gagaagaacaggauaaagc

SEQ ID NO: 701783 - RNA, 19 nt, Homo sapiens
  misc_RNA (1)...(19): siRNA sense strand
gagcauuccaggagagaaa

SEQ ID NO: 701784 - RNA, 19 nt, Homo sapiens
  misc_RNA (1)...(19): siRNA sense strand
gcuucgaccucaugaacaa

SEQ ID NO: 701785 - RNA, 19 nt, Homo sapiens
  misc_RNA (1)...(19): siRNA sense strand
ggaaacgacaucgagaaga

SEQ ID NO: 701786 - RNA, 19 nt, Homo sapiens
  misc_RNA (1)...(19): siRNA sense strand
gaaugggaaagacagaaga

SEQ ID NO: 701787 - RNA, 19 nt, Homo sapiens
  misc_RNA (1)...(19): siRNA sense strand
agacagaagagaagggaaa

SEQ ID NO: 701788 - RNA, 19 nt, Homo sapiens
  misc_RNA (1)...(19): siRNA sense strand
gggaaagacagaagagaag

SEQ ID NO: 701789 - RNA, 19 nt, Homo sapiens
  misc_RNA (1)...(19): siRNA sense strand
ggaaugggaaagacagaag

SEQ ID NO: 701790 - RNA, 19 nt, Homo sapiens
  misc_RNA (1)...(19): siRNA sense strand
ggaccgcuuggagcaguua

SEQ ID NO: 701791 - RNA, 19 nt, Homo sapiens
  misc_RNA (1)...(19): siRNA sense strand
cagaagagaagggaaaugg

SEQ ID NO: 701792 - RNA, 19 nt, Homo sapiens
  misc_RNA (1)...(19): siRNA sense strand
aggacggccucaagcauga

SEQ ID NO: 701793 - RNA, 19 nt, Homo sapiens
  misc_RNA (1)...(19): siRNA sense strand
ggaaauggcaagggagcau

SEQ ID NO: 701794 - RNA, 19 nt, Homo sapiens
  misc_RNA (1)...(19): siRNA sense strand
gcuuggagcaguuagaaag

SEQ ID NO: 701795 - RNA, 19 nt, Homo sapiens
  misc_RNA (1)...(19): siRNA sense strand
ugggaaagacagaagagaa

SEQ ID NO: 701796 - RNA, 19 nt, Homo sapiens
  misc_RNA (1)...(19): siRNA sense strand
uggagcaguuagaaaggaa

SEQ ID NO: 701797 - RNA, 19 nt, Homo sapiens
  misc_RNA (1)...(19): siRNA sense strand
caucgagaagaacaggaua

SEQ ID NO: 701798 - RNA, 19 nt, Homo sapiens
  misc_RNA (1)...(19): siRNA sense strand
ucgagaagaacaggauaaa

SEQ ID NO: 701799 - RNA, 19 nt, Homo sapiens
  misc_RNA (1)...(19): siRNA sense strand
gggcuucgaccucaugaac

SEQ ID NO: 701800 - RNA, 19 nt, Homo sapiens
  misc_RNA (1)...(19): siRNA sense strand
gcacagaugaugcugaaua

SEQ ID NO: 701801 - RNA, 19 nt, Homo sapiens
  misc_RNA (1)...(19): siRNA sense strand
gagaugaugauccaaauaa

SEQ ID NO: 701802 - RNA, 19 nt, Homo sapiens
  misc_RNA (1)...(19): siRNA sense strand
caagagcaaugcaggcuuu

SEQ ID NO: 701803 - RNA, 19 nt, Homo sapiens
  misc_RNA (1)...(19): siRNA sense strand
ccacaccuauuuccacaaa

SEQ ID NO: 701804 - RNA, 19 nt, Homo sapiens
  misc_RNA (1)...(19): siRNA sense strand
caacaacccagacauaaug

SEQ ID NO: 701805 - RNA, 19 nt, Homo sapiens
  misc_RNA (1)...(19): siRNA sense strand
cugaauagcccgcuguuua

SEQ ID NO: 701806 - RNA, 19 nt, Homo sapiens
  misc_RNA (1)...(19): siRNA sense strand
ugaagcaccuggccugauu

SEQ ID NO: 701807 - RNA, 19 nt, Homo sapiens
  misc_RNA (1)...(19): siRNA sense strand
gguagugggucuggcaaua

SEQ ID NO: 701808 - RNA, 19 nt, Homo sapiens
  misc_RNA (1)...(19): siRNA sense strand
gaaaaucccuuuguucaga

SEQ ID NO: 701809 - RNA, 19 nt, Homo sapiens
  misc_RNA (1)...(19): siRNA sense strand
ggcaauaguuccagcaaug

SEQ ID NO: 701810 - RNA, 19 nt, Homo sapiens
  misc_RNA (1)...(19): siRNA sense strand
ugcaagagaugaugagaaa

SEQ ID NO: 701811 - RNA, 19 nt, Homo sapiens
  misc_RNA (1)...(19): siRNA sense strand
gcucaacaacccagacaua

SEQ ID NO: 701812 - RNA, 19 nt, Homo sapiens
  misc_RNA (1)...(19): siRNA sense strand
gcucuuagcaaucuagaaa

SEQ ID NO: 701813 - RNA, 19 nt, Homo sapiens
  misc_RNA (1)...(19): siRNA sense strand
ccacagaugcagcaauuga

SEQ ID NO: 701814 - RNA, 19 nt, Homo sapiens
  misc_RNA (1)...(19): siRNA sense strand
ucagucaccugcucaacaa

SEQ ID NO: 701815 - RNA, 19 nt, Homo sapiens
  misc_RNA (1)...(19): siRNA sense strand
ggugaagacucccaaagag

SEQ ID NO: 701816 - RNA, 19 nt, Homo sapiens
  misc_RNA (1)...(19): siRNA sense strand
ccagguggcuauaaugcuu

SEQ ID NO: 701817 - RNA, 19 nt, Homo sapiens
  misc_RNA (1)...(19): siRNA sense strand
caagagaugaugagaaauc

SEQ ID NO: 701818 - RNA, 19 nt, Homo sapiens
  misc_RNA (1)...(19): siRNA sense strand
aaacuugcaggcccuaaua

SEQ ID NO: 701819 - RNA, 19 nt, Homo sapiens
  misc_RNA (1)...(19): siRNA sense strand
uaaggaagcgauuucgaaa

SEQ ID NO: 701820 - RNA, 19 nt, Homo sapiens
  misc_RNA (1)...(19): siRNA sense strand
uggaacagcucaacgcaau

SEQ ID NO: 701821 - RNA, 19 nt, Homo sapiens
  misc_RNA (1)...(19): siRNA sense strand
gaagacucccaaagagaaa

SEQ ID NO: 701822 - RNA, 19 nt, Homo sapiens
  misc_RNA (1)...(19): siRNA sense strand
gaugaugauccaaauaaug

SEQ ID NO: 701823 - RNA, 19 nt, Homo sapiens
  misc_RNA (1)...(19): siRNA sense strand
ccaaagagaaagaggaguu

SEQ ID NO: 701824 - RNA, 19 nt, Homo sapiens
  misc_RNA (1)...(19): siRNA sense strand
gagcaaugcaggcuuuaau

SEQ ID NO: 701825 - RNA, 19 nt, Homo sapiens
  misc_RNA (1)...(19): siRNA sense strand
ccaaaccgaucagcuagug

SEQ ID NO: 701826 - RNA, 19 nt, Homo sapiens
  misc_RNA (1)...(19): siRNA sense strand
ccacgaguccuacaucaga

SEQ ID NO: 701827 - RNA, 19 nt, Homo sapiens
  misc_RNA (1)...(19): siRNA sense strand
gcagaauccagacacacua

SEQ ID NO: 701828 - RNA, 19 nt, Homo sapiens
  misc_RNA (1)...(19): siRNA sense strand
gagaaacccagaaaucagu

SEQ ID NO: 701829 - RNA, 19 nt, Homo sapiens
  misc_RNA (1)...(19): siRNA sense strand
agauuuggcugcacagaug

SEQ ID NO: 701830 - RNA, 19 nt, Homo sapiens
  misc_RNA (1)...(19): siRNA sense strand
ugaagacucccaaagagaa

SEQ ID NO: 701831 - RNA, 19 nt, Homo sapiens
  misc_RNA (1)...(19): siRNA sense strand
gacauuagccacugaagca

SEQ ID NO: 701832 - RNA, 19 nt, Homo sapiens
  misc_RNA (1)...(19): siRNA sense strand
agaccuggcucuuagcaau

SEQ ID NO: 701833 - RNA, 19 nt, Homo sapiens
  misc_RNA (1)...(19): siRNA sense strand
ucagagaaacccagaaauc

SEQ ID NO: 701834 - RNA, 19 nt, Homo sapiens
  misc_RNA (1)...(19): siRNA sense strand
cagagaaacccagaaauca

SEQ ID NO: 701835 - RNA, 19 nt, Homo sapiens
  misc_RNA (1)...(19): siRNA sense strand
cugaugaggcagcugauua

SEQ ID NO: 701836 - RNA, 19 nt, Homo sapiens
  misc_RNA (1)...(19): siRNA sense strand
cuaauuaugucgccagcau

SEQ ID NO: 701837 - RNA, 19 nt, Homo sapiens
  misc_RNA (1)...(19): siRNA sense strand
caucccagguggcuauaau

SEQ ID NO: 701838 - RNA, 19 nt, Homo sapiens
  misc_RNA (1)...(19): siRNA sense strand
gaacagcucaacgcaaugg

SEQ ID NO: 701839 - RNA, 19 nt, Homo sapiens
  misc_RNA (1)...(19): siRNA sense strand
ggcccuggcuggagcaaau

SEQ ID NO: 701840 - RNA, 19 nt, Homo sapiens
  misc_RNA (1)...(19): siRNA sense strand
ggccagcccugagaugaug

SEQ ID NO: 701841 - RNA, 19 nt, Homo sapiens
  misc_RNA (1)...(19): siRNA sense strand
gaauccagacacacuauca

SEQ ID NO: 701842 - RNA, 19 nt, Homo sapiens
  misc_RNA (1)...(19): siRNA sense strand
cacagaugaugcugaauag

SEQ ID NO: 701843 - RNA, 19 nt, Homo sapiens
  misc_RNA (1)...(19): siRNA sense strand
guucagagcaugcuuucga

SEQ ID NO: 701844 - RNA, 19 nt, Homo sapiens
  misc_RNA (1)...(19): siRNA sense strand
ggcagcugauuauggcuaa

SEQ ID NO: 701845 - RNA, 19 nt, Homo sapiens
  misc_RNA (1)...(19): siRNA sense strand
cugcacagaugaugcugaa

SEQ ID NO: 701846 - RNA, 19 nt, Homo sapiens
  misc_RNA (1)...(19): siRNA sense strand
gaggcagacacucgaaauu

SEQ ID NO: 701847 - RNA, 19 nt, Homo sapiens
  misc_RNA (1)...(19): siRNA sense strand
gcccugagaugaugaucca

SEQ ID NO: 701848 - RNA, 19 nt, Homo sapiens
  misc_RNA (1)...(19): siRNA sense strand
gcucgguucagcaguuuaa

SEQ ID NO: 701849 - RNA, 19 nt, Homo sapiens
  misc_RNA (1)...(19): siRNA sense strand
gcaauugauucagagaaac

SEQ ID NO: 701850 - RNA, 19 nt, Homo sapiens
  misc_RNA (1)...(19): siRNA sense strand
agcaauugauucagagaaa

SEQ ID NO: 701851 - RNA, 19 nt, Homo sapiens
  misc_RNA (1)...(19): siRNA sense strand
ccaaccagcaguucauuca

SEQ ID NO: 701852 - RNA, 19 nt, Homo sapiens
  misc_RNA (1)...(19): siRNA sense strand
uuaaggaagcgauuucgaa

SEQ ID NO: 701853 - RNA, 19 nt, Homo sapiens
  misc_RNA (1)...(19): siRNA sense strand
ugagaugaugauccaaaua

SEQ ID NO: 701854 - RNA, 19 nt, Homo sapiens
  misc_RNA (1)...(19): siRNA sense strand
caacaggaggcgacaucaa

SEQ ID NO: 701855 - RNA, 19 nt, Homo sapiens
  misc_RNA (1)...(19): siRNA sense strand
gaugcagaauccagacaca

SEQ ID NO: 701856 - RNA, 19 nt, Homo sapiens
  misc_RNA (1)...(19): siRNA sense strand
ggcagacacucgaaauugc

SEQ ID NO: 701857 - RNA, 19 nt, Homo sapiens
  misc_RNA (1)...(19): siRNA sense strand
gcaaugcaggcuuuaaugc

SEQ ID NO: 701858 - RNA, 19 nt, Homo sapiens
  misc_RNA (1)...(19): siRNA sense strand
gaugcugaaugccgcacaa

SEQ ID NO: 701859 - RNA, 19 nt, Homo sapiens
  misc_RNA (1)...(19): siRNA sense strand
gugaagacucccaaagaga

SEQ ID NO: 701860 - RNA, 19 nt, Homo sapiens
  misc_RNA (1)...(19): siRNA sense strand
caugaugggcugacuguuc

SEQ ID NO: 701861 - RNA, 19 nt, Homo sapiens
  misc_RNA (1)...(19): siRNA sense strand
caagagccgaugcugaaug

SEQ ID NO: 701862 - RNA, 19 nt, Homo sapiens
  misc_RNA (1)...(19): siRNA sense strand
cagaugcagcagcagcuua

SEQ ID NO: 701863 - RNA, 19 nt, Homo sapiens
  misc_RNA (1)...(19): siRNA sense strand
ucaacaacccagacauaau

SEQ ID NO: 701864 - RNA, 19 nt, Homo sapiens
  misc_RNA (1)...(19): siRNA sense strand
ucaaaucccaaaccgauca

SEQ ID NO: 701865 - RNA, 19 nt, Homo sapiens
  misc_RNA (1)...(19): siRNA sense strand
cagcucgguucagcaguuu

SEQ ID NO: 701866 - RNA, 19 nt, Homo sapiens
  misc_RNA (1)...(19): siRNA sense strand
acagcucgguucagcaguu

SEQ ID NO: 701867 - RNA, 19 nt, Homo sapiens
  misc_RNA (1)...(19): siRNA sense strand
ggacuugcaggccuuagca

SEQ ID NO: 701868 - RNA, 19 nt, Homo sapiens
  misc_RNA (1)...(19): siRNA sense strand
gaaaccacgaguccuacau

SEQ ID NO: 701869 - RNA, 19 nt, Homo sapiens
  misc_RNA (1)...(19): siRNA sense strand
ugaauagcccgcuguuuac

SEQ ID NO: 701870 - RNA, 19 nt, Homo sapiens
  misc_RNA (1)...(19): siRNA sense strand
gaaaaucgcgauccacuac

SEQ ID NO: 701871 - RNA, 19 nt, Homo sapiens
  misc_RNA (1)...(19): siRNA sense strand
auccacagaugcagcaauu

SEQ ID NO: 701872 - RNA, 19 nt, Homo sapiens
  misc_RNA (1)...(19): siRNA sense strand
gcucgaccaacuucucuga

SEQ ID NO: 701873 - RNA, 19 nt, Homo sapiens
  misc_RNA (1)...(19): siRNA sense strand
ggcuugagcucgaccaacu

SEQ ID NO: 701874 - RNA, 19 nt, Homo sapiens
  misc_RNA (1)...(19): siRNA sense strand
augcagcaauugauucaga

SEQ ID NO: 701875 - RNA, 19 nt, Homo sapiens
  misc_RNA (1)...(19): siRNA sense strand
cagcaguucauucagcaaa

SEQ ID NO: 701876 - RNA, 19 nt, Homo sapiens
  misc_RNA (1)...(19): siRNA sense strand
ggacccaaccagcaguuca

SEQ ID NO: 701877 - RNA, 19 nt, Homo sapiens
  misc_RNA (1)...(19): siRNA sense strand
gagccugcugcaacagaua

SEQ ID NO: 701878 - RNA, 19 nt, Homo sapiens
  misc_RNA (1)...(19): siRNA sense strand
ugaugaggcagcugauuau

SEQ ID NO: 701879 - RNA, 19 nt, Homo sapiens
  misc_RNA (1)...(19): siRNA sense strand
guucuuaaaccgugaagca

SEQ ID NO: 701880 - RNA, 19 nt, Homo sapiens
  misc_RNA (1)...(19): siRNA sense strand
ccguugcugccgcuaauua

SEQ ID NO: 701881 - RNA, 19 nt, Homo sapiens
  misc_RNA (1)...(19): siRNA sense strand
acagaugcagcaauugauu

SEQ ID NO: 701882 - RNA, 19 nt, Homo sapiens
  misc_RNA (1)...(19): siRNA sense strand
gcaguuuaaggaagcgauu

SEQ ID NO: 701883 - RNA, 19 nt, Homo sapiens
  misc_RNA (1)...(19): siRNA sense strand
uuaugucgccagcaucuuu

SEQ ID NO: 701884 - RNA, 19 nt, Homo sapiens
  misc_RNA (1)...(19): siRNA sense strand
caccguugcugccgcuaau

SEQ ID NO: 701885 - RNA, 19 nt, Homo sapiens
  misc_RNA (1)...(19): siRNA sense strand
cugagaugaugauccaaau

SEQ ID NO: 701886 - RNA, 19 nt, Homo sapiens
  misc_RNA (1)...(19): siRNA sense strand
agucagauuucagcaacaa

SEQ ID NO: 701887 - RNA, 19 nt, Homo sapiens
  misc_RNA (1)...(19): siRNA sense strand
cacgaguccuacaucagaa

SEQ ID NO: 701888 - RNA, 19 nt, Homo sapiens
  misc_RNA (1)...(19): siRNA sense strand
gcugaaugccgcacaagag

SEQ ID NO: 701889 - RNA, 19 nt, Homo sapiens
  misc_RNA (1)...(19): siRNA sense strand
ccaggaauccagccaugau

SEQ ID NO: 701890 - RNA, 19 nt, Homo sapiens
  misc_RNA (1)...(19): siRNA sense strand
augaugggcugacuguuca

SEQ ID NO: 701891 - RNA, 19 nt, Homo sapiens
  misc_RNA (1)...(19): siRNA sense strand
ggaggacuugcaggccuua

SEQ ID NO: 701892 - RNA, 19 nt, Homo sapiens
  misc_RNA (1)...(19): siRNA sense strand
caaagagaaagaggaguuc

SEQ ID NO: 701893 - RNA, 19 nt, Homo sapiens
  misc_RNA (1)...(19): siRNA sense strand
ccugagaugaugauccaaa

SEQ ID NO: 701894 - RNA, 19 nt, Homo sapiens
  misc_RNA (1)...(19): siRNA sense strand
ccacgcagccuagcaaugc

SEQ ID NO: 701895 - RNA, 19 nt, Homo sapiens
  misc_RNA (1)...(19): siRNA sense strand
gacacacuaucagccaugu

SEQ ID NO: 701896 - RNA, 19 nt, Homo sapiens
  misc_RNA (1)...(19): siRNA sense strand
uaugucgccagcaucuuua

SEQ ID NO: 701897 - RNA, 19 nt, Homo sapiens
  misc_RNA (1)...(19): siRNA sense strand
cggugaagacucccaaaga

SEQ ID NO: 701898 - RNA, 19 nt, Homo sapiens
  misc_RNA (1)...(19): siRNA sense strand
ggaauccagccaugaugca

SEQ ID NO: 701899 - RNA, 19 nt, Homo sapiens
  misc_RNA (1)...(19): siRNA sense strand
caaacuugcaggcccuaau

SEQ ID NO: 701900 - RNA, 19 nt, Homo sapiens
  misc_RNA (1)...(19): siRNA sense strand
caagagguguggcauguuu

SEQ ID NO: 701901 - RNA, 19 nt, Homo sapiens
  misc_RNA (1)...(19): siRNA sense strand
ggaagaauuugucaagcaa

SEQ ID NO: 701902 - RNA, 19 nt, Homo sapiens
  misc_RNA (1)...(19): siRNA sense strand
ccuaacaucugaccuagaa

SEQ ID NO: 701903 - RNA, 19 nt, Homo sapiens
  misc_RNA (1)...(19): siRNA sense strand
gaaacugauggaagaauuu

SEQ ID NO: 701904 - RNA, 19 nt, Homo sapiens
  misc_RNA (1)...(19): siRNA sense strand
ccaaagaaguggaauacgu

SEQ ID NO: 701905 - RNA, 19 nt, Homo sapiens
  misc_RNA (1)...(19): siRNA sense strand
ugaaacugauggaagaauu

SEQ ID NO: 701906 - RNA, 19 nt, Homo sapiens
  misc_RNA (1)...(19): siRNA sense strand
cggcugcgaugagauaaua

SEQ ID NO: 701907 - RNA, 19 nt, Homo sapiens
  misc_RNA (1)...(19): siRNA sense strand
gaucaugaccaacccuauu

SEQ ID NO: 701908 - RNA, 19 nt, Homo sapiens
  misc_RNA (1)...(19): siRNA sense strand
caagaggaccacugccuaa

SEQ ID NO: 701909 - RNA, 19 nt, Homo sapiens
  misc_RNA (1)...(19): siRNA sense strand
gggcguacaucgucaccaa

SEQ ID NO: 701910 - RNA, 19 nt, Homo sapiens
  misc_RNA (1)...(19): siRNA sense strand
gaccucaacccaggaguua

SEQ ID NO: 701911 - RNA, 19 nt, Homo sapiens
  misc_RNA (1)...(19): siRNA sense strand
gaggaccacugccuaacau

SEQ ID NO: 701912 - RNA, 19 nt, Homo sapiens
  misc_RNA (1)...(19): siRNA sense strand
ucagugacccguccaaaga

SEQ ID NO: 701913 - RNA, 19 nt, Homo sapiens
  misc_RNA (1)...(19): siRNA sense strand
gggacggcauccggauuua

SEQ ID NO: 701914 - RNA, 19 nt, Homo sapiens
  misc_RNA (1)...(19): siRNA sense strand
ggacagggcaggcuacaac

SEQ ID NO: 701915 - RNA, 19 nt, Homo sapiens
  misc_RNA (1)...(19): siRNA sense strand
uaacaucugaccuagaaga

SEQ ID NO: 701916 - RNA, 19 nt, Homo sapiens
  misc_RNA (1)...(19): siRNA sense strand
cagcuucugugcccaacuu

SEQ ID NO: 701917 - RNA, 19 nt, Homo sapiens
  misc_RNA (1)...(19): siRNA sense strand
gauggaagaauuugucaag

SEQ ID NO: 701918 - RNA, 19 nt, Homo sapiens
  misc_RNA (1)...(19): siRNA sense strand
ccuagaagacgaucggaaa

SEQ ID NO: 701919 - RNA, 19 nt, Homo sapiens
  misc_RNA (1)...(19): siRNA sense strand
ggacuaccagcguguggaa

SEQ ID NO: 701920 - RNA, 19 nt, Homo sapiens
  misc_RNA (1)...(19): siRNA sense strand
uggaagaauuugucaagca

SEQ ID NO: 701921 - RNA, 19 nt, Homo sapiens
  misc_RNA (1)...(19): siRNA sense strand
ggaccucaacccaggaguu

SEQ ID NO: 701922 - RNA, 19 nt, Homo sapiens
  misc_RNA (1)...(19): siRNA sense strand
ccucaacccaggaguuaaa

SEQ ID NO: 701923 - RNA, 19 nt, Homo sapiens
  misc_RNA (1)...(19): siRNA sense strand
aagaggaaccggaugauca

SEQ ID NO: 701924 - RNA, 19 nt, Homo sapiens
  misc_RNA (1)...(19): siRNA sense strand
gaccaacccuauugcuacu

SEQ ID NO: 701925 - RNA, 19 nt, Homo sapiens
  misc_RNA (1)...(19): siRNA sense strand
ggaaccggaugaucaugac

SEQ ID NO: 701926 - RNA, 19 nt, Homo sapiens
  misc_RNA (1)...(19): siRNA sense strand
ugguggaccucaucuacuu

SEQ ID NO: 701927 - RNA, 19 nt, Homo sapiens
  misc_RNA (1)...(19): siRNA sense strand
gcauccggauuuacaagag

SEQ ID NO: 701928 - RNA, 19 nt, Homo sapiens
  misc_RNA (1)...(19): siRNA sense strand
ccacauucauggaggaaaa

SEQ ID NO: 701929 - RNA, 19 nt, Homo sapiens
  misc_RNA (1)...(19): siRNA sense strand
aauauucgcugaggacuac

SEQ ID NO: 701930 - RNA, 19 nt, Homo sapiens
  misc_RNA (1)...(19): siRNA sense strand
ggagaagcagccagugaca

SEQ ID NO: 701931 - RNA, 19 nt, Homo sapiens
  misc_RNA (1)...(19): siRNA sense strand
gaagaauuugucaagcaau

SEQ ID NO: 701932 - RNA, 19 nt, Homo sapiens
  misc_RNA (1)...(19): siRNA sense strand
gcugcgaugagauaauauu

SEQ ID NO: 701933 - RNA, 19 nt, Homo sapiens
  misc_RNA (1)...(19): siRNA sense strand
ggaccacugccuaacaucu

SEQ ID NO: 701934 - RNA, 19 nt, Homo sapiens
  misc_RNA (1)...(19): siRNA sense strand
gaagacgaucggaaaauug

SEQ ID NO: 701935 - RNA, 19 nt, Homo sapiens
  misc_RNA (1)...(19): siRNA sense strand
agaagacgaucggaaaauu

SEQ ID NO: 701936 - RNA, 19 nt, Homo sapiens
  misc_RNA (1)...(19): siRNA sense strand
uaauauucgcugaggacua

SEQ ID NO: 701937 - RNA, 19 nt, Homo sapiens
  misc_RNA (1)...(19): siRNA sense strand
gcaagagguguggcauguu

SEQ ID NO: 701938 - RNA, 19 nt, Homo sapiens
  misc_RNA (1)...(19): siRNA sense strand
uacaagaggaaccggauga

SEQ ID NO: 701939 - RNA, 19 nt, Homo sapiens
  misc_RNA (1)...(19): siRNA sense strand
aaacugauggaagaauuug

SEQ ID NO: 701940 - RNA, 19 nt, Homo sapiens
  misc_RNA (1)...(19): siRNA sense strand
ccacugcugcuaccaccaa

SEQ ID NO: 701941 - RNA, 19 nt, Homo sapiens
  misc_RNA (1)...(19): siRNA sense strand
gacggcauccggauuuaca

SEQ ID NO: 701942 - RNA, 19 nt, Homo sapiens
  misc_RNA (1)...(19): siRNA sense strand
gcuucgagccacauucaug

SEQ ID NO: 701943 - RNA, 19 nt, Homo sapiens
  misc_RNA (1)...(19): siRNA sense strand
agcaagagguguggcaugu

SEQ ID NO: 701944 - RNA, 19 nt, Homo sapiens
  misc_RNA (1)...(19): siRNA sense strand
caagaggaaccggaugauc

SEQ ID NO: 701945 - RNA, 19 nt, Homo sapiens
  misc_RNA (1)...(19): siRNA sense strand
ccaacggcagucucaguga

SEQ ID NO: 701946 - RNA, 19 nt, Homo sapiens
  misc_RNA (1)...(19): siRNA sense strand
gaccacugccuaacaucug

SEQ ID NO: 701947 - RNA, 19 nt, Homo sapiens
  misc_RNA (1)...(19): siRNA sense strand
gcgcugccguggacuuuug

SEQ ID NO: 701948 - RNA, 19 nt, Homo sapiens
  misc_RNA (1)...(19): siRNA sense strand
caacaagccuggugaagug

SEQ ID NO: 701949 - RNA, 19 nt, Homo sapiens
  misc_RNA (1)...(19): siRNA sense strand
ucacagaccucgugcagaa

SEQ ID NO: 701950 - RNA, 19 nt, Homo sapiens
  misc_RNA (1)...(19): siRNA sense strand
gcaccugucuucacucaga

SEQ ID NO: 701951 - RNA, 19 nt, Homo sapiens
  misc_RNA (1)...(19): siRNA sense strand
gcauagggcuagugacuca

SEQ ID NO: 701952 - RNA, 19 nt, Homo sapiens
  misc_RNA (1)...(19): siRNA sense strand
ggucaaagacuacaccauu

SEQ ID NO: 701953 - RNA, 19 nt, Homo sapiens
  misc_RNA (1)...(19): siRNA sense strand
gcuagugacucaucaagau

SEQ ID NO: 701954 - RNA, 19 nt, Homo sapiens
  misc_RNA (1)...(19): siRNA sense strand
gcagaagucccucaaguuc

SEQ ID NO: 701955 - RNA, 19 nt, Homo sapiens
  misc_RNA (1)...(19): siRNA sense strand
caacaucggcucacucuuc

SEQ ID NO: 701956 - RNA, 19 nt, Homo sapiens
  misc_RNA (1)...(19): siRNA sense strand
ugaaggacaugaaugacaa

SEQ ID NO: 701957 - RNA, 19 nt, Homo sapiens
  misc_RNA (1)...(19): siRNA sense strand
gcaggugucugaccgagau

SEQ ID NO: 701958 - RNA, 19 nt, Homo sapiens
  misc_RNA (1)...(19): siRNA sense strand
ucaaugugcuggacgagaa

SEQ ID NO: 701959 - RNA, 19 nt, Homo sapiens
  misc_RNA (1)...(19): siRNA sense strand
ccacuguccuugucaaugu

SEQ ID NO: 701960 - RNA, 19 nt, Homo sapiens
  misc_RNA (1)...(19): siRNA sense strand
gaacaugccagcacugagu

SEQ ID NO: 701961 - RNA, 19 nt, Homo sapiens
  misc_RNA (1)...(19): siRNA sense strand
acacgccgcuggauauuga

SEQ ID NO: 701962 - RNA, 19 nt, Homo sapiens
  misc_RNA (1)...(19): siRNA sense strand
gacaggaacacuggacuua

SEQ ID NO: 701963 - RNA, 19 nt, Homo sapiens
  misc_RNA (1)...(19): siRNA sense strand
gcaggacaacggugacuuu

SEQ ID NO: 701964 - RNA, 19 nt, Homo sapiens
  misc_RNA (1)...(19): siRNA sense strand
acacuggacuuaucacugu

SEQ ID NO: 701965 - RNA, 19 nt, Homo sapiens
  misc_RNA (1)...(19): siRNA sense strand
gcagugacagcaagaagaa

SEQ ID NO: 701966 - RNA, 19 nt, Homo sapiens
  misc_RNA (1)...(19): siRNA sense strand
caacgcaccugucuucacu

SEQ ID NO: 701967 - RNA, 19 nt, Homo sapiens
  misc_RNA (1)...(19): siRNA sense strand
ccuaugaccucaccaucaa

SEQ ID NO: 701968 - RNA, 19 nt, Homo sapiens
  misc_RNA (1)...(19): siRNA sense strand
guaagaaggagaccaagga

SEQ ID NO: 701969 - RNA, 19 nt, Homo sapiens
  misc_RNA (1)...(19): siRNA sense strand
gcacagccuugguccaucu

SEQ ID NO: 701970 - RNA, 19 nt, Homo sapiens
  misc_RNA (1)...(19): siRNA sense strand
gagcuuugaucgagagcaa

SEQ ID NO: 701971 - RNA, 19 nt, Homo sapiens
  misc_RNA (1)...(19): siRNA sense strand
ggcuacaacuucucaguga

SEQ ID NO: 701972 - RNA, 19 nt, Homo sapiens
  misc_RNA (1)...(19): siRNA sense strand
acgagaaggucaaagacua

SEQ ID NO: 701973 - RNA, 19 nt, Homo sapiens
  misc_RNA (1)...(19): siRNA sense strand
ucaaugugcuggacugcaa

SEQ ID NO: 701974 - RNA, 19 nt, Homo sapiens
  misc_RNA (1)...(19): siRNA sense strand
gucaaagacuacaccauug

SEQ ID NO: 701975 - RNA, 19 nt, Homo sapiens
  misc_RNA (1)...(19): siRNA sense strand
uacaagacaucaaugacaa

SEQ ID NO: 701976 - RNA, 19 nt, Homo sapiens
  misc_RNA (1)...(19): siRNA sense strand
agaagucccucaaguucaa

SEQ ID NO: 701977 - RNA, 19 nt, Homo sapiens
  misc_RNA (1)...(19): siRNA sense strand
cagccuugguccaucuuua

SEQ ID NO: 701978 - RNA, 19 nt, Homo sapiens
  misc_RNA (1)...(19): siRNA sense strand
gacaaugaccccaaauuua

SEQ ID NO: 701979 - RNA, 19 nt, Homo sapiens
  misc_RNA (1)...(19): siRNA sense strand
guacaagacaucaaugaca

SEQ ID NO: 701980 - RNA, 19 nt, Homo sapiens
  misc_RNA (1)...(19): siRNA sense strand
caagcagcguggcaacauu

SEQ ID NO: 701981 - RNA, 19 nt, Homo sapiens
  misc_RNA (1)...(19): siRNA sense strand
gggaacagcgggagagcua

SEQ ID NO: 701982 - RNA, 19 nt, Homo sapiens
  misc_RNA (1)...(19): siRNA sense strand
caggaacacuggacuuauc

SEQ ID NO: 701983 - RNA, 19 nt, Homo sapiens
  misc_RNA (1)...(19): siRNA sense strand
gccgaacuaucugagaaua

SEQ ID NO: 701984 - RNA, 19 nt, Homo sapiens
  misc_RNA (1)...(19): siRNA sense strand
agacaucaaugacaacaca

SEQ ID NO: 701985 - RNA, 19 nt, Homo sapiens
  misc_RNA (1)...(19): siRNA sense strand
ucucagugcuugcuaagga

SEQ ID NO: 701986 - RNA, 19 nt, Homo sapiens
  misc_RNA (1)...(19): siRNA sense strand
ggagagauccaggugaaga

SEQ ID NO: 701987 - RNA, 19 nt, Homo sapiens
  misc_RNA (1)...(19): siRNA sense strand
ggacugcaaugacaaugac

SEQ ID NO: 701988 - RNA, 19 nt, Homo sapiens
  misc_RNA (1)...(19): siRNA sense strand
ggagagcuaugaguugaag

SEQ ID NO: 701989 - RNA, 19 nt, Homo sapiens
  misc_RNA (1)...(19): siRNA sense strand
gaagcaaccacagcucauu

SEQ ID NO: 701990 - RNA, 19 nt, Homo sapiens
  misc_RNA (1)...(19): siRNA sense strand
gaacagcgggagagcuaug

SEQ ID NO: 701991 - RNA, 19 nt, Homo sapiens
  misc_RNA (1)...(19): siRNA sense strand
caagacaggugacauuuuc

SEQ ID NO: 701992 - RNA, 19 nt, Homo sapiens
  misc_RNA (1)...(19): siRNA sense strand
gcaaaggcaagaagagcaa

SEQ ID NO: 701993 - RNA, 19 nt, Homo sapiens
  misc_RNA (1)...(19): siRNA sense strand
ccaacgguguggcauccua

SEQ ID NO: 701994 - RNA, 19 nt, Homo sapiens
  misc_RNA (1)...(19): siRNA sense strand
acagcaagaagaaguauuu

SEQ ID NO: 701995 - RNA, 19 nt, Homo sapiens
  misc_RNA (1)...(19): siRNA sense strand
gcagaaaucgaauacacau

SEQ ID NO: 701996 - RNA, 19 nt, Homo sapiens
  misc_RNA (1)...(19): siRNA sense strand
gauagaaguacaagacauc

SEQ ID NO: 701997 - RNA, 19 nt, Homo sapiens
  misc_RNA (1)...(19): siRNA sense strand
gugcuggacugcaaugaca

SEQ ID NO: 701998 - RNA, 19 nt, Homo sapiens
  misc_RNA (1)...(19): siRNA sense strand
cgggagagcuaugaguuga

SEQ ID NO: 701999 - RNA, 19 nt, Homo sapiens
  misc_RNA (1)...(19): siRNA sense strand
ccaaugcagaaaucgaaua

SEQ ID NO: 702000 - RNA, 19 nt, Homo sapiens
  misc_RNA (1)...(19): siRNA sense strand
ugacaacgcacccuauauc

SEQ ID NO: 702001 - RNA, 19 nt, Homo sapiens
  misc_RNA (1)...(19): siRNA sense strand
gagaacaugccagcacuga

SEQ ID NO: 702002 - RNA, 19 nt, Homo sapiens
  misc_RNA (1)...(19): siRNA sense strand
gaaguacaagacaucaaug

SEQ ID NO: 702003 - RNA, 19 nt, Homo sapiens
  misc_RNA (1)...(19): siRNA sense strand
gcacaggcaccauccuauc

SEQ ID NO: 702004 - RNA, 19 nt, Homo sapiens
  misc_RNA (1)...(19): siRNA sense strand
gugaagugauugcugagau

SEQ ID NO: 702005 - RNA, 19 nt, Homo sapiens
  misc_RNA (1)...(19): siRNA sense strand
gcacuaacucccucaaggu

SEQ ID NO: 702006 - RNA, 19 nt, Homo sapiens
  misc_RNA (1)...(19): siRNA sense strand
ggacaggaacacuggacuu

SEQ ID NO: 702007 - RNA, 19 nt, Homo sapiens
  misc_RNA (1)...(19): siRNA sense strand
ggugaaggccaaugacuca

SEQ ID NO: 702008 - RNA, 19 nt, Homo sapiens
  misc_RNA (1)...(19): siRNA sense strand
ugacaacacacccaacuuc

SEQ ID NO: 702009 - RNA, 19 nt, Homo sapiens
  misc_RNA (1)...(19): siRNA sense strand
caagccuggugaagugauu

SEQ ID NO: 702010 - RNA, 19 nt, Homo sapiens
  misc_RNA (1)...(19): siRNA sense strand
gaaugacaacgcacccuau

SEQ ID NO: 702011 - RNA, 19 nt, Homo sapiens
  misc_RNA (1)...(19): siRNA sense strand
gcugcuagagggccagaua

SEQ ID NO: 702012 - RNA, 19 nt, Homo sapiens
  misc_RNA (1)...(19): siRNA sense strand
gcaaggccuccaagggaaa

SEQ ID NO: 702013 - RNA, 19 nt, Homo sapiens
  misc_RNA (1)...(19): siRNA sense strand
ggacacgccgcuggauauu

SEQ ID NO: 702014 - RNA, 19 nt, Homo sapiens
  misc_RNA (1)...(19): siRNA sense strand
gcagguggcaacccuuaug

SEQ ID NO: 702015 - RNA, 19 nt, Homo sapiens
  misc_RNA (1)...(19): siRNA sense strand
ucaccgugcuugacaccaa

SEQ ID NO: 702016 - RNA, 19 nt, Homo sapiens
  misc_RNA (1)...(19): siRNA sense strand
agacuacaccauugagauu

SEQ ID NO: 702017 - RNA, 19 nt, Homo sapiens
  misc_RNA (1)...(19): siRNA sense strand
caacgcacccuauaucacu

SEQ ID NO: 702018 - RNA, 19 nt, Homo sapiens
  misc_RNA (1)...(19): siRNA sense strand
caacggugacuuuguuauc

SEQ ID NO: 702019 - RNA, 19 nt, Homo sapiens
  misc_RNA (1)...(19): siRNA sense strand
gagccucgcagccgacuau

SEQ ID NO: 702020 - RNA, 19 nt, Homo sapiens
  misc_RNA (1)...(19): siRNA sense strand
cuaaugcugagcugguuua

SEQ ID NO: 702021 - RNA, 19 nt, Homo sapiens
  misc_RNA (1)...(19): siRNA sense strand
ugaagugauugcugagauc

SEQ ID NO: 702022 - RNA, 19 nt, Homo sapiens
  misc_RNA (1)...(19): siRNA sense strand
gagcaguacuccgacuaca

SEQ ID NO: 702023 - RNA, 19 nt, Homo sapiens
  misc_RNA (1)...(19): siRNA sense strand
gguggcagccgaggacuuu

SEQ ID NO: 702024 - RNA, 19 nt, Homo sapiens
  misc_RNA (1)...(19): siRNA sense strand
cuaagggccucuucaccau

SEQ ID NO: 702025 - RNA, 19 nt, Homo sapiens
  misc_RNA (1)...(19): siRNA sense strand
gcaagaagaaguauuuccu

SEQ ID NO: 702026 - RNA, 19 nt, Homo sapiens
  misc_RNA (1)...(19): siRNA sense strand
gacaacgcacccuauauca

SEQ ID NO: 702027 - RNA, 19 nt, Homo sapiens
  misc_RNA (1)...(19): siRNA sense strand
cagaggaccaggaggagaa

SEQ ID NO: 702028 - RNA, 19 nt, Homo sapiens
  misc_RNA (1)...(19): siRNA sense strand
ggagaccaaggaccuguau

SEQ ID NO: 702029 - RNA, 19 nt, Homo sapiens
  misc_RNA (1)...(19): siRNA sense strand
ccaucacccuggagaagga

SEQ ID NO: 702030 - RNA, 19 nt, Homo sapiens
  misc_RNA (1)...(19): siRNA sense strand
gaugcugacucuggcucua

SEQ ID NO: 702031 - RNA, 19 nt, Homo sapiens
  misc_RNA (1)...(19): siRNA sense strand
gauuguggcuguggacucu

SEQ ID NO: 702032 - RNA, 19 nt, Homo sapiens
  misc_RNA (1)...(19): siRNA sense strand
aagaugggauggcuaacau

SEQ ID NO: 702033 - RNA, 19 nt, Homo sapiens
  misc_RNA (1)...(19): siRNA sense strand
agaccaaggugccaaugca

SEQ ID NO: 702034 - RNA, 19 nt, Homo sapiens
  misc_RNA (1)...(19): siRNA sense strand
ggcaagacaggugacauuu

SEQ ID NO: 702035 - RNA, 19 nt, Homo sapiens
  misc_RNA (1)...(19): siRNA sense strand
gcuagagggccagauagaa

SEQ ID NO: 702036 - RNA, 19 nt, Homo sapiens
  misc_RNA (1)...(19): siRNA sense strand
uauccagccugagcuuuga

SEQ ID NO: 702037 - RNA, 19 nt, Homo sapiens
  misc_RNA (1)...(19): siRNA sense strand
gcuucucagugcuugcuaa

SEQ ID NO: 702038 - RNA, 19 nt, Homo sapiens
  misc_RNA (1)...(19): siRNA sense strand
ccaaggugccaaugcagaa

SEQ ID NO: 702039 - RNA, 19 nt, Homo sapiens
  misc_RNA (1)...(19): siRNA sense strand
ccagauagaaguacaagac

SEQ ID NO: 702040 - RNA, 19 nt, Homo sapiens
  misc_RNA (1)...(19): siRNA sense strand
ugacuuuguuauccagaau

SEQ ID NO: 702041 - RNA, 19 nt, Homo sapiens
  misc_RNA (1)...(19): siRNA sense strand
cugcagaagucccucaagu

SEQ ID NO: 702042 - RNA, 19 nt, Homo sapiens
  misc_RNA (1)...(19): siRNA sense strand
caacccuuauggacucuuc

SEQ ID NO: 702043 - RNA, 19 nt, Homo sapiens
  misc_RNA (1)...(19): siRNA sense strand
guugugaggcgucuucuuc

SEQ ID NO: 702044 - RNA, 19 nt, Homo sapiens
  misc_RNA (1)...(19): siRNA sense strand
cagauugggucacauucag

SEQ ID NO: 702045 - RNA, 19 nt, Homo sapiens
  misc_RNA (1)...(19): siRNA sense strand
ucgcucagcuuacguuggu

SEQ ID NO: 702046 - RNA, 19 nt, Homo sapiens
  misc_RNA (1)...(19): siRNA sense strand
ccacccaacacccucauug

SEQ ID NO: 702047 - RNA, 19 nt, Homo sapiens
  misc_RNA (1)...(19): siRNA sense strand
gccgcuggauauugacauu

SEQ ID NO: 702048 - RNA, 19 nt, Homo sapiens
  misc_RNA (1)...(19): siRNA sense strand
caacaagccuggugaagug

SEQ ID NO: 702049 - RNA, 19 nt, Homo sapiens
  misc_RNA (1)...(19): siRNA sense strand
ucacagaccucgugcagaa

SEQ ID NO: 702050 - RNA, 19 nt, Homo sapiens
  misc_RNA (1)...(19): siRNA sense strand
gcaccugucuucacucaga

SEQ ID NO: 702051 - RNA, 19 nt, Homo sapiens
  misc_RNA (1)...(19): siRNA sense strand
gcauagggcuagugacuca

SEQ ID NO: 702052 - RNA, 19 nt, Homo sapiens
  misc_RNA (1)...(19): siRNA sense strand
ggucaaagacuacaccauu

SEQ ID NO: 702053 - RNA, 19 nt, Homo sapiens
  misc_RNA (1)...(19): siRNA sense strand
gcuagugacucaucaagau

SEQ ID NO: 702054 - RNA, 19 nt, Homo sapiens
  misc_RNA (1)...(19): siRNA sense strand
gcagaagucccucaaguuc

SEQ ID NO: 702055 - RNA, 19 nt, Homo sapiens
  misc_RNA (1)...(19): siRNA sense strand
caacaucggcucacucuuc

SEQ ID NO: 702056 - RNA, 19 nt, Homo sapiens
  misc_RNA (1)...(19): siRNA sense strand
ugaaggacaugaaugacaa

SEQ ID NO: 702057 - RNA, 19 nt, Homo sapiens
  misc_RNA (1)...(19): siRNA sense strand
gcaggugucugaccgagau

SEQ ID NO: 702058 - RNA, 19 nt, Homo sapiens
  misc_RNA (1)...(19): siRNA sense strand
ucaaugugcuggacgagaa

SEQ ID NO: 702059 - RNA, 19 nt, Homo sapiens
  misc_RNA (1)...(19): siRNA sense strand
ccacuguccuugucaaugu

SEQ ID NO: 702060 - RNA, 19 nt, Homo sapiens
  misc_RNA (1)...(19): siRNA sense strand
gaacaugccagcacugagu

SEQ ID NO: 702061 - RNA, 19 nt, Homo sapiens
  misc_RNA (1)...(19): siRNA sense strand
acacgccgcuggauauuga

SEQ ID NO: 702062 - RNA, 19 nt, Homo sapiens
  misc_RNA (1)...(19): siRNA sense strand
gacaggaacacuggacuua

SEQ ID NO: 702063 - RNA, 19 nt, Homo sapiens
  misc_RNA (1)...(19): siRNA sense strand
gcaggacaacggugacuuu

SEQ ID NO: 702064 - RNA, 19 nt, Homo sapiens
  misc_RNA (1)...(19): siRNA sense strand
acacuggacuuaucacugu

SEQ ID NO: 702065 - RNA, 19 nt, Homo sapiens
  misc_RNA (1)...(19): siRNA sense strand
gcagugacagcaagaagaa

SEQ ID NO: 702066 - RNA, 19 nt, Homo sapiens
  misc_RNA (1)...(19): siRNA sense strand
caacgcaccugucuucacu

SEQ ID NO: 702067 - RNA, 19 nt, Homo sapiens
  misc_RNA (1)...(19): siRNA sense strand
ccuaugaccucaccaucaa

SEQ ID NO: 702068 - RNA, 19 nt, Homo sapiens
  misc_RNA (1)...(19): siRNA sense strand
guaagaaggagaccaagga

SEQ ID NO: 702069 - RNA, 19 nt, Homo sapiens
  misc_RNA (1)...(19): siRNA sense strand
gcacagccuugguccaucu

SEQ ID NO: 702070 - RNA, 19 nt, Homo sapiens
  misc_RNA (1)...(19): siRNA sense strand
gagcuuugaucgagagcaa

SEQ ID NO: 702071 - RNA, 19 nt, Homo sapiens
  misc_RNA (1)...(19): siRNA sense strand
ggcuacaacuucucaguga

SEQ ID NO: 702072 - RNA, 19 nt, Homo sapiens
  misc_RNA (1)...(19): siRNA sense strand
acgagaaggucaaagacua

SEQ ID NO: 702073 - RNA, 19 nt, Homo sapiens
  misc_RNA (1)...(19): siRNA sense strand
ucaaugugcuggacugcaa

SEQ ID NO: 702074 - RNA, 19 nt, Homo sapiens
  misc_RNA (1)...(19): siRNA sense strand
gucaaagacuacaccauug

SEQ ID NO: 702075 - RNA, 19 nt, Homo sapiens
  misc_RNA (1)...(19): siRNA sense strand
uacaagacaucaaugacaa

SEQ ID NO: 702076 - RNA, 19 nt, Homo sapiens
  misc_RNA (1)...(19): siRNA sense strand
agaagucccucaaguucaa

SEQ ID NO: 702077 - RNA, 19 nt, Homo sapiens
  misc_RNA (1)...(19): siRNA sense strand
cagccuugguccaucuuua

SEQ ID NO: 702078 - RNA, 19 nt, Homo sapiens
  misc_RNA (1)...(19): siRNA sense strand
gacaaugaccccaaauuua

SEQ ID NO: 702079 - RNA, 19 nt, Homo sapiens
  misc_RNA (1)...(19): siRNA sense strand
guacaagacaucaaugaca

SEQ ID NO: 702080 - RNA, 19 nt, Homo sapiens
  misc_RNA (1)...(19): siRNA sense strand
caagcagcguggcaacauu

SEQ ID NO: 702081 - RNA, 19 nt, Homo sapiens
  misc_RNA (1)...(19): siRNA sense strand
gggaacagcgggagagcua

SEQ ID NO: 702082 - RNA, 19 nt, Homo sapiens
  misc_RNA (1)...(19): siRNA sense strand
caggaacacuggacuuauc

SEQ ID NO: 702083 - RNA, 19 nt, Homo sapiens
  misc_RNA (1)...(19): siRNA sense strand
gccgaacuaucugagaaua

SEQ ID NO: 702084 - RNA, 19 nt, Homo sapiens
  misc_RNA (1)...(19): siRNA sense strand
agacaucaaugacaacaca

SEQ ID NO: 702085 - RNA, 19 nt, Homo sapiens
  misc_RNA (1)...(19): siRNA sense strand
ucucagugcuugcuaagga

SEQ ID NO: 702086 - RNA, 19 nt, Homo sapiens
  misc_RNA (1)...(19): siRNA sense strand
ggagagauccaggugaaga

SEQ ID NO: 702087 - RNA, 19 nt, Homo sapiens
  misc_RNA (1)...(19): siRNA sense strand
ggacugcaaugacaaugac

SEQ ID NO: 702088 - RNA, 19 nt, Homo sapiens
  misc_RNA (1)...(19): siRNA sense strand
ggagagcuaugaguugaag

SEQ ID NO: 702089 - RNA, 19 nt, Homo sapiens
  misc_RNA (1)...(19): siRNA sense strand
gaagcaaccacagcucauu

SEQ ID NO: 702090 - RNA, 19 nt, Homo sapiens
  misc_RNA (1)...(19): siRNA sense strand
gaacagcgggagagcuaug

SEQ ID NO: 702091 - RNA, 19 nt, Homo sapiens
  misc_RNA (1)...(19): siRNA sense strand
caagacaggugacauuuuc

SEQ ID NO: 702092 - RNA, 19 nt, Homo sapiens
  misc_RNA (1)...(19): siRNA sense strand
gcaaaggcaagaagagcaa

SEQ ID NO: 702093 - RNA, 19 nt, Homo sapiens
  misc_RNA (1)...(19): siRNA sense strand
ccaacgguguggcauccua

SEQ ID NO: 702094 - RNA, 19 nt, Homo sapiens
  misc_RNA (1)...(19): siRNA sense strand
acagcaagaagaaguauuu

SEQ ID NO: 702095 - RNA, 19 nt, Homo sapiens
  misc_RNA (1)...(19): siRNA sense strand
gcagaaaucgaauacacau

SEQ ID NO: 702096 - RNA, 19 nt, Homo sapiens
  misc_RNA (1)...(19): siRNA sense strand
gauagaaguacaagacauc

SEQ ID NO: 702097 - RNA, 19 nt, Homo sapiens
  misc_RNA (1)...(19): siRNA sense strand
gugcuggacugcaaugaca

SEQ ID NO: 702098 - RNA, 19 nt, Homo sapiens
  misc_RNA (1)...(19): siRNA sense strand
cgggagagcuaugaguuga

SEQ ID NO: 702099 - RNA, 19 nt, Homo sapiens
  misc_RNA (1)...(19): siRNA sense strand
ccaaugcagaaaucgaaua

SEQ ID NO: 702100 - RNA, 19 nt, Homo sapiens
  misc_RNA (1)...(19): siRNA sense strand
ugacaacgcacccuauauc

SEQ ID NO: 702101 - RNA, 19 nt, Homo sapiens
  misc_RNA (1)...(19): siRNA sense strand
gagaacaugccagcacuga

SEQ ID NO: 702102 - RNA, 19 nt, Homo sapiens
  misc_RNA (1)...(19): siRNA sense strand
gaaguacaagacaucaaug

SEQ ID NO: 702103 - RNA, 19 nt, Homo sapiens
  misc_RNA (1)...(19): siRNA sense strand
gcacaggcaccauccuauc

SEQ ID NO: 702104 - RNA, 19 nt, Homo sapiens
  misc_RNA (1)...(19): siRNA sense strand
gugaagugauugcugagau

SEQ ID NO: 702105 - RNA, 19 nt, Homo sapiens
  misc_RNA (1)...(19): siRNA sense strand
gcacuaacucccucaaggu

SEQ ID NO: 702106 - RNA, 19 nt, Homo sapiens
  misc_RNA (1)...(19): siRNA sense strand
ggacaggaacacuggacuu

SEQ ID NO: 702107 - RNA, 19 nt, Homo sapiens
  misc_RNA (1)...(19): siRNA sense strand
ggugaaggccaaugacuca

SEQ ID NO: 702108 - RNA, 19 nt, Homo sapiens
  misc_RNA (1)...(19): siRNA sense strand
ugacaacacacccaacuuc

SEQ ID NO: 702109 - RNA, 19 nt, Homo sapiens
  misc_RNA (1)...(19): siRNA sense strand
caagccuggugaagugauu

SEQ ID NO: 702110 - RNA, 19 nt, Homo sapiens
  misc_RNA (1)...(19): siRNA sense strand
gaaugacaacgcacccuau

SEQ ID NO: 702111 - RNA, 19 nt, Homo sapiens
  misc_RNA (1)...(19): siRNA sense strand
gcugcuagagggccagaua

SEQ ID NO: 702112 - RNA, 19 nt, Homo sapiens
  misc_RNA (1)...(19): siRNA sense strand
gcaaggccuccaagggaaa

SEQ ID NO: 702113 - RNA, 19 nt, Homo sapiens
  misc_RNA (1)...(19): siRNA sense strand
ggacacgccgcuggauauu

SEQ ID NO: 702114 - RNA, 19 nt, Homo sapiens
  misc_RNA (1)...(19): siRNA sense strand
gcagguggcaacccuuaug

SEQ ID NO: 702115 - RNA, 19 nt, Homo sapiens
  misc_RNA (1)...(19): siRNA sense strand
ucaccgugcuugacaccaa

SEQ ID NO: 702116 - RNA, 19 nt, Homo sapiens
  misc_RNA (1)...(19): siRNA sense strand
agacuacaccauugagauu

SEQ ID NO: 702117 - RNA, 19 nt, Homo sapiens
  misc_RNA (1)...(19): siRNA sense strand
caacgcacccuauaucacu

SEQ ID NO: 702118 - RNA, 19 nt, Homo sapiens
  misc_RNA (1)...(19): siRNA sense strand
caacggugacuuuguuauc

SEQ ID NO: 702119 - RNA, 19 nt, Homo sapiens
  misc_RNA (1)...(19): siRNA sense strand
gagccucgcagccgacuau

SEQ ID NO: 702120 - RNA, 19 nt, Homo sapiens
  misc_RNA (1)...(19): siRNA sense strand
cuaaugcugagcugguuua

SEQ ID NO: 702121 - RNA, 19 nt, Homo sapiens
  misc_RNA (1)...(19): siRNA sense strand
ugaagugauugcugagauc

SEQ ID NO: 702122 - RNA, 19 nt, Homo sapiens
  misc_RNA (1)...(19): siRNA sense strand
gagcaguacuccgacuaca

SEQ ID NO: 702123 - RNA, 19 nt, Homo sapiens
  misc_RNA (1)...(19): siRNA sense strand
gguggcagccgaggacuuu

SEQ ID NO: 702124 - RNA, 19 nt, Homo sapiens
  misc_RNA (1)...(19): siRNA sense strand
cuaagggccucuucaccau

SEQ ID NO: 702125 - RNA, 19 nt, Homo sapiens
  misc_RNA (1)...(19): siRNA sense strand
gcaagaagaaguauuuccu

SEQ ID NO: 702126 - RNA, 19 nt, Homo sapiens
  misc_RNA (1)...(19): siRNA sense strand
gacaacgcacccuauauca

SEQ ID NO: 702127 - RNA, 19 nt, Homo sapiens
  misc_RNA (1)...(19): siRNA sense strand
cagaggaccaggaggagaa

SEQ ID NO: 702128 - RNA, 19 nt, Homo sapiens
  misc_RNA (1)...(19): siRNA sense strand
ggagaccaaggaccuguau

SEQ ID NO: 702129 - RNA, 19 nt, Homo sapiens
  misc_RNA (1)...(19): siRNA sense strand
ccaucacccuggagaagga

SEQ ID NO: 702130 - RNA, 19 nt, Homo sapiens
  misc_RNA (1)...(19): siRNA sense strand
gaugcugacucuggcucua

SEQ ID NO: 702131 - RNA, 19 nt, Homo sapiens
  misc_RNA (1)...(19): siRNA sense strand
gauuguggcuguggacucu

SEQ ID NO: 702132 - RNA, 19 nt, Homo sapiens
  misc_RNA (1)...(19): siRNA sense strand
aagaugggauggcuaacau

SEQ ID NO: 702133 - RNA, 19 nt, Homo sapiens
  misc_RNA (1)...(19): siRNA sense strand
agaccaaggugccaaugca

SEQ ID NO: 702134 - RNA, 19 nt, Homo sapiens
  misc_RNA (1)...(19): siRNA sense strand
ggcaagacaggugacauuu

SEQ ID NO: 702135 - RNA, 19 nt, Homo sapiens
  misc_RNA (1)...(19): siRNA sense strand
gcuagagggccagauagaa

SEQ ID NO: 702136 - RNA, 19 nt, Homo sapiens
  misc_RNA (1)...(19): siRNA sense strand
uauccagccugagcuuuga

SEQ ID NO: 702137 - RNA, 19 nt, Homo sapiens
  misc_RNA (1)...(19): siRNA sense strand
gcuucucagugcuugcuaa

SEQ ID NO: 702138 - RNA, 19 nt, Homo sapiens
  misc_RNA (1)...(19): siRNA sense strand
ccaaggugccaaugcagaa

SEQ ID NO: 702139 - RNA, 19 nt, Homo sapiens
  misc_RNA (1)...(19): siRNA sense strand
ccagauagaaguacaagac

SEQ ID NO: 702140 - RNA, 19 nt, Homo sapiens
  misc_RNA (1)...(19): siRNA sense strand
ugacuuuguuauccagaau

SEQ ID NO: 702141 - RNA, 19 nt, Homo sapiens
  misc_RNA (1)...(19): siRNA sense strand
cugcagaagucccucaagu

SEQ ID NO: 702142 - RNA, 19 nt, Homo sapiens
  misc_RNA (1)...(19): siRNA sense strand
caacccuuauggacucuuc

SEQ ID NO: 702143 - RNA, 19 nt, Homo sapiens
  misc_RNA (1)...(19): siRNA sense strand
guugugaggcgucuucuuc

SEQ ID NO: 702144 - RNA, 19 nt, Homo sapiens
  misc_RNA (1)...(19): siRNA sense strand
cagauugggucacauucag

SEQ ID NO: 702145 - RNA, 19 nt, Homo sapiens
  misc_RNA (1)...(19): siRNA sense strand
ucgcucagcuuacguuggu

SEQ ID NO: 702146 - RNA, 19 nt, Homo sapiens
  misc_RNA (1)...(19): siRNA sense strand
ccacccaacacccucauug

SEQ ID NO: 702147 - RNA, 19 nt, Homo sapiens
  misc_RNA (1)...(19): siRNA sense strand
gccgcuggauauugacauu

SEQ ID NO: 702148 - RNA, 19 nt, Homo sapiens
  misc_RNA (1)...(19): siRNA sense strand
ggacaaagcucagaaacaa

SEQ ID NO: 702149 - RNA, 19 nt, Homo sapiens
  misc_RNA (1)...(19): siRNA sense strand
agaagaagauguuggacua

SEQ ID NO: 702150 - RNA, 19 nt, Homo sapiens
  misc_RNA (1)...(19): siRNA sense strand
ggaggaagguggaggaucu

SEQ ID NO: 702151 - RNA, 19 nt, Homo sapiens
  misc_RNA (1)...(19): siRNA sense strand
uaagugcgcuggagagcaa

SEQ ID NO: 702152 - RNA, 19 nt, Homo sapiens
  misc_RNA (1)...(19): siRNA sense strand
ugaccgggcuggacaaaga

SEQ ID NO: 702153 - RNA, 19 nt, Homo sapiens
  misc_RNA (1)...(19): siRNA sense strand
aacaggaggucgagaguuu

SEQ ID NO: 702154 - RNA, 19 nt, Homo sapiens
  misc_RNA (1)...(19): siRNA sense strand
ccaagaagaccaagcguau

SEQ ID NO: 702155 - RNA, 19 nt, Homo sapiens
  misc_RNA (1)...(19): siRNA sense strand
gcucagggcccaaguaagu

SEQ ID NO: 702156 - RNA, 19 nt, Homo sapiens
  misc_RNA (1)...(19): siRNA sense strand
gaacaagagggacaaagag

SEQ ID NO: 702157 - RNA, 19 nt, Homo sapiens
  misc_RNA (1)...(19): siRNA sense strand
cguaucggcuucccaucua

SEQ ID NO: 702158 - RNA, 19 nt, Homo sapiens
  misc_RNA (1)...(19): siRNA sense strand
cagaaccugucauugcauu

SEQ ID NO: 702159 - RNA, 19 nt, Homo sapiens
  misc_RNA (1)...(19): siRNA sense strand
agcagaaacucaaggauga

SEQ ID NO: 702160 - RNA, 19 nt, Homo sapiens
  misc_RNA (1)...(19): siRNA sense strand
gcuaauggacaacuggaaa

SEQ ID NO: 702161 - RNA, 19 nt, Homo sapiens
  misc_RNA (1)...(19): siRNA sense strand
gcaauuccgguucugcaaa

SEQ ID NO: 702162 - RNA, 19 nt, Homo sapiens
  misc_RNA (1)...(19): siRNA sense strand
ggaaggagcggagccugaa

SEQ ID NO: 702163 - RNA, 19 nt, Homo sapiens
  misc_RNA (1)...(19): siRNA sense strand
gagaagcagcagcacauug

SEQ ID NO: 702164 - RNA, 19 nt, Homo sapiens
  misc_RNA (1)...(19): siRNA sense strand
ggagagcaaguguaaguca

SEQ ID NO: 702165 - RNA, 19 nt, Homo sapiens
  misc_RNA (1)...(19): siRNA sense strand
agaagcagcagcacauuga

SEQ ID NO: 702166 - RNA, 19 nt, Homo sapiens
  misc_RNA (1)...(19): siRNA sense strand
gcaggacaaagcucagaaa

SEQ ID NO: 702167 - RNA, 19 nt, Homo sapiens
  misc_RNA (1)...(19): siRNA sense strand
ugaacaagagggacaaaga

SEQ ID NO: 702168 - RNA, 19 nt, Homo sapiens
  misc_RNA (1)...(19): siRNA sense strand
acaaagcucagaaacaaga

SEQ ID NO: 702169 - RNA, 19 nt, Homo sapiens
  misc_RNA (1)...(19): siRNA sense strand
ucaaggagcagaaacucaa

SEQ ID NO: 702170 - RNA, 19 nt, Homo sapiens
  misc_RNA (1)...(19): siRNA sense strand
cagcacacccacaugauug

SEQ ID NO: 702171 - RNA, 19 nt, Homo sapiens
  misc_RNA (1)...(19): siRNA sense strand
gaacgaacugcggguguug

SEQ ID NO: 702172 - RNA, 19 nt, Homo sapiens
  misc_RNA (1)...(19): siRNA sense strand
guaagucaggcgagaagaa

SEQ ID NO: 702173 - RNA, 19 nt, Homo sapiens
  misc_RNA (1)...(19): siRNA sense strand
ccagugcccacccaaguuu

SEQ ID NO: 702174 - RNA, 19 nt, Homo sapiens
  misc_RNA (1)...(19): siRNA sense strand
ccaugcacgugaaggagaa

SEQ ID NO: 702175 - RNA, 19 nt, Homo sapiens
  misc_RNA (1)...(19): siRNA sense strand
ugaacgaacugcggguguu

SEQ ID NO: 702176 - RNA, 19 nt, Homo sapiens
  misc_RNA (1)...(19): siRNA sense strand
ugagcaguauguugcagaa

SEQ ID NO: 702177 - RNA, 19 nt, Homo sapiens
  misc_RNA (1)...(19): siRNA sense strand
aggacaagcugaacaagag

SEQ ID NO: 702178 - RNA, 19 nt, Homo sapiens
  misc_RNA (1)...(19): siRNA sense strand
aggaggcacugaaggagaa

SEQ ID NO: 702179 - RNA, 19 nt, Homo sapiens
  misc_RNA (1)...(19): siRNA sense strand
ccacaugauugagucgaau

SEQ ID NO: 702180 - RNA, 19 nt, Homo sapiens
  misc_RNA (1)...(19): siRNA sense strand
gguggaggaucugcaguuc

SEQ ID NO: 702181 - RNA, 19 nt, Homo sapiens
  misc_RNA (1)...(19): siRNA sense strand
ggagaagcagcagcacauu

SEQ ID NO: 702182 - RNA, 19 nt, Homo sapiens
  misc_RNA (1)...(19): siRNA sense strand
gagaccgugucccggaaga

SEQ ID NO: 702183 - RNA, 19 nt, Homo sapiens
  misc_RNA (1)...(19): siRNA sense strand
ccagcacacccacaugauu

SEQ ID NO: 702184 - RNA, 19 nt, Homo sapiens
  misc_RNA (1)...(19): siRNA sense strand
aggcacagcaugagcagua

SEQ ID NO: 702185 - RNA, 19 nt, Homo sapiens
  misc_RNA (1)...(19): siRNA sense strand
cagcaugagcaguauguug

SEQ ID NO: 702186 - RNA, 19 nt, Homo sapiens
  misc_RNA (1)...(19): siRNA sense strand
cccagaaccugucauugca

SEQ ID NO: 702187 - RNA, 19 nt, Homo sapiens
  misc_RNA (1)...(19): siRNA sense strand
ccugguggcugagaacaga

SEQ ID NO: 702188 - RNA, 19 nt, Homo sapiens
  misc_RNA (1)...(19): siRNA sense strand
gcccagaaccugucauugc

SEQ ID NO: 702189 - RNA, 19 nt, Homo sapiens
  misc_RNA (1)...(19): siRNA sense strand
gcccagaccaucggcaauu

SEQ ID NO: 702190 - RNA, 19 nt, Homo sapiens
  misc_RNA (1)...(19): siRNA sense strand
augaggagcugcccugaca

SEQ ID NO: 702191 - RNA, 19 nt, Homo sapiens
  misc_RNA (1)...(19): siRNA sense strand
ggagauugcccugcucaag

SEQ ID NO: 702192 - RNA, 19 nt, Homo sapiens
  misc_RNA (1)...(19): siRNA sense strand
cucaacagcuccgugaaga

SEQ ID NO: 702193 - RNA, 19 nt, Homo sapiens
  misc_RNA (1)...(19): siRNA sense strand
ggagaucggcgagcugaag

SEQ ID NO: 702194 - RNA, 19 nt, Homo sapiens
  misc_RNA (1)...(19): siRNA sense strand
caauuccgguucugcaaac

SEQ ID NO: 702195 - RNA, 19 nt, Homo sapiens
  misc_RNA (1)...(19): siRNA sense strand
caggacaagcugaacaaga

SEQ ID NO: 702196 - RNA, 19 nt, Homo sapiens
  misc_RNA (1)...(19): siRNA sense strand
agaagauguuggacuacga

SEQ ID NO: 702197 - RNA, 19 nt, Homo sapiens
  misc_RNA (1)...(19): siRNA sense strand
gcgcccauccacaaaguga

SEQ ID NO: 702198 - RNA, 19 nt, Homo sapiens
  misc_RNA (1)...(19): siRNA sense strand
gaugcucagggcccaagua

SEQ ID NO: 702199 - RNA, 19 nt, Homo sapiens
  misc_RNA (1)...(19): siRNA sense strand
uggagggccugcaggacaa

SEQ ID NO: 702200 - RNA, 19 nt, Homo sapiens
  misc_RNA (1)...(19): siRNA sense strand
gggagagcguccucaacag

SEQ ID NO: 702201 - RNA, 19 nt, Homo sapiens
  misc_RNA (1)...(19): siRNA sense strand
gagagcgugcggaaagaga

SEQ ID NO: 702202 - RNA, 19 nt, Homo sapiens
  misc_RNA (1)...(19): siRNA sense strand
ucugcgagguggagaagga

SEQ ID NO: 702203 - RNA, 19 nt, Homo sapiens
  misc_RNA (1)...(19): siRNA sense strand
guggagagcgugcggaaag

SEQ ID NO: 702204 - RNA, 19 nt, Homo sapiens
  misc_RNA (1)...(19): siRNA sense strand
gcaacgagucgggauccaa

SEQ ID NO: 702205 - RNA, 19 nt, Homo sapiens
  misc_RNA (1)...(19): siRNA sense strand
ggcgcaggcuaucgaguuc

SEQ ID NO: 702206 - RNA, 19 nt, Homo sapiens
  misc_RNA (1)...(19): siRNA sense strand
gggugcugcgggauaaaua

SEQ ID NO: 702207 - RNA, 19 nt, Homo sapiens
  misc_RNA (1)...(19): siRNA sense strand
gcucucggccagcaaggaa

SEQ ID NO: 702208 - RNA, 19 nt, Homo sapiens
  misc_RNA (1)...(19): siRNA sense strand
caagaagaccaagcguaug

SEQ ID NO: 702209 - RNA, 19 nt, Homo sapiens
  misc_RNA (1)...(19): siRNA sense strand
agccaggcguggugcagua

SEQ ID NO: 702210 - RNA, 19 nt, Homo sapiens
  misc_RNA (1)...(19): siRNA sense strand
ggauccaaccucucagaca

SEQ ID NO: 702211 - RNA, 19 nt, Homo sapiens
  misc_RNA (1)...(19): siRNA sense strand
caucggcaauuccgguucu

SEQ ID NO: 702212 - RNA, 19 nt, Homo sapiens
  misc_RNA (1)...(19): siRNA sense strand
ccucaaagccacccugaac

SEQ ID NO: 702213 - RNA, 19 nt, Homo sapiens
  misc_RNA (1)...(19): siRNA sense strand
cgggagagcguccucaaca

SEQ ID NO: 702214 - RNA, 19 nt, Homo sapiens
  misc_RNA (1)...(19): siRNA sense strand
ccacaaagugauccguauc

SEQ ID NO: 702215 - RNA, 19 nt, Homo sapiens
  misc_RNA (1)...(19): siRNA sense strand
gaggagcugcccugacaag

SEQ ID NO: 702216 - RNA, 19 nt, Homo sapiens
  misc_RNA (1)...(19): siRNA sense strand
gaucaaggagcagaaacuc

SEQ ID NO: 702217 - RNA, 19 nt, Homo sapiens
  misc_RNA (1)...(19): siRNA sense strand
gcgcuggagagcaagugua

SEQ ID NO: 702218 - RNA, 19 nt, Homo sapiens
  misc_RNA (1)...(19): siRNA sense strand
caaacaggaggucgagagu

SEQ ID NO: 702219 - RNA, 19 nt, Homo sapiens
  misc_RNA (1)...(19): siRNA sense strand
ccgagaagaagauguugga

SEQ ID NO: 702220 - RNA, 19 nt, Homo sapiens
  misc_RNA (1)...(19): siRNA sense strand
gcacagcaugagcaguaug

SEQ ID NO: 702221 - RNA, 19 nt, Homo sapiens
  misc_RNA (1)...(19): siRNA sense strand
gaagaagauguuggacuac

SEQ ID NO: 702222 - RNA, 19 nt, Homo sapiens
  misc_RNA (1)...(19): siRNA sense strand
gcccagccaaggccaagaa

SEQ ID NO: 702223 - RNA, 19 nt, Homo sapiens
  misc_RNA (1)...(19): siRNA sense strand
ggaucaaggagcagaaacu

SEQ ID NO: 702224 - RNA, 19 nt, Homo sapiens
  misc_RNA (1)...(19): siRNA sense strand
uccacaaagugauccguau

SEQ ID NO: 702225 - RNA, 19 nt, Homo sapiens
  misc_RNA (1)...(19): siRNA sense strand
agaccgccaugcacgugaa

SEQ ID NO: 702226 - RNA, 19 nt, Homo sapiens
  misc_RNA (1)...(19): siRNA sense strand
ucaaagccacccugaacuc

SEQ ID NO: 702227 - RNA, 19 nt, Homo sapiens
  misc_RNA (1)...(19): siRNA sense strand
cccagcaguuccuccauca

SEQ ID NO: 702228 - RNA, 19 nt, Homo sapiens
  misc_RNA (1)...(19): siRNA sense strand
aagaagaccaagcguaugg

SEQ ID NO: 702229 - RNA, 19 nt, Homo sapiens
  misc_RNA (1)...(19): siRNA sense strand
cuaauggacaacuggaaau

SEQ ID NO: 702230 - RNA, 19 nt, Homo sapiens
  misc_RNA (1)...(19): siRNA sense strand
ggacaaagcucagaaacaa

SEQ ID NO: 702231 - RNA, 19 nt, Homo sapiens
  misc_RNA (1)...(19): siRNA sense strand
agaagaagauguuggacua

SEQ ID NO: 702232 - RNA, 19 nt, Homo sapiens
  misc_RNA (1)...(19): siRNA sense strand
ggaggaagguggaggaucu

SEQ ID NO: 702233 - RNA, 19 nt, Homo sapiens
  misc_RNA (1)...(19): siRNA sense strand
uaagugcgcuggagagcaa

SEQ ID NO: 702234 - RNA, 19 nt, Homo sapiens
  misc_RNA (1)...(19): siRNA sense strand
ugaccgggcuggacaaaga

SEQ ID NO: 702235 - RNA, 19 nt, Homo sapiens
  misc_RNA (1)...(19): siRNA sense strand
aacaggaggucgagaguuu

SEQ ID NO: 702236 - RNA, 19 nt, Homo sapiens
  misc_RNA (1)...(19): siRNA sense strand
ccaagaagaccaagcguau

SEQ ID NO: 702237 - RNA, 19 nt, Homo sapiens
  misc_RNA (1)...(19): siRNA sense strand
gcucagggcccaaguaagu

SEQ ID NO: 702238 - RNA, 19 nt, Homo sapiens
  misc_RNA (1)...(19): siRNA sense strand
gaacaagagggacaaagag

SEQ ID NO: 702239 - RNA, 19 nt, Homo sapiens
  misc_RNA (1)...(19): siRNA sense strand
cguaucggcuucccaucua

SEQ ID NO: 702240 - RNA, 19 nt, Homo sapiens
  misc_RNA (1)...(19): siRNA sense strand
cagaaccugucauugcauu

SEQ ID NO: 702241 - RNA, 19 nt, Homo sapiens
  misc_RNA (1)...(19): siRNA sense strand
agcagaaacucaaggauga

SEQ ID NO: 702242 - RNA, 19 nt, Homo sapiens
  misc_RNA (1)...(19): siRNA sense strand
gcuaauggacaacuggaaa

SEQ ID NO: 702243 - RNA, 19 nt, Homo sapiens
  misc_RNA (1)...(19): siRNA sense strand
gcaauuccgguucugcaaa

SEQ ID NO: 702244 - RNA, 19 nt, Homo sapiens
  misc_RNA (1)...(19): siRNA sense strand
ggaaggagcggagccugaa

SEQ ID NO: 702245 - RNA, 19 nt, Homo sapiens
  misc_RNA (1)...(19): siRNA sense strand
gagaagcagcagcacauug

SEQ ID NO: 702246 - RNA, 19 nt, Homo sapiens
  misc_RNA (1)...(19): siRNA sense strand
ggagagcaaguguaaguca

SEQ ID NO: 702247 - RNA, 19 nt, Homo sapiens
  misc_RNA (1)...(19): siRNA sense strand
agaagcagcagcacauuga

SEQ ID NO: 702248 - RNA, 19 nt, Homo sapiens
  misc_RNA (1)...(19): siRNA sense strand
gcaggacaaagcucagaaa

SEQ ID NO: 702249 - RNA, 19 nt, Homo sapiens
  misc_RNA (1)...(19): siRNA sense strand
ugaacaagagggacaaaga

SEQ ID NO: 702250 - RNA, 19 nt, Homo sapiens
  misc_RNA (1)...(19): siRNA sense strand
acaaagcucagaaacaaga

SEQ ID NO: 702251 - RNA, 19 nt, Homo sapiens
  misc_RNA (1)...(19): siRNA sense strand
ucaaggagcagaaacucaa

SEQ ID NO: 702252 - RNA, 19 nt, Homo sapiens
  misc_RNA (1)...(19): siRNA sense strand
cagcacacccacaugauug

SEQ ID NO: 702253 - RNA, 19 nt, Homo sapiens
  misc_RNA (1)...(19): siRNA sense strand
gaacgaacugcggguguug

SEQ ID NO: 702254 - RNA, 19 nt, Homo sapiens
  misc_RNA (1)...(19): siRNA sense strand
guaagucaggcgagaagaa

SEQ ID NO: 702255 - RNA, 19 nt, Homo sapiens
  misc_RNA (1)...(19): siRNA sense strand
ccagugcccacccaaguuu

SEQ ID NO: 702256 - RNA, 19 nt, Homo sapiens
  misc_RNA (1)...(19): siRNA sense strand
ccaugcacgugaaggagaa

SEQ ID NO: 702257 - RNA, 19 nt, Homo sapiens
  misc_RNA (1)...(19): siRNA sense strand
ugaacgaacugcggguguu

SEQ ID NO: 702258 - RNA, 19 nt, Homo sapiens
  misc_RNA (1)...(19): siRNA sense strand
ugagcaguauguugcagaa

SEQ ID NO: 702259 - RNA, 19 nt, Homo sapiens
  misc_RNA (1)...(19): siRNA sense strand
aggacaagcugaacaagag

SEQ ID NO: 702260 - RNA, 19 nt, Homo sapiens
  misc_RNA (1)...(19): siRNA sense strand
aggaggcacugaaggagaa

SEQ ID NO: 702261 - RNA, 19 nt, Homo sapiens
  misc_RNA (1)...(19): siRNA sense strand
ccacaugauugagucgaau

SEQ ID NO: 702262 - RNA, 19 nt, Homo sapiens
  misc_RNA (1)...(19): siRNA sense strand
gguggaggaucugcaguuc

SEQ ID NO: 702263 - RNA, 19 nt, Homo sapiens
  misc_RNA (1)...(19): siRNA sense strand
ggagaagcagcagcacauu

SEQ ID NO: 702264 - RNA, 19 nt, Homo sapiens
  misc_RNA (1)...(19): siRNA sense strand
gagaccgugucccggaaga

SEQ ID NO: 702265 - RNA, 19 nt, Homo sapiens
  misc_RNA (1)...(19): siRNA sense strand
ccagcacacccacaugauu

SEQ ID NO: 702266 - RNA, 19 nt, Homo sapiens
  misc_RNA (1)...(19): siRNA sense strand
aggcacagcaugagcagua

SEQ ID NO: 702267 - RNA, 19 nt, Homo sapiens
  misc_RNA (1)...(19): siRNA sense strand
cagcaugagcaguauguug

SEQ ID NO: 702268 - RNA, 19 nt, Homo sapiens
  misc_RNA (1)...(19): siRNA sense strand
cccagaaccugucauugca

SEQ ID NO: 702269 - RNA, 19 nt, Homo sapiens
  misc_RNA (1)...(19): siRNA sense strand
ccugguggcugagaacaga

SEQ ID NO: 702270 - RNA, 19 nt, Homo sapiens
  misc_RNA (1)...(19): siRNA sense strand
gcccagaaccugucauugc

SEQ ID NO: 702271 - RNA, 19 nt, Homo sapiens
  misc_RNA (1)...(19): siRNA sense strand
gcccagaccaucggcaauu

SEQ ID NO: 702272 - RNA, 19 nt, Homo sapiens
  misc_RNA (1)...(19): siRNA sense strand
augaggagcugcccugaca

SEQ ID NO: 702273 - RNA, 19 nt, Homo sapiens
  misc_RNA (1)...(19): siRNA sense strand
ggagauugcccugcucaag

SEQ ID NO: 702274 - RNA, 19 nt, Homo sapiens
  misc_RNA (1)...(19): siRNA sense strand
cucaacagcuccgugaaga

SEQ ID NO: 702275 - RNA, 19 nt, Homo sapiens
  misc_RNA (1)...(19): siRNA sense strand
ggagaucggcgagcugaag

SEQ ID NO: 702276 - RNA, 19 nt, Homo sapiens
  misc_RNA (1)...(19): siRNA sense strand
caauuccgguucugcaaac

SEQ ID NO: 702277 - RNA, 19 nt, Homo sapiens
  misc_RNA (1)...(19): siRNA sense strand
caggacaagcugaacaaga

SEQ ID NO: 702278 - RNA, 19 nt, Homo sapiens
  misc_RNA (1)...(19): siRNA sense strand
agaagauguuggacuacga

SEQ ID NO: 702279 - RNA, 19 nt, Homo sapiens
  misc_RNA (1)...(19): siRNA sense strand
gcgcccauccacaaaguga

SEQ ID NO: 702280 - RNA, 19 nt, Homo sapiens
  misc_RNA (1)...(19): siRNA sense strand
gaugcucagggcccaagua

SEQ ID NO: 702281 - RNA, 19 nt, Homo sapiens
  misc_RNA (1)...(19): siRNA sense strand
uggagggccugcaggacaa

SEQ ID NO: 702282 - RNA, 19 nt, Homo sapiens
  misc_RNA (1)...(19): siRNA sense strand
gggagagcguccucaacag

SEQ ID NO: 702283 - RNA, 19 nt, Homo sapiens
  misc_RNA (1)...(19): siRNA sense strand
gagagcgugcggaaagaga

SEQ ID NO: 702284 - RNA, 19 nt, Homo sapiens
  misc_RNA (1)...(19): siRNA sense strand
ucugcgagguggagaagga

SEQ ID NO: 702285 - RNA, 19 nt, Homo sapiens
  misc_RNA (1)...(19): siRNA sense strand
guggagagcgugcggaaag

SEQ ID NO: 702286 - RNA, 19 nt, Homo sapiens
  misc_RNA (1)...(19): siRNA sense strand
gcaacgagucgggauccaa

SEQ ID NO: 702287 - RNA, 19 nt, Homo sapiens
  misc_RNA (1)...(19): siRNA sense strand
ggcgcaggcuaucgaguuc

SEQ ID NO: 702288 - RNA, 19 nt, Homo sapiens
  misc_RNA (1)...(19): siRNA sense strand
gggugcugcgggauaaaua

SEQ ID NO: 702289 - RNA, 19 nt, Homo sapiens
  misc_RNA (1)...(19): siRNA sense strand
gcucucggccagcaaggaa

SEQ ID NO: 702290 - RNA, 19 nt, Homo sapiens
  misc_RNA (1)...(19): siRNA sense strand
caagaagaccaagcguaug

SEQ ID NO: 702291 - RNA, 19 nt, Homo sapiens
  misc_RNA (1)...(19): siRNA sense strand
agccaggcguggugcagua

SEQ ID NO: 702292 - RNA, 19 nt, Homo sapiens
  misc_RNA (1)...(19): siRNA sense strand
ggauccaaccucucagaca

SEQ ID NO: 702293 - RNA, 19 nt, Homo sapiens
  misc_RNA (1)...(19): siRNA sense strand
caucggcaauuccgguucu

SEQ ID NO: 702294 - RNA, 19 nt, Homo sapiens
  misc_RNA (1)...(19): siRNA sense strand
ccucaaagccacccugaac

SEQ ID NO: 702295 - RNA, 19 nt, Homo sapiens
  misc_RNA (1)...(19): siRNA sense strand
cgggagagcguccucaaca

SEQ ID NO: 702296 - RNA, 19 nt, Homo sapiens
  misc_RNA (1)...(19): siRNA sense strand
ccacaaagugauccguauc

SEQ ID NO: 702297 - RNA, 19 nt, Homo sapiens
  misc_RNA (1)...(19): siRNA sense strand
gaggagcugcccugacaag

SEQ ID NO: 702298 - RNA, 19 nt, Homo sapiens
  misc_RNA (1)...(19): siRNA sense strand
gaucaaggagcagaaacuc

SEQ ID NO: 702299 - RNA, 19 nt, Homo sapiens
  misc_RNA (1)...(19): siRNA sense strand
gcgcuggagagcaagugua

SEQ ID NO: 702300 - RNA, 19 nt, Homo sapiens
  misc_RNA (1)...(19): siRNA sense strand
caaacaggaggucgagagu

SEQ ID NO: 702301 - RNA, 19 nt, Homo sapiens
  misc_RNA (1)...(19): siRNA sense strand
ccgagaagaagauguugga

SEQ ID NO: 702302 - RNA, 19 nt, Homo sapiens
  misc_RNA (1)...(19): siRNA sense strand
gcacagcaugagcaguaug

SEQ ID NO: 702303 - RNA, 19 nt, Homo sapiens
  misc_RNA (1)...(19): siRNA sense strand
gaagaagauguuggacuac

SEQ ID NO: 702304 - RNA, 19 nt, Homo sapiens
  misc_RNA (1)...(19): siRNA sense strand
gcccagccaaggccaagaa

SEQ ID NO: 702305 - RNA, 19 nt, Homo sapiens
  misc_RNA (1)...(19): siRNA sense strand
ggaucaaggagcagaaacu

SEQ ID NO: 702306 - RNA, 19 nt, Homo sapiens
  misc_RNA (1)...(19): siRNA sense strand
uccacaaagugauccguau

SEQ ID NO: 702307 - RNA, 19 nt, Homo sapiens
  misc_RNA (1)...(19): siRNA sense strand
agaccgccaugcacgugaa

SEQ ID NO: 702308 - RNA, 19 nt, Homo sapiens
  misc_RNA (1)...(19): siRNA sense strand
ucaaagccacccugaacuc

SEQ ID NO: 702309 - RNA, 19 nt, Homo sapiens
  misc_RNA (1)...(19): siRNA sense strand
cccagcaguuccuccauca

SEQ ID NO: 702310 - RNA, 19 nt, Homo sapiens
  misc_RNA (1)...(19): siRNA sense strand
aagaagaccaagcguaugg

SEQ ID NO: 702311 - RNA, 19 nt, Homo sapiens
  misc_RNA (1)...(19): siRNA sense strand
cuaauggacaacuggaaau

SEQ ID NO: 702312 - RNA, 19 nt, Homo sapiens
  misc_RNA (1)...(19): siRNA sense strand
gaacaagccuucucuccua

SEQ ID NO: 702313 - RNA, 19 nt, Homo sapiens
  misc_RNA (1)...(19): siRNA sense strand
gcacauggauggccaaaug

SEQ ID NO: 702314 - RNA, 19 nt, Homo sapiens
  misc_RNA (1)...(19): siRNA sense strand
gaagaaaugugggcaauau

SEQ ID NO: 702315 - RNA, 19 nt, Homo sapiens
  misc_RNA (1)...(19): siRNA sense strand
caaaugagccaaacacuaa

SEQ ID NO: 702316 - RNA, 19 nt, Homo sapiens
  misc_RNA (1)...(19): siRNA sense strand
guaaucaaccuaacacaua

SEQ ID NO: 702317 - RNA, 19 nt, Homo sapiens
  misc_RNA (1)...(19): siRNA sense strand
caagguggccuccaaauaa

SEQ ID NO: 702318 - RNA, 19 nt, Homo sapiens
  misc_RNA (1)...(19): siRNA sense strand
gcaccuagauguccucaug

SEQ ID NO: 702319 - RNA, 19 nt, Homo sapiens
  misc_RNA (1)...(19): siRNA sense strand
ucagggaccuugccuauga

SEQ ID NO: 702320 - RNA, 19 nt, Homo sapiens
  misc_RNA (1)...(19): siRNA sense strand
uaaaggagguaaagaagga

SEQ ID NO: 702321 - RNA, 19 nt, Homo sapiens
  misc_RNA (1)...(19): siRNA sense strand
cagagaacaucaaacguaa

SEQ ID NO: 702322 - RNA, 19 nt, Homo sapiens
  misc_RNA (1)...(19): siRNA sense strand
ggacaaagucagauuaugu

SEQ ID NO: 702323 - RNA, 19 nt, Homo sapiens
  misc_RNA (1)...(19): siRNA sense strand
gcacacagauuuugccuaa

SEQ ID NO: 702324 - RNA, 19 nt, Homo sapiens
  misc_RNA (1)...(19): siRNA sense strand
gaaagaagcagacucuaca

SEQ ID NO: 702325 - RNA, 19 nt, Homo sapiens
  misc_RNA (1)...(19): siRNA sense strand
caacagcagaguucaauuu

SEQ ID NO: 702326 - RNA, 19 nt, Homo sapiens
  misc_RNA (1)...(19): siRNA sense strand
cgaaaguaauggcuaacua

SEQ ID NO: 702327 - RNA, 19 nt, Homo sapiens
  misc_RNA (1)...(19): siRNA sense strand
cuacagcaguucagaauau

SEQ ID NO: 702328 - RNA, 19 nt, Homo sapiens
  misc_RNA (1)...(19): siRNA sense strand
gaaaauugcuccacaagau

SEQ ID NO: 702329 - RNA, 19 nt, Homo sapiens
  misc_RNA (1)...(19): siRNA sense strand
caacacaacugcaccaaac

SEQ ID NO: 702330 - RNA, 19 nt, Homo sapiens
  misc_RNA (1)...(19): siRNA sense strand
caaaugacccaagagaaua

SEQ ID NO: 702331 - RNA, 19 nt, Homo sapiens
  misc_RNA (1)...(19): siRNA sense strand
caaagcaauuguuagcaaa

SEQ ID NO: 702332 - RNA, 19 nt, Homo sapiens
  misc_RNA (1)...(19): siRNA sense strand
ucaaugaacugaccaacau

SEQ ID NO: 702333 - RNA, 19 nt, Homo sapiens
  misc_RNA (1)...(19): siRNA sense strand
gaugacccauuuaacauug

SEQ ID NO: 702334 - RNA, 19 nt, Homo sapiens
  misc_RNA (1)...(19): siRNA sense strand
cagcuaagcacacagauuu

SEQ ID NO: 702335 - RNA, 19 nt, Homo sapiens
  misc_RNA (1)...(19): siRNA sense strand
ccaaagcaauuguuagcaa

SEQ ID NO: 702336 - RNA, 19 nt, Homo sapiens
  misc_RNA (1)...(19): siRNA sense strand
guggacaacucauuucuug

SEQ ID NO: 702337 - RNA, 19 nt, Homo sapiens
  misc_RNA (1)...(19): siRNA sense strand
gacaacucauuucuugaua

SEQ ID NO: 702338 - RNA, 19 nt, Homo sapiens
  misc_RNA (1)...(19): siRNA sense strand
ggaaaucugccuuguaauc

SEQ ID NO: 702339 - RNA, 19 nt, Homo sapiens
  misc_RNA (1)...(19): siRNA sense strand
agacagagccugguaauga

SEQ ID NO: 702340 - RNA, 19 nt, Homo sapiens
  misc_RNA (1)...(19): siRNA sense strand
aaacagugaugcugauuuc

SEQ ID NO: 702341 - RNA, 19 nt, Homo sapiens
  misc_RNA (1)...(19): siRNA sense strand
caugaucaaugccaccaua

SEQ ID NO: 702342 - RNA, 19 nt, Homo sapiens
  misc_RNA (1)...(19): siRNA sense strand
ggaacaggguugaaucagu

SEQ ID NO: 702343 - RNA, 19 nt, Homo sapiens
  misc_RNA (1)...(19): siRNA sense strand
cagcagagcucaauuucag

SEQ ID NO: 702344 - RNA, 19 nt, Homo sapiens
  misc_RNA (1)...(19): siRNA sense strand
caaggccaccuccagauua

SEQ ID NO: 702345 - RNA, 19 nt, Homo sapiens
  misc_RNA (1)...(19): siRNA sense strand
aaacugggccucucaagaa

SEQ ID NO: 702346 - RNA, 19 nt, Homo sapiens
  misc_RNA (1)...(19): siRNA sense strand
aaagcaggaugacccauuu

SEQ ID NO: 702347 - RNA, 19 nt, Homo sapiens
  misc_RNA (1)...(19): siRNA sense strand
ggaaugggauaccaagucu

SEQ ID NO: 702348 - RNA, 19 nt, Homo sapiens
  misc_RNA (1)...(19): siRNA sense strand
ggacaacucauuucuugau

SEQ ID NO: 702349 - RNA, 19 nt, Homo sapiens
  misc_RNA (1)...(19): siRNA sense strand
ucacaacaauugagaccaa

SEQ ID NO: 702350 - RNA, 19 nt, Homo sapiens
  misc_RNA (1)...(19): siRNA sense strand
gaucaaaagugaauacuca

SEQ ID NO: 702351 - RNA, 19 nt, Homo sapiens
  misc_RNA (1)...(19): siRNA sense strand
gcuccaggguuccuugaaa

SEQ ID NO: 702352 - RNA, 19 nt, Homo sapiens
  misc_RNA (1)...(19): siRNA sense strand
ggagcuggaucuguuggua

SEQ ID NO: 702353 - RNA, 19 nt, Homo sapiens
  misc_RNA (1)...(19): siRNA sense strand
ccaagccuuuguuucauuu

SEQ ID NO: 702354 - RNA, 19 nt, Homo sapiens
  misc_RNA (1)...(19): siRNA sense strand
gaaucucucugcaggacaa

SEQ ID NO: 702355 - RNA, 19 nt, Homo sapiens
  misc_RNA (1)...(19): siRNA sense strand
caacucauuucuugauauc

SEQ ID NO: 702356 - RNA, 19 nt, Homo sapiens
  misc_RNA (1)...(19): siRNA sense strand
ccaaaugacccaagagaau

SEQ ID NO: 702357 - RNA, 19 nt, Homo sapiens
  misc_RNA (1)...(19): siRNA sense strand
ugacuuagcuuuugacuuc

SEQ ID NO: 702358 - RNA, 19 nt, Homo sapiens
  misc_RNA (1)...(19): siRNA sense strand
gaaaucugccuuguaauca

SEQ ID NO: 702359 - RNA, 19 nt, Homo sapiens
  misc_RNA (1)...(19): siRNA sense strand
auggaaaucugccuuguaa

SEQ ID NO: 702360 - RNA, 19 nt, Homo sapiens
  misc_RNA (1)...(19): siRNA sense strand
agaccaaauuuaacccaua

SEQ ID NO: 702361 - RNA, 19 nt, Homo sapiens
  misc_RNA (1)...(19): siRNA sense strand
gagaacaucaaacguaaug

SEQ ID NO: 702362 - RNA, 19 nt, Homo sapiens
  misc_RNA (1)...(19): siRNA sense strand
gaucagauaaaccgacauu

SEQ ID NO: 702363 - RNA, 19 nt, Homo sapiens
  misc_RNA (1)...(19): siRNA sense strand
gaacaagcaaacagcaaga

SEQ ID NO: 702364 - RNA, 19 nt, Homo sapiens
  misc_RNA (1)...(19): siRNA sense strand
acagagaacaucaaacgua

SEQ ID NO: 702365 - RNA, 19 nt, Homo sapiens
  misc_RNA (1)...(19): siRNA sense strand
gaccaaauuuaacccauag

SEQ ID NO: 702366 - RNA, 19 nt, Homo sapiens
  misc_RNA (1)...(19): siRNA sense strand
ucagauaaaccgacauuug

SEQ ID NO: 702367 - RNA, 19 nt, Homo sapiens
  misc_RNA (1)...(19): siRNA sense strand
ccaaaugagccaaacacua

SEQ ID NO: 702368 - RNA, 19 nt, Homo sapiens
  misc_RNA (1)...(19): siRNA sense strand
agacgacccuggagaacaa

SEQ ID NO: 702369 - RNA, 19 nt, Homo sapiens
  misc_RNA (1)...(19): siRNA sense strand
gacagagccugguaaugau

SEQ ID NO: 702370 - RNA, 19 nt, Homo sapiens
  misc_RNA (1)...(19): siRNA sense strand
guaaugaucacauccaaca

SEQ ID NO: 702371 - RNA, 19 nt, Homo sapiens
  misc_RNA (1)...(19): siRNA sense strand
gaacugaccaacauaucug

SEQ ID NO: 702372 - RNA, 19 nt, Homo sapiens
  misc_RNA (1)...(19): siRNA sense strand
ggaaagaagcagacucuac

SEQ ID NO: 702373 - RNA, 19 nt, Homo sapiens
  misc_RNA (1)...(19): siRNA sense strand
gaagacagagccugguaau

SEQ ID NO: 702374 - RNA, 19 nt, Homo sapiens
  misc_RNA (1)...(19): siRNA sense strand
gcucagaccgggaaagaga

SEQ ID NO: 702375 - RNA, 19 nt, Homo sapiens
  misc_RNA (1)...(19): siRNA sense strand
ccaaauuuaacccauagua

SEQ ID NO: 702376 - RNA, 19 nt, Homo sapiens
  misc_RNA (1)...(19): siRNA sense strand
cagauaaaccgacauuugu

SEQ ID NO: 702377 - RNA, 19 nt, Homo sapiens
  misc_RNA (1)...(19): siRNA sense strand
gagcagaaacagcaacuuc

SEQ ID NO: 702378 - RNA, 19 nt, Homo sapiens
  misc_RNA (1)...(19): siRNA sense strand
gaaaguaauggcuaacuac

SEQ ID NO: 702379 - RNA, 19 nt, Homo sapiens
  misc_RNA (1)...(19): siRNA sense strand
caaucuugaugaaaucuug

SEQ ID NO: 702380 - RNA, 19 nt, Homo sapiens
  misc_RNA (1)...(19): siRNA sense strand
gaugcugauuucauugauu

SEQ ID NO: 702381 - RNA, 19 nt, Homo sapiens
  misc_RNA (1)...(19): siRNA sense strand
aguaauggcuaacuacaug

SEQ ID NO: 702382 - RNA, 19 nt, Homo sapiens
  misc_RNA (1)...(19): siRNA sense strand
ccaaauaaacaauggacaa

SEQ ID NO: 702383 - RNA, 19 nt, Homo sapiens
  misc_RNA (1)...(19): siRNA sense strand
cagugaugcugauuucauu

SEQ ID NO: 702384 - RNA, 19 nt, Homo sapiens
  misc_RNA (1)...(19): siRNA sense strand
gagacaggaucaacacucu

SEQ ID NO: 702385 - RNA, 19 nt, Homo sapiens
  misc_RNA (1)...(19): siRNA sense strand
ggaugacccauuuaacauu

SEQ ID NO: 702386 - RNA, 19 nt, Homo sapiens
  misc_RNA (1)...(19): siRNA sense strand
ggacaagguggccuccaaa

SEQ ID NO: 702387 - RNA, 19 nt, Homo sapiens
  misc_RNA (1)...(19): siRNA sense strand
gcaagcaugccaccacaga

SEQ ID NO: 702388 - RNA, 19 nt, Homo sapiens
  misc_RNA (1)...(19): siRNA sense strand
aaacccaaagcaauuguua

SEQ ID NO: 702389 - RNA, 19 nt, Homo sapiens
  misc_RNA (1)...(19): siRNA sense strand
agagaaacccaaagcaauu

SEQ ID NO: 702390 - RNA, 19 nt, Homo sapiens
  misc_RNA (1)...(19): siRNA sense strand
gaucaaugccaccauaaag

SEQ ID NO: 702391 - RNA, 19 nt, Homo sapiens
  misc_RNA (1)...(19): siRNA sense strand
gcuuaaaggagguaaagaa

SEQ ID NO: 702392 - RNA, 19 nt, Homo sapiens
  misc_RNA (1)...(19): siRNA sense strand
gcccugcccuaaacaguga

SEQ ID NO: 702393 - RNA, 19 nt, Homo sapiens
  misc_RNA (1)...(19): siRNA sense strand
aagguggccuccaaauaaa

SEQ ID NO: 702394 - RNA, 19 nt, Homo sapiens
  misc_RNA (1)...(19): siRNA sense strand
ucaauugacccaacagaga

SEQ ID NO: 702395 - RNA, 19 nt, Homo sapiens
  misc_RNA (1)...(19): siRNA sense strand
agcaaucacuguugaauca

SEQ ID NO: 702396 - RNA, 19 nt, Homo sapiens
  misc_RNA (1)...(19): siRNA sense strand
ggaagugguuacaugaacu

SEQ ID NO: 702397 - RNA, 19 nt, Homo sapiens
  misc_RNA (1)...(19): siRNA sense strand
ggaucaacacucuguggua

SEQ ID NO: 702398 - RNA, 19 nt, Homo sapiens
  misc_RNA (1)...(19): siRNA sense strand
cagcagcagagcucaauuu

SEQ ID NO: 702399 - RNA, 19 nt, Homo sapiens
  misc_RNA (1)...(19): siRNA sense strand
acaccaagccuuuguuuca

SEQ ID NO: 702400 - RNA, 19 nt, Homo sapiens
  misc_RNA (1)...(19): siRNA sense strand
acaagguggccuccaaaua

SEQ ID NO: 702401 - RNA, 19 nt, Homo sapiens
  misc_RNA (1)...(19): siRNA sense strand
ccaaucagcuaagcacaca

SEQ ID NO: 702402 - RNA, 19 nt, Homo sapiens
  misc_RNA (1)...(19): siRNA sense strand
auaacaauguagccacuuu

SEQ ID NO: 702403 - RNA, 19 nt, Homo sapiens
  misc_RNA (1)...(19): siRNA sense strand
gagaaacccaaagcaauug

SEQ ID NO: 702404 - RNA, 19 nt, Homo sapiens
  misc_RNA (1)...(19): siRNA sense strand
gcugaacaguagcaauaau

SEQ ID NO: 702405 - RNA, 19 nt, Homo sapiens
  misc_RNA (1)...(19): siRNA sense strand
ggucagccuugcccucuuc

SEQ ID NO: 702406 - RNA, 19 nt, Homo sapiens
  misc_RNA (1)...(19): siRNA sense strand
acacagauuuugccuaauu

SEQ ID NO: 702407 - RNA, 19 nt, Homo sapiens
  misc_RNA (1)...(19): siRNA sense strand
ggccaccuccagauuauaa

SEQ ID NO: 702408 - RNA, 19 nt, Homo sapiens
  misc_RNA (1)...(19): siRNA sense strand
uacaugaacucccagcaau

SEQ ID NO: 702409 - RNA, 19 nt, Homo sapiens
  misc_RNA (1)...(19): siRNA sense strand
gauaccaagucucccaaca

SEQ ID NO: 702410 - RNA, 19 nt, Homo sapiens
  misc_RNA (1)...(19): siRNA sense strand
cagcagaguucaauuucag

SEQ ID NO: 702411 - RNA, 19 nt, Homo sapiens
  misc_RNA (1)...(19): siRNA sense strand
caacagcaacagcagaguu

SEQ ID NO: 702412 - RNA, 19 nt, Homo sapiens
  misc_RNA (1)...(19): siRNA sense strand
caacaaggcuguguacaug

SEQ ID NO: 702413 - RNA, 19 nt, Homo sapiens
  misc_RNA (1)...(19): siRNA sense strand
caacaucuccuggcucuuu

SEQ ID NO: 702414 - RNA, 19 nt, Homo sapiens
  misc_RNA (1)...(19): siRNA sense strand
cagaggagcuccaggcaau

SEQ ID NO: 702415 - RNA, 19 nt, Homo sapiens
  misc_RNA (1)...(19): siRNA sense strand
ggagaugccugaggaugga

SEQ ID NO: 702416 - RNA, 19 nt, Homo sapiens
  misc_RNA (1)...(19): siRNA sense strand
ccaagagacugcccugcaa

SEQ ID NO: 702417 - RNA, 19 nt, Homo sapiens
  misc_RNA (1)...(19): siRNA sense strand
gcacaccuucccacucuuu

SEQ ID NO: 702418 - RNA, 19 nt, Homo sapiens
  misc_RNA (1)...(19): siRNA sense strand
caacaugaacacccuguau

SEQ ID NO: 702419 - RNA, 19 nt, Homo sapiens
  misc_RNA (1)...(19): siRNA sense strand
ucaucaagguucugcugua

SEQ ID NO: 702420 - RNA, 19 nt, Homo sapiens
  misc_RNA (1)...(19): siRNA sense strand
ugucuggccuucaccguuu

SEQ ID NO: 702421 - RNA, 19 nt, Homo sapiens
  misc_RNA (1)...(19): siRNA sense strand
cgcauugucucucuuaugu

SEQ ID NO: 702422 - RNA, 19 nt, Homo sapiens
  misc_RNA (1)...(19): siRNA sense strand
cauugucucucuuauguuc

SEQ ID NO: 702423 - RNA, 19 nt, Homo sapiens
  misc_RNA (1)...(19): siRNA sense strand
gugcacaccuucccacucu

SEQ ID NO: 702424 - RNA, 19 nt, Homo sapiens
  misc_RNA (1)...(19): siRNA sense strand
caugagacaguucaagaaa

SEQ ID NO: 702425 - RNA, 19 nt, Homo sapiens
  misc_RNA (1)...(19): siRNA sense strand
ucaccaucuucaucaagua

SEQ ID NO: 702426 - RNA, 19 nt, Homo sapiens
  misc_RNA (1)...(19): siRNA sense strand
cuucuucucuuccucaaau

SEQ ID NO: 702427 - RNA, 19 nt, Homo sapiens
  misc_RNA (1)...(19): siRNA sense strand
ucaagguucugcuguacau

SEQ ID NO: 702428 - RNA, 19 nt, Homo sapiens
  misc_RNA (1)...(19): siRNA sense strand
gcauggcaguccuguacau

SEQ ID NO: 702429 - RNA, 19 nt, Homo sapiens
  misc_RNA (1)...(19): siRNA sense strand
ccaggcauguucccacugu

SEQ ID NO: 702430 - RNA, 19 nt, Homo sapiens
  misc_RNA (1)...(19): siRNA sense strand
ggacaacaaggcuguguac

SEQ ID NO: 702431 - RNA, 19 nt, Homo sapiens
  misc_RNA (1)...(19): siRNA sense strand
gcaaggugaugggcaaggu

SEQ ID NO: 702432 - RNA, 19 nt, Homo sapiens
  misc_RNA (1)...(19): siRNA sense strand
caacugagggcagcagaga

SEQ ID NO: 702433 - RNA, 19 nt, Homo sapiens
  misc_RNA (1)...(19): siRNA sense strand
ugaggaccguguggacuuu

SEQ ID NO: 702434 - RNA, 19 nt, Homo sapiens
  misc_RNA (1)...(19): siRNA sense strand
guugcacucuucacucuuc

SEQ ID NO: 702435 - RNA, 19 nt, Homo sapiens
  misc_RNA (1)...(19): siRNA sense strand
ggugacuggugccaagaga

SEQ ID NO: 702436 - RNA, 19 nt, Homo sapiens
  misc_RNA (1)...(19): siRNA sense strand
ugagacaguucaagaaagc

SEQ ID NO: 702437 - RNA, 19 nt, Homo sapiens
  misc_RNA (1)...(19): siRNA sense strand
gccaugagacaguucaaga

SEQ ID NO: 702438 - RNA, 19 nt, Homo sapiens
  misc_RNA (1)...(19): siRNA sense strand
ugaggagacugccacuaca

SEQ ID NO: 702439 - RNA, 19 nt, Homo sapiens
  misc_RNA (1)...(19): siRNA sense strand
gcaacaugaacacccugua

SEQ ID NO: 702440 - RNA, 19 nt, Homo sapiens
  misc_RNA (1)...(19): siRNA sense strand
gauggagcaccuucuggaa

SEQ ID NO: 702441 - RNA, 19 nt, Homo sapiens
  misc_RNA (1)...(19): siRNA sense strand
cgagccauccgcaacauga

SEQ ID NO: 702442 - RNA, 19 nt, Homo sapiens
  misc_RNA (1)...(19): siRNA sense strand
gaacgcagccccaacaucu

SEQ ID NO: 702443 - RNA, 19 nt, Homo sapiens
  misc_RNA (1)...(19): siRNA sense strand
gcacucuucacucuucuuc

SEQ ID NO: 702444 - RNA, 19 nt, Homo sapiens
  misc_RNA (1)...(19): siRNA sense strand
ccaugagacaguucaagaa

SEQ ID NO: 702445 - RNA, 19 nt, Homo sapiens
  misc_RNA (1)...(19): siRNA sense strand
ucaccgugcuggccuccuu

SEQ ID NO: 702446 - RNA, 19 nt, Homo sapiens
  misc_RNA (1)...(19): siRNA sense strand
gaacacccuguauccagau

SEQ ID NO: 702447 - RNA, 19 nt, Homo sapiens
  misc_RNA (1)...(19): siRNA sense strand
cagcauggcaguccuguac

SEQ ID NO: 702448 - RNA, 19 nt, Homo sapiens
  misc_RNA (1)...(19): siRNA sense strand
caucaagguucugcuguac

SEQ ID NO: 702449 - RNA, 19 nt, Homo sapiens
  misc_RNA (1)...(19): siRNA sense strand
uuacaggcuucaucaaggu

SEQ ID NO: 702450 - RNA, 19 nt, Homo sapiens
  misc_RNA (1)...(19): siRNA sense strand
gcagcugguguuuggcuuu

SEQ ID NO: 702451 - RNA, 19 nt, Homo sapiens
  misc_RNA (1)...(19): siRNA sense strand
cagcugguguuuggcuuug

SEQ ID NO: 702452 - RNA, 19 nt, Homo sapiens
  misc_RNA (1)...(19): siRNA sense strand
gguguuuggcuuugaguau

SEQ ID NO: 702453 - RNA, 19 nt, Homo sapiens
  misc_RNA (1)...(19): siRNA sense strand
ucacgccuacuaccucaaa

SEQ ID NO: 702454 - RNA, 19 nt, Homo sapiens
  misc_RNA (1)...(19): siRNA sense strand
cauccaggccuuuguccuu

SEQ ID NO: 702455 - RNA, 19 nt, Homo sapiens
  misc_RNA (1)...(19): siRNA sense strand
guguuuggcuuugaguaug

SEQ ID NO: 702456 - RNA, 19 nt, Homo sapiens
  misc_RNA (1)...(19): siRNA sense strand
gggacaacaaggcugugua

SEQ ID NO: 702457 - RNA, 19 nt, Homo sapiens
  misc_RNA (1)...(19): siRNA sense strand
ccaucuucaucaaguaugu

SEQ ID NO: 702458 - RNA, 19 nt, Homo sapiens
  misc_RNA (1)...(19): siRNA sense strand
gccuccagcuccugaguca

SEQ ID NO: 702459 - RNA, 19 nt, Homo sapiens
  misc_RNA (1)...(19): siRNA sense strand
acaacaaggcuguguacau

SEQ ID NO: 702460 - RNA, 19 nt, Homo sapiens
  misc_RNA (1)...(19): siRNA sense strand
gaugggcaagguguucuuu

SEQ ID NO: 702461 - RNA, 19 nt, Homo sapiens
  misc_RNA (1)...(19): siRNA sense strand
gaggaccguguggacuuua

SEQ ID NO: 702462 - RNA, 19 nt, Homo sapiens
  misc_RNA (1)...(19): siRNA sense strand
gcaaccacauuuuccauac

SEQ ID NO: 702463 - RNA, 19 nt, Homo sapiens
  misc_RNA (1)...(19): siRNA sense strand
guacauccaggccuuuguc

SEQ ID NO: 702464 - RNA, 19 nt, Homo sapiens
  misc_RNA (1)...(19): siRNA sense strand
gugcucaccaucuucauca

SEQ ID NO: 702465 - RNA, 19 nt, Homo sapiens
  misc_RNA (1)...(19): siRNA sense strand
ccgcuuuguugcacucuuc

SEQ ID NO: 702466 - RNA, 19 nt, Homo sapiens
  misc_RNA (1)...(19): siRNA sense strand
ugcugcagaucaaccagua

SEQ ID NO: 702467 - RNA, 19 nt, Homo sapiens
  misc_RNA (1)...(19): siRNA sense strand
ccgccaugcugcagaucaa

SEQ ID NO: 702468 - RNA, 19 nt, Homo sapiens
  misc_RNA (1)...(19): siRNA sense strand
cauccuggacuuccucuuc

SEQ ID NO: 702469 - RNA, 19 nt, Homo sapiens
  misc_RNA (1)...(19): siRNA sense strand
caucaucugccgagaagag

SEQ ID NO: 702470 - RNA, 19 nt, Homo sapiens
  misc_RNA (1)...(19): siRNA sense strand
ccaccugccguauggaugu

SEQ ID NO: 702471 - RNA, 19 nt, Homo sapiens
  misc_RNA (1)...(19): siRNA sense strand
ggauggagagcccgaugca

SEQ ID NO: 702472 - RNA, 19 nt, Homo sapiens
  misc_RNA (1)...(19): siRNA sense strand
ugaccaucaugaucaaggu

SEQ ID NO: 702473 - RNA, 19 nt, Homo sapiens
  misc_RNA (1)...(19): siRNA sense strand
gagccauccgcaacaugaa

SEQ ID NO: 702474 - RNA, 19 nt, Homo sapiens
  misc_RNA (1)...(19): siRNA sense strand
caacaaggcuguguacaug

SEQ ID NO: 702475 - RNA, 19 nt, Homo sapiens
  misc_RNA (1)...(19): siRNA sense strand
caacaucuccuggcucuuu

SEQ ID NO: 702476 - RNA, 19 nt, Homo sapiens
  misc_RNA (1)...(19): siRNA sense strand
cagaggagcuccaggcaau

SEQ ID NO: 702477 - RNA, 19 nt, Homo sapiens
  misc_RNA (1)...(19): siRNA sense strand
ggagaugccugaggaugga

SEQ ID NO: 702478 - RNA, 19 nt, Homo sapiens
  misc_RNA (1)...(19): siRNA sense strand
ccaagagacugcccugcaa

SEQ ID NO: 702479 - RNA, 19 nt, Homo sapiens
  misc_RNA (1)...(19): siRNA sense strand
gcacaccuucccacucuuu

SEQ ID NO: 702480 - RNA, 19 nt, Homo sapiens
  misc_RNA (1)...(19): siRNA sense strand
caacaugaacacccuguau

SEQ ID NO: 702481 - RNA, 19 nt, Homo sapiens
  misc_RNA (1)...(19): siRNA sense strand
ucaucaagguucugcugua

SEQ ID NO: 702482 - RNA, 19 nt, Homo sapiens
  misc_RNA (1)...(19): siRNA sense strand
ugucuggccuucaccguuu

SEQ ID NO: 702483 - RNA, 19 nt, Homo sapiens
  misc_RNA (1)...(19): siRNA sense strand
cgcauugucucucuuaugu

SEQ ID NO: 702484 - RNA, 19 nt, Homo sapiens
  misc_RNA (1)...(19): siRNA sense strand
cauugucucucuuauguuc

SEQ ID NO: 702485 - RNA, 19 nt, Homo sapiens
  misc_RNA (1)...(19): siRNA sense strand
gugcacaccuucccacucu

SEQ ID NO: 702486 - RNA, 19 nt, Homo sapiens
  misc_RNA (1)...(19): siRNA sense strand
caugagacaguucaagaaa

SEQ ID NO: 702487 - RNA, 19 nt, Homo sapiens
  misc_RNA (1)...(19): siRNA sense strand
ucaccaucuucaucaagua

SEQ ID NO: 702488 - RNA, 19 nt, Homo sapiens
  misc_RNA (1)...(19): siRNA sense strand
cuucuucucuuccucaaau

SEQ ID NO: 702489 - RNA, 19 nt, Homo sapiens
  misc_RNA (1)...(19): siRNA sense strand
ucaagguucugcuguacau

SEQ ID NO: 702490 - RNA, 19 nt, Homo sapiens
  misc_RNA (1)...(19): siRNA sense strand
gcauggcaguccuguacau

SEQ ID NO: 702491 - RNA, 19 nt, Homo sapiens
  misc_RNA (1)...(19): siRNA sense strand
ccaggcauguucccacugu

SEQ ID NO: 702492 - RNA, 19 nt, Homo sapiens
  misc_RNA (1)...(19): siRNA sense strand
ggacaacaaggcuguguac

SEQ ID NO: 702493 - RNA, 19 nt, Homo sapiens
  misc_RNA (1)...(19): siRNA sense strand
gcaaggugaugggcaaggu

SEQ ID NO: 702494 - RNA, 19 nt, Homo sapiens
  misc_RNA (1)...(19): siRNA sense strand
caacugagggcagcagaga

SEQ ID NO: 702495 - RNA, 19 nt, Homo sapiens
  misc_RNA (1)...(19): siRNA sense strand
ugaggaccguguggacuuu

SEQ ID NO: 702496 - RNA, 19 nt, Homo sapiens
  misc_RNA (1)...(19): siRNA sense strand
guugcacucuucacucuuc

SEQ ID NO: 702497 - RNA, 19 nt, Homo sapiens
  misc_RNA (1)...(19): siRNA sense strand
ggugacuggugccaagaga

SEQ ID NO: 702498 - RNA, 19 nt, Homo sapiens
  misc_RNA (1)...(19): siRNA sense strand
ugagacaguucaagaaagc

SEQ ID NO: 702499 - RNA, 19 nt, Homo sapiens
  misc_RNA (1)...(19): siRNA sense strand
gccaugagacaguucaaga

SEQ ID NO: 702500 - RNA, 19 nt, Homo sapiens
  misc_RNA (1)...(19): siRNA sense strand
ugaggagacugccacuaca

SEQ ID NO: 702501 - RNA, 19 nt, Homo sapiens
  misc_RNA (1)...(19): siRNA sense strand
gcaacaugaacacccugua

SEQ ID NO: 702502 - RNA, 19 nt, Homo sapiens
  misc_RNA (1)...(19): siRNA sense strand
gauggagcaccuucuggaa

SEQ ID NO: 702503 - RNA, 19 nt, Homo sapiens
  misc_RNA (1)...(19): siRNA sense strand
cgagccauccgcaacauga

SEQ ID NO: 702504 - RNA, 19 nt, Homo sapiens
  misc_RNA (1)...(19): siRNA sense strand
gaacgcagccccaacaucu

SEQ ID NO: 702505 - RNA, 19 nt, Homo sapiens
  misc_RNA (1)...(19): siRNA sense strand
gcacucuucacucuucuuc

SEQ ID NO: 702506 - RNA, 19 nt, Homo sapiens
  misc_RNA (1)...(19): siRNA sense strand
ccaugagacaguucaagaa

SEQ ID NO: 702507 - RNA, 19 nt, Homo sapiens
  misc_RNA (1)...(19): siRNA sense strand
ucaccgugcuggccuccuu

SEQ ID NO: 702508 - RNA, 19 nt, Homo sapiens
  misc_RNA (1)...(19): siRNA sense strand
gaacacccuguauccagau

SEQ ID NO: 702509 - RNA, 19 nt, Homo sapiens
  misc_RNA (1)...(19): siRNA sense strand
cagcauggcaguccuguac

SEQ ID NO: 702510 - RNA, 19 nt, Homo sapiens
  misc_RNA (1)...(19): siRNA sense strand
caucaagguucugcuguac

SEQ ID NO: 702511 - RNA, 19 nt, Homo sapiens
  misc_RNA (1)...(19): siRNA sense strand
uuacaggcuucaucaaggu

SEQ ID NO: 702512 - RNA, 19 nt, Homo sapiens
  misc_RNA (1)...(19): siRNA sense strand
gcagcugguguuuggcuuu

SEQ ID NO: 702513 - RNA, 19 nt, Homo sapiens
  misc_RNA (1)...(19): siRNA sense strand
cagcugguguuuggcuuug

SEQ ID NO: 702514 - RNA, 19 nt, Homo sapiens
  misc_RNA (1)...(19): siRNA sense strand
gguguuuggcuuugaguau

SEQ ID NO: 702515 - RNA, 19 nt, Homo sapiens
  misc_RNA (1)...(19): siRNA sense strand
ucacgccuacuaccucaaa

SEQ ID NO: 702516 - RNA, 19 nt, Homo sapiens
  misc_RNA (1)...(19): siRNA sense strand
cauccaggccuuuguccuu

SEQ ID NO: 702517 - RNA, 19 nt, Homo sapiens
  misc_RNA (1)...(19): siRNA sense strand
guguuuggcuuugaguaug

SEQ ID NO: 702518 - RNA, 19 nt, Homo sapiens
  misc_RNA (1)...(19): siRNA sense strand
gggacaacaaggcugugua

SEQ ID NO: 702519 - RNA, 19 nt, Homo sapiens
  misc_RNA (1)...(19): siRNA sense strand
ccaucuucaucaaguaugu

SEQ ID NO: 702520 - RNA, 19 nt, Homo sapiens
  misc_RNA (1)...(19): siRNA sense strand
gccuccagcuccugaguca

SEQ ID NO: 702521 - RNA, 19 nt, Homo sapiens
  misc_RNA (1)...(19): siRNA sense strand
acaacaaggcuguguacau

SEQ ID NO: 702522 - RNA, 19 nt, Homo sapiens
  misc_RNA (1)...(19): siRNA sense strand
gaugggcaagguguucuuu

SEQ ID NO: 702523 - RNA, 19 nt, Homo sapiens
  misc_RNA (1)...(19): siRNA sense strand
gaggaccguguggacuuua

SEQ ID NO: 702524 - RNA, 19 nt, Homo sapiens
  misc_RNA (1)...(19): siRNA sense strand
gcaaccacauuuuccauac

SEQ ID NO: 702525 - RNA, 19 nt, Homo sapiens
  misc_RNA (1)...(19): siRNA sense strand
guacauccaggccuuuguc

SEQ ID NO: 702526 - RNA, 19 nt, Homo sapiens
  misc_RNA (1)...(19): siRNA sense strand
gugcucaccaucuucauca

SEQ ID NO: 702527 - RNA, 19 nt, Homo sapiens
  misc_RNA (1)...(19): siRNA sense strand
ccgcuuuguugcacucuuc

SEQ ID NO: 702528 - RNA, 19 nt, Homo sapiens
  misc_RNA (1)...(19): siRNA sense strand
ugcugcagaucaaccagua

SEQ ID NO: 702529 - RNA, 19 nt, Homo sapiens
  misc_RNA (1)...(19): siRNA sense strand
ccgccaugcugcagaucaa

SEQ ID NO: 702530 - RNA, 19 nt, Homo sapiens
  misc_RNA (1)...(19): siRNA sense strand
cauccuggacuuccucuuc

SEQ ID NO: 702531 - RNA, 19 nt, Homo sapiens
  misc_RNA (1)...(19): siRNA sense strand
caucaucugccgagaagag

SEQ ID NO: 702532 - RNA, 19 nt, Homo sapiens
  misc_RNA (1)...(19): siRNA sense strand
ccaccugccguauggaugu

SEQ ID NO: 702533 - RNA, 19 nt, Homo sapiens
  misc_RNA (1)...(19): siRNA sense strand
ggauggagagcccgaugca

SEQ ID NO: 702534 - RNA, 19 nt, Homo sapiens
  misc_RNA (1)...(19): siRNA sense strand
ugaccaucaugaucaaggu

SEQ ID NO: 702535 - RNA, 19 nt, Homo sapiens
  misc_RNA (1)...(19): siRNA sense strand
gagccauccgcaacaugaa

SEQ ID NO: 702536 - RNA, 19 nt, Homo sapiens
  misc_RNA (1)...(19): siRNA sense strand
ccacaacggucucaagauc

SEQ ID NO: 702537 - RNA, 19 nt, Homo sapiens
  misc_RNA (1)...(19): siRNA sense strand
gaauaugcacugcccuuug

SEQ ID NO: 702538 - RNA, 19 nt, Homo sapiens
  misc_RNA (1)...(19): siRNA sense strand
gggcugcaucuucauguua

SEQ ID NO: 702539 - RNA, 19 nt, Homo sapiens
  misc_RNA (1)...(19): siRNA sense strand
caagaucugcgagaaguuu

SEQ ID NO: 702540 - RNA, 19 nt, Homo sapiens
  misc_RNA (1)...(19): siRNA sense strand
ggcugcaucuucauguuaa

SEQ ID NO: 702541 - RNA, 19 nt, Homo sapiens
  misc_RNA (1)...(19): siRNA sense strand
agaaguggcacauggcaua

SEQ ID NO: 702542 - RNA, 19 nt, Homo sapiens
  misc_RNA (1)...(19): siRNA sense strand
gagcugccguccuuugaag

SEQ ID NO: 702543 - RNA, 19 nt, Homo sapiens
  misc_RNA (1)...(19): siRNA sense strand
ggaauaugcacugcccuuu

SEQ ID NO: 702544 - RNA, 19 nt, Homo sapiens
  misc_RNA (1)...(19): siRNA sense strand
gcauaucacgggagcaaug

SEQ ID NO: 702545 - RNA, 19 nt, Homo sapiens
  misc_RNA (1)...(19): siRNA sense strand
gcgaguaccaugcccuuug

SEQ ID NO: 702546 - RNA, 19 nt, Homo sapiens
  misc_RNA (1)...(19): siRNA sense strand
ggaccucuaugggcagugu

SEQ ID NO: 702547 - RNA, 19 nt, Homo sapiens
  misc_RNA (1)...(19): siRNA sense strand
caugguggacgguaucaaa

SEQ ID NO: 702548 - RNA, 19 nt, Homo sapiens
  misc_RNA (1)...(19): siRNA sense strand
ggguagcugugccagaugu

SEQ ID NO: 702549 - RNA, 19 nt, Homo sapiens
  misc_RNA (1)...(19): siRNA sense strand
gcugggacacuaaccaaga

SEQ ID NO: 702550 - RNA, 19 nt, Homo sapiens
  misc_RNA (1)...(19): siRNA sense strand
aauaugcacugcccuuugg

SEQ ID NO: 702551 - RNA, 19 nt, Homo sapiens
  misc_RNA (1)...(19): siRNA sense strand
gacccuggccuccaaagug

SEQ ID NO: 702552 - RNA, 19 nt, Homo sapiens
  misc_RNA (1)...(19): siRNA sense strand
gguggacgguaucaaagag

SEQ ID NO: 702553 - RNA, 19 nt, Homo sapiens
  misc_RNA (1)...(19): siRNA sense strand
gaaguggcacauggcauau

SEQ ID NO: 702554 - RNA, 19 nt, Homo sapiens
  misc_RNA (1)...(19): siRNA sense strand
ccuggaggcugggacacua

SEQ ID NO: 702555 - RNA, 19 nt, Homo sapiens
  misc_RNA (1)...(19): siRNA sense strand
acaacggucucaagaucug

SEQ ID NO: 702556 - RNA, 19 nt, Homo sapiens
  misc_RNA (1)...(19): siRNA sense strand
caaagcgaagccugugcua

SEQ ID NO: 702557 - RNA, 19 nt, Homo sapiens
  misc_RNA (1)...(19): siRNA sense strand
cagacaugguggacgguau

SEQ ID NO: 702558 - RNA, 19 nt, Homo sapiens
  misc_RNA (1)...(19): siRNA sense strand
cugggacacuaaccaagaa

SEQ ID NO: 702559 - RNA, 19 nt, Homo sapiens
  misc_RNA (1)...(19): siRNA sense strand
cgaguaccaugcccuuugc

SEQ ID NO: 702560 - RNA, 19 nt, Homo sapiens
  misc_RNA (1)...(19): siRNA sense strand
uaucacgggagcaauguug

SEQ ID NO: 702561 - RNA, 19 nt, Homo sapiens
  misc_RNA (1)...(19): siRNA sense strand
gugagcaggugacaaucgu

SEQ ID NO: 702562 - RNA, 19 nt, Homo sapiens
  misc_RNA (1)...(19): siRNA sense strand
ccuuugcucucgcuuccaa

SEQ ID NO: 702563 - RNA, 19 nt, Homo sapiens
  misc_RNA (1)...(19): siRNA sense strand
cucaagaucugcgagaagu

SEQ ID NO: 702564 - RNA, 19 nt, Homo sapiens
  misc_RNA (1)...(19): siRNA sense strand
aguggcacauggcauauca

SEQ ID NO: 702565 - RNA, 19 nt, Homo sapiens
  misc_RNA (1)...(19): siRNA sense strand
auccugagcugccguccuu

SEQ ID NO: 702566 - RNA, 19 nt, Homo sapiens
  misc_RNA (1)...(19): siRNA sense strand
gccgcuaguccucuaaaga

SEQ ID NO: 702567 - RNA, 19 nt, Homo sapiens
  misc_RNA (1)...(19): siRNA sense strand
ucgaggagccuggcgagaa

SEQ ID NO: 702568 - RNA, 19 nt, Homo sapiens
  misc_RNA (1)...(19): siRNA sense strand
cgaaggagguugacaccaa

SEQ ID NO: 702569 - RNA, 19 nt, Homo sapiens
  misc_RNA (1)...(19): siRNA sense strand
ccggagaccuuuggaguua

SEQ ID NO: 702570 - RNA, 19 nt, Homo sapiens
  misc_RNA (1)...(19): siRNA sense strand
ggagauucaucaaguacuu

SEQ ID NO: 702571 - RNA, 19 nt, Homo sapiens
  misc_RNA (1)...(19): siRNA sense strand
gggaacugcuccuaucaga

SEQ ID NO: 702572 - RNA, 19 nt, Homo sapiens
  misc_RNA (1)...(19): siRNA sense strand
gcugggagauucaucaagu

SEQ ID NO: 702573 - RNA, 19 nt, Homo sapiens
  misc_RNA (1)...(19): siRNA sense strand
cgacuuggaugcccaugga

SEQ ID NO: 702574 - RNA, 19 nt, Homo sapiens
  misc_RNA (1)...(19): siRNA sense strand
gaaauuucuagcuucagua

SEQ ID NO: 702575 - RNA, 19 nt, Homo sapiens
  misc_RNA (1)...(19): siRNA sense strand
acacagaccuuuggcuuca

SEQ ID NO: 702576 - RNA, 19 nt, Homo sapiens
  misc_RNA (1)...(19): siRNA sense strand
ucucuucccuccauuccua

SEQ ID NO: 702577 - RNA, 19 nt, Homo sapiens
  misc_RNA (1)...(19): siRNA sense strand
cuaguggacugcaucucua

SEQ ID NO: 702578 - RNA, 19 nt, Homo sapiens
  misc_RNA (1)...(19): siRNA sense strand
ccaaaugacacagaccuuu

SEQ ID NO: 702579 - RNA, 19 nt, Homo sapiens
  misc_RNA (1)...(19): siRNA sense strand
ggagaccuuuggaguuaag

SEQ ID NO: 702580 - RNA, 19 nt, Homo sapiens
  misc_RNA (1)...(19): siRNA sense strand
gacugcaucucuaccacuu

SEQ ID NO: 702581 - RNA, 19 nt, Homo sapiens
  misc_RNA (1)...(19): siRNA sense strand
ggaugcccauggaauuauc

SEQ ID NO: 702582 - RNA, 19 nt, Homo sapiens
  misc_RNA (1)...(19): siRNA sense strand
acucagaaaucacgcaucu

SEQ ID NO: 702583 - RNA, 19 nt, Homo sapiens
  misc_RNA (1)...(19): siRNA sense strand
gccuggagcugggagauuc

SEQ ID NO: 702584 - RNA, 19 nt, Homo sapiens
  misc_RNA (1)...(19): siRNA sense strand
gagauucaucaaguacuuu

SEQ ID NO: 702585 - RNA, 19 nt, Homo sapiens
  misc_RNA (1)...(19): siRNA sense strand
ggagcugggagauucauca

SEQ ID NO: 702586 - RNA, 19 nt, Homo sapiens
  misc_RNA (1)...(19): siRNA sense strand
cugggagauucaucaagua

SEQ ID NO: 702587 - RNA, 19 nt, Homo sapiens
  misc_RNA (1)...(19): siRNA sense strand
cagguucucuucccuccau

SEQ ID NO: 702588 - RNA, 19 nt, Homo sapiens
  misc_RNA (1)...(19): siRNA sense strand
uaucuucacugaggacuac

SEQ ID NO: 702589 - RNA, 19 nt, Homo sapiens
  misc_RNA (1)...(19): siRNA sense strand
gcuaguggacugcaucucu

SEQ ID NO: 702590 - RNA, 19 nt, Homo sapiens
  misc_RNA (1)...(19): siRNA sense strand
cugcaucucuaccacuuca

SEQ ID NO: 702591 - RNA, 19 nt, Homo sapiens
  misc_RNA (1)...(19): siRNA sense strand
gcccauggaauuaucuuca

SEQ ID NO: 702592 - RNA, 19 nt, Homo sapiens
  misc_RNA (1)...(19): siRNA sense strand
ccagcugggcuucgacuug

SEQ ID NO: 702593 - RNA, 19 nt, Homo sapiens
  misc_RNA (1)...(19): siRNA sense strand
gagcugggagauucaucaa

SEQ ID NO: 702594 - RNA, 19 nt, Homo sapiens
  misc_RNA (1)...(19): siRNA sense strand
gcggcugucucagaacuca

SEQ ID NO: 702595 - RNA, 19 nt, Homo sapiens
  misc_RNA (1)...(19): siRNA sense strand
cagaacucaugcagcuguu

SEQ ID NO: 702596 - RNA, 19 nt, Homo sapiens
  misc_RNA (1)...(19): siRNA sense strand
auuucuagcuucaguacuu

SEQ ID NO: 702597 - RNA, 19 nt, Homo sapiens
  misc_RNA (1)...(19): siRNA sense strand
cuucagggacucagaaauc

SEQ ID NO: 702598 - RNA, 19 nt, Homo sapiens
  misc_RNA (1)...(19): siRNA sense strand
gcaaucauucagcgacagu

SEQ ID NO: 702599 - RNA, 19 nt, Homo sapiens
  misc_RNA (1)...(19): siRNA sense strand
cggagaccuuuggaguuaa

SEQ ID NO: 702600 - RNA, 19 nt, Homo sapiens
  misc_RNA (1)...(19): siRNA sense strand
ccaugugcacgaccucauu

SEQ ID NO: 702601 - RNA, 19 nt, Homo sapiens
  misc_RNA (1)...(19): siRNA sense strand
uuggaugcccauggaauua

SEQ ID NO: 702602 - RNA, 19 nt, Homo sapiens
  misc_RNA (1)...(19): siRNA sense strand
gccaggcuguccuuagcau

SEQ ID NO: 702603 - RNA, 19 nt, Homo sapiens
  misc_RNA (1)...(19): siRNA sense strand
gcaugguccggaaggcaaa

SEQ ID NO: 702604 - RNA, 19 nt, Homo sapiens
  misc_RNA (1)...(19): siRNA sense strand
cgaaggagguugacaccaa

SEQ ID NO: 702605 - RNA, 19 nt, Homo sapiens
  misc_RNA (1)...(19): siRNA sense strand
ccggagaccuuuggaguua

SEQ ID NO: 702606 - RNA, 19 nt, Homo sapiens
  misc_RNA (1)...(19): siRNA sense strand
ggagauucaucaaguacuu

SEQ ID NO: 702607 - RNA, 19 nt, Homo sapiens
  misc_RNA (1)...(19): siRNA sense strand
gggaacugcuccuaucaga

SEQ ID NO: 702608 - RNA, 19 nt, Homo sapiens
  misc_RNA (1)...(19): siRNA sense strand
gcugggagauucaucaagu

SEQ ID NO: 702609 - RNA, 19 nt, Homo sapiens
  misc_RNA (1)...(19): siRNA sense strand
cgacuuggaugcccaugga

SEQ ID NO: 702610 - RNA, 19 nt, Homo sapiens
  misc_RNA (1)...(19): siRNA sense strand
gaaauuucuagcuucagua

SEQ ID NO: 702611 - RNA, 19 nt, Homo sapiens
  misc_RNA (1)...(19): siRNA sense strand
acacagaccuuuggcuuca

SEQ ID NO: 702612 - RNA, 19 nt, Homo sapiens
  misc_RNA (1)...(19): siRNA sense strand
ucucuucccuccauuccua

SEQ ID NO: 702613 - RNA, 19 nt, Homo sapiens
  misc_RNA (1)...(19): siRNA sense strand
cuaguggacugcaucucua

SEQ ID NO: 702614 - RNA, 19 nt, Homo sapiens
  misc_RNA (1)...(19): siRNA sense strand
ccaaaugacacagaccuuu

SEQ ID NO: 702615 - RNA, 19 nt, Homo sapiens
  misc_RNA (1)...(19): siRNA sense strand
ggagaccuuuggaguuaag

SEQ ID NO: 702616 - RNA, 19 nt, Homo sapiens
  misc_RNA (1)...(19): siRNA sense strand
gacugcaucucuaccacuu

SEQ ID NO: 702617 - RNA, 19 nt, Homo sapiens
  misc_RNA (1)...(19): siRNA sense strand
ggaugcccauggaauuauc

SEQ ID NO: 702618 - RNA, 19 nt, Homo sapiens
  misc_RNA (1)...(19): siRNA sense strand
acucagaaaucacgcaucu

SEQ ID NO: 702619 - RNA, 19 nt, Homo sapiens
  misc_RNA (1)...(19): siRNA sense strand
gccuggagcugggagauuc

SEQ ID NO: 702620 - RNA, 19 nt, Homo sapiens
  misc_RNA (1)...(19): siRNA sense strand
gagauucaucaaguacuuu

SEQ ID NO: 702621 - RNA, 19 nt, Homo sapiens
  misc_RNA (1)...(19): siRNA sense strand
ggagcugggagauucauca

SEQ ID NO: 702622 - RNA, 19 nt, Homo sapiens
  misc_RNA (1)...(19): siRNA sense strand
cugggagauucaucaagua

SEQ ID NO: 702623 - RNA, 19 nt, Homo sapiens
  misc_RNA (1)...(19): siRNA sense strand
cagguucucuucccuccau

SEQ ID NO: 702624 - RNA, 19 nt, Homo sapiens
  misc_RNA (1)...(19): siRNA sense strand
uaucuucacugaggacuac

SEQ ID NO: 702625 - RNA, 19 nt, Homo sapiens
  misc_RNA (1)...(19): siRNA sense strand
gcuaguggacugcaucucu

SEQ ID NO: 702626 - RNA, 19 nt, Homo sapiens
  misc_RNA (1)...(19): siRNA sense strand
cugcaucucuaccacuuca

SEQ ID NO: 702627 - RNA, 19 nt, Homo sapiens
  misc_RNA (1)...(19): siRNA sense strand
gcccauggaauuaucuuca

SEQ ID NO: 702628 - RNA, 19 nt, Homo sapiens
  misc_RNA (1)...(19): siRNA sense strand
ccagcugggcuucgacuug

SEQ ID NO: 702629 - RNA, 19 nt, Homo sapiens
  misc_RNA (1)...(19): siRNA sense strand
gagcugggagauucaucaa

SEQ ID NO: 702630 - RNA, 19 nt, Homo sapiens
  misc_RNA (1)...(19): siRNA sense strand
gcggcugucucagaacuca

SEQ ID NO: 702631 - RNA, 19 nt, Homo sapiens
  misc_RNA (1)...(19): siRNA sense strand
cagaacucaugcagcuguu

SEQ ID NO: 702632 - RNA, 19 nt, Homo sapiens
  misc_RNA (1)...(19): siRNA sense strand
auuucuagcuucaguacuu

SEQ ID NO: 702633 - RNA, 19 nt, Homo sapiens
  misc_RNA (1)...(19): siRNA sense strand
cuucagggacucagaaauc

SEQ ID NO: 702634 - RNA, 19 nt, Homo sapiens
  misc_RNA (1)...(19): siRNA sense strand
gcaaucauucagcgacagu

SEQ ID NO: 702635 - RNA, 19 nt, Homo sapiens
  misc_RNA (1)...(19): siRNA sense strand
cggagaccuuuggaguuaa

SEQ ID NO: 702636 - RNA, 19 nt, Homo sapiens
  misc_RNA (1)...(19): siRNA sense strand
ccaugugcacgaccucauu

SEQ ID NO: 702637 - RNA, 19 nt, Homo sapiens
  misc_RNA (1)...(19): siRNA sense strand
uuggaugcccauggaauua

SEQ ID NO: 702638 - RNA, 19 nt, Homo sapiens
  misc_RNA (1)...(19): siRNA sense strand
gccaggcuguccuuagcau

SEQ ID NO: 702639 - RNA, 19 nt, Homo sapiens
  misc_RNA (1)...(19): siRNA sense strand
gcaugguccggaaggcaaa

SEQ ID NO: 702640 - RNA, 19 nt, Homo sapiens
  misc_RNA (1)...(19): siRNA sense strand
gcaccuacauugacaagaa

SEQ ID NO: 702641 - RNA, 19 nt, Homo sapiens
  misc_RNA (1)...(19): siRNA sense strand
gagacuaucugcacuacau

SEQ ID NO: 702642 - RNA, 19 nt, Homo sapiens
  misc_RNA (1)...(19): siRNA sense strand
ccaagaagcaguuccagaa

SEQ ID NO: 702643 - RNA, 19 nt, Homo sapiens
  misc_RNA (1)...(19): siRNA sense strand
agaagcaguuccagaaguu

SEQ ID NO: 702644 - RNA, 19 nt, Homo sapiens
  misc_RNA (1)...(19): siRNA sense strand
ugaccaagaugaagaugca

SEQ ID NO: 702645 - RNA, 19 nt, Homo sapiens
  misc_RNA (1)...(19): siRNA sense strand
gagaaacuggcaaggagaa

SEQ ID NO: 702646 - RNA, 19 nt, Homo sapiens
  misc_RNA (1)...(19): siRNA sense strand
gcagaggaccauugucauc

SEQ ID NO: 702647 - RNA, 19 nt, Homo sapiens
  misc_RNA (1)...(19): siRNA sense strand
gagggcaccuacauugaca

SEQ ID NO: 702648 - RNA, 19 nt, Homo sapiens
  misc_RNA (1)...(19): siRNA sense strand
caccuacauugacaagaaa

SEQ ID NO: 702649 - RNA, 19 nt, Homo sapiens
  misc_RNA (1)...(19): siRNA sense strand
cagccgaccaucuuucaaa

SEQ ID NO: 702650 - RNA, 19 nt, Homo sapiens
  misc_RNA (1)...(19): siRNA sense strand
aagaagcaguuccagaagu

SEQ ID NO: 702651 - RNA, 19 nt, Homo sapiens
  misc_RNA (1)...(19): siRNA sense strand
gacaagaaaugccccuuca

SEQ ID NO: 702652 - RNA, 19 nt, Homo sapiens
  misc_RNA (1)...(19): siRNA sense strand
gaagaugcagaggaccauu

SEQ ID NO: 702653 - RNA, 19 nt, Homo sapiens
  misc_RNA (1)...(19): siRNA sense strand
gcaccaagaagcaguucca

SEQ ID NO: 702654 - RNA, 19 nt, Homo sapiens
  misc_RNA (1)...(19): siRNA sense strand
caagaagcaguuccagaag

SEQ ID NO: 702655 - RNA, 19 nt, Homo sapiens
  misc_RNA (1)...(19): siRNA sense strand
agacugagcgugccuacca

SEQ ID NO: 702656 - RNA, 19 nt, Homo sapiens
  misc_RNA (1)...(19): siRNA sense strand
gcuucaacgugcucaaggu

SEQ ID NO: 702657 - RNA, 19 nt, Homo sapiens
  misc_RNA (1)...(19): siRNA sense strand
cacccaaggaggcuauuga

SEQ ID NO: 702658 - RNA, 19 nt, Homo sapiens
  misc_RNA (1)...(19): siRNA sense strand
gacugagcgugccuaccaa

SEQ ID NO: 702659 - RNA, 19 nt, Homo sapiens
  misc_RNA (1)...(19): siRNA sense strand
ugucauccgccgagacuau

SEQ ID NO: 702660 - RNA, 19 nt, Homo sapiens
  misc_RNA (1)...(19): siRNA sense strand
gacccaagcuaugaaauua

SEQ ID NO: 702661 - RNA, 19 nt, Homo sapiens
  misc_RNA (1)...(19): siRNA sense strand
ccagauagcuagaaguuug

SEQ ID NO: 702662 - RNA, 19 nt, Homo sapiens
  misc_RNA (1)...(19): siRNA sense strand
aaacagagacucaguauug

SEQ ID NO: 702663 - RNA, 19 nt, Homo sapiens
  misc_RNA (1)...(19): siRNA sense strand
gacaaugacccuaaguuua

SEQ ID NO: 702664 - RNA, 19 nt, Homo sapiens
  misc_RNA (1)...(19): siRNA sense strand
ggacagagguaugauagug

SEQ ID NO: 702665 - RNA, 19 nt, Homo sapiens
  misc_RNA (1)...(19): siRNA sense strand
ggagacaacauuucaauug

SEQ ID NO: 702666 - RNA, 19 nt, Homo sapiens
  misc_RNA (1)...(19): siRNA sense strand
gagaugagccuguacauag

SEQ ID NO: 702667 - RNA, 19 nt, Homo sapiens
  misc_RNA (1)...(19): siRNA sense strand
gaccugaacuacagcauug

SEQ ID NO: 702668 - RNA, 19 nt, Homo sapiens
  misc_RNA (1)...(19): siRNA sense strand
gaggagaacaauaacauuu

SEQ ID NO: 702669 - RNA, 19 nt, Homo sapiens
  misc_RNA (1)...(19): siRNA sense strand
ugacaaugcucccacaguu

SEQ ID NO: 702670 - RNA, 19 nt, Homo sapiens
  misc_RNA (1)...(19): siRNA sense strand
gcacguguuugucaaugaa

SEQ ID NO: 702671 - RNA, 19 nt, Homo sapiens
  misc_RNA (1)...(19): siRNA sense strand
gggaacaucagaccacaua

SEQ ID NO: 702672 - RNA, 19 nt, Homo sapiens
  misc_RNA (1)...(19): siRNA sense strand
guacagcugucaaaccaau

SEQ ID NO: 702673 - RNA, 19 nt, Homo sapiens
  misc_RNA (1)...(19): siRNA sense strand
gcaaggcauuacaaaucua

SEQ ID NO: 702674 - RNA, 19 nt, Homo sapiens
  misc_RNA (1)...(19): siRNA sense strand
ugacagguaugaguuuaaa

SEQ ID NO: 702675 - RNA, 19 nt, Homo sapiens
  misc_RNA (1)...(19): siRNA sense strand
gcgauugacucccagauag

SEQ ID NO: 702676 - RNA, 19 nt, Homo sapiens
  misc_RNA (1)...(19): siRNA sense strand
gcaaacagagacucaguau

SEQ ID NO: 702677 - RNA, 19 nt, Homo sapiens
  misc_RNA (1)...(19): siRNA sense strand
gagacaacauuucaauugg

SEQ ID NO: 702678 - RNA, 19 nt, Homo sapiens
  misc_RNA (1)...(19): siRNA sense strand
gagcaacaacucccugauu

SEQ ID NO: 702679 - RNA, 19 nt, Homo sapiens
  misc_RNA (1)...(19): siRNA sense strand
gaguacagcugucaaacca

SEQ ID NO: 702680 - RNA, 19 nt, Homo sapiens
  misc_RNA (1)...(19): siRNA sense strand
gguaugauagugucaauga

SEQ ID NO: 702681 - RNA, 19 nt, Homo sapiens
  misc_RNA (1)...(19): siRNA sense strand
gaaaucccuucaagcuguu

SEQ ID NO: 702682 - RNA, 19 nt, Homo sapiens
  misc_RNA (1)...(19): siRNA sense strand
acaaugacccuaaguuuau

SEQ ID NO: 702683 - RNA, 19 nt, Homo sapiens
  misc_RNA (1)...(19): siRNA sense strand
gacaaugcucccacaguua

SEQ ID NO: 702684 - RNA, 19 nt, Homo sapiens
  misc_RNA (1)...(19): siRNA sense strand
ugacaaugacccuaaguuu

SEQ ID NO: 702685 - RNA, 19 nt, Homo sapiens
  misc_RNA (1)...(19): siRNA sense strand
gaaauugaucccacuagug

SEQ ID NO: 702686 - RNA, 19 nt, Homo sapiens
  misc_RNA (1)...(19): siRNA sense strand
gagguuuacuucccugaga

SEQ ID NO: 702687 - RNA, 19 nt, Homo sapiens
  misc_RNA (1)...(19): siRNA sense strand
gagacucaguauugucauu

SEQ ID NO: 702688 - RNA, 19 nt, Homo sapiens
  misc_RNA (1)...(19): siRNA sense strand
gaacaucagaccacauaca

SEQ ID NO: 702689 - RNA, 19 nt, Homo sapiens
  misc_RNA (1)...(19): siRNA sense strand
acauagaggagaacaauaa

SEQ ID NO: 702690 - RNA, 19 nt, Homo sapiens
  misc_RNA (1)...(19): siRNA sense strand
gcagaucgaauacguguuc

SEQ ID NO: 702691 - RNA, 19 nt, Homo sapiens
  misc_RNA (1)...(19): siRNA sense strand
caaauggacagagguauga

SEQ ID NO: 702692 - RNA, 19 nt, Homo sapiens
  misc_RNA (1)...(19): siRNA sense strand
gacaacauuucaauuggau

SEQ ID NO: 702693 - RNA, 19 nt, Homo sapiens
  misc_RNA (1)...(19): siRNA sense strand
ucaacgggcagaucgaaua

SEQ ID NO: 702694 - RNA, 19 nt, Homo sapiens
  misc_RNA (1)...(19): siRNA sense strand
ggcaaggcauuacaaaucu

SEQ ID NO: 702695 - RNA, 19 nt, Homo sapiens
  misc_RNA (1)...(19): siRNA sense strand
ccacauacacuuucagagu

SEQ ID NO: 702696 - RNA, 19 nt, Homo sapiens
  misc_RNA (1)...(19): siRNA sense strand
guacauagaggagaacaau

SEQ ID NO: 702697 - RNA, 19 nt, Homo sapiens
  misc_RNA (1)...(19): siRNA sense strand
gcaggacgucuucaccuuu

SEQ ID NO: 702698 - RNA, 19 nt, Homo sapiens
  misc_RNA (1)...(19): siRNA sense strand
gggcagcacuacggugauu

SEQ ID NO: 702699 - RNA, 19 nt, Homo sapiens
  misc_RNA (1)...(19): siRNA sense strand
gcgagcagacugacaggua

SEQ ID NO: 702700 - RNA, 19 nt, Homo sapiens
  misc_RNA (1)...(19): siRNA sense strand
caacgugccguccauugaa

SEQ ID NO: 702701 - RNA, 19 nt, Homo sapiens
  misc_RNA (1)...(19): siRNA sense strand
agacaacauuucaauugga

SEQ ID NO: 702702 - RNA, 19 nt, Homo sapiens
  misc_RNA (1)...(19): siRNA sense strand
ucgcuggacuccucuguga

SEQ ID NO: 702703 - RNA, 19 nt, Homo sapiens
  misc_RNA (1)...(19): siRNA sense strand
ucaaugagaagcugucaga

SEQ ID NO: 702704 - RNA, 19 nt, Homo sapiens
  misc_RNA (1)...(19): siRNA sense strand
gaggaaaucccuucaagcu

SEQ ID NO: 702705 - RNA, 19 nt, Homo sapiens
  misc_RNA (1)...(19): siRNA sense strand
cgagcagacugacagguau

SEQ ID NO: 702706 - RNA, 19 nt, Homo sapiens
  misc_RNA (1)...(19): siRNA sense strand
ggaguccgguuccgaguac

SEQ ID NO: 702707 - RNA, 19 nt, Homo sapiens
  misc_RNA (1)...(19): siRNA sense strand
ccgaguaccugaagaucga

SEQ ID NO: 702708 - RNA, 19 nt, Homo sapiens
  misc_RNA (1)...(19): siRNA sense strand
ccaacagcaugacaaaucu

SEQ ID NO: 702709 - RNA, 19 nt, Homo sapiens
  misc_RNA (1)...(19): siRNA sense strand
ugaaauugaucccacuagu

SEQ ID NO: 702710 - RNA, 19 nt, Homo sapiens
  misc_RNA (1)...(19): siRNA sense strand
gaucgggugaggugacuuu

SEQ ID NO: 702711 - RNA, 19 nt, Homo sapiens
  misc_RNA (1)...(19): siRNA sense strand
caucagaccacauacacuu

SEQ ID NO: 702712 - RNA, 19 nt, Homo sapiens
  misc_RNA (1)...(19): siRNA sense strand
gagguaugauagugucaau

SEQ ID NO: 702713 - RNA, 19 nt, Homo sapiens
  misc_RNA (1)...(19): siRNA sense strand
agcaacaacucccugauug

SEQ ID NO: 702714 - RNA, 19 nt, Homo sapiens
  misc_RNA (1)...(19): siRNA sense strand
caacauuucaauuggauca

SEQ ID NO: 702715 - RNA, 19 nt, Homo sapiens
  misc_RNA (1)...(19): siRNA sense strand
gagcuggguggaccuguuu

SEQ ID NO: 702716 - RNA, 19 nt, Homo sapiens
  misc_RNA (1)...(19): siRNA sense strand
gaagaucgacaaccucacu

SEQ ID NO: 702717 - RNA, 19 nt, Homo sapiens
  misc_RNA (1)...(19): siRNA sense strand
gagcaggagacaacauuuc

SEQ ID NO: 702718 - RNA, 19 nt, Homo sapiens
  misc_RNA (1)...(19): siRNA sense strand
agaugagccuguacauaga

SEQ ID NO: 702719 - RNA, 19 nt, Homo sapiens
  misc_RNA (1)...(19): siRNA sense strand
caaugacccuaaguuuaug

SEQ ID NO: 702720 - RNA, 19 nt, Homo sapiens
  misc_RNA (1)...(19): siRNA sense strand
ccaauaacaaguacagcaa

SEQ ID NO: 702721 - RNA, 19 nt, Homo sapiens
  misc_RNA (1)...(19): siRNA sense strand
gucaaaccaauaacaagua

SEQ ID NO: 702722 - RNA, 19 nt, Homo sapiens
  misc_RNA (1)...(19): siRNA sense strand
gaucacugcucugaguaca

SEQ ID NO: 702723 - RNA, 19 nt, Homo sapiens
  misc_RNA (1)...(19): siRNA sense strand
ggagcaggagacaacauuu

SEQ ID NO: 702724 - RNA, 19 nt, Homo sapiens
  misc_RNA (1)...(19): siRNA sense strand
ugacccaagcuaugaaauu

SEQ ID NO: 702725 - RNA, 19 nt, Homo sapiens
  misc_RNA (1)...(19): siRNA sense strand
ccaaauggacagagguaug

SEQ ID NO: 702726 - RNA, 19 nt, Homo sapiens
  misc_RNA (1)...(19): siRNA sense strand
caauaacaaguacagcaaa

SEQ ID NO: 702727 - RNA, 19 nt, Homo sapiens
  misc_RNA (1)...(19): siRNA sense strand
gggagcaggagacaacauu

SEQ ID NO: 702728 - RNA, 19 nt, Homo sapiens
  misc_RNA (1)...(19): siRNA sense strand
ucaaagacgagaacgacaa

SEQ ID NO: 702729 - RNA, 19 nt, Homo sapiens
  misc_RNA (1)...(19): siRNA sense strand
ucaaaccaauaacaaguac

SEQ ID NO: 702730 - RNA, 19 nt, Homo sapiens
  misc_RNA (1)...(19): siRNA sense strand
cuaaugcaacugcgauuga

SEQ ID NO: 702731 - RNA, 19 nt, Homo sapiens
  misc_RNA (1)...(19): siRNA sense strand
agucggugguggagguuua

SEQ ID NO: 702732 - RNA, 19 nt, Homo sapiens
  misc_RNA (1)...(19): siRNA sense strand
gggacauccuggucaauac

SEQ ID NO: 702733 - RNA, 19 nt, Homo sapiens
  misc_RNA (1)...(19): siRNA sense strand
aaucuaagcagccucucua

SEQ ID NO: 702734 - RNA, 19 nt, Homo sapiens
  misc_RNA (1)...(19): siRNA sense strand
caacagcaugacaaaucua

SEQ ID NO: 702735 - RNA, 19 nt, Homo sapiens
  misc_RNA (1)...(19): siRNA sense strand
caagcuguuugaaauugau

SEQ ID NO: 702736 - RNA, 19 nt, Homo sapiens
  misc_RNA (1)...(19): siRNA sense strand
gcagagaugagccuguaca

SEQ ID NO: 702737 - RNA, 19 nt, Homo sapiens
  misc_RNA (1)...(19): siRNA sense strand
aaaguuaacgccaaagaca

SEQ ID NO: 702738 - RNA, 19 nt, Homo sapiens
  misc_RNA (1)...(19): siRNA sense strand
cgugauggaugcugacaag

SEQ ID NO: 702739 - RNA, 19 nt, Homo sapiens
  misc_RNA (1)...(19): siRNA sense strand
ucaaugcagaccugaacua

SEQ ID NO: 702740 - RNA, 19 nt, Homo sapiens
  misc_RNA (1)...(19): siRNA sense strand
gaccacauacacuuucaga

SEQ ID NO: 702741 - RNA, 19 nt, Homo sapiens
  misc_RNA (1)...(19): siRNA sense strand
ccauugaaauccgcaagau

SEQ ID NO: 702742 - RNA, 19 nt, Homo sapiens
  misc_RNA (1)...(19): siRNA sense strand
uggcaaggcauuacaaauc

SEQ ID NO: 702743 - RNA, 19 nt, Homo sapiens
  misc_RNA (1)...(19): siRNA sense strand
acugacagguaugaguuua

SEQ ID NO: 702744 - RNA, 19 nt, Homo sapiens
  misc_RNA (1)...(19): siRNA sense strand
ucacuguggaggcuucuaa

SEQ ID NO: 702745 - RNA, 19 nt, Homo sapiens
  misc_RNA (1)...(19): siRNA sense strand
gcugucaaaccaauaacaa

SEQ ID NO: 702746 - RNA, 19 nt, Homo sapiens
  misc_RNA (1)...(19): siRNA sense strand
gcaggagacaacauuucaa

SEQ ID NO: 702747 - RNA, 19 nt, Homo sapiens
  misc_RNA (1)...(19): siRNA sense strand
uaugauagugucaaugaga

SEQ ID NO: 702748 - RNA, 19 nt, Homo sapiens
  misc_RNA (1)...(19): siRNA sense strand
gacaacgugccguccauug

SEQ ID NO: 702749 - RNA, 19 nt, Homo sapiens
  misc_RNA (1)...(19): siRNA sense strand
cagagacucaguauuguca

SEQ ID NO: 702750 - RNA, 19 nt, Homo sapiens
  misc_RNA (1)...(19): siRNA sense strand
caaacagagacucaguauu

SEQ ID NO: 702751 - RNA, 19 nt, Homo sapiens
  misc_RNA (1)...(19): siRNA sense strand
augcagagaugagccugua

SEQ ID NO: 702752 - RNA, 19 nt, Homo sapiens
  misc_RNA (1)...(19): siRNA sense strand
gcuggacuccucugugaug

SEQ ID NO: 702753 - RNA, 19 nt, Homo sapiens
  misc_RNA (1)...(19): siRNA sense strand
agagaugagccuguacaua

SEQ ID NO: 702754 - RNA, 19 nt, Homo sapiens
  misc_RNA (1)...(19): siRNA sense strand
caggagacaacauuucaau

SEQ ID NO: 702755 - RNA, 19 nt, Homo sapiens
  misc_RNA (1)...(19): siRNA sense strand
cuaguggugugguuuccuu

SEQ ID NO: 702756 - RNA, 19 nt, Homo sapiens
  misc_RNA (1)...(19): siRNA sense strand
gcaacagacagugaugaug

SEQ ID NO: 702757 - RNA, 19 nt, Homo sapiens
  misc_RNA (1)...(19): siRNA sense strand
agacugacagguaugaguu

SEQ ID NO: 702758 - RNA, 19 nt, Homo sapiens
  misc_RNA (1)...(19): siRNA sense strand
acauacacuuucagaguca

SEQ ID NO: 702759 - RNA, 19 nt, Homo sapiens
  misc_RNA (1)...(19): siRNA sense strand
uagaggagaacaauaacau

SEQ ID NO: 702760 - RNA, 19 nt, Homo sapiens
  misc_RNA (1)...(19): siRNA sense strand
gacccaagcuaugaaauua

SEQ ID NO: 702761 - RNA, 19 nt, Homo sapiens
  misc_RNA (1)...(19): siRNA sense strand
ccagauagcuagaaguuug

SEQ ID NO: 702762 - RNA, 19 nt, Homo sapiens
  misc_RNA (1)...(19): siRNA sense strand
aaacagagacucaguauug

SEQ ID NO: 702763 - RNA, 19 nt, Homo sapiens
  misc_RNA (1)...(19): siRNA sense strand
gacaaugacccuaaguuua

SEQ ID NO: 702764 - RNA, 19 nt, Homo sapiens
  misc_RNA (1)...(19): siRNA sense strand
ggacagagguaugauagug

SEQ ID NO: 702765 - RNA, 19 nt, Homo sapiens
  misc_RNA (1)...(19): siRNA sense strand
ggagacaacauuucaauug

SEQ ID NO: 702766 - RNA, 19 nt, Homo sapiens
  misc_RNA (1)...(19): siRNA sense strand
gagaugagccuguacauag

SEQ ID NO: 702767 - RNA, 19 nt, Homo sapiens
  misc_RNA (1)...(19): siRNA sense strand
gaccugaacuacagcauug

SEQ ID NO: 702768 - RNA, 19 nt, Homo sapiens
  misc_RNA (1)...(19): siRNA sense strand
gaggagaacaauaacauuu

SEQ ID NO: 702769 - RNA, 19 nt, Homo sapiens
  misc_RNA (1)...(19): siRNA sense strand
ugacaaugcucccacaguu

SEQ ID NO: 702770 - RNA, 19 nt, Homo sapiens
  misc_RNA (1)...(19): siRNA sense strand
gcacguguuugucaaugaa

SEQ ID NO: 702771 - RNA, 19 nt, Homo sapiens
  misc_RNA (1)...(19): siRNA sense strand
gggaacaucagaccacaua

SEQ ID NO: 702772 - RNA, 19 nt, Homo sapiens
  misc_RNA (1)...(19): siRNA sense strand
guacagcugucaaaccaau

SEQ ID NO: 702773 - RNA, 19 nt, Homo sapiens
  misc_RNA (1)...(19): siRNA sense strand
gcaaggcauuacaaaucua

SEQ ID NO: 702774 - RNA, 19 nt, Homo sapiens
  misc_RNA (1)...(19): siRNA sense strand
ugacagguaugaguuuaaa

SEQ ID NO: 702775 - RNA, 19 nt, Homo sapiens
  misc_RNA (1)...(19): siRNA sense strand
gcgauugacucccagauag

SEQ ID NO: 702776 - RNA, 19 nt, Homo sapiens
  misc_RNA (1)...(19): siRNA sense strand
gcaaacagagacucaguau

SEQ ID NO: 702777 - RNA, 19 nt, Homo sapiens
  misc_RNA (1)...(19): siRNA sense strand
gagacaacauuucaauugg

SEQ ID NO: 702778 - RNA, 19 nt, Homo sapiens
  misc_RNA (1)...(19): siRNA sense strand
gagcaacaacucccugauu

SEQ ID NO: 702779 - RNA, 19 nt, Homo sapiens
  misc_RNA (1)...(19): siRNA sense strand
gaguacagcugucaaacca

SEQ ID NO: 702780 - RNA, 19 nt, Homo sapiens
  misc_RNA (1)...(19): siRNA sense strand
gguaugauagugucaauga

SEQ ID NO: 702781 - RNA, 19 nt, Homo sapiens
  misc_RNA (1)...(19): siRNA sense strand
gaaaucccuucaagcuguu

SEQ ID NO: 702782 - RNA, 19 nt, Homo sapiens
  misc_RNA (1)...(19): siRNA sense strand
acaaugacccuaaguuuau

SEQ ID NO: 702783 - RNA, 19 nt, Homo sapiens
  misc_RNA (1)...(19): siRNA sense strand
gacaaugcucccacaguua

SEQ ID NO: 702784 - RNA, 19 nt, Homo sapiens
  misc_RNA (1)...(19): siRNA sense strand
ugacaaugacccuaaguuu

SEQ ID NO: 702785 - RNA, 19 nt, Homo sapiens
  misc_RNA (1)...(19): siRNA sense strand
gaaauugaucccacuagug

SEQ ID NO: 702786 - RNA, 19 nt, Homo sapiens
  misc_RNA (1)...(19): siRNA sense strand
gagguuuacuucccugaga

SEQ ID NO: 702787 - RNA, 19 nt, Homo sapiens
  misc_RNA (1)...(19): siRNA sense strand
gagacucaguauugucauu

SEQ ID NO: 702788 - RNA, 19 nt, Homo sapiens
  misc_RNA (1)...(19): siRNA sense strand
gaacaucagaccacauaca

SEQ ID NO: 702789 - RNA, 19 nt, Homo sapiens
  misc_RNA (1)...(19): siRNA sense strand
acauagaggagaacaauaa

SEQ ID NO: 702790 - RNA, 19 nt, Homo sapiens
  misc_RNA (1)...(19): siRNA sense strand
gcagaucgaauacguguuc

SEQ ID NO: 702791 - RNA, 19 nt, Homo sapiens
  misc_RNA (1)...(19): siRNA sense strand
caaauggacagagguauga

SEQ ID NO: 702792 - RNA, 19 nt, Homo sapiens
  misc_RNA (1)...(19): siRNA sense strand
gacaacauuucaauuggau

SEQ ID NO: 702793 - RNA, 19 nt, Homo sapiens
  misc_RNA (1)...(19): siRNA sense strand
ucaacgggcagaucgaaua

SEQ ID NO: 702794 - RNA, 19 nt, Homo sapiens
  misc_RNA (1)...(19): siRNA sense strand
ggcaaggcauuacaaaucu

SEQ ID NO: 702795 - RNA, 19 nt, Homo sapiens
  misc_RNA (1)...(19): siRNA sense strand
ccacauacacuuucagagu

SEQ ID NO: 702796 - RNA, 19 nt, Homo sapiens
  misc_RNA (1)...(19): siRNA sense strand
guacauagaggagaacaau

SEQ ID NO: 702797 - RNA, 19 nt, Homo sapiens
  misc_RNA (1)...(19): siRNA sense strand
gcaggacgucuucaccuuu

SEQ ID NO: 702798 - RNA, 19 nt, Homo sapiens
  misc_RNA (1)...(19): siRNA sense strand
gggcagcacuacggugauu

SEQ ID NO: 702799 - RNA, 19 nt, Homo sapiens
  misc_RNA (1)...(19): siRNA sense strand
gcgagcagacugacaggua

SEQ ID NO: 702800 - RNA, 19 nt, Homo sapiens
  misc_RNA (1)...(19): siRNA sense strand
caacgugccguccauugaa

SEQ ID NO: 702801 - RNA, 19 nt, Homo sapiens
  misc_RNA (1)...(19): siRNA sense strand
agacaacauuucaauugga

SEQ ID NO: 702802 - RNA, 19 nt, Homo sapiens
  misc_RNA (1)...(19): siRNA sense strand
ucgcuggacuccucuguga

SEQ ID NO: 702803 - RNA, 19 nt, Homo sapiens
  misc_RNA (1)...(19): siRNA sense strand
ucaaugagaagcugucaga

SEQ ID NO: 702804 - RNA, 19 nt, Homo sapiens
  misc_RNA (1)...(19): siRNA sense strand
gaggaaaucccuucaagcu

SEQ ID NO: 702805 - RNA, 19 nt, Homo sapiens
  misc_RNA (1)...(19): siRNA sense strand
cgagcagacugacagguau

SEQ ID NO: 702806 - RNA, 19 nt, Homo sapiens
  misc_RNA (1)...(19): siRNA sense strand
ggaguccgguuccgaguac

SEQ ID NO: 702807 - RNA, 19 nt, Homo sapiens
  misc_RNA (1)...(19): siRNA sense strand
ccgaguaccugaagaucga

SEQ ID NO: 702808 - RNA, 19 nt, Homo sapiens
  misc_RNA (1)...(19): siRNA sense strand
ccaacagcaugacaaaucu

SEQ ID NO: 702809 - RNA, 19 nt, Homo sapiens
  misc_RNA (1)...(19): siRNA sense strand
ugaaauugaucccacuagu

SEQ ID NO: 702810 - RNA, 19 nt, Homo sapiens
  misc_RNA (1)...(19): siRNA sense strand
gaucgggugaggugacuuu

SEQ ID NO: 702811 - RNA, 19 nt, Homo sapiens
  misc_RNA (1)...(19): siRNA sense strand
caucagaccacauacacuu

SEQ ID NO: 702812 - RNA, 19 nt, Homo sapiens
  misc_RNA (1)...(19): siRNA sense strand
gagguaugauagugucaau

SEQ ID NO: 702813 - RNA, 19 nt, Homo sapiens
  misc_RNA (1)...(19): siRNA sense strand
agcaacaacucccugauug

SEQ ID NO: 702814 - RNA, 19 nt, Homo sapiens
  misc_RNA (1)...(19): siRNA sense strand
caacauuucaauuggauca

SEQ ID NO: 702815 - RNA, 19 nt, Homo sapiens
  misc_RNA (1)...(19): siRNA sense strand
gagcuggguggaccuguuu

SEQ ID NO: 702816 - RNA, 19 nt, Homo sapiens
  misc_RNA (1)...(19): siRNA sense strand
gaagaucgacaaccucacu

SEQ ID NO: 702817 - RNA, 19 nt, Homo sapiens
  misc_RNA (1)...(19): siRNA sense strand
gagcaggagacaacauuuc

SEQ ID NO: 702818 - RNA, 19 nt, Homo sapiens
  misc_RNA (1)...(19): siRNA sense strand
agaugagccuguacauaga

SEQ ID NO: 702819 - RNA, 19 nt, Homo sapiens
  misc_RNA (1)...(19): siRNA sense strand
caaugacccuaaguuuaug

SEQ ID NO: 702820 - RNA, 19 nt, Homo sapiens
  misc_RNA (1)...(19): siRNA sense strand
ccaauaacaaguacagcaa

SEQ ID NO: 702821 - RNA, 19 nt, Homo sapiens
  misc_RNA (1)...(19): siRNA sense strand
gucaaaccaauaacaagua

SEQ ID NO: 702822 - RNA, 19 nt, Homo sapiens
  misc_RNA (1)...(19): siRNA sense strand
gaucacugcucugaguaca

SEQ ID NO: 702823 - RNA, 19 nt, Homo sapiens
  misc_RNA (1)...(19): siRNA sense strand
ggagcaggagacaacauuu

SEQ ID NO: 702824 - RNA, 19 nt, Homo sapiens
  misc_RNA (1)...(19): siRNA sense strand
ugacccaagcuaugaaauu

SEQ ID NO: 702825 - RNA, 19 nt, Homo sapiens
  misc_RNA (1)...(19): siRNA sense strand
ccaaauggacagagguaug

SEQ ID NO: 702826 - RNA, 19 nt, Homo sapiens
  misc_RNA (1)...(19): siRNA sense strand
caauaacaaguacagcaaa

SEQ ID NO: 702827 - RNA, 19 nt, Homo sapiens
  misc_RNA (1)...(19): siRNA sense strand
gggagcaggagacaacauu

SEQ ID NO: 702828 - RNA, 19 nt, Homo sapiens
  misc_RNA (1)...(19): siRNA sense strand
ucaaagacgagaacgacaa

SEQ ID NO: 702829 - RNA, 19 nt, Homo sapiens
  misc_RNA (1)...(19): siRNA sense strand
ucaaaccaauaacaaguac

SEQ ID NO: 702830 - RNA, 19 nt, Homo sapiens
  misc_RNA (1)...(19): siRNA sense strand
cuaaugcaacugcgauuga

SEQ ID NO: 702831 - RNA, 19 nt, Homo sapiens
  misc_RNA (1)...(19): siRNA sense strand
agucggugguggagguuua

SEQ ID NO: 702832 - RNA, 19 nt, Homo sapiens
  misc_RNA (1)...(19): siRNA sense strand
gggacauccuggucaauac

SEQ ID NO: 702833 - RNA, 19 nt, Homo sapiens
  misc_RNA (1)...(19): siRNA sense strand
aaucuaagcagccucucua

SEQ ID NO: 702834 - RNA, 19 nt, Homo sapiens
  misc_RNA (1)...(19): siRNA sense strand
caacagcaugacaaaucua

SEQ ID NO: 702835 - RNA, 19 nt, Homo sapiens
  misc_RNA (1)...(19): siRNA sense strand
caagcuguuugaaauugau

SEQ ID NO: 702836 - RNA, 19 nt, Homo sapiens
  misc_RNA (1)...(19): siRNA sense strand
gcagagaugagccuguaca

SEQ ID NO: 702837 - RNA, 19 nt, Homo sapiens
  misc_RNA (1)...(19): siRNA sense strand
aaaguuaacgccaaagaca

SEQ ID NO: 702838 - RNA, 19 nt, Homo sapiens
  misc_RNA (1)...(19): siRNA sense strand
cgugauggaugcugacaag

SEQ ID NO: 702839 - RNA, 19 nt, Homo sapiens
  misc_RNA (1)...(19): siRNA sense strand
ucaaugcagaccugaacua

SEQ ID NO: 702840 - RNA, 19 nt, Homo sapiens
  misc_RNA (1)...(19): siRNA sense strand
gaccacauacacuuucaga

SEQ ID NO: 702841 - RNA, 19 nt, Homo sapiens
  misc_RNA (1)...(19): siRNA sense strand
ccauugaaauccgcaagau

SEQ ID NO: 702842 - RNA, 19 nt, Homo sapiens
  misc_RNA (1)...(19): siRNA sense strand
uggcaaggcauuacaaauc

SEQ ID NO: 702843 - RNA, 19 nt, Homo sapiens
  misc_RNA (1)...(19): siRNA sense strand
acugacagguaugaguuua

SEQ ID NO: 702844 - RNA, 19 nt, Homo sapiens
  misc_RNA (1)...(19): siRNA sense strand
ucacuguggaggcuucuaa

SEQ ID NO: 702845 - RNA, 19 nt, Homo sapiens
  misc_RNA (1)...(19): siRNA sense strand
gcugucaaaccaauaacaa

SEQ ID NO: 702846 - RNA, 19 nt, Homo sapiens
  misc_RNA (1)...(19): siRNA sense strand
gcaggagacaacauuucaa

SEQ ID NO: 702847 - RNA, 19 nt, Homo sapiens
  misc_RNA (1)...(19): siRNA sense strand
uaugauagugucaaugaga

SEQ ID NO: 702848 - RNA, 19 nt, Homo sapiens
  misc_RNA (1)...(19): siRNA sense strand
gacaacgugccguccauug

SEQ ID NO: 702849 - RNA, 19 nt, Homo sapiens
  misc_RNA (1)...(19): siRNA sense strand
cagagacucaguauuguca

SEQ ID NO: 702850 - RNA, 19 nt, Homo sapiens
  misc_RNA (1)...(19): siRNA sense strand
caaacagagacucaguauu

SEQ ID NO: 702851 - RNA, 19 nt, Homo sapiens
  misc_RNA (1)...(19): siRNA sense strand
augcagagaugagccugua

SEQ ID NO: 702852 - RNA, 19 nt, Homo sapiens
  misc_RNA (1)...(19): siRNA sense strand
gcuggacuccucugugaug

SEQ ID NO: 702853 - RNA, 19 nt, Homo sapiens
  misc_RNA (1)...(19): siRNA sense strand
agagaugagccuguacaua

SEQ ID NO: 702854 - RNA, 19 nt, Homo sapiens
  misc_RNA (1)...(19): siRNA sense strand
caggagacaacauuucaau

SEQ ID NO: 702855 - RNA, 19 nt, Homo sapiens
  misc_RNA (1)...(19): siRNA sense strand
cuaguggugugguuuccuu

SEQ ID NO: 702856 - RNA, 19 nt, Homo sapiens
  misc_RNA (1)...(19): siRNA sense strand
gcaacagacagugaugaug

SEQ ID NO: 702857 - RNA, 19 nt, Homo sapiens
  misc_RNA (1)...(19): siRNA sense strand
agacugacagguaugaguu

SEQ ID NO: 702858 - RNA, 19 nt, Homo sapiens
  misc_RNA (1)...(19): siRNA sense strand
acauacacuuucagaguca

SEQ ID NO: 702859 - RNA, 19 nt, Homo sapiens
  misc_RNA (1)...(19): siRNA sense strand
uagaggagaacaauaacau

SEQ ID NO: 702860 - RNA, 19 nt, Homo sapiens
  misc_RNA (1)...(19): siRNA sense strand
gacccaagcuaugaaauua

SEQ ID NO: 702861 - RNA, 19 nt, Homo sapiens
  misc_RNA (1)...(19): siRNA sense strand
ccagauagcuagaaguuug

SEQ ID NO: 702862 - RNA, 19 nt, Homo sapiens
  misc_RNA (1)...(19): siRNA sense strand
aaacagagacucaguauug

SEQ ID NO: 702863 - RNA, 19 nt, Homo sapiens
  misc_RNA (1)...(19): siRNA sense strand
gacaaugacccuaaguuua

SEQ ID NO: 702864 - RNA, 19 nt, Homo sapiens
  misc_RNA (1)...(19): siRNA sense strand
ggacagagguaugauagug

SEQ ID NO: 702865 - RNA, 19 nt, Homo sapiens
  misc_RNA (1)...(19): siRNA sense strand
ggagacaacauuucaauug

SEQ ID NO: 702866 - RNA, 19 nt, Homo sapiens
  misc_RNA (1)...(19): siRNA sense strand
gagaugagccuguacauag

SEQ ID NO: 702867 - RNA, 19 nt, Homo sapiens
  misc_RNA (1)...(19): siRNA sense strand
gaccugaacuacagcauug

SEQ ID NO: 702868 - RNA, 19 nt, Homo sapiens
  misc_RNA (1)...(19): siRNA sense strand
gaggagaacaauaacauuu

SEQ ID NO: 702869 - RNA, 19 nt, Homo sapiens
  misc_RNA (1)...(19): siRNA sense strand
ugacaaugcucccacaguu

SEQ ID NO: 702870 - RNA, 19 nt, Homo sapiens
  misc_RNA (1)...(19): siRNA sense strand
gcacguguuugucaaugaa

SEQ ID NO: 702871 - RNA, 19 nt, Homo sapiens
  misc_RNA (1)...(19): siRNA sense strand
gggaacaucagaccacaua

SEQ ID NO: 702872 - RNA, 19 nt, Homo sapiens
  misc_RNA (1)...(19): siRNA sense strand
guacagcugucaaaccaau

SEQ ID NO: 702873 - RNA, 19 nt, Homo sapiens
  misc_RNA (1)...(19): siRNA sense strand
gcaaggcauuacaaaucua

SEQ ID NO: 702874 - RNA, 19 nt, Homo sapiens
  misc_RNA (1)...(19): siRNA sense strand
ugacagguaugaguuuaaa

SEQ ID NO: 702875 - RNA, 19 nt, Homo sapiens
  misc_RNA (1)...(19): siRNA sense strand
gcgauugacucccagauag

SEQ ID NO: 702876 - RNA, 19 nt, Homo sapiens
  misc_RNA (1)...(19): siRNA sense strand
gcaaacagagacucaguau

SEQ ID NO: 702877 - RNA, 19 nt, Homo sapiens
  misc_RNA (1)...(19): siRNA sense strand
gagacaacauuucaauugg

SEQ ID NO: 702878 - RNA, 19 nt, Homo sapiens
  misc_RNA (1)...(19): siRNA sense strand
gagcaacaacucccugauu

SEQ ID NO: 702879 - RNA, 19 nt, Homo sapiens
  misc_RNA (1)...(19): siRNA sense strand
gaguacagcugucaaacca

SEQ ID NO: 702880 - RNA, 19 nt, Homo sapiens
  misc_RNA (1)...(19): siRNA sense strand
gguaugauagugucaauga

SEQ ID NO: 702881 - RNA, 19 nt, Homo sapiens
  misc_RNA (1)...(19): siRNA sense strand
gaaaucccuucaagcuguu

SEQ ID NO: 702882 - RNA, 19 nt, Homo sapiens
  misc_RNA (1)...(19): siRNA sense strand
acaaugacccuaaguuuau

SEQ ID NO: 702883 - RNA, 19 nt, Homo sapiens
  misc_RNA (1)...(19): siRNA sense strand
gacaaugcucccacaguua

SEQ ID NO: 702884 - RNA, 19 nt, Homo sapiens
  misc_RNA (1)...(19): siRNA sense strand
ugacaaugacccuaaguuu

SEQ ID NO: 702885 - RNA, 19 nt, Homo sapiens
  misc_RNA (1)...(19): siRNA sense strand
gaaauugaucccacuagug

SEQ ID NO: 702886 - RNA, 19 nt, Homo sapiens
  misc_RNA (1)...(19): siRNA sense strand
gagguuuacuucccugaga

SEQ ID NO: 702887 - RNA, 19 nt, Homo sapiens
  misc_RNA (1)...(19): siRNA sense strand
gagacucaguauugucauu

SEQ ID NO: 702888 - RNA, 19 nt, Homo sapiens
  misc_RNA (1)...(19): siRNA sense strand
gaacaucagaccacauaca

SEQ ID NO: 702889 - RNA, 19 nt, Homo sapiens
  misc_RNA (1)...(19): siRNA sense strand
acauagaggagaacaauaa

SEQ ID NO: 702890 - RNA, 19 nt, Homo sapiens
  misc_RNA (1)...(19): siRNA sense strand
gcagaucgaauacguguuc

SEQ ID NO: 702891 - RNA, 19 nt, Homo sapiens
  misc_RNA (1)...(19): siRNA sense strand
caaauggacagagguauga

SEQ ID NO: 702892 - RNA, 19 nt, Homo sapiens
  misc_RNA (1)...(19): siRNA sense strand
gacaacauuucaauuggau

SEQ ID NO: 702893 - RNA, 19 nt, Homo sapiens
  misc_RNA (1)...(19): siRNA sense strand
ucaacgggcagaucgaaua

SEQ ID NO: 702894 - RNA, 19 nt, Homo sapiens
  misc_RNA (1)...(19): siRNA sense strand
ggcaaggcauuacaaaucu

SEQ ID NO: 702895 - RNA, 19 nt, Homo sapiens
  misc_RNA (1)...(19): siRNA sense strand
ccacauacacuuucagagu

SEQ ID NO: 702896 - RNA, 19 nt, Homo sapiens
  misc_RNA (1)...(19): siRNA sense strand
guacauagaggagaacaau

SEQ ID NO: 702897 - RNA, 19 nt, Homo sapiens
  misc_RNA (1)...(19): siRNA sense strand
gcaggacgucuucaccuuu

SEQ ID NO: 702898 - RNA, 19 nt, Homo sapiens
  misc_RNA (1)...(19): siRNA sense strand
gggcagcacuacggugauu

SEQ ID NO: 702899 - RNA, 19 nt, Homo sapiens
  misc_RNA (1)...(19): siRNA sense strand
gcgagcagacugacaggua

SEQ ID NO: 702900 - RNA, 19 nt, Homo sapiens
  misc_RNA (1)...(19): siRNA sense strand
caacgugccguccauugaa

SEQ ID NO: 702901 - RNA, 19 nt, Homo sapiens
  misc_RNA (1)...(19): siRNA sense strand
agacaacauuucaauugga

SEQ ID NO: 702902 - RNA, 19 nt, Homo sapiens
  misc_RNA (1)...(19): siRNA sense strand
ucgcuggacuccucuguga

SEQ ID NO: 702903 - RNA, 19 nt, Homo sapiens
  misc_RNA (1)...(19): siRNA sense strand
ucaaugagaagcugucaga

SEQ ID NO: 702904 - RNA, 19 nt, Homo sapiens
  misc_RNA (1)...(19): siRNA sense strand
gaggaaaucccuucaagcu

SEQ ID NO: 702905 - RNA, 19 nt, Homo sapiens
  misc_RNA (1)...(19): siRNA sense strand
cgagcagacugacagguau

SEQ ID NO: 702906 - RNA, 19 nt, Homo sapiens
  misc_RNA (1)...(19): siRNA sense strand
ggaguccgguuccgaguac

SEQ ID NO: 702907 - RNA, 19 nt, Homo sapiens
  misc_RNA (1)...(19): siRNA sense strand
ccgaguaccugaagaucga

SEQ ID NO: 702908 - RNA, 19 nt, Homo sapiens
  misc_RNA (1)...(19): siRNA sense strand
ccaacagcaugacaaaucu

SEQ ID NO: 702909 - RNA, 19 nt, Homo sapiens
  misc_RNA (1)...(19): siRNA sense strand
ugaaauugaucccacuagu

SEQ ID NO: 702910 - RNA, 19 nt, Homo sapiens
  misc_RNA (1)...(19): siRNA sense strand
gaucgggugaggugacuuu

SEQ ID NO: 702911 - RNA, 19 nt, Homo sapiens
  misc_RNA (1)...(19): siRNA sense strand
caucagaccacauacacuu

SEQ ID NO: 702912 - RNA, 19 nt, Homo sapiens
  misc_RNA (1)...(19): siRNA sense strand
gagguaugauagugucaau

SEQ ID NO: 702913 - RNA, 19 nt, Homo sapiens
  misc_RNA (1)...(19): siRNA sense strand
agcaacaacucccugauug

SEQ ID NO: 702914 - RNA, 19 nt, Homo sapiens
  misc_RNA (1)...(19): siRNA sense strand
caacauuucaauuggauca

SEQ ID NO: 702915 - RNA, 19 nt, Homo sapiens
  misc_RNA (1)...(19): siRNA sense strand
gagcuggguggaccuguuu

SEQ ID NO: 702916 - RNA, 19 nt, Homo sapiens
  misc_RNA (1)...(19): siRNA sense strand
gaagaucgacaaccucacu

SEQ ID NO: 702917 - RNA, 19 nt, Homo sapiens
  misc_RNA (1)...(19): siRNA sense strand
gagcaggagacaacauuuc

SEQ ID NO: 702918 - RNA, 19 nt, Homo sapiens
  misc_RNA (1)...(19): siRNA sense strand
agaugagccuguacauaga

SEQ ID NO: 702919 - RNA, 19 nt, Homo sapiens
  misc_RNA (1)...(19): siRNA sense strand
caaugacccuaaguuuaug

SEQ ID NO: 702920 - RNA, 19 nt, Homo sapiens
  misc_RNA (1)...(19): siRNA sense strand
ccaauaacaaguacagcaa

SEQ ID NO: 702921 - RNA, 19 nt, Homo sapiens
  misc_RNA (1)...(19): siRNA sense strand
gucaaaccaauaacaagua

SEQ ID NO: 702922 - RNA, 19 nt, Homo sapiens
  misc_RNA (1)...(19): siRNA sense strand
gaucacugcucugaguaca

SEQ ID NO: 702923 - RNA, 19 nt, Homo sapiens
  misc_RNA (1)...(19): siRNA sense strand
ggagcaggagacaacauuu

SEQ ID NO: 702924 - RNA, 19 nt, Homo sapiens
  misc_RNA (1)...(19): siRNA sense strand
ugacccaagcuaugaaauu

SEQ ID NO: 702925 - RNA, 19 nt, Homo sapiens
  misc_RNA (1)...(19): siRNA sense strand
ccaaauggacagagguaug

SEQ ID NO: 702926 - RNA, 19 nt, Homo sapiens
  misc_RNA (1)...(19): siRNA sense strand
caauaacaaguacagcaaa

SEQ ID NO: 702927 - RNA, 19 nt, Homo sapiens
  misc_RNA (1)...(19): siRNA sense strand
gggagcaggagacaacauu

SEQ ID NO: 702928 - RNA, 19 nt, Homo sapiens
  misc_RNA (1)...(19): siRNA sense strand
ucaaagacgagaacgacaa

SEQ ID NO: 702929 - RNA, 19 nt, Homo sapiens
  misc_RNA (1)...(19): siRNA sense strand
ucaaaccaauaacaaguac

SEQ ID NO: 702930 - RNA, 19 nt, Homo sapiens
  misc_RNA (1)...(19): siRNA sense strand
cuaaugcaacugcgauuga

SEQ ID NO: 702931 - RNA, 19 nt, Homo sapiens
  misc_RNA (1)...(19): siRNA sense strand
agucggugguggagguuua

SEQ ID NO: 702932 - RNA, 19 nt, Homo sapiens
  misc_RNA (1)...(19): siRNA sense strand
gggacauccuggucaauac

SEQ ID NO: 702933 - RNA, 19 nt, Homo sapiens
  misc_RNA (1)...(19): siRNA sense strand
aaucuaagcagccucucua

SEQ ID NO: 702934 - RNA, 19 nt, Homo sapiens
  misc_RNA (1)...(19): siRNA sense strand
caacagcaugacaaaucua

SEQ ID NO: 702935 - RNA, 19 nt, Homo sapiens
  misc_RNA (1)...(19): siRNA sense strand
caagcuguuugaaauugau

SEQ ID NO: 702936 - RNA, 19 nt, Homo sapiens
  misc_RNA (1)...(19): siRNA sense strand
gcagagaugagccuguaca

SEQ ID NO: 702937 - RNA, 19 nt, Homo sapiens
  misc_RNA (1)...(19): siRNA sense strand
aaaguuaacgccaaagaca

SEQ ID NO: 702938 - RNA, 19 nt, Homo sapiens
  misc_RNA (1)...(19): siRNA sense strand
cgugauggaugcugacaag

SEQ ID NO: 702939 - RNA, 19 nt, Homo sapiens
  misc_RNA (1)...(19): siRNA sense strand
ucaaugcagaccugaacua

SEQ ID NO: 702940 - RNA, 19 nt, Homo sapiens
  misc_RNA (1)...(19): siRNA sense strand
gaccacauacacuuucaga

SEQ ID NO: 702941 - RNA, 19 nt, Homo sapiens
  misc_RNA (1)...(19): siRNA sense strand
ccauugaaauccgcaagau

SEQ ID NO: 702942 - RNA, 19 nt, Homo sapiens
  misc_RNA (1)...(19): siRNA sense strand
uggcaaggcauuacaaauc

SEQ ID NO: 702943 - RNA, 19 nt, Homo sapiens
  misc_RNA (1)...(19): siRNA sense strand
acugacagguaugaguuua

SEQ ID NO: 702944 - RNA, 19 nt, Homo sapiens
  misc_RNA (1)...(19): siRNA sense strand
ucacuguggaggcuucuaa

SEQ ID NO: 702945 - RNA, 19 nt, Homo sapiens
  misc_RNA (1)...(19): siRNA sense strand
gcugucaaaccaauaacaa

SEQ ID NO: 702946 - RNA, 19 nt, Homo sapiens
  misc_RNA (1)...(19): siRNA sense strand
gcaggagacaacauuucaa

SEQ ID NO: 702947 - RNA, 19 nt, Homo sapiens
  misc_RNA (1)...(19): siRNA sense strand
uaugauagugucaaugaga

SEQ ID NO: 702948 - RNA, 19 nt, Homo sapiens
  misc_RNA (1)...(19): siRNA sense strand
gacaacgugccguccauug

SEQ ID NO: 702949 - RNA, 19 nt, Homo sapiens
  misc_RNA (1)...(19): siRNA sense strand
cagagacucaguauuguca

SEQ ID NO: 702950 - RNA, 19 nt, Homo sapiens
  misc_RNA (1)...(19): siRNA sense strand
caaacagagacucaguauu

SEQ ID NO: 702951 - RNA, 19 nt, Homo sapiens
  misc_RNA (1)...(19): siRNA sense strand
augcagagaugagccugua

SEQ ID NO: 702952 - RNA, 19 nt, Homo sapiens
  misc_RNA (1)...(19): siRNA sense strand
gcuggacuccucugugaug

SEQ ID NO: 702953 - RNA, 19 nt, Homo sapiens
  misc_RNA (1)...(19): siRNA sense strand
agagaugagccuguacaua

SEQ ID NO: 702954 - RNA, 19 nt, Homo sapiens
  misc_RNA (1)...(19): siRNA sense strand
caggagacaacauuucaau

SEQ ID NO: 702955 - RNA, 19 nt, Homo sapiens
  misc_RNA (1)...(19): siRNA sense strand
cuaguggugugguuuccuu

SEQ ID NO: 702956 - RNA, 19 nt, Homo sapiens
  misc_RNA (1)...(19): siRNA sense strand
gcaacagacagugaugaug

SEQ ID NO: 702957 - RNA, 19 nt, Homo sapiens
  misc_RNA (1)...(19): siRNA sense strand
agacugacagguaugaguu

SEQ ID NO: 702958 - RNA, 19 nt, Homo sapiens
  misc_RNA (1)...(19): siRNA sense strand
acauacacuuucagaguca

SEQ ID NO: 702959 - RNA, 19 nt, Homo sapiens
  misc_RNA (1)...(19): siRNA sense strand
uagaggagaacaauaacau

SEQ ID NO: 702960 - RNA, 19 nt, Homo sapiens
  misc_RNA (1)...(19): siRNA sense strand
gacccaagcuaugaaauua

SEQ ID NO: 702961 - RNA, 19 nt, Homo sapiens
  misc_RNA (1)...(19): siRNA sense strand
ccagauagcuagaaguuug

SEQ ID NO: 702962 - RNA, 19 nt, Homo sapiens
  misc_RNA (1)...(19): siRNA sense strand
aaacagagacucaguauug

SEQ ID NO: 702963 - RNA, 19 nt, Homo sapiens
  misc_RNA (1)...(19): siRNA sense strand
gacaaugacccuaaguuua

SEQ ID NO: 702964 - RNA, 19 nt, Homo sapiens
  misc_RNA (1)...(19): siRNA sense strand
ggacagagguaugauagug

SEQ ID NO: 702965 - RNA, 19 nt, Homo sapiens
  misc_RNA (1)...(19): siRNA sense strand
ggagacaacauuucaauug

SEQ ID NO: 702966 - RNA, 19 nt, Homo sapiens
  misc_RNA (1)...(19): siRNA sense strand
gagaugagccuguacauag

SEQ ID NO: 702967 - RNA, 19 nt, Homo sapiens
  misc_RNA (1)...(19): siRNA sense strand
gaccugaacuacagcauug

SEQ ID NO: 702968 - RNA, 19 nt, Homo sapiens
  misc_RNA (1)...(19): siRNA sense strand
gaggagaacaauaacauuu

SEQ ID NO: 702969 - RNA, 19 nt, Homo sapiens
  misc_RNA (1)...(19): siRNA sense strand
ugacaaugcucccacaguu

SEQ ID NO: 702970 - RNA, 19 nt, Homo sapiens
  misc_RNA (1)...(19): siRNA sense strand
gcacguguuugucaaugaa

SEQ ID NO: 702971 - RNA, 19 nt, Homo sapiens
  misc_RNA (1)...(19): siRNA sense strand
gggaacaucagaccacaua

SEQ ID NO: 702972 - RNA, 19 nt, Homo sapiens
  misc_RNA (1)...(19): siRNA sense strand
guacagcugucaaaccaau

SEQ ID NO: 702973 - RNA, 19 nt, Homo sapiens
  misc_RNA (1)...(19): siRNA sense strand
gcaaggcauuacaaaucua

SEQ ID NO: 702974 - RNA, 19 nt, Homo sapiens
  misc_RNA (1)...(19): siRNA sense strand
ugacagguaugaguuuaaa

SEQ ID NO: 702975 - RNA, 19 nt, Homo sapiens
  misc_RNA (1)...(19): siRNA sense strand
gcgauugacucccagauag

SEQ ID NO: 702976 - RNA, 19 nt, Homo sapiens
  misc_RNA (1)...(19): siRNA sense strand
gcaaacagagacucaguau

SEQ ID NO: 702977 - RNA, 19 nt, Homo sapiens
  misc_RNA (1)...(19): siRNA sense strand
gagacaacauuucaauugg

SEQ ID NO: 702978 - RNA, 19 nt, Homo sapiens
  misc_RNA (1)...(19): siRNA sense strand
gagcaacaacucccugauu

SEQ ID NO: 702979 - RNA, 19 nt, Homo sapiens
  misc_RNA (1)...(19): siRNA sense strand
gaguacagcugucaaacca

SEQ ID NO: 702980 - RNA, 19 nt, Homo sapiens
  misc_RNA (1)...(19): siRNA sense strand
gguaugauagugucaauga

SEQ ID NO: 702981 - RNA, 19 nt, Homo sapiens
  misc_RNA (1)...(19): siRNA sense strand
gaaaucccuucaagcuguu

SEQ ID NO: 702982 - RNA, 19 nt, Homo sapiens
  misc_RNA (1)...(19): siRNA sense strand
acaaugacccuaaguuuau

SEQ ID NO: 702983 - RNA, 19 nt, Homo sapiens
  misc_RNA (1)...(19): siRNA sense strand
gacaaugcucccacaguua

SEQ ID NO: 702984 - RNA, 19 nt, Homo sapiens
  misc_RNA (1)...(19): siRNA sense strand
ugacaaugacccuaaguuu

SEQ ID NO: 702985 - RNA, 19 nt, Homo sapiens
  misc_RNA (1)...(19): siRNA sense strand
gaaauugaucccacuagug

SEQ ID NO: 702986 - RNA, 19 nt, Homo sapiens
  misc_RNA (1)...(19): siRNA sense strand
gagguuuacuucccugaga

SEQ ID NO: 702987 - RNA, 19 nt, Homo sapiens
  misc_RNA (1)...(19): siRNA sense strand
gagacucaguauugucauu

SEQ ID NO: 702988 - RNA, 19 nt, Homo sapiens
  misc_RNA (1)...(19): siRNA sense strand
gaacaucagaccacauaca

SEQ ID NO: 702989 - RNA, 19 nt, Homo sapiens
  misc_RNA (1)...(19): siRNA sense strand
acauagaggagaacaauaa

SEQ ID NO: 702990 - RNA, 19 nt, Homo sapiens
  misc_RNA (1)...(19): siRNA sense strand
gcagaucgaauacguguuc

SEQ ID NO: 702991 - RNA, 19 nt, Homo sapiens
  misc_RNA (1)...(19): siRNA sense strand
caaauggacagagguauga

SEQ ID NO: 702992 - RNA, 19 nt, Homo sapiens
  misc_RNA (1)...(19): siRNA sense strand
gacaacauuucaauuggau

SEQ ID NO: 702993 - RNA, 19 nt, Homo sapiens
  misc_RNA (1)...(19): siRNA sense strand
ucaacgggcagaucgaaua

SEQ ID NO: 702994 - RNA, 19 nt, Homo sapiens
  misc_RNA (1)...(19): siRNA sense strand
ggcaaggcauuacaaaucu

SEQ ID NO: 702995 - RNA, 19 nt, Homo sapiens
  misc_RNA (1)...(19): siRNA sense strand
ccacauacacuuucagagu

SEQ ID NO: 702996 - RNA, 19 nt, Homo sapiens
  misc_RNA (1)...(19): siRNA sense strand
guacauagaggagaacaau

SEQ ID NO: 702997 - RNA, 19 nt, Homo sapiens
  misc_RNA (1)...(19): siRNA sense strand
gcaggacgucuucaccuuu

SEQ ID NO: 702998 - RNA, 19 nt, Homo sapiens
  misc_RNA (1)...(19): siRNA sense strand
gggcagcacuacggugauu

SEQ ID NO: 702999 - RNA, 19 nt, Homo sapiens
  misc_RNA (1)...(19): siRNA sense strand
gcgagcagacugacaggua

SEQ ID NO: 703000 - RNA, 19 nt, Homo sapiens
  misc_RNA (1)...(19): siRNA sense strand
caacgugccguccauugaa

SEQ ID NO: 703001 - RNA, 19 nt, Homo sapiens
  misc_RNA (1)...(19): siRNA sense strand
agacaacauuucaauugga

SEQ ID NO: 703002 - RNA, 19 nt, Homo sapiens
  misc_RNA (1)...(19): siRNA sense strand
ucgcuggacuccucuguga

SEQ ID NO: 703003 - RNA, 19 nt, Homo sapiens
  misc_RNA (1)...(19): siRNA sense strand
ucaaugagaagcugucaga

SEQ ID NO: 703004 - RNA, 19 nt, Homo sapiens
  misc_RNA (1)...(19): siRNA sense strand
gaggaaaucccuucaagcu

SEQ ID NO: 703005 - RNA, 19 nt, Homo sapiens
  misc_RNA (1)...(19): siRNA sense strand
cgagcagacugacagguau

SEQ ID NO: 703006 - RNA, 19 nt, Homo sapiens
  misc_RNA (1)...(19): siRNA sense strand
ggaguccgguuccgaguac

SEQ ID NO: 703007 - RNA, 19 nt, Homo sapiens
  misc_RNA (1)...(19): siRNA sense strand
ccgaguaccugaagaucga

SEQ ID NO: 703008 - RNA, 19 nt, Homo sapiens
  misc_RNA (1)...(19): siRNA sense strand
ccaacagcaugacaaaucu

SEQ ID NO: 703009 - RNA, 19 nt, Homo sapiens
  misc_RNA (1)...(19): siRNA sense strand
ugaaauugaucccacuagu

SEQ ID NO: 703010 - RNA, 19 nt, Homo sapiens
  misc_RNA (1)...(19): siRNA sense strand
gaucgggugaggugacuuu

SEQ ID NO: 703011 - RNA, 19 nt, Homo sapiens
  misc_RNA (1)...(19): siRNA sense strand
caucagaccacauacacuu

SEQ ID NO: 703012 - RNA, 19 nt, Homo sapiens
  misc_RNA (1)...(19): siRNA sense strand
gagguaugauagugucaau

SEQ ID NO: 703013 - RNA, 19 nt, Homo sapiens
  misc_RNA (1)...(19): siRNA sense strand
agcaacaacucccugauug

SEQ ID NO: 703014 - RNA, 19 nt, Homo sapiens
  misc_RNA (1)...(19): siRNA sense strand
caacauuucaauuggauca

SEQ ID NO: 703015 - RNA, 19 nt, Homo sapiens
  misc_RNA (1)...(19): siRNA sense strand
gagcuggguggaccuguuu

SEQ ID NO: 703016 - RNA, 19 nt, Homo sapiens
  misc_RNA (1)...(19): siRNA sense strand
gaagaucgacaaccucacu

SEQ ID NO: 703017 - RNA, 19 nt, Homo sapiens
  misc_RNA (1)...(19): siRNA sense strand
gagcaggagacaacauuuc

SEQ ID NO: 703018 - RNA, 19 nt, Homo sapiens
  misc_RNA (1)...(19): siRNA sense strand
agaugagccuguacauaga

SEQ ID NO: 703019 - RNA, 19 nt, Homo sapiens
  misc_RNA (1)...(19): siRNA sense strand
caaugacccuaaguuuaug

SEQ ID NO: 703020 - RNA, 19 nt, Homo sapiens
  misc_RNA (1)...(19): siRNA sense strand
ccaauaacaaguacagcaa

SEQ ID NO: 703021 - RNA, 19 nt, Homo sapiens
  misc_RNA (1)...(19): siRNA sense strand
gucaaaccaauaacaagua

SEQ ID NO: 703022 - RNA, 19 nt, Homo sapiens
  misc_RNA (1)...(19): siRNA sense strand
gaucacugcucugaguaca

SEQ ID NO: 703023 - RNA, 19 nt, Homo sapiens
  misc_RNA (1)...(19): siRNA sense strand
ggagcaggagacaacauuu

SEQ ID NO: 703024 - RNA, 19 nt, Homo sapiens
  misc_RNA (1)...(19): siRNA sense strand
ugacccaagcuaugaaauu

SEQ ID NO: 703025 - RNA, 19 nt, Homo sapiens
  misc_RNA (1)...(19): siRNA sense strand
ccaaauggacagagguaug

SEQ ID NO: 703026 - RNA, 19 nt, Homo sapiens
  misc_RNA (1)...(19): siRNA sense strand
caauaacaaguacagcaaa

SEQ ID NO: 703027 - RNA, 19 nt, Homo sapiens
  misc_RNA (1)...(19): siRNA sense strand
gggagcaggagacaacauu

SEQ ID NO: 703028 - RNA, 19 nt, Homo sapiens
  misc_RNA (1)...(19): siRNA sense strand
ucaaagacgagaacgacaa

SEQ ID NO: 703029 - RNA, 19 nt, Homo sapiens
  misc_RNA (1)...(19): siRNA sense strand
ucaaaccaauaacaaguac

SEQ ID NO: 703030 - RNA, 19 nt, Homo sapiens
  misc_RNA (1)...(19): siRNA sense strand
cuaaugcaacugcgauuga

SEQ ID NO: 703031 - RNA, 19 nt, Homo sapiens
  misc_RNA (1)...(19): siRNA sense strand
agucggugguggagguuua

SEQ ID NO: 703032 - RNA, 19 nt, Homo sapiens
  misc_RNA (1)...(19): siRNA sense strand
gggacauccuggucaauac

SEQ ID NO: 703033 - RNA, 19 nt, Homo sapiens
  misc_RNA (1)...(19): siRNA sense strand
aaucuaagcagccucucua

SEQ ID NO: 703034 - RNA, 19 nt, Homo sapiens
  misc_RNA (1)...(19): siRNA sense strand
caacagcaugacaaaucua

SEQ ID NO: 703035 - RNA, 19 nt, Homo sapiens
  misc_RNA (1)...(19): siRNA sense strand
caagcuguuugaaauugau

SEQ ID NO: 703036 - RNA, 19 nt, Homo sapiens
  misc_RNA (1)...(19): siRNA sense strand
gcagagaugagccuguaca

SEQ ID NO: 703037 - RNA, 19 nt, Homo sapiens
  misc_RNA (1)...(19): siRNA sense strand
aaaguuaacgccaaagaca

SEQ ID NO: 703038 - RNA, 19 nt, Homo sapiens
  misc_RNA (1)...(19): siRNA sense strand
cgugauggaugcugacaag

SEQ ID NO: 703039 - RNA, 19 nt, Homo sapiens
  misc_RNA (1)...(19): siRNA sense strand
ucaaugcagaccugaacua

SEQ ID NO: 703040 - RNA, 19 nt, Homo sapiens
  misc_RNA (1)...(19): siRNA sense strand
gaccacauacacuuucaga

SEQ ID NO: 703041 - RNA, 19 nt, Homo sapiens
  misc_RNA (1)...(19): siRNA sense strand
ccauugaaauccgcaagau

SEQ ID NO: 703042 - RNA, 19 nt, Homo sapiens
  misc_RNA (1)...(19): siRNA sense strand
uggcaaggcauuacaaauc

SEQ ID NO: 703043 - RNA, 19 nt, Homo sapiens
  misc_RNA (1)...(19): siRNA sense strand
acugacagguaugaguuua

SEQ ID NO: 703044 - RNA, 19 nt, Homo sapiens
  misc_RNA (1)...(19): siRNA sense strand
ucacuguggaggcuucuaa

SEQ ID NO: 703045 - RNA, 19 nt, Homo sapiens
  misc_RNA (1)...(19): siRNA sense strand
gcugucaaaccaauaacaa

SEQ ID NO: 703046 - RNA, 19 nt, Homo sapiens
  misc_RNA (1)...(19): siRNA sense strand
gcaggagacaacauuucaa

SEQ ID NO: 703047 - RNA, 19 nt, Homo sapiens
  misc_RNA (1)...(19): siRNA sense strand
uaugauagugucaaugaga

SEQ ID NO: 703048 - RNA, 19 nt, Homo sapiens
  misc_RNA (1)...(19): siRNA sense strand
gacaacgugccguccauug

SEQ ID NO: 703049 - RNA, 19 nt, Homo sapiens
  misc_RNA (1)...(19): siRNA sense strand
cagagacucaguauuguca

SEQ ID NO: 703050 - RNA, 19 nt, Homo sapiens
  misc_RNA (1)...(19): siRNA sense strand
caaacagagacucaguauu

SEQ ID NO: 703051 - RNA, 19 nt, Homo sapiens
  misc_RNA (1)...(19): siRNA sense strand
augcagagaugagccugua

SEQ ID NO: 703052 - RNA, 19 nt, Homo sapiens
  misc_RNA (1)...(19): siRNA sense strand
gcuggacuccucugugaug

SEQ ID NO: 703053 - RNA, 19 nt, Homo sapiens
  misc_RNA (1)...(19): siRNA sense strand
agagaugagccuguacaua

SEQ ID NO: 703054 - RNA, 19 nt, Homo sapiens
  misc_RNA (1)...(19): siRNA sense strand
caggagacaacauuucaau

SEQ ID NO: 703055 - RNA, 19 nt, Homo sapiens
  misc_RNA (1)...(19): siRNA sense strand
cuaguggugugguuuccuu

SEQ ID NO: 703056 - RNA, 19 nt, Homo sapiens
  misc_RNA (1)...(19): siRNA sense strand
gcaacagacagugaugaug

SEQ ID NO: 703057 - RNA, 19 nt, Homo sapiens
  misc_RNA (1)...(19): siRNA sense strand
agacugacagguaugaguu

SEQ ID NO: 703058 - RNA, 19 nt, Homo sapiens
  misc_RNA (1)...(19): siRNA sense strand
acauacacuuucagaguca

SEQ ID NO: 703059 - RNA, 19 nt, Homo sapiens
  misc_RNA (1)...(19): siRNA sense strand
uagaggagaacaauaacau

SEQ ID NO: 703060 - RNA, 19 nt, Homo sapiens
  misc_RNA (1)...(19): siRNA sense strand
gacccaagcuaugaaauua

SEQ ID NO: 703061 - RNA, 19 nt, Homo sapiens
  misc_RNA (1)...(19): siRNA sense strand
ccagauagcuagaaguuug

SEQ ID NO: 703062 - RNA, 19 nt, Homo sapiens
  misc_RNA (1)...(19): siRNA sense strand
aaacagagacucaguauug

SEQ ID NO: 703063 - RNA, 19 nt, Homo sapiens
  misc_RNA (1)...(19): siRNA sense strand
gacaaugacccuaaguuua

SEQ ID NO: 703064 - RNA, 19 nt, Homo sapiens
  misc_RNA (1)...(19): siRNA sense strand
ggacagagguaugauagug

SEQ ID NO: 703065 - RNA, 19 nt, Homo sapiens
  misc_RNA (1)...(19): siRNA sense strand
ggagacaacauuucaauug

SEQ ID NO: 703066 - RNA, 19 nt, Homo sapiens
  misc_RNA (1)...(19): siRNA sense strand
gagaugagccuguacauag

SEQ ID NO: 703067 - RNA, 19 nt, Homo sapiens
  misc_RNA (1)...(19): siRNA sense strand
gaccugaacuacagcauug

SEQ ID NO: 703068 - RNA, 19 nt, Homo sapiens
  misc_RNA (1)...(19): siRNA sense strand
gaggagaacaauaacauuu

SEQ ID NO: 703069 - RNA, 19 nt, Homo sapiens
  misc_RNA (1)...(19): siRNA sense strand
ugacaaugcucccacaguu

SEQ ID NO: 703070 - RNA, 19 nt, Homo sapiens
  misc_RNA (1)...(19): siRNA sense strand
gcacguguuugucaaugaa

SEQ ID NO: 703071 - RNA, 19 nt, Homo sapiens
  misc_RNA (1)...(19): siRNA sense strand
gggaacaucagaccacaua

SEQ ID NO: 703072 - RNA, 19 nt, Homo sapiens
  misc_RNA (1)...(19): siRNA sense strand
guacagcugucaaaccaau

SEQ ID NO: 703073 - RNA, 19 nt, Homo sapiens
  misc_RNA (1)...(19): siRNA sense strand
gcaaggcauuacaaaucua

SEQ ID NO: 703074 - RNA, 19 nt, Homo sapiens
  misc_RNA (1)...(19): siRNA sense strand
ugacagguaugaguuuaaa

SEQ ID NO: 703075 - RNA, 19 nt, Homo sapiens
  misc_RNA (1)...(19): siRNA sense strand
gcgauugacucccagauag

SEQ ID NO: 703076 - RNA, 19 nt, Homo sapiens
  misc_RNA (1)...(19): siRNA sense strand
gcaaacagagacucaguau

SEQ ID NO: 703077 - RNA, 19 nt, Homo sapiens
  misc_RNA (1)...(19): siRNA sense strand
gagacaacauuucaauugg

SEQ ID NO: 703078 - RNA, 19 nt, Homo sapiens
  misc_RNA (1)...(19): siRNA sense strand
gagcaacaacucccugauu

SEQ ID NO: 703079 - RNA, 19 nt, Homo sapiens
  misc_RNA (1)...(19): siRNA sense strand
gaguacagcugucaaacca

SEQ ID NO: 703080 - RNA, 19 nt, Homo sapiens
  misc_RNA (1)...(19): siRNA sense strand
gguaugauagugucaauga

SEQ ID NO: 703081 - RNA, 19 nt, Homo sapiens
  misc_RNA (1)...(19): siRNA sense strand
gaaaucccuucaagcuguu

SEQ ID NO: 703082 - RNA, 19 nt, Homo sapiens
  misc_RNA (1)...(19): siRNA sense strand
acaaugacccuaaguuuau

SEQ ID NO: 703083 - RNA, 19 nt, Homo sapiens
  misc_RNA (1)...(19): siRNA sense strand
gacaaugcucccacaguua

SEQ ID NO: 703084 - RNA, 19 nt, Homo sapiens
  misc_RNA (1)...(19): siRNA sense strand
ugacaaugacccuaaguuu

SEQ ID NO: 703085 - RNA, 19 nt, Homo sapiens
  misc_RNA (1)...(19): siRNA sense strand
gaaauugaucccacuagug

SEQ ID NO: 703086 - RNA, 19 nt, Homo sapiens
  misc_RNA (1)...(19): siRNA sense strand
gagguuuacuucccugaga

SEQ ID NO: 703087 - RNA, 19 nt, Homo sapiens
  misc_RNA (1)...(19): siRNA sense strand
gagacucaguauugucauu

SEQ ID NO: 703088 - RNA, 19 nt, Homo sapiens
  misc_RNA (1)...(19): siRNA sense strand
gaacaucagaccacauaca

SEQ ID NO: 703089 - RNA, 19 nt, Homo sapiens
  misc_RNA (1)...(19): siRNA sense strand
acauagaggagaacaauaa

SEQ ID NO: 703090 - RNA, 19 nt, Homo sapiens
  misc_RNA (1)...(19): siRNA sense strand
gcagaucgaauacguguuc

SEQ ID NO: 703091 - RNA, 19 nt, Homo sapiens
  misc_RNA (1)...(19): siRNA sense strand
caaauggacagagguauga

SEQ ID NO: 703092 - RNA, 19 nt, Homo sapiens
  misc_RNA (1)...(19): siRNA sense strand
gacaacauuucaauuggau

SEQ ID NO: 703093 - RNA, 19 nt, Homo sapiens
  misc_RNA (1)...(19): siRNA sense strand
ucaacgggcagaucgaaua

SEQ ID NO: 703094 - RNA, 19 nt, Homo sapiens
  misc_RNA (1)...(19): siRNA sense strand
ggcaaggcauuacaaaucu

SEQ ID NO: 703095 - RNA, 19 nt, Homo sapiens
  misc_RNA (1)...(19): siRNA sense strand
ccacauacacuuucagagu

SEQ ID NO: 703096 - RNA, 19 nt, Homo sapiens
  misc_RNA (1)...(19): siRNA sense strand
guacauagaggagaacaau

SEQ ID NO: 703097 - RNA, 19 nt, Homo sapiens
  misc_RNA (1)...(19): siRNA sense strand
gcaggacgucuucaccuuu

SEQ ID NO: 703098 - RNA, 19 nt, Homo sapiens
  misc_RNA (1)...(19): siRNA sense strand
gggcagcacuacggugauu

SEQ ID NO: 703099 - RNA, 19 nt, Homo sapiens
  misc_RNA (1)...(19): siRNA sense strand
gcgagcagacugacaggua

SEQ ID NO: 703100 - RNA, 19 nt, Homo sapiens
  misc_RNA (1)...(19): siRNA sense strand
caacgugccguccauugaa

SEQ ID NO: 703101 - RNA, 19 nt, Homo sapiens
  misc_RNA (1)...(19): siRNA sense strand
agacaacauuucaauugga

SEQ ID NO: 703102 - RNA, 19 nt, Homo sapiens
  misc_RNA (1)...(19): siRNA sense strand
ucgcuggacuccucuguga

SEQ ID NO: 703103 - RNA, 19 nt, Homo sapiens
  misc_RNA (1)...(19): siRNA sense strand
ucaaugagaagcugucaga

SEQ ID NO: 703104 - RNA, 19 nt, Homo sapiens
  misc_RNA (1)...(19): siRNA sense strand
gaggaaaucccuucaagcu

SEQ ID NO: 703105 - RNA, 19 nt, Homo sapiens
  misc_RNA (1)...(19): siRNA sense strand
cgagcagacugacagguau

SEQ ID NO: 703106 - RNA, 19 nt, Homo sapiens
  misc_RNA (1)...(19): siRNA sense strand
ggaguccgguuccgaguac

SEQ ID NO: 703107 - RNA, 19 nt, Homo sapiens
  misc_RNA (1)...(19): siRNA sense strand
ccgaguaccugaagaucga

SEQ ID NO: 703108 - RNA, 19 nt, Homo sapiens
  misc_RNA (1)...(19): siRNA sense strand
ccaacagcaugacaaaucu

SEQ ID NO: 703109 - RNA, 19 nt, Homo sapiens
  misc_RNA (1)...(19): siRNA sense strand
ugaaauugaucccacuagu

SEQ ID NO: 703110 - RNA, 19 nt, Homo sapiens
  misc_RNA (1)...(19): siRNA sense strand
gaucgggugaggugacuuu

SEQ ID NO: 703111 - RNA, 19 nt, Homo sapiens
  misc_RNA (1)...(19): siRNA sense strand
caucagaccacauacacuu

SEQ ID NO: 703112 - RNA, 19 nt, Homo sapiens
  misc_RNA (1)...(19): siRNA sense strand
gagguaugauagugucaau

SEQ ID NO: 703113 - RNA, 19 nt, Homo sapiens
  misc_RNA (1)...(19): siRNA sense strand
agcaacaacucccugauug

SEQ ID NO: 703114 - RNA, 19 nt, Homo sapiens
  misc_RNA (1)...(19): siRNA sense strand
caacauuucaauuggauca

SEQ ID NO: 703115 - RNA, 19 nt, Homo sapiens
  misc_RNA (1)...(19): siRNA sense strand
gagcuggguggaccuguuu

SEQ ID NO: 703116 - RNA, 19 nt, Homo sapiens
  misc_RNA (1)...(19): siRNA sense strand
gaagaucgacaaccucacu

SEQ ID NO: 703117 - RNA, 19 nt, Homo sapiens
  misc_RNA (1)...(19): siRNA sense strand
gagcaggagacaacauuuc

SEQ ID NO: 703118 - RNA, 19 nt, Homo sapiens
  misc_RNA (1)...(19): siRNA sense strand
agaugagccuguacauaga

SEQ ID NO: 703119 - RNA, 19 nt, Homo sapiens
  misc_RNA (1)...(19): siRNA sense strand
caaugacccuaaguuuaug

SEQ ID NO: 703120 - RNA, 19 nt, Homo sapiens
  misc_RNA (1)...(19): siRNA sense strand
ccaauaacaaguacagcaa

SEQ ID NO: 703121 - RNA, 19 nt, Homo sapiens
  misc_RNA (1)...(19): siRNA sense strand
gucaaaccaauaacaagua

SEQ ID NO: 703122 - RNA, 19 nt, Homo sapiens
  misc_RNA (1)...(19): siRNA sense strand
gaucacugcucugaguaca

SEQ ID NO: 703123 - RNA, 19 nt, Homo sapiens
  misc_RNA (1)...(19): siRNA sense strand
ggagcaggagacaacauuu

SEQ ID NO: 703124 - RNA, 19 nt, Homo sapiens
  misc_RNA (1)...(19): siRNA sense strand
ugacccaagcuaugaaauu

SEQ ID NO: 703125 - RNA, 19 nt, Homo sapiens
  misc_RNA (1)...(19): siRNA sense strand
ccaaauggacagagguaug

SEQ ID NO: 703126 - RNA, 19 nt, Homo sapiens
  misc_RNA (1)...(19): siRNA sense strand
caauaacaaguacagcaaa

SEQ ID NO: 703127 - RNA, 19 nt, Homo sapiens
  misc_RNA (1)...(19): siRNA sense strand
gggagcaggagacaacauu

SEQ ID NO: 703128 - RNA, 19 nt, Homo sapiens
  misc_RNA (1)...(19): siRNA sense strand
ucaaagacgagaacgacaa

SEQ ID NO: 703129 - RNA, 19 nt, Homo sapiens
  misc_RNA (1)...(19): siRNA sense strand
ucaaaccaauaacaaguac

SEQ ID NO: 703130 - RNA, 19 nt, Homo sapiens
  misc_RNA (1)...(19): siRNA sense strand
cuaaugcaacugcgauuga

SEQ ID NO: 703131 - RNA, 19 nt, Homo sapiens
  misc_RNA (1)...(19): siRNA sense strand
agucggugguggagguuua

SEQ ID NO: 703132 - RNA, 19 nt, Homo sapiens
  misc_RNA (1)...(19): siRNA sense strand
gggacauccuggucaauac

SEQ ID NO: 703133 - RNA, 19 nt, Homo sapiens
  misc_RNA (1)...(19): siRNA sense strand
aaucuaagcagccucucua

SEQ ID NO: 703134 - RNA, 19 nt, Homo sapiens
  misc_RNA (1)...(19): siRNA sense strand
caacagcaugacaaaucua

SEQ ID NO: 703135 - RNA, 19 nt, Homo sapiens
  misc_RNA (1)...(19): siRNA sense strand
caagcuguuugaaauugau

SEQ ID NO: 703136 - RNA, 19 nt, Homo sapiens
  misc_RNA (1)...(19): siRNA sense strand
gcagagaugagccuguaca

SEQ ID NO: 703137 - RNA, 19 nt, Homo sapiens
  misc_RNA (1)...(19): siRNA sense strand
aaaguuaacgccaaagaca

SEQ ID NO: 703138 - RNA, 19 nt, Homo sapiens
  misc_RNA (1)...(19): siRNA sense strand
cgugauggaugcugacaag

SEQ ID NO: 703139 - RNA, 19 nt, Homo sapiens
  misc_RNA (1)...(19): siRNA sense strand
ucaaugcagaccugaacua

SEQ ID NO: 703140 - RNA, 19 nt, Homo sapiens
  misc_RNA (1)...(19): siRNA sense strand
gaccacauacacuuucaga

SEQ ID NO: 703141 - RNA, 19 nt, Homo sapiens
  misc_RNA (1)...(19): siRNA sense strand
ccauugaaauccgcaagau

SEQ ID NO: 703142 - RNA, 19 nt, Homo sapiens
  misc_RNA (1)...(19): siRNA sense strand
uggcaaggcauuacaaauc

SEQ ID NO: 703143 - RNA, 19 nt, Homo sapiens
  misc_RNA (1)...(19): siRNA sense strand
acugacagguaugaguuua

SEQ ID NO: 703144 - RNA, 19 nt, Homo sapiens
  misc_RNA (1)...(19): siRNA sense strand
ucacuguggaggcuucuaa

SEQ ID NO: 703145 - RNA, 19 nt, Homo sapiens
  misc_RNA (1)...(19): siRNA sense strand
gcugucaaaccaauaacaa

SEQ ID NO: 703146 - RNA, 19 nt, Homo sapiens
  misc_RNA (1)...(19): siRNA sense strand
gcaggagacaacauuucaa

SEQ ID NO: 703147 - RNA, 19 nt, Homo sapiens
  misc_RNA (1)...(19): siRNA sense strand
uaugauagugucaaugaga

SEQ ID NO: 703148 - RNA, 19 nt, Homo sapiens
  misc_RNA (1)...(19): siRNA sense strand
gacaacgugccguccauug

SEQ ID NO: 703149 - RNA, 19 nt, Homo sapiens
  misc_RNA (1)...(19): siRNA sense strand
cagagacucaguauuguca

SEQ ID NO: 703150 - RNA, 19 nt, Homo sapiens
  misc_RNA (1)...(19): siRNA sense strand
caaacagagacucaguauu

SEQ ID NO: 703151 - RNA, 19 nt, Homo sapiens
  misc_RNA (1)...(19): siRNA sense strand
augcagagaugagccugua

SEQ ID NO: 703152 - RNA, 19 nt, Homo sapiens
  misc_RNA (1)...(19): siRNA sense strand
gcuggacuccucugugaug

SEQ ID NO: 703153 - RNA, 19 nt, Homo sapiens
  misc_RNA (1)...(19): siRNA sense strand
agagaugagccuguacaua

SEQ ID NO: 703154 - RNA, 19 nt, Homo sapiens
  misc_RNA (1)...(19): siRNA sense strand
caggagacaacauuucaau

SEQ ID NO: 703155 - RNA, 19 nt, Homo sapiens
  misc_RNA (1)...(19): siRNA sense strand
cuaguggugugguuuccuu

SEQ ID NO: 703156 - RNA, 19 nt, Homo sapiens
  misc_RNA (1)...(19): siRNA sense strand
gcaacagacagugaugaug

SEQ ID NO: 703157 - RNA, 19 nt, Homo sapiens
  misc_RNA (1)...(19): siRNA sense strand
agacugacagguaugaguu

SEQ ID NO: 703158 - RNA, 19 nt, Homo sapiens
  misc_RNA (1)...(19): siRNA sense strand
acauacacuuucagaguca

SEQ ID NO: 703159 - RNA, 19 nt, Homo sapiens
  misc_RNA (1)...(19): siRNA sense strand
uagaggagaacaauaacau

SEQ ID NO: 703160 - RNA, 19 nt, Homo sapiens
  misc_RNA (1)...(19): siRNA sense strand
gacccaagcuaugaaauua

SEQ ID NO: 703161 - RNA, 19 nt, Homo sapiens
  misc_RNA (1)...(19): siRNA sense strand
ccagauagcuagaaguuug

SEQ ID NO: 703162 - RNA, 19 nt, Homo sapiens
  misc_RNA (1)...(19): siRNA sense strand
aaacagagacucaguauug

SEQ ID NO: 703163 - RNA, 19 nt, Homo sapiens
  misc_RNA (1)...(19): siRNA sense strand
gacaaugacccuaaguuua

SEQ ID NO: 703164 - RNA, 19 nt, Homo sapiens
  misc_RNA (1)...(19): siRNA sense strand
ggacagagguaugauagug

SEQ ID NO: 703165 - RNA, 19 nt, Homo sapiens
  misc_RNA (1)...(19): siRNA sense strand
ggagacaacauuucaauug

SEQ ID NO: 703166 - RNA, 19 nt, Homo sapiens
  misc_RNA (1)...(19): siRNA sense strand
gagaugagccuguacauag

SEQ ID NO: 703167 - RNA, 19 nt, Homo sapiens
  misc_RNA (1)...(19): siRNA sense strand
gaccugaacuacagcauug

SEQ ID NO: 703168 - RNA, 19 nt, Homo sapiens
  misc_RNA (1)...(19): siRNA sense strand
gaggagaacaauaacauuu

SEQ ID NO: 703169 - RNA, 19 nt, Homo sapiens
  misc_RNA (1)...(19): siRNA sense strand
ugacaaugcucccacaguu

SEQ ID NO: 703170 - RNA, 19 nt, Homo sapiens
  misc_RNA (1)...(19): siRNA sense strand
gcacguguuugucaaugaa

SEQ ID NO: 703171 - RNA, 19 nt, Homo sapiens
  misc_RNA (1)...(19): siRNA sense strand
gggaacaucagaccacaua

SEQ ID NO: 703172 - RNA, 19 nt, Homo sapiens
  misc_RNA (1)...(19): siRNA sense strand
guacagcugucaaaccaau

SEQ ID NO: 703173 - RNA, 19 nt, Homo sapiens
  misc_RNA (1)...(19): siRNA sense strand
gcaaggcauuacaaaucua

SEQ ID NO: 703174 - RNA, 19 nt, Homo sapiens
  misc_RNA (1)...(19): siRNA sense strand
ugacagguaugaguuuaaa

SEQ ID NO: 703175 - RNA, 19 nt, Homo sapiens
  misc_RNA (1)...(19): siRNA sense strand
gcgauugacucccagauag

SEQ ID NO: 703176 - RNA, 19 nt, Homo sapiens
  misc_RNA (1)...(19): siRNA sense strand
gcaaacagagacucaguau

SEQ ID NO: 703177 - RNA, 19 nt, Homo sapiens
  misc_RNA (1)...(19): siRNA sense strand
gagacaacauuucaauugg

SEQ ID NO: 703178 - RNA, 19 nt, Homo sapiens
  misc_RNA (1)...(19): siRNA sense strand
gagcaacaacucccugauu

SEQ ID NO: 703179 - RNA, 19 nt, Homo sapiens
  misc_RNA (1)...(19): siRNA sense strand
gaguacagcugucaaacca

SEQ ID NO: 703180 - RNA, 19 nt, Homo sapiens
  misc_RNA (1)...(19): siRNA sense strand
gguaugauagugucaauga

SEQ ID NO: 703181 - RNA, 19 nt, Homo sapiens
  misc_RNA (1)...(19): siRNA sense strand
gaaaucccuucaagcuguu

SEQ ID NO: 703182 - RNA, 19 nt, Homo sapiens
  misc_RNA (1)...(19): siRNA sense strand
acaaugacccuaaguuuau

SEQ ID NO: 703183 - RNA, 19 nt, Homo sapiens
  misc_RNA (1)...(19): siRNA sense strand
gacaaugcucccacaguua

SEQ ID NO: 703184 - RNA, 19 nt, Homo sapiens
  misc_RNA (1)...(19): siRNA sense strand
ugacaaugacccuaaguuu

SEQ ID NO: 703185 - RNA, 19 nt, Homo sapiens
  misc_RNA (1)...(19): siRNA sense strand
gaaauugaucccacuagug

SEQ ID NO: 703186 - RNA, 19 nt, Homo sapiens
  misc_RNA (1)...(19): siRNA sense strand
gagguuuacuucccugaga

SEQ ID NO: 703187 - RNA, 19 nt, Homo sapiens
  misc_RNA (1)...(19): siRNA sense strand
gagacucaguauugucauu

SEQ ID NO: 703188 - RNA, 19 nt, Homo sapiens
  misc_RNA (1)...(19): siRNA sense strand
gaacaucagaccacauaca

SEQ ID NO: 703189 - RNA, 19 nt, Homo sapiens
  misc_RNA (1)...(19): siRNA sense strand
acauagaggagaacaauaa

SEQ ID NO: 703190 - RNA, 19 nt, Homo sapiens
  misc_RNA (1)...(19): siRNA sense strand
gcagaucgaauacguguuc

SEQ ID NO: 703191 - RNA, 19 nt, Homo sapiens
  misc_RNA (1)...(19): siRNA sense strand
caaauggacagagguauga

SEQ ID NO: 703192 - RNA, 19 nt, Homo sapiens
  misc_RNA (1)...(19): siRNA sense strand
gacaacauuucaauuggau

SEQ ID NO: 703193 - RNA, 19 nt, Homo sapiens
  misc_RNA (1)...(19): siRNA sense strand
ucaacgggcagaucgaaua

SEQ ID NO: 703194 - RNA, 19 nt, Homo sapiens
  misc_RNA (1)...(19): siRNA sense strand
ggcaaggcauuacaaaucu

SEQ ID NO: 703195 - RNA, 19 nt, Homo sapiens
  misc_RNA (1)...(19): siRNA sense strand
ccacauacacuuucagagu

SEQ ID NO: 703196 - RNA, 19 nt, Homo sapiens
  misc_RNA (1)...(19): siRNA sense strand
guacauagaggagaacaau

SEQ ID NO: 703197 - RNA, 19 nt, Homo sapiens
  misc_RNA (1)...(19): siRNA sense strand
gcaggacgucuucaccuuu

SEQ ID NO: 703198 - RNA, 19 nt, Homo sapiens
  misc_RNA (1)...(19): siRNA sense strand
gggcagcacuacggugauu

SEQ ID NO: 703199 - RNA, 19 nt, Homo sapiens
  misc_RNA (1)...(19): siRNA sense strand
gcgagcagacugacaggua

SEQ ID NO: 703200 - RNA, 19 nt, Homo sapiens
  misc_RNA (1)...(19): siRNA sense strand
caacgugccguccauugaa

SEQ ID NO: 703201 - RNA, 19 nt, Homo sapiens
  misc_RNA (1)...(19): siRNA sense strand
agacaacauuucaauugga

SEQ ID NO: 703202 - RNA, 19 nt, Homo sapiens
  misc_RNA (1)...(19): siRNA sense strand
ucgcuggacuccucuguga

SEQ ID NO: 703203 - RNA, 19 nt, Homo sapiens
  misc_RNA (1)...(19): siRNA sense strand
ucaaugagaagcugucaga

SEQ ID NO: 703204 - RNA, 19 nt, Homo sapiens
  misc_RNA (1)...(19): siRNA sense strand
gaggaaaucccuucaagcu

SEQ ID NO: 703205 - RNA, 19 nt, Homo sapiens
  misc_RNA (1)...(19): siRNA sense strand
cgagcagacugacagguau

SEQ ID NO: 703206 - RNA, 19 nt, Homo sapiens
  misc_RNA (1)...(19): siRNA sense strand
ggaguccgguuccgaguac

SEQ ID NO: 703207 - RNA, 19 nt, Homo sapiens
  misc_RNA (1)...(19): siRNA sense strand
ccgaguaccugaagaucga

SEQ ID NO: 703208 - RNA, 19 nt, Homo sapiens
  misc_RNA (1)...(19): siRNA sense strand
ccaacagcaugacaaaucu

SEQ ID NO: 703209 - RNA, 19 nt, Homo sapiens
  misc_RNA (1)...(19): siRNA sense strand
ugaaauugaucccacuagu

SEQ ID NO: 703210 - RNA, 19 nt, Homo sapiens
  misc_RNA (1)...(19): siRNA sense strand
gaucgggugaggugacuuu

SEQ ID NO: 703211 - RNA, 19 nt, Homo sapiens
  misc_RNA (1)...(19): siRNA sense strand
caucagaccacauacacuu

SEQ ID NO: 703212 - RNA, 19 nt, Homo sapiens
  misc_RNA (1)...(19): siRNA sense strand
gagguaugauagugucaau

SEQ ID NO: 703213 - RNA, 19 nt, Homo sapiens
  misc_RNA (1)...(19): siRNA sense strand
agcaacaacucccugauug

SEQ ID NO: 703214 - RNA, 19 nt, Homo sapiens
  misc_RNA (1)...(19): siRNA sense strand
caacauuucaauuggauca

SEQ ID NO: 703215 - RNA, 19 nt, Homo sapiens
  misc_RNA (1)...(19): siRNA sense strand
gagcuggguggaccuguuu

SEQ ID NO: 703216 - RNA, 19 nt, Homo sapiens
  misc_RNA (1)...(19): siRNA sense strand
gaagaucgacaaccucacu

SEQ ID NO: 703217 - RNA, 19 nt, Homo sapiens
  misc_RNA (1)...(19): siRNA sense strand
gagcaggagacaacauuuc

SEQ ID NO: 703218 - RNA, 19 nt, Homo sapiens
  misc_RNA (1)...(19): siRNA sense strand
agaugagccuguacauaga

SEQ ID NO: 703219 - RNA, 19 nt, Homo sapiens
  misc_RNA (1)...(19): siRNA sense strand
caaugacccuaaguuuaug

SEQ ID NO: 703220 - RNA, 19 nt, Homo sapiens
  misc_RNA (1)...(19): siRNA sense strand
ccaauaacaaguacagcaa

SEQ ID NO: 703221 - RNA, 19 nt, Homo sapiens
  misc_RNA (1)...(19): siRNA sense strand
gucaaaccaauaacaagua

SEQ ID NO: 703222 - RNA, 19 nt, Homo sapiens
  misc_RNA (1)...(19): siRNA sense strand
gaucacugcucugaguaca

SEQ ID NO: 703223 - RNA, 19 nt, Homo sapiens
  misc_RNA (1)...(19): siRNA sense strand
ggagcaggagacaacauuu

SEQ ID NO: 703224 - RNA, 19 nt, Homo sapiens
  misc_RNA (1)...(19): siRNA sense strand
ugacccaagcuaugaaauu

SEQ ID NO: 703225 - RNA, 19 nt, Homo sapiens
  misc_RNA (1)...(19): siRNA sense strand
ccaaauggacagagguaug

SEQ ID NO: 703226 - RNA, 19 nt, Homo sapiens
  misc_RNA (1)...(19): siRNA sense strand
caauaacaaguacagcaaa

SEQ ID NO: 703227 - RNA, 19 nt, Homo sapiens
  misc_RNA (1)...(19): siRNA sense strand
gggagcaggagacaacauu

SEQ ID NO: 703228 - RNA, 19 nt, Homo sapiens
  misc_RNA (1)...(19): siRNA sense strand
ucaaagacgagaacgacaa

SEQ ID NO: 703229 - RNA, 19 nt, Homo sapiens
  misc_RNA (1)...(19): siRNA sense strand
ucaaaccaauaacaaguac

SEQ ID NO: 703230 - RNA, 19 nt, Homo sapiens
  misc_RNA (1)...(19): siRNA sense strand
cuaaugcaacugcgauuga

SEQ ID NO: 703231 - RNA, 19 nt, Homo sapiens
  misc_RNA (1)...(19): siRNA sense strand
agucggugguggagguuua

SEQ ID NO: 703232 - RNA, 19 nt, Homo sapiens
  misc_RNA (1)...(19): siRNA sense strand
gggacauccuggucaauac

SEQ ID NO: 703233 - RNA, 19 nt, Homo sapiens
  misc_RNA (1)...(19): siRNA sense strand
aaucuaagcagccucucua

SEQ ID NO: 703234 - RNA, 19 nt, Homo sapiens
  misc_RNA (1)...(19): siRNA sense strand
caacagcaugacaaaucua

SEQ ID NO: 703235 - RNA, 19 nt, Homo sapiens
  misc_RNA (1)...(19): siRNA sense strand
caagcuguuugaaauugau

SEQ ID NO: 703236 - RNA, 19 nt, Homo sapiens
  misc_RNA (1)...(19): siRNA sense strand
gcagagaugagccuguaca

SEQ ID NO: 703237 - RNA, 19 nt, Homo sapiens
  misc_RNA (1)...(19): siRNA sense strand
aaaguuaacgccaaagaca

SEQ ID NO: 703238 - RNA, 19 nt, Homo sapiens
  misc_RNA (1)...(19): siRNA sense strand
cgugauggaugcugacaag

SEQ ID NO: 703239 - RNA, 19 nt, Homo sapiens
  misc_RNA (1)...(19): siRNA sense strand
ucaaugcagaccugaacua

SEQ ID NO: 703240 - RNA, 19 nt, Homo sapiens
  misc_RNA (1)...(19): siRNA sense strand
gaccacauacacuuucaga

SEQ ID NO: 703241 - RNA, 19 nt, Homo sapiens
  misc_RNA (1)...(19): siRNA sense strand
ccauugaaauccgcaagau

SEQ ID NO: 703242 - RNA, 19 nt, Homo sapiens
  misc_RNA (1)...(19): siRNA sense strand
uggcaaggcauuacaaauc

SEQ ID NO: 703243 - RNA, 19 nt, Homo sapiens
  misc_RNA (1)...(19): siRNA sense strand
acugacagguaugaguuua

SEQ ID NO: 703244 - RNA, 19 nt, Homo sapiens
  misc_RNA (1)...(19): siRNA sense strand
ucacuguggaggcuucuaa

SEQ ID NO: 703245 - RNA, 19 nt, Homo sapiens
  misc_RNA (1)...(19): siRNA sense strand
gcugucaaaccaauaacaa

SEQ ID NO: 703246 - RNA, 19 nt, Homo sapiens
  misc_RNA (1)...(19): siRNA sense strand
gcaggagacaacauuucaa

SEQ ID NO: 703247 - RNA, 19 nt, Homo sapiens
  misc_RNA (1)...(19): siRNA sense strand
uaugauagugucaaugaga

SEQ ID NO: 703248 - RNA, 19 nt, Homo sapiens
  misc_RNA (1)...(19): siRNA sense strand
gacaacgugccguccauug

SEQ ID NO: 703249 - RNA, 19 nt, Homo sapiens
  misc_RNA (1)...(19): siRNA sense strand
cagagacucaguauuguca

SEQ ID NO: 703250 - RNA, 19 nt, Homo sapiens
  misc_RNA (1)...(19): siRNA sense strand
caaacagagacucaguauu

SEQ ID NO: 703251 - RNA, 19 nt, Homo sapiens
  misc_RNA (1)...(19): siRNA sense strand
augcagagaugagccugua

SEQ ID NO: 703252 - RNA, 19 nt, Homo sapiens
  misc_RNA (1)...(19): siRNA sense strand
gcuggacuccucugugaug

SEQ ID NO: 703253 - RNA, 19 nt, Homo sapiens
  misc_RNA (1)...(19): siRNA sense strand
agagaugagccuguacaua

SEQ ID NO: 703254 - RNA, 19 nt, Homo sapiens
  misc_RNA (1)...(19): siRNA sense strand
caggagacaacauuucaau

SEQ ID NO: 703255 - RNA, 19 nt, Homo sapiens
  misc_RNA (1)...(19): siRNA sense strand
cuaguggugugguuuccuu

SEQ ID NO: 703256 - RNA, 19 nt, Homo sapiens
  misc_RNA (1)...(19): siRNA sense strand
gcaacagacagugaugaug

SEQ ID NO: 703257 - RNA, 19 nt, Homo sapiens
  misc_RNA (1)...(19): siRNA sense strand
agacugacagguaugaguu

SEQ ID NO: 703258 - RNA, 19 nt, Homo sapiens
  misc_RNA (1)...(19): siRNA sense strand
acauacacuuucagaguca

SEQ ID NO: 703259 - RNA, 19 nt, Homo sapiens
  misc_RNA (1)...(19): siRNA sense strand
uagaggagaacaauaacau

SEQ ID NO: 703260 - RNA, 19 nt, Homo sapiens
  misc_RNA (1)...(19): siRNA sense strand
gaaacgagcgucagccuua

SEQ ID NO: 703261 - RNA, 19 nt, Homo sapiens
  misc_RNA (1)...(19): siRNA sense strand
gcagggagauggaggauga

SEQ ID NO: 703262 - RNA, 19 nt, Homo sapiens
  misc_RNA (1)...(19): siRNA sense strand
ggacaaagcucagggaucu

SEQ ID NO: 703263 - RNA, 19 nt, Homo sapiens
  misc_RNA (1)...(19): siRNA sense strand
ugacugcccugccuccuuu

SEQ ID NO: 703264 - RNA, 19 nt, Homo sapiens
  misc_RNA (1)...(19): siRNA sense strand
ggucagggcugcagguaca

SEQ ID NO: 703265 - RNA, 19 nt, Homo sapiens
  misc_RNA (1)...(19): siRNA sense strand
ucacuacccugcucacuag

SEQ ID NO: 703266 - RNA, 19 nt, Homo sapiens
  misc_RNA (1)...(19): siRNA sense strand
cagccuuacucaauuugua

SEQ ID NO: 703267 - RNA, 19 nt, Homo sapiens
  misc_RNA (1)...(19): siRNA sense strand
ggaugaugcucccuaugau

SEQ ID NO: 703268 - RNA, 19 nt, Homo sapiens
  misc_RNA (1)...(19): siRNA sense strand
cgucagccuuacucaauuu

SEQ ID NO: 703269 - RNA, 19 nt, Homo sapiens
  misc_RNA (1)...(19): siRNA sense strand
cagcaggacaccacaauga

SEQ ID NO: 703270 - RNA, 19 nt, Homo sapiens
  misc_RNA (1)...(19): siRNA sense strand
gagaugccuuggaggucua

SEQ ID NO: 703271 - RNA, 19 nt, Homo sapiens
  misc_RNA (1)...(19): siRNA sense strand
gagauggugcaguguguaa

SEQ ID NO: 703272 - RNA, 19 nt, Homo sapiens
  misc_RNA (1)...(19): siRNA sense strand
ccacugugcuggcugucaa

SEQ ID NO: 703273 - RNA, 19 nt, Homo sapiens
  misc_RNA (1)...(19): siRNA sense strand
gcgucagccuuacucaauu

SEQ ID NO: 703274 - RNA, 19 nt, Homo sapiens
  misc_RNA (1)...(19): siRNA sense strand
gcucaucgccugguguuug

SEQ ID NO: 703275 - RNA, 19 nt, Homo sapiens
  misc_RNA (1)...(19): siRNA sense strand
guaugaagcacccgaggaa

SEQ ID NO: 703276 - RNA, 19 nt, Homo sapiens
  misc_RNA (1)...(19): siRNA sense strand
caggacaccacaaugagua

SEQ ID NO: 703277 - RNA, 19 nt, Homo sapiens
  misc_RNA (1)...(19): siRNA sense strand
cuccugaccucaucuacaa

SEQ ID NO: 703278 - RNA, 19 nt, Homo sapiens
  misc_RNA (1)...(19): siRNA sense strand
ggugcaguguguaacagaa

SEQ ID NO: 703279 - RNA, 19 nt, Homo sapiens
  misc_RNA (1)...(19): siRNA sense strand
cgaggaguaugacuauguc

SEQ ID NO: 703280 - RNA, 19 nt, Homo sapiens
  misc_RNA (1)...(19): siRNA sense strand
gaugaugcucccuaugaug

SEQ ID NO: 703281 - RNA, 19 nt, Homo sapiens
  misc_RNA (1)...(19): siRNA sense strand
ccaguacccaggcuaauca

SEQ ID NO: 703282 - RNA, 19 nt, Homo sapiens
  misc_RNA (1)...(19): siRNA sense strand
ccuuggaggucuacgaugu

SEQ ID NO: 703283 - RNA, 19 nt, Homo sapiens
  misc_RNA (1)...(19): siRNA sense strand
gcaggacaccacaaugagu

SEQ ID NO: 703284 - RNA, 19 nt, Homo sapiens
  misc_RNA (1)...(19): siRNA sense strand
gagaucugcagcuccugua

SEQ ID NO: 703285 - RNA, 19 nt, Homo sapiens
  misc_RNA (1)...(19): siRNA sense strand
aggaugaugcucccuauga

SEQ ID NO: 703286 - RNA, 19 nt, Homo sapiens
  misc_RNA (1)...(19): siRNA sense strand
agaggaugaugcucccuau

SEQ ID NO: 703287 - RNA, 19 nt, Homo sapiens
  misc_RNA (1)...(19): siRNA sense strand
ugaagggcauggacaaagc

SEQ ID NO: 703288 - RNA, 19 nt, Homo sapiens
  misc_RNA (1)...(19): siRNA sense strand
gagccuuggccucccauga

SEQ ID NO: 703289 - RNA, 19 nt, Homo sapiens
  misc_RNA (1)...(19): siRNA sense strand
gcccugccauccaagagau

SEQ ID NO: 703290 - RNA, 19 nt, Homo sapiens
  misc_RNA (1)...(19): siRNA sense strand
aagagauggugcagugugu

SEQ ID NO: 703291 - RNA, 19 nt, Homo sapiens
  misc_RNA (1)...(19): siRNA sense strand
gagcgucagccuuacucaa

SEQ ID NO: 703292 - RNA, 19 nt, Homo sapiens
  misc_RNA (1)...(19): siRNA sense strand
ggccgaggaguaugacuau

SEQ ID NO: 703293 - RNA, 19 nt, Homo sapiens
  misc_RNA (1)...(19): siRNA sense strand
ccgccugccugguuaugga

SEQ ID NO: 703294 - RNA, 19 nt, Homo sapiens
  misc_RNA (1)...(19): siRNA sense strand
gauggugcaguguguaaca

SEQ ID NO: 703295 - RNA, 19 nt, Homo sapiens
  misc_RNA (1)...(19): siRNA sense strand
ccgaggaguaugacuaugu

SEQ ID NO: 703296 - RNA, 19 nt, Homo sapiens
  misc_RNA (1)...(19): siRNA sense strand
gcagcuccuguacuucuau

SEQ ID NO: 703297 - RNA, 19 nt, Homo sapiens
  misc_RNA (1)...(19): siRNA sense strand
gcagcccugauguccagua

SEQ ID NO: 703298 - RNA, 19 nt, Homo sapiens
  misc_RNA (1)...(19): siRNA sense strand
gaaacgagcgucagccuua

SEQ ID NO: 703299 - RNA, 19 nt, Homo sapiens
  misc_RNA (1)...(19): siRNA sense strand
gcagggagauggaggauga

SEQ ID NO: 703300 - RNA, 19 nt, Homo sapiens
  misc_RNA (1)...(19): siRNA sense strand
ggacaaagcucagggaucu

SEQ ID NO: 703301 - RNA, 19 nt, Homo sapiens
  misc_RNA (1)...(19): siRNA sense strand
ugacugcccugccuccuuu

SEQ ID NO: 703302 - RNA, 19 nt, Homo sapiens
  misc_RNA (1)...(19): siRNA sense strand
ggucagggcugcagguaca

SEQ ID NO: 703303 - RNA, 19 nt, Homo sapiens
  misc_RNA (1)...(19): siRNA sense strand
ucacuacccugcucacuag

SEQ ID NO: 703304 - RNA, 19 nt, Homo sapiens
  misc_RNA (1)...(19): siRNA sense strand
cagccuuacucaauuugua

SEQ ID NO: 703305 - RNA, 19 nt, Homo sapiens
  misc_RNA (1)...(19): siRNA sense strand
ggaugaugcucccuaugau

SEQ ID NO: 703306 - RNA, 19 nt, Homo sapiens
  misc_RNA (1)...(19): siRNA sense strand
cgucagccuuacucaauuu

SEQ ID NO: 703307 - RNA, 19 nt, Homo sapiens
  misc_RNA (1)...(19): siRNA sense strand
cagcaggacaccacaauga

SEQ ID NO: 703308 - RNA, 19 nt, Homo sapiens
  misc_RNA (1)...(19): siRNA sense strand
gagaugccuuggaggucua

SEQ ID NO: 703309 - RNA, 19 nt, Homo sapiens
  misc_RNA (1)...(19): siRNA sense strand
gagauggugcaguguguaa

SEQ ID NO: 703310 - RNA, 19 nt, Homo sapiens
  misc_RNA (1)...(19): siRNA sense strand
ccacugugcuggcugucaa

SEQ ID NO: 703311 - RNA, 19 nt, Homo sapiens
  misc_RNA (1)...(19): siRNA sense strand
gcgucagccuuacucaauu

SEQ ID NO: 703312 - RNA, 19 nt, Homo sapiens
  misc_RNA (1)...(19): siRNA sense strand
gcucaucgccugguguuug

SEQ ID NO: 703313 - RNA, 19 nt, Homo sapiens
  misc_RNA (1)...(19): siRNA sense strand
guaugaagcacccgaggaa

SEQ ID NO: 703314 - RNA, 19 nt, Homo sapiens
  misc_RNA (1)...(19): siRNA sense strand
caggacaccacaaugagua

SEQ ID NO: 703315 - RNA, 19 nt, Homo sapiens
  misc_RNA (1)...(19): siRNA sense strand
cuccugaccucaucuacaa

SEQ ID NO: 703316 - RNA, 19 nt, Homo sapiens
  misc_RNA (1)...(19): siRNA sense strand
ggugcaguguguaacagaa

SEQ ID NO: 703317 - RNA, 19 nt, Homo sapiens
  misc_RNA (1)...(19): siRNA sense strand
cgaggaguaugacuauguc

SEQ ID NO: 703318 - RNA, 19 nt, Homo sapiens
  misc_RNA (1)...(19): siRNA sense strand
gaugaugcucccuaugaug

SEQ ID NO: 703319 - RNA, 19 nt, Homo sapiens
  misc_RNA (1)...(19): siRNA sense strand
ccaguacccaggcuaauca

SEQ ID NO: 703320 - RNA, 19 nt, Homo sapiens
  misc_RNA (1)...(19): siRNA sense strand
ccuuggaggucuacgaugu

SEQ ID NO: 703321 - RNA, 19 nt, Homo sapiens
  misc_RNA (1)...(19): siRNA sense strand
gcaggacaccacaaugagu

SEQ ID NO: 703322 - RNA, 19 nt, Homo sapiens
  misc_RNA (1)...(19): siRNA sense strand
gagaucugcagcuccugua

SEQ ID NO: 703323 - RNA, 19 nt, Homo sapiens
  misc_RNA (1)...(19): siRNA sense strand
aggaugaugcucccuauga

SEQ ID NO: 703324 - RNA, 19 nt, Homo sapiens
  misc_RNA (1)...(19): siRNA sense strand
agaggaugaugcucccuau

SEQ ID NO: 703325 - RNA, 19 nt, Homo sapiens
  misc_RNA (1)...(19): siRNA sense strand
ugaagggcauggacaaagc

SEQ ID NO: 703326 - RNA, 19 nt, Homo sapiens
  misc_RNA (1)...(19): siRNA sense strand
gagccuuggccucccauga

SEQ ID NO: 703327 - RNA, 19 nt, Homo sapiens
  misc_RNA (1)...(19): siRNA sense strand
gcccugccauccaagagau

SEQ ID NO: 703328 - RNA, 19 nt, Homo sapiens
  misc_RNA (1)...(19): siRNA sense strand
aagagauggugcagugugu

SEQ ID NO: 703329 - RNA, 19 nt, Homo sapiens
  misc_RNA (1)...(19): siRNA sense strand
gagcgucagccuuacucaa

SEQ ID NO: 703330 - RNA, 19 nt, Homo sapiens
  misc_RNA (1)...(19): siRNA sense strand
ggccgaggaguaugacuau

SEQ ID NO: 703331 - RNA, 19 nt, Homo sapiens
  misc_RNA (1)...(19): siRNA sense strand
ccgccugccugguuaugga

SEQ ID NO: 703332 - RNA, 19 nt, Homo sapiens
  misc_RNA (1)...(19): siRNA sense strand
gauggugcaguguguaaca

SEQ ID NO: 703333 - RNA, 19 nt, Homo sapiens
  misc_RNA (1)...(19): siRNA sense strand
ccgaggaguaugacuaugu

SEQ ID NO: 703334 - RNA, 19 nt, Homo sapiens
  misc_RNA (1)...(19): siRNA sense strand
gcagcuccuguacuucuau

SEQ ID NO: 703335 - RNA, 19 nt, Homo sapiens
  misc_RNA (1)...(19): siRNA sense strand
gcagcccugauguccagua

SEQ ID NO: 703336 - RNA, 19 nt, Homo sapiens
  misc_RNA (1)...(19): siRNA sense strand
gcaaagaggucagagaaaa

SEQ ID NO: 703337 - RNA, 19 nt, Homo sapiens
  misc_RNA (1)...(19): siRNA sense strand
ggaaccggauuacgugaau

SEQ ID NO: 703338 - RNA, 19 nt, Homo sapiens
  misc_RNA (1)...(19): siRNA sense strand
aggacaagcuguugcaauu

SEQ ID NO: 703339 - RNA, 19 nt, Homo sapiens
  misc_RNA (1)...(19): siRNA sense strand
gaacucagcauccauccau

SEQ ID NO: 703340 - RNA, 19 nt, Homo sapiens
  misc_RNA (1)...(19): siRNA sense strand
uaccagaacuucagcaaag

SEQ ID NO: 703341 - RNA, 19 nt, Homo sapiens
  misc_RNA (1)...(19): siRNA sense strand
gacaagcuguugcaauucu

SEQ ID NO: 703342 - RNA, 19 nt, Homo sapiens
  misc_RNA (1)...(19): siRNA sense strand
gugcaaagaggucagagaa

SEQ ID NO: 703343 - RNA, 19 nt, Homo sapiens
  misc_RNA (1)...(19): siRNA sense strand
caaggaaggacaagcuguu

SEQ ID NO: 703344 - RNA, 19 nt, Homo sapiens
  misc_RNA (1)...(19): siRNA sense strand
gaggaccaacagagcuuua

SEQ ID NO: 703345 - RNA, 19 nt, Homo sapiens
  misc_RNA (1)...(19): siRNA sense strand
gaaccggauuacgugaaug

SEQ ID NO: 703346 - RNA, 19 nt, Homo sapiens
  misc_RNA (1)...(19): siRNA sense strand
ggaaggacaagcuguugca

SEQ ID NO: 703347 - RNA, 19 nt, Homo sapiens
  misc_RNA (1)...(19): siRNA sense strand
uaucagaacucagcaucca

SEQ ID NO: 703348 - RNA, 19 nt, Homo sapiens
  misc_RNA (1)...(19): siRNA sense strand
guaccagaacuucagcaaa

SEQ ID NO: 703349 - RNA, 19 nt, Homo sapiens
  misc_RNA (1)...(19): siRNA sense strand
ggacaagcuguugcaauuc

SEQ ID NO: 703350 - RNA, 19 nt, Homo sapiens
  misc_RNA (1)...(19): siRNA sense strand
acaagcuguugcaauucua

SEQ ID NO: 703351 - RNA, 19 nt, Homo sapiens
  misc_RNA (1)...(19): siRNA sense strand
gaaaaucuaccagcagaga

SEQ ID NO: 703352 - RNA, 19 nt, Homo sapiens
  misc_RNA (1)...(19): siRNA sense strand
gacauggcacccacaagga

SEQ ID NO: 703353 - RNA, 19 nt, Homo sapiens
  misc_RNA (1)...(19): siRNA sense strand
gggcaacuccagagagaag

SEQ ID NO: 703354 - RNA, 19 nt, Homo sapiens
  misc_RNA (1)...(19): siRNA sense strand
gcagaaaaccacagagaca

SEQ ID NO: 703355 - RNA, 19 nt, Homo sapiens
  misc_RNA (1)...(19): siRNA sense strand
gaaggacaagcuguugcaa

SEQ ID NO: 703356 - RNA, 19 nt, Homo sapiens
  misc_RNA (1)...(19): siRNA sense strand
ccacaaggaaggacaagcu

SEQ ID NO: 703357 - RNA, 19 nt, Homo sapiens
  misc_RNA (1)...(19): siRNA sense strand
gggaaccggauuacgugaa

SEQ ID NO: 703358 - RNA, 19 nt, Homo sapiens
  misc_RNA (1)...(19): siRNA sense strand
gccugucacuggcccugaa

SEQ ID NO: 703359 - RNA, 19 nt, Homo sapiens
  misc_RNA (1)...(19): siRNA sense strand
cggaagaagaugaggaauc

SEQ ID NO: 703360 - RNA, 19 nt, Homo sapiens
  misc_RNA (1)...(19): siRNA sense strand
caucuuccagguaccagaa

SEQ ID NO: 703361 - RNA, 19 nt, Homo sapiens
  misc_RNA (1)...(19): siRNA sense strand
gcaaagaggucagagaaaa

SEQ ID NO: 703362 - RNA, 19 nt, Homo sapiens
  misc_RNA (1)...(19): siRNA sense strand
ggaaccggauuacgugaau

SEQ ID NO: 703363 - RNA, 19 nt, Homo sapiens
  misc_RNA (1)...(19): siRNA sense strand
aggacaagcuguugcaauu

SEQ ID NO: 703364 - RNA, 19 nt, Homo sapiens
  misc_RNA (1)...(19): siRNA sense strand
gaacucagcauccauccau

SEQ ID NO: 703365 - RNA, 19 nt, Homo sapiens
  misc_RNA (1)...(19): siRNA sense strand
uaccagaacuucagcaaag

SEQ ID NO: 703366 - RNA, 19 nt, Homo sapiens
  misc_RNA (1)...(19): siRNA sense strand
gacaagcuguugcaauucu

SEQ ID NO: 703367 - RNA, 19 nt, Homo sapiens
  misc_RNA (1)...(19): siRNA sense strand
gugcaaagaggucagagaa

SEQ ID NO: 703368 - RNA, 19 nt, Homo sapiens
  misc_RNA (1)...(19): siRNA sense strand
caaggaaggacaagcuguu

SEQ ID NO: 703369 - RNA, 19 nt, Homo sapiens
  misc_RNA (1)...(19): siRNA sense strand
gaggaccaacagagcuuua

SEQ ID NO: 703370 - RNA, 19 nt, Homo sapiens
  misc_RNA (1)...(19): siRNA sense strand
gaaccggauuacgugaaug

SEQ ID NO: 703371 - RNA, 19 nt, Homo sapiens
  misc_RNA (1)...(19): siRNA sense strand
ggaaggacaagcuguugca

SEQ ID NO: 703372 - RNA, 19 nt, Homo sapiens
  misc_RNA (1)...(19): siRNA sense strand
uaucagaacucagcaucca

SEQ ID NO: 703373 - RNA, 19 nt, Homo sapiens
  misc_RNA (1)...(19): siRNA sense strand
guaccagaacuucagcaaa

SEQ ID NO: 703374 - RNA, 19 nt, Homo sapiens
  misc_RNA (1)...(19): siRNA sense strand
ggacaagcuguugcaauuc

SEQ ID NO: 703375 - RNA, 19 nt, Homo sapiens
  misc_RNA (1)...(19): siRNA sense strand
acaagcuguugcaauucua

SEQ ID NO: 703376 - RNA, 19 nt, Homo sapiens
  misc_RNA (1)...(19): siRNA sense strand
gaaaaucuaccagcagaga

SEQ ID NO: 703377 - RNA, 19 nt, Homo sapiens
  misc_RNA (1)...(19): siRNA sense strand
gacauggcacccacaagga

SEQ ID NO: 703378 - RNA, 19 nt, Homo sapiens
  misc_RNA (1)...(19): siRNA sense strand
gggcaacuccagagagaag

SEQ ID NO: 703379 - RNA, 19 nt, Homo sapiens
  misc_RNA (1)...(19): siRNA sense strand
gcagaaaaccacagagaca

SEQ ID NO: 703380 - RNA, 19 nt, Homo sapiens
  misc_RNA (1)...(19): siRNA sense strand
gaaggacaagcuguugcaa

SEQ ID NO: 703381 - RNA, 19 nt, Homo sapiens
  misc_RNA (1)...(19): siRNA sense strand
ccacaaggaaggacaagcu

SEQ ID NO: 703382 - RNA, 19 nt, Homo sapiens
  misc_RNA (1)...(19): siRNA sense strand
gggaaccggauuacgugaa

SEQ ID NO: 703383 - RNA, 19 nt, Homo sapiens
  misc_RNA (1)...(19): siRNA sense strand
gccugucacuggcccugaa

SEQ ID NO: 703384 - RNA, 19 nt, Homo sapiens
  misc_RNA (1)...(19): siRNA sense strand
cggaagaagaugaggaauc

SEQ ID NO: 703385 - RNA, 19 nt, Homo sapiens
  misc_RNA (1)...(19): siRNA sense strand
caucuuccagguaccagaa

SEQ ID NO: 703386 - RNA, 19 nt, Homo sapiens
  misc_RNA (1)...(19): siRNA sense strand
gcaaagaggucagagaaaa

SEQ ID NO: 703387 - RNA, 19 nt, Homo sapiens
  misc_RNA (1)...(19): siRNA sense strand
ggaaccggauuacgugaau

SEQ ID NO: 703388 - RNA, 19 nt, Homo sapiens
  misc_RNA (1)...(19): siRNA sense strand
aggacaagcuguugcaauu

SEQ ID NO: 703389 - RNA, 19 nt, Homo sapiens
  misc_RNA (1)...(19): siRNA sense strand
gaacucagcauccauccau

SEQ ID NO: 703390 - RNA, 19 nt, Homo sapiens
  misc_RNA (1)...(19): siRNA sense strand
uaccagaacuucagcaaag

SEQ ID NO: 703391 - RNA, 19 nt, Homo sapiens
  misc_RNA (1)...(19): siRNA sense strand
gacaagcuguugcaauucu

SEQ ID NO: 703392 - RNA, 19 nt, Homo sapiens
  misc_RNA (1)...(19): siRNA sense strand
gugcaaagaggucagagaa

SEQ ID NO: 703393 - RNA, 19 nt, Homo sapiens
  misc_RNA (1)...(19): siRNA sense strand
caaggaaggacaagcuguu

SEQ ID NO: 703394 - RNA, 19 nt, Homo sapiens
  misc_RNA (1)...(19): siRNA sense strand
gaggaccaacagagcuuua

SEQ ID NO: 703395 - RNA, 19 nt, Homo sapiens
  misc_RNA (1)...(19): siRNA sense strand
gaaccggauuacgugaaug

SEQ ID NO: 703396 - RNA, 19 nt, Homo sapiens
  misc_RNA (1)...(19): siRNA sense strand
ggaaggacaagcuguugca

SEQ ID NO: 703397 - RNA, 19 nt, Homo sapiens
  misc_RNA (1)...(19): siRNA sense strand
uaucagaacucagcaucca

SEQ ID NO: 703398 - RNA, 19 nt, Homo sapiens
  misc_RNA (1)...(19): siRNA sense strand
guaccagaacuucagcaaa

SEQ ID NO: 703399 - RNA, 19 nt, Homo sapiens
  misc_RNA (1)...(19): siRNA sense strand
ggacaagcuguugcaauuc

SEQ ID NO: 703400 - RNA, 19 nt, Homo sapiens
  misc_RNA (1)...(19): siRNA sense strand
acaagcuguugcaauucua

SEQ ID NO: 703401 - RNA, 19 nt, Homo sapiens
  misc_RNA (1)...(19): siRNA sense strand
gaaaaucuaccagcagaga

SEQ ID NO: 703402 - RNA, 19 nt, Homo sapiens
  misc_RNA (1)...(19): siRNA sense strand
gacauggcacccacaagga

SEQ ID NO: 703403 - RNA, 19 nt, Homo sapiens
  misc_RNA (1)...(19): siRNA sense strand
gggcaacuccagagagaag

SEQ ID NO: 703404 - RNA, 19 nt, Homo sapiens
  misc_RNA (1)...(19): siRNA sense strand
gcagaaaaccacagagaca

SEQ ID NO: 703405 - RNA, 19 nt, Homo sapiens
  misc_RNA (1)...(19): siRNA sense strand
gaaggacaagcuguugcaa

SEQ ID NO: 703406 - RNA, 19 nt, Homo sapiens
  misc_RNA (1)...(19): siRNA sense strand
ccacaaggaaggacaagcu

SEQ ID NO: 703407 - RNA, 19 nt, Homo sapiens
  misc_RNA (1)...(19): siRNA sense strand
gggaaccggauuacgugaa

SEQ ID NO: 703408 - RNA, 19 nt, Homo sapiens
  misc_RNA (1)...(19): siRNA sense strand
gccugucacuggcccugaa

SEQ ID NO: 703409 - RNA, 19 nt, Homo sapiens
  misc_RNA (1)...(19): siRNA sense strand
cggaagaagaugaggaauc

SEQ ID NO: 703410 - RNA, 19 nt, Homo sapiens
  misc_RNA (1)...(19): siRNA sense strand
caucuuccagguaccagaa

SEQ ID NO: 703411 - RNA, 19 nt, Homo sapiens
  misc_RNA (1)...(19): siRNA sense strand
gcaaagaggucagagaaaa

SEQ ID NO: 703412 - RNA, 19 nt, Homo sapiens
  misc_RNA (1)...(19): siRNA sense strand
aggacaagcuguugcaauu

SEQ ID NO: 703413 - RNA, 19 nt, Homo sapiens
  misc_RNA (1)...(19): siRNA sense strand
uaccagaacuucagcaaag

SEQ ID NO: 703414 - RNA, 19 nt, Homo sapiens
  misc_RNA (1)...(19): siRNA sense strand
gacaagcuguugcaauucu

SEQ ID NO: 703415 - RNA, 19 nt, Homo sapiens
  misc_RNA (1)...(19): siRNA sense strand
gugcaaagaggucagagaa

SEQ ID NO: 703416 - RNA, 19 nt, Homo sapiens
  misc_RNA (1)...(19): siRNA sense strand
caaggaaggacaagcuguu

SEQ ID NO: 703417 - RNA, 19 nt, Homo sapiens
  misc_RNA (1)...(19): siRNA sense strand
gaggaccaacagagcuuua

SEQ ID NO: 703418 - RNA, 19 nt, Homo sapiens
  misc_RNA (1)...(19): siRNA sense strand
ggaaggacaagcuguugca

SEQ ID NO: 703419 - RNA, 19 nt, Homo sapiens
  misc_RNA (1)...(19): siRNA sense strand
guaccagaacuucagcaaa

SEQ ID NO: 703420 - RNA, 19 nt, Homo sapiens
  misc_RNA (1)...(19): siRNA sense strand
ggacaagcuguugcaauuc

SEQ ID NO: 703421 - RNA, 19 nt, Homo sapiens
  misc_RNA (1)...(19): siRNA sense strand
acaagcuguugcaauucua

SEQ ID NO: 703422 - RNA, 19 nt, Homo sapiens
  misc_RNA (1)...(19): siRNA sense strand
gaaaaucuaccagcagaga

SEQ ID NO: 703423 - RNA, 19 nt, Homo sapiens
  misc_RNA (1)...(19): siRNA sense strand
gacauggcacccacaagga

SEQ ID NO: 703424 - RNA, 19 nt, Homo sapiens
  misc_RNA (1)...(19): siRNA sense strand
gaaggacaagcuguugcaa

SEQ ID NO: 703425 - RNA, 19 nt, Homo sapiens
  misc_RNA (1)...(19): siRNA sense strand
ccacaaggaaggacaagcu

SEQ ID NO: 703426 - RNA, 19 nt, Homo sapiens
  misc_RNA (1)...(19): siRNA sense strand
caucuuccagguaccagaa

SEQ ID NO: 703427 - RNA, 19 nt, Homo sapiens
  misc_RNA (1)...(19): siRNA sense strand
ggaggccucugaauauuua

SEQ ID NO: 703428 - RNA, 19 nt, Homo sapiens
  misc_RNA (1)...(19): siRNA sense strand
ugaaggagguaccagauua

SEQ ID NO: 703429 - RNA, 19 nt, Homo sapiens
  misc_RNA (1)...(19): siRNA sense strand
ccaaagagaagcugaagua

SEQ ID NO: 703430 - RNA, 19 nt, Homo sapiens
  misc_RNA (1)...(19): siRNA sense strand
guuagaagcucaaggguau

SEQ ID NO: 703431 - RNA, 19 nt, Homo sapiens
  misc_RNA (1)...(19): siRNA sense strand
gguggaaacugacaugcua

SEQ ID NO: 703432 - RNA, 19 nt, Homo sapiens
  misc_RNA (1)...(19): siRNA sense strand
gaaagaccgcuuacuguga

SEQ ID NO: 703433 - RNA, 19 nt, Homo sapiens
  misc_RNA (1)...(19): siRNA sense strand
gaugaaggcugccaaagag

SEQ ID NO: 703434 - RNA, 19 nt, Homo sapiens
  misc_RNA (1)...(19): siRNA sense strand
acaacgagguggaguauga

SEQ ID NO: 703435 - RNA, 19 nt, Homo sapiens
  misc_RNA (1)...(19): siRNA sense strand
ccgcagagguuaaauagga

SEQ ID NO: 703436 - RNA, 19 nt, Homo sapiens
  misc_RNA (1)...(19): siRNA sense strand
ggagguaccagauuauuug

SEQ ID NO: 703437 - RNA, 19 nt, Homo sapiens
  misc_RNA (1)...(19): siRNA sense strand
gggaagacguggacagguu

SEQ ID NO: 703438 - RNA, 19 nt, Homo sapiens
  misc_RNA (1)...(19): siRNA sense strand
gaccaagucugaugagaag

SEQ ID NO: 703439 - RNA, 19 nt, Homo sapiens
  misc_RNA (1)...(19): siRNA sense strand
gaaaagagagcucgguuaa

SEQ ID NO: 703440 - RNA, 19 nt, Homo sapiens
  misc_RNA (1)...(19): siRNA sense strand
ugagagagcugcuggacau

SEQ ID NO: 703441 - RNA, 19 nt, Homo sapiens
  misc_RNA (1)...(19): siRNA sense strand
aagagaagcugaaguacug

SEQ ID NO: 703442 - RNA, 19 nt, Homo sapiens
  misc_RNA (1)...(19): siRNA sense strand
gaugguagagauagaaauu

SEQ ID NO: 703443 - RNA, 19 nt, Homo sapiens
  misc_RNA (1)...(19): siRNA sense strand
ugacgaaacuauagacaag

SEQ ID NO: 703444 - RNA, 19 nt, Homo sapiens
  misc_RNA (1)...(19): siRNA sense strand
gaccucaccugcgcuauga

SEQ ID NO: 703445 - RNA, 19 nt, Homo sapiens
  misc_RNA (1)...(19): siRNA sense strand
aaagagagcucgguuaaaa

SEQ ID NO: 703446 - RNA, 19 nt, Homo sapiens
  misc_RNA (1)...(19): siRNA sense strand
gaccuacgcucaagcucaa

SEQ ID NO: 703447 - RNA, 19 nt, Homo sapiens
  misc_RNA (1)...(19): siRNA sense strand
cgugugcgcuccuuauauu

SEQ ID NO: 703448 - RNA, 19 nt, Homo sapiens
  misc_RNA (1)...(19): siRNA sense strand
ggcuggagaucgucaauga

SEQ ID NO: 703449 - RNA, 19 nt, Homo sapiens
  misc_RNA (1)...(19): siRNA sense strand
ucaagcggcuguccaggaa

SEQ ID NO: 703450 - RNA, 19 nt, Homo sapiens
  misc_RNA (1)...(19): siRNA sense strand
gagaucauauuggaagaug

SEQ ID NO: 703451 - RNA, 19 nt, Homo sapiens
  misc_RNA (1)...(19): siRNA sense strand
auagauaacugcaugaagu

SEQ ID NO: 703452 - RNA, 19 nt, Homo sapiens
  misc_RNA (1)...(19): siRNA sense strand
ggcaguggcuuccuaaguc

SEQ ID NO: 703453 - RNA, 19 nt, Homo sapiens
  misc_RNA (1)...(19): siRNA sense strand
cauccaaggucaggaagaa

SEQ ID NO: 703454 - RNA, 19 nt, Homo sapiens
  misc_RNA (1)...(19): siRNA sense strand
aaauugcccuucuccgaaa

SEQ ID NO: 703455 - RNA, 19 nt, Homo sapiens
  misc_RNA (1)...(19): siRNA sense strand
gguaccagauuauuuggau

SEQ ID NO: 703456 - RNA, 19 nt, Homo sapiens
  misc_RNA (1)...(19): siRNA sense strand
gaaggagguaccagauuau

SEQ ID NO: 703457 - RNA, 19 nt, Homo sapiens
  misc_RNA (1)...(19): siRNA sense strand
ccgaggaacuggacaacga

SEQ ID NO: 703458 - RNA, 19 nt, Homo sapiens
  misc_RNA (1)...(19): siRNA sense strand
aaagaccgcuuacugugau

SEQ ID NO: 703459 - RNA, 19 nt, Homo sapiens
  misc_RNA (1)...(19): siRNA sense strand
ggacaacgagguggaguau

SEQ ID NO: 703460 - RNA, 19 nt, Homo sapiens
  misc_RNA (1)...(19): siRNA sense strand
ugguagagauagaaauuga

SEQ ID NO: 703461 - RNA, 19 nt, Homo sapiens
  misc_RNA (1)...(19): siRNA sense strand
ggacagcaucggcuuggaa

SEQ ID NO: 703462 - RNA, 19 nt, Homo sapiens
  misc_RNA (1)...(19): siRNA sense strand
ccuccugucugcuuaagaa

SEQ ID NO: 703463 - RNA, 19 nt, Homo sapiens
  misc_RNA (1)...(19): siRNA sense strand
ucaaaggaugguagagaua

SEQ ID NO: 703464 - RNA, 19 nt, Homo sapiens
  misc_RNA (1)...(19): siRNA sense strand
cagaaagaccgcuuacugu

SEQ ID NO: 703465 - RNA, 19 nt, Homo sapiens
  misc_RNA (1)...(19): siRNA sense strand
ucagggagguguuguucug

SEQ ID NO: 703466 - RNA, 19 nt, Homo sapiens
  misc_RNA (1)...(19): siRNA sense strand
aaauggagcccgugaagga

SEQ ID NO: 703467 - RNA, 19 nt, Homo sapiens
  misc_RNA (1)...(19): siRNA sense strand
ggagaugaaggcugccaaa

SEQ ID NO: 703468 - RNA, 19 nt, Homo sapiens
  misc_RNA (1)...(19): siRNA sense strand
gaagcucacagcagagaga

SEQ ID NO: 703469 - RNA, 19 nt, Homo sapiens
  misc_RNA (1)...(19): siRNA sense strand
ucagaaagaccgcuuacug

SEQ ID NO: 703470 - RNA, 19 nt, Homo sapiens
  misc_RNA (1)...(19): siRNA sense strand
ccucacugcucaagagaug

SEQ ID NO: 703471 - RNA, 19 nt, Homo sapiens
  misc_RNA (1)...(19): siRNA sense strand
gggagcacaugcagaccaa

SEQ ID NO: 703472 - RNA, 19 nt, Homo sapiens
  misc_RNA (1)...(19): siRNA sense strand
gcaacgugauccucuucug

SEQ ID NO: 703473 - RNA, 19 nt, Homo sapiens
  misc_RNA (1)...(19): siRNA sense strand
ccugucugcuuaagaacua

SEQ ID NO: 703474 - RNA, 19 nt, Homo sapiens
  misc_RNA (1)...(19): siRNA sense strand
gcucaaaggaugguagaga

SEQ ID NO: 703475 - RNA, 19 nt, Homo sapiens
  misc_RNA (1)...(19): siRNA sense strand
gggcaaaccggcucuugug

SEQ ID NO: 703476 - RNA, 19 nt, Homo sapiens
  misc_RNA (1)...(19): siRNA sense strand
uagauaacugcaugaagua

SEQ ID NO: 703477 - RNA, 19 nt, Homo sapiens
  misc_RNA (1)...(19): siRNA sense strand
cagauuauuuggaucacau

SEQ ID NO: 703478 - RNA, 19 nt, Homo sapiens
  misc_RNA (1)...(19): siRNA sense strand
ugaccucacugcucaagag

SEQ ID NO: 703479 - RNA, 19 nt, Homo sapiens
  misc_RNA (1)...(19): siRNA sense strand
uuaaacaucccauggacuu

SEQ ID NO: 703480 - RNA, 19 nt, Homo sapiens
  misc_RNA (1)...(19): siRNA sense strand
ccggaggccucugaauauu

SEQ ID NO: 703481 - RNA, 19 nt, Homo sapiens
  misc_RNA (1)...(19): siRNA sense strand
ugacaugcuaccucuguaa

SEQ ID NO: 703482 - RNA, 19 nt, Homo sapiens
  misc_RNA (1)...(19): siRNA sense strand
ccagcccgguggaaacuga

SEQ ID NO: 703483 - RNA, 19 nt, Homo sapiens
  misc_RNA (1)...(19): siRNA sense strand
gguauugacgaaacuauag

SEQ ID NO: 703484 - RNA, 19 nt, Homo sapiens
  misc_RNA (1)...(19): siRNA sense strand
gagcuuuaaugcgcccaaa

SEQ ID NO: 703485 - RNA, 19 nt, Homo sapiens
  misc_RNA (1)...(19): siRNA sense strand
aaaggaugguagagauaga

SEQ ID NO: 703486 - RNA, 19 nt, Homo sapiens
  misc_RNA (1)...(19): siRNA sense strand
gcagagcauguuugaguuc

SEQ ID NO: 703487 - RNA, 19 nt, Homo sapiens
  misc_RNA (1)...(19): siRNA sense strand
ccauggacuuugccacaau

SEQ ID NO: 703488 - RNA, 19 nt, Homo sapiens
  misc_RNA (1)...(19): siRNA sense strand
gaggucggcuuugccaaca

SEQ ID NO: 703489 - RNA, 19 nt, Homo sapiens
  misc_RNA (1)...(19): siRNA sense strand
gaucccagaggucggcuuu

SEQ ID NO: 703490 - RNA, 19 nt, Homo sapiens
  misc_RNA (1)...(19): siRNA sense strand
uugcacaggaucaguauuu

SEQ ID NO: 703491 - RNA, 19 nt, Homo sapiens
  misc_RNA (1)...(19): siRNA sense strand
gaucagggagguguuguuc

SEQ ID NO: 703492 - RNA, 19 nt, Homo sapiens
  misc_RNA (1)...(19): siRNA sense strand
ccacauccaaggucaggaa

SEQ ID NO: 703493 - RNA, 19 nt, Homo sapiens
  misc_RNA (1)...(19): siRNA sense strand
gcggccuccugucugcuua

SEQ ID NO: 703494 - RNA, 19 nt, Homo sapiens
  misc_RNA (1)...(19): siRNA sense strand
caaaggaugguagagauag

SEQ ID NO: 703495 - RNA, 19 nt, Homo sapiens
  misc_RNA (1)...(19): siRNA sense strand
acuacaaguucaucgagaa

SEQ ID NO: 703496 - RNA, 19 nt, Homo sapiens
  misc_RNA (1)...(19): siRNA sense strand
gcuuuaaugcgcccaaaug

SEQ ID NO: 703497 - RNA, 19 nt, Homo sapiens
  misc_RNA (1)...(19): siRNA sense strand
uagaagcucaaggguauaa

SEQ ID NO: 703498 - RNA, 19 nt, Homo sapiens
  misc_RNA (1)...(19): siRNA sense strand
uggaccagcugcaagacaa

SEQ ID NO: 703499 - RNA, 19 nt, Homo sapiens
  misc_RNA (1)...(19): siRNA sense strand
agaugaaggcugccaaaga

SEQ ID NO: 703500 - RNA, 19 nt, Homo sapiens
  misc_RNA (1)...(19): siRNA sense strand
ggagaucgucaaugagaag

SEQ ID NO: 703501 - RNA, 19 nt, Homo sapiens
  misc_RNA (1)...(19): siRNA sense strand
guagagauagaaauugaag

SEQ ID NO: 703502 - RNA, 19 nt, Homo sapiens
  misc_RNA (1)...(19): siRNA sense strand
cagcgaggcauccuucuuc

SEQ ID NO: 703503 - RNA, 19 nt, Homo sapiens
  misc_RNA (1)...(19): siRNA sense strand
gaagucggccgaggaacug

SEQ ID NO: 703504 - RNA, 19 nt, Homo sapiens
  misc_RNA (1)...(19): siRNA sense strand
cgagaagucggccgaggaa

SEQ ID NO: 703505 - RNA, 19 nt, Homo sapiens
  misc_RNA (1)...(19): siRNA sense strand
ucgcagagcauguuugagu

SEQ ID NO: 703506 - RNA, 19 nt, Homo sapiens
  misc_RNA (1)...(19): siRNA sense strand
ggaccgcagugagcugauc

SEQ ID NO: 703507 - RNA, 19 nt, Homo sapiens
  misc_RNA (1)...(19): siRNA sense strand
auaacugcaugaaguacaa

SEQ ID NO: 703508 - RNA, 19 nt, Homo sapiens
  misc_RNA (1)...(19): siRNA sense strand
aaacaucccauggacuuug

SEQ ID NO: 703509 - RNA, 19 nt, Homo sapiens
  misc_RNA (1)...(19): siRNA sense strand
ugaaggcugccaaagagaa

SEQ ID NO: 703510 - RNA, 19 nt, Homo sapiens
  misc_RNA (1)...(19): siRNA sense strand
gcagagguuaaauaggauu

SEQ ID NO: 703511 - RNA, 19 nt, Homo sapiens
  misc_RNA (1)...(19): siRNA sense strand
gcuguuccucguucucuuu

SEQ ID NO: 703512 - RNA, 19 nt, Homo sapiens
  misc_RNA (1)...(19): siRNA sense strand
gcaucgagaaugggaacua

SEQ ID NO: 703513 - RNA, 19 nt, Homo sapiens
  misc_RNA (1)...(19): siRNA sense strand
gauaacugcaugaaguaca

SEQ ID NO: 703514 - RNA, 19 nt, Homo sapiens
  misc_RNA (1)...(19): siRNA sense strand
cggaggccucugaauauuu

SEQ ID NO: 703515 - RNA, 19 nt, Homo sapiens
  misc_RNA (1)...(19): siRNA sense strand
cauggacuuugccacaaug

SEQ ID NO: 703516 - RNA, 19 nt, Homo sapiens
  misc_RNA (1)...(19): siRNA sense strand
gcagcgaggcauccuucuu

SEQ ID NO: 703517 - RNA, 19 nt, Homo sapiens
  misc_RNA (1)...(19): siRNA sense strand
cgcagagcauguuugaguu

SEQ ID NO: 703518 - RNA, 19 nt, Homo sapiens
  misc_RNA (1)...(19): siRNA sense strand
ggagcaagcgggcaaagcu

SEQ ID NO: 703519 - RNA, 19 nt, Homo sapiens
  misc_RNA (1)...(19): siRNA sense strand
uggaggagcagcugagaga

SEQ ID NO: 703520 - RNA, 19 nt, Homo sapiens
  misc_RNA (1)...(19): siRNA sense strand
gaggaaaggacgaugucau

SEQ ID NO: 703521 - RNA, 19 nt, Homo sapiens
  misc_RNA (1)...(19): siRNA sense strand
cacaaugaggaaacgguua

SEQ ID NO: 703522 - RNA, 19 nt, Homo sapiens
  misc_RNA (1)...(19): siRNA sense strand
cucaaaggaugguagagau

SEQ ID NO: 703523 - RNA, 19 nt, Homo sapiens
  misc_RNA (1)...(19): siRNA sense strand
gagcacaugcagaccaagu

SEQ ID NO: 703524 - RNA, 19 nt, Homo sapiens
  misc_RNA (1)...(19): siRNA sense strand
gagagcugcuggacaugcu

SEQ ID NO: 703525 - RNA, 19 nt, Homo sapiens
  misc_RNA (1)...(19): siRNA sense strand
gaaggcugccaaagagaag

SEQ ID NO: 703526 - RNA, 19 nt, Homo sapiens
  misc_RNA (1)...(19): siRNA sense strand
gaggaggaaaggacgaugu

SEQ ID NO: 703527 - RNA, 19 nt, Homo sapiens
  misc_RNA (1)...(19): siRNA sense strand
gcagagacaccuugaagua

SEQ ID NO: 703528 - RNA, 19 nt, Homo sapiens
  misc_RNA (1)...(19): siRNA sense strand
ugacuucucuaaucuguuu

SEQ ID NO: 703529 - RNA, 19 nt, Homo sapiens
  misc_RNA (1)...(19): siRNA sense strand
gagaauggcugacaucaac

SEQ ID NO: 703530 - RNA, 19 nt, Homo sapiens
  misc_RNA (1)...(19): siRNA sense strand
ggacauacuccucaacuau

SEQ ID NO: 703531 - RNA, 19 nt, Homo sapiens
  misc_RNA (1)...(19): siRNA sense strand
gagaagagucgccuuguga

SEQ ID NO: 703532 - RNA, 19 nt, Homo sapiens
  misc_RNA (1)...(19): siRNA sense strand
gagaucugcuuccggcuaa

SEQ ID NO: 703533 - RNA, 19 nt, Homo sapiens
  misc_RNA (1)...(19): siRNA sense strand
ccaaggugcuggacuuuca

SEQ ID NO: 703534 - RNA, 19 nt, Homo sapiens
  misc_RNA (1)...(19): siRNA sense strand
gcacaggucauccucgauu

SEQ ID NO: 703535 - RNA, 19 nt, Homo sapiens
  misc_RNA (1)...(19): siRNA sense strand
ccaacagccuggaagagaa

SEQ ID NO: 703536 - RNA, 19 nt, Homo sapiens
  misc_RNA (1)...(19): siRNA sense strand
ccacuggauuggauauuau

SEQ ID NO: 703537 - RNA, 19 nt, Homo sapiens
  misc_RNA (1)...(19): siRNA sense strand
gaaccugcuuuccugugaa

SEQ ID NO: 703538 - RNA, 19 nt, Homo sapiens
  misc_RNA (1)...(19): siRNA sense strand
agagacaccuugaaguaug

SEQ ID NO: 703539 - RNA, 19 nt, Homo sapiens
  misc_RNA (1)...(19): siRNA sense strand
uaagaacggugaggagcaa

SEQ ID NO: 703540 - RNA, 19 nt, Homo sapiens
  misc_RNA (1)...(19): siRNA sense strand
agacugacuucucuaaucu

SEQ ID NO: 703541 - RNA, 19 nt, Homo sapiens
  misc_RNA (1)...(19): siRNA sense strand
ggagcaaaccgugcaauuc

SEQ ID NO: 703542 - RNA, 19 nt, Homo sapiens
  misc_RNA (1)...(19): siRNA sense strand
gaucugcggcuucuugcaa

SEQ ID NO: 703543 - RNA, 19 nt, Homo sapiens
  misc_RNA (1)...(19): siRNA sense strand
ggagaauggcugacaucaa

SEQ ID NO: 703544 - RNA, 19 nt, Homo sapiens
  misc_RNA (1)...(19): siRNA sense strand
uggccuagcuggagaaugg

SEQ ID NO: 703545 - RNA, 19 nt, Homo sapiens
  misc_RNA (1)...(19): siRNA sense strand
gcauggagggcuucaacuu

SEQ ID NO: 703546 - RNA, 19 nt, Homo sapiens
  misc_RNA (1)...(19): siRNA sense strand
ggaccaacagccuggaaga

SEQ ID NO: 703547 - RNA, 19 nt, Homo sapiens
  misc_RNA (1)...(19): siRNA sense strand
gagacaccuugaaguaugg

SEQ ID NO: 703548 - RNA, 19 nt, Homo sapiens
  misc_RNA (1)...(19): siRNA sense strand
agaaccugcuuuccuguga

SEQ ID NO: 703549 - RNA, 19 nt, Homo sapiens
  misc_RNA (1)...(19): siRNA sense strand
uggagcagauccugguuga

SEQ ID NO: 703550 - RNA, 19 nt, Homo sapiens
  misc_RNA (1)...(19): siRNA sense strand
caucaacggccaauaccaa

SEQ ID NO: 703551 - RNA, 19 nt, Homo sapiens
  misc_RNA (1)...(19): siRNA sense strand
cacaggucauccucgauuu

SEQ ID NO: 703552 - RNA, 19 nt, Homo sapiens
  misc_RNA (1)...(19): siRNA sense strand
gaagagucgccuugugagu

SEQ ID NO: 703553 - RNA, 19 nt, Homo sapiens
  misc_RNA (1)...(19): siRNA sense strand
gagcagauccugguugacu

SEQ ID NO: 703554 - RNA, 19 nt, Homo sapiens
  misc_RNA (1)...(19): siRNA sense strand
gagcaaaccgugcaauucc

SEQ ID NO: 703555 - RNA, 19 nt, Homo sapiens
  misc_RNA (1)...(19): siRNA sense strand
ugacaucaacggccaauac

SEQ ID NO: 703556 - RNA, 19 nt, Homo sapiens
  misc_RNA (1)...(19): siRNA sense strand
agagaagagucgccuugug

SEQ ID NO: 703557 - RNA, 19 nt, Homo sapiens
  misc_RNA (1)...(19): siRNA sense strand
uggacauacuccucaacua

SEQ ID NO: 703558 - RNA, 19 nt, Homo sapiens
  misc_RNA (1)...(19): siRNA sense strand
cauggagggcuucaacuug

SEQ ID NO: 703559 - RNA, 19 nt, Homo sapiens
  misc_RNA (1)...(19): siRNA sense strand
cuaaucuguuugcuagaga

SEQ ID NO: 703560 - RNA, 19 nt, Homo sapiens
  misc_RNA (1)...(19): siRNA sense strand
cagagacaccuugaaguau

SEQ ID NO: 703561 - RNA, 19 nt, Homo sapiens
  misc_RNA (1)...(19): siRNA sense strand
gcgcacagagacugacuuc

SEQ ID NO: 703562 - RNA, 19 nt, Homo sapiens
  misc_RNA (1)...(19): siRNA sense strand
ggaagugguggacauacuc

SEQ ID NO: 703563 - RNA, 19 nt, Homo sapiens
  misc_RNA (1)...(19): siRNA sense strand
gcuggagaauggcugacau

SEQ ID NO: 703564 - RNA, 19 nt, Homo sapiens
  misc_RNA (1)...(19): siRNA sense strand
caacggccaauaccaacau

SEQ ID NO: 703565 - RNA, 19 nt, Homo sapiens
  misc_RNA (1)...(19): siRNA sense strand
ggauauuauuggccuagcu

SEQ ID NO: 703566 - RNA, 19 nt, Homo sapiens
  misc_RNA (1)...(19): siRNA sense strand
gaucugcuuccggcuaaga

SEQ ID NO: 703567 - RNA, 19 nt, Homo sapiens
  misc_RNA (1)...(19): siRNA sense strand
caacagccuggaagagaag

SEQ ID NO: 703568 - RNA, 19 nt, Homo sapiens
  misc_RNA (1)...(19): siRNA sense strand
gcagagacaccuugaagua

SEQ ID NO: 703569 - RNA, 19 nt, Homo sapiens
  misc_RNA (1)...(19): siRNA sense strand
ugacuucucuaaucuguuu

SEQ ID NO: 703570 - RNA, 19 nt, Homo sapiens
  misc_RNA (1)...(19): siRNA sense strand
gagaauggcugacaucaac

SEQ ID NO: 703571 - RNA, 19 nt, Homo sapiens
  misc_RNA (1)...(19): siRNA sense strand
ggacauacuccucaacuau

SEQ ID NO: 703572 - RNA, 19 nt, Homo sapiens
  misc_RNA (1)...(19): siRNA sense strand
gagaagagucgccuuguga

SEQ ID NO: 703573 - RNA, 19 nt, Homo sapiens
  misc_RNA (1)...(19): siRNA sense strand
gagaucugcuuccggcuaa

SEQ ID NO: 703574 - RNA, 19 nt, Homo sapiens
  misc_RNA (1)...(19): siRNA sense strand
ccaaggugcuggacuuuca

SEQ ID NO: 703575 - RNA, 19 nt, Homo sapiens
  misc_RNA (1)...(19): siRNA sense strand
gcacaggucauccucgauu

SEQ ID NO: 703576 - RNA, 19 nt, Homo sapiens
  misc_RNA (1)...(19): siRNA sense strand
ccaacagccuggaagagaa

SEQ ID NO: 703577 - RNA, 19 nt, Homo sapiens
  misc_RNA (1)...(19): siRNA sense strand
ccacuggauuggauauuau

SEQ ID NO: 703578 - RNA, 19 nt, Homo sapiens
  misc_RNA (1)...(19): siRNA sense strand
gaaccugcuuuccugugaa

SEQ ID NO: 703579 - RNA, 19 nt, Homo sapiens
  misc_RNA (1)...(19): siRNA sense strand
agagacaccuugaaguaug

SEQ ID NO: 703580 - RNA, 19 nt, Homo sapiens
  misc_RNA (1)...(19): siRNA sense strand
uaagaacggugaggagcaa

SEQ ID NO: 703581 - RNA, 19 nt, Homo sapiens
  misc_RNA (1)...(19): siRNA sense strand
agacugacuucucuaaucu

SEQ ID NO: 703582 - RNA, 19 nt, Homo sapiens
  misc_RNA (1)...(19): siRNA sense strand
ggagcaaaccgugcaauuc

SEQ ID NO: 703583 - RNA, 19 nt, Homo sapiens
  misc_RNA (1)...(19): siRNA sense strand
gaucugcggcuucuugcaa

SEQ ID NO: 703584 - RNA, 19 nt, Homo sapiens
  misc_RNA (1)...(19): siRNA sense strand
ggagaauggcugacaucaa

SEQ ID NO: 703585 - RNA, 19 nt, Homo sapiens
  misc_RNA (1)...(19): siRNA sense strand
uggccuagcuggagaaugg

SEQ ID NO: 703586 - RNA, 19 nt, Homo sapiens
  misc_RNA (1)...(19): siRNA sense strand
gcauggagggcuucaacuu

SEQ ID NO: 703587 - RNA, 19 nt, Homo sapiens
  misc_RNA (1)...(19): siRNA sense strand
ggaccaacagccuggaaga

SEQ ID NO: 703588 - RNA, 19 nt, Homo sapiens
  misc_RNA (1)...(19): siRNA sense strand
gagacaccuugaaguaugg

SEQ ID NO: 703589 - RNA, 19 nt, Homo sapiens
  misc_RNA (1)...(19): siRNA sense strand
agaaccugcuuuccuguga

SEQ ID NO: 703590 - RNA, 19 nt, Homo sapiens
  misc_RNA (1)...(19): siRNA sense strand
uggagcagauccugguuga

SEQ ID NO: 703591 - RNA, 19 nt, Homo sapiens
  misc_RNA (1)...(19): siRNA sense strand
caucaacggccaauaccaa

SEQ ID NO: 703592 - RNA, 19 nt, Homo sapiens
  misc_RNA (1)...(19): siRNA sense strand
cacaggucauccucgauuu

SEQ ID NO: 703593 - RNA, 19 nt, Homo sapiens
  misc_RNA (1)...(19): siRNA sense strand
gaagagucgccuugugagu

SEQ ID NO: 703594 - RNA, 19 nt, Homo sapiens
  misc_RNA (1)...(19): siRNA sense strand
gagcagauccugguugacu

SEQ ID NO: 703595 - RNA, 19 nt, Homo sapiens
  misc_RNA (1)...(19): siRNA sense strand
gagcaaaccgugcaauucc

SEQ ID NO: 703596 - RNA, 19 nt, Homo sapiens
  misc_RNA (1)...(19): siRNA sense strand
ugacaucaacggccaauac

SEQ ID NO: 703597 - RNA, 19 nt, Homo sapiens
  misc_RNA (1)...(19): siRNA sense strand
agagaagagucgccuugug

SEQ ID NO: 703598 - RNA, 19 nt, Homo sapiens
  misc_RNA (1)...(19): siRNA sense strand
uggacauacuccucaacua

SEQ ID NO: 703599 - RNA, 19 nt, Homo sapiens
  misc_RNA (1)...(19): siRNA sense strand
cauggagggcuucaacuug

SEQ ID NO: 703600 - RNA, 19 nt, Homo sapiens
  misc_RNA (1)...(19): siRNA sense strand
cuaaucuguuugcuagaga

SEQ ID NO: 703601 - RNA, 19 nt, Homo sapiens
  misc_RNA (1)...(19): siRNA sense strand
cagagacaccuugaaguau

SEQ ID NO: 703602 - RNA, 19 nt, Homo sapiens
  misc_RNA (1)...(19): siRNA sense strand
gcgcacagagacugacuuc

SEQ ID NO: 703603 - RNA, 19 nt, Homo sapiens
  misc_RNA (1)...(19): siRNA sense strand
ggaagugguggacauacuc

SEQ ID NO: 703604 - RNA, 19 nt, Homo sapiens
  misc_RNA (1)...(19): siRNA sense strand
gcuggagaauggcugacau

SEQ ID NO: 703605 - RNA, 19 nt, Homo sapiens
  misc_RNA (1)...(19): siRNA sense strand
caacggccaauaccaacau

SEQ ID NO: 703606 - RNA, 19 nt, Homo sapiens
  misc_RNA (1)...(19): siRNA sense strand
ggauauuauuggccuagcu

SEQ ID NO: 703607 - RNA, 19 nt, Homo sapiens
  misc_RNA (1)...(19): siRNA sense strand
caacagccuggaagagaag

SEQ ID NO: 703608 - RNA, 19 nt, Homo sapiens
  misc_RNA (1)...(19): siRNA sense strand
gaucugcuuccggcuaaga

SEQ ID NO: 703609 - RNA, 19 nt, Homo sapiens
  misc_RNA (1)...(19): siRNA sense strand
gcaaagaggucagagaaaa

SEQ ID NO: 703610 - RNA, 19 nt, Homo sapiens
  misc_RNA (1)...(19): siRNA sense strand
ggaaccggauuacgugaau

SEQ ID NO: 703611 - RNA, 19 nt, Homo sapiens
  misc_RNA (1)...(19): siRNA sense strand
aggacaagcuguugcaauu

SEQ ID NO: 703612 - RNA, 19 nt, Homo sapiens
  misc_RNA (1)...(19): siRNA sense strand
gaacucagcauccauccau

SEQ ID NO: 703613 - RNA, 19 nt, Homo sapiens
  misc_RNA (1)...(19): siRNA sense strand
uaccagaacuucagcaaag

SEQ ID NO: 703614 - RNA, 19 nt, Homo sapiens
  misc_RNA (1)...(19): siRNA sense strand
gacaagcuguugcaauucu

SEQ ID NO: 703615 - RNA, 19 nt, Homo sapiens
  misc_RNA (1)...(19): siRNA sense strand
gugcaaagaggucagagaa

SEQ ID NO: 703616 - RNA, 19 nt, Homo sapiens
  misc_RNA (1)...(19): siRNA sense strand
caaggaaggacaagcuguu

SEQ ID NO: 703617 - RNA, 19 nt, Homo sapiens
  misc_RNA (1)...(19): siRNA sense strand
gaggaccaacagagcuuua

SEQ ID NO: 703618 - RNA, 19 nt, Homo sapiens
  misc_RNA (1)...(19): siRNA sense strand
gaaccggauuacgugaaug

SEQ ID NO: 703619 - RNA, 19 nt, Homo sapiens
  misc_RNA (1)...(19): siRNA sense strand
ggaaggacaagcuguugca

SEQ ID NO: 703620 - RNA, 19 nt, Homo sapiens
  misc_RNA (1)...(19): siRNA sense strand
uaucagaacucagcaucca

SEQ ID NO: 703621 - RNA, 19 nt, Homo sapiens
  misc_RNA (1)...(19): siRNA sense strand
guaccagaacuucagcaaa

SEQ ID NO: 703622 - RNA, 19 nt, Homo sapiens
  misc_RNA (1)...(19): siRNA sense strand
ggacaagcuguugcaauuc

SEQ ID NO: 703623 - RNA, 19 nt, Homo sapiens
  misc_RNA (1)...(19): siRNA sense strand
acaagcuguugcaauucua

SEQ ID NO: 703624 - RNA, 19 nt, Homo sapiens
  misc_RNA (1)...(19): siRNA sense strand
gaaaaucuaccagcagaga

SEQ ID NO: 703625 - RNA, 19 nt, Homo sapiens
  misc_RNA (1)...(19): siRNA sense strand
gacauggcacccacaagga

SEQ ID NO: 703626 - RNA, 19 nt, Homo sapiens
  misc_RNA (1)...(19): siRNA sense strand
gggcaacuccagagagaag

SEQ ID NO: 703627 - RNA, 19 nt, Homo sapiens
  misc_RNA (1)...(19): siRNA sense strand
gcagaaaaccacagagaca

SEQ ID NO: 703628 - RNA, 19 nt, Homo sapiens
  misc_RNA (1)...(19): siRNA sense strand
gaaggacaagcuguugcaa

SEQ ID NO: 703629 - RNA, 19 nt, Homo sapiens
  misc_RNA (1)...(19): siRNA sense strand
ccacaaggaaggacaagcu

SEQ ID NO: 703630 - RNA, 19 nt, Homo sapiens
  misc_RNA (1)...(19): siRNA sense strand
gggaaccggauuacgugaa

SEQ ID NO: 703631 - RNA, 19 nt, Homo sapiens
  misc_RNA (1)...(19): siRNA sense strand
gccugucacuggcccugaa

SEQ ID NO: 703632 - RNA, 19 nt, Homo sapiens
  misc_RNA (1)...(19): siRNA sense strand
cggaagaagaugaggaauc

SEQ ID NO: 703633 - RNA, 19 nt, Homo sapiens
  misc_RNA (1)...(19): siRNA sense strand
caucuuccagguaccagaa

SEQ ID NO: 703634 - RNA, 19 nt, Homo sapiens
  misc_RNA (1)...(19): siRNA sense strand
gcaaagaggucagagaaaa

SEQ ID NO: 703635 - RNA, 19 nt, Homo sapiens
  misc_RNA (1)...(19): siRNA sense strand
ggaaccggauuacgugaau

SEQ ID NO: 703636 - RNA, 19 nt, Homo sapiens
  misc_RNA (1)...(19): siRNA sense strand
aggacaagcuguugcaauu

SEQ ID NO: 703637 - RNA, 19 nt, Homo sapiens
  misc_RNA (1)...(19): siRNA sense strand
gaacucagcauccauccau

SEQ ID NO: 703638 - RNA, 19 nt, Homo sapiens
  misc_RNA (1)...(19): siRNA sense strand
uaccagaacuucagcaaag

SEQ ID NO: 703639 - RNA, 19 nt, Homo sapiens
  misc_RNA (1)...(19): siRNA sense strand
gacaagcuguugcaauucu

SEQ ID NO: 703640 - RNA, 19 nt, Homo sapiens
  misc_RNA (1)...(19): siRNA sense strand
gugcaaagaggucagagaa

SEQ ID NO: 703641 - RNA, 19 nt, Homo sapiens
  misc_RNA (1)...(19): siRNA sense strand
caaggaaggacaagcuguu

SEQ ID NO: 703642 - RNA, 19 nt, Homo sapiens
  misc_RNA (1)...(19): siRNA sense strand
gaggaccaacagagcuuua

SEQ ID NO: 703643 - RNA, 19 nt, Homo sapiens
  misc_RNA (1)...(19): siRNA sense strand
gaaccggauuacgugaaug

SEQ ID NO: 703644 - RNA, 19 nt, Homo sapiens
  misc_RNA (1)...(19): siRNA sense strand
ggaaggacaagcuguugca

SEQ ID NO: 703645 - RNA, 19 nt, Homo sapiens
  misc_RNA (1)...(19): siRNA sense strand
uaucagaacucagcaucca

SEQ ID NO: 703646 - RNA, 19 nt, Homo sapiens
  misc_RNA (1)...(19): siRNA sense strand
guaccagaacuucagcaaa

SEQ ID NO: 703647 - RNA, 19 nt, Homo sapiens
  misc_RNA (1)...(19): siRNA sense strand
ggacaagcuguugcaauuc

SEQ ID NO: 703648 - RNA, 19 nt, Homo sapiens
  misc_RNA (1)...(19): siRNA sense strand
acaagcuguugcaauucua

SEQ ID NO: 703649 - RNA, 19 nt, Homo sapiens
  misc_RNA (1)...(19): siRNA sense strand
gaaaaucuaccagcagaga

SEQ ID NO: 703650 - RNA, 19 nt, Homo sapiens
  misc_RNA (1)...(19): siRNA sense strand
gacauggcacccacaagga

SEQ ID NO: 703651 - RNA, 19 nt, Homo sapiens
  misc_RNA (1)...(19): siRNA sense strand
gggcaacuccagagagaag

SEQ ID NO: 703652 - RNA, 19 nt, Homo sapiens
  misc_RNA (1)...(19): siRNA sense strand
gcagaaaaccacagagaca

SEQ ID NO: 703653 - RNA, 19 nt, Homo sapiens
  misc_RNA (1)...(19): siRNA sense strand
gaaggacaagcuguugcaa

SEQ ID NO: 703654 - RNA, 19 nt, Homo sapiens
  misc_RNA (1)...(19): siRNA sense strand
ccacaaggaaggacaagcu

SEQ ID NO: 703655 - RNA, 19 nt, Homo sapiens
  misc_RNA (1)...(19): siRNA sense strand
gggaaccggauuacgugaa

SEQ ID NO: 703656 - RNA, 19 nt, Homo sapiens
  misc_RNA (1)...(19): siRNA sense strand
gccugucacuggcccugaa

SEQ ID NO: 703657 - RNA, 19 nt, Homo sapiens
  misc_RNA (1)...(19): siRNA sense strand
cggaagaagaugaggaauc

SEQ ID NO: 703658 - RNA, 19 nt, Homo sapiens
  misc_RNA (1)...(19): siRNA sense strand
caucuuccagguaccagaa

SEQ ID NO: 703659 - RNA, 19 nt, Homo sapiens
  misc_RNA (1)...(19): siRNA sense strand
gcaaagaggucagagaaaa

SEQ ID NO: 703660 - RNA, 19 nt, Homo sapiens
  misc_RNA (1)...(19): siRNA sense strand
ggaaccggauuacgugaau

SEQ ID NO: 703661 - RNA, 19 nt, Homo sapiens
  misc_RNA (1)...(19): siRNA sense strand
aggacaagcuguugcaauu

SEQ ID NO: 703662 - RNA, 19 nt, Homo sapiens
  misc_RNA (1)...(19): siRNA sense strand
gaacucagcauccauccau

SEQ ID NO: 703663 - RNA, 19 nt, Homo sapiens
  misc_RNA (1)...(19): siRNA sense strand
uaccagaacuucagcaaag

SEQ ID NO: 703664 - RNA, 19 nt, Homo sapiens
  misc_RNA (1)...(19): siRNA sense strand
gacaagcuguugcaauucu

SEQ ID NO: 703665 - RNA, 19 nt, Homo sapiens
  misc_RNA (1)...(19): siRNA sense strand
gugcaaagaggucagagaa

SEQ ID NO: 703666 - RNA, 19 nt, Homo sapiens
  misc_RNA (1)...(19): siRNA sense strand
caaggaaggacaagcuguu

SEQ ID NO: 703667 - RNA, 19 nt, Homo sapiens
  misc_RNA (1)...(19): siRNA sense strand
gaggaccaacagagcuuua

SEQ ID NO: 703668 - RNA, 19 nt, Homo sapiens
  misc_RNA (1)...(19): siRNA sense strand
gaaccggauuacgugaaug

SEQ ID NO: 703669 - RNA, 19 nt, Homo sapiens
  misc_RNA (1)...(19): siRNA sense strand
ggaaggacaagcuguugca

SEQ ID NO: 703670 - RNA, 19 nt, Homo sapiens
  misc_RNA (1)...(19): siRNA sense strand
uaucagaacucagcaucca

SEQ ID NO: 703671 - RNA, 19 nt, Homo sapiens
  misc_RNA (1)...(19): siRNA sense strand
guaccagaacuucagcaaa

SEQ ID NO: 703672 - RNA, 19 nt, Homo sapiens
  misc_RNA (1)...(19): siRNA sense strand
ggacaagcuguugcaauuc

SEQ ID NO: 703673 - RNA, 19 nt, Homo sapiens
  misc_RNA (1)...(19): siRNA sense strand
acaagcuguugcaauucua

SEQ ID NO: 703674 - RNA, 19 nt, Homo sapiens
  misc_RNA (1)...(19): siRNA sense strand
gaaaaucuaccagcagaga

SEQ ID NO: 703675 - RNA, 19 nt, Homo sapiens
  misc_RNA (1)...(19): siRNA sense strand
gacauggcacccacaagga

SEQ ID NO: 703676 - RNA, 19 nt, Homo sapiens
  misc_RNA (1)...(19): siRNA sense strand
gggcaacuccagagagaag

SEQ ID NO: 703677 - RNA, 19 nt, Homo sapiens
  misc_RNA (1)...(19): siRNA sense strand
gcagaaaaccacagagaca

SEQ ID NO: 703678 - RNA, 19 nt, Homo sapiens
  misc_RNA (1)...(19): siRNA sense strand
gaaggacaagcuguugcaa

SEQ ID NO: 703679 - RNA, 19 nt, Homo sapiens
  misc_RNA (1)...(19): siRNA sense strand
ccacaaggaaggacaagcu

SEQ ID NO: 703680 - RNA, 19 nt, Homo sapiens
  misc_RNA (1)...(19): siRNA sense strand
gggaaccggauuacgugaa

SEQ ID NO: 703681 - RNA, 19 nt, Homo sapiens
  misc_RNA (1)...(19): siRNA sense strand
gccugucacuggcccugaa

SEQ ID NO: 703682 - RNA, 19 nt, Homo sapiens
  misc_RNA (1)...(19): siRNA sense strand
cggaagaagaugaggaauc

SEQ ID NO: 703683 - RNA, 19 nt, Homo sapiens
  misc_RNA (1)...(19): siRNA sense strand
caucuuccagguaccagaa

SEQ ID NO: 703684 - RNA, 19 nt, Homo sapiens
  misc_RNA (1)...(19): siRNA sense strand
gcaaagaggucagagaaaa

SEQ ID NO: 703685 - RNA, 19 nt, Homo sapiens
  misc_RNA (1)...(19): siRNA sense strand
aggacaagcuguugcaauu

SEQ ID NO: 703686 - RNA, 19 nt, Homo sapiens
  misc_RNA (1)...(19): siRNA sense strand
uaccagaacuucagcaaag

SEQ ID NO: 703687 - RNA, 19 nt, Homo sapiens
  misc_RNA (1)...(19): siRNA sense strand
gacaagcuguugcaauucu

SEQ ID NO: 703688 - RNA, 19 nt, Homo sapiens
  misc_RNA (1)...(19): siRNA sense strand
gugcaaagaggucagagaa

SEQ ID NO: 703689 - RNA, 19 nt, Homo sapiens
  misc_RNA (1)...(19): siRNA sense strand
caaggaaggacaagcuguu

SEQ ID NO: 703690 - RNA, 19 nt, Homo sapiens
  misc_RNA (1)...(19): siRNA sense strand
gaggaccaacagagcuuua

SEQ ID NO: 703691 - RNA, 19 nt, Homo sapiens
  misc_RNA (1)...(19): siRNA sense strand
ggaaggacaagcuguugca

SEQ ID NO: 703692 - RNA, 19 nt, Homo sapiens
  misc_RNA (1)...(19): siRNA sense strand
guaccagaacuucagcaaa

SEQ ID NO: 703693 - RNA, 19 nt, Homo sapiens
  misc_RNA (1)...(19): siRNA sense strand
ggacaagcuguugcaauuc

SEQ ID NO: 703694 - RNA, 19 nt, Homo sapiens
  misc_RNA (1)...(19): siRNA sense strand
acaagcuguugcaauucua

SEQ ID NO: 703695 - RNA, 19 nt, Homo sapiens
  misc_RNA (1)...(19): siRNA sense strand
gaaaaucuaccagcagaga

SEQ ID NO: 703696 - RNA, 19 nt, Homo sapiens
  misc_RNA (1)...(19): siRNA sense strand
gacauggcacccacaagga

SEQ ID NO: 703697 - RNA, 19 nt, Homo sapiens
  misc_RNA (1)...(19): siRNA sense strand
gaaggacaagcuguugcaa

SEQ ID NO: 703698 - RNA, 19 nt, Homo sapiens
  misc_RNA (1)...(19): siRNA sense strand
ccacaaggaaggacaagcu

SEQ ID NO: 703699 - RNA, 19 nt, Homo sapiens
  misc_RNA (1)...(19): siRNA sense strand
caucuuccagguaccagaa

SEQ ID NO: 703700 - RNA, 19 nt, Homo sapiens
  misc_RNA (1)...(19): siRNA sense strand
gcaaagaggucagagaaaa

SEQ ID NO: 703701 - RNA, 19 nt, Homo sapiens
  misc_RNA (1)...(19): siRNA sense strand
ggaaccggauuacgugaau

SEQ ID NO: 703702 - RNA, 19 nt, Homo sapiens
  misc_RNA (1)...(19): siRNA sense strand
aggacaagcuguugcaauu

SEQ ID NO: 703703 - RNA, 19 nt, Homo sapiens
  misc_RNA (1)...(19): siRNA sense strand
gaacucagcauccauccau

SEQ ID NO: 703704 - RNA, 19 nt, Homo sapiens
  misc_RNA (1)...(19): siRNA sense strand
uaccagaacuucagcaaag

SEQ ID NO: 703705 - RNA, 19 nt, Homo sapiens
  misc_RNA (1)...(19): siRNA sense strand
gacaagcuguugcaauucu

SEQ ID NO: 703706 - RNA, 19 nt, Homo sapiens
  misc_RNA (1)...(19): siRNA sense strand
gugcaaagaggucagagaa

SEQ ID NO: 703707 - RNA, 19 nt, Homo sapiens
  misc_RNA (1)...(19): siRNA sense strand
caaggaaggacaagcuguu

SEQ ID NO: 703708 - RNA, 19 nt, Homo sapiens
  misc_RNA (1)...(19): siRNA sense strand
gaggaccaacagagcuuua

SEQ ID NO: 703709 - RNA, 19 nt, Homo sapiens
  misc_RNA (1)...(19): siRNA sense strand
gaaccggauuacgugaaug

SEQ ID NO: 703710 - RNA, 19 nt, Homo sapiens
  misc_RNA (1)...(19): siRNA sense strand
ggaaggacaagcuguugca

SEQ ID NO: 703711 - RNA, 19 nt, Homo sapiens
  misc_RNA (1)...(19): siRNA sense strand
uaucagaacucagcaucca

SEQ ID NO: 703712 - RNA, 19 nt, Homo sapiens
  misc_RNA (1)...(19): siRNA sense strand
guaccagaacuucagcaaa

SEQ ID NO: 703713 - RNA, 19 nt, Homo sapiens
  misc_RNA (1)...(19): siRNA sense strand
ggacaagcuguugcaauuc

SEQ ID NO: 703714 - RNA, 19 nt, Homo sapiens
  misc_RNA (1)...(19): siRNA sense strand
acaagcuguugcaauucua

SEQ ID NO: 703715 - RNA, 19 nt, Homo sapiens
  misc_RNA (1)...(19): siRNA sense strand
gaaaaucuaccagcagaga

SEQ ID NO: 703716 - RNA, 19 nt, Homo sapiens
  misc_RNA (1)...(19): siRNA sense strand
gacauggcacccacaagga

SEQ ID NO: 703717 - RNA, 19 nt, Homo sapiens
  misc_RNA (1)...(19): siRNA sense strand
gggcaacuccagagagaag

SEQ ID NO: 703718 - RNA, 19 nt, Homo sapiens
  misc_RNA (1)...(19): siRNA sense strand
gcagaaaaccacagagaca

SEQ ID NO: 703719 - RNA, 19 nt, Homo sapiens
  misc_RNA (1)...(19): siRNA sense strand
gaaggacaagcuguugcaa

SEQ ID NO: 703720 - RNA, 19 nt, Homo sapiens
  misc_RNA (1)...(19): siRNA sense strand
ccacaaggaaggacaagcu

SEQ ID NO: 703721 - RNA, 19 nt, Homo sapiens
  misc_RNA (1)...(19): siRNA sense strand
gggaaccggauuacgugaa

SEQ ID NO: 703722 - RNA, 19 nt, Homo sapiens
  misc_RNA (1)...(19): siRNA sense strand
gccugucacuggcccugaa

SEQ ID NO: 703723 - RNA, 19 nt, Homo sapiens
  misc_RNA (1)...(19): siRNA sense strand
cggaagaagaugaggaauc

SEQ ID NO: 703724 - RNA, 19 nt, Homo sapiens
  misc_RNA (1)...(19): siRNA sense strand
caucuuccagguaccagaa

SEQ ID NO: 703725 - RNA, 19 nt, Homo sapiens
  misc_RNA (1)...(19): siRNA sense strand
gcaaagaggucagagaaaa

SEQ ID NO: 703726 - RNA, 19 nt, Homo sapiens
  misc_RNA (1)...(19): siRNA sense strand
ggaaccggauuacgugaau

SEQ ID NO: 703727 - RNA, 19 nt, Homo sapiens
  misc_RNA (1)...(19): siRNA sense strand
aggacaagcuguugcaauu

SEQ ID NO: 703728 - RNA, 19 nt, Homo sapiens
  misc_RNA (1)...(19): siRNA sense strand
gaacucagcauccauccau

SEQ ID NO: 703729 - RNA, 19 nt, Homo sapiens
  misc_RNA (1)...(19): siRNA sense strand
uaccagaacuucagcaaag

SEQ ID NO: 703730 - RNA, 19 nt, Homo sapiens
  misc_RNA (1)...(19): siRNA sense strand
gacaagcuguugcaauucu

SEQ ID NO: 703731 - RNA, 19 nt, Homo sapiens
  misc_RNA (1)...(19): siRNA sense strand
gugcaaagaggucagagaa

SEQ ID NO: 703732 - RNA, 19 nt, Homo sapiens
  misc_RNA (1)...(19): siRNA sense strand
caaggaaggacaagcuguu

SEQ ID NO: 703733 - RNA, 19 nt, Homo sapiens
  misc_RNA (1)...(19): siRNA sense strand
gaggaccaacagagcuuua

SEQ ID NO: 703734 - RNA, 19 nt, Homo sapiens
  misc_RNA (1)...(19): siRNA sense strand
gaaccggauuacgugaaug

SEQ ID NO: 703735 - RNA, 19 nt, Homo sapiens
  misc_RNA (1)...(19): siRNA sense strand
ggaaggacaagcuguugca

SEQ ID NO: 703736 - RNA, 19 nt, Homo sapiens
  misc_RNA (1)...(19): siRNA sense strand
uaucagaacucagcaucca

SEQ ID NO: 703737 - RNA, 19 nt, Homo sapiens
  misc_RNA (1)...(19): siRNA sense strand
guaccagaacuucagcaaa

SEQ ID NO: 703738 - RNA, 19 nt, Homo sapiens
  misc_RNA (1)...(19): siRNA sense strand
ggacaagcuguugcaauuc

SEQ ID NO: 703739 - RNA, 19 nt, Homo sapiens
  misc_RNA (1)...(19): siRNA sense strand
acaagcuguugcaauucua

SEQ ID NO: 703740 - RNA, 19 nt, Homo sapiens
  misc_RNA (1)...(19): siRNA sense strand
gaaaaucuaccagcagaga

SEQ ID NO: 703741 - RNA, 19 nt, Homo sapiens
  misc_RNA (1)...(19): siRNA sense strand
gacauggcacccacaagga

SEQ ID NO: 703742 - RNA, 19 nt, Homo sapiens
  misc_RNA (1)...(19): siRNA sense strand
gggcaacuccagagagaag

SEQ ID NO: 703743 - RNA, 19 nt, Homo sapiens
  misc_RNA (1)...(19): siRNA sense strand
gcagaaaaccacagagaca

SEQ ID NO: 703744 - RNA, 19 nt, Homo sapiens
  misc_RNA (1)...(19): siRNA sense strand
gaaggacaagcuguugcaa

SEQ ID NO: 703745 - RNA, 19 nt, Homo sapiens
  misc_RNA (1)...(19): siRNA sense strand
ccacaaggaaggacaagcu

SEQ ID NO: 703746 - RNA, 19 nt, Homo sapiens
  misc_RNA (1)...(19): siRNA sense strand
gggaaccggauuacgugaa

SEQ ID NO: 703747 - RNA, 19 nt, Homo sapiens
  misc_RNA (1)...(19): siRNA sense strand
gccugucacuggcccugaa

SEQ ID NO: 703748 - RNA, 19 nt, Homo sapiens
  misc_RNA (1)...(19): siRNA sense strand
cggaagaagaugaggaauc

SEQ ID NO: 703749 - RNA, 19 nt, Homo sapiens
  misc_RNA (1)...(19): siRNA sense strand
caucuuccagguaccagaa

SEQ ID NO: 703750 - RNA, 19 nt, Homo sapiens
  misc_RNA (1)...(19): siRNA sense strand
gcaaagaggucagagaaaa

SEQ ID NO: 703751 - RNA, 19 nt, Homo sapiens
  misc_RNA (1)...(19): siRNA sense strand
ggaaccggauuacgugaau

SEQ ID NO: 703752 - RNA, 19 nt, Homo sapiens
  misc_RNA (1)...(19): siRNA sense strand
aggacaagcuguugcaauu

SEQ ID NO: 703753 - RNA, 19 nt, Homo sapiens
  misc_RNA (1)...(19): siRNA sense strand
gaacucagcauccauccau

SEQ ID NO: 703754 - RNA, 19 nt, Homo sapiens
  misc_RNA (1)...(19): siRNA sense strand
uaccagaacuucagcaaag

SEQ ID NO: 703755 - RNA, 19 nt, Homo sapiens
  misc_RNA (1)...(19): siRNA sense strand
gacaagcuguugcaauucu

SEQ ID NO: 703756 - RNA, 19 nt, Homo sapiens
  misc_RNA (1)...(19): siRNA sense strand
gugcaaagaggucagagaa

SEQ ID NO: 703757 - RNA, 19 nt, Homo sapiens
  misc_RNA (1)...(19): siRNA sense strand
caaggaaggacaagcuguu

SEQ ID NO: 703758 - RNA, 19 nt, Homo sapiens
  misc_RNA (1)...(19): siRNA sense strand
gaggaccaacagagcuuua

SEQ ID NO: 703759 - RNA, 19 nt, Homo sapiens
  misc_RNA (1)...(19): siRNA sense strand
gaaccggauuacgugaaug

SEQ ID NO: 703760 - RNA, 19 nt, Homo sapiens
  misc_RNA (1)...(19): siRNA sense strand
ggaaggacaagcuguugca

SEQ ID NO: 703761 - RNA, 19 nt, Homo sapiens
  misc_RNA (1)...(19): siRNA sense strand
uaucagaacucagcaucca

SEQ ID NO: 703762 - RNA, 19 nt, Homo sapiens
  misc_RNA (1)...(19): siRNA sense strand
guaccagaacuucagcaaa

SEQ ID NO: 703763 - RNA, 19 nt, Homo sapiens
  misc_RNA (1)...(19): siRNA sense strand
ggacaagcuguugcaauuc

SEQ ID NO: 703764 - RNA, 19 nt, Homo sapiens
  misc_RNA (1)...(19): siRNA sense strand
acaagcuguugcaauucua

SEQ ID NO: 703765 - RNA, 19 nt, Homo sapiens
  misc_RNA (1)...(19): siRNA sense strand
gaaaaucuaccagcagaga

SEQ ID NO: 703766 - RNA, 19 nt, Homo sapiens
  misc_RNA (1)...(19): siRNA sense strand
gacauggcacccacaagga

SEQ ID NO: 703767 - RNA, 19 nt, Homo sapiens
  misc_RNA (1)...(19): siRNA sense strand
gggcaacuccagagagaag

SEQ ID NO: 703768 - RNA, 19 nt, Homo sapiens
  misc_RNA (1)...(19): siRNA sense strand
gcagaaaaccacagagaca

SEQ ID NO: 703769 - RNA, 19 nt, Homo sapiens
  misc_RNA (1)...(19): siRNA sense strand
gaaggacaagcuguugcaa

SEQ ID NO: 703770 - RNA, 19 nt, Homo sapiens
  misc_RNA (1)...(19): siRNA sense strand
ccacaaggaaggacaagcu

SEQ ID NO: 703771 - RNA, 19 nt, Homo sapiens
  misc_RNA (1)...(19): siRNA sense strand
gggaaccggauuacgugaa

SEQ ID NO: 703772 - RNA, 19 nt, Homo sapiens
  misc_RNA (1)...(19): siRNA sense strand
gccugucacuggcccugaa

SEQ ID NO: 703773 - RNA, 19 nt, Homo sapiens
  misc_RNA (1)...(19): siRNA sense strand
cggaagaagaugaggaauc

SEQ ID NO: 703774 - RNA, 19 nt, Homo sapiens
  misc_RNA (1)...(19): siRNA sense strand
caucuuccagguaccagaa

SEQ ID NO: 703775 - RNA, 19 nt, Homo sapiens
  misc_RNA (1)...(19): siRNA sense strand
gcaaagaggucagagaaaa

SEQ ID NO: 703776 - RNA, 19 nt, Homo sapiens
  misc_RNA (1)...(19): siRNA sense strand
aggacaagcuguugcaauu

SEQ ID NO: 703777 - RNA, 19 nt, Homo sapiens
  misc_RNA (1)...(19): siRNA sense strand
uaccagaacuucagcaaag

SEQ ID NO: 703778 - RNA, 19 nt, Homo sapiens
  misc_RNA (1)...(19): siRNA sense strand
gacaagcuguugcaauucu

SEQ ID NO: 703779 - RNA, 19 nt, Homo sapiens
  misc_RNA (1)...(19): siRNA sense strand
gugcaaagaggucagagaa

SEQ ID NO: 703780 - RNA, 19 nt, Homo sapiens
  misc_RNA (1)...(19): siRNA sense strand
caaggaaggacaagcuguu

SEQ ID NO: 703781 - RNA, 19 nt, Homo sapiens
  misc_RNA (1)...(19): siRNA sense strand
gaggaccaacagagcuuua

SEQ ID NO: 703782 - RNA, 19 nt, Homo sapiens
  misc_RNA (1)...(19): siRNA sense strand
ggaaggacaagcuguugca

SEQ ID NO: 703783 - RNA, 19 nt, Homo sapiens
  misc_RNA (1)...(19): siRNA sense strand
guaccagaacuucagcaaa

SEQ ID NO: 703784 - RNA, 19 nt, Homo sapiens
  misc_RNA (1)...(19): siRNA sense strand
ggacaagcuguugcaauuc

SEQ ID NO: 703785 - RNA, 19 nt, Homo sapiens
  misc_RNA (1)...(19): siRNA sense strand
acaagcuguugcaauucua

SEQ ID NO: 703786 - RNA, 19 nt, Homo sapiens
  misc_RNA (1)...(19): siRNA sense strand
gaaaaucuaccagcagaga

SEQ ID NO: 703787 - RNA, 19 nt, Homo sapiens
  misc_RNA (1)...(19): siRNA sense strand
gacauggcacccacaagga

SEQ ID NO: 703788 - RNA, 19 nt, Homo sapiens
  misc_RNA (1)...(19): siRNA sense strand
gaaggacaagcuguugcaa

SEQ ID NO: 703789 - RNA, 19 nt, Homo sapiens
  misc_RNA (1)...(19): siRNA sense strand
ccacaaggaaggacaagcu

SEQ ID NO: 703790 - RNA, 19 nt, Homo sapiens
  misc_RNA (1)...(19): siRNA sense strand
caucuuccagguaccagaa

SEQ ID NO: 703791 - RNA, 19 nt, Homo sapiens
  misc_RNA (1)...(19): siRNA sense strand
gcaaagaggucagagaaaa

SEQ ID NO: 703792 - RNA, 19 nt, Homo sapiens
  misc_RNA (1)...(19): siRNA sense strand
ggaaccggauuacgugaau

SEQ ID NO: 703793 - RNA, 19 nt, Homo sapiens
  misc_RNA (1)...(19): siRNA sense strand
aggacaagcuguugcaauu

SEQ ID NO: 703794 - RNA, 19 nt, Homo sapiens
  misc_RNA (1)...(19): siRNA sense strand
gaacucagcauccauccau

SEQ ID NO: 703795 - RNA, 19 nt, Homo sapiens
  misc_RNA (1)...(19): siRNA sense strand
uaccagaacuucagcaaag

SEQ ID NO: 703796 - RNA, 19 nt, Homo sapiens
  misc_RNA (1)...(19): siRNA sense strand
gacaagcuguugcaauucu

SEQ ID NO: 703797 - RNA, 19 nt, Homo sapiens
  misc_RNA (1)...(19): siRNA sense strand
gugcaaagaggucagagaa

SEQ ID NO: 703798 - RNA, 19 nt, Homo sapiens
  misc_RNA (1)...(19): siRNA sense strand
caaggaaggacaagcuguu

SEQ ID NO: 703799 - RNA, 19 nt, Homo sapiens
  misc_RNA (1)...(19): siRNA sense strand
gaggaccaacagagcuuua

SEQ ID NO: 703800 - RNA, 19 nt, Homo sapiens
  misc_RNA (1)...(19): siRNA sense strand
gaaccggauuacgugaaug

SEQ ID NO: 703801 - RNA, 19 nt, Homo sapiens
  misc_RNA (1)...(19): siRNA sense strand
ggaaggacaagcuguugca

SEQ ID NO: 703802 - RNA, 19 nt, Homo sapiens
  misc_RNA (1)...(19): siRNA sense strand
uaucagaacucagcaucca

SEQ ID NO: 703803 - RNA, 19 nt, Homo sapiens
  misc_RNA (1)...(19): siRNA sense strand
guaccagaacuucagcaaa

SEQ ID NO: 703804 - RNA, 19 nt, Homo sapiens
  misc_RNA (1)...(19): siRNA sense strand
ggacaagcuguugcaauuc

SEQ ID NO: 703805 - RNA, 19 nt, Homo sapiens
  misc_RNA (1)...(19): siRNA sense strand
acaagcuguugcaauucua

SEQ ID NO: 703806 - RNA, 19 nt, Homo sapiens
  misc_RNA (1)...(19): siRNA sense strand
gaaaaucuaccagcagaga

SEQ ID NO: 703807 - RNA, 19 nt, Homo sapiens
  misc_RNA (1)...(19): siRNA sense strand
gacauggcacccacaagga

SEQ ID NO: 703808 - RNA, 19 nt, Homo sapiens
  misc_RNA (1)...(19): siRNA sense strand
gggcaacuccagagagaag

SEQ ID NO: 703809 - RNA, 19 nt, Homo sapiens
  misc_RNA (1)...(19): siRNA sense strand
gcagaaaaccacagagaca

SEQ ID NO: 703810 - RNA, 19 nt, Homo sapiens
  misc_RNA (1)...(19): siRNA sense strand
gaaggacaagcuguugcaa

SEQ ID NO: 703811 - RNA, 19 nt, Homo sapiens
  misc_RNA (1)...(19): siRNA sense strand
ccacaaggaaggacaagcu

SEQ ID NO: 703812 - RNA, 19 nt, Homo sapiens
  misc_RNA (1)...(19): siRNA sense strand
gggaaccggauuacgugaa

SEQ ID NO: 703813 - RNA, 19 nt, Homo sapiens
  misc_RNA (1)...(19): siRNA sense strand
gccugucacuggcccugaa

SEQ ID NO: 703814 - RNA, 19 nt, Homo sapiens
  misc_RNA (1)...(19): siRNA sense strand
cggaagaagaugaggaauc

SEQ ID NO: 703815 - RNA, 19 nt, Homo sapiens
  misc_RNA (1)...(19): siRNA sense strand
caucuuccagguaccagaa

SEQ ID NO: 703816 - RNA, 19 nt, Homo sapiens
  misc_RNA (1)...(19): siRNA sense strand
gcaaagaggucagagaaaa

SEQ ID NO: 703817 - RNA, 19 nt, Homo sapiens
  misc_RNA (1)...(19): siRNA sense strand
ggaaccggauuacgugaau

SEQ ID NO: 703818 - RNA, 19 nt, Homo sapiens
  misc_RNA (1)...(19): siRNA sense strand
aggacaagcuguugcaauu

SEQ ID NO: 703819 - RNA, 19 nt, Homo sapiens
  misc_RNA (1)...(19): siRNA sense strand
gaacucagcauccauccau

SEQ ID NO: 703820 - RNA, 19 nt, Homo sapiens
  misc_RNA (1)...(19): siRNA sense strand
uaccagaacuucagcaaag

SEQ ID NO: 703821 - RNA, 19 nt, Homo sapiens
  misc_RNA (1)...(19): siRNA sense strand
gacaagcuguugcaauucu

SEQ ID NO: 703822 - RNA, 19 nt, Homo sapiens
  misc_RNA (1)...(19): siRNA sense strand
gugcaaagaggucagagaa

SEQ ID NO: 703823 - RNA, 19 nt, Homo sapiens
  misc_RNA (1)...(19): siRNA sense strand
caaggaaggacaagcuguu

SEQ ID NO: 703824 - RNA, 19 nt, Homo sapiens
  misc_RNA (1)...(19): siRNA sense strand
gaggaccaacagagcuuua

SEQ ID NO: 703825 - RNA, 19 nt, Homo sapiens
  misc_RNA (1)...(19): siRNA sense strand
gaaccggauuacgugaaug

SEQ ID NO: 703826 - RNA, 19 nt, Homo sapiens
  misc_RNA (1)...(19): siRNA sense strand
ggaaggacaagcuguugca

SEQ ID NO: 703827 - RNA, 19 nt, Homo sapiens
  misc_RNA (1)...(19): siRNA sense strand
uaucagaacucagcaucca

SEQ ID NO: 703828 - RNA, 19 nt, Homo sapiens
  misc_RNA (1)...(19): siRNA sense strand
guaccagaacuucagcaaa

SEQ ID NO: 703829 - RNA, 19 nt, Homo sapiens
  misc_RNA (1)...(19): siRNA sense strand
ggacaagcuguugcaauuc

SEQ ID NO: 703830 - RNA, 19 nt, Homo sapiens
  misc_RNA (1)...(19): siRNA sense strand
acaagcuguugcaauucua

SEQ ID NO: 703831 - RNA, 19 nt, Homo sapiens
  misc_RNA (1)...(19): siRNA sense strand
gaaaaucuaccagcagaga

SEQ ID NO: 703832 - RNA, 19 nt, Homo sapiens
  misc_RNA (1)...(19): siRNA sense strand
gacauggcacccacaagga

SEQ ID NO: 703833 - RNA, 19 nt, Homo sapiens
  misc_RNA (1)...(19): siRNA sense strand
gggcaacuccagagagaag

SEQ ID NO: 703834 - RNA, 19 nt, Homo sapiens
  misc_RNA (1)...(19): siRNA sense strand
gcagaaaaccacagagaca

SEQ ID NO: 703835 - RNA, 19 nt, Homo sapiens
  misc_RNA (1)...(19): siRNA sense strand
gaaggacaagcuguugcaa

SEQ ID NO: 703836 - RNA, 19 nt, Homo sapiens
  misc_RNA (1)...(19): siRNA sense strand
ccacaaggaaggacaagcu

SEQ ID NO: 703837 - RNA, 19 nt, Homo sapiens
  misc_RNA (1)...(19): siRNA sense strand
gggaaccggauuacgugaa

SEQ ID NO: 703838 - RNA, 19 nt, Homo sapiens
  misc_RNA (1)...(19): siRNA sense strand
gccugucacuggcccugaa

SEQ ID NO: 703839 - RNA, 19 nt, Homo sapiens
  misc_RNA (1)...(19): siRNA sense strand
cggaagaagaugaggaauc

SEQ ID NO: 703840 - RNA, 19 nt, Homo sapiens
  misc_RNA (1)...(19): siRNA sense strand
caucuuccagguaccagaa

SEQ ID NO: 703841 - RNA, 19 nt, Homo sapiens
  misc_RNA (1)...(19): siRNA sense strand
gcaaagaggucagagaaaa

SEQ ID NO: 703842 - RNA, 19 nt, Homo sapiens
  misc_RNA (1)...(19): siRNA sense strand
ggaaccggauuacgugaau

SEQ ID NO: 703843 - RNA, 19 nt, Homo sapiens
  misc_RNA (1)...(19): siRNA sense strand
aggacaagcuguugcaauu

SEQ ID NO: 703844 - RNA, 19 nt, Homo sapiens
  misc_RNA (1)...(19): siRNA sense strand
gaacucagcauccauccau

SEQ ID NO: 703845 - RNA, 19 nt, Homo sapiens
  misc_RNA (1)...(19): siRNA sense strand
uaccagaacuucagcaaag

SEQ ID NO: 703846 - RNA, 19 nt, Homo sapiens
  misc_RNA (1)...(19): siRNA sense strand
gacaagcuguugcaauucu

SEQ ID NO: 703847 - RNA, 19 nt, Homo sapiens
  misc_RNA (1)...(19): siRNA sense strand
gugcaaagaggucagagaa

SEQ ID NO: 703848 - RNA, 19 nt, Homo sapiens
  misc_RNA (1)...(19): siRNA sense strand
caaggaaggacaagcuguu

SEQ ID NO: 703849 - RNA, 19 nt, Homo sapiens
  misc_RNA (1)...(19): siRNA sense strand
gaggaccaacagagcuuua

SEQ ID NO: 703850 - RNA, 19 nt, Homo sapiens
  misc_RNA (1)...(19): siRNA sense strand
gaaccggauuacgugaaug

SEQ ID NO: 703851 - RNA, 19 nt, Homo sapiens
  misc_RNA (1)...(19): siRNA sense strand
ggaaggacaagcuguugca

SEQ ID NO: 703852 - RNA, 19 nt, Homo sapiens
  misc_RNA (1)...(19): siRNA sense strand
uaucagaacucagcaucca

SEQ ID NO: 703853 - RNA, 19 nt, Homo sapiens
  misc_RNA (1)...(19): siRNA sense strand
guaccagaacuucagcaaa

SEQ ID NO: 703854 - RNA, 19 nt, Homo sapiens
  misc_RNA (1)...(19): siRNA sense strand
ggacaagcuguugcaauuc

SEQ ID NO: 703855 - RNA, 19 nt, Homo sapiens
  misc_RNA (1)...(19): siRNA sense strand
acaagcuguugcaauucua

SEQ ID NO: 703856 - RNA, 19 nt, Homo sapiens
  misc_RNA (1)...(19): siRNA sense strand
gaaaaucuaccagcagaga

SEQ ID NO: 703857 - RNA, 19 nt, Homo sapiens
  misc_RNA (1)...(19): siRNA sense strand
gacauggcacccacaagga

SEQ ID NO: 703858 - RNA, 19 nt, Homo sapiens
  misc_RNA (1)...(19): siRNA sense strand
gggcaacuccagagagaag

SEQ ID NO: 703859 - RNA, 19 nt, Homo sapiens
  misc_RNA (1)...(19): siRNA sense strand
gcagaaaaccacagagaca

SEQ ID NO: 703860 - RNA, 19 nt, Homo sapiens
  misc_RNA (1)...(19): siRNA sense strand
gaaggacaagcuguugcaa

SEQ ID NO: 703861 - RNA, 19 nt, Homo sapiens
  misc_RNA (1)...(19): siRNA sense strand
ccacaaggaaggacaagcu

SEQ ID NO: 703862 - RNA, 19 nt, Homo sapiens
  misc_RNA (1)...(19): siRNA sense strand
gggaaccggauuacgugaa

SEQ ID NO: 703863 - RNA, 19 nt, Homo sapiens
  misc_RNA (1)...(19): siRNA sense strand
gccugucacuggcccugaa

SEQ ID NO: 703864 - RNA, 19 nt, Homo sapiens
  misc_RNA (1)...(19): siRNA sense strand
cggaagaagaugaggaauc

SEQ ID NO: 703865 - RNA, 19 nt, Homo sapiens
  misc_RNA (1)...(19): siRNA sense strand
caucuuccagguaccagaa

SEQ ID NO: 703866 - RNA, 19 nt, Homo sapiens
  misc_RNA (1)...(19): siRNA sense strand
gcaaagaggucagagaaaa

SEQ ID NO: 703867 - RNA, 19 nt, Homo sapiens
  misc_RNA (1)...(19): siRNA sense strand
aggacaagcuguugcaauu

SEQ ID NO: 703868 - RNA, 19 nt, Homo sapiens
  misc_RNA (1)...(19): siRNA sense strand
uaccagaacuucagcaaag

SEQ ID NO: 703869 - RNA, 19 nt, Homo sapiens
  misc_RNA (1)...(19): siRNA sense strand
gacaagcuguugcaauucu

SEQ ID NO: 703870 - RNA, 19 nt, Homo sapiens
  misc_RNA (1)...(19): siRNA sense strand
gugcaaagaggucagagaa

SEQ ID NO: 703871 - RNA, 19 nt, Homo sapiens
  misc_RNA (1)...(19): siRNA sense strand
caaggaaggacaagcuguu

SEQ ID NO: 703872 - RNA, 19 nt, Homo sapiens
  misc_RNA (1)...(19): siRNA sense strand
gaggaccaacagagcuuua

SEQ ID NO: 703873 - RNA, 19 nt, Homo sapiens
  misc_RNA (1)...(19): siRNA sense strand
ggaaggacaagcuguugca

SEQ ID NO: 703874 - RNA, 19 nt, Homo sapiens
  misc_RNA (1)...(19): siRNA sense strand
guaccagaacuucagcaaa

SEQ ID NO: 703875 - RNA, 19 nt, Homo sapiens
  misc_RNA (1)...(19): siRNA sense strand
ggacaagcuguugcaauuc

SEQ ID NO: 703876 - RNA, 19 nt, Homo sapiens
  misc_RNA (1)...(19): siRNA sense strand
acaagcuguugcaauucua

SEQ ID NO: 703877 - RNA, 19 nt, Homo sapiens
  misc_RNA (1)...(19): siRNA sense strand
gaaaaucuaccagcagaga

SEQ ID NO: 703878 - RNA, 19 nt, Homo sapiens
  misc_RNA (1)...(19): siRNA sense strand
gacauggcacccacaagga

SEQ ID NO: 703879 - RNA, 19 nt, Homo sapiens
  misc_RNA (1)...(19): siRNA sense strand
gaaggacaagcuguugcaa

SEQ ID NO: 703880 - RNA, 19 nt, Homo sapiens
  misc_RNA (1)...(19): siRNA sense strand
ccacaaggaaggacaagcu

SEQ ID NO: 703881 - RNA, 19 nt, Homo sapiens
  misc_RNA (1)...(19): siRNA sense strand
caucuuccagguaccagaa

SEQ ID NO: 703882 - RNA, 19 nt, Homo sapiens
  misc_RNA (1)...(19): siRNA sense strand
gguuugaucuuguugacua

SEQ ID NO: 703883 - RNA, 19 nt, Homo sapiens
  misc_RNA (1)...(19): siRNA sense strand
gaggaaaggcggacucuca

SEQ ID NO: 703884 - RNA, 19 nt, Homo sapiens
  misc_RNA (1)...(19): siRNA sense strand
ugauguggaugaugccaaa

SEQ ID NO: 703885 - RNA, 19 nt, Homo sapiens
  misc_RNA (1)...(19): siRNA sense strand
acacaagaaugggaggaaa

SEQ ID NO: 703886 - RNA, 19 nt, Homo sapiens
  misc_RNA (1)...(19): siRNA sense strand
aaacuaggaaucuaugaug

SEQ ID NO: 703887 - RNA, 19 nt, Homo sapiens
  misc_RNA (1)...(19): siRNA sense strand
cucaggaacuucauucuuc

SEQ ID NO: 703888 - RNA, 19 nt, Homo sapiens
  misc_RNA (1)...(19): siRNA sense strand
gcauggaggacacaagaau

SEQ ID NO: 703889 - RNA, 19 nt, Homo sapiens
  misc_RNA (1)...(19): siRNA sense strand
ucaggaacuucauucuuca

SEQ ID NO: 703890 - RNA, 19 nt, Homo sapiens
  misc_RNA (1)...(19): siRNA sense strand
gguuuauggugauugcauu

SEQ ID NO: 703891 - RNA, 19 nt, Homo sapiens
  misc_RNA (1)...(19): siRNA sense strand
ggaugaugccaaaguuuua

SEQ ID NO: 703892 - RNA, 19 nt, Homo sapiens
  misc_RNA (1)...(19): siRNA sense strand
uguggaugaugccaaaguu

SEQ ID NO: 703893 - RNA, 19 nt, Homo sapiens
  misc_RNA (1)...(19): siRNA sense strand
ugacuaugaggaaguucua

SEQ ID NO: 703894 - RNA, 19 nt, Homo sapiens
  misc_RNA (1)...(19): siRNA sense strand
guagcugucguuugguuug

SEQ ID NO: 703895 - RNA, 19 nt, Homo sapiens
  misc_RNA (1)...(19): siRNA sense strand
ggcggacucucaggaacuu

SEQ ID NO: 703896 - RNA, 19 nt, Homo sapiens
  misc_RNA (1)...(19): siRNA sense strand
aagcauggaggacacaaga

SEQ ID NO: 703897 - RNA, 19 nt, Homo sapiens
  misc_RNA (1)...(19): siRNA sense strand
uagcugucguuugguuuga

SEQ ID NO: 703898 - RNA, 19 nt, Homo sapiens
  misc_RNA (1)...(19): siRNA sense strand
aggaaucuaugaugcugau

SEQ ID NO: 703899 - RNA, 19 nt, Homo sapiens
  misc_RNA (1)...(19): siRNA sense strand
guggaugaugccaaaguuu

SEQ ID NO: 703900 - RNA, 19 nt, Homo sapiens
  misc_RNA (1)...(19): siRNA sense strand
uugaucuuguugacuauga

SEQ ID NO: 703901 - RNA, 19 nt, Homo sapiens
  misc_RNA (1)...(19): siRNA sense strand
cuaugaugcugauggugau

SEQ ID NO: 703902 - RNA, 19 nt, Homo sapiens
  misc_RNA (1)...(19): siRNA sense strand
aaaggcggacucucaggaa

SEQ ID NO: 703903 - RNA, 19 nt, Homo sapiens
  misc_RNA (1)...(19): siRNA sense strand
gaaaacuaggaaucuauga

SEQ ID NO: 703904 - RNA, 19 nt, Homo sapiens
  misc_RNA (1)...(19): siRNA sense strand
ggaaaacuaggaaucuaug

SEQ ID NO: 703905 - RNA, 19 nt, Homo sapiens
  misc_RNA (1)...(19): siRNA sense strand
gguuugaucuuguugacua

SEQ ID NO: 703906 - RNA, 19 nt, Homo sapiens
  misc_RNA (1)...(19): siRNA sense strand
gaggaaaggcggacucuca

SEQ ID NO: 703907 - RNA, 19 nt, Homo sapiens
  misc_RNA (1)...(19): siRNA sense strand
ugauguggaugaugccaaa

SEQ ID NO: 703908 - RNA, 19 nt, Homo sapiens
  misc_RNA (1)...(19): siRNA sense strand
acacaagaaugggaggaaa

SEQ ID NO: 703909 - RNA, 19 nt, Homo sapiens
  misc_RNA (1)...(19): siRNA sense strand
aaacuaggaaucuaugaug

SEQ ID NO: 703910 - RNA, 19 nt, Homo sapiens
  misc_RNA (1)...(19): siRNA sense strand
cucaggaacuucauucuuc

SEQ ID NO: 703911 - RNA, 19 nt, Homo sapiens
  misc_RNA (1)...(19): siRNA sense strand
gcauggaggacacaagaau

SEQ ID NO: 703912 - RNA, 19 nt, Homo sapiens
  misc_RNA (1)...(19): siRNA sense strand
ucaggaacuucauucuuca

SEQ ID NO: 703913 - RNA, 19 nt, Homo sapiens
  misc_RNA (1)...(19): siRNA sense strand
gguuuauggugauugcauu

SEQ ID NO: 703914 - RNA, 19 nt, Homo sapiens
  misc_RNA (1)...(19): siRNA sense strand
ggaugaugccaaaguuuua

SEQ ID NO: 703915 - RNA, 19 nt, Homo sapiens
  misc_RNA (1)...(19): siRNA sense strand
uguggaugaugccaaaguu

SEQ ID NO: 703916 - RNA, 19 nt, Homo sapiens
  misc_RNA (1)...(19): siRNA sense strand
ugacuaugaggaaguucua

SEQ ID NO: 703917 - RNA, 19 nt, Homo sapiens
  misc_RNA (1)...(19): siRNA sense strand
guagcugucguuugguuug

SEQ ID NO: 703918 - RNA, 19 nt, Homo sapiens
  misc_RNA (1)...(19): siRNA sense strand
ggcggacucucaggaacuu

SEQ ID NO: 703919 - RNA, 19 nt, Homo sapiens
  misc_RNA (1)...(19): siRNA sense strand
aagcauggaggacacaaga

SEQ ID NO: 703920 - RNA, 19 nt, Homo sapiens
  misc_RNA (1)...(19): siRNA sense strand
uagcugucguuugguuuga

SEQ ID NO: 703921 - RNA, 19 nt, Homo sapiens
  misc_RNA (1)...(19): siRNA sense strand
aggaaucuaugaugcugau

SEQ ID NO: 703922 - RNA, 19 nt, Homo sapiens
  misc_RNA (1)...(19): siRNA sense strand
guggaugaugccaaaguuu

SEQ ID NO: 703923 - RNA, 19 nt, Homo sapiens
  misc_RNA (1)...(19): siRNA sense strand
uugaucuuguugacuauga

SEQ ID NO: 703924 - RNA, 19 nt, Homo sapiens
  misc_RNA (1)...(19): siRNA sense strand
cuaugaugcugauggugau

SEQ ID NO: 703925 - RNA, 19 nt, Homo sapiens
  misc_RNA (1)...(19): siRNA sense strand
aaaggcggacucucaggaa

SEQ ID NO: 703926 - RNA, 19 nt, Homo sapiens
  misc_RNA (1)...(19): siRNA sense strand
gaaaacuaggaaucuauga

SEQ ID NO: 703927 - RNA, 19 nt, Homo sapiens
  misc_RNA (1)...(19): siRNA sense strand
ggaaaacuaggaaucuaug

SEQ ID NO: 703928 - RNA, 19 nt, Homo sapiens
  misc_RNA (1)...(19): siRNA sense strand
gguuugaucuuguugacua

SEQ ID NO: 703929 - RNA, 19 nt, Homo sapiens
  misc_RNA (1)...(19): siRNA sense strand
gaggaaaggcggacucuca

SEQ ID NO: 703930 - RNA, 19 nt, Homo sapiens
  misc_RNA (1)...(19): siRNA sense strand
ugauguggaugaugccaaa

SEQ ID NO: 703931 - RNA, 19 nt, Homo sapiens
  misc_RNA (1)...(19): siRNA sense strand
acacaagaaugggaggaaa

SEQ ID NO: 703932 - RNA, 19 nt, Homo sapiens
  misc_RNA (1)...(19): siRNA sense strand
aaacuaggaaucuaugaug

SEQ ID NO: 703933 - RNA, 19 nt, Homo sapiens
  misc_RNA (1)...(19): siRNA sense strand
cucaggaacuucauucuuc

SEQ ID NO: 703934 - RNA, 19 nt, Homo sapiens
  misc_RNA (1)...(19): siRNA sense strand
gcauggaggacacaagaau

SEQ ID NO: 703935 - RNA, 19 nt, Homo sapiens
  misc_RNA (1)...(19): siRNA sense strand
ucaggaacuucauucuuca

SEQ ID NO: 703936 - RNA, 19 nt, Homo sapiens
  misc_RNA (1)...(19): siRNA sense strand
gguuuauggugauugcauu

SEQ ID NO: 703937 - RNA, 19 nt, Homo sapiens
  misc_RNA (1)...(19): siRNA sense strand
ggaugaugccaaaguuuua

SEQ ID NO: 703938 - RNA, 19 nt, Homo sapiens
  misc_RNA (1)...(19): siRNA sense strand
uguggaugaugccaaaguu

SEQ ID NO: 703939 - RNA, 19 nt, Homo sapiens
  misc_RNA (1)...(19): siRNA sense strand
ugacuaugaggaaguucua

SEQ ID NO: 703940 - RNA, 19 nt, Homo sapiens
  misc_RNA (1)...(19): siRNA sense strand
guagcugucguuugguuug

SEQ ID NO: 703941 - RNA, 19 nt, Homo sapiens
  misc_RNA (1)...(19): siRNA sense strand
ggcggacucucaggaacuu

SEQ ID NO: 703942 - RNA, 19 nt, Homo sapiens
  misc_RNA (1)...(19): siRNA sense strand
aagcauggaggacacaaga

SEQ ID NO: 703943 - RNA, 19 nt, Homo sapiens
  misc_RNA (1)...(19): siRNA sense strand
uagcugucguuugguuuga

SEQ ID NO: 703944 - RNA, 19 nt, Homo sapiens
  misc_RNA (1)...(19): siRNA sense strand
aggaaucuaugaugcugau

SEQ ID NO: 703945 - RNA, 19 nt, Homo sapiens
  misc_RNA (1)...(19): siRNA sense strand
guggaugaugccaaaguuu

SEQ ID NO: 703946 - RNA, 19 nt, Homo sapiens
  misc_RNA (1)...(19): siRNA sense strand
uugaucuuguugacuauga

SEQ ID NO: 703947 - RNA, 19 nt, Homo sapiens
  misc_RNA (1)...(19): siRNA sense strand
cuaugaugcugauggugau

SEQ ID NO: 703948 - RNA, 19 nt, Homo sapiens
  misc_RNA (1)...(19): siRNA sense strand
aaaggcggacucucaggaa

SEQ ID NO: 703949 - RNA, 19 nt, Homo sapiens
  misc_RNA (1)...(19): siRNA sense strand
gaaaacuaggaaucuauga

SEQ ID NO: 703950 - RNA, 19 nt, Homo sapiens
  misc_RNA (1)...(19): siRNA sense strand
ggaaaacuaggaaucuaug

SEQ ID NO: 703951 - RNA, 19 nt, Homo sapiens
  misc_RNA (1)...(19): siRNA sense strand
gguuugaucuuguugacua

SEQ ID NO: 703952 - RNA, 19 nt, Homo sapiens
  misc_RNA (1)...(19): siRNA sense strand
gaggaaaggcggacucuca

SEQ ID NO: 703953 - RNA, 19 nt, Homo sapiens
  misc_RNA (1)...(19): siRNA sense strand
ugauguggaugaugccaaa

SEQ ID NO: 703954 - RNA, 19 nt, Homo sapiens
  misc_RNA (1)...(19): siRNA sense strand
acacaagaaugggaggaaa

SEQ ID NO: 703955 - RNA, 19 nt, Homo sapiens
  misc_RNA (1)...(19): siRNA sense strand
aaacuaggaaucuaugaug

SEQ ID NO: 703956 - RNA, 19 nt, Homo sapiens
  misc_RNA (1)...(19): siRNA sense strand
cucaggaacuucauucuuc

SEQ ID NO: 703957 - RNA, 19 nt, Homo sapiens
  misc_RNA (1)...(19): siRNA sense strand
gcauggaggacacaagaau

SEQ ID NO: 703958 - RNA, 19 nt, Homo sapiens
  misc_RNA (1)...(19): siRNA sense strand
ucaggaacuucauucuuca

SEQ ID NO: 703959 - RNA, 19 nt, Homo sapiens
  misc_RNA (1)...(19): siRNA sense strand
gguuuauggugauugcauu

SEQ ID NO: 703960 - RNA, 19 nt, Homo sapiens
  misc_RNA (1)...(19): siRNA sense strand
ggaugaugccaaaguuuua

SEQ ID NO: 703961 - RNA, 19 nt, Homo sapiens
  misc_RNA (1)...(19): siRNA sense strand
uguggaugaugccaaaguu

SEQ ID NO: 703962 - RNA, 19 nt, Homo sapiens
  misc_RNA (1)...(19): siRNA sense strand
ugacuaugaggaaguucua

SEQ ID NO: 703963 - RNA, 19 nt, Homo sapiens
  misc_RNA (1)...(19): siRNA sense strand
guagcugucguuugguuug

SEQ ID NO: 703964 - RNA, 19 nt, Homo sapiens
  misc_RNA (1)...(19): siRNA sense strand
ggcggacucucaggaacuu

SEQ ID NO: 703965 - RNA, 19 nt, Homo sapiens
  misc_RNA (1)...(19): siRNA sense strand
aagcauggaggacacaaga

SEQ ID NO: 703966 - RNA, 19 nt, Homo sapiens
  misc_RNA (1)...(19): siRNA sense strand
uagcugucguuugguuuga

SEQ ID NO: 703967 - RNA, 19 nt, Homo sapiens
  misc_RNA (1)...(19): siRNA sense strand
aggaaucuaugaugcugau

SEQ ID NO: 703968 - RNA, 19 nt, Homo sapiens
  misc_RNA (1)...(19): siRNA sense strand
guggaugaugccaaaguuu

SEQ ID NO: 703969 - RNA, 19 nt, Homo sapiens
  misc_RNA (1)...(19): siRNA sense strand
uugaucuuguugacuauga

SEQ ID NO: 703970 - RNA, 19 nt, Homo sapiens
  misc_RNA (1)...(19): siRNA sense strand
cuaugaugcugauggugau

SEQ ID NO: 703971 - RNA, 19 nt, Homo sapiens
  misc_RNA (1)...(19): siRNA sense strand
aaaggcggacucucaggaa

SEQ ID NO: 703972 - RNA, 19 nt, Homo sapiens
  misc_RNA (1)...(19): siRNA sense strand
gaaaacuaggaaucuauga

SEQ ID NO: 703973 - RNA, 19 nt, Homo sapiens
  misc_RNA (1)...(19): siRNA sense strand
ggaaaacuaggaaucuaug

SEQ ID NO: 703974 - RNA, 19 nt, Homo sapiens
  misc_RNA (1)...(19): siRNA sense strand
gguuugaucuuguugacua

SEQ ID NO: 703975 - RNA, 19 nt, Homo sapiens
  misc_RNA (1)...(19): siRNA sense strand
gaggaaaggcggacucuca

SEQ ID NO: 703976 - RNA, 19 nt, Homo sapiens
  misc_RNA (1)...(19): siRNA sense strand
ugauguggaugaugccaaa

SEQ ID NO: 703977 - RNA, 19 nt, Homo sapiens
  misc_RNA (1)...(19): siRNA sense strand
acacaagaaugggaggaaa

SEQ ID NO: 703978 - RNA, 19 nt, Homo sapiens
  misc_RNA (1)...(19): siRNA sense strand
aaacuaggaaucuaugaug

SEQ ID NO: 703979 - RNA, 19 nt, Homo sapiens
  misc_RNA (1)...(19): siRNA sense strand
cucaggaacuucauucuuc

SEQ ID NO: 703980 - RNA, 19 nt, Homo sapiens
  misc_RNA (1)...(19): siRNA sense strand
gcauggaggacacaagaau

SEQ ID NO: 703981 - RNA, 19 nt, Homo sapiens
  misc_RNA (1)...(19): siRNA sense strand
ucaggaacuucauucuuca

SEQ ID NO: 703982 - RNA, 19 nt, Homo sapiens
  misc_RNA (1)...(19): siRNA sense strand
gguuuauggugauugcauu

SEQ ID NO: 703983 - RNA, 19 nt, Homo sapiens
  misc_RNA (1)...(19): siRNA sense strand
ggaugaugccaaaguuuua

SEQ ID NO: 703984 - RNA, 19 nt, Homo sapiens
  misc_RNA (1)...(19): siRNA sense strand
uguggaugaugccaaaguu

SEQ ID NO: 703985 - RNA, 19 nt, Homo sapiens
  misc_RNA (1)...(19): siRNA sense strand
ugacuaugaggaaguucua

SEQ ID NO: 703986 - RNA, 19 nt, Homo sapiens
  misc_RNA (1)...(19): siRNA sense strand
guagcugucguuugguuug

SEQ ID NO: 703987 - RNA, 19 nt, Homo sapiens
  misc_RNA (1)...(19): siRNA sense strand
ggcggacucucaggaacuu

SEQ ID NO: 703988 - RNA, 19 nt, Homo sapiens
  misc_RNA (1)...(19): siRNA sense strand
aagcauggaggacacaaga

SEQ ID NO: 703989 - RNA, 19 nt, Homo sapiens
  misc_RNA (1)...(19): siRNA sense strand
uagcugucguuugguuuga

SEQ ID NO: 703990 - RNA, 19 nt, Homo sapiens
  misc_RNA (1)...(19): siRNA sense strand
aggaaucuaugaugcugau

SEQ ID NO: 703991 - RNA, 19 nt, Homo sapiens
  misc_RNA (1)...(19): siRNA sense strand
guggaugaugccaaaguuu

SEQ ID NO: 703992 - RNA, 19 nt, Homo sapiens
  misc_RNA (1)...(19): siRNA sense strand
uugaucuuguugacuauga

SEQ ID NO: 703993 - RNA, 19 nt, Homo sapiens
  misc_RNA (1)...(19): siRNA sense strand
cuaugaugcugauggugau

SEQ ID NO: 703994 - RNA, 19 nt, Homo sapiens
  misc_RNA (1)...(19): siRNA sense strand
aaaggcggacucucaggaa

SEQ ID NO: 703995 - RNA, 19 nt, Homo sapiens
  misc_RNA (1)...(19): siRNA sense strand
gaaaacuaggaaucuauga

SEQ ID NO: 703996 - RNA, 19 nt, Homo sapiens
  misc_RNA (1)...(19): siRNA sense strand
ggaaaacuaggaaucuaug

SEQ ID NO: 703997 - RNA, 19 nt, Homo sapiens
  misc_RNA (1)...(19): siRNA sense strand
gguuugaucuuguugacua

SEQ ID NO: 703998 - RNA, 19 nt, Homo sapiens
  misc_RNA (1)...(19): siRNA sense strand
gaggaaaggcggacucuca

SEQ ID NO: 703999 - RNA, 19 nt, Homo sapiens
  misc_RNA (1)...(19): siRNA sense strand
ugauguggaugaugccaaa

SEQ ID NO: 704000 - RNA, 19 nt, Homo sapiens
  misc_RNA (1)...(19): siRNA sense strand
acacaagaaugggaggaaa

SEQ ID NO: 704001 - RNA, 19 nt, Homo sapiens
  misc_RNA (1)...(19): siRNA sense strand
aaacuaggaaucuaugaug

SEQ ID NO: 704002 - RNA, 19 nt, Homo sapiens
  misc_RNA (1)...(19): siRNA sense strand
cucaggaacuucauucuuc

SEQ ID NO: 704003 - RNA, 19 nt, Homo sapiens
  misc_RNA (1)...(19): siRNA sense strand
gcauggaggacacaagaau

SEQ ID NO: 704004 - RNA, 19 nt, Homo sapiens
  misc_RNA (1)...(19): siRNA sense strand
ucaggaacuucauucuuca

SEQ ID NO: 704005 - RNA, 19 nt, Homo sapiens
  misc_RNA (1)...(19): siRNA sense strand
gguuuauggugauugcauu

SEQ ID NO: 704006 - RNA, 19 nt, Homo sapiens
  misc_RNA (1)...(19): siRNA sense strand
ggaugaugccaaaguuuua

SEQ ID NO: 704007 - RNA, 19 nt, Homo sapiens
  misc_RNA (1)...(19): siRNA sense strand
uguggaugaugccaaaguu

SEQ ID NO: 704008 - RNA, 19 nt, Homo sapiens
  misc_RNA (1)...(19): siRNA sense strand
ugacuaugaggaaguucua

SEQ ID NO: 704009 - RNA, 19 nt, Homo sapiens
  misc_RNA (1)...(19): siRNA sense strand
guagcugucguuugguuug

SEQ ID NO: 704010 - RNA, 19 nt, Homo sapiens
  misc_RNA (1)...(19): siRNA sense strand
ggcggacucucaggaacuu

SEQ ID NO: 704011 - RNA, 19 nt, Homo sapiens
  misc_RNA (1)...(19): siRNA sense strand
aagcauggaggacacaaga

SEQ ID NO: 704012 - RNA, 19 nt, Homo sapiens
  misc_RNA (1)...(19): siRNA sense strand
uagcugucguuugguuuga

SEQ ID NO: 704013 - RNA, 19 nt, Homo sapiens
  misc_RNA (1)...(19): siRNA sense strand
aggaaucuaugaugcugau

SEQ ID NO: 704014 - RNA, 19 nt, Homo sapiens
  misc_RNA (1)...(19): siRNA sense strand
guggaugaugccaaaguuu

SEQ ID NO: 704015 - RNA, 19 nt, Homo sapiens
  misc_RNA (1)...(19): siRNA sense strand
uugaucuuguugacuauga

SEQ ID NO: 704016 - RNA, 19 nt, Homo sapiens
  misc_RNA (1)...(19): siRNA sense strand
cuaugaugcugauggugau

SEQ ID NO: 704017 - RNA, 19 nt, Homo sapiens
  misc_RNA (1)...(19): siRNA sense strand
aaaggcggacucucaggaa

SEQ ID NO: 704018 - RNA, 19 nt, Homo sapiens
  misc_RNA (1)...(19): siRNA sense strand
gaaaacuaggaaucuauga

SEQ ID NO: 704019 - RNA, 19 nt, Homo sapiens
  misc_RNA (1)...(19): siRNA sense strand
ggaaaacuaggaaucuaug

SEQ ID NO: 704020 - RNA, 19 nt, Homo sapiens
  misc_RNA (1)...(19): siRNA sense strand
gguuugaucuuguugacua

SEQ ID NO: 704021 - RNA, 19 nt, Homo sapiens
  misc_RNA (1)...(19): siRNA sense strand
gaggaaaggcggacucuca

SEQ ID NO: 704022 - RNA, 19 nt, Homo sapiens
  misc_RNA (1)...(19): siRNA sense strand
ugauguggaugaugccaaa

SEQ ID NO: 704023 - RNA, 19 nt, Homo sapiens
  misc_RNA (1)...(19): siRNA sense strand
acacaagaaugggaggaaa

SEQ ID NO: 704024 - RNA, 19 nt, Homo sapiens
  misc_RNA (1)...(19): siRNA sense strand
aaacuaggaaucuaugaug

SEQ ID NO: 704025 - RNA, 19 nt, Homo sapiens
  misc_RNA (1)...(19): siRNA sense strand
cucaggaacuucauucuuc

SEQ ID NO: 704026 - RNA, 19 nt, Homo sapiens
  misc_RNA (1)...(19): siRNA sense strand
gcauggaggacacaagaau

SEQ ID NO: 704027 - RNA, 19 nt, Homo sapiens
  misc_RNA (1)...(19): siRNA sense strand
ucaggaacuucauucuuca

SEQ ID NO: 704028 - RNA, 19 nt, Homo sapiens
  misc_RNA (1)...(19): siRNA sense strand
gguuuauggugauugcauu

SEQ ID NO: 704029 - RNA, 19 nt, Homo sapiens
  misc_RNA (1)...(19): siRNA sense strand
ggaugaugccaaaguuuua

SEQ ID NO: 704030 - RNA, 19 nt, Homo sapiens
  misc_RNA (1)...(19): siRNA sense strand
uguggaugaugccaaaguu

SEQ ID NO: 704031 - RNA, 19 nt, Homo sapiens
  misc_RNA (1)...(19): siRNA sense strand
ugacuaugaggaaguucua

SEQ ID NO: 704032 - RNA, 19 nt, Homo sapiens
  misc_RNA (1)...(19): siRNA sense strand
guagcugucguuugguuug

SEQ ID NO: 704033 - RNA, 19 nt, Homo sapiens
  misc_RNA (1)...(19): siRNA sense strand
ggcggacucucaggaacuu

SEQ ID NO: 704034 - RNA, 19 nt, Homo sapiens
  misc_RNA (1)...(19): siRNA sense strand
aagcauggaggacacaaga

SEQ ID NO: 704035 - RNA, 19 nt, Homo sapiens
  misc_RNA (1)...(19): siRNA sense strand
uagcugucguuugguuuga

SEQ ID NO: 704036 - RNA, 19 nt, Homo sapiens
  misc_RNA (1)...(19): siRNA sense strand
aggaaucuaugaugcugau

SEQ ID NO: 704037 - RNA, 19 nt, Homo sapiens
  misc_RNA (1)...(19): siRNA sense strand
guggaugaugccaaaguuu

SEQ ID NO: 704038 - RNA, 19 nt, Homo sapiens
  misc_RNA (1)...(19): siRNA sense strand
uugaucuuguugacuauga

SEQ ID NO: 704039 - RNA, 19 nt, Homo sapiens
  misc_RNA (1)...(19): siRNA sense strand
cuaugaugcugauggugau

SEQ ID NO: 704040 - RNA, 19 nt, Homo sapiens
  misc_RNA (1)...(19): siRNA sense strand
aaaggcggacucucaggaa

SEQ ID NO: 704041 - RNA, 19 nt, Homo sapiens
  misc_RNA (1)...(19): siRNA sense strand
gaaaacuaggaaucuauga

SEQ ID NO: 704042 - RNA, 19 nt, Homo sapiens
  misc_RNA (1)...(19): siRNA sense strand
ggaaaacuaggaaucuaug

SEQ ID NO: 704043 - RNA, 19 nt, Homo sapiens
  misc_RNA (1)...(19): siRNA sense strand
gguuugaucuuguugacua

SEQ ID NO: 704044 - RNA, 19 nt, Homo sapiens
  misc_RNA (1)...(19): siRNA sense strand
gaggaaaggcggacucuca

SEQ ID NO: 704045 - RNA, 19 nt, Homo sapiens
  misc_RNA (1)...(19): siRNA sense strand
ugauguggaugaugccaaa

SEQ ID NO: 704046 - RNA, 19 nt, Homo sapiens
  misc_RNA (1)...(19): siRNA sense strand
acacaagaaugggaggaaa

SEQ ID NO: 704047 - RNA, 19 nt, Homo sapiens
  misc_RNA (1)...(19): siRNA sense strand
aaacuaggaaucuaugaug

SEQ ID NO: 704048 - RNA, 19 nt, Homo sapiens
  misc_RNA (1)...(19): siRNA sense strand
cucaggaacuucauucuuc

SEQ ID NO: 704049 - RNA, 19 nt, Homo sapiens
  misc_RNA (1)...(19): siRNA sense strand
gcauggaggacacaagaau

SEQ ID NO: 704050 - RNA, 19 nt, Homo sapiens
  misc_RNA (1)...(19): siRNA sense strand
ucaggaacuucauucuuca

SEQ ID NO: 704051 - RNA, 19 nt, Homo sapiens
  misc_RNA (1)...(19): siRNA sense strand
gguuuauggugauugcauu

SEQ ID NO: 704052 - RNA, 19 nt, Homo sapiens
  misc_RNA (1)...(19): siRNA sense strand
ggaugaugccaaaguuuua

SEQ ID NO: 704053 - RNA, 19 nt, Homo sapiens
  misc_RNA (1)...(19): siRNA sense strand
uguggaugaugccaaaguu

SEQ ID NO: 704054 - RNA, 19 nt, Homo sapiens
  misc_RNA (1)...(19): siRNA sense strand
ugacuaugaggaaguucua

SEQ ID NO: 704055 - RNA, 19 nt, Homo sapiens
  misc_RNA (1)...(19): siRNA sense strand
guagcugucguuugguuug

SEQ ID NO: 704056 - RNA, 19 nt, Homo sapiens
  misc_RNA (1)...(19): siRNA sense strand
ggcggacucucaggaacuu

SEQ ID NO: 704057 - RNA, 19 nt, Homo sapiens
  misc_RNA (1)...(19): siRNA sense strand
aagcauggaggacacaaga

SEQ ID NO: 704058 - RNA, 19 nt, Homo sapiens
  misc_RNA (1)...(19): siRNA sense strand
uagcugucguuugguuuga

SEQ ID NO: 704059 - RNA, 19 nt, Homo sapiens
  misc_RNA (1)...(19): siRNA sense strand
aggaaucuaugaugcugau

SEQ ID NO: 704060 - RNA, 19 nt, Homo sapiens
  misc_RNA (1)...(19): siRNA sense strand
guggaugaugccaaaguuu

SEQ ID NO: 704061 - RNA, 19 nt, Homo sapiens
  misc_RNA (1)...(19): siRNA sense strand
uugaucuuguugacuauga

SEQ ID NO: 704062 - RNA, 19 nt, Homo sapiens
  misc_RNA (1)...(19): siRNA sense strand
cuaugaugcugauggugau

SEQ ID NO: 704063 - RNA, 19 nt, Homo sapiens
  misc_RNA (1)...(19): siRNA sense strand
aaaggcggacucucaggaa

SEQ ID NO: 704064 - RNA, 19 nt, Homo sapiens
  misc_RNA (1)...(19): siRNA sense strand
gaaaacuaggaaucuauga

SEQ ID NO: 704065 - RNA, 19 nt, Homo sapiens
  misc_RNA (1)...(19): siRNA sense strand
ggaaaacuaggaaucuaug

SEQ ID NO: 704066 - RNA, 19 nt, Homo sapiens
  misc_RNA (1)...(19): siRNA sense strand
gguuugaucuuguugacua

SEQ ID NO: 704067 - RNA, 19 nt, Homo sapiens
  misc_RNA (1)...(19): siRNA sense strand
gaggaaaggcggacucuca

SEQ ID NO: 704068 - RNA, 19 nt, Homo sapiens
  misc_RNA (1)...(19): siRNA sense strand
ugauguggaugaugccaaa

SEQ ID NO: 704069 - RNA, 19 nt, Homo sapiens
  misc_RNA (1)...(19): siRNA sense strand
acacaagaaugggaggaaa

SEQ ID NO: 704070 - RNA, 19 nt, Homo sapiens
  misc_RNA (1)...(19): siRNA sense strand
aaacuaggaaucuaugaug

SEQ ID NO: 704071 - RNA, 19 nt, Homo sapiens
  misc_RNA (1)...(19): siRNA sense strand
cucaggaacuucauucuuc

SEQ ID NO: 704072 - RNA, 19 nt, Homo sapiens
  misc_RNA (1)...(19): siRNA sense strand
gcauggaggacacaagaau

SEQ ID NO: 704073 - RNA, 19 nt, Homo sapiens
  misc_RNA (1)...(19): siRNA sense strand
ucaggaacuucauucuuca

SEQ ID NO: 704074 - RNA, 19 nt, Homo sapiens
  misc_RNA (1)...(19): siRNA sense strand
gguuuauggugauugcauu

SEQ ID NO: 704075 - RNA, 19 nt, Homo sapiens
  misc_RNA (1)...(19): siRNA sense strand
ggaugaugccaaaguuuua

SEQ ID NO: 704076 - RNA, 19 nt, Homo sapiens
  misc_RNA (1)...(19): siRNA sense strand
uguggaugaugccaaaguu

SEQ ID NO: 704077 - RNA, 19 nt, Homo sapiens
  misc_RNA (1)...(19): siRNA sense strand
ugacuaugaggaaguucua

SEQ ID NO: 704078 - RNA, 19 nt, Homo sapiens
  misc_RNA (1)...(19): siRNA sense strand
guagcugucguuugguuug

SEQ ID NO: 704079 - RNA, 19 nt, Homo sapiens
  misc_RNA (1)...(19): siRNA sense strand
ggcggacucucaggaacuu

SEQ ID NO: 704080 - RNA, 19 nt, Homo sapiens
  misc_RNA (1)...(19): siRNA sense strand
aagcauggaggacacaaga

SEQ ID NO: 704081 - RNA, 19 nt, Homo sapiens
  misc_RNA (1)...(19): siRNA sense strand
uagcugucguuugguuuga

SEQ ID NO: 704082 - RNA, 19 nt, Homo sapiens
  misc_RNA (1)...(19): siRNA sense strand
aggaaucuaugaugcugau

SEQ ID NO: 704083 - RNA, 19 nt, Homo sapiens
  misc_RNA (1)...(19): siRNA sense strand
guggaugaugccaaaguuu

SEQ ID NO: 704084 - RNA, 19 nt, Homo sapiens
  misc_RNA (1)...(19): siRNA sense strand
uugaucuuguugacuauga

SEQ ID NO: 704085 - RNA, 19 nt, Homo sapiens
  misc_RNA (1)...(19): siRNA sense strand
cuaugaugcugauggugau

SEQ ID NO: 704086 - RNA, 19 nt, Homo sapiens
  misc_RNA (1)...(19): siRNA sense strand
aaaggcggacucucaggaa

SEQ ID NO: 704087 - RNA, 19 nt, Homo sapiens
  misc_RNA (1)...(19): siRNA sense strand
gaaaacuaggaaucuauga

SEQ ID NO: 704088 - RNA, 19 nt, Homo sapiens
  misc_RNA (1)...(19): siRNA sense strand
ggaaaacuaggaaucuaug

SEQ ID NO: 704089 - RNA, 19 nt, Homo sapiens
  misc_RNA (1)...(19): siRNA sense strand
gguuugaucuuguugacua

SEQ ID NO: 704090 - RNA, 19 nt, Homo sapiens
  misc_RNA (1)...(19): siRNA sense strand
gaggaaaggcggacucuca

SEQ ID NO: 704091 - RNA, 19 nt, Homo sapiens
  misc_RNA (1)...(19): siRNA sense strand
ugauguggaugaugccaaa

SEQ ID NO: 704092 - RNA, 19 nt, Homo sapiens
  misc_RNA (1)...(19): siRNA sense strand
acacaagaaugggaggaaa

SEQ ID NO: 704093 - RNA, 19 nt, Homo sapiens
  misc_RNA (1)...(19): siRNA sense strand
aaacuaggaaucuaugaug

SEQ ID NO: 704094 - RNA, 19 nt, Homo sapiens
  misc_RNA (1)...(19): siRNA sense strand
cucaggaacuucauucuuc

SEQ ID NO: 704095 - RNA, 19 nt, Homo sapiens
  misc_RNA (1)...(19): siRNA sense strand
gcauggaggacacaagaau

SEQ ID NO: 704096 - RNA, 19 nt, Homo sapiens
  misc_RNA (1)...(19): siRNA sense strand
ucaggaacuucauucuuca

SEQ ID NO: 704097 - RNA, 19 nt, Homo sapiens
  misc_RNA (1)...(19): siRNA sense strand
gguuuauggugauugcauu

SEQ ID NO: 704098 - RNA, 19 nt, Homo sapiens
  misc_RNA (1)...(19): siRNA sense strand
ggaugaugccaaaguuuua

SEQ ID NO: 704099 - RNA, 19 nt, Homo sapiens
  misc_RNA (1)...(19): siRNA sense strand
uguggaugaugccaaaguu

SEQ ID NO: 704100 - RNA, 19 nt, Homo sapiens
  misc_RNA (1)...(19): siRNA sense strand
ugacuaugaggaaguucua

SEQ ID NO: 704101 - RNA, 19 nt, Homo sapiens
  misc_RNA (1)...(19): siRNA sense strand
guagcugucguuugguuug

SEQ ID NO: 704102 - RNA, 19 nt, Homo sapiens
  misc_RNA (1)...(19): siRNA sense strand
ggcggacucucaggaacuu

SEQ ID NO: 704103 - RNA, 19 nt, Homo sapiens
  misc_RNA (1)...(19): siRNA sense strand
aagcauggaggacacaaga

SEQ ID NO: 704104 - RNA, 19 nt, Homo sapiens
  misc_RNA (1)...(19): siRNA sense strand
uagcugucguuugguuuga

SEQ ID NO: 704105 - RNA, 19 nt, Homo sapiens
  misc_RNA (1)...(19): siRNA sense strand
aggaaucuaugaugcugau

SEQ ID NO: 704106 - RNA, 19 nt, Homo sapiens
  misc_RNA (1)...(19): siRNA sense strand
guggaugaugccaaaguuu

SEQ ID NO: 704107 - RNA, 19 nt, Homo sapiens
  misc_RNA (1)...(19): siRNA sense strand
uugaucuuguugacuauga

SEQ ID NO: 704108 - RNA, 19 nt, Homo sapiens
  misc_RNA (1)...(19): siRNA sense strand
cuaugaugcugauggugau

SEQ ID NO: 704109 - RNA, 19 nt, Homo sapiens
  misc_RNA (1)...(19): siRNA sense strand
aaaggcggacucucaggaa

SEQ ID NO: 704110 - RNA, 19 nt, Homo sapiens
  misc_RNA (1)...(19): siRNA sense strand
gaaaacuaggaaucuauga

SEQ ID NO: 704111 - RNA, 19 nt, Homo sapiens
  misc_RNA (1)...(19): siRNA sense strand
ggaaaacuaggaaucuaug

SEQ ID NO: 704112 - RNA, 19 nt, Homo sapiens
  misc_RNA (1)...(19): siRNA sense strand
gguuugaucuuguugacua

SEQ ID NO: 704113 - RNA, 19 nt, Homo sapiens
  misc_RNA (1)...(19): siRNA sense strand
gaggaaaggcggacucuca

SEQ ID NO: 704114 - RNA, 19 nt, Homo sapiens
  misc_RNA (1)...(19): siRNA sense strand
ugauguggaugaugccaaa

SEQ ID NO: 704115 - RNA, 19 nt, Homo sapiens
  misc_RNA (1)...(19): siRNA sense strand
acacaagaaugggaggaaa

SEQ ID NO: 704116 - RNA, 19 nt, Homo sapiens
  misc_RNA (1)...(19): siRNA sense strand
aaacuaggaaucuaugaug

SEQ ID NO: 704117 - RNA, 19 nt, Homo sapiens
  misc_RNA (1)...(19): siRNA sense strand
cucaggaacuucauucuuc

SEQ ID NO: 704118 - RNA, 19 nt, Homo sapiens
  misc_RNA (1)...(19): siRNA sense strand
gcauggaggacacaagaau

SEQ ID NO: 704119 - RNA, 19 nt, Homo sapiens
  misc_RNA (1)...(19): siRNA sense strand
ucaggaacuucauucuuca

SEQ ID NO: 704120 - RNA, 19 nt, Homo sapiens
  misc_RNA (1)...(19): siRNA sense strand
gguuuauggugauugcauu

SEQ ID NO: 704121 - RNA, 19 nt, Homo sapiens
  misc_RNA (1)...(19): siRNA sense strand
ggaugaugccaaaguuuua

SEQ ID NO: 704122 - RNA, 19 nt, Homo sapiens
  misc_RNA (1)...(19): siRNA sense strand
uguggaugaugccaaaguu

SEQ ID NO: 704123 - RNA, 19 nt, Homo sapiens
  misc_RNA (1)...(19): siRNA sense strand
ugacuaugaggaaguucua

SEQ ID NO: 704124 - RNA, 19 nt, Homo sapiens
  misc_RNA (1)...(19): siRNA sense strand
guagcugucguuugguuug

SEQ ID NO: 704125 - RNA, 19 nt, Homo sapiens
  misc_RNA (1)...(19): siRNA sense strand
ggcggacucucaggaacuu

SEQ ID NO: 704126 - RNA, 19 nt, Homo sapiens
  misc_RNA (1)...(19): siRNA sense strand
aagcauggaggacacaaga

SEQ ID NO: 704127 - RNA, 19 nt, Homo sapiens
  misc_RNA (1)...(19): siRNA sense strand
uagcugucguuugguuuga

SEQ ID NO: 704128 - RNA, 19 nt, Homo sapiens
  misc_RNA (1)...(19): siRNA sense strand
aggaaucuaugaugcugau

SEQ ID NO: 704129 - RNA, 19 nt, Homo sapiens
  misc_RNA (1)...(19): siRNA sense strand
guggaugaugccaaaguuu

SEQ ID NO: 704130 - RNA, 19 nt, Homo sapiens
  misc_RNA (1)...(19): siRNA sense strand
uugaucuuguugacuauga

SEQ ID NO: 704131 - RNA, 19 nt, Homo sapiens
  misc_RNA (1)...(19): siRNA sense strand
cuaugaugcugauggugau

SEQ ID NO: 704132 - RNA, 19 nt, Homo sapiens
  misc_RNA (1)...(19): siRNA sense strand
aaaggcggacucucaggaa

SEQ ID NO: 704133 - RNA, 19 nt, Homo sapiens
  misc_RNA (1)...(19): siRNA sense strand
gaaaacuaggaaucuauga

SEQ ID NO: 704134 - RNA, 19 nt, Homo sapiens
  misc_RNA (1)...(19): siRNA sense strand
ggaaaacuaggaaucuaug

SEQ ID NO: 704135 - RNA, 19 nt, Homo sapiens
  misc_RNA (1)...(19): siRNA sense strand
gguuugaucuuguugacua

SEQ ID NO: 704136 - RNA, 19 nt, Homo sapiens
  misc_RNA (1)...(19): siRNA sense strand
gaggaaaggcggacucuca

SEQ ID NO: 704137 - RNA, 19 nt, Homo sapiens
  misc_RNA (1)...(19): siRNA sense strand
ugauguggaugaugccaaa

SEQ ID NO: 704138 - RNA, 19 nt, Homo sapiens
  misc_RNA (1)...(19): siRNA sense strand
acacaagaaugggaggaaa

SEQ ID NO: 704139 - RNA, 19 nt, Homo sapiens
  misc_RNA (1)...(19): siRNA sense strand
aaacuaggaaucuaugaug

SEQ ID NO: 704140 - RNA, 19 nt, Homo sapiens
  misc_RNA (1)...(19): siRNA sense strand
cucaggaacuucauucuuc

SEQ ID NO: 704141 - RNA, 19 nt, Homo sapiens
  misc_RNA (1)...(19): siRNA sense strand
gcauggaggacacaagaau

SEQ ID NO: 704142 - RNA, 19 nt, Homo sapiens
  misc_RNA (1)...(19): siRNA sense strand
ucaggaacuucauucuuca

SEQ ID NO: 704143 - RNA, 19 nt, Homo sapiens
  misc_RNA (1)...(19): siRNA sense strand
gguuuauggugauugcauu

SEQ ID NO: 704144 - RNA, 19 nt, Homo sapiens
  misc_RNA (1)...(19): siRNA sense strand
ggaugaugccaaaguuuua

SEQ ID NO: 704145 - RNA, 19 nt, Homo sapiens
  misc_RNA (1)...(19): siRNA sense strand
uguggaugaugccaaaguu

SEQ ID NO: 704146 - RNA, 19 nt, Homo sapiens
  misc_RNA (1)...(19): siRNA sense strand
ugacuaugaggaaguucua

SEQ ID NO: 704147 - RNA, 19 nt, Homo sapiens
  misc_RNA (1)...(19): siRNA sense strand
guagcugucguuugguuug

SEQ ID NO: 704148 - RNA, 19 nt, Homo sapiens
  misc_RNA (1)...(19): siRNA sense strand
ggcggacucucaggaacuu

SEQ ID NO: 704149 - RNA, 19 nt, Homo sapiens
  misc_RNA (1)...(19): siRNA sense strand
aagcauggaggacacaaga

SEQ ID NO: 704150 - RNA, 19 nt, Homo sapiens
  misc_RNA (1)...(19): siRNA sense strand
uagcugucguuugguuuga

SEQ ID NO: 704151 - RNA, 19 nt, Homo sapiens
  misc_RNA (1)...(19): siRNA sense strand
aggaaucuaugaugcugau

SEQ ID NO: 704152 - RNA, 19 nt, Homo sapiens
  misc_RNA (1)...(19): siRNA sense strand
guggaugaugccaaaguuu

SEQ ID NO: 704153 - RNA, 19 nt, Homo sapiens
  misc_RNA (1)...(19): siRNA sense strand
uugaucuuguugacuauga

SEQ ID NO: 704154 - RNA, 19 nt, Homo sapiens
  misc_RNA (1)...(19): siRNA sense strand
cuaugaugcugauggugau

SEQ ID NO: 704155 - RNA, 19 nt, Homo sapiens
  misc_RNA (1)...(19): siRNA sense strand
aaaggcggacucucaggaa

SEQ ID NO: 704156 - RNA, 19 nt, Homo sapiens
  misc_RNA (1)...(19): siRNA sense strand
gaaaacuaggaaucuauga

SEQ ID NO: 704157 - RNA, 19 nt, Homo sapiens
  misc_RNA (1)...(19): siRNA sense strand
ggaaaacuaggaaucuaug

SEQ ID NO: 704158 - RNA, 19 nt, Homo sapiens
  misc_RNA (1)...(19): siRNA sense strand
gguuugaucuuguugacua

SEQ ID NO: 704159 - RNA, 19 nt, Homo sapiens
  misc_RNA (1)...(19): siRNA sense strand
gaggaaaggcggacucuca

SEQ ID NO: 704160 - RNA, 19 nt, Homo sapiens
  misc_RNA (1)...(19): siRNA sense strand
ugauguggaugaugccaaa

SEQ ID NO: 704161 - RNA, 19 nt, Homo sapiens
  misc_RNA (1)...(19): siRNA sense strand
acacaagaaugggaggaaa

SEQ ID NO: 704162 - RNA, 19 nt, Homo sapiens
  misc_RNA (1)...(19): siRNA sense strand
aaacuaggaaucuaugaug

SEQ ID NO: 704163 - RNA, 19 nt, Homo sapiens
  misc_RNA (1)...(19): siRNA sense strand
cucaggaacuucauucuuc

SEQ ID NO: 704164 - RNA, 19 nt, Homo sapiens
  misc_RNA (1)...(19): siRNA sense strand
gcauggaggacacaagaau

SEQ ID NO: 704165 - RNA, 19 nt, Homo sapiens
  misc_RNA (1)...(19): siRNA sense strand
ucaggaacuucauucuuca

SEQ ID NO: 704166 - RNA, 19 nt, Homo sapiens
  misc_RNA (1)...(19): siRNA sense strand
gguuuauggugauugcauu

SEQ ID NO: 704167 - RNA, 19 nt, Homo sapiens
  misc_RNA (1)...(19): siRNA sense strand
ggaugaugccaaaguuuua

SEQ ID NO: 704168 - RNA, 19 nt, Homo sapiens
  misc_RNA (1)...(19): siRNA sense strand
uguggaugaugccaaaguu

SEQ ID NO: 704169 - RNA, 19 nt, Homo sapiens
  misc_RNA (1)...(19): siRNA sense strand
ugacuaugaggaaguucua

SEQ ID NO: 704170 - RNA, 19 nt, Homo sapiens
  misc_RNA (1)...(19): siRNA sense strand
guagcugucguuugguuug

SEQ ID NO: 704171 - RNA, 19 nt, Homo sapiens
  misc_RNA (1)...(19): siRNA sense strand
ggcggacucucaggaacuu

SEQ ID NO: 704172 - RNA, 19 nt, Homo sapiens
  misc_RNA (1)...(19): siRNA sense strand
aagcauggaggacacaaga

SEQ ID NO: 704173 - RNA, 19 nt, Homo sapiens
  misc_RNA (1)...(19): siRNA sense strand
uagcugucguuugguuuga

SEQ ID NO: 704174 - RNA, 19 nt, Homo sapiens
  misc_RNA (1)...(19): siRNA sense strand
aggaaucuaugaugcugau

SEQ ID NO: 704175 - RNA, 19 nt, Homo sapiens
  misc_RNA (1)...(19): siRNA sense strand
guggaugaugccaaaguuu

SEQ ID NO: 704176 - RNA, 19 nt, Homo sapiens
  misc_RNA (1)...(19): siRNA sense strand
uugaucuuguugacuauga

SEQ ID NO: 704177 - RNA, 19 nt, Homo sapiens
  misc_RNA (1)...(19): siRNA sense strand
cuaugaugcugauggugau

SEQ ID NO: 704178 - RNA, 19 nt, Homo sapiens
  misc_RNA (1)...(19): siRNA sense strand
aaaggcggacucucaggaa

SEQ ID NO: 704179 - RNA, 19 nt, Homo sapiens
  misc_RNA (1)...(19): siRNA sense strand
gaaaacuaggaaucuauga

SEQ ID NO: 704180 - RNA, 19 nt, Homo sapiens
  misc_RNA (1)...(19): siRNA sense strand
ggaaaacuaggaaucuaug

SEQ ID NO: 704181 - RNA, 19 nt, Homo sapiens
  misc_RNA (1)...(19): siRNA sense strand
gguuugaucuuguugacua

SEQ ID NO: 704182 - RNA, 19 nt, Homo sapiens
  misc_RNA (1)...(19): siRNA sense strand
gaggaaaggcggacucuca

SEQ ID NO: 704183 - RNA, 19 nt, Homo sapiens
  misc_RNA (1)...(19): siRNA sense strand
ugauguggaugaugccaaa

SEQ ID NO: 704184 - RNA, 19 nt, Homo sapiens
  misc_RNA (1)...(19): siRNA sense strand
acacaagaaugggaggaaa

SEQ ID NO: 704185 - RNA, 19 nt, Homo sapiens
  misc_RNA (1)...(19): siRNA sense strand
aaacuaggaaucuaugaug

SEQ ID NO: 704186 - RNA, 19 nt, Homo sapiens
  misc_RNA (1)...(19): siRNA sense strand
cucaggaacuucauucuuc

SEQ ID NO: 704187 - RNA, 19 nt, Homo sapiens
  misc_RNA (1)...(19): siRNA sense strand
gcauggaggacacaagaau

SEQ ID NO: 704188 - RNA, 19 nt, Homo sapiens
  misc_RNA (1)...(19): siRNA sense strand
ucaggaacuucauucuuca

SEQ ID NO: 704189 - RNA, 19 nt, Homo sapiens
  misc_RNA (1)...(19): siRNA sense strand
gguuuauggugauugcauu

SEQ ID NO: 704190 - RNA, 19 nt, Homo sapiens
  misc_RNA (1)...(19): siRNA sense strand
ggaugaugccaaaguuuua

SEQ ID NO: 704191 - RNA, 19 nt, Homo sapiens
  misc_RNA (1)...(19): siRNA sense strand
uguggaugaugccaaaguu

SEQ ID NO: 704192 - RNA, 19 nt, Homo sapiens
  misc_RNA (1)...(19): siRNA sense strand
ugacuaugaggaaguucua

SEQ ID NO: 704193 - RNA, 19 nt, Homo sapiens
  misc_RNA (1)...(19): siRNA sense strand
guagcugucguuugguuug

SEQ ID NO: 704194 - RNA, 19 nt, Homo sapiens
  misc_RNA (1)...(19): siRNA sense strand
ggcggacucucaggaacuu

SEQ ID NO: 704195 - RNA, 19 nt, Homo sapiens
  misc_RNA (1)...(19): siRNA sense strand
aagcauggaggacacaaga

SEQ ID NO: 704196 - RNA, 19 nt, Homo sapiens
  misc_RNA (1)...(19): siRNA sense strand
uagcugucguuugguuuga

SEQ ID NO: 704197 - RNA, 19 nt, Homo sapiens
  misc_RNA (1)...(19): siRNA sense strand
aggaaucuaugaugcugau

SEQ ID NO: 704198 - RNA, 19 nt, Homo sapiens
  misc_RNA (1)...(19): siRNA sense strand
guggaugaugccaaaguuu

SEQ ID NO: 704199 - RNA, 19 nt, Homo sapiens
  misc_RNA (1)...(19): siRNA sense strand
uugaucuuguugacuauga

SEQ ID NO: 704200 - RNA, 19 nt, Homo sapiens
  misc_RNA (1)...(19): siRNA sense strand
cuaugaugcugauggugau

SEQ ID NO: 704201 - RNA, 19 nt, Homo sapiens
  misc_RNA (1)...(19): siRNA sense strand
aaaggcggacucucaggaa

SEQ ID NO: 704202 - RNA, 19 nt, Homo sapiens
  misc_RNA (1)...(19): siRNA sense strand
gaaaacuaggaaucuauga

SEQ ID NO: 704203 - RNA, 19 nt, Homo sapiens
  misc_RNA (1)...(19): siRNA sense strand
ggaaaacuaggaaucuaug

SEQ ID NO: 704204 - RNA, 19 nt, Homo sapiens
  misc_RNA (1)...(19): siRNA sense strand
gguuugaucuuguugacua

SEQ ID NO: 704205 - RNA, 19 nt, Homo sapiens
  misc_RNA (1)...(19): siRNA sense strand
gaggaaaggcggacucuca

SEQ ID NO: 704206 - RNA, 19 nt, Homo sapiens
  misc_RNA (1)...(19): siRNA sense strand
ugauguggaugaugccaaa

SEQ ID NO: 704207 - RNA, 19 nt, Homo sapiens
  misc_RNA (1)...(19): siRNA sense strand
acacaagaaugggaggaaa

SEQ ID NO: 704208 - RNA, 19 nt, Homo sapiens
  misc_RNA (1)...(19): siRNA sense strand
aaacuaggaaucuaugaug

SEQ ID NO: 704209 - RNA, 19 nt, Homo sapiens
  misc_RNA (1)...(19): siRNA sense strand
cucaggaacuucauucuuc

SEQ ID NO: 704210 - RNA, 19 nt, Homo sapiens
  misc_RNA (1)...(19): siRNA sense strand
gcauggaggacacaagaau

SEQ ID NO: 704211 - RNA, 19 nt, Homo sapiens
  misc_RNA (1)...(19): siRNA sense strand
ucaggaacuucauucuuca

SEQ ID NO: 704212 - RNA, 19 nt, Homo sapiens
  misc_RNA (1)...(19): siRNA sense strand
gguuuauggugauugcauu

SEQ ID NO: 704213 - RNA, 19 nt, Homo sapiens
  misc_RNA (1)...(19): siRNA sense strand
ggaugaugccaaaguuuua

SEQ ID NO: 704214 - RNA, 19 nt, Homo sapiens
  misc_RNA (1)...(19): siRNA sense strand
uguggaugaugccaaaguu

SEQ ID NO: 704215 - RNA, 19 nt, Homo sapiens
  misc_RNA (1)...(19): siRNA sense strand
ugacuaugaggaaguucua

SEQ ID NO: 704216 - RNA, 19 nt, Homo sapiens
  misc_RNA (1)...(19): siRNA sense strand
guagcugucguuugguuug

SEQ ID NO: 704217 - RNA, 19 nt, Homo sapiens
  misc_RNA (1)...(19): siRNA sense strand
ggcggacucucaggaacuu

SEQ ID NO: 704218 - RNA, 19 nt, Homo sapiens
  misc_RNA (1)...(19): siRNA sense strand
aagcauggaggacacaaga

SEQ ID NO: 704219 - RNA, 19 nt, Homo sapiens
  misc_RNA (1)...(19): siRNA sense strand
uagcugucguuugguuuga

SEQ ID NO: 704220 - RNA, 19 nt, Homo sapiens
  misc_RNA (1)...(19): siRNA sense strand
aggaaucuaugaugcugau

SEQ ID NO: 704221 - RNA, 19 nt, Homo sapiens
  misc_RNA (1)...(19): siRNA sense strand
guggaugaugccaaaguuu

SEQ ID NO: 704222 - RNA, 19 nt, Homo sapiens
  misc_RNA (1)...(19): siRNA sense strand
uugaucuuguugacuauga

SEQ ID NO: 704223 - RNA, 19 nt, Homo sapiens
  misc_RNA (1)...(19): siRNA sense strand
cuaugaugcugauggugau

SEQ ID NO: 704224 - RNA, 19 nt, Homo sapiens
  misc_RNA (1)...(19): siRNA sense strand
aaaggcggacucucaggaa

SEQ ID NO: 704225 - RNA, 19 nt, Homo sapiens
  misc_RNA (1)...(19): siRNA sense strand
gaaaacuaggaaucuauga

SEQ ID NO: 704226 - RNA, 19 nt, Homo sapiens
  misc_RNA (1)...(19): siRNA sense strand
ggaaaacuaggaaucuaug

SEQ ID NO: 704227 - RNA, 19 nt, Homo sapiens
  misc_RNA (1)...(19): siRNA sense strand
gguuugaucuuguugacua

SEQ ID NO: 704228 - RNA, 19 nt, Homo sapiens
  misc_RNA (1)...(19): siRNA sense strand
gaggaaaggcggacucuca

SEQ ID NO: 704229 - RNA, 19 nt, Homo sapiens
  misc_RNA (1)...(19): siRNA sense strand
ugauguggaugaugccaaa

SEQ ID NO: 704230 - RNA, 19 nt, Homo sapiens
  misc_RNA (1)...(19): siRNA sense strand
acacaagaaugggaggaaa

SEQ ID NO: 704231 - RNA, 19 nt, Homo sapiens
  misc_RNA (1)...(19): siRNA sense strand
aaacuaggaaucuaugaug

SEQ ID NO: 704232 - RNA, 19 nt, Homo sapiens
  misc_RNA (1)...(19): siRNA sense strand
cucaggaacuucauucuuc

SEQ ID NO: 704233 - RNA, 19 nt, Homo sapiens
  misc_RNA (1)...(19): siRNA sense strand
gcauggaggacacaagaau

SEQ ID NO: 704234 - RNA, 19 nt, Homo sapiens
  misc_RNA (1)...(19): siRNA sense strand
ucaggaacuucauucuuca

SEQ ID NO: 704235 - RNA, 19 nt, Homo sapiens
  misc_RNA (1)...(19): siRNA sense strand
gguuuauggugauugcauu

SEQ ID NO: 704236 - RNA, 19 nt, Homo sapiens
  misc_RNA (1)...(19): siRNA sense strand
ggaugaugccaaaguuuua

SEQ ID NO: 704237 - RNA, 19 nt, Homo sapiens
  misc_RNA (1)...(19): siRNA sense strand
uguggaugaugccaaaguu

SEQ ID NO: 704238 - RNA, 19 nt, Homo sapiens
  misc_RNA (1)...(19): siRNA sense strand
ugacuaugaggaaguucua

SEQ ID NO: 704239 - RNA, 19 nt, Homo sapiens
  misc_RNA (1)...(19): siRNA sense strand
guagcugucguuugguuug

SEQ ID NO: 704240 - RNA, 19 nt, Homo sapiens
  misc_RNA (1)...(19): siRNA sense strand
ggcggacucucaggaacuu

SEQ ID NO: 704241 - RNA, 19 nt, Homo sapiens
  misc_RNA (1)...(19): siRNA sense strand
aagcauggaggacacaaga

SEQ ID NO: 704242 - RNA, 19 nt, Homo sapiens
  misc_RNA (1)...(19): siRNA sense strand
uagcugucguuugguuuga

SEQ ID NO: 704243 - RNA, 19 nt, Homo sapiens
  misc_RNA (1)...(19): siRNA sense strand
aggaaucuaugaugcugau

SEQ ID NO: 704244 - RNA, 19 nt, Homo sapiens
  misc_RNA (1)...(19): siRNA sense strand
guggaugaugccaaaguuu

SEQ ID NO: 704245 - RNA, 19 nt, Homo sapiens
  misc_RNA (1)...(19): siRNA sense strand
uugaucuuguugacuauga

SEQ ID NO: 704246 - RNA, 19 nt, Homo sapiens
  misc_RNA (1)...(19): siRNA sense strand
cuaugaugcugauggugau

SEQ ID NO: 704247 - RNA, 19 nt, Homo sapiens
  misc_RNA (1)...(19): siRNA sense strand
aaaggcggacucucaggaa

SEQ ID NO: 704248 - RNA, 19 nt, Homo sapiens
  misc_RNA (1)...(19): siRNA sense strand
gaaaacuaggaaucuauga

SEQ ID NO: 704249 - RNA, 19 nt, Homo sapiens
  misc_RNA (1)...(19): siRNA sense strand
ggaaaacuaggaaucuaug

SEQ ID NO: 704250 - RNA, 19 nt, Homo sapiens
  misc_RNA (1)...(19): siRNA sense strand
gguuugaucuuguugacua

SEQ ID NO: 704251 - RNA, 19 nt, Homo sapiens
  misc_RNA (1)...(19): siRNA sense strand
gaggaaaggcggacucuca

SEQ ID NO: 704252 - RNA, 19 nt, Homo sapiens
  misc_RNA (1)...(19): siRNA sense strand
ugauguggaugaugccaaa

SEQ ID NO: 704253 - RNA, 19 nt, Homo sapiens
  misc_RNA (1)...(19): siRNA sense strand
acacaagaaugggaggaaa

SEQ ID NO: 704254 - RNA, 19 nt, Homo sapiens
  misc_RNA (1)...(19): siRNA sense strand
aaacuaggaaucuaugaug

SEQ ID NO: 704255 - RNA, 19 nt, Homo sapiens
  misc_RNA (1)...(19): siRNA sense strand
cucaggaacuucauucuuc

SEQ ID NO: 704256 - RNA, 19 nt, Homo sapiens
  misc_RNA (1)...(19): siRNA sense strand
gcauggaggacacaagaau

SEQ ID NO: 704257 - RNA, 19 nt, Homo sapiens
  misc_RNA (1)...(19): siRNA sense strand
ucaggaacuucauucuuca

SEQ ID NO: 704258 - RNA, 19 nt, Homo sapiens
  misc_RNA (1)...(19): siRNA sense strand
gguuuauggugauugcauu

SEQ ID NO: 704259 - RNA, 19 nt, Homo sapiens
  misc_RNA (1)...(19): siRNA sense strand
ggaugaugccaaaguuuua

SEQ ID NO: 704260 - RNA, 19 nt, Homo sapiens
  misc_RNA (1)...(19): siRNA sense strand
uguggaugaugccaaaguu

SEQ ID NO: 704261 - RNA, 19 nt, Homo sapiens
  misc_RNA (1)...(19): siRNA sense strand
ugacuaugaggaaguucua

SEQ ID NO: 704262 - RNA, 19 nt, Homo sapiens
  misc_RNA (1)...(19): siRNA sense strand
guagcugucguuugguuug

SEQ ID NO: 704263 - RNA, 19 nt, Homo sapiens
  misc_RNA (1)...(19): siRNA sense strand
ggcggacucucaggaacuu

SEQ ID NO: 704264 - RNA, 19 nt, Homo sapiens
  misc_RNA (1)...(19): siRNA sense strand
aagcauggaggacacaaga

SEQ ID NO: 704265 - RNA, 19 nt, Homo sapiens
  misc_RNA (1)...(19): siRNA sense strand
uagcugucguuugguuuga

SEQ ID NO: 704266 - RNA, 19 nt, Homo sapiens
  misc_RNA (1)...(19): siRNA sense strand
aggaaucuaugaugcugau

SEQ ID NO: 704267 - RNA, 19 nt, Homo sapiens
  misc_RNA (1)...(19): siRNA sense strand
guggaugaugccaaaguuu

SEQ ID NO: 704268 - RNA, 19 nt, Homo sapiens
  misc_RNA (1)...(19): siRNA sense strand
uugaucuuguugacuauga

SEQ ID NO: 704269 - RNA, 19 nt, Homo sapiens
  misc_RNA (1)...(19): siRNA sense strand
cuaugaugcugauggugau

SEQ ID NO: 704270 - RNA, 19 nt, Homo sapiens
  misc_RNA (1)...(19): siRNA sense strand
aaaggcggacucucaggaa

SEQ ID NO: 704271 - RNA, 19 nt, Homo sapiens
  misc_RNA (1)...(19): siRNA sense strand
gaaaacuaggaaucuauga

SEQ ID NO: 704272 - RNA, 19 nt, Homo sapiens
  misc_RNA (1)...(19): siRNA sense strand
ggaaaacuaggaaucuaug

SEQ ID NO: 704273 - RNA, 19 nt, Homo sapiens
  misc_RNA (1)...(19): siRNA sense strand
gguuugaucuuguugacua

SEQ ID NO: 704274 - RNA, 19 nt, Homo sapiens
  misc_RNA (1)...(19): siRNA sense strand
gaggaaaggcggacucuca

SEQ ID NO: 704275 - RNA, 19 nt, Homo sapiens
  misc_RNA (1)...(19): siRNA sense strand
ugauguggaugaugccaaa

SEQ ID NO: 704276 - RNA, 19 nt, Homo sapiens
  misc_RNA (1)...(19): siRNA sense strand
acacaagaaugggaggaaa

SEQ ID NO: 704277 - RNA, 19 nt, Homo sapiens
  misc_RNA (1)...(19): siRNA sense strand
aaacuaggaaucuaugaug

SEQ ID NO: 704278 - RNA, 19 nt, Homo sapiens
  misc_RNA (1)...(19): siRNA sense strand
cucaggaacuucauucuuc

SEQ ID NO: 704279 - RNA, 19 nt, Homo sapiens
  misc_RNA (1)...(19): siRNA sense strand
gcauggaggacacaagaau

SEQ ID NO: 704280 - RNA, 19 nt, Homo sapiens
  misc_RNA (1)...(19): siRNA sense strand
ucaggaacuucauucuuca

SEQ ID NO: 704281 - RNA, 19 nt, Homo sapiens
  misc_RNA (1)...(19): siRNA sense strand
gguuuauggugauugcauu

SEQ ID NO: 704282 - RNA, 19 nt, Homo sapiens
  misc_RNA (1)...(19): siRNA sense strand
ggaugaugccaaaguuuua

SEQ ID NO: 704283 - RNA, 19 nt, Homo sapiens
  misc_RNA (1)...(19): siRNA sense strand
uguggaugaugccaaaguu

SEQ ID NO: 704284 - RNA, 19 nt, Homo sapiens
  misc_RNA (1)...(19): siRNA sense strand
ugacuaugaggaaguucua

SEQ ID NO: 704285 - RNA, 19 nt, Homo sapiens
  misc_RNA (1)...(19): siRNA sense strand
guagcugucguuugguuug

SEQ ID NO: 704286 - RNA, 19 nt, Homo sapiens
  misc_RNA (1)...(19): siRNA sense strand
ggcggacucucaggaacuu

SEQ ID NO: 704287 - RNA, 19 nt, Homo sapiens
  misc_RNA (1)...(19): siRNA sense strand
aagcauggaggacacaaga

SEQ ID NO: 704288 - RNA, 19 nt, Homo sapiens
  misc_RNA (1)...(19): siRNA sense strand
uagcugucguuugguuuga

SEQ ID NO: 704289 - RNA, 19 nt, Homo sapiens
  misc_RNA (1)...(19): siRNA sense strand
aggaaucuaugaugcugau

SEQ ID NO: 704290 - RNA, 19 nt, Homo sapiens
  misc_RNA (1)...(19): siRNA sense strand
guggaugaugccaaaguuu

SEQ ID NO: 704291 - RNA, 19 nt, Homo sapiens
  misc_RNA (1)...(19): siRNA sense strand
uugaucuuguugacuauga

SEQ ID NO: 704292 - RNA, 19 nt, Homo sapiens
  misc_RNA (1)...(19): siRNA sense strand
cuaugaugcugauggugau

SEQ ID NO: 704293 - RNA, 19 nt, Homo sapiens
  misc_RNA (1)...(19): siRNA sense strand
aaaggcggacucucaggaa

SEQ ID NO: 704294 - RNA, 19 nt, Homo sapiens
  misc_RNA (1)...(19): siRNA sense strand
gaaaacuaggaaucuauga

SEQ ID NO: 704295 - RNA, 19 nt, Homo sapiens
  misc_RNA (1)...(19): siRNA sense strand
ggaaaacuaggaaucuaug

SEQ ID NO: 704296 - RNA, 19 nt, Homo sapiens
  misc_RNA (1)...(19): siRNA sense strand
gguuugaucuuguugacua

SEQ ID NO: 704297 - RNA, 19 nt, Homo sapiens
  misc_RNA (1)...(19): siRNA sense strand
gaggaaaggcggacucuca

SEQ ID NO: 704298 - RNA, 19 nt, Homo sapiens
  misc_RNA (1)...(19): siRNA sense strand
ugauguggaugaugccaaa

SEQ ID NO: 704299 - RNA, 19 nt, Homo sapiens
  misc_RNA (1)...(19): siRNA sense strand
acacaagaaugggaggaaa

SEQ ID NO: 704300 - RNA, 19 nt, Homo sapiens
  misc_RNA (1)...(19): siRNA sense strand
aaacuaggaaucuaugaug

SEQ ID NO: 704301 - RNA, 19 nt, Homo sapiens
  misc_RNA (1)...(19): siRNA sense strand
cucaggaacuucauucuuc

SEQ ID NO: 704302 - RNA, 19 nt, Homo sapiens
  misc_RNA (1)...(19): siRNA sense strand
gcauggaggacacaagaau

SEQ ID NO: 704303 - RNA, 19 nt, Homo sapiens
  misc_RNA (1)...(19): siRNA sense strand
ucaggaacuucauucuuca

SEQ ID NO: 704304 - RNA, 19 nt, Homo sapiens
  misc_RNA (1)...(19): siRNA sense strand
gguuuauggugauugcauu

SEQ ID NO: 704305 - RNA, 19 nt, Homo sapiens
  misc_RNA (1)...(19): siRNA sense strand
ggaugaugccaaaguuuua

SEQ ID NO: 704306 - RNA, 19 nt, Homo sapiens
  misc_RNA (1)...(19): siRNA sense strand
uguggaugaugccaaaguu

SEQ ID NO: 704307 - RNA, 19 nt, Homo sapiens
  misc_RNA (1)...(19): siRNA sense strand
ugacuaugaggaaguucua

SEQ ID NO: 704308 - RNA, 19 nt, Homo sapiens
  misc_RNA (1)...(19): siRNA sense strand
guagcugucguuugguuug

SEQ ID NO: 704309 - RNA, 19 nt, Homo sapiens
  misc_RNA (1)...(19): siRNA sense strand
ggcggacucucaggaacuu

SEQ ID NO: 704310 - RNA, 19 nt, Homo sapiens
  misc_RNA (1)...(19): siRNA sense strand
aagcauggaggacacaaga

SEQ ID NO: 704311 - RNA, 19 nt, Homo sapiens
  misc_RNA (1)...(19): siRNA sense strand
uagcugucguuugguuuga

SEQ ID NO: 704312 - RNA, 19 nt, Homo sapiens
  misc_RNA (1)...(19): siRNA sense strand
aggaaucuaugaugcugau

SEQ ID NO: 704313 - RNA, 19 nt, Homo sapiens
  misc_RNA (1)...(19): siRNA sense strand
guggaugaugccaaaguuu

SEQ ID NO: 704314 - RNA, 19 nt, Homo sapiens
  misc_RNA (1)...(19): siRNA sense strand
uugaucuuguugacuauga

SEQ ID NO: 704315 - RNA, 19 nt, Homo sapiens
  misc_RNA (1)...(19): siRNA sense strand
cuaugaugcugauggugau

SEQ ID NO: 704316 - RNA, 19 nt, Homo sapiens
  misc_RNA (1)...(19): siRNA sense strand
aaaggcggacucucaggaa

SEQ ID NO: 704317 - RNA, 19 nt, Homo sapiens
  misc_RNA (1)...(19): siRNA sense strand
gaaaacuaggaaucuauga

SEQ ID NO: 704318 - RNA, 19 nt, Homo sapiens
  misc_RNA (1)...(19): siRNA sense strand
ggaaaacuaggaaucuaug

SEQ ID NO: 704319 - RNA, 19 nt, Homo sapiens
  misc_RNA (1)...(19): siRNA sense strand
gguuugaucuuguugacua

SEQ ID NO: 704320 - RNA, 19 nt, Homo sapiens
  misc_RNA (1)...(19): siRNA sense strand
gaggaaaggcggacucuca

SEQ ID NO: 704321 - RNA, 19 nt, Homo sapiens
  misc_RNA (1)...(19): siRNA sense strand
ugauguggaugaugccaaa

SEQ ID NO: 704322 - RNA, 19 nt, Homo sapiens
  misc_RNA (1)...(19): siRNA sense strand
acacaagaaugggaggaaa

SEQ ID NO: 704323 - RNA, 19 nt, Homo sapiens
  misc_RNA (1)...(19): siRNA sense strand
aaacuaggaaucuaugaug

SEQ ID NO: 704324 - RNA, 19 nt, Homo sapiens
  misc_RNA (1)...(19): siRNA sense strand
cucaggaacuucauucuuc

SEQ ID NO: 704325 - RNA, 19 nt, Homo sapiens
  misc_RNA (1)...(19): siRNA sense strand
gcauggaggacacaagaau

SEQ ID NO: 704326 - RNA, 19 nt, Homo sapiens
  misc_RNA (1)...(19): siRNA sense strand
ucaggaacuucauucuuca

SEQ ID NO: 704327 - RNA, 19 nt, Homo sapiens
  misc_RNA (1)...(19): siRNA sense strand
gguuuauggugauugcauu

SEQ ID NO: 704328 - RNA, 19 nt, Homo sapiens
  misc_RNA (1)...(19): siRNA sense strand
ggaugaugccaaaguuuua

SEQ ID NO: 704329 - RNA, 19 nt, Homo sapiens
  misc_RNA (1)...(19): siRNA sense strand
uguggaugaugccaaaguu

SEQ ID NO: 704330 - RNA, 19 nt, Homo sapiens
  misc_RNA (1)...(19): siRNA sense strand
ugacuaugaggaaguucua

SEQ ID NO: 704331 - RNA, 19 nt, Homo sapiens
  misc_RNA (1)...(19): siRNA sense strand
guagcugucguuugguuug

SEQ ID NO: 704332 - RNA, 19 nt, Homo sapiens
  misc_RNA (1)...(19): siRNA sense strand
ggcggacucucaggaacuu

SEQ ID NO: 704333 - RNA, 19 nt, Homo sapiens
  misc_RNA (1)...(19): siRNA sense strand
aagcauggaggacacaaga

SEQ ID NO: 704334 - RNA, 19 nt, Homo sapiens
  misc_RNA (1)...(19): siRNA sense strand
uagcugucguuugguuuga

SEQ ID NO: 704335 - RNA, 19 nt, Homo sapiens
  misc_RNA (1)...(19): siRNA sense strand
aggaaucuaugaugcugau

SEQ ID NO: 704336 - RNA, 19 nt, Homo sapiens
  misc_RNA (1)...(19): siRNA sense strand
guggaugaugccaaaguuu

SEQ ID NO: 704337 - RNA, 19 nt, Homo sapiens
  misc_RNA (1)...(19): siRNA sense strand
uugaucuuguugacuauga

SEQ ID NO: 704338 - RNA, 19 nt, Homo sapiens
  misc_RNA (1)...(19): siRNA sense strand
cuaugaugcugauggugau

SEQ ID NO: 704339 - RNA, 19 nt, Homo sapiens
  misc_RNA (1)...(19): siRNA sense strand
aaaggcggacucucaggaa

SEQ ID NO: 704340 - RNA, 19 nt, Homo sapiens
  misc_RNA (1)...(19): siRNA sense strand
gaaaacuaggaaucuauga

SEQ ID NO: 704341 - RNA, 19 nt, Homo sapiens
  misc_RNA (1)...(19): siRNA sense strand
ggaaaacuaggaaucuaug

SEQ ID NO: 704342 - RNA, 19 nt, Homo sapiens
  misc_RNA (1)...(19): siRNA sense strand
gaaaugaagcugagaccaa

SEQ ID NO: 704343 - RNA, 19 nt, Homo sapiens
  misc_RNA (1)...(19): siRNA sense strand
gcggacagcuucaaagucu

SEQ ID NO: 704344 - RNA, 19 nt, Homo sapiens
  misc_RNA (1)...(19): siRNA sense strand
gaacuugaccgagggauuc

SEQ ID NO: 704345 - RNA, 19 nt, Homo sapiens
  misc_RNA (1)...(19): siRNA sense strand
gcugagaccaagaaacuuu

SEQ ID NO: 704346 - RNA, 19 nt, Homo sapiens
  misc_RNA (1)...(19): siRNA sense strand
caggagggaucacaucuca

SEQ ID NO: 704347 - RNA, 19 nt, Homo sapiens
  misc_RNA (1)...(19): siRNA sense strand
ggagcacaguggaccauca

SEQ ID NO: 704348 - RNA, 19 nt, Homo sapiens
  misc_RNA (1)...(19): siRNA sense strand
cagccaaggucaacuggau

SEQ ID NO: 704349 - RNA, 19 nt, Homo sapiens
  misc_RNA (1)...(19): siRNA sense strand
guacuaccgccuccacuug

SEQ ID NO: 704350 - RNA, 19 nt, Homo sapiens
  misc_RNA (1)...(19): siRNA sense strand
ccgcauggauggacagaca

SEQ ID NO: 704351 - RNA, 19 nt, Homo sapiens
  misc_RNA (1)...(19): siRNA sense strand
cccaacagcuugcucaucu

SEQ ID NO: 704352 - RNA, 19 nt, Homo sapiens
  misc_RNA (1)...(19): siRNA sense strand
gaacguguuuugcgacaug

SEQ ID NO: 704353 - RNA, 19 nt, Homo sapiens
  misc_RNA (1)...(19): siRNA sense strand
ggaggacuaugcccauggu

SEQ ID NO: 704354 - RNA, 19 nt, Homo sapiens
  misc_RNA (1)...(19): siRNA sense strand
agaauccuguggacaccua

SEQ ID NO: 704355 - RNA, 19 nt, Homo sapiens
  misc_RNA (1)...(19): siRNA sense strand
ccagcuccuuggccucuuu

SEQ ID NO: 704356 - RNA, 19 nt, Homo sapiens
  misc_RNA (1)...(19): siRNA sense strand
guacaggaacugccacuac

SEQ ID NO: 704357 - RNA, 19 nt, Homo sapiens
  misc_RNA (1)...(19): siRNA sense strand
ggacuaugcccaugguuuu

SEQ ID NO: 704358 - RNA, 19 nt, Homo sapiens
  misc_RNA (1)...(19): siRNA sense strand
ccacagcggcagugucuuc

SEQ ID NO: 704359 - RNA, 19 nt, Homo sapiens
  misc_RNA (1)...(19): siRNA sense strand
ggagggacugggaggacua

SEQ ID NO: 704360 - RNA, 19 nt, Homo sapiens
  misc_RNA (1)...(19): siRNA sense strand
gaucccaggcgcucgcuau

SEQ ID NO: 704361 - RNA, 19 nt, Homo sapiens
  misc_RNA (1)...(19): siRNA sense strand
ucggugcccuucacggaaa

SEQ ID NO: 704362 - RNA, 19 nt, Homo sapiens
  misc_RNA (1)...(19): siRNA sense strand
cuacagguuccuccucuau

SEQ ID NO: 704363 - RNA, 19 nt, Homo sapiens
  misc_RNA (1)...(19): siRNA sense strand
cagcggcagugucuucucu

SEQ ID NO: 704364 - RNA, 19 nt, Homo sapiens
  misc_RNA (1)...(19): siRNA sense strand
acagguuccuccucuaugg

SEQ ID NO: 704365 - RNA, 19 nt, Homo sapiens
  misc_RNA (1)...(19): siRNA sense strand
gggcggacagcuucaaagu

SEQ ID NO: 704366 - RNA, 19 nt, Homo sapiens
  misc_RNA (1)...(19): siRNA sense strand
gcauggauggacagacaga

SEQ ID NO: 704367 - RNA, 19 nt, Homo sapiens
  misc_RNA (1)...(19): siRNA sense strand
ccacuacgccaaccucaac

SEQ ID NO: 704368 - RNA, 19 nt, Homo sapiens
  misc_RNA (1)...(19): siRNA sense strand
ugacacaggcaggugacua

SEQ ID NO: 704369 - RNA, 19 nt, Homo sapiens
  misc_RNA (1)...(19): siRNA sense strand
ggauggacagacagacuuc

SEQ ID NO: 704370 - RNA, 19 nt, Homo sapiens
  misc_RNA (1)...(19): siRNA sense strand
aagcugagaccaagaaacu

SEQ ID NO: 704371 - RNA, 19 nt, Homo sapiens
  misc_RNA (1)...(19): siRNA sense strand
ccagcaccaucuuccucaa

SEQ ID NO: 704372 - RNA, 19 nt, Homo sapiens
  misc_RNA (1)...(19): siRNA sense strand
ccuacagguuccuccucua

SEQ ID NO: 704373 - RNA, 19 nt, Homo sapiens
  misc_RNA (1)...(19): siRNA sense strand
ugucuucucugcccgugau

SEQ ID NO: 704374 - RNA, 19 nt, Homo sapiens
  misc_RNA (1)...(19): siRNA sense strand
ccaacuacaccgccacagu

SEQ ID NO: 704375 - RNA, 19 nt, Homo sapiens
  misc_RNA (1)...(19): siRNA sense strand
ugacgugaccaccaguuca

SEQ ID NO: 704376 - RNA, 19 nt, Homo sapiens
  misc_RNA (1)...(19): siRNA sense strand
uuugcgacauggagacuga

SEQ ID NO: 704377 - RNA, 19 nt, Homo sapiens
  misc_RNA (1)...(19): siRNA sense strand
ugacggucccacacaguug

SEQ ID NO: 704378 - RNA, 19 nt, Homo sapiens
  misc_RNA (1)...(19): siRNA sense strand
gcuucaaagucuccuacca

SEQ ID NO: 704379 - RNA, 19 nt, Homo sapiens
  misc_RNA (1)...(19): siRNA sense strand
gaaaugaagcugagaccaa

SEQ ID NO: 704380 - RNA, 19 nt, Homo sapiens
  misc_RNA (1)...(19): siRNA sense strand
gcggacagcuucaaagucu

SEQ ID NO: 704381 - RNA, 19 nt, Homo sapiens
  misc_RNA (1)...(19): siRNA sense strand
gaacuugaccgagggauuc

SEQ ID NO: 704382 - RNA, 19 nt, Homo sapiens
  misc_RNA (1)...(19): siRNA sense strand
gcugagaccaagaaacuuu

SEQ ID NO: 704383 - RNA, 19 nt, Homo sapiens
  misc_RNA (1)...(19): siRNA sense strand
caggagggaucacaucuca

SEQ ID NO: 704384 - RNA, 19 nt, Homo sapiens
  misc_RNA (1)...(19): siRNA sense strand
ggagcacaguggaccauca

SEQ ID NO: 704385 - RNA, 19 nt, Homo sapiens
  misc_RNA (1)...(19): siRNA sense strand
cagccaaggucaacuggau

SEQ ID NO: 704386 - RNA, 19 nt, Homo sapiens
  misc_RNA (1)...(19): siRNA sense strand
guacuaccgccuccacuug

SEQ ID NO: 704387 - RNA, 19 nt, Homo sapiens
  misc_RNA (1)...(19): siRNA sense strand
ccgcauggauggacagaca

SEQ ID NO: 704388 - RNA, 19 nt, Homo sapiens
  misc_RNA (1)...(19): siRNA sense strand
cccaacagcuugcucaucu

SEQ ID NO: 704389 - RNA, 19 nt, Homo sapiens
  misc_RNA (1)...(19): siRNA sense strand
gaacguguuuugcgacaug

SEQ ID NO: 704390 - RNA, 19 nt, Homo sapiens
  misc_RNA (1)...(19): siRNA sense strand
ggaggacuaugcccauggu

SEQ ID NO: 704391 - RNA, 19 nt, Homo sapiens
  misc_RNA (1)...(19): siRNA sense strand
agaauccuguggacaccua

SEQ ID NO: 704392 - RNA, 19 nt, Homo sapiens
  misc_RNA (1)...(19): siRNA sense strand
ccagcuccuuggccucuuu

SEQ ID NO: 704393 - RNA, 19 nt, Homo sapiens
  misc_RNA (1)...(19): siRNA sense strand
guacaggaacugccacuac

SEQ ID NO: 704394 - RNA, 19 nt, Homo sapiens
  misc_RNA (1)...(19): siRNA sense strand
ggacuaugcccaugguuuu

SEQ ID NO: 704395 - RNA, 19 nt, Homo sapiens
  misc_RNA (1)...(19): siRNA sense strand
ccacagcggcagugucuuc

SEQ ID NO: 704396 - RNA, 19 nt, Homo sapiens
  misc_RNA (1)...(19): siRNA sense strand
ggagggacugggaggacua

SEQ ID NO: 704397 - RNA, 19 nt, Homo sapiens
  misc_RNA (1)...(19): siRNA sense strand
gaucccaggcgcucgcuau

SEQ ID NO: 704398 - RNA, 19 nt, Homo sapiens
  misc_RNA (1)...(19): siRNA sense strand
ucggugcccuucacggaaa

SEQ ID NO: 704399 - RNA, 19 nt, Homo sapiens
  misc_RNA (1)...(19): siRNA sense strand
cuacagguuccuccucuau

SEQ ID NO: 704400 - RNA, 19 nt, Homo sapiens
  misc_RNA (1)...(19): siRNA sense strand
cagcggcagugucuucucu

SEQ ID NO: 704401 - RNA, 19 nt, Homo sapiens
  misc_RNA (1)...(19): siRNA sense strand
acagguuccuccucuaugg

SEQ ID NO: 704402 - RNA, 19 nt, Homo sapiens
  misc_RNA (1)...(19): siRNA sense strand
gggcggacagcuucaaagu

SEQ ID NO: 704403 - RNA, 19 nt, Homo sapiens
  misc_RNA (1)...(19): siRNA sense strand
gcauggauggacagacaga

SEQ ID NO: 704404 - RNA, 19 nt, Homo sapiens
  misc_RNA (1)...(19): siRNA sense strand
ccacuacgccaaccucaac

SEQ ID NO: 704405 - RNA, 19 nt, Homo sapiens
  misc_RNA (1)...(19): siRNA sense strand
ugacacaggcaggugacua

SEQ ID NO: 704406 - RNA, 19 nt, Homo sapiens
  misc_RNA (1)...(19): siRNA sense strand
ggauggacagacagacuuc

SEQ ID NO: 704407 - RNA, 19 nt, Homo sapiens
  misc_RNA (1)...(19): siRNA sense strand
aagcugagaccaagaaacu

SEQ ID NO: 704408 - RNA, 19 nt, Homo sapiens
  misc_RNA (1)...(19): siRNA sense strand
ccagcaccaucuuccucaa

SEQ ID NO: 704409 - RNA, 19 nt, Homo sapiens
  misc_RNA (1)...(19): siRNA sense strand
ugucuucucugcccgugau

SEQ ID NO: 704410 - RNA, 19 nt, Homo sapiens
  misc_RNA (1)...(19): siRNA sense strand
ccuacagguuccuccucua

SEQ ID NO: 704411 - RNA, 19 nt, Homo sapiens
  misc_RNA (1)...(19): siRNA sense strand
ccaacuacaccgccacagu

SEQ ID NO: 704412 - RNA, 19 nt, Homo sapiens
  misc_RNA (1)...(19): siRNA sense strand
gcuucaaagucuccuacca

SEQ ID NO: 704413 - RNA, 19 nt, Homo sapiens
  misc_RNA (1)...(19): siRNA sense strand
ugacgugaccaccaguuca

SEQ ID NO: 704414 - RNA, 19 nt, Homo sapiens
  misc_RNA (1)...(19): siRNA sense strand
uuugcgacauggagacuga

SEQ ID NO: 704415 - RNA, 19 nt, Homo sapiens
  misc_RNA (1)...(19): siRNA sense strand
ugacggucccacacaguug

SEQ ID NO: 704416 - RNA, 19 nt, Homo sapiens
  misc_RNA (1)...(19): siRNA sense strand
gaacuggccucuacaaauc

SEQ ID NO: 704417 - RNA, 19 nt, Homo sapiens
  misc_RNA (1)...(19): siRNA sense strand
gaugugaaauggagaagua

SEQ ID NO: 704418 - RNA, 19 nt, Homo sapiens
  misc_RNA (1)...(19): siRNA sense strand
uaccaagucuucucauuua

SEQ ID NO: 704419 - RNA, 19 nt, Homo sapiens
  misc_RNA (1)...(19): siRNA sense strand
cagagaugcuccagaauuu

SEQ ID NO: 704420 - RNA, 19 nt, Homo sapiens
  misc_RNA (1)...(19): siRNA sense strand
uaacacacaucaagacaga

SEQ ID NO: 704421 - RNA, 19 nt, Homo sapiens
  misc_RNA (1)...(19): siRNA sense strand
gcagagaugcuccagaauu

SEQ ID NO: 704422 - RNA, 19 nt, Homo sapiens
  misc_RNA (1)...(19): siRNA sense strand
gcaauggacacucuuaaug

SEQ ID NO: 704423 - RNA, 19 nt, Homo sapiens
  misc_RNA (1)...(19): siRNA sense strand
gagaugcuccagaauuuaa

SEQ ID NO: 704424 - RNA, 19 nt, Homo sapiens
  misc_RNA (1)...(19): siRNA sense strand
gcacaaaaguuuauaccaa

SEQ ID NO: 704425 - RNA, 19 nt, Homo sapiens
  misc_RNA (1)...(19): siRNA sense strand
caaccugucagauacaaua

SEQ ID NO: 704426 - RNA, 19 nt, Homo sapiens
  misc_RNA (1)...(19): siRNA sense strand
ccaccacccugccaguuaa

SEQ ID NO: 704427 - RNA, 19 nt, Homo sapiens
  misc_RNA (1)...(19): siRNA sense strand
cuccagaggugaacaauau

SEQ ID NO: 704428 - RNA, 19 nt, Homo sapiens
  misc_RNA (1)...(19): siRNA sense strand
gaaauggagaaguaucuga

SEQ ID NO: 704429 - RNA, 19 nt, Homo sapiens
  misc_RNA (1)...(19): siRNA sense strand
agacugcagugaaacaauu

SEQ ID NO: 704430 - RNA, 19 nt, Homo sapiens
  misc_RNA (1)...(19): siRNA sense strand
gaauacaccggaucuagau

SEQ ID NO: 704431 - RNA, 19 nt, Homo sapiens
  misc_RNA (1)...(19): siRNA sense strand
cuucuaaacuggcaauuca

SEQ ID NO: 704432 - RNA, 19 nt, Homo sapiens
  misc_RNA (1)...(19): siRNA sense strand
gaagaggcaccagaacuga

SEQ ID NO: 704433 - RNA, 19 nt, Homo sapiens
  misc_RNA (1)...(19): siRNA sense strand
gcagcaauggacacucuua

SEQ ID NO: 704434 - RNA, 19 nt, Homo sapiens
  misc_RNA (1)...(19): siRNA sense strand
agacagugccucagucgua

SEQ ID NO: 704435 - RNA, 19 nt, Homo sapiens
  misc_RNA (1)...(19): siRNA sense strand
caacaggccacuuacuuuc

SEQ ID NO: 704436 - RNA, 19 nt, Homo sapiens
  misc_RNA (1)...(19): siRNA sense strand
cacugacacugaaggguua

SEQ ID NO: 704437 - RNA, 19 nt, Homo sapiens
  misc_RNA (1)...(19): siRNA sense strand
cauccaaccugucagauac

SEQ ID NO: 704438 - RNA, 19 nt, Homo sapiens
  misc_RNA (1)...(19): siRNA sense strand
uacaauugcuucuaaacug

SEQ ID NO: 704439 - RNA, 19 nt, Homo sapiens
  misc_RNA (1)...(19): siRNA sense strand
cugcuacaauugcuucuaa

SEQ ID NO: 704440 - RNA, 19 nt, Homo sapiens
  misc_RNA (1)...(19): siRNA sense strand
gauaugcccaguucuacaa

SEQ ID NO: 704441 - RNA, 19 nt, Homo sapiens
  misc_RNA (1)...(19): siRNA sense strand
caauggacacucuuaaugu

SEQ ID NO: 704442 - RNA, 19 nt, Homo sapiens
  misc_RNA (1)...(19): siRNA sense strand
acacacaccucugcuguuc

SEQ ID NO: 704443 - RNA, 19 nt, Homo sapiens
  misc_RNA (1)...(19): siRNA sense strand
gagaacuggccucuacaaa

SEQ ID NO: 704444 - RNA, 19 nt, Homo sapiens
  misc_RNA (1)...(19): siRNA sense strand
uauaccaagucuucucauu

SEQ ID NO: 704445 - RNA, 19 nt, Homo sapiens
  misc_RNA (1)...(19): siRNA sense strand
aauggacacucuuaauguu

SEQ ID NO: 704446 - RNA, 19 nt, Homo sapiens
  misc_RNA (1)...(19): siRNA sense strand
ccugagaacuggccucuac

SEQ ID NO: 704447 - RNA, 19 nt, Homo sapiens
  misc_RNA (1)...(19): siRNA sense strand
ccaagucuucucauuuaaa

SEQ ID NO: 704448 - RNA, 19 nt, Homo sapiens
  misc_RNA (1)...(19): siRNA sense strand
ccaguuaacucacaaaaca

SEQ ID NO: 704449 - RNA, 19 nt, Homo sapiens
  misc_RNA (1)...(19): siRNA sense strand
ccagaggugaacaauauuu

SEQ ID NO: 704450 - RNA, 19 nt, Homo sapiens
  misc_RNA (1)...(19): siRNA sense strand
ccagagaccgugcguaaca

SEQ ID NO: 704451 - RNA, 19 nt, Homo sapiens
  misc_RNA (1)...(19): siRNA sense strand
ccugucagauacaauagaa

SEQ ID NO: 704452 - RNA, 19 nt, Homo sapiens
  misc_RNA (1)...(19): siRNA sense strand
cagacaagaugugaaaugg

SEQ ID NO: 704453 - RNA, 19 nt, Homo sapiens
  misc_RNA (1)...(19): siRNA sense strand
acaacaggccacuuacuuu

SEQ ID NO: 704454 - RNA, 19 nt, Homo sapiens
  misc_RNA (1)...(19): siRNA sense strand
cagcagcaauggacacucu

SEQ ID NO: 704455 - RNA, 19 nt, Homo sapiens
  misc_RNA (1)...(19): siRNA sense strand
uggcaggccuuaacacaca

SEQ ID NO: 704456 - RNA, 19 nt, Homo sapiens
  misc_RNA (1)...(19): siRNA sense strand
ugaauacaccggaucuaga

SEQ ID NO: 704457 - RNA, 19 nt, Homo sapiens
  misc_RNA (1)...(19): siRNA sense strand
cauacacaaugccaaguca

SEQ ID NO: 704458 - RNA, 19 nt, Homo sapiens
  misc_RNA (1)...(19): siRNA sense strand
caaaucagacagcagcaau

SEQ ID NO: 704459 - RNA, 19 nt, Homo sapiens
  misc_RNA (1)...(19): siRNA sense strand
gaaacgacgcauccacuac

SEQ ID NO: 704460 - RNA, 19 nt, Homo sapiens
  misc_RNA (1)...(19): siRNA sense strand
ccagacaagaugugaaaug

SEQ ID NO: 704461 - RNA, 19 nt, Homo sapiens
  misc_RNA (1)...(19): siRNA sense strand
caaacaagaacuuccuaca

SEQ ID NO: 704462 - RNA, 19 nt, Homo sapiens
  misc_RNA (1)...(19): siRNA sense strand
caccuggcccugcauauga

SEQ ID NO: 704463 - RNA, 19 nt, Homo sapiens
  misc_RNA (1)...(19): siRNA sense strand
ugaguucaccaguauauuc

SEQ ID NO: 704464 - RNA, 19 nt, Homo sapiens
  misc_RNA (1)...(19): siRNA sense strand
auaccaagucuucucauuu

SEQ ID NO: 704465 - RNA, 19 nt, Homo sapiens
  misc_RNA (1)...(19): siRNA sense strand
aaacauccaaccugucaga

SEQ ID NO: 704466 - RNA, 19 nt, Homo sapiens
  misc_RNA (1)...(19): siRNA sense strand
gaacuuccuacaccagauc

SEQ ID NO: 704467 - RNA, 19 nt, Homo sapiens
  misc_RNA (1)...(19): siRNA sense strand
guaucaacaugaacgucuu

SEQ ID NO: 704468 - RNA, 19 nt, Homo sapiens
  misc_RNA (1)...(19): siRNA sense strand
uaaacuggcaauucacaau

SEQ ID NO: 704469 - RNA, 19 nt, Homo sapiens
  misc_RNA (1)...(19): siRNA sense strand
ucccugaguucaccaguau

SEQ ID NO: 704470 - RNA, 19 nt, Homo sapiens
  misc_RNA (1)...(19): siRNA sense strand
agaacuggccucuacaaau

SEQ ID NO: 704471 - RNA, 19 nt, Homo sapiens
  misc_RNA (1)...(19): siRNA sense strand
gauacaauagaaggaguaa

SEQ ID NO: 704472 - RNA, 19 nt, Homo sapiens
  misc_RNA (1)...(19): siRNA sense strand
caagaugugaaauggagaa

SEQ ID NO: 704473 - RNA, 19 nt, Homo sapiens
  misc_RNA (1)...(19): siRNA sense strand
ccagauagacaagcagaga

SEQ ID NO: 704474 - RNA, 19 nt, Homo sapiens
  misc_RNA (1)...(19): siRNA sense strand
cacaacaggccacuuacuu

SEQ ID NO: 704475 - RNA, 19 nt, Homo sapiens
  misc_RNA (1)...(19): siRNA sense strand
cacaaugccaagucaguuu

SEQ ID NO: 704476 - RNA, 19 nt, Homo sapiens
  misc_RNA (1)...(19): siRNA sense strand
cagcaauggacacucuuaa

SEQ ID NO: 704477 - RNA, 19 nt, Homo sapiens
  misc_RNA (1)...(19): siRNA sense strand
gcuccagaggugaacaaua

SEQ ID NO: 704478 - RNA, 19 nt, Homo sapiens
  misc_RNA (1)...(19): siRNA sense strand
guccagacaagaugugaaa

SEQ ID NO: 704479 - RNA, 19 nt, Homo sapiens
  misc_RNA (1)...(19): siRNA sense strand
ucccagagaccgugcguaa

SEQ ID NO: 704480 - RNA, 19 nt, Homo sapiens
  misc_RNA (1)...(19): siRNA sense strand
ugaagaggcaccagaacug

SEQ ID NO: 704481 - RNA, 19 nt, Homo sapiens
  misc_RNA (1)...(19): siRNA sense strand
ggacacucuuaauguuucu

SEQ ID NO: 704482 - RNA, 19 nt, Homo sapiens
  misc_RNA (1)...(19): siRNA sense strand
uggacacucuuaauguuuc

SEQ ID NO: 704483 - RNA, 19 nt, Homo sapiens
  misc_RNA (1)...(19): siRNA sense strand
gaguucaccaguauauuca

SEQ ID NO: 704484 - RNA, 19 nt, Homo sapiens
  misc_RNA (1)...(19): siRNA sense strand
agagaugcuccagaauuua

SEQ ID NO: 704485 - RNA, 19 nt, Homo sapiens
  misc_RNA (1)...(19): siRNA sense strand
uguaccagcuacugaauac

SEQ ID NO: 704486 - RNA, 19 nt, Homo sapiens
  misc_RNA (1)...(19): siRNA sense strand
cagaaccuguugccauuuu

SEQ ID NO: 704487 - RNA, 19 nt, Homo sapiens
  misc_RNA (1)...(19): siRNA sense strand
agaaacgacgcauccacua

SEQ ID NO: 704488 - RNA, 19 nt, Homo sapiens
  misc_RNA (1)...(19): siRNA sense strand
cuauaauuccagagcauaa

SEQ ID NO: 704489 - RNA, 19 nt, Homo sapiens
  misc_RNA (1)...(19): siRNA sense strand
aggguuaccuuacaguauc

SEQ ID NO: 704490 - RNA, 19 nt, Homo sapiens
  misc_RNA (1)...(19): siRNA sense strand
acauccaaccugucagaua

SEQ ID NO: 704491 - RNA, 19 nt, Homo sapiens
  misc_RNA (1)...(19): siRNA sense strand
gaucuagauaugcccaguu

SEQ ID NO: 704492 - RNA, 19 nt, Homo sapiens
  misc_RNA (1)...(19): siRNA sense strand
cuuacaguaucaacaugaa

SEQ ID NO: 704493 - RNA, 19 nt, Homo sapiens
  misc_RNA (1)...(19): siRNA sense strand
ggaguaaccccgauuugga

SEQ ID NO: 704494 - RNA, 19 nt, Homo sapiens
  misc_RNA (1)...(19): siRNA sense strand
gaaggaguaaccccgauuu

SEQ ID NO: 704495 - RNA, 19 nt, Homo sapiens
  misc_RNA (1)...(19): siRNA sense strand
caaaacauccaaccuguca

SEQ ID NO: 704496 - RNA, 19 nt, Homo sapiens
  misc_RNA (1)...(19): siRNA sense strand
cauccuaugcugcuacaau

SEQ ID NO: 704497 - RNA, 19 nt, Homo sapiens
  misc_RNA (1)...(19): siRNA sense strand
gucaguuucuuccacaaca

SEQ ID NO: 704498 - RNA, 19 nt, Homo sapiens
  misc_RNA (1)...(19): siRNA sense strand
gugcguaacacacaucaag

SEQ ID NO: 704499 - RNA, 19 nt, Homo sapiens
  misc_RNA (1)...(19): siRNA sense strand
cccaccacccugccaguua

SEQ ID NO: 704500 - RNA, 19 nt, Homo sapiens
  misc_RNA (1)...(19): siRNA sense strand
uuccacaacaggccacuua

SEQ ID NO: 704501 - RNA, 19 nt, Homo sapiens
  misc_RNA (1)...(19): siRNA sense strand
ggaaguccagauagacaag

SEQ ID NO: 704502 - RNA, 19 nt, Homo sapiens
  misc_RNA (1)...(19): siRNA sense strand
ggguuaccuuacaguauca

SEQ ID NO: 704503 - RNA, 19 nt, Homo sapiens
  misc_RNA (1)...(19): siRNA sense strand
gaccaccuggcccugcaua

SEQ ID NO: 704504 - RNA, 19 nt, Homo sapiens
  misc_RNA (1)...(19): siRNA sense strand
gugaaaagccauacaagug

SEQ ID NO: 704505 - RNA, 19 nt, Homo sapiens
  misc_RNA (1)...(19): siRNA sense strand
accaagucuucucauuuaa

SEQ ID NO: 704506 - RNA, 19 nt, Homo sapiens
  misc_RNA (1)...(19): siRNA sense strand
auccuaugcugcuacaauu

SEQ ID NO: 704507 - RNA, 19 nt, Homo sapiens
  misc_RNA (1)...(19): siRNA sense strand
ccuauaauuccagagcaua

SEQ ID NO: 704508 - RNA, 19 nt, Homo sapiens
  misc_RNA (1)...(19): siRNA sense strand
ccaccuggcccugcauaug

SEQ ID NO: 704509 - RNA, 19 nt, Homo sapiens
  misc_RNA (1)...(19): siRNA sense strand
aaacaagaacuuccuacac

SEQ ID NO: 704510 - RNA, 19 nt, Homo sapiens
  misc_RNA (1)...(19): siRNA sense strand
ugagaacuggccucuacaa

SEQ ID NO: 704511 - RNA, 19 nt, Homo sapiens
  misc_RNA (1)...(19): siRNA sense strand
aaacuggcaauucacaauc

SEQ ID NO: 704512 - RNA, 19 nt, Homo sapiens
  misc_RNA (1)...(19): siRNA sense strand
ccugaguucaccaguauau

SEQ ID NO: 704513 - RNA, 19 nt, Homo sapiens
  misc_RNA (1)...(19): siRNA sense strand
gaccgugcguaacacacau

SEQ ID NO: 704514 - RNA, 19 nt, Homo sapiens
  misc_RNA (1)...(19): siRNA sense strand
ccucagucguagaccaguu

SEQ ID NO: 704515 - RNA, 19 nt, Homo sapiens
  misc_RNA (1)...(19): siRNA sense strand
uacaccggaucuagauaug

SEQ ID NO: 704516 - RNA, 19 nt, Homo sapiens
  misc_RNA (1)...(19): siRNA sense strand
ggagguucgugcagaucaa

SEQ ID NO: 704517 - RNA, 19 nt, Homo sapiens
  misc_RNA (1)...(19): siRNA sense strand
gcuggagguucgugcagau

SEQ ID NO: 704518 - RNA, 19 nt, Homo sapiens
  misc_RNA (1)...(19): siRNA sense strand
cugacaaccuggaaaagua

SEQ ID NO: 704519 - RNA, 19 nt, Homo sapiens
  misc_RNA (1)...(19): siRNA sense strand
ggucagagcuccagaaguu

SEQ ID NO: 704520 - RNA, 19 nt, Homo sapiens
  misc_RNA (1)...(19): siRNA sense strand
cagaauaggugacuucauu

SEQ ID NO: 704521 - RNA, 19 nt, Homo sapiens
  misc_RNA (1)...(19): siRNA sense strand
ggacauguauaagccuuua

SEQ ID NO: 704522 - RNA, 19 nt, Homo sapiens
  misc_RNA (1)...(19): siRNA sense strand
acaaaguccugugaaauua

SEQ ID NO: 704523 - RNA, 19 nt, Homo sapiens
  misc_RNA (1)...(19): siRNA sense strand
ugacagaaaugcggaauga

SEQ ID NO: 704524 - RNA, 19 nt, Homo sapiens
  misc_RNA (1)...(19): siRNA sense strand
gaugaugggcugugugaua

SEQ ID NO: 704525 - RNA, 19 nt, Homo sapiens
  misc_RNA (1)...(19): siRNA sense strand
cgacagaauugacagaaau

SEQ ID NO: 704526 - RNA, 19 nt, Homo sapiens
  misc_RNA (1)...(19): siRNA sense strand
gaacugagaagauagaagu

SEQ ID NO: 704527 - RNA, 19 nt, Homo sapiens
  misc_RNA (1)...(19): siRNA sense strand
gggauaagcuauuggaaag

SEQ ID NO: 704528 - RNA, 19 nt, Homo sapiens
  misc_RNA (1)...(19): siRNA sense strand
gcaaguacaaaguagauuu

SEQ ID NO: 704529 - RNA, 19 nt, Homo sapiens
  misc_RNA (1)...(19): siRNA sense strand
ggaaagaucucggaaaaug

SEQ ID NO: 704530 - RNA, 19 nt, Homo sapiens
  misc_RNA (1)...(19): siRNA sense strand
gucuuuaccuguucacuua

SEQ ID NO: 704531 - RNA, 19 nt, Homo sapiens
  misc_RNA (1)...(19): siRNA sense strand
gaagauagaaguuaagcau

SEQ ID NO: 704532 - RNA, 19 nt, Homo sapiens
  misc_RNA (1)...(19): siRNA sense strand
gagagggcauucaaagaug

SEQ ID NO: 704533 - RNA, 19 nt, Homo sapiens
  misc_RNA (1)...(19): siRNA sense strand
gauaagcuauuggaaagau

SEQ ID NO: 704534 - RNA, 19 nt, Homo sapiens
  misc_RNA (1)...(19): siRNA sense strand
gccaggcaguuaucauuaa

SEQ ID NO: 704535 - RNA, 19 nt, Homo sapiens
  misc_RNA (1)...(19): siRNA sense strand
caacaucgccagcuucuca

SEQ ID NO: 704536 - RNA, 19 nt, Homo sapiens
  misc_RNA (1)...(19): siRNA sense strand
guauuuguuuccaguauga

SEQ ID NO: 704537 - RNA, 19 nt, Homo sapiens
  misc_RNA (1)...(19): siRNA sense strand
ggaauguacaucuaccuaa

SEQ ID NO: 704538 - RNA, 19 nt, Homo sapiens
  misc_RNA (1)...(19): siRNA sense strand
gauagaaguuaagcauguu

SEQ ID NO: 704539 - RNA, 19 nt, Homo sapiens
  misc_RNA (1)...(19): siRNA sense strand
gagaagugaauaaggcaua

SEQ ID NO: 704540 - RNA, 19 nt, Homo sapiens
  misc_RNA (1)...(19): siRNA sense strand
agagaaagccaggcaguua

SEQ ID NO: 704541 - RNA, 19 nt, Homo sapiens
  misc_RNA (1)...(19): siRNA sense strand
gaagaucaaaguaaagcaa

SEQ ID NO: 704542 - RNA, 19 nt, Homo sapiens
  misc_RNA (1)...(19): siRNA sense strand
gaauaggugacuucauuga

SEQ ID NO: 704543 - RNA, 19 nt, Homo sapiens
  misc_RNA (1)...(19): siRNA sense strand
uuaacaaaguccugugaaa

SEQ ID NO: 704544 - RNA, 19 nt, Homo sapiens
  misc_RNA (1)...(19): siRNA sense strand
cugagaagauagaaguuaa

SEQ ID NO: 704545 - RNA, 19 nt, Homo sapiens
  misc_RNA (1)...(19): siRNA sense strand
acagaggaauguacaucua

SEQ ID NO: 704546 - RNA, 19 nt, Homo sapiens
  misc_RNA (1)...(19): siRNA sense strand
gcggaaugaucucuuuaau

SEQ ID NO: 704547 - RNA, 19 nt, Homo sapiens
  misc_RNA (1)...(19): siRNA sense strand
gaauauauggucaauuugg

SEQ ID NO: 704548 - RNA, 19 nt, Homo sapiens
  misc_RNA (1)...(19): siRNA sense strand
cggaaugaucucuuuaaua

SEQ ID NO: 704549 - RNA, 19 nt, Homo sapiens
  misc_RNA (1)...(19): siRNA sense strand
caaaguccugugaaauuaa

SEQ ID NO: 704550 - RNA, 19 nt, Homo sapiens
  misc_RNA (1)...(19): siRNA sense strand
agauagaaguuaagcaugu

SEQ ID NO: 704551 - RNA, 19 nt, Homo sapiens
  misc_RNA (1)...(19): siRNA sense strand
uccagaaguuccuguaauu

SEQ ID NO: 704552 - RNA, 19 nt, Homo sapiens
  misc_RNA (1)...(19): siRNA sense strand
gagaaagccaggcaguuau

SEQ ID NO: 704553 - RNA, 19 nt, Homo sapiens
  misc_RNA (1)...(19): siRNA sense strand
ggagauuuauagcaacauc

SEQ ID NO: 704554 - RNA, 19 nt, Homo sapiens
  misc_RNA (1)...(19): siRNA sense strand
gguacugucuucgugauga

SEQ ID NO: 704555 - RNA, 19 nt, Homo sapiens
  misc_RNA (1)...(19): siRNA sense strand
ggacagccuugggacaugu

SEQ ID NO: 704556 - RNA, 19 nt, Homo sapiens
  misc_RNA (1)...(19): siRNA sense strand
acacagcaaguacaaagua

SEQ ID NO: 704557 - RNA, 19 nt, Homo sapiens
  misc_RNA (1)...(19): siRNA sense strand
caacacagcaaguacaaag

SEQ ID NO: 704558 - RNA, 19 nt, Homo sapiens
  misc_RNA (1)...(19): siRNA sense strand
aaaguggcauuggaaauau

SEQ ID NO: 704559 - RNA, 19 nt, Homo sapiens
  misc_RNA (1)...(19): siRNA sense strand
uaacaaaguccugugaaau

SEQ ID NO: 704560 - RNA, 19 nt, Homo sapiens
  misc_RNA (1)...(19): siRNA sense strand
aacaaaguccugugaaauu

SEQ ID NO: 704561 - RNA, 19 nt, Homo sapiens
  misc_RNA (1)...(19): siRNA sense strand
gauagagagggcauucaaa

SEQ ID NO: 704562 - RNA, 19 nt, Homo sapiens
  misc_RNA (1)...(19): siRNA sense strand
guacugucuucgugaugaa

SEQ ID NO: 704563 - RNA, 19 nt, Homo sapiens
  misc_RNA (1)...(19): siRNA sense strand
guaaagcaacagaggaaug

SEQ ID NO: 704564 - RNA, 19 nt, Homo sapiens
  misc_RNA (1)...(19): siRNA sense strand
auaggugacuucauugaug

SEQ ID NO: 704565 - RNA, 19 nt, Homo sapiens
  misc_RNA (1)...(19): siRNA sense strand
ccagaaguuccuguaauuu

SEQ ID NO: 704566 - RNA, 19 nt, Homo sapiens
  misc_RNA (1)...(19): siRNA sense strand
guaacugaagaucaaagua

SEQ ID NO: 704567 - RNA, 19 nt, Homo sapiens
  misc_RNA (1)...(19): siRNA sense strand
gggugugucuuuaccuguu

SEQ ID NO: 704568 - RNA, 19 nt, Homo sapiens
  misc_RNA (1)...(19): siRNA sense strand
gaucuuccauuugaaacuc

SEQ ID NO: 704569 - RNA, 19 nt, Homo sapiens
  misc_RNA (1)...(19): siRNA sense strand
cagaaguuccuguaauuuc

SEQ ID NO: 704570 - RNA, 19 nt, Homo sapiens
  misc_RNA (1)...(19): siRNA sense strand
ccaagucucauacgaagau

SEQ ID NO: 704571 - RNA, 19 nt, Homo sapiens
  misc_RNA (1)...(19): siRNA sense strand
ccgacagaauugacagaaa

SEQ ID NO: 704572 - RNA, 19 nt, Homo sapiens
  misc_RNA (1)...(19): siRNA sense strand
gagcacauuuuacaauaug

SEQ ID NO: 704573 - RNA, 19 nt, Homo sapiens
  misc_RNA (1)...(19): siRNA sense strand
agagggcauucaaagauga

SEQ ID NO: 704574 - RNA, 19 nt, Homo sapiens
  misc_RNA (1)...(19): siRNA sense strand
caaguacaaaguagauuuc

SEQ ID NO: 704575 - RNA, 19 nt, Homo sapiens
  misc_RNA (1)...(19): siRNA sense strand
ugucagcaguucacaaucu

SEQ ID NO: 704576 - RNA, 19 nt, Homo sapiens
  misc_RNA (1)...(19): siRNA sense strand
ugacuucauugaugugagu

SEQ ID NO: 704577 - RNA, 19 nt, Homo sapiens
  misc_RNA (1)...(19): siRNA sense strand
ugccuucuguuaugacgua

SEQ ID NO: 704578 - RNA, 19 nt, Homo sapiens
  misc_RNA (1)...(19): siRNA sense strand
caacagaggaauguacauc

SEQ ID NO: 704579 - RNA, 19 nt, Homo sapiens
  misc_RNA (1)...(19): siRNA sense strand
uaaagcaacagaggaaugu

SEQ ID NO: 704580 - RNA, 19 nt, Homo sapiens
  misc_RNA (1)...(19): siRNA sense strand
uaggugacuucauugaugu

SEQ ID NO: 704581 - RNA, 19 nt, Homo sapiens
  misc_RNA (1)...(19): siRNA sense strand
gaugcucaugcuuuaauuu

SEQ ID NO: 704582 - RNA, 19 nt, Homo sapiens
  misc_RNA (1)...(19): siRNA sense strand
uuucaaagauugugaucca

SEQ ID NO: 704583 - RNA, 19 nt, Homo sapiens
  misc_RNA (1)...(19): siRNA sense strand
aaugcggaaugaucucuuu

SEQ ID NO: 704584 - RNA, 19 nt, Homo sapiens
  misc_RNA (1)...(19): siRNA sense strand
agagagggcauucaaagau

SEQ ID NO: 704585 - RNA, 19 nt, Homo sapiens
  misc_RNA (1)...(19): siRNA sense strand
ucuggugccuucuguuaug

SEQ ID NO: 704586 - RNA, 19 nt, Homo sapiens
  misc_RNA (1)...(19): siRNA sense strand
uacaauaugggauaagcua

SEQ ID NO: 704587 - RNA, 19 nt, Homo sapiens
  misc_RNA (1)...(19): siRNA sense strand
uagucaagcuacacagaau

SEQ ID NO: 704588 - RNA, 19 nt, Homo sapiens
  misc_RNA (1)...(19): siRNA sense strand
gaaagccaggcaguuauca

SEQ ID NO: 704589 - RNA, 19 nt, Homo sapiens
  misc_RNA (1)...(19): siRNA sense strand
augaguggaugccaacaaa

SEQ ID NO: 704590 - RNA, 19 nt, Homo sapiens
  misc_RNA (1)...(19): siRNA sense strand
cauuucaacucccuacagu

SEQ ID NO: 704591 - RNA, 19 nt, Homo sapiens
  misc_RNA (1)...(19): siRNA sense strand
ugagagaauagucaagcua

SEQ ID NO: 704592 - RNA, 19 nt, Homo sapiens
  misc_RNA (1)...(19): siRNA sense strand
acaguugugccaugcauuu

SEQ ID NO: 704593 - RNA, 19 nt, Homo sapiens
  misc_RNA (1)...(19): siRNA sense strand
agaagugaauaaggcauau

SEQ ID NO: 704594 - RNA, 19 nt, Homo sapiens
  misc_RNA (1)...(19): siRNA sense strand
aaaaguggcauuggaaaua

SEQ ID NO: 704595 - RNA, 19 nt, Homo sapiens
  misc_RNA (1)...(19): siRNA sense strand
gcauuuaagcgagugguau

SEQ ID NO: 704596 - RNA, 19 nt, Homo sapiens
  misc_RNA (1)...(19): siRNA sense strand
acagaaaugcggaaugauc

SEQ ID NO: 704597 - RNA, 19 nt, Homo sapiens
  misc_RNA (1)...(19): siRNA sense strand
gaugaguggaugccaacaa

SEQ ID NO: 704598 - RNA, 19 nt, Homo sapiens
  misc_RNA (1)...(19): siRNA sense strand
gcuccagaaguuccuguaa

SEQ ID NO: 704599 - RNA, 19 nt, Homo sapiens
  misc_RNA (1)...(19): siRNA sense strand
gauccaggagaagugaaua

SEQ ID NO: 704600 - RNA, 19 nt, Homo sapiens
  misc_RNA (1)...(19): siRNA sense strand
ugggauaagcuauuggaaa

SEQ ID NO: 704601 - RNA, 19 nt, Homo sapiens
  misc_RNA (1)...(19): siRNA sense strand
ccagccaagucucauacga

SEQ ID NO: 704602 - RNA, 19 nt, Homo sapiens
  misc_RNA (1)...(19): siRNA sense strand
uagagagggcauucaaaga

SEQ ID NO: 704603 - RNA, 19 nt, Homo sapiens
  misc_RNA (1)...(19): siRNA sense strand
uuucuggugccuucuguua

SEQ ID NO: 704604 - RNA, 19 nt, Homo sapiens
  misc_RNA (1)...(19): siRNA sense strand
gauuccagggugugucuuu

SEQ ID NO: 704605 - RNA, 19 nt, Homo sapiens
  misc_RNA (1)...(19): siRNA sense strand
cagccaagucucauacgaa

SEQ ID NO: 704606 - RNA, 19 nt, Homo sapiens
  misc_RNA (1)...(19): siRNA sense strand
uaugaagugucagcaguuc

SEQ ID NO: 704607 - RNA, 19 nt, Homo sapiens
  misc_RNA (1)...(19): siRNA sense strand
guaugaagugucagcaguu

SEQ ID NO: 704608 - RNA, 19 nt, Homo sapiens
  misc_RNA (1)...(19): siRNA sense strand
caaguauuuguuuccagua

SEQ ID NO: 704609 - RNA, 19 nt, Homo sapiens
  misc_RNA (1)...(19): siRNA sense strand
uggcguuccugugcuauga

SEQ ID NO: 704610 - RNA, 19 nt, Homo sapiens
  misc_RNA (1)...(19): siRNA sense strand
gaaaugcggaaugaucucu

SEQ ID NO: 704611 - RNA, 19 nt, Homo sapiens
  misc_RNA (1)...(19): siRNA sense strand
gucagcaguucacaaucuu

SEQ ID NO: 704612 - RNA, 19 nt, Homo sapiens
  misc_RNA (1)...(19): siRNA sense strand
acacagaauaggugacuuc

SEQ ID NO: 704613 - RNA, 19 nt, Homo sapiens
  misc_RNA (1)...(19): siRNA sense strand
guagauuucauagaagaga

SEQ ID NO: 704614 - RNA, 19 nt, Homo sapiens
  misc_RNA (1)...(19): siRNA sense strand
cagcaaguacaaaguagau

SEQ ID NO: 704615 - RNA, 19 nt, Homo sapiens
  misc_RNA (1)...(19): siRNA sense strand
cuucuguuaugacguaguu

SEQ ID NO: 704616 - RNA, 19 nt, Homo sapiens
  misc_RNA (1)...(19): siRNA sense strand
gaaguuccuguaauuucug

SEQ ID NO: 704617 - RNA, 19 nt, Homo sapiens
  misc_RNA (1)...(19): siRNA sense strand
cuccagaaguuccuguaau

SEQ ID NO: 704618 - RNA, 19 nt, Homo sapiens
  misc_RNA (1)...(19): siRNA sense strand
ugauagagagggcauucaa

SEQ ID NO: 704619 - RNA, 19 nt, Homo sapiens
  misc_RNA (1)...(19): siRNA sense strand
ggucagagcuccagaaguu

SEQ ID NO: 704620 - RNA, 19 nt, Homo sapiens
  misc_RNA (1)...(19): siRNA sense strand
cagaauaggugacuucauu

SEQ ID NO: 704621 - RNA, 19 nt, Homo sapiens
  misc_RNA (1)...(19): siRNA sense strand
ggacauguauaagccuuua

SEQ ID NO: 704622 - RNA, 19 nt, Homo sapiens
  misc_RNA (1)...(19): siRNA sense strand
acaaaguccugugaaauua

SEQ ID NO: 704623 - RNA, 19 nt, Homo sapiens
  misc_RNA (1)...(19): siRNA sense strand
ugacagaaaugcggaauga

SEQ ID NO: 704624 - RNA, 19 nt, Homo sapiens
  misc_RNA (1)...(19): siRNA sense strand
gaugaugggcugugugaua

SEQ ID NO: 704625 - RNA, 19 nt, Homo sapiens
  misc_RNA (1)...(19): siRNA sense strand
cgacagaauugacagaaau

SEQ ID NO: 704626 - RNA, 19 nt, Homo sapiens
  misc_RNA (1)...(19): siRNA sense strand
gaacugagaagauagaagu

SEQ ID NO: 704627 - RNA, 19 nt, Homo sapiens
  misc_RNA (1)...(19): siRNA sense strand
gggauaagcuauuggaaag

SEQ ID NO: 704628 - RNA, 19 nt, Homo sapiens
  misc_RNA (1)...(19): siRNA sense strand
gcaaguacaaaguagauuu

SEQ ID NO: 704629 - RNA, 19 nt, Homo sapiens
  misc_RNA (1)...(19): siRNA sense strand
ggaaagaucucggaaaaug

SEQ ID NO: 704630 - RNA, 19 nt, Homo sapiens
  misc_RNA (1)...(19): siRNA sense strand
gucuuuaccuguucacuua

SEQ ID NO: 704631 - RNA, 19 nt, Homo sapiens
  misc_RNA (1)...(19): siRNA sense strand
gaagauagaaguuaagcau

SEQ ID NO: 704632 - RNA, 19 nt, Homo sapiens
  misc_RNA (1)...(19): siRNA sense strand
gagagggcauucaaagaug

SEQ ID NO: 704633 - RNA, 19 nt, Homo sapiens
  misc_RNA (1)...(19): siRNA sense strand
gauaagcuauuggaaagau

SEQ ID NO: 704634 - RNA, 19 nt, Homo sapiens
  misc_RNA (1)...(19): siRNA sense strand
gccaggcaguuaucauuaa

SEQ ID NO: 704635 - RNA, 19 nt, Homo sapiens
  misc_RNA (1)...(19): siRNA sense strand
caacaucgccagcuucuca

SEQ ID NO: 704636 - RNA, 19 nt, Homo sapiens
  misc_RNA (1)...(19): siRNA sense strand
guauuuguuuccaguauga

SEQ ID NO: 704637 - RNA, 19 nt, Homo sapiens
  misc_RNA (1)...(19): siRNA sense strand
gauagaaguuaagcauguu

SEQ ID NO: 704638 - RNA, 19 nt, Homo sapiens
  misc_RNA (1)...(19): siRNA sense strand
gagaagugaauaaggcaua

SEQ ID NO: 704639 - RNA, 19 nt, Homo sapiens
  misc_RNA (1)...(19): siRNA sense strand
agagaaagccaggcaguua

SEQ ID NO: 704640 - RNA, 19 nt, Homo sapiens
  misc_RNA (1)...(19): siRNA sense strand
gaauaggugacuucauuga

SEQ ID NO: 704641 - RNA, 19 nt, Homo sapiens
  misc_RNA (1)...(19): siRNA sense strand
uuaacaaaguccugugaaa

SEQ ID NO: 704642 - RNA, 19 nt, Homo sapiens
  misc_RNA (1)...(19): siRNA sense strand
cugagaagauagaaguuaa

SEQ ID NO: 704643 - RNA, 19 nt, Homo sapiens
  misc_RNA (1)...(19): siRNA sense strand
gcggaaugaucucuuuaau

SEQ ID NO: 704644 - RNA, 19 nt, Homo sapiens
  misc_RNA (1)...(19): siRNA sense strand
gaauauauggucaauuugg

SEQ ID NO: 704645 - RNA, 19 nt, Homo sapiens
  misc_RNA (1)...(19): siRNA sense strand
cggaaugaucucuuuaaua

SEQ ID NO: 704646 - RNA, 19 nt, Homo sapiens
  misc_RNA (1)...(19): siRNA sense strand
caaaguccugugaaauuaa

SEQ ID NO: 704647 - RNA, 19 nt, Homo sapiens
  misc_RNA (1)...(19): siRNA sense strand
agauagaaguuaagcaugu

SEQ ID NO: 704648 - RNA, 19 nt, Homo sapiens
  misc_RNA (1)...(19): siRNA sense strand
uccagaaguuccuguaauu

SEQ ID NO: 704649 - RNA, 19 nt, Homo sapiens
  misc_RNA (1)...(19): siRNA sense strand
gagaaagccaggcaguuau

SEQ ID NO: 704650 - RNA, 19 nt, Homo sapiens
  misc_RNA (1)...(19): siRNA sense strand
ggagauuuauagcaacauc

SEQ ID NO: 704651 - RNA, 19 nt, Homo sapiens
  misc_RNA (1)...(19): siRNA sense strand
gguacugucuucgugauga

SEQ ID NO: 704652 - RNA, 19 nt, Homo sapiens
  misc_RNA (1)...(19): siRNA sense strand
ggacagccuugggacaugu

SEQ ID NO: 704653 - RNA, 19 nt, Homo sapiens
  misc_RNA (1)...(19): siRNA sense strand
acacagcaaguacaaagua

SEQ ID NO: 704654 - RNA, 19 nt, Homo sapiens
  misc_RNA (1)...(19): siRNA sense strand
caacacagcaaguacaaag

SEQ ID NO: 704655 - RNA, 19 nt, Homo sapiens
  misc_RNA (1)...(19): siRNA sense strand
aaaguggcauuggaaauau

SEQ ID NO: 704656 - RNA, 19 nt, Homo sapiens
  misc_RNA (1)...(19): siRNA sense strand
uaacaaaguccugugaaau

SEQ ID NO: 704657 - RNA, 19 nt, Homo sapiens
  misc_RNA (1)...(19): siRNA sense strand
aacaaaguccugugaaauu

SEQ ID NO: 704658 - RNA, 19 nt, Homo sapiens
  misc_RNA (1)...(19): siRNA sense strand
gauagagagggcauucaaa

SEQ ID NO: 704659 - RNA, 19 nt, Homo sapiens
  misc_RNA (1)...(19): siRNA sense strand
guacugucuucgugaugaa

SEQ ID NO: 704660 - RNA, 19 nt, Homo sapiens
  misc_RNA (1)...(19): siRNA sense strand
auaggugacuucauugaug

SEQ ID NO: 704661 - RNA, 19 nt, Homo sapiens
  misc_RNA (1)...(19): siRNA sense strand
ccagaaguuccuguaauuu

SEQ ID NO: 704662 - RNA, 19 nt, Homo sapiens
  misc_RNA (1)...(19): siRNA sense strand
gggugugucuuuaccuguu

SEQ ID NO: 704663 - RNA, 19 nt, Homo sapiens
  misc_RNA (1)...(19): siRNA sense strand
gaucuuccauuugaaacuc

SEQ ID NO: 704664 - RNA, 19 nt, Homo sapiens
  misc_RNA (1)...(19): siRNA sense strand
cagaaguuccuguaauuuc

SEQ ID NO: 704665 - RNA, 19 nt, Homo sapiens
  misc_RNA (1)...(19): siRNA sense strand
ccaagucucauacgaagau

SEQ ID NO: 704666 - RNA, 19 nt, Homo sapiens
  misc_RNA (1)...(19): siRNA sense strand
ccgacagaauugacagaaa

SEQ ID NO: 704667 - RNA, 19 nt, Homo sapiens
  misc_RNA (1)...(19): siRNA sense strand
gagcacauuuuacaauaug

SEQ ID NO: 704668 - RNA, 19 nt, Homo sapiens
  misc_RNA (1)...(19): siRNA sense strand
agagggcauucaaagauga

SEQ ID NO: 704669 - RNA, 19 nt, Homo sapiens
  misc_RNA (1)...(19): siRNA sense strand
caaguacaaaguagauuuc

SEQ ID NO: 704670 - RNA, 19 nt, Homo sapiens
  misc_RNA (1)...(19): siRNA sense strand
ugucagcaguucacaaucu

SEQ ID NO: 704671 - RNA, 19 nt, Homo sapiens
  misc_RNA (1)...(19): siRNA sense strand
ugacuucauugaugugagu

SEQ ID NO: 704672 - RNA, 19 nt, Homo sapiens
  misc_RNA (1)...(19): siRNA sense strand
ugccuucuguuaugacgua

SEQ ID NO: 704673 - RNA, 19 nt, Homo sapiens
  misc_RNA (1)...(19): siRNA sense strand
uaggugacuucauugaugu

SEQ ID NO: 704674 - RNA, 19 nt, Homo sapiens
  misc_RNA (1)...(19): siRNA sense strand
gaugcucaugcuuuaauuu

SEQ ID NO: 704675 - RNA, 19 nt, Homo sapiens
  misc_RNA (1)...(19): siRNA sense strand
aaugcggaaugaucucuuu

SEQ ID NO: 704676 - RNA, 19 nt, Homo sapiens
  misc_RNA (1)...(19): siRNA sense strand
agagagggcauucaaagau

SEQ ID NO: 704677 - RNA, 19 nt, Homo sapiens
  misc_RNA (1)...(19): siRNA sense strand
uuucaaagauugugaucca

SEQ ID NO: 704678 - RNA, 19 nt, Homo sapiens
  misc_RNA (1)...(19): siRNA sense strand
gaaagccaggcaguuauca

SEQ ID NO: 704679 - RNA, 19 nt, Homo sapiens
  misc_RNA (1)...(19): siRNA sense strand
uacaauaugggauaagcua

SEQ ID NO: 704680 - RNA, 19 nt, Homo sapiens
  misc_RNA (1)...(19): siRNA sense strand
uagucaagcuacacagaau

SEQ ID NO: 704681 - RNA, 19 nt, Homo sapiens
  misc_RNA (1)...(19): siRNA sense strand
augaguggaugccaacaaa

SEQ ID NO: 704682 - RNA, 19 nt, Homo sapiens
  misc_RNA (1)...(19): siRNA sense strand
ucuggugccuucuguuaug

SEQ ID NO: 704683 - RNA, 19 nt, Homo sapiens
  misc_RNA (1)...(19): siRNA sense strand
cauuucaacucccuacagu

SEQ ID NO: 704684 - RNA, 19 nt, Homo sapiens
  misc_RNA (1)...(19): siRNA sense strand
ugagagaauagucaagcua

SEQ ID NO: 704685 - RNA, 19 nt, Homo sapiens
  misc_RNA (1)...(19): siRNA sense strand
acaguugugccaugcauuu

SEQ ID NO: 704686 - RNA, 19 nt, Homo sapiens
  misc_RNA (1)...(19): siRNA sense strand
agaagugaauaaggcauau

SEQ ID NO: 704687 - RNA, 19 nt, Homo sapiens
  misc_RNA (1)...(19): siRNA sense strand
aaaaguggcauuggaaaua

SEQ ID NO: 704688 - RNA, 19 nt, Homo sapiens
  misc_RNA (1)...(19): siRNA sense strand
gcauuuaagcgagugguau

SEQ ID NO: 704689 - RNA, 19 nt, Homo sapiens
  misc_RNA (1)...(19): siRNA sense strand
acagaaaugcggaaugauc

SEQ ID NO: 704690 - RNA, 19 nt, Homo sapiens
  misc_RNA (1)...(19): siRNA sense strand
gaugaguggaugccaacaa

SEQ ID NO: 704691 - RNA, 19 nt, Homo sapiens
  misc_RNA (1)...(19): siRNA sense strand
gcuccagaaguuccuguaa

SEQ ID NO: 704692 - RNA, 19 nt, Homo sapiens
  misc_RNA (1)...(19): siRNA sense strand
gauccaggagaagugaaua

SEQ ID NO: 704693 - RNA, 19 nt, Homo sapiens
  misc_RNA (1)...(19): siRNA sense strand
ugggauaagcuauuggaaa

SEQ ID NO: 704694 - RNA, 19 nt, Homo sapiens
  misc_RNA (1)...(19): siRNA sense strand
ccagccaagucucauacga

SEQ ID NO: 704695 - RNA, 19 nt, Homo sapiens
  misc_RNA (1)...(19): siRNA sense strand
uagagagggcauucaaaga

SEQ ID NO: 704696 - RNA, 19 nt, Homo sapiens
  misc_RNA (1)...(19): siRNA sense strand
uuucuggugccuucuguua

SEQ ID NO: 704697 - RNA, 19 nt, Homo sapiens
  misc_RNA (1)...(19): siRNA sense strand
gauuccagggugugucuuu

SEQ ID NO: 704698 - RNA, 19 nt, Homo sapiens
  misc_RNA (1)...(19): siRNA sense strand
cagccaagucucauacgaa

SEQ ID NO: 704699 - RNA, 19 nt, Homo sapiens
  misc_RNA (1)...(19): siRNA sense strand
uaugaagugucagcaguuc

SEQ ID NO: 704700 - RNA, 19 nt, Homo sapiens
  misc_RNA (1)...(19): siRNA sense strand
guaugaagugucagcaguu

SEQ ID NO: 704701 - RNA, 19 nt, Homo sapiens
  misc_RNA (1)...(19): siRNA sense strand
caaguauuuguuuccagua

SEQ ID NO: 704702 - RNA, 19 nt, Homo sapiens
  misc_RNA (1)...(19): siRNA sense strand
uggcguuccugugcuauga

SEQ ID NO: 704703 - RNA, 19 nt, Homo sapiens
  misc_RNA (1)...(19): siRNA sense strand
gaaaugcggaaugaucucu

SEQ ID NO: 704704 - RNA, 19 nt, Homo sapiens
  misc_RNA (1)...(19): siRNA sense strand
gucagcaguucacaaucuu

SEQ ID NO: 704705 - RNA, 19 nt, Homo sapiens
  misc_RNA (1)...(19): siRNA sense strand
gacagaauugacagaaaug

SEQ ID NO: 704706 - RNA, 19 nt, Homo sapiens
  misc_RNA (1)...(19): siRNA sense strand
acacagaauaggugacuuc

SEQ ID NO: 704707 - RNA, 19 nt, Homo sapiens
  misc_RNA (1)...(19): siRNA sense strand
guagauuucauagaagaga

SEQ ID NO: 704708 - RNA, 19 nt, Homo sapiens
  misc_RNA (1)...(19): siRNA sense strand
cagcaaguacaaaguagau

SEQ ID NO: 704709 - RNA, 19 nt, Homo sapiens
  misc_RNA (1)...(19): siRNA sense strand
cuucuguuaugacguaguu

SEQ ID NO: 704710 - RNA, 19 nt, Homo sapiens
  misc_RNA (1)...(19): siRNA sense strand
gaaguuccuguaauuucug

SEQ ID NO: 704711 - RNA, 19 nt, Homo sapiens
  misc_RNA (1)...(19): siRNA sense strand
cuccagaaguuccuguaau

SEQ ID NO: 704712 - RNA, 19 nt, Homo sapiens
  misc_RNA (1)...(19): siRNA sense strand
ugauagagagggcauucaa

SEQ ID NO: 704713 - RNA, 19 nt, Homo sapiens
  misc_RNA (1)...(19): siRNA sense strand
gaugggcugugugauagag

SEQ ID NO: 704714 - RNA, 19 nt, Homo sapiens
  misc_RNA (1)...(19): siRNA sense strand
cacagcaaguacaaaguag

SEQ ID NO: 704715 - RNA, 19 nt, Homo sapiens
  misc_RNA (1)...(19): siRNA sense strand
gcaaaaguggcauuggaaa

SEQ ID NO: 704716 - RNA, 19 nt, Homo sapiens
  misc_RNA (1)...(19): siRNA sense strand
guugugccaugcauuuaag

SEQ ID NO: 704717 - RNA, 19 nt, Homo sapiens
  misc_RNA (1)...(19): siRNA sense strand
acugagaagauagaaguua

SEQ ID NO: 704718 - RNA, 19 nt, Homo sapiens
  misc_RNA (1)...(19): siRNA sense strand
cagaaaugcggaaugaucu

SEQ ID NO: 704719 - RNA, 19 nt, Homo sapiens
  misc_RNA (1)...(19): siRNA sense strand
gaagacagaucccaaagag

SEQ ID NO: 704720 - RNA, 19 nt, Homo sapiens
  misc_RNA (1)...(19): siRNA sense strand
ccaaagagaagauugauau

SEQ ID NO: 704721 - RNA, 19 nt, Homo sapiens
  misc_RNA (1)...(19): siRNA sense strand
ggaccuaccgagaguauuu

SEQ ID NO: 704722 - RNA, 19 nt, Homo sapiens
  misc_RNA (1)...(19): siRNA sense strand
ggacguugcuacucacuag

SEQ ID NO: 704723 - RNA, 19 nt, Homo sapiens
  misc_RNA (1)...(19): siRNA sense strand
agacagaucccaaagagaa

SEQ ID NO: 704724 - RNA, 19 nt, Homo sapiens
  misc_RNA (1)...(19): siRNA sense strand
ggagaagacagaucccaaa

SEQ ID NO: 704725 - RNA, 19 nt, Homo sapiens
  misc_RNA (1)...(19): siRNA sense strand
uggagcggcuggagaagua

SEQ ID NO: 704726 - RNA, 19 nt, Homo sapiens
  misc_RNA (1)...(19): siRNA sense strand
aagagaagauugauauugg

SEQ ID NO: 704727 - RNA, 19 nt, Homo sapiens
  misc_RNA (1)...(19): siRNA sense strand
caacagugacaucgacuug

SEQ ID NO: 704728 - RNA, 19 nt, Homo sapiens
  misc_RNA (1)...(19): siRNA sense strand
ggagccagaugcugaguac

SEQ ID NO: 704729 - RNA, 19 nt, Homo sapiens
  misc_RNA (1)...(19): siRNA sense strand
gggagccgguguuugaguu

SEQ ID NO: 704730 - RNA, 19 nt, Homo sapiens
  misc_RNA (1)...(19): siRNA sense strand
ccaccuauggcaucuacua

SEQ ID NO: 704731 - RNA, 19 nt, Homo sapiens
  misc_RNA (1)...(19): siRNA sense strand
gggugaggaugaccugaug

SEQ ID NO: 704732 - RNA, 19 nt, Homo sapiens
  misc_RNA (1)...(19): siRNA sense strand
cuacaagaaacaccaagaa

SEQ ID NO: 704733 - RNA, 19 nt, Homo sapiens
  misc_RNA (1)...(19): siRNA sense strand
uaccuccacuggcugcuaa

SEQ ID NO: 704734 - RNA, 19 nt, Homo sapiens
  misc_RNA (1)...(19): siRNA sense strand
uacaagaaacaccaagaaa

SEQ ID NO: 704735 - RNA, 19 nt, Homo sapiens
  misc_RNA (1)...(19): siRNA sense strand
gucaugagcccaccuaugg

SEQ ID NO: 704736 - RNA, 19 nt, Homo sapiens
  misc_RNA (1)...(19): siRNA sense strand
cagaagagggcuccuugug

SEQ ID NO: 704737 - RNA, 19 nt, Homo sapiens
  misc_RNA (1)...(19): siRNA sense strand
gagaagacagaucccaaag

SEQ ID NO: 704738 - RNA, 19 nt, Homo sapiens
  misc_RNA (1)...(19): siRNA sense strand
caagaaacaccaagaaacc

SEQ ID NO: 704739 - RNA, 19 nt, Homo sapiens
  misc_RNA (1)...(19): siRNA sense strand
ccugaugccuguguacugu

SEQ ID NO: 704740 - RNA, 19 nt, Homo sapiens
  misc_RNA (1)...(19): siRNA sense strand
ggaccagccgauugacuuc

SEQ ID NO: 704741 - RNA, 19 nt, Homo sapiens
  misc_RNA (1)...(19): siRNA sense strand
gcagaagagggcuccuugu

SEQ ID NO: 704742 - RNA, 19 nt, Homo sapiens
  misc_RNA (1)...(19): siRNA sense strand
acagugacaucgacuugag

SEQ ID NO: 704743 - RNA, 19 nt, Homo sapiens
  misc_RNA (1)...(19): siRNA sense strand
ggugaccuaugaggcagaa

SEQ ID NO: 704744 - RNA, 19 nt, Homo sapiens
  misc_RNA (1)...(19): siRNA sense strand
aaacaccaagaaaccauga

SEQ ID NO: 704745 - RNA, 19 nt, Homo sapiens
  misc_RNA (1)...(19): siRNA sense strand
agaagacagaucccaaaga

SEQ ID NO: 704746 - RNA, 19 nt, Homo sapiens
  misc_RNA (1)...(19): siRNA sense strand
gcccaccuauggcaucuac

SEQ ID NO: 704747 - RNA, 19 nt, Homo sapiens
  misc_RNA (1)...(19): siRNA sense strand
acaagaaacaccaagaaac

SEQ ID NO: 704748 - RNA, 19 nt, Homo sapiens
  misc_RNA (1)...(19): siRNA sense strand
gaucccaaagagaagauug

SEQ ID NO: 704749 - RNA, 19 nt, Homo sapiens
  misc_RNA (1)...(19): siRNA sense strand
aagcaggaccagccgauug

SEQ ID NO: 704750 - RNA, 19 nt, Homo sapiens
  misc_RNA (1)...(19): siRNA sense strand
uggcggaccuaccgagagu

SEQ ID NO: 704751 - RNA, 19 nt, Homo sapiens
  misc_RNA (1)...(19): siRNA sense strand
gacccaacagcuacuggaa

SEQ ID NO: 704752 - RNA, 19 nt, Homo sapiens
  misc_RNA (1)...(19): siRNA sense strand
ugcgggagccgguguuuga

SEQ ID NO: 704753 - RNA, 19 nt, Homo sapiens
  misc_RNA (1)...(19): siRNA sense strand
uccacuggcugcuaaccaa

SEQ ID NO: 704754 - RNA, 19 nt, Homo sapiens
  misc_RNA (1)...(19): siRNA sense strand
ugaccuaugaggcagaaga

SEQ ID NO: 704755 - RNA, 19 nt, Homo sapiens
  misc_RNA (1)...(19): siRNA sense strand
cccaaagagaagauugaua

SEQ ID NO: 704756 - RNA, 19 nt, Homo sapiens
  misc_RNA (1)...(19): siRNA sense strand
caccuauggcaucuacuaa

SEQ ID NO: 704757 - RNA, 19 nt, Homo sapiens
  misc_RNA (1)...(19): siRNA sense strand
gcggaccuaccgagaguau

SEQ ID NO: 704758 - RNA, 19 nt, Homo sapiens
  misc_RNA (1)...(19): siRNA sense strand
ccagccggcuuguccuucu

SEQ ID NO: 704759 - RNA, 19 nt, Homo sapiens
  misc_RNA (1)...(19): siRNA sense strand
gagcccaccuauggcaucu

SEQ ID NO: 704760 - RNA, 19 nt, Homo sapiens
  misc_RNA (1)...(19): siRNA sense strand
ggugguacgucuacuguaa

SEQ ID NO: 704761 - RNA, 19 nt, Homo sapiens
  misc_RNA (1)...(19): siRNA sense strand
aaacaagacuguccuuaag

SEQ ID NO: 704762 - RNA, 19 nt, Homo sapiens
  misc_RNA (1)...(19): siRNA sense strand
acaagacuguccuuaagaa

SEQ ID NO: 704763 - RNA, 19 nt, Homo sapiens
  misc_RNA (1)...(19): siRNA sense strand
ggugaacccucugcucuau

SEQ ID NO: 704764 - RNA, 19 nt, Homo sapiens
  misc_RNA (1)...(19): siRNA sense strand
gcacaagcagagacagaug

SEQ ID NO: 704765 - RNA, 19 nt, Homo sapiens
  misc_RNA (1)...(19): siRNA sense strand
ccucuccacauuucuauuu

SEQ ID NO: 704766 - RNA, 19 nt, Homo sapiens
  misc_RNA (1)...(19): siRNA sense strand
ugaacccucugcucuaucu

SEQ ID NO: 704767 - RNA, 19 nt, Homo sapiens
  misc_RNA (1)...(19): siRNA sense strand
cgagcccucuccacauuuc

SEQ ID NO: 704768 - RNA, 19 nt, Homo sapiens
  misc_RNA (1)...(19): siRNA sense strand
cucgagcccucuccacauu

SEQ ID NO: 704769 - RNA, 19 nt, Homo sapiens
  misc_RNA (1)...(19): siRNA sense strand
acaagcagagacagaugua

SEQ ID NO: 704770 - RNA, 19 nt, Homo sapiens
  misc_RNA (1)...(19): siRNA sense strand
acuguuaccuggugaagag

SEQ ID NO: 704771 - RNA, 19 nt, Homo sapiens
  misc_RNA (1)...(19): siRNA sense strand
uuaagaagcgcugcaagga

SEQ ID NO: 704772 - RNA, 19 nt, Homo sapiens
  misc_RNA (1)...(19): siRNA sense strand
aaaacaagacuguccuuaa

SEQ ID NO: 704773 - RNA, 19 nt, Homo sapiens
  misc_RNA (1)...(19): siRNA sense strand
gagaauaccugcaucauaa

SEQ ID NO: 704774 - RNA, 19 nt, Homo sapiens
  misc_RNA (1)...(19): siRNA sense strand
ugagaugucugcagaauga

SEQ ID NO: 704775 - RNA, 19 nt, Homo sapiens
  misc_RNA (1)...(19): siRNA sense strand
ggagaauaccugcaucaua

SEQ ID NO: 704776 - RNA, 19 nt, Homo sapiens
  misc_RNA (1)...(19): siRNA sense strand
aaacuacuguuccuucaaa

SEQ ID NO: 704777 - RNA, 19 nt, Homo sapiens
  misc_RNA (1)...(19): siRNA sense strand
gaaaggcugugaagauguc

SEQ ID NO: 704778 - RNA, 19 nt, Homo sapiens
  misc_RNA (1)...(19): siRNA sense strand
gcaagaagaggaacaggaa

SEQ ID NO: 704779 - RNA, 19 nt, Homo sapiens
  misc_RNA (1)...(19): siRNA sense strand
gcuauucgaucguggagaa

SEQ ID NO: 704780 - RNA, 19 nt, Homo sapiens
  misc_RNA (1)...(19): siRNA sense strand
ggauuucccuaccaagauu

SEQ ID NO: 704781 - RNA, 19 nt, Homo sapiens
  misc_RNA (1)...(19): siRNA sense strand
uggaagagcuccuacaauc

SEQ ID NO: 704782 - RNA, 19 nt, Homo sapiens
  misc_RNA (1)...(19): siRNA sense strand
cugaaucucuaucuucuaa

SEQ ID NO: 704783 - RNA, 19 nt, Homo sapiens
  misc_RNA (1)...(19): siRNA sense strand
gaaggugucccgcaugaga

SEQ ID NO: 704784 - RNA, 19 nt, Homo sapiens
  misc_RNA (1)...(19): siRNA sense strand
ccaagagaguccuguguuc

SEQ ID NO: 704785 - RNA, 19 nt, Homo sapiens
  misc_RNA (1)...(19): siRNA sense strand
gaacauccaggagcucauu

SEQ ID NO: 704786 - RNA, 19 nt, Homo sapiens
  misc_RNA (1)...(19): siRNA sense strand
gaucagcccaggaaauaga

SEQ ID NO: 704787 - RNA, 19 nt, Homo sapiens
  misc_RNA (1)...(19): siRNA sense strand
agacugaguuccuuagcuu

SEQ ID NO: 704788 - RNA, 19 nt, Homo sapiens
  misc_RNA (1)...(19): siRNA sense strand
gcuccaaccucccuuaugc

SEQ ID NO: 704789 - RNA, 19 nt, Homo sapiens
  misc_RNA (1)...(19): siRNA sense strand
ccaaacuacuguuccuuca

SEQ ID NO: 704790 - RNA, 19 nt, Homo sapiens
  misc_RNA (1)...(19): siRNA sense strand
gcagaaacaggaagagcaa

SEQ ID NO: 704791 - RNA, 19 nt, Homo sapiens
  misc_RNA (1)...(19): siRNA sense strand
ucuauucucucaccuaaca

SEQ ID NO: 704792 - RNA, 19 nt, Homo sapiens
  misc_RNA (1)...(19): siRNA sense strand
gaaacaggaagagcaagaa

SEQ ID NO: 704793 - RNA, 19 nt, Homo sapiens
  misc_RNA (1)...(19): siRNA sense strand
ggcaggagccgacacaaga

SEQ ID NO: 704794 - RNA, 19 nt, Homo sapiens
  misc_RNA (1)...(19): siRNA sense strand
cuucuaacccuuccucuuu

SEQ ID NO: 704795 - RNA, 19 nt, Homo sapiens
  misc_RNA (1)...(19): siRNA sense strand
cggaaggugucccgcauga

SEQ ID NO: 704796 - RNA, 19 nt, Homo sapiens
  misc_RNA (1)...(19): siRNA sense strand
ucucuauucucucaccuaa

SEQ ID NO: 704797 - RNA, 19 nt, Homo sapiens
  misc_RNA (1)...(19): siRNA sense strand
ggaagagcaagaagaggaa

SEQ ID NO: 704798 - RNA, 19 nt, Homo sapiens
  misc_RNA (1)...(19): siRNA sense strand
gcuccaaccacgucuacua

SEQ ID NO: 704799 - RNA, 19 nt, Homo sapiens
  misc_RNA (1)...(19): siRNA sense strand
uuuacgggcuggauuugua

SEQ ID NO: 704800 - RNA, 19 nt, Homo sapiens
  misc_RNA (1)...(19): siRNA sense strand
gccagucucuauucucuca

SEQ ID NO: 704801 - RNA, 19 nt, Homo sapiens
  misc_RNA (1)...(19): siRNA sense strand
acucagagcccaaguuuca

SEQ ID NO: 704802 - RNA, 19 nt, Homo sapiens
  misc_RNA (1)...(19): siRNA sense strand
ccuccugguuugagucuuu

SEQ ID NO: 704803 - RNA, 19 nt, Homo sapiens
  misc_RNA (1)...(19): siRNA sense strand
caugagaugucugcagaau

SEQ ID NO: 704804 - RNA, 19 nt, Homo sapiens
  misc_RNA (1)...(19): siRNA sense strand
acacagacuauauccagua

SEQ ID NO: 704805 - RNA, 19 nt, Homo sapiens
  misc_RNA (1)...(19): siRNA sense strand
gccaaggccuggaaguaca

SEQ ID NO: 704806 - RNA, 19 nt, Homo sapiens
  misc_RNA (1)...(19): siRNA sense strand
ucgaucagcccaggaaaua

SEQ ID NO: 704807 - RNA, 19 nt, Homo sapiens
  misc_RNA (1)...(19): siRNA sense strand
ugacagaacgccagaccuu

SEQ ID NO: 704808 - RNA, 19 nt, Homo sapiens
  misc_RNA (1)...(19): siRNA sense strand
cgucuacuaugccaagaga

SEQ ID NO: 704809 - RNA, 19 nt, Homo sapiens
  misc_RNA (1)...(19): siRNA sense strand
acgaaaggcugugaagaug

SEQ ID NO: 704810 - RNA, 19 nt, Homo sapiens
  misc_RNA (1)...(19): siRNA sense strand
cagcuggaccaauaugaaa

SEQ ID NO: 704811 - RNA, 19 nt, Homo sapiens
  misc_RNA (1)...(19): siRNA sense strand
agacucagagcccaaguuu

SEQ ID NO: 704812 - RNA, 19 nt, Homo sapiens
  misc_RNA (1)...(19): siRNA sense strand
gcaggagccgacacaagaa

SEQ ID NO: 704813 - RNA, 19 nt, Homo sapiens
  misc_RNA (1)...(19): siRNA sense strand
gaagagcuccuacaauccu

SEQ ID NO: 704814 - RNA, 19 nt, Homo sapiens
  misc_RNA (1)...(19): siRNA sense strand
cgaauacgaacgcuucuuc

SEQ ID NO: 704815 - RNA, 19 nt, Homo sapiens
  misc_RNA (1)...(19): siRNA sense strand
ccuuaugccuccugguuug

SEQ ID NO: 704816 - RNA, 19 nt, Homo sapiens
  misc_RNA (1)...(19): siRNA sense strand
agcagugucugaugagaaa

SEQ ID NO: 704817 - RNA, 19 nt, Homo sapiens
  misc_RNA (1)...(19): siRNA sense strand
ggagggaaagcaggaagaa

SEQ ID NO: 704818 - RNA, 19 nt, Homo sapiens
  misc_RNA (1)...(19): siRNA sense strand
cagccagucucuauucucu

SEQ ID NO: 704819 - RNA, 19 nt, Homo sapiens
  misc_RNA (1)...(19): siRNA sense strand
cuacuccuaugauaaugga

SEQ ID NO: 704820 - RNA, 19 nt, Homo sapiens
  misc_RNA (1)...(19): siRNA sense strand
uauaugaugagaacuccua

SEQ ID NO: 704821 - RNA, 19 nt, Homo sapiens
  misc_RNA (1)...(19): siRNA sense strand
ccaaccacgucuacuaugc

SEQ ID NO: 704822 - RNA, 19 nt, Homo sapiens
  misc_RNA (1)...(19): siRNA sense strand
cagccaaggccuggaagua

SEQ ID NO: 704823 - RNA, 19 nt, Homo sapiens
  misc_RNA (1)...(19): siRNA sense strand
ccaggaaauagaugaaaug

SEQ ID NO: 704824 - RNA, 19 nt, Homo sapiens
  misc_RNA (1)...(19): siRNA sense strand
gacgggaggcugugucuca

SEQ ID NO: 704825 - RNA, 19 nt, Homo sapiens
  misc_RNA (1)...(19): siRNA sense strand
gcacaagcaggagcaagga

SEQ ID NO: 704826 - RNA, 19 nt, Homo sapiens
  misc_RNA (1)...(19): siRNA sense strand
gccaagagaguccuguguu

SEQ ID NO: 704827 - RNA, 19 nt, Homo sapiens
  misc_RNA (1)...(19): siRNA sense strand
caacguggaagagcuccua

SEQ ID NO: 704828 - RNA, 19 nt, Homo sapiens
  misc_RNA (1)...(19): siRNA sense strand
cacgaaaggcugugaagau

SEQ ID NO: 704829 - RNA, 19 nt, Homo sapiens
  misc_RNA (1)...(19): siRNA sense strand
gggaaagcaggaagaagga

SEQ ID NO: 704830 - RNA, 19 nt, Homo sapiens
  misc_RNA (1)...(19): siRNA sense strand
gaaucucuaucuucuaacc

SEQ ID NO: 704831 - RNA, 19 nt, Homo sapiens
  misc_RNA (1)...(19): siRNA sense strand
gcucagcaacaacguggaa

SEQ ID NO: 704832 - RNA, 19 nt, Homo sapiens
  misc_RNA (1)...(19): siRNA sense strand
gcuccagacugaguuccuu

SEQ ID NO: 704833 - RNA, 19 nt, Homo sapiens
  misc_RNA (1)...(19): siRNA sense strand
cccaggaaauagaugaaau

SEQ ID NO: 704834 - RNA, 19 nt, Homo sapiens
  misc_RNA (1)...(19): siRNA sense strand
ccagcuggaccaauaugaa

SEQ ID NO: 704835 - RNA, 19 nt, Homo sapiens
  misc_RNA (1)...(19): siRNA sense strand
agccagcagugucugauga

SEQ ID NO: 704836 - RNA, 19 nt, Homo sapiens
  misc_RNA (1)...(19): siRNA sense strand
ccacagccaaggccuggaa

SEQ ID NO: 704837 - RNA, 19 nt, Homo sapiens
  misc_RNA (1)...(19): siRNA sense strand
caggaaauagaugaaauga

SEQ ID NO: 704838 - RNA, 19 nt, Homo sapiens
  misc_RNA (1)...(19): siRNA sense strand
caccuaacacucucaagga

SEQ ID NO: 704839 - RNA, 19 nt, Homo sapiens
  misc_RNA (1)...(19): siRNA sense strand
ugcgacaccucccacaaga

SEQ ID NO: 704840 - RNA, 19 nt, Homo sapiens
  misc_RNA (1)...(19): siRNA sense strand
caaacuacuguuccuucaa

SEQ ID NO: 704841 - RNA, 19 nt, Homo sapiens
  misc_RNA (1)...(19): siRNA sense strand
agaaacaggaagagcaaga

SEQ ID NO: 704842 - RNA, 19 nt, Homo sapiens
  misc_RNA (1)...(19): siRNA sense strand
gccaggaguucagcaccuu

SEQ ID NO: 704843 - RNA, 19 nt, Homo sapiens
  misc_RNA (1)...(19): siRNA sense strand
guacauggaggaggagauc

SEQ ID NO: 704844 - RNA, 19 nt, Homo sapiens
  misc_RNA (1)...(19): siRNA sense strand
aagaagaggaacaggaaga

SEQ ID NO: 704845 - RNA, 19 nt, Homo sapiens
  misc_RNA (1)...(19): siRNA sense strand
guccaucggcaaccaggua

SEQ ID NO: 704846 - RNA, 19 nt, Homo sapiens
  misc_RNA (1)...(19): siRNA sense strand
guucagcaccuugacucua

SEQ ID NO: 704847 - RNA, 19 nt, Homo sapiens
  misc_RNA (1)...(19): siRNA sense strand
cgaaaggcugugaagaugu

SEQ ID NO: 704848 - RNA, 19 nt, Homo sapiens
  misc_RNA (1)...(19): siRNA sense strand
gagucuuucugccaguuca

SEQ ID NO: 704849 - RNA, 19 nt, Homo sapiens
  misc_RNA (1)...(19): siRNA sense strand
gcugagcccuggcaaaagu

SEQ ID NO: 704850 - RNA, 19 nt, Homo sapiens
  misc_RNA (1)...(19): siRNA sense strand
gcagaaugagacuuacagu

SEQ ID NO: 704851 - RNA, 19 nt, Homo sapiens
  misc_RNA (1)...(19): siRNA sense strand
cagcagugucugaugagaa

SEQ ID NO: 704852 - RNA, 19 nt, Homo sapiens
  misc_RNA (1)...(19): siRNA sense strand
guucccagccagucucuau

SEQ ID NO: 704853 - RNA, 19 nt, Homo sapiens
  misc_RNA (1)...(19): siRNA sense strand
ccacgaaaggcugugaaga

SEQ ID NO: 704854 - RNA, 19 nt, Homo sapiens
  misc_RNA (1)...(19): siRNA sense strand
agcccaaguuucacucuga

SEQ ID NO: 704855 - RNA, 19 nt, Homo sapiens
  misc_RNA (1)...(19): siRNA sense strand
gguacgagaaguagagucu

SEQ ID NO: 704856 - RNA, 19 nt, Homo sapiens
  misc_RNA (1)...(19): siRNA sense strand
ccagcagugucugaugaga

SEQ ID NO: 704857 - RNA, 19 nt, Homo sapiens
  misc_RNA (1)...(19): siRNA sense strand
cccagaaucaggccgcuuu

SEQ ID NO: 704858 - RNA, 19 nt, Homo sapiens
  misc_RNA (1)...(19): siRNA sense strand
ggaagagcuccuacaaucc

SEQ ID NO: 704859 - RNA, 19 nt, Homo sapiens
  misc_RNA (1)...(19): siRNA sense strand
cgacaccucccacaagacu

SEQ ID NO: 704860 - RNA, 19 nt, Homo sapiens
  misc_RNA (1)...(19): siRNA sense strand
ugugacuucugcuccuuga

SEQ ID NO: 704861 - RNA, 19 nt, Homo sapiens
  misc_RNA (1)...(19): siRNA sense strand
agucuacuccuaugauaau

SEQ ID NO: 704862 - RNA, 19 nt, Homo sapiens
  misc_RNA (1)...(19): siRNA sense strand
gagaugagauagacuguga

SEQ ID NO: 704863 - RNA, 19 nt, Homo sapiens
  misc_RNA (1)...(19): siRNA sense strand
ccaaauggcucagaugaaa

SEQ ID NO: 704864 - RNA, 19 nt, Homo sapiens
  misc_RNA (1)...(19): siRNA sense strand
guaauaacauggaugaaug

SEQ ID NO: 704865 - RNA, 19 nt, Homo sapiens
  misc_RNA (1)...(19): siRNA sense strand
gaagggaugugacaagugu

SEQ ID NO: 704866 - RNA, 19 nt, Homo sapiens
  misc_RNA (1)...(19): siRNA sense strand
gaagcagaauuguuaagaa

SEQ ID NO: 704867 - RNA, 19 nt, Homo sapiens
  misc_RNA (1)...(19): siRNA sense strand
gaagagaucugugccaaag

SEQ ID NO: 704868 - RNA, 19 nt, Homo sapiens
  misc_RNA (1)...(19): siRNA sense strand
gcauugggauguacuugua

SEQ ID NO: 704869 - RNA, 19 nt, Homo sapiens
  misc_RNA (1)...(19): siRNA sense strand
gaagagaagaugaugauga

SEQ ID NO: 704870 - RNA, 19 nt, Homo sapiens
  misc_RNA (1)...(19): siRNA sense strand
guagagaaccugagagaaa

SEQ ID NO: 704871 - RNA, 19 nt, Homo sapiens
  misc_RNA (1)...(19): siRNA sense strand
gaagaucauuugaaacaca

SEQ ID NO: 704872 - RNA, 19 nt, Homo sapiens
  misc_RNA (1)...(19): siRNA sense strand
gaugaggcuuuguuacuuu

SEQ ID NO: 704873 - RNA, 19 nt, Homo sapiens
  misc_RNA (1)...(19): siRNA sense strand
ugauggaucuucagacuuu

SEQ ID NO: 704874 - RNA, 19 nt, Homo sapiens
  misc_RNA (1)...(19): siRNA sense strand
gaagaaaauugcccaguaa

SEQ ID NO: 704875 - RNA, 19 nt, Homo sapiens
  misc_RNA (1)...(19): siRNA sense strand
gaaccagaguccuuugaga

SEQ ID NO: 704876 - RNA, 19 nt, Homo sapiens
  misc_RNA (1)...(19): siRNA sense strand
gagaauguuugaaagaaga

SEQ ID NO: 704877 - RNA, 19 nt, Homo sapiens
  misc_RNA (1)...(19): siRNA sense strand
ccucaucuguggccuguua

SEQ ID NO: 704878 - RNA, 19 nt, Homo sapiens
  misc_RNA (1)...(19): siRNA sense strand
ggauguacuuguaagcuuu

SEQ ID NO: 704879 - RNA, 19 nt, Homo sapiens
  misc_RNA (1)...(19): siRNA sense strand
caucacugcugccgucaua

SEQ ID NO: 704880 - RNA, 19 nt, Homo sapiens
  misc_RNA (1)...(19): siRNA sense strand
gagaagcuccucccucgua

SEQ ID NO: 704881 - RNA, 19 nt, Homo sapiens
  misc_RNA (1)...(19): siRNA sense strand
ggcgaaaucauuacuauaa

SEQ ID NO: 704882 - RNA, 19 nt, Homo sapiens
  misc_RNA (1)...(19): siRNA sense strand
caagaccacaucuggauua

SEQ ID NO: 704883 - RNA, 19 nt, Homo sapiens
  misc_RNA (1)...(19): siRNA sense strand
gaaccugagagaaaucaua

SEQ ID NO: 704884 - RNA, 19 nt, Homo sapiens
  misc_RNA (1)...(19): siRNA sense strand
gcaacuaccagaaucauug

SEQ ID NO: 704885 - RNA, 19 nt, Homo sapiens
  misc_RNA (1)...(19): siRNA sense strand
gacaacaucucuagaaagg

SEQ ID NO: 704886 - RNA, 19 nt, Homo sapiens
  misc_RNA (1)...(19): siRNA sense strand
ugagacaacuugauaaugg

SEQ ID NO: 704887 - RNA, 19 nt, Homo sapiens
  misc_RNA (1)...(19): siRNA sense strand
gaaaccaauuguaccaugu

SEQ ID NO: 704888 - RNA, 19 nt, Homo sapiens
  misc_RNA (1)...(19): siRNA sense strand
gaaacacaguugucaagag

SEQ ID NO: 704889 - RNA, 19 nt, Homo sapiens
  misc_RNA (1)...(19): siRNA sense strand
ggaguaaggccaaguaauc

SEQ ID NO: 704890 - RNA, 19 nt, Homo sapiens
  misc_RNA (1)...(19): siRNA sense strand
gggcuuagacaaccauaua

SEQ ID NO: 704891 - RNA, 19 nt, Homo sapiens
  misc_RNA (1)...(19): siRNA sense strand
caagaugacuguggugaug

SEQ ID NO: 704892 - RNA, 19 nt, Homo sapiens
  misc_RNA (1)...(19): siRNA sense strand
gcaggcagaucaagcaaca

SEQ ID NO: 704893 - RNA, 19 nt, Homo sapiens
  misc_RNA (1)...(19): siRNA sense strand
gaccacaucuggauuaggu

SEQ ID NO: 704894 - RNA, 19 nt, Homo sapiens
  misc_RNA (1)...(19): siRNA sense strand
ucacugacuuuaaacuuga

SEQ ID NO: 704895 - RNA, 19 nt, Homo sapiens
  misc_RNA (1)...(19): siRNA sense strand
ggcaauggcuaaaauauuu

SEQ ID NO: 704896 - RNA, 19 nt, Homo sapiens
  misc_RNA (1)...(19): siRNA sense strand
gaucucagcuuggauuuac

SEQ ID NO: 704897 - RNA, 19 nt, Homo sapiens
  misc_RNA (1)...(19): siRNA sense strand
gaagggaugaaaccaauug

SEQ ID NO: 704898 - RNA, 19 nt, Homo sapiens
  misc_RNA (1)...(19): siRNA sense strand
ccaaguagauggguucugu

SEQ ID NO: 704899 - RNA, 19 nt, Homo sapiens
  misc_RNA (1)...(19): siRNA sense strand
gaaaguugggugugugauu

SEQ ID NO: 704900 - RNA, 19 nt, Homo sapiens
  misc_RNA (1)...(19): siRNA sense strand
ggagauaguuccgaugaag

SEQ ID NO: 704901 - RNA, 19 nt, Homo sapiens
  misc_RNA (1)...(19): siRNA sense strand
gcaaggggauuuaaugcua

SEQ ID NO: 704902 - RNA, 19 nt, Homo sapiens
  misc_RNA (1)...(19): siRNA sense strand
guacggaaauggugcucuu

SEQ ID NO: 704903 - RNA, 19 nt, Homo sapiens
  misc_RNA (1)...(19): siRNA sense strand
gaaaucauacucacagaag

SEQ ID NO: 704904 - RNA, 19 nt, Homo sapiens
  misc_RNA (1)...(19): siRNA sense strand
ggacagauaaggguacauu

SEQ ID NO: 704905 - RNA, 19 nt, Homo sapiens
  misc_RNA (1)...(19): siRNA sense strand
aacuguagcugguucauaa

SEQ ID NO: 704906 - RNA, 19 nt, Homo sapiens
  misc_RNA (1)...(19): siRNA sense strand
gaaaaugagagaagagaua

SEQ ID NO: 704907 - RNA, 19 nt, Homo sapiens
  misc_RNA (1)...(19): siRNA sense strand
gcagaauuguuaagaagag

SEQ ID NO: 704908 - RNA, 19 nt, Homo sapiens
  misc_RNA (1)...(19): siRNA sense strand
aaacacaguugucaagagu

SEQ ID NO: 704909 - RNA, 19 nt, Homo sapiens
  misc_RNA (1)...(19): siRNA sense strand
ggaugaauguggagauagu

SEQ ID NO: 704910 - RNA, 19 nt, Homo sapiens
  misc_RNA (1)...(19): siRNA sense strand
ggaaaucugaggaaccaaa

SEQ ID NO: 704911 - RNA, 19 nt, Homo sapiens
  misc_RNA (1)...(19): siRNA sense strand
ggaaccaaauugugcuugu

SEQ ID NO: 704912 - RNA, 19 nt, Homo sapiens
  misc_RNA (1)...(19): siRNA sense strand
gagaagaugaugaugaugu

SEQ ID NO: 704913 - RNA, 19 nt, Homo sapiens
  misc_RNA (1)...(19): siRNA sense strand
gagaaaucauacucacaga

SEQ ID NO: 704914 - RNA, 19 nt, Homo sapiens
  misc_RNA (1)...(19): siRNA sense strand
agagaucugugccaaagaa

SEQ ID NO: 704915 - RNA, 19 nt, Homo sapiens
  misc_RNA (1)...(19): siRNA sense strand
gaucaaggacaagggcuua

SEQ ID NO: 704916 - RNA, 19 nt, Homo sapiens
  misc_RNA (1)...(19): siRNA sense strand
gcagaucaagcaacauuug

SEQ ID NO: 704917 - RNA, 19 nt, Homo sapiens
  misc_RNA (1)...(19): siRNA sense strand
caauugcaccugguuaaua

SEQ ID NO: 704918 - RNA, 19 nt, Homo sapiens
  misc_RNA (1)...(19): siRNA sense strand
gaaccaaauugugcuugug

SEQ ID NO: 704919 - RNA, 19 nt, Homo sapiens
  misc_RNA (1)...(19): siRNA sense strand
gauaccagacacuugcuua

SEQ ID NO: 704920 - RNA, 19 nt, Homo sapiens
  misc_RNA (1)...(19): siRNA sense strand
guagauggguucuguuugc

SEQ ID NO: 704921 - RNA, 19 nt, Homo sapiens
  misc_RNA (1)...(19): siRNA sense strand
gguugacaauagaaacaua

SEQ ID NO: 704922 - RNA, 19 nt, Homo sapiens
  misc_RNA (1)...(19): siRNA sense strand
ggaagcagaauuguuaaga

SEQ ID NO: 704923 - RNA, 19 nt, Homo sapiens
  misc_RNA (1)...(19): siRNA sense strand
gcaaauacgagcaccaagu

SEQ ID NO: 704924 - RNA, 19 nt, Homo sapiens
  misc_RNA (1)...(19): siRNA sense strand
guuucagacuggcauauuu

SEQ ID NO: 704925 - RNA, 19 nt, Homo sapiens
  misc_RNA (1)...(19): siRNA sense strand
aagagaagaugaugaugau

SEQ ID NO: 704926 - RNA, 19 nt, Homo sapiens
  misc_RNA (1)...(19): siRNA sense strand
gggcuacgcuggguacguu

SEQ ID NO: 704927 - RNA, 19 nt, Homo sapiens
  misc_RNA (1)...(19): siRNA sense strand
caagugcacucagucguau

SEQ ID NO: 704928 - RNA, 19 nt, Homo sapiens
  misc_RNA (1)...(19): siRNA sense strand
gcacgucaccagcuuacaa

SEQ ID NO: 704929 - RNA, 19 nt, Homo sapiens
  misc_RNA (1)...(19): siRNA sense strand
gagguggucaugcagauaa

SEQ ID NO: 704930 - RNA, 19 nt, Homo sapiens
  misc_RNA (1)...(19): siRNA sense strand
gagaauccacacaagcuuu

SEQ ID NO: 704931 - RNA, 19 nt, Homo sapiens
  misc_RNA (1)...(19): siRNA sense strand
ccaauuauccagacuuuua

SEQ ID NO: 704932 - RNA, 19 nt, Homo sapiens
  misc_RNA (1)...(19): siRNA sense strand
ugaccuaggagaugagaua

SEQ ID NO: 704933 - RNA, 19 nt, Homo sapiens
  misc_RNA (1)...(19): siRNA sense strand
acaaccaguuccaguguuu

SEQ ID NO: 704934 - RNA, 19 nt, Homo sapiens
  misc_RNA (1)...(19): siRNA sense strand
ggacaagggcuuagacaac

SEQ ID NO: 704935 - RNA, 19 nt, Homo sapiens
  misc_RNA (1)...(19): siRNA sense strand
aguggaagcagaauuguua

SEQ ID NO: 704936 - RNA, 19 nt, Homo sapiens
  misc_RNA (1)...(19): siRNA sense strand
gaaauggugucuguuaucc

SEQ ID NO: 704937 - RNA, 19 nt, Homo sapiens
  misc_RNA (1)...(19): siRNA sense strand
gcaccaaguggcauaauca

SEQ ID NO: 704938 - RNA, 19 nt, Homo sapiens
  misc_RNA (1)...(19): siRNA sense strand
acgcuucacugacuuuaaa

SEQ ID NO: 704939 - RNA, 19 nt, Homo sapiens
  misc_RNA (1)...(19): siRNA sense strand
agaagaugaugaugauguu

SEQ ID NO: 704940 - RNA, 19 nt, Homo sapiens
  misc_RNA (1)...(19): siRNA sense strand
uagagaaccugagagaaau

SEQ ID NO: 704941 - RNA, 19 nt, Homo sapiens
  misc_RNA (1)...(19): siRNA sense strand
gaucaagcaacauuuggaa

SEQ ID NO: 704942 - RNA, 19 nt, Homo sapiens
  misc_RNA (1)...(19): siRNA sense strand
gggauguacuuguaagcuu

SEQ ID NO: 704943 - RNA, 19 nt, Homo sapiens
  misc_RNA (1)...(19): siRNA sense strand
caggcgaaaucauuacuau

SEQ ID NO: 704944 - RNA, 19 nt, Homo sapiens
  misc_RNA (1)...(19): siRNA sense strand
ugugagcgcugugguauug

SEQ ID NO: 704945 - RNA, 19 nt, Homo sapiens
  misc_RNA (1)...(19): siRNA sense strand
caaguucccuaagucagaa

SEQ ID NO: 704946 - RNA, 19 nt, Homo sapiens
  misc_RNA (1)...(19): siRNA sense strand
gauaauggaagggauguga

SEQ ID NO: 704947 - RNA, 19 nt, Homo sapiens
  misc_RNA (1)...(19): siRNA sense strand
gaugauacagacacagaaa

SEQ ID NO: 704948 - RNA, 19 nt, Homo sapiens
  misc_RNA (1)...(19): siRNA sense strand
guacuuguaagcuuuauuc

SEQ ID NO: 704949 - RNA, 19 nt, Homo sapiens
  misc_RNA (1)...(19): siRNA sense strand
gcgaaaucauuacuauaag

SEQ ID NO: 704950 - RNA, 19 nt, Homo sapiens
  misc_RNA (1)...(19): siRNA sense strand
ugaagaaaauugcccagua

SEQ ID NO: 704951 - RNA, 19 nt, Homo sapiens
  misc_RNA (1)...(19): siRNA sense strand
uguccacacugcccagaua

SEQ ID NO: 704952 - RNA, 19 nt, Homo sapiens
  misc_RNA (1)...(19): siRNA sense strand
caacaaauccuggaguaag

SEQ ID NO: 704953 - RNA, 19 nt, Homo sapiens
  misc_RNA (1)...(19): siRNA sense strand
gcaacaaauccuggaguaa

SEQ ID NO: 704954 - RNA, 19 nt, Homo sapiens
  misc_RNA (1)...(19): siRNA sense strand
caaauacgagcaccaagug

SEQ ID NO: 704955 - RNA, 19 nt, Homo sapiens
  misc_RNA (1)...(19): siRNA sense strand
cuuguaagcuuuauucucu

SEQ ID NO: 704956 - RNA, 19 nt, Homo sapiens
  misc_RNA (1)...(19): siRNA sense strand
ccaaguggcauaaucacaa

SEQ ID NO: 704957 - RNA, 19 nt, Homo sapiens
  misc_RNA (1)...(19): siRNA sense strand
ccagaccucuucuugaucu

SEQ ID NO: 704958 - RNA, 19 nt, Homo sapiens
  misc_RNA (1)...(19): siRNA sense strand
aaauggugcucuugcagaa

SEQ ID NO: 704959 - RNA, 19 nt, Homo sapiens
  misc_RNA (1)...(19): siRNA sense strand
ucaugcaccucuuacaguu

SEQ ID NO: 704960 - RNA, 19 nt, Homo sapiens
  misc_RNA (1)...(19): siRNA sense strand
ugagauagacugugaugug

SEQ ID NO: 704961 - RNA, 19 nt, Homo sapiens
  misc_RNA (1)...(19): siRNA sense strand
agacaaccauauaaugcaa

SEQ ID NO: 704962 - RNA, 19 nt, Homo sapiens
  misc_RNA (1)...(19): siRNA sense strand
ggacaacugccgauuauuu

SEQ ID NO: 704963 - RNA, 19 nt, Homo sapiens
  misc_RNA (1)...(19): siRNA sense strand
gaaaggggcugugaaauuu

SEQ ID NO: 704964 - RNA, 19 nt, Homo sapiens
  misc_RNA (1)...(19): siRNA sense strand
gauacaaugucuucaguga

SEQ ID NO: 704965 - RNA, 19 nt, Homo sapiens
  misc_RNA (1)...(19): siRNA sense strand
gcaaucaagcaacuuaaua

SEQ ID NO: 704966 - RNA, 19 nt, Homo sapiens
  misc_RNA (1)...(19): siRNA sense strand
gacaaggacaguuauguua

SEQ ID NO: 704967 - RNA, 19 nt, Homo sapiens
  misc_RNA (1)...(19): siRNA sense strand
ggacaguuauguuagguau

SEQ ID NO: 704968 - RNA, 19 nt, Homo sapiens
  misc_RNA (1)...(19): siRNA sense strand
ugagaaugaugauggauuu

SEQ ID NO: 704969 - RNA, 19 nt, Homo sapiens
  misc_RNA (1)...(19): siRNA sense strand
gacaaacucuaugacauuu

SEQ ID NO: 704970 - RNA, 19 nt, Homo sapiens
  misc_RNA (1)...(19): siRNA sense strand
uagaggauaugcauuugua

SEQ ID NO: 704971 - RNA, 19 nt, Homo sapiens
  misc_RNA (1)...(19): siRNA sense strand
caauagaggauaugcauuu

SEQ ID NO: 704972 - RNA, 19 nt, Homo sapiens
  misc_RNA (1)...(19): siRNA sense strand
gaagagauuugucagaaaa

SEQ ID NO: 704973 - RNA, 19 nt, Homo sapiens
  misc_RNA (1)...(19): siRNA sense strand
ggaugagcuuauaccauua

SEQ ID NO: 704974 - RNA, 19 nt, Homo sapiens
  misc_RNA (1)...(19): siRNA sense strand
gacaagacuuagcagcaua

SEQ ID NO: 704975 - RNA, 19 nt, Homo sapiens
  misc_RNA (1)...(19): siRNA sense strand
gcaauucccagucuucauu

SEQ ID NO: 704976 - RNA, 19 nt, Homo sapiens
  misc_RNA (1)...(19): siRNA sense strand
gaagaaaauucgagacuau

SEQ ID NO: 704977 - RNA, 19 nt, Homo sapiens
  misc_RNA (1)...(19): siRNA sense strand
uagaagagauuugucagaa

SEQ ID NO: 704978 - RNA, 19 nt, Homo sapiens
  misc_RNA (1)...(19): siRNA sense strand
gcacuucaguaaccgagaa

SEQ ID NO: 704979 - RNA, 19 nt, Homo sapiens
  misc_RNA (1)...(19): siRNA sense strand
aggaugagcuuauaccauu

SEQ ID NO: 704980 - RNA, 19 nt, Homo sapiens
  misc_RNA (1)...(19): siRNA sense strand
gagaagacaaacucuauga

SEQ ID NO: 704981 - RNA, 19 nt, Homo sapiens
  misc_RNA (1)...(19): siRNA sense strand
ggacaaggacaguuauguu

SEQ ID NO: 704982 - RNA, 19 nt, Homo sapiens
  misc_RNA (1)...(19): siRNA sense strand
cccaagcgcugcagauaaa

SEQ ID NO: 704983 - RNA, 19 nt, Homo sapiens
  misc_RNA (1)...(19): siRNA sense strand
ggacaagacuuagcagcau

SEQ ID NO: 704984 - RNA, 19 nt, Homo sapiens
  misc_RNA (1)...(19): siRNA sense strand
ggaaucaaaucacaaaucc

SEQ ID NO: 704985 - RNA, 19 nt, Homo sapiens
  misc_RNA (1)...(19): siRNA sense strand
gaagacaaacucuaugaca

SEQ ID NO: 704986 - RNA, 19 nt, Homo sapiens
  misc_RNA (1)...(19): siRNA sense strand
guggacaacugccgauuau

SEQ ID NO: 704987 - RNA, 19 nt, Homo sapiens
  misc_RNA (1)...(19): siRNA sense strand
ugaauccugucacauuaaa

SEQ ID NO: 704988 - RNA, 19 nt, Homo sapiens
  misc_RNA (1)...(19): siRNA sense strand
uaaacucgcuccccagaua

SEQ ID NO: 704989 - RNA, 19 nt, Homo sapiens
  misc_RNA (1)...(19): siRNA sense strand
gaaaucuuaugcugucuac

SEQ ID NO: 704990 - RNA, 19 nt, Homo sapiens
  misc_RNA (1)...(19): siRNA sense strand
gagcggcacucagaaggaa

SEQ ID NO: 704991 - RNA, 19 nt, Homo sapiens
  misc_RNA (1)...(19): siRNA sense strand
gcacucugcuauuggacaa

SEQ ID NO: 704992 - RNA, 19 nt, Homo sapiens
  misc_RNA (1)...(19): siRNA sense strand
cagcugcacucugcuauug

SEQ ID NO: 704993 - RNA, 19 nt, Homo sapiens
  misc_RNA (1)...(19): siRNA sense strand
ccagaccuaugcagcaauu

SEQ ID NO: 704994 - RNA, 19 nt, Homo sapiens
  misc_RNA (1)...(19): siRNA sense strand
gagcuuauaccauuaugug

SEQ ID NO: 704995 - RNA, 19 nt, Homo sapiens
  misc_RNA (1)...(19): siRNA sense strand
gauaugcugucccuaaugc

SEQ ID NO: 704996 - RNA, 19 nt, Homo sapiens
  misc_RNA (1)...(19): siRNA sense strand
gcuaugaaagcuuuaaaug

SEQ ID NO: 704997 - RNA, 19 nt, Homo sapiens
  misc_RNA (1)...(19): siRNA sense strand
caggaagaauucaguuaug

SEQ ID NO: 704998 - RNA, 19 nt, Homo sapiens
  misc_RNA (1)...(19): siRNA sense strand
gggcagagccagaaguaga

SEQ ID NO: 704999 - RNA, 19 nt, Homo sapiens
  misc_RNA (1)...(19): siRNA sense strand
agaagagauuugucagaaa

SEQ ID NO: 705000 - RNA, 19 nt, Homo sapiens
  misc_RNA (1)...(19): siRNA sense strand
gacaugguauugcaguaga

SEQ ID NO: 705001 - RNA, 19 nt, Homo sapiens
  misc_RNA (1)...(19): siRNA sense strand
agacaaacucuaugacauu

SEQ ID NO: 705002 - RNA, 19 nt, Homo sapiens
  misc_RNA (1)...(19): siRNA sense strand
gacaacugccgauuauuug

SEQ ID NO: 705003 - RNA, 19 nt, Homo sapiens
  misc_RNA (1)...(19): siRNA sense strand
cuacugcuuucccaggaua

SEQ ID NO: 705004 - RNA, 19 nt, Homo sapiens
  misc_RNA (1)...(19): siRNA sense strand
ggauaugcauuuguaacau

SEQ ID NO: 705005 - RNA, 19 nt, Homo sapiens
  misc_RNA (1)...(19): siRNA sense strand
caggauaugcugucccuaa

SEQ ID NO: 705006 - RNA, 19 nt, Homo sapiens
  misc_RNA (1)...(19): siRNA sense strand
ccagauauuagaagagauu

SEQ ID NO: 705007 - RNA, 19 nt, Homo sapiens
  misc_RNA (1)...(19): siRNA sense strand
agaaguagaaguugaugaa

SEQ ID NO: 705008 - RNA, 19 nt, Homo sapiens
  misc_RNA (1)...(19): siRNA sense strand
aaguagaaguugaugaaga

SEQ ID NO: 705009 - RNA, 19 nt, Homo sapiens
  misc_RNA (1)...(19): siRNA sense strand
caaggacaguuauguuagg

SEQ ID NO: 705010 - RNA, 19 nt, Homo sapiens
  misc_RNA (1)...(19): siRNA sense strand
uaugaggucuacccaacuu

SEQ ID NO: 705011 - RNA, 19 nt, Homo sapiens
  misc_RNA (1)...(19): siRNA sense strand
agacuuagcagcauauaca

SEQ ID NO: 705012 - RNA, 19 nt, Homo sapiens
  misc_RNA (1)...(19): siRNA sense strand
agacagcuauucuuguaca

SEQ ID NO: 705013 - RNA, 19 nt, Homo sapiens
  misc_RNA (1)...(19): siRNA sense strand
caacugccgauuauuuguu

SEQ ID NO: 705014 - RNA, 19 nt, Homo sapiens
  misc_RNA (1)...(19): siRNA sense strand
agacguaugcagccgaaua

SEQ ID NO: 705015 - RNA, 19 nt, Homo sapiens
  misc_RNA (1)...(19): siRNA sense strand
gaggauaccaggucaaagg

SEQ ID NO: 705016 - RNA, 19 nt, Homo sapiens
  misc_RNA (1)...(19): siRNA sense strand
ccaaaggacaucucagcaa

SEQ ID NO: 705017 - RNA, 19 nt, Homo sapiens
  misc_RNA (1)...(19): siRNA sense strand
uaaccgagaagaugcaguu

SEQ ID NO: 705018 - RNA, 19 nt, Homo sapiens
  misc_RNA (1)...(19): siRNA sense strand
gggacaugguauugcagua

SEQ ID NO: 705019 - RNA, 19 nt, Homo sapiens
  misc_RNA (1)...(19): siRNA sense strand
ccaggaagaauucaguuau

SEQ ID NO: 705020 - RNA, 19 nt, Homo sapiens
  misc_RNA (1)...(19): siRNA sense strand
aaagguuacugaagguguu

SEQ ID NO: 705021 - RNA, 19 nt, Homo sapiens
  misc_RNA (1)...(19): siRNA sense strand
uaaaguggaagccaagaau

SEQ ID NO: 705022 - RNA, 19 nt, Homo sapiens
  misc_RNA (1)...(19): siRNA sense strand
ugagugccuuuguggauga

SEQ ID NO: 705023 - RNA, 19 nt, Homo sapiens
  misc_RNA (1)...(19): siRNA sense strand
cugaagagaugauugaaaa

SEQ ID NO: 705024 - RNA, 19 nt, Homo sapiens
  misc_RNA (1)...(19): siRNA sense strand
agaaguugaugaagauaca

SEQ ID NO: 705025 - RNA, 19 nt, Homo sapiens
  misc_RNA (1)...(19): siRNA sense strand
aguagaaguugaugaagau

SEQ ID NO: 705026 - RNA, 19 nt, Homo sapiens
  misc_RNA (1)...(19): siRNA sense strand
gcuuauaccauuaugugaa

SEQ ID NO: 705027 - RNA, 19 nt, Homo sapiens
  misc_RNA (1)...(19): siRNA sense strand
gaccaaagacagcuauucu

SEQ ID NO: 705028 - RNA, 19 nt, Homo sapiens
  misc_RNA (1)...(19): siRNA sense strand
uggcaacaauagaggauau

SEQ ID NO: 705029 - RNA, 19 nt, Homo sapiens
  misc_RNA (1)...(19): siRNA sense strand
ugaugaagauacaaugucu

SEQ ID NO: 705030 - RNA, 19 nt, Homo sapiens
  misc_RNA (1)...(19): siRNA sense strand
gcugcacucugcuauugga

SEQ ID NO: 705031 - RNA, 19 nt, Homo sapiens
  misc_RNA (1)...(19): siRNA sense strand
ggauggagcucaccccaau

SEQ ID NO: 705032 - RNA, 19 nt, Homo sapiens
  misc_RNA (1)...(19): siRNA sense strand
ccgagaagaugcaguugag

SEQ ID NO: 705033 - RNA, 19 nt, Homo sapiens
  misc_RNA (1)...(19): siRNA sense strand
aaaugagaaugaugaugga

SEQ ID NO: 705034 - RNA, 19 nt, Homo sapiens
  misc_RNA (1)...(19): siRNA sense strand
aagacaaacucuaugacau

SEQ ID NO: 705035 - RNA, 19 nt, Homo sapiens
  misc_RNA (1)...(19): siRNA sense strand
acaguuauguuagguauac

SEQ ID NO: 705036 - RNA, 19 nt, Homo sapiens
  misc_RNA (1)...(19): siRNA sense strand
gaugagcuuauaccauuau

SEQ ID NO: 705037 - RNA, 19 nt, Homo sapiens
  misc_RNA (1)...(19): siRNA sense strand
caagaaugcaaucaagcaa

SEQ ID NO: 705038 - RNA, 19 nt, Homo sapiens
  misc_RNA (1)...(19): siRNA sense strand
ggaaaauggacaaagaaaa

SEQ ID NO: 705039 - RNA, 19 nt, Homo sapiens
  misc_RNA (1)...(19): siRNA sense strand
caguggacaaggacaguua

SEQ ID NO: 705040 - RNA, 19 nt, Homo sapiens
  misc_RNA (1)...(19): siRNA sense strand
ggacaugguauugcaguag

SEQ ID NO: 705041 - RNA, 19 nt, Homo sapiens
  misc_RNA (1)...(19): siRNA sense strand
gcuuugccuucguggagua

SEQ ID NO: 705042 - RNA, 19 nt, Homo sapiens
  misc_RNA (1)...(19): siRNA sense strand
aauagaggauaugcauuug

SEQ ID NO: 705043 - RNA, 19 nt, Homo sapiens
  misc_RNA (1)...(19): siRNA sense strand
caaaaccaguggacaagga

SEQ ID NO: 705044 - RNA, 19 nt, Homo sapiens
  misc_RNA (1)...(19): siRNA sense strand
uugaggcuaugaaagcuuu

SEQ ID NO: 705045 - RNA, 19 nt, Homo sapiens
  misc_RNA (1)...(19): siRNA sense strand
aagaugcaguugaggcuau

SEQ ID NO: 705046 - RNA, 19 nt, Homo sapiens
  misc_RNA (1)...(19): siRNA sense strand
gaaacugcuaccaggaaga

SEQ ID NO: 705047 - RNA, 19 nt, Homo sapiens
  misc_RNA (1)...(19): siRNA sense strand
cugaagguguugucgaugu

SEQ ID NO: 705048 - RNA, 19 nt, Homo sapiens
  misc_RNA (1)...(19): siRNA sense strand
ggucaaaggagacaaaaga

SEQ ID NO: 705049 - RNA, 19 nt, Homo sapiens
  misc_RNA (1)...(19): siRNA sense strand
gcagcaauucccagucuuc

SEQ ID NO: 705050 - RNA, 19 nt, Homo sapiens
  misc_RNA (1)...(19): siRNA sense strand
ugaaaggggcugugaaauu

SEQ ID NO: 705051 - RNA, 19 nt, Homo sapiens
  misc_RNA (1)...(19): siRNA sense strand
ccaagaaugcaaucaagca

SEQ ID NO: 705052 - RNA, 19 nt, Homo sapiens
  misc_RNA (1)...(19): siRNA sense strand
aaugcaaucaagcaacuua

SEQ ID NO: 705053 - RNA, 19 nt, Homo sapiens
  misc_RNA (1)...(19): siRNA sense strand
ggauaugcugucccuaaug

SEQ ID NO: 705054 - RNA, 19 nt, Homo sapiens
  misc_RNA (1)...(19): siRNA sense strand
ggaugaagcaaagacguau

SEQ ID NO: 705055 - RNA, 19 nt, Homo sapiens
  misc_RNA (1)...(19): siRNA sense strand
cagcuauucuuguacaaaa

SEQ ID NO: 705056 - RNA, 19 nt, Homo sapiens
  misc_RNA (1)...(19): siRNA sense strand
caaaggagacaaaagagaa

SEQ ID NO: 705057 - RNA, 19 nt, Homo sapiens
  misc_RNA (1)...(19): siRNA sense strand
guccagcgcacaggauaua

SEQ ID NO: 705058 - RNA, 19 nt, Homo sapiens
  misc_RNA (1)...(19): siRNA sense strand
agaaugcaaucaagcaacu

SEQ ID NO: 705059 - RNA, 19 nt, Homo sapiens
  misc_RNA (1)...(19): siRNA sense strand
ggcagagccagaaguagaa

SEQ ID NO: 705060 - RNA, 19 nt, Homo sapiens
  misc_RNA (1)...(19): siRNA sense strand
gcugagugccuuuguggau

SEQ ID NO: 705061 - RNA, 19 nt, Homo sapiens
  misc_RNA (1)...(19): siRNA sense strand
uguggacaacugccgauua

SEQ ID NO: 705062 - RNA, 19 nt, Homo sapiens
  misc_RNA (1)...(19): siRNA sense strand
ggacaacugccgauuauuu

SEQ ID NO: 705063 - RNA, 19 nt, Homo sapiens
  misc_RNA (1)...(19): siRNA sense strand
gaaaggggcugugaaauuu

SEQ ID NO: 705064 - RNA, 19 nt, Homo sapiens
  misc_RNA (1)...(19): siRNA sense strand
gauacaaugucuucaguga

SEQ ID NO: 705065 - RNA, 19 nt, Homo sapiens
  misc_RNA (1)...(19): siRNA sense strand
gcaaucaagcaacuuaaua

SEQ ID NO: 705066 - RNA, 19 nt, Homo sapiens
  misc_RNA (1)...(19): siRNA sense strand
gacaaggacaguuauguua

SEQ ID NO: 705067 - RNA, 19 nt, Homo sapiens
  misc_RNA (1)...(19): siRNA sense strand
ggacaguuauguuagguau

SEQ ID NO: 705068 - RNA, 19 nt, Homo sapiens
  misc_RNA (1)...(19): siRNA sense strand
ugagaaugaugauggauuu

SEQ ID NO: 705069 - RNA, 19 nt, Homo sapiens
  misc_RNA (1)...(19): siRNA sense strand
gacaaacucuaugacauuu

SEQ ID NO: 705070 - RNA, 19 nt, Homo sapiens
  misc_RNA (1)...(19): siRNA sense strand
uagaggauaugcauuugua

SEQ ID NO: 705071 - RNA, 19 nt, Homo sapiens
  misc_RNA (1)...(19): siRNA sense strand
caauagaggauaugcauuu

SEQ ID NO: 705072 - RNA, 19 nt, Homo sapiens
  misc_RNA (1)...(19): siRNA sense strand
gaagagauuugucagaaaa

SEQ ID NO: 705073 - RNA, 19 nt, Homo sapiens
  misc_RNA (1)...(19): siRNA sense strand
ggaugagcuuauaccauua

SEQ ID NO: 705074 - RNA, 19 nt, Homo sapiens
  misc_RNA (1)...(19): siRNA sense strand
gacaagacuuagcagcaua

SEQ ID NO: 705075 - RNA, 19 nt, Homo sapiens
  misc_RNA (1)...(19): siRNA sense strand
gcaauucccagucuucauu

SEQ ID NO: 705076 - RNA, 19 nt, Homo sapiens
  misc_RNA (1)...(19): siRNA sense strand
gaagaaaauucgagacuau

SEQ ID NO: 705077 - RNA, 19 nt, Homo sapiens
  misc_RNA (1)...(19): siRNA sense strand
uagaagagauuugucagaa

SEQ ID NO: 705078 - RNA, 19 nt, Homo sapiens
  misc_RNA (1)...(19): siRNA sense strand
gcacuucaguaaccgagaa

SEQ ID NO: 705079 - RNA, 19 nt, Homo sapiens
  misc_RNA (1)...(19): siRNA sense strand
aggaugagcuuauaccauu

SEQ ID NO: 705080 - RNA, 19 nt, Homo sapiens
  misc_RNA (1)...(19): siRNA sense strand
gagaagacaaacucuauga

SEQ ID NO: 705081 - RNA, 19 nt, Homo sapiens
  misc_RNA (1)...(19): siRNA sense strand
ggacaaggacaguuauguu

SEQ ID NO: 705082 - RNA, 19 nt, Homo sapiens
  misc_RNA (1)...(19): siRNA sense strand
cccaagcgcugcagauaaa

SEQ ID NO: 705083 - RNA, 19 nt, Homo sapiens
  misc_RNA (1)...(19): siRNA sense strand
ggacaagacuuagcagcau

SEQ ID NO: 705084 - RNA, 19 nt, Homo sapiens
  misc_RNA (1)...(19): siRNA sense strand
ggaaucaaaucacaaaucc

SEQ ID NO: 705085 - RNA, 19 nt, Homo sapiens
  misc_RNA (1)...(19): siRNA sense strand
gaagacaaacucuaugaca

SEQ ID NO: 705086 - RNA, 19 nt, Homo sapiens
  misc_RNA (1)...(19): siRNA sense strand
guggacaacugccgauuau

SEQ ID NO: 705087 - RNA, 19 nt, Homo sapiens
  misc_RNA (1)...(19): siRNA sense strand
ugaauccugucacauuaaa

SEQ ID NO: 705088 - RNA, 19 nt, Homo sapiens
  misc_RNA (1)...(19): siRNA sense strand
uaaacucgcuccccagaua

SEQ ID NO: 705089 - RNA, 19 nt, Homo sapiens
  misc_RNA (1)...(19): siRNA sense strand
gaaaucuuaugcugucuac

SEQ ID NO: 705090 - RNA, 19 nt, Homo sapiens
  misc_RNA (1)...(19): siRNA sense strand
gagcggcacucagaaggaa

SEQ ID NO: 705091 - RNA, 19 nt, Homo sapiens
  misc_RNA (1)...(19): siRNA sense strand
gcacucugcuauuggacaa

SEQ ID NO: 705092 - RNA, 19 nt, Homo sapiens
  misc_RNA (1)...(19): siRNA sense strand
cagcugcacucugcuauug

SEQ ID NO: 705093 - RNA, 19 nt, Homo sapiens
  misc_RNA (1)...(19): siRNA sense strand
ccagaccuaugcagcaauu

SEQ ID NO: 705094 - RNA, 19 nt, Homo sapiens
  misc_RNA (1)...(19): siRNA sense strand
gagcuuauaccauuaugug

SEQ ID NO: 705095 - RNA, 19 nt, Homo sapiens
  misc_RNA (1)...(19): siRNA sense strand
gauaugcugucccuaaugc

SEQ ID NO: 705096 - RNA, 19 nt, Homo sapiens
  misc_RNA (1)...(19): siRNA sense strand
gcuaugaaagcuuuaaaug

SEQ ID NO: 705097 - RNA, 19 nt, Homo sapiens
  misc_RNA (1)...(19): siRNA sense strand
caggaagaauucaguuaug

SEQ ID NO: 705098 - RNA, 19 nt, Homo sapiens
  misc_RNA (1)...(19): siRNA sense strand
gggcagagccagaaguaga

SEQ ID NO: 705099 - RNA, 19 nt, Homo sapiens
  misc_RNA (1)...(19): siRNA sense strand
agaagagauuugucagaaa

SEQ ID NO: 705100 - RNA, 19 nt, Homo sapiens
  misc_RNA (1)...(19): siRNA sense strand
gacaugguauugcaguaga

SEQ ID NO: 705101 - RNA, 19 nt, Homo sapiens
  misc_RNA (1)...(19): siRNA sense strand
agacaaacucuaugacauu

SEQ ID NO: 705102 - RNA, 19 nt, Homo sapiens
  misc_RNA (1)...(19): siRNA sense strand
gacaacugccgauuauuug

SEQ ID NO: 705103 - RNA, 19 nt, Homo sapiens
  misc_RNA (1)...(19): siRNA sense strand
cuacugcuuucccaggaua

SEQ ID NO: 705104 - RNA, 19 nt, Homo sapiens
  misc_RNA (1)...(19): siRNA sense strand
ggauaugcauuuguaacau

SEQ ID NO: 705105 - RNA, 19 nt, Homo sapiens
  misc_RNA (1)...(19): siRNA sense strand
caggauaugcugucccuaa

SEQ ID NO: 705106 - RNA, 19 nt, Homo sapiens
  misc_RNA (1)...(19): siRNA sense strand
ccagauauuagaagagauu

SEQ ID NO: 705107 - RNA, 19 nt, Homo sapiens
  misc_RNA (1)...(19): siRNA sense strand
agaaguagaaguugaugaa

SEQ ID NO: 705108 - RNA, 19 nt, Homo sapiens
  misc_RNA (1)...(19): siRNA sense strand
aaguagaaguugaugaaga

SEQ ID NO: 705109 - RNA, 19 nt, Homo sapiens
  misc_RNA (1)...(19): siRNA sense strand
caaggacaguuauguuagg

SEQ ID NO: 705110 - RNA, 19 nt, Homo sapiens
  misc_RNA (1)...(19): siRNA sense strand
uaugaggucuacccaacuu

SEQ ID NO: 705111 - RNA, 19 nt, Homo sapiens
  misc_RNA (1)...(19): siRNA sense strand
agacuuagcagcauauaca

SEQ ID NO: 705112 - RNA, 19 nt, Homo sapiens
  misc_RNA (1)...(19): siRNA sense strand
agacagcuauucuuguaca

SEQ ID NO: 705113 - RNA, 19 nt, Homo sapiens
  misc_RNA (1)...(19): siRNA sense strand
caacugccgauuauuuguu

SEQ ID NO: 705114 - RNA, 19 nt, Homo sapiens
  misc_RNA (1)...(19): siRNA sense strand
agacguaugcagccgaaua

SEQ ID NO: 705115 - RNA, 19 nt, Homo sapiens
  misc_RNA (1)...(19): siRNA sense strand
gaggauaccaggucaaagg

SEQ ID NO: 705116 - RNA, 19 nt, Homo sapiens
  misc_RNA (1)...(19): siRNA sense strand
ccaaaggacaucucagcaa

SEQ ID NO: 705117 - RNA, 19 nt, Homo sapiens
  misc_RNA (1)...(19): siRNA sense strand
uaaccgagaagaugcaguu

SEQ ID NO: 705118 - RNA, 19 nt, Homo sapiens
  misc_RNA (1)...(19): siRNA sense strand
gggacaugguauugcagua

SEQ ID NO: 705119 - RNA, 19 nt, Homo sapiens
  misc_RNA (1)...(19): siRNA sense strand
ccaggaagaauucaguuau

SEQ ID NO: 705120 - RNA, 19 nt, Homo sapiens
  misc_RNA (1)...(19): siRNA sense strand
aaagguuacugaagguguu

SEQ ID NO: 705121 - RNA, 19 nt, Homo sapiens
  misc_RNA (1)...(19): siRNA sense strand
uaaaguggaagccaagaau

SEQ ID NO: 705122 - RNA, 19 nt, Homo sapiens
  misc_RNA (1)...(19): siRNA sense strand
ugagugccuuuguggauga

SEQ ID NO: 705123 - RNA, 19 nt, Homo sapiens
  misc_RNA (1)...(19): siRNA sense strand
cugaagagaugauugaaaa

SEQ ID NO: 705124 - RNA, 19 nt, Homo sapiens
  misc_RNA (1)...(19): siRNA sense strand
agaaguugaugaagauaca

SEQ ID NO: 705125 - RNA, 19 nt, Homo sapiens
  misc_RNA (1)...(19): siRNA sense strand
aguagaaguugaugaagau

SEQ ID NO: 705126 - RNA, 19 nt, Homo sapiens
  misc_RNA (1)...(19): siRNA sense strand
gcuuauaccauuaugugaa

SEQ ID NO: 705127 - RNA, 19 nt, Homo sapiens
  misc_RNA (1)...(19): siRNA sense strand
gaccaaagacagcuauucu

SEQ ID NO: 705128 - RNA, 19 nt, Homo sapiens
  misc_RNA (1)...(19): siRNA sense strand
uggcaacaauagaggauau

SEQ ID NO: 705129 - RNA, 19 nt, Homo sapiens
  misc_RNA (1)...(19): siRNA sense strand
ugaugaagauacaaugucu

SEQ ID NO: 705130 - RNA, 19 nt, Homo sapiens
  misc_RNA (1)...(19): siRNA sense strand
gcugcacucugcuauugga

SEQ ID NO: 705131 - RNA, 19 nt, Homo sapiens
  misc_RNA (1)...(19): siRNA sense strand
ggauggagcucaccccaau

SEQ ID NO: 705132 - RNA, 19 nt, Homo sapiens
  misc_RNA (1)...(19): siRNA sense strand
ccgagaagaugcaguugag

SEQ ID NO: 705133 - RNA, 19 nt, Homo sapiens
  misc_RNA (1)...(19): siRNA sense strand
aaaugagaaugaugaugga

SEQ ID NO: 705134 - RNA, 19 nt, Homo sapiens
  misc_RNA (1)...(19): siRNA sense strand
aagacaaacucuaugacau

SEQ ID NO: 705135 - RNA, 19 nt, Homo sapiens
  misc_RNA (1)...(19): siRNA sense strand
acaguuauguuagguauac

SEQ ID NO: 705136 - RNA, 19 nt, Homo sapiens
  misc_RNA (1)...(19): siRNA sense strand
gaugagcuuauaccauuau

SEQ ID NO: 705137 - RNA, 19 nt, Homo sapiens
  misc_RNA (1)...(19): siRNA sense strand
caagaaugcaaucaagcaa

SEQ ID NO: 705138 - RNA, 19 nt, Homo sapiens
  misc_RNA (1)...(19): siRNA sense strand
ggaaaauggacaaagaaaa

SEQ ID NO: 705139 - RNA, 19 nt, Homo sapiens
  misc_RNA (1)...(19): siRNA sense strand
caguggacaaggacaguua

SEQ ID NO: 705140 - RNA, 19 nt, Homo sapiens
  misc_RNA (1)...(19): siRNA sense strand
ggacaugguauugcaguag

SEQ ID NO: 705141 - RNA, 19 nt, Homo sapiens
  misc_RNA (1)...(19): siRNA sense strand
gcuuugccuucguggagua

SEQ ID NO: 705142 - RNA, 19 nt, Homo sapiens
  misc_RNA (1)...(19): siRNA sense strand
aauagaggauaugcauuug

SEQ ID NO: 705143 - RNA, 19 nt, Homo sapiens
  misc_RNA (1)...(19): siRNA sense strand
caaaaccaguggacaagga

SEQ ID NO: 705144 - RNA, 19 nt, Homo sapiens
  misc_RNA (1)...(19): siRNA sense strand
uugaggcuaugaaagcuuu

SEQ ID NO: 705145 - RNA, 19 nt, Homo sapiens
  misc_RNA (1)...(19): siRNA sense strand
aagaugcaguugaggcuau

SEQ ID NO: 705146 - RNA, 19 nt, Homo sapiens
  misc_RNA (1)...(19): siRNA sense strand
gaaacugcuaccaggaaga

SEQ ID NO: 705147 - RNA, 19 nt, Homo sapiens
  misc_RNA (1)...(19): siRNA sense strand
cugaagguguugucgaugu

SEQ ID NO: 705148 - RNA, 19 nt, Homo sapiens
  misc_RNA (1)...(19): siRNA sense strand
ggucaaaggagacaaaaga

SEQ ID NO: 705149 - RNA, 19 nt, Homo sapiens
  misc_RNA (1)...(19): siRNA sense strand
gcagcaauucccagucuuc

SEQ ID NO: 705150 - RNA, 19 nt, Homo sapiens
  misc_RNA (1)...(19): siRNA sense strand
ugaaaggggcugugaaauu

SEQ ID NO: 705151 - RNA, 19 nt, Homo sapiens
  misc_RNA (1)...(19): siRNA sense strand
ccaagaaugcaaucaagca

SEQ ID NO: 705152 - RNA, 19 nt, Homo sapiens
  misc_RNA (1)...(19): siRNA sense strand
aaugcaaucaagcaacuua

SEQ ID NO: 705153 - RNA, 19 nt, Homo sapiens
  misc_RNA (1)...(19): siRNA sense strand
ggauaugcugucccuaaug

SEQ ID NO: 705154 - RNA, 19 nt, Homo sapiens
  misc_RNA (1)...(19): siRNA sense strand
ggaugaagcaaagacguau

SEQ ID NO: 705155 - RNA, 19 nt, Homo sapiens
  misc_RNA (1)...(19): siRNA sense strand
cagcuauucuuguacaaaa

SEQ ID NO: 705156 - RNA, 19 nt, Homo sapiens
  misc_RNA (1)...(19): siRNA sense strand
caaaggagacaaaagagaa

SEQ ID NO: 705157 - RNA, 19 nt, Homo sapiens
  misc_RNA (1)...(19): siRNA sense strand
guccagcgcacaggauaua

SEQ ID NO: 705158 - RNA, 19 nt, Homo sapiens
  misc_RNA (1)...(19): siRNA sense strand
agaaugcaaucaagcaacu

SEQ ID NO: 705159 - RNA, 19 nt, Homo sapiens
  misc_RNA (1)...(19): siRNA sense strand
ggcagagccagaaguagaa

SEQ ID NO: 705160 - RNA, 19 nt, Homo sapiens
  misc_RNA (1)...(19): siRNA sense strand
gcugagugccuuuguggau

SEQ ID NO: 705161 - RNA, 19 nt, Homo sapiens
  misc_RNA (1)...(19): siRNA sense strand
uguggacaacugccgauua

SEQ ID NO: 705162 - RNA, 19 nt, Homo sapiens
  misc_RNA (1)...(19): siRNA sense strand
ggacaacugccgauuauuu

SEQ ID NO: 705163 - RNA, 19 nt, Homo sapiens
  misc_RNA (1)...(19): siRNA sense strand
gaaaggggcugugaaauuu

SEQ ID NO: 705164 - RNA, 19 nt, Homo sapiens
  misc_RNA (1)...(19): siRNA sense strand
gauacaaugucuucaguga

SEQ ID NO: 705165 - RNA, 19 nt, Homo sapiens
  misc_RNA (1)...(19): siRNA sense strand
gcaaucaagcaacuuaaua

SEQ ID NO: 705166 - RNA, 19 nt, Homo sapiens
  misc_RNA (1)...(19): siRNA sense strand
gacaaggacaguuauguua

SEQ ID NO: 705167 - RNA, 19 nt, Homo sapiens
  misc_RNA (1)...(19): siRNA sense strand
ggacaguuauguuagguau

SEQ ID NO: 705168 - RNA, 19 nt, Homo sapiens
  misc_RNA (1)...(19): siRNA sense strand
ugagaaugaugauggauuu

SEQ ID NO: 705169 - RNA, 19 nt, Homo sapiens
  misc_RNA (1)...(19): siRNA sense strand
gacaaacucuaugacauuu

SEQ ID NO: 705170 - RNA, 19 nt, Homo sapiens
  misc_RNA (1)...(19): siRNA sense strand
uagaggauaugcauuugua

SEQ ID NO: 705171 - RNA, 19 nt, Homo sapiens
  misc_RNA (1)...(19): siRNA sense strand
caauagaggauaugcauuu

SEQ ID NO: 705172 - RNA, 19 nt, Homo sapiens
  misc_RNA (1)...(19): siRNA sense strand
gaagagauuugucagaaaa

SEQ ID NO: 705173 - RNA, 19 nt, Homo sapiens
  misc_RNA (1)...(19): siRNA sense strand
ggaugagcuuauaccauua

SEQ ID NO: 705174 - RNA, 19 nt, Homo sapiens
  misc_RNA (1)...(19): siRNA sense strand
gacaagacuuagcagcaua

SEQ ID NO: 705175 - RNA, 19 nt, Homo sapiens
  misc_RNA (1)...(19): siRNA sense strand
gcaauucccagucuucauu

SEQ ID NO: 705176 - RNA, 19 nt, Homo sapiens
  misc_RNA (1)...(19): siRNA sense strand
gaagaaaauucgagacuau

SEQ ID NO: 705177 - RNA, 19 nt, Homo sapiens
  misc_RNA (1)...(19): siRNA sense strand
uagaagagauuugucagaa

SEQ ID NO: 705178 - RNA, 19 nt, Homo sapiens
  misc_RNA (1)...(19): siRNA sense strand
gcacuucaguaaccgagaa

SEQ ID NO: 705179 - RNA, 19 nt, Homo sapiens
  misc_RNA (1)...(19): siRNA sense strand
aggaugagcuuauaccauu

SEQ ID NO: 705180 - RNA, 19 nt, Homo sapiens
  misc_RNA (1)...(19): siRNA sense strand
gagaagacaaacucuauga

SEQ ID NO: 705181 - RNA, 19 nt, Homo sapiens
  misc_RNA (1)...(19): siRNA sense strand
ggacaaggacaguuauguu

SEQ ID NO: 705182 - RNA, 19 nt, Homo sapiens
  misc_RNA (1)...(19): siRNA sense strand
cccaagcgcugcagauaaa

SEQ ID NO: 705183 - RNA, 19 nt, Homo sapiens
  misc_RNA (1)...(19): siRNA sense strand
ggacaagacuuagcagcau

SEQ ID NO: 705184 - RNA, 19 nt, Homo sapiens
  misc_RNA (1)...(19): siRNA sense strand
gaagacaaacucuaugaca

SEQ ID NO: 705185 - RNA, 19 nt, Homo sapiens
  misc_RNA (1)...(19): siRNA sense strand
guggacaacugccgauuau

SEQ ID NO: 705186 - RNA, 19 nt, Homo sapiens
  misc_RNA (1)...(19): siRNA sense strand
ugaauccugucacauuaaa

SEQ ID NO: 705187 - RNA, 19 nt, Homo sapiens
  misc_RNA (1)...(19): siRNA sense strand
uaaacucgcuccccagaua

SEQ ID NO: 705188 - RNA, 19 nt, Homo sapiens
  misc_RNA (1)...(19): siRNA sense strand
gaaaucuuaugcugucuac

SEQ ID NO: 705189 - RNA, 19 nt, Homo sapiens
  misc_RNA (1)...(19): siRNA sense strand
gcacucugcuauuggacaa

SEQ ID NO: 705190 - RNA, 19 nt, Homo sapiens
  misc_RNA (1)...(19): siRNA sense strand
cagcugcacucugcuauug

SEQ ID NO: 705191 - RNA, 19 nt, Homo sapiens
  misc_RNA (1)...(19): siRNA sense strand
ccagaccuaugcagcaauu

SEQ ID NO: 705192 - RNA, 19 nt, Homo sapiens
  misc_RNA (1)...(19): siRNA sense strand
gagcuuauaccauuaugug

SEQ ID NO: 705193 - RNA, 19 nt, Homo sapiens
  misc_RNA (1)...(19): siRNA sense strand
gauaugcugucccuaaugc

SEQ ID NO: 705194 - RNA, 19 nt, Homo sapiens
  misc_RNA (1)...(19): siRNA sense strand
gcuaugaaagcuuuaaaug

SEQ ID NO: 705195 - RNA, 19 nt, Homo sapiens
  misc_RNA (1)...(19): siRNA sense strand
caggaagaauucaguuaug

SEQ ID NO: 705196 - RNA, 19 nt, Homo sapiens
  misc_RNA (1)...(19): siRNA sense strand
gggcagagccagaaguaga

SEQ ID NO: 705197 - RNA, 19 nt, Homo sapiens
  misc_RNA (1)...(19): siRNA sense strand
agaagagauuugucagaaa

SEQ ID NO: 705198 - RNA, 19 nt, Homo sapiens
  misc_RNA (1)...(19): siRNA sense strand
gacaugguauugcaguaga

SEQ ID NO: 705199 - RNA, 19 nt, Homo sapiens
  misc_RNA (1)...(19): siRNA sense strand
agacaaacucuaugacauu

SEQ ID NO: 705200 - RNA, 19 nt, Homo sapiens
  misc_RNA (1)...(19): siRNA sense strand
gacaacugccgauuauuug

SEQ ID NO: 705201 - RNA, 19 nt, Homo sapiens
  misc_RNA (1)...(19): siRNA sense strand
cuacugcuuucccaggaua

SEQ ID NO: 705202 - RNA, 19 nt, Homo sapiens
  misc_RNA (1)...(19): siRNA sense strand
ggauaugcauuuguaacau

SEQ ID NO: 705203 - RNA, 19 nt, Homo sapiens
  misc_RNA (1)...(19): siRNA sense strand
caggauaugcugucccuaa

SEQ ID NO: 705204 - RNA, 19 nt, Homo sapiens
  misc_RNA (1)...(19): siRNA sense strand
ccagauauuagaagagauu

SEQ ID NO: 705205 - RNA, 19 nt, Homo sapiens
  misc_RNA (1)...(19): siRNA sense strand
agaaguagaaguugaugaa

SEQ ID NO: 705206 - RNA, 19 nt, Homo sapiens
  misc_RNA (1)...(19): siRNA sense strand
aaguagaaguugaugaaga

SEQ ID NO: 705207 - RNA, 19 nt, Homo sapiens
  misc_RNA (1)...(19): siRNA sense strand
caaggacaguuauguuagg

SEQ ID NO: 705208 - RNA, 19 nt, Homo sapiens
  misc_RNA (1)...(19): siRNA sense strand
uaugaggucuacccaacuu

SEQ ID NO: 705209 - RNA, 19 nt, Homo sapiens
  misc_RNA (1)...(19): siRNA sense strand
agacuuagcagcauauaca

SEQ ID NO: 705210 - RNA, 19 nt, Homo sapiens
  misc_RNA (1)...(19): siRNA sense strand
agacagcuauucuuguaca

SEQ ID NO: 705211 - RNA, 19 nt, Homo sapiens
  misc_RNA (1)...(19): siRNA sense strand
caacugccgauuauuuguu

SEQ ID NO: 705212 - RNA, 19 nt, Homo sapiens
  misc_RNA (1)...(19): siRNA sense strand
agacguaugcagccgaaua

SEQ ID NO: 705213 - RNA, 19 nt, Homo sapiens
  misc_RNA (1)...(19): siRNA sense strand
gaggauaccaggucaaagg

SEQ ID NO: 705214 - RNA, 19 nt, Homo sapiens
  misc_RNA (1)...(19): siRNA sense strand
ccaaaggacaucucagcaa

SEQ ID NO: 705215 - RNA, 19 nt, Homo sapiens
  misc_RNA (1)...(19): siRNA sense strand
uaaccgagaagaugcaguu

SEQ ID NO: 705216 - RNA, 19 nt, Homo sapiens
  misc_RNA (1)...(19): siRNA sense strand
gggacaugguauugcagua

SEQ ID NO: 705217 - RNA, 19 nt, Homo sapiens
  misc_RNA (1)...(19): siRNA sense strand
ccaggaagaauucaguuau

SEQ ID NO: 705218 - RNA, 19 nt, Homo sapiens
  misc_RNA (1)...(19): siRNA sense strand
aaagguuacugaagguguu

SEQ ID NO: 705219 - RNA, 19 nt, Homo sapiens
  misc_RNA (1)...(19): siRNA sense strand
uaaaguggaagccaagaau

SEQ ID NO: 705220 - RNA, 19 nt, Homo sapiens
  misc_RNA (1)...(19): siRNA sense strand
ugagugccuuuguggauga

SEQ ID NO: 705221 - RNA, 19 nt, Homo sapiens
  misc_RNA (1)...(19): siRNA sense strand
cugaagagaugauugaaaa

SEQ ID NO: 705222 - RNA, 19 nt, Homo sapiens
  misc_RNA (1)...(19): siRNA sense strand
agaaguugaugaagauaca

SEQ ID NO: 705223 - RNA, 19 nt, Homo sapiens
  misc_RNA (1)...(19): siRNA sense strand
aguagaaguugaugaagau

SEQ ID NO: 705224 - RNA, 19 nt, Homo sapiens
  misc_RNA (1)...(19): siRNA sense strand
gcuuauaccauuaugugaa

SEQ ID NO: 705225 - RNA, 19 nt, Homo sapiens
  misc_RNA (1)...(19): siRNA sense strand
gaccaaagacagcuauucu

SEQ ID NO: 705226 - RNA, 19 nt, Homo sapiens
  misc_RNA (1)...(19): siRNA sense strand
uggcaacaauagaggauau

SEQ ID NO: 705227 - RNA, 19 nt, Homo sapiens
  misc_RNA (1)...(19): siRNA sense strand
ugaugaagauacaaugucu

SEQ ID NO: 705228 - RNA, 19 nt, Homo sapiens
  misc_RNA (1)...(19): siRNA sense strand
gcugcacucugcuauugga

SEQ ID NO: 705229 - RNA, 19 nt, Homo sapiens
  misc_RNA (1)...(19): siRNA sense strand
ggauggagcucaccccaau

SEQ ID NO: 705230 - RNA, 19 nt, Homo sapiens
  misc_RNA (1)...(19): siRNA sense strand
ccgagaagaugcaguugag

SEQ ID NO: 705231 - RNA, 19 nt, Homo sapiens
  misc_RNA (1)...(19): siRNA sense strand
acaguuauguuagguauac

SEQ ID NO: 705232 - RNA, 19 nt, Homo sapiens
  misc_RNA (1)...(19): siRNA sense strand
aaaugagaaugaugaugga

SEQ ID NO: 705233 - RNA, 19 nt, Homo sapiens
  misc_RNA (1)...(19): siRNA sense strand
aagacaaacucuaugacau

SEQ ID NO: 705234 - RNA, 19 nt, Homo sapiens
  misc_RNA (1)...(19): siRNA sense strand
gaugagcuuauaccauuau

SEQ ID NO: 705235 - RNA, 19 nt, Homo sapiens
  misc_RNA (1)...(19): siRNA sense strand
gcuuugccuucguggagua

SEQ ID NO: 705236 - RNA, 19 nt, Homo sapiens
  misc_RNA (1)...(19): siRNA sense strand
ggaaaauggacaaagaaaa

SEQ ID NO: 705237 - RNA, 19 nt, Homo sapiens
  misc_RNA (1)...(19): siRNA sense strand
caagaaugcaaucaagcaa

SEQ ID NO: 705238 - RNA, 19 nt, Homo sapiens
  misc_RNA (1)...(19): siRNA sense strand
caguggacaaggacaguua

SEQ ID NO: 705239 - RNA, 19 nt, Homo sapiens
  misc_RNA (1)...(19): siRNA sense strand
ggacaugguauugcaguag

SEQ ID NO: 705240 - RNA, 19 nt, Homo sapiens
  misc_RNA (1)...(19): siRNA sense strand
gaaacugcuaccaggaaga

SEQ ID NO: 705241 - RNA, 19 nt, Homo sapiens
  misc_RNA (1)...(19): siRNA sense strand
aauagaggauaugcauuug

SEQ ID NO: 705242 - RNA, 19 nt, Homo sapiens
  misc_RNA (1)...(19): siRNA sense strand
caaaaccaguggacaagga

SEQ ID NO: 705243 - RNA, 19 nt, Homo sapiens
  misc_RNA (1)...(19): siRNA sense strand
uugaggcuaugaaagcuuu

SEQ ID NO: 705244 - RNA, 19 nt, Homo sapiens
  misc_RNA (1)...(19): siRNA sense strand
aagaugcaguugaggcuau

SEQ ID NO: 705245 - RNA, 19 nt, Homo sapiens
  misc_RNA (1)...(19): siRNA sense strand
cugaagguguugucgaugu

SEQ ID NO: 705246 - RNA, 19 nt, Homo sapiens
  misc_RNA (1)...(19): siRNA sense strand
ccaagaaugcaaucaagca

SEQ ID NO: 705247 - RNA, 19 nt, Homo sapiens
  misc_RNA (1)...(19): siRNA sense strand
ggucaaaggagacaaaaga

SEQ ID NO: 705248 - RNA, 19 nt, Homo sapiens
  misc_RNA (1)...(19): siRNA sense strand
gcagcaauucccagucuuc

SEQ ID NO: 705249 - RNA, 19 nt, Homo sapiens
  misc_RNA (1)...(19): siRNA sense strand
ugaaaggggcugugaaauu

SEQ ID NO: 705250 - RNA, 19 nt, Homo sapiens
  misc_RNA (1)...(19): siRNA sense strand
caaaggagacaaaagagaa

SEQ ID NO: 705251 - RNA, 19 nt, Homo sapiens
  misc_RNA (1)...(19): siRNA sense strand
ggauaugcugucccuaaug

SEQ ID NO: 705252 - RNA, 19 nt, Homo sapiens
  misc_RNA (1)...(19): siRNA sense strand
ggaugaagcaaagacguau

SEQ ID NO: 705253 - RNA, 19 nt, Homo sapiens
  misc_RNA (1)...(19): siRNA sense strand
cagcuauucuuguacaaaa

SEQ ID NO: 705254 - RNA, 19 nt, Homo sapiens
  misc_RNA (1)...(19): siRNA sense strand
aaugcaaucaagcaacuua

SEQ ID NO: 705255 - RNA, 19 nt, Homo sapiens
  misc_RNA (1)...(19): siRNA sense strand
ggcagagccagaaguagaa

SEQ ID NO: 705256 - RNA, 19 nt, Homo sapiens
  misc_RNA (1)...(19): siRNA sense strand
agaaugcaaucaagcaacu

SEQ ID NO: 705257 - RNA, 19 nt, Homo sapiens
  misc_RNA (1)...(19): siRNA sense strand
gcugagugccuuuguggau

SEQ ID NO: 705258 - RNA, 19 nt, Homo sapiens
  misc_RNA (1)...(19): siRNA sense strand
uguggacaacugccgauua

SEQ ID NO: 705259 - RNA, 19 nt, Homo sapiens
  misc_RNA (1)...(19): siRNA sense strand
cccaaugaauccugucaca

SEQ ID NO: 705260 - RNA, 19 nt, Homo sapiens
  misc_RNA (1)...(19): siRNA sense strand
gaggaugagcuuauaccau

SEQ ID NO: 705261 - RNA, 19 nt, Homo sapiens
  misc_RNA (1)...(19): siRNA sense strand
caauucccagucuucauuu

SEQ ID NO: 705262 - RNA, 19 nt, Homo sapiens
  misc_RNA (1)...(19): siRNA sense strand
aaagaaagcucccaauauu

SEQ ID NO: 705263 - RNA, 19 nt, Homo sapiens
  misc_RNA (1)...(19): siRNA sense strand
gaacacugcugccagaauu

SEQ ID NO: 705264 - RNA, 19 nt, Homo sapiens
  misc_RNA (1)...(19): siRNA sense strand
gaaagaaagcucccaauau

SEQ ID NO: 705265 - RNA, 19 nt, Homo sapiens
  misc_RNA (1)...(19): siRNA sense strand
ggcauuaccugacagcuua

SEQ ID NO: 705266 - RNA, 19 nt, Homo sapiens
  misc_RNA (1)...(19): siRNA sense strand
ccaauuauaucaggaguuu

SEQ ID NO: 705267 - RNA, 19 nt, Homo sapiens
  misc_RNA (1)...(19): siRNA sense strand
uaacucaggugauucgaaa

SEQ ID NO: 705268 - RNA, 19 nt, Homo sapiens
  misc_RNA (1)...(19): siRNA sense strand
gcaaacagacaguggcaua

SEQ ID NO: 705269 - RNA, 19 nt, Homo sapiens
  misc_RNA (1)...(19): siRNA sense strand
gaaacucaucacccaauua

SEQ ID NO: 705270 - RNA, 19 nt, Homo sapiens
  misc_RNA (1)...(19): siRNA sense strand
ggaaacucaucacccaauu

SEQ ID NO: 705271 - RNA, 19 nt, Homo sapiens
  misc_RNA (1)...(19): siRNA sense strand
ugaaagaaagcucccaaua

SEQ ID NO: 705272 - RNA, 19 nt, Homo sapiens
  misc_RNA (1)...(19): siRNA sense strand
cagcuuaacucaggugauu

SEQ ID NO: 705273 - RNA, 19 nt, Homo sapiens
  misc_RNA (1)...(19): siRNA sense strand
ggaggaacguggaccugaa

SEQ ID NO: 705274 - RNA, 19 nt, Homo sapiens
  misc_RNA (1)...(19): siRNA sense strand
gaugugauguauuccaaga

SEQ ID NO: 705275 - RNA, 19 nt, Homo sapiens
  misc_RNA (1)...(19): siRNA sense strand
uagaaucucugcacuguca

SEQ ID NO: 705276 - RNA, 19 nt, Homo sapiens
  misc_RNA (1)...(19): siRNA sense strand
gaaaguggcccagcaguuc

SEQ ID NO: 705277 - RNA, 19 nt, Homo sapiens
  misc_RNA (1)...(19): siRNA sense strand
ggaagacucucgcgaugag

SEQ ID NO: 705278 - RNA, 19 nt, Homo sapiens
  misc_RNA (1)...(19): siRNA sense strand
guaauaagagccaacuuug

SEQ ID NO: 705279 - RNA, 19 nt, Homo sapiens
  misc_RNA (1)...(19): siRNA sense strand
cggcaaacaucacuaaauc

SEQ ID NO: 705280 - RNA, 19 nt, Homo sapiens
  misc_RNA (1)...(19): siRNA sense strand
ccacugugcugcaggcauu

SEQ ID NO: 705281 - RNA, 19 nt, Homo sapiens
  misc_RNA (1)...(19): siRNA sense strand
gcagacaucacguuccaaa

SEQ ID NO: 705282 - RNA, 19 nt, Homo sapiens
  misc_RNA (1)...(19): siRNA sense strand
ucaccuaauucacuuaaug

SEQ ID NO: 705283 - RNA, 19 nt, Homo sapiens
  misc_RNA (1)...(19): siRNA sense strand
aaacaucaaguucgaauug

SEQ ID NO: 705284 - RNA, 19 nt, Homo sapiens
  misc_RNA (1)...(19): siRNA sense strand
agaaagcucccaauauuau

SEQ ID NO: 705285 - RNA, 19 nt, Homo sapiens
  misc_RNA (1)...(19): siRNA sense strand
ccaauauuaugaugugaug

SEQ ID NO: 705286 - RNA, 19 nt, Homo sapiens
  misc_RNA (1)...(19): siRNA sense strand
gcaaacaucacuaaaucau

SEQ ID NO: 705287 - RNA, 19 nt, Homo sapiens
  misc_RNA (1)...(19): siRNA sense strand
aagaaagcucccaauauua

SEQ ID NO: 705288 - RNA, 19 nt, Homo sapiens
  misc_RNA (1)...(19): siRNA sense strand
agaaagaagugagcaaaca

SEQ ID NO: 705289 - RNA, 19 nt, Homo sapiens
  misc_RNA (1)...(19): siRNA sense strand
ucaccaagcaaacccuuua

SEQ ID NO: 705290 - RNA, 19 nt, Homo sapiens
  misc_RNA (1)...(19): siRNA sense strand
ucaggugauucgaaaguuu

SEQ ID NO: 705291 - RNA, 19 nt, Homo sapiens
  misc_RNA (1)...(19): siRNA sense strand
gaacacacugucagagaau

SEQ ID NO: 705292 - RNA, 19 nt, Homo sapiens
  misc_RNA (1)...(19): siRNA sense strand
gaacauugucggcgugugu

SEQ ID NO: 705293 - RNA, 19 nt, Homo sapiens
  misc_RNA (1)...(19): siRNA sense strand
gagaauacuggacacugua

SEQ ID NO: 705294 - RNA, 19 nt, Homo sapiens
  misc_RNA (1)...(19): siRNA sense strand
guuagaaucucugcacugu

SEQ ID NO: 705295 - RNA, 19 nt, Homo sapiens
  misc_RNA (1)...(19): siRNA sense strand
caagaaagaagugagcaaa

SEQ ID NO: 705296 - RNA, 19 nt, Homo sapiens
  misc_RNA (1)...(19): siRNA sense strand
ggaguuugaccaucucuug

SEQ ID NO: 705297 - RNA, 19 nt, Homo sapiens
  misc_RNA (1)...(19): siRNA sense strand
ccagaaaacuugcgaaaca

SEQ ID NO: 705298 - RNA, 19 nt, Homo sapiens
  misc_RNA (1)...(19): siRNA sense strand
agaacacacugucagagaa

SEQ ID NO: 705299 - RNA, 19 nt, Homo sapiens
  misc_RNA (1)...(19): siRNA sense strand
ugugauguauuccaagaaa

SEQ ID NO: 705300 - RNA, 19 nt, Homo sapiens
  misc_RNA (1)...(19): siRNA sense strand
gcagaaguccgagaagaga

SEQ ID NO: 705301 - RNA, 19 nt, Homo sapiens
  misc_RNA (1)...(19): siRNA sense strand
gcauugcagugaaagaaag

SEQ ID NO: 705302 - RNA, 19 nt, Homo sapiens
  misc_RNA (1)...(19): siRNA sense strand
gaaggaagcacugcagaag

SEQ ID NO: 705303 - RNA, 19 nt, Homo sapiens
  misc_RNA (1)...(19): siRNA sense strand
gcccagcaguuccucuuga

SEQ ID NO: 705304 - RNA, 19 nt, Homo sapiens
  misc_RNA (1)...(19): siRNA sense strand
aaacucaucacccaauuau

SEQ ID NO: 705305 - RNA, 19 nt, Homo sapiens
  misc_RNA (1)...(19): siRNA sense strand
uaauaagagccaacuuuga

SEQ ID NO: 705306 - RNA, 19 nt, Homo sapiens
  misc_RNA (1)...(19): siRNA sense strand
agacaucacguuccaaaug

SEQ ID NO: 705307 - RNA, 19 nt, Homo sapiens
  misc_RNA (1)...(19): siRNA sense strand
gaaagcucccaauauuaug

SEQ ID NO: 705308 - RNA, 19 nt, Homo sapiens
  misc_RNA (1)...(19): siRNA sense strand
gaaacaucaaguucgaauu

SEQ ID NO: 705309 - RNA, 19 nt, Homo sapiens
  misc_RNA (1)...(19): siRNA sense strand
uguaauaagagccaacuuu

SEQ ID NO: 705310 - RNA, 19 nt, Homo sapiens
  misc_RNA (1)...(19): siRNA sense strand
guugaccgcuguguuguga

SEQ ID NO: 705311 - RNA, 19 nt, Homo sapiens
  misc_RNA (1)...(19): siRNA sense strand
uacauugaguggcuggaua

SEQ ID NO: 705312 - RNA, 19 nt, Homo sapiens
  misc_RNA (1)...(19): siRNA sense strand
acucaucacccaauuauau

SEQ ID NO: 705313 - RNA, 19 nt, Homo sapiens
  misc_RNA (1)...(19): siRNA sense strand
gaacagcaucaccaagcaa

SEQ ID NO: 705314 - RNA, 19 nt, Homo sapiens
  misc_RNA (1)...(19): siRNA sense strand
uaagagccaacuuugauga

SEQ ID NO: 705315 - RNA, 19 nt, Homo sapiens
  misc_RNA (1)...(19): siRNA sense strand
agagaauacuggacacugu

SEQ ID NO: 705316 - RNA, 19 nt, Homo sapiens
  misc_RNA (1)...(19): siRNA sense strand
acuggacacuguaauaaga

SEQ ID NO: 705317 - RNA, 19 nt, Homo sapiens
  misc_RNA (1)...(19): siRNA sense strand
cuacgugcucuaccuguua

SEQ ID NO: 705318 - RNA, 19 nt, Homo sapiens
  misc_RNA (1)...(19): siRNA sense strand
gacaucacguuccaaaugc

SEQ ID NO: 705319 - RNA, 19 nt, Homo sapiens
  misc_RNA (1)...(19): siRNA sense strand
gauccacagugcagacauc

SEQ ID NO: 705320 - RNA, 19 nt, Homo sapiens
  misc_RNA (1)...(19): siRNA sense strand
aauaagagccaacuuugau

SEQ ID NO: 705321 - RNA, 19 nt, Homo sapiens
  misc_RNA (1)...(19): siRNA sense strand
gcaagaaagaagugagcaa

SEQ ID NO: 705322 - RNA, 19 nt, Homo sapiens
  misc_RNA (1)...(19): siRNA sense strand
caaauucugagacggcaaa

SEQ ID NO: 705323 - RNA, 19 nt, Homo sapiens
  misc_RNA (1)...(19): siRNA sense strand
aaacagacaguggcauauu

SEQ ID NO: 705324 - RNA, 19 nt, Homo sapiens
  misc_RNA (1)...(19): siRNA sense strand
gaaagaagugagcaaacag

SEQ ID NO: 705325 - RNA, 19 nt, Homo sapiens
  misc_RNA (1)...(19): siRNA sense strand
ugccagaauuucccaaugu

SEQ ID NO: 705326 - RNA, 19 nt, Homo sapiens
  misc_RNA (1)...(19): siRNA sense strand
cagaacacacugucagaga

SEQ ID NO: 705327 - RNA, 19 nt, Homo sapiens
  misc_RNA (1)...(19): siRNA sense strand
ggaacacugcugccagaau

SEQ ID NO: 705328 - RNA, 19 nt, Homo sapiens
  misc_RNA (1)...(19): siRNA sense strand
gugcagacaucacguucca

SEQ ID NO: 705329 - RNA, 19 nt, Homo sapiens
  misc_RNA (1)...(19): siRNA sense strand
aauacuggacacuguaaua

SEQ ID NO: 705330 - RNA, 19 nt, Homo sapiens
  misc_RNA (1)...(19): siRNA sense strand
aggaagcacugcagaaguc

SEQ ID NO: 705331 - RNA, 19 nt, Homo sapiens
  misc_RNA (1)...(19): siRNA sense strand
gugacuccauccucuacaa

SEQ ID NO: 705332 - RNA, 19 nt, Homo sapiens
  misc_RNA (1)...(19): siRNA sense strand
gaagugccaccucccucuu

SEQ ID NO: 705333 - RNA, 19 nt, Homo sapiens
  misc_RNA (1)...(19): siRNA sense strand
aacagacaguggcauauuc

SEQ ID NO: 705334 - RNA, 19 nt, Homo sapiens
  misc_RNA (1)...(19): siRNA sense strand
agacggcaaacaucacuaa

SEQ ID NO: 705335 - RNA, 19 nt, Homo sapiens
  misc_RNA (1)...(19): siRNA sense strand
ugagugagacgggcaagaa

SEQ ID NO: 705336 - RNA, 19 nt, Homo sapiens
  misc_RNA (1)...(19): siRNA sense strand
gagugagacgggcaagaaa

SEQ ID NO: 705337 - RNA, 19 nt, Homo sapiens
  misc_RNA (1)...(19): siRNA sense strand
cagcaguuccucuugaugu

SEQ ID NO: 705338 - RNA, 19 nt, Homo sapiens
  misc_RNA (1)...(19): siRNA sense strand
ugaacagcaucaccaagca

SEQ ID NO: 705339 - RNA, 19 nt, Homo sapiens
  misc_RNA (1)...(19): siRNA sense strand
auacuggacacuguaauaa

SEQ ID NO: 705340 - RNA, 19 nt, Homo sapiens
  misc_RNA (1)...(19): siRNA sense strand
ugaugagguucaaaguuuc

SEQ ID NO: 705341 - RNA, 19 nt, Homo sapiens
  misc_RNA (1)...(19): siRNA sense strand
aaagaagugagcaaacaga

SEQ ID NO: 705342 - RNA, 19 nt, Homo sapiens
  misc_RNA (1)...(19): siRNA sense strand
gccagaauuucccaauguc

SEQ ID NO: 705343 - RNA, 19 nt, Homo sapiens
  misc_RNA (1)...(19): siRNA sense strand
aaagcucccaauauuauga

SEQ ID NO: 705344 - RNA, 19 nt, Homo sapiens
  misc_RNA (1)...(19): siRNA sense strand
cugcagaaguccgagaaga

SEQ ID NO: 705345 - RNA, 19 nt, Homo sapiens
  misc_RNA (1)...(19): siRNA sense strand
agaauuucccaaugucaaa

SEQ ID NO: 705346 - RNA, 19 nt, Homo sapiens
  misc_RNA (1)...(19): siRNA sense strand
caaacagacaguggcauau

SEQ ID NO: 705347 - RNA, 19 nt, Homo sapiens
  misc_RNA (1)...(19): siRNA sense strand
gugagacgggcaagaaaga

SEQ ID NO: 705348 - RNA, 19 nt, Homo sapiens
  misc_RNA (1)...(19): siRNA sense strand
gguccaaacucggaacacu

SEQ ID NO: 705349 - RNA, 19 nt, Homo sapiens
  misc_RNA (1)...(19): siRNA sense strand
cuauggcauugcagugaaa

SEQ ID NO: 705350 - RNA, 19 nt, Homo sapiens
  misc_RNA (1)...(19): siRNA sense strand
cagaauuucccaaugucaa

SEQ ID NO: 705351 - RNA, 19 nt, Homo sapiens
  misc_RNA (1)...(19): siRNA sense strand
agaauacuggacacuguaa

SEQ ID NO: 705352 - RNA, 19 nt, Homo sapiens
  misc_RNA (1)...(19): siRNA sense strand
agaaaguggcccagcaguu

SEQ ID NO: 705353 - RNA, 19 nt, Homo sapiens
  misc_RNA (1)...(19): siRNA sense strand
ugaccgcuguguugugaag

SEQ ID NO: 705354 - RNA, 19 nt, Homo sapiens
  misc_RNA (1)...(19): siRNA sense strand
ccaucgaguccuacauuga

SEQ ID NO: 705355 - RNA, 19 nt, Homo sapiens
  misc_RNA (1)...(19): siRNA sense strand
gagcaccggaaacucauca

SEQ ID NO: 705356 - RNA, 19 nt, Homo sapiens
  misc_RNA (1)...(19): siRNA sense strand
ggcauugcagugaaagaaa

SEQ ID NO: 705357 - RNA, 19 nt, Homo sapiens
  misc_RNA (1)...(19): siRNA sense strand
caacuggaugaguggcuaa

SEQ ID NO: 705358 - RNA, 19 nt, Homo sapiens
  misc_RNA (1)...(19): siRNA sense strand
caaacaucacuaaaucauc

SEQ ID NO: 705359 - RNA, 19 nt, Homo sapiens
  misc_RNA (1)...(19): siRNA sense strand
agaaggaagcacugcagaa

SEQ ID NO: 705360 - RNA, 19 nt, Homo sapiens
  misc_RNA (1)...(19): siRNA sense strand
cuuaauguuugaugacuac

SEQ ID NO: 705361 - RNA, 19 nt, Homo sapiens
  misc_RNA (1)...(19): siRNA sense strand
acacuggccucagcacuac

SEQ ID NO: 705362 - RNA, 19 nt, Homo sapiens
  misc_RNA (1)...(19): siRNA sense strand
aaagaaagcucccaauauu

SEQ ID NO: 705363 - RNA, 19 nt, Homo sapiens
  misc_RNA (1)...(19): siRNA sense strand
gaacacugcugccagaauu

SEQ ID NO: 705364 - RNA, 19 nt, Homo sapiens
  misc_RNA (1)...(19): siRNA sense strand
gaaagaaagcucccaauau

SEQ ID NO: 705365 - RNA, 19 nt, Homo sapiens
  misc_RNA (1)...(19): siRNA sense strand
ggcauuaccugacagcuua

SEQ ID NO: 705366 - RNA, 19 nt, Homo sapiens
  misc_RNA (1)...(19): siRNA sense strand
ccaauuauaucaggaguuu

SEQ ID NO: 705367 - RNA, 19 nt, Homo sapiens
  misc_RNA (1)...(19): siRNA sense strand
uaacucaggugauucgaaa

SEQ ID NO: 705368 - RNA, 19 nt, Homo sapiens
  misc_RNA (1)...(19): siRNA sense strand
gcaaacagacaguggcaua

SEQ ID NO: 705369 - RNA, 19 nt, Homo sapiens
  misc_RNA (1)...(19): siRNA sense strand
gaaacucaucacccaauua

SEQ ID NO: 705370 - RNA, 19 nt, Homo sapiens
  misc_RNA (1)...(19): siRNA sense strand
ggaaacucaucacccaauu

SEQ ID NO: 705371 - RNA, 19 nt, Homo sapiens
  misc_RNA (1)...(19): siRNA sense strand
ugaaagaaagcucccaaua

SEQ ID NO: 705372 - RNA, 19 nt, Homo sapiens
  misc_RNA (1)...(19): siRNA sense strand
cagcuuaacucaggugauu

SEQ ID NO: 705373 - RNA, 19 nt, Homo sapiens
  misc_RNA (1)...(19): siRNA sense strand
ggaggaacguggaccugaa

SEQ ID NO: 705374 - RNA, 19 nt, Homo sapiens
  misc_RNA (1)...(19): siRNA sense strand
gaugugauguauuccaaga

SEQ ID NO: 705375 - RNA, 19 nt, Homo sapiens
  misc_RNA (1)...(19): siRNA sense strand
uagaaucucugcacuguca

SEQ ID NO: 705376 - RNA, 19 nt, Homo sapiens
  misc_RNA (1)...(19): siRNA sense strand
gaaaguggcccagcaguuc

SEQ ID NO: 705377 - RNA, 19 nt, Homo sapiens
  misc_RNA (1)...(19): siRNA sense strand
ggaagacucucgcgaugag

SEQ ID NO: 705378 - RNA, 19 nt, Homo sapiens
  misc_RNA (1)...(19): siRNA sense strand
guaauaagagccaacuuug

SEQ ID NO: 705379 - RNA, 19 nt, Homo sapiens
  misc_RNA (1)...(19): siRNA sense strand
cggcaaacaucacuaaauc

SEQ ID NO: 705380 - RNA, 19 nt, Homo sapiens
  misc_RNA (1)...(19): siRNA sense strand
ccacugugcugcaggcauu

SEQ ID NO: 705381 - RNA, 19 nt, Homo sapiens
  misc_RNA (1)...(19): siRNA sense strand
gcagacaucacguuccaaa

SEQ ID NO: 705382 - RNA, 19 nt, Homo sapiens
  misc_RNA (1)...(19): siRNA sense strand
ucaccuaauucacuuaaug

SEQ ID NO: 705383 - RNA, 19 nt, Homo sapiens
  misc_RNA (1)...(19): siRNA sense strand
aaacaucaaguucgaauug

SEQ ID NO: 705384 - RNA, 19 nt, Homo sapiens
  misc_RNA (1)...(19): siRNA sense strand
agaaagcucccaauauuau

SEQ ID NO: 705385 - RNA, 19 nt, Homo sapiens
  misc_RNA (1)...(19): siRNA sense strand
ccaauauuaugaugugaug

SEQ ID NO: 705386 - RNA, 19 nt, Homo sapiens
  misc_RNA (1)...(19): siRNA sense strand
gcaaacaucacuaaaucau

SEQ ID NO: 705387 - RNA, 19 nt, Homo sapiens
  misc_RNA (1)...(19): siRNA sense strand
aagaaagcucccaauauua

SEQ ID NO: 705388 - RNA, 19 nt, Homo sapiens
  misc_RNA (1)...(19): siRNA sense strand
agaaagaagugagcaaaca

SEQ ID NO: 705389 - RNA, 19 nt, Homo sapiens
  misc_RNA (1)...(19): siRNA sense strand
ucaccaagcaaacccuuua

SEQ ID NO: 705390 - RNA, 19 nt, Homo sapiens
  misc_RNA (1)...(19): siRNA sense strand
ucaggugauucgaaaguuu

SEQ ID NO: 705391 - RNA, 19 nt, Homo sapiens
  misc_RNA (1)...(19): siRNA sense strand
gaacacacugucagagaau

SEQ ID NO: 705392 - RNA, 19 nt, Homo sapiens
  misc_RNA (1)...(19): siRNA sense strand
gaacauugucggcgugugu

SEQ ID NO: 705393 - RNA, 19 nt, Homo sapiens
  misc_RNA (1)...(19): siRNA sense strand
gagaauacuggacacugua

SEQ ID NO: 705394 - RNA, 19 nt, Homo sapiens
  misc_RNA (1)...(19): siRNA sense strand
guuagaaucucugcacugu

SEQ ID NO: 705395 - RNA, 19 nt, Homo sapiens
  misc_RNA (1)...(19): siRNA sense strand
caagaaagaagugagcaaa

SEQ ID NO: 705396 - RNA, 19 nt, Homo sapiens
  misc_RNA (1)...(19): siRNA sense strand
ggaguuugaccaucucuug

SEQ ID NO: 705397 - RNA, 19 nt, Homo sapiens
  misc_RNA (1)...(19): siRNA sense strand
ccagaaaacuugcgaaaca

SEQ ID NO: 705398 - RNA, 19 nt, Homo sapiens
  misc_RNA (1)...(19): siRNA sense strand
agaacacacugucagagaa

SEQ ID NO: 705399 - RNA, 19 nt, Homo sapiens
  misc_RNA (1)...(19): siRNA sense strand
ugugauguauuccaagaaa

SEQ ID NO: 705400 - RNA, 19 nt, Homo sapiens
  misc_RNA (1)...(19): siRNA sense strand
gcagaaguccgagaagaga

SEQ ID NO: 705401 - RNA, 19 nt, Homo sapiens
  misc_RNA (1)...(19): siRNA sense strand
gcauugcagugaaagaaag

SEQ ID NO: 705402 - RNA, 19 nt, Homo sapiens
  misc_RNA (1)...(19): siRNA sense strand
gaaggaagcacugcagaag

SEQ ID NO: 705403 - RNA, 19 nt, Homo sapiens
  misc_RNA (1)...(19): siRNA sense strand
gcccagcaguuccucuuga

SEQ ID NO: 705404 - RNA, 19 nt, Homo sapiens
  misc_RNA (1)...(19): siRNA sense strand
aaacucaucacccaauuau

SEQ ID NO: 705405 - RNA, 19 nt, Homo sapiens
  misc_RNA (1)...(19): siRNA sense strand
uaauaagagccaacuuuga

SEQ ID NO: 705406 - RNA, 19 nt, Homo sapiens
  misc_RNA (1)...(19): siRNA sense strand
agacaucacguuccaaaug

SEQ ID NO: 705407 - RNA, 19 nt, Homo sapiens
  misc_RNA (1)...(19): siRNA sense strand
gaaagcucccaauauuaug

SEQ ID NO: 705408 - RNA, 19 nt, Homo sapiens
  misc_RNA (1)...(19): siRNA sense strand
gaaacaucaaguucgaauu

SEQ ID NO: 705409 - RNA, 19 nt, Homo sapiens
  misc_RNA (1)...(19): siRNA sense strand
uguaauaagagccaacuuu

SEQ ID NO: 705410 - RNA, 19 nt, Homo sapiens
  misc_RNA (1)...(19): siRNA sense strand
guugaccgcuguguuguga

SEQ ID NO: 705411 - RNA, 19 nt, Homo sapiens
  misc_RNA (1)...(19): siRNA sense strand
uacauugaguggcuggaua

SEQ ID NO: 705412 - RNA, 19 nt, Homo sapiens
  misc_RNA (1)...(19): siRNA sense strand
acucaucacccaauuauau

SEQ ID NO: 705413 - RNA, 19 nt, Homo sapiens
  misc_RNA (1)...(19): siRNA sense strand
gaacagcaucaccaagcaa

SEQ ID NO: 705414 - RNA, 19 nt, Homo sapiens
  misc_RNA (1)...(19): siRNA sense strand
uaagagccaacuuugauga

SEQ ID NO: 705415 - RNA, 19 nt, Homo sapiens
  misc_RNA (1)...(19): siRNA sense strand
agagaauacuggacacugu

SEQ ID NO: 705416 - RNA, 19 nt, Homo sapiens
  misc_RNA (1)...(19): siRNA sense strand
acuggacacuguaauaaga

SEQ ID NO: 705417 - RNA, 19 nt, Homo sapiens
  misc_RNA (1)...(19): siRNA sense strand
cuacgugcucuaccuguua

SEQ ID NO: 705418 - RNA, 19 nt, Homo sapiens
  misc_RNA (1)...(19): siRNA sense strand
gacaucacguuccaaaugc

SEQ ID NO: 705419 - RNA, 19 nt, Homo sapiens
  misc_RNA (1)...(19): siRNA sense strand
gauccacagugcagacauc

SEQ ID NO: 705420 - RNA, 19 nt, Homo sapiens
  misc_RNA (1)...(19): siRNA sense strand
aauaagagccaacuuugau

SEQ ID NO: 705421 - RNA, 19 nt, Homo sapiens
  misc_RNA (1)...(19): siRNA sense strand
gcaagaaagaagugagcaa

SEQ ID NO: 705422 - RNA, 19 nt, Homo sapiens
  misc_RNA (1)...(19): siRNA sense strand
caaauucugagacggcaaa

SEQ ID NO: 705423 - RNA, 19 nt, Homo sapiens
  misc_RNA (1)...(19): siRNA sense strand
aaacagacaguggcauauu

SEQ ID NO: 705424 - RNA, 19 nt, Homo sapiens
  misc_RNA (1)...(19): siRNA sense strand
gaaagaagugagcaaacag

SEQ ID NO: 705425 - RNA, 19 nt, Homo sapiens
  misc_RNA (1)...(19): siRNA sense strand
ugccagaauuucccaaugu

SEQ ID NO: 705426 - RNA, 19 nt, Homo sapiens
  misc_RNA (1)...(19): siRNA sense strand
cagaacacacugucagaga

SEQ ID NO: 705427 - RNA, 19 nt, Homo sapiens
  misc_RNA (1)...(19): siRNA sense strand
ggaacacugcugccagaau

SEQ ID NO: 705428 - RNA, 19 nt, Homo sapiens
  misc_RNA (1)...(19): siRNA sense strand
gugcagacaucacguucca

SEQ ID NO: 705429 - RNA, 19 nt, Homo sapiens
  misc_RNA (1)...(19): siRNA sense strand
aauacuggacacuguaaua

SEQ ID NO: 705430 - RNA, 19 nt, Homo sapiens
  misc_RNA (1)...(19): siRNA sense strand
aggaagcacugcagaaguc

SEQ ID NO: 705431 - RNA, 19 nt, Homo sapiens
  misc_RNA (1)...(19): siRNA sense strand
gugacuccauccucuacaa

SEQ ID NO: 705432 - RNA, 19 nt, Homo sapiens
  misc_RNA (1)...(19): siRNA sense strand
gaagugccaccucccucuu

SEQ ID NO: 705433 - RNA, 19 nt, Homo sapiens
  misc_RNA (1)...(19): siRNA sense strand
aacagacaguggcauauuc

SEQ ID NO: 705434 - RNA, 19 nt, Homo sapiens
  misc_RNA (1)...(19): siRNA sense strand
agacggcaaacaucacuaa

SEQ ID NO: 705435 - RNA, 19 nt, Homo sapiens
  misc_RNA (1)...(19): siRNA sense strand
ugagugagacgggcaagaa

SEQ ID NO: 705436 - RNA, 19 nt, Homo sapiens
  misc_RNA (1)...(19): siRNA sense strand
gagugagacgggcaagaaa

SEQ ID NO: 705437 - RNA, 19 nt, Homo sapiens
  misc_RNA (1)...(19): siRNA sense strand
cagcaguuccucuugaugu

SEQ ID NO: 705438 - RNA, 19 nt, Homo sapiens
  misc_RNA (1)...(19): siRNA sense strand
ugaacagcaucaccaagca

SEQ ID NO: 705439 - RNA, 19 nt, Homo sapiens
  misc_RNA (1)...(19): siRNA sense strand
auacuggacacuguaauaa

SEQ ID NO: 705440 - RNA, 19 nt, Homo sapiens
  misc_RNA (1)...(19): siRNA sense strand
ugaugagguucaaaguuuc

SEQ ID NO: 705441 - RNA, 19 nt, Homo sapiens
  misc_RNA (1)...(19): siRNA sense strand
aaagaagugagcaaacaga

SEQ ID NO: 705442 - RNA, 19 nt, Homo sapiens
  misc_RNA (1)...(19): siRNA sense strand
gccagaauuucccaauguc

SEQ ID NO: 705443 - RNA, 19 nt, Homo sapiens
  misc_RNA (1)...(19): siRNA sense strand
aaagcucccaauauuauga

SEQ ID NO: 705444 - RNA, 19 nt, Homo sapiens
  misc_RNA (1)...(19): siRNA sense strand
cugcagaaguccgagaaga

SEQ ID NO: 705445 - RNA, 19 nt, Homo sapiens
  misc_RNA (1)...(19): siRNA sense strand
agaauuucccaaugucaaa

SEQ ID NO: 705446 - RNA, 19 nt, Homo sapiens
  misc_RNA (1)...(19): siRNA sense strand
caaacagacaguggcauau

SEQ ID NO: 705447 - RNA, 19 nt, Homo sapiens
  misc_RNA (1)...(19): siRNA sense strand
gugagacgggcaagaaaga

SEQ ID NO: 705448 - RNA, 19 nt, Homo sapiens
  misc_RNA (1)...(19): siRNA sense strand
gguccaaacucggaacacu

SEQ ID NO: 705449 - RNA, 19 nt, Homo sapiens
  misc_RNA (1)...(19): siRNA sense strand
cuauggcauugcagugaaa

SEQ ID NO: 705450 - RNA, 19 nt, Homo sapiens
  misc_RNA (1)...(19): siRNA sense strand
cagaauuucccaaugucaa

SEQ ID NO: 705451 - RNA, 19 nt, Homo sapiens
  misc_RNA (1)...(19): siRNA sense strand
agaauacuggacacuguaa

SEQ ID NO: 705452 - RNA, 19 nt, Homo sapiens
  misc_RNA (1)...(19): siRNA sense strand
agaaaguggcccagcaguu

SEQ ID NO: 705453 - RNA, 19 nt, Homo sapiens
  misc_RNA (1)...(19): siRNA sense strand
ugaccgcuguguugugaag

SEQ ID NO: 705454 - RNA, 19 nt, Homo sapiens
  misc_RNA (1)...(19): siRNA sense strand
ccaucgaguccuacauuga

SEQ ID NO: 705455 - RNA, 19 nt, Homo sapiens
  misc_RNA (1)...(19): siRNA sense strand
gagcaccggaaacucauca

SEQ ID NO: 705456 - RNA, 19 nt, Homo sapiens
  misc_RNA (1)...(19): siRNA sense strand
ggcauugcagugaaagaaa

SEQ ID NO: 705457 - RNA, 19 nt, Homo sapiens
  misc_RNA (1)...(19): siRNA sense strand
caacuggaugaguggcuaa

SEQ ID NO: 705458 - RNA, 19 nt, Homo sapiens
  misc_RNA (1)...(19): siRNA sense strand
caaacaucacuaaaucauc

SEQ ID NO: 705459 - RNA, 19 nt, Homo sapiens
  misc_RNA (1)...(19): siRNA sense strand
agaaggaagcacugcagaa

SEQ ID NO: 705460 - RNA, 19 nt, Homo sapiens
  misc_RNA (1)...(19): siRNA sense strand
cuuaauguuugaugacuac

SEQ ID NO: 705461 - RNA, 19 nt, Homo sapiens
  misc_RNA (1)...(19): siRNA sense strand
acacuggccucagcacuac

SEQ ID NO: 705462 - RNA, 19 nt, Homo sapiens
  misc_RNA (1)...(19): siRNA sense strand
ccaccaagaucgccaaaua

SEQ ID NO: 705463 - RNA, 19 nt, Homo sapiens
  misc_RNA (1)...(19): siRNA sense strand
guagagagguugaagauca

SEQ ID NO: 705464 - RNA, 19 nt, Homo sapiens
  misc_RNA (1)...(19): siRNA sense strand
gaucggagcuguccacaca

SEQ ID NO: 705465 - RNA, 19 nt, Homo sapiens
  misc_RNA (1)...(19): siRNA sense strand
gaagaucaaucaguucuau

SEQ ID NO: 705466 - RNA, 19 nt, Homo sapiens
  misc_RNA (1)...(19): siRNA sense strand
ugaggaagaucaucacuag

SEQ ID NO: 705467 - RNA, 19 nt, Homo sapiens
  misc_RNA (1)...(19): siRNA sense strand
gcagagauccugagugucu

SEQ ID NO: 705468 - RNA, 19 nt, Homo sapiens
  misc_RNA (1)...(19): siRNA sense strand
ccagccaggugacaucuuu

SEQ ID NO: 705469 - RNA, 19 nt, Homo sapiens
  misc_RNA (1)...(19): siRNA sense strand
gagagcccaucaacuguga

SEQ ID NO: 705470 - RNA, 19 nt, Homo sapiens
  misc_RNA (1)...(19): siRNA sense strand
ucacagggcggauggauga

SEQ ID NO: 705471 - RNA, 19 nt, Homo sapiens
  misc_RNA (1)...(19): siRNA sense strand
ucgcagagauccugagugu

SEQ ID NO: 705472 - RNA, 19 nt, Homo sapiens
  misc_RNA (1)...(19): siRNA sense strand
cgacaucgguuggauuaca

SEQ ID NO: 705473 - RNA, 19 nt, Homo sapiens
  misc_RNA (1)...(19): siRNA sense strand
gcgaugaggcccuucuuug

SEQ ID NO: 705474 - RNA, 19 nt, Homo sapiens
  misc_RNA (1)...(19): siRNA sense strand
cgagagcguugcuuugauc

SEQ ID NO: 705475 - RNA, 19 nt, Homo sapiens
  misc_RNA (1)...(19): siRNA sense strand
ggugaugccugggugaaga

SEQ ID NO: 705476 - RNA, 19 nt, Homo sapiens
  misc_RNA (1)...(19): siRNA sense strand
caucuuugcuggcuucagu

SEQ ID NO: 705477 - RNA, 19 nt, Homo sapiens
  misc_RNA (1)...(19): siRNA sense strand
aauaugcugugccugauga

SEQ ID NO: 705478 - RNA, 19 nt, Homo sapiens
  misc_RNA (1)...(19): siRNA sense strand
caaauaugcugugccugau

SEQ ID NO: 705479 - RNA, 19 nt, Homo sapiens
  misc_RNA (1)...(19): siRNA sense strand
ggugaaacgucuuccaaaa

SEQ ID NO: 705480 - RNA, 19 nt, Homo sapiens
  misc_RNA (1)...(19): siRNA sense strand
ccaaggaggacccuguuug

SEQ ID NO: 705481 - RNA, 19 nt, Homo sapiens
  misc_RNA (1)...(19): siRNA sense strand
ggaggccaguuaaaugucu

SEQ ID NO: 705482 - RNA, 19 nt, Homo sapiens
  misc_RNA (1)...(19): siRNA sense strand
ccaagggcaucguccauac

SEQ ID NO: 705483 - RNA, 19 nt, Homo sapiens
  misc_RNA (1)...(19): siRNA sense strand
gggagacaguagagagguu

SEQ ID NO: 705484 - RNA, 19 nt, Homo sapiens
  misc_RNA (1)...(19): siRNA sense strand
guaugggccucucugcaau

SEQ ID NO: 705485 - RNA, 19 nt, Homo sapiens
  misc_RNA (1)...(19): siRNA sense strand
ucaaugaugccaagugcaa

SEQ ID NO: 705486 - RNA, 19 nt, Homo sapiens
  misc_RNA (1)...(19): siRNA sense strand
gcagugaggacaugcucuu

SEQ ID NO: 705487 - RNA, 19 nt, Homo sapiens
  misc_RNA (1)...(19): siRNA sense strand
ugaagaaaauaguggauga

SEQ ID NO: 705488 - RNA, 19 nt, Homo sapiens
  misc_RNA (1)...(19): siRNA sense strand
cuucagcacuggcaagauc

SEQ ID NO: 705489 - RNA, 19 nt, Homo sapiens
  misc_RNA (1)...(19): siRNA sense strand
cagagagcaugggcaguga

SEQ ID NO: 705490 - RNA, 19 nt, Homo sapiens
  misc_RNA (1)...(19): siRNA sense strand
accagaaagugcugucauu

SEQ ID NO: 705491 - RNA, 19 nt, Homo sapiens
  misc_RNA (1)...(19): siRNA sense strand
caacggcuguccggcuguu

SEQ ID NO: 705492 - RNA, 19 nt, Homo sapiens
  misc_RNA (1)...(19): siRNA sense strand
gugaggacaugcucuucau

SEQ ID NO: 705493 - RNA, 19 nt, Homo sapiens
  misc_RNA (1)...(19): siRNA sense strand
ggaccguguugccaucuac

SEQ ID NO: 705494 - RNA, 19 nt, Homo sapiens
  misc_RNA (1)...(19): siRNA sense strand
uuaaaugucucugucaacu

SEQ ID NO: 705495 - RNA, 19 nt, Homo sapiens
  misc_RNA (1)...(19): siRNA sense strand
cgaccacccugcaguacca

SEQ ID NO: 705496 - RNA, 19 nt, Homo sapiens
  misc_RNA (1)...(19): siRNA sense strand
ccagaaagugcugucauug

SEQ ID NO: 705497 - RNA, 19 nt, Homo sapiens
  misc_RNA (1)...(19): siRNA sense strand
caagaucgccaaauaugcu

SEQ ID NO: 705498 - RNA, 19 nt, Homo sapiens
  misc_RNA (1)...(19): siRNA sense strand
ucauuguggugaaagauag

SEQ ID NO: 705499 - RNA, 19 nt, Homo sapiens
  misc_RNA (1)...(19): siRNA sense strand
ugcaggagcucaaguccau

SEQ ID NO: 705500 - RNA, 19 nt, Homo sapiens
  misc_RNA (1)...(19): siRNA sense strand
gggaccguguugccaucua

SEQ ID NO: 705501 - RNA, 19 nt, Homo sapiens
  misc_RNA (1)...(19): siRNA sense strand
ggaacggaagugaggauca

SEQ ID NO: 705502 - RNA, 19 nt, Homo sapiens
  misc_RNA (1)...(19): siRNA sense strand
augccugggugaagaagua

SEQ ID NO: 705503 - RNA, 19 nt, Homo sapiens
  misc_RNA (1)...(19): siRNA sense strand
ucacaggacagacaacaag

SEQ ID NO: 705504 - RNA, 19 nt, Homo sapiens
  misc_RNA (1)...(19): siRNA sense strand
acagcuacgugguguaugg

SEQ ID NO: 705505 - RNA, 19 nt, Homo sapiens
  misc_RNA (1)...(19): siRNA sense strand
aggaagaucaucacuagug

SEQ ID NO: 705506 - RNA, 19 nt, Homo sapiens
  misc_RNA (1)...(19): siRNA sense strand
cagggcggauggaugaugu

SEQ ID NO: 705507 - RNA, 19 nt, Homo sapiens
  misc_RNA (1)...(19): siRNA sense strand
cagagauccugagugucua

SEQ ID NO: 705508 - RNA, 19 nt, Homo sapiens
  misc_RNA (1)...(19): siRNA sense strand
caccaagaucgccaaauau

SEQ ID NO: 705509 - RNA, 19 nt, Homo sapiens
  misc_RNA (1)...(19): siRNA sense strand
caguagagagguugaagau

SEQ ID NO: 705510 - RNA, 19 nt, Homo sapiens
  misc_RNA (1)...(19): siRNA sense strand
gggagagcccaucaacugu

SEQ ID NO: 705511 - RNA, 19 nt, Homo sapiens
  misc_RNA (1)...(19): siRNA sense strand
gaucaccuacagggaacua

SEQ ID NO: 705512 - RNA, 19 nt, Homo sapiens
  misc_RNA (1)...(19): siRNA sense strand
guccggcuguugcugaaau

SEQ ID NO: 705513 - RNA, 19 nt, Homo sapiens
  misc_RNA (1)...(19): siRNA sense strand
cagaaagugcugucauugg

SEQ ID NO: 705514 - RNA, 19 nt, Homo sapiens
  misc_RNA (1)...(19): siRNA sense strand
cuacccaggcuauuacuuc

SEQ ID NO: 705515 - RNA, 19 nt, Homo sapiens
  misc_RNA (1)...(19): siRNA sense strand
uggcugggaggaucaauga

SEQ ID NO: 705516 - RNA, 19 nt, Homo sapiens
  misc_RNA (1)...(19): siRNA sense strand
uacccaggcuauuacuuca

SEQ ID NO: 705517 - RNA, 19 nt, Homo sapiens
  misc_RNA (1)...(19): siRNA sense strand
gacaucgguuggauuacag

SEQ ID NO: 705518 - RNA, 19 nt, Homo sapiens
  misc_RNA (1)...(19): siRNA sense strand
ccgagagcguugcuuugau

SEQ ID NO: 705519 - RNA, 19 nt, Homo sapiens
  misc_RNA (1)...(19): siRNA sense strand
agacaacaagguccacaug

SEQ ID NO: 705520 - RNA, 19 nt, Homo sapiens
  misc_RNA (1)...(19): siRNA sense strand
ccaagugcaaggugguuau

SEQ ID NO: 705521 - RNA, 19 nt, Homo sapiens
  misc_RNA (1)...(19): siRNA sense strand
agcaggaaauggccaagga

SEQ ID NO: 705522 - RNA, 19 nt, Homo sapiens
  misc_RNA (1)...(19): siRNA sense strand
gagacacuaccaccuugga

SEQ ID NO: 705523 - RNA, 19 nt, Homo sapiens
  misc_RNA (1)...(19): siRNA sense strand
cgaugaggcccuucuuugg

SEQ ID NO: 705524 - RNA, 19 nt, Homo sapiens
  misc_RNA (1)...(19): siRNA sense strand
ggcgaugaggcccuucuuu

SEQ ID NO: 705525 - RNA, 19 nt, Homo sapiens
  misc_RNA (1)...(19): siRNA sense strand
uguaugggccucucugcaa

SEQ ID NO: 705526 - RNA, 19 nt, Homo sapiens
  misc_RNA (1)...(19): siRNA sense strand
caaggaggacccuguuugc

SEQ ID NO: 705527 - RNA, 19 nt, Homo sapiens
  misc_RNA (1)...(19): siRNA sense strand
gccaagugcaaggugguua

SEQ ID NO: 705528 - RNA, 19 nt, Homo sapiens
  misc_RNA (1)...(19): siRNA sense strand
gccaaggaggacccuguuu

SEQ ID NO: 705529 - RNA, 19 nt, Homo sapiens
  misc_RNA (1)...(19): siRNA sense strand
aguuaaaugucucugucaa

SEQ ID NO: 705530 - RNA, 19 nt, Homo sapiens
  misc_RNA (1)...(19): siRNA sense strand
gaucacagggcggauggau

SEQ ID NO: 705531 - RNA, 19 nt, Homo sapiens
  misc_RNA (1)...(19): siRNA sense strand
ugaagaucaaucaguucua

SEQ ID NO: 705532 - RNA, 19 nt, Homo sapiens
  misc_RNA (1)...(19): siRNA sense strand
uguccacacagucaucuuu

SEQ ID NO: 705533 - RNA, 19 nt, Homo sapiens
  misc_RNA (1)...(19): siRNA sense strand
gagccuggaacggaaguga

SEQ ID NO: 705534 - RNA, 19 nt, Homo sapiens
  misc_RNA (1)...(19): siRNA sense strand
ggauuacaggacacagcua

SEQ ID NO: 705535 - RNA, 19 nt, Homo sapiens
  misc_RNA (1)...(19): siRNA sense strand
uggaugaggcugugaagca

SEQ ID NO: 705536 - RNA, 19 nt, Homo sapiens
  misc_RNA (1)...(19): siRNA sense strand
gaagaaaucccucagauaa

SEQ ID NO: 705537 - RNA, 19 nt, Homo sapiens
  misc_RNA (1)...(19): siRNA sense strand
ggacagauuugaauugauu

SEQ ID NO: 705538 - RNA, 19 nt, Homo sapiens
  misc_RNA (1)...(19): siRNA sense strand
gaaaugagguguguguuug

SEQ ID NO: 705539 - RNA, 19 nt, Homo sapiens
  misc_RNA (1)...(19): siRNA sense strand
caagaagaaucaacuauga

SEQ ID NO: 705540 - RNA, 19 nt, Homo sapiens
  misc_RNA (1)...(19): siRNA sense strand
gagguaagcuguugugaug

SEQ ID NO: 705541 - RNA, 19 nt, Homo sapiens
  misc_RNA (1)...(19): siRNA sense strand
caaggaagguguagcuaaa

SEQ ID NO: 705542 - RNA, 19 nt, Homo sapiens
  misc_RNA (1)...(19): siRNA sense strand
ggagauuuguugcacauuu

SEQ ID NO: 705543 - RNA, 19 nt, Homo sapiens
  misc_RNA (1)...(19): siRNA sense strand
gagaaguggucacaucuga

SEQ ID NO: 705544 - RNA, 19 nt, Homo sapiens
  misc_RNA (1)...(19): siRNA sense strand
gaacucagcucaggagaca

SEQ ID NO: 705545 - RNA, 19 nt, Homo sapiens
  misc_RNA (1)...(19): siRNA sense strand
gcagagaaguggucacauc

SEQ ID NO: 705546 - RNA, 19 nt, Homo sapiens
  misc_RNA (1)...(19): siRNA sense strand
agacaaagcucgagugagu

SEQ ID NO: 705547 - RNA, 19 nt, Homo sapiens
  misc_RNA (1)...(19): siRNA sense strand
gcauagaaccagucaauga

SEQ ID NO: 705548 - RNA, 19 nt, Homo sapiens
  misc_RNA (1)...(19): siRNA sense strand
ggaaaugagguguguguuu

SEQ ID NO: 705549 - RNA, 19 nt, Homo sapiens
  misc_RNA (1)...(19): siRNA sense strand
uaaccacccugaaguguga

SEQ ID NO: 705550 - RNA, 19 nt, Homo sapiens
  misc_RNA (1)...(19): siRNA sense strand
gaacaaugcauggcaacua

SEQ ID NO: 705551 - RNA, 19 nt, Homo sapiens
  misc_RNA (1)...(19): siRNA sense strand
gguuagagaugcaaucaga

SEQ ID NO: 705552 - RNA, 19 nt, Homo sapiens
  misc_RNA (1)...(19): siRNA sense strand
gaaaucuagugaugaacuu

SEQ ID NO: 705553 - RNA, 19 nt, Homo sapiens
  misc_RNA (1)...(19): siRNA sense strand
aaaggacaguugcacauuu

SEQ ID NO: 705554 - RNA, 19 nt, Homo sapiens
  misc_RNA (1)...(19): siRNA sense strand
caagaaaugguacucaauu

SEQ ID NO: 705555 - RNA, 19 nt, Homo sapiens
  misc_RNA (1)...(19): siRNA sense strand
gcaaggaagguguagcuaa

SEQ ID NO: 705556 - RNA, 19 nt, Homo sapiens
  misc_RNA (1)...(19): siRNA sense strand
guacuccuauugcuacuga

SEQ ID NO: 705557 - RNA, 19 nt, Homo sapiens
  misc_RNA (1)...(19): siRNA sense strand
ggaaagccuauuagaauug

SEQ ID NO: 705558 - RNA, 19 nt, Homo sapiens
  misc_RNA (1)...(19): siRNA sense strand
ggaaauguauugggaaguc

SEQ ID NO: 705559 - RNA, 19 nt, Homo sapiens
  misc_RNA (1)...(19): siRNA sense strand
gcacuggauucuggacuuu

SEQ ID NO: 705560 - RNA, 19 nt, Homo sapiens
  misc_RNA (1)...(19): siRNA sense strand
gcacaucucaucccuggaa

SEQ ID NO: 705561 - RNA, 19 nt, Homo sapiens
  misc_RNA (1)...(19): siRNA sense strand
gaaguuaaagguaucaugu

SEQ ID NO: 705562 - RNA, 19 nt, Homo sapiens
  misc_RNA (1)...(19): siRNA sense strand
gcacaccaaggaacagaua

SEQ ID NO: 705563 - RNA, 19 nt, Homo sapiens
  misc_RNA (1)...(19): siRNA sense strand
guggaaaucuagugaugaa

SEQ ID NO: 705564 - RNA, 19 nt, Homo sapiens
  misc_RNA (1)...(19): siRNA sense strand
agacauuggugaagacuga

SEQ ID NO: 705565 - RNA, 19 nt, Homo sapiens
  misc_RNA (1)...(19): siRNA sense strand
ugacagugcuggagaaucu

SEQ ID NO: 705566 - RNA, 19 nt, Homo sapiens
  misc_RNA (1)...(19): siRNA sense strand
gaccggagaugcacaccaa

SEQ ID NO: 705567 - RNA, 19 nt, Homo sapiens
  misc_RNA (1)...(19): siRNA sense strand
cgaagaaaucccucagaua

SEQ ID NO: 705568 - RNA, 19 nt, Homo sapiens
  misc_RNA (1)...(19): siRNA sense strand
gaagaaauggaacaaagug

SEQ ID NO: 705569 - RNA, 19 nt, Homo sapiens
  misc_RNA (1)...(19): siRNA sense strand
ggugaagacugaggaagaa

SEQ ID NO: 705570 - RNA, 19 nt, Homo sapiens
  misc_RNA (1)...(19): siRNA sense strand
gaucuuggguuagguggaa

SEQ ID NO: 705571 - RNA, 19 nt, Homo sapiens
  misc_RNA (1)...(19): siRNA sense strand
gguaucauguuucccagaa

SEQ ID NO: 705572 - RNA, 19 nt, Homo sapiens
  misc_RNA (1)...(19): siRNA sense strand
caggagacauuacccgaaa

SEQ ID NO: 705573 - RNA, 19 nt, Homo sapiens
  misc_RNA (1)...(19): siRNA sense strand
gaaaggacaguugcacauu

SEQ ID NO: 705574 - RNA, 19 nt, Homo sapiens
  misc_RNA (1)...(19): siRNA sense strand
gaagggacagauuugaauu

SEQ ID NO: 705575 - RNA, 19 nt, Homo sapiens
  misc_RNA (1)...(19): siRNA sense strand
gaagauggccuugugaaag

SEQ ID NO: 705576 - RNA, 19 nt, Homo sapiens
  misc_RNA (1)...(19): siRNA sense strand
gauagcuucuuuacaagug

SEQ ID NO: 705577 - RNA, 19 nt, Homo sapiens
  misc_RNA (1)...(19): siRNA sense strand
caggaaagcccaacagaga

SEQ ID NO: 705578 - RNA, 19 nt, Homo sapiens
  misc_RNA (1)...(19): siRNA sense strand
uggaaagccuauuagaauu

SEQ ID NO: 705579 - RNA, 19 nt, Homo sapiens
  misc_RNA (1)...(19): siRNA sense strand
gugaaugcuuugauaguga

SEQ ID NO: 705580 - RNA, 19 nt, Homo sapiens
  misc_RNA (1)...(19): siRNA sense strand
ggaagucacaguucaggaa

SEQ ID NO: 705581 - RNA, 19 nt, Homo sapiens
  misc_RNA (1)...(19): siRNA sense strand
ucaaugagguaagcuguug

SEQ ID NO: 705582 - RNA, 19 nt, Homo sapiens
  misc_RNA (1)...(19): siRNA sense strand
gagauuuguugcacauuuc

SEQ ID NO: 705583 - RNA, 19 nt, Homo sapiens
  misc_RNA (1)...(19): siRNA sense strand
gauaauggccaccuagauc

SEQ ID NO: 705584 - RNA, 19 nt, Homo sapiens
  misc_RNA (1)...(19): siRNA sense strand
uaacccaggugcuucucua

SEQ ID NO: 705585 - RNA, 19 nt, Homo sapiens
  misc_RNA (1)...(19): siRNA sense strand
agucaaccauccauaguaa

SEQ ID NO: 705586 - RNA, 19 nt, Homo sapiens
  misc_RNA (1)...(19): siRNA sense strand
gucaaugugugaaugcuuu

SEQ ID NO: 705587 - RNA, 19 nt, Homo sapiens
  misc_RNA (1)...(19): siRNA sense strand
gaaauacagggugaggaua

SEQ ID NO: 705588 - RNA, 19 nt, Homo sapiens
  misc_RNA (1)...(19): siRNA sense strand
gaaagccuauuagaauugg

SEQ ID NO: 705589 - RNA, 19 nt, Homo sapiens
  misc_RNA (1)...(19): siRNA sense strand
acacaggguuaucugguuu

SEQ ID NO: 705590 - RNA, 19 nt, Homo sapiens
  misc_RNA (1)...(19): siRNA sense strand
gacaggaaguggagacaca

SEQ ID NO: 705591 - RNA, 19 nt, Homo sapiens
  misc_RNA (1)...(19): siRNA sense strand
agaaaucccucagauaagu

SEQ ID NO: 705592 - RNA, 19 nt, Homo sapiens
  misc_RNA (1)...(19): siRNA sense strand
agaaucaacuaugaaggua

SEQ ID NO: 705593 - RNA, 19 nt, Homo sapiens
  misc_RNA (1)...(19): siRNA sense strand
gaauggaaagccuauuaga

SEQ ID NO: 705594 - RNA, 19 nt, Homo sapiens
  misc_RNA (1)...(19): siRNA sense strand
uccgaugacugaagaaauu

SEQ ID NO: 705595 - RNA, 19 nt, Homo sapiens
  misc_RNA (1)...(19): siRNA sense strand
cgagaacuuugucaucaau

SEQ ID NO: 705596 - RNA, 19 nt, Homo sapiens
  misc_RNA (1)...(19): siRNA sense strand
uaagaagcaagaaauggua

SEQ ID NO: 705597 - RNA, 19 nt, Homo sapiens
  misc_RNA (1)...(19): siRNA sense strand
gugaugaacuucgcugaug

SEQ ID NO: 705598 - RNA, 19 nt, Homo sapiens
  misc_RNA (1)...(19): siRNA sense strand
gacaggacaugcacccaau

SEQ ID NO: 705599 - RNA, 19 nt, Homo sapiens
  misc_RNA (1)...(19): siRNA sense strand
gggcauagaaccagucaau

SEQ ID NO: 705600 - RNA, 19 nt, Homo sapiens
  misc_RNA (1)...(19): siRNA sense strand
uggguuagguggaaaucua

SEQ ID NO: 705601 - RNA, 19 nt, Homo sapiens
  misc_RNA (1)...(19): siRNA sense strand
gaagucacaguucaggaaa

SEQ ID NO: 705602 - RNA, 19 nt, Homo sapiens
  misc_RNA (1)...(19): siRNA sense strand
aaaugaagauggccuugug

SEQ ID NO: 705603 - RNA, 19 nt, Homo sapiens
  misc_RNA (1)...(19): siRNA sense strand
gaagugagugggccuguuc

SEQ ID NO: 705604 - RNA, 19 nt, Homo sapiens
  misc_RNA (1)...(19): siRNA sense strand
caacuaugaagguagauga

SEQ ID NO: 705605 - RNA, 19 nt, Homo sapiens
  misc_RNA (1)...(19): siRNA sense strand
gcaagaaaugguacucaau

SEQ ID NO: 705606 - RNA, 19 nt, Homo sapiens
  misc_RNA (1)...(19): siRNA sense strand
ccaaggaacagauaaugga

SEQ ID NO: 705607 - RNA, 19 nt, Homo sapiens
  misc_RNA (1)...(19): siRNA sense strand
ggauaagaagcaagaaaug

SEQ ID NO: 705608 - RNA, 19 nt, Homo sapiens
  misc_RNA (1)...(19): siRNA sense strand
gaggauaagaagcaagaaa

SEQ ID NO: 705609 - RNA, 19 nt, Homo sapiens
  misc_RNA (1)...(19): siRNA sense strand
gauaagucaaccauccaua

SEQ ID NO: 705610 - RNA, 19 nt, Homo sapiens
  misc_RNA (1)...(19): siRNA sense strand
ggagaagccucaggaaagc

SEQ ID NO: 705611 - RNA, 19 nt, Homo sapiens
  misc_RNA (1)...(19): siRNA sense strand
gaacaauucgugagaacag

SEQ ID NO: 705612 - RNA, 19 nt, Homo sapiens
  misc_RNA (1)...(19): siRNA sense strand
gaaguggucacaucugagu

SEQ ID NO: 705613 - RNA, 19 nt, Homo sapiens
  misc_RNA (1)...(19): siRNA sense strand
aaucaacuaugaagguaga

SEQ ID NO: 705614 - RNA, 19 nt, Homo sapiens
  misc_RNA (1)...(19): siRNA sense strand
aagauggccuugugaaagu

SEQ ID NO: 705615 - RNA, 19 nt, Homo sapiens
  misc_RNA (1)...(19): siRNA sense strand
aaauacagggugaggauaa

SEQ ID NO: 705616 - RNA, 19 nt, Homo sapiens
  misc_RNA (1)...(19): siRNA sense strand
gaagguagaugaggauccu

SEQ ID NO: 705617 - RNA, 19 nt, Homo sapiens
  misc_RNA (1)...(19): siRNA sense strand
aaggacaguugcacauuug

SEQ ID NO: 705618 - RNA, 19 nt, Homo sapiens
  misc_RNA (1)...(19): siRNA sense strand
uuggugagcuacaugauug

SEQ ID NO: 705619 - RNA, 19 nt, Homo sapiens
  misc_RNA (1)...(19): siRNA sense strand
gagggcaacaggaacaauu

SEQ ID NO: 705620 - RNA, 19 nt, Homo sapiens
  misc_RNA (1)...(19): siRNA sense strand
ucaagaagaaucaacuaug

SEQ ID NO: 705621 - RNA, 19 nt, Homo sapiens
  misc_RNA (1)...(19): siRNA sense strand
ugaacccuaucaagaagaa

SEQ ID NO: 705622 - RNA, 19 nt, Homo sapiens
  misc_RNA (1)...(19): siRNA sense strand
cugaauggaaagccuauua

SEQ ID NO: 705623 - RNA, 19 nt, Homo sapiens
  misc_RNA (1)...(19): siRNA sense strand
guguguguuuggugucuua

SEQ ID NO: 705624 - RNA, 19 nt, Homo sapiens
  misc_RNA (1)...(19): siRNA sense strand
cugaagaaauggaacaaag

SEQ ID NO: 705625 - RNA, 19 nt, Homo sapiens
  misc_RNA (1)...(19): siRNA sense strand
gggauggcauuaucagucu

SEQ ID NO: 705626 - RNA, 19 nt, Homo sapiens
  misc_RNA (1)...(19): siRNA sense strand
gagauaauuuugugucguu

SEQ ID NO: 705627 - RNA, 19 nt, Homo sapiens
  misc_RNA (1)...(19): siRNA sense strand
aggguuaucugguuugguu

SEQ ID NO: 705628 - RNA, 19 nt, Homo sapiens
  misc_RNA (1)...(19): siRNA sense strand
ggacaguugcacauuugaa

SEQ ID NO: 705629 - RNA, 19 nt, Homo sapiens
  misc_RNA (1)...(19): siRNA sense strand
gaagacugaggaagaaaca

SEQ ID NO: 705630 - RNA, 19 nt, Homo sapiens
  misc_RNA (1)...(19): siRNA sense strand
ggagaugcacaccaaggaa

SEQ ID NO: 705631 - RNA, 19 nt, Homo sapiens
  misc_RNA (1)...(19): siRNA sense strand
ucucaucccuggaauaugc

SEQ ID NO: 705632 - RNA, 19 nt, Homo sapiens
  misc_RNA (1)...(19): siRNA sense strand
gcacauuugaacacucuga

SEQ ID NO: 705633 - RNA, 19 nt, Homo sapiens
  misc_RNA (1)...(19): siRNA sense strand
gcccaacuccgagaacuuu

SEQ ID NO: 705634 - RNA, 19 nt, Homo sapiens
  misc_RNA (1)...(19): siRNA sense strand
gauguagccaugaacaaug

SEQ ID NO: 705635 - RNA, 19 nt, Homo sapiens
  misc_RNA (1)...(19): siRNA sense strand
gauaagaagcaagaaaugg

SEQ ID NO: 705636 - RNA, 19 nt, Homo sapiens
  misc_RNA (1)...(19): siRNA sense strand
guaaggagguacagcagau

SEQ ID NO: 705637 - RNA, 19 nt, Homo sapiens
  misc_RNA (1)...(19): siRNA sense strand
ggucuacgccucccaggaa

SEQ ID NO: 705638 - RNA, 19 nt, Homo sapiens
  misc_RNA (1)...(19): siRNA sense strand
ggaaaccuucggcuucuga

SEQ ID NO: 705639 - RNA, 19 nt, Homo sapiens
  misc_RNA (1)...(19): siRNA sense strand
ggacggcuuccucuauaug

SEQ ID NO: 705640 - RNA, 19 nt, Homo sapiens
  misc_RNA (1)...(19): siRNA sense strand
gaucaucgagcgcuacaag

SEQ ID NO: 705641 - RNA, 19 nt, Homo sapiens
  misc_RNA (1)...(19): siRNA sense strand
ugagcgaguuggucaagau

SEQ ID NO: 705642 - RNA, 19 nt, Homo sapiens
  misc_RNA (1)...(19): siRNA sense strand
gcgaguuggucaagaucau

SEQ ID NO: 705643 - RNA, 19 nt, Homo sapiens
  misc_RNA (1)...(19): siRNA sense strand
caggaaaccuucggcuucu

SEQ ID NO: 705644 - RNA, 19 nt, Homo sapiens
  misc_RNA (1)...(19): siRNA sense strand
ucuacgagcaggagaaaga

SEQ ID NO: 705645 - RNA, 19 nt, Homo sapiens
  misc_RNA (1)...(19): siRNA sense strand
cgaccgcuguaaggaggua

SEQ ID NO: 705646 - RNA, 19 nt, Homo sapiens
  misc_RNA (1)...(19): siRNA sense strand
gcccaucgcggacaucuac

SEQ ID NO: 705647 - RNA, 19 nt, Homo sapiens
  misc_RNA (1)...(19): siRNA sense strand
gcuacaagggugagaagca

SEQ ID NO: 705648 - RNA, 19 nt, Homo sapiens
  misc_RNA (1)...(19): siRNA sense strand
gaccagcaccccagcaaaa

SEQ ID NO: 705649 - RNA, 19 nt, Homo sapiens
  misc_RNA (1)...(19): siRNA sense strand
caucuacgagcaggagaaa

SEQ ID NO: 705650 - RNA, 19 nt, Homo sapiens
  misc_RNA (1)...(19): siRNA sense strand
guaaggagguacagcagau

SEQ ID NO: 705651 - RNA, 19 nt, Homo sapiens
  misc_RNA (1)...(19): siRNA sense strand
ggucuacgccucccaggaa

SEQ ID NO: 705652 - RNA, 19 nt, Homo sapiens
  misc_RNA (1)...(19): siRNA sense strand
ggaaaccuucggcuucuga

SEQ ID NO: 705653 - RNA, 19 nt, Homo sapiens
  misc_RNA (1)...(19): siRNA sense strand
ggacggcuuccucuauaug

SEQ ID NO: 705654 - RNA, 19 nt, Homo sapiens
  misc_RNA (1)...(19): siRNA sense strand
gaucaucgagcgcuacaag

SEQ ID NO: 705655 - RNA, 19 nt, Homo sapiens
  misc_RNA (1)...(19): siRNA sense strand
ugagcgaguuggucaagau

SEQ ID NO: 705656 - RNA, 19 nt, Homo sapiens
  misc_RNA (1)...(19): siRNA sense strand
gcgaguuggucaagaucau

SEQ ID NO: 705657 - RNA, 19 nt, Homo sapiens
  misc_RNA (1)...(19): siRNA sense strand
caggaaaccuucggcuucu

SEQ ID NO: 705658 - RNA, 19 nt, Homo sapiens
  misc_RNA (1)...(19): siRNA sense strand
ucuacgagcaggagaaaga

SEQ ID NO: 705659 - RNA, 19 nt, Homo sapiens
  misc_RNA (1)...(19): siRNA sense strand
cgaccgcuguaaggaggua

SEQ ID NO: 705660 - RNA, 19 nt, Homo sapiens
  misc_RNA (1)...(19): siRNA sense strand
gcccaucgcggacaucuac

SEQ ID NO: 705661 - RNA, 19 nt, Homo sapiens
  misc_RNA (1)...(19): siRNA sense strand
gcuacaagggugagaagca

SEQ ID NO: 705662 - RNA, 19 nt, Homo sapiens
  misc_RNA (1)...(19): siRNA sense strand
gaccagcaccccagcaaaa

SEQ ID NO: 705663 - RNA, 19 nt, Homo sapiens
  misc_RNA (1)...(19): siRNA sense strand
caucuacgagcaggagaaa

SEQ ID NO: 705664 - RNA, 19 nt, Homo sapiens
  misc_RNA (1)...(19): siRNA sense strand
gaaacuagcucuccaguau

SEQ ID NO: 705665 - RNA, 19 nt, Homo sapiens
  misc_RNA (1)...(19): siRNA sense strand
aaacagaggugaaaugaaa

SEQ ID NO: 705666 - RNA, 19 nt, Homo sapiens
  misc_RNA (1)...(19): siRNA sense strand
gacaagagcuguagggaaa

SEQ ID NO: 705667 - RNA, 19 nt, Homo sapiens
  misc_RNA (1)...(19): siRNA sense strand
gcaagucuguuccagcauu

SEQ ID NO: 705668 - RNA, 19 nt, Homo sapiens
  misc_RNA (1)...(19): siRNA sense strand
ggacugaaguggacuggau

SEQ ID NO: 705669 - RNA, 19 nt, Homo sapiens
  misc_RNA (1)...(19): siRNA sense strand
gcagugugaugaguguuua

SEQ ID NO: 705670 - RNA, 19 nt, Homo sapiens
  misc_RNA (1)...(19): siRNA sense strand
cagcauuucuccaagauga

SEQ ID NO: 705671 - RNA, 19 nt, Homo sapiens
  misc_RNA (1)...(19): siRNA sense strand
gggagaagaugguaaacuc

SEQ ID NO: 705672 - RNA, 19 nt, Homo sapiens
  misc_RNA (1)...(19): siRNA sense strand
cugggaccauuacaaauua

SEQ ID NO: 705673 - RNA, 19 nt, Homo sapiens
  misc_RNA (1)...(19): siRNA sense strand
ggaaauauucaguuugcaa

SEQ ID NO: 705674 - RNA, 19 nt, Homo sapiens
  misc_RNA (1)...(19): siRNA sense strand
gggauaacaaacagaauaa

SEQ ID NO: 705675 - RNA, 19 nt, Homo sapiens
  misc_RNA (1)...(19): siRNA sense strand
gaacuugauuuggaaacau

SEQ ID NO: 705676 - RNA, 19 nt, Homo sapiens
  misc_RNA (1)...(19): siRNA sense strand
cauuuaagcgcaauaguuu

SEQ ID NO: 705677 - RNA, 19 nt, Homo sapiens
  misc_RNA (1)...(19): siRNA sense strand
ggacugggauaacaaacag

SEQ ID NO: 705678 - RNA, 19 nt, Homo sapiens
  misc_RNA (1)...(19): siRNA sense strand
gaaauugaaccuguccauu

SEQ ID NO: 705679 - RNA, 19 nt, Homo sapiens
  misc_RNA (1)...(19): siRNA sense strand
cugaaggaguugcauguuu

SEQ ID NO: 705680 - RNA, 19 nt, Homo sapiens
  misc_RNA (1)...(19): siRNA sense strand
gauggaagccuguguagag

SEQ ID NO: 705681 - RNA, 19 nt, Homo sapiens
  misc_RNA (1)...(19): siRNA sense strand
uguaaaggccuauuugcua

SEQ ID NO: 705682 - RNA, 19 nt, Homo sapiens
  misc_RNA (1)...(19): siRNA sense strand
caagucuguuccagcauuu

SEQ ID NO: 705683 - RNA, 19 nt, Homo sapiens
  misc_RNA (1)...(19): siRNA sense strand
gguggaacuugauuuggaa

SEQ ID NO: 705684 - RNA, 19 nt, Homo sapiens
  misc_RNA (1)...(19): siRNA sense strand
ggagguggaacuugauuug

SEQ ID NO: 705685 - RNA, 19 nt, Homo sapiens
  misc_RNA (1)...(19): siRNA sense strand
guucagacccauauguaaa

SEQ ID NO: 705686 - RNA, 19 nt, Homo sapiens
  misc_RNA (1)...(19): siRNA sense strand
gaagcaacacugccucuca

SEQ ID NO: 705687 - RNA, 19 nt, Homo sapiens
  misc_RNA (1)...(19): siRNA sense strand
ggaacuugauuuggaaaca

SEQ ID NO: 705688 - RNA, 19 nt, Homo sapiens
  misc_RNA (1)...(19): siRNA sense strand
aauugaaccuguccauuug

SEQ ID NO: 705689 - RNA, 19 nt, Homo sapiens
  misc_RNA (1)...(19): siRNA sense strand
ccuugaauccuguguauaa

SEQ ID NO: 705690 - RNA, 19 nt, Homo sapiens
  misc_RNA (1)...(19): siRNA sense strand
ggaaugccuugaucuacca

SEQ ID NO: 705691 - RNA, 19 nt, Homo sapiens
  misc_RNA (1)...(19): siRNA sense strand
caacacugccucucagaau

SEQ ID NO: 705692 - RNA, 19 nt, Homo sapiens
  misc_RNA (1)...(19): siRNA sense strand
gaaaacagaggugaaauga

SEQ ID NO: 705693 - RNA, 19 nt, Homo sapiens
  misc_RNA (1)...(19): siRNA sense strand
ggaagucaucuaaauucuu

SEQ ID NO: 705694 - RNA, 19 nt, Homo sapiens
  misc_RNA (1)...(19): siRNA sense strand
gaauauguggagucacuga

SEQ ID NO: 705695 - RNA, 19 nt, Homo sapiens
  misc_RNA (1)...(19): siRNA sense strand
aaacaugggacugggauaa

SEQ ID NO: 705696 - RNA, 19 nt, Homo sapiens
  misc_RNA (1)...(19): siRNA sense strand
uggagucacugaaggaguu

SEQ ID NO: 705697 - RNA, 19 nt, Homo sapiens
  misc_RNA (1)...(19): siRNA sense strand
gggaagucaucuaaauucu

SEQ ID NO: 705698 - RNA, 19 nt, Homo sapiens
  misc_RNA (1)...(19): siRNA sense strand
ugaaggaguugcauguuuu

SEQ ID NO: 705699 - RNA, 19 nt, Homo sapiens
  misc_RNA (1)...(19): siRNA sense strand
ccaccaacccuaucuucaa

SEQ ID NO: 705700 - RNA, 19 nt, Homo sapiens
  misc_RNA (1)...(19): siRNA sense strand
gaaacaugggacugggaua

SEQ ID NO: 705701 - RNA, 19 nt, Homo sapiens
  misc_RNA (1)...(19): siRNA sense strand
gcaacacugccucucagaa

SEQ ID NO: 705702 - RNA, 19 nt, Homo sapiens
  misc_RNA (1)...(19): siRNA sense strand
ugggauaacaaacagaaua

SEQ ID NO: 705703 - RNA, 19 nt, Homo sapiens
  misc_RNA (1)...(19): siRNA sense strand
ugaauccuguguauaacga

SEQ ID NO: 705704 - RNA, 19 nt, Homo sapiens
  misc_RNA (1)...(19): siRNA sense strand
guaccauccuuccagauac

SEQ ID NO: 705705 - RNA, 19 nt, Homo sapiens
  misc_RNA (1)...(19): siRNA sense strand
cagcaccaguugcccuuga

SEQ ID NO: 705706 - RNA, 19 nt, Homo sapiens
  misc_RNA (1)...(19): siRNA sense strand
uaagcgcaauaguuuccua

SEQ ID NO: 705707 - RNA, 19 nt, Homo sapiens
  misc_RNA (1)...(19): siRNA sense strand
uggcaucgggauacauuua

SEQ ID NO: 705708 - RNA, 19 nt, Homo sapiens
  misc_RNA (1)...(19): siRNA sense strand
gcacaucugggugaaggaa

SEQ ID NO: 705709 - RNA, 19 nt, Homo sapiens
  misc_RNA (1)...(19): siRNA sense strand
uuggcaaucuggaaguuaa

SEQ ID NO: 705710 - RNA, 19 nt, Homo sapiens
  misc_RNA (1)...(19): siRNA sense strand
ggauggacucuacuucaga

SEQ ID NO: 705711 - RNA, 19 nt, Homo sapiens
  misc_RNA (1)...(19): siRNA sense strand
gcguucagacccauaugua

SEQ ID NO: 705712 - RNA, 19 nt, Homo sapiens
  misc_RNA (1)...(19): siRNA sense strand
aaggaaauauucaguuugc

SEQ ID NO: 705713 - RNA, 19 nt, Homo sapiens
  misc_RNA (1)...(19): siRNA sense strand
cauauguaaaggccuauuu

SEQ ID NO: 705714 - RNA, 19 nt, Homo sapiens
  misc_RNA (1)...(19): siRNA sense strand
ucugggaccauuacaaauu

SEQ ID NO: 705715 - RNA, 19 nt, Homo sapiens
  misc_RNA (1)...(19): siRNA sense strand
gcaucgggauacauuuaag

SEQ ID NO: 705716 - RNA, 19 nt, Homo sapiens
  misc_RNA (1)...(19): siRNA sense strand
ccuauuugcuaccagacaa

SEQ ID NO: 705717 - RNA, 19 nt, Homo sapiens
  misc_RNA (1)...(19): siRNA sense strand
uuugggaggucuucguauu

SEQ ID NO: 705718 - RNA, 19 nt, Homo sapiens
  misc_RNA (1)...(19): siRNA sense strand
ccagaagacaagagcugua

SEQ ID NO: 705719 - RNA, 19 nt, Homo sapiens
  misc_RNA (1)...(19): siRNA sense strand
uguaccauccuuccagaua

SEQ ID NO: 705720 - RNA, 19 nt, Homo sapiens
  misc_RNA (1)...(19): siRNA sense strand
aaccuugaauccuguguau

SEQ ID NO: 705721 - RNA, 19 nt, Homo sapiens
  misc_RNA (1)...(19): siRNA sense strand
gugaugaguguuuauagug

SEQ ID NO: 705722 - RNA, 19 nt, Homo sapiens
  misc_RNA (1)...(19): siRNA sense strand
ugucugggaccauuacaaa

SEQ ID NO: 705723 - RNA, 19 nt, Homo sapiens
  misc_RNA (1)...(19): siRNA sense strand
gccugaagaucugauggaa

SEQ ID NO: 705724 - RNA, 19 nt, Homo sapiens
  misc_RNA (1)...(19): siRNA sense strand
acauuuaagcgcaauaguu

SEQ ID NO: 705725 - RNA, 19 nt, Homo sapiens
  misc_RNA (1)...(19): siRNA sense strand
ggcaucgggauacauuuaa

SEQ ID NO: 705726 - RNA, 19 nt, Homo sapiens
  misc_RNA (1)...(19): siRNA sense strand
aacuagcucuccaguaugu

SEQ ID NO: 705727 - RNA, 19 nt, Homo sapiens
  misc_RNA (1)...(19): siRNA sense strand
ugaaacuagcucuccagua

SEQ ID NO: 705728 - RNA, 19 nt, Homo sapiens
  misc_RNA (1)...(19): siRNA sense strand
gcagaaaacagaggugaaa

SEQ ID NO: 705729 - RNA, 19 nt, Homo sapiens
  misc_RNA (1)...(19): siRNA sense strand
cggaagacagcaccaguug

SEQ ID NO: 705730 - RNA, 19 nt, Homo sapiens
  misc_RNA (1)...(19): siRNA sense strand
gcggaagacagcaccaguu

SEQ ID NO: 705731 - RNA, 19 nt, Homo sapiens
  misc_RNA (1)...(19): siRNA sense strand
gcaaaaugggcaagaagaa

SEQ ID NO: 705732 - RNA, 19 nt, Homo sapiens
  misc_RNA (1)...(19): siRNA sense strand
gagaugguacccucugaag

SEQ ID NO: 705733 - RNA, 19 nt, Homo sapiens
  misc_RNA (1)...(19): siRNA sense strand
ugugaugaguguuuauagu

SEQ ID NO: 705734 - RNA, 19 nt, Homo sapiens
  misc_RNA (1)...(19): siRNA sense strand
ucuggaaguuaaaggaaau

SEQ ID NO: 705735 - RNA, 19 nt, Homo sapiens
  misc_RNA (1)...(19): siRNA sense strand
caccaacccuaucuucaac

SEQ ID NO: 705736 - RNA, 19 nt, Homo sapiens
  misc_RNA (1)...(19): siRNA sense strand
ggcagugugaugaguguuu

SEQ ID NO: 705737 - RNA, 19 nt, Homo sapiens
  misc_RNA (1)...(19): siRNA sense strand
uagcagcagcggauguaaa

SEQ ID NO: 705738 - RNA, 19 nt, Homo sapiens
  misc_RNA (1)...(19): siRNA sense strand
ggaaaaccaccaacccuau

SEQ ID NO: 705739 - RNA, 19 nt, Homo sapiens
  misc_RNA (1)...(19): siRNA sense strand
cguauuggcuuuggaacag

SEQ ID NO: 705740 - RNA, 19 nt, Homo sapiens
  misc_RNA (1)...(19): siRNA sense strand
cuuaaagacacagaaauug

SEQ ID NO: 705741 - RNA, 19 nt, Homo sapiens
  misc_RNA (1)...(19): siRNA sense strand
uugaauauguggagucacu

SEQ ID NO: 705742 - RNA, 19 nt, Homo sapiens
  misc_RNA (1)...(19): siRNA sense strand
gugaguggcagugugauga

SEQ ID NO: 705743 - RNA, 19 nt, Homo sapiens
  misc_RNA (1)...(19): siRNA sense strand
agguggaacuugauuugga

SEQ ID NO: 705744 - RNA, 19 nt, Homo sapiens
  misc_RNA (1)...(19): siRNA sense strand
gggagguggaacuugauuu

SEQ ID NO: 705745 - RNA, 19 nt, Homo sapiens
  misc_RNA (1)...(19): siRNA sense strand
uccuguguauaacgaaaua

SEQ ID NO: 705746 - RNA, 19 nt, Homo sapiens
  misc_RNA (1)...(19): siRNA sense strand
gcuaccagacaaaggcaaa

SEQ ID NO: 705747 - RNA, 19 nt, Homo sapiens
  misc_RNA (1)...(19): siRNA sense strand
aacacugccucucagaaug

SEQ ID NO: 705748 - RNA, 19 nt, Homo sapiens
  misc_RNA (1)...(19): siRNA sense strand
ugggaccauuacaaauuaa

SEQ ID NO: 705749 - RNA, 19 nt, Homo sapiens
  misc_RNA (1)...(19): siRNA sense strand
acaucugggugaaggaaug

SEQ ID NO: 705750 - RNA, 19 nt, Homo sapiens
  misc_RNA (1)...(19): siRNA sense strand
caaucuggaaguuaaagga

SEQ ID NO: 705751 - RNA, 19 nt, Homo sapiens
  misc_RNA (1)...(19): siRNA sense strand
ggauacauuuaagcgcaau

SEQ ID NO: 705752 - RNA, 19 nt, Homo sapiens
  misc_RNA (1)...(19): siRNA sense strand
aauccuguguauaacgaaa

SEQ ID NO: 705753 - RNA, 19 nt, Homo sapiens
  misc_RNA (1)...(19): siRNA sense strand
uguuuauaguggagacuuu

SEQ ID NO: 705754 - RNA, 19 nt, Homo sapiens
  misc_RNA (1)...(19): siRNA sense strand
guggagacuuuggcaaucu

SEQ ID NO: 705755 - RNA, 19 nt, Homo sapiens
  misc_RNA (1)...(19): siRNA sense strand
uguuaaauguaccauccuu

SEQ ID NO: 705756 - RNA, 19 nt, Homo sapiens
  misc_RNA (1)...(19): siRNA sense strand
gggacugggauaacaaaca

SEQ ID NO: 705757 - RNA, 19 nt, Homo sapiens
  misc_RNA (1)...(19): siRNA sense strand
aaaguuaugggacugaagu

SEQ ID NO: 705758 - RNA, 19 nt, Homo sapiens
  misc_RNA (1)...(19): siRNA sense strand
uaccauccuuccagauaca

SEQ ID NO: 705759 - RNA, 19 nt, Homo sapiens
  misc_RNA (1)...(19): siRNA sense strand
uccuacaacuggagaagug

SEQ ID NO: 705760 - RNA, 19 nt, Homo sapiens
  misc_RNA (1)...(19): siRNA sense strand
caaaaugggcaagaagaaa

SEQ ID NO: 705761 - RNA, 19 nt, Homo sapiens
  misc_RNA (1)...(19): siRNA sense strand
ccaacccuaucuucaacca

SEQ ID NO: 705762 - RNA, 19 nt, Homo sapiens
  misc_RNA (1)...(19): siRNA sense strand
ccagauacaaguaggaaaa

SEQ ID NO: 705763 - RNA, 19 nt, Homo sapiens
  misc_RNA (1)...(19): siRNA sense strand
cuggagaagugcacaucug

SEQ ID NO: 705764 - RNA, 19 nt, Homo sapiens
  misc_RNA (1)...(19): siRNA sense strand
gaaacuagcucuccaguau

SEQ ID NO: 705765 - RNA, 19 nt, Homo sapiens
  misc_RNA (1)...(19): siRNA sense strand
aaacagaggugaaaugaaa

SEQ ID NO: 705766 - RNA, 19 nt, Homo sapiens
  misc_RNA (1)...(19): siRNA sense strand
gacaagagcuguagggaaa

SEQ ID NO: 705767 - RNA, 19 nt, Homo sapiens
  misc_RNA (1)...(19): siRNA sense strand
gcaagucuguuccagcauu

SEQ ID NO: 705768 - RNA, 19 nt, Homo sapiens
  misc_RNA (1)...(19): siRNA sense strand
ggacugaaguggacuggau

SEQ ID NO: 705769 - RNA, 19 nt, Homo sapiens
  misc_RNA (1)...(19): siRNA sense strand
gcagugugaugaguguuua

SEQ ID NO: 705770 - RNA, 19 nt, Homo sapiens
  misc_RNA (1)...(19): siRNA sense strand
cagcauuucuccaagauga

SEQ ID NO: 705771 - RNA, 19 nt, Homo sapiens
  misc_RNA (1)...(19): siRNA sense strand
gggagaagaugguaaacuc

SEQ ID NO: 705772 - RNA, 19 nt, Homo sapiens
  misc_RNA (1)...(19): siRNA sense strand
cugggaccauuacaaauua

SEQ ID NO: 705773 - RNA, 19 nt, Homo sapiens
  misc_RNA (1)...(19): siRNA sense strand
ggaaauauucaguuugcaa

SEQ ID NO: 705774 - RNA, 19 nt, Homo sapiens
  misc_RNA (1)...(19): siRNA sense strand
gggauaacaaacagaauaa

SEQ ID NO: 705775 - RNA, 19 nt, Homo sapiens
  misc_RNA (1)...(19): siRNA sense strand
gaacuugauuuggaaacau

SEQ ID NO: 705776 - RNA, 19 nt, Homo sapiens
  misc_RNA (1)...(19): siRNA sense strand
cauuuaagcgcaauaguuu

SEQ ID NO: 705777 - RNA, 19 nt, Homo sapiens
  misc_RNA (1)...(19): siRNA sense strand
ggacugggauaacaaacag

SEQ ID NO: 705778 - RNA, 19 nt, Homo sapiens
  misc_RNA (1)...(19): siRNA sense strand
gaaauugaaccuguccauu

SEQ ID NO: 705779 - RNA, 19 nt, Homo sapiens
  misc_RNA (1)...(19): siRNA sense strand
cugaaggaguugcauguuu

SEQ ID NO: 705780 - RNA, 19 nt, Homo sapiens
  misc_RNA (1)...(19): siRNA sense strand
gauggaagccuguguagag

SEQ ID NO: 705781 - RNA, 19 nt, Homo sapiens
  misc_RNA (1)...(19): siRNA sense strand
caagucuguuccagcauuu

SEQ ID NO: 705782 - RNA, 19 nt, Homo sapiens
  misc_RNA (1)...(19): siRNA sense strand
gguggaacuugauuuggaa

SEQ ID NO: 705783 - RNA, 19 nt, Homo sapiens
  misc_RNA (1)...(19): siRNA sense strand
ggagguggaacuugauuug

SEQ ID NO: 705784 - RNA, 19 nt, Homo sapiens
  misc_RNA (1)...(19): siRNA sense strand
uguaaaggccuauuugcua

SEQ ID NO: 705785 - RNA, 19 nt, Homo sapiens
  misc_RNA (1)...(19): siRNA sense strand
guucagacccauauguaaa

SEQ ID NO: 705786 - RNA, 19 nt, Homo sapiens
  misc_RNA (1)...(19): siRNA sense strand
gaagcaacacugccucuca

SEQ ID NO: 705787 - RNA, 19 nt, Homo sapiens
  misc_RNA (1)...(19): siRNA sense strand
ggaacuugauuuggaaaca

SEQ ID NO: 705788 - RNA, 19 nt, Homo sapiens
  misc_RNA (1)...(19): siRNA sense strand
aauugaaccuguccauuug

SEQ ID NO: 705789 - RNA, 19 nt, Homo sapiens
  misc_RNA (1)...(19): siRNA sense strand
ccuugaauccuguguauaa

SEQ ID NO: 705790 - RNA, 19 nt, Homo sapiens
  misc_RNA (1)...(19): siRNA sense strand
ggaaugccuugaucuacca

SEQ ID NO: 705791 - RNA, 19 nt, Homo sapiens
  misc_RNA (1)...(19): siRNA sense strand
caacacugccucucagaau

SEQ ID NO: 705792 - RNA, 19 nt, Homo sapiens
  misc_RNA (1)...(19): siRNA sense strand
gaaaacagaggugaaauga

SEQ ID NO: 705793 - RNA, 19 nt, Homo sapiens
  misc_RNA (1)...(19): siRNA sense strand
ggaagucaucuaaauucuu

SEQ ID NO: 705794 - RNA, 19 nt, Homo sapiens
  misc_RNA (1)...(19): siRNA sense strand
gaauauguggagucacuga

SEQ ID NO: 705795 - RNA, 19 nt, Homo sapiens
  misc_RNA (1)...(19): siRNA sense strand
aaacaugggacugggauaa

SEQ ID NO: 705796 - RNA, 19 nt, Homo sapiens
  misc_RNA (1)...(19): siRNA sense strand
uggagucacugaaggaguu

SEQ ID NO: 705797 - RNA, 19 nt, Homo sapiens
  misc_RNA (1)...(19): siRNA sense strand
gggaagucaucuaaauucu

SEQ ID NO: 705798 - RNA, 19 nt, Homo sapiens
  misc_RNA (1)...(19): siRNA sense strand
ugaaggaguugcauguuuu

SEQ ID NO: 705799 - RNA, 19 nt, Homo sapiens
  misc_RNA (1)...(19): siRNA sense strand
ccaccaacccuaucuucaa

SEQ ID NO: 705800 - RNA, 19 nt, Homo sapiens
  misc_RNA (1)...(19): siRNA sense strand
gaaacaugggacugggaua

SEQ ID NO: 705801 - RNA, 19 nt, Homo sapiens
  misc_RNA (1)...(19): siRNA sense strand
gcaacacugccucucagaa

SEQ ID NO: 705802 - RNA, 19 nt, Homo sapiens
  misc_RNA (1)...(19): siRNA sense strand
ugggauaacaaacagaaua

SEQ ID NO: 705803 - RNA, 19 nt, Homo sapiens
  misc_RNA (1)...(19): siRNA sense strand
ugaauccuguguauaacga

SEQ ID NO: 705804 - RNA, 19 nt, Homo sapiens
  misc_RNA (1)...(19): siRNA sense strand
guaccauccuuccagauac

SEQ ID NO: 705805 - RNA, 19 nt, Homo sapiens
  misc_RNA (1)...(19): siRNA sense strand
cagcaccaguugcccuuga

SEQ ID NO: 705806 - RNA, 19 nt, Homo sapiens
  misc_RNA (1)...(19): siRNA sense strand
uaagcgcaauaguuuccua

SEQ ID NO: 705807 - RNA, 19 nt, Homo sapiens
  misc_RNA (1)...(19): siRNA sense strand
uggcaucgggauacauuua

SEQ ID NO: 705808 - RNA, 19 nt, Homo sapiens
  misc_RNA (1)...(19): siRNA sense strand
uuggcaaucuggaaguuaa

SEQ ID NO: 705809 - RNA, 19 nt, Homo sapiens
  misc_RNA (1)...(19): siRNA sense strand
ggauggacucuacuucaga

SEQ ID NO: 705810 - RNA, 19 nt, Homo sapiens
  misc_RNA (1)...(19): siRNA sense strand
gcacaucugggugaaggaa

SEQ ID NO: 705811 - RNA, 19 nt, Homo sapiens
  misc_RNA (1)...(19): siRNA sense strand
aaggaaauauucaguuugc

SEQ ID NO: 705812 - RNA, 19 nt, Homo sapiens
  misc_RNA (1)...(19): siRNA sense strand
gcguucagacccauaugua

SEQ ID NO: 705813 - RNA, 19 nt, Homo sapiens
  misc_RNA (1)...(19): siRNA sense strand
cauauguaaaggccuauuu

SEQ ID NO: 705814 - RNA, 19 nt, Homo sapiens
  misc_RNA (1)...(19): siRNA sense strand
ucugggaccauuacaaauu

SEQ ID NO: 705815 - RNA, 19 nt, Homo sapiens
  misc_RNA (1)...(19): siRNA sense strand
gcaucgggauacauuuaag

SEQ ID NO: 705816 - RNA, 19 nt, Homo sapiens
  misc_RNA (1)...(19): siRNA sense strand
ccuauuugcuaccagacaa

SEQ ID NO: 705817 - RNA, 19 nt, Homo sapiens
  misc_RNA (1)...(19): siRNA sense strand
uuugggaggucuucguauu

SEQ ID NO: 705818 - RNA, 19 nt, Homo sapiens
  misc_RNA (1)...(19): siRNA sense strand
ccagaagacaagagcugua

SEQ ID NO: 705819 - RNA, 19 nt, Homo sapiens
  misc_RNA (1)...(19): siRNA sense strand
uguaccauccuuccagaua

SEQ ID NO: 705820 - RNA, 19 nt, Homo sapiens
  misc_RNA (1)...(19): siRNA sense strand
aaccuugaauccuguguau

SEQ ID NO: 705821 - RNA, 19 nt, Homo sapiens
  misc_RNA (1)...(19): siRNA sense strand
acaaccugauaauccauuu

SEQ ID NO: 705822 - RNA, 19 nt, Homo sapiens
  misc_RNA (1)...(19): siRNA sense strand
gugaugaguguuuauagug

SEQ ID NO: 705823 - RNA, 19 nt, Homo sapiens
  misc_RNA (1)...(19): siRNA sense strand
ugucugggaccauuacaaa

SEQ ID NO: 705824 - RNA, 19 nt, Homo sapiens
  misc_RNA (1)...(19): siRNA sense strand
gccugaagaucugauggaa

SEQ ID NO: 705825 - RNA, 19 nt, Homo sapiens
  misc_RNA (1)...(19): siRNA sense strand
acauuuaagcgcaauaguu

SEQ ID NO: 705826 - RNA, 19 nt, Homo sapiens
  misc_RNA (1)...(19): siRNA sense strand
ggcaucgggauacauuuaa

SEQ ID NO: 705827 - RNA, 19 nt, Homo sapiens
  misc_RNA (1)...(19): siRNA sense strand
gugccuacacaaccugaua

SEQ ID NO: 705828 - RNA, 19 nt, Homo sapiens
  misc_RNA (1)...(19): siRNA sense strand
aacuagcucuccaguaugu

SEQ ID NO: 705829 - RNA, 19 nt, Homo sapiens
  misc_RNA (1)...(19): siRNA sense strand
ugaaacuagcucuccagua

SEQ ID NO: 705830 - RNA, 19 nt, Homo sapiens
  misc_RNA (1)...(19): siRNA sense strand
gcagaaaacagaggugaaa

SEQ ID NO: 705831 - RNA, 19 nt, Homo sapiens
  misc_RNA (1)...(19): siRNA sense strand
cggaagacagcaccaguug

SEQ ID NO: 705832 - RNA, 19 nt, Homo sapiens
  misc_RNA (1)...(19): siRNA sense strand
gcggaagacagcaccaguu

SEQ ID NO: 705833 - RNA, 19 nt, Homo sapiens
  misc_RNA (1)...(19): siRNA sense strand
gcaaaaugggcaagaagaa

SEQ ID NO: 705834 - RNA, 19 nt, Homo sapiens
  misc_RNA (1)...(19): siRNA sense strand
ugugaugaguguuuauagu

SEQ ID NO: 705835 - RNA, 19 nt, Homo sapiens
  misc_RNA (1)...(19): siRNA sense strand
gagaugguacccucugaag

SEQ ID NO: 705836 - RNA, 19 nt, Homo sapiens
  misc_RNA (1)...(19): siRNA sense strand
cuacacaaccugauaaucc

SEQ ID NO: 705837 - RNA, 19 nt, Homo sapiens
  misc_RNA (1)...(19): siRNA sense strand
ucuggaaguuaaaggaaau

SEQ ID NO: 705838 - RNA, 19 nt, Homo sapiens
  misc_RNA (1)...(19): siRNA sense strand
caccaacccuaucuucaac

SEQ ID NO: 705839 - RNA, 19 nt, Homo sapiens
  misc_RNA (1)...(19): siRNA sense strand
ggcagugugaugaguguuu

SEQ ID NO: 705840 - RNA, 19 nt, Homo sapiens
  misc_RNA (1)...(19): siRNA sense strand
uagcagcagcggauguaaa

SEQ ID NO: 705841 - RNA, 19 nt, Homo sapiens
  misc_RNA (1)...(19): siRNA sense strand
ggaaaaccaccaacccuau

SEQ ID NO: 705842 - RNA, 19 nt, Homo sapiens
  misc_RNA (1)...(19): siRNA sense strand
cguauuggcuuuggaacag

SEQ ID NO: 705843 - RNA, 19 nt, Homo sapiens
  misc_RNA (1)...(19): siRNA sense strand
cuuaaagacacagaaauug

SEQ ID NO: 705844 - RNA, 19 nt, Homo sapiens
  misc_RNA (1)...(19): siRNA sense strand
uugaauauguggagucacu

SEQ ID NO: 705845 - RNA, 19 nt, Homo sapiens
  misc_RNA (1)...(19): siRNA sense strand
gugaguggcagugugauga

SEQ ID NO: 705846 - RNA, 19 nt, Homo sapiens
  misc_RNA (1)...(19): siRNA sense strand
agguggaacuugauuugga

SEQ ID NO: 705847 - RNA, 19 nt, Homo sapiens
  misc_RNA (1)...(19): siRNA sense strand
gggagguggaacuugauuu

SEQ ID NO: 705848 - RNA, 19 nt, Homo sapiens
  misc_RNA (1)...(19): siRNA sense strand
uccuguguauaacgaaaua

SEQ ID NO: 705849 - RNA, 19 nt, Homo sapiens
  misc_RNA (1)...(19): siRNA sense strand
gcuaccagacaaaggcaaa

SEQ ID NO: 705850 - RNA, 19 nt, Homo sapiens
  misc_RNA (1)...(19): siRNA sense strand
aacacugccucucagaaug

SEQ ID NO: 705851 - RNA, 19 nt, Homo sapiens
  misc_RNA (1)...(19): siRNA sense strand
caaucuggaaguuaaagga

SEQ ID NO: 705852 - RNA, 19 nt, Homo sapiens
  misc_RNA (1)...(19): siRNA sense strand
ugggaccauuacaaauuaa

SEQ ID NO: 705853 - RNA, 19 nt, Homo sapiens
  misc_RNA (1)...(19): siRNA sense strand
acaucugggugaaggaaug

SEQ ID NO: 705854 - RNA, 19 nt, Homo sapiens
  misc_RNA (1)...(19): siRNA sense strand
uacacaaccugauaaucca

SEQ ID NO: 705855 - RNA, 19 nt, Homo sapiens
  misc_RNA (1)...(19): siRNA sense strand
ggauacauuuaagcgcaau

SEQ ID NO: 705856 - RNA, 19 nt, Homo sapiens
  misc_RNA (1)...(19): siRNA sense strand
aauccuguguauaacgaaa

SEQ ID NO: 705857 - RNA, 19 nt, Homo sapiens
  misc_RNA (1)...(19): siRNA sense strand
uguuaaauguaccauccuu

SEQ ID NO: 705858 - RNA, 19 nt, Homo sapiens
  misc_RNA (1)...(19): siRNA sense strand
uguuuauaguggagacuuu

SEQ ID NO: 705859 - RNA, 19 nt, Homo sapiens
  misc_RNA (1)...(19): siRNA sense strand
guggagacuuuggcaaucu

SEQ ID NO: 705860 - RNA, 19 nt, Homo sapiens
  misc_RNA (1)...(19): siRNA sense strand
gggacugggauaacaaaca

SEQ ID NO: 705861 - RNA, 19 nt, Homo sapiens
  misc_RNA (1)...(19): siRNA sense strand
aaaguuaugggacugaagu

SEQ ID NO: 705862 - RNA, 19 nt, Homo sapiens
  misc_RNA (1)...(19): siRNA sense strand
uaccauccuuccagauaca

SEQ ID NO: 705863 - RNA, 19 nt, Homo sapiens
  misc_RNA (1)...(19): siRNA sense strand
uccuacaacuggagaagug

SEQ ID NO: 705864 - RNA, 19 nt, Homo sapiens
  misc_RNA (1)...(19): siRNA sense strand
gaagauggauagaacauua

SEQ ID NO: 705865 - RNA, 19 nt, Homo sapiens
  misc_RNA (1)...(19): siRNA sense strand
aaagaaagcucgaagaaua

SEQ ID NO: 705866 - RNA, 19 nt, Homo sapiens
  misc_RNA (1)...(19): siRNA sense strand
gaaguaaccaucagaaaua

SEQ ID NO: 705867 - RNA, 19 nt, Homo sapiens
  misc_RNA (1)...(19): siRNA sense strand
cagaagaucuugcacauug

SEQ ID NO: 705868 - RNA, 19 nt, Homo sapiens
  misc_RNA (1)...(19): siRNA sense strand
gagcacaucuaucauuuga

SEQ ID NO: 705869 - RNA, 19 nt, Homo sapiens
  misc_RNA (1)...(19): siRNA sense strand
gauagaacauuauggagaa

SEQ ID NO: 705870 - RNA, 19 nt, Homo sapiens
  misc_RNA (1)...(19): siRNA sense strand
gcaccuaacuuuacugaca

SEQ ID NO: 705871 - RNA, 19 nt, Homo sapiens
  misc_RNA (1)...(19): siRNA sense strand
auacaaagcugcaagaaga

SEQ ID NO: 705872 - RNA, 19 nt, Homo sapiens
  misc_RNA (1)...(19): siRNA sense strand
ugaguuagauccaguacua

SEQ ID NO: 705873 - RNA, 19 nt, Homo sapiens
  misc_RNA (1)...(19): siRNA sense strand
gcacaucuaucauuugaag

SEQ ID NO: 705874 - RNA, 19 nt, Homo sapiens
  misc_RNA (1)...(19): siRNA sense strand
ggaaacugaugauccauau

SEQ ID NO: 705875 - RNA, 19 nt, Homo sapiens
  misc_RNA (1)...(19): siRNA sense strand
gaagagcacaucuaucauu

SEQ ID NO: 705876 - RNA, 19 nt, Homo sapiens
  misc_RNA (1)...(19): siRNA sense strand
gaaugaggcuucagaugau

SEQ ID NO: 705877 - RNA, 19 nt, Homo sapiens
  misc_RNA (1)...(19): siRNA sense strand
ggacaggugugcagaagau

SEQ ID NO: 705878 - RNA, 19 nt, Homo sapiens
  misc_RNA (1)...(19): siRNA sense strand
gaacuaaggagucgguuga

SEQ ID NO: 705879 - RNA, 19 nt, Homo sapiens
  misc_RNA (1)...(19): siRNA sense strand
ggaacaacauugguaaaga

SEQ ID NO: 705880 - RNA, 19 nt, Homo sapiens
  misc_RNA (1)...(19): siRNA sense strand
ucacaagguuugcuauuga

SEQ ID NO: 705881 - RNA, 19 nt, Homo sapiens
  misc_RNA (1)...(19): siRNA sense strand
ggacaaggcuucggaaacu

SEQ ID NO: 705882 - RNA, 19 nt, Homo sapiens
  misc_RNA (1)...(19): siRNA sense strand
ggaagaaggaaauuuagaa

SEQ ID NO: 705883 - RNA, 19 nt, Homo sapiens
  misc_RNA (1)...(19): siRNA sense strand
uaaaguggcagccugguua

SEQ ID NO: 705884 - RNA, 19 nt, Homo sapiens
  misc_RNA (1)...(19): siRNA sense strand
gaacaacauugguaaagac

SEQ ID NO: 705885 - RNA, 19 nt, Homo sapiens
  misc_RNA (1)...(19): siRNA sense strand
gacaauauuucucggcaaa

SEQ ID NO: 705886 - RNA, 19 nt, Homo sapiens
  misc_RNA (1)...(19): siRNA sense strand
caaccagaaugcugaacua

SEQ ID NO: 705887 - RNA, 19 nt, Homo sapiens
  misc_RNA (1)...(19): siRNA sense strand
ccaaaccaauguccagaaa

SEQ ID NO: 705888 - RNA, 19 nt, Homo sapiens
  misc_RNA (1)...(19): siRNA sense strand
gcacaacuggccagaguaa

SEQ ID NO: 705889 - RNA, 19 nt, Homo sapiens
  misc_RNA (1)...(19): siRNA sense strand
cagagucuauuauuuguga

SEQ ID NO: 705890 - RNA, 19 nt, Homo sapiens
  misc_RNA (1)...(19): siRNA sense strand
gcaaacuccugcaaaauuu

SEQ ID NO: 705891 - RNA, 19 nt, Homo sapiens
  misc_RNA (1)...(19): siRNA sense strand
ggaaagaugcaaccaaaca

SEQ ID NO: 705892 - RNA, 19 nt, Homo sapiens
  misc_RNA (1)...(19): siRNA sense strand
guauggagauuacuaugug

SEQ ID NO: 705893 - RNA, 19 nt, Homo sapiens
  misc_RNA (1)...(19): siRNA sense strand
uuacugacaugcaggcuaa

SEQ ID NO: 705894 - RNA, 19 nt, Homo sapiens
  misc_RNA (1)...(19): siRNA sense strand
gaacucagucagcaccuaa

SEQ ID NO: 705895 - RNA, 19 nt, Homo sapiens
  misc_RNA (1)...(19): siRNA sense strand
ggauacugcuccaccuauu

SEQ ID NO: 705896 - RNA, 19 nt, Homo sapiens
  misc_RNA (1)...(19): siRNA sense strand
uggaauaucuugaggaaca

SEQ ID NO: 705897 - RNA, 19 nt, Homo sapiens
  misc_RNA (1)...(19): siRNA sense strand
agacaaacaugagggcuuu

SEQ ID NO: 705898 - RNA, 19 nt, Homo sapiens
  misc_RNA (1)...(19): siRNA sense strand
ucagugaugugagugauaa

SEQ ID NO: 705899 - RNA, 19 nt, Homo sapiens
  misc_RNA (1)...(19): siRNA sense strand
gaaugaaauugugagauca

SEQ ID NO: 705900 - RNA, 19 nt, Homo sapiens
  misc_RNA (1)...(19): siRNA sense strand
aaacugaugauccauauga

SEQ ID NO: 705901 - RNA, 19 nt, Homo sapiens
  misc_RNA (1)...(19): siRNA sense strand
aagagcacaucuaucauuu

SEQ ID NO: 705902 - RNA, 19 nt, Homo sapiens
  misc_RNA (1)...(19): siRNA sense strand
acuaugagcuguacuaugg

SEQ ID NO: 705903 - RNA, 19 nt, Homo sapiens
  misc_RNA (1)...(19): siRNA sense strand
caacaaacuaugagcugua

SEQ ID NO: 705904 - RNA, 19 nt, Homo sapiens
  misc_RNA (1)...(19): siRNA sense strand
caaggugaauuauuggaau

SEQ ID NO: 705905 - RNA, 19 nt, Homo sapiens
  misc_RNA (1)...(19): siRNA sense strand
gggagaagauggauagaac

SEQ ID NO: 705906 - RNA, 19 nt, Homo sapiens
  misc_RNA (1)...(19): siRNA sense strand
ggagacuuaugaaugcauu

SEQ ID NO: 705907 - RNA, 19 nt, Homo sapiens
  misc_RNA (1)...(19): siRNA sense strand
gcauagcuauagagaagga

SEQ ID NO: 705908 - RNA, 19 nt, Homo sapiens
  misc_RNA (1)...(19): siRNA sense strand
acaagacgauggagaacaa

SEQ ID NO: 705909 - RNA, 19 nt, Homo sapiens
  misc_RNA (1)...(19): siRNA sense strand
caggcuaacuguguagaua

SEQ ID NO: 705910 - RNA, 19 nt, Homo sapiens
  misc_RNA (1)...(19): siRNA sense strand
agaaugaaauugugagauc

SEQ ID NO: 705911 - RNA, 19 nt, Homo sapiens
  misc_RNA (1)...(19): siRNA sense strand
uguaauggauggaaagaug

SEQ ID NO: 705912 - RNA, 19 nt, Homo sapiens
  misc_RNA (1)...(19): siRNA sense strand
agaaugaggcuucagauga

SEQ ID NO: 705913 - RNA, 19 nt, Homo sapiens
  misc_RNA (1)...(19): siRNA sense strand
ccagaaugcugaacuaagg

SEQ ID NO: 705914 - RNA, 19 nt, Homo sapiens
  misc_RNA (1)...(19): siRNA sense strand
ccgaagagcacaucuauca

SEQ ID NO: 705915 - RNA, 19 nt, Homo sapiens
  misc_RNA (1)...(19): siRNA sense strand
uagaggaacuccagagauc

SEQ ID NO: 705916 - RNA, 19 nt, Homo sapiens
  misc_RNA (1)...(19): siRNA sense strand
gaaaauaggccaaaccaau

SEQ ID NO: 705917 - RNA, 19 nt, Homo sapiens
  misc_RNA (1)...(19): siRNA sense strand
caaccuuugugcagauauu

SEQ ID NO: 705918 - RNA, 19 nt, Homo sapiens
  misc_RNA (1)...(19): siRNA sense strand
ggaaauacuucagagaacu

SEQ ID NO: 705919 - RNA, 19 nt, Homo sapiens
  misc_RNA (1)...(19): siRNA sense strand
caaacuaugagcuguacua

SEQ ID NO: 705920 - RNA, 19 nt, Homo sapiens
  misc_RNA (1)...(19): siRNA sense strand
uuuagaagcugcagcauca

SEQ ID NO: 705921 - RNA, 19 nt, Homo sapiens
  misc_RNA (1)...(19): siRNA sense strand
ugacagcugggaaauuaua

SEQ ID NO: 705922 - RNA, 19 nt, Homo sapiens
  misc_RNA (1)...(19): siRNA sense strand
ggaaaguucaacagauuau

SEQ ID NO: 705923 - RNA, 19 nt, Homo sapiens
  misc_RNA (1)...(19): siRNA sense strand
gagaaguaaccaucagaaa

SEQ ID NO: 705924 - RNA, 19 nt, Homo sapiens
  misc_RNA (1)...(19): siRNA sense strand
ggcaagauaucagauggaa

SEQ ID NO: 705925 - RNA, 19 nt, Homo sapiens
  misc_RNA (1)...(19): siRNA sense strand
aacauuaaccuguggaaua

SEQ ID NO: 705926 - RNA, 19 nt, Homo sapiens
  misc_RNA (1)...(19): siRNA sense strand
gaucagguugucaguguaa

SEQ ID NO: 705927 - RNA, 19 nt, Homo sapiens
  misc_RNA (1)...(19): siRNA sense strand
gagacgauauauggaagaa

SEQ ID NO: 705928 - RNA, 19 nt, Homo sapiens
  misc_RNA (1)...(19): siRNA sense strand
acauuaaccuguggaauau

SEQ ID NO: 705929 - RNA, 19 nt, Homo sapiens
  misc_RNA (1)...(19): siRNA sense strand
ucaaaggcaccacucgaua

SEQ ID NO: 705930 - RNA, 19 nt, Homo sapiens
  misc_RNA (1)...(19): siRNA sense strand
gaagaaggaaauuuagaag

SEQ ID NO: 705931 - RNA, 19 nt, Homo sapiens
  misc_RNA (1)...(19): siRNA sense strand
gguugucaguguaaauauu

SEQ ID NO: 705932 - RNA, 19 nt, Homo sapiens
  misc_RNA (1)...(19): siRNA sense strand
ggagucgguugaacagaau

SEQ ID NO: 705933 - RNA, 19 nt, Homo sapiens
  misc_RNA (1)...(19): siRNA sense strand
cuggaaaguucaacagauu

SEQ ID NO: 705934 - RNA, 19 nt, Homo sapiens
  misc_RNA (1)...(19): siRNA sense strand
ucagucagcaccuaacuuu

SEQ ID NO: 705935 - RNA, 19 nt, Homo sapiens
  misc_RNA (1)...(19): siRNA sense strand
ucucagucaugucaauuaa

SEQ ID NO: 705936 - RNA, 19 nt, Homo sapiens
  misc_RNA (1)...(19): siRNA sense strand
caaaggcaccacucgauau

SEQ ID NO: 705937 - RNA, 19 nt, Homo sapiens
  misc_RNA (1)...(19): siRNA sense strand
gugaucagguugucagugu

SEQ ID NO: 705938 - RNA, 19 nt, Homo sapiens
  misc_RNA (1)...(19): siRNA sense strand
gaacauuauggagaaguaa

SEQ ID NO: 705939 - RNA, 19 nt, Homo sapiens
  misc_RNA (1)...(19): siRNA sense strand
ccuggauaauggaauguua

SEQ ID NO: 705940 - RNA, 19 nt, Homo sapiens
  misc_RNA (1)...(19): siRNA sense strand
cagaacagguuagccauca

SEQ ID NO: 705941 - RNA, 19 nt, Homo sapiens
  misc_RNA (1)...(19): siRNA sense strand
ccugacaccaguaacauua

SEQ ID NO: 705942 - RNA, 19 nt, Homo sapiens
  misc_RNA (1)...(19): siRNA sense strand
cgagcaggaucacaguaaa

SEQ ID NO: 705943 - RNA, 19 nt, Homo sapiens
  misc_RNA (1)...(19): siRNA sense strand
gacgauauauggaagaaaa

SEQ ID NO: 705944 - RNA, 19 nt, Homo sapiens
  misc_RNA (1)...(19): siRNA sense strand
gaagcaaagaguagaggaa

SEQ ID NO: 705945 - RNA, 19 nt, Homo sapiens
  misc_RNA (1)...(19): siRNA sense strand
ggagaaguaaccaucagaa

SEQ ID NO: 705946 - RNA, 19 nt, Homo sapiens
  misc_RNA (1)...(19): siRNA sense strand
agaacauuauggagaagua

SEQ ID NO: 705947 - RNA, 19 nt, Homo sapiens
  misc_RNA (1)...(19): siRNA sense strand
ggaagucgauggaaauccu

SEQ ID NO: 705948 - RNA, 19 nt, Homo sapiens
  misc_RNA (1)...(19): siRNA sense strand
cuucagaugaugagucuua

SEQ ID NO: 705949 - RNA, 19 nt, Homo sapiens
  misc_RNA (1)...(19): siRNA sense strand
gcaccgagcccucuguaag

SEQ ID NO: 705950 - RNA, 19 nt, Homo sapiens
  misc_RNA (1)...(19): siRNA sense strand
gguuguaucgucagaauga

SEQ ID NO: 705951 - RNA, 19 nt, Homo sapiens
  misc_RNA (1)...(19): siRNA sense strand
gugcacaacuggccagagu

SEQ ID NO: 705952 - RNA, 19 nt, Homo sapiens
  misc_RNA (1)...(19): siRNA sense strand
cagguuccaugccaacaaa

SEQ ID NO: 705953 - RNA, 19 nt, Homo sapiens
  misc_RNA (1)...(19): siRNA sense strand
gauacugcuccaccuauuu

SEQ ID NO: 705954 - RNA, 19 nt, Homo sapiens
  misc_RNA (1)...(19): siRNA sense strand
cauuugcaguuucaggaua

SEQ ID NO: 705955 - RNA, 19 nt, Homo sapiens
  misc_RNA (1)...(19): siRNA sense strand
gcaaguucgucagagaaug

SEQ ID NO: 705956 - RNA, 19 nt, Homo sapiens
  misc_RNA (1)...(19): siRNA sense strand
aggagaagcugaagcagau

SEQ ID NO: 705957 - RNA, 19 nt, Homo sapiens
  misc_RNA (1)...(19): siRNA sense strand
uuacaggacucggaagaga

SEQ ID NO: 705958 - RNA, 19 nt, Homo sapiens
  misc_RNA (1)...(19): siRNA sense strand
caaagagaagccuggguuu

SEQ ID NO: 705959 - RNA, 19 nt, Homo sapiens
  misc_RNA (1)...(19): siRNA sense strand
ugaaugucaugcuuccaaa

SEQ ID NO: 705960 - RNA, 19 nt, Homo sapiens
  misc_RNA (1)...(19): siRNA sense strand
gacaagggauuccgcuuuu

SEQ ID NO: 705961 - RNA, 19 nt, Homo sapiens
  misc_RNA (1)...(19): siRNA sense strand
caaguucgucagagaauga

SEQ ID NO: 705962 - RNA, 19 nt, Homo sapiens
  misc_RNA (1)...(19): siRNA sense strand
ggcuaacuguguagauauu

SEQ ID NO: 705963 - RNA, 19 nt, Homo sapiens
  misc_RNA (1)...(19): siRNA sense strand
agaaggaaauuuagaagcu

SEQ ID NO: 705964 - RNA, 19 nt, Homo sapiens
  misc_RNA (1)...(19): siRNA sense strand
gaagauggauagaacauua

SEQ ID NO: 705965 - RNA, 19 nt, Homo sapiens
  misc_RNA (1)...(19): siRNA sense strand
aaagaaagcucgaagaaua

SEQ ID NO: 705966 - RNA, 19 nt, Homo sapiens
  misc_RNA (1)...(19): siRNA sense strand
gaaguaaccaucagaaaua

SEQ ID NO: 705967 - RNA, 19 nt, Homo sapiens
  misc_RNA (1)...(19): siRNA sense strand
cagaagaucuugcacauug

SEQ ID NO: 705968 - RNA, 19 nt, Homo sapiens
  misc_RNA (1)...(19): siRNA sense strand
gagcacaucuaucauuuga

SEQ ID NO: 705969 - RNA, 19 nt, Homo sapiens
  misc_RNA (1)...(19): siRNA sense strand
gauagaacauuauggagaa

SEQ ID NO: 705970 - RNA, 19 nt, Homo sapiens
  misc_RNA (1)...(19): siRNA sense strand
gcaccuaacuuuacugaca

SEQ ID NO: 705971 - RNA, 19 nt, Homo sapiens
  misc_RNA (1)...(19): siRNA sense strand
auacaaagcugcaagaaga

SEQ ID NO: 705972 - RNA, 19 nt, Homo sapiens
  misc_RNA (1)...(19): siRNA sense strand
ugaguuagauccaguacua

SEQ ID NO: 705973 - RNA, 19 nt, Homo sapiens
  misc_RNA (1)...(19): siRNA sense strand
gcacaucuaucauuugaag

SEQ ID NO: 705974 - RNA, 19 nt, Homo sapiens
  misc_RNA (1)...(19): siRNA sense strand
ggaaacugaugauccauau

SEQ ID NO: 705975 - RNA, 19 nt, Homo sapiens
  misc_RNA (1)...(19): siRNA sense strand
gaagagcacaucuaucauu

SEQ ID NO: 705976 - RNA, 19 nt, Homo sapiens
  misc_RNA (1)...(19): siRNA sense strand
gaaugaggcuucagaugau

SEQ ID NO: 705977 - RNA, 19 nt, Homo sapiens
  misc_RNA (1)...(19): siRNA sense strand
ggacaggugugcagaagau

SEQ ID NO: 705978 - RNA, 19 nt, Homo sapiens
  misc_RNA (1)...(19): siRNA sense strand
gaacuaaggagucgguuga

SEQ ID NO: 705979 - RNA, 19 nt, Homo sapiens
  misc_RNA (1)...(19): siRNA sense strand
ggaacaacauugguaaaga

SEQ ID NO: 705980 - RNA, 19 nt, Homo sapiens
  misc_RNA (1)...(19): siRNA sense strand
ucacaagguuugcuauuga

SEQ ID NO: 705981 - RNA, 19 nt, Homo sapiens
  misc_RNA (1)...(19): siRNA sense strand
ggacaaggcuucggaaacu

SEQ ID NO: 705982 - RNA, 19 nt, Homo sapiens
  misc_RNA (1)...(19): siRNA sense strand
ggaagaaggaaauuuagaa

SEQ ID NO: 705983 - RNA, 19 nt, Homo sapiens
  misc_RNA (1)...(19): siRNA sense strand
uaaaguggcagccugguua

SEQ ID NO: 705984 - RNA, 19 nt, Homo sapiens
  misc_RNA (1)...(19): siRNA sense strand
gaacaacauugguaaagac

SEQ ID NO: 705985 - RNA, 19 nt, Homo sapiens
  misc_RNA (1)...(19): siRNA sense strand
gacaauauuucucggcaaa

SEQ ID NO: 705986 - RNA, 19 nt, Homo sapiens
  misc_RNA (1)...(19): siRNA sense strand
caaccagaaugcugaacua

SEQ ID NO: 705987 - RNA, 19 nt, Homo sapiens
  misc_RNA (1)...(19): siRNA sense strand
ccaaaccaauguccagaaa

SEQ ID NO: 705988 - RNA, 19 nt, Homo sapiens
  misc_RNA (1)...(19): siRNA sense strand
gcacaacuggccagaguaa

SEQ ID NO: 705989 - RNA, 19 nt, Homo sapiens
  misc_RNA (1)...(19): siRNA sense strand
cagagucuauuauuuguga

SEQ ID NO: 705990 - RNA, 19 nt, Homo sapiens
  misc_RNA (1)...(19): siRNA sense strand
gcaaacuccugcaaaauuu

SEQ ID NO: 705991 - RNA, 19 nt, Homo sapiens
  misc_RNA (1)...(19): siRNA sense strand
ggaaagaugcaaccaaaca

SEQ ID NO: 705992 - RNA, 19 nt, Homo sapiens
  misc_RNA (1)...(19): siRNA sense strand
guauggagauuacuaugug

SEQ ID NO: 705993 - RNA, 19 nt, Homo sapiens
  misc_RNA (1)...(19): siRNA sense strand
uuacugacaugcaggcuaa

SEQ ID NO: 705994 - RNA, 19 nt, Homo sapiens
  misc_RNA (1)...(19): siRNA sense strand
gaacucagucagcaccuaa

SEQ ID NO: 705995 - RNA, 19 nt, Homo sapiens
  misc_RNA (1)...(19): siRNA sense strand
ggauacugcuccaccuauu

SEQ ID NO: 705996 - RNA, 19 nt, Homo sapiens
  misc_RNA (1)...(19): siRNA sense strand
uggaauaucuugaggaaca

SEQ ID NO: 705997 - RNA, 19 nt, Homo sapiens
  misc_RNA (1)...(19): siRNA sense strand
agacaaacaugagggcuuu

SEQ ID NO: 705998 - RNA, 19 nt, Homo sapiens
  misc_RNA (1)...(19): siRNA sense strand
ucagugaugugagugauaa

SEQ ID NO: 705999 - RNA, 19 nt, Homo sapiens
  misc_RNA (1)...(19): siRNA sense strand
gaaugaaauugugagauca

SEQ ID NO: 706000 - RNA, 19 nt, Homo sapiens
  misc_RNA (1)...(19): siRNA sense strand
aaacugaugauccauauga

SEQ ID NO: 706001 - RNA, 19 nt, Homo sapiens
  misc_RNA (1)...(19): siRNA sense strand
aagagcacaucuaucauuu

SEQ ID NO: 706002 - RNA, 19 nt, Homo sapiens
  misc_RNA (1)...(19): siRNA sense strand
acuaugagcuguacuaugg

SEQ ID NO: 706003 - RNA, 19 nt, Homo sapiens
  misc_RNA (1)...(19): siRNA sense strand
caacaaacuaugagcugua

SEQ ID NO: 706004 - RNA, 19 nt, Homo sapiens
  misc_RNA (1)...(19): siRNA sense strand
caaggugaauuauuggaau

SEQ ID NO: 706005 - RNA, 19 nt, Homo sapiens
  misc_RNA (1)...(19): siRNA sense strand
gggagaagauggauagaac

SEQ ID NO: 706006 - RNA, 19 nt, Homo sapiens
  misc_RNA (1)...(19): siRNA sense strand
ggagacuuaugaaugcauu

SEQ ID NO: 706007 - RNA, 19 nt, Homo sapiens
  misc_RNA (1)...(19): siRNA sense strand
gcauagcuauagagaagga

SEQ ID NO: 706008 - RNA, 19 nt, Homo sapiens
  misc_RNA (1)...(19): siRNA sense strand
acaagacgauggagaacaa

SEQ ID NO: 706009 - RNA, 19 nt, Homo sapiens
  misc_RNA (1)...(19): siRNA sense strand
caggcuaacuguguagaua

SEQ ID NO: 706010 - RNA, 19 nt, Homo sapiens
  misc_RNA (1)...(19): siRNA sense strand
agaaugaaauugugagauc

SEQ ID NO: 706011 - RNA, 19 nt, Homo sapiens
  misc_RNA (1)...(19): siRNA sense strand
uguaauggauggaaagaug

SEQ ID NO: 706012 - RNA, 19 nt, Homo sapiens
  misc_RNA (1)...(19): siRNA sense strand
agaaugaggcuucagauga

SEQ ID NO: 706013 - RNA, 19 nt, Homo sapiens
  misc_RNA (1)...(19): siRNA sense strand
ccagaaugcugaacuaagg

SEQ ID NO: 706014 - RNA, 19 nt, Homo sapiens
  misc_RNA (1)...(19): siRNA sense strand
ccgaagagcacaucuauca

SEQ ID NO: 706015 - RNA, 19 nt, Homo sapiens
  misc_RNA (1)...(19): siRNA sense strand
uagaggaacuccagagauc

SEQ ID NO: 706016 - RNA, 19 nt, Homo sapiens
  misc_RNA (1)...(19): siRNA sense strand
gaaaauaggccaaaccaau

SEQ ID NO: 706017 - RNA, 19 nt, Homo sapiens
  misc_RNA (1)...(19): siRNA sense strand
caaccuuugugcagauauu

SEQ ID NO: 706018 - RNA, 19 nt, Homo sapiens
  misc_RNA (1)...(19): siRNA sense strand
ggaaauacuucagagaacu

SEQ ID NO: 706019 - RNA, 19 nt, Homo sapiens
  misc_RNA (1)...(19): siRNA sense strand
caaacuaugagcuguacua

SEQ ID NO: 706020 - RNA, 19 nt, Homo sapiens
  misc_RNA (1)...(19): siRNA sense strand
uuuagaagcugcagcauca

SEQ ID NO: 706021 - RNA, 19 nt, Homo sapiens
  misc_RNA (1)...(19): siRNA sense strand
ugacagcugggaaauuaua

SEQ ID NO: 706022 - RNA, 19 nt, Homo sapiens
  misc_RNA (1)...(19): siRNA sense strand
ggaaaguucaacagauuau

SEQ ID NO: 706023 - RNA, 19 nt, Homo sapiens
  misc_RNA (1)...(19): siRNA sense strand
gagaaguaaccaucagaaa

SEQ ID NO: 706024 - RNA, 19 nt, Homo sapiens
  misc_RNA (1)...(19): siRNA sense strand
ggcaagauaucagauggaa

SEQ ID NO: 706025 - RNA, 19 nt, Homo sapiens
  misc_RNA (1)...(19): siRNA sense strand
aacauuaaccuguggaaua

SEQ ID NO: 706026 - RNA, 19 nt, Homo sapiens
  misc_RNA (1)...(19): siRNA sense strand
gaucagguugucaguguaa

SEQ ID NO: 706027 - RNA, 19 nt, Homo sapiens
  misc_RNA (1)...(19): siRNA sense strand
gagacgauauauggaagaa

SEQ ID NO: 706028 - RNA, 19 nt, Homo sapiens
  misc_RNA (1)...(19): siRNA sense strand
acauuaaccuguggaauau

SEQ ID NO: 706029 - RNA, 19 nt, Homo sapiens
  misc_RNA (1)...(19): siRNA sense strand
ucaaaggcaccacucgaua

SEQ ID NO: 706030 - RNA, 19 nt, Homo sapiens
  misc_RNA (1)...(19): siRNA sense strand
gaagaaggaaauuuagaag

SEQ ID NO: 706031 - RNA, 19 nt, Homo sapiens
  misc_RNA (1)...(19): siRNA sense strand
gguugucaguguaaauauu

SEQ ID NO: 706032 - RNA, 19 nt, Homo sapiens
  misc_RNA (1)...(19): siRNA sense strand
ggagucgguugaacagaau

SEQ ID NO: 706033 - RNA, 19 nt, Homo sapiens
  misc_RNA (1)...(19): siRNA sense strand
cuggaaaguucaacagauu

SEQ ID NO: 706034 - RNA, 19 nt, Homo sapiens
  misc_RNA (1)...(19): siRNA sense strand
ucagucagcaccuaacuuu

SEQ ID NO: 706035 - RNA, 19 nt, Homo sapiens
  misc_RNA (1)...(19): siRNA sense strand
ucucagucaugucaauuaa

SEQ ID NO: 706036 - RNA, 19 nt, Homo sapiens
  misc_RNA (1)...(19): siRNA sense strand
caaaggcaccacucgauau

SEQ ID NO: 706037 - RNA, 19 nt, Homo sapiens
  misc_RNA (1)...(19): siRNA sense strand
gugaucagguugucagugu

SEQ ID NO: 706038 - RNA, 19 nt, Homo sapiens
  misc_RNA (1)...(19): siRNA sense strand
gaacauuauggagaaguaa

SEQ ID NO: 706039 - RNA, 19 nt, Homo sapiens
  misc_RNA (1)...(19): siRNA sense strand
ccuggauaauggaauguua

SEQ ID NO: 706040 - RNA, 19 nt, Homo sapiens
  misc_RNA (1)...(19): siRNA sense strand
cagaacagguuagccauca

SEQ ID NO: 706041 - RNA, 19 nt, Homo sapiens
  misc_RNA (1)...(19): siRNA sense strand
ccugacaccaguaacauua

SEQ ID NO: 706042 - RNA, 19 nt, Homo sapiens
  misc_RNA (1)...(19): siRNA sense strand
cgagcaggaucacaguaaa

SEQ ID NO: 706043 - RNA, 19 nt, Homo sapiens
  misc_RNA (1)...(19): siRNA sense strand
gacgauauauggaagaaaa

SEQ ID NO: 706044 - RNA, 19 nt, Homo sapiens
  misc_RNA (1)...(19): siRNA sense strand
gaagcaaagaguagaggaa

SEQ ID NO: 706045 - RNA, 19 nt, Homo sapiens
  misc_RNA (1)...(19): siRNA sense strand
ggagaaguaaccaucagaa

SEQ ID NO: 706046 - RNA, 19 nt, Homo sapiens
  misc_RNA (1)...(19): siRNA sense strand
agaacauuauggagaagua

SEQ ID NO: 706047 - RNA, 19 nt, Homo sapiens
  misc_RNA (1)...(19): siRNA sense strand
ggaagucgauggaaauccu

SEQ ID NO: 706048 - RNA, 19 nt, Homo sapiens
  misc_RNA (1)...(19): siRNA sense strand
cuucagaugaugagucuua

SEQ ID NO: 706049 - RNA, 19 nt, Homo sapiens
  misc_RNA (1)...(19): siRNA sense strand
gcaccgagcccucuguaag

SEQ ID NO: 706050 - RNA, 19 nt, Homo sapiens
  misc_RNA (1)...(19): siRNA sense strand
gguuguaucgucagaauga

SEQ ID NO: 706051 - RNA, 19 nt, Homo sapiens
  misc_RNA (1)...(19): siRNA sense strand
gugcacaacuggccagagu

SEQ ID NO: 706052 - RNA, 19 nt, Homo sapiens
  misc_RNA (1)...(19): siRNA sense strand
cagguuccaugccaacaaa

SEQ ID NO: 706053 - RNA, 19 nt, Homo sapiens
  misc_RNA (1)...(19): siRNA sense strand
gauacugcuccaccuauuu

SEQ ID NO: 706054 - RNA, 19 nt, Homo sapiens
  misc_RNA (1)...(19): siRNA sense strand
cauuugcaguuucaggaua

SEQ ID NO: 706055 - RNA, 19 nt, Homo sapiens
  misc_RNA (1)...(19): siRNA sense strand
gcaaguucgucagagaaug

SEQ ID NO: 706056 - RNA, 19 nt, Homo sapiens
  misc_RNA (1)...(19): siRNA sense strand
aggagaagcugaagcagau

SEQ ID NO: 706057 - RNA, 19 nt, Homo sapiens
  misc_RNA (1)...(19): siRNA sense strand
uuacaggacucggaagaga

SEQ ID NO: 706058 - RNA, 19 nt, Homo sapiens
  misc_RNA (1)...(19): siRNA sense strand
caaagagaagccuggguuu

SEQ ID NO: 706059 - RNA, 19 nt, Homo sapiens
  misc_RNA (1)...(19): siRNA sense strand
ugaaugucaugcuuccaaa

SEQ ID NO: 706060 - RNA, 19 nt, Homo sapiens
  misc_RNA (1)...(19): siRNA sense strand
gacaagggauuccgcuuuu

SEQ ID NO: 706061 - RNA, 19 nt, Homo sapiens
  misc_RNA (1)...(19): siRNA sense strand
caaguucgucagagaauga

SEQ ID NO: 706062 - RNA, 19 nt, Homo sapiens
  misc_RNA (1)...(19): siRNA sense strand
ggcuaacuguguagauauu

SEQ ID NO: 706063 - RNA, 19 nt, Homo sapiens
  misc_RNA (1)...(19): siRNA sense strand
agaaggaaauuuagaagcu

SEQ ID NO: 706064 - RNA, 19 nt, Homo sapiens
  misc_RNA (1)...(19): siRNA sense strand
gcaagcagaucuacaacau

SEQ ID NO: 706065 - RNA, 19 nt, Homo sapiens
  misc_RNA (1)...(19): siRNA sense strand
gcucauagguggcaaguac

SEQ ID NO: 706066 - RNA, 19 nt, Homo sapiens
  misc_RNA (1)...(19): siRNA sense strand
ugaagaugcugcccaccua

SEQ ID NO: 706067 - RNA, 19 nt, Homo sapiens
  misc_RNA (1)...(19): siRNA sense strand
gagcagaagggaacaaugu

SEQ ID NO: 706068 - RNA, 19 nt, Homo sapiens
  misc_RNA (1)...(19): siRNA sense strand
ccacgaugaucuccugcua

SEQ ID NO: 706069 - RNA, 19 nt, Homo sapiens
  misc_RNA (1)...(19): siRNA sense strand
gaccggcacugcugagaug

SEQ ID NO: 706070 - RNA, 19 nt, Homo sapiens
  misc_RNA (1)...(19): siRNA sense strand
uggaggagaugcagaaugu

SEQ ID NO: 706071 - RNA, 19 nt, Homo sapiens
  misc_RNA (1)...(19): siRNA sense strand
gcacgaagacaucgauaag

SEQ ID NO: 706072 - RNA, 19 nt, Homo sapiens
  misc_RNA (1)...(19): siRNA sense strand
gggcuucaccuucuccuuu

SEQ ID NO: 706073 - RNA, 19 nt, Homo sapiens
  misc_RNA (1)...(19): siRNA sense strand
ugagacggaugcagaagga

SEQ ID NO: 706074 - RNA, 19 nt, Homo sapiens
  misc_RNA (1)...(19): siRNA sense strand
gaagaggccagugugaaga

SEQ ID NO: 706075 - RNA, 19 nt, Homo sapiens
  misc_RNA (1)...(19): siRNA sense strand
ucucggcgguggccuguaa

SEQ ID NO: 706076 - RNA, 19 nt, Homo sapiens
  misc_RNA (1)...(19): siRNA sense strand
gagaugcucuucgacuaca

SEQ ID NO: 706077 - RNA, 19 nt, Homo sapiens
  misc_RNA (1)...(19): siRNA sense strand
gaugaucuccugcuacuac

SEQ ID NO: 706078 - RNA, 19 nt, Homo sapiens
  misc_RNA (1)...(19): siRNA sense strand
gcacuaacuucagggugau

SEQ ID NO: 706079 - RNA, 19 nt, Homo sapiens
  misc_RNA (1)...(19): siRNA sense strand
gagcagauccuggcagagu

SEQ ID NO: 706080 - RNA, 19 nt, Homo sapiens
  misc_RNA (1)...(19): siRNA sense strand
gaagaccaaacaccagaug

SEQ ID NO: 706081 - RNA, 19 nt, Homo sapiens
  misc_RNA (1)...(19): siRNA sense strand
agaccaaacaccagaugua

SEQ ID NO: 706082 - RNA, 19 nt, Homo sapiens
  misc_RNA (1)...(19): siRNA sense strand
cugagaugcucuucgacua

SEQ ID NO: 706083 - RNA, 19 nt, Homo sapiens
  misc_RNA (1)...(19): siRNA sense strand
ggaccuggguggcacuaac

SEQ ID NO: 706084 - RNA, 19 nt, Homo sapiens
  misc_RNA (1)...(19): siRNA sense strand
aaauggaugugguggcaau

SEQ ID NO: 706085 - RNA, 19 nt, Homo sapiens
  misc_RNA (1)...(19): siRNA sense strand
gacgagagcucugcaaacc

SEQ ID NO: 706086 - RNA, 19 nt, Homo sapiens
  misc_RNA (1)...(19): siRNA sense strand
ccaaacaccagauguacuc

SEQ ID NO: 706087 - RNA, 19 nt, Homo sapiens
  misc_RNA (1)...(19): siRNA sense strand
gcugcgagaucaccuucau

SEQ ID NO: 706088 - RNA, 19 nt, Homo sapiens
  misc_RNA (1)...(19): siRNA sense strand
gaucuccugcuacuacgaa

SEQ ID NO: 706089 - RNA, 19 nt, Homo sapiens
  misc_RNA (1)...(19): siRNA sense strand
acgaguuccugcuggagua

SEQ ID NO: 706090 - RNA, 19 nt, Homo sapiens
  misc_RNA (1)...(19): siRNA sense strand
gcucuucgacuacaucucu

SEQ ID NO: 706091 - RNA, 19 nt, Homo sapiens
  misc_RNA (1)...(19): siRNA sense strand
cugcugagaugcucuucga

SEQ ID NO: 706092 - RNA, 19 nt, Homo sapiens
  misc_RNA (1)...(19): siRNA sense strand
ucagggugaugcuggugaa

SEQ ID NO: 706093 - RNA, 19 nt, Homo sapiens
  misc_RNA (1)...(19): siRNA sense strand
ggacgagagcucugcaaac

SEQ ID NO: 706094 - RNA, 19 nt, Homo sapiens
  misc_RNA (1)...(19): siRNA sense strand
ggcacgaagacaucgauaa

SEQ ID NO: 706095 - RNA, 19 nt, Homo sapiens
  misc_RNA (1)...(19): siRNA sense strand
gcagauccuggcagaguuc

SEQ ID NO: 706096 - RNA, 19 nt, Homo sapiens
  misc_RNA (1)...(19): siRNA sense strand
gggugaugcuggugaaggu

SEQ ID NO: 706097 - RNA, 19 nt, Homo sapiens
  misc_RNA (1)...(19): siRNA sense strand
ugaagaggccagugugaag

SEQ ID NO: 706098 - RNA, 19 nt, Homo sapiens
  misc_RNA (1)...(19): siRNA sense strand
guggauggcuccguguaca

SEQ ID NO: 706099 - RNA, 19 nt, Homo sapiens
  misc_RNA (1)...(19): siRNA sense strand
ugguggcaauggugaauga

SEQ ID NO: 706100 - RNA, 19 nt, Homo sapiens
  misc_RNA (1)...(19): siRNA sense strand
gagaggggacuuugaaaug

SEQ ID NO: 706101 - RNA, 19 nt, Homo sapiens
  misc_RNA (1)...(19): siRNA sense strand
gaccaaacaccagauguac

SEQ ID NO: 706102 - RNA, 19 nt, Homo sapiens
  misc_RNA (1)...(19): siRNA sense strand
gcaaugccugcuacaugga

SEQ ID NO: 706103 - RNA, 19 nt, Homo sapiens
  misc_RNA (1)...(19): siRNA sense strand
ggcuucaccuucuccuuuc

SEQ ID NO: 706104 - RNA, 19 nt, Homo sapiens
  misc_RNA (1)...(19): siRNA sense strand
gcacugcugagaugcucuu

SEQ ID NO: 706105 - RNA, 19 nt, Homo sapiens
  misc_RNA (1)...(19): siRNA sense strand
ggaugcagaaggagaugga

SEQ ID NO: 706106 - RNA, 19 nt, Homo sapiens
  misc_RNA (1)...(19): siRNA sense strand
ccgcagcgaggacguaaug

SEQ ID NO: 706107 - RNA, 19 nt, Homo sapiens
  misc_RNA (1)...(19): siRNA sense strand
caaggccucaggagcagaa

SEQ ID NO: 706108 - RNA, 19 nt, Homo sapiens
  misc_RNA (1)...(19): siRNA sense strand
ccuguaagaaggccuguau

SEQ ID NO: 706109 - RNA, 19 nt, Homo sapiens
  misc_RNA (1)...(19): siRNA sense strand
caugaagaggccaguguga

SEQ ID NO: 706110 - RNA, 19 nt, Homo sapiens
  misc_RNA (1)...(19): siRNA sense strand
ggagcagaagggaacaaug

SEQ ID NO: 706111 - RNA, 19 nt, Homo sapiens
  misc_RNA (1)...(19): siRNA sense strand
ggacguaaugcgcaucacu

SEQ ID NO: 706112 - RNA, 19 nt, Homo sapiens
  misc_RNA (1)...(19): siRNA sense strand
gaccaccgacugcgacauc

SEQ ID NO: 706113 - RNA, 19 nt, Homo sapiens
  misc_RNA (1)...(19): siRNA sense strand
ggaggaggaccugaagaag

SEQ ID NO: 706114 - RNA, 19 nt, Homo sapiens
  misc_RNA (1)...(19): siRNA sense strand
gcuggagacccaugaagag

SEQ ID NO: 706115 - RNA, 19 nt, Homo sapiens
  misc_RNA (1)...(19): siRNA sense strand
cugcaaugccugcuacaug

SEQ ID NO: 706116 - RNA, 19 nt, Homo sapiens
  misc_RNA (1)...(19): siRNA sense strand
ggcuggagacccaugaaga

SEQ ID NO: 706117 - RNA, 19 nt, Homo sapiens
  misc_RNA (1)...(19): siRNA sense strand
guaagaaggccuguaugcu

SEQ ID NO: 706118 - RNA, 19 nt, Homo sapiens
  misc_RNA (1)...(19): siRNA sense strand
acgaugaucuccugcuacu

SEQ ID NO: 706119 - RNA, 19 nt, Homo sapiens
  misc_RNA (1)...(19): siRNA sense strand
aggaggaggaccugaagaa

SEQ ID NO: 706120 - RNA, 19 nt, Homo sapiens
  misc_RNA (1)...(19): siRNA sense strand
ucugcgagacgcuaucaaa

SEQ ID NO: 706121 - RNA, 19 nt, Homo sapiens
  misc_RNA (1)...(19): siRNA sense strand
gcaagcagaucuacaacau

SEQ ID NO: 706122 - RNA, 19 nt, Homo sapiens
  misc_RNA (1)...(19): siRNA sense strand
gcucauagguggcaaguac

SEQ ID NO: 706123 - RNA, 19 nt, Homo sapiens
  misc_RNA (1)...(19): siRNA sense strand
ugaagaugcugcccaccua

SEQ ID NO: 706124 - RNA, 19 nt, Homo sapiens
  misc_RNA (1)...(19): siRNA sense strand
gagcagaagggaacaaugu

SEQ ID NO: 706125 - RNA, 19 nt, Homo sapiens
  misc_RNA (1)...(19): siRNA sense strand
ccacgaugaucuccugcua

SEQ ID NO: 706126 - RNA, 19 nt, Homo sapiens
  misc_RNA (1)...(19): siRNA sense strand
gaccggcacugcugagaug

SEQ ID NO: 706127 - RNA, 19 nt, Homo sapiens
  misc_RNA (1)...(19): siRNA sense strand
uggaggagaugcagaaugu

SEQ ID NO: 706128 - RNA, 19 nt, Homo sapiens
  misc_RNA (1)...(19): siRNA sense strand
gcacgaagacaucgauaag

SEQ ID NO: 706129 - RNA, 19 nt, Homo sapiens
  misc_RNA (1)...(19): siRNA sense strand
gggcuucaccuucuccuuu

SEQ ID NO: 706130 - RNA, 19 nt, Homo sapiens
  misc_RNA (1)...(19): siRNA sense strand
ugagacggaugcagaagga

SEQ ID NO: 706131 - RNA, 19 nt, Homo sapiens
  misc_RNA (1)...(19): siRNA sense strand
gaagaggccagugugaaga

SEQ ID NO: 706132 - RNA, 19 nt, Homo sapiens
  misc_RNA (1)...(19): siRNA sense strand
ucucggcgguggccuguaa

SEQ ID NO: 706133 - RNA, 19 nt, Homo sapiens
  misc_RNA (1)...(19): siRNA sense strand
gagaugcucuucgacuaca

SEQ ID NO: 706134 - RNA, 19 nt, Homo sapiens
  misc_RNA (1)...(19): siRNA sense strand
gaugaucuccugcuacuac

SEQ ID NO: 706135 - RNA, 19 nt, Homo sapiens
  misc_RNA (1)...(19): siRNA sense strand
gcacuaacuucagggugau

SEQ ID NO: 706136 - RNA, 19 nt, Homo sapiens
  misc_RNA (1)...(19): siRNA sense strand
gagcagauccuggcagagu

SEQ ID NO: 706137 - RNA, 19 nt, Homo sapiens
  misc_RNA (1)...(19): siRNA sense strand
gaagaccaaacaccagaug

SEQ ID NO: 706138 - RNA, 19 nt, Homo sapiens
  misc_RNA (1)...(19): siRNA sense strand
agaccaaacaccagaugua

SEQ ID NO: 706139 - RNA, 19 nt, Homo sapiens
  misc_RNA (1)...(19): siRNA sense strand
cugagaugcucuucgacua

SEQ ID NO: 706140 - RNA, 19 nt, Homo sapiens
  misc_RNA (1)...(19): siRNA sense strand
ggaccuggguggcacuaac

SEQ ID NO: 706141 - RNA, 19 nt, Homo sapiens
  misc_RNA (1)...(19): siRNA sense strand
aaauggaugugguggcaau

SEQ ID NO: 706142 - RNA, 19 nt, Homo sapiens
  misc_RNA (1)...(19): siRNA sense strand
gacgagagcucugcaaacc

SEQ ID NO: 706143 - RNA, 19 nt, Homo sapiens
  misc_RNA (1)...(19): siRNA sense strand
ccaaacaccagauguacuc

SEQ ID NO: 706144 - RNA, 19 nt, Homo sapiens
  misc_RNA (1)...(19): siRNA sense strand
gcugcgagaucaccuucau

SEQ ID NO: 706145 - RNA, 19 nt, Homo sapiens
  misc_RNA (1)...(19): siRNA sense strand
gaucuccugcuacuacgaa

SEQ ID NO: 706146 - RNA, 19 nt, Homo sapiens
  misc_RNA (1)...(19): siRNA sense strand
acgaguuccugcuggagua

SEQ ID NO: 706147 - RNA, 19 nt, Homo sapiens
  misc_RNA (1)...(19): siRNA sense strand
gcucuucgacuacaucucu

SEQ ID NO: 706148 - RNA, 19 nt, Homo sapiens
  misc_RNA (1)...(19): siRNA sense strand
cugcugagaugcucuucga

SEQ ID NO: 706149 - RNA, 19 nt, Homo sapiens
  misc_RNA (1)...(19): siRNA sense strand
ucagggugaugcuggugaa

SEQ ID NO: 706150 - RNA, 19 nt, Homo sapiens
  misc_RNA (1)...(19): siRNA sense strand
ggacgagagcucugcaaac

SEQ ID NO: 706151 - RNA, 19 nt, Homo sapiens
  misc_RNA (1)...(19): siRNA sense strand
ggcacgaagacaucgauaa

SEQ ID NO: 706152 - RNA, 19 nt, Homo sapiens
  misc_RNA (1)...(19): siRNA sense strand
gcagauccuggcagaguuc

SEQ ID NO: 706153 - RNA, 19 nt, Homo sapiens
  misc_RNA (1)...(19): siRNA sense strand
gggugaugcuggugaaggu

SEQ ID NO: 706154 - RNA, 19 nt, Homo sapiens
  misc_RNA (1)...(19): siRNA sense strand
ugaagaggccagugugaag

SEQ ID NO: 706155 - RNA, 19 nt, Homo sapiens
  misc_RNA (1)...(19): siRNA sense strand
guggauggcuccguguaca

SEQ ID NO: 706156 - RNA, 19 nt, Homo sapiens
  misc_RNA (1)...(19): siRNA sense strand
ugguggcaauggugaauga

SEQ ID NO: 706157 - RNA, 19 nt, Homo sapiens
  misc_RNA (1)...(19): siRNA sense strand
gagaggggacuuugaaaug

SEQ ID NO: 706158 - RNA, 19 nt, Homo sapiens
  misc_RNA (1)...(19): siRNA sense strand
gaccaaacaccagauguac

SEQ ID NO: 706159 - RNA, 19 nt, Homo sapiens
  misc_RNA (1)...(19): siRNA sense strand
gcaaugccugcuacaugga

SEQ ID NO: 706160 - RNA, 19 nt, Homo sapiens
  misc_RNA (1)...(19): siRNA sense strand
ggcuucaccuucuccuuuc

SEQ ID NO: 706161 - RNA, 19 nt, Homo sapiens
  misc_RNA (1)...(19): siRNA sense strand
gcacugcugagaugcucuu

SEQ ID NO: 706162 - RNA, 19 nt, Homo sapiens
  misc_RNA (1)...(19): siRNA sense strand
ggaugcagaaggagaugga

SEQ ID NO: 706163 - RNA, 19 nt, Homo sapiens
  misc_RNA (1)...(19): siRNA sense strand
ccgcagcgaggacguaaug

SEQ ID NO: 706164 - RNA, 19 nt, Homo sapiens
  misc_RNA (1)...(19): siRNA sense strand
caaggccucaggagcagaa

SEQ ID NO: 706165 - RNA, 19 nt, Homo sapiens
  misc_RNA (1)...(19): siRNA sense strand
ccuguaagaaggccuguau

SEQ ID NO: 706166 - RNA, 19 nt, Homo sapiens
  misc_RNA (1)...(19): siRNA sense strand
caugaagaggccaguguga

SEQ ID NO: 706167 - RNA, 19 nt, Homo sapiens
  misc_RNA (1)...(19): siRNA sense strand
ggagcagaagggaacaaug

SEQ ID NO: 706168 - RNA, 19 nt, Homo sapiens
  misc_RNA (1)...(19): siRNA sense strand
ggacguaaugcgcaucacu

SEQ ID NO: 706169 - RNA, 19 nt, Homo sapiens
  misc_RNA (1)...(19): siRNA sense strand
gaccaccgacugcgacauc

SEQ ID NO: 706170 - RNA, 19 nt, Homo sapiens
  misc_RNA (1)...(19): siRNA sense strand
ggaggaggaccugaagaag

SEQ ID NO: 706171 - RNA, 19 nt, Homo sapiens
  misc_RNA (1)...(19): siRNA sense strand
gcuggagacccaugaagag

SEQ ID NO: 706172 - RNA, 19 nt, Homo sapiens
  misc_RNA (1)...(19): siRNA sense strand
cugcaaugccugcuacaug

SEQ ID NO: 706173 - RNA, 19 nt, Homo sapiens
  misc_RNA (1)...(19): siRNA sense strand
ggcuggagacccaugaaga

SEQ ID NO: 706174 - RNA, 19 nt, Homo sapiens
  misc_RNA (1)...(19): siRNA sense strand
guaagaaggccuguaugcu

SEQ ID NO: 706175 - RNA, 19 nt, Homo sapiens
  misc_RNA (1)...(19): siRNA sense strand
acgaugaucuccugcuacu

SEQ ID NO: 706176 - RNA, 19 nt, Homo sapiens
  misc_RNA (1)...(19): siRNA sense strand
aggaggaggaccugaagaa

SEQ ID NO: 706177 - RNA, 19 nt, Homo sapiens
  misc_RNA (1)...(19): siRNA sense strand
ucugcgagacgcuaucaaa

SEQ ID NO: 706178 - RNA, 19 nt, Homo sapiens
  misc_RNA (1)...(19): siRNA sense strand
gcaagcagaucuacaacau

SEQ ID NO: 706179 - RNA, 19 nt, Homo sapiens
  misc_RNA (1)...(19): siRNA sense strand
gcucauagguggcaaguac

SEQ ID NO: 706180 - RNA, 19 nt, Homo sapiens
  misc_RNA (1)...(19): siRNA sense strand
ugaagaugcugcccaccua

SEQ ID NO: 706181 - RNA, 19 nt, Homo sapiens
  misc_RNA (1)...(19): siRNA sense strand
gagcagaagggaacaaugu

SEQ ID NO: 706182 - RNA, 19 nt, Homo sapiens
  misc_RNA (1)...(19): siRNA sense strand
ccacgaugaucuccugcua

SEQ ID NO: 706183 - RNA, 19 nt, Homo sapiens
  misc_RNA (1)...(19): siRNA sense strand
gaccggcacugcugagaug

SEQ ID NO: 706184 - RNA, 19 nt, Homo sapiens
  misc_RNA (1)...(19): siRNA sense strand
uggaggagaugcagaaugu

SEQ ID NO: 706185 - RNA, 19 nt, Homo sapiens
  misc_RNA (1)...(19): siRNA sense strand
gcacgaagacaucgauaag

SEQ ID NO: 706186 - RNA, 19 nt, Homo sapiens
  misc_RNA (1)...(19): siRNA sense strand
gggcuucaccuucuccuuu

SEQ ID NO: 706187 - RNA, 19 nt, Homo sapiens
  misc_RNA (1)...(19): siRNA sense strand
ugagacggaugcagaagga

SEQ ID NO: 706188 - RNA, 19 nt, Homo sapiens
  misc_RNA (1)...(19): siRNA sense strand
gaagaggccagugugaaga

SEQ ID NO: 706189 - RNA, 19 nt, Homo sapiens
  misc_RNA (1)...(19): siRNA sense strand
ucucggcgguggccuguaa

SEQ ID NO: 706190 - RNA, 19 nt, Homo sapiens
  misc_RNA (1)...(19): siRNA sense strand
gagaugcucuucgacuaca

SEQ ID NO: 706191 - RNA, 19 nt, Homo sapiens
  misc_RNA (1)...(19): siRNA sense strand
gaugaucuccugcuacuac

SEQ ID NO: 706192 - RNA, 19 nt, Homo sapiens
  misc_RNA (1)...(19): siRNA sense strand
gcacuaacuucagggugau

SEQ ID NO: 706193 - RNA, 19 nt, Homo sapiens
  misc_RNA (1)...(19): siRNA sense strand
gagcagauccuggcagagu

SEQ ID NO: 706194 - RNA, 19 nt, Homo sapiens
  misc_RNA (1)...(19): siRNA sense strand
gaagaccaaacaccagaug

SEQ ID NO: 706195 - RNA, 19 nt, Homo sapiens
  misc_RNA (1)...(19): siRNA sense strand
agaccaaacaccagaugua

SEQ ID NO: 706196 - RNA, 19 nt, Homo sapiens
  misc_RNA (1)...(19): siRNA sense strand
cugagaugcucuucgacua

SEQ ID NO: 706197 - RNA, 19 nt, Homo sapiens
  misc_RNA (1)...(19): siRNA sense strand
ggaccuggguggcacuaac

SEQ ID NO: 706198 - RNA, 19 nt, Homo sapiens
  misc_RNA (1)...(19): siRNA sense strand
aaauggaugugguggcaau

SEQ ID NO: 706199 - RNA, 19 nt, Homo sapiens
  misc_RNA (1)...(19): siRNA sense strand
gacgagagcucugcaaacc

SEQ ID NO: 706200 - RNA, 19 nt, Homo sapiens
  misc_RNA (1)...(19): siRNA sense strand
ccaaacaccagauguacuc

SEQ ID NO: 706201 - RNA, 19 nt, Homo sapiens
  misc_RNA (1)...(19): siRNA sense strand
gcugcgagaucaccuucau

SEQ ID NO: 706202 - RNA, 19 nt, Homo sapiens
  misc_RNA (1)...(19): siRNA sense strand
gaucuccugcuacuacgaa

SEQ ID NO: 706203 - RNA, 19 nt, Homo sapiens
  misc_RNA (1)...(19): siRNA sense strand
acgaguuccugcuggagua

SEQ ID NO: 706204 - RNA, 19 nt, Homo sapiens
  misc_RNA (1)...(19): siRNA sense strand
gcucuucgacuacaucucu

SEQ ID NO: 706205 - RNA, 19 nt, Homo sapiens
  misc_RNA (1)...(19): siRNA sense strand
cugcugagaugcucuucga

SEQ ID NO: 706206 - RNA, 19 nt, Homo sapiens
  misc_RNA (1)...(19): siRNA sense strand
ucagggugaugcuggugaa

SEQ ID NO: 706207 - RNA, 19 nt, Homo sapiens
  misc_RNA (1)...(19): siRNA sense strand
ggacgagagcucugcaaac

SEQ ID NO: 706208 - RNA, 19 nt, Homo sapiens
  misc_RNA (1)...(19): siRNA sense strand
ggcacgaagacaucgauaa

SEQ ID NO: 706209 - RNA, 19 nt, Homo sapiens
  misc_RNA (1)...(19): siRNA sense strand
gcagauccuggcagaguuc

SEQ ID NO: 706210 - RNA, 19 nt, Homo sapiens
  misc_RNA (1)...(19): siRNA sense strand
gggugaugcuggugaaggu

SEQ ID NO: 706211 - RNA, 19 nt, Homo sapiens
  misc_RNA (1)...(19): siRNA sense strand
ugaagaggccagugugaag

SEQ ID NO: 706212 - RNA, 19 nt, Homo sapiens
  misc_RNA (1)...(19): siRNA sense strand
guggauggcuccguguaca

SEQ ID NO: 706213 - RNA, 19 nt, Homo sapiens
  misc_RNA (1)...(19): siRNA sense strand
ugguggcaauggugaauga

SEQ ID NO: 706214 - RNA, 19 nt, Homo sapiens
  misc_RNA (1)...(19): siRNA sense strand
gagaggggacuuugaaaug

SEQ ID NO: 706215 - RNA, 19 nt, Homo sapiens
  misc_RNA (1)...(19): siRNA sense strand
gaccaaacaccagauguac

SEQ ID NO: 706216 - RNA, 19 nt, Homo sapiens
  misc_RNA (1)...(19): siRNA sense strand
gcaaugccugcuacaugga

SEQ ID NO: 706217 - RNA, 19 nt, Homo sapiens
  misc_RNA (1)...(19): siRNA sense strand
ggcuucaccuucuccuuuc

SEQ ID NO: 706218 - RNA, 19 nt, Homo sapiens
  misc_RNA (1)...(19): siRNA sense strand
gcacugcugagaugcucuu

SEQ ID NO: 706219 - RNA, 19 nt, Homo sapiens
  misc_RNA (1)...(19): siRNA sense strand
ggaugcagaaggagaugga

SEQ ID NO: 706220 - RNA, 19 nt, Homo sapiens
  misc_RNA (1)...(19): siRNA sense strand
ccgcagcgaggacguaaug

SEQ ID NO: 706221 - RNA, 19 nt, Homo sapiens
  misc_RNA (1)...(19): siRNA sense strand
caaggccucaggagcagaa

SEQ ID NO: 706222 - RNA, 19 nt, Homo sapiens
  misc_RNA (1)...(19): siRNA sense strand
ccuguaagaaggccuguau

SEQ ID NO: 706223 - RNA, 19 nt, Homo sapiens
  misc_RNA (1)...(19): siRNA sense strand
caugaagaggccaguguga

SEQ ID NO: 706224 - RNA, 19 nt, Homo sapiens
  misc_RNA (1)...(19): siRNA sense strand
ggagcagaagggaacaaug

SEQ ID NO: 706225 - RNA, 19 nt, Homo sapiens
  misc_RNA (1)...(19): siRNA sense strand
ggacguaaugcgcaucacu

SEQ ID NO: 706226 - RNA, 19 nt, Homo sapiens
  misc_RNA (1)...(19): siRNA sense strand
gaccaccgacugcgacauc

SEQ ID NO: 706227 - RNA, 19 nt, Homo sapiens
  misc_RNA (1)...(19): siRNA sense strand
ggaggaggaccugaagaag

SEQ ID NO: 706228 - RNA, 19 nt, Homo sapiens
  misc_RNA (1)...(19): siRNA sense strand
gcuggagacccaugaagag

SEQ ID NO: 706229 - RNA, 19 nt, Homo sapiens
  misc_RNA (1)...(19): siRNA sense strand
cugcaaugccugcuacaug

SEQ ID NO: 706230 - RNA, 19 nt, Homo sapiens
  misc_RNA (1)...(19): siRNA sense strand
ggcuggagacccaugaaga

SEQ ID NO: 706231 - RNA, 19 nt, Homo sapiens
  misc_RNA (1)...(19): siRNA sense strand
guaagaaggccuguaugcu

SEQ ID NO: 706232 - RNA, 19 nt, Homo sapiens
  misc_RNA (1)...(19): siRNA sense strand
acgaugaucuccugcuacu

SEQ ID NO: 706233 - RNA, 19 nt, Homo sapiens
  misc_RNA (1)...(19): siRNA sense strand
aggaggaggaccugaagaa

SEQ ID NO: 706234 - RNA, 19 nt, Homo sapiens
  misc_RNA (1)...(19): siRNA sense strand
ucugcgagacgcuaucaaa

SEQ ID NO: 706235 - RNA, 19 nt, Homo sapiens
  misc_RNA (1)...(19): siRNA sense strand
gcaagcagaucuacaacau

SEQ ID NO: 706236 - RNA, 19 nt, Homo sapiens
  misc_RNA (1)...(19): siRNA sense strand
gcucauagguggcaaguac

SEQ ID NO: 706237 - RNA, 19 nt, Homo sapiens
  misc_RNA (1)...(19): siRNA sense strand
ugaagaugcugcccaccua

SEQ ID NO: 706238 - RNA, 19 nt, Homo sapiens
  misc_RNA (1)...(19): siRNA sense strand
gagcagaagggaacaaugu

SEQ ID NO: 706239 - RNA, 19 nt, Homo sapiens
  misc_RNA (1)...(19): siRNA sense strand
ccacgaugaucuccugcua

SEQ ID NO: 706240 - RNA, 19 nt, Homo sapiens
  misc_RNA (1)...(19): siRNA sense strand
gaccggcacugcugagaug

SEQ ID NO: 706241 - RNA, 19 nt, Homo sapiens
  misc_RNA (1)...(19): siRNA sense strand
uggaggagaugcagaaugu

SEQ ID NO: 706242 - RNA, 19 nt, Homo sapiens
  misc_RNA (1)...(19): siRNA sense strand
gcacgaagacaucgauaag

SEQ ID NO: 706243 - RNA, 19 nt, Homo sapiens
  misc_RNA (1)...(19): siRNA sense strand
gggcuucaccuucuccuuu

SEQ ID NO: 706244 - RNA, 19 nt, Homo sapiens
  misc_RNA (1)...(19): siRNA sense strand
ugagacggaugcagaagga

SEQ ID NO: 706245 - RNA, 19 nt, Homo sapiens
  misc_RNA (1)...(19): siRNA sense strand
gaagaggccagugugaaga

SEQ ID NO: 706246 - RNA, 19 nt, Homo sapiens
  misc_RNA (1)...(19): siRNA sense strand
ucucggcgguggccuguaa

SEQ ID NO: 706247 - RNA, 19 nt, Homo sapiens
  misc_RNA (1)...(19): siRNA sense strand
gagaugcucuucgacuaca

SEQ ID NO: 706248 - RNA, 19 nt, Homo sapiens
  misc_RNA (1)...(19): siRNA sense strand
gaugaucuccugcuacuac

SEQ ID NO: 706249 - RNA, 19 nt, Homo sapiens
  misc_RNA (1)...(19): siRNA sense strand
gcacuaacuucagggugau

SEQ ID NO: 706250 - RNA, 19 nt, Homo sapiens
  misc_RNA (1)...(19): siRNA sense strand
gagcagauccuggcagagu

SEQ ID NO: 706251 - RNA, 19 nt, Homo sapiens
  misc_RNA (1)...(19): siRNA sense strand
gaagaccaaacaccagaug

SEQ ID NO: 706252 - RNA, 19 nt, Homo sapiens
  misc_RNA (1)...(19): siRNA sense strand
agaccaaacaccagaugua

SEQ ID NO: 706253 - RNA, 19 nt, Homo sapiens
  misc_RNA (1)...(19): siRNA sense strand
cugagaugcucuucgacua

SEQ ID NO: 706254 - RNA, 19 nt, Homo sapiens
  misc_RNA (1)...(19): siRNA sense strand
ggaccuggguggcacuaac

SEQ ID NO: 706255 - RNA, 19 nt, Homo sapiens
  misc_RNA (1)...(19): siRNA sense strand
aaauggaugugguggcaau

SEQ ID NO: 706256 - RNA, 19 nt, Homo sapiens
  misc_RNA (1)...(19): siRNA sense strand
gacgagagcucugcaaacc

SEQ ID NO: 706257 - RNA, 19 nt, Homo sapiens
  misc_RNA (1)...(19): siRNA sense strand
ccaaacaccagauguacuc

SEQ ID NO: 706258 - RNA, 19 nt, Homo sapiens
  misc_RNA (1)...(19): siRNA sense strand
gcugcgagaucaccuucau

SEQ ID NO: 706259 - RNA, 19 nt, Homo sapiens
  misc_RNA (1)...(19): siRNA sense strand
gaucuccugcuacuacgaa

SEQ ID NO: 706260 - RNA, 19 nt, Homo sapiens
  misc_RNA (1)...(19): siRNA sense strand
acgaguuccugcuggagua

SEQ ID NO: 706261 - RNA, 19 nt, Homo sapiens
  misc_RNA (1)...(19): siRNA sense strand
gcucuucgacuacaucucu

SEQ ID NO: 706262 - RNA, 19 nt, Homo sapiens
  misc_RNA (1)...(19): siRNA sense strand
cugcugagaugcucuucga

SEQ ID NO: 706263 - RNA, 19 nt, Homo sapiens
  misc_RNA (1)...(19): siRNA sense strand
ucagggugaugcuggugaa

SEQ ID NO: 706264 - RNA, 19 nt, Homo sapiens
  misc_RNA (1)...(19): siRNA sense strand
ggacgagagcucugcaaac

SEQ ID NO: 706265 - RNA, 19 nt, Homo sapiens
  misc_RNA (1)...(19): siRNA sense strand
ggcacgaagacaucgauaa

SEQ ID NO: 706266 - RNA, 19 nt, Homo sapiens
  misc_RNA (1)...(19): siRNA sense strand
gcagauccuggcagaguuc

SEQ ID NO: 706267 - RNA, 19 nt, Homo sapiens
  misc_RNA (1)...(19): siRNA sense strand
gggugaugcuggugaaggu

SEQ ID NO: 706268 - RNA, 19 nt, Homo sapiens
  misc_RNA (1)...(19): siRNA sense strand
ugaagaggccagugugaag

SEQ ID NO: 706269 - RNA, 19 nt, Homo sapiens
  misc_RNA (1)...(19): siRNA sense strand
guggauggcuccguguaca

SEQ ID NO: 706270 - RNA, 19 nt, Homo sapiens
  misc_RNA (1)...(19): siRNA sense strand
ugguggcaauggugaauga

SEQ ID NO: 706271 - RNA, 19 nt, Homo sapiens
  misc_RNA (1)...(19): siRNA sense strand
gagaggggacuuugaaaug

SEQ ID NO: 706272 - RNA, 19 nt, Homo sapiens
  misc_RNA (1)...(19): siRNA sense strand
gaccaaacaccagauguac

SEQ ID NO: 706273 - RNA, 19 nt, Homo sapiens
  misc_RNA (1)...(19): siRNA sense strand
gcaaugccugcuacaugga

SEQ ID NO: 706274 - RNA, 19 nt, Homo sapiens
  misc_RNA (1)...(19): siRNA sense strand
ggcuucaccuucuccuuuc

SEQ ID NO: 706275 - RNA, 19 nt, Homo sapiens
  misc_RNA (1)...(19): siRNA sense strand
gcacugcugagaugcucuu

SEQ ID NO: 706276 - RNA, 19 nt, Homo sapiens
  misc_RNA (1)...(19): siRNA sense strand
ggaugcagaaggagaugga

SEQ ID NO: 706277 - RNA, 19 nt, Homo sapiens
  misc_RNA (1)...(19): siRNA sense strand
ccgcagcgaggacguaaug

SEQ ID NO: 706278 - RNA, 19 nt, Homo sapiens
  misc_RNA (1)...(19): siRNA sense strand
caaggccucaggagcagaa

SEQ ID NO: 706279 - RNA, 19 nt, Homo sapiens
  misc_RNA (1)...(19): siRNA sense strand
ccuguaagaaggccuguau

SEQ ID NO: 706280 - RNA, 19 nt, Homo sapiens
  misc_RNA (1)...(19): siRNA sense strand
caugaagaggccaguguga

SEQ ID NO: 706281 - RNA, 19 nt, Homo sapiens
  misc_RNA (1)...(19): siRNA sense strand
ggagcagaagggaacaaug

SEQ ID NO: 706282 - RNA, 19 nt, Homo sapiens
  misc_RNA (1)...(19): siRNA sense strand
ggacguaaugcgcaucacu

SEQ ID NO: 706283 - RNA, 19 nt, Homo sapiens
  misc_RNA (1)...(19): siRNA sense strand
gaccaccgacugcgacauc

SEQ ID NO: 706284 - RNA, 19 nt, Homo sapiens
  misc_RNA (1)...(19): siRNA sense strand
ggaggaggaccugaagaag

SEQ ID NO: 706285 - RNA, 19 nt, Homo sapiens
  misc_RNA (1)...(19): siRNA sense strand
gcuggagacccaugaagag

SEQ ID NO: 706286 - RNA, 19 nt, Homo sapiens
  misc_RNA (1)...(19): siRNA sense strand
cugcaaugccugcuacaug

SEQ ID NO: 706287 - RNA, 19 nt, Homo sapiens
  misc_RNA (1)...(19): siRNA sense strand
ggcuggagacccaugaaga

SEQ ID NO: 706288 - RNA, 19 nt, Homo sapiens
  misc_RNA (1)...(19): siRNA sense strand
guaagaaggccuguaugcu

SEQ ID NO: 706289 - RNA, 19 nt, Homo sapiens
  misc_RNA (1)...(19): siRNA sense strand
acgaugaucuccugcuacu

SEQ ID NO: 706290 - RNA, 19 nt, Homo sapiens
  misc_RNA (1)...(19): siRNA sense strand
aggaggaggaccugaagaa

SEQ ID NO: 706291 - RNA, 19 nt, Homo sapiens
  misc_RNA (1)...(19): siRNA sense strand
ucugcgagacgcuaucaaa

SEQ ID NO: 706292 - RNA, 19 nt, Homo sapiens
  misc_RNA (1)...(19): siRNA sense strand
gcaagcagaucuacaacau

SEQ ID NO: 706293 - RNA, 19 nt, Homo sapiens
  misc_RNA (1)...(19): siRNA sense strand
gcucauagguggcaaguac

SEQ ID NO: 706294 - RNA, 19 nt, Homo sapiens
  misc_RNA (1)...(19): siRNA sense strand
ugaagaugcugcccaccua

SEQ ID NO: 706295 - RNA, 19 nt, Homo sapiens
  misc_RNA (1)...(19): siRNA sense strand
gagcagaagggaacaaugu

SEQ ID NO: 706296 - RNA, 19 nt, Homo sapiens
  misc_RNA (1)...(19): siRNA sense strand
ccacgaugaucuccugcua

SEQ ID NO: 706297 - RNA, 19 nt, Homo sapiens
  misc_RNA (1)...(19): siRNA sense strand
gaccggcacugcugagaug

SEQ ID NO: 706298 - RNA, 19 nt, Homo sapiens
  misc_RNA (1)...(19): siRNA sense strand
uggaggagaugcagaaugu

SEQ ID NO: 706299 - RNA, 19 nt, Homo sapiens
  misc_RNA (1)...(19): siRNA sense strand
gcacgaagacaucgauaag

SEQ ID NO: 706300 - RNA, 19 nt, Homo sapiens
  misc_RNA (1)...(19): siRNA sense strand
gggcuucaccuucuccuuu

SEQ ID NO: 706301 - RNA, 19 nt, Homo sapiens
  misc_RNA (1)...(19): siRNA sense strand
ugagacggaugcagaagga

SEQ ID NO: 706302 - RNA, 19 nt, Homo sapiens
  misc_RNA (1)...(19): siRNA sense strand
gaagaggccagugugaaga

SEQ ID NO: 706303 - RNA, 19 nt, Homo sapiens
  misc_RNA (1)...(19): siRNA sense strand
ucucggcgguggccuguaa

SEQ ID NO: 706304 - RNA, 19 nt, Homo sapiens
  misc_RNA (1)...(19): siRNA sense strand
gagaugcucuucgacuaca

SEQ ID NO: 706305 - RNA, 19 nt, Homo sapiens
  misc_RNA (1)...(19): siRNA sense strand
gaugaucuccugcuacuac

SEQ ID NO: 706306 - RNA, 19 nt, Homo sapiens
  misc_RNA (1)...(19): siRNA sense strand
gcacuaacuucagggugau

SEQ ID NO: 706307 - RNA, 19 nt, Homo sapiens
  misc_RNA (1)...(19): siRNA sense strand
gagcagauccuggcagagu

SEQ ID NO: 706308 - RNA, 19 nt, Homo sapiens
  misc_RNA (1)...(19): siRNA sense strand
gaagaccaaacaccagaug

SEQ ID NO: 706309 - RNA, 19 nt, Homo sapiens
  misc_RNA (1)...(19): siRNA sense strand
agaccaaacaccagaugua

SEQ ID NO: 706310 - RNA, 19 nt, Homo sapiens
  misc_RNA (1)...(19): siRNA sense strand
cugagaugcucuucgacua

SEQ ID NO: 706311 - RNA, 19 nt, Homo sapiens
  misc_RNA (1)...(19): siRNA sense strand
ggaccuggguggcacuaac

SEQ ID NO: 706312 - RNA, 19 nt, Homo sapiens
  misc_RNA (1)...(19): siRNA sense strand
aaauggaugugguggcaau

SEQ ID NO: 706313 - RNA, 19 nt, Homo sapiens
  misc_RNA (1)...(19): siRNA sense strand
gacgagagcucugcaaacc

SEQ ID NO: 706314 - RNA, 19 nt, Homo sapiens
  misc_RNA (1)...(19): siRNA sense strand
ccaaacaccagauguacuc

SEQ ID NO: 706315 - RNA, 19 nt, Homo sapiens
  misc_RNA (1)...(19): siRNA sense strand
gcugcgagaucaccuucau

SEQ ID NO: 706316 - RNA, 19 nt, Homo sapiens
  misc_RNA (1)...(19): siRNA sense strand
gaucuccugcuacuacgaa

SEQ ID NO: 706317 - RNA, 19 nt, Homo sapiens
  misc_RNA (1)...(19): siRNA sense strand
acgaguuccugcuggagua

SEQ ID NO: 706318 - RNA, 19 nt, Homo sapiens
  misc_RNA (1)...(19): siRNA sense strand
gcucuucgacuacaucucu

SEQ ID NO: 706319 - RNA, 19 nt, Homo sapiens
  misc_RNA (1)...(19): siRNA sense strand
cugcugagaugcucuucga

SEQ ID NO: 706320 - RNA, 19 nt, Homo sapiens
  misc_RNA (1)...(19): siRNA sense strand
ucagggugaugcuggugaa

SEQ ID NO: 706321 - RNA, 19 nt, Homo sapiens
  misc_RNA (1)...(19): siRNA sense strand
ggacgagagcucugcaaac

SEQ ID NO: 706322 - RNA, 19 nt, Homo sapiens
  misc_RNA (1)...(19): siRNA sense strand
ggcacgaagacaucgauaa

SEQ ID NO: 706323 - RNA, 19 nt, Homo sapiens
  misc_RNA (1)...(19): siRNA sense strand
gcagauccuggcagaguuc

SEQ ID NO: 706324 - RNA, 19 nt, Homo sapiens
  misc_RNA (1)...(19): siRNA sense strand
gggugaugcuggugaaggu

SEQ ID NO: 706325 - RNA, 19 nt, Homo sapiens
  misc_RNA (1)...(19): siRNA sense strand
ugaagaggccagugugaag

SEQ ID NO: 706326 - RNA, 19 nt, Homo sapiens
  misc_RNA (1)...(19): siRNA sense strand
guggauggcuccguguaca

SEQ ID NO: 706327 - RNA, 19 nt, Homo sapiens
  misc_RNA (1)...(19): siRNA sense strand
ugguggcaauggugaauga

SEQ ID NO: 706328 - RNA, 19 nt, Homo sapiens
  misc_RNA (1)...(19): siRNA sense strand
gagaggggacuuugaaaug

SEQ ID NO: 706329 - RNA, 19 nt, Homo sapiens
  misc_RNA (1)...(19): siRNA sense strand
gaccaaacaccagauguac

SEQ ID NO: 706330 - RNA, 19 nt, Homo sapiens
  misc_RNA (1)...(19): siRNA sense strand
gcaaugccugcuacaugga

SEQ ID NO: 706331 - RNA, 19 nt, Homo sapiens
  misc_RNA (1)...(19): siRNA sense strand
ggcuucaccuucuccuuuc

SEQ ID NO: 706332 - RNA, 19 nt, Homo sapiens
  misc_RNA (1)...(19): siRNA sense strand
gcacugcugagaugcucuu

SEQ ID NO: 706333 - RNA, 19 nt, Homo sapiens
  misc_RNA (1)...(19): siRNA sense strand
ggaugcagaaggagaugga

SEQ ID NO: 706334 - RNA, 19 nt, Homo sapiens
  misc_RNA (1)...(19): siRNA sense strand
ccgcagcgaggacguaaug

SEQ ID NO: 706335 - RNA, 19 nt, Homo sapiens
  misc_RNA (1)...(19): siRNA sense strand
caaggccucaggagcagaa

SEQ ID NO: 706336 - RNA, 19 nt, Homo sapiens
  misc_RNA (1)...(19): siRNA sense strand
ccuguaagaaggccuguau

SEQ ID NO: 706337 - RNA, 19 nt, Homo sapiens
  misc_RNA (1)...(19): siRNA sense strand
caugaagaggccaguguga

SEQ ID NO: 706338 - RNA, 19 nt, Homo sapiens
  misc_RNA (1)...(19): siRNA sense strand
ggagcagaagggaacaaug

SEQ ID NO: 706339 - RNA, 19 nt, Homo sapiens
  misc_RNA (1)...(19): siRNA sense strand
ggacguaaugcgcaucacu

SEQ ID NO: 706340 - RNA, 19 nt, Homo sapiens
  misc_RNA (1)...(19): siRNA sense strand
gaccaccgacugcgacauc

SEQ ID NO: 706341 - RNA, 19 nt, Homo sapiens
  misc_RNA (1)...(19): siRNA sense strand
ggaggaggaccugaagaag

SEQ ID NO: 706342 - RNA, 19 nt, Homo sapiens
  misc_RNA (1)...(19): siRNA sense strand
gcuggagacccaugaagag

SEQ ID NO: 706343 - RNA, 19 nt, Homo sapiens
  misc_RNA (1)...(19): siRNA sense strand
cugcaaugccugcuacaug

SEQ ID NO: 706344 - RNA, 19 nt, Homo sapiens
  misc_RNA (1)...(19): siRNA sense strand
ggcuggagacccaugaaga

SEQ ID NO: 706345 - RNA, 19 nt, Homo sapiens
  misc_RNA (1)...(19): siRNA sense strand
guaagaaggccuguaugcu

SEQ ID NO: 706346 - RNA, 19 nt, Homo sapiens
  misc_RNA (1)...(19): siRNA sense strand
acgaugaucuccugcuacu

SEQ ID NO: 706347 - RNA, 19 nt, Homo sapiens
  misc_RNA (1)...(19): siRNA sense strand
aggaggaggaccugaagaa

SEQ ID NO: 706348 - RNA, 19 nt, Homo sapiens
  misc_RNA (1)...(19): siRNA sense strand
ucugcgagacgcuaucaaa

SEQ ID NO: 706349 - RNA, 19 nt, Homo sapiens
  misc_RNA (1)...(19): siRNA sense strand
gcaagcagaucuacaacau

SEQ ID NO: 706350 - RNA, 19 nt, Homo sapiens
  misc_RNA (1)...(19): siRNA sense strand
gcucauagguggcaaguac

SEQ ID NO: 706351 - RNA, 19 nt, Homo sapiens
  misc_RNA (1)...(19): siRNA sense strand
ugaagaugcugcccaccua

SEQ ID NO: 706352 - RNA, 19 nt, Homo sapiens
  misc_RNA (1)...(19): siRNA sense strand
gagcagaagggaacaaugu

SEQ ID NO: 706353 - RNA, 19 nt, Homo sapiens
  misc_RNA (1)...(19): siRNA sense strand
ccacgaugaucuccugcua

SEQ ID NO: 706354 - RNA, 19 nt, Homo sapiens
  misc_RNA (1)...(19): siRNA sense strand
gaccggcacugcugagaug

SEQ ID NO: 706355 - RNA, 19 nt, Homo sapiens
  misc_RNA (1)...(19): siRNA sense strand
uggaggagaugcagaaugu

SEQ ID NO: 706356 - RNA, 19 nt, Homo sapiens
  misc_RNA (1)...(19): siRNA sense strand
gcacgaagacaucgauaag

SEQ ID NO: 706357 - RNA, 19 nt, Homo sapiens
  misc_RNA (1)...(19): siRNA sense strand
gggcuucaccuucuccuuu

SEQ ID NO: 706358 - RNA, 19 nt, Homo sapiens
  misc_RNA (1)...(19): siRNA sense strand
ugagacggaugcagaagga

SEQ ID NO: 706359 - RNA, 19 nt, Homo sapiens
  misc_RNA (1)...(19): siRNA sense strand
gaagaggccagugugaaga

SEQ ID NO: 706360 - RNA, 19 nt, Homo sapiens
  misc_RNA (1)...(19): siRNA sense strand
ucucggcgguggccuguaa

SEQ ID NO: 706361 - RNA, 19 nt, Homo sapiens
  misc_RNA (1)...(19): siRNA sense strand
gagaugcucuucgacuaca

SEQ ID NO: 706362 - RNA, 19 nt, Homo sapiens
  misc_RNA (1)...(19): siRNA sense strand
gaugaucuccugcuacuac

SEQ ID NO: 706363 - RNA, 19 nt, Homo sapiens
  misc_RNA (1)...(19): siRNA sense strand
gcacuaacuucagggugau

SEQ ID NO: 706364 - RNA, 19 nt, Homo sapiens
  misc_RNA (1)...(19): siRNA sense strand
gagcagauccuggcagagu

SEQ ID NO: 706365 - RNA, 19 nt, Homo sapiens
  misc_RNA (1)...(19): siRNA sense strand
gaagaccaaacaccagaug

SEQ ID NO: 706366 - RNA, 19 nt, Homo sapiens
  misc_RNA (1)...(19): siRNA sense strand
agaccaaacaccagaugua

SEQ ID NO: 706367 - RNA, 19 nt, Homo sapiens
  misc_RNA (1)...(19): siRNA sense strand
cugagaugcucuucgacua

SEQ ID NO: 706368 - RNA, 19 nt, Homo sapiens
  misc_RNA (1)...(19): siRNA sense strand
ggaccuggguggcacuaac

SEQ ID NO: 706369 - RNA, 19 nt, Homo sapiens
  misc_RNA (1)...(19): siRNA sense strand
aaauggaugugguggcaau

SEQ ID NO: 706370 - RNA, 19 nt, Homo sapiens
  misc_RNA (1)...(19): siRNA sense strand
gacgagagcucugcaaacc

SEQ ID NO: 706371 - RNA, 19 nt, Homo sapiens
  misc_RNA (1)...(19): siRNA sense strand
ccaaacaccagauguacuc

SEQ ID NO: 706372 - RNA, 19 nt, Homo sapiens
  misc_RNA (1)...(19): siRNA sense strand
gcugcgagaucaccuucau

SEQ ID NO: 706373 - RNA, 19 nt, Homo sapiens
  misc_RNA (1)...(19): siRNA sense strand
gaucuccugcuacuacgaa

SEQ ID NO: 706374 - RNA, 19 nt, Homo sapiens
  misc_RNA (1)...(19): siRNA sense strand
acgaguuccugcuggagua

SEQ ID NO: 706375 - RNA, 19 nt, Homo sapiens
  misc_RNA (1)...(19): siRNA sense strand
gcucuucgacuacaucucu

SEQ ID NO: 706376 - RNA, 19 nt, Homo sapiens
  misc_RNA (1)...(19): siRNA sense strand
cugcugagaugcucuucga

SEQ ID NO: 706377 - RNA, 19 nt, Homo sapiens
  misc_RNA (1)...(19): siRNA sense strand
ucagggugaugcuggugaa

SEQ ID NO: 706378 - RNA, 19 nt, Homo sapiens
  misc_RNA (1)...(19): siRNA sense strand
ggacgagagcucugcaaac

SEQ ID NO: 706379 - RNA, 19 nt, Homo sapiens
  misc_RNA (1)...(19): siRNA sense strand
ggcacgaagacaucgauaa

SEQ ID NO: 706380 - RNA, 19 nt, Homo sapiens
  misc_RNA (1)...(19): siRNA sense strand
gcagauccuggcagaguuc

SEQ ID NO: 706381 - RNA, 19 nt, Homo sapiens
  misc_RNA (1)...(19): siRNA sense strand
gggugaugcuggugaaggu

SEQ ID NO: 706382 - RNA, 19 nt, Homo sapiens
  misc_RNA (1)...(19): siRNA sense strand
ugaagaggccagugugaag

SEQ ID NO: 706383 - RNA, 19 nt, Homo sapiens
  misc_RNA (1)...(19): siRNA sense strand
guggauggcuccguguaca

SEQ ID NO: 706384 - RNA, 19 nt, Homo sapiens
  misc_RNA (1)...(19): siRNA sense strand
ugguggcaauggugaauga

SEQ ID NO: 706385 - RNA, 19 nt, Homo sapiens
  misc_RNA (1)...(19): siRNA sense strand
gagaggggacuuugaaaug

SEQ ID NO: 706386 - RNA, 19 nt, Homo sapiens
  misc_RNA (1)...(19): siRNA sense strand
gaccaaacaccagauguac

SEQ ID NO: 706387 - RNA, 19 nt, Homo sapiens
  misc_RNA (1)...(19): siRNA sense strand
gcaaugccugcuacaugga

SEQ ID NO: 706388 - RNA, 19 nt, Homo sapiens
  misc_RNA (1)...(19): siRNA sense strand
ggcuucaccuucuccuuuc

SEQ ID NO: 706389 - RNA, 19 nt, Homo sapiens
  misc_RNA (1)...(19): siRNA sense strand
gcacugcugagaugcucuu

SEQ ID NO: 706390 - RNA, 19 nt, Homo sapiens
  misc_RNA (1)...(19): siRNA sense strand
ggaugcagaaggagaugga

SEQ ID NO: 706391 - RNA, 19 nt, Homo sapiens
  misc_RNA (1)...(19): siRNA sense strand
ccgcagcgaggacguaaug

SEQ ID NO: 706392 - RNA, 19 nt, Homo sapiens
  misc_RNA (1)...(19): siRNA sense strand
caaggccucaggagcagaa

SEQ ID NO: 706393 - RNA, 19 nt, Homo sapiens
  misc_RNA (1)...(19): siRNA sense strand
ccuguaagaaggccuguau

SEQ ID NO: 706394 - RNA, 19 nt, Homo sapiens
  misc_RNA (1)...(19): siRNA sense strand
caugaagaggccaguguga

SEQ ID NO: 706395 - RNA, 19 nt, Homo sapiens
  misc_RNA (1)...(19): siRNA sense strand
ggagcagaagggaacaaug

SEQ ID NO: 706396 - RNA, 19 nt, Homo sapiens
  misc_RNA (1)...(19): siRNA sense strand
ggacguaaugcgcaucacu

SEQ ID NO: 706397 - RNA, 19 nt, Homo sapiens
  misc_RNA (1)...(19): siRNA sense strand
gaccaccgacugcgacauc

SEQ ID NO: 706398 - RNA, 19 nt, Homo sapiens
  misc_RNA (1)...(19): siRNA sense strand
ggaggaggaccugaagaag

SEQ ID NO: 706399 - RNA, 19 nt, Homo sapiens
  misc_RNA (1)...(19): siRNA sense strand
gcuggagacccaugaagag

SEQ ID NO: 706400 - RNA, 19 nt, Homo sapiens
  misc_RNA (1)...(19): siRNA sense strand
cugcaaugccugcuacaug

SEQ ID NO: 706401 - RNA, 19 nt, Homo sapiens
  misc_RNA (1)...(19): siRNA sense strand
ggcuggagacccaugaaga

SEQ ID NO: 706402 - RNA, 19 nt, Homo sapiens
  misc_RNA (1)...(19): siRNA sense strand
guaagaaggccuguaugcu

SEQ ID NO: 706403 - RNA, 19 nt, Homo sapiens
  misc_RNA (1)...(19): siRNA sense strand
acgaugaucuccugcuacu

SEQ ID NO: 706404 - RNA, 19 nt, Homo sapiens
  misc_RNA (1)...(19): siRNA sense strand
aggaggaggaccugaagaa

SEQ ID NO: 706405 - RNA, 19 nt, Homo sapiens
  misc_RNA (1)...(19): siRNA sense strand
ucugcgagacgcuaucaaa

SEQ ID NO: 706406 - RNA, 19 nt, Homo sapiens
  misc_RNA (1)...(19): siRNA sense strand
ggaagcaguuugagaagua

SEQ ID NO: 706407 - RNA, 19 nt, Homo sapiens
  misc_RNA (1)...(19): siRNA sense strand
uaacugaggaggagaaaua

SEQ ID NO: 706408 - RNA, 19 nt, Homo sapiens
  misc_RNA (1)...(19): siRNA sense strand
gaugauaggaggaaacaaa

SEQ ID NO: 706409 - RNA, 19 nt, Homo sapiens
  misc_RNA (1)...(19): siRNA sense strand
ccagaucccucaugauuca

SEQ ID NO: 706410 - RNA, 19 nt, Homo sapiens
  misc_RNA (1)...(19): siRNA sense strand
gauaggaggaaacaaagua

SEQ ID NO: 706411 - RNA, 19 nt, Homo sapiens
  misc_RNA (1)...(19): siRNA sense strand
caaguucuguguuugaaga

SEQ ID NO: 706412 - RNA, 19 nt, Homo sapiens
  misc_RNA (1)...(19): siRNA sense strand
ggacacugaugccggagaa

SEQ ID NO: 706413 - RNA, 19 nt, Homo sapiens
  misc_RNA (1)...(19): siRNA sense strand
cggagaagcugucacacaa

SEQ ID NO: 706414 - RNA, 19 nt, Homo sapiens
  misc_RNA (1)...(19): siRNA sense strand
ggccagaucccucaugauu

SEQ ID NO: 706415 - RNA, 19 nt, Homo sapiens
  misc_RNA (1)...(19): siRNA sense strand
caagaagacucagcucauc

SEQ ID NO: 706416 - RNA, 19 nt, Homo sapiens
  misc_RNA (1)...(19): siRNA sense strand
gaagacccagucaucagua

SEQ ID NO: 706417 - RNA, 19 nt, Homo sapiens
  misc_RNA (1)...(19): siRNA sense strand
aaaggaagcaguuugagaa

SEQ ID NO: 706418 - RNA, 19 nt, Homo sapiens
  misc_RNA (1)...(19): siRNA sense strand
gccaugaaguggaugauca

SEQ ID NO: 706419 - RNA, 19 nt, Homo sapiens
  misc_RNA (1)...(19): siRNA sense strand
uaaauucaccaacaugaug

SEQ ID NO: 706420 - RNA, 19 nt, Homo sapiens
  misc_RNA (1)...(19): siRNA sense strand
agacucagcucaucaaagc

SEQ ID NO: 706421 - RNA, 19 nt, Homo sapiens
  misc_RNA (1)...(19): siRNA sense strand
gcuauaguccugaauucaa

SEQ ID NO: 706422 - RNA, 19 nt, Homo sapiens
  misc_RNA (1)...(19): siRNA sense strand
ucaccaacaugaugaugau

SEQ ID NO: 706423 - RNA, 19 nt, Homo sapiens
  misc_RNA (1)...(19): siRNA sense strand
acaaaguacuggccagauc

SEQ ID NO: 706424 - RNA, 19 nt, Homo sapiens
  misc_RNA (1)...(19): siRNA sense strand
ggaacaggcaaccaucgaa

SEQ ID NO: 706425 - RNA, 19 nt, Homo sapiens
  misc_RNA (1)...(19): siRNA sense strand
gaagacucagcucaucaaa

SEQ ID NO: 706426 - RNA, 19 nt, Homo sapiens
  misc_RNA (1)...(19): siRNA sense strand
caagggaggccguuucuac

SEQ ID NO: 706427 - RNA, 19 nt, Homo sapiens
  misc_RNA (1)...(19): siRNA sense strand
ucaguaaauucaccaacau

SEQ ID NO: 706428 - RNA, 19 nt, Homo sapiens
  misc_RNA (1)...(19): siRNA sense strand
ggaagcaugacuugcacaa

SEQ ID NO: 706429 - RNA, 19 nt, Homo sapiens
  misc_RNA (1)...(19): siRNA sense strand
ccagucaucaguaaauuca

SEQ ID NO: 706430 - RNA, 19 nt, Homo sapiens
  misc_RNA (1)...(19): siRNA sense strand
guaaauucaccaacaugau

SEQ ID NO: 706431 - RNA, 19 nt, Homo sapiens
  misc_RNA (1)...(19): siRNA sense strand
aaacugugagccuaugauu

SEQ ID NO: 706432 - RNA, 19 nt, Homo sapiens
  misc_RNA (1)...(19): siRNA sense strand
ccgcuauaguccugaauuc

SEQ ID NO: 706433 - RNA, 19 nt, Homo sapiens
  misc_RNA (1)...(19): siRNA sense strand
gagccgcuauaguccugaa

SEQ ID NO: 706434 - RNA, 19 nt, Homo sapiens
  misc_RNA (1)...(19): siRNA sense strand
gaagcaguuugagaaguac

SEQ ID NO: 706435 - RNA, 19 nt, Homo sapiens
  misc_RNA (1)...(19): siRNA sense strand
aagacccagucaucaguaa

SEQ ID NO: 706436 - RNA, 19 nt, Homo sapiens
  misc_RNA (1)...(19): siRNA sense strand
cuauaguccugaauucaag

SEQ ID NO: 706437 - RNA, 19 nt, Homo sapiens
  misc_RNA (1)...(19): siRNA sense strand
gacccagucaucaguaaau

SEQ ID NO: 706438 - RNA, 19 nt, Homo sapiens
  misc_RNA (1)...(19): siRNA sense strand
ccaacaugaugaugauagg

SEQ ID NO: 706439 - RNA, 19 nt, Homo sapiens
  misc_RNA (1)...(19): siRNA sense strand
ucaagaagacucagcucau

SEQ ID NO: 706440 - RNA, 19 nt, Homo sapiens
  misc_RNA (1)...(19): siRNA sense strand
gagauggagccgcuauagu

SEQ ID NO: 706441 - RNA, 19 nt, Homo sapiens
  misc_RNA (1)...(19): siRNA sense strand
ccuacaccaucuuccauca

SEQ ID NO: 706442 - RNA, 19 nt, Homo sapiens
  misc_RNA (1)...(19): siRNA sense strand
gaggaggagaaauauguuc

SEQ ID NO: 706443 - RNA, 19 nt, Homo sapiens
  misc_RNA (1)...(19): siRNA sense strand
ucaagaggaagcaugacuu

SEQ ID NO: 706444 - RNA, 19 nt, Homo sapiens
  misc_RNA (1)...(19): siRNA sense strand
agauggagccgcuauaguc

SEQ ID NO: 706445 - RNA, 19 nt, Homo sapiens
  misc_RNA (1)...(19): siRNA sense strand
cugaggaggagaaauaugu

SEQ ID NO: 706446 - RNA, 19 nt, Homo sapiens
  misc_RNA (1)...(19): siRNA sense strand
ugaucaagaggaagcauga

SEQ ID NO: 706447 - RNA, 19 nt, Homo sapiens
  misc_RNA (1)...(19): siRNA sense strand
aaauucaccaacaugauga

SEQ ID NO: 706448 - RNA, 19 nt, Homo sapiens
  misc_RNA (1)...(19): siRNA sense strand
uacaccaucuuccaucaag

SEQ ID NO: 706449 - RNA, 19 nt, Homo sapiens
  misc_RNA (1)...(19): siRNA sense strand
agaagacucagcucaucaa

SEQ ID NO: 706450 - RNA, 19 nt, Homo sapiens
  misc_RNA (1)...(19): siRNA sense strand
agaggaagcaugacuugca

SEQ ID NO: 706451 - RNA, 19 nt, Homo sapiens
  misc_RNA (1)...(19): siRNA sense strand
ggagaagcugucacacaag

SEQ ID NO: 706452 - RNA, 19 nt, Homo sapiens
  misc_RNA (1)...(19): siRNA sense strand
ugaagacccagucaucagu

SEQ ID NO: 706453 - RNA, 19 nt, Homo sapiens
  misc_RNA (1)...(19): siRNA sense strand
aguaaauucaccaacauga

SEQ ID NO: 706454 - RNA, 19 nt, Homo sapiens
  misc_RNA (1)...(19): siRNA sense strand
guucgggagcucaagaaga

SEQ ID NO: 706455 - RNA, 19 nt, Homo sapiens
  misc_RNA (1)...(19): siRNA sense strand
gcugguacccauccucaag

SEQ ID NO: 706456 - RNA, 19 nt, Homo sapiens
  misc_RNA (1)...(19): siRNA sense strand
ugaaaaggaagcaguuuga

SEQ ID NO: 706457 - RNA, 19 nt, Homo sapiens
  misc_RNA (1)...(19): siRNA sense strand
cuggccagaucccucauga

SEQ ID NO: 706458 - RNA, 19 nt, Homo sapiens
  misc_RNA (1)...(19): siRNA sense strand
gccagaucccucaugauuc

SEQ ID NO: 706459 - RNA, 19 nt, Homo sapiens
  misc_RNA (1)...(19): siRNA sense strand
guaaagcacuguccacuug

SEQ ID NO: 706460 - RNA, 19 nt, Homo sapiens
  misc_RNA (1)...(19): siRNA sense strand
ccacugaucuauacuuuga

SEQ ID NO: 706461 - RNA, 19 nt, Homo sapiens
  misc_RNA (1)...(19): siRNA sense strand
ucacuuaucucuucuucaa

SEQ ID NO: 706462 - RNA, 19 nt, Homo sapiens
  misc_RNA (1)...(19): siRNA sense strand
ugacacuucucuccuauuu

SEQ ID NO: 706463 - RNA, 19 nt, Homo sapiens
  misc_RNA (1)...(19): siRNA sense strand
gaauggagccguucugaug

SEQ ID NO: 706464 - RNA, 19 nt, Homo sapiens
  misc_RNA (1)...(19): siRNA sense strand
gauauuaagccauugcuaa

SEQ ID NO: 706465 - RNA, 19 nt, Homo sapiens
  misc_RNA (1)...(19): siRNA sense strand
guaaugacuucucgcuuga

SEQ ID NO: 706466 - RNA, 19 nt, Homo sapiens
  misc_RNA (1)...(19): siRNA sense strand
ccacuucgcuacacuguca

SEQ ID NO: 706467 - RNA, 19 nt, Homo sapiens
  misc_RNA (1)...(19): siRNA sense strand
caaccucagucaccgaauu

SEQ ID NO: 706468 - RNA, 19 nt, Homo sapiens
  misc_RNA (1)...(19): siRNA sense strand
gcacggaguccauguuguu

SEQ ID NO: 706469 - RNA, 19 nt, Homo sapiens
  misc_RNA (1)...(19): siRNA sense strand
cauuaucacuuaucucuuc

SEQ ID NO: 706470 - RNA, 19 nt, Homo sapiens
  misc_RNA (1)...(19): siRNA sense strand
cuauauccauccugcguua

SEQ ID NO: 706471 - RNA, 19 nt, Homo sapiens
  misc_RNA (1)...(19): siRNA sense strand
ugacagacauucaagaacu

SEQ ID NO: 706472 - RNA, 19 nt, Homo sapiens
  misc_RNA (1)...(19): siRNA sense strand
guacuaaacccacugaucu

SEQ ID NO: 706473 - RNA, 19 nt, Homo sapiens
  misc_RNA (1)...(19): siRNA sense strand
ccaaccguauccaucauuu

SEQ ID NO: 706474 - RNA, 19 nt, Homo sapiens
  misc_RNA (1)...(19): siRNA sense strand
gaccaggaccggauuguug

SEQ ID NO: 706475 - RNA, 19 nt, Homo sapiens
  misc_RNA (1)...(19): siRNA sense strand
cuggauaucuguuacucua

SEQ ID NO: 706476 - RNA, 19 nt, Homo sapiens
  misc_RNA (1)...(19): siRNA sense strand
uaaacccacugaucuauac

SEQ ID NO: 706477 - RNA, 19 nt, Homo sapiens
  misc_RNA (1)...(19): siRNA sense strand
uucaagaacugcagccuuu

SEQ ID NO: 706478 - RNA, 19 nt, Homo sapiens
  misc_RNA (1)...(19): siRNA sense strand
acacuucucuccuauuucu

SEQ ID NO: 706479 - RNA, 19 nt, Homo sapiens
  misc_RNA (1)...(19): siRNA sense strand
gagccguucugaugauugu

SEQ ID NO: 706480 - RNA, 19 nt, Homo sapiens
  misc_RNA (1)...(19): siRNA sense strand
caccgaauuucuccucuug

SEQ ID NO: 706481 - RNA, 19 nt, Homo sapiens
  misc_RNA (1)...(19): siRNA sense strand
uguggucacuccuguacua

SEQ ID NO: 706482 - RNA, 19 nt, Homo sapiens
  misc_RNA (1)...(19): siRNA sense strand
ucgcuacacugucaucaug

SEQ ID NO: 706483 - RNA, 19 nt, Homo sapiens
  misc_RNA (1)...(19): siRNA sense strand
ucugugauauuaagccauu

SEQ ID NO: 706484 - RNA, 19 nt, Homo sapiens
  misc_RNA (1)...(19): siRNA sense strand
ggaacacugagcuuaauca

SEQ ID NO: 706485 - RNA, 19 nt, Homo sapiens
  misc_RNA (1)...(19): siRNA sense strand
cuaaacccacugaucuaua

SEQ ID NO: 706486 - RNA, 19 nt, Homo sapiens
  misc_RNA (1)...(19): siRNA sense strand
ggucacuccuguacuaaac

SEQ ID NO: 706487 - RNA, 19 nt, Homo sapiens
  misc_RNA (1)...(19): siRNA sense strand
gacagacauucaagaacug

SEQ ID NO: 706488 - RNA, 19 nt, Homo sapiens
  misc_RNA (1)...(19): siRNA sense strand
agagugaucagaaggcuuu

SEQ ID NO: 706489 - RNA, 19 nt, Homo sapiens
  misc_RNA (1)...(19): siRNA sense strand
caugaacccucagcucugu

SEQ ID NO: 706490 - RNA, 19 nt, Homo sapiens
  misc_RNA (1)...(19): siRNA sense strand
cuuaaucaguggcuacuca

SEQ ID NO: 706491 - RNA, 19 nt, Homo sapiens
  misc_RNA (1)...(19): siRNA sense strand
ucucuccuauuucuacauu

SEQ ID NO: 706492 - RNA, 19 nt, Homo sapiens
  misc_RNA (1)...(19): siRNA sense strand
cuuguagcaugcucuguaa

SEQ ID NO: 706493 - RNA, 19 nt, Homo sapiens
  misc_RNA (1)...(19): siRNA sense strand
cugcugcacuccguaauga

SEQ ID NO: 706494 - RNA, 19 nt, Homo sapiens
  misc_RNA (1)...(19): siRNA sense strand
ggauuguugccaucaugua

SEQ ID NO: 706495 - RNA, 19 nt, Homo sapiens
  misc_RNA (1)...(19): siRNA sense strand
ugacuucucgcuugaacuu

SEQ ID NO: 706496 - RNA, 19 nt, Homo sapiens
  misc_RNA (1)...(19): siRNA sense strand
uaucacuuaucucuucuuc

SEQ ID NO: 706497 - RNA, 19 nt, Homo sapiens
  misc_RNA (1)...(19): siRNA sense strand
ggaauggagccguucugau

SEQ ID NO: 706498 - RNA, 19 nt, Homo sapiens
  misc_RNA (1)...(19): siRNA sense strand
gugggaacacugagcuuaa

SEQ ID NO: 706499 - RNA, 19 nt, Homo sapiens
  misc_RNA (1)...(19): siRNA sense strand
gauggcauuugaccucucu

SEQ ID NO: 706500 - RNA, 19 nt, Homo sapiens
  misc_RNA (1)...(19): siRNA sense strand
gggaauggagccguucuga

SEQ ID NO: 706501 - RNA, 19 nt, Homo sapiens
  misc_RNA (1)...(19): siRNA sense strand
ccacuucaugguaguuauu

SEQ ID NO: 706502 - RNA, 19 nt, Homo sapiens
  misc_RNA (1)...(19): siRNA sense strand
cgcuugaacuucugugguu

SEQ ID NO: 706503 - RNA, 19 nt, Homo sapiens
  misc_RNA (1)...(19): siRNA sense strand
ggaccaggaccggauuguu

SEQ ID NO: 706504 - RNA, 19 nt, Homo sapiens
  misc_RNA (1)...(19): siRNA sense strand
ucaccgaauuucuccucuu

SEQ ID NO: 706505 - RNA, 19 nt, Homo sapiens
  misc_RNA (1)...(19): siRNA sense strand
ggccuuggguagagugauc

SEQ ID NO: 706506 - RNA, 19 nt, Homo sapiens
  misc_RNA (1)...(19): siRNA sense strand
acccacugaucuauacuuu

SEQ ID NO: 706507 - RNA, 19 nt, Homo sapiens
  misc_RNA (1)...(19): siRNA sense strand
gggagugacagacauucaa

SEQ ID NO: 706508 - RNA, 19 nt, Homo sapiens
  misc_RNA (1)...(19): siRNA sense strand
ccaucuacuucaucagugu

SEQ ID NO: 706509 - RNA, 19 nt, Homo sapiens
  misc_RNA (1)...(19): siRNA sense strand
uguccuaccuggauaucug

SEQ ID NO: 706510 - RNA, 19 nt, Homo sapiens
  misc_RNA (1)...(19): siRNA sense strand
gcaagccacuucgcuacac

SEQ ID NO: 706511 - RNA, 19 nt, Homo sapiens
  misc_RNA (1)...(19): siRNA sense strand
gcagcacggaguccauguu

SEQ ID NO: 706512 - RNA, 19 nt, Homo sapiens
  misc_RNA (1)...(19): siRNA sense strand
cagcacggaguccauguug

SEQ ID NO: 706513 - RNA, 19 nt, Homo sapiens
  misc_RNA (1)...(19): siRNA sense strand
ggagugacagacauucaag

SEQ ID NO: 706514 - RNA, 19 nt, Homo sapiens
  misc_RNA (1)...(19): siRNA sense strand
aaagcacuguccacuugug

SEQ ID NO: 706515 - RNA, 19 nt, Homo sapiens
  misc_RNA (1)...(19): siRNA sense strand
ugggaacacugagcuuaau

SEQ ID NO: 706516 - RNA, 19 nt, Homo sapiens
  misc_RNA (1)...(19): siRNA sense strand
ugucaucuccgauccuaga

SEQ ID NO: 706517 - RNA, 19 nt, Homo sapiens
  misc_RNA (1)...(19): siRNA sense strand
guuccaaccguauccauca

SEQ ID NO: 706518 - RNA, 19 nt, Homo sapiens
  misc_RNA (1)...(19): siRNA sense strand
acacacaaagcaauuucuu

SEQ ID NO: 706519 - RNA, 19 nt, Homo sapiens
  misc_RNA (1)...(19): siRNA sense strand
ccacuugugccucccacuu

SEQ ID NO: 706520 - RNA, 19 nt, Homo sapiens
  misc_RNA (1)...(19): siRNA sense strand
gaggaacaaggaagugaag

SEQ ID NO: 706521 - RNA, 19 nt, Homo sapiens
  misc_RNA (1)...(19): siRNA sense strand
ugggaaaccuguccuaccu

SEQ ID NO: 706522 - RNA, 19 nt, Homo sapiens
  misc_RNA (1)...(19): siRNA sense strand
ccggauuguugccaucaug

SEQ ID NO: 706523 - RNA, 19 nt, Homo sapiens
  misc_RNA (1)...(19): siRNA sense strand
aaccuguccuaccuggaua

SEQ ID NO: 706524 - RNA, 19 nt, Homo sapiens
  misc_RNA (1)...(19): siRNA sense strand
aaaccuguccuaccuggau

SEQ ID NO: 706525 - RNA, 19 nt, Homo sapiens
  misc_RNA (1)...(19): siRNA sense strand
ucgccgugauggcauuuga

SEQ ID NO: 706526 - RNA, 19 nt, Homo sapiens
  misc_RNA (1)...(19): siRNA sense strand
ugaucuauacuuugaggaa

SEQ ID NO: 706527 - RNA, 19 nt, Homo sapiens
  misc_RNA (1)...(19): siRNA sense strand
ucuuguagcaugcucugua

SEQ ID NO: 706528 - RNA, 19 nt, Homo sapiens
  misc_RNA (1)...(19): siRNA sense strand
ucugacacuucucuccuau

SEQ ID NO: 706529 - RNA, 19 nt, Homo sapiens
  misc_RNA (1)...(19): siRNA sense strand
caucacaaucugggucauu

SEQ ID NO: 706530 - RNA, 19 nt, Homo sapiens
  misc_RNA (1)...(19): siRNA sense strand
cuaccuggauaucuguuac

SEQ ID NO: 706531 - RNA, 19 nt, Homo sapiens
  misc_RNA (1)...(19): siRNA sense strand
ugaggaacaaggaagugaa

SEQ ID NO: 706532 - RNA, 19 nt, Homo sapiens
  misc_RNA (1)...(19): siRNA sense strand
uacuaaacccacugaucua

SEQ ID NO: 706533 - RNA, 19 nt, Homo sapiens
  misc_RNA (1)...(19): siRNA sense strand
ugugggaacacugagcuua

SEQ ID NO: 706534 - RNA, 19 nt, Homo sapiens
  misc_RNA (1)...(19): siRNA sense strand
cuacacacaaagcaauuuc

SEQ ID NO: 706535 - RNA, 19 nt, Homo sapiens
  misc_RNA (1)...(19): siRNA sense strand
cuaccaagguggccaagaa

SEQ ID NO: 706536 - RNA, 19 nt, Homo sapiens
  misc_RNA (1)...(19): siRNA sense strand
gaagaacuaccgagugugu

SEQ ID NO: 706537 - RNA, 19 nt, Homo sapiens
  misc_RNA (1)...(19): siRNA sense strand
ccagugacccgaagaagaa

SEQ ID NO: 706538 - RNA, 19 nt, Homo sapiens
  misc_RNA (1)...(19): siRNA sense strand
uggaagaacuaccgagugu

SEQ ID NO: 706539 - RNA, 19 nt, Homo sapiens
  misc_RNA (1)...(19): siRNA sense strand
cgaagaagaagacuaccaa

SEQ ID NO: 706540 - RNA, 19 nt, Homo sapiens
  misc_RNA (1)...(19): siRNA sense strand
gaaaggggcugcgacaaag

SEQ ID NO: 706541 - RNA, 19 nt, Homo sapiens
  misc_RNA (1)...(19): siRNA sense strand
agaagaagacuaccaaggu

SEQ ID NO: 706542 - RNA, 19 nt, Homo sapiens
  misc_RNA (1)...(19): siRNA sense strand
gagcgagauggaagaacua

SEQ ID NO: 706543 - RNA, 19 nt, Homo sapiens
  misc_RNA (1)...(19): siRNA sense strand
ggagagcgagauggaagaa

SEQ ID NO: 706544 - RNA, 19 nt, Homo sapiens
  misc_RNA (1)...(19): siRNA sense strand
gggaaaagcaguucguaga

SEQ ID NO: 706545 - RNA, 19 nt, Homo sapiens
  misc_RNA (1)...(19): siRNA sense strand
gggagacgcgggaagaaag

SEQ ID NO: 706546 - RNA, 19 nt, Homo sapiens
  misc_RNA (1)...(19): siRNA sense strand
agagcgagauggaagaacu

SEQ ID NO: 706547 - RNA, 19 nt, Homo sapiens
  misc_RNA (1)...(19): siRNA sense strand
ggagagccagguggaggaa

SEQ ID NO: 706548 - RNA, 19 nt, Homo sapiens
  misc_RNA (1)...(19): siRNA sense strand
ggagagccagguggaggaa

SEQ ID NO: 706549 - RNA, 19 nt, Homo sapiens
  misc_RNA (1)...(19): siRNA sense strand
ggagagccagguggaggaa

SEQ ID NO: 706550 - RNA, 19 nt, Homo sapiens
  misc_RNA (1)...(19): siRNA sense strand
ggagagccagguggaggaa

SEQ ID NO: 706551 - RNA, 19 nt, Homo sapiens
  misc_RNA (1)...(19): siRNA sense strand
gagggagacgcgggaagaa

SEQ ID NO: 706552 - RNA, 19 nt, Homo sapiens
  misc_RNA (1)...(19): siRNA sense strand
gcuguggccuagagaacug

SEQ ID NO: 706553 - RNA, 19 nt, Homo sapiens
  misc_RNA (1)...(19): siRNA sense strand
gccagucucuaugcugcua

SEQ ID NO: 706554 - RNA, 19 nt, Homo sapiens
  misc_RNA (1)...(19): siRNA sense strand
cauuguggccagucucuau

SEQ ID NO: 706555 - RNA, 19 nt, Homo sapiens
  misc_RNA (1)...(19): siRNA sense strand
ggacagaucccauaaauac

SEQ ID NO: 706556 - RNA, 19 nt, Homo sapiens
  misc_RNA (1)...(19): siRNA sense strand
ggagaaacccuacaaaugu

SEQ ID NO: 706557 - RNA, 19 nt, Homo sapiens
  misc_RNA (1)...(19): siRNA sense strand
gcagaauccuucccagaaa

SEQ ID NO: 706558 - RNA, 19 nt, Homo sapiens
  misc_RNA (1)...(19): siRNA sense strand
gggaaagccuucagaguga

SEQ ID NO: 706559 - RNA, 19 nt, Homo sapiens
  misc_RNA (1)...(19): siRNA sense strand
ggagagagaccacauaaau

SEQ ID NO: 706560 - RNA, 19 nt, Homo sapiens
  misc_RNA (1)...(19): siRNA sense strand
gagagacccuucaagugua

SEQ ID NO: 706561 - RNA, 19 nt, Homo sapiens
  misc_RNA (1)...(19): siRNA sense strand
gaggacagaucccauaaau

SEQ ID NO: 706562 - RNA, 19 nt, Homo sapiens
  misc_RNA (1)...(19): siRNA sense strand
gaagucacaucuuaaucaa

SEQ ID NO: 706563 - RNA, 19 nt, Homo sapiens
  misc_RNA (1)...(19): siRNA sense strand
ggagaaggcugugaguuuc

SEQ ID NO: 706564 - RNA, 19 nt, Homo sapiens
  misc_RNA (1)...(19): siRNA sense strand
ggagagacccuucaagugu

SEQ ID NO: 706565 - RNA, 19 nt, Homo sapiens
  misc_RNA (1)...(19): siRNA sense strand
gaacaucacccugaaagug

SEQ ID NO: 706566 - RNA, 19 nt, Homo sapiens
  misc_RNA (1)...(19): siRNA sense strand
acucugaagucacaucuua

SEQ ID NO: 706567 - RNA, 19 nt, Homo sapiens
  misc_RNA (1)...(19): siRNA sense strand
gggaaaagcuucauucaga

SEQ ID NO: 706568 - RNA, 19 nt, Homo sapiens
  misc_RNA (1)...(19): siRNA sense strand
gggcacagaugcagcgauu

SEQ ID NO: 706569 - RNA, 19 nt, Homo sapiens
  misc_RNA (1)...(19): siRNA sense strand
gaacgcagacagcagauug

SEQ ID NO: 706570 - RNA, 19 nt, Homo sapiens
  misc_RNA (1)...(19): siRNA sense strand
gagaagcccuaucaaugug

SEQ ID NO: 706571 - RNA, 19 nt, Homo sapiens
  misc_RNA (1)...(19): siRNA sense strand
gaacuucggucgccauucg

SEQ ID NO: 706572 - RNA, 19 nt, Homo sapiens
  misc_RNA (1)...(19): siRNA sense strand
acaagaagauugaguuaca

SEQ ID NO: 706573 - RNA, 19 nt, Homo sapiens
  misc_RNA (1)...(19): siRNA sense strand
ucacagacaucagcccuaa

SEQ ID NO: 706574 - RNA, 19 nt, Homo sapiens
  misc_RNA (1)...(19): siRNA sense strand
caacaucagagaauccaua

SEQ ID NO: 706575 - RNA, 19 nt, Homo sapiens
  misc_RNA (1)...(19): siRNA sense strand
gggagaaacccuacaaaug

SEQ ID NO: 706576 - RNA, 19 nt, Homo sapiens
  misc_RNA (1)...(19): siRNA sense strand
ggagaacuaugggaguauu

SEQ ID NO: 706577 - RNA, 19 nt, Homo sapiens
  misc_RNA (1)...(19): siRNA sense strand
gugcacaucuuauucaaca

SEQ ID NO: 706578 - RNA, 19 nt, Homo sapiens
  misc_RNA (1)...(19): siRNA sense strand
caaagaggaugaacuacag

SEQ ID NO: 706579 - RNA, 19 nt, Homo sapiens
  misc_RNA (1)...(19): siRNA sense strand
gagaaacccuacaaauguc

SEQ ID NO: 706580 - RNA, 19 nt, Homo sapiens
  misc_RNA (1)...(19): siRNA sense strand
ucccagaagucccuuuaua

SEQ ID NO: 706581 - RNA, 19 nt, Homo sapiens
  misc_RNA (1)...(19): siRNA sense strand
gcagagaagcccuaucaau

SEQ ID NO: 706582 - RNA, 19 nt, Homo sapiens
  misc_RNA (1)...(19): siRNA sense strand
ggaauucccaugaaagaga

SEQ ID NO: 706583 - RNA, 19 nt, Homo sapiens
  misc_RNA (1)...(19): siRNA sense strand
aaagggaucuggaugcaau

SEQ ID NO: 706584 - RNA, 19 nt, Homo sapiens
  misc_RNA (1)...(19): siRNA sense strand
cagagaagcccuaucaaug

SEQ ID NO: 706585 - RNA, 19 nt, Homo sapiens
  misc_RNA (1)...(19): siRNA sense strand
guacaacccgccaacguuu

SEQ ID NO: 706586 - RNA, 19 nt, Homo sapiens
  misc_RNA (1)...(19): siRNA sense strand
cgagagaaaucccaucagu

SEQ ID NO: 706587 - RNA, 19 nt, Homo sapiens
  misc_RNA (1)...(19): siRNA sense strand
cuccaagccucaaacuuua

SEQ ID NO: 706588 - RNA, 19 nt, Homo sapiens
  misc_RNA (1)...(19): siRNA sense strand
gaccgaaucccgagaaguu

SEQ ID NO: 706589 - RNA, 19 nt, Homo sapiens
  misc_RNA (1)...(19): siRNA sense strand
aaggcaagcuggauagaaa

SEQ ID NO: 706590 - RNA, 19 nt, Homo sapiens
  misc_RNA (1)...(19): siRNA sense strand
gaacuugacagugauugaa

SEQ ID NO: 706591 - RNA, 19 nt, Homo sapiens
  misc_RNA (1)...(19): siRNA sense strand
gaacucauacagcagagaa

SEQ ID NO: 706592 - RNA, 19 nt, Homo sapiens
  misc_RNA (1)...(19): siRNA sense strand
ugacagugauugaagacaa

SEQ ID NO: 706593 - RNA, 19 nt, Homo sapiens
  misc_RNA (1)...(19): siRNA sense strand
gacaucagcccuaagcaaa

SEQ ID NO: 706594 - RNA, 19 nt, Homo sapiens
  misc_RNA (1)...(19): siRNA sense strand
gcaggaagaccuuuucaua

SEQ ID NO: 706595 - RNA, 19 nt, Homo sapiens
  misc_RNA (1)...(19): siRNA sense strand
gcacagaugcagcgauugu

SEQ ID NO: 706596 - RNA, 19 nt, Homo sapiens
  misc_RNA (1)...(19): siRNA sense strand
ccuccaagccucaaacuuu

SEQ ID NO: 706597 - RNA, 19 nt, Homo sapiens
  misc_RNA (1)...(19): siRNA sense strand
ggaguuguagccucuuuaa

SEQ ID NO: 706598 - RNA, 19 nt, Homo sapiens
  misc_RNA (1)...(19): siRNA sense strand
ccaccuggcuggacaucuu

SEQ ID NO: 706599 - RNA, 19 nt, Homo sapiens
  misc_RNA (1)...(19): siRNA sense strand
gagagagaccacauaaaug

SEQ ID NO: 706600 - RNA, 19 nt, Homo sapiens
  misc_RNA (1)...(19): siRNA sense strand
acagugaagucccauaugu

SEQ ID NO: 706601 - RNA, 19 nt, Homo sapiens
  misc_RNA (1)...(19): siRNA sense strand
aauuucagcuggaguugua

SEQ ID NO: 706602 - RNA, 19 nt, Homo sapiens
  misc_RNA (1)...(19): siRNA sense strand
caagaagauugaguuacaa

SEQ ID NO: 706603 - RNA, 19 nt, Homo sapiens
  misc_RNA (1)...(19): siRNA sense strand
gaaaaugcccuuccuguuc

SEQ ID NO: 706604 - RNA, 19 nt, Homo sapiens
  misc_RNA (1)...(19): siRNA sense strand
guuguagccucuuuaaaca

SEQ ID NO: 706605 - RNA, 19 nt, Homo sapiens
  misc_RNA (1)...(19): siRNA sense strand
cgacuccacucccgagaga

SEQ ID NO: 706606 - RNA, 19 nt, Homo sapiens
  misc_RNA (1)...(19): siRNA sense strand
cgccaacguuugagacuuu

SEQ ID NO: 706607 - RNA, 19 nt, Homo sapiens
  misc_RNA (1)...(19): siRNA sense strand
gaggaagcauauaguugga

SEQ ID NO: 706608 - RNA, 19 nt, Homo sapiens
  misc_RNA (1)...(19): siRNA sense strand
gagaggacagaucccauaa

SEQ ID NO: 706609 - RNA, 19 nt, Homo sapiens
  misc_RNA (1)...(19): siRNA sense strand
uguaaagaauguggaauga

SEQ ID NO: 706610 - RNA, 19 nt, Homo sapiens
  misc_RNA (1)...(19): siRNA sense strand
cagcauuacagaacucaua

SEQ ID NO: 706611 - RNA, 19 nt, Homo sapiens
  misc_RNA (1)...(19): siRNA sense strand
gagaacuaugggaguauua

SEQ ID NO: 706612 - RNA, 19 nt, Homo sapiens
  misc_RNA (1)...(19): siRNA sense strand
ccaucaaugucaugaaugu

SEQ ID NO: 706613 - RNA, 19 nt, Homo sapiens
  misc_RNA (1)...(19): siRNA sense strand
cagcagagaagcccuauca

SEQ ID NO: 706614 - RNA, 19 nt, Homo sapiens
  misc_RNA (1)...(19): siRNA sense strand
uacaagagcagccuuauca

SEQ ID NO: 706615 - RNA, 19 nt, Homo sapiens
  misc_RNA (1)...(19): siRNA sense strand
agacaagaagauugaguua

SEQ ID NO: 706616 - RNA, 19 nt, Homo sapiens
  misc_RNA (1)...(19): siRNA sense strand
gcccuacaccugucccuua

SEQ ID NO: 706617 - RNA, 19 nt, Homo sapiens
  misc_RNA (1)...(19): siRNA sense strand
gaauucccaugaaagagau

SEQ ID NO: 706618 - RNA, 19 nt, Homo sapiens
  misc_RNA (1)...(19): siRNA sense strand
gcaaugagugugggaagaa

SEQ ID NO: 706619 - RNA, 19 nt, Homo sapiens
  misc_RNA (1)...(19): siRNA sense strand
gagaaugugggaagagcua

SEQ ID NO: 706620 - RNA, 19 nt, Homo sapiens
  misc_RNA (1)...(19): siRNA sense strand
ugaagucacaucuuaauca

SEQ ID NO: 706621 - RNA, 19 nt, Homo sapiens
  misc_RNA (1)...(19): siRNA sense strand
cuacaccugucccuuaugu

SEQ ID NO: 706622 - RNA, 19 nt, Homo sapiens
  misc_RNA (1)...(19): siRNA sense strand
caacaucaaagaauacaca

SEQ ID NO: 706623 - RNA, 19 nt, Homo sapiens
  misc_RNA (1)...(19): siRNA sense strand
agucacaucuuaaucaaca

SEQ ID NO: 706624 - RNA, 19 nt, Homo sapiens
  misc_RNA (1)...(19): siRNA sense strand
gaagauugaguuacaagag

SEQ ID NO: 706625 - RNA, 19 nt, Homo sapiens
  misc_RNA (1)...(19): siRNA sense strand
agagaaaucccaucagugu

SEQ ID NO: 706626 - RNA, 19 nt, Homo sapiens
  misc_RNA (1)...(19): siRNA sense strand
uugaagagguggcugaugu

SEQ ID NO: 706627 - RNA, 19 nt, Homo sapiens
  misc_RNA (1)...(19): siRNA sense strand
uagugaagguggaagaaga

SEQ ID NO: 706628 - RNA, 19 nt, Homo sapiens
  misc_RNA (1)...(19): siRNA sense strand
cauccugccugaagaguuc

SEQ ID NO: 706629 - RNA, 19 nt, Homo sapiens
  misc_RNA (1)...(19): siRNA sense strand
gaagaccuuuucauaguga

SEQ ID NO: 706630 - RNA, 19 nt, Homo sapiens
  misc_RNA (1)...(19): siRNA sense strand
uggagaaggcugugaguuu

SEQ ID NO: 706631 - RNA, 19 nt, Homo sapiens
  misc_RNA (1)...(19): siRNA sense strand
ccagagaugcagugacaaa

SEQ ID NO: 706632 - RNA, 19 nt, Homo sapiens
  misc_RNA (1)...(19): siRNA sense strand
ggaucuggaugcaaucaca

SEQ ID NO: 706633 - RNA, 19 nt, Homo sapiens
  misc_RNA (1)...(19): siRNA sense strand
uuacuuccauggguuauga

SEQ ID NO: 706634 - RNA, 19 nt, Homo sapiens
  misc_RNA (1)...(19): siRNA sense strand
aaggagaacuaugggagua

SEQ ID NO: 706635 - RNA, 19 nt, Homo sapiens
  misc_RNA (1)...(19): siRNA sense strand
ggcagaauccuucccagaa

SEQ ID NO: 706636 - RNA, 19 nt, Homo sapiens
  misc_RNA (1)...(19): siRNA sense strand
ccauaaauaccuuaagugu

SEQ ID NO: 706637 - RNA, 19 nt, Homo sapiens
  misc_RNA (1)...(19): siRNA sense strand
ugagaggacagaucccaua

SEQ ID NO: 706638 - RNA, 19 nt, Homo sapiens
  misc_RNA (1)...(19): siRNA sense strand
acauggaacuaucuggaaa

SEQ ID NO: 706639 - RNA, 19 nt, Homo sapiens
  misc_RNA (1)...(19): siRNA sense strand
uuaaaggcaugguacaaag

SEQ ID NO: 706640 - RNA, 19 nt, Homo sapiens
  misc_RNA (1)...(19): siRNA sense strand
gagugcacaucuuauucaa

SEQ ID NO: 706641 - RNA, 19 nt, Homo sapiens
  misc_RNA (1)...(19): siRNA sense strand
gaaagagauacuaggacaa

SEQ ID NO: 706642 - RNA, 19 nt, Homo sapiens
  misc_RNA (1)...(19): siRNA sense strand
caucugaucgaacaccuaa

SEQ ID NO: 706643 - RNA, 19 nt, Homo sapiens
  misc_RNA (1)...(19): siRNA sense strand
caucagagaauccauacug

SEQ ID NO: 706644 - RNA, 19 nt, Homo sapiens
  misc_RNA (1)...(19): siRNA sense strand
agagaagcccuaucaaugu

SEQ ID NO: 706645 - RNA, 19 nt, Homo sapiens
  misc_RNA (1)...(19): siRNA sense strand
cagaccucauucagcauua

SEQ ID NO: 706646 - RNA, 19 nt, Homo sapiens
  misc_RNA (1)...(19): siRNA sense strand
agagacccuucaaguguaa

SEQ ID NO: 706647 - RNA, 19 nt, Homo sapiens
  misc_RNA (1)...(19): siRNA sense strand
gcaccuaacucagcaucag

SEQ ID NO: 706648 - RNA, 19 nt, Homo sapiens
  misc_RNA (1)...(19): siRNA sense strand
gcacaucuuauucaacauc

SEQ ID NO: 706649 - RNA, 19 nt, Homo sapiens
  misc_RNA (1)...(19): siRNA sense strand
gagaugcagugacaaaaga

SEQ ID NO: 706650 - RNA, 19 nt, Homo sapiens
  misc_RNA (1)...(19): siRNA sense strand
cagcuucacuucucucaac

SEQ ID NO: 706651 - RNA, 19 nt, Homo sapiens
  misc_RNA (1)...(19): siRNA sense strand
ucagagugcacaucuuauu

SEQ ID NO: 706652 - RNA, 19 nt, Homo sapiens
  misc_RNA (1)...(19): siRNA sense strand
aagcagacauggaacuauc

SEQ ID NO: 706653 - RNA, 19 nt, Homo sapiens
  misc_RNA (1)...(19): siRNA sense strand
cagcgauuguggcaaauuc

SEQ ID NO: 706654 - RNA, 19 nt, Homo sapiens
  misc_RNA (1)...(19): siRNA sense strand
ggaacuugacagugauuga

SEQ ID NO: 706655 - RNA, 19 nt, Homo sapiens
  misc_RNA (1)...(19): siRNA sense strand
ggacagaucccauaaauac

SEQ ID NO: 706656 - RNA, 19 nt, Homo sapiens
  misc_RNA (1)...(19): siRNA sense strand
ggagaaacccuacaaaugu

SEQ ID NO: 706657 - RNA, 19 nt, Homo sapiens
  misc_RNA (1)...(19): siRNA sense strand
gcagaauccuucccagaaa

SEQ ID NO: 706658 - RNA, 19 nt, Homo sapiens
  misc_RNA (1)...(19): siRNA sense strand
gggaaagccuucagaguga

SEQ ID NO: 706659 - RNA, 19 nt, Homo sapiens
  misc_RNA (1)...(19): siRNA sense strand
ggagagagaccacauaaau

SEQ ID NO: 706660 - RNA, 19 nt, Homo sapiens
  misc_RNA (1)...(19): siRNA sense strand
gagagacccuucaagugua

SEQ ID NO: 706661 - RNA, 19 nt, Homo sapiens
  misc_RNA (1)...(19): siRNA sense strand
gaggacagaucccauaaau

SEQ ID NO: 706662 - RNA, 19 nt, Homo sapiens
  misc_RNA (1)...(19): siRNA sense strand
gaagucacaucuuaaucaa

SEQ ID NO: 706663 - RNA, 19 nt, Homo sapiens
  misc_RNA (1)...(19): siRNA sense strand
ggagaaggcugugaguuuc

SEQ ID NO: 706664 - RNA, 19 nt, Homo sapiens
  misc_RNA (1)...(19): siRNA sense strand
ggagagacccuucaagugu

SEQ ID NO: 706665 - RNA, 19 nt, Homo sapiens
  misc_RNA (1)...(19): siRNA sense strand
gaacaucacccugaaagug

SEQ ID NO: 706666 - RNA, 19 nt, Homo sapiens
  misc_RNA (1)...(19): siRNA sense strand
acucugaagucacaucuua

SEQ ID NO: 706667 - RNA, 19 nt, Homo sapiens
  misc_RNA (1)...(19): siRNA sense strand
gggaaaagcuucauucaga

SEQ ID NO: 706668 - RNA, 19 nt, Homo sapiens
  misc_RNA (1)...(19): siRNA sense strand
gggcacagaugcagcgauu

SEQ ID NO: 706669 - RNA, 19 nt, Homo sapiens
  misc_RNA (1)...(19): siRNA sense strand
gaacgcagacagcagauug

SEQ ID NO: 706670 - RNA, 19 nt, Homo sapiens
  misc_RNA (1)...(19): siRNA sense strand
gagaagcccuaucaaugug

SEQ ID NO: 706671 - RNA, 19 nt, Homo sapiens
  misc_RNA (1)...(19): siRNA sense strand
gaacuucggucgccauucg

SEQ ID NO: 706672 - RNA, 19 nt, Homo sapiens
  misc_RNA (1)...(19): siRNA sense strand
acaagaagauugaguuaca

SEQ ID NO: 706673 - RNA, 19 nt, Homo sapiens
  misc_RNA (1)...(19): siRNA sense strand
ucacagacaucagcccuaa

SEQ ID NO: 706674 - RNA, 19 nt, Homo sapiens
  misc_RNA (1)...(19): siRNA sense strand
caacaucagagaauccaua

SEQ ID NO: 706675 - RNA, 19 nt, Homo sapiens
  misc_RNA (1)...(19): siRNA sense strand
gggagaaacccuacaaaug

SEQ ID NO: 706676 - RNA, 19 nt, Homo sapiens
  misc_RNA (1)...(19): siRNA sense strand
ggagaacuaugggaguauu

SEQ ID NO: 706677 - RNA, 19 nt, Homo sapiens
  misc_RNA (1)...(19): siRNA sense strand
gugcacaucuuauucaaca

SEQ ID NO: 706678 - RNA, 19 nt, Homo sapiens
  misc_RNA (1)...(19): siRNA sense strand
caaagaggaugaacuacag

SEQ ID NO: 706679 - RNA, 19 nt, Homo sapiens
  misc_RNA (1)...(19): siRNA sense strand
gagaaacccuacaaauguc

SEQ ID NO: 706680 - RNA, 19 nt, Homo sapiens
  misc_RNA (1)...(19): siRNA sense strand
ucccagaagucccuuuaua

SEQ ID NO: 706681 - RNA, 19 nt, Homo sapiens
  misc_RNA (1)...(19): siRNA sense strand
gcagagaagcccuaucaau

SEQ ID NO: 706682 - RNA, 19 nt, Homo sapiens
  misc_RNA (1)...(19): siRNA sense strand
ggaauucccaugaaagaga

SEQ ID NO: 706683 - RNA, 19 nt, Homo sapiens
  misc_RNA (1)...(19): siRNA sense strand
aaagggaucuggaugcaau

SEQ ID NO: 706684 - RNA, 19 nt, Homo sapiens
  misc_RNA (1)...(19): siRNA sense strand
cagagaagcccuaucaaug

SEQ ID NO: 706685 - RNA, 19 nt, Homo sapiens
  misc_RNA (1)...(19): siRNA sense strand
guacaacccgccaacguuu

SEQ ID NO: 706686 - RNA, 19 nt, Homo sapiens
  misc_RNA (1)...(19): siRNA sense strand
cgagagaaaucccaucagu

SEQ ID NO: 706687 - RNA, 19 nt, Homo sapiens
  misc_RNA (1)...(19): siRNA sense strand
cuccaagccucaaacuuua

SEQ ID NO: 706688 - RNA, 19 nt, Homo sapiens
  misc_RNA (1)...(19): siRNA sense strand
gaccgaaucccgagaaguu

SEQ ID NO: 706689 - RNA, 19 nt, Homo sapiens
  misc_RNA (1)...(19): siRNA sense strand
aaggcaagcuggauagaaa

SEQ ID NO: 706690 - RNA, 19 nt, Homo sapiens
  misc_RNA (1)...(19): siRNA sense strand
gaacuugacagugauugaa

SEQ ID NO: 706691 - RNA, 19 nt, Homo sapiens
  misc_RNA (1)...(19): siRNA sense strand
gaacucauacagcagagaa

SEQ ID NO: 706692 - RNA, 19 nt, Homo sapiens
  misc_RNA (1)...(19): siRNA sense strand
ugacagugauugaagacaa

SEQ ID NO: 706693 - RNA, 19 nt, Homo sapiens
  misc_RNA (1)...(19): siRNA sense strand
gacaucagcccuaagcaaa

SEQ ID NO: 706694 - RNA, 19 nt, Homo sapiens
  misc_RNA (1)...(19): siRNA sense strand
gcaggaagaccuuuucaua

SEQ ID NO: 706695 - RNA, 19 nt, Homo sapiens
  misc_RNA (1)...(19): siRNA sense strand
gcacagaugcagcgauugu

SEQ ID NO: 706696 - RNA, 19 nt, Homo sapiens
  misc_RNA (1)...(19): siRNA sense strand
ccuccaagccucaaacuuu

SEQ ID NO: 706697 - RNA, 19 nt, Homo sapiens
  misc_RNA (1)...(19): siRNA sense strand
ggaguuguagccucuuuaa

SEQ ID NO: 706698 - RNA, 19 nt, Homo sapiens
  misc_RNA (1)...(19): siRNA sense strand
ccaccuggcuggacaucuu

SEQ ID NO: 706699 - RNA, 19 nt, Homo sapiens
  misc_RNA (1)...(19): siRNA sense strand
gagagagaccacauaaaug

SEQ ID NO: 706700 - RNA, 19 nt, Homo sapiens
  misc_RNA (1)...(19): siRNA sense strand
acagugaagucccauaugu

SEQ ID NO: 706701 - RNA, 19 nt, Homo sapiens
  misc_RNA (1)...(19): siRNA sense strand
aauuucagcuggaguugua

SEQ ID NO: 706702 - RNA, 19 nt, Homo sapiens
  misc_RNA (1)...(19): siRNA sense strand
caagaagauugaguuacaa

SEQ ID NO: 706703 - RNA, 19 nt, Homo sapiens
  misc_RNA (1)...(19): siRNA sense strand
gaaaaugcccuuccuguuc

SEQ ID NO: 706704 - RNA, 19 nt, Homo sapiens
  misc_RNA (1)...(19): siRNA sense strand
guuguagccucuuuaaaca

SEQ ID NO: 706705 - RNA, 19 nt, Homo sapiens
  misc_RNA (1)...(19): siRNA sense strand
cgacuccacucccgagaga

SEQ ID NO: 706706 - RNA, 19 nt, Homo sapiens
  misc_RNA (1)...(19): siRNA sense strand
cgccaacguuugagacuuu

SEQ ID NO: 706707 - RNA, 19 nt, Homo sapiens
  misc_RNA (1)...(19): siRNA sense strand
gaggaagcauauaguugga

SEQ ID NO: 706708 - RNA, 19 nt, Homo sapiens
  misc_RNA (1)...(19): siRNA sense strand
gagaggacagaucccauaa

SEQ ID NO: 706709 - RNA, 19 nt, Homo sapiens
  misc_RNA (1)...(19): siRNA sense strand
uguaaagaauguggaauga

SEQ ID NO: 706710 - RNA, 19 nt, Homo sapiens
  misc_RNA (1)...(19): siRNA sense strand
cagcauuacagaacucaua

SEQ ID NO: 706711 - RNA, 19 nt, Homo sapiens
  misc_RNA (1)...(19): siRNA sense strand
gagaacuaugggaguauua

SEQ ID NO: 706712 - RNA, 19 nt, Homo sapiens
  misc_RNA (1)...(19): siRNA sense strand
ccaucaaugucaugaaugu

SEQ ID NO: 706713 - RNA, 19 nt, Homo sapiens
  misc_RNA (1)...(19): siRNA sense strand
cagcagagaagcccuauca

SEQ ID NO: 706714 - RNA, 19 nt, Homo sapiens
  misc_RNA (1)...(19): siRNA sense strand
uacaagagcagccuuauca

SEQ ID NO: 706715 - RNA, 19 nt, Homo sapiens
  misc_RNA (1)...(19): siRNA sense strand
agacaagaagauugaguua

SEQ ID NO: 706716 - RNA, 19 nt, Homo sapiens
  misc_RNA (1)...(19): siRNA sense strand
gcccuacaccugucccuua

SEQ ID NO: 706717 - RNA, 19 nt, Homo sapiens
  misc_RNA (1)...(19): siRNA sense strand
gaauucccaugaaagagau

SEQ ID NO: 706718 - RNA, 19 nt, Homo sapiens
  misc_RNA (1)...(19): siRNA sense strand
gcaaugagugugggaagaa

SEQ ID NO: 706719 - RNA, 19 nt, Homo sapiens
  misc_RNA (1)...(19): siRNA sense strand
gagaaugugggaagagcua

SEQ ID NO: 706720 - RNA, 19 nt, Homo sapiens
  misc_RNA (1)...(19): siRNA sense strand
ugaagucacaucuuaauca

SEQ ID NO: 706721 - RNA, 19 nt, Homo sapiens
  misc_RNA (1)...(19): siRNA sense strand
cuacaccugucccuuaugu

SEQ ID NO: 706722 - RNA, 19 nt, Homo sapiens
  misc_RNA (1)...(19): siRNA sense strand
caacaucaaagaauacaca

SEQ ID NO: 706723 - RNA, 19 nt, Homo sapiens
  misc_RNA (1)...(19): siRNA sense strand
agucacaucuuaaucaaca

SEQ ID NO: 706724 - RNA, 19 nt, Homo sapiens
  misc_RNA (1)...(19): siRNA sense strand
gaagauugaguuacaagag

SEQ ID NO: 706725 - RNA, 19 nt, Homo sapiens
  misc_RNA (1)...(19): siRNA sense strand
agagaaaucccaucagugu

SEQ ID NO: 706726 - RNA, 19 nt, Homo sapiens
  misc_RNA (1)...(19): siRNA sense strand
uugaagagguggcugaugu

SEQ ID NO: 706727 - RNA, 19 nt, Homo sapiens
  misc_RNA (1)...(19): siRNA sense strand
uagugaagguggaagaaga

SEQ ID NO: 706728 - RNA, 19 nt, Homo sapiens
  misc_RNA (1)...(19): siRNA sense strand
cauccugccugaagaguuc

SEQ ID NO: 706729 - RNA, 19 nt, Homo sapiens
  misc_RNA (1)...(19): siRNA sense strand
gaagaccuuuucauaguga

SEQ ID NO: 706730 - RNA, 19 nt, Homo sapiens
  misc_RNA (1)...(19): siRNA sense strand
uggagaaggcugugaguuu

SEQ ID NO: 706731 - RNA, 19 nt, Homo sapiens
  misc_RNA (1)...(19): siRNA sense strand
ccagagaugcagugacaaa

SEQ ID NO: 706732 - RNA, 19 nt, Homo sapiens
  misc_RNA (1)...(19): siRNA sense strand
ggaucuggaugcaaucaca

SEQ ID NO: 706733 - RNA, 19 nt, Homo sapiens
  misc_RNA (1)...(19): siRNA sense strand
uuacuuccauggguuauga

SEQ ID NO: 706734 - RNA, 19 nt, Homo sapiens
  misc_RNA (1)...(19): siRNA sense strand
aaggagaacuaugggagua

SEQ ID NO: 706735 - RNA, 19 nt, Homo sapiens
  misc_RNA (1)...(19): siRNA sense strand
ggcagaauccuucccagaa

SEQ ID NO: 706736 - RNA, 19 nt, Homo sapiens
  misc_RNA (1)...(19): siRNA sense strand
ccauaaauaccuuaagugu

SEQ ID NO: 706737 - RNA, 19 nt, Homo sapiens
  misc_RNA (1)...(19): siRNA sense strand
ugagaggacagaucccaua

SEQ ID NO: 706738 - RNA, 19 nt, Homo sapiens
  misc_RNA (1)...(19): siRNA sense strand
acauggaacuaucuggaaa

SEQ ID NO: 706739 - RNA, 19 nt, Homo sapiens
  misc_RNA (1)...(19): siRNA sense strand
uuaaaggcaugguacaaag

SEQ ID NO: 706740 - RNA, 19 nt, Homo sapiens
  misc_RNA (1)...(19): siRNA sense strand
gagugcacaucuuauucaa

SEQ ID NO: 706741 - RNA, 19 nt, Homo sapiens
  misc_RNA (1)...(19): siRNA sense strand
gaaagagauacuaggacaa

SEQ ID NO: 706742 - RNA, 19 nt, Homo sapiens
  misc_RNA (1)...(19): siRNA sense strand
caucugaucgaacaccuaa

SEQ ID NO: 706743 - RNA, 19 nt, Homo sapiens
  misc_RNA (1)...(19): siRNA sense strand
caucagagaauccauacug

SEQ ID NO: 706744 - RNA, 19 nt, Homo sapiens
  misc_RNA (1)...(19): siRNA sense strand
agagaagcccuaucaaugu

SEQ ID NO: 706745 - RNA, 19 nt, Homo sapiens
  misc_RNA (1)...(19): siRNA sense strand
cagaccucauucagcauua

SEQ ID NO: 706746 - RNA, 19 nt, Homo sapiens
  misc_RNA (1)...(19): siRNA sense strand
agagacccuucaaguguaa

SEQ ID NO: 706747 - RNA, 19 nt, Homo sapiens
  misc_RNA (1)...(19): siRNA sense strand
gcaccuaacucagcaucag

SEQ ID NO: 706748 - RNA, 19 nt, Homo sapiens
  misc_RNA (1)...(19): siRNA sense strand
gcacaucuuauucaacauc

SEQ ID NO: 706749 - RNA, 19 nt, Homo sapiens
  misc_RNA (1)...(19): siRNA sense strand
gagaugcagugacaaaaga

SEQ ID NO: 706750 - RNA, 19 nt, Homo sapiens
  misc_RNA (1)...(19): siRNA sense strand
cagcuucacuucucucaac

SEQ ID NO: 706751 - RNA, 19 nt, Homo sapiens
  misc_RNA (1)...(19): siRNA sense strand
ucagagugcacaucuuauu

SEQ ID NO: 706752 - RNA, 19 nt, Homo sapiens
  misc_RNA (1)...(19): siRNA sense strand
aagcagacauggaacuauc

SEQ ID NO: 706753 - RNA, 19 nt, Homo sapiens
  misc_RNA (1)...(19): siRNA sense strand
cagcgauuguggcaaauuc

SEQ ID NO: 706754 - RNA, 19 nt, Homo sapiens
  misc_RNA (1)...(19): siRNA sense strand
ggaacuugacagugauuga

SEQ ID NO: 706755 - RNA, 19 nt, Homo sapiens
  misc_RNA (1)...(19): siRNA sense strand
ggaauaugcuucucuaauu

SEQ ID NO: 706756 - RNA, 19 nt, Homo sapiens
  misc_RNA (1)...(19): siRNA sense strand
ggacuggcuugauaaauua

SEQ ID NO: 706757 - RNA, 19 nt, Homo sapiens
  misc_RNA (1)...(19): siRNA sense strand
gcugauagaugaaguuaua

SEQ ID NO: 706758 - RNA, 19 nt, Homo sapiens
  misc_RNA (1)...(19): siRNA sense strand
gaacugagcugcuacuuac

SEQ ID NO: 706759 - RNA, 19 nt, Homo sapiens
  misc_RNA (1)...(19): siRNA sense strand
gaaaguggcuucuucucaa

SEQ ID NO: 706760 - RNA, 19 nt, Homo sapiens
  misc_RNA (1)...(19): siRNA sense strand
ccagaaaccucuuggcuuu

SEQ ID NO: 706761 - RNA, 19 nt, Homo sapiens
  misc_RNA (1)...(19): siRNA sense strand
gagcauuucuggaguauug

SEQ ID NO: 706762 - RNA, 19 nt, Homo sapiens
  misc_RNA (1)...(19): siRNA sense strand
gaauaugcuucucuaauug

SEQ ID NO: 706763 - RNA, 19 nt, Homo sapiens
  misc_RNA (1)...(19): siRNA sense strand
ggaagacaccaaaccauua

SEQ ID NO: 706764 - RNA, 19 nt, Homo sapiens
  misc_RNA (1)...(19): siRNA sense strand
ggaaggaguugccuacaga

SEQ ID NO: 706765 - RNA, 19 nt, Homo sapiens
  misc_RNA (1)...(19): siRNA sense strand
ccacaggaaugcacgguua

SEQ ID NO: 706766 - RNA, 19 nt, Homo sapiens
  misc_RNA (1)...(19): siRNA sense strand
gaacaucuggcuaggcuua

SEQ ID NO: 706767 - RNA, 19 nt, Homo sapiens
  misc_RNA (1)...(19): siRNA sense strand
ggacaucguuaucgaaaug

SEQ ID NO: 706768 - RNA, 19 nt, Homo sapiens
  misc_RNA (1)...(19): siRNA sense strand
gaaggagaguggauaguug

SEQ ID NO: 706769 - RNA, 19 nt, Homo sapiens
  misc_RNA (1)...(19): siRNA sense strand
gagaagacaccaccagaua

SEQ ID NO: 706770 - RNA, 19 nt, Homo sapiens
  misc_RNA (1)...(19): siRNA sense strand
ggaagaagaugaaggugau

SEQ ID NO: 706771 - RNA, 19 nt, Homo sapiens
  misc_RNA (1)...(19): siRNA sense strand
gaacggcugcaaacaaaua

SEQ ID NO: 706772 - RNA, 19 nt, Homo sapiens
  misc_RNA (1)...(19): siRNA sense strand
ggaaauauuuggaggcaau

SEQ ID NO: 706773 - RNA, 19 nt, Homo sapiens
  misc_RNA (1)...(19): siRNA sense strand
gaagauaccaguucagguu

SEQ ID NO: 706774 - RNA, 19 nt, Homo sapiens
  misc_RNA (1)...(19): siRNA sense strand
ccacugagaucauccauuc

SEQ ID NO: 706775 - RNA, 19 nt, Homo sapiens
  misc_RNA (1)...(19): siRNA sense strand
aaaucaagcucucauguuu

SEQ ID NO: 706776 - RNA, 19 nt, Homo sapiens
  misc_RNA (1)...(19): siRNA sense strand
gaagacagguuggacaaug

SEQ ID NO: 706777 - RNA, 19 nt, Homo sapiens
  misc_RNA (1)...(19): siRNA sense strand
gagaaaggcugggaauaug

SEQ ID NO: 706778 - RNA, 19 nt, Homo sapiens
  misc_RNA (1)...(19): siRNA sense strand
ggaaucaggucgucaaucu

SEQ ID NO: 706779 - RNA, 19 nt, Homo sapiens
  misc_RNA (1)...(19): siRNA sense strand
gaugaugccuucucacaga

SEQ ID NO: 706780 - RNA, 19 nt, Homo sapiens
  misc_RNA (1)...(19): siRNA sense strand
ggacaacaauggccugugu

SEQ ID NO: 706781 - RNA, 19 nt, Homo sapiens
  misc_RNA (1)...(19): siRNA sense strand
caacacagcugcuucaaaa

SEQ ID NO: 706782 - RNA, 19 nt, Homo sapiens
  misc_RNA (1)...(19): siRNA sense strand
ggaaaugagugacaucuac

SEQ ID NO: 706783 - RNA, 19 nt, Homo sapiens
  misc_RNA (1)...(19): siRNA sense strand
gaagacaccaccagauaaa

SEQ ID NO: 706784 - RNA, 19 nt, Homo sapiens
  misc_RNA (1)...(19): siRNA sense strand
gauaguugauccugaaaga

SEQ ID NO: 706785 - RNA, 19 nt, Homo sapiens
  misc_RNA (1)...(19): siRNA sense strand
cagaacggcugcaaacaaa

SEQ ID NO: 706786 - RNA, 19 nt, Homo sapiens
  misc_RNA (1)...(19): siRNA sense strand
gugaugauguggagaguaa

SEQ ID NO: 706787 - RNA, 19 nt, Homo sapiens
  misc_RNA (1)...(19): siRNA sense strand
gagcagaaguccaugaaag

SEQ ID NO: 706788 - RNA, 19 nt, Homo sapiens
  misc_RNA (1)...(19): siRNA sense strand
ggucaaaguucacgucugu

SEQ ID NO: 706789 - RNA, 19 nt, Homo sapiens
  misc_RNA (1)...(19): siRNA sense strand
gaagaugggaguagaauca

SEQ ID NO: 706790 - RNA, 19 nt, Homo sapiens
  misc_RNA (1)...(19): siRNA sense strand
ccagauggcuucuaucaca

SEQ ID NO: 706791 - RNA, 19 nt, Homo sapiens
  misc_RNA (1)...(19): siRNA sense strand
gauggcaacuacuauuauu

SEQ ID NO: 706792 - RNA, 19 nt, Homo sapiens
  misc_RNA (1)...(19): siRNA sense strand
ggaaagccaagaaauacua

SEQ ID NO: 706793 - RNA, 19 nt, Homo sapiens
  misc_RNA (1)...(19): siRNA sense strand
ggaaugagauuuuggaguu

SEQ ID NO: 706794 - RNA, 19 nt, Homo sapiens
  misc_RNA (1)...(19): siRNA sense strand
caagagggcugggaauaug

SEQ ID NO: 706795 - RNA, 19 nt, Homo sapiens
  misc_RNA (1)...(19): siRNA sense strand
cuuguuaccugaaucuuua

SEQ ID NO: 706796 - RNA, 19 nt, Homo sapiens
  misc_RNA (1)...(19): siRNA sense strand
gaaacaacguaguucagau

SEQ ID NO: 706797 - RNA, 19 nt, Homo sapiens
  misc_RNA (1)...(19): siRNA sense strand
cuacuuggguuuccuagaa

SEQ ID NO: 706798 - RNA, 19 nt, Homo sapiens
  misc_RNA (1)...(19): siRNA sense strand
ggcggaugcugucaaauaa

SEQ ID NO: 706799 - RNA, 19 nt, Homo sapiens
  misc_RNA (1)...(19): siRNA sense strand
gaugaugcauggucuuaug

SEQ ID NO: 706800 - RNA, 19 nt, Homo sapiens
  misc_RNA (1)...(19): siRNA sense strand
uaaugcagcugacugaaga

SEQ ID NO: 706801 - RNA, 19 nt, Homo sapiens
  misc_RNA (1)...(19): siRNA sense strand
ggcugaagcugauagauga

SEQ ID NO: 706802 - RNA, 19 nt, Homo sapiens
  misc_RNA (1)...(19): siRNA sense strand
aagcugaucucccugcuaa

SEQ ID NO: 706803 - RNA, 19 nt, Homo sapiens
  misc_RNA (1)...(19): siRNA sense strand
cagauacguucaaguugua

SEQ ID NO: 706804 - RNA, 19 nt, Homo sapiens
  misc_RNA (1)...(19): siRNA sense strand
cagaauccacccaaaguua

SEQ ID NO: 706805 - RNA, 19 nt, Homo sapiens
  misc_RNA (1)...(19): siRNA sense strand
caaauaagccacaggacuu

SEQ ID NO: 706806 - RNA, 19 nt, Homo sapiens
  misc_RNA (1)...(19): siRNA sense strand
gaaaacagauguccauuac

SEQ ID NO: 706807 - RNA, 19 nt, Homo sapiens
  misc_RNA (1)...(19): siRNA sense strand
cagcuuggaugaauuugaa

SEQ ID NO: 706808 - RNA, 19 nt, Homo sapiens
  misc_RNA (1)...(19): siRNA sense strand
agaccgagaucacuacauu

SEQ ID NO: 706809 - RNA, 19 nt, Homo sapiens
  misc_RNA (1)...(19): siRNA sense strand
ggacaucacacccaaacuu

SEQ ID NO: 706810 - RNA, 19 nt, Homo sapiens
  misc_RNA (1)...(19): siRNA sense strand
acacggaguucacugauga

SEQ ID NO: 706811 - RNA, 19 nt, Homo sapiens
  misc_RNA (1)...(19): siRNA sense strand
caaaccaucuuucugaagu

SEQ ID NO: 706812 - RNA, 19 nt, Homo sapiens
  misc_RNA (1)...(19): siRNA sense strand
cgaugaaguugaaaucuau

SEQ ID NO: 706813 - RNA, 19 nt, Homo sapiens
  misc_RNA (1)...(19): siRNA sense strand
gcaaacaaauauagaagcu

SEQ ID NO: 706814 - RNA, 19 nt, Homo sapiens
  misc_RNA (1)...(19): siRNA sense strand
aaagagcauuucuggagua

SEQ ID NO: 706815 - RNA, 19 nt, Homo sapiens
  misc_RNA (1)...(19): siRNA sense strand
ccagaggaguacuguguuu

SEQ ID NO: 706816 - RNA, 19 nt, Homo sapiens
  misc_RNA (1)...(19): siRNA sense strand
auuccaagcucaagauaua

SEQ ID NO: 706817 - RNA, 19 nt, Homo sapiens
  misc_RNA (1)...(19): siRNA sense strand
uaagaagacacccaacuuu

SEQ ID NO: 706818 - RNA, 19 nt, Homo sapiens
  misc_RNA (1)...(19): siRNA sense strand
ggaccaaacaauuauauuc

SEQ ID NO: 706819 - RNA, 19 nt, Homo sapiens
  misc_RNA (1)...(19): siRNA sense strand
caagggccauggaggaauu

SEQ ID NO: 706820 - RNA, 19 nt, Homo sapiens
  misc_RNA (1)...(19): siRNA sense strand
uaagugcuguggagaagaa

SEQ ID NO: 706821 - RNA, 19 nt, Homo sapiens
  misc_RNA (1)...(19): siRNA sense strand
cauaaggccuguggucaaa

SEQ ID NO: 706822 - RNA, 19 nt, Homo sapiens
  misc_RNA (1)...(19): siRNA sense strand
aaacagauguccauuacag

SEQ ID NO: 706823 - RNA, 19 nt, Homo sapiens
  misc_RNA (1)...(19): siRNA sense strand
uuacauuguucgaggcuua

SEQ ID NO: 706824 - RNA, 19 nt, Homo sapiens
  misc_RNA (1)...(19): siRNA sense strand
ucacaguucucgauacuca

SEQ ID NO: 706825 - RNA, 19 nt, Homo sapiens
  misc_RNA (1)...(19): siRNA sense strand
aaacaacguaguucagaua

SEQ ID NO: 706826 - RNA, 19 nt, Homo sapiens
  misc_RNA (1)...(19): siRNA sense strand
ggaaaguggagaugacauu

SEQ ID NO: 706827 - RNA, 19 nt, Homo sapiens
  misc_RNA (1)...(19): siRNA sense strand
gacaguauauucagaaagg

SEQ ID NO: 706828 - RNA, 19 nt, Homo sapiens
  misc_RNA (1)...(19): siRNA sense strand
gauguuggauuuguuuaug

SEQ ID NO: 706829 - RNA, 19 nt, Homo sapiens
  misc_RNA (1)...(19): siRNA sense strand
cgaacuauuugucaaugaa

SEQ ID NO: 706830 - RNA, 19 nt, Homo sapiens
  misc_RNA (1)...(19): siRNA sense strand
ggacugguggaguaaauuu

SEQ ID NO: 706831 - RNA, 19 nt, Homo sapiens
  misc_RNA (1)...(19): siRNA sense strand
gcugccaucuuuaaacuug

SEQ ID NO: 706832 - RNA, 19 nt, Homo sapiens
  misc_RNA (1)...(19): siRNA sense strand
caaguuuccuucagugugu

SEQ ID NO: 706833 - RNA, 19 nt, Homo sapiens
  misc_RNA (1)...(19): siRNA sense strand
ggaaugcacgguuaggauu

SEQ ID NO: 706834 - RNA, 19 nt, Homo sapiens
  misc_RNA (1)...(19): siRNA sense strand
ucagauacguucaaguugu

SEQ ID NO: 706835 - RNA, 19 nt, Homo sapiens
  misc_RNA (1)...(19): siRNA sense strand
ggcgaaggcugguccgaaa

SEQ ID NO: 706836 - RNA, 19 nt, Homo sapiens
  misc_RNA (1)...(19): siRNA sense strand
ggaaggagaguggauaguu

SEQ ID NO: 706837 - RNA, 19 nt, Homo sapiens
  misc_RNA (1)...(19): siRNA sense strand
cgucuuugcugaaauguau

SEQ ID NO: 706838 - RNA, 19 nt, Homo sapiens
  misc_RNA (1)...(19): siRNA sense strand
agaagaaguuuaacagcuu

SEQ ID NO: 706839 - RNA, 19 nt, Homo sapiens
  misc_RNA (1)...(19): siRNA sense strand
cagcaugccugacaucauc

SEQ ID NO: 706840 - RNA, 19 nt, Homo sapiens
  misc_RNA (1)...(19): siRNA sense strand
gauugagggccgacaguua

SEQ ID NO: 706841 - RNA, 19 nt, Homo sapiens
  misc_RNA (1)...(19): siRNA sense strand
gcaagaaagauuuaacaca

SEQ ID NO: 706842 - RNA, 19 nt, Homo sapiens
  misc_RNA (1)...(19): siRNA sense strand
aguaggacgucauaaguuu

SEQ ID NO: 706843 - RNA, 19 nt, Homo sapiens
  misc_RNA (1)...(19): siRNA sense strand
aaucagggauacaagguaa

SEQ ID NO: 706844 - RNA, 19 nt, Homo sapiens
  misc_RNA (1)...(19): siRNA sense strand
cagccugucugccguguuu

SEQ ID NO: 706845 - RNA, 19 nt, Homo sapiens
  misc_RNA (1)...(19): siRNA sense strand
aaacagagguaggcuuugu

SEQ ID NO: 706846 - RNA, 19 nt, Homo sapiens
  misc_RNA (1)...(19): siRNA sense strand
ucgaugaaguugaaaucua

SEQ ID NO: 706847 - RNA, 19 nt, Homo sapiens
  misc_RNA (1)...(19): siRNA sense strand
ggaaacaacguaguucaga

SEQ ID NO: 706848 - RNA, 19 nt, Homo sapiens
  misc_RNA (1)...(19): siRNA sense strand
aaagaagcuugcugacuga

SEQ ID NO: 706849 - RNA, 19 nt, Homo sapiens
  misc_RNA (1)...(19): siRNA sense strand
aggacuggcuugauaaauu

SEQ ID NO: 706850 - RNA, 19 nt, Homo sapiens
  misc_RNA (1)...(19): siRNA sense strand
gagguaggcuuuguuccaa

SEQ ID NO: 706851 - RNA, 19 nt, Homo sapiens
  misc_RNA (1)...(19): siRNA sense strand
ccaggucucucucccaaau

SEQ ID NO: 706852 - RNA, 19 nt, Homo sapiens
  misc_RNA (1)...(19): siRNA sense strand
gcucaaagccucccuucug

SEQ ID NO: 706853 - RNA, 19 nt, Homo sapiens
  misc_RNA (1)...(19): siRNA sense strand
agaagagccuggagaaaca

SEQ ID NO: 706854 - RNA, 19 nt, Homo sapiens
  misc_RNA (1)...(19): siRNA sense strand
gucaauaccuggcgagauc

SEQ ID NO: 706855 - RNA, 19 nt, Homo sapiens
  misc_RNA (1)...(19): siRNA sense strand
ggaauaugcuucucuaauu

SEQ ID NO: 706856 - RNA, 19 nt, Homo sapiens
  misc_RNA (1)...(19): siRNA sense strand
ggacuggcuugauaaauua

SEQ ID NO: 706857 - RNA, 19 nt, Homo sapiens
  misc_RNA (1)...(19): siRNA sense strand
gcugauagaugaaguuaua

SEQ ID NO: 706858 - RNA, 19 nt, Homo sapiens
  misc_RNA (1)...(19): siRNA sense strand
gaacugagcugcuacuuac

SEQ ID NO: 706859 - RNA, 19 nt, Homo sapiens
  misc_RNA (1)...(19): siRNA sense strand
gaaaguggcuucuucucaa

SEQ ID NO: 706860 - RNA, 19 nt, Homo sapiens
  misc_RNA (1)...(19): siRNA sense strand
ccagaaaccucuuggcuuu

SEQ ID NO: 706861 - RNA, 19 nt, Homo sapiens
  misc_RNA (1)...(19): siRNA sense strand
gagcauuucuggaguauug

SEQ ID NO: 706862 - RNA, 19 nt, Homo sapiens
  misc_RNA (1)...(19): siRNA sense strand
gaauaugcuucucuaauug

SEQ ID NO: 706863 - RNA, 19 nt, Homo sapiens
  misc_RNA (1)...(19): siRNA sense strand
ggaagacaccaaaccauua

SEQ ID NO: 706864 - RNA, 19 nt, Homo sapiens
  misc_RNA (1)...(19): siRNA sense strand
ggaaggaguugccuacaga

SEQ ID NO: 706865 - RNA, 19 nt, Homo sapiens
  misc_RNA (1)...(19): siRNA sense strand
ccacaggaaugcacgguua

SEQ ID NO: 706866 - RNA, 19 nt, Homo sapiens
  misc_RNA (1)...(19): siRNA sense strand
gaacaucuggcuaggcuua

SEQ ID NO: 706867 - RNA, 19 nt, Homo sapiens
  misc_RNA (1)...(19): siRNA sense strand
ggacaucguuaucgaaaug

SEQ ID NO: 706868 - RNA, 19 nt, Homo sapiens
  misc_RNA (1)...(19): siRNA sense strand
gaaggagaguggauaguug

SEQ ID NO: 706869 - RNA, 19 nt, Homo sapiens
  misc_RNA (1)...(19): siRNA sense strand
gagaagacaccaccagaua

SEQ ID NO: 706870 - RNA, 19 nt, Homo sapiens
  misc_RNA (1)...(19): siRNA sense strand
ggaagaagaugaaggugau

SEQ ID NO: 706871 - RNA, 19 nt, Homo sapiens
  misc_RNA (1)...(19): siRNA sense strand
gaacggcugcaaacaaaua

SEQ ID NO: 706872 - RNA, 19 nt, Homo sapiens
  misc_RNA (1)...(19): siRNA sense strand
ggaaauauuuggaggcaau

SEQ ID NO: 706873 - RNA, 19 nt, Homo sapiens
  misc_RNA (1)...(19): siRNA sense strand
gaagauaccaguucagguu

SEQ ID NO: 706874 - RNA, 19 nt, Homo sapiens
  misc_RNA (1)...(19): siRNA sense strand
ccacugagaucauccauuc

SEQ ID NO: 706875 - RNA, 19 nt, Homo sapiens
  misc_RNA (1)...(19): siRNA sense strand
aaaucaagcucucauguuu

SEQ ID NO: 706876 - RNA, 19 nt, Homo sapiens
  misc_RNA (1)...(19): siRNA sense strand
gaagacagguuggacaaug

SEQ ID NO: 706877 - RNA, 19 nt, Homo sapiens
  misc_RNA (1)...(19): siRNA sense strand
gagaaaggcugggaauaug

SEQ ID NO: 706878 - RNA, 19 nt, Homo sapiens
  misc_RNA (1)...(19): siRNA sense strand
ggaaucaggucgucaaucu

SEQ ID NO: 706879 - RNA, 19 nt, Homo sapiens
  misc_RNA (1)...(19): siRNA sense strand
gaugaugccuucucacaga

SEQ ID NO: 706880 - RNA, 19 nt, Homo sapiens
  misc_RNA (1)...(19): siRNA sense strand
ggacaacaauggccugugu

SEQ ID NO: 706881 - RNA, 19 nt, Homo sapiens
  misc_RNA (1)...(19): siRNA sense strand
caacacagcugcuucaaaa

SEQ ID NO: 706882 - RNA, 19 nt, Homo sapiens
  misc_RNA (1)...(19): siRNA sense strand
ggaaaugagugacaucuac

SEQ ID NO: 706883 - RNA, 19 nt, Homo sapiens
  misc_RNA (1)...(19): siRNA sense strand
gaagacaccaccagauaaa

SEQ ID NO: 706884 - RNA, 19 nt, Homo sapiens
  misc_RNA (1)...(19): siRNA sense strand
gauaguugauccugaaaga

SEQ ID NO: 706885 - RNA, 19 nt, Homo sapiens
  misc_RNA (1)...(19): siRNA sense strand
cagaacggcugcaaacaaa

SEQ ID NO: 706886 - RNA, 19 nt, Homo sapiens
  misc_RNA (1)...(19): siRNA sense strand
gugaugauguggagaguaa

SEQ ID NO: 706887 - RNA, 19 nt, Homo sapiens
  misc_RNA (1)...(19): siRNA sense strand
gagcagaaguccaugaaag

SEQ ID NO: 706888 - RNA, 19 nt, Homo sapiens
  misc_RNA (1)...(19): siRNA sense strand
ggucaaaguucacgucugu

SEQ ID NO: 706889 - RNA, 19 nt, Homo sapiens
  misc_RNA (1)...(19): siRNA sense strand
gaagaugggaguagaauca

SEQ ID NO: 706890 - RNA, 19 nt, Homo sapiens
  misc_RNA (1)...(19): siRNA sense strand
ccagauggcuucuaucaca

SEQ ID NO: 706891 - RNA, 19 nt, Homo sapiens
  misc_RNA (1)...(19): siRNA sense strand
gauggcaacuacuauuauu

SEQ ID NO: 706892 - RNA, 19 nt, Homo sapiens
  misc_RNA (1)...(19): siRNA sense strand
ggaaagccaagaaauacua

SEQ ID NO: 706893 - RNA, 19 nt, Homo sapiens
  misc_RNA (1)...(19): siRNA sense strand
ggaaugagauuuuggaguu

SEQ ID NO: 706894 - RNA, 19 nt, Homo sapiens
  misc_RNA (1)...(19): siRNA sense strand
caagagggcugggaauaug

SEQ ID NO: 706895 - RNA, 19 nt, Homo sapiens
  misc_RNA (1)...(19): siRNA sense strand
cuuguuaccugaaucuuua

SEQ ID NO: 706896 - RNA, 19 nt, Homo sapiens
  misc_RNA (1)...(19): siRNA sense strand
gaaacaacguaguucagau

SEQ ID NO: 706897 - RNA, 19 nt, Homo sapiens
  misc_RNA (1)...(19): siRNA sense strand
cuacuuggguuuccuagaa

SEQ ID NO: 706898 - RNA, 19 nt, Homo sapiens
  misc_RNA (1)...(19): siRNA sense strand
ggcggaugcugucaaauaa

SEQ ID NO: 706899 - RNA, 19 nt, Homo sapiens
  misc_RNA (1)...(19): siRNA sense strand
gaugaugcauggucuuaug

SEQ ID NO: 706900 - RNA, 19 nt, Homo sapiens
  misc_RNA (1)...(19): siRNA sense strand
uaaugcagcugacugaaga

SEQ ID NO: 706901 - RNA, 19 nt, Homo sapiens
  misc_RNA (1)...(19): siRNA sense strand
ggcugaagcugauagauga

SEQ ID NO: 706902 - RNA, 19 nt, Homo sapiens
  misc_RNA (1)...(19): siRNA sense strand
aagcugaucucccugcuaa

SEQ ID NO: 706903 - RNA, 19 nt, Homo sapiens
  misc_RNA (1)...(19): siRNA sense strand
cagauacguucaaguugua

SEQ ID NO: 706904 - RNA, 19 nt, Homo sapiens
  misc_RNA (1)...(19): siRNA sense strand
cagaauccacccaaaguua

SEQ ID NO: 706905 - RNA, 19 nt, Homo sapiens
  misc_RNA (1)...(19): siRNA sense strand
caaauaagccacaggacuu

SEQ ID NO: 706906 - RNA, 19 nt, Homo sapiens
  misc_RNA (1)...(19): siRNA sense strand
gaaaacagauguccauuac

SEQ ID NO: 706907 - RNA, 19 nt, Homo sapiens
  misc_RNA (1)...(19): siRNA sense strand
cagcuuggaugaauuugaa

SEQ ID NO: 706908 - RNA, 19 nt, Homo sapiens
  misc_RNA (1)...(19): siRNA sense strand
agaccgagaucacuacauu

SEQ ID NO: 706909 - RNA, 19 nt, Homo sapiens
  misc_RNA (1)...(19): siRNA sense strand
ggacaucacacccaaacuu

SEQ ID NO: 706910 - RNA, 19 nt, Homo sapiens
  misc_RNA (1)...(19): siRNA sense strand
acacggaguucacugauga

SEQ ID NO: 706911 - RNA, 19 nt, Homo sapiens
  misc_RNA (1)...(19): siRNA sense strand
caaaccaucuuucugaagu

SEQ ID NO: 706912 - RNA, 19 nt, Homo sapiens
  misc_RNA (1)...(19): siRNA sense strand
cgaugaaguugaaaucuau

SEQ ID NO: 706913 - RNA, 19 nt, Homo sapiens
  misc_RNA (1)...(19): siRNA sense strand
gcaaacaaauauagaagcu

SEQ ID NO: 706914 - RNA, 19 nt, Homo sapiens
  misc_RNA (1)...(19): siRNA sense strand
aaagagcauuucuggagua

SEQ ID NO: 706915 - RNA, 19 nt, Homo sapiens
  misc_RNA (1)...(19): siRNA sense strand
ccagaggaguacuguguuu

SEQ ID NO: 706916 - RNA, 19 nt, Homo sapiens
  misc_RNA (1)...(19): siRNA sense strand
auuccaagcucaagauaua

SEQ ID NO: 706917 - RNA, 19 nt, Homo sapiens
  misc_RNA (1)...(19): siRNA sense strand
uaagaagacacccaacuuu

SEQ ID NO: 706918 - RNA, 19 nt, Homo sapiens
  misc_RNA (1)...(19): siRNA sense strand
ggaccaaacaauuauauuc

SEQ ID NO: 706919 - RNA, 19 nt, Homo sapiens
  misc_RNA (1)...(19): siRNA sense strand
caagggccauggaggaauu

SEQ ID NO: 706920 - RNA, 19 nt, Homo sapiens
  misc_RNA (1)...(19): siRNA sense strand
uaagugcuguggagaagaa

SEQ ID NO: 706921 - RNA, 19 nt, Homo sapiens
  misc_RNA (1)...(19): siRNA sense strand
cauaaggccuguggucaaa

SEQ ID NO: 706922 - RNA, 19 nt, Homo sapiens
  misc_RNA (1)...(19): siRNA sense strand
aaacagauguccauuacag

SEQ ID NO: 706923 - RNA, 19 nt, Homo sapiens
  misc_RNA (1)...(19): siRNA sense strand
uuacauuguucgaggcuua

SEQ ID NO: 706924 - RNA, 19 nt, Homo sapiens
  misc_RNA (1)...(19): siRNA sense strand
ucacaguucucgauacuca

SEQ ID NO: 706925 - RNA, 19 nt, Homo sapiens
  misc_RNA (1)...(19): siRNA sense strand
aaacaacguaguucagaua

SEQ ID NO: 706926 - RNA, 19 nt, Homo sapiens
  misc_RNA (1)...(19): siRNA sense strand
ggaaaguggagaugacauu

SEQ ID NO: 706927 - RNA, 19 nt, Homo sapiens
  misc_RNA (1)...(19): siRNA sense strand
gacaguauauucagaaagg

SEQ ID NO: 706928 - RNA, 19 nt, Homo sapiens
  misc_RNA (1)...(19): siRNA sense strand
gauguuggauuuguuuaug

SEQ ID NO: 706929 - RNA, 19 nt, Homo sapiens
  misc_RNA (1)...(19): siRNA sense strand
cgaacuauuugucaaugaa

SEQ ID NO: 706930 - RNA, 19 nt, Homo sapiens
  misc_RNA (1)...(19): siRNA sense strand
ggacugguggaguaaauuu

SEQ ID NO: 706931 - RNA, 19 nt, Homo sapiens
  misc_RNA (1)...(19): siRNA sense strand
gcugccaucuuuaaacuug

SEQ ID NO: 706932 - RNA, 19 nt, Homo sapiens
  misc_RNA (1)...(19): siRNA sense strand
caaguuuccuucagugugu

SEQ ID NO: 706933 - RNA, 19 nt, Homo sapiens
  misc_RNA (1)...(19): siRNA sense strand
ggaaugcacgguuaggauu

SEQ ID NO: 706934 - RNA, 19 nt, Homo sapiens
  misc_RNA (1)...(19): siRNA sense strand
ucagauacguucaaguugu

SEQ ID NO: 706935 - RNA, 19 nt, Homo sapiens
  misc_RNA (1)...(19): siRNA sense strand
ggcgaaggcugguccgaaa

SEQ ID NO: 706936 - RNA, 19 nt, Homo sapiens
  misc_RNA (1)...(19): siRNA sense strand
ggaaggagaguggauaguu

SEQ ID NO: 706937 - RNA, 19 nt, Homo sapiens
  misc_RNA (1)...(19): siRNA sense strand
cgucuuugcugaaauguau

SEQ ID NO: 706938 - RNA, 19 nt, Homo sapiens
  misc_RNA (1)...(19): siRNA sense strand
agaagaaguuuaacagcuu

SEQ ID NO: 706939 - RNA, 19 nt, Homo sapiens
  misc_RNA (1)...(19): siRNA sense strand
cagcaugccugacaucauc

SEQ ID NO: 706940 - RNA, 19 nt, Homo sapiens
  misc_RNA (1)...(19): siRNA sense strand
gauugagggccgacaguua

SEQ ID NO: 706941 - RNA, 19 nt, Homo sapiens
  misc_RNA (1)...(19): siRNA sense strand
gcaagaaagauuuaacaca

SEQ ID NO: 706942 - RNA, 19 nt, Homo sapiens
  misc_RNA (1)...(19): siRNA sense strand
aguaggacgucauaaguuu

SEQ ID NO: 706943 - RNA, 19 nt, Homo sapiens
  misc_RNA (1)...(19): siRNA sense strand
aaucagggauacaagguaa

SEQ ID NO: 706944 - RNA, 19 nt, Homo sapiens
  misc_RNA (1)...(19): siRNA sense strand
cagccugucugccguguuu

SEQ ID NO: 706945 - RNA, 19 nt, Homo sapiens
  misc_RNA (1)...(19): siRNA sense strand
aaacagagguaggcuuugu

SEQ ID NO: 706946 - RNA, 19 nt, Homo sapiens
  misc_RNA (1)...(19): siRNA sense strand
ucgaugaaguugaaaucua

SEQ ID NO: 706947 - RNA, 19 nt, Homo sapiens
  misc_RNA (1)...(19): siRNA sense strand
ggaaacaacguaguucaga

SEQ ID NO: 706948 - RNA, 19 nt, Homo sapiens
  misc_RNA (1)...(19): siRNA sense strand
aaagaagcuugcugacuga

SEQ ID NO: 706949 - RNA, 19 nt, Homo sapiens
  misc_RNA (1)...(19): siRNA sense strand
aggacuggcuugauaaauu

SEQ ID NO: 706950 - RNA, 19 nt, Homo sapiens
  misc_RNA (1)...(19): siRNA sense strand
gagguaggcuuuguuccaa

SEQ ID NO: 706951 - RNA, 19 nt, Homo sapiens
  misc_RNA (1)...(19): siRNA sense strand
ccaggucucucucccaaau

SEQ ID NO: 706952 - RNA, 19 nt, Homo sapiens
  misc_RNA (1)...(19): siRNA sense strand
gcucaaagccucccuucug

SEQ ID NO: 706953 - RNA, 19 nt, Homo sapiens
  misc_RNA (1)...(19): siRNA sense strand
agaagagccuggagaaaca

SEQ ID NO: 706954 - RNA, 19 nt, Homo sapiens
  misc_RNA (1)...(19): siRNA sense strand
gucaauaccuggcgagauc

SEQ ID NO: 706955 - RNA, 19 nt, Homo sapiens
  misc_RNA (1)...(19): siRNA sense strand
ggaaacagcuaucaaagag

SEQ ID NO: 706956 - RNA, 19 nt, Homo sapiens
  misc_RNA (1)...(19): siRNA sense strand
gagaggaagucaccaaggu

SEQ ID NO: 706957 - RNA, 19 nt, Homo sapiens
  misc_RNA (1)...(19): siRNA sense strand
uaacggcgguagagaggaa

SEQ ID NO: 706958 - RNA, 19 nt, Homo sapiens
  misc_RNA (1)...(19): siRNA sense strand
ucaccaagguugccacuca

SEQ ID NO: 706959 - RNA, 19 nt, Homo sapiens
  misc_RNA (1)...(19): siRNA sense strand
gggaaacagcuaucaaaga

SEQ ID NO: 706960 - RNA, 19 nt, Homo sapiens
  misc_RNA (1)...(19): siRNA sense strand
ggacuugggcaucgccuuu

SEQ ID NO: 706961 - RNA, 19 nt, Homo sapiens
  misc_RNA (1)...(19): siRNA sense strand
gaccagaggcgcagugaau

SEQ ID NO: 706962 - RNA, 19 nt, Homo sapiens
  misc_RNA (1)...(19): siRNA sense strand
caugucaggcuucuguuua

SEQ ID NO: 706963 - RNA, 19 nt, Homo sapiens
  misc_RNA (1)...(19): siRNA sense strand
gaucaucaauuugggaaac

SEQ ID NO: 706964 - RNA, 19 nt, Homo sapiens
  misc_RNA (1)...(19): siRNA sense strand
gcauuacagaucaucaauu

SEQ ID NO: 706965 - RNA, 19 nt, Homo sapiens
  misc_RNA (1)...(19): siRNA sense strand
gaaacagcuaucaaagaga

SEQ ID NO: 706966 - RNA, 19 nt, Homo sapiens
  misc_RNA (1)...(19): siRNA sense strand
uuacagaucaucaauuugg

SEQ ID NO: 706967 - RNA, 19 nt, Homo sapiens
  misc_RNA (1)...(19): siRNA sense strand
gcugugacccgaaagacuu

SEQ ID NO: 706968 - RNA, 19 nt, Homo sapiens
  misc_RNA (1)...(19): siRNA sense strand
guagagaggaagucaccaa

SEQ ID NO: 706969 - RNA, 19 nt, Homo sapiens
  misc_RNA (1)...(19): siRNA sense strand
uacggucaguuuggcauua

SEQ ID NO: 706970 - RNA, 19 nt, Homo sapiens
  misc_RNA (1)...(19): siRNA sense strand
ugaccgcugugacccgaaa

SEQ ID NO: 706971 - RNA, 19 nt, Homo sapiens
  misc_RNA (1)...(19): siRNA sense strand
gaaacauaacggcgguaga

SEQ ID NO: 706972 - RNA, 19 nt, Homo sapiens
  misc_RNA (1)...(19): siRNA sense strand
ucaaagagagaaacauaac

SEQ ID NO: 706973 - RNA, 19 nt, Homo sapiens
  misc_RNA (1)...(19): siRNA sense strand
aaacauaacggcgguagag

SEQ ID NO: 706974 - RNA, 19 nt, Homo sapiens
  misc_RNA (1)...(19): siRNA sense strand
ucagaagcaccgacaguca

SEQ ID NO: 706975 - RNA, 19 nt, Homo sapiens
  misc_RNA (1)...(19): siRNA sense strand
gacuugggcaucgccuuua

SEQ ID NO: 706976 - RNA, 19 nt, Homo sapiens
  misc_RNA (1)...(19): siRNA sense strand
ccaugucaggcuucuguuu

SEQ ID NO: 706977 - RNA, 19 nt, Homo sapiens
  misc_RNA (1)...(19): siRNA sense strand
ccaagguugccacucagaa

SEQ ID NO: 706978 - RNA, 19 nt, Homo sapiens
  misc_RNA (1)...(19): siRNA sense strand
caagguugccacucagaag

SEQ ID NO: 706979 - RNA, 19 nt, Homo sapiens
  misc_RNA (1)...(19): siRNA sense strand
caccaugucaggcuucugu

SEQ ID NO: 706980 - RNA, 19 nt, Homo sapiens
  misc_RNA (1)...(19): siRNA sense strand
caauuugggaaacagcuau

SEQ ID NO: 706981 - RNA, 19 nt, Homo sapiens
  misc_RNA (1)...(19): siRNA sense strand
acuugggcaucgccuuuaa

SEQ ID NO: 706982 - RNA, 19 nt, Homo sapiens
  misc_RNA (1)...(19): siRNA sense strand
gcuaucaaagagagaaaca

SEQ ID NO: 706983 - RNA, 19 nt, Homo sapiens
  misc_RNA (1)...(19): siRNA sense strand
gcgagaaggugucugaguu

SEQ ID NO: 706984 - RNA, 19 nt, Homo sapiens
  misc_RNA (1)...(19): siRNA sense strand
gaaggugucugaguuugug

SEQ ID NO: 706985 - RNA, 19 nt, Homo sapiens
  misc_RNA (1)...(19): siRNA sense strand
gaugaccacuuccgagaga

SEQ ID NO: 706986 - RNA, 19 nt, Homo sapiens
  misc_RNA (1)...(19): siRNA sense strand
ucacucacgugcucuacua

SEQ ID NO: 706987 - RNA, 19 nt, Homo sapiens
  misc_RNA (1)...(19): siRNA sense strand
gggcaagagugucgugguu

SEQ ID NO: 706988 - RNA, 19 nt, Homo sapiens
  misc_RNA (1)...(19): siRNA sense strand
gagaaggugucugaguuug

SEQ ID NO: 706989 - RNA, 19 nt, Homo sapiens
  misc_RNA (1)...(19): siRNA sense strand
guacauggccaaggucauu

SEQ ID NO: 706990 - RNA, 19 nt, Homo sapiens
  misc_RNA (1)...(19): siRNA sense strand
gcguagagcaugugaguga

SEQ ID NO: 706991 - RNA, 19 nt, Homo sapiens
  misc_RNA (1)...(19): siRNA sense strand
gcaagagugucgugguucu

SEQ ID NO: 706992 - RNA, 19 nt, Homo sapiens
  misc_RNA (1)...(19): siRNA sense strand
gagcugcccuucccuuguc

SEQ ID NO: 706993 - RNA, 19 nt, Homo sapiens
  misc_RNA (1)...(19): siRNA sense strand
gcuccgaggugaucuuugg

SEQ ID NO: 706994 - RNA, 19 nt, Homo sapiens
  misc_RNA (1)...(19): siRNA sense strand
cgagaaggugucugaguuu

SEQ ID NO: 706995 - RNA, 19 nt, Homo sapiens
  misc_RNA (1)...(19): siRNA sense strand
ugaaggugcugaccaucga

SEQ ID NO: 706996 - RNA, 19 nt, Homo sapiens
  misc_RNA (1)...(19): siRNA sense strand
uggccaaggucauugagaa

SEQ ID NO: 706997 - RNA, 19 nt, Homo sapiens
  misc_RNA (1)...(19): siRNA sense strand
caacagcugcccugacauc

SEQ ID NO: 706998 - RNA, 19 nt, Homo sapiens
  misc_RNA (1)...(19): siRNA sense strand
ccaucggucuggacuguug

SEQ ID NO: 706999 - RNA, 19 nt, Homo sapiens
  misc_RNA (1)...(19): siRNA sense strand
ggcaggagacggacucuau

SEQ ID NO: 707000 - RNA, 19 nt, Homo sapiens
  misc_RNA (1)...(19): siRNA sense strand
gcagaccuacagcgccaua

SEQ ID NO: 707001 - RNA, 19 nt, Homo sapiens
  misc_RNA (1)...(19): siRNA sense strand
ggacauuggcguagagcau

SEQ ID NO: 707002 - RNA, 19 nt, Homo sapiens
  misc_RNA (1)...(19): siRNA sense strand
caucucacccgacgucuuc

SEQ ID NO: 707003 - RNA, 19 nt, Homo sapiens
  misc_RNA (1)...(19): siRNA sense strand
uccgagcccugcuggauga

SEQ ID NO: 707004 - RNA, 19 nt, Homo sapiens
  misc_RNA (1)...(19): siRNA sense strand
cugaguuuguggcgucuaa

SEQ ID NO: 707005 - RNA, 19 nt, Homo sapiens
  misc_RNA (1)...(19): siRNA sense strand
cacccgacgucuucacuca

SEQ ID NO: 707006 - RNA, 19 nt, Homo sapiens
  misc_RNA (1)...(19): siRNA sense strand
gagcuccgaggugaucuuu

SEQ ID NO: 707007 - RNA, 19 nt, Homo sapiens
  misc_RNA (1)...(19): siRNA sense strand
uucaacagcugcccugaca

SEQ ID NO: 707008 - RNA, 19 nt, Homo sapiens
  misc_RNA (1)...(19): siRNA sense strand
gcaggagacggacucuauc

SEQ ID NO: 707009 - RNA, 19 nt, Homo sapiens
  misc_RNA (1)...(19): siRNA sense strand
caaauggaagggcaagagu

SEQ ID NO: 707010 - RNA, 19 nt, Homo sapiens
  misc_RNA (1)...(19): siRNA sense strand
ggagcugcccuucccuugu

SEQ ID NO: 707011 - RNA, 19 nt, Homo sapiens
  misc_RNA (1)...(19): siRNA sense strand
cacgugcucuacuacaugu

SEQ ID NO: 707012 - RNA, 19 nt, Homo sapiens
  misc_RNA (1)...(19): siRNA sense strand
ccaaggucauugagaagcu

SEQ ID NO: 707013 - RNA, 19 nt, Homo sapiens
  misc_RNA (1)...(19): siRNA sense strand
cugaguacauggccaaggu

SEQ ID NO: 707014 - RNA, 19 nt, Homo sapiens
  misc_RNA (1)...(19): siRNA sense strand
gugugaaggugcugaccau

SEQ ID NO: 707015 - RNA, 19 nt, Homo sapiens
  misc_RNA (1)...(19): siRNA sense strand
ccugcuggaugaccacuuc

SEQ ID NO: 707016 - RNA, 19 nt, Homo sapiens
  misc_RNA (1)...(19): siRNA sense strand
ucacgugcucuacuacaug

SEQ ID NO: 707017 - RNA, 19 nt, Homo sapiens
  misc_RNA (1)...(19): siRNA sense strand
gcgagaaggugucugaguu

SEQ ID NO: 707018 - RNA, 19 nt, Homo sapiens
  misc_RNA (1)...(19): siRNA sense strand
gaaggugucugaguuugug

SEQ ID NO: 707019 - RNA, 19 nt, Homo sapiens
  misc_RNA (1)...(19): siRNA sense strand
gcaggaggcgggauuacua

SEQ ID NO: 707020 - RNA, 19 nt, Homo sapiens
  misc_RNA (1)...(19): siRNA sense strand
gaugaccacuuccgagaga

SEQ ID NO: 707021 - RNA, 19 nt, Homo sapiens
  misc_RNA (1)...(19): siRNA sense strand
ucacucacgugcucuacua

SEQ ID NO: 707022 - RNA, 19 nt, Homo sapiens
  misc_RNA (1)...(19): siRNA sense strand
ggugagcgcugccucuaug

SEQ ID NO: 707023 - RNA, 19 nt, Homo sapiens
  misc_RNA (1)...(19): siRNA sense strand
ggauuacuaugacgacuuc

SEQ ID NO: 707024 - RNA, 19 nt, Homo sapiens
  misc_RNA (1)...(19): siRNA sense strand
gggcaagagugucgugguu

SEQ ID NO: 707025 - RNA, 19 nt, Homo sapiens
  misc_RNA (1)...(19): siRNA sense strand
gagaaggugucugaguuug

SEQ ID NO: 707026 - RNA, 19 nt, Homo sapiens
  misc_RNA (1)...(19): siRNA sense strand
guacauggccaaggucauu

SEQ ID NO: 707027 - RNA, 19 nt, Homo sapiens
  misc_RNA (1)...(19): siRNA sense strand
ugacguggucuuuguagua

SEQ ID NO: 707028 - RNA, 19 nt, Homo sapiens
  misc_RNA (1)...(19): siRNA sense strand
gcguagagcaugugaguga

SEQ ID NO: 707029 - RNA, 19 nt, Homo sapiens
  misc_RNA (1)...(19): siRNA sense strand
gcaagagugucgugguucu

SEQ ID NO: 707030 - RNA, 19 nt, Homo sapiens
  misc_RNA (1)...(19): siRNA sense strand
gagcugcccuucccuuguc

SEQ ID NO: 707031 - RNA, 19 nt, Homo sapiens
  misc_RNA (1)...(19): siRNA sense strand
acgaggagcugguacucua

SEQ ID NO: 707032 - RNA, 19 nt, Homo sapiens
  misc_RNA (1)...(19): siRNA sense strand
gcuccgaggugaucuuugg

SEQ ID NO: 707033 - RNA, 19 nt, Homo sapiens
  misc_RNA (1)...(19): siRNA sense strand
guacuaugccugcuugugu

SEQ ID NO: 707034 - RNA, 19 nt, Homo sapiens
  misc_RNA (1)...(19): siRNA sense strand
ggaggcgggauuacuauga

SEQ ID NO: 707035 - RNA, 19 nt, Homo sapiens
  misc_RNA (1)...(19): siRNA sense strand
ccaacaugcuggacaccaa

SEQ ID NO: 707036 - RNA, 19 nt, Homo sapiens
  misc_RNA (1)...(19): siRNA sense strand
cgagaaggugucugaguuu

SEQ ID NO: 707037 - RNA, 19 nt, Homo sapiens
  misc_RNA (1)...(19): siRNA sense strand
acagugacguggucuuugu

SEQ ID NO: 707038 - RNA, 19 nt, Homo sapiens
  misc_RNA (1)...(19): siRNA sense strand
uggccaaggucauugagaa

SEQ ID NO: 707039 - RNA, 19 nt, Homo sapiens
  misc_RNA (1)...(19): siRNA sense strand
ugaaggugcugaccaucga

SEQ ID NO: 707040 - RNA, 19 nt, Homo sapiens
  misc_RNA (1)...(19): siRNA sense strand
ggacaccagcgaccuguuc

SEQ ID NO: 707041 - RNA, 19 nt, Homo sapiens
  misc_RNA (1)...(19): siRNA sense strand
caacagcugcccugacauc

SEQ ID NO: 707042 - RNA, 19 nt, Homo sapiens
  misc_RNA (1)...(19): siRNA sense strand
ccaucggucuggacuguug

SEQ ID NO: 707043 - RNA, 19 nt, Homo sapiens
  misc_RNA (1)...(19): siRNA sense strand
ggcaggagacggacucuau

SEQ ID NO: 707044 - RNA, 19 nt, Homo sapiens
  misc_RNA (1)...(19): siRNA sense strand
caacaugcuggacaccaaa

SEQ ID NO: 707045 - RNA, 19 nt, Homo sapiens
  misc_RNA (1)...(19): siRNA sense strand
gcagaccuacagcgccaua

SEQ ID NO: 707046 - RNA, 19 nt, Homo sapiens
  misc_RNA (1)...(19): siRNA sense strand
ggacauuggcguagagcau

SEQ ID NO: 707047 - RNA, 19 nt, Homo sapiens
  misc_RNA (1)...(19): siRNA sense strand
caucucacccgacgucuuc

SEQ ID NO: 707048 - RNA, 19 nt, Homo sapiens
  misc_RNA (1)...(19): siRNA sense strand
uccgagcccugcuggauga

SEQ ID NO: 707049 - RNA, 19 nt, Homo sapiens
  misc_RNA (1)...(19): siRNA sense strand
gacguggucuuuguaguac

SEQ ID NO: 707050 - RNA, 19 nt, Homo sapiens
  misc_RNA (1)...(19): siRNA sense strand
uuacuaugacgacuucuug

SEQ ID NO: 707051 - RNA, 19 nt, Homo sapiens
  misc_RNA (1)...(19): siRNA sense strand
cacccgacgucuucacuca

SEQ ID NO: 707052 - RNA, 19 nt, Homo sapiens
  misc_RNA (1)...(19): siRNA sense strand
gagcuccgaggugaucuuu

SEQ ID NO: 707053 - RNA, 19 nt, Homo sapiens
  misc_RNA (1)...(19): siRNA sense strand
cugaguuuguggcgucuaa

SEQ ID NO: 707054 - RNA, 19 nt, Homo sapiens
  misc_RNA (1)...(19): siRNA sense strand
caaauggaagggcaagagu

SEQ ID NO: 707055 - RNA, 19 nt, Homo sapiens
  misc_RNA (1)...(19): siRNA sense strand
gcaggagacggacucuauc

SEQ ID NO: 707056 - RNA, 19 nt, Homo sapiens
  misc_RNA (1)...(19): siRNA sense strand
uucaacagcugcccugaca

SEQ ID NO: 707057 - RNA, 19 nt, Homo sapiens
  misc_RNA (1)...(19): siRNA sense strand
ggagcugcccuucccuugu

SEQ ID NO: 707058 - RNA, 19 nt, Homo sapiens
  misc_RNA (1)...(19): siRNA sense strand
cacgugcucuacuacaugu

SEQ ID NO: 707059 - RNA, 19 nt, Homo sapiens
  misc_RNA (1)...(19): siRNA sense strand
gaggcgggauuacuaugac

SEQ ID NO: 707060 - RNA, 19 nt, Homo sapiens
  misc_RNA (1)...(19): siRNA sense strand
ccaaggucauugagaagcu

SEQ ID NO: 707061 - RNA, 19 nt, Homo sapiens
  misc_RNA (1)...(19): siRNA sense strand
cugaguacauggccaaggu

SEQ ID NO: 707062 - RNA, 19 nt, Homo sapiens
  misc_RNA (1)...(19): siRNA sense strand
gugugaaggugcugaccau

SEQ ID NO: 707063 - RNA, 19 nt, Homo sapiens
  misc_RNA (1)...(19): siRNA sense strand
ccugcuggaugaccacuuc

SEQ ID NO: 707064 - RNA, 19 nt, Homo sapiens
  misc_RNA (1)...(19): siRNA sense strand
gugccuacuuugccaacau

SEQ ID NO: 707065 - RNA, 19 nt, Homo sapiens
  misc_RNA (1)...(19): siRNA sense strand
gggauuacuaugacgacuu

SEQ ID NO: 707066 - RNA, 19 nt, Homo sapiens
  misc_RNA (1)...(19): siRNA sense strand
ucacgugcucuacuacaug

SEQ ID NO: 707067 - RNA, 19 nt, Homo sapiens
  misc_RNA (1)...(19): siRNA sense strand
ggccaacaccuucgauggu

SEQ ID NO: 707068 - RNA, 19 nt, Homo sapiens
  misc_RNA (1)...(19): siRNA sense strand
gcgagaaggugucugaguu

SEQ ID NO: 707069 - RNA, 19 nt, Homo sapiens
  misc_RNA (1)...(19): siRNA sense strand
gaaggugucugaguuugug

SEQ ID NO: 707070 - RNA, 19 nt, Homo sapiens
  misc_RNA (1)...(19): siRNA sense strand
gcaggaggcgggauuacua

SEQ ID NO: 707071 - RNA, 19 nt, Homo sapiens
  misc_RNA (1)...(19): siRNA sense strand
gaugaccacuuccgagaga

SEQ ID NO: 707072 - RNA, 19 nt, Homo sapiens
  misc_RNA (1)...(19): siRNA sense strand
ucacucacgugcucuacua

SEQ ID NO: 707073 - RNA, 19 nt, Homo sapiens
  misc_RNA (1)...(19): siRNA sense strand
ggugagcgcugccucuaug

SEQ ID NO: 707074 - RNA, 19 nt, Homo sapiens
  misc_RNA (1)...(19): siRNA sense strand
ggauuacuaugacgacuuc

SEQ ID NO: 707075 - RNA, 19 nt, Homo sapiens
  misc_RNA (1)...(19): siRNA sense strand
gggcaagagugucgugguu

SEQ ID NO: 707076 - RNA, 19 nt, Homo sapiens
  misc_RNA (1)...(19): siRNA sense strand
gagaaggugucugaguuug

SEQ ID NO: 707077 - RNA, 19 nt, Homo sapiens
  misc_RNA (1)...(19): siRNA sense strand
guacauggccaaggucauu

SEQ ID NO: 707078 - RNA, 19 nt, Homo sapiens
  misc_RNA (1)...(19): siRNA sense strand
ugacguggucuuuguagua

SEQ ID NO: 707079 - RNA, 19 nt, Homo sapiens
  misc_RNA (1)...(19): siRNA sense strand
gcguagagcaugugaguga

SEQ ID NO: 707080 - RNA, 19 nt, Homo sapiens
  misc_RNA (1)...(19): siRNA sense strand
acgaggagcugguacucua

SEQ ID NO: 707081 - RNA, 19 nt, Homo sapiens
  misc_RNA (1)...(19): siRNA sense strand
gagcugcccuucccuuguc

SEQ ID NO: 707082 - RNA, 19 nt, Homo sapiens
  misc_RNA (1)...(19): siRNA sense strand
gcaagagugucgugguucu

SEQ ID NO: 707083 - RNA, 19 nt, Homo sapiens
  misc_RNA (1)...(19): siRNA sense strand
guacuaugccugcuugugu

SEQ ID NO: 707084 - RNA, 19 nt, Homo sapiens
  misc_RNA (1)...(19): siRNA sense strand
gcuccgaggugaucuuugg

SEQ ID NO: 707085 - RNA, 19 nt, Homo sapiens
  misc_RNA (1)...(19): siRNA sense strand
ggaggcgggauuacuauga

SEQ ID NO: 707086 - RNA, 19 nt, Homo sapiens
  misc_RNA (1)...(19): siRNA sense strand
ccaacaugcuggacaccaa

SEQ ID NO: 707087 - RNA, 19 nt, Homo sapiens
  misc_RNA (1)...(19): siRNA sense strand
cgagaaggugucugaguuu

SEQ ID NO: 707088 - RNA, 19 nt, Homo sapiens
  misc_RNA (1)...(19): siRNA sense strand
acagugacguggucuuugu

SEQ ID NO: 707089 - RNA, 19 nt, Homo sapiens
  misc_RNA (1)...(19): siRNA sense strand
uggccaaggucauugagaa

SEQ ID NO: 707090 - RNA, 19 nt, Homo sapiens
  misc_RNA (1)...(19): siRNA sense strand
ugaaggugcugaccaucga

SEQ ID NO: 707091 - RNA, 19 nt, Homo sapiens
  misc_RNA (1)...(19): siRNA sense strand
caacagcugcccugacauc

SEQ ID NO: 707092 - RNA, 19 nt, Homo sapiens
  misc_RNA (1)...(19): siRNA sense strand
ccaucggucuggacuguug

SEQ ID NO: 707093 - RNA, 19 nt, Homo sapiens
  misc_RNA (1)...(19): siRNA sense strand
ggcaggagacggacucuau

SEQ ID NO: 707094 - RNA, 19 nt, Homo sapiens
  misc_RNA (1)...(19): siRNA sense strand
caacaugcuggacaccaaa

SEQ ID NO: 707095 - RNA, 19 nt, Homo sapiens
  misc_RNA (1)...(19): siRNA sense strand
gcagaccuacagcgccaua

SEQ ID NO: 707096 - RNA, 19 nt, Homo sapiens
  misc_RNA (1)...(19): siRNA sense strand
ggacauuggcguagagcau

SEQ ID NO: 707097 - RNA, 19 nt, Homo sapiens
  misc_RNA (1)...(19): siRNA sense strand
caucucacccgacgucuuc

SEQ ID NO: 707098 - RNA, 19 nt, Homo sapiens
  misc_RNA (1)...(19): siRNA sense strand
uccgagcccugcuggauga

SEQ ID NO: 707099 - RNA, 19 nt, Homo sapiens
  misc_RNA (1)...(19): siRNA sense strand
gacguggucuuuguaguac

SEQ ID NO: 707100 - RNA, 19 nt, Homo sapiens
  misc_RNA (1)...(19): siRNA sense strand
uuacuaugacgacuucuug

SEQ ID NO: 707101 - RNA, 19 nt, Homo sapiens
  misc_RNA (1)...(19): siRNA sense strand
cacccgacgucuucacuca

SEQ ID NO: 707102 - RNA, 19 nt, Homo sapiens
  misc_RNA (1)...(19): siRNA sense strand
gagcuccgaggugaucuuu

SEQ ID NO: 707103 - RNA, 19 nt, Homo sapiens
  misc_RNA (1)...(19): siRNA sense strand
cugaguuuguggcgucuaa

SEQ ID NO: 707104 - RNA, 19 nt, Homo sapiens
  misc_RNA (1)...(19): siRNA sense strand
caaauggaagggcaagagu

SEQ ID NO: 707105 - RNA, 19 nt, Homo sapiens
  misc_RNA (1)...(19): siRNA sense strand
gcaggagacggacucuauc

SEQ ID NO: 707106 - RNA, 19 nt, Homo sapiens
  misc_RNA (1)...(19): siRNA sense strand
uucaacagcugcccugaca

SEQ ID NO: 707107 - RNA, 19 nt, Homo sapiens
  misc_RNA (1)...(19): siRNA sense strand
ggagcugcccuucccuugu

SEQ ID NO: 707108 - RNA, 19 nt, Homo sapiens
  misc_RNA (1)...(19): siRNA sense strand
cacgugcucuacuacaugu

SEQ ID NO: 707109 - RNA, 19 nt, Homo sapiens
  misc_RNA (1)...(19): siRNA sense strand
gaggcgggauuacuaugac

SEQ ID NO: 707110 - RNA, 19 nt, Homo sapiens
  misc_RNA (1)...(19): siRNA sense strand
ccaaggucauugagaagcu

SEQ ID NO: 707111 - RNA, 19 nt, Homo sapiens
  misc_RNA (1)...(19): siRNA sense strand
cugaguacauggccaaggu

SEQ ID NO: 707112 - RNA, 19 nt, Homo sapiens
  misc_RNA (1)...(19): siRNA sense strand
gugugaaggugcugaccau

SEQ ID NO: 707113 - RNA, 19 nt, Homo sapiens
  misc_RNA (1)...(19): siRNA sense strand
ccugcuggaugaccacuuc

SEQ ID NO: 707114 - RNA, 19 nt, Homo sapiens
  misc_RNA (1)...(19): siRNA sense strand
gugccuacuuugccaacau

SEQ ID NO: 707115 - RNA, 19 nt, Homo sapiens
  misc_RNA (1)...(19): siRNA sense strand
gggauuacuaugacgacuu

SEQ ID NO: 707116 - RNA, 19 nt, Homo sapiens
  misc_RNA (1)...(19): siRNA sense strand
ucacgugcucuacuacaug

SEQ ID NO: 707117 - RNA, 19 nt, Homo sapiens
  misc_RNA (1)...(19): siRNA sense strand
ggccaacaccuucgauggu

SEQ ID NO: 707118 - RNA, 19 nt, Homo sapiens
  misc_RNA (1)...(19): siRNA sense strand
gaaacgacaucgagaagaa

SEQ ID NO: 707119 - RNA, 19 nt, Homo sapiens
  misc_RNA (1)...(19): siRNA sense strand
gcaaaugucucggaaagaa

SEQ ID NO: 707120 - RNA, 19 nt, Homo sapiens
  misc_RNA (1)...(19): siRNA sense strand
gaaaacagaugaaauugug

SEQ ID NO: 707121 - RNA, 19 nt, Homo sapiens
  misc_RNA (1)...(19): siRNA sense strand
gcauggagaucacaauaag

SEQ ID NO: 707122 - RNA, 19 nt, Homo sapiens
  misc_RNA (1)...(19): siRNA sense strand
gagcaccagugaagaauca

SEQ ID NO: 707123 - RNA, 19 nt, Homo sapiens
  misc_RNA (1)...(19): siRNA sense strand
ugaaacaccugcacgacaa

SEQ ID NO: 707124 - RNA, 19 nt, Homo sapiens
  misc_RNA (1)...(19): siRNA sense strand
gaaaaggacucuuggaaag

SEQ ID NO: 707125 - RNA, 19 nt, Homo sapiens
  misc_RNA (1)...(19): siRNA sense strand
uaaagcggcugaagaugga

SEQ ID NO: 707126 - RNA, 19 nt, Homo sapiens
  misc_RNA (1)...(19): siRNA sense strand
agaaaugagugaagaugaa

SEQ ID NO: 707127 - RNA, 19 nt, Homo sapiens
  misc_RNA (1)...(19): siRNA sense strand
gagugaagaugaagaacga

SEQ ID NO: 707128 - RNA, 19 nt, Homo sapiens
  misc_RNA (1)...(19): siRNA sense strand
gcagcaacauggacaagau

SEQ ID NO: 707129 - RNA, 19 nt, Homo sapiens
  misc_RNA (1)...(19): siRNA sense strand
gaagggagcaccagugaag

SEQ ID NO: 707130 - RNA, 19 nt, Homo sapiens
  misc_RNA (1)...(19): siRNA sense strand
ggaaggaacaagaggagaa

SEQ ID NO: 707131 - RNA, 19 nt, Homo sapiens
  misc_RNA (1)...(19): siRNA sense strand
ggaguggucuacagagcaa

SEQ ID NO: 707132 - RNA, 19 nt, Homo sapiens
  misc_RNA (1)...(19): siRNA sense strand
gaagaugaagaacgagaaa

SEQ ID NO: 707133 - RNA, 19 nt, Homo sapiens
  misc_RNA (1)...(19): siRNA sense strand
gcacgaacgucggaaacga

SEQ ID NO: 707134 - RNA, 19 nt, Homo sapiens
  misc_RNA (1)...(19): siRNA sense strand
gagaagacucuauggaaga

SEQ ID NO: 707135 - RNA, 19 nt, Homo sapiens
  misc_RNA (1)...(19): siRNA sense strand
cagcaaaugucucggaaag

SEQ ID NO: 707136 - RNA, 19 nt, Homo sapiens
  misc_RNA (1)...(19): siRNA sense strand
cagaaaagaugaaaagaga

SEQ ID NO: 707137 - RNA, 19 nt, Homo sapiens
  misc_RNA (1)...(19): siRNA sense strand
gaagaaaugagugaagaug

SEQ ID NO: 707138 - RNA, 19 nt, Homo sapiens
  misc_RNA (1)...(19): siRNA sense strand
agaaguaagugaggaagaa

SEQ ID NO: 707139 - RNA, 19 nt, Homo sapiens
  misc_RNA (1)...(19): siRNA sense strand
ggaagacagaggagaagaa

SEQ ID NO: 707140 - RNA, 19 nt, Homo sapiens
  misc_RNA (1)...(19): siRNA sense strand
gaaggaacaagaggagaaa

SEQ ID NO: 707141 - RNA, 19 nt, Homo sapiens
  misc_RNA (1)...(19): siRNA sense strand
ugacagagggcgacuaugu

SEQ ID NO: 707142 - RNA, 19 nt, Homo sapiens
  misc_RNA (1)...(19): siRNA sense strand
ggagaaagcagagauaaaa

SEQ ID NO: 707143 - RNA, 19 nt, Homo sapiens
  misc_RNA (1)...(19): siRNA sense strand
gagaagaacaggauaaagc

SEQ ID NO: 707144 - RNA, 19 nt, Homo sapiens
  misc_RNA (1)...(19): siRNA sense strand
gaggagaaagcagagauaa

SEQ ID NO: 707145 - RNA, 19 nt, Homo sapiens
  misc_RNA (1)...(19): siRNA sense strand
ugaagaagcagaggaagaa

SEQ ID NO: 707146 - RNA, 19 nt, Homo sapiens
  misc_RNA (1)...(19): siRNA sense strand
gagcauuccaggagagaaa

SEQ ID NO: 707147 - RNA, 19 nt, Homo sapiens
  misc_RNA (1)...(19): siRNA sense strand
aaggagggcuucccgauca

SEQ ID NO: 707148 - RNA, 19 nt, Homo sapiens
  misc_RNA (1)...(19): siRNA sense strand
gcuucgaccucaugaacaa

SEQ ID NO: 707149 - RNA, 19 nt, Homo sapiens
  misc_RNA (1)...(19): siRNA sense strand
gaaguaagugaggaagaaa

SEQ ID NO: 707150 - RNA, 19 nt, Homo sapiens
  misc_RNA (1)...(19): siRNA sense strand
caacaucgucaccguuaga

SEQ ID NO: 707151 - RNA, 19 nt, Homo sapiens
  misc_RNA (1)...(19): siRNA sense strand
ugagggagaucaacaccau

SEQ ID NO: 707152 - RNA, 19 nt, Homo sapiens
  misc_RNA (1)...(19): siRNA sense strand
aaaggacucuuggaaagug

SEQ ID NO: 707153 - RNA, 19 nt, Homo sapiens
  misc_RNA (1)...(19): siRNA sense strand
gcucuaaagcggcugaaga

SEQ ID NO: 707154 - RNA, 19 nt, Homo sapiens
  misc_RNA (1)...(19): siRNA sense strand
ggcugaagauggagaagga

SEQ ID NO: 707155 - RNA, 19 nt, Homo sapiens
  misc_RNA (1)...(19): siRNA sense strand
agacagaggagaagaagau

SEQ ID NO: 707156 - RNA, 19 nt, Homo sapiens
  misc_RNA (1)...(19): siRNA sense strand
gaucaacaccauccucaag

SEQ ID NO: 707157 - RNA, 19 nt, Homo sapiens
  misc_RNA (1)...(19): siRNA sense strand
gaugaaauuguggcucuaa

SEQ ID NO: 707158 - RNA, 19 nt, Homo sapiens
  misc_RNA (1)...(19): siRNA sense strand
gaaucaggcucagguucug

SEQ ID NO: 707159 - RNA, 19 nt, Homo sapiens
  misc_RNA (1)...(19): siRNA sense strand
gaggugaagacccugauga

SEQ ID NO: 707160 - RNA, 19 nt, Homo sapiens
  misc_RNA (1)...(19): siRNA sense strand
ggaggaggaggaagaggaa

SEQ ID NO: 707161 - RNA, 19 nt, Homo sapiens
  misc_RNA (1)...(19): siRNA sense strand
ggaaacgacaucgagaaga

SEQ ID NO: 707162 - RNA, 19 nt, Homo sapiens
  misc_RNA (1)...(19): siRNA sense strand
agucagaaaucgaucagau

SEQ ID NO: 707163 - RNA, 19 nt, Homo sapiens
  misc_RNA (1)...(19): siRNA sense strand
ucacgucgcugagggagau

SEQ ID NO: 707164 - RNA, 19 nt, Homo sapiens
  misc_RNA (1)...(19): siRNA sense strand
gaaauuguggcucuaaagc

SEQ ID NO: 707165 - RNA, 19 nt, Homo sapiens
  misc_RNA (1)...(19): siRNA sense strand
gucaguggguugcaucuuc

SEQ ID NO: 707166 - RNA, 19 nt, Homo sapiens
  misc_RNA (1)...(19): siRNA sense strand
ugaagacccugaugaucca

SEQ ID NO: 707167 - RNA, 19 nt, Homo sapiens
  misc_RNA (1)...(19): siRNA sense strand
gaagacagaggagaagaag

SEQ ID NO: 707168 - RNA, 19 nt, Homo sapiens
  misc_RNA (1)...(19): siRNA sense strand
gaagaacgagaaaaugaaa

SEQ ID NO: 707169 - RNA, 19 nt, Homo sapiens
  misc_RNA (1)...(19): siRNA sense strand
ggaagaaaugagugaagau

SEQ ID NO: 707170 - RNA, 19 nt, Homo sapiens
  misc_RNA (1)...(19): siRNA sense strand
agacagaagagaagggaaa

SEQ ID NO: 707171 - RNA, 19 nt, Homo sapiens
  misc_RNA (1)...(19): siRNA sense strand
gaaugggaaagacagaaga

SEQ ID NO: 707172 - RNA, 19 nt, Homo sapiens
  misc_RNA (1)...(19): siRNA sense strand
caaaugucucggaaagaaa

SEQ ID NO: 707173 - RNA, 19 nt, Homo sapiens
  misc_RNA (1)...(19): siRNA sense strand
gaggagaagaagaugauuc

SEQ ID NO: 707174 - RNA, 19 nt, Homo sapiens
  misc_RNA (1)...(19): siRNA sense strand
gcaacauggacaagaucua

SEQ ID NO: 707175 - RNA, 19 nt, Homo sapiens
  misc_RNA (1)...(19): siRNA sense strand
aggaagaaaugagugaaga

SEQ ID NO: 707176 - RNA, 19 nt, Homo sapiens
  misc_RNA (1)...(19): siRNA sense strand
auaaggaacuccccguaua

SEQ ID NO: 707177 - RNA, 19 nt, Homo sapiens
  misc_RNA (1)...(19): siRNA sense strand
gagugaagaagcagaggaa

SEQ ID NO: 707178 - RNA, 19 nt, Homo sapiens
  misc_RNA (1)...(19): siRNA sense strand
ggaagucagaaaucgauca

SEQ ID NO: 707179 - RNA, 19 nt, Homo sapiens
  misc_RNA (1)...(19): siRNA sense strand
cccaacaucgucaccguua

SEQ ID NO: 707180 - RNA, 19 nt, Homo sapiens
  misc_RNA (1)...(19): siRNA sense strand
gggaaagacagaagagaag

SEQ ID NO: 707181 - RNA, 19 nt, Homo sapiens
  misc_RNA (1)...(19): siRNA sense strand
caaaagacaagaaaacaga

SEQ ID NO: 707182 - RNA, 19 nt, Homo sapiens
  misc_RNA (1)...(19): siRNA sense strand
gaucgaggagggcaccuau

SEQ ID NO: 707183 - RNA, 19 nt, Homo sapiens
  misc_RNA (1)...(19): siRNA sense strand
gaaaugagugaagaugaag

SEQ ID NO: 707184 - RNA, 19 nt, Homo sapiens
  misc_RNA (1)...(19): siRNA sense strand
ggaagaggaggaggaggaa

SEQ ID NO: 707185 - RNA, 19 nt, Homo sapiens
  misc_RNA (1)...(19): siRNA sense strand
caugcuagagugaaagaaa

SEQ ID NO: 707186 - RNA, 19 nt, Homo sapiens
  misc_RNA (1)...(19): siRNA sense strand
gaagagaaaauggaagaaa

SEQ ID NO: 707187 - RNA, 19 nt, Homo sapiens
  misc_RNA (1)...(19): siRNA sense strand
ggaaugggaaagacagaag

SEQ ID NO: 707188 - RNA, 19 nt, Homo sapiens
  misc_RNA (1)...(19): siRNA sense strand
cgucaccguuagagagauu

SEQ ID NO: 707189 - RNA, 19 nt, Homo sapiens
  misc_RNA (1)...(19): siRNA sense strand
gugaagaagcagaggaaga

SEQ ID NO: 707190 - RNA, 19 nt, Homo sapiens
  misc_RNA (1)...(19): siRNA sense strand
cgaagaaguaagugaggaa

SEQ ID NO: 707191 - RNA, 19 nt, Homo sapiens
  misc_RNA (1)...(19): siRNA sense strand
caacauggacaagaucuac

SEQ ID NO: 707192 - RNA, 19 nt, Homo sapiens
  misc_RNA (1)...(19): siRNA sense strand
ggaacaagaggagaaagca

SEQ ID NO: 707193 - RNA, 19 nt, Homo sapiens
  misc_RNA (1)...(19): siRNA sense strand
gaaacgaaggaaggaacaa

SEQ ID NO: 707194 - RNA, 19 nt, Homo sapiens
  misc_RNA (1)...(19): siRNA sense strand
ggaagggagcaccagugaa

SEQ ID NO: 707195 - RNA, 19 nt, Homo sapiens
  misc_RNA (1)...(19): siRNA sense strand
cagaggagaagaagaugau

SEQ ID NO: 707196 - RNA, 19 nt, Homo sapiens
  misc_RNA (1)...(19): siRNA sense strand
guaagugaggaagaaauga

SEQ ID NO: 707197 - RNA, 19 nt, Homo sapiens
  misc_RNA (1)...(19): siRNA sense strand
gcagaaucaggcucagguu

SEQ ID NO: 707198 - RNA, 19 nt, Homo sapiens
  misc_RNA (1)...(19): siRNA sense strand
cagaagagaagggaaaugg

SEQ ID NO: 707199 - RNA, 19 nt, Homo sapiens
  misc_RNA (1)...(19): siRNA sense strand
aggacggccucaagcauga

SEQ ID NO: 707200 - RNA, 19 nt, Homo sapiens
  misc_RNA (1)...(19): siRNA sense strand
gcaccuauggaguggucua

SEQ ID NO: 707201 - RNA, 19 nt, Homo sapiens
  misc_RNA (1)...(19): siRNA sense strand
gacagagggcgacuaugug

SEQ ID NO: 707202 - RNA, 19 nt, Homo sapiens
  misc_RNA (1)...(19): siRNA sense strand
aagaaaugagugaagauga

SEQ ID NO: 707203 - RNA, 19 nt, Homo sapiens
  misc_RNA (1)...(19): siRNA sense strand
ggaaauggcaagggagcau

SEQ ID NO: 707204 - RNA, 19 nt, Homo sapiens
  misc_RNA (1)...(19): siRNA sense strand
agaggagaaagcagagaua

SEQ ID NO: 707205 - RNA, 19 nt, Homo sapiens
  misc_RNA (1)...(19): siRNA sense strand
gaagauggagaaggagaag

SEQ ID NO: 707206 - RNA, 19 nt, Homo sapiens
  misc_RNA (1)...(19): siRNA sense strand
gaggagaccggcagcaacu

SEQ ID NO: 707207 - RNA, 19 nt, Homo sapiens
  misc_RNA (1)...(19): siRNA sense strand
agaaagagagcacgaacgu

SEQ ID NO: 707208 - RNA, 19 nt, Homo sapiens
  misc_RNA (1)...(19): siRNA sense strand
gaggaagaaaugagugaag

SEQ ID NO: 707209 - RNA, 19 nt, Homo sapiens
  misc_RNA (1)...(19): siRNA sense strand
gcagagauaaaacgcuuaa

SEQ ID NO: 707210 - RNA, 19 nt, Homo sapiens
  misc_RNA (1)...(19): siRNA sense strand
ugggaaagacagaagagaa

SEQ ID NO: 707211 - RNA, 19 nt, Homo sapiens
  misc_RNA (1)...(19): siRNA sense strand
ucccagcagucaagaagau

SEQ ID NO: 707212 - RNA, 19 nt, Homo sapiens
  misc_RNA (1)...(19): siRNA sense strand
agaagcagaggaagaagug

SEQ ID NO: 707213 - RNA, 19 nt, Homo sapiens
  misc_RNA (1)...(19): siRNA sense strand
uauggaagacagaggagaa

SEQ ID NO: 707214 - RNA, 19 nt, Homo sapiens
  misc_RNA (1)...(19): siRNA sense strand
ugaagaugaagaacgagaa

SEQ ID NO: 707215 - RNA, 19 nt, Homo sapiens
  misc_RNA (1)...(19): siRNA sense strand
gugaggaagaaaugaguga

SEQ ID NO: 707216 - RNA, 19 nt, Homo sapiens
  misc_RNA (1)...(19): siRNA sense strand
gaacuccccguauagaaga

SEQ ID NO: 707217 - RNA, 19 nt, Homo sapiens
  misc_RNA (1)...(19): siRNA sense strand
ugaaaaggacucuuggaaa

SEQ ID NO: 707218 - RNA, 19 nt, Homo sapiens
  misc_RNA (1)...(19): siRNA sense strand
gaaacgacaucgagaagaa

SEQ ID NO: 707219 - RNA, 19 nt, Homo sapiens
  misc_RNA (1)...(19): siRNA sense strand
gcaaaugucucggaaagaa

SEQ ID NO: 707220 - RNA, 19 nt, Homo sapiens
  misc_RNA (1)...(19): siRNA sense strand
gaaaacagaugaaauugug

SEQ ID NO: 707221 - RNA, 19 nt, Homo sapiens
  misc_RNA (1)...(19): siRNA sense strand
gcauggagaucacaauaag

SEQ ID NO: 707222 - RNA, 19 nt, Homo sapiens
  misc_RNA (1)...(19): siRNA sense strand
gagcaccagugaagaauca

SEQ ID NO: 707223 - RNA, 19 nt, Homo sapiens
  misc_RNA (1)...(19): siRNA sense strand
ugaaacaccugcacgacaa

SEQ ID NO: 707224 - RNA, 19 nt, Homo sapiens
  misc_RNA (1)...(19): siRNA sense strand
gaaaaggacucuuggaaag

SEQ ID NO: 707225 - RNA, 19 nt, Homo sapiens
  misc_RNA (1)...(19): siRNA sense strand
uaaagcggcugaagaugga

SEQ ID NO: 707226 - RNA, 19 nt, Homo sapiens
  misc_RNA (1)...(19): siRNA sense strand
agaaaugagugaagaugaa

SEQ ID NO: 707227 - RNA, 19 nt, Homo sapiens
  misc_RNA (1)...(19): siRNA sense strand
gagugaagaugaagaacga

SEQ ID NO: 707228 - RNA, 19 nt, Homo sapiens
  misc_RNA (1)...(19): siRNA sense strand
gcagcaacauggacaagau

SEQ ID NO: 707229 - RNA, 19 nt, Homo sapiens
  misc_RNA (1)...(19): siRNA sense strand
gaagggagcaccagugaag

SEQ ID NO: 707230 - RNA, 19 nt, Homo sapiens
  misc_RNA (1)...(19): siRNA sense strand
ggaaggaacaagaggagaa

SEQ ID NO: 707231 - RNA, 19 nt, Homo sapiens
  misc_RNA (1)...(19): siRNA sense strand
ggaguggucuacagagcaa

SEQ ID NO: 707232 - RNA, 19 nt, Homo sapiens
  misc_RNA (1)...(19): siRNA sense strand
gaagaugaagaacgagaaa

SEQ ID NO: 707233 - RNA, 19 nt, Homo sapiens
  misc_RNA (1)...(19): siRNA sense strand
gcacgaacgucggaaacga

SEQ ID NO: 707234 - RNA, 19 nt, Homo sapiens
  misc_RNA (1)...(19): siRNA sense strand
gagaagacucuauggaaga

SEQ ID NO: 707235 - RNA, 19 nt, Homo sapiens
  misc_RNA (1)...(19): siRNA sense strand
cagcaaaugucucggaaag

SEQ ID NO: 707236 - RNA, 19 nt, Homo sapiens
  misc_RNA (1)...(19): siRNA sense strand
cagaaaagaugaaaagaga

SEQ ID NO: 707237 - RNA, 19 nt, Homo sapiens
  misc_RNA (1)...(19): siRNA sense strand
gaagaaaugagugaagaug

SEQ ID NO: 707238 - RNA, 19 nt, Homo sapiens
  misc_RNA (1)...(19): siRNA sense strand
agaaguaagugaggaagaa

SEQ ID NO: 707239 - RNA, 19 nt, Homo sapiens
  misc_RNA (1)...(19): siRNA sense strand
ggaagacagaggagaagaa

SEQ ID NO: 707240 - RNA, 19 nt, Homo sapiens
  misc_RNA (1)...(19): siRNA sense strand
gaaggaacaagaggagaaa

SEQ ID NO: 707241 - RNA, 19 nt, Homo sapiens
  misc_RNA (1)...(19): siRNA sense strand
ugacagagggcgacuaugu

SEQ ID NO: 707242 - RNA, 19 nt, Homo sapiens
  misc_RNA (1)...(19): siRNA sense strand
ggagaaagcagagauaaaa

SEQ ID NO: 707243 - RNA, 19 nt, Homo sapiens
  misc_RNA (1)...(19): siRNA sense strand
gagaagaacaggauaaagc

SEQ ID NO: 707244 - RNA, 19 nt, Homo sapiens
  misc_RNA (1)...(19): siRNA sense strand
gaggagaaagcagagauaa

SEQ ID NO: 707245 - RNA, 19 nt, Homo sapiens
  misc_RNA (1)...(19): siRNA sense strand
ugaagaagcagaggaagaa

SEQ ID NO: 707246 - RNA, 19 nt, Homo sapiens
  misc_RNA (1)...(19): siRNA sense strand
gagcauuccaggagagaaa

SEQ ID NO: 707247 - RNA, 19 nt, Homo sapiens
  misc_RNA (1)...(19): siRNA sense strand
aaggagggcuucccgauca

SEQ ID NO: 707248 - RNA, 19 nt, Homo sapiens
  misc_RNA (1)...(19): siRNA sense strand
gcuucgaccucaugaacaa

SEQ ID NO: 707249 - RNA, 19 nt, Homo sapiens
  misc_RNA (1)...(19): siRNA sense strand
gaaguaagugaggaagaaa

SEQ ID NO: 707250 - RNA, 19 nt, Homo sapiens
  misc_RNA (1)...(19): siRNA sense strand
caacaucgucaccguuaga

SEQ ID NO: 707251 - RNA, 19 nt, Homo sapiens
  misc_RNA (1)...(19): siRNA sense strand
ugagggagaucaacaccau

SEQ ID NO: 707252 - RNA, 19 nt, Homo sapiens
  misc_RNA (1)...(19): siRNA sense strand
aaaggacucuuggaaagug

SEQ ID NO: 707253 - RNA, 19 nt, Homo sapiens
  misc_RNA (1)...(19): siRNA sense strand
gcucuaaagcggcugaaga

SEQ ID NO: 707254 - RNA, 19 nt, Homo sapiens
  misc_RNA (1)...(19): siRNA sense strand
ggcugaagauggagaagga

SEQ ID NO: 707255 - RNA, 19 nt, Homo sapiens
  misc_RNA (1)...(19): siRNA sense strand
agacagaggagaagaagau

SEQ ID NO: 707256 - RNA, 19 nt, Homo sapiens
  misc_RNA (1)...(19): siRNA sense strand
gaucaacaccauccucaag

SEQ ID NO: 707257 - RNA, 19 nt, Homo sapiens
  misc_RNA (1)...(19): siRNA sense strand
gaugaaauuguggcucuaa

SEQ ID NO: 707258 - RNA, 19 nt, Homo sapiens
  misc_RNA (1)...(19): siRNA sense strand
gaaucaggcucagguucug

SEQ ID NO: 707259 - RNA, 19 nt, Homo sapiens
  misc_RNA (1)...(19): siRNA sense strand
gaggugaagacccugauga

SEQ ID NO: 707260 - RNA, 19 nt, Homo sapiens
  misc_RNA (1)...(19): siRNA sense strand
ggaggaggaggaagaggaa

SEQ ID NO: 707261 - RNA, 19 nt, Homo sapiens
  misc_RNA (1)...(19): siRNA sense strand
ggaaacgacaucgagaaga

SEQ ID NO: 707262 - RNA, 19 nt, Homo sapiens
  misc_RNA (1)...(19): siRNA sense strand
agucagaaaucgaucagau

SEQ ID NO: 707263 - RNA, 19 nt, Homo sapiens
  misc_RNA (1)...(19): siRNA sense strand
ucacgucgcugagggagau

SEQ ID NO: 707264 - RNA, 19 nt, Homo sapiens
  misc_RNA (1)...(19): siRNA sense strand
gaaauuguggcucuaaagc

SEQ ID NO: 707265 - RNA, 19 nt, Homo sapiens
  misc_RNA (1)...(19): siRNA sense strand
gucaguggguugcaucuuc

SEQ ID NO: 707266 - RNA, 19 nt, Homo sapiens
  misc_RNA (1)...(19): siRNA sense strand
ugaagacccugaugaucca

SEQ ID NO: 707267 - RNA, 19 nt, Homo sapiens
  misc_RNA (1)...(19): siRNA sense strand
gaagacagaggagaagaag

SEQ ID NO: 707268 - RNA, 19 nt, Homo sapiens
  misc_RNA (1)...(19): siRNA sense strand
gaagaacgagaaaaugaaa

SEQ ID NO: 707269 - RNA, 19 nt, Homo sapiens
  misc_RNA (1)...(19): siRNA sense strand
ggaagaaaugagugaagau

SEQ ID NO: 707270 - RNA, 19 nt, Homo sapiens
  misc_RNA (1)...(19): siRNA sense strand
agacagaagagaagggaaa

SEQ ID NO: 707271 - RNA, 19 nt, Homo sapiens
  misc_RNA (1)...(19): siRNA sense strand
gaaugggaaagacagaaga

SEQ ID NO: 707272 - RNA, 19 nt, Homo sapiens
  misc_RNA (1)...(19): siRNA sense strand
caaaugucucggaaagaaa

SEQ ID NO: 707273 - RNA, 19 nt, Homo sapiens
  misc_RNA (1)...(19): siRNA sense strand
gaggagaagaagaugauuc

SEQ ID NO: 707274 - RNA, 19 nt, Homo sapiens
  misc_RNA (1)...(19): siRNA sense strand
gcaacauggacaagaucua

SEQ ID NO: 707275 - RNA, 19 nt, Homo sapiens
  misc_RNA (1)...(19): siRNA sense strand
aggaagaaaugagugaaga

SEQ ID NO: 707276 - RNA, 19 nt, Homo sapiens
  misc_RNA (1)...(19): siRNA sense strand
auaaggaacuccccguaua

SEQ ID NO: 707277 - RNA, 19 nt, Homo sapiens
  misc_RNA (1)...(19): siRNA sense strand
gagugaagaagcagaggaa

SEQ ID NO: 707278 - RNA, 19 nt, Homo sapiens
  misc_RNA (1)...(19): siRNA sense strand
ggaagucagaaaucgauca

SEQ ID NO: 707279 - RNA, 19 nt, Homo sapiens
  misc_RNA (1)...(19): siRNA sense strand
cccaacaucgucaccguua

SEQ ID NO: 707280 - RNA, 19 nt, Homo sapiens
  misc_RNA (1)...(19): siRNA sense strand
gggaaagacagaagagaag

SEQ ID NO: 707281 - RNA, 19 nt, Homo sapiens
  misc_RNA (1)...(19): siRNA sense strand
caaaagacaagaaaacaga

SEQ ID NO: 707282 - RNA, 19 nt, Homo sapiens
  misc_RNA (1)...(19): siRNA sense strand
gaucgaggagggcaccuau

SEQ ID NO: 707283 - RNA, 19 nt, Homo sapiens
  misc_RNA (1)...(19): siRNA sense strand
gaaaugagugaagaugaag

SEQ ID NO: 707284 - RNA, 19 nt, Homo sapiens
  misc_RNA (1)...(19): siRNA sense strand
ggaagaggaggaggaggaa

SEQ ID NO: 707285 - RNA, 19 nt, Homo sapiens
  misc_RNA (1)...(19): siRNA sense strand
caugcuagagugaaagaaa

SEQ ID NO: 707286 - RNA, 19 nt, Homo sapiens
  misc_RNA (1)...(19): siRNA sense strand
gaagagaaaauggaagaaa

SEQ ID NO: 707287 - RNA, 19 nt, Homo sapiens
  misc_RNA (1)...(19): siRNA sense strand
ggaaugggaaagacagaag

SEQ ID NO: 707288 - RNA, 19 nt, Homo sapiens
  misc_RNA (1)...(19): siRNA sense strand
cgucaccguuagagagauu

SEQ ID NO: 707289 - RNA, 19 nt, Homo sapiens
  misc_RNA (1)...(19): siRNA sense strand
gugaagaagcagaggaaga

SEQ ID NO: 707290 - RNA, 19 nt, Homo sapiens
  misc_RNA (1)...(19): siRNA sense strand
cgaagaaguaagugaggaa

SEQ ID NO: 707291 - RNA, 19 nt, Homo sapiens
  misc_RNA (1)...(19): siRNA sense strand
caacauggacaagaucuac

SEQ ID NO: 707292 - RNA, 19 nt, Homo sapiens
  misc_RNA (1)...(19): siRNA sense strand
ggaacaagaggagaaagca

SEQ ID NO: 707293 - RNA, 19 nt, Homo sapiens
  misc_RNA (1)...(19): siRNA sense strand
gaaacgaaggaaggaacaa

SEQ ID NO: 707294 - RNA, 19 nt, Homo sapiens
  misc_RNA (1)...(19): siRNA sense strand
ggaagggagcaccagugaa

SEQ ID NO: 707295 - RNA, 19 nt, Homo sapiens
  misc_RNA (1)...(19): siRNA sense strand
cagaggagaagaagaugau

SEQ ID NO: 707296 - RNA, 19 nt, Homo sapiens
  misc_RNA (1)...(19): siRNA sense strand
guaagugaggaagaaauga

SEQ ID NO: 707297 - RNA, 19 nt, Homo sapiens
  misc_RNA (1)...(19): siRNA sense strand
gcagaaucaggcucagguu

SEQ ID NO: 707298 - RNA, 19 nt, Homo sapiens
  misc_RNA (1)...(19): siRNA sense strand
cagaagagaagggaaaugg

SEQ ID NO: 707299 - RNA, 19 nt, Homo sapiens
  misc_RNA (1)...(19): siRNA sense strand
aggacggccucaagcauga

SEQ ID NO: 707300 - RNA, 19 nt, Homo sapiens
  misc_RNA (1)...(19): siRNA sense strand
gcaccuauggaguggucua

SEQ ID NO: 707301 - RNA, 19 nt, Homo sapiens
  misc_RNA (1)...(19): siRNA sense strand
gacagagggcgacuaugug

SEQ ID NO: 707302 - RNA, 19 nt, Homo sapiens
  misc_RNA (1)...(19): siRNA sense strand
aagaaaugagugaagauga

SEQ ID NO: 707303 - RNA, 19 nt, Homo sapiens
  misc_RNA (1)...(19): siRNA sense strand
ggaaauggcaagggagcau

SEQ ID NO: 707304 - RNA, 19 nt, Homo sapiens
  misc_RNA (1)...(19): siRNA sense strand
agaggagaaagcagagaua

SEQ ID NO: 707305 - RNA, 19 nt, Homo sapiens
  misc_RNA (1)...(19): siRNA sense strand
gaagauggagaaggagaag

SEQ ID NO: 707306 - RNA, 19 nt, Homo sapiens
  misc_RNA (1)...(19): siRNA sense strand
gaggagaccggcagcaacu

SEQ ID NO: 707307 - RNA, 19 nt, Homo sapiens
  misc_RNA (1)...(19): siRNA sense strand
agaaagagagcacgaacgu

SEQ ID NO: 707308 - RNA, 19 nt, Homo sapiens
  misc_RNA (1)...(19): siRNA sense strand
gaggaagaaaugagugaag

SEQ ID NO: 707309 - RNA, 19 nt, Homo sapiens
  misc_RNA (1)...(19): siRNA sense strand
gcagagauaaaacgcuuaa

SEQ ID NO: 707310 - RNA, 19 nt, Homo sapiens
  misc_RNA (1)...(19): siRNA sense strand
ugggaaagacagaagagaa

SEQ ID NO: 707311 - RNA, 19 nt, Homo sapiens
  misc_RNA (1)...(19): siRNA sense strand
ucccagcagucaagaagau

SEQ ID NO: 707312 - RNA, 19 nt, Homo sapiens
  misc_RNA (1)...(19): siRNA sense strand
agaagcagaggaagaagug

SEQ ID NO: 707313 - RNA, 19 nt, Homo sapiens
  misc_RNA (1)...(19): siRNA sense strand
uauggaagacagaggagaa

SEQ ID NO: 707314 - RNA, 19 nt, Homo sapiens
  misc_RNA (1)...(19): siRNA sense strand
ugaagaugaagaacgagaa

SEQ ID NO: 707315 - RNA, 19 nt, Homo sapiens
  misc_RNA (1)...(19): siRNA sense strand
gugaggaagaaaugaguga

SEQ ID NO: 707316 - RNA, 19 nt, Homo sapiens
  misc_RNA (1)...(19): siRNA sense strand
gaacuccccguauagaaga

SEQ ID NO: 707317 - RNA, 19 nt, Homo sapiens
  misc_RNA (1)...(19): siRNA sense strand
ugaaaaggacucuuggaaa

SEQ ID NO: 707318 - RNA, 19 nt, Homo sapiens
  misc_RNA (1)...(19): siRNA sense strand
gaaaacagaugaaauugug

SEQ ID NO: 707319 - RNA, 19 nt, Homo sapiens
  misc_RNA (1)...(19): siRNA sense strand
gagcaccagugaagaauca

SEQ ID NO: 707320 - RNA, 19 nt, Homo sapiens
  misc_RNA (1)...(19): siRNA sense strand
ugaaacaccugcacgacaa

SEQ ID NO: 707321 - RNA, 19 nt, Homo sapiens
  misc_RNA (1)...(19): siRNA sense strand
uaaagcggcugaagaugga

SEQ ID NO: 707322 - RNA, 19 nt, Homo sapiens
  misc_RNA (1)...(19): siRNA sense strand
agaaaugagugaagaugaa

SEQ ID NO: 707323 - RNA, 19 nt, Homo sapiens
  misc_RNA (1)...(19): siRNA sense strand
gagugaagaugaagaacga

SEQ ID NO: 707324 - RNA, 19 nt, Homo sapiens
  misc_RNA (1)...(19): siRNA sense strand
gcagcaacauggacaagau

SEQ ID NO: 707325 - RNA, 19 nt, Homo sapiens
  misc_RNA (1)...(19): siRNA sense strand
gaagggagcaccagugaag

SEQ ID NO: 707326 - RNA, 19 nt, Homo sapiens
  misc_RNA (1)...(19): siRNA sense strand
gaagaugaagaacgagaaa

SEQ ID NO: 707327 - RNA, 19 nt, Homo sapiens
  misc_RNA (1)...(19): siRNA sense strand
ggaguggucuacagagcaa

SEQ ID NO: 707328 - RNA, 19 nt, Homo sapiens
  misc_RNA (1)...(19): siRNA sense strand
gaagaaaugagugaagaug

SEQ ID NO: 707329 - RNA, 19 nt, Homo sapiens
  misc_RNA (1)...(19): siRNA sense strand
agaaguaagugaggaagaa

SEQ ID NO: 707330 - RNA, 19 nt, Homo sapiens
  misc_RNA (1)...(19): siRNA sense strand
ugacagagggcgacuaugu

SEQ ID NO: 707331 - RNA, 19 nt, Homo sapiens
  misc_RNA (1)...(19): siRNA sense strand
ugaagaagcagaggaagaa

SEQ ID NO: 707332 - RNA, 19 nt, Homo sapiens
  misc_RNA (1)...(19): siRNA sense strand
aaggagggcuucccgauca

SEQ ID NO: 707333 - RNA, 19 nt, Homo sapiens
  misc_RNA (1)...(19): siRNA sense strand
gcuucgaccucaugaacaa

SEQ ID NO: 707334 - RNA, 19 nt, Homo sapiens
  misc_RNA (1)...(19): siRNA sense strand
gaaguaagugaggaagaaa

SEQ ID NO: 707335 - RNA, 19 nt, Homo sapiens
  misc_RNA (1)...(19): siRNA sense strand
caacaucgucaccguuaga

SEQ ID NO: 707336 - RNA, 19 nt, Homo sapiens
  misc_RNA (1)...(19): siRNA sense strand
ugagggagaucaacaccau

SEQ ID NO: 707337 - RNA, 19 nt, Homo sapiens
  misc_RNA (1)...(19): siRNA sense strand
gcucuaaagcggcugaaga

SEQ ID NO: 707338 - RNA, 19 nt, Homo sapiens
  misc_RNA (1)...(19): siRNA sense strand
ggcugaagauggagaagga

SEQ ID NO: 707339 - RNA, 19 nt, Homo sapiens
  misc_RNA (1)...(19): siRNA sense strand
gaugaaauuguggcucuaa

SEQ ID NO: 707340 - RNA, 19 nt, Homo sapiens
  misc_RNA (1)...(19): siRNA sense strand
gaucaacaccauccucaag

SEQ ID NO: 707341 - RNA, 19 nt, Homo sapiens
  misc_RNA (1)...(19): siRNA sense strand
ggaggaggaggaagaggaa

SEQ ID NO: 707342 - RNA, 19 nt, Homo sapiens
  misc_RNA (1)...(19): siRNA sense strand
gaggugaagacccugauga

SEQ ID NO: 707343 - RNA, 19 nt, Homo sapiens
  misc_RNA (1)...(19): siRNA sense strand
gaaucaggcucagguucug

SEQ ID NO: 707344 - RNA, 19 nt, Homo sapiens
  misc_RNA (1)...(19): siRNA sense strand
ucacgucgcugagggagau

SEQ ID NO: 707345 - RNA, 19 nt, Homo sapiens
  misc_RNA (1)...(19): siRNA sense strand
agucagaaaucgaucagau

SEQ ID NO: 707346 - RNA, 19 nt, Homo sapiens
  misc_RNA (1)...(19): siRNA sense strand
gaaauuguggcucuaaagc

SEQ ID NO: 707347 - RNA, 19 nt, Homo sapiens
  misc_RNA (1)...(19): siRNA sense strand
gucaguggguugcaucuuc

SEQ ID NO: 707348 - RNA, 19 nt, Homo sapiens
  misc_RNA (1)...(19): siRNA sense strand
ugaagacccugaugaucca

SEQ ID NO: 707349 - RNA, 19 nt, Homo sapiens
  misc_RNA (1)...(19): siRNA sense strand
ggaagaaaugagugaagau

SEQ ID NO: 707350 - RNA, 19 nt, Homo sapiens
  misc_RNA (1)...(19): siRNA sense strand
gaagaacgagaaaaugaaa

SEQ ID NO: 707351 - RNA, 19 nt, Homo sapiens
  misc_RNA (1)...(19): siRNA sense strand
aggaagaaaugagugaaga

SEQ ID NO: 707352 - RNA, 19 nt, Homo sapiens
  misc_RNA (1)...(19): siRNA sense strand
gcaacauggacaagaucua

SEQ ID NO: 707353 - RNA, 19 nt, Homo sapiens
  misc_RNA (1)...(19): siRNA sense strand
gagugaagaagcagaggaa

SEQ ID NO: 707354 - RNA, 19 nt, Homo sapiens
  misc_RNA (1)...(19): siRNA sense strand
ggaagucagaaaucgauca

SEQ ID NO: 707355 - RNA, 19 nt, Homo sapiens
  misc_RNA (1)...(19): siRNA sense strand
cccaacaucgucaccguua

SEQ ID NO: 707356 - RNA, 19 nt, Homo sapiens
  misc_RNA (1)...(19): siRNA sense strand
gaaaugagugaagaugaag

SEQ ID NO: 707357 - RNA, 19 nt, Homo sapiens
  misc_RNA (1)...(19): siRNA sense strand
ggaagaggaggaggaggaa

SEQ ID NO: 707358 - RNA, 19 nt, Homo sapiens
  misc_RNA (1)...(19): siRNA sense strand
caaaagacaagaaaacaga

SEQ ID NO: 707359 - RNA, 19 nt, Homo sapiens
  misc_RNA (1)...(19): siRNA sense strand
gaucgaggagggcaccuau

SEQ ID NO: 707360 - RNA, 19 nt, Homo sapiens
  misc_RNA (1)...(19): siRNA sense strand
cgaagaaguaagugaggaa

SEQ ID NO: 707361 - RNA, 19 nt, Homo sapiens
  misc_RNA (1)...(19): siRNA sense strand
cgucaccguuagagagauu

SEQ ID NO: 707362 - RNA, 19 nt, Homo sapiens
  misc_RNA (1)...(19): siRNA sense strand
gugaagaagcagaggaaga

SEQ ID NO: 707363 - RNA, 19 nt, Homo sapiens
  misc_RNA (1)...(19): siRNA sense strand
caacauggacaagaucuac

SEQ ID NO: 707364 - RNA, 19 nt, Homo sapiens
  misc_RNA (1)...(19): siRNA sense strand
ggaagggagcaccagugaa

SEQ ID NO: 707365 - RNA, 19 nt, Homo sapiens
  misc_RNA (1)...(19): siRNA sense strand
gcagaaucaggcucagguu

SEQ ID NO: 707366 - RNA, 19 nt, Homo sapiens
  misc_RNA (1)...(19): siRNA sense strand
guaagugaggaagaaauga

SEQ ID NO: 707367 - RNA, 19 nt, Homo sapiens
  misc_RNA (1)...(19): siRNA sense strand
aagaaaugagugaagauga

SEQ ID NO: 707368 - RNA, 19 nt, Homo sapiens
  misc_RNA (1)...(19): siRNA sense strand
aggacggccucaagcauga

SEQ ID NO: 707369 - RNA, 19 nt, Homo sapiens
  misc_RNA (1)...(19): siRNA sense strand
gcaccuauggaguggucua

SEQ ID NO: 707370 - RNA, 19 nt, Homo sapiens
  misc_RNA (1)...(19): siRNA sense strand
gacagagggcgacuaugug

SEQ ID NO: 707371 - RNA, 19 nt, Homo sapiens
  misc_RNA (1)...(19): siRNA sense strand
gaggagaccggcagcaacu

SEQ ID NO: 707372 - RNA, 19 nt, Homo sapiens
  misc_RNA (1)...(19): siRNA sense strand
gaagauggagaaggagaag

SEQ ID NO: 707373 - RNA, 19 nt, Homo sapiens
  misc_RNA (1)...(19): siRNA sense strand
gaggaagaaaugagugaag

SEQ ID NO: 707374 - RNA, 19 nt, Homo sapiens
  misc_RNA (1)...(19): siRNA sense strand
ugaagaugaagaacgagaa

SEQ ID NO: 707375 - RNA, 19 nt, Homo sapiens
  misc_RNA (1)...(19): siRNA sense strand
ucccagcagucaagaagau

SEQ ID NO: 707376 - RNA, 19 nt, Homo sapiens
  misc_RNA (1)...(19): siRNA sense strand
agaagcagaggaagaagug

SEQ ID NO: 707377 - RNA, 19 nt, Homo sapiens
  misc_RNA (1)...(19): siRNA sense strand
gugaggaagaaaugaguga

SEQ ID NO: 707378 - RNA, 19 nt, Homo sapiens
  misc_RNA (1)...(19): siRNA sense strand
gcaccagugaagaaucaga

SEQ ID NO: 707379 - RNA, 19 nt, Homo sapiens
  misc_RNA (1)...(19): siRNA sense strand
ugaagauggagaaggagaa

SEQ ID NO: 707380 - RNA, 19 nt, Homo sapiens
  misc_RNA (1)...(19): siRNA sense strand
aagaggaggaggaggaaga

SEQ ID NO: 707381 - RNA, 19 nt, Homo sapiens
  misc_RNA (1)...(19): siRNA sense strand
acaagguguucaaggaucu

SEQ ID NO: 707382 - RNA, 19 nt, Homo sapiens
  misc_RNA (1)...(19): siRNA sense strand
gaguacggauccccucuga

SEQ ID NO: 707383 - RNA, 19 nt, Homo sapiens
  misc_RNA (1)...(19): siRNA sense strand
ccaacaucgucaccguuag

SEQ ID NO: 707384 - RNA, 19 nt, Homo sapiens
  misc_RNA (1)...(19): siRNA sense strand
gaagucagaaaucgaucag

SEQ ID NO: 707385 - RNA, 19 nt, Homo sapiens
  misc_RNA (1)...(19): siRNA sense strand
ggugaagacccugaugauc

SEQ ID NO: 707386 - RNA, 19 nt, Homo sapiens
  misc_RNA (1)...(19): siRNA sense strand
ugaaauuguggcucuaaag

SEQ ID NO: 707387 - RNA, 19 nt, Homo sapiens
  misc_RNA (1)...(19): siRNA sense strand
gggcuucgaccucaugaac

SEQ ID NO: 707388 - RNA, 19 nt, Homo sapiens
  misc_RNA (1)...(19): siRNA sense strand
ggaggugaagacccugaug

SEQ ID NO: 707389 - RNA, 19 nt, Homo sapiens
  misc_RNA (1)...(19): siRNA sense strand
ggagaccggcagcaacucu

SEQ ID NO: 707390 - RNA, 19 nt, Homo sapiens
  misc_RNA (1)...(19): siRNA sense strand
gaaacgacaucgagaagaa

SEQ ID NO: 707391 - RNA, 19 nt, Homo sapiens
  misc_RNA (1)...(19): siRNA sense strand
gcaaaugucucggaaagaa

SEQ ID NO: 707392 - RNA, 19 nt, Homo sapiens
  misc_RNA (1)...(19): siRNA sense strand
gaaaacagaugaaauugug

SEQ ID NO: 707393 - RNA, 19 nt, Homo sapiens
  misc_RNA (1)...(19): siRNA sense strand
gcauggagaucacaauaag

SEQ ID NO: 707394 - RNA, 19 nt, Homo sapiens
  misc_RNA (1)...(19): siRNA sense strand
gagcaccagugaagaauca

SEQ ID NO: 707395 - RNA, 19 nt, Homo sapiens
  misc_RNA (1)...(19): siRNA sense strand
ugaaacaccugcacgacaa

SEQ ID NO: 707396 - RNA, 19 nt, Homo sapiens
  misc_RNA (1)...(19): siRNA sense strand
uaaagcggcugaagaugga

SEQ ID NO: 707397 - RNA, 19 nt, Homo sapiens
  misc_RNA (1)...(19): siRNA sense strand
agaaaugagugaagaugaa

SEQ ID NO: 707398 - RNA, 19 nt, Homo sapiens
  misc_RNA (1)...(19): siRNA sense strand
gagugaagaugaagaacga

SEQ ID NO: 707399 - RNA, 19 nt, Homo sapiens
  misc_RNA (1)...(19): siRNA sense strand
gcagcaacauggacaagau

SEQ ID NO: 707400 - RNA, 19 nt, Homo sapiens
  misc_RNA (1)...(19): siRNA sense strand
gaagggagcaccagugaag

SEQ ID NO: 707401 - RNA, 19 nt, Homo sapiens
  misc_RNA (1)...(19): siRNA sense strand
gagaagacucuauggaaga

SEQ ID NO: 707402 - RNA, 19 nt, Homo sapiens
  misc_RNA (1)...(19): siRNA sense strand
ggaguggucuacagagcaa

SEQ ID NO: 707403 - RNA, 19 nt, Homo sapiens
  misc_RNA (1)...(19): siRNA sense strand
gaagaugaagaacgagaaa

SEQ ID NO: 707404 - RNA, 19 nt, Homo sapiens
  misc_RNA (1)...(19): siRNA sense strand
gcacgaacgucggaaacga

SEQ ID NO: 707405 - RNA, 19 nt, Homo sapiens
  misc_RNA (1)...(19): siRNA sense strand
cagcaaaugucucggaaag

SEQ ID NO: 707406 - RNA, 19 nt, Homo sapiens
  misc_RNA (1)...(19): siRNA sense strand
cagaaaagaugaaaagaga

SEQ ID NO: 707407 - RNA, 19 nt, Homo sapiens
  misc_RNA (1)...(19): siRNA sense strand
gaagaaaugagugaagaug

SEQ ID NO: 707408 - RNA, 19 nt, Homo sapiens
  misc_RNA (1)...(19): siRNA sense strand
agaaguaagugaggaagaa

SEQ ID NO: 707409 - RNA, 19 nt, Homo sapiens
  misc_RNA (1)...(19): siRNA sense strand
ggaagacagaggagaagaa

SEQ ID NO: 707410 - RNA, 19 nt, Homo sapiens
  misc_RNA (1)...(19): siRNA sense strand
ugacagagggcgacuaugu

SEQ ID NO: 707411 - RNA, 19 nt, Homo sapiens
  misc_RNA (1)...(19): siRNA sense strand
gagaagaacaggauaaagc

SEQ ID NO: 707412 - RNA, 19 nt, Homo sapiens
  misc_RNA (1)...(19): siRNA sense strand
gagcauuccaggagagaaa

SEQ ID NO: 707413 - RNA, 19 nt, Homo sapiens
  misc_RNA (1)...(19): siRNA sense strand
ugaagaagcagaggaagaa

SEQ ID NO: 707414 - RNA, 19 nt, Homo sapiens
  misc_RNA (1)...(19): siRNA sense strand
aaggagggcuucccgauca

SEQ ID NO: 707415 - RNA, 19 nt, Homo sapiens
  misc_RNA (1)...(19): siRNA sense strand
gcuucgaccucaugaacaa

SEQ ID NO: 707416 - RNA, 19 nt, Homo sapiens
  misc_RNA (1)...(19): siRNA sense strand
gaaguaagugaggaagaaa

SEQ ID NO: 707417 - RNA, 19 nt, Homo sapiens
  misc_RNA (1)...(19): siRNA sense strand
caacaucgucaccguuaga

SEQ ID NO: 707418 - RNA, 19 nt, Homo sapiens
  misc_RNA (1)...(19): siRNA sense strand
ugagggagaucaacaccau

SEQ ID NO: 707419 - RNA, 19 nt, Homo sapiens
  misc_RNA (1)...(19): siRNA sense strand
gcucuaaagcggcugaaga

SEQ ID NO: 707420 - RNA, 19 nt, Homo sapiens
  misc_RNA (1)...(19): siRNA sense strand
ggcugaagauggagaagga

SEQ ID NO: 707421 - RNA, 19 nt, Homo sapiens
  misc_RNA (1)...(19): siRNA sense strand
agacagaggagaagaagau

SEQ ID NO: 707422 - RNA, 19 nt, Homo sapiens
  misc_RNA (1)...(19): siRNA sense strand
gaucaacaccauccucaag

SEQ ID NO: 707423 - RNA, 19 nt, Homo sapiens
  misc_RNA (1)...(19): siRNA sense strand
gaugaaauuguggcucuaa

SEQ ID NO: 707424 - RNA, 19 nt, Homo sapiens
  misc_RNA (1)...(19): siRNA sense strand
gaaucaggcucagguucug

SEQ ID NO: 707425 - RNA, 19 nt, Homo sapiens
  misc_RNA (1)...(19): siRNA sense strand
gaggugaagacccugauga

SEQ ID NO: 707426 - RNA, 19 nt, Homo sapiens
  misc_RNA (1)...(19): siRNA sense strand
ggaggaggaggaagaggaa

SEQ ID NO: 707427 - RNA, 19 nt, Homo sapiens
  misc_RNA (1)...(19): siRNA sense strand
ggaaacgacaucgagaaga

SEQ ID NO: 707428 - RNA, 19 nt, Homo sapiens
  misc_RNA (1)...(19): siRNA sense strand
agucagaaaucgaucagau

SEQ ID NO: 707429 - RNA, 19 nt, Homo sapiens
  misc_RNA (1)...(19): siRNA sense strand
ucacgucgcugagggagau

SEQ ID NO: 707430 - RNA, 19 nt, Homo sapiens
  misc_RNA (1)...(19): siRNA sense strand
gaaauuguggcucuaaagc

SEQ ID NO: 707431 - RNA, 19 nt, Homo sapiens
  misc_RNA (1)...(19): siRNA sense strand
gucaguggguugcaucuuc

SEQ ID NO: 707432 - RNA, 19 nt, Homo sapiens
  misc_RNA (1)...(19): siRNA sense strand
ugaagacccugaugaucca

SEQ ID NO: 707433 - RNA, 19 nt, Homo sapiens
  misc_RNA (1)...(19): siRNA sense strand
caaaugucucggaaagaaa

SEQ ID NO: 707434 - RNA, 19 nt, Homo sapiens
  misc_RNA (1)...(19): siRNA sense strand
gaagaacgagaaaaugaaa

SEQ ID NO: 707435 - RNA, 19 nt, Homo sapiens
  misc_RNA (1)...(19): siRNA sense strand
ggaagaaaugagugaagau

SEQ ID NO: 707436 - RNA, 19 nt, Homo sapiens
  misc_RNA (1)...(19): siRNA sense strand
gaagacagaggagaagaag

SEQ ID NO: 707437 - RNA, 19 nt, Homo sapiens
  misc_RNA (1)...(19): siRNA sense strand
agacagaagagaagggaaa

SEQ ID NO: 707438 - RNA, 19 nt, Homo sapiens
  misc_RNA (1)...(19): siRNA sense strand
gaaugggaaagacagaaga

SEQ ID NO: 707439 - RNA, 19 nt, Homo sapiens
  misc_RNA (1)...(19): siRNA sense strand
aggaagaaaugagugaaga

SEQ ID NO: 707440 - RNA, 19 nt, Homo sapiens
  misc_RNA (1)...(19): siRNA sense strand
gaggagaagaagaugauuc

SEQ ID NO: 707441 - RNA, 19 nt, Homo sapiens
  misc_RNA (1)...(19): siRNA sense strand
gcaacauggacaagaucua

SEQ ID NO: 707442 - RNA, 19 nt, Homo sapiens
  misc_RNA (1)...(19): siRNA sense strand
auaaggaacuccccguaua

SEQ ID NO: 707443 - RNA, 19 nt, Homo sapiens
  misc_RNA (1)...(19): siRNA sense strand
gagugaagaagcagaggaa

SEQ ID NO: 707444 - RNA, 19 nt, Homo sapiens
  misc_RNA (1)...(19): siRNA sense strand
ggaagucagaaaucgauca

SEQ ID NO: 707445 - RNA, 19 nt, Homo sapiens
  misc_RNA (1)...(19): siRNA sense strand
cccaacaucgucaccguua

SEQ ID NO: 707446 - RNA, 19 nt, Homo sapiens
  misc_RNA (1)...(19): siRNA sense strand
gggaaagacagaagagaag

SEQ ID NO: 707447 - RNA, 19 nt, Homo sapiens
  misc_RNA (1)...(19): siRNA sense strand
caaaagacaagaaaacaga

SEQ ID NO: 707448 - RNA, 19 nt, Homo sapiens
  misc_RNA (1)...(19): siRNA sense strand
gaucgaggagggcaccuau

SEQ ID NO: 707449 - RNA, 19 nt, Homo sapiens
  misc_RNA (1)...(19): siRNA sense strand
gaaaugagugaagaugaag

SEQ ID NO: 707450 - RNA, 19 nt, Homo sapiens
  misc_RNA (1)...(19): siRNA sense strand
ggaagaggaggaggaggaa

SEQ ID NO: 707451 - RNA, 19 nt, Homo sapiens
  misc_RNA (1)...(19): siRNA sense strand
caugcuagagugaaagaaa

SEQ ID NO: 707452 - RNA, 19 nt, Homo sapiens
  misc_RNA (1)...(19): siRNA sense strand
gaagagaaaauggaagaaa

SEQ ID NO: 707453 - RNA, 19 nt, Homo sapiens
  misc_RNA (1)...(19): siRNA sense strand
ggaaugggaaagacagaag

SEQ ID NO: 707454 - RNA, 19 nt, Homo sapiens
  misc_RNA (1)...(19): siRNA sense strand
cgucaccguuagagagauu

SEQ ID NO: 707455 - RNA, 19 nt, Homo sapiens
  misc_RNA (1)...(19): siRNA sense strand
gugaagaagcagaggaaga

SEQ ID NO: 707456 - RNA, 19 nt, Homo sapiens
  misc_RNA (1)...(19): siRNA sense strand
cgaagaaguaagugaggaa

SEQ ID NO: 707457 - RNA, 19 nt, Homo sapiens
  misc_RNA (1)...(19): siRNA sense strand
caacauggacaagaucuac

SEQ ID NO: 707458 - RNA, 19 nt, Homo sapiens
  misc_RNA (1)...(19): siRNA sense strand
ggaagggagcaccagugaa

SEQ ID NO: 707459 - RNA, 19 nt, Homo sapiens
  misc_RNA (1)...(19): siRNA sense strand
gcagaaucaggcucagguu

SEQ ID NO: 707460 - RNA, 19 nt, Homo sapiens
  misc_RNA (1)...(19): siRNA sense strand
cagaggagaagaagaugau

SEQ ID NO: 707461 - RNA, 19 nt, Homo sapiens
  misc_RNA (1)...(19): siRNA sense strand
guaagugaggaagaaauga

SEQ ID NO: 707462 - RNA, 19 nt, Homo sapiens
  misc_RNA (1)...(19): siRNA sense strand
cagaagagaagggaaaugg

SEQ ID NO: 707463 - RNA, 19 nt, Homo sapiens
  misc_RNA (1)...(19): siRNA sense strand
aggacggccucaagcauga

SEQ ID NO: 707464 - RNA, 19 nt, Homo sapiens
  misc_RNA (1)...(19): siRNA sense strand
gcaccuauggaguggucua

SEQ ID NO: 707465 - RNA, 19 nt, Homo sapiens
  misc_RNA (1)...(19): siRNA sense strand
gacagagggcgacuaugug

SEQ ID NO: 707466 - RNA, 19 nt, Homo sapiens
  misc_RNA (1)...(19): siRNA sense strand
aagaaaugagugaagauga

SEQ ID NO: 707467 - RNA, 19 nt, Homo sapiens
  misc_RNA (1)...(19): siRNA sense strand
ggaaauggcaagggagcau

SEQ ID NO: 707468 - RNA, 19 nt, Homo sapiens
  misc_RNA (1)...(19): siRNA sense strand
gaagauggagaaggagaag

SEQ ID NO: 707469 - RNA, 19 nt, Homo sapiens
  misc_RNA (1)...(19): siRNA sense strand
gaggagaccggcagcaacu

SEQ ID NO: 707470 - RNA, 19 nt, Homo sapiens
  misc_RNA (1)...(19): siRNA sense strand
gaggaagaaaugagugaag

SEQ ID NO: 707471 - RNA, 19 nt, Homo sapiens
  misc_RNA (1)...(19): siRNA sense strand
agaaagagagcacgaacgu

SEQ ID NO: 707472 - RNA, 19 nt, Homo sapiens
  misc_RNA (1)...(19): siRNA sense strand
ugggaaagacagaagagaa

SEQ ID NO: 707473 - RNA, 19 nt, Homo sapiens
  misc_RNA (1)...(19): siRNA sense strand
ucccagcagucaagaagau

SEQ ID NO: 707474 - RNA, 19 nt, Homo sapiens
  misc_RNA (1)...(19): siRNA sense strand
uauggaagacagaggagaa

SEQ ID NO: 707475 - RNA, 19 nt, Homo sapiens
  misc_RNA (1)...(19): siRNA sense strand
agaagcagaggaagaagug

SEQ ID NO: 707476 - RNA, 19 nt, Homo sapiens
  misc_RNA (1)...(19): siRNA sense strand
ugaagaugaagaacgagaa

SEQ ID NO: 707477 - RNA, 19 nt, Homo sapiens
  misc_RNA (1)...(19): siRNA sense strand
gugaggaagaaaugaguga

SEQ ID NO: 707478 - RNA, 19 nt, Homo sapiens
  misc_RNA (1)...(19): siRNA sense strand
gaacuccccguauagaaga

SEQ ID NO: 707479 - RNA, 19 nt, Homo sapiens
  misc_RNA (1)...(19): siRNA sense strand
gcaccagugaagaaucaga

SEQ ID NO: 707480 - RNA, 19 nt, Homo sapiens
  misc_RNA (1)...(19): siRNA sense strand
gaugaaaagagaaaagaga

SEQ ID NO: 707481 - RNA, 19 nt, Homo sapiens
  misc_RNA (1)...(19): siRNA sense strand
caucgagaagaacaggaua

SEQ ID NO: 707482 - RNA, 19 nt, Homo sapiens
  misc_RNA (1)...(19): siRNA sense strand
aagaggaggaggaggaaga

SEQ ID NO: 707483 - RNA, 19 nt, Homo sapiens
  misc_RNA (1)...(19): siRNA sense strand
acaagguguucaaggaucu

SEQ ID NO: 707484 - RNA, 19 nt, Homo sapiens
  misc_RNA (1)...(19): siRNA sense strand
gaguacggauccccucuga

SEQ ID NO: 707485 - RNA, 19 nt, Homo sapiens
  misc_RNA (1)...(19): siRNA sense strand
ugaagauggagaaggagaa

SEQ ID NO: 707486 - RNA, 19 nt, Homo sapiens
  misc_RNA (1)...(19): siRNA sense strand
ccaacaucgucaccguuag

SEQ ID NO: 707487 - RNA, 19 nt, Homo sapiens
  misc_RNA (1)...(19): siRNA sense strand
gaagucagaaaucgaucag

SEQ ID NO: 707488 - RNA, 19 nt, Homo sapiens
  misc_RNA (1)...(19): siRNA sense strand
ggugaagacccugaugauc

SEQ ID NO: 707489 - RNA, 19 nt, Homo sapiens
  misc_RNA (1)...(19): siRNA sense strand
gggcuucgaccucaugaac

SEQ ID NO: 707490 - RNA, 19 nt, Homo sapiens
  misc_RNA (1)...(19): siRNA sense strand
gaaacgacaucgagaagaa

SEQ ID NO: 707491 - RNA, 19 nt, Homo sapiens
  misc_RNA (1)...(19): siRNA sense strand
gcaaaugucucggaaagaa

SEQ ID NO: 707492 - RNA, 19 nt, Homo sapiens
  misc_RNA (1)...(19): siRNA sense strand
gaaaacagaugaaauugug

SEQ ID NO: 707493 - RNA, 19 nt, Homo sapiens
  misc_RNA (1)...(19): siRNA sense strand
gcauggagaucacaauaag

SEQ ID NO: 707494 - RNA, 19 nt, Homo sapiens
  misc_RNA (1)...(19): siRNA sense strand
gagcaccagugaagaauca

SEQ ID NO: 707495 - RNA, 19 nt, Homo sapiens
  misc_RNA (1)...(19): siRNA sense strand
ugaaacaccugcacgacaa

SEQ ID NO: 707496 - RNA, 19 nt, Homo sapiens
  misc_RNA (1)...(19): siRNA sense strand
uaaagcggcugaagaugga

SEQ ID NO: 707497 - RNA, 19 nt, Homo sapiens
  misc_RNA (1)...(19): siRNA sense strand
agaaaugagugaagaugaa

SEQ ID NO: 707498 - RNA, 19 nt, Homo sapiens
  misc_RNA (1)...(19): siRNA sense strand
gagugaagaugaagaacga

SEQ ID NO: 707499 - RNA, 19 nt, Homo sapiens
  misc_RNA (1)...(19): siRNA sense strand
gcagcaacauggacaagau

SEQ ID NO: 707500 - RNA, 19 nt, Homo sapiens
  misc_RNA (1)...(19): siRNA sense strand
gaagggagcaccagugaag

SEQ ID NO: 707501 - RNA, 19 nt, Homo sapiens
  misc_RNA (1)...(19): siRNA sense strand
gagaagacucuauggaaga

SEQ ID NO: 707502 - RNA, 19 nt, Homo sapiens
  misc_RNA (1)...(19): siRNA sense strand
ggaguggucuacagagcaa

SEQ ID NO: 707503 - RNA, 19 nt, Homo sapiens
  misc_RNA (1)...(19): siRNA sense strand
gaagaugaagaacgagaaa

SEQ ID NO: 707504 - RNA, 19 nt, Homo sapiens
  misc_RNA (1)...(19): siRNA sense strand
gcacgaacgucggaaacga

SEQ ID NO: 707505 - RNA, 19 nt, Homo sapiens
  misc_RNA (1)...(19): siRNA sense strand
cagcaaaugucucggaaag

SEQ ID NO: 707506 - RNA, 19 nt, Homo sapiens
  misc_RNA (1)...(19): siRNA sense strand
cagaaaagaugaaaagaga

SEQ ID NO: 707507 - RNA, 19 nt, Homo sapiens
  misc_RNA (1)...(19): siRNA sense strand
gaagaaaugagugaagaug

SEQ ID NO: 707508 - RNA, 19 nt, Homo sapiens
  misc_RNA (1)...(19): siRNA sense strand
agaaguaagugaggaagaa

SEQ ID NO: 707509 - RNA, 19 nt, Homo sapiens
  misc_RNA (1)...(19): siRNA sense strand
ggaagacagaggagaagaa

SEQ ID NO: 707510 - RNA, 19 nt, Homo sapiens
  misc_RNA (1)...(19): siRNA sense strand
ugacagagggcgacuaugu

SEQ ID NO: 707511 - RNA, 19 nt, Homo sapiens
  misc_RNA (1)...(19): siRNA sense strand
gagaagaacaggauaaagc

SEQ ID NO: 707512 - RNA, 19 nt, Homo sapiens
  misc_RNA (1)...(19): siRNA sense strand
gagcauuccaggagagaaa

SEQ ID NO: 707513 - RNA, 19 nt, Homo sapiens
  misc_RNA (1)...(19): siRNA sense strand
ugaagaagcagaggaagaa

SEQ ID NO: 707514 - RNA, 19 nt, Homo sapiens
  misc_RNA (1)...(19): siRNA sense strand
aaggagggcuucccgauca

SEQ ID NO: 707515 - RNA, 19 nt, Homo sapiens
  misc_RNA (1)...(19): siRNA sense strand
gcuucgaccucaugaacaa

SEQ ID NO: 707516 - RNA, 19 nt, Homo sapiens
  misc_RNA (1)...(19): siRNA sense strand
gaaguaagugaggaagaaa

SEQ ID NO: 707517 - RNA, 19 nt, Homo sapiens
  misc_RNA (1)...(19): siRNA sense strand
caacaucgucaccguuaga

SEQ ID NO: 707518 - RNA, 19 nt, Homo sapiens
  misc_RNA (1)...(19): siRNA sense strand
ugagggagaucaacaccau

SEQ ID NO: 707519 - RNA, 19 nt, Homo sapiens
  misc_RNA (1)...(19): siRNA sense strand
gcucuaaagcggcugaaga

SEQ ID NO: 707520 - RNA, 19 nt, Homo sapiens
  misc_RNA (1)...(19): siRNA sense strand
ggcugaagauggagaagga

SEQ ID NO: 707521 - RNA, 19 nt, Homo sapiens
  misc_RNA (1)...(19): siRNA sense strand
agacagaggagaagaagau

SEQ ID NO: 707522 - RNA, 19 nt, Homo sapiens
  misc_RNA (1)...(19): siRNA sense strand
gaucaacaccauccucaag

SEQ ID NO: 707523 - RNA, 19 nt, Homo sapiens
  misc_RNA (1)...(19): siRNA sense strand
gaugaaauuguggcucuaa

SEQ ID NO: 707524 - RNA, 19 nt, Homo sapiens
  misc_RNA (1)...(19): siRNA sense strand
gaaucaggcucagguucug

SEQ ID NO: 707525 - RNA, 19 nt, Homo sapiens
  misc_RNA (1)...(19): siRNA sense strand
gaggugaagacccugauga

SEQ ID NO: 707526 - RNA, 19 nt, Homo sapiens
  misc_RNA (1)...(19): siRNA sense strand
ggaggaggaggaagaggaa

SEQ ID NO: 707527 - RNA, 19 nt, Homo sapiens
  misc_RNA (1)...(19): siRNA sense strand
ggaaacgacaucgagaaga

SEQ ID NO: 707528 - RNA, 19 nt, Homo sapiens
  misc_RNA (1)...(19): siRNA sense strand
agucagaaaucgaucagau

SEQ ID NO: 707529 - RNA, 19 nt, Homo sapiens
  misc_RNA (1)...(19): siRNA sense strand
ucacgucgcugagggagau

SEQ ID NO: 707530 - RNA, 19 nt, Homo sapiens
  misc_RNA (1)...(19): siRNA sense strand
gaaauuguggcucuaaagc

SEQ ID NO: 707531 - RNA, 19 nt, Homo sapiens
  misc_RNA (1)...(19): siRNA sense strand
gucaguggguugcaucuuc

SEQ ID NO: 707532 - RNA, 19 nt, Homo sapiens
  misc_RNA (1)...(19): siRNA sense strand
ugaagacccugaugaucca

SEQ ID NO: 707533 - RNA, 19 nt, Homo sapiens
  misc_RNA (1)...(19): siRNA sense strand
caaaugucucggaaagaaa

SEQ ID NO: 707534 - RNA, 19 nt, Homo sapiens
  misc_RNA (1)...(19): siRNA sense strand
gaagaacgagaaaaugaaa

SEQ ID NO: 707535 - RNA, 19 nt, Homo sapiens
  misc_RNA (1)...(19): siRNA sense strand
ggaagaaaugagugaagau

SEQ ID NO: 707536 - RNA, 19 nt, Homo sapiens
  misc_RNA (1)...(19): siRNA sense strand
gaagacagaggagaagaag

SEQ ID NO: 707537 - RNA, 19 nt, Homo sapiens
  misc_RNA (1)...(19): siRNA sense strand
agacagaagagaagggaaa

SEQ ID NO: 707538 - RNA, 19 nt, Homo sapiens
  misc_RNA (1)...(19): siRNA sense strand
gaaugggaaagacagaaga

SEQ ID NO: 707539 - RNA, 19 nt, Homo sapiens
  misc_RNA (1)...(19): siRNA sense strand
aggaagaaaugagugaaga

SEQ ID NO: 707540 - RNA, 19 nt, Homo sapiens
  misc_RNA (1)...(19): siRNA sense strand
gaggagaagaagaugauuc

SEQ ID NO: 707541 - RNA, 19 nt, Homo sapiens
  misc_RNA (1)...(19): siRNA sense strand
gcaacauggacaagaucua

SEQ ID NO: 707542 - RNA, 19 nt, Homo sapiens
  misc_RNA (1)...(19): siRNA sense strand
auaaggaacuccccguaua

SEQ ID NO: 707543 - RNA, 19 nt, Homo sapiens
  misc_RNA (1)...(19): siRNA sense strand
gagugaagaagcagaggaa

SEQ ID NO: 707544 - RNA, 19 nt, Homo sapiens
  misc_RNA (1)...(19): siRNA sense strand
ggaagucagaaaucgauca

SEQ ID NO: 707545 - RNA, 19 nt, Homo sapiens
  misc_RNA (1)...(19): siRNA sense strand
cccaacaucgucaccguua

SEQ ID NO: 707546 - RNA, 19 nt, Homo sapiens
  misc_RNA (1)...(19): siRNA sense strand
gggaaagacagaagagaag

SEQ ID NO: 707547 - RNA, 19 nt, Homo sapiens
  misc_RNA (1)...(19): siRNA sense strand
caaaagacaagaaaacaga

SEQ ID NO: 707548 - RNA, 19 nt, Homo sapiens
  misc_RNA (1)...(19): siRNA sense strand
gaucgaggagggcaccuau

SEQ ID NO: 707549 - RNA, 19 nt, Homo sapiens
  misc_RNA (1)...(19): siRNA sense strand
gaaaugagugaagaugaag

SEQ ID NO: 707550 - RNA, 19 nt, Homo sapiens
  misc_RNA (1)...(19): siRNA sense strand
ggaagaggaggaggaggaa

SEQ ID NO: 707551 - RNA, 19 nt, Homo sapiens
  misc_RNA (1)...(19): siRNA sense strand
caugcuagagugaaagaaa

SEQ ID NO: 707552 - RNA, 19 nt, Homo sapiens
  misc_RNA (1)...(19): siRNA sense strand
gaagagaaaauggaagaaa

SEQ ID NO: 707553 - RNA, 19 nt, Homo sapiens
  misc_RNA (1)...(19): siRNA sense strand
ggaaugggaaagacagaag

SEQ ID NO: 707554 - RNA, 19 nt, Homo sapiens
  misc_RNA (1)...(19): siRNA sense strand
cgucaccguuagagagauu

SEQ ID NO: 707555 - RNA, 19 nt, Homo sapiens
  misc_RNA (1)...(19): siRNA sense strand
gugaagaagcagaggaaga

SEQ ID NO: 707556 - RNA, 19 nt, Homo sapiens
  misc_RNA (1)...(19): siRNA sense strand
cgaagaaguaagugaggaa

SEQ ID NO: 707557 - RNA, 19 nt, Homo sapiens
  misc_RNA (1)...(19): siRNA sense strand
caacauggacaagaucuac

SEQ ID NO: 707558 - RNA, 19 nt, Homo sapiens
  misc_RNA (1)...(19): siRNA sense strand
ggaagggagcaccagugaa

SEQ ID NO: 707559 - RNA, 19 nt, Homo sapiens
  misc_RNA (1)...(19): siRNA sense strand
gcagaaucaggcucagguu

SEQ ID NO: 707560 - RNA, 19 nt, Homo sapiens
  misc_RNA (1)...(19): siRNA sense strand
cagaggagaagaagaugau

SEQ ID NO: 707561 - RNA, 19 nt, Homo sapiens
  misc_RNA (1)...(19): siRNA sense strand
guaagugaggaagaaauga

SEQ ID NO: 707562 - RNA, 19 nt, Homo sapiens
  misc_RNA (1)...(19): siRNA sense strand
cagaagagaagggaaaugg

SEQ ID NO: 707563 - RNA, 19 nt, Homo sapiens
  misc_RNA (1)...(19): siRNA sense strand
aggacggccucaagcauga

SEQ ID NO: 707564 - RNA, 19 nt, Homo sapiens
  misc_RNA (1)...(19): siRNA sense strand
gcaccuauggaguggucua

SEQ ID NO: 707565 - RNA, 19 nt, Homo sapiens
  misc_RNA (1)...(19): siRNA sense strand
gacagagggcgacuaugug

SEQ ID NO: 707566 - RNA, 19 nt, Homo sapiens
  misc_RNA (1)...(19): siRNA sense strand
aagaaaugagugaagauga

SEQ ID NO: 707567 - RNA, 19 nt, Homo sapiens
  misc_RNA (1)...(19): siRNA sense strand
ggaaauggcaagggagcau

SEQ ID NO: 707568 - RNA, 19 nt, Homo sapiens
  misc_RNA (1)...(19): siRNA sense strand
gaagauggagaaggagaag

SEQ ID NO: 707569 - RNA, 19 nt, Homo sapiens
  misc_RNA (1)...(19): siRNA sense strand
gaggagaccggcagcaacu

SEQ ID NO: 707570 - RNA, 19 nt, Homo sapiens
  misc_RNA (1)...(19): siRNA sense strand
gaggaagaaaugagugaag

SEQ ID NO: 707571 - RNA, 19 nt, Homo sapiens
  misc_RNA (1)...(19): siRNA sense strand
agaaagagagcacgaacgu

SEQ ID NO: 707572 - RNA, 19 nt, Homo sapiens
  misc_RNA (1)...(19): siRNA sense strand
ugggaaagacagaagagaa

SEQ ID NO: 707573 - RNA, 19 nt, Homo sapiens
  misc_RNA (1)...(19): siRNA sense strand
ucccagcagucaagaagau

SEQ ID NO: 707574 - RNA, 19 nt, Homo sapiens
  misc_RNA (1)...(19): siRNA sense strand
uauggaagacagaggagaa

SEQ ID NO: 707575 - RNA, 19 nt, Homo sapiens
  misc_RNA (1)...(19): siRNA sense strand
agaagcagaggaagaagug

SEQ ID NO: 707576 - RNA, 19 nt, Homo sapiens
  misc_RNA (1)...(19): siRNA sense strand
ugaagaugaagaacgagaa

SEQ ID NO: 707577 - RNA, 19 nt, Homo sapiens
  misc_RNA (1)...(19): siRNA sense strand
gugaggaagaaaugaguga

SEQ ID NO: 707578 - RNA, 19 nt, Homo sapiens
  misc_RNA (1)...(19): siRNA sense strand
gaacuccccguauagaaga

SEQ ID NO: 707579 - RNA, 19 nt, Homo sapiens
  misc_RNA (1)...(19): siRNA sense strand
gcaccagugaagaaucaga

SEQ ID NO: 707580 - RNA, 19 nt, Homo sapiens
  misc_RNA (1)...(19): siRNA sense strand
gaugaaaagagaaaagaga

SEQ ID NO: 707581 - RNA, 19 nt, Homo sapiens
  misc_RNA (1)...(19): siRNA sense strand
caucgagaagaacaggaua

SEQ ID NO: 707582 - RNA, 19 nt, Homo sapiens
  misc_RNA (1)...(19): siRNA sense strand
aagaggaggaggaggaaga

SEQ ID NO: 707583 - RNA, 19 nt, Homo sapiens
  misc_RNA (1)...(19): siRNA sense strand
acaagguguucaaggaucu

SEQ ID NO: 707584 - RNA, 19 nt, Homo sapiens
  misc_RNA (1)...(19): siRNA sense strand
gaguacggauccccucuga

SEQ ID NO: 707585 - RNA, 19 nt, Homo sapiens
  misc_RNA (1)...(19): siRNA sense strand
ugaagauggagaaggagaa

SEQ ID NO: 707586 - RNA, 19 nt, Homo sapiens
  misc_RNA (1)...(19): siRNA sense strand
ccaacaucgucaccguuag

SEQ ID NO: 707587 - RNA, 19 nt, Homo sapiens
  misc_RNA (1)...(19): siRNA sense strand
gaagucagaaaucgaucag

SEQ ID NO: 707588 - RNA, 19 nt, Homo sapiens
  misc_RNA (1)...(19): siRNA sense strand
ggugaagacccugaugauc

SEQ ID NO: 707589 - RNA, 19 nt, Homo sapiens
  misc_RNA (1)...(19): siRNA sense strand
gggcuucgaccucaugaac

SEQ ID NO: 707590 - RNA, 19 nt, Homo sapiens
  misc_RNA (1)...(19): siRNA sense strand
gaaaacagaugaaauugug

SEQ ID NO: 707591 - RNA, 19 nt, Homo sapiens
  misc_RNA (1)...(19): siRNA sense strand
gagcaccagugaagaauca

SEQ ID NO: 707592 - RNA, 19 nt, Homo sapiens
  misc_RNA (1)...(19): siRNA sense strand
ugaaacaccugcacgacaa

SEQ ID NO: 707593 - RNA, 19 nt, Homo sapiens
  misc_RNA (1)...(19): siRNA sense strand
uaaagcggcugaagaugga

SEQ ID NO: 707594 - RNA, 19 nt, Homo sapiens
  misc_RNA (1)...(19): siRNA sense strand
agaaaugagugaagaugaa

SEQ ID NO: 707595 - RNA, 19 nt, Homo sapiens
  misc_RNA (1)...(19): siRNA sense strand
gagugaagaugaagaacga

SEQ ID NO: 707596 - RNA, 19 nt, Homo sapiens
  misc_RNA (1)...(19): siRNA sense strand
gcagcaacauggacaagau

SEQ ID NO: 707597 - RNA, 19 nt, Homo sapiens
  misc_RNA (1)...(19): siRNA sense strand
gaagggagcaccagugaag

SEQ ID NO: 707598 - RNA, 19 nt, Homo sapiens
  misc_RNA (1)...(19): siRNA sense strand
gaagaugaagaacgagaaa

SEQ ID NO: 707599 - RNA, 19 nt, Homo sapiens
  misc_RNA (1)...(19): siRNA sense strand
ggaguggucuacagagcaa

SEQ ID NO: 707600 - RNA, 19 nt, Homo sapiens
  misc_RNA (1)...(19): siRNA sense strand
gaagaaaugagugaagaug

SEQ ID NO: 707601 - RNA, 19 nt, Homo sapiens
  misc_RNA (1)...(19): siRNA sense strand
agaaguaagugaggaagaa

SEQ ID NO: 707602 - RNA, 19 nt, Homo sapiens
  misc_RNA (1)...(19): siRNA sense strand
ugacagagggcgacuaugu

SEQ ID NO: 707603 - RNA, 19 nt, Homo sapiens
  misc_RNA (1)...(19): siRNA sense strand
ugaagaagcagaggaagaa

SEQ ID NO: 707604 - RNA, 19 nt, Homo sapiens
  misc_RNA (1)...(19): siRNA sense strand
aaggagggcuucccgauca

SEQ ID NO: 707605 - RNA, 19 nt, Homo sapiens
  misc_RNA (1)...(19): siRNA sense strand
gcuucgaccucaugaacaa

SEQ ID NO: 707606 - RNA, 19 nt, Homo sapiens
  misc_RNA (1)...(19): siRNA sense strand
gaaguaagugaggaagaaa

SEQ ID NO: 707607 - RNA, 19 nt, Homo sapiens
  misc_RNA (1)...(19): siRNA sense strand
caacaucgucaccguuaga

SEQ ID NO: 707608 - RNA, 19 nt, Homo sapiens
  misc_RNA (1)...(19): siRNA sense strand
ugagggagaucaacaccau

SEQ ID NO: 707609 - RNA, 19 nt, Homo sapiens
  misc_RNA (1)...(19): siRNA sense strand
gcucuaaagcggcugaaga

SEQ ID NO: 707610 - RNA, 19 nt, Homo sapiens
  misc_RNA (1)...(19): siRNA sense strand
ggcugaagauggagaagga

SEQ ID NO: 707611 - RNA, 19 nt, Homo sapiens
  misc_RNA (1)...(19): siRNA sense strand
gaugaaauuguggcucuaa

SEQ ID NO: 707612 - RNA, 19 nt, Homo sapiens
  misc_RNA (1)...(19): siRNA sense strand
gaucaacaccauccucaag

SEQ ID NO: 707613 - RNA, 19 nt, Homo sapiens
  misc_RNA (1)...(19): siRNA sense strand
ggaggaggaggaagaggaa

SEQ ID NO: 707614 - RNA, 19 nt, Homo sapiens
  misc_RNA (1)...(19): siRNA sense strand
gaggugaagacccugauga

SEQ ID NO: 707615 - RNA, 19 nt, Homo sapiens
  misc_RNA (1)...(19): siRNA sense strand
gaaucaggcucagguucug

SEQ ID NO: 707616 - RNA, 19 nt, Homo sapiens
  misc_RNA (1)...(19): siRNA sense strand
ucacgucgcugagggagau

SEQ ID NO: 707617 - RNA, 19 nt, Homo sapiens
  misc_RNA (1)...(19): siRNA sense strand
agucagaaaucgaucagau

SEQ ID NO: 707618 - RNA, 19 nt, Homo sapiens
  misc_RNA (1)...(19): siRNA sense strand
gaaauuguggcucuaaagc

SEQ ID NO: 707619 - RNA, 19 nt, Homo sapiens
  misc_RNA (1)...(19): siRNA sense strand
gucaguggguugcaucuuc

SEQ ID NO: 707620 - RNA, 19 nt, Homo sapiens
  misc_RNA (1)...(19): siRNA sense strand
ugaagacccugaugaucca

SEQ ID NO: 707621 - RNA, 19 nt, Homo sapiens
  misc_RNA (1)...(19): siRNA sense strand
ggaagaaaugagugaagau

SEQ ID NO: 707622 - RNA, 19 nt, Homo sapiens
  misc_RNA (1)...(19): siRNA sense strand
gaagaacgagaaaaugaaa

SEQ ID NO: 707623 - RNA, 19 nt, Homo sapiens
  misc_RNA (1)...(19): siRNA sense strand
aggaagaaaugagugaaga

SEQ ID NO: 707624 - RNA, 19 nt, Homo sapiens
  misc_RNA (1)...(19): siRNA sense strand
gcaacauggacaagaucua

SEQ ID NO: 707625 - RNA, 19 nt, Homo sapiens
  misc_RNA (1)...(19): siRNA sense strand
gagugaagaagcagaggaa

SEQ ID NO: 707626 - RNA, 19 nt, Homo sapiens
  misc_RNA (1)...(19): siRNA sense strand
ggaagucagaaaucgauca

SEQ ID NO: 707627 - RNA, 19 nt, Homo sapiens
  misc_RNA (1)...(19): siRNA sense strand
cccaacaucgucaccguua

SEQ ID NO: 707628 - RNA, 19 nt, Homo sapiens
  misc_RNA (1)...(19): siRNA sense strand
gaaaugagugaagaugaag

SEQ ID NO: 707629 - RNA, 19 nt, Homo sapiens
  misc_RNA (1)...(19): siRNA sense strand
ggaagaggaggaggaggaa

SEQ ID NO: 707630 - RNA, 19 nt, Homo sapiens
  misc_RNA (1)...(19): siRNA sense strand
caaaagacaagaaaacaga

SEQ ID NO: 707631 - RNA, 19 nt, Homo sapiens
  misc_RNA (1)...(19): siRNA sense strand
gaucgaggagggcaccuau

SEQ ID NO: 707632 - RNA, 19 nt, Homo sapiens
  misc_RNA (1)...(19): siRNA sense strand
gaagagaaaauggaagaaa

SEQ ID NO: 707633 - RNA, 19 nt, Homo sapiens
  misc_RNA (1)...(19): siRNA sense strand
cgaagaaguaagugaggaa

SEQ ID NO: 707634 - RNA, 19 nt, Homo sapiens
  misc_RNA (1)...(19): siRNA sense strand
cgucaccguuagagagauu

SEQ ID NO: 707635 - RNA, 19 nt, Homo sapiens
  misc_RNA (1)...(19): siRNA sense strand
gugaagaagcagaggaaga

SEQ ID NO: 707636 - RNA, 19 nt, Homo sapiens
  misc_RNA (1)...(19): siRNA sense strand
caacauggacaagaucuac

SEQ ID NO: 707637 - RNA, 19 nt, Homo sapiens
  misc_RNA (1)...(19): siRNA sense strand
ggaagggagcaccagugaa

SEQ ID NO: 707638 - RNA, 19 nt, Homo sapiens
  misc_RNA (1)...(19): siRNA sense strand
guaagugaggaagaaauga

SEQ ID NO: 707639 - RNA, 19 nt, Homo sapiens
  misc_RNA (1)...(19): siRNA sense strand
gcagaaucaggcucagguu

SEQ ID NO: 707640 - RNA, 19 nt, Homo sapiens
  misc_RNA (1)...(19): siRNA sense strand
aagaaaugagugaagauga

SEQ ID NO: 707641 - RNA, 19 nt, Homo sapiens
  misc_RNA (1)...(19): siRNA sense strand
aggacggccucaagcauga

SEQ ID NO: 707642 - RNA, 19 nt, Homo sapiens
  misc_RNA (1)...(19): siRNA sense strand
gcaccuauggaguggucua

SEQ ID NO: 707643 - RNA, 19 nt, Homo sapiens
  misc_RNA (1)...(19): siRNA sense strand
gacagagggcgacuaugug

SEQ ID NO: 707644 - RNA, 19 nt, Homo sapiens
  misc_RNA (1)...(19): siRNA sense strand
gaggagaccggcagcaacu

SEQ ID NO: 707645 - RNA, 19 nt, Homo sapiens
  misc_RNA (1)...(19): siRNA sense strand
gaagauggagaaggagaag

SEQ ID NO: 707646 - RNA, 19 nt, Homo sapiens
  misc_RNA (1)...(19): siRNA sense strand
gaggaagaaaugagugaag

SEQ ID NO: 707647 - RNA, 19 nt, Homo sapiens
  misc_RNA (1)...(19): siRNA sense strand
gugaggaagaaaugaguga

SEQ ID NO: 707648 - RNA, 19 nt, Homo sapiens
  misc_RNA (1)...(19): siRNA sense strand
ucccagcagucaagaagau

SEQ ID NO: 707649 - RNA, 19 nt, Homo sapiens
  misc_RNA (1)...(19): siRNA sense strand
agaagcagaggaagaagug

SEQ ID NO: 707650 - RNA, 19 nt, Homo sapiens
  misc_RNA (1)...(19): siRNA sense strand
ugaagaugaagaacgagaa

SEQ ID NO: 707651 - RNA, 19 nt, Homo sapiens
  misc_RNA (1)...(19): siRNA sense strand
gcaccagugaagaaucaga

SEQ ID NO: 707652 - RNA, 19 nt, Homo sapiens
  misc_RNA (1)...(19): siRNA sense strand
aagaggaggaggaggaaga

SEQ ID NO: 707653 - RNA, 19 nt, Homo sapiens
  misc_RNA (1)...(19): siRNA sense strand
acaagguguucaaggaucu

SEQ ID NO: 707654 - RNA, 19 nt, Homo sapiens
  misc_RNA (1)...(19): siRNA sense strand
gaguacggauccccucuga

SEQ ID NO: 707655 - RNA, 19 nt, Homo sapiens
  misc_RNA (1)...(19): siRNA sense strand
ugaagauggagaaggagaa

SEQ ID NO: 707656 - RNA, 19 nt, Homo sapiens
  misc_RNA (1)...(19): siRNA sense strand
ccaacaucgucaccguuag

SEQ ID NO: 707657 - RNA, 19 nt, Homo sapiens
  misc_RNA (1)...(19): siRNA sense strand
gaagucagaaaucgaucag

SEQ ID NO: 707658 - RNA, 19 nt, Homo sapiens
  misc_RNA (1)...(19): siRNA sense strand
ggugaagacccugaugauc

SEQ ID NO: 707659 - RNA, 19 nt, Homo sapiens
  misc_RNA (1)...(19): siRNA sense strand
ugaaauuguggcucuaaag

SEQ ID NO: 707660 - RNA, 19 nt, Homo sapiens
  misc_RNA (1)...(19): siRNA sense strand
gggcuucgaccucaugaac

SEQ ID NO: 707661 - RNA, 19 nt, Homo sapiens
  misc_RNA (1)...(19): siRNA sense strand
ggagaccggcagcaacucu

SEQ ID NO: 707662 - RNA, 19 nt, Homo sapiens
  misc_RNA (1)...(19): siRNA sense strand
ggaggugaagacccugaug

SEQ ID NO: 707663 - RNA, 19 nt, Homo sapiens
  misc_RNA (1)...(19): siRNA sense strand
gaaacgacaucgagaagaa

SEQ ID NO: 707664 - RNA, 19 nt, Homo sapiens
  misc_RNA (1)...(19): siRNA sense strand
gcaaaugucucggaaagaa

SEQ ID NO: 707665 - RNA, 19 nt, Homo sapiens
  misc_RNA (1)...(19): siRNA sense strand
gaaaacagaugaaauugug

SEQ ID NO: 707666 - RNA, 19 nt, Homo sapiens
  misc_RNA (1)...(19): siRNA sense strand
gcauggagaucacaauaag

SEQ ID NO: 707667 - RNA, 19 nt, Homo sapiens
  misc_RNA (1)...(19): siRNA sense strand
gagcaccagugaagaauca

SEQ ID NO: 707668 - RNA, 19 nt, Homo sapiens
  misc_RNA (1)...(19): siRNA sense strand
ugaaacaccugcacgacaa

SEQ ID NO: 707669 - RNA, 19 nt, Homo sapiens
  misc_RNA (1)...(19): siRNA sense strand
gaaaaggacucuuggaaag

SEQ ID NO: 707670 - RNA, 19 nt, Homo sapiens
  misc_RNA (1)...(19): siRNA sense strand
uaaagcggcugaagaugga

SEQ ID NO: 707671 - RNA, 19 nt, Homo sapiens
  misc_RNA (1)...(19): siRNA sense strand
agaaaugagugaagaugaa

SEQ ID NO: 707672 - RNA, 19 nt, Homo sapiens
  misc_RNA (1)...(19): siRNA sense strand
gagugaagaugaagaacga

SEQ ID NO: 707673 - RNA, 19 nt, Homo sapiens
  misc_RNA (1)...(19): siRNA sense strand
gcagcaacauggacaagau

SEQ ID NO: 707674 - RNA, 19 nt, Homo sapiens
  misc_RNA (1)...(19): siRNA sense strand
gaagggagcaccagugaag

SEQ ID NO: 707675 - RNA, 19 nt, Homo sapiens
  misc_RNA (1)...(19): siRNA sense strand
ggaaggaacaagaggagaa

SEQ ID NO: 707676 - RNA, 19 nt, Homo sapiens
  misc_RNA (1)...(19): siRNA sense strand
ggaguggucuacagagcaa

SEQ ID NO: 707677 - RNA, 19 nt, Homo sapiens
  misc_RNA (1)...(19): siRNA sense strand
gaagaugaagaacgagaaa

SEQ ID NO: 707678 - RNA, 19 nt, Homo sapiens
  misc_RNA (1)...(19): siRNA sense strand
gcacgaacgucggaaacga

SEQ ID NO: 707679 - RNA, 19 nt, Homo sapiens
  misc_RNA (1)...(19): siRNA sense strand
gagaagacucuauggaaga

SEQ ID NO: 707680 - RNA, 19 nt, Homo sapiens
  misc_RNA (1)...(19): siRNA sense strand
cagcaaaugucucggaaag

SEQ ID NO: 707681 - RNA, 19 nt, Homo sapiens
  misc_RNA (1)...(19): siRNA sense strand
cagaaaagaugaaaagaga

SEQ ID NO: 707682 - RNA, 19 nt, Homo sapiens
  misc_RNA (1)...(19): siRNA sense strand
gaagaaaugagugaagaug

SEQ ID NO: 707683 - RNA, 19 nt, Homo sapiens
  misc_RNA (1)...(19): siRNA sense strand
agaaguaagugaggaagaa

SEQ ID NO: 707684 - RNA, 19 nt, Homo sapiens
  misc_RNA (1)...(19): siRNA sense strand
ggaagacagaggagaagaa

SEQ ID NO: 707685 - RNA, 19 nt, Homo sapiens
  misc_RNA (1)...(19): siRNA sense strand
gaaggaacaagaggagaaa

SEQ ID NO: 707686 - RNA, 19 nt, Homo sapiens
  misc_RNA (1)...(19): siRNA sense strand
ugacagagggcgacuaugu

SEQ ID NO: 707687 - RNA, 19 nt, Homo sapiens
  misc_RNA (1)...(19): siRNA sense strand
ggagaaagcagagauaaaa

SEQ ID NO: 707688 - RNA, 19 nt, Homo sapiens
  misc_RNA (1)...(19): siRNA sense strand
gagaagaacaggauaaagc

SEQ ID NO: 707689 - RNA, 19 nt, Homo sapiens
  misc_RNA (1)...(19): siRNA sense strand
gaggagaaagcagagauaa

SEQ ID NO: 707690 - RNA, 19 nt, Homo sapiens
  misc_RNA (1)...(19): siRNA sense strand
ugaagaagcagaggaagaa

SEQ ID NO: 707691 - RNA, 19 nt, Homo sapiens
  misc_RNA (1)...(19): siRNA sense strand
gagcauuccaggagagaaa

SEQ ID NO: 707692 - RNA, 19 nt, Homo sapiens
  misc_RNA (1)...(19): siRNA sense strand
aaggagggcuucccgauca

SEQ ID NO: 707693 - RNA, 19 nt, Homo sapiens
  misc_RNA (1)...(19): siRNA sense strand
gcuucgaccucaugaacaa

SEQ ID NO: 707694 - RNA, 19 nt, Homo sapiens
  misc_RNA (1)...(19): siRNA sense strand
gaaguaagugaggaagaaa

SEQ ID NO: 707695 - RNA, 19 nt, Homo sapiens
  misc_RNA (1)...(19): siRNA sense strand
caacaucgucaccguuaga

SEQ ID NO: 707696 - RNA, 19 nt, Homo sapiens
  misc_RNA (1)...(19): siRNA sense strand
ugagggagaucaacaccau

SEQ ID NO: 707697 - RNA, 19 nt, Homo sapiens
  misc_RNA (1)...(19): siRNA sense strand
aaaggacucuuggaaagug

SEQ ID NO: 707698 - RNA, 19 nt, Homo sapiens
  misc_RNA (1)...(19): siRNA sense strand
gcucuaaagcggcugaaga

SEQ ID NO: 707699 - RNA, 19 nt, Homo sapiens
  misc_RNA (1)...(19): siRNA sense strand
ggcugaagauggagaagga

SEQ ID NO: 707700 - RNA, 19 nt, Homo sapiens
  misc_RNA (1)...(19): siRNA sense strand
agacagaggagaagaagau

SEQ ID NO: 707701 - RNA, 19 nt, Homo sapiens
  misc_RNA (1)...(19): siRNA sense strand
gaucaacaccauccucaag

SEQ ID NO: 707702 - RNA, 19 nt, Homo sapiens
  misc_RNA (1)...(19): siRNA sense strand
gaugaaauuguggcucuaa

SEQ ID NO: 707703 - RNA, 19 nt, Homo sapiens
  misc_RNA (1)...(19): siRNA sense strand
gaaucaggcucagguucug

SEQ ID NO: 707704 - RNA, 19 nt, Homo sapiens
  misc_RNA (1)...(19): siRNA sense strand
gaggugaagacccugauga

SEQ ID NO: 707705 - RNA, 19 nt, Homo sapiens
  misc_RNA (1)...(19): siRNA sense strand
ggaggaggaggaagaggaa

SEQ ID NO: 707706 - RNA, 19 nt, Homo sapiens
  misc_RNA (1)...(19): siRNA sense strand
ggaaacgacaucgagaaga

SEQ ID NO: 707707 - RNA, 19 nt, Homo sapiens
  misc_RNA (1)...(19): siRNA sense strand
agucagaaaucgaucagau

SEQ ID NO: 707708 - RNA, 19 nt, Homo sapiens
  misc_RNA (1)...(19): siRNA sense strand
ucacgucgcugagggagau

SEQ ID NO: 707709 - RNA, 19 nt, Homo sapiens
  misc_RNA (1)...(19): siRNA sense strand
gaaauuguggcucuaaagc

SEQ ID NO: 707710 - RNA, 19 nt, Homo sapiens
  misc_RNA (1)...(19): siRNA sense strand
gucaguggguugcaucuuc

SEQ ID NO: 707711 - RNA, 19 nt, Homo sapiens
  misc_RNA (1)...(19): siRNA sense strand
ugaagacccugaugaucca

SEQ ID NO: 707712 - RNA, 19 nt, Homo sapiens
  misc_RNA (1)...(19): siRNA sense strand
gaagacagaggagaagaag

SEQ ID NO: 707713 - RNA, 19 nt, Homo sapiens
  misc_RNA (1)...(19): siRNA sense strand
gaagaacgagaaaaugaaa

SEQ ID NO: 707714 - RNA, 19 nt, Homo sapiens
  misc_RNA (1)...(19): siRNA sense strand
ggaagaaaugagugaagau

SEQ ID NO: 707715 - RNA, 19 nt, Homo sapiens
  misc_RNA (1)...(19): siRNA sense strand
agacagaagagaagggaaa

SEQ ID NO: 707716 - RNA, 19 nt, Homo sapiens
  misc_RNA (1)...(19): siRNA sense strand
gaaugggaaagacagaaga

SEQ ID NO: 707717 - RNA, 19 nt, Homo sapiens
  misc_RNA (1)...(19): siRNA sense strand
caaaugucucggaaagaaa

SEQ ID NO: 707718 - RNA, 19 nt, Homo sapiens
  misc_RNA (1)...(19): siRNA sense strand
gaggagaagaagaugauuc

SEQ ID NO: 707719 - RNA, 19 nt, Homo sapiens
  misc_RNA (1)...(19): siRNA sense strand
gcaacauggacaagaucua

SEQ ID NO: 707720 - RNA, 19 nt, Homo sapiens
  misc_RNA (1)...(19): siRNA sense strand
aggaagaaaugagugaaga

SEQ ID NO: 707721 - RNA, 19 nt, Homo sapiens
  misc_RNA (1)...(19): siRNA sense strand
auaaggaacuccccguaua

SEQ ID NO: 707722 - RNA, 19 nt, Homo sapiens
  misc_RNA (1)...(19): siRNA sense strand
gagugaagaagcagaggaa

SEQ ID NO: 707723 - RNA, 19 nt, Homo sapiens
  misc_RNA (1)...(19): siRNA sense strand
ggaagucagaaaucgauca

SEQ ID NO: 707724 - RNA, 19 nt, Homo sapiens
  misc_RNA (1)...(19): siRNA sense strand
cccaacaucgucaccguua

SEQ ID NO: 707725 - RNA, 19 nt, Homo sapiens
  misc_RNA (1)...(19): siRNA sense strand
gggaaagacagaagagaag

SEQ ID NO: 707726 - RNA, 19 nt, Homo sapiens
  misc_RNA (1)...(19): siRNA sense strand
caaaagacaagaaaacaga

SEQ ID NO: 707727 - RNA, 19 nt, Homo sapiens
  misc_RNA (1)...(19): siRNA sense strand
gaucgaggagggcaccuau

SEQ ID NO: 707728 - RNA, 19 nt, Homo sapiens
  misc_RNA (1)...(19): siRNA sense strand
gaaaugagugaagaugaag

SEQ ID NO: 707729 - RNA, 19 nt, Homo sapiens
  misc_RNA (1)...(19): siRNA sense strand
ggaagaggaggaggaggaa

SEQ ID NO: 707730 - RNA, 19 nt, Homo sapiens
  misc_RNA (1)...(19): siRNA sense strand
caugcuagagugaaagaaa

SEQ ID NO: 707731 - RNA, 19 nt, Homo sapiens
  misc_RNA (1)...(19): siRNA sense strand
gaagagaaaauggaagaaa

SEQ ID NO: 707732 - RNA, 19 nt, Homo sapiens
  misc_RNA (1)...(19): siRNA sense strand
ggaaugggaaagacagaag

SEQ ID NO: 707733 - RNA, 19 nt, Homo sapiens
  misc_RNA (1)...(19): siRNA sense strand
cgucaccguuagagagauu

SEQ ID NO: 707734 - RNA, 19 nt, Homo sapiens
  misc_RNA (1)...(19): siRNA sense strand
gugaagaagcagaggaaga

SEQ ID NO: 707735 - RNA, 19 nt, Homo sapiens
  misc_RNA (1)...(19): siRNA sense strand
cgaagaaguaagugaggaa

SEQ ID NO: 707736 - RNA, 19 nt, Homo sapiens
  misc_RNA (1)...(19): siRNA sense strand
caacauggacaagaucuac

SEQ ID NO: 707737 - RNA, 19 nt, Homo sapiens
  misc_RNA (1)...(19): siRNA sense strand
ggaacaagaggagaaagca

SEQ ID NO: 707738 - RNA, 19 nt, Homo sapiens
  misc_RNA (1)...(19): siRNA sense strand
gaaacgaaggaaggaacaa

SEQ ID NO: 707739 - RNA, 19 nt, Homo sapiens
  misc_RNA (1)...(19): siRNA sense strand
ggaagggagcaccagugaa

SEQ ID NO: 707740 - RNA, 19 nt, Homo sapiens
  misc_RNA (1)...(19): siRNA sense strand
cagaggagaagaagaugau

SEQ ID NO: 707741 - RNA, 19 nt, Homo sapiens
  misc_RNA (1)...(19): siRNA sense strand
guaagugaggaagaaauga

SEQ ID NO: 707742 - RNA, 19 nt, Homo sapiens
  misc_RNA (1)...(19): siRNA sense strand
gcagaaucaggcucagguu

SEQ ID NO: 707743 - RNA, 19 nt, Homo sapiens
  misc_RNA (1)...(19): siRNA sense strand
cagaagagaagggaaaugg

SEQ ID NO: 707744 - RNA, 19 nt, Homo sapiens
  misc_RNA (1)...(19): siRNA sense strand
aggacggccucaagcauga

SEQ ID NO: 707745 - RNA, 19 nt, Homo sapiens
  misc_RNA (1)...(19): siRNA sense strand
gcaccuauggaguggucua

SEQ ID NO: 707746 - RNA, 19 nt, Homo sapiens
  misc_RNA (1)...(19): siRNA sense strand
gacagagggcgacuaugug

SEQ ID NO: 707747 - RNA, 19 nt, Homo sapiens
  misc_RNA (1)...(19): siRNA sense strand
aagaaaugagugaagauga

SEQ ID NO: 707748 - RNA, 19 nt, Homo sapiens
  misc_RNA (1)...(19): siRNA sense strand
ggaaauggcaagggagcau

SEQ ID NO: 707749 - RNA, 19 nt, Homo sapiens
  misc_RNA (1)...(19): siRNA sense strand
agaggagaaagcagagaua

SEQ ID NO: 707750 - RNA, 19 nt, Homo sapiens
  misc_RNA (1)...(19): siRNA sense strand
gaagauggagaaggagaag

SEQ ID NO: 707751 - RNA, 19 nt, Homo sapiens
  misc_RNA (1)...(19): siRNA sense strand
gaggagaccggcagcaacu

SEQ ID NO: 707752 - RNA, 19 nt, Homo sapiens
  misc_RNA (1)...(19): siRNA sense strand
agaaagagagcacgaacgu

SEQ ID NO: 707753 - RNA, 19 nt, Homo sapiens
  misc_RNA (1)...(19): siRNA sense strand
gaggaagaaaugagugaag

SEQ ID NO: 707754 - RNA, 19 nt, Homo sapiens
  misc_RNA (1)...(19): siRNA sense strand
gcagagauaaaacgcuuaa

SEQ ID NO: 707755 - RNA, 19 nt, Homo sapiens
  misc_RNA (1)...(19): siRNA sense strand
ugggaaagacagaagagaa

SEQ ID NO: 707756 - RNA, 19 nt, Homo sapiens
  misc_RNA (1)...(19): siRNA sense strand
ucccagcagucaagaagau

SEQ ID NO: 707757 - RNA, 19 nt, Homo sapiens
  misc_RNA (1)...(19): siRNA sense strand
agaagcagaggaagaagug

SEQ ID NO: 707758 - RNA, 19 nt, Homo sapiens
  misc_RNA (1)...(19): siRNA sense strand
uauggaagacagaggagaa

SEQ ID NO: 707759 - RNA, 19 nt, Homo sapiens
  misc_RNA (1)...(19): siRNA sense strand
ugaagaugaagaacgagaa

SEQ ID NO: 707760 - RNA, 19 nt, Homo sapiens
  misc_RNA (1)...(19): siRNA sense strand
gugaggaagaaaugaguga

SEQ ID NO: 707761 - RNA, 19 nt, Homo sapiens
  misc_RNA (1)...(19): siRNA sense strand
gaacuccccguauagaaga

SEQ ID NO: 707762 - RNA, 19 nt, Homo sapiens
  misc_RNA (1)...(19): siRNA sense strand
ugaaaaggacucuuggaaa

SEQ ID NO: 707763 - RNA, 19 nt, Homo sapiens
  misc_RNA (1)...(19): siRNA sense strand
gaaacgacaucgagaagaa

SEQ ID NO: 707764 - RNA, 19 nt, Homo sapiens
  misc_RNA (1)...(19): siRNA sense strand
gcaaaugucucggaaagaa

SEQ ID NO: 707765 - RNA, 19 nt, Homo sapiens
  misc_RNA (1)...(19): siRNA sense strand
gaaaacagaugaaauugug

SEQ ID NO: 707766 - RNA, 19 nt, Homo sapiens
  misc_RNA (1)...(19): siRNA sense strand
gcauggagaucacaauaag

SEQ ID NO: 707767 - RNA, 19 nt, Homo sapiens
  misc_RNA (1)...(19): siRNA sense strand
gagcaccagugaagaauca

SEQ ID NO: 707768 - RNA, 19 nt, Homo sapiens
  misc_RNA (1)...(19): siRNA sense strand
ugaaacaccugcacgacaa

SEQ ID NO: 707769 - RNA, 19 nt, Homo sapiens
  misc_RNA (1)...(19): siRNA sense strand
gaaaaggacucuuggaaag

SEQ ID NO: 707770 - RNA, 19 nt, Homo sapiens
  misc_RNA (1)...(19): siRNA sense strand
uaaagcggcugaagaugga

SEQ ID NO: 707771 - RNA, 19 nt, Homo sapiens
  misc_RNA (1)...(19): siRNA sense strand
agaaaugagugaagaugaa

SEQ ID NO: 707772 - RNA, 19 nt, Homo sapiens
  misc_RNA (1)...(19): siRNA sense strand
gagugaagaugaagaacga

SEQ ID NO: 707773 - RNA, 19 nt, Homo sapiens
  misc_RNA (1)...(19): siRNA sense strand
gcagcaacauggacaagau

SEQ ID NO: 707774 - RNA, 19 nt, Homo sapiens
  misc_RNA (1)...(19): siRNA sense strand
gaagggagcaccagugaag

SEQ ID NO: 707775 - RNA, 19 nt, Homo sapiens
  misc_RNA (1)...(19): siRNA sense strand
ggaaggaacaagaggagaa

SEQ ID NO: 707776 - RNA, 19 nt, Homo sapiens
  misc_RNA (1)...(19): siRNA sense strand
ggaguggucuacagagcaa

SEQ ID NO: 707777 - RNA, 19 nt, Homo sapiens
  misc_RNA (1)...(19): siRNA sense strand
gaagaugaagaacgagaaa

SEQ ID NO: 707778 - RNA, 19 nt, Homo sapiens
  misc_RNA (1)...(19): siRNA sense strand
gcacgaacgucggaaacga

SEQ ID NO: 707779 - RNA, 19 nt, Homo sapiens
  misc_RNA (1)...(19): siRNA sense strand
gagaagacucuauggaaga

SEQ ID NO: 707780 - RNA, 19 nt, Homo sapiens
  misc_RNA (1)...(19): siRNA sense strand
cagcaaaugucucggaaag

SEQ ID NO: 707781 - RNA, 19 nt, Homo sapiens
  misc_RNA (1)...(19): siRNA sense strand
cagaaaagaugaaaagaga

SEQ ID NO: 707782 - RNA, 19 nt, Homo sapiens
  misc_RNA (1)...(19): siRNA sense strand
gaagaaaugagugaagaug

SEQ ID NO: 707783 - RNA, 19 nt, Homo sapiens
  misc_RNA (1)...(19): siRNA sense strand
agaaguaagugaggaagaa

SEQ ID NO: 707784 - RNA, 19 nt, Homo sapiens
  misc_RNA (1)...(19): siRNA sense strand
ggaagacagaggagaagaa

SEQ ID NO: 707785 - RNA, 19 nt, Homo sapiens
  misc_RNA (1)...(19): siRNA sense strand
gaaggaacaagaggagaaa

SEQ ID NO: 707786 - RNA, 19 nt, Homo sapiens
  misc_RNA (1)...(19): siRNA sense strand
ugacagagggcgacuaugu

SEQ ID NO: 707787 - RNA, 19 nt, Homo sapiens
  misc_RNA (1)...(19): siRNA sense strand
ggagaaagcagagauaaaa

SEQ ID NO: 707788 - RNA, 19 nt, Homo sapiens
  misc_RNA (1)...(19): siRNA sense strand
gagaagaacaggauaaagc

SEQ ID NO: 707789 - RNA, 19 nt, Homo sapiens
  misc_RNA (1)...(19): siRNA sense strand
gaggagaaagcagagauaa

SEQ ID NO: 707790 - RNA, 19 nt, Homo sapiens
  misc_RNA (1)...(19): siRNA sense strand
ugaagaagcagaggaagaa

SEQ ID NO: 707791 - RNA, 19 nt, Homo sapiens
  misc_RNA (1)...(19): siRNA sense strand
gagcauuccaggagagaaa

SEQ ID NO: 707792 - RNA, 19 nt, Homo sapiens
  misc_RNA (1)...(19): siRNA sense strand
aaggagggcuucccgauca

SEQ ID NO: 707793 - RNA, 19 nt, Homo sapiens
  misc_RNA (1)...(19): siRNA sense strand
gcuucgaccucaugaacaa

SEQ ID NO: 707794 - RNA, 19 nt, Homo sapiens
  misc_RNA (1)...(19): siRNA sense strand
gaaguaagugaggaagaaa

SEQ ID NO: 707795 - RNA, 19 nt, Homo sapiens
  misc_RNA (1)...(19): siRNA sense strand
caacaucgucaccguuaga

SEQ ID NO: 707796 - RNA, 19 nt, Homo sapiens
  misc_RNA (1)...(19): siRNA sense strand
ugagggagaucaacaccau

SEQ ID NO: 707797 - RNA, 19 nt, Homo sapiens
  misc_RNA (1)...(19): siRNA sense strand
aaaggacucuuggaaagug

SEQ ID NO: 707798 - RNA, 19 nt, Homo sapiens
  misc_RNA (1)...(19): siRNA sense strand
gcucuaaagcggcugaaga

SEQ ID NO: 707799 - RNA, 19 nt, Homo sapiens
  misc_RNA (1)...(19): siRNA sense strand
ggcugaagauggagaagga

SEQ ID NO: 707800 - RNA, 19 nt, Homo sapiens
  misc_RNA (1)...(19): siRNA sense strand
agacagaggagaagaagau

SEQ ID NO: 707801 - RNA, 19 nt, Homo sapiens
  misc_RNA (1)...(19): siRNA sense strand
gaucaacaccauccucaag

SEQ ID NO: 707802 - RNA, 19 nt, Homo sapiens
  misc_RNA (1)...(19): siRNA sense strand
gaugaaauuguggcucuaa

SEQ ID NO: 707803 - RNA, 19 nt, Homo sapiens
  misc_RNA (1)...(19): siRNA sense strand
gaaucaggcucagguucug

SEQ ID NO: 707804 - RNA, 19 nt, Homo sapiens
  misc_RNA (1)...(19): siRNA sense strand
gaggugaagacccugauga

SEQ ID NO: 707805 - RNA, 19 nt, Homo sapiens
  misc_RNA (1)...(19): siRNA sense strand
ggaggaggaggaagaggaa

SEQ ID NO: 707806 - RNA, 19 nt, Homo sapiens
  misc_RNA (1)...(19): siRNA sense strand
ggaaacgacaucgagaaga

SEQ ID NO: 707807 - RNA, 19 nt, Homo sapiens
  misc_RNA (1)...(19): siRNA sense strand
agucagaaaucgaucagau

SEQ ID NO: 707808 - RNA, 19 nt, Homo sapiens
  misc_RNA (1)...(19): siRNA sense strand
ucacgucgcugagggagau

SEQ ID NO: 707809 - RNA, 19 nt, Homo sapiens
  misc_RNA (1)...(19): siRNA sense strand
gaaauuguggcucuaaagc

SEQ ID NO: 707810 - RNA, 19 nt, Homo sapiens
  misc_RNA (1)...(19): siRNA sense strand
gucaguggguugcaucuuc

SEQ ID NO: 707811 - RNA, 19 nt, Homo sapiens
  misc_RNA (1)...(19): siRNA sense strand
ugaagacccugaugaucca

SEQ ID NO: 707812 - RNA, 19 nt, Homo sapiens
  misc_RNA (1)...(19): siRNA sense strand
gaagacagaggagaagaag

SEQ ID NO: 707813 - RNA, 19 nt, Homo sapiens
  misc_RNA (1)...(19): siRNA sense strand
gaagaacgagaaaaugaaa

SEQ ID NO: 707814 - RNA, 19 nt, Homo sapiens
  misc_RNA (1)...(19): siRNA sense strand
ggaagaaaugagugaagau

SEQ ID NO: 707815 - RNA, 19 nt, Homo sapiens
  misc_RNA (1)...(19): siRNA sense strand
agacagaagagaagggaaa

SEQ ID NO: 707816 - RNA, 19 nt, Homo sapiens
  misc_RNA (1)...(19): siRNA sense strand
gaaugggaaagacagaaga

SEQ ID NO: 707817 - RNA, 19 nt, Homo sapiens
  misc_RNA (1)...(19): siRNA sense strand
caaaugucucggaaagaaa

SEQ ID NO: 707818 - RNA, 19 nt, Homo sapiens
  misc_RNA (1)...(19): siRNA sense strand
gaggagaagaagaugauuc

SEQ ID NO: 707819 - RNA, 19 nt, Homo sapiens
  misc_RNA (1)...(19): siRNA sense strand
gcaacauggacaagaucua

SEQ ID NO: 707820 - RNA, 19 nt, Homo sapiens
  misc_RNA (1)...(19): siRNA sense strand
aggaagaaaugagugaaga

SEQ ID NO: 707821 - RNA, 19 nt, Homo sapiens
  misc_RNA (1)...(19): siRNA sense strand
auaaggaacuccccguaua

SEQ ID NO: 707822 - RNA, 19 nt, Homo sapiens
  misc_RNA (1)...(19): siRNA sense strand
gagugaagaagcagaggaa

SEQ ID NO: 707823 - RNA, 19 nt, Homo sapiens
  misc_RNA (1)...(19): siRNA sense strand
ggaagucagaaaucgauca

SEQ ID NO: 707824 - RNA, 19 nt, Homo sapiens
  misc_RNA (1)...(19): siRNA sense strand
cccaacaucgucaccguua

SEQ ID NO: 707825 - RNA, 19 nt, Homo sapiens
  misc_RNA (1)...(19): siRNA sense strand
gggaaagacagaagagaag

SEQ ID NO: 707826 - RNA, 19 nt, Homo sapiens
  misc_RNA (1)...(19): siRNA sense strand
caaaagacaagaaaacaga

SEQ ID NO: 707827 - RNA, 19 nt, Homo sapiens
  misc_RNA (1)...(19): siRNA sense strand
gaucgaggagggcaccuau

SEQ ID NO: 707828 - RNA, 19 nt, Homo sapiens
  misc_RNA (1)...(19): siRNA sense strand
gaaaugagugaagaugaag

SEQ ID NO: 707829 - RNA, 19 nt, Homo sapiens
  misc_RNA (1)...(19): siRNA sense strand
ggaagaggaggaggaggaa

SEQ ID NO: 707830 - RNA, 19 nt, Homo sapiens
  misc_RNA (1)...(19): siRNA sense strand
caugcuagagugaaagaaa

SEQ ID NO: 707831 - RNA, 19 nt, Homo sapiens
  misc_RNA (1)...(19): siRNA sense strand
gaagagaaaauggaagaaa

SEQ ID NO: 707832 - RNA, 19 nt, Homo sapiens
  misc_RNA (1)...(19): siRNA sense strand
ggaaugggaaagacagaag

SEQ ID NO: 707833 - RNA, 19 nt, Homo sapiens
  misc_RNA (1)...(19): siRNA sense strand
cgucaccguuagagagauu

SEQ ID NO: 707834 - RNA, 19 nt, Homo sapiens
  misc_RNA (1)...(19): siRNA sense strand
gugaagaagcagaggaaga

SEQ ID NO: 707835 - RNA, 19 nt, Homo sapiens
  misc_RNA (1)...(19): siRNA sense strand
cgaagaaguaagugaggaa

SEQ ID NO: 707836 - RNA, 19 nt, Homo sapiens
  misc_RNA (1)...(19): siRNA sense strand
caacauggacaagaucuac

SEQ ID NO: 707837 - RNA, 19 nt, Homo sapiens
  misc_RNA (1)...(19): siRNA sense strand
ggaacaagaggagaaagca

SEQ ID NO: 707838 - RNA, 19 nt, Homo sapiens
  misc_RNA (1)...(19): siRNA sense strand
gaaacgaaggaaggaacaa

SEQ ID NO: 707839 - RNA, 19 nt, Homo sapiens
  misc_RNA (1)...(19): siRNA sense strand
ggaagggagcaccagugaa

SEQ ID NO: 707840 - RNA, 19 nt, Homo sapiens
  misc_RNA (1)...(19): siRNA sense strand
cagaggagaagaagaugau

SEQ ID NO: 707841 - RNA, 19 nt, Homo sapiens
  misc_RNA (1)...(19): siRNA sense strand
guaagugaggaagaaauga

SEQ ID NO: 707842 - RNA, 19 nt, Homo sapiens
  misc_RNA (1)...(19): siRNA sense strand
gcagaaucaggcucagguu

SEQ ID NO: 707843 - RNA, 19 nt, Homo sapiens
  misc_RNA (1)...(19): siRNA sense strand
cagaagagaagggaaaugg

SEQ ID NO: 707844 - RNA, 19 nt, Homo sapiens
  misc_RNA (1)...(19): siRNA sense strand
aggacggccucaagcauga

SEQ ID NO: 707845 - RNA, 19 nt, Homo sapiens
  misc_RNA (1)...(19): siRNA sense strand
gcaccuauggaguggucua

SEQ ID NO: 707846 - RNA, 19 nt, Homo sapiens
  misc_RNA (1)...(19): siRNA sense strand
gacagagggcgacuaugug

SEQ ID NO: 707847 - RNA, 19 nt, Homo sapiens
  misc_RNA (1)...(19): siRNA sense strand
aagaaaugagugaagauga

SEQ ID NO: 707848 - RNA, 19 nt, Homo sapiens
  misc_RNA (1)...(19): siRNA sense strand
ggaaauggcaagggagcau

SEQ ID NO: 707849 - RNA, 19 nt, Homo sapiens
  misc_RNA (1)...(19): siRNA sense strand
agaggagaaagcagagaua

SEQ ID NO: 707850 - RNA, 19 nt, Homo sapiens
  misc_RNA (1)...(19): siRNA sense strand
gaagauggagaaggagaag

SEQ ID NO: 707851 - RNA, 19 nt, Homo sapiens
  misc_RNA (1)...(19): siRNA sense strand
gaggagaccggcagcaacu

SEQ ID NO: 707852 - RNA, 19 nt, Homo sapiens
  misc_RNA (1)...(19): siRNA sense strand
agaaagagagcacgaacgu

SEQ ID NO: 707853 - RNA, 19 nt, Homo sapiens
  misc_RNA (1)...(19): siRNA sense strand
gaggaagaaaugagugaag

SEQ ID NO: 707854 - RNA, 19 nt, Homo sapiens
  misc_RNA (1)...(19): siRNA sense strand
gcagagauaaaacgcuuaa

SEQ ID NO: 707855 - RNA, 19 nt, Homo sapiens
  misc_RNA (1)...(19): siRNA sense strand
ugggaaagacagaagagaa

SEQ ID NO: 707856 - RNA, 19 nt, Homo sapiens
  misc_RNA (1)...(19): siRNA sense strand
ucccagcagucaagaagau

SEQ ID NO: 707857 - RNA, 19 nt, Homo sapiens
  misc_RNA (1)...(19): siRNA sense strand
agaagcagaggaagaagug

SEQ ID NO: 707858 - RNA, 19 nt, Homo sapiens
  misc_RNA (1)...(19): siRNA sense strand
uauggaagacagaggagaa

SEQ ID NO: 707859 - RNA, 19 nt, Homo sapiens
  misc_RNA (1)...(19): siRNA sense strand
ugaagaugaagaacgagaa

SEQ ID NO: 707860 - RNA, 19 nt, Homo sapiens
  misc_RNA (1)...(19): siRNA sense strand
gugaggaagaaaugaguga

SEQ ID NO: 707861 - RNA, 19 nt, Homo sapiens
  misc_RNA (1)...(19): siRNA sense strand
gaacuccccguauagaaga

SEQ ID NO: 707862 - RNA, 19 nt, Homo sapiens
  misc_RNA (1)...(19): siRNA sense strand
ugaaaaggacucuuggaaa

SEQ ID NO: 707863 - RNA, 19 nt, Homo sapiens
  misc_RNA (1)...(19): siRNA sense strand
gaaacgacaucgagaagaa

SEQ ID NO: 707864 - RNA, 19 nt, Homo sapiens
  misc_RNA (1)...(19): siRNA sense strand
gcaaaugucucggaaagaa

SEQ ID NO: 707865 - RNA, 19 nt, Homo sapiens
  misc_RNA (1)...(19): siRNA sense strand
gaaaacagaugaaauugug

SEQ ID NO: 707866 - RNA, 19 nt, Homo sapiens
  misc_RNA (1)...(19): siRNA sense strand
gcauggagaucacaauaag

SEQ ID NO: 707867 - RNA, 19 nt, Homo sapiens
  misc_RNA (1)...(19): siRNA sense strand
gagcaccagugaagaauca

SEQ ID NO: 707868 - RNA, 19 nt, Homo sapiens
  misc_RNA (1)...(19): siRNA sense strand
ugaaacaccugcacgacaa

SEQ ID NO: 707869 - RNA, 19 nt, Homo sapiens
  misc_RNA (1)...(19): siRNA sense strand
gaaaaggacucuuggaaag

SEQ ID NO: 707870 - RNA, 19 nt, Homo sapiens
  misc_RNA (1)...(19): siRNA sense strand
uaaagcggcugaagaugga

SEQ ID NO: 707871 - RNA, 19 nt, Homo sapiens
  misc_RNA (1)...(19): siRNA sense strand
agaaaugagugaagaugaa

SEQ ID NO: 707872 - RNA, 19 nt, Homo sapiens
  misc_RNA (1)...(19): siRNA sense strand
gagugaagaugaagaacga

SEQ ID NO: 707873 - RNA, 19 nt, Homo sapiens
  misc_RNA (1)...(19): siRNA sense strand
gcagcaacauggacaagau

SEQ ID NO: 707874 - RNA, 19 nt, Homo sapiens
  misc_RNA (1)...(19): siRNA sense strand
gaagggagcaccagugaag

SEQ ID NO: 707875 - RNA, 19 nt, Homo sapiens
  misc_RNA (1)...(19): siRNA sense strand
ggaaggaacaagaggagaa

SEQ ID NO: 707876 - RNA, 19 nt, Homo sapiens
  misc_RNA (1)...(19): siRNA sense strand
ggaguggucuacagagcaa

SEQ ID NO: 707877 - RNA, 19 nt, Homo sapiens
  misc_RNA (1)...(19): siRNA sense strand
gaagaugaagaacgagaaa

SEQ ID NO: 707878 - RNA, 19 nt, Homo sapiens
  misc_RNA (1)...(19): siRNA sense strand
gcacgaacgucggaaacga

SEQ ID NO: 707879 - RNA, 19 nt, Homo sapiens
  misc_RNA (1)...(19): siRNA sense strand
gagaagacucuauggaaga

SEQ ID NO: 707880 - RNA, 19 nt, Homo sapiens
  misc_RNA (1)...(19): siRNA sense strand
cagcaaaugucucggaaag

SEQ ID NO: 707881 - RNA, 19 nt, Homo sapiens
  misc_RNA (1)...(19): siRNA sense strand
cagaaaagaugaaaagaga

SEQ ID NO: 707882 - RNA, 19 nt, Homo sapiens
  misc_RNA (1)...(19): siRNA sense strand
gaagaaaugagugaagaug

SEQ ID NO: 707883 - RNA, 19 nt, Homo sapiens
  misc_RNA (1)...(19): siRNA sense strand
agaaguaagugaggaagaa

SEQ ID NO: 707884 - RNA, 19 nt, Homo sapiens
  misc_RNA (1)...(19): siRNA sense strand
ggaagacagaggagaagaa

SEQ ID NO: 707885 - RNA, 19 nt, Homo sapiens
  misc_RNA (1)...(19): siRNA sense strand
gaaggaacaagaggagaaa

SEQ ID NO: 707886 - RNA, 19 nt, Homo sapiens
  misc_RNA (1)...(19): siRNA sense strand
ugacagagggcgacuaugu

SEQ ID NO: 707887 - RNA, 19 nt, Homo sapiens
  misc_RNA (1)...(19): siRNA sense strand
ggagaaagcagagauaaaa

SEQ ID NO: 707888 - RNA, 19 nt, Homo sapiens
  misc_RNA (1)...(19): siRNA sense strand
gagaagaacaggauaaagc

SEQ ID NO: 707889 - RNA, 19 nt, Homo sapiens
  misc_RNA (1)...(19): siRNA sense strand
gaggagaaagcagagauaa

SEQ ID NO: 707890 - RNA, 19 nt, Homo sapiens
  misc_RNA (1)...(19): siRNA sense strand
ugaagaagcagaggaagaa

SEQ ID NO: 707891 - RNA, 19 nt, Homo sapiens
  misc_RNA (1)...(19): siRNA sense strand
gagcauuccaggagagaaa

SEQ ID NO: 707892 - RNA, 19 nt, Homo sapiens
  misc_RNA (1)...(19): siRNA sense strand
aaggagggcuucccgauca

SEQ ID NO: 707893 - RNA, 19 nt, Homo sapiens
  misc_RNA (1)...(19): siRNA sense strand
gcuucgaccucaugaacaa

SEQ ID NO: 707894 - RNA, 19 nt, Homo sapiens
  misc_RNA (1)...(19): siRNA sense strand
gaaguaagugaggaagaaa

SEQ ID NO: 707895 - RNA, 19 nt, Homo sapiens
  misc_RNA (1)...(19): siRNA sense strand
caacaucgucaccguuaga

SEQ ID NO: 707896 - RNA, 19 nt, Homo sapiens
  misc_RNA (1)...(19): siRNA sense strand
ugagggagaucaacaccau

SEQ ID NO: 707897 - RNA, 19 nt, Homo sapiens
  misc_RNA (1)...(19): siRNA sense strand
aaaggacucuuggaaagug

SEQ ID NO: 707898 - RNA, 19 nt, Homo sapiens
  misc_RNA (1)...(19): siRNA sense strand
gcucuaaagcggcugaaga

SEQ ID NO: 707899 - RNA, 19 nt, Homo sapiens
  misc_RNA (1)...(19): siRNA sense strand
ggcugaagauggagaagga

SEQ ID NO: 707900 - RNA, 19 nt, Homo sapiens
  misc_RNA (1)...(19): siRNA sense strand
agacagaggagaagaagau

SEQ ID NO: 707901 - RNA, 19 nt, Homo sapiens
  misc_RNA (1)...(19): siRNA sense strand
gaucaacaccauccucaag

SEQ ID NO: 707902 - RNA, 19 nt, Homo sapiens
  misc_RNA (1)...(19): siRNA sense strand
gaugaaauuguggcucuaa

SEQ ID NO: 707903 - RNA, 19 nt, Homo sapiens
  misc_RNA (1)...(19): siRNA sense strand
gaaucaggcucagguucug

SEQ ID NO: 707904 - RNA, 19 nt, Homo sapiens
  misc_RNA (1)...(19): siRNA sense strand
gaggugaagacccugauga

SEQ ID NO: 707905 - RNA, 19 nt, Homo sapiens
  misc_RNA (1)...(19): siRNA sense strand
ggaggaggaggaagaggaa

SEQ ID NO: 707906 - RNA, 19 nt, Homo sapiens
  misc_RNA (1)...(19): siRNA sense strand
ggaaacgacaucgagaaga

SEQ ID NO: 707907 - RNA, 19 nt, Homo sapiens
  misc_RNA (1)...(19): siRNA sense strand
agucagaaaucgaucagau

SEQ ID NO: 707908 - RNA, 19 nt, Homo sapiens
  misc_RNA (1)...(19): siRNA sense strand
ucacgucgcugagggagau

SEQ ID NO: 707909 - RNA, 19 nt, Homo sapiens
  misc_RNA (1)...(19): siRNA sense strand
gaaauuguggcucuaaagc

SEQ ID NO: 707910 - RNA, 19 nt, Homo sapiens
  misc_RNA (1)...(19): siRNA sense strand
gucaguggguugcaucuuc

SEQ ID NO: 707911 - RNA, 19 nt, Homo sapiens
  misc_RNA (1)...(19): siRNA sense strand
ugaagacccugaugaucca

SEQ ID NO: 707912 - RNA, 19 nt, Homo sapiens
  misc_RNA (1)...(19): siRNA sense strand
gaagacagaggagaagaag

SEQ ID NO: 707913 - RNA, 19 nt, Homo sapiens
  misc_RNA (1)...(19): siRNA sense strand
gaagaacgagaaaaugaaa

SEQ ID NO: 707914 - RNA, 19 nt, Homo sapiens
  misc_RNA (1)...(19): siRNA sense strand
ggaagaaaugagugaagau

SEQ ID NO: 707915 - RNA, 19 nt, Homo sapiens
  misc_RNA (1)...(19): siRNA sense strand
agacagaagagaagggaaa

SEQ ID NO: 707916 - RNA, 19 nt, Homo sapiens
  misc_RNA (1)...(19): siRNA sense strand
gaaugggaaagacagaaga

SEQ ID NO: 707917 - RNA, 19 nt, Homo sapiens
  misc_RNA (1)...(19): siRNA sense strand
caaaugucucggaaagaaa

SEQ ID NO: 707918 - RNA, 19 nt, Homo sapiens
  misc_RNA (1)...(19): siRNA sense strand
gaggagaagaagaugauuc

SEQ ID NO: 707919 - RNA, 19 nt, Homo sapiens
  misc_RNA (1)...(19): siRNA sense strand
gcaacauggacaagaucua

SEQ ID NO: 707920 - RNA, 19 nt, Homo sapiens
  misc_RNA (1)...(19): siRNA sense strand
aggaagaaaugagugaaga

SEQ ID NO: 707921 - RNA, 19 nt, Homo sapiens
  misc_RNA (1)...(19): siRNA sense strand
auaaggaacuccccguaua

SEQ ID NO: 707922 - RNA, 19 nt, Homo sapiens
  misc_RNA (1)...(19): siRNA sense strand
gagugaagaagcagaggaa

SEQ ID NO: 707923 - RNA, 19 nt, Homo sapiens
  misc_RNA (1)...(19): siRNA sense strand
ggaagucagaaaucgauca

SEQ ID NO: 707924 - RNA, 19 nt, Homo sapiens
  misc_RNA (1)...(19): siRNA sense strand
cccaacaucgucaccguua

SEQ ID NO: 707925 - RNA, 19 nt, Homo sapiens
  misc_RNA (1)...(19): siRNA sense strand
gggaaagacagaagagaag

SEQ ID NO: 707926 - RNA, 19 nt, Homo sapiens
  misc_RNA (1)...(19): siRNA sense strand
caaaagacaagaaaacaga

SEQ ID NO: 707927 - RNA, 19 nt, Homo sapiens
  misc_RNA (1)...(19): siRNA sense strand
gaucgaggagggcaccuau

SEQ ID NO: 707928 - RNA, 19 nt, Homo sapiens
  misc_RNA (1)...(19): siRNA sense strand
gaaaugagugaagaugaag

SEQ ID NO: 707929 - RNA, 19 nt, Homo sapiens
  misc_RNA (1)...(19): siRNA sense strand
ggaagaggaggaggaggaa

SEQ ID NO: 707930 - RNA, 19 nt, Homo sapiens
  misc_RNA (1)...(19): siRNA sense strand
caugcuagagugaaagaaa

SEQ ID NO: 707931 - RNA, 19 nt, Homo sapiens
  misc_RNA (1)...(19): siRNA sense strand
gaagagaaaauggaagaaa

SEQ ID NO: 707932 - RNA, 19 nt, Homo sapiens
  misc_RNA (1)...(19): siRNA sense strand
ggaaugggaaagacagaag

SEQ ID NO: 707933 - RNA, 19 nt, Homo sapiens
  misc_RNA (1)...(19): siRNA sense strand
cgucaccguuagagagauu

SEQ ID NO: 707934 - RNA, 19 nt, Homo sapiens
  misc_RNA (1)...(19): siRNA sense strand
gugaagaagcagaggaaga

SEQ ID NO: 707935 - RNA, 19 nt, Homo sapiens
  misc_RNA (1)...(19): siRNA sense strand
cgaagaaguaagugaggaa

SEQ ID NO: 707936 - RNA, 19 nt, Homo sapiens
  misc_RNA (1)...(19): siRNA sense strand
caacauggacaagaucuac

SEQ ID NO: 707937 - RNA, 19 nt, Homo sapiens
  misc_RNA (1)...(19): siRNA sense strand
ggaacaagaggagaaagca

SEQ ID NO: 707938 - RNA, 19 nt, Homo sapiens
  misc_RNA (1)...(19): siRNA sense strand
gaaacgaaggaaggaacaa

SEQ ID NO: 707939 - RNA, 19 nt, Homo sapiens
  misc_RNA (1)...(19): siRNA sense strand
ggaagggagcaccagugaa

SEQ ID NO: 707940 - RNA, 19 nt, Homo sapiens
  misc_RNA (1)...(19): siRNA sense strand
cagaggagaagaagaugau

SEQ ID NO: 707941 - RNA, 19 nt, Homo sapiens
  misc_RNA (1)...(19): siRNA sense strand
guaagugaggaagaaauga

SEQ ID NO: 707942 - RNA, 19 nt, Homo sapiens
  misc_RNA (1)...(19): siRNA sense strand
gcagaaucaggcucagguu

SEQ ID NO: 707943 - RNA, 19 nt, Homo sapiens
  misc_RNA (1)...(19): siRNA sense strand
cagaagagaagggaaaugg

SEQ ID NO: 707944 - RNA, 19 nt, Homo sapiens
  misc_RNA (1)...(19): siRNA sense strand
aggacggccucaagcauga

SEQ ID NO: 707945 - RNA, 19 nt, Homo sapiens
  misc_RNA (1)...(19): siRNA sense strand
gcaccuauggaguggucua

SEQ ID NO: 707946 - RNA, 19 nt, Homo sapiens
  misc_RNA (1)...(19): siRNA sense strand
gacagagggcgacuaugug

SEQ ID NO: 707947 - RNA, 19 nt, Homo sapiens
  misc_RNA (1)...(19): siRNA sense strand
aagaaaugagugaagauga

SEQ ID NO: 707948 - RNA, 19 nt, Homo sapiens
  misc_RNA (1)...(19): siRNA sense strand
ggaaauggcaagggagcau

SEQ ID NO: 707949 - RNA, 19 nt, Homo sapiens
  misc_RNA (1)...(19): siRNA sense strand
agaggagaaagcagagaua

SEQ ID NO: 707950 - RNA, 19 nt, Homo sapiens
  misc_RNA (1)...(19): siRNA sense strand
gaagauggagaaggagaag

SEQ ID NO: 707951 - RNA, 19 nt, Homo sapiens
  misc_RNA (1)...(19): siRNA sense strand
gaggagaccggcagcaacu

SEQ ID NO: 707952 - RNA, 19 nt, Homo sapiens
  misc_RNA (1)...(19): siRNA sense strand
agaaagagagcacgaacgu

SEQ ID NO: 707953 - RNA, 19 nt, Homo sapiens
  misc_RNA (1)...(19): siRNA sense strand
gaggaagaaaugagugaag

SEQ ID NO: 707954 - RNA, 19 nt, Homo sapiens
  misc_RNA (1)...(19): siRNA sense strand
gcagagauaaaacgcuuaa

SEQ ID NO: 707955 - RNA, 19 nt, Homo sapiens
  misc_RNA (1)...(19): siRNA sense strand
ugggaaagacagaagagaa

SEQ ID NO: 707956 - RNA, 19 nt, Homo sapiens
  misc_RNA (1)...(19): siRNA sense strand
ucccagcagucaagaagau

SEQ ID NO: 707957 - RNA, 19 nt, Homo sapiens
  misc_RNA (1)...(19): siRNA sense strand
agaagcagaggaagaagug

SEQ ID NO: 707958 - RNA, 19 nt, Homo sapiens
  misc_RNA (1)...(19): siRNA sense strand
uauggaagacagaggagaa

SEQ ID NO: 707959 - RNA, 19 nt, Homo sapiens
  misc_RNA (1)...(19): siRNA sense strand
ugaagaugaagaacgagaa

SEQ ID NO: 707960 - RNA, 19 nt, Homo sapiens
  misc_RNA (1)...(19): siRNA sense strand
gugaggaagaaaugaguga

SEQ ID NO: 707961 - RNA, 19 nt, Homo sapiens
  misc_RNA (1)...(19): siRNA sense strand
gaacuccccguauagaaga

SEQ ID NO: 707962 - RNA, 19 nt, Homo sapiens
  misc_RNA (1)...(19): siRNA sense strand
ugaaaaggacucuuggaaa

SEQ ID NO: 707963 - RNA, 19 nt, Homo sapiens
  misc_RNA (1)...(19): siRNA sense strand
gaaacgacaucgagaagaa

SEQ ID NO: 707964 - RNA, 19 nt, Homo sapiens
  misc_RNA (1)...(19): siRNA sense strand
gcaaaugucucggaaagaa

SEQ ID NO: 707965 - RNA, 19 nt, Homo sapiens
  misc_RNA (1)...(19): siRNA sense strand
gaaaacagaugaaauugug

SEQ ID NO: 707966 - RNA, 19 nt, Homo sapiens
  misc_RNA (1)...(19): siRNA sense strand
gcauggagaucacaauaag

SEQ ID NO: 707967 - RNA, 19 nt, Homo sapiens
  misc_RNA (1)...(19): siRNA sense strand
gagcaccagugaagaauca

SEQ ID NO: 707968 - RNA, 19 nt, Homo sapiens
  misc_RNA (1)...(19): siRNA sense strand
ugaaacaccugcacgacaa

SEQ ID NO: 707969 - RNA, 19 nt, Homo sapiens
  misc_RNA (1)...(19): siRNA sense strand
gaaaaggacucuuggaaag

SEQ ID NO: 707970 - RNA, 19 nt, Homo sapiens
  misc_RNA (1)...(19): siRNA sense strand
uaaagcggcugaagaugga

SEQ ID NO: 707971 - RNA, 19 nt, Homo sapiens
  misc_RNA (1)...(19): siRNA sense strand
agaaaugagugaagaugaa

SEQ ID NO: 707972 - RNA, 19 nt, Homo sapiens
  misc_RNA (1)...(19): siRNA sense strand
gagugaagaugaagaacga

SEQ ID NO: 707973 - RNA, 19 nt, Homo sapiens
  misc_RNA (1)...(19): siRNA sense strand
gcagcaacauggacaagau

SEQ ID NO: 707974 - RNA, 19 nt, Homo sapiens
  misc_RNA (1)...(19): siRNA sense strand
gaagggagcaccagugaag

SEQ ID NO: 707975 - RNA, 19 nt, Homo sapiens
  misc_RNA (1)...(19): siRNA sense strand
ggaaggaacaagaggagaa

SEQ ID NO: 707976 - RNA, 19 nt, Homo sapiens
  misc_RNA (1)...(19): siRNA sense strand
ggaguggucuacagagcaa

SEQ ID NO: 707977 - RNA, 19 nt, Homo sapiens
  misc_RNA (1)...(19): siRNA sense strand
gaagaugaagaacgagaaa

SEQ ID NO: 707978 - RNA, 19 nt, Homo sapiens
  misc_RNA (1)...(19): siRNA sense strand
gcacgaacgucggaaacga

SEQ ID NO: 707979 - RNA, 19 nt, Homo sapiens
  misc_RNA (1)...(19): siRNA sense strand
gagaagacucuauggaaga

SEQ ID NO: 707980 - RNA, 19 nt, Homo sapiens
  misc_RNA (1)...(19): siRNA sense strand
cagcaaaugucucggaaag

SEQ ID NO: 707981 - RNA, 19 nt, Homo sapiens
  misc_RNA (1)...(19): siRNA sense strand
cagaaaagaugaaaagaga

SEQ ID NO: 707982 - RNA, 19 nt, Homo sapiens
  misc_RNA (1)...(19): siRNA sense strand
gaagaaaugagugaagaug

SEQ ID NO: 707983 - RNA, 19 nt, Homo sapiens
  misc_RNA (1)...(19): siRNA sense strand
agaaguaagugaggaagaa

SEQ ID NO: 707984 - RNA, 19 nt, Homo sapiens
  misc_RNA (1)...(19): siRNA sense strand
ggaagacagaggagaagaa

SEQ ID NO: 707985 - RNA, 19 nt, Homo sapiens
  misc_RNA (1)...(19): siRNA sense strand
gaaggaacaagaggagaaa

SEQ ID NO: 707986 - RNA, 19 nt, Homo sapiens
  misc_RNA (1)...(19): siRNA sense strand
ugacagagggcgacuaugu

SEQ ID NO: 707987 - RNA, 19 nt, Homo sapiens
  misc_RNA (1)...(19): siRNA sense strand
ggagaaagcagagauaaaa

SEQ ID NO: 707988 - RNA, 19 nt, Homo sapiens
  misc_RNA (1)...(19): siRNA sense strand
gagaagaacaggauaaagc

SEQ ID NO: 707989 - RNA, 19 nt, Homo sapiens
  misc_RNA (1)...(19): siRNA sense strand
gaggagaaagcagagauaa

SEQ ID NO: 707990 - RNA, 19 nt, Homo sapiens
  misc_RNA (1)...(19): siRNA sense strand
ugaagaagcagaggaagaa

SEQ ID NO: 707991 - RNA, 19 nt, Homo sapiens
  misc_RNA (1)...(19): siRNA sense strand
gagcauuccaggagagaaa

SEQ ID NO: 707992 - RNA, 19 nt, Homo sapiens
  misc_RNA (1)...(19): siRNA sense strand
aaggagggcuucccgauca

SEQ ID NO: 707993 - RNA, 19 nt, Homo sapiens
  misc_RNA (1)...(19): siRNA sense strand
gcuucgaccucaugaacaa

SEQ ID NO: 707994 - RNA, 19 nt, Homo sapiens
  misc_RNA (1)...(19): siRNA sense strand
gaaguaagugaggaagaaa

SEQ ID NO: 707995 - RNA, 19 nt, Homo sapiens
  misc_RNA (1)...(19): siRNA sense strand
caacaucgucaccguuaga

SEQ ID NO: 707996 - RNA, 19 nt, Homo sapiens
  misc_RNA (1)...(19): siRNA sense strand
ugagggagaucaacaccau

SEQ ID NO: 707997 - RNA, 19 nt, Homo sapiens
  misc_RNA (1)...(19): siRNA sense strand
aaaggacucuuggaaagug

SEQ ID NO: 707998 - RNA, 19 nt, Homo sapiens
  misc_RNA (1)...(19): siRNA sense strand
gcucuaaagcggcugaaga

SEQ ID NO: 707999 - RNA, 19 nt, Homo sapiens
  misc_RNA (1)...(19): siRNA sense strand
ggcugaagauggagaagga

SEQ ID NO: 708000 - RNA, 19 nt, Homo sapiens
  misc_RNA (1)...(19): siRNA sense strand
agacagaggagaagaagau

SEQ ID NO: 708001 - RNA, 19 nt, Homo sapiens
  misc_RNA (1)...(19): siRNA sense strand
gaucaacaccauccucaag

SEQ ID NO: 708002 - RNA, 19 nt, Homo sapiens
  misc_RNA (1)...(19): siRNA sense strand
gaugaaauuguggcucuaa

SEQ ID NO: 708003 - RNA, 19 nt, Homo sapiens
  misc_RNA (1)...(19): siRNA sense strand
gaaucaggcucagguucug

SEQ ID NO: 708004 - RNA, 19 nt, Homo sapiens
  misc_RNA (1)...(19): siRNA sense strand
gaggugaagacccugauga

SEQ ID NO: 708005 - RNA, 19 nt, Homo sapiens
  misc_RNA (1)...(19): siRNA sense strand
ggaggaggaggaagaggaa

SEQ ID NO: 708006 - RNA, 19 nt, Homo sapiens
  misc_RNA (1)...(19): siRNA sense strand
ggaaacgacaucgagaaga

SEQ ID NO: 708007 - RNA, 19 nt, Homo sapiens
  misc_RNA (1)...(19): siRNA sense strand
agucagaaaucgaucagau

SEQ ID NO: 708008 - RNA, 19 nt, Homo sapiens
  misc_RNA (1)...(19): siRNA sense strand
ucacgucgcugagggagau

SEQ ID NO: 708009 - RNA, 19 nt, Homo sapiens
  misc_RNA (1)...(19): siRNA sense strand
gaaauuguggcucuaaagc

SEQ ID NO: 708010 - RNA, 19 nt, Homo sapiens
  misc_RNA (1)...(19): siRNA sense strand
gucaguggguugcaucuuc

SEQ ID NO: 708011 - RNA, 19 nt, Homo sapiens
  misc_RNA (1)...(19): siRNA sense strand
ugaagacccugaugaucca

SEQ ID NO: 708012 - RNA, 19 nt, Homo sapiens
  misc_RNA (1)...(19): siRNA sense strand
gaagacagaggagaagaag

SEQ ID NO: 708013 - RNA, 19 nt, Homo sapiens
  misc_RNA (1)...(19): siRNA sense strand
gaagaacgagaaaaugaaa

SEQ ID NO: 708014 - RNA, 19 nt, Homo sapiens
  misc_RNA (1)...(19): siRNA sense strand
ggaagaaaugagugaagau

SEQ ID NO: 708015 - RNA, 19 nt, Homo sapiens
  misc_RNA (1)...(19): siRNA sense strand
agacagaagagaagggaaa

SEQ ID NO: 708016 - RNA, 19 nt, Homo sapiens
  misc_RNA (1)...(19): siRNA sense strand
gaaugggaaagacagaaga

SEQ ID NO: 708017 - RNA, 19 nt, Homo sapiens
  misc_RNA (1)...(19): siRNA sense strand
caaaugucucggaaagaaa

SEQ ID NO: 708018 - RNA, 19 nt, Homo sapiens
  misc_RNA (1)...(19): siRNA sense strand
gaggagaagaagaugauuc

SEQ ID NO: 708019 - RNA, 19 nt, Homo sapiens
  misc_RNA (1)...(19): siRNA sense strand
gcaacauggacaagaucua

SEQ ID NO: 708020 - RNA, 19 nt, Homo sapiens
  misc_RNA (1)...(19): siRNA sense strand
aggaagaaaugagugaaga

SEQ ID NO: 708021 - RNA, 19 nt, Homo sapiens
  misc_RNA (1)...(19): siRNA sense strand
auaaggaacuccccguaua

SEQ ID NO: 708022 - RNA, 19 nt, Homo sapiens
  misc_RNA (1)...(19): siRNA sense strand
gagugaagaagcagaggaa

SEQ ID NO: 708023 - RNA, 19 nt, Homo sapiens
  misc_RNA (1)...(19): siRNA sense strand
ggaagucagaaaucgauca

SEQ ID NO: 708024 - RNA, 19 nt, Homo sapiens
  misc_RNA (1)...(19): siRNA sense strand
cccaacaucgucaccguua

SEQ ID NO: 708025 - RNA, 19 nt, Homo sapiens
  misc_RNA (1)...(19): siRNA sense strand
gggaaagacagaagagaag

SEQ ID NO: 708026 - RNA, 19 nt, Homo sapiens
  misc_RNA (1)...(19): siRNA sense strand
caaaagacaagaaaacaga

SEQ ID NO: 708027 - RNA, 19 nt, Homo sapiens
  misc_RNA (1)...(19): siRNA sense strand
gaucgaggagggcaccuau

SEQ ID NO: 708028 - RNA, 19 nt, Homo sapiens
  misc_RNA (1)...(19): siRNA sense strand
gaaaugagugaagaugaag

SEQ ID NO: 708029 - RNA, 19 nt, Homo sapiens
  misc_RNA (1)...(19): siRNA sense strand
ggaagaggaggaggaggaa

SEQ ID NO: 708030 - RNA, 19 nt, Homo sapiens
  misc_RNA (1)...(19): siRNA sense strand
caugcuagagugaaagaaa

SEQ ID NO: 708031 - RNA, 19 nt, Homo sapiens
  misc_RNA (1)...(19): siRNA sense strand
gaagagaaaauggaagaaa

SEQ ID NO: 708032 - RNA, 19 nt, Homo sapiens
  misc_RNA (1)...(19): siRNA sense strand
ggaaugggaaagacagaag

SEQ ID NO: 708033 - RNA, 19 nt, Homo sapiens
  misc_RNA (1)...(19): siRNA sense strand
cgucaccguuagagagauu

SEQ ID NO: 708034 - RNA, 19 nt, Homo sapiens
  misc_RNA (1)...(19): siRNA sense strand
gugaagaagcagaggaaga

SEQ ID NO: 708035 - RNA, 19 nt, Homo sapiens
  misc_RNA (1)...(19): siRNA sense strand
cgaagaaguaagugaggaa

SEQ ID NO: 708036 - RNA, 19 nt, Homo sapiens
  misc_RNA (1)...(19): siRNA sense strand
caacauggacaagaucuac

SEQ ID NO: 708037 - RNA, 19 nt, Homo sapiens
  misc_RNA (1)...(19): siRNA sense strand
ggaacaagaggagaaagca

SEQ ID NO: 708038 - RNA, 19 nt, Homo sapiens
  misc_RNA (1)...(19): siRNA sense strand
gaaacgaaggaaggaacaa

SEQ ID NO: 708039 - RNA, 19 nt, Homo sapiens
  misc_RNA (1)...(19): siRNA sense strand
ggaagggagcaccagugaa

SEQ ID NO: 708040 - RNA, 19 nt, Homo sapiens
  misc_RNA (1)...(19): siRNA sense strand
cagaggagaagaagaugau

SEQ ID NO: 708041 - RNA, 19 nt, Homo sapiens
  misc_RNA (1)...(19): siRNA sense strand
guaagugaggaagaaauga

SEQ ID NO: 708042 - RNA, 19 nt, Homo sapiens
  misc_RNA (1)...(19): siRNA sense strand
gcagaaucaggcucagguu

SEQ ID NO: 708043 - RNA, 19 nt, Homo sapiens
  misc_RNA (1)...(19): siRNA sense strand
cagaagagaagggaaaugg

SEQ ID NO: 708044 - RNA, 19 nt, Homo sapiens
  misc_RNA (1)...(19): siRNA sense strand
aggacggccucaagcauga

SEQ ID NO: 708045 - RNA, 19 nt, Homo sapiens
  misc_RNA (1)...(19): siRNA sense strand
gcaccuauggaguggucua

SEQ ID NO: 708046 - RNA, 19 nt, Homo sapiens
  misc_RNA (1)...(19): siRNA sense strand
gacagagggcgacuaugug

SEQ ID NO: 708047 - RNA, 19 nt, Homo sapiens
  misc_RNA (1)...(19): siRNA sense strand
aagaaaugagugaagauga

SEQ ID NO: 708048 - RNA, 19 nt, Homo sapiens
  misc_RNA (1)...(19): siRNA sense strand
ggaaauggcaagggagcau

SEQ ID NO: 708049 - RNA, 19 nt, Homo sapiens
  misc_RNA (1)...(19): siRNA sense strand
agaggagaaagcagagaua

SEQ ID NO: 708050 - RNA, 19 nt, Homo sapiens
  misc_RNA (1)...(19): siRNA sense strand
gaagauggagaaggagaag

SEQ ID NO: 708051 - RNA, 19 nt, Homo sapiens
  misc_RNA (1)...(19): siRNA sense strand
gaggagaccggcagcaacu

SEQ ID NO: 708052 - RNA, 19 nt, Homo sapiens
  misc_RNA (1)...(19): siRNA sense strand
agaaagagagcacgaacgu

SEQ ID NO: 708053 - RNA, 19 nt, Homo sapiens
  misc_RNA (1)...(19): siRNA sense strand
gaggaagaaaugagugaag

SEQ ID NO: 708054 - RNA, 19 nt, Homo sapiens
  misc_RNA (1)...(19): siRNA sense strand
gcagagauaaaacgcuuaa

SEQ ID NO: 708055 - RNA, 19 nt, Homo sapiens
  misc_RNA (1)...(19): siRNA sense strand
ugggaaagacagaagagaa

SEQ ID NO: 708056 - RNA, 19 nt, Homo sapiens
  misc_RNA (1)...(19): siRNA sense strand
ucccagcagucaagaagau

SEQ ID NO: 708057 - RNA, 19 nt, Homo sapiens
  misc_RNA (1)...(19): siRNA sense strand
agaagcagaggaagaagug

SEQ ID NO: 708058 - RNA, 19 nt, Homo sapiens
  misc_RNA (1)...(19): siRNA sense strand
uauggaagacagaggagaa

SEQ ID NO: 708059 - RNA, 19 nt, Homo sapiens
  misc_RNA (1)...(19): siRNA sense strand
ugaagaugaagaacgagaa

SEQ ID NO: 708060 - RNA, 19 nt, Homo sapiens
  misc_RNA (1)...(19): siRNA sense strand
gugaggaagaaaugaguga

SEQ ID NO: 708061 - RNA, 19 nt, Homo sapiens
  misc_RNA (1)...(19): siRNA sense strand
gaacuccccguauagaaga

SEQ ID NO: 708062 - RNA, 19 nt, Homo sapiens
  misc_RNA (1)...(19): siRNA sense strand
ugaaaaggacucuuggaaa

SEQ ID NO: 708063 - RNA, 19 nt, Homo sapiens
  misc_RNA (1)...(19): siRNA sense strand
gaaaacagaugaaauugug

SEQ ID NO: 708064 - RNA, 19 nt, Homo sapiens
  misc_RNA (1)...(19): siRNA sense strand
gagcaccagugaagaauca

SEQ ID NO: 708065 - RNA, 19 nt, Homo sapiens
  misc_RNA (1)...(19): siRNA sense strand
ugaaacaccugcacgacaa

SEQ ID NO: 708066 - RNA, 19 nt, Homo sapiens
  misc_RNA (1)...(19): siRNA sense strand
uaaagcggcugaagaugga

SEQ ID NO: 708067 - RNA, 19 nt, Homo sapiens
  misc_RNA (1)...(19): siRNA sense strand
agaaaugagugaagaugaa

SEQ ID NO: 708068 - RNA, 19 nt, Homo sapiens
  misc_RNA (1)...(19): siRNA sense strand
gagugaagaugaagaacga

SEQ ID NO: 708069 - RNA, 19 nt, Homo sapiens
  misc_RNA (1)...(19): siRNA sense strand
gcagcaacauggacaagau

SEQ ID NO: 708070 - RNA, 19 nt, Homo sapiens
  misc_RNA (1)...(19): siRNA sense strand
gaagggagcaccagugaag

SEQ ID NO: 708071 - RNA, 19 nt, Homo sapiens
  misc_RNA (1)...(19): siRNA sense strand
gaagaugaagaacgagaaa

SEQ ID NO: 708072 - RNA, 19 nt, Homo sapiens
  misc_RNA (1)...(19): siRNA sense strand
ggaguggucuacagagcaa

SEQ ID NO: 708073 - RNA, 19 nt, Homo sapiens
  misc_RNA (1)...(19): siRNA sense strand
gaagaaaugagugaagaug

SEQ ID NO: 708074 - RNA, 19 nt, Homo sapiens
  misc_RNA (1)...(19): siRNA sense strand
agaaguaagugaggaagaa

SEQ ID NO: 708075 - RNA, 19 nt, Homo sapiens
  misc_RNA (1)...(19): siRNA sense strand
ugacagagggcgacuaugu

SEQ ID NO: 708076 - RNA, 19 nt, Homo sapiens
  misc_RNA (1)...(19): siRNA sense strand
ugaagaagcagaggaagaa

SEQ ID NO: 708077 - RNA, 19 nt, Homo sapiens
  misc_RNA (1)...(19): siRNA sense strand
aaggagggcuucccgauca

SEQ ID NO: 708078 - RNA, 19 nt, Homo sapiens
  misc_RNA (1)...(19): siRNA sense strand
gcuucgaccucaugaacaa

SEQ ID NO: 708079 - RNA, 19 nt, Homo sapiens
  misc_RNA (1)...(19): siRNA sense strand
gaaguaagugaggaagaaa

SEQ ID NO: 708080 - RNA, 19 nt, Homo sapiens
  misc_RNA (1)...(19): siRNA sense strand
caacaucgucaccguuaga

SEQ ID NO: 708081 - RNA, 19 nt, Homo sapiens
  misc_RNA (1)...(19): siRNA sense strand
ugagggagaucaacaccau

SEQ ID NO: 708082 - RNA, 19 nt, Homo sapiens
  misc_RNA (1)...(19): siRNA sense strand
gcucuaaagcggcugaaga

SEQ ID NO: 708083 - RNA, 19 nt, Homo sapiens
  misc_RNA (1)...(19): siRNA sense strand
ggcugaagauggagaagga

SEQ ID NO: 708084 - RNA, 19 nt, Homo sapiens
  misc_RNA (1)...(19): siRNA sense strand
gaugaaauuguggcucuaa

SEQ ID NO: 708085 - RNA, 19 nt, Homo sapiens
  misc_RNA (1)...(19): siRNA sense strand
gaucaacaccauccucaag

SEQ ID NO: 708086 - RNA, 19 nt, Homo sapiens
  misc_RNA (1)...(19): siRNA sense strand
ggaggaggaggaagaggaa

SEQ ID NO: 708087 - RNA, 19 nt, Homo sapiens
  misc_RNA (1)...(19): siRNA sense strand
gaggugaagacccugauga

SEQ ID NO: 708088 - RNA, 19 nt, Homo sapiens
  misc_RNA (1)...(19): siRNA sense strand
gaaucaggcucagguucug

SEQ ID NO: 708089 - RNA, 19 nt, Homo sapiens
  misc_RNA (1)...(19): siRNA sense strand
ucacgucgcugagggagau

SEQ ID NO: 708090 - RNA, 19 nt, Homo sapiens
  misc_RNA (1)...(19): siRNA sense strand
agucagaaaucgaucagau

SEQ ID NO: 708091 - RNA, 19 nt, Homo sapiens
  misc_RNA (1)...(19): siRNA sense strand
gaaauuguggcucuaaagc

SEQ ID NO: 708092 - RNA, 19 nt, Homo sapiens
  misc_RNA (1)...(19): siRNA sense strand
gucaguggguugcaucuuc

SEQ ID NO: 708093 - RNA, 19 nt, Homo sapiens
  misc_RNA (1)...(19): siRNA sense strand
ugaagacccugaugaucca

SEQ ID NO: 708094 - RNA, 19 nt, Homo sapiens
  misc_RNA (1)...(19): siRNA sense strand
ggaagaaaugagugaagau

SEQ ID NO: 708095 - RNA, 19 nt, Homo sapiens
  misc_RNA (1)...(19): siRNA sense strand
gaagaacgagaaaaugaaa

SEQ ID NO: 708096 - RNA, 19 nt, Homo sapiens
  misc_RNA (1)...(19): siRNA sense strand
aggaagaaaugagugaaga

SEQ ID NO: 708097 - RNA, 19 nt, Homo sapiens
  misc_RNA (1)...(19): siRNA sense strand
gcaacauggacaagaucua

SEQ ID NO: 708098 - RNA, 19 nt, Homo sapiens
  misc_RNA (1)...(19): siRNA sense strand
gagugaagaagcagaggaa

SEQ ID NO: 708099 - RNA, 19 nt, Homo sapiens
  misc_RNA (1)...(19): siRNA sense strand
ggaagucagaaaucgauca

SEQ ID NO: 708100 - RNA, 19 nt, Homo sapiens
  misc_RNA (1)...(19): siRNA sense strand
cccaacaucgucaccguua

SEQ ID NO: 708101 - RNA, 19 nt, Homo sapiens
  misc_RNA (1)...(19): siRNA sense strand
gaaaugagugaagaugaag

SEQ ID NO: 708102 - RNA, 19 nt, Homo sapiens
  misc_RNA (1)...(19): siRNA sense strand
ggaagaggaggaggaggaa

SEQ ID NO: 708103 - RNA, 19 nt, Homo sapiens
  misc_RNA (1)...(19): siRNA sense strand
caaaagacaagaaaacaga

SEQ ID NO: 708104 - RNA, 19 nt, Homo sapiens
  misc_RNA (1)...(19): siRNA sense strand
gaucgaggagggcaccuau

SEQ ID NO: 708105 - RNA, 19 nt, Homo sapiens
  misc_RNA (1)...(19): siRNA sense strand
cgaagaaguaagugaggaa

SEQ ID NO: 708106 - RNA, 19 nt, Homo sapiens
  misc_RNA (1)...(19): siRNA sense strand
cgucaccguuagagagauu

SEQ ID NO: 708107 - RNA, 19 nt, Homo sapiens
  misc_RNA (1)...(19): siRNA sense strand
gugaagaagcagaggaaga

SEQ ID NO: 708108 - RNA, 19 nt, Homo sapiens
  misc_RNA (1)...(19): siRNA sense strand
caacauggacaagaucuac

SEQ ID NO: 708109 - RNA, 19 nt, Homo sapiens
  misc_RNA (1)...(19): siRNA sense strand
ggaagggagcaccagugaa

SEQ ID NO: 708110 - RNA, 19 nt, Homo sapiens
  misc_RNA (1)...(19): siRNA sense strand
gcagaaucaggcucagguu

SEQ ID NO: 708111 - RNA, 19 nt, Homo sapiens
  misc_RNA (1)...(19): siRNA sense strand
guaagugaggaagaaauga

SEQ ID NO: 708112 - RNA, 19 nt, Homo sapiens
  misc_RNA (1)...(19): siRNA sense strand
aagaaaugagugaagauga

SEQ ID NO: 708113 - RNA, 19 nt, Homo sapiens
  misc_RNA (1)...(19): siRNA sense strand
aggacggccucaagcauga

SEQ ID NO: 708114 - RNA, 19 nt, Homo sapiens
  misc_RNA (1)...(19): siRNA sense strand
gcaccuauggaguggucua

SEQ ID NO: 708115 - RNA, 19 nt, Homo sapiens
  misc_RNA (1)...(19): siRNA sense strand
gacagagggcgacuaugug

SEQ ID NO: 708116 - RNA, 19 nt, Homo sapiens
  misc_RNA (1)...(19): siRNA sense strand
gaggagaccggcagcaacu

SEQ ID NO: 708117 - RNA, 19 nt, Homo sapiens
  misc_RNA (1)...(19): siRNA sense strand
gaagauggagaaggagaag

SEQ ID NO: 708118 - RNA, 19 nt, Homo sapiens
  misc_RNA (1)...(19): siRNA sense strand
gaggaagaaaugagugaag

SEQ ID NO: 708119 - RNA, 19 nt, Homo sapiens
  misc_RNA (1)...(19): siRNA sense strand
ugaagaugaagaacgagaa

SEQ ID NO: 708120 - RNA, 19 nt, Homo sapiens
  misc_RNA (1)...(19): siRNA sense strand
ucccagcagucaagaagau

SEQ ID NO: 708121 - RNA, 19 nt, Homo sapiens
  misc_RNA (1)...(19): siRNA sense strand
agaagcagaggaagaagug

SEQ ID NO: 708122 - RNA, 19 nt, Homo sapiens
  misc_RNA (1)...(19): siRNA sense strand
gugaggaagaaaugaguga

SEQ ID NO: 708123 - RNA, 19 nt, Homo sapiens
  misc_RNA (1)...(19): siRNA sense strand
gcaccagugaagaaucaga

SEQ ID NO: 708124 - RNA, 19 nt, Homo sapiens
  misc_RNA (1)...(19): siRNA sense strand
ugaagauggagaaggagaa

SEQ ID NO: 708125 - RNA, 19 nt, Homo sapiens
  misc_RNA (1)...(19): siRNA sense strand
aagaggaggaggaggaaga

SEQ ID NO: 708126 - RNA, 19 nt, Homo sapiens
  misc_RNA (1)...(19): siRNA sense strand
acaagguguucaaggaucu

SEQ ID NO: 708127 - RNA, 19 nt, Homo sapiens
  misc_RNA (1)...(19): siRNA sense strand
gaguacggauccccucuga

SEQ ID NO: 708128 - RNA, 19 nt, Homo sapiens
  misc_RNA (1)...(19): siRNA sense strand
ccaacaucgucaccguuag

SEQ ID NO: 708129 - RNA, 19 nt, Homo sapiens
  misc_RNA (1)...(19): siRNA sense strand
gaagucagaaaucgaucag

SEQ ID NO: 708130 - RNA, 19 nt, Homo sapiens
  misc_RNA (1)...(19): siRNA sense strand
ggugaagacccugaugauc

SEQ ID NO: 708131 - RNA, 19 nt, Homo sapiens
  misc_RNA (1)...(19): siRNA sense strand
ugaaauuguggcucuaaag

SEQ ID NO: 708132 - RNA, 19 nt, Homo sapiens
  misc_RNA (1)...(19): siRNA sense strand
gggcuucgaccucaugaac

SEQ ID NO: 708133 - RNA, 19 nt, Homo sapiens
  misc_RNA (1)...(19): siRNA sense strand
ggaggugaagacccugaug

SEQ ID NO: 708134 - RNA, 19 nt, Homo sapiens
  misc_RNA (1)...(19): siRNA sense strand
ggagaccggcagcaacucu

SEQ ID NO: 708135 - RNA, 19 nt, Homo sapiens
  misc_RNA (1)...(19): siRNA sense strand
gaaacgacaucgagaagaa

SEQ ID NO: 708136 - RNA, 19 nt, Homo sapiens
  misc_RNA (1)...(19): siRNA sense strand
gcaaaugucucggaaagaa

SEQ ID NO: 708137 - RNA, 19 nt, Homo sapiens
  misc_RNA (1)...(19): siRNA sense strand
gaaaacagaugaaauugug

SEQ ID NO: 708138 - RNA, 19 nt, Homo sapiens
  misc_RNA (1)...(19): siRNA sense strand
gcauggagaucacaauaag

SEQ ID NO: 708139 - RNA, 19 nt, Homo sapiens
  misc_RNA (1)...(19): siRNA sense strand
gagcaccagugaagaauca

SEQ ID NO: 708140 - RNA, 19 nt, Homo sapiens
  misc_RNA (1)...(19): siRNA sense strand
ugaaacaccugcacgacaa

SEQ ID NO: 708141 - RNA, 19 nt, Homo sapiens
  misc_RNA (1)...(19): siRNA sense strand
uaaagcggcugaagaugga

SEQ ID NO: 708142 - RNA, 19 nt, Homo sapiens
  misc_RNA (1)...(19): siRNA sense strand
agaaaugagugaagaugaa

SEQ ID NO: 708143 - RNA, 19 nt, Homo sapiens
  misc_RNA (1)...(19): siRNA sense strand
gagugaagaugaagaacga

SEQ ID NO: 708144 - RNA, 19 nt, Homo sapiens
  misc_RNA (1)...(19): siRNA sense strand
gcagcaacauggacaagau

SEQ ID NO: 708145 - RNA, 19 nt, Homo sapiens
  misc_RNA (1)...(19): siRNA sense strand
gaagggagcaccagugaag

SEQ ID NO: 708146 - RNA, 19 nt, Homo sapiens
  misc_RNA (1)...(19): siRNA sense strand
gagaagacucuauggaaga

SEQ ID NO: 708147 - RNA, 19 nt, Homo sapiens
  misc_RNA (1)...(19): siRNA sense strand
ggaguggucuacagagcaa

SEQ ID NO: 708148 - RNA, 19 nt, Homo sapiens
  misc_RNA (1)...(19): siRNA sense strand
gaagaugaagaacgagaaa

SEQ ID NO: 708149 - RNA, 19 nt, Homo sapiens
  misc_RNA (1)...(19): siRNA sense strand
gcacgaacgucggaaacga

SEQ ID NO: 708150 - RNA, 19 nt, Homo sapiens
  misc_RNA (1)...(19): siRNA sense strand
cagcaaaugucucggaaag

SEQ ID NO: 708151 - RNA, 19 nt, Homo sapiens
  misc_RNA (1)...(19): siRNA sense strand
cagaaaagaugaaaagaga

SEQ ID NO: 708152 - RNA, 19 nt, Homo sapiens
  misc_RNA (1)...(19): siRNA sense strand
gaagaaaugagugaagaug

SEQ ID NO: 708153 - RNA, 19 nt, Homo sapiens
  misc_RNA (1)...(19): siRNA sense strand
agaaguaagugaggaagaa

SEQ ID NO: 708154 - RNA, 19 nt, Homo sapiens
  misc_RNA (1)...(19): siRNA sense strand
ggaagacagaggagaagaa

SEQ ID NO: 708155 - RNA, 19 nt, Homo sapiens
  misc_RNA (1)...(19): siRNA sense strand
ugacagagggcgacuaugu

SEQ ID NO: 708156 - RNA, 19 nt, Homo sapiens
  misc_RNA (1)...(19): siRNA sense strand
gagaagaacaggauaaagc

SEQ ID NO: 708157 - RNA, 19 nt, Homo sapiens
  misc_RNA (1)...(19): siRNA sense strand
gagcauuccaggagagaaa

SEQ ID NO: 708158 - RNA, 19 nt, Homo sapiens
  misc_RNA (1)...(19): siRNA sense strand
ugaagaagcagaggaagaa

SEQ ID NO: 708159 - RNA, 19 nt, Homo sapiens
  misc_RNA (1)...(19): siRNA sense strand
aaggagggcuucccgauca

SEQ ID NO: 708160 - RNA, 19 nt, Homo sapiens
  misc_RNA (1)...(19): siRNA sense strand
gcuucgaccucaugaacaa

SEQ ID NO: 708161 - RNA, 19 nt, Homo sapiens
  misc_RNA (1)...(19): siRNA sense strand
gaaguaagugaggaagaaa

SEQ ID NO: 708162 - RNA, 19 nt, Homo sapiens
  misc_RNA (1)...(19): siRNA sense strand
caacaucgucaccguuaga

SEQ ID NO: 708163 - RNA, 19 nt, Homo sapiens
  misc_RNA (1)...(19): siRNA sense strand
ugagggagaucaacaccau

SEQ ID NO: 708164 - RNA, 19 nt, Homo sapiens
  misc_RNA (1)...(19): siRNA sense strand
gcucuaaagcggcugaaga

SEQ ID NO: 708165 - RNA, 19 nt, Homo sapiens
  misc_RNA (1)...(19): siRNA sense strand
ggcugaagauggagaagga

SEQ ID NO: 708166 - RNA, 19 nt, Homo sapiens
  misc_RNA (1)...(19): siRNA sense strand
agacagaggagaagaagau

SEQ ID NO: 708167 - RNA, 19 nt, Homo sapiens
  misc_RNA (1)...(19): siRNA sense strand
gaucaacaccauccucaag

SEQ ID NO: 708168 - RNA, 19 nt, Homo sapiens
  misc_RNA (1)...(19): siRNA sense strand
gaugaaauuguggcucuaa

SEQ ID NO: 708169 - RNA, 19 nt, Homo sapiens
  misc_RNA (1)...(19): siRNA sense strand
gaaucaggcucagguucug

SEQ ID NO: 708170 - RNA, 19 nt, Homo sapiens
  misc_RNA (1)...(19): siRNA sense strand
gaggugaagacccugauga

SEQ ID NO: 708171 - RNA, 19 nt, Homo sapiens
  misc_RNA (1)...(19): siRNA sense strand
ggaggaggaggaagaggaa

SEQ ID NO: 708172 - RNA, 19 nt, Homo sapiens
  misc_RNA (1)...(19): siRNA sense strand
ggaaacgacaucgagaaga

SEQ ID NO: 708173 - RNA, 19 nt, Homo sapiens
  misc_RNA (1)...(19): siRNA sense strand
agucagaaaucgaucagau

SEQ ID NO: 708174 - RNA, 19 nt, Homo sapiens
  misc_RNA (1)...(19): siRNA sense strand
ucacgucgcugagggagau

SEQ ID NO: 708175 - RNA, 19 nt, Homo sapiens
  misc_RNA (1)...(19): siRNA sense strand
gaaauuguggcucuaaagc

SEQ ID NO: 708176 - RNA, 19 nt, Homo sapiens
  misc_RNA (1)...(19): siRNA sense strand
gucaguggguugcaucuuc

SEQ ID NO: 708177 - RNA, 19 nt, Homo sapiens
  misc_RNA (1)...(19): siRNA sense strand
ugaagacccugaugaucca

SEQ ID NO: 708178 - RNA, 19 nt, Homo sapiens
  misc_RNA (1)...(19): siRNA sense strand
caaaugucucggaaagaaa

SEQ ID NO: 708179 - RNA, 19 nt, Homo sapiens
  misc_RNA (1)...(19): siRNA sense strand
gaagaacgagaaaaugaaa

SEQ ID NO: 708180 - RNA, 19 nt, Homo sapiens
  misc_RNA (1)...(19): siRNA sense strand
ggaagaaaugagugaagau

SEQ ID NO: 708181 - RNA, 19 nt, Homo sapiens
  misc_RNA (1)...(19): siRNA sense strand
gaagacagaggagaagaag

SEQ ID NO: 708182 - RNA, 19 nt, Homo sapiens
  misc_RNA (1)...(19): siRNA sense strand
agacagaagagaagggaaa

SEQ ID NO: 708183 - RNA, 19 nt, Homo sapiens
  misc_RNA (1)...(19): siRNA sense strand
gaaugggaaagacagaaga

SEQ ID NO: 708184 - RNA, 19 nt, Homo sapiens
  misc_RNA (1)...(19): siRNA sense strand
aggaagaaaugagugaaga

SEQ ID NO: 708185 - RNA, 19 nt, Homo sapiens
  misc_RNA (1)...(19): siRNA sense strand
gaggagaagaagaugauuc

SEQ ID NO: 708186 - RNA, 19 nt, Homo sapiens
  misc_RNA (1)...(19): siRNA sense strand
gcaacauggacaagaucua

SEQ ID NO: 708187 - RNA, 19 nt, Homo sapiens
  misc_RNA (1)...(19): siRNA sense strand
auaaggaacuccccguaua

SEQ ID NO: 708188 - RNA, 19 nt, Homo sapiens
  misc_RNA (1)...(19): siRNA sense strand
gagugaagaagcagaggaa

SEQ ID NO: 708189 - RNA, 19 nt, Homo sapiens
  misc_RNA (1)...(19): siRNA sense strand
ggaagucagaaaucgauca

SEQ ID NO: 708190 - RNA, 19 nt, Homo sapiens
  misc_RNA (1)...(19): siRNA sense strand
cccaacaucgucaccguua

SEQ ID NO: 708191 - RNA, 19 nt, Homo sapiens
  misc_RNA (1)...(19): siRNA sense strand
gggaaagacagaagagaag

SEQ ID NO: 708192 - RNA, 19 nt, Homo sapiens
  misc_RNA (1)...(19): siRNA sense strand
caaaagacaagaaaacaga

SEQ ID NO: 708193 - RNA, 19 nt, Homo sapiens
  misc_RNA (1)...(19): siRNA sense strand
gaucgaggagggcaccuau

SEQ ID NO: 708194 - RNA, 19 nt, Homo sapiens
  misc_RNA (1)...(19): siRNA sense strand
gaaaugagugaagaugaag

SEQ ID NO: 708195 - RNA, 19 nt, Homo sapiens
  misc_RNA (1)...(19): siRNA sense strand
ggaagaggaggaggaggaa

SEQ ID NO: 708196 - RNA, 19 nt, Homo sapiens
  misc_RNA (1)...(19): siRNA sense strand
caugcuagagugaaagaaa

SEQ ID NO: 708197 - RNA, 19 nt, Homo sapiens
  misc_RNA (1)...(19): siRNA sense strand
gaagagaaaauggaagaaa

SEQ ID NO: 708198 - RNA, 19 nt, Homo sapiens
  misc_RNA (1)...(19): siRNA sense strand
ggaaugggaaagacagaag

SEQ ID NO: 708199 - RNA, 19 nt, Homo sapiens
  misc_RNA (1)...(19): siRNA sense strand
cgucaccguuagagagauu

SEQ ID NO: 708200 - RNA, 19 nt, Homo sapiens
  misc_RNA (1)...(19): siRNA sense strand
gugaagaagcagaggaaga

SEQ ID NO: 708201 - RNA, 19 nt, Homo sapiens
  misc_RNA (1)...(19): siRNA sense strand
cgaagaaguaagugaggaa

SEQ ID NO: 708202 - RNA, 19 nt, Homo sapiens
  misc_RNA (1)...(19): siRNA sense strand
caacauggacaagaucuac

SEQ ID NO: 708203 - RNA, 19 nt, Homo sapiens
  misc_RNA (1)...(19): siRNA sense strand
ggaagggagcaccagugaa

SEQ ID NO: 708204 - RNA, 19 nt, Homo sapiens
  misc_RNA (1)...(19): siRNA sense strand
gcagaaucaggcucagguu

SEQ ID NO: 708205 - RNA, 19 nt, Homo sapiens
  misc_RNA (1)...(19): siRNA sense strand
cagaggagaagaagaugau

SEQ ID NO: 708206 - RNA, 19 nt, Homo sapiens
  misc_RNA (1)...(19): siRNA sense strand
guaagugaggaagaaauga

SEQ ID NO: 708207 - RNA, 19 nt, Homo sapiens
  misc_RNA (1)...(19): siRNA sense strand
cagaagagaagggaaaugg

SEQ ID NO: 708208 - RNA, 19 nt, Homo sapiens
  misc_RNA (1)...(19): siRNA sense strand
aggacggccucaagcauga

SEQ ID NO: 708209 - RNA, 19 nt, Homo sapiens
  misc_RNA (1)...(19): siRNA sense strand
gcaccuauggaguggucua

SEQ ID NO: 708210 - RNA, 19 nt, Homo sapiens
  misc_RNA (1)...(19): siRNA sense strand
gacagagggcgacuaugug

SEQ ID NO: 708211 - RNA, 19 nt, Homo sapiens
  misc_RNA (1)...(19): siRNA sense strand
aagaaaugagugaagauga

SEQ ID NO: 708212 - RNA, 19 nt, Homo sapiens
  misc_RNA (1)...(19): siRNA sense strand
ggaaauggcaagggagcau

SEQ ID NO: 708213 - RNA, 19 nt, Homo sapiens
  misc_RNA (1)...(19): siRNA sense strand
gaagauggagaaggagaag

SEQ ID NO: 708214 - RNA, 19 nt, Homo sapiens
  misc_RNA (1)...(19): siRNA sense strand
gaggagaccggcagcaacu

SEQ ID NO: 708215 - RNA, 19 nt, Homo sapiens
  misc_RNA (1)...(19): siRNA sense strand
gaggaagaaaugagugaag

SEQ ID NO: 708216 - RNA, 19 nt, Homo sapiens
  misc_RNA (1)...(19): siRNA sense strand
agaaagagagcacgaacgu

SEQ ID NO: 708217 - RNA, 19 nt, Homo sapiens
  misc_RNA (1)...(19): siRNA sense strand
ugggaaagacagaagagaa

SEQ ID NO: 708218 - RNA, 19 nt, Homo sapiens
  misc_RNA (1)...(19): siRNA sense strand
ucccagcagucaagaagau

SEQ ID NO: 708219 - RNA, 19 nt, Homo sapiens
  misc_RNA (1)...(19): siRNA sense strand
uauggaagacagaggagaa

SEQ ID NO: 708220 - RNA, 19 nt, Homo sapiens
  misc_RNA (1)...(19): siRNA sense strand
agaagcagaggaagaagug

SEQ ID NO: 708221 - RNA, 19 nt, Homo sapiens
  misc_RNA (1)...(19): siRNA sense strand
ugaagaugaagaacgagaa

SEQ ID NO: 708222 - RNA, 19 nt, Homo sapiens
  misc_RNA (1)...(19): siRNA sense strand
gugaggaagaaaugaguga

SEQ ID NO: 708223 - RNA, 19 nt, Homo sapiens
  misc_RNA (1)...(19): siRNA sense strand
gaacuccccguauagaaga

SEQ ID NO: 708224 - RNA, 19 nt, Homo sapiens
  misc_RNA (1)...(19): siRNA sense strand
gcaccagugaagaaucaga

SEQ ID NO: 708225 - RNA, 19 nt, Homo sapiens
  misc_RNA (1)...(19): siRNA sense strand
gaugaaaagagaaaagaga

SEQ ID NO: 708226 - RNA, 19 nt, Homo sapiens
  misc_RNA (1)...(19): siRNA sense strand
caucgagaagaacaggaua

SEQ ID NO: 708227 - RNA, 19 nt, Homo sapiens
  misc_RNA (1)...(19): siRNA sense strand
aagaggaggaggaggaaga

SEQ ID NO: 708228 - RNA, 19 nt, Homo sapiens
  misc_RNA (1)...(19): siRNA sense strand
acaagguguucaaggaucu

SEQ ID NO: 708229 - RNA, 19 nt, Homo sapiens
  misc_RNA (1)...(19): siRNA sense strand
gaguacggauccccucuga

SEQ ID NO: 708230 - RNA, 19 nt, Homo sapiens
  misc_RNA (1)...(19): siRNA sense strand
ugaagauggagaaggagaa

SEQ ID NO: 708231 - RNA, 19 nt, Homo sapiens
  misc_RNA (1)...(19): siRNA sense strand
ccaacaucgucaccguuag

SEQ ID NO: 708232 - RNA, 19 nt, Homo sapiens
  misc_RNA (1)...(19): siRNA sense strand
gaagucagaaaucgaucag

SEQ ID NO: 708233 - RNA, 19 nt, Homo sapiens
  misc_RNA (1)...(19): siRNA sense strand
ggugaagacccugaugauc

SEQ ID NO: 708234 - RNA, 19 nt, Homo sapiens
  misc_RNA (1)...(19): siRNA sense strand
gggcuucgaccucaugaac

SEQ ID NO: 708235 - RNA, 19 nt, Homo sapiens
  misc_RNA (1)...(19): siRNA sense strand
gaaacgacaucgagaagaa

SEQ ID NO: 708236 - RNA, 19 nt, Homo sapiens
  misc_RNA (1)...(19): siRNA sense strand
gcaaaugucucggaaagaa

SEQ ID NO: 708237 - RNA, 19 nt, Homo sapiens
  misc_RNA (1)...(19): siRNA sense strand
gaaaacagaugaaauugug

SEQ ID NO: 708238 - RNA, 19 nt, Homo sapiens
  misc_RNA (1)...(19): siRNA sense strand
gcauggagaucacaauaag

SEQ ID NO: 708239 - RNA, 19 nt, Homo sapiens
  misc_RNA (1)...(19): siRNA sense strand
gagcaccagugaagaauca

SEQ ID NO: 708240 - RNA, 19 nt, Homo sapiens
  misc_RNA (1)...(19): siRNA sense strand
ugaaacaccugcacgacaa

SEQ ID NO: 708241 - RNA, 19 nt, Homo sapiens
  misc_RNA (1)...(19): siRNA sense strand
uaaagcggcugaagaugga

SEQ ID NO: 708242 - RNA, 19 nt, Homo sapiens
  misc_RNA (1)...(19): siRNA sense strand
agaaaugagugaagaugaa

SEQ ID NO: 708243 - RNA, 19 nt, Homo sapiens
  misc_RNA (1)...(19): siRNA sense strand
gagugaagaugaagaacga

SEQ ID NO: 708244 - RNA, 19 nt, Homo sapiens
  misc_RNA (1)...(19): siRNA sense strand
gcagcaacauggacaagau

SEQ ID NO: 708245 - RNA, 19 nt, Homo sapiens
  misc_RNA (1)...(19): siRNA sense strand
gaagggagcaccagugaag

SEQ ID NO: 708246 - RNA, 19 nt, Homo sapiens
  misc_RNA (1)...(19): siRNA sense strand
gagaagacucuauggaaga

SEQ ID NO: 708247 - RNA, 19 nt, Homo sapiens
  misc_RNA (1)...(19): siRNA sense strand
ggaguggucuacagagcaa

SEQ ID NO: 708248 - RNA, 19 nt, Homo sapiens
  misc_RNA (1)...(19): siRNA sense strand
gaagaugaagaacgagaaa

SEQ ID NO: 708249 - RNA, 19 nt, Homo sapiens
  misc_RNA (1)...(19): siRNA sense strand
gcacgaacgucggaaacga

SEQ ID NO: 708250 - RNA, 19 nt, Homo sapiens
  misc_RNA (1)...(19): siRNA sense strand
cagcaaaugucucggaaag

SEQ ID NO: 708251 - RNA, 19 nt, Homo sapiens
  misc_RNA (1)...(19): siRNA sense strand
cagaaaagaugaaaagaga

SEQ ID NO: 708252 - RNA, 19 nt, Homo sapiens
  misc_RNA (1)...(19): siRNA sense strand
gaagaaaugagugaagaug

SEQ ID NO: 708253 - RNA, 19 nt, Homo sapiens
  misc_RNA (1)...(19): siRNA sense strand
agaaguaagugaggaagaa

SEQ ID NO: 708254 - RNA, 19 nt, Homo sapiens
  misc_RNA (1)...(19): siRNA sense strand
ggaagacagaggagaagaa

SEQ ID NO: 708255 - RNA, 19 nt, Homo sapiens
  misc_RNA (1)...(19): siRNA sense strand
ugacagagggcgacuaugu

SEQ ID NO: 708256 - RNA, 19 nt, Homo sapiens
  misc_RNA (1)...(19): siRNA sense strand
gagaagaacaggauaaagc

SEQ ID NO: 708257 - RNA, 19 nt, Homo sapiens
  misc_RNA (1)...(19): siRNA sense strand
gagcauuccaggagagaaa

SEQ ID NO: 708258 - RNA, 19 nt, Homo sapiens
  misc_RNA (1)...(19): siRNA sense strand
ugaagaagcagaggaagaa

SEQ ID NO: 708259 - RNA, 19 nt, Homo sapiens
  misc_RNA (1)...(19): siRNA sense strand
aaggagggcuucccgauca

SEQ ID NO: 708260 - RNA, 19 nt, Homo sapiens
  misc_RNA (1)...(19): siRNA sense strand
gcuucgaccucaugaacaa

SEQ ID NO: 708261 - RNA, 19 nt, Homo sapiens
  misc_RNA (1)...(19): siRNA sense strand
gaaguaagugaggaagaaa

SEQ ID NO: 708262 - RNA, 19 nt, Homo sapiens
  misc_RNA (1)...(19): siRNA sense strand
caacaucgucaccguuaga

SEQ ID NO: 708263 - RNA, 19 nt, Homo sapiens
  misc_RNA (1)...(19): siRNA sense strand
ugagggagaucaacaccau

SEQ ID NO: 708264 - RNA, 19 nt, Homo sapiens
  misc_RNA (1)...(19): siRNA sense strand
gcucuaaagcggcugaaga

SEQ ID NO: 708265 - RNA, 19 nt, Homo sapiens
  misc_RNA (1)...(19): siRNA sense strand
ggcugaagauggagaagga

SEQ ID NO: 708266 - RNA, 19 nt, Homo sapiens
  misc_RNA (1)...(19): siRNA sense strand
agacagaggagaagaagau

SEQ ID NO: 708267 - RNA, 19 nt, Homo sapiens
  misc_RNA (1)...(19): siRNA sense strand
gaucaacaccauccucaag

SEQ ID NO: 708268 - RNA, 19 nt, Homo sapiens
  misc_RNA (1)...(19): siRNA sense strand
gaugaaauuguggcucuaa

SEQ ID NO: 708269 - RNA, 19 nt, Homo sapiens
  misc_RNA (1)...(19): siRNA sense strand
gaaucaggcucagguucug

SEQ ID NO: 708270 - RNA, 19 nt, Homo sapiens
  misc_RNA (1)...(19): siRNA sense strand
gaggugaagacccugauga

SEQ ID NO: 708271 - RNA, 19 nt, Homo sapiens
  misc_RNA (1)...(19): siRNA sense strand
ggaggaggaggaagaggaa

SEQ ID NO: 708272 - RNA, 19 nt, Homo sapiens
  misc_RNA (1)...(19): siRNA sense strand
ggaaacgacaucgagaaga

SEQ ID NO: 708273 - RNA, 19 nt, Homo sapiens
  misc_RNA (1)...(19): siRNA sense strand
agucagaaaucgaucagau

SEQ ID NO: 708274 - RNA, 19 nt, Homo sapiens
  misc_RNA (1)...(19): siRNA sense strand
ucacgucgcugagggagau

SEQ ID NO: 708275 - RNA, 19 nt, Homo sapiens
  misc_RNA (1)...(19): siRNA sense strand
gaaauuguggcucuaaagc

SEQ ID NO: 708276 - RNA, 19 nt, Homo sapiens
  misc_RNA (1)...(19): siRNA sense strand
gucaguggguugcaucuuc

SEQ ID NO: 708277 - RNA, 19 nt, Homo sapiens
  misc_RNA (1)...(19): siRNA sense strand
ugaagacccugaugaucca

SEQ ID NO: 708278 - RNA, 19 nt, Homo sapiens
  misc_RNA (1)...(19): siRNA sense strand
caaaugucucggaaagaaa

SEQ ID NO: 708279 - RNA, 19 nt, Homo sapiens
  misc_RNA (1)...(19): siRNA sense strand
gaagaacgagaaaaugaaa

SEQ ID NO: 708280 - RNA, 19 nt, Homo sapiens
  misc_RNA (1)...(19): siRNA sense strand
ggaagaaaugagugaagau

SEQ ID NO: 708281 - RNA, 19 nt, Homo sapiens
  misc_RNA (1)...(19): siRNA sense strand
gaagacagaggagaagaag

SEQ ID NO: 708282 - RNA, 19 nt, Homo sapiens
  misc_RNA (1)...(19): siRNA sense strand
agacagaagagaagggaaa

SEQ ID NO: 708283 - RNA, 19 nt, Homo sapiens
  misc_RNA (1)...(19): siRNA sense strand
gaaugggaaagacagaaga

SEQ ID NO: 708284 - RNA, 19 nt, Homo sapiens
  misc_RNA (1)...(19): siRNA sense strand
aggaagaaaugagugaaga

SEQ ID NO: 708285 - RNA, 19 nt, Homo sapiens
  misc_RNA (1)...(19): siRNA sense strand
gaggagaagaagaugauuc

SEQ ID NO: 708286 - RNA, 19 nt, Homo sapiens
  misc_RNA (1)...(19): siRNA sense strand
gcaacauggacaagaucua

SEQ ID NO: 708287 - RNA, 19 nt, Homo sapiens
  misc_RNA (1)...(19): siRNA sense strand
auaaggaacuccccguaua

SEQ ID NO: 708288 - RNA, 19 nt, Homo sapiens
  misc_RNA (1)...(19): siRNA sense strand
gagugaagaagcagaggaa

SEQ ID NO: 708289 - RNA, 19 nt, Homo sapiens
  misc_RNA (1)...(19): siRNA sense strand
ggaagucagaaaucgauca

SEQ ID NO: 708290 - RNA, 19 nt, Homo sapiens
  misc_RNA (1)...(19): siRNA sense strand
cccaacaucgucaccguua

SEQ ID NO: 708291 - RNA, 19 nt, Homo sapiens
  misc_RNA (1)...(19): siRNA sense strand
gggaaagacagaagagaag

SEQ ID NO: 708292 - RNA, 19 nt, Homo sapiens
  misc_RNA (1)...(19): siRNA sense strand
caaaagacaagaaaacaga

SEQ ID NO: 708293 - RNA, 19 nt, Homo sapiens
  misc_RNA (1)...(19): siRNA sense strand
gaucgaggagggcaccuau

SEQ ID NO: 708294 - RNA, 19 nt, Homo sapiens
  misc_RNA (1)...(19): siRNA sense strand
gaaaugagugaagaugaag

SEQ ID NO: 708295 - RNA, 19 nt, Homo sapiens
  misc_RNA (1)...(19): siRNA sense strand
ggaagaggaggaggaggaa

SEQ ID NO: 708296 - RNA, 19 nt, Homo sapiens
  misc_RNA (1)...(19): siRNA sense strand
caugcuagagugaaagaaa

SEQ ID NO: 708297 - RNA, 19 nt, Homo sapiens
  misc_RNA (1)...(19): siRNA sense strand
gaagagaaaauggaagaaa

SEQ ID NO: 708298 - RNA, 19 nt, Homo sapiens
  misc_RNA (1)...(19): siRNA sense strand
ggaaugggaaagacagaag

SEQ ID NO: 708299 - RNA, 19 nt, Homo sapiens
  misc_RNA (1)...(19): siRNA sense strand
cgucaccguuagagagauu

SEQ ID NO: 708300 - RNA, 19 nt, Homo sapiens
  misc_RNA (1)...(19): siRNA sense strand
gugaagaagcagaggaaga

SEQ ID NO: 708301 - RNA, 19 nt, Homo sapiens
  misc_RNA (1)...(19): siRNA sense strand
cgaagaaguaagugaggaa

SEQ ID NO: 708302 - RNA, 19 nt, Homo sapiens
  misc_RNA (1)...(19): siRNA sense strand
caacauggacaagaucuac

SEQ ID NO: 708303 - RNA, 19 nt, Homo sapiens
  misc_RNA (1)...(19): siRNA sense strand
ggaagggagcaccagugaa

SEQ ID NO: 708304 - RNA, 19 nt, Homo sapiens
  misc_RNA (1)...(19): siRNA sense strand
gcagaaucaggcucagguu

SEQ ID NO: 708305 - RNA, 19 nt, Homo sapiens
  misc_RNA (1)...(19): siRNA sense strand
cagaggagaagaagaugau

SEQ ID NO: 708306 - RNA, 19 nt, Homo sapiens
  misc_RNA (1)...(19): siRNA sense strand
guaagugaggaagaaauga

SEQ ID NO: 708307 - RNA, 19 nt, Homo sapiens
  misc_RNA (1)...(19): siRNA sense strand
cagaagagaagggaaaugg

SEQ ID NO: 708308 - RNA, 19 nt, Homo sapiens
  misc_RNA (1)...(19): siRNA sense strand
aggacggccucaagcauga

SEQ ID NO: 708309 - RNA, 19 nt, Homo sapiens
  misc_RNA (1)...(19): siRNA sense strand
gcaccuauggaguggucua

SEQ ID NO: 708310 - RNA, 19 nt, Homo sapiens
  misc_RNA (1)...(19): siRNA sense strand
gacagagggcgacuaugug

SEQ ID NO: 708311 - RNA, 19 nt, Homo sapiens
  misc_RNA (1)...(19): siRNA sense strand
aagaaaugagugaagauga

SEQ ID NO: 708312 - RNA, 19 nt, Homo sapiens
  misc_RNA (1)...(19): siRNA sense strand
ggaaauggcaagggagcau

SEQ ID NO: 708313 - RNA, 19 nt, Homo sapiens
  misc_RNA (1)...(19): siRNA sense strand
gaagauggagaaggagaag

SEQ ID NO: 708314 - RNA, 19 nt, Homo sapiens
  misc_RNA (1)...(19): siRNA sense strand
gaggagaccggcagcaacu

SEQ ID NO: 708315 - RNA, 19 nt, Homo sapiens
  misc_RNA (1)...(19): siRNA sense strand
gaggaagaaaugagugaag

SEQ ID NO: 708316 - RNA, 19 nt, Homo sapiens
  misc_RNA (1)...(19): siRNA sense strand
agaaagagagcacgaacgu

SEQ ID NO: 708317 - RNA, 19 nt, Homo sapiens
  misc_RNA (1)...(19): siRNA sense strand
ugggaaagacagaagagaa

SEQ ID NO: 708318 - RNA, 19 nt, Homo sapiens
  misc_RNA (1)...(19): siRNA sense strand
ucccagcagucaagaagau

SEQ ID NO: 708319 - RNA, 19 nt, Homo sapiens
  misc_RNA (1)...(19): siRNA sense strand
uauggaagacagaggagaa

SEQ ID NO: 708320 - RNA, 19 nt, Homo sapiens
  misc_RNA (1)...(19): siRNA sense strand
agaagcagaggaagaagug

SEQ ID NO: 708321 - RNA, 19 nt, Homo sapiens
  misc_RNA (1)...(19): siRNA sense strand
ugaagaugaagaacgagaa

SEQ ID NO: 708322 - RNA, 19 nt, Homo sapiens
  misc_RNA (1)...(19): siRNA sense strand
gugaggaagaaaugaguga

SEQ ID NO: 708323 - RNA, 19 nt, Homo sapiens
  misc_RNA (1)...(19): siRNA sense strand
gaacuccccguauagaaga

SEQ ID NO: 708324 - RNA, 19 nt, Homo sapiens
  misc_RNA (1)...(19): siRNA sense strand
gcaccagugaagaaucaga

SEQ ID NO: 708325 - RNA, 19 nt, Homo sapiens
  misc_RNA (1)...(19): siRNA sense strand
gaugaaaagagaaaagaga

SEQ ID NO: 708326 - RNA, 19 nt, Homo sapiens
  misc_RNA (1)...(19): siRNA sense strand
caucgagaagaacaggaua

SEQ ID NO: 708327 - RNA, 19 nt, Homo sapiens
  misc_RNA (1)...(19): siRNA sense strand
aagaggaggaggaggaaga

SEQ ID NO: 708328 - RNA, 19 nt, Homo sapiens
  misc_RNA (1)...(19): siRNA sense strand
acaagguguucaaggaucu

SEQ ID NO: 708329 - RNA, 19 nt, Homo sapiens
  misc_RNA (1)...(19): siRNA sense strand
gaguacggauccccucuga

SEQ ID NO: 708330 - RNA, 19 nt, Homo sapiens
  misc_RNA (1)...(19): siRNA sense strand
ugaagauggagaaggagaa

SEQ ID NO: 708331 - RNA, 19 nt, Homo sapiens
  misc_RNA (1)...(19): siRNA sense strand
ccaacaucgucaccguuag

SEQ ID NO: 708332 - RNA, 19 nt, Homo sapiens
  misc_RNA (1)...(19): siRNA sense strand
gaagucagaaaucgaucag

SEQ ID NO: 708333 - RNA, 19 nt, Homo sapiens
  misc_RNA (1)...(19): siRNA sense strand
ggugaagacccugaugauc

SEQ ID NO: 708334 - RNA, 19 nt, Homo sapiens
  misc_RNA (1)...(19): siRNA sense strand
gggcuucgaccucaugaac

SEQ ID NO: 708335 - RNA, 19 nt, Homo sapiens
  misc_RNA (1)...(19): siRNA sense strand
gaaaacagaugaaauugug

SEQ ID NO: 708336 - RNA, 19 nt, Homo sapiens
  misc_RNA (1)...(19): siRNA sense strand
gagcaccagugaagaauca

SEQ ID NO: 708337 - RNA, 19 nt, Homo sapiens
  misc_RNA (1)...(19): siRNA sense strand
ugaaacaccugcacgacaa

SEQ ID NO: 708338 - RNA, 19 nt, Homo sapiens
  misc_RNA (1)...(19): siRNA sense strand
uaaagcggcugaagaugga

SEQ ID NO: 708339 - RNA, 19 nt, Homo sapiens
  misc_RNA (1)...(19): siRNA sense strand
agaaaugagugaagaugaa

SEQ ID NO: 708340 - RNA, 19 nt, Homo sapiens
  misc_RNA (1)...(19): siRNA sense strand
gagugaagaugaagaacga

SEQ ID NO: 708341 - RNA, 19 nt, Homo sapiens
  misc_RNA (1)...(19): siRNA sense strand
gcagcaacauggacaagau

SEQ ID NO: 708342 - RNA, 19 nt, Homo sapiens
  misc_RNA (1)...(19): siRNA sense strand
gaagggagcaccagugaag

SEQ ID NO: 708343 - RNA, 19 nt, Homo sapiens
  misc_RNA (1)...(19): siRNA sense strand
gaagaugaagaacgagaaa

SEQ ID NO: 708344 - RNA, 19 nt, Homo sapiens
  misc_RNA (1)...(19): siRNA sense strand
ggaguggucuacagagcaa

SEQ ID NO: 708345 - RNA, 19 nt, Homo sapiens
  misc_RNA (1)...(19): siRNA sense strand
gaagaaaugagugaagaug

SEQ ID NO: 708346 - RNA, 19 nt, Homo sapiens
  misc_RNA (1)...(19): siRNA sense strand
agaaguaagugaggaagaa

SEQ ID NO: 708347 - RNA, 19 nt, Homo sapiens
  misc_RNA (1)...(19): siRNA sense strand
ugacagagggcgacuaugu

SEQ ID NO: 708348 - RNA, 19 nt, Homo sapiens
  misc_RNA (1)...(19): siRNA sense strand
ugaagaagcagaggaagaa

SEQ ID NO: 708349 - RNA, 19 nt, Homo sapiens
  misc_RNA (1)...(19): siRNA sense strand
aaggagggcuucccgauca

SEQ ID NO: 708350 - RNA, 19 nt, Homo sapiens
  misc_RNA (1)...(19): siRNA sense strand
gcuucgaccucaugaacaa

SEQ ID NO: 708351 - RNA, 19 nt, Homo sapiens
  misc_RNA (1)...(19): siRNA sense strand
gaaguaagugaggaagaaa

SEQ ID NO: 708352 - RNA, 19 nt, Homo sapiens
  misc_RNA (1)...(19): siRNA sense strand
caacaucgucaccguuaga

SEQ ID NO: 708353 - RNA, 19 nt, Homo sapiens
  misc_RNA (1)...(19): siRNA sense strand
ugagggagaucaacaccau

SEQ ID NO: 708354 - RNA, 19 nt, Homo sapiens
  misc_RNA (1)...(19): siRNA sense strand
gcucuaaagcggcugaaga

SEQ ID NO: 708355 - RNA, 19 nt, Homo sapiens
  misc_RNA (1)...(19): siRNA sense strand
ggcugaagauggagaagga

SEQ ID NO: 708356 - RNA, 19 nt, Homo sapiens
  misc_RNA (1)...(19): siRNA sense strand
gaugaaauuguggcucuaa

SEQ ID NO: 708357 - RNA, 19 nt, Homo sapiens
  misc_RNA (1)...(19): siRNA sense strand
gaucaacaccauccucaag

SEQ ID NO: 708358 - RNA, 19 nt, Homo sapiens
  misc_RNA (1)...(19): siRNA sense strand
ggaggaggaggaagaggaa

SEQ ID NO: 708359 - RNA, 19 nt, Homo sapiens
  misc_RNA (1)...(19): siRNA sense strand
gaggugaagacccugauga

SEQ ID NO: 708360 - RNA, 19 nt, Homo sapiens
  misc_RNA (1)...(19): siRNA sense strand
gaaucaggcucagguucug

SEQ ID NO: 708361 - RNA, 19 nt, Homo sapiens
  misc_RNA (1)...(19): siRNA sense strand
ucacgucgcugagggagau

SEQ ID NO: 708362 - RNA, 19 nt, Homo sapiens
  misc_RNA (1)...(19): siRNA sense strand
agucagaaaucgaucagau

SEQ ID NO: 708363 - RNA, 19 nt, Homo sapiens
  misc_RNA (1)...(19): siRNA sense strand
gaaauuguggcucuaaagc

SEQ ID NO: 708364 - RNA, 19 nt, Homo sapiens
  misc_RNA (1)...(19): siRNA sense strand
gucaguggguugcaucuuc

SEQ ID NO: 708365 - RNA, 19 nt, Homo sapiens
  misc_RNA (1)...(19): siRNA sense strand
ugaagacccugaugaucca

SEQ ID NO: 708366 - RNA, 19 nt, Homo sapiens
  misc_RNA (1)...(19): siRNA sense strand
ggaagaaaugagugaagau

SEQ ID NO: 708367 - RNA, 19 nt, Homo sapiens
  misc_RNA (1)...(19): siRNA sense strand
gaagaacgagaaaaugaaa

SEQ ID NO: 708368 - RNA, 19 nt, Homo sapiens
  misc_RNA (1)...(19): siRNA sense strand
aggaagaaaugagugaaga

SEQ ID NO: 708369 - RNA, 19 nt, Homo sapiens
  misc_RNA (1)...(19): siRNA sense strand
gcaacauggacaagaucua

SEQ ID NO: 708370 - RNA, 19 nt, Homo sapiens
  misc_RNA (1)...(19): siRNA sense strand
gagugaagaagcagaggaa

SEQ ID NO: 708371 - RNA, 19 nt, Homo sapiens
  misc_RNA (1)...(19): siRNA sense strand
ggaagucagaaaucgauca

SEQ ID NO: 708372 - RNA, 19 nt, Homo sapiens
  misc_RNA (1)...(19): siRNA sense strand
cccaacaucgucaccguua

SEQ ID NO: 708373 - RNA, 19 nt, Homo sapiens
  misc_RNA (1)...(19): siRNA sense strand
gaaaugagugaagaugaag

SEQ ID NO: 708374 - RNA, 19 nt, Homo sapiens
  misc_RNA (1)...(19): siRNA sense strand
ggaagaggaggaggaggaa

SEQ ID NO: 708375 - RNA, 19 nt, Homo sapiens
  misc_RNA (1)...(19): siRNA sense strand
caaaagacaagaaaacaga

SEQ ID NO: 708376 - RNA, 19 nt, Homo sapiens
  misc_RNA (1)...(19): siRNA sense strand
gaucgaggagggcaccuau

SEQ ID NO: 708377 - RNA, 19 nt, Homo sapiens
  misc_RNA (1)...(19): siRNA sense strand
gaagagaaaauggaagaaa

SEQ ID NO: 708378 - RNA, 19 nt, Homo sapiens
  misc_RNA (1)...(19): siRNA sense strand
cgaagaaguaagugaggaa

SEQ ID NO: 708379 - RNA, 19 nt, Homo sapiens
  misc_RNA (1)...(19): siRNA sense strand
cgucaccguuagagagauu

SEQ ID NO: 708380 - RNA, 19 nt, Homo sapiens
  misc_RNA (1)...(19): siRNA sense strand
gugaagaagcagaggaaga

SEQ ID NO: 708381 - RNA, 19 nt, Homo sapiens
  misc_RNA (1)...(19): siRNA sense strand
caacauggacaagaucuac

SEQ ID NO: 708382 - RNA, 19 nt, Homo sapiens
  misc_RNA (1)...(19): siRNA sense strand
ggaagggagcaccagugaa

SEQ ID NO: 708383 - RNA, 19 nt, Homo sapiens
  misc_RNA (1)...(19): siRNA sense strand
guaagugaggaagaaauga

SEQ ID NO: 708384 - RNA, 19 nt, Homo sapiens
  misc_RNA (1)...(19): siRNA sense strand
gcagaaucaggcucagguu

SEQ ID NO: 708385 - RNA, 19 nt, Homo sapiens
  misc_RNA (1)...(19): siRNA sense strand
aagaaaugagugaagauga

SEQ ID NO: 708386 - RNA, 19 nt, Homo sapiens
  misc_RNA (1)...(19): siRNA sense strand
aggacggccucaagcauga

SEQ ID NO: 708387 - RNA, 19 nt, Homo sapiens
  misc_RNA (1)...(19): siRNA sense strand
gcaccuauggaguggucua

SEQ ID NO: 708388 - RNA, 19 nt, Homo sapiens
  misc_RNA (1)...(19): siRNA sense strand
gacagagggcgacuaugug

SEQ ID NO: 708389 - RNA, 19 nt, Homo sapiens
  misc_RNA (1)...(19): siRNA sense strand
gaggagaccggcagcaacu

SEQ ID NO: 708390 - RNA, 19 nt, Homo sapiens
  misc_RNA (1)...(19): siRNA sense strand
gaagauggagaaggagaag

SEQ ID NO: 708391 - RNA, 19 nt, Homo sapiens
  misc_RNA (1)...(19): siRNA sense strand
gaggaagaaaugagugaag

SEQ ID NO: 708392 - RNA, 19 nt, Homo sapiens
  misc_RNA (1)...(19): siRNA sense strand
gugaggaagaaaugaguga

SEQ ID NO: 708393 - RNA, 19 nt, Homo sapiens
  misc_RNA (1)...(19): siRNA sense strand
ucccagcagucaagaagau

SEQ ID NO: 708394 - RNA, 19 nt, Homo sapiens
  misc_RNA (1)...(19): siRNA sense strand
agaagcagaggaagaagug

SEQ ID NO: 708395 - RNA, 19 nt, Homo sapiens
  misc_RNA (1)...(19): siRNA sense strand
ugaagaugaagaacgagaa

SEQ ID NO: 708396 - RNA, 19 nt, Homo sapiens
  misc_RNA (1)...(19): siRNA sense strand
gcaccagugaagaaucaga

SEQ ID NO: 708397 - RNA, 19 nt, Homo sapiens
  misc_RNA (1)...(19): siRNA sense strand
aagaggaggaggaggaaga

SEQ ID NO: 708398 - RNA, 19 nt, Homo sapiens
  misc_RNA (1)...(19): siRNA sense strand
acaagguguucaaggaucu

SEQ ID NO: 708399 - RNA, 19 nt, Homo sapiens
  misc_RNA (1)...(19): siRNA sense strand
gaguacggauccccucuga

SEQ ID NO: 708400 - RNA, 19 nt, Homo sapiens
  misc_RNA (1)...(19): siRNA sense strand
ugaagauggagaaggagaa

SEQ ID NO: 708401 - RNA, 19 nt, Homo sapiens
  misc_RNA (1)...(19): siRNA sense strand
ccaacaucgucaccguuag

SEQ ID NO: 708402 - RNA, 19 nt, Homo sapiens
  misc_RNA (1)...(19): siRNA sense strand
gaagucagaaaucgaucag

SEQ ID NO: 708403 - RNA, 19 nt, Homo sapiens
  misc_RNA (1)...(19): siRNA sense strand
ggugaagacccugaugauc

SEQ ID NO: 708404 - RNA, 19 nt, Homo sapiens
  misc_RNA (1)...(19): siRNA sense strand
ugaaauuguggcucuaaag

SEQ ID NO: 708405 - RNA, 19 nt, Homo sapiens
  misc_RNA (1)...(19): siRNA sense strand
gggcuucgaccucaugaac

SEQ ID NO: 708406 - RNA, 19 nt, Homo sapiens
  misc_RNA (1)...(19): siRNA sense strand
ggagaccggcagcaacucu

SEQ ID NO: 708407 - RNA, 19 nt, Homo sapiens
  misc_RNA (1)...(19): siRNA sense strand
ggaggugaagacccugaug

SEQ ID NO: 708408 - RNA, 19 nt, Homo sapiens
  misc_RNA (1)...(19): siRNA sense strand
gaaacgacaucgagaagaa

SEQ ID NO: 708409 - RNA, 19 nt, Homo sapiens
  misc_RNA (1)...(19): siRNA sense strand
gcaaaugucucggaaagaa

SEQ ID NO: 708410 - RNA, 19 nt, Homo sapiens
  misc_RNA (1)...(19): siRNA sense strand
gaaaacagaugaaauugug

SEQ ID NO: 708411 - RNA, 19 nt, Homo sapiens
  misc_RNA (1)...(19): siRNA sense strand
gcauggagaucacaauaag

SEQ ID NO: 708412 - RNA, 19 nt, Homo sapiens
  misc_RNA (1)...(19): siRNA sense strand
gagcaccagugaagaauca

SEQ ID NO: 708413 - RNA, 19 nt, Homo sapiens
  misc_RNA (1)...(19): siRNA sense strand
ugaaacaccugcacgacaa

SEQ ID NO: 708414 - RNA, 19 nt, Homo sapiens
  misc_RNA (1)...(19): siRNA sense strand
gaaaaggacucuuggaaag

SEQ ID NO: 708415 - RNA, 19 nt, Homo sapiens
  misc_RNA (1)...(19): siRNA sense strand
uaaagcggcugaagaugga

SEQ ID NO: 708416 - RNA, 19 nt, Homo sapiens
  misc_RNA (1)...(19): siRNA sense strand
agaaaugagugaagaugaa

SEQ ID NO: 708417 - RNA, 19 nt, Homo sapiens
  misc_RNA (1)...(19): siRNA sense strand
gagugaagaugaagaacga

SEQ ID NO: 708418 - RNA, 19 nt, Homo sapiens
  misc_RNA (1)...(19): siRNA sense strand
gcagcaacauggacaagau

SEQ ID NO: 708419 - RNA, 19 nt, Homo sapiens
  misc_RNA (1)...(19): siRNA sense strand
gaagggagcaccagugaag

SEQ ID NO: 708420 - RNA, 19 nt, Homo sapiens
  misc_RNA (1)...(19): siRNA sense strand
ggaaggaacaagaggagaa

SEQ ID NO: 708421 - RNA, 19 nt, Homo sapiens
  misc_RNA (1)...(19): siRNA sense strand
ggaguggucuacagagcaa

SEQ ID NO: 708422 - RNA, 19 nt, Homo sapiens
  misc_RNA (1)...(19): siRNA sense strand
gaagaugaagaacgagaaa

SEQ ID NO: 708423 - RNA, 19 nt, Homo sapiens
  misc_RNA (1)...(19): siRNA sense strand
gcacgaacgucggaaacga

SEQ ID NO: 708424 - RNA, 19 nt, Homo sapiens
  misc_RNA (1)...(19): siRNA sense strand
gagaagacucuauggaaga

SEQ ID NO: 708425 - RNA, 19 nt, Homo sapiens
  misc_RNA (1)...(19): siRNA sense strand
cagcaaaugucucggaaag

SEQ ID NO: 708426 - RNA, 19 nt, Homo sapiens
  misc_RNA (1)...(19): siRNA sense strand
cagaaaagaugaaaagaga

SEQ ID NO: 708427 - RNA, 19 nt, Homo sapiens
  misc_RNA (1)...(19): siRNA sense strand
gaagaaaugagugaagaug

SEQ ID NO: 708428 - RNA, 19 nt, Homo sapiens
  misc_RNA (1)...(19): siRNA sense strand
agaaguaagugaggaagaa

SEQ ID NO: 708429 - RNA, 19 nt, Homo sapiens
  misc_RNA (1)...(19): siRNA sense strand
ggaagacagaggagaagaa

SEQ ID NO: 708430 - RNA, 19 nt, Homo sapiens
  misc_RNA (1)...(19): siRNA sense strand
gaaggaacaagaggagaaa

SEQ ID NO: 708431 - RNA, 19 nt, Homo sapiens
  misc_RNA (1)...(19): siRNA sense strand
ugacagagggcgacuaugu

SEQ ID NO: 708432 - RNA, 19 nt, Homo sapiens
  misc_RNA (1)...(19): siRNA sense strand
ggagaaagcagagauaaaa

SEQ ID NO: 708433 - RNA, 19 nt, Homo sapiens
  misc_RNA (1)...(19): siRNA sense strand
gagaagaacaggauaaagc

SEQ ID NO: 708434 - RNA, 19 nt, Homo sapiens
  misc_RNA (1)...(19): siRNA sense strand
gaggagaaagcagagauaa

SEQ ID NO: 708435 - RNA, 19 nt, Homo sapiens
  misc_RNA (1)...(19): siRNA sense strand
ugaagaagcagaggaagaa

SEQ ID NO: 708436 - RNA, 19 nt, Homo sapiens
  misc_RNA (1)...(19): siRNA sense strand
gagcauuccaggagagaaa

SEQ ID NO: 708437 - RNA, 19 nt, Homo sapiens
  misc_RNA (1)...(19): siRNA sense strand
aaggagggcuucccgauca

SEQ ID NO: 708438 - RNA, 19 nt, Homo sapiens
  misc_RNA (1)...(19): siRNA sense strand
gcuucgaccucaugaacaa

SEQ ID NO: 708439 - RNA, 19 nt, Homo sapiens
  misc_RNA (1)...(19): siRNA sense strand
gaaguaagugaggaagaaa

SEQ ID NO: 708440 - RNA, 19 nt, Homo sapiens
  misc_RNA (1)...(19): siRNA sense strand
caacaucgucaccguuaga

SEQ ID NO: 708441 - RNA, 19 nt, Homo sapiens
  misc_RNA (1)...(19): siRNA sense strand
ugagggagaucaacaccau

SEQ ID NO: 708442 - RNA, 19 nt, Homo sapiens
  misc_RNA (1)...(19): siRNA sense strand
aaaggacucuuggaaagug

SEQ ID NO: 708443 - RNA, 19 nt, Homo sapiens
  misc_RNA (1)...(19): siRNA sense strand
gcucuaaagcggcugaaga

SEQ ID NO: 708444 - RNA, 19 nt, Homo sapiens
  misc_RNA (1)...(19): siRNA sense strand
ggcugaagauggagaagga

SEQ ID NO: 708445 - RNA, 19 nt, Homo sapiens
  misc_RNA (1)...(19): siRNA sense strand
agacagaggagaagaagau

SEQ ID NO: 708446 - RNA, 19 nt, Homo sapiens
  misc_RNA (1)...(19): siRNA sense strand
gaucaacaccauccucaag

SEQ ID NO: 708447 - RNA, 19 nt, Homo sapiens
  misc_RNA (1)...(19): siRNA sense strand
gaugaaauuguggcucuaa

SEQ ID NO: 708448 - RNA, 19 nt, Homo sapiens
  misc_RNA (1)...(19): siRNA sense strand
gaaucaggcucagguucug

SEQ ID NO: 708449 - RNA, 19 nt, Homo sapiens
  misc_RNA (1)...(19): siRNA sense strand
gaggugaagacccugauga

SEQ ID NO: 708450 - RNA, 19 nt, Homo sapiens
  misc_RNA (1)...(19): siRNA sense strand
ggaggaggaggaagaggaa

SEQ ID NO: 708451 - RNA, 19 nt, Homo sapiens
  misc_RNA (1)...(19): siRNA sense strand
ggaaacgacaucgagaaga

SEQ ID NO: 708452 - RNA, 19 nt, Homo sapiens
  misc_RNA (1)...(19): siRNA sense strand
agucagaaaucgaucagau

SEQ ID NO: 708453 - RNA, 19 nt, Homo sapiens
  misc_RNA (1)...(19): siRNA sense strand
ucacgucgcugagggagau

SEQ ID NO: 708454 - RNA, 19 nt, Homo sapiens
  misc_RNA (1)...(19): siRNA sense strand
gaaauuguggcucuaaagc

SEQ ID NO: 708455 - RNA, 19 nt, Homo sapiens
  misc_RNA (1)...(19): siRNA sense strand
gucaguggguugcaucuuc

SEQ ID NO: 708456 - RNA, 19 nt, Homo sapiens
  misc_RNA (1)...(19): siRNA sense strand
ugaagacccugaugaucca

SEQ ID NO: 708457 - RNA, 19 nt, Homo sapiens
  misc_RNA (1)...(19): siRNA sense strand
gaagacagaggagaagaag

SEQ ID NO: 708458 - RNA, 19 nt, Homo sapiens
  misc_RNA (1)...(19): siRNA sense strand
gaagaacgagaaaaugaaa

SEQ ID NO: 708459 - RNA, 19 nt, Homo sapiens
  misc_RNA (1)...(19): siRNA sense strand
ggaagaaaugagugaagau

SEQ ID NO: 708460 - RNA, 19 nt, Homo sapiens
  misc_RNA (1)...(19): siRNA sense strand
agacagaagagaagggaaa

SEQ ID NO: 708461 - RNA, 19 nt, Homo sapiens
  misc_RNA (1)...(19): siRNA sense strand
gaaugggaaagacagaaga

SEQ ID NO: 708462 - RNA, 19 nt, Homo sapiens
  misc_RNA (1)...(19): siRNA sense strand
caaaugucucggaaagaaa

SEQ ID NO: 708463 - RNA, 19 nt, Homo sapiens
  misc_RNA (1)...(19): siRNA sense strand
gaggagaagaagaugauuc

SEQ ID NO: 708464 - RNA, 19 nt, Homo sapiens
  misc_RNA (1)...(19): siRNA sense strand
gcaacauggacaagaucua

SEQ ID NO: 708465 - RNA, 19 nt, Homo sapiens
  misc_RNA (1)...(19): siRNA sense strand
aggaagaaaugagugaaga

SEQ ID NO: 708466 - RNA, 19 nt, Homo sapiens
  misc_RNA (1)...(19): siRNA sense strand
auaaggaacuccccguaua

SEQ ID NO: 708467 - RNA, 19 nt, Homo sapiens
  misc_RNA (1)...(19): siRNA sense strand
gagugaagaagcagaggaa

SEQ ID NO: 708468 - RNA, 19 nt, Homo sapiens
  misc_RNA (1)...(19): siRNA sense strand
ggaagucagaaaucgauca

SEQ ID NO: 708469 - RNA, 19 nt, Homo sapiens
  misc_RNA (1)...(19): siRNA sense strand
cccaacaucgucaccguua

SEQ ID NO: 708470 - RNA, 19 nt, Homo sapiens
  misc_RNA (1)...(19): siRNA sense strand
gggaaagacagaagagaag

SEQ ID NO: 708471 - RNA, 19 nt, Homo sapiens
  misc_RNA (1)...(19): siRNA sense strand
caaaagacaagaaaacaga

SEQ ID NO: 708472 - RNA, 19 nt, Homo sapiens
  misc_RNA (1)...(19): siRNA sense strand
gaucgaggagggcaccuau

SEQ ID NO: 708473 - RNA, 19 nt, Homo sapiens
  misc_RNA (1)...(19): siRNA sense strand
gaaaugagugaagaugaag

SEQ ID NO: 708474 - RNA, 19 nt, Homo sapiens
  misc_RNA (1)...(19): siRNA sense strand
ggaagaggaggaggaggaa

SEQ ID NO: 708475 - RNA, 19 nt, Homo sapiens
  misc_RNA (1)...(19): siRNA sense strand
caugcuagagugaaagaaa

SEQ ID NO: 708476 - RNA, 19 nt, Homo sapiens
  misc_RNA (1)...(19): siRNA sense strand
gaagagaaaauggaagaaa

SEQ ID NO: 708477 - RNA, 19 nt, Homo sapiens
  misc_RNA (1)...(19): siRNA sense strand
ggaaugggaaagacagaag

SEQ ID NO: 708478 - RNA, 19 nt, Homo sapiens
  misc_RNA (1)...(19): siRNA sense strand
cgucaccguuagagagauu

SEQ ID NO: 708479 - RNA, 19 nt, Homo sapiens
  misc_RNA (1)...(19): siRNA sense strand
gugaagaagcagaggaaga

SEQ ID NO: 708480 - RNA, 19 nt, Homo sapiens
  misc_RNA (1)...(19): siRNA sense strand
cgaagaaguaagugaggaa

SEQ ID NO: 708481 - RNA, 19 nt, Homo sapiens
  misc_RNA (1)...(19): siRNA sense strand
caacauggacaagaucuac

SEQ ID NO: 708482 - RNA, 19 nt, Homo sapiens
  misc_RNA (1)...(19): siRNA sense strand
ggaacaagaggagaaagca

SEQ ID NO: 708483 - RNA, 19 nt, Homo sapiens
  misc_RNA (1)...(19): siRNA sense strand
gaaacgaaggaaggaacaa

SEQ ID NO: 708484 - RNA, 19 nt, Homo sapiens
  misc_RNA (1)...(19): siRNA sense strand
ggaagggagcaccagugaa

SEQ ID NO: 708485 - RNA, 19 nt, Homo sapiens
  misc_RNA (1)...(19): siRNA sense strand
cagaggagaagaagaugau

SEQ ID NO: 708486 - RNA, 19 nt, Homo sapiens
  misc_RNA (1)...(19): siRNA sense strand
guaagugaggaagaaauga

SEQ ID NO: 708487 - RNA, 19 nt, Homo sapiens
  misc_RNA (1)...(19): siRNA sense strand
gcagaaucaggcucagguu

SEQ ID NO: 708488 - RNA, 19 nt, Homo sapiens
  misc_RNA (1)...(19): siRNA sense strand
cagaagagaagggaaaugg

SEQ ID NO: 708489 - RNA, 19 nt, Homo sapiens
  misc_RNA (1)...(19): siRNA sense strand
aggacggccucaagcauga

SEQ ID NO: 708490 - RNA, 19 nt, Homo sapiens
  misc_RNA (1)...(19): siRNA sense strand
gcaccuauggaguggucua

SEQ ID NO: 708491 - RNA, 19 nt, Homo sapiens
  misc_RNA (1)...(19): siRNA sense strand
gacagagggcgacuaugug

SEQ ID NO: 708492 - RNA, 19 nt, Homo sapiens
  misc_RNA (1)...(19): siRNA sense strand
aagaaaugagugaagauga

SEQ ID NO: 708493 - RNA, 19 nt, Homo sapiens
  misc_RNA (1)...(19): siRNA sense strand
ggaaauggcaagggagcau

SEQ ID NO: 708494 - RNA, 19 nt, Homo sapiens
  misc_RNA (1)...(19): siRNA sense strand
agaggagaaagcagagaua

SEQ ID NO: 708495 - RNA, 19 nt, Homo sapiens
  misc_RNA (1)...(19): siRNA sense strand
gaagauggagaaggagaag

SEQ ID NO: 708496 - RNA, 19 nt, Homo sapiens
  misc_RNA (1)...(19): siRNA sense strand
gaggagaccggcagcaacu

SEQ ID NO: 708497 - RNA, 19 nt, Homo sapiens
  misc_RNA (1)...(19): siRNA sense strand
agaaagagagcacgaacgu

SEQ ID NO: 708498 - RNA, 19 nt, Homo sapiens
  misc_RNA (1)...(19): siRNA sense strand
gaggaagaaaugagugaag

SEQ ID NO: 708499 - RNA, 19 nt, Homo sapiens
  misc_RNA (1)...(19): siRNA sense strand
gcagagauaaaacgcuuaa

SEQ ID NO: 708500 - RNA, 19 nt, Homo sapiens
  misc_RNA (1)...(19): siRNA sense strand
ugggaaagacagaagagaa

SEQ ID NO: 708501 - RNA, 19 nt, Homo sapiens
  misc_RNA (1)...(19): siRNA sense strand
ucccagcagucaagaagau

SEQ ID NO: 708502 - RNA, 19 nt, Homo sapiens
  misc_RNA (1)...(19): siRNA sense strand
agaagcagaggaagaagug

SEQ ID NO: 708503 - RNA, 19 nt, Homo sapiens
  misc_RNA (1)...(19): siRNA sense strand
uauggaagacagaggagaa

SEQ ID NO: 708504 - RNA, 19 nt, Homo sapiens
  misc_RNA (1)...(19): siRNA sense strand
ugaagaugaagaacgagaa

SEQ ID NO: 708505 - RNA, 19 nt, Homo sapiens
  misc_RNA (1)...(19): siRNA sense strand
gugaggaagaaaugaguga

SEQ ID NO: 708506 - RNA, 19 nt, Homo sapiens
  misc_RNA (1)...(19): siRNA sense strand
gaacuccccguauagaaga

SEQ ID NO: 708507 - RNA, 19 nt, Homo sapiens
  misc_RNA (1)...(19): siRNA sense strand
ugaaaaggacucuuggaaa

SEQ ID NO: 708508 - RNA, 19 nt, Homo sapiens
  misc_RNA (1)...(19): siRNA sense strand
gaaacgacaucgagaagaa

SEQ ID NO: 708509 - RNA, 19 nt, Homo sapiens
  misc_RNA (1)...(19): siRNA sense strand
gcaaaugucucggaaagaa

SEQ ID NO: 708510 - RNA, 19 nt, Homo sapiens
  misc_RNA (1)...(19): siRNA sense strand
gaaaacagaugaaauugug

SEQ ID NO: 708511 - RNA, 19 nt, Homo sapiens
  misc_RNA (1)...(19): siRNA sense strand
gcauggagaucacaauaag

SEQ ID NO: 708512 - RNA, 19 nt, Homo sapiens
  misc_RNA (1)...(19): siRNA sense strand
gagcaccagugaagaauca

SEQ ID NO: 708513 - RNA, 19 nt, Homo sapiens
  misc_RNA (1)...(19): siRNA sense strand
ugaaacaccugcacgacaa

SEQ ID NO: 708514 - RNA, 19 nt, Homo sapiens
  misc_RNA (1)...(19): siRNA sense strand
gaaaaggacucuuggaaag

SEQ ID NO: 708515 - RNA, 19 nt, Homo sapiens
  misc_RNA (1)...(19): siRNA sense strand
uaaagcggcugaagaugga

SEQ ID NO: 708516 - RNA, 19 nt, Homo sapiens
  misc_RNA (1)...(19): siRNA sense strand
agaaaugagugaagaugaa

SEQ ID NO: 708517 - RNA, 19 nt, Homo sapiens
  misc_RNA (1)...(19): siRNA sense strand
gagugaagaugaagaacga

SEQ ID NO: 708518 - RNA, 19 nt, Homo sapiens
  misc_RNA (1)...(19): siRNA sense strand
gcagcaacauggacaagau

SEQ ID NO: 708519 - RNA, 19 nt, Homo sapiens
  misc_RNA (1)...(19): siRNA sense strand
gaagggagcaccagugaag

SEQ ID NO: 708520 - RNA, 19 nt, Homo sapiens
  misc_RNA (1)...(19): siRNA sense strand
ggaaggaacaagaggagaa

SEQ ID NO: 708521 - RNA, 19 nt, Homo sapiens
  misc_RNA (1)...(19): siRNA sense strand
ggaguggucuacagagcaa

SEQ ID NO: 708522 - RNA, 19 nt, Homo sapiens
  misc_RNA (1)...(19): siRNA sense strand
gaagaugaagaacgagaaa

SEQ ID NO: 708523 - RNA, 19 nt, Homo sapiens
  misc_RNA (1)...(19): siRNA sense strand
gcacgaacgucggaaacga

SEQ ID NO: 708524 - RNA, 19 nt, Homo sapiens
  misc_RNA (1)...(19): siRNA sense strand
gagaagacucuauggaaga

SEQ ID NO: 708525 - RNA, 19 nt, Homo sapiens
  misc_RNA (1)...(19): siRNA sense strand
cagcaaaugucucggaaag

SEQ ID NO: 708526 - RNA, 19 nt, Homo sapiens
  misc_RNA (1)...(19): siRNA sense strand
cagaaaagaugaaaagaga

SEQ ID NO: 708527 - RNA, 19 nt, Homo sapiens
  misc_RNA (1)...(19): siRNA sense strand
gaagaaaugagugaagaug

SEQ ID NO: 708528 - RNA, 19 nt, Homo sapiens
  misc_RNA (1)...(19): siRNA sense strand
agaaguaagugaggaagaa

SEQ ID NO: 708529 - RNA, 19 nt, Homo sapiens
  misc_RNA (1)...(19): siRNA sense strand
ggaagacagaggagaagaa

SEQ ID NO: 708530 - RNA, 19 nt, Homo sapiens
  misc_RNA (1)...(19): siRNA sense strand
gaaggaacaagaggagaaa

SEQ ID NO: 708531 - RNA, 19 nt, Homo sapiens
  misc_RNA (1)...(19): siRNA sense strand
ugacagagggcgacuaugu

SEQ ID NO: 708532 - RNA, 19 nt, Homo sapiens
  misc_RNA (1)...(19): siRNA sense strand
ggagaaagcagagauaaaa

SEQ ID NO: 708533 - RNA, 19 nt, Homo sapiens
  misc_RNA (1)...(19): siRNA sense strand
gagaagaacaggauaaagc

SEQ ID NO: 708534 - RNA, 19 nt, Homo sapiens
  misc_RNA (1)...(19): siRNA sense strand
gaggagaaagcagagauaa

SEQ ID NO: 708535 - RNA, 19 nt, Homo sapiens
  misc_RNA (1)...(19): siRNA sense strand
ugaagaagcagaggaagaa

SEQ ID NO: 708536 - RNA, 19 nt, Homo sapiens
  misc_RNA (1)...(19): siRNA sense strand
gagcauuccaggagagaaa

SEQ ID NO: 708537 - RNA, 19 nt, Homo sapiens
  misc_RNA (1)...(19): siRNA sense strand
aaggagggcuucccgauca

SEQ ID NO: 708538 - RNA, 19 nt, Homo sapiens
  misc_RNA (1)...(19): siRNA sense strand
gcuucgaccucaugaacaa

SEQ ID NO: 708539 - RNA, 19 nt, Homo sapiens
  misc_RNA (1)...(19): siRNA sense strand
gaaguaagugaggaagaaa

SEQ ID NO: 708540 - RNA, 19 nt, Homo sapiens
  misc_RNA (1)...(19): siRNA sense strand
caacaucgucaccguuaga

SEQ ID NO: 708541 - RNA, 19 nt, Homo sapiens
  misc_RNA (1)...(19): siRNA sense strand
ugagggagaucaacaccau

SEQ ID NO: 708542 - RNA, 19 nt, Homo sapiens
  misc_RNA (1)...(19): siRNA sense strand
aaaggacucuuggaaagug

SEQ ID NO: 708543 - RNA, 19 nt, Homo sapiens
  misc_RNA (1)...(19): siRNA sense strand
gcucuaaagcggcugaaga

SEQ ID NO: 708544 - RNA, 19 nt, Homo sapiens
  misc_RNA (1)...(19): siRNA sense strand
ggcugaagauggagaagga

SEQ ID NO: 708545 - RNA, 19 nt, Homo sapiens
  misc_RNA (1)...(19): siRNA sense strand
agacagaggagaagaagau

SEQ ID NO: 708546 - RNA, 19 nt, Homo sapiens
  misc_RNA (1)...(19): siRNA sense strand
gaucaacaccauccucaag

SEQ ID NO: 708547 - RNA, 19 nt, Homo sapiens
  misc_RNA (1)...(19): siRNA sense strand
gaugaaauuguggcucuaa

SEQ ID NO: 708548 - RNA, 19 nt, Homo sapiens
  misc_RNA (1)...(19): siRNA sense strand
gaaucaggcucagguucug

SEQ ID NO: 708549 - RNA, 19 nt, Homo sapiens
  misc_RNA (1)...(19): siRNA sense strand
gaggugaagacccugauga

SEQ ID NO: 708550 - RNA, 19 nt, Homo sapiens
  misc_RNA (1)...(19): siRNA sense strand
ggaggaggaggaagaggaa

SEQ ID NO: 708551 - RNA, 19 nt, Homo sapiens
  misc_RNA (1)...(19): siRNA sense strand
ggaaacgacaucgagaaga

SEQ ID NO: 708552 - RNA, 19 nt, Homo sapiens
  misc_RNA (1)...(19): siRNA sense strand
agucagaaaucgaucagau

SEQ ID NO: 708553 - RNA, 19 nt, Homo sapiens
  misc_RNA (1)...(19): siRNA sense strand
ucacgucgcugagggagau

SEQ ID NO: 708554 - RNA, 19 nt, Homo sapiens
  misc_RNA (1)...(19): siRNA sense strand
gaaauuguggcucuaaagc

SEQ ID NO: 708555 - RNA, 19 nt, Homo sapiens
  misc_RNA (1)...(19): siRNA sense strand
gucaguggguugcaucuuc

SEQ ID NO: 708556 - RNA, 19 nt, Homo sapiens
  misc_RNA (1)...(19): siRNA sense strand
ugaagacccugaugaucca

SEQ ID NO: 708557 - RNA, 19 nt, Homo sapiens
  misc_RNA (1)...(19): siRNA sense strand
gaagacagaggagaagaag

SEQ ID NO: 708558 - RNA, 19 nt, Homo sapiens
  misc_RNA (1)...(19): siRNA sense strand
gaagaacgagaaaaugaaa

SEQ ID NO: 708559 - RNA, 19 nt, Homo sapiens
  misc_RNA (1)...(19): siRNA sense strand
ggaagaaaugagugaagau

SEQ ID NO: 708560 - RNA, 19 nt, Homo sapiens
  misc_RNA (1)...(19): siRNA sense strand
agacagaagagaagggaaa

SEQ ID NO: 708561 - RNA, 19 nt, Homo sapiens
  misc_RNA (1)...(19): siRNA sense strand
gaaugggaaagacagaaga

SEQ ID NO: 708562 - RNA, 19 nt, Homo sapiens
  misc_RNA (1)...(19): siRNA sense strand
caaaugucucggaaagaaa

SEQ ID NO: 708563 - RNA, 19 nt, Homo sapiens
  misc_RNA (1)...(19): siRNA sense strand
gaggagaagaagaugauuc

SEQ ID NO: 708564 - RNA, 19 nt, Homo sapiens
  misc_RNA (1)...(19): siRNA sense strand
gcaacauggacaagaucua

SEQ ID NO: 708565 - RNA, 19 nt, Homo sapiens
  misc_RNA (1)...(19): siRNA sense strand
aggaagaaaugagugaaga

SEQ ID NO: 708566 - RNA, 19 nt, Homo sapiens
  misc_RNA (1)...(19): siRNA sense strand
auaaggaacuccccguaua

SEQ ID NO: 708567 - RNA, 19 nt, Homo sapiens
  misc_RNA (1)...(19): siRNA sense strand
gagugaagaagcagaggaa

SEQ ID NO: 708568 - RNA, 19 nt, Homo sapiens
  misc_RNA (1)...(19): siRNA sense strand
ggaagucagaaaucgauca

SEQ ID NO: 708569 - RNA, 19 nt, Homo sapiens
  misc_RNA (1)...(19): siRNA sense strand
cccaacaucgucaccguua

SEQ ID NO: 708570 - RNA, 19 nt, Homo sapiens
  misc_RNA (1)...(19): siRNA sense strand
gggaaagacagaagagaag

SEQ ID NO: 708571 - RNA, 19 nt, Homo sapiens
  misc_RNA (1)...(19): siRNA sense strand
caaaagacaagaaaacaga

SEQ ID NO: 708572 - RNA, 19 nt, Homo sapiens
  misc_RNA (1)...(19): siRNA sense strand
gaucgaggagggcaccuau

SEQ ID NO: 708573 - RNA, 19 nt, Homo sapiens
  misc_RNA (1)...(19): siRNA sense strand
gaaaugagugaagaugaag

SEQ ID NO: 708574 - RNA, 19 nt, Homo sapiens
  misc_RNA (1)...(19): siRNA sense strand
ggaagaggaggaggaggaa

SEQ ID NO: 708575 - RNA, 19 nt, Homo sapiens
  misc_RNA (1)...(19): siRNA sense strand
caugcuagagugaaagaaa

SEQ ID NO: 708576 - RNA, 19 nt, Homo sapiens
  misc_RNA (1)...(19): siRNA sense strand
gaagagaaaauggaagaaa

SEQ ID NO: 708577 - RNA, 19 nt, Homo sapiens
  misc_RNA (1)...(19): siRNA sense strand
ggaaugggaaagacagaag

SEQ ID NO: 708578 - RNA, 19 nt, Homo sapiens
  misc_RNA (1)...(19): siRNA sense strand
cgucaccguuagagagauu

SEQ ID NO: 708579 - RNA, 19 nt, Homo sapiens
  misc_RNA (1)...(19): siRNA sense strand
gugaagaagcagaggaaga

SEQ ID NO: 708580 - RNA, 19 nt, Homo sapiens
  misc_RNA (1)...(19): siRNA sense strand
cgaagaaguaagugaggaa

SEQ ID NO: 708581 - RNA, 19 nt, Homo sapiens
  misc_RNA (1)...(19): siRNA sense strand
caacauggacaagaucuac

SEQ ID NO: 708582 - RNA, 19 nt, Homo sapiens
  misc_RNA (1)...(19): siRNA sense strand
ggaacaagaggagaaagca

SEQ ID NO: 708583 - RNA, 19 nt, Homo sapiens
  misc_RNA (1)...(19): siRNA sense strand
gaaacgaaggaaggaacaa

SEQ ID NO: 708584 - RNA, 19 nt, Homo sapiens
  misc_RNA (1)...(19): siRNA sense strand
ggaagggagcaccagugaa

SEQ ID NO: 708585 - RNA, 19 nt, Homo sapiens
  misc_RNA (1)...(19): siRNA sense strand
cagaggagaagaagaugau

SEQ ID NO: 708586 - RNA, 19 nt, Homo sapiens
  misc_RNA (1)...(19): siRNA sense strand
guaagugaggaagaaauga

SEQ ID NO: 708587 - RNA, 19 nt, Homo sapiens
  misc_RNA (1)...(19): siRNA sense strand
gcagaaucaggcucagguu

SEQ ID NO: 708588 - RNA, 19 nt, Homo sapiens
  misc_RNA (1)...(19): siRNA sense strand
cagaagagaagggaaaugg

SEQ ID NO: 708589 - RNA, 19 nt, Homo sapiens
  misc_RNA (1)...(19): siRNA sense strand
aggacggccucaagcauga

SEQ ID NO: 708590 - RNA, 19 nt, Homo sapiens
  misc_RNA (1)...(19): siRNA sense strand
gcaccuauggaguggucua

SEQ ID NO: 708591 - RNA, 19 nt, Homo sapiens
  misc_RNA (1)...(19): siRNA sense strand
gacagagggcgacuaugug

SEQ ID NO: 708592 - RNA, 19 nt, Homo sapiens
  misc_RNA (1)...(19): siRNA sense strand
aagaaaugagugaagauga

SEQ ID NO: 708593 - RNA, 19 nt, Homo sapiens
  misc_RNA (1)...(19): siRNA sense strand
ggaaauggcaagggagcau

SEQ ID NO: 708594 - RNA, 19 nt, Homo sapiens
  misc_RNA (1)...(19): siRNA sense strand
agaggagaaagcagagaua

SEQ ID NO: 708595 - RNA, 19 nt, Homo sapiens
  misc_RNA (1)...(19): siRNA sense strand
gaagauggagaaggagaag

SEQ ID NO: 708596 - RNA, 19 nt, Homo sapiens
  misc_RNA (1)...(19): siRNA sense strand
gaggagaccggcagcaacu

SEQ ID NO: 708597 - RNA, 19 nt, Homo sapiens
  misc_RNA (1)...(19): siRNA sense strand
agaaagagagcacgaacgu

SEQ ID NO: 708598 - RNA, 19 nt, Homo sapiens
  misc_RNA (1)...(19): siRNA sense strand
gaggaagaaaugagugaag

SEQ ID NO: 708599 - RNA, 19 nt, Homo sapiens
  misc_RNA (1)...(19): siRNA sense strand
gcagagauaaaacgcuuaa

SEQ ID NO: 708600 - RNA, 19 nt, Homo sapiens
  misc_RNA (1)...(19): siRNA sense strand
ugggaaagacagaagagaa

SEQ ID NO: 708601 - RNA, 19 nt, Homo sapiens
  misc_RNA (1)...(19): siRNA sense strand
ucccagcagucaagaagau

SEQ ID NO: 708602 - RNA, 19 nt, Homo sapiens
  misc_RNA (1)...(19): siRNA sense strand
agaagcagaggaagaagug

SEQ ID NO: 708603 - RNA, 19 nt, Homo sapiens
  misc_RNA (1)...(19): siRNA sense strand
uauggaagacagaggagaa

SEQ ID NO: 708604 - RNA, 19 nt, Homo sapiens
  misc_RNA (1)...(19): siRNA sense strand
ugaagaugaagaacgagaa

SEQ ID NO: 708605 - RNA, 19 nt, Homo sapiens
  misc_RNA (1)...(19): siRNA sense strand
gugaggaagaaaugaguga

SEQ ID NO: 708606 - RNA, 19 nt, Homo sapiens
  misc_RNA (1)...(19): siRNA sense strand
gaacuccccguauagaaga

SEQ ID NO: 708607 - RNA, 19 nt, Homo sapiens
  misc_RNA (1)...(19): siRNA sense strand
ugaaaaggacucuuggaaa

SEQ ID NO: 708608 - RNA, 19 nt, Homo sapiens
  misc_RNA (1)...(19): siRNA sense strand
gaaacgacaucgagaagaa

SEQ ID NO: 708609 - RNA, 19 nt, Homo sapiens
  misc_RNA (1)...(19): siRNA sense strand
gcaaaugucucggaaagaa

SEQ ID NO: 708610 - RNA, 19 nt, Homo sapiens
  misc_RNA (1)...(19): siRNA sense strand
gaaaacagaugaaauugug

SEQ ID NO: 708611 - RNA, 19 nt, Homo sapiens
  misc_RNA (1)...(19): siRNA sense strand
gcauggagaucacaauaag

SEQ ID NO: 708612 - RNA, 19 nt, Homo sapiens
  misc_RNA (1)...(19): siRNA sense strand
gagcaccagugaagaauca

SEQ ID NO: 708613 - RNA, 19 nt, Homo sapiens
  misc_RNA (1)...(19): siRNA sense strand
ugaaacaccugcacgacaa

SEQ ID NO: 708614 - RNA, 19 nt, Homo sapiens
  misc_RNA (1)...(19): siRNA sense strand
gaaaaggacucuuggaaag

SEQ ID NO: 708615 - RNA, 19 nt, Homo sapiens
  misc_RNA (1)...(19): siRNA sense strand
uaaagcggcugaagaugga

SEQ ID NO: 708616 - RNA, 19 nt, Homo sapiens
  misc_RNA (1)...(19): siRNA sense strand
agaaaugagugaagaugaa

SEQ ID NO: 708617 - RNA, 19 nt, Homo sapiens
  misc_RNA (1)...(19): siRNA sense strand
gagugaagaugaagaacga

SEQ ID NO: 708618 - RNA, 19 nt, Homo sapiens
  misc_RNA (1)...(19): siRNA sense strand
gcagcaacauggacaagau

SEQ ID NO: 708619 - RNA, 19 nt, Homo sapiens
  misc_RNA (1)...(19): siRNA sense strand
gaagggagcaccagugaag

SEQ ID NO: 708620 - RNA, 19 nt, Homo sapiens
  misc_RNA (1)...(19): siRNA sense strand
ggaaggaacaagaggagaa

SEQ ID NO: 708621 - RNA, 19 nt, Homo sapiens
  misc_RNA (1)...(19): siRNA sense strand
ggaguggucuacagagcaa

SEQ ID NO: 708622 - RNA, 19 nt, Homo sapiens
  misc_RNA (1)...(19): siRNA sense strand
gaagaugaagaacgagaaa

SEQ ID NO: 708623 - RNA, 19 nt, Homo sapiens
  misc_RNA (1)...(19): siRNA sense strand
gcacgaacgucggaaacga

SEQ ID NO: 708624 - RNA, 19 nt, Homo sapiens
  misc_RNA (1)...(19): siRNA sense strand
gagaagacucuauggaaga

SEQ ID NO: 708625 - RNA, 19 nt, Homo sapiens
  misc_RNA (1)...(19): siRNA sense strand
cagcaaaugucucggaaag

SEQ ID NO: 708626 - RNA, 19 nt, Homo sapiens
  misc_RNA (1)...(19): siRNA sense strand
cagaaaagaugaaaagaga

SEQ ID NO: 708627 - RNA, 19 nt, Homo sapiens
  misc_RNA (1)...(19): siRNA sense strand
gaagaaaugagugaagaug

SEQ ID NO: 708628 - RNA, 19 nt, Homo sapiens
  misc_RNA (1)...(19): siRNA sense strand
agaaguaagugaggaagaa

SEQ ID NO: 708629 - RNA, 19 nt, Homo sapiens
  misc_RNA (1)...(19): siRNA sense strand
ggaagacagaggagaagaa

SEQ ID NO: 708630 - RNA, 19 nt, Homo sapiens
  misc_RNA (1)...(19): siRNA sense strand
gaaggaacaagaggagaaa

SEQ ID NO: 708631 - RNA, 19 nt, Homo sapiens
  misc_RNA (1)...(19): siRNA sense strand
ugacagagggcgacuaugu

SEQ ID NO: 708632 - RNA, 19 nt, Homo sapiens
  misc_RNA (1)...(19): siRNA sense strand
ggagaaagcagagauaaaa

SEQ ID NO: 708633 - RNA, 19 nt, Homo sapiens
  misc_RNA (1)...(19): siRNA sense strand
gagaagaacaggauaaagc

SEQ ID NO: 708634 - RNA, 19 nt, Homo sapiens
  misc_RNA (1)...(19): siRNA sense strand
gaggagaaagcagagauaa

SEQ ID NO: 708635 - RNA, 19 nt, Homo sapiens
  misc_RNA (1)...(19): siRNA sense strand
ugaagaagcagaggaagaa

SEQ ID NO: 708636 - RNA, 19 nt, Homo sapiens
  misc_RNA (1)...(19): siRNA sense strand
gagcauuccaggagagaaa

SEQ ID NO: 708637 - RNA, 19 nt, Homo sapiens
  misc_RNA (1)...(19): siRNA sense strand
aaggagggcuucccgauca

SEQ ID NO: 708638 - RNA, 19 nt, Homo sapiens
  misc_RNA (1)...(19): siRNA sense strand
gcuucgaccucaugaacaa

SEQ ID NO: 708639 - RNA, 19 nt, Homo sapiens
  misc_RNA (1)...(19): siRNA sense strand
gaaguaagugaggaagaaa

SEQ ID NO: 708640 - RNA, 19 nt, Homo sapiens
  misc_RNA (1)...(19): siRNA sense strand
caacaucgucaccguuaga

SEQ ID NO: 708641 - RNA, 19 nt, Homo sapiens
  misc_RNA (1)...(19): siRNA sense strand
ugagggagaucaacaccau

SEQ ID NO: 708642 - RNA, 19 nt, Homo sapiens
  misc_RNA (1)...(19): siRNA sense strand
aaaggacucuuggaaagug

SEQ ID NO: 708643 - RNA, 19 nt, Homo sapiens
  misc_RNA (1)...(19): siRNA sense strand
gcucuaaagcggcugaaga

SEQ ID NO: 708644 - RNA, 19 nt, Homo sapiens
  misc_RNA (1)...(19): siRNA sense strand
ggcugaagauggagaagga

SEQ ID NO: 708645 - RNA, 19 nt, Homo sapiens
  misc_RNA (1)...(19): siRNA sense strand
agacagaggagaagaagau

SEQ ID NO: 708646 - RNA, 19 nt, Homo sapiens
  misc_RNA (1)...(19): siRNA sense strand
gaucaacaccauccucaag

SEQ ID NO: 708647 - RNA, 19 nt, Homo sapiens
  misc_RNA (1)...(19): siRNA sense strand
gaugaaauuguggcucuaa

SEQ ID NO: 708648 - RNA, 19 nt, Homo sapiens
  misc_RNA (1)...(19): siRNA sense strand
gaaucaggcucagguucug

SEQ ID NO: 708649 - RNA, 19 nt, Homo sapiens
  misc_RNA (1)...(19): siRNA sense strand
gaggugaagacccugauga

SEQ ID NO: 708650 - RNA, 19 nt, Homo sapiens
  misc_RNA (1)...(19): siRNA sense strand
ggaggaggaggaagaggaa

SEQ ID NO: 708651 - RNA, 19 nt, Homo sapiens
  misc_RNA (1)...(19): siRNA sense strand
ggaaacgacaucgagaaga

SEQ ID NO: 708652 - RNA, 19 nt, Homo sapiens
  misc_RNA (1)...(19): siRNA sense strand
agucagaaaucgaucagau

SEQ ID NO: 708653 - RNA, 19 nt, Homo sapiens
  misc_RNA (1)...(19): siRNA sense strand
ucacgucgcugagggagau

SEQ ID NO: 708654 - RNA, 19 nt, Homo sapiens
  misc_RNA (1)...(19): siRNA sense strand
gaaauuguggcucuaaagc

SEQ ID NO: 708655 - RNA, 19 nt, Homo sapiens
  misc_RNA (1)...(19): siRNA sense strand
gucaguggguugcaucuuc

SEQ ID NO: 708656 - RNA, 19 nt, Homo sapiens
  misc_RNA (1)...(19): siRNA sense strand
ugaagacccugaugaucca

SEQ ID NO: 708657 - RNA, 19 nt, Homo sapiens
  misc_RNA (1)...(19): siRNA sense strand
gaagacagaggagaagaag

SEQ ID NO: 708658 - RNA, 19 nt, Homo sapiens
  misc_RNA (1)...(19): siRNA sense strand
gaagaacgagaaaaugaaa

SEQ ID NO: 708659 - RNA, 19 nt, Homo sapiens
  misc_RNA (1)...(19): siRNA sense strand
ggaagaaaugagugaagau

SEQ ID NO: 708660 - RNA, 19 nt, Homo sapiens
  misc_RNA (1)...(19): siRNA sense strand
agacagaagagaagggaaa

SEQ ID NO: 708661 - RNA, 19 nt, Homo sapiens
  misc_RNA (1)...(19): siRNA sense strand
gaaugggaaagacagaaga

SEQ ID NO: 708662 - RNA, 19 nt, Homo sapiens
  misc_RNA (1)...(19): siRNA sense strand
caaaugucucggaaagaaa

SEQ ID NO: 708663 - RNA, 19 nt, Homo sapiens
  misc_RNA (1)...(19): siRNA sense strand
gaggagaagaagaugauuc

SEQ ID NO: 708664 - RNA, 19 nt, Homo sapiens
  misc_RNA (1)...(19): siRNA sense strand
gcaacauggacaagaucua

SEQ ID NO: 708665 - RNA, 19 nt, Homo sapiens
  misc_RNA (1)...(19): siRNA sense strand
aggaagaaaugagugaaga

SEQ ID NO: 708666 - RNA, 19 nt, Homo sapiens
  misc_RNA (1)...(19): siRNA sense strand
auaaggaacuccccguaua

SEQ ID NO: 708667 - RNA, 19 nt, Homo sapiens
  misc_RNA (1)...(19): siRNA sense strand
gagugaagaagcagaggaa

SEQ ID NO: 708668 - RNA, 19 nt, Homo sapiens
  misc_RNA (1)...(19): siRNA sense strand
ggaagucagaaaucgauca

SEQ ID NO: 708669 - RNA, 19 nt, Homo sapiens
  misc_RNA (1)...(19): siRNA sense strand
cccaacaucgucaccguua

SEQ ID NO: 708670 - RNA, 19 nt, Homo sapiens
  misc_RNA (1)...(19): siRNA sense strand
gggaaagacagaagagaag

SEQ ID NO: 708671 - RNA, 19 nt, Homo sapiens
  misc_RNA (1)...(19): siRNA sense strand
caaaagacaagaaaacaga

SEQ ID NO: 708672 - RNA, 19 nt, Homo sapiens
  misc_RNA (1)...(19): siRNA sense strand
gaucgaggagggcaccuau

SEQ ID NO: 708673 - RNA, 19 nt, Homo sapiens
  misc_RNA (1)...(19): siRNA sense strand
gaaaugagugaagaugaag

SEQ ID NO: 708674 - RNA, 19 nt, Homo sapiens
  misc_RNA (1)...(19): siRNA sense strand
ggaagaggaggaggaggaa

SEQ ID NO: 708675 - RNA, 19 nt, Homo sapiens
  misc_RNA (1)...(19): siRNA sense strand
caugcuagagugaaagaaa

SEQ ID NO: 708676 - RNA, 19 nt, Homo sapiens
  misc_RNA (1)...(19): siRNA sense strand
gaagagaaaauggaagaaa

SEQ ID NO: 708677 - RNA, 19 nt, Homo sapiens
  misc_RNA (1)...(19): siRNA sense strand
ggaaugggaaagacagaag

SEQ ID NO: 708678 - RNA, 19 nt, Homo sapiens
  misc_RNA (1)...(19): siRNA sense strand
cgucaccguuagagagauu

SEQ ID NO: 708679 - RNA, 19 nt, Homo sapiens
  misc_RNA (1)...(19): siRNA sense strand
gugaagaagcagaggaaga

SEQ ID NO: 708680 - RNA, 19 nt, Homo sapiens
  misc_RNA (1)...(19): siRNA sense strand
cgaagaaguaagugaggaa

SEQ ID NO: 708681 - RNA, 19 nt, Homo sapiens
  misc_RNA (1)...(19): siRNA sense strand
caacauggacaagaucuac

SEQ ID NO: 708682 - RNA, 19 nt, Homo sapiens
  misc_RNA (1)...(19): siRNA sense strand
ggaacaagaggagaaagca

SEQ ID NO: 708683 - RNA, 19 nt, Homo sapiens
  misc_RNA (1)...(19): siRNA sense strand
gaaacgaaggaaggaacaa

SEQ ID NO: 708684 - RNA, 19 nt, Homo sapiens
  misc_RNA (1)...(19): siRNA sense strand
ggaagggagcaccagugaa

SEQ ID NO: 708685 - RNA, 19 nt, Homo sapiens
  misc_RNA (1)...(19): siRNA sense strand
cagaggagaagaagaugau

SEQ ID NO: 708686 - RNA, 19 nt, Homo sapiens
  misc_RNA (1)...(19): siRNA sense strand
guaagugaggaagaaauga

SEQ ID NO: 708687 - RNA, 19 nt, Homo sapiens
  misc_RNA (1)...(19): siRNA sense strand
gcagaaucaggcucagguu

SEQ ID NO: 708688 - RNA, 19 nt, Homo sapiens
  misc_RNA (1)...(19): siRNA sense strand
cagaagagaagggaaaugg

SEQ ID NO: 708689 - RNA, 19 nt, Homo sapiens
  misc_RNA (1)...(19): siRNA sense strand
aggacggccucaagcauga

SEQ ID NO: 708690 - RNA, 19 nt, Homo sapiens
  misc_RNA (1)...(19): siRNA sense strand
gcaccuauggaguggucua

SEQ ID NO: 708691 - RNA, 19 nt, Homo sapiens
  misc_RNA (1)...(19): siRNA sense strand
gacagagggcgacuaugug

SEQ ID NO: 708692 - RNA, 19 nt, Homo sapiens
  misc_RNA (1)...(19): siRNA sense strand
aagaaaugagugaagauga

SEQ ID NO: 708693 - RNA, 19 nt, Homo sapiens
  misc_RNA (1)...(19): siRNA sense strand
ggaaauggcaagggagcau

SEQ ID NO: 708694 - RNA, 19 nt, Homo sapiens
  misc_RNA (1)...(19): siRNA sense strand
agaggagaaagcagagaua

SEQ ID NO: 708695 - RNA, 19 nt, Homo sapiens
  misc_RNA (1)...(19): siRNA sense strand
gaagauggagaaggagaag

SEQ ID NO: 708696 - RNA, 19 nt, Homo sapiens
  misc_RNA (1)...(19): siRNA sense strand
gaggagaccggcagcaacu

SEQ ID NO: 708697 - RNA, 19 nt, Homo sapiens
  misc_RNA (1)...(19): siRNA sense strand
agaaagagagcacgaacgu

SEQ ID NO: 708698 - RNA, 19 nt, Homo sapiens
  misc_RNA (1)...(19): siRNA sense strand
gaggaagaaaugagugaag

SEQ ID NO: 708699 - RNA, 19 nt, Homo sapiens
  misc_RNA (1)...(19): siRNA sense strand
gcagagauaaaacgcuuaa

SEQ ID NO: 708700 - RNA, 19 nt, Homo sapiens
  misc_RNA (1)...(19): siRNA sense strand
ugggaaagacagaagagaa

SEQ ID NO: 708701 - RNA, 19 nt, Homo sapiens
  misc_RNA (1)...(19): siRNA sense strand
ucccagcagucaagaagau

SEQ ID NO: 708702 - RNA, 19 nt, Homo sapiens
  misc_RNA (1)...(19): siRNA sense strand
agaagcagaggaagaagug

SEQ ID NO: 708703 - RNA, 19 nt, Homo sapiens
  misc_RNA (1)...(19): siRNA sense strand
uauggaagacagaggagaa

SEQ ID NO: 708704 - RNA, 19 nt, Homo sapiens
  misc_RNA (1)...(19): siRNA sense strand
ugaagaugaagaacgagaa

SEQ ID NO: 708705 - RNA, 19 nt, Homo sapiens
  misc_RNA (1)...(19): siRNA sense strand
gugaggaagaaaugaguga

SEQ ID NO: 708706 - RNA, 19 nt, Homo sapiens
  misc_RNA (1)...(19): siRNA sense strand
gaacuccccguauagaaga

SEQ ID NO: 708707 - RNA, 19 nt, Homo sapiens
  misc_RNA (1)...(19): siRNA sense strand
ugaaaaggacucuuggaaa

SEQ ID NO: 708708 - RNA, 19 nt, Homo sapiens
  misc_RNA (1)...(19): siRNA sense strand
gaaacgacaucgagaagaa

SEQ ID NO: 708709 - RNA, 19 nt, Homo sapiens
  misc_RNA (1)...(19): siRNA sense strand
gcaaaugucucggaaagaa

SEQ ID NO: 708710 - RNA, 19 nt, Homo sapiens
  misc_RNA (1)...(19): siRNA sense strand
gaaaacagaugaaauugug

SEQ ID NO: 708711 - RNA, 19 nt, Homo sapiens
  misc_RNA (1)...(19): siRNA sense strand
gcauggagaucacaauaag

SEQ ID NO: 708712 - RNA, 19 nt, Homo sapiens
  misc_RNA (1)...(19): siRNA sense strand
gagcaccagugaagaauca

SEQ ID NO: 708713 - RNA, 19 nt, Homo sapiens
  misc_RNA (1)...(19): siRNA sense strand
ugaaacaccugcacgacaa

SEQ ID NO: 708714 - RNA, 19 nt, Homo sapiens
  misc_RNA (1)...(19): siRNA sense strand
gaaaaggacucuuggaaag

SEQ ID NO: 708715 - RNA, 19 nt, Homo sapiens
  misc_RNA (1)...(19): siRNA sense strand
uaaagcggcugaagaugga

SEQ ID NO: 708716 - RNA, 19 nt, Homo sapiens
  misc_RNA (1)...(19): siRNA sense strand
agaaaugagugaagaugaa

SEQ ID NO: 708717 - RNA, 19 nt, Homo sapiens
  misc_RNA (1)...(19): siRNA sense strand
gagugaagaugaagaacga

SEQ ID NO: 708718 - RNA, 19 nt, Homo sapiens
  misc_RNA (1)...(19): siRNA sense strand
gcagcaacauggacaagau

SEQ ID NO: 708719 - RNA, 19 nt, Homo sapiens
  misc_RNA (1)...(19): siRNA sense strand
gaagggagcaccagugaag

SEQ ID NO: 708720 - RNA, 19 nt, Homo sapiens
  misc_RNA (1)...(19): siRNA sense strand
ggaaggaacaagaggagaa

SEQ ID NO: 708721 - RNA, 19 nt, Homo sapiens
  misc_RNA (1)...(19): siRNA sense strand
ggaguggucuacagagcaa

SEQ ID NO: 708722 - RNA, 19 nt, Homo sapiens
  misc_RNA (1)...(19): siRNA sense strand
gaagaugaagaacgagaaa

SEQ ID NO: 708723 - RNA, 19 nt, Homo sapiens
  misc_RNA (1)...(19): siRNA sense strand
gcacgaacgucggaaacga

SEQ ID NO: 708724 - RNA, 19 nt, Homo sapiens
  misc_RNA (1)...(19): siRNA sense strand
gagaagacucuauggaaga

SEQ ID NO: 708725 - RNA, 19 nt, Homo sapiens
  misc_RNA (1)...(19): siRNA sense strand
cagcaaaugucucggaaag

SEQ ID NO: 708726 - RNA, 19 nt, Homo sapiens
  misc_RNA (1)...(19): siRNA sense strand
cagaaaagaugaaaagaga

SEQ ID NO: 708727 - RNA, 19 nt, Homo sapiens
  misc_RNA (1)...(19): siRNA sense strand
gaagaaaugagugaagaug

SEQ ID NO: 708728 - RNA, 19 nt, Homo sapiens
  misc_RNA (1)...(19): siRNA sense strand
agaaguaagugaggaagaa

SEQ ID NO: 708729 - RNA, 19 nt, Homo sapiens
  misc_RNA (1)...(19): siRNA sense strand
ggaagacagaggagaagaa

SEQ ID NO: 708730 - RNA, 19 nt, Homo sapiens
  misc_RNA (1)...(19): siRNA sense strand
gaaggaacaagaggagaaa

SEQ ID NO: 708731 - RNA, 19 nt, Homo sapiens
  misc_RNA (1)...(19): siRNA sense strand
ugacagagggcgacuaugu

SEQ ID NO: 708732 - RNA, 19 nt, Homo sapiens
  misc_RNA (1)...(19): siRNA sense strand
ggagaaagcagagauaaaa

SEQ ID NO: 708733 - RNA, 19 nt, Homo sapiens
  misc_RNA (1)...(19): siRNA sense strand
gagaagaacaggauaaagc

SEQ ID NO: 708734 - RNA, 19 nt, Homo sapiens
  misc_RNA (1)...(19): siRNA sense strand
gaggagaaagcagagauaa

SEQ ID NO: 708735 - RNA, 19 nt, Homo sapiens
  misc_RNA (1)...(19): siRNA sense strand
ugaagaagcagaggaagaa

SEQ ID NO: 708736 - RNA, 19 nt, Homo sapiens
  misc_RNA (1)...(19): siRNA sense strand
gagcauuccaggagagaaa

SEQ ID NO: 708737 - RNA, 19 nt, Homo sapiens
  misc_RNA (1)...(19): siRNA sense strand
aaggagggcuucccgauca

SEQ ID NO: 708738 - RNA, 19 nt, Homo sapiens
  misc_RNA (1)...(19): siRNA sense strand
gcuucgaccucaugaacaa

SEQ ID NO: 708739 - RNA, 19 nt, Homo sapiens
  misc_RNA (1)...(19): siRNA sense strand
gaaguaagugaggaagaaa

SEQ ID NO: 708740 - RNA, 19 nt, Homo sapiens
  misc_RNA (1)...(19): siRNA sense strand
caacaucgucaccguuaga

SEQ ID NO: 708741 - RNA, 19 nt, Homo sapiens
  misc_RNA (1)...(19): siRNA sense strand
ugagggagaucaacaccau

SEQ ID NO: 708742 - RNA, 19 nt, Homo sapiens
  misc_RNA (1)...(19): siRNA sense strand
aaaggacucuuggaaagug

SEQ ID NO: 708743 - RNA, 19 nt, Homo sapiens
  misc_RNA (1)...(19): siRNA sense strand
gcucuaaagcggcugaaga

SEQ ID NO: 708744 - RNA, 19 nt, Homo sapiens
  misc_RNA (1)...(19): siRNA sense strand
ggcugaagauggagaagga

SEQ ID NO: 708745 - RNA, 19 nt, Homo sapiens
  misc_RNA (1)...(19): siRNA sense strand
agacagaggagaagaagau

SEQ ID NO: 708746 - RNA, 19 nt, Homo sapiens
  misc_RNA (1)...(19): siRNA sense strand
gaucaacaccauccucaag

SEQ ID NO: 708747 - RNA, 19 nt, Homo sapiens
  misc_RNA (1)...(19): siRNA sense strand
gaugaaauuguggcucuaa

SEQ ID NO: 708748 - RNA, 19 nt, Homo sapiens
  misc_RNA (1)...(19): siRNA sense strand
gaaucaggcucagguucug

SEQ ID NO: 708749 - RNA, 19 nt, Homo sapiens
  misc_RNA (1)...(19): siRNA sense strand
gaggugaagacccugauga

SEQ ID NO: 708750 - RNA, 19 nt, Homo sapiens
  misc_RNA (1)...(19): siRNA sense strand
ggaggaggaggaagaggaa

SEQ ID NO: 708751 - RNA, 19 nt, Homo sapiens
  misc_RNA (1)...(19): siRNA sense strand
ggaaacgacaucgagaaga

SEQ ID NO: 708752 - RNA, 19 nt, Homo sapiens
  misc_RNA (1)...(19): siRNA sense strand
agucagaaaucgaucagau

SEQ ID NO: 708753 - RNA, 19 nt, Homo sapiens
  misc_RNA (1)...(19): siRNA sense strand
ucacgucgcugagggagau

SEQ ID NO: 708754 - RNA, 19 nt, Homo sapiens
  misc_RNA (1)...(19): siRNA sense strand
gaaauuguggcucuaaagc

SEQ ID NO: 708755 - RNA, 19 nt, Homo sapiens
  misc_RNA (1)...(19): siRNA sense strand
gucaguggguugcaucuuc

SEQ ID NO: 708756 - RNA, 19 nt, Homo sapiens
  misc_RNA (1)...(19): siRNA sense strand
ugaagacccugaugaucca

SEQ ID NO: 708757 - RNA, 19 nt, Homo sapiens
  misc_RNA (1)...(19): siRNA sense strand
gaagacagaggagaagaag

SEQ ID NO: 708758 - RNA, 19 nt, Homo sapiens
  misc_RNA (1)...(19): siRNA sense strand
gaagaacgagaaaaugaaa

SEQ ID NO: 708759 - RNA, 19 nt, Homo sapiens
  misc_RNA (1)...(19): siRNA sense strand
ggaagaaaugagugaagau

SEQ ID NO: 708760 - RNA, 19 nt, Homo sapiens
  misc_RNA (1)...(19): siRNA sense strand
agacagaagagaagggaaa

SEQ ID NO: 708761 - RNA, 19 nt, Homo sapiens
  misc_RNA (1)...(19): siRNA sense strand
gaaugggaaagacagaaga

SEQ ID NO: 708762 - RNA, 19 nt, Homo sapiens
  misc_RNA (1)...(19): siRNA sense strand
caaaugucucggaaagaaa

SEQ ID NO: 708763 - RNA, 19 nt, Homo sapiens
  misc_RNA (1)...(19): siRNA sense strand
gaggagaagaagaugauuc

SEQ ID NO: 708764 - RNA, 19 nt, Homo sapiens
  misc_RNA (1)...(19): siRNA sense strand
gcaacauggacaagaucua

SEQ ID NO: 708765 - RNA, 19 nt, Homo sapiens
  misc_RNA (1)...(19): siRNA sense strand
aggaagaaaugagugaaga

SEQ ID NO: 708766 - RNA, 19 nt, Homo sapiens
  misc_RNA (1)...(19): siRNA sense strand
auaaggaacuccccguaua

SEQ ID NO: 708767 - RNA, 19 nt, Homo sapiens
  misc_RNA (1)...(19): siRNA sense strand
gagugaagaagcagaggaa

SEQ ID NO: 708768 - RNA, 19 nt, Homo sapiens
  misc_RNA (1)...(19): siRNA sense strand
ggaagucagaaaucgauca

SEQ ID NO: 708769 - RNA, 19 nt, Homo sapiens
  misc_RNA (1)...(19): siRNA sense strand
cccaacaucgucaccguua

SEQ ID NO: 708770 - RNA, 19 nt, Homo sapiens
  misc_RNA (1)...(19): siRNA sense strand
gggaaagacagaagagaag

SEQ ID NO: 708771 - RNA, 19 nt, Homo sapiens
  misc_RNA (1)...(19): siRNA sense strand
caaaagacaagaaaacaga

SEQ ID NO: 708772 - RNA, 19 nt, Homo sapiens
  misc_RNA (1)...(19): siRNA sense strand
gaucgaggagggcaccuau

SEQ ID NO: 708773 - RNA, 19 nt, Homo sapiens
  misc_RNA (1)...(19): siRNA sense strand
gaaaugagugaagaugaag

SEQ ID NO: 708774 - RNA, 19 nt, Homo sapiens
  misc_RNA (1)...(19): siRNA sense strand
ggaagaggaggaggaggaa

SEQ ID NO: 708775 - RNA, 19 nt, Homo sapiens
  misc_RNA (1)...(19): siRNA sense strand
caugcuagagugaaagaaa

SEQ ID NO: 708776 - RNA, 19 nt, Homo sapiens
  misc_RNA (1)...(19): siRNA sense strand
gaagagaaaauggaagaaa

SEQ ID NO: 708777 - RNA, 19 nt, Homo sapiens
  misc_RNA (1)...(19): siRNA sense strand
ggaaugggaaagacagaag

SEQ ID NO: 708778 - RNA, 19 nt, Homo sapiens
  misc_RNA (1)...(19): siRNA sense strand
cgucaccguuagagagauu

SEQ ID NO: 708779 - RNA, 19 nt, Homo sapiens
  misc_RNA (1)...(19): siRNA sense strand
gugaagaagcagaggaaga

SEQ ID NO: 708780 - RNA, 19 nt, Homo sapiens
  misc_RNA (1)...(19): siRNA sense strand
cgaagaaguaagugaggaa

SEQ ID NO: 708781 - RNA, 19 nt, Homo sapiens
  misc_RNA (1)...(19): siRNA sense strand
caacauggacaagaucuac

SEQ ID NO: 708782 - RNA, 19 nt, Homo sapiens
  misc_RNA (1)...(19): siRNA sense strand
ggaacaagaggagaaagca

SEQ ID NO: 708783 - RNA, 19 nt, Homo sapiens
  misc_RNA (1)...(19): siRNA sense strand
gaaacgaaggaaggaacaa

SEQ ID NO: 708784 - RNA, 19 nt, Homo sapiens
  misc_RNA (1)...(19): siRNA sense strand
ggaagggagcaccagugaa

SEQ ID NO: 708785 - RNA, 19 nt, Homo sapiens
  misc_RNA (1)...(19): siRNA sense strand
cagaggagaagaagaugau

SEQ ID NO: 708786 - RNA, 19 nt, Homo sapiens
  misc_RNA (1)...(19): siRNA sense strand
guaagugaggaagaaauga

SEQ ID NO: 708787 - RNA, 19 nt, Homo sapiens
  misc_RNA (1)...(19): siRNA sense strand
gcagaaucaggcucagguu

SEQ ID NO: 708788 - RNA, 19 nt, Homo sapiens
  misc_RNA (1)...(19): siRNA sense strand
cagaagagaagggaaaugg

SEQ ID NO: 708789 - RNA, 19 nt, Homo sapiens
  misc_RNA (1)...(19): siRNA sense strand
aggacggccucaagcauga

SEQ ID NO: 708790 - RNA, 19 nt, Homo sapiens
  misc_RNA (1)...(19): siRNA sense strand
gcaccuauggaguggucua

SEQ ID NO: 708791 - RNA, 19 nt, Homo sapiens
  misc_RNA (1)...(19): siRNA sense strand
gacagagggcgacuaugug

SEQ ID NO: 708792 - RNA, 19 nt, Homo sapiens
  misc_RNA (1)...(19): siRNA sense strand
aagaaaugagugaagauga

SEQ ID NO: 708793 - RNA, 19 nt, Homo sapiens
  misc_RNA (1)...(19): siRNA sense strand
ggaaauggcaagggagcau

SEQ ID NO: 708794 - RNA, 19 nt, Homo sapiens
  misc_RNA (1)...(19): siRNA sense strand
agaggagaaagcagagaua

SEQ ID NO: 708795 - RNA, 19 nt, Homo sapiens
  misc_RNA (1)...(19): siRNA sense strand
gaagauggagaaggagaag

SEQ ID NO: 708796 - RNA, 19 nt, Homo sapiens
  misc_RNA (1)...(19): siRNA sense strand
gaggagaccggcagcaacu

SEQ ID NO: 708797 - RNA, 19 nt, Homo sapiens
  misc_RNA (1)...(19): siRNA sense strand
agaaagagagcacgaacgu

SEQ ID NO: 708798 - RNA, 19 nt, Homo sapiens
  misc_RNA (1)...(19): siRNA sense strand
gaggaagaaaugagugaag

SEQ ID NO: 708799 - RNA, 19 nt, Homo sapiens
  misc_RNA (1)...(19): siRNA sense strand
gcagagauaaaacgcuuaa

SEQ ID NO: 708800 - RNA, 19 nt, Homo sapiens
  misc_RNA (1)...(19): siRNA sense strand
ugggaaagacagaagagaa

SEQ ID NO: 708801 - RNA, 19 nt, Homo sapiens
  misc_RNA (1)...(19): siRNA sense strand
ucccagcagucaagaagau

SEQ ID NO: 708802 - RNA, 19 nt, Homo sapiens
  misc_RNA (1)...(19): siRNA sense strand
agaagcagaggaagaagug

SEQ ID NO: 708803 - RNA, 19 nt, Homo sapiens
  misc_RNA (1)...(19): siRNA sense strand
uauggaagacagaggagaa

SEQ ID NO: 708804 - RNA, 19 nt, Homo sapiens
  misc_RNA (1)...(19): siRNA sense strand
ugaagaugaagaacgagaa

SEQ ID NO: 708805 - RNA, 19 nt, Homo sapiens
  misc_RNA (1)...(19): siRNA sense strand
gugaggaagaaaugaguga

SEQ ID NO: 708806 - RNA, 19 nt, Homo sapiens
  misc_RNA (1)...(19): siRNA sense strand
gaacuccccguauagaaga

SEQ ID NO: 708807 - RNA, 19 nt, Homo sapiens
  misc_RNA (1)...(19): siRNA sense strand
ugaaaaggacucuuggaaa

SEQ ID NO: 708808 - RNA, 19 nt, Homo sapiens
  misc_RNA (1)...(19): siRNA sense strand
gaaaacagaugaaauugug

SEQ ID NO: 708809 - RNA, 19 nt, Homo sapiens
  misc_RNA (1)...(19): siRNA sense strand
gagcaccagugaagaauca

SEQ ID NO: 708810 - RNA, 19 nt, Homo sapiens
  misc_RNA (1)...(19): siRNA sense strand
ugaaacaccugcacgacaa

SEQ ID NO: 708811 - RNA, 19 nt, Homo sapiens
  misc_RNA (1)...(19): siRNA sense strand
uaaagcggcugaagaugga

SEQ ID NO: 708812 - RNA, 19 nt, Homo sapiens
  misc_RNA (1)...(19): siRNA sense strand
agaaaugagugaagaugaa

SEQ ID NO: 708813 - RNA, 19 nt, Homo sapiens
  misc_RNA (1)...(19): siRNA sense strand
gagugaagaugaagaacga

SEQ ID NO: 708814 - RNA, 19 nt, Homo sapiens
  misc_RNA (1)...(19): siRNA sense strand
gcagcaacauggacaagau

SEQ ID NO: 708815 - RNA, 19 nt, Homo sapiens
  misc_RNA (1)...(19): siRNA sense strand
gaagggagcaccagugaag

SEQ ID NO: 708816 - RNA, 19 nt, Homo sapiens
  misc_RNA (1)...(19): siRNA sense strand
gaagaugaagaacgagaaa

SEQ ID NO: 708817 - RNA, 19 nt, Homo sapiens
  misc_RNA (1)...(19): siRNA sense strand
ggaguggucuacagagcaa

SEQ ID NO: 708818 - RNA, 19 nt, Homo sapiens
  misc_RNA (1)...(19): siRNA sense strand
gaagaaaugagugaagaug

SEQ ID NO: 708819 - RNA, 19 nt, Homo sapiens
  misc_RNA (1)...(19): siRNA sense strand
agaaguaagugaggaagaa

SEQ ID NO: 708820 - RNA, 19 nt, Homo sapiens
  misc_RNA (1)...(19): siRNA sense strand
ugacagagggcgacuaugu

SEQ ID NO: 708821 - RNA, 19 nt, Homo sapiens
  misc_RNA (1)...(19): siRNA sense strand
ugaagaagcagaggaagaa

SEQ ID NO: 708822 - RNA, 19 nt, Homo sapiens
  misc_RNA (1)...(19): siRNA sense strand
aaggagggcuucccgauca

SEQ ID NO: 708823 - RNA, 19 nt, Homo sapiens
  misc_RNA (1)...(19): siRNA sense strand
gcuucgaccucaugaacaa

SEQ ID NO: 708824 - RNA, 19 nt, Homo sapiens
  misc_RNA (1)...(19): siRNA sense strand
gaaguaagugaggaagaaa

SEQ ID NO: 708825 - RNA, 19 nt, Homo sapiens
  misc_RNA (1)...(19): siRNA sense strand
caacaucgucaccguuaga

SEQ ID NO: 708826 - RNA, 19 nt, Homo sapiens
  misc_RNA (1)...(19): siRNA sense strand
ugagggagaucaacaccau

SEQ ID NO: 708827 - RNA, 19 nt, Homo sapiens
  misc_RNA (1)...(19): siRNA sense strand
gcucuaaagcggcugaaga

SEQ ID NO: 708828 - RNA, 19 nt, Homo sapiens
  misc_RNA (1)...(19): siRNA sense strand
ggcugaagauggagaagga

SEQ ID NO: 708829 - RNA, 19 nt, Homo sapiens
  misc_RNA (1)...(19): siRNA sense strand
gaugaaauuguggcucuaa

SEQ ID NO: 708830 - RNA, 19 nt, Homo sapiens
  misc_RNA (1)...(19): siRNA sense strand
gaucaacaccauccucaag

SEQ ID NO: 708831 - RNA, 19 nt, Homo sapiens
  misc_RNA (1)...(19): siRNA sense strand
ggaggaggaggaagaggaa

SEQ ID NO: 708832 - RNA, 19 nt, Homo sapiens
  misc_RNA (1)...(19): siRNA sense strand
gaggugaagacccugauga

SEQ ID NO: 708833 - RNA, 19 nt, Homo sapiens
  misc_RNA (1)...(19): siRNA sense strand
gaaucaggcucagguucug

SEQ ID NO: 708834 - RNA, 19 nt, Homo sapiens
  misc_RNA (1)...(19): siRNA sense strand
ucacgucgcugagggagau

SEQ ID NO: 708835 - RNA, 19 nt, Homo sapiens
  misc_RNA (1)...(19): siRNA sense strand
agucagaaaucgaucagau

SEQ ID NO: 708836 - RNA, 19 nt, Homo sapiens
  misc_RNA (1)...(19): siRNA sense strand
gaaauuguggcucuaaagc

SEQ ID NO: 708837 - RNA, 19 nt, Homo sapiens
  misc_RNA (1)...(19): siRNA sense strand
gucaguggguugcaucuuc

SEQ ID NO: 708838 - RNA, 19 nt, Homo sapiens
  misc_RNA (1)...(19): siRNA sense strand
ugaagacccugaugaucca

SEQ ID NO: 708839 - RNA, 19 nt, Homo sapiens
  misc_RNA (1)...(19): siRNA sense strand
ggaagaaaugagugaagau

SEQ ID NO: 708840 - RNA, 19 nt, Homo sapiens
  misc_RNA (1)...(19): siRNA sense strand
gaagaacgagaaaaugaaa

SEQ ID NO: 708841 - RNA, 19 nt, Homo sapiens
  misc_RNA (1)...(19): siRNA sense strand
aggaagaaaugagugaaga

SEQ ID NO: 708842 - RNA, 19 nt, Homo sapiens
  misc_RNA (1)...(19): siRNA sense strand
gcaacauggacaagaucua

SEQ ID NO: 708843 - RNA, 19 nt, Homo sapiens
  misc_RNA (1)...(19): siRNA sense strand
gagugaagaagcagaggaa

SEQ ID NO: 708844 - RNA, 19 nt, Homo sapiens
  misc_RNA (1)...(19): siRNA sense strand
ggaagucagaaaucgauca

SEQ ID NO: 708845 - RNA, 19 nt, Homo sapiens
  misc_RNA (1)...(19): siRNA sense strand
cccaacaucgucaccguua

SEQ ID NO: 708846 - RNA, 19 nt, Homo sapiens
  misc_RNA (1)...(19): siRNA sense strand
gaaaugagugaagaugaag

SEQ ID NO: 708847 - RNA, 19 nt, Homo sapiens
  misc_RNA (1)...(19): siRNA sense strand
ggaagaggaggaggaggaa

SEQ ID NO: 708848 - RNA, 19 nt, Homo sapiens
  misc_RNA (1)...(19): siRNA sense strand
caaaagacaagaaaacaga

SEQ ID NO: 708849 - RNA, 19 nt, Homo sapiens
  misc_RNA (1)...(19): siRNA sense strand
gaucgaggagggcaccuau

SEQ ID NO: 708850 - RNA, 19 nt, Homo sapiens
  misc_RNA (1)...(19): siRNA sense strand
cgaagaaguaagugaggaa

SEQ ID NO: 708851 - RNA, 19 nt, Homo sapiens
  misc_RNA (1)...(19): siRNA sense strand
cgucaccguuagagagauu

SEQ ID NO: 708852 - RNA, 19 nt, Homo sapiens
  misc_RNA (1)...(19): siRNA sense strand
gugaagaagcagaggaaga

SEQ ID NO: 708853 - RNA, 19 nt, Homo sapiens
  misc_RNA (1)...(19): siRNA sense strand
caacauggacaagaucuac

SEQ ID NO: 708854 - RNA, 19 nt, Homo sapiens
  misc_RNA (1)...(19): siRNA sense strand
ggaagggagcaccagugaa

SEQ ID NO: 708855 - RNA, 19 nt, Homo sapiens
  misc_RNA (1)...(19): siRNA sense strand
gcagaaucaggcucagguu

SEQ ID NO: 708856 - RNA, 19 nt, Homo sapiens
  misc_RNA (1)...(19): siRNA sense strand
guaagugaggaagaaauga

SEQ ID NO: 708857 - RNA, 19 nt, Homo sapiens
  misc_RNA (1)...(19): siRNA sense strand
aagaaaugagugaagauga

SEQ ID NO: 708858 - RNA, 19 nt, Homo sapiens
  misc_RNA (1)...(19): siRNA sense strand
aggacggccucaagcauga

SEQ ID NO: 708859 - RNA, 19 nt, Homo sapiens
  misc_RNA (1)...(19): siRNA sense strand
gcaccuauggaguggucua

SEQ ID NO: 708860 - RNA, 19 nt, Homo sapiens
  misc_RNA (1)...(19): siRNA sense strand
gacagagggcgacuaugug

SEQ ID NO: 708861 - RNA, 19 nt, Homo sapiens
  misc_RNA (1)...(19): siRNA sense strand
gaggagaccggcagcaacu

SEQ ID NO: 708862 - RNA, 19 nt, Homo sapiens
  misc_RNA (1)...(19): siRNA sense strand
gaagauggagaaggagaag

SEQ ID NO: 708863 - RNA, 19 nt, Homo sapiens
  misc_RNA (1)...(19): siRNA sense strand
gaggaagaaaugagugaag

SEQ ID NO: 708864 - RNA, 19 nt, Homo sapiens
  misc_RNA (1)...(19): siRNA sense strand
ugaagaugaagaacgagaa

SEQ ID NO: 708865 - RNA, 19 nt, Homo sapiens
  misc_RNA (1)...(19): siRNA sense strand
ucccagcagucaagaagau

SEQ ID NO: 708866 - RNA, 19 nt, Homo sapiens
  misc_RNA (1)...(19): siRNA sense strand
agaagcagaggaagaagug

SEQ ID NO: 708867 - RNA, 19 nt, Homo sapiens
  misc_RNA (1)...(19): siRNA sense strand
gugaggaagaaaugaguga

SEQ ID NO: 708868 - RNA, 19 nt, Homo sapiens
  misc_RNA (1)...(19): siRNA sense strand
gcaccagugaagaaucaga

SEQ ID NO: 708869 - RNA, 19 nt, Homo sapiens
  misc_RNA (1)...(19): siRNA sense strand
ugaagauggagaaggagaa

SEQ ID NO: 708870 - RNA, 19 nt, Homo sapiens
  misc_RNA (1)...(19): siRNA sense strand
aagaggaggaggaggaaga

SEQ ID NO: 708871 - RNA, 19 nt, Homo sapiens
  misc_RNA (1)...(19): siRNA sense strand
acaagguguucaaggaucu

SEQ ID NO: 708872 - RNA, 19 nt, Homo sapiens
  misc_RNA (1)...(19): siRNA sense strand
gaguacggauccccucuga

SEQ ID NO: 708873 - RNA, 19 nt, Homo sapiens
  misc_RNA (1)...(19): siRNA sense strand
ccaacaucgucaccguuag

SEQ ID NO: 708874 - RNA, 19 nt, Homo sapiens
  misc_RNA (1)...(19): siRNA sense strand
gaagucagaaaucgaucag

SEQ ID NO: 708875 - RNA, 19 nt, Homo sapiens
  misc_RNA (1)...(19): siRNA sense strand
ggugaagacccugaugauc

SEQ ID NO: 708876 - RNA, 19 nt, Homo sapiens
  misc_RNA (1)...(19): siRNA sense strand
ugaaauuguggcucuaaag

SEQ ID NO: 708877 - RNA, 19 nt, Homo sapiens
  misc_RNA (1)...(19): siRNA sense strand
gggcuucgaccucaugaac

SEQ ID NO: 708878 - RNA, 19 nt, Homo sapiens
  misc_RNA (1)...(19): siRNA sense strand
ggaggugaagacccugaug

SEQ ID NO: 708879 - RNA, 19 nt, Homo sapiens
  misc_RNA (1)...(19): siRNA sense strand
ggagaccggcagcaacucu

SEQ ID NO: 708880 - RNA, 19 nt, Homo sapiens
  misc_RNA (1)...(19): siRNA sense strand
gaaacgacaucgagaagaa

SEQ ID NO: 708881 - RNA, 19 nt, Homo sapiens
  misc_RNA (1)...(19): siRNA sense strand
gcaaaugucucggaaagaa

SEQ ID NO: 708882 - RNA, 19 nt, Homo sapiens
  misc_RNA (1)...(19): siRNA sense strand
gaaaacagaugaaauugug

SEQ ID NO: 708883 - RNA, 19 nt, Homo sapiens
  misc_RNA (1)...(19): siRNA sense strand
gcauggagaucacaauaag

SEQ ID NO: 708884 - RNA, 19 nt, Homo sapiens
  misc_RNA (1)...(19): siRNA sense strand
gagcaccagugaagaauca

SEQ ID NO: 708885 - RNA, 19 nt, Homo sapiens
  misc_RNA (1)...(19): siRNA sense strand
ugaaacaccugcacgacaa

SEQ ID NO: 708886 - RNA, 19 nt, Homo sapiens
  misc_RNA (1)...(19): siRNA sense strand
uaaagcggcugaagaugga

SEQ ID NO: 708887 - RNA, 19 nt, Homo sapiens
  misc_RNA (1)...(19): siRNA sense strand
agaaaugagugaagaugaa

SEQ ID NO: 708888 - RNA, 19 nt, Homo sapiens
  misc_RNA (1)...(19): siRNA sense strand
gagugaagaugaagaacga

SEQ ID NO: 708889 - RNA, 19 nt, Homo sapiens
  misc_RNA (1)...(19): siRNA sense strand
gcagcaacauggacaagau

SEQ ID NO: 708890 - RNA, 19 nt, Homo sapiens
  misc_RNA (1)...(19): siRNA sense strand
gaagggagcaccagugaag

SEQ ID NO: 708891 - RNA, 19 nt, Homo sapiens
  misc_RNA (1)...(19): siRNA sense strand
gagaagacucuauggaaga

SEQ ID NO: 708892 - RNA, 19 nt, Homo sapiens
  misc_RNA (1)...(19): siRNA sense strand
ggaguggucuacagagcaa

SEQ ID NO: 708893 - RNA, 19 nt, Homo sapiens
  misc_RNA (1)...(19): siRNA sense strand
gaagaugaagaacgagaaa

SEQ ID NO: 708894 - RNA, 19 nt, Homo sapiens
  misc_RNA (1)...(19): siRNA sense strand
gcacgaacgucggaaacga

SEQ ID NO: 708895 - RNA, 19 nt, Homo sapiens
  misc_RNA (1)...(19): siRNA sense strand
cagcaaaugucucggaaag

SEQ ID NO: 708896 - RNA, 19 nt, Homo sapiens
  misc_RNA (1)...(19): siRNA sense strand
cagaaaagaugaaaagaga

SEQ ID NO: 708897 - RNA, 19 nt, Homo sapiens
  misc_RNA (1)...(19): siRNA sense strand
gaagaaaugagugaagaug

SEQ ID NO: 708898 - RNA, 19 nt, Homo sapiens
  misc_RNA (1)...(19): siRNA sense strand
agaaguaagugaggaagaa

SEQ ID NO: 708899 - RNA, 19 nt, Homo sapiens
  misc_RNA (1)...(19): siRNA sense strand
ggaagacagaggagaagaa

SEQ ID NO: 708900 - RNA, 19 nt, Homo sapiens
  misc_RNA (1)...(19): siRNA sense strand
ugacagagggcgacuaugu

SEQ ID NO: 708901 - RNA, 19 nt, Homo sapiens
  misc_RNA (1)...(19): siRNA sense strand
gagaagaacaggauaaagc

SEQ ID NO: 708902 - RNA, 19 nt, Homo sapiens
  misc_RNA (1)...(19): siRNA sense strand
gagcauuccaggagagaaa

SEQ ID NO: 708903 - RNA, 19 nt, Homo sapiens
  misc_RNA (1)...(19): siRNA sense strand
ugaagaagcagaggaagaa

SEQ ID NO: 708904 - RNA, 19 nt, Homo sapiens
  misc_RNA (1)...(19): siRNA sense strand
aaggagggcuucccgauca

SEQ ID NO: 708905 - RNA, 19 nt, Homo sapiens
  misc_RNA (1)...(19): siRNA sense strand
gcuucgaccucaugaacaa

SEQ ID NO: 708906 - RNA, 19 nt, Homo sapiens
  misc_RNA (1)...(19): siRNA sense strand
gaaguaagugaggaagaaa

SEQ ID NO: 708907 - RNA, 19 nt, Homo sapiens
  misc_RNA (1)...(19): siRNA sense strand
caacaucgucaccguuaga

SEQ ID NO: 708908 - RNA, 19 nt, Homo sapiens
  misc_RNA (1)...(19): siRNA sense strand
ugagggagaucaacaccau

SEQ ID NO: 708909 - RNA, 19 nt, Homo sapiens
  misc_RNA (1)...(19): siRNA sense strand
gcucuaaagcggcugaaga

SEQ ID NO: 708910 - RNA, 19 nt, Homo sapiens
  misc_RNA (1)...(19): siRNA sense strand
ggcugaagauggagaagga

SEQ ID NO: 708911 - RNA, 19 nt, Homo sapiens
  misc_RNA (1)...(19): siRNA sense strand
agacagaggagaagaagau

SEQ ID NO: 708912 - RNA, 19 nt, Homo sapiens
  misc_RNA (1)...(19): siRNA sense strand
gaucaacaccauccucaag

SEQ ID NO: 708913 - RNA, 19 nt, Homo sapiens
  misc_RNA (1)...(19): siRNA sense strand
gaugaaauuguggcucuaa

SEQ ID NO: 708914 - RNA, 19 nt, Homo sapiens
  misc_RNA (1)...(19): siRNA sense strand
gaaucaggcucagguucug

SEQ ID NO: 708915 - RNA, 19 nt, Homo sapiens
  misc_RNA (1)...(19): siRNA sense strand
gaggugaagacccugauga

SEQ ID NO: 708916 - RNA, 19 nt, Homo sapiens
  misc_RNA (1)...(19): siRNA sense strand
ggaggaggaggaagaggaa

SEQ ID NO: 708917 - RNA, 19 nt, Homo sapiens
  misc_RNA (1)...(19): siRNA sense strand
ggaaacgacaucgagaaga

SEQ ID NO: 708918 - RNA, 19 nt, Homo sapiens
  misc_RNA (1)...(19): siRNA sense strand
agucagaaaucgaucagau

SEQ ID NO: 708919 - RNA, 19 nt, Homo sapiens
  misc_RNA (1)...(19): siRNA sense strand
ucacgucgcugagggagau

SEQ ID NO: 708920 - RNA, 19 nt, Homo sapiens
  misc_RNA (1)...(19): siRNA sense strand
gaaauuguggcucuaaagc

SEQ ID NO: 708921 - RNA, 19 nt, Homo sapiens
  misc_RNA (1)...(19): siRNA sense strand
gucaguggguugcaucuuc

SEQ ID NO: 708922 - RNA, 19 nt, Homo sapiens
  misc_RNA (1)...(19): siRNA sense strand
ugaagacccugaugaucca

SEQ ID NO: 708923 - RNA, 19 nt, Homo sapiens
  misc_RNA (1)...(19): siRNA sense strand
caaaugucucggaaagaaa

SEQ ID NO: 708924 - RNA, 19 nt, Homo sapiens
  misc_RNA (1)...(19): siRNA sense strand
gaagaacgagaaaaugaaa

SEQ ID NO: 708925 - RNA, 19 nt, Homo sapiens
  misc_RNA (1)...(19): siRNA sense strand
ggaagaaaugagugaagau

SEQ ID NO: 708926 - RNA, 19 nt, Homo sapiens
  misc_RNA (1)...(19): siRNA sense strand
gaagacagaggagaagaag

SEQ ID NO: 708927 - RNA, 19 nt, Homo sapiens
  misc_RNA (1)...(19): siRNA sense strand
agacagaagagaagggaaa

SEQ ID NO: 708928 - RNA, 19 nt, Homo sapiens
  misc_RNA (1)...(19): siRNA sense strand
gaaugggaaagacagaaga

SEQ ID NO: 708929 - RNA, 19 nt, Homo sapiens
  misc_RNA (1)...(19): siRNA sense strand
aggaagaaaugagugaaga

SEQ ID NO: 708930 - RNA, 19 nt, Homo sapiens
  misc_RNA (1)...(19): siRNA sense strand
gaggagaagaagaugauuc

SEQ ID NO: 708931 - RNA, 19 nt, Homo sapiens
  misc_RNA (1)...(19): siRNA sense strand
gcaacauggacaagaucua

SEQ ID NO: 708932 - RNA, 19 nt, Homo sapiens
  misc_RNA (1)...(19): siRNA sense strand
auaaggaacuccccguaua

SEQ ID NO: 708933 - RNA, 19 nt, Homo sapiens
  misc_RNA (1)...(19): siRNA sense strand
gagugaagaagcagaggaa

SEQ ID NO: 708934 - RNA, 19 nt, Homo sapiens
  misc_RNA (1)...(19): siRNA sense strand
ggaagucagaaaucgauca

SEQ ID NO: 708935 - RNA, 19 nt, Homo sapiens
  misc_RNA (1)...(19): siRNA sense strand
cccaacaucgucaccguua

SEQ ID NO: 708936 - RNA, 19 nt, Homo sapiens
  misc_RNA (1)...(19): siRNA sense strand
gggaaagacagaagagaag

SEQ ID NO: 708937 - RNA, 19 nt, Homo sapiens
  misc_RNA (1)...(19): siRNA sense strand
caaaagacaagaaaacaga

SEQ ID NO: 708938 - RNA, 19 nt, Homo sapiens
  misc_RNA (1)...(19): siRNA sense strand
gaucgaggagggcaccuau

SEQ ID NO: 708939 - RNA, 19 nt, Homo sapiens
  misc_RNA (1)...(19): siRNA sense strand
gaaaugagugaagaugaag

SEQ ID NO: 708940 - RNA, 19 nt, Homo sapiens
  misc_RNA (1)...(19): siRNA sense strand
ggaagaggaggaggaggaa

SEQ ID NO: 708941 - RNA, 19 nt, Homo sapiens
  misc_RNA (1)...(19): siRNA sense strand
caugcuagagugaaagaaa

SEQ ID NO: 708942 - RNA, 19 nt, Homo sapiens
  misc_RNA (1)...(19): siRNA sense strand
gaagagaaaauggaagaaa

SEQ ID NO: 708943 - RNA, 19 nt, Homo sapiens
  misc_RNA (1)...(19): siRNA sense strand
ggaaugggaaagacagaag

SEQ ID NO: 708944 - RNA, 19 nt, Homo sapiens
  misc_RNA (1)...(19): siRNA sense strand
cgucaccguuagagagauu

SEQ ID NO: 708945 - RNA, 19 nt, Homo sapiens
  misc_RNA (1)...(19): siRNA sense strand
gugaagaagcagaggaaga

SEQ ID NO: 708946 - RNA, 19 nt, Homo sapiens
  misc_RNA (1)...(19): siRNA sense strand
cgaagaaguaagugaggaa

SEQ ID NO: 708947 - RNA, 19 nt, Homo sapiens
  misc_RNA (1)...(19): siRNA sense strand
caacauggacaagaucuac

SEQ ID NO: 708948 - RNA, 19 nt, Homo sapiens
  misc_RNA (1)...(19): siRNA sense strand
ggaagggagcaccagugaa

SEQ ID NO: 708949 - RNA, 19 nt, Homo sapiens
  misc_RNA (1)...(19): siRNA sense strand
gcagaaucaggcucagguu

SEQ ID NO: 708950 - RNA, 19 nt, Homo sapiens
  misc_RNA (1)...(19): siRNA sense strand
cagaggagaagaagaugau

SEQ ID NO: 708951 - RNA, 19 nt, Homo sapiens
  misc_RNA (1)...(19): siRNA sense strand
guaagugaggaagaaauga

SEQ ID NO: 708952 - RNA, 19 nt, Homo sapiens
  misc_RNA (1)...(19): siRNA sense strand
cagaagagaagggaaaugg

SEQ ID NO: 708953 - RNA, 19 nt, Homo sapiens
  misc_RNA (1)...(19): siRNA sense strand
aggacggccucaagcauga

SEQ ID NO: 708954 - RNA, 19 nt, Homo sapiens
  misc_RNA (1)...(19): siRNA sense strand
gcaccuauggaguggucua

SEQ ID NO: 708955 - RNA, 19 nt, Homo sapiens
  misc_RNA (1)...(19): siRNA sense strand
gacagagggcgacuaugug

SEQ ID NO: 708956 - RNA, 19 nt, Homo sapiens
  misc_RNA (1)...(19): siRNA sense strand
aagaaaugagugaagauga

SEQ ID NO: 708957 - RNA, 19 nt, Homo sapiens
  misc_RNA (1)...(19): siRNA sense strand
ggaaauggcaagggagcau

SEQ ID NO: 708958 - RNA, 19 nt, Homo sapiens
  misc_RNA (1)...(19): siRNA sense strand
gaagauggagaaggagaag

SEQ ID NO: 708959 - RNA, 19 nt, Homo sapiens
  misc_RNA (1)...(19): siRNA sense strand
gaggagaccggcagcaacu

SEQ ID NO: 708960 - RNA, 19 nt, Homo sapiens
  misc_RNA (1)...(19): siRNA sense strand
gaggaagaaaugagugaag

SEQ ID NO: 708961 - RNA, 19 nt, Homo sapiens
  misc_RNA (1)...(19): siRNA sense strand
agaaagagagcacgaacgu

SEQ ID NO: 708962 - RNA, 19 nt, Homo sapiens
  misc_RNA (1)...(19): siRNA sense strand
ugggaaagacagaagagaa

SEQ ID NO: 708963 - RNA, 19 nt, Homo sapiens
  misc_RNA (1)...(19): siRNA sense strand
ucccagcagucaagaagau

SEQ ID NO: 708964 - RNA, 19 nt, Homo sapiens
  misc_RNA (1)...(19): siRNA sense strand
uauggaagacagaggagaa

SEQ ID NO: 708965 - RNA, 19 nt, Homo sapiens
  misc_RNA (1)...(19): siRNA sense strand
agaagcagaggaagaagug

SEQ ID NO: 708966 - RNA, 19 nt, Homo sapiens
  misc_RNA (1)...(19): siRNA sense strand
ugaagaugaagaacgagaa

SEQ ID NO: 708967 - RNA, 19 nt, Homo sapiens
  misc_RNA (1)...(19): siRNA sense strand
gugaggaagaaaugaguga

SEQ ID NO: 708968 - RNA, 19 nt, Homo sapiens
  misc_RNA (1)...(19): siRNA sense strand
gaacuccccguauagaaga

SEQ ID NO: 708969 - RNA, 19 nt, Homo sapiens
  misc_RNA (1)...(19): siRNA sense strand
gcaccagugaagaaucaga

SEQ ID NO: 708970 - RNA, 19 nt, Homo sapiens
  misc_RNA (1)...(19): siRNA sense strand
gaugaaaagagaaaagaga

SEQ ID NO: 708971 - RNA, 19 nt, Homo sapiens
  misc_RNA (1)...(19): siRNA sense strand
caucgagaagaacaggaua

SEQ ID NO: 708972 - RNA, 19 nt, Homo sapiens
  misc_RNA (1)...(19): siRNA sense strand
aagaggaggaggaggaaga

SEQ ID NO: 708973 - RNA, 19 nt, Homo sapiens
  misc_RNA (1)...(19): siRNA sense strand
acaagguguucaaggaucu

SEQ ID NO: 708974 - RNA, 19 nt, Homo sapiens
  misc_RNA (1)...(19): siRNA sense strand
gaguacggauccccucuga

SEQ ID NO: 708975 - RNA, 19 nt, Homo sapiens
  misc_RNA (1)...(19): siRNA sense strand
ugaagauggagaaggagaa

SEQ ID NO: 708976 - RNA, 19 nt, Homo sapiens
  misc_RNA (1)...(19): siRNA sense strand
ccaacaucgucaccguuag

SEQ ID NO: 708977 - RNA, 19 nt, Homo sapiens
  misc_RNA (1)...(19): siRNA sense strand
gaagucagaaaucgaucag

SEQ ID NO: 708978 - RNA, 19 nt, Homo sapiens
  misc_RNA (1)...(19): siRNA sense strand
ggugaagacccugaugauc

SEQ ID NO: 708979 - RNA, 19 nt, Homo sapiens
  misc_RNA (1)...(19): siRNA sense strand
gggcuucgaccucaugaac

SEQ ID NO: 708980 - RNA, 19 nt, Homo sapiens
  misc_RNA (1)...(19): siRNA sense strand
gaaacgacaucgagaagaa

SEQ ID NO: 708981 - RNA, 19 nt, Homo sapiens
  misc_RNA (1)...(19): siRNA sense strand
gcaaaugucucggaaagaa

SEQ ID NO: 708982 - RNA, 19 nt, Homo sapiens
  misc_RNA (1)...(19): siRNA sense strand
gaaaacagaugaaauugug

SEQ ID NO: 708983 - RNA, 19 nt, Homo sapiens
  misc_RNA (1)...(19): siRNA sense strand
gcauggagaucacaauaag

SEQ ID NO: 708984 - RNA, 19 nt, Homo sapiens
  misc_RNA (1)...(19): siRNA sense strand
gagcaccagugaagaauca

SEQ ID NO: 708985 - RNA, 19 nt, Homo sapiens
  misc_RNA (1)...(19): siRNA sense strand
ugaaacaccugcacgacaa

SEQ ID NO: 708986 - RNA, 19 nt, Homo sapiens
  misc_RNA (1)...(19): siRNA sense strand
uaaagcggcugaagaugga

SEQ ID NO: 708987 - RNA, 19 nt, Homo sapiens
  misc_RNA (1)...(19): siRNA sense strand
agaaaugagugaagaugaa

SEQ ID NO: 708988 - RNA, 19 nt, Homo sapiens
  misc_RNA (1)...(19): siRNA sense strand
gagugaagaugaagaacga

SEQ ID NO: 708989 - RNA, 19 nt, Homo sapiens
  misc_RNA (1)...(19): siRNA sense strand
gcagcaacauggacaagau

SEQ ID NO: 708990 - RNA, 19 nt, Homo sapiens
  misc_RNA (1)...(19): siRNA sense strand
gaagggagcaccagugaag

SEQ ID NO: 708991 - RNA, 19 nt, Homo sapiens
  misc_RNA (1)...(19): siRNA sense strand
gagaagacucuauggaaga

SEQ ID NO: 708992 - RNA, 19 nt, Homo sapiens
  misc_RNA (1)...(19): siRNA sense strand
ggaguggucuacagagcaa

SEQ ID NO: 708993 - RNA, 19 nt, Homo sapiens
  misc_RNA (1)...(19): siRNA sense strand
gaagaugaagaacgagaaa

SEQ ID NO: 708994 - RNA, 19 nt, Homo sapiens
  misc_RNA (1)...(19): siRNA sense strand
gcacgaacgucggaaacga

SEQ ID NO: 708995 - RNA, 19 nt, Homo sapiens
  misc_RNA (1)...(19): siRNA sense strand
cagcaaaugucucggaaag

SEQ ID NO: 708996 - RNA, 19 nt, Homo sapiens
  misc_RNA (1)...(19): siRNA sense strand
cagaaaagaugaaaagaga

SEQ ID NO: 708997 - RNA, 19 nt, Homo sapiens
  misc_RNA (1)...(19): siRNA sense strand
gaagaaaugagugaagaug

SEQ ID NO: 708998 - RNA, 19 nt, Homo sapiens
  misc_RNA (1)...(19): siRNA sense strand
agaaguaagugaggaagaa

SEQ ID NO: 708999 - RNA, 19 nt, Homo sapiens
  misc_RNA (1)...(19): siRNA sense strand
ggaagacagaggagaagaa

SEQ ID NO: 709000 - RNA, 19 nt, Homo sapiens
  misc_RNA (1)...(19): siRNA sense strand
ugacagagggcgacuaugu

SEQ ID NO: 709001 - RNA, 19 nt, Homo sapiens
  misc_RNA (1)...(19): siRNA sense strand
gagaagaacaggauaaagc

SEQ ID NO: 709002 - RNA, 19 nt, Homo sapiens
  misc_RNA (1)...(19): siRNA sense strand
gagcauuccaggagagaaa

SEQ ID NO: 709003 - RNA, 19 nt, Homo sapiens
  misc_RNA (1)...(19): siRNA sense strand
ugaagaagcagaggaagaa

SEQ ID NO: 709004 - RNA, 19 nt, Homo sapiens
  misc_RNA (1)...(19): siRNA sense strand
aaggagggcuucccgauca

SEQ ID NO: 709005 - RNA, 19 nt, Homo sapiens
  misc_RNA (1)...(19): siRNA sense strand
gcuucgaccucaugaacaa

SEQ ID NO: 709006 - RNA, 19 nt, Homo sapiens
  misc_RNA (1)...(19): siRNA sense strand
gaaguaagugaggaagaaa

SEQ ID NO: 709007 - RNA, 19 nt, Homo sapiens
  misc_RNA (1)...(19): siRNA sense strand
caacaucgucaccguuaga

SEQ ID NO: 709008 - RNA, 19 nt, Homo sapiens
  misc_RNA (1)...(19): siRNA sense strand
ugagggagaucaacaccau

SEQ ID NO: 709009 - RNA, 19 nt, Homo sapiens
  misc_RNA (1)...(19): siRNA sense strand
gcucuaaagcggcugaaga

SEQ ID NO: 709010 - RNA, 19 nt, Homo sapiens
  misc_RNA (1)...(19): siRNA sense strand
ggcugaagauggagaagga

SEQ ID NO: 709011 - RNA, 19 nt, Homo sapiens
  misc_RNA (1)...(19): siRNA sense strand
agacagaggagaagaagau

SEQ ID NO: 709012 - RNA, 19 nt, Homo sapiens
  misc_RNA (1)...(19): siRNA sense strand
gaucaacaccauccucaag

SEQ ID NO: 709013 - RNA, 19 nt, Homo sapiens
  misc_RNA (1)...(19): siRNA sense strand
gaugaaauuguggcucuaa

SEQ ID NO: 709014 - RNA, 19 nt, Homo sapiens
  misc_RNA (1)...(19): siRNA sense strand
gaaucaggcucagguucug

SEQ ID NO: 709015 - RNA, 19 nt, Homo sapiens
  misc_RNA (1)...(19): siRNA sense strand
gaggugaagacccugauga

SEQ ID NO: 709016 - RNA, 19 nt, Homo sapiens
  misc_RNA (1)...(19): siRNA sense strand
ggaggaggaggaagaggaa

SEQ ID NO: 709017 - RNA, 19 nt, Homo sapiens
  misc_RNA (1)...(19): siRNA sense strand
ggaaacgacaucgagaaga

SEQ ID NO: 709018 - RNA, 19 nt, Homo sapiens
  misc_RNA (1)...(19): siRNA sense strand
agucagaaaucgaucagau

SEQ ID NO: 709019 - RNA, 19 nt, Homo sapiens
  misc_RNA (1)...(19): siRNA sense strand
ucacgucgcugagggagau

SEQ ID NO: 709020 - RNA, 19 nt, Homo sapiens
  misc_RNA (1)...(19): siRNA sense strand
gaaauuguggcucuaaagc

SEQ ID NO: 709021 - RNA, 19 nt, Homo sapiens
  misc_RNA (1)...(19): siRNA sense strand
gucaguggguugcaucuuc

SEQ ID NO: 709022 - RNA, 19 nt, Homo sapiens
  misc_RNA (1)...(19): siRNA sense strand
ugaagacccugaugaucca

SEQ ID NO: 709023 - RNA, 19 nt, Homo sapiens
  misc_RNA (1)...(19): siRNA sense strand
caaaugucucggaaagaaa

SEQ ID NO: 709024 - RNA, 19 nt, Homo sapiens
  misc_RNA (1)...(19): siRNA sense strand
gaagaacgagaaaaugaaa

SEQ ID NO: 709025 - RNA, 19 nt, Homo sapiens
  misc_RNA (1)...(19): siRNA sense strand
ggaagaaaugagugaagau

SEQ ID NO: 709026 - RNA, 19 nt, Homo sapiens
  misc_RNA (1)...(19): siRNA sense strand
gaagacagaggagaagaag

SEQ ID NO: 709027 - RNA, 19 nt, Homo sapiens
  misc_RNA (1)...(19): siRNA sense strand
agacagaagagaagggaaa

SEQ ID NO: 709028 - RNA, 19 nt, Homo sapiens
  misc_RNA (1)...(19): siRNA sense strand
gaaugggaaagacagaaga

SEQ ID NO: 709029 - RNA, 19 nt, Homo sapiens
  misc_RNA (1)...(19): siRNA sense strand
aggaagaaaugagugaaga

SEQ ID NO: 709030 - RNA, 19 nt, Homo sapiens
  misc_RNA (1)...(19): siRNA sense strand
gaggagaagaagaugauuc

SEQ ID NO: 709031 - RNA, 19 nt, Homo sapiens
  misc_RNA (1)...(19): siRNA sense strand
gcaacauggacaagaucua

SEQ ID NO: 709032 - RNA, 19 nt, Homo sapiens
  misc_RNA (1)...(19): siRNA sense strand
auaaggaacuccccguaua

SEQ ID NO: 709033 - RNA, 19 nt, Homo sapiens
  misc_RNA (1)...(19): siRNA sense strand
gagugaagaagcagaggaa

SEQ ID NO: 709034 - RNA, 19 nt, Homo sapiens
  misc_RNA (1)...(19): siRNA sense strand
ggaagucagaaaucgauca

SEQ ID NO: 709035 - RNA, 19 nt, Homo sapiens
  misc_RNA (1)...(19): siRNA sense strand
cccaacaucgucaccguua

SEQ ID NO: 709036 - RNA, 19 nt, Homo sapiens
  misc_RNA (1)...(19): siRNA sense strand
gggaaagacagaagagaag

SEQ ID NO: 709037 - RNA, 19 nt, Homo sapiens
  misc_RNA (1)...(19): siRNA sense strand
caaaagacaagaaaacaga

SEQ ID NO: 709038 - RNA, 19 nt, Homo sapiens
  misc_RNA (1)...(19): siRNA sense strand
gaucgaggagggcaccuau

SEQ ID NO: 709039 - RNA, 19 nt, Homo sapiens
  misc_RNA (1)...(19): siRNA sense strand
gaaaugagugaagaugaag

SEQ ID NO: 709040 - RNA, 19 nt, Homo sapiens
  misc_RNA (1)...(19): siRNA sense strand
ggaagaggaggaggaggaa

SEQ ID NO: 709041 - RNA, 19 nt, Homo sapiens
  misc_RNA (1)...(19): siRNA sense strand
caugcuagagugaaagaaa

SEQ ID NO: 709042 - RNA, 19 nt, Homo sapiens
  misc_RNA (1)...(19): siRNA sense strand
gaagagaaaauggaagaaa

SEQ ID NO: 709043 - RNA, 19 nt, Homo sapiens
  misc_RNA (1)...(19): siRNA sense strand
ggaaugggaaagacagaag

SEQ ID NO: 709044 - RNA, 19 nt, Homo sapiens
  misc_RNA (1)...(19): siRNA sense strand
cgucaccguuagagagauu

SEQ ID NO: 709045 - RNA, 19 nt, Homo sapiens
  misc_RNA (1)...(19): siRNA sense strand
gugaagaagcagaggaaga

SEQ ID NO: 709046 - RNA, 19 nt, Homo sapiens
  misc_RNA (1)...(19): siRNA sense strand
cgaagaaguaagugaggaa

SEQ ID NO: 709047 - RNA, 19 nt, Homo sapiens
  misc_RNA (1)...(19): siRNA sense strand
caacauggacaagaucuac

SEQ ID NO: 709048 - RNA, 19 nt, Homo sapiens
  misc_RNA (1)...(19): siRNA sense strand
ggaagggagcaccagugaa

SEQ ID NO: 709049 - RNA, 19 nt, Homo sapiens
  misc_RNA (1)...(19): siRNA sense strand
gcagaaucaggcucagguu

SEQ ID NO: 709050 - RNA, 19 nt, Homo sapiens
  misc_RNA (1)...(19): siRNA sense strand
cagaggagaagaagaugau

SEQ ID NO: 709051 - RNA, 19 nt, Homo sapiens
  misc_RNA (1)...(19): siRNA sense strand
guaagugaggaagaaauga

SEQ ID NO: 709052 - RNA, 19 nt, Homo sapiens
  misc_RNA (1)...(19): siRNA sense strand
cagaagagaagggaaaugg

SEQ ID NO: 709053 - RNA, 19 nt, Homo sapiens
  misc_RNA (1)...(19): siRNA sense strand
aggacggccucaagcauga

SEQ ID NO: 709054 - RNA, 19 nt, Homo sapiens
  misc_RNA (1)...(19): siRNA sense strand
gcaccuauggaguggucua

SEQ ID NO: 709055 - RNA, 19 nt, Homo sapiens
  misc_RNA (1)...(19): siRNA sense strand
gacagagggcgacuaugug

SEQ ID NO: 709056 - RNA, 19 nt, Homo sapiens
  misc_RNA (1)...(19): siRNA sense strand
aagaaaugagugaagauga

SEQ ID NO: 709057 - RNA, 19 nt, Homo sapiens
  misc_RNA (1)...(19): siRNA sense strand
ggaaauggcaagggagcau

SEQ ID NO: 709058 - RNA, 19 nt, Homo sapiens
  misc_RNA (1)...(19): siRNA sense strand
gaagauggagaaggagaag

SEQ ID NO: 709059 - RNA, 19 nt, Homo sapiens
  misc_RNA (1)...(19): siRNA sense strand
gaggagaccggcagcaacu

SEQ ID NO: 709060 - RNA, 19 nt, Homo sapiens
  misc_RNA (1)...(19): siRNA sense strand
gaggaagaaaugagugaag

SEQ ID NO: 709061 - RNA, 19 nt, Homo sapiens
  misc_RNA (1)...(19): siRNA sense strand
agaaagagagcacgaacgu

SEQ ID NO: 709062 - RNA, 19 nt, Homo sapiens
  misc_RNA (1)...(19): siRNA sense strand
ugggaaagacagaagagaa

SEQ ID NO: 709063 - RNA, 19 nt, Homo sapiens
  misc_RNA (1)...(19): siRNA sense strand
ucccagcagucaagaagau

SEQ ID NO: 709064 - RNA, 19 nt, Homo sapiens
  misc_RNA (1)...(19): siRNA sense strand
uauggaagacagaggagaa

SEQ ID NO: 709065 - RNA, 19 nt, Homo sapiens
  misc_RNA (1)...(19): siRNA sense strand
agaagcagaggaagaagug

SEQ ID NO: 709066 - RNA, 19 nt, Homo sapiens
  misc_RNA (1)...(19): siRNA sense strand
ugaagaugaagaacgagaa

SEQ ID NO: 709067 - RNA, 19 nt, Homo sapiens
  misc_RNA (1)...(19): siRNA sense strand
gugaggaagaaaugaguga

SEQ ID NO: 709068 - RNA, 19 nt, Homo sapiens
  misc_RNA (1)...(19): siRNA sense strand
gaacuccccguauagaaga

SEQ ID NO: 709069 - RNA, 19 nt, Homo sapiens
  misc_RNA (1)...(19): siRNA sense strand
gcaccagugaagaaucaga

SEQ ID NO: 709070 - RNA, 19 nt, Homo sapiens
  misc_RNA (1)...(19): siRNA sense strand
gaugaaaagagaaaagaga

SEQ ID NO: 709071 - RNA, 19 nt, Homo sapiens
  misc_RNA (1)...(19): siRNA sense strand
caucgagaagaacaggaua

SEQ ID NO: 709072 - RNA, 19 nt, Homo sapiens
  misc_RNA (1)...(19): siRNA sense strand
aagaggaggaggaggaaga

SEQ ID NO: 709073 - RNA, 19 nt, Homo sapiens
  misc_RNA (1)...(19): siRNA sense strand
acaagguguucaaggaucu

SEQ ID NO: 709074 - RNA, 19 nt, Homo sapiens
  misc_RNA (1)...(19): siRNA sense strand
gaguacggauccccucuga

SEQ ID NO: 709075 - RNA, 19 nt, Homo sapiens
  misc_RNA (1)...(19): siRNA sense strand
ugaagauggagaaggagaa

SEQ ID NO: 709076 - RNA, 19 nt, Homo sapiens
  misc_RNA (1)...(19): siRNA sense strand
ccaacaucgucaccguuag

SEQ ID NO: 709077 - RNA, 19 nt, Homo sapiens
  misc_RNA (1)...(19): siRNA sense strand
gaagucagaaaucgaucag

SEQ ID NO: 709078 - RNA, 19 nt, Homo sapiens
  misc_RNA (1)...(19): siRNA sense strand
ggugaagacccugaugauc

SEQ ID NO: 709079 - RNA, 19 nt, Homo sapiens
  misc_RNA (1)...(19): siRNA sense strand
gggcuucgaccucaugaac

SEQ ID NO: 709080 - RNA, 19 nt, Homo sapiens
  misc_RNA (1)...(19): siRNA sense strand
gaaaacagaugaaauugug

SEQ ID NO: 709081 - RNA, 19 nt, Homo sapiens
  misc_RNA (1)...(19): siRNA sense strand
gagcaccagugaagaauca

SEQ ID NO: 709082 - RNA, 19 nt, Homo sapiens
  misc_RNA (1)...(19): siRNA sense strand
ugaaacaccugcacgacaa

SEQ ID NO: 709083 - RNA, 19 nt, Homo sapiens
  misc_RNA (1)...(19): siRNA sense strand
uaaagcggcugaagaugga

SEQ ID NO: 709084 - RNA, 19 nt, Homo sapiens
  misc_RNA (1)...(19): siRNA sense strand
agaaaugagugaagaugaa

SEQ ID NO: 709085 - RNA, 19 nt, Homo sapiens
  misc_RNA (1)...(19): siRNA sense strand
gagugaagaugaagaacga

SEQ ID NO: 709086 - RNA, 19 nt, Homo sapiens
  misc_RNA (1)...(19): siRNA sense strand
gcagcaacauggacaagau

SEQ ID NO: 709087 - RNA, 19 nt, Homo sapiens
  misc_RNA (1)...(19): siRNA sense strand
gaagggagcaccagugaag

SEQ ID NO: 709088 - RNA, 19 nt, Homo sapiens
  misc_RNA (1)...(19): siRNA sense strand
gaagaugaagaacgagaaa

SEQ ID NO: 709089 - RNA, 19 nt, Homo sapiens
  misc_RNA (1)...(19): siRNA sense strand
ggaguggucuacagagcaa

SEQ ID NO: 709090 - RNA, 19 nt, Homo sapiens
  misc_RNA (1)...(19): siRNA sense strand
gaagaaaugagugaagaug

SEQ ID NO: 709091 - RNA, 19 nt, Homo sapiens
  misc_RNA (1)...(19): siRNA sense strand
agaaguaagugaggaagaa

SEQ ID NO: 709092 - RNA, 19 nt, Homo sapiens
  misc_RNA (1)...(19): siRNA sense strand
ugacagagggcgacuaugu

SEQ ID NO: 709093 - RNA, 19 nt, Homo sapiens
  misc_RNA (1)...(19): siRNA sense strand
ugaagaagcagaggaagaa

SEQ ID NO: 709094 - RNA, 19 nt, Homo sapiens
  misc_RNA (1)...(19): siRNA sense strand
aaggagggcuucccgauca

SEQ ID NO: 709095 - RNA, 19 nt, Homo sapiens
  misc_RNA (1)...(19): siRNA sense strand
gcuucgaccucaugaacaa

SEQ ID NO: 709096 - RNA, 19 nt, Homo sapiens
  misc_RNA (1)...(19): siRNA sense strand
gaaguaagugaggaagaaa

SEQ ID NO: 709097 - RNA, 19 nt, Homo sapiens
  misc_RNA (1)...(19): siRNA sense strand
caacaucgucaccguuaga

SEQ ID NO: 709098 - RNA, 19 nt, Homo sapiens
  misc_RNA (1)...(19): siRNA sense strand
ugagggagaucaacaccau

SEQ ID NO: 709099 - RNA, 19 nt, Homo sapiens
  misc_RNA (1)...(19): siRNA sense strand
gcucuaaagcggcugaaga

SEQ ID NO: 709100 - RNA, 19 nt, Homo sapiens
  misc_RNA (1)...(19): siRNA sense strand
ggcugaagauggagaagga

SEQ ID NO: 709101 - RNA, 19 nt, Homo sapiens
  misc_RNA (1)...(19): siRNA sense strand
gaugaaauuguggcucuaa

SEQ ID NO: 709102 - RNA, 19 nt, Homo sapiens
  misc_RNA (1)...(19): siRNA sense strand
gaucaacaccauccucaag

SEQ ID NO: 709103 - RNA, 19 nt, Homo sapiens
  misc_RNA (1)...(19): siRNA sense strand
ggaggaggaggaagaggaa

SEQ ID NO: 709104 - RNA, 19 nt, Homo sapiens
  misc_RNA (1)...(19): siRNA sense strand
gaggugaagacccugauga

SEQ ID NO: 709105 - RNA, 19 nt, Homo sapiens
  misc_RNA (1)...(19): siRNA sense strand
gaaucaggcucagguucug

SEQ ID NO: 709106 - RNA, 19 nt, Homo sapiens
  misc_RNA (1)...(19): siRNA sense strand
ucacgucgcugagggagau

SEQ ID NO: 709107 - RNA, 19 nt, Homo sapiens
  misc_RNA (1)...(19): siRNA sense strand
agucagaaaucgaucagau

SEQ ID NO: 709108 - RNA, 19 nt, Homo sapiens
  misc_RNA (1)...(19): siRNA sense strand
gaaauuguggcucuaaagc

SEQ ID NO: 709109 - RNA, 19 nt, Homo sapiens
  misc_RNA (1)...(19): siRNA sense strand
gucaguggguugcaucuuc

SEQ ID NO: 709110 - RNA, 19 nt, Homo sapiens
  misc_RNA (1)...(19): siRNA sense strand
ugaagacccugaugaucca

SEQ ID NO: 709111 - RNA, 19 nt, Homo sapiens
  misc_RNA (1)...(19): siRNA sense strand
ggaagaaaugagugaagau

SEQ ID NO: 709112 - RNA, 19 nt, Homo sapiens
  misc_RNA (1)...(19): siRNA sense strand
gaagaacgagaaaaugaaa

SEQ ID NO: 709113 - RNA, 19 nt, Homo sapiens
  misc_RNA (1)...(19): siRNA sense strand
aggaagaaaugagugaaga

SEQ ID NO: 709114 - RNA, 19 nt, Homo sapiens
  misc_RNA (1)...(19): siRNA sense strand
gcaacauggacaagaucua

SEQ ID NO: 709115 - RNA, 19 nt, Homo sapiens
  misc_RNA (1)...(19): siRNA sense strand
gagugaagaagcagaggaa

SEQ ID NO: 709116 - RNA, 19 nt, Homo sapiens
  misc_RNA (1)...(19): siRNA sense strand
ggaagucagaaaucgauca

SEQ ID NO: 709117 - RNA, 19 nt, Homo sapiens
  misc_RNA (1)...(19): siRNA sense strand
cccaacaucgucaccguua

SEQ ID NO: 709118 - RNA, 19 nt, Homo sapiens
  misc_RNA (1)...(19): siRNA sense strand
gaaaugagugaagaugaag

SEQ ID NO: 709119 - RNA, 19 nt, Homo sapiens
  misc_RNA (1)...(19): siRNA sense strand
ggaagaggaggaggaggaa

SEQ ID NO: 709120 - RNA, 19 nt, Homo sapiens
  misc_RNA (1)...(19): siRNA sense strand
caaaagacaagaaaacaga

SEQ ID NO: 709121 - RNA, 19 nt, Homo sapiens
  misc_RNA (1)...(19): siRNA sense strand
gaucgaggagggcaccuau

SEQ ID NO: 709122 - RNA, 19 nt, Homo sapiens
  misc_RNA (1)...(19): siRNA sense strand
gaagagaaaauggaagaaa

SEQ ID NO: 709123 - RNA, 19 nt, Homo sapiens
  misc_RNA (1)...(19): siRNA sense strand
cgaagaaguaagugaggaa

SEQ ID NO: 709124 - RNA, 19 nt, Homo sapiens
  misc_RNA (1)...(19): siRNA sense strand
cgucaccguuagagagauu

SEQ ID NO: 709125 - RNA, 19 nt, Homo sapiens
  misc_RNA (1)...(19): siRNA sense strand
gugaagaagcagaggaaga

SEQ ID NO: 709126 - RNA, 19 nt, Homo sapiens
  misc_RNA (1)...(19): siRNA sense strand
caacauggacaagaucuac

SEQ ID NO: 709127 - RNA, 19 nt, Homo sapiens
  misc_RNA (1)...(19): siRNA sense strand
ggaagggagcaccagugaa

SEQ ID NO: 709128 - RNA, 19 nt, Homo sapiens
  misc_RNA (1)...(19): siRNA sense strand
guaagugaggaagaaauga

SEQ ID NO: 709129 - RNA, 19 nt, Homo sapiens
  misc_RNA (1)...(19): siRNA sense strand
gcagaaucaggcucagguu

SEQ ID NO: 709130 - RNA, 19 nt, Homo sapiens
  misc_RNA (1)...(19): siRNA sense strand
aagaaaugagugaagauga

SEQ ID NO: 709131 - RNA, 19 nt, Homo sapiens
  misc_RNA (1)...(19): siRNA sense strand
aggacggccucaagcauga

SEQ ID NO: 709132 - RNA, 19 nt, Homo sapiens
  misc_RNA (1)...(19): siRNA sense strand
gcaccuauggaguggucua

SEQ ID NO: 709133 - RNA, 19 nt, Homo sapiens
  misc_RNA (1)...(19): siRNA sense strand
gacagagggcgacuaugug

SEQ ID NO: 709134 - RNA, 19 nt, Homo sapiens
  misc_RNA (1)...(19): siRNA sense strand
gaggagaccggcagcaacu

SEQ ID NO: 709135 - RNA, 19 nt, Homo sapiens
  misc_RNA (1)...(19): siRNA sense strand
gaagauggagaaggagaag

SEQ ID NO: 709136 - RNA, 19 nt, Homo sapiens
  misc_RNA (1)...(19): siRNA sense strand
gaggaagaaaugagugaag

SEQ ID NO: 709137 - RNA, 19 nt, Homo sapiens
  misc_RNA (1)...(19): siRNA sense strand
gugaggaagaaaugaguga

SEQ ID NO: 709138 - RNA, 19 nt, Homo sapiens
  misc_RNA (1)...(19): siRNA sense strand
ucccagcagucaagaagau

SEQ ID NO: 709139 - RNA, 19 nt, Homo sapiens
  misc_RNA (1)...(19): siRNA sense strand
agaagcagaggaagaagug

SEQ ID NO: 709140 - RNA, 19 nt, Homo sapiens
  misc_RNA (1)...(19): siRNA sense strand
ugaagaugaagaacgagaa

SEQ ID NO: 709141 - RNA, 19 nt, Homo sapiens
  misc_RNA (1)...(19): siRNA sense strand
gcaccagugaagaaucaga

SEQ ID NO: 709142 - RNA, 19 nt, Homo sapiens
  misc_RNA (1)...(19): siRNA sense strand
aagaggaggaggaggaaga

SEQ ID NO: 709143 - RNA, 19 nt, Homo sapiens
  misc_RNA (1)...(19): siRNA sense strand
acaagguguucaaggaucu

SEQ ID NO: 709144 - RNA, 19 nt, Homo sapiens
  misc_RNA (1)...(19): siRNA sense strand
gaguacggauccccucuga

SEQ ID NO: 709145 - RNA, 19 nt, Homo sapiens
  misc_RNA (1)...(19): siRNA sense strand
ugaagauggagaaggagaa

SEQ ID NO: 709146 - RNA, 19 nt, Homo sapiens
  misc_RNA (1)...(19): siRNA sense strand
ccaacaucgucaccguuag

SEQ ID NO: 709147 - RNA, 19 nt, Homo sapiens
  misc_RNA (1)...(19): siRNA sense strand
gaagucagaaaucgaucag

SEQ ID NO: 709148 - RNA, 19 nt, Homo sapiens
  misc_RNA (1)...(19): siRNA sense strand
ggugaagacccugaugauc

SEQ ID NO: 709149 - RNA, 19 nt, Homo sapiens
  misc_RNA (1)...(19): siRNA sense strand
ugaaauuguggcucuaaag

SEQ ID NO: 709150 - RNA, 19 nt, Homo sapiens
  misc_RNA (1)...(19): siRNA sense strand
gggcuucgaccucaugaac

SEQ ID NO: 709151 - RNA, 19 nt, Homo sapiens
  misc_RNA (1)...(19): siRNA sense strand
ggagaccggcagcaacucu

SEQ ID NO: 709152 - RNA, 19 nt, Homo sapiens
  misc_RNA (1)...(19): siRNA sense strand
ggaggugaagacccugaug

SEQ ID NO: 709153 - RNA, 19 nt, Homo sapiens
  misc_RNA (1)...(19): siRNA sense strand
gaaacgacaucgagaagaa

SEQ ID NO: 709154 - RNA, 19 nt, Homo sapiens
  misc_RNA (1)...(19): siRNA sense strand
gcaaaugucucggaaagaa

SEQ ID NO: 709155 - RNA, 19 nt, Homo sapiens
  misc_RNA (1)...(19): siRNA sense strand
gaaaacagaugaaauugug

SEQ ID NO: 709156 - RNA, 19 nt, Homo sapiens
  misc_RNA (1)...(19): siRNA sense strand
gcauggagaucacaauaag

SEQ ID NO: 709157 - RNA, 19 nt, Homo sapiens
  misc_RNA (1)...(19): siRNA sense strand
gagcaccagugaagaauca

SEQ ID NO: 709158 - RNA, 19 nt, Homo sapiens
  misc_RNA (1)...(19): siRNA sense strand
ugaaacaccugcacgacaa

SEQ ID NO: 709159 - RNA, 19 nt, Homo sapiens
  misc_RNA (1)...(19): siRNA sense strand
gaaaaggacucuuggaaag

SEQ ID NO: 709160 - RNA, 19 nt, Homo sapiens
  misc_RNA (1)...(19): siRNA sense strand
uaaagcggcugaagaugga

SEQ ID NO: 709161 - RNA, 19 nt, Homo sapiens
  misc_RNA (1)...(19): siRNA sense strand
agaaaugagugaagaugaa

SEQ ID NO: 709162 - RNA, 19 nt, Homo sapiens
  misc_RNA (1)...(19): siRNA sense strand
gagugaagaugaagaacga

SEQ ID NO: 709163 - RNA, 19 nt, Homo sapiens
  misc_RNA (1)...(19): siRNA sense strand
gcagcaacauggacaagau

SEQ ID NO: 709164 - RNA, 19 nt, Homo sapiens
  misc_RNA (1)...(19): siRNA sense strand
gaagggagcaccagugaag

SEQ ID NO: 709165 - RNA, 19 nt, Homo sapiens
  misc_RNA (1)...(19): siRNA sense strand
ggaaggaacaagaggagaa

SEQ ID NO: 709166 - RNA, 19 nt, Homo sapiens
  misc_RNA (1)...(19): siRNA sense strand
ggaguggucuacagagcaa

SEQ ID NO: 709167 - RNA, 19 nt, Homo sapiens
  misc_RNA (1)...(19): siRNA sense strand
gaagaugaagaacgagaaa

SEQ ID NO: 709168 - RNA, 19 nt, Homo sapiens
  misc_RNA (1)...(19): siRNA sense strand
gcacgaacgucggaaacga

SEQ ID NO: 709169 - RNA, 19 nt, Homo sapiens
  misc_RNA (1)...(19): siRNA sense strand
gagaagacucuauggaaga

SEQ ID NO: 709170 - RNA, 19 nt, Homo sapiens
  misc_RNA (1)...(19): siRNA sense strand
cagcaaaugucucggaaag

SEQ ID NO: 709171 - RNA, 19 nt, Homo sapiens
  misc_RNA (1)...(19): siRNA sense strand
cagaaaagaugaaaagaga

SEQ ID NO: 709172 - RNA, 19 nt, Homo sapiens
  misc_RNA (1)...(19): siRNA sense strand
gaagaaaugagugaagaug

SEQ ID NO: 709173 - RNA, 19 nt, Homo sapiens
  misc_RNA (1)...(19): siRNA sense strand
agaaguaagugaggaagaa

SEQ ID NO: 709174 - RNA, 19 nt, Homo sapiens
  misc_RNA (1)...(19): siRNA sense strand
ggaagacagaggagaagaa

SEQ ID NO: 709175 - RNA, 19 nt, Homo sapiens
  misc_RNA (1)...(19): siRNA sense strand
gaaggaacaagaggagaaa

SEQ ID NO: 709176 - RNA, 19 nt, Homo sapiens
  misc_RNA (1)...(19): siRNA sense strand
ugacagagggcgacuaugu

SEQ ID NO: 709177 - RNA, 19 nt, Homo sapiens
  misc_RNA (1)...(19): siRNA sense strand
ggagaaagcagagauaaaa

SEQ ID NO: 709178 - RNA, 19 nt, Homo sapiens
  misc_RNA (1)...(19): siRNA sense strand
gagaagaacaggauaaagc

SEQ ID NO: 709179 - RNA, 19 nt, Homo sapiens
  misc_RNA (1)...(19): siRNA sense strand
gaggagaaagcagagauaa

SEQ ID NO: 709180 - RNA, 19 nt, Homo sapiens
  misc_RNA (1)...(19): siRNA sense strand
ugaagaagcagaggaagaa

SEQ ID NO: 709181 - RNA, 19 nt, Homo sapiens
  misc_RNA (1)...(19): siRNA sense strand
gagcauuccaggagagaaa

SEQ ID NO: 709182 - RNA, 19 nt, Homo sapiens
  misc_RNA (1)...(19): siRNA sense strand
aaggagggcuucccgauca

SEQ ID NO: 709183 - RNA, 19 nt, Homo sapiens
  misc_RNA (1)...(19): siRNA sense strand
gcuucgaccucaugaacaa

SEQ ID NO: 709184 - RNA, 19 nt, Homo sapiens
  misc_RNA (1)...(19): siRNA sense strand
gaaguaagugaggaagaaa

SEQ ID NO: 709185 - RNA, 19 nt, Homo sapiens
  misc_RNA (1)...(19): siRNA sense strand
caacaucgucaccguuaga

SEQ ID NO: 709186 - RNA, 19 nt, Homo sapiens
  misc_RNA (1)...(19): siRNA sense strand
ugagggagaucaacaccau

SEQ ID NO: 709187 - RNA, 19 nt, Homo sapiens
  misc_RNA (1)...(19): siRNA sense strand
aaaggacucuuggaaagug

SEQ ID NO: 709188 - RNA, 19 nt, Homo sapiens
  misc_RNA (1)...(19): siRNA sense strand
gcucuaaagcggcugaaga

SEQ ID NO: 709189 - RNA, 19 nt, Homo sapiens
  misc_RNA (1)...(19): siRNA sense strand
ggcugaagauggagaagga

SEQ ID NO: 709190 - RNA, 19 nt, Homo sapiens
  misc_RNA (1)...(19): siRNA sense strand
agacagaggagaagaagau

SEQ ID NO: 709191 - RNA, 19 nt, Homo sapiens
  misc_RNA (1)...(19): siRNA sense strand
gaucaacaccauccucaag

SEQ ID NO: 709192 - RNA, 19 nt, Homo sapiens
  misc_RNA (1)...(19): siRNA sense strand
gaugaaauuguggcucuaa

SEQ ID NO: 709193 - RNA, 19 nt, Homo sapiens
  misc_RNA (1)...(19): siRNA sense strand
gaaucaggcucagguucug

SEQ ID NO: 709194 - RNA, 19 nt, Homo sapiens
  misc_RNA (1)...(19): siRNA sense strand
gaggugaagacccugauga

SEQ ID NO: 709195 - RNA, 19 nt, Homo sapiens
  misc_RNA (1)...(19): siRNA sense strand
ggaggaggaggaagaggaa

SEQ ID NO: 709196 - RNA, 19 nt, Homo sapiens
  misc_RNA (1)...(19): siRNA sense strand
ggaaacgacaucgagaaga

SEQ ID NO: 709197 - RNA, 19 nt, Homo sapiens
  misc_RNA (1)...(19): siRNA sense strand
agucagaaaucgaucagau

SEQ ID NO: 709198 - RNA, 19 nt, Homo sapiens
  misc_RNA (1)...(19): siRNA sense strand
ucacgucgcugagggagau

SEQ ID NO: 709199 - RNA, 19 nt, Homo sapiens
  misc_RNA (1)...(19): siRNA sense strand
gaaauuguggcucuaaagc

SEQ ID NO: 709200 - RNA, 19 nt, Homo sapiens
  misc_RNA (1)...(19): siRNA sense strand
gucaguggguugcaucuuc

SEQ ID NO: 709201 - RNA, 19 nt, Homo sapiens
  misc_RNA (1)...(19): siRNA sense strand
ugaagacccugaugaucca

SEQ ID NO: 709202 - RNA, 19 nt, Homo sapiens
  misc_RNA (1)...(19): siRNA sense strand
gaagacagaggagaagaag

SEQ ID NO: 709203 - RNA, 19 nt, Homo sapiens
  misc_RNA (1)...(19): siRNA sense strand
gaagaacgagaaaaugaaa

SEQ ID NO: 709204 - RNA, 19 nt, Homo sapiens
  misc_RNA (1)...(19): siRNA sense strand
ggaagaaaugagugaagau

SEQ ID NO: 709205 - RNA, 19 nt, Homo sapiens
  misc_RNA (1)...(19): siRNA sense strand
agacagaagagaagggaaa

SEQ ID NO: 709206 - RNA, 19 nt, Homo sapiens
  misc_RNA (1)...(19): siRNA sense strand
gaaugggaaagacagaaga

SEQ ID NO: 709207 - RNA, 19 nt, Homo sapiens
  misc_RNA (1)...(19): siRNA sense strand
caaaugucucggaaagaaa

SEQ ID NO: 709208 - RNA, 19 nt, Homo sapiens
  misc_RNA (1)...(19): siRNA sense strand
gaggagaagaagaugauuc

SEQ ID NO: 709209 - RNA, 19 nt, Homo sapiens
  misc_RNA (1)...(19): siRNA sense strand
gcaacauggacaagaucua

SEQ ID NO: 709210 - RNA, 19 nt, Homo sapiens
  misc_RNA (1)...(19): siRNA sense strand
aggaagaaaugagugaaga

SEQ ID NO: 709211 - RNA, 19 nt, Homo sapiens
  misc_RNA (1)...(19): siRNA sense strand
auaaggaacuccccguaua

SEQ ID NO: 709212 - RNA, 19 nt, Homo sapiens
  misc_RNA (1)...(19): siRNA sense strand
gagugaagaagcagaggaa

SEQ ID NO: 709213 - RNA, 19 nt, Homo sapiens
  misc_RNA (1)...(19): siRNA sense strand
ggaagucagaaaucgauca

SEQ ID NO: 709214 - RNA, 19 nt, Homo sapiens
  misc_RNA (1)...(19): siRNA sense strand
cccaacaucgucaccguua

SEQ ID NO: 709215 - RNA, 19 nt, Homo sapiens
  misc_RNA (1)...(19): siRNA sense strand
gggaaagacagaagagaag

SEQ ID NO: 709216 - RNA, 19 nt, Homo sapiens
  misc_RNA (1)...(19): siRNA sense strand
caaaagacaagaaaacaga

SEQ ID NO: 709217 - RNA, 19 nt, Homo sapiens
  misc_RNA (1)...(19): siRNA sense strand
gaucgaggagggcaccuau

SEQ ID NO: 709218 - RNA, 19 nt, Homo sapiens
  misc_RNA (1)...(19): siRNA sense strand
gaaaugagugaagaugaag

SEQ ID NO: 709219 - RNA, 19 nt, Homo sapiens
  misc_RNA (1)...(19): siRNA sense strand
ggaagaggaggaggaggaa

SEQ ID NO: 709220 - RNA, 19 nt, Homo sapiens
  misc_RNA (1)...(19): siRNA sense strand
caugcuagagugaaagaaa

SEQ ID NO: 709221 - RNA, 19 nt, Homo sapiens
  misc_RNA (1)...(19): siRNA sense strand
gaagagaaaauggaagaaa

SEQ ID NO: 709222 - RNA, 19 nt, Homo sapiens
  misc_RNA (1)...(19): siRNA sense strand
ggaaugggaaagacagaag

SEQ ID NO: 709223 - RNA, 19 nt, Homo sapiens
  misc_RNA (1)...(19): siRNA sense strand
cgucaccguuagagagauu

SEQ ID NO: 709224 - RNA, 19 nt, Homo sapiens
  misc_RNA (1)...(19): siRNA sense strand
gugaagaagcagaggaaga

SEQ ID NO: 709225 - RNA, 19 nt, Homo sapiens
  misc_RNA (1)...(19): siRNA sense strand
cgaagaaguaagugaggaa

SEQ ID NO: 709226 - RNA, 19 nt, Homo sapiens
  misc_RNA (1)...(19): siRNA sense strand
caacauggacaagaucuac

SEQ ID NO: 709227 - RNA, 19 nt, Homo sapiens
  misc_RNA (1)...(19): siRNA sense strand
ggaacaagaggagaaagca

SEQ ID NO: 709228 - RNA, 19 nt, Homo sapiens
  misc_RNA (1)...(19): siRNA sense strand
gaaacgaaggaaggaacaa

SEQ ID NO: 709229 - RNA, 19 nt, Homo sapiens
  misc_RNA (1)...(19): siRNA sense strand
ggaagggagcaccagugaa

SEQ ID NO: 709230 - RNA, 19 nt, Homo sapiens
  misc_RNA (1)...(19): siRNA sense strand
cagaggagaagaagaugau

SEQ ID NO: 709231 - RNA, 19 nt, Homo sapiens
  misc_RNA (1)...(19): siRNA sense strand
guaagugaggaagaaauga

SEQ ID NO: 709232 - RNA, 19 nt, Homo sapiens
  misc_RNA (1)...(19): siRNA sense strand
gcagaaucaggcucagguu

SEQ ID NO: 709233 - RNA, 19 nt, Homo sapiens
  misc_RNA (1)...(19): siRNA sense strand
cagaagagaagggaaaugg

SEQ ID NO: 709234 - RNA, 19 nt, Homo sapiens
  misc_RNA (1)...(19): siRNA sense strand
aggacggccucaagcauga

SEQ ID NO: 709235 - RNA, 19 nt, Homo sapiens
  misc_RNA (1)...(19): siRNA sense strand
gcaccuauggaguggucua

SEQ ID NO: 709236 - RNA, 19 nt, Homo sapiens
  misc_RNA (1)...(19): siRNA sense strand
gacagagggcgacuaugug

SEQ ID NO: 709237 - RNA, 19 nt, Homo sapiens
  misc_RNA (1)...(19): siRNA sense strand
aagaaaugagugaagauga

SEQ ID NO: 709238 - RNA, 19 nt, Homo sapiens
  misc_RNA (1)...(19): siRNA sense strand
ggaaauggcaagggagcau

SEQ ID NO: 709239 - RNA, 19 nt, Homo sapiens
  misc_RNA (1)...(19): siRNA sense strand
agaggagaaagcagagaua

SEQ ID NO: 709240 - RNA, 19 nt, Homo sapiens
  misc_RNA (1)...(19): siRNA sense strand
gaagauggagaaggagaag

SEQ ID NO: 709241 - RNA, 19 nt, Homo sapiens
  misc_RNA (1)...(19): siRNA sense strand
gaggagaccggcagcaacu

SEQ ID NO: 709242 - RNA, 19 nt, Homo sapiens
  misc_RNA (1)...(19): siRNA sense strand
agaaagagagcacgaacgu

SEQ ID NO: 709243 - RNA, 19 nt, Homo sapiens
  misc_RNA (1)...(19): siRNA sense strand
gaggaagaaaugagugaag

SEQ ID NO: 709244 - RNA, 19 nt, Homo sapiens
  misc_RNA (1)...(19): siRNA sense strand
gcagagauaaaacgcuuaa

SEQ ID NO: 709245 - RNA, 19 nt, Homo sapiens
  misc_RNA (1)...(19): siRNA sense strand
ugggaaagacagaagagaa

SEQ ID NO: 709246 - RNA, 19 nt, Homo sapiens
  misc_RNA (1)...(19): siRNA sense strand
ucccagcagucaagaagau

SEQ ID NO: 709247 - RNA, 19 nt, Homo sapiens
  misc_RNA (1)...(19): siRNA sense strand
agaagcagaggaagaagug

SEQ ID NO: 709248 - RNA, 19 nt, Homo sapiens
  misc_RNA (1)...(19): siRNA sense strand
uauggaagacagaggagaa

SEQ ID NO: 709249 - RNA, 19 nt, Homo sapiens
  misc_RNA (1)...(19): siRNA sense strand
ugaagaugaagaacgagaa

SEQ ID NO: 709250 - RNA, 19 nt, Homo sapiens
  misc_RNA (1)...(19): siRNA sense strand
gugaggaagaaaugaguga

SEQ ID NO: 709251 - RNA, 19 nt, Homo sapiens
  misc_RNA (1)...(19): siRNA sense strand
gaacuccccguauagaaga

SEQ ID NO: 709252 - RNA, 19 nt, Homo sapiens
  misc_RNA (1)...(19): siRNA sense strand
ugaaaaggacucuuggaaa

SEQ ID NO: 709253 - RNA, 19 nt, Homo sapiens
  misc_RNA (1)...(19): siRNA sense strand
gaaacgacaucgagaagaa

SEQ ID NO: 709254 - RNA, 19 nt, Homo sapiens
  misc_RNA (1)...(19): siRNA sense strand
gcaaaugucucggaaagaa

SEQ ID NO: 709255 - RNA, 19 nt, Homo sapiens
  misc_RNA (1)...(19): siRNA sense strand
gaaaacagaugaaauugug

SEQ ID NO: 709256 - RNA, 19 nt, Homo sapiens
  misc_RNA (1)...(19): siRNA sense strand
gcauggagaucacaauaag

SEQ ID NO: 709257 - RNA, 19 nt, Homo sapiens
  misc_RNA (1)...(19): siRNA sense strand
gagcaccagugaagaauca

SEQ ID NO: 709258 - RNA, 19 nt, Homo sapiens
  misc_RNA (1)...(19): siRNA sense strand
ugaaacaccugcacgacaa

SEQ ID NO: 709259 - RNA, 19 nt, Homo sapiens
  misc_RNA (1)...(19): siRNA sense strand
gaaaaggacucuuggaaag

SEQ ID NO: 709260 - RNA, 19 nt, Homo sapiens
  misc_RNA (1)...(19): siRNA sense strand
uaaagcggcugaagaugga

SEQ ID NO: 709261 - RNA, 19 nt, Homo sapiens
  misc_RNA (1)...(19): siRNA sense strand
agaaaugagugaagaugaa

SEQ ID NO: 709262 - RNA, 19 nt, Homo sapiens
  misc_RNA (1)...(19): siRNA sense strand
gagugaagaugaagaacga

SEQ ID NO: 709263 - RNA, 19 nt, Homo sapiens
  misc_RNA (1)...(19): siRNA sense strand
gcagcaacauggacaagau

SEQ ID NO: 709264 - RNA, 19 nt, Homo sapiens
  misc_RNA (1)...(19): siRNA sense strand
gaagggagcaccagugaag

SEQ ID NO: 709265 - RNA, 19 nt, Homo sapiens
  misc_RNA (1)...(19): siRNA sense strand
ggaaggaacaagaggagaa

SEQ ID NO: 709266 - RNA, 19 nt, Homo sapiens
  misc_RNA (1)...(19): siRNA sense strand
ggaguggucuacagagcaa

SEQ ID NO: 709267 - RNA, 19 nt, Homo sapiens
  misc_RNA (1)...(19): siRNA sense strand
gaagaugaagaacgagaaa

SEQ ID NO: 709268 - RNA, 19 nt, Homo sapiens
  misc_RNA (1)...(19): siRNA sense strand
gcacgaacgucggaaacga

SEQ ID NO: 709269 - RNA, 19 nt, Homo sapiens
  misc_RNA (1)...(19): siRNA sense strand
gagaagacucuauggaaga

SEQ ID NO: 709270 - RNA, 19 nt, Homo sapiens
  misc_RNA (1)...(19): siRNA sense strand
cagcaaaugucucggaaag

SEQ ID NO: 709271 - RNA, 19 nt, Homo sapiens
  misc_RNA (1)...(19): siRNA sense strand
cagaaaagaugaaaagaga

SEQ ID NO: 709272 - RNA, 19 nt, Homo sapiens
  misc_RNA (1)...(19): siRNA sense strand
gaagaaaugagugaagaug

SEQ ID NO: 709273 - RNA, 19 nt, Homo sapiens
  misc_RNA (1)...(19): siRNA sense strand
agaaguaagugaggaagaa

SEQ ID NO: 709274 - RNA, 19 nt, Homo sapiens
  misc_RNA (1)...(19): siRNA sense strand
ggaagacagaggagaagaa

SEQ ID NO: 709275 - RNA, 19 nt, Homo sapiens
  misc_RNA (1)...(19): siRNA sense strand
gaaggaacaagaggagaaa

SEQ ID NO: 709276 - RNA, 19 nt, Homo sapiens
  misc_RNA (1)...(19): siRNA sense strand
ugacagagggcgacuaugu

SEQ ID NO: 709277 - RNA, 19 nt, Homo sapiens
  misc_RNA (1)...(19): siRNA sense strand
ggagaaagcagagauaaaa

SEQ ID NO: 709278 - RNA, 19 nt, Homo sapiens
  misc_RNA (1)...(19): siRNA sense strand
gagaagaacaggauaaagc

SEQ ID NO: 709279 - RNA, 19 nt, Homo sapiens
  misc_RNA (1)...(19): siRNA sense strand
gaggagaaagcagagauaa

SEQ ID NO: 709280 - RNA, 19 nt, Homo sapiens
  misc_RNA (1)...(19): siRNA sense strand
ugaagaagcagaggaagaa

SEQ ID NO: 709281 - RNA, 19 nt, Homo sapiens
  misc_RNA (1)...(19): siRNA sense strand
gagcauuccaggagagaaa

SEQ ID NO: 709282 - RNA, 19 nt, Homo sapiens
  misc_RNA (1)...(19): siRNA sense strand
aaggagggcuucccgauca

SEQ ID NO: 709283 - RNA, 19 nt, Homo sapiens
  misc_RNA (1)...(19): siRNA sense strand
gcuucgaccucaugaacaa

SEQ ID NO: 709284 - RNA, 19 nt, Homo sapiens
  misc_RNA (1)...(19): siRNA sense strand
gaaguaagugaggaagaaa

SEQ ID NO: 709285 - RNA, 19 nt, Homo sapiens
  misc_RNA (1)...(19): siRNA sense strand
caacaucgucaccguuaga

SEQ ID NO: 709286 - RNA, 19 nt, Homo sapiens
  misc_RNA (1)...(19): siRNA sense strand
ugagggagaucaacaccau

SEQ ID NO: 709287 - RNA, 19 nt, Homo sapiens
  misc_RNA (1)...(19): siRNA sense strand
aaaggacucuuggaaagug

SEQ ID NO: 709288 - RNA, 19 nt, Homo sapiens
  misc_RNA (1)...(19): siRNA sense strand
gcucuaaagcggcugaaga

SEQ ID NO: 709289 - RNA, 19 nt, Homo sapiens
  misc_RNA (1)...(19): siRNA sense strand
ggcugaagauggagaagga

SEQ ID NO: 709290 - RNA, 19 nt, Homo sapiens
  misc_RNA (1)...(19): siRNA sense strand
agacagaggagaagaagau

SEQ ID NO: 709291 - RNA, 19 nt, Homo sapiens
  misc_RNA (1)...(19): siRNA sense strand
gaucaacaccauccucaag

SEQ ID NO: 709292 - RNA, 19 nt, Homo sapiens
  misc_RNA (1)...(19): siRNA sense strand
gaugaaauuguggcucuaa

SEQ ID NO: 709293 - RNA, 19 nt, Homo sapiens
  misc_RNA (1)...(19): siRNA sense strand
gaaucaggcucagguucug

SEQ ID NO: 709294 - RNA, 19 nt, Homo sapiens
  misc_RNA (1)...(19): siRNA sense strand
gaggugaagacccugauga

SEQ ID NO: 709295 - RNA, 19 nt, Homo sapiens
  misc_RNA (1)...(19): siRNA sense strand
ggaggaggaggaagaggaa

SEQ ID NO: 709296 - RNA, 19 nt, Homo sapiens
  misc_RNA (1)...(19): siRNA sense strand
ggaaacgacaucgagaaga

SEQ ID NO: 709297 - RNA, 19 nt, Homo sapiens
  misc_RNA (1)...(19): siRNA sense strand
agucagaaaucgaucagau

SEQ ID NO: 709298 - RNA, 19 nt, Homo sapiens
  misc_RNA (1)...(19): siRNA sense strand
ucacgucgcugagggagau

SEQ ID NO: 709299 - RNA, 19 nt, Homo sapiens
  misc_RNA (1)...(19): siRNA sense strand
gaaauuguggcucuaaagc

SEQ ID NO: 709300 - RNA, 19 nt, Homo sapiens
  misc_RNA (1)...(19): siRNA sense strand
gucaguggguugcaucuuc

SEQ ID NO: 709301 - RNA, 19 nt, Homo sapiens
  misc_RNA (1)...(19): siRNA sense strand
ugaagacccugaugaucca

SEQ ID NO: 709302 - RNA, 19 nt, Homo sapiens
  misc_RNA (1)...(19): siRNA sense strand
gaagacagaggagaagaag

SEQ ID NO: 709303 - RNA, 19 nt, Homo sapiens
  misc_RNA (1)...(19): siRNA sense strand
gaagaacgagaaaaugaaa

SEQ ID NO: 709304 - RNA, 19 nt, Homo sapiens
  misc_RNA (1)...(19): siRNA sense strand
ggaagaaaugagugaagau

SEQ ID NO: 709305 - RNA, 19 nt, Homo sapiens
  misc_RNA (1)...(19): siRNA sense strand
agacagaagagaagggaaa

SEQ ID NO: 709306 - RNA, 19 nt, Homo sapiens
  misc_RNA (1)...(19): siRNA sense strand
gaaugggaaagacagaaga

SEQ ID NO: 709307 - RNA, 19 nt, Homo sapiens
  misc_RNA (1)...(19): siRNA sense strand
caaaugucucggaaagaaa

SEQ ID NO: 709308 - RNA, 19 nt, Homo sapiens
  misc_RNA (1)...(19): siRNA sense strand
gaggagaagaagaugauuc

SEQ ID NO: 709309 - RNA, 19 nt, Homo sapiens
  misc_RNA (1)...(19): siRNA sense strand
gcaacauggacaagaucua

SEQ ID NO: 709310 - RNA, 19 nt, Homo sapiens
  misc_RNA (1)...(19): siRNA sense strand
aggaagaaaugagugaaga

SEQ ID NO: 709311 - RNA, 19 nt, Homo sapiens
  misc_RNA (1)...(19): siRNA sense strand
auaaggaacuccccguaua

SEQ ID NO: 709312 - RNA, 19 nt, Homo sapiens
  misc_RNA (1)...(19): siRNA sense strand
gagugaagaagcagaggaa

SEQ ID NO: 709313 - RNA, 19 nt, Homo sapiens
  misc_RNA (1)...(19): siRNA sense strand
ggaagucagaaaucgauca

SEQ ID NO: 709314 - RNA, 19 nt, Homo sapiens
  misc_RNA (1)...(19): siRNA sense strand
cccaacaucgucaccguua

SEQ ID NO: 709315 - RNA, 19 nt, Homo sapiens
  misc_RNA (1)...(19): siRNA sense strand
gggaaagacagaagagaag

SEQ ID NO: 709316 - RNA, 19 nt, Homo sapiens
  misc_RNA (1)...(19): siRNA sense strand
caaaagacaagaaaacaga

SEQ ID NO: 709317 - RNA, 19 nt, Homo sapiens
  misc_RNA (1)...(19): siRNA sense strand
gaucgaggagggcaccuau

SEQ ID NO: 709318 - RNA, 19 nt, Homo sapiens
  misc_RNA (1)...(19): siRNA sense strand
gaaaugagugaagaugaag

SEQ ID NO: 709319 - RNA, 19 nt, Homo sapiens
  misc_RNA (1)...(19): siRNA sense strand
ggaagaggaggaggaggaa

SEQ ID NO: 709320 - RNA, 19 nt, Homo sapiens
  misc_RNA (1)...(19): siRNA sense strand
caugcuagagugaaagaaa

SEQ ID NO: 709321 - RNA, 19 nt, Homo sapiens
  misc_RNA (1)...(19): siRNA sense strand
gaagagaaaauggaagaaa

SEQ ID NO: 709322 - RNA, 19 nt, Homo sapiens
  misc_RNA (1)...(19): siRNA sense strand
ggaaugggaaagacagaag

SEQ ID NO: 709323 - RNA, 19 nt, Homo sapiens
  misc_RNA (1)...(19): siRNA sense strand
cgucaccguuagagagauu

SEQ ID NO: 709324 - RNA, 19 nt, Homo sapiens
  misc_RNA (1)...(19): siRNA sense strand
gugaagaagcagaggaaga

SEQ ID NO: 709325 - RNA, 19 nt, Homo sapiens
  misc_RNA (1)...(19): siRNA sense strand
cgaagaaguaagugaggaa

SEQ ID NO: 709326 - RNA, 19 nt, Homo sapiens
  misc_RNA (1)...(19): siRNA sense strand
caacauggacaagaucuac

SEQ ID NO: 709327 - RNA, 19 nt, Homo sapiens
  misc_RNA (1)...(19): siRNA sense strand
ggaacaagaggagaaagca

SEQ ID NO: 709328 - RNA, 19 nt, Homo sapiens
  misc_RNA (1)...(19): siRNA sense strand
gaaacgaaggaaggaacaa

SEQ ID NO: 709329 - RNA, 19 nt, Homo sapiens
  misc_RNA (1)...(19): siRNA sense strand
ggaagggagcaccagugaa

SEQ ID NO: 709330 - RNA, 19 nt, Homo sapiens
  misc_RNA (1)...(19): siRNA sense strand
cagaggagaagaagaugau

SEQ ID NO: 709331 - RNA, 19 nt, Homo sapiens
  misc_RNA (1)...(19): siRNA sense strand
guaagugaggaagaaauga

SEQ ID NO: 709332 - RNA, 19 nt, Homo sapiens
  misc_RNA (1)...(19): siRNA sense strand
gcagaaucaggcucagguu

SEQ ID NO: 709333 - RNA, 19 nt, Homo sapiens
  misc_RNA (1)...(19): siRNA sense strand
cagaagagaagggaaaugg

SEQ ID NO: 709334 - RNA, 19 nt, Homo sapiens
  misc_RNA (1)...(19): siRNA sense strand
aggacggccucaagcauga

SEQ ID NO: 709335 - RNA, 19 nt, Homo sapiens
  misc_RNA (1)...(19): siRNA sense strand
gcaccuauggaguggucua

SEQ ID NO: 709336 - RNA, 19 nt, Homo sapiens
  misc_RNA (1)...(19): siRNA sense strand
gacagagggcgacuaugug

SEQ ID NO: 709337 - RNA, 19 nt, Homo sapiens
  misc_RNA (1)...(19): siRNA sense strand
aagaaaugagugaagauga

SEQ ID NO: 709338 - RNA, 19 nt, Homo sapiens
  misc_RNA (1)...(19): siRNA sense strand
ggaaauggcaagggagcau

SEQ ID NO: 709339 - RNA, 19 nt, Homo sapiens
  misc_RNA (1)...(19): siRNA sense strand
agaggagaaagcagagaua

SEQ ID NO: 709340 - RNA, 19 nt, Homo sapiens
  misc_RNA (1)...(19): siRNA sense strand
gaagauggagaaggagaag

SEQ ID NO: 709341 - RNA, 19 nt, Homo sapiens
  misc_RNA (1)...(19): siRNA sense strand
gaggagaccggcagcaacu

SEQ ID NO: 709342 - RNA, 19 nt, Homo sapiens
  misc_RNA (1)...(19): siRNA sense strand
agaaagagagcacgaacgu

SEQ ID NO: 709343 - RNA, 19 nt, Homo sapiens
  misc_RNA (1)...(19): siRNA sense strand
gaggaagaaaugagugaag

SEQ ID NO: 709344 - RNA, 19 nt, Homo sapiens
  misc_RNA (1)...(19): siRNA sense strand
gcagagauaaaacgcuuaa

SEQ ID NO: 709345 - RNA, 19 nt, Homo sapiens
  misc_RNA (1)...(19): siRNA sense strand
ugggaaagacagaagagaa

SEQ ID NO: 709346 - RNA, 19 nt, Homo sapiens
  misc_RNA (1)...(19): siRNA sense strand
ucccagcagucaagaagau

SEQ ID NO: 709347 - RNA, 19 nt, Homo sapiens
  misc_RNA (1)...(19): siRNA sense strand
agaagcagaggaagaagug

SEQ ID NO: 709348 - RNA, 19 nt, Homo sapiens
  misc_RNA (1)...(19): siRNA sense strand
uauggaagacagaggagaa

SEQ ID NO: 709349 - RNA, 19 nt, Homo sapiens
  misc_RNA (1)...(19): siRNA sense strand
ugaagaugaagaacgagaa

SEQ ID NO: 709350 - RNA, 19 nt, Homo sapiens
  misc_RNA (1)...(19): siRNA sense strand
gugaggaagaaaugaguga

SEQ ID NO: 709351 - RNA, 19 nt, Homo sapiens
  misc_RNA (1)...(19): siRNA sense strand
gaacuccccguauagaaga

SEQ ID NO: 709352 - RNA, 19 nt, Homo sapiens
  misc_RNA (1)...(19): siRNA sense strand
ugaaaaggacucuuggaaa

SEQ ID NO: 709353 - RNA, 19 nt, Homo sapiens
  misc_RNA (1)...(19): siRNA sense strand
gaaacgacaucgagaagaa

SEQ ID NO: 709354 - RNA, 19 nt, Homo sapiens
  misc_RNA (1)...(19): siRNA sense strand
gcaaaugucucggaaagaa

SEQ ID NO: 709355 - RNA, 19 nt, Homo sapiens
  misc_RNA (1)...(19): siRNA sense strand
gaaaacagaugaaauugug

SEQ ID NO: 709356 - RNA, 19 nt, Homo sapiens
  misc_RNA (1)...(19): siRNA sense strand
gcauggagaucacaauaag

SEQ ID NO: 709357 - RNA, 19 nt, Homo sapiens
  misc_RNA (1)...(19): siRNA sense strand
gagcaccagugaagaauca

SEQ ID NO: 709358 - RNA, 19 nt, Homo sapiens
  misc_RNA (1)...(19): siRNA sense strand
ugaaacaccugcacgacaa

SEQ ID NO: 709359 - RNA, 19 nt, Homo sapiens
  misc_RNA (1)...(19): siRNA sense strand
gaaaaggacucuuggaaag

SEQ ID NO: 709360 - RNA, 19 nt, Homo sapiens
  misc_RNA (1)...(19): siRNA sense strand
uaaagcggcugaagaugga

SEQ ID NO: 709361 - RNA, 19 nt, Homo sapiens
  misc_RNA (1)...(19): siRNA sense strand
agaaaugagugaagaugaa

SEQ ID NO: 709362 - RNA, 19 nt, Homo sapiens
  misc_RNA (1)...(19): siRNA sense strand
gagugaagaugaagaacga

SEQ ID NO: 709363 - RNA, 19 nt, Homo sapiens
  misc_RNA (1)...(19): siRNA sense strand
gcagcaacauggacaagau

SEQ ID NO: 709364 - RNA, 19 nt, Homo sapiens
  misc_RNA (1)...(19): siRNA sense strand
gaagggagcaccagugaag

SEQ ID NO: 709365 - RNA, 19 nt, Homo sapiens
  misc_RNA (1)...(19): siRNA sense strand
ggaaggaacaagaggagaa

SEQ ID NO: 709366 - RNA, 19 nt, Homo sapiens
  misc_RNA (1)...(19): siRNA sense strand
ggaguggucuacagagcaa

SEQ ID NO: 709367 - RNA, 19 nt, Homo sapiens
  misc_RNA (1)...(19): siRNA sense strand
gaagaugaagaacgagaaa

SEQ ID NO: 709368 - RNA, 19 nt, Homo sapiens
  misc_RNA (1)...(19): siRNA sense strand
gcacgaacgucggaaacga

SEQ ID NO: 709369 - RNA, 19 nt, Homo sapiens
  misc_RNA (1)...(19): siRNA sense strand
gagaagacucuauggaaga

SEQ ID NO: 709370 - RNA, 19 nt, Homo sapiens
  misc_RNA (1)...(19): siRNA sense strand
cagcaaaugucucggaaag

SEQ ID NO: 709371 - RNA, 19 nt, Homo sapiens
  misc_RNA (1)...(19): siRNA sense strand
cagaaaagaugaaaagaga

SEQ ID NO: 709372 - RNA, 19 nt, Homo sapiens
  misc_RNA (1)...(19): siRNA sense strand
gaagaaaugagugaagaug

SEQ ID NO: 709373 - RNA, 19 nt, Homo sapiens
  misc_RNA (1)...(19): siRNA sense strand
agaaguaagugaggaagaa

SEQ ID NO: 709374 - RNA, 19 nt, Homo sapiens
  misc_RNA (1)...(19): siRNA sense strand
ggaagacagaggagaagaa

SEQ ID NO: 709375 - RNA, 19 nt, Homo sapiens
  misc_RNA (1)...(19): siRNA sense strand
gaaggaacaagaggagaaa

SEQ ID NO: 709376 - RNA, 19 nt, Homo sapiens
  misc_RNA (1)...(19): siRNA sense strand
ugacagagggcgacuaugu

SEQ ID NO: 709377 - RNA, 19 nt, Homo sapiens
  misc_RNA (1)...(19): siRNA sense strand
ggagaaagcagagauaaaa

SEQ ID NO: 709378 - RNA, 19 nt, Homo sapiens
  misc_RNA (1)...(19): siRNA sense strand
gagaagaacaggauaaagc

SEQ ID NO: 709379 - RNA, 19 nt, Homo sapiens
  misc_RNA (1)...(19): siRNA sense strand
gaggagaaagcagagauaa

SEQ ID NO: 709380 - RNA, 19 nt, Homo sapiens
  misc_RNA (1)...(19): siRNA sense strand
ugaagaagcagaggaagaa

SEQ ID NO: 709381 - RNA, 19 nt, Homo sapiens
  misc_RNA (1)...(19): siRNA sense strand
gagcauuccaggagagaaa

SEQ ID NO: 709382 - RNA, 19 nt, Homo sapiens
  misc_RNA (1)...(19): siRNA sense strand
aaggagggcuucccgauca

SEQ ID NO: 709383 - RNA, 19 nt, Homo sapiens
  misc_RNA (1)...(19): siRNA sense strand
gcuucgaccucaugaacaa

SEQ ID NO: 709384 - RNA, 19 nt, Homo sapiens
  misc_RNA (1)...(19): siRNA sense strand
gaaguaagugaggaagaaa

SEQ ID NO: 709385 - RNA, 19 nt, Homo sapiens
  misc_RNA (1)...(19): siRNA sense strand
caacaucgucaccguuaga

SEQ ID NO: 709386 - RNA, 19 nt, Homo sapiens
  misc_RNA (1)...(19): siRNA sense strand
ugagggagaucaacaccau

SEQ ID NO: 709387 - RNA, 19 nt, Homo sapiens
  misc_RNA (1)...(19): siRNA sense strand
aaaggacucuuggaaagug

SEQ ID NO: 709388 - RNA, 19 nt, Homo sapiens
  misc_RNA (1)...(19): siRNA sense strand
gcucuaaagcggcugaaga

SEQ ID NO: 709389 - RNA, 19 nt, Homo sapiens
  misc_RNA (1)...(19): siRNA sense strand
ggcugaagauggagaagga

SEQ ID NO: 709390 - RNA, 19 nt, Homo sapiens
  misc_RNA (1)...(19): siRNA sense strand
agacagaggagaagaagau

SEQ ID NO: 709391 - RNA, 19 nt, Homo sapiens
  misc_RNA (1)...(19): siRNA sense strand
gaucaacaccauccucaag

SEQ ID NO: 709392 - RNA, 19 nt, Homo sapiens
  misc_RNA (1)...(19): siRNA sense strand
gaugaaauuguggcucuaa

SEQ ID NO: 709393 - RNA, 19 nt, Homo sapiens
  misc_RNA (1)...(19): siRNA sense strand
gaaucaggcucagguucug

SEQ ID NO: 709394 - RNA, 19 nt, Homo sapiens
  misc_RNA (1)...(19): siRNA sense strand
gaggugaagacccugauga

SEQ ID NO: 709395 - RNA, 19 nt, Homo sapiens
  misc_RNA (1)...(19): siRNA sense strand
ggaggaggaggaagaggaa

SEQ ID NO: 709396 - RNA, 19 nt, Homo sapiens
  misc_RNA (1)...(19): siRNA sense strand
ggaaacgacaucgagaaga

SEQ ID NO: 709397 - RNA, 19 nt, Homo sapiens
  misc_RNA (1)...(19): siRNA sense strand
agucagaaaucgaucagau

SEQ ID NO: 709398 - RNA, 19 nt, Homo sapiens
  misc_RNA (1)...(19): siRNA sense strand
ucacgucgcugagggagau

SEQ ID NO: 709399 - RNA, 19 nt, Homo sapiens
  misc_RNA (1)...(19): siRNA sense strand
gaaauuguggcucuaaagc

SEQ ID NO: 709400 - RNA, 19 nt, Homo sapiens
  misc_RNA (1)...(19): siRNA sense strand
gucaguggguugcaucuuc

SEQ ID NO: 709401 - RNA, 19 nt, Homo sapiens
  misc_RNA (1)...(19): siRNA sense strand
ugaagacccugaugaucca

SEQ ID NO: 709402 - RNA, 19 nt, Homo sapiens
  misc_RNA (1)...(19): siRNA sense strand
gaagacagaggagaagaag

SEQ ID NO: 709403 - RNA, 19 nt, Homo sapiens
  misc_RNA (1)...(19): siRNA sense strand
gaagaacgagaaaaugaaa

SEQ ID NO: 709404 - RNA, 19 nt, Homo sapiens
  misc_RNA (1)...(19): siRNA sense strand
ggaagaaaugagugaagau

SEQ ID NO: 709405 - RNA, 19 nt, Homo sapiens
  misc_RNA (1)...(19): siRNA sense strand
agacagaagagaagggaaa

SEQ ID NO: 709406 - RNA, 19 nt, Homo sapiens
  misc_RNA (1)...(19): siRNA sense strand
gaaugggaaagacagaaga

SEQ ID NO: 709407 - RNA, 19 nt, Homo sapiens
  misc_RNA (1)...(19): siRNA sense strand
caaaugucucggaaagaaa

SEQ ID NO: 709408 - RNA, 19 nt, Homo sapiens
  misc_RNA (1)...(19): siRNA sense strand
gaggagaagaagaugauuc

SEQ ID NO: 709409 - RNA, 19 nt, Homo sapiens
  misc_RNA (1)...(19): siRNA sense strand
gcaacauggacaagaucua

SEQ ID NO: 709410 - RNA, 19 nt, Homo sapiens
  misc_RNA (1)...(19): siRNA sense strand
aggaagaaaugagugaaga

SEQ ID NO: 709411 - RNA, 19 nt, Homo sapiens
  misc_RNA (1)...(19): siRNA sense strand
auaaggaacuccccguaua

SEQ ID NO: 709412 - RNA, 19 nt, Homo sapiens
  misc_RNA (1)...(19): siRNA sense strand
gagugaagaagcagaggaa

SEQ ID NO: 709413 - RNA, 19 nt, Homo sapiens
  misc_RNA (1)...(19): siRNA sense strand
ggaagucagaaaucgauca

SEQ ID NO: 709414 - RNA, 19 nt, Homo sapiens
  misc_RNA (1)...(19): siRNA sense strand
cccaacaucgucaccguua

SEQ ID NO: 709415 - RNA, 19 nt, Homo sapiens
  misc_RNA (1)...(19): siRNA sense strand
gggaaagacagaagagaag

SEQ ID NO: 709416 - RNA, 19 nt, Homo sapiens
  misc_RNA (1)...(19): siRNA sense strand
caaaagacaagaaaacaga

SEQ ID NO: 709417 - RNA, 19 nt, Homo sapiens
  misc_RNA (1)...(19): siRNA sense strand
gaucgaggagggcaccuau

SEQ ID NO: 709418 - RNA, 19 nt, Homo sapiens
  misc_RNA (1)...(19): siRNA sense strand
gaaaugagugaagaugaag

SEQ ID NO: 709419 - RNA, 19 nt, Homo sapiens
  misc_RNA (1)...(19): siRNA sense strand
ggaagaggaggaggaggaa

SEQ ID NO: 709420 - RNA, 19 nt, Homo sapiens
  misc_RNA (1)...(19): siRNA sense strand
caugcuagagugaaagaaa

SEQ ID NO: 709421 - RNA, 19 nt, Homo sapiens
  misc_RNA (1)...(19): siRNA sense strand
gaagagaaaauggaagaaa

SEQ ID NO: 709422 - RNA, 19 nt, Homo sapiens
  misc_RNA (1)...(19): siRNA sense strand
ggaaugggaaagacagaag

SEQ ID NO: 709423 - RNA, 19 nt, Homo sapiens
  misc_RNA (1)...(19): siRNA sense strand
cgucaccguuagagagauu

SEQ ID NO: 709424 - RNA, 19 nt, Homo sapiens
  misc_RNA (1)...(19): siRNA sense strand
gugaagaagcagaggaaga

SEQ ID NO: 709425 - RNA, 19 nt, Homo sapiens
  misc_RNA (1)...(19): siRNA sense strand
cgaagaaguaagugaggaa

SEQ ID NO: 709426 - RNA, 19 nt, Homo sapiens
  misc_RNA (1)...(19): siRNA sense strand
caacauggacaagaucuac

SEQ ID NO: 709427 - RNA, 19 nt, Homo sapiens
  misc_RNA (1)...(19): siRNA sense strand
ggaacaagaggagaaagca

SEQ ID NO: 709428 - RNA, 19 nt, Homo sapiens
  misc_RNA (1)...(19): siRNA sense strand
gaaacgaaggaaggaacaa

SEQ ID NO: 709429 - RNA, 19 nt, Homo sapiens
  misc_RNA (1)...(19): siRNA sense strand
ggaagggagcaccagugaa

SEQ ID NO: 709430 - RNA, 19 nt, Homo sapiens
  misc_RNA (1)...(19): siRNA sense strand
cagaggagaagaagaugau

SEQ ID NO: 709431 - RNA, 19 nt, Homo sapiens
  misc_RNA (1)...(19): siRNA sense strand
guaagugaggaagaaauga

SEQ ID NO: 709432 - RNA, 19 nt, Homo sapiens
  misc_RNA (1)...(19): siRNA sense strand
gcagaaucaggcucagguu

SEQ ID NO: 709433 - RNA, 19 nt, Homo sapiens
  misc_RNA (1)...(19): siRNA sense strand
cagaagagaagggaaaugg

SEQ ID NO: 709434 - RNA, 19 nt, Homo sapiens
  misc_RNA (1)...(19): siRNA sense strand
aggacggccucaagcauga

SEQ ID NO: 709435 - RNA, 19 nt, Homo sapiens
  misc_RNA (1)...(19): siRNA sense strand
gcaccuauggaguggucua

SEQ ID NO: 709436 - RNA, 19 nt, Homo sapiens
  misc_RNA (1)...(19): siRNA sense strand
gacagagggcgacuaugug

SEQ ID NO: 709437 - RNA, 19 nt, Homo sapiens
  misc_RNA (1)...(19): siRNA sense strand
aagaaaugagugaagauga

SEQ ID NO: 709438 - RNA, 19 nt, Homo sapiens
  misc_RNA (1)...(19): siRNA sense strand
ggaaauggcaagggagcau

SEQ ID NO: 709439 - RNA, 19 nt, Homo sapiens
  misc_RNA (1)...(19): siRNA sense strand
agaggagaaagcagagaua

SEQ ID NO: 709440 - RNA, 19 nt, Homo sapiens
  misc_RNA (1)...(19): siRNA sense strand
gaagauggagaaggagaag

SEQ ID NO: 709441 - RNA, 19 nt, Homo sapiens
  misc_RNA (1)...(19): siRNA sense strand
gaggagaccggcagcaacu

SEQ ID NO: 709442 - RNA, 19 nt, Homo sapiens
  misc_RNA (1)...(19): siRNA sense strand
agaaagagagcacgaacgu

SEQ ID NO: 709443 - RNA, 19 nt, Homo sapiens
  misc_RNA (1)...(19): siRNA sense strand
gaggaagaaaugagugaag

SEQ ID NO: 709444 - RNA, 19 nt, Homo sapiens
  misc_RNA (1)...(19): siRNA sense strand
gcagagauaaaacgcuuaa

SEQ ID NO: 709445 - RNA, 19 nt, Homo sapiens
  misc_RNA (1)...(19): siRNA sense strand
ugggaaagacagaagagaa

SEQ ID NO: 709446 - RNA, 19 nt, Homo sapiens
  misc_RNA (1)...(19): siRNA sense strand
ucccagcagucaagaagau

SEQ ID NO: 709447 - RNA, 19 nt, Homo sapiens
  misc_RNA (1)...(19): siRNA sense strand
agaagcagaggaagaagug

SEQ ID NO: 709448 - RNA, 19 nt, Homo sapiens
  misc_RNA (1)...(19): siRNA sense strand
uauggaagacagaggagaa

SEQ ID NO: 709449 - RNA, 19 nt, Homo sapiens
  misc_RNA (1)...(19): siRNA sense strand
ugaagaugaagaacgagaa

SEQ ID NO: 709450 - RNA, 19 nt, Homo sapiens
  misc_RNA (1)...(19): siRNA sense strand
gugaggaagaaaugaguga

SEQ ID NO: 709451 - RNA, 19 nt, Homo sapiens
  misc_RNA (1)...(19): siRNA sense strand
gaacuccccguauagaaga

SEQ ID NO: 709452 - RNA, 19 nt, Homo sapiens
  misc_RNA (1)...(19): siRNA sense strand
ugaaaaggacucuuggaaa

SEQ ID NO: 709453 - RNA, 19 nt, Homo sapiens
  misc_RNA (1)...(19): siRNA sense strand
gaaacgacaucgagaagaa

SEQ ID NO: 709454 - RNA, 19 nt, Homo sapiens
  misc_RNA (1)...(19): siRNA sense strand
gcaaaugucucggaaagaa

SEQ ID NO: 709455 - RNA, 19 nt, Homo sapiens
  misc_RNA (1)...(19): siRNA sense strand
gaaaacagaugaaauugug

SEQ ID NO: 709456 - RNA, 19 nt, Homo sapiens
  misc_RNA (1)...(19): siRNA sense strand
gcauggagaucacaauaag

SEQ ID NO: 709457 - RNA, 19 nt, Homo sapiens
  misc_RNA (1)...(19): siRNA sense strand
gagcaccagugaagaauca

SEQ ID NO: 709458 - RNA, 19 nt, Homo sapiens
  misc_RNA (1)...(19): siRNA sense strand
ugaaacaccugcacgacaa

SEQ ID NO: 709459 - RNA, 19 nt, Homo sapiens
  misc_RNA (1)...(19): siRNA sense strand
gaaaaggacucuuggaaag

SEQ ID NO: 709460 - RNA, 19 nt, Homo sapiens
  misc_RNA (1)...(19): siRNA sense strand
uaaagcggcugaagaugga

SEQ ID NO: 709461 - RNA, 19 nt, Homo sapiens
  misc_RNA (1)...(19): siRNA sense strand
agaaaugagugaagaugaa

SEQ ID NO: 709462 - RNA, 19 nt, Homo sapiens
  misc_RNA (1)...(19): siRNA sense strand
gagugaagaugaagaacga

SEQ ID NO: 709463 - RNA, 19 nt, Homo sapiens
  misc_RNA (1)...(19): siRNA sense strand
gcagcaacauggacaagau

SEQ ID NO: 709464 - RNA, 19 nt, Homo sapiens
  misc_RNA (1)...(19): siRNA sense strand
gaagggagcaccagugaag

SEQ ID NO: 709465 - RNA, 19 nt, Homo sapiens
  misc_RNA (1)...(19): siRNA sense strand
ggaaggaacaagaggagaa

SEQ ID NO: 709466 - RNA, 19 nt, Homo sapiens
  misc_RNA (1)...(19): siRNA sense strand
ggaguggucuacagagcaa

SEQ ID NO: 709467 - RNA, 19 nt, Homo sapiens
  misc_RNA (1)...(19): siRNA sense strand
gaagaugaagaacgagaaa

SEQ ID NO: 709468 - RNA, 19 nt, Homo sapiens
  misc_RNA (1)...(19): siRNA sense strand
gcacgaacgucggaaacga

SEQ ID NO: 709469 - RNA, 19 nt, Homo sapiens
  misc_RNA (1)...(19): siRNA sense strand
gagaagacucuauggaaga

SEQ ID NO: 709470 - RNA, 19 nt, Homo sapiens
  misc_RNA (1)...(19): siRNA sense strand
cagcaaaugucucggaaag

SEQ ID NO: 709471 - RNA, 19 nt, Homo sapiens
  misc_RNA (1)...(19): siRNA sense strand
cagaaaagaugaaaagaga

SEQ ID NO: 709472 - RNA, 19 nt, Homo sapiens
  misc_RNA (1)...(19): siRNA sense strand
gaagaaaugagugaagaug

SEQ ID NO: 709473 - RNA, 19 nt, Homo sapiens
  misc_RNA (1)...(19): siRNA sense strand
agaaguaagugaggaagaa

SEQ ID NO: 709474 - RNA, 19 nt, Homo sapiens
  misc_RNA (1)...(19): siRNA sense strand
ggaagacagaggagaagaa

SEQ ID NO: 709475 - RNA, 19 nt, Homo sapiens
  misc_RNA (1)...(19): siRNA sense strand
gaaggaacaagaggagaaa

SEQ ID NO: 709476 - RNA, 19 nt, Homo sapiens
  misc_RNA (1)...(19): siRNA sense strand
ugacagagggcgacuaugu

SEQ ID NO: 709477 - RNA, 19 nt, Homo sapiens
  misc_RNA (1)...(19): siRNA sense strand
ggagaaagcagagauaaaa

SEQ ID NO: 709478 - RNA, 19 nt, Homo sapiens
  misc_RNA (1)...(19): siRNA sense strand
gagaagaacaggauaaagc

SEQ ID NO: 709479 - RNA, 19 nt, Homo sapiens
  misc_RNA (1)...(19): siRNA sense strand
gaggagaaagcagagauaa

SEQ ID NO: 709480 - RNA, 19 nt, Homo sapiens
  misc_RNA (1)...(19): siRNA sense strand
ugaagaagcagaggaagaa

SEQ ID NO: 709481 - RNA, 19 nt, Homo sapiens
  misc_RNA (1)...(19): siRNA sense strand
gagcauuccaggagagaaa

SEQ ID NO: 709482 - RNA, 19 nt, Homo sapiens
  misc_RNA (1)...(19): siRNA sense strand
aaggagggcuucccgauca

SEQ ID NO: 709483 - RNA, 19 nt, Homo sapiens
  misc_RNA (1)...(19): siRNA sense strand
gcuucgaccucaugaacaa

SEQ ID NO: 709484 - RNA, 19 nt, Homo sapiens
  misc_RNA (1)...(19): siRNA sense strand
gaaguaagugaggaagaaa

SEQ ID NO: 709485 - RNA, 19 nt, Homo sapiens
  misc_RNA (1)...(19): siRNA sense strand
caacaucgucaccguuaga

SEQ ID NO: 709486 - RNA, 19 nt, Homo sapiens
  misc_RNA (1)...(19): siRNA sense strand
ugagggagaucaacaccau

SEQ ID NO: 709487 - RNA, 19 nt, Homo sapiens
  misc_RNA (1)...(19): siRNA sense strand
aaaggacucuuggaaagug

SEQ ID NO: 709488 - RNA, 19 nt, Homo sapiens
  misc_RNA (1)...(19): siRNA sense strand
gcucuaaagcggcugaaga

SEQ ID NO: 709489 - RNA, 19 nt, Homo sapiens
  misc_RNA (1)...(19): siRNA sense strand
ggcugaagauggagaagga

SEQ ID NO: 709490 - RNA, 19 nt, Homo sapiens
  misc_RNA (1)...(19): siRNA sense strand
agacagaggagaagaagau

SEQ ID NO: 709491 - RNA, 19 nt, Homo sapiens
  misc_RNA (1)...(19): siRNA sense strand
gaucaacaccauccucaag

SEQ ID NO: 709492 - RNA, 19 nt, Homo sapiens
  misc_RNA (1)...(19): siRNA sense strand
gaugaaauuguggcucuaa

SEQ ID NO: 709493 - RNA, 19 nt, Homo sapiens
  misc_RNA (1)...(19): siRNA sense strand
gaaucaggcucagguucug

SEQ ID NO: 709494 - RNA, 19 nt, Homo sapiens
  misc_RNA (1)...(19): siRNA sense strand
gaggugaagacccugauga

SEQ ID NO: 709495 - RNA, 19 nt, Homo sapiens
  misc_RNA (1)...(19): siRNA sense strand
ggaggaggaggaagaggaa

SEQ ID NO: 709496 - RNA, 19 nt, Homo sapiens
  misc_RNA (1)...(19): siRNA sense strand
ggaaacgacaucgagaaga

SEQ ID NO: 709497 - RNA, 19 nt, Homo sapiens
  misc_RNA (1)...(19): siRNA sense strand
agucagaaaucgaucagau

SEQ ID NO: 709498 - RNA, 19 nt, Homo sapiens
  misc_RNA (1)...(19): siRNA sense strand
ucacgucgcugagggagau

SEQ ID NO: 709499 - RNA, 19 nt, Homo sapiens
  misc_RNA (1)...(19): siRNA sense strand
gaaauuguggcucuaaagc

SEQ ID NO: 709500 - RNA, 19 nt, Homo sapiens
  misc_RNA (1)...(19): siRNA sense strand
gucaguggguugcaucuuc

SEQ ID NO: 709501 - RNA, 19 nt, Homo sapiens
  misc_RNA (1)...(19): siRNA sense strand
ugaagacccugaugaucca

SEQ ID NO: 709502 - RNA, 19 nt, Homo sapiens
  misc_RNA (1)...(19): siRNA sense strand
gaagacagaggagaagaag

SEQ ID NO: 709503 - RNA, 19 nt, Homo sapiens
  misc_RNA (1)...(19): siRNA sense strand
gaagaacgagaaaaugaaa

SEQ ID NO: 709504 - RNA, 19 nt, Homo sapiens
  misc_RNA (1)...(19): siRNA sense strand
ggaagaaaugagugaagau

SEQ ID NO: 709505 - RNA, 19 nt, Homo sapiens
  misc_RNA (1)...(19): siRNA sense strand
agacagaagagaagggaaa

SEQ ID NO: 709506 - RNA, 19 nt, Homo sapiens
  misc_RNA (1)...(19): siRNA sense strand
gaaugggaaagacagaaga

SEQ ID NO: 709507 - RNA, 19 nt, Homo sapiens
  misc_RNA (1)...(19): siRNA sense strand
caaaugucucggaaagaaa

SEQ ID NO: 709508 - RNA, 19 nt, Homo sapiens
  misc_RNA (1)...(19): siRNA sense strand
gaggagaagaagaugauuc

SEQ ID NO: 709509 - RNA, 19 nt, Homo sapiens
  misc_RNA (1)...(19): siRNA sense strand
gcaacauggacaagaucua

SEQ ID NO: 709510 - RNA, 19 nt, Homo sapiens
  misc_RNA (1)...(19): siRNA sense strand
aggaagaaaugagugaaga

SEQ ID NO: 709511 - RNA, 19 nt, Homo sapiens
  misc_RNA (1)...(19): siRNA sense strand
auaaggaacuccccguaua

SEQ ID NO: 709512 - RNA, 19 nt, Homo sapiens
  misc_RNA (1)...(19): siRNA sense strand
gagugaagaagcagaggaa

SEQ ID NO: 709513 - RNA, 19 nt, Homo sapiens
  misc_RNA (1)...(19): siRNA sense strand
ggaagucagaaaucgauca

SEQ ID NO: 709514 - RNA, 19 nt, Homo sapiens
  misc_RNA (1)...(19): siRNA sense strand
cccaacaucgucaccguua

SEQ ID NO: 709515 - RNA, 19 nt, Homo sapiens
  misc_RNA (1)...(19): siRNA sense strand
gggaaagacagaagagaag

SEQ ID NO: 709516 - RNA, 19 nt, Homo sapiens
  misc_RNA (1)...(19): siRNA sense strand
caaaagacaagaaaacaga

SEQ ID NO: 709517 - RNA, 19 nt, Homo sapiens
  misc_RNA (1)...(19): siRNA sense strand
gaucgaggagggcaccuau

SEQ ID NO: 709518 - RNA, 19 nt, Homo sapiens
  misc_RNA (1)...(19): siRNA sense strand
gaaaugagugaagaugaag

SEQ ID NO: 709519 - RNA, 19 nt, Homo sapiens
  misc_RNA (1)...(19): siRNA sense strand
ggaagaggaggaggaggaa

SEQ ID NO: 709520 - RNA, 19 nt, Homo sapiens
  misc_RNA (1)...(19): siRNA sense strand
caugcuagagugaaagaaa

SEQ ID NO: 709521 - RNA, 19 nt, Homo sapiens
  misc_RNA (1)...(19): siRNA sense strand
gaagagaaaauggaagaaa

SEQ ID NO: 709522 - RNA, 19 nt, Homo sapiens
  misc_RNA (1)...(19): siRNA sense strand
ggaaugggaaagacagaag

SEQ ID NO: 709523 - RNA, 19 nt, Homo sapiens
  misc_RNA (1)...(19): siRNA sense strand
cgucaccguuagagagauu

SEQ ID NO: 709524 - RNA, 19 nt, Homo sapiens
  misc_RNA (1)...(19): siRNA sense strand
gugaagaagcagaggaaga

SEQ ID NO: 709525 - RNA, 19 nt, Homo sapiens
  misc_RNA (1)...(19): siRNA sense strand
cgaagaaguaagugaggaa

SEQ ID NO: 709526 - RNA, 19 nt, Homo sapiens
  misc_RNA (1)...(19): siRNA sense strand
caacauggacaagaucuac

SEQ ID NO: 709527 - RNA, 19 nt, Homo sapiens
  misc_RNA (1)...(19): siRNA sense strand
ggaacaagaggagaaagca

SEQ ID NO: 709528 - RNA, 19 nt, Homo sapiens
  misc_RNA (1)...(19): siRNA sense strand
gaaacgaaggaaggaacaa

SEQ ID NO: 709529 - RNA, 19 nt, Homo sapiens
  misc_RNA (1)...(19): siRNA sense strand
ggaagggagcaccagugaa

SEQ ID NO: 709530 - RNA, 19 nt, Homo sapiens
  misc_RNA (1)...(19): siRNA sense strand
cagaggagaagaagaugau

SEQ ID NO: 709531 - RNA, 19 nt, Homo sapiens
  misc_RNA (1)...(19): siRNA sense strand
guaagugaggaagaaauga

SEQ ID NO: 709532 - RNA, 19 nt, Homo sapiens
  misc_RNA (1)...(19): siRNA sense strand
gcagaaucaggcucagguu

SEQ ID NO: 709533 - RNA, 19 nt, Homo sapiens
  misc_RNA (1)...(19): siRNA sense strand
cagaagagaagggaaaugg

SEQ ID NO: 709534 - RNA, 19 nt, Homo sapiens
  misc_RNA (1)...(19): siRNA sense strand
aggacggccucaagcauga

SEQ ID NO: 709535 - RNA, 19 nt, Homo sapiens
  misc_RNA (1)...(19): siRNA sense strand
gcaccuauggaguggucua

SEQ ID NO: 709536 - RNA, 19 nt, Homo sapiens
  misc_RNA (1)...(19): siRNA sense strand
gacagagggcgacuaugug

SEQ ID NO: 709537 - RNA, 19 nt, Homo sapiens
  misc_RNA (1)...(19): siRNA sense strand
aagaaaugagugaagauga

SEQ ID NO: 709538 - RNA, 19 nt, Homo sapiens
  misc_RNA (1)...(19): siRNA sense strand
ggaaauggcaagggagcau

SEQ ID NO: 709539 - RNA, 19 nt, Homo sapiens
  misc_RNA (1)...(19): siRNA sense strand
agaggagaaagcagagaua

SEQ ID NO: 709540 - RNA, 19 nt, Homo sapiens
  misc_RNA (1)...(19): siRNA sense strand
gaagauggagaaggagaag

SEQ ID NO: 709541 - RNA, 19 nt, Homo sapiens
  misc_RNA (1)...(19): siRNA sense strand
gaggagaccggcagcaacu

SEQ ID NO: 709542 - RNA, 19 nt, Homo sapiens
  misc_RNA (1)...(19): siRNA sense strand
agaaagagagcacgaacgu

SEQ ID NO: 709543 - RNA, 19 nt, Homo sapiens
  misc_RNA (1)...(19): siRNA sense strand
gaggaagaaaugagugaag

SEQ ID NO: 709544 - RNA, 19 nt, Homo sapiens
  misc_RNA (1)...(19): siRNA sense strand
gcagagauaaaacgcuuaa

SEQ ID NO: 709545 - RNA, 19 nt, Homo sapiens
  misc_RNA (1)...(19): siRNA sense strand
ugggaaagacagaagagaa

SEQ ID NO: 709546 - RNA, 19 nt, Homo sapiens
  misc_RNA (1)...(19): siRNA sense strand
ucccagcagucaagaagau

SEQ ID NO: 709547 - RNA, 19 nt, Homo sapiens
  misc_RNA (1)...(19): siRNA sense strand
agaagcagaggaagaagug

SEQ ID NO: 709548 - RNA, 19 nt, Homo sapiens
  misc_RNA (1)...(19): siRNA sense strand
uauggaagacagaggagaa

SEQ ID NO: 709549 - RNA, 19 nt, Homo sapiens
  misc_RNA (1)...(19): siRNA sense strand
ugaagaugaagaacgagaa

SEQ ID NO: 709550 - RNA, 19 nt, Homo sapiens
  misc_RNA (1)...(19): siRNA sense strand
gugaggaagaaaugaguga

SEQ ID NO: 709551 - RNA, 19 nt, Homo sapiens
  misc_RNA (1)...(19): siRNA sense strand
gaacuccccguauagaaga

SEQ ID NO: 709552 - RNA, 19 nt, Homo sapiens
  misc_RNA (1)...(19): siRNA sense strand
ugaaaaggacucuuggaaa

SEQ ID NO: 709553 - RNA, 19 nt, Homo sapiens
  misc_RNA (1)...(19): siRNA sense strand
gaaaacagaugaaauugug

SEQ ID NO: 709554 - RNA, 19 nt, Homo sapiens
  misc_RNA (1)...(19): siRNA sense strand
gagcaccagugaagaauca

SEQ ID NO: 709555 - RNA, 19 nt, Homo sapiens
  misc_RNA (1)...(19): siRNA sense strand
ugaaacaccugcacgacaa

SEQ ID NO: 709556 - RNA, 19 nt, Homo sapiens
  misc_RNA (1)...(19): siRNA sense strand
uaaagcggcugaagaugga

SEQ ID NO: 709557 - RNA, 19 nt, Homo sapiens
  misc_RNA (1)...(19): siRNA sense strand
agaaaugagugaagaugaa

SEQ ID NO: 709558 - RNA, 19 nt, Homo sapiens
  misc_RNA (1)...(19): siRNA sense strand
gagugaagaugaagaacga

SEQ ID NO: 709559 - RNA, 19 nt, Homo sapiens
  misc_RNA (1)...(19): siRNA sense strand
gcagcaacauggacaagau

SEQ ID NO: 709560 - RNA, 19 nt, Homo sapiens
  misc_RNA (1)...(19): siRNA sense strand
gaagggagcaccagugaag

SEQ ID NO: 709561 - RNA, 19 nt, Homo sapiens
  misc_RNA (1)...(19): siRNA sense strand
gaagaugaagaacgagaaa

SEQ ID NO: 709562 - RNA, 19 nt, Homo sapiens
  misc_RNA (1)...(19): siRNA sense strand
ggaguggucuacagagcaa

SEQ ID NO: 709563 - RNA, 19 nt, Homo sapiens
  misc_RNA (1)...(19): siRNA sense strand
gaagaaaugagugaagaug

SEQ ID NO: 709564 - RNA, 19 nt, Homo sapiens
  misc_RNA (1)...(19): siRNA sense strand
agaaguaagugaggaagaa

SEQ ID NO: 709565 - RNA, 19 nt, Homo sapiens
  misc_RNA (1)...(19): siRNA sense strand
ugacagagggcgacuaugu

SEQ ID NO: 709566 - RNA, 19 nt, Homo sapiens
  misc_RNA (1)...(19): siRNA sense strand
ugaagaagcagaggaagaa

SEQ ID NO: 709567 - RNA, 19 nt, Homo sapiens
  misc_RNA (1)...(19): siRNA sense strand
aaggagggcuucccgauca

SEQ ID NO: 709568 - RNA, 19 nt, Homo sapiens
  misc_RNA (1)...(19): siRNA sense strand
gcuucgaccucaugaacaa

SEQ ID NO: 709569 - RNA, 19 nt, Homo sapiens
  misc_RNA (1)...(19): siRNA sense strand
gaaguaagugaggaagaaa

SEQ ID NO: 709570 - RNA, 19 nt, Homo sapiens
  misc_RNA (1)...(19): siRNA sense strand
caacaucgucaccguuaga

SEQ ID NO: 709571 - RNA, 19 nt, Homo sapiens
  misc_RNA (1)...(19): siRNA sense strand
ugagggagaucaacaccau

SEQ ID NO: 709572 - RNA, 19 nt, Homo sapiens
  misc_RNA (1)...(19): siRNA sense strand
gcucuaaagcggcugaaga

SEQ ID NO: 709573 - RNA, 19 nt, Homo sapiens
  misc_RNA (1)...(19): siRNA sense strand
ggcugaagauggagaagga

SEQ ID NO: 709574 - RNA, 19 nt, Homo sapiens
  misc_RNA (1)...(19): siRNA sense strand
gaugaaauuguggcucuaa

SEQ ID NO: 709575 - RNA, 19 nt, Homo sapiens
  misc_RNA (1)...(19): siRNA sense strand
gaucaacaccauccucaag

SEQ ID NO: 709576 - RNA, 19 nt, Homo sapiens
  misc_RNA (1)...(19): siRNA sense strand
ggaggaggaggaagaggaa

SEQ ID NO: 709577 - RNA, 19 nt, Homo sapiens
  misc_RNA (1)...(19): siRNA sense strand
gaggugaagacccugauga

SEQ ID NO: 709578 - RNA, 19 nt, Homo sapiens
  misc_RNA (1)...(19): siRNA sense strand
gaaucaggcucagguucug

SEQ ID NO: 709579 - RNA, 19 nt, Homo sapiens
  misc_RNA (1)...(19): siRNA sense strand
ucacgucgcugagggagau

SEQ ID NO: 709580 - RNA, 19 nt, Homo sapiens
  misc_RNA (1)...(19): siRNA sense strand
agucagaaaucgaucagau

SEQ ID NO: 709581 - RNA, 19 nt, Homo sapiens
  misc_RNA (1)...(19): siRNA sense strand
gaaauuguggcucuaaagc

SEQ ID NO: 709582 - RNA, 19 nt, Homo sapiens
  misc_RNA (1)...(19): siRNA sense strand
gucaguggguugcaucuuc

SEQ ID NO: 709583 - RNA, 19 nt, Homo sapiens
  misc_RNA (1)...(19): siRNA sense strand
ugaagacccugaugaucca

SEQ ID NO: 709584 - RNA, 19 nt, Homo sapiens
  misc_RNA (1)...(19): siRNA sense strand
ggaagaaaugagugaagau

SEQ ID NO: 709585 - RNA, 19 nt, Homo sapiens
  misc_RNA (1)...(19): siRNA sense strand
gaagaacgagaaaaugaaa

SEQ ID NO: 709586 - RNA, 19 nt, Homo sapiens
  misc_RNA (1)...(19): siRNA sense strand
aggaagaaaugagugaaga

SEQ ID NO: 709587 - RNA, 19 nt, Homo sapiens
  misc_RNA (1)...(19): siRNA sense strand
gcaacauggacaagaucua

SEQ ID NO: 709588 - RNA, 19 nt, Homo sapiens
  misc_RNA (1)...(19): siRNA sense strand
gagugaagaagcagaggaa

SEQ ID NO: 709589 - RNA, 19 nt, Homo sapiens
  misc_RNA (1)...(19): siRNA sense strand
ggaagucagaaaucgauca

SEQ ID NO: 709590 - RNA, 19 nt, Homo sapiens
  misc_RNA (1)...(19): siRNA sense strand
cccaacaucgucaccguua

SEQ ID NO: 709591 - RNA, 19 nt, Homo sapiens
  misc_RNA (1)...(19): siRNA sense strand
gaaaugagugaagaugaag

SEQ ID NO: 709592 - RNA, 19 nt, Homo sapiens
  misc_RNA (1)...(19): siRNA sense strand
ggaagaggaggaggaggaa

SEQ ID NO: 709593 - RNA, 19 nt, Homo sapiens
  misc_RNA (1)...(19): siRNA sense strand
caaaagacaagaaaacaga

SEQ ID NO: 709594 - RNA, 19 nt, Homo sapiens
  misc_RNA (1)...(19): siRNA sense strand
gaucgaggagggcaccuau

SEQ ID NO: 709595 - RNA, 19 nt, Homo sapiens
  misc_RNA (1)...(19): siRNA sense strand
cgaagaaguaagugaggaa

SEQ ID NO: 709596 - RNA, 19 nt, Homo sapiens
  misc_RNA (1)...(19): siRNA sense strand
cgucaccguuagagagauu

SEQ ID NO: 709597 - RNA, 19 nt, Homo sapiens
  misc_RNA (1)...(19): siRNA sense strand
gugaagaagcagaggaaga

SEQ ID NO: 709598 - RNA, 19 nt, Homo sapiens
  misc_RNA (1)...(19): siRNA sense strand
caacauggacaagaucuac

SEQ ID NO: 709599 - RNA, 19 nt, Homo sapiens
  misc_RNA (1)...(19): siRNA sense strand
ggaagggagcaccagugaa

SEQ ID NO: 709600 - RNA, 19 nt, Homo sapiens
  misc_RNA (1)...(19): siRNA sense strand
gcagaaucaggcucagguu

SEQ ID NO: 709601 - RNA, 19 nt, Homo sapiens
  misc_RNA (1)...(19): siRNA sense strand
guaagugaggaagaaauga

SEQ ID NO: 709602 - RNA, 19 nt, Homo sapiens
  misc_RNA (1)...(19): siRNA sense strand
aagaaaugagugaagauga

SEQ ID NO: 709603 - RNA, 19 nt, Homo sapiens
  misc_RNA (1)...(19): siRNA sense strand
aggacggccucaagcauga

SEQ ID NO: 709604 - RNA, 19 nt, Homo sapiens
  misc_RNA (1)...(19): siRNA sense strand
gcaccuauggaguggucua

SEQ ID NO: 709605 - RNA, 19 nt, Homo sapiens
  misc_RNA (1)...(19): siRNA sense strand
gacagagggcgacuaugug

SEQ ID NO: 709606 - RNA, 19 nt, Homo sapiens
  misc_RNA (1)...(19): siRNA sense strand
gaggagaccggcagcaacu

SEQ ID NO: 709607 - RNA, 19 nt, Homo sapiens
  misc_RNA (1)...(19): siRNA sense strand
gaagauggagaaggagaag

SEQ ID NO: 709608 - RNA, 19 nt, Homo sapiens
  misc_RNA (1)...(19): siRNA sense strand
gaggaagaaaugagugaag

SEQ ID NO: 709609 - RNA, 19 nt, Homo sapiens
  misc_RNA (1)...(19): siRNA sense strand
ugaagaugaagaacgagaa

SEQ ID NO: 709610 - RNA, 19 nt, Homo sapiens
  misc_RNA (1)...(19): siRNA sense strand
ucccagcagucaagaagau

SEQ ID NO: 709611 - RNA, 19 nt, Homo sapiens
  misc_RNA (1)...(19): siRNA sense strand
agaagcagaggaagaagug

SEQ ID NO: 709612 - RNA, 19 nt, Homo sapiens
  misc_RNA (1)...(19): siRNA sense strand
gugaggaagaaaugaguga

SEQ ID NO: 709613 - RNA, 19 nt, Homo sapiens
  misc_RNA (1)...(19): siRNA sense strand
gcaccagugaagaaucaga

SEQ ID NO: 709614 - RNA, 19 nt, Homo sapiens
  misc_RNA (1)...(19): siRNA sense strand
ugaagauggagaaggagaa

SEQ ID NO: 709615 - RNA, 19 nt, Homo sapiens
  misc_RNA (1)...(19): siRNA sense strand
aagaggaggaggaggaaga

SEQ ID NO: 709616 - RNA, 19 nt, Homo sapiens
  misc_RNA (1)...(19): siRNA sense strand
acaagguguucaaggaucu

SEQ ID NO: 709617 - RNA, 19 nt, Homo sapiens
  misc_RNA (1)...(19): siRNA sense strand
gaguacggauccccucuga

SEQ ID NO: 709618 - RNA, 19 nt, Homo sapiens
  misc_RNA (1)...(19): siRNA sense strand
ccaacaucgucaccguuag

SEQ ID NO: 709619 - RNA, 19 nt, Homo sapiens
  misc_RNA (1)...(19): siRNA sense strand
gaagucagaaaucgaucag

SEQ ID NO: 709620 - RNA, 19 nt, Homo sapiens
  misc_RNA (1)...(19): siRNA sense strand
ggugaagacccugaugauc

SEQ ID NO: 709621 - RNA, 19 nt, Homo sapiens
  misc_RNA (1)...(19): siRNA sense strand
ugaaauuguggcucuaaag

SEQ ID NO: 709622 - RNA, 19 nt, Homo sapiens
  misc_RNA (1)...(19): siRNA sense strand
gggcuucgaccucaugaac

SEQ ID NO: 709623 - RNA, 19 nt, Homo sapiens
  misc_RNA (1)...(19): siRNA sense strand
ggaggugaagacccugaug

SEQ ID NO: 709624 - RNA, 19 nt, Homo sapiens
  misc_RNA (1)...(19): siRNA sense strand
ggagaccggcagcaacucu

SEQ ID NO: 709625 - RNA, 19 nt, Homo sapiens
  misc_RNA (1)...(19): siRNA sense strand
gaaacgacaucgagaagaa

SEQ ID NO: 709626 - RNA, 19 nt, Homo sapiens
  misc_RNA (1)...(19): siRNA sense strand
gcaaaugucucggaaagaa

SEQ ID NO: 709627 - RNA, 19 nt, Homo sapiens
  misc_RNA (1)...(19): siRNA sense strand
gaaaacagaugaaauugug

SEQ ID NO: 709628 - RNA, 19 nt, Homo sapiens
  misc_RNA (1)...(19): siRNA sense strand
gcauggagaucacaauaag

SEQ ID NO: 709629 - RNA, 19 nt, Homo sapiens
  misc_RNA (1)...(19): siRNA sense strand
gagcaccagugaagaauca

SEQ ID NO: 709630 - RNA, 19 nt, Homo sapiens
  misc_RNA (1)...(19): siRNA sense strand
ugaaacaccugcacgacaa

SEQ ID NO: 709631 - RNA, 19 nt, Homo sapiens
  misc_RNA (1)...(19): siRNA sense strand
uaaagcggcugaagaugga

SEQ ID NO: 709632 - RNA, 19 nt, Homo sapiens
  misc_RNA (1)...(19): siRNA sense strand
agaaaugagugaagaugaa

SEQ ID NO: 709633 - RNA, 19 nt, Homo sapiens
  misc_RNA (1)...(19): siRNA sense strand
gagugaagaugaagaacga

SEQ ID NO: 709634 - RNA, 19 nt, Homo sapiens
  misc_RNA (1)...(19): siRNA sense strand
gcagcaacauggacaagau

SEQ ID NO: 709635 - RNA, 19 nt, Homo sapiens
  misc_RNA (1)...(19): siRNA sense strand
gaagggagcaccagugaag

SEQ ID NO: 709636 - RNA, 19 nt, Homo sapiens
  misc_RNA (1)...(19): siRNA sense strand
gagaagacucuauggaaga

SEQ ID NO: 709637 - RNA, 19 nt, Homo sapiens
  misc_RNA (1)...(19): siRNA sense strand
ggaguggucuacagagcaa

SEQ ID NO: 709638 - RNA, 19 nt, Homo sapiens
  misc_RNA (1)...(19): siRNA sense strand
gaagaugaagaacgagaaa

SEQ ID NO: 709639 - RNA, 19 nt, Homo sapiens
  misc_RNA (1)...(19): siRNA sense strand
gcacgaacgucggaaacga

SEQ ID NO: 709640 - RNA, 19 nt, Homo sapiens
  misc_RNA (1)...(19): siRNA sense strand
cagcaaaugucucggaaag

SEQ ID NO: 709641 - RNA, 19 nt, Homo sapiens
  misc_RNA (1)...(19): siRNA sense strand
cagaaaagaugaaaagaga

SEQ ID NO: 709642 - RNA, 19 nt, Homo sapiens
  misc_RNA (1)...(19): siRNA sense strand
gaagaaaugagugaagaug

SEQ ID NO: 709643 - RNA, 19 nt, Homo sapiens
  misc_RNA (1)...(19): siRNA sense strand
agaaguaagugaggaagaa

SEQ ID NO: 709644 - RNA, 19 nt, Homo sapiens
  misc_RNA (1)...(19): siRNA sense strand
ggaagacagaggagaagaa

SEQ ID NO: 709645 - RNA, 19 nt, Homo sapiens
  misc_RNA (1)...(19): siRNA sense strand
ugacagagggcgacuaugu

SEQ ID NO: 709646 - RNA, 19 nt, Homo sapiens
  misc_RNA (1)...(19): siRNA sense strand
gagaagaacaggauaaagc

SEQ ID NO: 709647 - RNA, 19 nt, Homo sapiens
  misc_RNA (1)...(19): siRNA sense strand
gagcauuccaggagagaaa

SEQ ID NO: 709648 - RNA, 19 nt, Homo sapiens
  misc_RNA (1)...(19): siRNA sense strand
ugaagaagcagaggaagaa

SEQ ID NO: 709649 - RNA, 19 nt, Homo sapiens
  misc_RNA (1)...(19): siRNA sense strand
aaggagggcuucccgauca

SEQ ID NO: 709650 - RNA, 19 nt, Homo sapiens
  misc_RNA (1)...(19): siRNA sense strand
gcuucgaccucaugaacaa

SEQ ID NO: 709651 - RNA, 19 nt, Homo sapiens
  misc_RNA (1)...(19): siRNA sense strand
gaaguaagugaggaagaaa

SEQ ID NO: 709652 - RNA, 19 nt, Homo sapiens
  misc_RNA (1)...(19): siRNA sense strand
caacaucgucaccguuaga

SEQ ID NO: 709653 - RNA, 19 nt, Homo sapiens
  misc_RNA (1)...(19): siRNA sense strand
ugagggagaucaacaccau

SEQ ID NO: 709654 - RNA, 19 nt, Homo sapiens
  misc_RNA (1)...(19): siRNA sense strand
gcucuaaagcggcugaaga

SEQ ID NO: 709655 - RNA, 19 nt, Homo sapiens
  misc_RNA (1)...(19): siRNA sense strand
ggcugaagauggagaagga

SEQ ID NO: 709656 - RNA, 19 nt, Homo sapiens
  misc_RNA (1)...(19): siRNA sense strand
agacagaggagaagaagau

SEQ ID NO: 709657 - RNA, 19 nt, Homo sapiens
  misc_RNA (1)...(19): siRNA sense strand
gaucaacaccauccucaag

SEQ ID NO: 709658 - RNA, 19 nt, Homo sapiens
  misc_RNA (1)...(19): siRNA sense strand
gaugaaauuguggcucuaa

SEQ ID NO: 709659 - RNA, 19 nt, Homo sapiens
  misc_RNA (1)...(19): siRNA sense strand
gaaucaggcucagguucug

SEQ ID NO: 709660 - RNA, 19 nt, Homo sapiens
  misc_RNA (1)...(19): siRNA sense strand
gaggugaagacccugauga

SEQ ID NO: 709661 - RNA, 19 nt, Homo sapiens
  misc_RNA (1)...(19): siRNA sense strand
ggaggaggaggaagaggaa

SEQ ID NO: 709662 - RNA, 19 nt, Homo sapiens
  misc_RNA (1)...(19): siRNA sense strand
ggaaacgacaucgagaaga

SEQ ID NO: 709663 - RNA, 19 nt, Homo sapiens
  misc_RNA (1)...(19): siRNA sense strand
agucagaaaucgaucagau

SEQ ID NO: 709664 - RNA, 19 nt, Homo sapiens
  misc_RNA (1)...(19): siRNA sense strand
ucacgucgcugagggagau

SEQ ID NO: 709665 - RNA, 19 nt, Homo sapiens
  misc_RNA (1)...(19): siRNA sense strand
gaaauuguggcucuaaagc

SEQ ID NO: 709666 - RNA, 19 nt, Homo sapiens
  misc_RNA (1)...(19): siRNA sense strand
gucaguggguugcaucuuc

SEQ ID NO: 709667 - RNA, 19 nt, Homo sapiens
  misc_RNA (1)...(19): siRNA sense strand
ugaagacccugaugaucca

SEQ ID NO: 709668 - RNA, 19 nt, Homo sapiens
  misc_RNA (1)...(19): siRNA sense strand
caaaugucucggaaagaaa

SEQ ID NO: 709669 - RNA, 19 nt, Homo sapiens
  misc_RNA (1)...(19): siRNA sense strand
gaagaacgagaaaaugaaa

SEQ ID NO: 709670 - RNA, 19 nt, Homo sapiens
  misc_RNA (1)...(19): siRNA sense strand
ggaagaaaugagugaagau

SEQ ID NO: 709671 - RNA, 19 nt, Homo sapiens
  misc_RNA (1)...(19): siRNA sense strand
gaagacagaggagaagaag

SEQ ID NO: 709672 - RNA, 19 nt, Homo sapiens
  misc_RNA (1)...(19): siRNA sense strand
agacagaagagaagggaaa

SEQ ID NO: 709673 - RNA, 19 nt, Homo sapiens
  misc_RNA (1)...(19): siRNA sense strand
gaaugggaaagacagaaga

SEQ ID NO: 709674 - RNA, 19 nt, Homo sapiens
  misc_RNA (1)...(19): siRNA sense strand
aggaagaaaugagugaaga

SEQ ID NO: 709675 - RNA, 19 nt, Homo sapiens
  misc_RNA (1)...(19): siRNA sense strand
gaggagaagaagaugauuc

SEQ ID NO: 709676 - RNA, 19 nt, Homo sapiens
  misc_RNA (1)...(19): siRNA sense strand
gcaacauggacaagaucua

SEQ ID NO: 709677 - RNA, 19 nt, Homo sapiens
  misc_RNA (1)...(19): siRNA sense strand
auaaggaacuccccguaua

SEQ ID NO: 709678 - RNA, 19 nt, Homo sapiens
  misc_RNA (1)...(19): siRNA sense strand
gagugaagaagcagaggaa

SEQ ID NO: 709679 - RNA, 19 nt, Homo sapiens
  misc_RNA (1)...(19): siRNA sense strand
ggaagucagaaaucgauca

SEQ ID NO: 709680 - RNA, 19 nt, Homo sapiens
  misc_RNA (1)...(19): siRNA sense strand
cccaacaucgucaccguua

SEQ ID NO: 709681 - RNA, 19 nt, Homo sapiens
  misc_RNA (1)...(19): siRNA sense strand
gggaaagacagaagagaag

SEQ ID NO: 709682 - RNA, 19 nt, Homo sapiens
  misc_RNA (1)...(19): siRNA sense strand
caaaagacaagaaaacaga

SEQ ID NO: 709683 - RNA, 19 nt, Homo sapiens
  misc_RNA (1)...(19): siRNA sense strand
gaucgaggagggcaccuau

SEQ ID NO: 709684 - RNA, 19 nt, Homo sapiens
  misc_RNA (1)...(19): siRNA sense strand
gaaaugagugaagaugaag

SEQ ID NO: 709685 - RNA, 19 nt, Homo sapiens
  misc_RNA (1)...(19): siRNA sense strand
ggaagaggaggaggaggaa

SEQ ID NO: 709686 - RNA, 19 nt, Homo sapiens
  misc_RNA (1)...(19): siRNA sense strand
caugcuagagugaaagaaa

SEQ ID NO: 709687 - RNA, 19 nt, Homo sapiens
  misc_RNA (1)...(19): siRNA sense strand
gaagagaaaauggaagaaa

SEQ ID NO: 709688 - RNA, 19 nt, Homo sapiens
  misc_RNA (1)...(19): siRNA sense strand
ggaaugggaaagacagaag

SEQ ID NO: 709689 - RNA, 19 nt, Homo sapiens
  misc_RNA (1)...(19): siRNA sense strand
cgucaccguuagagagauu

SEQ ID NO: 709690 - RNA, 19 nt, Homo sapiens
  misc_RNA (1)...(19): siRNA sense strand
gugaagaagcagaggaaga

SEQ ID NO: 709691 - RNA, 19 nt, Homo sapiens
  misc_RNA (1)...(19): siRNA sense strand
cgaagaaguaagugaggaa

SEQ ID NO: 709692 - RNA, 19 nt, Homo sapiens
  misc_RNA (1)...(19): siRNA sense strand
caacauggacaagaucuac

SEQ ID NO: 709693 - RNA, 19 nt, Homo sapiens
  misc_RNA (1)...(19): siRNA sense strand
ggaagggagcaccagugaa

SEQ ID NO: 709694 - RNA, 19 nt, Homo sapiens
  misc_RNA (1)...(19): siRNA sense strand
gcagaaucaggcucagguu

SEQ ID NO: 709695 - RNA, 19 nt, Homo sapiens
  misc_RNA (1)...(19): siRNA sense strand
cagaggagaagaagaugau

SEQ ID NO: 709696 - RNA, 19 nt, Homo sapiens
  misc_RNA (1)...(19): siRNA sense strand
guaagugaggaagaaauga

SEQ ID NO: 709697 - RNA, 19 nt, Homo sapiens
  misc_RNA (1)...(19): siRNA sense strand
cagaagagaagggaaaugg

SEQ ID NO: 709698 - RNA, 19 nt, Homo sapiens
  misc_RNA (1)...(19): siRNA sense strand
aggacggccucaagcauga

SEQ ID NO: 709699 - RNA, 19 nt, Homo sapiens
  misc_RNA (1)...(19): siRNA sense strand
gcaccuauggaguggucua

SEQ ID NO: 709700 - RNA, 19 nt, Homo sapiens
  misc_RNA (1)...(19): siRNA sense strand
gacagagggcgacuaugug

SEQ ID NO: 709701 - RNA, 19 nt, Homo sapiens
  misc_RNA (1)...(19): siRNA sense strand
aagaaaugagugaagauga

SEQ ID NO: 709702 - RNA, 19 nt, Homo sapiens
  misc_RNA (1)...(19): siRNA sense strand
ggaaauggcaagggagcau

SEQ ID NO: 709703 - RNA, 19 nt, Homo sapiens
  misc_RNA (1)...(19): siRNA sense strand
gaagauggagaaggagaag

SEQ ID NO: 709704 - RNA, 19 nt, Homo sapiens
  misc_RNA (1)...(19): siRNA sense strand
gaggagaccggcagcaacu

SEQ ID NO: 709705 - RNA, 19 nt, Homo sapiens
  misc_RNA (1)...(19): siRNA sense strand
gaggaagaaaugagugaag

SEQ ID NO: 709706 - RNA, 19 nt, Homo sapiens
  misc_RNA (1)...(19): siRNA sense strand
agaaagagagcacgaacgu

SEQ ID NO: 709707 - RNA, 19 nt, Homo sapiens
  misc_RNA (1)...(19): siRNA sense strand
ugggaaagacagaagagaa

SEQ ID NO: 709708 - RNA, 19 nt, Homo sapiens
  misc_RNA (1)...(19): siRNA sense strand
ucccagcagucaagaagau

SEQ ID NO: 709709 - RNA, 19 nt, Homo sapiens
  misc_RNA (1)...(19): siRNA sense strand
uauggaagacagaggagaa

SEQ ID NO: 709710 - RNA, 19 nt, Homo sapiens
  misc_RNA (1)...(19): siRNA sense strand
agaagcagaggaagaagug

SEQ ID NO: 709711 - RNA, 19 nt, Homo sapiens
  misc_RNA (1)...(19): siRNA sense strand
ugaagaugaagaacgagaa

SEQ ID NO: 709712 - RNA, 19 nt, Homo sapiens
  misc_RNA (1)...(19): siRNA sense strand
gugaggaagaaaugaguga

SEQ ID NO: 709713 - RNA, 19 nt, Homo sapiens
  misc_RNA (1)...(19): siRNA sense strand
gaacuccccguauagaaga

SEQ ID NO: 709714 - RNA, 19 nt, Homo sapiens
  misc_RNA (1)...(19): siRNA sense strand
gcaccagugaagaaucaga

SEQ ID NO: 709715 - RNA, 19 nt, Homo sapiens
  misc_RNA (1)...(19): siRNA sense strand
gaugaaaagagaaaagaga

SEQ ID NO: 709716 - RNA, 19 nt, Homo sapiens
  misc_RNA (1)...(19): siRNA sense strand
caucgagaagaacaggaua

SEQ ID NO: 709717 - RNA, 19 nt, Homo sapiens
  misc_RNA (1)...(19): siRNA sense strand
aagaggaggaggaggaaga

SEQ ID NO: 709718 - RNA, 19 nt, Homo sapiens
  misc_RNA (1)...(19): siRNA sense strand
acaagguguucaaggaucu

SEQ ID NO: 709719 - RNA, 19 nt, Homo sapiens
  misc_RNA (1)...(19): siRNA sense strand
gaguacggauccccucuga

SEQ ID NO: 709720 - RNA, 19 nt, Homo sapiens
  misc_RNA (1)...(19): siRNA sense strand
ugaagauggagaaggagaa

SEQ ID NO: 709721 - RNA, 19 nt, Homo sapiens
  misc_RNA (1)...(19): siRNA sense strand
ccaacaucgucaccguuag

SEQ ID NO: 709722 - RNA, 19 nt, Homo sapiens
  misc_RNA (1)...(19): siRNA sense strand
gaagucagaaaucgaucag

SEQ ID NO: 709723 - RNA, 19 nt, Homo sapiens
  misc_RNA (1)...(19): siRNA sense strand
ggugaagacccugaugauc

SEQ ID NO: 709724 - RNA, 19 nt, Homo sapiens
  misc_RNA (1)...(19): siRNA sense strand
gggcuucgaccucaugaac

SEQ ID NO: 709725 - RNA, 19 nt, Homo sapiens
  misc_RNA (1)...(19): siRNA sense strand
gaaacgacaucgagaagaa

SEQ ID NO: 709726 - RNA, 19 nt, Homo sapiens
  misc_RNA (1)...(19): siRNA sense strand
gcaaaugucucggaaagaa

SEQ ID NO: 709727 - RNA, 19 nt, Homo sapiens
  misc_RNA (1)...(19): siRNA sense strand
gaaaacagaugaaauugug

SEQ ID NO: 709728 - RNA, 19 nt, Homo sapiens
  misc_RNA (1)...(19): siRNA sense strand
gcauggagaucacaauaag

SEQ ID NO: 709729 - RNA, 19 nt, Homo sapiens
  misc_RNA (1)...(19): siRNA sense strand
gagcaccagugaagaauca

SEQ ID NO: 709730 - RNA, 19 nt, Homo sapiens
  misc_RNA (1)...(19): siRNA sense strand
ugaaacaccugcacgacaa

SEQ ID NO: 709731 - RNA, 19 nt, Homo sapiens
  misc_RNA (1)...(19): siRNA sense strand
uaaagcggcugaagaugga

SEQ ID NO: 709732 - RNA, 19 nt, Homo sapiens
  misc_RNA (1)...(19): siRNA sense strand
agaaaugagugaagaugaa

SEQ ID NO: 709733 - RNA, 19 nt, Homo sapiens
  misc_RNA (1)...(19): siRNA sense strand
gagugaagaugaagaacga

SEQ ID NO: 709734 - RNA, 19 nt, Homo sapiens
  misc_RNA (1)...(19): siRNA sense strand
gcagcaacauggacaagau

SEQ ID NO: 709735 - RNA, 19 nt, Homo sapiens
  misc_RNA (1)...(19): siRNA sense strand
gaagggagcaccagugaag

SEQ ID NO: 709736 - RNA, 19 nt, Homo sapiens
  misc_RNA (1)...(19): siRNA sense strand
gagaagacucuauggaaga

SEQ ID NO: 709737 - RNA, 19 nt, Homo sapiens
  misc_RNA (1)...(19): siRNA sense strand
ggaguggucuacagagcaa

SEQ ID NO: 709738 - RNA, 19 nt, Homo sapiens
  misc_RNA (1)...(19): siRNA sense strand
gaagaugaagaacgagaaa

SEQ ID NO: 709739 - RNA, 19 nt, Homo sapiens
  misc_RNA (1)...(19): siRNA sense strand
gcacgaacgucggaaacga

SEQ ID NO: 709740 - RNA, 19 nt, Homo sapiens
  misc_RNA (1)...(19): siRNA sense strand
cagcaaaugucucggaaag

SEQ ID NO: 709741 - RNA, 19 nt, Homo sapiens
  misc_RNA (1)...(19): siRNA sense strand
cagaaaagaugaaaagaga

SEQ ID NO: 709742 - RNA, 19 nt, Homo sapiens
  misc_RNA (1)...(19): siRNA sense strand
gaagaaaugagugaagaug

SEQ ID NO: 709743 - RNA, 19 nt, Homo sapiens
  misc_RNA (1)...(19): siRNA sense strand
agaaguaagugaggaagaa

SEQ ID NO: 709744 - RNA, 19 nt, Homo sapiens
  misc_RNA (1)...(19): siRNA sense strand
ggaagacagaggagaagaa

SEQ ID NO: 709745 - RNA, 19 nt, Homo sapiens
  misc_RNA (1)...(19): siRNA sense strand
ugacagagggcgacuaugu

SEQ ID NO: 709746 - RNA, 19 nt, Homo sapiens
  misc_RNA (1)...(19): siRNA sense strand
gagaagaacaggauaaagc

SEQ ID NO: 709747 - RNA, 19 nt, Homo sapiens
  misc_RNA (1)...(19): siRNA sense strand
gagcauuccaggagagaaa

SEQ ID NO: 709748 - RNA, 19 nt, Homo sapiens
  misc_RNA (1)...(19): siRNA sense strand
ugaagaagcagaggaagaa

SEQ ID NO: 709749 - RNA, 19 nt, Homo sapiens
  misc_RNA (1)...(19): siRNA sense strand
aaggagggcuucccgauca

SEQ ID NO: 709750 - RNA, 19 nt, Homo sapiens
  misc_RNA (1)...(19): siRNA sense strand
gcuucgaccucaugaacaa

SEQ ID NO: 709751 - RNA, 19 nt, Homo sapiens
  misc_RNA (1)...(19): siRNA sense strand
gaaguaagugaggaagaaa

SEQ ID NO: 709752 - RNA, 19 nt, Homo sapiens
  misc_RNA (1)...(19): siRNA sense strand
caacaucgucaccguuaga

SEQ ID NO: 709753 - RNA, 19 nt, Homo sapiens
  misc_RNA (1)...(19): siRNA sense strand
ugagggagaucaacaccau

SEQ ID NO: 709754 - RNA, 19 nt, Homo sapiens
  misc_RNA (1)...(19): siRNA sense strand
gcucuaaagcggcugaaga

SEQ ID NO: 709755 - RNA, 19 nt, Homo sapiens
  misc_RNA (1)...(19): siRNA sense strand
ggcugaagauggagaagga

SEQ ID NO: 709756 - RNA, 19 nt, Homo sapiens
  misc_RNA (1)...(19): siRNA sense strand
agacagaggagaagaagau

SEQ ID NO: 709757 - RNA, 19 nt, Homo sapiens
  misc_RNA (1)...(19): siRNA sense strand
gaucaacaccauccucaag

SEQ ID NO: 709758 - RNA, 19 nt, Homo sapiens
  misc_RNA (1)...(19): siRNA sense strand
gaugaaauuguggcucuaa

SEQ ID NO: 709759 - RNA, 19 nt, Homo sapiens
  misc_RNA (1)...(19): siRNA sense strand
gaaucaggcucagguucug

SEQ ID NO: 709760 - RNA, 19 nt, Homo sapiens
  misc_RNA (1)...(19): siRNA sense strand
gaggugaagacccugauga

SEQ ID NO: 709761 - RNA, 19 nt, Homo sapiens
  misc_RNA (1)...(19): siRNA sense strand
ggaggaggaggaagaggaa

SEQ ID NO: 709762 - RNA, 19 nt, Homo sapiens
  misc_RNA (1)...(19): siRNA sense strand
ggaaacgacaucgagaaga

SEQ ID NO: 709763 - RNA, 19 nt, Homo sapiens
  misc_RNA (1)...(19): siRNA sense strand
agucagaaaucgaucagau

SEQ ID NO: 709764 - RNA, 19 nt, Homo sapiens
  misc_RNA (1)...(19): siRNA sense strand
ucacgucgcugagggagau

SEQ ID NO: 709765 - RNA, 19 nt, Homo sapiens
  misc_RNA (1)...(19): siRNA sense strand
gaaauuguggcucuaaagc

SEQ ID NO: 709766 - RNA, 19 nt, Homo sapiens
  misc_RNA (1)...(19): siRNA sense strand
gucaguggguugcaucuuc

SEQ ID NO: 709767 - RNA, 19 nt, Homo sapiens
  misc_RNA (1)...(19): siRNA sense strand
ugaagacccugaugaucca

SEQ ID NO: 709768 - RNA, 19 nt, Homo sapiens
  misc_RNA (1)...(19): siRNA sense strand
caaaugucucggaaagaaa

SEQ ID NO: 709769 - RNA, 19 nt, Homo sapiens
  misc_RNA (1)...(19): siRNA sense strand
gaagaacgagaaaaugaaa

SEQ ID NO: 709770 - RNA, 19 nt, Homo sapiens
  misc_RNA (1)...(19): siRNA sense strand
ggaagaaaugagugaagau

SEQ ID NO: 709771 - RNA, 19 nt, Homo sapiens
  misc_RNA (1)...(19): siRNA sense strand
gaagacagaggagaagaag

SEQ ID NO: 709772 - RNA, 19 nt, Homo sapiens
  misc_RNA (1)...(19): siRNA sense strand
agacagaagagaagggaaa

SEQ ID NO: 709773 - RNA, 19 nt, Homo sapiens
  misc_RNA (1)...(19): siRNA sense strand
gaaugggaaagacagaaga

SEQ ID NO: 709774 - RNA, 19 nt, Homo sapiens
  misc_RNA (1)...(19): siRNA sense strand
aggaagaaaugagugaaga

SEQ ID NO: 709775 - RNA, 19 nt, Homo sapiens
  misc_RNA (1)...(19): siRNA sense strand
gaggagaagaagaugauuc

SEQ ID NO: 709776 - RNA, 19 nt, Homo sapiens
  misc_RNA (1)...(19): siRNA sense strand
gcaacauggacaagaucua

SEQ ID NO: 709777 - RNA, 19 nt, Homo sapiens
  misc_RNA (1)...(19): siRNA sense strand
auaaggaacuccccguaua

SEQ ID NO: 709778 - RNA, 19 nt, Homo sapiens
  misc_RNA (1)...(19): siRNA sense strand
gagugaagaagcagaggaa

SEQ ID NO: 709779 - RNA, 19 nt, Homo sapiens
  misc_RNA (1)...(19): siRNA sense strand
ggaagucagaaaucgauca

SEQ ID NO: 709780 - RNA, 19 nt, Homo sapiens
  misc_RNA (1)...(19): siRNA sense strand
cccaacaucgucaccguua

SEQ ID NO: 709781 - RNA, 19 nt, Homo sapiens
  misc_RNA (1)...(19): siRNA sense strand
gggaaagacagaagagaag

SEQ ID NO: 709782 - RNA, 19 nt, Homo sapiens
  misc_RNA (1)...(19): siRNA sense strand
caaaagacaagaaaacaga

SEQ ID NO: 709783 - RNA, 19 nt, Homo sapiens
  misc_RNA (1)...(19): siRNA sense strand
gaucgaggagggcaccuau

SEQ ID NO: 709784 - RNA, 19 nt, Homo sapiens
  misc_RNA (1)...(19): siRNA sense strand
gaaaugagugaagaugaag

SEQ ID NO: 709785 - RNA, 19 nt, Homo sapiens
  misc_RNA (1)...(19): siRNA sense strand
ggaagaggaggaggaggaa

SEQ ID NO: 709786 - RNA, 19 nt, Homo sapiens
  misc_RNA (1)...(19): siRNA sense strand
caugcuagagugaaagaaa

SEQ ID NO: 709787 - RNA, 19 nt, Homo sapiens
  misc_RNA (1)...(19): siRNA sense strand
gaagagaaaauggaagaaa

SEQ ID NO: 709788 - RNA, 19 nt, Homo sapiens
  misc_RNA (1)...(19): siRNA sense strand
ggaaugggaaagacagaag

SEQ ID NO: 709789 - RNA, 19 nt, Homo sapiens
  misc_RNA (1)...(19): siRNA sense strand
cgucaccguuagagagauu

SEQ ID NO: 709790 - RNA, 19 nt, Homo sapiens
  misc_RNA (1)...(19): siRNA sense strand
gugaagaagcagaggaaga

SEQ ID NO: 709791 - RNA, 19 nt, Homo sapiens
  misc_RNA (1)...(19): siRNA sense strand
cgaagaaguaagugaggaa

SEQ ID NO: 709792 - RNA, 19 nt, Homo sapiens
  misc_RNA (1)...(19): siRNA sense strand
caacauggacaagaucuac

SEQ ID NO: 709793 - RNA, 19 nt, Homo sapiens
  misc_RNA (1)...(19): siRNA sense strand
ggaagggagcaccagugaa

SEQ ID NO: 709794 - RNA, 19 nt, Homo sapiens
  misc_RNA (1)...(19): siRNA sense strand
gcagaaucaggcucagguu

SEQ ID NO: 709795 - RNA, 19 nt, Homo sapiens
  misc_RNA (1)...(19): siRNA sense strand
cagaggagaagaagaugau

SEQ ID NO: 709796 - RNA, 19 nt, Homo sapiens
  misc_RNA (1)...(19): siRNA sense strand
guaagugaggaagaaauga

SEQ ID NO: 709797 - RNA, 19 nt, Homo sapiens
  misc_RNA (1)...(19): siRNA sense strand
cagaagagaagggaaaugg

SEQ ID NO: 709798 - RNA, 19 nt, Homo sapiens
  misc_RNA (1)...(19): siRNA sense strand
aggacggccucaagcauga

SEQ ID NO: 709799 - RNA, 19 nt, Homo sapiens
  misc_RNA (1)...(19): siRNA sense strand
gcaccuauggaguggucua

SEQ ID NO: 709800 - RNA, 19 nt, Homo sapiens
  misc_RNA (1)...(19): siRNA sense strand
gacagagggcgacuaugug

SEQ ID NO: 709801 - RNA, 19 nt, Homo sapiens
  misc_RNA (1)...(19): siRNA sense strand
aagaaaugagugaagauga

SEQ ID NO: 709802 - RNA, 19 nt, Homo sapiens
  misc_RNA (1)...(19): siRNA sense strand
ggaaauggcaagggagcau

SEQ ID NO: 709803 - RNA, 19 nt, Homo sapiens
  misc_RNA (1)...(19): siRNA sense strand
gaagauggagaaggagaag

SEQ ID NO: 709804 - RNA, 19 nt, Homo sapiens
  misc_RNA (1)...(19): siRNA sense strand
gaggagaccggcagcaacu

SEQ ID NO: 709805 - RNA, 19 nt, Homo sapiens
  misc_RNA (1)...(19): siRNA sense strand
gaggaagaaaugagugaag

SEQ ID NO: 709806 - RNA, 19 nt, Homo sapiens
  misc_RNA (1)...(19): siRNA sense strand
agaaagagagcacgaacgu

SEQ ID NO: 709807 - RNA, 19 nt, Homo sapiens
  misc_RNA (1)...(19): siRNA sense strand
ugggaaagacagaagagaa

SEQ ID NO: 709808 - RNA, 19 nt, Homo sapiens
  misc_RNA (1)...(19): siRNA sense strand
ucccagcagucaagaagau

SEQ ID NO: 709809 - RNA, 19 nt, Homo sapiens
  misc_RNA (1)...(19): siRNA sense strand
uauggaagacagaggagaa

SEQ ID NO: 709810 - RNA, 19 nt, Homo sapiens
  misc_RNA (1)...(19): siRNA sense strand
agaagcagaggaagaagug

SEQ ID NO: 709811 - RNA, 19 nt, Homo sapiens
  misc_RNA (1)...(19): siRNA sense strand
ugaagaugaagaacgagaa

SEQ ID NO: 709812 - RNA, 19 nt, Homo sapiens
  misc_RNA (1)...(19): siRNA sense strand
gugaggaagaaaugaguga

SEQ ID NO: 709813 - RNA, 19 nt, Homo sapiens
  misc_RNA (1)...(19): siRNA sense strand
gaacuccccguauagaaga

SEQ ID NO: 709814 - RNA, 19 nt, Homo sapiens
  misc_RNA (1)...(19): siRNA sense strand
gcaccagugaagaaucaga

SEQ ID NO: 709815 - RNA, 19 nt, Homo sapiens
  misc_RNA (1)...(19): siRNA sense strand
gaugaaaagagaaaagaga

SEQ ID NO: 709816 - RNA, 19 nt, Homo sapiens
  misc_RNA (1)...(19): siRNA sense strand
caucgagaagaacaggaua

SEQ ID NO: 709817 - RNA, 19 nt, Homo sapiens
  misc_RNA (1)...(19): siRNA sense strand
aagaggaggaggaggaaga

SEQ ID NO: 709818 - RNA, 19 nt, Homo sapiens
  misc_RNA (1)...(19): siRNA sense strand
acaagguguucaaggaucu

SEQ ID NO: 709819 - RNA, 19 nt, Homo sapiens
  misc_RNA (1)...(19): siRNA sense strand
gaguacggauccccucuga

SEQ ID NO: 709820 - RNA, 19 nt, Homo sapiens
  misc_RNA (1)...(19): siRNA sense strand
ugaagauggagaaggagaa

SEQ ID NO: 709821 - RNA, 19 nt, Homo sapiens
  misc_RNA (1)...(19): siRNA sense strand
ccaacaucgucaccguuag

SEQ ID NO: 709822 - RNA, 19 nt, Homo sapiens
  misc_RNA (1)...(19): siRNA sense strand
gaagucagaaaucgaucag

SEQ ID NO: 709823 - RNA, 19 nt, Homo sapiens
  misc_RNA (1)...(19): siRNA sense strand
ggugaagacccugaugauc

SEQ ID NO: 709824 - RNA, 19 nt, Homo sapiens
  misc_RNA (1)...(19): siRNA sense strand
gggcuucgaccucaugaac

SEQ ID NO: 709825 - RNA, 19 nt, Homo sapiens
  misc_RNA (1)...(19): siRNA sense strand
gaaaacagaugaaauugug

SEQ ID NO: 709826 - RNA, 19 nt, Homo sapiens
  misc_RNA (1)...(19): siRNA sense strand
gagcaccagugaagaauca

SEQ ID NO: 709827 - RNA, 19 nt, Homo sapiens
  misc_RNA (1)...(19): siRNA sense strand
ugaaacaccugcacgacaa

SEQ ID NO: 709828 - RNA, 19 nt, Homo sapiens
  misc_RNA (1)...(19): siRNA sense strand
uaaagcggcugaagaugga

SEQ ID NO: 709829 - RNA, 19 nt, Homo sapiens
  misc_RNA (1)...(19): siRNA sense strand
agaaaugagugaagaugaa

SEQ ID NO: 709830 - RNA, 19 nt, Homo sapiens
  misc_RNA (1)...(19): siRNA sense strand
gagugaagaugaagaacga

SEQ ID NO: 709831 - RNA, 19 nt, Homo sapiens
  misc_RNA (1)...(19): siRNA sense strand
gcagcaacauggacaagau

SEQ ID NO: 709832 - RNA, 19 nt, Homo sapiens
  misc_RNA (1)...(19): siRNA sense strand
gaagggagcaccagugaag

SEQ ID NO: 709833 - RNA, 19 nt, Homo sapiens
  misc_RNA (1)...(19): siRNA sense strand
gaagaugaagaacgagaaa

SEQ ID NO: 709834 - RNA, 19 nt, Homo sapiens
  misc_RNA (1)...(19): siRNA sense strand
ggaguggucuacagagcaa

SEQ ID NO: 709835 - RNA, 19 nt, Homo sapiens
  misc_RNA (1)...(19): siRNA sense strand
gaagaaaugagugaagaug

SEQ ID NO: 709836 - RNA, 19 nt, Homo sapiens
  misc_RNA (1)...(19): siRNA sense strand
agaaguaagugaggaagaa

SEQ ID NO: 709837 - RNA, 19 nt, Homo sapiens
  misc_RNA (1)...(19): siRNA sense strand
ugacagagggcgacuaugu

SEQ ID NO: 709838 - RNA, 19 nt, Homo sapiens
  misc_RNA (1)...(19): siRNA sense strand
ugaagaagcagaggaagaa

SEQ ID NO: 709839 - RNA, 19 nt, Homo sapiens
  misc_RNA (1)...(19): siRNA sense strand
aaggagggcuucccgauca

SEQ ID NO: 709840 - RNA, 19 nt, Homo sapiens
  misc_RNA (1)...(19): siRNA sense strand
gcuucgaccucaugaacaa

SEQ ID NO: 709841 - RNA, 19 nt, Homo sapiens
  misc_RNA (1)...(19): siRNA sense strand
gaaguaagugaggaagaaa

SEQ ID NO: 709842 - RNA, 19 nt, Homo sapiens
  misc_RNA (1)...(19): siRNA sense strand
caacaucgucaccguuaga

SEQ ID NO: 709843 - RNA, 19 nt, Homo sapiens
  misc_RNA (1)...(19): siRNA sense strand
ugagggagaucaacaccau

SEQ ID NO: 709844 - RNA, 19 nt, Homo sapiens
  misc_RNA (1)...(19): siRNA sense strand
gcucuaaagcggcugaaga

SEQ ID NO: 709845 - RNA, 19 nt, Homo sapiens
  misc_RNA (1)...(19): siRNA sense strand
ggcugaagauggagaagga

SEQ ID NO: 709846 - RNA, 19 nt, Homo sapiens
  misc_RNA (1)...(19): siRNA sense strand
gaugaaauuguggcucuaa

SEQ ID NO: 709847 - RNA, 19 nt, Homo sapiens
  misc_RNA (1)...(19): siRNA sense strand
gaucaacaccauccucaag

SEQ ID NO: 709848 - RNA, 19 nt, Homo sapiens
  misc_RNA (1)...(19): siRNA sense strand
ggaggaggaggaagaggaa

SEQ ID NO: 709849 - RNA, 19 nt, Homo sapiens
  misc_RNA (1)...(19): siRNA sense strand
gaggugaagacccugauga

SEQ ID NO: 709850 - RNA, 19 nt, Homo sapiens
  misc_RNA (1)...(19): siRNA sense strand
gaaucaggcucagguucug

SEQ ID NO: 709851 - RNA, 19 nt, Homo sapiens
  misc_RNA (1)...(19): siRNA sense strand
ucacgucgcugagggagau

SEQ ID NO: 709852 - RNA, 19 nt, Homo sapiens
  misc_RNA (1)...(19): siRNA sense strand
agucagaaaucgaucagau

SEQ ID NO: 709853 - RNA, 19 nt, Homo sapiens
  misc_RNA (1)...(19): siRNA sense strand
gaaauuguggcucuaaagc

SEQ ID NO: 709854 - RNA, 19 nt, Homo sapiens
  misc_RNA (1)...(19): siRNA sense strand
gucaguggguugcaucuuc

SEQ ID NO: 709855 - RNA, 19 nt, Homo sapiens
  misc_RNA (1)...(19): siRNA sense strand
ugaagacccugaugaucca

SEQ ID NO: 709856 - RNA, 19 nt, Homo sapiens
  misc_RNA (1)...(19): siRNA sense strand
ggaagaaaugagugaagau

SEQ ID NO: 709857 - RNA, 19 nt, Homo sapiens
  misc_RNA (1)...(19): siRNA sense strand
gaagaacgagaaaaugaaa

SEQ ID NO: 709858 - RNA, 19 nt, Homo sapiens
  misc_RNA (1)...(19): siRNA sense strand
aggaagaaaugagugaaga

SEQ ID NO: 709859 - RNA, 19 nt, Homo sapiens
  misc_RNA (1)...(19): siRNA sense strand
gcaacauggacaagaucua

SEQ ID NO: 709860 - RNA, 19 nt, Homo sapiens
  misc_RNA (1)...(19): siRNA sense strand
gagugaagaagcagaggaa

SEQ ID NO: 709861 - RNA, 19 nt, Homo sapiens
  misc_RNA (1)...(19): siRNA sense strand
ggaagucagaaaucgauca

SEQ ID NO: 709862 - RNA, 19 nt, Homo sapiens
  misc_RNA (1)...(19): siRNA sense strand
cccaacaucgucaccguua

SEQ ID NO: 709863 - RNA, 19 nt, Homo sapiens
  misc_RNA (1)...(19): siRNA sense strand
gaaaugagugaagaugaag

SEQ ID NO: 709864 - RNA, 19 nt, Homo sapiens
  misc_RNA (1)...(19): siRNA sense strand
ggaagaggaggaggaggaa

SEQ ID NO: 709865 - RNA, 19 nt, Homo sapiens
  misc_RNA (1)...(19): siRNA sense strand
caaaagacaagaaaacaga

SEQ ID NO: 709866 - RNA, 19 nt, Homo sapiens
  misc_RNA (1)...(19): siRNA sense strand
gaucgaggagggcaccuau

SEQ ID NO: 709867 - RNA, 19 nt, Homo sapiens
  misc_RNA (1)...(19): siRNA sense strand
gaagagaaaauggaagaaa

SEQ ID NO: 709868 - RNA, 19 nt, Homo sapiens
  misc_RNA (1)...(19): siRNA sense strand
cgaagaaguaagugaggaa

SEQ ID NO: 709869 - RNA, 19 nt, Homo sapiens
  misc_RNA (1)...(19): siRNA sense strand
cgucaccguuagagagauu

SEQ ID NO: 709870 - RNA, 19 nt, Homo sapiens
  misc_RNA (1)...(19): siRNA sense strand
gugaagaagcagaggaaga

SEQ ID NO: 709871 - RNA, 19 nt, Homo sapiens
  misc_RNA (1)...(19): siRNA sense strand
caacauggacaagaucuac

SEQ ID NO: 709872 - RNA, 19 nt, Homo sapiens
  misc_RNA (1)...(19): siRNA sense strand
ggaagggagcaccagugaa

SEQ ID NO: 709873 - RNA, 19 nt, Homo sapiens
  misc_RNA (1)...(19): siRNA sense strand
guaagugaggaagaaauga

SEQ ID NO: 709874 - RNA, 19 nt, Homo sapiens
  misc_RNA (1)...(19): siRNA sense strand
gcagaaucaggcucagguu

SEQ ID NO: 709875 - RNA, 19 nt, Homo sapiens
  misc_RNA (1)...(19): siRNA sense strand
aagaaaugagugaagauga

SEQ ID NO: 709876 - RNA, 19 nt, Homo sapiens
  misc_RNA (1)...(19): siRNA sense strand
aggacggccucaagcauga

SEQ ID NO: 709877 - RNA, 19 nt, Homo sapiens
  misc_RNA (1)...(19): siRNA sense strand
gcaccuauggaguggucua

SEQ ID NO: 709878 - RNA, 19 nt, Homo sapiens
  misc_RNA (1)...(19): siRNA sense strand
gacagagggcgacuaugug

SEQ ID NO: 709879 - RNA, 19 nt, Homo sapiens
  misc_RNA (1)...(19): siRNA sense strand
gaggagaccggcagcaacu

SEQ ID NO: 709880 - RNA, 19 nt, Homo sapiens
  misc_RNA (1)...(19): siRNA sense strand
gaagauggagaaggagaag

SEQ ID NO: 709881 - RNA, 19 nt, Homo sapiens
  misc_RNA (1)...(19): siRNA sense strand
gaggaagaaaugagugaag

SEQ ID NO: 709882 - RNA, 19 nt, Homo sapiens
  misc_RNA (1)...(19): siRNA sense strand
gugaggaagaaaugaguga

SEQ ID NO: 709883 - RNA, 19 nt, Homo sapiens
  misc_RNA (1)...(19): siRNA sense strand
ucccagcagucaagaagau

SEQ ID NO: 709884 - RNA, 19 nt, Homo sapiens
  misc_RNA (1)...(19): siRNA sense strand
agaagcagaggaagaagug

SEQ ID NO: 709885 - RNA, 19 nt, Homo sapiens
  misc_RNA (1)...(19): siRNA sense strand
ugaagaugaagaacgagaa

SEQ ID NO: 709886 - RNA, 19 nt, Homo sapiens
  misc_RNA (1)...(19): siRNA sense strand
gcaccagugaagaaucaga

SEQ ID NO: 709887 - RNA, 19 nt, Homo sapiens
  misc_RNA (1)...(19): siRNA sense strand
aagaggaggaggaggaaga

SEQ ID NO: 709888 - RNA, 19 nt, Homo sapiens
  misc_RNA (1)...(19): siRNA sense strand
acaagguguucaaggaucu

SEQ ID NO: 709889 - RNA, 19 nt, Homo sapiens
  misc_RNA (1)...(19): siRNA sense strand
gaguacggauccccucuga

SEQ ID NO: 709890 - RNA, 19 nt, Homo sapiens
  misc_RNA (1)...(19): siRNA sense strand
ugaagauggagaaggagaa

SEQ ID NO: 709891 - RNA, 19 nt, Homo sapiens
  misc_RNA (1)...(19): siRNA sense strand
ccaacaucgucaccguuag

SEQ ID NO: 709892 - RNA, 19 nt, Homo sapiens
  misc_RNA (1)...(19): siRNA sense strand
gaagucagaaaucgaucag

SEQ ID NO: 709893 - RNA, 19 nt, Homo sapiens
  misc_RNA (1)...(19): siRNA sense strand
ggugaagacccugaugauc

SEQ ID NO: 709894 - RNA, 19 nt, Homo sapiens
  misc_RNA (1)...(19): siRNA sense strand
ugaaauuguggcucuaaag

SEQ ID NO: 709895 - RNA, 19 nt, Homo sapiens
  misc_RNA (1)...(19): siRNA sense strand
gggcuucgaccucaugaac

SEQ ID NO: 709896 - RNA, 19 nt, Homo sapiens
  misc_RNA (1)...(19): siRNA sense strand
ggagaccggcagcaacucu

SEQ ID NO: 709897 - RNA, 19 nt, Homo sapiens
  misc_RNA (1)...(19): siRNA sense strand
ggaggugaagacccugaug

SEQ ID NO: 709898 - RNA, 19 nt, Homo sapiens
  misc_RNA (1)...(19): siRNA sense strand
gaaacgacaucgagaagaa

SEQ ID NO: 709899 - RNA, 19 nt, Homo sapiens
  misc_RNA (1)...(19): siRNA sense strand
gcaaaugucucggaaagaa

SEQ ID NO: 709900 - RNA, 19 nt, Homo sapiens
  misc_RNA (1)...(19): siRNA sense strand
gaaaacagaugaaauugug

SEQ ID NO: 709901 - RNA, 19 nt, Homo sapiens
  misc_RNA (1)...(19): siRNA sense strand
gcauggagaucacaauaag

SEQ ID NO: 709902 - RNA, 19 nt, Homo sapiens
  misc_RNA (1)...(19): siRNA sense strand
gagcaccagugaagaauca

SEQ ID NO: 709903 - RNA, 19 nt, Homo sapiens
  misc_RNA (1)...(19): siRNA sense strand
ugaaacaccugcacgacaa

SEQ ID NO: 709904 - RNA, 19 nt, Homo sapiens
  misc_RNA (1)...(19): siRNA sense strand
gaaaaggacucuuggaaag

SEQ ID NO: 709905 - RNA, 19 nt, Homo sapiens
  misc_RNA (1)...(19): siRNA sense strand
uaaagcggcugaagaugga

SEQ ID NO: 709906 - RNA, 19 nt, Homo sapiens
  misc_RNA (1)...(19): siRNA sense strand
agaaaugagugaagaugaa

SEQ ID NO: 709907 - RNA, 19 nt, Homo sapiens
  misc_RNA (1)...(19): siRNA sense strand
gagugaagaugaagaacga

SEQ ID NO: 709908 - RNA, 19 nt, Homo sapiens
  misc_RNA (1)...(19): siRNA sense strand
gcagcaacauggacaagau

SEQ ID NO: 709909 - RNA, 19 nt, Homo sapiens
  misc_RNA (1)...(19): siRNA sense strand
gaagggagcaccagugaag

SEQ ID NO: 709910 - RNA, 19 nt, Homo sapiens
  misc_RNA (1)...(19): siRNA sense strand
ggaaggaacaagaggagaa

SEQ ID NO: 709911 - RNA, 19 nt, Homo sapiens
  misc_RNA (1)...(19): siRNA sense strand
ggaguggucuacagagcaa

SEQ ID NO: 709912 - RNA, 19 nt, Homo sapiens
  misc_RNA (1)...(19): siRNA sense strand
gaagaugaagaacgagaaa

SEQ ID NO: 709913 - RNA, 19 nt, Homo sapiens
  misc_RNA (1)...(19): siRNA sense strand
gcacgaacgucggaaacga

SEQ ID NO: 709914 - RNA, 19 nt, Homo sapiens
  misc_RNA (1)...(19): siRNA sense strand
gagaagacucuauggaaga

SEQ ID NO: 709915 - RNA, 19 nt, Homo sapiens
  misc_RNA (1)...(19): siRNA sense strand
cagcaaaugucucggaaag

SEQ ID NO: 709916 - RNA, 19 nt, Homo sapiens
  misc_RNA (1)...(19): siRNA sense strand
cagaaaagaugaaaagaga

SEQ ID NO: 709917 - RNA, 19 nt, Homo sapiens
  misc_RNA (1)...(19): siRNA sense strand
gaagaaaugagugaagaug

SEQ ID NO: 709918 - RNA, 19 nt, Homo sapiens
  misc_RNA (1)...(19): siRNA sense strand
agaaguaagugaggaagaa

SEQ ID NO: 709919 - RNA, 19 nt, Homo sapiens
  misc_RNA (1)...(19): siRNA sense strand
ggaagacagaggagaagaa

SEQ ID NO: 709920 - RNA, 19 nt, Homo sapiens
  misc_RNA (1)...(19): siRNA sense strand
gaaggaacaagaggagaaa

SEQ ID NO: 709921 - RNA, 19 nt, Homo sapiens
  misc_RNA (1)...(19): siRNA sense strand
ugacagagggcgacuaugu

SEQ ID NO: 709922 - RNA, 19 nt, Homo sapiens
  misc_RNA (1)...(19): siRNA sense strand
ggagaaagcagagauaaaa

SEQ ID NO: 709923 - RNA, 19 nt, Homo sapiens
  misc_RNA (1)...(19): siRNA sense strand
gagaagaacaggauaaagc

SEQ ID NO: 709924 - RNA, 19 nt, Homo sapiens
  misc_RNA (1)...(19): siRNA sense strand
gaggagaaagcagagauaa

SEQ ID NO: 709925 - RNA, 19 nt, Homo sapiens
  misc_RNA (1)...(19): siRNA sense strand
ugaagaagcagaggaagaa

SEQ ID NO: 709926 - RNA, 19 nt, Homo sapiens
  misc_RNA (1)...(19): siRNA sense strand
gagcauuccaggagagaaa

SEQ ID NO: 709927 - RNA, 19 nt, Homo sapiens
  misc_RNA (1)...(19): siRNA sense strand
aaggagggcuucccgauca

SEQ ID NO: 709928 - RNA, 19 nt, Homo sapiens
  misc_RNA (1)...(19): siRNA sense strand
gcuucgaccucaugaacaa

SEQ ID NO: 709929 - RNA, 19 nt, Homo sapiens
  misc_RNA (1)...(19): siRNA sense strand
gaaguaagugaggaagaaa

SEQ ID NO: 709930 - RNA, 19 nt, Homo sapiens
  misc_RNA (1)...(19): siRNA sense strand
caacaucgucaccguuaga

SEQ ID NO: 709931 - RNA, 19 nt, Homo sapiens
  misc_RNA (1)...(19): siRNA sense strand
ugagggagaucaacaccau

SEQ ID NO: 709932 - RNA, 19 nt, Homo sapiens
  misc_RNA (1)...(19): siRNA sense strand
aaaggacucuuggaaagug

SEQ ID NO: 709933 - RNA, 19 nt, Homo sapiens
  misc_RNA (1)...(19): siRNA sense strand
gcucuaaagcggcugaaga

SEQ ID NO: 709934 - RNA, 19 nt, Homo sapiens
  misc_RNA (1)...(19): siRNA sense strand
ggcugaagauggagaagga

SEQ ID NO: 709935 - RNA, 19 nt, Homo sapiens
  misc_RNA (1)...(19): siRNA sense strand
agacagaggagaagaagau

SEQ ID NO: 709936 - RNA, 19 nt, Homo sapiens
  misc_RNA (1)...(19): siRNA sense strand
gaucaacaccauccucaag

SEQ ID NO: 709937 - RNA, 19 nt, Homo sapiens
  misc_RNA (1)...(19): siRNA sense strand
gaugaaauuguggcucuaa

SEQ ID NO: 709938 - RNA, 19 nt, Homo sapiens
  misc_RNA (1)...(19): siRNA sense strand
gaaucaggcucagguucug

SEQ ID NO: 709939 - RNA, 19 nt, Homo sapiens
  misc_RNA (1)...(19): siRNA sense strand
gaggugaagacccugauga

SEQ ID NO: 709940 - RNA, 19 nt, Homo sapiens
  misc_RNA (1)...(19): siRNA sense strand
ggaggaggaggaagaggaa

SEQ ID NO: 709941 - RNA, 19 nt, Homo sapiens
  misc_RNA (1)...(19): siRNA sense strand
ggaaacgacaucgagaaga

SEQ ID NO: 709942 - RNA, 19 nt, Homo sapiens
  misc_RNA (1)...(19): siRNA sense strand
agucagaaaucgaucagau

SEQ ID NO: 709943 - RNA, 19 nt, Homo sapiens
  misc_RNA (1)...(19): siRNA sense strand
ucacgucgcugagggagau

SEQ ID NO: 709944 - RNA, 19 nt, Homo sapiens
  misc_RNA (1)...(19): siRNA sense strand
gaaauuguggcucuaaagc

SEQ ID NO: 709945 - RNA, 19 nt, Homo sapiens
  misc_RNA (1)...(19): siRNA sense strand
gucaguggguugcaucuuc

SEQ ID NO: 709946 - RNA, 19 nt, Homo sapiens
  misc_RNA (1)...(19): siRNA sense strand
ugaagacccugaugaucca

SEQ ID NO: 709947 - RNA, 19 nt, Homo sapiens
  misc_RNA (1)...(19): siRNA sense strand
gaagacagaggagaagaag

SEQ ID NO: 709948 - RNA, 19 nt, Homo sapiens
  misc_RNA (1)...(19): siRNA sense strand
gaagaacgagaaaaugaaa

SEQ ID NO: 709949 - RNA, 19 nt, Homo sapiens
  misc_RNA (1)...(19): siRNA sense strand
ggaagaaaugagugaagau

SEQ ID NO: 709950 - RNA, 19 nt, Homo sapiens
  misc_RNA (1)...(19): siRNA sense strand
agacagaagagaagggaaa

SEQ ID NO: 709951 - RNA, 19 nt, Homo sapiens
  misc_RNA (1)...(19): siRNA sense strand
gaaugggaaagacagaaga

SEQ ID NO: 709952 - RNA, 19 nt, Homo sapiens
  misc_RNA (1)...(19): siRNA sense strand
caaaugucucggaaagaaa

SEQ ID NO: 709953 - RNA, 19 nt, Homo sapiens
  misc_RNA (1)...(19): siRNA sense strand
gaggagaagaagaugauuc

SEQ ID NO: 709954 - RNA, 19 nt, Homo sapiens
  misc_RNA (1)...(19): siRNA sense strand
gcaacauggacaagaucua

SEQ ID NO: 709955 - RNA, 19 nt, Homo sapiens
  misc_RNA (1)...(19): siRNA sense strand
aggaagaaaugagugaaga

SEQ ID NO: 709956 - RNA, 19 nt, Homo sapiens
  misc_RNA (1)...(19): siRNA sense strand
auaaggaacuccccguaua

SEQ ID NO: 709957 - RNA, 19 nt, Homo sapiens
  misc_RNA (1)...(19): siRNA sense strand
gagugaagaagcagaggaa

SEQ ID NO: 709958 - RNA, 19 nt, Homo sapiens
  misc_RNA (1)...(19): siRNA sense strand
ggaagucagaaaucgauca

SEQ ID NO: 709959 - RNA, 19 nt, Homo sapiens
  misc_RNA (1)...(19): siRNA sense strand
cccaacaucgucaccguua

SEQ ID NO: 709960 - RNA, 19 nt, Homo sapiens
  misc_RNA (1)...(19): siRNA sense strand
gggaaagacagaagagaag

SEQ ID NO: 709961 - RNA, 19 nt, Homo sapiens
  misc_RNA (1)...(19): siRNA sense strand
caaaagacaagaaaacaga

SEQ ID NO: 709962 - RNA, 19 nt, Homo sapiens
  misc_RNA (1)...(19): siRNA sense strand
gaucgaggagggcaccuau

SEQ ID NO: 709963 - RNA, 19 nt, Homo sapiens
  misc_RNA (1)...(19): siRNA sense strand
gaaaugagugaagaugaag

SEQ ID NO: 709964 - RNA, 19 nt, Homo sapiens
  misc_RNA (1)...(19): siRNA sense strand
ggaagaggaggaggaggaa

SEQ ID NO: 709965 - RNA, 19 nt, Homo sapiens
  misc_RNA (1)...(19): siRNA sense strand
caugcuagagugaaagaaa

SEQ ID NO: 709966 - RNA, 19 nt, Homo sapiens
  misc_RNA (1)...(19): siRNA sense strand
gaagagaaaauggaagaaa

SEQ ID NO: 709967 - RNA, 19 nt, Homo sapiens
  misc_RNA (1)...(19): siRNA sense strand
ggaaugggaaagacagaag

SEQ ID NO: 709968 - RNA, 19 nt, Homo sapiens
  misc_RNA (1)...(19): siRNA sense strand
cgucaccguuagagagauu

SEQ ID NO: 709969 - RNA, 19 nt, Homo sapiens
  misc_RNA (1)...(19): siRNA sense strand
gugaagaagcagaggaaga

SEQ ID NO: 709970 - RNA, 19 nt, Homo sapiens
  misc_RNA (1)...(19): siRNA sense strand
cgaagaaguaagugaggaa

SEQ ID NO: 709971 - RNA, 19 nt, Homo sapiens
  misc_RNA (1)...(19): siRNA sense strand
caacauggacaagaucuac

SEQ ID NO: 709972 - RNA, 19 nt, Homo sapiens
  misc_RNA (1)...(19): siRNA sense strand
ggaacaagaggagaaagca

SEQ ID NO: 709973 - RNA, 19 nt, Homo sapiens
  misc_RNA (1)...(19): siRNA sense strand
gaaacgaaggaaggaacaa

SEQ ID NO: 709974 - RNA, 19 nt, Homo sapiens
  misc_RNA (1)...(19): siRNA sense strand
ggaagggagcaccagugaa

SEQ ID NO: 709975 - RNA, 19 nt, Homo sapiens
  misc_RNA (1)...(19): siRNA sense strand
cagaggagaagaagaugau

SEQ ID NO: 709976 - RNA, 19 nt, Homo sapiens
  misc_RNA (1)...(19): siRNA sense strand
guaagugaggaagaaauga

SEQ ID NO: 709977 - RNA, 19 nt, Homo sapiens
  misc_RNA (1)...(19): siRNA sense strand
gcagaaucaggcucagguu

SEQ ID NO: 709978 - RNA, 19 nt, Homo sapiens
  misc_RNA (1)...(19): siRNA sense strand
cagaagagaagggaaaugg

SEQ ID NO: 709979 - RNA, 19 nt, Homo sapiens
  misc_RNA (1)...(19): siRNA sense strand
aggacggccucaagcauga

SEQ ID NO: 709980 - RNA, 19 nt, Homo sapiens
  misc_RNA (1)...(19): siRNA sense strand
gcaccuauggaguggucua

SEQ ID NO: 709981 - RNA, 19 nt, Homo sapiens
  misc_RNA (1)...(19): siRNA sense strand
gacagagggcgacuaugug

SEQ ID NO: 709982 - RNA, 19 nt, Homo sapiens
  misc_RNA (1)...(19): siRNA sense strand
aagaaaugagugaagauga

SEQ ID NO: 709983 - RNA, 19 nt, Homo sapiens
  misc_RNA (1)...(19): siRNA sense strand
ggaaauggcaagggagcau

SEQ ID NO: 709984 - RNA, 19 nt, Homo sapiens
  misc_RNA (1)...(19): siRNA sense strand
agaggagaaagcagagaua

SEQ ID NO: 709985 - RNA, 19 nt, Homo sapiens
  misc_RNA (1)...(19): siRNA sense strand
gaagauggagaaggagaag

SEQ ID NO: 709986 - RNA, 19 nt, Homo sapiens
  misc_RNA (1)...(19): siRNA sense strand
gaggagaccggcagcaacu

SEQ ID NO: 709987 - RNA, 19 nt, Homo sapiens
  misc_RNA (1)...(19): siRNA sense strand
agaaagagagcacgaacgu

SEQ ID NO: 709988 - RNA, 19 nt, Homo sapiens
  misc_RNA (1)...(19): siRNA sense strand
gaggaagaaaugagugaag

SEQ ID NO: 709989 - RNA, 19 nt, Homo sapiens
  misc_RNA (1)...(19): siRNA sense strand
gcagagauaaaacgcuuaa

SEQ ID NO: 709990 - RNA, 19 nt, Homo sapiens
  misc_RNA (1)...(19): siRNA sense strand
ugggaaagacagaagagaa

SEQ ID NO: 709991 - RNA, 19 nt, Homo sapiens
  misc_RNA (1)...(19): siRNA sense strand
ucccagcagucaagaagau

SEQ ID NO: 709992 - RNA, 19 nt, Homo sapiens
  misc_RNA (1)...(19): siRNA sense strand
agaagcagaggaagaagug

SEQ ID NO: 709993 - RNA, 19 nt, Homo sapiens
  misc_RNA (1)...(19): siRNA sense strand
uauggaagacagaggagaa

SEQ ID NO: 709994 - RNA, 19 nt, Homo sapiens
  misc_RNA (1)...(19): siRNA sense strand
ugaagaugaagaacgagaa

SEQ ID NO: 709995 - RNA, 19 nt, Homo sapiens
  misc_RNA (1)...(19): siRNA sense strand
gugaggaagaaaugaguga

SEQ ID NO: 709996 - RNA, 19 nt, Homo sapiens
  misc_RNA (1)...(19): siRNA sense strand
gaacuccccguauagaaga

SEQ ID NO: 709997 - RNA, 19 nt, Homo sapiens
  misc_RNA (1)...(19): siRNA sense strand
ugaaaaggacucuuggaaa

SEQ ID NO: 709998 - RNA, 19 nt, Homo sapiens
  misc_RNA (1)...(19): siRNA sense strand
gaaacgacaucgagaagaa

SEQ ID NO: 709999 - RNA, 19 nt, Homo sapiens
  misc_RNA (1)...(19): siRNA sense strand
gcaaaugucucggaaagaa

SEQ ID NO: 710000 - RNA, 19 nt, Homo sapiens
  misc_RNA (1)...(19): siRNA sense strand
gaaaacagaugaaauugug

SEQ ID NO: 710001 - RNA, 19 nt, Homo sapiens
  misc_RNA (1)...(19): siRNA sense strand
gcauggagaucacaauaag

SEQ ID NO: 710002 - RNA, 19 nt, Homo sapiens
  misc_RNA (1)...(19): siRNA sense strand
gagcaccagugaagaauca

SEQ ID NO: 710003 - RNA, 19 nt, Homo sapiens
  misc_RNA (1)...(19): siRNA sense strand
ugaaacaccugcacgacaa

SEQ ID NO: 710004 - RNA, 19 nt, Homo sapiens
  misc_RNA (1)...(19): siRNA sense strand
gaaaaggacucuuggaaag

SEQ ID NO: 710005 - RNA, 19 nt, Homo sapiens
  misc_RNA (1)...(19): siRNA sense strand
uaaagcggcugaagaugga

SEQ ID NO: 710006 - RNA, 19 nt, Homo sapiens
  misc_RNA (1)...(19): siRNA sense strand
agaaaugagugaagaugaa

SEQ ID NO: 710007 - RNA, 19 nt, Homo sapiens
  misc_RNA (1)...(19): siRNA sense strand
gagugaagaugaagaacga

SEQ ID NO: 710008 - RNA, 19 nt, Homo sapiens
  misc_RNA (1)...(19): siRNA sense strand
gcagcaacauggacaagau

SEQ ID NO: 710009 - RNA, 19 nt, Homo sapiens
  misc_RNA (1)...(19): siRNA sense strand
gaagggagcaccagugaag

SEQ ID NO: 710010 - RNA, 19 nt, Homo sapiens
  misc_RNA (1)...(19): siRNA sense strand
ggaaggaacaagaggagaa

SEQ ID NO: 710011 - RNA, 19 nt, Homo sapiens
  misc_RNA (1)...(19): siRNA sense strand
ggaguggucuacagagcaa

SEQ ID NO: 710012 - RNA, 19 nt, Homo sapiens
  misc_RNA (1)...(19): siRNA sense strand
gaagaugaagaacgagaaa

SEQ ID NO: 710013 - RNA, 19 nt, Homo sapiens
  misc_RNA (1)...(19): siRNA sense strand
gcacgaacgucggaaacga

SEQ ID NO: 710014 - RNA, 19 nt, Homo sapiens
  misc_RNA (1)...(19): siRNA sense strand
gagaagacucuauggaaga

SEQ ID NO: 710015 - RNA, 19 nt, Homo sapiens
  misc_RNA (1)...(19): siRNA sense strand
cagcaaaugucucggaaag

SEQ ID NO: 710016 - RNA, 19 nt, Homo sapiens
  misc_RNA (1)...(19): siRNA sense strand
cagaaaagaugaaaagaga

SEQ ID NO: 710017 - RNA, 19 nt, Homo sapiens
  misc_RNA (1)...(19): siRNA sense strand
gaagaaaugagugaagaug

SEQ ID NO: 710018 - RNA, 19 nt, Homo sapiens
  misc_RNA (1)...(19): siRNA sense strand
agaaguaagugaggaagaa

SEQ ID NO: 710019 - RNA, 19 nt, Homo sapiens
  misc_RNA (1)...(19): siRNA sense strand
ggaagacagaggagaagaa

SEQ ID NO: 710020 - RNA, 19 nt, Homo sapiens
  misc_RNA (1)...(19): siRNA sense strand
gaaggaacaagaggagaaa

SEQ ID NO: 710021 - RNA, 19 nt, Homo sapiens
  misc_RNA (1)...(19): siRNA sense strand
ugacagagggcgacuaugu

SEQ ID NO: 710022 - RNA, 19 nt, Homo sapiens
  misc_RNA (1)...(19): siRNA sense strand
ggagaaagcagagauaaaa

SEQ ID NO: 710023 - RNA, 19 nt, Homo sapiens
  misc_RNA (1)...(19): siRNA sense strand
gagaagaacaggauaaagc

SEQ ID NO: 710024 - RNA, 19 nt, Homo sapiens
  misc_RNA (1)...(19): siRNA sense strand
gaggagaaagcagagauaa

SEQ ID NO: 710025 - RNA, 19 nt, Homo sapiens
  misc_RNA (1)...(19): siRNA sense strand
ugaagaagcagaggaagaa

SEQ ID NO: 710026 - RNA, 19 nt, Homo sapiens
  misc_RNA (1)...(19): siRNA sense strand
gagcauuccaggagagaaa

SEQ ID NO: 710027 - RNA, 19 nt, Homo sapiens
  misc_RNA (1)...(19): siRNA sense strand
aaggagggcuucccgauca

SEQ ID NO: 710028 - RNA, 19 nt, Homo sapiens
  misc_RNA (1)...(19): siRNA sense strand
gcuucgaccucaugaacaa

SEQ ID NO: 710029 - RNA, 19 nt, Homo sapiens
  misc_RNA (1)...(19): siRNA sense strand
gaaguaagugaggaagaaa

SEQ ID NO: 710030 - RNA, 19 nt, Homo sapiens
  misc_RNA (1)...(19): siRNA sense strand
caacaucgucaccguuaga

SEQ ID NO: 710031 - RNA, 19 nt, Homo sapiens
  misc_RNA (1)...(19): siRNA sense strand
ugagggagaucaacaccau

SEQ ID NO: 710032 - RNA, 19 nt, Homo sapiens
  misc_RNA (1)...(19): siRNA sense strand
aaaggacucuuggaaagug

SEQ ID NO: 710033 - RNA, 19 nt, Homo sapiens
  misc_RNA (1)...(19): siRNA sense strand
gcucuaaagcggcugaaga

SEQ ID NO: 710034 - RNA, 19 nt, Homo sapiens
  misc_RNA (1)...(19): siRNA sense strand
ggcugaagauggagaagga

SEQ ID NO: 710035 - RNA, 19 nt, Homo sapiens
  misc_RNA (1)...(19): siRNA sense strand
agacagaggagaagaagau

SEQ ID NO: 710036 - RNA, 19 nt, Homo sapiens
  misc_RNA (1)...(19): siRNA sense strand
gaucaacaccauccucaag

SEQ ID NO: 710037 - RNA, 19 nt, Homo sapiens
  misc_RNA (1)...(19): siRNA sense strand
gaugaaauuguggcucuaa

SEQ ID NO: 710038 - RNA, 19 nt, Homo sapiens
  misc_RNA (1)...(19): siRNA sense strand
gaaucaggcucagguucug

SEQ ID NO: 710039 - RNA, 19 nt, Homo sapiens
  misc_RNA (1)...(19): siRNA sense strand
gaggugaagacccugauga

SEQ ID NO: 710040 - RNA, 19 nt, Homo sapiens
  misc_RNA (1)...(19): siRNA sense strand
ggaggaggaggaagaggaa

SEQ ID NO: 710041 - RNA, 19 nt, Homo sapiens
  misc_RNA (1)...(19): siRNA sense strand
ggaaacgacaucgagaaga

SEQ ID NO: 710042 - RNA, 19 nt, Homo sapiens
  misc_RNA (1)...(19): siRNA sense strand
agucagaaaucgaucagau

SEQ ID NO: 710043 - RNA, 19 nt, Homo sapiens
  misc_RNA (1)...(19): siRNA sense strand
ucacgucgcugagggagau

SEQ ID NO: 710044 - RNA, 19 nt, Homo sapiens
  misc_RNA (1)...(19): siRNA sense strand
gaaauuguggcucuaaagc

SEQ ID NO: 710045 - RNA, 19 nt, Homo sapiens
  misc_RNA (1)...(19): siRNA sense strand
gucaguggguugcaucuuc

SEQ ID NO: 710046 - RNA, 19 nt, Homo sapiens
  misc_RNA (1)...(19): siRNA sense strand
ugaagacccugaugaucca

SEQ ID NO: 710047 - RNA, 19 nt, Homo sapiens
  misc_RNA (1)...(19): siRNA sense strand
gaagacagaggagaagaag

SEQ ID NO: 710048 - RNA, 19 nt, Homo sapiens
  misc_RNA (1)...(19): siRNA sense strand
gaagaacgagaaaaugaaa

SEQ ID NO: 710049 - RNA, 19 nt, Homo sapiens
  misc_RNA (1)...(19): siRNA sense strand
ggaagaaaugagugaagau

SEQ ID NO: 710050 - RNA, 19 nt, Homo sapiens
  misc_RNA (1)...(19): siRNA sense strand
agacagaagagaagggaaa

SEQ ID NO: 710051 - RNA, 19 nt, Homo sapiens
  misc_RNA (1)...(19): siRNA sense strand
gaaugggaaagacagaaga

SEQ ID NO: 710052 - RNA, 19 nt, Homo sapiens
  misc_RNA (1)...(19): siRNA sense strand
caaaugucucggaaagaaa

SEQ ID NO: 710053 - RNA, 19 nt, Homo sapiens
  misc_RNA (1)...(19): siRNA sense strand
gaggagaagaagaugauuc

SEQ ID NO: 710054 - RNA, 19 nt, Homo sapiens
  misc_RNA (1)...(19): siRNA sense strand
gcaacauggacaagaucua

SEQ ID NO: 710055 - RNA, 19 nt, Homo sapiens
  misc_RNA (1)...(19): siRNA sense strand
aggaagaaaugagugaaga

SEQ ID NO: 710056 - RNA, 19 nt, Homo sapiens
  misc_RNA (1)...(19): siRNA sense strand
auaaggaacuccccguaua

SEQ ID NO: 710057 - RNA, 19 nt, Homo sapiens
  misc_RNA (1)...(19): siRNA sense strand
gagugaagaagcagaggaa

SEQ ID NO: 710058 - RNA, 19 nt, Homo sapiens
  misc_RNA (1)...(19): siRNA sense strand
ggaagucagaaaucgauca

SEQ ID NO: 710059 - RNA, 19 nt, Homo sapiens
  misc_RNA (1)...(19): siRNA sense strand
cccaacaucgucaccguua

SEQ ID NO: 710060 - RNA, 19 nt, Homo sapiens
  misc_RNA (1)...(19): siRNA sense strand
gggaaagacagaagagaag

SEQ ID NO: 710061 - RNA, 19 nt, Homo sapiens
  misc_RNA (1)...(19): siRNA sense strand
caaaagacaagaaaacaga

SEQ ID NO: 710062 - RNA, 19 nt, Homo sapiens
  misc_RNA (1)...(19): siRNA sense strand
gaucgaggagggcaccuau

SEQ ID NO: 710063 - RNA, 19 nt, Homo sapiens
  misc_RNA (1)...(19): siRNA sense strand
gaaaugagugaagaugaag

SEQ ID NO: 710064 - RNA, 19 nt, Homo sapiens
  misc_RNA (1)...(19): siRNA sense strand
ggaagaggaggaggaggaa

SEQ ID NO: 710065 - RNA, 19 nt, Homo sapiens
  misc_RNA (1)...(19): siRNA sense strand
caugcuagagugaaagaaa

SEQ ID NO: 710066 - RNA, 19 nt, Homo sapiens
  misc_RNA (1)...(19): siRNA sense strand
gaagagaaaauggaagaaa

SEQ ID NO: 710067 - RNA, 19 nt, Homo sapiens
  misc_RNA (1)...(19): siRNA sense strand
ggaaugggaaagacagaag

SEQ ID NO: 710068 - RNA, 19 nt, Homo sapiens
  misc_RNA (1)...(19): siRNA sense strand
cgucaccguuagagagauu

SEQ ID NO: 710069 - RNA, 19 nt, Homo sapiens
  misc_RNA (1)...(19): siRNA sense strand
gugaagaagcagaggaaga

SEQ ID NO: 710070 - RNA, 19 nt, Homo sapiens
  misc_RNA (1)...(19): siRNA sense strand
cgaagaaguaagugaggaa

SEQ ID NO: 710071 - RNA, 19 nt, Homo sapiens
  misc_RNA (1)...(19): siRNA sense strand
caacauggacaagaucuac

SEQ ID NO: 710072 - RNA, 19 nt, Homo sapiens
  misc_RNA (1)...(19): siRNA sense strand
ggaacaagaggagaaagca

SEQ ID NO: 710073 - RNA, 19 nt, Homo sapiens
  misc_RNA (1)...(19): siRNA sense strand
gaaacgaaggaaggaacaa

SEQ ID NO: 710074 - RNA, 19 nt, Homo sapiens
  misc_RNA (1)...(19): siRNA sense strand
ggaagggagcaccagugaa

SEQ ID NO: 710075 - RNA, 19 nt, Homo sapiens
  misc_RNA (1)...(19): siRNA sense strand
cagaggagaagaagaugau

SEQ ID NO: 710076 - RNA, 19 nt, Homo sapiens
  misc_RNA (1)...(19): siRNA sense strand
guaagugaggaagaaauga

SEQ ID NO: 710077 - RNA, 19 nt, Homo sapiens
  misc_RNA (1)...(19): siRNA sense strand
gcagaaucaggcucagguu

SEQ ID NO: 710078 - RNA, 19 nt, Homo sapiens
  misc_RNA (1)...(19): siRNA sense strand
cagaagagaagggaaaugg

SEQ ID NO: 710079 - RNA, 19 nt, Homo sapiens
  misc_RNA (1)...(19): siRNA sense strand
aggacggccucaagcauga

SEQ ID NO: 710080 - RNA, 19 nt, Homo sapiens
  misc_RNA (1)...(19): siRNA sense strand
gcaccuauggaguggucua

SEQ ID NO: 710081 - RNA, 19 nt, Homo sapiens
  misc_RNA (1)...(19): siRNA sense strand
gacagagggcgacuaugug

SEQ ID NO: 710082 - RNA, 19 nt, Homo sapiens
  misc_RNA (1)...(19): siRNA sense strand
aagaaaugagugaagauga

SEQ ID NO: 710083 - RNA, 19 nt, Homo sapiens
  misc_RNA (1)...(19): siRNA sense strand
ggaaauggcaagggagcau

SEQ ID NO: 710084 - RNA, 19 nt, Homo sapiens
  misc_RNA (1)...(19): siRNA sense strand
agaggagaaagcagagaua

SEQ ID NO: 710085 - RNA, 19 nt, Homo sapiens
  misc_RNA (1)...(19): siRNA sense strand
gaagauggagaaggagaag

SEQ ID NO: 710086 - RNA, 19 nt, Homo sapiens
  misc_RNA (1)...(19): siRNA sense strand
gaggagaccggcagcaacu

SEQ ID NO: 710087 - RNA, 19 nt, Homo sapiens
  misc_RNA (1)...(19): siRNA sense strand
agaaagagagcacgaacgu

SEQ ID NO: 710088 - RNA, 19 nt, Homo sapiens
  misc_RNA (1)...(19): siRNA sense strand
gaggaagaaaugagugaag

SEQ ID NO: 710089 - RNA, 19 nt, Homo sapiens
  misc_RNA (1)...(19): siRNA sense strand
gcagagauaaaacgcuuaa

SEQ ID NO: 710090 - RNA, 19 nt, Homo sapiens
  misc_RNA (1)...(19): siRNA sense strand
ugggaaagacagaagagaa

SEQ ID NO: 710091 - RNA, 19 nt, Homo sapiens
  misc_RNA (1)...(19): siRNA sense strand
ucccagcagucaagaagau

SEQ ID NO: 710092 - RNA, 19 nt, Homo sapiens
  misc_RNA (1)...(19): siRNA sense strand
agaagcagaggaagaagug

SEQ ID NO: 710093 - RNA, 19 nt, Homo sapiens
  misc_RNA (1)...(19): siRNA sense strand
uauggaagacagaggagaa

SEQ ID NO: 710094 - RNA, 19 nt, Homo sapiens
  misc_RNA (1)...(19): siRNA sense strand
ugaagaugaagaacgagaa

SEQ ID NO: 710095 - RNA, 19 nt, Homo sapiens
  misc_RNA (1)...(19): siRNA sense strand
gugaggaagaaaugaguga

SEQ ID NO: 710096 - RNA, 19 nt, Homo sapiens
  misc_RNA (1)...(19): siRNA sense strand
gaacuccccguauagaaga

SEQ ID NO: 710097 - RNA, 19 nt, Homo sapiens
  misc_RNA (1)...(19): siRNA sense strand
ugaaaaggacucuuggaaa

SEQ ID NO: 710098 - RNA, 19 nt, Homo sapiens
  misc_RNA (1)...(19): siRNA sense strand
gaaacgacaucgagaagaa

SEQ ID NO: 710099 - RNA, 19 nt, Homo sapiens
  misc_RNA (1)...(19): siRNA sense strand
gcaaaugucucggaaagaa

SEQ ID NO: 710100 - RNA, 19 nt, Homo sapiens
  misc_RNA (1)...(19): siRNA sense strand
gaaaacagaugaaauugug

SEQ ID NO: 710101 - RNA, 19 nt, Homo sapiens
  misc_RNA (1)...(19): siRNA sense strand
gcauggagaucacaauaag

SEQ ID NO: 710102 - RNA, 19 nt, Homo sapiens
  misc_RNA (1)...(19): siRNA sense strand
gagcaccagugaagaauca

SEQ ID NO: 710103 - RNA, 19 nt, Homo sapiens
  misc_RNA (1)...(19): siRNA sense strand
ugaaacaccugcacgacaa

SEQ ID NO: 710104 - RNA, 19 nt, Homo sapiens
  misc_RNA (1)...(19): siRNA sense strand
gaaaaggacucuuggaaag

SEQ ID NO: 710105 - RNA, 19 nt, Homo sapiens
  misc_RNA (1)...(19): siRNA sense strand
uaaagcggcugaagaugga

SEQ ID NO: 710106 - RNA, 19 nt, Homo sapiens
  misc_RNA (1)...(19): siRNA sense strand
agaaaugagugaagaugaa

SEQ ID NO: 710107 - RNA, 19 nt, Homo sapiens
  misc_RNA (1)...(19): siRNA sense strand
gagugaagaugaagaacga

SEQ ID NO: 710108 - RNA, 19 nt, Homo sapiens
  misc_RNA (1)...(19): siRNA sense strand
gcagcaacauggacaagau

SEQ ID NO: 710109 - RNA, 19 nt, Homo sapiens
  misc_RNA (1)...(19): siRNA sense strand
gaagggagcaccagugaag

SEQ ID NO: 710110 - RNA, 19 nt, Homo sapiens
  misc_RNA (1)...(19): siRNA sense strand
ggaaggaacaagaggagaa

SEQ ID NO: 710111 - RNA, 19 nt, Homo sapiens
  misc_RNA (1)...(19): siRNA sense strand
ggaguggucuacagagcaa

SEQ ID NO: 710112 - RNA, 19 nt, Homo sapiens
  misc_RNA (1)...(19): siRNA sense strand
gaagaugaagaacgagaaa

SEQ ID NO: 710113 - RNA, 19 nt, Homo sapiens
  misc_RNA (1)...(19): siRNA sense strand
gcacgaacgucggaaacga

SEQ ID NO: 710114 - RNA, 19 nt, Homo sapiens
  misc_RNA (1)...(19): siRNA sense strand
gagaagacucuauggaaga

SEQ ID NO: 710115 - RNA, 19 nt, Homo sapiens
  misc_RNA (1)...(19): siRNA sense strand
cagcaaaugucucggaaag

SEQ ID NO: 710116 - RNA, 19 nt, Homo sapiens
  misc_RNA (1)...(19): siRNA sense strand
cagaaaagaugaaaagaga

SEQ ID NO: 710117 - RNA, 19 nt, Homo sapiens
  misc_RNA (1)...(19): siRNA sense strand
gaagaaaugagugaagaug

SEQ ID NO: 710118 - RNA, 19 nt, Homo sapiens
  misc_RNA (1)...(19): siRNA sense strand
agaaguaagugaggaagaa

SEQ ID NO: 710119 - RNA, 19 nt, Homo sapiens
  misc_RNA (1)...(19): siRNA sense strand
ggaagacagaggagaagaa

SEQ ID NO: 710120 - RNA, 19 nt, Homo sapiens
  misc_RNA (1)...(19): siRNA sense strand
gaaggaacaagaggagaaa

SEQ ID NO: 710121 - RNA, 19 nt, Homo sapiens
  misc_RNA (1)...(19): siRNA sense strand
ugacagagggcgacuaugu

SEQ ID NO: 710122 - RNA, 19 nt, Homo sapiens
  misc_RNA (1)...(19): siRNA sense strand
ggagaaagcagagauaaaa

SEQ ID NO: 710123 - RNA, 19 nt, Homo sapiens
  misc_RNA (1)...(19): siRNA sense strand
gagaagaacaggauaaagc

SEQ ID NO: 710124 - RNA, 19 nt, Homo sapiens
  misc_RNA (1)...(19): siRNA sense strand
gaggagaaagcagagauaa

SEQ ID NO: 710125 - RNA, 19 nt, Homo sapiens
  misc_RNA (1)...(19): siRNA sense strand
ugaagaagcagaggaagaa

SEQ ID NO: 710126 - RNA, 19 nt, Homo sapiens
  misc_RNA (1)...(19): siRNA sense strand
gagcauuccaggagagaaa

SEQ ID NO: 710127 - RNA, 19 nt, Homo sapiens
  misc_RNA (1)...(19): siRNA sense strand
aaggagggcuucccgauca

SEQ ID NO: 710128 - RNA, 19 nt, Homo sapiens
  misc_RNA (1)...(19): siRNA sense strand
gcuucgaccucaugaacaa

SEQ ID NO: 710129 - RNA, 19 nt, Homo sapiens
  misc_RNA (1)...(19): siRNA sense strand
gaaguaagugaggaagaaa

SEQ ID NO: 710130 - RNA, 19 nt, Homo sapiens
  misc_RNA (1)...(19): siRNA sense strand
caacaucgucaccguuaga

SEQ ID NO: 710131 - RNA, 19 nt, Homo sapiens
  misc_RNA (1)...(19): siRNA sense strand
ugagggagaucaacaccau

SEQ ID NO: 710132 - RNA, 19 nt, Homo sapiens
  misc_RNA (1)...(19): siRNA sense strand
aaaggacucuuggaaagug

SEQ ID NO: 710133 - RNA, 19 nt, Homo sapiens
  misc_RNA (1)...(19): siRNA sense strand
gcucuaaagcggcugaaga

SEQ ID NO: 710134 - RNA, 19 nt, Homo sapiens
  misc_RNA (1)...(19): siRNA sense strand
ggcugaagauggagaagga

SEQ ID NO: 710135 - RNA, 19 nt, Homo sapiens
  misc_RNA (1)...(19): siRNA sense strand
agacagaggagaagaagau

SEQ ID NO: 710136 - RNA, 19 nt, Homo sapiens
  misc_RNA (1)...(19): siRNA sense strand
gaucaacaccauccucaag

SEQ ID NO: 710137 - RNA, 19 nt, Homo sapiens
  misc_RNA (1)...(19): siRNA sense strand
gaugaaauuguggcucuaa

SEQ ID NO: 710138 - RNA, 19 nt, Homo sapiens
  misc_RNA (1)...(19): siRNA sense strand
gaaucaggcucagguucug

SEQ ID NO: 710139 - RNA, 19 nt, Homo sapiens
  misc_RNA (1)...(19): siRNA sense strand
gaggugaagacccugauga

SEQ ID NO: 710140 - RNA, 19 nt, Homo sapiens
  misc_RNA (1)...(19): siRNA sense strand
ggaggaggaggaagaggaa

SEQ ID NO: 710141 - RNA, 19 nt, Homo sapiens
  misc_RNA (1)...(19): siRNA sense strand
ggaaacgacaucgagaaga

SEQ ID NO: 710142 - RNA, 19 nt, Homo sapiens
  misc_RNA (1)...(19): siRNA sense strand
agucagaaaucgaucagau

SEQ ID NO: 710143 - RNA, 19 nt, Homo sapiens
  misc_RNA (1)...(19): siRNA sense strand
ucacgucgcugagggagau

SEQ ID NO: 710144 - RNA, 19 nt, Homo sapiens
  misc_RNA (1)...(19): siRNA sense strand
gaaauuguggcucuaaagc

SEQ ID NO: 710145 - RNA, 19 nt, Homo sapiens
  misc_RNA (1)...(19): siRNA sense strand
gucaguggguugcaucuuc

SEQ ID NO: 710146 - RNA, 19 nt, Homo sapiens
  misc_RNA (1)...(19): siRNA sense strand
ugaagacccugaugaucca

SEQ ID NO: 710147 - RNA, 19 nt, Homo sapiens
  misc_RNA (1)...(19): siRNA sense strand
gaagacagaggagaagaag

SEQ ID NO: 710148 - RNA, 19 nt, Homo sapiens
  misc_RNA (1)...(19): siRNA sense strand
gaagaacgagaaaaugaaa

SEQ ID NO: 710149 - RNA, 19 nt, Homo sapiens
  misc_RNA (1)...(19): siRNA sense strand
ggaagaaaugagugaagau

SEQ ID NO: 710150 - RNA, 19 nt, Homo sapiens
  misc_RNA (1)...(19): siRNA sense strand
agacagaagagaagggaaa

SEQ ID NO: 710151 - RNA, 19 nt, Homo sapiens
  misc_RNA (1)...(19): siRNA sense strand
gaaugggaaagacagaaga

SEQ ID NO: 710152 - RNA, 19 nt, Homo sapiens
  misc_RNA (1)...(19): siRNA sense strand
caaaugucucggaaagaaa

SEQ ID NO: 710153 - RNA, 19 nt, Homo sapiens
  misc_RNA (1)...(19): siRNA sense strand
gaggagaagaagaugauuc

SEQ ID NO: 710154 - RNA, 19 nt, Homo sapiens
  misc_RNA (1)...(19): siRNA sense strand
gcaacauggacaagaucua

SEQ ID NO: 710155 - RNA, 19 nt, Homo sapiens
  misc_RNA (1)...(19): siRNA sense strand
aggaagaaaugagugaaga

SEQ ID NO: 710156 - RNA, 19 nt, Homo sapiens
  misc_RNA (1)...(19): siRNA sense strand
auaaggaacuccccguaua

SEQ ID NO: 710157 - RNA, 19 nt, Homo sapiens
  misc_RNA (1)...(19): siRNA sense strand
gagugaagaagcagaggaa

SEQ ID NO: 710158 - RNA, 19 nt, Homo sapiens
  misc_RNA (1)...(19): siRNA sense strand
ggaagucagaaaucgauca

SEQ ID NO: 710159 - RNA, 19 nt, Homo sapiens
  misc_RNA (1)...(19): siRNA sense strand
cccaacaucgucaccguua

SEQ ID NO: 710160 - RNA, 19 nt, Homo sapiens
  misc_RNA (1)...(19): siRNA sense strand
gggaaagacagaagagaag

SEQ ID NO: 710161 - RNA, 19 nt, Homo sapiens
  misc_RNA (1)...(19): siRNA sense strand
caaaagacaagaaaacaga

SEQ ID NO: 710162 - RNA, 19 nt, Homo sapiens
  misc_RNA (1)...(19): siRNA sense strand
gaucgaggagggcaccuau

SEQ ID NO: 710163 - RNA, 19 nt, Homo sapiens
  misc_RNA (1)...(19): siRNA sense strand
gaaaugagugaagaugaag

SEQ ID NO: 710164 - RNA, 19 nt, Homo sapiens
  misc_RNA (1)...(19): siRNA sense strand
ggaagaggaggaggaggaa

SEQ ID NO: 710165 - RNA, 19 nt, Homo sapiens
  misc_RNA (1)...(19): siRNA sense strand
caugcuagagugaaagaaa

SEQ ID NO: 710166 - RNA, 19 nt, Homo sapiens
  misc_RNA (1)...(19): siRNA sense strand
gaagagaaaauggaagaaa

SEQ ID NO: 710167 - RNA, 19 nt, Homo sapiens
  misc_RNA (1)...(19): siRNA sense strand
ggaaugggaaagacagaag

SEQ ID NO: 710168 - RNA, 19 nt, Homo sapiens
  misc_RNA (1)...(19): siRNA sense strand
cgucaccguuagagagauu

SEQ ID NO: 710169 - RNA, 19 nt, Homo sapiens
  misc_RNA (1)...(19): siRNA sense strand
gugaagaagcagaggaaga

SEQ ID NO: 710170 - RNA, 19 nt, Homo sapiens
  misc_RNA (1)...(19): siRNA sense strand
cgaagaaguaagugaggaa

SEQ ID NO: 710171 - RNA, 19 nt, Homo sapiens
  misc_RNA (1)...(19): siRNA sense strand
caacauggacaagaucuac

SEQ ID NO: 710172 - RNA, 19 nt, Homo sapiens
  misc_RNA (1)...(19): siRNA sense strand
ggaacaagaggagaaagca

SEQ ID NO: 710173 - RNA, 19 nt, Homo sapiens
  misc_RNA (1)...(19): siRNA sense strand
gaaacgaaggaaggaacaa

SEQ ID NO: 710174 - RNA, 19 nt, Homo sapiens
  misc_RNA (1)...(19): siRNA sense strand
ggaagggagcaccagugaa

SEQ ID NO: 710175 - RNA, 19 nt, Homo sapiens
  misc_RNA (1)...(19): siRNA sense strand
cagaggagaagaagaugau

SEQ ID NO: 710176 - RNA, 19 nt, Homo sapiens
  misc_RNA (1)...(19): siRNA sense strand
guaagugaggaagaaauga

SEQ ID NO: 710177 - RNA, 19 nt, Homo sapiens
  misc_RNA (1)...(19): siRNA sense strand
gcagaaucaggcucagguu

SEQ ID NO: 710178 - RNA, 19 nt, Homo sapiens
  misc_RNA (1)...(19): siRNA sense strand
cagaagagaagggaaaugg

SEQ ID NO: 710179 - RNA, 19 nt, Homo sapiens
  misc_RNA (1)...(19): siRNA sense strand
aggacggccucaagcauga

SEQ ID NO: 710180 - RNA, 19 nt, Homo sapiens
  misc_RNA (1)...(19): siRNA sense strand
gcaccuauggaguggucua

SEQ ID NO: 710181 - RNA, 19 nt, Homo sapiens
  misc_RNA (1)...(19): siRNA sense strand
gacagagggcgacuaugug

SEQ ID NO: 710182 - RNA, 19 nt, Homo sapiens
  misc_RNA (1)...(19): siRNA sense strand
aagaaaugagugaagauga

SEQ ID NO: 710183 - RNA, 19 nt, Homo sapiens
  misc_RNA (1)...(19): siRNA sense strand
ggaaauggcaagggagcau

SEQ ID NO: 710184 - RNA, 19 nt, Homo sapiens
  misc_RNA (1)...(19): siRNA sense strand
agaggagaaagcagagaua

SEQ ID NO: 710185 - RNA, 19 nt, Homo sapiens
  misc_RNA (1)...(19): siRNA sense strand
gaagauggagaaggagaag

SEQ ID NO: 710186 - RNA, 19 nt, Homo sapiens
  misc_RNA (1)...(19): siRNA sense strand
gaggagaccggcagcaacu

SEQ ID NO: 710187 - RNA, 19 nt, Homo sapiens
  misc_RNA (1)...(19): siRNA sense strand
agaaagagagcacgaacgu

SEQ ID NO: 710188 - RNA, 19 nt, Homo sapiens
  misc_RNA (1)...(19): siRNA sense strand
gaggaagaaaugagugaag

SEQ ID NO: 710189 - RNA, 19 nt, Homo sapiens
  misc_RNA (1)...(19): siRNA sense strand
gcagagauaaaacgcuuaa

SEQ ID NO: 710190 - RNA, 19 nt, Homo sapiens
  misc_RNA (1)...(19): siRNA sense strand
ugggaaagacagaagagaa

SEQ ID NO: 710191 - RNA, 19 nt, Homo sapiens
  misc_RNA (1)...(19): siRNA sense strand
ucccagcagucaagaagau

SEQ ID NO: 710192 - RNA, 19 nt, Homo sapiens
  misc_RNA (1)...(19): siRNA sense strand
agaagcagaggaagaagug

SEQ ID NO: 710193 - RNA, 19 nt, Homo sapiens
  misc_RNA (1)...(19): siRNA sense strand
uauggaagacagaggagaa

SEQ ID NO: 710194 - RNA, 19 nt, Homo sapiens
  misc_RNA (1)...(19): siRNA sense strand
ugaagaugaagaacgagaa

SEQ ID NO: 710195 - RNA, 19 nt, Homo sapiens
  misc_RNA (1)...(19): siRNA sense strand
gugaggaagaaaugaguga

SEQ ID NO: 710196 - RNA, 19 nt, Homo sapiens
  misc_RNA (1)...(19): siRNA sense strand
gaacuccccguauagaaga

SEQ ID NO: 710197 - RNA, 19 nt, Homo sapiens
  misc_RNA (1)...(19): siRNA sense strand
ugaaaaggacucuuggaaa

SEQ ID NO: 710198 - RNA, 19 nt, Homo sapiens
  misc_RNA (1)...(19): siRNA sense strand
gaaacgacaucgagaagaa

SEQ ID NO: 710199 - RNA, 19 nt, Homo sapiens
  misc_RNA (1)...(19): siRNA sense strand
gcaaaugucucggaaagaa

SEQ ID NO: 710200 - RNA, 19 nt, Homo sapiens
  misc_RNA (1)...(19): siRNA sense strand
gaaaacagaugaaauugug

SEQ ID NO: 710201 - RNA, 19 nt, Homo sapiens
  misc_RNA (1)...(19): siRNA sense strand
gcauggagaucacaauaag

SEQ ID NO: 710202 - RNA, 19 nt, Homo sapiens
  misc_RNA (1)...(19): siRNA sense strand
gagcaccagugaagaauca

SEQ ID NO: 710203 - RNA, 19 nt, Homo sapiens
  misc_RNA (1)...(19): siRNA sense strand
ugaaacaccugcacgacaa

SEQ ID NO: 710204 - RNA, 19 nt, Homo sapiens
  misc_RNA (1)...(19): siRNA sense strand
gaaaaggacucuuggaaag

SEQ ID NO: 710205 - RNA, 19 nt, Homo sapiens
  misc_RNA (1)...(19): siRNA sense strand
uaaagcggcugaagaugga

SEQ ID NO: 710206 - RNA, 19 nt, Homo sapiens
  misc_RNA (1)...(19): siRNA sense strand
agaaaugagugaagaugaa

SEQ ID NO: 710207 - RNA, 19 nt, Homo sapiens
  misc_RNA (1)...(19): siRNA sense strand
gagugaagaugaagaacga

SEQ ID NO: 710208 - RNA, 19 nt, Homo sapiens
  misc_RNA (1)...(19): siRNA sense strand
gcagcaacauggacaagau

SEQ ID NO: 710209 - RNA, 19 nt, Homo sapiens
  misc_RNA (1)...(19): siRNA sense strand
gaagggagcaccagugaag

SEQ ID NO: 710210 - RNA, 19 nt, Homo sapiens
  misc_RNA (1)...(19): siRNA sense strand
ggaaggaacaagaggagaa

SEQ ID NO: 710211 - RNA, 19 nt, Homo sapiens
  misc_RNA (1)...(19): siRNA sense strand
ggaguggucuacagagcaa

SEQ ID NO: 710212 - RNA, 19 nt, Homo sapiens
  misc_RNA (1)...(19): siRNA sense strand
gaagaugaagaacgagaaa

SEQ ID NO: 710213 - RNA, 19 nt, Homo sapiens
  misc_RNA (1)...(19): siRNA sense strand
gcacgaacgucggaaacga

SEQ ID NO: 710214 - RNA, 19 nt, Homo sapiens
  misc_RNA (1)...(19): siRNA sense strand
gagaagacucuauggaaga

SEQ ID NO: 710215 - RNA, 19 nt, Homo sapiens
  misc_RNA (1)...(19): siRNA sense strand
cagcaaaugucucggaaag

SEQ ID NO: 710216 - RNA, 19 nt, Homo sapiens
  misc_RNA (1)...(19): siRNA sense strand
cagaaaagaugaaaagaga

SEQ ID NO: 710217 - RNA, 19 nt, Homo sapiens
  misc_RNA (1)...(19): siRNA sense strand
gaagaaaugagugaagaug

SEQ ID NO: 710218 - RNA, 19 nt, Homo sapiens
  misc_RNA (1)...(19): siRNA sense strand
agaaguaagugaggaagaa

SEQ ID NO: 710219 - RNA, 19 nt, Homo sapiens
  misc_RNA (1)...(19): siRNA sense strand
ggaagacagaggagaagaa

SEQ ID NO: 710220 - RNA, 19 nt, Homo sapiens
  misc_RNA (1)...(19): siRNA sense strand
gaaggaacaagaggagaaa

SEQ ID NO: 710221 - RNA, 19 nt, Homo sapiens
  misc_RNA (1)...(19): siRNA sense strand
ugacagagggcgacuaugu

SEQ ID NO: 710222 - RNA, 19 nt, Homo sapiens
  misc_RNA (1)...(19): siRNA sense strand
ggagaaagcagagauaaaa

SEQ ID NO: 710223 - RNA, 19 nt, Homo sapiens
  misc_RNA (1)...(19): siRNA sense strand
gagaagaacaggauaaagc

SEQ ID NO: 710224 - RNA, 19 nt, Homo sapiens
  misc_RNA (1)...(19): siRNA sense strand
gaggagaaagcagagauaa

SEQ ID NO: 710225 - RNA, 19 nt, Homo sapiens
  misc_RNA (1)...(19): siRNA sense strand
ugaagaagcagaggaagaa

SEQ ID NO: 710226 - RNA, 19 nt, Homo sapiens
  misc_RNA (1)...(19): siRNA sense strand
gagcauuccaggagagaaa

SEQ ID NO: 710227 - RNA, 19 nt, Homo sapiens
  misc_RNA (1)...(19): siRNA sense strand
aaggagggcuucccgauca

SEQ ID NO: 710228 - RNA, 19 nt, Homo sapiens
  misc_RNA (1)...(19): siRNA sense strand
gcuucgaccucaugaacaa

SEQ ID NO: 710229 - RNA, 19 nt, Homo sapiens
  misc_RNA (1)...(19): siRNA sense strand
gaaguaagugaggaagaaa

SEQ ID NO: 710230 - RNA, 19 nt, Homo sapiens
  misc_RNA (1)...(19): siRNA sense strand
caacaucgucaccguuaga

SEQ ID NO: 710231 - RNA, 19 nt, Homo sapiens
  misc_RNA (1)...(19): siRNA sense strand
ugagggagaucaacaccau

SEQ ID NO: 710232 - RNA, 19 nt, Homo sapiens
  misc_RNA (1)...(19): siRNA sense strand
aaaggacucuuggaaagug

SEQ ID NO: 710233 - RNA, 19 nt, Homo sapiens
  misc_RNA (1)...(19): siRNA sense strand
gcucuaaagcggcugaaga

SEQ ID NO: 710234 - RNA, 19 nt, Homo sapiens
  misc_RNA (1)...(19): siRNA sense strand
ggcugaagauggagaagga

SEQ ID NO: 710235 - RNA, 19 nt, Homo sapiens
  misc_RNA (1)...(19): siRNA sense strand
agacagaggagaagaagau

SEQ ID NO: 710236 - RNA, 19 nt, Homo sapiens
  misc_RNA (1)...(19): siRNA sense strand
gaucaacaccauccucaag

SEQ ID NO: 710237 - RNA, 19 nt, Homo sapiens
  misc_RNA (1)...(19): siRNA sense strand
gaugaaauuguggcucuaa

SEQ ID NO: 710238 - RNA, 19 nt, Homo sapiens
  misc_RNA (1)...(19): siRNA sense strand
gaaucaggcucagguucug

SEQ ID NO: 710239 - RNA, 19 nt, Homo sapiens
  misc_RNA (1)...(19): siRNA sense strand
gaggugaagacccugauga

SEQ ID NO: 710240 - RNA, 19 nt, Homo sapiens
  misc_RNA (1)...(19): siRNA sense strand
ggaggaggaggaagaggaa

SEQ ID NO: 710241 - RNA, 19 nt, Homo sapiens
  misc_RNA (1)...(19): siRNA sense strand
ggaaacgacaucgagaaga

SEQ ID NO: 710242 - RNA, 19 nt, Homo sapiens
  misc_RNA (1)...(19): siRNA sense strand
agucagaaaucgaucagau

SEQ ID NO: 710243 - RNA, 19 nt, Homo sapiens
  misc_RNA (1)...(19): siRNA sense strand
ucacgucgcugagggagau

SEQ ID NO: 710244 - RNA, 19 nt, Homo sapiens
  misc_RNA (1)...(19): siRNA sense strand
gaaauuguggcucuaaagc

SEQ ID NO: 710245 - RNA, 19 nt, Homo sapiens
  misc_RNA (1)...(19): siRNA sense strand
gucaguggguugcaucuuc

SEQ ID NO: 710246 - RNA, 19 nt, Homo sapiens
  misc_RNA (1)...(19): siRNA sense strand
ugaagacccugaugaucca

SEQ ID NO: 710247 - RNA, 19 nt, Homo sapiens
  misc_RNA (1)...(19): siRNA sense strand
gaagacagaggagaagaag

SEQ ID NO: 710248 - RNA, 19 nt, Homo sapiens
  misc_RNA (1)...(19): siRNA sense strand
gaagaacgagaaaaugaaa

SEQ ID NO: 710249 - RNA, 19 nt, Homo sapiens
  misc_RNA (1)...(19): siRNA sense strand
ggaagaaaugagugaagau

SEQ ID NO: 710250 - RNA, 19 nt, Homo sapiens
  misc_RNA (1)...(19): siRNA sense strand
agacagaagagaagggaaa

SEQ ID NO: 710251 - RNA, 19 nt, Homo sapiens
  misc_RNA (1)...(19): siRNA sense strand
gaaugggaaagacagaaga

SEQ ID NO: 710252 - RNA, 19 nt, Homo sapiens
  misc_RNA (1)...(19): siRNA sense strand
caaaugucucggaaagaaa

SEQ ID NO: 710253 - RNA, 19 nt, Homo sapiens
  misc_RNA (1)...(19): siRNA sense strand
gaggagaagaagaugauuc

SEQ ID NO: 710254 - RNA, 19 nt, Homo sapiens
  misc_RNA (1)...(19): siRNA sense strand
gcaacauggacaagaucua

SEQ ID NO: 710255 - RNA, 19 nt, Homo sapiens
  misc_RNA (1)...(19): siRNA sense strand
aggaagaaaugagugaaga

SEQ ID NO: 710256 - RNA, 19 nt, Homo sapiens
  misc_RNA (1)...(19): siRNA sense strand
auaaggaacuccccguaua

SEQ ID NO: 710257 - RNA, 19 nt, Homo sapiens
  misc_RNA (1)...(19): siRNA sense strand
gagugaagaagcagaggaa

SEQ ID NO: 710258 - RNA, 19 nt, Homo sapiens
  misc_RNA (1)...(19): siRNA sense strand
ggaagucagaaaucgauca

SEQ ID NO: 710259 - RNA, 19 nt, Homo sapiens
  misc_RNA (1)...(19): siRNA sense strand
cccaacaucgucaccguua

SEQ ID NO: 710260 - RNA, 19 nt, Homo sapiens
  misc_RNA (1)...(19): siRNA sense strand
gggaaagacagaagagaag

SEQ ID NO: 710261 - RNA, 19 nt, Homo sapiens
  misc_RNA (1)...(19): siRNA sense strand
caaaagacaagaaaacaga

SEQ ID NO: 710262 - RNA, 19 nt, Homo sapiens
  misc_RNA (1)...(19): siRNA sense strand
gaucgaggagggcaccuau

SEQ ID NO: 710263 - RNA, 19 nt, Homo sapiens
  misc_RNA (1)...(19): siRNA sense strand
gaaaugagugaagaugaag

SEQ ID NO: 710264 - RNA, 19 nt, Homo sapiens
  misc_RNA (1)...(19): siRNA sense strand
ggaagaggaggaggaggaa

SEQ ID NO: 710265 - RNA, 19 nt, Homo sapiens
  misc_RNA (1)...(19): siRNA sense strand
caugcuagagugaaagaaa

SEQ ID NO: 710266 - RNA, 19 nt, Homo sapiens
  misc_RNA (1)...(19): siRNA sense strand
gaagagaaaauggaagaaa

SEQ ID NO: 710267 - RNA, 19 nt, Homo sapiens
  misc_RNA (1)...(19): siRNA sense strand
ggaaugggaaagacagaag

SEQ ID NO: 710268 - RNA, 19 nt, Homo sapiens
  misc_RNA (1)...(19): siRNA sense strand
cgucaccguuagagagauu

SEQ ID NO: 710269 - RNA, 19 nt, Homo sapiens
  misc_RNA (1)...(19): siRNA sense strand
gugaagaagcagaggaaga

SEQ ID NO: 710270 - RNA, 19 nt, Homo sapiens
  misc_RNA (1)...(19): siRNA sense strand
cgaagaaguaagugaggaa

SEQ ID NO: 710271 - RNA, 19 nt, Homo sapiens
  misc_RNA (1)...(19): siRNA sense strand
caacauggacaagaucuac

SEQ ID NO: 710272 - RNA, 19 nt, Homo sapiens
  misc_RNA (1)...(19): siRNA sense strand
ggaacaagaggagaaagca

SEQ ID NO: 710273 - RNA, 19 nt, Homo sapiens
  misc_RNA (1)...(19): siRNA sense strand
gaaacgaaggaaggaacaa

SEQ ID NO: 710274 - RNA, 19 nt, Homo sapiens
  misc_RNA (1)...(19): siRNA sense strand
ggaagggagcaccagugaa

SEQ ID NO: 710275 - RNA, 19 nt, Homo sapiens
  misc_RNA (1)...(19): siRNA sense strand
cagaggagaagaagaugau

SEQ ID NO: 710276 - RNA, 19 nt, Homo sapiens
  misc_RNA (1)...(19): siRNA sense strand
guaagugaggaagaaauga

SEQ ID NO: 710277 - RNA, 19 nt, Homo sapiens
  misc_RNA (1)...(19): siRNA sense strand
gcagaaucaggcucagguu

SEQ ID NO: 710278 - RNA, 19 nt, Homo sapiens
  misc_RNA (1)...(19): siRNA sense strand
cagaagagaagggaaaugg

SEQ ID NO: 710279 - RNA, 19 nt, Homo sapiens
  misc_RNA (1)...(19): siRNA sense strand
aggacggccucaagcauga

SEQ ID NO: 710280 - RNA, 19 nt, Homo sapiens
  misc_RNA (1)...(19): siRNA sense strand
gcaccuauggaguggucua

SEQ ID NO: 710281 - RNA, 19 nt, Homo sapiens
  misc_RNA (1)...(19): siRNA sense strand
gacagagggcgacuaugug

SEQ ID NO: 710282 - RNA, 19 nt, Homo sapiens
  misc_RNA (1)...(19): siRNA sense strand
aagaaaugagugaagauga

SEQ ID NO: 710283 - RNA, 19 nt, Homo sapiens
  misc_RNA (1)...(19): siRNA sense strand
ggaaauggcaagggagcau

SEQ ID NO: 710284 - RNA, 19 nt, Homo sapiens
  misc_RNA (1)...(19): siRNA sense strand
agaggagaaagcagagaua

SEQ ID NO: 710285 - RNA, 19 nt, Homo sapiens
  misc_RNA (1)...(19): siRNA sense strand
gaagauggagaaggagaag

SEQ ID NO: 710286 - RNA, 19 nt, Homo sapiens
  misc_RNA (1)...(19): siRNA sense strand
gaggagaccggcagcaacu

SEQ ID NO: 710287 - RNA, 19 nt, Homo sapiens
  misc_RNA (1)...(19): siRNA sense strand
agaaagagagcacgaacgu

SEQ ID NO: 710288 - RNA, 19 nt, Homo sapiens
  misc_RNA (1)...(19): siRNA sense strand
gaggaagaaaugagugaag

SEQ ID NO: 710289 - RNA, 19 nt, Homo sapiens
  misc_RNA (1)...(19): siRNA sense strand
gcagagauaaaacgcuuaa

SEQ ID NO: 710290 - RNA, 19 nt, Homo sapiens
  misc_RNA (1)...(19): siRNA sense strand
ugggaaagacagaagagaa

SEQ ID NO: 710291 - RNA, 19 nt, Homo sapiens
  misc_RNA (1)...(19): siRNA sense strand
ucccagcagucaagaagau

SEQ ID NO: 710292 - RNA, 19 nt, Homo sapiens
  misc_RNA (1)...(19): siRNA sense strand
agaagcagaggaagaagug

SEQ ID NO: 710293 - RNA, 19 nt, Homo sapiens
  misc_RNA (1)...(19): siRNA sense strand
uauggaagacagaggagaa

SEQ ID NO: 710294 - RNA, 19 nt, Homo sapiens
  misc_RNA (1)...(19): siRNA sense strand
ugaagaugaagaacgagaa

SEQ ID NO: 710295 - RNA, 19 nt, Homo sapiens
  misc_RNA (1)...(19): siRNA sense strand
gugaggaagaaaugaguga

SEQ ID NO: 710296 - RNA, 19 nt, Homo sapiens
  misc_RNA (1)...(19): siRNA sense strand
gaacuccccguauagaaga

SEQ ID NO: 710297 - RNA, 19 nt, Homo sapiens
  misc_RNA (1)...(19): siRNA sense strand
ugaaaaggacucuuggaaa

SEQ ID NO: 710298 - RNA, 19 nt, Homo sapiens
  misc_RNA (1)...(19): siRNA sense strand
gaaaacagaugaaauugug

SEQ ID NO: 710299 - RNA, 19 nt, Homo sapiens
  misc_RNA (1)...(19): siRNA sense strand
gagcaccagugaagaauca

SEQ ID NO: 710300 - RNA, 19 nt, Homo sapiens
  misc_RNA (1)...(19): siRNA sense strand
ugaaacaccugcacgacaa

SEQ ID NO: 710301 - RNA, 19 nt, Homo sapiens
  misc_RNA (1)...(19): siRNA sense strand
uaaagcggcugaagaugga

SEQ ID NO: 710302 - RNA, 19 nt, Homo sapiens
  misc_RNA (1)...(19): siRNA sense strand
agaaaugagugaagaugaa

SEQ ID NO: 710303 - RNA, 19 nt, Homo sapiens
  misc_RNA (1)...(19): siRNA sense strand
gagugaagaugaagaacga

SEQ ID NO: 710304 - RNA, 19 nt, Homo sapiens
  misc_RNA (1)...(19): siRNA sense strand
gcagcaacauggacaagau

SEQ ID NO: 710305 - RNA, 19 nt, Homo sapiens
  misc_RNA (1)...(19): siRNA sense strand
gaagggagcaccagugaag

SEQ ID NO: 710306 - RNA, 19 nt, Homo sapiens
  misc_RNA (1)...(19): siRNA sense strand
gaagaugaagaacgagaaa

SEQ ID NO: 710307 - RNA, 19 nt, Homo sapiens
  misc_RNA (1)...(19): siRNA sense strand
ggaguggucuacagagcaa

SEQ ID NO: 710308 - RNA, 19 nt, Homo sapiens
  misc_RNA (1)...(19): siRNA sense strand
gaagaaaugagugaagaug

SEQ ID NO: 710309 - RNA, 19 nt, Homo sapiens
  misc_RNA (1)...(19): siRNA sense strand
agaaguaagugaggaagaa

SEQ ID NO: 710310 - RNA, 19 nt, Homo sapiens
  misc_RNA (1)...(19): siRNA sense strand
ugacagagggcgacuaugu

SEQ ID NO: 710311 - RNA, 19 nt, Homo sapiens
  misc_RNA (1)...(19): siRNA sense strand
ugaagaagcagaggaagaa

SEQ ID NO: 710312 - RNA, 19 nt, Homo sapiens
  misc_RNA (1)...(19): siRNA sense strand
aaggagggcuucccgauca

SEQ ID NO: 710313 - RNA, 19 nt, Homo sapiens
  misc_RNA (1)...(19): siRNA sense strand
gcuucgaccucaugaacaa

SEQ ID NO: 710314 - RNA, 19 nt, Homo sapiens
  misc_RNA (1)...(19): siRNA sense strand
gaaguaagugaggaagaaa

SEQ ID NO: 710315 - RNA, 19 nt, Homo sapiens
  misc_RNA (1)...(19): siRNA sense strand
caacaucgucaccguuaga

SEQ ID NO: 710316 - RNA, 19 nt, Homo sapiens
  misc_RNA (1)...(19): siRNA sense strand
ugagggagaucaacaccau

SEQ ID NO: 710317 - RNA, 19 nt, Homo sapiens
  misc_RNA (1)...(19): siRNA sense strand
gcucuaaagcggcugaaga

SEQ ID NO: 710318 - RNA, 19 nt, Homo sapiens
  misc_RNA (1)...(19): siRNA sense strand
ggcugaagauggagaagga

SEQ ID NO: 710319 - RNA, 19 nt, Homo sapiens
  misc_RNA (1)...(19): siRNA sense strand
gaugaaauuguggcucuaa

SEQ ID NO: 710320 - RNA, 19 nt, Homo sapiens
  misc_RNA (1)...(19): siRNA sense strand
gaucaacaccauccucaag

SEQ ID NO: 710321 - RNA, 19 nt, Homo sapiens
  misc_RNA (1)...(19): siRNA sense strand
ggaggaggaggaagaggaa

SEQ ID NO: 710322 - RNA, 19 nt, Homo sapiens
  misc_RNA (1)...(19): siRNA sense strand
gaggugaagacccugauga

SEQ ID NO: 710323 - RNA, 19 nt, Homo sapiens
  misc_RNA (1)...(19): siRNA sense strand
gaaucaggcucagguucug

SEQ ID NO: 710324 - RNA, 19 nt, Homo sapiens
  misc_RNA (1)...(19): siRNA sense strand
ucacgucgcugagggagau

SEQ ID NO: 710325 - RNA, 19 nt, Homo sapiens
  misc_RNA (1)...(19): siRNA sense strand
agucagaaaucgaucagau

SEQ ID NO: 710326 - RNA, 19 nt, Homo sapiens
  misc_RNA (1)...(19): siRNA sense strand
gaaauuguggcucuaaagc

SEQ ID NO: 710327 - RNA, 19 nt, Homo sapiens
  misc_RNA (1)...(19): siRNA sense strand
gucaguggguugcaucuuc

SEQ ID NO: 710328 - RNA, 19 nt, Homo sapiens
  misc_RNA (1)...(19): siRNA sense strand
ugaagacccugaugaucca

SEQ ID NO: 710329 - RNA, 19 nt, Homo sapiens
  misc_RNA (1)...(19): siRNA sense strand
ggaagaaaugagugaagau

SEQ ID NO: 710330 - RNA, 19 nt, Homo sapiens
  misc_RNA (1)...(19): siRNA sense strand
gaagaacgagaaaaugaaa

SEQ ID NO: 710331 - RNA, 19 nt, Homo sapiens
  misc_RNA (1)...(19): siRNA sense strand
aggaagaaaugagugaaga

SEQ ID NO: 710332 - RNA, 19 nt, Homo sapiens
  misc_RNA (1)...(19): siRNA sense strand
gcaacauggacaagaucua

SEQ ID NO: 710333 - RNA, 19 nt, Homo sapiens
  misc_RNA (1)...(19): siRNA sense strand
gagugaagaagcagaggaa

SEQ ID NO: 710334 - RNA, 19 nt, Homo sapiens
  misc_RNA (1)...(19): siRNA sense strand
ggaagucagaaaucgauca

SEQ ID NO: 710335 - RNA, 19 nt, Homo sapiens
  misc_RNA (1)...(19): siRNA sense strand
cccaacaucgucaccguua

SEQ ID NO: 710336 - RNA, 19 nt, Homo sapiens
  misc_RNA (1)...(19): siRNA sense strand
gaaaugagugaagaugaag

SEQ ID NO: 710337 - RNA, 19 nt, Homo sapiens
  misc_RNA (1)...(19): siRNA sense strand
ggaagaggaggaggaggaa

SEQ ID NO: 710338 - RNA, 19 nt, Homo sapiens
  misc_RNA (1)...(19): siRNA sense strand
caaaagacaagaaaacaga

SEQ ID NO: 710339 - RNA, 19 nt, Homo sapiens
  misc_RNA (1)...(19): siRNA sense strand
gaucgaggagggcaccuau

SEQ ID NO: 710340 - RNA, 19 nt, Homo sapiens
  misc_RNA (1)...(19): siRNA sense strand
cgaagaaguaagugaggaa

SEQ ID NO: 710341 - RNA, 19 nt, Homo sapiens
  misc_RNA (1)...(19): siRNA sense strand
cgucaccguuagagagauu

SEQ ID NO: 710342 - RNA, 19 nt, Homo sapiens
  misc_RNA (1)...(19): siRNA sense strand
gugaagaagcagaggaaga

SEQ ID NO: 710343 - RNA, 19 nt, Homo sapiens
  misc_RNA (1)...(19): siRNA sense strand
caacauggacaagaucuac

SEQ ID NO: 710344 - RNA, 19 nt, Homo sapiens
  misc_RNA (1)...(19): siRNA sense strand
ggaagggagcaccagugaa

SEQ ID NO: 710345 - RNA, 19 nt, Homo sapiens
  misc_RNA (1)...(19): siRNA sense strand
gcagaaucaggcucagguu

SEQ ID NO: 710346 - RNA, 19 nt, Homo sapiens
  misc_RNA (1)...(19): siRNA sense strand
guaagugaggaagaaauga

SEQ ID NO: 710347 - RNA, 19 nt, Homo sapiens
  misc_RNA (1)...(19): siRNA sense strand
aagaaaugagugaagauga

SEQ ID NO: 710348 - RNA, 19 nt, Homo sapiens
  misc_RNA (1)...(19): siRNA sense strand
aggacggccucaagcauga

SEQ ID NO: 710349 - RNA, 19 nt, Homo sapiens
  misc_RNA (1)...(19): siRNA sense strand
gcaccuauggaguggucua

SEQ ID NO: 710350 - RNA, 19 nt, Homo sapiens
  misc_RNA (1)...(19): siRNA sense strand
gacagagggcgacuaugug

SEQ ID NO: 710351 - RNA, 19 nt, Homo sapiens
  misc_RNA (1)...(19): siRNA sense strand
gaggagaccggcagcaacu

SEQ ID NO: 710352 - RNA, 19 nt, Homo sapiens
  misc_RNA (1)...(19): siRNA sense strand
gaagauggagaaggagaag

SEQ ID NO: 710353 - RNA, 19 nt, Homo sapiens
  misc_RNA (1)...(19): siRNA sense strand
gaggaagaaaugagugaag

SEQ ID NO: 710354 - RNA, 19 nt, Homo sapiens
  misc_RNA (1)...(19): siRNA sense strand
ugaagaugaagaacgagaa

SEQ ID NO: 710355 - RNA, 19 nt, Homo sapiens
  misc_RNA (1)...(19): siRNA sense strand
ucccagcagucaagaagau

SEQ ID NO: 710356 - RNA, 19 nt, Homo sapiens
  misc_RNA (1)...(19): siRNA sense strand
agaagcagaggaagaagug

SEQ ID NO: 710357 - RNA, 19 nt, Homo sapiens
  misc_RNA (1)...(19): siRNA sense strand
gugaggaagaaaugaguga

SEQ ID NO: 710358 - RNA, 19 nt, Homo sapiens
  misc_RNA (1)...(19): siRNA sense strand
gcaccagugaagaaucaga

SEQ ID NO: 710359 - RNA, 19 nt, Homo sapiens
  misc_RNA (1)...(19): siRNA sense strand
ugaagauggagaaggagaa

SEQ ID NO: 710360 - RNA, 19 nt, Homo sapiens
  misc_RNA (1)...(19): siRNA sense strand
aagaggaggaggaggaaga

SEQ ID NO: 710361 - RNA, 19 nt, Homo sapiens
  misc_RNA (1)...(19): siRNA sense strand
acaagguguucaaggaucu

SEQ ID NO: 710362 - RNA, 19 nt, Homo sapiens
  misc_RNA (1)...(19): siRNA sense strand
gaguacggauccccucuga

SEQ ID NO: 710363 - RNA, 19 nt, Homo sapiens
  misc_RNA (1)...(19): siRNA sense strand
ccaacaucgucaccguuag

SEQ ID NO: 710364 - RNA, 19 nt, Homo sapiens
  misc_RNA (1)...(19): siRNA sense strand
gaagucagaaaucgaucag

SEQ ID NO: 710365 - RNA, 19 nt, Homo sapiens
  misc_RNA (1)...(19): siRNA sense strand
ggugaagacccugaugauc

SEQ ID NO: 710366 - RNA, 19 nt, Homo sapiens
  misc_RNA (1)...(19): siRNA sense strand
ugaaauuguggcucuaaag

SEQ ID NO: 710367 - RNA, 19 nt, Homo sapiens
  misc_RNA (1)...(19): siRNA sense strand
gggcuucgaccucaugaac

SEQ ID NO: 710368 - RNA, 19 nt, Homo sapiens
  misc_RNA (1)...(19): siRNA sense strand
ggaggugaagacccugaug

SEQ ID NO: 710369 - RNA, 19 nt, Homo sapiens
  misc_RNA (1)...(19): siRNA sense strand
ggagaccggcagcaacucu

SEQ ID NO: 710370 - RNA, 19 nt, Homo sapiens
  misc_RNA (1)...(19): siRNA sense strand
gaaacgacaucgagaagaa

SEQ ID NO: 710371 - RNA, 19 nt, Homo sapiens
  misc_RNA (1)...(19): siRNA sense strand
gcaaaugucucggaaagaa

SEQ ID NO: 710372 - RNA, 19 nt, Homo sapiens
  misc_RNA (1)...(19): siRNA sense strand
gaaaacagaugaaauugug

SEQ ID NO: 710373 - RNA, 19 nt, Homo sapiens
  misc_RNA (1)...(19): siRNA sense strand
gcauggagaucacaauaag

SEQ ID NO: 710374 - RNA, 19 nt, Homo sapiens
  misc_RNA (1)...(19): siRNA sense strand
gagcaccagugaagaauca

SEQ ID NO: 710375 - RNA, 19 nt, Homo sapiens
  misc_RNA (1)...(19): siRNA sense strand
ugaaacaccugcacgacaa

SEQ ID NO: 710376 - RNA, 19 nt, Homo sapiens
  misc_RNA (1)...(19): siRNA sense strand
uaaagcggcugaagaugga

SEQ ID NO: 710377 - RNA, 19 nt, Homo sapiens
  misc_RNA (1)...(19): siRNA sense strand
agaaaugagugaagaugaa

SEQ ID NO: 710378 - RNA, 19 nt, Homo sapiens
  misc_RNA (1)...(19): siRNA sense strand
gagugaagaugaagaacga

SEQ ID NO: 710379 - RNA, 19 nt, Homo sapiens
  misc_RNA (1)...(19): siRNA sense strand
gcagcaacauggacaagau

SEQ ID NO: 710380 - RNA, 19 nt, Homo sapiens
  misc_RNA (1)...(19): siRNA sense strand
gaagggagcaccagugaag

SEQ ID NO: 710381 - RNA, 19 nt, Homo sapiens
  misc_RNA (1)...(19): siRNA sense strand
gagaagacucuauggaaga

SEQ ID NO: 710382 - RNA, 19 nt, Homo sapiens
  misc_RNA (1)...(19): siRNA sense strand
ggaguggucuacagagcaa

SEQ ID NO: 710383 - RNA, 19 nt, Homo sapiens
  misc_RNA (1)...(19): siRNA sense strand
gaagaugaagaacgagaaa

SEQ ID NO: 710384 - RNA, 19 nt, Homo sapiens
  misc_RNA (1)...(19): siRNA sense strand
gcacgaacgucggaaacga

SEQ ID NO: 710385 - RNA, 19 nt, Homo sapiens
  misc_RNA (1)...(19): siRNA sense strand
cagcaaaugucucggaaag

SEQ ID NO: 710386 - RNA, 19 nt, Homo sapiens
  misc_RNA (1)...(19): siRNA sense strand
cagaaaagaugaaaagaga

SEQ ID NO: 710387 - RNA, 19 nt, Homo sapiens
  misc_RNA (1)...(19): siRNA sense strand
gaagaaaugagugaagaug

SEQ ID NO: 710388 - RNA, 19 nt, Homo sapiens
  misc_RNA (1)...(19): siRNA sense strand
agaaguaagugaggaagaa

SEQ ID NO: 710389 - RNA, 19 nt, Homo sapiens
  misc_RNA (1)...(19): siRNA sense strand
ggaagacagaggagaagaa

SEQ ID NO: 710390 - RNA, 19 nt, Homo sapiens
  misc_RNA (1)...(19): siRNA sense strand
ugacagagggcgacuaugu

SEQ ID NO: 710391 - RNA, 19 nt, Homo sapiens
  misc_RNA (1)...(19): siRNA sense strand
gagaagaacaggauaaagc

SEQ ID NO: 710392 - RNA, 19 nt, Homo sapiens
  misc_RNA (1)...(19): siRNA sense strand
gagcauuccaggagagaaa

SEQ ID NO: 710393 - RNA, 19 nt, Homo sapiens
  misc_RNA (1)...(19): siRNA sense strand
ugaagaagcagaggaagaa

SEQ ID NO: 710394 - RNA, 19 nt, Homo sapiens
  misc_RNA (1)...(19): siRNA sense strand
aaggagggcuucccgauca

SEQ ID NO: 710395 - RNA, 19 nt, Homo sapiens
  misc_RNA (1)...(19): siRNA sense strand
gcuucgaccucaugaacaa

SEQ ID NO: 710396 - RNA, 19 nt, Homo sapiens
  misc_RNA (1)...(19): siRNA sense strand
gaaguaagugaggaagaaa

SEQ ID NO: 710397 - RNA, 19 nt, Homo sapiens
  misc_RNA (1)...(19): siRNA sense strand
caacaucgucaccguuaga

SEQ ID NO: 710398 - RNA, 19 nt, Homo sapiens
  misc_RNA (1)...(19): siRNA sense strand
ugagggagaucaacaccau

SEQ ID NO: 710399 - RNA, 19 nt, Homo sapiens
  misc_RNA (1)...(19): siRNA sense strand
gcucuaaagcggcugaaga

SEQ ID NO: 710400 - RNA, 19 nt, Homo sapiens
  misc_RNA (1)...(19): siRNA sense strand
ggcugaagauggagaagga

SEQ ID NO: 710401 - RNA, 19 nt, Homo sapiens
  misc_RNA (1)...(19): siRNA sense strand
agacagaggagaagaagau

SEQ ID NO: 710402 - RNA, 19 nt, Homo sapiens
  misc_RNA (1)...(19): siRNA sense strand
gaucaacaccauccucaag

SEQ ID NO: 710403 - RNA, 19 nt, Homo sapiens
  misc_RNA (1)...(19): siRNA sense strand
gaugaaauuguggcucuaa

SEQ ID NO: 710404 - RNA, 19 nt, Homo sapiens
  misc_RNA (1)...(19): siRNA sense strand
gaaucaggcucagguucug

SEQ ID NO: 710405 - RNA, 19 nt, Homo sapiens
  misc_RNA (1)...(19): siRNA sense strand
gaggugaagacccugauga

SEQ ID NO: 710406 - RNA, 19 nt, Homo sapiens
  misc_RNA (1)...(19): siRNA sense strand
ggaggaggaggaagaggaa

SEQ ID NO: 710407 - RNA, 19 nt, Homo sapiens
  misc_RNA (1)...(19): siRNA sense strand
ggaaacgacaucgagaaga

SEQ ID NO: 710408 - RNA, 19 nt, Homo sapiens
  misc_RNA (1)...(19): siRNA sense strand
agucagaaaucgaucagau

SEQ ID NO: 710409 - RNA, 19 nt, Homo sapiens
  misc_RNA (1)...(19): siRNA sense strand
ucacgucgcugagggagau

SEQ ID NO: 710410 - RNA, 19 nt, Homo sapiens
  misc_RNA (1)...(19): siRNA sense strand
gaaauuguggcucuaaagc

SEQ ID NO: 710411 - RNA, 19 nt, Homo sapiens
  misc_RNA (1)...(19): siRNA sense strand
gucaguggguugcaucuuc

SEQ ID NO: 710412 - RNA, 19 nt, Homo sapiens
  misc_RNA (1)...(19): siRNA sense strand
ugaagacccugaugaucca

SEQ ID NO: 710413 - RNA, 19 nt, Homo sapiens
  misc_RNA (1)...(19): siRNA sense strand
caaaugucucggaaagaaa

SEQ ID NO: 710414 - RNA, 19 nt, Homo sapiens
  misc_RNA (1)...(19): siRNA sense strand
gaagaacgagaaaaugaaa

SEQ ID NO: 710415 - RNA, 19 nt, Homo sapiens
  misc_RNA (1)...(19): siRNA sense strand
ggaagaaaugagugaagau

SEQ ID NO: 710416 - RNA, 19 nt, Homo sapiens
  misc_RNA (1)...(19): siRNA sense strand
gaagacagaggagaagaag

SEQ ID NO: 710417 - RNA, 19 nt, Homo sapiens
  misc_RNA (1)...(19): siRNA sense strand
agacagaagagaagggaaa

SEQ ID NO: 710418 - RNA, 19 nt, Homo sapiens
  misc_RNA (1)...(19): siRNA sense strand
gaaugggaaagacagaaga

SEQ ID NO: 710419 - RNA, 19 nt, Homo sapiens
  misc_RNA (1)...(19): siRNA sense strand
aggaagaaaugagugaaga

SEQ ID NO: 710420 - RNA, 19 nt, Homo sapiens
  misc_RNA (1)...(19): siRNA sense strand
gaggagaagaagaugauuc

SEQ ID NO: 710421 - RNA, 19 nt, Homo sapiens
  misc_RNA (1)...(19): siRNA sense strand
gcaacauggacaagaucua

SEQ ID NO: 710422 - RNA, 19 nt, Homo sapiens
  misc_RNA (1)...(19): siRNA sense strand
auaaggaacuccccguaua

SEQ ID NO: 710423 - RNA, 19 nt, Homo sapiens
  misc_RNA (1)...(19): siRNA sense strand
gagugaagaagcagaggaa

SEQ ID NO: 710424 - RNA, 19 nt, Homo sapiens
  misc_RNA (1)...(19): siRNA sense strand
ggaagucagaaaucgauca

SEQ ID NO: 710425 - RNA, 19 nt, Homo sapiens
  misc_RNA (1)...(19): siRNA sense strand
cccaacaucgucaccguua

SEQ ID NO: 710426 - RNA, 19 nt, Homo sapiens
  misc_RNA (1)...(19): siRNA sense strand
gggaaagacagaagagaag

SEQ ID NO: 710427 - RNA, 19 nt, Homo sapiens
  misc_RNA (1)...(19): siRNA sense strand
caaaagacaagaaaacaga

SEQ ID NO: 710428 - RNA, 19 nt, Homo sapiens
  misc_RNA (1)...(19): siRNA sense strand
gaucgaggagggcaccuau

SEQ ID NO: 710429 - RNA, 19 nt, Homo sapiens
  misc_RNA (1)...(19): siRNA sense strand
gaaaugagugaagaugaag

SEQ ID NO: 710430 - RNA, 19 nt, Homo sapiens
  misc_RNA (1)...(19): siRNA sense strand
ggaagaggaggaggaggaa

SEQ ID NO: 710431 - RNA, 19 nt, Homo sapiens
  misc_RNA (1)...(19): siRNA sense strand
caugcuagagugaaagaaa

SEQ ID NO: 710432 - RNA, 19 nt, Homo sapiens
  misc_RNA (1)...(19): siRNA sense strand
gaagagaaaauggaagaaa

SEQ ID NO: 710433 - RNA, 19 nt, Homo sapiens
  misc_RNA (1)...(19): siRNA sense strand
ggaaugggaaagacagaag

SEQ ID NO: 710434 - RNA, 19 nt, Homo sapiens
  misc_RNA (1)...(19): siRNA sense strand
cgucaccguuagagagauu

SEQ ID NO: 710435 - RNA, 19 nt, Homo sapiens
  misc_RNA (1)...(19): siRNA sense strand
gugaagaagcagaggaaga

SEQ ID NO: 710436 - RNA, 19 nt, Homo sapiens
  misc_RNA (1)...(19): siRNA sense strand
cgaagaaguaagugaggaa

SEQ ID NO: 710437 - RNA, 19 nt, Homo sapiens
  misc_RNA (1)...(19): siRNA sense strand
caacauggacaagaucuac

SEQ ID NO: 710438 - RNA, 19 nt, Homo sapiens
  misc_RNA (1)...(19): siRNA sense strand
ggaagggagcaccagugaa

SEQ ID NO: 710439 - RNA, 19 nt, Homo sapiens
  misc_RNA (1)...(19): siRNA sense strand
gcagaaucaggcucagguu

SEQ ID NO: 710440 - RNA, 19 nt, Homo sapiens
  misc_RNA (1)...(19): siRNA sense strand
cagaggagaagaagaugau

SEQ ID NO: 710441 - RNA, 19 nt, Homo sapiens
  misc_RNA (1)...(19): siRNA sense strand
guaagugaggaagaaauga

SEQ ID NO: 710442 - RNA, 19 nt, Homo sapiens
  misc_RNA (1)...(19): siRNA sense strand
cagaagagaagggaaaugg

SEQ ID NO: 710443 - RNA, 19 nt, Homo sapiens
  misc_RNA (1)...(19): siRNA sense strand
aggacggccucaagcauga

SEQ ID NO: 710444 - RNA, 19 nt, Homo sapiens
  misc_RNA (1)...(19): siRNA sense strand
gcaccuauggaguggucua

SEQ ID NO: 710445 - RNA, 19 nt, Homo sapiens
  misc_RNA (1)...(19): siRNA sense strand
gacagagggcgacuaugug

SEQ ID NO: 710446 - RNA, 19 nt, Homo sapiens
  misc_RNA (1)...(19): siRNA sense strand
aagaaaugagugaagauga

SEQ ID NO: 710447 - RNA, 19 nt, Homo sapiens
  misc_RNA (1)...(19): siRNA sense strand
ggaaauggcaagggagcau

SEQ ID NO: 710448 - RNA, 19 nt, Homo sapiens
  misc_RNA (1)...(19): siRNA sense strand
gaagauggagaaggagaag

SEQ ID NO: 710449 - RNA, 19 nt, Homo sapiens
  misc_RNA (1)...(19): siRNA sense strand
gaggagaccggcagcaacu

SEQ ID NO: 710450 - RNA, 19 nt, Homo sapiens
  misc_RNA (1)...(19): siRNA sense strand
gaggaagaaaugagugaag

SEQ ID NO: 710451 - RNA, 19 nt, Homo sapiens
  misc_RNA (1)...(19): siRNA sense strand
agaaagagagcacgaacgu

SEQ ID NO: 710452 - RNA, 19 nt, Homo sapiens
  misc_RNA (1)...(19): siRNA sense strand
ugggaaagacagaagagaa

SEQ ID NO: 710453 - RNA, 19 nt, Homo sapiens
  misc_RNA (1)...(19): siRNA sense strand
ucccagcagucaagaagau

SEQ ID NO: 710454 - RNA, 19 nt, Homo sapiens
  misc_RNA (1)...(19): siRNA sense strand
uauggaagacagaggagaa

SEQ ID NO: 710455 - RNA, 19 nt, Homo sapiens
  misc_RNA (1)...(19): siRNA sense strand
agaagcagaggaagaagug

SEQ ID NO: 710456 - RNA, 19 nt, Homo sapiens
  misc_RNA (1)...(19): siRNA sense strand
ugaagaugaagaacgagaa

SEQ ID NO: 710457 - RNA, 19 nt, Homo sapiens
  misc_RNA (1)...(19): siRNA sense strand
gugaggaagaaaugaguga

SEQ ID NO: 710458 - RNA, 19 nt, Homo sapiens
  misc_RNA (1)...(19): siRNA sense strand
gaacuccccguauagaaga

SEQ ID NO: 710459 - RNA, 19 nt, Homo sapiens
  misc_RNA (1)...(19): siRNA sense strand
gcaccagugaagaaucaga

SEQ ID NO: 710460 - RNA, 19 nt, Homo sapiens
  misc_RNA (1)...(19): siRNA sense strand
gaugaaaagagaaaagaga

SEQ ID NO: 710461 - RNA, 19 nt, Homo sapiens
  misc_RNA (1)...(19): siRNA sense strand
caucgagaagaacaggaua

SEQ ID NO: 710462 - RNA, 19 nt, Homo sapiens
  misc_RNA (1)...(19): siRNA sense strand
aagaggaggaggaggaaga

SEQ ID NO: 710463 - RNA, 19 nt, Homo sapiens
  misc_RNA (1)...(19): siRNA sense strand
acaagguguucaaggaucu

SEQ ID NO: 710464 - RNA, 19 nt, Homo sapiens
  misc_RNA (1)...(19): siRNA sense strand
gaguacggauccccucuga

SEQ ID NO: 710465 - RNA, 19 nt, Homo sapiens
  misc_RNA (1)...(19): siRNA sense strand
ugaagauggagaaggagaa

SEQ ID NO: 710466 - RNA, 19 nt, Homo sapiens
  misc_RNA (1)...(19): siRNA sense strand
ccaacaucgucaccguuag

SEQ ID NO: 710467 - RNA, 19 nt, Homo sapiens
  misc_RNA (1)...(19): siRNA sense strand
gaagucagaaaucgaucag

SEQ ID NO: 710468 - RNA, 19 nt, Homo sapiens
  misc_RNA (1)...(19): siRNA sense strand
ggugaagacccugaugauc

SEQ ID NO: 710469 - RNA, 19 nt, Homo sapiens
  misc_RNA (1)...(19): siRNA sense strand
gggcuucgaccucaugaac

SEQ ID NO: 710470 - RNA, 19 nt, Homo sapiens
  misc_RNA (1)...(19): siRNA sense strand
gaaacgacaucgagaagaa

SEQ ID NO: 710471 - RNA, 19 nt, Homo sapiens
  misc_RNA (1)...(19): siRNA sense strand
gcaaaugucucggaaagaa

SEQ ID NO: 710472 - RNA, 19 nt, Homo sapiens
  misc_RNA (1)...(19): siRNA sense strand
gaaaacagaugaaauugug

SEQ ID NO: 710473 - RNA, 19 nt, Homo sapiens
  misc_RNA (1)...(19): siRNA sense strand
gcauggagaucacaauaag

SEQ ID NO: 710474 - RNA, 19 nt, Homo sapiens
  misc_RNA (1)...(19): siRNA sense strand
gagcaccagugaagaauca

SEQ ID NO: 710475 - RNA, 19 nt, Homo sapiens
  misc_RNA (1)...(19): siRNA sense strand
ugaaacaccugcacgacaa

SEQ ID NO: 710476 - RNA, 19 nt, Homo sapiens
  misc_RNA (1)...(19): siRNA sense strand
uaaagcggcugaagaugga

SEQ ID NO: 710477 - RNA, 19 nt, Homo sapiens
  misc_RNA (1)...(19): siRNA sense strand
agaaaugagugaagaugaa

SEQ ID NO: 710478 - RNA, 19 nt, Homo sapiens
  misc_RNA (1)...(19): siRNA sense strand
gagugaagaugaagaacga

SEQ ID NO: 710479 - RNA, 19 nt, Homo sapiens
  misc_RNA (1)...(19): siRNA sense strand
gcagcaacauggacaagau

SEQ ID NO: 710480 - RNA, 19 nt, Homo sapiens
  misc_RNA (1)...(19): siRNA sense strand
gaagggagcaccagugaag

SEQ ID NO: 710481 - RNA, 19 nt, Homo sapiens
  misc_RNA (1)...(19): siRNA sense strand
gagaagacucuauggaaga

SEQ ID NO: 710482 - RNA, 19 nt, Homo sapiens
  misc_RNA (1)...(19): siRNA sense strand
ggaguggucuacagagcaa

SEQ ID NO: 710483 - RNA, 19 nt, Homo sapiens
  misc_RNA (1)...(19): siRNA sense strand
gaagaugaagaacgagaaa

SEQ ID NO: 710484 - RNA, 19 nt, Homo sapiens
  misc_RNA (1)...(19): siRNA sense strand
gcacgaacgucggaaacga

SEQ ID NO: 710485 - RNA, 19 nt, Homo sapiens
  misc_RNA (1)...(19): siRNA sense strand
cagcaaaugucucggaaag

SEQ ID NO: 710486 - RNA, 19 nt, Homo sapiens
  misc_RNA (1)...(19): siRNA sense strand
cagaaaagaugaaaagaga

SEQ ID NO: 710487 - RNA, 19 nt, Homo sapiens
  misc_RNA (1)...(19): siRNA sense strand
gaagaaaugagugaagaug

SEQ ID NO: 710488 - RNA, 19 nt, Homo sapiens
  misc_RNA (1)...(19): siRNA sense strand
agaaguaagugaggaagaa

SEQ ID NO: 710489 - RNA, 19 nt, Homo sapiens
  misc_RNA (1)...(19): siRNA sense strand
ggaagacagaggagaagaa

SEQ ID NO: 710490 - RNA, 19 nt, Homo sapiens
  misc_RNA (1)...(19): siRNA sense strand
ugacagagggcgacuaugu

SEQ ID NO: 710491 - RNA, 19 nt, Homo sapiens
  misc_RNA (1)...(19): siRNA sense strand
gagaagaacaggauaaagc

SEQ ID NO: 710492 - RNA, 19 nt, Homo sapiens
  misc_RNA (1)...(19): siRNA sense strand
gagcauuccaggagagaaa

SEQ ID NO: 710493 - RNA, 19 nt, Homo sapiens
  misc_RNA (1)...(19): siRNA sense strand
ugaagaagcagaggaagaa

SEQ ID NO: 710494 - RNA, 19 nt, Homo sapiens
  misc_RNA (1)...(19): siRNA sense strand
aaggagggcuucccgauca

SEQ ID NO: 710495 - RNA, 19 nt, Homo sapiens
  misc_RNA (1)...(19): siRNA sense strand
gcuucgaccucaugaacaa

SEQ ID NO: 710496 - RNA, 19 nt, Homo sapiens
  misc_RNA (1)...(19): siRNA sense strand
gaaguaagugaggaagaaa

SEQ ID NO: 710497 - RNA, 19 nt, Homo sapiens
  misc_RNA (1)...(19): siRNA sense strand
caacaucgucaccguuaga

SEQ ID NO: 710498 - RNA, 19 nt, Homo sapiens
  misc_RNA (1)...(19): siRNA sense strand
ugagggagaucaacaccau

SEQ ID NO: 710499 - RNA, 19 nt, Homo sapiens
  misc_RNA (1)...(19): siRNA sense strand
gcucuaaagcggcugaaga

SEQ ID NO: 710500 - RNA, 19 nt, Homo sapiens
  misc_RNA (1)...(19): siRNA sense strand
ggcugaagauggagaagga

SEQ ID NO: 710501 - RNA, 19 nt, Homo sapiens
  misc_RNA (1)...(19): siRNA sense strand
agacagaggagaagaagau

SEQ ID NO: 710502 - RNA, 19 nt, Homo sapiens
  misc_RNA (1)...(19): siRNA sense strand
gaucaacaccauccucaag

SEQ ID NO: 710503 - RNA, 19 nt, Homo sapiens
  misc_RNA (1)...(19): siRNA sense strand
gaugaaauuguggcucuaa

SEQ ID NO: 710504 - RNA, 19 nt, Homo sapiens
  misc_RNA (1)...(19): siRNA sense strand
gaaucaggcucagguucug

SEQ ID NO: 710505 - RNA, 19 nt, Homo sapiens
  misc_RNA (1)...(19): siRNA sense strand
gaggugaagacccugauga

SEQ ID NO: 710506 - RNA, 19 nt, Homo sapiens
  misc_RNA (1)...(19): siRNA sense strand
ggaggaggaggaagaggaa

SEQ ID NO: 710507 - RNA, 19 nt, Homo sapiens
  misc_RNA (1)...(19): siRNA sense strand
ggaaacgacaucgagaaga

SEQ ID NO: 710508 - RNA, 19 nt, Homo sapiens
  misc_RNA (1)...(19): siRNA sense strand
agucagaaaucgaucagau

SEQ ID NO: 710509 - RNA, 19 nt, Homo sapiens
  misc_RNA (1)...(19): siRNA sense strand
ucacgucgcugagggagau

SEQ ID NO: 710510 - RNA, 19 nt, Homo sapiens
  misc_RNA (1)...(19): siRNA sense strand
gaaauuguggcucuaaagc

SEQ ID NO: 710511 - RNA, 19 nt, Homo sapiens
  misc_RNA (1)...(19): siRNA sense strand
gucaguggguugcaucuuc

SEQ ID NO: 710512 - RNA, 19 nt, Homo sapiens
  misc_RNA (1)...(19): siRNA sense strand
ugaagacccugaugaucca

SEQ ID NO: 710513 - RNA, 19 nt, Homo sapiens
  misc_RNA (1)...(19): siRNA sense strand
caaaugucucggaaagaaa

SEQ ID NO: 710514 - RNA, 19 nt, Homo sapiens
  misc_RNA (1)...(19): siRNA sense strand
gaagaacgagaaaaugaaa

SEQ ID NO: 710515 - RNA, 19 nt, Homo sapiens
  misc_RNA (1)...(19): siRNA sense strand
ggaagaaaugagugaagau

SEQ ID NO: 710516 - RNA, 19 nt, Homo sapiens
  misc_RNA (1)...(19): siRNA sense strand
gaagacagaggagaagaag

SEQ ID NO: 710517 - RNA, 19 nt, Homo sapiens
  misc_RNA (1)...(19): siRNA sense strand
agacagaagagaagggaaa

SEQ ID NO: 710518 - RNA, 19 nt, Homo sapiens
  misc_RNA (1)...(19): siRNA sense strand
gaaugggaaagacagaaga

SEQ ID NO: 710519 - RNA, 19 nt, Homo sapiens
  misc_RNA (1)...(19): siRNA sense strand
aggaagaaaugagugaaga

SEQ ID NO: 710520 - RNA, 19 nt, Homo sapiens
  misc_RNA (1)...(19): siRNA sense strand
gaggagaagaagaugauuc

SEQ ID NO: 710521 - RNA, 19 nt, Homo sapiens
  misc_RNA (1)...(19): siRNA sense strand
gcaacauggacaagaucua

SEQ ID NO: 710522 - RNA, 19 nt, Homo sapiens
  misc_RNA (1)...(19): siRNA sense strand
auaaggaacuccccguaua

SEQ ID NO: 710523 - RNA, 19 nt, Homo sapiens
  misc_RNA (1)...(19): siRNA sense strand
gagugaagaagcagaggaa

SEQ ID NO: 710524 - RNA, 19 nt, Homo sapiens
  misc_RNA (1)...(19): siRNA sense strand
ggaagucagaaaucgauca

SEQ ID NO: 710525 - RNA, 19 nt, Homo sapiens
  misc_RNA (1)...(19): siRNA sense strand
cccaacaucgucaccguua

SEQ ID NO: 710526 - RNA, 19 nt, Homo sapiens
  misc_RNA (1)...(19): siRNA sense strand
gggaaagacagaagagaag

SEQ ID NO: 710527 - RNA, 19 nt, Homo sapiens
  misc_RNA (1)...(19): siRNA sense strand
caaaagacaagaaaacaga

SEQ ID NO: 710528 - RNA, 19 nt, Homo sapiens
  misc_RNA (1)...(19): siRNA sense strand
gaucgaggagggcaccuau

SEQ ID NO: 710529 - RNA, 19 nt, Homo sapiens
  misc_RNA (1)...(19): siRNA sense strand
gaaaugagugaagaugaag

SEQ ID NO: 710530 - RNA, 19 nt, Homo sapiens
  misc_RNA (1)...(19): siRNA sense strand
ggaagaggaggaggaggaa

SEQ ID NO: 710531 - RNA, 19 nt, Homo sapiens
  misc_RNA (1)...(19): siRNA sense strand
caugcuagagugaaagaaa

SEQ ID NO: 710532 - RNA, 19 nt, Homo sapiens
  misc_RNA (1)...(19): siRNA sense strand
gaagagaaaauggaagaaa

SEQ ID NO: 710533 - RNA, 19 nt, Homo sapiens
  misc_RNA (1)...(19): siRNA sense strand
ggaaugggaaagacagaag

SEQ ID NO: 710534 - RNA, 19 nt, Homo sapiens
  misc_RNA (1)...(19): siRNA sense strand
cgucaccguuagagagauu

SEQ ID NO: 710535 - RNA, 19 nt, Homo sapiens
  misc_RNA (1)...(19): siRNA sense strand
gugaagaagcagaggaaga

SEQ ID NO: 710536 - RNA, 19 nt, Homo sapiens
  misc_RNA (1)...(19): siRNA sense strand
cgaagaaguaagugaggaa

SEQ ID NO: 710537 - RNA, 19 nt, Homo sapiens
  misc_RNA (1)...(19): siRNA sense strand
caacauggacaagaucuac

SEQ ID NO: 710538 - RNA, 19 nt, Homo sapiens
  misc_RNA (1)...(19): siRNA sense strand
ggaagggagcaccagugaa

SEQ ID NO: 710539 - RNA, 19 nt, Homo sapiens
  misc_RNA (1)...(19): siRNA sense strand
gcagaaucaggcucagguu

SEQ ID NO: 710540 - RNA, 19 nt, Homo sapiens
  misc_RNA (1)...(19): siRNA sense strand
cagaggagaagaagaugau

SEQ ID NO: 710541 - RNA, 19 nt, Homo sapiens
  misc_RNA (1)...(19): siRNA sense strand
guaagugaggaagaaauga

SEQ ID NO: 710542 - RNA, 19 nt, Homo sapiens
  misc_RNA (1)...(19): siRNA sense strand
cagaagagaagggaaaugg

SEQ ID NO: 710543 - RNA, 19 nt, Homo sapiens
  misc_RNA (1)...(19): siRNA sense strand
aggacggccucaagcauga

SEQ ID NO: 710544 - RNA, 19 nt, Homo sapiens
  misc_RNA (1)...(19): siRNA sense strand
gcaccuauggaguggucua

SEQ ID NO: 710545 - RNA, 19 nt, Homo sapiens
  misc_RNA (1)...(19): siRNA sense strand
gacagagggcgacuaugug

SEQ ID NO: 710546 - RNA, 19 nt, Homo sapiens
  misc_RNA (1)...(19): siRNA sense strand
aagaaaugagugaagauga

SEQ ID NO: 710547 - RNA, 19 nt, Homo sapiens
  misc_RNA (1)...(19): siRNA sense strand
ggaaauggcaagggagcau

SEQ ID NO: 710548 - RNA, 19 nt, Homo sapiens
  misc_RNA (1)...(19): siRNA sense strand
gaagauggagaaggagaag

SEQ ID NO: 710549 - RNA, 19 nt, Homo sapiens
  misc_RNA (1)...(19): siRNA sense strand
gaggagaccggcagcaacu

SEQ ID NO: 710550 - RNA, 19 nt, Homo sapiens
  misc_RNA (1)...(19): siRNA sense strand
gaggaagaaaugagugaag

SEQ ID NO: 710551 - RNA, 19 nt, Homo sapiens
  misc_RNA (1)...(19): siRNA sense strand
agaaagagagcacgaacgu

SEQ ID NO: 710552 - RNA, 19 nt, Homo sapiens
  misc_RNA (1)...(19): siRNA sense strand
ugggaaagacagaagagaa

SEQ ID NO: 710553 - RNA, 19 nt, Homo sapiens
  misc_RNA (1)...(19): siRNA sense strand
ucccagcagucaagaagau

SEQ ID NO: 710554 - RNA, 19 nt, Homo sapiens
  misc_RNA (1)...(19): siRNA sense strand
uauggaagacagaggagaa

SEQ ID NO: 710555 - RNA, 19 nt, Homo sapiens
  misc_RNA (1)...(19): siRNA sense strand
agaagcagaggaagaagug

SEQ ID NO: 710556 - RNA, 19 nt, Homo sapiens
  misc_RNA (1)...(19): siRNA sense strand
ugaagaugaagaacgagaa

SEQ ID NO: 710557 - RNA, 19 nt, Homo sapiens
  misc_RNA (1)...(19): siRNA sense strand
gugaggaagaaaugaguga

SEQ ID NO: 710558 - RNA, 19 nt, Homo sapiens
  misc_RNA (1)...(19): siRNA sense strand
gaacuccccguauagaaga

SEQ ID NO: 710559 - RNA, 19 nt, Homo sapiens
  misc_RNA (1)...(19): siRNA sense strand
gcaccagugaagaaucaga

SEQ ID NO: 710560 - RNA, 19 nt, Homo sapiens
  misc_RNA (1)...(19): siRNA sense strand
gaugaaaagagaaaagaga

SEQ ID NO: 710561 - RNA, 19 nt, Homo sapiens
  misc_RNA (1)...(19): siRNA sense strand
caucgagaagaacaggaua

SEQ ID NO: 710562 - RNA, 19 nt, Homo sapiens
  misc_RNA (1)...(19): siRNA sense strand
aagaggaggaggaggaaga

SEQ ID NO: 710563 - RNA, 19 nt, Homo sapiens
  misc_RNA (1)...(19): siRNA sense strand
acaagguguucaaggaucu

SEQ ID NO: 710564 - RNA, 19 nt, Homo sapiens
  misc_RNA (1)...(19): siRNA sense strand
gaguacggauccccucuga

SEQ ID NO: 710565 - RNA, 19 nt, Homo sapiens
  misc_RNA (1)...(19): siRNA sense strand
ugaagauggagaaggagaa

SEQ ID NO: 710566 - RNA, 19 nt, Homo sapiens
  misc_RNA (1)...(19): siRNA sense strand
ccaacaucgucaccguuag

SEQ ID NO: 710567 - RNA, 19 nt, Homo sapiens
  misc_RNA (1)...(19): siRNA sense strand
gaagucagaaaucgaucag

SEQ ID NO: 710568 - RNA, 19 nt, Homo sapiens
  misc_RNA (1)...(19): siRNA sense strand
ggugaagacccugaugauc

SEQ ID NO: 710569 - RNA, 19 nt, Homo sapiens
  misc_RNA (1)...(19): siRNA sense strand
gggcuucgaccucaugaac

SEQ ID NO: 710570 - RNA, 19 nt, Homo sapiens
  misc_RNA (1)...(19): siRNA sense strand
gaaaacagaugaaauugug

SEQ ID NO: 710571 - RNA, 19 nt, Homo sapiens
  misc_RNA (1)...(19): siRNA sense strand
gagcaccagugaagaauca

SEQ ID NO: 710572 - RNA, 19 nt, Homo sapiens
  misc_RNA (1)...(19): siRNA sense strand
ugaaacaccugcacgacaa

SEQ ID NO: 710573 - RNA, 19 nt, Homo sapiens
  misc_RNA (1)...(19): siRNA sense strand
uaaagcggcugaagaugga

SEQ ID NO: 710574 - RNA, 19 nt, Homo sapiens
  misc_RNA (1)...(19): siRNA sense strand
agaaaugagugaagaugaa

SEQ ID NO: 710575 - RNA, 19 nt, Homo sapiens
  misc_RNA (1)...(19): siRNA sense strand
gagugaagaugaagaacga

SEQ ID NO: 710576 - RNA, 19 nt, Homo sapiens
  misc_RNA (1)...(19): siRNA sense strand
gcagcaacauggacaagau

SEQ ID NO: 710577 - RNA, 19 nt, Homo sapiens
  misc_RNA (1)...(19): siRNA sense strand
gaagggagcaccagugaag

SEQ ID NO: 710578 - RNA, 19 nt, Homo sapiens
  misc_RNA (1)...(19): siRNA sense strand
gaagaugaagaacgagaaa

SEQ ID NO: 710579 - RNA, 19 nt, Homo sapiens
  misc_RNA (1)...(19): siRNA sense strand
ggaguggucuacagagcaa

SEQ ID NO: 710580 - RNA, 19 nt, Homo sapiens
  misc_RNA (1)...(19): siRNA sense strand
gaagaaaugagugaagaug

SEQ ID NO: 710581 - RNA, 19 nt, Homo sapiens
  misc_RNA (1)...(19): siRNA sense strand
agaaguaagugaggaagaa

SEQ ID NO: 710582 - RNA, 19 nt, Homo sapiens
  misc_RNA (1)...(19): siRNA sense strand
ugacagagggcgacuaugu

SEQ ID NO: 710583 - RNA, 19 nt, Homo sapiens
  misc_RNA (1)...(19): siRNA sense strand
ugaagaagcagaggaagaa

SEQ ID NO: 710584 - RNA, 19 nt, Homo sapiens
  misc_RNA (1)...(19): siRNA sense strand
aaggagggcuucccgauca

SEQ ID NO: 710585 - RNA, 19 nt, Homo sapiens
  misc_RNA (1)...(19): siRNA sense strand
gcuucgaccucaugaacaa

SEQ ID NO: 710586 - RNA, 19 nt, Homo sapiens
  misc_RNA (1)...(19): siRNA sense strand
gaaguaagugaggaagaaa

SEQ ID NO: 710587 - RNA, 19 nt, Homo sapiens
  misc_RNA (1)...(19): siRNA sense strand
caacaucgucaccguuaga

SEQ ID NO: 710588 - RNA, 19 nt, Homo sapiens
  misc_RNA (1)...(19): siRNA sense strand
ugagggagaucaacaccau

SEQ ID NO: 710589 - RNA, 19 nt, Homo sapiens
  misc_RNA (1)...(19): siRNA sense strand
gcucuaaagcggcugaaga

SEQ ID NO: 710590 - RNA, 19 nt, Homo sapiens
  misc_RNA (1)...(19): siRNA sense strand
ggcugaagauggagaagga

SEQ ID NO: 710591 - RNA, 19 nt, Homo sapiens
  misc_RNA (1)...(19): siRNA sense strand
gaugaaauuguggcucuaa

SEQ ID NO: 710592 - RNA, 19 nt, Homo sapiens
  misc_RNA (1)...(19): siRNA sense strand
gaucaacaccauccucaag

SEQ ID NO: 710593 - RNA, 19 nt, Homo sapiens
  misc_RNA (1)...(19): siRNA sense strand
ggaggaggaggaagaggaa

SEQ ID NO: 710594 - RNA, 19 nt, Homo sapiens
  misc_RNA (1)...(19): siRNA sense strand
gaggugaagacccugauga

SEQ ID NO: 710595 - RNA, 19 nt, Homo sapiens
  misc_RNA (1)...(19): siRNA sense strand
gaaucaggcucagguucug

SEQ ID NO: 710596 - RNA, 19 nt, Homo sapiens
  misc_RNA (1)...(19): siRNA sense strand
ucacgucgcugagggagau

SEQ ID NO: 710597 - RNA, 19 nt, Homo sapiens
  misc_RNA (1)...(19): siRNA sense strand
agucagaaaucgaucagau

SEQ ID NO: 710598 - RNA, 19 nt, Homo sapiens
  misc_RNA (1)...(19): siRNA sense strand
gaaauuguggcucuaaagc

SEQ ID NO: 710599 - RNA, 19 nt, Homo sapiens
  misc_RNA (1)...(19): siRNA sense strand
gucaguggguugcaucuuc

SEQ ID NO: 710600 - RNA, 19 nt, Homo sapiens
  misc_RNA (1)...(19): siRNA sense strand
ugaagacccugaugaucca

SEQ ID NO: 710601 - RNA, 19 nt, Homo sapiens
  misc_RNA (1)...(19): siRNA sense strand
ggaagaaaugagugaagau

SEQ ID NO: 710602 - RNA, 19 nt, Homo sapiens
  misc_RNA (1)...(19): siRNA sense strand
gaagaacgagaaaaugaaa

SEQ ID NO: 710603 - RNA, 19 nt, Homo sapiens
  misc_RNA (1)...(19): siRNA sense strand
aggaagaaaugagugaaga

SEQ ID NO: 710604 - RNA, 19 nt, Homo sapiens
  misc_RNA (1)...(19): siRNA sense strand
gcaacauggacaagaucua

SEQ ID NO: 710605 - RNA, 19 nt, Homo sapiens
  misc_RNA (1)...(19): siRNA sense strand
gagugaagaagcagaggaa

SEQ ID NO: 710606 - RNA, 19 nt, Homo sapiens
  misc_RNA (1)...(19): siRNA sense strand
ggaagucagaaaucgauca

SEQ ID NO: 710607 - RNA, 19 nt, Homo sapiens
  misc_RNA (1)...(19): siRNA sense strand
cccaacaucgucaccguua

SEQ ID NO: 710608 - RNA, 19 nt, Homo sapiens
  misc_RNA (1)...(19): siRNA sense strand
gaaaugagugaagaugaag

SEQ ID NO: 710609 - RNA, 19 nt, Homo sapiens
  misc_RNA (1)...(19): siRNA sense strand
ggaagaggaggaggaggaa

SEQ ID NO: 710610 - RNA, 19 nt, Homo sapiens
  misc_RNA (1)...(19): siRNA sense strand
caaaagacaagaaaacaga

SEQ ID NO: 710611 - RNA, 19 nt, Homo sapiens
  misc_RNA (1)...(19): siRNA sense strand
gaucgaggagggcaccuau

SEQ ID NO: 710612 - RNA, 19 nt, Homo sapiens
  misc_RNA (1)...(19): siRNA sense strand
gaagagaaaauggaagaaa

SEQ ID NO: 710613 - RNA, 19 nt, Homo sapiens
  misc_RNA (1)...(19): siRNA sense strand
cgaagaaguaagugaggaa

SEQ ID NO: 710614 - RNA, 19 nt, Homo sapiens
  misc_RNA (1)...(19): siRNA sense strand
cgucaccguuagagagauu

SEQ ID NO: 710615 - RNA, 19 nt, Homo sapiens
  misc_RNA (1)...(19): siRNA sense strand
gugaagaagcagaggaaga

SEQ ID NO: 710616 - RNA, 19 nt, Homo sapiens
  misc_RNA (1)...(19): siRNA sense strand
caacauggacaagaucuac

SEQ ID NO: 710617 - RNA, 19 nt, Homo sapiens
  misc_RNA (1)...(19): siRNA sense strand
ggaagggagcaccagugaa

SEQ ID NO: 710618 - RNA, 19 nt, Homo sapiens
  misc_RNA (1)...(19): siRNA sense strand
guaagugaggaagaaauga

SEQ ID NO: 710619 - RNA, 19 nt, Homo sapiens
  misc_RNA (1)...(19): siRNA sense strand
gcagaaucaggcucagguu

SEQ ID NO: 710620 - RNA, 19 nt, Homo sapiens
  misc_RNA (1)...(19): siRNA sense strand
aagaaaugagugaagauga

SEQ ID NO: 710621 - RNA, 19 nt, Homo sapiens
  misc_RNA (1)...(19): siRNA sense strand
aggacggccucaagcauga

SEQ ID NO: 710622 - RNA, 19 nt, Homo sapiens
  misc_RNA (1)...(19): siRNA sense strand
gcaccuauggaguggucua

SEQ ID NO: 710623 - RNA, 19 nt, Homo sapiens
  misc_RNA (1)...(19): siRNA sense strand
gacagagggcgacuaugug

SEQ ID NO: 710624 - RNA, 19 nt, Homo sapiens
  misc_RNA (1)...(19): siRNA sense strand
gaggagaccggcagcaacu

SEQ ID NO: 710625 - RNA, 19 nt, Homo sapiens
  misc_RNA (1)...(19): siRNA sense strand
gaagauggagaaggagaag

SEQ ID NO: 710626 - RNA, 19 nt, Homo sapiens
  misc_RNA (1)...(19): siRNA sense strand
gaggaagaaaugagugaag

SEQ ID NO: 710627 - RNA, 19 nt, Homo sapiens
  misc_RNA (1)...(19): siRNA sense strand
gugaggaagaaaugaguga

SEQ ID NO: 710628 - RNA, 19 nt, Homo sapiens
  misc_RNA (1)...(19): siRNA sense strand
ucccagcagucaagaagau

SEQ ID NO: 710629 - RNA, 19 nt, Homo sapiens
  misc_RNA (1)...(19): siRNA sense strand
agaagcagaggaagaagug

SEQ ID NO: 710630 - RNA, 19 nt, Homo sapiens
  misc_RNA (1)...(19): siRNA sense strand
ugaagaugaagaacgagaa

SEQ ID NO: 710631 - RNA, 19 nt, Homo sapiens
  misc_RNA (1)...(19): siRNA sense strand
gcaccagugaagaaucaga

SEQ ID NO: 710632 - RNA, 19 nt, Homo sapiens
  misc_RNA (1)...(19): siRNA sense strand
aagaggaggaggaggaaga

SEQ ID NO: 710633 - RNA, 19 nt, Homo sapiens
  misc_RNA (1)...(19): siRNA sense strand
acaagguguucaaggaucu

SEQ ID NO: 710634 - RNA, 19 nt, Homo sapiens
  misc_RNA (1)...(19): siRNA sense strand
gaguacggauccccucuga

SEQ ID NO: 710635 - RNA, 19 nt, Homo sapiens
  misc_RNA (1)...(19): siRNA sense strand
ugaagauggagaaggagaa

SEQ ID NO: 710636 - RNA, 19 nt, Homo sapiens
  misc_RNA (1)...(19): siRNA sense strand
ccaacaucgucaccguuag

SEQ ID NO: 710637 - RNA, 19 nt, Homo sapiens
  misc_RNA (1)...(19): siRNA sense strand
gaagucagaaaucgaucag

SEQ ID NO: 710638 - RNA, 19 nt, Homo sapiens
  misc_RNA (1)...(19): siRNA sense strand
ggugaagacccugaugauc

SEQ ID NO: 710639 - RNA, 19 nt, Homo sapiens
  misc_RNA (1)...(19): siRNA sense strand
ugaaauuguggcucuaaag

SEQ ID NO: 710640 - RNA, 19 nt, Homo sapiens
  misc_RNA (1)...(19): siRNA sense strand
gggcuucgaccucaugaac

SEQ ID NO: 710641 - RNA, 19 nt, Homo sapiens
  misc_RNA (1)...(19): siRNA sense strand
ggagaccggcagcaacucu

SEQ ID NO: 710642 - RNA, 19 nt, Homo sapiens
  misc_RNA (1)...(19): siRNA sense strand
ggaggugaagacccugaug

SEQ ID NO: 710643 - RNA, 19 nt, Homo sapiens
  misc_RNA (1)...(19): siRNA sense strand
gaaacgacaucgagaagaa

SEQ ID NO: 710644 - RNA, 19 nt, Homo sapiens
  misc_RNA (1)...(19): siRNA sense strand
gcaaaugucucggaaagaa

SEQ ID NO: 710645 - RNA, 19 nt, Homo sapiens
  misc_RNA (1)...(19): siRNA sense strand
gaaaacagaugaaauugug

SEQ ID NO: 710646 - RNA, 19 nt, Homo sapiens
  misc_RNA (1)...(19): siRNA sense strand
gcauggagaucacaauaag

SEQ ID NO: 710647 - RNA, 19 nt, Homo sapiens
  misc_RNA (1)...(19): siRNA sense strand
gagcaccagugaagaauca

SEQ ID NO: 710648 - RNA, 19 nt, Homo sapiens
  misc_RNA (1)...(19): siRNA sense strand
ugaaacaccugcacgacaa

SEQ ID NO: 710649 - RNA, 19 nt, Homo sapiens
  misc_RNA (1)...(19): siRNA sense strand
gaaaaggacucuuggaaag

SEQ ID NO: 710650 - RNA, 19 nt, Homo sapiens
  misc_RNA (1)...(19): siRNA sense strand
uaaagcggcugaagaugga

SEQ ID NO: 710651 - RNA, 19 nt, Homo sapiens
  misc_RNA (1)...(19): siRNA sense strand
agaaaugagugaagaugaa

SEQ ID NO: 710652 - RNA, 19 nt, Homo sapiens
  misc_RNA (1)...(19): siRNA sense strand
gagugaagaugaagaacga

SEQ ID NO: 710653 - RNA, 19 nt, Homo sapiens
  misc_RNA (1)...(19): siRNA sense strand
gcagcaacauggacaagau

SEQ ID NO: 710654 - RNA, 19 nt, Homo sapiens
  misc_RNA (1)...(19): siRNA sense strand
gaagggagcaccagugaag

SEQ ID NO: 710655 - RNA, 19 nt, Homo sapiens
  misc_RNA (1)...(19): siRNA sense strand
ggaaggaacaagaggagaa

SEQ ID NO: 710656 - RNA, 19 nt, Homo sapiens
  misc_RNA (1)...(19): siRNA sense strand
ggaguggucuacagagcaa

SEQ ID NO: 710657 - RNA, 19 nt, Homo sapiens
  misc_RNA (1)...(19): siRNA sense strand
gaagaugaagaacgagaaa

SEQ ID NO: 710658 - RNA, 19 nt, Homo sapiens
  misc_RNA (1)...(19): siRNA sense strand
gcacgaacgucggaaacga

SEQ ID NO: 710659 - RNA, 19 nt, Homo sapiens
  misc_RNA (1)...(19): siRNA sense strand
gagaagacucuauggaaga

SEQ ID NO: 710660 - RNA, 19 nt, Homo sapiens
  misc_RNA (1)...(19): siRNA sense strand
cagcaaaugucucggaaag

SEQ ID NO: 710661 - RNA, 19 nt, Homo sapiens
  misc_RNA (1)...(19): siRNA sense strand
cagaaaagaugaaaagaga

SEQ ID NO: 710662 - RNA, 19 nt, Homo sapiens
  misc_RNA (1)...(19): siRNA sense strand
gaagaaaugagugaagaug

SEQ ID NO: 710663 - RNA, 19 nt, Homo sapiens
  misc_RNA (1)...(19): siRNA sense strand
agaaguaagugaggaagaa

SEQ ID NO: 710664 - RNA, 19 nt, Homo sapiens
  misc_RNA (1)...(19): siRNA sense strand
ggaagacagaggagaagaa

SEQ ID NO: 710665 - RNA, 19 nt, Homo sapiens
  misc_RNA (1)...(19): siRNA sense strand
gaaggaacaagaggagaaa

SEQ ID NO: 710666 - RNA, 19 nt, Homo sapiens
  misc_RNA (1)...(19): siRNA sense strand
ugacagagggcgacuaugu

SEQ ID NO: 710667 - RNA, 19 nt, Homo sapiens
  misc_RNA (1)...(19): siRNA sense strand
ggagaaagcagagauaaaa

SEQ ID NO: 710668 - RNA, 19 nt, Homo sapiens
  misc_RNA (1)...(19): siRNA sense strand
gagaagaacaggauaaagc

SEQ ID NO: 710669 - RNA, 19 nt, Homo sapiens
  misc_RNA (1)...(19): siRNA sense strand
gaggagaaagcagagauaa

SEQ ID NO: 710670 - RNA, 19 nt, Homo sapiens
  misc_RNA (1)...(19): siRNA sense strand
ugaagaagcagaggaagaa

SEQ ID NO: 710671 - RNA, 19 nt, Homo sapiens
  misc_RNA (1)...(19): siRNA sense strand
gagcauuccaggagagaaa

SEQ ID NO: 710672 - RNA, 19 nt, Homo sapiens
  misc_RNA (1)...(19): siRNA sense strand
aaggagggcuucccgauca

SEQ ID NO: 710673 - RNA, 19 nt, Homo sapiens
  misc_RNA (1)...(19): siRNA sense strand
gcuucgaccucaugaacaa

SEQ ID NO: 710674 - RNA, 19 nt, Homo sapiens
  misc_RNA (1)...(19): siRNA sense strand
gaaguaagugaggaagaaa

SEQ ID NO: 710675 - RNA, 19 nt, Homo sapiens
  misc_RNA (1)...(19): siRNA sense strand
caacaucgucaccguuaga

SEQ ID NO: 710676 - RNA, 19 nt, Homo sapiens
  misc_RNA (1)...(19): siRNA sense strand
ugagggagaucaacaccau

SEQ ID NO: 710677 - RNA, 19 nt, Homo sapiens
  misc_RNA (1)...(19): siRNA sense strand
aaaggacucuuggaaagug

SEQ ID NO: 710678 - RNA, 19 nt, Homo sapiens
  misc_RNA (1)...(19): siRNA sense strand
gcucuaaagcggcugaaga

SEQ ID NO: 710679 - RNA, 19 nt, Homo sapiens
  misc_RNA (1)...(19): siRNA sense strand
ggcugaagauggagaagga

SEQ ID NO: 710680 - RNA, 19 nt, Homo sapiens
  misc_RNA (1)...(19): siRNA sense strand
agacagaggagaagaagau

SEQ ID NO: 710681 - RNA, 19 nt, Homo sapiens
  misc_RNA (1)...(19): siRNA sense strand
gaucaacaccauccucaag

SEQ ID NO: 710682 - RNA, 19 nt, Homo sapiens
  misc_RNA (1)...(19): siRNA sense strand
gaugaaauuguggcucuaa

SEQ ID NO: 710683 - RNA, 19 nt, Homo sapiens
  misc_RNA (1)...(19): siRNA sense strand
gaaucaggcucagguucug

SEQ ID NO: 710684 - RNA, 19 nt, Homo sapiens
  misc_RNA (1)...(19): siRNA sense strand
gaggugaagacccugauga

SEQ ID NO: 710685 - RNA, 19 nt, Homo sapiens
  misc_RNA (1)...(19): siRNA sense strand
ggaggaggaggaagaggaa

SEQ ID NO: 710686 - RNA, 19 nt, Homo sapiens
  misc_RNA (1)...(19): siRNA sense strand
ggaaacgacaucgagaaga

SEQ ID NO: 710687 - RNA, 19 nt, Homo sapiens
  misc_RNA (1)...(19): siRNA sense strand
agucagaaaucgaucagau

SEQ ID NO: 710688 - RNA, 19 nt, Homo sapiens
  misc_RNA (1)...(19): siRNA sense strand
ucacgucgcugagggagau

SEQ ID NO: 710689 - RNA, 19 nt, Homo sapiens
  misc_RNA (1)...(19): siRNA sense strand
gaaauuguggcucuaaagc

SEQ ID NO: 710690 - RNA, 19 nt, Homo sapiens
  misc_RNA (1)...(19): siRNA sense strand
gucaguggguugcaucuuc

SEQ ID NO: 710691 - RNA, 19 nt, Homo sapiens
  misc_RNA (1)...(19): siRNA sense strand
ugaagacccugaugaucca

SEQ ID NO: 710692 - RNA, 19 nt, Homo sapiens
  misc_RNA (1)...(19): siRNA sense strand
gaagacagaggagaagaag

SEQ ID NO: 710693 - RNA, 19 nt, Homo sapiens
  misc_RNA (1)...(19): siRNA sense strand
gaagaacgagaaaaugaaa

SEQ ID NO: 710694 - RNA, 19 nt, Homo sapiens
  misc_RNA (1)...(19): siRNA sense strand
ggaagaaaugagugaagau

SEQ ID NO: 710695 - RNA, 19 nt, Homo sapiens
  misc_RNA (1)...(19): siRNA sense strand
agacagaagagaagggaaa

SEQ ID NO: 710696 - RNA, 19 nt, Homo sapiens
  misc_RNA (1)...(19): siRNA sense strand
gaaugggaaagacagaaga

SEQ ID NO: 710697 - RNA, 19 nt, Homo sapiens
  misc_RNA (1)...(19): siRNA sense strand
caaaugucucggaaagaaa

SEQ ID NO: 710698 - RNA, 19 nt, Homo sapiens
  misc_RNA (1)...(19): siRNA sense strand
gaggagaagaagaugauuc

SEQ ID NO: 710699 - RNA, 19 nt, Homo sapiens
  misc_RNA (1)...(19): siRNA sense strand
gcaacauggacaagaucua

SEQ ID NO: 710700 - RNA, 19 nt, Homo sapiens
  misc_RNA (1)...(19): siRNA sense strand
aggaagaaaugagugaaga

SEQ ID NO: 710701 - RNA, 19 nt, Homo sapiens
  misc_RNA (1)...(19): siRNA sense strand
auaaggaacuccccguaua

SEQ ID NO: 710702 - RNA, 19 nt, Homo sapiens
  misc_RNA (1)...(19): siRNA sense strand
gagugaagaagcagaggaa

SEQ ID NO: 710703 - RNA, 19 nt, Homo sapiens
  misc_RNA (1)...(19): siRNA sense strand
ggaagucagaaaucgauca

SEQ ID NO: 710704 - RNA, 19 nt, Homo sapiens
  misc_RNA (1)...(19): siRNA sense strand
cccaacaucgucaccguua

SEQ ID NO: 710705 - RNA, 19 nt, Homo sapiens
  misc_RNA (1)...(19): siRNA sense strand
gggaaagacagaagagaag

SEQ ID NO: 710706 - RNA, 19 nt, Homo sapiens
  misc_RNA (1)...(19): siRNA sense strand
caaaagacaagaaaacaga

SEQ ID NO: 710707 - RNA, 19 nt, Homo sapiens
  misc_RNA (1)...(19): siRNA sense strand
gaucgaggagggcaccuau

SEQ ID NO: 710708 - RNA, 19 nt, Homo sapiens
  misc_RNA (1)...(19): siRNA sense strand
gaaaugagugaagaugaag

SEQ ID NO: 710709 - RNA, 19 nt, Homo sapiens
  misc_RNA (1)...(19): siRNA sense strand
ggaagaggaggaggaggaa

SEQ ID NO: 710710 - RNA, 19 nt, Homo sapiens
  misc_RNA (1)...(19): siRNA sense strand
caugcuagagugaaagaaa

SEQ ID NO: 710711 - RNA, 19 nt, Homo sapiens
  misc_RNA (1)...(19): siRNA sense strand
gaagagaaaauggaagaaa

SEQ ID NO: 710712 - RNA, 19 nt, Homo sapiens
  misc_RNA (1)...(19): siRNA sense strand
ggaaugggaaagacagaag

SEQ ID NO: 710713 - RNA, 19 nt, Homo sapiens
  misc_RNA (1)...(19): siRNA sense strand
cgucaccguuagagagauu

SEQ ID NO: 710714 - RNA, 19 nt, Homo sapiens
  misc_RNA (1)...(19): siRNA sense strand
gugaagaagcagaggaaga

SEQ ID NO: 710715 - RNA, 19 nt, Homo sapiens
  misc_RNA (1)...(19): siRNA sense strand
cgaagaaguaagugaggaa

SEQ ID NO: 710716 - RNA, 19 nt, Homo sapiens
  misc_RNA (1)...(19): siRNA sense strand
caacauggacaagaucuac

SEQ ID NO: 710717 - RNA, 19 nt, Homo sapiens
  misc_RNA (1)...(19): siRNA sense strand
ggaacaagaggagaaagca

SEQ ID NO: 710718 - RNA, 19 nt, Homo sapiens
  misc_RNA (1)...(19): siRNA sense strand
gaaacgaaggaaggaacaa

SEQ ID NO: 710719 - RNA, 19 nt, Homo sapiens
  misc_RNA (1)...(19): siRNA sense strand
ggaagggagcaccagugaa

SEQ ID NO: 710720 - RNA, 19 nt, Homo sapiens
  misc_RNA (1)...(19): siRNA sense strand
cagaggagaagaagaugau

SEQ ID NO: 710721 - RNA, 19 nt, Homo sapiens
  misc_RNA (1)...(19): siRNA sense strand
guaagugaggaagaaauga

SEQ ID NO: 710722 - RNA, 19 nt, Homo sapiens
  misc_RNA (1)...(19): siRNA sense strand
gcagaaucaggcucagguu

SEQ ID NO: 710723 - RNA, 19 nt, Homo sapiens
  misc_RNA (1)...(19): siRNA sense strand
cagaagagaagggaaaugg

SEQ ID NO: 710724 - RNA, 19 nt, Homo sapiens
  misc_RNA (1)...(19): siRNA sense strand
aggacggccucaagcauga

SEQ ID NO: 710725 - RNA, 19 nt, Homo sapiens
  misc_RNA (1)...(19): siRNA sense strand
gcaccuauggaguggucua

SEQ ID NO: 710726 - RNA, 19 nt, Homo sapiens
  misc_RNA (1)...(19): siRNA sense strand
gacagagggcgacuaugug

SEQ ID NO: 710727 - RNA, 19 nt, Homo sapiens
  misc_RNA (1)...(19): siRNA sense strand
aagaaaugagugaagauga

SEQ ID NO: 710728 - RNA, 19 nt, Homo sapiens
  misc_RNA (1)...(19): siRNA sense strand
ggaaauggcaagggagcau

SEQ ID NO: 710729 - RNA, 19 nt, Homo sapiens
  misc_RNA (1)...(19): siRNA sense strand
agaggagaaagcagagaua

SEQ ID NO: 710730 - RNA, 19 nt, Homo sapiens
  misc_RNA (1)...(19): siRNA sense strand
gaagauggagaaggagaag

SEQ ID NO: 710731 - RNA, 19 nt, Homo sapiens
  misc_RNA (1)...(19): siRNA sense strand
gaggagaccggcagcaacu

SEQ ID NO: 710732 - RNA, 19 nt, Homo sapiens
  misc_RNA (1)...(19): siRNA sense strand
agaaagagagcacgaacgu

SEQ ID NO: 710733 - RNA, 19 nt, Homo sapiens
  misc_RNA (1)...(19): siRNA sense strand
gaggaagaaaugagugaag

SEQ ID NO: 710734 - RNA, 19 nt, Homo sapiens
  misc_RNA (1)...(19): siRNA sense strand
gcagagauaaaacgcuuaa

SEQ ID NO: 710735 - RNA, 19 nt, Homo sapiens
  misc_RNA (1)...(19): siRNA sense strand
ugggaaagacagaagagaa

SEQ ID NO: 710736 - RNA, 19 nt, Homo sapiens
  misc_RNA (1)...(19): siRNA sense strand
ucccagcagucaagaagau

SEQ ID NO: 710737 - RNA, 19 nt, Homo sapiens
  misc_RNA (1)...(19): siRNA sense strand
agaagcagaggaagaagug

SEQ ID NO: 710738 - RNA, 19 nt, Homo sapiens
  misc_RNA (1)...(19): siRNA sense strand
uauggaagacagaggagaa

SEQ ID NO: 710739 - RNA, 19 nt, Homo sapiens
  misc_RNA (1)...(19): siRNA sense strand
ugaagaugaagaacgagaa

SEQ ID NO: 710740 - RNA, 19 nt, Homo sapiens
  misc_RNA (1)...(19): siRNA sense strand
gugaggaagaaaugaguga

SEQ ID NO: 710741 - RNA, 19 nt, Homo sapiens
  misc_RNA (1)...(19): siRNA sense strand
gaacuccccguauagaaga

SEQ ID NO: 710742 - RNA, 19 nt, Homo sapiens
  misc_RNA (1)...(19): siRNA sense strand
ugaaaaggacucuuggaaa

SEQ ID NO: 710743 - RNA, 19 nt, Homo sapiens
  misc_RNA (1)...(19): siRNA sense strand
gaaacgacaucgagaagaa

SEQ ID NO: 710744 - RNA, 19 nt, Homo sapiens
  misc_RNA (1)...(19): siRNA sense strand
gcaaaugucucggaaagaa

SEQ ID NO: 710745 - RNA, 19 nt, Homo sapiens
  misc_RNA (1)...(19): siRNA sense strand
gaaaacagaugaaauugug

SEQ ID NO: 710746 - RNA, 19 nt, Homo sapiens
  misc_RNA (1)...(19): siRNA sense strand
gcauggagaucacaauaag

SEQ ID NO: 710747 - RNA, 19 nt, Homo sapiens
  misc_RNA (1)...(19): siRNA sense strand
gagcaccagugaagaauca

SEQ ID NO: 710748 - RNA, 19 nt, Homo sapiens
  misc_RNA (1)...(19): siRNA sense strand
ugaaacaccugcacgacaa

SEQ ID NO: 710749 - RNA, 19 nt, Homo sapiens
  misc_RNA (1)...(19): siRNA sense strand
gaaaaggacucuuggaaag

SEQ ID NO: 710750 - RNA, 19 nt, Homo sapiens
  misc_RNA (1)...(19): siRNA sense strand
uaaagcggcugaagaugga

SEQ ID NO: 710751 - RNA, 19 nt, Homo sapiens
  misc_RNA (1)...(19): siRNA sense strand
agaaaugagugaagaugaa

SEQ ID NO: 710752 - RNA, 19 nt, Homo sapiens
  misc_RNA (1)...(19): siRNA sense strand
gagugaagaugaagaacga

SEQ ID NO: 710753 - RNA, 19 nt, Homo sapiens
  misc_RNA (1)...(19): siRNA sense strand
gcagcaacauggacaagau

SEQ ID NO: 710754 - RNA, 19 nt, Homo sapiens
  misc_RNA (1)...(19): siRNA sense strand
gaagggagcaccagugaag

SEQ ID NO: 710755 - RNA, 19 nt, Homo sapiens
  misc_RNA (1)...(19): siRNA sense strand
ggaaggaacaagaggagaa

SEQ ID NO: 710756 - RNA, 19 nt, Homo sapiens
  misc_RNA (1)...(19): siRNA sense strand
ggaguggucuacagagcaa

SEQ ID NO: 710757 - RNA, 19 nt, Homo sapiens
  misc_RNA (1)...(19): siRNA sense strand
gaagaugaagaacgagaaa

SEQ ID NO: 710758 - RNA, 19 nt, Homo sapiens
  misc_RNA (1)...(19): siRNA sense strand
gcacgaacgucggaaacga

SEQ ID NO: 710759 - RNA, 19 nt, Homo sapiens
  misc_RNA (1)...(19): siRNA sense strand
gagaagacucuauggaaga

SEQ ID NO: 710760 - RNA, 19 nt, Homo sapiens
  misc_RNA (1)...(19): siRNA sense strand
cagcaaaugucucggaaag

SEQ ID NO: 710761 - RNA, 19 nt, Homo sapiens
  misc_RNA (1)...(19): siRNA sense strand
cagaaaagaugaaaagaga

SEQ ID NO: 710762 - RNA, 19 nt, Homo sapiens
  misc_RNA (1)...(19): siRNA sense strand
gaagaaaugagugaagaug

SEQ ID NO: 710763 - RNA, 19 nt, Homo sapiens
  misc_RNA (1)...(19): siRNA sense strand
agaaguaagugaggaagaa

SEQ ID NO: 710764 - RNA, 19 nt, Homo sapiens
  misc_RNA (1)...(19): siRNA sense strand
ggaagacagaggagaagaa

SEQ ID NO: 710765 - RNA, 19 nt, Homo sapiens
  misc_RNA (1)...(19): siRNA sense strand
gaaggaacaagaggagaaa

SEQ ID NO: 710766 - RNA, 19 nt, Homo sapiens
  misc_RNA (1)...(19): siRNA sense strand
ugacagagggcgacuaugu

SEQ ID NO: 710767 - RNA, 19 nt, Homo sapiens
  misc_RNA (1)...(19): siRNA sense strand
ggagaaagcagagauaaaa

SEQ ID NO: 710768 - RNA, 19 nt, Homo sapiens
  misc_RNA (1)...(19): siRNA sense strand
gagaagaacaggauaaagc

SEQ ID NO: 710769 - RNA, 19 nt, Homo sapiens
  misc_RNA (1)...(19): siRNA sense strand
gaggagaaagcagagauaa

SEQ ID NO: 710770 - RNA, 19 nt, Homo sapiens
  misc_RNA (1)...(19): siRNA sense strand
ugaagaagcagaggaagaa

SEQ ID NO: 710771 - RNA, 19 nt, Homo sapiens
  misc_RNA (1)...(19): siRNA sense strand
gagcauuccaggagagaaa

SEQ ID NO: 710772 - RNA, 19 nt, Homo sapiens
  misc_RNA (1)...(19): siRNA sense strand
aaggagggcuucccgauca

SEQ ID NO: 710773 - RNA, 19 nt, Homo sapiens
  misc_RNA (1)...(19): siRNA sense strand
gcuucgaccucaugaacaa

SEQ ID NO: 710774 - RNA, 19 nt, Homo sapiens
  misc_RNA (1)...(19): siRNA sense strand
gaaguaagugaggaagaaa

SEQ ID NO: 710775 - RNA, 19 nt, Homo sapiens
  misc_RNA (1)...(19): siRNA sense strand
caacaucgucaccguuaga

SEQ ID NO: 710776 - RNA, 19 nt, Homo sapiens
  misc_RNA (1)...(19): siRNA sense strand
ugagggagaucaacaccau

SEQ ID NO: 710777 - RNA, 19 nt, Homo sapiens
  misc_RNA (1)...(19): siRNA sense strand
aaaggacucuuggaaagug

SEQ ID NO: 710778 - RNA, 19 nt, Homo sapiens
  misc_RNA (1)...(19): siRNA sense strand
gcucuaaagcggcugaaga

SEQ ID NO: 710779 - RNA, 19 nt, Homo sapiens
  misc_RNA (1)...(19): siRNA sense strand
ggcugaagauggagaagga

SEQ ID NO: 710780 - RNA, 19 nt, Homo sapiens
  misc_RNA (1)...(19): siRNA sense strand
agacagaggagaagaagau

SEQ ID NO: 710781 - RNA, 19 nt, Homo sapiens
  misc_RNA (1)...(19): siRNA sense strand
gaucaacaccauccucaag

SEQ ID NO: 710782 - RNA, 19 nt, Homo sapiens
  misc_RNA (1)...(19): siRNA sense strand
gaugaaauuguggcucuaa

SEQ ID NO: 710783 - RNA, 19 nt, Homo sapiens
  misc_RNA (1)...(19): siRNA sense strand
gaaucaggcucagguucug

SEQ ID NO: 710784 - RNA, 19 nt, Homo sapiens
  misc_RNA (1)...(19): siRNA sense strand
gaggugaagacccugauga

SEQ ID NO: 710785 - RNA, 19 nt, Homo sapiens
  misc_RNA (1)...(19): siRNA sense strand
ggaggaggaggaagaggaa

SEQ ID NO: 710786 - RNA, 19 nt, Homo sapiens
  misc_RNA (1)...(19): siRNA sense strand
ggaaacgacaucgagaaga

SEQ ID NO: 710787 - RNA, 19 nt, Homo sapiens
  misc_RNA (1)...(19): siRNA sense strand
agucagaaaucgaucagau

SEQ ID NO: 710788 - RNA, 19 nt, Homo sapiens
  misc_RNA (1)...(19): siRNA sense strand
ucacgucgcugagggagau

SEQ ID NO: 710789 - RNA, 19 nt, Homo sapiens
  misc_RNA (1)...(19): siRNA sense strand
gaaauuguggcucuaaagc

SEQ ID NO: 710790 - RNA, 19 nt, Homo sapiens
  misc_RNA (1)...(19): siRNA sense strand
gucaguggguugcaucuuc

SEQ ID NO: 710791 - RNA, 19 nt, Homo sapiens
  misc_RNA (1)...(19): siRNA sense strand
ugaagacccugaugaucca

SEQ ID NO: 710792 - RNA, 19 nt, Homo sapiens
  misc_RNA (1)...(19): siRNA sense strand
gaagacagaggagaagaag

SEQ ID NO: 710793 - RNA, 19 nt, Homo sapiens
  misc_RNA (1)...(19): siRNA sense strand
gaagaacgagaaaaugaaa

SEQ ID NO: 710794 - RNA, 19 nt, Homo sapiens
  misc_RNA (1)...(19): siRNA sense strand
ggaagaaaugagugaagau

SEQ ID NO: 710795 - RNA, 19 nt, Homo sapiens
  misc_RNA (1)...(19): siRNA sense strand
agacagaagagaagggaaa

SEQ ID NO: 710796 - RNA, 19 nt, Homo sapiens
  misc_RNA (1)...(19): siRNA sense strand
gaaugggaaagacagaaga

SEQ ID NO: 710797 - RNA, 19 nt, Homo sapiens
  misc_RNA (1)...(19): siRNA sense strand
caaaugucucggaaagaaa

SEQ ID NO: 710798 - RNA, 19 nt, Homo sapiens
  misc_RNA (1)...(19): siRNA sense strand
gaggagaagaagaugauuc

SEQ ID NO: 710799 - RNA, 19 nt, Homo sapiens
  misc_RNA (1)...(19): siRNA sense strand
gcaacauggacaagaucua

SEQ ID NO: 710800 - RNA, 19 nt, Homo sapiens
  misc_RNA (1)...(19): siRNA sense strand
aggaagaaaugagugaaga

SEQ ID NO: 710801 - RNA, 19 nt, Homo sapiens
  misc_RNA (1)...(19): siRNA sense strand
auaaggaacuccccguaua

SEQ ID NO: 710802 - RNA, 19 nt, Homo sapiens
  misc_RNA (1)...(19): siRNA sense strand
gagugaagaagcagaggaa

SEQ ID NO: 710803 - RNA, 19 nt, Homo sapiens
  misc_RNA (1)...(19): siRNA sense strand
ggaagucagaaaucgauca

SEQ ID NO: 710804 - RNA, 19 nt, Homo sapiens
  misc_RNA (1)...(19): siRNA sense strand
cccaacaucgucaccguua

SEQ ID NO: 710805 - RNA, 19 nt, Homo sapiens
  misc_RNA (1)...(19): siRNA sense strand
gggaaagacagaagagaag

SEQ ID NO: 710806 - RNA, 19 nt, Homo sapiens
  misc_RNA (1)...(19): siRNA sense strand
caaaagacaagaaaacaga

SEQ ID NO: 710807 - RNA, 19 nt, Homo sapiens
  misc_RNA (1)...(19): siRNA sense strand
gaucgaggagggcaccuau

SEQ ID NO: 710808 - RNA, 19 nt, Homo sapiens
  misc_RNA (1)...(19): siRNA sense strand
gaaaugagugaagaugaag

SEQ ID NO: 710809 - RNA, 19 nt, Homo sapiens
  misc_RNA (1)...(19): siRNA sense strand
ggaagaggaggaggaggaa

SEQ ID NO: 710810 - RNA, 19 nt, Homo sapiens
  misc_RNA (1)...(19): siRNA sense strand
caugcuagagugaaagaaa

SEQ ID NO: 710811 - RNA, 19 nt, Homo sapiens
  misc_RNA (1)...(19): siRNA sense strand
gaagagaaaauggaagaaa

SEQ ID NO: 710812 - RNA, 19 nt, Homo sapiens
  misc_RNA (1)...(19): siRNA sense strand
ggaaugggaaagacagaag

SEQ ID NO: 710813 - RNA, 19 nt, Homo sapiens
  misc_RNA (1)...(19): siRNA sense strand
cgucaccguuagagagauu

SEQ ID NO: 710814 - RNA, 19 nt, Homo sapiens
  misc_RNA (1)...(19): siRNA sense strand
gugaagaagcagaggaaga

SEQ ID NO: 710815 - RNA, 19 nt, Homo sapiens
  misc_RNA (1)...(19): siRNA sense strand
cgaagaaguaagugaggaa

SEQ ID NO: 710816 - RNA, 19 nt, Homo sapiens
  misc_RNA (1)...(19): siRNA sense strand
caacauggacaagaucuac

SEQ ID NO: 710817 - RNA, 19 nt, Homo sapiens
  misc_RNA (1)...(19): siRNA sense strand
ggaacaagaggagaaagca

SEQ ID NO: 710818 - RNA, 19 nt, Homo sapiens
  misc_RNA (1)...(19): siRNA sense strand
gaaacgaaggaaggaacaa

SEQ ID NO: 710819 - RNA, 19 nt, Homo sapiens
  misc_RNA (1)...(19): siRNA sense strand
ggaagggagcaccagugaa

SEQ ID NO: 710820 - RNA, 19 nt, Homo sapiens
  misc_RNA (1)...(19): siRNA sense strand
cagaggagaagaagaugau

SEQ ID NO: 710821 - RNA, 19 nt, Homo sapiens
  misc_RNA (1)...(19): siRNA sense strand
guaagugaggaagaaauga

SEQ ID NO: 710822 - RNA, 19 nt, Homo sapiens
  misc_RNA (1)...(19): siRNA sense strand
gcagaaucaggcucagguu

SEQ ID NO: 710823 - RNA, 19 nt, Homo sapiens
  misc_RNA (1)...(19): siRNA sense strand
cagaagagaagggaaaugg

SEQ ID NO: 710824 - RNA, 19 nt, Homo sapiens
  misc_RNA (1)...(19): siRNA sense strand
aggacggccucaagcauga

SEQ ID NO: 710825 - RNA, 19 nt, Homo sapiens
  misc_RNA (1)...(19): siRNA sense strand
gcaccuauggaguggucua

SEQ ID NO: 710826 - RNA, 19 nt, Homo sapiens
  misc_RNA (1)...(19): siRNA sense strand
gacagagggcgacuaugug

SEQ ID NO: 710827 - RNA, 19 nt, Homo sapiens
  misc_RNA (1)...(19): siRNA sense strand
aagaaaugagugaagauga

SEQ ID NO: 710828 - RNA, 19 nt, Homo sapiens
  misc_RNA (1)...(19): siRNA sense strand
ggaaauggcaagggagcau

SEQ ID NO: 710829 - RNA, 19 nt, Homo sapiens
  misc_RNA (1)...(19): siRNA sense strand
agaggagaaagcagagaua

SEQ ID NO: 710830 - RNA, 19 nt, Homo sapiens
  misc_RNA (1)...(19): siRNA sense strand
gaagauggagaaggagaag

SEQ ID NO: 710831 - RNA, 19 nt, Homo sapiens
  misc_RNA (1)...(19): siRNA sense strand
gaggagaccggcagcaacu

SEQ ID NO: 710832 - RNA, 19 nt, Homo sapiens
  misc_RNA (1)...(19): siRNA sense strand
agaaagagagcacgaacgu

SEQ ID NO: 710833 - RNA, 19 nt, Homo sapiens
  misc_RNA (1)...(19): siRNA sense strand
gaggaagaaaugagugaag

SEQ ID NO: 710834 - RNA, 19 nt, Homo sapiens
  misc_RNA (1)...(19): siRNA sense strand
gcagagauaaaacgcuuaa

SEQ ID NO: 710835 - RNA, 19 nt, Homo sapiens
  misc_RNA (1)...(19): siRNA sense strand
ugggaaagacagaagagaa

SEQ ID NO: 710836 - RNA, 19 nt, Homo sapiens
  misc_RNA (1)...(19): siRNA sense strand
ucccagcagucaagaagau

SEQ ID NO: 710837 - RNA, 19 nt, Homo sapiens
  misc_RNA (1)...(19): siRNA sense strand
agaagcagaggaagaagug

SEQ ID NO: 710838 - RNA, 19 nt, Homo sapiens
  misc_RNA (1)...(19): siRNA sense strand
uauggaagacagaggagaa

SEQ ID NO: 710839 - RNA, 19 nt, Homo sapiens
  misc_RNA (1)...(19): siRNA sense strand
ugaagaugaagaacgagaa

SEQ ID NO: 710840 - RNA, 19 nt, Homo sapiens
  misc_RNA (1)...(19): siRNA sense strand
gugaggaagaaaugaguga

SEQ ID NO: 710841 - RNA, 19 nt, Homo sapiens
  misc_RNA (1)...(19): siRNA sense strand
gaacuccccguauagaaga

SEQ ID NO: 710842 - RNA, 19 nt, Homo sapiens
  misc_RNA (1)...(19): siRNA sense strand
ugaaaaggacucuuggaaa

SEQ ID NO: 710843 - RNA, 19 nt, Homo sapiens
  misc_RNA (1)...(19): siRNA sense strand
gggaagagcuguuugauca

SEQ ID NO: 710844 - RNA, 19 nt, Homo sapiens
  misc_RNA (1)...(19): siRNA sense strand
ggaaggagaugaagaaugg

SEQ ID NO: 710845 - RNA, 19 nt, Homo sapiens
  misc_RNA (1)...(19): siRNA sense strand
gcaagugaaucaugagaaa

SEQ ID NO: 710846 - RNA, 19 nt, Homo sapiens
  misc_RNA (1)...(19): siRNA sense strand
gggaggauguguaucaaua

SEQ ID NO: 710847 - RNA, 19 nt, Homo sapiens
  misc_RNA (1)...(19): siRNA sense strand
gaaguuaccugugggauuc

SEQ ID NO: 710848 - RNA, 19 nt, Homo sapiens
  misc_RNA (1)...(19): siRNA sense strand
gcacaacaaugccgugguu

SEQ ID NO: 710849 - RNA, 19 nt, Homo sapiens
  misc_RNA (1)...(19): siRNA sense strand
ugaaggaacugucaccaaa

SEQ ID NO: 710850 - RNA, 19 nt, Homo sapiens
  misc_RNA (1)...(19): siRNA sense strand
uggagacgauggaucauua

SEQ ID NO: 710851 - RNA, 19 nt, Homo sapiens
  misc_RNA (1)...(19): siRNA sense strand
cgacggaucucuuuacaag

SEQ ID NO: 710852 - RNA, 19 nt, Homo sapiens
  misc_RNA (1)...(19): siRNA sense strand
gagcagauguggucaaacu

SEQ ID NO: 710853 - RNA, 19 nt, Homo sapiens
  misc_RNA (1)...(19): siRNA sense strand
gaucaaggacaagaaguua

SEQ ID NO: 710854 - RNA, 19 nt, Homo sapiens
  misc_RNA (1)...(19): siRNA sense strand
gagaagaugaucaguggua

SEQ ID NO: 710855 - RNA, 19 nt, Homo sapiens
  misc_RNA (1)...(19): siRNA sense strand
aaacaaagguaugagaaga

SEQ ID NO: 710856 - RNA, 19 nt, Homo sapiens
  misc_RNA (1)...(19): siRNA sense strand
gcacauugaucugguggaa

SEQ ID NO: 710857 - RNA, 19 nt, Homo sapiens
  misc_RNA (1)...(19): siRNA sense strand
aaaggaagaucaaggacaa

SEQ ID NO: 710858 - RNA, 19 nt, Homo sapiens
  misc_RNA (1)...(19): siRNA sense strand
gaacugaggcacauugauc

SEQ ID NO: 710859 - RNA, 19 nt, Homo sapiens
  misc_RNA (1)...(19): siRNA sense strand
gaagagcuguuugaucaca

SEQ ID NO: 710860 - RNA, 19 nt, Homo sapiens
  misc_RNA (1)...(19): siRNA sense strand
ggaaacaaagguaugagaa

SEQ ID NO: 710861 - RNA, 19 nt, Homo sapiens
  misc_RNA (1)...(19): siRNA sense strand
ggacaaagcgauuuaaagc

SEQ ID NO: 710862 - RNA, 19 nt, Homo sapiens
  misc_RNA (1)...(19): siRNA sense strand
ggaagcagacgcacaacaa

SEQ ID NO: 710863 - RNA, 19 nt, Homo sapiens
  misc_RNA (1)...(19): siRNA sense strand
gaagacauccggacagagu

SEQ ID NO: 710864 - RNA, 19 nt, Homo sapiens
  misc_RNA (1)...(19): siRNA sense strand
caucguagcuguggugaau

SEQ ID NO: 710865 - RNA, 19 nt, Homo sapiens
  misc_RNA (1)...(19): siRNA sense strand
ggacuggaccgucugaaug

SEQ ID NO: 710866 - RNA, 19 nt, Homo sapiens
  misc_RNA (1)...(19): siRNA sense strand
gaucuacgccauuccuauu

SEQ ID NO: 710867 - RNA, 19 nt, Homo sapiens
  misc_RNA (1)...(19): siRNA sense strand
gaugaucagugguauguac

SEQ ID NO: 710868 - RNA, 19 nt, Homo sapiens
  misc_RNA (1)...(19): siRNA sense strand
gacgauggaucauuagaag

SEQ ID NO: 710869 - RNA, 19 nt, Homo sapiens
  misc_RNA (1)...(19): siRNA sense strand
gcacagaggcaagcagcua

SEQ ID NO: 710870 - RNA, 19 nt, Homo sapiens
  misc_RNA (1)...(19): siRNA sense strand
cugcaucucugacuucuug

SEQ ID NO: 710871 - RNA, 19 nt, Homo sapiens
  misc_RNA (1)...(19): siRNA sense strand
gaguggagccguccgauga

SEQ ID NO: 710872 - RNA, 19 nt, Homo sapiens
  misc_RNA (1)...(19): siRNA sense strand
gaaacucucauagauauca

SEQ ID NO: 710873 - RNA, 19 nt, Homo sapiens
  misc_RNA (1)...(19): siRNA sense strand
caccaaugcuugcuacaug

SEQ ID NO: 710874 - RNA, 19 nt, Homo sapiens
  misc_RNA (1)...(19): siRNA sense strand
gaaaauccguagugggaaa

SEQ ID NO: 710875 - RNA, 19 nt, Homo sapiens
  misc_RNA (1)...(19): siRNA sense strand
uggcugcgguuguggauaa

SEQ ID NO: 710876 - RNA, 19 nt, Homo sapiens
  misc_RNA (1)...(19): siRNA sense strand
gggcuucacguucucauuu

SEQ ID NO: 710877 - RNA, 19 nt, Homo sapiens
  misc_RNA (1)...(19): siRNA sense strand
gagguuggacucauuguug

SEQ ID NO: 710878 - RNA, 19 nt, Homo sapiens
  misc_RNA (1)...(19): siRNA sense strand
gagcagcaccggcagauag

SEQ ID NO: 710879 - RNA, 19 nt, Homo sapiens
  misc_RNA (1)...(19): siRNA sense strand
gauaagauccgcgagaaca

SEQ ID NO: 710880 - RNA, 19 nt, Homo sapiens
  misc_RNA (1)...(19): siRNA sense strand
gaaaucguccgcaacaucu

SEQ ID NO: 710881 - RNA, 19 nt, Homo sapiens
  misc_RNA (1)...(19): siRNA sense strand
gaggagacccuggcucauu

SEQ ID NO: 710882 - RNA, 19 nt, Homo sapiens
  misc_RNA (1)...(19): siRNA sense strand
ggucaaacugcuuaacaaa

SEQ ID NO: 710883 - RNA, 19 nt, Homo sapiens
  misc_RNA (1)...(19): siRNA sense strand
ccaaguuucucucucagau

SEQ ID NO: 710884 - RNA, 19 nt, Homo sapiens
  misc_RNA (1)...(19): siRNA sense strand
guauguaccugggugaaau

SEQ ID NO: 710885 - RNA, 19 nt, Homo sapiens
  misc_RNA (1)...(19): siRNA sense strand
gaaacaaagguaugagaag

SEQ ID NO: 710886 - RNA, 19 nt, Homo sapiens
  misc_RNA (1)...(19): siRNA sense strand
gaccgagaauggugacuuc

SEQ ID NO: 710887 - RNA, 19 nt, Homo sapiens
  misc_RNA (1)...(19): siRNA sense strand
gauguggucaaacugcuua

SEQ ID NO: 710888 - RNA, 19 nt, Homo sapiens
  misc_RNA (1)...(19): siRNA sense strand
ccaugcggcucuccgauga

SEQ ID NO: 710889 - RNA, 19 nt, Homo sapiens
  misc_RNA (1)...(19): siRNA sense strand
caacaagaucuacgccauu

SEQ ID NO: 710890 - RNA, 19 nt, Homo sapiens
  misc_RNA (1)...(19): siRNA sense strand
ggagagcugguucgacuga

SEQ ID NO: 710891 - RNA, 19 nt, Homo sapiens
  misc_RNA (1)...(19): siRNA sense strand
uuaaucgacuucaccaaga

SEQ ID NO: 710892 - RNA, 19 nt, Homo sapiens
  misc_RNA (1)...(19): siRNA sense strand
gaaaugcacaacaagaucu

SEQ ID NO: 710893 - RNA, 19 nt, Homo sapiens
  misc_RNA (1)...(19): siRNA sense strand
ggaaaugcacaacaagauc

SEQ ID NO: 710894 - RNA, 19 nt, Homo sapiens
  misc_RNA (1)...(19): siRNA sense strand
aggagacccuggcucauuu

SEQ ID NO: 710895 - RNA, 19 nt, Homo sapiens
  misc_RNA (1)...(19): siRNA sense strand
gaagaucaaggacaagaag

SEQ ID NO: 710896 - RNA, 19 nt, Homo sapiens
  misc_RNA (1)...(19): siRNA sense strand
agaccaaguuucucucuca

SEQ ID NO: 710897 - RNA, 19 nt, Homo sapiens
  misc_RNA (1)...(19): siRNA sense strand
ccacaaugccaaagaaauc

SEQ ID NO: 710898 - RNA, 19 nt, Homo sapiens
  misc_RNA (1)...(19): siRNA sense strand
uaaggaaggccuccacaau

SEQ ID NO: 710899 - RNA, 19 nt, Homo sapiens
  misc_RNA (1)...(19): siRNA sense strand
uagaagacauccggacaga

SEQ ID NO: 710900 - RNA, 19 nt, Homo sapiens
  misc_RNA (1)...(19): siRNA sense strand
cagcagcuaggucugaaua

SEQ ID NO: 710901 - RNA, 19 nt, Homo sapiens
  misc_RNA (1)...(19): siRNA sense strand
gggugcaagugaaucauga

SEQ ID NO: 710902 - RNA, 19 nt, Homo sapiens
  misc_RNA (1)...(19): siRNA sense strand
uaaucgacuucaccaagaa

SEQ ID NO: 710903 - RNA, 19 nt, Homo sapiens
  misc_RNA (1)...(19): siRNA sense strand
acaaagguaugagaagaug

SEQ ID NO: 710904 - RNA, 19 nt, Homo sapiens
  misc_RNA (1)...(19): siRNA sense strand
ccuaaaugcugggaaacaa

SEQ ID NO: 710905 - RNA, 19 nt, Homo sapiens
  misc_RNA (1)...(19): siRNA sense strand
acaagacgcacccacagua

SEQ ID NO: 710906 - RNA, 19 nt, Homo sapiens
  misc_RNA (1)...(19): siRNA sense strand
ucaggaaggagaugaagaa

SEQ ID NO: 710907 - RNA, 19 nt, Homo sapiens
  misc_RNA (1)...(19): siRNA sense strand
ugaagaacguggagauggu

SEQ ID NO: 710908 - RNA, 19 nt, Homo sapiens
  misc_RNA (1)...(19): siRNA sense strand
acaaugccgugguuaagau

SEQ ID NO: 710909 - RNA, 19 nt, Homo sapiens
  misc_RNA (1)...(19): siRNA sense strand
ggaaguuuaacaccaguga

SEQ ID NO: 710910 - RNA, 19 nt, Homo sapiens
  misc_RNA (1)...(19): siRNA sense strand
ggaagaucaaggacaagaa

SEQ ID NO: 710911 - RNA, 19 nt, Homo sapiens
  misc_RNA (1)...(19): siRNA sense strand
gaagcagacgcacaacaau

SEQ ID NO: 710912 - RNA, 19 nt, Homo sapiens
  misc_RNA (1)...(19): siRNA sense strand
caucggcacuggcaccaau

SEQ ID NO: 710913 - RNA, 19 nt, Homo sapiens
  misc_RNA (1)...(19): siRNA sense strand
gauggucaguggcauguac

SEQ ID NO: 710914 - RNA, 19 nt, Homo sapiens
  misc_RNA (1)...(19): siRNA sense strand
gacaguauccucgucaaga

SEQ ID NO: 710915 - RNA, 19 nt, Homo sapiens
  misc_RNA (1)...(19): siRNA sense strand
aaagagaacgguggaaaug

SEQ ID NO: 710916 - RNA, 19 nt, Homo sapiens
  misc_RNA (1)...(19): siRNA sense strand
caacagccacagucaagau

SEQ ID NO: 710917 - RNA, 19 nt, Homo sapiens
  misc_RNA (1)...(19): siRNA sense strand
ucucugacuucuuggacua

SEQ ID NO: 710918 - RNA, 19 nt, Homo sapiens
  misc_RNA (1)...(19): siRNA sense strand
uuaagaugcugcccuccuu

SEQ ID NO: 710919 - RNA, 19 nt, Homo sapiens
  misc_RNA (1)...(19): siRNA sense strand
cagcacguuugcaccauug

SEQ ID NO: 710920 - RNA, 19 nt, Homo sapiens
  misc_RNA (1)...(19): siRNA sense strand
gaugauaucaggacacacu

SEQ ID NO: 710921 - RNA, 19 nt, Homo sapiens
  misc_RNA (1)...(19): siRNA sense strand
ggacgggacacucuacaag

SEQ ID NO: 710922 - RNA, 19 nt, Homo sapiens
  misc_RNA (1)...(19): siRNA sense strand
gaggaacugaggcacauug

SEQ ID NO: 710923 - RNA, 19 nt, Homo sapiens
  misc_RNA (1)...(19): siRNA sense strand
gaagaugaucagugguaug

SEQ ID NO: 710924 - RNA, 19 nt, Homo sapiens
  misc_RNA (1)...(19): siRNA sense strand
gggaaacaaagguaugaga

SEQ ID NO: 710925 - RNA, 19 nt, Homo sapiens
  misc_RNA (1)...(19): siRNA sense strand
caugaugaccugugcuuau

SEQ ID NO: 710926 - RNA, 19 nt, Homo sapiens
  misc_RNA (1)...(19): siRNA sense strand
agagaacgguggaaaugca

SEQ ID NO: 710927 - RNA, 19 nt, Homo sapiens
  misc_RNA (1)...(19): siRNA sense strand
ugaaccgccugcgugauaa

SEQ ID NO: 710928 - RNA, 19 nt, Homo sapiens
  misc_RNA (1)...(19): siRNA sense strand
ugggagauuucauggagaa

SEQ ID NO: 710929 - RNA, 19 nt, Homo sapiens
  misc_RNA (1)...(19): siRNA sense strand
ggugaaaucguccgcaaca

SEQ ID NO: 710930 - RNA, 19 nt, Homo sapiens
  misc_RNA (1)...(19): siRNA sense strand
caacgggugucuggaugau

SEQ ID NO: 710931 - RNA, 19 nt, Homo sapiens
  misc_RNA (1)...(19): siRNA sense strand
ucacauggaguccgagguu

SEQ ID NO: 710932 - RNA, 19 nt, Homo sapiens
  misc_RNA (1)...(19): siRNA sense strand
ucacguggacaaaggguuu

SEQ ID NO: 710933 - RNA, 19 nt, Homo sapiens
  misc_RNA (1)...(19): siRNA sense strand
caacaaugccgugguuaag

SEQ ID NO: 710934 - RNA, 19 nt, Homo sapiens
  misc_RNA (1)...(19): siRNA sense strand
ucguagcuguggugaauga

SEQ ID NO: 710935 - RNA, 19 nt, Homo sapiens
  misc_RNA (1)...(19): siRNA sense strand
cacauugucuccugcaucu

SEQ ID NO: 710936 - RNA, 19 nt, Homo sapiens
  misc_RNA (1)...(19): siRNA sense strand
cagccacagucaagauguu

SEQ ID NO: 710937 - RNA, 19 nt, Homo sapiens
  misc_RNA (1)...(19): siRNA sense strand
caagacgcacccacaguau

SEQ ID NO: 710938 - RNA, 19 nt, Homo sapiens
  misc_RNA (1)...(19): siRNA sense strand
ccagcacguuugcaccauu

SEQ ID NO: 710939 - RNA, 19 nt, Homo sapiens
  misc_RNA (1)...(19): siRNA sense strand
ccuccacaaugccaaagaa

SEQ ID NO: 710940 - RNA, 19 nt, Homo sapiens
  misc_RNA (1)...(19): siRNA sense strand
caugaugaccuguggcuau

SEQ ID NO: 710941 - RNA, 19 nt, Homo sapiens
  misc_RNA (1)...(19): siRNA sense strand
caagcuucauccacacuuc

SEQ ID NO: 710942 - RNA, 19 nt, Homo sapiens
  misc_RNA (1)...(19): siRNA sense strand
gaacugucaccaaaaugua

SEQ ID NO: 710943 - RNA, 19 nt, Homo sapiens
  misc_RNA (1)...(19): siRNA sense strand
gggaagagcuguuugauca

SEQ ID NO: 710944 - RNA, 19 nt, Homo sapiens
  misc_RNA (1)...(19): siRNA sense strand
ggaaggagaugaagaaugg

SEQ ID NO: 710945 - RNA, 19 nt, Homo sapiens
  misc_RNA (1)...(19): siRNA sense strand
gcaagugaaucaugagaaa

SEQ ID NO: 710946 - RNA, 19 nt, Homo sapiens
  misc_RNA (1)...(19): siRNA sense strand
gggaggauguguaucaaua

SEQ ID NO: 710947 - RNA, 19 nt, Homo sapiens
  misc_RNA (1)...(19): siRNA sense strand
gaaguuaccugugggauuc

SEQ ID NO: 710948 - RNA, 19 nt, Homo sapiens
  misc_RNA (1)...(19): siRNA sense strand
gcacaacaaugccgugguu

SEQ ID NO: 710949 - RNA, 19 nt, Homo sapiens
  misc_RNA (1)...(19): siRNA sense strand
ugaaggaacugucaccaaa

SEQ ID NO: 710950 - RNA, 19 nt, Homo sapiens
  misc_RNA (1)...(19): siRNA sense strand
uggagacgauggaucauua

SEQ ID NO: 710951 - RNA, 19 nt, Homo sapiens
  misc_RNA (1)...(19): siRNA sense strand
cgacggaucucuuuacaag

SEQ ID NO: 710952 - RNA, 19 nt, Homo sapiens
  misc_RNA (1)...(19): siRNA sense strand
gagcagauguggucaaacu

SEQ ID NO: 710953 - RNA, 19 nt, Homo sapiens
  misc_RNA (1)...(19): siRNA sense strand
gaucaaggacaagaaguua

SEQ ID NO: 710954 - RNA, 19 nt, Homo sapiens
  misc_RNA (1)...(19): siRNA sense strand
gagaagaugaucaguggua

SEQ ID NO: 710955 - RNA, 19 nt, Homo sapiens
  misc_RNA (1)...(19): siRNA sense strand
aaacaaagguaugagaaga

SEQ ID NO: 710956 - RNA, 19 nt, Homo sapiens
  misc_RNA (1)...(19): siRNA sense strand
gcacauugaucugguggaa

SEQ ID NO: 710957 - RNA, 19 nt, Homo sapiens
  misc_RNA (1)...(19): siRNA sense strand
aaaggaagaucaaggacaa

SEQ ID NO: 710958 - RNA, 19 nt, Homo sapiens
  misc_RNA (1)...(19): siRNA sense strand
gaacugaggcacauugauc

SEQ ID NO: 710959 - RNA, 19 nt, Homo sapiens
  misc_RNA (1)...(19): siRNA sense strand
gaagagcuguuugaucaca

SEQ ID NO: 710960 - RNA, 19 nt, Homo sapiens
  misc_RNA (1)...(19): siRNA sense strand
ggaaacaaagguaugagaa

SEQ ID NO: 710961 - RNA, 19 nt, Homo sapiens
  misc_RNA (1)...(19): siRNA sense strand
ggacaaagcgauuuaaagc

SEQ ID NO: 710962 - RNA, 19 nt, Homo sapiens
  misc_RNA (1)...(19): siRNA sense strand
ggaagcagacgcacaacaa

SEQ ID NO: 710963 - RNA, 19 nt, Homo sapiens
  misc_RNA (1)...(19): siRNA sense strand
gaagacauccggacagagu

SEQ ID NO: 710964 - RNA, 19 nt, Homo sapiens
  misc_RNA (1)...(19): siRNA sense strand
caucguagcuguggugaau

SEQ ID NO: 710965 - RNA, 19 nt, Homo sapiens
  misc_RNA (1)...(19): siRNA sense strand
ggacuggaccgucugaaug

SEQ ID NO: 710966 - RNA, 19 nt, Homo sapiens
  misc_RNA (1)...(19): siRNA sense strand
gaucuacgccauuccuauu

SEQ ID NO: 710967 - RNA, 19 nt, Homo sapiens
  misc_RNA (1)...(19): siRNA sense strand
gaugaucagugguauguac

SEQ ID NO: 710968 - RNA, 19 nt, Homo sapiens
  misc_RNA (1)...(19): siRNA sense strand
gacgauggaucauuagaag

SEQ ID NO: 710969 - RNA, 19 nt, Homo sapiens
  misc_RNA (1)...(19): siRNA sense strand
gcacagaggcaagcagcua

SEQ ID NO: 710970 - RNA, 19 nt, Homo sapiens
  misc_RNA (1)...(19): siRNA sense strand
cugcaucucugacuucuug

SEQ ID NO: 710971 - RNA, 19 nt, Homo sapiens
  misc_RNA (1)...(19): siRNA sense strand
gaguggagccguccgauga

SEQ ID NO: 710972 - RNA, 19 nt, Homo sapiens
  misc_RNA (1)...(19): siRNA sense strand
gaaacucucauagauauca

SEQ ID NO: 710973 - RNA, 19 nt, Homo sapiens
  misc_RNA (1)...(19): siRNA sense strand
caccaaugcuugcuacaug

SEQ ID NO: 710974 - RNA, 19 nt, Homo sapiens
  misc_RNA (1)...(19): siRNA sense strand
gaaaauccguagugggaaa

SEQ ID NO: 710975 - RNA, 19 nt, Homo sapiens
  misc_RNA (1)...(19): siRNA sense strand
uggcugcgguuguggauaa

SEQ ID NO: 710976 - RNA, 19 nt, Homo sapiens
  misc_RNA (1)...(19): siRNA sense strand
gggcuucacguucucauuu

SEQ ID NO: 710977 - RNA, 19 nt, Homo sapiens
  misc_RNA (1)...(19): siRNA sense strand
gagguuggacucauuguug

SEQ ID NO: 710978 - RNA, 19 nt, Homo sapiens
  misc_RNA (1)...(19): siRNA sense strand
gagcagcaccggcagauag

SEQ ID NO: 710979 - RNA, 19 nt, Homo sapiens
  misc_RNA (1)...(19): siRNA sense strand
gauaagauccgcgagaaca

SEQ ID NO: 710980 - RNA, 19 nt, Homo sapiens
  misc_RNA (1)...(19): siRNA sense strand
gaaaucguccgcaacaucu

SEQ ID NO: 710981 - RNA, 19 nt, Homo sapiens
  misc_RNA (1)...(19): siRNA sense strand
gaggagacccuggcucauu

SEQ ID NO: 710982 - RNA, 19 nt, Homo sapiens
  misc_RNA (1)...(19): siRNA sense strand
ggucaaacugcuuaacaaa

SEQ ID NO: 710983 - RNA, 19 nt, Homo sapiens
  misc_RNA (1)...(19): siRNA sense strand
ccaaguuucucucucagau

SEQ ID NO: 710984 - RNA, 19 nt, Homo sapiens
  misc_RNA (1)...(19): siRNA sense strand
guauguaccugggugaaau

SEQ ID NO: 710985 - RNA, 19 nt, Homo sapiens
  misc_RNA (1)...(19): siRNA sense strand
gaaacaaagguaugagaag

SEQ ID NO: 710986 - RNA, 19 nt, Homo sapiens
  misc_RNA (1)...(19): siRNA sense strand
gaccgagaauggugacuuc

SEQ ID NO: 710987 - RNA, 19 nt, Homo sapiens
  misc_RNA (1)...(19): siRNA sense strand
gauguggucaaacugcuua

SEQ ID NO: 710988 - RNA, 19 nt, Homo sapiens
  misc_RNA (1)...(19): siRNA sense strand
ccaugcggcucuccgauga

SEQ ID NO: 710989 - RNA, 19 nt, Homo sapiens
  misc_RNA (1)...(19): siRNA sense strand
caacaagaucuacgccauu

SEQ ID NO: 710990 - RNA, 19 nt, Homo sapiens
  misc_RNA (1)...(19): siRNA sense strand
ggagagcugguucgacuga

SEQ ID NO: 710991 - RNA, 19 nt, Homo sapiens
  misc_RNA (1)...(19): siRNA sense strand
uuaaucgacuucaccaaga

SEQ ID NO: 710992 - RNA, 19 nt, Homo sapiens
  misc_RNA (1)...(19): siRNA sense strand
gaaaugcacaacaagaucu

SEQ ID NO: 710993 - RNA, 19 nt, Homo sapiens
  misc_RNA (1)...(19): siRNA sense strand
ggaaaugcacaacaagauc

SEQ ID NO: 710994 - RNA, 19 nt, Homo sapiens
  misc_RNA (1)...(19): siRNA sense strand
aggagacccuggcucauuu

SEQ ID NO: 710995 - RNA, 19 nt, Homo sapiens
  misc_RNA (1)...(19): siRNA sense strand
gaagaucaaggacaagaag

SEQ ID NO: 710996 - RNA, 19 nt, Homo sapiens
  misc_RNA (1)...(19): siRNA sense strand
agaccaaguuucucucuca

SEQ ID NO: 710997 - RNA, 19 nt, Homo sapiens
  misc_RNA (1)...(19): siRNA sense strand
ccacaaugccaaagaaauc

SEQ ID NO: 710998 - RNA, 19 nt, Homo sapiens
  misc_RNA (1)...(19): siRNA sense strand
uaaggaaggccuccacaau

SEQ ID NO: 710999 - RNA, 19 nt, Homo sapiens
  misc_RNA (1)...(19): siRNA sense strand
uagaagacauccggacaga

SEQ ID NO: 711000 - RNA, 19 nt, Homo sapiens
  misc_RNA (1)...(19): siRNA sense strand
cagcagcuaggucugaaua

SEQ ID NO: 711001 - RNA, 19 nt, Homo sapiens
  misc_RNA (1)...(19): siRNA sense strand
gggugcaagugaaucauga

SEQ ID NO: 711002 - RNA, 19 nt, Homo sapiens
  misc_RNA (1)...(19): siRNA sense strand
uaaucgacuucaccaagaa

SEQ ID NO: 711003 - RNA, 19 nt, Homo sapiens
  misc_RNA (1)...(19): siRNA sense strand
acaaagguaugagaagaug

SEQ ID NO: 711004 - RNA, 19 nt, Homo sapiens
  misc_RNA (1)...(19): siRNA sense strand
ccuaaaugcugggaaacaa

SEQ ID NO: 711005 - RNA, 19 nt, Homo sapiens
  misc_RNA (1)...(19): siRNA sense strand
acaagacgcacccacagua

SEQ ID NO: 711006 - RNA, 19 nt, Homo sapiens
  misc_RNA (1)...(19): siRNA sense strand
ucaggaaggagaugaagaa

SEQ ID NO: 711007 - RNA, 19 nt, Homo sapiens
  misc_RNA (1)...(19): siRNA sense strand
ugaagaacguggagauggu

SEQ ID NO: 711008 - RNA, 19 nt, Homo sapiens
  misc_RNA (1)...(19): siRNA sense strand
acaaugccgugguuaagau

SEQ ID NO: 711009 - RNA, 19 nt, Homo sapiens
  misc_RNA (1)...(19): siRNA sense strand
ggaaguuuaacaccaguga

SEQ ID NO: 711010 - RNA, 19 nt, Homo sapiens
  misc_RNA (1)...(19): siRNA sense strand
ggaagaucaaggacaagaa

SEQ ID NO: 711011 - RNA, 19 nt, Homo sapiens
  misc_RNA (1)...(19): siRNA sense strand
gaagcagacgcacaacaau

SEQ ID NO: 711012 - RNA, 19 nt, Homo sapiens
  misc_RNA (1)...(19): siRNA sense strand
caucggcacuggcaccaau

SEQ ID NO: 711013 - RNA, 19 nt, Homo sapiens
  misc_RNA (1)...(19): siRNA sense strand
gauggucaguggcauguac

SEQ ID NO: 711014 - RNA, 19 nt, Homo sapiens
  misc_RNA (1)...(19): siRNA sense strand
gacaguauccucgucaaga

SEQ ID NO: 711015 - RNA, 19 nt, Homo sapiens
  misc_RNA (1)...(19): siRNA sense strand
aaagagaacgguggaaaug

SEQ ID NO: 711016 - RNA, 19 nt, Homo sapiens
  misc_RNA (1)...(19): siRNA sense strand
caacagccacagucaagau

SEQ ID NO: 711017 - RNA, 19 nt, Homo sapiens
  misc_RNA (1)...(19): siRNA sense strand
ucucugacuucuuggacua

SEQ ID NO: 711018 - RNA, 19 nt, Homo sapiens
  misc_RNA (1)...(19): siRNA sense strand
uuaagaugcugcccuccuu

SEQ ID NO: 711019 - RNA, 19 nt, Homo sapiens
  misc_RNA (1)...(19): siRNA sense strand
cagcacguuugcaccauug

SEQ ID NO: 711020 - RNA, 19 nt, Homo sapiens
  misc_RNA (1)...(19): siRNA sense strand
gaugauaucaggacacacu

SEQ ID NO: 711021 - RNA, 19 nt, Homo sapiens
  misc_RNA (1)...(19): siRNA sense strand
ggacgggacacucuacaag

SEQ ID NO: 711022 - RNA, 19 nt, Homo sapiens
  misc_RNA (1)...(19): siRNA sense strand
gaggaacugaggcacauug

SEQ ID NO: 711023 - RNA, 19 nt, Homo sapiens
  misc_RNA (1)...(19): siRNA sense strand
gaagaugaucagugguaug

SEQ ID NO: 711024 - RNA, 19 nt, Homo sapiens
  misc_RNA (1)...(19): siRNA sense strand
gggaaacaaagguaugaga

SEQ ID NO: 711025 - RNA, 19 nt, Homo sapiens
  misc_RNA (1)...(19): siRNA sense strand
caugaugaccugugcuuau

SEQ ID NO: 711026 - RNA, 19 nt, Homo sapiens
  misc_RNA (1)...(19): siRNA sense strand
agagaacgguggaaaugca

SEQ ID NO: 711027 - RNA, 19 nt, Homo sapiens
  misc_RNA (1)...(19): siRNA sense strand
ugaaccgccugcgugauaa

SEQ ID NO: 711028 - RNA, 19 nt, Homo sapiens
  misc_RNA (1)...(19): siRNA sense strand
ugggagauuucauggagaa

SEQ ID NO: 711029 - RNA, 19 nt, Homo sapiens
  misc_RNA (1)...(19): siRNA sense strand
ggugaaaucguccgcaaca

SEQ ID NO: 711030 - RNA, 19 nt, Homo sapiens
  misc_RNA (1)...(19): siRNA sense strand
caacgggugucuggaugau

SEQ ID NO: 711031 - RNA, 19 nt, Homo sapiens
  misc_RNA (1)...(19): siRNA sense strand
ucacauggaguccgagguu

SEQ ID NO: 711032 - RNA, 19 nt, Homo sapiens
  misc_RNA (1)...(19): siRNA sense strand
ucacguggacaaaggguuu

SEQ ID NO: 711033 - RNA, 19 nt, Homo sapiens
  misc_RNA (1)...(19): siRNA sense strand
caacaaugccgugguuaag

SEQ ID NO: 711034 - RNA, 19 nt, Homo sapiens
  misc_RNA (1)...(19): siRNA sense strand
ucguagcuguggugaauga

SEQ ID NO: 711035 - RNA, 19 nt, Homo sapiens
  misc_RNA (1)...(19): siRNA sense strand
cacauugucuccugcaucu

SEQ ID NO: 711036 - RNA, 19 nt, Homo sapiens
  misc_RNA (1)...(19): siRNA sense strand
cagccacagucaagauguu

SEQ ID NO: 711037 - RNA, 19 nt, Homo sapiens
  misc_RNA (1)...(19): siRNA sense strand
caagacgcacccacaguau

SEQ ID NO: 711038 - RNA, 19 nt, Homo sapiens
  misc_RNA (1)...(19): siRNA sense strand
ccagcacguuugcaccauu

SEQ ID NO: 711039 - RNA, 19 nt, Homo sapiens
  misc_RNA (1)...(19): siRNA sense strand
ccuccacaaugccaaagaa

SEQ ID NO: 711040 - RNA, 19 nt, Homo sapiens
  misc_RNA (1)...(19): siRNA sense strand
caugaugaccuguggcuau

SEQ ID NO: 711041 - RNA, 19 nt, Homo sapiens
  misc_RNA (1)...(19): siRNA sense strand
caagcuucauccacacuuc

SEQ ID NO: 711042 - RNA, 19 nt, Homo sapiens
  misc_RNA (1)...(19): siRNA sense strand
gaacugucaccaaaaugua

SEQ ID NO: 711043 - RNA, 19 nt, Homo sapiens
  misc_RNA (1)...(19): siRNA sense strand
gggaagagcuguuugauca

SEQ ID NO: 711044 - RNA, 19 nt, Homo sapiens
  misc_RNA (1)...(19): siRNA sense strand
ggaaggagaugaagaaugg

SEQ ID NO: 711045 - RNA, 19 nt, Homo sapiens
  misc_RNA (1)...(19): siRNA sense strand
gcaagugaaucaugagaaa

SEQ ID NO: 711046 - RNA, 19 nt, Homo sapiens
  misc_RNA (1)...(19): siRNA sense strand
gggaggauguguaucaaua

SEQ ID NO: 711047 - RNA, 19 nt, Homo sapiens
  misc_RNA (1)...(19): siRNA sense strand
gaaguuaccugugggauuc

SEQ ID NO: 711048 - RNA, 19 nt, Homo sapiens
  misc_RNA (1)...(19): siRNA sense strand
gcacaacaaugccgugguu

SEQ ID NO: 711049 - RNA, 19 nt, Homo sapiens
  misc_RNA (1)...(19): siRNA sense strand
ugaaggaacugucaccaaa

SEQ ID NO: 711050 - RNA, 19 nt, Homo sapiens
  misc_RNA (1)...(19): siRNA sense strand
uggagacgauggaucauua

SEQ ID NO: 711051 - RNA, 19 nt, Homo sapiens
  misc_RNA (1)...(19): siRNA sense strand
cgacggaucucuuuacaag

SEQ ID NO: 711052 - RNA, 19 nt, Homo sapiens
  misc_RNA (1)...(19): siRNA sense strand
gagcagauguggucaaacu

SEQ ID NO: 711053 - RNA, 19 nt, Homo sapiens
  misc_RNA (1)...(19): siRNA sense strand
gaucaaggacaagaaguua

SEQ ID NO: 711054 - RNA, 19 nt, Homo sapiens
  misc_RNA (1)...(19): siRNA sense strand
gagaagaugaucaguggua

SEQ ID NO: 711055 - RNA, 19 nt, Homo sapiens
  misc_RNA (1)...(19): siRNA sense strand
aaacaaagguaugagaaga

SEQ ID NO: 711056 - RNA, 19 nt, Homo sapiens
  misc_RNA (1)...(19): siRNA sense strand
gcacauugaucugguggaa

SEQ ID NO: 711057 - RNA, 19 nt, Homo sapiens
  misc_RNA (1)...(19): siRNA sense strand
aaaggaagaucaaggacaa

SEQ ID NO: 711058 - RNA, 19 nt, Homo sapiens
  misc_RNA (1)...(19): siRNA sense strand
gaacugaggcacauugauc

SEQ ID NO: 711059 - RNA, 19 nt, Homo sapiens
  misc_RNA (1)...(19): siRNA sense strand
gaagagcuguuugaucaca

SEQ ID NO: 711060 - RNA, 19 nt, Homo sapiens
  misc_RNA (1)...(19): siRNA sense strand
ggaaacaaagguaugagaa

SEQ ID NO: 711061 - RNA, 19 nt, Homo sapiens
  misc_RNA (1)...(19): siRNA sense strand
ggacaaagcgauuuaaagc

SEQ ID NO: 711062 - RNA, 19 nt, Homo sapiens
  misc_RNA (1)...(19): siRNA sense strand
ggaagcagacgcacaacaa

SEQ ID NO: 711063 - RNA, 19 nt, Homo sapiens
  misc_RNA (1)...(19): siRNA sense strand
gaagacauccggacagagu

SEQ ID NO: 711064 - RNA, 19 nt, Homo sapiens
  misc_RNA (1)...(19): siRNA sense strand
caucguagcuguggugaau

SEQ ID NO: 711065 - RNA, 19 nt, Homo sapiens
  misc_RNA (1)...(19): siRNA sense strand
ggacuggaccgucugaaug

SEQ ID NO: 711066 - RNA, 19 nt, Homo sapiens
  misc_RNA (1)...(19): siRNA sense strand
gaucuacgccauuccuauu

SEQ ID NO: 711067 - RNA, 19 nt, Homo sapiens
  misc_RNA (1)...(19): siRNA sense strand
gaugaucagugguauguac

SEQ ID NO: 711068 - RNA, 19 nt, Homo sapiens
  misc_RNA (1)...(19): siRNA sense strand
gacgauggaucauuagaag

SEQ ID NO: 711069 - RNA, 19 nt, Homo sapiens
  misc_RNA (1)...(19): siRNA sense strand
gcacagaggcaagcagcua

SEQ ID NO: 711070 - RNA, 19 nt, Homo sapiens
  misc_RNA (1)...(19): siRNA sense strand
cugcaucucugacuucuug

SEQ ID NO: 711071 - RNA, 19 nt, Homo sapiens
  misc_RNA (1)...(19): siRNA sense strand
gaguggagccguccgauga

SEQ ID NO: 711072 - RNA, 19 nt, Homo sapiens
  misc_RNA (1)...(19): siRNA sense strand
gaaacucucauagauauca

SEQ ID NO: 711073 - RNA, 19 nt, Homo sapiens
  misc_RNA (1)...(19): siRNA sense strand
caccaaugcuugcuacaug

SEQ ID NO: 711074 - RNA, 19 nt, Homo sapiens
  misc_RNA (1)...(19): siRNA sense strand
gaaaauccguagugggaaa

SEQ ID NO: 711075 - RNA, 19 nt, Homo sapiens
  misc_RNA (1)...(19): siRNA sense strand
uggcugcgguuguggauaa

SEQ ID NO: 711076 - RNA, 19 nt, Homo sapiens
  misc_RNA (1)...(19): siRNA sense strand
gggcuucacguucucauuu

SEQ ID NO: 711077 - RNA, 19 nt, Homo sapiens
  misc_RNA (1)...(19): siRNA sense strand
gagguuggacucauuguug

SEQ ID NO: 711078 - RNA, 19 nt, Homo sapiens
  misc_RNA (1)...(19): siRNA sense strand
gagcagcaccggcagauag

SEQ ID NO: 711079 - RNA, 19 nt, Homo sapiens
  misc_RNA (1)...(19): siRNA sense strand
gauaagauccgcgagaaca

SEQ ID NO: 711080 - RNA, 19 nt, Homo sapiens
  misc_RNA (1)...(19): siRNA sense strand
gaaaucguccgcaacaucu

SEQ ID NO: 711081 - RNA, 19 nt, Homo sapiens
  misc_RNA (1)...(19): siRNA sense strand
gaggagacccuggcucauu

SEQ ID NO: 711082 - RNA, 19 nt, Homo sapiens
  misc_RNA (1)...(19): siRNA sense strand
ggucaaacugcuuaacaaa

SEQ ID NO: 711083 - RNA, 19 nt, Homo sapiens
  misc_RNA (1)...(19): siRNA sense strand
ccaaguuucucucucagau

SEQ ID NO: 711084 - RNA, 19 nt, Homo sapiens
  misc_RNA (1)...(19): siRNA sense strand
guauguaccugggugaaau

SEQ ID NO: 711085 - RNA, 19 nt, Homo sapiens
  misc_RNA (1)...(19): siRNA sense strand
gaaacaaagguaugagaag

SEQ ID NO: 711086 - RNA, 19 nt, Homo sapiens
  misc_RNA (1)...(19): siRNA sense strand
gaccgagaauggugacuuc

SEQ ID NO: 711087 - RNA, 19 nt, Homo sapiens
  misc_RNA (1)...(19): siRNA sense strand
gauguggucaaacugcuua

SEQ ID NO: 711088 - RNA, 19 nt, Homo sapiens
  misc_RNA (1)...(19): siRNA sense strand
ccaugcggcucuccgauga

SEQ ID NO: 711089 - RNA, 19 nt, Homo sapiens
  misc_RNA (1)...(19): siRNA sense strand
caacaagaucuacgccauu

SEQ ID NO: 711090 - RNA, 19 nt, Homo sapiens
  misc_RNA (1)...(19): siRNA sense strand
ggagagcugguucgacuga

SEQ ID NO: 711091 - RNA, 19 nt, Homo sapiens
  misc_RNA (1)...(19): siRNA sense strand
uuaaucgacuucaccaaga

SEQ ID NO: 711092 - RNA, 19 nt, Homo sapiens
  misc_RNA (1)...(19): siRNA sense strand
gaaaugcacaacaagaucu

SEQ ID NO: 711093 - RNA, 19 nt, Homo sapiens
  misc_RNA (1)...(19): siRNA sense strand
ggaaaugcacaacaagauc

SEQ ID NO: 711094 - RNA, 19 nt, Homo sapiens
  misc_RNA (1)...(19): siRNA sense strand
aggagacccuggcucauuu

SEQ ID NO: 711095 - RNA, 19 nt, Homo sapiens
  misc_RNA (1)...(19): siRNA sense strand
gaagaucaaggacaagaag

SEQ ID NO: 711096 - RNA, 19 nt, Homo sapiens
  misc_RNA (1)...(19): siRNA sense strand
agaccaaguuucucucuca

SEQ ID NO: 711097 - RNA, 19 nt, Homo sapiens
  misc_RNA (1)...(19): siRNA sense strand
ccacaaugccaaagaaauc

SEQ ID NO: 711098 - RNA, 19 nt, Homo sapiens
  misc_RNA (1)...(19): siRNA sense strand
uaaggaaggccuccacaau

SEQ ID NO: 711099 - RNA, 19 nt, Homo sapiens
  misc_RNA (1)...(19): siRNA sense strand
uagaagacauccggacaga

SEQ ID NO: 711100 - RNA, 19 nt, Homo sapiens
  misc_RNA (1)...(19): siRNA sense strand
cagcagcuaggucugaaua

SEQ ID NO: 711101 - RNA, 19 nt, Homo sapiens
  misc_RNA (1)...(19): siRNA sense strand
gggugcaagugaaucauga

SEQ ID NO: 711102 - RNA, 19 nt, Homo sapiens
  misc_RNA (1)...(19): siRNA sense strand
uaaucgacuucaccaagaa

SEQ ID NO: 711103 - RNA, 19 nt, Homo sapiens
  misc_RNA (1)...(19): siRNA sense strand
acaaagguaugagaagaug

SEQ ID NO: 711104 - RNA, 19 nt, Homo sapiens
  misc_RNA (1)...(19): siRNA sense strand
ccuaaaugcugggaaacaa

SEQ ID NO: 711105 - RNA, 19 nt, Homo sapiens
  misc_RNA (1)...(19): siRNA sense strand
acaagacgcacccacagua

SEQ ID NO: 711106 - RNA, 19 nt, Homo sapiens
  misc_RNA (1)...(19): siRNA sense strand
ucaggaaggagaugaagaa

SEQ ID NO: 711107 - RNA, 19 nt, Homo sapiens
  misc_RNA (1)...(19): siRNA sense strand
ugaagaacguggagauggu

SEQ ID NO: 711108 - RNA, 19 nt, Homo sapiens
  misc_RNA (1)...(19): siRNA sense strand
acaaugccgugguuaagau

SEQ ID NO: 711109 - RNA, 19 nt, Homo sapiens
  misc_RNA (1)...(19): siRNA sense strand
ggaaguuuaacaccaguga

SEQ ID NO: 711110 - RNA, 19 nt, Homo sapiens
  misc_RNA (1)...(19): siRNA sense strand
ggaagaucaaggacaagaa

SEQ ID NO: 711111 - RNA, 19 nt, Homo sapiens
  misc_RNA (1)...(19): siRNA sense strand
gaagcagacgcacaacaau

SEQ ID NO: 711112 - RNA, 19 nt, Homo sapiens
  misc_RNA (1)...(19): siRNA sense strand
caucggcacuggcaccaau

SEQ ID NO: 711113 - RNA, 19 nt, Homo sapiens
  misc_RNA (1)...(19): siRNA sense strand
gauggucaguggcauguac

SEQ ID NO: 711114 - RNA, 19 nt, Homo sapiens
  misc_RNA (1)...(19): siRNA sense strand
gacaguauccucgucaaga

SEQ ID NO: 711115 - RNA, 19 nt, Homo sapiens
  misc_RNA (1)...(19): siRNA sense strand
aaagagaacgguggaaaug

SEQ ID NO: 711116 - RNA, 19 nt, Homo sapiens
  misc_RNA (1)...(19): siRNA sense strand
caacagccacagucaagau

SEQ ID NO: 711117 - RNA, 19 nt, Homo sapiens
  misc_RNA (1)...(19): siRNA sense strand
ucucugacuucuuggacua

SEQ ID NO: 711118 - RNA, 19 nt, Homo sapiens
  misc_RNA (1)...(19): siRNA sense strand
uuaagaugcugcccuccuu

SEQ ID NO: 711119 - RNA, 19 nt, Homo sapiens
  misc_RNA (1)...(19): siRNA sense strand
cagcacguuugcaccauug

SEQ ID NO: 711120 - RNA, 19 nt, Homo sapiens
  misc_RNA (1)...(19): siRNA sense strand
gaugauaucaggacacacu

SEQ ID NO: 711121 - RNA, 19 nt, Homo sapiens
  misc_RNA (1)...(19): siRNA sense strand
ggacgggacacucuacaag

SEQ ID NO: 711122 - RNA, 19 nt, Homo sapiens
  misc_RNA (1)...(19): siRNA sense strand
gaggaacugaggcacauug

SEQ ID NO: 711123 - RNA, 19 nt, Homo sapiens
  misc_RNA (1)...(19): siRNA sense strand
gaagaugaucagugguaug

SEQ ID NO: 711124 - RNA, 19 nt, Homo sapiens
  misc_RNA (1)...(19): siRNA sense strand
gggaaacaaagguaugaga

SEQ ID NO: 711125 - RNA, 19 nt, Homo sapiens
  misc_RNA (1)...(19): siRNA sense strand
caugaugaccugugcuuau

SEQ ID NO: 711126 - RNA, 19 nt, Homo sapiens
  misc_RNA (1)...(19): siRNA sense strand
agagaacgguggaaaugca

SEQ ID NO: 711127 - RNA, 19 nt, Homo sapiens
  misc_RNA (1)...(19): siRNA sense strand
ugaaccgccugcgugauaa

SEQ ID NO: 711128 - RNA, 19 nt, Homo sapiens
  misc_RNA (1)...(19): siRNA sense strand
ugggagauuucauggagaa

SEQ ID NO: 711129 - RNA, 19 nt, Homo sapiens
  misc_RNA (1)...(19): siRNA sense strand
ggugaaaucguccgcaaca

SEQ ID NO: 711130 - RNA, 19 nt, Homo sapiens
  misc_RNA (1)...(19): siRNA sense strand
caacgggugucuggaugau

SEQ ID NO: 711131 - RNA, 19 nt, Homo sapiens
  misc_RNA (1)...(19): siRNA sense strand
ucacauggaguccgagguu

SEQ ID NO: 711132 - RNA, 19 nt, Homo sapiens
  misc_RNA (1)...(19): siRNA sense strand
ucacguggacaaaggguuu

SEQ ID NO: 711133 - RNA, 19 nt, Homo sapiens
  misc_RNA (1)...(19): siRNA sense strand
caacaaugccgugguuaag

SEQ ID NO: 711134 - RNA, 19 nt, Homo sapiens
  misc_RNA (1)...(19): siRNA sense strand
ucguagcuguggugaauga

SEQ ID NO: 711135 - RNA, 19 nt, Homo sapiens
  misc_RNA (1)...(19): siRNA sense strand
cacauugucuccugcaucu

SEQ ID NO: 711136 - RNA, 19 nt, Homo sapiens
  misc_RNA (1)...(19): siRNA sense strand
cagccacagucaagauguu

SEQ ID NO: 711137 - RNA, 19 nt, Homo sapiens
  misc_RNA (1)...(19): siRNA sense strand
caagacgcacccacaguau

SEQ ID NO: 711138 - RNA, 19 nt, Homo sapiens
  misc_RNA (1)...(19): siRNA sense strand
ccagcacguuugcaccauu

SEQ ID NO: 711139 - RNA, 19 nt, Homo sapiens
  misc_RNA (1)...(19): siRNA sense strand
ccuccacaaugccaaagaa

SEQ ID NO: 711140 - RNA, 19 nt, Homo sapiens
  misc_RNA (1)...(19): siRNA sense strand
caugaugaccuguggcuau

SEQ ID NO: 711141 - RNA, 19 nt, Homo sapiens
  misc_RNA (1)...(19): siRNA sense strand
caagcuucauccacacuuc

SEQ ID NO: 711142 - RNA, 19 nt, Homo sapiens
  misc_RNA (1)...(19): siRNA sense strand
gaacugucaccaaaaugua

SEQ ID NO: 711143 - RNA, 19 nt, Homo sapiens
  misc_RNA (1)...(19): siRNA sense strand
gggaagagcuguuugauca

SEQ ID NO: 711144 - RNA, 19 nt, Homo sapiens
  misc_RNA (1)...(19): siRNA sense strand
ggaaggagaugaagaaugg

SEQ ID NO: 711145 - RNA, 19 nt, Homo sapiens
  misc_RNA (1)...(19): siRNA sense strand
gcaagugaaucaugagaaa

SEQ ID NO: 711146 - RNA, 19 nt, Homo sapiens
  misc_RNA (1)...(19): siRNA sense strand
gggaggauguguaucaaua

SEQ ID NO: 711147 - RNA, 19 nt, Homo sapiens
  misc_RNA (1)...(19): siRNA sense strand
gaaguuaccugugggauuc

SEQ ID NO: 711148 - RNA, 19 nt, Homo sapiens
  misc_RNA (1)...(19): siRNA sense strand
gcacaacaaugccgugguu

SEQ ID NO: 711149 - RNA, 19 nt, Homo sapiens
  misc_RNA (1)...(19): siRNA sense strand
ugaaggaacugucaccaaa

SEQ ID NO: 711150 - RNA, 19 nt, Homo sapiens
  misc_RNA (1)...(19): siRNA sense strand
uggagacgauggaucauua

SEQ ID NO: 711151 - RNA, 19 nt, Homo sapiens
  misc_RNA (1)...(19): siRNA sense strand
cgacggaucucuuuacaag

SEQ ID NO: 711152 - RNA, 19 nt, Homo sapiens
  misc_RNA (1)...(19): siRNA sense strand
gagcagauguggucaaacu

SEQ ID NO: 711153 - RNA, 19 nt, Homo sapiens
  misc_RNA (1)...(19): siRNA sense strand
gaucaaggacaagaaguua

SEQ ID NO: 711154 - RNA, 19 nt, Homo sapiens
  misc_RNA (1)...(19): siRNA sense strand
gagaagaugaucaguggua

SEQ ID NO: 711155 - RNA, 19 nt, Homo sapiens
  misc_RNA (1)...(19): siRNA sense strand
aaacaaagguaugagaaga

SEQ ID NO: 711156 - RNA, 19 nt, Homo sapiens
  misc_RNA (1)...(19): siRNA sense strand
gcacauugaucugguggaa

SEQ ID NO: 711157 - RNA, 19 nt, Homo sapiens
  misc_RNA (1)...(19): siRNA sense strand
aaaggaagaucaaggacaa

SEQ ID NO: 711158 - RNA, 19 nt, Homo sapiens
  misc_RNA (1)...(19): siRNA sense strand
gaacugaggcacauugauc

SEQ ID NO: 711159 - RNA, 19 nt, Homo sapiens
  misc_RNA (1)...(19): siRNA sense strand
gaagagcuguuugaucaca

SEQ ID NO: 711160 - RNA, 19 nt, Homo sapiens
  misc_RNA (1)...(19): siRNA sense strand
ggaaacaaagguaugagaa

SEQ ID NO: 711161 - RNA, 19 nt, Homo sapiens
  misc_RNA (1)...(19): siRNA sense strand
ggacaaagcgauuuaaagc

SEQ ID NO: 711162 - RNA, 19 nt, Homo sapiens
  misc_RNA (1)...(19): siRNA sense strand
ggaagcagacgcacaacaa

SEQ ID NO: 711163 - RNA, 19 nt, Homo sapiens
  misc_RNA (1)...(19): siRNA sense strand
gaagacauccggacagagu

SEQ ID NO: 711164 - RNA, 19 nt, Homo sapiens
  misc_RNA (1)...(19): siRNA sense strand
caucguagcuguggugaau

SEQ ID NO: 711165 - RNA, 19 nt, Homo sapiens
  misc_RNA (1)...(19): siRNA sense strand
ggacuggaccgucugaaug

SEQ ID NO: 711166 - RNA, 19 nt, Homo sapiens
  misc_RNA (1)...(19): siRNA sense strand
gaucuacgccauuccuauu

SEQ ID NO: 711167 - RNA, 19 nt, Homo sapiens
  misc_RNA (1)...(19): siRNA sense strand
gaugaucagugguauguac

SEQ ID NO: 711168 - RNA, 19 nt, Homo sapiens
  misc_RNA (1)...(19): siRNA sense strand
gacgauggaucauuagaag

SEQ ID NO: 711169 - RNA, 19 nt, Homo sapiens
  misc_RNA (1)...(19): siRNA sense strand
gcacagaggcaagcagcua

SEQ ID NO: 711170 - RNA, 19 nt, Homo sapiens
  misc_RNA (1)...(19): siRNA sense strand
cugcaucucugacuucuug

SEQ ID NO: 711171 - RNA, 19 nt, Homo sapiens
  misc_RNA (1)...(19): siRNA sense strand
gaguggagccguccgauga

SEQ ID NO: 711172 - RNA, 19 nt, Homo sapiens
  misc_RNA (1)...(19): siRNA sense strand
gaaacucucauagauauca

SEQ ID NO: 711173 - RNA, 19 nt, Homo sapiens
  misc_RNA (1)...(19): siRNA sense strand
caccaaugcuugcuacaug

SEQ ID NO: 711174 - RNA, 19 nt, Homo sapiens
  misc_RNA (1)...(19): siRNA sense strand
gaaaauccguagugggaaa

SEQ ID NO: 711175 - RNA, 19 nt, Homo sapiens
  misc_RNA (1)...(19): siRNA sense strand
uggcugcgguuguggauaa

SEQ ID NO: 711176 - RNA, 19 nt, Homo sapiens
  misc_RNA (1)...(19): siRNA sense strand
gggcuucacguucucauuu

SEQ ID NO: 711177 - RNA, 19 nt, Homo sapiens
  misc_RNA (1)...(19): siRNA sense strand
gagguuggacucauuguug

SEQ ID NO: 711178 - RNA, 19 nt, Homo sapiens
  misc_RNA (1)...(19): siRNA sense strand
gagcagcaccggcagauag

SEQ ID NO: 711179 - RNA, 19 nt, Homo sapiens
  misc_RNA (1)...(19): siRNA sense strand
gauaagauccgcgagaaca

SEQ ID NO: 711180 - RNA, 19 nt, Homo sapiens
  misc_RNA (1)...(19): siRNA sense strand
gaaaucguccgcaacaucu

SEQ ID NO: 711181 - RNA, 19 nt, Homo sapiens
  misc_RNA (1)...(19): siRNA sense strand
gaggagacccuggcucauu

SEQ ID NO: 711182 - RNA, 19 nt, Homo sapiens
  misc_RNA (1)...(19): siRNA sense strand
ggucaaacugcuuaacaaa

SEQ ID NO: 711183 - RNA, 19 nt, Homo sapiens
  misc_RNA (1)...(19): siRNA sense strand
ccaaguuucucucucagau

SEQ ID NO: 711184 - RNA, 19 nt, Homo sapiens
  misc_RNA (1)...(19): siRNA sense strand
guauguaccugggugaaau

SEQ ID NO: 711185 - RNA, 19 nt, Homo sapiens
  misc_RNA (1)...(19): siRNA sense strand
gaaacaaagguaugagaag

SEQ ID NO: 711186 - RNA, 19 nt, Homo sapiens
  misc_RNA (1)...(19): siRNA sense strand
gaccgagaauggugacuuc

SEQ ID NO: 711187 - RNA, 19 nt, Homo sapiens
  misc_RNA (1)...(19): siRNA sense strand
gauguggucaaacugcuua

SEQ ID NO: 711188 - RNA, 19 nt, Homo sapiens
  misc_RNA (1)...(19): siRNA sense strand
ccaugcggcucuccgauga

SEQ ID NO: 711189 - RNA, 19 nt, Homo sapiens
  misc_RNA (1)...(19): siRNA sense strand
caacaagaucuacgccauu

SEQ ID NO: 711190 - RNA, 19 nt, Homo sapiens
  misc_RNA (1)...(19): siRNA sense strand
ggagagcugguucgacuga

SEQ ID NO: 711191 - RNA, 19 nt, Homo sapiens
  misc_RNA (1)...(19): siRNA sense strand
uuaaucgacuucaccaaga

SEQ ID NO: 711192 - RNA, 19 nt, Homo sapiens
  misc_RNA (1)...(19): siRNA sense strand
gaaaugcacaacaagaucu

SEQ ID NO: 711193 - RNA, 19 nt, Homo sapiens
  misc_RNA (1)...(19): siRNA sense strand
ggaaaugcacaacaagauc

SEQ ID NO: 711194 - RNA, 19 nt, Homo sapiens
  misc_RNA (1)...(19): siRNA sense strand
aggagacccuggcucauuu

SEQ ID NO: 711195 - RNA, 19 nt, Homo sapiens
  misc_RNA (1)...(19): siRNA sense strand
gaagaucaaggacaagaag

SEQ ID NO: 711196 - RNA, 19 nt, Homo sapiens
  misc_RNA (1)...(19): siRNA sense strand
agaccaaguuucucucuca

SEQ ID NO: 711197 - RNA, 19 nt, Homo sapiens
  misc_RNA (1)...(19): siRNA sense strand
ccacaaugccaaagaaauc

SEQ ID NO: 711198 - RNA, 19 nt, Homo sapiens
  misc_RNA (1)...(19): siRNA sense strand
uaaggaaggccuccacaau

SEQ ID NO: 711199 - RNA, 19 nt, Homo sapiens
  misc_RNA (1)...(19): siRNA sense strand
uagaagacauccggacaga

SEQ ID NO: 711200 - RNA, 19 nt, Homo sapiens
  misc_RNA (1)...(19): siRNA sense strand
cagcagcuaggucugaaua

SEQ ID NO: 711201 - RNA, 19 nt, Homo sapiens
  misc_RNA (1)...(19): siRNA sense strand
gggugcaagugaaucauga

SEQ ID NO: 711202 - RNA, 19 nt, Homo sapiens
  misc_RNA (1)...(19): siRNA sense strand
uaaucgacuucaccaagaa

SEQ ID NO: 711203 - RNA, 19 nt, Homo sapiens
  misc_RNA (1)...(19): siRNA sense strand
acaaagguaugagaagaug

SEQ ID NO: 711204 - RNA, 19 nt, Homo sapiens
  misc_RNA (1)...(19): siRNA sense strand
ccuaaaugcugggaaacaa

SEQ ID NO: 711205 - RNA, 19 nt, Homo sapiens
  misc_RNA (1)...(19): siRNA sense strand
acaagacgcacccacagua

SEQ ID NO: 711206 - RNA, 19 nt, Homo sapiens
  misc_RNA (1)...(19): siRNA sense strand
ucaggaaggagaugaagaa

SEQ ID NO: 711207 - RNA, 19 nt, Homo sapiens
  misc_RNA (1)...(19): siRNA sense strand
ugaagaacguggagauggu

SEQ ID NO: 711208 - RNA, 19 nt, Homo sapiens
  misc_RNA (1)...(19): siRNA sense strand
acaaugccgugguuaagau

SEQ ID NO: 711209 - RNA, 19 nt, Homo sapiens
  misc_RNA (1)...(19): siRNA sense strand
ggaaguuuaacaccaguga

SEQ ID NO: 711210 - RNA, 19 nt, Homo sapiens
  misc_RNA (1)...(19): siRNA sense strand
ggaagaucaaggacaagaa

SEQ ID NO: 711211 - RNA, 19 nt, Homo sapiens
  misc_RNA (1)...(19): siRNA sense strand
gaagcagacgcacaacaau

SEQ ID NO: 711212 - RNA, 19 nt, Homo sapiens
  misc_RNA (1)...(19): siRNA sense strand
caucggcacuggcaccaau

SEQ ID NO: 711213 - RNA, 19 nt, Homo sapiens
  misc_RNA (1)...(19): siRNA sense strand
gauggucaguggcauguac

SEQ ID NO: 711214 - RNA, 19 nt, Homo sapiens
  misc_RNA (1)...(19): siRNA sense strand
gacaguauccucgucaaga

SEQ ID NO: 711215 - RNA, 19 nt, Homo sapiens
  misc_RNA (1)...(19): siRNA sense strand
aaagagaacgguggaaaug

SEQ ID NO: 711216 - RNA, 19 nt, Homo sapiens
  misc_RNA (1)...(19): siRNA sense strand
caacagccacagucaagau

SEQ ID NO: 711217 - RNA, 19 nt, Homo sapiens
  misc_RNA (1)...(19): siRNA sense strand
ucucugacuucuuggacua

SEQ ID NO: 711218 - RNA, 19 nt, Homo sapiens
  misc_RNA (1)...(19): siRNA sense strand
uuaagaugcugcccuccuu

SEQ ID NO: 711219 - RNA, 19 nt, Homo sapiens
  misc_RNA (1)...(19): siRNA sense strand
cagcacguuugcaccauug

SEQ ID NO: 711220 - RNA, 19 nt, Homo sapiens
  misc_RNA (1)...(19): siRNA sense strand
gaugauaucaggacacacu

SEQ ID NO: 711221 - RNA, 19 nt, Homo sapiens
  misc_RNA (1)...(19): siRNA sense strand
ggacgggacacucuacaag

SEQ ID NO: 711222 - RNA, 19 nt, Homo sapiens
  misc_RNA (1)...(19): siRNA sense strand
gaggaacugaggcacauug

SEQ ID NO: 711223 - RNA, 19 nt, Homo sapiens
  misc_RNA (1)...(19): siRNA sense strand
gaagaugaucagugguaug

SEQ ID NO: 711224 - RNA, 19 nt, Homo sapiens
  misc_RNA (1)...(19): siRNA sense strand
gggaaacaaagguaugaga

SEQ ID NO: 711225 - RNA, 19 nt, Homo sapiens
  misc_RNA (1)...(19): siRNA sense strand
caugaugaccugugcuuau

SEQ ID NO: 711226 - RNA, 19 nt, Homo sapiens
  misc_RNA (1)...(19): siRNA sense strand
agagaacgguggaaaugca

SEQ ID NO: 711227 - RNA, 19 nt, Homo sapiens
  misc_RNA (1)...(19): siRNA sense strand
ugaaccgccugcgugauaa

SEQ ID NO: 711228 - RNA, 19 nt, Homo sapiens
  misc_RNA (1)...(19): siRNA sense strand
ugggagauuucauggagaa

SEQ ID NO: 711229 - RNA, 19 nt, Homo sapiens
  misc_RNA (1)...(19): siRNA sense strand
ggugaaaucguccgcaaca

SEQ ID NO: 711230 - RNA, 19 nt, Homo sapiens
  misc_RNA (1)...(19): siRNA sense strand
caacgggugucuggaugau

SEQ ID NO: 711231 - RNA, 19 nt, Homo sapiens
  misc_RNA (1)...(19): siRNA sense strand
ucacauggaguccgagguu

SEQ ID NO: 711232 - RNA, 19 nt, Homo sapiens
  misc_RNA (1)...(19): siRNA sense strand
ucacguggacaaaggguuu

SEQ ID NO: 711233 - RNA, 19 nt, Homo sapiens
  misc_RNA (1)...(19): siRNA sense strand
caacaaugccgugguuaag

SEQ ID NO: 711234 - RNA, 19 nt, Homo sapiens
  misc_RNA (1)...(19): siRNA sense strand
ucguagcuguggugaauga

SEQ ID NO: 711235 - RNA, 19 nt, Homo sapiens
  misc_RNA (1)...(19): siRNA sense strand
cacauugucuccugcaucu

SEQ ID NO: 711236 - RNA, 19 nt, Homo sapiens
  misc_RNA (1)...(19): siRNA sense strand
cagccacagucaagauguu

SEQ ID NO: 711237 - RNA, 19 nt, Homo sapiens
  misc_RNA (1)...(19): siRNA sense strand
caagacgcacccacaguau

SEQ ID NO: 711238 - RNA, 19 nt, Homo sapiens
  misc_RNA (1)...(19): siRNA sense strand
ccagcacguuugcaccauu

SEQ ID NO: 711239 - RNA, 19 nt, Homo sapiens
  misc_RNA (1)...(19): siRNA sense strand
ccuccacaaugccaaagaa

SEQ ID NO: 711240 - RNA, 19 nt, Homo sapiens
  misc_RNA (1)...(19): siRNA sense strand
caugaugaccuguggcuau

SEQ ID NO: 711241 - RNA, 19 nt, Homo sapiens
  misc_RNA (1)...(19): siRNA sense strand
caagcuucauccacacuuc

SEQ ID NO: 711242 - RNA, 19 nt, Homo sapiens
  misc_RNA (1)...(19): siRNA sense strand
gaacugucaccaaaaugua

SEQ ID NO: 711243 - RNA, 19 nt, Homo sapiens
  misc_RNA (1)...(19): siRNA sense strand
gggaagagcuguuugauca

SEQ ID NO: 711244 - RNA, 19 nt, Homo sapiens
  misc_RNA (1)...(19): siRNA sense strand
ggaaggagaugaagaaugg

SEQ ID NO: 711245 - RNA, 19 nt, Homo sapiens
  misc_RNA (1)...(19): siRNA sense strand
gcaagugaaucaugagaaa

SEQ ID NO: 711246 - RNA, 19 nt, Homo sapiens
  misc_RNA (1)...(19): siRNA sense strand
gggaggauguguaucaaua

SEQ ID NO: 711247 - RNA, 19 nt, Homo sapiens
  misc_RNA (1)...(19): siRNA sense strand
gaaguuaccugugggauuc

SEQ ID NO: 711248 - RNA, 19 nt, Homo sapiens
  misc_RNA (1)...(19): siRNA sense strand
gcacaacaaugccgugguu

SEQ ID NO: 711249 - RNA, 19 nt, Homo sapiens
  misc_RNA (1)...(19): siRNA sense strand
ugaaggaacugucaccaaa

SEQ ID NO: 711250 - RNA, 19 nt, Homo sapiens
  misc_RNA (1)...(19): siRNA sense strand
uggagacgauggaucauua

SEQ ID NO: 711251 - RNA, 19 nt, Homo sapiens
  misc_RNA (1)...(19): siRNA sense strand
cgacggaucucuuuacaag

SEQ ID NO: 711252 - RNA, 19 nt, Homo sapiens
  misc_RNA (1)...(19): siRNA sense strand
gagcagauguggucaaacu

SEQ ID NO: 711253 - RNA, 19 nt, Homo sapiens
  misc_RNA (1)...(19): siRNA sense strand
gaucaaggacaagaaguua

SEQ ID NO: 711254 - RNA, 19 nt, Homo sapiens
  misc_RNA (1)...(19): siRNA sense strand
gagaagaugaucaguggua

SEQ ID NO: 711255 - RNA, 19 nt, Homo sapiens
  misc_RNA (1)...(19): siRNA sense strand
aaacaaagguaugagaaga

SEQ ID NO: 711256 - RNA, 19 nt, Homo sapiens
  misc_RNA (1)...(19): siRNA sense strand
gcacauugaucugguggaa

SEQ ID NO: 711257 - RNA, 19 nt, Homo sapiens
  misc_RNA (1)...(19): siRNA sense strand
aaaggaagaucaaggacaa

SEQ ID NO: 711258 - RNA, 19 nt, Homo sapiens
  misc_RNA (1)...(19): siRNA sense strand
gaacugaggcacauugauc

SEQ ID NO: 711259 - RNA, 19 nt, Homo sapiens
  misc_RNA (1)...(19): siRNA sense strand
gaagagcuguuugaucaca

SEQ ID NO: 711260 - RNA, 19 nt, Homo sapiens
  misc_RNA (1)...(19): siRNA sense strand
ggaaacaaagguaugagaa

SEQ ID NO: 711261 - RNA, 19 nt, Homo sapiens
  misc_RNA (1)...(19): siRNA sense strand
ggacaaagcgauuuaaagc

SEQ ID NO: 711262 - RNA, 19 nt, Homo sapiens
  misc_RNA (1)...(19): siRNA sense strand
ggaagcagacgcacaacaa

SEQ ID NO: 711263 - RNA, 19 nt, Homo sapiens
  misc_RNA (1)...(19): siRNA sense strand
gaagacauccggacagagu

SEQ ID NO: 711264 - RNA, 19 nt, Homo sapiens
  misc_RNA (1)...(19): siRNA sense strand
caucguagcuguggugaau

SEQ ID NO: 711265 - RNA, 19 nt, Homo sapiens
  misc_RNA (1)...(19): siRNA sense strand
ggacuggaccgucugaaug

SEQ ID NO: 711266 - RNA, 19 nt, Homo sapiens
  misc_RNA (1)...(19): siRNA sense strand
gaucuacgccauuccuauu

SEQ ID NO: 711267 - RNA, 19 nt, Homo sapiens
  misc_RNA (1)...(19): siRNA sense strand
gaugaucagugguauguac

SEQ ID NO: 711268 - RNA, 19 nt, Homo sapiens
  misc_RNA (1)...(19): siRNA sense strand
gacgauggaucauuagaag

SEQ ID NO: 711269 - RNA, 19 nt, Homo sapiens
  misc_RNA (1)...(19): siRNA sense strand
gcacagaggcaagcagcua

SEQ ID NO: 711270 - RNA, 19 nt, Homo sapiens
  misc_RNA (1)...(19): siRNA sense strand
cugcaucucugacuucuug

SEQ ID NO: 711271 - RNA, 19 nt, Homo sapiens
  misc_RNA (1)...(19): siRNA sense strand
gaguggagccguccgauga

SEQ ID NO: 711272 - RNA, 19 nt, Homo sapiens
  misc_RNA (1)...(19): siRNA sense strand
gaaacucucauagauauca

SEQ ID NO: 711273 - RNA, 19 nt, Homo sapiens
  misc_RNA (1)...(19): siRNA sense strand
caccaaugcuugcuacaug

SEQ ID NO: 711274 - RNA, 19 nt, Homo sapiens
  misc_RNA (1)...(19): siRNA sense strand
gaaaauccguagugggaaa

SEQ ID NO: 711275 - RNA, 19 nt, Homo sapiens
  misc_RNA (1)...(19): siRNA sense strand
uggcugcgguuguggauaa

SEQ ID NO: 711276 - RNA, 19 nt, Homo sapiens
  misc_RNA (1)...(19): siRNA sense strand
gggcuucacguucucauuu

SEQ ID NO: 711277 - RNA, 19 nt, Homo sapiens
  misc_RNA (1)...(19): siRNA sense strand
gagguuggacucauuguug

SEQ ID NO: 711278 - RNA, 19 nt, Homo sapiens
  misc_RNA (1)...(19): siRNA sense strand
gagcagcaccggcagauag

SEQ ID NO: 711279 - RNA, 19 nt, Homo sapiens
  misc_RNA (1)...(19): siRNA sense strand
gauaagauccgcgagaaca

SEQ ID NO: 711280 - RNA, 19 nt, Homo sapiens
  misc_RNA (1)...(19): siRNA sense strand
gaaaucguccgcaacaucu

SEQ ID NO: 711281 - RNA, 19 nt, Homo sapiens
  misc_RNA (1)...(19): siRNA sense strand
gaggagacccuggcucauu

SEQ ID NO: 711282 - RNA, 19 nt, Homo sapiens
  misc_RNA (1)...(19): siRNA sense strand
ggucaaacugcuuaacaaa

SEQ ID NO: 711283 - RNA, 19 nt, Homo sapiens
  misc_RNA (1)...(19): siRNA sense strand
ccaaguuucucucucagau

SEQ ID NO: 711284 - RNA, 19 nt, Homo sapiens
  misc_RNA (1)...(19): siRNA sense strand
guauguaccugggugaaau

SEQ ID NO: 711285 - RNA, 19 nt, Homo sapiens
  misc_RNA (1)...(19): siRNA sense strand
gaaacaaagguaugagaag

SEQ ID NO: 711286 - RNA, 19 nt, Homo sapiens
  misc_RNA (1)...(19): siRNA sense strand
gaccgagaauggugacuuc

SEQ ID NO: 711287 - RNA, 19 nt, Homo sapiens
  misc_RNA (1)...(19): siRNA sense strand
gauguggucaaacugcuua

SEQ ID NO: 711288 - RNA, 19 nt, Homo sapiens
  misc_RNA (1)...(19): siRNA sense strand
ccaugcggcucuccgauga

SEQ ID NO: 711289 - RNA, 19 nt, Homo sapiens
  misc_RNA (1)...(19): siRNA sense strand
caacaagaucuacgccauu

SEQ ID NO: 711290 - RNA, 19 nt, Homo sapiens
  misc_RNA (1)...(19): siRNA sense strand
ggagagcugguucgacuga

SEQ ID NO: 711291 - RNA, 19 nt, Homo sapiens
  misc_RNA (1)...(19): siRNA sense strand
uuaaucgacuucaccaaga

SEQ ID NO: 711292 - RNA, 19 nt, Homo sapiens
  misc_RNA (1)...(19): siRNA sense strand
gaaaugcacaacaagaucu

SEQ ID NO: 711293 - RNA, 19 nt, Homo sapiens
  misc_RNA (1)...(19): siRNA sense strand
ggaaaugcacaacaagauc

SEQ ID NO: 711294 - RNA, 19 nt, Homo sapiens
  misc_RNA (1)...(19): siRNA sense strand
aggagacccuggcucauuu

SEQ ID NO: 711295 - RNA, 19 nt, Homo sapiens
  misc_RNA (1)...(19): siRNA sense strand
gaagaucaaggacaagaag

SEQ ID NO: 711296 - RNA, 19 nt, Homo sapiens
  misc_RNA (1)...(19): siRNA sense strand
agaccaaguuucucucuca

SEQ ID NO: 711297 - RNA, 19 nt, Homo sapiens
  misc_RNA (1)...(19): siRNA sense strand
ccacaaugccaaagaaauc

SEQ ID NO: 711298 - RNA, 19 nt, Homo sapiens
  misc_RNA (1)...(19): siRNA sense strand
uaaggaaggccuccacaau

SEQ ID NO: 711299 - RNA, 19 nt, Homo sapiens
  misc_RNA (1)...(19): siRNA sense strand
uagaagacauccggacaga

SEQ ID NO: 711300 - RNA, 19 nt, Homo sapiens
  misc_RNA (1)...(19): siRNA sense strand
cagcagcuaggucugaaua

SEQ ID NO: 711301 - RNA, 19 nt, Homo sapiens
  misc_RNA (1)...(19): siRNA sense strand
gggugcaagugaaucauga

SEQ ID NO: 711302 - RNA, 19 nt, Homo sapiens
  misc_RNA (1)...(19): siRNA sense strand
uaaucgacuucaccaagaa

SEQ ID NO: 711303 - RNA, 19 nt, Homo sapiens
  misc_RNA (1)...(19): siRNA sense strand
acaaagguaugagaagaug

SEQ ID NO: 711304 - RNA, 19 nt, Homo sapiens
  misc_RNA (1)...(19): siRNA sense strand
ccuaaaugcugggaaacaa

SEQ ID NO: 711305 - RNA, 19 nt, Homo sapiens
  misc_RNA (1)...(19): siRNA sense strand
acaagacgcacccacagua

SEQ ID NO: 711306 - RNA, 19 nt, Homo sapiens
  misc_RNA (1)...(19): siRNA sense strand
ucaggaaggagaugaagaa

SEQ ID NO: 711307 - RNA, 19 nt, Homo sapiens
  misc_RNA (1)...(19): siRNA sense strand
ugaagaacguggagauggu

SEQ ID NO: 711308 - RNA, 19 nt, Homo sapiens
  misc_RNA (1)...(19): siRNA sense strand
acaaugccgugguuaagau

SEQ ID NO: 711309 - RNA, 19 nt, Homo sapiens
  misc_RNA (1)...(19): siRNA sense strand
ggaaguuuaacaccaguga

SEQ ID NO: 711310 - RNA, 19 nt, Homo sapiens
  misc_RNA (1)...(19): siRNA sense strand
ggaagaucaaggacaagaa

SEQ ID NO: 711311 - RNA, 19 nt, Homo sapiens
  misc_RNA (1)...(19): siRNA sense strand
gaagcagacgcacaacaau

SEQ ID NO: 711312 - RNA, 19 nt, Homo sapiens
  misc_RNA (1)...(19): siRNA sense strand
caucggcacuggcaccaau

SEQ ID NO: 711313 - RNA, 19 nt, Homo sapiens
  misc_RNA (1)...(19): siRNA sense strand
gauggucaguggcauguac

SEQ ID NO: 711314 - RNA, 19 nt, Homo sapiens
  misc_RNA (1)...(19): siRNA sense strand
gacaguauccucgucaaga

SEQ ID NO: 711315 - RNA, 19 nt, Homo sapiens
  misc_RNA (1)...(19): siRNA sense strand
aaagagaacgguggaaaug

SEQ ID NO: 711316 - RNA, 19 nt, Homo sapiens
  misc_RNA (1)...(19): siRNA sense strand
caacagccacagucaagau

SEQ ID NO: 711317 - RNA, 19 nt, Homo sapiens
  misc_RNA (1)...(19): siRNA sense strand
ucucugacuucuuggacua

SEQ ID NO: 711318 - RNA, 19 nt, Homo sapiens
  misc_RNA (1)...(19): siRNA sense strand
uuaagaugcugcccuccuu

SEQ ID NO: 711319 - RNA, 19 nt, Homo sapiens
  misc_RNA (1)...(19): siRNA sense strand
cagcacguuugcaccauug

SEQ ID NO: 711320 - RNA, 19 nt, Homo sapiens
  misc_RNA (1)...(19): siRNA sense strand
gaugauaucaggacacacu

SEQ ID NO: 711321 - RNA, 19 nt, Homo sapiens
  misc_RNA (1)...(19): siRNA sense strand
ggacgggacacucuacaag

SEQ ID NO: 711322 - RNA, 19 nt, Homo sapiens
  misc_RNA (1)...(19): siRNA sense strand
gaggaacugaggcacauug

SEQ ID NO: 711323 - RNA, 19 nt, Homo sapiens
  misc_RNA (1)...(19): siRNA sense strand
gaagaugaucagugguaug

SEQ ID NO: 711324 - RNA, 19 nt, Homo sapiens
  misc_RNA (1)...(19): siRNA sense strand
gggaaacaaagguaugaga

SEQ ID NO: 711325 - RNA, 19 nt, Homo sapiens
  misc_RNA (1)...(19): siRNA sense strand
caugaugaccugugcuuau

SEQ ID NO: 711326 - RNA, 19 nt, Homo sapiens
  misc_RNA (1)...(19): siRNA sense strand
agagaacgguggaaaugca

SEQ ID NO: 711327 - RNA, 19 nt, Homo sapiens
  misc_RNA (1)...(19): siRNA sense strand
ugaaccgccugcgugauaa

SEQ ID NO: 711328 - RNA, 19 nt, Homo sapiens
  misc_RNA (1)...(19): siRNA sense strand
ugggagauuucauggagaa

SEQ ID NO: 711329 - RNA, 19 nt, Homo sapiens
  misc_RNA (1)...(19): siRNA sense strand
ggugaaaucguccgcaaca

SEQ ID NO: 711330 - RNA, 19 nt, Homo sapiens
  misc_RNA (1)...(19): siRNA sense strand
caacgggugucuggaugau

SEQ ID NO: 711331 - RNA, 19 nt, Homo sapiens
  misc_RNA (1)...(19): siRNA sense strand
ucacauggaguccgagguu

SEQ ID NO: 711332 - RNA, 19 nt, Homo sapiens
  misc_RNA (1)...(19): siRNA sense strand
ucacguggacaaaggguuu

SEQ ID NO: 711333 - RNA, 19 nt, Homo sapiens
  misc_RNA (1)...(19): siRNA sense strand
caacaaugccgugguuaag

SEQ ID NO: 711334 - RNA, 19 nt, Homo sapiens
  misc_RNA (1)...(19): siRNA sense strand
ucguagcuguggugaauga

SEQ ID NO: 711335 - RNA, 19 nt, Homo sapiens
  misc_RNA (1)...(19): siRNA sense strand
cacauugucuccugcaucu

SEQ ID NO: 711336 - RNA, 19 nt, Homo sapiens
  misc_RNA (1)...(19): siRNA sense strand
cagccacagucaagauguu

SEQ ID NO: 711337 - RNA, 19 nt, Homo sapiens
  misc_RNA (1)...(19): siRNA sense strand
caagacgcacccacaguau

SEQ ID NO: 711338 - RNA, 19 nt, Homo sapiens
  misc_RNA (1)...(19): siRNA sense strand
ccagcacguuugcaccauu

SEQ ID NO: 711339 - RNA, 19 nt, Homo sapiens
  misc_RNA (1)...(19): siRNA sense strand
ccuccacaaugccaaagaa

SEQ ID NO: 711340 - RNA, 19 nt, Homo sapiens
  misc_RNA (1)...(19): siRNA sense strand
caugaugaccuguggcuau

SEQ ID NO: 711341 - RNA, 19 nt, Homo sapiens
  misc_RNA (1)...(19): siRNA sense strand
caagcuucauccacacuuc

SEQ ID NO: 711342 - RNA, 19 nt, Homo sapiens
  misc_RNA (1)...(19): siRNA sense strand
gaacugucaccaaaaugua

SEQ ID NO: 711343 - RNA, 19 nt, Homo sapiens
  misc_RNA (1)...(19): siRNA sense strand
ucaaagagauucggaaauu

SEQ ID NO: 711344 - RNA, 19 nt, Homo sapiens
  misc_RNA (1)...(19): siRNA sense strand
caaagagauucggaaauuu

SEQ ID NO: 711345 - RNA, 19 nt, Homo sapiens
  misc_RNA (1)...(19): siRNA sense strand
gaauaaggaaugugccaua

SEQ ID NO: 711346 - RNA, 19 nt, Homo sapiens
  misc_RNA (1)...(19): siRNA sense strand
gaugggaacuccagaugug

SEQ ID NO: 711347 - RNA, 19 nt, Homo sapiens
  misc_RNA (1)...(19): siRNA sense strand
caauguggaugagaacuaa

SEQ ID NO: 711348 - RNA, 19 nt, Homo sapiens
  misc_RNA (1)...(19): siRNA sense strand
gagaauacaccaucaacau

SEQ ID NO: 711349 - RNA, 19 nt, Homo sapiens
  misc_RNA (1)...(19): siRNA sense strand
ggaaauuugccaugaagga

SEQ ID NO: 711350 - RNA, 19 nt, Homo sapiens
  misc_RNA (1)...(19): siRNA sense strand
ccaaaggaauaaggaaugu

SEQ ID NO: 711351 - RNA, 19 nt, Homo sapiens
  misc_RNA (1)...(19): siRNA sense strand
aaagagauucggaaauuug

SEQ ID NO: 711352 - RNA, 19 nt, Homo sapiens
  misc_RNA (1)...(19): siRNA sense strand
aaagaaggguggcgagaag

SEQ ID NO: 711353 - RNA, 19 nt, Homo sapiens
  misc_RNA (1)...(19): siRNA sense strand
auacuuugguuaccuaugu

SEQ ID NO: 711354 - RNA, 19 nt, Homo sapiens
  misc_RNA (1)...(19): siRNA sense strand
agaauacaccaucaacauu

SEQ ID NO: 711355 - RNA, 19 nt, Homo sapiens
  misc_RNA (1)...(19): siRNA sense strand
ggaaugugccauaccgaau

SEQ ID NO: 711356 - RNA, 19 nt, Homo sapiens
  misc_RNA (1)...(19): siRNA sense strand
caaagaaggguggcgagaa

SEQ ID NO: 711357 - RNA, 19 nt, Homo sapiens
  misc_RNA (1)...(19): siRNA sense strand
gagaugggaacuccagaug

SEQ ID NO: 711358 - RNA, 19 nt, Homo sapiens
  misc_RNA (1)...(19): siRNA sense strand
gaaggguggcgagaagaaa

SEQ ID NO: 711359 - RNA, 19 nt, Homo sapiens
  misc_RNA (1)...(19): siRNA sense strand
gaaugugccauaccgaauc

SEQ ID NO: 711360 - RNA, 19 nt, Homo sapiens
  misc_RNA (1)...(19): siRNA sense strand
gccaaaggaauaaggaaug

SEQ ID NO: 711361 - RNA, 19 nt, Homo sapiens
  misc_RNA (1)...(19): siRNA sense strand
gugugcggcuguccagaaa

SEQ ID NO: 711362 - RNA, 19 nt, Homo sapiens
  misc_RNA (1)...(19): siRNA sense strand
ucaauguggaugagaacua

SEQ ID NO: 711363 - RNA, 19 nt, Homo sapiens
  misc_RNA (1)...(19): siRNA sense strand
acaccaggcucaacaaagc

SEQ ID NO: 711364 - RNA, 19 nt, Homo sapiens
  misc_RNA (1)...(19): siRNA sense strand
guucugccaucaacgaagu

SEQ ID NO: 711365 - RNA, 19 nt, Homo sapiens
  misc_RNA (1)...(19): siRNA sense strand
cagucaauguggaugagaa

SEQ ID NO: 711366 - RNA, 19 nt, Homo sapiens
  misc_RNA (1)...(19): siRNA sense strand
caccaaauaagcuauauac

SEQ ID NO: 711367 - RNA, 19 nt, Homo sapiens
  misc_RNA (1)...(19): siRNA sense strand
aauacaccaucaacauuca

SEQ ID NO: 711368 - RNA, 19 nt, Homo sapiens
  misc_RNA (1)...(19): siRNA sense strand
gguuaccuauguaccuguu

SEQ ID NO: 711369 - RNA, 19 nt, Homo sapiens
  misc_RNA (1)...(19): siRNA sense strand
ugacaccaggcucaacaaa

SEQ ID NO: 711370 - RNA, 19 nt, Homo sapiens
  misc_RNA (1)...(19): siRNA sense strand
ccagaugugcgcauugaca

SEQ ID NO: 711371 - RNA, 19 nt, Homo sapiens
  misc_RNA (1)...(19): siRNA sense strand
ucggaaauuugccaugaag

SEQ ID NO: 711372 - RNA, 19 nt, Homo sapiens
  misc_RNA (1)...(19): siRNA sense strand
ggccaaaggaauaaggaau

SEQ ID NO: 711373 - RNA, 19 nt, Homo sapiens
  misc_RNA (1)...(19): siRNA sense strand
cuccagaugugcgcauuga

SEQ ID NO: 711374 - RNA, 19 nt, Homo sapiens
  misc_RNA (1)...(19): siRNA sense strand
gcaccucgggcacucaaag

SEQ ID NO: 711375 - RNA, 19 nt, Homo sapiens
  misc_RNA (1)...(19): siRNA sense strand
auucggaaauuugccauga

SEQ ID NO: 711376 - RNA, 19 nt, Homo sapiens
  misc_RNA (1)...(19): siRNA sense strand
aauaaggaaugugccauac

SEQ ID NO: 711377 - RNA, 19 nt, Homo sapiens
  misc_RNA (1)...(19): siRNA sense strand
acucaaagagauucggaaa

SEQ ID NO: 711378 - RNA, 19 nt, Homo sapiens
  misc_RNA (1)...(19): siRNA sense strand
cgagaauacaccaucaaca

SEQ ID NO: 711379 - RNA, 19 nt, Homo sapiens
  misc_RNA (1)...(19): siRNA sense strand
agacagucaauguggauga

SEQ ID NO: 711380 - RNA, 19 nt, Homo sapiens
  misc_RNA (1)...(19): siRNA sense strand
ugccaucaacgaaguggua

SEQ ID NO: 711381 - RNA, 19 nt, Homo sapiens
  misc_RNA (1)...(19): siRNA sense strand
agaaggguggcgagaagaa

SEQ ID NO: 711382 - RNA, 19 nt, Homo sapiens
  misc_RNA (1)...(19): siRNA sense strand
gacagucaauguggaugag

SEQ ID NO: 711383 - RNA, 19 nt, Homo sapiens
  misc_RNA (1)...(19): siRNA sense strand
uacuuugguuaccuaugua

SEQ ID NO: 711384 - RNA, 19 nt, Homo sapiens
  misc_RNA (1)...(19): siRNA sense strand
ggacaccgaucuucucuug

SEQ ID NO: 711385 - RNA, 19 nt, Homo sapiens
  misc_RNA (1)...(19): siRNA sense strand
ggaagaggcugaaguugug

SEQ ID NO: 711386 - RNA, 19 nt, Homo sapiens
  misc_RNA (1)...(19): siRNA sense strand
acaaagcacuagccacuua

SEQ ID NO: 711387 - RNA, 19 nt, Homo sapiens
  misc_RNA (1)...(19): siRNA sense strand
ugaagaagaagaagaguua

SEQ ID NO: 711388 - RNA, 19 nt, Homo sapiens
  misc_RNA (1)...(19): siRNA sense strand
gaaccugccugcccugaau

SEQ ID NO: 711389 - RNA, 19 nt, Homo sapiens
  misc_RNA (1)...(19): siRNA sense strand
ggacacgccuggcagaaau

SEQ ID NO: 711390 - RNA, 19 nt, Homo sapiens
  misc_RNA (1)...(19): siRNA sense strand
ggaccucccuagaaagaaa

SEQ ID NO: 711391 - RNA, 19 nt, Homo sapiens
  misc_RNA (1)...(19): siRNA sense strand
gaaccacgcaucaacauug

SEQ ID NO: 711392 - RNA, 19 nt, Homo sapiens
  misc_RNA (1)...(19): siRNA sense strand
ggccaaaggugaugugaug

SEQ ID NO: 711393 - RNA, 19 nt, Homo sapiens
  misc_RNA (1)...(19): siRNA sense strand
gcaacaaauucgcccauca

SEQ ID NO: 711394 - RNA, 19 nt, Homo sapiens
  misc_RNA (1)...(19): siRNA sense strand
gaagauaggaaauccacaa

SEQ ID NO: 711395 - RNA, 19 nt, Homo sapiens
  misc_RNA (1)...(19): siRNA sense strand
caaugcagauaccucagua

SEQ ID NO: 711396 - RNA, 19 nt, Homo sapiens
  misc_RNA (1)...(19): siRNA sense strand
agaaaucccugaacuccaa

SEQ ID NO: 711397 - RNA, 19 nt, Homo sapiens
  misc_RNA (1)...(19): siRNA sense strand
acagucagcugaagaccua

SEQ ID NO: 711398 - RNA, 19 nt, Homo sapiens
  misc_RNA (1)...(19): siRNA sense strand
cccaagggcaccuguauua

SEQ ID NO: 711399 - RNA, 19 nt, Homo sapiens
  misc_RNA (1)...(19): siRNA sense strand
gcaccuguauuaugacuac

SEQ ID NO: 711400 - RNA, 19 nt, Homo sapiens
  misc_RNA (1)...(19): siRNA sense strand
gaucaaacccaucaaggau

SEQ ID NO: 711401 - RNA, 19 nt, Homo sapiens
  misc_RNA (1)...(19): siRNA sense strand
aagggcaccuguauuauga

SEQ ID NO: 711402 - RNA, 19 nt, Homo sapiens
  misc_RNA (1)...(19): siRNA sense strand
gaugguugcucuggaaaug

SEQ ID NO: 711403 - RNA, 19 nt, Homo sapiens
  misc_RNA (1)...(19): siRNA sense strand
gaccuacucuagugacaga

SEQ ID NO: 711404 - RNA, 19 nt, Homo sapiens
  misc_RNA (1)...(19): siRNA sense strand
caaguggaccucccuagaa

SEQ ID NO: 711405 - RNA, 19 nt, Homo sapiens
  misc_RNA (1)...(19): siRNA sense strand
guugggaggugucauggaa

SEQ ID NO: 711406 - RNA, 19 nt, Homo sapiens
  misc_RNA (1)...(19): siRNA sense strand
acacaaggccacacuggua

SEQ ID NO: 711407 - RNA, 19 nt, Homo sapiens
  misc_RNA (1)...(19): siRNA sense strand
ggaagaagauaggaaaucc

SEQ ID NO: 711408 - RNA, 19 nt, Homo sapiens
  misc_RNA (1)...(19): siRNA sense strand
caaaggugaugugaugguu

SEQ ID NO: 711409 - RNA, 19 nt, Homo sapiens
  misc_RNA (1)...(19): siRNA sense strand
gagagcagacuguagaugu

SEQ ID NO: 711410 - RNA, 19 nt, Homo sapiens
  misc_RNA (1)...(19): siRNA sense strand
acaccgaucuucucuugga

SEQ ID NO: 711411 - RNA, 19 nt, Homo sapiens
  misc_RNA (1)...(19): siRNA sense strand
ucccugaacuccaagauau

SEQ ID NO: 711412 - RNA, 19 nt, Homo sapiens
  misc_RNA (1)...(19): siRNA sense strand
ucaagaccgugcaggagaa

SEQ ID NO: 711413 - RNA, 19 nt, Homo sapiens
  misc_RNA (1)...(19): siRNA sense strand
gggugacgcagaacuauaa

SEQ ID NO: 711414 - RNA, 19 nt, Homo sapiens
  misc_RNA (1)...(19): siRNA sense strand
caagggcaccuguauuaug

SEQ ID NO: 711415 - RNA, 19 nt, Homo sapiens
  misc_RNA (1)...(19): siRNA sense strand
cugaagaccuacucuagug

SEQ ID NO: 711416 - RNA, 19 nt, Homo sapiens
  misc_RNA (1)...(19): siRNA sense strand
caaggaguguggcaaaguc

SEQ ID NO: 711417 - RNA, 19 nt, Homo sapiens
  misc_RNA (1)...(19): siRNA sense strand
gcuuugcacucucuguuug

SEQ ID NO: 711418 - RNA, 19 nt, Homo sapiens
  misc_RNA (1)...(19): siRNA sense strand
ggaagcaucagccgagugu

SEQ ID NO: 711419 - RNA, 19 nt, Homo sapiens
  misc_RNA (1)...(19): siRNA sense strand
uacagaagauggugaaguc

SEQ ID NO: 711420 - RNA, 19 nt, Homo sapiens
  misc_RNA (1)...(19): siRNA sense strand
ugugacaagugaagaagaa

SEQ ID NO: 711421 - RNA, 19 nt, Homo sapiens
  misc_RNA (1)...(19): siRNA sense strand
ugcagcagcaccaguauua

SEQ ID NO: 711422 - RNA, 19 nt, Homo sapiens
  misc_RNA (1)...(19): siRNA sense strand
gauaggaaauccacaaaag

SEQ ID NO: 711423 - RNA, 19 nt, Homo sapiens
  misc_RNA (1)...(19): siRNA sense strand
aaguggaccucccuagaaa

SEQ ID NO: 711424 - RNA, 19 nt, Homo sapiens
  misc_RNA (1)...(19): siRNA sense strand
gcaguuugaugccaagaac

SEQ ID NO: 711425 - RNA, 19 nt, Homo sapiens
  misc_RNA (1)...(19): siRNA sense strand
ggauccaccucaacaacau

SEQ ID NO: 711426 - RNA, 19 nt, Homo sapiens
  misc_RNA (1)...(19): siRNA sense strand
gucauccuuuagcaaauua

SEQ ID NO: 711427 - RNA, 19 nt, Homo sapiens
  misc_RNA (1)...(19): siRNA sense strand
gacaagugaagaagaagaa

SEQ ID NO: 711428 - RNA, 19 nt, Homo sapiens
  misc_RNA (1)...(19): siRNA sense strand
agagugaggugccgaaguc

SEQ ID NO: 711429 - RNA, 19 nt, Homo sapiens
  misc_RNA (1)...(19): siRNA sense strand
ucacagcacaugcaacaga

SEQ ID NO: 711430 - RNA, 19 nt, Homo sapiens
  misc_RNA (1)...(19): siRNA sense strand
gacuguagauguugaacca

SEQ ID NO: 711431 - RNA, 19 nt, Homo sapiens
  misc_RNA (1)...(19): siRNA sense strand
caacauuggcuugagauuc

SEQ ID NO: 711432 - RNA, 19 nt, Homo sapiens
  misc_RNA (1)...(19): siRNA sense strand
ccaagaacaagcugacaug

SEQ ID NO: 711433 - RNA, 19 nt, Homo sapiens
  misc_RNA (1)...(19): siRNA sense strand
gcaguugggaggugucaug

SEQ ID NO: 711434 - RNA, 19 nt, Homo sapiens
  misc_RNA (1)...(19): siRNA sense strand
agagcagacuguagauguu

SEQ ID NO: 711435 - RNA, 19 nt, Homo sapiens
  misc_RNA (1)...(19): siRNA sense strand
agacgcagccgcaacaaau

SEQ ID NO: 711436 - RNA, 19 nt, Homo sapiens
  misc_RNA (1)...(19): siRNA sense strand
ggaggacccggaagaagau

SEQ ID NO: 711437 - RNA, 19 nt, Homo sapiens
  misc_RNA (1)...(19): siRNA sense strand
ggaggaggacccggaagaa

SEQ ID NO: 711438 - RNA, 19 nt, Homo sapiens
  misc_RNA (1)...(19): siRNA sense strand
agaagauggugaaguccaa

SEQ ID NO: 711439 - RNA, 19 nt, Homo sapiens
  misc_RNA (1)...(19): siRNA sense strand
ugucauccuuuagcaaauu

SEQ ID NO: 711440 - RNA, 19 nt, Homo sapiens
  misc_RNA (1)...(19): siRNA sense strand
ugaauuugcuuugcacucu

SEQ ID NO: 711441 - RNA, 19 nt, Homo sapiens
  misc_RNA (1)...(19): siRNA sense strand
guggagggaccaauucuga

SEQ ID NO: 711442 - RNA, 19 nt, Homo sapiens
  misc_RNA (1)...(19): siRNA sense strand
ccaucugccugaaggaguu

SEQ ID NO: 711443 - RNA, 19 nt, Homo sapiens
  misc_RNA (1)...(19): siRNA sense strand
cauggaagaggcugaaguu

SEQ ID NO: 711444 - RNA, 19 nt, Homo sapiens
  misc_RNA (1)...(19): siRNA sense strand
ccgaaaugcacacaugaaa

SEQ ID NO: 711445 - RNA, 19 nt, Homo sapiens
  misc_RNA (1)...(19): siRNA sense strand
gagcagacuguagauguug

SEQ ID NO: 711446 - RNA, 19 nt, Homo sapiens
  misc_RNA (1)...(19): siRNA sense strand
gagcagcagcagcaacaga

SEQ ID NO: 711447 - RNA, 19 nt, Homo sapiens
  misc_RNA (1)...(19): siRNA sense strand
ccgaucuucucuuggauga

SEQ ID NO: 711448 - RNA, 19 nt, Homo sapiens
  misc_RNA (1)...(19): siRNA sense strand
caagugaagaagaagaaga

SEQ ID NO: 711449 - RNA, 19 nt, Homo sapiens
  misc_RNA (1)...(19): siRNA sense strand
ccacuuacagcaaagacuu

SEQ ID NO: 711450 - RNA, 19 nt, Homo sapiens
  misc_RNA (1)...(19): siRNA sense strand
aagcagaaaucccugaacu

SEQ ID NO: 711451 - RNA, 19 nt, Homo sapiens
  misc_RNA (1)...(19): siRNA sense strand
cagaugcaccuaccugaug

SEQ ID NO: 711452 - RNA, 19 nt, Homo sapiens
  misc_RNA (1)...(19): siRNA sense strand
guaucuccaugcaagaaau

SEQ ID NO: 711453 - RNA, 19 nt, Homo sapiens
  misc_RNA (1)...(19): siRNA sense strand
gcaaggaguguggcaaagu

SEQ ID NO: 711454 - RNA, 19 nt, Homo sapiens
  misc_RNA (1)...(19): siRNA sense strand
gaggaacaacagaggcaaa

SEQ ID NO: 711455 - RNA, 19 nt, Homo sapiens
  misc_RNA (1)...(19): siRNA sense strand
aagccgaaaugcacacaug

SEQ ID NO: 711456 - RNA, 19 nt, Homo sapiens
  misc_RNA (1)...(19): siRNA sense strand
ugugaugguugcucuggaa

SEQ ID NO: 711457 - RNA, 19 nt, Homo sapiens
  misc_RNA (1)...(19): siRNA sense strand
aagcugacaugcuccaucu

SEQ ID NO: 711458 - RNA, 19 nt, Homo sapiens
  misc_RNA (1)...(19): siRNA sense strand
ccagcugagucugaucaaa

SEQ ID NO: 711459 - RNA, 19 nt, Homo sapiens
  misc_RNA (1)...(19): siRNA sense strand
gaggacagucagcugaaga

SEQ ID NO: 711460 - RNA, 19 nt, Homo sapiens
  misc_RNA (1)...(19): siRNA sense strand
guggcaaagucuucuucaa

SEQ ID NO: 711461 - RNA, 19 nt, Homo sapiens
  misc_RNA (1)...(19): siRNA sense strand
acuagccacuuacagcaaa

SEQ ID NO: 711462 - RNA, 19 nt, Homo sapiens
  misc_RNA (1)...(19): siRNA sense strand
ccagguggagggaccaauu

SEQ ID NO: 711463 - RNA, 19 nt, Homo sapiens
  misc_RNA (1)...(19): siRNA sense strand
guacagaagauggugaagu

SEQ ID NO: 711464 - RNA, 19 nt, Homo sapiens
  misc_RNA (1)...(19): siRNA sense strand
gcuucagggugacgcagaa

SEQ ID NO: 711465 - RNA, 19 nt, Homo sapiens
  misc_RNA (1)...(19): siRNA sense strand
uggaagaggcugaaguugu

SEQ ID NO: 711466 - RNA, 19 nt, Homo sapiens
  misc_RNA (1)...(19): siRNA sense strand
ugggaggugucauggaaga

SEQ ID NO: 711467 - RNA, 19 nt, Homo sapiens
  misc_RNA (1)...(19): siRNA sense strand
gcugaagaccuacucuagu

SEQ ID NO: 711468 - RNA, 19 nt, Homo sapiens
  misc_RNA (1)...(19): siRNA sense strand
ggaguguggcaaagucuuc

SEQ ID NO: 711469 - RNA, 19 nt, Homo sapiens
  misc_RNA (1)...(19): siRNA sense strand
caaaagaagaagagaguga

SEQ ID NO: 711470 - RNA, 19 nt, Homo sapiens
  misc_RNA (1)...(19): siRNA sense strand
gaaauccacaaaagaagaa

SEQ ID NO: 711471 - RNA, 19 nt, Homo sapiens
  misc_RNA (1)...(19): siRNA sense strand
gugaagaagaagaagaguu

SEQ ID NO: 711472 - RNA, 19 nt, Homo sapiens
  misc_RNA (1)...(19): siRNA sense strand
guggaccucccuagaaaga

SEQ ID NO: 711473 - RNA, 19 nt, Homo sapiens
  misc_RNA (1)...(19): siRNA sense strand
gaagcccuggccagaacua

SEQ ID NO: 711474 - RNA, 19 nt, Homo sapiens
  misc_RNA (1)...(19): siRNA sense strand
cuucagcaauguccucauc

SEQ ID NO: 711475 - RNA, 19 nt, Homo sapiens
  misc_RNA (1)...(19): siRNA sense strand
gcucggggcucuucagcaa

SEQ ID NO: 711476 - RNA, 19 nt, Homo sapiens
  misc_RNA (1)...(19): siRNA sense strand
ucaaguggccaacccaaag

SEQ ID NO: 711477 - RNA, 19 nt, Homo sapiens
  misc_RNA (1)...(19): siRNA sense strand
gcaggguucaaugcagaua

SEQ ID NO: 711478 - RNA, 19 nt, Homo sapiens
  misc_RNA (1)...(19): siRNA sense strand
gaccagcugagucugauca

SEQ ID NO: 711479 - RNA, 19 nt, Homo sapiens
  misc_RNA (1)...(19): siRNA sense strand
gaaaugcacacaugaaaac

SEQ ID NO: 711480 - RNA, 19 nt, Homo sapiens
  misc_RNA (1)...(19): siRNA sense strand
ggaaauccacaaaagaaga

SEQ ID NO: 711481 - RNA, 19 nt, Homo sapiens
  misc_RNA (1)...(19): siRNA sense strand
aaugucauccuuuagcaaa

SEQ ID NO: 711482 - RNA, 19 nt, Homo sapiens
  misc_RNA (1)...(19): siRNA sense strand
cuucugaauuugugcuguu

SEQ ID NO: 711483 - RNA, 19 nt, Homo sapiens
  misc_RNA (1)...(19): siRNA sense strand
gcccuggccagaacuagaa

SEQ ID NO: 711484 - RNA, 19 nt, Homo sapiens
  misc_RNA (1)...(19): siRNA sense strand
ggacaccgaucuucucuug

SEQ ID NO: 711485 - RNA, 19 nt, Homo sapiens
  misc_RNA (1)...(19): siRNA sense strand
ggaagaggcugaaguugug

SEQ ID NO: 711486 - RNA, 19 nt, Homo sapiens
  misc_RNA (1)...(19): siRNA sense strand
acaaagcacuagccacuua

SEQ ID NO: 711487 - RNA, 19 nt, Homo sapiens
  misc_RNA (1)...(19): siRNA sense strand
ugaagaagaagaagaguua

SEQ ID NO: 711488 - RNA, 19 nt, Homo sapiens
  misc_RNA (1)...(19): siRNA sense strand
gaaccugccugcccugaau

SEQ ID NO: 711489 - RNA, 19 nt, Homo sapiens
  misc_RNA (1)...(19): siRNA sense strand
ggacacgccuggcagaaau

SEQ ID NO: 711490 - RNA, 19 nt, Homo sapiens
  misc_RNA (1)...(19): siRNA sense strand
ggaccucccuagaaagaaa

SEQ ID NO: 711491 - RNA, 19 nt, Homo sapiens
  misc_RNA (1)...(19): siRNA sense strand
gaaccacgcaucaacauug

SEQ ID NO: 711492 - RNA, 19 nt, Homo sapiens
  misc_RNA (1)...(19): siRNA sense strand
ggccaaaggugaugugaug

SEQ ID NO: 711493 - RNA, 19 nt, Homo sapiens
  misc_RNA (1)...(19): siRNA sense strand
gcaacaaauucgcccauca

SEQ ID NO: 711494 - RNA, 19 nt, Homo sapiens
  misc_RNA (1)...(19): siRNA sense strand
gaagauaggaaauccacaa

SEQ ID NO: 711495 - RNA, 19 nt, Homo sapiens
  misc_RNA (1)...(19): siRNA sense strand
caaugcagauaccucagua

SEQ ID NO: 711496 - RNA, 19 nt, Homo sapiens
  misc_RNA (1)...(19): siRNA sense strand
agaaaucccugaacuccaa

SEQ ID NO: 711497 - RNA, 19 nt, Homo sapiens
  misc_RNA (1)...(19): siRNA sense strand
acagucagcugaagaccua

SEQ ID NO: 711498 - RNA, 19 nt, Homo sapiens
  misc_RNA (1)...(19): siRNA sense strand
cccaagggcaccuguauua

SEQ ID NO: 711499 - RNA, 19 nt, Homo sapiens
  misc_RNA (1)...(19): siRNA sense strand
gcaccuguauuaugacuac

SEQ ID NO: 711500 - RNA, 19 nt, Homo sapiens
  misc_RNA (1)...(19): siRNA sense strand
gaucaaacccaucaaggau

SEQ ID NO: 711501 - RNA, 19 nt, Homo sapiens
  misc_RNA (1)...(19): siRNA sense strand
aagggcaccuguauuauga

SEQ ID NO: 711502 - RNA, 19 nt, Homo sapiens
  misc_RNA (1)...(19): siRNA sense strand
gaugguugcucuggaaaug

SEQ ID NO: 711503 - RNA, 19 nt, Homo sapiens
  misc_RNA (1)...(19): siRNA sense strand
gaccuacucuagugacaga

SEQ ID NO: 711504 - RNA, 19 nt, Homo sapiens
  misc_RNA (1)...(19): siRNA sense strand
caaguggaccucccuagaa

SEQ ID NO: 711505 - RNA, 19 nt, Homo sapiens
  misc_RNA (1)...(19): siRNA sense strand
guugggaggugucauggaa

SEQ ID NO: 711506 - RNA, 19 nt, Homo sapiens
  misc_RNA (1)...(19): siRNA sense strand
acacaaggccacacuggua

SEQ ID NO: 711507 - RNA, 19 nt, Homo sapiens
  misc_RNA (1)...(19): siRNA sense strand
ggaagaagauaggaaaucc

SEQ ID NO: 711508 - RNA, 19 nt, Homo sapiens
  misc_RNA (1)...(19): siRNA sense strand
caaaggugaugugaugguu

SEQ ID NO: 711509 - RNA, 19 nt, Homo sapiens
  misc_RNA (1)...(19): siRNA sense strand
gagagcagacuguagaugu

SEQ ID NO: 711510 - RNA, 19 nt, Homo sapiens
  misc_RNA (1)...(19): siRNA sense strand
acaccgaucuucucuugga

SEQ ID NO: 711511 - RNA, 19 nt, Homo sapiens
  misc_RNA (1)...(19): siRNA sense strand
ucccugaacuccaagauau

SEQ ID NO: 711512 - RNA, 19 nt, Homo sapiens
  misc_RNA (1)...(19): siRNA sense strand
ucaagaccgugcaggagaa

SEQ ID NO: 711513 - RNA, 19 nt, Homo sapiens
  misc_RNA (1)...(19): siRNA sense strand
gggugacgcagaacuauaa

SEQ ID NO: 711514 - RNA, 19 nt, Homo sapiens
  misc_RNA (1)...(19): siRNA sense strand
caagggcaccuguauuaug

SEQ ID NO: 711515 - RNA, 19 nt, Homo sapiens
  misc_RNA (1)...(19): siRNA sense strand
cugaagaccuacucuagug

SEQ ID NO: 711516 - RNA, 19 nt, Homo sapiens
  misc_RNA (1)...(19): siRNA sense strand
caaggaguguggcaaaguc

SEQ ID NO: 711517 - RNA, 19 nt, Homo sapiens
  misc_RNA (1)...(19): siRNA sense strand
gcuuugcacucucuguuug

SEQ ID NO: 711518 - RNA, 19 nt, Homo sapiens
  misc_RNA (1)...(19): siRNA sense strand
ggaagcaucagccgagugu

SEQ ID NO: 711519 - RNA, 19 nt, Homo sapiens
  misc_RNA (1)...(19): siRNA sense strand
uacagaagauggugaaguc

SEQ ID NO: 711520 - RNA, 19 nt, Homo sapiens
  misc_RNA (1)...(19): siRNA sense strand
ugugacaagugaagaagaa

SEQ ID NO: 711521 - RNA, 19 nt, Homo sapiens
  misc_RNA (1)...(19): siRNA sense strand
ugcagcagcaccaguauua

SEQ ID NO: 711522 - RNA, 19 nt, Homo sapiens
  misc_RNA (1)...(19): siRNA sense strand
gauaggaaauccacaaaag

SEQ ID NO: 711523 - RNA, 19 nt, Homo sapiens
  misc_RNA (1)...(19): siRNA sense strand
aaguggaccucccuagaaa

SEQ ID NO: 711524 - RNA, 19 nt, Homo sapiens
  misc_RNA (1)...(19): siRNA sense strand
gcaguuugaugccaagaac

SEQ ID NO: 711525 - RNA, 19 nt, Homo sapiens
  misc_RNA (1)...(19): siRNA sense strand
ggauccaccucaacaacau

SEQ ID NO: 711526 - RNA, 19 nt, Homo sapiens
  misc_RNA (1)...(19): siRNA sense strand
gucauccuuuagcaaauua

SEQ ID NO: 711527 - RNA, 19 nt, Homo sapiens
  misc_RNA (1)...(19): siRNA sense strand
gacaagugaagaagaagaa

SEQ ID NO: 711528 - RNA, 19 nt, Homo sapiens
  misc_RNA (1)...(19): siRNA sense strand
agagugaggugccgaaguc

SEQ ID NO: 711529 - RNA, 19 nt, Homo sapiens
  misc_RNA (1)...(19): siRNA sense strand
ucacagcacaugcaacaga

SEQ ID NO: 711530 - RNA, 19 nt, Homo sapiens
  misc_RNA (1)...(19): siRNA sense strand
gacuguagauguugaacca

SEQ ID NO: 711531 - RNA, 19 nt, Homo sapiens
  misc_RNA (1)...(19): siRNA sense strand
caacauuggcuugagauuc

SEQ ID NO: 711532 - RNA, 19 nt, Homo sapiens
  misc_RNA (1)...(19): siRNA sense strand
ccaagaacaagcugacaug

SEQ ID NO: 711533 - RNA, 19 nt, Homo sapiens
  misc_RNA (1)...(19): siRNA sense strand
gcaguugggaggugucaug

SEQ ID NO: 711534 - RNA, 19 nt, Homo sapiens
  misc_RNA (1)...(19): siRNA sense strand
agagcagacuguagauguu

SEQ ID NO: 711535 - RNA, 19 nt, Homo sapiens
  misc_RNA (1)...(19): siRNA sense strand
agacgcagccgcaacaaau

SEQ ID NO: 711536 - RNA, 19 nt, Homo sapiens
  misc_RNA (1)...(19): siRNA sense strand
ggaggacccggaagaagau

SEQ ID NO: 711537 - RNA, 19 nt, Homo sapiens
  misc_RNA (1)...(19): siRNA sense strand
ggaggaggacccggaagaa

SEQ ID NO: 711538 - RNA, 19 nt, Homo sapiens
  misc_RNA (1)...(19): siRNA sense strand
agaagauggugaaguccaa

SEQ ID NO: 711539 - RNA, 19 nt, Homo sapiens
  misc_RNA (1)...(19): siRNA sense strand
ugucauccuuuagcaaauu

SEQ ID NO: 711540 - RNA, 19 nt, Homo sapiens
  misc_RNA (1)...(19): siRNA sense strand
ugaauuugcuuugcacucu

SEQ ID NO: 711541 - RNA, 19 nt, Homo sapiens
  misc_RNA (1)...(19): siRNA sense strand
guggagggaccaauucuga

SEQ ID NO: 711542 - RNA, 19 nt, Homo sapiens
  misc_RNA (1)...(19): siRNA sense strand
ccaucugccugaaggaguu

SEQ ID NO: 711543 - RNA, 19 nt, Homo sapiens
  misc_RNA (1)...(19): siRNA sense strand
cauggaagaggcugaaguu

SEQ ID NO: 711544 - RNA, 19 nt, Homo sapiens
  misc_RNA (1)...(19): siRNA sense strand
ccgaaaugcacacaugaaa

SEQ ID NO: 711545 - RNA, 19 nt, Homo sapiens
  misc_RNA (1)...(19): siRNA sense strand
gagcagacuguagauguug

SEQ ID NO: 711546 - RNA, 19 nt, Homo sapiens
  misc_RNA (1)...(19): siRNA sense strand
gagcagcagcagcaacaga

SEQ ID NO: 711547 - RNA, 19 nt, Homo sapiens
  misc_RNA (1)...(19): siRNA sense strand
ccgaucuucucuuggauga

SEQ ID NO: 711548 - RNA, 19 nt, Homo sapiens
  misc_RNA (1)...(19): siRNA sense strand
caagugaagaagaagaaga

SEQ ID NO: 711549 - RNA, 19 nt, Homo sapiens
  misc_RNA (1)...(19): siRNA sense strand
ccacuuacagcaaagacuu

SEQ ID NO: 711550 - RNA, 19 nt, Homo sapiens
  misc_RNA (1)...(19): siRNA sense strand
aagcagaaaucccugaacu

SEQ ID NO: 711551 - RNA, 19 nt, Homo sapiens
  misc_RNA (1)...(19): siRNA sense strand
cagaugcaccuaccugaug

SEQ ID NO: 711552 - RNA, 19 nt, Homo sapiens
  misc_RNA (1)...(19): siRNA sense strand
guaucuccaugcaagaaau

SEQ ID NO: 711553 - RNA, 19 nt, Homo sapiens
  misc_RNA (1)...(19): siRNA sense strand
gcaaggaguguggcaaagu

SEQ ID NO: 711554 - RNA, 19 nt, Homo sapiens
  misc_RNA (1)...(19): siRNA sense strand
gaggaacaacagaggcaaa

SEQ ID NO: 711555 - RNA, 19 nt, Homo sapiens
  misc_RNA (1)...(19): siRNA sense strand
aagccgaaaugcacacaug

SEQ ID NO: 711556 - RNA, 19 nt, Homo sapiens
  misc_RNA (1)...(19): siRNA sense strand
ugugaugguugcucuggaa

SEQ ID NO: 711557 - RNA, 19 nt, Homo sapiens
  misc_RNA (1)...(19): siRNA sense strand
aagcugacaugcuccaucu

SEQ ID NO: 711558 - RNA, 19 nt, Homo sapiens
  misc_RNA (1)...(19): siRNA sense strand
ccagcugagucugaucaaa

SEQ ID NO: 711559 - RNA, 19 nt, Homo sapiens
  misc_RNA (1)...(19): siRNA sense strand
gaggacagucagcugaaga

SEQ ID NO: 711560 - RNA, 19 nt, Homo sapiens
  misc_RNA (1)...(19): siRNA sense strand
guggcaaagucuucuucaa

SEQ ID NO: 711561 - RNA, 19 nt, Homo sapiens
  misc_RNA (1)...(19): siRNA sense strand
acuagccacuuacagcaaa

SEQ ID NO: 711562 - RNA, 19 nt, Homo sapiens
  misc_RNA (1)...(19): siRNA sense strand
ccagguggagggaccaauu

SEQ ID NO: 711563 - RNA, 19 nt, Homo sapiens
  misc_RNA (1)...(19): siRNA sense strand
guacagaagauggugaagu

SEQ ID NO: 711564 - RNA, 19 nt, Homo sapiens
  misc_RNA (1)...(19): siRNA sense strand
gcuucagggugacgcagaa

SEQ ID NO: 711565 - RNA, 19 nt, Homo sapiens
  misc_RNA (1)...(19): siRNA sense strand
uggaagaggcugaaguugu

SEQ ID NO: 711566 - RNA, 19 nt, Homo sapiens
  misc_RNA (1)...(19): siRNA sense strand
ugggaggugucauggaaga

SEQ ID NO: 711567 - RNA, 19 nt, Homo sapiens
  misc_RNA (1)...(19): siRNA sense strand
gcugaagaccuacucuagu

SEQ ID NO: 711568 - RNA, 19 nt, Homo sapiens
  misc_RNA (1)...(19): siRNA sense strand
ggaguguggcaaagucuuc

SEQ ID NO: 711569 - RNA, 19 nt, Homo sapiens
  misc_RNA (1)...(19): siRNA sense strand
caaaagaagaagagaguga

SEQ ID NO: 711570 - RNA, 19 nt, Homo sapiens
  misc_RNA (1)...(19): siRNA sense strand
gaaauccacaaaagaagaa

SEQ ID NO: 711571 - RNA, 19 nt, Homo sapiens
  misc_RNA (1)...(19): siRNA sense strand
gugaagaagaagaagaguu

SEQ ID NO: 711572 - RNA, 19 nt, Homo sapiens
  misc_RNA (1)...(19): siRNA sense strand
guggaccucccuagaaaga

SEQ ID NO: 711573 - RNA, 19 nt, Homo sapiens
  misc_RNA (1)...(19): siRNA sense strand
gaagcccuggccagaacua

SEQ ID NO: 711574 - RNA, 19 nt, Homo sapiens
  misc_RNA (1)...(19): siRNA sense strand
cuucagcaauguccucauc

SEQ ID NO: 711575 - RNA, 19 nt, Homo sapiens
  misc_RNA (1)...(19): siRNA sense strand
gcucggggcucuucagcaa

SEQ ID NO: 711576 - RNA, 19 nt, Homo sapiens
  misc_RNA (1)...(19): siRNA sense strand
ucaaguggccaacccaaag

SEQ ID NO: 711577 - RNA, 19 nt, Homo sapiens
  misc_RNA (1)...(19): siRNA sense strand
gcaggguucaaugcagaua

SEQ ID NO: 711578 - RNA, 19 nt, Homo sapiens
  misc_RNA (1)...(19): siRNA sense strand
gaccagcugagucugauca

SEQ ID NO: 711579 - RNA, 19 nt, Homo sapiens
  misc_RNA (1)...(19): siRNA sense strand
gaaaugcacacaugaaaac

SEQ ID NO: 711580 - RNA, 19 nt, Homo sapiens
  misc_RNA (1)...(19): siRNA sense strand
ggaaauccacaaaagaaga

SEQ ID NO: 711581 - RNA, 19 nt, Homo sapiens
  misc_RNA (1)...(19): siRNA sense strand
aaugucauccuuuagcaaa

SEQ ID NO: 711582 - RNA, 19 nt, Homo sapiens
  misc_RNA (1)...(19): siRNA sense strand
cuucugaauuugugcuguu

SEQ ID NO: 711583 - RNA, 19 nt, Homo sapiens
  misc_RNA (1)...(19): siRNA sense strand
gcccuggccagaacuagaa

SEQ ID NO: 711584 - RNA, 19 nt, Homo sapiens
  misc_RNA (1)...(19): siRNA sense strand
gaauucaggucaacaauau

SEQ ID NO: 711585 - RNA, 19 nt, Homo sapiens
  misc_RNA (1)...(19): siRNA sense strand
ggacaccgaucuucucuug

SEQ ID NO: 711586 - RNA, 19 nt, Homo sapiens
  misc_RNA (1)...(19): siRNA sense strand
ggaagaggcugaaguugug

SEQ ID NO: 711587 - RNA, 19 nt, Homo sapiens
  misc_RNA (1)...(19): siRNA sense strand
acaaagcacuagccacuua

SEQ ID NO: 711588 - RNA, 19 nt, Homo sapiens
  misc_RNA (1)...(19): siRNA sense strand
ugaagaagaagaagaguua

SEQ ID NO: 711589 - RNA, 19 nt, Homo sapiens
  misc_RNA (1)...(19): siRNA sense strand
gaaccugccugcccugaau

SEQ ID NO: 711590 - RNA, 19 nt, Homo sapiens
  misc_RNA (1)...(19): siRNA sense strand
ggacacgccuggcagaaau

SEQ ID NO: 711591 - RNA, 19 nt, Homo sapiens
  misc_RNA (1)...(19): siRNA sense strand
ggaccucccuagaaagaaa

SEQ ID NO: 711592 - RNA, 19 nt, Homo sapiens
  misc_RNA (1)...(19): siRNA sense strand
gaaccacgcaucaacauug

SEQ ID NO: 711593 - RNA, 19 nt, Homo sapiens
  misc_RNA (1)...(19): siRNA sense strand
ggccaaaggugaugugaug

SEQ ID NO: 711594 - RNA, 19 nt, Homo sapiens
  misc_RNA (1)...(19): siRNA sense strand
uacacaagcuggacucuuu

SEQ ID NO: 711595 - RNA, 19 nt, Homo sapiens
  misc_RNA (1)...(19): siRNA sense strand
gcaacaaauucgcccauca

SEQ ID NO: 711596 - RNA, 19 nt, Homo sapiens
  misc_RNA (1)...(19): siRNA sense strand
gaagauaggaaauccacaa

SEQ ID NO: 711597 - RNA, 19 nt, Homo sapiens
  misc_RNA (1)...(19): siRNA sense strand
caaugcagauaccucagua

SEQ ID NO: 711598 - RNA, 19 nt, Homo sapiens
  misc_RNA (1)...(19): siRNA sense strand
agaaaucccugaacuccaa

SEQ ID NO: 711599 - RNA, 19 nt, Homo sapiens
  misc_RNA (1)...(19): siRNA sense strand
acagucagcugaagaccua

SEQ ID NO: 711600 - RNA, 19 nt, Homo sapiens
  misc_RNA (1)...(19): siRNA sense strand
ccacugauggcuaccaaua

SEQ ID NO: 711601 - RNA, 19 nt, Homo sapiens
  misc_RNA (1)...(19): siRNA sense strand
cccaagggcaccuguauua

SEQ ID NO: 711602 - RNA, 19 nt, Homo sapiens
  misc_RNA (1)...(19): siRNA sense strand
gcaccuguauuaugacuac

SEQ ID NO: 711603 - RNA, 19 nt, Homo sapiens
  misc_RNA (1)...(19): siRNA sense strand
gaucaaacccaucaaggau

SEQ ID NO: 711604 - RNA, 19 nt, Homo sapiens
  misc_RNA (1)...(19): siRNA sense strand
aagggcaccuguauuauga

SEQ ID NO: 711605 - RNA, 19 nt, Homo sapiens
  misc_RNA (1)...(19): siRNA sense strand
gaugguugcucuggaaaug

SEQ ID NO: 711606 - RNA, 19 nt, Homo sapiens
  misc_RNA (1)...(19): siRNA sense strand
gaccuacucuagugacaga

SEQ ID NO: 711607 - RNA, 19 nt, Homo sapiens
  misc_RNA (1)...(19): siRNA sense strand
cgaauucaggucaacaaua

SEQ ID NO: 711608 - RNA, 19 nt, Homo sapiens
  misc_RNA (1)...(19): siRNA sense strand
caaguggaccucccuagaa

SEQ ID NO: 711609 - RNA, 19 nt, Homo sapiens
  misc_RNA (1)...(19): siRNA sense strand
guugggaggugucauggaa

SEQ ID NO: 711610 - RNA, 19 nt, Homo sapiens
  misc_RNA (1)...(19): siRNA sense strand
acacaaggccacacuggua

SEQ ID NO: 711611 - RNA, 19 nt, Homo sapiens
  misc_RNA (1)...(19): siRNA sense strand
ggaagaagauaggaaaucc

SEQ ID NO: 711612 - RNA, 19 nt, Homo sapiens
  misc_RNA (1)...(19): siRNA sense strand
caaaggugaugugaugguu

SEQ ID NO: 711613 - RNA, 19 nt, Homo sapiens
  misc_RNA (1)...(19): siRNA sense strand
gagagcagacuguagaugu

SEQ ID NO: 711614 - RNA, 19 nt, Homo sapiens
  misc_RNA (1)...(19): siRNA sense strand
acaccgaucuucucuugga

SEQ ID NO: 711615 - RNA, 19 nt, Homo sapiens
  misc_RNA (1)...(19): siRNA sense strand
ucccugaacuccaagauau

SEQ ID NO: 711616 - RNA, 19 nt, Homo sapiens
  misc_RNA (1)...(19): siRNA sense strand
caagggcaccuguauuaug

SEQ ID NO: 711617 - RNA, 19 nt, Homo sapiens
  misc_RNA (1)...(19): siRNA sense strand
gggugacgcagaacuauaa

SEQ ID NO: 711618 - RNA, 19 nt, Homo sapiens
  misc_RNA (1)...(19): siRNA sense strand
ucaagaccgugcaggagaa

SEQ ID NO: 711619 - RNA, 19 nt, Homo sapiens
  misc_RNA (1)...(19): siRNA sense strand
cugaagaccuacucuagug

SEQ ID NO: 711620 - RNA, 19 nt, Homo sapiens
  misc_RNA (1)...(19): siRNA sense strand
caaggaguguggcaaaguc

SEQ ID NO: 711621 - RNA, 19 nt, Homo sapiens
  misc_RNA (1)...(19): siRNA sense strand
gcuuugcacucucuguuug

SEQ ID NO: 711622 - RNA, 19 nt, Homo sapiens
  misc_RNA (1)...(19): siRNA sense strand
ggaagcaucagccgagugu

SEQ ID NO: 711623 - RNA, 19 nt, Homo sapiens
  misc_RNA (1)...(19): siRNA sense strand
uacagaagauggugaaguc

SEQ ID NO: 711624 - RNA, 19 nt, Homo sapiens
  misc_RNA (1)...(19): siRNA sense strand
ugugacaagugaagaagaa

SEQ ID NO: 711625 - RNA, 19 nt, Homo sapiens
  misc_RNA (1)...(19): siRNA sense strand
guacaagaccaaccaugug

SEQ ID NO: 711626 - RNA, 19 nt, Homo sapiens
  misc_RNA (1)...(19): siRNA sense strand
gauaggaaauccacaaaag

SEQ ID NO: 711627 - RNA, 19 nt, Homo sapiens
  misc_RNA (1)...(19): siRNA sense strand
aaguggaccucccuagaaa

SEQ ID NO: 711628 - RNA, 19 nt, Homo sapiens
  misc_RNA (1)...(19): siRNA sense strand
gcaguuugaugccaagaac

SEQ ID NO: 711629 - RNA, 19 nt, Homo sapiens
  misc_RNA (1)...(19): siRNA sense strand
ggauccaccucaacaacau

SEQ ID NO: 711630 - RNA, 19 nt, Homo sapiens
  misc_RNA (1)...(19): siRNA sense strand
ugcagcagcaccaguauua

SEQ ID NO: 711631 - RNA, 19 nt, Homo sapiens
  misc_RNA (1)...(19): siRNA sense strand
gucauccuuuagcaaauua

SEQ ID NO: 711632 - RNA, 19 nt, Homo sapiens
  misc_RNA (1)...(19): siRNA sense strand
ucacagcacaugcaacaga

SEQ ID NO: 711633 - RNA, 19 nt, Homo sapiens
  misc_RNA (1)...(19): siRNA sense strand
agagugaggugccgaaguc

SEQ ID NO: 711634 - RNA, 19 nt, Homo sapiens
  misc_RNA (1)...(19): siRNA sense strand
gaccagcaacuguacaaga

SEQ ID NO: 711635 - RNA, 19 nt, Homo sapiens
  misc_RNA (1)...(19): siRNA sense strand
gacaagugaagaagaagaa

SEQ ID NO: 711636 - RNA, 19 nt, Homo sapiens
  misc_RNA (1)...(19): siRNA sense strand
gacuguagauguugaacca

SEQ ID NO: 711637 - RNA, 19 nt, Homo sapiens
  misc_RNA (1)...(19): siRNA sense strand
caacauuggcuugagauuc

SEQ ID NO: 711638 - RNA, 19 nt, Homo sapiens
  misc_RNA (1)...(19): siRNA sense strand
ccaagaacaagcugacaug

SEQ ID NO: 711639 - RNA, 19 nt, Homo sapiens
  misc_RNA (1)...(19): siRNA sense strand
gcaguugggaggugucaug

SEQ ID NO: 711640 - RNA, 19 nt, Homo sapiens
  misc_RNA (1)...(19): siRNA sense strand
agagcagacuguagauguu

SEQ ID NO: 711641 - RNA, 19 nt, Homo sapiens
  misc_RNA (1)...(19): siRNA sense strand
agacgcagccgcaacaaau

SEQ ID NO: 711642 - RNA, 19 nt, Homo sapiens
  misc_RNA (1)...(19): siRNA sense strand
ggaggacccggaagaagau

SEQ ID NO: 711643 - RNA, 19 nt, Homo sapiens
  misc_RNA (1)...(19): siRNA sense strand
ggaggaggacccggaagaa

SEQ ID NO: 711644 - RNA, 19 nt, Homo sapiens
  misc_RNA (1)...(19): siRNA sense strand
agaagauggugaaguccaa

SEQ ID NO: 711645 - RNA, 19 nt, Homo sapiens
  misc_RNA (1)...(19): siRNA sense strand
ugucauccuuuagcaaauu

SEQ ID NO: 711646 - RNA, 19 nt, Homo sapiens
  misc_RNA (1)...(19): siRNA sense strand
ugaauuugcuuugcacucu

SEQ ID NO: 711647 - RNA, 19 nt, Homo sapiens
  misc_RNA (1)...(19): siRNA sense strand
guggagggaccaauucuga

SEQ ID NO: 711648 - RNA, 19 nt, Homo sapiens
  misc_RNA (1)...(19): siRNA sense strand
ccaucugccugaaggaguu

SEQ ID NO: 711649 - RNA, 19 nt, Homo sapiens
  misc_RNA (1)...(19): siRNA sense strand
cauggaagaggcugaaguu

SEQ ID NO: 711650 - RNA, 19 nt, Homo sapiens
  misc_RNA (1)...(19): siRNA sense strand
ccgaaaugcacacaugaaa

SEQ ID NO: 711651 - RNA, 19 nt, Homo sapiens
  misc_RNA (1)...(19): siRNA sense strand
gagcagacuguagauguug

SEQ ID NO: 711652 - RNA, 19 nt, Homo sapiens
  misc_RNA (1)...(19): siRNA sense strand
gagcagcagcagcaacaga

SEQ ID NO: 711653 - RNA, 19 nt, Homo sapiens
  misc_RNA (1)...(19): siRNA sense strand
ccgaucuucucuuggauga

SEQ ID NO: 711654 - RNA, 19 nt, Homo sapiens
  misc_RNA (1)...(19): siRNA sense strand
caagugaagaagaagaaga

SEQ ID NO: 711655 - RNA, 19 nt, Homo sapiens
  misc_RNA (1)...(19): siRNA sense strand
ccacuuacagcaaagacuu

SEQ ID NO: 711656 - RNA, 19 nt, Homo sapiens
  misc_RNA (1)...(19): siRNA sense strand
aagcagaaaucccugaacu

SEQ ID NO: 711657 - RNA, 19 nt, Homo sapiens
  misc_RNA (1)...(19): siRNA sense strand
gcuuaccagcggugucuua

SEQ ID NO: 711658 - RNA, 19 nt, Homo sapiens
  misc_RNA (1)...(19): siRNA sense strand
cagaugcaccuaccugaug

SEQ ID NO: 711659 - RNA, 19 nt, Homo sapiens
  misc_RNA (1)...(19): siRNA sense strand
guaucuccaugcaagaaau

SEQ ID NO: 711660 - RNA, 19 nt, Homo sapiens
  misc_RNA (1)...(19): siRNA sense strand
gcaaggaguguggcaaagu

SEQ ID NO: 711661 - RNA, 19 nt, Homo sapiens
  misc_RNA (1)...(19): siRNA sense strand
gaggaacaacagaggcaaa

SEQ ID NO: 711662 - RNA, 19 nt, Homo sapiens
  misc_RNA (1)...(19): siRNA sense strand
aagccgaaaugcacacaug

SEQ ID NO: 711663 - RNA, 19 nt, Homo sapiens
  misc_RNA (1)...(19): siRNA sense strand
ugugaugguugcucuggaa

SEQ ID NO: 711664 - RNA, 19 nt, Homo sapiens
  misc_RNA (1)...(19): siRNA sense strand
aagcugacaugcuccaucu

SEQ ID NO: 711665 - RNA, 19 nt, Homo sapiens
  misc_RNA (1)...(19): siRNA sense strand
ccagcugagucugaucaaa

SEQ ID NO: 711666 - RNA, 19 nt, Homo sapiens
  misc_RNA (1)...(19): siRNA sense strand
gaggacagucagcugaaga

SEQ ID NO: 711667 - RNA, 19 nt, Homo sapiens
  misc_RNA (1)...(19): siRNA sense strand
guggcaaagucuucuucaa

SEQ ID NO: 711668 - RNA, 19 nt, Homo sapiens
  misc_RNA (1)...(19): siRNA sense strand
acuagccacuuacagcaaa

SEQ ID NO: 711669 - RNA, 19 nt, Homo sapiens
  misc_RNA (1)...(19): siRNA sense strand
ccagguggagggaccaauu

SEQ ID NO: 711670 - RNA, 19 nt, Homo sapiens
  misc_RNA (1)...(19): siRNA sense strand
ccagguguuugccaaccaa

SEQ ID NO: 711671 - RNA, 19 nt, Homo sapiens
  misc_RNA (1)...(19): siRNA sense strand
acugauggcuaccaauaca

SEQ ID NO: 711672 - RNA, 19 nt, Homo sapiens
  misc_RNA (1)...(19): siRNA sense strand
gcuucagggugacgcagaa

SEQ ID NO: 711673 - RNA, 19 nt, Homo sapiens
  misc_RNA (1)...(19): siRNA sense strand
uggaagaggcugaaguugu

SEQ ID NO: 711674 - RNA, 19 nt, Homo sapiens
  misc_RNA (1)...(19): siRNA sense strand
ugggaggugucauggaaga

SEQ ID NO: 711675 - RNA, 19 nt, Homo sapiens
  misc_RNA (1)...(19): siRNA sense strand
guacagaagauggugaagu

SEQ ID NO: 711676 - RNA, 19 nt, Homo sapiens
  misc_RNA (1)...(19): siRNA sense strand
gcucggggcucuucagcaa

SEQ ID NO: 711677 - RNA, 19 nt, Homo sapiens
  misc_RNA (1)...(19): siRNA sense strand
ggaguguggcaaagucuuc

SEQ ID NO: 711678 - RNA, 19 nt, Homo sapiens
  misc_RNA (1)...(19): siRNA sense strand
caaaagaagaagagaguga

SEQ ID NO: 711679 - RNA, 19 nt, Homo sapiens
  misc_RNA (1)...(19): siRNA sense strand
gaaauccacaaaagaagaa

SEQ ID NO: 711680 - RNA, 19 nt, Homo sapiens
  misc_RNA (1)...(19): siRNA sense strand
gugaagaagaagaagaguu

SEQ ID NO: 711681 - RNA, 19 nt, Homo sapiens
  misc_RNA (1)...(19): siRNA sense strand
guggaccucccuagaaaga

SEQ ID NO: 711682 - RNA, 19 nt, Homo sapiens
  misc_RNA (1)...(19): siRNA sense strand
gaagcccuggccagaacua

SEQ ID NO: 711683 - RNA, 19 nt, Homo sapiens
  misc_RNA (1)...(19): siRNA sense strand
cuucagcaauguccucauc

SEQ ID NO: 711684 - RNA, 19 nt, Homo sapiens
  misc_RNA (1)...(19): siRNA sense strand
ggacaccgaucuucucuug

SEQ ID NO: 711685 - RNA, 19 nt, Homo sapiens
  misc_RNA (1)...(19): siRNA sense strand
ggaagaggcugaaguugug

SEQ ID NO: 711686 - RNA, 19 nt, Homo sapiens
  misc_RNA (1)...(19): siRNA sense strand
acaaagcacuagccacuua

SEQ ID NO: 711687 - RNA, 19 nt, Homo sapiens
  misc_RNA (1)...(19): siRNA sense strand
ugaagaagaagaagaguua

SEQ ID NO: 711688 - RNA, 19 nt, Homo sapiens
  misc_RNA (1)...(19): siRNA sense strand
gaaccugccugcccugaau

SEQ ID NO: 711689 - RNA, 19 nt, Homo sapiens
  misc_RNA (1)...(19): siRNA sense strand
ggacacgccuggcagaaau

SEQ ID NO: 711690 - RNA, 19 nt, Homo sapiens
  misc_RNA (1)...(19): siRNA sense strand
ggaccucccuagaaagaaa

SEQ ID NO: 711691 - RNA, 19 nt, Homo sapiens
  misc_RNA (1)...(19): siRNA sense strand
gaaccacgcaucaacauug

SEQ ID NO: 711692 - RNA, 19 nt, Homo sapiens
  misc_RNA (1)...(19): siRNA sense strand
ggccaaaggugaugugaug

SEQ ID NO: 711693 - RNA, 19 nt, Homo sapiens
  misc_RNA (1)...(19): siRNA sense strand
gcaacaaauucgcccauca

SEQ ID NO: 711694 - RNA, 19 nt, Homo sapiens
  misc_RNA (1)...(19): siRNA sense strand
gaagauaggaaauccacaa

SEQ ID NO: 711695 - RNA, 19 nt, Homo sapiens
  misc_RNA (1)...(19): siRNA sense strand
caaugcagauaccucagua

SEQ ID NO: 711696 - RNA, 19 nt, Homo sapiens
  misc_RNA (1)...(19): siRNA sense strand
agaaaucccugaacuccaa

SEQ ID NO: 711697 - RNA, 19 nt, Homo sapiens
  misc_RNA (1)...(19): siRNA sense strand
acagucagcugaagaccua

SEQ ID NO: 711698 - RNA, 19 nt, Homo sapiens
  misc_RNA (1)...(19): siRNA sense strand
cccaagggcaccuguauua

SEQ ID NO: 711699 - RNA, 19 nt, Homo sapiens
  misc_RNA (1)...(19): siRNA sense strand
gcaccuguauuaugacuac

SEQ ID NO: 711700 - RNA, 19 nt, Homo sapiens
  misc_RNA (1)...(19): siRNA sense strand
gaucaaacccaucaaggau

SEQ ID NO: 711701 - RNA, 19 nt, Homo sapiens
  misc_RNA (1)...(19): siRNA sense strand
aagggcaccuguauuauga

SEQ ID NO: 711702 - RNA, 19 nt, Homo sapiens
  misc_RNA (1)...(19): siRNA sense strand
gaugguugcucuggaaaug

SEQ ID NO: 711703 - RNA, 19 nt, Homo sapiens
  misc_RNA (1)...(19): siRNA sense strand
gaccuacucuagugacaga

SEQ ID NO: 711704 - RNA, 19 nt, Homo sapiens
  misc_RNA (1)...(19): siRNA sense strand
caaguggaccucccuagaa

SEQ ID NO: 711705 - RNA, 19 nt, Homo sapiens
  misc_RNA (1)...(19): siRNA sense strand
guugggaggugucauggaa

SEQ ID NO: 711706 - RNA, 19 nt, Homo sapiens
  misc_RNA (1)...(19): siRNA sense strand
acacaaggccacacuggua

SEQ ID NO: 711707 - RNA, 19 nt, Homo sapiens
  misc_RNA (1)...(19): siRNA sense strand
ggaagaagauaggaaaucc

SEQ ID NO: 711708 - RNA, 19 nt, Homo sapiens
  misc_RNA (1)...(19): siRNA sense strand
caaaggugaugugaugguu

SEQ ID NO: 711709 - RNA, 19 nt, Homo sapiens
  misc_RNA (1)...(19): siRNA sense strand
gagagcagacuguagaugu

SEQ ID NO: 711710 - RNA, 19 nt, Homo sapiens
  misc_RNA (1)...(19): siRNA sense strand
acaccgaucuucucuugga

SEQ ID NO: 711711 - RNA, 19 nt, Homo sapiens
  misc_RNA (1)...(19): siRNA sense strand
ucccugaacuccaagauau

SEQ ID NO: 711712 - RNA, 19 nt, Homo sapiens
  misc_RNA (1)...(19): siRNA sense strand
ucaagaccgugcaggagaa

SEQ ID NO: 711713 - RNA, 19 nt, Homo sapiens
  misc_RNA (1)...(19): siRNA sense strand
gggugacgcagaacuauaa

SEQ ID NO: 711714 - RNA, 19 nt, Homo sapiens
  misc_RNA (1)...(19): siRNA sense strand
caagggcaccuguauuaug

SEQ ID NO: 711715 - RNA, 19 nt, Homo sapiens
  misc_RNA (1)...(19): siRNA sense strand
cugaagaccuacucuagug

SEQ ID NO: 711716 - RNA, 19 nt, Homo sapiens
  misc_RNA (1)...(19): siRNA sense strand
caaggaguguggcaaaguc

SEQ ID NO: 711717 - RNA, 19 nt, Homo sapiens
  misc_RNA (1)...(19): siRNA sense strand
gcuuugcacucucuguuug

SEQ ID NO: 711718 - RNA, 19 nt, Homo sapiens
  misc_RNA (1)...(19): siRNA sense strand
ggaagcaucagccgagugu

SEQ ID NO: 711719 - RNA, 19 nt, Homo sapiens
  misc_RNA (1)...(19): siRNA sense strand
uacagaagauggugaaguc

SEQ ID NO: 711720 - RNA, 19 nt, Homo sapiens
  misc_RNA (1)...(19): siRNA sense strand
ugugacaagugaagaagaa

SEQ ID NO: 711721 - RNA, 19 nt, Homo sapiens
  misc_RNA (1)...(19): siRNA sense strand
ugcagcagcaccaguauua

SEQ ID NO: 711722 - RNA, 19 nt, Homo sapiens
  misc_RNA (1)...(19): siRNA sense strand
gauaggaaauccacaaaag

SEQ ID NO: 711723 - RNA, 19 nt, Homo sapiens
  misc_RNA (1)...(19): siRNA sense strand
aaguggaccucccuagaaa

SEQ ID NO: 711724 - RNA, 19 nt, Homo sapiens
  misc_RNA (1)...(19): siRNA sense strand
gcaguuugaugccaagaac

SEQ ID NO: 711725 - RNA, 19 nt, Homo sapiens
  misc_RNA (1)...(19): siRNA sense strand
ggauccaccucaacaacau

SEQ ID NO: 711726 - RNA, 19 nt, Homo sapiens
  misc_RNA (1)...(19): siRNA sense strand
gucauccuuuagcaaauua

SEQ ID NO: 711727 - RNA, 19 nt, Homo sapiens
  misc_RNA (1)...(19): siRNA sense strand
gacaagugaagaagaagaa

SEQ ID NO: 711728 - RNA, 19 nt, Homo sapiens
  misc_RNA (1)...(19): siRNA sense strand
agagugaggugccgaaguc

SEQ ID NO: 711729 - RNA, 19 nt, Homo sapiens
  misc_RNA (1)...(19): siRNA sense strand
ucacagcacaugcaacaga

SEQ ID NO: 711730 - RNA, 19 nt, Homo sapiens
  misc_RNA (1)...(19): siRNA sense strand
gacuguagauguugaacca

SEQ ID NO: 711731 - RNA, 19 nt, Homo sapiens
  misc_RNA (1)...(19): siRNA sense strand
caacauuggcuugagauuc

SEQ ID NO: 711732 - RNA, 19 nt, Homo sapiens
  misc_RNA (1)...(19): siRNA sense strand
ccaagaacaagcugacaug

SEQ ID NO: 711733 - RNA, 19 nt, Homo sapiens
  misc_RNA (1)...(19): siRNA sense strand
gcaguugggaggugucaug

SEQ ID NO: 711734 - RNA, 19 nt, Homo sapiens
  misc_RNA (1)...(19): siRNA sense strand
agagcagacuguagauguu

SEQ ID NO: 711735 - RNA, 19 nt, Homo sapiens
  misc_RNA (1)...(19): siRNA sense strand
agacgcagccgcaacaaau

SEQ ID NO: 711736 - RNA, 19 nt, Homo sapiens
  misc_RNA (1)...(19): siRNA sense strand
ggaggacccggaagaagau

SEQ ID NO: 711737 - RNA, 19 nt, Homo sapiens
  misc_RNA (1)...(19): siRNA sense strand
ggaggaggacccggaagaa

SEQ ID NO: 711738 - RNA, 19 nt, Homo sapiens
  misc_RNA (1)...(19): siRNA sense strand
agaagauggugaaguccaa

SEQ ID NO: 711739 - RNA, 19 nt, Homo sapiens
  misc_RNA (1)...(19): siRNA sense strand
ugucauccuuuagcaaauu

SEQ ID NO: 711740 - RNA, 19 nt, Homo sapiens
  misc_RNA (1)...(19): siRNA sense strand
ugaauuugcuuugcacucu

SEQ ID NO: 711741 - RNA, 19 nt, Homo sapiens
  misc_RNA (1)...(19): siRNA sense strand
guggagggaccaauucuga

SEQ ID NO: 711742 - RNA, 19 nt, Homo sapiens
  misc_RNA (1)...(19): siRNA sense strand
ccaucugccugaaggaguu

SEQ ID NO: 711743 - RNA, 19 nt, Homo sapiens
  misc_RNA (1)...(19): siRNA sense strand
cauggaagaggcugaaguu

SEQ ID NO: 711744 - RNA, 19 nt, Homo sapiens
  misc_RNA (1)...(19): siRNA sense strand
ccgaaaugcacacaugaaa

SEQ ID NO: 711745 - RNA, 19 nt, Homo sapiens
  misc_RNA (1)...(19): siRNA sense strand
gagcagacuguagauguug

SEQ ID NO: 711746 - RNA, 19 nt, Homo sapiens
  misc_RNA (1)...(19): siRNA sense strand
gagcagcagcagcaacaga

SEQ ID NO: 711747 - RNA, 19 nt, Homo sapiens
  misc_RNA (1)...(19): siRNA sense strand
ccgaucuucucuuggauga

SEQ ID NO: 711748 - RNA, 19 nt, Homo sapiens
  misc_RNA (1)...(19): siRNA sense strand
caagugaagaagaagaaga

SEQ ID NO: 711749 - RNA, 19 nt, Homo sapiens
  misc_RNA (1)...(19): siRNA sense strand
ccacuuacagcaaagacuu

SEQ ID NO: 711750 - RNA, 19 nt, Homo sapiens
  misc_RNA (1)...(19): siRNA sense strand
aagcagaaaucccugaacu

SEQ ID NO: 711751 - RNA, 19 nt, Homo sapiens
  misc_RNA (1)...(19): siRNA sense strand
cagaugcaccuaccugaug

SEQ ID NO: 711752 - RNA, 19 nt, Homo sapiens
  misc_RNA (1)...(19): siRNA sense strand
guaucuccaugcaagaaau

SEQ ID NO: 711753 - RNA, 19 nt, Homo sapiens
  misc_RNA (1)...(19): siRNA sense strand
gcaaggaguguggcaaagu

SEQ ID NO: 711754 - RNA, 19 nt, Homo sapiens
  misc_RNA (1)...(19): siRNA sense strand
gaggaacaacagaggcaaa

SEQ ID NO: 711755 - RNA, 19 nt, Homo sapiens
  misc_RNA (1)...(19): siRNA sense strand
aagccgaaaugcacacaug

SEQ ID NO: 711756 - RNA, 19 nt, Homo sapiens
  misc_RNA (1)...(19): siRNA sense strand
ugugaugguugcucuggaa

SEQ ID NO: 711757 - RNA, 19 nt, Homo sapiens
  misc_RNA (1)...(19): siRNA sense strand
aagcugacaugcuccaucu

SEQ ID NO: 711758 - RNA, 19 nt, Homo sapiens
  misc_RNA (1)...(19): siRNA sense strand
ccagcugagucugaucaaa

SEQ ID NO: 711759 - RNA, 19 nt, Homo sapiens
  misc_RNA (1)...(19): siRNA sense strand
gaggacagucagcugaaga

SEQ ID NO: 711760 - RNA, 19 nt, Homo sapiens
  misc_RNA (1)...(19): siRNA sense strand
guggcaaagucuucuucaa

SEQ ID NO: 711761 - RNA, 19 nt, Homo sapiens
  misc_RNA (1)...(19): siRNA sense strand
acuagccacuuacagcaaa

SEQ ID NO: 711762 - RNA, 19 nt, Homo sapiens
  misc_RNA (1)...(19): siRNA sense strand
ccagguggagggaccaauu

SEQ ID NO: 711763 - RNA, 19 nt, Homo sapiens
  misc_RNA (1)...(19): siRNA sense strand
guacagaagauggugaagu

SEQ ID NO: 711764 - RNA, 19 nt, Homo sapiens
  misc_RNA (1)...(19): siRNA sense strand
gcuucagggugacgcagaa

SEQ ID NO: 711765 - RNA, 19 nt, Homo sapiens
  misc_RNA (1)...(19): siRNA sense strand
uggaagaggcugaaguugu

SEQ ID NO: 711766 - RNA, 19 nt, Homo sapiens
  misc_RNA (1)...(19): siRNA sense strand
ugggaggugucauggaaga

SEQ ID NO: 711767 - RNA, 19 nt, Homo sapiens
  misc_RNA (1)...(19): siRNA sense strand
gcugaagaccuacucuagu

SEQ ID NO: 711768 - RNA, 19 nt, Homo sapiens
  misc_RNA (1)...(19): siRNA sense strand
ggaguguggcaaagucuuc

SEQ ID NO: 711769 - RNA, 19 nt, Homo sapiens
  misc_RNA (1)...(19): siRNA sense strand
caaaagaagaagagaguga

SEQ ID NO: 711770 - RNA, 19 nt, Homo sapiens
  misc_RNA (1)...(19): siRNA sense strand
gaaauccacaaaagaagaa

SEQ ID NO: 711771 - RNA, 19 nt, Homo sapiens
  misc_RNA (1)...(19): siRNA sense strand
gugaagaagaagaagaguu

SEQ ID NO: 711772 - RNA, 19 nt, Homo sapiens
  misc_RNA (1)...(19): siRNA sense strand
guggaccucccuagaaaga

SEQ ID NO: 711773 - RNA, 19 nt, Homo sapiens
  misc_RNA (1)...(19): siRNA sense strand
gaagcccuggccagaacua

SEQ ID NO: 711774 - RNA, 19 nt, Homo sapiens
  misc_RNA (1)...(19): siRNA sense strand
cuucagcaauguccucauc

SEQ ID NO: 711775 - RNA, 19 nt, Homo sapiens
  misc_RNA (1)...(19): siRNA sense strand
gcucggggcucuucagcaa

SEQ ID NO: 711776 - RNA, 19 nt, Homo sapiens
  misc_RNA (1)...(19): siRNA sense strand
ucaaguggccaacccaaag

SEQ ID NO: 711777 - RNA, 19 nt, Homo sapiens
  misc_RNA (1)...(19): siRNA sense strand
gcaggguucaaugcagaua

SEQ ID NO: 711778 - RNA, 19 nt, Homo sapiens
  misc_RNA (1)...(19): siRNA sense strand
gaccagcugagucugauca

SEQ ID NO: 711779 - RNA, 19 nt, Homo sapiens
  misc_RNA (1)...(19): siRNA sense strand
gaaaugcacacaugaaaac

SEQ ID NO: 711780 - RNA, 19 nt, Homo sapiens
  misc_RNA (1)...(19): siRNA sense strand
ggaaauccacaaaagaaga

SEQ ID NO: 711781 - RNA, 19 nt, Homo sapiens
  misc_RNA (1)...(19): siRNA sense strand
aaugucauccuuuagcaaa

SEQ ID NO: 711782 - RNA, 19 nt, Homo sapiens
  misc_RNA (1)...(19): siRNA sense strand
cuucugaauuugugcuguu

SEQ ID NO: 711783 - RNA, 19 nt, Homo sapiens
  misc_RNA (1)...(19): siRNA sense strand
gcccuggccagaacuagaa

SEQ ID NO: 711784 - RNA, 19 nt, Homo sapiens
  misc_RNA (1)...(19): siRNA sense strand
ggacaccgaucuucucuug

SEQ ID NO: 711785 - RNA, 19 nt, Homo sapiens
  misc_RNA (1)...(19): siRNA sense strand
ggaagaggcugaaguugug

SEQ ID NO: 711786 - RNA, 19 nt, Homo sapiens
  misc_RNA (1)...(19): siRNA sense strand
acaaagcacuagccacuua

SEQ ID NO: 711787 - RNA, 19 nt, Homo sapiens
  misc_RNA (1)...(19): siRNA sense strand
ugaagaagaagaagaguua

SEQ ID NO: 711788 - RNA, 19 nt, Homo sapiens
  misc_RNA (1)...(19): siRNA sense strand
gaaccugccugcccugaau

SEQ ID NO: 711789 - RNA, 19 nt, Homo sapiens
  misc_RNA (1)...(19): siRNA sense strand
ggacacgccuggcagaaau

SEQ ID NO: 711790 - RNA, 19 nt, Homo sapiens
  misc_RNA (1)...(19): siRNA sense strand
ggaccucccuagaaagaaa

SEQ ID NO: 711791 - RNA, 19 nt, Homo sapiens
  misc_RNA (1)...(19): siRNA sense strand
gaaccacgcaucaacauug

SEQ ID NO: 711792 - RNA, 19 nt, Homo sapiens
  misc_RNA (1)...(19): siRNA sense strand
ggccaaaggugaugugaug

SEQ ID NO: 711793 - RNA, 19 nt, Homo sapiens
  misc_RNA (1)...(19): siRNA sense strand
gcaacaaauucgcccauca

SEQ ID NO: 711794 - RNA, 19 nt, Homo sapiens
  misc_RNA (1)...(19): siRNA sense strand
gaagauaggaaauccacaa

SEQ ID NO: 711795 - RNA, 19 nt, Homo sapiens
  misc_RNA (1)...(19): siRNA sense strand
caaugcagauaccucagua

SEQ ID NO: 711796 - RNA, 19 nt, Homo sapiens
  misc_RNA (1)...(19): siRNA sense strand
agaaaucccugaacuccaa

SEQ ID NO: 711797 - RNA, 19 nt, Homo sapiens
  misc_RNA (1)...(19): siRNA sense strand
acagucagcugaagaccua

SEQ ID NO: 711798 - RNA, 19 nt, Homo sapiens
  misc_RNA (1)...(19): siRNA sense strand
cccaagggcaccuguauua

SEQ ID NO: 711799 - RNA, 19 nt, Homo sapiens
  misc_RNA (1)...(19): siRNA sense strand
gcaccuguauuaugacuac

SEQ ID NO: 711800 - RNA, 19 nt, Homo sapiens
  misc_RNA (1)...(19): siRNA sense strand
gaucaaacccaucaaggau

SEQ ID NO: 711801 - RNA, 19 nt, Homo sapiens
  misc_RNA (1)...(19): siRNA sense strand
aagggcaccuguauuauga

SEQ ID NO: 711802 - RNA, 19 nt, Homo sapiens
  misc_RNA (1)...(19): siRNA sense strand
gaugguugcucuggaaaug

SEQ ID NO: 711803 - RNA, 19 nt, Homo sapiens
  misc_RNA (1)...(19): siRNA sense strand
gaccuacucuagugacaga

SEQ ID NO: 711804 - RNA, 19 nt, Homo sapiens
  misc_RNA (1)...(19): siRNA sense strand
caaguggaccucccuagaa

SEQ ID NO: 711805 - RNA, 19 nt, Homo sapiens
  misc_RNA (1)...(19): siRNA sense strand
guugggaggugucauggaa

SEQ ID NO: 711806 - RNA, 19 nt, Homo sapiens
  misc_RNA (1)...(19): siRNA sense strand
acacaaggccacacuggua

SEQ ID NO: 711807 - RNA, 19 nt, Homo sapiens
  misc_RNA (1)...(19): siRNA sense strand
ggaagaagauaggaaaucc

SEQ ID NO: 711808 - RNA, 19 nt, Homo sapiens
  misc_RNA (1)...(19): siRNA sense strand
caaaggugaugugaugguu

SEQ ID NO: 711809 - RNA, 19 nt, Homo sapiens
  misc_RNA (1)...(19): siRNA sense strand
gagagcagacuguagaugu

SEQ ID NO: 711810 - RNA, 19 nt, Homo sapiens
  misc_RNA (1)...(19): siRNA sense strand
acaccgaucuucucuugga

SEQ ID NO: 711811 - RNA, 19 nt, Homo sapiens
  misc_RNA (1)...(19): siRNA sense strand
ucccugaacuccaagauau

SEQ ID NO: 711812 - RNA, 19 nt, Homo sapiens
  misc_RNA (1)...(19): siRNA sense strand
ucaagaccgugcaggagaa

SEQ ID NO: 711813 - RNA, 19 nt, Homo sapiens
  misc_RNA (1)...(19): siRNA sense strand
gggugacgcagaacuauaa

SEQ ID NO: 711814 - RNA, 19 nt, Homo sapiens
  misc_RNA (1)...(19): siRNA sense strand
caagggcaccuguauuaug

SEQ ID NO: 711815 - RNA, 19 nt, Homo sapiens
  misc_RNA (1)...(19): siRNA sense strand
cugaagaccuacucuagug

SEQ ID NO: 711816 - RNA, 19 nt, Homo sapiens
  misc_RNA (1)...(19): siRNA sense strand
caaggaguguggcaaaguc

SEQ ID NO: 711817 - RNA, 19 nt, Homo sapiens
  misc_RNA (1)...(19): siRNA sense strand
gcuuugcacucucuguuug

SEQ ID NO: 711818 - RNA, 19 nt, Homo sapiens
  misc_RNA (1)...(19): siRNA sense strand
ggaagcaucagccgagugu

SEQ ID NO: 711819 - RNA, 19 nt, Homo sapiens
  misc_RNA (1)...(19): siRNA sense strand
uacagaagauggugaaguc

SEQ ID NO: 711820 - RNA, 19 nt, Homo sapiens
  misc_RNA (1)...(19): siRNA sense strand
ugugacaagugaagaagaa

SEQ ID NO: 711821 - RNA, 19 nt, Homo sapiens
  misc_RNA (1)...(19): siRNA sense strand
ugcagcagcaccaguauua

SEQ ID NO: 711822 - RNA, 19 nt, Homo sapiens
  misc_RNA (1)...(19): siRNA sense strand
gauaggaaauccacaaaag

SEQ ID NO: 711823 - RNA, 19 nt, Homo sapiens
  misc_RNA (1)...(19): siRNA sense strand
aaguggaccucccuagaaa

SEQ ID NO: 711824 - RNA, 19 nt, Homo sapiens
  misc_RNA (1)...(19): siRNA sense strand
gcaguuugaugccaagaac

SEQ ID NO: 711825 - RNA, 19 nt, Homo sapiens
  misc_RNA (1)...(19): siRNA sense strand
ggauccaccucaacaacau

SEQ ID NO: 711826 - RNA, 19 nt, Homo sapiens
  misc_RNA (1)...(19): siRNA sense strand
gucauccuuuagcaaauua

SEQ ID NO: 711827 - RNA, 19 nt, Homo sapiens
  misc_RNA (1)...(19): siRNA sense strand
gacaagugaagaagaagaa

SEQ ID NO: 711828 - RNA, 19 nt, Homo sapiens
  misc_RNA (1)...(19): siRNA sense strand
agagugaggugccgaaguc

SEQ ID NO: 711829 - RNA, 19 nt, Homo sapiens
  misc_RNA (1)...(19): siRNA sense strand
ucacagcacaugcaacaga

SEQ ID NO: 711830 - RNA, 19 nt, Homo sapiens
  misc_RNA (1)...(19): siRNA sense strand
gacuguagauguugaacca

SEQ ID NO: 711831 - RNA, 19 nt, Homo sapiens
  misc_RNA (1)...(19): siRNA sense strand
caacauuggcuugagauuc

SEQ ID NO: 711832 - RNA, 19 nt, Homo sapiens
  misc_RNA (1)...(19): siRNA sense strand
ccaagaacaagcugacaug

SEQ ID NO: 711833 - RNA, 19 nt, Homo sapiens
  misc_RNA (1)...(19): siRNA sense strand
gcaguugggaggugucaug

SEQ ID NO: 711834 - RNA, 19 nt, Homo sapiens
  misc_RNA (1)...(19): siRNA sense strand
agagcagacuguagauguu

SEQ ID NO: 711835 - RNA, 19 nt, Homo sapiens
  misc_RNA (1)...(19): siRNA sense strand
agacgcagccgcaacaaau

SEQ ID NO: 711836 - RNA, 19 nt, Homo sapiens
  misc_RNA (1)...(19): siRNA sense strand
ggaggacccggaagaagau

SEQ ID NO: 711837 - RNA, 19 nt, Homo sapiens
  misc_RNA (1)...(19): siRNA sense strand
ggaggaggacccggaagaa

SEQ ID NO: 711838 - RNA, 19 nt, Homo sapiens
  misc_RNA (1)...(19): siRNA sense strand
agaagauggugaaguccaa

SEQ ID NO: 711839 - RNA, 19 nt, Homo sapiens
  misc_RNA (1)...(19): siRNA sense strand
ugucauccuuuagcaaauu

SEQ ID NO: 711840 - RNA, 19 nt, Homo sapiens
  misc_RNA (1)...(19): siRNA sense strand
ugaauuugcuuugcacucu

SEQ ID NO: 711841 - RNA, 19 nt, Homo sapiens
  misc_RNA (1)...(19): siRNA sense strand
guggagggaccaauucuga

SEQ ID NO: 711842 - RNA, 19 nt, Homo sapiens
  misc_RNA (1)...(19): siRNA sense strand
ccaucugccugaaggaguu

SEQ ID NO: 711843 - RNA, 19 nt, Homo sapiens
  misc_RNA (1)...(19): siRNA sense strand
cauggaagaggcugaaguu

SEQ ID NO: 711844 - RNA, 19 nt, Homo sapiens
  misc_RNA (1)...(19): siRNA sense strand
ccgaaaugcacacaugaaa

SEQ ID NO: 711845 - RNA, 19 nt, Homo sapiens
  misc_RNA (1)...(19): siRNA sense strand
gagcagacuguagauguug

SEQ ID NO: 711846 - RNA, 19 nt, Homo sapiens
  misc_RNA (1)...(19): siRNA sense strand
gagcagcagcagcaacaga

SEQ ID NO: 711847 - RNA, 19 nt, Homo sapiens
  misc_RNA (1)...(19): siRNA sense strand
ccgaucuucucuuggauga

SEQ ID NO: 711848 - RNA, 19 nt, Homo sapiens
  misc_RNA (1)...(19): siRNA sense strand
caagugaagaagaagaaga

SEQ ID NO: 711849 - RNA, 19 nt, Homo sapiens
  misc_RNA (1)...(19): siRNA sense strand
ccacuuacagcaaagacuu

SEQ ID NO: 711850 - RNA, 19 nt, Homo sapiens
  misc_RNA (1)...(19): siRNA sense strand
aagcagaaaucccugaacu

SEQ ID NO: 711851 - RNA, 19 nt, Homo sapiens
  misc_RNA (1)...(19): siRNA sense strand
cagaugcaccuaccugaug

SEQ ID NO: 711852 - RNA, 19 nt, Homo sapiens
  misc_RNA (1)...(19): siRNA sense strand
guaucuccaugcaagaaau

SEQ ID NO: 711853 - RNA, 19 nt, Homo sapiens
  misc_RNA (1)...(19): siRNA sense strand
gcaaggaguguggcaaagu

SEQ ID NO: 711854 - RNA, 19 nt, Homo sapiens
  misc_RNA (1)...(19): siRNA sense strand
gaggaacaacagaggcaaa

SEQ ID NO: 711855 - RNA, 19 nt, Homo sapiens
  misc_RNA (1)...(19): siRNA sense strand
aagccgaaaugcacacaug

SEQ ID NO: 711856 - RNA, 19 nt, Homo sapiens
  misc_RNA (1)...(19): siRNA sense strand
ugugaugguugcucuggaa

SEQ ID NO: 711857 - RNA, 19 nt, Homo sapiens
  misc_RNA (1)...(19): siRNA sense strand
aagcugacaugcuccaucu

SEQ ID NO: 711858 - RNA, 19 nt, Homo sapiens
  misc_RNA (1)...(19): siRNA sense strand
ccagcugagucugaucaaa

SEQ ID NO: 711859 - RNA, 19 nt, Homo sapiens
  misc_RNA (1)...(19): siRNA sense strand
gaggacagucagcugaaga

SEQ ID NO: 711860 - RNA, 19 nt, Homo sapiens
  misc_RNA (1)...(19): siRNA sense strand
guggcaaagucuucuucaa

SEQ ID NO: 711861 - RNA, 19 nt, Homo sapiens
  misc_RNA (1)...(19): siRNA sense strand
acuagccacuuacagcaaa

SEQ ID NO: 711862 - RNA, 19 nt, Homo sapiens
  misc_RNA (1)...(19): siRNA sense strand
ccagguggagggaccaauu

SEQ ID NO: 711863 - RNA, 19 nt, Homo sapiens
  misc_RNA (1)...(19): siRNA sense strand
guacagaagauggugaagu

SEQ ID NO: 711864 - RNA, 19 nt, Homo sapiens
  misc_RNA (1)...(19): siRNA sense strand
gcuucagggugacgcagaa

SEQ ID NO: 711865 - RNA, 19 nt, Homo sapiens
  misc_RNA (1)...(19): siRNA sense strand
uggaagaggcugaaguugu

SEQ ID NO: 711866 - RNA, 19 nt, Homo sapiens
  misc_RNA (1)...(19): siRNA sense strand
ugggaggugucauggaaga

SEQ ID NO: 711867 - RNA, 19 nt, Homo sapiens
  misc_RNA (1)...(19): siRNA sense strand
gcugaagaccuacucuagu

SEQ ID NO: 711868 - RNA, 19 nt, Homo sapiens
  misc_RNA (1)...(19): siRNA sense strand
ggaguguggcaaagucuuc

SEQ ID NO: 711869 - RNA, 19 nt, Homo sapiens
  misc_RNA (1)...(19): siRNA sense strand
caaaagaagaagagaguga

SEQ ID NO: 711870 - RNA, 19 nt, Homo sapiens
  misc_RNA (1)...(19): siRNA sense strand
gaaauccacaaaagaagaa

SEQ ID NO: 711871 - RNA, 19 nt, Homo sapiens
  misc_RNA (1)...(19): siRNA sense strand
gugaagaagaagaagaguu

SEQ ID NO: 711872 - RNA, 19 nt, Homo sapiens
  misc_RNA (1)...(19): siRNA sense strand
guggaccucccuagaaaga

SEQ ID NO: 711873 - RNA, 19 nt, Homo sapiens
  misc_RNA (1)...(19): siRNA sense strand
gaagcccuggccagaacua

SEQ ID NO: 711874 - RNA, 19 nt, Homo sapiens
  misc_RNA (1)...(19): siRNA sense strand
cuucagcaauguccucauc

SEQ ID NO: 711875 - RNA, 19 nt, Homo sapiens
  misc_RNA (1)...(19): siRNA sense strand
gcucggggcucuucagcaa

SEQ ID NO: 711876 - RNA, 19 nt, Homo sapiens
  misc_RNA (1)...(19): siRNA sense strand
ucaaguggccaacccaaag

SEQ ID NO: 711877 - RNA, 19 nt, Homo sapiens
  misc_RNA (1)...(19): siRNA sense strand
gcaggguucaaugcagaua

SEQ ID NO: 711878 - RNA, 19 nt, Homo sapiens
  misc_RNA (1)...(19): siRNA sense strand
gaccagcugagucugauca

SEQ ID NO: 711879 - RNA, 19 nt, Homo sapiens
  misc_RNA (1)...(19): siRNA sense strand
gaaaugcacacaugaaaac

SEQ ID NO: 711880 - RNA, 19 nt, Homo sapiens
  misc_RNA (1)...(19): siRNA sense strand
ggaaauccacaaaagaaga

SEQ ID NO: 711881 - RNA, 19 nt, Homo sapiens
  misc_RNA (1)...(19): siRNA sense strand
aaugucauccuuuagcaaa

SEQ ID NO: 711882 - RNA, 19 nt, Homo sapiens
  misc_RNA (1)...(19): siRNA sense strand
cuucugaauuugugcuguu

SEQ ID NO: 711883 - RNA, 19 nt, Homo sapiens
  misc_RNA (1)...(19): siRNA sense strand
gcccuggccagaacuagaa

SEQ ID NO: 711884 - RNA, 19 nt, Homo sapiens
  misc_RNA (1)...(19): siRNA sense strand
gaauucaggucaacaauau

SEQ ID NO: 711885 - RNA, 19 nt, Homo sapiens
  misc_RNA (1)...(19): siRNA sense strand
ggacaccgaucuucucuug

SEQ ID NO: 711886 - RNA, 19 nt, Homo sapiens
  misc_RNA (1)...(19): siRNA sense strand
ggaagaggcugaaguugug

SEQ ID NO: 711887 - RNA, 19 nt, Homo sapiens
  misc_RNA (1)...(19): siRNA sense strand
acaaagcacuagccacuua

SEQ ID NO: 711888 - RNA, 19 nt, Homo sapiens
  misc_RNA (1)...(19): siRNA sense strand
ugaagaagaagaagaguua

SEQ ID NO: 711889 - RNA, 19 nt, Homo sapiens
  misc_RNA (1)...(19): siRNA sense strand
gaaccugccugcccugaau

SEQ ID NO: 711890 - RNA, 19 nt, Homo sapiens
  misc_RNA (1)...(19): siRNA sense strand
ggacacgccuggcagaaau

SEQ ID NO: 711891 - RNA, 19 nt, Homo sapiens
  misc_RNA (1)...(19): siRNA sense strand
ggaccucccuagaaagaaa

SEQ ID NO: 711892 - RNA, 19 nt, Homo sapiens
  misc_RNA (1)...(19): siRNA sense strand
gaaccacgcaucaacauug

SEQ ID NO: 711893 - RNA, 19 nt, Homo sapiens
  misc_RNA (1)...(19): siRNA sense strand
ggccaaaggugaugugaug

SEQ ID NO: 711894 - RNA, 19 nt, Homo sapiens
  misc_RNA (1)...(19): siRNA sense strand
uacacaagcuggacucuuu

SEQ ID NO: 711895 - RNA, 19 nt, Homo sapiens
  misc_RNA (1)...(19): siRNA sense strand
gcaacaaauucgcccauca

SEQ ID NO: 711896 - RNA, 19 nt, Homo sapiens
  misc_RNA (1)...(19): siRNA sense strand
gaagauaggaaauccacaa

SEQ ID NO: 711897 - RNA, 19 nt, Homo sapiens
  misc_RNA (1)...(19): siRNA sense strand
caaugcagauaccucagua

SEQ ID NO: 711898 - RNA, 19 nt, Homo sapiens
  misc_RNA (1)...(19): siRNA sense strand
agaaaucccugaacuccaa

SEQ ID NO: 711899 - RNA, 19 nt, Homo sapiens
  misc_RNA (1)...(19): siRNA sense strand
acagucagcugaagaccua

SEQ ID NO: 711900 - RNA, 19 nt, Homo sapiens
  misc_RNA (1)...(19): siRNA sense strand
ccacugauggcuaccaaua

SEQ ID NO: 711901 - RNA, 19 nt, Homo sapiens
  misc_RNA (1)...(19): siRNA sense strand
cccaagggcaccuguauua

SEQ ID NO: 711902 - RNA, 19 nt, Homo sapiens
  misc_RNA (1)...(19): siRNA sense strand
gcaccuguauuaugacuac

SEQ ID NO: 711903 - RNA, 19 nt, Homo sapiens
  misc_RNA (1)...(19): siRNA sense strand
gaucaaacccaucaaggau

SEQ ID NO: 711904 - RNA, 19 nt, Homo sapiens
  misc_RNA (1)...(19): siRNA sense strand
aagggcaccuguauuauga

SEQ ID NO: 711905 - RNA, 19 nt, Homo sapiens
  misc_RNA (1)...(19): siRNA sense strand
gaugguugcucuggaaaug

SEQ ID NO: 711906 - RNA, 19 nt, Homo sapiens
  misc_RNA (1)...(19): siRNA sense strand
gaccuacucuagugacaga

SEQ ID NO: 711907 - RNA, 19 nt, Homo sapiens
  misc_RNA (1)...(19): siRNA sense strand
cgaauucaggucaacaaua

SEQ ID NO: 711908 - RNA, 19 nt, Homo sapiens
  misc_RNA (1)...(19): siRNA sense strand
caaguggaccucccuagaa

SEQ ID NO: 711909 - RNA, 19 nt, Homo sapiens
  misc_RNA (1)...(19): siRNA sense strand
guugggaggugucauggaa

SEQ ID NO: 711910 - RNA, 19 nt, Homo sapiens
  misc_RNA (1)...(19): siRNA sense strand
acacaaggccacacuggua

SEQ ID NO: 711911 - RNA, 19 nt, Homo sapiens
  misc_RNA (1)...(19): siRNA sense strand
ggaagaagauaggaaaucc

SEQ ID NO: 711912 - RNA, 19 nt, Homo sapiens
  misc_RNA (1)...(19): siRNA sense strand
caaaggugaugugaugguu

SEQ ID NO: 711913 - RNA, 19 nt, Homo sapiens
  misc_RNA (1)...(19): siRNA sense strand
gagagcagacuguagaugu

SEQ ID NO: 711914 - RNA, 19 nt, Homo sapiens
  misc_RNA (1)...(19): siRNA sense strand
acaccgaucuucucuugga

SEQ ID NO: 711915 - RNA, 19 nt, Homo sapiens
  misc_RNA (1)...(19): siRNA sense strand
ucccugaacuccaagauau

SEQ ID NO: 711916 - RNA, 19 nt, Homo sapiens
  misc_RNA (1)...(19): siRNA sense strand
caagggcaccuguauuaug

SEQ ID NO: 711917 - RNA, 19 nt, Homo sapiens
  misc_RNA (1)...(19): siRNA sense strand
gggugacgcagaacuauaa

SEQ ID NO: 711918 - RNA, 19 nt, Homo sapiens
  misc_RNA (1)...(19): siRNA sense strand
ucaagaccgugcaggagaa

SEQ ID NO: 711919 - RNA, 19 nt, Homo sapiens
  misc_RNA (1)...(19): siRNA sense strand
cugaagaccuacucuagug

SEQ ID NO: 711920 - RNA, 19 nt, Homo sapiens
  misc_RNA (1)...(19): siRNA sense strand
caaggaguguggcaaaguc

SEQ ID NO: 711921 - RNA, 19 nt, Homo sapiens
  misc_RNA (1)...(19): siRNA sense strand
gcuuugcacucucuguuug

SEQ ID NO: 711922 - RNA, 19 nt, Homo sapiens
  misc_RNA (1)...(19): siRNA sense strand
ggaagcaucagccgagugu

SEQ ID NO: 711923 - RNA, 19 nt, Homo sapiens
  misc_RNA (1)...(19): siRNA sense strand
uacagaagauggugaaguc

SEQ ID NO: 711924 - RNA, 19 nt, Homo sapiens
  misc_RNA (1)...(19): siRNA sense strand
ugugacaagugaagaagaa

SEQ ID NO: 711925 - RNA, 19 nt, Homo sapiens
  misc_RNA (1)...(19): siRNA sense strand
guacaagaccaaccaugug

SEQ ID NO: 711926 - RNA, 19 nt, Homo sapiens
  misc_RNA (1)...(19): siRNA sense strand
gauaggaaauccacaaaag

SEQ ID NO: 711927 - RNA, 19 nt, Homo sapiens
  misc_RNA (1)...(19): siRNA sense strand
aaguggaccucccuagaaa

SEQ ID NO: 711928 - RNA, 19 nt, Homo sapiens
  misc_RNA (1)...(19): siRNA sense strand
gcaguuugaugccaagaac

SEQ ID NO: 711929 - RNA, 19 nt, Homo sapiens
  misc_RNA (1)...(19): siRNA sense strand
ggauccaccucaacaacau

SEQ ID NO: 711930 - RNA, 19 nt, Homo sapiens
  misc_RNA (1)...(19): siRNA sense strand
ugcagcagcaccaguauua

SEQ ID NO: 711931 - RNA, 19 nt, Homo sapiens
  misc_RNA (1)...(19): siRNA sense strand
gucauccuuuagcaaauua

SEQ ID NO: 711932 - RNA, 19 nt, Homo sapiens
  misc_RNA (1)...(19): siRNA sense strand
ucacagcacaugcaacaga

SEQ ID NO: 711933 - RNA, 19 nt, Homo sapiens
  misc_RNA (1)...(19): siRNA sense strand
agagugaggugccgaaguc

SEQ ID NO: 711934 - RNA, 19 nt, Homo sapiens
  misc_RNA (1)...(19): siRNA sense strand
gaccagcaacuguacaaga

SEQ ID NO: 711935 - RNA, 19 nt, Homo sapiens
  misc_RNA (1)...(19): siRNA sense strand
gacaagugaagaagaagaa

SEQ ID NO: 711936 - RNA, 19 nt, Homo sapiens
  misc_RNA (1)...(19): siRNA sense strand
gacuguagauguugaacca

SEQ ID NO: 711937 - RNA, 19 nt, Homo sapiens
  misc_RNA (1)...(19): siRNA sense strand
caacauuggcuugagauuc

SEQ ID NO: 711938 - RNA, 19 nt, Homo sapiens
  misc_RNA (1)...(19): siRNA sense strand
ccaagaacaagcugacaug

SEQ ID NO: 711939 - RNA, 19 nt, Homo sapiens
  misc_RNA (1)...(19): siRNA sense strand
gcaguugggaggugucaug

SEQ ID NO: 711940 - RNA, 19 nt, Homo sapiens
  misc_RNA (1)...(19): siRNA sense strand
agagcagacuguagauguu

SEQ ID NO: 711941 - RNA, 19 nt, Homo sapiens
  misc_RNA (1)...(19): siRNA sense strand
agacgcagccgcaacaaau

SEQ ID NO: 711942 - RNA, 19 nt, Homo sapiens
  misc_RNA (1)...(19): siRNA sense strand
ggaggacccggaagaagau

SEQ ID NO: 711943 - RNA, 19 nt, Homo sapiens
  misc_RNA (1)...(19): siRNA sense strand
ggaggaggacccggaagaa

SEQ ID NO: 711944 - RNA, 19 nt, Homo sapiens
  misc_RNA (1)...(19): siRNA sense strand
agaagauggugaaguccaa

SEQ ID NO: 711945 - RNA, 19 nt, Homo sapiens
  misc_RNA (1)...(19): siRNA sense strand
ugucauccuuuagcaaauu

SEQ ID NO: 711946 - RNA, 19 nt, Homo sapiens
  misc_RNA (1)...(19): siRNA sense strand
ugaauuugcuuugcacucu

SEQ ID NO: 711947 - RNA, 19 nt, Homo sapiens
  misc_RNA (1)...(19): siRNA sense strand
guggagggaccaauucuga

SEQ ID NO: 711948 - RNA, 19 nt, Homo sapiens
  misc_RNA (1)...(19): siRNA sense strand
ccaucugccugaaggaguu

SEQ ID NO: 711949 - RNA, 19 nt, Homo sapiens
  misc_RNA (1)...(19): siRNA sense strand
cauggaagaggcugaaguu

SEQ ID NO: 711950 - RNA, 19 nt, Homo sapiens
  misc_RNA (1)...(19): siRNA sense strand
ccgaaaugcacacaugaaa

SEQ ID NO: 711951 - RNA, 19 nt, Homo sapiens
  misc_RNA (1)...(19): siRNA sense strand
gagcagacuguagauguug

SEQ ID NO: 711952 - RNA, 19 nt, Homo sapiens
  misc_RNA (1)...(19): siRNA sense strand
gagcagcagcagcaacaga

SEQ ID NO: 711953 - RNA, 19 nt, Homo sapiens
  misc_RNA (1)...(19): siRNA sense strand
ccgaucuucucuuggauga

SEQ ID NO: 711954 - RNA, 19 nt, Homo sapiens
  misc_RNA (1)...(19): siRNA sense strand
caagugaagaagaagaaga

SEQ ID NO: 711955 - RNA, 19 nt, Homo sapiens
  misc_RNA (1)...(19): siRNA sense strand
ccacuuacagcaaagacuu

SEQ ID NO: 711956 - RNA, 19 nt, Homo sapiens
  misc_RNA (1)...(19): siRNA sense strand
aagcagaaaucccugaacu

SEQ ID NO: 711957 - RNA, 19 nt, Homo sapiens
  misc_RNA (1)...(19): siRNA sense strand
gcuuaccagcggugucuua

SEQ ID NO: 711958 - RNA, 19 nt, Homo sapiens
  misc_RNA (1)...(19): siRNA sense strand
cagaugcaccuaccugaug

SEQ ID NO: 711959 - RNA, 19 nt, Homo sapiens
  misc_RNA (1)...(19): siRNA sense strand
guaucuccaugcaagaaau

SEQ ID NO: 711960 - RNA, 19 nt, Homo sapiens
  misc_RNA (1)...(19): siRNA sense strand
gcaaggaguguggcaaagu

SEQ ID NO: 711961 - RNA, 19 nt, Homo sapiens
  misc_RNA (1)...(19): siRNA sense strand
gaggaacaacagaggcaaa

SEQ ID NO: 711962 - RNA, 19 nt, Homo sapiens
  misc_RNA (1)...(19): siRNA sense strand
aagccgaaaugcacacaug

SEQ ID NO: 711963 - RNA, 19 nt, Homo sapiens
  misc_RNA (1)...(19): siRNA sense strand
ugugaugguugcucuggaa

SEQ ID NO: 711964 - RNA, 19 nt, Homo sapiens
  misc_RNA (1)...(19): siRNA sense strand
aagcugacaugcuccaucu

SEQ ID NO: 711965 - RNA, 19 nt, Homo sapiens
  misc_RNA (1)...(19): siRNA sense strand
ccagcugagucugaucaaa

SEQ ID NO: 711966 - RNA, 19 nt, Homo sapiens
  misc_RNA (1)...(19): siRNA sense strand
gaggacagucagcugaaga

SEQ ID NO: 711967 - RNA, 19 nt, Homo sapiens
  misc_RNA (1)...(19): siRNA sense strand
guggcaaagucuucuucaa

SEQ ID NO: 711968 - RNA, 19 nt, Homo sapiens
  misc_RNA (1)...(19): siRNA sense strand
acuagccacuuacagcaaa

SEQ ID NO: 711969 - RNA, 19 nt, Homo sapiens
  misc_RNA (1)...(19): siRNA sense strand
ccagguggagggaccaauu

SEQ ID NO: 711970 - RNA, 19 nt, Homo sapiens
  misc_RNA (1)...(19): siRNA sense strand
ccagguguuugccaaccaa

SEQ ID NO: 711971 - RNA, 19 nt, Homo sapiens
  misc_RNA (1)...(19): siRNA sense strand
acugauggcuaccaauaca

SEQ ID NO: 711972 - RNA, 19 nt, Homo sapiens
  misc_RNA (1)...(19): siRNA sense strand
gcuucagggugacgcagaa

SEQ ID NO: 711973 - RNA, 19 nt, Homo sapiens
  misc_RNA (1)...(19): siRNA sense strand
uggaagaggcugaaguugu

SEQ ID NO: 711974 - RNA, 19 nt, Homo sapiens
  misc_RNA (1)...(19): siRNA sense strand
ugggaggugucauggaaga

SEQ ID NO: 711975 - RNA, 19 nt, Homo sapiens
  misc_RNA (1)...(19): siRNA sense strand
guacagaagauggugaagu

SEQ ID NO: 711976 - RNA, 19 nt, Homo sapiens
  misc_RNA (1)...(19): siRNA sense strand
gcucggggcucuucagcaa

SEQ ID NO: 711977 - RNA, 19 nt, Homo sapiens
  misc_RNA (1)...(19): siRNA sense strand
ggaguguggcaaagucuuc

SEQ ID NO: 711978 - RNA, 19 nt, Homo sapiens
  misc_RNA (1)...(19): siRNA sense strand
caaaagaagaagagaguga

SEQ ID NO: 711979 - RNA, 19 nt, Homo sapiens
  misc_RNA (1)...(19): siRNA sense strand
gaaauccacaaaagaagaa

SEQ ID NO: 711980 - RNA, 19 nt, Homo sapiens
  misc_RNA (1)...(19): siRNA sense strand
gugaagaagaagaagaguu

SEQ ID NO: 711981 - RNA, 19 nt, Homo sapiens
  misc_RNA (1)...(19): siRNA sense strand
guggaccucccuagaaaga

SEQ ID NO: 711982 - RNA, 19 nt, Homo sapiens
  misc_RNA (1)...(19): siRNA sense strand
gaagcccuggccagaacua

SEQ ID NO: 711983 - RNA, 19 nt, Homo sapiens
  misc_RNA (1)...(19): siRNA sense strand
cuucagcaauguccucauc

SEQ ID NO: 711984 - RNA, 19 nt, Homo sapiens
  misc_RNA (1)...(19): siRNA sense strand
guaaauaccucuacgucuu

SEQ ID NO: 711985 - RNA, 19 nt, Homo sapiens
  misc_RNA (1)...(19): siRNA sense strand
gaucacgucuucauucuug

SEQ ID NO: 711986 - RNA, 19 nt, Homo sapiens
  misc_RNA (1)...(19): siRNA sense strand
ugaggaaggugucccacua

SEQ ID NO: 711987 - RNA, 19 nt, Homo sapiens
  misc_RNA (1)...(19): siRNA sense strand
acacgaagggccuguauuu

SEQ ID NO: 711988 - RNA, 19 nt, Homo sapiens
  misc_RNA (1)...(19): siRNA sense strand
caccaaggaucacgucuuc

SEQ ID NO: 711989 - RNA, 19 nt, Homo sapiens
  misc_RNA (1)...(19): siRNA sense strand
ugaaugagacccagcuuga

SEQ ID NO: 711990 - RNA, 19 nt, Homo sapiens
  misc_RNA (1)...(19): siRNA sense strand
ggaggcgggugaagagaag

SEQ ID NO: 711991 - RNA, 19 nt, Homo sapiens
  misc_RNA (1)...(19): siRNA sense strand
uggagcauaucaucucauu

SEQ ID NO: 711992 - RNA, 19 nt, Homo sapiens
  misc_RNA (1)...(19): siRNA sense strand
cgaagggccuguauuucca

SEQ ID NO: 711993 - RNA, 19 nt, Homo sapiens
  misc_RNA (1)...(19): siRNA sense strand
uaaauaccucuacgucuug

SEQ ID NO: 711994 - RNA, 19 nt, Homo sapiens
  misc_RNA (1)...(19): siRNA sense strand
cgauuuccauccaguuguu

SEQ ID NO: 711995 - RNA, 19 nt, Homo sapiens
  misc_RNA (1)...(19): siRNA sense strand
gagcauaucaucucauucc

SEQ ID NO: 711996 - RNA, 19 nt, Homo sapiens
  misc_RNA (1)...(19): siRNA sense strand
ggaaggaaagaucuacucu

SEQ ID NO: 711997 - RNA, 19 nt, Homo sapiens
  misc_RNA (1)...(19): siRNA sense strand
gguggagcauaucaucuca

SEQ ID NO: 711998 - RNA, 19 nt, Homo sapiens
  misc_RNA (1)...(19): siRNA sense strand
caaggaucacgucuucauu

SEQ ID NO: 711999 - RNA, 19 nt, Homo sapiens
  misc_RNA (1)...(19): siRNA sense strand
cagagcugguggagcauau

SEQ ID NO: 712000 - RNA, 19 nt, Homo sapiens
  misc_RNA (1)...(19): siRNA sense strand
gaugacauuccaccacuca

SEQ ID NO: 712001 - RNA, 19 nt, Homo sapiens
  misc_RNA (1)...(19): siRNA sense strand
acucuuugguagugaauga

SEQ ID NO: 712002 - RNA, 19 nt, Homo sapiens
  misc_RNA (1)...(19): siRNA sense strand
ccaaggaucacgucuucau

SEQ ID NO: 712003 - RNA, 19 nt, Homo sapiens
  misc_RNA (1)...(19): siRNA sense strand
caaugaccuucaagcagau

SEQ ID NO: 712004 - RNA, 19 nt, Homo sapiens
  misc_RNA (1)...(19): siRNA sense strand
gugacuguguugaggucua

SEQ ID NO: 712005 - RNA, 19 nt, Homo sapiens
  misc_RNA (1)...(19): siRNA sense strand
ugacuguguugaggucuau

SEQ ID NO: 712006 - RNA, 19 nt, Homo sapiens
  misc_RNA (1)...(19): siRNA sense strand
ugacauuccaccacucaau

SEQ ID NO: 712007 - RNA, 19 nt, Homo sapiens
  misc_RNA (1)...(19): siRNA sense strand
gagcugguggagcauauca

SEQ ID NO: 712008 - RNA, 19 nt, Homo sapiens
  misc_RNA (1)...(19): siRNA sense strand
cagaggaaggaaagaucua

SEQ ID NO: 712009 - RNA, 19 nt, Homo sapiens
  misc_RNA (1)...(19): siRNA sense strand
ccagucagagaccuuguug

SEQ ID NO: 712010 - RNA, 19 nt, Homo sapiens
  misc_RNA (1)...(19): siRNA sense strand
gccgaugucucagcaagag

SEQ ID NO: 712011 - RNA, 19 nt, Homo sapiens
  misc_RNA (1)...(19): siRNA sense strand
ucacagaggaaggaaagau

SEQ ID NO: 712012 - RNA, 19 nt, Homo sapiens
  misc_RNA (1)...(19): siRNA sense strand
cgucuucauucuugacuac

SEQ ID NO: 712013 - RNA, 19 nt, Homo sapiens
  misc_RNA (1)...(19): siRNA sense strand
gauccuauucugugcucuu

SEQ ID NO: 712014 - RNA, 19 nt, Homo sapiens
  misc_RNA (1)...(19): siRNA sense strand
ccaccaaggaucacgucuu

SEQ ID NO: 712015 - RNA, 19 nt, Homo sapiens
  misc_RNA (1)...(19): siRNA sense strand
ucugugcucuuggcuacaa

SEQ ID NO: 712016 - RNA, 19 nt, Homo sapiens
  misc_RNA (1)...(19): siRNA sense strand
gacccucuucuuccucaaa

SEQ ID NO: 712017 - RNA, 19 nt, Homo sapiens
  misc_RNA (1)...(19): siRNA sense strand
aaggaucacgucuucauuc

SEQ ID NO: 712018 - RNA, 19 nt, Homo sapiens
  misc_RNA (1)...(19): siRNA sense strand
guaaauaccucuacgucuu

SEQ ID NO: 712019 - RNA, 19 nt, Homo sapiens
  misc_RNA (1)...(19): siRNA sense strand
gaucacgucuucauucuug

SEQ ID NO: 712020 - RNA, 19 nt, Homo sapiens
  misc_RNA (1)...(19): siRNA sense strand
gcaaggaaauaacagauac

SEQ ID NO: 712021 - RNA, 19 nt, Homo sapiens
  misc_RNA (1)...(19): siRNA sense strand
ugaggaaggugucccacua

SEQ ID NO: 712022 - RNA, 19 nt, Homo sapiens
  misc_RNA (1)...(19): siRNA sense strand
gcacggagaagaugaagga

SEQ ID NO: 712023 - RNA, 19 nt, Homo sapiens
  misc_RNA (1)...(19): siRNA sense strand
gaauuuggccgaaucuuca

SEQ ID NO: 712024 - RNA, 19 nt, Homo sapiens
  misc_RNA (1)...(19): siRNA sense strand
gcucagaguucagcaagga

SEQ ID NO: 712025 - RNA, 19 nt, Homo sapiens
  misc_RNA (1)...(19): siRNA sense strand
acacgaagggccuguauuu

SEQ ID NO: 712026 - RNA, 19 nt, Homo sapiens
  misc_RNA (1)...(19): siRNA sense strand
gaagaugaaggagaucgua

SEQ ID NO: 712027 - RNA, 19 nt, Homo sapiens
  misc_RNA (1)...(19): siRNA sense strand
caccaaggaucacgucuuc

SEQ ID NO: 712028 - RNA, 19 nt, Homo sapiens
  misc_RNA (1)...(19): siRNA sense strand
ugaaugagacccagcuuga

SEQ ID NO: 712029 - RNA, 19 nt, Homo sapiens
  misc_RNA (1)...(19): siRNA sense strand
ggaugaauuuggccgaauc

SEQ ID NO: 712030 - RNA, 19 nt, Homo sapiens
  misc_RNA (1)...(19): siRNA sense strand
cggagaagaugaaggagau

SEQ ID NO: 712031 - RNA, 19 nt, Homo sapiens
  misc_RNA (1)...(19): siRNA sense strand
gaaucuucaugcaaggaaa

SEQ ID NO: 712032 - RNA, 19 nt, Homo sapiens
  misc_RNA (1)...(19): siRNA sense strand
uaacagauacgggcagcua

SEQ ID NO: 712033 - RNA, 19 nt, Homo sapiens
  misc_RNA (1)...(19): siRNA sense strand
ucagccagauccacaguug

SEQ ID NO: 712034 - RNA, 19 nt, Homo sapiens
  misc_RNA (1)...(19): siRNA sense strand
uggagcauaucaucucauu

SEQ ID NO: 712035 - RNA, 19 nt, Homo sapiens
  misc_RNA (1)...(19): siRNA sense strand
ggaggcgggugaagagaag

SEQ ID NO: 712036 - RNA, 19 nt, Homo sapiens
  misc_RNA (1)...(19): siRNA sense strand
cgaagggccuguauuucca

SEQ ID NO: 712037 - RNA, 19 nt, Homo sapiens
  misc_RNA (1)...(19): siRNA sense strand
uaaauaccucuacgucuug

SEQ ID NO: 712038 - RNA, 19 nt, Homo sapiens
  misc_RNA (1)...(19): siRNA sense strand
cgauuuccauccaguuguu

SEQ ID NO: 712039 - RNA, 19 nt, Homo sapiens
  misc_RNA (1)...(19): siRNA sense strand
gagcauaucaucucauucc

SEQ ID NO: 712040 - RNA, 19 nt, Homo sapiens
  misc_RNA (1)...(19): siRNA sense strand
ggaaggaaagaucuacucu

SEQ ID NO: 712041 - RNA, 19 nt, Homo sapiens
  misc_RNA (1)...(19): siRNA sense strand
gguggagcauaucaucuca

SEQ ID NO: 712042 - RNA, 19 nt, Homo sapiens
  misc_RNA (1)...(19): siRNA sense strand
caaggaucacgucuucauu

SEQ ID NO: 712043 - RNA, 19 nt, Homo sapiens
  misc_RNA (1)...(19): siRNA sense strand
cagagcugguggagcauau

SEQ ID NO: 712044 - RNA, 19 nt, Homo sapiens
  misc_RNA (1)...(19): siRNA sense strand
gaugacauuccaccacuca

SEQ ID NO: 712045 - RNA, 19 nt, Homo sapiens
  misc_RNA (1)...(19): siRNA sense strand
gaacaggggacaaaaugga

SEQ ID NO: 712046 - RNA, 19 nt, Homo sapiens
  misc_RNA (1)...(19): siRNA sense strand
acucuuugguagugaauga

SEQ ID NO: 712047 - RNA, 19 nt, Homo sapiens
  misc_RNA (1)...(19): siRNA sense strand
ccaaggaucacgucuucau

SEQ ID NO: 712048 - RNA, 19 nt, Homo sapiens
  misc_RNA (1)...(19): siRNA sense strand
caaugaccuucaagcagau

SEQ ID NO: 712049 - RNA, 19 nt, Homo sapiens
  misc_RNA (1)...(19): siRNA sense strand
ugaauuuggccgaaucuuc

SEQ ID NO: 712050 - RNA, 19 nt, Homo sapiens
  misc_RNA (1)...(19): siRNA sense strand
gugacuguguugaggucua

SEQ ID NO: 712051 - RNA, 19 nt, Homo sapiens
  misc_RNA (1)...(19): siRNA sense strand
gauccacaguugccaaacg

SEQ ID NO: 712052 - RNA, 19 nt, Homo sapiens
  misc_RNA (1)...(19): siRNA sense strand
ugacuguguugaggucuau

SEQ ID NO: 712053 - RNA, 19 nt, Homo sapiens
  misc_RNA (1)...(19): siRNA sense strand
agccagagcucagaguuca

SEQ ID NO: 712054 - RNA, 19 nt, Homo sapiens
  misc_RNA (1)...(19): siRNA sense strand
ugacauuccaccacucaau

SEQ ID NO: 712055 - RNA, 19 nt, Homo sapiens
  misc_RNA (1)...(19): siRNA sense strand
ugcaaggaaauaacagaua

SEQ ID NO: 712056 - RNA, 19 nt, Homo sapiens
  misc_RNA (1)...(19): siRNA sense strand
gagcugguggagcauauca

SEQ ID NO: 712057 - RNA, 19 nt, Homo sapiens
  misc_RNA (1)...(19): siRNA sense strand
cagaggaaggaaagaucua

SEQ ID NO: 712058 - RNA, 19 nt, Homo sapiens
  misc_RNA (1)...(19): siRNA sense strand
ccagucagagaccuuguug

SEQ ID NO: 712059 - RNA, 19 nt, Homo sapiens
  misc_RNA (1)...(19): siRNA sense strand
gccgaugucucagcaagag

SEQ ID NO: 712060 - RNA, 19 nt, Homo sapiens
  misc_RNA (1)...(19): siRNA sense strand
ucacagaggaaggaaagau

SEQ ID NO: 712061 - RNA, 19 nt, Homo sapiens
  misc_RNA (1)...(19): siRNA sense strand
caagucaaggucccucugu

SEQ ID NO: 712062 - RNA, 19 nt, Homo sapiens
  misc_RNA (1)...(19): siRNA sense strand
cgucuucauucuugacuac

SEQ ID NO: 712063 - RNA, 19 nt, Homo sapiens
  misc_RNA (1)...(19): siRNA sense strand
ggaccgcacggagaagaug

SEQ ID NO: 712064 - RNA, 19 nt, Homo sapiens
  misc_RNA (1)...(19): siRNA sense strand
gauccuauucugugcucuu

SEQ ID NO: 712065 - RNA, 19 nt, Homo sapiens
  misc_RNA (1)...(19): siRNA sense strand
cgaaucuucaugcaaggaa

SEQ ID NO: 712066 - RNA, 19 nt, Homo sapiens
  misc_RNA (1)...(19): siRNA sense strand
ccaccaaggaucacgucuu

SEQ ID NO: 712067 - RNA, 19 nt, Homo sapiens
  misc_RNA (1)...(19): siRNA sense strand
ccugauggccgcacagaag

SEQ ID NO: 712068 - RNA, 19 nt, Homo sapiens
  misc_RNA (1)...(19): siRNA sense strand
cagauccacaguugccaaa

SEQ ID NO: 712069 - RNA, 19 nt, Homo sapiens
  misc_RNA (1)...(19): siRNA sense strand
ucgucaagcuccaagucaa

SEQ ID NO: 712070 - RNA, 19 nt, Homo sapiens
  misc_RNA (1)...(19): siRNA sense strand
ucugugcucuuggcuacaa

SEQ ID NO: 712071 - RNA, 19 nt, Homo sapiens
  misc_RNA (1)...(19): siRNA sense strand
gacccucuucuuccucaaa

SEQ ID NO: 712072 - RNA, 19 nt, Homo sapiens
  misc_RNA (1)...(19): siRNA sense strand
aaggaucacgucuucauuc

SEQ ID NO: 712073 - RNA, 19 nt, Homo sapiens
  misc_RNA (1)...(19): siRNA sense strand
cgaaagcaguggccaauuc

SEQ ID NO: 712074 - RNA, 19 nt, Homo sapiens
  misc_RNA (1)...(19): siRNA sense strand
gcucugggcuugccuucaa

SEQ ID NO: 712075 - RNA, 19 nt, Homo sapiens
  misc_RNA (1)...(19): siRNA sense strand
ccgacugucuggacuauaa

SEQ ID NO: 712076 - RNA, 19 nt, Homo sapiens
  misc_RNA (1)...(19): siRNA sense strand
gcccuccucuuccuacuuu

SEQ ID NO: 712077 - RNA, 19 nt, Homo sapiens
  misc_RNA (1)...(19): siRNA sense strand
ggacugcagcucauaccua

SEQ ID NO: 712078 - RNA, 19 nt, Homo sapiens
  misc_RNA (1)...(19): siRNA sense strand
gaaagcaguggccaauuca

SEQ ID NO: 712079 - RNA, 19 nt, Homo sapiens
  misc_RNA (1)...(19): siRNA sense strand
ccuggaaacucaacuucaa

SEQ ID NO: 712080 - RNA, 19 nt, Homo sapiens
  misc_RNA (1)...(19): siRNA sense strand
ccucuuaucccauguccua

SEQ ID NO: 712081 - RNA, 19 nt, Homo sapiens
  misc_RNA (1)...(19): siRNA sense strand
ggagguggcgcucaagauc

SEQ ID NO: 712082 - RNA, 19 nt, Homo sapiens
  misc_RNA (1)...(19): siRNA sense strand
ccagcugccucaucuaucu

SEQ ID NO: 712083 - RNA, 19 nt, Homo sapiens
  misc_RNA (1)...(19): siRNA sense strand
ucgcuacccugacaucuuc

SEQ ID NO: 712084 - RNA, 19 nt, Homo sapiens
  misc_RNA (1)...(19): siRNA sense strand
caucaucaccacccacaug

SEQ ID NO: 712085 - RNA, 19 nt, Homo sapiens
  misc_RNA (1)...(19): siRNA sense strand
ccaccgcagcagccucuua

SEQ ID NO: 712086 - RNA, 19 nt, Homo sapiens
  misc_RNA (1)...(19): siRNA sense strand
gagguggcgcucaagauca

SEQ ID NO: 712087 - RNA, 19 nt, Homo sapiens
  misc_RNA (1)...(19): siRNA sense strand
gaggagguggcgcucaaga

SEQ ID NO: 712088 - RNA, 19 nt, Homo sapiens
  misc_RNA (1)...(19): siRNA sense strand
guacaccagcugccucauc

SEQ ID NO: 712089 - RNA, 19 nt, Homo sapiens
  misc_RNA (1)...(19): siRNA sense strand
caccagcugccucaucuau

SEQ ID NO: 712090 - RNA, 19 nt, Homo sapiens
  misc_RNA (1)...(19): siRNA sense strand
uacaccagcugccucaucu

SEQ ID NO: 712091 - RNA, 19 nt, Homo sapiens
  misc_RNA (1)...(19): siRNA sense strand
aagacucgcuacccugaca

SEQ ID NO: 712092 - RNA, 19 nt, Homo sapiens
  misc_RNA (1)...(19): siRNA sense strand
gcgguuccaggucuuguga

SEQ ID NO: 712093 - RNA, 19 nt, Homo sapiens
  misc_RNA (1)...(19): siRNA sense strand
agaagaggcugaagaagga

SEQ ID NO: 712094 - RNA, 19 nt, Homo sapiens
  misc_RNA (1)...(19): siRNA sense strand
gcagggaacggacccaguu

SEQ ID NO: 712095 - RNA, 19 nt, Homo sapiens
  misc_RNA (1)...(19): siRNA sense strand
gggagagcguuuacugcaa

SEQ ID NO: 712096 - RNA, 19 nt, Homo sapiens
  misc_RNA (1)...(19): siRNA sense strand
ggacccaguucugaccuau

SEQ ID NO: 712097 - RNA, 19 nt, Homo sapiens
  misc_RNA (1)...(19): siRNA sense strand
gcacagcaagugucucaag

SEQ ID NO: 712098 - RNA, 19 nt, Homo sapiens
  misc_RNA (1)...(19): siRNA sense strand
gugcaaggcggacuacgaa

SEQ ID NO: 712099 - RNA, 19 nt, Homo sapiens
  misc_RNA (1)...(19): siRNA sense strand
cugaagagcgcuuacaaca

SEQ ID NO: 712100 - RNA, 19 nt, Homo sapiens
  misc_RNA (1)...(19): siRNA sense strand
gcaaggcggacuacgaaac

SEQ ID NO: 712101 - RNA, 19 nt, Homo sapiens
  misc_RNA (1)...(19): siRNA sense strand
ggacaaggacagcguucag

SEQ ID NO: 712102 - RNA, 19 nt, Homo sapiens
  misc_RNA (1)...(19): siRNA sense strand
gcuccaagucggacaagga

SEQ ID NO: 712103 - RNA, 19 nt, Homo sapiens
  misc_RNA (1)...(19): siRNA sense strand
gggcaguauuuccgcaaca

SEQ ID NO: 712104 - RNA, 19 nt, Homo sapiens
  misc_RNA (1)...(19): siRNA sense strand
gguagaccacgcucaguuc

SEQ ID NO: 712105 - RNA, 19 nt, Homo sapiens
  misc_RNA (1)...(19): siRNA sense strand
uuacugcaaggacgacuuu

SEQ ID NO: 712106 - RNA, 19 nt, Homo sapiens
  misc_RNA (1)...(19): siRNA sense strand
caguauuuccgcaacauga

SEQ ID NO: 712107 - RNA, 19 nt, Homo sapiens
  misc_RNA (1)...(19): siRNA sense strand
gcgacgaguucuaccucau

SEQ ID NO: 712108 - RNA, 19 nt, Homo sapiens
  misc_RNA (1)...(19): siRNA sense strand
cacagcaagugucucaagu

SEQ ID NO: 712109 - RNA, 19 nt, Homo sapiens
  misc_RNA (1)...(19): siRNA sense strand
cgacgaguucuaccucaug

SEQ ID NO: 712110 - RNA, 19 nt, Homo sapiens
  misc_RNA (1)...(19): siRNA sense strand
ccaaggagaagaggcugaa

SEQ ID NO: 712111 - RNA, 19 nt, Homo sapiens
  misc_RNA (1)...(19): siRNA sense strand
aggagaagaggcugaagaa

SEQ ID NO: 712112 - RNA, 19 nt, Homo sapiens
  misc_RNA (1)...(19): siRNA sense strand
gcaguauuuccgcaacaug

SEQ ID NO: 712113 - RNA, 19 nt, Homo sapiens
  misc_RNA (1)...(19): siRNA sense strand
uggcaggcccagagcagua

SEQ ID NO: 712114 - RNA, 19 nt, Homo sapiens
  misc_RNA (1)...(19): siRNA sense strand
uguaccaccugcacugcuu

SEQ ID NO: 712115 - RNA, 19 nt, Homo sapiens
  misc_RNA (1)...(19): siRNA sense strand
ccacgggcgacgaguucua

SEQ ID NO: 712116 - RNA, 19 nt, Homo sapiens
  misc_RNA (1)...(19): siRNA sense strand
acagccggcucgugugcaa

SEQ ID NO: 712117 - RNA, 19 nt, Homo sapiens
  misc_RNA (1)...(19): siRNA sense strand
agaagaggcugaagaagga

SEQ ID NO: 712118 - RNA, 19 nt, Homo sapiens
  misc_RNA (1)...(19): siRNA sense strand
gcagggaacggacccaguu

SEQ ID NO: 712119 - RNA, 19 nt, Homo sapiens
  misc_RNA (1)...(19): siRNA sense strand
gggagagcguuuacugcaa

SEQ ID NO: 712120 - RNA, 19 nt, Homo sapiens
  misc_RNA (1)...(19): siRNA sense strand
ggacccaguucugaccuau

SEQ ID NO: 712121 - RNA, 19 nt, Homo sapiens
  misc_RNA (1)...(19): siRNA sense strand
gcacagcaagugucucaag

SEQ ID NO: 712122 - RNA, 19 nt, Homo sapiens
  misc_RNA (1)...(19): siRNA sense strand
gugcaaggcggacuacgaa

SEQ ID NO: 712123 - RNA, 19 nt, Homo sapiens
  misc_RNA (1)...(19): siRNA sense strand
cugaagagcgcuuacaaca

SEQ ID NO: 712124 - RNA, 19 nt, Homo sapiens
  misc_RNA (1)...(19): siRNA sense strand
gcaaggcggacuacgaaac

SEQ ID NO: 712125 - RNA, 19 nt, Homo sapiens
  misc_RNA (1)...(19): siRNA sense strand
ggacaaggacagcguucag

SEQ ID NO: 712126 - RNA, 19 nt, Homo sapiens
  misc_RNA (1)...(19): siRNA sense strand
gcuccaagucggacaagga

SEQ ID NO: 712127 - RNA, 19 nt, Homo sapiens
  misc_RNA (1)...(19): siRNA sense strand
gggcaguauuuccgcaaca

SEQ ID NO: 712128 - RNA, 19 nt, Homo sapiens
  misc_RNA (1)...(19): siRNA sense strand
gguagaccacgcucaguuc

SEQ ID NO: 712129 - RNA, 19 nt, Homo sapiens
  misc_RNA (1)...(19): siRNA sense strand
uuacugcaaggacgacuuu

SEQ ID NO: 712130 - RNA, 19 nt, Homo sapiens
  misc_RNA (1)...(19): siRNA sense strand
caguauuuccgcaacauga

SEQ ID NO: 712131 - RNA, 19 nt, Homo sapiens
  misc_RNA (1)...(19): siRNA sense strand
gcgacgaguucuaccucau

SEQ ID NO: 712132 - RNA, 19 nt, Homo sapiens
  misc_RNA (1)...(19): siRNA sense strand
cacagcaagugucucaagu

SEQ ID NO: 712133 - RNA, 19 nt, Homo sapiens
  misc_RNA (1)...(19): siRNA sense strand
cgacgaguucuaccucaug

SEQ ID NO: 712134 - RNA, 19 nt, Homo sapiens
  misc_RNA (1)...(19): siRNA sense strand
ccaaggagaagaggcugaa

SEQ ID NO: 712135 - RNA, 19 nt, Homo sapiens
  misc_RNA (1)...(19): siRNA sense strand
aggagaagaggcugaagaa

SEQ ID NO: 712136 - RNA, 19 nt, Homo sapiens
  misc_RNA (1)...(19): siRNA sense strand
gcaguauuuccgcaacaug

SEQ ID NO: 712137 - RNA, 19 nt, Homo sapiens
  misc_RNA (1)...(19): siRNA sense strand
uggcaggcccagagcagua

SEQ ID NO: 712138 - RNA, 19 nt, Homo sapiens
  misc_RNA (1)...(19): siRNA sense strand
uguaccaccugcacugcuu

SEQ ID NO: 712139 - RNA, 19 nt, Homo sapiens
  misc_RNA (1)...(19): siRNA sense strand
ccacgggcgacgaguucua

SEQ ID NO: 712140 - RNA, 19 nt, Homo sapiens
  misc_RNA (1)...(19): siRNA sense strand
acagccggcucgugugcaa

SEQ ID NO: 712141 - RNA, 19 nt, Homo sapiens
  misc_RNA (1)...(19): siRNA sense strand
gaaacugccuugaaagauc

SEQ ID NO: 712142 - RNA, 19 nt, Homo sapiens
  misc_RNA (1)...(19): siRNA sense strand
aaacuuuccucccucaaua

SEQ ID NO: 712143 - RNA, 19 nt, Homo sapiens
  misc_RNA (1)...(19): siRNA sense strand
caauugcucugaagaaaga

SEQ ID NO: 712144 - RNA, 19 nt, Homo sapiens
  misc_RNA (1)...(19): siRNA sense strand
caagauggguccugacuca

SEQ ID NO: 712145 - RNA, 19 nt, Homo sapiens
  misc_RNA (1)...(19): siRNA sense strand
gaagaaagaaagacauuca

SEQ ID NO: 712146 - RNA, 19 nt, Homo sapiens
  misc_RNA (1)...(19): siRNA sense strand
acacaaggaugcuggcuuu

SEQ ID NO: 712147 - RNA, 19 nt, Homo sapiens
  misc_RNA (1)...(19): siRNA sense strand
ggcagaaacuauucacauu

SEQ ID NO: 712148 - RNA, 19 nt, Homo sapiens
  misc_RNA (1)...(19): siRNA sense strand
ucaauagacucaugaagug

SEQ ID NO: 712149 - RNA, 19 nt, Homo sapiens
  misc_RNA (1)...(19): siRNA sense strand
gacaauugcucugaagaaa

SEQ ID NO: 712150 - RNA, 19 nt, Homo sapiens
  misc_RNA (1)...(19): siRNA sense strand
cgaaggaaguuucuacugu

SEQ ID NO: 712151 - RNA, 19 nt, Homo sapiens
  misc_RNA (1)...(19): siRNA sense strand
gaauguacaccacccuaua

SEQ ID NO: 712152 - RNA, 19 nt, Homo sapiens
  misc_RNA (1)...(19): siRNA sense strand
ggaaacaucauaaaugcaa

SEQ ID NO: 712153 - RNA, 19 nt, Homo sapiens
  misc_RNA (1)...(19): siRNA sense strand
ucuagaaacugccuugaaa

SEQ ID NO: 712154 - RNA, 19 nt, Homo sapiens
  misc_RNA (1)...(19): siRNA sense strand
ggacaaauuugagucacuu

SEQ ID NO: 712155 - RNA, 19 nt, Homo sapiens
  misc_RNA (1)...(19): siRNA sense strand
gaaaucucauccacagcua

SEQ ID NO: 712156 - RNA, 19 nt, Homo sapiens
  misc_RNA (1)...(19): siRNA sense strand
uugaagagauggauaagaa

SEQ ID NO: 712157 - RNA, 19 nt, Homo sapiens
  misc_RNA (1)...(19): siRNA sense strand
ggaaguuucuacugucaau

SEQ ID NO: 712158 - RNA, 19 nt, Homo sapiens
  misc_RNA (1)...(19): siRNA sense strand
gcagucaccuguccagcuu

SEQ ID NO: 712159 - RNA, 19 nt, Homo sapiens
  misc_RNA (1)...(19): siRNA sense strand
gaacagaagggagacaaga

SEQ ID NO: 712160 - RNA, 19 nt, Homo sapiens
  misc_RNA (1)...(19): siRNA sense strand
caaggaugcuggcuuucaa

SEQ ID NO: 712161 - RNA, 19 nt, Homo sapiens
  misc_RNA (1)...(19): siRNA sense strand
gauguggaaucgaaaguuc

SEQ ID NO: 712162 - RNA, 19 nt, Homo sapiens
  misc_RNA (1)...(19): siRNA sense strand
caggacaagugaagagaaa

SEQ ID NO: 712163 - RNA, 19 nt, Homo sapiens
  misc_RNA (1)...(19): siRNA sense strand
ggucauggccuaccucuuc

SEQ ID NO: 712164 - RNA, 19 nt, Homo sapiens
  misc_RNA (1)...(19): siRNA sense strand
ccaaaugcuuccuguguca

SEQ ID NO: 712165 - RNA, 19 nt, Homo sapiens
  misc_RNA (1)...(19): siRNA sense strand
caacuugaacguccaaaug

SEQ ID NO: 712166 - RNA, 19 nt, Homo sapiens
  misc_RNA (1)...(19): siRNA sense strand
aaucagacuuuauggagaa

SEQ ID NO: 712167 - RNA, 19 nt, Homo sapiens
  misc_RNA (1)...(19): siRNA sense strand
ccauugccuuuaucucaua

SEQ ID NO: 712168 - RNA, 19 nt, Homo sapiens
  misc_RNA (1)...(19): siRNA sense strand
cuugaaagauccagaacaa

SEQ ID NO: 712169 - RNA, 19 nt, Homo sapiens
  misc_RNA (1)...(19): siRNA sense strand
gucaaugugucccaggaua

SEQ ID NO: 712170 - RNA, 19 nt, Homo sapiens
  misc_RNA (1)...(19): siRNA sense strand
gaaagaaagacauucaacu

SEQ ID NO: 712171 - RNA, 19 nt, Homo sapiens
  misc_RNA (1)...(19): siRNA sense strand
gcagaaacuauucacauuc

SEQ ID NO: 712172 - RNA, 19 nt, Homo sapiens
  misc_RNA (1)...(19): siRNA sense strand
ucugagacauacacacuuu

SEQ ID NO: 712173 - RNA, 19 nt, Homo sapiens
  misc_RNA (1)...(19): siRNA sense strand
ccagugccauugccuuuau

SEQ ID NO: 712174 - RNA, 19 nt, Homo sapiens
  misc_RNA (1)...(19): siRNA sense strand
gaaucgaaaguucuagaaa

SEQ ID NO: 712175 - RNA, 19 nt, Homo sapiens
  misc_RNA (1)...(19): siRNA sense strand
ggauauagacugcauucug

SEQ ID NO: 712176 - RNA, 19 nt, Homo sapiens
  misc_RNA (1)...(19): siRNA sense strand
caucaucgccggugcuuug

SEQ ID NO: 712177 - RNA, 19 nt, Homo sapiens
  misc_RNA (1)...(19): siRNA sense strand
gaagagauggauaagaaag

SEQ ID NO: 712178 - RNA, 19 nt, Homo sapiens
  misc_RNA (1)...(19): siRNA sense strand
ggauggcugcuuccugaua

SEQ ID NO: 712179 - RNA, 19 nt, Homo sapiens
  misc_RNA (1)...(19): siRNA sense strand
gauaagaaagaucaagugu

SEQ ID NO: 712180 - RNA, 19 nt, Homo sapiens
  misc_RNA (1)...(19): siRNA sense strand
gccuuuaucucauauucuu

SEQ ID NO: 712181 - RNA, 19 nt, Homo sapiens
  misc_RNA (1)...(19): siRNA sense strand
ccaaugagaacaccuguca

SEQ ID NO: 712182 - RNA, 19 nt, Homo sapiens
  misc_RNA (1)...(19): siRNA sense strand
caaaagugguuuagagaga

SEQ ID NO: 712183 - RNA, 19 nt, Homo sapiens
  misc_RNA (1)...(19): siRNA sense strand
gaucaaguguaucugaacu

SEQ ID NO: 712184 - RNA, 19 nt, Homo sapiens
  misc_RNA (1)...(19): siRNA sense strand
ggaaucgaaaguucuagaa

SEQ ID NO: 712185 - RNA, 19 nt, Homo sapiens
  misc_RNA (1)...(19): siRNA sense strand
gaagggagacaagaaaucu

SEQ ID NO: 712186 - RNA, 19 nt, Homo sapiens
  misc_RNA (1)...(19): siRNA sense strand
cauacacacuuuccagcaa

SEQ ID NO: 712187 - RNA, 19 nt, Homo sapiens
  misc_RNA (1)...(19): siRNA sense strand
gccagcagguccagaaaca

SEQ ID NO: 712188 - RNA, 19 nt, Homo sapiens
  misc_RNA (1)...(19): siRNA sense strand
guaaagccauccagaacac

SEQ ID NO: 712189 - RNA, 19 nt, Homo sapiens
  misc_RNA (1)...(19): siRNA sense strand
caaugugucccaggauaua

SEQ ID NO: 712190 - RNA, 19 nt, Homo sapiens
  misc_RNA (1)...(19): siRNA sense strand
gcaccugcaaccauggaua

SEQ ID NO: 712191 - RNA, 19 nt, Homo sapiens
  misc_RNA (1)...(19): siRNA sense strand
aaguguaucugaacucuca

SEQ ID NO: 712192 - RNA, 19 nt, Homo sapiens
  misc_RNA (1)...(19): siRNA sense strand
uagaaacugccuugaaaga

SEQ ID NO: 712193 - RNA, 19 nt, Homo sapiens
  misc_RNA (1)...(19): siRNA sense strand
aagaaagacauucaacuug

SEQ ID NO: 712194 - RNA, 19 nt, Homo sapiens
  misc_RNA (1)...(19): siRNA sense strand
ccuccuggccucaccuuua

SEQ ID NO: 712195 - RNA, 19 nt, Homo sapiens
  misc_RNA (1)...(19): siRNA sense strand
aaacucaagcgauuacaga

SEQ ID NO: 712196 - RNA, 19 nt, Homo sapiens
  misc_RNA (1)...(19): siRNA sense strand
caacuacucaagcaucaau

SEQ ID NO: 712197 - RNA, 19 nt, Homo sapiens
  misc_RNA (1)...(19): siRNA sense strand
ggauaagaaagaucaagug

SEQ ID NO: 712198 - RNA, 19 nt, Homo sapiens
  misc_RNA (1)...(19): siRNA sense strand
ucucaccaaucagacuuua

SEQ ID NO: 712199 - RNA, 19 nt, Homo sapiens
  misc_RNA (1)...(19): siRNA sense strand
gcagguccagaaacaauau

SEQ ID NO: 712200 - RNA, 19 nt, Homo sapiens
  misc_RNA (1)...(19): siRNA sense strand
ucacuuuucuccuguguaa

SEQ ID NO: 712201 - RNA, 19 nt, Homo sapiens
  misc_RNA (1)...(19): siRNA sense strand
gauggcugcuuccugauac

SEQ ID NO: 712202 - RNA, 19 nt, Homo sapiens
  misc_RNA (1)...(19): siRNA sense strand
gggcagaaacuauucacau

SEQ ID NO: 712203 - RNA, 19 nt, Homo sapiens
  misc_RNA (1)...(19): siRNA sense strand
ucaccaaucagacuuuaug

SEQ ID NO: 712204 - RNA, 19 nt, Homo sapiens
  misc_RNA (1)...(19): siRNA sense strand
guccagaaacaauaucaaa

SEQ ID NO: 712205 - RNA, 19 nt, Homo sapiens
  misc_RNA (1)...(19): siRNA sense strand
ggcccagucugugccauuu

SEQ ID NO: 712206 - RNA, 19 nt, Homo sapiens
  misc_RNA (1)...(19): siRNA sense strand
aagcaucaauagacucaug

SEQ ID NO: 712207 - RNA, 19 nt, Homo sapiens
  misc_RNA (1)...(19): siRNA sense strand
ggauauacuucuggaucug

SEQ ID NO: 712208 - RNA, 19 nt, Homo sapiens
  misc_RNA (1)...(19): siRNA sense strand
guguagcuauugaaacuca

SEQ ID NO: 712209 - RNA, 19 nt, Homo sapiens
  misc_RNA (1)...(19): siRNA sense strand
uaguguagcuauugaaacu

SEQ ID NO: 712210 - RNA, 19 nt, Homo sapiens
  misc_RNA (1)...(19): siRNA sense strand
ucacuucucaccaaucaga

SEQ ID NO: 712211 - RNA, 19 nt, Homo sapiens
  misc_RNA (1)...(19): siRNA sense strand
ccucaauagugaaguguca

SEQ ID NO: 712212 - RNA, 19 nt, Homo sapiens
  misc_RNA (1)...(19): siRNA sense strand
ccacuauucuccgggaugu

SEQ ID NO: 712213 - RNA, 19 nt, Homo sapiens
  misc_RNA (1)...(19): siRNA sense strand
uuagagagaucguaaaauc

SEQ ID NO: 712214 - RNA, 19 nt, Homo sapiens
  misc_RNA (1)...(19): siRNA sense strand
cagggaccauugcuucuuc

SEQ ID NO: 712215 - RNA, 19 nt, Homo sapiens
  misc_RNA (1)...(19): siRNA sense strand
ugaaagauccagaacaaaa

SEQ ID NO: 712216 - RNA, 19 nt, Homo sapiens
  misc_RNA (1)...(19): siRNA sense strand
aaucgaaaguucuagaaac

SEQ ID NO: 712217 - RNA, 19 nt, Homo sapiens
  misc_RNA (1)...(19): siRNA sense strand
acagaagggagacaagaaa

SEQ ID NO: 712218 - RNA, 19 nt, Homo sapiens
  misc_RNA (1)...(19): siRNA sense strand
cagaaacuauucacauucc

SEQ ID NO: 712219 - RNA, 19 nt, Homo sapiens
  misc_RNA (1)...(19): siRNA sense strand
gguugugagugcugcuauu

SEQ ID NO: 712220 - RNA, 19 nt, Homo sapiens
  misc_RNA (1)...(19): siRNA sense strand
ucaguaauuccaaugagaa

SEQ ID NO: 712221 - RNA, 19 nt, Homo sapiens
  misc_RNA (1)...(19): siRNA sense strand
cuccaaggcuucuucaucu

SEQ ID NO: 712222 - RNA, 19 nt, Homo sapiens
  misc_RNA (1)...(19): siRNA sense strand
ugugagugcugcuauugga

SEQ ID NO: 712223 - RNA, 19 nt, Homo sapiens
  misc_RNA (1)...(19): siRNA sense strand
agagauggauaagaaagau

SEQ ID NO: 712224 - RNA, 19 nt, Homo sapiens
  misc_RNA (1)...(19): siRNA sense strand
gccauugccuuuaucucau

SEQ ID NO: 712225 - RNA, 19 nt, Homo sapiens
  misc_RNA (1)...(19): siRNA sense strand
agacaauugcucugaagaa

SEQ ID NO: 712226 - RNA, 19 nt, Homo sapiens
  misc_RNA (1)...(19): siRNA sense strand
ccacagcuaccacuauucu

SEQ ID NO: 712227 - RNA, 19 nt, Homo sapiens
  misc_RNA (1)...(19): siRNA sense strand
cagcagguccagaaacaau

SEQ ID NO: 712228 - RNA, 19 nt, Homo sapiens
  misc_RNA (1)...(19): siRNA sense strand
uuuccucccucaauaguga

SEQ ID NO: 712229 - RNA, 19 nt, Homo sapiens
  misc_RNA (1)...(19): siRNA sense strand
ugauacacgugaacaagag

SEQ ID NO: 712230 - RNA, 19 nt, Homo sapiens
  misc_RNA (1)...(19): siRNA sense strand
gcagggaccauugcuucuu

SEQ ID NO: 712231 - RNA, 19 nt, Homo sapiens
  misc_RNA (1)...(19): siRNA sense strand
uuauggaacugcugaucga

SEQ ID NO: 712232 - RNA, 19 nt, Homo sapiens
  misc_RNA (1)...(19): siRNA sense strand
gucaacuacucaagcauca

SEQ ID NO: 712233 - RNA, 19 nt, Homo sapiens
  misc_RNA (1)...(19): siRNA sense strand
cucaagcgauuacagacaa

SEQ ID NO: 712234 - RNA, 19 nt, Homo sapiens
  misc_RNA (1)...(19): siRNA sense strand
agucacuucucaccaauca

SEQ ID NO: 712235 - RNA, 19 nt, Homo sapiens
  misc_RNA (1)...(19): siRNA sense strand
gccuaccucuucaccauca

SEQ ID NO: 712236 - RNA, 19 nt, Homo sapiens
  misc_RNA (1)...(19): siRNA sense strand
gacauccguugcagugaca

SEQ ID NO: 712237 - RNA, 19 nt, Homo sapiens
  misc_RNA (1)...(19): siRNA sense strand
gagaacagaagggagacaa

SEQ ID NO: 712238 - RNA, 19 nt, Homo sapiens
  misc_RNA (1)...(19): siRNA sense strand
ucaaguguaucugaacucu

SEQ ID NO: 712239 - RNA, 19 nt, Homo sapiens
  misc_RNA (1)...(19): siRNA sense strand
gauggguccugacucaaaa

SEQ ID NO: 712240 - RNA, 19 nt, Homo sapiens
  misc_RNA (1)...(19): siRNA sense strand
caaggcuucuucaucuucu

SEQ ID NO: 712241 - RNA, 19 nt, Homo sapiens
  misc_RNA (1)...(19): siRNA sense strand
ggcagaaacuauucacauu

SEQ ID NO: 712242 - RNA, 19 nt, Homo sapiens
  misc_RNA (1)...(19): siRNA sense strand
cgaaggaaguuucuacugu

SEQ ID NO: 712243 - RNA, 19 nt, Homo sapiens
  misc_RNA (1)...(19): siRNA sense strand
gaauguacaccacccuaua

SEQ ID NO: 712244 - RNA, 19 nt, Homo sapiens
  misc_RNA (1)...(19): siRNA sense strand
ggaaguuucuacugucaau

SEQ ID NO: 712245 - RNA, 19 nt, Homo sapiens
  misc_RNA (1)...(19): siRNA sense strand
ccaaaugcuuccuguguca

SEQ ID NO: 712246 - RNA, 19 nt, Homo sapiens
  misc_RNA (1)...(19): siRNA sense strand
gucaaugugucccaggaua

SEQ ID NO: 712247 - RNA, 19 nt, Homo sapiens
  misc_RNA (1)...(19): siRNA sense strand
gcagaaacuauucacauuc

SEQ ID NO: 712248 - RNA, 19 nt, Homo sapiens
  misc_RNA (1)...(19): siRNA sense strand
ggauauagacugcauucug

SEQ ID NO: 712249 - RNA, 19 nt, Homo sapiens
  misc_RNA (1)...(19): siRNA sense strand
ccaaugagaacaccuguca

SEQ ID NO: 712250 - RNA, 19 nt, Homo sapiens
  misc_RNA (1)...(19): siRNA sense strand
caaugugucccaggauaua

SEQ ID NO: 712251 - RNA, 19 nt, Homo sapiens
  misc_RNA (1)...(19): siRNA sense strand
gcaccugcaaccauggaua

SEQ ID NO: 712252 - RNA, 19 nt, Homo sapiens
  misc_RNA (1)...(19): siRNA sense strand
gggcagaaacuauucacau

SEQ ID NO: 712253 - RNA, 19 nt, Homo sapiens
  misc_RNA (1)...(19): siRNA sense strand
ggauauacuucuggaucug

SEQ ID NO: 712254 - RNA, 19 nt, Homo sapiens
  misc_RNA (1)...(19): siRNA sense strand
cagggaccauugcuucuuc

SEQ ID NO: 712255 - RNA, 19 nt, Homo sapiens
  misc_RNA (1)...(19): siRNA sense strand
cagaaacuauucacauucc

SEQ ID NO: 712256 - RNA, 19 nt, Homo sapiens
  misc_RNA (1)...(19): siRNA sense strand
ucaguaauuccaaugagaa

SEQ ID NO: 712257 - RNA, 19 nt, Homo sapiens
  misc_RNA (1)...(19): siRNA sense strand
gcagggaccauugcuucuu

SEQ ID NO: 712258 - RNA, 19 nt, Homo sapiens
  misc_RNA (1)...(19): siRNA sense strand
ggauuuaacgcuguguguu

SEQ ID NO: 712259 - RNA, 19 nt, Homo sapiens
  misc_RNA (1)...(19): siRNA sense strand
aaggaaguuucuacuguca

SEQ ID NO: 712260 - RNA, 19 nt, Homo sapiens
  misc_RNA (1)...(19): siRNA sense strand
guguuacaaugucgaagga

SEQ ID NO: 712261 - RNA, 19 nt, Homo sapiens
  misc_RNA (1)...(19): siRNA sense strand
gcaaccauggauauacuuc

SEQ ID NO: 712262 - RNA, 19 nt, Homo sapiens
  misc_RNA (1)...(19): siRNA sense strand
uggauauacuucuggaucu

SEQ ID NO: 712263 - RNA, 19 nt, Homo sapiens
  misc_RNA (1)...(19): siRNA sense strand
ucaaugugucccaggauau

SEQ ID NO: 712264 - RNA, 19 nt, Homo sapiens
  misc_RNA (1)...(19): siRNA sense strand
aaugcuuccugugucaaua

SEQ ID NO: 712265 - RNA, 19 nt, Homo sapiens
  misc_RNA (1)...(19): siRNA sense strand
caaugucgaaggaaguuuc

SEQ ID NO: 712266 - RNA, 19 nt, Homo sapiens
  misc_RNA (1)...(19): siRNA sense strand
aaccauggauauacuucug

SEQ ID NO: 712267 - RNA, 19 nt, Homo sapiens
  misc_RNA (1)...(19): siRNA sense strand
caggauauagacugcauuc

SEQ ID NO: 712268 - RNA, 19 nt, Homo sapiens
  misc_RNA (1)...(19): siRNA sense strand
uuggagcugugacucagaa

SEQ ID NO: 712269 - RNA, 19 nt, Homo sapiens
  misc_RNA (1)...(19): siRNA sense strand
uucaguaauuccaaugaga

SEQ ID NO: 712270 - RNA, 19 nt, Homo sapiens
  misc_RNA (1)...(19): siRNA sense strand
caccugcaaccauggauau

SEQ ID NO: 712271 - RNA, 19 nt, Homo sapiens
  misc_RNA (1)...(19): siRNA sense strand
ugaauguacaccacccuau

SEQ ID NO: 712272 - RNA, 19 nt, Homo sapiens
  misc_RNA (1)...(19): siRNA sense strand
ggagcuagaugauucuuua

SEQ ID NO: 712273 - RNA, 19 nt, Homo sapiens
  misc_RNA (1)...(19): siRNA sense strand
guuuaaagauguccuguua

SEQ ID NO: 712274 - RNA, 19 nt, Homo sapiens
  misc_RNA (1)...(19): siRNA sense strand
uuacagaucuccugaagaa

SEQ ID NO: 712275 - RNA, 19 nt, Homo sapiens
  misc_RNA (1)...(19): siRNA sense strand
ucagguagaugaagacuuu

SEQ ID NO: 712276 - RNA, 19 nt, Homo sapiens
  misc_RNA (1)...(19): siRNA sense strand
gaaugggacuugcuaaugu

SEQ ID NO: 712277 - RNA, 19 nt, Homo sapiens
  misc_RNA (1)...(19): siRNA sense strand
gaacaucccauauuggaaa

SEQ ID NO: 712278 - RNA, 19 nt, Homo sapiens
  misc_RNA (1)...(19): siRNA sense strand
ggaagaaugagaaggaaua

SEQ ID NO: 712279 - RNA, 19 nt, Homo sapiens
  misc_RNA (1)...(19): siRNA sense strand
gauaagaacaucccauauu

SEQ ID NO: 712280 - RNA, 19 nt, Homo sapiens
  misc_RNA (1)...(19): siRNA sense strand
guggaaaucuagaaaguuu

SEQ ID NO: 712281 - RNA, 19 nt, Homo sapiens
  misc_RNA (1)...(19): siRNA sense strand
aaauccagcucuccaaaua

SEQ ID NO: 712282 - RNA, 19 nt, Homo sapiens
  misc_RNA (1)...(19): siRNA sense strand
caagagcucucaguucaaa

SEQ ID NO: 712283 - RNA, 19 nt, Homo sapiens
  misc_RNA (1)...(19): siRNA sense strand
gcaaaucuacucagccuaa

SEQ ID NO: 712284 - RNA, 19 nt, Homo sapiens
  misc_RNA (1)...(19): siRNA sense strand
ggcaguagccuccaagaua

SEQ ID NO: 712285 - RNA, 19 nt, Homo sapiens
  misc_RNA (1)...(19): siRNA sense strand
caaccuaaauccucucaga

SEQ ID NO: 712286 - RNA, 19 nt, Homo sapiens
  misc_RNA (1)...(19): siRNA sense strand
gcaguagccuccaagauag

SEQ ID NO: 712287 - RNA, 19 nt, Homo sapiens
  misc_RNA (1)...(19): siRNA sense strand
gaaauucgagacauacaaa

SEQ ID NO: 712288 - RNA, 19 nt, Homo sapiens
  misc_RNA (1)...(19): siRNA sense strand
gaucauagaaagagaaaga

SEQ ID NO: 712289 - RNA, 19 nt, Homo sapiens
  misc_RNA (1)...(19): siRNA sense strand
aagaggagguuuaugauga

SEQ ID NO: 712290 - RNA, 19 nt, Homo sapiens
  misc_RNA (1)...(19): siRNA sense strand
ggaugucacucgaauggaa

SEQ ID NO: 712291 - RNA, 19 nt, Homo sapiens
  misc_RNA (1)...(19): siRNA sense strand
uuaaagauguccuguuaug

SEQ ID NO: 712292 - RNA, 19 nt, Homo sapiens
  misc_RNA (1)...(19): siRNA sense strand
auaagaacaucccauauug

SEQ ID NO: 712293 - RNA, 19 nt, Homo sapiens
  misc_RNA (1)...(19): siRNA sense strand
gaugggaacucuugaaagg

SEQ ID NO: 712294 - RNA, 19 nt, Homo sapiens
  misc_RNA (1)...(19): siRNA sense strand
gcaaagacacagucagcua

SEQ ID NO: 712295 - RNA, 19 nt, Homo sapiens
  misc_RNA (1)...(19): siRNA sense strand
gauaugaggagcuagauga

SEQ ID NO: 712296 - RNA, 19 nt, Homo sapiens
  misc_RNA (1)...(19): siRNA sense strand
gccagaaucuucagaaucu

SEQ ID NO: 712297 - RNA, 19 nt, Homo sapiens
  misc_RNA (1)...(19): siRNA sense strand
gaaaguuggaugugaaguu

SEQ ID NO: 712298 - RNA, 19 nt, Homo sapiens
  misc_RNA (1)...(19): siRNA sense strand
gaagauagcaaggaggauu

SEQ ID NO: 712299 - RNA, 19 nt, Homo sapiens
  misc_RNA (1)...(19): siRNA sense strand
aaacaauucuccuuagauc

SEQ ID NO: 712300 - RNA, 19 nt, Homo sapiens
  misc_RNA (1)...(19): siRNA sense strand
ugagaaaguuggaugugaa

SEQ ID NO: 712301 - RNA, 19 nt, Homo sapiens
  misc_RNA (1)...(19): siRNA sense strand
gaacauggagggccuucaa

SEQ ID NO: 712302 - RNA, 19 nt, Homo sapiens
  misc_RNA (1)...(19): siRNA sense strand
gaggcgaccugucagcauu

SEQ ID NO: 712303 - RNA, 19 nt, Homo sapiens
  misc_RNA (1)...(19): siRNA sense strand
ccucagagaucauagaaag

SEQ ID NO: 712304 - RNA, 19 nt, Homo sapiens
  misc_RNA (1)...(19): siRNA sense strand
caaagacacagucagcuaa

SEQ ID NO: 712305 - RNA, 19 nt, Homo sapiens
  misc_RNA (1)...(19): siRNA sense strand
gaaggaaugggacuugcua

SEQ ID NO: 712306 - RNA, 19 nt, Homo sapiens
  misc_RNA (1)...(19): siRNA sense strand
gaaggaacacuuggauuug

SEQ ID NO: 712307 - RNA, 19 nt, Homo sapiens
  misc_RNA (1)...(19): siRNA sense strand
gcaccaggguaacagaguu

SEQ ID NO: 712308 - RNA, 19 nt, Homo sapiens
  misc_RNA (1)...(19): siRNA sense strand
caaaugaugggaacucuug

SEQ ID NO: 712309 - RNA, 19 nt, Homo sapiens
  misc_RNA (1)...(19): siRNA sense strand
uugaaagccuccuggguua

SEQ ID NO: 712310 - RNA, 19 nt, Homo sapiens
  misc_RNA (1)...(19): siRNA sense strand
gagguaacuuuaaccaugu

SEQ ID NO: 712311 - RNA, 19 nt, Homo sapiens
  misc_RNA (1)...(19): siRNA sense strand
cgagacauacaaaccauua

SEQ ID NO: 712312 - RNA, 19 nt, Homo sapiens
  misc_RNA (1)...(19): siRNA sense strand
ggagaaaaguauagaagaa

SEQ ID NO: 712313 - RNA, 19 nt, Homo sapiens
  misc_RNA (1)...(19): siRNA sense strand
agaaugagaaggaauauga

SEQ ID NO: 712314 - RNA, 19 nt, Homo sapiens
  misc_RNA (1)...(19): siRNA sense strand
gauguccuguuauguuuga

SEQ ID NO: 712315 - RNA, 19 nt, Homo sapiens
  misc_RNA (1)...(19): siRNA sense strand
gaauuggagguaacuuuaa

SEQ ID NO: 712316 - RNA, 19 nt, Homo sapiens
  misc_RNA (1)...(19): siRNA sense strand
agaaggaacacuuggauuu

SEQ ID NO: 712317 - RNA, 19 nt, Homo sapiens
  misc_RNA (1)...(19): siRNA sense strand
ugaaaggucuagggcagua

SEQ ID NO: 712318 - RNA, 19 nt, Homo sapiens
  misc_RNA (1)...(19): siRNA sense strand
cuaagugguuccauccuuu

SEQ ID NO: 712319 - RNA, 19 nt, Homo sapiens
  misc_RNA (1)...(19): siRNA sense strand
gaagaggagguuuaugaug

SEQ ID NO: 712320 - RNA, 19 nt, Homo sapiens
  misc_RNA (1)...(19): siRNA sense strand
gaauaucuaggaucuguug

SEQ ID NO: 712321 - RNA, 19 nt, Homo sapiens
  misc_RNA (1)...(19): siRNA sense strand
gcuagaugauucuuuauac

SEQ ID NO: 712322 - RNA, 19 nt, Homo sapiens
  misc_RNA (1)...(19): siRNA sense strand
aagauguccuguuauguuu

SEQ ID NO: 712323 - RNA, 19 nt, Homo sapiens
  misc_RNA (1)...(19): siRNA sense strand
caaccuaagucauccucaa

SEQ ID NO: 712324 - RNA, 19 nt, Homo sapiens
  misc_RNA (1)...(19): siRNA sense strand
ggaaugggacuugcuaaug

SEQ ID NO: 712325 - RNA, 19 nt, Homo sapiens
  misc_RNA (1)...(19): siRNA sense strand
ccugagagaccacaaauga

SEQ ID NO: 712326 - RNA, 19 nt, Homo sapiens
  misc_RNA (1)...(19): siRNA sense strand
cauauucaguugagaaagu

SEQ ID NO: 712327 - RNA, 19 nt, Homo sapiens
  misc_RNA (1)...(19): siRNA sense strand
ugcaagagcucucaguuca

SEQ ID NO: 712328 - RNA, 19 nt, Homo sapiens
  misc_RNA (1)...(19): siRNA sense strand
ggucagagcagaggccuaa

SEQ ID NO: 712329 - RNA, 19 nt, Homo sapiens
  misc_RNA (1)...(19): siRNA sense strand
agaauuggagguaacuuua

SEQ ID NO: 712330 - RNA, 19 nt, Homo sapiens
  misc_RNA (1)...(19): siRNA sense strand
caaccagaauuggagguaa

SEQ ID NO: 712331 - RNA, 19 nt, Homo sapiens
  misc_RNA (1)...(19): siRNA sense strand
aaagauguccuguuauguu

SEQ ID NO: 712332 - RNA, 19 nt, Homo sapiens
  misc_RNA (1)...(19): siRNA sense strand
uggcuggaguggagaauuu

SEQ ID NO: 712333 - RNA, 19 nt, Homo sapiens
  misc_RNA (1)...(19): siRNA sense strand
gagugaagaggcucaaauu

SEQ ID NO: 712334 - RNA, 19 nt, Homo sapiens
  misc_RNA (1)...(19): siRNA sense strand
gaagcagucaacacaguuu

SEQ ID NO: 712335 - RNA, 19 nt, Homo sapiens
  misc_RNA (1)...(19): siRNA sense strand
caccagaagucacauuauc

SEQ ID NO: 712336 - RNA, 19 nt, Homo sapiens
  misc_RNA (1)...(19): siRNA sense strand
gagcucagccagaaucuuc

SEQ ID NO: 712337 - RNA, 19 nt, Homo sapiens
  misc_RNA (1)...(19): siRNA sense strand
gucacaagguucuggauga

SEQ ID NO: 712338 - RNA, 19 nt, Homo sapiens
  misc_RNA (1)...(19): siRNA sense strand
guuaaacaauucuccuuag

SEQ ID NO: 712339 - RNA, 19 nt, Homo sapiens
  misc_RNA (1)...(19): siRNA sense strand
aaaccagccuuucauugga

SEQ ID NO: 712340 - RNA, 19 nt, Homo sapiens
  misc_RNA (1)...(19): siRNA sense strand
gugaagaaccaaguuauga

SEQ ID NO: 712341 - RNA, 19 nt, Homo sapiens
  misc_RNA (1)...(19): siRNA sense strand
gagaacuccuggcucuuuc

SEQ ID NO: 712342 - RNA, 19 nt, Homo sapiens
  misc_RNA (1)...(19): siRNA sense strand
ucucagcccugcccaguug

SEQ ID NO: 712343 - RNA, 19 nt, Homo sapiens
  misc_RNA (1)...(19): siRNA sense strand
uacaguaccuccucaaucu

SEQ ID NO: 712344 - RNA, 19 nt, Homo sapiens
  misc_RNA (1)...(19): siRNA sense strand
ggacuucgagaauucagaa

SEQ ID NO: 712345 - RNA, 19 nt, Homo sapiens
  misc_RNA (1)...(19): siRNA sense strand
uggaagaggagguuuauga

SEQ ID NO: 712346 - RNA, 19 nt, Homo sapiens
  misc_RNA (1)...(19): siRNA sense strand
uauaaaagauggacagaga

SEQ ID NO: 712347 - RNA, 19 nt, Homo sapiens
  misc_RNA (1)...(19): siRNA sense strand
acucagagaauucaaguuu

SEQ ID NO: 712348 - RNA, 19 nt, Homo sapiens
  misc_RNA (1)...(19): siRNA sense strand
ugaagaagcagucaacaca

SEQ ID NO: 712349 - RNA, 19 nt, Homo sapiens
  misc_RNA (1)...(19): siRNA sense strand
acaagguucuggaugaaga

SEQ ID NO: 712350 - RNA, 19 nt, Homo sapiens
  misc_RNA (1)...(19): siRNA sense strand
ucacaagguucuggaugaa

SEQ ID NO: 712351 - RNA, 19 nt, Homo sapiens
  misc_RNA (1)...(19): siRNA sense strand
cagagcacguuggauauga

SEQ ID NO: 712352 - RNA, 19 nt, Homo sapiens
  misc_RNA (1)...(19): siRNA sense strand
acagagauaugaggagcua

SEQ ID NO: 712353 - RNA, 19 nt, Homo sapiens
  misc_RNA (1)...(19): siRNA sense strand
ggcaagcaguaauucagaa

SEQ ID NO: 712354 - RNA, 19 nt, Homo sapiens
  misc_RNA (1)...(19): siRNA sense strand
uaacugaagcaacuggaaa

SEQ ID NO: 712355 - RNA, 19 nt, Homo sapiens
  misc_RNA (1)...(19): siRNA sense strand
ugagagaccacaaaugaug

SEQ ID NO: 712356 - RNA, 19 nt, Homo sapiens
  misc_RNA (1)...(19): siRNA sense strand
ggaaauucgagacauacaa

SEQ ID NO: 712357 - RNA, 19 nt, Homo sapiens
  misc_RNA (1)...(19): siRNA sense strand
ggauagaagcagaaagguu

SEQ ID NO: 712358 - RNA, 19 nt, Homo sapiens
  misc_RNA (1)...(19): siRNA sense strand
ggaagaggagguuuaugau

SEQ ID NO: 712359 - RNA, 19 nt, Homo sapiens
  misc_RNA (1)...(19): siRNA sense strand
gaauaugacacaccagaag

SEQ ID NO: 712360 - RNA, 19 nt, Homo sapiens
  misc_RNA (1)...(19): siRNA sense strand
aaaguuggaugugaaguuc

SEQ ID NO: 712361 - RNA, 19 nt, Homo sapiens
  misc_RNA (1)...(19): siRNA sense strand
ucccagcccucccaaacua

SEQ ID NO: 712362 - RNA, 19 nt, Homo sapiens
  misc_RNA (1)...(19): siRNA sense strand
ugauagcgaugauagaaag

SEQ ID NO: 712363 - RNA, 19 nt, Homo sapiens
  misc_RNA (1)...(19): siRNA sense strand
gauacuguagcuucucuaa

SEQ ID NO: 712364 - RNA, 19 nt, Homo sapiens
  misc_RNA (1)...(19): siRNA sense strand
ggaauaugacacaccagaa

SEQ ID NO: 712365 - RNA, 19 nt, Homo sapiens
  misc_RNA (1)...(19): siRNA sense strand
uaaaccuucuccaugcaaa

SEQ ID NO: 712366 - RNA, 19 nt, Homo sapiens
  misc_RNA (1)...(19): siRNA sense strand
ccuaaacccuuccauucug

SEQ ID NO: 712367 - RNA, 19 nt, Homo sapiens
  misc_RNA (1)...(19): siRNA sense strand
caacccauccacagucaaa

SEQ ID NO: 712368 - RNA, 19 nt, Homo sapiens
  misc_RNA (1)...(19): siRNA sense strand
gaaagccuccuggguuaug

SEQ ID NO: 712369 - RNA, 19 nt, Homo sapiens
  misc_RNA (1)...(19): siRNA sense strand
uaggagaggcugccauuga

SEQ ID NO: 712370 - RNA, 19 nt, Homo sapiens
  misc_RNA (1)...(19): siRNA sense strand
uacuguagcuucucuaagu

SEQ ID NO: 712371 - RNA, 19 nt, Homo sapiens
  misc_RNA (1)...(19): siRNA sense strand
aagaggacuucgagaauuc

SEQ ID NO: 712372 - RNA, 19 nt, Homo sapiens
  misc_RNA (1)...(19): siRNA sense strand
gcaaauggcuccucaaguu

SEQ ID NO: 712373 - RNA, 19 nt, Homo sapiens
  misc_RNA (1)...(19): siRNA sense strand
ggauacagcuuaaagaaga

SEQ ID NO: 712374 - RNA, 19 nt, Homo sapiens
  misc_RNA (1)...(19): siRNA sense strand
gcggaaaguucuucgaaua

SEQ ID NO: 712375 - RNA, 19 nt, Homo sapiens
  misc_RNA (1)...(19): siRNA sense strand
cgacagcuuucaagucuua

SEQ ID NO: 712376 - RNA, 19 nt, Homo sapiens
  misc_RNA (1)...(19): siRNA sense strand
ggacagcucucagauaaau

SEQ ID NO: 712377 - RNA, 19 nt, Homo sapiens
  misc_RNA (1)...(19): siRNA sense strand
cuacacagauugucucuuu

SEQ ID NO: 712378 - RNA, 19 nt, Homo sapiens
  misc_RNA (1)...(19): siRNA sense strand
gaaccaagcagcucuuuga

SEQ ID NO: 712379 - RNA, 19 nt, Homo sapiens
  misc_RNA (1)...(19): siRNA sense strand
ggaagacucugauuucauc

SEQ ID NO: 712380 - RNA, 19 nt, Homo sapiens
  misc_RNA (1)...(19): siRNA sense strand
ggagagagcguccuaaaug

SEQ ID NO: 712381 - RNA, 19 nt, Homo sapiens
  misc_RNA (1)...(19): siRNA sense strand
gagagagcguccuaaauga

SEQ ID NO: 712382 - RNA, 19 nt, Homo sapiens
  misc_RNA (1)...(19): siRNA sense strand
guacuguccucgucuauug

SEQ ID NO: 712383 - RNA, 19 nt, Homo sapiens
  misc_RNA (1)...(19): siRNA sense strand
ucagaaaucuuggaucuau

SEQ ID NO: 712384 - RNA, 19 nt, Homo sapiens
  misc_RNA (1)...(19): siRNA sense strand
ggccuucaguaccuuauua

SEQ ID NO: 712385 - RNA, 19 nt, Homo sapiens
  misc_RNA (1)...(19): siRNA sense strand
ugggacagcucucagauaa

SEQ ID NO: 712386 - RNA, 19 nt, Homo sapiens
  misc_RNA (1)...(19): siRNA sense strand
ggacugcuguuucaugcuu

SEQ ID NO: 712387 - RNA, 19 nt, Homo sapiens
  misc_RNA (1)...(19): siRNA sense strand
gcuguuucaugcuucauua

SEQ ID NO: 712388 - RNA, 19 nt, Homo sapiens
  misc_RNA (1)...(19): siRNA sense strand
uggaggagcucgcuacuga

SEQ ID NO: 712389 - RNA, 19 nt, Homo sapiens
  misc_RNA (1)...(19): siRNA sense strand
gugaagcucaugaagauua

SEQ ID NO: 712390 - RNA, 19 nt, Homo sapiens
  misc_RNA (1)...(19): siRNA sense strand
ugacugugcuggcgauauu

SEQ ID NO: 712391 - RNA, 19 nt, Homo sapiens
  misc_RNA (1)...(19): siRNA sense strand
ggaaaguucuucgaauaca

SEQ ID NO: 712392 - RNA, 19 nt, Homo sapiens
  misc_RNA (1)...(19): siRNA sense strand
guacagcuuugaucacaau

SEQ ID NO: 712393 - RNA, 19 nt, Homo sapiens
  misc_RNA (1)...(19): siRNA sense strand
gaggaagacucugauuuca

SEQ ID NO: 712394 - RNA, 19 nt, Homo sapiens
  misc_RNA (1)...(19): siRNA sense strand
cgaauacacucugaaagga

SEQ ID NO: 712395 - RNA, 19 nt, Homo sapiens
  misc_RNA (1)...(19): siRNA sense strand
gaaggcgaccugacauuga

SEQ ID NO: 712396 - RNA, 19 nt, Homo sapiens
  misc_RNA (1)...(19): siRNA sense strand
ggcgauauuuaaugaauug

SEQ ID NO: 712397 - RNA, 19 nt, Homo sapiens
  misc_RNA (1)...(19): siRNA sense strand
aacauucgauccagaagua

SEQ ID NO: 712398 - RNA, 19 nt, Homo sapiens
  misc_RNA (1)...(19): siRNA sense strand
gaaucacacaagcucauua

SEQ ID NO: 712399 - RNA, 19 nt, Homo sapiens
  misc_RNA (1)...(19): siRNA sense strand
ucuuugagguguuacauuu

SEQ ID NO: 712400 - RNA, 19 nt, Homo sapiens
  misc_RNA (1)...(19): siRNA sense strand
gcagcucuuugagguguua

SEQ ID NO: 712401 - RNA, 19 nt, Homo sapiens
  misc_RNA (1)...(19): siRNA sense strand
gauaugcuacggaagguaa

SEQ ID NO: 712402 - RNA, 19 nt, Homo sapiens
  misc_RNA (1)...(19): siRNA sense strand
gcagaaggcauaagauugg

SEQ ID NO: 712403 - RNA, 19 nt, Homo sapiens
  misc_RNA (1)...(19): siRNA sense strand
cagaaaucuuggaucuaua

SEQ ID NO: 712404 - RNA, 19 nt, Homo sapiens
  misc_RNA (1)...(19): siRNA sense strand
ggagagcgcauggauauuc

SEQ ID NO: 712405 - RNA, 19 nt, Homo sapiens
  misc_RNA (1)...(19): siRNA sense strand
gaucuuuacgcacuucuuu

SEQ ID NO: 712406 - RNA, 19 nt, Homo sapiens
  misc_RNA (1)...(19): siRNA sense strand
augcagacguggaucuuua

SEQ ID NO: 712407 - RNA, 19 nt, Homo sapiens
  misc_RNA (1)...(19): siRNA sense strand
gcguagagcagaaugauau

SEQ ID NO: 712408 - RNA, 19 nt, Homo sapiens
  misc_RNA (1)...(19): siRNA sense strand
gaucuauacuggccuaugc

SEQ ID NO: 712409 - RNA, 19 nt, Homo sapiens
  misc_RNA (1)...(19): siRNA sense strand
cgaccacccuucucauugu

SEQ ID NO: 712410 - RNA, 19 nt, Homo sapiens
  misc_RNA (1)...(19): siRNA sense strand
gggcagaaggcauaagauu

SEQ ID NO: 712411 - RNA, 19 nt, Homo sapiens
  misc_RNA (1)...(19): siRNA sense strand
cagcgggacugaacacuca

SEQ ID NO: 712412 - RNA, 19 nt, Homo sapiens
  misc_RNA (1)...(19): siRNA sense strand
ggcauaagauuggcuggaa

SEQ ID NO: 712413 - RNA, 19 nt, Homo sapiens
  misc_RNA (1)...(19): siRNA sense strand
gagagcgcauggauauuca

SEQ ID NO: 712414 - RNA, 19 nt, Homo sapiens
  misc_RNA (1)...(19): siRNA sense strand
caggagagcgcauggauau

SEQ ID NO: 712415 - RNA, 19 nt, Homo sapiens
  misc_RNA (1)...(19): siRNA sense strand
uucaguaccuuauuaguga

SEQ ID NO: 712416 - RNA, 19 nt, Homo sapiens
  misc_RNA (1)...(19): siRNA sense strand
caacaacgacagcuuucaa

SEQ ID NO: 712417 - RNA, 19 nt, Homo sapiens
  misc_RNA (1)...(19): siRNA sense strand
ccgaagaggaccagaauga

SEQ ID NO: 712418 - RNA, 19 nt, Homo sapiens
  misc_RNA (1)...(19): siRNA sense strand
gaaaucaguccuggcaaga

SEQ ID NO: 712419 - RNA, 19 nt, Homo sapiens
  misc_RNA (1)...(19): siRNA sense strand
ggagcucgcuacugagaag

SEQ ID NO: 712420 - RNA, 19 nt, Homo sapiens
  misc_RNA (1)...(19): siRNA sense strand
gcgcuguucuuccucaugu

SEQ ID NO: 712421 - RNA, 19 nt, Homo sapiens
  misc_RNA (1)...(19): siRNA sense strand
gaagguaacauucgaucca

SEQ ID NO: 712422 - RNA, 19 nt, Homo sapiens
  misc_RNA (1)...(19): siRNA sense strand
uggcaguacuucagaguug

SEQ ID NO: 712423 - RNA, 19 nt, Homo sapiens
  misc_RNA (1)...(19): siRNA sense strand
gcauaagauuggcuggaau

SEQ ID NO: 712424 - RNA, 19 nt, Homo sapiens
  misc_RNA (1)...(19): siRNA sense strand
uuaccaaacugcacugcuu

SEQ ID NO: 712425 - RNA, 19 nt, Homo sapiens
  misc_RNA (1)...(19): siRNA sense strand
guuucaugcuucauuauug

SEQ ID NO: 712426 - RNA, 19 nt, Homo sapiens
  misc_RNA (1)...(19): siRNA sense strand
gaagaggaccagaaugaac

SEQ ID NO: 712427 - RNA, 19 nt, Homo sapiens
  misc_RNA (1)...(19): siRNA sense strand
uuggaaaucucauguaugg

SEQ ID NO: 712428 - RNA, 19 nt, Homo sapiens
  misc_RNA (1)...(19): siRNA sense strand
gagagcguccuaaaugaug

SEQ ID NO: 712429 - RNA, 19 nt, Homo sapiens
  misc_RNA (1)...(19): siRNA sense strand
ccuggaagauaaugcuuga

SEQ ID NO: 712430 - RNA, 19 nt, Homo sapiens
  misc_RNA (1)...(19): siRNA sense strand
acugaacacucacgccuuu

SEQ ID NO: 712431 - RNA, 19 nt, Homo sapiens
  misc_RNA (1)...(19): siRNA sense strand
gaaugucagcggaaaguuc

SEQ ID NO: 712432 - RNA, 19 nt, Homo sapiens
  misc_RNA (1)...(19): siRNA sense strand
uggugaagcucaugaagau

SEQ ID NO: 712433 - RNA, 19 nt, Homo sapiens
  misc_RNA (1)...(19): siRNA sense strand
gaaaguucuucgaauacac

SEQ ID NO: 712434 - RNA, 19 nt, Homo sapiens
  misc_RNA (1)...(19): siRNA sense strand
uaaccaagagccacugaga

SEQ ID NO: 712435 - RNA, 19 nt, Homo sapiens
  misc_RNA (1)...(19): siRNA sense strand
cauaagauuggcuggaauu

SEQ ID NO: 712436 - RNA, 19 nt, Homo sapiens
  misc_RNA (1)...(19): siRNA sense strand
ggcagaaggcauaagauug

SEQ ID NO: 712437 - RNA, 19 nt, Homo sapiens
  misc_RNA (1)...(19): siRNA sense strand
gaggagcucgcuacugaga

SEQ ID NO: 712438 - RNA, 19 nt, Homo sapiens
  misc_RNA (1)...(19): siRNA sense strand
ugaagcucaugaagauuau

SEQ ID NO: 712439 - RNA, 19 nt, Homo sapiens
  misc_RNA (1)...(19): siRNA sense strand
cagcuuugaucacaauuac

SEQ ID NO: 712440 - RNA, 19 nt, Homo sapiens
  misc_RNA (1)...(19): siRNA sense strand
caacgacagcuuucaaguc

SEQ ID NO: 712441 - RNA, 19 nt, Homo sapiens
  misc_RNA (1)...(19): siRNA sense strand
ugucauggcuuaacaucag

SEQ ID NO: 712442 - RNA, 19 nt, Homo sapiens
  misc_RNA (1)...(19): siRNA sense strand
gguaacauucgauccagaa

SEQ ID NO: 712443 - RNA, 19 nt, Homo sapiens
  misc_RNA (1)...(19): siRNA sense strand
ccaucuggcucuucaagca

SEQ ID NO: 712444 - RNA, 19 nt, Homo sapiens
  misc_RNA (1)...(19): siRNA sense strand
ggaaucacacaagcucauu

SEQ ID NO: 712445 - RNA, 19 nt, Homo sapiens
  misc_RNA (1)...(19): siRNA sense strand
acagcucucagauaaauuu

SEQ ID NO: 712446 - RNA, 19 nt, Homo sapiens
  misc_RNA (1)...(19): siRNA sense strand
gggcacccgccuaguguuu

SEQ ID NO: 712447 - RNA, 19 nt, Homo sapiens
  misc_RNA (1)...(19): siRNA sense strand
caaauggcuccucaaguuc

SEQ ID NO: 712448 - RNA, 19 nt, Homo sapiens
  misc_RNA (1)...(19): siRNA sense strand
cauuacaccuacaacaauc

SEQ ID NO: 712449 - RNA, 19 nt, Homo sapiens
  misc_RNA (1)...(19): siRNA sense strand
gaacacucacgccuuugau

SEQ ID NO: 712450 - RNA, 19 nt, Homo sapiens
  misc_RNA (1)...(19): siRNA sense strand
cguccuaaaugaugcuguu

SEQ ID NO: 712451 - RNA, 19 nt, Homo sapiens
  misc_RNA (1)...(19): siRNA sense strand
gaccgaaggcgaccugaca

SEQ ID NO: 712452 - RNA, 19 nt, Homo sapiens
  misc_RNA (1)...(19): siRNA sense strand
gguguacgauaaccaagag

SEQ ID NO: 712453 - RNA, 19 nt, Homo sapiens
  misc_RNA (1)...(19): siRNA sense strand
aacgacagcuuucaagucu

SEQ ID NO: 712454 - RNA, 19 nt, Homo sapiens
  misc_RNA (1)...(19): siRNA sense strand
uggcuuaacaucagaguug

SEQ ID NO: 712455 - RNA, 19 nt, Homo sapiens
  misc_RNA (1)...(19): siRNA sense strand
cacaagcucauuacaccua

SEQ ID NO: 712456 - RNA, 19 nt, Homo sapiens
  misc_RNA (1)...(19): siRNA sense strand
aaucaguccuggcaagauc

SEQ ID NO: 712457 - RNA, 19 nt, Homo sapiens
  misc_RNA (1)...(19): siRNA sense strand
agaccgggcuggccaugau

SEQ ID NO: 712458 - RNA, 19 nt, Homo sapiens
  misc_RNA (1)...(19): siRNA sense strand
cgaaggcgaccugacauug

SEQ ID NO: 712459 - RNA, 19 nt, Homo sapiens
  misc_RNA (1)...(19): siRNA sense strand
ggauauucaggcuguggua

SEQ ID NO: 712460 - RNA, 19 nt, Homo sapiens
  misc_RNA (1)...(19): siRNA sense strand
gccaacgugacuaaguuua

SEQ ID NO: 712461 - RNA, 19 nt, Homo sapiens
  misc_RNA (1)...(19): siRNA sense strand
ggagcugugacugguguua

SEQ ID NO: 712462 - RNA, 19 nt, Homo sapiens
  misc_RNA (1)...(19): siRNA sense strand
cgccugguguggcuuacua

SEQ ID NO: 712463 - RNA, 19 nt, Homo sapiens
  misc_RNA (1)...(19): siRNA sense strand
cgaagaggaccagaaugaa

SEQ ID NO: 712464 - RNA, 19 nt, Homo sapiens
  misc_RNA (1)...(19): siRNA sense strand
uacauuuccuggcagagaa

SEQ ID NO: 712465 - RNA, 19 nt, Homo sapiens
  misc_RNA (1)...(19): siRNA sense strand
gagcugugacugguguuaa

SEQ ID NO: 712466 - RNA, 19 nt, Homo sapiens
  misc_RNA (1)...(19): siRNA sense strand
auucuucugccuccaauua

SEQ ID NO: 712467 - RNA, 19 nt, Homo sapiens
  misc_RNA (1)...(19): siRNA sense strand
gguacagcuuugaucacaa

SEQ ID NO: 712468 - RNA, 19 nt, Homo sapiens
  misc_RNA (1)...(19): siRNA sense strand
guaccuuauuagugaaugu

SEQ ID NO: 712469 - RNA, 19 nt, Homo sapiens
  misc_RNA (1)...(19): siRNA sense strand
gaucuaugggcucaucguu

SEQ ID NO: 712470 - RNA, 19 nt, Homo sapiens
  misc_RNA (1)...(19): siRNA sense strand
ggagacggcgcuguucuuc

SEQ ID NO: 712471 - RNA, 19 nt, Homo sapiens
  misc_RNA (1)...(19): siRNA sense strand
ggagcgagaccugggaaug

SEQ ID NO: 712472 - RNA, 19 nt, Homo sapiens
  misc_RNA (1)...(19): siRNA sense strand
cuaccaggcugucguguuu

SEQ ID NO: 712473 - RNA, 19 nt, Homo sapiens
  misc_RNA (1)...(19): siRNA sense strand
gcaguagccaggauacaua

SEQ ID NO: 712474 - RNA, 19 nt, Homo sapiens
  misc_RNA (1)...(19): siRNA sense strand
cagcaauacugaagaucua

SEQ ID NO: 712475 - RNA, 19 nt, Homo sapiens
  misc_RNA (1)...(19): siRNA sense strand
gagccacacuguuccauca

SEQ ID NO: 712476 - RNA, 19 nt, Homo sapiens
  misc_RNA (1)...(19): siRNA sense strand
gcugggcucugccaacuug

SEQ ID NO: 712477 - RNA, 19 nt, Homo sapiens
  misc_RNA (1)...(19): siRNA sense strand
ggauaucaagacuguguua

SEQ ID NO: 712478 - RNA, 19 nt, Homo sapiens
  misc_RNA (1)...(19): siRNA sense strand
ggauacuggugcugaauca

SEQ ID NO: 712479 - RNA, 19 nt, Homo sapiens
  misc_RNA (1)...(19): siRNA sense strand
gaggccagcuccugcuaga

SEQ ID NO: 712480 - RNA, 19 nt, Homo sapiens
  misc_RNA (1)...(19): siRNA sense strand
guacaauccgccaguuuga

SEQ ID NO: 712481 - RNA, 19 nt, Homo sapiens
  misc_RNA (1)...(19): siRNA sense strand
ucaacucacugcucuucaa

SEQ ID NO: 712482 - RNA, 19 nt, Homo sapiens
  misc_RNA (1)...(19): siRNA sense strand
gagggauacuggugcugaa

SEQ ID NO: 712483 - RNA, 19 nt, Homo sapiens
  misc_RNA (1)...(19): siRNA sense strand
gcagcaagcccuagaacca

SEQ ID NO: 712484 - RNA, 19 nt, Homo sapiens
  misc_RNA (1)...(19): siRNA sense strand
gcaccuaguuaaccaagcu

SEQ ID NO: 712485 - RNA, 19 nt, Homo sapiens
  misc_RNA (1)...(19): siRNA sense strand
acccaacgcugugguguuu

SEQ ID NO: 712486 - RNA, 19 nt, Homo sapiens
  misc_RNA (1)...(19): siRNA sense strand
aagacuguguuaccuacua

SEQ ID NO: 712487 - RNA, 19 nt, Homo sapiens
  misc_RNA (1)...(19): siRNA sense strand
acucacugcucuucaauca

SEQ ID NO: 712488 - RNA, 19 nt, Homo sapiens
  misc_RNA (1)...(19): siRNA sense strand
cugaagaucuagagacagu

SEQ ID NO: 712489 - RNA, 19 nt, Homo sapiens
  misc_RNA (1)...(19): siRNA sense strand
ccaagacccugauccuacu

SEQ ID NO: 712490 - RNA, 19 nt, Homo sapiens
  misc_RNA (1)...(19): siRNA sense strand
caccuucucucugcucuug

SEQ ID NO: 712491 - RNA, 19 nt, Homo sapiens
  misc_RNA (1)...(19): siRNA sense strand
caaagcagcaagcccuaga

SEQ ID NO: 712492 - RNA, 19 nt, Homo sapiens
  misc_RNA (1)...(19): siRNA sense strand
caucuguggccuuuggaua

SEQ ID NO: 712493 - RNA, 19 nt, Homo sapiens
  misc_RNA (1)...(19): siRNA sense strand
gggcagacaccuucucucu

SEQ ID NO: 712494 - RNA, 19 nt, Homo sapiens
  misc_RNA (1)...(19): siRNA sense strand
ccucagggcucucuuaccu

SEQ ID NO: 712495 - RNA, 19 nt, Homo sapiens
  misc_RNA (1)...(19): siRNA sense strand
uacaaagcaucuuccaagu

SEQ ID NO: 712496 - RNA, 19 nt, Homo sapiens
  misc_RNA (1)...(19): siRNA sense strand
ugaccucagggcucucuua

SEQ ID NO: 712497 - RNA, 19 nt, Homo sapiens
  misc_RNA (1)...(19): siRNA sense strand
gcacugacucugucugcau

SEQ ID NO: 712498 - RNA, 19 nt, Homo sapiens
  misc_RNA (1)...(19): siRNA sense strand
gcaauacugaagaucuaga

SEQ ID NO: 712499 - RNA, 19 nt, Homo sapiens
  misc_RNA (1)...(19): siRNA sense strand
ucucugcucuuggcucuug

SEQ ID NO: 712500 - RNA, 19 nt, Homo sapiens
  misc_RNA (1)...(19): siRNA sense strand
cgucugugcccuucccaua

SEQ ID NO: 712501 - RNA, 19 nt, Homo sapiens
  misc_RNA (1)...(19): siRNA sense strand
ccggaucccugugcucuau

SEQ ID NO: 712502 - RNA, 19 nt, Homo sapiens
  misc_RNA (1)...(19): siRNA sense strand
gacagucgugaaccacaua

SEQ ID NO: 712503 - RNA, 19 nt, Homo sapiens
  misc_RNA (1)...(19): siRNA sense strand
cagagugacauccuccaaa

SEQ ID NO: 712504 - RNA, 19 nt, Homo sapiens
  misc_RNA (1)...(19): siRNA sense strand
uguguuaccuacuacaaag

SEQ ID NO: 712505 - RNA, 19 nt, Homo sapiens
  misc_RNA (1)...(19): siRNA sense strand
agagugacauccuccaaac

SEQ ID NO: 712506 - RNA, 19 nt, Homo sapiens
  misc_RNA (1)...(19): siRNA sense strand
uacugaagaucuagagaca

SEQ ID NO: 712507 - RNA, 19 nt, Homo sapiens
  misc_RNA (1)...(19): siRNA sense strand
accaggcugucguguuuaa

SEQ ID NO: 712508 - RNA, 19 nt, Homo sapiens
  misc_RNA (1)...(19): siRNA sense strand
caacucacugcucuucaau

SEQ ID NO: 712509 - RNA, 19 nt, Homo sapiens
  misc_RNA (1)...(19): siRNA sense strand
cguacaauccgccaguuug

SEQ ID NO: 712510 - RNA, 19 nt, Homo sapiens
  misc_RNA (1)...(19): siRNA sense strand
cuacugggcaugugugcuu

SEQ ID NO: 712511 - RNA, 19 nt, Homo sapiens
  misc_RNA (1)...(19): siRNA sense strand
ccaggauacauacgucuug

SEQ ID NO: 712512 - RNA, 19 nt, Homo sapiens
  misc_RNA (1)...(19): siRNA sense strand
cuaguuaaccaagcucuga

SEQ ID NO: 712513 - RNA, 19 nt, Homo sapiens
  misc_RNA (1)...(19): siRNA sense strand
gcaccugggcagacaccuu

SEQ ID NO: 712514 - RNA, 19 nt, Homo sapiens
  misc_RNA (1)...(19): siRNA sense strand
ugagccgccucuugcauca

SEQ ID NO: 712515 - RNA, 19 nt, Homo sapiens
  misc_RNA (1)...(19): siRNA sense strand
uagagacagucgugaacca

SEQ ID NO: 712516 - RNA, 19 nt, Homo sapiens
  misc_RNA (1)...(19): siRNA sense strand
ggaucccugugcucuaucu

SEQ ID NO: 712517 - RNA, 19 nt, Homo sapiens
  misc_RNA (1)...(19): siRNA sense strand
ccuagaaccaagauagaug

SEQ ID NO: 712518 - RNA, 19 nt, Homo sapiens
  misc_RNA (1)...(19): siRNA sense strand
gcccuagaaccaagauaga

SEQ ID NO: 712519 - RNA, 19 nt, Homo sapiens
  misc_RNA (1)...(19): siRNA sense strand
uaucaagacuguguuaccu

SEQ ID NO: 712520 - RNA, 19 nt, Homo sapiens
  misc_RNA (1)...(19): siRNA sense strand
acaauccgccaguuugaug

SEQ ID NO: 712521 - RNA, 19 nt, Homo sapiens
  misc_RNA (1)...(19): siRNA sense strand
gcucugccaacuuguggaa

SEQ ID NO: 712522 - RNA, 19 nt, Homo sapiens
  misc_RNA (1)...(19): siRNA sense strand
cagcaagcccuagaaccaa

SEQ ID NO: 712523 - RNA, 19 nt, Homo sapiens
  misc_RNA (1)...(19): siRNA sense strand
ccuaguccuuuaucagagu

SEQ ID NO: 712524 - RNA, 19 nt, Homo sapiens
  misc_RNA (1)...(19): siRNA sense strand
ucugugcccuucccauaca

SEQ ID NO: 712525 - RNA, 19 nt, Homo sapiens
  misc_RNA (1)...(19): siRNA sense strand
gcaagcccuagaaccaaga

SEQ ID NO: 712526 - RNA, 19 nt, Homo sapiens
  misc_RNA (1)...(19): siRNA sense strand
cuuuggauaucaagacugu

SEQ ID NO: 712527 - RNA, 19 nt, Homo sapiens
  misc_RNA (1)...(19): siRNA sense strand
agacagucgugaaccacau

SEQ ID NO: 712528 - RNA, 19 nt, Homo sapiens
  misc_RNA (1)...(19): siRNA sense strand
ccuacuacccagcccauug

SEQ ID NO: 712529 - RNA, 19 nt, Homo sapiens
  misc_RNA (1)...(19): siRNA sense strand
cuacuacccagcccauugu

SEQ ID NO: 712530 - RNA, 19 nt, Homo sapiens
  misc_RNA (1)...(19): siRNA sense strand
gcuaccaggcugucguguu

SEQ ID NO: 712531 - RNA, 19 nt, Homo sapiens
  misc_RNA (1)...(19): siRNA sense strand
accacucgcucccuggaaa

SEQ ID NO: 712532 - RNA, 19 nt, Homo sapiens
  misc_RNA (1)...(19): siRNA sense strand
ccagcaauacugaagaucu

SEQ ID NO: 712533 - RNA, 19 nt, Homo sapiens
  misc_RNA (1)...(19): siRNA sense strand
cuaccaggcugucguguuu

SEQ ID NO: 712534 - RNA, 19 nt, Homo sapiens
  misc_RNA (1)...(19): siRNA sense strand
gcaguagccaggauacaua

SEQ ID NO: 712535 - RNA, 19 nt, Homo sapiens
  misc_RNA (1)...(19): siRNA sense strand
cagcaauacugaagaucua

SEQ ID NO: 712536 - RNA, 19 nt, Homo sapiens
  misc_RNA (1)...(19): siRNA sense strand
gagccacacuguuccauca

SEQ ID NO: 712537 - RNA, 19 nt, Homo sapiens
  misc_RNA (1)...(19): siRNA sense strand
gcugggcucugccaacuug

SEQ ID NO: 712538 - RNA, 19 nt, Homo sapiens
  misc_RNA (1)...(19): siRNA sense strand
ggauaucaagacuguguua

SEQ ID NO: 712539 - RNA, 19 nt, Homo sapiens
  misc_RNA (1)...(19): siRNA sense strand
ggauacuggugcugaauca

SEQ ID NO: 712540 - RNA, 19 nt, Homo sapiens
  misc_RNA (1)...(19): siRNA sense strand
gaggccagcuccugcuaga

SEQ ID NO: 712541 - RNA, 19 nt, Homo sapiens
  misc_RNA (1)...(19): siRNA sense strand
guacaauccgccaguuuga

SEQ ID NO: 712542 - RNA, 19 nt, Homo sapiens
  misc_RNA (1)...(19): siRNA sense strand
ucaacucacugcucuucaa

SEQ ID NO: 712543 - RNA, 19 nt, Homo sapiens
  misc_RNA (1)...(19): siRNA sense strand
gagggauacuggugcugaa

SEQ ID NO: 712544 - RNA, 19 nt, Homo sapiens
  misc_RNA (1)...(19): siRNA sense strand
gcagcaagcccuagaacca

SEQ ID NO: 712545 - RNA, 19 nt, Homo sapiens
  misc_RNA (1)...(19): siRNA sense strand
gcaccuaguuaaccaagcu

SEQ ID NO: 712546 - RNA, 19 nt, Homo sapiens
  misc_RNA (1)...(19): siRNA sense strand
acccaacgcugugguguuu

SEQ ID NO: 712547 - RNA, 19 nt, Homo sapiens
  misc_RNA (1)...(19): siRNA sense strand
aagacuguguuaccuacua

SEQ ID NO: 712548 - RNA, 19 nt, Homo sapiens
  misc_RNA (1)...(19): siRNA sense strand
acucacugcucuucaauca

SEQ ID NO: 712549 - RNA, 19 nt, Homo sapiens
  misc_RNA (1)...(19): siRNA sense strand
cugaagaucuagagacagu

SEQ ID NO: 712550 - RNA, 19 nt, Homo sapiens
  misc_RNA (1)...(19): siRNA sense strand
ccaagacccugauccuacu

SEQ ID NO: 712551 - RNA, 19 nt, Homo sapiens
  misc_RNA (1)...(19): siRNA sense strand
caccuucucucugcucuug

SEQ ID NO: 712552 - RNA, 19 nt, Homo sapiens
  misc_RNA (1)...(19): siRNA sense strand
caaagcagcaagcccuaga

SEQ ID NO: 712553 - RNA, 19 nt, Homo sapiens
  misc_RNA (1)...(19): siRNA sense strand
caucuguggccuuuggaua

SEQ ID NO: 712554 - RNA, 19 nt, Homo sapiens
  misc_RNA (1)...(19): siRNA sense strand
gggcagacaccuucucucu

SEQ ID NO: 712555 - RNA, 19 nt, Homo sapiens
  misc_RNA (1)...(19): siRNA sense strand
uacaaagcaucuuccaagu

SEQ ID NO: 712556 - RNA, 19 nt, Homo sapiens
  misc_RNA (1)...(19): siRNA sense strand
gcacugacucugucugcau

SEQ ID NO: 712557 - RNA, 19 nt, Homo sapiens
  misc_RNA (1)...(19): siRNA sense strand
gcaauacugaagaucuaga

SEQ ID NO: 712558 - RNA, 19 nt, Homo sapiens
  misc_RNA (1)...(19): siRNA sense strand
ucucugcucuuggcucuug

SEQ ID NO: 712559 - RNA, 19 nt, Homo sapiens
  misc_RNA (1)...(19): siRNA sense strand
gacagucgugaaccacaua

SEQ ID NO: 712560 - RNA, 19 nt, Homo sapiens
  misc_RNA (1)...(19): siRNA sense strand
cagagugacauccuccaaa

SEQ ID NO: 712561 - RNA, 19 nt, Homo sapiens
  misc_RNA (1)...(19): siRNA sense strand
uguguuaccuacuacaaag

SEQ ID NO: 712562 - RNA, 19 nt, Homo sapiens
  misc_RNA (1)...(19): siRNA sense strand
agagugacauccuccaaac

SEQ ID NO: 712563 - RNA, 19 nt, Homo sapiens
  misc_RNA (1)...(19): siRNA sense strand
uacugaagaucuagagaca

SEQ ID NO: 712564 - RNA, 19 nt, Homo sapiens
  misc_RNA (1)...(19): siRNA sense strand
accaggcugucguguuuaa

SEQ ID NO: 712565 - RNA, 19 nt, Homo sapiens
  misc_RNA (1)...(19): siRNA sense strand
cuacugggcaugugugcuu

SEQ ID NO: 712566 - RNA, 19 nt, Homo sapiens
  misc_RNA (1)...(19): siRNA sense strand
cguacaauccgccaguuug

SEQ ID NO: 712567 - RNA, 19 nt, Homo sapiens
  misc_RNA (1)...(19): siRNA sense strand
caacucacugcucuucaau

SEQ ID NO: 712568 - RNA, 19 nt, Homo sapiens
  misc_RNA (1)...(19): siRNA sense strand
ccaggauacauacgucuug

SEQ ID NO: 712569 - RNA, 19 nt, Homo sapiens
  misc_RNA (1)...(19): siRNA sense strand
cuaguuaaccaagcucuga

SEQ ID NO: 712570 - RNA, 19 nt, Homo sapiens
  misc_RNA (1)...(19): siRNA sense strand
gcaccugggcagacaccuu

SEQ ID NO: 712571 - RNA, 19 nt, Homo sapiens
  misc_RNA (1)...(19): siRNA sense strand
uagagacagucgugaacca

SEQ ID NO: 712572 - RNA, 19 nt, Homo sapiens
  misc_RNA (1)...(19): siRNA sense strand
uaucaagacuguguuaccu

SEQ ID NO: 712573 - RNA, 19 nt, Homo sapiens
  misc_RNA (1)...(19): siRNA sense strand
acaauccgccaguuugaug

SEQ ID NO: 712574 - RNA, 19 nt, Homo sapiens
  misc_RNA (1)...(19): siRNA sense strand
gcucugccaacuuguggaa

SEQ ID NO: 712575 - RNA, 19 nt, Homo sapiens
  misc_RNA (1)...(19): siRNA sense strand
cagcaagcccuagaaccaa

SEQ ID NO: 712576 - RNA, 19 nt, Homo sapiens
  misc_RNA (1)...(19): siRNA sense strand
ccuaguccuuuaucagagu

SEQ ID NO: 712577 - RNA, 19 nt, Homo sapiens
  misc_RNA (1)...(19): siRNA sense strand
gcaagcccuagaaccaaga

SEQ ID NO: 712578 - RNA, 19 nt, Homo sapiens
  misc_RNA (1)...(19): siRNA sense strand
cuuuggauaucaagacugu

SEQ ID NO: 712579 - RNA, 19 nt, Homo sapiens
  misc_RNA (1)...(19): siRNA sense strand
agacagucgugaaccacau

SEQ ID NO: 712580 - RNA, 19 nt, Homo sapiens
  misc_RNA (1)...(19): siRNA sense strand
ccuacuacccagcccauug

SEQ ID NO: 712581 - RNA, 19 nt, Homo sapiens
  misc_RNA (1)...(19): siRNA sense strand
cuacuacccagcccauugu

SEQ ID NO: 712582 - RNA, 19 nt, Homo sapiens
  misc_RNA (1)...(19): siRNA sense strand
gcuaccaggcugucguguu

SEQ ID NO: 712583 - RNA, 19 nt, Homo sapiens
  misc_RNA (1)...(19): siRNA sense strand
accacucgcucccuggaaa

SEQ ID NO: 712584 - RNA, 19 nt, Homo sapiens
  misc_RNA (1)...(19): siRNA sense strand
ccagcaauacugaagaucu

SEQ ID NO: 712585 - RNA, 19 nt, Homo sapiens
  misc_RNA (1)...(19): siRNA sense strand
ucgcagcucuggugauuug

SEQ ID NO: 712586 - RNA, 19 nt, Homo sapiens
  misc_RNA (1)...(19): siRNA sense strand
gagaagaagcaguggaaga

SEQ ID NO: 712587 - RNA, 19 nt, Homo sapiens
  misc_RNA (1)...(19): siRNA sense strand
gcagcgggucuacguauuu

SEQ ID NO: 712588 - RNA, 19 nt, Homo sapiens
  misc_RNA (1)...(19): siRNA sense strand
gaugaaccgucgcuccaau

SEQ ID NO: 712589 - RNA, 19 nt, Homo sapiens
  misc_RNA (1)...(19): siRNA sense strand
gaaagguggagguggaaga

SEQ ID NO: 712590 - RNA, 19 nt, Homo sapiens
  misc_RNA (1)...(19): siRNA sense strand
ggagcuuggugcugaggaa

SEQ ID NO: 712591 - RNA, 19 nt, Homo sapiens
  misc_RNA (1)...(19): siRNA sense strand
ccaguucaaugagaccuuu

SEQ ID NO: 712592 - RNA, 19 nt, Homo sapiens
  misc_RNA (1)...(19): siRNA sense strand
gauggguugugucuucuuc

SEQ ID NO: 712593 - RNA, 19 nt, Homo sapiens
  misc_RNA (1)...(19): siRNA sense strand
agaagaagcaguggaagaa

SEQ ID NO: 712594 - RNA, 19 nt, Homo sapiens
  misc_RNA (1)...(19): siRNA sense strand
gguugugucuucuucuuca

SEQ ID NO: 712595 - RNA, 19 nt, Homo sapiens
  misc_RNA (1)...(19): siRNA sense strand
cuacguauuuccuccaaag

SEQ ID NO: 712596 - RNA, 19 nt, Homo sapiens
  misc_RNA (1)...(19): siRNA sense strand
caaagccgaucaccuugac

SEQ ID NO: 712597 - RNA, 19 nt, Homo sapiens
  misc_RNA (1)...(19): siRNA sense strand
ggcagcgggucuacguauu

SEQ ID NO: 712598 - RNA, 19 nt, Homo sapiens
  misc_RNA (1)...(19): siRNA sense strand
agugauggguugugucuuc

SEQ ID NO: 712599 - RNA, 19 nt, Homo sapiens
  misc_RNA (1)...(19): siRNA sense strand
aagaagcaguggaagaagu

SEQ ID NO: 712600 - RNA, 19 nt, Homo sapiens
  misc_RNA (1)...(19): siRNA sense strand
ccaaagccgaucaccuuga

SEQ ID NO: 712601 - RNA, 19 nt, Homo sapiens
  misc_RNA (1)...(19): siRNA sense strand
agacagugauggguugugu

SEQ ID NO: 712602 - RNA, 19 nt, Homo sapiens
  misc_RNA (1)...(19): siRNA sense strand
cagcgggucuacguauuuc

SEQ ID NO: 712603 - RNA, 19 nt, Homo sapiens
  misc_RNA (1)...(19): siRNA sense strand
gaagaagcaguggaagaag

SEQ ID NO: 712604 - RNA, 19 nt, Homo sapiens
  misc_RNA (1)...(19): siRNA sense strand
cggcuccaguucaaugaga

SEQ ID NO: 712605 - RNA, 19 nt, Homo sapiens
  misc_RNA (1)...(19): siRNA sense strand
cuccaaagccgaucaccuu

SEQ ID NO: 712606 - RNA, 19 nt, Homo sapiens
  misc_RNA (1)...(19): siRNA sense strand
auucgcagcucuggugauu

SEQ ID NO: 712607 - RNA, 19 nt, Homo sapiens
  misc_RNA (1)...(19): siRNA sense strand
gcuaugcccagcgcuacua

SEQ ID NO: 712608 - RNA, 19 nt, Homo sapiens
  misc_RNA (1)...(19): siRNA sense strand
ugugucuucuucuucauug

SEQ ID NO: 712609 - RNA, 19 nt, Homo sapiens
  misc_RNA (1)...(19): siRNA sense strand
gcugggacuaugagaagaa

SEQ ID NO: 712610 - RNA, 19 nt, Homo sapiens
  misc_RNA (1)...(19): siRNA sense strand
uguaccggcuccaguucaa

SEQ ID NO: 712611 - RNA, 19 nt, Homo sapiens
  misc_RNA (1)...(19): siRNA sense strand
gggaugcacagcucagaag

SEQ ID NO: 712612 - RNA, 19 nt, Homo sapiens
  misc_RNA (1)...(19): siRNA sense strand
ucaccuaccuggagaaaua

SEQ ID NO: 712613 - RNA, 19 nt, Homo sapiens
  misc_RNA (1)...(19): siRNA sense strand
gaggugagcuacaaacaca

SEQ ID NO: 712614 - RNA, 19 nt, Homo sapiens
  misc_RNA (1)...(19): siRNA sense strand
uugaggaccugaagaagua

SEQ ID NO: 712615 - RNA, 19 nt, Homo sapiens
  misc_RNA (1)...(19): siRNA sense strand
gcaagcagcucaccuaccu

SEQ ID NO: 712616 - RNA, 19 nt, Homo sapiens
  misc_RNA (1)...(19): siRNA sense strand
aaacgccgcuggagaagga

SEQ ID NO: 712617 - RNA, 19 nt, Homo sapiens
  misc_RNA (1)...(19): siRNA sense strand
ugaagugaccuaugacaaa

SEQ ID NO: 712618 - RNA, 19 nt, Homo sapiens
  misc_RNA (1)...(19): siRNA sense strand
cacaugcgcuuccucauca

SEQ ID NO: 712619 - RNA, 19 nt, Homo sapiens
  misc_RNA (1)...(19): siRNA sense strand
gaagugaccuaugacaaaa

SEQ ID NO: 712620 - RNA, 19 nt, Homo sapiens
  misc_RNA (1)...(19): siRNA sense strand
ugugugaagugaccuauga

SEQ ID NO: 712621 - RNA, 19 nt, Homo sapiens
  misc_RNA (1)...(19): siRNA sense strand
aaacagaggcugcgguuca

SEQ ID NO: 712622 - RNA, 19 nt, Homo sapiens
  misc_RNA (1)...(19): siRNA sense strand
gcggagccaucaacagcaa

SEQ ID NO: 712623 - RNA, 19 nt, Homo sapiens
  misc_RNA (1)...(19): siRNA sense strand
guuguggacuggccguuug

SEQ ID NO: 712624 - RNA, 19 nt, Homo sapiens
  misc_RNA (1)...(19): siRNA sense strand
ggacuggccguuugacgau

SEQ ID NO: 712625 - RNA, 19 nt, Homo sapiens
  misc_RNA (1)...(19): siRNA sense strand
aagacccggugcugcguua

SEQ ID NO: 712626 - RNA, 19 nt, Homo sapiens
  misc_RNA (1)...(19): siRNA sense strand
gugcgugugugugaaguga

SEQ ID NO: 712627 - RNA, 19 nt, Homo sapiens
  misc_RNA (1)...(19): siRNA sense strand
ucauugaggaccugaagaa

SEQ ID NO: 712628 - RNA, 19 nt, Homo sapiens
  misc_RNA (1)...(19): siRNA sense strand
ugaaggccaaguucuguga

SEQ ID NO: 712629 - RNA, 19 nt, Homo sapiens
  misc_RNA (1)...(19): siRNA sense strand
acagcaagcagcucaccua

SEQ ID NO: 712630 - RNA, 19 nt, Homo sapiens
  misc_RNA (1)...(19): siRNA sense strand
gugaagugaccuaugacaa

SEQ ID NO: 712631 - RNA, 19 nt, Homo sapiens
  misc_RNA (1)...(19): siRNA sense strand
ggugagcuacaaacacaug

SEQ ID NO: 712632 - RNA, 19 nt, Homo sapiens
  misc_RNA (1)...(19): siRNA sense strand
ggugaaggccaaguucugu

SEQ ID NO: 712633 - RNA, 19 nt, Homo sapiens
  misc_RNA (1)...(19): siRNA sense strand
ccggcaagguaguggaaga

SEQ ID NO: 712634 - RNA, 19 nt, Homo sapiens
  misc_RNA (1)...(19): siRNA sense strand
acacaugcgcuuccucauc

SEQ ID NO: 712635 - RNA, 19 nt, Homo sapiens
  misc_RNA (1)...(19): siRNA sense strand
gcucaccuaccuggagaaa

SEQ ID NO: 712636 - RNA, 19 nt, Homo sapiens
  misc_RNA (1)...(19): siRNA sense strand
acgcucagcaccuucauug

SEQ ID NO: 712637 - RNA, 19 nt, Homo sapiens
  misc_RNA (1)...(19): siRNA sense strand
acaaaacgccgcuggagaa

SEQ ID NO: 712638 - RNA, 19 nt, Homo sapiens
  misc_RNA (1)...(19): siRNA sense strand
ucaccuaccuggagaaaua

SEQ ID NO: 712639 - RNA, 19 nt, Homo sapiens
  misc_RNA (1)...(19): siRNA sense strand
gaggugagcuacaaacaca

SEQ ID NO: 712640 - RNA, 19 nt, Homo sapiens
  misc_RNA (1)...(19): siRNA sense strand
uugaggaccugaagaagua

SEQ ID NO: 712641 - RNA, 19 nt, Homo sapiens
  misc_RNA (1)...(19): siRNA sense strand
gcaagcagcucaccuaccu

SEQ ID NO: 712642 - RNA, 19 nt, Homo sapiens
  misc_RNA (1)...(19): siRNA sense strand
aaacgccgcuggagaagga

SEQ ID NO: 712643 - RNA, 19 nt, Homo sapiens
  misc_RNA (1)...(19): siRNA sense strand
ugaagugaccuaugacaaa

SEQ ID NO: 712644 - RNA, 19 nt, Homo sapiens
  misc_RNA (1)...(19): siRNA sense strand
cacaugcgcuuccucauca

SEQ ID NO: 712645 - RNA, 19 nt, Homo sapiens
  misc_RNA (1)...(19): siRNA sense strand
gaagugaccuaugacaaaa

SEQ ID NO: 712646 - RNA, 19 nt, Homo sapiens
  misc_RNA (1)...(19): siRNA sense strand
ugugugaagugaccuauga

SEQ ID NO: 712647 - RNA, 19 nt, Homo sapiens
  misc_RNA (1)...(19): siRNA sense strand
aaacagaggcugcgguuca

SEQ ID NO: 712648 - RNA, 19 nt, Homo sapiens
  misc_RNA (1)...(19): siRNA sense strand
gcggagccaucaacagcaa

SEQ ID NO: 712649 - RNA, 19 nt, Homo sapiens
  misc_RNA (1)...(19): siRNA sense strand
guuguggacuggccguuug

SEQ ID NO: 712650 - RNA, 19 nt, Homo sapiens
  misc_RNA (1)...(19): siRNA sense strand
ggacuggccguuugacgau

SEQ ID NO: 712651 - RNA, 19 nt, Homo sapiens
  misc_RNA (1)...(19): siRNA sense strand
aagacccggugcugcguua

SEQ ID NO: 712652 - RNA, 19 nt, Homo sapiens
  misc_RNA (1)...(19): siRNA sense strand
gugcgugugugugaaguga

SEQ ID NO: 712653 - RNA, 19 nt, Homo sapiens
  misc_RNA (1)...(19): siRNA sense strand
ucauugaggaccugaagaa

SEQ ID NO: 712654 - RNA, 19 nt, Homo sapiens
  misc_RNA (1)...(19): siRNA sense strand
ugaaggccaaguucuguga

SEQ ID NO: 712655 - RNA, 19 nt, Homo sapiens
  misc_RNA (1)...(19): siRNA sense strand
acagcaagcagcucaccua

SEQ ID NO: 712656 - RNA, 19 nt, Homo sapiens
  misc_RNA (1)...(19): siRNA sense strand
gugaagugaccuaugacaa

SEQ ID NO: 712657 - RNA, 19 nt, Homo sapiens
  misc_RNA (1)...(19): siRNA sense strand
ggugagcuacaaacacaug

SEQ ID NO: 712658 - RNA, 19 nt, Homo sapiens
  misc_RNA (1)...(19): siRNA sense strand
ggugaaggccaaguucugu

SEQ ID NO: 712659 - RNA, 19 nt, Homo sapiens
  misc_RNA (1)...(19): siRNA sense strand
ccggcaagguaguggaaga

SEQ ID NO: 712660 - RNA, 19 nt, Homo sapiens
  misc_RNA (1)...(19): siRNA sense strand
acacaugcgcuuccucauc

SEQ ID NO: 712661 - RNA, 19 nt, Homo sapiens
  misc_RNA (1)...(19): siRNA sense strand
gcucaccuaccuggagaaa

SEQ ID NO: 712662 - RNA, 19 nt, Homo sapiens
  misc_RNA (1)...(19): siRNA sense strand
acgcucagcaccuucauug

SEQ ID NO: 712663 - RNA, 19 nt, Homo sapiens
  misc_RNA (1)...(19): siRNA sense strand
acaaaacgccgcuggagaa

SEQ ID NO: 712664 - RNA, 19 nt, Homo sapiens
  misc_RNA (1)...(19): siRNA sense strand
ucaccuaccuggagaaaua

SEQ ID NO: 712665 - RNA, 19 nt, Homo sapiens
  misc_RNA (1)...(19): siRNA sense strand
gaggugagcuacaaacaca

SEQ ID NO: 712666 - RNA, 19 nt, Homo sapiens
  misc_RNA (1)...(19): siRNA sense strand
uugaggaccugaagaagua

SEQ ID NO: 712667 - RNA, 19 nt, Homo sapiens
  misc_RNA (1)...(19): siRNA sense strand
gcaagcagcucaccuaccu

SEQ ID NO: 712668 - RNA, 19 nt, Homo sapiens
  misc_RNA (1)...(19): siRNA sense strand
aaacgccgcuggagaagga

SEQ ID NO: 712669 - RNA, 19 nt, Homo sapiens
  misc_RNA (1)...(19): siRNA sense strand
ugaagugaccuaugacaaa

SEQ ID NO: 712670 - RNA, 19 nt, Homo sapiens
  misc_RNA (1)...(19): siRNA sense strand
cacaugcgcuuccucauca

SEQ ID NO: 712671 - RNA, 19 nt, Homo sapiens
  misc_RNA (1)...(19): siRNA sense strand
gaagugaccuaugacaaaa

SEQ ID NO: 712672 - RNA, 19 nt, Homo sapiens
  misc_RNA (1)...(19): siRNA sense strand
ugugugaagugaccuauga

SEQ ID NO: 712673 - RNA, 19 nt, Homo sapiens
  misc_RNA (1)...(19): siRNA sense strand
aaacagaggcugcgguuca

SEQ ID NO: 712674 - RNA, 19 nt, Homo sapiens
  misc_RNA (1)...(19): siRNA sense strand
gcggagccaucaacagcaa

SEQ ID NO: 712675 - RNA, 19 nt, Homo sapiens
  misc_RNA (1)...(19): siRNA sense strand
guuguggacuggccguuug

SEQ ID NO: 712676 - RNA, 19 nt, Homo sapiens
  misc_RNA (1)...(19): siRNA sense strand
ggacuggccguuugacgau

SEQ ID NO: 712677 - RNA, 19 nt, Homo sapiens
  misc_RNA (1)...(19): siRNA sense strand
aagacccggugcugcguua

SEQ ID NO: 712678 - RNA, 19 nt, Homo sapiens
  misc_RNA (1)...(19): siRNA sense strand
gugcgugugugugaaguga

SEQ ID NO: 712679 - RNA, 19 nt, Homo sapiens
  misc_RNA (1)...(19): siRNA sense strand
ucauugaggaccugaagaa

SEQ ID NO: 712680 - RNA, 19 nt, Homo sapiens
  misc_RNA (1)...(19): siRNA sense strand
ugaaggccaaguucuguga

SEQ ID NO: 712681 - RNA, 19 nt, Homo sapiens
  misc_RNA (1)...(19): siRNA sense strand
acagcaagcagcucaccua

SEQ ID NO: 712682 - RNA, 19 nt, Homo sapiens
  misc_RNA (1)...(19): siRNA sense strand
gugaagugaccuaugacaa

SEQ ID NO: 712683 - RNA, 19 nt, Homo sapiens
  misc_RNA (1)...(19): siRNA sense strand
ggugagcuacaaacacaug

SEQ ID NO: 712684 - RNA, 19 nt, Homo sapiens
  misc_RNA (1)...(19): siRNA sense strand
ggugaaggccaaguucugu

SEQ ID NO: 712685 - RNA, 19 nt, Homo sapiens
  misc_RNA (1)...(19): siRNA sense strand
ccggcaagguaguggaaga

SEQ ID NO: 712686 - RNA, 19 nt, Homo sapiens
  misc_RNA (1)...(19): siRNA sense strand
acacaugcgcuuccucauc

SEQ ID NO: 712687 - RNA, 19 nt, Homo sapiens
  misc_RNA (1)...(19): siRNA sense strand
gcucaccuaccuggagaaa

SEQ ID NO: 712688 - RNA, 19 nt, Homo sapiens
  misc_RNA (1)...(19): siRNA sense strand
acgcucagcaccuucauug

SEQ ID NO: 712689 - RNA, 19 nt, Homo sapiens
  misc_RNA (1)...(19): siRNA sense strand
acaaaacgccgcuggagaa

SEQ ID NO: 712690 - RNA, 19 nt, Homo sapiens
  misc_RNA (1)...(19): siRNA sense strand
ucaccuaccuggagaaaua

SEQ ID NO: 712691 - RNA, 19 nt, Homo sapiens
  misc_RNA (1)...(19): siRNA sense strand
gaggugagcuacaaacaca

SEQ ID NO: 712692 - RNA, 19 nt, Homo sapiens
  misc_RNA (1)...(19): siRNA sense strand
uugaggaccugaagaagua

SEQ ID NO: 712693 - RNA, 19 nt, Homo sapiens
  misc_RNA (1)...(19): siRNA sense strand
gcaagcagcucaccuaccu

SEQ ID NO: 712694 - RNA, 19 nt, Homo sapiens
  misc_RNA (1)...(19): siRNA sense strand
aaacgccgcuggagaagga

SEQ ID NO: 712695 - RNA, 19 nt, Homo sapiens
  misc_RNA (1)...(19): siRNA sense strand
ugaagugaccuaugacaaa

SEQ ID NO: 712696 - RNA, 19 nt, Homo sapiens
  misc_RNA (1)...(19): siRNA sense strand
cacaugcgcuuccucauca

SEQ ID NO: 712697 - RNA, 19 nt, Homo sapiens
  misc_RNA (1)...(19): siRNA sense strand
gaagugaccuaugacaaaa

SEQ ID NO: 712698 - RNA, 19 nt, Homo sapiens
  misc_RNA (1)...(19): siRNA sense strand
ugugugaagugaccuauga

SEQ ID NO: 712699 - RNA, 19 nt, Homo sapiens
  misc_RNA (1)...(19): siRNA sense strand
aaacagaggcugcgguuca

SEQ ID NO: 712700 - RNA, 19 nt, Homo sapiens
  misc_RNA (1)...(19): siRNA sense strand
gcggagccaucaacagcaa

SEQ ID NO: 712701 - RNA, 19 nt, Homo sapiens
  misc_RNA (1)...(19): siRNA sense strand
guuguggacuggccguuug

SEQ ID NO: 712702 - RNA, 19 nt, Homo sapiens
  misc_RNA (1)...(19): siRNA sense strand
ggacuggccguuugacgau

SEQ ID NO: 712703 - RNA, 19 nt, Homo sapiens
  misc_RNA (1)...(19): siRNA sense strand
aagacccggugcugcguua

SEQ ID NO: 712704 - RNA, 19 nt, Homo sapiens
  misc_RNA (1)...(19): siRNA sense strand
gugcgugugugugaaguga

SEQ ID NO: 712705 - RNA, 19 nt, Homo sapiens
  misc_RNA (1)...(19): siRNA sense strand
ucauugaggaccugaagaa

SEQ ID NO: 712706 - RNA, 19 nt, Homo sapiens
  misc_RNA (1)...(19): siRNA sense strand
ugaaggccaaguucuguga

SEQ ID NO: 712707 - RNA, 19 nt, Homo sapiens
  misc_RNA (1)...(19): siRNA sense strand
acagcaagcagcucaccua

SEQ ID NO: 712708 - RNA, 19 nt, Homo sapiens
  misc_RNA (1)...(19): siRNA sense strand
gugaagugaccuaugacaa

SEQ ID NO: 712709 - RNA, 19 nt, Homo sapiens
  misc_RNA (1)...(19): siRNA sense strand
ggugagcuacaaacacaug

SEQ ID NO: 712710 - RNA, 19 nt, Homo sapiens
  misc_RNA (1)...(19): siRNA sense strand
ggugaaggccaaguucugu

SEQ ID NO: 712711 - RNA, 19 nt, Homo sapiens
  misc_RNA (1)...(19): siRNA sense strand
ccggcaagguaguggaaga

SEQ ID NO: 712712 - RNA, 19 nt, Homo sapiens
  misc_RNA (1)...(19): siRNA sense strand
acacaugcgcuuccucauc

SEQ ID NO: 712713 - RNA, 19 nt, Homo sapiens
  misc_RNA (1)...(19): siRNA sense strand
gcucaccuaccuggagaaa

SEQ ID NO: 712714 - RNA, 19 nt, Homo sapiens
  misc_RNA (1)...(19): siRNA sense strand
acgcucagcaccuucauug

SEQ ID NO: 712715 - RNA, 19 nt, Homo sapiens
  misc_RNA (1)...(19): siRNA sense strand
acaaaacgccgcuggagaa

SEQ ID NO: 712716 - RNA, 19 nt, Homo sapiens
  misc_RNA (1)...(19): siRNA sense strand
gaaaagcugucuucaacua

SEQ ID NO: 712717 - RNA, 19 nt, Homo sapiens
  misc_RNA (1)...(19): siRNA sense strand
caagggaauuugugaacua

SEQ ID NO: 712718 - RNA, 19 nt, Homo sapiens
  misc_RNA (1)...(19): siRNA sense strand
gggaauuugugaacuagaa

SEQ ID NO: 712719 - RNA, 19 nt, Homo sapiens
  misc_RNA (1)...(19): siRNA sense strand
aaaccugucuuaucuguca

SEQ ID NO: 712720 - RNA, 19 nt, Homo sapiens
  misc_RNA (1)...(19): siRNA sense strand
gaaggaaaaugaagaaaag

SEQ ID NO: 712721 - RNA, 19 nt, Homo sapiens
  misc_RNA (1)...(19): siRNA sense strand
cuacaacccauuucuauga

SEQ ID NO: 712722 - RNA, 19 nt, Homo sapiens
  misc_RNA (1)...(19): siRNA sense strand
gaacuguaacgcccagaaa

SEQ ID NO: 712723 - RNA, 19 nt, Homo sapiens
  misc_RNA (1)...(19): siRNA sense strand
cauaagcucuuggagaugu

SEQ ID NO: 712724 - RNA, 19 nt, Homo sapiens
  misc_RNA (1)...(19): siRNA sense strand
gaaaaccugucuuaucugu

SEQ ID NO: 712725 - RNA, 19 nt, Homo sapiens
  misc_RNA (1)...(19): siRNA sense strand
gaaaaggugugucuggaau

SEQ ID NO: 712726 - RNA, 19 nt, Homo sapiens
  misc_RNA (1)...(19): siRNA sense strand
cgcauaagcucuuggagau

SEQ ID NO: 712727 - RNA, 19 nt, Homo sapiens
  misc_RNA (1)...(19): siRNA sense strand
cagaaaaccugucuuaucu

SEQ ID NO: 712728 - RNA, 19 nt, Homo sapiens
  misc_RNA (1)...(19): siRNA sense strand
aaaggugugucuggaauau

SEQ ID NO: 712729 - RNA, 19 nt, Homo sapiens
  misc_RNA (1)...(19): siRNA sense strand
aggugugucuggaauauaa

SEQ ID NO: 712730 - RNA, 19 nt, Homo sapiens
  misc_RNA (1)...(19): siRNA sense strand
ugagcuaccuguccaugug

SEQ ID NO: 712731 - RNA, 19 nt, Homo sapiens
  misc_RNA (1)...(19): siRNA sense strand
acaauuuaauccugaagug

SEQ ID NO: 712732 - RNA, 19 nt, Homo sapiens
  misc_RNA (1)...(19): siRNA sense strand
gaagugggaaacccucaau

SEQ ID NO: 712733 - RNA, 19 nt, Homo sapiens
  misc_RNA (1)...(19): siRNA sense strand
ggaauuugugaacuagaaa

SEQ ID NO: 712734 - RNA, 19 nt, Homo sapiens
  misc_RNA (1)...(19): siRNA sense strand
gaagcugugugaggaacug

SEQ ID NO: 712735 - RNA, 19 nt, Homo sapiens
  misc_RNA (1)...(19): siRNA sense strand
ucuuggagauguacaggaa

SEQ ID NO: 712736 - RNA, 19 nt, Homo sapiens
  misc_RNA (1)...(19): siRNA sense strand
aagacaagauagaacuaga

SEQ ID NO: 712737 - RNA, 19 nt, Homo sapiens
  misc_RNA (1)...(19): siRNA sense strand
cuagaaaacuaccauuaug

SEQ ID NO: 712738 - RNA, 19 nt, Homo sapiens
  misc_RNA (1)...(19): siRNA sense strand
ugggaaacccucaaugaug

SEQ ID NO: 712739 - RNA, 19 nt, Homo sapiens
  misc_RNA (1)...(19): siRNA sense strand
ucaacuaccaagggaauuu

SEQ ID NO: 712740 - RNA, 19 nt, Homo sapiens
  misc_RNA (1)...(19): siRNA sense strand
ggagaagcugugugaggaa

SEQ ID NO: 712741 - RNA, 19 nt, Homo sapiens
  misc_RNA (1)...(19): siRNA sense strand
caacuaccaagggaauuug

SEQ ID NO: 712742 - RNA, 19 nt, Homo sapiens
  misc_RNA (1)...(19): siRNA sense strand
gccuacaacccauuucuau

SEQ ID NO: 712743 - RNA, 19 nt, Homo sapiens
  misc_RNA (1)...(19): siRNA sense strand
ggaacuguaacgcccagaa

SEQ ID NO: 712744 - RNA, 19 nt, Homo sapiens
  misc_RNA (1)...(19): siRNA sense strand
gacaagauagaacuagaca

SEQ ID NO: 712745 - RNA, 19 nt, Homo sapiens
  misc_RNA (1)...(19): siRNA sense strand
ucuggaauauaacgaggaa

SEQ ID NO: 712746 - RNA, 19 nt, Homo sapiens
  misc_RNA (1)...(19): siRNA sense strand
cuaccaagggaauuuguga

SEQ ID NO: 712747 - RNA, 19 nt, Homo sapiens
  misc_RNA (1)...(19): siRNA sense strand
ggccuacaacccauuucua

SEQ ID NO: 712748 - RNA, 19 nt, Homo sapiens
  misc_RNA (1)...(19): siRNA sense strand
gcccagaaaaccugucuua

SEQ ID NO: 712749 - RNA, 19 nt, Homo sapiens
  misc_RNA (1)...(19): siRNA sense strand
caaaauacaggugaaaaug

SEQ ID NO: 712750 - RNA, 19 nt, Homo sapiens
  misc_RNA (1)...(19): siRNA sense strand
ccaagggaauuugugaacu

SEQ ID NO: 712751 - RNA, 19 nt, Homo sapiens
  misc_RNA (1)...(19): siRNA sense strand
gugggaaacccucaaugau

SEQ ID NO: 712752 - RNA, 19 nt, Homo sapiens
  misc_RNA (1)...(19): siRNA sense strand
uggaaaagcugucuucaac

SEQ ID NO: 712753 - RNA, 19 nt, Homo sapiens
  misc_RNA (1)...(19): siRNA sense strand
cgaaggaaaaugaagaaaa

SEQ ID NO: 712754 - RNA, 19 nt, Homo sapiens
  misc_RNA (1)...(19): siRNA sense strand
ggcacaauuuaauccugaa

SEQ ID NO: 712755 - RNA, 19 nt, Homo sapiens
  misc_RNA (1)...(19): siRNA sense strand
acgaggaacuggagaagcu

SEQ ID NO: 712756 - RNA, 19 nt, Homo sapiens
  misc_RNA (1)...(19): siRNA sense strand
ccagaaaaccugucuuauc

SEQ ID NO: 712757 - RNA, 19 nt, Homo sapiens
  misc_RNA (1)...(19): siRNA sense strand
aaauacaggugaaaaugga

SEQ ID NO: 712758 - RNA, 19 nt, Homo sapiens
  misc_RNA (1)...(19): siRNA sense strand
ggaauauaacgaggaacug

SEQ ID NO: 712759 - RNA, 19 nt, Homo sapiens
  misc_RNA (1)...(19): siRNA sense strand
agugggaaacccucaauga

SEQ ID NO: 712760 - RNA, 19 nt, Homo sapiens
  misc_RNA (1)...(19): siRNA sense strand
ccucaaugaugcagguuuu

SEQ ID NO: 712761 - RNA, 19 nt, Homo sapiens
  misc_RNA (1)...(19): siRNA sense strand
gaacuagaaaacuaccauu

SEQ ID NO: 712762 - RNA, 19 nt, Homo sapiens
  misc_RNA (1)...(19): siRNA sense strand
gaugagaccuuggacuuug

SEQ ID NO: 712763 - RNA, 19 nt, Homo sapiens
  misc_RNA (1)...(19): siRNA sense strand
ggacacaagguuccuguuu

SEQ ID NO: 712764 - RNA, 19 nt, Homo sapiens
  misc_RNA (1)...(19): siRNA sense strand
cagagaagcuggaggagau

SEQ ID NO: 712765 - RNA, 19 nt, Homo sapiens
  misc_RNA (1)...(19): siRNA sense strand
ggacacagagugcgggaaa

SEQ ID NO: 712766 - RNA, 19 nt, Homo sapiens
  misc_RNA (1)...(19): siRNA sense strand
uaagguuuauuguggauga

SEQ ID NO: 712767 - RNA, 19 nt, Homo sapiens
  misc_RNA (1)...(19): siRNA sense strand
gacacaagguuccuguuuc

SEQ ID NO: 712768 - RNA, 19 nt, Homo sapiens
  misc_RNA (1)...(19): siRNA sense strand
guuggugacuccagagaaa

SEQ ID NO: 712769 - RNA, 19 nt, Homo sapiens
  misc_RNA (1)...(19): siRNA sense strand
ccaccgaagugacccaaau

SEQ ID NO: 712770 - RNA, 19 nt, Homo sapiens
  misc_RNA (1)...(19): siRNA sense strand
ggaaaguggacacaagguu

SEQ ID NO: 712771 - RNA, 19 nt, Homo sapiens
  misc_RNA (1)...(19): siRNA sense strand
gaggaagacauaacagugu

SEQ ID NO: 712772 - RNA, 19 nt, Homo sapiens
  misc_RNA (1)...(19): siRNA sense strand
gacuaaaucuuccugucau

SEQ ID NO: 712773 - RNA, 19 nt, Homo sapiens
  misc_RNA (1)...(19): siRNA sense strand
ggaugagaccuuggacuuu

SEQ ID NO: 712774 - RNA, 19 nt, Homo sapiens
  misc_RNA (1)...(19): siRNA sense strand
ccagcaucuucuccucuua

SEQ ID NO: 712775 - RNA, 19 nt, Homo sapiens
  misc_RNA (1)...(19): siRNA sense strand
cgacuaaaucuuccuguca

SEQ ID NO: 712776 - RNA, 19 nt, Homo sapiens
  misc_RNA (1)...(19): siRNA sense strand
gcgggaaaguggacacaag

SEQ ID NO: 712777 - RNA, 19 nt, Homo sapiens
  misc_RNA (1)...(19): siRNA sense strand
ugacagccgugaggaggaa

SEQ ID NO: 712778 - RNA, 19 nt, Homo sapiens
  misc_RNA (1)...(19): siRNA sense strand
gagaccugcugcccacugu

SEQ ID NO: 712779 - RNA, 19 nt, Homo sapiens
  misc_RNA (1)...(19): siRNA sense strand
gauucucugucaacucgaa

SEQ ID NO: 712780 - RNA, 19 nt, Homo sapiens
  misc_RNA (1)...(19): siRNA sense strand
gggagaccuuugugcugaa

SEQ ID NO: 712781 - RNA, 19 nt, Homo sapiens
  misc_RNA (1)...(19): siRNA sense strand
ucuguucccugcauccaaa

SEQ ID NO: 712782 - RNA, 19 nt, Homo sapiens
  misc_RNA (1)...(19): siRNA sense strand
gggagucacccacuugcaa

SEQ ID NO: 712783 - RNA, 19 nt, Homo sapiens
  misc_RNA (1)...(19): siRNA sense strand
ggagucacccacuugcaau

SEQ ID NO: 712784 - RNA, 19 nt, Homo sapiens
  misc_RNA (1)...(19): siRNA sense strand
gaccugcugcccacuguga

SEQ ID NO: 712785 - RNA, 19 nt, Homo sapiens
  misc_RNA (1)...(19): siRNA sense strand
ucacccacuugcaaucugu

SEQ ID NO: 712786 - RNA, 19 nt, Homo sapiens
  misc_RNA (1)...(19): siRNA sense strand
gcuaaaucuuccagucaac

SEQ ID NO: 712787 - RNA, 19 nt, Homo sapiens
  misc_RNA (1)...(19): siRNA sense strand
ggagaccuuugugcugaag

SEQ ID NO: 712788 - RNA, 19 nt, Homo sapiens
  misc_RNA (1)...(19): siRNA sense strand
acacaagguuccuguuucc

SEQ ID NO: 712789 - RNA, 19 nt, Homo sapiens
  misc_RNA (1)...(19): siRNA sense strand
ugcuaaaucuuccagucaa

SEQ ID NO: 712790 - RNA, 19 nt, Homo sapiens
  misc_RNA (1)...(19): siRNA sense strand
ugcccacugugaacucuuu

SEQ ID NO: 712791 - RNA, 19 nt, Homo sapiens
  misc_RNA (1)...(19): siRNA sense strand
uggaugagaccuuggacuu

SEQ ID NO: 712792 - RNA, 19 nt, Homo sapiens
  misc_RNA (1)...(19): siRNA sense strand
aagagggagucacccacuu

SEQ ID NO: 712793 - RNA, 19 nt, Homo sapiens
  misc_RNA (1)...(19): siRNA sense strand
ugaggaggaagacauaaca

SEQ ID NO: 712794 - RNA, 19 nt, Homo sapiens
  misc_RNA (1)...(19): siRNA sense strand
cccagcaucuucuccucuu

SEQ ID NO: 712795 - RNA, 19 nt, Homo sapiens
  misc_RNA (1)...(19): siRNA sense strand
cgggcuacaucuggaaaga

SEQ ID NO: 712796 - RNA, 19 nt, Homo sapiens
  misc_RNA (1)...(19): siRNA sense strand
caacaugaagagggaguca

SEQ ID NO: 712797 - RNA, 19 nt, Homo sapiens
  misc_RNA (1)...(19): siRNA sense strand
gaaagaaucuccagaaauc

SEQ ID NO: 712798 - RNA, 19 nt, Homo sapiens
  misc_RNA (1)...(19): siRNA sense strand
aaucagaucucucuacuuu

SEQ ID NO: 712799 - RNA, 19 nt, Homo sapiens
  misc_RNA (1)...(19): siRNA sense strand
caucuagacuuaagugaua

SEQ ID NO: 712800 - RNA, 19 nt, Homo sapiens
  misc_RNA (1)...(19): siRNA sense strand
ggaaacggcugaagagcaa

SEQ ID NO: 712801 - RNA, 19 nt, Homo sapiens
  misc_RNA (1)...(19): siRNA sense strand
gcaaagggagugacaaaga

SEQ ID NO: 712802 - RNA, 19 nt, Homo sapiens
  misc_RNA (1)...(19): siRNA sense strand
gaaaucagaucucucuacu

SEQ ID NO: 712803 - RNA, 19 nt, Homo sapiens
  misc_RNA (1)...(19): siRNA sense strand
cagaaagaaucuccagaaa

SEQ ID NO: 712804 - RNA, 19 nt, Homo sapiens
  misc_RNA (1)...(19): siRNA sense strand
cuaaaggucucugguguuu

SEQ ID NO: 712805 - RNA, 19 nt, Homo sapiens
  misc_RNA (1)...(19): siRNA sense strand
ucagaucucucuacuuuag

SEQ ID NO: 712806 - RNA, 19 nt, Homo sapiens
  misc_RNA (1)...(19): siRNA sense strand
cagcaagacuucugaacug

SEQ ID NO: 712807 - RNA, 19 nt, Homo sapiens
  misc_RNA (1)...(19): siRNA sense strand
gagcaaagggagugacaaa

SEQ ID NO: 712808 - RNA, 19 nt, Homo sapiens
  misc_RNA (1)...(19): siRNA sense strand
gauagugucaugcuaaaga

SEQ ID NO: 712809 - RNA, 19 nt, Homo sapiens
  misc_RNA (1)...(19): siRNA sense strand
ucggugcuaugauauaaua

SEQ ID NO: 712810 - RNA, 19 nt, Homo sapiens
  misc_RNA (1)...(19): siRNA sense strand
caaauuuagugcgacuuaa

SEQ ID NO: 712811 - RNA, 19 nt, Homo sapiens
  misc_RNA (1)...(19): siRNA sense strand
cccaggaacugcucucaaa

SEQ ID NO: 712812 - RNA, 19 nt, Homo sapiens
  misc_RNA (1)...(19): siRNA sense strand
aaaggucucugguguuugu

SEQ ID NO: 712813 - RNA, 19 nt, Homo sapiens
  misc_RNA (1)...(19): siRNA sense strand
gaacuuuccagguguuuca

SEQ ID NO: 712814 - RNA, 19 nt, Homo sapiens
  misc_RNA (1)...(19): siRNA sense strand
ugacugcuuucaggaauuu

SEQ ID NO: 712815 - RNA, 19 nt, Homo sapiens
  misc_RNA (1)...(19): siRNA sense strand
ucaaauuuagugcgacuua

SEQ ID NO: 712816 - RNA, 19 nt, Homo sapiens
  misc_RNA (1)...(19): siRNA sense strand
ucacccagcugaaucuuag

SEQ ID NO: 712817 - RNA, 19 nt, Homo sapiens
  misc_RNA (1)...(19): siRNA sense strand
gugauagugucaugcuaaa

SEQ ID NO: 712818 - RNA, 19 nt, Homo sapiens
  misc_RNA (1)...(19): siRNA sense strand
caaagggagugacaaagac

SEQ ID NO: 712819 - RNA, 19 nt, Homo sapiens
  misc_RNA (1)...(19): siRNA sense strand
aagaggagcccgacaguga

SEQ ID NO: 712820 - RNA, 19 nt, Homo sapiens
  misc_RNA (1)...(19): siRNA sense strand
gaaugacugcuuucaggaa

SEQ ID NO: 712821 - RNA, 19 nt, Homo sapiens
  misc_RNA (1)...(19): siRNA sense strand
gaauuugcccugcagacuu

SEQ ID NO: 712822 - RNA, 19 nt, Homo sapiens
  misc_RNA (1)...(19): siRNA sense strand
gguaucgccuagcgucuga

SEQ ID NO: 712823 - RNA, 19 nt, Homo sapiens
  misc_RNA (1)...(19): siRNA sense strand
gaaagaggagcccgacagu

SEQ ID NO: 712824 - RNA, 19 nt, Homo sapiens
  misc_RNA (1)...(19): siRNA sense strand
ucuuguccaucuagacuua

SEQ ID NO: 712825 - RNA, 19 nt, Homo sapiens
  misc_RNA (1)...(19): siRNA sense strand
cucagucggugcuaugaua

SEQ ID NO: 712826 - RNA, 19 nt, Homo sapiens
  misc_RNA (1)...(19): siRNA sense strand
ccacggaaacggcugaaga

SEQ ID NO: 712827 - RNA, 19 nt, Homo sapiens
  misc_RNA (1)...(19): siRNA sense strand
aauuugcccugcagacuuu

SEQ ID NO: 712828 - RNA, 19 nt, Homo sapiens
  misc_RNA (1)...(19): siRNA sense strand
ggaugggauuccagcaaga

SEQ ID NO: 712829 - RNA, 19 nt, Homo sapiens
  misc_RNA (1)...(19): siRNA sense strand
acagaaagaaucuccagaa

SEQ ID NO: 712830 - RNA, 19 nt, Homo sapiens
  misc_RNA (1)...(19): siRNA sense strand
ccagaaaucagaucucucu

SEQ ID NO: 712831 - RNA, 19 nt, Homo sapiens
  misc_RNA (1)...(19): siRNA sense strand
caacuaccuccaacaccua

SEQ ID NO: 712832 - RNA, 19 nt, Homo sapiens
  misc_RNA (1)...(19): siRNA sense strand
guuccaaguugcagaaucu

SEQ ID NO: 712833 - RNA, 19 nt, Homo sapiens
  misc_RNA (1)...(19): siRNA sense strand
uaagcuaaaucgagagaac

SEQ ID NO: 712834 - RNA, 19 nt, Homo sapiens
  misc_RNA (1)...(19): siRNA sense strand
agaaagaaucuccagaaau

SEQ ID NO: 712835 - RNA, 19 nt, Homo sapiens
  misc_RNA (1)...(19): siRNA sense strand
ucccugagcugcuaaaggu

SEQ ID NO: 712836 - RNA, 19 nt, Homo sapiens
  misc_RNA (1)...(19): siRNA sense strand
accauuggcugaacauuuc

SEQ ID NO: 712837 - RNA, 19 nt, Homo sapiens
  misc_RNA (1)...(19): siRNA sense strand
gcuaaaggucucugguguu

SEQ ID NO: 712838 - RNA, 19 nt, Homo sapiens
  misc_RNA (1)...(19): siRNA sense strand
agucggugcuaugauauaa

SEQ ID NO: 712839 - RNA, 19 nt, Homo sapiens
  misc_RNA (1)...(19): siRNA sense strand
gaucucucuacuuuaguua

SEQ ID NO: 712840 - RNA, 19 nt, Homo sapiens
  misc_RNA (1)...(19): siRNA sense strand
gagauuccagaccugagua

SEQ ID NO: 712841 - RNA, 19 nt, Homo sapiens
  misc_RNA (1)...(19): siRNA sense strand
guacagcacauggaccuau

SEQ ID NO: 712842 - RNA, 19 nt, Homo sapiens
  misc_RNA (1)...(19): siRNA sense strand
uuagugcgacuuaaccuuu

SEQ ID NO: 712843 - RNA, 19 nt, Homo sapiens
  misc_RNA (1)...(19): siRNA sense strand
ccgcaggccuaagcuaaau

SEQ ID NO: 712844 - RNA, 19 nt, Homo sapiens
  misc_RNA (1)...(19): siRNA sense strand
agaucucucuacuuuaguu

SEQ ID NO: 712845 - RNA, 19 nt, Homo sapiens
  misc_RNA (1)...(19): siRNA sense strand
ccaaucuuguccaucuaga

SEQ ID NO: 712846 - RNA, 19 nt, Homo sapiens
  misc_RNA (1)...(19): siRNA sense strand
agagaacuuuccagguguu

SEQ ID NO: 712847 - RNA, 19 nt, Homo sapiens
  misc_RNA (1)...(19): siRNA sense strand
gaccaucacccagcugaau

SEQ ID NO: 712848 - RNA, 19 nt, Homo sapiens
  misc_RNA (1)...(19): siRNA sense strand
gaacauuucagcccuuuuc

SEQ ID NO: 712849 - RNA, 19 nt, Homo sapiens
  misc_RNA (1)...(19): siRNA sense strand
ggagauuccagaccugagu

SEQ ID NO: 712850 - RNA, 19 nt, Homo sapiens
  misc_RNA (1)...(19): siRNA sense strand
ccgcugcccacgaucauuu

SEQ ID NO: 712851 - RNA, 19 nt, Homo sapiens
  misc_RNA (1)...(19): siRNA sense strand
auagugucaugcuaaagaa

SEQ ID NO: 712852 - RNA, 19 nt, Homo sapiens
  misc_RNA (1)...(19): siRNA sense strand
cuuaagugauagugucaug

SEQ ID NO: 712853 - RNA, 19 nt, Homo sapiens
  misc_RNA (1)...(19): siRNA sense strand
cuacuuuaguuagaagaug

SEQ ID NO: 712854 - RNA, 19 nt, Homo sapiens
  misc_RNA (1)...(19): siRNA sense strand
aaccauuggcugaacauuu

SEQ ID NO: 712855 - RNA, 19 nt, Homo sapiens
  misc_RNA (1)...(19): siRNA sense strand
gaggagcccgacagugaga

SEQ ID NO: 712856 - RNA, 19 nt, Homo sapiens
  misc_RNA (1)...(19): siRNA sense strand
aaugacugcuuucaggaau

SEQ ID NO: 712857 - RNA, 19 nt, Homo sapiens
  misc_RNA (1)...(19): siRNA sense strand
gcuaaaucgagagaacuuu

SEQ ID NO: 712858 - RNA, 19 nt, Homo sapiens
  misc_RNA (1)...(19): siRNA sense strand
cugaaccucuccugguguu

SEQ ID NO: 712859 - RNA, 19 nt, Homo sapiens
  misc_RNA (1)...(19): siRNA sense strand
cuggaaggccugcggcuuu

SEQ ID NO: 712860 - RNA, 19 nt, Homo sapiens
  misc_RNA (1)...(19): siRNA sense strand
guccgcaggccuaagcuaa

SEQ ID NO: 712861 - RNA, 19 nt, Homo sapiens
  misc_RNA (1)...(19): siRNA sense strand
guuagaagaugccccaauc

SEQ ID NO: 712862 - RNA, 19 nt, Homo sapiens
  misc_RNA (1)...(19): siRNA sense strand
ccuagcgucugaugagucu

SEQ ID NO: 712863 - RNA, 19 nt, Homo sapiens
  misc_RNA (1)...(19): siRNA sense strand
gugccucccugagcugcua

SEQ ID NO: 712864 - RNA, 19 nt, Homo sapiens
  misc_RNA (1)...(19): siRNA sense strand
cuaaaucgagagaacuuuc

SEQ ID NO: 712865 - RNA, 19 nt, Homo sapiens
  misc_RNA (1)...(19): siRNA sense strand
gggauuccagcaagacuuc

SEQ ID NO: 712866 - RNA, 19 nt, Homo sapiens
  misc_RNA (1)...(19): siRNA sense strand
agaccugaguagcaacguu

SEQ ID NO: 712867 - RNA, 19 nt, Homo sapiens
  misc_RNA (1)...(19): siRNA sense strand
gaaccucuccugguguuuu

SEQ ID NO: 712868 - RNA, 19 nt, Homo sapiens
  misc_RNA (1)...(19): siRNA sense strand
ggucucugguguuuguaag

SEQ ID NO: 712869 - RNA, 19 nt, Homo sapiens
  misc_RNA (1)...(19): siRNA sense strand
acauggaccuaucgaacuc

SEQ ID NO: 712870 - RNA, 19 nt, Homo sapiens
  misc_RNA (1)...(19): siRNA sense strand
agugauagugucaugcuaa

SEQ ID NO: 712871 - RNA, 19 nt, Homo sapiens
  misc_RNA (1)...(19): siRNA sense strand
ccaaguugcagaaucuaag

SEQ ID NO: 712872 - RNA, 19 nt, Homo sapiens
  misc_RNA (1)...(19): siRNA sense strand
gagaacuuuccagguguuu

SEQ ID NO: 712873 - RNA, 19 nt, Homo sapiens
  misc_RNA (1)...(19): siRNA sense strand
ugucaauacucucgcaaaa

SEQ ID NO: 712874 - RNA, 19 nt, Homo sapiens
  misc_RNA (1)...(19): siRNA sense strand
uggaaggccugcggcuuuc

SEQ ID NO: 712875 - RNA, 19 nt, Homo sapiens
  misc_RNA (1)...(19): siRNA sense strand
ucacucagucggugcuaug

SEQ ID NO: 712876 - RNA, 19 nt, Homo sapiens
  misc_RNA (1)...(19): siRNA sense strand
gcccugcagacuuugcuaa

SEQ ID NO: 712877 - RNA, 19 nt, Homo sapiens
  misc_RNA (1)...(19): siRNA sense strand
gaaagaaucuccagaaauc

SEQ ID NO: 712878 - RNA, 19 nt, Homo sapiens
  misc_RNA (1)...(19): siRNA sense strand
aaucagaucucucuacuuu

SEQ ID NO: 712879 - RNA, 19 nt, Homo sapiens
  misc_RNA (1)...(19): siRNA sense strand
caucuagacuuaagugaua

SEQ ID NO: 712880 - RNA, 19 nt, Homo sapiens
  misc_RNA (1)...(19): siRNA sense strand
ggaaacggcugaagagcaa

SEQ ID NO: 712881 - RNA, 19 nt, Homo sapiens
  misc_RNA (1)...(19): siRNA sense strand
gcaaagggagugacaaaga

SEQ ID NO: 712882 - RNA, 19 nt, Homo sapiens
  misc_RNA (1)...(19): siRNA sense strand
gaaaucagaucucucuacu

SEQ ID NO: 712883 - RNA, 19 nt, Homo sapiens
  misc_RNA (1)...(19): siRNA sense strand
cagaaagaaucuccagaaa

SEQ ID NO: 712884 - RNA, 19 nt, Homo sapiens
  misc_RNA (1)...(19): siRNA sense strand
cuaaaggucucugguguuu

SEQ ID NO: 712885 - RNA, 19 nt, Homo sapiens
  misc_RNA (1)...(19): siRNA sense strand
ucagaucucucuacuuuag

SEQ ID NO: 712886 - RNA, 19 nt, Homo sapiens
  misc_RNA (1)...(19): siRNA sense strand
cagcaagacuucugaacug

SEQ ID NO: 712887 - RNA, 19 nt, Homo sapiens
  misc_RNA (1)...(19): siRNA sense strand
gagcaaagggagugacaaa

SEQ ID NO: 712888 - RNA, 19 nt, Homo sapiens
  misc_RNA (1)...(19): siRNA sense strand
gauagugucaugcuaaaga

SEQ ID NO: 712889 - RNA, 19 nt, Homo sapiens
  misc_RNA (1)...(19): siRNA sense strand
ucggugcuaugauauaaua

SEQ ID NO: 712890 - RNA, 19 nt, Homo sapiens
  misc_RNA (1)...(19): siRNA sense strand
caaauuuagugcgacuuaa

SEQ ID NO: 712891 - RNA, 19 nt, Homo sapiens
  misc_RNA (1)...(19): siRNA sense strand
cccaggaacugcucucaaa

SEQ ID NO: 712892 - RNA, 19 nt, Homo sapiens
  misc_RNA (1)...(19): siRNA sense strand
aaaggucucugguguuugu

SEQ ID NO: 712893 - RNA, 19 nt, Homo sapiens
  misc_RNA (1)...(19): siRNA sense strand
gaacuuuccagguguuuca

SEQ ID NO: 712894 - RNA, 19 nt, Homo sapiens
  misc_RNA (1)...(19): siRNA sense strand
ugacugcuuucaggaauuu

SEQ ID NO: 712895 - RNA, 19 nt, Homo sapiens
  misc_RNA (1)...(19): siRNA sense strand
ucaaauuuagugcgacuua

SEQ ID NO: 712896 - RNA, 19 nt, Homo sapiens
  misc_RNA (1)...(19): siRNA sense strand
ucacccagcugaaucuuag

SEQ ID NO: 712897 - RNA, 19 nt, Homo sapiens
  misc_RNA (1)...(19): siRNA sense strand
gugauagugucaugcuaaa

SEQ ID NO: 712898 - RNA, 19 nt, Homo sapiens
  misc_RNA (1)...(19): siRNA sense strand
caaagggagugacaaagac

SEQ ID NO: 712899 - RNA, 19 nt, Homo sapiens
  misc_RNA (1)...(19): siRNA sense strand
aagaggagcccgacaguga

SEQ ID NO: 712900 - RNA, 19 nt, Homo sapiens
  misc_RNA (1)...(19): siRNA sense strand
gaaugacugcuuucaggaa

SEQ ID NO: 712901 - RNA, 19 nt, Homo sapiens
  misc_RNA (1)...(19): siRNA sense strand
gaauuugcccugcagacuu

SEQ ID NO: 712902 - RNA, 19 nt, Homo sapiens
  misc_RNA (1)...(19): siRNA sense strand
gguaucgccuagcgucuga

SEQ ID NO: 712903 - RNA, 19 nt, Homo sapiens
  misc_RNA (1)...(19): siRNA sense strand
gaaagaggagcccgacagu

SEQ ID NO: 712904 - RNA, 19 nt, Homo sapiens
  misc_RNA (1)...(19): siRNA sense strand
ucuuguccaucuagacuua

SEQ ID NO: 712905 - RNA, 19 nt, Homo sapiens
  misc_RNA (1)...(19): siRNA sense strand
cucagucggugcuaugaua

SEQ ID NO: 712906 - RNA, 19 nt, Homo sapiens
  misc_RNA (1)...(19): siRNA sense strand
ccacggaaacggcugaaga

SEQ ID NO: 712907 - RNA, 19 nt, Homo sapiens
  misc_RNA (1)...(19): siRNA sense strand
aauuugcccugcagacuuu

SEQ ID NO: 712908 - RNA, 19 nt, Homo sapiens
  misc_RNA (1)...(19): siRNA sense strand
ggaugggauuccagcaaga

SEQ ID NO: 712909 - RNA, 19 nt, Homo sapiens
  misc_RNA (1)...(19): siRNA sense strand
acagaaagaaucuccagaa

SEQ ID NO: 712910 - RNA, 19 nt, Homo sapiens
  misc_RNA (1)...(19): siRNA sense strand
ccagaaaucagaucucucu

SEQ ID NO: 712911 - RNA, 19 nt, Homo sapiens
  misc_RNA (1)...(19): siRNA sense strand
caacuaccuccaacaccua

SEQ ID NO: 712912 - RNA, 19 nt, Homo sapiens
  misc_RNA (1)...(19): siRNA sense strand
guuccaaguugcagaaucu

SEQ ID NO: 712913 - RNA, 19 nt, Homo sapiens
  misc_RNA (1)...(19): siRNA sense strand
uaagcuaaaucgagagaac

SEQ ID NO: 712914 - RNA, 19 nt, Homo sapiens
  misc_RNA (1)...(19): siRNA sense strand
agaaagaaucuccagaaau

SEQ ID NO: 712915 - RNA, 19 nt, Homo sapiens
  misc_RNA (1)...(19): siRNA sense strand
ucccugagcugcuaaaggu

SEQ ID NO: 712916 - RNA, 19 nt, Homo sapiens
  misc_RNA (1)...(19): siRNA sense strand
accauuggcugaacauuuc

SEQ ID NO: 712917 - RNA, 19 nt, Homo sapiens
  misc_RNA (1)...(19): siRNA sense strand
gcuaaaggucucugguguu

SEQ ID NO: 712918 - RNA, 19 nt, Homo sapiens
  misc_RNA (1)...(19): siRNA sense strand
agucggugcuaugauauaa

SEQ ID NO: 712919 - RNA, 19 nt, Homo sapiens
  misc_RNA (1)...(19): siRNA sense strand
gaucucucuacuuuaguua

SEQ ID NO: 712920 - RNA, 19 nt, Homo sapiens
  misc_RNA (1)...(19): siRNA sense strand
gagauuccagaccugagua

SEQ ID NO: 712921 - RNA, 19 nt, Homo sapiens
  misc_RNA (1)...(19): siRNA sense strand
guacagcacauggaccuau

SEQ ID NO: 712922 - RNA, 19 nt, Homo sapiens
  misc_RNA (1)...(19): siRNA sense strand
uuagugcgacuuaaccuuu

SEQ ID NO: 712923 - RNA, 19 nt, Homo sapiens
  misc_RNA (1)...(19): siRNA sense strand
ccgcaggccuaagcuaaau

SEQ ID NO: 712924 - RNA, 19 nt, Homo sapiens
  misc_RNA (1)...(19): siRNA sense strand
agaucucucuacuuuaguu

SEQ ID NO: 712925 - RNA, 19 nt, Homo sapiens
  misc_RNA (1)...(19): siRNA sense strand
ccaaucuuguccaucuaga

SEQ ID NO: 712926 - RNA, 19 nt, Homo sapiens
  misc_RNA (1)...(19): siRNA sense strand
agagaacuuuccagguguu

SEQ ID NO: 712927 - RNA, 19 nt, Homo sapiens
  misc_RNA (1)...(19): siRNA sense strand
gaccaucacccagcugaau

SEQ ID NO: 712928 - RNA, 19 nt, Homo sapiens
  misc_RNA (1)...(19): siRNA sense strand
gaacauuucagcccuuuuc

SEQ ID NO: 712929 - RNA, 19 nt, Homo sapiens
  misc_RNA (1)...(19): siRNA sense strand
ggagauuccagaccugagu

SEQ ID NO: 712930 - RNA, 19 nt, Homo sapiens
  misc_RNA (1)...(19): siRNA sense strand
ccgcugcccacgaucauuu

SEQ ID NO: 712931 - RNA, 19 nt, Homo sapiens
  misc_RNA (1)...(19): siRNA sense strand
auagugucaugcuaaagaa

SEQ ID NO: 712932 - RNA, 19 nt, Homo sapiens
  misc_RNA (1)...(19): siRNA sense strand
cuuaagugauagugucaug

SEQ ID NO: 712933 - RNA, 19 nt, Homo sapiens
  misc_RNA (1)...(19): siRNA sense strand
cuacuuuaguuagaagaug

SEQ ID NO: 712934 - RNA, 19 nt, Homo sapiens
  misc_RNA (1)...(19): siRNA sense strand
aaccauuggcugaacauuu

SEQ ID NO: 712935 - RNA, 19 nt, Homo sapiens
  misc_RNA (1)...(19): siRNA sense strand
gaggagcccgacagugaga

SEQ ID NO: 712936 - RNA, 19 nt, Homo sapiens
  misc_RNA (1)...(19): siRNA sense strand
aaugacugcuuucaggaau

SEQ ID NO: 712937 - RNA, 19 nt, Homo sapiens
  misc_RNA (1)...(19): siRNA sense strand
gcuaaaucgagagaacuuu

SEQ ID NO: 712938 - RNA, 19 nt, Homo sapiens
  misc_RNA (1)...(19): siRNA sense strand
cugaaccucuccugguguu

SEQ ID NO: 712939 - RNA, 19 nt, Homo sapiens
  misc_RNA (1)...(19): siRNA sense strand
cuggaaggccugcggcuuu

SEQ ID NO: 712940 - RNA, 19 nt, Homo sapiens
  misc_RNA (1)...(19): siRNA sense strand
guccgcaggccuaagcuaa

SEQ ID NO: 712941 - RNA, 19 nt, Homo sapiens
  misc_RNA (1)...(19): siRNA sense strand
guuagaagaugccccaauc

SEQ ID NO: 712942 - RNA, 19 nt, Homo sapiens
  misc_RNA (1)...(19): siRNA sense strand
ccuagcgucugaugagucu

SEQ ID NO: 712943 - RNA, 19 nt, Homo sapiens
  misc_RNA (1)...(19): siRNA sense strand
gugccucccugagcugcua

SEQ ID NO: 712944 - RNA, 19 nt, Homo sapiens
  misc_RNA (1)...(19): siRNA sense strand
cuaaaucgagagaacuuuc

SEQ ID NO: 712945 - RNA, 19 nt, Homo sapiens
  misc_RNA (1)...(19): siRNA sense strand
gggauuccagcaagacuuc

SEQ ID NO: 712946 - RNA, 19 nt, Homo sapiens
  misc_RNA (1)...(19): siRNA sense strand
agaccugaguagcaacguu

SEQ ID NO: 712947 - RNA, 19 nt, Homo sapiens
  misc_RNA (1)...(19): siRNA sense strand
gaaccucuccugguguuuu

SEQ ID NO: 712948 - RNA, 19 nt, Homo sapiens
  misc_RNA (1)...(19): siRNA sense strand
ggucucugguguuuguaag

SEQ ID NO: 712949 - RNA, 19 nt, Homo sapiens
  misc_RNA (1)...(19): siRNA sense strand
acauggaccuaucgaacuc

SEQ ID NO: 712950 - RNA, 19 nt, Homo sapiens
  misc_RNA (1)...(19): siRNA sense strand
agugauagugucaugcuaa

SEQ ID NO: 712951 - RNA, 19 nt, Homo sapiens
  misc_RNA (1)...(19): siRNA sense strand
ccaaguugcagaaucuaag

SEQ ID NO: 712952 - RNA, 19 nt, Homo sapiens
  misc_RNA (1)...(19): siRNA sense strand
gagaacuuuccagguguuu

SEQ ID NO: 712953 - RNA, 19 nt, Homo sapiens
  misc_RNA (1)...(19): siRNA sense strand
ugucaauacucucgcaaaa

SEQ ID NO: 712954 - RNA, 19 nt, Homo sapiens
  misc_RNA (1)...(19): siRNA sense strand
uggaaggccugcggcuuuc

SEQ ID NO: 712955 - RNA, 19 nt, Homo sapiens
  misc_RNA (1)...(19): siRNA sense strand
ucacucagucggugcuaug

SEQ ID NO: 712956 - RNA, 19 nt, Homo sapiens
  misc_RNA (1)...(19): siRNA sense strand
gcccugcagacuuugcuaa

SEQ ID NO: 712957 - RNA, 19 nt, Homo sapiens
  misc_RNA (1)...(19): siRNA sense strand
gcagagacccgagauguuu

SEQ ID NO: 712958 - RNA, 19 nt, Homo sapiens
  misc_RNA (1)...(19): siRNA sense strand
gcagggcuguguauaagau

SEQ ID NO: 712959 - RNA, 19 nt, Homo sapiens
  misc_RNA (1)...(19): siRNA sense strand
agaggaagcugugccaauu

SEQ ID NO: 712960 - RNA, 19 nt, Homo sapiens
  misc_RNA (1)...(19): siRNA sense strand
gacccgagauguuuaucau

SEQ ID NO: 712961 - RNA, 19 nt, Homo sapiens
  misc_RNA (1)...(19): siRNA sense strand
gggaccggcugaaggagaa

SEQ ID NO: 712962 - RNA, 19 nt, Homo sapiens
  misc_RNA (1)...(19): siRNA sense strand
agacuggcaucaaggaaug

SEQ ID NO: 712963 - RNA, 19 nt, Homo sapiens
  misc_RNA (1)...(19): siRNA sense strand
agacguagccugcaaaugc

SEQ ID NO: 712964 - RNA, 19 nt, Homo sapiens
  misc_RNA (1)...(19): siRNA sense strand
ggagagucaugcagauagg

SEQ ID NO: 712965 - RNA, 19 nt, Homo sapiens
  misc_RNA (1)...(19): siRNA sense strand
ggaaugccagcaccaguuc

SEQ ID NO: 712966 - RNA, 19 nt, Homo sapiens
  misc_RNA (1)...(19): siRNA sense strand
cagagacccgagauguuua

SEQ ID NO: 712967 - RNA, 19 nt, Homo sapiens
  misc_RNA (1)...(19): siRNA sense strand
caacuccugguggucauua

SEQ ID NO: 712968 - RNA, 19 nt, Homo sapiens
  misc_RNA (1)...(19): siRNA sense strand
gagcacauggccuacauag

SEQ ID NO: 712969 - RNA, 19 nt, Homo sapiens
  misc_RNA (1)...(19): siRNA sense strand
gaggaagcugugccaauug

SEQ ID NO: 712970 - RNA, 19 nt, Homo sapiens
  misc_RNA (1)...(19): siRNA sense strand
ggagcgagagaagaacuuu

SEQ ID NO: 712971 - RNA, 19 nt, Homo sapiens
  misc_RNA (1)...(19): siRNA sense strand
cagauaggcagccgagaga

SEQ ID NO: 712972 - RNA, 19 nt, Homo sapiens
  misc_RNA (1)...(19): siRNA sense strand
guaagaagugcacggagau

SEQ ID NO: 712973 - RNA, 19 nt, Homo sapiens
  misc_RNA (1)...(19): siRNA sense strand
ggauggcugugagcucaug

SEQ ID NO: 712974 - RNA, 19 nt, Homo sapiens
  misc_RNA (1)...(19): siRNA sense strand
ggaagcugugccaauugua

SEQ ID NO: 712975 - RNA, 19 nt, Homo sapiens
  misc_RNA (1)...(19): siRNA sense strand
gaagcugugccaauuguac

SEQ ID NO: 712976 - RNA, 19 nt, Homo sapiens
  misc_RNA (1)...(19): siRNA sense strand
ggagcacauggccuacaua

SEQ ID NO: 712977 - RNA, 19 nt, Homo sapiens
  misc_RNA (1)...(19): siRNA sense strand
cggagaucguggaccagua

SEQ ID NO: 712978 - RNA, 19 nt, Homo sapiens
  misc_RNA (1)...(19): siRNA sense strand
ucgcagggcuguguauaag

SEQ ID NO: 712979 - RNA, 19 nt, Homo sapiens
  misc_RNA (1)...(19): siRNA sense strand
gggagagucaugcagauag

SEQ ID NO: 712980 - RNA, 19 nt, Homo sapiens
  misc_RNA (1)...(19): siRNA sense strand
gguggucauuagcuuugaa

SEQ ID NO: 712981 - RNA, 19 nt, Homo sapiens
  misc_RNA (1)...(19): siRNA sense strand
ggcuggagcuggucaacag

SEQ ID NO: 712982 - RNA, 19 nt, Homo sapiens
  misc_RNA (1)...(19): siRNA sense strand
aggaagcugugccaauugu

SEQ ID NO: 712983 - RNA, 19 nt, Homo sapiens
  misc_RNA (1)...(19): siRNA sense strand
ucaugaaccugcaaaacaa

SEQ ID NO: 712984 - RNA, 19 nt, Homo sapiens
  misc_RNA (1)...(19): siRNA sense strand
ggagaucguggaccaguac

SEQ ID NO: 712985 - RNA, 19 nt, Homo sapiens
  misc_RNA (1)...(19): siRNA sense strand
guauaagauggcagacgua

SEQ ID NO: 712986 - RNA, 19 nt, Homo sapiens
  misc_RNA (1)...(19): siRNA sense strand
gugcagagacccgagaugu

SEQ ID NO: 712987 - RNA, 19 nt, Homo sapiens
  misc_RNA (1)...(19): siRNA sense strand
gaucguggaccaguacauc

SEQ ID NO: 712988 - RNA, 19 nt, Homo sapiens
  misc_RNA (1)...(19): siRNA sense strand
ccaagacuggcaucaagga

SEQ ID NO: 712989 - RNA, 19 nt, Homo sapiens
  misc_RNA (1)...(19): siRNA sense strand
gcuacaaccaguucaagag

SEQ ID NO: 712990 - RNA, 19 nt, Homo sapiens
  misc_RNA (1)...(19): siRNA sense strand
ggucgcagggcuguguaua

SEQ ID NO: 712991 - RNA, 19 nt, Homo sapiens
  misc_RNA (1)...(19): siRNA sense strand
gcgcugccacugcaaguuc

SEQ ID NO: 712992 - RNA, 19 nt, Homo sapiens
  misc_RNA (1)...(19): siRNA sense strand
cagaggaagcugugccaau

SEQ ID NO: 712993 - RNA, 19 nt, Homo sapiens
  misc_RNA (1)...(19): siRNA sense strand
caagacuggcaucaaggaa

SEQ ID NO: 712994 - RNA, 19 nt, Homo sapiens
  misc_RNA (1)...(19): siRNA sense strand
gagcgagagaagaacuuug

SEQ ID NO: 712995 - RNA, 19 nt, Homo sapiens
  misc_RNA (1)...(19): siRNA sense strand
ccgcuucgccaaggaguuu

SEQ ID NO: 712996 - RNA, 19 nt, Homo sapiens
  misc_RNA (1)...(19): siRNA sense strand
gucgcagggcuguguauaa

SEQ ID NO: 712997 - RNA, 19 nt, Homo sapiens
  misc_RNA (1)...(19): siRNA sense strand
gcugcuucgucagguguaa

SEQ ID NO: 712998 - RNA, 19 nt, Homo sapiens
  misc_RNA (1)...(19): siRNA sense strand
gcagagacccgagauguuu

SEQ ID NO: 712999 - RNA, 19 nt, Homo sapiens
  misc_RNA (1)...(19): siRNA sense strand
gcagggcuguguauaagau

SEQ ID NO: 713000 - RNA, 19 nt, Homo sapiens
  misc_RNA (1)...(19): siRNA sense strand
agaggaagcugugccaauu

SEQ ID NO: 713001 - RNA, 19 nt, Homo sapiens
  misc_RNA (1)...(19): siRNA sense strand
gacccgagauguuuaucau

SEQ ID NO: 713002 - RNA, 19 nt, Homo sapiens
  misc_RNA (1)...(19): siRNA sense strand
gggaccggcugaaggagaa

SEQ ID NO: 713003 - RNA, 19 nt, Homo sapiens
  misc_RNA (1)...(19): siRNA sense strand
agacuggcaucaaggaaug

SEQ ID NO: 713004 - RNA, 19 nt, Homo sapiens
  misc_RNA (1)...(19): siRNA sense strand
agacguagccugcaaaugc

SEQ ID NO: 713005 - RNA, 19 nt, Homo sapiens
  misc_RNA (1)...(19): siRNA sense strand
ggagagucaugcagauagg

SEQ ID NO: 713006 - RNA, 19 nt, Homo sapiens
  misc_RNA (1)...(19): siRNA sense strand
ggaaugccagcaccaguuc

SEQ ID NO: 713007 - RNA, 19 nt, Homo sapiens
  misc_RNA (1)...(19): siRNA sense strand
cagagacccgagauguuua

SEQ ID NO: 713008 - RNA, 19 nt, Homo sapiens
  misc_RNA (1)...(19): siRNA sense strand
caacuccugguggucauua

SEQ ID NO: 713009 - RNA, 19 nt, Homo sapiens
  misc_RNA (1)...(19): siRNA sense strand
gagcacauggccuacauag

SEQ ID NO: 713010 - RNA, 19 nt, Homo sapiens
  misc_RNA (1)...(19): siRNA sense strand
gaggaagcugugccaauug

SEQ ID NO: 713011 - RNA, 19 nt, Homo sapiens
  misc_RNA (1)...(19): siRNA sense strand
ggagcgagagaagaacuuu

SEQ ID NO: 713012 - RNA, 19 nt, Homo sapiens
  misc_RNA (1)...(19): siRNA sense strand
cagauaggcagccgagaga

SEQ ID NO: 713013 - RNA, 19 nt, Homo sapiens
  misc_RNA (1)...(19): siRNA sense strand
guaagaagugcacggagau

SEQ ID NO: 713014 - RNA, 19 nt, Homo sapiens
  misc_RNA (1)...(19): siRNA sense strand
ggauggcugugagcucaug

SEQ ID NO: 713015 - RNA, 19 nt, Homo sapiens
  misc_RNA (1)...(19): siRNA sense strand
ggaagcugugccaauugua

SEQ ID NO: 713016 - RNA, 19 nt, Homo sapiens
  misc_RNA (1)...(19): siRNA sense strand
gaagcugugccaauuguac

SEQ ID NO: 713017 - RNA, 19 nt, Homo sapiens
  misc_RNA (1)...(19): siRNA sense strand
ggagcacauggccuacaua

SEQ ID NO: 713018 - RNA, 19 nt, Homo sapiens
  misc_RNA (1)...(19): siRNA sense strand
cggagaucguggaccagua

SEQ ID NO: 713019 - RNA, 19 nt, Homo sapiens
  misc_RNA (1)...(19): siRNA sense strand
ucgcagggcuguguauaag

SEQ ID NO: 713020 - RNA, 19 nt, Homo sapiens
  misc_RNA (1)...(19): siRNA sense strand
gggagagucaugcagauag

SEQ ID NO: 713021 - RNA, 19 nt, Homo sapiens
  misc_RNA (1)...(19): siRNA sense strand
gguggucauuagcuuugaa

SEQ ID NO: 713022 - RNA, 19 nt, Homo sapiens
  misc_RNA (1)...(19): siRNA sense strand
ggcuggagcuggucaacag

SEQ ID NO: 713023 - RNA, 19 nt, Homo sapiens
  misc_RNA (1)...(19): siRNA sense strand
aggaagcugugccaauugu

SEQ ID NO: 713024 - RNA, 19 nt, Homo sapiens
  misc_RNA (1)...(19): siRNA sense strand
ucaugaaccugcaaaacaa

SEQ ID NO: 713025 - RNA, 19 nt, Homo sapiens
  misc_RNA (1)...(19): siRNA sense strand
ggagaucguggaccaguac

SEQ ID NO: 713026 - RNA, 19 nt, Homo sapiens
  misc_RNA (1)...(19): siRNA sense strand
guauaagauggcagacgua

SEQ ID NO: 713027 - RNA, 19 nt, Homo sapiens
  misc_RNA (1)...(19): siRNA sense strand
gugcagagacccgagaugu

SEQ ID NO: 713028 - RNA, 19 nt, Homo sapiens
  misc_RNA (1)...(19): siRNA sense strand
gaucguggaccaguacauc

SEQ ID NO: 713029 - RNA, 19 nt, Homo sapiens
  misc_RNA (1)...(19): siRNA sense strand
ccaagacuggcaucaagga

SEQ ID NO: 713030 - RNA, 19 nt, Homo sapiens
  misc_RNA (1)...(19): siRNA sense strand
gcuacaaccaguucaagag

SEQ ID NO: 713031 - RNA, 19 nt, Homo sapiens
  misc_RNA (1)...(19): siRNA sense strand
ggucgcagggcuguguaua

SEQ ID NO: 713032 - RNA, 19 nt, Homo sapiens
  misc_RNA (1)...(19): siRNA sense strand
gcgcugccacugcaaguuc

SEQ ID NO: 713033 - RNA, 19 nt, Homo sapiens
  misc_RNA (1)...(19): siRNA sense strand
cagaggaagcugugccaau

SEQ ID NO: 713034 - RNA, 19 nt, Homo sapiens
  misc_RNA (1)...(19): siRNA sense strand
caagacuggcaucaaggaa

SEQ ID NO: 713035 - RNA, 19 nt, Homo sapiens
  misc_RNA (1)...(19): siRNA sense strand
gagcgagagaagaacuuug

SEQ ID NO: 713036 - RNA, 19 nt, Homo sapiens
  misc_RNA (1)...(19): siRNA sense strand
ccgcuucgccaaggaguuu

SEQ ID NO: 713037 - RNA, 19 nt, Homo sapiens
  misc_RNA (1)...(19): siRNA sense strand
gucgcagggcuguguauaa

SEQ ID NO: 713038 - RNA, 19 nt, Homo sapiens
  misc_RNA (1)...(19): siRNA sense strand
gcugcuucgucagguguaa

SEQ ID NO: 713039 - RNA, 19 nt, Homo sapiens
  misc_RNA (1)...(19): siRNA sense strand
agaagaagcucauuacugu

SEQ ID NO: 713040 - RNA, 19 nt, Homo sapiens
  misc_RNA (1)...(19): siRNA sense strand
gcacccagcuggcaugcaa

SEQ ID NO: 713041 - RNA, 19 nt, Homo sapiens
  misc_RNA (1)...(19): siRNA sense strand
ucaaggagcuccaucacau

SEQ ID NO: 713042 - RNA, 19 nt, Homo sapiens
  misc_RNA (1)...(19): siRNA sense strand
gagaagaagcucauuacug

SEQ ID NO: 713043 - RNA, 19 nt, Homo sapiens
  misc_RNA (1)...(19): siRNA sense strand
ccaaggagacagggaaaua

SEQ ID NO: 713044 - RNA, 19 nt, Homo sapiens
  misc_RNA (1)...(19): siRNA sense strand
cgagagaagaagcucauua

SEQ ID NO: 713045 - RNA, 19 nt, Homo sapiens
  misc_RNA (1)...(19): siRNA sense strand
gagcucauccuguuccaaa

SEQ ID NO: 713046 - RNA, 19 nt, Homo sapiens
  misc_RNA (1)...(19): siRNA sense strand
gagaucuucuucugcuuug

SEQ ID NO: 713047 - RNA, 19 nt, Homo sapiens
  misc_RNA (1)...(19): siRNA sense strand
agaauggccugaccgcaaa

SEQ ID NO: 713048 - RNA, 19 nt, Homo sapiens
  misc_RNA (1)...(19): siRNA sense strand
gaagaagcucauuacugua

SEQ ID NO: 713049 - RNA, 19 nt, Homo sapiens
  misc_RNA (1)...(19): siRNA sense strand
gagaggaggaggaagaaga

SEQ ID NO: 713050 - RNA, 19 nt, Homo sapiens
  misc_RNA (1)...(19): siRNA sense strand
ugaccgaccuggagaucaa

SEQ ID NO: 713051 - RNA, 19 nt, Homo sapiens
  misc_RNA (1)...(19): siRNA sense strand
aggaagagcugcagaggau

SEQ ID NO: 713052 - RNA, 19 nt, Homo sapiens
  misc_RNA (1)...(19): siRNA sense strand
gaagagcugcagaggaugu

SEQ ID NO: 713053 - RNA, 19 nt, Homo sapiens
  misc_RNA (1)...(19): siRNA sense strand
gagagaagaagcucauuac

SEQ ID NO: 713054 - RNA, 19 nt, Homo sapiens
  misc_RNA (1)...(19): siRNA sense strand
ccauaagccuggagcaagu

SEQ ID NO: 713055 - RNA, 19 nt, Homo sapiens
  misc_RNA (1)...(19): siRNA sense strand
gcugugcccuuaacaagag

SEQ ID NO: 713056 - RNA, 19 nt, Homo sapiens
  misc_RNA (1)...(19): siRNA sense strand
ggaggaggaagaagaggaa

SEQ ID NO: 713057 - RNA, 19 nt, Homo sapiens
  misc_RNA (1)...(19): siRNA sense strand
aaccugcgcugugcccuua

SEQ ID NO: 713058 - RNA, 19 nt, Homo sapiens
  misc_RNA (1)...(19): siRNA sense strand
cgagaucuucuucugcuuu

SEQ ID NO: 713059 - RNA, 19 nt, Homo sapiens
  misc_RNA (1)...(19): siRNA sense strand
ggagcaggccuugguguug

SEQ ID NO: 713060 - RNA, 19 nt, Homo sapiens
  misc_RNA (1)...(19): siRNA sense strand
uacgaggucugcuccaaug

SEQ ID NO: 713061 - RNA, 19 nt, Homo sapiens
  misc_RNA (1)...(19): siRNA sense strand
ggagaucaaguuucaguac

SEQ ID NO: 713062 - RNA, 19 nt, Homo sapiens
  misc_RNA (1)...(19): siRNA sense strand
ggacuuccgccucaucuac

SEQ ID NO: 713063 - RNA, 19 nt, Homo sapiens
  misc_RNA (1)...(19): siRNA sense strand
ccucagcccuacaagaucu

SEQ ID NO: 713064 - RNA, 19 nt, Homo sapiens
  misc_RNA (1)...(19): siRNA sense strand
caggagaggaggaggaaga

SEQ ID NO: 713065 - RNA, 19 nt, Homo sapiens
  misc_RNA (1)...(19): siRNA sense strand
cgaccuggagaucaaguuu

SEQ ID NO: 713066 - RNA, 19 nt, Homo sapiens
  misc_RNA (1)...(19): siRNA sense strand
cuacagggccaggaccuuu

SEQ ID NO: 713067 - RNA, 19 nt, Homo sapiens
  misc_RNA (1)...(19): siRNA sense strand
caccucagcccuacaagau

SEQ ID NO: 713068 - RNA, 19 nt, Homo sapiens
  misc_RNA (1)...(19): siRNA sense strand
uaacaagagccgggacuuc

SEQ ID NO: 713069 - RNA, 19 nt, Homo sapiens
  misc_RNA (1)...(19): siRNA sense strand
gaagcucauuacuguacag

SEQ ID NO: 713070 - RNA, 19 nt, Homo sapiens
  misc_RNA (1)...(19): siRNA sense strand
caacggggaaaagaaauua

SEQ ID NO: 713071 - RNA, 19 nt, Homo sapiens
  misc_RNA (1)...(19): siRNA sense strand
gacugcugcuggagauguu

SEQ ID NO: 713072 - RNA, 19 nt, Homo sapiens
  misc_RNA (1)...(19): siRNA sense strand
ggaggaagaagaggaagag

SEQ ID NO: 713073 - RNA, 19 nt, Homo sapiens
  misc_RNA (1)...(19): siRNA sense strand
gcgcugugcccuuaacaag

SEQ ID NO: 713074 - RNA, 19 nt, Homo sapiens
  misc_RNA (1)...(19): siRNA sense strand
uacagggccaggaccuuua

SEQ ID NO: 713075 - RNA, 19 nt, Homo sapiens
  misc_RNA (1)...(19): siRNA sense strand
ccaccacccuucgagaucu

SEQ ID NO: 713076 - RNA, 19 nt, Homo sapiens
  misc_RNA (1)...(19): siRNA sense strand
guacccagggcuucaaugg

SEQ ID NO: 713077 - RNA, 19 nt, Homo sapiens
  misc_RNA (1)...(19): siRNA sense strand
caaacccagaccucaaaga

SEQ ID NO: 713078 - RNA, 19 nt, Homo sapiens
  misc_RNA (1)...(19): siRNA sense strand
ccaccucagcccuacaaga

SEQ ID NO: 713079 - RNA, 19 nt, Homo sapiens
  misc_RNA (1)...(19): siRNA sense strand
caaaagggccagaccaaca

SEQ ID NO: 713080 - RNA, 19 nt, Homo sapiens
  misc_RNA (1)...(19): siRNA sense strand
caaggagacagggaaauac

SEQ ID NO: 713081 - RNA, 19 nt, Homo sapiens
  misc_RNA (1)...(19): siRNA sense strand
ggucaacggggaaaagaaa

SEQ ID NO: 713082 - RNA, 19 nt, Homo sapiens
  misc_RNA (1)...(19): siRNA sense strand
aagaagcucauuacuguac

SEQ ID NO: 713083 - RNA, 19 nt, Homo sapiens
  misc_RNA (1)...(19): siRNA sense strand
ggagcagguggaacucuuc

SEQ ID NO: 713084 - RNA, 19 nt, Homo sapiens
  misc_RNA (1)...(19): siRNA sense strand
ugccagaccugcugaucag

SEQ ID NO: 713085 - RNA, 19 nt, Homo sapiens
  misc_RNA (1)...(19): siRNA sense strand
agaagaagcucauuacugu

SEQ ID NO: 713086 - RNA, 19 nt, Homo sapiens
  misc_RNA (1)...(19): siRNA sense strand
gcacccagcuggcaugcaa

SEQ ID NO: 713087 - RNA, 19 nt, Homo sapiens
  misc_RNA (1)...(19): siRNA sense strand
ucaaggagcuccaucacau

SEQ ID NO: 713088 - RNA, 19 nt, Homo sapiens
  misc_RNA (1)...(19): siRNA sense strand
gagaagaagcucauuacug

SEQ ID NO: 713089 - RNA, 19 nt, Homo sapiens
  misc_RNA (1)...(19): siRNA sense strand
ccaaggagacagggaaaua

SEQ ID NO: 713090 - RNA, 19 nt, Homo sapiens
  misc_RNA (1)...(19): siRNA sense strand
cgagagaagaagcucauua

SEQ ID NO: 713091 - RNA, 19 nt, Homo sapiens
  misc_RNA (1)...(19): siRNA sense strand
gagcucauccuguuccaaa

SEQ ID NO: 713092 - RNA, 19 nt, Homo sapiens
  misc_RNA (1)...(19): siRNA sense strand
gagaucuucuucugcuuug

SEQ ID NO: 713093 - RNA, 19 nt, Homo sapiens
  misc_RNA (1)...(19): siRNA sense strand
agaauggccugaccgcaaa

SEQ ID NO: 713094 - RNA, 19 nt, Homo sapiens
  misc_RNA (1)...(19): siRNA sense strand
gaagaagcucauuacugua

SEQ ID NO: 713095 - RNA, 19 nt, Homo sapiens
  misc_RNA (1)...(19): siRNA sense strand
gagaggaggaggaagaaga

SEQ ID NO: 713096 - RNA, 19 nt, Homo sapiens
  misc_RNA (1)...(19): siRNA sense strand
ugaccgaccuggagaucaa

SEQ ID NO: 713097 - RNA, 19 nt, Homo sapiens
  misc_RNA (1)...(19): siRNA sense strand
aggaagagcugcagaggau

SEQ ID NO: 713098 - RNA, 19 nt, Homo sapiens
  misc_RNA (1)...(19): siRNA sense strand
gaagagcugcagaggaugu

SEQ ID NO: 713099 - RNA, 19 nt, Homo sapiens
  misc_RNA (1)...(19): siRNA sense strand
gagagaagaagcucauuac

SEQ ID NO: 713100 - RNA, 19 nt, Homo sapiens
  misc_RNA (1)...(19): siRNA sense strand
ccauaagccuggagcaagu

SEQ ID NO: 713101 - RNA, 19 nt, Homo sapiens
  misc_RNA (1)...(19): siRNA sense strand
gcugugcccuuaacaagag

SEQ ID NO: 713102 - RNA, 19 nt, Homo sapiens
  misc_RNA (1)...(19): siRNA sense strand
ggaggaggaagaagaggaa

SEQ ID NO: 713103 - RNA, 19 nt, Homo sapiens
  misc_RNA (1)...(19): siRNA sense strand
aaccugcgcugugcccuua

SEQ ID NO: 713104 - RNA, 19 nt, Homo sapiens
  misc_RNA (1)...(19): siRNA sense strand
cgagaucuucuucugcuuu

SEQ ID NO: 713105 - RNA, 19 nt, Homo sapiens
  misc_RNA (1)...(19): siRNA sense strand
ggagcaggccuugguguug

SEQ ID NO: 713106 - RNA, 19 nt, Homo sapiens
  misc_RNA (1)...(19): siRNA sense strand
uacgaggucugcuccaaug

SEQ ID NO: 713107 - RNA, 19 nt, Homo sapiens
  misc_RNA (1)...(19): siRNA sense strand
ggagaucaaguuucaguac

SEQ ID NO: 713108 - RNA, 19 nt, Homo sapiens
  misc_RNA (1)...(19): siRNA sense strand
ggacuuccgccucaucuac

SEQ ID NO: 713109 - RNA, 19 nt, Homo sapiens
  misc_RNA (1)...(19): siRNA sense strand
ccucagcccuacaagaucu

SEQ ID NO: 713110 - RNA, 19 nt, Homo sapiens
  misc_RNA (1)...(19): siRNA sense strand
caggagaggaggaggaaga

SEQ ID NO: 713111 - RNA, 19 nt, Homo sapiens
  misc_RNA (1)...(19): siRNA sense strand
cgaccuggagaucaaguuu

SEQ ID NO: 713112 - RNA, 19 nt, Homo sapiens
  misc_RNA (1)...(19): siRNA sense strand
cuacagggccaggaccuuu

SEQ ID NO: 713113 - RNA, 19 nt, Homo sapiens
  misc_RNA (1)...(19): siRNA sense strand
caccucagcccuacaagau

SEQ ID NO: 713114 - RNA, 19 nt, Homo sapiens
  misc_RNA (1)...(19): siRNA sense strand
uaacaagagccgggacuuc

SEQ ID NO: 713115 - RNA, 19 nt, Homo sapiens
  misc_RNA (1)...(19): siRNA sense strand
gaagcucauuacuguacag

SEQ ID NO: 713116 - RNA, 19 nt, Homo sapiens
  misc_RNA (1)...(19): siRNA sense strand
caacggggaaaagaaauua

SEQ ID NO: 713117 - RNA, 19 nt, Homo sapiens
  misc_RNA (1)...(19): siRNA sense strand
gacugcugcuggagauguu

SEQ ID NO: 713118 - RNA, 19 nt, Homo sapiens
  misc_RNA (1)...(19): siRNA sense strand
ggaggaagaagaggaagag

SEQ ID NO: 713119 - RNA, 19 nt, Homo sapiens
  misc_RNA (1)...(19): siRNA sense strand
gcgcugugcccuuaacaag

SEQ ID NO: 713120 - RNA, 19 nt, Homo sapiens
  misc_RNA (1)...(19): siRNA sense strand
uacagggccaggaccuuua

SEQ ID NO: 713121 - RNA, 19 nt, Homo sapiens
  misc_RNA (1)...(19): siRNA sense strand
ccaccacccuucgagaucu

SEQ ID NO: 713122 - RNA, 19 nt, Homo sapiens
  misc_RNA (1)...(19): siRNA sense strand
guacccagggcuucaaugg

SEQ ID NO: 713123 - RNA, 19 nt, Homo sapiens
  misc_RNA (1)...(19): siRNA sense strand
caaacccagaccucaaaga

SEQ ID NO: 713124 - RNA, 19 nt, Homo sapiens
  misc_RNA (1)...(19): siRNA sense strand
ccaccucagcccuacaaga

SEQ ID NO: 713125 - RNA, 19 nt, Homo sapiens
  misc_RNA (1)...(19): siRNA sense strand
caaaagggccagaccaaca

SEQ ID NO: 713126 - RNA, 19 nt, Homo sapiens
  misc_RNA (1)...(19): siRNA sense strand
caaggagacagggaaauac

SEQ ID NO: 713127 - RNA, 19 nt, Homo sapiens
  misc_RNA (1)...(19): siRNA sense strand
ggucaacggggaaaagaaa

SEQ ID NO: 713128 - RNA, 19 nt, Homo sapiens
  misc_RNA (1)...(19): siRNA sense strand
aagaagcucauuacuguac

SEQ ID NO: 713129 - RNA, 19 nt, Homo sapiens
  misc_RNA (1)...(19): siRNA sense strand
ggagcagguggaacucuuc

SEQ ID NO: 713130 - RNA, 19 nt, Homo sapiens
  misc_RNA (1)...(19): siRNA sense strand
ugccagaccugcugaucag

SEQ ID NO: 713131 - RNA, 19 nt, Homo sapiens
  misc_RNA (1)...(19): siRNA sense strand
ggacaaaggugcuggagaa

SEQ ID NO: 713132 - RNA, 19 nt, Homo sapiens
  misc_RNA (1)...(19): siRNA sense strand
acaaggagaugcugaaguu

SEQ ID NO: 713133 - RNA, 19 nt, Homo sapiens
  misc_RNA (1)...(19): siRNA sense strand
gcagugccauggaguguug

SEQ ID NO: 713134 - RNA, 19 nt, Homo sapiens
  misc_RNA (1)...(19): siRNA sense strand
caaaggugcuggagaagag

SEQ ID NO: 713135 - RNA, 19 nt, Homo sapiens
  misc_RNA (1)...(19): siRNA sense strand
ggucaaggacuacgagaaa

SEQ ID NO: 713136 - RNA, 19 nt, Homo sapiens
  misc_RNA (1)...(19): siRNA sense strand
gaagagcucggaccucaug

SEQ ID NO: 713137 - RNA, 19 nt, Homo sapiens
  misc_RNA (1)...(19): siRNA sense strand
gcuaugcccacaacaauga

SEQ ID NO: 713138 - RNA, 19 nt, Homo sapiens
  misc_RNA (1)...(19): siRNA sense strand
ccaagcagcagaucgagaa

SEQ ID NO: 713139 - RNA, 19 nt, Homo sapiens
  misc_RNA (1)...(19): siRNA sense strand
gcuggaggaugccgacuuc

SEQ ID NO: 713140 - RNA, 19 nt, Homo sapiens
  misc_RNA (1)...(19): siRNA sense strand
gagaaggcccugcgcuaug

SEQ ID NO: 713141 - RNA, 19 nt, Homo sapiens
  misc_RNA (1)...(19): siRNA sense strand
gagaagcugugcgaguuuc

SEQ ID NO: 713142 - RNA, 19 nt, Homo sapiens
  misc_RNA (1)...(19): siRNA sense strand
gggcgcacguugugagguu

SEQ ID NO: 713143 - RNA, 19 nt, Homo sapiens
  misc_RNA (1)...(19): siRNA sense strand
agaaggcccuggagagcuu

SEQ ID NO: 713144 - RNA, 19 nt, Homo sapiens
  misc_RNA (1)...(19): siRNA sense strand
gagcauuuaccgcagcaaa

SEQ ID NO: 713145 - RNA, 19 nt, Homo sapiens
  misc_RNA (1)...(19): siRNA sense strand
acgagaagcugugcgaguu

SEQ ID NO: 713146 - RNA, 19 nt, Homo sapiens
  misc_RNA (1)...(19): siRNA sense strand
ugucugagcgagagcauuu

SEQ ID NO: 713147 - RNA, 19 nt, Homo sapiens
  misc_RNA (1)...(19): siRNA sense strand
acaagaccaucuccuacug

SEQ ID NO: 713148 - RNA, 19 nt, Homo sapiens
  misc_RNA (1)...(19): siRNA sense strand
gcgcuaugcccacaacaau

SEQ ID NO: 713149 - RNA, 19 nt, Homo sapiens
  misc_RNA (1)...(19): siRNA sense strand
ugugaggagucuaugaaga

SEQ ID NO: 713150 - RNA, 19 nt, Homo sapiens
  misc_RNA (1)...(19): siRNA sense strand
gugaggagucuaugaagau

SEQ ID NO: 713151 - RNA, 19 nt, Homo sapiens
  misc_RNA (1)...(19): siRNA sense strand
cgagaaggcccugcgcuau

SEQ ID NO: 713152 - RNA, 19 nt, Homo sapiens
  misc_RNA (1)...(19): siRNA sense strand
agaaggggcuccagcugua

SEQ ID NO: 713153 - RNA, 19 nt, Homo sapiens
  misc_RNA (1)...(19): siRNA sense strand
cgagaagcugugcgaguuu

SEQ ID NO: 713154 - RNA, 19 nt, Homo sapiens
  misc_RNA (1)...(19): siRNA sense strand
cauugcagguguggacaaa

SEQ ID NO: 713155 - RNA, 19 nt, Homo sapiens
  misc_RNA (1)...(19): siRNA sense strand
gcuacaaggagaugcugaa

SEQ ID NO: 713156 - RNA, 19 nt, Homo sapiens
  misc_RNA (1)...(19): siRNA sense strand
cuaccuugcucccacaucu

SEQ ID NO: 713157 - RNA, 19 nt, Homo sapiens
  misc_RNA (1)...(19): siRNA sense strand
guugugaggagucuaugaa

SEQ ID NO: 713158 - RNA, 19 nt, Homo sapiens
  misc_RNA (1)...(19): siRNA sense strand
ugucaacaacuauggcaaa

SEQ ID NO: 713159 - RNA, 19 nt, Homo sapiens
  misc_RNA (1)...(19): siRNA sense strand
agacagagaaggcauugca

SEQ ID NO: 713160 - RNA, 19 nt, Homo sapiens
  misc_RNA (1)...(19): siRNA sense strand
ucacagcccacucggagau

SEQ ID NO: 713161 - RNA, 19 nt, Homo sapiens
  misc_RNA (1)...(19): siRNA sense strand
gcgaguccauaggcgagaa

SEQ ID NO: 713162 - RNA, 19 nt, Homo sapiens
  misc_RNA (1)...(19): siRNA sense strand
ugaggagucuaugaagauc

SEQ ID NO: 713163 - RNA, 19 nt, Homo sapiens
  misc_RNA (1)...(19): siRNA sense strand
ggaguguugugaggagucu

SEQ ID NO: 713164 - RNA, 19 nt, Homo sapiens
  misc_RNA (1)...(19): siRNA sense strand
uggaggagacggagcucua

SEQ ID NO: 713165 - RNA, 19 nt, Homo sapiens
  misc_RNA (1)...(19): siRNA sense strand
agaaggcccugcgcuaugc

SEQ ID NO: 713166 - RNA, 19 nt, Homo sapiens
  misc_RNA (1)...(19): siRNA sense strand
guaccaguccaaccagaca

SEQ ID NO: 713167 - RNA, 19 nt, Homo sapiens
  misc_RNA (1)...(19): siRNA sense strand
gucaacaacuauggcaaag

SEQ ID NO: 713168 - RNA, 19 nt, Homo sapiens
  misc_RNA (1)...(19): siRNA sense strand
gcauuuaccgcagcaaagg

SEQ ID NO: 713169 - RNA, 19 nt, Homo sapiens
  misc_RNA (1)...(19): siRNA sense strand
ggacaaaggugcuggagaa

SEQ ID NO: 713170 - RNA, 19 nt, Homo sapiens
  misc_RNA (1)...(19): siRNA sense strand
acaaggagaugcugaaguu

SEQ ID NO: 713171 - RNA, 19 nt, Homo sapiens
  misc_RNA (1)...(19): siRNA sense strand
gcagugccauggaguguug

SEQ ID NO: 713172 - RNA, 19 nt, Homo sapiens
  misc_RNA (1)...(19): siRNA sense strand
caaaggugcuggagaagag

SEQ ID NO: 713173 - RNA, 19 nt, Homo sapiens
  misc_RNA (1)...(19): siRNA sense strand
ggucaaggacuacgagaaa

SEQ ID NO: 713174 - RNA, 19 nt, Homo sapiens
  misc_RNA (1)...(19): siRNA sense strand
gaagagcucggaccucaug

SEQ ID NO: 713175 - RNA, 19 nt, Homo sapiens
  misc_RNA (1)...(19): siRNA sense strand
gcuaugcccacaacaauga

SEQ ID NO: 713176 - RNA, 19 nt, Homo sapiens
  misc_RNA (1)...(19): siRNA sense strand
ccaagcagcagaucgagaa

SEQ ID NO: 713177 - RNA, 19 nt, Homo sapiens
  misc_RNA (1)...(19): siRNA sense strand
gcuggaggaugccgacuuc

SEQ ID NO: 713178 - RNA, 19 nt, Homo sapiens
  misc_RNA (1)...(19): siRNA sense strand
gagaaggcccugcgcuaug

SEQ ID NO: 713179 - RNA, 19 nt, Homo sapiens
  misc_RNA (1)...(19): siRNA sense strand
gagaagcugugcgaguuuc

SEQ ID NO: 713180 - RNA, 19 nt, Homo sapiens
  misc_RNA (1)...(19): siRNA sense strand
gggcgcacguugugagguu

SEQ ID NO: 713181 - RNA, 19 nt, Homo sapiens
  misc_RNA (1)...(19): siRNA sense strand
agaaggcccuggagagcuu

SEQ ID NO: 713182 - RNA, 19 nt, Homo sapiens
  misc_RNA (1)...(19): siRNA sense strand
gagcauuuaccgcagcaaa

SEQ ID NO: 713183 - RNA, 19 nt, Homo sapiens
  misc_RNA (1)...(19): siRNA sense strand
acgagaagcugugcgaguu

SEQ ID NO: 713184 - RNA, 19 nt, Homo sapiens
  misc_RNA (1)...(19): siRNA sense strand
ugucugagcgagagcauuu

SEQ ID NO: 713185 - RNA, 19 nt, Homo sapiens
  misc_RNA (1)...(19): siRNA sense strand
acaagaccaucuccuacug

SEQ ID NO: 713186 - RNA, 19 nt, Homo sapiens
  misc_RNA (1)...(19): siRNA sense strand
gcgcuaugcccacaacaau

SEQ ID NO: 713187 - RNA, 19 nt, Homo sapiens
  misc_RNA (1)...(19): siRNA sense strand
ugugaggagucuaugaaga

SEQ ID NO: 713188 - RNA, 19 nt, Homo sapiens
  misc_RNA (1)...(19): siRNA sense strand
gugaggagucuaugaagau

SEQ ID NO: 713189 - RNA, 19 nt, Homo sapiens
  misc_RNA (1)...(19): siRNA sense strand
cgagaaggcccugcgcuau

SEQ ID NO: 713190 - RNA, 19 nt, Homo sapiens
  misc_RNA (1)...(19): siRNA sense strand
agaaggggcuccagcugua

SEQ ID NO: 713191 - RNA, 19 nt, Homo sapiens
  misc_RNA (1)...(19): siRNA sense strand
cgagaagcugugcgaguuu

SEQ ID NO: 713192 - RNA, 19 nt, Homo sapiens
  misc_RNA (1)...(19): siRNA sense strand
cauugcagguguggacaaa

SEQ ID NO: 713193 - RNA, 19 nt, Homo sapiens
  misc_RNA (1)...(19): siRNA sense strand
gcuacaaggagaugcugaa

SEQ ID NO: 713194 - RNA, 19 nt, Homo sapiens
  misc_RNA (1)...(19): siRNA sense strand
cuaccuugcucccacaucu

SEQ ID NO: 713195 - RNA, 19 nt, Homo sapiens
  misc_RNA (1)...(19): siRNA sense strand
guugugaggagucuaugaa

SEQ ID NO: 713196 - RNA, 19 nt, Homo sapiens
  misc_RNA (1)...(19): siRNA sense strand
ugucaacaacuauggcaaa

SEQ ID NO: 713197 - RNA, 19 nt, Homo sapiens
  misc_RNA (1)...(19): siRNA sense strand
agacagagaaggcauugca

SEQ ID NO: 713198 - RNA, 19 nt, Homo sapiens
  misc_RNA (1)...(19): siRNA sense strand
ucacagcccacucggagau

SEQ ID NO: 713199 - RNA, 19 nt, Homo sapiens
  misc_RNA (1)...(19): siRNA sense strand
gcgaguccauaggcgagaa

SEQ ID NO: 713200 - RNA, 19 nt, Homo sapiens
  misc_RNA (1)...(19): siRNA sense strand
ugaggagucuaugaagauc

SEQ ID NO: 713201 - RNA, 19 nt, Homo sapiens
  misc_RNA (1)...(19): siRNA sense strand
ggaguguugugaggagucu

SEQ ID NO: 713202 - RNA, 19 nt, Homo sapiens
  misc_RNA (1)...(19): siRNA sense strand
uggaggagacggagcucua

SEQ ID NO: 713203 - RNA, 19 nt, Homo sapiens
  misc_RNA (1)...(19): siRNA sense strand
agaaggcccugcgcuaugc

SEQ ID NO: 713204 - RNA, 19 nt, Homo sapiens
  misc_RNA (1)...(19): siRNA sense strand
guaccaguccaaccagaca

SEQ ID NO: 713205 - RNA, 19 nt, Homo sapiens
  misc_RNA (1)...(19): siRNA sense strand
gucaacaacuauggcaaag

SEQ ID NO: 713206 - RNA, 19 nt, Homo sapiens
  misc_RNA (1)...(19): siRNA sense strand
gcauuuaccgcagcaaagg

SEQ ID NO: 713207 - RNA, 19 nt, Homo sapiens
  misc_RNA (1)...(19): siRNA sense strand
guacgaaucugguccuaua

SEQ ID NO: 713208 - RNA, 19 nt, Homo sapiens
  misc_RNA (1)...(19): siRNA sense strand
gggaagagccugaagauga

SEQ ID NO: 713209 - RNA, 19 nt, Homo sapiens
  misc_RNA (1)...(19): siRNA sense strand
ggacaagguucucgaguuc

SEQ ID NO: 713210 - RNA, 19 nt, Homo sapiens
  misc_RNA (1)...(19): siRNA sense strand
gaaccugacuccguuagga

SEQ ID NO: 713211 - RNA, 19 nt, Homo sapiens
  misc_RNA (1)...(19): siRNA sense strand
ggaagagccugaagaugag

SEQ ID NO: 713212 - RNA, 19 nt, Homo sapiens
  misc_RNA (1)...(19): siRNA sense strand
gaccgcagaucauuaccuu

SEQ ID NO: 713213 - RNA, 19 nt, Homo sapiens
  misc_RNA (1)...(19): siRNA sense strand
ggacaaauacauccacaag

SEQ ID NO: 713214 - RNA, 19 nt, Homo sapiens
  misc_RNA (1)...(19): siRNA sense strand
cuacgcaccugcagacaga

SEQ ID NO: 713215 - RNA, 19 nt, Homo sapiens
  misc_RNA (1)...(19): siRNA sense strand
agaaggagaccgacuguga

SEQ ID NO: 713216 - RNA, 19 nt, Homo sapiens
  misc_RNA (1)...(19): siRNA sense strand
gcuaugggacgaugacuug

SEQ ID NO: 713217 - RNA, 19 nt, Homo sapiens
  misc_RNA (1)...(19): siRNA sense strand
ccacuggucccaccgcuuu

SEQ ID NO: 713218 - RNA, 19 nt, Homo sapiens
  misc_RNA (1)...(19): siRNA sense strand
gaccgacugugaccucugu

SEQ ID NO: 713219 - RNA, 19 nt, Homo sapiens
  misc_RNA (1)...(19): siRNA sense strand
ggagugagguacgaaucug

SEQ ID NO: 713220 - RNA, 19 nt, Homo sapiens
  misc_RNA (1)...(19): siRNA sense strand
ccgcagaucauuaccuuga

SEQ ID NO: 713221 - RNA, 19 nt, Homo sapiens
  misc_RNA (1)...(19): siRNA sense strand
ggcugaggcucuugaaaca

SEQ ID NO: 713222 - RNA, 19 nt, Homo sapiens
  misc_RNA (1)...(19): siRNA sense strand
uggacaagguucucgaguu

SEQ ID NO: 713223 - RNA, 19 nt, Homo sapiens
  misc_RNA (1)...(19): siRNA sense strand
gcagaucauuaccuugaac

SEQ ID NO: 713224 - RNA, 19 nt, Homo sapiens
  misc_RNA (1)...(19): siRNA sense strand
gaagcccagugguccuuuc

SEQ ID NO: 713225 - RNA, 19 nt, Homo sapiens
  misc_RNA (1)...(19): siRNA sense strand
gaaggaacucaaccacaca

SEQ ID NO: 713226 - RNA, 19 nt, Homo sapiens
  misc_RNA (1)...(19): siRNA sense strand
gaaucugguccuauacuca

SEQ ID NO: 713227 - RNA, 19 nt, Homo sapiens
  misc_RNA (1)...(19): siRNA sense strand
caacgugcaucugguucug

SEQ ID NO: 713228 - RNA, 19 nt, Homo sapiens
  misc_RNA (1)...(19): siRNA sense strand
ugacaacgugcaucugguu

SEQ ID NO: 713229 - RNA, 19 nt, Homo sapiens
  misc_RNA (1)...(19): siRNA sense strand
gcccagugguccuuucucu

SEQ ID NO: 713230 - RNA, 19 nt, Homo sapiens
  misc_RNA (1)...(19): siRNA sense strand
ugugggcucugugguauau

SEQ ID NO: 713231 - RNA, 19 nt, Homo sapiens
  misc_RNA (1)...(19): siRNA sense strand
ccuauacucagcccaggua

SEQ ID NO: 713232 - RNA, 19 nt, Homo sapiens
  misc_RNA (1)...(19): siRNA sense strand
cgaaucugguccuauacuc

SEQ ID NO: 713233 - RNA, 19 nt, Homo sapiens
  misc_RNA (1)...(19): siRNA sense strand
cugguucccugccucugua

SEQ ID NO: 713234 - RNA, 19 nt, Homo sapiens
  misc_RNA (1)...(19): siRNA sense strand
ugggcucugugguauauga

SEQ ID NO: 713235 - RNA, 19 nt, Homo sapiens
  misc_RNA (1)...(19): siRNA sense strand
caacgugucagcagauggu

SEQ ID NO: 713236 - RNA, 19 nt, Homo sapiens
  misc_RNA (1)...(19): siRNA sense strand
uggaggagcagcugacuca

SEQ ID NO: 713237 - RNA, 19 nt, Homo sapiens
  misc_RNA (1)...(19): siRNA sense strand
gcacugggaagagccugaa

SEQ ID NO: 713238 - RNA, 19 nt, Homo sapiens
  misc_RNA (1)...(19): siRNA sense strand
cacccuaaccucuguguuc

SEQ ID NO: 713239 - RNA, 19 nt, Homo sapiens
  misc_RNA (1)...(19): siRNA sense strand
ccucauccuccuucucaaa

SEQ ID NO: 713240 - RNA, 19 nt, Homo sapiens
  misc_RNA (1)...(19): siRNA sense strand
ccgcugcgcuuucccucau

SEQ ID NO: 713241 - RNA, 19 nt, Homo sapiens
  misc_RNA (1)...(19): siRNA sense strand
cgaguucccauugcugaaa

SEQ ID NO: 713242 - RNA, 19 nt, Homo sapiens
  misc_RNA (1)...(19): siRNA sense strand
ucugugggcucugugguau

SEQ ID NO: 713243 - RNA, 19 nt, Homo sapiens
  misc_RNA (1)...(19): siRNA sense strand
gcuggccugccuacucuuu

SEQ ID NO: 713244 - RNA, 19 nt, Homo sapiens
  misc_RNA (1)...(19): siRNA sense strand
gcugaaaggccacccuaac

SEQ ID NO: 713245 - RNA, 19 nt, Homo sapiens
  misc_RNA (1)...(19): siRNA sense strand
gaguucccauugcugaaag

SEQ ID NO: 713246 - RNA, 19 nt, Homo sapiens
  misc_RNA (1)...(19): siRNA sense strand
gugcaucugguucugaaug

SEQ ID NO: 713247 - RNA, 19 nt, Homo sapiens
  misc_RNA (1)...(19): siRNA sense strand
gguacgagaaggaacucaa

SEQ ID NO: 713248 - RNA, 19 nt, Homo sapiens
  misc_RNA (1)...(19): siRNA sense strand
uggcuggccugccuacucu

SEQ ID NO: 713249 - RNA, 19 nt, Homo sapiens
  misc_RNA (1)...(19): siRNA sense strand
gccucucccuguacuggaa

SEQ ID NO: 713250 - RNA, 19 nt, Homo sapiens
  misc_RNA (1)...(19): siRNA sense strand
gcucaacgugucagcagau

SEQ ID NO: 713251 - RNA, 19 nt, Homo sapiens
  misc_RNA (1)...(19): siRNA sense strand
guacgaaucugguccuaua

SEQ ID NO: 713252 - RNA, 19 nt, Homo sapiens
  misc_RNA (1)...(19): siRNA sense strand
gggaagagccugaagauga

SEQ ID NO: 713253 - RNA, 19 nt, Homo sapiens
  misc_RNA (1)...(19): siRNA sense strand
ggacaagguucucgaguuc

SEQ ID NO: 713254 - RNA, 19 nt, Homo sapiens
  misc_RNA (1)...(19): siRNA sense strand
gaaccugacuccguuagga

SEQ ID NO: 713255 - RNA, 19 nt, Homo sapiens
  misc_RNA (1)...(19): siRNA sense strand
ggaagagccugaagaugag

SEQ ID NO: 713256 - RNA, 19 nt, Homo sapiens
  misc_RNA (1)...(19): siRNA sense strand
gaccgcagaucauuaccuu

SEQ ID NO: 713257 - RNA, 19 nt, Homo sapiens
  misc_RNA (1)...(19): siRNA sense strand
ggacaaauacauccacaag

SEQ ID NO: 713258 - RNA, 19 nt, Homo sapiens
  misc_RNA (1)...(19): siRNA sense strand
cuacgcaccugcagacaga

SEQ ID NO: 713259 - RNA, 19 nt, Homo sapiens
  misc_RNA (1)...(19): siRNA sense strand
agaaggagaccgacuguga

SEQ ID NO: 713260 - RNA, 19 nt, Homo sapiens
  misc_RNA (1)...(19): siRNA sense strand
gcuaugggacgaugacuug

SEQ ID NO: 713261 - RNA, 19 nt, Homo sapiens
  misc_RNA (1)...(19): siRNA sense strand
ccacuggucccaccgcuuu

SEQ ID NO: 713262 - RNA, 19 nt, Homo sapiens
  misc_RNA (1)...(19): siRNA sense strand
gaccgacugugaccucugu

SEQ ID NO: 713263 - RNA, 19 nt, Homo sapiens
  misc_RNA (1)...(19): siRNA sense strand
ggagugagguacgaaucug

SEQ ID NO: 713264 - RNA, 19 nt, Homo sapiens
  misc_RNA (1)...(19): siRNA sense strand
ccgcagaucauuaccuuga

SEQ ID NO: 713265 - RNA, 19 nt, Homo sapiens
  misc_RNA (1)...(19): siRNA sense strand
ggcugaggcucuugaaaca

SEQ ID NO: 713266 - RNA, 19 nt, Homo sapiens
  misc_RNA (1)...(19): siRNA sense strand
uggacaagguucucgaguu

SEQ ID NO: 713267 - RNA, 19 nt, Homo sapiens
  misc_RNA (1)...(19): siRNA sense strand
gcagaucauuaccuugaac

SEQ ID NO: 713268 - RNA, 19 nt, Homo sapiens
  misc_RNA (1)...(19): siRNA sense strand
gaagcccagugguccuuuc

SEQ ID NO: 713269 - RNA, 19 nt, Homo sapiens
  misc_RNA (1)...(19): siRNA sense strand
gaaggaacucaaccacaca

SEQ ID NO: 713270 - RNA, 19 nt, Homo sapiens
  misc_RNA (1)...(19): siRNA sense strand
gaaucugguccuauacuca

SEQ ID NO: 713271 - RNA, 19 nt, Homo sapiens
  misc_RNA (1)...(19): siRNA sense strand
caacgugcaucugguucug

SEQ ID NO: 713272 - RNA, 19 nt, Homo sapiens
  misc_RNA (1)...(19): siRNA sense strand
ugacaacgugcaucugguu

SEQ ID NO: 713273 - RNA, 19 nt, Homo sapiens
  misc_RNA (1)...(19): siRNA sense strand
gcccagugguccuuucucu

SEQ ID NO: 713274 - RNA, 19 nt, Homo sapiens
  misc_RNA (1)...(19): siRNA sense strand
ugugggcucugugguauau

SEQ ID NO: 713275 - RNA, 19 nt, Homo sapiens
  misc_RNA (1)...(19): siRNA sense strand
ccuauacucagcccaggua

SEQ ID NO: 713276 - RNA, 19 nt, Homo sapiens
  misc_RNA (1)...(19): siRNA sense strand
cgaaucugguccuauacuc

SEQ ID NO: 713277 - RNA, 19 nt, Homo sapiens
  misc_RNA (1)...(19): siRNA sense strand
cugguucccugccucugua

SEQ ID NO: 713278 - RNA, 19 nt, Homo sapiens
  misc_RNA (1)...(19): siRNA sense strand
ugggcucugugguauauga

SEQ ID NO: 713279 - RNA, 19 nt, Homo sapiens
  misc_RNA (1)...(19): siRNA sense strand
caacgugucagcagauggu

SEQ ID NO: 713280 - RNA, 19 nt, Homo sapiens
  misc_RNA (1)...(19): siRNA sense strand
uggaggagcagcugacuca

SEQ ID NO: 713281 - RNA, 19 nt, Homo sapiens
  misc_RNA (1)...(19): siRNA sense strand
agagagagcggagcaagug

SEQ ID NO: 713282 - RNA, 19 nt, Homo sapiens
  misc_RNA (1)...(19): siRNA sense strand
ccucccaacugccagacuu

SEQ ID NO: 713283 - RNA, 19 nt, Homo sapiens
  misc_RNA (1)...(19): siRNA sense strand
guggagccgucgugaacug

SEQ ID NO: 713284 - RNA, 19 nt, Homo sapiens
  misc_RNA (1)...(19): siRNA sense strand
gcacugggaagagccugaa

SEQ ID NO: 713285 - RNA, 19 nt, Homo sapiens
  misc_RNA (1)...(19): siRNA sense strand
cacccuaaccucuguguuc

SEQ ID NO: 713286 - RNA, 19 nt, Homo sapiens
  misc_RNA (1)...(19): siRNA sense strand
ccucauccuccuucucaaa

SEQ ID NO: 713287 - RNA, 19 nt, Homo sapiens
  misc_RNA (1)...(19): siRNA sense strand
ccgcugcgcuuucccucau

SEQ ID NO: 713288 - RNA, 19 nt, Homo sapiens
  misc_RNA (1)...(19): siRNA sense strand
cgaguucccauugcugaaa

SEQ ID NO: 713289 - RNA, 19 nt, Homo sapiens
  misc_RNA (1)...(19): siRNA sense strand
ucugugggcucugugguau

SEQ ID NO: 713290 - RNA, 19 nt, Homo sapiens
  misc_RNA (1)...(19): siRNA sense strand
gugguggucuugcucuucu

SEQ ID NO: 713291 - RNA, 19 nt, Homo sapiens
  misc_RNA (1)...(19): siRNA sense strand
gcuggccugccuacucuuu

SEQ ID NO: 713292 - RNA, 19 nt, Homo sapiens
  misc_RNA (1)...(19): siRNA sense strand
gcugaaaggccacccuaac

SEQ ID NO: 713293 - RNA, 19 nt, Homo sapiens
  misc_RNA (1)...(19): siRNA sense strand
gaguucccauugcugaaag

SEQ ID NO: 713294 - RNA, 19 nt, Homo sapiens
  misc_RNA (1)...(19): siRNA sense strand
gugcaucugguucugaaug

SEQ ID NO: 713295 - RNA, 19 nt, Homo sapiens
  misc_RNA (1)...(19): siRNA sense strand
gguacgagaaggaacucaa

SEQ ID NO: 713296 - RNA, 19 nt, Homo sapiens
  misc_RNA (1)...(19): siRNA sense strand
uggcuggccugccuacucu

SEQ ID NO: 713297 - RNA, 19 nt, Homo sapiens
  misc_RNA (1)...(19): siRNA sense strand
gccucucccuguacuggaa

SEQ ID NO: 713298 - RNA, 19 nt, Homo sapiens
  misc_RNA (1)...(19): siRNA sense strand
gcucaacgugucagcagau

SEQ ID NO: 713299 - RNA, 19 nt, Homo sapiens
  misc_RNA (1)...(19): siRNA sense strand
guacgaaucugguccuaua

SEQ ID NO: 713300 - RNA, 19 nt, Homo sapiens
  misc_RNA (1)...(19): siRNA sense strand
gggaagagccugaagauga

SEQ ID NO: 713301 - RNA, 19 nt, Homo sapiens
  misc_RNA (1)...(19): siRNA sense strand
ggacaagguucucgaguuc

SEQ ID NO: 713302 - RNA, 19 nt, Homo sapiens
  misc_RNA (1)...(19): siRNA sense strand
gaaccugacuccguuagga

SEQ ID NO: 713303 - RNA, 19 nt, Homo sapiens
  misc_RNA (1)...(19): siRNA sense strand
ggaagagccugaagaugag

SEQ ID NO: 713304 - RNA, 19 nt, Homo sapiens
  misc_RNA (1)...(19): siRNA sense strand
gaccgcagaucauuaccuu

SEQ ID NO: 713305 - RNA, 19 nt, Homo sapiens
  misc_RNA (1)...(19): siRNA sense strand
ggacaaauacauccacaag

SEQ ID NO: 713306 - RNA, 19 nt, Homo sapiens
  misc_RNA (1)...(19): siRNA sense strand
cuacgcaccugcagacaga

SEQ ID NO: 713307 - RNA, 19 nt, Homo sapiens
  misc_RNA (1)...(19): siRNA sense strand
agaaggagaccgacuguga

SEQ ID NO: 713308 - RNA, 19 nt, Homo sapiens
  misc_RNA (1)...(19): siRNA sense strand
gcuaugggacgaugacuug

SEQ ID NO: 713309 - RNA, 19 nt, Homo sapiens
  misc_RNA (1)...(19): siRNA sense strand
ccacuggucccaccgcuuu

SEQ ID NO: 713310 - RNA, 19 nt, Homo sapiens
  misc_RNA (1)...(19): siRNA sense strand
gaccgacugugaccucugu

SEQ ID NO: 713311 - RNA, 19 nt, Homo sapiens
  misc_RNA (1)...(19): siRNA sense strand
ggagugagguacgaaucug

SEQ ID NO: 713312 - RNA, 19 nt, Homo sapiens
  misc_RNA (1)...(19): siRNA sense strand
ccgcagaucauuaccuuga

SEQ ID NO: 713313 - RNA, 19 nt, Homo sapiens
  misc_RNA (1)...(19): siRNA sense strand
ggcugaggcucuugaaaca

SEQ ID NO: 713314 - RNA, 19 nt, Homo sapiens
  misc_RNA (1)...(19): siRNA sense strand
uggacaagguucucgaguu

SEQ ID NO: 713315 - RNA, 19 nt, Homo sapiens
  misc_RNA (1)...(19): siRNA sense strand
gcagaucauuaccuugaac

SEQ ID NO: 713316 - RNA, 19 nt, Homo sapiens
  misc_RNA (1)...(19): siRNA sense strand
gaagcccagugguccuuuc

SEQ ID NO: 713317 - RNA, 19 nt, Homo sapiens
  misc_RNA (1)...(19): siRNA sense strand
gaaggaacucaaccacaca

SEQ ID NO: 713318 - RNA, 19 nt, Homo sapiens
  misc_RNA (1)...(19): siRNA sense strand
gaaucugguccuauacuca

SEQ ID NO: 713319 - RNA, 19 nt, Homo sapiens
  misc_RNA (1)...(19): siRNA sense strand
caacgugcaucugguucug

SEQ ID NO: 713320 - RNA, 19 nt, Homo sapiens
  misc_RNA (1)...(19): siRNA sense strand
ugacaacgugcaucugguu

SEQ ID NO: 713321 - RNA, 19 nt, Homo sapiens
  misc_RNA (1)...(19): siRNA sense strand
gcccagugguccuuucucu

SEQ ID NO: 713322 - RNA, 19 nt, Homo sapiens
  misc_RNA (1)...(19): siRNA sense strand
ugugggcucugugguauau

SEQ ID NO: 713323 - RNA, 19 nt, Homo sapiens
  misc_RNA (1)...(19): siRNA sense strand
ccuauacucagcccaggua

SEQ ID NO: 713324 - RNA, 19 nt, Homo sapiens
  misc_RNA (1)...(19): siRNA sense strand
cgaaucugguccuauacuc

SEQ ID NO: 713325 - RNA, 19 nt, Homo sapiens
  misc_RNA (1)...(19): siRNA sense strand
cugguucccugccucugua

SEQ ID NO: 713326 - RNA, 19 nt, Homo sapiens
  misc_RNA (1)...(19): siRNA sense strand
ugggcucugugguauauga

SEQ ID NO: 713327 - RNA, 19 nt, Homo sapiens
  misc_RNA (1)...(19): siRNA sense strand
caacgugucagcagauggu

SEQ ID NO: 713328 - RNA, 19 nt, Homo sapiens
  misc_RNA (1)...(19): siRNA sense strand
uggaggagcagcugacuca

SEQ ID NO: 713329 - RNA, 19 nt, Homo sapiens
  misc_RNA (1)...(19): siRNA sense strand
agagagagcggagcaagug

SEQ ID NO: 713330 - RNA, 19 nt, Homo sapiens
  misc_RNA (1)...(19): siRNA sense strand
ccucccaacugccagacuu

SEQ ID NO: 713331 - RNA, 19 nt, Homo sapiens
  misc_RNA (1)...(19): siRNA sense strand
guggagccgucgugaacug

SEQ ID NO: 713332 - RNA, 19 nt, Homo sapiens
  misc_RNA (1)...(19): siRNA sense strand
gcacugggaagagccugaa

SEQ ID NO: 713333 - RNA, 19 nt, Homo sapiens
  misc_RNA (1)...(19): siRNA sense strand
cacccuaaccucuguguuc

SEQ ID NO: 713334 - RNA, 19 nt, Homo sapiens
  misc_RNA (1)...(19): siRNA sense strand
ccucauccuccuucucaaa

SEQ ID NO: 713335 - RNA, 19 nt, Homo sapiens
  misc_RNA (1)...(19): siRNA sense strand
ccgcugcgcuuucccucau

SEQ ID NO: 713336 - RNA, 19 nt, Homo sapiens
  misc_RNA (1)...(19): siRNA sense strand
cgaguucccauugcugaaa

SEQ ID NO: 713337 - RNA, 19 nt, Homo sapiens
  misc_RNA (1)...(19): siRNA sense strand
ucugugggcucugugguau

SEQ ID NO: 713338 - RNA, 19 nt, Homo sapiens
  misc_RNA (1)...(19): siRNA sense strand
gugguggucuugcucuucu

SEQ ID NO: 713339 - RNA, 19 nt, Homo sapiens
  misc_RNA (1)...(19): siRNA sense strand
gcuggccugccuacucuuu

SEQ ID NO: 713340 - RNA, 19 nt, Homo sapiens
  misc_RNA (1)...(19): siRNA sense strand
gcugaaaggccacccuaac

SEQ ID NO: 713341 - RNA, 19 nt, Homo sapiens
  misc_RNA (1)...(19): siRNA sense strand
gaguucccauugcugaaag

SEQ ID NO: 713342 - RNA, 19 nt, Homo sapiens
  misc_RNA (1)...(19): siRNA sense strand
gugcaucugguucugaaug

SEQ ID NO: 713343 - RNA, 19 nt, Homo sapiens
  misc_RNA (1)...(19): siRNA sense strand
gguacgagaaggaacucaa

SEQ ID NO: 713344 - RNA, 19 nt, Homo sapiens
  misc_RNA (1)...(19): siRNA sense strand
uggcuggccugccuacucu

SEQ ID NO: 713345 - RNA, 19 nt, Homo sapiens
  misc_RNA (1)...(19): siRNA sense strand
gccucucccuguacuggaa

SEQ ID NO: 713346 - RNA, 19 nt, Homo sapiens
  misc_RNA (1)...(19): siRNA sense strand
gcucaacgugucagcagau

SEQ ID NO: 713347 - RNA, 19 nt, Homo sapiens
  misc_RNA (1)...(19): siRNA sense strand
guacgaaucugguccuaua

SEQ ID NO: 713348 - RNA, 19 nt, Homo sapiens
  misc_RNA (1)...(19): siRNA sense strand
gggaagagccugaagauga

SEQ ID NO: 713349 - RNA, 19 nt, Homo sapiens
  misc_RNA (1)...(19): siRNA sense strand
ggaagagccugaagaugag

SEQ ID NO: 713350 - RNA, 19 nt, Homo sapiens
  misc_RNA (1)...(19): siRNA sense strand
cuacgcaccugcagacaga

SEQ ID NO: 713351 - RNA, 19 nt, Homo sapiens
  misc_RNA (1)...(19): siRNA sense strand
agaaggagaccgacuguga

SEQ ID NO: 713352 - RNA, 19 nt, Homo sapiens
  misc_RNA (1)...(19): siRNA sense strand
gaccgacugugaccucugu

SEQ ID NO: 713353 - RNA, 19 nt, Homo sapiens
  misc_RNA (1)...(19): siRNA sense strand
ggagugagguacgaaucug

SEQ ID NO: 713354 - RNA, 19 nt, Homo sapiens
  misc_RNA (1)...(19): siRNA sense strand
gaagcccagugguccuuuc

SEQ ID NO: 713355 - RNA, 19 nt, Homo sapiens
  misc_RNA (1)...(19): siRNA sense strand
gaaggaacucaaccacaca

SEQ ID NO: 713356 - RNA, 19 nt, Homo sapiens
  misc_RNA (1)...(19): siRNA sense strand
gaaucugguccuauacuca

SEQ ID NO: 713357 - RNA, 19 nt, Homo sapiens
  misc_RNA (1)...(19): siRNA sense strand
caacgugcaucugguucug

SEQ ID NO: 713358 - RNA, 19 nt, Homo sapiens
  misc_RNA (1)...(19): siRNA sense strand
gcccagugguccuuucucu

SEQ ID NO: 713359 - RNA, 19 nt, Homo sapiens
  misc_RNA (1)...(19): siRNA sense strand
ugacaacgugcaucugguu

SEQ ID NO: 713360 - RNA, 19 nt, Homo sapiens
  misc_RNA (1)...(19): siRNA sense strand
ugugggcucugugguauau

SEQ ID NO: 713361 - RNA, 19 nt, Homo sapiens
  misc_RNA (1)...(19): siRNA sense strand
ccuauacucagcccaggua

SEQ ID NO: 713362 - RNA, 19 nt, Homo sapiens
  misc_RNA (1)...(19): siRNA sense strand
cgaaucugguccuauacuc

SEQ ID NO: 713363 - RNA, 19 nt, Homo sapiens
  misc_RNA (1)...(19): siRNA sense strand
ugggcucugugguauauga

SEQ ID NO: 713364 - RNA, 19 nt, Homo sapiens
  misc_RNA (1)...(19): siRNA sense strand
caacgugucagcagauggu

SEQ ID NO: 713365 - RNA, 19 nt, Homo sapiens
  misc_RNA (1)...(19): siRNA sense strand
gcacugggaagagccugaa

SEQ ID NO: 713366 - RNA, 19 nt, Homo sapiens
  misc_RNA (1)...(19): siRNA sense strand
uggaggagcagcugacuca

SEQ ID NO: 713367 - RNA, 19 nt, Homo sapiens
  misc_RNA (1)...(19): siRNA sense strand
ucugugggcucugugguau

SEQ ID NO: 713368 - RNA, 19 nt, Homo sapiens
  misc_RNA (1)...(19): siRNA sense strand
gugcaucugguucugaaug

SEQ ID NO: 713369 - RNA, 19 nt, Homo sapiens
  misc_RNA (1)...(19): siRNA sense strand
gguacgagaaggaacucaa

SEQ ID NO: 713370 - RNA, 19 nt, Homo sapiens
  misc_RNA (1)...(19): siRNA sense strand
gccucucccuguacuggaa

SEQ ID NO: 713371 - RNA, 19 nt, Homo sapiens
  misc_RNA (1)...(19): siRNA sense strand
gcucaacgugucagcagau

SEQ ID NO: 713372 - RNA, 19 nt, Homo sapiens
  misc_RNA (1)...(19): siRNA sense strand
cuacgcaccugcagacaga

SEQ ID NO: 713373 - RNA, 19 nt, Homo sapiens
  misc_RNA (1)...(19): siRNA sense strand
gaagcccagugguccuuuc

SEQ ID NO: 713374 - RNA, 19 nt, Homo sapiens
  misc_RNA (1)...(19): siRNA sense strand
gcccagugguccuuucucu

SEQ ID NO: 713375 - RNA, 19 nt, Homo sapiens
  misc_RNA (1)...(19): siRNA sense strand
gaagaacucugaucugcuu

SEQ ID NO: 713376 - RNA, 19 nt, Homo sapiens
  misc_RNA (1)...(19): siRNA sense strand
gaaccaaacaggaaauauu

SEQ ID NO: 713377 - RNA, 19 nt, Homo sapiens
  misc_RNA (1)...(19): siRNA sense strand
caagacauaucacugcaaa

SEQ ID NO: 713378 - RNA, 19 nt, Homo sapiens
  misc_RNA (1)...(19): siRNA sense strand
gcagaaagcacgucauugu

SEQ ID NO: 713379 - RNA, 19 nt, Homo sapiens
  misc_RNA (1)...(19): siRNA sense strand
ggaaugacaagacauauca

SEQ ID NO: 713380 - RNA, 19 nt, Homo sapiens
  misc_RNA (1)...(19): siRNA sense strand
aagaagaacuugggaagaa

SEQ ID NO: 713381 - RNA, 19 nt, Homo sapiens
  misc_RNA (1)...(19): siRNA sense strand
caaagaggcagcaaaggaa

SEQ ID NO: 713382 - RNA, 19 nt, Homo sapiens
  misc_RNA (1)...(19): siRNA sense strand
acucugaucugcuuucuau

SEQ ID NO: 713383 - RNA, 19 nt, Homo sapiens
  misc_RNA (1)...(19): siRNA sense strand
ccaaagaggcagcaaagga

SEQ ID NO: 713384 - RNA, 19 nt, Homo sapiens
  misc_RNA (1)...(19): siRNA sense strand
acauaucacugcaaagguu

SEQ ID NO: 713385 - RNA, 19 nt, Homo sapiens
  misc_RNA (1)...(19): siRNA sense strand
gauuacauauuccaacagu

SEQ ID NO: 713386 - RNA, 19 nt, Homo sapiens
  misc_RNA (1)...(19): siRNA sense strand
ccugauggccacuguguua

SEQ ID NO: 713387 - RNA, 19 nt, Homo sapiens
  misc_RNA (1)...(19): siRNA sense strand
ccaaguagaauuaaaccuu

SEQ ID NO: 713388 - RNA, 19 nt, Homo sapiens
  misc_RNA (1)...(19): siRNA sense strand
guucuuauuccuuguauug

SEQ ID NO: 713389 - RNA, 19 nt, Homo sapiens
  misc_RNA (1)...(19): siRNA sense strand
aggaguggauuacauauuc

SEQ ID NO: 713390 - RNA, 19 nt, Homo sapiens
  misc_RNA (1)...(19): siRNA sense strand
gaaacuuaagggcaauaaa

SEQ ID NO: 713391 - RNA, 19 nt, Homo sapiens
  misc_RNA (1)...(19): siRNA sense strand
gcacgucauuguggccauu

SEQ ID NO: 713392 - RNA, 19 nt, Homo sapiens
  misc_RNA (1)...(19): siRNA sense strand
ucaagggaaugacaagaca

SEQ ID NO: 713393 - RNA, 19 nt, Homo sapiens
  misc_RNA (1)...(19): siRNA sense strand
ggaaccuacucagaaguga

SEQ ID NO: 713394 - RNA, 19 nt, Homo sapiens
  misc_RNA (1)...(19): siRNA sense strand
cuaggaaucauuugcauug

SEQ ID NO: 713395 - RNA, 19 nt, Homo sapiens
  misc_RNA (1)...(19): siRNA sense strand
gaacuugggaagaaagagu

SEQ ID NO: 713396 - RNA, 19 nt, Homo sapiens
  misc_RNA (1)...(19): siRNA sense strand
agaagaacuugggaagaaa

SEQ ID NO: 713397 - RNA, 19 nt, Homo sapiens
  misc_RNA (1)...(19): siRNA sense strand
gaauagaagaaugcagaaa

SEQ ID NO: 713398 - RNA, 19 nt, Homo sapiens
  misc_RNA (1)...(19): siRNA sense strand
gaacucugaucugcuuucu

SEQ ID NO: 713399 - RNA, 19 nt, Homo sapiens
  misc_RNA (1)...(19): siRNA sense strand
ggaaacuuaagggcaauaa

SEQ ID NO: 713400 - RNA, 19 nt, Homo sapiens
  misc_RNA (1)...(19): siRNA sense strand
gaggaguggauuacauauu

SEQ ID NO: 713401 - RNA, 19 nt, Homo sapiens
  misc_RNA (1)...(19): siRNA sense strand
guacuggagcagaacaauu

SEQ ID NO: 713402 - RNA, 19 nt, Homo sapiens
  misc_RNA (1)...(19): siRNA sense strand
aagaggaaccuacucagaa

SEQ ID NO: 713403 - RNA, 19 nt, Homo sapiens
  misc_RNA (1)...(19): siRNA sense strand
uacuggagcagaacaauuu

SEQ ID NO: 713404 - RNA, 19 nt, Homo sapiens
  misc_RNA (1)...(19): siRNA sense strand
gguaaggaaagaagaacuu

SEQ ID NO: 713405 - RNA, 19 nt, Homo sapiens
  misc_RNA (1)...(19): siRNA sense strand
aaagaggaaccuacucaga

SEQ ID NO: 713406 - RNA, 19 nt, Homo sapiens
  misc_RNA (1)...(19): siRNA sense strand
agaggaaccuacucagaag

SEQ ID NO: 713407 - RNA, 19 nt, Homo sapiens
  misc_RNA (1)...(19): siRNA sense strand
gaagaacuugggaagaaag

SEQ ID NO: 713408 - RNA, 19 nt, Homo sapiens
  misc_RNA (1)...(19): siRNA sense strand
acaaagaggaaccuacuca

SEQ ID NO: 713409 - RNA, 19 nt, Homo sapiens
  misc_RNA (1)...(19): siRNA sense strand
ggaaccaaacaggaaauau

SEQ ID NO: 713410 - RNA, 19 nt, Homo sapiens
  misc_RNA (1)...(19): siRNA sense strand
gcugagguccuaggaauca

SEQ ID NO: 713411 - RNA, 19 nt, Homo sapiens
  misc_RNA (1)...(19): siRNA sense strand
cugcugagguccuaggaau

SEQ ID NO: 713412 - RNA, 19 nt, Homo sapiens
  misc_RNA (1)...(19): siRNA sense strand
gagguccuaggaaucauuu

SEQ ID NO: 713413 - RNA, 19 nt, Homo sapiens
  misc_RNA (1)...(19): siRNA sense strand
guaaggaaagaagaacuug

SEQ ID NO: 713414 - RNA, 19 nt, Homo sapiens
  misc_RNA (1)...(19): siRNA sense strand
aggcagcaaaggaaacuua

SEQ ID NO: 713415 - RNA, 19 nt, Homo sapiens
  misc_RNA (1)...(19): siRNA sense strand
aaacaaagaggaaccuacu

SEQ ID NO: 713416 - RNA, 19 nt, Homo sapiens
  misc_RNA (1)...(19): siRNA sense strand
gugcuucgaagaacucuga

SEQ ID NO: 713417 - RNA, 19 nt, Homo sapiens
  misc_RNA (1)...(19): siRNA sense strand
aagggaaugacaagacaua

SEQ ID NO: 713418 - RNA, 19 nt, Homo sapiens
  misc_RNA (1)...(19): siRNA sense strand
cugaggaguggauuacaua

SEQ ID NO: 713419 - RNA, 19 nt, Homo sapiens
  misc_RNA (1)...(19): siRNA sense strand
aaccaaacaggaaauauuc

SEQ ID NO: 713420 - RNA, 19 nt, Homo sapiens
  misc_RNA (1)...(19): siRNA sense strand
gggaaugacaagacauauc

SEQ ID NO: 713421 - RNA, 19 nt, Homo sapiens
  misc_RNA (1)...(19): siRNA sense strand
aaagaggcagcaaaggaaa

SEQ ID NO: 713422 - RNA, 19 nt, Homo sapiens
  misc_RNA (1)...(19): siRNA sense strand
cagcaaaggaaacuuaagg

SEQ ID NO: 713423 - RNA, 19 nt, Homo sapiens
  misc_RNA (1)...(19): siRNA sense strand
ucaggaaccaaacaggaaa

SEQ ID NO: 713424 - RNA, 19 nt, Homo sapiens
  misc_RNA (1)...(19): siRNA sense strand
cagaaagcacgucauugug

SEQ ID NO: 713425 - RNA, 19 nt, Homo sapiens
  misc_RNA (1)...(19): siRNA sense strand
ccugaggaguggauuacau

SEQ ID NO: 713426 - RNA, 19 nt, Homo sapiens
  misc_RNA (1)...(19): siRNA sense strand
gauggccacuguguuaaaa

SEQ ID NO: 713427 - RNA, 19 nt, Homo sapiens
  misc_RNA (1)...(19): siRNA sense strand
ggcagcaaaggaaacuuaa

SEQ ID NO: 713428 - RNA, 19 nt, Homo sapiens
  misc_RNA (1)...(19): siRNA sense strand
aaagaagaacuugggaaga

SEQ ID NO: 713429 - RNA, 19 nt, Homo sapiens
  misc_RNA (1)...(19): siRNA sense strand
agacauaucacugcaaagg

SEQ ID NO: 713430 - RNA, 19 nt, Homo sapiens
  misc_RNA (1)...(19): siRNA sense strand
aauagaagaaugcagaaag

SEQ ID NO: 713431 - RNA, 19 nt, Homo sapiens
  misc_RNA (1)...(19): siRNA sense strand
ucuuauuccuuguauugga

SEQ ID NO: 713432 - RNA, 19 nt, Homo sapiens
  misc_RNA (1)...(19): siRNA sense strand
cauaucacugcaaagguuu

SEQ ID NO: 713433 - RNA, 19 nt, Homo sapiens
  misc_RNA (1)...(19): siRNA sense strand
cauuugcauuguccugaug

SEQ ID NO: 713434 - RNA, 19 nt, Homo sapiens
  misc_RNA (1)...(19): siRNA sense strand
ugaauagaagaaugcagaa

SEQ ID NO: 713435 - RNA, 19 nt, Homo sapiens
  misc_RNA (1)...(19): siRNA sense strand
ugauggccacuguguuaaa

SEQ ID NO: 713436 - RNA, 19 nt, Homo sapiens
  misc_RNA (1)...(19): siRNA sense strand
ucugaucugcuuucuauag

SEQ ID NO: 713437 - RNA, 19 nt, Homo sapiens
  misc_RNA (1)...(19): siRNA sense strand
ggaguggauuacauauucc

SEQ ID NO: 713438 - RNA, 19 nt, Homo sapiens
  misc_RNA (1)...(19): siRNA sense strand
gacccaaagaggcagcaaa

SEQ ID NO: 713439 - RNA, 19 nt, Homo sapiens
  misc_RNA (1)...(19): siRNA sense strand
auagaagaaugcagaaagc

SEQ ID NO: 713440 - RNA, 19 nt, Homo sapiens
  misc_RNA (1)...(19): siRNA sense strand
ucauuugcauuguccugau

SEQ ID NO: 713441 - RNA, 19 nt, Homo sapiens
  misc_RNA (1)...(19): siRNA sense strand
uuggaguacuggagcagaa

SEQ ID NO: 713442 - RNA, 19 nt, Homo sapiens
  misc_RNA (1)...(19): siRNA sense strand
gaagucagaugaugaauua

SEQ ID NO: 713443 - RNA, 19 nt, Homo sapiens
  misc_RNA (1)...(19): siRNA sense strand
ggaaacagauggcaaauau

SEQ ID NO: 713444 - RNA, 19 nt, Homo sapiens
  misc_RNA (1)...(19): siRNA sense strand
caaggaagcuguugaugaa

SEQ ID NO: 713445 - RNA, 19 nt, Homo sapiens
  misc_RNA (1)...(19): siRNA sense strand
caaagaagaugcuaaagag

SEQ ID NO: 713446 - RNA, 19 nt, Homo sapiens
  misc_RNA (1)...(19): siRNA sense strand
ggaagagugugacuacuug

SEQ ID NO: 713447 - RNA, 19 nt, Homo sapiens
  misc_RNA (1)...(19): siRNA sense strand
gaacagcuaaucgauaaua

SEQ ID NO: 713448 - RNA, 19 nt, Homo sapiens
  misc_RNA (1)...(19): siRNA sense strand
uaaaagaccugcugcauuu

SEQ ID NO: 713449 - RNA, 19 nt, Homo sapiens
  misc_RNA (1)...(19): siRNA sense strand
ggacagggaugacuucaag

SEQ ID NO: 713450 - RNA, 19 nt, Homo sapiens
  misc_RNA (1)...(19): siRNA sense strand
ucaagaauuuggagucuaa

SEQ ID NO: 713451 - RNA, 19 nt, Homo sapiens
  misc_RNA (1)...(19): siRNA sense strand
gaagggcuauugugcgauu

SEQ ID NO: 713452 - RNA, 19 nt, Homo sapiens
  misc_RNA (1)...(19): siRNA sense strand
gcuaaucgauaauauggaa

SEQ ID NO: 713453 - RNA, 19 nt, Homo sapiens
  misc_RNA (1)...(19): siRNA sense strand
gcaaauauccagcacuuuc

SEQ ID NO: 713454 - RNA, 19 nt, Homo sapiens
  misc_RNA (1)...(19): siRNA sense strand
cugaacagcuaaucgauaa

SEQ ID NO: 713455 - RNA, 19 nt, Homo sapiens
  misc_RNA (1)...(19): siRNA sense strand
agaauacucugaacagcua

SEQ ID NO: 713456 - RNA, 19 nt, Homo sapiens
  misc_RNA (1)...(19): siRNA sense strand
caccagcgaugacagguuu

SEQ ID NO: 713457 - RNA, 19 nt, Homo sapiens
  misc_RNA (1)...(19): siRNA sense strand
gugagaggauggaaaauua

SEQ ID NO: 713458 - RNA, 19 nt, Homo sapiens
  misc_RNA (1)...(19): siRNA sense strand
ucgauaauauggaagcuuu

SEQ ID NO: 713459 - RNA, 19 nt, Homo sapiens
  misc_RNA (1)...(19): siRNA sense strand
gaagagagaagugcagaug

SEQ ID NO: 713460 - RNA, 19 nt, Homo sapiens
  misc_RNA (1)...(19): siRNA sense strand
ggaagcuguugaugaaugu

SEQ ID NO: 713461 - RNA, 19 nt, Homo sapiens
  misc_RNA (1)...(19): siRNA sense strand
ucaaagaagaugcuaaaga

SEQ ID NO: 713462 - RNA, 19 nt, Homo sapiens
  misc_RNA (1)...(19): siRNA sense strand
gagaagugcagaugucgaa

SEQ ID NO: 713463 - RNA, 19 nt, Homo sapiens
  misc_RNA (1)...(19): siRNA sense strand
gagaagaagcaacuuguag

SEQ ID NO: 713464 - RNA, 19 nt, Homo sapiens
  misc_RNA (1)...(19): siRNA sense strand
uaucuacagccuucacuua

SEQ ID NO: 713465 - RNA, 19 nt, Homo sapiens
  misc_RNA (1)...(19): siRNA sense strand
gaaacuggcuccccaucaa

SEQ ID NO: 713466 - RNA, 19 nt, Homo sapiens
  misc_RNA (1)...(19): siRNA sense strand
gaagauccuuucaaaacaa

SEQ ID NO: 713467 - RNA, 19 nt, Homo sapiens
  misc_RNA (1)...(19): siRNA sense strand
gaugaauuauaccagaaga

SEQ ID NO: 713468 - RNA, 19 nt, Homo sapiens
  misc_RNA (1)...(19): siRNA sense strand
ggacaaggaagcuguugau

SEQ ID NO: 713469 - RNA, 19 nt, Homo sapiens
  misc_RNA (1)...(19): siRNA sense strand
ggcaggaaguccaggagaa

SEQ ID NO: 713470 - RNA, 19 nt, Homo sapiens
  misc_RNA (1)...(19): siRNA sense strand
acaggaagcugaacagaac

SEQ ID NO: 713471 - RNA, 19 nt, Homo sapiens
  misc_RNA (1)...(19): siRNA sense strand
gcagguggcgcucaugaga

SEQ ID NO: 713472 - RNA, 19 nt, Homo sapiens
  misc_RNA (1)...(19): siRNA sense strand
ggaaaagcauaugauguuu

SEQ ID NO: 713473 - RNA, 19 nt, Homo sapiens
  misc_RNA (1)...(19): siRNA sense strand
cagcaaaucggaaggauca

SEQ ID NO: 713474 - RNA, 19 nt, Homo sapiens
  misc_RNA (1)...(19): siRNA sense strand
accagaagauccuuucaaa

SEQ ID NO: 713475 - RNA, 19 nt, Homo sapiens
  misc_RNA (1)...(19): siRNA sense strand
acaaggaagcuguugauga

SEQ ID NO: 713476 - RNA, 19 nt, Homo sapiens
  misc_RNA (1)...(19): siRNA sense strand
gcacgcgacaccagaaaga

SEQ ID NO: 713477 - RNA, 19 nt, Homo sapiens
  misc_RNA (1)...(19): siRNA sense strand
guucguggaugcccuguuc

SEQ ID NO: 713478 - RNA, 19 nt, Homo sapiens
  misc_RNA (1)...(19): siRNA sense strand
uggcaaauauccagcacuu

SEQ ID NO: 713479 - RNA, 19 nt, Homo sapiens
  misc_RNA (1)...(19): siRNA sense strand
ucuacagccuucacuuaaa

SEQ ID NO: 713480 - RNA, 19 nt, Homo sapiens
  misc_RNA (1)...(19): siRNA sense strand
gcaggcguauuaccagcaa

SEQ ID NO: 713481 - RNA, 19 nt, Homo sapiens
  misc_RNA (1)...(19): siRNA sense strand
ggaagaggagaaugucaga

SEQ ID NO: 713482 - RNA, 19 nt, Homo sapiens
  misc_RNA (1)...(19): siRNA sense strand
ccagaaagacgacacucaa

SEQ ID NO: 713483 - RNA, 19 nt, Homo sapiens
  misc_RNA (1)...(19): siRNA sense strand
gccaggagcuguacuucag

SEQ ID NO: 713484 - RNA, 19 nt, Homo sapiens
  misc_RNA (1)...(19): siRNA sense strand
aaagaagucagaugaugaa

SEQ ID NO: 713485 - RNA, 19 nt, Homo sapiens
  misc_RNA (1)...(19): siRNA sense strand
ggugaacgccuucccugaa

SEQ ID NO: 713486 - RNA, 19 nt, Homo sapiens
  misc_RNA (1)...(19): siRNA sense strand
aagaagaugcuaaagagaa

SEQ ID NO: 713487 - RNA, 19 nt, Homo sapiens
  misc_RNA (1)...(19): siRNA sense strand
agugggaacucaaagaaga

SEQ ID NO: 713488 - RNA, 19 nt, Homo sapiens
  misc_RNA (1)...(19): siRNA sense strand
acagcaauaucacagcauu

SEQ ID NO: 713489 - RNA, 19 nt, Homo sapiens
  misc_RNA (1)...(19): siRNA sense strand
ucagcaccguggacacuuu

SEQ ID NO: 713490 - RNA, 19 nt, Homo sapiens
  misc_RNA (1)...(19): siRNA sense strand
cacccuggcugauguggaa

SEQ ID NO: 713491 - RNA, 19 nt, Homo sapiens
  misc_RNA (1)...(19): siRNA sense strand
ggacuucaggucaaacugu

SEQ ID NO: 713492 - RNA, 19 nt, Homo sapiens
  misc_RNA (1)...(19): siRNA sense strand
gcgagaguguagacguuga

SEQ ID NO: 713493 - RNA, 19 nt, Homo sapiens
  misc_RNA (1)...(19): siRNA sense strand
aaagggacuucaggucaaa

SEQ ID NO: 713494 - RNA, 19 nt, Homo sapiens
  misc_RNA (1)...(19): siRNA sense strand
gcacauggcaaaagugauu

SEQ ID NO: 713495 - RNA, 19 nt, Homo sapiens
  misc_RNA (1)...(19): siRNA sense strand
ucacagcauucgcccugaa

SEQ ID NO: 713496 - RNA, 19 nt, Homo sapiens
  misc_RNA (1)...(19): siRNA sense strand
agagagaagugcagauguc

SEQ ID NO: 713497 - RNA, 19 nt, Homo sapiens
  misc_RNA (1)...(19): siRNA sense strand
caacccgucucugcaugaa

SEQ ID NO: 713498 - RNA, 19 nt, Homo sapiens
  misc_RNA (1)...(19): siRNA sense strand
gaacucaaagaagaugcua

SEQ ID NO: 713499 - RNA, 19 nt, Homo sapiens
  misc_RNA (1)...(19): siRNA sense strand
cagaaagacgacacucaaa

SEQ ID NO: 713500 - RNA, 19 nt, Homo sapiens
  misc_RNA (1)...(19): siRNA sense strand
gcucaagaauuuggagucu

SEQ ID NO: 713501 - RNA, 19 nt, Homo sapiens
  misc_RNA (1)...(19): siRNA sense strand
caaaaucugcucaagaauu

SEQ ID NO: 713502 - RNA, 19 nt, Homo sapiens
  misc_RNA (1)...(19): siRNA sense strand
gaaggacaaggaagcuguu

SEQ ID NO: 713503 - RNA, 19 nt, Homo sapiens
  misc_RNA (1)...(19): siRNA sense strand
agaagaugcuaaagagaag

SEQ ID NO: 713504 - RNA, 19 nt, Homo sapiens
  misc_RNA (1)...(19): siRNA sense strand
ggaggaagcacagcagaca

SEQ ID NO: 713505 - RNA, 19 nt, Homo sapiens
  misc_RNA (1)...(19): siRNA sense strand
gaaagacgacacucaaaau

SEQ ID NO: 713506 - RNA, 19 nt, Homo sapiens
  misc_RNA (1)...(19): siRNA sense strand
aggaagcuguugaugaaug

SEQ ID NO: 713507 - RNA, 19 nt, Homo sapiens
  misc_RNA (1)...(19): siRNA sense strand
aaagagaagaagcaacuug

SEQ ID NO: 713508 - RNA, 19 nt, Homo sapiens
  misc_RNA (1)...(19): siRNA sense strand
caaggaggaggaagagaga

SEQ ID NO: 713509 - RNA, 19 nt, Homo sapiens
  misc_RNA (1)...(19): siRNA sense strand
gcagcaggcaggagucaug

SEQ ID NO: 713510 - RNA, 19 nt, Homo sapiens
  misc_RNA (1)...(19): siRNA sense strand
gcaaaucggaaggaucaug

SEQ ID NO: 713511 - RNA, 19 nt, Homo sapiens
  misc_RNA (1)...(19): siRNA sense strand
ggaaugcagccaccaagag

SEQ ID NO: 713512 - RNA, 19 nt, Homo sapiens
  misc_RNA (1)...(19): siRNA sense strand
agugugaccuggaggaaga

SEQ ID NO: 713513 - RNA, 19 nt, Homo sapiens
  misc_RNA (1)...(19): siRNA sense strand
ccaagaggaggaacagaga

SEQ ID NO: 713514 - RNA, 19 nt, Homo sapiens
  misc_RNA (1)...(19): siRNA sense strand
cagcugaugaugacucuga

SEQ ID NO: 713515 - RNA, 19 nt, Homo sapiens
  misc_RNA (1)...(19): siRNA sense strand
uccuugaccuucuuccuaa

SEQ ID NO: 713516 - RNA, 19 nt, Homo sapiens
  misc_RNA (1)...(19): siRNA sense strand
gauggaaaauuacaaacug

SEQ ID NO: 713517 - RNA, 19 nt, Homo sapiens
  misc_RNA (1)...(19): siRNA sense strand
caaaagugauugaguuucu

SEQ ID NO: 713518 - RNA, 19 nt, Homo sapiens
  misc_RNA (1)...(19): siRNA sense strand
gucagaugaugaauuauac

SEQ ID NO: 713519 - RNA, 19 nt, Homo sapiens
  misc_RNA (1)...(19): siRNA sense strand
ugagucagcaagaaaguga

SEQ ID NO: 713520 - RNA, 19 nt, Homo sapiens
  misc_RNA (1)...(19): siRNA sense strand
gaacucagcaacccuucgu

SEQ ID NO: 713521 - RNA, 19 nt, Homo sapiens
  misc_RNA (1)...(19): siRNA sense strand
gaagagugugacuacuuga

SEQ ID NO: 713522 - RNA, 19 nt, Homo sapiens
  misc_RNA (1)...(19): siRNA sense strand
cuacagccuucacuuaaaa

SEQ ID NO: 713523 - RNA, 19 nt, Homo sapiens
  misc_RNA (1)...(19): siRNA sense strand
acucaaagaagaugcuaaa

SEQ ID NO: 713524 - RNA, 19 nt, Homo sapiens
  misc_RNA (1)...(19): siRNA sense strand
cagcuaaucgauaauaugg

SEQ ID NO: 713525 - RNA, 19 nt, Homo sapiens
  misc_RNA (1)...(19): siRNA sense strand
gaaaagaaggagagagaau

SEQ ID NO: 713526 - RNA, 19 nt, Homo sapiens
  misc_RNA (1)...(19): siRNA sense strand
agagaagaagcaacuugua

SEQ ID NO: 713527 - RNA, 19 nt, Homo sapiens
  misc_RNA (1)...(19): siRNA sense strand
gagaagccccuaaggacua

SEQ ID NO: 713528 - RNA, 19 nt, Homo sapiens
  misc_RNA (1)...(19): siRNA sense strand
ugaugacucugacggaaag

SEQ ID NO: 713529 - RNA, 19 nt, Homo sapiens
  misc_RNA (1)...(19): siRNA sense strand
gaaacagauggcaaauauc

SEQ ID NO: 713530 - RNA, 19 nt, Homo sapiens
  misc_RNA (1)...(19): siRNA sense strand
cuaaagagaagaagcaacu

SEQ ID NO: 713531 - RNA, 19 nt, Homo sapiens
  misc_RNA (1)...(19): siRNA sense strand
gaugcccuguuccuucaga

SEQ ID NO: 713532 - RNA, 19 nt, Homo sapiens
  misc_RNA (1)...(19): siRNA sense strand
uggaugcccuguuccuuca

SEQ ID NO: 713533 - RNA, 19 nt, Homo sapiens
  misc_RNA (1)...(19): siRNA sense strand
agaagucagaugaugaauu

SEQ ID NO: 713534 - RNA, 19 nt, Homo sapiens
  misc_RNA (1)...(19): siRNA sense strand
ggucaaacugucaaacaca

SEQ ID NO: 713535 - RNA, 19 nt, Homo sapiens
  misc_RNA (1)...(19): siRNA sense strand
gacguugaccuguguaucu

SEQ ID NO: 713536 - RNA, 19 nt, Homo sapiens
  misc_RNA (1)...(19): siRNA sense strand
gacagugggaacucaaaga

SEQ ID NO: 713537 - RNA, 19 nt, Homo sapiens
  misc_RNA (1)...(19): siRNA sense strand
ggagacccagcuacaggaa

SEQ ID NO: 713538 - RNA, 19 nt, Homo sapiens
  misc_RNA (1)...(19): siRNA sense strand
ccaaggacagggaugacuu

SEQ ID NO: 713539 - RNA, 19 nt, Homo sapiens
  misc_RNA (1)...(19): siRNA sense strand
aaacagauggcaaauaucc

SEQ ID NO: 713540 - RNA, 19 nt, Homo sapiens
  misc_RNA (1)...(19): siRNA sense strand
ucugaacagcuaaucgaua

SEQ ID NO: 713541 - RNA, 19 nt, Homo sapiens
  misc_RNA (1)...(19): siRNA sense strand
cucaaaaucugcucaagaa

SEQ ID NO: 713542 - RNA, 19 nt, Homo sapiens
  misc_RNA (1)...(19): siRNA sense strand
gaagucagaugaugaauua

SEQ ID NO: 713543 - RNA, 19 nt, Homo sapiens
  misc_RNA (1)...(19): siRNA sense strand
ggaaacagauggcaaauau

SEQ ID NO: 713544 - RNA, 19 nt, Homo sapiens
  misc_RNA (1)...(19): siRNA sense strand
caaggaagcuguugaugaa

SEQ ID NO: 713545 - RNA, 19 nt, Homo sapiens
  misc_RNA (1)...(19): siRNA sense strand
caaagaagaugcuaaagag

SEQ ID NO: 713546 - RNA, 19 nt, Homo sapiens
  misc_RNA (1)...(19): siRNA sense strand
ggaagagugugacuacuug

SEQ ID NO: 713547 - RNA, 19 nt, Homo sapiens
  misc_RNA (1)...(19): siRNA sense strand
gaacagcuaaucgauaaua

SEQ ID NO: 713548 - RNA, 19 nt, Homo sapiens
  misc_RNA (1)...(19): siRNA sense strand
uaaaagaccugcugcauuu

SEQ ID NO: 713549 - RNA, 19 nt, Homo sapiens
  misc_RNA (1)...(19): siRNA sense strand
ggacagggaugacuucaag

SEQ ID NO: 713550 - RNA, 19 nt, Homo sapiens
  misc_RNA (1)...(19): siRNA sense strand
ucaagaauuuggagucuaa

SEQ ID NO: 713551 - RNA, 19 nt, Homo sapiens
  misc_RNA (1)...(19): siRNA sense strand
gaagggcuauugugcgauu

SEQ ID NO: 713552 - RNA, 19 nt, Homo sapiens
  misc_RNA (1)...(19): siRNA sense strand
gcuaaucgauaauauggaa

SEQ ID NO: 713553 - RNA, 19 nt, Homo sapiens
  misc_RNA (1)...(19): siRNA sense strand
gcaaauauccagcacuuuc

SEQ ID NO: 713554 - RNA, 19 nt, Homo sapiens
  misc_RNA (1)...(19): siRNA sense strand
cugaacagcuaaucgauaa

SEQ ID NO: 713555 - RNA, 19 nt, Homo sapiens
  misc_RNA (1)...(19): siRNA sense strand
agaauacucugaacagcua

SEQ ID NO: 713556 - RNA, 19 nt, Homo sapiens
  misc_RNA (1)...(19): siRNA sense strand
caccagcgaugacagguuu

SEQ ID NO: 713557 - RNA, 19 nt, Homo sapiens
  misc_RNA (1)...(19): siRNA sense strand
gugagaggauggaaaauua

SEQ ID NO: 713558 - RNA, 19 nt, Homo sapiens
  misc_RNA (1)...(19): siRNA sense strand
ucgauaauauggaagcuuu

SEQ ID NO: 713559 - RNA, 19 nt, Homo sapiens
  misc_RNA (1)...(19): siRNA sense strand
gaagagagaagugcagaug

SEQ ID NO: 713560 - RNA, 19 nt, Homo sapiens
  misc_RNA (1)...(19): siRNA sense strand
ggaagcuguugaugaaugu

SEQ ID NO: 713561 - RNA, 19 nt, Homo sapiens
  misc_RNA (1)...(19): siRNA sense strand
ucaaagaagaugcuaaaga

SEQ ID NO: 713562 - RNA, 19 nt, Homo sapiens
  misc_RNA (1)...(19): siRNA sense strand
gagaagugcagaugucgaa

SEQ ID NO: 713563 - RNA, 19 nt, Homo sapiens
  misc_RNA (1)...(19): siRNA sense strand
gagaagaagcaacuuguag

SEQ ID NO: 713564 - RNA, 19 nt, Homo sapiens
  misc_RNA (1)...(19): siRNA sense strand
uaucuacagccuucacuua

SEQ ID NO: 713565 - RNA, 19 nt, Homo sapiens
  misc_RNA (1)...(19): siRNA sense strand
gaaacuggcuccccaucaa

SEQ ID NO: 713566 - RNA, 19 nt, Homo sapiens
  misc_RNA (1)...(19): siRNA sense strand
gaagauccuuucaaaacaa

SEQ ID NO: 713567 - RNA, 19 nt, Homo sapiens
  misc_RNA (1)...(19): siRNA sense strand
gaugaauuauaccagaaga

SEQ ID NO: 713568 - RNA, 19 nt, Homo sapiens
  misc_RNA (1)...(19): siRNA sense strand
ggacaaggaagcuguugau

SEQ ID NO: 713569 - RNA, 19 nt, Homo sapiens
  misc_RNA (1)...(19): siRNA sense strand
ggcaggaaguccaggagaa

SEQ ID NO: 713570 - RNA, 19 nt, Homo sapiens
  misc_RNA (1)...(19): siRNA sense strand
acaggaagcugaacagaac

SEQ ID NO: 713571 - RNA, 19 nt, Homo sapiens
  misc_RNA (1)...(19): siRNA sense strand
gcagguggcgcucaugaga

SEQ ID NO: 713572 - RNA, 19 nt, Homo sapiens
  misc_RNA (1)...(19): siRNA sense strand
ggaaaagcauaugauguuu

SEQ ID NO: 713573 - RNA, 19 nt, Homo sapiens
  misc_RNA (1)...(19): siRNA sense strand
cagcaaaucggaaggauca

SEQ ID NO: 713574 - RNA, 19 nt, Homo sapiens
  misc_RNA (1)...(19): siRNA sense strand
accagaagauccuuucaaa

SEQ ID NO: 713575 - RNA, 19 nt, Homo sapiens
  misc_RNA (1)...(19): siRNA sense strand
acaaggaagcuguugauga

SEQ ID NO: 713576 - RNA, 19 nt, Homo sapiens
  misc_RNA (1)...(19): siRNA sense strand
gcacgcgacaccagaaaga

SEQ ID NO: 713577 - RNA, 19 nt, Homo sapiens
  misc_RNA (1)...(19): siRNA sense strand
guucguggaugcccuguuc

SEQ ID NO: 713578 - RNA, 19 nt, Homo sapiens
  misc_RNA (1)...(19): siRNA sense strand
uggcaaauauccagcacuu

SEQ ID NO: 713579 - RNA, 19 nt, Homo sapiens
  misc_RNA (1)...(19): siRNA sense strand
ucuacagccuucacuuaaa

SEQ ID NO: 713580 - RNA, 19 nt, Homo sapiens
  misc_RNA (1)...(19): siRNA sense strand
gcaggcguauuaccagcaa

SEQ ID NO: 713581 - RNA, 19 nt, Homo sapiens
  misc_RNA (1)...(19): siRNA sense strand
ggaagaggagaaugucaga

SEQ ID NO: 713582 - RNA, 19 nt, Homo sapiens
  misc_RNA (1)...(19): siRNA sense strand
ccagaaagacgacacucaa

SEQ ID NO: 713583 - RNA, 19 nt, Homo sapiens
  misc_RNA (1)...(19): siRNA sense strand
gccaggagcuguacuucag

SEQ ID NO: 713584 - RNA, 19 nt, Homo sapiens
  misc_RNA (1)...(19): siRNA sense strand
aaagaagucagaugaugaa

SEQ ID NO: 713585 - RNA, 19 nt, Homo sapiens
  misc_RNA (1)...(19): siRNA sense strand
ggugaacgccuucccugaa

SEQ ID NO: 713586 - RNA, 19 nt, Homo sapiens
  misc_RNA (1)...(19): siRNA sense strand
aagaagaugcuaaagagaa

SEQ ID NO: 713587 - RNA, 19 nt, Homo sapiens
  misc_RNA (1)...(19): siRNA sense strand
agugggaacucaaagaaga

SEQ ID NO: 713588 - RNA, 19 nt, Homo sapiens
  misc_RNA (1)...(19): siRNA sense strand
acagcaauaucacagcauu

SEQ ID NO: 713589 - RNA, 19 nt, Homo sapiens
  misc_RNA (1)...(19): siRNA sense strand
ucagcaccguggacacuuu

SEQ ID NO: 713590 - RNA, 19 nt, Homo sapiens
  misc_RNA (1)...(19): siRNA sense strand
cacccuggcugauguggaa

SEQ ID NO: 713591 - RNA, 19 nt, Homo sapiens
  misc_RNA (1)...(19): siRNA sense strand
ggacuucaggucaaacugu

SEQ ID NO: 713592 - RNA, 19 nt, Homo sapiens
  misc_RNA (1)...(19): siRNA sense strand
gcgagaguguagacguuga

SEQ ID NO: 713593 - RNA, 19 nt, Homo sapiens
  misc_RNA (1)...(19): siRNA sense strand
aaagggacuucaggucaaa

SEQ ID NO: 713594 - RNA, 19 nt, Homo sapiens
  misc_RNA (1)...(19): siRNA sense strand
gcacauggcaaaagugauu

SEQ ID NO: 713595 - RNA, 19 nt, Homo sapiens
  misc_RNA (1)...(19): siRNA sense strand
ucacagcauucgcccugaa

SEQ ID NO: 713596 - RNA, 19 nt, Homo sapiens
  misc_RNA (1)...(19): siRNA sense strand
agagagaagugcagauguc

SEQ ID NO: 713597 - RNA, 19 nt, Homo sapiens
  misc_RNA (1)...(19): siRNA sense strand
caacccgucucugcaugaa

SEQ ID NO: 713598 - RNA, 19 nt, Homo sapiens
  misc_RNA (1)...(19): siRNA sense strand
gaacucaaagaagaugcua

SEQ ID NO: 713599 - RNA, 19 nt, Homo sapiens
  misc_RNA (1)...(19): siRNA sense strand
cagaaagacgacacucaaa

SEQ ID NO: 713600 - RNA, 19 nt, Homo sapiens
  misc_RNA (1)...(19): siRNA sense strand
gcucaagaauuuggagucu

SEQ ID NO: 713601 - RNA, 19 nt, Homo sapiens
  misc_RNA (1)...(19): siRNA sense strand
caaaaucugcucaagaauu

SEQ ID NO: 713602 - RNA, 19 nt, Homo sapiens
  misc_RNA (1)...(19): siRNA sense strand
gaaggacaaggaagcuguu

SEQ ID NO: 713603 - RNA, 19 nt, Homo sapiens
  misc_RNA (1)...(19): siRNA sense strand
agaagaugcuaaagagaag

SEQ ID NO: 713604 - RNA, 19 nt, Homo sapiens
  misc_RNA (1)...(19): siRNA sense strand
ggaggaagcacagcagaca

SEQ ID NO: 713605 - RNA, 19 nt, Homo sapiens
  misc_RNA (1)...(19): siRNA sense strand
gaaagacgacacucaaaau

SEQ ID NO: 713606 - RNA, 19 nt, Homo sapiens
  misc_RNA (1)...(19): siRNA sense strand
aggaagcuguugaugaaug

SEQ ID NO: 713607 - RNA, 19 nt, Homo sapiens
  misc_RNA (1)...(19): siRNA sense strand
aaagagaagaagcaacuug

SEQ ID NO: 713608 - RNA, 19 nt, Homo sapiens
  misc_RNA (1)...(19): siRNA sense strand
caaggaggaggaagagaga

SEQ ID NO: 713609 - RNA, 19 nt, Homo sapiens
  misc_RNA (1)...(19): siRNA sense strand
gcagcaggcaggagucaug

SEQ ID NO: 713610 - RNA, 19 nt, Homo sapiens
  misc_RNA (1)...(19): siRNA sense strand
gcaaaucggaaggaucaug

SEQ ID NO: 713611 - RNA, 19 nt, Homo sapiens
  misc_RNA (1)...(19): siRNA sense strand
ggaaugcagccaccaagag

SEQ ID NO: 713612 - RNA, 19 nt, Homo sapiens
  misc_RNA (1)...(19): siRNA sense strand
agugugaccuggaggaaga

SEQ ID NO: 713613 - RNA, 19 nt, Homo sapiens
  misc_RNA (1)...(19): siRNA sense strand
ccaagaggaggaacagaga

SEQ ID NO: 713614 - RNA, 19 nt, Homo sapiens
  misc_RNA (1)...(19): siRNA sense strand
cagcugaugaugacucuga

SEQ ID NO: 713615 - RNA, 19 nt, Homo sapiens
  misc_RNA (1)...(19): siRNA sense strand
uccuugaccuucuuccuaa

SEQ ID NO: 713616 - RNA, 19 nt, Homo sapiens
  misc_RNA (1)...(19): siRNA sense strand
gauggaaaauuacaaacug

SEQ ID NO: 713617 - RNA, 19 nt, Homo sapiens
  misc_RNA (1)...(19): siRNA sense strand
caaaagugauugaguuucu

SEQ ID NO: 713618 - RNA, 19 nt, Homo sapiens
  misc_RNA (1)...(19): siRNA sense strand
gucagaugaugaauuauac

SEQ ID NO: 713619 - RNA, 19 nt, Homo sapiens
  misc_RNA (1)...(19): siRNA sense strand
ugagucagcaagaaaguga

SEQ ID NO: 713620 - RNA, 19 nt, Homo sapiens
  misc_RNA (1)...(19): siRNA sense strand
gaacucagcaacccuucgu

SEQ ID NO: 713621 - RNA, 19 nt, Homo sapiens
  misc_RNA (1)...(19): siRNA sense strand
gaagagugugacuacuuga

SEQ ID NO: 713622 - RNA, 19 nt, Homo sapiens
  misc_RNA (1)...(19): siRNA sense strand
cuacagccuucacuuaaaa

SEQ ID NO: 713623 - RNA, 19 nt, Homo sapiens
  misc_RNA (1)...(19): siRNA sense strand
acucaaagaagaugcuaaa

SEQ ID NO: 713624 - RNA, 19 nt, Homo sapiens
  misc_RNA (1)...(19): siRNA sense strand
cagcuaaucgauaauaugg

SEQ ID NO: 713625 - RNA, 19 nt, Homo sapiens
  misc_RNA (1)...(19): siRNA sense strand
gaaaagaaggagagagaau

SEQ ID NO: 713626 - RNA, 19 nt, Homo sapiens
  misc_RNA (1)...(19): siRNA sense strand
agagaagaagcaacuugua

SEQ ID NO: 713627 - RNA, 19 nt, Homo sapiens
  misc_RNA (1)...(19): siRNA sense strand
gagaagccccuaaggacua

SEQ ID NO: 713628 - RNA, 19 nt, Homo sapiens
  misc_RNA (1)...(19): siRNA sense strand
ugaugacucugacggaaag

SEQ ID NO: 713629 - RNA, 19 nt, Homo sapiens
  misc_RNA (1)...(19): siRNA sense strand
gaaacagauggcaaauauc

SEQ ID NO: 713630 - RNA, 19 nt, Homo sapiens
  misc_RNA (1)...(19): siRNA sense strand
cuaaagagaagaagcaacu

SEQ ID NO: 713631 - RNA, 19 nt, Homo sapiens
  misc_RNA (1)...(19): siRNA sense strand
gaugcccuguuccuucaga

SEQ ID NO: 713632 - RNA, 19 nt, Homo sapiens
  misc_RNA (1)...(19): siRNA sense strand
uggaugcccuguuccuuca

SEQ ID NO: 713633 - RNA, 19 nt, Homo sapiens
  misc_RNA (1)...(19): siRNA sense strand
agaagucagaugaugaauu

SEQ ID NO: 713634 - RNA, 19 nt, Homo sapiens
  misc_RNA (1)...(19): siRNA sense strand
ggucaaacugucaaacaca

SEQ ID NO: 713635 - RNA, 19 nt, Homo sapiens
  misc_RNA (1)...(19): siRNA sense strand
gacguugaccuguguaucu

SEQ ID NO: 713636 - RNA, 19 nt, Homo sapiens
  misc_RNA (1)...(19): siRNA sense strand
gacagugggaacucaaaga

SEQ ID NO: 713637 - RNA, 19 nt, Homo sapiens
  misc_RNA (1)...(19): siRNA sense strand
ggagacccagcuacaggaa

SEQ ID NO: 713638 - RNA, 19 nt, Homo sapiens
  misc_RNA (1)...(19): siRNA sense strand
ccaaggacagggaugacuu

SEQ ID NO: 713639 - RNA, 19 nt, Homo sapiens
  misc_RNA (1)...(19): siRNA sense strand
aaacagauggcaaauaucc

SEQ ID NO: 713640 - RNA, 19 nt, Homo sapiens
  misc_RNA (1)...(19): siRNA sense strand
ucugaacagcuaaucgaua

SEQ ID NO: 713641 - RNA, 19 nt, Homo sapiens
  misc_RNA (1)...(19): siRNA sense strand
cucaaaaucugcucaagaa

SEQ ID NO: 713642 - RNA, 19 nt, Homo sapiens
  misc_RNA (1)...(19): siRNA sense strand
gaaacuggaucuugauauu

SEQ ID NO: 713643 - RNA, 19 nt, Homo sapiens
  misc_RNA (1)...(19): siRNA sense strand
gaacaaggcgaauuauauu

SEQ ID NO: 713644 - RNA, 19 nt, Homo sapiens
  misc_RNA (1)...(19): siRNA sense strand
aaacagagcaggagaauga

SEQ ID NO: 713645 - RNA, 19 nt, Homo sapiens
  misc_RNA (1)...(19): siRNA sense strand
uauaaagccuugaagauga

SEQ ID NO: 713646 - RNA, 19 nt, Homo sapiens
  misc_RNA (1)...(19): siRNA sense strand
agagagagcuucaggaugu

SEQ ID NO: 713647 - RNA, 19 nt, Homo sapiens
  misc_RNA (1)...(19): siRNA sense strand
uaaguggaauucgucauua

SEQ ID NO: 713648 - RNA, 19 nt, Homo sapiens
  misc_RNA (1)...(19): siRNA sense strand
gaagagaaagcuuauaaag

SEQ ID NO: 713649 - RNA, 19 nt, Homo sapiens
  misc_RNA (1)...(19): siRNA sense strand
gaagccaaaugccggaauu

SEQ ID NO: 713650 - RNA, 19 nt, Homo sapiens
  misc_RNA (1)...(19): siRNA sense strand
ugaaagaagagaaagcuua

SEQ ID NO: 713651 - RNA, 19 nt, Homo sapiens
  misc_RNA (1)...(19): siRNA sense strand
gaaagaagagaaagcuuau

SEQ ID NO: 713652 - RNA, 19 nt, Homo sapiens
  misc_RNA (1)...(19): siRNA sense strand
ggucagaagguuuagguua

SEQ ID NO: 713653 - RNA, 19 nt, Homo sapiens
  misc_RNA (1)...(19): siRNA sense strand
gcaggagaaugaagccaaa

SEQ ID NO: 713654 - RNA, 19 nt, Homo sapiens
  misc_RNA (1)...(19): siRNA sense strand
caaggcgaauuauauuuga

SEQ ID NO: 713655 - RNA, 19 nt, Homo sapiens
  misc_RNA (1)...(19): siRNA sense strand
caacaagauuacugauuuc

SEQ ID NO: 713656 - RNA, 19 nt, Homo sapiens
  misc_RNA (1)...(19): siRNA sense strand
cagggaaacuggaucuuga

SEQ ID NO: 713657 - RNA, 19 nt, Homo sapiens
  misc_RNA (1)...(19): siRNA sense strand
gauuacugauuucccauuu

SEQ ID NO: 713658 - RNA, 19 nt, Homo sapiens
  misc_RNA (1)...(19): siRNA sense strand
ccaaaugccggaauucaaa

SEQ ID NO: 713659 - RNA, 19 nt, Homo sapiens
  misc_RNA (1)...(19): siRNA sense strand
ugaacaaggcgaauuauau

SEQ ID NO: 713660 - RNA, 19 nt, Homo sapiens
  misc_RNA (1)...(19): siRNA sense strand
ugaagaugaugaaagagaa

SEQ ID NO: 713661 - RNA, 19 nt, Homo sapiens
  misc_RNA (1)...(19): siRNA sense strand
gaaaauauuccaugacuug

SEQ ID NO: 713662 - RNA, 19 nt, Homo sapiens
  misc_RNA (1)...(19): siRNA sense strand
ucaauugaaucccuaagau

SEQ ID NO: 713663 - RNA, 19 nt, Homo sapiens
  misc_RNA (1)...(19): siRNA sense strand
gucagaagguuuagguuau

SEQ ID NO: 713664 - RNA, 19 nt, Homo sapiens
  misc_RNA (1)...(19): siRNA sense strand
ccuugaagaugaugaaaga

SEQ ID NO: 713665 - RNA, 19 nt, Homo sapiens
  misc_RNA (1)...(19): siRNA sense strand
gauauuccaguacaacauu

SEQ ID NO: 713666 - RNA, 19 nt, Homo sapiens
  misc_RNA (1)...(19): siRNA sense strand
gagagagcuucaggaugua

SEQ ID NO: 713667 - RNA, 19 nt, Homo sapiens
  misc_RNA (1)...(19): siRNA sense strand
gcuucaggauguaaauauu

SEQ ID NO: 713668 - RNA, 19 nt, Homo sapiens
  misc_RNA (1)...(19): siRNA sense strand
caugguugcucuugccaaa

SEQ ID NO: 713669 - RNA, 19 nt, Homo sapiens
  misc_RNA (1)...(19): siRNA sense strand
ugacgacugugcaggaaga

SEQ ID NO: 713670 - RNA, 19 nt, Homo sapiens
  misc_RNA (1)...(19): siRNA sense strand
ggaucuugauauuccagua

SEQ ID NO: 713671 - RNA, 19 nt, Homo sapiens
  misc_RNA (1)...(19): siRNA sense strand
ggaaacuggaucuugauau

SEQ ID NO: 713672 - RNA, 19 nt, Homo sapiens
  misc_RNA (1)...(19): siRNA sense strand
ugagaaccguguaccaugu

SEQ ID NO: 713673 - RNA, 19 nt, Homo sapiens
  misc_RNA (1)...(19): siRNA sense strand
gagccagugauuuacaaua

SEQ ID NO: 713674 - RNA, 19 nt, Homo sapiens
  misc_RNA (1)...(19): siRNA sense strand
gcagggaaacuggaucuug

SEQ ID NO: 713675 - RNA, 19 nt, Homo sapiens
  misc_RNA (1)...(19): siRNA sense strand
gguuggaguuucuguagau

SEQ ID NO: 713676 - RNA, 19 nt, Homo sapiens
  misc_RNA (1)...(19): siRNA sense strand
gggaaacuggaucuugaua

SEQ ID NO: 713677 - RNA, 19 nt, Homo sapiens
  misc_RNA (1)...(19): siRNA sense strand
gcaaaagucucaccauggu

SEQ ID NO: 713678 - RNA, 19 nt, Homo sapiens
  misc_RNA (1)...(19): siRNA sense strand
gagaaccguguaccaugua

SEQ ID NO: 713679 - RNA, 19 nt, Homo sapiens
  misc_RNA (1)...(19): siRNA sense strand
guagagagagcuucaggau

SEQ ID NO: 713680 - RNA, 19 nt, Homo sapiens
  misc_RNA (1)...(19): siRNA sense strand
gggcauagugguuggaguu

SEQ ID NO: 713681 - RNA, 19 nt, Homo sapiens
  misc_RNA (1)...(19): siRNA sense strand
aaaacgagccagugauuua

SEQ ID NO: 713682 - RNA, 19 nt, Homo sapiens
  misc_RNA (1)...(19): siRNA sense strand
gaagaaaacgagccaguga

SEQ ID NO: 713683 - RNA, 19 nt, Homo sapiens
  misc_RNA (1)...(19): siRNA sense strand
ucagaagguuuagguuaug

SEQ ID NO: 713684 - RNA, 19 nt, Homo sapiens
  misc_RNA (1)...(19): siRNA sense strand
gccagugauuuacaauaga

SEQ ID NO: 713685 - RNA, 19 nt, Homo sapiens
  misc_RNA (1)...(19): siRNA sense strand
aaagguuucugucacaaca

SEQ ID NO: 713686 - RNA, 19 nt, Homo sapiens
  misc_RNA (1)...(19): siRNA sense strand
cagagacaguuaugcgaau

SEQ ID NO: 713687 - RNA, 19 nt, Homo sapiens
  misc_RNA (1)...(19): siRNA sense strand
gagcuucaggauguaaaua

SEQ ID NO: 713688 - RNA, 19 nt, Homo sapiens
  misc_RNA (1)...(19): siRNA sense strand
acaaggcgaauuauauuug

SEQ ID NO: 713689 - RNA, 19 nt, Homo sapiens
  misc_RNA (1)...(19): siRNA sense strand
ugguugcucuugccaaauu

SEQ ID NO: 713690 - RNA, 19 nt, Homo sapiens
  misc_RNA (1)...(19): siRNA sense strand
gaagaugaugaaagagaau

SEQ ID NO: 713691 - RNA, 19 nt, Homo sapiens
  misc_RNA (1)...(19): siRNA sense strand
gcauagugguuggaguuuc

SEQ ID NO: 713692 - RNA, 19 nt, Homo sapiens
  misc_RNA (1)...(19): siRNA sense strand
acaguuaugcgaauugcua

SEQ ID NO: 713693 - RNA, 19 nt, Homo sapiens
  misc_RNA (1)...(19): siRNA sense strand
uggauaugcugacgacugu

SEQ ID NO: 713694 - RNA, 19 nt, Homo sapiens
  misc_RNA (1)...(19): siRNA sense strand
cauagugguuggaguuucu

SEQ ID NO: 713695 - RNA, 19 nt, Homo sapiens
  misc_RNA (1)...(19): siRNA sense strand
gcugacgacugugcaggaa

SEQ ID NO: 713696 - RNA, 19 nt, Homo sapiens
  misc_RNA (1)...(19): siRNA sense strand
ccagugauuuacaauagag

SEQ ID NO: 713697 - RNA, 19 nt, Homo sapiens
  misc_RNA (1)...(19): siRNA sense strand
uuaaguggaauucgucauu

SEQ ID NO: 713698 - RNA, 19 nt, Homo sapiens
  misc_RNA (1)...(19): siRNA sense strand
gaugaaagagaauguugca

SEQ ID NO: 713699 - RNA, 19 nt, Homo sapiens
  misc_RNA (1)...(19): siRNA sense strand
uuauaaagccuugaagaug

SEQ ID NO: 713700 - RNA, 19 nt, Homo sapiens
  misc_RNA (1)...(19): siRNA sense strand
gccaaaugccggaauucaa

SEQ ID NO: 713701 - RNA, 19 nt, Homo sapiens
  misc_RNA (1)...(19): siRNA sense strand
gaaccguguaccauguaaa

SEQ ID NO: 713702 - RNA, 19 nt, Homo sapiens
  misc_RNA (1)...(19): siRNA sense strand
guaaaccagagacaguuau

SEQ ID NO: 713703 - RNA, 19 nt, Homo sapiens
  misc_RNA (1)...(19): siRNA sense strand
uguaaaccagagacaguua

SEQ ID NO: 713704 - RNA, 19 nt, Homo sapiens
  misc_RNA (1)...(19): siRNA sense strand
cacaacaagauuacugauu

SEQ ID NO: 713705 - RNA, 19 nt, Homo sapiens
  misc_RNA (1)...(19): siRNA sense strand
aaaggugaaagaagagaaa

SEQ ID NO: 713706 - RNA, 19 nt, Homo sapiens
  misc_RNA (1)...(19): siRNA sense strand
agagacaguuaugcgaauu

SEQ ID NO: 713707 - RNA, 19 nt, Homo sapiens
  misc_RNA (1)...(19): siRNA sense strand
ggaagcagggaaacuggau

SEQ ID NO: 713708 - RNA, 19 nt, Homo sapiens
  misc_RNA (1)...(19): siRNA sense strand
gaaaacgagccagugauuu

SEQ ID NO: 713709 - RNA, 19 nt, Homo sapiens
  misc_RNA (1)...(19): siRNA sense strand
ggagaaugaagccaaaugc

SEQ ID NO: 713710 - RNA, 19 nt, Homo sapiens
  misc_RNA (1)...(19): siRNA sense strand
agaaccguguaccauguaa

SEQ ID NO: 713711 - RNA, 19 nt, Homo sapiens
  misc_RNA (1)...(19): siRNA sense strand
gagacaguuaugcgaauug

SEQ ID NO: 713712 - RNA, 19 nt, Homo sapiens
  misc_RNA (1)...(19): siRNA sense strand
ccauuuaaguggaauucgu

SEQ ID NO: 713713 - RNA, 19 nt, Homo sapiens
  misc_RNA (1)...(19): siRNA sense strand
uagguuaugcugauguuga

SEQ ID NO: 713714 - RNA, 19 nt, Homo sapiens
  misc_RNA (1)...(19): siRNA sense strand
agccagugauuuacaauag

SEQ ID NO: 713715 - RNA, 19 nt, Homo sapiens
  misc_RNA (1)...(19): siRNA sense strand
guauucaacuuuuggcuau

SEQ ID NO: 713716 - RNA, 19 nt, Homo sapiens
  misc_RNA (1)...(19): siRNA sense strand
gaaggcaaaaguaaugaaa

SEQ ID NO: 713717 - RNA, 19 nt, Homo sapiens
  misc_RNA (1)...(19): siRNA sense strand
auaaagccuugaagaugau

SEQ ID NO: 713718 - RNA, 19 nt, Homo sapiens
  misc_RNA (1)...(19): siRNA sense strand
guucccgaauucccagaaa

SEQ ID NO: 713719 - RNA, 19 nt, Homo sapiens
  misc_RNA (1)...(19): siRNA sense strand
ugcacaggaucaaggauga

SEQ ID NO: 713720 - RNA, 19 nt, Homo sapiens
  misc_RNA (1)...(19): siRNA sense strand
aaguggaauucgucauuau

SEQ ID NO: 713721 - RNA, 19 nt, Homo sapiens
  misc_RNA (1)...(19): siRNA sense strand
uggaguuucuguagaugga

SEQ ID NO: 713722 - RNA, 19 nt, Homo sapiens
  misc_RNA (1)...(19): siRNA sense strand
aaaugauccuuuguucuuc

SEQ ID NO: 713723 - RNA, 19 nt, Homo sapiens
  misc_RNA (1)...(19): siRNA sense strand
gaugaugaaagagaauguu

SEQ ID NO: 713724 - RNA, 19 nt, Homo sapiens
  misc_RNA (1)...(19): siRNA sense strand
cggcucaugucagcaguga

SEQ ID NO: 713725 - RNA, 19 nt, Homo sapiens
  misc_RNA (1)...(19): siRNA sense strand
uugaacaaggcgaauuaua

SEQ ID NO: 713726 - RNA, 19 nt, Homo sapiens
  misc_RNA (1)...(19): siRNA sense strand
aaugauccuuuguucuuca

SEQ ID NO: 713727 - RNA, 19 nt, Homo sapiens
  misc_RNA (1)...(19): siRNA sense strand
gagagcuucaggauguaaa

SEQ ID NO: 713728 - RNA, 19 nt, Homo sapiens
  misc_RNA (1)...(19): siRNA sense strand
aaacuggaucuugauauuc

SEQ ID NO: 713729 - RNA, 19 nt, Homo sapiens
  misc_RNA (1)...(19): siRNA sense strand
cagaaaauauuccaugacu

SEQ ID NO: 713730 - RNA, 19 nt, Homo sapiens
  misc_RNA (1)...(19): siRNA sense strand
uaaaccagagacaguuaug

SEQ ID NO: 713731 - RNA, 19 nt, Homo sapiens
  misc_RNA (1)...(19): siRNA sense strand
cuuauaaagccuugaagau

SEQ ID NO: 713732 - RNA, 19 nt, Homo sapiens
  misc_RNA (1)...(19): siRNA sense strand
cauaguagagagagcuuca

SEQ ID NO: 713733 - RNA, 19 nt, Homo sapiens
  misc_RNA (1)...(19): siRNA sense strand
cauguaaaccagagacagu

SEQ ID NO: 713734 - RNA, 19 nt, Homo sapiens
  misc_RNA (1)...(19): siRNA sense strand
uucaaaaccuggcaagaaa

SEQ ID NO: 713735 - RNA, 19 nt, Homo sapiens
  misc_RNA (1)...(19): siRNA sense strand
gcgaauuauauuugagaga

SEQ ID NO: 713736 - RNA, 19 nt, Homo sapiens
  misc_RNA (1)...(19): siRNA sense strand
guuaugcugauguugagaa

SEQ ID NO: 713737 - RNA, 19 nt, Homo sapiens
  misc_RNA (1)...(19): siRNA sense strand
gaucuugauauuccaguac

SEQ ID NO: 713738 - RNA, 19 nt, Homo sapiens
  misc_RNA (1)...(19): siRNA sense strand
uugaagaugaugaaagaga

SEQ ID NO: 713739 - RNA, 19 nt, Homo sapiens
  misc_RNA (1)...(19): siRNA sense strand
gaaacuggaucuugauauu

SEQ ID NO: 713740 - RNA, 19 nt, Homo sapiens
  misc_RNA (1)...(19): siRNA sense strand
gaacaaggcgaauuauauu

SEQ ID NO: 713741 - RNA, 19 nt, Homo sapiens
  misc_RNA (1)...(19): siRNA sense strand
aaacagagcaggagaauga

SEQ ID NO: 713742 - RNA, 19 nt, Homo sapiens
  misc_RNA (1)...(19): siRNA sense strand
uauaaagccuugaagauga

SEQ ID NO: 713743 - RNA, 19 nt, Homo sapiens
  misc_RNA (1)...(19): siRNA sense strand
agagagagcuucaggaugu

SEQ ID NO: 713744 - RNA, 19 nt, Homo sapiens
  misc_RNA (1)...(19): siRNA sense strand
uaaguggaauucgucauua

SEQ ID NO: 713745 - RNA, 19 nt, Homo sapiens
  misc_RNA (1)...(19): siRNA sense strand
gaagagaaagcuuauaaag

SEQ ID NO: 713746 - RNA, 19 nt, Homo sapiens
  misc_RNA (1)...(19): siRNA sense strand
gaagccaaaugccggaauu

SEQ ID NO: 713747 - RNA, 19 nt, Homo sapiens
  misc_RNA (1)...(19): siRNA sense strand
ugaaagaagagaaagcuua

SEQ ID NO: 713748 - RNA, 19 nt, Homo sapiens
  misc_RNA (1)...(19): siRNA sense strand
gaaagaagagaaagcuuau

SEQ ID NO: 713749 - RNA, 19 nt, Homo sapiens
  misc_RNA (1)...(19): siRNA sense strand
ggucagaagguuuagguua

SEQ ID NO: 713750 - RNA, 19 nt, Homo sapiens
  misc_RNA (1)...(19): siRNA sense strand
gcaggagaaugaagccaaa

SEQ ID NO: 713751 - RNA, 19 nt, Homo sapiens
  misc_RNA (1)...(19): siRNA sense strand
caaggcgaauuauauuuga

SEQ ID NO: 713752 - RNA, 19 nt, Homo sapiens
  misc_RNA (1)...(19): siRNA sense strand
caacaagauuacugauuuc

SEQ ID NO: 713753 - RNA, 19 nt, Homo sapiens
  misc_RNA (1)...(19): siRNA sense strand
cagggaaacuggaucuuga

SEQ ID NO: 713754 - RNA, 19 nt, Homo sapiens
  misc_RNA (1)...(19): siRNA sense strand
gauuacugauuucccauuu

SEQ ID NO: 713755 - RNA, 19 nt, Homo sapiens
  misc_RNA (1)...(19): siRNA sense strand
ccaaaugccggaauucaaa

SEQ ID NO: 713756 - RNA, 19 nt, Homo sapiens
  misc_RNA (1)...(19): siRNA sense strand
ugaacaaggcgaauuauau

SEQ ID NO: 713757 - RNA, 19 nt, Homo sapiens
  misc_RNA (1)...(19): siRNA sense strand
ugaagaugaugaaagagaa

SEQ ID NO: 713758 - RNA, 19 nt, Homo sapiens
  misc_RNA (1)...(19): siRNA sense strand
gaaaauauuccaugacuug

SEQ ID NO: 713759 - RNA, 19 nt, Homo sapiens
  misc_RNA (1)...(19): siRNA sense strand
ucaauugaaucccuaagau

SEQ ID NO: 713760 - RNA, 19 nt, Homo sapiens
  misc_RNA (1)...(19): siRNA sense strand
gucagaagguuuagguuau

SEQ ID NO: 713761 - RNA, 19 nt, Homo sapiens
  misc_RNA (1)...(19): siRNA sense strand
ccuugaagaugaugaaaga

SEQ ID NO: 713762 - RNA, 19 nt, Homo sapiens
  misc_RNA (1)...(19): siRNA sense strand
gauauuccaguacaacauu

SEQ ID NO: 713763 - RNA, 19 nt, Homo sapiens
  misc_RNA (1)...(19): siRNA sense strand
gagagagcuucaggaugua

SEQ ID NO: 713764 - RNA, 19 nt, Homo sapiens
  misc_RNA (1)...(19): siRNA sense strand
gcuucaggauguaaauauu

SEQ ID NO: 713765 - RNA, 19 nt, Homo sapiens
  misc_RNA (1)...(19): siRNA sense strand
caugguugcucuugccaaa

SEQ ID NO: 713766 - RNA, 19 nt, Homo sapiens
  misc_RNA (1)...(19): siRNA sense strand
ugacgacugugcaggaaga

SEQ ID NO: 713767 - RNA, 19 nt, Homo sapiens
  misc_RNA (1)...(19): siRNA sense strand
ggaucuugauauuccagua

SEQ ID NO: 713768 - RNA, 19 nt, Homo sapiens
  misc_RNA (1)...(19): siRNA sense strand
ggaaacuggaucuugauau

SEQ ID NO: 713769 - RNA, 19 nt, Homo sapiens
  misc_RNA (1)...(19): siRNA sense strand
ugagaaccguguaccaugu

SEQ ID NO: 713770 - RNA, 19 nt, Homo sapiens
  misc_RNA (1)...(19): siRNA sense strand
gagccagugauuuacaaua

SEQ ID NO: 713771 - RNA, 19 nt, Homo sapiens
  misc_RNA (1)...(19): siRNA sense strand
gcagggaaacuggaucuug

SEQ ID NO: 713772 - RNA, 19 nt, Homo sapiens
  misc_RNA (1)...(19): siRNA sense strand
gguuggaguuucuguagau

SEQ ID NO: 713773 - RNA, 19 nt, Homo sapiens
  misc_RNA (1)...(19): siRNA sense strand
gggaaacuggaucuugaua

SEQ ID NO: 713774 - RNA, 19 nt, Homo sapiens
  misc_RNA (1)...(19): siRNA sense strand
gcaaaagucucaccauggu

SEQ ID NO: 713775 - RNA, 19 nt, Homo sapiens
  misc_RNA (1)...(19): siRNA sense strand
gagaaccguguaccaugua

SEQ ID NO: 713776 - RNA, 19 nt, Homo sapiens
  misc_RNA (1)...(19): siRNA sense strand
guagagagagcuucaggau

SEQ ID NO: 713777 - RNA, 19 nt, Homo sapiens
  misc_RNA (1)...(19): siRNA sense strand
gggcauagugguuggaguu

SEQ ID NO: 713778 - RNA, 19 nt, Homo sapiens
  misc_RNA (1)...(19): siRNA sense strand
aaaacgagccagugauuua

SEQ ID NO: 713779 - RNA, 19 nt, Homo sapiens
  misc_RNA (1)...(19): siRNA sense strand
gaagaaaacgagccaguga

SEQ ID NO: 713780 - RNA, 19 nt, Homo sapiens
  misc_RNA (1)...(19): siRNA sense strand
ucagaagguuuagguuaug

SEQ ID NO: 713781 - RNA, 19 nt, Homo sapiens
  misc_RNA (1)...(19): siRNA sense strand
gccagugauuuacaauaga

SEQ ID NO: 713782 - RNA, 19 nt, Homo sapiens
  misc_RNA (1)...(19): siRNA sense strand
aaagguuucugucacaaca

SEQ ID NO: 713783 - RNA, 19 nt, Homo sapiens
  misc_RNA (1)...(19): siRNA sense strand
cagagacaguuaugcgaau

SEQ ID NO: 713784 - RNA, 19 nt, Homo sapiens
  misc_RNA (1)...(19): siRNA sense strand
gagcuucaggauguaaaua

SEQ ID NO: 713785 - RNA, 19 nt, Homo sapiens
  misc_RNA (1)...(19): siRNA sense strand
acaaggcgaauuauauuug

SEQ ID NO: 713786 - RNA, 19 nt, Homo sapiens
  misc_RNA (1)...(19): siRNA sense strand
ugguugcucuugccaaauu

SEQ ID NO: 713787 - RNA, 19 nt, Homo sapiens
  misc_RNA (1)...(19): siRNA sense strand
gaagaugaugaaagagaau

SEQ ID NO: 713788 - RNA, 19 nt, Homo sapiens
  misc_RNA (1)...(19): siRNA sense strand
gcauagugguuggaguuuc

SEQ ID NO: 713789 - RNA, 19 nt, Homo sapiens
  misc_RNA (1)...(19): siRNA sense strand
acaguuaugcgaauugcua

SEQ ID NO: 713790 - RNA, 19 nt, Homo sapiens
  misc_RNA (1)...(19): siRNA sense strand
uggauaugcugacgacugu

SEQ ID NO: 713791 - RNA, 19 nt, Homo sapiens
  misc_RNA (1)...(19): siRNA sense strand
cauagugguuggaguuucu

SEQ ID NO: 713792 - RNA, 19 nt, Homo sapiens
  misc_RNA (1)...(19): siRNA sense strand
gcugacgacugugcaggaa

SEQ ID NO: 713793 - RNA, 19 nt, Homo sapiens
  misc_RNA (1)...(19): siRNA sense strand
ccagugauuuacaauagag

SEQ ID NO: 713794 - RNA, 19 nt, Homo sapiens
  misc_RNA (1)...(19): siRNA sense strand
uuaaguggaauucgucauu

SEQ ID NO: 713795 - RNA, 19 nt, Homo sapiens
  misc_RNA (1)...(19): siRNA sense strand
gaugaaagagaauguugca

SEQ ID NO: 713796 - RNA, 19 nt, Homo sapiens
  misc_RNA (1)...(19): siRNA sense strand
uuauaaagccuugaagaug

SEQ ID NO: 713797 - RNA, 19 nt, Homo sapiens
  misc_RNA (1)...(19): siRNA sense strand
gccaaaugccggaauucaa

SEQ ID NO: 713798 - RNA, 19 nt, Homo sapiens
  misc_RNA (1)...(19): siRNA sense strand
gaaccguguaccauguaaa

SEQ ID NO: 713799 - RNA, 19 nt, Homo sapiens
  misc_RNA (1)...(19): siRNA sense strand
guaaaccagagacaguuau

SEQ ID NO: 713800 - RNA, 19 nt, Homo sapiens
  misc_RNA (1)...(19): siRNA sense strand
uguaaaccagagacaguua

SEQ ID NO: 713801 - RNA, 19 nt, Homo sapiens
  misc_RNA (1)...(19): siRNA sense strand
cacaacaagauuacugauu

SEQ ID NO: 713802 - RNA, 19 nt, Homo sapiens
  misc_RNA (1)...(19): siRNA sense strand
aaaggugaaagaagagaaa

SEQ ID NO: 713803 - RNA, 19 nt, Homo sapiens
  misc_RNA (1)...(19): siRNA sense strand
agagacaguuaugcgaauu

SEQ ID NO: 713804 - RNA, 19 nt, Homo sapiens
  misc_RNA (1)...(19): siRNA sense strand
ggaagcagggaaacuggau

SEQ ID NO: 713805 - RNA, 19 nt, Homo sapiens
  misc_RNA (1)...(19): siRNA sense strand
gaaaacgagccagugauuu

SEQ ID NO: 713806 - RNA, 19 nt, Homo sapiens
  misc_RNA (1)...(19): siRNA sense strand
ggagaaugaagccaaaugc

SEQ ID NO: 713807 - RNA, 19 nt, Homo sapiens
  misc_RNA (1)...(19): siRNA sense strand
agaaccguguaccauguaa

SEQ ID NO: 713808 - RNA, 19 nt, Homo sapiens
  misc_RNA (1)...(19): siRNA sense strand
gagacaguuaugcgaauug

SEQ ID NO: 713809 - RNA, 19 nt, Homo sapiens
  misc_RNA (1)...(19): siRNA sense strand
ccauuuaaguggaauucgu

SEQ ID NO: 713810 - RNA, 19 nt, Homo sapiens
  misc_RNA (1)...(19): siRNA sense strand
uagguuaugcugauguuga

SEQ ID NO: 713811 - RNA, 19 nt, Homo sapiens
  misc_RNA (1)...(19): siRNA sense strand
agccagugauuuacaauag

SEQ ID NO: 713812 - RNA, 19 nt, Homo sapiens
  misc_RNA (1)...(19): siRNA sense strand
guauucaacuuuuggcuau

SEQ ID NO: 713813 - RNA, 19 nt, Homo sapiens
  misc_RNA (1)...(19): siRNA sense strand
gaaggcaaaaguaaugaaa

SEQ ID NO: 713814 - RNA, 19 nt, Homo sapiens
  misc_RNA (1)...(19): siRNA sense strand
auaaagccuugaagaugau

SEQ ID NO: 713815 - RNA, 19 nt, Homo sapiens
  misc_RNA (1)...(19): siRNA sense strand
guucccgaauucccagaaa

SEQ ID NO: 713816 - RNA, 19 nt, Homo sapiens
  misc_RNA (1)...(19): siRNA sense strand
ugcacaggaucaaggauga

SEQ ID NO: 713817 - RNA, 19 nt, Homo sapiens
  misc_RNA (1)...(19): siRNA sense strand
aaguggaauucgucauuau

SEQ ID NO: 713818 - RNA, 19 nt, Homo sapiens
  misc_RNA (1)...(19): siRNA sense strand
uggaguuucuguagaugga

SEQ ID NO: 713819 - RNA, 19 nt, Homo sapiens
  misc_RNA (1)...(19): siRNA sense strand
aaaugauccuuuguucuuc

SEQ ID NO: 713820 - RNA, 19 nt, Homo sapiens
  misc_RNA (1)...(19): siRNA sense strand
gaugaugaaagagaauguu

SEQ ID NO: 713821 - RNA, 19 nt, Homo sapiens
  misc_RNA (1)...(19): siRNA sense strand
cggcucaugucagcaguga

SEQ ID NO: 713822 - RNA, 19 nt, Homo sapiens
  misc_RNA (1)...(19): siRNA sense strand
uugaacaaggcgaauuaua

SEQ ID NO: 713823 - RNA, 19 nt, Homo sapiens
  misc_RNA (1)...(19): siRNA sense strand
aaugauccuuuguucuuca

SEQ ID NO: 713824 - RNA, 19 nt, Homo sapiens
  misc_RNA (1)...(19): siRNA sense strand
gagagcuucaggauguaaa

SEQ ID NO: 713825 - RNA, 19 nt, Homo sapiens
  misc_RNA (1)...(19): siRNA sense strand
aaacuggaucuugauauuc

SEQ ID NO: 713826 - RNA, 19 nt, Homo sapiens
  misc_RNA (1)...(19): siRNA sense strand
cagaaaauauuccaugacu

SEQ ID NO: 713827 - RNA, 19 nt, Homo sapiens
  misc_RNA (1)...(19): siRNA sense strand
uaaaccagagacaguuaug

SEQ ID NO: 713828 - RNA, 19 nt, Homo sapiens
  misc_RNA (1)...(19): siRNA sense strand
cuuauaaagccuugaagau

SEQ ID NO: 713829 - RNA, 19 nt, Homo sapiens
  misc_RNA (1)...(19): siRNA sense strand
cauaguagagagagcuuca

SEQ ID NO: 713830 - RNA, 19 nt, Homo sapiens
  misc_RNA (1)...(19): siRNA sense strand
cauguaaaccagagacagu

SEQ ID NO: 713831 - RNA, 19 nt, Homo sapiens
  misc_RNA (1)...(19): siRNA sense strand
uucaaaaccuggcaagaaa

SEQ ID NO: 713832 - RNA, 19 nt, Homo sapiens
  misc_RNA (1)...(19): siRNA sense strand
gcgaauuauauuugagaga

SEQ ID NO: 713833 - RNA, 19 nt, Homo sapiens
  misc_RNA (1)...(19): siRNA sense strand
guuaugcugauguugagaa

SEQ ID NO: 713834 - RNA, 19 nt, Homo sapiens
  misc_RNA (1)...(19): siRNA sense strand
gaucuugauauuccaguac

SEQ ID NO: 713835 - RNA, 19 nt, Homo sapiens
  misc_RNA (1)...(19): siRNA sense strand
uugaagaugaugaaagaga

SEQ ID NO: 713836 - RNA, 19 nt, Homo sapiens
  misc_RNA (1)...(19): siRNA sense strand
gcacucagcgcaagaagau

SEQ ID NO: 713837 - RNA, 19 nt, Homo sapiens
  misc_RNA (1)...(19): siRNA sense strand
ggaggaggccaccgacuau

SEQ ID NO: 713838 - RNA, 19 nt, Homo sapiens
  misc_RNA (1)...(19): siRNA sense strand
ucaccggccucuacuggaa

SEQ ID NO: 713839 - RNA, 19 nt, Homo sapiens
  misc_RNA (1)...(19): siRNA sense strand
caguugcgcucacucauca

SEQ ID NO: 713840 - RNA, 19 nt, Homo sapiens
  misc_RNA (1)...(19): siRNA sense strand
gcagcuucaugcucaagga

SEQ ID NO: 713841 - RNA, 19 nt, Homo sapiens
  misc_RNA (1)...(19): siRNA sense strand
ggcugcaccuggacgauga

SEQ ID NO: 713842 - RNA, 19 nt, Homo sapiens
  misc_RNA (1)...(19): siRNA sense strand
ccacaaccaggacaaguuc

SEQ ID NO: 713843 - RNA, 19 nt, Homo sapiens
  misc_RNA (1)...(19): siRNA sense strand
gcugguucuuugaggaauu

SEQ ID NO: 713844 - RNA, 19 nt, Homo sapiens
  misc_RNA (1)...(19): siRNA sense strand
uggcggcucuggccuacaa

SEQ ID NO: 713845 - RNA, 19 nt, Homo sapiens
  misc_RNA (1)...(19): siRNA sense strand
ucaaggacaugcucuaccu

SEQ ID NO: 713846 - RNA, 19 nt, Homo sapiens
  misc_RNA (1)...(19): siRNA sense strand
gcaguugcgcucacucauc

SEQ ID NO: 713847 - RNA, 19 nt, Homo sapiens
  misc_RNA (1)...(19): siRNA sense strand
aagcccagcugccaguaug

SEQ ID NO: 713848 - RNA, 19 nt, Homo sapiens
  misc_RNA (1)...(19): siRNA sense strand
ggaggccaccgacuaugga

SEQ ID NO: 713849 - RNA, 19 nt, Homo sapiens
  misc_RNA (1)...(19): siRNA sense strand
cgcaaggccuacuccauca

SEQ ID NO: 713850 - RNA, 19 nt, Homo sapiens
  misc_RNA (1)...(19): siRNA sense strand
gggacgagcagauuuacag

SEQ ID NO: 713851 - RNA, 19 nt, Homo sapiens
  misc_RNA (1)...(19): siRNA sense strand
gcaaggccuacuccaucaa

SEQ ID NO: 713852 - RNA, 19 nt, Homo sapiens
  misc_RNA (1)...(19): siRNA sense strand
gggcugguucuuugaggaa

SEQ ID NO: 713853 - RNA, 19 nt, Homo sapiens
  misc_RNA (1)...(19): siRNA sense strand
agucugcccucugccauug

SEQ ID NO: 713854 - RNA, 19 nt, Homo sapiens
  misc_RNA (1)...(19): siRNA sense strand
ccuacuccaucaaggacaa

SEQ ID NO: 713855 - RNA, 19 nt, Homo sapiens
  misc_RNA (1)...(19): siRNA sense strand
cugguucuuugaggaauuu

SEQ ID NO: 713856 - RNA, 19 nt, Homo sapiens
  misc_RNA (1)...(19): siRNA sense strand
agaugcggcuggccaacga

SEQ ID NO: 713857 - RNA, 19 nt, Homo sapiens
  misc_RNA (1)...(19): siRNA sense strand
aggaggaggccaccgacua

SEQ ID NO: 713858 - RNA, 19 nt, Homo sapiens
  misc_RNA (1)...(19): siRNA sense strand
gcacauagccaacauaaga

SEQ ID NO: 713859 - RNA, 19 nt, Homo sapiens
  misc_RNA (1)...(19): siRNA sense strand
caaugugccugcuguauua

SEQ ID NO: 713860 - RNA, 19 nt, Homo sapiens
  misc_RNA (1)...(19): siRNA sense strand
gaugauagauggucagaug

SEQ ID NO: 713861 - RNA, 19 nt, Homo sapiens
  misc_RNA (1)...(19): siRNA sense strand
cagaagcacuggaucguua

SEQ ID NO: 713862 - RNA, 19 nt, Homo sapiens
  misc_RNA (1)...(19): siRNA sense strand
gaaccucacugcccucauu

SEQ ID NO: 713863 - RNA, 19 nt, Homo sapiens
  misc_RNA (1)...(19): siRNA sense strand
gcaauaaucaguucuuuga

SEQ ID NO: 713864 - RNA, 19 nt, Homo sapiens
  misc_RNA (1)...(19): siRNA sense strand
aaagugaucuucucucuga

SEQ ID NO: 713865 - RNA, 19 nt, Homo sapiens
  misc_RNA (1)...(19): siRNA sense strand
ucagaagcaucucgaauuu

SEQ ID NO: 713866 - RNA, 19 nt, Homo sapiens
  misc_RNA (1)...(19): siRNA sense strand
gcagagccaucgucauuug

SEQ ID NO: 713867 - RNA, 19 nt, Homo sapiens
  misc_RNA (1)...(19): siRNA sense strand
gaagaccacuuaugaagag

SEQ ID NO: 713868 - RNA, 19 nt, Homo sapiens
  misc_RNA (1)...(19): siRNA sense strand
caugagcgguaucuucuua

SEQ ID NO: 713869 - RNA, 19 nt, Homo sapiens
  misc_RNA (1)...(19): siRNA sense strand
ugacuucucugauccauug

SEQ ID NO: 713870 - RNA, 19 nt, Homo sapiens
  misc_RNA (1)...(19): siRNA sense strand
gcaauucuguggacuguca

SEQ ID NO: 713871 - RNA, 19 nt, Homo sapiens
  misc_RNA (1)...(19): siRNA sense strand
gaaacuacaucgccauucu

SEQ ID NO: 713872 - RNA, 19 nt, Homo sapiens
  misc_RNA (1)...(19): siRNA sense strand
gaaaggaccagcucaagug

SEQ ID NO: 713873 - RNA, 19 nt, Homo sapiens
  misc_RNA (1)...(19): siRNA sense strand
aagaaugccucagauguua

SEQ ID NO: 713874 - RNA, 19 nt, Homo sapiens
  misc_RNA (1)...(19): siRNA sense strand
aaagagaaguugacuggaa

SEQ ID NO: 713875 - RNA, 19 nt, Homo sapiens
  misc_RNA (1)...(19): siRNA sense strand
gcaaagugaucuucucucu

SEQ ID NO: 713876 - RNA, 19 nt, Homo sapiens
  misc_RNA (1)...(19): siRNA sense strand
ccacaucugcucugaauuu

SEQ ID NO: 713877 - RNA, 19 nt, Homo sapiens
  misc_RNA (1)...(19): siRNA sense strand
guagauaauuccaggauca

SEQ ID NO: 713878 - RNA, 19 nt, Homo sapiens
  misc_RNA (1)...(19): siRNA sense strand
ggacagcuauauuggugaa

SEQ ID NO: 713879 - RNA, 19 nt, Homo sapiens
  misc_RNA (1)...(19): siRNA sense strand
gcaauggaaacaaugauuu

SEQ ID NO: 713880 - RNA, 19 nt, Homo sapiens
  misc_RNA (1)...(19): siRNA sense strand
gaacucagaacauuucaau

SEQ ID NO: 713881 - RNA, 19 nt, Homo sapiens
  misc_RNA (1)...(19): siRNA sense strand
aaucugaacuggagcauga

SEQ ID NO: 713882 - RNA, 19 nt, Homo sapiens
  misc_RNA (1)...(19): siRNA sense strand
gcugggagcucaauguguu

SEQ ID NO: 713883 - RNA, 19 nt, Homo sapiens
  misc_RNA (1)...(19): siRNA sense strand
cagcuauauuggugaauua

SEQ ID NO: 713884 - RNA, 19 nt, Homo sapiens
  misc_RNA (1)...(19): siRNA sense strand
ggacaaagcaaaacacaua

SEQ ID NO: 713885 - RNA, 19 nt, Homo sapiens
  misc_RNA (1)...(19): siRNA sense strand
gagguggacucguggauau

SEQ ID NO: 713886 - RNA, 19 nt, Homo sapiens
  misc_RNA (1)...(19): siRNA sense strand
gcaugcagcuuacaacagu

SEQ ID NO: 713887 - RNA, 19 nt, Homo sapiens
  misc_RNA (1)...(19): siRNA sense strand
guaaagggaaguugacauu

SEQ ID NO: 713888 - RNA, 19 nt, Homo sapiens
  misc_RNA (1)...(19): siRNA sense strand
gaacgauauuugucacugu

SEQ ID NO: 713889 - RNA, 19 nt, Homo sapiens
  misc_RNA (1)...(19): siRNA sense strand
gaacaaaagugaguccaaa

SEQ ID NO: 713890 - RNA, 19 nt, Homo sapiens
  misc_RNA (1)...(19): siRNA sense strand
gacaauguuugcaauaauc

SEQ ID NO: 713891 - RNA, 19 nt, Homo sapiens
  misc_RNA (1)...(19): siRNA sense strand
agaauucucugccuaggaa

SEQ ID NO: 713892 - RNA, 19 nt, Homo sapiens
  misc_RNA (1)...(19): siRNA sense strand
guuggaaucugucaccauu

SEQ ID NO: 713893 - RNA, 19 nt, Homo sapiens
  misc_RNA (1)...(19): siRNA sense strand
ucagcaaucuggaguucua

SEQ ID NO: 713894 - RNA, 19 nt, Homo sapiens
  misc_RNA (1)...(19): siRNA sense strand
gaagaaaggaccagcucaa

SEQ ID NO: 713895 - RNA, 19 nt, Homo sapiens
  misc_RNA (1)...(19): siRNA sense strand
uguaccagauccuccauua

SEQ ID NO: 713896 - RNA, 19 nt, Homo sapiens
  misc_RNA (1)...(19): siRNA sense strand
ggacuugugccaaacacua

SEQ ID NO: 713897 - RNA, 19 nt, Homo sapiens
  misc_RNA (1)...(19): siRNA sense strand
gucaguugcuguugcauuu

SEQ ID NO: 713898 - RNA, 19 nt, Homo sapiens
  misc_RNA (1)...(19): siRNA sense strand
acaguuuguuucaggauua

SEQ ID NO: 713899 - RNA, 19 nt, Homo sapiens
  misc_RNA (1)...(19): siRNA sense strand
caaagaaugccucagaugu

SEQ ID NO: 713900 - RNA, 19 nt, Homo sapiens
  misc_RNA (1)...(19): siRNA sense strand
cagaacauuucaaucagaa

SEQ ID NO: 713901 - RNA, 19 nt, Homo sapiens
  misc_RNA (1)...(19): siRNA sense strand
gagaagaccacuuaugaag

SEQ ID NO: 713902 - RNA, 19 nt, Homo sapiens
  misc_RNA (1)...(19): siRNA sense strand
gggcagugguguuagaguu

SEQ ID NO: 713903 - RNA, 19 nt, Homo sapiens
  misc_RNA (1)...(19): siRNA sense strand
aaagggaaguugacauuag

SEQ ID NO: 713904 - RNA, 19 nt, Homo sapiens
  misc_RNA (1)...(19): siRNA sense strand
gacaauggcaacccacuaa

SEQ ID NO: 713905 - RNA, 19 nt, Homo sapiens
  misc_RNA (1)...(19): siRNA sense strand
gauggucagaugaucauua

SEQ ID NO: 713906 - RNA, 19 nt, Homo sapiens
  misc_RNA (1)...(19): siRNA sense strand
gaaccaagaggaacagcaa

SEQ ID NO: 713907 - RNA, 19 nt, Homo sapiens
  misc_RNA (1)...(19): siRNA sense strand
ccaaaucauucaccugugu

SEQ ID NO: 713908 - RNA, 19 nt, Homo sapiens
  misc_RNA (1)...(19): siRNA sense strand
ugccuugguuggaguauua

SEQ ID NO: 713909 - RNA, 19 nt, Homo sapiens
  misc_RNA (1)...(19): siRNA sense strand
gaaccaaaaguccuauuua

SEQ ID NO: 713910 - RNA, 19 nt, Homo sapiens
  misc_RNA (1)...(19): siRNA sense strand
caaagaagcaacaagaaca

SEQ ID NO: 713911 - RNA, 19 nt, Homo sapiens
  misc_RNA (1)...(19): siRNA sense strand
ccacaugcccaucacagua

SEQ ID NO: 713912 - RNA, 19 nt, Homo sapiens
  misc_RNA (1)...(19): siRNA sense strand
ccagaagugccacaaagua

SEQ ID NO: 713913 - RNA, 19 nt, Homo sapiens
  misc_RNA (1)...(19): siRNA sense strand
agagcaugaugaacauuua

SEQ ID NO: 713914 - RNA, 19 nt, Homo sapiens
  misc_RNA (1)...(19): siRNA sense strand
ccucagcaaugguugguuu

SEQ ID NO: 713915 - RNA, 19 nt, Homo sapiens
  misc_RNA (1)...(19): siRNA sense strand
cacauaccauaaaugcuua

SEQ ID NO: 713916 - RNA, 19 nt, Homo sapiens
  misc_RNA (1)...(19): siRNA sense strand
caaagcaacauuagcaaau

SEQ ID NO: 713917 - RNA, 19 nt, Homo sapiens
  misc_RNA (1)...(19): siRNA sense strand
aaacaaggcaggagggaaa

SEQ ID NO: 713918 - RNA, 19 nt, Homo sapiens
  misc_RNA (1)...(19): siRNA sense strand
agauguagcugcccagaug

SEQ ID NO: 713919 - RNA, 19 nt, Homo sapiens
  misc_RNA (1)...(19): siRNA sense strand
guaccuaccucuucacacu

SEQ ID NO: 713920 - RNA, 19 nt, Homo sapiens
  misc_RNA (1)...(19): siRNA sense strand
ccacuaaaucccaagagua

SEQ ID NO: 713921 - RNA, 19 nt, Homo sapiens
  misc_RNA (1)...(19): siRNA sense strand
cagcagcaaauauaugaua

SEQ ID NO: 713922 - RNA, 19 nt, Homo sapiens
  misc_RNA (1)...(19): siRNA sense strand
guucuuugauuguuuccua

SEQ ID NO: 713923 - RNA, 19 nt, Homo sapiens
  misc_RNA (1)...(19): siRNA sense strand
gagagcaugaugaacauuu

SEQ ID NO: 713924 - RNA, 19 nt, Homo sapiens
  misc_RNA (1)...(19): siRNA sense strand
ggagacauuauggaauuua

SEQ ID NO: 713925 - RNA, 19 nt, Homo sapiens
  misc_RNA (1)...(19): siRNA sense strand
gaugacaauguuugcaaua

SEQ ID NO: 713926 - RNA, 19 nt, Homo sapiens
  misc_RNA (1)...(19): siRNA sense strand
aaacaaagggaacucugua

SEQ ID NO: 713927 - RNA, 19 nt, Homo sapiens
  misc_RNA (1)...(19): siRNA sense strand
gugaugagccugcccugua

SEQ ID NO: 713928 - RNA, 19 nt, Homo sapiens
  misc_RNA (1)...(19): siRNA sense strand
cgaaaccucagaaacagua

SEQ ID NO: 713929 - RNA, 19 nt, Homo sapiens
  misc_RNA (1)...(19): siRNA sense strand
gagcgguaucuucuuaaua

SEQ ID NO: 713930 - RNA, 19 nt, Homo sapiens
  misc_RNA (1)...(19): siRNA sense strand
ucagaacauuucaaucaga

SEQ ID NO: 713931 - RNA, 19 nt, Homo sapiens
  misc_RNA (1)...(19): siRNA sense strand
uacaaacacuugaacuaug

SEQ ID NO: 713932 - RNA, 19 nt, Homo sapiens
  misc_RNA (1)...(19): siRNA sense strand
ggucagauuccuuuaccua

SEQ ID NO: 713933 - RNA, 19 nt, Homo sapiens
  misc_RNA (1)...(19): siRNA sense strand
gaugaugcccuccacaguu

SEQ ID NO: 713934 - RNA, 19 nt, Homo sapiens
  misc_RNA (1)...(19): siRNA sense strand
gggccgagguuugauauca

SEQ ID NO: 713935 - RNA, 19 nt, Homo sapiens
  misc_RNA (1)...(19): siRNA sense strand
gcuggacacugggaaacua

SEQ ID NO: 713936 - RNA, 19 nt, Homo sapiens
  misc_RNA (1)...(19): siRNA sense strand
uaucagggcagugguguua

SEQ ID NO: 713937 - RNA, 19 nt, Homo sapiens
  misc_RNA (1)...(19): siRNA sense strand
uaaagggaaguugacauua

SEQ ID NO: 713938 - RNA, 19 nt, Homo sapiens
  misc_RNA (1)...(19): siRNA sense strand
gcgguaucuucuuaauaua

SEQ ID NO: 713939 - RNA, 19 nt, Homo sapiens
  misc_RNA (1)...(19): siRNA sense strand
gcccauaccaucacccuuu

SEQ ID NO: 713940 - RNA, 19 nt, Homo sapiens
  misc_RNA (1)...(19): siRNA sense strand
cacuaaaucccaagaguaa

SEQ ID NO: 713941 - RNA, 19 nt, Homo sapiens
  misc_RNA (1)...(19): siRNA sense strand
ugccaugcauugucauuaa

SEQ ID NO: 713942 - RNA, 19 nt, Homo sapiens
  misc_RNA (1)...(19): siRNA sense strand
ucacugcccucauuauuuu

SEQ ID NO: 713943 - RNA, 19 nt, Homo sapiens
  misc_RNA (1)...(19): siRNA sense strand
gggauugaguuugguauca

SEQ ID NO: 713944 - RNA, 19 nt, Homo sapiens
  misc_RNA (1)...(19): siRNA sense strand
caagaccaauguacacagu

SEQ ID NO: 713945 - RNA, 19 nt, Homo sapiens
  misc_RNA (1)...(19): siRNA sense strand
gcaaaacacauaccauaaa

SEQ ID NO: 713946 - RNA, 19 nt, Homo sapiens
  misc_RNA (1)...(19): siRNA sense strand
gcaaucuggaguucuauga

SEQ ID NO: 713947 - RNA, 19 nt, Homo sapiens
  misc_RNA (1)...(19): siRNA sense strand
ucucuaucguguaguauuu

SEQ ID NO: 713948 - RNA, 19 nt, Homo sapiens
  misc_RNA (1)...(19): siRNA sense strand
ugccagagcucccugacuu

SEQ ID NO: 713949 - RNA, 19 nt, Homo sapiens
  misc_RNA (1)...(19): siRNA sense strand
acacauaccauaaaugcuu

SEQ ID NO: 713950 - RNA, 19 nt, Homo sapiens
  misc_RNA (1)...(19): siRNA sense strand
ccuccacaguucuagcuua

SEQ ID NO: 713951 - RNA, 19 nt, Homo sapiens
  misc_RNA (1)...(19): siRNA sense strand
agcgguaucuucuuaauau

SEQ ID NO: 713952 - RNA, 19 nt, Homo sapiens
  misc_RNA (1)...(19): siRNA sense strand
ccacgcaaauguaccaagu

SEQ ID NO: 713953 - RNA, 19 nt, Homo sapiens
  misc_RNA (1)...(19): siRNA sense strand
ccagagugguauuuacuuc

SEQ ID NO: 713954 - RNA, 19 nt, Homo sapiens
  misc_RNA (1)...(19): siRNA sense strand
aaucauccuuucugccuuu

SEQ ID NO: 713955 - RNA, 19 nt, Homo sapiens
  misc_RNA (1)...(19): siRNA sense strand
aaagaaugccucagauguu

SEQ ID NO: 713956 - RNA, 19 nt, Homo sapiens
  misc_RNA (1)...(19): siRNA sense strand
acaaacacuugaacuaugg

SEQ ID NO: 713957 - RNA, 19 nt, Homo sapiens
  misc_RNA (1)...(19): siRNA sense strand
caacagugaacucagcaaa

SEQ ID NO: 713958 - RNA, 19 nt, Homo sapiens
  misc_RNA (1)...(19): siRNA sense strand
ccacaacggucucaagauc

SEQ ID NO: 713959 - RNA, 19 nt, Homo sapiens
  misc_RNA (1)...(19): siRNA sense strand
gaauaugcacugcccuuug

SEQ ID NO: 713960 - RNA, 19 nt, Homo sapiens
  misc_RNA (1)...(19): siRNA sense strand
gggcugcaucuucauguua

SEQ ID NO: 713961 - RNA, 19 nt, Homo sapiens
  misc_RNA (1)...(19): siRNA sense strand
caagaucugcgagaaguuu

SEQ ID NO: 713962 - RNA, 19 nt, Homo sapiens
  misc_RNA (1)...(19): siRNA sense strand
ggcugcaucuucauguuaa

SEQ ID NO: 713963 - RNA, 19 nt, Homo sapiens
  misc_RNA (1)...(19): siRNA sense strand
agaaguggcacauggcaua

SEQ ID NO: 713964 - RNA, 19 nt, Homo sapiens
  misc_RNA (1)...(19): siRNA sense strand
gagcugccguccuuugaag

SEQ ID NO: 713965 - RNA, 19 nt, Homo sapiens
  misc_RNA (1)...(19): siRNA sense strand
ggaauaugcacugcccuuu

SEQ ID NO: 713966 - RNA, 19 nt, Homo sapiens
  misc_RNA (1)...(19): siRNA sense strand
gcauaucacgggagcaaug

SEQ ID NO: 713967 - RNA, 19 nt, Homo sapiens
  misc_RNA (1)...(19): siRNA sense strand
gcgaguaccaugcccuuug

SEQ ID NO: 713968 - RNA, 19 nt, Homo sapiens
  misc_RNA (1)...(19): siRNA sense strand
ggaccucuaugggcagugu

SEQ ID NO: 713969 - RNA, 19 nt, Homo sapiens
  misc_RNA (1)...(19): siRNA sense strand
caugguggacgguaucaaa

SEQ ID NO: 713970 - RNA, 19 nt, Homo sapiens
  misc_RNA (1)...(19): siRNA sense strand
ggguagcugugccagaugu

SEQ ID NO: 713971 - RNA, 19 nt, Homo sapiens
  misc_RNA (1)...(19): siRNA sense strand
gcugggacacuaaccaaga

SEQ ID NO: 713972 - RNA, 19 nt, Homo sapiens
  misc_RNA (1)...(19): siRNA sense strand
aauaugcacugcccuuugg

SEQ ID NO: 713973 - RNA, 19 nt, Homo sapiens
  misc_RNA (1)...(19): siRNA sense strand
gacccuggccuccaaagug

SEQ ID NO: 713974 - RNA, 19 nt, Homo sapiens
  misc_RNA (1)...(19): siRNA sense strand
gguggacgguaucaaagag

SEQ ID NO: 713975 - RNA, 19 nt, Homo sapiens
  misc_RNA (1)...(19): siRNA sense strand
gaaguggcacauggcauau

SEQ ID NO: 713976 - RNA, 19 nt, Homo sapiens
  misc_RNA (1)...(19): siRNA sense strand
ccuggaggcugggacacua

SEQ ID NO: 713977 - RNA, 19 nt, Homo sapiens
  misc_RNA (1)...(19): siRNA sense strand
acaacggucucaagaucug

SEQ ID NO: 713978 - RNA, 19 nt, Homo sapiens
  misc_RNA (1)...(19): siRNA sense strand
caaagcgaagccugugcua

SEQ ID NO: 713979 - RNA, 19 nt, Homo sapiens
  misc_RNA (1)...(19): siRNA sense strand
cagacaugguggacgguau

SEQ ID NO: 713980 - RNA, 19 nt, Homo sapiens
  misc_RNA (1)...(19): siRNA sense strand
cugggacacuaaccaagaa

SEQ ID NO: 713981 - RNA, 19 nt, Homo sapiens
  misc_RNA (1)...(19): siRNA sense strand
cgaguaccaugcccuuugc

SEQ ID NO: 713982 - RNA, 19 nt, Homo sapiens
  misc_RNA (1)...(19): siRNA sense strand
uaucacgggagcaauguug

SEQ ID NO: 713983 - RNA, 19 nt, Homo sapiens
  misc_RNA (1)...(19): siRNA sense strand
gugagcaggugacaaucgu

SEQ ID NO: 713984 - RNA, 19 nt, Homo sapiens
  misc_RNA (1)...(19): siRNA sense strand
ccuuugcucucgcuuccaa

SEQ ID NO: 713985 - RNA, 19 nt, Homo sapiens
  misc_RNA (1)...(19): siRNA sense strand
cucaagaucugcgagaagu

SEQ ID NO: 713986 - RNA, 19 nt, Homo sapiens
  misc_RNA (1)...(19): siRNA sense strand
aguggcacauggcauauca

SEQ ID NO: 713987 - RNA, 19 nt, Homo sapiens
  misc_RNA (1)...(19): siRNA sense strand
auccugagcugccguccuu

SEQ ID NO: 713988 - RNA, 19 nt, Homo sapiens
  misc_RNA (1)...(19): siRNA sense strand
gccgcuaguccucuaaaga

SEQ ID NO: 713989 - RNA, 19 nt, Homo sapiens
  misc_RNA (1)...(19): siRNA sense strand
ucgaggagccuggcgagaa

SEQ ID NO: 713990 - RNA, 19 nt, Homo sapiens
  misc_RNA (1)...(19): siRNA sense strand
ccacaacggucucaagauc

SEQ ID NO: 713991 - RNA, 19 nt, Homo sapiens
  misc_RNA (1)...(19): siRNA sense strand
gaauaugcacugcccuuug

SEQ ID NO: 713992 - RNA, 19 nt, Homo sapiens
  misc_RNA (1)...(19): siRNA sense strand
gggcugcaucuucauguua

SEQ ID NO: 713993 - RNA, 19 nt, Homo sapiens
  misc_RNA (1)...(19): siRNA sense strand
caagaucugcgagaaguuu

SEQ ID NO: 713994 - RNA, 19 nt, Homo sapiens
  misc_RNA (1)...(19): siRNA sense strand
ggcugcaucuucauguuaa

SEQ ID NO: 713995 - RNA, 19 nt, Homo sapiens
  misc_RNA (1)...(19): siRNA sense strand
agaaguggcacauggcaua

SEQ ID NO: 713996 - RNA, 19 nt, Homo sapiens
  misc_RNA (1)...(19): siRNA sense strand
gagcugccguccuuugaag

SEQ ID NO: 713997 - RNA, 19 nt, Homo sapiens
  misc_RNA (1)...(19): siRNA sense strand
ggaauaugcacugcccuuu

SEQ ID NO: 713998 - RNA, 19 nt, Homo sapiens
  misc_RNA (1)...(19): siRNA sense strand
gcauaucacgggagcaaug

SEQ ID NO: 713999 - RNA, 19 nt, Homo sapiens
  misc_RNA (1)...(19): siRNA sense strand
gcgaguaccaugcccuuug

SEQ ID NO: 714000 - RNA, 19 nt, Homo sapiens
  misc_RNA (1)...(19): siRNA sense strand
ggaccucuaugggcagugu

SEQ ID NO: 714001 - RNA, 19 nt, Homo sapiens
  misc_RNA (1)...(19): siRNA sense strand
caugguggacgguaucaaa

SEQ ID NO: 714002 - RNA, 19 nt, Homo sapiens
  misc_RNA (1)...(19): siRNA sense strand
ggguagcugugccagaugu

SEQ ID NO: 714003 - RNA, 19 nt, Homo sapiens
  misc_RNA (1)...(19): siRNA sense strand
gcugggacacuaaccaaga

SEQ ID NO: 714004 - RNA, 19 nt, Homo sapiens
  misc_RNA (1)...(19): siRNA sense strand
aauaugcacugcccuuugg

SEQ ID NO: 714005 - RNA, 19 nt, Homo sapiens
  misc_RNA (1)...(19): siRNA sense strand
gacccuggccuccaaagug

SEQ ID NO: 714006 - RNA, 19 nt, Homo sapiens
  misc_RNA (1)...(19): siRNA sense strand
gguggacgguaucaaagag

SEQ ID NO: 714007 - RNA, 19 nt, Homo sapiens
  misc_RNA (1)...(19): siRNA sense strand
gaaguggcacauggcauau

SEQ ID NO: 714008 - RNA, 19 nt, Homo sapiens
  misc_RNA (1)...(19): siRNA sense strand
ccuggaggcugggacacua

SEQ ID NO: 714009 - RNA, 19 nt, Homo sapiens
  misc_RNA (1)...(19): siRNA sense strand
acaacggucucaagaucug

SEQ ID NO: 714010 - RNA, 19 nt, Homo sapiens
  misc_RNA (1)...(19): siRNA sense strand
caaagcgaagccugugcua

SEQ ID NO: 714011 - RNA, 19 nt, Homo sapiens
  misc_RNA (1)...(19): siRNA sense strand
cagacaugguggacgguau

SEQ ID NO: 714012 - RNA, 19 nt, Homo sapiens
  misc_RNA (1)...(19): siRNA sense strand
cugggacacuaaccaagaa

SEQ ID NO: 714013 - RNA, 19 nt, Homo sapiens
  misc_RNA (1)...(19): siRNA sense strand
cgaguaccaugcccuuugc

SEQ ID NO: 714014 - RNA, 19 nt, Homo sapiens
  misc_RNA (1)...(19): siRNA sense strand
uaucacgggagcaauguug

SEQ ID NO: 714015 - RNA, 19 nt, Homo sapiens
  misc_RNA (1)...(19): siRNA sense strand
gugagcaggugacaaucgu

SEQ ID NO: 714016 - RNA, 19 nt, Homo sapiens
  misc_RNA (1)...(19): siRNA sense strand
ccuuugcucucgcuuccaa

SEQ ID NO: 714017 - RNA, 19 nt, Homo sapiens
  misc_RNA (1)...(19): siRNA sense strand
cucaagaucugcgagaagu

SEQ ID NO: 714018 - RNA, 19 nt, Homo sapiens
  misc_RNA (1)...(19): siRNA sense strand
aguggcacauggcauauca

SEQ ID NO: 714019 - RNA, 19 nt, Homo sapiens
  misc_RNA (1)...(19): siRNA sense strand
auccugagcugccguccuu

SEQ ID NO: 714020 - RNA, 19 nt, Homo sapiens
  misc_RNA (1)...(19): siRNA sense strand
gccgcuaguccucuaaaga

SEQ ID NO: 714021 - RNA, 19 nt, Homo sapiens
  misc_RNA (1)...(19): siRNA sense strand
ucgaggagccuggcgagaa

SEQ ID NO: 714022 - RNA, 19 nt, Homo sapiens
  misc_RNA (1)...(19): siRNA sense strand
gaaacugagugauuuacaa

SEQ ID NO: 714023 - RNA, 19 nt, Homo sapiens
  misc_RNA (1)...(19): siRNA sense strand
gaagaaacugagugauuua

SEQ ID NO: 714024 - RNA, 19 nt, Homo sapiens
  misc_RNA (1)...(19): siRNA sense strand
agaagaaacugagugauuu

SEQ ID NO: 714025 - RNA, 19 nt, Homo sapiens
  misc_RNA (1)...(19): siRNA sense strand
gcaaggagcaugccaagug

SEQ ID NO: 714026 - RNA, 19 nt, Homo sapiens
  misc_RNA (1)...(19): siRNA sense strand
ucacaggcuuggauuaauu

SEQ ID NO: 714027 - RNA, 19 nt, Homo sapiens
  misc_RNA (1)...(19): siRNA sense strand
ugaauacgauccagacaau

SEQ ID NO: 714028 - RNA, 19 nt, Homo sapiens
  misc_RNA (1)...(19): siRNA sense strand
ggagcucacugacgagaau

SEQ ID NO: 714029 - RNA, 19 nt, Homo sapiens
  misc_RNA (1)...(19): siRNA sense strand
gauccagagugaugugcua

SEQ ID NO: 714030 - RNA, 19 nt, Homo sapiens
  misc_RNA (1)...(19): siRNA sense strand
gccacgagauccagaguga

SEQ ID NO: 714031 - RNA, 19 nt, Homo sapiens
  misc_RNA (1)...(19): siRNA sense strand
gugaugugcuaaccauaaa

SEQ ID NO: 714032 - RNA, 19 nt, Homo sapiens
  misc_RNA (1)...(19): siRNA sense strand
gcucacaggcuuggauuaa

SEQ ID NO: 714033 - RNA, 19 nt, Homo sapiens
  misc_RNA (1)...(19): siRNA sense strand
gaugugcggugcaaugaag

SEQ ID NO: 714034 - RNA, 19 nt, Homo sapiens
  misc_RNA (1)...(19): siRNA sense strand
gcugagacuucgagccuau

SEQ ID NO: 714035 - RNA, 19 nt, Homo sapiens
  misc_RNA (1)...(19): siRNA sense strand
gagaaugucaaguucauca

SEQ ID NO: 714036 - RNA, 19 nt, Homo sapiens
  misc_RNA (1)...(19): siRNA sense strand
aagaagaaacugagugauu

SEQ ID NO: 714037 - RNA, 19 nt, Homo sapiens
  misc_RNA (1)...(19): siRNA sense strand
ugucagcccucucaggauu

SEQ ID NO: 714038 - RNA, 19 nt, Homo sapiens
  misc_RNA (1)...(19): siRNA sense strand
gaugugcuaaccauaaauu

SEQ ID NO: 714039 - RNA, 19 nt, Homo sapiens
  misc_RNA (1)...(19): siRNA sense strand
ucgcugagguucccauaau

SEQ ID NO: 714040 - RNA, 19 nt, Homo sapiens
  misc_RNA (1)...(19): siRNA sense strand
ugaagaagaaacugaguga

SEQ ID NO: 714041 - RNA, 19 nt, Homo sapiens
  misc_RNA (1)...(19): siRNA sense strand
ucaaguucaucaucgagaa

SEQ ID NO: 714042 - RNA, 19 nt, Homo sapiens
  misc_RNA (1)...(19): siRNA sense strand
gaccagacgcgacauguca

SEQ ID NO: 714043 - RNA, 19 nt, Homo sapiens
  misc_RNA (1)...(19): siRNA sense strand
ucucaggauugaagaagaa

SEQ ID NO: 714044 - RNA, 19 nt, Homo sapiens
  misc_RNA (1)...(19): siRNA sense strand
ggaguucacccucgaugug

SEQ ID NO: 714045 - RNA, 19 nt, Homo sapiens
  misc_RNA (1)...(19): siRNA sense strand
ugaaaccauuguccuguca

SEQ ID NO: 714046 - RNA, 19 nt, Homo sapiens
  misc_RNA (1)...(19): siRNA sense strand
ggauugaagaagaaacuga

SEQ ID NO: 714047 - RNA, 19 nt, Homo sapiens
  misc_RNA (1)...(19): siRNA sense strand
gccauugacuggguucaga

SEQ ID NO: 714048 - RNA, 19 nt, Homo sapiens
  misc_RNA (1)...(19): siRNA sense strand
ccagaaagguuuuacuaca

SEQ ID NO: 714049 - RNA, 19 nt, Homo sapiens
  misc_RNA (1)...(19): siRNA sense strand
ucaauuaagccacgagauc

SEQ ID NO: 714050 - RNA, 19 nt, Homo sapiens
  misc_RNA (1)...(19): siRNA sense strand
gaagaccagacgcgacaug

SEQ ID NO: 714051 - RNA, 19 nt, Homo sapiens
  misc_RNA (1)...(19): siRNA sense strand
uggacaagcugcaguacuc

SEQ ID NO: 714052 - RNA, 19 nt, Homo sapiens
  misc_RNA (1)...(19): siRNA sense strand
gcacaugugaggaguucug

SEQ ID NO: 714053 - RNA, 19 nt, Homo sapiens
  misc_RNA (1)...(19): siRNA sense strand
cgcugagguucccauaaua

SEQ ID NO: 714054 - RNA, 19 nt, Homo sapiens
  misc_RNA (1)...(19): siRNA sense strand
gaaugucaaguucaucauc

SEQ ID NO: 714055 - RNA, 19 nt, Homo sapiens
  misc_RNA (1)...(19): siRNA sense strand
cagaaagguuuuacuacaa

SEQ ID NO: 714056 - RNA, 19 nt, Homo sapiens
  misc_RNA (1)...(19): siRNA sense strand
cggcaagccagaaagguuu

SEQ ID NO: 714057 - RNA, 19 nt, Homo sapiens
  misc_RNA (1)...(19): siRNA sense strand
cauuagugaugacauugug

SEQ ID NO: 714058 - RNA, 19 nt, Homo sapiens
  misc_RNA (1)...(19): siRNA sense strand
aggaauggccaaagaguga

SEQ ID NO: 714059 - RNA, 19 nt, Homo sapiens
  misc_RNA (1)...(19): siRNA sense strand
agagugaugugcuaaccau

SEQ ID NO: 714060 - RNA, 19 nt, Homo sapiens
  misc_RNA (1)...(19): siRNA sense strand
gagauaaugaccccaauga

SEQ ID NO: 714061 - RNA, 19 nt, Homo sapiens
  misc_RNA (1)...(19): siRNA sense strand
uugacuggguucagauuga

SEQ ID NO: 714062 - RNA, 19 nt, Homo sapiens
  misc_RNA (1)...(19): siRNA sense strand
cccgaggaauggccaaaga

SEQ ID NO: 714063 - RNA, 19 nt, Homo sapiens
  misc_RNA (1)...(19): siRNA sense strand
ucucgggacugcacaugug

SEQ ID NO: 714064 - RNA, 19 nt, Homo sapiens
  misc_RNA (1)...(19): siRNA sense strand
gcugagguucccauaauag

SEQ ID NO: 714065 - RNA, 19 nt, Homo sapiens
  misc_RNA (1)...(19): siRNA sense strand
ugacuggguucagauugau

SEQ ID NO: 714066 - RNA, 19 nt, Homo sapiens
  misc_RNA (1)...(19): siRNA sense strand
gaaagguuuuacuacaaug

SEQ ID NO: 714067 - RNA, 19 nt, Homo sapiens
  misc_RNA (1)...(19): siRNA sense strand
ggaucacggagcucacuga

SEQ ID NO: 714068 - RNA, 19 nt, Homo sapiens
  misc_RNA (1)...(19): siRNA sense strand
agugaugugcuaaccauaa

SEQ ID NO: 714069 - RNA, 19 nt, Homo sapiens
  misc_RNA (1)...(19): siRNA sense strand
gaagaagaaacugagugau

SEQ ID NO: 714070 - RNA, 19 nt, Homo sapiens
  misc_RNA (1)...(19): siRNA sense strand
ggagcuggaugaggaugag

SEQ ID NO: 714071 - RNA, 19 nt, Homo sapiens
  misc_RNA (1)...(19): siRNA sense strand
cacgagauccagagugaug

SEQ ID NO: 714072 - RNA, 19 nt, Homo sapiens
  misc_RNA (1)...(19): siRNA sense strand
acgagaaugucaaguucau

SEQ ID NO: 714073 - RNA, 19 nt, Homo sapiens
  misc_RNA (1)...(19): siRNA sense strand
agucgcaggcucccuauga

SEQ ID NO: 714074 - RNA, 19 nt, Homo sapiens
  misc_RNA (1)...(19): siRNA sense strand
ggccaggagcugagacuuc

SEQ ID NO: 714075 - RNA, 19 nt, Homo sapiens
  misc_RNA (1)...(19): siRNA sense strand
ggucuucaucgcugagguu

SEQ ID NO: 714076 - RNA, 19 nt, Homo sapiens
  misc_RNA (1)...(19): siRNA sense strand
ucagcccucucaggauuga

SEQ ID NO: 714077 - RNA, 19 nt, Homo sapiens
  misc_RNA (1)...(19): siRNA sense strand
caacggcaagccagaaagg

SEQ ID NO: 714078 - RNA, 19 nt, Homo sapiens
  misc_RNA (1)...(19): siRNA sense strand
ggcgguggccaauucgauu

SEQ ID NO: 714079 - RNA, 19 nt, Homo sapiens
  misc_RNA (1)...(19): siRNA sense strand
gacgagaaugucaaguuca

SEQ ID NO: 714080 - RNA, 19 nt, Homo sapiens
  misc_RNA (1)...(19): siRNA sense strand
cagccuaccgugcggauca

SEQ ID NO: 714081 - RNA, 19 nt, Homo sapiens
  misc_RNA (1)...(19): siRNA sense strand
gaauacgauccagacaaug

SEQ ID NO: 714082 - RNA, 19 nt, Homo sapiens
  misc_RNA (1)...(19): siRNA sense strand
gaaacugagugauuuacaa

SEQ ID NO: 714083 - RNA, 19 nt, Homo sapiens
  misc_RNA (1)...(19): siRNA sense strand
gaagaaacugagugauuua

SEQ ID NO: 714084 - RNA, 19 nt, Homo sapiens
  misc_RNA (1)...(19): siRNA sense strand
agaagaaacugagugauuu

SEQ ID NO: 714085 - RNA, 19 nt, Homo sapiens
  misc_RNA (1)...(19): siRNA sense strand
gcaaggagcaugccaagug

SEQ ID NO: 714086 - RNA, 19 nt, Homo sapiens
  misc_RNA (1)...(19): siRNA sense strand
ucacaggcuuggauuaauu

SEQ ID NO: 714087 - RNA, 19 nt, Homo sapiens
  misc_RNA (1)...(19): siRNA sense strand
ugaauacgauccagacaau

SEQ ID NO: 714088 - RNA, 19 nt, Homo sapiens
  misc_RNA (1)...(19): siRNA sense strand
ggagcucacugacgagaau

SEQ ID NO: 714089 - RNA, 19 nt, Homo sapiens
  misc_RNA (1)...(19): siRNA sense strand
gauccagagugaugugcua

SEQ ID NO: 714090 - RNA, 19 nt, Homo sapiens
  misc_RNA (1)...(19): siRNA sense strand
gccacgagauccagaguga

SEQ ID NO: 714091 - RNA, 19 nt, Homo sapiens
  misc_RNA (1)...(19): siRNA sense strand
gugaugugcuaaccauaaa

SEQ ID NO: 714092 - RNA, 19 nt, Homo sapiens
  misc_RNA (1)...(19): siRNA sense strand
gcucacaggcuuggauuaa

SEQ ID NO: 714093 - RNA, 19 nt, Homo sapiens
  misc_RNA (1)...(19): siRNA sense strand
gaugugcggugcaaugaag

SEQ ID NO: 714094 - RNA, 19 nt, Homo sapiens
  misc_RNA (1)...(19): siRNA sense strand
gcugagacuucgagccuau

SEQ ID NO: 714095 - RNA, 19 nt, Homo sapiens
  misc_RNA (1)...(19): siRNA sense strand
gagaaugucaaguucauca

SEQ ID NO: 714096 - RNA, 19 nt, Homo sapiens
  misc_RNA (1)...(19): siRNA sense strand
aagaagaaacugagugauu

SEQ ID NO: 714097 - RNA, 19 nt, Homo sapiens
  misc_RNA (1)...(19): siRNA sense strand
ugucagcccucucaggauu

SEQ ID NO: 714098 - RNA, 19 nt, Homo sapiens
  misc_RNA (1)...(19): siRNA sense strand
gaugugcuaaccauaaauu

SEQ ID NO: 714099 - RNA, 19 nt, Homo sapiens
  misc_RNA (1)...(19): siRNA sense strand
ucgcugagguucccauaau

SEQ ID NO: 714100 - RNA, 19 nt, Homo sapiens
  misc_RNA (1)...(19): siRNA sense strand
ugaagaagaaacugaguga

SEQ ID NO: 714101 - RNA, 19 nt, Homo sapiens
  misc_RNA (1)...(19): siRNA sense strand
ucaaguucaucaucgagaa

SEQ ID NO: 714102 - RNA, 19 nt, Homo sapiens
  misc_RNA (1)...(19): siRNA sense strand
gaccagacgcgacauguca

SEQ ID NO: 714103 - RNA, 19 nt, Homo sapiens
  misc_RNA (1)...(19): siRNA sense strand
ucucaggauugaagaagaa

SEQ ID NO: 714104 - RNA, 19 nt, Homo sapiens
  misc_RNA (1)...(19): siRNA sense strand
ggaguucacccucgaugug

SEQ ID NO: 714105 - RNA, 19 nt, Homo sapiens
  misc_RNA (1)...(19): siRNA sense strand
ugaaaccauuguccuguca

SEQ ID NO: 714106 - RNA, 19 nt, Homo sapiens
  misc_RNA (1)...(19): siRNA sense strand
ggauugaagaagaaacuga

SEQ ID NO: 714107 - RNA, 19 nt, Homo sapiens
  misc_RNA (1)...(19): siRNA sense strand
gccauugacuggguucaga

SEQ ID NO: 714108 - RNA, 19 nt, Homo sapiens
  misc_RNA (1)...(19): siRNA sense strand
ccagaaagguuuuacuaca

SEQ ID NO: 714109 - RNA, 19 nt, Homo sapiens
  misc_RNA (1)...(19): siRNA sense strand
ucaauuaagccacgagauc

SEQ ID NO: 714110 - RNA, 19 nt, Homo sapiens
  misc_RNA (1)...(19): siRNA sense strand
gaagaccagacgcgacaug

SEQ ID NO: 714111 - RNA, 19 nt, Homo sapiens
  misc_RNA (1)...(19): siRNA sense strand
uggacaagcugcaguacuc

SEQ ID NO: 714112 - RNA, 19 nt, Homo sapiens
  misc_RNA (1)...(19): siRNA sense strand
gcacaugugaggaguucug

SEQ ID NO: 714113 - RNA, 19 nt, Homo sapiens
  misc_RNA (1)...(19): siRNA sense strand
cgcugagguucccauaaua

SEQ ID NO: 714114 - RNA, 19 nt, Homo sapiens
  misc_RNA (1)...(19): siRNA sense strand
gaaugucaaguucaucauc

SEQ ID NO: 714115 - RNA, 19 nt, Homo sapiens
  misc_RNA (1)...(19): siRNA sense strand
cagaaagguuuuacuacaa

SEQ ID NO: 714116 - RNA, 19 nt, Homo sapiens
  misc_RNA (1)...(19): siRNA sense strand
cggcaagccagaaagguuu

SEQ ID NO: 714117 - RNA, 19 nt, Homo sapiens
  misc_RNA (1)...(19): siRNA sense strand
cauuagugaugacauugug

SEQ ID NO: 714118 - RNA, 19 nt, Homo sapiens
  misc_RNA (1)...(19): siRNA sense strand
aggaauggccaaagaguga

SEQ ID NO: 714119 - RNA, 19 nt, Homo sapiens
  misc_RNA (1)...(19): siRNA sense strand
agagugaugugcuaaccau

SEQ ID NO: 714120 - RNA, 19 nt, Homo sapiens
  misc_RNA (1)...(19): siRNA sense strand
gagauaaugaccccaauga

SEQ ID NO: 714121 - RNA, 19 nt, Homo sapiens
  misc_RNA (1)...(19): siRNA sense strand
uugacuggguucagauuga

SEQ ID NO: 714122 - RNA, 19 nt, Homo sapiens
  misc_RNA (1)...(19): siRNA sense strand
cccgaggaauggccaaaga

SEQ ID NO: 714123 - RNA, 19 nt, Homo sapiens
  misc_RNA (1)...(19): siRNA sense strand
ucucgggacugcacaugug

SEQ ID NO: 714124 - RNA, 19 nt, Homo sapiens
  misc_RNA (1)...(19): siRNA sense strand
gcugagguucccauaauag

SEQ ID NO: 714125 - RNA, 19 nt, Homo sapiens
  misc_RNA (1)...(19): siRNA sense strand
ugacuggguucagauugau

SEQ ID NO: 714126 - RNA, 19 nt, Homo sapiens
  misc_RNA (1)...(19): siRNA sense strand
gaaagguuuuacuacaaug

SEQ ID NO: 714127 - RNA, 19 nt, Homo sapiens
  misc_RNA (1)...(19): siRNA sense strand
ggaucacggagcucacuga

SEQ ID NO: 714128 - RNA, 19 nt, Homo sapiens
  misc_RNA (1)...(19): siRNA sense strand
agugaugugcuaaccauaa

SEQ ID NO: 714129 - RNA, 19 nt, Homo sapiens
  misc_RNA (1)...(19): siRNA sense strand
gaagaagaaacugagugau

SEQ ID NO: 714130 - RNA, 19 nt, Homo sapiens
  misc_RNA (1)...(19): siRNA sense strand
ggagcuggaugaggaugag

SEQ ID NO: 714131 - RNA, 19 nt, Homo sapiens
  misc_RNA (1)...(19): siRNA sense strand
cacgagauccagagugaug

SEQ ID NO: 714132 - RNA, 19 nt, Homo sapiens
  misc_RNA (1)...(19): siRNA sense strand
acgagaaugucaaguucau

SEQ ID NO: 714133 - RNA, 19 nt, Homo sapiens
  misc_RNA (1)...(19): siRNA sense strand
agucgcaggcucccuauga

SEQ ID NO: 714134 - RNA, 19 nt, Homo sapiens
  misc_RNA (1)...(19): siRNA sense strand
ggccaggagcugagacuuc

SEQ ID NO: 714135 - RNA, 19 nt, Homo sapiens
  misc_RNA (1)...(19): siRNA sense strand
ggucuucaucgcugagguu

SEQ ID NO: 714136 - RNA, 19 nt, Homo sapiens
  misc_RNA (1)...(19): siRNA sense strand
ucagcccucucaggauuga

SEQ ID NO: 714137 - RNA, 19 nt, Homo sapiens
  misc_RNA (1)...(19): siRNA sense strand
caacggcaagccagaaagg

SEQ ID NO: 714138 - RNA, 19 nt, Homo sapiens
  misc_RNA (1)...(19): siRNA sense strand
ggcgguggccaauucgauu

SEQ ID NO: 714139 - RNA, 19 nt, Homo sapiens
  misc_RNA (1)...(19): siRNA sense strand
gacgagaaugucaaguuca

SEQ ID NO: 714140 - RNA, 19 nt, Homo sapiens
  misc_RNA (1)...(19): siRNA sense strand
cagccuaccgugcggauca

SEQ ID NO: 714141 - RNA, 19 nt, Homo sapiens
  misc_RNA (1)...(19): siRNA sense strand
gaauacgauccagacaaug

SEQ ID NO: 714142 - RNA, 19 nt, Homo sapiens
  misc_RNA (1)...(19): siRNA sense strand
gaaagacucugaacaaguu

SEQ ID NO: 714143 - RNA, 19 nt, Homo sapiens
  misc_RNA (1)...(19): siRNA sense strand
gagcuuauguuaccaguua

SEQ ID NO: 714144 - RNA, 19 nt, Homo sapiens
  misc_RNA (1)...(19): siRNA sense strand
gaagaaggcugcaaacaug

SEQ ID NO: 714145 - RNA, 19 nt, Homo sapiens
  misc_RNA (1)...(19): siRNA sense strand
gcaaggagauuuacucgaa

SEQ ID NO: 714146 - RNA, 19 nt, Homo sapiens
  misc_RNA (1)...(19): siRNA sense strand
ggccaaaucuauauuauga

SEQ ID NO: 714147 - RNA, 19 nt, Homo sapiens
  misc_RNA (1)...(19): siRNA sense strand
gaagauuauugcacacuuu

SEQ ID NO: 714148 - RNA, 19 nt, Homo sapiens
  misc_RNA (1)...(19): siRNA sense strand
ggaaagagcuuauguuacc

SEQ ID NO: 714149 - RNA, 19 nt, Homo sapiens
  misc_RNA (1)...(19): siRNA sense strand
gaaguucacugcuguaguc

SEQ ID NO: 714150 - RNA, 19 nt, Homo sapiens
  misc_RNA (1)...(19): siRNA sense strand
aacaagagcuuauucagaa

SEQ ID NO: 714151 - RNA, 19 nt, Homo sapiens
  misc_RNA (1)...(19): siRNA sense strand
gauaagaccacaguucaua

SEQ ID NO: 714152 - RNA, 19 nt, Homo sapiens
  misc_RNA (1)...(19): siRNA sense strand
ggagguauuucuuguuaug

SEQ ID NO: 714153 - RNA, 19 nt, Homo sapiens
  misc_RNA (1)...(19): siRNA sense strand
gcuugaaacuauuaacgua

SEQ ID NO: 714154 - RNA, 19 nt, Homo sapiens
  misc_RNA (1)...(19): siRNA sense strand
uaaagacagugcauuugaa

SEQ ID NO: 714155 - RNA, 19 nt, Homo sapiens
  misc_RNA (1)...(19): siRNA sense strand
aaggagguauuucuuguua

SEQ ID NO: 714156 - RNA, 19 nt, Homo sapiens
  misc_RNA (1)...(19): siRNA sense strand
gcagaagcuuuaugagaug

SEQ ID NO: 714157 - RNA, 19 nt, Homo sapiens
  misc_RNA (1)...(19): siRNA sense strand
gauaacugcuguaaagaca

SEQ ID NO: 714158 - RNA, 19 nt, Homo sapiens
  misc_RNA (1)...(19): siRNA sense strand
guggaaagagcuuauguua

SEQ ID NO: 714159 - RNA, 19 nt, Homo sapiens
  misc_RNA (1)...(19): siRNA sense strand
guaaagacagugcauuuga

SEQ ID NO: 714160 - RNA, 19 nt, Homo sapiens
  misc_RNA (1)...(19): siRNA sense strand
gaagauaagaccacaguuc

SEQ ID NO: 714161 - RNA, 19 nt, Homo sapiens
  misc_RNA (1)...(19): siRNA sense strand
gaauacaggagcuaagaaa

SEQ ID NO: 714162 - RNA, 19 nt, Homo sapiens
  misc_RNA (1)...(19): siRNA sense strand
gcagaggaacugaaugaaa

SEQ ID NO: 714163 - RNA, 19 nt, Homo sapiens
  misc_RNA (1)...(19): siRNA sense strand
gaacuggauucuauaacca

SEQ ID NO: 714164 - RNA, 19 nt, Homo sapiens
  misc_RNA (1)...(19): siRNA sense strand
caacaagagcuuauucaga

SEQ ID NO: 714165 - RNA, 19 nt, Homo sapiens
  misc_RNA (1)...(19): siRNA sense strand
ugaaacugauugauucuug

SEQ ID NO: 714166 - RNA, 19 nt, Homo sapiens
  misc_RNA (1)...(19): siRNA sense strand
gcaaucaggaaucauauau

SEQ ID NO: 714167 - RNA, 19 nt, Homo sapiens
  misc_RNA (1)...(19): siRNA sense strand
gcaguucccuaacgcauca

SEQ ID NO: 714168 - RNA, 19 nt, Homo sapiens
  misc_RNA (1)...(19): siRNA sense strand
gcaaccauguuaaaugcuu

SEQ ID NO: 714169 - RNA, 19 nt, Homo sapiens
  misc_RNA (1)...(19): siRNA sense strand
cuaaggagcauguuaaaug

SEQ ID NO: 714170 - RNA, 19 nt, Homo sapiens
  misc_RNA (1)...(19): siRNA sense strand
caaaugucgucguguguug

SEQ ID NO: 714171 - RNA, 19 nt, Homo sapiens
  misc_RNA (1)...(19): siRNA sense strand
cauugaaacugauugauuc

SEQ ID NO: 714172 - RNA, 19 nt, Homo sapiens
  misc_RNA (1)...(19): siRNA sense strand
gaaaggcaacaagagcuua

SEQ ID NO: 714173 - RNA, 19 nt, Homo sapiens
  misc_RNA (1)...(19): siRNA sense strand
gugcuuaccaugccaauuu

SEQ ID NO: 714174 - RNA, 19 nt, Homo sapiens
  misc_RNA (1)...(19): siRNA sense strand
ccucaaacacugaagauuu

SEQ ID NO: 714175 - RNA, 19 nt, Homo sapiens
  misc_RNA (1)...(19): siRNA sense strand
ccagaugugagguuuguua

SEQ ID NO: 714176 - RNA, 19 nt, Homo sapiens
  misc_RNA (1)...(19): siRNA sense strand
cuacggcuuuggagauaua

SEQ ID NO: 714177 - RNA, 19 nt, Homo sapiens
  misc_RNA (1)...(19): siRNA sense strand
cugaggaacuggauucuau

SEQ ID NO: 714178 - RNA, 19 nt, Homo sapiens
  misc_RNA (1)...(19): siRNA sense strand
gaauugcuguggaugaagu

SEQ ID NO: 714179 - RNA, 19 nt, Homo sapiens
  misc_RNA (1)...(19): siRNA sense strand
gagaaagccuaugaagcaa

SEQ ID NO: 714180 - RNA, 19 nt, Homo sapiens
  misc_RNA (1)...(19): siRNA sense strand
gagaguagcagguguugug

SEQ ID NO: 714181 - RNA, 19 nt, Homo sapiens
  misc_RNA (1)...(19): siRNA sense strand
caugaaagcagacuguauu

SEQ ID NO: 714182 - RNA, 19 nt, Homo sapiens
  misc_RNA (1)...(19): siRNA sense strand
uaaggagcauguuaaaugg

SEQ ID NO: 714183 - RNA, 19 nt, Homo sapiens
  misc_RNA (1)...(19): siRNA sense strand
gaagcuuuaugagauggua

SEQ ID NO: 714184 - RNA, 19 nt, Homo sapiens
  misc_RNA (1)...(19): siRNA sense strand
ccuaacgcaucacuaauug

SEQ ID NO: 714185 - RNA, 19 nt, Homo sapiens
  misc_RNA (1)...(19): siRNA sense strand
ucagaccacuucagcuuga

SEQ ID NO: 714186 - RNA, 19 nt, Homo sapiens
  misc_RNA (1)...(19): siRNA sense strand
gaaagcagacuguauuuug

SEQ ID NO: 714187 - RNA, 19 nt, Homo sapiens
  misc_RNA (1)...(19): siRNA sense strand
gauuauaaggcacuuggua

SEQ ID NO: 714188 - RNA, 19 nt, Homo sapiens
  misc_RNA (1)...(19): siRNA sense strand
gggcaagcaaugaauauga

SEQ ID NO: 714189 - RNA, 19 nt, Homo sapiens
  misc_RNA (1)...(19): siRNA sense strand
cagaggaacugaaugaaaa

SEQ ID NO: 714190 - RNA, 19 nt, Homo sapiens
  misc_RNA (1)...(19): siRNA sense strand
gacagugcauuugaaagaa

SEQ ID NO: 714191 - RNA, 19 nt, Homo sapiens
  misc_RNA (1)...(19): siRNA sense strand
gaggaacuggauucuauaa

SEQ ID NO: 714192 - RNA, 19 nt, Homo sapiens
  misc_RNA (1)...(19): siRNA sense strand
agagaaagccuaugaagca

SEQ ID NO: 714193 - RNA, 19 nt, Homo sapiens
  misc_RNA (1)...(19): siRNA sense strand
ugacaaaguccacgcagaa

SEQ ID NO: 714194 - RNA, 19 nt, Homo sapiens
  misc_RNA (1)...(19): siRNA sense strand
cagcagaagcuuuaugaga

SEQ ID NO: 714195 - RNA, 19 nt, Homo sapiens
  misc_RNA (1)...(19): siRNA sense strand
gacagcagaagcuuuauga

SEQ ID NO: 714196 - RNA, 19 nt, Homo sapiens
  misc_RNA (1)...(19): siRNA sense strand
guuaaaugcuucuaguucu

SEQ ID NO: 714197 - RNA, 19 nt, Homo sapiens
  misc_RNA (1)...(19): siRNA sense strand
gaacaaguuacgguuaguu

SEQ ID NO: 714198 - RNA, 19 nt, Homo sapiens
  misc_RNA (1)...(19): siRNA sense strand
ccaguuaccagcauuaugu

SEQ ID NO: 714199 - RNA, 19 nt, Homo sapiens
  misc_RNA (1)...(19): siRNA sense strand
gcuaccauuucguauuuga

SEQ ID NO: 714200 - RNA, 19 nt, Homo sapiens
  misc_RNA (1)...(19): siRNA sense strand
ggaacuggauucuauaacc

SEQ ID NO: 714201 - RNA, 19 nt, Homo sapiens
  misc_RNA (1)...(19): siRNA sense strand
uaaagcggcaguucccuaa

SEQ ID NO: 714202 - RNA, 19 nt, Homo sapiens
  misc_RNA (1)...(19): siRNA sense strand
cagcaaccauguuaaaugc

SEQ ID NO: 714203 - RNA, 19 nt, Homo sapiens
  misc_RNA (1)...(19): siRNA sense strand
gcccauugaucucucuuau

SEQ ID NO: 714204 - RNA, 19 nt, Homo sapiens
  misc_RNA (1)...(19): siRNA sense strand
uauggaagaccaauuaaug

SEQ ID NO: 714205 - RNA, 19 nt, Homo sapiens
  misc_RNA (1)...(19): siRNA sense strand
ugaaucgucucaaacuugu

SEQ ID NO: 714206 - RNA, 19 nt, Homo sapiens
  misc_RNA (1)...(19): siRNA sense strand
uaaucaagauccugaagca

SEQ ID NO: 714207 - RNA, 19 nt, Homo sapiens
  misc_RNA (1)...(19): siRNA sense strand
gaauugauaagccagaugu

SEQ ID NO: 714208 - RNA, 19 nt, Homo sapiens
  misc_RNA (1)...(19): siRNA sense strand
agaccacaguucauagaaa

SEQ ID NO: 714209 - RNA, 19 nt, Homo sapiens
  misc_RNA (1)...(19): siRNA sense strand
uuguaaagcucauuaaugg

SEQ ID NO: 714210 - RNA, 19 nt, Homo sapiens
  misc_RNA (1)...(19): siRNA sense strand
ggcaagcaaugaauaugau

SEQ ID NO: 714211 - RNA, 19 nt, Homo sapiens
  misc_RNA (1)...(19): siRNA sense strand
guucuaaggagcauguuaa

SEQ ID NO: 714212 - RNA, 19 nt, Homo sapiens
  misc_RNA (1)...(19): siRNA sense strand
gaaaauggucagccaauga

SEQ ID NO: 714213 - RNA, 19 nt, Homo sapiens
  misc_RNA (1)...(19): siRNA sense strand
uuaugugacuccagagaaa

SEQ ID NO: 714214 - RNA, 19 nt, Homo sapiens
  misc_RNA (1)...(19): siRNA sense strand
ggaaaggcaacaagagcuu

SEQ ID NO: 714215 - RNA, 19 nt, Homo sapiens
  misc_RNA (1)...(19): siRNA sense strand
gggaaagggugcagcaaaa

SEQ ID NO: 714216 - RNA, 19 nt, Homo sapiens
  misc_RNA (1)...(19): siRNA sense strand
ccauugaaacugauugauu

SEQ ID NO: 714217 - RNA, 19 nt, Homo sapiens
  misc_RNA (1)...(19): siRNA sense strand
agacagugcauuugaaaga

SEQ ID NO: 714218 - RNA, 19 nt, Homo sapiens
  misc_RNA (1)...(19): siRNA sense strand
uaagccagaugugagguuu

SEQ ID NO: 714219 - RNA, 19 nt, Homo sapiens
  misc_RNA (1)...(19): siRNA sense strand
uaugaagcaaggagauuua

SEQ ID NO: 714220 - RNA, 19 nt, Homo sapiens
  misc_RNA (1)...(19): siRNA sense strand
gcugaaucgucucaaacuu

SEQ ID NO: 714221 - RNA, 19 nt, Homo sapiens
  misc_RNA (1)...(19): siRNA sense strand
gauuauugcacacuuucua

SEQ ID NO: 714222 - RNA, 19 nt, Homo sapiens
  misc_RNA (1)...(19): siRNA sense strand
caaggagauuuacucgaau

SEQ ID NO: 714223 - RNA, 19 nt, Homo sapiens
  misc_RNA (1)...(19): siRNA sense strand
gaccacaguucauagaaaa

SEQ ID NO: 714224 - RNA, 19 nt, Homo sapiens
  misc_RNA (1)...(19): siRNA sense strand
augcuaccauuucguauuu

SEQ ID NO: 714225 - RNA, 19 nt, Homo sapiens
  misc_RNA (1)...(19): siRNA sense strand
gcaaaugucgucguguguu

SEQ ID NO: 714226 - RNA, 19 nt, Homo sapiens
  misc_RNA (1)...(19): siRNA sense strand
gaugugagguuuguuaucc

SEQ ID NO: 714227 - RNA, 19 nt, Homo sapiens
  misc_RNA (1)...(19): siRNA sense strand
uaacugaggaacuggauuc

SEQ ID NO: 714228 - RNA, 19 nt, Homo sapiens
  misc_RNA (1)...(19): siRNA sense strand
ugcgauaacugcuguaaag

SEQ ID NO: 714229 - RNA, 19 nt, Homo sapiens
  misc_RNA (1)...(19): siRNA sense strand
agcagaagcuuuaugagau

SEQ ID NO: 714230 - RNA, 19 nt, Homo sapiens
  misc_RNA (1)...(19): siRNA sense strand
guucaaugguggugaugga

SEQ ID NO: 714231 - RNA, 19 nt, Homo sapiens
  misc_RNA (1)...(19): siRNA sense strand
uccauggucugguaaaguu

SEQ ID NO: 714232 - RNA, 19 nt, Homo sapiens
  misc_RNA (1)...(19): siRNA sense strand
gcagaagcccucaaacacu

SEQ ID NO: 714233 - RNA, 19 nt, Homo sapiens
  misc_RNA (1)...(19): siRNA sense strand
cagaaaauuuugugcauug

SEQ ID NO: 714234 - RNA, 19 nt, Homo sapiens
  misc_RNA (1)...(19): siRNA sense strand
gaagcaaggagauuuacuc

SEQ ID NO: 714235 - RNA, 19 nt, Homo sapiens
  misc_RNA (1)...(19): siRNA sense strand
ugggacagcagaagcuuua

SEQ ID NO: 714236 - RNA, 19 nt, Homo sapiens
  misc_RNA (1)...(19): siRNA sense strand
gcuauuacuaugcaaguga

SEQ ID NO: 714237 - RNA, 19 nt, Homo sapiens
  misc_RNA (1)...(19): siRNA sense strand
caaugaggcacaugcuauu

SEQ ID NO: 714238 - RNA, 19 nt, Homo sapiens
  misc_RNA (1)...(19): siRNA sense strand
acaagagcuuauucagaaa

SEQ ID NO: 714239 - RNA, 19 nt, Homo sapiens
  misc_RNA (1)...(19): siRNA sense strand
aaagacagugcauuugaaa

SEQ ID NO: 714240 - RNA, 19 nt, Homo sapiens
  misc_RNA (1)...(19): siRNA sense strand
ggaacucagaagcauguaa

SEQ ID NO: 714241 - RNA, 19 nt, Homo sapiens
  misc_RNA (1)...(19): siRNA sense strand
ggacagcagaagcuuuaug

SEQ ID NO: 714242 - RNA, 19 nt, Homo sapiens
  misc_RNA (1)...(19): siRNA sense strand
gaaagacucugaacaaguu

SEQ ID NO: 714243 - RNA, 19 nt, Homo sapiens
  misc_RNA (1)...(19): siRNA sense strand
gagcuuauguuaccaguua

SEQ ID NO: 714244 - RNA, 19 nt, Homo sapiens
  misc_RNA (1)...(19): siRNA sense strand
gaagaaggcugcaaacaug

SEQ ID NO: 714245 - RNA, 19 nt, Homo sapiens
  misc_RNA (1)...(19): siRNA sense strand
gcaaggagauuuacucgaa

SEQ ID NO: 714246 - RNA, 19 nt, Homo sapiens
  misc_RNA (1)...(19): siRNA sense strand
ggccaaaucuauauuauga

SEQ ID NO: 714247 - RNA, 19 nt, Homo sapiens
  misc_RNA (1)...(19): siRNA sense strand
gaagauuauugcacacuuu

SEQ ID NO: 714248 - RNA, 19 nt, Homo sapiens
  misc_RNA (1)...(19): siRNA sense strand
ggaaagagcuuauguuacc

SEQ ID NO: 714249 - RNA, 19 nt, Homo sapiens
  misc_RNA (1)...(19): siRNA sense strand
gaaguucacugcuguaguc

SEQ ID NO: 714250 - RNA, 19 nt, Homo sapiens
  misc_RNA (1)...(19): siRNA sense strand
aacaagagcuuauucagaa

SEQ ID NO: 714251 - RNA, 19 nt, Homo sapiens
  misc_RNA (1)...(19): siRNA sense strand
gauaagaccacaguucaua

SEQ ID NO: 714252 - RNA, 19 nt, Homo sapiens
  misc_RNA (1)...(19): siRNA sense strand
ggagguauuucuuguuaug

SEQ ID NO: 714253 - RNA, 19 nt, Homo sapiens
  misc_RNA (1)...(19): siRNA sense strand
gcuugaaacuauuaacgua

SEQ ID NO: 714254 - RNA, 19 nt, Homo sapiens
  misc_RNA (1)...(19): siRNA sense strand
uaaagacagugcauuugaa

SEQ ID NO: 714255 - RNA, 19 nt, Homo sapiens
  misc_RNA (1)...(19): siRNA sense strand
aaggagguauuucuuguua

SEQ ID NO: 714256 - RNA, 19 nt, Homo sapiens
  misc_RNA (1)...(19): siRNA sense strand
gcagaagcuuuaugagaug

SEQ ID NO: 714257 - RNA, 19 nt, Homo sapiens
  misc_RNA (1)...(19): siRNA sense strand
gauaacugcuguaaagaca

SEQ ID NO: 714258 - RNA, 19 nt, Homo sapiens
  misc_RNA (1)...(19): siRNA sense strand
guggaaagagcuuauguua

SEQ ID NO: 714259 - RNA, 19 nt, Homo sapiens
  misc_RNA (1)...(19): siRNA sense strand
guaaagacagugcauuuga

SEQ ID NO: 714260 - RNA, 19 nt, Homo sapiens
  misc_RNA (1)...(19): siRNA sense strand
gaagauaagaccacaguuc

SEQ ID NO: 714261 - RNA, 19 nt, Homo sapiens
  misc_RNA (1)...(19): siRNA sense strand
gaauacaggagcuaagaaa

SEQ ID NO: 714262 - RNA, 19 nt, Homo sapiens
  misc_RNA (1)...(19): siRNA sense strand
gcagaggaacugaaugaaa

SEQ ID NO: 714263 - RNA, 19 nt, Homo sapiens
  misc_RNA (1)...(19): siRNA sense strand
gaacuggauucuauaacca

SEQ ID NO: 714264 - RNA, 19 nt, Homo sapiens
  misc_RNA (1)...(19): siRNA sense strand
caacaagagcuuauucaga

SEQ ID NO: 714265 - RNA, 19 nt, Homo sapiens
  misc_RNA (1)...(19): siRNA sense strand
ugaaacugauugauucuug

SEQ ID NO: 714266 - RNA, 19 nt, Homo sapiens
  misc_RNA (1)...(19): siRNA sense strand
gcaaucaggaaucauauau

SEQ ID NO: 714267 - RNA, 19 nt, Homo sapiens
  misc_RNA (1)...(19): siRNA sense strand
gcaguucccuaacgcauca

SEQ ID NO: 714268 - RNA, 19 nt, Homo sapiens
  misc_RNA (1)...(19): siRNA sense strand
gcaaccauguuaaaugcuu

SEQ ID NO: 714269 - RNA, 19 nt, Homo sapiens
  misc_RNA (1)...(19): siRNA sense strand
cuaaggagcauguuaaaug

SEQ ID NO: 714270 - RNA, 19 nt, Homo sapiens
  misc_RNA (1)...(19): siRNA sense strand
caaaugucgucguguguug

SEQ ID NO: 714271 - RNA, 19 nt, Homo sapiens
  misc_RNA (1)...(19): siRNA sense strand
cauugaaacugauugauuc

SEQ ID NO: 714272 - RNA, 19 nt, Homo sapiens
  misc_RNA (1)...(19): siRNA sense strand
gaaaggcaacaagagcuua

SEQ ID NO: 714273 - RNA, 19 nt, Homo sapiens
  misc_RNA (1)...(19): siRNA sense strand
gugcuuaccaugccaauuu

SEQ ID NO: 714274 - RNA, 19 nt, Homo sapiens
  misc_RNA (1)...(19): siRNA sense strand
ccucaaacacugaagauuu

SEQ ID NO: 714275 - RNA, 19 nt, Homo sapiens
  misc_RNA (1)...(19): siRNA sense strand
ccagaugugagguuuguua

SEQ ID NO: 714276 - RNA, 19 nt, Homo sapiens
  misc_RNA (1)...(19): siRNA sense strand
cuacggcuuuggagauaua

SEQ ID NO: 714277 - RNA, 19 nt, Homo sapiens
  misc_RNA (1)...(19): siRNA sense strand
cugaggaacuggauucuau

SEQ ID NO: 714278 - RNA, 19 nt, Homo sapiens
  misc_RNA (1)...(19): siRNA sense strand
gaauugcuguggaugaagu

SEQ ID NO: 714279 - RNA, 19 nt, Homo sapiens
  misc_RNA (1)...(19): siRNA sense strand
gagaaagccuaugaagcaa

SEQ ID NO: 714280 - RNA, 19 nt, Homo sapiens
  misc_RNA (1)...(19): siRNA sense strand
gagaguagcagguguugug

SEQ ID NO: 714281 - RNA, 19 nt, Homo sapiens
  misc_RNA (1)...(19): siRNA sense strand
caugaaagcagacuguauu

SEQ ID NO: 714282 - RNA, 19 nt, Homo sapiens
  misc_RNA (1)...(19): siRNA sense strand
uaaggagcauguuaaaugg

SEQ ID NO: 714283 - RNA, 19 nt, Homo sapiens
  misc_RNA (1)...(19): siRNA sense strand
gaagcuuuaugagauggua

SEQ ID NO: 714284 - RNA, 19 nt, Homo sapiens
  misc_RNA (1)...(19): siRNA sense strand
ccuaacgcaucacuaauug

SEQ ID NO: 714285 - RNA, 19 nt, Homo sapiens
  misc_RNA (1)...(19): siRNA sense strand
ucagaccacuucagcuuga

SEQ ID NO: 714286 - RNA, 19 nt, Homo sapiens
  misc_RNA (1)...(19): siRNA sense strand
gaaagcagacuguauuuug

SEQ ID NO: 714287 - RNA, 19 nt, Homo sapiens
  misc_RNA (1)...(19): siRNA sense strand
gauuauaaggcacuuggua

SEQ ID NO: 714288 - RNA, 19 nt, Homo sapiens
  misc_RNA (1)...(19): siRNA sense strand
gggcaagcaaugaauauga

SEQ ID NO: 714289 - RNA, 19 nt, Homo sapiens
  misc_RNA (1)...(19): siRNA sense strand
cagaggaacugaaugaaaa

SEQ ID NO: 714290 - RNA, 19 nt, Homo sapiens
  misc_RNA (1)...(19): siRNA sense strand
gacagugcauuugaaagaa

SEQ ID NO: 714291 - RNA, 19 nt, Homo sapiens
  misc_RNA (1)...(19): siRNA sense strand
gaggaacuggauucuauaa

SEQ ID NO: 714292 - RNA, 19 nt, Homo sapiens
  misc_RNA (1)...(19): siRNA sense strand
agagaaagccuaugaagca

SEQ ID NO: 714293 - RNA, 19 nt, Homo sapiens
  misc_RNA (1)...(19): siRNA sense strand
ugacaaaguccacgcagaa

SEQ ID NO: 714294 - RNA, 19 nt, Homo sapiens
  misc_RNA (1)...(19): siRNA sense strand
cagcagaagcuuuaugaga

SEQ ID NO: 714295 - RNA, 19 nt, Homo sapiens
  misc_RNA (1)...(19): siRNA sense strand
gacagcagaagcuuuauga

SEQ ID NO: 714296 - RNA, 19 nt, Homo sapiens
  misc_RNA (1)...(19): siRNA sense strand
guuaaaugcuucuaguucu

SEQ ID NO: 714297 - RNA, 19 nt, Homo sapiens
  misc_RNA (1)...(19): siRNA sense strand
gaacaaguuacgguuaguu

SEQ ID NO: 714298 - RNA, 19 nt, Homo sapiens
  misc_RNA (1)...(19): siRNA sense strand
ccaguuaccagcauuaugu

SEQ ID NO: 714299 - RNA, 19 nt, Homo sapiens
  misc_RNA (1)...(19): siRNA sense strand
gcuaccauuucguauuuga

SEQ ID NO: 714300 - RNA, 19 nt, Homo sapiens
  misc_RNA (1)...(19): siRNA sense strand
ggaacuggauucuauaacc

SEQ ID NO: 714301 - RNA, 19 nt, Homo sapiens
  misc_RNA (1)...(19): siRNA sense strand
uaaagcggcaguucccuaa

SEQ ID NO: 714302 - RNA, 19 nt, Homo sapiens
  misc_RNA (1)...(19): siRNA sense strand
cagcaaccauguuaaaugc

SEQ ID NO: 714303 - RNA, 19 nt, Homo sapiens
  misc_RNA (1)...(19): siRNA sense strand
gcccauugaucucucuuau

SEQ ID NO: 714304 - RNA, 19 nt, Homo sapiens
  misc_RNA (1)...(19): siRNA sense strand
uauggaagaccaauuaaug

SEQ ID NO: 714305 - RNA, 19 nt, Homo sapiens
  misc_RNA (1)...(19): siRNA sense strand
ugaaucgucucaaacuugu

SEQ ID NO: 714306 - RNA, 19 nt, Homo sapiens
  misc_RNA (1)...(19): siRNA sense strand
uaaucaagauccugaagca

SEQ ID NO: 714307 - RNA, 19 nt, Homo sapiens
  misc_RNA (1)...(19): siRNA sense strand
gaauugauaagccagaugu

SEQ ID NO: 714308 - RNA, 19 nt, Homo sapiens
  misc_RNA (1)...(19): siRNA sense strand
agaccacaguucauagaaa

SEQ ID NO: 714309 - RNA, 19 nt, Homo sapiens
  misc_RNA (1)...(19): siRNA sense strand
uuguaaagcucauuaaugg

SEQ ID NO: 714310 - RNA, 19 nt, Homo sapiens
  misc_RNA (1)...(19): siRNA sense strand
ggcaagcaaugaauaugau

SEQ ID NO: 714311 - RNA, 19 nt, Homo sapiens
  misc_RNA (1)...(19): siRNA sense strand
guucuaaggagcauguuaa

SEQ ID NO: 714312 - RNA, 19 nt, Homo sapiens
  misc_RNA (1)...(19): siRNA sense strand
gaaaauggucagccaauga

SEQ ID NO: 714313 - RNA, 19 nt, Homo sapiens
  misc_RNA (1)...(19): siRNA sense strand
uuaugugacuccagagaaa

SEQ ID NO: 714314 - RNA, 19 nt, Homo sapiens
  misc_RNA (1)...(19): siRNA sense strand
ggaaaggcaacaagagcuu

SEQ ID NO: 714315 - RNA, 19 nt, Homo sapiens
  misc_RNA (1)...(19): siRNA sense strand
gggaaagggugcagcaaaa

SEQ ID NO: 714316 - RNA, 19 nt, Homo sapiens
  misc_RNA (1)...(19): siRNA sense strand
ccauugaaacugauugauu

SEQ ID NO: 714317 - RNA, 19 nt, Homo sapiens
  misc_RNA (1)...(19): siRNA sense strand
agacagugcauuugaaaga

SEQ ID NO: 714318 - RNA, 19 nt, Homo sapiens
  misc_RNA (1)...(19): siRNA sense strand
uaagccagaugugagguuu

SEQ ID NO: 714319 - RNA, 19 nt, Homo sapiens
  misc_RNA (1)...(19): siRNA sense strand
uaugaagcaaggagauuua

SEQ ID NO: 714320 - RNA, 19 nt, Homo sapiens
  misc_RNA (1)...(19): siRNA sense strand
gcugaaucgucucaaacuu

SEQ ID NO: 714321 - RNA, 19 nt, Homo sapiens
  misc_RNA (1)...(19): siRNA sense strand
gauuauugcacacuuucua

SEQ ID NO: 714322 - RNA, 19 nt, Homo sapiens
  misc_RNA (1)...(19): siRNA sense strand
caaggagauuuacucgaau

SEQ ID NO: 714323 - RNA, 19 nt, Homo sapiens
  misc_RNA (1)...(19): siRNA sense strand
gaccacaguucauagaaaa

SEQ ID NO: 714324 - RNA, 19 nt, Homo sapiens
  misc_RNA (1)...(19): siRNA sense strand
augcuaccauuucguauuu

SEQ ID NO: 714325 - RNA, 19 nt, Homo sapiens
  misc_RNA (1)...(19): siRNA sense strand
gcaaaugucgucguguguu

SEQ ID NO: 714326 - RNA, 19 nt, Homo sapiens
  misc_RNA (1)...(19): siRNA sense strand
gaugugagguuuguuaucc

SEQ ID NO: 714327 - RNA, 19 nt, Homo sapiens
  misc_RNA (1)...(19): siRNA sense strand
uaacugaggaacuggauuc

SEQ ID NO: 714328 - RNA, 19 nt, Homo sapiens
  misc_RNA (1)...(19): siRNA sense strand
ugcgauaacugcuguaaag

SEQ ID NO: 714329 - RNA, 19 nt, Homo sapiens
  misc_RNA (1)...(19): siRNA sense strand
agcagaagcuuuaugagau

SEQ ID NO: 714330 - RNA, 19 nt, Homo sapiens
  misc_RNA (1)...(19): siRNA sense strand
guucaaugguggugaugga

SEQ ID NO: 714331 - RNA, 19 nt, Homo sapiens
  misc_RNA (1)...(19): siRNA sense strand
uccauggucugguaaaguu

SEQ ID NO: 714332 - RNA, 19 nt, Homo sapiens
  misc_RNA (1)...(19): siRNA sense strand
gcagaagcccucaaacacu

SEQ ID NO: 714333 - RNA, 19 nt, Homo sapiens
  misc_RNA (1)...(19): siRNA sense strand
cagaaaauuuugugcauug

SEQ ID NO: 714334 - RNA, 19 nt, Homo sapiens
  misc_RNA (1)...(19): siRNA sense strand
gaagcaaggagauuuacuc

SEQ ID NO: 714335 - RNA, 19 nt, Homo sapiens
  misc_RNA (1)...(19): siRNA sense strand
ugggacagcagaagcuuua

SEQ ID NO: 714336 - RNA, 19 nt, Homo sapiens
  misc_RNA (1)...(19): siRNA sense strand
gcuauuacuaugcaaguga

SEQ ID NO: 714337 - RNA, 19 nt, Homo sapiens
  misc_RNA (1)...(19): siRNA sense strand
caaugaggcacaugcuauu

SEQ ID NO: 714338 - RNA, 19 nt, Homo sapiens
  misc_RNA (1)...(19): siRNA sense strand
acaagagcuuauucagaaa

SEQ ID NO: 714339 - RNA, 19 nt, Homo sapiens
  misc_RNA (1)...(19): siRNA sense strand
aaagacagugcauuugaaa

SEQ ID NO: 714340 - RNA, 19 nt, Homo sapiens
  misc_RNA (1)...(19): siRNA sense strand
ggaacucagaagcauguaa

SEQ ID NO: 714341 - RNA, 19 nt, Homo sapiens
  misc_RNA (1)...(19): siRNA sense strand
ggacagcagaagcuuuaug

SEQ ID NO: 714342 - RNA, 19 nt, Homo sapiens
  misc_RNA (1)...(19): siRNA sense strand
gaaccugucucuccauguu

SEQ ID NO: 714343 - RNA, 19 nt, Homo sapiens
  misc_RNA (1)...(19): siRNA sense strand
ggagaaagaagaaagagua

SEQ ID NO: 714344 - RNA, 19 nt, Homo sapiens
  misc_RNA (1)...(19): siRNA sense strand
gcccaaaccuguagugcua

SEQ ID NO: 714345 - RNA, 19 nt, Homo sapiens
  misc_RNA (1)...(19): siRNA sense strand
gaagucaccuccaguuaag

SEQ ID NO: 714346 - RNA, 19 nt, Homo sapiens
  misc_RNA (1)...(19): siRNA sense strand
aaacagcgagcucaaguua

SEQ ID NO: 714347 - RNA, 19 nt, Homo sapiens
  misc_RNA (1)...(19): siRNA sense strand
ccacagaccagcccaguuu

SEQ ID NO: 714348 - RNA, 19 nt, Homo sapiens
  misc_RNA (1)...(19): siRNA sense strand
ggagcaggaugucccguuu

SEQ ID NO: 714349 - RNA, 19 nt, Homo sapiens
  misc_RNA (1)...(19): siRNA sense strand
gaaagaagaaagaguaucu

SEQ ID NO: 714350 - RNA, 19 nt, Homo sapiens
  misc_RNA (1)...(19): siRNA sense strand
gaagaagucaccuccaguu

SEQ ID NO: 714351 - RNA, 19 nt, Homo sapiens
  misc_RNA (1)...(19): siRNA sense strand
gcuaaccacugucccaaug

SEQ ID NO: 714352 - RNA, 19 nt, Homo sapiens
  misc_RNA (1)...(19): siRNA sense strand
ccaaggagcuacuacuaag

SEQ ID NO: 714353 - RNA, 19 nt, Homo sapiens
  misc_RNA (1)...(19): siRNA sense strand
ccaacauccucauuugaaa

SEQ ID NO: 714354 - RNA, 19 nt, Homo sapiens
  misc_RNA (1)...(19): siRNA sense strand
gacccaacauccucauuug

SEQ ID NO: 714355 - RNA, 19 nt, Homo sapiens
  misc_RNA (1)...(19): siRNA sense strand
gaacagcaccuuguauucu

SEQ ID NO: 714356 - RNA, 19 nt, Homo sapiens
  misc_RNA (1)...(19): siRNA sense strand
ggucuuccuucucuucauu

SEQ ID NO: 714357 - RNA, 19 nt, Homo sapiens
  misc_RNA (1)...(19): siRNA sense strand
gaggcuugcugacgaguug

SEQ ID NO: 714358 - RNA, 19 nt, Homo sapiens
  misc_RNA (1)...(19): siRNA sense strand
guucuuccgucaacucuga

SEQ ID NO: 714359 - RNA, 19 nt, Homo sapiens
  misc_RNA (1)...(19): siRNA sense strand
gaagguggucugcaucaug

SEQ ID NO: 714360 - RNA, 19 nt, Homo sapiens
  misc_RNA (1)...(19): siRNA sense strand
cagaacagcaccuuguauu

SEQ ID NO: 714361 - RNA, 19 nt, Homo sapiens
  misc_RNA (1)...(19): siRNA sense strand
ugaugcagaucgaguguga

SEQ ID NO: 714362 - RNA, 19 nt, Homo sapiens
  misc_RNA (1)...(19): siRNA sense strand
ccucagauguccagaccaa

SEQ ID NO: 714363 - RNA, 19 nt, Homo sapiens
  misc_RNA (1)...(19): siRNA sense strand
caagauagaaccugucucu

SEQ ID NO: 714364 - RNA, 19 nt, Homo sapiens
  misc_RNA (1)...(19): siRNA sense strand
gccaaggagcuacuacuaa

SEQ ID NO: 714365 - RNA, 19 nt, Homo sapiens
  misc_RNA (1)...(19): siRNA sense strand
gcagaacagcaccuuguau

SEQ ID NO: 714366 - RNA, 19 nt, Homo sapiens
  misc_RNA (1)...(19): siRNA sense strand
agaagucaccuccaguuaa

SEQ ID NO: 714367 - RNA, 19 nt, Homo sapiens
  misc_RNA (1)...(19): siRNA sense strand
gagaaagaagaaagaguau

SEQ ID NO: 714368 - RNA, 19 nt, Homo sapiens
  misc_RNA (1)...(19): siRNA sense strand
gaucgagugugaggucaug

SEQ ID NO: 714369 - RNA, 19 nt, Homo sapiens
  misc_RNA (1)...(19): siRNA sense strand
cuucauugccuucaacuuu

SEQ ID NO: 714370 - RNA, 19 nt, Homo sapiens
  misc_RNA (1)...(19): siRNA sense strand
caucgcgucucuccacaga

SEQ ID NO: 714371 - RNA, 19 nt, Homo sapiens
  misc_RNA (1)...(19): siRNA sense strand
ugggccagcugcaacuaua

SEQ ID NO: 714372 - RNA, 19 nt, Homo sapiens
  misc_RNA (1)...(19): siRNA sense strand
cagagaggccggaggaaga

SEQ ID NO: 714373 - RNA, 19 nt, Homo sapiens
  misc_RNA (1)...(19): siRNA sense strand
caagaugucccuggugaug

SEQ ID NO: 714374 - RNA, 19 nt, Homo sapiens
  misc_RNA (1)...(19): siRNA sense strand
ugacccaacauccucauuu

SEQ ID NO: 714375 - RNA, 19 nt, Homo sapiens
  misc_RNA (1)...(19): siRNA sense strand
aagaagucaccuccaguua

SEQ ID NO: 714376 - RNA, 19 nt, Homo sapiens
  misc_RNA (1)...(19): siRNA sense strand
gggaacuccugccgaucuu

SEQ ID NO: 714377 - RNA, 19 nt, Homo sapiens
  misc_RNA (1)...(19): siRNA sense strand
cagcagcgaaugaucaaga

SEQ ID NO: 714378 - RNA, 19 nt, Homo sapiens
  misc_RNA (1)...(19): siRNA sense strand
cgccugaaguggaugcaaa

SEQ ID NO: 714379 - RNA, 19 nt, Homo sapiens
  misc_RNA (1)...(19): siRNA sense strand
ggugaagucugagccaucu

SEQ ID NO: 714380 - RNA, 19 nt, Homo sapiens
  misc_RNA (1)...(19): siRNA sense strand
acagcgagcucaaguuagg

SEQ ID NO: 714381 - RNA, 19 nt, Homo sapiens
  misc_RNA (1)...(19): siRNA sense strand
aagcaguacuggcugacaa

SEQ ID NO: 714382 - RNA, 19 nt, Homo sapiens
  misc_RNA (1)...(19): siRNA sense strand
acaggaagguggucugcau

SEQ ID NO: 714383 - RNA, 19 nt, Homo sapiens
  misc_RNA (1)...(19): siRNA sense strand
ggaagguggucugcaucau

SEQ ID NO: 714384 - RNA, 19 nt, Homo sapiens
  misc_RNA (1)...(19): siRNA sense strand
ucagauguccagaccaaga

SEQ ID NO: 714385 - RNA, 19 nt, Homo sapiens
  misc_RNA (1)...(19): siRNA sense strand
gccaucagccacaacaaga

SEQ ID NO: 714386 - RNA, 19 nt, Homo sapiens
  misc_RNA (1)...(19): siRNA sense strand
gcagccagcauucuuggau

SEQ ID NO: 714387 - RNA, 19 nt, Homo sapiens
  misc_RNA (1)...(19): siRNA sense strand
gaucaagaaccgggaguca

SEQ ID NO: 714388 - RNA, 19 nt, Homo sapiens
  misc_RNA (1)...(19): siRNA sense strand
cccaacauccucauuugaa

SEQ ID NO: 714389 - RNA, 19 nt, Homo sapiens
  misc_RNA (1)...(19): siRNA sense strand
caaguuagggucuggaaac

SEQ ID NO: 714390 - RNA, 19 nt, Homo sapiens
  misc_RNA (1)...(19): siRNA sense strand
gaaaacagcgagcucaagu

SEQ ID NO: 714391 - RNA, 19 nt, Homo sapiens
  misc_RNA (1)...(19): siRNA sense strand
agcaggaugucccguuuga

SEQ ID NO: 714392 - RNA, 19 nt, Homo sapiens
  misc_RNA (1)...(19): siRNA sense strand
caaggagcuacuacuaaga

SEQ ID NO: 714393 - RNA, 19 nt, Homo sapiens
  misc_RNA (1)...(19): siRNA sense strand
cauccagggugcuauucga

SEQ ID NO: 714394 - RNA, 19 nt, Homo sapiens
  misc_RNA (1)...(19): siRNA sense strand
ucagagggcccaggagaga

SEQ ID NO: 714395 - RNA, 19 nt, Homo sapiens
  misc_RNA (1)...(19): siRNA sense strand
gagcaggaugucccguuug

SEQ ID NO: 714396 - RNA, 19 nt, Homo sapiens
  misc_RNA (1)...(19): siRNA sense strand
ggacuaugaggagaugaug

SEQ ID NO: 714397 - RNA, 19 nt, Homo sapiens
  misc_RNA (1)...(19): siRNA sense strand
uucauugccuucaacuuug

SEQ ID NO: 714398 - RNA, 19 nt, Homo sapiens
  misc_RNA (1)...(19): siRNA sense strand
augaggagaugaugcagau

SEQ ID NO: 714399 - RNA, 19 nt, Homo sapiens
  misc_RNA (1)...(19): siRNA sense strand
cgccaaggagcuacuacua

SEQ ID NO: 714400 - RNA, 19 nt, Homo sapiens
  misc_RNA (1)...(19): siRNA sense strand
caacauccucauuugaaac

SEQ ID NO: 714401 - RNA, 19 nt, Homo sapiens
  misc_RNA (1)...(19): siRNA sense strand
aacagcaccuuguauucug

SEQ ID NO: 714402 - RNA, 19 nt, Homo sapiens
  misc_RNA (1)...(19): siRNA sense strand
agaacagcaccuuguauuc

SEQ ID NO: 714403 - RNA, 19 nt, Homo sapiens
  misc_RNA (1)...(19): siRNA sense strand
uugcugacccgacgcguuu

SEQ ID NO: 714404 - RNA, 19 nt, Homo sapiens
  misc_RNA (1)...(19): siRNA sense strand
ccgcuccuaugccuggaaa

SEQ ID NO: 714405 - RNA, 19 nt, Homo sapiens
  misc_RNA (1)...(19): siRNA sense strand
uaccacggccugagaggaa

SEQ ID NO: 714406 - RNA, 19 nt, Homo sapiens
  misc_RNA (1)...(19): siRNA sense strand
guucgcagccagcauucuu

SEQ ID NO: 714407 - RNA, 19 nt, Homo sapiens
  misc_RNA (1)...(19): siRNA sense strand
ugauggcuccucaggcaaa

SEQ ID NO: 714408 - RNA, 19 nt, Homo sapiens
  misc_RNA (1)...(19): siRNA sense strand
gaugaugcagaucgagugu

SEQ ID NO: 714409 - RNA, 19 nt, Homo sapiens
  misc_RNA (1)...(19): siRNA sense strand
gacgggaagacacauuuua

SEQ ID NO: 714410 - RNA, 19 nt, Homo sapiens
  misc_RNA (1)...(19): siRNA sense strand
gcaucauggucuuccuucu

SEQ ID NO: 714411 - RNA, 19 nt, Homo sapiens
  misc_RNA (1)...(19): siRNA sense strand
gcagcuccgccgagagaau

SEQ ID NO: 714412 - RNA, 19 nt, Homo sapiens
  misc_RNA (1)...(19): siRNA sense strand
ccaaaccuguagugcuaac

SEQ ID NO: 714413 - RNA, 19 nt, Homo sapiens
  misc_RNA (1)...(19): siRNA sense strand
cggcagcagcgaaugauca

SEQ ID NO: 714414 - RNA, 19 nt, Homo sapiens
  misc_RNA (1)...(19): siRNA sense strand
gaaagacucugaacaaguu

SEQ ID NO: 714415 - RNA, 19 nt, Homo sapiens
  misc_RNA (1)...(19): siRNA sense strand
gagcuuauguuaccaguua

SEQ ID NO: 714416 - RNA, 19 nt, Homo sapiens
  misc_RNA (1)...(19): siRNA sense strand
gaagaaggcugcaaacaug

SEQ ID NO: 714417 - RNA, 19 nt, Homo sapiens
  misc_RNA (1)...(19): siRNA sense strand
gcaaggagauuuacucgaa

SEQ ID NO: 714418 - RNA, 19 nt, Homo sapiens
  misc_RNA (1)...(19): siRNA sense strand
ggccaaaucuauauuauga

SEQ ID NO: 714419 - RNA, 19 nt, Homo sapiens
  misc_RNA (1)...(19): siRNA sense strand
gaagauuauugcacacuuu

SEQ ID NO: 714420 - RNA, 19 nt, Homo sapiens
  misc_RNA (1)...(19): siRNA sense strand
ggaaagagcuuauguuacc

SEQ ID NO: 714421 - RNA, 19 nt, Homo sapiens
  misc_RNA (1)...(19): siRNA sense strand
gaaguucacugcuguaguc

SEQ ID NO: 714422 - RNA, 19 nt, Homo sapiens
  misc_RNA (1)...(19): siRNA sense strand
aacaagagcuuauucagaa

SEQ ID NO: 714423 - RNA, 19 nt, Homo sapiens
  misc_RNA (1)...(19): siRNA sense strand
gauaagaccacaguucaua

SEQ ID NO: 714424 - RNA, 19 nt, Homo sapiens
  misc_RNA (1)...(19): siRNA sense strand
ggagguauuucuuguuaug

SEQ ID NO: 714425 - RNA, 19 nt, Homo sapiens
  misc_RNA (1)...(19): siRNA sense strand
gcuugaaacuauuaacgua

SEQ ID NO: 714426 - RNA, 19 nt, Homo sapiens
  misc_RNA (1)...(19): siRNA sense strand
uaaagacagugcauuugaa

SEQ ID NO: 714427 - RNA, 19 nt, Homo sapiens
  misc_RNA (1)...(19): siRNA sense strand
aaggagguauuucuuguua

SEQ ID NO: 714428 - RNA, 19 nt, Homo sapiens
  misc_RNA (1)...(19): siRNA sense strand
gcagaagcuuuaugagaug

SEQ ID NO: 714429 - RNA, 19 nt, Homo sapiens
  misc_RNA (1)...(19): siRNA sense strand
gauaacugcuguaaagaca

SEQ ID NO: 714430 - RNA, 19 nt, Homo sapiens
  misc_RNA (1)...(19): siRNA sense strand
guggaaagagcuuauguua

SEQ ID NO: 714431 - RNA, 19 nt, Homo sapiens
  misc_RNA (1)...(19): siRNA sense strand
guaaagacagugcauuuga

SEQ ID NO: 714432 - RNA, 19 nt, Homo sapiens
  misc_RNA (1)...(19): siRNA sense strand
gaagauaagaccacaguuc

SEQ ID NO: 714433 - RNA, 19 nt, Homo sapiens
  misc_RNA (1)...(19): siRNA sense strand
gaauacaggagcuaagaaa

SEQ ID NO: 714434 - RNA, 19 nt, Homo sapiens
  misc_RNA (1)...(19): siRNA sense strand
gcagaggaacugaaugaaa

SEQ ID NO: 714435 - RNA, 19 nt, Homo sapiens
  misc_RNA (1)...(19): siRNA sense strand
gaacuggauucuauaacca

SEQ ID NO: 714436 - RNA, 19 nt, Homo sapiens
  misc_RNA (1)...(19): siRNA sense strand
caacaagagcuuauucaga

SEQ ID NO: 714437 - RNA, 19 nt, Homo sapiens
  misc_RNA (1)...(19): siRNA sense strand
ugaaacugauugauucuug

SEQ ID NO: 714438 - RNA, 19 nt, Homo sapiens
  misc_RNA (1)...(19): siRNA sense strand
gcaaucaggaaucauauau

SEQ ID NO: 714439 - RNA, 19 nt, Homo sapiens
  misc_RNA (1)...(19): siRNA sense strand
gcaguucccuaacgcauca

SEQ ID NO: 714440 - RNA, 19 nt, Homo sapiens
  misc_RNA (1)...(19): siRNA sense strand
gcaaccauguuaaaugcuu

SEQ ID NO: 714441 - RNA, 19 nt, Homo sapiens
  misc_RNA (1)...(19): siRNA sense strand
cuaaggagcauguuaaaug

SEQ ID NO: 714442 - RNA, 19 nt, Homo sapiens
  misc_RNA (1)...(19): siRNA sense strand
caaaugucgucguguguug

SEQ ID NO: 714443 - RNA, 19 nt, Homo sapiens
  misc_RNA (1)...(19): siRNA sense strand
cauugaaacugauugauuc

SEQ ID NO: 714444 - RNA, 19 nt, Homo sapiens
  misc_RNA (1)...(19): siRNA sense strand
gaaaggcaacaagagcuua

SEQ ID NO: 714445 - RNA, 19 nt, Homo sapiens
  misc_RNA (1)...(19): siRNA sense strand
gugcuuaccaugccaauuu

SEQ ID NO: 714446 - RNA, 19 nt, Homo sapiens
  misc_RNA (1)...(19): siRNA sense strand
ccucaaacacugaagauuu

SEQ ID NO: 714447 - RNA, 19 nt, Homo sapiens
  misc_RNA (1)...(19): siRNA sense strand
ccagaugugagguuuguua

SEQ ID NO: 714448 - RNA, 19 nt, Homo sapiens
  misc_RNA (1)...(19): siRNA sense strand
cuacggcuuuggagauaua

SEQ ID NO: 714449 - RNA, 19 nt, Homo sapiens
  misc_RNA (1)...(19): siRNA sense strand
cugaggaacuggauucuau

SEQ ID NO: 714450 - RNA, 19 nt, Homo sapiens
  misc_RNA (1)...(19): siRNA sense strand
gaauugcuguggaugaagu

SEQ ID NO: 714451 - RNA, 19 nt, Homo sapiens
  misc_RNA (1)...(19): siRNA sense strand
gagaaagccuaugaagcaa

SEQ ID NO: 714452 - RNA, 19 nt, Homo sapiens
  misc_RNA (1)...(19): siRNA sense strand
gagaguagcagguguugug

SEQ ID NO: 714453 - RNA, 19 nt, Homo sapiens
  misc_RNA (1)...(19): siRNA sense strand
caugaaagcagacuguauu

SEQ ID NO: 714454 - RNA, 19 nt, Homo sapiens
  misc_RNA (1)...(19): siRNA sense strand
uaaggagcauguuaaaugg

SEQ ID NO: 714455 - RNA, 19 nt, Homo sapiens
  misc_RNA (1)...(19): siRNA sense strand
gaagcuuuaugagauggua

SEQ ID NO: 714456 - RNA, 19 nt, Homo sapiens
  misc_RNA (1)...(19): siRNA sense strand
ccuaacgcaucacuaauug

SEQ ID NO: 714457 - RNA, 19 nt, Homo sapiens
  misc_RNA (1)...(19): siRNA sense strand
ucagaccacuucagcuuga

SEQ ID NO: 714458 - RNA, 19 nt, Homo sapiens
  misc_RNA (1)...(19): siRNA sense strand
gaaagcagacuguauuuug

SEQ ID NO: 714459 - RNA, 19 nt, Homo sapiens
  misc_RNA (1)...(19): siRNA sense strand
gauuauaaggcacuuggua

SEQ ID NO: 714460 - RNA, 19 nt, Homo sapiens
  misc_RNA (1)...(19): siRNA sense strand
gggcaagcaaugaauauga

SEQ ID NO: 714461 - RNA, 19 nt, Homo sapiens
  misc_RNA (1)...(19): siRNA sense strand
cagaggaacugaaugaaaa

SEQ ID NO: 714462 - RNA, 19 nt, Homo sapiens
  misc_RNA (1)...(19): siRNA sense strand
gacagugcauuugaaagaa

SEQ ID NO: 714463 - RNA, 19 nt, Homo sapiens
  misc_RNA (1)...(19): siRNA sense strand
gaggaacuggauucuauaa

SEQ ID NO: 714464 - RNA, 19 nt, Homo sapiens
  misc_RNA (1)...(19): siRNA sense strand
agagaaagccuaugaagca

SEQ ID NO: 714465 - RNA, 19 nt, Homo sapiens
  misc_RNA (1)...(19): siRNA sense strand
ugacaaaguccacgcagaa

SEQ ID NO: 714466 - RNA, 19 nt, Homo sapiens
  misc_RNA (1)...(19): siRNA sense strand
cagcagaagcuuuaugaga

SEQ ID NO: 714467 - RNA, 19 nt, Homo sapiens
  misc_RNA (1)...(19): siRNA sense strand
gacagcagaagcuuuauga

SEQ ID NO: 714468 - RNA, 19 nt, Homo sapiens
  misc_RNA (1)...(19): siRNA sense strand
guuaaaugcuucuaguucu

SEQ ID NO: 714469 - RNA, 19 nt, Homo sapiens
  misc_RNA (1)...(19): siRNA sense strand
gaacaaguuacgguuaguu

SEQ ID NO: 714470 - RNA, 19 nt, Homo sapiens
  misc_RNA (1)...(19): siRNA sense strand
ccaguuaccagcauuaugu

SEQ ID NO: 714471 - RNA, 19 nt, Homo sapiens
  misc_RNA (1)...(19): siRNA sense strand
gcuaccauuucguauuuga

SEQ ID NO: 714472 - RNA, 19 nt, Homo sapiens
  misc_RNA (1)...(19): siRNA sense strand
ggaacuggauucuauaacc

SEQ ID NO: 714473 - RNA, 19 nt, Homo sapiens
  misc_RNA (1)...(19): siRNA sense strand
uaaagcggcaguucccuaa

SEQ ID NO: 714474 - RNA, 19 nt, Homo sapiens
  misc_RNA (1)...(19): siRNA sense strand
cagcaaccauguuaaaugc

SEQ ID NO: 714475 - RNA, 19 nt, Homo sapiens
  misc_RNA (1)...(19): siRNA sense strand
gcccauugaucucucuuau

SEQ ID NO: 714476 - RNA, 19 nt, Homo sapiens
  misc_RNA (1)...(19): siRNA sense strand
uauggaagaccaauuaaug

SEQ ID NO: 714477 - RNA, 19 nt, Homo sapiens
  misc_RNA (1)...(19): siRNA sense strand
ugaaucgucucaaacuugu

SEQ ID NO: 714478 - RNA, 19 nt, Homo sapiens
  misc_RNA (1)...(19): siRNA sense strand
uaaucaagauccugaagca

SEQ ID NO: 714479 - RNA, 19 nt, Homo sapiens
  misc_RNA (1)...(19): siRNA sense strand
gaauugauaagccagaugu

SEQ ID NO: 714480 - RNA, 19 nt, Homo sapiens
  misc_RNA (1)...(19): siRNA sense strand
agaccacaguucauagaaa

SEQ ID NO: 714481 - RNA, 19 nt, Homo sapiens
  misc_RNA (1)...(19): siRNA sense strand
uuguaaagcucauuaaugg

SEQ ID NO: 714482 - RNA, 19 nt, Homo sapiens
  misc_RNA (1)...(19): siRNA sense strand
ggcaagcaaugaauaugau

SEQ ID NO: 714483 - RNA, 19 nt, Homo sapiens
  misc_RNA (1)...(19): siRNA sense strand
guucuaaggagcauguuaa

SEQ ID NO: 714484 - RNA, 19 nt, Homo sapiens
  misc_RNA (1)...(19): siRNA sense strand
gaaaauggucagccaauga

SEQ ID NO: 714485 - RNA, 19 nt, Homo sapiens
  misc_RNA (1)...(19): siRNA sense strand
uuaugugacuccagagaaa

SEQ ID NO: 714486 - RNA, 19 nt, Homo sapiens
  misc_RNA (1)...(19): siRNA sense strand
ggaaaggcaacaagagcuu

SEQ ID NO: 714487 - RNA, 19 nt, Homo sapiens
  misc_RNA (1)...(19): siRNA sense strand
gggaaagggugcagcaaaa

SEQ ID NO: 714488 - RNA, 19 nt, Homo sapiens
  misc_RNA (1)...(19): siRNA sense strand
ccauugaaacugauugauu

SEQ ID NO: 714489 - RNA, 19 nt, Homo sapiens
  misc_RNA (1)...(19): siRNA sense strand
agacagugcauuugaaaga

SEQ ID NO: 714490 - RNA, 19 nt, Homo sapiens
  misc_RNA (1)...(19): siRNA sense strand
uaagccagaugugagguuu

SEQ ID NO: 714491 - RNA, 19 nt, Homo sapiens
  misc_RNA (1)...(19): siRNA sense strand
uaugaagcaaggagauuua

SEQ ID NO: 714492 - RNA, 19 nt, Homo sapiens
  misc_RNA (1)...(19): siRNA sense strand
gcugaaucgucucaaacuu

SEQ ID NO: 714493 - RNA, 19 nt, Homo sapiens
  misc_RNA (1)...(19): siRNA sense strand
gauuauugcacacuuucua

SEQ ID NO: 714494 - RNA, 19 nt, Homo sapiens
  misc_RNA (1)...(19): siRNA sense strand
caaggagauuuacucgaau

SEQ ID NO: 714495 - RNA, 19 nt, Homo sapiens
  misc_RNA (1)...(19): siRNA sense strand
gaccacaguucauagaaaa

SEQ ID NO: 714496 - RNA, 19 nt, Homo sapiens
  misc_RNA (1)...(19): siRNA sense strand
augcuaccauuucguauuu

SEQ ID NO: 714497 - RNA, 19 nt, Homo sapiens
  misc_RNA (1)...(19): siRNA sense strand
gcaaaugucgucguguguu

SEQ ID NO: 714498 - RNA, 19 nt, Homo sapiens
  misc_RNA (1)...(19): siRNA sense strand
gaugugagguuuguuaucc

SEQ ID NO: 714499 - RNA, 19 nt, Homo sapiens
  misc_RNA (1)...(19): siRNA sense strand
uaacugaggaacuggauuc

SEQ ID NO: 714500 - RNA, 19 nt, Homo sapiens
  misc_RNA (1)...(19): siRNA sense strand
ugcgauaacugcuguaaag

SEQ ID NO: 714501 - RNA, 19 nt, Homo sapiens
  misc_RNA (1)...(19): siRNA sense strand
agcagaagcuuuaugagau

SEQ ID NO: 714502 - RNA, 19 nt, Homo sapiens
  misc_RNA (1)...(19): siRNA sense strand
guucaaugguggugaugga

SEQ ID NO: 714503 - RNA, 19 nt, Homo sapiens
  misc_RNA (1)...(19): siRNA sense strand
uccauggucugguaaaguu

SEQ ID NO: 714504 - RNA, 19 nt, Homo sapiens
  misc_RNA (1)...(19): siRNA sense strand
gcagaagcccucaaacacu

SEQ ID NO: 714505 - RNA, 19 nt, Homo sapiens
  misc_RNA (1)...(19): siRNA sense strand
cagaaaauuuugugcauug

SEQ ID NO: 714506 - RNA, 19 nt, Homo sapiens
  misc_RNA (1)...(19): siRNA sense strand
gaagcaaggagauuuacuc

SEQ ID NO: 714507 - RNA, 19 nt, Homo sapiens
  misc_RNA (1)...(19): siRNA sense strand
ugggacagcagaagcuuua

SEQ ID NO: 714508 - RNA, 19 nt, Homo sapiens
  misc_RNA (1)...(19): siRNA sense strand
gcuauuacuaugcaaguga

SEQ ID NO: 714509 - RNA, 19 nt, Homo sapiens
  misc_RNA (1)...(19): siRNA sense strand
caaugaggcacaugcuauu

SEQ ID NO: 714510 - RNA, 19 nt, Homo sapiens
  misc_RNA (1)...(19): siRNA sense strand
acaagagcuuauucagaaa

SEQ ID NO: 714511 - RNA, 19 nt, Homo sapiens
  misc_RNA (1)...(19): siRNA sense strand
aaagacagugcauuugaaa

SEQ ID NO: 714512 - RNA, 19 nt, Homo sapiens
  misc_RNA (1)...(19): siRNA sense strand
ggaacucagaagcauguaa

SEQ ID NO: 714513 - RNA, 19 nt, Homo sapiens
  misc_RNA (1)...(19): siRNA sense strand
ggacagcagaagcuuuaug

SEQ ID NO: 714514 - RNA, 19 nt, Homo sapiens
  misc_RNA (1)...(19): siRNA sense strand
gaaagacucugaacaaguu

SEQ ID NO: 714515 - RNA, 19 nt, Homo sapiens
  misc_RNA (1)...(19): siRNA sense strand
gagcuuauguuaccaguua

SEQ ID NO: 714516 - RNA, 19 nt, Homo sapiens
  misc_RNA (1)...(19): siRNA sense strand
gaagaaggcugcaaacaug

SEQ ID NO: 714517 - RNA, 19 nt, Homo sapiens
  misc_RNA (1)...(19): siRNA sense strand
gcaaggagauuuacucgaa

SEQ ID NO: 714518 - RNA, 19 nt, Homo sapiens
  misc_RNA (1)...(19): siRNA sense strand
ggccaaaucuauauuauga

SEQ ID NO: 714519 - RNA, 19 nt, Homo sapiens
  misc_RNA (1)...(19): siRNA sense strand
gaagauuauugcacacuuu

SEQ ID NO: 714520 - RNA, 19 nt, Homo sapiens
  misc_RNA (1)...(19): siRNA sense strand
ggaaagagcuuauguuacc

SEQ ID NO: 714521 - RNA, 19 nt, Homo sapiens
  misc_RNA (1)...(19): siRNA sense strand
gaaguucacugcuguaguc

SEQ ID NO: 714522 - RNA, 19 nt, Homo sapiens
  misc_RNA (1)...(19): siRNA sense strand
aacaagagcuuauucagaa

SEQ ID NO: 714523 - RNA, 19 nt, Homo sapiens
  misc_RNA (1)...(19): siRNA sense strand
gauaagaccacaguucaua

SEQ ID NO: 714524 - RNA, 19 nt, Homo sapiens
  misc_RNA (1)...(19): siRNA sense strand
ggagguauuucuuguuaug

SEQ ID NO: 714525 - RNA, 19 nt, Homo sapiens
  misc_RNA (1)...(19): siRNA sense strand
gcuugaaacuauuaacgua

SEQ ID NO: 714526 - RNA, 19 nt, Homo sapiens
  misc_RNA (1)...(19): siRNA sense strand
uaaagacagugcauuugaa

SEQ ID NO: 714527 - RNA, 19 nt, Homo sapiens
  misc_RNA (1)...(19): siRNA sense strand
aaggagguauuucuuguua

SEQ ID NO: 714528 - RNA, 19 nt, Homo sapiens
  misc_RNA (1)...(19): siRNA sense strand
gcagaagcuuuaugagaug

SEQ ID NO: 714529 - RNA, 19 nt, Homo sapiens
  misc_RNA (1)...(19): siRNA sense strand
gauaacugcuguaaagaca

SEQ ID NO: 714530 - RNA, 19 nt, Homo sapiens
  misc_RNA (1)...(19): siRNA sense strand
guggaaagagcuuauguua

SEQ ID NO: 714531 - RNA, 19 nt, Homo sapiens
  misc_RNA (1)...(19): siRNA sense strand
guaaagacagugcauuuga

SEQ ID NO: 714532 - RNA, 19 nt, Homo sapiens
  misc_RNA (1)...(19): siRNA sense strand
gaagauaagaccacaguuc

SEQ ID NO: 714533 - RNA, 19 nt, Homo sapiens
  misc_RNA (1)...(19): siRNA sense strand
gaauacaggagcuaagaaa

SEQ ID NO: 714534 - RNA, 19 nt, Homo sapiens
  misc_RNA (1)...(19): siRNA sense strand
gcagaggaacugaaugaaa

SEQ ID NO: 714535 - RNA, 19 nt, Homo sapiens
  misc_RNA (1)...(19): siRNA sense strand
gaacuggauucuauaacca

SEQ ID NO: 714536 - RNA, 19 nt, Homo sapiens
  misc_RNA (1)...(19): siRNA sense strand
caacaagagcuuauucaga

SEQ ID NO: 714537 - RNA, 19 nt, Homo sapiens
  misc_RNA (1)...(19): siRNA sense strand
ugaaacugauugauucuug

SEQ ID NO: 714538 - RNA, 19 nt, Homo sapiens
  misc_RNA (1)...(19): siRNA sense strand
gcaaucaggaaucauauau

SEQ ID NO: 714539 - RNA, 19 nt, Homo sapiens
  misc_RNA (1)...(19): siRNA sense strand
gcaguucccuaacgcauca

SEQ ID NO: 714540 - RNA, 19 nt, Homo sapiens
  misc_RNA (1)...(19): siRNA sense strand
gcaaccauguuaaaugcuu

SEQ ID NO: 714541 - RNA, 19 nt, Homo sapiens
  misc_RNA (1)...(19): siRNA sense strand
cuaaggagcauguuaaaug

SEQ ID NO: 714542 - RNA, 19 nt, Homo sapiens
  misc_RNA (1)...(19): siRNA sense strand
caaaugucgucguguguug

SEQ ID NO: 714543 - RNA, 19 nt, Homo sapiens
  misc_RNA (1)...(19): siRNA sense strand
cauugaaacugauugauuc

SEQ ID NO: 714544 - RNA, 19 nt, Homo sapiens
  misc_RNA (1)...(19): siRNA sense strand
gaaaggcaacaagagcuua

SEQ ID NO: 714545 - RNA, 19 nt, Homo sapiens
  misc_RNA (1)...(19): siRNA sense strand
gugcuuaccaugccaauuu

SEQ ID NO: 714546 - RNA, 19 nt, Homo sapiens
  misc_RNA (1)...(19): siRNA sense strand
ccucaaacacugaagauuu

SEQ ID NO: 714547 - RNA, 19 nt, Homo sapiens
  misc_RNA (1)...(19): siRNA sense strand
ccagaugugagguuuguua

SEQ ID NO: 714548 - RNA, 19 nt, Homo sapiens
  misc_RNA (1)...(19): siRNA sense strand
cuacggcuuuggagauaua

SEQ ID NO: 714549 - RNA, 19 nt, Homo sapiens
  misc_RNA (1)...(19): siRNA sense strand
cugaggaacuggauucuau

SEQ ID NO: 714550 - RNA, 19 nt, Homo sapiens
  misc_RNA (1)...(19): siRNA sense strand
gaauugcuguggaugaagu

SEQ ID NO: 714551 - RNA, 19 nt, Homo sapiens
  misc_RNA (1)...(19): siRNA sense strand
gagaaagccuaugaagcaa

SEQ ID NO: 714552 - RNA, 19 nt, Homo sapiens
  misc_RNA (1)...(19): siRNA sense strand
gagaguagcagguguugug

SEQ ID NO: 714553 - RNA, 19 nt, Homo sapiens
  misc_RNA (1)...(19): siRNA sense strand
caugaaagcagacuguauu

SEQ ID NO: 714554 - RNA, 19 nt, Homo sapiens
  misc_RNA (1)...(19): siRNA sense strand
uaaggagcauguuaaaugg

SEQ ID NO: 714555 - RNA, 19 nt, Homo sapiens
  misc_RNA (1)...(19): siRNA sense strand
gaagcuuuaugagauggua

SEQ ID NO: 714556 - RNA, 19 nt, Homo sapiens
  misc_RNA (1)...(19): siRNA sense strand
ccuaacgcaucacuaauug

SEQ ID NO: 714557 - RNA, 19 nt, Homo sapiens
  misc_RNA (1)...(19): siRNA sense strand
ucagaccacuucagcuuga

SEQ ID NO: 714558 - RNA, 19 nt, Homo sapiens
  misc_RNA (1)...(19): siRNA sense strand
gaaagcagacuguauuuug

SEQ ID NO: 714559 - RNA, 19 nt, Homo sapiens
  misc_RNA (1)...(19): siRNA sense strand
gauuauaaggcacuuggua

SEQ ID NO: 714560 - RNA, 19 nt, Homo sapiens
  misc_RNA (1)...(19): siRNA sense strand
gggcaagcaaugaauauga

SEQ ID NO: 714561 - RNA, 19 nt, Homo sapiens
  misc_RNA (1)...(19): siRNA sense strand
cagaggaacugaaugaaaa

SEQ ID NO: 714562 - RNA, 19 nt, Homo sapiens
  misc_RNA (1)...(19): siRNA sense strand
gacagugcauuugaaagaa

SEQ ID NO: 714563 - RNA, 19 nt, Homo sapiens
  misc_RNA (1)...(19): siRNA sense strand
gaggaacuggauucuauaa

SEQ ID NO: 714564 - RNA, 19 nt, Homo sapiens
  misc_RNA (1)...(19): siRNA sense strand
agagaaagccuaugaagca

SEQ ID NO: 714565 - RNA, 19 nt, Homo sapiens
  misc_RNA (1)...(19): siRNA sense strand
ugacaaaguccacgcagaa

SEQ ID NO: 714566 - RNA, 19 nt, Homo sapiens
  misc_RNA (1)...(19): siRNA sense strand
cagcagaagcuuuaugaga

SEQ ID NO: 714567 - RNA, 19 nt, Homo sapiens
  misc_RNA (1)...(19): siRNA sense strand
gacagcagaagcuuuauga

SEQ ID NO: 714568 - RNA, 19 nt, Homo sapiens
  misc_RNA (1)...(19): siRNA sense strand
guuaaaugcuucuaguucu

SEQ ID NO: 714569 - RNA, 19 nt, Homo sapiens
  misc_RNA (1)...(19): siRNA sense strand
gaacaaguuacgguuaguu

SEQ ID NO: 714570 - RNA, 19 nt, Homo sapiens
  misc_RNA (1)...(19): siRNA sense strand
ccaguuaccagcauuaugu

SEQ ID NO: 714571 - RNA, 19 nt, Homo sapiens
  misc_RNA (1)...(19): siRNA sense strand
gcuaccauuucguauuuga

SEQ ID NO: 714572 - RNA, 19 nt, Homo sapiens
  misc_RNA (1)...(19): siRNA sense strand
ggaacuggauucuauaacc

SEQ ID NO: 714573 - RNA, 19 nt, Homo sapiens
  misc_RNA (1)...(19): siRNA sense strand
uaaagcggcaguucccuaa

SEQ ID NO: 714574 - RNA, 19 nt, Homo sapiens
  misc_RNA (1)...(19): siRNA sense strand
cagcaaccauguuaaaugc

SEQ ID NO: 714575 - RNA, 19 nt, Homo sapiens
  misc_RNA (1)...(19): siRNA sense strand
gcccauugaucucucuuau

SEQ ID NO: 714576 - RNA, 19 nt, Homo sapiens
  misc_RNA (1)...(19): siRNA sense strand
uauggaagaccaauuaaug

SEQ ID NO: 714577 - RNA, 19 nt, Homo sapiens
  misc_RNA (1)...(19): siRNA sense strand
ugaaucgucucaaacuugu

SEQ ID NO: 714578 - RNA, 19 nt, Homo sapiens
  misc_RNA (1)...(19): siRNA sense strand
uaaucaagauccugaagca

SEQ ID NO: 714579 - RNA, 19 nt, Homo sapiens
  misc_RNA (1)...(19): siRNA sense strand
gaauugauaagccagaugu

SEQ ID NO: 714580 - RNA, 19 nt, Homo sapiens
  misc_RNA (1)...(19): siRNA sense strand
agaccacaguucauagaaa

SEQ ID NO: 714581 - RNA, 19 nt, Homo sapiens
  misc_RNA (1)...(19): siRNA sense strand
uuguaaagcucauuaaugg

SEQ ID NO: 714582 - RNA, 19 nt, Homo sapiens
  misc_RNA (1)...(19): siRNA sense strand
ggcaagcaaugaauaugau

SEQ ID NO: 714583 - RNA, 19 nt, Homo sapiens
  misc_RNA (1)...(19): siRNA sense strand
guucuaaggagcauguuaa

SEQ ID NO: 714584 - RNA, 19 nt, Homo sapiens
  misc_RNA (1)...(19): siRNA sense strand
gaaaauggucagccaauga

SEQ ID NO: 714585 - RNA, 19 nt, Homo sapiens
  misc_RNA (1)...(19): siRNA sense strand
uuaugugacuccagagaaa

SEQ ID NO: 714586 - RNA, 19 nt, Homo sapiens
  misc_RNA (1)...(19): siRNA sense strand
ggaaaggcaacaagagcuu

SEQ ID NO: 714587 - RNA, 19 nt, Homo sapiens
  misc_RNA (1)...(19): siRNA sense strand
gggaaagggugcagcaaaa

SEQ ID NO: 714588 - RNA, 19 nt, Homo sapiens
  misc_RNA (1)...(19): siRNA sense strand
ccauugaaacugauugauu

SEQ ID NO: 714589 - RNA, 19 nt, Homo sapiens
  misc_RNA (1)...(19): siRNA sense strand
agacagugcauuugaaaga

SEQ ID NO: 714590 - RNA, 19 nt, Homo sapiens
  misc_RNA (1)...(19): siRNA sense strand
uaagccagaugugagguuu

SEQ ID NO: 714591 - RNA, 19 nt, Homo sapiens
  misc_RNA (1)...(19): siRNA sense strand
uaugaagcaaggagauuua

SEQ ID NO: 714592 - RNA, 19 nt, Homo sapiens
  misc_RNA (1)...(19): siRNA sense strand
gcugaaucgucucaaacuu

SEQ ID NO: 714593 - RNA, 19 nt, Homo sapiens
  misc_RNA (1)...(19): siRNA sense strand
gauuauugcacacuuucua

SEQ ID NO: 714594 - RNA, 19 nt, Homo sapiens
  misc_RNA (1)...(19): siRNA sense strand
caaggagauuuacucgaau

SEQ ID NO: 714595 - RNA, 19 nt, Homo sapiens
  misc_RNA (1)...(19): siRNA sense strand
gaccacaguucauagaaaa

SEQ ID NO: 714596 - RNA, 19 nt, Homo sapiens
  misc_RNA (1)...(19): siRNA sense strand
augcuaccauuucguauuu

SEQ ID NO: 714597 - RNA, 19 nt, Homo sapiens
  misc_RNA (1)...(19): siRNA sense strand
gcaaaugucgucguguguu

SEQ ID NO: 714598 - RNA, 19 nt, Homo sapiens
  misc_RNA (1)...(19): siRNA sense strand
gaugugagguuuguuaucc

SEQ ID NO: 714599 - RNA, 19 nt, Homo sapiens
  misc_RNA (1)...(19): siRNA sense strand
uaacugaggaacuggauuc

SEQ ID NO: 714600 - RNA, 19 nt, Homo sapiens
  misc_RNA (1)...(19): siRNA sense strand
ugcgauaacugcuguaaag

SEQ ID NO: 714601 - RNA, 19 nt, Homo sapiens
  misc_RNA (1)...(19): siRNA sense strand
agcagaagcuuuaugagau

SEQ ID NO: 714602 - RNA, 19 nt, Homo sapiens
  misc_RNA (1)...(19): siRNA sense strand
guucaaugguggugaugga

SEQ ID NO: 714603 - RNA, 19 nt, Homo sapiens
  misc_RNA (1)...(19): siRNA sense strand
uccauggucugguaaaguu

SEQ ID NO: 714604 - RNA, 19 nt, Homo sapiens
  misc_RNA (1)...(19): siRNA sense strand
gcagaagcccucaaacacu

SEQ ID NO: 714605 - RNA, 19 nt, Homo sapiens
  misc_RNA (1)...(19): siRNA sense strand
cagaaaauuuugugcauug

SEQ ID NO: 714606 - RNA, 19 nt, Homo sapiens
  misc_RNA (1)...(19): siRNA sense strand
gaagcaaggagauuuacuc

SEQ ID NO: 714607 - RNA, 19 nt, Homo sapiens
  misc_RNA (1)...(19): siRNA sense strand
ugggacagcagaagcuuua

SEQ ID NO: 714608 - RNA, 19 nt, Homo sapiens
  misc_RNA (1)...(19): siRNA sense strand
gcuauuacuaugcaaguga

SEQ ID NO: 714609 - RNA, 19 nt, Homo sapiens
  misc_RNA (1)...(19): siRNA sense strand
caaugaggcacaugcuauu

SEQ ID NO: 714610 - RNA, 19 nt, Homo sapiens
  misc_RNA (1)...(19): siRNA sense strand
acaagagcuuauucagaaa

SEQ ID NO: 714611 - RNA, 19 nt, Homo sapiens
  misc_RNA (1)...(19): siRNA sense strand
aaagacagugcauuugaaa

SEQ ID NO: 714612 - RNA, 19 nt, Homo sapiens
  misc_RNA (1)...(19): siRNA sense strand
ggaacucagaagcauguaa

SEQ ID NO: 714613 - RNA, 19 nt, Homo sapiens
  misc_RNA (1)...(19): siRNA sense strand
ggacagcagaagcuuuaug

SEQ ID NO: 714614 - RNA, 19 nt, Homo sapiens
  misc_RNA (1)...(19): siRNA sense strand
gaaaggcgauccaggugua

SEQ ID NO: 714615 - RNA, 19 nt, Homo sapiens
  misc_RNA (1)...(19): siRNA sense strand
gagaauaugugcaccauug

SEQ ID NO: 714616 - RNA, 19 nt, Homo sapiens
  misc_RNA (1)...(19): siRNA sense strand
ccaaagagccucagccuaa

SEQ ID NO: 714617 - RNA, 19 nt, Homo sapiens
  misc_RNA (1)...(19): siRNA sense strand
agacggagcuggacaaguu

SEQ ID NO: 714618 - RNA, 19 nt, Homo sapiens
  misc_RNA (1)...(19): siRNA sense strand
gaaaucaccugguauccau

SEQ ID NO: 714619 - RNA, 19 nt, Homo sapiens
  misc_RNA (1)...(19): siRNA sense strand
gagcugggauggagaagaa

SEQ ID NO: 714620 - RNA, 19 nt, Homo sapiens
  misc_RNA (1)...(19): siRNA sense strand
caaagcagcuggucaagag

SEQ ID NO: 714621 - RNA, 19 nt, Homo sapiens
  misc_RNA (1)...(19): siRNA sense strand
caaguugacagcucaguua

SEQ ID NO: 714622 - RNA, 19 nt, Homo sapiens
  misc_RNA (1)...(19): siRNA sense strand
ucaaagggcuagcaacuca

SEQ ID NO: 714623 - RNA, 19 nt, Homo sapiens
  misc_RNA (1)...(19): siRNA sense strand
caacaaauccagaaauuac

SEQ ID NO: 714624 - RNA, 19 nt, Homo sapiens
  misc_RNA (1)...(19): siRNA sense strand
gaaccaagaagucaugaau

SEQ ID NO: 714625 - RNA, 19 nt, Homo sapiens
  misc_RNA (1)...(19): siRNA sense strand
caaagagccucagccuaaa

SEQ ID NO: 714626 - RNA, 19 nt, Homo sapiens
  misc_RNA (1)...(19): siRNA sense strand
accaagaagucaugaauuu

SEQ ID NO: 714627 - RNA, 19 nt, Homo sapiens
  misc_RNA (1)...(19): siRNA sense strand
gaccuagacaagcaaauua

SEQ ID NO: 714628 - RNA, 19 nt, Homo sapiens
  misc_RNA (1)...(19): siRNA sense strand
gguaguggcugucgacauc

SEQ ID NO: 714629 - RNA, 19 nt, Homo sapiens
  misc_RNA (1)...(19): siRNA sense strand
gagcaccuguuccuugaga

SEQ ID NO: 714630 - RNA, 19 nt, Homo sapiens
  misc_RNA (1)...(19): siRNA sense strand
uuucaaaucuaccugauga

SEQ ID NO: 714631 - RNA, 19 nt, Homo sapiens
  misc_RNA (1)...(19): siRNA sense strand
ggaaacgcccaccuucaaa

SEQ ID NO: 714632 - RNA, 19 nt, Homo sapiens
  misc_RNA (1)...(19): siRNA sense strand
gaaaggcagccgaggagaa

SEQ ID NO: 714633 - RNA, 19 nt, Homo sapiens
  misc_RNA (1)...(19): siRNA sense strand
cggcagcgguggaaacuga

SEQ ID NO: 714634 - RNA, 19 nt, Homo sapiens
  misc_RNA (1)...(19): siRNA sense strand
ugagaaugauguugcagaa

SEQ ID NO: 714635 - RNA, 19 nt, Homo sapiens
  misc_RNA (1)...(19): siRNA sense strand
ccacauaaagagcaguaua

SEQ ID NO: 714636 - RNA, 19 nt, Homo sapiens
  misc_RNA (1)...(19): siRNA sense strand
cuaugaagcuuauuguauc

SEQ ID NO: 714637 - RNA, 19 nt, Homo sapiens
  misc_RNA (1)...(19): siRNA sense strand
cgccuggaguuucauauaa

SEQ ID NO: 714638 - RNA, 19 nt, Homo sapiens
  misc_RNA (1)...(19): siRNA sense strand
aaacugaaccuggaaauca

SEQ ID NO: 714639 - RNA, 19 nt, Homo sapiens
  misc_RNA (1)...(19): siRNA sense strand
gaaggaaacaucacaaagc

SEQ ID NO: 714640 - RNA, 19 nt, Homo sapiens
  misc_RNA (1)...(19): siRNA sense strand
uaaguaagguagaugaacu

SEQ ID NO: 714641 - RNA, 19 nt, Homo sapiens
  misc_RNA (1)...(19): siRNA sense strand
caaagucacaccugaagga

SEQ ID NO: 714642 - RNA, 19 nt, Homo sapiens
  misc_RNA (1)...(19): siRNA sense strand
agaggagaauguccaugua

SEQ ID NO: 714643 - RNA, 19 nt, Homo sapiens
  misc_RNA (1)...(19): siRNA sense strand
gaugaacucuaugaagcuu

SEQ ID NO: 714644 - RNA, 19 nt, Homo sapiens
  misc_RNA (1)...(19): siRNA sense strand
auaaagaguuucaggaucu

SEQ ID NO: 714645 - RNA, 19 nt, Homo sapiens
  misc_RNA (1)...(19): siRNA sense strand
cacauaaagagcaguauaa

SEQ ID NO: 714646 - RNA, 19 nt, Homo sapiens
  misc_RNA (1)...(19): siRNA sense strand
cgacaucaaugaccuuggu

SEQ ID NO: 714647 - RNA, 19 nt, Homo sapiens
  misc_RNA (1)...(19): siRNA sense strand
ggauggagaagaaacaguu

SEQ ID NO: 714648 - RNA, 19 nt, Homo sapiens
  misc_RNA (1)...(19): siRNA sense strand
gaauaugugcaccauugaa

SEQ ID NO: 714649 - RNA, 19 nt, Homo sapiens
  misc_RNA (1)...(19): siRNA sense strand
ucacaaagcagcuggucaa

SEQ ID NO: 714650 - RNA, 19 nt, Homo sapiens
  misc_RNA (1)...(19): siRNA sense strand
agaaugaggguauggauga

SEQ ID NO: 714651 - RNA, 19 nt, Homo sapiens
  misc_RNA (1)...(19): siRNA sense strand
cucaacaaauccagaaauu

SEQ ID NO: 714652 - RNA, 19 nt, Homo sapiens
  misc_RNA (1)...(19): siRNA sense strand
ugagacgccuggaguuuca

SEQ ID NO: 714653 - RNA, 19 nt, Homo sapiens
  misc_RNA (1)...(19): siRNA sense strand
ggaaggaaacaucacaaag

SEQ ID NO: 714654 - RNA, 19 nt, Homo sapiens
  misc_RNA (1)...(19): siRNA sense strand
gcucaagccuguggaacug

SEQ ID NO: 714655 - RNA, 19 nt, Homo sapiens
  misc_RNA (1)...(19): siRNA sense strand
ugaacucuaugaagcuuau

SEQ ID NO: 714656 - RNA, 19 nt, Homo sapiens
  misc_RNA (1)...(19): siRNA sense strand
cauuagaaccacauaaaga

SEQ ID NO: 714657 - RNA, 19 nt, Homo sapiens
  misc_RNA (1)...(19): siRNA sense strand
gaaugauguugcagaagca

SEQ ID NO: 714658 - RNA, 19 nt, Homo sapiens
  misc_RNA (1)...(19): siRNA sense strand
caacucaacaaauccagaa

SEQ ID NO: 714659 - RNA, 19 nt, Homo sapiens
  misc_RNA (1)...(19): siRNA sense strand
gaaacugaaaggcaaaaua

SEQ ID NO: 714660 - RNA, 19 nt, Homo sapiens
  misc_RNA (1)...(19): siRNA sense strand
caagaagucaugaauuugg

SEQ ID NO: 714661 - RNA, 19 nt, Homo sapiens
  misc_RNA (1)...(19): siRNA sense strand
ccauugaaguggagcuaga

SEQ ID NO: 714662 - RNA, 19 nt, Homo sapiens
  misc_RNA (1)...(19): siRNA sense strand
cuuucuagauggaagcuua

SEQ ID NO: 714663 - RNA, 19 nt, Homo sapiens
  misc_RNA (1)...(19): siRNA sense strand
ucaaugaccuugguaccau

SEQ ID NO: 714664 - RNA, 19 nt, Homo sapiens
  misc_RNA (1)...(19): siRNA sense strand
gaaaauuccuccgcucuca

SEQ ID NO: 714665 - RNA, 19 nt, Homo sapiens
  misc_RNA (1)...(19): siRNA sense strand
gaucugaaccaagaaguca

SEQ ID NO: 714666 - RNA, 19 nt, Homo sapiens
  misc_RNA (1)...(19): siRNA sense strand
guauaaagaguuucaggau

SEQ ID NO: 714667 - RNA, 19 nt, Homo sapiens
  misc_RNA (1)...(19): siRNA sense strand
aaggaaacaucacaaagca

SEQ ID NO: 714668 - RNA, 19 nt, Homo sapiens
  misc_RNA (1)...(19): siRNA sense strand
gccaagagccaaagucaca

SEQ ID NO: 714669 - RNA, 19 nt, Homo sapiens
  misc_RNA (1)...(19): siRNA sense strand
ccaggauggugccagcaaa

SEQ ID NO: 714670 - RNA, 19 nt, Homo sapiens
  misc_RNA (1)...(19): siRNA sense strand
aaagagcaguauaaagagu

SEQ ID NO: 714671 - RNA, 19 nt, Homo sapiens
  misc_RNA (1)...(19): siRNA sense strand
gcacaauuuaggccacaaa

SEQ ID NO: 714672 - RNA, 19 nt, Homo sapiens
  misc_RNA (1)...(19): siRNA sense strand
gagaaggccaagagccaaa

SEQ ID NO: 714673 - RNA, 19 nt, Homo sapiens
  misc_RNA (1)...(19): siRNA sense strand
gcagagcugggauggagaa

SEQ ID NO: 714674 - RNA, 19 nt, Homo sapiens
  misc_RNA (1)...(19): siRNA sense strand
gaaacgcccaccuucaaag

SEQ ID NO: 714675 - RNA, 19 nt, Homo sapiens
  misc_RNA (1)...(19): siRNA sense strand
agguguaacuccuucauug

SEQ ID NO: 714676 - RNA, 19 nt, Homo sapiens
  misc_RNA (1)...(19): siRNA sense strand
guugacagcucaguuaaaa

SEQ ID NO: 714677 - RNA, 19 nt, Homo sapiens
  misc_RNA (1)...(19): siRNA sense strand
agagcaguauaaagaguuu

SEQ ID NO: 714678 - RNA, 19 nt, Homo sapiens
  misc_RNA (1)...(19): siRNA sense strand
gguguaacuccuucauuga

SEQ ID NO: 714679 - RNA, 19 nt, Homo sapiens
  misc_RNA (1)...(19): siRNA sense strand
cagcuuggccucccagaau

SEQ ID NO: 714680 - RNA, 19 nt, Homo sapiens
  misc_RNA (1)...(19): siRNA sense strand
gaaaggcaaaauagaagua

SEQ ID NO: 714681 - RNA, 19 nt, Homo sapiens
  misc_RNA (1)...(19): siRNA sense strand
uguaugaccuagacaagca

SEQ ID NO: 714682 - RNA, 19 nt, Homo sapiens
  misc_RNA (1)...(19): siRNA sense strand
agaaucugcugggagaauu

SEQ ID NO: 714683 - RNA, 19 nt, Homo sapiens
  misc_RNA (1)...(19): siRNA sense strand
gcauuagaaccacauaaag

SEQ ID NO: 714684 - RNA, 19 nt, Homo sapiens
  misc_RNA (1)...(19): siRNA sense strand
cugcagauccuuucuagau

SEQ ID NO: 714685 - RNA, 19 nt, Homo sapiens
  misc_RNA (1)...(19): siRNA sense strand
cugagcaccuguuccuuga

SEQ ID NO: 714686 - RNA, 19 nt, Homo sapiens
  misc_RNA (1)...(19): siRNA sense strand
gacaccagcucagcaucuu

SEQ ID NO: 714687 - RNA, 19 nt, Homo sapiens
  misc_RNA (1)...(19): siRNA sense strand
ugaccuugguaccaucaaa

SEQ ID NO: 714688 - RNA, 19 nt, Homo sapiens
  misc_RNA (1)...(19): siRNA sense strand
gccaguccuuugcggguuu

SEQ ID NO: 714689 - RNA, 19 nt, Homo sapiens
  misc_RNA (1)...(19): siRNA sense strand
ccaagaagucaugaauuug

SEQ ID NO: 714690 - RNA, 19 nt, Homo sapiens
  misc_RNA (1)...(19): siRNA sense strand
ggaaaucaccugguaucca

SEQ ID NO: 714691 - RNA, 19 nt, Homo sapiens
  misc_RNA (1)...(19): siRNA sense strand
ucaaggaguacacagagaa

SEQ ID NO: 714692 - RNA, 19 nt, Homo sapiens
  misc_RNA (1)...(19): siRNA sense strand
ggaguacacagagaauaug

SEQ ID NO: 714693 - RNA, 19 nt, Homo sapiens
  misc_RNA (1)...(19): siRNA sense strand
aaaggcagccgaggagaaa

SEQ ID NO: 714694 - RNA, 19 nt, Homo sapiens
  misc_RNA (1)...(19): siRNA sense strand
cggaaacgcccaccuucaa

SEQ ID NO: 714695 - RNA, 19 nt, Homo sapiens
  misc_RNA (1)...(19): siRNA sense strand
cagaggagaauguccaugu

SEQ ID NO: 714696 - RNA, 19 nt, Homo sapiens
  misc_RNA (1)...(19): siRNA sense strand
ugaccuagacaagcaaauu

SEQ ID NO: 714697 - RNA, 19 nt, Homo sapiens
  misc_RNA (1)...(19): siRNA sense strand
ugaugaauaucuggagguu

SEQ ID NO: 714698 - RNA, 19 nt, Homo sapiens
  misc_RNA (1)...(19): siRNA sense strand
ggaguuucauauaaguaag

SEQ ID NO: 714699 - RNA, 19 nt, Homo sapiens
  misc_RNA (1)...(19): siRNA sense strand
caugagacgccuggaguuu

SEQ ID NO: 714700 - RNA, 19 nt, Homo sapiens
  misc_RNA (1)...(19): siRNA sense strand
aaguggagcuagagaaucu

SEQ ID NO: 714701 - RNA, 19 nt, Homo sapiens
  misc_RNA (1)...(19): siRNA sense strand
aagaagucaugaauuugga

SEQ ID NO: 714702 - RNA, 19 nt, Homo sapiens
  misc_RNA (1)...(19): siRNA sense strand
gcccucaccucccacucaa

SEQ ID NO: 714703 - RNA, 19 nt, Homo sapiens
  misc_RNA (1)...(19): siRNA sense strand
gagaaucugcugggagaau

SEQ ID NO: 714704 - RNA, 19 nt, Homo sapiens
  misc_RNA (1)...(19): siRNA sense strand
gaaguggagcuagagaauc

SEQ ID NO: 714705 - RNA, 19 nt, Homo sapiens
  misc_RNA (1)...(19): siRNA sense strand
ggaggccucugagcucaag

SEQ ID NO: 714706 - RNA, 19 nt, Homo sapiens
  misc_RNA (1)...(19): siRNA sense strand
gcucaaagggcuagcaacu

SEQ ID NO: 714707 - RNA, 19 nt, Homo sapiens
  misc_RNA (1)...(19): siRNA sense strand
ugaaguggagcuagagaau

SEQ ID NO: 714708 - RNA, 19 nt, Homo sapiens
  misc_RNA (1)...(19): siRNA sense strand
cauaaagagcaguauaaag

SEQ ID NO: 714709 - RNA, 19 nt, Homo sapiens
  misc_RNA (1)...(19): siRNA sense strand
ucgccuggguguacuguau

SEQ ID NO: 714710 - RNA, 19 nt, Homo sapiens
  misc_RNA (1)...(19): siRNA sense strand
caaggucacggagcucaaa

SEQ ID NO: 714711 - RNA, 19 nt, Homo sapiens
  misc_RNA (1)...(19): siRNA sense strand
aaacgcccaccuucaaaga

SEQ ID NO: 714712 - RNA, 19 nt, Homo sapiens
  misc_RNA (1)...(19): siRNA sense strand
uaaagagcaguauaaagag

SEQ ID NO: 714713 - RNA, 19 nt, Homo sapiens
  misc_RNA (1)...(19): siRNA sense strand
gcaccuguuccuugagaau

SEQ ID NO: 714714 - RNA, 19 nt, Homo sapiens
  misc_RNA (1)...(19): siRNA sense strand
gaagaucacugaaagaaau

SEQ ID NO: 714715 - RNA, 19 nt, Homo sapiens
  misc_RNA (1)...(19): siRNA sense strand
ggaccagucugccuaugua

SEQ ID NO: 714716 - RNA, 19 nt, Homo sapiens
  misc_RNA (1)...(19): siRNA sense strand
gauauaauccugaaucgaa

SEQ ID NO: 714717 - RNA, 19 nt, Homo sapiens
  misc_RNA (1)...(19): siRNA sense strand
gcaaguacuucaaggauag

SEQ ID NO: 714718 - RNA, 19 nt, Homo sapiens
  misc_RNA (1)...(19): siRNA sense strand
gaagagcuauggcuagaag

SEQ ID NO: 714719 - RNA, 19 nt, Homo sapiens
  misc_RNA (1)...(19): siRNA sense strand
aaggauagcaggaauauaa

SEQ ID NO: 714720 - RNA, 19 nt, Homo sapiens
  misc_RNA (1)...(19): siRNA sense strand
gaacaaacgguacaauguc

SEQ ID NO: 714721 - RNA, 19 nt, Homo sapiens
  misc_RNA (1)...(19): siRNA sense strand
ccuacucugugaagaauaa

SEQ ID NO: 714722 - RNA, 19 nt, Homo sapiens
  misc_RNA (1)...(19): siRNA sense strand
ugacagcucugagacaaug

SEQ ID NO: 714723 - RNA, 19 nt, Homo sapiens
  misc_RNA (1)...(19): siRNA sense strand
agagaaggcucccaaaguc

SEQ ID NO: 714724 - RNA, 19 nt, Homo sapiens
  misc_RNA (1)...(19): siRNA sense strand
gaucugagacccuaaagca

SEQ ID NO: 714725 - RNA, 19 nt, Homo sapiens
  misc_RNA (1)...(19): siRNA sense strand
guucugaucuugccuucau

SEQ ID NO: 714726 - RNA, 19 nt, Homo sapiens
  misc_RNA (1)...(19): siRNA sense strand
gccgugacauugauauaau

SEQ ID NO: 714727 - RNA, 19 nt, Homo sapiens
  misc_RNA (1)...(19): siRNA sense strand
ugcaaguacuucaaggaua

SEQ ID NO: 714728 - RNA, 19 nt, Homo sapiens
  misc_RNA (1)...(19): siRNA sense strand
ugcuaaagcugaccaugaa

SEQ ID NO: 714729 - RNA, 19 nt, Homo sapiens
  misc_RNA (1)...(19): siRNA sense strand
cugagacccuaaagcauuu

SEQ ID NO: 714730 - RNA, 19 nt, Homo sapiens
  misc_RNA (1)...(19): siRNA sense strand
ugaacaaacgguacaaugu

SEQ ID NO: 714731 - RNA, 19 nt, Homo sapiens
  misc_RNA (1)...(19): siRNA sense strand
gacccugaaucucuccaaa

SEQ ID NO: 714732 - RNA, 19 nt, Homo sapiens
  misc_RNA (1)...(19): siRNA sense strand
aaauggagaugcuaaagcu

SEQ ID NO: 714733 - RNA, 19 nt, Homo sapiens
  misc_RNA (1)...(19): siRNA sense strand
gcauuuaguccugcaauuc

SEQ ID NO: 714734 - RNA, 19 nt, Homo sapiens
  misc_RNA (1)...(19): siRNA sense strand
aaugaaacccugcaaggaa

SEQ ID NO: 714735 - RNA, 19 nt, Homo sapiens
  misc_RNA (1)...(19): siRNA sense strand
ucgaagagcuauggcuaga

SEQ ID NO: 714736 - RNA, 19 nt, Homo sapiens
  misc_RNA (1)...(19): siRNA sense strand
gaugggccgugacauugau

SEQ ID NO: 714737 - RNA, 19 nt, Homo sapiens
  misc_RNA (1)...(19): siRNA sense strand
gugcauugccugaaacuca

SEQ ID NO: 714738 - RNA, 19 nt, Homo sapiens
  misc_RNA (1)...(19): siRNA sense strand
gagaaggcucccaaaguca

SEQ ID NO: 714739 - RNA, 19 nt, Homo sapiens
  misc_RNA (1)...(19): siRNA sense strand
augaaacccugcaaggaaa

SEQ ID NO: 714740 - RNA, 19 nt, Homo sapiens
  misc_RNA (1)...(19): siRNA sense strand
gcccuacucugugaagaau

SEQ ID NO: 714741 - RNA, 19 nt, Homo sapiens
  misc_RNA (1)...(19): siRNA sense strand
gcggaacacacaagaugaa

SEQ ID NO: 714742 - RNA, 19 nt, Homo sapiens
  misc_RNA (1)...(19): siRNA sense strand
ucugagacccuaaagcauu

SEQ ID NO: 714743 - RNA, 19 nt, Homo sapiens
  misc_RNA (1)...(19): siRNA sense strand
uccagaaucuccgcuuuga

SEQ ID NO: 714744 - RNA, 19 nt, Homo sapiens
  misc_RNA (1)...(19): siRNA sense strand
caaugaaacccugcaagga

SEQ ID NO: 714745 - RNA, 19 nt, Homo sapiens
  misc_RNA (1)...(19): siRNA sense strand
gacauugacagcucugaga

SEQ ID NO: 714746 - RNA, 19 nt, Homo sapiens
  misc_RNA (1)...(19): siRNA sense strand
ccuggacggccgagaguua

SEQ ID NO: 714747 - RNA, 19 nt, Homo sapiens
  misc_RNA (1)...(19): siRNA sense strand
ggccgugacauugauauaa

SEQ ID NO: 714748 - RNA, 19 nt, Homo sapiens
  misc_RNA (1)...(19): siRNA sense strand
ugaagaucacugaaagaaa

SEQ ID NO: 714749 - RNA, 19 nt, Homo sapiens
  misc_RNA (1)...(19): siRNA sense strand
ccgcaccagugauuguuga

SEQ ID NO: 714750 - RNA, 19 nt, Homo sapiens
  misc_RNA (1)...(19): siRNA sense strand
ggaguugggcaaggugaaa

SEQ ID NO: 714751 - RNA, 19 nt, Homo sapiens
  misc_RNA (1)...(19): siRNA sense strand
ucaaggauagcaggaauau

SEQ ID NO: 714752 - RNA, 19 nt, Homo sapiens
  misc_RNA (1)...(19): siRNA sense strand
uuacugcgcccuacucugu

SEQ ID NO: 714753 - RNA, 19 nt, Homo sapiens
  misc_RNA (1)...(19): siRNA sense strand
ggccaaauggagaugcuaa

SEQ ID NO: 714754 - RNA, 19 nt, Homo sapiens
  misc_RNA (1)...(19): siRNA sense strand
uaaagcugaccaugaacaa

SEQ ID NO: 714755 - RNA, 19 nt, Homo sapiens
  misc_RNA (1)...(19): siRNA sense strand
guacaaugucucccagcaa

SEQ ID NO: 714756 - RNA, 19 nt, Homo sapiens
  misc_RNA (1)...(19): siRNA sense strand
gucaagacccugaaucucu

SEQ ID NO: 714757 - RNA, 19 nt, Homo sapiens
  misc_RNA (1)...(19): siRNA sense strand
guuauccgcaccagugauu

SEQ ID NO: 714758 - RNA, 19 nt, Homo sapiens
  misc_RNA (1)...(19): siRNA sense strand
cagugauuguugacauuga

SEQ ID NO: 714759 - RNA, 19 nt, Homo sapiens
  misc_RNA (1)...(19): siRNA sense strand
uccagucugugcaucauga

SEQ ID NO: 714760 - RNA, 19 nt, Homo sapiens
  misc_RNA (1)...(19): siRNA sense strand
gaugaaaacaugaggaaau

SEQ ID NO: 714761 - RNA, 19 nt, Homo sapiens
  misc_RNA (1)...(19): siRNA sense strand
ucuccagaaucuccgcuuu

SEQ ID NO: 714762 - RNA, 19 nt, Homo sapiens
  misc_RNA (1)...(19): siRNA sense strand
aaacguggacucccucagu

SEQ ID NO: 714763 - RNA, 19 nt, Homo sapiens
  misc_RNA (1)...(19): siRNA sense strand
guugaagccaggccaaaug

SEQ ID NO: 714764 - RNA, 19 nt, Homo sapiens
  misc_RNA (1)...(19): siRNA sense strand
gggccgugacauugauaua

SEQ ID NO: 714765 - RNA, 19 nt, Homo sapiens
  misc_RNA (1)...(19): siRNA sense strand
gcaauuccagucugugcau

SEQ ID NO: 714766 - RNA, 19 nt, Homo sapiens
  misc_RNA (1)...(19): siRNA sense strand
cuucaaggauagcaggaau

SEQ ID NO: 714767 - RNA, 19 nt, Homo sapiens
  misc_RNA (1)...(19): siRNA sense strand
caccagugauuguugacau

SEQ ID NO: 714768 - RNA, 19 nt, Homo sapiens
  misc_RNA (1)...(19): siRNA sense strand
cugaagaucacugaaagaa

SEQ ID NO: 714769 - RNA, 19 nt, Homo sapiens
  misc_RNA (1)...(19): siRNA sense strand
caaagucaagacccugaau

SEQ ID NO: 714770 - RNA, 19 nt, Homo sapiens
  misc_RNA (1)...(19): siRNA sense strand
gaccagucugccuauguaa

SEQ ID NO: 714771 - RNA, 19 nt, Homo sapiens
  misc_RNA (1)...(19): siRNA sense strand
ggccgcaauuccagucugu

SEQ ID NO: 714772 - RNA, 19 nt, Homo sapiens
  misc_RNA (1)...(19): siRNA sense strand
gaacacacaagaugaaaac

SEQ ID NO: 714773 - RNA, 19 nt, Homo sapiens
  misc_RNA (1)...(19): siRNA sense strand
auguggaccuucaucacua

SEQ ID NO: 714774 - RNA, 19 nt, Homo sapiens
  misc_RNA (1)...(19): siRNA sense strand
ggacucccucagugcauug

SEQ ID NO: 714775 - RNA, 19 nt, Homo sapiens
  misc_RNA (1)...(19): siRNA sense strand
gugcaaguacuucaaggau

SEQ ID NO: 714776 - RNA, 19 nt, Homo sapiens
  misc_RNA (1)...(19): siRNA sense strand
ggaaaacuuuacuggaucu

SEQ ID NO: 714777 - RNA, 19 nt, Homo sapiens
  misc_RNA (1)...(19): siRNA sense strand
aacaaacgguacaaugucu

SEQ ID NO: 714778 - RNA, 19 nt, Homo sapiens
  misc_RNA (1)...(19): siRNA sense strand
gccaaauggagaugcuaaa

SEQ ID NO: 714779 - RNA, 19 nt, Homo sapiens
  misc_RNA (1)...(19): siRNA sense strand
caaggauagcaggaauaua

SEQ ID NO: 714780 - RNA, 19 nt, Homo sapiens
  misc_RNA (1)...(19): siRNA sense strand
aaggaaaacuuuacuggau

SEQ ID NO: 714781 - RNA, 19 nt, Homo sapiens
  misc_RNA (1)...(19): siRNA sense strand
ccagucugccuauguaagu

SEQ ID NO: 714782 - RNA, 19 nt, Homo sapiens
  misc_RNA (1)...(19): siRNA sense strand
agaaggcucccaaagucaa

SEQ ID NO: 714783 - RNA, 19 nt, Homo sapiens
  misc_RNA (1)...(19): siRNA sense strand
gaaaugguucaaggucaca

SEQ ID NO: 714784 - RNA, 19 nt, Homo sapiens
  misc_RNA (1)...(19): siRNA sense strand
caaauggagaugcuaaagc

SEQ ID NO: 714785 - RNA, 19 nt, Homo sapiens
  misc_RNA (1)...(19): siRNA sense strand
ggcggaacacacaagauga

SEQ ID NO: 714786 - RNA, 19 nt, Homo sapiens
  misc_RNA (1)...(19): siRNA sense strand
ccaaauggagaugcuaaag

SEQ ID NO: 714787 - RNA, 19 nt, Homo sapiens
  misc_RNA (1)...(19): siRNA sense strand
gaaacucagcaugacuuca

SEQ ID NO: 714788 - RNA, 19 nt, Homo sapiens
  misc_RNA (1)...(19): siRNA sense strand
cacacaagaugaaaacaug

SEQ ID NO: 714789 - RNA, 19 nt, Homo sapiens
  misc_RNA (1)...(19): siRNA sense strand
cuugaugggccgugacauu

SEQ ID NO: 714790 - RNA, 19 nt, Homo sapiens
  misc_RNA (1)...(19): siRNA sense strand
cuaaagcugaccaugaaca

SEQ ID NO: 714791 - RNA, 19 nt, Homo sapiens
  misc_RNA (1)...(19): siRNA sense strand
gaguuauccgcaccaguga

SEQ ID NO: 714792 - RNA, 19 nt, Homo sapiens
  misc_RNA (1)...(19): siRNA sense strand
gcugccacccugaagauca

SEQ ID NO: 714793 - RNA, 19 nt, Homo sapiens
  misc_RNA (1)...(19): siRNA sense strand
gaagaucacugaaagaaau

SEQ ID NO: 714794 - RNA, 19 nt, Homo sapiens
  misc_RNA (1)...(19): siRNA sense strand
ggaccagucugccuaugua

SEQ ID NO: 714795 - RNA, 19 nt, Homo sapiens
  misc_RNA (1)...(19): siRNA sense strand
gauauaauccugaaucgaa

SEQ ID NO: 714796 - RNA, 19 nt, Homo sapiens
  misc_RNA (1)...(19): siRNA sense strand
gcaaguacuucaaggauag

SEQ ID NO: 714797 - RNA, 19 nt, Homo sapiens
  misc_RNA (1)...(19): siRNA sense strand
gaagagcuauggcuagaag

SEQ ID NO: 714798 - RNA, 19 nt, Homo sapiens
  misc_RNA (1)...(19): siRNA sense strand
aaggauagcaggaauauaa

SEQ ID NO: 714799 - RNA, 19 nt, Homo sapiens
  misc_RNA (1)...(19): siRNA sense strand
gaacaaacgguacaauguc

SEQ ID NO: 714800 - RNA, 19 nt, Homo sapiens
  misc_RNA (1)...(19): siRNA sense strand
ccuacucugugaagaauaa

SEQ ID NO: 714801 - RNA, 19 nt, Homo sapiens
  misc_RNA (1)...(19): siRNA sense strand
ugacagcucugagacaaug

SEQ ID NO: 714802 - RNA, 19 nt, Homo sapiens
  misc_RNA (1)...(19): siRNA sense strand
agagaaggcucccaaaguc

SEQ ID NO: 714803 - RNA, 19 nt, Homo sapiens
  misc_RNA (1)...(19): siRNA sense strand
gaucugagacccuaaagca

SEQ ID NO: 714804 - RNA, 19 nt, Homo sapiens
  misc_RNA (1)...(19): siRNA sense strand
gccgugacauugauauaau

SEQ ID NO: 714805 - RNA, 19 nt, Homo sapiens
  misc_RNA (1)...(19): siRNA sense strand
ugcaaguacuucaaggaua

SEQ ID NO: 714806 - RNA, 19 nt, Homo sapiens
  misc_RNA (1)...(19): siRNA sense strand
ugcuaaagcugaccaugaa

SEQ ID NO: 714807 - RNA, 19 nt, Homo sapiens
  misc_RNA (1)...(19): siRNA sense strand
cugagacccuaaagcauuu

SEQ ID NO: 714808 - RNA, 19 nt, Homo sapiens
  misc_RNA (1)...(19): siRNA sense strand
ugaacaaacgguacaaugu

SEQ ID NO: 714809 - RNA, 19 nt, Homo sapiens
  misc_RNA (1)...(19): siRNA sense strand
gacccugaaucucuccaaa

SEQ ID NO: 714810 - RNA, 19 nt, Homo sapiens
  misc_RNA (1)...(19): siRNA sense strand
aaauggagaugcuaaagcu

SEQ ID NO: 714811 - RNA, 19 nt, Homo sapiens
  misc_RNA (1)...(19): siRNA sense strand
gcauuuaguccugcaauuc

SEQ ID NO: 714812 - RNA, 19 nt, Homo sapiens
  misc_RNA (1)...(19): siRNA sense strand
aaugaaacccugcaaggaa

SEQ ID NO: 714813 - RNA, 19 nt, Homo sapiens
  misc_RNA (1)...(19): siRNA sense strand
ucgaagagcuauggcuaga

SEQ ID NO: 714814 - RNA, 19 nt, Homo sapiens
  misc_RNA (1)...(19): siRNA sense strand
gaugggccgugacauugau

SEQ ID NO: 714815 - RNA, 19 nt, Homo sapiens
  misc_RNA (1)...(19): siRNA sense strand
gugcauugccugaaacuca

SEQ ID NO: 714816 - RNA, 19 nt, Homo sapiens
  misc_RNA (1)...(19): siRNA sense strand
gagaaggcucccaaaguca

SEQ ID NO: 714817 - RNA, 19 nt, Homo sapiens
  misc_RNA (1)...(19): siRNA sense strand
augaaacccugcaaggaaa

SEQ ID NO: 714818 - RNA, 19 nt, Homo sapiens
  misc_RNA (1)...(19): siRNA sense strand
gcccuacucugugaagaau

SEQ ID NO: 714819 - RNA, 19 nt, Homo sapiens
  misc_RNA (1)...(19): siRNA sense strand
gcggaacacacaagaugaa

SEQ ID NO: 714820 - RNA, 19 nt, Homo sapiens
  misc_RNA (1)...(19): siRNA sense strand
ucugagacccuaaagcauu

SEQ ID NO: 714821 - RNA, 19 nt, Homo sapiens
  misc_RNA (1)...(19): siRNA sense strand
uccagaaucuccgcuuuga

SEQ ID NO: 714822 - RNA, 19 nt, Homo sapiens
  misc_RNA (1)...(19): siRNA sense strand
caaugaaacccugcaagga

SEQ ID NO: 714823 - RNA, 19 nt, Homo sapiens
  misc_RNA (1)...(19): siRNA sense strand
gacauugacagcucugaga

SEQ ID NO: 714824 - RNA, 19 nt, Homo sapiens
  misc_RNA (1)...(19): siRNA sense strand
ccuggacggccgagaguua

SEQ ID NO: 714825 - RNA, 19 nt, Homo sapiens
  misc_RNA (1)...(19): siRNA sense strand
ggccgugacauugauauaa

SEQ ID NO: 714826 - RNA, 19 nt, Homo sapiens
  misc_RNA (1)...(19): siRNA sense strand
ugaagaucacugaaagaaa

SEQ ID NO: 714827 - RNA, 19 nt, Homo sapiens
  misc_RNA (1)...(19): siRNA sense strand
ccgcaccagugauuguuga

SEQ ID NO: 714828 - RNA, 19 nt, Homo sapiens
  misc_RNA (1)...(19): siRNA sense strand
ggaguugggcaaggugaaa

SEQ ID NO: 714829 - RNA, 19 nt, Homo sapiens
  misc_RNA (1)...(19): siRNA sense strand
ucaaggauagcaggaauau

SEQ ID NO: 714830 - RNA, 19 nt, Homo sapiens
  misc_RNA (1)...(19): siRNA sense strand
uuacugcgcccuacucugu

SEQ ID NO: 714831 - RNA, 19 nt, Homo sapiens
  misc_RNA (1)...(19): siRNA sense strand
ggccaaauggagaugcuaa

SEQ ID NO: 714832 - RNA, 19 nt, Homo sapiens
  misc_RNA (1)...(19): siRNA sense strand
uaaagcugaccaugaacaa

SEQ ID NO: 714833 - RNA, 19 nt, Homo sapiens
  misc_RNA (1)...(19): siRNA sense strand
guacaaugucucccagcaa

SEQ ID NO: 714834 - RNA, 19 nt, Homo sapiens
  misc_RNA (1)...(19): siRNA sense strand
gucaagacccugaaucucu

SEQ ID NO: 714835 - RNA, 19 nt, Homo sapiens
  misc_RNA (1)...(19): siRNA sense strand
guuauccgcaccagugauu

SEQ ID NO: 714836 - RNA, 19 nt, Homo sapiens
  misc_RNA (1)...(19): siRNA sense strand
gaugaaaacaugaggaaau

SEQ ID NO: 714837 - RNA, 19 nt, Homo sapiens
  misc_RNA (1)...(19): siRNA sense strand
cagugauuguugacauuga

SEQ ID NO: 714838 - RNA, 19 nt, Homo sapiens
  misc_RNA (1)...(19): siRNA sense strand
guugaagccaggccaaaug

SEQ ID NO: 714839 - RNA, 19 nt, Homo sapiens
  misc_RNA (1)...(19): siRNA sense strand
aaacguggacucccucagu

SEQ ID NO: 714840 - RNA, 19 nt, Homo sapiens
  misc_RNA (1)...(19): siRNA sense strand
ucuccagaaucuccgcuuu

SEQ ID NO: 714841 - RNA, 19 nt, Homo sapiens
  misc_RNA (1)...(19): siRNA sense strand
gggccgugacauugauaua

SEQ ID NO: 714842 - RNA, 19 nt, Homo sapiens
  misc_RNA (1)...(19): siRNA sense strand
cuucaaggauagcaggaau

SEQ ID NO: 714843 - RNA, 19 nt, Homo sapiens
  misc_RNA (1)...(19): siRNA sense strand
caccagugauuguugacau

SEQ ID NO: 714844 - RNA, 19 nt, Homo sapiens
  misc_RNA (1)...(19): siRNA sense strand
cugaagaucacugaaagaa

SEQ ID NO: 714845 - RNA, 19 nt, Homo sapiens
  misc_RNA (1)...(19): siRNA sense strand
caaagucaagacccugaau

SEQ ID NO: 714846 - RNA, 19 nt, Homo sapiens
  misc_RNA (1)...(19): siRNA sense strand
gaccagucugccuauguaa

SEQ ID NO: 714847 - RNA, 19 nt, Homo sapiens
  misc_RNA (1)...(19): siRNA sense strand
gaacacacaagaugaaaac

SEQ ID NO: 714848 - RNA, 19 nt, Homo sapiens
  misc_RNA (1)...(19): siRNA sense strand
ggacucccucagugcauug

SEQ ID NO: 714849 - RNA, 19 nt, Homo sapiens
  misc_RNA (1)...(19): siRNA sense strand
gugcaaguacuucaaggau

SEQ ID NO: 714850 - RNA, 19 nt, Homo sapiens
  misc_RNA (1)...(19): siRNA sense strand
ggaaaacuuuacuggaucu

SEQ ID NO: 714851 - RNA, 19 nt, Homo sapiens
  misc_RNA (1)...(19): siRNA sense strand
aacaaacgguacaaugucu

SEQ ID NO: 714852 - RNA, 19 nt, Homo sapiens
  misc_RNA (1)...(19): siRNA sense strand
ccagucugccuauguaagu

SEQ ID NO: 714853 - RNA, 19 nt, Homo sapiens
  misc_RNA (1)...(19): siRNA sense strand
caaggauagcaggaauaua

SEQ ID NO: 714854 - RNA, 19 nt, Homo sapiens
  misc_RNA (1)...(19): siRNA sense strand
gccaaauggagaugcuaaa

SEQ ID NO: 714855 - RNA, 19 nt, Homo sapiens
  misc_RNA (1)...(19): siRNA sense strand
aaggaaaacuuuacuggau

SEQ ID NO: 714856 - RNA, 19 nt, Homo sapiens
  misc_RNA (1)...(19): siRNA sense strand
caaauggagaugcuaaagc

SEQ ID NO: 714857 - RNA, 19 nt, Homo sapiens
  misc_RNA (1)...(19): siRNA sense strand
gaaaugguucaaggucaca

SEQ ID NO: 714858 - RNA, 19 nt, Homo sapiens
  misc_RNA (1)...(19): siRNA sense strand
agaaggcucccaaagucaa

SEQ ID NO: 714859 - RNA, 19 nt, Homo sapiens
  misc_RNA (1)...(19): siRNA sense strand
ggcggaacacacaagauga

SEQ ID NO: 714860 - RNA, 19 nt, Homo sapiens
  misc_RNA (1)...(19): siRNA sense strand
gaaacucagcaugacuuca

SEQ ID NO: 714861 - RNA, 19 nt, Homo sapiens
  misc_RNA (1)...(19): siRNA sense strand
cacacaagaugaaaacaug

SEQ ID NO: 714862 - RNA, 19 nt, Homo sapiens
  misc_RNA (1)...(19): siRNA sense strand
ccaaauggagaugcuaaag

SEQ ID NO: 714863 - RNA, 19 nt, Homo sapiens
  misc_RNA (1)...(19): siRNA sense strand
cuugaugggccgugacauu

SEQ ID NO: 714864 - RNA, 19 nt, Homo sapiens
  misc_RNA (1)...(19): siRNA sense strand
cuaaagcugaccaugaaca

SEQ ID NO: 714865 - RNA, 19 nt, Homo sapiens
  misc_RNA (1)...(19): siRNA sense strand
gaguuauccgcaccaguga

SEQ ID NO: 714866 - RNA, 19 nt, Homo sapiens
  misc_RNA (1)...(19): siRNA sense strand
gcugccacccugaagauca

SEQ ID NO: 714867 - RNA, 19 nt, Homo sapiens
  misc_RNA (1)...(19): siRNA sense strand
gaagaucacugaaagaaau

SEQ ID NO: 714868 - RNA, 19 nt, Homo sapiens
  misc_RNA (1)...(19): siRNA sense strand
gauauaauccugaaucgaa

SEQ ID NO: 714869 - RNA, 19 nt, Homo sapiens
  misc_RNA (1)...(19): siRNA sense strand
gaacaaacgguacaauguc

SEQ ID NO: 714870 - RNA, 19 nt, Homo sapiens
  misc_RNA (1)...(19): siRNA sense strand
ccuacucugugaagaauaa

SEQ ID NO: 714871 - RNA, 19 nt, Homo sapiens
  misc_RNA (1)...(19): siRNA sense strand
agagaaggcucccaaaguc

SEQ ID NO: 714872 - RNA, 19 nt, Homo sapiens
  misc_RNA (1)...(19): siRNA sense strand
gccgugacauugauauaau

SEQ ID NO: 714873 - RNA, 19 nt, Homo sapiens
  misc_RNA (1)...(19): siRNA sense strand
ugcuaaagcugaccaugaa

SEQ ID NO: 714874 - RNA, 19 nt, Homo sapiens
  misc_RNA (1)...(19): siRNA sense strand
ugaacaaacgguacaaugu

SEQ ID NO: 714875 - RNA, 19 nt, Homo sapiens
  misc_RNA (1)...(19): siRNA sense strand
aaauggagaugcuaaagcu

SEQ ID NO: 714876 - RNA, 19 nt, Homo sapiens
  misc_RNA (1)...(19): siRNA sense strand
gaugggccgugacauugau

SEQ ID NO: 714877 - RNA, 19 nt, Homo sapiens
  misc_RNA (1)...(19): siRNA sense strand
gagaaggcucccaaaguca

SEQ ID NO: 714878 - RNA, 19 nt, Homo sapiens
  misc_RNA (1)...(19): siRNA sense strand
gcccuacucugugaagaau

SEQ ID NO: 714879 - RNA, 19 nt, Homo sapiens
  misc_RNA (1)...(19): siRNA sense strand
gcggaacacacaagaugaa

SEQ ID NO: 714880 - RNA, 19 nt, Homo sapiens
  misc_RNA (1)...(19): siRNA sense strand
uccagaaucuccgcuuuga

SEQ ID NO: 714881 - RNA, 19 nt, Homo sapiens
  misc_RNA (1)...(19): siRNA sense strand
ggccgugacauugauauaa

SEQ ID NO: 714882 - RNA, 19 nt, Homo sapiens
  misc_RNA (1)...(19): siRNA sense strand
ugaagaucacugaaagaaa

SEQ ID NO: 714883 - RNA, 19 nt, Homo sapiens
  misc_RNA (1)...(19): siRNA sense strand
uuacugcgcccuacucugu

SEQ ID NO: 714884 - RNA, 19 nt, Homo sapiens
  misc_RNA (1)...(19): siRNA sense strand
ggccaaauggagaugcuaa

SEQ ID NO: 714885 - RNA, 19 nt, Homo sapiens
  misc_RNA (1)...(19): siRNA sense strand
uaaagcugaccaugaacaa

SEQ ID NO: 714886 - RNA, 19 nt, Homo sapiens
  misc_RNA (1)...(19): siRNA sense strand
guacaaugucucccagcaa

SEQ ID NO: 714887 - RNA, 19 nt, Homo sapiens
  misc_RNA (1)...(19): siRNA sense strand
gaugaaaacaugaggaaau

SEQ ID NO: 714888 - RNA, 19 nt, Homo sapiens
  misc_RNA (1)...(19): siRNA sense strand
guugaagccaggccaaaug

SEQ ID NO: 714889 - RNA, 19 nt, Homo sapiens
  misc_RNA (1)...(19): siRNA sense strand
ucuccagaaucuccgcuuu

SEQ ID NO: 714890 - RNA, 19 nt, Homo sapiens
  misc_RNA (1)...(19): siRNA sense strand
gggccgugacauugauaua

SEQ ID NO: 714891 - RNA, 19 nt, Homo sapiens
  misc_RNA (1)...(19): siRNA sense strand
cugaagaucacugaaagaa

SEQ ID NO: 714892 - RNA, 19 nt, Homo sapiens
  misc_RNA (1)...(19): siRNA sense strand
gaacacacaagaugaaaac

SEQ ID NO: 714893 - RNA, 19 nt, Homo sapiens
  misc_RNA (1)...(19): siRNA sense strand
aacaaacgguacaaugucu

SEQ ID NO: 714894 - RNA, 19 nt, Homo sapiens
  misc_RNA (1)...(19): siRNA sense strand
gccaaauggagaugcuaaa

SEQ ID NO: 714895 - RNA, 19 nt, Homo sapiens
  misc_RNA (1)...(19): siRNA sense strand
caaauggagaugcuaaagc

SEQ ID NO: 714896 - RNA, 19 nt, Homo sapiens
  misc_RNA (1)...(19): siRNA sense strand
agaaggcucccaaagucaa

SEQ ID NO: 714897 - RNA, 19 nt, Homo sapiens
  misc_RNA (1)...(19): siRNA sense strand
gaaaugguucaaggucaca

SEQ ID NO: 714898 - RNA, 19 nt, Homo sapiens
  misc_RNA (1)...(19): siRNA sense strand
ccaaauggagaugcuaaag

SEQ ID NO: 714899 - RNA, 19 nt, Homo sapiens
  misc_RNA (1)...(19): siRNA sense strand
ggcggaacacacaagauga

SEQ ID NO: 714900 - RNA, 19 nt, Homo sapiens
  misc_RNA (1)...(19): siRNA sense strand
cacacaagaugaaaacaug

SEQ ID NO: 714901 - RNA, 19 nt, Homo sapiens
  misc_RNA (1)...(19): siRNA sense strand
cuaaagcugaccaugaaca

SEQ ID NO: 714902 - RNA, 19 nt, Homo sapiens
  misc_RNA (1)...(19): siRNA sense strand
gcugccacccugaagauca

SEQ ID NO: 714903 - RNA, 19 nt, Homo sapiens
  misc_RNA (1)...(19): siRNA sense strand
cuugaugggccgugacauu

SEQ ID NO: 714904 - RNA, 19 nt, Homo sapiens
  misc_RNA (1)...(19): siRNA sense strand
gaagaucacugaaagaaau

SEQ ID NO: 714905 - RNA, 19 nt, Homo sapiens
  misc_RNA (1)...(19): siRNA sense strand
ggaccagucugccuaugua

SEQ ID NO: 714906 - RNA, 19 nt, Homo sapiens
  misc_RNA (1)...(19): siRNA sense strand
gauauaauccugaaucgaa

SEQ ID NO: 714907 - RNA, 19 nt, Homo sapiens
  misc_RNA (1)...(19): siRNA sense strand
gcaaguacuucaaggauag

SEQ ID NO: 714908 - RNA, 19 nt, Homo sapiens
  misc_RNA (1)...(19): siRNA sense strand
gaagagcuauggcuagaag

SEQ ID NO: 714909 - RNA, 19 nt, Homo sapiens
  misc_RNA (1)...(19): siRNA sense strand
aaggauagcaggaauauaa

SEQ ID NO: 714910 - RNA, 19 nt, Homo sapiens
  misc_RNA (1)...(19): siRNA sense strand
gaacaaacgguacaauguc

SEQ ID NO: 714911 - RNA, 19 nt, Homo sapiens
  misc_RNA (1)...(19): siRNA sense strand
ccuacucugugaagaauaa

SEQ ID NO: 714912 - RNA, 19 nt, Homo sapiens
  misc_RNA (1)...(19): siRNA sense strand
ugacagcucugagacaaug

SEQ ID NO: 714913 - RNA, 19 nt, Homo sapiens
  misc_RNA (1)...(19): siRNA sense strand
agagaaggcucccaaaguc

SEQ ID NO: 714914 - RNA, 19 nt, Homo sapiens
  misc_RNA (1)...(19): siRNA sense strand
gaucugagacccuaaagca

SEQ ID NO: 714915 - RNA, 19 nt, Homo sapiens
  misc_RNA (1)...(19): siRNA sense strand
gccgugacauugauauaau

SEQ ID NO: 714916 - RNA, 19 nt, Homo sapiens
  misc_RNA (1)...(19): siRNA sense strand
ugcaaguacuucaaggaua

SEQ ID NO: 714917 - RNA, 19 nt, Homo sapiens
  misc_RNA (1)...(19): siRNA sense strand
ugcuaaagcugaccaugaa

SEQ ID NO: 714918 - RNA, 19 nt, Homo sapiens
  misc_RNA (1)...(19): siRNA sense strand
cugagacccuaaagcauuu

SEQ ID NO: 714919 - RNA, 19 nt, Homo sapiens
  misc_RNA (1)...(19): siRNA sense strand
ugaacaaacgguacaaugu

SEQ ID NO: 714920 - RNA, 19 nt, Homo sapiens
  misc_RNA (1)...(19): siRNA sense strand
gacccugaaucucuccaaa

SEQ ID NO: 714921 - RNA, 19 nt, Homo sapiens
  misc_RNA (1)...(19): siRNA sense strand
aaauggagaugcuaaagcu

SEQ ID NO: 714922 - RNA, 19 nt, Homo sapiens
  misc_RNA (1)...(19): siRNA sense strand
gcauuuaguccugcaauuc

SEQ ID NO: 714923 - RNA, 19 nt, Homo sapiens
  misc_RNA (1)...(19): siRNA sense strand
aaugaaacccugcaaggaa

SEQ ID NO: 714924 - RNA, 19 nt, Homo sapiens
  misc_RNA (1)...(19): siRNA sense strand
ucgaagagcuauggcuaga

SEQ ID NO: 714925 - RNA, 19 nt, Homo sapiens
  misc_RNA (1)...(19): siRNA sense strand
gaugggccgugacauugau

SEQ ID NO: 714926 - RNA, 19 nt, Homo sapiens
  misc_RNA (1)...(19): siRNA sense strand
gugcauugccugaaacuca

SEQ ID NO: 714927 - RNA, 19 nt, Homo sapiens
  misc_RNA (1)...(19): siRNA sense strand
gagaaggcucccaaaguca

SEQ ID NO: 714928 - RNA, 19 nt, Homo sapiens
  misc_RNA (1)...(19): siRNA sense strand
augaaacccugcaaggaaa

SEQ ID NO: 714929 - RNA, 19 nt, Homo sapiens
  misc_RNA (1)...(19): siRNA sense strand
gcccuacucugugaagaau

SEQ ID NO: 714930 - RNA, 19 nt, Homo sapiens
  misc_RNA (1)...(19): siRNA sense strand
gcggaacacacaagaugaa

SEQ ID NO: 714931 - RNA, 19 nt, Homo sapiens
  misc_RNA (1)...(19): siRNA sense strand
ucugagacccuaaagcauu

SEQ ID NO: 714932 - RNA, 19 nt, Homo sapiens
  misc_RNA (1)...(19): siRNA sense strand
uccagaaucuccgcuuuga

SEQ ID NO: 714933 - RNA, 19 nt, Homo sapiens
  misc_RNA (1)...(19): siRNA sense strand
caaugaaacccugcaagga

SEQ ID NO: 714934 - RNA, 19 nt, Homo sapiens
  misc_RNA (1)...(19): siRNA sense strand
gacauugacagcucugaga

SEQ ID NO: 714935 - RNA, 19 nt, Homo sapiens
  misc_RNA (1)...(19): siRNA sense strand
ccuggacggccgagaguua

SEQ ID NO: 714936 - RNA, 19 nt, Homo sapiens
  misc_RNA (1)...(19): siRNA sense strand
ggccgugacauugauauaa

SEQ ID NO: 714937 - RNA, 19 nt, Homo sapiens
  misc_RNA (1)...(19): siRNA sense strand
ugaagaucacugaaagaaa

SEQ ID NO: 714938 - RNA, 19 nt, Homo sapiens
  misc_RNA (1)...(19): siRNA sense strand
ccgcaccagugauuguuga

SEQ ID NO: 714939 - RNA, 19 nt, Homo sapiens
  misc_RNA (1)...(19): siRNA sense strand
ggaguugggcaaggugaaa

SEQ ID NO: 714940 - RNA, 19 nt, Homo sapiens
  misc_RNA (1)...(19): siRNA sense strand
ucaaggauagcaggaauau

SEQ ID NO: 714941 - RNA, 19 nt, Homo sapiens
  misc_RNA (1)...(19): siRNA sense strand
uuacugcgcccuacucugu

SEQ ID NO: 714942 - RNA, 19 nt, Homo sapiens
  misc_RNA (1)...(19): siRNA sense strand
ggccaaauggagaugcuaa

SEQ ID NO: 714943 - RNA, 19 nt, Homo sapiens
  misc_RNA (1)...(19): siRNA sense strand
uaaagcugaccaugaacaa

SEQ ID NO: 714944 - RNA, 19 nt, Homo sapiens
  misc_RNA (1)...(19): siRNA sense strand
guacaaugucucccagcaa

SEQ ID NO: 714945 - RNA, 19 nt, Homo sapiens
  misc_RNA (1)...(19): siRNA sense strand
gucaagacccugaaucucu

SEQ ID NO: 714946 - RNA, 19 nt, Homo sapiens
  misc_RNA (1)...(19): siRNA sense strand
guuauccgcaccagugauu

SEQ ID NO: 714947 - RNA, 19 nt, Homo sapiens
  misc_RNA (1)...(19): siRNA sense strand
gaugaaaacaugaggaaau

SEQ ID NO: 714948 - RNA, 19 nt, Homo sapiens
  misc_RNA (1)...(19): siRNA sense strand
cagugauuguugacauuga

SEQ ID NO: 714949 - RNA, 19 nt, Homo sapiens
  misc_RNA (1)...(19): siRNA sense strand
guugaagccaggccaaaug

SEQ ID NO: 714950 - RNA, 19 nt, Homo sapiens
  misc_RNA (1)...(19): siRNA sense strand
aaacguggacucccucagu

SEQ ID NO: 714951 - RNA, 19 nt, Homo sapiens
  misc_RNA (1)...(19): siRNA sense strand
ucuccagaaucuccgcuuu

SEQ ID NO: 714952 - RNA, 19 nt, Homo sapiens
  misc_RNA (1)...(19): siRNA sense strand
gggccgugacauugauaua

SEQ ID NO: 714953 - RNA, 19 nt, Homo sapiens
  misc_RNA (1)...(19): siRNA sense strand
cuucaaggauagcaggaau

SEQ ID NO: 714954 - RNA, 19 nt, Homo sapiens
  misc_RNA (1)...(19): siRNA sense strand
caccagugauuguugacau

SEQ ID NO: 714955 - RNA, 19 nt, Homo sapiens
  misc_RNA (1)...(19): siRNA sense strand
cugaagaucacugaaagaa

SEQ ID NO: 714956 - RNA, 19 nt, Homo sapiens
  misc_RNA (1)...(19): siRNA sense strand
caaagucaagacccugaau

SEQ ID NO: 714957 - RNA, 19 nt, Homo sapiens
  misc_RNA (1)...(19): siRNA sense strand
gaccagucugccuauguaa

SEQ ID NO: 714958 - RNA, 19 nt, Homo sapiens
  misc_RNA (1)...(19): siRNA sense strand
gaacacacaagaugaaaac

SEQ ID NO: 714959 - RNA, 19 nt, Homo sapiens
  misc_RNA (1)...(19): siRNA sense strand
ggacucccucagugcauug

SEQ ID NO: 714960 - RNA, 19 nt, Homo sapiens
  misc_RNA (1)...(19): siRNA sense strand
gugcaaguacuucaaggau

SEQ ID NO: 714961 - RNA, 19 nt, Homo sapiens
  misc_RNA (1)...(19): siRNA sense strand
ggaaaacuuuacuggaucu

SEQ ID NO: 714962 - RNA, 19 nt, Homo sapiens
  misc_RNA (1)...(19): siRNA sense strand
aacaaacgguacaaugucu

SEQ ID NO: 714963 - RNA, 19 nt, Homo sapiens
  misc_RNA (1)...(19): siRNA sense strand
ccagucugccuauguaagu

SEQ ID NO: 714964 - RNA, 19 nt, Homo sapiens
  misc_RNA (1)...(19): siRNA sense strand
caaggauagcaggaauaua

SEQ ID NO: 714965 - RNA, 19 nt, Homo sapiens
  misc_RNA (1)...(19): siRNA sense strand
gccaaauggagaugcuaaa

SEQ ID NO: 714966 - RNA, 19 nt, Homo sapiens
  misc_RNA (1)...(19): siRNA sense strand
aaggaaaacuuuacuggau

SEQ ID NO: 714967 - RNA, 19 nt, Homo sapiens
  misc_RNA (1)...(19): siRNA sense strand
caaauggagaugcuaaagc

SEQ ID NO: 714968 - RNA, 19 nt, Homo sapiens
  misc_RNA (1)...(19): siRNA sense strand
gaaaugguucaaggucaca

SEQ ID NO: 714969 - RNA, 19 nt, Homo sapiens
  misc_RNA (1)...(19): siRNA sense strand
agaaggcucccaaagucaa

SEQ ID NO: 714970 - RNA, 19 nt, Homo sapiens
  misc_RNA (1)...(19): siRNA sense strand
ggcggaacacacaagauga

SEQ ID NO: 714971 - RNA, 19 nt, Homo sapiens
  misc_RNA (1)...(19): siRNA sense strand
gaaacucagcaugacuuca

SEQ ID NO: 714972 - RNA, 19 nt, Homo sapiens
  misc_RNA (1)...(19): siRNA sense strand
cacacaagaugaaaacaug

SEQ ID NO: 714973 - RNA, 19 nt, Homo sapiens
  misc_RNA (1)...(19): siRNA sense strand
ccaaauggagaugcuaaag

SEQ ID NO: 714974 - RNA, 19 nt, Homo sapiens
  misc_RNA (1)...(19): siRNA sense strand
cuugaugggccgugacauu

SEQ ID NO: 714975 - RNA, 19 nt, Homo sapiens
  misc_RNA (1)...(19): siRNA sense strand
cuaaagcugaccaugaaca

SEQ ID NO: 714976 - RNA, 19 nt, Homo sapiens
  misc_RNA (1)...(19): siRNA sense strand
gaguuauccgcaccaguga

SEQ ID NO: 714977 - RNA, 19 nt, Homo sapiens
  misc_RNA (1)...(19): siRNA sense strand
gcugccacccugaagauca

SEQ ID NO: 714978 - RNA, 19 nt, Homo sapiens
  misc_RNA (1)...(19): siRNA sense strand
gaagaucacugaaagaaau

SEQ ID NO: 714979 - RNA, 19 nt, Homo sapiens
  misc_RNA (1)...(19): siRNA sense strand
ggaccagucugccuaugua

SEQ ID NO: 714980 - RNA, 19 nt, Homo sapiens
  misc_RNA (1)...(19): siRNA sense strand
gauauaauccugaaucgaa

SEQ ID NO: 714981 - RNA, 19 nt, Homo sapiens
  misc_RNA (1)...(19): siRNA sense strand
gcaaguacuucaaggauag

SEQ ID NO: 714982 - RNA, 19 nt, Homo sapiens
  misc_RNA (1)...(19): siRNA sense strand
gaagagcuauggcuagaag

SEQ ID NO: 714983 - RNA, 19 nt, Homo sapiens
  misc_RNA (1)...(19): siRNA sense strand
aaggauagcaggaauauaa

SEQ ID NO: 714984 - RNA, 19 nt, Homo sapiens
  misc_RNA (1)...(19): siRNA sense strand
gaacaaacgguacaauguc

SEQ ID NO: 714985 - RNA, 19 nt, Homo sapiens
  misc_RNA (1)...(19): siRNA sense strand
ccuacucugugaagaauaa

SEQ ID NO: 714986 - RNA, 19 nt, Homo sapiens
  misc_RNA (1)...(19): siRNA sense strand
ugacagcucugagacaaug

SEQ ID NO: 714987 - RNA, 19 nt, Homo sapiens
  misc_RNA (1)...(19): siRNA sense strand
agagaaggcucccaaaguc

SEQ ID NO: 714988 - RNA, 19 nt, Homo sapiens
  misc_RNA (1)...(19): siRNA sense strand
gaucugagacccuaaagca

SEQ ID NO: 714989 - RNA, 19 nt, Homo sapiens
  misc_RNA (1)...(19): siRNA sense strand
gccgugacauugauauaau

SEQ ID NO: 714990 - RNA, 19 nt, Homo sapiens
  misc_RNA (1)...(19): siRNA sense strand
ugcaaguacuucaaggaua

SEQ ID NO: 714991 - RNA, 19 nt, Homo sapiens
  misc_RNA (1)...(19): siRNA sense strand
ugcuaaagcugaccaugaa

SEQ ID NO: 714992 - RNA, 19 nt, Homo sapiens
  misc_RNA (1)...(19): siRNA sense strand
cugagacccuaaagcauuu

SEQ ID NO: 714993 - RNA, 19 nt, Homo sapiens
  misc_RNA (1)...(19): siRNA sense strand
ugaacaaacgguacaaugu

SEQ ID NO: 714994 - RNA, 19 nt, Homo sapiens
  misc_RNA (1)...(19): siRNA sense strand
gacccugaaucucuccaaa

SEQ ID NO: 714995 - RNA, 19 nt, Homo sapiens
  misc_RNA (1)...(19): siRNA sense strand
aaauggagaugcuaaagcu

SEQ ID NO: 714996 - RNA, 19 nt, Homo sapiens
  misc_RNA (1)...(19): siRNA sense strand
gcauuuaguccugcaauuc

SEQ ID NO: 714997 - RNA, 19 nt, Homo sapiens
  misc_RNA (1)...(19): siRNA sense strand
aaugaaacccugcaaggaa

SEQ ID NO: 714998 - RNA, 19 nt, Homo sapiens
  misc_RNA (1)...(19): siRNA sense strand
ucgaagagcuauggcuaga

SEQ ID NO: 714999 - RNA, 19 nt, Homo sapiens
  misc_RNA (1)...(19): siRNA sense strand
gaugggccgugacauugau

SEQ ID NO: 715000 - RNA, 19 nt, Homo sapiens
  misc_RNA (1)...(19): siRNA sense strand
gugcauugccugaaacuca

SEQ ID NO: 715001 - RNA, 19 nt, Homo sapiens
  misc_RNA (1)...(19): siRNA sense strand
gagaaggcucccaaaguca

SEQ ID NO: 715002 - RNA, 19 nt, Homo sapiens
  misc_RNA (1)...(19): siRNA sense strand
augaaacccugcaaggaaa

SEQ ID NO: 715003 - RNA, 19 nt, Homo sapiens
  misc_RNA (1)...(19): siRNA sense strand
gcccuacucugugaagaau

SEQ ID NO: 715004 - RNA, 19 nt, Homo sapiens
  misc_RNA (1)...(19): siRNA sense strand
gcggaacacacaagaugaa

SEQ ID NO: 715005 - RNA, 19 nt, Homo sapiens
  misc_RNA (1)...(19): siRNA sense strand
ucugagacccuaaagcauu

SEQ ID NO: 715006 - RNA, 19 nt, Homo sapiens
  misc_RNA (1)...(19): siRNA sense strand
uccagaaucuccgcuuuga

SEQ ID NO: 715007 - RNA, 19 nt, Homo sapiens
  misc_RNA (1)...(19): siRNA sense strand
caaugaaacccugcaagga

SEQ ID NO: 715008 - RNA, 19 nt, Homo sapiens
  misc_RNA (1)...(19): siRNA sense strand
gacauugacagcucugaga

SEQ ID NO: 715009 - RNA, 19 nt, Homo sapiens
  misc_RNA (1)...(19): siRNA sense strand
ccuggacggccgagaguua

SEQ ID NO: 715010 - RNA, 19 nt, Homo sapiens
  misc_RNA (1)...(19): siRNA sense strand
ggccgugacauugauauaa

SEQ ID NO: 715011 - RNA, 19 nt, Homo sapiens
  misc_RNA (1)...(19): siRNA sense strand
ugaagaucacugaaagaaa

SEQ ID NO: 715012 - RNA, 19 nt, Homo sapiens
  misc_RNA (1)...(19): siRNA sense strand
ccgcaccagugauuguuga

SEQ ID NO: 715013 - RNA, 19 nt, Homo sapiens
  misc_RNA (1)...(19): siRNA sense strand
ggaguugggcaaggugaaa

SEQ ID NO: 715014 - RNA, 19 nt, Homo sapiens
  misc_RNA (1)...(19): siRNA sense strand
ucaaggauagcaggaauau

SEQ ID NO: 715015 - RNA, 19 nt, Homo sapiens
  misc_RNA (1)...(19): siRNA sense strand
uuacugcgcccuacucugu

SEQ ID NO: 715016 - RNA, 19 nt, Homo sapiens
  misc_RNA (1)...(19): siRNA sense strand
ggccaaauggagaugcuaa

SEQ ID NO: 715017 - RNA, 19 nt, Homo sapiens
  misc_RNA (1)...(19): siRNA sense strand
uaaagcugaccaugaacaa

SEQ ID NO: 715018 - RNA, 19 nt, Homo sapiens
  misc_RNA (1)...(19): siRNA sense strand
guacaaugucucccagcaa

SEQ ID NO: 715019 - RNA, 19 nt, Homo sapiens
  misc_RNA (1)...(19): siRNA sense strand
gucaagacccugaaucucu

SEQ ID NO: 715020 - RNA, 19 nt, Homo sapiens
  misc_RNA (1)...(19): siRNA sense strand
guuauccgcaccagugauu

SEQ ID NO: 715021 - RNA, 19 nt, Homo sapiens
  misc_RNA (1)...(19): siRNA sense strand
gaugaaaacaugaggaaau

SEQ ID NO: 715022 - RNA, 19 nt, Homo sapiens
  misc_RNA (1)...(19): siRNA sense strand
cagugauuguugacauuga

SEQ ID NO: 715023 - RNA, 19 nt, Homo sapiens
  misc_RNA (1)...(19): siRNA sense strand
guugaagccaggccaaaug

SEQ ID NO: 715024 - RNA, 19 nt, Homo sapiens
  misc_RNA (1)...(19): siRNA sense strand
aaacguggacucccucagu

SEQ ID NO: 715025 - RNA, 19 nt, Homo sapiens
  misc_RNA (1)...(19): siRNA sense strand
ucuccagaaucuccgcuuu

SEQ ID NO: 715026 - RNA, 19 nt, Homo sapiens
  misc_RNA (1)...(19): siRNA sense strand
gggccgugacauugauaua

SEQ ID NO: 715027 - RNA, 19 nt, Homo sapiens
  misc_RNA (1)...(19): siRNA sense strand
cuucaaggauagcaggaau

SEQ ID NO: 715028 - RNA, 19 nt, Homo sapiens
  misc_RNA (1)...(19): siRNA sense strand
caccagugauuguugacau

SEQ ID NO: 715029 - RNA, 19 nt, Homo sapiens
  misc_RNA (1)...(19): siRNA sense strand
cugaagaucacugaaagaa

SEQ ID NO: 715030 - RNA, 19 nt, Homo sapiens
  misc_RNA (1)...(19): siRNA sense strand
caaagucaagacccugaau

SEQ ID NO: 715031 - RNA, 19 nt, Homo sapiens
  misc_RNA (1)...(19): siRNA sense strand
gaccagucugccuauguaa

SEQ ID NO: 715032 - RNA, 19 nt, Homo sapiens
  misc_RNA (1)...(19): siRNA sense strand
gaacacacaagaugaaaac

SEQ ID NO: 715033 - RNA, 19 nt, Homo sapiens
  misc_RNA (1)...(19): siRNA sense strand
ggacucccucagugcauug

SEQ ID NO: 715034 - RNA, 19 nt, Homo sapiens
  misc_RNA (1)...(19): siRNA sense strand
gugcaaguacuucaaggau

SEQ ID NO: 715035 - RNA, 19 nt, Homo sapiens
  misc_RNA (1)...(19): siRNA sense strand
ggaaaacuuuacuggaucu

SEQ ID NO: 715036 - RNA, 19 nt, Homo sapiens
  misc_RNA (1)...(19): siRNA sense strand
aacaaacgguacaaugucu

SEQ ID NO: 715037 - RNA, 19 nt, Homo sapiens
  misc_RNA (1)...(19): siRNA sense strand
ccagucugccuauguaagu

SEQ ID NO: 715038 - RNA, 19 nt, Homo sapiens
  misc_RNA (1)...(19): siRNA sense strand
caaggauagcaggaauaua

SEQ ID NO: 715039 - RNA, 19 nt, Homo sapiens
  misc_RNA (1)...(19): siRNA sense strand
gccaaauggagaugcuaaa

SEQ ID NO: 715040 - RNA, 19 nt, Homo sapiens
  misc_RNA (1)...(19): siRNA sense strand
aaggaaaacuuuacuggau

SEQ ID NO: 715041 - RNA, 19 nt, Homo sapiens
  misc_RNA (1)...(19): siRNA sense strand
caaauggagaugcuaaagc

SEQ ID NO: 715042 - RNA, 19 nt, Homo sapiens
  misc_RNA (1)...(19): siRNA sense strand
gaaaugguucaaggucaca

SEQ ID NO: 715043 - RNA, 19 nt, Homo sapiens
  misc_RNA (1)...(19): siRNA sense strand
agaaggcucccaaagucaa

SEQ ID NO: 715044 - RNA, 19 nt, Homo sapiens
  misc_RNA (1)...(19): siRNA sense strand
ggcggaacacacaagauga

SEQ ID NO: 715045 - RNA, 19 nt, Homo sapiens
  misc_RNA (1)...(19): siRNA sense strand
gaaacucagcaugacuuca

SEQ ID NO: 715046 - RNA, 19 nt, Homo sapiens
  misc_RNA (1)...(19): siRNA sense strand
cacacaagaugaaaacaug

SEQ ID NO: 715047 - RNA, 19 nt, Homo sapiens
  misc_RNA (1)...(19): siRNA sense strand
ccaaauggagaugcuaaag

SEQ ID NO: 715048 - RNA, 19 nt, Homo sapiens
  misc_RNA (1)...(19): siRNA sense strand
cuugaugggccgugacauu

SEQ ID NO: 715049 - RNA, 19 nt, Homo sapiens
  misc_RNA (1)...(19): siRNA sense strand
cuaaagcugaccaugaaca

SEQ ID NO: 715050 - RNA, 19 nt, Homo sapiens
  misc_RNA (1)...(19): siRNA sense strand
gaguuauccgcaccaguga

SEQ ID NO: 715051 - RNA, 19 nt, Homo sapiens
  misc_RNA (1)...(19): siRNA sense strand
gcugccacccugaagauca

SEQ ID NO: 715052 - RNA, 19 nt, Homo sapiens
  misc_RNA (1)...(19): siRNA sense strand
gcauaaggcugacauaauu

SEQ ID NO: 715053 - RNA, 19 nt, Homo sapiens
  misc_RNA (1)...(19): siRNA sense strand
gaaaugaaaugcagcagaa

SEQ ID NO: 715054 - RNA, 19 nt, Homo sapiens
  misc_RNA (1)...(19): siRNA sense strand
gaaaggauuugcagagaaa

SEQ ID NO: 715055 - RNA, 19 nt, Homo sapiens
  misc_RNA (1)...(19): siRNA sense strand
caacaugccuuuaaauuca

SEQ ID NO: 715056 - RNA, 19 nt, Homo sapiens
  misc_RNA (1)...(19): siRNA sense strand
gcagagaaaugcagacuug

SEQ ID NO: 715057 - RNA, 19 nt, Homo sapiens
  misc_RNA (1)...(19): siRNA sense strand
gggaagaggugcuuaagaa

SEQ ID NO: 715058 - RNA, 19 nt, Homo sapiens
  misc_RNA (1)...(19): siRNA sense strand
uaacucagcugcgcaauaa

SEQ ID NO: 715059 - RNA, 19 nt, Homo sapiens
  misc_RNA (1)...(19): siRNA sense strand
caagauuuaugguggauua

SEQ ID NO: 715060 - RNA, 19 nt, Homo sapiens
  misc_RNA (1)...(19): siRNA sense strand
ggauuugacuaaccacuua

SEQ ID NO: 715061 - RNA, 19 nt, Homo sapiens
  misc_RNA (1)...(19): siRNA sense strand
gaugaagggugcuuuacua

SEQ ID NO: 715062 - RNA, 19 nt, Homo sapiens
  misc_RNA (1)...(19): siRNA sense strand
gcaaagagcuggagauagc

SEQ ID NO: 715063 - RNA, 19 nt, Homo sapiens
  misc_RNA (1)...(19): siRNA sense strand
gaaaaugacucuugacuug

SEQ ID NO: 715064 - RNA, 19 nt, Homo sapiens
  misc_RNA (1)...(19): siRNA sense strand
gaagauacacauuacgaua

SEQ ID NO: 715065 - RNA, 19 nt, Homo sapiens
  misc_RNA (1)...(19): siRNA sense strand
gaacuuggauaaauguaug

SEQ ID NO: 715066 - RNA, 19 nt, Homo sapiens
  misc_RNA (1)...(19): siRNA sense strand
ggaaauuuaucaugagaga

SEQ ID NO: 715067 - RNA, 19 nt, Homo sapiens
  misc_RNA (1)...(19): siRNA sense strand
ggagauagcucugguugau

SEQ ID NO: 715068 - RNA, 19 nt, Homo sapiens
  misc_RNA (1)...(19): siRNA sense strand
cugaagaccuauauagaua

SEQ ID NO: 715069 - RNA, 19 nt, Homo sapiens
  misc_RNA (1)...(19): siRNA sense strand
ggaacgagaucuucuugau

SEQ ID NO: 715070 - RNA, 19 nt, Homo sapiens
  misc_RNA (1)...(19): siRNA sense strand
ccugauggcucucaaauug

SEQ ID NO: 715071 - RNA, 19 nt, Homo sapiens
  misc_RNA (1)...(19): siRNA sense strand
cauagaagaugcaguaaca

SEQ ID NO: 715072 - RNA, 19 nt, Homo sapiens
  misc_RNA (1)...(19): siRNA sense strand
ucaagaaguuacccaguuu

SEQ ID NO: 715073 - RNA, 19 nt, Homo sapiens
  misc_RNA (1)...(19): siRNA sense strand
guucagacuuauaugcuua

SEQ ID NO: 715074 - RNA, 19 nt, Homo sapiens
  misc_RNA (1)...(19): siRNA sense strand
gaagaucaguguugguaca

SEQ ID NO: 715075 - RNA, 19 nt, Homo sapiens
  misc_RNA (1)...(19): siRNA sense strand
ugaaggagacucaggguua

SEQ ID NO: 715076 - RNA, 19 nt, Homo sapiens
  misc_RNA (1)...(19): siRNA sense strand
ugacauaauucauggauca

SEQ ID NO: 715077 - RNA, 19 nt, Homo sapiens
  misc_RNA (1)...(19): siRNA sense strand
ucacauagaagaugcagua

SEQ ID NO: 715078 - RNA, 19 nt, Homo sapiens
  misc_RNA (1)...(19): siRNA sense strand
ucaaaucccuccucuguag

SEQ ID NO: 715079 - RNA, 19 nt, Homo sapiens
  misc_RNA (1)...(19): siRNA sense strand
caaggacaguauugaguuu

SEQ ID NO: 715080 - RNA, 19 nt, Homo sapiens
  misc_RNA (1)...(19): siRNA sense strand
gagaggaguucaccagugu

SEQ ID NO: 715081 - RNA, 19 nt, Homo sapiens
  misc_RNA (1)...(19): siRNA sense strand
gaagggugcuuuacuacuc

SEQ ID NO: 715082 - RNA, 19 nt, Homo sapiens
  misc_RNA (1)...(19): siRNA sense strand
gaagauggaacaguuauug

SEQ ID NO: 715083 - RNA, 19 nt, Homo sapiens
  misc_RNA (1)...(19): siRNA sense strand
caggcaaucuuauaacauu

SEQ ID NO: 715084 - RNA, 19 nt, Homo sapiens
  misc_RNA (1)...(19): siRNA sense strand
ccauagagcuuggagagaa

SEQ ID NO: 715085 - RNA, 19 nt, Homo sapiens
  misc_RNA (1)...(19): siRNA sense strand
gaagccaacuuugauuguu

SEQ ID NO: 715086 - RNA, 19 nt, Homo sapiens
  misc_RNA (1)...(19): siRNA sense strand
cagcaagcguccuuuggua

SEQ ID NO: 715087 - RNA, 19 nt, Homo sapiens
  misc_RNA (1)...(19): siRNA sense strand
cuaaaucgaucugauauag

SEQ ID NO: 715088 - RNA, 19 nt, Homo sapiens
  misc_RNA (1)...(19): siRNA sense strand
gaugucaccugaguugaaa

SEQ ID NO: 715089 - RNA, 19 nt, Homo sapiens
  misc_RNA (1)...(19): siRNA sense strand
gaauaugagaugcuaacua

SEQ ID NO: 715090 - RNA, 19 nt, Homo sapiens
  misc_RNA (1)...(19): siRNA sense strand
gaaguuacccaguuugauc

SEQ ID NO: 715091 - RNA, 19 nt, Homo sapiens
  misc_RNA (1)...(19): siRNA sense strand
gcuuauggcugccucuuau

SEQ ID NO: 715092 - RNA, 19 nt, Homo sapiens
  misc_RNA (1)...(19): siRNA sense strand
ggacaguauugaguuuaaa

SEQ ID NO: 715093 - RNA, 19 nt, Homo sapiens
  misc_RNA (1)...(19): siRNA sense strand
gcagacaaggagauaauuu

SEQ ID NO: 715094 - RNA, 19 nt, Homo sapiens
  misc_RNA (1)...(19): siRNA sense strand
ggauuugucagucucuuua

SEQ ID NO: 715095 - RNA, 19 nt, Homo sapiens
  misc_RNA (1)...(19): siRNA sense strand
gagauaauaugggcagaau

SEQ ID NO: 715096 - RNA, 19 nt, Homo sapiens
  misc_RNA (1)...(19): siRNA sense strand
gaucaaaccagucaaccuu

SEQ ID NO: 715097 - RNA, 19 nt, Homo sapiens
  misc_RNA (1)...(19): siRNA sense strand
aauaugagaugcuaacuag

SEQ ID NO: 715098 - RNA, 19 nt, Homo sapiens
  misc_RNA (1)...(19): siRNA sense strand
gaucacuugcuauccauua

SEQ ID NO: 715099 - RNA, 19 nt, Homo sapiens
  misc_RNA (1)...(19): siRNA sense strand
ggaaauacugaaagaaaug

SEQ ID NO: 715100 - RNA, 19 nt, Homo sapiens
  misc_RNA (1)...(19): siRNA sense strand
guuauaaggcguuagaauu

SEQ ID NO: 715101 - RNA, 19 nt, Homo sapiens
  misc_RNA (1)...(19): siRNA sense strand
aagccaacuuugauuguua

SEQ ID NO: 715102 - RNA, 19 nt, Homo sapiens
  misc_RNA (1)...(19): siRNA sense strand
ggaugaagauacacauuac

SEQ ID NO: 715103 - RNA, 19 nt, Homo sapiens
  misc_RNA (1)...(19): siRNA sense strand
gcuauucuguggauguuga

SEQ ID NO: 715104 - RNA, 19 nt, Homo sapiens
  misc_RNA (1)...(19): siRNA sense strand
gaauuaaagcaaccucuga

SEQ ID NO: 715105 - RNA, 19 nt, Homo sapiens
  misc_RNA (1)...(19): siRNA sense strand
gaacucugguggucuccuu

SEQ ID NO: 715106 - RNA, 19 nt, Homo sapiens
  misc_RNA (1)...(19): siRNA sense strand
gaugaaauccuagagaaga

SEQ ID NO: 715107 - RNA, 19 nt, Homo sapiens
  misc_RNA (1)...(19): siRNA sense strand
gaagacgcaauggauaaua

SEQ ID NO: 715108 - RNA, 19 nt, Homo sapiens
  misc_RNA (1)...(19): siRNA sense strand
gaggaguucaccaguguua

SEQ ID NO: 715109 - RNA, 19 nt, Homo sapiens
  misc_RNA (1)...(19): siRNA sense strand
gagcaaauucugaugaaau

SEQ ID NO: 715110 - RNA, 19 nt, Homo sapiens
  misc_RNA (1)...(19): siRNA sense strand
ugaaagaaaugaggcaugu

SEQ ID NO: 715111 - RNA, 19 nt, Homo sapiens
  misc_RNA (1)...(19): siRNA sense strand
ucagauggaugaagauaca

SEQ ID NO: 715112 - RNA, 19 nt, Homo sapiens
  misc_RNA (1)...(19): siRNA sense strand
cugaauacacccuauauaa

SEQ ID NO: 715113 - RNA, 19 nt, Homo sapiens
  misc_RNA (1)...(19): siRNA sense strand
guuggugacuugaguuuga

SEQ ID NO: 715114 - RNA, 19 nt, Homo sapiens
  misc_RNA (1)...(19): siRNA sense strand
gguuggaagucacauagaa

SEQ ID NO: 715115 - RNA, 19 nt, Homo sapiens
  misc_RNA (1)...(19): siRNA sense strand
uaacuaguuuggcacagaa

SEQ ID NO: 715116 - RNA, 19 nt, Homo sapiens
  misc_RNA (1)...(19): siRNA sense strand
ggaagaggugcuuaagaaa

SEQ ID NO: 715117 - RNA, 19 nt, Homo sapiens
  misc_RNA (1)...(19): siRNA sense strand
gaacgagaucuucuugaug

SEQ ID NO: 715118 - RNA, 19 nt, Homo sapiens
  misc_RNA (1)...(19): siRNA sense strand
gauaauaugggcagaauac

SEQ ID NO: 715119 - RNA, 19 nt, Homo sapiens
  misc_RNA (1)...(19): siRNA sense strand
gaagaggugcuuaagaaag

SEQ ID NO: 715120 - RNA, 19 nt, Homo sapiens
  misc_RNA (1)...(19): siRNA sense strand
caugaugguuggugacuug

SEQ ID NO: 715121 - RNA, 19 nt, Homo sapiens
  misc_RNA (1)...(19): siRNA sense strand
ugaaggaacuuagcagcaa

SEQ ID NO: 715122 - RNA, 19 nt, Homo sapiens
  misc_RNA (1)...(19): siRNA sense strand
ggagcaaauucugaugaaa

SEQ ID NO: 715123 - RNA, 19 nt, Homo sapiens
  misc_RNA (1)...(19): siRNA sense strand
guacaugucaguagaagau

SEQ ID NO: 715124 - RNA, 19 nt, Homo sapiens
  misc_RNA (1)...(19): siRNA sense strand
cuauauagauaccagaaug

SEQ ID NO: 715125 - RNA, 19 nt, Homo sapiens
  misc_RNA (1)...(19): siRNA sense strand
aaaugacucuugacuugaa

SEQ ID NO: 715126 - RNA, 19 nt, Homo sapiens
  misc_RNA (1)...(19): siRNA sense strand
gacuacacauuccuucuga

SEQ ID NO: 715127 - RNA, 19 nt, Homo sapiens
  misc_RNA (1)...(19): siRNA sense strand
uaaauaagagucccagugu

SEQ ID NO: 715128 - RNA, 19 nt, Homo sapiens
  misc_RNA (1)...(19): siRNA sense strand
cagaagacgcaauggauaa

SEQ ID NO: 715129 - RNA, 19 nt, Homo sapiens
  misc_RNA (1)...(19): siRNA sense strand
ugagguacauugacuaugg

SEQ ID NO: 715130 - RNA, 19 nt, Homo sapiens
  misc_RNA (1)...(19): siRNA sense strand
agacggagaacuuggauaa

SEQ ID NO: 715131 - RNA, 19 nt, Homo sapiens
  misc_RNA (1)...(19): siRNA sense strand
gccuuuaaauucagaagaa

SEQ ID NO: 715132 - RNA, 19 nt, Homo sapiens
  misc_RNA (1)...(19): siRNA sense strand
gguggucuccuuacaauga

SEQ ID NO: 715133 - RNA, 19 nt, Homo sapiens
  misc_RNA (1)...(19): siRNA sense strand
cagcuaagauggaaauacu

SEQ ID NO: 715134 - RNA, 19 nt, Homo sapiens
  misc_RNA (1)...(19): siRNA sense strand
gaugcaggcaaucuuauaa

SEQ ID NO: 715135 - RNA, 19 nt, Homo sapiens
  misc_RNA (1)...(19): siRNA sense strand
uaaagcaaccucugaagau

SEQ ID NO: 715136 - RNA, 19 nt, Homo sapiens
  misc_RNA (1)...(19): siRNA sense strand
guacauugacuauggaaau

SEQ ID NO: 715137 - RNA, 19 nt, Homo sapiens
  misc_RNA (1)...(19): siRNA sense strand
gaucaguguugguacagau

SEQ ID NO: 715138 - RNA, 19 nt, Homo sapiens
  misc_RNA (1)...(19): siRNA sense strand
aaucaggaguuugagauaa

SEQ ID NO: 715139 - RNA, 19 nt, Homo sapiens
  misc_RNA (1)...(19): siRNA sense strand
uauuauggcuuucuguuca

SEQ ID NO: 715140 - RNA, 19 nt, Homo sapiens
  misc_RNA (1)...(19): siRNA sense strand
gccaacaugccuuuaaauu

SEQ ID NO: 715141 - RNA, 19 nt, Homo sapiens
  misc_RNA (1)...(19): siRNA sense strand
cccaggagcugcagcaaga

SEQ ID NO: 715142 - RNA, 19 nt, Homo sapiens
  misc_RNA (1)...(19): siRNA sense strand
guuggugacuuuaauuuag

SEQ ID NO: 715143 - RNA, 19 nt, Homo sapiens
  misc_RNA (1)...(19): siRNA sense strand
acacauuccuucugaucaa

SEQ ID NO: 715144 - RNA, 19 nt, Homo sapiens
  misc_RNA (1)...(19): siRNA sense strand
aaauaaagacggagaacuu

SEQ ID NO: 715145 - RNA, 19 nt, Homo sapiens
  misc_RNA (1)...(19): siRNA sense strand
aaagauucauucagaggaa

SEQ ID NO: 715146 - RNA, 19 nt, Homo sapiens
  misc_RNA (1)...(19): siRNA sense strand
guagcaugguuccaaagaa

SEQ ID NO: 715147 - RNA, 19 nt, Homo sapiens
  misc_RNA (1)...(19): siRNA sense strand
cuauacaaguguuggauga

SEQ ID NO: 715148 - RNA, 19 nt, Homo sapiens
  misc_RNA (1)...(19): siRNA sense strand
uauaaggcguuagaauuga

SEQ ID NO: 715149 - RNA, 19 nt, Homo sapiens
  misc_RNA (1)...(19): siRNA sense strand
agaaaggauuugcagagaa

SEQ ID NO: 715150 - RNA, 19 nt, Homo sapiens
  misc_RNA (1)...(19): siRNA sense strand
agucugauccuauggcuua

SEQ ID NO: 715151 - RNA, 19 nt, Homo sapiens
  misc_RNA (1)...(19): siRNA sense strand
cggagaacuuggauaaaug

SEQ ID NO: 715152 - RNA, 19 nt, Homo sapiens
  misc_RNA (1)...(19): siRNA sense strand
gcauaaggcugacauaauu

SEQ ID NO: 715153 - RNA, 19 nt, Homo sapiens
  misc_RNA (1)...(19): siRNA sense strand
gaaaugaaaugcagcagaa

SEQ ID NO: 715154 - RNA, 19 nt, Homo sapiens
  misc_RNA (1)...(19): siRNA sense strand
gaaaggauuugcagagaaa

SEQ ID NO: 715155 - RNA, 19 nt, Homo sapiens
  misc_RNA (1)...(19): siRNA sense strand
caacaugccuuuaaauuca

SEQ ID NO: 715156 - RNA, 19 nt, Homo sapiens
  misc_RNA (1)...(19): siRNA sense strand
gcagagaaaugcagacuug

SEQ ID NO: 715157 - RNA, 19 nt, Homo sapiens
  misc_RNA (1)...(19): siRNA sense strand
gggaagaggugcuuaagaa

SEQ ID NO: 715158 - RNA, 19 nt, Homo sapiens
  misc_RNA (1)...(19): siRNA sense strand
uaacucagcugcgcaauaa

SEQ ID NO: 715159 - RNA, 19 nt, Homo sapiens
  misc_RNA (1)...(19): siRNA sense strand
caagauuuaugguggauua

SEQ ID NO: 715160 - RNA, 19 nt, Homo sapiens
  misc_RNA (1)...(19): siRNA sense strand
ggauuugacuaaccacuua

SEQ ID NO: 715161 - RNA, 19 nt, Homo sapiens
  misc_RNA (1)...(19): siRNA sense strand
gaugaagggugcuuuacua

SEQ ID NO: 715162 - RNA, 19 nt, Homo sapiens
  misc_RNA (1)...(19): siRNA sense strand
gcaaagagcuggagauagc

SEQ ID NO: 715163 - RNA, 19 nt, Homo sapiens
  misc_RNA (1)...(19): siRNA sense strand
gaaaaugacucuugacuug

SEQ ID NO: 715164 - RNA, 19 nt, Homo sapiens
  misc_RNA (1)...(19): siRNA sense strand
gaagauacacauuacgaua

SEQ ID NO: 715165 - RNA, 19 nt, Homo sapiens
  misc_RNA (1)...(19): siRNA sense strand
gaacuuggauaaauguaug

SEQ ID NO: 715166 - RNA, 19 nt, Homo sapiens
  misc_RNA (1)...(19): siRNA sense strand
ggaaauuuaucaugagaga

SEQ ID NO: 715167 - RNA, 19 nt, Homo sapiens
  misc_RNA (1)...(19): siRNA sense strand
ggagauagcucugguugau

SEQ ID NO: 715168 - RNA, 19 nt, Homo sapiens
  misc_RNA (1)...(19): siRNA sense strand
cugaagaccuauauagaua

SEQ ID NO: 715169 - RNA, 19 nt, Homo sapiens
  misc_RNA (1)...(19): siRNA sense strand
ggaacgagaucuucuugau

SEQ ID NO: 715170 - RNA, 19 nt, Homo sapiens
  misc_RNA (1)...(19): siRNA sense strand
ccugauggcucucaaauug

SEQ ID NO: 715171 - RNA, 19 nt, Homo sapiens
  misc_RNA (1)...(19): siRNA sense strand
cauagaagaugcaguaaca

SEQ ID NO: 715172 - RNA, 19 nt, Homo sapiens
  misc_RNA (1)...(19): siRNA sense strand
ucaagaaguuacccaguuu

SEQ ID NO: 715173 - RNA, 19 nt, Homo sapiens
  misc_RNA (1)...(19): siRNA sense strand
guucagacuuauaugcuua

SEQ ID NO: 715174 - RNA, 19 nt, Homo sapiens
  misc_RNA (1)...(19): siRNA sense strand
gaagaucaguguugguaca

SEQ ID NO: 715175 - RNA, 19 nt, Homo sapiens
  misc_RNA (1)...(19): siRNA sense strand
ugaaggagacucaggguua

SEQ ID NO: 715176 - RNA, 19 nt, Homo sapiens
  misc_RNA (1)...(19): siRNA sense strand
ugacauaauucauggauca

SEQ ID NO: 715177 - RNA, 19 nt, Homo sapiens
  misc_RNA (1)...(19): siRNA sense strand
gaagauggaacaguuauug

SEQ ID NO: 715178 - RNA, 19 nt, Homo sapiens
  misc_RNA (1)...(19): siRNA sense strand
ucaaaucccuccucuguag

SEQ ID NO: 715179 - RNA, 19 nt, Homo sapiens
  misc_RNA (1)...(19): siRNA sense strand
caaggacaguauugaguuu

SEQ ID NO: 715180 - RNA, 19 nt, Homo sapiens
  misc_RNA (1)...(19): siRNA sense strand
gagaggaguucaccagugu

SEQ ID NO: 715181 - RNA, 19 nt, Homo sapiens
  misc_RNA (1)...(19): siRNA sense strand
ucacauagaagaugcagua

SEQ ID NO: 715182 - RNA, 19 nt, Homo sapiens
  misc_RNA (1)...(19): siRNA sense strand
gaagggugcuuuacuacuc

SEQ ID NO: 715183 - RNA, 19 nt, Homo sapiens
  misc_RNA (1)...(19): siRNA sense strand
caggcaaucuuauaacauu

SEQ ID NO: 715184 - RNA, 19 nt, Homo sapiens
  misc_RNA (1)...(19): siRNA sense strand
ccauagagcuuggagagaa

SEQ ID NO: 715185 - RNA, 19 nt, Homo sapiens
  misc_RNA (1)...(19): siRNA sense strand
gaagccaacuuugauuguu

SEQ ID NO: 715186 - RNA, 19 nt, Homo sapiens
  misc_RNA (1)...(19): siRNA sense strand
cagcaagcguccuuuggua

SEQ ID NO: 715187 - RNA, 19 nt, Homo sapiens
  misc_RNA (1)...(19): siRNA sense strand
cuaaaucgaucugauauag

SEQ ID NO: 715188 - RNA, 19 nt, Homo sapiens
  misc_RNA (1)...(19): siRNA sense strand
gaugucaccugaguugaaa

SEQ ID NO: 715189 - RNA, 19 nt, Homo sapiens
  misc_RNA (1)...(19): siRNA sense strand
gaauaugagaugcuaacua

SEQ ID NO: 715190 - RNA, 19 nt, Homo sapiens
  misc_RNA (1)...(19): siRNA sense strand
gaaguuacccaguuugauc

SEQ ID NO: 715191 - RNA, 19 nt, Homo sapiens
  misc_RNA (1)...(19): siRNA sense strand
gcuuauggcugccucuuau

SEQ ID NO: 715192 - RNA, 19 nt, Homo sapiens
  misc_RNA (1)...(19): siRNA sense strand
ggacaguauugaguuuaaa

SEQ ID NO: 715193 - RNA, 19 nt, Homo sapiens
  misc_RNA (1)...(19): siRNA sense strand
gcagacaaggagauaauuu

SEQ ID NO: 715194 - RNA, 19 nt, Homo sapiens
  misc_RNA (1)...(19): siRNA sense strand
ggauuugucagucucuuua

SEQ ID NO: 715195 - RNA, 19 nt, Homo sapiens
  misc_RNA (1)...(19): siRNA sense strand
gagauaauaugggcagaau

SEQ ID NO: 715196 - RNA, 19 nt, Homo sapiens
  misc_RNA (1)...(19): siRNA sense strand
gaucaaaccagucaaccuu

SEQ ID NO: 715197 - RNA, 19 nt, Homo sapiens
  misc_RNA (1)...(19): siRNA sense strand
aauaugagaugcuaacuag

SEQ ID NO: 715198 - RNA, 19 nt, Homo sapiens
  misc_RNA (1)...(19): siRNA sense strand
gaucacuugcuauccauua

SEQ ID NO: 715199 - RNA, 19 nt, Homo sapiens
  misc_RNA (1)...(19): siRNA sense strand
ggaaauacugaaagaaaug

SEQ ID NO: 715200 - RNA, 19 nt, Homo sapiens
  misc_RNA (1)...(19): siRNA sense strand
guuauaaggcguuagaauu

SEQ ID NO: 715201 - RNA, 19 nt, Homo sapiens
  misc_RNA (1)...(19): siRNA sense strand
aagccaacuuugauuguua

SEQ ID NO: 715202 - RNA, 19 nt, Homo sapiens
  misc_RNA (1)...(19): siRNA sense strand
ggaugaagauacacauuac

SEQ ID NO: 715203 - RNA, 19 nt, Homo sapiens
  misc_RNA (1)...(19): siRNA sense strand
gcuauucuguggauguuga

SEQ ID NO: 715204 - RNA, 19 nt, Homo sapiens
  misc_RNA (1)...(19): siRNA sense strand
gaauuaaagcaaccucuga

SEQ ID NO: 715205 - RNA, 19 nt, Homo sapiens
  misc_RNA (1)...(19): siRNA sense strand
gaacucugguggucuccuu

SEQ ID NO: 715206 - RNA, 19 nt, Homo sapiens
  misc_RNA (1)...(19): siRNA sense strand
gaugaaauccuagagaaga

SEQ ID NO: 715207 - RNA, 19 nt, Homo sapiens
  misc_RNA (1)...(19): siRNA sense strand
gaagacgcaauggauaaua

SEQ ID NO: 715208 - RNA, 19 nt, Homo sapiens
  misc_RNA (1)...(19): siRNA sense strand
gaggaguucaccaguguua

SEQ ID NO: 715209 - RNA, 19 nt, Homo sapiens
  misc_RNA (1)...(19): siRNA sense strand
gagcaaauucugaugaaau

SEQ ID NO: 715210 - RNA, 19 nt, Homo sapiens
  misc_RNA (1)...(19): siRNA sense strand
ugaaagaaaugaggcaugu

SEQ ID NO: 715211 - RNA, 19 nt, Homo sapiens
  misc_RNA (1)...(19): siRNA sense strand
gguuggaagucacauagaa

SEQ ID NO: 715212 - RNA, 19 nt, Homo sapiens
  misc_RNA (1)...(19): siRNA sense strand
cugaauacacccuauauaa

SEQ ID NO: 715213 - RNA, 19 nt, Homo sapiens
  misc_RNA (1)...(19): siRNA sense strand
guuggugacuugaguuuga

SEQ ID NO: 715214 - RNA, 19 nt, Homo sapiens
  misc_RNA (1)...(19): siRNA sense strand
uaacuaguuuggcacagaa

SEQ ID NO: 715215 - RNA, 19 nt, Homo sapiens
  misc_RNA (1)...(19): siRNA sense strand
ggaagaggugcuuaagaaa

SEQ ID NO: 715216 - RNA, 19 nt, Homo sapiens
  misc_RNA (1)...(19): siRNA sense strand
gaacgagaucuucuugaug

SEQ ID NO: 715217 - RNA, 19 nt, Homo sapiens
  misc_RNA (1)...(19): siRNA sense strand
gauaauaugggcagaauac

SEQ ID NO: 715218 - RNA, 19 nt, Homo sapiens
  misc_RNA (1)...(19): siRNA sense strand
gaagaggugcuuaagaaag

SEQ ID NO: 715219 - RNA, 19 nt, Homo sapiens
  misc_RNA (1)...(19): siRNA sense strand
caugaugguuggugacuug

SEQ ID NO: 715220 - RNA, 19 nt, Homo sapiens
  misc_RNA (1)...(19): siRNA sense strand
ugaaggaacuuagcagcaa

SEQ ID NO: 715221 - RNA, 19 nt, Homo sapiens
  misc_RNA (1)...(19): siRNA sense strand
ggagcaaauucugaugaaa

SEQ ID NO: 715222 - RNA, 19 nt, Homo sapiens
  misc_RNA (1)...(19): siRNA sense strand
guacaugucaguagaagau

SEQ ID NO: 715223 - RNA, 19 nt, Homo sapiens
  misc_RNA (1)...(19): siRNA sense strand
cuauauagauaccagaaug

SEQ ID NO: 715224 - RNA, 19 nt, Homo sapiens
  misc_RNA (1)...(19): siRNA sense strand
aaaugacucuugacuugaa

SEQ ID NO: 715225 - RNA, 19 nt, Homo sapiens
  misc_RNA (1)...(19): siRNA sense strand
gacuacacauuccuucuga

SEQ ID NO: 715226 - RNA, 19 nt, Homo sapiens
  misc_RNA (1)...(19): siRNA sense strand
uaaauaagagucccagugu

SEQ ID NO: 715227 - RNA, 19 nt, Homo sapiens
  misc_RNA (1)...(19): siRNA sense strand
cagaagacgcaauggauaa

SEQ ID NO: 715228 - RNA, 19 nt, Homo sapiens
  misc_RNA (1)...(19): siRNA sense strand
ugagguacauugacuaugg

SEQ ID NO: 715229 - RNA, 19 nt, Homo sapiens
  misc_RNA (1)...(19): siRNA sense strand
agacggagaacuuggauaa

SEQ ID NO: 715230 - RNA, 19 nt, Homo sapiens
  misc_RNA (1)...(19): siRNA sense strand
gccuuuaaauucagaagaa

SEQ ID NO: 715231 - RNA, 19 nt, Homo sapiens
  misc_RNA (1)...(19): siRNA sense strand
gguggucuccuuacaauga

SEQ ID NO: 715232 - RNA, 19 nt, Homo sapiens
  misc_RNA (1)...(19): siRNA sense strand
cagcuaagauggaaauacu

SEQ ID NO: 715233 - RNA, 19 nt, Homo sapiens
  misc_RNA (1)...(19): siRNA sense strand
gaugcaggcaaucuuauaa

SEQ ID NO: 715234 - RNA, 19 nt, Homo sapiens
  misc_RNA (1)...(19): siRNA sense strand
uaaagcaaccucugaagau

SEQ ID NO: 715235 - RNA, 19 nt, Homo sapiens
  misc_RNA (1)...(19): siRNA sense strand
guacauugacuauggaaau

SEQ ID NO: 715236 - RNA, 19 nt, Homo sapiens
  misc_RNA (1)...(19): siRNA sense strand
gaucaguguugguacagau

SEQ ID NO: 715237 - RNA, 19 nt, Homo sapiens
  misc_RNA (1)...(19): siRNA sense strand
aaucaggaguuugagauaa

SEQ ID NO: 715238 - RNA, 19 nt, Homo sapiens
  misc_RNA (1)...(19): siRNA sense strand
uauuauggcuuucuguuca

SEQ ID NO: 715239 - RNA, 19 nt, Homo sapiens
  misc_RNA (1)...(19): siRNA sense strand
gccaacaugccuuuaaauu

SEQ ID NO: 715240 - RNA, 19 nt, Homo sapiens
  misc_RNA (1)...(19): siRNA sense strand
cccaggagcugcagcaaga

SEQ ID NO: 715241 - RNA, 19 nt, Homo sapiens
  misc_RNA (1)...(19): siRNA sense strand
guuggugacuuuaauuuag

SEQ ID NO: 715242 - RNA, 19 nt, Homo sapiens
  misc_RNA (1)...(19): siRNA sense strand
acacauuccuucugaucaa

SEQ ID NO: 715243 - RNA, 19 nt, Homo sapiens
  misc_RNA (1)...(19): siRNA sense strand
aaauaaagacggagaacuu

SEQ ID NO: 715244 - RNA, 19 nt, Homo sapiens
  misc_RNA (1)...(19): siRNA sense strand
aaagauucauucagaggaa

SEQ ID NO: 715245 - RNA, 19 nt, Homo sapiens
  misc_RNA (1)...(19): siRNA sense strand
guagcaugguuccaaagaa

SEQ ID NO: 715246 - RNA, 19 nt, Homo sapiens
  misc_RNA (1)...(19): siRNA sense strand
cuauacaaguguuggauga

SEQ ID NO: 715247 - RNA, 19 nt, Homo sapiens
  misc_RNA (1)...(19): siRNA sense strand
uauaaggcguuagaauuga

SEQ ID NO: 715248 - RNA, 19 nt, Homo sapiens
  misc_RNA (1)...(19): siRNA sense strand
agaaaggauuugcagagaa

SEQ ID NO: 715249 - RNA, 19 nt, Homo sapiens
  misc_RNA (1)...(19): siRNA sense strand
gaaggagacucaggguuac

SEQ ID NO: 715250 - RNA, 19 nt, Homo sapiens
  misc_RNA (1)...(19): siRNA sense strand
cggagaacuuggauaaaug

SEQ ID NO: 715251 - RNA, 19 nt, Homo sapiens
  misc_RNA (1)...(19): siRNA sense strand
agucugauccuauggcuua

SEQ ID NO: 715252 - RNA, 19 nt, Homo sapiens
  misc_RNA (1)...(19): siRNA sense strand
caggacaucuccaucaaga

SEQ ID NO: 715253 - RNA, 19 nt, Homo sapiens
  misc_RNA (1)...(19): siRNA sense strand
ucaucgacuuuguggcuuu

SEQ ID NO: 715254 - RNA, 19 nt, Homo sapiens
  misc_RNA (1)...(19): siRNA sense strand
uccaggacaucuccaucaa

SEQ ID NO: 715255 - RNA, 19 nt, Homo sapiens
  misc_RNA (1)...(19): siRNA sense strand
accaggagcugaggagugu

SEQ ID NO: 715256 - RNA, 19 nt, Homo sapiens
  misc_RNA (1)...(19): siRNA sense strand
uggcagaaacacccaccua

SEQ ID NO: 715257 - RNA, 19 nt, Homo sapiens
  misc_RNA (1)...(19): siRNA sense strand
caggagcugaggaguguga

SEQ ID NO: 715258 - RNA, 19 nt, Homo sapiens
  misc_RNA (1)...(19): siRNA sense strand
caggacaucuccaucaaga

SEQ ID NO: 715259 - RNA, 19 nt, Homo sapiens
  misc_RNA (1)...(19): siRNA sense strand
ucaucgacuuuguggcuuu

SEQ ID NO: 715260 - RNA, 19 nt, Homo sapiens
  misc_RNA (1)...(19): siRNA sense strand
uccaggacaucuccaucaa

SEQ ID NO: 715261 - RNA, 19 nt, Homo sapiens
  misc_RNA (1)...(19): siRNA sense strand
accaggagcugaggagugu

SEQ ID NO: 715262 - RNA, 19 nt, Homo sapiens
  misc_RNA (1)...(19): siRNA sense strand
uggcagaaacacccaccua

SEQ ID NO: 715263 - RNA, 19 nt, Homo sapiens
  misc_RNA (1)...(19): siRNA sense strand
caggagcugaggaguguga

SEQ ID NO: 715264 - RNA, 19 nt, Homo sapiens
  misc_RNA (1)...(19): siRNA sense strand
gaggaugagugacgaguuu

SEQ ID NO: 715265 - RNA, 19 nt, Homo sapiens
  misc_RNA (1)...(19): siRNA sense strand
uuuguggacuccuuuaaga

SEQ ID NO: 715266 - RNA, 19 nt, Homo sapiens
  misc_RNA (1)...(19): siRNA sense strand
ggaggaugagugacgaguu

SEQ ID NO: 715267 - RNA, 19 nt, Homo sapiens
  misc_RNA (1)...(19): siRNA sense strand
ggaugagugacgaguuugu

SEQ ID NO: 715268 - RNA, 19 nt, Homo sapiens
  misc_RNA (1)...(19): siRNA sense strand
gggcacagcaacgcagaug

SEQ ID NO: 715269 - RNA, 19 nt, Homo sapiens
  misc_RNA (1)...(19): siRNA sense strand
gaggaugagugacgaguuu

SEQ ID NO: 715270 - RNA, 19 nt, Homo sapiens
  misc_RNA (1)...(19): siRNA sense strand
uuuguggacuccuuuaaga

SEQ ID NO: 715271 - RNA, 19 nt, Homo sapiens
  misc_RNA (1)...(19): siRNA sense strand
ggaggaugagugacgaguu

SEQ ID NO: 715272 - RNA, 19 nt, Homo sapiens
  misc_RNA (1)...(19): siRNA sense strand
ggaugagugacgaguuugu

SEQ ID NO: 715273 - RNA, 19 nt, Homo sapiens
  misc_RNA (1)...(19): siRNA sense strand
gggcacagcaacgcagaug

SEQ ID NO: 715274 - RNA, 19 nt, Homo sapiens
  misc_RNA (1)...(19): siRNA sense strand
ggucaagacuguugucauc

SEQ ID NO: 715275 - RNA, 19 nt, Homo sapiens
  misc_RNA (1)...(19): siRNA sense strand
gcaauguccuggcuguaga

SEQ ID NO: 715276 - RNA, 19 nt, Homo sapiens
  misc_RNA (1)...(19): siRNA sense strand
uaacaacaguggcaaagag

SEQ ID NO: 715277 - RNA, 19 nt, Homo sapiens
  misc_RNA (1)...(19): siRNA sense strand
ggucaaugcugcuguguac

SEQ ID NO: 715278 - RNA, 19 nt, Homo sapiens
  misc_RNA (1)...(19): siRNA sense strand
gaccaucggcuucuucuau

SEQ ID NO: 715279 - RNA, 19 nt, Homo sapiens
  misc_RNA (1)...(19): siRNA sense strand
gaacggccacccacugaug

SEQ ID NO: 715280 - RNA, 19 nt, Homo sapiens
  misc_RNA (1)...(19): siRNA sense strand
gagaacggccacccacuga

SEQ ID NO: 715281 - RNA, 19 nt, Homo sapiens
  misc_RNA (1)...(19): siRNA sense strand
ccgcgagucuguccacuau

SEQ ID NO: 715282 - RNA, 19 nt, Homo sapiens
  misc_RNA (1)...(19): siRNA sense strand
gcgagucuguccacuauac

SEQ ID NO: 715283 - RNA, 19 nt, Homo sapiens
  misc_RNA (1)...(19): siRNA sense strand
ccaacucacuggucaaugc

SEQ ID NO: 715284 - RNA, 19 nt, Homo sapiens
  misc_RNA (1)...(19): siRNA sense strand
ccaucggcuucuucuauaa

SEQ ID NO: 715285 - RNA, 19 nt, Homo sapiens
  misc_RNA (1)...(19): siRNA sense strand
gcucagccgcuccuauuug

SEQ ID NO: 715286 - RNA, 19 nt, Homo sapiens
  misc_RNA (1)...(19): siRNA sense strand
accaucggcuucuucuaua

SEQ ID NO: 715287 - RNA, 19 nt, Homo sapiens
  misc_RNA (1)...(19): siRNA sense strand
caagacuguugucaucauc

SEQ ID NO: 715288 - RNA, 19 nt, Homo sapiens
  misc_RNA (1)...(19): siRNA sense strand
ucaagacuguugucaucau

SEQ ID NO: 715289 - RNA, 19 nt, Homo sapiens
  misc_RNA (1)...(19): siRNA sense strand
ccgcacagcccgacuuuca

SEQ ID NO: 715290 - RNA, 19 nt, Homo sapiens
  misc_RNA (1)...(19): siRNA sense strand
uagcagccaucgccuccaa

SEQ ID NO: 715291 - RNA, 19 nt, Homo sapiens
  misc_RNA (1)...(19): siRNA sense strand
guacugcuccuggaugguu

SEQ ID NO: 715292 - RNA, 19 nt, Homo sapiens
  misc_RNA (1)...(19): siRNA sense strand
cagcccgacuuucacuuga

SEQ ID NO: 715293 - RNA, 19 nt, Homo sapiens
  misc_RNA (1)...(19): siRNA sense strand
ugccagcacucgcaucaug

SEQ ID NO: 715294 - RNA, 19 nt, Homo sapiens
  misc_RNA (1)...(19): siRNA sense strand
gccuaccucuuccucaugu

SEQ ID NO: 715295 - RNA, 19 nt, Homo sapiens
  misc_RNA (1)...(19): siRNA sense strand
gcacagcccgacuuucacu

SEQ ID NO: 715296 - RNA, 19 nt, Homo sapiens
  misc_RNA (1)...(19): siRNA sense strand
ccaaucugcuggucauagc

SEQ ID NO: 715297 - RNA, 19 nt, Homo sapiens
  misc_RNA (1)...(19): siRNA sense strand
gcuguguacacccgcauuu

SEQ ID NO: 715298 - RNA, 19 nt, Homo sapiens
  misc_RNA (1)...(19): siRNA sense strand
uugccgagaugcugagaug

SEQ ID NO: 715299 - RNA, 19 nt, Homo sapiens
  misc_RNA (1)...(19): siRNA sense strand
ugucgagccugcuugucuu

SEQ ID NO: 715300 - RNA, 19 nt, Homo sapiens
  misc_RNA (1)...(19): siRNA sense strand
caucaugcuucccgagaac

SEQ ID NO: 715301 - RNA, 19 nt, Homo sapiens
  misc_RNA (1)...(19): siRNA sense strand
uguguacucuugccgagau

SEQ ID NO: 715302 - RNA, 19 nt, Homo sapiens
  misc_RNA (1)...(19): siRNA sense strand
gcugugaguccugcaaugu

SEQ ID NO: 715303 - RNA, 19 nt, Homo sapiens
  misc_RNA (1)...(19): siRNA sense strand
cugcucagccgcuccuauu

SEQ ID NO: 715304 - RNA, 19 nt, Homo sapiens
  misc_RNA (1)...(19): siRNA sense strand
augcugcuguguacucuug

SEQ ID NO: 715305 - RNA, 19 nt, Homo sapiens
  misc_RNA (1)...(19): siRNA sense strand
gagcgucuaugagaaagua

SEQ ID NO: 715306 - RNA, 19 nt, Homo sapiens
  misc_RNA (1)...(19): siRNA sense strand
gaaaguaucgggugacaca

SEQ ID NO: 715307 - RNA, 19 nt, Homo sapiens
  misc_RNA (1)...(19): siRNA sense strand
cgacagcgauuccgacauc

SEQ ID NO: 715308 - RNA, 19 nt, Homo sapiens
  misc_RNA (1)...(19): siRNA sense strand
gaagaagggagccaaugaa

SEQ ID NO: 715309 - RNA, 19 nt, Homo sapiens
  misc_RNA (1)...(19): siRNA sense strand
gcagagcgucuaugagaaa

SEQ ID NO: 715310 - RNA, 19 nt, Homo sapiens
  misc_RNA (1)...(19): siRNA sense strand
gcagagaagcagagaaguu

SEQ ID NO: 715311 - RNA, 19 nt, Homo sapiens
  misc_RNA (1)...(19): siRNA sense strand
ggaccugcauaugaaagua

SEQ ID NO: 715312 - RNA, 19 nt, Homo sapiens
  misc_RNA (1)...(19): siRNA sense strand
ccgaggaccugcauaugaa

SEQ ID NO: 715313 - RNA, 19 nt, Homo sapiens
  misc_RNA (1)...(19): siRNA sense strand
agaaaguacugcacagaga

SEQ ID NO: 715314 - RNA, 19 nt, Homo sapiens
  misc_RNA (1)...(19): siRNA sense strand
cgaagaagggagccaauga

SEQ ID NO: 715315 - RNA, 19 nt, Homo sapiens
  misc_RNA (1)...(19): siRNA sense strand
gaagggagccaaugaaaau

SEQ ID NO: 715316 - RNA, 19 nt, Homo sapiens
  misc_RNA (1)...(19): siRNA sense strand
gccgaggaccugcauauga

SEQ ID NO: 715317 - RNA, 19 nt, Homo sapiens
  misc_RNA (1)...(19): siRNA sense strand
aaguggagcuggcggaaga

SEQ ID NO: 715318 - RNA, 19 nt, Homo sapiens
  misc_RNA (1)...(19): siRNA sense strand
cagcagcgcccuagugcaa

SEQ ID NO: 715319 - RNA, 19 nt, Homo sapiens
  misc_RNA (1)...(19): siRNA sense strand
cgacgugguguucgcauuu

SEQ ID NO: 715320 - RNA, 19 nt, Homo sapiens
  misc_RNA (1)...(19): siRNA sense strand
gcccagaugucaaccuucu

SEQ ID NO: 715321 - RNA, 19 nt, Homo sapiens
  misc_RNA (1)...(19): siRNA sense strand
ugacaacgcacccgacauc

SEQ ID NO: 715322 - RNA, 19 nt, Homo sapiens
  misc_RNA (1)...(19): siRNA sense strand
cugcagagcgucuaugaga

SEQ ID NO: 715323 - RNA, 19 nt, Homo sapiens
  misc_RNA (1)...(19): siRNA sense strand
gacguucgcauccaagcua

SEQ ID NO: 715324 - RNA, 19 nt, Homo sapiens
  misc_RNA (1)...(19): siRNA sense strand
gcagcgcccuagugcaagu

SEQ ID NO: 715325 - RNA, 19 nt, Homo sapiens
  misc_RNA (1)...(19): siRNA sense strand
cagcccagaugucaaccuu

SEQ ID NO: 715326 - RNA, 19 nt, Homo sapiens
  misc_RNA (1)...(19): siRNA sense strand
gcaaagacagcgguaaagg

SEQ ID NO: 715327 - RNA, 19 nt, Homo sapiens
  misc_RNA (1)...(19): siRNA sense strand
caauggcucccuagaagug

SEQ ID NO: 715328 - RNA, 19 nt, Homo sapiens
  misc_RNA (1)...(19): siRNA sense strand
cagagaagcagagaaguuc

SEQ ID NO: 715329 - RNA, 19 nt, Homo sapiens
  misc_RNA (1)...(19): siRNA sense strand
ucccagaccugcaggagau

SEQ ID NO: 715330 - RNA, 19 nt, Homo sapiens
  misc_RNA (1)...(19): siRNA sense strand
cggcaaagacagcgguaaa

SEQ ID NO: 715331 - RNA, 19 nt, Homo sapiens
  misc_RNA (1)...(19): siRNA sense strand
aagaagggagccaaugaaa

SEQ ID NO: 715332 - RNA, 19 nt, Homo sapiens
  misc_RNA (1)...(19): siRNA sense strand
aaaaggaucucaucaacca

SEQ ID NO: 715333 - RNA, 19 nt, Homo sapiens
  misc_RNA (1)...(19): siRNA sense strand
gacgugguguucgcauuug

SEQ ID NO: 715334 - RNA, 19 nt, Homo sapiens
  misc_RNA (1)...(19): siRNA sense strand
gaaguucagcggcaaagac

SEQ ID NO: 715335 - RNA, 19 nt, Homo sapiens
  misc_RNA (1)...(19): siRNA sense strand
acugucagcuucgugguaa

SEQ ID NO: 715336 - RNA, 19 nt, Homo sapiens
  misc_RNA (1)...(19): siRNA sense strand
gaugucaaccuucuguaag

SEQ ID NO: 715337 - RNA, 19 nt, Homo sapiens
  misc_RNA (1)...(19): siRNA sense strand
gcagggacaauuacuacca

SEQ ID NO: 715338 - RNA, 19 nt, Homo sapiens
  misc_RNA (1)...(19): siRNA sense strand
gaacgcaucgccgaguaca

SEQ ID NO: 715339 - RNA, 19 nt, Homo sapiens
  misc_RNA (1)...(19): siRNA sense strand
gcgcagggacaauuacuac

SEQ ID NO: 715340 - RNA, 19 nt, Homo sapiens
  misc_RNA (1)...(19): siRNA sense strand
uaacggcgacgugguguuc

SEQ ID NO: 715341 - RNA, 19 nt, Homo sapiens
  misc_RNA (1)...(19): siRNA sense strand
agaugucaaccuucuguaa

SEQ ID NO: 715342 - RNA, 19 nt, Homo sapiens
  misc_RNA (1)...(19): siRNA sense strand
gggcgcuccuggucauauc

SEQ ID NO: 715343 - RNA, 19 nt, Homo sapiens
  misc_RNA (1)...(19): siRNA sense strand
gaccugcauaugaaaguau

SEQ ID NO: 715344 - RNA, 19 nt, Homo sapiens
  misc_RNA (1)...(19): siRNA sense strand
gugcaccgcugaguguaag

SEQ ID NO: 715345 - RNA, 19 nt, Homo sapiens
  misc_RNA (1)...(19): siRNA sense strand
acacgccgcugaucgucau

SEQ ID NO: 715346 - RNA, 19 nt, Homo sapiens
  misc_RNA (1)...(19): siRNA sense strand
gcgcauccgagacgucaau

SEQ ID NO: 715347 - RNA, 19 nt, Homo sapiens
  misc_RNA (1)...(19): siRNA sense strand
gagcaaaacaguccgauac

SEQ ID NO: 715348 - RNA, 19 nt, Homo sapiens
  misc_RNA (1)...(19): siRNA sense strand
guacugcacagagacuaug

SEQ ID NO: 715349 - RNA, 19 nt, Homo sapiens
  misc_RNA (1)...(19): siRNA sense strand
ugcagagcgucuaugagaa

SEQ ID NO: 715350 - RNA, 19 nt, Homo sapiens
  misc_RNA (1)...(19): siRNA sense strand
caucgccgaguacaacuug

SEQ ID NO: 715351 - RNA, 19 nt, Homo sapiens
  misc_RNA (1)...(19): siRNA sense strand
ccgcaaaggacacgguugu

SEQ ID NO: 715352 - RNA, 19 nt, Homo sapiens
  misc_RNA (1)...(19): siRNA sense strand
ugagaaaguacugcacaga

SEQ ID NO: 715353 - RNA, 19 nt, Homo sapiens
  misc_RNA (1)...(19): siRNA sense strand
guaaaggggacagugauuu

SEQ ID NO: 715354 - RNA, 19 nt, Homo sapiens
  misc_RNA (1)...(19): siRNA sense strand
cugcgcagcuucgacuaug

SEQ ID NO: 715355 - RNA, 19 nt, Homo sapiens
  misc_RNA (1)...(19): siRNA sense strand
augucaaccuucuguaaga

SEQ ID NO: 715356 - RNA, 19 nt, Homo sapiens
  misc_RNA (1)...(19): siRNA sense strand
gauuucaacgacagcgauu

SEQ ID NO: 715357 - RNA, 19 nt, Homo sapiens
  misc_RNA (1)...(19): siRNA sense strand
gagcgucuaugagaaagua

SEQ ID NO: 715358 - RNA, 19 nt, Homo sapiens
  misc_RNA (1)...(19): siRNA sense strand
gaaaguaucgggugacaca

SEQ ID NO: 715359 - RNA, 19 nt, Homo sapiens
  misc_RNA (1)...(19): siRNA sense strand
cgacagcgauuccgacauc

SEQ ID NO: 715360 - RNA, 19 nt, Homo sapiens
  misc_RNA (1)...(19): siRNA sense strand
gaagaagggagccaaugaa

SEQ ID NO: 715361 - RNA, 19 nt, Homo sapiens
  misc_RNA (1)...(19): siRNA sense strand
gcagagcgucuaugagaaa

SEQ ID NO: 715362 - RNA, 19 nt, Homo sapiens
  misc_RNA (1)...(19): siRNA sense strand
gcagagaagcagagaaguu

SEQ ID NO: 715363 - RNA, 19 nt, Homo sapiens
  misc_RNA (1)...(19): siRNA sense strand
ggaccugcauaugaaagua

SEQ ID NO: 715364 - RNA, 19 nt, Homo sapiens
  misc_RNA (1)...(19): siRNA sense strand
ccgaggaccugcauaugaa

SEQ ID NO: 715365 - RNA, 19 nt, Homo sapiens
  misc_RNA (1)...(19): siRNA sense strand
agaaaguacugcacagaga

SEQ ID NO: 715366 - RNA, 19 nt, Homo sapiens
  misc_RNA (1)...(19): siRNA sense strand
cgaagaagggagccaauga

SEQ ID NO: 715367 - RNA, 19 nt, Homo sapiens
  misc_RNA (1)...(19): siRNA sense strand
gaagggagccaaugaaaau

SEQ ID NO: 715368 - RNA, 19 nt, Homo sapiens
  misc_RNA (1)...(19): siRNA sense strand
gccgaggaccugcauauga

SEQ ID NO: 715369 - RNA, 19 nt, Homo sapiens
  misc_RNA (1)...(19): siRNA sense strand
aaguggagcuggcggaaga

SEQ ID NO: 715370 - RNA, 19 nt, Homo sapiens
  misc_RNA (1)...(19): siRNA sense strand
cagcagcgcccuagugcaa

SEQ ID NO: 715371 - RNA, 19 nt, Homo sapiens
  misc_RNA (1)...(19): siRNA sense strand
cgacgugguguucgcauuu

SEQ ID NO: 715372 - RNA, 19 nt, Homo sapiens
  misc_RNA (1)...(19): siRNA sense strand
gcccagaugucaaccuucu

SEQ ID NO: 715373 - RNA, 19 nt, Homo sapiens
  misc_RNA (1)...(19): siRNA sense strand
ugacaacgcacccgacauc

SEQ ID NO: 715374 - RNA, 19 nt, Homo sapiens
  misc_RNA (1)...(19): siRNA sense strand
cugcagagcgucuaugaga

SEQ ID NO: 715375 - RNA, 19 nt, Homo sapiens
  misc_RNA (1)...(19): siRNA sense strand
gacguucgcauccaagcua

SEQ ID NO: 715376 - RNA, 19 nt, Homo sapiens
  misc_RNA (1)...(19): siRNA sense strand
gcagcgcccuagugcaagu

SEQ ID NO: 715377 - RNA, 19 nt, Homo sapiens
  misc_RNA (1)...(19): siRNA sense strand
cagcccagaugucaaccuu

SEQ ID NO: 715378 - RNA, 19 nt, Homo sapiens
  misc_RNA (1)...(19): siRNA sense strand
gcaaagacagcgguaaagg

SEQ ID NO: 715379 - RNA, 19 nt, Homo sapiens
  misc_RNA (1)...(19): siRNA sense strand
caauggcucccuagaagug

SEQ ID NO: 715380 - RNA, 19 nt, Homo sapiens
  misc_RNA (1)...(19): siRNA sense strand
cagagaagcagagaaguuc

SEQ ID NO: 715381 - RNA, 19 nt, Homo sapiens
  misc_RNA (1)...(19): siRNA sense strand
ucccagaccugcaggagau

SEQ ID NO: 715382 - RNA, 19 nt, Homo sapiens
  misc_RNA (1)...(19): siRNA sense strand
cggcaaagacagcgguaaa

SEQ ID NO: 715383 - RNA, 19 nt, Homo sapiens
  misc_RNA (1)...(19): siRNA sense strand
aagaagggagccaaugaaa

SEQ ID NO: 715384 - RNA, 19 nt, Homo sapiens
  misc_RNA (1)...(19): siRNA sense strand
aaaaggaucucaucaacca

SEQ ID NO: 715385 - RNA, 19 nt, Homo sapiens
  misc_RNA (1)...(19): siRNA sense strand
gacgugguguucgcauuug

SEQ ID NO: 715386 - RNA, 19 nt, Homo sapiens
  misc_RNA (1)...(19): siRNA sense strand
gaaguucagcggcaaagac

SEQ ID NO: 715387 - RNA, 19 nt, Homo sapiens
  misc_RNA (1)...(19): siRNA sense strand
acugucagcuucgugguaa

SEQ ID NO: 715388 - RNA, 19 nt, Homo sapiens
  misc_RNA (1)...(19): siRNA sense strand
gaugucaaccuucuguaag

SEQ ID NO: 715389 - RNA, 19 nt, Homo sapiens
  misc_RNA (1)...(19): siRNA sense strand
gcagggacaauuacuacca

SEQ ID NO: 715390 - RNA, 19 nt, Homo sapiens
  misc_RNA (1)...(19): siRNA sense strand
gaacgcaucgccgaguaca

SEQ ID NO: 715391 - RNA, 19 nt, Homo sapiens
  misc_RNA (1)...(19): siRNA sense strand
gcgcagggacaauuacuac

SEQ ID NO: 715392 - RNA, 19 nt, Homo sapiens
  misc_RNA (1)...(19): siRNA sense strand
uaacggcgacgugguguuc

SEQ ID NO: 715393 - RNA, 19 nt, Homo sapiens
  misc_RNA (1)...(19): siRNA sense strand
agaugucaaccuucuguaa

SEQ ID NO: 715394 - RNA, 19 nt, Homo sapiens
  misc_RNA (1)...(19): siRNA sense strand
gggcgcuccuggucauauc

SEQ ID NO: 715395 - RNA, 19 nt, Homo sapiens
  misc_RNA (1)...(19): siRNA sense strand
gaccugcauaugaaaguau

SEQ ID NO: 715396 - RNA, 19 nt, Homo sapiens
  misc_RNA (1)...(19): siRNA sense strand
gugcaccgcugaguguaag

SEQ ID NO: 715397 - RNA, 19 nt, Homo sapiens
  misc_RNA (1)...(19): siRNA sense strand
acacgccgcugaucgucau

SEQ ID NO: 715398 - RNA, 19 nt, Homo sapiens
  misc_RNA (1)...(19): siRNA sense strand
gcgcauccgagacgucaau

SEQ ID NO: 715399 - RNA, 19 nt, Homo sapiens
  misc_RNA (1)...(19): siRNA sense strand
gagcaaaacaguccgauac

SEQ ID NO: 715400 - RNA, 19 nt, Homo sapiens
  misc_RNA (1)...(19): siRNA sense strand
guacugcacagagacuaug

SEQ ID NO: 715401 - RNA, 19 nt, Homo sapiens
  misc_RNA (1)...(19): siRNA sense strand
ugcagagcgucuaugagaa

SEQ ID NO: 715402 - RNA, 19 nt, Homo sapiens
  misc_RNA (1)...(19): siRNA sense strand
caucgccgaguacaacuug

SEQ ID NO: 715403 - RNA, 19 nt, Homo sapiens
  misc_RNA (1)...(19): siRNA sense strand
ccgcaaaggacacgguugu

SEQ ID NO: 715404 - RNA, 19 nt, Homo sapiens
  misc_RNA (1)...(19): siRNA sense strand
ugagaaaguacugcacaga

SEQ ID NO: 715405 - RNA, 19 nt, Homo sapiens
  misc_RNA (1)...(19): siRNA sense strand
guaaaggggacagugauuu

SEQ ID NO: 715406 - RNA, 19 nt, Homo sapiens
  misc_RNA (1)...(19): siRNA sense strand
cugcgcagcuucgacuaug

SEQ ID NO: 715407 - RNA, 19 nt, Homo sapiens
  misc_RNA (1)...(19): siRNA sense strand
augucaaccuucuguaaga

SEQ ID NO: 715408 - RNA, 19 nt, Homo sapiens
  misc_RNA (1)...(19): siRNA sense strand
gauuucaacgacagcgauu

SEQ ID NO: 715409 - RNA, 19 nt, Homo sapiens
  misc_RNA (1)...(19): siRNA sense strand
caggaaagcuguucacuga

SEQ ID NO: 715410 - RNA, 19 nt, Homo sapiens
  misc_RNA (1)...(19): siRNA sense strand
gaggaucagugacuuguuu

SEQ ID NO: 715411 - RNA, 19 nt, Homo sapiens
  misc_RNA (1)...(19): siRNA sense strand
uuacagauaccaacaguua

SEQ ID NO: 715412 - RNA, 19 nt, Homo sapiens
  misc_RNA (1)...(19): siRNA sense strand
gcaaggaggcggaggcauu

SEQ ID NO: 715413 - RNA, 19 nt, Homo sapiens
  misc_RNA (1)...(19): siRNA sense strand
guaagaaacgcuuugcaaa

SEQ ID NO: 715414 - RNA, 19 nt, Homo sapiens
  misc_RNA (1)...(19): siRNA sense strand
ggaaagcuguucacugacu

SEQ ID NO: 715415 - RNA, 19 nt, Homo sapiens
  misc_RNA (1)...(19): siRNA sense strand
ggagauuucuacuucuuca

SEQ ID NO: 715416 - RNA, 19 nt, Homo sapiens
  misc_RNA (1)...(19): siRNA sense strand
gaacuggccugagcaucug

SEQ ID NO: 715417 - RNA, 19 nt, Homo sapiens
  misc_RNA (1)...(19): siRNA sense strand
ugauggagauuucuacuuc

SEQ ID NO: 715418 - RNA, 19 nt, Homo sapiens
  misc_RNA (1)...(19): siRNA sense strand
aaacgcagggcccuaaaua

SEQ ID NO: 715419 - RNA, 19 nt, Homo sapiens
  misc_RNA (1)...(19): siRNA sense strand
guacggauaccucaaugaa

SEQ ID NO: 715420 - RNA, 19 nt, Homo sapiens
  misc_RNA (1)...(19): siRNA sense strand
gcaaagcaagguaacaaau

SEQ ID NO: 715421 - RNA, 19 nt, Homo sapiens
  misc_RNA (1)...(19): siRNA sense strand
gaaagcuguucacugacuu

SEQ ID NO: 715422 - RNA, 19 nt, Homo sapiens
  misc_RNA (1)...(19): siRNA sense strand
gaaguacggauaccucaau

SEQ ID NO: 715423 - RNA, 19 nt, Homo sapiens
  misc_RNA (1)...(19): siRNA sense strand
caaagcaagguaacaaaug

SEQ ID NO: 715424 - RNA, 19 nt, Homo sapiens
  misc_RNA (1)...(19): siRNA sense strand
gcggaggcauuccuagaga

SEQ ID NO: 715425 - RNA, 19 nt, Homo sapiens
  misc_RNA (1)...(19): siRNA sense strand
aaagcaagguaacaaaugg

SEQ ID NO: 715426 - RNA, 19 nt, Homo sapiens
  misc_RNA (1)...(19): siRNA sense strand
aggcauuccuagagaagua

SEQ ID NO: 715427 - RNA, 19 nt, Homo sapiens
  misc_RNA (1)...(19): siRNA sense strand
acggauaccucaaugaaca

SEQ ID NO: 715428 - RNA, 19 nt, Homo sapiens
  misc_RNA (1)...(19): siRNA sense strand
gaaacgcagggcccuaaau

SEQ ID NO: 715429 - RNA, 19 nt, Homo sapiens
  misc_RNA (1)...(19): siRNA sense strand
gcacuucgaccaagaugag

SEQ ID NO: 715430 - RNA, 19 nt, Homo sapiens
  misc_RNA (1)...(19): siRNA sense strand
ucucagcgcuggaguucug

SEQ ID NO: 715431 - RNA, 19 nt, Homo sapiens
  misc_RNA (1)...(19): siRNA sense strand
gcuguucacugacuuugag

SEQ ID NO: 715432 - RNA, 19 nt, Homo sapiens
  misc_RNA (1)...(19): siRNA sense strand
gcaaguggagcccuacuac

SEQ ID NO: 715433 - RNA, 19 nt, Homo sapiens
  misc_RNA (1)...(19): siRNA sense strand
acaagcagcaccucuccua

SEQ ID NO: 715434 - RNA, 19 nt, Homo sapiens
  misc_RNA (1)...(19): siRNA sense strand
gcucccaccuccacucgau

SEQ ID NO: 715435 - RNA, 19 nt, Homo sapiens
  misc_RNA (1)...(19): siRNA sense strand
ggaccaaaaugaggcguaa

SEQ ID NO: 715436 - RNA, 19 nt, Homo sapiens
  misc_RNA (1)...(19): siRNA sense strand
gguuacagauaccaacagu

SEQ ID NO: 715437 - RNA, 19 nt, Homo sapiens
  misc_RNA (1)...(19): siRNA sense strand
cguaagaaacgcuuugcaa

SEQ ID NO: 715438 - RNA, 19 nt, Homo sapiens
  misc_RNA (1)...(19): siRNA sense strand
ugaaugauggagauuucua

SEQ ID NO: 715439 - RNA, 19 nt, Homo sapiens
  misc_RNA (1)...(19): siRNA sense strand
ccuaaauacugccacucuu

SEQ ID NO: 715440 - RNA, 19 nt, Homo sapiens
  misc_RNA (1)...(19): siRNA sense strand
acagauaccaacaguuaug

SEQ ID NO: 715441 - RNA, 19 nt, Homo sapiens
  misc_RNA (1)...(19): siRNA sense strand
gauuucuacuucuucaaag

SEQ ID NO: 715442 - RNA, 19 nt, Homo sapiens
  misc_RNA (1)...(19): siRNA sense strand
gauggagauuucuacuucu

SEQ ID NO: 715443 - RNA, 19 nt, Homo sapiens
  misc_RNA (1)...(19): siRNA sense strand
gagaggaucagugacuugu

SEQ ID NO: 715444 - RNA, 19 nt, Homo sapiens
  misc_RNA (1)...(19): siRNA sense strand
cuaaauacugccacucuuc

SEQ ID NO: 715445 - RNA, 19 nt, Homo sapiens
  misc_RNA (1)...(19): siRNA sense strand
caagguaacaaaugguaca

SEQ ID NO: 715446 - RNA, 19 nt, Homo sapiens
  misc_RNA (1)...(19): siRNA sense strand
ggaggcggaggcauuccua

SEQ ID NO: 715447 - RNA, 19 nt, Homo sapiens
  misc_RNA (1)...(19): siRNA sense strand
caaaaugaggcguaagaaa

SEQ ID NO: 715448 - RNA, 19 nt, Homo sapiens
  misc_RNA (1)...(19): siRNA sense strand
cggaggcauuccuagagaa

SEQ ID NO: 715449 - RNA, 19 nt, Homo sapiens
  misc_RNA (1)...(19): siRNA sense strand
caaggaggcggaggcauuc

SEQ ID NO: 715450 - RNA, 19 nt, Homo sapiens
  misc_RNA (1)...(19): siRNA sense strand
caagggugcccgcuacuac

SEQ ID NO: 715451 - RNA, 19 nt, Homo sapiens
  misc_RNA (1)...(19): siRNA sense strand
gaaugauggagauuucuac

SEQ ID NO: 715452 - RNA, 19 nt, Homo sapiens
  misc_RNA (1)...(19): siRNA sense strand
aucagugacuuguuugcua

SEQ ID NO: 715453 - RNA, 19 nt, Homo sapiens
  misc_RNA (1)...(19): siRNA sense strand
ugaacuggccugagcaucu

SEQ ID NO: 715454 - RNA, 19 nt, Homo sapiens
  misc_RNA (1)...(19): siRNA sense strand
guaacaaaugguacaagca

SEQ ID NO: 715455 - RNA, 19 nt, Homo sapiens
  misc_RNA (1)...(19): siRNA sense strand
ccguccagcucccaggaaa

SEQ ID NO: 715456 - RNA, 19 nt, Homo sapiens
  misc_RNA (1)...(19): siRNA sense strand
aagcgcacuucgaccaaga

SEQ ID NO: 715457 - RNA, 19 nt, Homo sapiens
  misc_RNA (1)...(19): siRNA sense strand
ggaggcauuccuagagaag

SEQ ID NO: 715458 - RNA, 19 nt, Homo sapiens
  misc_RNA (1)...(19): siRNA sense strand
ucaagggugcccgcuacua

SEQ ID NO: 715459 - RNA, 19 nt, Homo sapiens
  misc_RNA (1)...(19): siRNA sense strand
caggaaagcuguucacuga

SEQ ID NO: 715460 - RNA, 19 nt, Homo sapiens
  misc_RNA (1)...(19): siRNA sense strand
gaggaucagugacuuguuu

SEQ ID NO: 715461 - RNA, 19 nt, Homo sapiens
  misc_RNA (1)...(19): siRNA sense strand
uuacagauaccaacaguua

SEQ ID NO: 715462 - RNA, 19 nt, Homo sapiens
  misc_RNA (1)...(19): siRNA sense strand
gcaaggaggcggaggcauu

SEQ ID NO: 715463 - RNA, 19 nt, Homo sapiens
  misc_RNA (1)...(19): siRNA sense strand
guaagaaacgcuuugcaaa

SEQ ID NO: 715464 - RNA, 19 nt, Homo sapiens
  misc_RNA (1)...(19): siRNA sense strand
ggaaagcuguucacugacu

SEQ ID NO: 715465 - RNA, 19 nt, Homo sapiens
  misc_RNA (1)...(19): siRNA sense strand
ggagauuucuacuucuuca

SEQ ID NO: 715466 - RNA, 19 nt, Homo sapiens
  misc_RNA (1)...(19): siRNA sense strand
gaacuggccugagcaucug

SEQ ID NO: 715467 - RNA, 19 nt, Homo sapiens
  misc_RNA (1)...(19): siRNA sense strand
ugauggagauuucuacuuc

SEQ ID NO: 715468 - RNA, 19 nt, Homo sapiens
  misc_RNA (1)...(19): siRNA sense strand
aaacgcagggcccuaaaua

SEQ ID NO: 715469 - RNA, 19 nt, Homo sapiens
  misc_RNA (1)...(19): siRNA sense strand
guacggauaccucaaugaa

SEQ ID NO: 715470 - RNA, 19 nt, Homo sapiens
  misc_RNA (1)...(19): siRNA sense strand
gcaaagcaagguaacaaau

SEQ ID NO: 715471 - RNA, 19 nt, Homo sapiens
  misc_RNA (1)...(19): siRNA sense strand
gaaagcuguucacugacuu

SEQ ID NO: 715472 - RNA, 19 nt, Homo sapiens
  misc_RNA (1)...(19): siRNA sense strand
gaaguacggauaccucaau

SEQ ID NO: 715473 - RNA, 19 nt, Homo sapiens
  misc_RNA (1)...(19): siRNA sense strand
caaagcaagguaacaaaug

SEQ ID NO: 715474 - RNA, 19 nt, Homo sapiens
  misc_RNA (1)...(19): siRNA sense strand
gcggaggcauuccuagaga

SEQ ID NO: 715475 - RNA, 19 nt, Homo sapiens
  misc_RNA (1)...(19): siRNA sense strand
aaagcaagguaacaaaugg

SEQ ID NO: 715476 - RNA, 19 nt, Homo sapiens
  misc_RNA (1)...(19): siRNA sense strand
aggcauuccuagagaagua

SEQ ID NO: 715477 - RNA, 19 nt, Homo sapiens
  misc_RNA (1)...(19): siRNA sense strand
acggauaccucaaugaaca

SEQ ID NO: 715478 - RNA, 19 nt, Homo sapiens
  misc_RNA (1)...(19): siRNA sense strand
gaaacgcagggcccuaaau

SEQ ID NO: 715479 - RNA, 19 nt, Homo sapiens
  misc_RNA (1)...(19): siRNA sense strand
gcacuucgaccaagaugag

SEQ ID NO: 715480 - RNA, 19 nt, Homo sapiens
  misc_RNA (1)...(19): siRNA sense strand
ucucagcgcuggaguucug

SEQ ID NO: 715481 - RNA, 19 nt, Homo sapiens
  misc_RNA (1)...(19): siRNA sense strand
gcuguucacugacuuugag

SEQ ID NO: 715482 - RNA, 19 nt, Homo sapiens
  misc_RNA (1)...(19): siRNA sense strand
acaagcagcaccucuccua

SEQ ID NO: 715483 - RNA, 19 nt, Homo sapiens
  misc_RNA (1)...(19): siRNA sense strand
gcucccaccuccacucgau

SEQ ID NO: 715484 - RNA, 19 nt, Homo sapiens
  misc_RNA (1)...(19): siRNA sense strand
ggaccaaaaugaggcguaa

SEQ ID NO: 715485 - RNA, 19 nt, Homo sapiens
  misc_RNA (1)...(19): siRNA sense strand
gguuacagauaccaacagu

SEQ ID NO: 715486 - RNA, 19 nt, Homo sapiens
  misc_RNA (1)...(19): siRNA sense strand
cguaagaaacgcuuugcaa

SEQ ID NO: 715487 - RNA, 19 nt, Homo sapiens
  misc_RNA (1)...(19): siRNA sense strand
ugaaugauggagauuucua

SEQ ID NO: 715488 - RNA, 19 nt, Homo sapiens
  misc_RNA (1)...(19): siRNA sense strand
ccuaaauacugccacucuu

SEQ ID NO: 715489 - RNA, 19 nt, Homo sapiens
  misc_RNA (1)...(19): siRNA sense strand
acagauaccaacaguuaug

SEQ ID NO: 715490 - RNA, 19 nt, Homo sapiens
  misc_RNA (1)...(19): siRNA sense strand
gauuucuacuucuucaaag

SEQ ID NO: 715491 - RNA, 19 nt, Homo sapiens
  misc_RNA (1)...(19): siRNA sense strand
gauggagauuucuacuucu

SEQ ID NO: 715492 - RNA, 19 nt, Homo sapiens
  misc_RNA (1)...(19): siRNA sense strand
gagaggaucagugacuugu

SEQ ID NO: 715493 - RNA, 19 nt, Homo sapiens
  misc_RNA (1)...(19): siRNA sense strand
cuaaauacugccacucuuc

SEQ ID NO: 715494 - RNA, 19 nt, Homo sapiens
  misc_RNA (1)...(19): siRNA sense strand
caagguaacaaaugguaca

SEQ ID NO: 715495 - RNA, 19 nt, Homo sapiens
  misc_RNA (1)...(19): siRNA sense strand
ggaggcggaggcauuccua

SEQ ID NO: 715496 - RNA, 19 nt, Homo sapiens
  misc_RNA (1)...(19): siRNA sense strand
caaaaugaggcguaagaaa

SEQ ID NO: 715497 - RNA, 19 nt, Homo sapiens
  misc_RNA (1)...(19): siRNA sense strand
cggaggcauuccuagagaa

SEQ ID NO: 715498 - RNA, 19 nt, Homo sapiens
  misc_RNA (1)...(19): siRNA sense strand
caaggaggcggaggcauuc

SEQ ID NO: 715499 - RNA, 19 nt, Homo sapiens
  misc_RNA (1)...(19): siRNA sense strand
gaaugauggagauuucuac

SEQ ID NO: 715500 - RNA, 19 nt, Homo sapiens
  misc_RNA (1)...(19): siRNA sense strand
aucagugacuuguuugcua

SEQ ID NO: 715501 - RNA, 19 nt, Homo sapiens
  misc_RNA (1)...(19): siRNA sense strand
ugaacuggccugagcaucu

SEQ ID NO: 715502 - RNA, 19 nt, Homo sapiens
  misc_RNA (1)...(19): siRNA sense strand
guaacaaaugguacaagca

SEQ ID NO: 715503 - RNA, 19 nt, Homo sapiens
  misc_RNA (1)...(19): siRNA sense strand
ccguccagcucccaggaaa

SEQ ID NO: 715504 - RNA, 19 nt, Homo sapiens
  misc_RNA (1)...(19): siRNA sense strand
aagcgcacuucgaccaaga

SEQ ID NO: 715505 - RNA, 19 nt, Homo sapiens
  misc_RNA (1)...(19): siRNA sense strand
ggaggcauuccuagagaag

SEQ ID NO: 715506 - RNA, 19 nt, Homo sapiens
  misc_RNA (1)...(19): siRNA sense strand
ccacagcggucacuucaug

SEQ ID NO: 715507 - RNA, 19 nt, Homo sapiens
  misc_RNA (1)...(19): siRNA sense strand
gacacucucuucaccauga

SEQ ID NO: 715508 - RNA, 19 nt, Homo sapiens
  misc_RNA (1)...(19): siRNA sense strand
gcccaugccuucaaacuuc

SEQ ID NO: 715509 - RNA, 19 nt, Homo sapiens
  misc_RNA (1)...(19): siRNA sense strand
acaagaagcggcuccguaa

SEQ ID NO: 715510 - RNA, 19 nt, Homo sapiens
  misc_RNA (1)...(19): siRNA sense strand
gacaagauccgccugaaca

SEQ ID NO: 715511 - RNA, 19 nt, Homo sapiens
  misc_RNA (1)...(19): siRNA sense strand
ucucuucucucccagguuu

SEQ ID NO: 715512 - RNA, 19 nt, Homo sapiens
  misc_RNA (1)...(19): siRNA sense strand
gagacauguuugaugacua

SEQ ID NO: 715513 - RNA, 19 nt, Homo sapiens
  misc_RNA (1)...(19): siRNA sense strand
gagacaagauccgccugaa

SEQ ID NO: 715514 - RNA, 19 nt, Homo sapiens
  misc_RNA (1)...(19): siRNA sense strand
acaaguggcgcaucuacua

SEQ ID NO: 715515 - RNA, 19 nt, Homo sapiens
  misc_RNA (1)...(19): siRNA sense strand
gggcacaucuaccaguauc

SEQ ID NO: 715516 - RNA, 19 nt, Homo sapiens
  misc_RNA (1)...(19): siRNA sense strand
cggcaaugcugacaugauc

SEQ ID NO: 715517 - RNA, 19 nt, Homo sapiens
  misc_RNA (1)...(19): siRNA sense strand
ucucagauuucuuuaccaa

SEQ ID NO: 715518 - RNA, 19 nt, Homo sapiens
  misc_RNA (1)...(19): siRNA sense strand
ugcgagacauguuugauga

SEQ ID NO: 715519 - RNA, 19 nt, Homo sapiens
  misc_RNA (1)...(19): siRNA sense strand
ccagaugcgagacauguuu

SEQ ID NO: 715520 - RNA, 19 nt, Homo sapiens
  misc_RNA (1)...(19): siRNA sense strand
ucagauuucuuuaccaacu

SEQ ID NO: 715521 - RNA, 19 nt, Homo sapiens
  misc_RNA (1)...(19): siRNA sense strand
agacauguuugaugacuac

SEQ ID NO: 715522 - RNA, 19 nt, Homo sapiens
  misc_RNA (1)...(19): siRNA sense strand
ccaaguggaagaauuucaa

SEQ ID NO: 715523 - RNA, 19 nt, Homo sapiens
  misc_RNA (1)...(19): siRNA sense strand
caaguggaagaauuucaaa

SEQ ID NO: 715524 - RNA, 19 nt, Homo sapiens
  misc_RNA (1)...(19): siRNA sense strand
gugguugacucccucuuca

SEQ ID NO: 715525 - RNA, 19 nt, Homo sapiens
  misc_RNA (1)...(19): siRNA sense strand
uggcgcaucuacuacaaga

SEQ ID NO: 715526 - RNA, 19 nt, Homo sapiens
  misc_RNA (1)...(19): siRNA sense strand
gcgcaucuacuacaagaag

SEQ ID NO: 715527 - RNA, 19 nt, Homo sapiens
  misc_RNA (1)...(19): siRNA sense strand
cgucggcaaugcugacaug

SEQ ID NO: 715528 - RNA, 19 nt, Homo sapiens
  misc_RNA (1)...(19): siRNA sense strand
ggccaacuguccugaacuc

SEQ ID NO: 715529 - RNA, 19 nt, Homo sapiens
  misc_RNA (1)...(19): siRNA sense strand
ucucccaaguggaagaauu

SEQ ID NO: 715530 - RNA, 19 nt, Homo sapiens
  misc_RNA (1)...(19): siRNA sense strand
gaccagaugcgagacaugu

SEQ ID NO: 715531 - RNA, 19 nt, Homo sapiens
  misc_RNA (1)...(19): siRNA sense strand
gcgccuuccugaguucuga

SEQ ID NO: 715532 - RNA, 19 nt, Homo sapiens
  misc_RNA (1)...(19): siRNA sense strand
cagacacucucuucaccau

SEQ ID NO: 715533 - RNA, 19 nt, Homo sapiens
  misc_RNA (1)...(19): siRNA sense strand
gaacccguacgcugcacaa

SEQ ID NO: 715534 - RNA, 19 nt, Homo sapiens
  misc_RNA (1)...(19): siRNA sense strand
guacgcugcacaacuggaa

SEQ ID NO: 715535 - RNA, 19 nt, Homo sapiens
  misc_RNA (1)...(19): siRNA sense strand
ugguauauccaguauguga

SEQ ID NO: 715536 - RNA, 19 nt, Homo sapiens
  misc_RNA (1)...(19): siRNA sense strand
gaauuucaaaggccucaag

SEQ ID NO: 715537 - RNA, 19 nt, Homo sapiens
  misc_RNA (1)...(19): siRNA sense strand
ccacacgggcagucacaga

SEQ ID NO: 715538 - RNA, 19 nt, Homo sapiens
  misc_RNA (1)...(19): siRNA sense strand
ccucauccggccucuguuu

SEQ ID NO: 715539 - RNA, 19 nt, Homo sapiens
  misc_RNA (1)...(19): siRNA sense strand
cgagacauguuugaugacu

SEQ ID NO: 715540 - RNA, 19 nt, Homo sapiens
  misc_RNA (1)...(19): siRNA sense strand
gcagcugcgggaugagauu

SEQ ID NO: 715541 - RNA, 19 nt, Homo sapiens
  misc_RNA (1)...(19): siRNA sense strand
gaguucugauuuccuccuu

SEQ ID NO: 715542 - RNA, 19 nt, Homo sapiens
  misc_RNA (1)...(19): siRNA sense strand
caucucagacacucucuuc

SEQ ID NO: 715543 - RNA, 19 nt, Homo sapiens
  misc_RNA (1)...(19): siRNA sense strand
ccccaccucugcugcauua

SEQ ID NO: 715544 - RNA, 19 nt, Homo sapiens
  misc_RNA (1)...(19): siRNA sense strand
gguauauccaguaugugaa

SEQ ID NO: 715545 - RNA, 19 nt, Homo sapiens
  misc_RNA (1)...(19): siRNA sense strand
cccguacgcugcacaacug

SEQ ID NO: 715546 - RNA, 19 nt, Homo sapiens
  misc_RNA (1)...(19): siRNA sense strand
agccaagccuggaugacuu

SEQ ID NO: 715547 - RNA, 19 nt, Homo sapiens
  misc_RNA (1)...(19): siRNA sense strand
uaugugaagcggaggaaga

SEQ ID NO: 715548 - RNA, 19 nt, Homo sapiens
  misc_RNA (1)...(19): siRNA sense strand
ggccaugacccaccucucu

SEQ ID NO: 715549 - RNA, 19 nt, Homo sapiens
  misc_RNA (1)...(19): siRNA sense strand
uggcaccacccacugcuuu

SEQ ID NO: 715550 - RNA, 19 nt, Homo sapiens
  misc_RNA (1)...(19): siRNA sense strand
gcaaugcugacaugaucca

SEQ ID NO: 715551 - RNA, 19 nt, Homo sapiens
  misc_RNA (1)...(19): siRNA sense strand
ccagcgccuuccugaguuc

SEQ ID NO: 715552 - RNA, 19 nt, Homo sapiens
  misc_RNA (1)...(19): siRNA sense strand
gcuugagccuggccuacag

SEQ ID NO: 715553 - RNA, 19 nt, Homo sapiens
  misc_RNA (1)...(19): siRNA sense strand
aagcuggugucucccaagu

SEQ ID NO: 715554 - RNA, 19 nt, Homo sapiens
  misc_RNA (1)...(19): siRNA sense strand
caacaaccccugccucaca

SEQ ID NO: 715555 - RNA, 19 nt, Homo sapiens
  misc_RNA (1)...(19): siRNA sense strand
ccacagcggucacuucaug

SEQ ID NO: 715556 - RNA, 19 nt, Homo sapiens
  misc_RNA (1)...(19): siRNA sense strand
gacacucucuucaccauga

SEQ ID NO: 715557 - RNA, 19 nt, Homo sapiens
  misc_RNA (1)...(19): siRNA sense strand
gcccaugccuucaaacuuc

SEQ ID NO: 715558 - RNA, 19 nt, Homo sapiens
  misc_RNA (1)...(19): siRNA sense strand
acaagaagcggcuccguaa

SEQ ID NO: 715559 - RNA, 19 nt, Homo sapiens
  misc_RNA (1)...(19): siRNA sense strand
gacaagauccgccugaaca

SEQ ID NO: 715560 - RNA, 19 nt, Homo sapiens
  misc_RNA (1)...(19): siRNA sense strand
ucucuucucucccagguuu

SEQ ID NO: 715561 - RNA, 19 nt, Homo sapiens
  misc_RNA (1)...(19): siRNA sense strand
gagacauguuugaugacua

SEQ ID NO: 715562 - RNA, 19 nt, Homo sapiens
  misc_RNA (1)...(19): siRNA sense strand
gagacaagauccgccugaa

SEQ ID NO: 715563 - RNA, 19 nt, Homo sapiens
  misc_RNA (1)...(19): siRNA sense strand
acaaguggcgcaucuacua

SEQ ID NO: 715564 - RNA, 19 nt, Homo sapiens
  misc_RNA (1)...(19): siRNA sense strand
gggcacaucuaccaguauc

SEQ ID NO: 715565 - RNA, 19 nt, Homo sapiens
  misc_RNA (1)...(19): siRNA sense strand
cggcaaugcugacaugauc

SEQ ID NO: 715566 - RNA, 19 nt, Homo sapiens
  misc_RNA (1)...(19): siRNA sense strand
ucucagauuucuuuaccaa

SEQ ID NO: 715567 - RNA, 19 nt, Homo sapiens
  misc_RNA (1)...(19): siRNA sense strand
ugcgagacauguuugauga

SEQ ID NO: 715568 - RNA, 19 nt, Homo sapiens
  misc_RNA (1)...(19): siRNA sense strand
ccagaugcgagacauguuu

SEQ ID NO: 715569 - RNA, 19 nt, Homo sapiens
  misc_RNA (1)...(19): siRNA sense strand
ucagauuucuuuaccaacu

SEQ ID NO: 715570 - RNA, 19 nt, Homo sapiens
  misc_RNA (1)...(19): siRNA sense strand
agacauguuugaugacuac

SEQ ID NO: 715571 - RNA, 19 nt, Homo sapiens
  misc_RNA (1)...(19): siRNA sense strand
ccaaguggaagaauuucaa

SEQ ID NO: 715572 - RNA, 19 nt, Homo sapiens
  misc_RNA (1)...(19): siRNA sense strand
caaguggaagaauuucaaa

SEQ ID NO: 715573 - RNA, 19 nt, Homo sapiens
  misc_RNA (1)...(19): siRNA sense strand
gugguugacucccucuuca

SEQ ID NO: 715574 - RNA, 19 nt, Homo sapiens
  misc_RNA (1)...(19): siRNA sense strand
uggcgcaucuacuacaaga

SEQ ID NO: 715575 - RNA, 19 nt, Homo sapiens
  misc_RNA (1)...(19): siRNA sense strand
gcgcaucuacuacaagaag

SEQ ID NO: 715576 - RNA, 19 nt, Homo sapiens
  misc_RNA (1)...(19): siRNA sense strand
cgucggcaaugcugacaug

SEQ ID NO: 715577 - RNA, 19 nt, Homo sapiens
  misc_RNA (1)...(19): siRNA sense strand
ggccaacuguccugaacuc

SEQ ID NO: 715578 - RNA, 19 nt, Homo sapiens
  misc_RNA (1)...(19): siRNA sense strand
ucucccaaguggaagaauu

SEQ ID NO: 715579 - RNA, 19 nt, Homo sapiens
  misc_RNA (1)...(19): siRNA sense strand
gaccagaugcgagacaugu

SEQ ID NO: 715580 - RNA, 19 nt, Homo sapiens
  misc_RNA (1)...(19): siRNA sense strand
gcgccuuccugaguucuga

SEQ ID NO: 715581 - RNA, 19 nt, Homo sapiens
  misc_RNA (1)...(19): siRNA sense strand
cagacacucucuucaccau

SEQ ID NO: 715582 - RNA, 19 nt, Homo sapiens
  misc_RNA (1)...(19): siRNA sense strand
gaacccguacgcugcacaa

SEQ ID NO: 715583 - RNA, 19 nt, Homo sapiens
  misc_RNA (1)...(19): siRNA sense strand
guacgcugcacaacuggaa

SEQ ID NO: 715584 - RNA, 19 nt, Homo sapiens
  misc_RNA (1)...(19): siRNA sense strand
ugguauauccaguauguga

SEQ ID NO: 715585 - RNA, 19 nt, Homo sapiens
  misc_RNA (1)...(19): siRNA sense strand
gaauuucaaaggccucaag

SEQ ID NO: 715586 - RNA, 19 nt, Homo sapiens
  misc_RNA (1)...(19): siRNA sense strand
ccacacgggcagucacaga

SEQ ID NO: 715587 - RNA, 19 nt, Homo sapiens
  misc_RNA (1)...(19): siRNA sense strand
ccucauccggccucuguuu

SEQ ID NO: 715588 - RNA, 19 nt, Homo sapiens
  misc_RNA (1)...(19): siRNA sense strand
cgagacauguuugaugacu

SEQ ID NO: 715589 - RNA, 19 nt, Homo sapiens
  misc_RNA (1)...(19): siRNA sense strand
gcagcugcgggaugagauu

SEQ ID NO: 715590 - RNA, 19 nt, Homo sapiens
  misc_RNA (1)...(19): siRNA sense strand
gaguucugauuuccuccuu

SEQ ID NO: 715591 - RNA, 19 nt, Homo sapiens
  misc_RNA (1)...(19): siRNA sense strand
caucucagacacucucuuc

SEQ ID NO: 715592 - RNA, 19 nt, Homo sapiens
  misc_RNA (1)...(19): siRNA sense strand
ccccaccucugcugcauua

SEQ ID NO: 715593 - RNA, 19 nt, Homo sapiens
  misc_RNA (1)...(19): siRNA sense strand
gguauauccaguaugugaa

SEQ ID NO: 715594 - RNA, 19 nt, Homo sapiens
  misc_RNA (1)...(19): siRNA sense strand
cccguacgcugcacaacug

SEQ ID NO: 715595 - RNA, 19 nt, Homo sapiens
  misc_RNA (1)...(19): siRNA sense strand
agccaagccuggaugacuu

SEQ ID NO: 715596 - RNA, 19 nt, Homo sapiens
  misc_RNA (1)...(19): siRNA sense strand
uaugugaagcggaggaaga

SEQ ID NO: 715597 - RNA, 19 nt, Homo sapiens
  misc_RNA (1)...(19): siRNA sense strand
ggccaugacccaccucucu

SEQ ID NO: 715598 - RNA, 19 nt, Homo sapiens
  misc_RNA (1)...(19): siRNA sense strand
uggcaccacccacugcuuu

SEQ ID NO: 715599 - RNA, 19 nt, Homo sapiens
  misc_RNA (1)...(19): siRNA sense strand
gcaaugcugacaugaucca

SEQ ID NO: 715600 - RNA, 19 nt, Homo sapiens
  misc_RNA (1)...(19): siRNA sense strand
ccagcgccuuccugaguuc

SEQ ID NO: 715601 - RNA, 19 nt, Homo sapiens
  misc_RNA (1)...(19): siRNA sense strand
gcuugagccuggccuacag

SEQ ID NO: 715602 - RNA, 19 nt, Homo sapiens
  misc_RNA (1)...(19): siRNA sense strand
aagcuggugucucccaagu

SEQ ID NO: 715603 - RNA, 19 nt, Homo sapiens
  misc_RNA (1)...(19): siRNA sense strand
caacaaccccugccucaca

SEQ ID NO: 715604 - RNA, 19 nt, Homo sapiens
  misc_RNA (1)...(19): siRNA sense strand
ccacagcggucacuucaug

SEQ ID NO: 715605 - RNA, 19 nt, Homo sapiens
  misc_RNA (1)...(19): siRNA sense strand
gacacucucuucaccauga

SEQ ID NO: 715606 - RNA, 19 nt, Homo sapiens
  misc_RNA (1)...(19): siRNA sense strand
gcccaugccuucaaacuuc

SEQ ID NO: 715607 - RNA, 19 nt, Homo sapiens
  misc_RNA (1)...(19): siRNA sense strand
acaagaagcggcuccguaa

SEQ ID NO: 715608 - RNA, 19 nt, Homo sapiens
  misc_RNA (1)...(19): siRNA sense strand
gacaagauccgccugaaca

SEQ ID NO: 715609 - RNA, 19 nt, Homo sapiens
  misc_RNA (1)...(19): siRNA sense strand
ucucuucucucccagguuu

SEQ ID NO: 715610 - RNA, 19 nt, Homo sapiens
  misc_RNA (1)...(19): siRNA sense strand
gagacauguuugaugacua

SEQ ID NO: 715611 - RNA, 19 nt, Homo sapiens
  misc_RNA (1)...(19): siRNA sense strand
gagacaagauccgccugaa

SEQ ID NO: 715612 - RNA, 19 nt, Homo sapiens
  misc_RNA (1)...(19): siRNA sense strand
acaaguggcgcaucuacua

SEQ ID NO: 715613 - RNA, 19 nt, Homo sapiens
  misc_RNA (1)...(19): siRNA sense strand
gggcacaucuaccaguauc

SEQ ID NO: 715614 - RNA, 19 nt, Homo sapiens
  misc_RNA (1)...(19): siRNA sense strand
cggcaaugcugacaugauc

SEQ ID NO: 715615 - RNA, 19 nt, Homo sapiens
  misc_RNA (1)...(19): siRNA sense strand
ucucagauuucuuuaccaa

SEQ ID NO: 715616 - RNA, 19 nt, Homo sapiens
  misc_RNA (1)...(19): siRNA sense strand
ugcgagacauguuugauga

SEQ ID NO: 715617 - RNA, 19 nt, Homo sapiens
  misc_RNA (1)...(19): siRNA sense strand
ccagaugcgagacauguuu

SEQ ID NO: 715618 - RNA, 19 nt, Homo sapiens
  misc_RNA (1)...(19): siRNA sense strand
ucagauuucuuuaccaacu

SEQ ID NO: 715619 - RNA, 19 nt, Homo sapiens
  misc_RNA (1)...(19): siRNA sense strand
agacauguuugaugacuac

SEQ ID NO: 715620 - RNA, 19 nt, Homo sapiens
  misc_RNA (1)...(19): siRNA sense strand
ccaaguggaagaauuucaa

SEQ ID NO: 715621 - RNA, 19 nt, Homo sapiens
  misc_RNA (1)...(19): siRNA sense strand
caaguggaagaauuucaaa

SEQ ID NO: 715622 - RNA, 19 nt, Homo sapiens
  misc_RNA (1)...(19): siRNA sense strand
gugguugacucccucuuca

SEQ ID NO: 715623 - RNA, 19 nt, Homo sapiens
  misc_RNA (1)...(19): siRNA sense strand
uggcgcaucuacuacaaga

SEQ ID NO: 715624 - RNA, 19 nt, Homo sapiens
  misc_RNA (1)...(19): siRNA sense strand
gcgcaucuacuacaagaag

SEQ ID NO: 715625 - RNA, 19 nt, Homo sapiens
  misc_RNA (1)...(19): siRNA sense strand
cgucggcaaugcugacaug

SEQ ID NO: 715626 - RNA, 19 nt, Homo sapiens
  misc_RNA (1)...(19): siRNA sense strand
ggccaacuguccugaacuc

SEQ ID NO: 715627 - RNA, 19 nt, Homo sapiens
  misc_RNA (1)...(19): siRNA sense strand
ucucccaaguggaagaauu

SEQ ID NO: 715628 - RNA, 19 nt, Homo sapiens
  misc_RNA (1)...(19): siRNA sense strand
gaccagaugcgagacaugu

SEQ ID NO: 715629 - RNA, 19 nt, Homo sapiens
  misc_RNA (1)...(19): siRNA sense strand
gcgccuuccugaguucuga

SEQ ID NO: 715630 - RNA, 19 nt, Homo sapiens
  misc_RNA (1)...(19): siRNA sense strand
cagacacucucuucaccau

SEQ ID NO: 715631 - RNA, 19 nt, Homo sapiens
  misc_RNA (1)...(19): siRNA sense strand
gaacccguacgcugcacaa

SEQ ID NO: 715632 - RNA, 19 nt, Homo sapiens
  misc_RNA (1)...(19): siRNA sense strand
guacgcugcacaacuggaa

SEQ ID NO: 715633 - RNA, 19 nt, Homo sapiens
  misc_RNA (1)...(19): siRNA sense strand
ugguauauccaguauguga

SEQ ID NO: 715634 - RNA, 19 nt, Homo sapiens
  misc_RNA (1)...(19): siRNA sense strand
gaauuucaaaggccucaag

SEQ ID NO: 715635 - RNA, 19 nt, Homo sapiens
  misc_RNA (1)...(19): siRNA sense strand
ccacacgggcagucacaga

SEQ ID NO: 715636 - RNA, 19 nt, Homo sapiens
  misc_RNA (1)...(19): siRNA sense strand
ccucauccggccucuguuu

SEQ ID NO: 715637 - RNA, 19 nt, Homo sapiens
  misc_RNA (1)...(19): siRNA sense strand
cgagacauguuugaugacu

SEQ ID NO: 715638 - RNA, 19 nt, Homo sapiens
  misc_RNA (1)...(19): siRNA sense strand
gcagcugcgggaugagauu

SEQ ID NO: 715639 - RNA, 19 nt, Homo sapiens
  misc_RNA (1)...(19): siRNA sense strand
gaguucugauuuccuccuu

SEQ ID NO: 715640 - RNA, 19 nt, Homo sapiens
  misc_RNA (1)...(19): siRNA sense strand
caucucagacacucucuuc

SEQ ID NO: 715641 - RNA, 19 nt, Homo sapiens
  misc_RNA (1)...(19): siRNA sense strand
ccccaccucugcugcauua

SEQ ID NO: 715642 - RNA, 19 nt, Homo sapiens
  misc_RNA (1)...(19): siRNA sense strand
gguauauccaguaugugaa

SEQ ID NO: 715643 - RNA, 19 nt, Homo sapiens
  misc_RNA (1)...(19): siRNA sense strand
cccguacgcugcacaacug

SEQ ID NO: 715644 - RNA, 19 nt, Homo sapiens
  misc_RNA (1)...(19): siRNA sense strand
agccaagccuggaugacuu

SEQ ID NO: 715645 - RNA, 19 nt, Homo sapiens
  misc_RNA (1)...(19): siRNA sense strand
uaugugaagcggaggaaga

SEQ ID NO: 715646 - RNA, 19 nt, Homo sapiens
  misc_RNA (1)...(19): siRNA sense strand
ggccaugacccaccucucu

SEQ ID NO: 715647 - RNA, 19 nt, Homo sapiens
  misc_RNA (1)...(19): siRNA sense strand
uggcaccacccacugcuuu

SEQ ID NO: 715648 - RNA, 19 nt, Homo sapiens
  misc_RNA (1)...(19): siRNA sense strand
gcaaugcugacaugaucca

SEQ ID NO: 715649 - RNA, 19 nt, Homo sapiens
  misc_RNA (1)...(19): siRNA sense strand
ccagcgccuuccugaguuc

SEQ ID NO: 715650 - RNA, 19 nt, Homo sapiens
  misc_RNA (1)...(19): siRNA sense strand
gcuugagccuggccuacag

SEQ ID NO: 715651 - RNA, 19 nt, Homo sapiens
  misc_RNA (1)...(19): siRNA sense strand
aagcuggugucucccaagu

SEQ ID NO: 715652 - RNA, 19 nt, Homo sapiens
  misc_RNA (1)...(19): siRNA sense strand
caacaaccccugccucaca

SEQ ID NO: 715653 - RNA, 19 nt, Homo sapiens
  misc_RNA (1)...(19): siRNA sense strand
ccacagcggucacuucaug

SEQ ID NO: 715654 - RNA, 19 nt, Homo sapiens
  misc_RNA (1)...(19): siRNA sense strand
gacacucucuucaccauga

SEQ ID NO: 715655 - RNA, 19 nt, Homo sapiens
  misc_RNA (1)...(19): siRNA sense strand
gcccaugccuucaaacuuc

SEQ ID NO: 715656 - RNA, 19 nt, Homo sapiens
  misc_RNA (1)...(19): siRNA sense strand
acaagaagcggcuccguaa

SEQ ID NO: 715657 - RNA, 19 nt, Homo sapiens
  misc_RNA (1)...(19): siRNA sense strand
gacaagauccgccugaaca

SEQ ID NO: 715658 - RNA, 19 nt, Homo sapiens
  misc_RNA (1)...(19): siRNA sense strand
ucucuucucucccagguuu

SEQ ID NO: 715659 - RNA, 19 nt, Homo sapiens
  misc_RNA (1)...(19): siRNA sense strand
gagacauguuugaugacua

SEQ ID NO: 715660 - RNA, 19 nt, Homo sapiens
  misc_RNA (1)...(19): siRNA sense strand
gagacaagauccgccugaa

SEQ ID NO: 715661 - RNA, 19 nt, Homo sapiens
  misc_RNA (1)...(19): siRNA sense strand
acaaguggcgcaucuacua

SEQ ID NO: 715662 - RNA, 19 nt, Homo sapiens
  misc_RNA (1)...(19): siRNA sense strand
gggcacaucuaccaguauc

SEQ ID NO: 715663 - RNA, 19 nt, Homo sapiens
  misc_RNA (1)...(19): siRNA sense strand
cggcaaugcugacaugauc

SEQ ID NO: 715664 - RNA, 19 nt, Homo sapiens
  misc_RNA (1)...(19): siRNA sense strand
ucucagauuucuuuaccaa

SEQ ID NO: 715665 - RNA, 19 nt, Homo sapiens
  misc_RNA (1)...(19): siRNA sense strand
ugcgagacauguuugauga

SEQ ID NO: 715666 - RNA, 19 nt, Homo sapiens
  misc_RNA (1)...(19): siRNA sense strand
ccagaugcgagacauguuu

SEQ ID NO: 715667 - RNA, 19 nt, Homo sapiens
  misc_RNA (1)...(19): siRNA sense strand
ucagauuucuuuaccaacu

SEQ ID NO: 715668 - RNA, 19 nt, Homo sapiens
  misc_RNA (1)...(19): siRNA sense strand
agacauguuugaugacuac

SEQ ID NO: 715669 - RNA, 19 nt, Homo sapiens
  misc_RNA (1)...(19): siRNA sense strand
ccaaguggaagaauuucaa

SEQ ID NO: 715670 - RNA, 19 nt, Homo sapiens
  misc_RNA (1)...(19): siRNA sense strand
caaguggaagaauuucaaa

SEQ ID NO: 715671 - RNA, 19 nt, Homo sapiens
  misc_RNA (1)...(19): siRNA sense strand
gugguugacucccucuuca

SEQ ID NO: 715672 - RNA, 19 nt, Homo sapiens
  misc_RNA (1)...(19): siRNA sense strand
uggcgcaucuacuacaaga

SEQ ID NO: 715673 - RNA, 19 nt, Homo sapiens
  misc_RNA (1)...(19): siRNA sense strand
gcgcaucuacuacaagaag

SEQ ID NO: 715674 - RNA, 19 nt, Homo sapiens
  misc_RNA (1)...(19): siRNA sense strand
cgucggcaaugcugacaug

SEQ ID NO: 715675 - RNA, 19 nt, Homo sapiens
  misc_RNA (1)...(19): siRNA sense strand
ggccaacuguccugaacuc

SEQ ID NO: 715676 - RNA, 19 nt, Homo sapiens
  misc_RNA (1)...(19): siRNA sense strand
ucucccaaguggaagaauu

SEQ ID NO: 715677 - RNA, 19 nt, Homo sapiens
  misc_RNA (1)...(19): siRNA sense strand
gaccagaugcgagacaugu

SEQ ID NO: 715678 - RNA, 19 nt, Homo sapiens
  misc_RNA (1)...(19): siRNA sense strand
gcgccuuccugaguucuga

SEQ ID NO: 715679 - RNA, 19 nt, Homo sapiens
  misc_RNA (1)...(19): siRNA sense strand
cagacacucucuucaccau

SEQ ID NO: 715680 - RNA, 19 nt, Homo sapiens
  misc_RNA (1)...(19): siRNA sense strand
gaacccguacgcugcacaa

SEQ ID NO: 715681 - RNA, 19 nt, Homo sapiens
  misc_RNA (1)...(19): siRNA sense strand
guacgcugcacaacuggaa

SEQ ID NO: 715682 - RNA, 19 nt, Homo sapiens
  misc_RNA (1)...(19): siRNA sense strand
ugguauauccaguauguga

SEQ ID NO: 715683 - RNA, 19 nt, Homo sapiens
  misc_RNA (1)...(19): siRNA sense strand
gaauuucaaaggccucaag

SEQ ID NO: 715684 - RNA, 19 nt, Homo sapiens
  misc_RNA (1)...(19): siRNA sense strand
ccacacgggcagucacaga

SEQ ID NO: 715685 - RNA, 19 nt, Homo sapiens
  misc_RNA (1)...(19): siRNA sense strand
ccucauccggccucuguuu

SEQ ID NO: 715686 - RNA, 19 nt, Homo sapiens
  misc_RNA (1)...(19): siRNA sense strand
cgagacauguuugaugacu

SEQ ID NO: 715687 - RNA, 19 nt, Homo sapiens
  misc_RNA (1)...(19): siRNA sense strand
gcagcugcgggaugagauu

SEQ ID NO: 715688 - RNA, 19 nt, Homo sapiens
  misc_RNA (1)...(19): siRNA sense strand
gaguucugauuuccuccuu

SEQ ID NO: 715689 - RNA, 19 nt, Homo sapiens
  misc_RNA (1)...(19): siRNA sense strand
caucucagacacucucuuc

SEQ ID NO: 715690 - RNA, 19 nt, Homo sapiens
  misc_RNA (1)...(19): siRNA sense strand
ccccaccucugcugcauua

SEQ ID NO: 715691 - RNA, 19 nt, Homo sapiens
  misc_RNA (1)...(19): siRNA sense strand
gguauauccaguaugugaa

SEQ ID NO: 715692 - RNA, 19 nt, Homo sapiens
  misc_RNA (1)...(19): siRNA sense strand
cccguacgcugcacaacug

SEQ ID NO: 715693 - RNA, 19 nt, Homo sapiens
  misc_RNA (1)...(19): siRNA sense strand
agccaagccuggaugacuu

SEQ ID NO: 715694 - RNA, 19 nt, Homo sapiens
  misc_RNA (1)...(19): siRNA sense strand
uaugugaagcggaggaaga

SEQ ID NO: 715695 - RNA, 19 nt, Homo sapiens
  misc_RNA (1)...(19): siRNA sense strand
ggccaugacccaccucucu

SEQ ID NO: 715696 - RNA, 19 nt, Homo sapiens
  misc_RNA (1)...(19): siRNA sense strand
uggcaccacccacugcuuu

SEQ ID NO: 715697 - RNA, 19 nt, Homo sapiens
  misc_RNA (1)...(19): siRNA sense strand
gcaaugcugacaugaucca

SEQ ID NO: 715698 - RNA, 19 nt, Homo sapiens
  misc_RNA (1)...(19): siRNA sense strand
ccagcgccuuccugaguuc

SEQ ID NO: 715699 - RNA, 19 nt, Homo sapiens
  misc_RNA (1)...(19): siRNA sense strand
gcuugagccuggccuacag

SEQ ID NO: 715700 - RNA, 19 nt, Homo sapiens
  misc_RNA (1)...(19): siRNA sense strand
aagcuggugucucccaagu

SEQ ID NO: 715701 - RNA, 19 nt, Homo sapiens
  misc_RNA (1)...(19): siRNA sense strand
caacaaccccugccucaca

SEQ ID NO: 715702 - RNA, 19 nt, Homo sapiens
  misc_RNA (1)...(19): siRNA sense strand
ccacagcggucacuucaug

SEQ ID NO: 715703 - RNA, 19 nt, Homo sapiens
  misc_RNA (1)...(19): siRNA sense strand
gacacucucuucaccauga

SEQ ID NO: 715704 - RNA, 19 nt, Homo sapiens
  misc_RNA (1)...(19): siRNA sense strand
gcccaugccuucaaacuuc

SEQ ID NO: 715705 - RNA, 19 nt, Homo sapiens
  misc_RNA (1)...(19): siRNA sense strand
acaagaagcggcuccguaa

SEQ ID NO: 715706 - RNA, 19 nt, Homo sapiens
  misc_RNA (1)...(19): siRNA sense strand
gacaagauccgccugaaca

SEQ ID NO: 715707 - RNA, 19 nt, Homo sapiens
  misc_RNA (1)...(19): siRNA sense strand
ucucuucucucccagguuu

SEQ ID NO: 715708 - RNA, 19 nt, Homo sapiens
  misc_RNA (1)...(19): siRNA sense strand
gagacaagauccgccugaa

SEQ ID NO: 715709 - RNA, 19 nt, Homo sapiens
  misc_RNA (1)...(19): siRNA sense strand
acaaguggcgcaucuacua

SEQ ID NO: 715710 - RNA, 19 nt, Homo sapiens
  misc_RNA (1)...(19): siRNA sense strand
cggcaaugcugacaugauc

SEQ ID NO: 715711 - RNA, 19 nt, Homo sapiens
  misc_RNA (1)...(19): siRNA sense strand
ucucagauuucuuuaccaa

SEQ ID NO: 715712 - RNA, 19 nt, Homo sapiens
  misc_RNA (1)...(19): siRNA sense strand
ucagauuucuuuaccaacu

SEQ ID NO: 715713 - RNA, 19 nt, Homo sapiens
  misc_RNA (1)...(19): siRNA sense strand
ccaaguggaagaauuucaa

SEQ ID NO: 715714 - RNA, 19 nt, Homo sapiens
  misc_RNA (1)...(19): siRNA sense strand
caaguggaagaauuucaaa

SEQ ID NO: 715715 - RNA, 19 nt, Homo sapiens
  misc_RNA (1)...(19): siRNA sense strand
gugguugacucccucuuca

SEQ ID NO: 715716 - RNA, 19 nt, Homo sapiens
  misc_RNA (1)...(19): siRNA sense strand
uggcgcaucuacuacaaga

SEQ ID NO: 715717 - RNA, 19 nt, Homo sapiens
  misc_RNA (1)...(19): siRNA sense strand
gcgcaucuacuacaagaag

SEQ ID NO: 715718 - RNA, 19 nt, Homo sapiens
  misc_RNA (1)...(19): siRNA sense strand
cgucggcaaugcugacaug

SEQ ID NO: 715719 - RNA, 19 nt, Homo sapiens
  misc_RNA (1)...(19): siRNA sense strand
ucucccaaguggaagaauu

SEQ ID NO: 715720 - RNA, 19 nt, Homo sapiens
  misc_RNA (1)...(19): siRNA sense strand
gcgccuuccugaguucuga

SEQ ID NO: 715721 - RNA, 19 nt, Homo sapiens
  misc_RNA (1)...(19): siRNA sense strand
cagacacucucuucaccau

SEQ ID NO: 715722 - RNA, 19 nt, Homo sapiens
  misc_RNA (1)...(19): siRNA sense strand
ugguauauccaguauguga

SEQ ID NO: 715723 - RNA, 19 nt, Homo sapiens
  misc_RNA (1)...(19): siRNA sense strand
gaauuucaaaggccucaag

SEQ ID NO: 715724 - RNA, 19 nt, Homo sapiens
  misc_RNA (1)...(19): siRNA sense strand
gaguucugauuuccuccuu

SEQ ID NO: 715725 - RNA, 19 nt, Homo sapiens
  misc_RNA (1)...(19): siRNA sense strand
caucucagacacucucuuc

SEQ ID NO: 715726 - RNA, 19 nt, Homo sapiens
  misc_RNA (1)...(19): siRNA sense strand
ccccaccucugcugcauua

SEQ ID NO: 715727 - RNA, 19 nt, Homo sapiens
  misc_RNA (1)...(19): siRNA sense strand
gguauauccaguaugugaa

SEQ ID NO: 715728 - RNA, 19 nt, Homo sapiens
  misc_RNA (1)...(19): siRNA sense strand
agccaagccuggaugacuu

SEQ ID NO: 715729 - RNA, 19 nt, Homo sapiens
  misc_RNA (1)...(19): siRNA sense strand
uaugugaagcggaggaaga

SEQ ID NO: 715730 - RNA, 19 nt, Homo sapiens
  misc_RNA (1)...(19): siRNA sense strand
ggccaugacccaccucucu

SEQ ID NO: 715731 - RNA, 19 nt, Homo sapiens
  misc_RNA (1)...(19): siRNA sense strand
uggcaccacccacugcuuu

SEQ ID NO: 715732 - RNA, 19 nt, Homo sapiens
  misc_RNA (1)...(19): siRNA sense strand
gcaaugcugacaugaucca

SEQ ID NO: 715733 - RNA, 19 nt, Homo sapiens
  misc_RNA (1)...(19): siRNA sense strand
aagcuggugucucccaagu

SEQ ID NO: 715734 - RNA, 19 nt, Homo sapiens
  misc_RNA (1)...(19): siRNA sense strand
caacaaccccugccucaca

SEQ ID NO: 715735 - RNA, 19 nt, Homo sapiens
  misc_RNA (1)...(19): siRNA sense strand
ccagcgccuuccugaguuc

SEQ ID NO: 715736 - RNA, 19 nt, Homo sapiens
  misc_RNA (1)...(19): siRNA sense strand
gcuugagccuggccuacag

SEQ ID NO: 715737 - RNA, 19 nt, Homo sapiens
  misc_RNA (1)...(19): siRNA sense strand
ccacagcggucacuucaug

SEQ ID NO: 715738 - RNA, 19 nt, Homo sapiens
  misc_RNA (1)...(19): siRNA sense strand
gacacucucuucaccauga

SEQ ID NO: 715739 - RNA, 19 nt, Homo sapiens
  misc_RNA (1)...(19): siRNA sense strand
gcccaugccuucaaacuuc

SEQ ID NO: 715740 - RNA, 19 nt, Homo sapiens
  misc_RNA (1)...(19): siRNA sense strand
acaagaagcggcuccguaa

SEQ ID NO: 715741 - RNA, 19 nt, Homo sapiens
  misc_RNA (1)...(19): siRNA sense strand
gacaagauccgccugaaca

SEQ ID NO: 715742 - RNA, 19 nt, Homo sapiens
  misc_RNA (1)...(19): siRNA sense strand
ucucuucucucccagguuu

SEQ ID NO: 715743 - RNA, 19 nt, Homo sapiens
  misc_RNA (1)...(19): siRNA sense strand
gagacauguuugaugacua

SEQ ID NO: 715744 - RNA, 19 nt, Homo sapiens
  misc_RNA (1)...(19): siRNA sense strand
gagacaagauccgccugaa

SEQ ID NO: 715745 - RNA, 19 nt, Homo sapiens
  misc_RNA (1)...(19): siRNA sense strand
acaaguggcgcaucuacua

SEQ ID NO: 715746 - RNA, 19 nt, Homo sapiens
  misc_RNA (1)...(19): siRNA sense strand
gggcacaucuaccaguauc

SEQ ID NO: 715747 - RNA, 19 nt, Homo sapiens
  misc_RNA (1)...(19): siRNA sense strand
cggcaaugcugacaugauc

SEQ ID NO: 715748 - RNA, 19 nt, Homo sapiens
  misc_RNA (1)...(19): siRNA sense strand
ucucagauuucuuuaccaa

SEQ ID NO: 715749 - RNA, 19 nt, Homo sapiens
  misc_RNA (1)...(19): siRNA sense strand
ugcgagacauguuugauga

SEQ ID NO: 715750 - RNA, 19 nt, Homo sapiens
  misc_RNA (1)...(19): siRNA sense strand
ccagaugcgagacauguuu

SEQ ID NO: 715751 - RNA, 19 nt, Homo sapiens
  misc_RNA (1)...(19): siRNA sense strand
ucagauuucuuuaccaacu

SEQ ID NO: 715752 - RNA, 19 nt, Homo sapiens
  misc_RNA (1)...(19): siRNA sense strand
agacauguuugaugacuac

SEQ ID NO: 715753 - RNA, 19 nt, Homo sapiens
  misc_RNA (1)...(19): siRNA sense strand
ccaaguggaagaauuucaa

SEQ ID NO: 715754 - RNA, 19 nt, Homo sapiens
  misc_RNA (1)...(19): siRNA sense strand
caaguggaagaauuucaaa

SEQ ID NO: 715755 - RNA, 19 nt, Homo sapiens
  misc_RNA (1)...(19): siRNA sense strand
gugguugacucccucuuca

SEQ ID NO: 715756 - RNA, 19 nt, Homo sapiens
  misc_RNA (1)...(19): siRNA sense strand
uggcgcaucuacuacaaga

SEQ ID NO: 715757 - RNA, 19 nt, Homo sapiens
  misc_RNA (1)...(19): siRNA sense strand
gcgcaucuacuacaagaag

SEQ ID NO: 715758 - RNA, 19 nt, Homo sapiens
  misc_RNA (1)...(19): siRNA sense strand
cgucggcaaugcugacaug

SEQ ID NO: 715759 - RNA, 19 nt, Homo sapiens
  misc_RNA (1)...(19): siRNA sense strand
ggccaacuguccugaacuc

SEQ ID NO: 715760 - RNA, 19 nt, Homo sapiens
  misc_RNA (1)...(19): siRNA sense strand
ucucccaaguggaagaauu

SEQ ID NO: 715761 - RNA, 19 nt, Homo sapiens
  misc_RNA (1)...(19): siRNA sense strand
gaccagaugcgagacaugu

SEQ ID NO: 715762 - RNA, 19 nt, Homo sapiens
  misc_RNA (1)...(19): siRNA sense strand
gcgccuuccugaguucuga

SEQ ID NO: 715763 - RNA, 19 nt, Homo sapiens
  misc_RNA (1)...(19): siRNA sense strand
cagacacucucuucaccau

SEQ ID NO: 715764 - RNA, 19 nt, Homo sapiens
  misc_RNA (1)...(19): siRNA sense strand
gaacccguacgcugcacaa

SEQ ID NO: 715765 - RNA, 19 nt, Homo sapiens
  misc_RNA (1)...(19): siRNA sense strand
guacgcugcacaacuggaa

SEQ ID NO: 715766 - RNA, 19 nt, Homo sapiens
  misc_RNA (1)...(19): siRNA sense strand
ugguauauccaguauguga

SEQ ID NO: 715767 - RNA, 19 nt, Homo sapiens
  misc_RNA (1)...(19): siRNA sense strand
gaauuucaaaggccucaag

SEQ ID NO: 715768 - RNA, 19 nt, Homo sapiens
  misc_RNA (1)...(19): siRNA sense strand
ccacacgggcagucacaga

SEQ ID NO: 715769 - RNA, 19 nt, Homo sapiens
  misc_RNA (1)...(19): siRNA sense strand
ccucauccggccucuguuu

SEQ ID NO: 715770 - RNA, 19 nt, Homo sapiens
  misc_RNA (1)...(19): siRNA sense strand
cgagacauguuugaugacu

SEQ ID NO: 715771 - RNA, 19 nt, Homo sapiens
  misc_RNA (1)...(19): siRNA sense strand
gcagcugcgggaugagauu

SEQ ID NO: 715772 - RNA, 19 nt, Homo sapiens
  misc_RNA (1)...(19): siRNA sense strand
gaguucugauuuccuccuu

SEQ ID NO: 715773 - RNA, 19 nt, Homo sapiens
  misc_RNA (1)...(19): siRNA sense strand
caucucagacacucucuuc

SEQ ID NO: 715774 - RNA, 19 nt, Homo sapiens
  misc_RNA (1)...(19): siRNA sense strand
ccccaccucugcugcauua

SEQ ID NO: 715775 - RNA, 19 nt, Homo sapiens
  misc_RNA (1)...(19): siRNA sense strand
gguauauccaguaugugaa

SEQ ID NO: 715776 - RNA, 19 nt, Homo sapiens
  misc_RNA (1)...(19): siRNA sense strand
cccguacgcugcacaacug

SEQ ID NO: 715777 - RNA, 19 nt, Homo sapiens
  misc_RNA (1)...(19): siRNA sense strand
agccaagccuggaugacuu

SEQ ID NO: 715778 - RNA, 19 nt, Homo sapiens
  misc_RNA (1)...(19): siRNA sense strand
uaugugaagcggaggaaga

SEQ ID NO: 715779 - RNA, 19 nt, Homo sapiens
  misc_RNA (1)...(19): siRNA sense strand
ggccaugacccaccucucu

SEQ ID NO: 715780 - RNA, 19 nt, Homo sapiens
  misc_RNA (1)...(19): siRNA sense strand
uggcaccacccacugcuuu

SEQ ID NO: 715781 - RNA, 19 nt, Homo sapiens
  misc_RNA (1)...(19): siRNA sense strand
gcaaugcugacaugaucca

SEQ ID NO: 715782 - RNA, 19 nt, Homo sapiens
  misc_RNA (1)...(19): siRNA sense strand
ccagcgccuuccugaguuc

SEQ ID NO: 715783 - RNA, 19 nt, Homo sapiens
  misc_RNA (1)...(19): siRNA sense strand
gcuugagccuggccuacag

SEQ ID NO: 715784 - RNA, 19 nt, Homo sapiens
  misc_RNA (1)...(19): siRNA sense strand
aagcuggugucucccaagu

SEQ ID NO: 715785 - RNA, 19 nt, Homo sapiens
  misc_RNA (1)...(19): siRNA sense strand
caacaaccccugccucaca

SEQ ID NO: 715786 - RNA, 19 nt, Homo sapiens
  misc_RNA (1)...(19): siRNA sense strand
ccacagcggucacuucaug

SEQ ID NO: 715787 - RNA, 19 nt, Homo sapiens
  misc_RNA (1)...(19): siRNA sense strand
gacacucucuucaccauga

SEQ ID NO: 715788 - RNA, 19 nt, Homo sapiens
  misc_RNA (1)...(19): siRNA sense strand
gcccaugccuucaaacuuc

SEQ ID NO: 715789 - RNA, 19 nt, Homo sapiens
  misc_RNA (1)...(19): siRNA sense strand
acaagaagcggcuccguaa

SEQ ID NO: 715790 - RNA, 19 nt, Homo sapiens
  misc_RNA (1)...(19): siRNA sense strand
gacaagauccgccugaaca

SEQ ID NO: 715791 - RNA, 19 nt, Homo sapiens
  misc_RNA (1)...(19): siRNA sense strand
ucucuucucucccagguuu

SEQ ID NO: 715792 - RNA, 19 nt, Homo sapiens
  misc_RNA (1)...(19): siRNA sense strand
gagacauguuugaugacua

SEQ ID NO: 715793 - RNA, 19 nt, Homo sapiens
  misc_RNA (1)...(19): siRNA sense strand
gagacaagauccgccugaa

SEQ ID NO: 715794 - RNA, 19 nt, Homo sapiens
  misc_RNA (1)...(19): siRNA sense strand
acaaguggcgcaucuacua

SEQ ID NO: 715795 - RNA, 19 nt, Homo sapiens
  misc_RNA (1)...(19): siRNA sense strand
gggcacaucuaccaguauc

SEQ ID NO: 715796 - RNA, 19 nt, Homo sapiens
  misc_RNA (1)...(19): siRNA sense strand
cggcaaugcugacaugauc

SEQ ID NO: 715797 - RNA, 19 nt, Homo sapiens
  misc_RNA (1)...(19): siRNA sense strand
ucucagauuucuuuaccaa

SEQ ID NO: 715798 - RNA, 19 nt, Homo sapiens
  misc_RNA (1)...(19): siRNA sense strand
ugcgagacauguuugauga

SEQ ID NO: 715799 - RNA, 19 nt, Homo sapiens
  misc_RNA (1)...(19): siRNA sense strand
ccagaugcgagacauguuu

SEQ ID NO: 715800 - RNA, 19 nt, Homo sapiens
  misc_RNA (1)...(19): siRNA sense strand
ucagauuucuuuaccaacu

SEQ ID NO: 715801 - RNA, 19 nt, Homo sapiens
  misc_RNA (1)...(19): siRNA sense strand
agacauguuugaugacuac

SEQ ID NO: 715802 - RNA, 19 nt, Homo sapiens
  misc_RNA (1)...(19): siRNA sense strand
ccaaguggaagaauuucaa

SEQ ID NO: 715803 - RNA, 19 nt, Homo sapiens
  misc_RNA (1)...(19): siRNA sense strand
caaguggaagaauuucaaa

SEQ ID NO: 715804 - RNA, 19 nt, Homo sapiens
  misc_RNA (1)...(19): siRNA sense strand
gugguugacucccucuuca

SEQ ID NO: 715805 - RNA, 19 nt, Homo sapiens
  misc_RNA (1)...(19): siRNA sense strand
uggcgcaucuacuacaaga

SEQ ID NO: 715806 - RNA, 19 nt, Homo sapiens
  misc_RNA (1)...(19): siRNA sense strand
gcgcaucuacuacaagaag

SEQ ID NO: 715807 - RNA, 19 nt, Homo sapiens
  misc_RNA (1)...(19): siRNA sense strand
cgucggcaaugcugacaug

SEQ ID NO: 715808 - RNA, 19 nt, Homo sapiens
  misc_RNA (1)...(19): siRNA sense strand
ggccaacuguccugaacuc

SEQ ID NO: 715809 - RNA, 19 nt, Homo sapiens
  misc_RNA (1)...(19): siRNA sense strand
ucucccaaguggaagaauu

SEQ ID NO: 715810 - RNA, 19 nt, Homo sapiens
  misc_RNA (1)...(19): siRNA sense strand
gaccagaugcgagacaugu

SEQ ID NO: 715811 - RNA, 19 nt, Homo sapiens
  misc_RNA (1)...(19): siRNA sense strand
gcgccuuccugaguucuga

SEQ ID NO: 715812 - RNA, 19 nt, Homo sapiens
  misc_RNA (1)...(19): siRNA sense strand
cagacacucucuucaccau

SEQ ID NO: 715813 - RNA, 19 nt, Homo sapiens
  misc_RNA (1)...(19): siRNA sense strand
gaacccguacgcugcacaa

SEQ ID NO: 715814 - RNA, 19 nt, Homo sapiens
  misc_RNA (1)...(19): siRNA sense strand
guacgcugcacaacuggaa

SEQ ID NO: 715815 - RNA, 19 nt, Homo sapiens
  misc_RNA (1)...(19): siRNA sense strand
ugguauauccaguauguga

SEQ ID NO: 715816 - RNA, 19 nt, Homo sapiens
  misc_RNA (1)...(19): siRNA sense strand
gaauuucaaaggccucaag

SEQ ID NO: 715817 - RNA, 19 nt, Homo sapiens
  misc_RNA (1)...(19): siRNA sense strand
ccacacgggcagucacaga

SEQ ID NO: 715818 - RNA, 19 nt, Homo sapiens
  misc_RNA (1)...(19): siRNA sense strand
ccucauccggccucuguuu

SEQ ID NO: 715819 - RNA, 19 nt, Homo sapiens
  misc_RNA (1)...(19): siRNA sense strand
cgagacauguuugaugacu

SEQ ID NO: 715820 - RNA, 19 nt, Homo sapiens
  misc_RNA (1)...(19): siRNA sense strand
gcagcugcgggaugagauu

SEQ ID NO: 715821 - RNA, 19 nt, Homo sapiens
  misc_RNA (1)...(19): siRNA sense strand
gaguucugauuuccuccuu

SEQ ID NO: 715822 - RNA, 19 nt, Homo sapiens
  misc_RNA (1)...(19): siRNA sense strand
caucucagacacucucuuc

SEQ ID NO: 715823 - RNA, 19 nt, Homo sapiens
  misc_RNA (1)...(19): siRNA sense strand
ccccaccucugcugcauua

SEQ ID NO: 715824 - RNA, 19 nt, Homo sapiens
  misc_RNA (1)...(19): siRNA sense strand
gguauauccaguaugugaa

SEQ ID NO: 715825 - RNA, 19 nt, Homo sapiens
  misc_RNA (1)...(19): siRNA sense strand
cccguacgcugcacaacug

SEQ ID NO: 715826 - RNA, 19 nt, Homo sapiens
  misc_RNA (1)...(19): siRNA sense strand
agccaagccuggaugacuu

SEQ ID NO: 715827 - RNA, 19 nt, Homo sapiens
  misc_RNA (1)...(19): siRNA sense strand
uaugugaagcggaggaaga

SEQ ID NO: 715828 - RNA, 19 nt, Homo sapiens
  misc_RNA (1)...(19): siRNA sense strand
ggccaugacccaccucucu

SEQ ID NO: 715829 - RNA, 19 nt, Homo sapiens
  misc_RNA (1)...(19): siRNA sense strand
uggcaccacccacugcuuu

SEQ ID NO: 715830 - RNA, 19 nt, Homo sapiens
  misc_RNA (1)...(19): siRNA sense strand
gcaaugcugacaugaucca

SEQ ID NO: 715831 - RNA, 19 nt, Homo sapiens
  misc_RNA (1)...(19): siRNA sense strand
ccagcgccuuccugaguuc

SEQ ID NO: 715832 - RNA, 19 nt, Homo sapiens
  misc_RNA (1)...(19): siRNA sense strand
gcuugagccuggccuacag

SEQ ID NO: 715833 - RNA, 19 nt, Homo sapiens
  misc_RNA (1)...(19): siRNA sense strand
aagcuggugucucccaagu

SEQ ID NO: 715834 - RNA, 19 nt, Homo sapiens
  misc_RNA (1)...(19): siRNA sense strand
caacaaccccugccucaca

SEQ ID NO: 715835 - RNA, 19 nt, Homo sapiens
  misc_RNA (1)...(19): siRNA sense strand
ccacagcggucacuucaug

SEQ ID NO: 715836 - RNA, 19 nt, Homo sapiens
  misc_RNA (1)...(19): siRNA sense strand
gacacucucuucaccauga

SEQ ID NO: 715837 - RNA, 19 nt, Homo sapiens
  misc_RNA (1)...(19): siRNA sense strand
gcccaugccuucaaacuuc

SEQ ID NO: 715838 - RNA, 19 nt, Homo sapiens
  misc_RNA (1)...(19): siRNA sense strand
acaagaagcggcuccguaa

SEQ ID NO: 715839 - RNA, 19 nt, Homo sapiens
  misc_RNA (1)...(19): siRNA sense strand
gacaagauccgccugaaca

SEQ ID NO: 715840 - RNA, 19 nt, Homo sapiens
  misc_RNA (1)...(19): siRNA sense strand
ucucuucucucccagguuu

SEQ ID NO: 715841 - RNA, 19 nt, Homo sapiens
  misc_RNA (1)...(19): siRNA sense strand
gagacauguuugaugacua

SEQ ID NO: 715842 - RNA, 19 nt, Homo sapiens
  misc_RNA (1)...(19): siRNA sense strand
gagacaagauccgccugaa

SEQ ID NO: 715843 - RNA, 19 nt, Homo sapiens
  misc_RNA (1)...(19): siRNA sense strand
acaaguggcgcaucuacua

SEQ ID NO: 715844 - RNA, 19 nt, Homo sapiens
  misc_RNA (1)...(19): siRNA sense strand
gggcacaucuaccaguauc

SEQ ID NO: 715845 - RNA, 19 nt, Homo sapiens
  misc_RNA (1)...(19): siRNA sense strand
cggcaaugcugacaugauc

SEQ ID NO: 715846 - RNA, 19 nt, Homo sapiens
  misc_RNA (1)...(19): siRNA sense strand
ucucagauuucuuuaccaa

SEQ ID NO: 715847 - RNA, 19 nt, Homo sapiens
  misc_RNA (1)...(19): siRNA sense strand
ugcgagacauguuugauga

SEQ ID NO: 715848 - RNA, 19 nt, Homo sapiens
  misc_RNA (1)...(19): siRNA sense strand
ccagaugcgagacauguuu

SEQ ID NO: 715849 - RNA, 19 nt, Homo sapiens
  misc_RNA (1)...(19): siRNA sense strand
ucagauuucuuuaccaacu

SEQ ID NO: 715850 - RNA, 19 nt, Homo sapiens
  misc_RNA (1)...(19): siRNA sense strand
agacauguuugaugacuac

SEQ ID NO: 715851 - RNA, 19 nt, Homo sapiens
  misc_RNA (1)...(19): siRNA sense strand
ccaaguggaagaauuucaa

SEQ ID NO: 715852 - RNA, 19 nt, Homo sapiens
  misc_RNA (1)...(19): siRNA sense strand
caaguggaagaauuucaaa

SEQ ID NO: 715853 - RNA, 19 nt, Homo sapiens
  misc_RNA (1)...(19): siRNA sense strand
gugguugacucccucuuca

SEQ ID NO: 715854 - RNA, 19 nt, Homo sapiens
  misc_RNA (1)...(19): siRNA sense strand
uggcgcaucuacuacaaga

SEQ ID NO: 715855 - RNA, 19 nt, Homo sapiens
  misc_RNA (1)...(19): siRNA sense strand
gcgcaucuacuacaagaag

SEQ ID NO: 715856 - RNA, 19 nt, Homo sapiens
  misc_RNA (1)...(19): siRNA sense strand
cgucggcaaugcugacaug

SEQ ID NO: 715857 - RNA, 19 nt, Homo sapiens
  misc_RNA (1)...(19): siRNA sense strand
ggccaacuguccugaacuc

SEQ ID NO: 715858 - RNA, 19 nt, Homo sapiens
  misc_RNA (1)...(19): siRNA sense strand
ucucccaaguggaagaauu

SEQ ID NO: 715859 - RNA, 19 nt, Homo sapiens
  misc_RNA (1)...(19): siRNA sense strand
gaccagaugcgagacaugu

SEQ ID NO: 715860 - RNA, 19 nt, Homo sapiens
  misc_RNA (1)...(19): siRNA sense strand
gcgccuuccugaguucuga

SEQ ID NO: 715861 - RNA, 19 nt, Homo sapiens
  misc_RNA (1)...(19): siRNA sense strand
cagacacucucuucaccau

SEQ ID NO: 715862 - RNA, 19 nt, Homo sapiens
  misc_RNA (1)...(19): siRNA sense strand
gaacccguacgcugcacaa

SEQ ID NO: 715863 - RNA, 19 nt, Homo sapiens
  misc_RNA (1)...(19): siRNA sense strand
guacgcugcacaacuggaa

SEQ ID NO: 715864 - RNA, 19 nt, Homo sapiens
  misc_RNA (1)...(19): siRNA sense strand
ugguauauccaguauguga

SEQ ID NO: 715865 - RNA, 19 nt, Homo sapiens
  misc_RNA (1)...(19): siRNA sense strand
gaauuucaaaggccucaag

SEQ ID NO: 715866 - RNA, 19 nt, Homo sapiens
  misc_RNA (1)...(19): siRNA sense strand
ccacacgggcagucacaga

SEQ ID NO: 715867 - RNA, 19 nt, Homo sapiens
  misc_RNA (1)...(19): siRNA sense strand
ccucauccggccucuguuu

SEQ ID NO: 715868 - RNA, 19 nt, Homo sapiens
  misc_RNA (1)...(19): siRNA sense strand
cgagacauguuugaugacu

SEQ ID NO: 715869 - RNA, 19 nt, Homo sapiens
  misc_RNA (1)...(19): siRNA sense strand
gcagcugcgggaugagauu

SEQ ID NO: 715870 - RNA, 19 nt, Homo sapiens
  misc_RNA (1)...(19): siRNA sense strand
gaguucugauuuccuccuu

SEQ ID NO: 715871 - RNA, 19 nt, Homo sapiens
  misc_RNA (1)...(19): siRNA sense strand
caucucagacacucucuuc

SEQ ID NO: 715872 - RNA, 19 nt, Homo sapiens
  misc_RNA (1)...(19): siRNA sense strand
ccccaccucugcugcauua

SEQ ID NO: 715873 - RNA, 19 nt, Homo sapiens
  misc_RNA (1)...(19): siRNA sense strand
gguauauccaguaugugaa

SEQ ID NO: 715874 - RNA, 19 nt, Homo sapiens
  misc_RNA (1)...(19): siRNA sense strand
cccguacgcugcacaacug

SEQ ID NO: 715875 - RNA, 19 nt, Homo sapiens
  misc_RNA (1)...(19): siRNA sense strand
agccaagccuggaugacuu

SEQ ID NO: 715876 - RNA, 19 nt, Homo sapiens
  misc_RNA (1)...(19): siRNA sense strand
uaugugaagcggaggaaga

SEQ ID NO: 715877 - RNA, 19 nt, Homo sapiens
  misc_RNA (1)...(19): siRNA sense strand
ggccaugacccaccucucu

SEQ ID NO: 715878 - RNA, 19 nt, Homo sapiens
  misc_RNA (1)...(19): siRNA sense strand
uggcaccacccacugcuuu

SEQ ID NO: 715879 - RNA, 19 nt, Homo sapiens
  misc_RNA (1)...(19): siRNA sense strand
gcaaugcugacaugaucca

SEQ ID NO: 715880 - RNA, 19 nt, Homo sapiens
  misc_RNA (1)...(19): siRNA sense strand
ccagcgccuuccugaguuc

SEQ ID NO: 715881 - RNA, 19 nt, Homo sapiens
  misc_RNA (1)...(19): siRNA sense strand
gcuugagccuggccuacag

SEQ ID NO: 715882 - RNA, 19 nt, Homo sapiens
  misc_RNA (1)...(19): siRNA sense strand
aagcuggugucucccaagu

SEQ ID NO: 715883 - RNA, 19 nt, Homo sapiens
  misc_RNA (1)...(19): siRNA sense strand
caacaaccccugccucaca

SEQ ID NO: 715884 - RNA, 19 nt, Homo sapiens
  misc_RNA (1)...(19): siRNA sense strand
ccacagcggucacuucaug

SEQ ID NO: 715885 - RNA, 19 nt, Homo sapiens
  misc_RNA (1)...(19): siRNA sense strand
gacacucucuucaccauga

SEQ ID NO: 715886 - RNA, 19 nt, Homo sapiens
  misc_RNA (1)...(19): siRNA sense strand
gcccaugccuucaaacuuc

SEQ ID NO: 715887 - RNA, 19 nt, Homo sapiens
  misc_RNA (1)...(19): siRNA sense strand
acaagaagcggcuccguaa

SEQ ID NO: 715888 - RNA, 19 nt, Homo sapiens
  misc_RNA (1)...(19): siRNA sense strand
gacaagauccgccugaaca

SEQ ID NO: 715889 - RNA, 19 nt, Homo sapiens
  misc_RNA (1)...(19): siRNA sense strand
ucucuucucucccagguuu

SEQ ID NO: 715890 - RNA, 19 nt, Homo sapiens
  misc_RNA (1)...(19): siRNA sense strand
gagacauguuugaugacua

SEQ ID NO: 715891 - RNA, 19 nt, Homo sapiens
  misc_RNA (1)...(19): siRNA sense strand
gagacaagauccgccugaa

SEQ ID NO: 715892 - RNA, 19 nt, Homo sapiens
  misc_RNA (1)...(19): siRNA sense strand
acaaguggcgcaucuacua

SEQ ID NO: 715893 - RNA, 19 nt, Homo sapiens
  misc_RNA (1)...(19): siRNA sense strand
gggcacaucuaccaguauc

SEQ ID NO: 715894 - RNA, 19 nt, Homo sapiens
  misc_RNA (1)...(19): siRNA sense strand
cggcaaugcugacaugauc

SEQ ID NO: 715895 - RNA, 19 nt, Homo sapiens
  misc_RNA (1)...(19): siRNA sense strand
ucucagauuucuuuaccaa

SEQ ID NO: 715896 - RNA, 19 nt, Homo sapiens
  misc_RNA (1)...(19): siRNA sense strand
ugcgagacauguuugauga

SEQ ID NO: 715897 - RNA, 19 nt, Homo sapiens
  misc_RNA (1)...(19): siRNA sense strand
ccagaugcgagacauguuu

SEQ ID NO: 715898 - RNA, 19 nt, Homo sapiens
  misc_RNA (1)...(19): siRNA sense strand
ucagauuucuuuaccaacu

SEQ ID NO: 715899 - RNA, 19 nt, Homo sapiens
  misc_RNA (1)...(19): siRNA sense strand
agacauguuugaugacuac

SEQ ID NO: 715900 - RNA, 19 nt, Homo sapiens
  misc_RNA (1)...(19): siRNA sense strand
ccaaguggaagaauuucaa

SEQ ID NO: 715901 - RNA, 19 nt, Homo sapiens
  misc_RNA (1)...(19): siRNA sense strand
caaguggaagaauuucaaa

SEQ ID NO: 715902 - RNA, 19 nt, Homo sapiens
  misc_RNA (1)...(19): siRNA sense strand
gugguugacucccucuuca

SEQ ID NO: 715903 - RNA, 19 nt, Homo sapiens
  misc_RNA (1)...(19): siRNA sense strand
uggcgcaucuacuacaaga

SEQ ID NO: 715904 - RNA, 19 nt, Homo sapiens
  misc_RNA (1)...(19): siRNA sense strand
gcgcaucuacuacaagaag

SEQ ID NO: 715905 - RNA, 19 nt, Homo sapiens
  misc_RNA (1)...(19): siRNA sense strand
cgucggcaaugcugacaug

SEQ ID NO: 715906 - RNA, 19 nt, Homo sapiens
  misc_RNA (1)...(19): siRNA sense strand
ggccaacuguccugaacuc

SEQ ID NO: 715907 - RNA, 19 nt, Homo sapiens
  misc_RNA (1)...(19): siRNA sense strand
ucucccaaguggaagaauu

SEQ ID NO: 715908 - RNA, 19 nt, Homo sapiens
  misc_RNA (1)...(19): siRNA sense strand
gaccagaugcgagacaugu

SEQ ID NO: 715909 - RNA, 19 nt, Homo sapiens
  misc_RNA (1)...(19): siRNA sense strand
gcgccuuccugaguucuga

SEQ ID NO: 715910 - RNA, 19 nt, Homo sapiens
  misc_RNA (1)...(19): siRNA sense strand
cagacacucucuucaccau

SEQ ID NO: 715911 - RNA, 19 nt, Homo sapiens
  misc_RNA (1)...(19): siRNA sense strand
gaacccguacgcugcacaa

SEQ ID NO: 715912 - RNA, 19 nt, Homo sapiens
  misc_RNA (1)...(19): siRNA sense strand
guacgcugcacaacuggaa

SEQ ID NO: 715913 - RNA, 19 nt, Homo sapiens
  misc_RNA (1)...(19): siRNA sense strand
ugguauauccaguauguga

SEQ ID NO: 715914 - RNA, 19 nt, Homo sapiens
  misc_RNA (1)...(19): siRNA sense strand
gaauuucaaaggccucaag

SEQ ID NO: 715915 - RNA, 19 nt, Homo sapiens
  misc_RNA (1)...(19): siRNA sense strand
ccacacgggcagucacaga

SEQ ID NO: 715916 - RNA, 19 nt, Homo sapiens
  misc_RNA (1)...(19): siRNA sense strand
ccucauccggccucuguuu

SEQ ID NO: 715917 - RNA, 19 nt, Homo sapiens
  misc_RNA (1)...(19): siRNA sense strand
cgagacauguuugaugacu

SEQ ID NO: 715918 - RNA, 19 nt, Homo sapiens
  misc_RNA (1)...(19): siRNA sense strand
gcagcugcgggaugagauu

SEQ ID NO: 715919 - RNA, 19 nt, Homo sapiens
  misc_RNA (1)...(19): siRNA sense strand
gaguucugauuuccuccuu

SEQ ID NO: 715920 - RNA, 19 nt, Homo sapiens
  misc_RNA (1)...(19): siRNA sense strand
caucucagacacucucuuc

SEQ ID NO: 715921 - RNA, 19 nt, Homo sapiens
  misc_RNA (1)...(19): siRNA sense strand
ccccaccucugcugcauua

SEQ ID NO: 715922 - RNA, 19 nt, Homo sapiens
  misc_RNA (1)...(19): siRNA sense strand
gguauauccaguaugugaa

SEQ ID NO: 715923 - RNA, 19 nt, Homo sapiens
  misc_RNA (1)...(19): siRNA sense strand
cccguacgcugcacaacug

SEQ ID NO: 715924 - RNA, 19 nt, Homo sapiens
  misc_RNA (1)...(19): siRNA sense strand
agccaagccuggaugacuu

SEQ ID NO: 715925 - RNA, 19 nt, Homo sapiens
  misc_RNA (1)...(19): siRNA sense strand
uaugugaagcggaggaaga

SEQ ID NO: 715926 - RNA, 19 nt, Homo sapiens
  misc_RNA (1)...(19): siRNA sense strand
ggccaugacccaccucucu

SEQ ID NO: 715927 - RNA, 19 nt, Homo sapiens
  misc_RNA (1)...(19): siRNA sense strand
uggcaccacccacugcuuu

SEQ ID NO: 715928 - RNA, 19 nt, Homo sapiens
  misc_RNA (1)...(19): siRNA sense strand
gcaaugcugacaugaucca

SEQ ID NO: 715929 - RNA, 19 nt, Homo sapiens
  misc_RNA (1)...(19): siRNA sense strand
ccagcgccuuccugaguuc

SEQ ID NO: 715930 - RNA, 19 nt, Homo sapiens
  misc_RNA (1)...(19): siRNA sense strand
gcuugagccuggccuacag

SEQ ID NO: 715931 - RNA, 19 nt, Homo sapiens
  misc_RNA (1)...(19): siRNA sense strand
aagcuggugucucccaagu

SEQ ID NO: 715932 - RNA, 19 nt, Homo sapiens
  misc_RNA (1)...(19): siRNA sense strand
caacaaccccugccucaca

SEQ ID NO: 715933 - RNA, 19 nt, Homo sapiens
  misc_RNA (1)...(19): siRNA sense strand
ccacagcggucacuucaug

SEQ ID NO: 715934 - RNA, 19 nt, Homo sapiens
  misc_RNA (1)...(19): siRNA sense strand
gacacucucuucaccauga

SEQ ID NO: 715935 - RNA, 19 nt, Homo sapiens
  misc_RNA (1)...(19): siRNA sense strand
gcccaugccuucaaacuuc

SEQ ID NO: 715936 - RNA, 19 nt, Homo sapiens
  misc_RNA (1)...(19): siRNA sense strand
acaagaagcggcuccguaa

SEQ ID NO: 715937 - RNA, 19 nt, Homo sapiens
  misc_RNA (1)...(19): siRNA sense strand
gacaagauccgccugaaca

SEQ ID NO: 715938 - RNA, 19 nt, Homo sapiens
  misc_RNA (1)...(19): siRNA sense strand
ucucuucucucccagguuu

SEQ ID NO: 715939 - RNA, 19 nt, Homo sapiens
  misc_RNA (1)...(19): siRNA sense strand
gagacaagauccgccugaa

SEQ ID NO: 715940 - RNA, 19 nt, Homo sapiens
  misc_RNA (1)...(19): siRNA sense strand
acaaguggcgcaucuacua

SEQ ID NO: 715941 - RNA, 19 nt, Homo sapiens
  misc_RNA (1)...(19): siRNA sense strand
cggcaaugcugacaugauc

SEQ ID NO: 715942 - RNA, 19 nt, Homo sapiens
  misc_RNA (1)...(19): siRNA sense strand
ucucagauuucuuuaccaa

SEQ ID NO: 715943 - RNA, 19 nt, Homo sapiens
  misc_RNA (1)...(19): siRNA sense strand
ucagauuucuuuaccaacu

SEQ ID NO: 715944 - RNA, 19 nt, Homo sapiens
  misc_RNA (1)...(19): siRNA sense strand
ccaaguggaagaauuucaa

SEQ ID NO: 715945 - RNA, 19 nt, Homo sapiens
  misc_RNA (1)...(19): siRNA sense strand
caaguggaagaauuucaaa

SEQ ID NO: 715946 - RNA, 19 nt, Homo sapiens
  misc_RNA (1)...(19): siRNA sense strand
gugguugacucccucuuca

SEQ ID NO: 715947 - RNA, 19 nt, Homo sapiens
  misc_RNA (1)...(19): siRNA sense strand
uggcgcaucuacuacaaga

SEQ ID NO: 715948 - RNA, 19 nt, Homo sapiens
  misc_RNA (1)...(19): siRNA sense strand
gcgcaucuacuacaagaag

SEQ ID NO: 715949 - RNA, 19 nt, Homo sapiens
  misc_RNA (1)...(19): siRNA sense strand
cgucggcaaugcugacaug

SEQ ID NO: 715950 - RNA, 19 nt, Homo sapiens
  misc_RNA (1)...(19): siRNA sense strand
ucucccaaguggaagaauu

SEQ ID NO: 715951 - RNA, 19 nt, Homo sapiens
  misc_RNA (1)...(19): siRNA sense strand
gcgccuuccugaguucuga

SEQ ID NO: 715952 - RNA, 19 nt, Homo sapiens
  misc_RNA (1)...(19): siRNA sense strand
cagacacucucuucaccau

SEQ ID NO: 715953 - RNA, 19 nt, Homo sapiens
  misc_RNA (1)...(19): siRNA sense strand
ugguauauccaguauguga

SEQ ID NO: 715954 - RNA, 19 nt, Homo sapiens
  misc_RNA (1)...(19): siRNA sense strand
gaauuucaaaggccucaag

SEQ ID NO: 715955 - RNA, 19 nt, Homo sapiens
  misc_RNA (1)...(19): siRNA sense strand
gaguucugauuuccuccuu

SEQ ID NO: 715956 - RNA, 19 nt, Homo sapiens
  misc_RNA (1)...(19): siRNA sense strand
caucucagacacucucuuc

SEQ ID NO: 715957 - RNA, 19 nt, Homo sapiens
  misc_RNA (1)...(19): siRNA sense strand
ccccaccucugcugcauua

SEQ ID NO: 715958 - RNA, 19 nt, Homo sapiens
  misc_RNA (1)...(19): siRNA sense strand
gguauauccaguaugugaa

SEQ ID NO: 715959 - RNA, 19 nt, Homo sapiens
  misc_RNA (1)...(19): siRNA sense strand
agccaagccuggaugacuu

SEQ ID NO: 715960 - RNA, 19 nt, Homo sapiens
  misc_RNA (1)...(19): siRNA sense strand
uaugugaagcggaggaaga

SEQ ID NO: 715961 - RNA, 19 nt, Homo sapiens
  misc_RNA (1)...(19): siRNA sense strand
ggccaugacccaccucucu

SEQ ID NO: 715962 - RNA, 19 nt, Homo sapiens
  misc_RNA (1)...(19): siRNA sense strand
uggcaccacccacugcuuu

SEQ ID NO: 715963 - RNA, 19 nt, Homo sapiens
  misc_RNA (1)...(19): siRNA sense strand
gcaaugcugacaugaucca

SEQ ID NO: 715964 - RNA, 19 nt, Homo sapiens
  misc_RNA (1)...(19): siRNA sense strand
aagcuggugucucccaagu

SEQ ID NO: 715965 - RNA, 19 nt, Homo sapiens
  misc_RNA (1)...(19): siRNA sense strand
caacaaccccugccucaca

SEQ ID NO: 715966 - RNA, 19 nt, Homo sapiens
  misc_RNA (1)...(19): siRNA sense strand
ccagcgccuuccugaguuc

SEQ ID NO: 715967 - RNA, 19 nt, Homo sapiens
  misc_RNA (1)...(19): siRNA sense strand
gcuugagccuggccuacag

SEQ ID NO: 715968 - RNA, 19 nt, Homo sapiens
  misc_RNA (1)...(19): siRNA sense strand
ccacagcggucacuucaug

SEQ ID NO: 715969 - RNA, 19 nt, Homo sapiens
  misc_RNA (1)...(19): siRNA sense strand
gacacucucuucaccauga

SEQ ID NO: 715970 - RNA, 19 nt, Homo sapiens
  misc_RNA (1)...(19): siRNA sense strand
gcccaugccuucaaacuuc

SEQ ID NO: 715971 - RNA, 19 nt, Homo sapiens
  misc_RNA (1)...(19): siRNA sense strand
acaagaagcggcuccguaa

SEQ ID NO: 715972 - RNA, 19 nt, Homo sapiens
  misc_RNA (1)...(19): siRNA sense strand
gacaagauccgccugaaca

SEQ ID NO: 715973 - RNA, 19 nt, Homo sapiens
  misc_RNA (1)...(19): siRNA sense strand
ucucuucucucccagguuu

SEQ ID NO: 715974 - RNA, 19 nt, Homo sapiens
  misc_RNA (1)...(19): siRNA sense strand
gagacauguuugaugacua

SEQ ID NO: 715975 - RNA, 19 nt, Homo sapiens
  misc_RNA (1)...(19): siRNA sense strand
gagacaagauccgccugaa

SEQ ID NO: 715976 - RNA, 19 nt, Homo sapiens
  misc_RNA (1)...(19): siRNA sense strand
acaaguggcgcaucuacua

SEQ ID NO: 715977 - RNA, 19 nt, Homo sapiens
  misc_RNA (1)...(19): siRNA sense strand
gggcacaucuaccaguauc

SEQ ID NO: 715978 - RNA, 19 nt, Homo sapiens
  misc_RNA (1)...(19): siRNA sense strand
cggcaaugcugacaugauc

SEQ ID NO: 715979 - RNA, 19 nt, Homo sapiens
  misc_RNA (1)...(19): siRNA sense strand
ucucagauuucuuuaccaa

SEQ ID NO: 715980 - RNA, 19 nt, Homo sapiens
  misc_RNA (1)...(19): siRNA sense strand
ugcgagacauguuugauga

SEQ ID NO: 715981 - RNA, 19 nt, Homo sapiens
  misc_RNA (1)...(19): siRNA sense strand
ccagaugcgagacauguuu

SEQ ID NO: 715982 - RNA, 19 nt, Homo sapiens
  misc_RNA (1)...(19): siRNA sense strand
ucagauuucuuuaccaacu

SEQ ID NO: 715983 - RNA, 19 nt, Homo sapiens
  misc_RNA (1)...(19): siRNA sense strand
agacauguuugaugacuac

SEQ ID NO: 715984 - RNA, 19 nt, Homo sapiens
  misc_RNA (1)...(19): siRNA sense strand
ccaaguggaagaauuucaa

SEQ ID NO: 715985 - RNA, 19 nt, Homo sapiens
  misc_RNA (1)...(19): siRNA sense strand
caaguggaagaauuucaaa

SEQ ID NO: 715986 - RNA, 19 nt, Homo sapiens
  misc_RNA (1)...(19): siRNA sense strand
gugguugacucccucuuca

SEQ ID NO: 715987 - RNA, 19 nt, Homo sapiens
  misc_RNA (1)...(19): siRNA sense strand
uggcgcaucuacuacaaga

SEQ ID NO: 715988 - RNA, 19 nt, Homo sapiens
  misc_RNA (1)...(19): siRNA sense strand
gcgcaucuacuacaagaag

SEQ ID NO: 715989 - RNA, 19 nt, Homo sapiens
  misc_RNA (1)...(19): siRNA sense strand
cgucggcaaugcugacaug

SEQ ID NO: 715990 - RNA, 19 nt, Homo sapiens
  misc_RNA (1)...(19): siRNA sense strand
ggccaacuguccugaacuc

SEQ ID NO: 715991 - RNA, 19 nt, Homo sapiens
  misc_RNA (1)...(19): siRNA sense strand
ucucccaaguggaagaauu

SEQ ID NO: 715992 - RNA, 19 nt, Homo sapiens
  misc_RNA (1)...(19): siRNA sense strand
gaccagaugcgagacaugu

SEQ ID NO: 715993 - RNA, 19 nt, Homo sapiens
  misc_RNA (1)...(19): siRNA sense strand
gcgccuuccugaguucuga

SEQ ID NO: 715994 - RNA, 19 nt, Homo sapiens
  misc_RNA (1)...(19): siRNA sense strand
cagacacucucuucaccau

SEQ ID NO: 715995 - RNA, 19 nt, Homo sapiens
  misc_RNA (1)...(19): siRNA sense strand
gaacccguacgcugcacaa

SEQ ID NO: 715996 - RNA, 19 nt, Homo sapiens
  misc_RNA (1)...(19): siRNA sense strand
guacgcugcacaacuggaa

SEQ ID NO: 715997 - RNA, 19 nt, Homo sapiens
  misc_RNA (1)...(19): siRNA sense strand
ugguauauccaguauguga

SEQ ID NO: 715998 - RNA, 19 nt, Homo sapiens
  misc_RNA (1)...(19): siRNA sense strand
gaauuucaaaggccucaag

SEQ ID NO: 715999 - RNA, 19 nt, Homo sapiens
  misc_RNA (1)...(19): siRNA sense strand
ccacacgggcagucacaga

SEQ ID NO: 716000 - RNA, 19 nt, Homo sapiens
  misc_RNA (1)...(19): siRNA sense strand
ccucauccggccucuguuu

SEQ ID NO: 716001 - RNA, 19 nt, Homo sapiens
  misc_RNA (1)...(19): siRNA sense strand
cgagacauguuugaugacu

SEQ ID NO: 716002 - RNA, 19 nt, Homo sapiens
  misc_RNA (1)...(19): siRNA sense strand
gcagcugcgggaugagauu

SEQ ID NO: 716003 - RNA, 19 nt, Homo sapiens
  misc_RNA (1)...(19): siRNA sense strand
gaguucugauuuccuccuu

SEQ ID NO: 716004 - RNA, 19 nt, Homo sapiens
  misc_RNA (1)...(19): siRNA sense strand
caucucagacacucucuuc

SEQ ID NO: 716005 - RNA, 19 nt, Homo sapiens
  misc_RNA (1)...(19): siRNA sense strand
ccccaccucugcugcauua

SEQ ID NO: 716006 - RNA, 19 nt, Homo sapiens
  misc_RNA (1)...(19): siRNA sense strand
gguauauccaguaugugaa

SEQ ID NO: 716007 - RNA, 19 nt, Homo sapiens
  misc_RNA (1)...(19): siRNA sense strand
cccguacgcugcacaacug

SEQ ID NO: 716008 - RNA, 19 nt, Homo sapiens
  misc_RNA (1)...(19): siRNA sense strand
agccaagccuggaugacuu

SEQ ID NO: 716009 - RNA, 19 nt, Homo sapiens
  misc_RNA (1)...(19): siRNA sense strand
uaugugaagcggaggaaga

SEQ ID NO: 716010 - RNA, 19 nt, Homo sapiens
  misc_RNA (1)...(19): siRNA sense strand
ggccaugacccaccucucu

SEQ ID NO: 716011 - RNA, 19 nt, Homo sapiens
  misc_RNA (1)...(19): siRNA sense strand
uggcaccacccacugcuuu

SEQ ID NO: 716012 - RNA, 19 nt, Homo sapiens
  misc_RNA (1)...(19): siRNA sense strand
gcaaugcugacaugaucca

SEQ ID NO: 716013 - RNA, 19 nt, Homo sapiens
  misc_RNA (1)...(19): siRNA sense strand
ccagcgccuuccugaguuc

SEQ ID NO: 716014 - RNA, 19 nt, Homo sapiens
  misc_RNA (1)...(19): siRNA sense strand
gcuugagccuggccuacag

SEQ ID NO: 716015 - RNA, 19 nt, Homo sapiens
  misc_RNA (1)...(19): siRNA sense strand
aagcuggugucucccaagu

SEQ ID NO: 716016 - RNA, 19 nt, Homo sapiens
  misc_RNA (1)...(19): siRNA sense strand
caacaaccccugccucaca

SEQ ID NO: 716017 - RNA, 19 nt, Homo sapiens
  misc_RNA (1)...(19): siRNA sense strand
ccacagcggucacuucaug

SEQ ID NO: 716018 - RNA, 19 nt, Homo sapiens
  misc_RNA (1)...(19): siRNA sense strand
gacacucucuucaccauga

SEQ ID NO: 716019 - RNA, 19 nt, Homo sapiens
  misc_RNA (1)...(19): siRNA sense strand
gcccaugccuucaaacuuc

SEQ ID NO: 716020 - RNA, 19 nt, Homo sapiens
  misc_RNA (1)...(19): siRNA sense strand
acaagaagcggcuccguaa

SEQ ID NO: 716021 - RNA, 19 nt, Homo sapiens
  misc_RNA (1)...(19): siRNA sense strand
gacaagauccgccugaaca

SEQ ID NO: 716022 - RNA, 19 nt, Homo sapiens
  misc_RNA (1)...(19): siRNA sense strand
ucucuucucucccagguuu

SEQ ID NO: 716023 - RNA, 19 nt, Homo sapiens
  misc_RNA (1)...(19): siRNA sense strand
gagacauguuugaugacua

SEQ ID NO: 716024 - RNA, 19 nt, Homo sapiens
  misc_RNA (1)...(19): siRNA sense strand
gagacaagauccgccugaa

SEQ ID NO: 716025 - RNA, 19 nt, Homo sapiens
  misc_RNA (1)...(19): siRNA sense strand
acaaguggcgcaucuacua

SEQ ID NO: 716026 - RNA, 19 nt, Homo sapiens
  misc_RNA (1)...(19): siRNA sense strand
gggcacaucuaccaguauc

SEQ ID NO: 716027 - RNA, 19 nt, Homo sapiens
  misc_RNA (1)...(19): siRNA sense strand
cggcaaugcugacaugauc

SEQ ID NO: 716028 - RNA, 19 nt, Homo sapiens
  misc_RNA (1)...(19): siRNA sense strand
ucucagauuucuuuaccaa

SEQ ID NO: 716029 - RNA, 19 nt, Homo sapiens
  misc_RNA (1)...(19): siRNA sense strand
ugcgagacauguuugauga

SEQ ID NO: 716030 - RNA, 19 nt, Homo sapiens
  misc_RNA (1)...(19): siRNA sense strand
ccagaugcgagacauguuu

SEQ ID NO: 716031 - RNA, 19 nt, Homo sapiens
  misc_RNA (1)...(19): siRNA sense strand
ucagauuucuuuaccaacu

SEQ ID NO: 716032 - RNA, 19 nt, Homo sapiens
  misc_RNA (1)...(19): siRNA sense strand
agacauguuugaugacuac

SEQ ID NO: 716033 - RNA, 19 nt, Homo sapiens
  misc_RNA (1)...(19): siRNA sense strand
ccaaguggaagaauuucaa

SEQ ID NO: 716034 - RNA, 19 nt, Homo sapiens
  misc_RNA (1)...(19): siRNA sense strand
caaguggaagaauuucaaa

SEQ ID NO: 716035 - RNA, 19 nt, Homo sapiens
  misc_RNA (1)...(19): siRNA sense strand
gugguugacucccucuuca

SEQ ID NO: 716036 - RNA, 19 nt, Homo sapiens
  misc_RNA (1)...(19): siRNA sense strand
uggcgcaucuacuacaaga

SEQ ID NO: 716037 - RNA, 19 nt, Homo sapiens
  misc_RNA (1)...(19): siRNA sense strand
gcgcaucuacuacaagaag

SEQ ID NO: 716038 - RNA, 19 nt, Homo sapiens
  misc_RNA (1)...(19): siRNA sense strand
cgucggcaaugcugacaug

SEQ ID NO: 716039 - RNA, 19 nt, Homo sapiens
  misc_RNA (1)...(19): siRNA sense strand
ggccaacuguccugaacuc

SEQ ID NO: 716040 - RNA, 19 nt, Homo sapiens
  misc_RNA (1)...(19): siRNA sense strand
ucucccaaguggaagaauu

SEQ ID NO: 716041 - RNA, 19 nt, Homo sapiens
  misc_RNA (1)...(19): siRNA sense strand
gaccagaugcgagacaugu

SEQ ID NO: 716042 - RNA, 19 nt, Homo sapiens
  misc_RNA (1)...(19): siRNA sense strand
gcgccuuccugaguucuga

SEQ ID NO: 716043 - RNA, 19 nt, Homo sapiens
  misc_RNA (1)...(19): siRNA sense strand
cagacacucucuucaccau

SEQ ID NO: 716044 - RNA, 19 nt, Homo sapiens
  misc_RNA (1)...(19): siRNA sense strand
gaacccguacgcugcacaa

SEQ ID NO: 716045 - RNA, 19 nt, Homo sapiens
  misc_RNA (1)...(19): siRNA sense strand
guacgcugcacaacuggaa

SEQ ID NO: 716046 - RNA, 19 nt, Homo sapiens
  misc_RNA (1)...(19): siRNA sense strand
ugguauauccaguauguga

SEQ ID NO: 716047 - RNA, 19 nt, Homo sapiens
  misc_RNA (1)...(19): siRNA sense strand
gaauuucaaaggccucaag

SEQ ID NO: 716048 - RNA, 19 nt, Homo sapiens
  misc_RNA (1)...(19): siRNA sense strand
ccacacgggcagucacaga

SEQ ID NO: 716049 - RNA, 19 nt, Homo sapiens
  misc_RNA (1)...(19): siRNA sense strand
ccucauccggccucuguuu

SEQ ID NO: 716050 - RNA, 19 nt, Homo sapiens
  misc_RNA (1)...(19): siRNA sense strand
cgagacauguuugaugacu

SEQ ID NO: 716051 - RNA, 19 nt, Homo sapiens
  misc_RNA (1)...(19): siRNA sense strand
gcagcugcgggaugagauu

SEQ ID NO: 716052 - RNA, 19 nt, Homo sapiens
  misc_RNA (1)...(19): siRNA sense strand
gaguucugauuuccuccuu

SEQ ID NO: 716053 - RNA, 19 nt, Homo sapiens
  misc_RNA (1)...(19): siRNA sense strand
caucucagacacucucuuc

SEQ ID NO: 716054 - RNA, 19 nt, Homo sapiens
  misc_RNA (1)...(19): siRNA sense strand
ccccaccucugcugcauua

SEQ ID NO: 716055 - RNA, 19 nt, Homo sapiens
  misc_RNA (1)...(19): siRNA sense strand
gguauauccaguaugugaa

SEQ ID NO: 716056 - RNA, 19 nt, Homo sapiens
  misc_RNA (1)...(19): siRNA sense strand
cccguacgcugcacaacug

SEQ ID NO: 716057 - RNA, 19 nt, Homo sapiens
  misc_RNA (1)...(19): siRNA sense strand
agccaagccuggaugacuu

SEQ ID NO: 716058 - RNA, 19 nt, Homo sapiens
  misc_RNA (1)...(19): siRNA sense strand
uaugugaagcggaggaaga

SEQ ID NO: 716059 - RNA, 19 nt, Homo sapiens
  misc_RNA (1)...(19): siRNA sense strand
ggccaugacccaccucucu

SEQ ID NO: 716060 - RNA, 19 nt, Homo sapiens
  misc_RNA (1)...(19): siRNA sense strand
uggcaccacccacugcuuu

SEQ ID NO: 716061 - RNA, 19 nt, Homo sapiens
  misc_RNA (1)...(19): siRNA sense strand
gcaaugcugacaugaucca

SEQ ID NO: 716062 - RNA, 19 nt, Homo sapiens
  misc_RNA (1)...(19): siRNA sense strand
ccagcgccuuccugaguuc

SEQ ID NO: 716063 - RNA, 19 nt, Homo sapiens
  misc_RNA (1)...(19): siRNA sense strand
gcuugagccuggccuacag

SEQ ID NO: 716064 - RNA, 19 nt, Homo sapiens
  misc_RNA (1)...(19): siRNA sense strand
aagcuggugucucccaagu

SEQ ID NO: 716065 - RNA, 19 nt, Homo sapiens
  misc_RNA (1)...(19): siRNA sense strand
caacaaccccugccucaca

SEQ ID NO: 716066 - RNA, 19 nt, Homo sapiens
  misc_RNA (1)...(19): siRNA sense strand
ccacagcggucacuucaug

SEQ ID NO: 716067 - RNA, 19 nt, Homo sapiens
  misc_RNA (1)...(19): siRNA sense strand
gacacucucuucaccauga

SEQ ID NO: 716068 - RNA, 19 nt, Homo sapiens
  misc_RNA (1)...(19): siRNA sense strand
gcccaugccuucaaacuuc

SEQ ID NO: 716069 - RNA, 19 nt, Homo sapiens
  misc_RNA (1)...(19): siRNA sense strand
acaagaagcggcuccguaa

SEQ ID NO: 716070 - RNA, 19 nt, Homo sapiens
  misc_RNA (1)...(19): siRNA sense strand
gacaagauccgccugaaca

SEQ ID NO: 716071 - RNA, 19 nt, Homo sapiens
  misc_RNA (1)...(19): siRNA sense strand
ucucuucucucccagguuu

SEQ ID NO: 716072 - RNA, 19 nt, Homo sapiens
  misc_RNA (1)...(19): siRNA sense strand
gagacauguuugaugacua

SEQ ID NO: 716073 - RNA, 19 nt, Homo sapiens
  misc_RNA (1)...(19): siRNA sense strand
gagacaagauccgccugaa

SEQ ID NO: 716074 - RNA, 19 nt, Homo sapiens
  misc_RNA (1)...(19): siRNA sense strand
acaaguggcgcaucuacua

SEQ ID NO: 716075 - RNA, 19 nt, Homo sapiens
  misc_RNA (1)...(19): siRNA sense strand
gggcacaucuaccaguauc

SEQ ID NO: 716076 - RNA, 19 nt, Homo sapiens
  misc_RNA (1)...(19): siRNA sense strand
cggcaaugcugacaugauc

SEQ ID NO: 716077 - RNA, 19 nt, Homo sapiens
  misc_RNA (1)...(19): siRNA sense strand
ucucagauuucuuuaccaa

SEQ ID NO: 716078 - RNA, 19 nt, Homo sapiens
  misc_RNA (1)...(19): siRNA sense strand
ugcgagacauguuugauga

SEQ ID NO: 716079 - RNA, 19 nt, Homo sapiens
  misc_RNA (1)...(19): siRNA sense strand
ccagaugcgagacauguuu

SEQ ID NO: 716080 - RNA, 19 nt, Homo sapiens
  misc_RNA (1)...(19): siRNA sense strand
ucagauuucuuuaccaacu

SEQ ID NO: 716081 - RNA, 19 nt, Homo sapiens
  misc_RNA (1)...(19): siRNA sense strand
agacauguuugaugacuac

SEQ ID NO: 716082 - RNA, 19 nt, Homo sapiens
  misc_RNA (1)...(19): siRNA sense strand
ccaaguggaagaauuucaa

SEQ ID NO: 716083 - RNA, 19 nt, Homo sapiens
  misc_RNA (1)...(19): siRNA sense strand
caaguggaagaauuucaaa

SEQ ID NO: 716084 - RNA, 19 nt, Homo sapiens
  misc_RNA (1)...(19): siRNA sense strand
gugguugacucccucuuca

SEQ ID NO: 716085 - RNA, 19 nt, Homo sapiens
  misc_RNA (1)...(19): siRNA sense strand
uggcgcaucuacuacaaga

SEQ ID NO: 716086 - RNA, 19 nt, Homo sapiens
  misc_RNA (1)...(19): siRNA sense strand
gcgcaucuacuacaagaag

SEQ ID NO: 716087 - RNA, 19 nt, Homo sapiens
  misc_RNA (1)...(19): siRNA sense strand
cgucggcaaugcugacaug

SEQ ID NO: 716088 - RNA, 19 nt, Homo sapiens
  misc_RNA (1)...(19): siRNA sense strand
ggccaacuguccugaacuc

SEQ ID NO: 716089 - RNA, 19 nt, Homo sapiens
  misc_RNA (1)...(19): siRNA sense strand
ucucccaaguggaagaauu

SEQ ID NO: 716090 - RNA, 19 nt, Homo sapiens
  misc_RNA (1)...(19): siRNA sense strand
gaccagaugcgagacaugu

SEQ ID NO: 716091 - RNA, 19 nt, Homo sapiens
  misc_RNA (1)...(19): siRNA sense strand
gcgccuuccugaguucuga

SEQ ID NO: 716092 - RNA, 19 nt, Homo sapiens
  misc_RNA (1)...(19): siRNA sense strand
cagacacucucuucaccau

SEQ ID NO: 716093 - RNA, 19 nt, Homo sapiens
  misc_RNA (1)...(19): siRNA sense strand
gaacccguacgcugcacaa

SEQ ID NO: 716094 - RNA, 19 nt, Homo sapiens
  misc_RNA (1)...(19): siRNA sense strand
guacgcugcacaacuggaa

SEQ ID NO: 716095 - RNA, 19 nt, Homo sapiens
  misc_RNA (1)...(19): siRNA sense strand
ugguauauccaguauguga

SEQ ID NO: 716096 - RNA, 19 nt, Homo sapiens
  misc_RNA (1)...(19): siRNA sense strand
gaauuucaaaggccucaag

SEQ ID NO: 716097 - RNA, 19 nt, Homo sapiens
  misc_RNA (1)...(19): siRNA sense strand
ccacacgggcagucacaga

SEQ ID NO: 716098 - RNA, 19 nt, Homo sapiens
  misc_RNA (1)...(19): siRNA sense strand
ccucauccggccucuguuu

SEQ ID NO: 716099 - RNA, 19 nt, Homo sapiens
  misc_RNA (1)...(19): siRNA sense strand
cgagacauguuugaugacu

SEQ ID NO: 716100 - RNA, 19 nt, Homo sapiens
  misc_RNA (1)...(19): siRNA sense strand
gcagcugcgggaugagauu

SEQ ID NO: 716101 - RNA, 19 nt, Homo sapiens
  misc_RNA (1)...(19): siRNA sense strand
gaguucugauuuccuccuu

SEQ ID NO: 716102 - RNA, 19 nt, Homo sapiens
  misc_RNA (1)...(19): siRNA sense strand
caucucagacacucucuuc

SEQ ID NO: 716103 - RNA, 19 nt, Homo sapiens
  misc_RNA (1)...(19): siRNA sense strand
ccccaccucugcugcauua

SEQ ID NO: 716104 - RNA, 19 nt, Homo sapiens
  misc_RNA (1)...(19): siRNA sense strand
gguauauccaguaugugaa

SEQ ID NO: 716105 - RNA, 19 nt, Homo sapiens
  misc_RNA (1)...(19): siRNA sense strand
cccguacgcugcacaacug

SEQ ID NO: 716106 - RNA, 19 nt, Homo sapiens
  misc_RNA (1)...(19): siRNA sense strand
agccaagccuggaugacuu

SEQ ID NO: 716107 - RNA, 19 nt, Homo sapiens
  misc_RNA (1)...(19): siRNA sense strand
uaugugaagcggaggaaga

SEQ ID NO: 716108 - RNA, 19 nt, Homo sapiens
  misc_RNA (1)...(19): siRNA sense strand
ggccaugacccaccucucu

SEQ ID NO: 716109 - RNA, 19 nt, Homo sapiens
  misc_RNA (1)...(19): siRNA sense strand
uggcaccacccacugcuuu

SEQ ID NO: 716110 - RNA, 19 nt, Homo sapiens
  misc_RNA (1)...(19): siRNA sense strand
gcaaugcugacaugaucca

SEQ ID NO: 716111 - RNA, 19 nt, Homo sapiens
  misc_RNA (1)...(19): siRNA sense strand
ccagcgccuuccugaguuc

SEQ ID NO: 716112 - RNA, 19 nt, Homo sapiens
  misc_RNA (1)...(19): siRNA sense strand
gcuugagccuggccuacag

SEQ ID NO: 716113 - RNA, 19 nt, Homo sapiens
  misc_RNA (1)...(19): siRNA sense strand
aagcuggugucucccaagu

SEQ ID NO: 716114 - RNA, 19 nt, Homo sapiens
  misc_RNA (1)...(19): siRNA sense strand
caacaaccccugccucaca

SEQ ID NO: 716115 - RNA, 19 nt, Homo sapiens
  misc_RNA (1)...(19): siRNA sense strand
ccacagcggucacuucaug

SEQ ID NO: 716116 - RNA, 19 nt, Homo sapiens
  misc_RNA (1)...(19): siRNA sense strand
gacacucucuucaccauga

SEQ ID NO: 716117 - RNA, 19 nt, Homo sapiens
  misc_RNA (1)...(19): siRNA sense strand
gcccaugccuucaaacuuc

SEQ ID NO: 716118 - RNA, 19 nt, Homo sapiens
  misc_RNA (1)...(19): siRNA sense strand
acaagaagcggcuccguaa

SEQ ID NO: 716119 - RNA, 19 nt, Homo sapiens
  misc_RNA (1)...(19): siRNA sense strand
gacaagauccgccugaaca

SEQ ID NO: 716120 - RNA, 19 nt, Homo sapiens
  misc_RNA (1)...(19): siRNA sense strand
ucucuucucucccagguuu

SEQ ID NO: 716121 - RNA, 19 nt, Homo sapiens
  misc_RNA (1)...(19): siRNA sense strand
gagacauguuugaugacua

SEQ ID NO: 716122 - RNA, 19 nt, Homo sapiens
  misc_RNA (1)...(19): siRNA sense strand
gagacaagauccgccugaa

SEQ ID NO: 716123 - RNA, 19 nt, Homo sapiens
  misc_RNA (1)...(19): siRNA sense strand
acaaguggcgcaucuacua

SEQ ID NO: 716124 - RNA, 19 nt, Homo sapiens
  misc_RNA (1)...(19): siRNA sense strand
gggcacaucuaccaguauc

SEQ ID NO: 716125 - RNA, 19 nt, Homo sapiens
  misc_RNA (1)...(19): siRNA sense strand
cggcaaugcugacaugauc

SEQ ID NO: 716126 - RNA, 19 nt, Homo sapiens
  misc_RNA (1)...(19): siRNA sense strand
ucucagauuucuuuaccaa

SEQ ID NO: 716127 - RNA, 19 nt, Homo sapiens
  misc_RNA (1)...(19): siRNA sense strand
ugcgagacauguuugauga

SEQ ID NO: 716128 - RNA, 19 nt, Homo sapiens
  misc_RNA (1)...(19): siRNA sense strand
ccagaugcgagacauguuu

SEQ ID NO: 716129 - RNA, 19 nt, Homo sapiens
  misc_RNA (1)...(19): siRNA sense strand
ucagauuucuuuaccaacu

SEQ ID NO: 716130 - RNA, 19 nt, Homo sapiens
  misc_RNA (1)...(19): siRNA sense strand
agacauguuugaugacuac

SEQ ID NO: 716131 - RNA, 19 nt, Homo sapiens
  misc_RNA (1)...(19): siRNA sense strand
ccaaguggaagaauuucaa

SEQ ID NO: 716132 - RNA, 19 nt, Homo sapiens
  misc_RNA (1)...(19): siRNA sense strand
caaguggaagaauuucaaa

SEQ ID NO: 716133 - RNA, 19 nt, Homo sapiens
  misc_RNA (1)...(19): siRNA sense strand
gugguugacucccucuuca

SEQ ID NO: 716134 - RNA, 19 nt, Homo sapiens
  misc_RNA (1)...(19): siRNA sense strand
uggcgcaucuacuacaaga

SEQ ID NO: 716135 - RNA, 19 nt, Homo sapiens
  misc_RNA (1)...(19): siRNA sense strand
gcgcaucuacuacaagaag

SEQ ID NO: 716136 - RNA, 19 nt, Homo sapiens
  misc_RNA (1)...(19): siRNA sense strand
cgucggcaaugcugacaug

SEQ ID NO: 716137 - RNA, 19 nt, Homo sapiens
  misc_RNA (1)...(19): siRNA sense strand
ggccaacuguccugaacuc

SEQ ID NO: 716138 - RNA, 19 nt, Homo sapiens
  misc_RNA (1)...(19): siRNA sense strand
ucucccaaguggaagaauu

SEQ ID NO: 716139 - RNA, 19 nt, Homo sapiens
  misc_RNA (1)...(19): siRNA sense strand
gaccagaugcgagacaugu

SEQ ID NO: 716140 - RNA, 19 nt, Homo sapiens
  misc_RNA (1)...(19): siRNA sense strand
gcgccuuccugaguucuga

SEQ ID NO: 716141 - RNA, 19 nt, Homo sapiens
  misc_RNA (1)...(19): siRNA sense strand
cagacacucucuucaccau

SEQ ID NO: 716142 - RNA, 19 nt, Homo sapiens
  misc_RNA (1)...(19): siRNA sense strand
gaacccguacgcugcacaa

SEQ ID NO: 716143 - RNA, 19 nt, Homo sapiens
  misc_RNA (1)...(19): siRNA sense strand
guacgcugcacaacuggaa

SEQ ID NO: 716144 - RNA, 19 nt, Homo sapiens
  misc_RNA (1)...(19): siRNA sense strand
ugguauauccaguauguga

SEQ ID NO: 716145 - RNA, 19 nt, Homo sapiens
  misc_RNA (1)...(19): siRNA sense strand
gaauuucaaaggccucaag

SEQ ID NO: 716146 - RNA, 19 nt, Homo sapiens
  misc_RNA (1)...(19): siRNA sense strand
ccacacgggcagucacaga

SEQ ID NO: 716147 - RNA, 19 nt, Homo sapiens
  misc_RNA (1)...(19): siRNA sense strand
ccucauccggccucuguuu

SEQ ID NO: 716148 - RNA, 19 nt, Homo sapiens
  misc_RNA (1)...(19): siRNA sense strand
cgagacauguuugaugacu

SEQ ID NO: 716149 - RNA, 19 nt, Homo sapiens
  misc_RNA (1)...(19): siRNA sense strand
gcagcugcgggaugagauu

SEQ ID NO: 716150 - RNA, 19 nt, Homo sapiens
  misc_RNA (1)...(19): siRNA sense strand
gaguucugauuuccuccuu

SEQ ID NO: 716151 - RNA, 19 nt, Homo sapiens
  misc_RNA (1)...(19): siRNA sense strand
caucucagacacucucuuc

SEQ ID NO: 716152 - RNA, 19 nt, Homo sapiens
  misc_RNA (1)...(19): siRNA sense strand
ccccaccucugcugcauua

SEQ ID NO: 716153 - RNA, 19 nt, Homo sapiens
  misc_RNA (1)...(19): siRNA sense strand
gguauauccaguaugugaa

SEQ ID NO: 716154 - RNA, 19 nt, Homo sapiens
  misc_RNA (1)...(19): siRNA sense strand
cccguacgcugcacaacug

SEQ ID NO: 716155 - RNA, 19 nt, Homo sapiens
  misc_RNA (1)...(19): siRNA sense strand
agccaagccuggaugacuu

SEQ ID NO: 716156 - RNA, 19 nt, Homo sapiens
  misc_RNA (1)...(19): siRNA sense strand
uaugugaagcggaggaaga

SEQ ID NO: 716157 - RNA, 19 nt, Homo sapiens
  misc_RNA (1)...(19): siRNA sense strand
ggccaugacccaccucucu

SEQ ID NO: 716158 - RNA, 19 nt, Homo sapiens
  misc_RNA (1)...(19): siRNA sense strand
uggcaccacccacugcuuu

SEQ ID NO: 716159 - RNA, 19 nt, Homo sapiens
  misc_RNA (1)...(19): siRNA sense strand
gcaaugcugacaugaucca

SEQ ID NO: 716160 - RNA, 19 nt, Homo sapiens
  misc_RNA (1)...(19): siRNA sense strand
ccagcgccuuccugaguuc

SEQ ID NO: 716161 - RNA, 19 nt, Homo sapiens
  misc_RNA (1)...(19): siRNA sense strand
gcuugagccuggccuacag

SEQ ID NO: 716162 - RNA, 19 nt, Homo sapiens
  misc_RNA (1)...(19): siRNA sense strand
aagcuggugucucccaagu

SEQ ID NO: 716163 - RNA, 19 nt, Homo sapiens
  misc_RNA (1)...(19): siRNA sense strand
caacaaccccugccucaca

SEQ ID NO: 716164 - RNA, 19 nt, Homo sapiens
  misc_RNA (1)...(19): siRNA sense strand
ccacagcggucacuucaug

SEQ ID NO: 716165 - RNA, 19 nt, Homo sapiens
  misc_RNA (1)...(19): siRNA sense strand
gacacucucuucaccauga

SEQ ID NO: 716166 - RNA, 19 nt, Homo sapiens
  misc_RNA (1)...(19): siRNA sense strand
gcccaugccuucaaacuuc

SEQ ID NO: 716167 - RNA, 19 nt, Homo sapiens
  misc_RNA (1)...(19): siRNA sense strand
acaagaagcggcuccguaa

SEQ ID NO: 716168 - RNA, 19 nt, Homo sapiens
  misc_RNA (1)...(19): siRNA sense strand
gacaagauccgccugaaca

SEQ ID NO: 716169 - RNA, 19 nt, Homo sapiens
  misc_RNA (1)...(19): siRNA sense strand
ucucuucucucccagguuu

SEQ ID NO: 716170 - RNA, 19 nt, Homo sapiens
  misc_RNA (1)...(19): siRNA sense strand
gagacaagauccgccugaa

SEQ ID NO: 716171 - RNA, 19 nt, Homo sapiens
  misc_RNA (1)...(19): siRNA sense strand
acaaguggcgcaucuacua

SEQ ID NO: 716172 - RNA, 19 nt, Homo sapiens
  misc_RNA (1)...(19): siRNA sense strand
cggcaaugcugacaugauc

SEQ ID NO: 716173 - RNA, 19 nt, Homo sapiens
  misc_RNA (1)...(19): siRNA sense strand
ucucagauuucuuuaccaa

SEQ ID NO: 716174 - RNA, 19 nt, Homo sapiens
  misc_RNA (1)...(19): siRNA sense strand
ucagauuucuuuaccaacu

SEQ ID NO: 716175 - RNA, 19 nt, Homo sapiens
  misc_RNA (1)...(19): siRNA sense strand
ccaaguggaagaauuucaa

SEQ ID NO: 716176 - RNA, 19 nt, Homo sapiens
  misc_RNA (1)...(19): siRNA sense strand
caaguggaagaauuucaaa

SEQ ID NO: 716177 - RNA, 19 nt, Homo sapiens
  misc_RNA (1)...(19): siRNA sense strand
gugguugacucccucuuca

SEQ ID NO: 716178 - RNA, 19 nt, Homo sapiens
  misc_RNA (1)...(19): siRNA sense strand
uggcgcaucuacuacaaga

SEQ ID NO: 716179 - RNA, 19 nt, Homo sapiens
  misc_RNA (1)...(19): siRNA sense strand
gcgcaucuacuacaagaag

SEQ ID NO: 716180 - RNA, 19 nt, Homo sapiens
  misc_RNA (1)...(19): siRNA sense strand
cgucggcaaugcugacaug

SEQ ID NO: 716181 - RNA, 19 nt, Homo sapiens
  misc_RNA (1)...(19): siRNA sense strand
ucucccaaguggaagaauu

SEQ ID NO: 716182 - RNA, 19 nt, Homo sapiens
  misc_RNA (1)...(19): siRNA sense strand
gcgccuuccugaguucuga

SEQ ID NO: 716183 - RNA, 19 nt, Homo sapiens
  misc_RNA (1)...(19): siRNA sense strand
cagacacucucuucaccau

SEQ ID NO: 716184 - RNA, 19 nt, Homo sapiens
  misc_RNA (1)...(19): siRNA sense strand
ugguauauccaguauguga

SEQ ID NO: 716185 - RNA, 19 nt, Homo sapiens
  misc_RNA (1)...(19): siRNA sense strand
gaauuucaaaggccucaag

SEQ ID NO: 716186 - RNA, 19 nt, Homo sapiens
  misc_RNA (1)...(19): siRNA sense strand
gaguucugauuuccuccuu

SEQ ID NO: 716187 - RNA, 19 nt, Homo sapiens
  misc_RNA (1)...(19): siRNA sense strand
caucucagacacucucuuc

SEQ ID NO: 716188 - RNA, 19 nt, Homo sapiens
  misc_RNA (1)...(19): siRNA sense strand
ccccaccucugcugcauua

SEQ ID NO: 716189 - RNA, 19 nt, Homo sapiens
  misc_RNA (1)...(19): siRNA sense strand
gguauauccaguaugugaa

SEQ ID NO: 716190 - RNA, 19 nt, Homo sapiens
  misc_RNA (1)...(19): siRNA sense strand
agccaagccuggaugacuu

SEQ ID NO: 716191 - RNA, 19 nt, Homo sapiens
  misc_RNA (1)...(19): siRNA sense strand
uaugugaagcggaggaaga

SEQ ID NO: 716192 - RNA, 19 nt, Homo sapiens
  misc_RNA (1)...(19): siRNA sense strand
ggccaugacccaccucucu

SEQ ID NO: 716193 - RNA, 19 nt, Homo sapiens
  misc_RNA (1)...(19): siRNA sense strand
uggcaccacccacugcuuu

SEQ ID NO: 716194 - RNA, 19 nt, Homo sapiens
  misc_RNA (1)...(19): siRNA sense strand
gcaaugcugacaugaucca

SEQ ID NO: 716195 - RNA, 19 nt, Homo sapiens
  misc_RNA (1)...(19): siRNA sense strand
aagcuggugucucccaagu

SEQ ID NO: 716196 - RNA, 19 nt, Homo sapiens
  misc_RNA (1)...(19): siRNA sense strand
caacaaccccugccucaca

SEQ ID NO: 716197 - RNA, 19 nt, Homo sapiens
  misc_RNA (1)...(19): siRNA sense strand
ccagcgccuuccugaguuc

SEQ ID NO: 716198 - RNA, 19 nt, Homo sapiens
  misc_RNA (1)...(19): siRNA sense strand
gcuugagccuggccuacag

SEQ ID NO: 716199 - RNA, 19 nt, Homo sapiens
  misc_RNA (1)...(19): siRNA sense strand
ccacagcggucacuucaug

SEQ ID NO: 716200 - RNA, 19 nt, Homo sapiens
  misc_RNA (1)...(19): siRNA sense strand
gacacucucuucaccauga

SEQ ID NO: 716201 - RNA, 19 nt, Homo sapiens
  misc_RNA (1)...(19): siRNA sense strand
gcccaugccuucaaacuuc

SEQ ID NO: 716202 - RNA, 19 nt, Homo sapiens
  misc_RNA (1)...(19): siRNA sense strand
acaagaagcggcuccguaa

SEQ ID NO: 716203 - RNA, 19 nt, Homo sapiens
  misc_RNA (1)...(19): siRNA sense strand
gacaagauccgccugaaca

SEQ ID NO: 716204 - RNA, 19 nt, Homo sapiens
  misc_RNA (1)...(19): siRNA sense strand
ucucuucucucccagguuu

SEQ ID NO: 716205 - RNA, 19 nt, Homo sapiens
  misc_RNA (1)...(19): siRNA sense strand
gagacauguuugaugacua

SEQ ID NO: 716206 - RNA, 19 nt, Homo sapiens
  misc_RNA (1)...(19): siRNA sense strand
gagacaagauccgccugaa

SEQ ID NO: 716207 - RNA, 19 nt, Homo sapiens
  misc_RNA (1)...(19): siRNA sense strand
acaaguggcgcaucuacua

SEQ ID NO: 716208 - RNA, 19 nt, Homo sapiens
  misc_RNA (1)...(19): siRNA sense strand
gggcacaucuaccaguauc

SEQ ID NO: 716209 - RNA, 19 nt, Homo sapiens
  misc_RNA (1)...(19): siRNA sense strand
cggcaaugcugacaugauc

SEQ ID NO: 716210 - RNA, 19 nt, Homo sapiens
  misc_RNA (1)...(19): siRNA sense strand
ucucagauuucuuuaccaa

SEQ ID NO: 716211 - RNA, 19 nt, Homo sapiens
  misc_RNA (1)...(19): siRNA sense strand
ugcgagacauguuugauga

SEQ ID NO: 716212 - RNA, 19 nt, Homo sapiens
  misc_RNA (1)...(19): siRNA sense strand
ccagaugcgagacauguuu

SEQ ID NO: 716213 - RNA, 19 nt, Homo sapiens
  misc_RNA (1)...(19): siRNA sense strand
ucagauuucuuuaccaacu

SEQ ID NO: 716214 - RNA, 19 nt, Homo sapiens
  misc_RNA (1)...(19): siRNA sense strand
agacauguuugaugacuac

SEQ ID NO: 716215 - RNA, 19 nt, Homo sapiens
  misc_RNA (1)...(19): siRNA sense strand
ccaaguggaagaauuucaa

SEQ ID NO: 716216 - RNA, 19 nt, Homo sapiens
  misc_RNA (1)...(19): siRNA sense strand
caaguggaagaauuucaaa

SEQ ID NO: 716217 - RNA, 19 nt, Homo sapiens
  misc_RNA (1)...(19): siRNA sense strand
gugguugacucccucuuca

SEQ ID NO: 716218 - RNA, 19 nt, Homo sapiens
  misc_RNA (1)...(19): siRNA sense strand
uggcgcaucuacuacaaga

SEQ ID NO: 716219 - RNA, 19 nt, Homo sapiens
  misc_RNA (1)...(19): siRNA sense strand
gcgcaucuacuacaagaag

SEQ ID NO: 716220 - RNA, 19 nt, Homo sapiens
  misc_RNA (1)...(19): siRNA sense strand
cgucggcaaugcugacaug

SEQ ID NO: 716221 - RNA, 19 nt, Homo sapiens
  misc_RNA (1)...(19): siRNA sense strand
ggccaacuguccugaacuc

SEQ ID NO: 716222 - RNA, 19 nt, Homo sapiens
  misc_RNA (1)...(19): siRNA sense strand
ucucccaaguggaagaauu

SEQ ID NO: 716223 - RNA, 19 nt, Homo sapiens
  misc_RNA (1)...(19): siRNA sense strand
gaccagaugcgagacaugu

SEQ ID NO: 716224 - RNA, 19 nt, Homo sapiens
  misc_RNA (1)...(19): siRNA sense strand
gcgccuuccugaguucuga

SEQ ID NO: 716225 - RNA, 19 nt, Homo sapiens
  misc_RNA (1)...(19): siRNA sense strand
cagacacucucuucaccau

SEQ ID NO: 716226 - RNA, 19 nt, Homo sapiens
  misc_RNA (1)...(19): siRNA sense strand
gaacccguacgcugcacaa

SEQ ID NO: 716227 - RNA, 19 nt, Homo sapiens
  misc_RNA (1)...(19): siRNA sense strand
guacgcugcacaacuggaa

SEQ ID NO: 716228 - RNA, 19 nt, Homo sapiens
  misc_RNA (1)...(19): siRNA sense strand
ugguauauccaguauguga

SEQ ID NO: 716229 - RNA, 19 nt, Homo sapiens
  misc_RNA (1)...(19): siRNA sense strand
gaauuucaaaggccucaag

SEQ ID NO: 716230 - RNA, 19 nt, Homo sapiens
  misc_RNA (1)...(19): siRNA sense strand
ccacacgggcagucacaga

SEQ ID NO: 716231 - RNA, 19 nt, Homo sapiens
  misc_RNA (1)...(19): siRNA sense strand
ccucauccggccucuguuu

SEQ ID NO: 716232 - RNA, 19 nt, Homo sapiens
  misc_RNA (1)...(19): siRNA sense strand
cgagacauguuugaugacu

SEQ ID NO: 716233 - RNA, 19 nt, Homo sapiens
  misc_RNA (1)...(19): siRNA sense strand
gcagcugcgggaugagauu

SEQ ID NO: 716234 - RNA, 19 nt, Homo sapiens
  misc_RNA (1)...(19): siRNA sense strand
gaguucugauuuccuccuu

SEQ ID NO: 716235 - RNA, 19 nt, Homo sapiens
  misc_RNA (1)...(19): siRNA sense strand
caucucagacacucucuuc

SEQ ID NO: 716236 - RNA, 19 nt, Homo sapiens
  misc_RNA (1)...(19): siRNA sense strand
ccccaccucugcugcauua

SEQ ID NO: 716237 - RNA, 19 nt, Homo sapiens
  misc_RNA (1)...(19): siRNA sense strand
gguauauccaguaugugaa

SEQ ID NO: 716238 - RNA, 19 nt, Homo sapiens
  misc_RNA (1)...(19): siRNA sense strand
cccguacgcugcacaacug

SEQ ID NO: 716239 - RNA, 19 nt, Homo sapiens
  misc_RNA (1)...(19): siRNA sense strand
agccaagccuggaugacuu

SEQ ID NO: 716240 - RNA, 19 nt, Homo sapiens
  misc_RNA (1)...(19): siRNA sense strand
uaugugaagcggaggaaga

SEQ ID NO: 716241 - RNA, 19 nt, Homo sapiens
  misc_RNA (1)...(19): siRNA sense strand
ggccaugacccaccucucu

SEQ ID NO: 716242 - RNA, 19 nt, Homo sapiens
  misc_RNA (1)...(19): siRNA sense strand
uggcaccacccacugcuuu

SEQ ID NO: 716243 - RNA, 19 nt, Homo sapiens
  misc_RNA (1)...(19): siRNA sense strand
gcaaugcugacaugaucca

SEQ ID NO: 716244 - RNA, 19 nt, Homo sapiens
  misc_RNA (1)...(19): siRNA sense strand
ccagcgccuuccugaguuc

SEQ ID NO: 716245 - RNA, 19 nt, Homo sapiens
  misc_RNA (1)...(19): siRNA sense strand
gcuugagccuggccuacag

SEQ ID NO: 716246 - RNA, 19 nt, Homo sapiens
  misc_RNA (1)...(19): siRNA sense strand
aagcuggugucucccaagu

SEQ ID NO: 716247 - RNA, 19 nt, Homo sapiens
  misc_RNA (1)...(19): siRNA sense strand
caacaaccccugccucaca

SEQ ID NO: 716248 - RNA, 19 nt, Homo sapiens
  misc_RNA (1)...(19): siRNA sense strand
ccacagcggucacuucaug

SEQ ID NO: 716249 - RNA, 19 nt, Homo sapiens
  misc_RNA (1)...(19): siRNA sense strand
gacacucucuucaccauga

SEQ ID NO: 716250 - RNA, 19 nt, Homo sapiens
  misc_RNA (1)...(19): siRNA sense strand
gcccaugccuucaaacuuc

SEQ ID NO: 716251 - RNA, 19 nt, Homo sapiens
  misc_RNA (1)...(19): siRNA sense strand
acaagaagcggcuccguaa

SEQ ID NO: 716252 - RNA, 19 nt, Homo sapiens
  misc_RNA (1)...(19): siRNA sense strand
gacaagauccgccugaaca

SEQ ID NO: 716253 - RNA, 19 nt, Homo sapiens
  misc_RNA (1)...(19): siRNA sense strand
ucucuucucucccagguuu

SEQ ID NO: 716254 - RNA, 19 nt, Homo sapiens
  misc_RNA (1)...(19): siRNA sense strand
gagacauguuugaugacua

SEQ ID NO: 716255 - RNA, 19 nt, Homo sapiens
  misc_RNA (1)...(19): siRNA sense strand
gagacaagauccgccugaa

SEQ ID NO: 716256 - RNA, 19 nt, Homo sapiens
  misc_RNA (1)...(19): siRNA sense strand
acaaguggcgcaucuacua

SEQ ID NO: 716257 - RNA, 19 nt, Homo sapiens
  misc_RNA (1)...(19): siRNA sense strand
gggcacaucuaccaguauc

SEQ ID NO: 716258 - RNA, 19 nt, Homo sapiens
  misc_RNA (1)...(19): siRNA sense strand
cggcaaugcugacaugauc

SEQ ID NO: 716259 - RNA, 19 nt, Homo sapiens
  misc_RNA (1)...(19): siRNA sense strand
ucucagauuucuuuaccaa

SEQ ID NO: 716260 - RNA, 19 nt, Homo sapiens
  misc_RNA (1)...(19): siRNA sense strand
ugcgagacauguuugauga

SEQ ID NO: 716261 - RNA, 19 nt, Homo sapiens
  misc_RNA (1)...(19): siRNA sense strand
ccagaugcgagacauguuu

SEQ ID NO: 716262 - RNA, 19 nt, Homo sapiens
  misc_RNA (1)...(19): siRNA sense strand
ucagauuucuuuaccaacu

SEQ ID NO: 716263 - RNA, 19 nt, Homo sapiens
  misc_RNA (1)...(19): siRNA sense strand
agacauguuugaugacuac

SEQ ID NO: 716264 - RNA, 19 nt, Homo sapiens
  misc_RNA (1)...(19): siRNA sense strand
ccaaguggaagaauuucaa

SEQ ID NO: 716265 - RNA, 19 nt, Homo sapiens
  misc_RNA (1)...(19): siRNA sense strand
caaguggaagaauuucaaa

SEQ ID NO: 716266 - RNA, 19 nt, Homo sapiens
  misc_RNA (1)...(19): siRNA sense strand
gugguugacucccucuuca

SEQ ID NO: 716267 - RNA, 19 nt, Homo sapiens
  misc_RNA (1)...(19): siRNA sense strand
uggcgcaucuacuacaaga

SEQ ID NO: 716268 - RNA, 19 nt, Homo sapiens
  misc_RNA (1)...(19): siRNA sense strand
gcgcaucuacuacaagaag

SEQ ID NO: 716269 - RNA, 19 nt, Homo sapiens
  misc_RNA (1)...(19): siRNA sense strand
cgucggcaaugcugacaug

SEQ ID NO: 716270 - RNA, 19 nt, Homo sapiens
  misc_RNA (1)...(19): siRNA sense strand
ggccaacuguccugaacuc

SEQ ID NO: 716271 - RNA, 19 nt, Homo sapiens
  misc_RNA (1)...(19): siRNA sense strand
ucucccaaguggaagaauu

SEQ ID NO: 716272 - RNA, 19 nt, Homo sapiens
  misc_RNA (1)...(19): siRNA sense strand
gaccagaugcgagacaugu

SEQ ID NO: 716273 - RNA, 19 nt, Homo sapiens
  misc_RNA (1)...(19): siRNA sense strand
gcgccuuccugaguucuga

SEQ ID NO: 716274 - RNA, 19 nt, Homo sapiens
  misc_RNA (1)...(19): siRNA sense strand
cagacacucucuucaccau

SEQ ID NO: 716275 - RNA, 19 nt, Homo sapiens
  misc_RNA (1)...(19): siRNA sense strand
gaacccguacgcugcacaa

SEQ ID NO: 716276 - RNA, 19 nt, Homo sapiens
  misc_RNA (1)...(19): siRNA sense strand
guacgcugcacaacuggaa

SEQ ID NO: 716277 - RNA, 19 nt, Homo sapiens
  misc_RNA (1)...(19): siRNA sense strand
ugguauauccaguauguga

SEQ ID NO: 716278 - RNA, 19 nt, Homo sapiens
  misc_RNA (1)...(19): siRNA sense strand
gaauuucaaaggccucaag

SEQ ID NO: 716279 - RNA, 19 nt, Homo sapiens
  misc_RNA (1)...(19): siRNA sense strand
ccacacgggcagucacaga

SEQ ID NO: 716280 - RNA, 19 nt, Homo sapiens
  misc_RNA (1)...(19): siRNA sense strand
ccucauccggccucuguuu

SEQ ID NO: 716281 - RNA, 19 nt, Homo sapiens
  misc_RNA (1)...(19): siRNA sense strand
cgagacauguuugaugacu

SEQ ID NO: 716282 - RNA, 19 nt, Homo sapiens
  misc_RNA (1)...(19): siRNA sense strand
gcagcugcgggaugagauu

SEQ ID NO: 716283 - RNA, 19 nt, Homo sapiens
  misc_RNA (1)...(19): siRNA sense strand
gaguucugauuuccuccuu

SEQ ID NO: 716284 - RNA, 19 nt, Homo sapiens
  misc_RNA (1)...(19): siRNA sense strand
caucucagacacucucuuc

SEQ ID NO: 716285 - RNA, 19 nt, Homo sapiens
  misc_RNA (1)...(19): siRNA sense strand
ccccaccucugcugcauua

SEQ ID NO: 716286 - RNA, 19 nt, Homo sapiens
  misc_RNA (1)...(19): siRNA sense strand
gguauauccaguaugugaa

SEQ ID NO: 716287 - RNA, 19 nt, Homo sapiens
  misc_RNA (1)...(19): siRNA sense strand
cccguacgcugcacaacug

SEQ ID NO: 716288 - RNA, 19 nt, Homo sapiens
  misc_RNA (1)...(19): siRNA sense strand
agccaagccuggaugacuu

SEQ ID NO: 716289 - RNA, 19 nt, Homo sapiens
  misc_RNA (1)...(19): siRNA sense strand
uaugugaagcggaggaaga

SEQ ID NO: 716290 - RNA, 19 nt, Homo sapiens
  misc_RNA (1)...(19): siRNA sense strand
ggccaugacccaccucucu

SEQ ID NO: 716291 - RNA, 19 nt, Homo sapiens
  misc_RNA (1)...(19): siRNA sense strand
uggcaccacccacugcuuu

SEQ ID NO: 716292 - RNA, 19 nt, Homo sapiens
  misc_RNA (1)...(19): siRNA sense strand
gcaaugcugacaugaucca

SEQ ID NO: 716293 - RNA, 19 nt, Homo sapiens
  misc_RNA (1)...(19): siRNA sense strand
ccagcgccuuccugaguuc

SEQ ID NO: 716294 - RNA, 19 nt, Homo sapiens
  misc_RNA (1)...(19): siRNA sense strand
gcuugagccuggccuacag

SEQ ID NO: 716295 - RNA, 19 nt, Homo sapiens
  misc_RNA (1)...(19): siRNA sense strand
aagcuggugucucccaagu

SEQ ID NO: 716296 - RNA, 19 nt, Homo sapiens
  misc_RNA (1)...(19): siRNA sense strand
caacaaccccugccucaca

SEQ ID NO: 716297 - RNA, 19 nt, Homo sapiens
  misc_RNA (1)...(19): siRNA sense strand
ccacagcggucacuucaug

SEQ ID NO: 716298 - RNA, 19 nt, Homo sapiens
  misc_RNA (1)...(19): siRNA sense strand
gacacucucuucaccauga

SEQ ID NO: 716299 - RNA, 19 nt, Homo sapiens
  misc_RNA (1)...(19): siRNA sense strand
gcccaugccuucaaacuuc

SEQ ID NO: 716300 - RNA, 19 nt, Homo sapiens
  misc_RNA (1)...(19): siRNA sense strand
acaagaagcggcuccguaa

SEQ ID NO: 716301 - RNA, 19 nt, Homo sapiens
  misc_RNA (1)...(19): siRNA sense strand
gacaagauccgccugaaca

SEQ ID NO: 716302 - RNA, 19 nt, Homo sapiens
  misc_RNA (1)...(19): siRNA sense strand
ucucuucucucccagguuu

SEQ ID NO: 716303 - RNA, 19 nt, Homo sapiens
  misc_RNA (1)...(19): siRNA sense strand
gagacauguuugaugacua

SEQ ID NO: 716304 - RNA, 19 nt, Homo sapiens
  misc_RNA (1)...(19): siRNA sense strand
gagacaagauccgccugaa

SEQ ID NO: 716305 - RNA, 19 nt, Homo sapiens
  misc_RNA (1)...(19): siRNA sense strand
acaaguggcgcaucuacua

SEQ ID NO: 716306 - RNA, 19 nt, Homo sapiens
  misc_RNA (1)...(19): siRNA sense strand
gggcacaucuaccaguauc

SEQ ID NO: 716307 - RNA, 19 nt, Homo sapiens
  misc_RNA (1)...(19): siRNA sense strand
cggcaaugcugacaugauc

SEQ ID NO: 716308 - RNA, 19 nt, Homo sapiens
  misc_RNA (1)...(19): siRNA sense strand
ucucagauuucuuuaccaa

SEQ ID NO: 716309 - RNA, 19 nt, Homo sapiens
  misc_RNA (1)...(19): siRNA sense strand
ugcgagacauguuugauga

SEQ ID NO: 716310 - RNA, 19 nt, Homo sapiens
  misc_RNA (1)...(19): siRNA sense strand
ccagaugcgagacauguuu

SEQ ID NO: 716311 - RNA, 19 nt, Homo sapiens
  misc_RNA (1)...(19): siRNA sense strand
ucagauuucuuuaccaacu

SEQ ID NO: 716312 - RNA, 19 nt, Homo sapiens
  misc_RNA (1)...(19): siRNA sense strand
agacauguuugaugacuac

SEQ ID NO: 716313 - RNA, 19 nt, Homo sapiens
  misc_RNA (1)...(19): siRNA sense strand
ccaaguggaagaauuucaa

SEQ ID NO: 716314 - RNA, 19 nt, Homo sapiens
  misc_RNA (1)...(19): siRNA sense strand
caaguggaagaauuucaaa

SEQ ID NO: 716315 - RNA, 19 nt, Homo sapiens
  misc_RNA (1)...(19): siRNA sense strand
gugguugacucccucuuca

SEQ ID NO: 716316 - RNA, 19 nt, Homo sapiens
  misc_RNA (1)...(19): siRNA sense strand
uggcgcaucuacuacaaga

SEQ ID NO: 716317 - RNA, 19 nt, Homo sapiens
  misc_RNA (1)...(19): siRNA sense strand
gcgcaucuacuacaagaag

SEQ ID NO: 716318 - RNA, 19 nt, Homo sapiens
  misc_RNA (1)...(19): siRNA sense strand
cgucggcaaugcugacaug

SEQ ID NO: 716319 - RNA, 19 nt, Homo sapiens
  misc_RNA (1)...(19): siRNA sense strand
ggccaacuguccugaacuc

SEQ ID NO: 716320 - RNA, 19 nt, Homo sapiens
  misc_RNA (1)...(19): siRNA sense strand
ucucccaaguggaagaauu

SEQ ID NO: 716321 - RNA, 19 nt, Homo sapiens
  misc_RNA (1)...(19): siRNA sense strand
gaccagaugcgagacaugu

SEQ ID NO: 716322 - RNA, 19 nt, Homo sapiens
  misc_RNA (1)...(19): siRNA sense strand
gcgccuuccugaguucuga

SEQ ID NO: 716323 - RNA, 19 nt, Homo sapiens
  misc_RNA (1)...(19): siRNA sense strand
cagacacucucuucaccau

SEQ ID NO: 716324 - RNA, 19 nt, Homo sapiens
  misc_RNA (1)...(19): siRNA sense strand
gaacccguacgcugcacaa

SEQ ID NO: 716325 - RNA, 19 nt, Homo sapiens
  misc_RNA (1)...(19): siRNA sense strand
guacgcugcacaacuggaa

SEQ ID NO: 716326 - RNA, 19 nt, Homo sapiens
  misc_RNA (1)...(19): siRNA sense strand
ugguauauccaguauguga

SEQ ID NO: 716327 - RNA, 19 nt, Homo sapiens
  misc_RNA (1)...(19): siRNA sense strand
gaauuucaaaggccucaag

SEQ ID NO: 716328 - RNA, 19 nt, Homo sapiens
  misc_RNA (1)...(19): siRNA sense strand
ccacacgggcagucacaga

SEQ ID NO: 716329 - RNA, 19 nt, Homo sapiens
  misc_RNA (1)...(19): siRNA sense strand
ccucauccggccucuguuu

SEQ ID NO: 716330 - RNA, 19 nt, Homo sapiens
  misc_RNA (1)...(19): siRNA sense strand
cgagacauguuugaugacu

SEQ ID NO: 716331 - RNA, 19 nt, Homo sapiens
  misc_RNA (1)...(19): siRNA sense strand
gcagcugcgggaugagauu

SEQ ID NO: 716332 - RNA, 19 nt, Homo sapiens
  misc_RNA (1)...(19): siRNA sense strand
gaguucugauuuccuccuu

SEQ ID NO: 716333 - RNA, 19 nt, Homo sapiens
  misc_RNA (1)...(19): siRNA sense strand
caucucagacacucucuuc

SEQ ID NO: 716334 - RNA, 19 nt, Homo sapiens
  misc_RNA (1)...(19): siRNA sense strand
ccccaccucugcugcauua

SEQ ID NO: 716335 - RNA, 19 nt, Homo sapiens
  misc_RNA (1)...(19): siRNA sense strand
gguauauccaguaugugaa

SEQ ID NO: 716336 - RNA, 19 nt, Homo sapiens
  misc_RNA (1)...(19): siRNA sense strand
cccguacgcugcacaacug

SEQ ID NO: 716337 - RNA, 19 nt, Homo sapiens
  misc_RNA (1)...(19): siRNA sense strand
agccaagccuggaugacuu

SEQ ID NO: 716338 - RNA, 19 nt, Homo sapiens
  misc_RNA (1)...(19): siRNA sense strand
uaugugaagcggaggaaga

SEQ ID NO: 716339 - RNA, 19 nt, Homo sapiens
  misc_RNA (1)...(19): siRNA sense strand
ggccaugacccaccucucu

SEQ ID NO: 716340 - RNA, 19 nt, Homo sapiens
  misc_RNA (1)...(19): siRNA sense strand
uggcaccacccacugcuuu

SEQ ID NO: 716341 - RNA, 19 nt, Homo sapiens
  misc_RNA (1)...(19): siRNA sense strand
gcaaugcugacaugaucca

SEQ ID NO: 716342 - RNA, 19 nt, Homo sapiens
  misc_RNA (1)...(19): siRNA sense strand
ccagcgccuuccugaguuc

SEQ ID NO: 716343 - RNA, 19 nt, Homo sapiens
  misc_RNA (1)...(19): siRNA sense strand
gcuugagccuggccuacag

SEQ ID NO: 716344 - RNA, 19 nt, Homo sapiens
  misc_RNA (1)...(19): siRNA sense strand
aagcuggugucucccaagu

SEQ ID NO: 716345 - RNA, 19 nt, Homo sapiens
  misc_RNA (1)...(19): siRNA sense strand
caacaaccccugccucaca

SEQ ID NO: 716346 - RNA, 19 nt, Homo sapiens
  misc_RNA (1)...(19): siRNA sense strand
ccacagcggucacuucaug

SEQ ID NO: 716347 - RNA, 19 nt, Homo sapiens
  misc_RNA (1)...(19): siRNA sense strand
gacacucucuucaccauga

SEQ ID NO: 716348 - RNA, 19 nt, Homo sapiens
  misc_RNA (1)...(19): siRNA sense strand
gcccaugccuucaaacuuc

SEQ ID NO: 716349 - RNA, 19 nt, Homo sapiens
  misc_RNA (1)...(19): siRNA sense strand
acaagaagcggcuccguaa

SEQ ID NO: 716350 - RNA, 19 nt, Homo sapiens
  misc_RNA (1)...(19): siRNA sense strand
gacaagauccgccugaaca

SEQ ID NO: 716351 - RNA, 19 nt, Homo sapiens
  misc_RNA (1)...(19): siRNA sense strand
ucucuucucucccagguuu

SEQ ID NO: 716352 - RNA, 19 nt, Homo sapiens
  misc_RNA (1)...(19): siRNA sense strand
gagacauguuugaugacua

SEQ ID NO: 716353 - RNA, 19 nt, Homo sapiens
  misc_RNA (1)...(19): siRNA sense strand
gagacaagauccgccugaa

SEQ ID NO: 716354 - RNA, 19 nt, Homo sapiens
  misc_RNA (1)...(19): siRNA sense strand
acaaguggcgcaucuacua

SEQ ID NO: 716355 - RNA, 19 nt, Homo sapiens
  misc_RNA (1)...(19): siRNA sense strand
gggcacaucuaccaguauc

SEQ ID NO: 716356 - RNA, 19 nt, Homo sapiens
  misc_RNA (1)...(19): siRNA sense strand
cggcaaugcugacaugauc

SEQ ID NO: 716357 - RNA, 19 nt, Homo sapiens
  misc_RNA (1)...(19): siRNA sense strand
ucucagauuucuuuaccaa

SEQ ID NO: 716358 - RNA, 19 nt, Homo sapiens
  misc_RNA (1)...(19): siRNA sense strand
ugcgagacauguuugauga

SEQ ID NO: 716359 - RNA, 19 nt, Homo sapiens
  misc_RNA (1)...(19): siRNA sense strand
ccagaugcgagacauguuu

SEQ ID NO: 716360 - RNA, 19 nt, Homo sapiens
  misc_RNA (1)...(19): siRNA sense strand
ucagauuucuuuaccaacu

SEQ ID NO: 716361 - RNA, 19 nt, Homo sapiens
  misc_RNA (1)...(19): siRNA sense strand
agacauguuugaugacuac

SEQ ID NO: 716362 - RNA, 19 nt, Homo sapiens
  misc_RNA (1)...(19): siRNA sense strand
ccaaguggaagaauuucaa

SEQ ID NO: 716363 - RNA, 19 nt, Homo sapiens
  misc_RNA (1)...(19): siRNA sense strand
caaguggaagaauuucaaa

SEQ ID NO: 716364 - RNA, 19 nt, Homo sapiens
  misc_RNA (1)...(19): siRNA sense strand
gugguugacucccucuuca

SEQ ID NO: 716365 - RNA, 19 nt, Homo sapiens
  misc_RNA (1)...(19): siRNA sense strand
uggcgcaucuacuacaaga

SEQ ID NO: 716366 - RNA, 19 nt, Homo sapiens
  misc_RNA (1)...(19): siRNA sense strand
gcgcaucuacuacaagaag

SEQ ID NO: 716367 - RNA, 19 nt, Homo sapiens
  misc_RNA (1)...(19): siRNA sense strand
cgucggcaaugcugacaug

SEQ ID NO: 716368 - RNA, 19 nt, Homo sapiens
  misc_RNA (1)...(19): siRNA sense strand
ggccaacuguccugaacuc

SEQ ID NO: 716369 - RNA, 19 nt, Homo sapiens
  misc_RNA (1)...(19): siRNA sense strand
ucucccaaguggaagaauu

SEQ ID NO: 716370 - RNA, 19 nt, Homo sapiens
  misc_RNA (1)...(19): siRNA sense strand
gaccagaugcgagacaugu

SEQ ID NO: 716371 - RNA, 19 nt, Homo sapiens
  misc_RNA (1)...(19): siRNA sense strand
gcgccuuccugaguucuga

SEQ ID NO: 716372 - RNA, 19 nt, Homo sapiens
  misc_RNA (1)...(19): siRNA sense strand
cagacacucucuucaccau

SEQ ID NO: 716373 - RNA, 19 nt, Homo sapiens
  misc_RNA (1)...(19): siRNA sense strand
gaacccguacgcugcacaa

SEQ ID NO: 716374 - RNA, 19 nt, Homo sapiens
  misc_RNA (1)...(19): siRNA sense strand
guacgcugcacaacuggaa

SEQ ID NO: 716375 - RNA, 19 nt, Homo sapiens
  misc_RNA (1)...(19): siRNA sense strand
ugguauauccaguauguga

SEQ ID NO: 716376 - RNA, 19 nt, Homo sapiens
  misc_RNA (1)...(19): siRNA sense strand
gaauuucaaaggccucaag

SEQ ID NO: 716377 - RNA, 19 nt, Homo sapiens
  misc_RNA (1)...(19): siRNA sense strand
ccacacgggcagucacaga

SEQ ID NO: 716378 - RNA, 19 nt, Homo sapiens
  misc_RNA (1)...(19): siRNA sense strand
ccucauccggccucuguuu

SEQ ID NO: 716379 - RNA, 19 nt, Homo sapiens
  misc_RNA (1)...(19): siRNA sense strand
cgagacauguuugaugacu

SEQ ID NO: 716380 - RNA, 19 nt, Homo sapiens
  misc_RNA (1)...(19): siRNA sense strand
gcagcugcgggaugagauu

SEQ ID NO: 716381 - RNA, 19 nt, Homo sapiens
  misc_RNA (1)...(19): siRNA sense strand
gaguucugauuuccuccuu

SEQ ID NO: 716382 - RNA, 19 nt, Homo sapiens
  misc_RNA (1)...(19): siRNA sense strand
caucucagacacucucuuc

SEQ ID NO: 716383 - RNA, 19 nt, Homo sapiens
  misc_RNA (1)...(19): siRNA sense strand
ccccaccucugcugcauua

SEQ ID NO: 716384 - RNA, 19 nt, Homo sapiens
  misc_RNA (1)...(19): siRNA sense strand
gguauauccaguaugugaa

SEQ ID NO: 716385 - RNA, 19 nt, Homo sapiens
  misc_RNA (1)...(19): siRNA sense strand
cccguacgcugcacaacug

SEQ ID NO: 716386 - RNA, 19 nt, Homo sapiens
  misc_RNA (1)...(19): siRNA sense strand
agccaagccuggaugacuu

SEQ ID NO: 716387 - RNA, 19 nt, Homo sapiens
  misc_RNA (1)...(19): siRNA sense strand
uaugugaagcggaggaaga

SEQ ID NO: 716388 - RNA, 19 nt, Homo sapiens
  misc_RNA (1)...(19): siRNA sense strand
ggccaugacccaccucucu

SEQ ID NO: 716389 - RNA, 19 nt, Homo sapiens
  misc_RNA (1)...(19): siRNA sense strand
uggcaccacccacugcuuu

SEQ ID NO: 716390 - RNA, 19 nt, Homo sapiens
  misc_RNA (1)...(19): siRNA sense strand
gcaaugcugacaugaucca

SEQ ID NO: 716391 - RNA, 19 nt, Homo sapiens
  misc_RNA (1)...(19): siRNA sense strand
ccagcgccuuccugaguuc

SEQ ID NO: 716392 - RNA, 19 nt, Homo sapiens
  misc_RNA (1)...(19): siRNA sense strand
gcuugagccuggccuacag

SEQ ID NO: 716393 - RNA, 19 nt, Homo sapiens
  misc_RNA (1)...(19): siRNA sense strand
aagcuggugucucccaagu

SEQ ID NO: 716394 - RNA, 19 nt, Homo sapiens
  misc_RNA (1)...(19): siRNA sense strand
caacaaccccugccucaca

SEQ ID NO: 716395 - RNA, 19 nt, Homo sapiens
  misc_RNA (1)...(19): siRNA sense strand
ccacagcggucacuucaug

SEQ ID NO: 716396 - RNA, 19 nt, Homo sapiens
  misc_RNA (1)...(19): siRNA sense strand
gacacucucuucaccauga

SEQ ID NO: 716397 - RNA, 19 nt, Homo sapiens
  misc_RNA (1)...(19): siRNA sense strand
gcccaugccuucaaacuuc

SEQ ID NO: 716398 - RNA, 19 nt, Homo sapiens
  misc_RNA (1)...(19): siRNA sense strand
acaagaagcggcuccguaa

SEQ ID NO: 716399 - RNA, 19 nt, Homo sapiens
  misc_RNA (1)...(19): siRNA sense strand
gacaagauccgccugaaca

SEQ ID NO: 716400 - RNA, 19 nt, Homo sapiens
  misc_RNA (1)...(19): siRNA sense strand
ucucuucucucccagguuu

SEQ ID NO: 716401 - RNA, 19 nt, Homo sapiens
  misc_RNA (1)...(19): siRNA sense strand
gagacaagauccgccugaa

SEQ ID NO: 716402 - RNA, 19 nt, Homo sapiens
  misc_RNA (1)...(19): siRNA sense strand
acaaguggcgcaucuacua

SEQ ID NO: 716403 - RNA, 19 nt, Homo sapiens
  misc_RNA (1)...(19): siRNA sense strand
cggcaaugcugacaugauc

SEQ ID NO: 716404 - RNA, 19 nt, Homo sapiens
  misc_RNA (1)...(19): siRNA sense strand
ucucagauuucuuuaccaa

SEQ ID NO: 716405 - RNA, 19 nt, Homo sapiens
  misc_RNA (1)...(19): siRNA sense strand
ucagauuucuuuaccaacu

SEQ ID NO: 716406 - RNA, 19 nt, Homo sapiens
  misc_RNA (1)...(19): siRNA sense strand
ccaaguggaagaauuucaa

SEQ ID NO: 716407 - RNA, 19 nt, Homo sapiens
  misc_RNA (1)...(19): siRNA sense strand
caaguggaagaauuucaaa

SEQ ID NO: 716408 - RNA, 19 nt, Homo sapiens
  misc_RNA (1)...(19): siRNA sense strand
gugguugacucccucuuca

SEQ ID NO: 716409 - RNA, 19 nt, Homo sapiens
  misc_RNA (1)...(19): siRNA sense strand
uggcgcaucuacuacaaga

SEQ ID NO: 716410 - RNA, 19 nt, Homo sapiens
  misc_RNA (1)...(19): siRNA sense strand
gcgcaucuacuacaagaag

SEQ ID NO: 716411 - RNA, 19 nt, Homo sapiens
  misc_RNA (1)...(19): siRNA sense strand
cgucggcaaugcugacaug

SEQ ID NO: 716412 - RNA, 19 nt, Homo sapiens
  misc_RNA (1)...(19): siRNA sense strand
ucucccaaguggaagaauu

SEQ ID NO: 716413 - RNA, 19 nt, Homo sapiens
  misc_RNA (1)...(19): siRNA sense strand
gcgccuuccugaguucuga

SEQ ID NO: 716414 - RNA, 19 nt, Homo sapiens
  misc_RNA (1)...(19): siRNA sense strand
cagacacucucuucaccau

SEQ ID NO: 716415 - RNA, 19 nt, Homo sapiens
  misc_RNA (1)...(19): siRNA sense strand
ugguauauccaguauguga

SEQ ID NO: 716416 - RNA, 19 nt, Homo sapiens
  misc_RNA (1)...(19): siRNA sense strand
gaauuucaaaggccucaag

SEQ ID NO: 716417 - RNA, 19 nt, Homo sapiens
  misc_RNA (1)...(19): siRNA sense strand
gaguucugauuuccuccuu

SEQ ID NO: 716418 - RNA, 19 nt, Homo sapiens
  misc_RNA (1)...(19): siRNA sense strand
caucucagacacucucuuc

SEQ ID NO: 716419 - RNA, 19 nt, Homo sapiens
  misc_RNA (1)...(19): siRNA sense strand
ccccaccucugcugcauua

SEQ ID NO: 716420 - RNA, 19 nt, Homo sapiens
  misc_RNA (1)...(19): siRNA sense strand
gguauauccaguaugugaa

SEQ ID NO: 716421 - RNA, 19 nt, Homo sapiens
  misc_RNA (1)...(19): siRNA sense strand
agccaagccuggaugacuu

SEQ ID NO: 716422 - RNA, 19 nt, Homo sapiens
  misc_RNA (1)...(19): siRNA sense strand
uaugugaagcggaggaaga

SEQ ID NO: 716423 - RNA, 19 nt, Homo sapiens
  misc_RNA (1)...(19): siRNA sense strand
ggccaugacccaccucucu

SEQ ID NO: 716424 - RNA, 19 nt, Homo sapiens
  misc_RNA (1)...(19): siRNA sense strand
uggcaccacccacugcuuu

SEQ ID NO: 716425 - RNA, 19 nt, Homo sapiens
  misc_RNA (1)...(19): siRNA sense strand
gcaaugcugacaugaucca

SEQ ID NO: 716426 - RNA, 19 nt, Homo sapiens
  misc_RNA (1)...(19): siRNA sense strand
aagcuggugucucccaagu

SEQ ID NO: 716427 - RNA, 19 nt, Homo sapiens
  misc_RNA (1)...(19): siRNA sense strand
caacaaccccugccucaca

SEQ ID NO: 716428 - RNA, 19 nt, Homo sapiens
  misc_RNA (1)...(19): siRNA sense strand
ccagcgccuuccugaguuc

SEQ ID NO: 716429 - RNA, 19 nt, Homo sapiens
  misc_RNA (1)...(19): siRNA sense strand
gcuugagccuggccuacag

SEQ ID NO: 716430 - RNA, 19 nt, Homo sapiens
  misc_RNA (1)...(19): siRNA sense strand
ccaauaccgucuaccagua

SEQ ID NO: 716431 - RNA, 19 nt, Homo sapiens
  misc_RNA (1)...(19): siRNA sense strand
acaaggcgcuggaggagaa

SEQ ID NO: 716432 - RNA, 19 nt, Homo sapiens
  misc_RNA (1)...(19): siRNA sense strand
aggagaagcucaacuacaa

SEQ ID NO: 716433 - RNA, 19 nt, Homo sapiens
  misc_RNA (1)...(19): siRNA sense strand
ggaggagaauaacaacuuc

SEQ ID NO: 716434 - RNA, 19 nt, Homo sapiens
  misc_RNA (1)...(19): siRNA sense strand
gaacaaggagcagcgagaa

SEQ ID NO: 716435 - RNA, 19 nt, Homo sapiens
  misc_RNA (1)...(19): siRNA sense strand
gagaagcucaacuacaaga

SEQ ID NO: 716436 - RNA, 19 nt, Homo sapiens
  misc_RNA (1)...(19): siRNA sense strand
gaagcucaacuacaagaug

SEQ ID NO: 716437 - RNA, 19 nt, Homo sapiens
  misc_RNA (1)...(19): siRNA sense strand
agauggagcucagcaagga

SEQ ID NO: 716438 - RNA, 19 nt, Homo sapiens
  misc_RNA (1)...(19): siRNA sense strand
acaaggagaagaugaagga

SEQ ID NO: 716439 - RNA, 19 nt, Homo sapiens
  misc_RNA (1)...(19): siRNA sense strand
gaggagaagcucaacuaca

SEQ ID NO: 716440 - RNA, 19 nt, Homo sapiens
  misc_RNA (1)...(19): siRNA sense strand
cggaggagaagcucaacua

SEQ ID NO: 716441 - RNA, 19 nt, Homo sapiens
  misc_RNA (1)...(19): siRNA sense strand
acaaggagcagcgagaaga

SEQ ID NO: 716442 - RNA, 19 nt, Homo sapiens
  misc_RNA (1)...(19): siRNA sense strand
uggaggagaauaacaacuu

SEQ ID NO: 716443 - RNA, 19 nt, Homo sapiens
  misc_RNA (1)...(19): siRNA sense strand
caucugcuccugcuucuac

SEQ ID NO: 716444 - RNA, 19 nt, Homo sapiens
  misc_RNA (1)...(19): siRNA sense strand
gcuccugcuucuacacaca

SEQ ID NO: 716445 - RNA, 19 nt, Homo sapiens
  misc_RNA (1)...(19): siRNA sense strand
ggagaagcucaacuacaag

SEQ ID NO: 716446 - RNA, 19 nt, Homo sapiens
  misc_RNA (1)...(19): siRNA sense strand
ggaggagaagcucaacuac

SEQ ID NO: 716447 - RNA, 19 nt, Homo sapiens
  misc_RNA (1)...(19): siRNA sense strand
gaggagaauaacaacuuca

SEQ ID NO: 716448 - RNA, 19 nt, Homo sapiens
  misc_RNA (1)...(19): siRNA sense strand
ccuacaaggagaagaugaa

SEQ ID NO: 716449 - RNA, 19 nt, Homo sapiens
  misc_RNA (1)...(19): siRNA sense strand
gagcagcgagaagagaugu

SEQ ID NO: 716450 - RNA, 19 nt, Homo sapiens
  misc_RNA (1)...(19): siRNA sense strand
gacaugggcuauaagaaua

SEQ ID NO: 716451 - RNA, 19 nt, Homo sapiens
  misc_RNA (1)...(19): siRNA sense strand
gagacaaucuuucauguuc

SEQ ID NO: 716452 - RNA, 19 nt, Homo sapiens
  misc_RNA (1)...(19): siRNA sense strand
gcagggacaugggcuauaa

SEQ ID NO: 716453 - RNA, 19 nt, Homo sapiens
  misc_RNA (1)...(19): siRNA sense strand
gaacacaagugccggcaau

SEQ ID NO: 716454 - RNA, 19 nt, Homo sapiens
  misc_RNA (1)...(19): siRNA sense strand
ccaaggugcuucucauuga

SEQ ID NO: 716455 - RNA, 19 nt, Homo sapiens
  misc_RNA (1)...(19): siRNA sense strand
ggacaugggcuauaagaau

SEQ ID NO: 716456 - RNA, 19 nt, Homo sapiens
  misc_RNA (1)...(19): siRNA sense strand
gacaaucuuucauguucua

SEQ ID NO: 716457 - RNA, 19 nt, Homo sapiens
  misc_RNA (1)...(19): siRNA sense strand
gcaaugucgauaucuauaa

SEQ ID NO: 716458 - RNA, 19 nt, Homo sapiens
  misc_RNA (1)...(19): siRNA sense strand
ggacuggauuuaucgacaa

SEQ ID NO: 716459 - RNA, 19 nt, Homo sapiens
  misc_RNA (1)...(19): siRNA sense strand
guacgggaaugugauggua

SEQ ID NO: 716460 - RNA, 19 nt, Homo sapiens
  misc_RNA (1)...(19): siRNA sense strand
gaccaaacuucauccuuca

SEQ ID NO: 716461 - RNA, 19 nt, Homo sapiens
  misc_RNA (1)...(19): siRNA sense strand
caacagcagauaugucuau

SEQ ID NO: 716462 - RNA, 19 nt, Homo sapiens
  misc_RNA (1)...(19): siRNA sense strand
uauuggaccuuacuaugaa

SEQ ID NO: 716463 - RNA, 19 nt, Homo sapiens
  misc_RNA (1)...(19): siRNA sense strand
gccaaggaauaguggauga

SEQ ID NO: 716464 - RNA, 19 nt, Homo sapiens
  misc_RNA (1)...(19): siRNA sense strand
caccagcuauuggaccuua

SEQ ID NO: 716465 - RNA, 19 nt, Homo sapiens
  misc_RNA (1)...(19): siRNA sense strand
ggacgagaaucgguguguu

SEQ ID NO: 716466 - RNA, 19 nt, Homo sapiens
  misc_RNA (1)...(19): siRNA sense strand
aaagugauuucucauccaa

SEQ ID NO: 716467 - RNA, 19 nt, Homo sapiens
  misc_RNA (1)...(19): siRNA sense strand
ccaagaccaagaacaauga

SEQ ID NO: 716468 - RNA, 19 nt, Homo sapiens
  misc_RNA (1)...(19): siRNA sense strand
ggacagugugcaccucaaa

SEQ ID NO: 716469 - RNA, 19 nt, Homo sapiens
  misc_RNA (1)...(19): siRNA sense strand
gcaccucaaagacuaagaa

SEQ ID NO: 716470 - RNA, 19 nt, Homo sapiens
  misc_RNA (1)...(19): siRNA sense strand
cagcagauaugucuaugac

SEQ ID NO: 716471 - RNA, 19 nt, Homo sapiens
  misc_RNA (1)...(19): siRNA sense strand
gaaagggaagaccucagaa

SEQ ID NO: 716472 - RNA, 19 nt, Homo sapiens
  misc_RNA (1)...(19): siRNA sense strand
ggccuacucuggaaguuca

SEQ ID NO: 716473 - RNA, 19 nt, Homo sapiens
  misc_RNA (1)...(19): siRNA sense strand
ggcaaugucgauaucuaua

SEQ ID NO: 716474 - RNA, 19 nt, Homo sapiens
  misc_RNA (1)...(19): siRNA sense strand
ggauccaccagcuuuauga

SEQ ID NO: 716475 - RNA, 19 nt, Homo sapiens
  misc_RNA (1)...(19): siRNA sense strand
ggaguguacgggaauguga

SEQ ID NO: 716476 - RNA, 19 nt, Homo sapiens
  misc_RNA (1)...(19): siRNA sense strand
agaagccucugacuuucaa

SEQ ID NO: 716477 - RNA, 19 nt, Homo sapiens
  misc_RNA (1)...(19): siRNA sense strand
uuaugaaacugaacacaag

SEQ ID NO: 716478 - RNA, 19 nt, Homo sapiens
  misc_RNA (1)...(19): siRNA sense strand
gugugcaccucaaagacua

SEQ ID NO: 716479 - RNA, 19 nt, Homo sapiens
  misc_RNA (1)...(19): siRNA sense strand
gcuauuggaccuuacuaug

SEQ ID NO: 716480 - RNA, 19 nt, Homo sapiens
  misc_RNA (1)...(19): siRNA sense strand
cagcggauccaccagcuuu

SEQ ID NO: 716481 - RNA, 19 nt, Homo sapiens
  misc_RNA (1)...(19): siRNA sense strand
cuauuggaccuuacuauga

SEQ ID NO: 716482 - RNA, 19 nt, Homo sapiens
  misc_RNA (1)...(19): siRNA sense strand
caaacuucauccuucagau

SEQ ID NO: 716483 - RNA, 19 nt, Homo sapiens
  misc_RNA (1)...(19): siRNA sense strand
gagaugcaacagcagauau

SEQ ID NO: 716484 - RNA, 19 nt, Homo sapiens
  misc_RNA (1)...(19): siRNA sense strand
gguauucacggacuggauu

SEQ ID NO: 716485 - RNA, 19 nt, Homo sapiens
  misc_RNA (1)...(19): siRNA sense strand
gacuggauuuaucgacaaa

SEQ ID NO: 716486 - RNA, 19 nt, Homo sapiens
  misc_RNA (1)...(19): siRNA sense strand
ggaaguucaugggcagcaa

SEQ ID NO: 716487 - RNA, 19 nt, Homo sapiens
  misc_RNA (1)...(19): siRNA sense strand
gccaaggugcuucucauug

SEQ ID NO: 716488 - RNA, 19 nt, Homo sapiens
  misc_RNA (1)...(19): siRNA sense strand
caaauuaugacuccaagac

SEQ ID NO: 716489 - RNA, 19 nt, Homo sapiens
  misc_RNA (1)...(19): siRNA sense strand
ccggcaaugucgauaucua

SEQ ID NO: 716490 - RNA, 19 nt, Homo sapiens
  misc_RNA (1)...(19): siRNA sense strand
agaaagggaagaccucaga

SEQ ID NO: 716491 - RNA, 19 nt, Homo sapiens
  misc_RNA (1)...(19): siRNA sense strand
ggagccggauaccaaguag

SEQ ID NO: 716492 - RNA, 19 nt, Homo sapiens
  misc_RNA (1)...(19): siRNA sense strand
ccucaaagacuaagaaagc

SEQ ID NO: 716493 - RNA, 19 nt, Homo sapiens
  misc_RNA (1)...(19): siRNA sense strand
agugaugccuguucuucaa

SEQ ID NO: 716494 - RNA, 19 nt, Homo sapiens
  misc_RNA (1)...(19): siRNA sense strand
ccgcuggccuacucuggaa

SEQ ID NO: 716495 - RNA, 19 nt, Homo sapiens
  misc_RNA (1)...(19): siRNA sense strand
gacgagaaucgguguguuc

SEQ ID NO: 716496 - RNA, 19 nt, Homo sapiens
  misc_RNA (1)...(19): siRNA sense strand
aaugagggcagacggcuaa

SEQ ID NO: 716497 - RNA, 19 nt, Homo sapiens
  misc_RNA (1)...(19): siRNA sense strand
ccaaacuucauccuucaga

SEQ ID NO: 716498 - RNA, 19 nt, Homo sapiens
  misc_RNA (1)...(19): siRNA sense strand
acgggaaugugaugguauu

SEQ ID NO: 716499 - RNA, 19 nt, Homo sapiens
  misc_RNA (1)...(19): siRNA sense strand
cuauggagccggauaccaa

SEQ ID NO: 716500 - RNA, 19 nt, Homo sapiens
  misc_RNA (1)...(19): siRNA sense strand
ugagacaaucuuucauguu

SEQ ID NO: 716501 - RNA, 19 nt, Homo sapiens
  misc_RNA (1)...(19): siRNA sense strand
ugaaaaccauggauaccaa

SEQ ID NO: 716502 - RNA, 19 nt, Homo sapiens
  misc_RNA (1)...(19): siRNA sense strand
aaucuuucauguucuaugg

SEQ ID NO: 716503 - RNA, 19 nt, Homo sapiens
  misc_RNA (1)...(19): siRNA sense strand
ccaccagcuuuaugaaacu

SEQ ID NO: 716504 - RNA, 19 nt, Homo sapiens
  misc_RNA (1)...(19): siRNA sense strand
gauccaccagcuuuaugaa

SEQ ID NO: 716505 - RNA, 19 nt, Homo sapiens
  misc_RNA (1)...(19): siRNA sense strand
ccagcuuuaugaaacugaa

SEQ ID NO: 716506 - RNA, 19 nt, Homo sapiens
  misc_RNA (1)...(19): siRNA sense strand
acauugcgcugaugaagcu

SEQ ID NO: 716507 - RNA, 19 nt, Homo sapiens
  misc_RNA (1)...(19): siRNA sense strand
uugagacaaucuuucaugu

SEQ ID NO: 716508 - RNA, 19 nt, Homo sapiens
  misc_RNA (1)...(19): siRNA sense strand
gcccaacccaggcaugaug

SEQ ID NO: 716509 - RNA, 19 nt, Homo sapiens
  misc_RNA (1)...(19): siRNA sense strand
ggccucuggucacuucgaa

SEQ ID NO: 716510 - RNA, 19 nt, Homo sapiens
  misc_RNA (1)...(19): siRNA sense strand
gggacagugugcaccucaa

SEQ ID NO: 716511 - RNA, 19 nt, Homo sapiens
  misc_RNA (1)...(19): siRNA sense strand
gcaacagcagauaugucua

SEQ ID NO: 716512 - RNA, 19 nt, Homo sapiens
  misc_RNA (1)...(19): siRNA sense strand
ucauugagacacagagaug

SEQ ID NO: 716513 - RNA, 19 nt, Homo sapiens
  misc_RNA (1)...(19): siRNA sense strand
ucaacgaccuagugaaacc

SEQ ID NO: 716514 - RNA, 19 nt, Homo sapiens
  misc_RNA (1)...(19): siRNA sense strand
gcauccggcucaguacuac

SEQ ID NO: 716515 - RNA, 19 nt, Homo sapiens
  misc_RNA (1)...(19): siRNA sense strand
acagugugcaccucaaaga

SEQ ID NO: 716516 - RNA, 19 nt, Homo sapiens
  misc_RNA (1)...(19): siRNA sense strand
gugcuccaacucugggaua

SEQ ID NO: 716517 - RNA, 19 nt, Homo sapiens
  misc_RNA (1)...(19): siRNA sense strand
guauucacggacuggauuu

SEQ ID NO: 716518 - RNA, 19 nt, Homo sapiens
  misc_RNA (1)...(19): siRNA sense strand
agagaugcaacagcagaua

SEQ ID NO: 716519 - RNA, 19 nt, Homo sapiens
  misc_RNA (1)...(19): siRNA sense strand
gaacgcugccaaggugcuu

SEQ ID NO: 716520 - RNA, 19 nt, Homo sapiens
  misc_RNA (1)...(19): siRNA sense strand
cggcaaugucgauaucuau

SEQ ID NO: 716521 - RNA, 19 nt, Homo sapiens
  misc_RNA (1)...(19): siRNA sense strand
cuacggaccaaacuucauc

SEQ ID NO: 716522 - RNA, 19 nt, Homo sapiens
  misc_RNA (1)...(19): siRNA sense strand
gggacaugggcuauaagaa

SEQ ID NO: 716523 - RNA, 19 nt, Homo sapiens
  misc_RNA (1)...(19): siRNA sense strand
gauacaagcugggguucug

SEQ ID NO: 716524 - RNA, 19 nt, Homo sapiens
  misc_RNA (1)...(19): siRNA sense strand
agacaaucuuucauguucu

SEQ ID NO: 716525 - RNA, 19 nt, Homo sapiens
  misc_RNA (1)...(19): siRNA sense strand
gugguuucuuuacgcugua

SEQ ID NO: 716526 - RNA, 19 nt, Homo sapiens
  misc_RNA (1)...(19): siRNA sense strand
caaggaauaguggaugaca

SEQ ID NO: 716527 - RNA, 19 nt, Homo sapiens
  misc_RNA (1)...(19): siRNA sense strand
uuacucuagccaaggaaua

SEQ ID NO: 716528 - RNA, 19 nt, Homo sapiens
  misc_RNA (1)...(19): siRNA sense strand
ggaaacaggccgagaagaa

SEQ ID NO: 716529 - RNA, 19 nt, Homo sapiens
  misc_RNA (1)...(19): siRNA sense strand
caucguggcuaaacaggua

SEQ ID NO: 716530 - RNA, 19 nt, Homo sapiens
  misc_RNA (1)...(19): siRNA sense strand
gcaagcggaugaacaccaa

SEQ ID NO: 716531 - RNA, 19 nt, Homo sapiens
  misc_RNA (1)...(19): siRNA sense strand
gaaacaaguugaaguaccu

SEQ ID NO: 716532 - RNA, 19 nt, Homo sapiens
  misc_RNA (1)...(19): siRNA sense strand
ggaaagagaaagccaagau

SEQ ID NO: 716533 - RNA, 19 nt, Homo sapiens
  misc_RNA (1)...(19): siRNA sense strand
gugaaggcaucaacauuuc

SEQ ID NO: 716534 - RNA, 19 nt, Homo sapiens
  misc_RNA (1)...(19): siRNA sense strand
acagaaacaaguugaagua

SEQ ID NO: 716535 - RNA, 19 nt, Homo sapiens
  misc_RNA (1)...(19): siRNA sense strand
gaaagagaaagccaagauc

SEQ ID NO: 716536 - RNA, 19 nt, Homo sapiens
  misc_RNA (1)...(19): siRNA sense strand
gaggagaagaggaaagaga

SEQ ID NO: 716537 - RNA, 19 nt, Homo sapiens
  misc_RNA (1)...(19): siRNA sense strand
ggagaagaggaaagagaaa

SEQ ID NO: 716538 - RNA, 19 nt, Homo sapiens
  misc_RNA (1)...(19): siRNA sense strand
ugugaaggcaucaacauuu

SEQ ID NO: 716539 - RNA, 19 nt, Homo sapiens
  misc_RNA (1)...(19): siRNA sense strand
gaagaagaaacagcucaug

SEQ ID NO: 716540 - RNA, 19 nt, Homo sapiens
  misc_RNA (1)...(19): siRNA sense strand
ugaaguaccuggcuuuccu

SEQ ID NO: 716541 - RNA, 19 nt, Homo sapiens
  misc_RNA (1)...(19): siRNA sense strand
cgucugaagccuacaagaa

SEQ ID NO: 716542 - RNA, 19 nt, Homo sapiens
  misc_RNA (1)...(19): siRNA sense strand
gaaacaggccgagaagaac

SEQ ID NO: 716543 - RNA, 19 nt, Homo sapiens
  misc_RNA (1)...(19): siRNA sense strand
aagaagaaacagcucauga

SEQ ID NO: 716544 - RNA, 19 nt, Homo sapiens
  misc_RNA (1)...(19): siRNA sense strand
gucugaagccuacaagaaa

SEQ ID NO: 716545 - RNA, 19 nt, Homo sapiens
  misc_RNA (1)...(19): siRNA sense strand
gaaggcaucaacauuucug

SEQ ID NO: 716546 - RNA, 19 nt, Homo sapiens
  misc_RNA (1)...(19): siRNA sense strand
gaaguaccaggcagugaca

SEQ ID NO: 716547 - RNA, 19 nt, Homo sapiens
  misc_RNA (1)...(19): siRNA sense strand
gcucaugaggcuacggaaa

SEQ ID NO: 716548 - RNA, 19 nt, Homo sapiens
  misc_RNA (1)...(19): siRNA sense strand
gaagccuacaagaaaguuu

SEQ ID NO: 716549 - RNA, 19 nt, Homo sapiens
  misc_RNA (1)...(19): siRNA sense strand
ggaagaagaaacagcucau

SEQ ID NO: 716550 - RNA, 19 nt, Homo sapiens
  misc_RNA (1)...(19): siRNA sense strand
gagaagaggaaagagaaag

SEQ ID NO: 716551 - RNA, 19 nt, Homo sapiens
  misc_RNA (1)...(19): siRNA sense strand
uacaagaaaguuugccuau

SEQ ID NO: 716552 - RNA, 19 nt, Homo sapiens
  misc_RNA (1)...(19): siRNA sense strand
ucugaagccuacaagaaag

SEQ ID NO: 716553 - RNA, 19 nt, Homo sapiens
  misc_RNA (1)...(19): siRNA sense strand
ucaugaggcuacggaaaca

SEQ ID NO: 716554 - RNA, 19 nt, Homo sapiens
  misc_RNA (1)...(19): siRNA sense strand
agaagaaacagcucaugag

SEQ ID NO: 716555 - RNA, 19 nt, Homo sapiens
  misc_RNA (1)...(19): siRNA sense strand
aggagaagaggaaagagaa

SEQ ID NO: 716556 - RNA, 19 nt, Homo sapiens
  misc_RNA (1)...(19): siRNA sense strand
caagagaucugccauccua

SEQ ID NO: 716557 - RNA, 19 nt, Homo sapiens
  misc_RNA (1)...(19): siRNA sense strand
agaaauacauggaguuuga

SEQ ID NO: 716558 - RNA, 19 nt, Homo sapiens
  misc_RNA (1)...(19): siRNA sense strand
uaauggaaauggcgauauu

SEQ ID NO: 716559 - RNA, 19 nt, Homo sapiens
  misc_RNA (1)...(19): siRNA sense strand
ccaagaaagcuaucucuga

SEQ ID NO: 716560 - RNA, 19 nt, Homo sapiens
  misc_RNA (1)...(19): siRNA sense strand
agaaagcuaucucugaguu

SEQ ID NO: 716561 - RNA, 19 nt, Homo sapiens
  misc_RNA (1)...(19): siRNA sense strand
ugaaacgaaugcuggagaa

SEQ ID NO: 716562 - RNA, 19 nt, Homo sapiens
  misc_RNA (1)...(19): siRNA sense strand
acauggaguuugaccuuaa

SEQ ID NO: 716563 - RNA, 19 nt, Homo sapiens
  misc_RNA (1)...(19): siRNA sense strand
gauaucaugucccugaaac

SEQ ID NO: 716564 - RNA, 19 nt, Homo sapiens
  misc_RNA (1)...(19): siRNA sense strand
agacucaccuagagcuaaa

SEQ ID NO: 716565 - RNA, 19 nt, Homo sapiens
  misc_RNA (1)...(19): siRNA sense strand
accuagagcuaaagaaauu

SEQ ID NO: 716566 - RNA, 19 nt, Homo sapiens
  misc_RNA (1)...(19): siRNA sense strand
ucaccuagagcuaaagaaa

SEQ ID NO: 716567 - RNA, 19 nt, Homo sapiens
  misc_RNA (1)...(19): siRNA sense strand
gaguuugaccuuaauggaa

SEQ ID NO: 716568 - RNA, 19 nt, Homo sapiens
  misc_RNA (1)...(19): siRNA sense strand
uacauggaguuugaccuua

SEQ ID NO: 716569 - RNA, 19 nt, Homo sapiens
  misc_RNA (1)...(19): siRNA sense strand
gaaagcuaucucugaguug

SEQ ID NO: 716570 - RNA, 19 nt, Homo sapiens
  misc_RNA (1)...(19): siRNA sense strand
gaaacgaaugcuggagaaa

SEQ ID NO: 716571 - RNA, 19 nt, Homo sapiens
  misc_RNA (1)...(19): siRNA sense strand
ggaguuugaccuuaaugga

SEQ ID NO: 716572 - RNA, 19 nt, Homo sapiens
  misc_RNA (1)...(19): siRNA sense strand
aguuugaccuuaauggaaa

SEQ ID NO: 716573 - RNA, 19 nt, Homo sapiens
  misc_RNA (1)...(19): siRNA sense strand
ucaugucccugaaacgaau

SEQ ID NO: 716574 - RNA, 19 nt, Homo sapiens
  misc_RNA (1)...(19): siRNA sense strand
cagcuacccugacuuucuc

SEQ ID NO: 716575 - RNA, 19 nt, Homo sapiens
  misc_RNA (1)...(19): siRNA sense strand
gagaaauacauggaguuug

SEQ ID NO: 716576 - RNA, 19 nt, Homo sapiens
  misc_RNA (1)...(19): siRNA sense strand
agagaaauacauggaguuu

SEQ ID NO: 716577 - RNA, 19 nt, Homo sapiens
  misc_RNA (1)...(19): siRNA sense strand
ggaugaugcugggcaagag

SEQ ID NO: 716578 - RNA, 19 nt, Homo sapiens
  misc_RNA (1)...(19): siRNA sense strand
cauggaguuugaccuuaau

SEQ ID NO: 716579 - RNA, 19 nt, Homo sapiens
  misc_RNA (1)...(19): siRNA sense strand
caagacucaccuagagcua

SEQ ID NO: 716580 - RNA, 19 nt, Homo sapiens
  misc_RNA (1)...(19): siRNA sense strand
agagaucugccauccuaaa

SEQ ID NO: 716581 - RNA, 19 nt, Homo sapiens
  misc_RNA (1)...(19): siRNA sense strand
cgaaugcuggagaaacuug

SEQ ID NO: 716582 - RNA, 19 nt, Homo sapiens
  misc_RNA (1)...(19): siRNA sense strand
gaugaugcugggcaagaga

SEQ ID NO: 716583 - RNA, 19 nt, Homo sapiens
  misc_RNA (1)...(19): siRNA sense strand
uaucaugucccugaaacga

SEQ ID NO: 716584 - RNA, 19 nt, Homo sapiens
  misc_RNA (1)...(19): siRNA sense strand
aacgaaugcuggagaaacu

SEQ ID NO: 716585 - RNA, 19 nt, Homo sapiens
  misc_RNA (1)...(19): siRNA sense strand
auacauggaguuugaccuu

SEQ ID NO: 716586 - RNA, 19 nt, Homo sapiens
  misc_RNA (1)...(19): siRNA sense strand
caagagaucugccauccua

SEQ ID NO: 716587 - RNA, 19 nt, Homo sapiens
  misc_RNA (1)...(19): siRNA sense strand
uaauggaaauggcgauauu

SEQ ID NO: 716588 - RNA, 19 nt, Homo sapiens
  misc_RNA (1)...(19): siRNA sense strand
ugaaacgaaugcuggagaa

SEQ ID NO: 716589 - RNA, 19 nt, Homo sapiens
  misc_RNA (1)...(19): siRNA sense strand
gauaucaugucccugaaac

SEQ ID NO: 716590 - RNA, 19 nt, Homo sapiens
  misc_RNA (1)...(19): siRNA sense strand
agacucaccuagagcuaaa

SEQ ID NO: 716591 - RNA, 19 nt, Homo sapiens
  misc_RNA (1)...(19): siRNA sense strand
accuagagcuaaagaaauu

SEQ ID NO: 716592 - RNA, 19 nt, Homo sapiens
  misc_RNA (1)...(19): siRNA sense strand
ucaccuagagcuaaagaaa

SEQ ID NO: 716593 - RNA, 19 nt, Homo sapiens
  misc_RNA (1)...(19): siRNA sense strand
gaguuugaccuuaauggaa

SEQ ID NO: 716594 - RNA, 19 nt, Homo sapiens
  misc_RNA (1)...(19): siRNA sense strand
gaaacgaaugcuggagaaa

SEQ ID NO: 716595 - RNA, 19 nt, Homo sapiens
  misc_RNA (1)...(19): siRNA sense strand
aguuugaccuuaauggaaa

SEQ ID NO: 716596 - RNA, 19 nt, Homo sapiens
  misc_RNA (1)...(19): siRNA sense strand
ggaguuugaccuuaaugga

SEQ ID NO: 716597 - RNA, 19 nt, Homo sapiens
  misc_RNA (1)...(19): siRNA sense strand
ucaugucccugaaacgaau

SEQ ID NO: 716598 - RNA, 19 nt, Homo sapiens
  misc_RNA (1)...(19): siRNA sense strand
cagcuacccugacuuucuc

SEQ ID NO: 716599 - RNA, 19 nt, Homo sapiens
  misc_RNA (1)...(19): siRNA sense strand
ggaugaugcugggcaagag

SEQ ID NO: 716600 - RNA, 19 nt, Homo sapiens
  misc_RNA (1)...(19): siRNA sense strand
caagacucaccuagagcua

SEQ ID NO: 716601 - RNA, 19 nt, Homo sapiens
  misc_RNA (1)...(19): siRNA sense strand
agagaucugccauccuaaa

SEQ ID NO: 716602 - RNA, 19 nt, Homo sapiens
  misc_RNA (1)...(19): siRNA sense strand
cgaaugcuggagaaacuug

SEQ ID NO: 716603 - RNA, 19 nt, Homo sapiens
  misc_RNA (1)...(19): siRNA sense strand
gaugaugcugggcaagaga

SEQ ID NO: 716604 - RNA, 19 nt, Homo sapiens
  misc_RNA (1)...(19): siRNA sense strand
uaucaugucccugaaacga

SEQ ID NO: 716605 - RNA, 19 nt, Homo sapiens
  misc_RNA (1)...(19): siRNA sense strand
aacgaaugcuggagaaacu

SEQ ID NO: 716606 - RNA, 19 nt, Homo sapiens
  misc_RNA (1)...(19): siRNA sense strand
caagagaucugccauccua

SEQ ID NO: 716607 - RNA, 19 nt, Homo sapiens
  misc_RNA (1)...(19): siRNA sense strand
uaauggaaauggcgauauu

SEQ ID NO: 716608 - RNA, 19 nt, Homo sapiens
  misc_RNA (1)...(19): siRNA sense strand
ccaagaaagcuaucucuga

SEQ ID NO: 716609 - RNA, 19 nt, Homo sapiens
  misc_RNA (1)...(19): siRNA sense strand
agaaagcuaucucugaguu

SEQ ID NO: 716610 - RNA, 19 nt, Homo sapiens
  misc_RNA (1)...(19): siRNA sense strand
ugaaacgaaugcuggagaa

SEQ ID NO: 716611 - RNA, 19 nt, Homo sapiens
  misc_RNA (1)...(19): siRNA sense strand
gauaucaugucccugaaac

SEQ ID NO: 716612 - RNA, 19 nt, Homo sapiens
  misc_RNA (1)...(19): siRNA sense strand
agacucaccuagagcuaaa

SEQ ID NO: 716613 - RNA, 19 nt, Homo sapiens
  misc_RNA (1)...(19): siRNA sense strand
accuagagcuaaagaaauu

SEQ ID NO: 716614 - RNA, 19 nt, Homo sapiens
  misc_RNA (1)...(19): siRNA sense strand
ucaccuagagcuaaagaaa

SEQ ID NO: 716615 - RNA, 19 nt, Homo sapiens
  misc_RNA (1)...(19): siRNA sense strand
gaguuugaccuuaauggaa

SEQ ID NO: 716616 - RNA, 19 nt, Homo sapiens
  misc_RNA (1)...(19): siRNA sense strand
gaaacgaaugcuggagaaa

SEQ ID NO: 716617 - RNA, 19 nt, Homo sapiens
  misc_RNA (1)...(19): siRNA sense strand
gaaagcuaucucugaguug

SEQ ID NO: 716618 - RNA, 19 nt, Homo sapiens
  misc_RNA (1)...(19): siRNA sense strand
ggaguuugaccuuaaugga

SEQ ID NO: 716619 - RNA, 19 nt, Homo sapiens
  misc_RNA (1)...(19): siRNA sense strand
aguuugaccuuaauggaaa

SEQ ID NO: 716620 - RNA, 19 nt, Homo sapiens
  misc_RNA (1)...(19): siRNA sense strand
ucaugucccugaaacgaau

SEQ ID NO: 716621 - RNA, 19 nt, Homo sapiens
  misc_RNA (1)...(19): siRNA sense strand
cagcuacccugacuuucuc

SEQ ID NO: 716622 - RNA, 19 nt, Homo sapiens
  misc_RNA (1)...(19): siRNA sense strand
ggaugaugcugggcaagag

SEQ ID NO: 716623 - RNA, 19 nt, Homo sapiens
  misc_RNA (1)...(19): siRNA sense strand
caagacucaccuagagcua

SEQ ID NO: 716624 - RNA, 19 nt, Homo sapiens
  misc_RNA (1)...(19): siRNA sense strand
agagaucugccauccuaaa

SEQ ID NO: 716625 - RNA, 19 nt, Homo sapiens
  misc_RNA (1)...(19): siRNA sense strand
cgaaugcuggagaaacuug

SEQ ID NO: 716626 - RNA, 19 nt, Homo sapiens
  misc_RNA (1)...(19): siRNA sense strand
gaugaugcugggcaagaga

SEQ ID NO: 716627 - RNA, 19 nt, Homo sapiens
  misc_RNA (1)...(19): siRNA sense strand
uaucaugucccugaaacga

SEQ ID NO: 716628 - RNA, 19 nt, Homo sapiens
  misc_RNA (1)...(19): siRNA sense strand
aacgaaugcuggagaaacu

SEQ ID NO: 716629 - RNA, 19 nt, Homo sapiens
  misc_RNA (1)...(19): siRNA sense strand
gcaagucgcuccugucauu

SEQ ID NO: 716630 - RNA, 19 nt, Homo sapiens
  misc_RNA (1)...(19): siRNA sense strand
gcagcaagccgacaucaua

SEQ ID NO: 716631 - RNA, 19 nt, Homo sapiens
  misc_RNA (1)...(19): siRNA sense strand
ggacagucgugaucuuuga

SEQ ID NO: 716632 - RNA, 19 nt, Homo sapiens
  misc_RNA (1)...(19): siRNA sense strand
gaagaugugugaagaaucg

SEQ ID NO: 716633 - RNA, 19 nt, Homo sapiens
  misc_RNA (1)...(19): siRNA sense strand
gagggaaggugcugagcua

SEQ ID NO: 716634 - RNA, 19 nt, Homo sapiens
  misc_RNA (1)...(19): siRNA sense strand
gagaagaugugugaagaau

SEQ ID NO: 716635 - RNA, 19 nt, Homo sapiens
  misc_RNA (1)...(19): siRNA sense strand
ccagggagcuacaucuuug

SEQ ID NO: 716636 - RNA, 19 nt, Homo sapiens
  misc_RNA (1)...(19): siRNA sense strand
gaccaucagugcuuacuau

SEQ ID NO: 716637 - RNA, 19 nt, Homo sapiens
  misc_RNA (1)...(19): siRNA sense strand
gaauggccguggugugauu

SEQ ID NO: 716638 - RNA, 19 nt, Homo sapiens
  misc_RNA (1)...(19): siRNA sense strand
gcagagcacacaacauuga

SEQ ID NO: 716639 - RNA, 19 nt, Homo sapiens
  misc_RNA (1)...(19): siRNA sense strand
ucacacaggucaucaacga

SEQ ID NO: 716640 - RNA, 19 nt, Homo sapiens
  misc_RNA (1)...(19): siRNA sense strand
gagaguaaccaucuacaga

SEQ ID NO: 716641 - RNA, 19 nt, Homo sapiens
  misc_RNA (1)...(19): siRNA sense strand
ugaagaaacaagagaguaa

SEQ ID NO: 716642 - RNA, 19 nt, Homo sapiens
  misc_RNA (1)...(19): siRNA sense strand
caggguguaugacaacuuu

SEQ ID NO: 716643 - RNA, 19 nt, Homo sapiens
  misc_RNA (1)...(19): siRNA sense strand
gcacagguucagcauguuu

SEQ ID NO: 716644 - RNA, 19 nt, Homo sapiens
  misc_RNA (1)...(19): siRNA sense strand
ggacgaggcuguggcuauc

SEQ ID NO: 716645 - RNA, 19 nt, Homo sapiens
  misc_RNA (1)...(19): siRNA sense strand
ugaagaaucggcauccuuu

SEQ ID NO: 716646 - RNA, 19 nt, Homo sapiens
  misc_RNA (1)...(19): siRNA sense strand
uugcaaagcugaagaugau

SEQ ID NO: 716647 - RNA, 19 nt, Homo sapiens
  misc_RNA (1)...(19): siRNA sense strand
ggaaggugcugagcuacug

SEQ ID NO: 716648 - RNA, 19 nt, Homo sapiens
  misc_RNA (1)...(19): siRNA sense strand
ccgcagagcacacaacauu

SEQ ID NO: 716649 - RNA, 19 nt, Homo sapiens
  misc_RNA (1)...(19): siRNA sense strand
gcccaguucuuccguguug

SEQ ID NO: 716650 - RNA, 19 nt, Homo sapiens
  misc_RNA (1)...(19): siRNA sense strand
ggaaggcucugggcaacau

SEQ ID NO: 716651 - RNA, 19 nt, Homo sapiens
  misc_RNA (1)...(19): siRNA sense strand
caucagugcuuacuaugca

SEQ ID NO: 716652 - RNA, 19 nt, Homo sapiens
  misc_RNA (1)...(19): siRNA sense strand
gggccaagcucuucauggu

SEQ ID NO: 716653 - RNA, 19 nt, Homo sapiens
  misc_RNA (1)...(19): siRNA sense strand
gggcuggacuucucagaca

SEQ ID NO: 716654 - RNA, 19 nt, Homo sapiens
  misc_RNA (1)...(19): siRNA sense strand
acacggacaucccaaagau

SEQ ID NO: 716655 - RNA, 19 nt, Homo sapiens
  misc_RNA (1)...(19): siRNA sense strand
cuacaucuuugagcuguuu

SEQ ID NO: 716656 - RNA, 19 nt, Homo sapiens
  misc_RNA (1)...(19): siRNA sense strand
ggacaucccaaagauuauu

SEQ ID NO: 716657 - RNA, 19 nt, Homo sapiens
  misc_RNA (1)...(19): siRNA sense strand
gaccacagguucgccuuug

SEQ ID NO: 716658 - RNA, 19 nt, Homo sapiens
  misc_RNA (1)...(19): siRNA sense strand
gggaagacccagagcaaga

SEQ ID NO: 716659 - RNA, 19 nt, Homo sapiens
  misc_RNA (1)...(19): siRNA sense strand
gcaagccgacaucauauuc

SEQ ID NO: 716660 - RNA, 19 nt, Homo sapiens
  misc_RNA (1)...(19): siRNA sense strand
ggacagggccaagcucuuc

SEQ ID NO: 716661 - RNA, 19 nt, Homo sapiens
  misc_RNA (1)...(19): siRNA sense strand
ccuaugggcuccugaucuu

SEQ ID NO: 716662 - RNA, 19 nt, Homo sapiens
  misc_RNA (1)...(19): siRNA sense strand
gacauuauccagauugugu

SEQ ID NO: 716663 - RNA, 19 nt, Homo sapiens
  misc_RNA (1)...(19): siRNA sense strand
ggacuacggagcugucuuc

SEQ ID NO: 716664 - RNA, 19 nt, Homo sapiens
  misc_RNA (1)...(19): siRNA sense strand
ggagaagaugugugaagaa

SEQ ID NO: 716665 - RNA, 19 nt, Homo sapiens
  misc_RNA (1)...(19): siRNA sense strand
gagcugucuuccucuguga

SEQ ID NO: 716666 - RNA, 19 nt, Homo sapiens
  misc_RNA (1)...(19): siRNA sense strand
acggacaucccaaagauua

SEQ ID NO: 716667 - RNA, 19 nt, Homo sapiens
  misc_RNA (1)...(19): siRNA sense strand
ggacuucucagacacgaau

SEQ ID NO: 716668 - RNA, 19 nt, Homo sapiens
  misc_RNA (1)...(19): siRNA sense strand
ggagaacccacacaucauc

SEQ ID NO: 716669 - RNA, 19 nt, Homo sapiens
  misc_RNA (1)...(19): siRNA sense strand
ugaauggugugaccguaga

SEQ ID NO: 716670 - RNA, 19 nt, Homo sapiens
  misc_RNA (1)...(19): siRNA sense strand
gaucucguccuuccuuaga

SEQ ID NO: 716671 - RNA, 19 nt, Homo sapiens
  misc_RNA (1)...(19): siRNA sense strand
gaagcuggcggacauuauc

SEQ ID NO: 716672 - RNA, 19 nt, Homo sapiens
  misc_RNA (1)...(19): siRNA sense strand
acaagagaguaaccaucua

SEQ ID NO: 716673 - RNA, 19 nt, Homo sapiens
  misc_RNA (1)...(19): siRNA sense strand
gcccagaucacguuucaga

SEQ ID NO: 716674 - RNA, 19 nt, Homo sapiens
  misc_RNA (1)...(19): siRNA sense strand
gaccguagacuucccuuuc

SEQ ID NO: 716675 - RNA, 19 nt, Homo sapiens
  misc_RNA (1)...(19): siRNA sense strand
caagaucucguccuuccuu

SEQ ID NO: 716676 - RNA, 19 nt, Homo sapiens
  misc_RNA (1)...(19): siRNA sense strand
acaaggugcuggcuguguu

SEQ ID NO: 716677 - RNA, 19 nt, Homo sapiens
  misc_RNA (1)...(19): siRNA sense strand
ccaaggcuucuaccaguuu

SEQ ID NO: 716678 - RNA, 19 nt, Homo sapiens
  misc_RNA (1)...(19): siRNA sense strand
ccaagauaguccugaaugg

SEQ ID NO: 716679 - RNA, 19 nt, Homo sapiens
  misc_RNA (1)...(19): siRNA sense strand
gaaacaagagaguaaccau

SEQ ID NO: 716680 - RNA, 19 nt, Homo sapiens
  misc_RNA (1)...(19): siRNA sense strand
gaagaaucggcauccuuug

SEQ ID NO: 716681 - RNA, 19 nt, Homo sapiens
  misc_RNA (1)...(19): siRNA sense strand
uggagaagaugugugaaga

SEQ ID NO: 716682 - RNA, 19 nt, Homo sapiens
  misc_RNA (1)...(19): siRNA sense strand
ccaagguccuggaaugucu

SEQ ID NO: 716683 - RNA, 19 nt, Homo sapiens
  misc_RNA (1)...(19): siRNA sense strand
uauucaugccguacaauua

SEQ ID NO: 716684 - RNA, 19 nt, Homo sapiens
  misc_RNA (1)...(19): siRNA sense strand
ccgagaccaucagugcuua

SEQ ID NO: 716685 - RNA, 19 nt, Homo sapiens
  misc_RNA (1)...(19): siRNA sense strand
gagcuccgcguuugacaga

SEQ ID NO: 716686 - RNA, 19 nt, Homo sapiens
  misc_RNA (1)...(19): siRNA sense strand
acauggagcuggaagacau

SEQ ID NO: 716687 - RNA, 19 nt, Homo sapiens
  misc_RNA (1)...(19): siRNA sense strand
cugcacagguucagcaugu

SEQ ID NO: 716688 - RNA, 19 nt, Homo sapiens
  misc_RNA (1)...(19): siRNA sense strand
acaaaugccaacaggagua

SEQ ID NO: 716689 - RNA, 19 nt, Homo sapiens
  misc_RNA (1)...(19): siRNA sense strand
caguugagcuccgcguuug

SEQ ID NO: 716690 - RNA, 19 nt, Homo sapiens
  misc_RNA (1)...(19): siRNA sense strand
ggccaucgaugcuguugag

SEQ ID NO: 716691 - RNA, 19 nt, Homo sapiens
  misc_RNA (1)...(19): siRNA sense strand
agagcaagaucucguccuu

SEQ ID NO: 716692 - RNA, 19 nt, Homo sapiens
  misc_RNA (1)...(19): siRNA sense strand
gccuguguguggaguauga

SEQ ID NO: 716693 - RNA, 19 nt, Homo sapiens
  misc_RNA (1)...(19): siRNA sense strand
gaggagggaggaagaagau

SEQ ID NO: 716694 - RNA, 19 nt, Homo sapiens
  misc_RNA (1)...(19): siRNA sense strand
acacaacauugaccugaag

SEQ ID NO: 716695 - RNA, 19 nt, Homo sapiens
  misc_RNA (1)...(19): siRNA sense strand
caaggcuucuaccaguuug

SEQ ID NO: 716696 - RNA, 19 nt, Homo sapiens
  misc_RNA (1)...(19): siRNA sense strand
cuacaaggguuccgaugac

SEQ ID NO: 716697 - RNA, 19 nt, Homo sapiens
  misc_RNA (1)...(19): siRNA sense strand
caacuuuggccaugucauc

SEQ ID NO: 716698 - RNA, 19 nt, Homo sapiens
  misc_RNA (1)...(19): siRNA sense strand
gcgcugaagccgcuguuug

SEQ ID NO: 716699 - RNA, 19 nt, Homo sapiens
  misc_RNA (1)...(19): siRNA sense strand
ccuauaaggugcacaucca

SEQ ID NO: 716700 - RNA, 19 nt, Homo sapiens
  misc_RNA (1)...(19): siRNA sense strand
gaacauggagcuggaagac

SEQ ID NO: 716701 - RNA, 19 nt, Homo sapiens
  misc_RNA (1)...(19): siRNA sense strand
gugaagaaacaagagagua

SEQ ID NO: 716702 - RNA, 19 nt, Homo sapiens
  misc_RNA (1)...(19): siRNA sense strand
ggagagcccuacggguaca

SEQ ID NO: 716703 - RNA, 19 nt, Homo sapiens
  misc_RNA (1)...(19): siRNA sense strand
gggccuuacaguccuauaa

SEQ ID NO: 716704 - RNA, 19 nt, Homo sapiens
  misc_RNA (1)...(19): siRNA sense strand
cagaagcuggcggacauua

SEQ ID NO: 716705 - RNA, 19 nt, Homo sapiens
  misc_RNA (1)...(19): siRNA sense strand
gccagggagcuacaucuuu

SEQ ID NO: 716706 - RNA, 19 nt, Homo sapiens
  misc_RNA (1)...(19): siRNA sense strand
ucauauucaugccguacaa

SEQ ID NO: 716707 - RNA, 19 nt, Homo sapiens
  misc_RNA (1)...(19): siRNA sense strand
ggaagacccagagcaagau

SEQ ID NO: 716708 - RNA, 19 nt, Homo sapiens
  misc_RNA (1)...(19): siRNA sense strand
gaucgggccuugucauccu

SEQ ID NO: 716709 - RNA, 19 nt, Homo sapiens
  misc_RNA (1)...(19): siRNA sense strand
caaggguuccgaugacuuc

SEQ ID NO: 716710 - RNA, 19 nt, Homo sapiens
  misc_RNA (1)...(19): siRNA sense strand
agaugcaguuccuggauga

SEQ ID NO: 716711 - RNA, 19 nt, Homo sapiens
  misc_RNA (1)...(19): siRNA sense strand
gaucuucuucccuuccuau

SEQ ID NO: 716712 - RNA, 19 nt, Homo sapiens
  misc_RNA (1)...(19): siRNA sense strand
gcaccacugcagccagaaa

SEQ ID NO: 716713 - RNA, 19 nt, Homo sapiens
  misc_RNA (1)...(19): siRNA sense strand
gugcuggaguguucaccaa

SEQ ID NO: 716714 - RNA, 19 nt, Homo sapiens
  misc_RNA (1)...(19): siRNA sense strand
uggaagacauugcaaagcu

SEQ ID NO: 716715 - RNA, 19 nt, Homo sapiens
  misc_RNA (1)...(19): siRNA sense strand
cacacaacauugaccugaa

SEQ ID NO: 716716 - RNA, 19 nt, Homo sapiens
  misc_RNA (1)...(19): siRNA sense strand
ggagaagagccuggaguuc

SEQ ID NO: 716717 - RNA, 19 nt, Homo sapiens
  misc_RNA (1)...(19): siRNA sense strand
aagaucucguccuuccuua

SEQ ID NO: 716718 - RNA, 19 nt, Homo sapiens
  misc_RNA (1)...(19): siRNA sense strand
cagcaagccgacaucauau

SEQ ID NO: 716719 - RNA, 19 nt, Homo sapiens
  misc_RNA (1)...(19): siRNA sense strand
gacaucccaaagauuauuu

SEQ ID NO: 716720 - RNA, 19 nt, Homo sapiens
  misc_RNA (1)...(19): siRNA sense strand
gaagauggaggcgcugaag

SEQ ID NO: 716721 - RNA, 19 nt, Homo sapiens
  misc_RNA (1)...(19): siRNA sense strand
uggcggacauuauccagau

SEQ ID NO: 716722 - RNA, 19 nt, Homo sapiens
  misc_RNA (1)...(19): siRNA sense strand
aagaaucggcauccuuuga

SEQ ID NO: 716723 - RNA, 19 nt, Homo sapiens
  misc_RNA (1)...(19): siRNA sense strand
aagcccagaucacguuuca

SEQ ID NO: 716724 - RNA, 19 nt, Homo sapiens
  misc_RNA (1)...(19): siRNA sense strand
ccaguugagcuccgcguuu

SEQ ID NO: 716725 - RNA, 19 nt, Homo sapiens
  misc_RNA (1)...(19): siRNA sense strand
caagagaguaaccaucuac

SEQ ID NO: 716726 - RNA, 19 nt, Homo sapiens
  misc_RNA (1)...(19): siRNA sense strand
ccuauccugucauggagaa

SEQ ID NO: 716727 - RNA, 19 nt, Homo sapiens
  misc_RNA (1)...(19): siRNA sense strand
gcucacaacguggagaaga

SEQ ID NO: 716728 - RNA, 19 nt, Homo sapiens
  misc_RNA (1)...(19): siRNA sense strand
gcuccugucauuucuacaa

SEQ ID NO: 716729 - RNA, 19 nt, Homo sapiens
  misc_RNA (1)...(19): siRNA sense strand
gcaagucgcuccugucauu

SEQ ID NO: 716730 - RNA, 19 nt, Homo sapiens
  misc_RNA (1)...(19): siRNA sense strand
gcagcaagccgacaucaua

SEQ ID NO: 716731 - RNA, 19 nt, Homo sapiens
  misc_RNA (1)...(19): siRNA sense strand
ggacagucgugaucuuuga

SEQ ID NO: 716732 - RNA, 19 nt, Homo sapiens
  misc_RNA (1)...(19): siRNA sense strand
gaagaugugugaagaaucg

SEQ ID NO: 716733 - RNA, 19 nt, Homo sapiens
  misc_RNA (1)...(19): siRNA sense strand
gagggaaggugcugagcua

SEQ ID NO: 716734 - RNA, 19 nt, Homo sapiens
  misc_RNA (1)...(19): siRNA sense strand
gagaagaugugugaagaau

SEQ ID NO: 716735 - RNA, 19 nt, Homo sapiens
  misc_RNA (1)...(19): siRNA sense strand
ccagggagcuacaucuuug

SEQ ID NO: 716736 - RNA, 19 nt, Homo sapiens
  misc_RNA (1)...(19): siRNA sense strand
gaccaucagugcuuacuau

SEQ ID NO: 716737 - RNA, 19 nt, Homo sapiens
  misc_RNA (1)...(19): siRNA sense strand
gaauggccguggugugauu

SEQ ID NO: 716738 - RNA, 19 nt, Homo sapiens
  misc_RNA (1)...(19): siRNA sense strand
gcagagcacacaacauuga

SEQ ID NO: 716739 - RNA, 19 nt, Homo sapiens
  misc_RNA (1)...(19): siRNA sense strand
ucacacaggucaucaacga

SEQ ID NO: 716740 - RNA, 19 nt, Homo sapiens
  misc_RNA (1)...(19): siRNA sense strand
gagaguaaccaucuacaga

SEQ ID NO: 716741 - RNA, 19 nt, Homo sapiens
  misc_RNA (1)...(19): siRNA sense strand
ugaagaaacaagagaguaa

SEQ ID NO: 716742 - RNA, 19 nt, Homo sapiens
  misc_RNA (1)...(19): siRNA sense strand
caggguguaugacaacuuu

SEQ ID NO: 716743 - RNA, 19 nt, Homo sapiens
  misc_RNA (1)...(19): siRNA sense strand
gcacagguucagcauguuu

SEQ ID NO: 716744 - RNA, 19 nt, Homo sapiens
  misc_RNA (1)...(19): siRNA sense strand
ggacgaggcuguggcuauc

SEQ ID NO: 716745 - RNA, 19 nt, Homo sapiens
  misc_RNA (1)...(19): siRNA sense strand
ugaagaaucggcauccuuu

SEQ ID NO: 716746 - RNA, 19 nt, Homo sapiens
  misc_RNA (1)...(19): siRNA sense strand
uugcaaagcugaagaugau

SEQ ID NO: 716747 - RNA, 19 nt, Homo sapiens
  misc_RNA (1)...(19): siRNA sense strand
ggaaggugcugagcuacug

SEQ ID NO: 716748 - RNA, 19 nt, Homo sapiens
  misc_RNA (1)...(19): siRNA sense strand
ccgcagagcacacaacauu

SEQ ID NO: 716749 - RNA, 19 nt, Homo sapiens
  misc_RNA (1)...(19): siRNA sense strand
gcccaguucuuccguguug

SEQ ID NO: 716750 - RNA, 19 nt, Homo sapiens
  misc_RNA (1)...(19): siRNA sense strand
ggaaggcucugggcaacau

SEQ ID NO: 716751 - RNA, 19 nt, Homo sapiens
  misc_RNA (1)...(19): siRNA sense strand
caucagugcuuacuaugca

SEQ ID NO: 716752 - RNA, 19 nt, Homo sapiens
  misc_RNA (1)...(19): siRNA sense strand
gggccaagcucuucauggu

SEQ ID NO: 716753 - RNA, 19 nt, Homo sapiens
  misc_RNA (1)...(19): siRNA sense strand
gggcuggacuucucagaca

SEQ ID NO: 716754 - RNA, 19 nt, Homo sapiens
  misc_RNA (1)...(19): siRNA sense strand
acacggacaucccaaagau

SEQ ID NO: 716755 - RNA, 19 nt, Homo sapiens
  misc_RNA (1)...(19): siRNA sense strand
cuacaucuuugagcuguuu

SEQ ID NO: 716756 - RNA, 19 nt, Homo sapiens
  misc_RNA (1)...(19): siRNA sense strand
ggacaucccaaagauuauu

SEQ ID NO: 716757 - RNA, 19 nt, Homo sapiens
  misc_RNA (1)...(19): siRNA sense strand
gaccacagguucgccuuug

SEQ ID NO: 716758 - RNA, 19 nt, Homo sapiens
  misc_RNA (1)...(19): siRNA sense strand
gggaagacccagagcaaga

SEQ ID NO: 716759 - RNA, 19 nt, Homo sapiens
  misc_RNA (1)...(19): siRNA sense strand
gcaagccgacaucauauuc

SEQ ID NO: 716760 - RNA, 19 nt, Homo sapiens
  misc_RNA (1)...(19): siRNA sense strand
ggacagggccaagcucuuc

SEQ ID NO: 716761 - RNA, 19 nt, Homo sapiens
  misc_RNA (1)...(19): siRNA sense strand
ccuaugggcuccugaucuu

SEQ ID NO: 716762 - RNA, 19 nt, Homo sapiens
  misc_RNA (1)...(19): siRNA sense strand
gacauuauccagauugugu

SEQ ID NO: 716763 - RNA, 19 nt, Homo sapiens
  misc_RNA (1)...(19): siRNA sense strand
ggacuacggagcugucuuc

SEQ ID NO: 716764 - RNA, 19 nt, Homo sapiens
  misc_RNA (1)...(19): siRNA sense strand
ggagaagaugugugaagaa

SEQ ID NO: 716765 - RNA, 19 nt, Homo sapiens
  misc_RNA (1)...(19): siRNA sense strand
gagcugucuuccucuguga

SEQ ID NO: 716766 - RNA, 19 nt, Homo sapiens
  misc_RNA (1)...(19): siRNA sense strand
acggacaucccaaagauua

SEQ ID NO: 716767 - RNA, 19 nt, Homo sapiens
  misc_RNA (1)...(19): siRNA sense strand
ggacuucucagacacgaau

SEQ ID NO: 716768 - RNA, 19 nt, Homo sapiens
  misc_RNA (1)...(19): siRNA sense strand
ggagaacccacacaucauc

SEQ ID NO: 716769 - RNA, 19 nt, Homo sapiens
  misc_RNA (1)...(19): siRNA sense strand
ugaauggugugaccguaga

SEQ ID NO: 716770 - RNA, 19 nt, Homo sapiens
  misc_RNA (1)...(19): siRNA sense strand
gaucucguccuuccuuaga

SEQ ID NO: 716771 - RNA, 19 nt, Homo sapiens
  misc_RNA (1)...(19): siRNA sense strand
gaagcuggcggacauuauc

SEQ ID NO: 716772 - RNA, 19 nt, Homo sapiens
  misc_RNA (1)...(19): siRNA sense strand
acaagagaguaaccaucua

SEQ ID NO: 716773 - RNA, 19 nt, Homo sapiens
  misc_RNA (1)...(19): siRNA sense strand
gcccagaucacguuucaga

SEQ ID NO: 716774 - RNA, 19 nt, Homo sapiens
  misc_RNA (1)...(19): siRNA sense strand
gaccguagacuucccuuuc

SEQ ID NO: 716775 - RNA, 19 nt, Homo sapiens
  misc_RNA (1)...(19): siRNA sense strand
caagaucucguccuuccuu

SEQ ID NO: 716776 - RNA, 19 nt, Homo sapiens
  misc_RNA (1)...(19): siRNA sense strand
acaaggugcuggcuguguu

SEQ ID NO: 716777 - RNA, 19 nt, Homo sapiens
  misc_RNA (1)...(19): siRNA sense strand
ccaaggcuucuaccaguuu

SEQ ID NO: 716778 - RNA, 19 nt, Homo sapiens
  misc_RNA (1)...(19): siRNA sense strand
ccaagauaguccugaaugg

SEQ ID NO: 716779 - RNA, 19 nt, Homo sapiens
  misc_RNA (1)...(19): siRNA sense strand
gaaacaagagaguaaccau

SEQ ID NO: 716780 - RNA, 19 nt, Homo sapiens
  misc_RNA (1)...(19): siRNA sense strand
gaagaaucggcauccuuug

SEQ ID NO: 716781 - RNA, 19 nt, Homo sapiens
  misc_RNA (1)...(19): siRNA sense strand
uggagaagaugugugaaga

SEQ ID NO: 716782 - RNA, 19 nt, Homo sapiens
  misc_RNA (1)...(19): siRNA sense strand
ccaagguccuggaaugucu

SEQ ID NO: 716783 - RNA, 19 nt, Homo sapiens
  misc_RNA (1)...(19): siRNA sense strand
uauucaugccguacaauua

SEQ ID NO: 716784 - RNA, 19 nt, Homo sapiens
  misc_RNA (1)...(19): siRNA sense strand
ccgagaccaucagugcuua

SEQ ID NO: 716785 - RNA, 19 nt, Homo sapiens
  misc_RNA (1)...(19): siRNA sense strand
gagcuccgcguuugacaga

SEQ ID NO: 716786 - RNA, 19 nt, Homo sapiens
  misc_RNA (1)...(19): siRNA sense strand
acauggagcuggaagacau

SEQ ID NO: 716787 - RNA, 19 nt, Homo sapiens
  misc_RNA (1)...(19): siRNA sense strand
cugcacagguucagcaugu

SEQ ID NO: 716788 - RNA, 19 nt, Homo sapiens
  misc_RNA (1)...(19): siRNA sense strand
acaaaugccaacaggagua

SEQ ID NO: 716789 - RNA, 19 nt, Homo sapiens
  misc_RNA (1)...(19): siRNA sense strand
caguugagcuccgcguuug

SEQ ID NO: 716790 - RNA, 19 nt, Homo sapiens
  misc_RNA (1)...(19): siRNA sense strand
ggccaucgaugcuguugag

SEQ ID NO: 716791 - RNA, 19 nt, Homo sapiens
  misc_RNA (1)...(19): siRNA sense strand
agagcaagaucucguccuu

SEQ ID NO: 716792 - RNA, 19 nt, Homo sapiens
  misc_RNA (1)...(19): siRNA sense strand
gccuguguguggaguauga

SEQ ID NO: 716793 - RNA, 19 nt, Homo sapiens
  misc_RNA (1)...(19): siRNA sense strand
gaggagggaggaagaagau

SEQ ID NO: 716794 - RNA, 19 nt, Homo sapiens
  misc_RNA (1)...(19): siRNA sense strand
acacaacauugaccugaag

SEQ ID NO: 716795 - RNA, 19 nt, Homo sapiens
  misc_RNA (1)...(19): siRNA sense strand
caaggcuucuaccaguuug

SEQ ID NO: 716796 - RNA, 19 nt, Homo sapiens
  misc_RNA (1)...(19): siRNA sense strand
cuacaaggguuccgaugac

SEQ ID NO: 716797 - RNA, 19 nt, Homo sapiens
  misc_RNA (1)...(19): siRNA sense strand
caacuuuggccaugucauc

SEQ ID NO: 716798 - RNA, 19 nt, Homo sapiens
  misc_RNA (1)...(19): siRNA sense strand
gcgcugaagccgcuguuug

SEQ ID NO: 716799 - RNA, 19 nt, Homo sapiens
  misc_RNA (1)...(19): siRNA sense strand
ccuauaaggugcacaucca

SEQ ID NO: 716800 - RNA, 19 nt, Homo sapiens
  misc_RNA (1)...(19): siRNA sense strand
gaacauggagcuggaagac

SEQ ID NO: 716801 - RNA, 19 nt, Homo sapiens
  misc_RNA (1)...(19): siRNA sense strand
gugaagaaacaagagagua

SEQ ID NO: 716802 - RNA, 19 nt, Homo sapiens
  misc_RNA (1)...(19): siRNA sense strand
ggagagcccuacggguaca

SEQ ID NO: 716803 - RNA, 19 nt, Homo sapiens
  misc_RNA (1)...(19): siRNA sense strand
gggccuuacaguccuauaa

SEQ ID NO: 716804 - RNA, 19 nt, Homo sapiens
  misc_RNA (1)...(19): siRNA sense strand
cagaagcuggcggacauua

SEQ ID NO: 716805 - RNA, 19 nt, Homo sapiens
  misc_RNA (1)...(19): siRNA sense strand
gccagggagcuacaucuuu

SEQ ID NO: 716806 - RNA, 19 nt, Homo sapiens
  misc_RNA (1)...(19): siRNA sense strand
ucauauucaugccguacaa

SEQ ID NO: 716807 - RNA, 19 nt, Homo sapiens
  misc_RNA (1)...(19): siRNA sense strand
ggaagacccagagcaagau

SEQ ID NO: 716808 - RNA, 19 nt, Homo sapiens
  misc_RNA (1)...(19): siRNA sense strand
gaucgggccuugucauccu

SEQ ID NO: 716809 - RNA, 19 nt, Homo sapiens
  misc_RNA (1)...(19): siRNA sense strand
caaggguuccgaugacuuc

SEQ ID NO: 716810 - RNA, 19 nt, Homo sapiens
  misc_RNA (1)...(19): siRNA sense strand
agaugcaguuccuggauga

SEQ ID NO: 716811 - RNA, 19 nt, Homo sapiens
  misc_RNA (1)...(19): siRNA sense strand
gaucuucuucccuuccuau

SEQ ID NO: 716812 - RNA, 19 nt, Homo sapiens
  misc_RNA (1)...(19): siRNA sense strand
gcaccacugcagccagaaa

SEQ ID NO: 716813 - RNA, 19 nt, Homo sapiens
  misc_RNA (1)...(19): siRNA sense strand
gugcuggaguguucaccaa

SEQ ID NO: 716814 - RNA, 19 nt, Homo sapiens
  misc_RNA (1)...(19): siRNA sense strand
uggaagacauugcaaagcu

SEQ ID NO: 716815 - RNA, 19 nt, Homo sapiens
  misc_RNA (1)...(19): siRNA sense strand
cacacaacauugaccugaa

SEQ ID NO: 716816 - RNA, 19 nt, Homo sapiens
  misc_RNA (1)...(19): siRNA sense strand
ggagaagagccuggaguuc

SEQ ID NO: 716817 - RNA, 19 nt, Homo sapiens
  misc_RNA (1)...(19): siRNA sense strand
ggaagcagagcgucaugca

SEQ ID NO: 716818 - RNA, 19 nt, Homo sapiens
  misc_RNA (1)...(19): siRNA sense strand
aagaucucguccuuccuua

SEQ ID NO: 716819 - RNA, 19 nt, Homo sapiens
  misc_RNA (1)...(19): siRNA sense strand
cagcaagccgacaucauau

SEQ ID NO: 716820 - RNA, 19 nt, Homo sapiens
  misc_RNA (1)...(19): siRNA sense strand
gacaucccaaagauuauuu

SEQ ID NO: 716821 - RNA, 19 nt, Homo sapiens
  misc_RNA (1)...(19): siRNA sense strand
gaagauggaggcgcugaag

SEQ ID NO: 716822 - RNA, 19 nt, Homo sapiens
  misc_RNA (1)...(19): siRNA sense strand
uggcggacauuauccagau

SEQ ID NO: 716823 - RNA, 19 nt, Homo sapiens
  misc_RNA (1)...(19): siRNA sense strand
aagaaucggcauccuuuga

SEQ ID NO: 716824 - RNA, 19 nt, Homo sapiens
  misc_RNA (1)...(19): siRNA sense strand
aagcccagaucacguuuca

SEQ ID NO: 716825 - RNA, 19 nt, Homo sapiens
  misc_RNA (1)...(19): siRNA sense strand
ccaguugagcuccgcguuu

SEQ ID NO: 716826 - RNA, 19 nt, Homo sapiens
  misc_RNA (1)...(19): siRNA sense strand
gcuccugucauuucuacaa

SEQ ID NO: 716827 - RNA, 19 nt, Homo sapiens
  misc_RNA (1)...(19): siRNA sense strand
ccuauccugucauggagaa

SEQ ID NO: 716828 - RNA, 19 nt, Homo sapiens
  misc_RNA (1)...(19): siRNA sense strand
gcucacaacguggagaaga

SEQ ID NO: 716829 - RNA, 19 nt, Homo sapiens
  misc_RNA (1)...(19): siRNA sense strand
gcgagaagaucaccauuaa

SEQ ID NO: 716830 - RNA, 19 nt, Homo sapiens
  misc_RNA (1)...(19): siRNA sense strand
gagaagaucaccauuaaca

SEQ ID NO: 716831 - RNA, 19 nt, Homo sapiens
  misc_RNA (1)...(19): siRNA sense strand
uaacaaggacaccaaggua

SEQ ID NO: 716832 - RNA, 19 nt, Homo sapiens
  misc_RNA (1)...(19): siRNA sense strand
caacaaagaagaccacaca

SEQ ID NO: 716833 - RNA, 19 nt, Homo sapiens
  misc_RNA (1)...(19): siRNA sense strand
gaagaucaccauuaacaag

SEQ ID NO: 716834 - RNA, 19 nt, Homo sapiens
  misc_RNA (1)...(19): siRNA sense strand
gguacccaaugccuguuua

SEQ ID NO: 716835 - RNA, 19 nt, Homo sapiens
  misc_RNA (1)...(19): siRNA sense strand
ggcgagaagaucaccauua

SEQ ID NO: 716836 - RNA, 19 nt, Homo sapiens
  misc_RNA (1)...(19): siRNA sense strand
ugggaaacaucauuaaauc

SEQ ID NO: 716837 - RNA, 19 nt, Homo sapiens
  misc_RNA (1)...(19): siRNA sense strand
cccaaugccuguuuauuca

SEQ ID NO: 716838 - RNA, 19 nt, Homo sapiens
  misc_RNA (1)...(19): siRNA sense strand
acacugggaaacaucauua

SEQ ID NO: 716839 - RNA, 19 nt, Homo sapiens
  misc_RNA (1)...(19): siRNA sense strand
ggaaacaucauuaaaucac

SEQ ID NO: 716840 - RNA, 19 nt, Homo sapiens
  misc_RNA (1)...(19): siRNA sense strand
gggaaacaucauuaaauca

SEQ ID NO: 716841 - RNA, 19 nt, Homo sapiens
  misc_RNA (1)...(19): siRNA sense strand
ggacaccaagguacccaau

SEQ ID NO: 716842 - RNA, 19 nt, Homo sapiens
  misc_RNA (1)...(19): siRNA sense strand
acaccaagguacccaaugc

SEQ ID NO: 716843 - RNA, 19 nt, Homo sapiens
  misc_RNA (1)...(19): siRNA sense strand
uauucaccaucaacaaaga

SEQ ID NO: 716844 - RNA, 19 nt, Homo sapiens
  misc_RNA (1)...(19): siRNA sense strand
cugggaaacaucauuaaau

SEQ ID NO: 716845 - RNA, 19 nt, Homo sapiens
  misc_RNA (1)...(19): siRNA sense strand
agaucaccauuaacaagga

SEQ ID NO: 716846 - RNA, 19 nt, Homo sapiens
  misc_RNA (1)...(19): siRNA sense strand
acccaaugccuguuuauuc

SEQ ID NO: 716847 - RNA, 19 nt, Homo sapiens
  misc_RNA (1)...(19): siRNA sense strand
gaccacacacugggaaaca

SEQ ID NO: 716848 - RNA, 19 nt, Homo sapiens
  misc_RNA (1)...(19): siRNA sense strand
agaagaucaccauuaacaa

SEQ ID NO: 716849 - RNA, 19 nt, Homo sapiens
  misc_RNA (1)...(19): siRNA sense strand
gcgagaagaucaccauuaa

SEQ ID NO: 716850 - RNA, 19 nt, Homo sapiens
  misc_RNA (1)...(19): siRNA sense strand
gagaagaucaccauuaaca

SEQ ID NO: 716851 - RNA, 19 nt, Homo sapiens
  misc_RNA (1)...(19): siRNA sense strand
uaacaaggacaccaaggua

SEQ ID NO: 716852 - RNA, 19 nt, Homo sapiens
  misc_RNA (1)...(19): siRNA sense strand
caacaaagaagaccacaca

SEQ ID NO: 716853 - RNA, 19 nt, Homo sapiens
  misc_RNA (1)...(19): siRNA sense strand
gaagaucaccauuaacaag

SEQ ID NO: 716854 - RNA, 19 nt, Homo sapiens
  misc_RNA (1)...(19): siRNA sense strand
gguacccaaugccuguuua

SEQ ID NO: 716855 - RNA, 19 nt, Homo sapiens
  misc_RNA (1)...(19): siRNA sense strand
ggcgagaagaucaccauua

SEQ ID NO: 716856 - RNA, 19 nt, Homo sapiens
  misc_RNA (1)...(19): siRNA sense strand
ugggaaacaucauuaaauc

SEQ ID NO: 716857 - RNA, 19 nt, Homo sapiens
  misc_RNA (1)...(19): siRNA sense strand
cccaaugccuguuuauuca

SEQ ID NO: 716858 - RNA, 19 nt, Homo sapiens
  misc_RNA (1)...(19): siRNA sense strand
acacugggaaacaucauua

SEQ ID NO: 716859 - RNA, 19 nt, Homo sapiens
  misc_RNA (1)...(19): siRNA sense strand
ggaaacaucauuaaaucac

SEQ ID NO: 716860 - RNA, 19 nt, Homo sapiens
  misc_RNA (1)...(19): siRNA sense strand
gggaaacaucauuaaauca

SEQ ID NO: 716861 - RNA, 19 nt, Homo sapiens
  misc_RNA (1)...(19): siRNA sense strand
ggacaccaagguacccaau

SEQ ID NO: 716862 - RNA, 19 nt, Homo sapiens
  misc_RNA (1)...(19): siRNA sense strand
acaccaagguacccaaugc

SEQ ID NO: 716863 - RNA, 19 nt, Homo sapiens
  misc_RNA (1)...(19): siRNA sense strand
uauucaccaucaacaaaga

SEQ ID NO: 716864 - RNA, 19 nt, Homo sapiens
  misc_RNA (1)...(19): siRNA sense strand
cugggaaacaucauuaaau

SEQ ID NO: 716865 - RNA, 19 nt, Homo sapiens
  misc_RNA (1)...(19): siRNA sense strand
agaucaccauuaacaagga

SEQ ID NO: 716866 - RNA, 19 nt, Homo sapiens
  misc_RNA (1)...(19): siRNA sense strand
acccaaugccuguuuauuc

SEQ ID NO: 716867 - RNA, 19 nt, Homo sapiens
  misc_RNA (1)...(19): siRNA sense strand
gaccacacacugggaaaca

SEQ ID NO: 716868 - RNA, 19 nt, Homo sapiens
  misc_RNA (1)...(19): siRNA sense strand
agaagaucaccauuaacaa

SEQ ID NO: 716869 - RNA, 19 nt, Homo sapiens
  misc_RNA (1)...(19): siRNA sense strand
gcgagaagaucaccauuaa

SEQ ID NO: 716870 - RNA, 19 nt, Homo sapiens
  misc_RNA (1)...(19): siRNA sense strand
gagaagaucaccauuaaca

SEQ ID NO: 716871 - RNA, 19 nt, Homo sapiens
  misc_RNA (1)...(19): siRNA sense strand
uaacaaggacaccaaggua

SEQ ID NO: 716872 - RNA, 19 nt, Homo sapiens
  misc_RNA (1)...(19): siRNA sense strand
caacaaagaagaccacaca

SEQ ID NO: 716873 - RNA, 19 nt, Homo sapiens
  misc_RNA (1)...(19): siRNA sense strand
gaagaucaccauuaacaag

SEQ ID NO: 716874 - RNA, 19 nt, Homo sapiens
  misc_RNA (1)...(19): siRNA sense strand
gguacccaaugccuguuua

SEQ ID NO: 716875 - RNA, 19 nt, Homo sapiens
  misc_RNA (1)...(19): siRNA sense strand
ggcgagaagaucaccauua

SEQ ID NO: 716876 - RNA, 19 nt, Homo sapiens
  misc_RNA (1)...(19): siRNA sense strand
ugggaaacaucauuaaauc

SEQ ID NO: 716877 - RNA, 19 nt, Homo sapiens
  misc_RNA (1)...(19): siRNA sense strand
cccaaugccuguuuauuca

SEQ ID NO: 716878 - RNA, 19 nt, Homo sapiens
  misc_RNA (1)...(19): siRNA sense strand
acacugggaaacaucauua

SEQ ID NO: 716879 - RNA, 19 nt, Homo sapiens
  misc_RNA (1)...(19): siRNA sense strand
ggaaacaucauuaaaucac

SEQ ID NO: 716880 - RNA, 19 nt, Homo sapiens
  misc_RNA (1)...(19): siRNA sense strand
gggaaacaucauuaaauca

SEQ ID NO: 716881 - RNA, 19 nt, Homo sapiens
  misc_RNA (1)...(19): siRNA sense strand
ggacaccaagguacccaau

SEQ ID NO: 716882 - RNA, 19 nt, Homo sapiens
  misc_RNA (1)...(19): siRNA sense strand
acaccaagguacccaaugc

SEQ ID NO: 716883 - RNA, 19 nt, Homo sapiens
  misc_RNA (1)...(19): siRNA sense strand
uauucaccaucaacaaaga

SEQ ID NO: 716884 - RNA, 19 nt, Homo sapiens
  misc_RNA (1)...(19): siRNA sense strand
cugggaaacaucauuaaau

SEQ ID NO: 716885 - RNA, 19 nt, Homo sapiens
  misc_RNA (1)...(19): siRNA sense strand
agaucaccauuaacaagga

SEQ ID NO: 716886 - RNA, 19 nt, Homo sapiens
  misc_RNA (1)...(19): siRNA sense strand
acccaaugccuguuuauuc

SEQ ID NO: 716887 - RNA, 19 nt, Homo sapiens
  misc_RNA (1)...(19): siRNA sense strand
gaccacacacugggaaaca

SEQ ID NO: 716888 - RNA, 19 nt, Homo sapiens
  misc_RNA (1)...(19): siRNA sense strand
agaagaucaccauuaacaa

SEQ ID NO: 716889 - RNA, 19 nt, Homo sapiens
  misc_RNA (1)...(19): siRNA sense strand
gaaacgacaucgagaagaa

SEQ ID NO: 716890 - RNA, 19 nt, Homo sapiens
  misc_RNA (1)...(19): siRNA sense strand
gcaaaugucucggaaagaa

SEQ ID NO: 716891 - RNA, 19 nt, Homo sapiens
  misc_RNA (1)...(19): siRNA sense strand
gaaaacagaugaaauugug

SEQ ID NO: 716892 - RNA, 19 nt, Homo sapiens
  misc_RNA (1)...(19): siRNA sense strand
gcauggagaucacaauaag

SEQ ID NO: 716893 - RNA, 19 nt, Homo sapiens
  misc_RNA (1)...(19): siRNA sense strand
gagcaccagugaagaauca

SEQ ID NO: 716894 - RNA, 19 nt, Homo sapiens
  misc_RNA (1)...(19): siRNA sense strand
ugaaacaccugcacgacaa

SEQ ID NO: 716895 - RNA, 19 nt, Homo sapiens
  misc_RNA (1)...(19): siRNA sense strand
gaaaaggacucuuggaaag

SEQ ID NO: 716896 - RNA, 19 nt, Homo sapiens
  misc_RNA (1)...(19): siRNA sense strand
uaaagcggcugaagaugga

SEQ ID NO: 716897 - RNA, 19 nt, Homo sapiens
  misc_RNA (1)...(19): siRNA sense strand
agaaaugagugaagaugaa

SEQ ID NO: 716898 - RNA, 19 nt, Homo sapiens
  misc_RNA (1)...(19): siRNA sense strand
gagugaagaugaagaacga

SEQ ID NO: 716899 - RNA, 19 nt, Homo sapiens
  misc_RNA (1)...(19): siRNA sense strand
gcagcaacauggacaagau

SEQ ID NO: 716900 - RNA, 19 nt, Homo sapiens
  misc_RNA (1)...(19): siRNA sense strand
gaagggagcaccagugaag

SEQ ID NO: 716901 - RNA, 19 nt, Homo sapiens
  misc_RNA (1)...(19): siRNA sense strand
ggaaggaacaagaggagaa

SEQ ID NO: 716902 - RNA, 19 nt, Homo sapiens
  misc_RNA (1)...(19): siRNA sense strand
ggaguggucuacagagcaa

SEQ ID NO: 716903 - RNA, 19 nt, Homo sapiens
  misc_RNA (1)...(19): siRNA sense strand
gaagaugaagaacgagaaa

SEQ ID NO: 716904 - RNA, 19 nt, Homo sapiens
  misc_RNA (1)...(19): siRNA sense strand
gcacgaacgucggaaacga

SEQ ID NO: 716905 - RNA, 19 nt, Homo sapiens
  misc_RNA (1)...(19): siRNA sense strand
gagaagacucuauggaaga

SEQ ID NO: 716906 - RNA, 19 nt, Homo sapiens
  misc_RNA (1)...(19): siRNA sense strand
cagcaaaugucucggaaag

SEQ ID NO: 716907 - RNA, 19 nt, Homo sapiens
  misc_RNA (1)...(19): siRNA sense strand
cagaaaagaugaaaagaga

SEQ ID NO: 716908 - RNA, 19 nt, Homo sapiens
  misc_RNA (1)...(19): siRNA sense strand
gaagaaaugagugaagaug

SEQ ID NO: 716909 - RNA, 19 nt, Homo sapiens
  misc_RNA (1)...(19): siRNA sense strand
agaaguaagugaggaagaa

SEQ ID NO: 716910 - RNA, 19 nt, Homo sapiens
  misc_RNA (1)...(19): siRNA sense strand
ggaagacagaggagaagaa

SEQ ID NO: 716911 - RNA, 19 nt, Homo sapiens
  misc_RNA (1)...(19): siRNA sense strand
gaaggaacaagaggagaaa

SEQ ID NO: 716912 - RNA, 19 nt, Homo sapiens
  misc_RNA (1)...(19): siRNA sense strand
ugacagagggcgacuaugu

SEQ ID NO: 716913 - RNA, 19 nt, Homo sapiens
  misc_RNA (1)...(19): siRNA sense strand
ggagaaagcagagauaaaa

SEQ ID NO: 716914 - RNA, 19 nt, Homo sapiens
  misc_RNA (1)...(19): siRNA sense strand
gagaagaacaggauaaagc

SEQ ID NO: 716915 - RNA, 19 nt, Homo sapiens
  misc_RNA (1)...(19): siRNA sense strand
gaggagaaagcagagauaa

SEQ ID NO: 716916 - RNA, 19 nt, Homo sapiens
  misc_RNA (1)...(19): siRNA sense strand
ugaagaagcagaggaagaa

SEQ ID NO: 716917 - RNA, 19 nt, Homo sapiens
  misc_RNA (1)...(19): siRNA sense strand
gagcauuccaggagagaaa

SEQ ID NO: 716918 - RNA, 19 nt, Homo sapiens
  misc_RNA (1)...(19): siRNA sense strand
aaggagggcuucccgauca

SEQ ID NO: 716919 - RNA, 19 nt, Homo sapiens
  misc_RNA (1)...(19): siRNA sense strand
gcuucgaccucaugaacaa

SEQ ID NO: 716920 - RNA, 19 nt, Homo sapiens
  misc_RNA (1)...(19): siRNA sense strand
gaaguaagugaggaagaaa

SEQ ID NO: 716921 - RNA, 19 nt, Homo sapiens
  misc_RNA (1)...(19): siRNA sense strand
caacaucgucaccguuaga

SEQ ID NO: 716922 - RNA, 19 nt, Homo sapiens
  misc_RNA (1)...(19): siRNA sense strand
ugagggagaucaacaccau

SEQ ID NO: 716923 - RNA, 19 nt, Homo sapiens
  misc_RNA (1)...(19): siRNA sense strand
aaaggacucuuggaaagug

SEQ ID NO: 716924 - RNA, 19 nt, Homo sapiens
  misc_RNA (1)...(19): siRNA sense strand
gcucuaaagcggcugaaga

SEQ ID NO: 716925 - RNA, 19 nt, Homo sapiens
  misc_RNA (1)...(19): siRNA sense strand
ggcugaagauggagaagga

SEQ ID NO: 716926 - RNA, 19 nt, Homo sapiens
  misc_RNA (1)...(19): siRNA sense strand
agacagaggagaagaagau

SEQ ID NO: 716927 - RNA, 19 nt, Homo sapiens
  misc_RNA (1)...(19): siRNA sense strand
gaucaacaccauccucaag

SEQ ID NO: 716928 - RNA, 19 nt, Homo sapiens
  misc_RNA (1)...(19): siRNA sense strand
gaugaaauuguggcucuaa

SEQ ID NO: 716929 - RNA, 19 nt, Homo sapiens
  misc_RNA (1)...(19): siRNA sense strand
gaaucaggcucagguucug

SEQ ID NO: 716930 - RNA, 19 nt, Homo sapiens
  misc_RNA (1)...(19): siRNA sense strand
gaggugaagacccugauga

SEQ ID NO: 716931 - RNA, 19 nt, Homo sapiens
  misc_RNA (1)...(19): siRNA sense strand
ggaggaggaggaagaggaa

SEQ ID NO: 716932 - RNA, 19 nt, Homo sapiens
  misc_RNA (1)...(19): siRNA sense strand
ggaaacgacaucgagaaga

SEQ ID NO: 716933 - RNA, 19 nt, Homo sapiens
  misc_RNA (1)...(19): siRNA sense strand
agucagaaaucgaucagau

SEQ ID NO: 716934 - RNA, 19 nt, Homo sapiens
  misc_RNA (1)...(19): siRNA sense strand
ucacgucgcugagggagau

SEQ ID NO: 716935 - RNA, 19 nt, Homo sapiens
  misc_RNA (1)...(19): siRNA sense strand
gaaauuguggcucuaaagc

SEQ ID NO: 716936 - RNA, 19 nt, Homo sapiens
  misc_RNA (1)...(19): siRNA sense strand
gucaguggguugcaucuuc

SEQ ID NO: 716937 - RNA, 19 nt, Homo sapiens
  misc_RNA (1)...(19): siRNA sense strand
ugaagacccugaugaucca

SEQ ID NO: 716938 - RNA, 19 nt, Homo sapiens
  misc_RNA (1)...(19): siRNA sense strand
gaagacagaggagaagaag

SEQ ID NO: 716939 - RNA, 19 nt, Homo sapiens
  misc_RNA (1)...(19): siRNA sense strand
gaagaacgagaaaaugaaa

SEQ ID NO: 716940 - RNA, 19 nt, Homo sapiens
  misc_RNA (1)...(19): siRNA sense strand
ggaagaaaugagugaagau

SEQ ID NO: 716941 - RNA, 19 nt, Homo sapiens
  misc_RNA (1)...(19): siRNA sense strand
agacagaagagaagggaaa

SEQ ID NO: 716942 - RNA, 19 nt, Homo sapiens
  misc_RNA (1)...(19): siRNA sense strand
gaaugggaaagacagaaga

SEQ ID NO: 716943 - RNA, 19 nt, Homo sapiens
  misc_RNA (1)...(19): siRNA sense strand
caaaugucucggaaagaaa

SEQ ID NO: 716944 - RNA, 19 nt, Homo sapiens
  misc_RNA (1)...(19): siRNA sense strand
gaggagaagaagaugauuc

SEQ ID NO: 716945 - RNA, 19 nt, Homo sapiens
  misc_RNA (1)...(19): siRNA sense strand
gcaacauggacaagaucua

SEQ ID NO: 716946 - RNA, 19 nt, Homo sapiens
  misc_RNA (1)...(19): siRNA sense strand
aggaagaaaugagugaaga

SEQ ID NO: 716947 - RNA, 19 nt, Homo sapiens
  misc_RNA (1)...(19): siRNA sense strand
auaaggaacuccccguaua

SEQ ID NO: 716948 - RNA, 19 nt, Homo sapiens
  misc_RNA (1)...(19): siRNA sense strand
gagugaagaagcagaggaa

SEQ ID NO: 716949 - RNA, 19 nt, Homo sapiens
  misc_RNA (1)...(19): siRNA sense strand
ggaagucagaaaucgauca

SEQ ID NO: 716950 - RNA, 19 nt, Homo sapiens
  misc_RNA (1)...(19): siRNA sense strand
cccaacaucgucaccguua

SEQ ID NO: 716951 - RNA, 19 nt, Homo sapiens
  misc_RNA (1)...(19): siRNA sense strand
gggaaagacagaagagaag

SEQ ID NO: 716952 - RNA, 19 nt, Homo sapiens
  misc_RNA (1)...(19): siRNA sense strand
caaaagacaagaaaacaga

SEQ ID NO: 716953 - RNA, 19 nt, Homo sapiens
  misc_RNA (1)...(19): siRNA sense strand
gaucgaggagggcaccuau

SEQ ID NO: 716954 - RNA, 19 nt, Homo sapiens
  misc_RNA (1)...(19): siRNA sense strand
gaaaugagugaagaugaag

SEQ ID NO: 716955 - RNA, 19 nt, Homo sapiens
  misc_RNA (1)...(19): siRNA sense strand
ggaagaggaggaggaggaa

SEQ ID NO: 716956 - RNA, 19 nt, Homo sapiens
  misc_RNA (1)...(19): siRNA sense strand
caugcuagagugaaagaaa

SEQ ID NO: 716957 - RNA, 19 nt, Homo sapiens
  misc_RNA (1)...(19): siRNA sense strand
gaagagaaaauggaagaaa

SEQ ID NO: 716958 - RNA, 19 nt, Homo sapiens
  misc_RNA (1)...(19): siRNA sense strand
ggaaugggaaagacagaag

SEQ ID NO: 716959 - RNA, 19 nt, Homo sapiens
  misc_RNA (1)...(19): siRNA sense strand
cgucaccguuagagagauu

SEQ ID NO: 716960 - RNA, 19 nt, Homo sapiens
  misc_RNA (1)...(19): siRNA sense strand
gugaagaagcagaggaaga

SEQ ID NO: 716961 - RNA, 19 nt, Homo sapiens
  misc_RNA (1)...(19): siRNA sense strand
cgaagaaguaagugaggaa

SEQ ID NO: 716962 - RNA, 19 nt, Homo sapiens
  misc_RNA (1)...(19): siRNA sense strand
caacauggacaagaucuac

SEQ ID NO: 716963 - RNA, 19 nt, Homo sapiens
  misc_RNA (1)...(19): siRNA sense strand
ggaacaagaggagaaagca

SEQ ID NO: 716964 - RNA, 19 nt, Homo sapiens
  misc_RNA (1)...(19): siRNA sense strand
gaaacgaaggaaggaacaa

SEQ ID NO: 716965 - RNA, 19 nt, Homo sapiens
  misc_RNA (1)...(19): siRNA sense strand
ggaagggagcaccagugaa

SEQ ID NO: 716966 - RNA, 19 nt, Homo sapiens
  misc_RNA (1)...(19): siRNA sense strand
cagaggagaagaagaugau

SEQ ID NO: 716967 - RNA, 19 nt, Homo sapiens
  misc_RNA (1)...(19): siRNA sense strand
guaagugaggaagaaauga

SEQ ID NO: 716968 - RNA, 19 nt, Homo sapiens
  misc_RNA (1)...(19): siRNA sense strand
gcagaaucaggcucagguu

SEQ ID NO: 716969 - RNA, 19 nt, Homo sapiens
  misc_RNA (1)...(19): siRNA sense strand
cagaagagaagggaaaugg

SEQ ID NO: 716970 - RNA, 19 nt, Homo sapiens
  misc_RNA (1)...(19): siRNA sense strand
aggacggccucaagcauga

SEQ ID NO: 716971 - RNA, 19 nt, Homo sapiens
  misc_RNA (1)...(19): siRNA sense strand
gcaccuauggaguggucua

SEQ ID NO: 716972 - RNA, 19 nt, Homo sapiens
  misc_RNA (1)...(19): siRNA sense strand
gacagagggcgacuaugug

SEQ ID NO: 716973 - RNA, 19 nt, Homo sapiens
  misc_RNA (1)...(19): siRNA sense strand
aagaaaugagugaagauga

SEQ ID NO: 716974 - RNA, 19 nt, Homo sapiens
  misc_RNA (1)...(19): siRNA sense strand
ggaaauggcaagggagcau

SEQ ID NO: 716975 - RNA, 19 nt, Homo sapiens
  misc_RNA (1)...(19): siRNA sense strand
agaggagaaagcagagaua

SEQ ID NO: 716976 - RNA, 19 nt, Homo sapiens
  misc_RNA (1)...(19): siRNA sense strand
gaagauggagaaggagaag

SEQ ID NO: 716977 - RNA, 19 nt, Homo sapiens
  misc_RNA (1)...(19): siRNA sense strand
gaggagaccggcagcaacu

SEQ ID NO: 716978 - RNA, 19 nt, Homo sapiens
  misc_RNA (1)...(19): siRNA sense strand
agaaagagagcacgaacgu

SEQ ID NO: 716979 - RNA, 19 nt, Homo sapiens
  misc_RNA (1)...(19): siRNA sense strand
gaggaagaaaugagugaag

SEQ ID NO: 716980 - RNA, 19 nt, Homo sapiens
  misc_RNA (1)...(19): siRNA sense strand
gcagagauaaaacgcuuaa

SEQ ID NO: 716981 - RNA, 19 nt, Homo sapiens
  misc_RNA (1)...(19): siRNA sense strand
ugggaaagacagaagagaa

SEQ ID NO: 716982 - RNA, 19 nt, Homo sapiens
  misc_RNA (1)...(19): siRNA sense strand
ucccagcagucaagaagau

SEQ ID NO: 716983 - RNA, 19 nt, Homo sapiens
  misc_RNA (1)...(19): siRNA sense strand
agaagcagaggaagaagug

SEQ ID NO: 716984 - RNA, 19 nt, Homo sapiens
  misc_RNA (1)...(19): siRNA sense strand
uauggaagacagaggagaa

SEQ ID NO: 716985 - RNA, 19 nt, Homo sapiens
  misc_RNA (1)...(19): siRNA sense strand
ugaagaugaagaacgagaa

SEQ ID NO: 716986 - RNA, 19 nt, Homo sapiens
  misc_RNA (1)...(19): siRNA sense strand
gugaggaagaaaugaguga

SEQ ID NO: 716987 - RNA, 19 nt, Homo sapiens
  misc_RNA (1)...(19): siRNA sense strand
gaacuccccguauagaaga

SEQ ID NO: 716988 - RNA, 19 nt, Homo sapiens
  misc_RNA (1)...(19): siRNA sense strand
ugaaaaggacucuuggaaa

SEQ ID NO: 716989 - RNA, 19 nt, Homo sapiens
  misc_RNA (1)...(19): siRNA sense strand
gaaacgacaucgagaagaa

SEQ ID NO: 716990 - RNA, 19 nt, Homo sapiens
  misc_RNA (1)...(19): siRNA sense strand
gcaaaugucucggaaagaa

SEQ ID NO: 716991 - RNA, 19 nt, Homo sapiens
  misc_RNA (1)...(19): siRNA sense strand
gaaaacagaugaaauugug

SEQ ID NO: 716992 - RNA, 19 nt, Homo sapiens
  misc_RNA (1)...(19): siRNA sense strand
gcauggagaucacaauaag

SEQ ID NO: 716993 - RNA, 19 nt, Homo sapiens
  misc_RNA (1)...(19): siRNA sense strand
gagcaccagugaagaauca

SEQ ID NO: 716994 - RNA, 19 nt, Homo sapiens
  misc_RNA (1)...(19): siRNA sense strand
ugaaacaccugcacgacaa

SEQ ID NO: 716995 - RNA, 19 nt, Homo sapiens
  misc_RNA (1)...(19): siRNA sense strand
gaaaaggacucuuggaaag

SEQ ID NO: 716996 - RNA, 19 nt, Homo sapiens
  misc_RNA (1)...(19): siRNA sense strand
uaaagcggcugaagaugga

SEQ ID NO: 716997 - RNA, 19 nt, Homo sapiens
  misc_RNA (1)...(19): siRNA sense strand
agaaaugagugaagaugaa

SEQ ID NO: 716998 - RNA, 19 nt, Homo sapiens
  misc_RNA (1)...(19): siRNA sense strand
gagugaagaugaagaacga

SEQ ID NO: 716999 - RNA, 19 nt, Homo sapiens
  misc_RNA (1)...(19): siRNA sense strand
gcagcaacauggacaagau

SEQ ID NO: 717000 - RNA, 19 nt, Homo sapiens
  misc_RNA (1)...(19): siRNA sense strand
gaagggagcaccagugaag

SEQ ID NO: 717001 - RNA, 19 nt, Homo sapiens
  misc_RNA (1)...(19): siRNA sense strand
ggaaggaacaagaggagaa

SEQ ID NO: 717002 - RNA, 19 nt, Homo sapiens
  misc_RNA (1)...(19): siRNA sense strand
ggaguggucuacagagcaa

SEQ ID NO: 717003 - RNA, 19 nt, Homo sapiens
  misc_RNA (1)...(19): siRNA sense strand
gaagaugaagaacgagaaa

SEQ ID NO: 717004 - RNA, 19 nt, Homo sapiens
  misc_RNA (1)...(19): siRNA sense strand
gcacgaacgucggaaacga

SEQ ID NO: 717005 - RNA, 19 nt, Homo sapiens
  misc_RNA (1)...(19): siRNA sense strand
gagaagacucuauggaaga

SEQ ID NO: 717006 - RNA, 19 nt, Homo sapiens
  misc_RNA (1)...(19): siRNA sense strand
cagcaaaugucucggaaag

SEQ ID NO: 717007 - RNA, 19 nt, Homo sapiens
  misc_RNA (1)...(19): siRNA sense strand
cagaaaagaugaaaagaga

SEQ ID NO: 717008 - RNA, 19 nt, Homo sapiens
  misc_RNA (1)...(19): siRNA sense strand
gaagaaaugagugaagaug

SEQ ID NO: 717009 - RNA, 19 nt, Homo sapiens
  misc_RNA (1)...(19): siRNA sense strand
agaaguaagugaggaagaa

SEQ ID NO: 717010 - RNA, 19 nt, Homo sapiens
  misc_RNA (1)...(19): siRNA sense strand
ggaagacagaggagaagaa

SEQ ID NO: 717011 - RNA, 19 nt, Homo sapiens
  misc_RNA (1)...(19): siRNA sense strand
gaaggaacaagaggagaaa

SEQ ID NO: 717012 - RNA, 19 nt, Homo sapiens
  misc_RNA (1)...(19): siRNA sense strand
ugacagagggcgacuaugu

SEQ ID NO: 717013 - RNA, 19 nt, Homo sapiens
  misc_RNA (1)...(19): siRNA sense strand
ggagaaagcagagauaaaa

SEQ ID NO: 717014 - RNA, 19 nt, Homo sapiens
  misc_RNA (1)...(19): siRNA sense strand
gagaagaacaggauaaagc

SEQ ID NO: 717015 - RNA, 19 nt, Homo sapiens
  misc_RNA (1)...(19): siRNA sense strand
gaggagaaagcagagauaa

SEQ ID NO: 717016 - RNA, 19 nt, Homo sapiens
  misc_RNA (1)...(19): siRNA sense strand
ugaagaagcagaggaagaa

SEQ ID NO: 717017 - RNA, 19 nt, Homo sapiens
  misc_RNA (1)...(19): siRNA sense strand
gagcauuccaggagagaaa

SEQ ID NO: 717018 - RNA, 19 nt, Homo sapiens
  misc_RNA (1)...(19): siRNA sense strand
aaggagggcuucccgauca

SEQ ID NO: 717019 - RNA, 19 nt, Homo sapiens
  misc_RNA (1)...(19): siRNA sense strand
gcuucgaccucaugaacaa

SEQ ID NO: 717020 - RNA, 19 nt, Homo sapiens
  misc_RNA (1)...(19): siRNA sense strand
gaaguaagugaggaagaaa

SEQ ID NO: 717021 - RNA, 19 nt, Homo sapiens
  misc_RNA (1)...(19): siRNA sense strand
caacaucgucaccguuaga

SEQ ID NO: 717022 - RNA, 19 nt, Homo sapiens
  misc_RNA (1)...(19): siRNA sense strand
ugagggagaucaacaccau

SEQ ID NO: 717023 - RNA, 19 nt, Homo sapiens
  misc_RNA (1)...(19): siRNA sense strand
aaaggacucuuggaaagug

SEQ ID NO: 717024 - RNA, 19 nt, Homo sapiens
  misc_RNA (1)...(19): siRNA sense strand
gcucuaaagcggcugaaga

SEQ ID NO: 717025 - RNA, 19 nt, Homo sapiens
  misc_RNA (1)...(19): siRNA sense strand
ggcugaagauggagaagga

SEQ ID NO: 717026 - RNA, 19 nt, Homo sapiens
  misc_RNA (1)...(19): siRNA sense strand
agacagaggagaagaagau

SEQ ID NO: 717027 - RNA, 19 nt, Homo sapiens
  misc_RNA (1)...(19): siRNA sense strand
gaucaacaccauccucaag

SEQ ID NO: 717028 - RNA, 19 nt, Homo sapiens
  misc_RNA (1)...(19): siRNA sense strand
gaugaaauuguggcucuaa

SEQ ID NO: 717029 - RNA, 19 nt, Homo sapiens
  misc_RNA (1)...(19): siRNA sense strand
gaaucaggcucagguucug

SEQ ID NO: 717030 - RNA, 19 nt, Homo sapiens
  misc_RNA (1)...(19): siRNA sense strand
gaggugaagacccugauga

SEQ ID NO: 717031 - RNA, 19 nt, Homo sapiens
  misc_RNA (1)...(19): siRNA sense strand
ggaggaggaggaagaggaa

SEQ ID NO: 717032 - RNA, 19 nt, Homo sapiens
  misc_RNA (1)...(19): siRNA sense strand
ggaaacgacaucgagaaga

SEQ ID NO: 717033 - RNA, 19 nt, Homo sapiens
  misc_RNA (1)...(19): siRNA sense strand
agucagaaaucgaucagau

SEQ ID NO: 717034 - RNA, 19 nt, Homo sapiens
  misc_RNA (1)...(19): siRNA sense strand
ucacgucgcugagggagau

SEQ ID NO: 717035 - RNA, 19 nt, Homo sapiens
  misc_RNA (1)...(19): siRNA sense strand
gaaauuguggcucuaaagc

SEQ ID NO: 717036 - RNA, 19 nt, Homo sapiens
  misc_RNA (1)...(19): siRNA sense strand
gucaguggguugcaucuuc

SEQ ID NO: 717037 - RNA, 19 nt, Homo sapiens
  misc_RNA (1)...(19): siRNA sense strand
ugaagacccugaugaucca

SEQ ID NO: 717038 - RNA, 19 nt, Homo sapiens
  misc_RNA (1)...(19): siRNA sense strand
gaagacagaggagaagaag

SEQ ID NO: 717039 - RNA, 19 nt, Homo sapiens
  misc_RNA (1)...(19): siRNA sense strand
gaagaacgagaaaaugaaa

SEQ ID NO: 717040 - RNA, 19 nt, Homo sapiens
  misc_RNA (1)...(19): siRNA sense strand
ggaagaaaugagugaagau

SEQ ID NO: 717041 - RNA, 19 nt, Homo sapiens
  misc_RNA (1)...(19): siRNA sense strand
agacagaagagaagggaaa

SEQ ID NO: 717042 - RNA, 19 nt, Homo sapiens
  misc_RNA (1)...(19): siRNA sense strand
gaaugggaaagacagaaga

SEQ ID NO: 717043 - RNA, 19 nt, Homo sapiens
  misc_RNA (1)...(19): siRNA sense strand
caaaugucucggaaagaaa

SEQ ID NO: 717044 - RNA, 19 nt, Homo sapiens
  misc_RNA (1)...(19): siRNA sense strand
gaggagaagaagaugauuc

SEQ ID NO: 717045 - RNA, 19 nt, Homo sapiens
  misc_RNA (1)...(19): siRNA sense strand
gcaacauggacaagaucua

SEQ ID NO: 717046 - RNA, 19 nt, Homo sapiens
  misc_RNA (1)...(19): siRNA sense strand
aggaagaaaugagugaaga

SEQ ID NO: 717047 - RNA, 19 nt, Homo sapiens
  misc_RNA (1)...(19): siRNA sense strand
auaaggaacuccccguaua

SEQ ID NO: 717048 - RNA, 19 nt, Homo sapiens
  misc_RNA (1)...(19): siRNA sense strand
gagugaagaagcagaggaa

SEQ ID NO: 717049 - RNA, 19 nt, Homo sapiens
  misc_RNA (1)...(19): siRNA sense strand
ggaagucagaaaucgauca

SEQ ID NO: 717050 - RNA, 19 nt, Homo sapiens
  misc_RNA (1)...(19): siRNA sense strand
cccaacaucgucaccguua

SEQ ID NO: 717051 - RNA, 19 nt, Homo sapiens
  misc_RNA (1)...(19): siRNA sense strand
gggaaagacagaagagaag

SEQ ID NO: 717052 - RNA, 19 nt, Homo sapiens
  misc_RNA (1)...(19): siRNA sense strand
caaaagacaagaaaacaga

SEQ ID NO: 717053 - RNA, 19 nt, Homo sapiens
  misc_RNA (1)...(19): siRNA sense strand
gaucgaggagggcaccuau

SEQ ID NO: 717054 - RNA, 19 nt, Homo sapiens
  misc_RNA (1)...(19): siRNA sense strand
gaaaugagugaagaugaag

SEQ ID NO: 717055 - RNA, 19 nt, Homo sapiens
  misc_RNA (1)...(19): siRNA sense strand
ggaagaggaggaggaggaa

SEQ ID NO: 717056 - RNA, 19 nt, Homo sapiens
  misc_RNA (1)...(19): siRNA sense strand
caugcuagagugaaagaaa

SEQ ID NO: 717057 - RNA, 19 nt, Homo sapiens
  misc_RNA (1)...(19): siRNA sense strand
gaagagaaaauggaagaaa

SEQ ID NO: 717058 - RNA, 19 nt, Homo sapiens
  misc_RNA (1)...(19): siRNA sense strand
ggaaugggaaagacagaag

SEQ ID NO: 717059 - RNA, 19 nt, Homo sapiens
  misc_RNA (1)...(19): siRNA sense strand
cgucaccguuagagagauu

SEQ ID NO: 717060 - RNA, 19 nt, Homo sapiens
  misc_RNA (1)...(19): siRNA sense strand
gugaagaagcagaggaaga

SEQ ID NO: 717061 - RNA, 19 nt, Homo sapiens
  misc_RNA (1)...(19): siRNA sense strand
cgaagaaguaagugaggaa

SEQ ID NO: 717062 - RNA, 19 nt, Homo sapiens
  misc_RNA (1)...(19): siRNA sense strand
caacauggacaagaucuac

SEQ ID NO: 717063 - RNA, 19 nt, Homo sapiens
  misc_RNA (1)...(19): siRNA sense strand
ggaacaagaggagaaagca

SEQ ID NO: 717064 - RNA, 19 nt, Homo sapiens
  misc_RNA (1)...(19): siRNA sense strand
gaaacgaaggaaggaacaa

SEQ ID NO: 717065 - RNA, 19 nt, Homo sapiens
  misc_RNA (1)...(19): siRNA sense strand
ggaagggagcaccagugaa

SEQ ID NO: 717066 - RNA, 19 nt, Homo sapiens
  misc_RNA (1)...(19): siRNA sense strand
cagaggagaagaagaugau

SEQ ID NO: 717067 - RNA, 19 nt, Homo sapiens
  misc_RNA (1)...(19): siRNA sense strand
guaagugaggaagaaauga

SEQ ID NO: 717068 - RNA, 19 nt, Homo sapiens
  misc_RNA (1)...(19): siRNA sense strand
gcagaaucaggcucagguu

SEQ ID NO: 717069 - RNA, 19 nt, Homo sapiens
  misc_RNA (1)...(19): siRNA sense strand
cagaagagaagggaaaugg

SEQ ID NO: 717070 - RNA, 19 nt, Homo sapiens
  misc_RNA (1)...(19): siRNA sense strand
aggacggccucaagcauga

SEQ ID NO: 717071 - RNA, 19 nt, Homo sapiens
  misc_RNA (1)...(19): siRNA sense strand
gcaccuauggaguggucua

SEQ ID NO: 717072 - RNA, 19 nt, Homo sapiens
  misc_RNA (1)...(19): siRNA sense strand
gacagagggcgacuaugug

SEQ ID NO: 717073 - RNA, 19 nt, Homo sapiens
  misc_RNA (1)...(19): siRNA sense strand
aagaaaugagugaagauga

SEQ ID NO: 717074 - RNA, 19 nt, Homo sapiens
  misc_RNA (1)...(19): siRNA sense strand
ggaaauggcaagggagcau

SEQ ID NO: 717075 - RNA, 19 nt, Homo sapiens
  misc_RNA (1)...(19): siRNA sense strand
agaggagaaagcagagaua

SEQ ID NO: 717076 - RNA, 19 nt, Homo sapiens
  misc_RNA (1)...(19): siRNA sense strand
gaagauggagaaggagaag

SEQ ID NO: 717077 - RNA, 19 nt, Homo sapiens
  misc_RNA (1)...(19): siRNA sense strand
gaggagaccggcagcaacu

SEQ ID NO: 717078 - RNA, 19 nt, Homo sapiens
  misc_RNA (1)...(19): siRNA sense strand
agaaagagagcacgaacgu

SEQ ID NO: 717079 - RNA, 19 nt, Homo sapiens
  misc_RNA (1)...(19): siRNA sense strand
gaggaagaaaugagugaag

SEQ ID NO: 717080 - RNA, 19 nt, Homo sapiens
  misc_RNA (1)...(19): siRNA sense strand
gcagagauaaaacgcuuaa

SEQ ID NO: 717081 - RNA, 19 nt, Homo sapiens
  misc_RNA (1)...(19): siRNA sense strand
ugggaaagacagaagagaa

SEQ ID NO: 717082 - RNA, 19 nt, Homo sapiens
  misc_RNA (1)...(19): siRNA sense strand
ucccagcagucaagaagau

SEQ ID NO: 717083 - RNA, 19 nt, Homo sapiens
  misc_RNA (1)...(19): siRNA sense strand
agaagcagaggaagaagug

SEQ ID NO: 717084 - RNA, 19 nt, Homo sapiens
  misc_RNA (1)...(19): siRNA sense strand
uauggaagacagaggagaa

SEQ ID NO: 717085 - RNA, 19 nt, Homo sapiens
  misc_RNA (1)...(19): siRNA sense strand
ugaagaugaagaacgagaa

SEQ ID NO: 717086 - RNA, 19 nt, Homo sapiens
  misc_RNA (1)...(19): siRNA sense strand
gugaggaagaaaugaguga

SEQ ID NO: 717087 - RNA, 19 nt, Homo sapiens
  misc_RNA (1)...(19): siRNA sense strand
gaacuccccguauagaaga

SEQ ID NO: 717088 - RNA, 19 nt, Homo sapiens
  misc_RNA (1)...(19): siRNA sense strand
ugaaaaggacucuuggaaa

SEQ ID NO: 717089 - RNA, 19 nt, Homo sapiens
  misc_RNA (1)...(19): siRNA sense strand
gaaaacagaugaaauugug

SEQ ID NO: 717090 - RNA, 19 nt, Homo sapiens
  misc_RNA (1)...(19): siRNA sense strand
gagcaccagugaagaauca

SEQ ID NO: 717091 - RNA, 19 nt, Homo sapiens
  misc_RNA (1)...(19): siRNA sense strand
ugaaacaccugcacgacaa

SEQ ID NO: 717092 - RNA, 19 nt, Homo sapiens
  misc_RNA (1)...(19): siRNA sense strand
uaaagcggcugaagaugga

SEQ ID NO: 717093 - RNA, 19 nt, Homo sapiens
  misc_RNA (1)...(19): siRNA sense strand
agaaaugagugaagaugaa

SEQ ID NO: 717094 - RNA, 19 nt, Homo sapiens
  misc_RNA (1)...(19): siRNA sense strand
gagugaagaugaagaacga

SEQ ID NO: 717095 - RNA, 19 nt, Homo sapiens
  misc_RNA (1)...(19): siRNA sense strand
gcagcaacauggacaagau

SEQ ID NO: 717096 - RNA, 19 nt, Homo sapiens
  misc_RNA (1)...(19): siRNA sense strand
gaagggagcaccagugaag

SEQ ID NO: 717097 - RNA, 19 nt, Homo sapiens
  misc_RNA (1)...(19): siRNA sense strand
gaagaugaagaacgagaaa

SEQ ID NO: 717098 - RNA, 19 nt, Homo sapiens
  misc_RNA (1)...(19): siRNA sense strand
ggaguggucuacagagcaa

SEQ ID NO: 717099 - RNA, 19 nt, Homo sapiens
  misc_RNA (1)...(19): siRNA sense strand
gaagaaaugagugaagaug

SEQ ID NO: 717100 - RNA, 19 nt, Homo sapiens
  misc_RNA (1)...(19): siRNA sense strand
agaaguaagugaggaagaa

SEQ ID NO: 717101 - RNA, 19 nt, Homo sapiens
  misc_RNA (1)...(19): siRNA sense strand
ugacagagggcgacuaugu

SEQ ID NO: 717102 - RNA, 19 nt, Homo sapiens
  misc_RNA (1)...(19): siRNA sense strand
ugaagaagcagaggaagaa

SEQ ID NO: 717103 - RNA, 19 nt, Homo sapiens
  misc_RNA (1)...(19): siRNA sense strand
aaggagggcuucccgauca

SEQ ID NO: 717104 - RNA, 19 nt, Homo sapiens
  misc_RNA (1)...(19): siRNA sense strand
gcuucgaccucaugaacaa

SEQ ID NO: 717105 - RNA, 19 nt, Homo sapiens
  misc_RNA (1)...(19): siRNA sense strand
gaaguaagugaggaagaaa

SEQ ID NO: 717106 - RNA, 19 nt, Homo sapiens
  misc_RNA (1)...(19): siRNA sense strand
caacaucgucaccguuaga

SEQ ID NO: 717107 - RNA, 19 nt, Homo sapiens
  misc_RNA (1)...(19): siRNA sense strand
ugagggagaucaacaccau

SEQ ID NO: 717108 - RNA, 19 nt, Homo sapiens
  misc_RNA (1)...(19): siRNA sense strand
gcucuaaagcggcugaaga

SEQ ID NO: 717109 - RNA, 19 nt, Homo sapiens
  misc_RNA (1)...(19): siRNA sense strand
ggcugaagauggagaagga

SEQ ID NO: 717110 - RNA, 19 nt, Homo sapiens
  misc_RNA (1)...(19): siRNA sense strand
gaugaaauuguggcucuaa

SEQ ID NO: 717111 - RNA, 19 nt, Homo sapiens
  misc_RNA (1)...(19): siRNA sense strand
gaucaacaccauccucaag

SEQ ID NO: 717112 - RNA, 19 nt, Homo sapiens
  misc_RNA (1)...(19): siRNA sense strand
ggaggaggaggaagaggaa

SEQ ID NO: 717113 - RNA, 19 nt, Homo sapiens
  misc_RNA (1)...(19): siRNA sense strand
gaggugaagacccugauga

SEQ ID NO: 717114 - RNA, 19 nt, Homo sapiens
  misc_RNA (1)...(19): siRNA sense strand
gaaucaggcucagguucug

SEQ ID NO: 717115 - RNA, 19 nt, Homo sapiens
  misc_RNA (1)...(19): siRNA sense strand
ucacgucgcugagggagau

SEQ ID NO: 717116 - RNA, 19 nt, Homo sapiens
  misc_RNA (1)...(19): siRNA sense strand
agucagaaaucgaucagau

SEQ ID NO: 717117 - RNA, 19 nt, Homo sapiens
  misc_RNA (1)...(19): siRNA sense strand
gaaauuguggcucuaaagc

SEQ ID NO: 717118 - RNA, 19 nt, Homo sapiens
  misc_RNA (1)...(19): siRNA sense strand
gucaguggguugcaucuuc

SEQ ID NO: 717119 - RNA, 19 nt, Homo sapiens
  misc_RNA (1)...(19): siRNA sense strand
ugaagacccugaugaucca

SEQ ID NO: 717120 - RNA, 19 nt, Homo sapiens
  misc_RNA (1)...(19): siRNA sense strand
ggaagaaaugagugaagau

SEQ ID NO: 717121 - RNA, 19 nt, Homo sapiens
  misc_RNA (1)...(19): siRNA sense strand
gaagaacgagaaaaugaaa

SEQ ID NO: 717122 - RNA, 19 nt, Homo sapiens
  misc_RNA (1)...(19): siRNA sense strand
aggaagaaaugagugaaga

SEQ ID NO: 717123 - RNA, 19 nt, Homo sapiens
  misc_RNA (1)...(19): siRNA sense strand
gcaacauggacaagaucua

SEQ ID NO: 717124 - RNA, 19 nt, Homo sapiens
  misc_RNA (1)...(19): siRNA sense strand
gagugaagaagcagaggaa

SEQ ID NO: 717125 - RNA, 19 nt, Homo sapiens
  misc_RNA (1)...(19): siRNA sense strand
ggaagucagaaaucgauca

SEQ ID NO: 717126 - RNA, 19 nt, Homo sapiens
  misc_RNA (1)...(19): siRNA sense strand
cccaacaucgucaccguua

SEQ ID NO: 717127 - RNA, 19 nt, Homo sapiens
  misc_RNA (1)...(19): siRNA sense strand
gaaaugagugaagaugaag

SEQ ID NO: 717128 - RNA, 19 nt, Homo sapiens
  misc_RNA (1)...(19): siRNA sense strand
ggaagaggaggaggaggaa

SEQ ID NO: 717129 - RNA, 19 nt, Homo sapiens
  misc_RNA (1)...(19): siRNA sense strand
caaaagacaagaaaacaga

SEQ ID NO: 717130 - RNA, 19 nt, Homo sapiens
  misc_RNA (1)...(19): siRNA sense strand
gaucgaggagggcaccuau

SEQ ID NO: 717131 - RNA, 19 nt, Homo sapiens
  misc_RNA (1)...(19): siRNA sense strand
cgaagaaguaagugaggaa

SEQ ID NO: 717132 - RNA, 19 nt, Homo sapiens
  misc_RNA (1)...(19): siRNA sense strand
cgucaccguuagagagauu

SEQ ID NO: 717133 - RNA, 19 nt, Homo sapiens
  misc_RNA (1)...(19): siRNA sense strand
gugaagaagcagaggaaga

SEQ ID NO: 717134 - RNA, 19 nt, Homo sapiens
  misc_RNA (1)...(19): siRNA sense strand
caacauggacaagaucuac

SEQ ID NO: 717135 - RNA, 19 nt, Homo sapiens
  misc_RNA (1)...(19): siRNA sense strand
ggaagggagcaccagugaa

SEQ ID NO: 717136 - RNA, 19 nt, Homo sapiens
  misc_RNA (1)...(19): siRNA sense strand
gcagaaucaggcucagguu

SEQ ID NO: 717137 - RNA, 19 nt, Homo sapiens
  misc_RNA (1)...(19): siRNA sense strand
guaagugaggaagaaauga

SEQ ID NO: 717138 - RNA, 19 nt, Homo sapiens
  misc_RNA (1)...(19): siRNA sense strand
aagaaaugagugaagauga

SEQ ID NO: 717139 - RNA, 19 nt, Homo sapiens
  misc_RNA (1)...(19): siRNA sense strand
aggacggccucaagcauga

SEQ ID NO: 717140 - RNA, 19 nt, Homo sapiens
  misc_RNA (1)...(19): siRNA sense strand
gcaccuauggaguggucua

SEQ ID NO: 717141 - RNA, 19 nt, Homo sapiens
  misc_RNA (1)...(19): siRNA sense strand
gacagagggcgacuaugug

SEQ ID NO: 717142 - RNA, 19 nt, Homo sapiens
  misc_RNA (1)...(19): siRNA sense strand
gaggagaccggcagcaacu

SEQ ID NO: 717143 - RNA, 19 nt, Homo sapiens
  misc_RNA (1)...(19): siRNA sense strand
gaagauggagaaggagaag

SEQ ID NO: 717144 - RNA, 19 nt, Homo sapiens
  misc_RNA (1)...(19): siRNA sense strand
gaggaagaaaugagugaag

SEQ ID NO: 717145 - RNA, 19 nt, Homo sapiens
  misc_RNA (1)...(19): siRNA sense strand
ugaagaugaagaacgagaa

SEQ ID NO: 717146 - RNA, 19 nt, Homo sapiens
  misc_RNA (1)...(19): siRNA sense strand
ucccagcagucaagaagau

SEQ ID NO: 717147 - RNA, 19 nt, Homo sapiens
  misc_RNA (1)...(19): siRNA sense strand
agaagcagaggaagaagug

SEQ ID NO: 717148 - RNA, 19 nt, Homo sapiens
  misc_RNA (1)...(19): siRNA sense strand
gugaggaagaaaugaguga

SEQ ID NO: 717149 - RNA, 19 nt, Homo sapiens
  misc_RNA (1)...(19): siRNA sense strand
gcaccagugaagaaucaga

SEQ ID NO: 717150 - RNA, 19 nt, Homo sapiens
  misc_RNA (1)...(19): siRNA sense strand
ugaagauggagaaggagaa

SEQ ID NO: 717151 - RNA, 19 nt, Homo sapiens
  misc_RNA (1)...(19): siRNA sense strand
aagaggaggaggaggaaga

SEQ ID NO: 717152 - RNA, 19 nt, Homo sapiens
  misc_RNA (1)...(19): siRNA sense strand
acaagguguucaaggaucu

SEQ ID NO: 717153 - RNA, 19 nt, Homo sapiens
  misc_RNA (1)...(19): siRNA sense strand
gaguacggauccccucuga

SEQ ID NO: 717154 - RNA, 19 nt, Homo sapiens
  misc_RNA (1)...(19): siRNA sense strand
ccaacaucgucaccguuag

SEQ ID NO: 717155 - RNA, 19 nt, Homo sapiens
  misc_RNA (1)...(19): siRNA sense strand
gaagucagaaaucgaucag

SEQ ID NO: 717156 - RNA, 19 nt, Homo sapiens
  misc_RNA (1)...(19): siRNA sense strand
ggugaagacccugaugauc

SEQ ID NO: 717157 - RNA, 19 nt, Homo sapiens
  misc_RNA (1)...(19): siRNA sense strand
ugaaauuguggcucuaaag

SEQ ID NO: 717158 - RNA, 19 nt, Homo sapiens
  misc_RNA (1)...(19): siRNA sense strand
gggcuucgaccucaugaac

SEQ ID NO: 717159 - RNA, 19 nt, Homo sapiens
  misc_RNA (1)...(19): siRNA sense strand
ggaggugaagacccugaug

SEQ ID NO: 717160 - RNA, 19 nt, Homo sapiens
  misc_RNA (1)...(19): siRNA sense strand
ggagaccggcagcaacucu

SEQ ID NO: 717161 - RNA, 19 nt, Homo sapiens
  misc_RNA (1)...(19): siRNA sense strand
gaaacgacaucgagaagaa

SEQ ID NO: 717162 - RNA, 19 nt, Homo sapiens
  misc_RNA (1)...(19): siRNA sense strand
gcaaaugucucggaaagaa

SEQ ID NO: 717163 - RNA, 19 nt, Homo sapiens
  misc_RNA (1)...(19): siRNA sense strand
gaaaacagaugaaauugug

SEQ ID NO: 717164 - RNA, 19 nt, Homo sapiens
  misc_RNA (1)...(19): siRNA sense strand
gcauggagaucacaauaag

SEQ ID NO: 717165 - RNA, 19 nt, Homo sapiens
  misc_RNA (1)...(19): siRNA sense strand
gagcaccagugaagaauca

SEQ ID NO: 717166 - RNA, 19 nt, Homo sapiens
  misc_RNA (1)...(19): siRNA sense strand
ugaaacaccugcacgacaa

SEQ ID NO: 717167 - RNA, 19 nt, Homo sapiens
  misc_RNA (1)...(19): siRNA sense strand
uaaagcggcugaagaugga

SEQ ID NO: 717168 - RNA, 19 nt, Homo sapiens
  misc_RNA (1)...(19): siRNA sense strand
agaaaugagugaagaugaa

SEQ ID NO: 717169 - RNA, 19 nt, Homo sapiens
  misc_RNA (1)...(19): siRNA sense strand
gagugaagaugaagaacga

SEQ ID NO: 717170 - RNA, 19 nt, Homo sapiens
  misc_RNA (1)...(19): siRNA sense strand
gcagcaacauggacaagau

SEQ ID NO: 717171 - RNA, 19 nt, Homo sapiens
  misc_RNA (1)...(19): siRNA sense strand
gaagggagcaccagugaag

SEQ ID NO: 717172 - RNA, 19 nt, Homo sapiens
  misc_RNA (1)...(19): siRNA sense strand
gagaagacucuauggaaga

SEQ ID NO: 717173 - RNA, 19 nt, Homo sapiens
  misc_RNA (1)...(19): siRNA sense strand
ggaguggucuacagagcaa

SEQ ID NO: 717174 - RNA, 19 nt, Homo sapiens
  misc_RNA (1)...(19): siRNA sense strand
gaagaugaagaacgagaaa

SEQ ID NO: 717175 - RNA, 19 nt, Homo sapiens
  misc_RNA (1)...(19): siRNA sense strand
gcacgaacgucggaaacga

SEQ ID NO: 717176 - RNA, 19 nt, Homo sapiens
  misc_RNA (1)...(19): siRNA sense strand
cagcaaaugucucggaaag

SEQ ID NO: 717177 - RNA, 19 nt, Homo sapiens
  misc_RNA (1)...(19): siRNA sense strand
cagaaaagaugaaaagaga

SEQ ID NO: 717178 - RNA, 19 nt, Homo sapiens
  misc_RNA (1)...(19): siRNA sense strand
gaagaaaugagugaagaug

SEQ ID NO: 717179 - RNA, 19 nt, Homo sapiens
  misc_RNA (1)...(19): siRNA sense strand
agaaguaagugaggaagaa

SEQ ID NO: 717180 - RNA, 19 nt, Homo sapiens
  misc_RNA (1)...(19): siRNA sense strand
ggaagacagaggagaagaa

SEQ ID NO: 717181 - RNA, 19 nt, Homo sapiens
  misc_RNA (1)...(19): siRNA sense strand
ugacagagggcgacuaugu

SEQ ID NO: 717182 - RNA, 19 nt, Homo sapiens
  misc_RNA (1)...(19): siRNA sense strand
gagaagaacaggauaaagc

SEQ ID NO: 717183 - RNA, 19 nt, Homo sapiens
  misc_RNA (1)...(19): siRNA sense strand
gagcauuccaggagagaaa

SEQ ID NO: 717184 - RNA, 19 nt, Homo sapiens
  misc_RNA (1)...(19): siRNA sense strand
ugaagaagcagaggaagaa

SEQ ID NO: 717185 - RNA, 19 nt, Homo sapiens
  misc_RNA (1)...(19): siRNA sense strand
aaggagggcuucccgauca

SEQ ID NO: 717186 - RNA, 19 nt, Homo sapiens
  misc_RNA (1)...(19): siRNA sense strand
gcuucgaccucaugaacaa

SEQ ID NO: 717187 - RNA, 19 nt, Homo sapiens
  misc_RNA (1)...(19): siRNA sense strand
gaaguaagugaggaagaaa

SEQ ID NO: 717188 - RNA, 19 nt, Homo sapiens
  misc_RNA (1)...(19): siRNA sense strand
caacaucgucaccguuaga

SEQ ID NO: 717189 - RNA, 19 nt, Homo sapiens
  misc_RNA (1)...(19): siRNA sense strand
ugagggagaucaacaccau

SEQ ID NO: 717190 - RNA, 19 nt, Homo sapiens
  misc_RNA (1)...(19): siRNA sense strand
gcucuaaagcggcugaaga

SEQ ID NO: 717191 - RNA, 19 nt, Homo sapiens
  misc_RNA (1)...(19): siRNA sense strand
ggcugaagauggagaagga

SEQ ID NO: 717192 - RNA, 19 nt, Homo sapiens
  misc_RNA (1)...(19): siRNA sense strand
agacagaggagaagaagau

SEQ ID NO: 717193 - RNA, 19 nt, Homo sapiens
  misc_RNA (1)...(19): siRNA sense strand
gaucaacaccauccucaag

SEQ ID NO: 717194 - RNA, 19 nt, Homo sapiens
  misc_RNA (1)...(19): siRNA sense strand
gaugaaauuguggcucuaa

SEQ ID NO: 717195 - RNA, 19 nt, Homo sapiens
  misc_RNA (1)...(19): siRNA sense strand
gaaucaggcucagguucug

SEQ ID NO: 717196 - RNA, 19 nt, Homo sapiens
  misc_RNA (1)...(19): siRNA sense strand
gaggugaagacccugauga

SEQ ID NO: 717197 - RNA, 19 nt, Homo sapiens
  misc_RNA (1)...(19): siRNA sense strand
ggaggaggaggaagaggaa

SEQ ID NO: 717198 - RNA, 19 nt, Homo sapiens
  misc_RNA (1)...(19): siRNA sense strand
ggaaacgacaucgagaaga

SEQ ID NO: 717199 - RNA, 19 nt, Homo sapiens
  misc_RNA (1)...(19): siRNA sense strand
agucagaaaucgaucagau

SEQ ID NO: 717200 - RNA, 19 nt, Homo sapiens
  misc_RNA (1)...(19): siRNA sense strand
ucacgucgcugagggagau

SEQ ID NO: 717201 - RNA, 19 nt, Homo sapiens
  misc_RNA (1)...(19): siRNA sense strand
gaaauuguggcucuaaagc

SEQ ID NO: 717202 - RNA, 19 nt, Homo sapiens
  misc_RNA (1)...(19): siRNA sense strand
gucaguggguugcaucuuc

SEQ ID NO: 717203 - RNA, 19 nt, Homo sapiens
  misc_RNA (1)...(19): siRNA sense strand
ugaagacccugaugaucca

SEQ ID NO: 717204 - RNA, 19 nt, Homo sapiens
  misc_RNA (1)...(19): siRNA sense strand
caaaugucucggaaagaaa

SEQ ID NO: 717205 - RNA, 19 nt, Homo sapiens
  misc_RNA (1)...(19): siRNA sense strand
gaagaacgagaaaaugaaa

SEQ ID NO: 717206 - RNA, 19 nt, Homo sapiens
  misc_RNA (1)...(19): siRNA sense strand
ggaagaaaugagugaagau

SEQ ID NO: 717207 - RNA, 19 nt, Homo sapiens
  misc_RNA (1)...(19): siRNA sense strand
gaagacagaggagaagaag

SEQ ID NO: 717208 - RNA, 19 nt, Homo sapiens
  misc_RNA (1)...(19): siRNA sense strand
agacagaagagaagggaaa

SEQ ID NO: 717209 - RNA, 19 nt, Homo sapiens
  misc_RNA (1)...(19): siRNA sense strand
gaaugggaaagacagaaga

SEQ ID NO: 717210 - RNA, 19 nt, Homo sapiens
  misc_RNA (1)...(19): siRNA sense strand
aggaagaaaugagugaaga

SEQ ID NO: 717211 - RNA, 19 nt, Homo sapiens
  misc_RNA (1)...(19): siRNA sense strand
gaggagaagaagaugauuc

SEQ ID NO: 717212 - RNA, 19 nt, Homo sapiens
  misc_RNA (1)...(19): siRNA sense strand
gcaacauggacaagaucua

SEQ ID NO: 717213 - RNA, 19 nt, Homo sapiens
  misc_RNA (1)...(19): siRNA sense strand
auaaggaacuccccguaua

SEQ ID NO: 717214 - RNA, 19 nt, Homo sapiens
  misc_RNA (1)...(19): siRNA sense strand
gagugaagaagcagaggaa

SEQ ID NO: 717215 - RNA, 19 nt, Homo sapiens
  misc_RNA (1)...(19): siRNA sense strand
ggaagucagaaaucgauca

SEQ ID NO: 717216 - RNA, 19 nt, Homo sapiens
  misc_RNA (1)...(19): siRNA sense strand
cccaacaucgucaccguua

SEQ ID NO: 717217 - RNA, 19 nt, Homo sapiens
  misc_RNA (1)...(19): siRNA sense strand
gggaaagacagaagagaag

SEQ ID NO: 717218 - RNA, 19 nt, Homo sapiens
  misc_RNA (1)...(19): siRNA sense strand
caaaagacaagaaaacaga

SEQ ID NO: 717219 - RNA, 19 nt, Homo sapiens
  misc_RNA (1)...(19): siRNA sense strand
gaucgaggagggcaccuau

SEQ ID NO: 717220 - RNA, 19 nt, Homo sapiens
  misc_RNA (1)...(19): siRNA sense strand
gaaaugagugaagaugaag

SEQ ID NO: 717221 - RNA, 19 nt, Homo sapiens
  misc_RNA (1)...(19): siRNA sense strand
ggaagaggaggaggaggaa

SEQ ID NO: 717222 - RNA, 19 nt, Homo sapiens
  misc_RNA (1)...(19): siRNA sense strand
caugcuagagugaaagaaa

SEQ ID NO: 717223 - RNA, 19 nt, Homo sapiens
  misc_RNA (1)...(19): siRNA sense strand
gaagagaaaauggaagaaa

SEQ ID NO: 717224 - RNA, 19 nt, Homo sapiens
  misc_RNA (1)...(19): siRNA sense strand
ggaaugggaaagacagaag

SEQ ID NO: 717225 - RNA, 19 nt, Homo sapiens
  misc_RNA (1)...(19): siRNA sense strand
cgucaccguuagagagauu

SEQ ID NO: 717226 - RNA, 19 nt, Homo sapiens
  misc_RNA (1)...(19): siRNA sense strand
gugaagaagcagaggaaga

SEQ ID NO: 717227 - RNA, 19 nt, Homo sapiens
  misc_RNA (1)...(19): siRNA sense strand
cgaagaaguaagugaggaa

SEQ ID NO: 717228 - RNA, 19 nt, Homo sapiens
  misc_RNA (1)...(19): siRNA sense strand
caacauggacaagaucuac

SEQ ID NO: 717229 - RNA, 19 nt, Homo sapiens
  misc_RNA (1)...(19): siRNA sense strand
ggaagggagcaccagugaa

SEQ ID NO: 717230 - RNA, 19 nt, Homo sapiens
  misc_RNA (1)...(19): siRNA sense strand
gcagaaucaggcucagguu

SEQ ID NO: 717231 - RNA, 19 nt, Homo sapiens
  misc_RNA (1)...(19): siRNA sense strand
cagaggagaagaagaugau

SEQ ID NO: 717232 - RNA, 19 nt, Homo sapiens
  misc_RNA (1)...(19): siRNA sense strand
guaagugaggaagaaauga

SEQ ID NO: 717233 - RNA, 19 nt, Homo sapiens
  misc_RNA (1)...(19): siRNA sense strand
cagaagagaagggaaaugg

SEQ ID NO: 717234 - RNA, 19 nt, Homo sapiens
  misc_RNA (1)...(19): siRNA sense strand
aggacggccucaagcauga

SEQ ID NO: 717235 - RNA, 19 nt, Homo sapiens
  misc_RNA (1)...(19): siRNA sense strand
gcaccuauggaguggucua

SEQ ID NO: 717236 - RNA, 19 nt, Homo sapiens
  misc_RNA (1)...(19): siRNA sense strand
gacagagggcgacuaugug

SEQ ID NO: 717237 - RNA, 19 nt, Homo sapiens
  misc_RNA (1)...(19): siRNA sense strand
aagaaaugagugaagauga

SEQ ID NO: 717238 - RNA, 19 nt, Homo sapiens
  misc_RNA (1)...(19): siRNA sense strand
ggaaauggcaagggagcau

SEQ ID NO: 717239 - RNA, 19 nt, Homo sapiens
  misc_RNA (1)...(19): siRNA sense strand
gaagauggagaaggagaag

SEQ ID NO: 717240 - RNA, 19 nt, Homo sapiens
  misc_RNA (1)...(19): siRNA sense strand
gaggagaccggcagcaacu

SEQ ID NO: 717241 - RNA, 19 nt, Homo sapiens
  misc_RNA (1)...(19): siRNA sense strand
gaggaagaaaugagugaag

SEQ ID NO: 717242 - RNA, 19 nt, Homo sapiens
  misc_RNA (1)...(19): siRNA sense strand
agaaagagagcacgaacgu

SEQ ID NO: 717243 - RNA, 19 nt, Homo sapiens
  misc_RNA (1)...(19): siRNA sense strand
ugggaaagacagaagagaa

SEQ ID NO: 717244 - RNA, 19 nt, Homo sapiens
  misc_RNA (1)...(19): siRNA sense strand
ucccagcagucaagaagau

SEQ ID NO: 717245 - RNA, 19 nt, Homo sapiens
  misc_RNA (1)...(19): siRNA sense strand
uauggaagacagaggagaa

SEQ ID NO: 717246 - RNA, 19 nt, Homo sapiens
  misc_RNA (1)...(19): siRNA sense strand
agaagcagaggaagaagug

SEQ ID NO: 717247 - RNA, 19 nt, Homo sapiens
  misc_RNA (1)...(19): siRNA sense strand
ugaagaugaagaacgagaa

SEQ ID NO: 717248 - RNA, 19 nt, Homo sapiens
  misc_RNA (1)...(19): siRNA sense strand
gugaggaagaaaugaguga

SEQ ID NO: 717249 - RNA, 19 nt, Homo sapiens
  misc_RNA (1)...(19): siRNA sense strand
gaacuccccguauagaaga

SEQ ID NO: 717250 - RNA, 19 nt, Homo sapiens
  misc_RNA (1)...(19): siRNA sense strand
gcaccagugaagaaucaga

SEQ ID NO: 717251 - RNA, 19 nt, Homo sapiens
  misc_RNA (1)...(19): siRNA sense strand
gaugaaaagagaaaagaga

SEQ ID NO: 717252 - RNA, 19 nt, Homo sapiens
  misc_RNA (1)...(19): siRNA sense strand
caucgagaagaacaggaua

SEQ ID NO: 717253 - RNA, 19 nt, Homo sapiens
  misc_RNA (1)...(19): siRNA sense strand
aagaggaggaggaggaaga

SEQ ID NO: 717254 - RNA, 19 nt, Homo sapiens
  misc_RNA (1)...(19): siRNA sense strand
acaagguguucaaggaucu

SEQ ID NO: 717255 - RNA, 19 nt, Homo sapiens
  misc_RNA (1)...(19): siRNA sense strand
gaguacggauccccucuga

SEQ ID NO: 717256 - RNA, 19 nt, Homo sapiens
  misc_RNA (1)...(19): siRNA sense strand
ugaagauggagaaggagaa

SEQ ID NO: 717257 - RNA, 19 nt, Homo sapiens
  misc_RNA (1)...(19): siRNA sense strand
ccaacaucgucaccguuag

SEQ ID NO: 717258 - RNA, 19 nt, Homo sapiens
  misc_RNA (1)...(19): siRNA sense strand
gaagucagaaaucgaucag

SEQ ID NO: 717259 - RNA, 19 nt, Homo sapiens
  misc_RNA (1)...(19): siRNA sense strand
ggugaagacccugaugauc

SEQ ID NO: 717260 - RNA, 19 nt, Homo sapiens
  misc_RNA (1)...(19): siRNA sense strand
gggcuucgaccucaugaac

SEQ ID NO: 717261 - RNA, 19 nt, Homo sapiens
  misc_RNA (1)...(19): siRNA sense strand
gaaacgacaucgagaagaa

SEQ ID NO: 717262 - RNA, 19 nt, Homo sapiens
  misc_RNA (1)...(19): siRNA sense strand
gcaaaugucucggaaagaa

SEQ ID NO: 717263 - RNA, 19 nt, Homo sapiens
  misc_RNA (1)...(19): siRNA sense strand
gaaaacagaugaaauugug

SEQ ID NO: 717264 - RNA, 19 nt, Homo sapiens
  misc_RNA (1)...(19): siRNA sense strand
gcauggagaucacaauaag

SEQ ID NO: 717265 - RNA, 19 nt, Homo sapiens
  misc_RNA (1)...(19): siRNA sense strand
gagcaccagugaagaauca

SEQ ID NO: 717266 - RNA, 19 nt, Homo sapiens
  misc_RNA (1)...(19): siRNA sense strand
ugaaacaccugcacgacaa

SEQ ID NO: 717267 - RNA, 19 nt, Homo sapiens
  misc_RNA (1)...(19): siRNA sense strand
uaaagcggcugaagaugga

SEQ ID NO: 717268 - RNA, 19 nt, Homo sapiens
  misc_RNA (1)...(19): siRNA sense strand
agaaaugagugaagaugaa

SEQ ID NO: 717269 - RNA, 19 nt, Homo sapiens
  misc_RNA (1)...(19): siRNA sense strand
gagugaagaugaagaacga

SEQ ID NO: 717270 - RNA, 19 nt, Homo sapiens
  misc_RNA (1)...(19): siRNA sense strand
gcagcaacauggacaagau

SEQ ID NO: 717271 - RNA, 19 nt, Homo sapiens
  misc_RNA (1)...(19): siRNA sense strand
gaagggagcaccagugaag

SEQ ID NO: 717272 - RNA, 19 nt, Homo sapiens
  misc_RNA (1)...(19): siRNA sense strand
gagaagacucuauggaaga

SEQ ID NO: 717273 - RNA, 19 nt, Homo sapiens
  misc_RNA (1)...(19): siRNA sense strand
ggaguggucuacagagcaa

SEQ ID NO: 717274 - RNA, 19 nt, Homo sapiens
  misc_RNA (1)...(19): siRNA sense strand
gaagaugaagaacgagaaa

SEQ ID NO: 717275 - RNA, 19 nt, Homo sapiens
  misc_RNA (1)...(19): siRNA sense strand
gcacgaacgucggaaacga

SEQ ID NO: 717276 - RNA, 19 nt, Homo sapiens
  misc_RNA (1)...(19): siRNA sense strand
cagcaaaugucucggaaag

SEQ ID NO: 717277 - RNA, 19 nt, Homo sapiens
  misc_RNA (1)...(19): siRNA sense strand
cagaaaagaugaaaagaga

SEQ ID NO: 717278 - RNA, 19 nt, Homo sapiens
  misc_RNA (1)...(19): siRNA sense strand
gaagaaaugagugaagaug

SEQ ID NO: 717279 - RNA, 19 nt, Homo sapiens
  misc_RNA (1)...(19): siRNA sense strand
agaaguaagugaggaagaa

SEQ ID NO: 717280 - RNA, 19 nt, Homo sapiens
  misc_RNA (1)...(19): siRNA sense strand
ggaagacagaggagaagaa

SEQ ID NO: 717281 - RNA, 19 nt, Homo sapiens
  misc_RNA (1)...(19): siRNA sense strand
ugacagagggcgacuaugu

SEQ ID NO: 717282 - RNA, 19 nt, Homo sapiens
  misc_RNA (1)...(19): siRNA sense strand
gagaagaacaggauaaagc

SEQ ID NO: 717283 - RNA, 19 nt, Homo sapiens
  misc_RNA (1)...(19): siRNA sense strand
gagcauuccaggagagaaa

SEQ ID NO: 717284 - RNA, 19 nt, Homo sapiens
  misc_RNA (1)...(19): siRNA sense strand
ugaagaagcagaggaagaa

SEQ ID NO: 717285 - RNA, 19 nt, Homo sapiens
  misc_RNA (1)...(19): siRNA sense strand
aaggagggcuucccgauca

SEQ ID NO: 717286 - RNA, 19 nt, Homo sapiens
  misc_RNA (1)...(19): siRNA sense strand
gcuucgaccucaugaacaa

SEQ ID NO: 717287 - RNA, 19 nt, Homo sapiens
  misc_RNA (1)...(19): siRNA sense strand
gaaguaagugaggaagaaa

SEQ ID NO: 717288 - RNA, 19 nt, Homo sapiens
  misc_RNA (1)...(19): siRNA sense strand
caacaucgucaccguuaga

SEQ ID NO: 717289 - RNA, 19 nt, Homo sapiens
  misc_RNA (1)...(19): siRNA sense strand
ugagggagaucaacaccau

SEQ ID NO: 717290 - RNA, 19 nt, Homo sapiens
  misc_RNA (1)...(19): siRNA sense strand
gcucuaaagcggcugaaga

SEQ ID NO: 717291 - RNA, 19 nt, Homo sapiens
  misc_RNA (1)...(19): siRNA sense strand
ggcugaagauggagaagga

SEQ ID NO: 717292 - RNA, 19 nt, Homo sapiens
  misc_RNA (1)...(19): siRNA sense strand
agacagaggagaagaagau

SEQ ID NO: 717293 - RNA, 19 nt, Homo sapiens
  misc_RNA (1)...(19): siRNA sense strand
gaucaacaccauccucaag

SEQ ID NO: 717294 - RNA, 19 nt, Homo sapiens
  misc_RNA (1)...(19): siRNA sense strand
gaugaaauuguggcucuaa

SEQ ID NO: 717295 - RNA, 19 nt, Homo sapiens
  misc_RNA (1)...(19): siRNA sense strand
gaaucaggcucagguucug

SEQ ID NO: 717296 - RNA, 19 nt, Homo sapiens
  misc_RNA (1)...(19): siRNA sense strand
gaggugaagacccugauga

SEQ ID NO: 717297 - RNA, 19 nt, Homo sapiens
  misc_RNA (1)...(19): siRNA sense strand
ggaggaggaggaagaggaa

SEQ ID NO: 717298 - RNA, 19 nt, Homo sapiens
  misc_RNA (1)...(19): siRNA sense strand
ggaaacgacaucgagaaga

SEQ ID NO: 717299 - RNA, 19 nt, Homo sapiens
  misc_RNA (1)...(19): siRNA sense strand
agucagaaaucgaucagau

SEQ ID NO: 717300 - RNA, 19 nt, Homo sapiens
  misc_RNA (1)...(19): siRNA sense strand
ucacgucgcugagggagau

SEQ ID NO: 717301 - RNA, 19 nt, Homo sapiens
  misc_RNA (1)...(19): siRNA sense strand
gaaauuguggcucuaaagc

SEQ ID NO: 717302 - RNA, 19 nt, Homo sapiens
  misc_RNA (1)...(19): siRNA sense strand
gucaguggguugcaucuuc

SEQ ID NO: 717303 - RNA, 19 nt, Homo sapiens
  misc_RNA (1)...(19): siRNA sense strand
ugaagacccugaugaucca

SEQ ID NO: 717304 - RNA, 19 nt, Homo sapiens
  misc_RNA (1)...(19): siRNA sense strand
caaaugucucggaaagaaa

SEQ ID NO: 717305 - RNA, 19 nt, Homo sapiens
  misc_RNA (1)...(19): siRNA sense strand
gaagaacgagaaaaugaaa

SEQ ID NO: 717306 - RNA, 19 nt, Homo sapiens
  misc_RNA (1)...(19): siRNA sense strand
ggaagaaaugagugaagau

SEQ ID NO: 717307 - RNA, 19 nt, Homo sapiens
  misc_RNA (1)...(19): siRNA sense strand
gaagacagaggagaagaag

SEQ ID NO: 717308 - RNA, 19 nt, Homo sapiens
  misc_RNA (1)...(19): siRNA sense strand
agacagaagagaagggaaa

SEQ ID NO: 717309 - RNA, 19 nt, Homo sapiens
  misc_RNA (1)...(19): siRNA sense strand
gaaugggaaagacagaaga

SEQ ID NO: 717310 - RNA, 19 nt, Homo sapiens
  misc_RNA (1)...(19): siRNA sense strand
aggaagaaaugagugaaga

SEQ ID NO: 717311 - RNA, 19 nt, Homo sapiens
  misc_RNA (1)...(19): siRNA sense strand
gaggagaagaagaugauuc

SEQ ID NO: 717312 - RNA, 19 nt, Homo sapiens
  misc_RNA (1)...(19): siRNA sense strand
gcaacauggacaagaucua

SEQ ID NO: 717313 - RNA, 19 nt, Homo sapiens
  misc_RNA (1)...(19): siRNA sense strand
auaaggaacuccccguaua

SEQ ID NO: 717314 - RNA, 19 nt, Homo sapiens
  misc_RNA (1)...(19): siRNA sense strand
gagugaagaagcagaggaa

SEQ ID NO: 717315 - RNA, 19 nt, Homo sapiens
  misc_RNA (1)...(19): siRNA sense strand
ggaagucagaaaucgauca

SEQ ID NO: 717316 - RNA, 19 nt, Homo sapiens
  misc_RNA (1)...(19): siRNA sense strand
cccaacaucgucaccguua

SEQ ID NO: 717317 - RNA, 19 nt, Homo sapiens
  misc_RNA (1)...(19): siRNA sense strand
gggaaagacagaagagaag

SEQ ID NO: 717318 - RNA, 19 nt, Homo sapiens
  misc_RNA (1)...(19): siRNA sense strand
caaaagacaagaaaacaga

SEQ ID NO: 717319 - RNA, 19 nt, Homo sapiens
  misc_RNA (1)...(19): siRNA sense strand
gaucgaggagggcaccuau

SEQ ID NO: 717320 - RNA, 19 nt, Homo sapiens
  misc_RNA (1)...(19): siRNA sense strand
gaaaugagugaagaugaag

SEQ ID NO: 717321 - RNA, 19 nt, Homo sapiens
  misc_RNA (1)...(19): siRNA sense strand
ggaagaggaggaggaggaa

SEQ ID NO: 717322 - RNA, 19 nt, Homo sapiens
  misc_RNA (1)...(19): siRNA sense strand
caugcuagagugaaagaaa

SEQ ID NO: 717323 - RNA, 19 nt, Homo sapiens
  misc_RNA (1)...(19): siRNA sense strand
gaagagaaaauggaagaaa

SEQ ID NO: 717324 - RNA, 19 nt, Homo sapiens
  misc_RNA (1)...(19): siRNA sense strand
ggaaugggaaagacagaag

SEQ ID NO: 717325 - RNA, 19 nt, Homo sapiens
  misc_RNA (1)...(19): siRNA sense strand
cgucaccguuagagagauu

SEQ ID NO: 717326 - RNA, 19 nt, Homo sapiens
  misc_RNA (1)...(19): siRNA sense strand
gugaagaagcagaggaaga

SEQ ID NO: 717327 - RNA, 19 nt, Homo sapiens
  misc_RNA (1)...(19): siRNA sense strand
cgaagaaguaagugaggaa

SEQ ID NO: 717328 - RNA, 19 nt, Homo sapiens
  misc_RNA (1)...(19): siRNA sense strand
caacauggacaagaucuac

SEQ ID NO: 717329 - RNA, 19 nt, Homo sapiens
  misc_RNA (1)...(19): siRNA sense strand
ggaagggagcaccagugaa

SEQ ID NO: 717330 - RNA, 19 nt, Homo sapiens
  misc_RNA (1)...(19): siRNA sense strand
gcagaaucaggcucagguu

SEQ ID NO: 717331 - RNA, 19 nt, Homo sapiens
  misc_RNA (1)...(19): siRNA sense strand
cagaggagaagaagaugau

SEQ ID NO: 717332 - RNA, 19 nt, Homo sapiens
  misc_RNA (1)...(19): siRNA sense strand
guaagugaggaagaaauga

SEQ ID NO: 717333 - RNA, 19 nt, Homo sapiens
  misc_RNA (1)...(19): siRNA sense strand
cagaagagaagggaaaugg

SEQ ID NO: 717334 - RNA, 19 nt, Homo sapiens
  misc_RNA (1)...(19): siRNA sense strand
aggacggccucaagcauga

SEQ ID NO: 717335 - RNA, 19 nt, Homo sapiens
  misc_RNA (1)...(19): siRNA sense strand
gcaccuauggaguggucua

SEQ ID NO: 717336 - RNA, 19 nt, Homo sapiens
  misc_RNA (1)...(19): siRNA sense strand
gacagagggcgacuaugug

SEQ ID NO: 717337 - RNA, 19 nt, Homo sapiens
  misc_RNA (1)...(19): siRNA sense strand
aagaaaugagugaagauga

SEQ ID NO: 717338 - RNA, 19 nt, Homo sapiens
  misc_RNA (1)...(19): siRNA sense strand
ggaaauggcaagggagcau

SEQ ID NO: 717339 - RNA, 19 nt, Homo sapiens
  misc_RNA (1)...(19): siRNA sense strand
gaagauggagaaggagaag

SEQ ID NO: 717340 - RNA, 19 nt, Homo sapiens
  misc_RNA (1)...(19): siRNA sense strand
gaggagaccggcagcaacu

SEQ ID NO: 717341 - RNA, 19 nt, Homo sapiens
  misc_RNA (1)...(19): siRNA sense strand
gaggaagaaaugagugaag

SEQ ID NO: 717342 - RNA, 19 nt, Homo sapiens
  misc_RNA (1)...(19): siRNA sense strand
agaaagagagcacgaacgu

SEQ ID NO: 717343 - RNA, 19 nt, Homo sapiens
  misc_RNA (1)...(19): siRNA sense strand
ugggaaagacagaagagaa

SEQ ID NO: 717344 - RNA, 19 nt, Homo sapiens
  misc_RNA (1)...(19): siRNA sense strand
ucccagcagucaagaagau

SEQ ID NO: 717345 - RNA, 19 nt, Homo sapiens
  misc_RNA (1)...(19): siRNA sense strand
uauggaagacagaggagaa

SEQ ID NO: 717346 - RNA, 19 nt, Homo sapiens
  misc_RNA (1)...(19): siRNA sense strand
agaagcagaggaagaagug

SEQ ID NO: 717347 - RNA, 19 nt, Homo sapiens
  misc_RNA (1)...(19): siRNA sense strand
ugaagaugaagaacgagaa

SEQ ID NO: 717348 - RNA, 19 nt, Homo sapiens
  misc_RNA (1)...(19): siRNA sense strand
gugaggaagaaaugaguga

SEQ ID NO: 717349 - RNA, 19 nt, Homo sapiens
  misc_RNA (1)...(19): siRNA sense strand
gaacuccccguauagaaga

SEQ ID NO: 717350 - RNA, 19 nt, Homo sapiens
  misc_RNA (1)...(19): siRNA sense strand
gcaccagugaagaaucaga

SEQ ID NO: 717351 - RNA, 19 nt, Homo sapiens
  misc_RNA (1)...(19): siRNA sense strand
gaugaaaagagaaaagaga

SEQ ID NO: 717352 - RNA, 19 nt, Homo sapiens
  misc_RNA (1)...(19): siRNA sense strand
caucgagaagaacaggaua

SEQ ID NO: 717353 - RNA, 19 nt, Homo sapiens
  misc_RNA (1)...(19): siRNA sense strand
aagaggaggaggaggaaga

SEQ ID NO: 717354 - RNA, 19 nt, Homo sapiens
  misc_RNA (1)...(19): siRNA sense strand
acaagguguucaaggaucu

SEQ ID NO: 717355 - RNA, 19 nt, Homo sapiens
  misc_RNA (1)...(19): siRNA sense strand
gaguacggauccccucuga

SEQ ID NO: 717356 - RNA, 19 nt, Homo sapiens
  misc_RNA (1)...(19): siRNA sense strand
ugaagauggagaaggagaa

SEQ ID NO: 717357 - RNA, 19 nt, Homo sapiens
  misc_RNA (1)...(19): siRNA sense strand
ccaacaucgucaccguuag

SEQ ID NO: 717358 - RNA, 19 nt, Homo sapiens
  misc_RNA (1)...(19): siRNA sense strand
gaagucagaaaucgaucag

SEQ ID NO: 717359 - RNA, 19 nt, Homo sapiens
  misc_RNA (1)...(19): siRNA sense strand
ggugaagacccugaugauc

SEQ ID NO: 717360 - RNA, 19 nt, Homo sapiens
  misc_RNA (1)...(19): siRNA sense strand
gggcuucgaccucaugaac

SEQ ID NO: 717361 - RNA, 19 nt, Homo sapiens
  misc_RNA (1)...(19): siRNA sense strand
gaaaacagaugaaauugug

SEQ ID NO: 717362 - RNA, 19 nt, Homo sapiens
  misc_RNA (1)...(19): siRNA sense strand
gagcaccagugaagaauca

SEQ ID NO: 717363 - RNA, 19 nt, Homo sapiens
  misc_RNA (1)...(19): siRNA sense strand
ugaaacaccugcacgacaa

SEQ ID NO: 717364 - RNA, 19 nt, Homo sapiens
  misc_RNA (1)...(19): siRNA sense strand
uaaagcggcugaagaugga

SEQ ID NO: 717365 - RNA, 19 nt, Homo sapiens
  misc_RNA (1)...(19): siRNA sense strand
agaaaugagugaagaugaa

SEQ ID NO: 717366 - RNA, 19 nt, Homo sapiens
  misc_RNA (1)...(19): siRNA sense strand
gagugaagaugaagaacga

SEQ ID NO: 717367 - RNA, 19 nt, Homo sapiens
  misc_RNA (1)...(19): siRNA sense strand
gcagcaacauggacaagau

SEQ ID NO: 717368 - RNA, 19 nt, Homo sapiens
  misc_RNA (1)...(19): siRNA sense strand
gaagggagcaccagugaag

SEQ ID NO: 717369 - RNA, 19 nt, Homo sapiens
  misc_RNA (1)...(19): siRNA sense strand
gaagaugaagaacgagaaa

SEQ ID NO: 717370 - RNA, 19 nt, Homo sapiens
  misc_RNA (1)...(19): siRNA sense strand
ggaguggucuacagagcaa

SEQ ID NO: 717371 - RNA, 19 nt, Homo sapiens
  misc_RNA (1)...(19): siRNA sense strand
gaagaaaugagugaagaug

SEQ ID NO: 717372 - RNA, 19 nt, Homo sapiens
  misc_RNA (1)...(19): siRNA sense strand
agaaguaagugaggaagaa

SEQ ID NO: 717373 - RNA, 19 nt, Homo sapiens
  misc_RNA (1)...(19): siRNA sense strand
ugacagagggcgacuaugu

SEQ ID NO: 717374 - RNA, 19 nt, Homo sapiens
  misc_RNA (1)...(19): siRNA sense strand
ugaagaagcagaggaagaa

SEQ ID NO: 717375 - RNA, 19 nt, Homo sapiens
  misc_RNA (1)...(19): siRNA sense strand
aaggagggcuucccgauca

SEQ ID NO: 717376 - RNA, 19 nt, Homo sapiens
  misc_RNA (1)...(19): siRNA sense strand
gcuucgaccucaugaacaa

SEQ ID NO: 717377 - RNA, 19 nt, Homo sapiens
  misc_RNA (1)...(19): siRNA sense strand
gaaguaagugaggaagaaa

SEQ ID NO: 717378 - RNA, 19 nt, Homo sapiens
  misc_RNA (1)...(19): siRNA sense strand
caacaucgucaccguuaga

SEQ ID NO: 717379 - RNA, 19 nt, Homo sapiens
  misc_RNA (1)...(19): siRNA sense strand
ugagggagaucaacaccau

SEQ ID NO: 717380 - RNA, 19 nt, Homo sapiens
  misc_RNA (1)...(19): siRNA sense strand
gcucuaaagcggcugaaga

SEQ ID NO: 717381 - RNA, 19 nt, Homo sapiens
  misc_RNA (1)...(19): siRNA sense strand
ggcugaagauggagaagga

SEQ ID NO: 717382 - RNA, 19 nt, Homo sapiens
  misc_RNA (1)...(19): siRNA sense strand
gaugaaauuguggcucuaa

SEQ ID NO: 717383 - RNA, 19 nt, Homo sapiens
  misc_RNA (1)...(19): siRNA sense strand
gaucaacaccauccucaag

SEQ ID NO: 717384 - RNA, 19 nt, Homo sapiens
  misc_RNA (1)...(19): siRNA sense strand
ggaggaggaggaagaggaa

SEQ ID NO: 717385 - RNA, 19 nt, Homo sapiens
  misc_RNA (1)...(19): siRNA sense strand
gaggugaagacccugauga

SEQ ID NO: 717386 - RNA, 19 nt, Homo sapiens
  misc_RNA (1)...(19): siRNA sense strand
gaaucaggcucagguucug

SEQ ID NO: 717387 - RNA, 19 nt, Homo sapiens
  misc_RNA (1)...(19): siRNA sense strand
ucacgucgcugagggagau

SEQ ID NO: 717388 - RNA, 19 nt, Homo sapiens
  misc_RNA (1)...(19): siRNA sense strand
agucagaaaucgaucagau

SEQ ID NO: 717389 - RNA, 19 nt, Homo sapiens
  misc_RNA (1)...(19): siRNA sense strand
gaaauuguggcucuaaagc

SEQ ID NO: 717390 - RNA, 19 nt, Homo sapiens
  misc_RNA (1)...(19): siRNA sense strand
gucaguggguugcaucuuc

SEQ ID NO: 717391 - RNA, 19 nt, Homo sapiens
  misc_RNA (1)...(19): siRNA sense strand
ugaagacccugaugaucca

SEQ ID NO: 717392 - RNA, 19 nt, Homo sapiens
  misc_RNA (1)...(19): siRNA sense strand
ggaagaaaugagugaagau

SEQ ID NO: 717393 - RNA, 19 nt, Homo sapiens
  misc_RNA (1)...(19): siRNA sense strand
gaagaacgagaaaaugaaa

SEQ ID NO: 717394 - RNA, 19 nt, Homo sapiens
  misc_RNA (1)...(19): siRNA sense strand
aggaagaaaugagugaaga

SEQ ID NO: 717395 - RNA, 19 nt, Homo sapiens
  misc_RNA (1)...(19): siRNA sense strand
gcaacauggacaagaucua

SEQ ID NO: 717396 - RNA, 19 nt, Homo sapiens
  misc_RNA (1)...(19): siRNA sense strand
gagugaagaagcagaggaa

SEQ ID NO: 717397 - RNA, 19 nt, Homo sapiens
  misc_RNA (1)...(19): siRNA sense strand
ggaagucagaaaucgauca

SEQ ID NO: 717398 - RNA, 19 nt, Homo sapiens
  misc_RNA (1)...(19): siRNA sense strand
cccaacaucgucaccguua

SEQ ID NO: 717399 - RNA, 19 nt, Homo sapiens
  misc_RNA (1)...(19): siRNA sense strand
gaaaugagugaagaugaag

SEQ ID NO: 717400 - RNA, 19 nt, Homo sapiens
  misc_RNA (1)...(19): siRNA sense strand
ggaagaggaggaggaggaa

SEQ ID NO: 717401 - RNA, 19 nt, Homo sapiens
  misc_RNA (1)...(19): siRNA sense strand
caaaagacaagaaaacaga

SEQ ID NO: 717402 - RNA, 19 nt, Homo sapiens
  misc_RNA (1)...(19): siRNA sense strand
gaucgaggagggcaccuau

SEQ ID NO: 717403 - RNA, 19 nt, Homo sapiens
  misc_RNA (1)...(19): siRNA sense strand
gaagagaaaauggaagaaa

SEQ ID NO: 717404 - RNA, 19 nt, Homo sapiens
  misc_RNA (1)...(19): siRNA sense strand
cgaagaaguaagugaggaa

SEQ ID NO: 717405 - RNA, 19 nt, Homo sapiens
  misc_RNA (1)...(19): siRNA sense strand
cgucaccguuagagagauu

SEQ ID NO: 717406 - RNA, 19 nt, Homo sapiens
  misc_RNA (1)...(19): siRNA sense strand
gugaagaagcagaggaaga

SEQ ID NO: 717407 - RNA, 19 nt, Homo sapiens
  misc_RNA (1)...(19): siRNA sense strand
caacauggacaagaucuac

SEQ ID NO: 717408 - RNA, 19 nt, Homo sapiens
  misc_RNA (1)...(19): siRNA sense strand
ggaagggagcaccagugaa

SEQ ID NO: 717409 - RNA, 19 nt, Homo sapiens
  misc_RNA (1)...(19): siRNA sense strand
guaagugaggaagaaauga

SEQ ID NO: 717410 - RNA, 19 nt, Homo sapiens
  misc_RNA (1)...(19): siRNA sense strand
gcagaaucaggcucagguu

SEQ ID NO: 717411 - RNA, 19 nt, Homo sapiens
  misc_RNA (1)...(19): siRNA sense strand
aagaaaugagugaagauga

SEQ ID NO: 717412 - RNA, 19 nt, Homo sapiens
  misc_RNA (1)...(19): siRNA sense strand
aggacggccucaagcauga

SEQ ID NO: 717413 - RNA, 19 nt, Homo sapiens
  misc_RNA (1)...(19): siRNA sense strand
gcaccuauggaguggucua

SEQ ID NO: 717414 - RNA, 19 nt, Homo sapiens
  misc_RNA (1)...(19): siRNA sense strand
gacagagggcgacuaugug

SEQ ID NO: 717415 - RNA, 19 nt, Homo sapiens
  misc_RNA (1)...(19): siRNA sense strand
gaggagaccggcagcaacu

SEQ ID NO: 717416 - RNA, 19 nt, Homo sapiens
  misc_RNA (1)...(19): siRNA sense strand
gaagauggagaaggagaag

SEQ ID NO: 717417 - RNA, 19 nt, Homo sapiens
  misc_RNA (1)...(19): siRNA sense strand
gaggaagaaaugagugaag

SEQ ID NO: 717418 - RNA, 19 nt, Homo sapiens
  misc_RNA (1)...(19): siRNA sense strand
gugaggaagaaaugaguga

SEQ ID NO: 717419 - RNA, 19 nt, Homo sapiens
  misc_RNA (1)...(19): siRNA sense strand
ucccagcagucaagaagau

SEQ ID NO: 717420 - RNA, 19 nt, Homo sapiens
  misc_RNA (1)...(19): siRNA sense strand
agaagcagaggaagaagug

SEQ ID NO: 717421 - RNA, 19 nt, Homo sapiens
  misc_RNA (1)...(19): siRNA sense strand
ugaagaugaagaacgagaa

SEQ ID NO: 717422 - RNA, 19 nt, Homo sapiens
  misc_RNA (1)...(19): siRNA sense strand
gcaccagugaagaaucaga

SEQ ID NO: 717423 - RNA, 19 nt, Homo sapiens
  misc_RNA (1)...(19): siRNA sense strand
aagaggaggaggaggaaga

SEQ ID NO: 717424 - RNA, 19 nt, Homo sapiens
  misc_RNA (1)...(19): siRNA sense strand
acaagguguucaaggaucu

SEQ ID NO: 717425 - RNA, 19 nt, Homo sapiens
  misc_RNA (1)...(19): siRNA sense strand
gaguacggauccccucuga

SEQ ID NO: 717426 - RNA, 19 nt, Homo sapiens
  misc_RNA (1)...(19): siRNA sense strand
ugaagauggagaaggagaa

SEQ ID NO: 717427 - RNA, 19 nt, Homo sapiens
  misc_RNA (1)...(19): siRNA sense strand
ccaacaucgucaccguuag

SEQ ID NO: 717428 - RNA, 19 nt, Homo sapiens
  misc_RNA (1)...(19): siRNA sense strand
gaagucagaaaucgaucag

SEQ ID NO: 717429 - RNA, 19 nt, Homo sapiens
  misc_RNA (1)...(19): siRNA sense strand
ggugaagacccugaugauc

SEQ ID NO: 717430 - RNA, 19 nt, Homo sapiens
  misc_RNA (1)...(19): siRNA sense strand
ugaaauuguggcucuaaag

SEQ ID NO: 717431 - RNA, 19 nt, Homo sapiens
  misc_RNA (1)...(19): siRNA sense strand
gggcuucgaccucaugaac

SEQ ID NO: 717432 - RNA, 19 nt, Homo sapiens
  misc_RNA (1)...(19): siRNA sense strand
ggagaccggcagcaacucu

SEQ ID NO: 717433 - RNA, 19 nt, Homo sapiens
  misc_RNA (1)...(19): siRNA sense strand
ggaggugaagacccugaug

SEQ ID NO: 717434 - RNA, 19 nt, Homo sapiens
  misc_RNA (1)...(19): siRNA sense strand
gaaacgacaucgagaagaa

SEQ ID NO: 717435 - RNA, 19 nt, Homo sapiens
  misc_RNA (1)...(19): siRNA sense strand
gcaaaugucucggaaagaa

SEQ ID NO: 717436 - RNA, 19 nt, Homo sapiens
  misc_RNA (1)...(19): siRNA sense strand
gaaaacagaugaaauugug

SEQ ID NO: 717437 - RNA, 19 nt, Homo sapiens
  misc_RNA (1)...(19): siRNA sense strand
gcauggagaucacaauaag

SEQ ID NO: 717438 - RNA, 19 nt, Homo sapiens
  misc_RNA (1)...(19): siRNA sense strand
gagcaccagugaagaauca

SEQ ID NO: 717439 - RNA, 19 nt, Homo sapiens
  misc_RNA (1)...(19): siRNA sense strand
ugaaacaccugcacgacaa

SEQ ID NO: 717440 - RNA, 19 nt, Homo sapiens
  misc_RNA (1)...(19): siRNA sense strand
gaaaaggacucuuggaaag

SEQ ID NO: 717441 - RNA, 19 nt, Homo sapiens
  misc_RNA (1)...(19): siRNA sense strand
uaaagcggcugaagaugga

SEQ ID NO: 717442 - RNA, 19 nt, Homo sapiens
  misc_RNA (1)...(19): siRNA sense strand
agaaaugagugaagaugaa

SEQ ID NO: 717443 - RNA, 19 nt, Homo sapiens
  misc_RNA (1)...(19): siRNA sense strand
gagugaagaugaagaacga

SEQ ID NO: 717444 - RNA, 19 nt, Homo sapiens
  misc_RNA (1)...(19): siRNA sense strand
gcagcaacauggacaagau

SEQ ID NO: 717445 - RNA, 19 nt, Homo sapiens
  misc_RNA (1)...(19): siRNA sense strand
gaagggagcaccagugaag

SEQ ID NO: 717446 - RNA, 19 nt, Homo sapiens
  misc_RNA (1)...(19): siRNA sense strand
ggaaggaacaagaggagaa

SEQ ID NO: 717447 - RNA, 19 nt, Homo sapiens
  misc_RNA (1)...(19): siRNA sense strand
ggaguggucuacagagcaa

SEQ ID NO: 717448 - RNA, 19 nt, Homo sapiens
  misc_RNA (1)...(19): siRNA sense strand
gaagaugaagaacgagaaa

SEQ ID NO: 717449 - RNA, 19 nt, Homo sapiens
  misc_RNA (1)...(19): siRNA sense strand
gcacgaacgucggaaacga

SEQ ID NO: 717450 - RNA, 19 nt, Homo sapiens
  misc_RNA (1)...(19): siRNA sense strand
gagaagacucuauggaaga

SEQ ID NO: 717451 - RNA, 19 nt, Homo sapiens
  misc_RNA (1)...(19): siRNA sense strand
cagcaaaugucucggaaag

SEQ ID NO: 717452 - RNA, 19 nt, Homo sapiens
  misc_RNA (1)...(19): siRNA sense strand
cagaaaagaugaaaagaga

SEQ ID NO: 717453 - RNA, 19 nt, Homo sapiens
  misc_RNA (1)...(19): siRNA sense strand
gaagaaaugagugaagaug

SEQ ID NO: 717454 - RNA, 19 nt, Homo sapiens
  misc_RNA (1)...(19): siRNA sense strand
agaaguaagugaggaagaa

SEQ ID NO: 717455 - RNA, 19 nt, Homo sapiens
  misc_RNA (1)...(19): siRNA sense strand
ggaagacagaggagaagaa

SEQ ID NO: 717456 - RNA, 19 nt, Homo sapiens
  misc_RNA (1)...(19): siRNA sense strand
gaaggaacaagaggagaaa

SEQ ID NO: 717457 - RNA, 19 nt, Homo sapiens
  misc_RNA (1)...(19): siRNA sense strand
ugacagagggcgacuaugu

SEQ ID NO: 717458 - RNA, 19 nt, Homo sapiens
  misc_RNA (1)...(19): siRNA sense strand
ggagaaagcagagauaaaa

SEQ ID NO: 717459 - RNA, 19 nt, Homo sapiens
  misc_RNA (1)...(19): siRNA sense strand
gagaagaacaggauaaagc

SEQ ID NO: 717460 - RNA, 19 nt, Homo sapiens
  misc_RNA (1)...(19): siRNA sense strand
gaggagaaagcagagauaa

SEQ ID NO: 717461 - RNA, 19 nt, Homo sapiens
  misc_RNA (1)...(19): siRNA sense strand
ugaagaagcagaggaagaa

SEQ ID NO: 717462 - RNA, 19 nt, Homo sapiens
  misc_RNA (1)...(19): siRNA sense strand
gagcauuccaggagagaaa

SEQ ID NO: 717463 - RNA, 19 nt, Homo sapiens
  misc_RNA (1)...(19): siRNA sense strand
aaggagggcuucccgauca

SEQ ID NO: 717464 - RNA, 19 nt, Homo sapiens
  misc_RNA (1)...(19): siRNA sense strand
gcuucgaccucaugaacaa

SEQ ID NO: 717465 - RNA, 19 nt, Homo sapiens
  misc_RNA (1)...(19): siRNA sense strand
gaaguaagugaggaagaaa

SEQ ID NO: 717466 - RNA, 19 nt, Homo sapiens
  misc_RNA (1)...(19): siRNA sense strand
caacaucgucaccguuaga

SEQ ID NO: 717467 - RNA, 19 nt, Homo sapiens
  misc_RNA (1)...(19): siRNA sense strand
ugagggagaucaacaccau

SEQ ID NO: 717468 - RNA, 19 nt, Homo sapiens
  misc_RNA (1)...(19): siRNA sense strand
aaaggacucuuggaaagug

SEQ ID NO: 717469 - RNA, 19 nt, Homo sapiens
  misc_RNA (1)...(19): siRNA sense strand
gcucuaaagcggcugaaga

SEQ ID NO: 717470 - RNA, 19 nt, Homo sapiens
  misc_RNA (1)...(19): siRNA sense strand
ggcugaagauggagaagga

SEQ ID NO: 717471 - RNA, 19 nt, Homo sapiens
  misc_RNA (1)...(19): siRNA sense strand
agacagaggagaagaagau

SEQ ID NO: 717472 - RNA, 19 nt, Homo sapiens
  misc_RNA (1)...(19): siRNA sense strand
gaucaacaccauccucaag

SEQ ID NO: 717473 - RNA, 19 nt, Homo sapiens
  misc_RNA (1)...(19): siRNA sense strand
gaugaaauuguggcucuaa

SEQ ID NO: 717474 - RNA, 19 nt, Homo sapiens
  misc_RNA (1)...(19): siRNA sense strand
gaaucaggcucagguucug

SEQ ID NO: 717475 - RNA, 19 nt, Homo sapiens
  misc_RNA (1)...(19): siRNA sense strand
gaggugaagacccugauga

SEQ ID NO: 717476 - RNA, 19 nt, Homo sapiens
  misc_RNA (1)...(19): siRNA sense strand
ggaggaggaggaagaggaa

SEQ ID NO: 717477 - RNA, 19 nt, Homo sapiens
  misc_RNA (1)...(19): siRNA sense strand
ggaaacgacaucgagaaga

SEQ ID NO: 717478 - RNA, 19 nt, Homo sapiens
  misc_RNA (1)...(19): siRNA sense strand
agucagaaaucgaucagau

SEQ ID NO: 717479 - RNA, 19 nt, Homo sapiens
  misc_RNA (1)...(19): siRNA sense strand
ucacgucgcugagggagau

SEQ ID NO: 717480 - RNA, 19 nt, Homo sapiens
  misc_RNA (1)...(19): siRNA sense strand
gaaauuguggcucuaaagc

SEQ ID NO: 717481 - RNA, 19 nt, Homo sapiens
  misc_RNA (1)...(19): siRNA sense strand
gucaguggguugcaucuuc

SEQ ID NO: 717482 - RNA, 19 nt, Homo sapiens
  misc_RNA (1)...(19): siRNA sense strand
ugaagacccugaugaucca

SEQ ID NO: 717483 - RNA, 19 nt, Homo sapiens
  misc_RNA (1)...(19): siRNA sense strand
gaagacagaggagaagaag

SEQ ID NO: 717484 - RNA, 19 nt, Homo sapiens
  misc_RNA (1)...(19): siRNA sense strand
gaagaacgagaaaaugaaa

SEQ ID NO: 717485 - RNA, 19 nt, Homo sapiens
  misc_RNA (1)...(19): siRNA sense strand
ggaagaaaugagugaagau

SEQ ID NO: 717486 - RNA, 19 nt, Homo sapiens
  misc_RNA (1)...(19): siRNA sense strand
agacagaagagaagggaaa

SEQ ID NO: 717487 - RNA, 19 nt, Homo sapiens
  misc_RNA (1)...(19): siRNA sense strand
gaaugggaaagacagaaga

SEQ ID NO: 717488 - RNA, 19 nt, Homo sapiens
  misc_RNA (1)...(19): siRNA sense strand
caaaugucucggaaagaaa

SEQ ID NO: 717489 - RNA, 19 nt, Homo sapiens
  misc_RNA (1)...(19): siRNA sense strand
gaggagaagaagaugauuc

SEQ ID NO: 717490 - RNA, 19 nt, Homo sapiens
  misc_RNA (1)...(19): siRNA sense strand
gcaacauggacaagaucua

SEQ ID NO: 717491 - RNA, 19 nt, Homo sapiens
  misc_RNA (1)...(19): siRNA sense strand
aggaagaaaugagugaaga

SEQ ID NO: 717492 - RNA, 19 nt, Homo sapiens
  misc_RNA (1)...(19): siRNA sense strand
auaaggaacuccccguaua

SEQ ID NO: 717493 - RNA, 19 nt, Homo sapiens
  misc_RNA (1)...(19): siRNA sense strand
gagugaagaagcagaggaa

SEQ ID NO: 717494 - RNA, 19 nt, Homo sapiens
  misc_RNA (1)...(19): siRNA sense strand
ggaagucagaaaucgauca

SEQ ID NO: 717495 - RNA, 19 nt, Homo sapiens
  misc_RNA (1)...(19): siRNA sense strand
cccaacaucgucaccguua

SEQ ID NO: 717496 - RNA, 19 nt, Homo sapiens
  misc_RNA (1)...(19): siRNA sense strand
gggaaagacagaagagaag

SEQ ID NO: 717497 - RNA, 19 nt, Homo sapiens
  misc_RNA (1)...(19): siRNA sense strand
caaaagacaagaaaacaga

SEQ ID NO: 717498 - RNA, 19 nt, Homo sapiens
  misc_RNA (1)...(19): siRNA sense strand
gaucgaggagggcaccuau

SEQ ID NO: 717499 - RNA, 19 nt, Homo sapiens
  misc_RNA (1)...(19): siRNA sense strand
gaaaugagugaagaugaag

SEQ ID NO: 717500 - RNA, 19 nt, Homo sapiens
  misc_RNA (1)...(19): siRNA sense strand
ggaagaggaggaggaggaa

SEQ ID NO: 717501 - RNA, 19 nt, Homo sapiens
  misc_RNA (1)...(19): siRNA sense strand
caugcuagagugaaagaaa

SEQ ID NO: 717502 - RNA, 19 nt, Homo sapiens
  misc_RNA (1)...(19): siRNA sense strand
gaagagaaaauggaagaaa

SEQ ID NO: 717503 - RNA, 19 nt, Homo sapiens
  misc_RNA (1)...(19): siRNA sense strand
ggaaugggaaagacagaag

SEQ ID NO: 717504 - RNA, 19 nt, Homo sapiens
  misc_RNA (1)...(19): siRNA sense strand
cgucaccguuagagagauu

SEQ ID NO: 717505 - RNA, 19 nt, Homo sapiens
  misc_RNA (1)...(19): siRNA sense strand
gugaagaagcagaggaaga

SEQ ID NO: 717506 - RNA, 19 nt, Homo sapiens
  misc_RNA (1)...(19): siRNA sense strand
cgaagaaguaagugaggaa

SEQ ID NO: 717507 - RNA, 19 nt, Homo sapiens
  misc_RNA (1)...(19): siRNA sense strand
caacauggacaagaucuac

SEQ ID NO: 717508 - RNA, 19 nt, Homo sapiens
  misc_RNA (1)...(19): siRNA sense strand
ggaacaagaggagaaagca

SEQ ID NO: 717509 - RNA, 19 nt, Homo sapiens
  misc_RNA (1)...(19): siRNA sense strand
gaaacgaaggaaggaacaa

SEQ ID NO: 717510 - RNA, 19 nt, Homo sapiens
  misc_RNA (1)...(19): siRNA sense strand
ggaagggagcaccagugaa

SEQ ID NO: 717511 - RNA, 19 nt, Homo sapiens
  misc_RNA (1)...(19): siRNA sense strand
cagaggagaagaagaugau

SEQ ID NO: 717512 - RNA, 19 nt, Homo sapiens
  misc_RNA (1)...(19): siRNA sense strand
guaagugaggaagaaauga

SEQ ID NO: 717513 - RNA, 19 nt, Homo sapiens
  misc_RNA (1)...(19): siRNA sense strand
gcagaaucaggcucagguu

SEQ ID NO: 717514 - RNA, 19 nt, Homo sapiens
  misc_RNA (1)...(19): siRNA sense strand
cagaagagaagggaaaugg

SEQ ID NO: 717515 - RNA, 19 nt, Homo sapiens
  misc_RNA (1)...(19): siRNA sense strand
aggacggccucaagcauga

SEQ ID NO: 717516 - RNA, 19 nt, Homo sapiens
  misc_RNA (1)...(19): siRNA sense strand
gcaccuauggaguggucua

SEQ ID NO: 717517 - RNA, 19 nt, Homo sapiens
  misc_RNA (1)...(19): siRNA sense strand
gacagagggcgacuaugug

SEQ ID NO: 717518 - RNA, 19 nt, Homo sapiens
  misc_RNA (1)...(19): siRNA sense strand
aagaaaugagugaagauga

SEQ ID NO: 717519 - RNA, 19 nt, Homo sapiens
  misc_RNA (1)...(19): siRNA sense strand
ggaaauggcaagggagcau

SEQ ID NO: 717520 - RNA, 19 nt, Homo sapiens
  misc_RNA (1)...(19): siRNA sense strand
agaggagaaagcagagaua

SEQ ID NO: 717521 - RNA, 19 nt, Homo sapiens
  misc_RNA (1)...(19): siRNA sense strand
gaagauggagaaggagaag

SEQ ID NO: 717522 - RNA, 19 nt, Homo sapiens
  misc_RNA (1)...(19): siRNA sense strand
gaggagaccggcagcaacu

SEQ ID NO: 717523 - RNA, 19 nt, Homo sapiens
  misc_RNA (1)...(19): siRNA sense strand
agaaagagagcacgaacgu

SEQ ID NO: 717524 - RNA, 19 nt, Homo sapiens
  misc_RNA (1)...(19): siRNA sense strand
gaggaagaaaugagugaag

SEQ ID NO: 717525 - RNA, 19 nt, Homo sapiens
  misc_RNA (1)...(19): siRNA sense strand
gcagagauaaaacgcuuaa

SEQ ID NO: 717526 - RNA, 19 nt, Homo sapiens
  misc_RNA (1)...(19): siRNA sense strand
ugggaaagacagaagagaa

SEQ ID NO: 717527 - RNA, 19 nt, Homo sapiens
  misc_RNA (1)...(19): siRNA sense strand
ucccagcagucaagaagau

SEQ ID NO: 717528 - RNA, 19 nt, Homo sapiens
  misc_RNA (1)...(19): siRNA sense strand
agaagcagaggaagaagug

SEQ ID NO: 717529 - RNA, 19 nt, Homo sapiens
  misc_RNA (1)...(19): siRNA sense strand
uauggaagacagaggagaa

SEQ ID NO: 717530 - RNA, 19 nt, Homo sapiens
  misc_RNA (1)...(19): siRNA sense strand
ugaagaugaagaacgagaa

SEQ ID NO: 717531 - RNA, 19 nt, Homo sapiens
  misc_RNA (1)...(19): siRNA sense strand
gugaggaagaaaugaguga

SEQ ID NO: 717532 - RNA, 19 nt, Homo sapiens
  misc_RNA (1)...(19): siRNA sense strand
gaacuccccguauagaaga

SEQ ID NO: 717533 - RNA, 19 nt, Homo sapiens
  misc_RNA (1)...(19): siRNA sense strand
ugaaaaggacucuuggaaa

SEQ ID NO: 717534 - RNA, 19 nt, Homo sapiens
  misc_RNA (1)...(19): siRNA sense strand
gaaacgacaucgagaagaa

SEQ ID NO: 717535 - RNA, 19 nt, Homo sapiens
  misc_RNA (1)...(19): siRNA sense strand
gcaaaugucucggaaagaa

SEQ ID NO: 717536 - RNA, 19 nt, Homo sapiens
  misc_RNA (1)...(19): siRNA sense strand
gaaaacagaugaaauugug

SEQ ID NO: 717537 - RNA, 19 nt, Homo sapiens
  misc_RNA (1)...(19): siRNA sense strand
gcauggagaucacaauaag

SEQ ID NO: 717538 - RNA, 19 nt, Homo sapiens
  misc_RNA (1)...(19): siRNA sense strand
gagcaccagugaagaauca

SEQ ID NO: 717539 - RNA, 19 nt, Homo sapiens
  misc_RNA (1)...(19): siRNA sense strand
ugaaacaccugcacgacaa

SEQ ID NO: 717540 - RNA, 19 nt, Homo sapiens
  misc_RNA (1)...(19): siRNA sense strand
gaaaaggacucuuggaaag

SEQ ID NO: 717541 - RNA, 19 nt, Homo sapiens
  misc_RNA (1)...(19): siRNA sense strand
uaaagcggcugaagaugga

SEQ ID NO: 717542 - RNA, 19 nt, Homo sapiens
  misc_RNA (1)...(19): siRNA sense strand
agaaaugagugaagaugaa

SEQ ID NO: 717543 - RNA, 19 nt, Homo sapiens
  misc_RNA (1)...(19): siRNA sense strand
gagugaagaugaagaacga

SEQ ID NO: 717544 - RNA, 19 nt, Homo sapiens
  misc_RNA (1)...(19): siRNA sense strand
gcagcaacauggacaagau

SEQ ID NO: 717545 - RNA, 19 nt, Homo sapiens
  misc_RNA (1)...(19): siRNA sense strand
gaagggagcaccagugaag

SEQ ID NO: 717546 - RNA, 19 nt, Homo sapiens
  misc_RNA (1)...(19): siRNA sense strand
ggaaggaacaagaggagaa

SEQ ID NO: 717547 - RNA, 19 nt, Homo sapiens
  misc_RNA (1)...(19): siRNA sense strand
ggaguggucuacagagcaa

SEQ ID NO: 717548 - RNA, 19 nt, Homo sapiens
  misc_RNA (1)...(19): siRNA sense strand
gaagaugaagaacgagaaa

SEQ ID NO: 717549 - RNA, 19 nt, Homo sapiens
  misc_RNA (1)...(19): siRNA sense strand
gcacgaacgucggaaacga

SEQ ID NO: 717550 - RNA, 19 nt, Homo sapiens
  misc_RNA (1)...(19): siRNA sense strand
gagaagacucuauggaaga

SEQ ID NO: 717551 - RNA, 19 nt, Homo sapiens
  misc_RNA (1)...(19): siRNA sense strand
cagcaaaugucucggaaag

SEQ ID NO: 717552 - RNA, 19 nt, Homo sapiens
  misc_RNA (1)...(19): siRNA sense strand
cagaaaagaugaaaagaga

SEQ ID NO: 717553 - RNA, 19 nt, Homo sapiens
  misc_RNA (1)...(19): siRNA sense strand
gaagaaaugagugaagaug

SEQ ID NO: 717554 - RNA, 19 nt, Homo sapiens
  misc_RNA (1)...(19): siRNA sense strand
agaaguaagugaggaagaa

SEQ ID NO: 717555 - RNA, 19 nt, Homo sapiens
  misc_RNA (1)...(19): siRNA sense strand
ggaagacagaggagaagaa

SEQ ID NO: 717556 - RNA, 19 nt, Homo sapiens
  misc_RNA (1)...(19): siRNA sense strand
gaaggaacaagaggagaaa

SEQ ID NO: 717557 - RNA, 19 nt, Homo sapiens
  misc_RNA (1)...(19): siRNA sense strand
ugacagagggcgacuaugu

SEQ ID NO: 717558 - RNA, 19 nt, Homo sapiens
  misc_RNA (1)...(19): siRNA sense strand
ggagaaagcagagauaaaa

SEQ ID NO: 717559 - RNA, 19 nt, Homo sapiens
  misc_RNA (1)...(19): siRNA sense strand
gagaagaacaggauaaagc

SEQ ID NO: 717560 - RNA, 19 nt, Homo sapiens
  misc_RNA (1)...(19): siRNA sense strand
gaggagaaagcagagauaa

SEQ ID NO: 717561 - RNA, 19 nt, Homo sapiens
  misc_RNA (1)...(19): siRNA sense strand
ugaagaagcagaggaagaa

SEQ ID NO: 717562 - RNA, 19 nt, Homo sapiens
  misc_RNA (1)...(19): siRNA sense strand
gagcauuccaggagagaaa

SEQ ID NO: 717563 - RNA, 19 nt, Homo sapiens
  misc_RNA (1)...(19): siRNA sense strand
aaggagggcuucccgauca

SEQ ID NO: 717564 - RNA, 19 nt, Homo sapiens
  misc_RNA (1)...(19): siRNA sense strand
gcuucgaccucaugaacaa

SEQ ID NO: 717565 - RNA, 19 nt, Homo sapiens
  misc_RNA (1)...(19): siRNA sense strand
gaaguaagugaggaagaaa

SEQ ID NO: 717566 - RNA, 19 nt, Homo sapiens
  misc_RNA (1)...(19): siRNA sense strand
caacaucgucaccguuaga

SEQ ID NO: 717567 - RNA, 19 nt, Homo sapiens
  misc_RNA (1)...(19): siRNA sense strand
ugagggagaucaacaccau

SEQ ID NO: 717568 - RNA, 19 nt, Homo sapiens
  misc_RNA (1)...(19): siRNA sense strand
aaaggacucuuggaaagug

SEQ ID NO: 717569 - RNA, 19 nt, Homo sapiens
  misc_RNA (1)...(19): siRNA sense strand
gcucuaaagcggcugaaga

SEQ ID NO: 717570 - RNA, 19 nt, Homo sapiens
  misc_RNA (1)...(19): siRNA sense strand
ggcugaagauggagaagga

SEQ ID NO: 717571 - RNA, 19 nt, Homo sapiens
  misc_RNA (1)...(19): siRNA sense strand
agacagaggagaagaagau

SEQ ID NO: 717572 - RNA, 19 nt, Homo sapiens
  misc_RNA (1)...(19): siRNA sense strand
gaucaacaccauccucaag

SEQ ID NO: 717573 - RNA, 19 nt, Homo sapiens
  misc_RNA (1)...(19): siRNA sense strand
gaugaaauuguggcucuaa

SEQ ID NO: 717574 - RNA, 19 nt, Homo sapiens
  misc_RNA (1)...(19): siRNA sense strand
gaaucaggcucagguucug

SEQ ID NO: 717575 - RNA, 19 nt, Homo sapiens
  misc_RNA (1)...(19): siRNA sense strand
gaggugaagacccugauga

SEQ ID NO: 717576 - RNA, 19 nt, Homo sapiens
  misc_RNA (1)...(19): siRNA sense strand
ggaggaggaggaagaggaa

SEQ ID NO: 717577 - RNA, 19 nt, Homo sapiens
  misc_RNA (1)...(19): siRNA sense strand
ggaaacgacaucgagaaga

SEQ ID NO: 717578 - RNA, 19 nt, Homo sapiens
  misc_RNA (1)...(19): siRNA sense strand
agucagaaaucgaucagau

SEQ ID NO: 717579 - RNA, 19 nt, Homo sapiens
  misc_RNA (1)...(19): siRNA sense strand
ucacgucgcugagggagau

SEQ ID NO: 717580 - RNA, 19 nt, Homo sapiens
  misc_RNA (1)...(19): siRNA sense strand
gaaauuguggcucuaaagc

SEQ ID NO: 717581 - RNA, 19 nt, Homo sapiens
  misc_RNA (1)...(19): siRNA sense strand
gucaguggguugcaucuuc

SEQ ID NO: 717582 - RNA, 19 nt, Homo sapiens
  misc_RNA (1)...(19): siRNA sense strand
ugaagacccugaugaucca

SEQ ID NO: 717583 - RNA, 19 nt, Homo sapiens
  misc_RNA (1)...(19): siRNA sense strand
gaagacagaggagaagaag

SEQ ID NO: 717584 - RNA, 19 nt, Homo sapiens
  misc_RNA (1)...(19): siRNA sense strand
gaagaacgagaaaaugaaa

SEQ ID NO: 717585 - RNA, 19 nt, Homo sapiens
  misc_RNA (1)...(19): siRNA sense strand
ggaagaaaugagugaagau

SEQ ID NO: 717586 - RNA, 19 nt, Homo sapiens
  misc_RNA (1)...(19): siRNA sense strand
agacagaagagaagggaaa

SEQ ID NO: 717587 - RNA, 19 nt, Homo sapiens
  misc_RNA (1)...(19): siRNA sense strand
gaaugggaaagacagaaga

SEQ ID NO: 717588 - RNA, 19 nt, Homo sapiens
  misc_RNA (1)...(19): siRNA sense strand
caaaugucucggaaagaaa

SEQ ID NO: 717589 - RNA, 19 nt, Homo sapiens
  misc_RNA (1)...(19): siRNA sense strand
gaggagaagaagaugauuc

SEQ ID NO: 717590 - RNA, 19 nt, Homo sapiens
  misc_RNA (1)...(19): siRNA sense strand
gcaacauggacaagaucua

SEQ ID NO: 717591 - RNA, 19 nt, Homo sapiens
  misc_RNA (1)...(19): siRNA sense strand
aggaagaaaugagugaaga

SEQ ID NO: 717592 - RNA, 19 nt, Homo sapiens
  misc_RNA (1)...(19): siRNA sense strand
auaaggaacuccccguaua

SEQ ID NO: 717593 - RNA, 19 nt, Homo sapiens
  misc_RNA (1)...(19): siRNA sense strand
gagugaagaagcagaggaa

SEQ ID NO: 717594 - RNA, 19 nt, Homo sapiens
  misc_RNA (1)...(19): siRNA sense strand
ggaagucagaaaucgauca

SEQ ID NO: 717595 - RNA, 19 nt, Homo sapiens
  misc_RNA (1)...(19): siRNA sense strand
cccaacaucgucaccguua

SEQ ID NO: 717596 - RNA, 19 nt, Homo sapiens
  misc_RNA (1)...(19): siRNA sense strand
gggaaagacagaagagaag

SEQ ID NO: 717597 - RNA, 19 nt, Homo sapiens
  misc_RNA (1)...(19): siRNA sense strand
caaaagacaagaaaacaga

SEQ ID NO: 717598 - RNA, 19 nt, Homo sapiens
  misc_RNA (1)...(19): siRNA sense strand
gaucgaggagggcaccuau

SEQ ID NO: 717599 - RNA, 19 nt, Homo sapiens
  misc_RNA (1)...(19): siRNA sense strand
gaaaugagugaagaugaag

SEQ ID NO: 717600 - RNA, 19 nt, Homo sapiens
  misc_RNA (1)...(19): siRNA sense strand
ggaagaggaggaggaggaa

SEQ ID NO: 717601 - RNA, 19 nt, Homo sapiens
  misc_RNA (1)...(19): siRNA sense strand
caugcuagagugaaagaaa

SEQ ID NO: 717602 - RNA, 19 nt, Homo sapiens
  misc_RNA (1)...(19): siRNA sense strand
gaagagaaaauggaagaaa

SEQ ID NO: 717603 - RNA, 19 nt, Homo sapiens
  misc_RNA (1)...(19): siRNA sense strand
ggaaugggaaagacagaag

SEQ ID NO: 717604 - RNA, 19 nt, Homo sapiens
  misc_RNA (1)...(19): siRNA sense strand
cgucaccguuagagagauu

SEQ ID NO: 717605 - RNA, 19 nt, Homo sapiens
  misc_RNA (1)...(19): siRNA sense strand
gugaagaagcagaggaaga

SEQ ID NO: 717606 - RNA, 19 nt, Homo sapiens
  misc_RNA (1)...(19): siRNA sense strand
cgaagaaguaagugaggaa

SEQ ID NO: 717607 - RNA, 19 nt, Homo sapiens
  misc_RNA (1)...(19): siRNA sense strand
caacauggacaagaucuac

SEQ ID NO: 717608 - RNA, 19 nt, Homo sapiens
  misc_RNA (1)...(19): siRNA sense strand
ggaacaagaggagaaagca

SEQ ID NO: 717609 - RNA, 19 nt, Homo sapiens
  misc_RNA (1)...(19): siRNA sense strand
gaaacgaaggaaggaacaa

SEQ ID NO: 717610 - RNA, 19 nt, Homo sapiens
  misc_RNA (1)...(19): siRNA sense strand
ggaagggagcaccagugaa

SEQ ID NO: 717611 - RNA, 19 nt, Homo sapiens
  misc_RNA (1)...(19): siRNA sense strand
cagaggagaagaagaugau

SEQ ID NO: 717612 - RNA, 19 nt, Homo sapiens
  misc_RNA (1)...(19): siRNA sense strand
guaagugaggaagaaauga

SEQ ID NO: 717613 - RNA, 19 nt, Homo sapiens
  misc_RNA (1)...(19): siRNA sense strand
gcagaaucaggcucagguu

SEQ ID NO: 717614 - RNA, 19 nt, Homo sapiens
  misc_RNA (1)...(19): siRNA sense strand
cagaagagaagggaaaugg

SEQ ID NO: 717615 - RNA, 19 nt, Homo sapiens
  misc_RNA (1)...(19): siRNA sense strand
aggacggccucaagcauga

SEQ ID NO: 717616 - RNA, 19 nt, Homo sapiens
  misc_RNA (1)...(19): siRNA sense strand
gcaccuauggaguggucua

SEQ ID NO: 717617 - RNA, 19 nt, Homo sapiens
  misc_RNA (1)...(19): siRNA sense strand
gacagagggcgacuaugug

SEQ ID NO: 717618 - RNA, 19 nt, Homo sapiens
  misc_RNA (1)...(19): siRNA sense strand
aagaaaugagugaagauga

SEQ ID NO: 717619 - RNA, 19 nt, Homo sapiens
  misc_RNA (1)...(19): siRNA sense strand
ggaaauggcaagggagcau

SEQ ID NO: 717620 - RNA, 19 nt, Homo sapiens
  misc_RNA (1)...(19): siRNA sense strand
agaggagaaagcagagaua

SEQ ID NO: 717621 - RNA, 19 nt, Homo sapiens
  misc_RNA (1)...(19): siRNA sense strand
gaagauggagaaggagaag

SEQ ID NO: 717622 - RNA, 19 nt, Homo sapiens
  misc_RNA (1)...(19): siRNA sense strand
gaggagaccggcagcaacu

SEQ ID NO: 717623 - RNA, 19 nt, Homo sapiens
  misc_RNA (1)...(19): siRNA sense strand
agaaagagagcacgaacgu

SEQ ID NO: 717624 - RNA, 19 nt, Homo sapiens
  misc_RNA (1)...(19): siRNA sense strand
gaggaagaaaugagugaag

SEQ ID NO: 717625 - RNA, 19 nt, Homo sapiens
  misc_RNA (1)...(19): siRNA sense strand
gcagagauaaaacgcuuaa

SEQ ID NO: 717626 - RNA, 19 nt, Homo sapiens
  misc_RNA (1)...(19): siRNA sense strand
ugggaaagacagaagagaa

SEQ ID NO: 717627 - RNA, 19 nt, Homo sapiens
  misc_RNA (1)...(19): siRNA sense strand
ucccagcagucaagaagau

SEQ ID NO: 717628 - RNA, 19 nt, Homo sapiens
  misc_RNA (1)...(19): siRNA sense strand
agaagcagaggaagaagug

SEQ ID NO: 717629 - RNA, 19 nt, Homo sapiens
  misc_RNA (1)...(19): siRNA sense strand
uauggaagacagaggagaa

SEQ ID NO: 717630 - RNA, 19 nt, Homo sapiens
  misc_RNA (1)...(19): siRNA sense strand
ugaagaugaagaacgagaa

SEQ ID NO: 717631 - RNA, 19 nt, Homo sapiens
  misc_RNA (1)...(19): siRNA sense strand
gugaggaagaaaugaguga

SEQ ID NO: 717632 - RNA, 19 nt, Homo sapiens
  misc_RNA (1)...(19): siRNA sense strand
gaacuccccguauagaaga

SEQ ID NO: 717633 - RNA, 19 nt, Homo sapiens
  misc_RNA (1)...(19): siRNA sense strand
ugaaaaggacucuuggaaa

SEQ ID NO: 717634 - RNA, 19 nt, Homo sapiens
  misc_RNA (1)...(19): siRNA sense strand
gaaagaaacuggauucacu

SEQ ID NO: 717635 - RNA, 19 nt, Homo sapiens
  misc_RNA (1)...(19): siRNA sense strand
gaaacuggauucacuagga

SEQ ID NO: 717636 - RNA, 19 nt, Homo sapiens
  misc_RNA (1)...(19): siRNA sense strand
aaacuuagccaccauauuu

SEQ ID NO: 717637 - RNA, 19 nt, Homo sapiens
  misc_RNA (1)...(19): siRNA sense strand
aaagaacucucaagcagua

SEQ ID NO: 717638 - RNA, 19 nt, Homo sapiens
  misc_RNA (1)...(19): siRNA sense strand
guacacagcuuucaucaac

SEQ ID NO: 717639 - RNA, 19 nt, Homo sapiens
  misc_RNA (1)...(19): siRNA sense strand
aagaaaggcuucccaauca

SEQ ID NO: 717640 - RNA, 19 nt, Homo sapiens
  misc_RNA (1)...(19): siRNA sense strand
caucaucgcuguugugcaa

SEQ ID NO: 717641 - RNA, 19 nt, Homo sapiens
  misc_RNA (1)...(19): siRNA sense strand
gaagucaucagacaaagaa

SEQ ID NO: 717642 - RNA, 19 nt, Homo sapiens
  misc_RNA (1)...(19): siRNA sense strand
gacaaagaauucucaguuc

SEQ ID NO: 717643 - RNA, 19 nt, Homo sapiens
  misc_RNA (1)...(19): siRNA sense strand
gcagaagucaucagacaaa

SEQ ID NO: 717644 - RNA, 19 nt, Homo sapiens
  misc_RNA (1)...(19): siRNA sense strand
acuagaagcuuuacaacuu

SEQ ID NO: 717645 - RNA, 19 nt, Homo sapiens
  misc_RNA (1)...(19): siRNA sense strand
aaagagagugagacaauua

SEQ ID NO: 717646 - RNA, 19 nt, Homo sapiens
  misc_RNA (1)...(19): siRNA sense strand
cgaaugacagggccuauaa

SEQ ID NO: 717647 - RNA, 19 nt, Homo sapiens
  misc_RNA (1)...(19): siRNA sense strand
cuagaagcuuuacaacuuu

SEQ ID NO: 717648 - RNA, 19 nt, Homo sapiens
  misc_RNA (1)...(19): siRNA sense strand
ucaccgaucuugaugacaa

SEQ ID NO: 717649 - RNA, 19 nt, Homo sapiens
  misc_RNA (1)...(19): siRNA sense strand
ccuugcagcuccucauaua

SEQ ID NO: 717650 - RNA, 19 nt, Homo sapiens
  misc_RNA (1)...(19): siRNA sense strand
acaaagaauucucaguuca

SEQ ID NO: 717651 - RNA, 19 nt, Homo sapiens
  misc_RNA (1)...(19): siRNA sense strand
gcccuuaucccaagucauu

SEQ ID NO: 717652 - RNA, 19 nt, Homo sapiens
  misc_RNA (1)...(19): siRNA sense strand
agacaaagaauucucaguu

SEQ ID NO: 717653 - RNA, 19 nt, Homo sapiens
  misc_RNA (1)...(19): siRNA sense strand
gacagggccuauaaacuca

SEQ ID NO: 717654 - RNA, 19 nt, Homo sapiens
  misc_RNA (1)...(19): siRNA sense strand
caagaggucacugggaaua

SEQ ID NO: 717655 - RNA, 19 nt, Homo sapiens
  misc_RNA (1)...(19): siRNA sense strand
gacccaaccugcugcacaa

SEQ ID NO: 717656 - RNA, 19 nt, Homo sapiens
  misc_RNA (1)...(19): siRNA sense strand
aaacuggauucacuaggaa

SEQ ID NO: 717657 - RNA, 19 nt, Homo sapiens
  misc_RNA (1)...(19): siRNA sense strand
gaucaccauucccaaagau

SEQ ID NO: 717658 - RNA, 19 nt, Homo sapiens
  misc_RNA (1)...(19): siRNA sense strand
ggaauuugaccgugggauu

SEQ ID NO: 717659 - RNA, 19 nt, Homo sapiens
  misc_RNA (1)...(19): siRNA sense strand
gcagagggacgagcagaaa

SEQ ID NO: 717660 - RNA, 19 nt, Homo sapiens
  misc_RNA (1)...(19): siRNA sense strand
ggaauaaaaugacaucucu

SEQ ID NO: 717661 - RNA, 19 nt, Homo sapiens
  misc_RNA (1)...(19): siRNA sense strand
uaagaaagaaacuggauuc

SEQ ID NO: 717662 - RNA, 19 nt, Homo sapiens
  misc_RNA (1)...(19): siRNA sense strand
gaauuugaccgugggauug

SEQ ID NO: 717663 - RNA, 19 nt, Homo sapiens
  misc_RNA (1)...(19): siRNA sense strand
aaagaauucucaguucaga

SEQ ID NO: 717664 - RNA, 19 nt, Homo sapiens
  misc_RNA (1)...(19): siRNA sense strand
aagcagaagucaucagaca

SEQ ID NO: 717665 - RNA, 19 nt, Homo sapiens
  misc_RNA (1)...(19): siRNA sense strand
cagcaaagaugggcaagag

SEQ ID NO: 717666 - RNA, 19 nt, Homo sapiens
  misc_RNA (1)...(19): siRNA sense strand
ugacagggccuauaaacuc

SEQ ID NO: 717667 - RNA, 19 nt, Homo sapiens
  misc_RNA (1)...(19): siRNA sense strand
gaaaggcuucccaaucauc

SEQ ID NO: 717668 - RNA, 19 nt, Homo sapiens
  misc_RNA (1)...(19): siRNA sense strand
ccaugucaguggauucuau

SEQ ID NO: 717669 - RNA, 19 nt, Homo sapiens
  misc_RNA (1)...(19): siRNA sense strand
gaaugacagggccuauaaa

SEQ ID NO: 717670 - RNA, 19 nt, Homo sapiens
  misc_RNA (1)...(19): siRNA sense strand
ggagcacaguguucaugau

SEQ ID NO: 717671 - RNA, 19 nt, Homo sapiens
  misc_RNA (1)...(19): siRNA sense strand
gagcacaguguucaugaug

SEQ ID NO: 717672 - RNA, 19 nt, Homo sapiens
  misc_RNA (1)...(19): siRNA sense strand
ccucagaaacaccgaauga

SEQ ID NO: 717673 - RNA, 19 nt, Homo sapiens
  misc_RNA (1)...(19): siRNA sense strand
agaggucacugggaauaaa

SEQ ID NO: 717674 - RNA, 19 nt, Homo sapiens
  misc_RNA (1)...(19): siRNA sense strand
ugaauccuauuuacagaca

SEQ ID NO: 717675 - RNA, 19 nt, Homo sapiens
  misc_RNA (1)...(19): siRNA sense strand
gaggagagcacggccauca

SEQ ID NO: 717676 - RNA, 19 nt, Homo sapiens
  misc_RNA (1)...(19): siRNA sense strand
ggagagcacggccaucauc

SEQ ID NO: 717677 - RNA, 19 nt, Homo sapiens
  misc_RNA (1)...(19): siRNA sense strand
caaagacaaagaauucauc

SEQ ID NO: 717678 - RNA, 19 nt, Homo sapiens
  misc_RNA (1)...(19): siRNA sense strand
aaagaaacuggauucacua

SEQ ID NO: 717679 - RNA, 19 nt, Homo sapiens
  misc_RNA (1)...(19): siRNA sense strand
agcaguaacucaucucuca

SEQ ID NO: 717680 - RNA, 19 nt, Homo sapiens
  misc_RNA (1)...(19): siRNA sense strand
gcgaaugacagggccuaua

SEQ ID NO: 717681 - RNA, 19 nt, Homo sapiens
  misc_RNA (1)...(19): siRNA sense strand
cugaugucguggacuauuu

SEQ ID NO: 717682 - RNA, 19 nt, Homo sapiens
  misc_RNA (1)...(19): siRNA sense strand
uggcuucccuccucccauu

SEQ ID NO: 717683 - RNA, 19 nt, Homo sapiens
  misc_RNA (1)...(19): siRNA sense strand
ggacaaaagagaaagaaau

SEQ ID NO: 717684 - RNA, 19 nt, Homo sapiens
  misc_RNA (1)...(19): siRNA sense strand
gagauaagaaacucagucu

SEQ ID NO: 717685 - RNA, 19 nt, Homo sapiens
  misc_RNA (1)...(19): siRNA sense strand
cagcucaaccucagaaaca

SEQ ID NO: 717686 - RNA, 19 nt, Homo sapiens
  misc_RNA (1)...(19): siRNA sense strand
ucagaucaccauucccaaa

SEQ ID NO: 717687 - RNA, 19 nt, Homo sapiens
  misc_RNA (1)...(19): siRNA sense strand
cguggacuauuuacucaga

SEQ ID NO: 717688 - RNA, 19 nt, Homo sapiens
  misc_RNA (1)...(19): siRNA sense strand
ucagaaacaccgaaugagu

SEQ ID NO: 717689 - RNA, 19 nt, Homo sapiens
  misc_RNA (1)...(19): siRNA sense strand
ugaugucguggacuauuua

SEQ ID NO: 717690 - RNA, 19 nt, Homo sapiens
  misc_RNA (1)...(19): siRNA sense strand
ggaggaggagcacaguguu

SEQ ID NO: 717691 - RNA, 19 nt, Homo sapiens
  misc_RNA (1)...(19): siRNA sense strand
gaggaggggugccauguca

SEQ ID NO: 717692 - RNA, 19 nt, Homo sapiens
  misc_RNA (1)...(19): siRNA sense strand
uaaacuuagccaccauauu

SEQ ID NO: 717693 - RNA, 19 nt, Homo sapiens
  misc_RNA (1)...(19): siRNA sense strand
uagaagcuuuacaacuuuc

SEQ ID NO: 717694 - RNA, 19 nt, Homo sapiens
  misc_RNA (1)...(19): siRNA sense strand
gcaagaggucacugggaau

SEQ ID NO: 717695 - RNA, 19 nt, Homo sapiens
  misc_RNA (1)...(19): siRNA sense strand
ggacuauuuacucagaaga

SEQ ID NO: 717696 - RNA, 19 nt, Homo sapiens
  misc_RNA (1)...(19): siRNA sense strand
cugaucagccuguuagaga

SEQ ID NO: 717697 - RNA, 19 nt, Homo sapiens
  misc_RNA (1)...(19): siRNA sense strand
gagacaauuacgugaggaa

SEQ ID NO: 717698 - RNA, 19 nt, Homo sapiens
  misc_RNA (1)...(19): siRNA sense strand
caaagaauucucaguucag

SEQ ID NO: 717699 - RNA, 19 nt, Homo sapiens
  misc_RNA (1)...(19): siRNA sense strand
acaagcagaagucaucaga

SEQ ID NO: 717700 - RNA, 19 nt, Homo sapiens
  misc_RNA (1)...(19): siRNA sense strand
agaaacaccgaaugaguca

SEQ ID NO: 717701 - RNA, 19 nt, Homo sapiens
  misc_RNA (1)...(19): siRNA sense strand
agaaaggcuucccaaucau

SEQ ID NO: 717702 - RNA, 19 nt, Homo sapiens
  misc_RNA (1)...(19): siRNA sense strand
gucguggacuauuuacuca

SEQ ID NO: 717703 - RNA, 19 nt, Homo sapiens
  misc_RNA (1)...(19): siRNA sense strand
gcacaagcagaagucauca

SEQ ID NO: 717704 - RNA, 19 nt, Homo sapiens
  misc_RNA (1)...(19): siRNA sense strand
gaggagcacaguguucaug

SEQ ID NO: 717705 - RNA, 19 nt, Homo sapiens
  misc_RNA (1)...(19): siRNA sense strand
gaggaggagcacaguguuc

SEQ ID NO: 717706 - RNA, 19 nt, Homo sapiens
  misc_RNA (1)...(19): siRNA sense strand
gacuauuuacucagaagaa

SEQ ID NO: 717707 - RNA, 19 nt, Homo sapiens
  misc_RNA (1)...(19): siRNA sense strand
aggaacagcugggcaccuu

SEQ ID NO: 717708 - RNA, 19 nt, Homo sapiens
  misc_RNA (1)...(19): siRNA sense strand
agaucaccauucccaaaga

SEQ ID NO: 717709 - RNA, 19 nt, Homo sapiens
  misc_RNA (1)...(19): siRNA sense strand
agagaccgauccugauguc

SEQ ID NO: 717710 - RNA, 19 nt, Homo sapiens
  misc_RNA (1)...(19): siRNA sense strand
cagcuuucaucaacacucu

SEQ ID NO: 717711 - RNA, 19 nt, Homo sapiens
  misc_RNA (1)...(19): siRNA sense strand
gcugucagaucaccauucc

SEQ ID NO: 717712 - RNA, 19 nt, Homo sapiens
  misc_RNA (1)...(19): siRNA sense strand
gucaucagacaaagaauuc

SEQ ID NO: 717713 - RNA, 19 nt, Homo sapiens
  misc_RNA (1)...(19): siRNA sense strand
caccuugcagcuccucaua

SEQ ID NO: 717714 - RNA, 19 nt, Homo sapiens
  misc_RNA (1)...(19): siRNA sense strand
uggauucuaucaccgaucu

SEQ ID NO: 717715 - RNA, 19 nt, Homo sapiens
  misc_RNA (1)...(19): siRNA sense strand
uuagagaccgauccugaug

SEQ ID NO: 717716 - RNA, 19 nt, Homo sapiens
  misc_RNA (1)...(19): siRNA sense strand
agaauucucaguucagagu

SEQ ID NO: 717717 - RNA, 19 nt, Homo sapiens
  misc_RNA (1)...(19): siRNA sense strand
uggauucacuaggaaagga

SEQ ID NO: 717718 - RNA, 19 nt, Homo sapiens
  misc_RNA (1)...(19): siRNA sense strand
gaaugcccuuaucccaagu

SEQ ID NO: 717719 - RNA, 19 nt, Homo sapiens
  misc_RNA (1)...(19): siRNA sense strand
aaaagagagugagacaauu

SEQ ID NO: 717720 - RNA, 19 nt, Homo sapiens
  misc_RNA (1)...(19): siRNA sense strand
gauucuaucaccgaucuug

SEQ ID NO: 717721 - RNA, 19 nt, Homo sapiens
  misc_RNA (1)...(19): siRNA sense strand
aacauggccuccagacagu

SEQ ID NO: 717722 - RNA, 19 nt, Homo sapiens
  misc_RNA (1)...(19): siRNA sense strand
cagaagucaucagacaaag

SEQ ID NO: 717723 - RNA, 19 nt, Homo sapiens
  misc_RNA (1)...(19): siRNA sense strand
ugacaacaucagcaaagau

SEQ ID NO: 717724 - RNA, 19 nt, Homo sapiens
  misc_RNA (1)...(19): siRNA sense strand
agagggacgagcagaaaga

SEQ ID NO: 717725 - RNA, 19 nt, Homo sapiens
  misc_RNA (1)...(19): siRNA sense strand
acacagcuuucaucaacac

SEQ ID NO: 717726 - RNA, 19 nt, Homo sapiens
  misc_RNA (1)...(19): siRNA sense strand
agucaucagacaaagaauu

SEQ ID NO: 717727 - RNA, 19 nt, Homo sapiens
  misc_RNA (1)...(19): siRNA sense strand
gaaagaaacuggauucacu

SEQ ID NO: 717728 - RNA, 19 nt, Homo sapiens
  misc_RNA (1)...(19): siRNA sense strand
gaaacuggauucacuagga

SEQ ID NO: 717729 - RNA, 19 nt, Homo sapiens
  misc_RNA (1)...(19): siRNA sense strand
aaacuuagccaccauauuu

SEQ ID NO: 717730 - RNA, 19 nt, Homo sapiens
  misc_RNA (1)...(19): siRNA sense strand
aaagaacucucaagcagua

SEQ ID NO: 717731 - RNA, 19 nt, Homo sapiens
  misc_RNA (1)...(19): siRNA sense strand
guacacagcuuucaucaac

SEQ ID NO: 717732 - RNA, 19 nt, Homo sapiens
  misc_RNA (1)...(19): siRNA sense strand
aagaaaggcuucccaauca

SEQ ID NO: 717733 - RNA, 19 nt, Homo sapiens
  misc_RNA (1)...(19): siRNA sense strand
caucaucgcuguugugcaa

SEQ ID NO: 717734 - RNA, 19 nt, Homo sapiens
  misc_RNA (1)...(19): siRNA sense strand
gaagucaucagacaaagaa

SEQ ID NO: 717735 - RNA, 19 nt, Homo sapiens
  misc_RNA (1)...(19): siRNA sense strand
gacaaagaauucucaguuc

SEQ ID NO: 717736 - RNA, 19 nt, Homo sapiens
  misc_RNA (1)...(19): siRNA sense strand
gcagaagucaucagacaaa

SEQ ID NO: 717737 - RNA, 19 nt, Homo sapiens
  misc_RNA (1)...(19): siRNA sense strand
acuagaagcuuuacaacuu

SEQ ID NO: 717738 - RNA, 19 nt, Homo sapiens
  misc_RNA (1)...(19): siRNA sense strand
aaagagagugagacaauua

SEQ ID NO: 717739 - RNA, 19 nt, Homo sapiens
  misc_RNA (1)...(19): siRNA sense strand
cgaaugacagggccuauaa

SEQ ID NO: 717740 - RNA, 19 nt, Homo sapiens
  misc_RNA (1)...(19): siRNA sense strand
cuagaagcuuuacaacuuu

SEQ ID NO: 717741 - RNA, 19 nt, Homo sapiens
  misc_RNA (1)...(19): siRNA sense strand
cggagaagcuuuacagagu

SEQ ID NO: 717742 - RNA, 19 nt, Homo sapiens
  misc_RNA (1)...(19): siRNA sense strand
ucaccgaucuugaugacaa

SEQ ID NO: 717743 - RNA, 19 nt, Homo sapiens
  misc_RNA (1)...(19): siRNA sense strand
ccuugcagcuccucauaua

SEQ ID NO: 717744 - RNA, 19 nt, Homo sapiens
  misc_RNA (1)...(19): siRNA sense strand
acaaagaauucucaguuca

SEQ ID NO: 717745 - RNA, 19 nt, Homo sapiens
  misc_RNA (1)...(19): siRNA sense strand
ggagggaggcauucaucua

SEQ ID NO: 717746 - RNA, 19 nt, Homo sapiens
  misc_RNA (1)...(19): siRNA sense strand
gcccuuaucccaagucauu

SEQ ID NO: 717747 - RNA, 19 nt, Homo sapiens
  misc_RNA (1)...(19): siRNA sense strand
agacaaagaauucucaguu

SEQ ID NO: 717748 - RNA, 19 nt, Homo sapiens
  misc_RNA (1)...(19): siRNA sense strand
gacagggccuauaaacuca

SEQ ID NO: 717749 - RNA, 19 nt, Homo sapiens
  misc_RNA (1)...(19): siRNA sense strand
caagaggucacugggaaua

SEQ ID NO: 717750 - RNA, 19 nt, Homo sapiens
  misc_RNA (1)...(19): siRNA sense strand
gacccaaccugcugcacaa

SEQ ID NO: 717751 - RNA, 19 nt, Homo sapiens
  misc_RNA (1)...(19): siRNA sense strand
aaacuggauucacuaggaa

SEQ ID NO: 717752 - RNA, 19 nt, Homo sapiens
  misc_RNA (1)...(19): siRNA sense strand
ggaauuugaccgugggauu

SEQ ID NO: 717753 - RNA, 19 nt, Homo sapiens
  misc_RNA (1)...(19): siRNA sense strand
gaucaccauucccaaagau

SEQ ID NO: 717754 - RNA, 19 nt, Homo sapiens
  misc_RNA (1)...(19): siRNA sense strand
gcagagggacgagcagaaa

SEQ ID NO: 717755 - RNA, 19 nt, Homo sapiens
  misc_RNA (1)...(19): siRNA sense strand
ggaauaaaaugacaucucu

SEQ ID NO: 717756 - RNA, 19 nt, Homo sapiens
  misc_RNA (1)...(19): siRNA sense strand
uaagaaagaaacuggauuc

SEQ ID NO: 717757 - RNA, 19 nt, Homo sapiens
  misc_RNA (1)...(19): siRNA sense strand
gaauuugaccgugggauug

SEQ ID NO: 717758 - RNA, 19 nt, Homo sapiens
  misc_RNA (1)...(19): siRNA sense strand
aaagaauucucaguucaga

SEQ ID NO: 717759 - RNA, 19 nt, Homo sapiens
  misc_RNA (1)...(19): siRNA sense strand
aagcagaagucaucagaca

SEQ ID NO: 717760 - RNA, 19 nt, Homo sapiens
  misc_RNA (1)...(19): siRNA sense strand
cagcaaagaugggcaagag

SEQ ID NO: 717761 - RNA, 19 nt, Homo sapiens
  misc_RNA (1)...(19): siRNA sense strand
ugacagggccuauaaacuc

SEQ ID NO: 717762 - RNA, 19 nt, Homo sapiens
  misc_RNA (1)...(19): siRNA sense strand
gaaaggcuucccaaucauc

SEQ ID NO: 717763 - RNA, 19 nt, Homo sapiens
  misc_RNA (1)...(19): siRNA sense strand
ccaugucaguggauucuau

SEQ ID NO: 717764 - RNA, 19 nt, Homo sapiens
  misc_RNA (1)...(19): siRNA sense strand
gaaugacagggccuauaaa

SEQ ID NO: 717765 - RNA, 19 nt, Homo sapiens
  misc_RNA (1)...(19): siRNA sense strand
ggagcacaguguucaugau

SEQ ID NO: 717766 - RNA, 19 nt, Homo sapiens
  misc_RNA (1)...(19): siRNA sense strand
gagcacaguguucaugaug

SEQ ID NO: 717767 - RNA, 19 nt, Homo sapiens
  misc_RNA (1)...(19): siRNA sense strand
ccucagaaacaccgaauga

SEQ ID NO: 717768 - RNA, 19 nt, Homo sapiens
  misc_RNA (1)...(19): siRNA sense strand
agaggucacugggaauaaa

SEQ ID NO: 717769 - RNA, 19 nt, Homo sapiens
  misc_RNA (1)...(19): siRNA sense strand
ugaauccuauuuacagaca

SEQ ID NO: 717770 - RNA, 19 nt, Homo sapiens
  misc_RNA (1)...(19): siRNA sense strand
caaagucaagggaaaguuc

SEQ ID NO: 717771 - RNA, 19 nt, Homo sapiens
  misc_RNA (1)...(19): siRNA sense strand
gaggagagcacggccauca

SEQ ID NO: 717772 - RNA, 19 nt, Homo sapiens
  misc_RNA (1)...(19): siRNA sense strand
ggagagcacggccaucauc

SEQ ID NO: 717773 - RNA, 19 nt, Homo sapiens
  misc_RNA (1)...(19): siRNA sense strand
caaagacaaagaauucauc

SEQ ID NO: 717774 - RNA, 19 nt, Homo sapiens
  misc_RNA (1)...(19): siRNA sense strand
agcaguaacucaucucuca

SEQ ID NO: 717775 - RNA, 19 nt, Homo sapiens
  misc_RNA (1)...(19): siRNA sense strand
aaagaaacuggauucacua

SEQ ID NO: 717776 - RNA, 19 nt, Homo sapiens
  misc_RNA (1)...(19): siRNA sense strand
gcgaaugacagggccuaua

SEQ ID NO: 717777 - RNA, 19 nt, Homo sapiens
  misc_RNA (1)...(19): siRNA sense strand
cugaugucguggacuauuu

SEQ ID NO: 717778 - RNA, 19 nt, Homo sapiens
  misc_RNA (1)...(19): siRNA sense strand
uggcuucccuccucccauu

SEQ ID NO: 717779 - RNA, 19 nt, Homo sapiens
  misc_RNA (1)...(19): siRNA sense strand
ggacaaaagagaaagaaau

SEQ ID NO: 717780 - RNA, 19 nt, Homo sapiens
  misc_RNA (1)...(19): siRNA sense strand
gagauaagaaacucagucu

SEQ ID NO: 717781 - RNA, 19 nt, Homo sapiens
  misc_RNA (1)...(19): siRNA sense strand
cagcucaaccucagaaaca

SEQ ID NO: 717782 - RNA, 19 nt, Homo sapiens
  misc_RNA (1)...(19): siRNA sense strand
ucagaucaccauucccaaa

SEQ ID NO: 717783 - RNA, 19 nt, Homo sapiens
  misc_RNA (1)...(19): siRNA sense strand
cguggacuauuuacucaga

SEQ ID NO: 717784 - RNA, 19 nt, Homo sapiens
  misc_RNA (1)...(19): siRNA sense strand
ucagaaacaccgaaugagu

SEQ ID NO: 717785 - RNA, 19 nt, Homo sapiens
  misc_RNA (1)...(19): siRNA sense strand
ugaugucguggacuauuua

SEQ ID NO: 717786 - RNA, 19 nt, Homo sapiens
  misc_RNA (1)...(19): siRNA sense strand
ggaggaggagcacaguguu

SEQ ID NO: 717787 - RNA, 19 nt, Homo sapiens
  misc_RNA (1)...(19): siRNA sense strand
gagggaggcauucaucuac

SEQ ID NO: 717788 - RNA, 19 nt, Homo sapiens
  misc_RNA (1)...(19): siRNA sense strand
gaggaggggugccauguca

SEQ ID NO: 717789 - RNA, 19 nt, Homo sapiens
  misc_RNA (1)...(19): siRNA sense strand
uaaacuuagccaccauauu

SEQ ID NO: 717790 - RNA, 19 nt, Homo sapiens
  misc_RNA (1)...(19): siRNA sense strand
uagaagcuuuacaacuuuc

SEQ ID NO: 717791 - RNA, 19 nt, Homo sapiens
  misc_RNA (1)...(19): siRNA sense strand
gcaagaggucacugggaau

SEQ ID NO: 717792 - RNA, 19 nt, Homo sapiens
  misc_RNA (1)...(19): siRNA sense strand
ggacuauuuacucagaaga

SEQ ID NO: 717793 - RNA, 19 nt, Homo sapiens
  misc_RNA (1)...(19): siRNA sense strand
cugaucagccuguuagaga

SEQ ID NO: 717794 - RNA, 19 nt, Homo sapiens
  misc_RNA (1)...(19): siRNA sense strand
gagacaauuacgugaggaa

SEQ ID NO: 717795 - RNA, 19 nt, Homo sapiens
  misc_RNA (1)...(19): siRNA sense strand
caaagaauucucaguucag

SEQ ID NO: 717796 - RNA, 19 nt, Homo sapiens
  misc_RNA (1)...(19): siRNA sense strand
acaagcagaagucaucaga

SEQ ID NO: 717797 - RNA, 19 nt, Homo sapiens
  misc_RNA (1)...(19): siRNA sense strand
agaaacaccgaaugaguca

SEQ ID NO: 717798 - RNA, 19 nt, Homo sapiens
  misc_RNA (1)...(19): siRNA sense strand
agaaaggcuucccaaucau

SEQ ID NO: 717799 - RNA, 19 nt, Homo sapiens
  misc_RNA (1)...(19): siRNA sense strand
gucguggacuauuuacuca

SEQ ID NO: 717800 - RNA, 19 nt, Homo sapiens
  misc_RNA (1)...(19): siRNA sense strand
gcacaagcagaagucauca

SEQ ID NO: 717801 - RNA, 19 nt, Homo sapiens
  misc_RNA (1)...(19): siRNA sense strand
gaggagcacaguguucaug

SEQ ID NO: 717802 - RNA, 19 nt, Homo sapiens
  misc_RNA (1)...(19): siRNA sense strand
gaggaggagcacaguguuc

SEQ ID NO: 717803 - RNA, 19 nt, Homo sapiens
  misc_RNA (1)...(19): siRNA sense strand
ggaggcauucaucuacaga

SEQ ID NO: 717804 - RNA, 19 nt, Homo sapiens
  misc_RNA (1)...(19): siRNA sense strand
gacuauuuacucagaagaa

SEQ ID NO: 717805 - RNA, 19 nt, Homo sapiens
  misc_RNA (1)...(19): siRNA sense strand
aggaacagcugggcaccuu

SEQ ID NO: 717806 - RNA, 19 nt, Homo sapiens
  misc_RNA (1)...(19): siRNA sense strand
gcugucagaucaccauucc

SEQ ID NO: 717807 - RNA, 19 nt, Homo sapiens
  misc_RNA (1)...(19): siRNA sense strand
agagaccgauccugauguc

SEQ ID NO: 717808 - RNA, 19 nt, Homo sapiens
  misc_RNA (1)...(19): siRNA sense strand
cagcuuucaucaacacucu

SEQ ID NO: 717809 - RNA, 19 nt, Homo sapiens
  misc_RNA (1)...(19): siRNA sense strand
agaucaccauucccaaaga

SEQ ID NO: 717810 - RNA, 19 nt, Homo sapiens
  misc_RNA (1)...(19): siRNA sense strand
gucaucagacaaagaauuc

SEQ ID NO: 717811 - RNA, 19 nt, Homo sapiens
  misc_RNA (1)...(19): siRNA sense strand
gcucggagaagcuuuacag

SEQ ID NO: 717812 - RNA, 19 nt, Homo sapiens
  misc_RNA (1)...(19): siRNA sense strand
gggaggcauucaucuacag

SEQ ID NO: 717813 - RNA, 19 nt, Homo sapiens
  misc_RNA (1)...(19): siRNA sense strand
caccuugcagcuccucaua

SEQ ID NO: 717814 - RNA, 19 nt, Homo sapiens
  misc_RNA (1)...(19): siRNA sense strand
uggauucuaucaccgaucu

SEQ ID NO: 717815 - RNA, 19 nt, Homo sapiens
  misc_RNA (1)...(19): siRNA sense strand
gaaugcccuuaucccaagu

SEQ ID NO: 717816 - RNA, 19 nt, Homo sapiens
  misc_RNA (1)...(19): siRNA sense strand
uuagagaccgauccugaug

SEQ ID NO: 717817 - RNA, 19 nt, Homo sapiens
  misc_RNA (1)...(19): siRNA sense strand
agaauucucaguucagagu

SEQ ID NO: 717818 - RNA, 19 nt, Homo sapiens
  misc_RNA (1)...(19): siRNA sense strand
aaaagagagugagacaauu

SEQ ID NO: 717819 - RNA, 19 nt, Homo sapiens
  misc_RNA (1)...(19): siRNA sense strand
uggauucacuaggaaagga

SEQ ID NO: 717820 - RNA, 19 nt, Homo sapiens
  misc_RNA (1)...(19): siRNA sense strand
gauucuaucaccgaucuug

SEQ ID NO: 717821 - RNA, 19 nt, Homo sapiens
  misc_RNA (1)...(19): siRNA sense strand
aacauggccuccagacagu

SEQ ID NO: 717822 - RNA, 19 nt, Homo sapiens
  misc_RNA (1)...(19): siRNA sense strand
caucuacagacuccaacaa

SEQ ID NO: 717823 - RNA, 19 nt, Homo sapiens
  misc_RNA (1)...(19): siRNA sense strand
agagggacgagcagaaaga

SEQ ID NO: 717824 - RNA, 19 nt, Homo sapiens
  misc_RNA (1)...(19): siRNA sense strand
cagaagucaucagacaaag

SEQ ID NO: 717825 - RNA, 19 nt, Homo sapiens
  misc_RNA (1)...(19): siRNA sense strand
ugacaacaucagcaaagau

SEQ ID NO: 717826 - RNA, 19 nt, Homo sapiens
  misc_RNA (1)...(19): siRNA sense strand
acacagcuuucaucaacac

SEQ ID NO: 717827 - RNA, 19 nt, Homo sapiens
  misc_RNA (1)...(19): siRNA sense strand
gaaagaaacuggauucacu

SEQ ID NO: 717828 - RNA, 19 nt, Homo sapiens
  misc_RNA (1)...(19): siRNA sense strand
gaaacuggauucacuagga

SEQ ID NO: 717829 - RNA, 19 nt, Homo sapiens
  misc_RNA (1)...(19): siRNA sense strand
aaacuuagccaccauauuu

SEQ ID NO: 717830 - RNA, 19 nt, Homo sapiens
  misc_RNA (1)...(19): siRNA sense strand
aaagaacucucaagcagua

SEQ ID NO: 717831 - RNA, 19 nt, Homo sapiens
  misc_RNA (1)...(19): siRNA sense strand
guacacagcuuucaucaac

SEQ ID NO: 717832 - RNA, 19 nt, Homo sapiens
  misc_RNA (1)...(19): siRNA sense strand
aagaaaggcuucccaauca

SEQ ID NO: 717833 - RNA, 19 nt, Homo sapiens
  misc_RNA (1)...(19): siRNA sense strand
caucaucgcuguugugcaa

SEQ ID NO: 717834 - RNA, 19 nt, Homo sapiens
  misc_RNA (1)...(19): siRNA sense strand
gaagucaucagacaaagaa

SEQ ID NO: 717835 - RNA, 19 nt, Homo sapiens
  misc_RNA (1)...(19): siRNA sense strand
gacaaagaauucucaguuc

SEQ ID NO: 717836 - RNA, 19 nt, Homo sapiens
  misc_RNA (1)...(19): siRNA sense strand
gcagaagucaucagacaaa

SEQ ID NO: 717837 - RNA, 19 nt, Homo sapiens
  misc_RNA (1)...(19): siRNA sense strand
acuagaagcuuuacaacuu

SEQ ID NO: 717838 - RNA, 19 nt, Homo sapiens
  misc_RNA (1)...(19): siRNA sense strand
aaagagagugagacaauua

SEQ ID NO: 717839 - RNA, 19 nt, Homo sapiens
  misc_RNA (1)...(19): siRNA sense strand
cgaaugacagggccuauaa

SEQ ID NO: 717840 - RNA, 19 nt, Homo sapiens
  misc_RNA (1)...(19): siRNA sense strand
cuagaagcuuuacaacuuu

SEQ ID NO: 717841 - RNA, 19 nt, Homo sapiens
  misc_RNA (1)...(19): siRNA sense strand
cggagaagcuuuacagagu

SEQ ID NO: 717842 - RNA, 19 nt, Homo sapiens
  misc_RNA (1)...(19): siRNA sense strand
ucaccgaucuugaugacaa

SEQ ID NO: 717843 - RNA, 19 nt, Homo sapiens
  misc_RNA (1)...(19): siRNA sense strand
ccuugcagcuccucauaua

SEQ ID NO: 717844 - RNA, 19 nt, Homo sapiens
  misc_RNA (1)...(19): siRNA sense strand
acaaagaauucucaguuca

SEQ ID NO: 717845 - RNA, 19 nt, Homo sapiens
  misc_RNA (1)...(19): siRNA sense strand
ggagggaggcauucaucua

SEQ ID NO: 717846 - RNA, 19 nt, Homo sapiens
  misc_RNA (1)...(19): siRNA sense strand
gcccuuaucccaagucauu

SEQ ID NO: 717847 - RNA, 19 nt, Homo sapiens
  misc_RNA (1)...(19): siRNA sense strand
agacaaagaauucucaguu

SEQ ID NO: 717848 - RNA, 19 nt, Homo sapiens
  misc_RNA (1)...(19): siRNA sense strand
gacagggccuauaaacuca

SEQ ID NO: 717849 - RNA, 19 nt, Homo sapiens
  misc_RNA (1)...(19): siRNA sense strand
caagaggucacugggaaua

SEQ ID NO: 717850 - RNA, 19 nt, Homo sapiens
  misc_RNA (1)...(19): siRNA sense strand
gacccaaccugcugcacaa

SEQ ID NO: 717851 - RNA, 19 nt, Homo sapiens
  misc_RNA (1)...(19): siRNA sense strand
aaacuggauucacuaggaa

SEQ ID NO: 717852 - RNA, 19 nt, Homo sapiens
  misc_RNA (1)...(19): siRNA sense strand
ggaauuugaccgugggauu

SEQ ID NO: 717853 - RNA, 19 nt, Homo sapiens
  misc_RNA (1)...(19): siRNA sense strand
gaucaccauucccaaagau

SEQ ID NO: 717854 - RNA, 19 nt, Homo sapiens
  misc_RNA (1)...(19): siRNA sense strand
gcagagggacgagcagaaa

SEQ ID NO: 717855 - RNA, 19 nt, Homo sapiens
  misc_RNA (1)...(19): siRNA sense strand
ggaauaaaaugacaucucu

SEQ ID NO: 717856 - RNA, 19 nt, Homo sapiens
  misc_RNA (1)...(19): siRNA sense strand
uaagaaagaaacuggauuc

SEQ ID NO: 717857 - RNA, 19 nt, Homo sapiens
  misc_RNA (1)...(19): siRNA sense strand
gaauuugaccgugggauug

SEQ ID NO: 717858 - RNA, 19 nt, Homo sapiens
  misc_RNA (1)...(19): siRNA sense strand
aaagaauucucaguucaga

SEQ ID NO: 717859 - RNA, 19 nt, Homo sapiens
  misc_RNA (1)...(19): siRNA sense strand
aagcagaagucaucagaca

SEQ ID NO: 717860 - RNA, 19 nt, Homo sapiens
  misc_RNA (1)...(19): siRNA sense strand
cagcaaagaugggcaagag

SEQ ID NO: 717861 - RNA, 19 nt, Homo sapiens
  misc_RNA (1)...(19): siRNA sense strand
ugacagggccuauaaacuc

SEQ ID NO: 717862 - RNA, 19 nt, Homo sapiens
  misc_RNA (1)...(19): siRNA sense strand
gaaaggcuucccaaucauc

SEQ ID NO: 717863 - RNA, 19 nt, Homo sapiens
  misc_RNA (1)...(19): siRNA sense strand
ccaugucaguggauucuau

SEQ ID NO: 717864 - RNA, 19 nt, Homo sapiens
  misc_RNA (1)...(19): siRNA sense strand
gaaugacagggccuauaaa

SEQ ID NO: 717865 - RNA, 19 nt, Homo sapiens
  misc_RNA (1)...(19): siRNA sense strand
ggagcacaguguucaugau

SEQ ID NO: 717866 - RNA, 19 nt, Homo sapiens
  misc_RNA (1)...(19): siRNA sense strand
gagcacaguguucaugaug

SEQ ID NO: 717867 - RNA, 19 nt, Homo sapiens
  misc_RNA (1)...(19): siRNA sense strand
ccucagaaacaccgaauga

SEQ ID NO: 717868 - RNA, 19 nt, Homo sapiens
  misc_RNA (1)...(19): siRNA sense strand
agaggucacugggaauaaa

SEQ ID NO: 717869 - RNA, 19 nt, Homo sapiens
  misc_RNA (1)...(19): siRNA sense strand
ugaauccuauuuacagaca

SEQ ID NO: 717870 - RNA, 19 nt, Homo sapiens
  misc_RNA (1)...(19): siRNA sense strand
caaagucaagggaaaguuc

SEQ ID NO: 717871 - RNA, 19 nt, Homo sapiens
  misc_RNA (1)...(19): siRNA sense strand
gaggagagcacggccauca

SEQ ID NO: 717872 - RNA, 19 nt, Homo sapiens
  misc_RNA (1)...(19): siRNA sense strand
ggagagcacggccaucauc

SEQ ID NO: 717873 - RNA, 19 nt, Homo sapiens
  misc_RNA (1)...(19): siRNA sense strand
agcaguaacucaucucuca

SEQ ID NO: 717874 - RNA, 19 nt, Homo sapiens
  misc_RNA (1)...(19): siRNA sense strand
caaagacaaagaauucauc

SEQ ID NO: 717875 - RNA, 19 nt, Homo sapiens
  misc_RNA (1)...(19): siRNA sense strand
aaagaaacuggauucacua

SEQ ID NO: 717876 - RNA, 19 nt, Homo sapiens
  misc_RNA (1)...(19): siRNA sense strand
gcgaaugacagggccuaua

SEQ ID NO: 717877 - RNA, 19 nt, Homo sapiens
  misc_RNA (1)...(19): siRNA sense strand
cugaugucguggacuauuu

SEQ ID NO: 717878 - RNA, 19 nt, Homo sapiens
  misc_RNA (1)...(19): siRNA sense strand
uggcuucccuccucccauu

SEQ ID NO: 717879 - RNA, 19 nt, Homo sapiens
  misc_RNA (1)...(19): siRNA sense strand
ggacaaaagagaaagaaau

SEQ ID NO: 717880 - RNA, 19 nt, Homo sapiens
  misc_RNA (1)...(19): siRNA sense strand
gagauaagaaacucagucu

SEQ ID NO: 717881 - RNA, 19 nt, Homo sapiens
  misc_RNA (1)...(19): siRNA sense strand
cagcucaaccucagaaaca

SEQ ID NO: 717882 - RNA, 19 nt, Homo sapiens
  misc_RNA (1)...(19): siRNA sense strand
ucagaucaccauucccaaa

SEQ ID NO: 717883 - RNA, 19 nt, Homo sapiens
  misc_RNA (1)...(19): siRNA sense strand
cguggacuauuuacucaga

SEQ ID NO: 717884 - RNA, 19 nt, Homo sapiens
  misc_RNA (1)...(19): siRNA sense strand
ucagaaacaccgaaugagu

SEQ ID NO: 717885 - RNA, 19 nt, Homo sapiens
  misc_RNA (1)...(19): siRNA sense strand
ugaugucguggacuauuua

SEQ ID NO: 717886 - RNA, 19 nt, Homo sapiens
  misc_RNA (1)...(19): siRNA sense strand
ggaggaggagcacaguguu

SEQ ID NO: 717887 - RNA, 19 nt, Homo sapiens
  misc_RNA (1)...(19): siRNA sense strand
gagggaggcauucaucuac

SEQ ID NO: 717888 - RNA, 19 nt, Homo sapiens
  misc_RNA (1)...(19): siRNA sense strand
gaggaggggugccauguca

SEQ ID NO: 717889 - RNA, 19 nt, Homo sapiens
  misc_RNA (1)...(19): siRNA sense strand
uaaacuuagccaccauauu

SEQ ID NO: 717890 - RNA, 19 nt, Homo sapiens
  misc_RNA (1)...(19): siRNA sense strand
uagaagcuuuacaacuuuc

SEQ ID NO: 717891 - RNA, 19 nt, Homo sapiens
  misc_RNA (1)...(19): siRNA sense strand
gcaagaggucacugggaau

SEQ ID NO: 717892 - RNA, 19 nt, Homo sapiens
  misc_RNA (1)...(19): siRNA sense strand
ggacuauuuacucagaaga

SEQ ID NO: 717893 - RNA, 19 nt, Homo sapiens
  misc_RNA (1)...(19): siRNA sense strand
cugaucagccuguuagaga

SEQ ID NO: 717894 - RNA, 19 nt, Homo sapiens
  misc_RNA (1)...(19): siRNA sense strand
gagacaauuacgugaggaa

SEQ ID NO: 717895 - RNA, 19 nt, Homo sapiens
  misc_RNA (1)...(19): siRNA sense strand
caaagaauucucaguucag

SEQ ID NO: 717896 - RNA, 19 nt, Homo sapiens
  misc_RNA (1)...(19): siRNA sense strand
acaagcagaagucaucaga

SEQ ID NO: 717897 - RNA, 19 nt, Homo sapiens
  misc_RNA (1)...(19): siRNA sense strand
agaaacaccgaaugaguca

SEQ ID NO: 717898 - RNA, 19 nt, Homo sapiens
  misc_RNA (1)...(19): siRNA sense strand
agaaaggcuucccaaucau

SEQ ID NO: 717899 - RNA, 19 nt, Homo sapiens
  misc_RNA (1)...(19): siRNA sense strand
gucguggacuauuuacuca

SEQ ID NO: 717900 - RNA, 19 nt, Homo sapiens
  misc_RNA (1)...(19): siRNA sense strand
gcacaagcagaagucauca

SEQ ID NO: 717901 - RNA, 19 nt, Homo sapiens
  misc_RNA (1)...(19): siRNA sense strand
gaggagcacaguguucaug

SEQ ID NO: 717902 - RNA, 19 nt, Homo sapiens
  misc_RNA (1)...(19): siRNA sense strand
gaggaggagcacaguguuc

SEQ ID NO: 717903 - RNA, 19 nt, Homo sapiens
  misc_RNA (1)...(19): siRNA sense strand
ggaggcauucaucuacaga

SEQ ID NO: 717904 - RNA, 19 nt, Homo sapiens
  misc_RNA (1)...(19): siRNA sense strand
gacuauuuacucagaagaa

SEQ ID NO: 717905 - RNA, 19 nt, Homo sapiens
  misc_RNA (1)...(19): siRNA sense strand
aggaacagcugggcaccuu

SEQ ID NO: 717906 - RNA, 19 nt, Homo sapiens
  misc_RNA (1)...(19): siRNA sense strand
cagcuuucaucaacacucu

SEQ ID NO: 717907 - RNA, 19 nt, Homo sapiens
  misc_RNA (1)...(19): siRNA sense strand
agagaccgauccugauguc

SEQ ID NO: 717908 - RNA, 19 nt, Homo sapiens
  misc_RNA (1)...(19): siRNA sense strand
gcugucagaucaccauucc

SEQ ID NO: 717909 - RNA, 19 nt, Homo sapiens
  misc_RNA (1)...(19): siRNA sense strand
agaucaccauucccaaaga

SEQ ID NO: 717910 - RNA, 19 nt, Homo sapiens
  misc_RNA (1)...(19): siRNA sense strand
gucaucagacaaagaauuc

SEQ ID NO: 717911 - RNA, 19 nt, Homo sapiens
  misc_RNA (1)...(19): siRNA sense strand
gcucggagaagcuuuacag

SEQ ID NO: 717912 - RNA, 19 nt, Homo sapiens
  misc_RNA (1)...(19): siRNA sense strand
gggaggcauucaucuacag

SEQ ID NO: 717913 - RNA, 19 nt, Homo sapiens
  misc_RNA (1)...(19): siRNA sense strand
caccuugcagcuccucaua

SEQ ID NO: 717914 - RNA, 19 nt, Homo sapiens
  misc_RNA (1)...(19): siRNA sense strand
uggauucuaucaccgaucu

SEQ ID NO: 717915 - RNA, 19 nt, Homo sapiens
  misc_RNA (1)...(19): siRNA sense strand
uuagagaccgauccugaug

SEQ ID NO: 717916 - RNA, 19 nt, Homo sapiens
  misc_RNA (1)...(19): siRNA sense strand
agaauucucaguucagagu

SEQ ID NO: 717917 - RNA, 19 nt, Homo sapiens
  misc_RNA (1)...(19): siRNA sense strand
uggauucacuaggaaagga

SEQ ID NO: 717918 - RNA, 19 nt, Homo sapiens
  misc_RNA (1)...(19): siRNA sense strand
gaaugcccuuaucccaagu

SEQ ID NO: 717919 - RNA, 19 nt, Homo sapiens
  misc_RNA (1)...(19): siRNA sense strand
aaaagagagugagacaauu

SEQ ID NO: 717920 - RNA, 19 nt, Homo sapiens
  misc_RNA (1)...(19): siRNA sense strand
gauucuaucaccgaucuug

SEQ ID NO: 717921 - RNA, 19 nt, Homo sapiens
  misc_RNA (1)...(19): siRNA sense strand
agagggacgagcagaaaga

SEQ ID NO: 717922 - RNA, 19 nt, Homo sapiens
  misc_RNA (1)...(19): siRNA sense strand
caucuacagacuccaacaa

SEQ ID NO: 717923 - RNA, 19 nt, Homo sapiens
  misc_RNA (1)...(19): siRNA sense strand
cagaagucaucagacaaag

SEQ ID NO: 717924 - RNA, 19 nt, Homo sapiens
  misc_RNA (1)...(19): siRNA sense strand
ugacaacaucagcaaagau

SEQ ID NO: 717925 - RNA, 19 nt, Homo sapiens
  misc_RNA (1)...(19): siRNA sense strand
acacagcuuucaucaacac

SEQ ID NO: 717926 - RNA, 19 nt, Homo sapiens
  misc_RNA (1)...(19): siRNA sense strand
aacauggccuccagacagu

SEQ ID NO: 717927 - RNA, 19 nt, Homo sapiens
  misc_RNA (1)...(19): siRNA sense strand
gaaagaaacuggauucacu

SEQ ID NO: 717928 - RNA, 19 nt, Homo sapiens
  misc_RNA (1)...(19): siRNA sense strand
gaaacuggauucacuagga

SEQ ID NO: 717929 - RNA, 19 nt, Homo sapiens
  misc_RNA (1)...(19): siRNA sense strand
aaacuuagccaccauauuu

SEQ ID NO: 717930 - RNA, 19 nt, Homo sapiens
  misc_RNA (1)...(19): siRNA sense strand
aaagaacucucaagcagua

SEQ ID NO: 717931 - RNA, 19 nt, Homo sapiens
  misc_RNA (1)...(19): siRNA sense strand
guacacagcuuucaucaac

SEQ ID NO: 717932 - RNA, 19 nt, Homo sapiens
  misc_RNA (1)...(19): siRNA sense strand
aagaaaggcuucccaauca

SEQ ID NO: 717933 - RNA, 19 nt, Homo sapiens
  misc_RNA (1)...(19): siRNA sense strand
caucaucgcuguugugcaa

SEQ ID NO: 717934 - RNA, 19 nt, Homo sapiens
  misc_RNA (1)...(19): siRNA sense strand
gaagucaucagacaaagaa

SEQ ID NO: 717935 - RNA, 19 nt, Homo sapiens
  misc_RNA (1)...(19): siRNA sense strand
gacaaagaauucucaguuc

SEQ ID NO: 717936 - RNA, 19 nt, Homo sapiens
  misc_RNA (1)...(19): siRNA sense strand
gcagaagucaucagacaaa

SEQ ID NO: 717937 - RNA, 19 nt, Homo sapiens
  misc_RNA (1)...(19): siRNA sense strand
acuagaagcuuuacaacuu

SEQ ID NO: 717938 - RNA, 19 nt, Homo sapiens
  misc_RNA (1)...(19): siRNA sense strand
aaagagagugagacaauua

SEQ ID NO: 717939 - RNA, 19 nt, Homo sapiens
  misc_RNA (1)...(19): siRNA sense strand
cgaaugacagggccuauaa

SEQ ID NO: 717940 - RNA, 19 nt, Homo sapiens
  misc_RNA (1)...(19): siRNA sense strand
cuagaagcuuuacaacuuu

SEQ ID NO: 717941 - RNA, 19 nt, Homo sapiens
  misc_RNA (1)...(19): siRNA sense strand
cggagaagcuuuacagagu

SEQ ID NO: 717942 - RNA, 19 nt, Homo sapiens
  misc_RNA (1)...(19): siRNA sense strand
ucaccgaucuugaugacaa

SEQ ID NO: 717943 - RNA, 19 nt, Homo sapiens
  misc_RNA (1)...(19): siRNA sense strand
ccuugcagcuccucauaua

SEQ ID NO: 717944 - RNA, 19 nt, Homo sapiens
  misc_RNA (1)...(19): siRNA sense strand
acaaagaauucucaguuca

SEQ ID NO: 717945 - RNA, 19 nt, Homo sapiens
  misc_RNA (1)...(19): siRNA sense strand
ggagggaggcauucaucua

SEQ ID NO: 717946 - RNA, 19 nt, Homo sapiens
  misc_RNA (1)...(19): siRNA sense strand
gcccuuaucccaagucauu

SEQ ID NO: 717947 - RNA, 19 nt, Homo sapiens
  misc_RNA (1)...(19): siRNA sense strand
agacaaagaauucucaguu

SEQ ID NO: 717948 - RNA, 19 nt, Homo sapiens
  misc_RNA (1)...(19): siRNA sense strand
gacagggccuauaaacuca

SEQ ID NO: 717949 - RNA, 19 nt, Homo sapiens
  misc_RNA (1)...(19): siRNA sense strand
caagaggucacugggaaua

SEQ ID NO: 717950 - RNA, 19 nt, Homo sapiens
  misc_RNA (1)...(19): siRNA sense strand
gacccaaccugcugcacaa

SEQ ID NO: 717951 - RNA, 19 nt, Homo sapiens
  misc_RNA (1)...(19): siRNA sense strand
aaacuggauucacuaggaa

SEQ ID NO: 717952 - RNA, 19 nt, Homo sapiens
  misc_RNA (1)...(19): siRNA sense strand
ggaauuugaccgugggauu

SEQ ID NO: 717953 - RNA, 19 nt, Homo sapiens
  misc_RNA (1)...(19): siRNA sense strand
gaucaccauucccaaagau

SEQ ID NO: 717954 - RNA, 19 nt, Homo sapiens
  misc_RNA (1)...(19): siRNA sense strand
gcagagggacgagcagaaa

SEQ ID NO: 717955 - RNA, 19 nt, Homo sapiens
  misc_RNA (1)...(19): siRNA sense strand
ggaauaaaaugacaucucu

SEQ ID NO: 717956 - RNA, 19 nt, Homo sapiens
  misc_RNA (1)...(19): siRNA sense strand
uaagaaagaaacuggauuc

SEQ ID NO: 717957 - RNA, 19 nt, Homo sapiens
  misc_RNA (1)...(19): siRNA sense strand
gaauuugaccgugggauug

SEQ ID NO: 717958 - RNA, 19 nt, Homo sapiens
  misc_RNA (1)...(19): siRNA sense strand
aaagaauucucaguucaga

SEQ ID NO: 717959 - RNA, 19 nt, Homo sapiens
  misc_RNA (1)...(19): siRNA sense strand
aagcagaagucaucagaca

SEQ ID NO: 717960 - RNA, 19 nt, Homo sapiens
  misc_RNA (1)...(19): siRNA sense strand
cagcaaagaugggcaagag

SEQ ID NO: 717961 - RNA, 19 nt, Homo sapiens
  misc_RNA (1)...(19): siRNA sense strand
ugacagggccuauaaacuc

SEQ ID NO: 717962 - RNA, 19 nt, Homo sapiens
  misc_RNA (1)...(19): siRNA sense strand
gaaaggcuucccaaucauc

SEQ ID NO: 717963 - RNA, 19 nt, Homo sapiens
  misc_RNA (1)...(19): siRNA sense strand
ccaugucaguggauucuau

SEQ ID NO: 717964 - RNA, 19 nt, Homo sapiens
  misc_RNA (1)...(19): siRNA sense strand
gaaugacagggccuauaaa

SEQ ID NO: 717965 - RNA, 19 nt, Homo sapiens
  misc_RNA (1)...(19): siRNA sense strand
ggagcacaguguucaugau

SEQ ID NO: 717966 - RNA, 19 nt, Homo sapiens
  misc_RNA (1)...(19): siRNA sense strand
gagcacaguguucaugaug

SEQ ID NO: 717967 - RNA, 19 nt, Homo sapiens
  misc_RNA (1)...(19): siRNA sense strand
ccucagaaacaccgaauga

SEQ ID NO: 717968 - RNA, 19 nt, Homo sapiens
  misc_RNA (1)...(19): siRNA sense strand
agaggucacugggaauaaa

SEQ ID NO: 717969 - RNA, 19 nt, Homo sapiens
  misc_RNA (1)...(19): siRNA sense strand
ugaauccuauuuacagaca

SEQ ID NO: 717970 - RNA, 19 nt, Homo sapiens
  misc_RNA (1)...(19): siRNA sense strand
caaagucaagggaaaguuc

SEQ ID NO: 717971 - RNA, 19 nt, Homo sapiens
  misc_RNA (1)...(19): siRNA sense strand
gaggagagcacggccauca

SEQ ID NO: 717972 - RNA, 19 nt, Homo sapiens
  misc_RNA (1)...(19): siRNA sense strand
ggagagcacggccaucauc

SEQ ID NO: 717973 - RNA, 19 nt, Homo sapiens
  misc_RNA (1)...(19): siRNA sense strand
agcaguaacucaucucuca

SEQ ID NO: 717974 - RNA, 19 nt, Homo sapiens
  misc_RNA (1)...(19): siRNA sense strand
caaagacaaagaauucauc

SEQ ID NO: 717975 - RNA, 19 nt, Homo sapiens
  misc_RNA (1)...(19): siRNA sense strand
aaagaaacuggauucacua

SEQ ID NO: 717976 - RNA, 19 nt, Homo sapiens
  misc_RNA (1)...(19): siRNA sense strand
gcgaaugacagggccuaua

SEQ ID NO: 717977 - RNA, 19 nt, Homo sapiens
  misc_RNA (1)...(19): siRNA sense strand
cugaugucguggacuauuu

SEQ ID NO: 717978 - RNA, 19 nt, Homo sapiens
  misc_RNA (1)...(19): siRNA sense strand
uggcuucccuccucccauu

SEQ ID NO: 717979 - RNA, 19 nt, Homo sapiens
  misc_RNA (1)...(19): siRNA sense strand
ggacaaaagagaaagaaau

SEQ ID NO: 717980 - RNA, 19 nt, Homo sapiens
  misc_RNA (1)...(19): siRNA sense strand
gagauaagaaacucagucu

SEQ ID NO: 717981 - RNA, 19 nt, Homo sapiens
  misc_RNA (1)...(19): siRNA sense strand
cagcucaaccucagaaaca

SEQ ID NO: 717982 - RNA, 19 nt, Homo sapiens
  misc_RNA (1)...(19): siRNA sense strand
ucagaucaccauucccaaa

SEQ ID NO: 717983 - RNA, 19 nt, Homo sapiens
  misc_RNA (1)...(19): siRNA sense strand
cguggacuauuuacucaga

SEQ ID NO: 717984 - RNA, 19 nt, Homo sapiens
  misc_RNA (1)...(19): siRNA sense strand
ucagaaacaccgaaugagu

SEQ ID NO: 717985 - RNA, 19 nt, Homo sapiens
  misc_RNA (1)...(19): siRNA sense strand
ugaugucguggacuauuua

SEQ ID NO: 717986 - RNA, 19 nt, Homo sapiens
  misc_RNA (1)...(19): siRNA sense strand
ggaggaggagcacaguguu

SEQ ID NO: 717987 - RNA, 19 nt, Homo sapiens
  misc_RNA (1)...(19): siRNA sense strand
gagggaggcauucaucuac

SEQ ID NO: 717988 - RNA, 19 nt, Homo sapiens
  misc_RNA (1)...(19): siRNA sense strand
gaggaggggugccauguca

SEQ ID NO: 717989 - RNA, 19 nt, Homo sapiens
  misc_RNA (1)...(19): siRNA sense strand
uaaacuuagccaccauauu

SEQ ID NO: 717990 - RNA, 19 nt, Homo sapiens
  misc_RNA (1)...(19): siRNA sense strand
uagaagcuuuacaacuuuc

SEQ ID NO: 717991 - RNA, 19 nt, Homo sapiens
  misc_RNA (1)...(19): siRNA sense strand
gcaagaggucacugggaau

SEQ ID NO: 717992 - RNA, 19 nt, Homo sapiens
  misc_RNA (1)...(19): siRNA sense strand
ggacuauuuacucagaaga

SEQ ID NO: 717993 - RNA, 19 nt, Homo sapiens
  misc_RNA (1)...(19): siRNA sense strand
cugaucagccuguuagaga

SEQ ID NO: 717994 - RNA, 19 nt, Homo sapiens
  misc_RNA (1)...(19): siRNA sense strand
gagacaauuacgugaggaa

SEQ ID NO: 717995 - RNA, 19 nt, Homo sapiens
  misc_RNA (1)...(19): siRNA sense strand
caaagaauucucaguucag

SEQ ID NO: 717996 - RNA, 19 nt, Homo sapiens
  misc_RNA (1)...(19): siRNA sense strand
acaagcagaagucaucaga

SEQ ID NO: 717997 - RNA, 19 nt, Homo sapiens
  misc_RNA (1)...(19): siRNA sense strand
agaaacaccgaaugaguca

SEQ ID NO: 717998 - RNA, 19 nt, Homo sapiens
  misc_RNA (1)...(19): siRNA sense strand
agaaaggcuucccaaucau

SEQ ID NO: 717999 - RNA, 19 nt, Homo sapiens
  misc_RNA (1)...(19): siRNA sense strand
gucguggacuauuuacuca

SEQ ID NO: 718000 - RNA, 19 nt, Homo sapiens
  misc_RNA (1)...(19): siRNA sense strand
gcacaagcagaagucauca

SEQ ID NO: 718001 - RNA, 19 nt, Homo sapiens
  misc_RNA (1)...(19): siRNA sense strand
gaggagcacaguguucaug

SEQ ID NO: 718002 - RNA, 19 nt, Homo sapiens
  misc_RNA (1)...(19): siRNA sense strand
gaggaggagcacaguguuc

SEQ ID NO: 718003 - RNA, 19 nt, Homo sapiens
  misc_RNA (1)...(19): siRNA sense strand
ggaggcauucaucuacaga

SEQ ID NO: 718004 - RNA, 19 nt, Homo sapiens
  misc_RNA (1)...(19): siRNA sense strand
gacuauuuacucagaagaa

SEQ ID NO: 718005 - RNA, 19 nt, Homo sapiens
  misc_RNA (1)...(19): siRNA sense strand
aggaacagcugggcaccuu

SEQ ID NO: 718006 - RNA, 19 nt, Homo sapiens
  misc_RNA (1)...(19): siRNA sense strand
cagcuuucaucaacacucu

SEQ ID NO: 718007 - RNA, 19 nt, Homo sapiens
  misc_RNA (1)...(19): siRNA sense strand
agagaccgauccugauguc

SEQ ID NO: 718008 - RNA, 19 nt, Homo sapiens
  misc_RNA (1)...(19): siRNA sense strand
gcugucagaucaccauucc

SEQ ID NO: 718009 - RNA, 19 nt, Homo sapiens
  misc_RNA (1)...(19): siRNA sense strand
agaucaccauucccaaaga

SEQ ID NO: 718010 - RNA, 19 nt, Homo sapiens
  misc_RNA (1)...(19): siRNA sense strand
gucaucagacaaagaauuc

SEQ ID NO: 718011 - RNA, 19 nt, Homo sapiens
  misc_RNA (1)...(19): siRNA sense strand
gcucggagaagcuuuacag

SEQ ID NO: 718012 - RNA, 19 nt, Homo sapiens
  misc_RNA (1)...(19): siRNA sense strand
gggaggcauucaucuacag

SEQ ID NO: 718013 - RNA, 19 nt, Homo sapiens
  misc_RNA (1)...(19): siRNA sense strand
caccuugcagcuccucaua

SEQ ID NO: 718014 - RNA, 19 nt, Homo sapiens
  misc_RNA (1)...(19): siRNA sense strand
uggauucuaucaccgaucu

SEQ ID NO: 718015 - RNA, 19 nt, Homo sapiens
  misc_RNA (1)...(19): siRNA sense strand
uuagagaccgauccugaug

SEQ ID NO: 718016 - RNA, 19 nt, Homo sapiens
  misc_RNA (1)...(19): siRNA sense strand
agaauucucaguucagagu

SEQ ID NO: 718017 - RNA, 19 nt, Homo sapiens
  misc_RNA (1)...(19): siRNA sense strand
uggauucacuaggaaagga

SEQ ID NO: 718018 - RNA, 19 nt, Homo sapiens
  misc_RNA (1)...(19): siRNA sense strand
gaaugcccuuaucccaagu

SEQ ID NO: 718019 - RNA, 19 nt, Homo sapiens
  misc_RNA (1)...(19): siRNA sense strand
aaaagagagugagacaauu

SEQ ID NO: 718020 - RNA, 19 nt, Homo sapiens
  misc_RNA (1)...(19): siRNA sense strand
gauucuaucaccgaucuug

SEQ ID NO: 718021 - RNA, 19 nt, Homo sapiens
  misc_RNA (1)...(19): siRNA sense strand
agagggacgagcagaaaga

SEQ ID NO: 718022 - RNA, 19 nt, Homo sapiens
  misc_RNA (1)...(19): siRNA sense strand
caucuacagacuccaacaa

SEQ ID NO: 718023 - RNA, 19 nt, Homo sapiens
  misc_RNA (1)...(19): siRNA sense strand
cagaagucaucagacaaag

SEQ ID NO: 718024 - RNA, 19 nt, Homo sapiens
  misc_RNA (1)...(19): siRNA sense strand
ugacaacaucagcaaagau

SEQ ID NO: 718025 - RNA, 19 nt, Homo sapiens
  misc_RNA (1)...(19): siRNA sense strand
acacagcuuucaucaacac

SEQ ID NO: 718026 - RNA, 19 nt, Homo sapiens
  misc_RNA (1)...(19): siRNA sense strand
aacauggccuccagacagu

SEQ ID NO: 718027 - RNA, 19 nt, Homo sapiens
  misc_RNA (1)...(19): siRNA sense strand
gaaagaaacuggauucacu

SEQ ID NO: 718028 - RNA, 19 nt, Homo sapiens
  misc_RNA (1)...(19): siRNA sense strand
gaaacuggauucacuagga

SEQ ID NO: 718029 - RNA, 19 nt, Homo sapiens
  misc_RNA (1)...(19): siRNA sense strand
aaacuuagccaccauauuu

SEQ ID NO: 718030 - RNA, 19 nt, Homo sapiens
  misc_RNA (1)...(19): siRNA sense strand
aaagaacucucaagcagua

SEQ ID NO: 718031 - RNA, 19 nt, Homo sapiens
  misc_RNA (1)...(19): siRNA sense strand
guacacagcuuucaucaac

SEQ ID NO: 718032 - RNA, 19 nt, Homo sapiens
  misc_RNA (1)...(19): siRNA sense strand
aagaaaggcuucccaauca

SEQ ID NO: 718033 - RNA, 19 nt, Homo sapiens
  misc_RNA (1)...(19): siRNA sense strand
caucaucgcuguugugcaa

SEQ ID NO: 718034 - RNA, 19 nt, Homo sapiens
  misc_RNA (1)...(19): siRNA sense strand
gaagucaucagacaaagaa

SEQ ID NO: 718035 - RNA, 19 nt, Homo sapiens
  misc_RNA (1)...(19): siRNA sense strand
gacaaagaauucucaguuc

SEQ ID NO: 718036 - RNA, 19 nt, Homo sapiens
  misc_RNA (1)...(19): siRNA sense strand
gcagaagucaucagacaaa

SEQ ID NO: 718037 - RNA, 19 nt, Homo sapiens
  misc_RNA (1)...(19): siRNA sense strand
acuagaagcuuuacaacuu

SEQ ID NO: 718038 - RNA, 19 nt, Homo sapiens
  misc_RNA (1)...(19): siRNA sense strand
aaagagagugagacaauua

SEQ ID NO: 718039 - RNA, 19 nt, Homo sapiens
  misc_RNA (1)...(19): siRNA sense strand
cgaaugacagggccuauaa

SEQ ID NO: 718040 - RNA, 19 nt, Homo sapiens
  misc_RNA (1)...(19): siRNA sense strand
cuagaagcuuuacaacuuu

SEQ ID NO: 718041 - RNA, 19 nt, Homo sapiens
  misc_RNA (1)...(19): siRNA sense strand
cggagaagcuuuacagagu

SEQ ID NO: 718042 - RNA, 19 nt, Homo sapiens
  misc_RNA (1)...(19): siRNA sense strand
ucaccgaucuugaugacaa

SEQ ID NO: 718043 - RNA, 19 nt, Homo sapiens
  misc_RNA (1)...(19): siRNA sense strand
ccuugcagcuccucauaua

SEQ ID NO: 718044 - RNA, 19 nt, Homo sapiens
  misc_RNA (1)...(19): siRNA sense strand
acaaagaauucucaguuca

SEQ ID NO: 718045 - RNA, 19 nt, Homo sapiens
  misc_RNA (1)...(19): siRNA sense strand
ggagggaggcauucaucua

SEQ ID NO: 718046 - RNA, 19 nt, Homo sapiens
  misc_RNA (1)...(19): siRNA sense strand
gcccuuaucccaagucauu

SEQ ID NO: 718047 - RNA, 19 nt, Homo sapiens
  misc_RNA (1)...(19): siRNA sense strand
agacaaagaauucucaguu

SEQ ID NO: 718048 - RNA, 19 nt, Homo sapiens
  misc_RNA (1)...(19): siRNA sense strand
gacagggccuauaaacuca

SEQ ID NO: 718049 - RNA, 19 nt, Homo sapiens
  misc_RNA (1)...(19): siRNA sense strand
caagaggucacugggaaua

SEQ ID NO: 718050 - RNA, 19 nt, Homo sapiens
  misc_RNA (1)...(19): siRNA sense strand
gacccaaccugcugcacaa

SEQ ID NO: 718051 - RNA, 19 nt, Homo sapiens
  misc_RNA (1)...(19): siRNA sense strand
aaacuggauucacuaggaa

SEQ ID NO: 718052 - RNA, 19 nt, Homo sapiens
  misc_RNA (1)...(19): siRNA sense strand
ggaauuugaccgugggauu

SEQ ID NO: 718053 - RNA, 19 nt, Homo sapiens
  misc_RNA (1)...(19): siRNA sense strand
gaucaccauucccaaagau

SEQ ID NO: 718054 - RNA, 19 nt, Homo sapiens
  misc_RNA (1)...(19): siRNA sense strand
gcagagggacgagcagaaa

SEQ ID NO: 718055 - RNA, 19 nt, Homo sapiens
  misc_RNA (1)...(19): siRNA sense strand
ggaauaaaaugacaucucu

SEQ ID NO: 718056 - RNA, 19 nt, Homo sapiens
  misc_RNA (1)...(19): siRNA sense strand
uaagaaagaaacuggauuc

SEQ ID NO: 718057 - RNA, 19 nt, Homo sapiens
  misc_RNA (1)...(19): siRNA sense strand
gaauuugaccgugggauug

SEQ ID NO: 718058 - RNA, 19 nt, Homo sapiens
  misc_RNA (1)...(19): siRNA sense strand
aaagaauucucaguucaga

SEQ ID NO: 718059 - RNA, 19 nt, Homo sapiens
  misc_RNA (1)...(19): siRNA sense strand
aagcagaagucaucagaca

SEQ ID NO: 718060 - RNA, 19 nt, Homo sapiens
  misc_RNA (1)...(19): siRNA sense strand
cagcaaagaugggcaagag

SEQ ID NO: 718061 - RNA, 19 nt, Homo sapiens
  misc_RNA (1)...(19): siRNA sense strand
ugacagggccuauaaacuc

SEQ ID NO: 718062 - RNA, 19 nt, Homo sapiens
  misc_RNA (1)...(19): siRNA sense strand
gaaaggcuucccaaucauc

SEQ ID NO: 718063 - RNA, 19 nt, Homo sapiens
  misc_RNA (1)...(19): siRNA sense strand
ccaugucaguggauucuau

SEQ ID NO: 718064 - RNA, 19 nt, Homo sapiens
  misc_RNA (1)...(19): siRNA sense strand
gaaugacagggccuauaaa

SEQ ID NO: 718065 - RNA, 19 nt, Homo sapiens
  misc_RNA (1)...(19): siRNA sense strand
ggagcacaguguucaugau

SEQ ID NO: 718066 - RNA, 19 nt, Homo sapiens
  misc_RNA (1)...(19): siRNA sense strand
gagcacaguguucaugaug

SEQ ID NO: 718067 - RNA, 19 nt, Homo sapiens
  misc_RNA (1)...(19): siRNA sense strand
ccucagaaacaccgaauga

SEQ ID NO: 718068 - RNA, 19 nt, Homo sapiens
  misc_RNA (1)...(19): siRNA sense strand
agaggucacugggaauaaa

SEQ ID NO: 718069 - RNA, 19 nt, Homo sapiens
  misc_RNA (1)...(19): siRNA sense strand
ugaauccuauuuacagaca

SEQ ID NO: 718070 - RNA, 19 nt, Homo sapiens
  misc_RNA (1)...(19): siRNA sense strand
caaagucaagggaaaguuc

SEQ ID NO: 718071 - RNA, 19 nt, Homo sapiens
  misc_RNA (1)...(19): siRNA sense strand
gaggagagcacggccauca

SEQ ID NO: 718072 - RNA, 19 nt, Homo sapiens
  misc_RNA (1)...(19): siRNA sense strand
ggagagcacggccaucauc

SEQ ID NO: 718073 - RNA, 19 nt, Homo sapiens
  misc_RNA (1)...(19): siRNA sense strand
caaagacaaagaauucauc

SEQ ID NO: 718074 - RNA, 19 nt, Homo sapiens
  misc_RNA (1)...(19): siRNA sense strand
agcaguaacucaucucuca

SEQ ID NO: 718075 - RNA, 19 nt, Homo sapiens
  misc_RNA (1)...(19): siRNA sense strand
aaagaaacuggauucacua

SEQ ID NO: 718076 - RNA, 19 nt, Homo sapiens
  misc_RNA (1)...(19): siRNA sense strand
gcgaaugacagggccuaua

SEQ ID NO: 718077 - RNA, 19 nt, Homo sapiens
  misc_RNA (1)...(19): siRNA sense strand
cugaugucguggacuauuu

SEQ ID NO: 718078 - RNA, 19 nt, Homo sapiens
  misc_RNA (1)...(19): siRNA sense strand
uggcuucccuccucccauu

SEQ ID NO: 718079 - RNA, 19 nt, Homo sapiens
  misc_RNA (1)...(19): siRNA sense strand
ggacaaaagagaaagaaau

SEQ ID NO: 718080 - RNA, 19 nt, Homo sapiens
  misc_RNA (1)...(19): siRNA sense strand
gagauaagaaacucagucu

SEQ ID NO: 718081 - RNA, 19 nt, Homo sapiens
  misc_RNA (1)...(19): siRNA sense strand
cagcucaaccucagaaaca

SEQ ID NO: 718082 - RNA, 19 nt, Homo sapiens
  misc_RNA (1)...(19): siRNA sense strand
ucagaucaccauucccaaa

SEQ ID NO: 718083 - RNA, 19 nt, Homo sapiens
  misc_RNA (1)...(19): siRNA sense strand
cguggacuauuuacucaga

SEQ ID NO: 718084 - RNA, 19 nt, Homo sapiens
  misc_RNA (1)...(19): siRNA sense strand
ucagaaacaccgaaugagu

SEQ ID NO: 718085 - RNA, 19 nt, Homo sapiens
  misc_RNA (1)...(19): siRNA sense strand
ugaugucguggacuauuua

SEQ ID NO: 718086 - RNA, 19 nt, Homo sapiens
  misc_RNA (1)...(19): siRNA sense strand
ggaggaggagcacaguguu

SEQ ID NO: 718087 - RNA, 19 nt, Homo sapiens
  misc_RNA (1)...(19): siRNA sense strand
gagggaggcauucaucuac

SEQ ID NO: 718088 - RNA, 19 nt, Homo sapiens
  misc_RNA (1)...(19): siRNA sense strand
gaggaggggugccauguca

SEQ ID NO: 718089 - RNA, 19 nt, Homo sapiens
  misc_RNA (1)...(19): siRNA sense strand
uaaacuuagccaccauauu

SEQ ID NO: 718090 - RNA, 19 nt, Homo sapiens
  misc_RNA (1)...(19): siRNA sense strand
uagaagcuuuacaacuuuc

SEQ ID NO: 718091 - RNA, 19 nt, Homo sapiens
  misc_RNA (1)...(19): siRNA sense strand
gcaagaggucacugggaau

SEQ ID NO: 718092 - RNA, 19 nt, Homo sapiens
  misc_RNA (1)...(19): siRNA sense strand
ggacuauuuacucagaaga

SEQ ID NO: 718093 - RNA, 19 nt, Homo sapiens
  misc_RNA (1)...(19): siRNA sense strand
cugaucagccuguuagaga

SEQ ID NO: 718094 - RNA, 19 nt, Homo sapiens
  misc_RNA (1)...(19): siRNA sense strand
gagacaauuacgugaggaa

SEQ ID NO: 718095 - RNA, 19 nt, Homo sapiens
  misc_RNA (1)...(19): siRNA sense strand
caaagaauucucaguucag

SEQ ID NO: 718096 - RNA, 19 nt, Homo sapiens
  misc_RNA (1)...(19): siRNA sense strand
acaagcagaagucaucaga

SEQ ID NO: 718097 - RNA, 19 nt, Homo sapiens
  misc_RNA (1)...(19): siRNA sense strand
agaaacaccgaaugaguca

SEQ ID NO: 718098 - RNA, 19 nt, Homo sapiens
  misc_RNA (1)...(19): siRNA sense strand
agaaaggcuucccaaucau

SEQ ID NO: 718099 - RNA, 19 nt, Homo sapiens
  misc_RNA (1)...(19): siRNA sense strand
gucguggacuauuuacuca

SEQ ID NO: 718100 - RNA, 19 nt, Homo sapiens
  misc_RNA (1)...(19): siRNA sense strand
gcacaagcagaagucauca

SEQ ID NO: 718101 - RNA, 19 nt, Homo sapiens
  misc_RNA (1)...(19): siRNA sense strand
gaggagcacaguguucaug

SEQ ID NO: 718102 - RNA, 19 nt, Homo sapiens
  misc_RNA (1)...(19): siRNA sense strand
gaggaggagcacaguguuc

SEQ ID NO: 718103 - RNA, 19 nt, Homo sapiens
  misc_RNA (1)...(19): siRNA sense strand
ggaggcauucaucuacaga

SEQ ID NO: 718104 - RNA, 19 nt, Homo sapiens
  misc_RNA (1)...(19): siRNA sense strand
gacuauuuacucagaagaa

SEQ ID NO: 718105 - RNA, 19 nt, Homo sapiens
  misc_RNA (1)...(19): siRNA sense strand
aggaacagcugggcaccuu

SEQ ID NO: 718106 - RNA, 19 nt, Homo sapiens
  misc_RNA (1)...(19): siRNA sense strand
gcugucagaucaccauucc

SEQ ID NO: 718107 - RNA, 19 nt, Homo sapiens
  misc_RNA (1)...(19): siRNA sense strand
agagaccgauccugauguc

SEQ ID NO: 718108 - RNA, 19 nt, Homo sapiens
  misc_RNA (1)...(19): siRNA sense strand
cagcuuucaucaacacucu

SEQ ID NO: 718109 - RNA, 19 nt, Homo sapiens
  misc_RNA (1)...(19): siRNA sense strand
agaucaccauucccaaaga

SEQ ID NO: 718110 - RNA, 19 nt, Homo sapiens
  misc_RNA (1)...(19): siRNA sense strand
gucaucagacaaagaauuc

SEQ ID NO: 718111 - RNA, 19 nt, Homo sapiens
  misc_RNA (1)...(19): siRNA sense strand
gcucggagaagcuuuacag

SEQ ID NO: 718112 - RNA, 19 nt, Homo sapiens
  misc_RNA (1)...(19): siRNA sense strand
gggaggcauucaucuacag

SEQ ID NO: 718113 - RNA, 19 nt, Homo sapiens
  misc_RNA (1)...(19): siRNA sense strand
caccuugcagcuccucaua

SEQ ID NO: 718114 - RNA, 19 nt, Homo sapiens
  misc_RNA (1)...(19): siRNA sense strand
uggauucuaucaccgaucu

SEQ ID NO: 718115 - RNA, 19 nt, Homo sapiens
  misc_RNA (1)...(19): siRNA sense strand
gaaugcccuuaucccaagu

SEQ ID NO: 718116 - RNA, 19 nt, Homo sapiens
  misc_RNA (1)...(19): siRNA sense strand
uuagagaccgauccugaug

SEQ ID NO: 718117 - RNA, 19 nt, Homo sapiens
  misc_RNA (1)...(19): siRNA sense strand
agaauucucaguucagagu

SEQ ID NO: 718118 - RNA, 19 nt, Homo sapiens
  misc_RNA (1)...(19): siRNA sense strand
aaaagagagugagacaauu

SEQ ID NO: 718119 - RNA, 19 nt, Homo sapiens
  misc_RNA (1)...(19): siRNA sense strand
uggauucacuaggaaagga

SEQ ID NO: 718120 - RNA, 19 nt, Homo sapiens
  misc_RNA (1)...(19): siRNA sense strand
gauucuaucaccgaucuug

SEQ ID NO: 718121 - RNA, 19 nt, Homo sapiens
  misc_RNA (1)...(19): siRNA sense strand
aacauggccuccagacagu

SEQ ID NO: 718122 - RNA, 19 nt, Homo sapiens
  misc_RNA (1)...(19): siRNA sense strand
caucuacagacuccaacaa

SEQ ID NO: 718123 - RNA, 19 nt, Homo sapiens
  misc_RNA (1)...(19): siRNA sense strand
agagggacgagcagaaaga

SEQ ID NO: 718124 - RNA, 19 nt, Homo sapiens
  misc_RNA (1)...(19): siRNA sense strand
cagaagucaucagacaaag

SEQ ID NO: 718125 - RNA, 19 nt, Homo sapiens
  misc_RNA (1)...(19): siRNA sense strand
ugacaacaucagcaaagau

SEQ ID NO: 718126 - RNA, 19 nt, Homo sapiens
  misc_RNA (1)...(19): siRNA sense strand
acacagcuuucaucaacac

SEQ ID NO: 718127 - RNA, 19 nt, Homo sapiens
  misc_RNA (1)...(19): siRNA sense strand
gaaagaaacuggauucacu

SEQ ID NO: 718128 - RNA, 19 nt, Homo sapiens
  misc_RNA (1)...(19): siRNA sense strand
gaaacuggauucacuagga

SEQ ID NO: 718129 - RNA, 19 nt, Homo sapiens
  misc_RNA (1)...(19): siRNA sense strand
aaacuuagccaccauauuu

SEQ ID NO: 718130 - RNA, 19 nt, Homo sapiens
  misc_RNA (1)...(19): siRNA sense strand
aaagaacucucaagcagua

SEQ ID NO: 718131 - RNA, 19 nt, Homo sapiens
  misc_RNA (1)...(19): siRNA sense strand
guacacagcuuucaucaac

SEQ ID NO: 718132 - RNA, 19 nt, Homo sapiens
  misc_RNA (1)...(19): siRNA sense strand
aagaaaggcuucccaauca

SEQ ID NO: 718133 - RNA, 19 nt, Homo sapiens
  misc_RNA (1)...(19): siRNA sense strand
caucaucgcuguugugcaa

SEQ ID NO: 718134 - RNA, 19 nt, Homo sapiens
  misc_RNA (1)...(19): siRNA sense strand
gaagucaucagacaaagaa

SEQ ID NO: 718135 - RNA, 19 nt, Homo sapiens
  misc_RNA (1)...(19): siRNA sense strand
gacaaagaauucucaguuc

SEQ ID NO: 718136 - RNA, 19 nt, Homo sapiens
  misc_RNA (1)...(19): siRNA sense strand
gcagaagucaucagacaaa

SEQ ID NO: 718137 - RNA, 19 nt, Homo sapiens
  misc_RNA (1)...(19): siRNA sense strand
acuagaagcuuuacaacuu

SEQ ID NO: 718138 - RNA, 19 nt, Homo sapiens
  misc_RNA (1)...(19): siRNA sense strand
aaagagagugagacaauua

SEQ ID NO: 718139 - RNA, 19 nt, Homo sapiens
  misc_RNA (1)...(19): siRNA sense strand
cgaaugacagggccuauaa

SEQ ID NO: 718140 - RNA, 19 nt, Homo sapiens
  misc_RNA (1)...(19): siRNA sense strand
cuagaagcuuuacaacuuu

SEQ ID NO: 718141 - RNA, 19 nt, Homo sapiens
  misc_RNA (1)...(19): siRNA sense strand
ucaccgaucuugaugacaa

SEQ ID NO: 718142 - RNA, 19 nt, Homo sapiens
  misc_RNA (1)...(19): siRNA sense strand
ccuugcagcuccucauaua

SEQ ID NO: 718143 - RNA, 19 nt, Homo sapiens
  misc_RNA (1)...(19): siRNA sense strand
acaaagaauucucaguuca

SEQ ID NO: 718144 - RNA, 19 nt, Homo sapiens
  misc_RNA (1)...(19): siRNA sense strand
gcccuuaucccaagucauu

SEQ ID NO: 718145 - RNA, 19 nt, Homo sapiens
  misc_RNA (1)...(19): siRNA sense strand
agacaaagaauucucaguu

SEQ ID NO: 718146 - RNA, 19 nt, Homo sapiens
  misc_RNA (1)...(19): siRNA sense strand
gacagggccuauaaacuca

SEQ ID NO: 718147 - RNA, 19 nt, Homo sapiens
  misc_RNA (1)...(19): siRNA sense strand
caagaggucacugggaaua

SEQ ID NO: 718148 - RNA, 19 nt, Homo sapiens
  misc_RNA (1)...(19): siRNA sense strand
gacccaaccugcugcacaa

SEQ ID NO: 718149 - RNA, 19 nt, Homo sapiens
  misc_RNA (1)...(19): siRNA sense strand
aaacuggauucacuaggaa

SEQ ID NO: 718150 - RNA, 19 nt, Homo sapiens
  misc_RNA (1)...(19): siRNA sense strand
gaucaccauucccaaagau

SEQ ID NO: 718151 - RNA, 19 nt, Homo sapiens
  misc_RNA (1)...(19): siRNA sense strand
ggaauuugaccgugggauu

SEQ ID NO: 718152 - RNA, 19 nt, Homo sapiens
  misc_RNA (1)...(19): siRNA sense strand
gcagagggacgagcagaaa

SEQ ID NO: 718153 - RNA, 19 nt, Homo sapiens
  misc_RNA (1)...(19): siRNA sense strand
ggaauaaaaugacaucucu

SEQ ID NO: 718154 - RNA, 19 nt, Homo sapiens
  misc_RNA (1)...(19): siRNA sense strand
uaagaaagaaacuggauuc

SEQ ID NO: 718155 - RNA, 19 nt, Homo sapiens
  misc_RNA (1)...(19): siRNA sense strand
gaauuugaccgugggauug

SEQ ID NO: 718156 - RNA, 19 nt, Homo sapiens
  misc_RNA (1)...(19): siRNA sense strand
aaagaauucucaguucaga

SEQ ID NO: 718157 - RNA, 19 nt, Homo sapiens
  misc_RNA (1)...(19): siRNA sense strand
aagcagaagucaucagaca

SEQ ID NO: 718158 - RNA, 19 nt, Homo sapiens
  misc_RNA (1)...(19): siRNA sense strand
cagcaaagaugggcaagag

SEQ ID NO: 718159 - RNA, 19 nt, Homo sapiens
  misc_RNA (1)...(19): siRNA sense strand
ugacagggccuauaaacuc

SEQ ID NO: 718160 - RNA, 19 nt, Homo sapiens
  misc_RNA (1)...(19): siRNA sense strand
gaaaggcuucccaaucauc

SEQ ID NO: 718161 - RNA, 19 nt, Homo sapiens
  misc_RNA (1)...(19): siRNA sense strand
ccaugucaguggauucuau

SEQ ID NO: 718162 - RNA, 19 nt, Homo sapiens
  misc_RNA (1)...(19): siRNA sense strand
gaaugacagggccuauaaa

SEQ ID NO: 718163 - RNA, 19 nt, Homo sapiens
  misc_RNA (1)...(19): siRNA sense strand
ggagcacaguguucaugau

SEQ ID NO: 718164 - RNA, 19 nt, Homo sapiens
  misc_RNA (1)...(19): siRNA sense strand
gagcacaguguucaugaug

SEQ ID NO: 718165 - RNA, 19 nt, Homo sapiens
  misc_RNA (1)...(19): siRNA sense strand
ccucagaaacaccgaauga

SEQ ID NO: 718166 - RNA, 19 nt, Homo sapiens
  misc_RNA (1)...(19): siRNA sense strand
agaggucacugggaauaaa

SEQ ID NO: 718167 - RNA, 19 nt, Homo sapiens
  misc_RNA (1)...(19): siRNA sense strand
ugaauccuauuuacagaca

SEQ ID NO: 718168 - RNA, 19 nt, Homo sapiens
  misc_RNA (1)...(19): siRNA sense strand
gaggagagcacggccauca

SEQ ID NO: 718169 - RNA, 19 nt, Homo sapiens
  misc_RNA (1)...(19): siRNA sense strand
ggagagcacggccaucauc

SEQ ID NO: 718170 - RNA, 19 nt, Homo sapiens
  misc_RNA (1)...(19): siRNA sense strand
caaagacaaagaauucauc

SEQ ID NO: 718171 - RNA, 19 nt, Homo sapiens
  misc_RNA (1)...(19): siRNA sense strand
aaagaaacuggauucacua

SEQ ID NO: 718172 - RNA, 19 nt, Homo sapiens
  misc_RNA (1)...(19): siRNA sense strand
agcaguaacucaucucuca

SEQ ID NO: 718173 - RNA, 19 nt, Homo sapiens
  misc_RNA (1)...(19): siRNA sense strand
gcgaaugacagggccuaua

SEQ ID NO: 718174 - RNA, 19 nt, Homo sapiens
  misc_RNA (1)...(19): siRNA sense strand
cugaugucguggacuauuu

SEQ ID NO: 718175 - RNA, 19 nt, Homo sapiens
  misc_RNA (1)...(19): siRNA sense strand
uggcuucccuccucccauu

SEQ ID NO: 718176 - RNA, 19 nt, Homo sapiens
  misc_RNA (1)...(19): siRNA sense strand
ggacaaaagagaaagaaau

SEQ ID NO: 718177 - RNA, 19 nt, Homo sapiens
  misc_RNA (1)...(19): siRNA sense strand
gagauaagaaacucagucu

SEQ ID NO: 718178 - RNA, 19 nt, Homo sapiens
  misc_RNA (1)...(19): siRNA sense strand
cagcucaaccucagaaaca

SEQ ID NO: 718179 - RNA, 19 nt, Homo sapiens
  misc_RNA (1)...(19): siRNA sense strand
ucagaucaccauucccaaa

SEQ ID NO: 718180 - RNA, 19 nt, Homo sapiens
  misc_RNA (1)...(19): siRNA sense strand
cguggacuauuuacucaga

SEQ ID NO: 718181 - RNA, 19 nt, Homo sapiens
  misc_RNA (1)...(19): siRNA sense strand
ucagaaacaccgaaugagu

SEQ ID NO: 718182 - RNA, 19 nt, Homo sapiens
  misc_RNA (1)...(19): siRNA sense strand
ugaugucguggacuauuua

SEQ ID NO: 718183 - RNA, 19 nt, Homo sapiens
  misc_RNA (1)...(19): siRNA sense strand
ggaggaggagcacaguguu

SEQ ID NO: 718184 - RNA, 19 nt, Homo sapiens
  misc_RNA (1)...(19): siRNA sense strand
gaggaggggugccauguca

SEQ ID NO: 718185 - RNA, 19 nt, Homo sapiens
  misc_RNA (1)...(19): siRNA sense strand
uaaacuuagccaccauauu

SEQ ID NO: 718186 - RNA, 19 nt, Homo sapiens
  misc_RNA (1)...(19): siRNA sense strand
uagaagcuuuacaacuuuc

SEQ ID NO: 718187 - RNA, 19 nt, Homo sapiens
  misc_RNA (1)...(19): siRNA sense strand
gcaagaggucacugggaau

SEQ ID NO: 718188 - RNA, 19 nt, Homo sapiens
  misc_RNA (1)...(19): siRNA sense strand
ggacuauuuacucagaaga

SEQ ID NO: 718189 - RNA, 19 nt, Homo sapiens
  misc_RNA (1)...(19): siRNA sense strand
cugaucagccuguuagaga

SEQ ID NO: 718190 - RNA, 19 nt, Homo sapiens
  misc_RNA (1)...(19): siRNA sense strand
gagacaauuacgugaggaa

SEQ ID NO: 718191 - RNA, 19 nt, Homo sapiens
  misc_RNA (1)...(19): siRNA sense strand
caaagaauucucaguucag

SEQ ID NO: 718192 - RNA, 19 nt, Homo sapiens
  misc_RNA (1)...(19): siRNA sense strand
acaagcagaagucaucaga

SEQ ID NO: 718193 - RNA, 19 nt, Homo sapiens
  misc_RNA (1)...(19): siRNA sense strand
agaaacaccgaaugaguca

SEQ ID NO: 718194 - RNA, 19 nt, Homo sapiens
  misc_RNA (1)...(19): siRNA sense strand
agaaaggcuucccaaucau

SEQ ID NO: 718195 - RNA, 19 nt, Homo sapiens
  misc_RNA (1)...(19): siRNA sense strand
gucguggacuauuuacuca

SEQ ID NO: 718196 - RNA, 19 nt, Homo sapiens
  misc_RNA (1)...(19): siRNA sense strand
gcacaagcagaagucauca

SEQ ID NO: 718197 - RNA, 19 nt, Homo sapiens
  misc_RNA (1)...(19): siRNA sense strand
gaggagcacaguguucaug

SEQ ID NO: 718198 - RNA, 19 nt, Homo sapiens
  misc_RNA (1)...(19): siRNA sense strand
gaggaggagcacaguguuc

SEQ ID NO: 718199 - RNA, 19 nt, Homo sapiens
  misc_RNA (1)...(19): siRNA sense strand
gacuauuuacucagaagaa

SEQ ID NO: 718200 - RNA, 19 nt, Homo sapiens
  misc_RNA (1)...(19): siRNA sense strand
aggaacagcugggcaccuu

SEQ ID NO: 718201 - RNA, 19 nt, Homo sapiens
  misc_RNA (1)...(19): siRNA sense strand
agaucaccauucccaaaga

SEQ ID NO: 718202 - RNA, 19 nt, Homo sapiens
  misc_RNA (1)...(19): siRNA sense strand
agagaccgauccugauguc

SEQ ID NO: 718203 - RNA, 19 nt, Homo sapiens
  misc_RNA (1)...(19): siRNA sense strand
cagcuuucaucaacacucu

SEQ ID NO: 718204 - RNA, 19 nt, Homo sapiens
  misc_RNA (1)...(19): siRNA sense strand
gcugucagaucaccauucc

SEQ ID NO: 718205 - RNA, 19 nt, Homo sapiens
  misc_RNA (1)...(19): siRNA sense strand
gucaucagacaaagaauuc

SEQ ID NO: 718206 - RNA, 19 nt, Homo sapiens
  misc_RNA (1)...(19): siRNA sense strand
caccuugcagcuccucaua

SEQ ID NO: 718207 - RNA, 19 nt, Homo sapiens
  misc_RNA (1)...(19): siRNA sense strand
uggauucuaucaccgaucu

SEQ ID NO: 718208 - RNA, 19 nt, Homo sapiens
  misc_RNA (1)...(19): siRNA sense strand
uuagagaccgauccugaug

SEQ ID NO: 718209 - RNA, 19 nt, Homo sapiens
  misc_RNA (1)...(19): siRNA sense strand
agaauucucaguucagagu

SEQ ID NO: 718210 - RNA, 19 nt, Homo sapiens
  misc_RNA (1)...(19): siRNA sense strand
uggauucacuaggaaagga

SEQ ID NO: 718211 - RNA, 19 nt, Homo sapiens
  misc_RNA (1)...(19): siRNA sense strand
gaaugcccuuaucccaagu

SEQ ID NO: 718212 - RNA, 19 nt, Homo sapiens
  misc_RNA (1)...(19): siRNA sense strand
aaaagagagugagacaauu

SEQ ID NO: 718213 - RNA, 19 nt, Homo sapiens
  misc_RNA (1)...(19): siRNA sense strand
gauucuaucaccgaucuug

SEQ ID NO: 718214 - RNA, 19 nt, Homo sapiens
  misc_RNA (1)...(19): siRNA sense strand
aacauggccuccagacagu

SEQ ID NO: 718215 - RNA, 19 nt, Homo sapiens
  misc_RNA (1)...(19): siRNA sense strand
cagaagucaucagacaaag

SEQ ID NO: 718216 - RNA, 19 nt, Homo sapiens
  misc_RNA (1)...(19): siRNA sense strand
ugacaacaucagcaaagau

SEQ ID NO: 718217 - RNA, 19 nt, Homo sapiens
  misc_RNA (1)...(19): siRNA sense strand
agagggacgagcagaaaga

SEQ ID NO: 718218 - RNA, 19 nt, Homo sapiens
  misc_RNA (1)...(19): siRNA sense strand
acacagcuuucaucaacac

SEQ ID NO: 718219 - RNA, 19 nt, Homo sapiens
  misc_RNA (1)...(19): siRNA sense strand
agucaucagacaaagaauu

SEQ ID NO: 718220 - RNA, 19 nt, Homo sapiens
  misc_RNA (1)...(19): siRNA sense strand
gaaagaaacuggauucacu

SEQ ID NO: 718221 - RNA, 19 nt, Homo sapiens
  misc_RNA (1)...(19): siRNA sense strand
gaaacuggauucacuagga

SEQ ID NO: 718222 - RNA, 19 nt, Homo sapiens
  misc_RNA (1)...(19): siRNA sense strand
aaacuuagccaccauauuu

SEQ ID NO: 718223 - RNA, 19 nt, Homo sapiens
  misc_RNA (1)...(19): siRNA sense strand
aaagaacucucaagcagua

SEQ ID NO: 718224 - RNA, 19 nt, Homo sapiens
  misc_RNA (1)...(19): siRNA sense strand
guacacagcuuucaucaac

SEQ ID NO: 718225 - RNA, 19 nt, Homo sapiens
  misc_RNA (1)...(19): siRNA sense strand
aagaaaggcuucccaauca

SEQ ID NO: 718226 - RNA, 19 nt, Homo sapiens
  misc_RNA (1)...(19): siRNA sense strand
caucaucgcuguugugcaa

SEQ ID NO: 718227 - RNA, 19 nt, Homo sapiens
  misc_RNA (1)...(19): siRNA sense strand
gaagucaucagacaaagaa

SEQ ID NO: 718228 - RNA, 19 nt, Homo sapiens
  misc_RNA (1)...(19): siRNA sense strand
gacaaagaauucucaguuc

SEQ ID NO: 718229 - RNA, 19 nt, Homo sapiens
  misc_RNA (1)...(19): siRNA sense strand
gcagaagucaucagacaaa

SEQ ID NO: 718230 - RNA, 19 nt, Homo sapiens
  misc_RNA (1)...(19): siRNA sense strand
acuagaagcuuuacaacuu

SEQ ID NO: 718231 - RNA, 19 nt, Homo sapiens
  misc_RNA (1)...(19): siRNA sense strand
aaagagagugagacaauua

SEQ ID NO: 718232 - RNA, 19 nt, Homo sapiens
  misc_RNA (1)...(19): siRNA sense strand
cgaaugacagggccuauaa

SEQ ID NO: 718233 - RNA, 19 nt, Homo sapiens
  misc_RNA (1)...(19): siRNA sense strand
cuagaagcuuuacaacuuu

SEQ ID NO: 718234 - RNA, 19 nt, Homo sapiens
  misc_RNA (1)...(19): siRNA sense strand
cggagaagcuuuacagagu

SEQ ID NO: 718235 - RNA, 19 nt, Homo sapiens
  misc_RNA (1)...(19): siRNA sense strand
ucaccgaucuugaugacaa

SEQ ID NO: 718236 - RNA, 19 nt, Homo sapiens
  misc_RNA (1)...(19): siRNA sense strand
ccuugcagcuccucauaua

SEQ ID NO: 718237 - RNA, 19 nt, Homo sapiens
  misc_RNA (1)...(19): siRNA sense strand
acaaagaauucucaguuca

SEQ ID NO: 718238 - RNA, 19 nt, Homo sapiens
  misc_RNA (1)...(19): siRNA sense strand
ggagggaggcauucaucua

SEQ ID NO: 718239 - RNA, 19 nt, Homo sapiens
  misc_RNA (1)...(19): siRNA sense strand
gcccuuaucccaagucauu

SEQ ID NO: 718240 - RNA, 19 nt, Homo sapiens
  misc_RNA (1)...(19): siRNA sense strand
agacaaagaauucucaguu

SEQ ID NO: 718241 - RNA, 19 nt, Homo sapiens
  misc_RNA (1)...(19): siRNA sense strand
gacagggccuauaaacuca

SEQ ID NO: 718242 - RNA, 19 nt, Homo sapiens
  misc_RNA (1)...(19): siRNA sense strand
caagaggucacugggaaua

SEQ ID NO: 718243 - RNA, 19 nt, Homo sapiens
  misc_RNA (1)...(19): siRNA sense strand
gacccaaccugcugcacaa

SEQ ID NO: 718244 - RNA, 19 nt, Homo sapiens
  misc_RNA (1)...(19): siRNA sense strand
aaacuggauucacuaggaa

SEQ ID NO: 718245 - RNA, 19 nt, Homo sapiens
  misc_RNA (1)...(19): siRNA sense strand
ggaauuugaccgugggauu

SEQ ID NO: 718246 - RNA, 19 nt, Homo sapiens
  misc_RNA (1)...(19): siRNA sense strand
gaucaccauucccaaagau

SEQ ID NO: 718247 - RNA, 19 nt, Homo sapiens
  misc_RNA (1)...(19): siRNA sense strand
gcagagggacgagcagaaa

SEQ ID NO: 718248 - RNA, 19 nt, Homo sapiens
  misc_RNA (1)...(19): siRNA sense strand
ggaauaaaaugacaucucu

SEQ ID NO: 718249 - RNA, 19 nt, Homo sapiens
  misc_RNA (1)...(19): siRNA sense strand
uaagaaagaaacuggauuc

SEQ ID NO: 718250 - RNA, 19 nt, Homo sapiens
  misc_RNA (1)...(19): siRNA sense strand
gaauuugaccgugggauug

SEQ ID NO: 718251 - RNA, 19 nt, Homo sapiens
  misc_RNA (1)...(19): siRNA sense strand
aaagaauucucaguucaga

SEQ ID NO: 718252 - RNA, 19 nt, Homo sapiens
  misc_RNA (1)...(19): siRNA sense strand
aagcagaagucaucagaca

SEQ ID NO: 718253 - RNA, 19 nt, Homo sapiens
  misc_RNA (1)...(19): siRNA sense strand
cagcaaagaugggcaagag

SEQ ID NO: 718254 - RNA, 19 nt, Homo sapiens
  misc_RNA (1)...(19): siRNA sense strand
ugacagggccuauaaacuc

SEQ ID NO: 718255 - RNA, 19 nt, Homo sapiens
  misc_RNA (1)...(19): siRNA sense strand
gaaaggcuucccaaucauc

SEQ ID NO: 718256 - RNA, 19 nt, Homo sapiens
  misc_RNA (1)...(19): siRNA sense strand
ccaugucaguggauucuau

SEQ ID NO: 718257 - RNA, 19 nt, Homo sapiens
  misc_RNA (1)...(19): siRNA sense strand
gaaugacagggccuauaaa

SEQ ID NO: 718258 - RNA, 19 nt, Homo sapiens
  misc_RNA (1)...(19): siRNA sense strand
ggagcacaguguucaugau

SEQ ID NO: 718259 - RNA, 19 nt, Homo sapiens
  misc_RNA (1)...(19): siRNA sense strand
gagcacaguguucaugaug

SEQ ID NO: 718260 - RNA, 19 nt, Homo sapiens
  misc_RNA (1)...(19): siRNA sense strand
ccucagaaacaccgaauga

SEQ ID NO: 718261 - RNA, 19 nt, Homo sapiens
  misc_RNA (1)...(19): siRNA sense strand
agaggucacugggaauaaa

SEQ ID NO: 718262 - RNA, 19 nt, Homo sapiens
  misc_RNA (1)...(19): siRNA sense strand
ugaauccuauuuacagaca

SEQ ID NO: 718263 - RNA, 19 nt, Homo sapiens
  misc_RNA (1)...(19): siRNA sense strand
caaagucaagggaaaguuc

SEQ ID NO: 718264 - RNA, 19 nt, Homo sapiens
  misc_RNA (1)...(19): siRNA sense strand
gaggagagcacggccauca

SEQ ID NO: 718265 - RNA, 19 nt, Homo sapiens
  misc_RNA (1)...(19): siRNA sense strand
ggagagcacggccaucauc

SEQ ID NO: 718266 - RNA, 19 nt, Homo sapiens
  misc_RNA (1)...(19): siRNA sense strand
caaagacaaagaauucauc

SEQ ID NO: 718267 - RNA, 19 nt, Homo sapiens
  misc_RNA (1)...(19): siRNA sense strand
agcaguaacucaucucuca

SEQ ID NO: 718268 - RNA, 19 nt, Homo sapiens
  misc_RNA (1)...(19): siRNA sense strand
aaagaaacuggauucacua

SEQ ID NO: 718269 - RNA, 19 nt, Homo sapiens
  misc_RNA (1)...(19): siRNA sense strand
gcgaaugacagggccuaua

SEQ ID NO: 718270 - RNA, 19 nt, Homo sapiens
  misc_RNA (1)...(19): siRNA sense strand
cugaugucguggacuauuu

SEQ ID NO: 718271 - RNA, 19 nt, Homo sapiens
  misc_RNA (1)...(19): siRNA sense strand
uggcuucccuccucccauu

SEQ ID NO: 718272 - RNA, 19 nt, Homo sapiens
  misc_RNA (1)...(19): siRNA sense strand
ggacaaaagagaaagaaau

SEQ ID NO: 718273 - RNA, 19 nt, Homo sapiens
  misc_RNA (1)...(19): siRNA sense strand
gagauaagaaacucagucu

SEQ ID NO: 718274 - RNA, 19 nt, Homo sapiens
  misc_RNA (1)...(19): siRNA sense strand
cagcucaaccucagaaaca

SEQ ID NO: 718275 - RNA, 19 nt, Homo sapiens
  misc_RNA (1)...(19): siRNA sense strand
ucagaucaccauucccaaa

SEQ ID NO: 718276 - RNA, 19 nt, Homo sapiens
  misc_RNA (1)...(19): siRNA sense strand
cguggacuauuuacucaga

SEQ ID NO: 718277 - RNA, 19 nt, Homo sapiens
  misc_RNA (1)...(19): siRNA sense strand
ucagaaacaccgaaugagu

SEQ ID NO: 718278 - RNA, 19 nt, Homo sapiens
  misc_RNA (1)...(19): siRNA sense strand
ugaugucguggacuauuua

SEQ ID NO: 718279 - RNA, 19 nt, Homo sapiens
  misc_RNA (1)...(19): siRNA sense strand
ggaggaggagcacaguguu

SEQ ID NO: 718280 - RNA, 19 nt, Homo sapiens
  misc_RNA (1)...(19): siRNA sense strand
gagggaggcauucaucuac

SEQ ID NO: 718281 - RNA, 19 nt, Homo sapiens
  misc_RNA (1)...(19): siRNA sense strand
gaggaggggugccauguca

SEQ ID NO: 718282 - RNA, 19 nt, Homo sapiens
  misc_RNA (1)...(19): siRNA sense strand
uaaacuuagccaccauauu

SEQ ID NO: 718283 - RNA, 19 nt, Homo sapiens
  misc_RNA (1)...(19): siRNA sense strand
uagaagcuuuacaacuuuc

SEQ ID NO: 718284 - RNA, 19 nt, Homo sapiens
  misc_RNA (1)...(19): siRNA sense strand
gcaagaggucacugggaau

SEQ ID NO: 718285 - RNA, 19 nt, Homo sapiens
  misc_RNA (1)...(19): siRNA sense strand
ggacuauuuacucagaaga

SEQ ID NO: 718286 - RNA, 19 nt, Homo sapiens
  misc_RNA (1)...(19): siRNA sense strand
cugaucagccuguuagaga

SEQ ID NO: 718287 - RNA, 19 nt, Homo sapiens
  misc_RNA (1)...(19): siRNA sense strand
gagacaauuacgugaggaa

SEQ ID NO: 718288 - RNA, 19 nt, Homo sapiens
  misc_RNA (1)...(19): siRNA sense strand
caaagaauucucaguucag

SEQ ID NO: 718289 - RNA, 19 nt, Homo sapiens
  misc_RNA (1)...(19): siRNA sense strand
acaagcagaagucaucaga

SEQ ID NO: 718290 - RNA, 19 nt, Homo sapiens
  misc_RNA (1)...(19): siRNA sense strand
agaaacaccgaaugaguca

SEQ ID NO: 718291 - RNA, 19 nt, Homo sapiens
  misc_RNA (1)...(19): siRNA sense strand
agaaaggcuucccaaucau

SEQ ID NO: 718292 - RNA, 19 nt, Homo sapiens
  misc_RNA (1)...(19): siRNA sense strand
gucguggacuauuuacuca

SEQ ID NO: 718293 - RNA, 19 nt, Homo sapiens
  misc_RNA (1)...(19): siRNA sense strand
gcacaagcagaagucauca

SEQ ID NO: 718294 - RNA, 19 nt, Homo sapiens
  misc_RNA (1)...(19): siRNA sense strand
gaggagcacaguguucaug

SEQ ID NO: 718295 - RNA, 19 nt, Homo sapiens
  misc_RNA (1)...(19): siRNA sense strand
gaggaggagcacaguguuc

SEQ ID NO: 718296 - RNA, 19 nt, Homo sapiens
  misc_RNA (1)...(19): siRNA sense strand
ggaggcauucaucuacaga

SEQ ID NO: 718297 - RNA, 19 nt, Homo sapiens
  misc_RNA (1)...(19): siRNA sense strand
gacuauuuacucagaagaa

SEQ ID NO: 718298 - RNA, 19 nt, Homo sapiens
  misc_RNA (1)...(19): siRNA sense strand
aggaacagcugggcaccuu

SEQ ID NO: 718299 - RNA, 19 nt, Homo sapiens
  misc_RNA (1)...(19): siRNA sense strand
gcugucagaucaccauucc

SEQ ID NO: 718300 - RNA, 19 nt, Homo sapiens
  misc_RNA (1)...(19): siRNA sense strand
agagaccgauccugauguc

SEQ ID NO: 718301 - RNA, 19 nt, Homo sapiens
  misc_RNA (1)...(19): siRNA sense strand
cagcuuucaucaacacucu

SEQ ID NO: 718302 - RNA, 19 nt, Homo sapiens
  misc_RNA (1)...(19): siRNA sense strand
agaucaccauucccaaaga

SEQ ID NO: 718303 - RNA, 19 nt, Homo sapiens
  misc_RNA (1)...(19): siRNA sense strand
gucaucagacaaagaauuc

SEQ ID NO: 718304 - RNA, 19 nt, Homo sapiens
  misc_RNA (1)...(19): siRNA sense strand
gcucggagaagcuuuacag

SEQ ID NO: 718305 - RNA, 19 nt, Homo sapiens
  misc_RNA (1)...(19): siRNA sense strand
gggaggcauucaucuacag

SEQ ID NO: 718306 - RNA, 19 nt, Homo sapiens
  misc_RNA (1)...(19): siRNA sense strand
caccuugcagcuccucaua

SEQ ID NO: 718307 - RNA, 19 nt, Homo sapiens
  misc_RNA (1)...(19): siRNA sense strand
uggauucuaucaccgaucu

SEQ ID NO: 718308 - RNA, 19 nt, Homo sapiens
  misc_RNA (1)...(19): siRNA sense strand
gaaugcccuuaucccaagu

SEQ ID NO: 718309 - RNA, 19 nt, Homo sapiens
  misc_RNA (1)...(19): siRNA sense strand
uuagagaccgauccugaug

SEQ ID NO: 718310 - RNA, 19 nt, Homo sapiens
  misc_RNA (1)...(19): siRNA sense strand
agaauucucaguucagagu

SEQ ID NO: 718311 - RNA, 19 nt, Homo sapiens
  misc_RNA (1)...(19): siRNA sense strand
aaaagagagugagacaauu

SEQ ID NO: 718312 - RNA, 19 nt, Homo sapiens
  misc_RNA (1)...(19): siRNA sense strand
uggauucacuaggaaagga

SEQ ID NO: 718313 - RNA, 19 nt, Homo sapiens
  misc_RNA (1)...(19): siRNA sense strand
gauucuaucaccgaucuug

SEQ ID NO: 718314 - RNA, 19 nt, Homo sapiens
  misc_RNA (1)...(19): siRNA sense strand
aacauggccuccagacagu

SEQ ID NO: 718315 - RNA, 19 nt, Homo sapiens
  misc_RNA (1)...(19): siRNA sense strand
caucuacagacuccaacaa

SEQ ID NO: 718316 - RNA, 19 nt, Homo sapiens
  misc_RNA (1)...(19): siRNA sense strand
agagggacgagcagaaaga

SEQ ID NO: 718317 - RNA, 19 nt, Homo sapiens
  misc_RNA (1)...(19): siRNA sense strand
cagaagucaucagacaaag

SEQ ID NO: 718318 - RNA, 19 nt, Homo sapiens
  misc_RNA (1)...(19): siRNA sense strand
ugacaacaucagcaaagau

SEQ ID NO: 718319 - RNA, 19 nt, Homo sapiens
  misc_RNA (1)...(19): siRNA sense strand
acacagcuuucaucaacac

SEQ ID NO: 718320 - RNA, 19 nt, Homo sapiens
  misc_RNA (1)...(19): siRNA sense strand
gaaagaaacuggauucacu

SEQ ID NO: 718321 - RNA, 19 nt, Homo sapiens
  misc_RNA (1)...(19): siRNA sense strand
gaaacuggauucacuagga

SEQ ID NO: 718322 - RNA, 19 nt, Homo sapiens
  misc_RNA (1)...(19): siRNA sense strand
aaacuuagccaccauauuu

SEQ ID NO: 718323 - RNA, 19 nt, Homo sapiens
  misc_RNA (1)...(19): siRNA sense strand
aaagaacucucaagcagua

SEQ ID NO: 718324 - RNA, 19 nt, Homo sapiens
  misc_RNA (1)...(19): siRNA sense strand
guacacagcuuucaucaac

SEQ ID NO: 718325 - RNA, 19 nt, Homo sapiens
  misc_RNA (1)...(19): siRNA sense strand
aagaaaggcuucccaauca

SEQ ID NO: 718326 - RNA, 19 nt, Homo sapiens
  misc_RNA (1)...(19): siRNA sense strand
caucaucgcuguugugcaa

SEQ ID NO: 718327 - RNA, 19 nt, Homo sapiens
  misc_RNA (1)...(19): siRNA sense strand
gaagucaucagacaaagaa

SEQ ID NO: 718328 - RNA, 19 nt, Homo sapiens
  misc_RNA (1)...(19): siRNA sense strand
gacaaagaauucucaguuc

SEQ ID NO: 718329 - RNA, 19 nt, Homo sapiens
  misc_RNA (1)...(19): siRNA sense strand
gcagaagucaucagacaaa

SEQ ID NO: 718330 - RNA, 19 nt, Homo sapiens
  misc_RNA (1)...(19): siRNA sense strand
acuagaagcuuuacaacuu

SEQ ID NO: 718331 - RNA, 19 nt, Homo sapiens
  misc_RNA (1)...(19): siRNA sense strand
aaagagagugagacaauua

SEQ ID NO: 718332 - RNA, 19 nt, Homo sapiens
  misc_RNA (1)...(19): siRNA sense strand
cgaaugacagggccuauaa

SEQ ID NO: 718333 - RNA, 19 nt, Homo sapiens
  misc_RNA (1)...(19): siRNA sense strand
cuagaagcuuuacaacuuu

SEQ ID NO: 718334 - RNA, 19 nt, Homo sapiens
  misc_RNA (1)...(19): siRNA sense strand
cggagaagcuuuacagagu

SEQ ID NO: 718335 - RNA, 19 nt, Homo sapiens
  misc_RNA (1)...(19): siRNA sense strand
ucaccgaucuugaugacaa

SEQ ID NO: 718336 - RNA, 19 nt, Homo sapiens
  misc_RNA (1)...(19): siRNA sense strand
ccuugcagcuccucauaua

SEQ ID NO: 718337 - RNA, 19 nt, Homo sapiens
  misc_RNA (1)...(19): siRNA sense strand
acaaagaauucucaguuca

SEQ ID NO: 718338 - RNA, 19 nt, Homo sapiens
  misc_RNA (1)...(19): siRNA sense strand
ggagggaggcauucaucua

SEQ ID NO: 718339 - RNA, 19 nt, Homo sapiens
  misc_RNA (1)...(19): siRNA sense strand
gcccuuaucccaagucauu

SEQ ID NO: 718340 - RNA, 19 nt, Homo sapiens
  misc_RNA (1)...(19): siRNA sense strand
agacaaagaauucucaguu

SEQ ID NO: 718341 - RNA, 19 nt, Homo sapiens
  misc_RNA (1)...(19): siRNA sense strand
gacagggccuauaaacuca

SEQ ID NO: 718342 - RNA, 19 nt, Homo sapiens
  misc_RNA (1)...(19): siRNA sense strand
caagaggucacugggaaua

SEQ ID NO: 718343 - RNA, 19 nt, Homo sapiens
  misc_RNA (1)...(19): siRNA sense strand
gacccaaccugcugcacaa

SEQ ID NO: 718344 - RNA, 19 nt, Homo sapiens
  misc_RNA (1)...(19): siRNA sense strand
aaacuggauucacuaggaa

SEQ ID NO: 718345 - RNA, 19 nt, Homo sapiens
  misc_RNA (1)...(19): siRNA sense strand
ggaauuugaccgugggauu

SEQ ID NO: 718346 - RNA, 19 nt, Homo sapiens
  misc_RNA (1)...(19): siRNA sense strand
gaucaccauucccaaagau

SEQ ID NO: 718347 - RNA, 19 nt, Homo sapiens
  misc_RNA (1)...(19): siRNA sense strand
gcagagggacgagcagaaa

SEQ ID NO: 718348 - RNA, 19 nt, Homo sapiens
  misc_RNA (1)...(19): siRNA sense strand
ggaauaaaaugacaucucu

SEQ ID NO: 718349 - RNA, 19 nt, Homo sapiens
  misc_RNA (1)...(19): siRNA sense strand
uaagaaagaaacuggauuc

SEQ ID NO: 718350 - RNA, 19 nt, Homo sapiens
  misc_RNA (1)...(19): siRNA sense strand
gaauuugaccgugggauug

SEQ ID NO: 718351 - RNA, 19 nt, Homo sapiens
  misc_RNA (1)...(19): siRNA sense strand
aaagaauucucaguucaga

SEQ ID NO: 718352 - RNA, 19 nt, Homo sapiens
  misc_RNA (1)...(19): siRNA sense strand
aagcagaagucaucagaca

SEQ ID NO: 718353 - RNA, 19 nt, Homo sapiens
  misc_RNA (1)...(19): siRNA sense strand
cagcaaagaugggcaagag

SEQ ID NO: 718354 - RNA, 19 nt, Homo sapiens
  misc_RNA (1)...(19): siRNA sense strand
ugacagggccuauaaacuc

SEQ ID NO: 718355 - RNA, 19 nt, Homo sapiens
  misc_RNA (1)...(19): siRNA sense strand
gaaaggcuucccaaucauc

SEQ ID NO: 718356 - RNA, 19 nt, Homo sapiens
  misc_RNA (1)...(19): siRNA sense strand
ccaugucaguggauucuau

SEQ ID NO: 718357 - RNA, 19 nt, Homo sapiens
  misc_RNA (1)...(19): siRNA sense strand
gaaugacagggccuauaaa

SEQ ID NO: 718358 - RNA, 19 nt, Homo sapiens
  misc_RNA (1)...(19): siRNA sense strand
ggagcacaguguucaugau

SEQ ID NO: 718359 - RNA, 19 nt, Homo sapiens
  misc_RNA (1)...(19): siRNA sense strand
gagcacaguguucaugaug

SEQ ID NO: 718360 - RNA, 19 nt, Homo sapiens
  misc_RNA (1)...(19): siRNA sense strand
ccucagaaacaccgaauga

SEQ ID NO: 718361 - RNA, 19 nt, Homo sapiens
  misc_RNA (1)...(19): siRNA sense strand
agaggucacugggaauaaa

SEQ ID NO: 718362 - RNA, 19 nt, Homo sapiens
  misc_RNA (1)...(19): siRNA sense strand
ugaauccuauuuacagaca

SEQ ID NO: 718363 - RNA, 19 nt, Homo sapiens
  misc_RNA (1)...(19): siRNA sense strand
caaagucaagggaaaguuc

SEQ ID NO: 718364 - RNA, 19 nt, Homo sapiens
  misc_RNA (1)...(19): siRNA sense strand
gaggagagcacggccauca

SEQ ID NO: 718365 - RNA, 19 nt, Homo sapiens
  misc_RNA (1)...(19): siRNA sense strand
ggagagcacggccaucauc

SEQ ID NO: 718366 - RNA, 19 nt, Homo sapiens
  misc_RNA (1)...(19): siRNA sense strand
agcaguaacucaucucuca

SEQ ID NO: 718367 - RNA, 19 nt, Homo sapiens
  misc_RNA (1)...(19): siRNA sense strand
caaagacaaagaauucauc

SEQ ID NO: 718368 - RNA, 19 nt, Homo sapiens
  misc_RNA (1)...(19): siRNA sense strand
aaagaaacuggauucacua

SEQ ID NO: 718369 - RNA, 19 nt, Homo sapiens
  misc_RNA (1)...(19): siRNA sense strand
gcgaaugacagggccuaua

SEQ ID NO: 718370 - RNA, 19 nt, Homo sapiens
  misc_RNA (1)...(19): siRNA sense strand
cugaugucguggacuauuu

SEQ ID NO: 718371 - RNA, 19 nt, Homo sapiens
  misc_RNA (1)...(19): siRNA sense strand
uggcuucccuccucccauu

SEQ ID NO: 718372 - RNA, 19 nt, Homo sapiens
  misc_RNA (1)...(19): siRNA sense strand
ggacaaaagagaaagaaau

SEQ ID NO: 718373 - RNA, 19 nt, Homo sapiens
  misc_RNA (1)...(19): siRNA sense strand
gagauaagaaacucagucu

SEQ ID NO: 718374 - RNA, 19 nt, Homo sapiens
  misc_RNA (1)...(19): siRNA sense strand
cagcucaaccucagaaaca

SEQ ID NO: 718375 - RNA, 19 nt, Homo sapiens
  misc_RNA (1)...(19): siRNA sense strand
ucagaucaccauucccaaa

SEQ ID NO: 718376 - RNA, 19 nt, Homo sapiens
  misc_RNA (1)...(19): siRNA sense strand
cguggacuauuuacucaga

SEQ ID NO: 718377 - RNA, 19 nt, Homo sapiens
  misc_RNA (1)...(19): siRNA sense strand
ucagaaacaccgaaugagu

SEQ ID NO: 718378 - RNA, 19 nt, Homo sapiens
  misc_RNA (1)...(19): siRNA sense strand
ugaugucguggacuauuua

SEQ ID NO: 718379 - RNA, 19 nt, Homo sapiens
  misc_RNA (1)...(19): siRNA sense strand
ggaggaggagcacaguguu

SEQ ID NO: 718380 - RNA, 19 nt, Homo sapiens
  misc_RNA (1)...(19): siRNA sense strand
gagggaggcauucaucuac

SEQ ID NO: 718381 - RNA, 19 nt, Homo sapiens
  misc_RNA (1)...(19): siRNA sense strand
gaggaggggugccauguca

SEQ ID NO: 718382 - RNA, 19 nt, Homo sapiens
  misc_RNA (1)...(19): siRNA sense strand
uaaacuuagccaccauauu

SEQ ID NO: 718383 - RNA, 19 nt, Homo sapiens
  misc_RNA (1)...(19): siRNA sense strand
uagaagcuuuacaacuuuc

SEQ ID NO: 718384 - RNA, 19 nt, Homo sapiens
  misc_RNA (1)...(19): siRNA sense strand
gcaagaggucacugggaau

SEQ ID NO: 718385 - RNA, 19 nt, Homo sapiens
  misc_RNA (1)...(19): siRNA sense strand
ggacuauuuacucagaaga

SEQ ID NO: 718386 - RNA, 19 nt, Homo sapiens
  misc_RNA (1)...(19): siRNA sense strand
cugaucagccuguuagaga

SEQ ID NO: 718387 - RNA, 19 nt, Homo sapiens
  misc_RNA (1)...(19): siRNA sense strand
gagacaauuacgugaggaa

SEQ ID NO: 718388 - RNA, 19 nt, Homo sapiens
  misc_RNA (1)...(19): siRNA sense strand
caaagaauucucaguucag

SEQ ID NO: 718389 - RNA, 19 nt, Homo sapiens
  misc_RNA (1)...(19): siRNA sense strand
acaagcagaagucaucaga

SEQ ID NO: 718390 - RNA, 19 nt, Homo sapiens
  misc_RNA (1)...(19): siRNA sense strand
agaaacaccgaaugaguca

SEQ ID NO: 718391 - RNA, 19 nt, Homo sapiens
  misc_RNA (1)...(19): siRNA sense strand
agaaaggcuucccaaucau

SEQ ID NO: 718392 - RNA, 19 nt, Homo sapiens
  misc_RNA (1)...(19): siRNA sense strand
gucguggacuauuuacuca

SEQ ID NO: 718393 - RNA, 19 nt, Homo sapiens
  misc_RNA (1)...(19): siRNA sense strand
gcacaagcagaagucauca

SEQ ID NO: 718394 - RNA, 19 nt, Homo sapiens
  misc_RNA (1)...(19): siRNA sense strand
gaggagcacaguguucaug

SEQ ID NO: 718395 - RNA, 19 nt, Homo sapiens
  misc_RNA (1)...(19): siRNA sense strand
gaggaggagcacaguguuc

SEQ ID NO: 718396 - RNA, 19 nt, Homo sapiens
  misc_RNA (1)...(19): siRNA sense strand
ggaggcauucaucuacaga

SEQ ID NO: 718397 - RNA, 19 nt, Homo sapiens
  misc_RNA (1)...(19): siRNA sense strand
gacuauuuacucagaagaa

SEQ ID NO: 718398 - RNA, 19 nt, Homo sapiens
  misc_RNA (1)...(19): siRNA sense strand
aggaacagcugggcaccuu

SEQ ID NO: 718399 - RNA, 19 nt, Homo sapiens
  misc_RNA (1)...(19): siRNA sense strand
cagcuuucaucaacacucu

SEQ ID NO: 718400 - RNA, 19 nt, Homo sapiens
  misc_RNA (1)...(19): siRNA sense strand
agagaccgauccugauguc

SEQ ID NO: 718401 - RNA, 19 nt, Homo sapiens
  misc_RNA (1)...(19): siRNA sense strand
gcugucagaucaccauucc

SEQ ID NO: 718402 - RNA, 19 nt, Homo sapiens
  misc_RNA (1)...(19): siRNA sense strand
agaucaccauucccaaaga

SEQ ID NO: 718403 - RNA, 19 nt, Homo sapiens
  misc_RNA (1)...(19): siRNA sense strand
gucaucagacaaagaauuc

SEQ ID NO: 718404 - RNA, 19 nt, Homo sapiens
  misc_RNA (1)...(19): siRNA sense strand
gcucggagaagcuuuacag

SEQ ID NO: 718405 - RNA, 19 nt, Homo sapiens
  misc_RNA (1)...(19): siRNA sense strand
gggaggcauucaucuacag

SEQ ID NO: 718406 - RNA, 19 nt, Homo sapiens
  misc_RNA (1)...(19): siRNA sense strand
caccuugcagcuccucaua

SEQ ID NO: 718407 - RNA, 19 nt, Homo sapiens
  misc_RNA (1)...(19): siRNA sense strand
uggauucuaucaccgaucu

SEQ ID NO: 718408 - RNA, 19 nt, Homo sapiens
  misc_RNA (1)...(19): siRNA sense strand
uuagagaccgauccugaug

SEQ ID NO: 718409 - RNA, 19 nt, Homo sapiens
  misc_RNA (1)...(19): siRNA sense strand
agaauucucaguucagagu

SEQ ID NO: 718410 - RNA, 19 nt, Homo sapiens
  misc_RNA (1)...(19): siRNA sense strand
uggauucacuaggaaagga

SEQ ID NO: 718411 - RNA, 19 nt, Homo sapiens
  misc_RNA (1)...(19): siRNA sense strand
gaaugcccuuaucccaagu

SEQ ID NO: 718412 - RNA, 19 nt, Homo sapiens
  misc_RNA (1)...(19): siRNA sense strand
aaaagagagugagacaauu

SEQ ID NO: 718413 - RNA, 19 nt, Homo sapiens
  misc_RNA (1)...(19): siRNA sense strand
gauucuaucaccgaucuug

SEQ ID NO: 718414 - RNA, 19 nt, Homo sapiens
  misc_RNA (1)...(19): siRNA sense strand
agagggacgagcagaaaga

SEQ ID NO: 718415 - RNA, 19 nt, Homo sapiens
  misc_RNA (1)...(19): siRNA sense strand
caucuacagacuccaacaa

SEQ ID NO: 718416 - RNA, 19 nt, Homo sapiens
  misc_RNA (1)...(19): siRNA sense strand
cagaagucaucagacaaag

SEQ ID NO: 718417 - RNA, 19 nt, Homo sapiens
  misc_RNA (1)...(19): siRNA sense strand
ugacaacaucagcaaagau

SEQ ID NO: 718418 - RNA, 19 nt, Homo sapiens
  misc_RNA (1)...(19): siRNA sense strand
acacagcuuucaucaacac

SEQ ID NO: 718419 - RNA, 19 nt, Homo sapiens
  misc_RNA (1)...(19): siRNA sense strand
aacauggccuccagacagu

SEQ ID NO: 718420 - RNA, 19 nt, Homo sapiens
  misc_RNA (1)...(19): siRNA sense strand
gaaagaaacuggauucacu

SEQ ID NO: 718421 - RNA, 19 nt, Homo sapiens
  misc_RNA (1)...(19): siRNA sense strand
gaaacuggauucacuagga

SEQ ID NO: 718422 - RNA, 19 nt, Homo sapiens
  misc_RNA (1)...(19): siRNA sense strand
aaacuuagccaccauauuu

SEQ ID NO: 718423 - RNA, 19 nt, Homo sapiens
  misc_RNA (1)...(19): siRNA sense strand
aaagaacucucaagcagua

SEQ ID NO: 718424 - RNA, 19 nt, Homo sapiens
  misc_RNA (1)...(19): siRNA sense strand
guacacagcuuucaucaac

SEQ ID NO: 718425 - RNA, 19 nt, Homo sapiens
  misc_RNA (1)...(19): siRNA sense strand
aagaaaggcuucccaauca

SEQ ID NO: 718426 - RNA, 19 nt, Homo sapiens
  misc_RNA (1)...(19): siRNA sense strand
caucaucgcuguugugcaa

SEQ ID NO: 718427 - RNA, 19 nt, Homo sapiens
  misc_RNA (1)...(19): siRNA sense strand
gaagucaucagacaaagaa

SEQ ID NO: 718428 - RNA, 19 nt, Homo sapiens
  misc_RNA (1)...(19): siRNA sense strand
gacaaagaauucucaguuc

SEQ ID NO: 718429 - RNA, 19 nt, Homo sapiens
  misc_RNA (1)...(19): siRNA sense strand
gcagaagucaucagacaaa

SEQ ID NO: 718430 - RNA, 19 nt, Homo sapiens
  misc_RNA (1)...(19): siRNA sense strand
acuagaagcuuuacaacuu

SEQ ID NO: 718431 - RNA, 19 nt, Homo sapiens
  misc_RNA (1)...(19): siRNA sense strand
aaagagagugagacaauua

SEQ ID NO: 718432 - RNA, 19 nt, Homo sapiens
  misc_RNA (1)...(19): siRNA sense strand
cgaaugacagggccuauaa

SEQ ID NO: 718433 - RNA, 19 nt, Homo sapiens
  misc_RNA (1)...(19): siRNA sense strand
cuagaagcuuuacaacuuu

SEQ ID NO: 718434 - RNA, 19 nt, Homo sapiens
  misc_RNA (1)...(19): siRNA sense strand
cggagaagcuuuacagagu

SEQ ID NO: 718435 - RNA, 19 nt, Homo sapiens
  misc_RNA (1)...(19): siRNA sense strand
ucaccgaucuugaugacaa

SEQ ID NO: 718436 - RNA, 19 nt, Homo sapiens
  misc_RNA (1)...(19): siRNA sense strand
ccuugcagcuccucauaua

SEQ ID NO: 718437 - RNA, 19 nt, Homo sapiens
  misc_RNA (1)...(19): siRNA sense strand
acaaagaauucucaguuca

SEQ ID NO: 718438 - RNA, 19 nt, Homo sapiens
  misc_RNA (1)...(19): siRNA sense strand
ggagggaggcauucaucua

SEQ ID NO: 718439 - RNA, 19 nt, Homo sapiens
  misc_RNA (1)...(19): siRNA sense strand
gcccuuaucccaagucauu

SEQ ID NO: 718440 - RNA, 19 nt, Homo sapiens
  misc_RNA (1)...(19): siRNA sense strand
agacaaagaauucucaguu

SEQ ID NO: 718441 - RNA, 19 nt, Homo sapiens
  misc_RNA (1)...(19): siRNA sense strand
gacagggccuauaaacuca

SEQ ID NO: 718442 - RNA, 19 nt, Homo sapiens
  misc_RNA (1)...(19): siRNA sense strand
caagaggucacugggaaua

SEQ ID NO: 718443 - RNA, 19 nt, Homo sapiens
  misc_RNA (1)...(19): siRNA sense strand
gacccaaccugcugcacaa

SEQ ID NO: 718444 - RNA, 19 nt, Homo sapiens
  misc_RNA (1)...(19): siRNA sense strand
aaacuggauucacuaggaa

SEQ ID NO: 718445 - RNA, 19 nt, Homo sapiens
  misc_RNA (1)...(19): siRNA sense strand
ggaauuugaccgugggauu

SEQ ID NO: 718446 - RNA, 19 nt, Homo sapiens
  misc_RNA (1)...(19): siRNA sense strand
gaucaccauucccaaagau

SEQ ID NO: 718447 - RNA, 19 nt, Homo sapiens
  misc_RNA (1)...(19): siRNA sense strand
gcagagggacgagcagaaa

SEQ ID NO: 718448 - RNA, 19 nt, Homo sapiens
  misc_RNA (1)...(19): siRNA sense strand
ggaauaaaaugacaucucu

SEQ ID NO: 718449 - RNA, 19 nt, Homo sapiens
  misc_RNA (1)...(19): siRNA sense strand
uaagaaagaaacuggauuc

SEQ ID NO: 718450 - RNA, 19 nt, Homo sapiens
  misc_RNA (1)...(19): siRNA sense strand
gaauuugaccgugggauug

SEQ ID NO: 718451 - RNA, 19 nt, Homo sapiens
  misc_RNA (1)...(19): siRNA sense strand
aaagaauucucaguucaga

SEQ ID NO: 718452 - RNA, 19 nt, Homo sapiens
  misc_RNA (1)...(19): siRNA sense strand
aagcagaagucaucagaca

SEQ ID NO: 718453 - RNA, 19 nt, Homo sapiens
  misc_RNA (1)...(19): siRNA sense strand
cagcaaagaugggcaagag

SEQ ID NO: 718454 - RNA, 19 nt, Homo sapiens
  misc_RNA (1)...(19): siRNA sense strand
ugacagggccuauaaacuc

SEQ ID NO: 718455 - RNA, 19 nt, Homo sapiens
  misc_RNA (1)...(19): siRNA sense strand
gaaaggcuucccaaucauc

SEQ ID NO: 718456 - RNA, 19 nt, Homo sapiens
  misc_RNA (1)...(19): siRNA sense strand
ccaugucaguggauucuau

SEQ ID NO: 718457 - RNA, 19 nt, Homo sapiens
  misc_RNA (1)...(19): siRNA sense strand
gaaugacagggccuauaaa

SEQ ID NO: 718458 - RNA, 19 nt, Homo sapiens
  misc_RNA (1)...(19): siRNA sense strand
ggagcacaguguucaugau

SEQ ID NO: 718459 - RNA, 19 nt, Homo sapiens
  misc_RNA (1)...(19): siRNA sense strand
gagcacaguguucaugaug

SEQ ID NO: 718460 - RNA, 19 nt, Homo sapiens
  misc_RNA (1)...(19): siRNA sense strand
ccucagaaacaccgaauga

SEQ ID NO: 718461 - RNA, 19 nt, Homo sapiens
  misc_RNA (1)...(19): siRNA sense strand
agaggucacugggaauaaa

SEQ ID NO: 718462 - RNA, 19 nt, Homo sapiens
  misc_RNA (1)...(19): siRNA sense strand
ugaauccuauuuacagaca

SEQ ID NO: 718463 - RNA, 19 nt, Homo sapiens
  misc_RNA (1)...(19): siRNA sense strand
caaagucaagggaaaguuc

SEQ ID NO: 718464 - RNA, 19 nt, Homo sapiens
  misc_RNA (1)...(19): siRNA sense strand
gaggagagcacggccauca

SEQ ID NO: 718465 - RNA, 19 nt, Homo sapiens
  misc_RNA (1)...(19): siRNA sense strand
ggagagcacggccaucauc

SEQ ID NO: 718466 - RNA, 19 nt, Homo sapiens
  misc_RNA (1)...(19): siRNA sense strand
agcaguaacucaucucuca

SEQ ID NO: 718467 - RNA, 19 nt, Homo sapiens
  misc_RNA (1)...(19): siRNA sense strand
caaagacaaagaauucauc

SEQ ID NO: 718468 - RNA, 19 nt, Homo sapiens
  misc_RNA (1)...(19): siRNA sense strand
aaagaaacuggauucacua

SEQ ID NO: 718469 - RNA, 19 nt, Homo sapiens
  misc_RNA (1)...(19): siRNA sense strand
gcgaaugacagggccuaua

SEQ ID NO: 718470 - RNA, 19 nt, Homo sapiens
  misc_RNA (1)...(19): siRNA sense strand
cugaugucguggacuauuu

SEQ ID NO: 718471 - RNA, 19 nt, Homo sapiens
  misc_RNA (1)...(19): siRNA sense strand
uggcuucccuccucccauu

SEQ ID NO: 718472 - RNA, 19 nt, Homo sapiens
  misc_RNA (1)...(19): siRNA sense strand
ggacaaaagagaaagaaau

SEQ ID NO: 718473 - RNA, 19 nt, Homo sapiens
  misc_RNA (1)...(19): siRNA sense strand
gagauaagaaacucagucu

SEQ ID NO: 718474 - RNA, 19 nt, Homo sapiens
  misc_RNA (1)...(19): siRNA sense strand
cagcucaaccucagaaaca

SEQ ID NO: 718475 - RNA, 19 nt, Homo sapiens
  misc_RNA (1)...(19): siRNA sense strand
ucagaucaccauucccaaa

SEQ ID NO: 718476 - RNA, 19 nt, Homo sapiens
  misc_RNA (1)...(19): siRNA sense strand
cguggacuauuuacucaga

SEQ ID NO: 718477 - RNA, 19 nt, Homo sapiens
  misc_RNA (1)...(19): siRNA sense strand
ucagaaacaccgaaugagu

SEQ ID NO: 718478 - RNA, 19 nt, Homo sapiens
  misc_RNA (1)...(19): siRNA sense strand
ugaugucguggacuauuua

SEQ ID NO: 718479 - RNA, 19 nt, Homo sapiens
  misc_RNA (1)...(19): siRNA sense strand
ggaggaggagcacaguguu

SEQ ID NO: 718480 - RNA, 19 nt, Homo sapiens
  misc_RNA (1)...(19): siRNA sense strand
gagggaggcauucaucuac

SEQ ID NO: 718481 - RNA, 19 nt, Homo sapiens
  misc_RNA (1)...(19): siRNA sense strand
gaggaggggugccauguca

SEQ ID NO: 718482 - RNA, 19 nt, Homo sapiens
  misc_RNA (1)...(19): siRNA sense strand
uaaacuuagccaccauauu

SEQ ID NO: 718483 - RNA, 19 nt, Homo sapiens
  misc_RNA (1)...(19): siRNA sense strand
uagaagcuuuacaacuuuc

SEQ ID NO: 718484 - RNA, 19 nt, Homo sapiens
  misc_RNA (1)...(19): siRNA sense strand
gcaagaggucacugggaau

SEQ ID NO: 718485 - RNA, 19 nt, Homo sapiens
  misc_RNA (1)...(19): siRNA sense strand
ggacuauuuacucagaaga

SEQ ID NO: 718486 - RNA, 19 nt, Homo sapiens
  misc_RNA (1)...(19): siRNA sense strand
cugaucagccuguuagaga

SEQ ID NO: 718487 - RNA, 19 nt, Homo sapiens
  misc_RNA (1)...(19): siRNA sense strand
gagacaauuacgugaggaa

SEQ ID NO: 718488 - RNA, 19 nt, Homo sapiens
  misc_RNA (1)...(19): siRNA sense strand
caaagaauucucaguucag

SEQ ID NO: 718489 - RNA, 19 nt, Homo sapiens
  misc_RNA (1)...(19): siRNA sense strand
acaagcagaagucaucaga

SEQ ID NO: 718490 - RNA, 19 nt, Homo sapiens
  misc_RNA (1)...(19): siRNA sense strand
agaaacaccgaaugaguca

SEQ ID NO: 718491 - RNA, 19 nt, Homo sapiens
  misc_RNA (1)...(19): siRNA sense strand
agaaaggcuucccaaucau

SEQ ID NO: 718492 - RNA, 19 nt, Homo sapiens
  misc_RNA (1)...(19): siRNA sense strand
gucguggacuauuuacuca

SEQ ID NO: 718493 - RNA, 19 nt, Homo sapiens
  misc_RNA (1)...(19): siRNA sense strand
gcacaagcagaagucauca

SEQ ID NO: 718494 - RNA, 19 nt, Homo sapiens
  misc_RNA (1)...(19): siRNA sense strand
gaggagcacaguguucaug

SEQ ID NO: 718495 - RNA, 19 nt, Homo sapiens
  misc_RNA (1)...(19): siRNA sense strand
gaggaggagcacaguguuc

SEQ ID NO: 718496 - RNA, 19 nt, Homo sapiens
  misc_RNA (1)...(19): siRNA sense strand
ggaggcauucaucuacaga

SEQ ID NO: 718497 - RNA, 19 nt, Homo sapiens
  misc_RNA (1)...(19): siRNA sense strand
gacuauuuacucagaagaa

SEQ ID NO: 718498 - RNA, 19 nt, Homo sapiens
  misc_RNA (1)...(19): siRNA sense strand
aggaacagcugggcaccuu

SEQ ID NO: 718499 - RNA, 19 nt, Homo sapiens
  misc_RNA (1)...(19): siRNA sense strand
cagcuuucaucaacacucu

SEQ ID NO: 718500 - RNA, 19 nt, Homo sapiens
  misc_RNA (1)...(19): siRNA sense strand
agagaccgauccugauguc

SEQ ID NO: 718501 - RNA, 19 nt, Homo sapiens
  misc_RNA (1)...(19): siRNA sense strand
gcugucagaucaccauucc

SEQ ID NO: 718502 - RNA, 19 nt, Homo sapiens
  misc_RNA (1)...(19): siRNA sense strand
agaucaccauucccaaaga

SEQ ID NO: 718503 - RNA, 19 nt, Homo sapiens
  misc_RNA (1)...(19): siRNA sense strand
gucaucagacaaagaauuc

SEQ ID NO: 718504 - RNA, 19 nt, Homo sapiens
  misc_RNA (1)...(19): siRNA sense strand
gcucggagaagcuuuacag

SEQ ID NO: 718505 - RNA, 19 nt, Homo sapiens
  misc_RNA (1)...(19): siRNA sense strand
gggaggcauucaucuacag

SEQ ID NO: 718506 - RNA, 19 nt, Homo sapiens
  misc_RNA (1)...(19): siRNA sense strand
caccuugcagcuccucaua

SEQ ID NO: 718507 - RNA, 19 nt, Homo sapiens
  misc_RNA (1)...(19): siRNA sense strand
uggauucuaucaccgaucu

SEQ ID NO: 718508 - RNA, 19 nt, Homo sapiens
  misc_RNA (1)...(19): siRNA sense strand
uuagagaccgauccugaug

SEQ ID NO: 718509 - RNA, 19 nt, Homo sapiens
  misc_RNA (1)...(19): siRNA sense strand
agaauucucaguucagagu

SEQ ID NO: 718510 - RNA, 19 nt, Homo sapiens
  misc_RNA (1)...(19): siRNA sense strand
uggauucacuaggaaagga

SEQ ID NO: 718511 - RNA, 19 nt, Homo sapiens
  misc_RNA (1)...(19): siRNA sense strand
gaaugcccuuaucccaagu

SEQ ID NO: 718512 - RNA, 19 nt, Homo sapiens
  misc_RNA (1)...(19): siRNA sense strand
aaaagagagugagacaauu

SEQ ID NO: 718513 - RNA, 19 nt, Homo sapiens
  misc_RNA (1)...(19): siRNA sense strand
gauucuaucaccgaucuug

SEQ ID NO: 718514 - RNA, 19 nt, Homo sapiens
  misc_RNA (1)...(19): siRNA sense strand
agagggacgagcagaaaga

SEQ ID NO: 718515 - RNA, 19 nt, Homo sapiens
  misc_RNA (1)...(19): siRNA sense strand
caucuacagacuccaacaa

SEQ ID NO: 718516 - RNA, 19 nt, Homo sapiens
  misc_RNA (1)...(19): siRNA sense strand
cagaagucaucagacaaag

SEQ ID NO: 718517 - RNA, 19 nt, Homo sapiens
  misc_RNA (1)...(19): siRNA sense strand
ugacaacaucagcaaagau

SEQ ID NO: 718518 - RNA, 19 nt, Homo sapiens
  misc_RNA (1)...(19): siRNA sense strand
acacagcuuucaucaacac

SEQ ID NO: 718519 - RNA, 19 nt, Homo sapiens
  misc_RNA (1)...(19): siRNA sense strand
aacauggccuccagacagu

SEQ ID NO: 718520 - RNA, 19 nt, Homo sapiens
  misc_RNA (1)...(19): siRNA sense strand
gaaagaaacuggauucacu

SEQ ID NO: 718521 - RNA, 19 nt, Homo sapiens
  misc_RNA (1)...(19): siRNA sense strand
gaaacuggauucacuagga

SEQ ID NO: 718522 - RNA, 19 nt, Homo sapiens
  misc_RNA (1)...(19): siRNA sense strand
aaacuuagccaccauauuu

SEQ ID NO: 718523 - RNA, 19 nt, Homo sapiens
  misc_RNA (1)...(19): siRNA sense strand
aaagaacucucaagcagua

SEQ ID NO: 718524 - RNA, 19 nt, Homo sapiens
  misc_RNA (1)...(19): siRNA sense strand
guacacagcuuucaucaac

SEQ ID NO: 718525 - RNA, 19 nt, Homo sapiens
  misc_RNA (1)...(19): siRNA sense strand
aagaaaggcuucccaauca

SEQ ID NO: 718526 - RNA, 19 nt, Homo sapiens
  misc_RNA (1)...(19): siRNA sense strand
caucaucgcuguugugcaa

SEQ ID NO: 718527 - RNA, 19 nt, Homo sapiens
  misc_RNA (1)...(19): siRNA sense strand
gaagucaucagacaaagaa

SEQ ID NO: 718528 - RNA, 19 nt, Homo sapiens
  misc_RNA (1)...(19): siRNA sense strand
gacaaagaauucucaguuc

SEQ ID NO: 718529 - RNA, 19 nt, Homo sapiens
  misc_RNA (1)...(19): siRNA sense strand
gcagaagucaucagacaaa

SEQ ID NO: 718530 - RNA, 19 nt, Homo sapiens
  misc_RNA (1)...(19): siRNA sense strand
acuagaagcuuuacaacuu

SEQ ID NO: 718531 - RNA, 19 nt, Homo sapiens
  misc_RNA (1)...(19): siRNA sense strand
aaagagagugagacaauua

SEQ ID NO: 718532 - RNA, 19 nt, Homo sapiens
  misc_RNA (1)...(19): siRNA sense strand
cgaaugacagggccuauaa

SEQ ID NO: 718533 - RNA, 19 nt, Homo sapiens
  misc_RNA (1)...(19): siRNA sense strand
cuagaagcuuuacaacuuu

SEQ ID NO: 718534 - RNA, 19 nt, Homo sapiens
  misc_RNA (1)...(19): siRNA sense strand
cggagaagcuuuacagagu

SEQ ID NO: 718535 - RNA, 19 nt, Homo sapiens
  misc_RNA (1)...(19): siRNA sense strand
ucaccgaucuugaugacaa

SEQ ID NO: 718536 - RNA, 19 nt, Homo sapiens
  misc_RNA (1)...(19): siRNA sense strand
ccuugcagcuccucauaua

SEQ ID NO: 718537 - RNA, 19 nt, Homo sapiens
  misc_RNA (1)...(19): siRNA sense strand
acaaagaauucucaguuca

SEQ ID NO: 718538 - RNA, 19 nt, Homo sapiens
  misc_RNA (1)...(19): siRNA sense strand
ggagggaggcauucaucua

SEQ ID NO: 718539 - RNA, 19 nt, Homo sapiens
  misc_RNA (1)...(19): siRNA sense strand
gcccuuaucccaagucauu

SEQ ID NO: 718540 - RNA, 19 nt, Homo sapiens
  misc_RNA (1)...(19): siRNA sense strand
agacaaagaauucucaguu

SEQ ID NO: 718541 - RNA, 19 nt, Homo sapiens
  misc_RNA (1)...(19): siRNA sense strand
gacagggccuauaaacuca

SEQ ID NO: 718542 - RNA, 19 nt, Homo sapiens
  misc_RNA (1)...(19): siRNA sense strand
caagaggucacugggaaua

SEQ ID NO: 718543 - RNA, 19 nt, Homo sapiens
  misc_RNA (1)...(19): siRNA sense strand
gacccaaccugcugcacaa

SEQ ID NO: 718544 - RNA, 19 nt, Homo sapiens
  misc_RNA (1)...(19): siRNA sense strand
aaacuggauucacuaggaa

SEQ ID NO: 718545 - RNA, 19 nt, Homo sapiens
  misc_RNA (1)...(19): siRNA sense strand
ggaauuugaccgugggauu

SEQ ID NO: 718546 - RNA, 19 nt, Homo sapiens
  misc_RNA (1)...(19): siRNA sense strand
gaucaccauucccaaagau

SEQ ID NO: 718547 - RNA, 19 nt, Homo sapiens
  misc_RNA (1)...(19): siRNA sense strand
gcagagggacgagcagaaa

SEQ ID NO: 718548 - RNA, 19 nt, Homo sapiens
  misc_RNA (1)...(19): siRNA sense strand
ggaauaaaaugacaucucu

SEQ ID NO: 718549 - RNA, 19 nt, Homo sapiens
  misc_RNA (1)...(19): siRNA sense strand
uaagaaagaaacuggauuc

SEQ ID NO: 718550 - RNA, 19 nt, Homo sapiens
  misc_RNA (1)...(19): siRNA sense strand
gaauuugaccgugggauug

SEQ ID NO: 718551 - RNA, 19 nt, Homo sapiens
  misc_RNA (1)...(19): siRNA sense strand
aaagaauucucaguucaga

SEQ ID NO: 718552 - RNA, 19 nt, Homo sapiens
  misc_RNA (1)...(19): siRNA sense strand
aagcagaagucaucagaca

SEQ ID NO: 718553 - RNA, 19 nt, Homo sapiens
  misc_RNA (1)...(19): siRNA sense strand
cagcaaagaugggcaagag

SEQ ID NO: 718554 - RNA, 19 nt, Homo sapiens
  misc_RNA (1)...(19): siRNA sense strand
ugacagggccuauaaacuc

SEQ ID NO: 718555 - RNA, 19 nt, Homo sapiens
  misc_RNA (1)...(19): siRNA sense strand
gaaaggcuucccaaucauc

SEQ ID NO: 718556 - RNA, 19 nt, Homo sapiens
  misc_RNA (1)...(19): siRNA sense strand
ccaugucaguggauucuau

SEQ ID NO: 718557 - RNA, 19 nt, Homo sapiens
  misc_RNA (1)...(19): siRNA sense strand
gaaugacagggccuauaaa

SEQ ID NO: 718558 - RNA, 19 nt, Homo sapiens
  misc_RNA (1)...(19): siRNA sense strand
ggagcacaguguucaugau

SEQ ID NO: 718559 - RNA, 19 nt, Homo sapiens
  misc_RNA (1)...(19): siRNA sense strand
gagcacaguguucaugaug

SEQ ID NO: 718560 - RNA, 19 nt, Homo sapiens
  misc_RNA (1)...(19): siRNA sense strand
ccucagaaacaccgaauga

SEQ ID NO: 718561 - RNA, 19 nt, Homo sapiens
  misc_RNA (1)...(19): siRNA sense strand
agaggucacugggaauaaa

SEQ ID NO: 718562 - RNA, 19 nt, Homo sapiens
  misc_RNA (1)...(19): siRNA sense strand
ugaauccuauuuacagaca

SEQ ID NO: 718563 - RNA, 19 nt, Homo sapiens
  misc_RNA (1)...(19): siRNA sense strand
caaagucaagggaaaguuc

SEQ ID NO: 718564 - RNA, 19 nt, Homo sapiens
  misc_RNA (1)...(19): siRNA sense strand
gaggagagcacggccauca

SEQ ID NO: 718565 - RNA, 19 nt, Homo sapiens
  misc_RNA (1)...(19): siRNA sense strand
ggagagcacggccaucauc

SEQ ID NO: 718566 - RNA, 19 nt, Homo sapiens
  misc_RNA (1)...(19): siRNA sense strand
caaagacaaagaauucauc

SEQ ID NO: 718567 - RNA, 19 nt, Homo sapiens
  misc_RNA (1)...(19): siRNA sense strand
agcaguaacucaucucuca

SEQ ID NO: 718568 - RNA, 19 nt, Homo sapiens
  misc_RNA (1)...(19): siRNA sense strand
aaagaaacuggauucacua

SEQ ID NO: 718569 - RNA, 19 nt, Homo sapiens
  misc_RNA (1)...(19): siRNA sense strand
gcgaaugacagggccuaua

SEQ ID NO: 718570 - RNA, 19 nt, Homo sapiens
  misc_RNA (1)...(19): siRNA sense strand
cugaugucguggacuauuu

SEQ ID NO: 718571 - RNA, 19 nt, Homo sapiens
  misc_RNA (1)...(19): siRNA sense strand
uggcuucccuccucccauu

SEQ ID NO: 718572 - RNA, 19 nt, Homo sapiens
  misc_RNA (1)...(19): siRNA sense strand
ggacaaaagagaaagaaau

SEQ ID NO: 718573 - RNA, 19 nt, Homo sapiens
  misc_RNA (1)...(19): siRNA sense strand
gagauaagaaacucagucu

SEQ ID NO: 718574 - RNA, 19 nt, Homo sapiens
  misc_RNA (1)...(19): siRNA sense strand
cagcucaaccucagaaaca

SEQ ID NO: 718575 - RNA, 19 nt, Homo sapiens
  misc_RNA (1)...(19): siRNA sense strand
ucagaucaccauucccaaa

SEQ ID NO: 718576 - RNA, 19 nt, Homo sapiens
  misc_RNA (1)...(19): siRNA sense strand
cguggacuauuuacucaga

SEQ ID NO: 718577 - RNA, 19 nt, Homo sapiens
  misc_RNA (1)...(19): siRNA sense strand
ucagaaacaccgaaugagu

SEQ ID NO: 718578 - RNA, 19 nt, Homo sapiens
  misc_RNA (1)...(19): siRNA sense strand
ugaugucguggacuauuua

SEQ ID NO: 718579 - RNA, 19 nt, Homo sapiens
  misc_RNA (1)...(19): siRNA sense strand
ggaggaggagcacaguguu

SEQ ID NO: 718580 - RNA, 19 nt, Homo sapiens
  misc_RNA (1)...(19): siRNA sense strand
gagggaggcauucaucuac

SEQ ID NO: 718581 - RNA, 19 nt, Homo sapiens
  misc_RNA (1)...(19): siRNA sense strand
gaggaggggugccauguca

SEQ ID NO: 718582 - RNA, 19 nt, Homo sapiens
  misc_RNA (1)...(19): siRNA sense strand
uaaacuuagccaccauauu

SEQ ID NO: 718583 - RNA, 19 nt, Homo sapiens
  misc_RNA (1)...(19): siRNA sense strand
uagaagcuuuacaacuuuc

SEQ ID NO: 718584 - RNA, 19 nt, Homo sapiens
  misc_RNA (1)...(19): siRNA sense strand
gcaagaggucacugggaau

SEQ ID NO: 718585 - RNA, 19 nt, Homo sapiens
  misc_RNA (1)...(19): siRNA sense strand
ggacuauuuacucagaaga

SEQ ID NO: 718586 - RNA, 19 nt, Homo sapiens
  misc_RNA (1)...(19): siRNA sense strand
cugaucagccuguuagaga

SEQ ID NO: 718587 - RNA, 19 nt, Homo sapiens
  misc_RNA (1)...(19): siRNA sense strand
gagacaauuacgugaggaa

SEQ ID NO: 718588 - RNA, 19 nt, Homo sapiens
  misc_RNA (1)...(19): siRNA sense strand
caaagaauucucaguucag

SEQ ID NO: 718589 - RNA, 19 nt, Homo sapiens
  misc_RNA (1)...(19): siRNA sense strand
acaagcagaagucaucaga

SEQ ID NO: 718590 - RNA, 19 nt, Homo sapiens
  misc_RNA (1)...(19): siRNA sense strand
agaaacaccgaaugaguca

SEQ ID NO: 718591 - RNA, 19 nt, Homo sapiens
  misc_RNA (1)...(19): siRNA sense strand
agaaaggcuucccaaucau

SEQ ID NO: 718592 - RNA, 19 nt, Homo sapiens
  misc_RNA (1)...(19): siRNA sense strand
gucguggacuauuuacuca

SEQ ID NO: 718593 - RNA, 19 nt, Homo sapiens
  misc_RNA (1)...(19): siRNA sense strand
gcacaagcagaagucauca

SEQ ID NO: 718594 - RNA, 19 nt, Homo sapiens
  misc_RNA (1)...(19): siRNA sense strand
gaggagcacaguguucaug

SEQ ID NO: 718595 - RNA, 19 nt, Homo sapiens
  misc_RNA (1)...(19): siRNA sense strand
gaggaggagcacaguguuc

SEQ ID NO: 718596 - RNA, 19 nt, Homo sapiens
  misc_RNA (1)...(19): siRNA sense strand
ggaggcauucaucuacaga

SEQ ID NO: 718597 - RNA, 19 nt, Homo sapiens
  misc_RNA (1)...(19): siRNA sense strand
gacuauuuacucagaagaa

SEQ ID NO: 718598 - RNA, 19 nt, Homo sapiens
  misc_RNA (1)...(19): siRNA sense strand
aggaacagcugggcaccuu

SEQ ID NO: 718599 - RNA, 19 nt, Homo sapiens
  misc_RNA (1)...(19): siRNA sense strand
gcugucagaucaccauucc

SEQ ID NO: 718600 - RNA, 19 nt, Homo sapiens
  misc_RNA (1)...(19): siRNA sense strand
agagaccgauccugauguc

SEQ ID NO: 718601 - RNA, 19 nt, Homo sapiens
  misc_RNA (1)...(19): siRNA sense strand
cagcuuucaucaacacucu

SEQ ID NO: 718602 - RNA, 19 nt, Homo sapiens
  misc_RNA (1)...(19): siRNA sense strand
agaucaccauucccaaaga

SEQ ID NO: 718603 - RNA, 19 nt, Homo sapiens
  misc_RNA (1)...(19): siRNA sense strand
gucaucagacaaagaauuc

SEQ ID NO: 718604 - RNA, 19 nt, Homo sapiens
  misc_RNA (1)...(19): siRNA sense strand
gcucggagaagcuuuacag

SEQ ID NO: 718605 - RNA, 19 nt, Homo sapiens
  misc_RNA (1)...(19): siRNA sense strand
gggaggcauucaucuacag

SEQ ID NO: 718606 - RNA, 19 nt, Homo sapiens
  misc_RNA (1)...(19): siRNA sense strand
caccuugcagcuccucaua

SEQ ID NO: 718607 - RNA, 19 nt, Homo sapiens
  misc_RNA (1)...(19): siRNA sense strand
uggauucuaucaccgaucu

SEQ ID NO: 718608 - RNA, 19 nt, Homo sapiens
  misc_RNA (1)...(19): siRNA sense strand
gaaugcccuuaucccaagu

SEQ ID NO: 718609 - RNA, 19 nt, Homo sapiens
  misc_RNA (1)...(19): siRNA sense strand
uuagagaccgauccugaug

SEQ ID NO: 718610 - RNA, 19 nt, Homo sapiens
  misc_RNA (1)...(19): siRNA sense strand
agaauucucaguucagagu

SEQ ID NO: 718611 - RNA, 19 nt, Homo sapiens
  misc_RNA (1)...(19): siRNA sense strand
aaaagagagugagacaauu

SEQ ID NO: 718612 - RNA, 19 nt, Homo sapiens
  misc_RNA (1)...(19): siRNA sense strand
uggauucacuaggaaagga

SEQ ID NO: 718613 - RNA, 19 nt, Homo sapiens
  misc_RNA (1)...(19): siRNA sense strand
gauucuaucaccgaucuug

SEQ ID NO: 718614 - RNA, 19 nt, Homo sapiens
  misc_RNA (1)...(19): siRNA sense strand
aacauggccuccagacagu

SEQ ID NO: 718615 - RNA, 19 nt, Homo sapiens
  misc_RNA (1)...(19): siRNA sense strand
caucuacagacuccaacaa

SEQ ID NO: 718616 - RNA, 19 nt, Homo sapiens
  misc_RNA (1)...(19): siRNA sense strand
agagggacgagcagaaaga

SEQ ID NO: 718617 - RNA, 19 nt, Homo sapiens
  misc_RNA (1)...(19): siRNA sense strand
cagaagucaucagacaaag

SEQ ID NO: 718618 - RNA, 19 nt, Homo sapiens
  misc_RNA (1)...(19): siRNA sense strand
ugacaacaucagcaaagau

SEQ ID NO: 718619 - RNA, 19 nt, Homo sapiens
  misc_RNA (1)...(19): siRNA sense strand
acacagcuuucaucaacac

SEQ ID NO: 718620 - RNA, 19 nt, Homo sapiens
  misc_RNA (1)...(19): siRNA sense strand
gcgagaagaucaccauuaa

SEQ ID NO: 718621 - RNA, 19 nt, Homo sapiens
  misc_RNA (1)...(19): siRNA sense strand
gagaagaucaccauuaaca

SEQ ID NO: 718622 - RNA, 19 nt, Homo sapiens
  misc_RNA (1)...(19): siRNA sense strand
uaacaaggacaccaaggua

SEQ ID NO: 718623 - RNA, 19 nt, Homo sapiens
  misc_RNA (1)...(19): siRNA sense strand
caacaaagaagaccacaca

SEQ ID NO: 718624 - RNA, 19 nt, Homo sapiens
  misc_RNA (1)...(19): siRNA sense strand
gaagaucaccauuaacaag

SEQ ID NO: 718625 - RNA, 19 nt, Homo sapiens
  misc_RNA (1)...(19): siRNA sense strand
gguacccaaugccuguuua

SEQ ID NO: 718626 - RNA, 19 nt, Homo sapiens
  misc_RNA (1)...(19): siRNA sense strand
ggcgagaagaucaccauua

SEQ ID NO: 718627 - RNA, 19 nt, Homo sapiens
  misc_RNA (1)...(19): siRNA sense strand
ugggaaacaucauuaaauc

SEQ ID NO: 718628 - RNA, 19 nt, Homo sapiens
  misc_RNA (1)...(19): siRNA sense strand
cccaaugccuguuuauuca

SEQ ID NO: 718629 - RNA, 19 nt, Homo sapiens
  misc_RNA (1)...(19): siRNA sense strand
acacugggaaacaucauua

SEQ ID NO: 718630 - RNA, 19 nt, Homo sapiens
  misc_RNA (1)...(19): siRNA sense strand
ggaaacaucauuaaaucac

SEQ ID NO: 718631 - RNA, 19 nt, Homo sapiens
  misc_RNA (1)...(19): siRNA sense strand
gggaaacaucauuaaauca

SEQ ID NO: 718632 - RNA, 19 nt, Homo sapiens
  misc_RNA (1)...(19): siRNA sense strand
ggacaccaagguacccaau

SEQ ID NO: 718633 - RNA, 19 nt, Homo sapiens
  misc_RNA (1)...(19): siRNA sense strand
acaccaagguacccaaugc

SEQ ID NO: 718634 - RNA, 19 nt, Homo sapiens
  misc_RNA (1)...(19): siRNA sense strand
uauucaccaucaacaaaga

SEQ ID NO: 718635 - RNA, 19 nt, Homo sapiens
  misc_RNA (1)...(19): siRNA sense strand
cugggaaacaucauuaaau

SEQ ID NO: 718636 - RNA, 19 nt, Homo sapiens
  misc_RNA (1)...(19): siRNA sense strand
agaucaccauuaacaagga

SEQ ID NO: 718637 - RNA, 19 nt, Homo sapiens
  misc_RNA (1)...(19): siRNA sense strand
acccaaugccuguuuauuc

SEQ ID NO: 718638 - RNA, 19 nt, Homo sapiens
  misc_RNA (1)...(19): siRNA sense strand
gaccacacacugggaaaca

SEQ ID NO: 718639 - RNA, 19 nt, Homo sapiens
  misc_RNA (1)...(19): siRNA sense strand
agaagaucaccauuaacaa

SEQ ID NO: 718640 - RNA, 19 nt, Homo sapiens
  misc_RNA (1)...(19): siRNA sense strand
gcgagaagaucaccauuaa

SEQ ID NO: 718641 - RNA, 19 nt, Homo sapiens
  misc_RNA (1)...(19): siRNA sense strand
gagaagaucaccauuaaca

SEQ ID NO: 718642 - RNA, 19 nt, Homo sapiens
  misc_RNA (1)...(19): siRNA sense strand
uaacaaggacaccaaggua

SEQ ID NO: 718643 - RNA, 19 nt, Homo sapiens
  misc_RNA (1)...(19): siRNA sense strand
caacaaagaagaccacaca

SEQ ID NO: 718644 - RNA, 19 nt, Homo sapiens
  misc_RNA (1)...(19): siRNA sense strand
gaagaucaccauuaacaag

SEQ ID NO: 718645 - RNA, 19 nt, Homo sapiens
  misc_RNA (1)...(19): siRNA sense strand
gguacccaaugccuguuua

SEQ ID NO: 718646 - RNA, 19 nt, Homo sapiens
  misc_RNA (1)...(19): siRNA sense strand
ggcgagaagaucaccauua

SEQ ID NO: 718647 - RNA, 19 nt, Homo sapiens
  misc_RNA (1)...(19): siRNA sense strand
ugggaaacaucauuaaauc

SEQ ID NO: 718648 - RNA, 19 nt, Homo sapiens
  misc_RNA (1)...(19): siRNA sense strand
cccaaugccuguuuauuca

SEQ ID NO: 718649 - RNA, 19 nt, Homo sapiens
  misc_RNA (1)...(19): siRNA sense strand
acacugggaaacaucauua

SEQ ID NO: 718650 - RNA, 19 nt, Homo sapiens
  misc_RNA (1)...(19): siRNA sense strand
ggaaacaucauuaaaucac

SEQ ID NO: 718651 - RNA, 19 nt, Homo sapiens
  misc_RNA (1)...(19): siRNA sense strand
gggaaacaucauuaaauca

SEQ ID NO: 718652 - RNA, 19 nt, Homo sapiens
  misc_RNA (1)...(19): siRNA sense strand
ggacaccaagguacccaau

SEQ ID NO: 718653 - RNA, 19 nt, Homo sapiens
  misc_RNA (1)...(19): siRNA sense strand
acaccaagguacccaaugc

SEQ ID NO: 718654 - RNA, 19 nt, Homo sapiens
  misc_RNA (1)...(19): siRNA sense strand
uauucaccaucaacaaaga

SEQ ID NO: 718655 - RNA, 19 nt, Homo sapiens
  misc_RNA (1)...(19): siRNA sense strand
cugggaaacaucauuaaau

SEQ ID NO: 718656 - RNA, 19 nt, Homo sapiens
  misc_RNA (1)...(19): siRNA sense strand
agaucaccauuaacaagga

SEQ ID NO: 718657 - RNA, 19 nt, Homo sapiens
  misc_RNA (1)...(19): siRNA sense strand
acccaaugccuguuuauuc

SEQ ID NO: 718658 - RNA, 19 nt, Homo sapiens
  misc_RNA (1)...(19): siRNA sense strand
gaccacacacugggaaaca

SEQ ID NO: 718659 - RNA, 19 nt, Homo sapiens
  misc_RNA (1)...(19): siRNA sense strand
agaagaucaccauuaacaa

SEQ ID NO: 718660 - RNA, 19 nt, Homo sapiens
  misc_RNA (1)...(19): siRNA sense strand
gcgagaagaucaccauuaa

SEQ ID NO: 718661 - RNA, 19 nt, Homo sapiens
  misc_RNA (1)...(19): siRNA sense strand
gagaagaucaccauuaaca

SEQ ID NO: 718662 - RNA, 19 nt, Homo sapiens
  misc_RNA (1)...(19): siRNA sense strand
uaacaaggacaccaaggua

SEQ ID NO: 718663 - RNA, 19 nt, Homo sapiens
  misc_RNA (1)...(19): siRNA sense strand
caacaaagaagaccacaca

SEQ ID NO: 718664 - RNA, 19 nt, Homo sapiens
  misc_RNA (1)...(19): siRNA sense strand
gaagaucaccauuaacaag

SEQ ID NO: 718665 - RNA, 19 nt, Homo sapiens
  misc_RNA (1)...(19): siRNA sense strand
gguacccaaugccuguuua

SEQ ID NO: 718666 - RNA, 19 nt, Homo sapiens
  misc_RNA (1)...(19): siRNA sense strand
ggcgagaagaucaccauua

SEQ ID NO: 718667 - RNA, 19 nt, Homo sapiens
  misc_RNA (1)...(19): siRNA sense strand
ugggaaacaucauuaaauc

SEQ ID NO: 718668 - RNA, 19 nt, Homo sapiens
  misc_RNA (1)...(19): siRNA sense strand
cccaaugccuguuuauuca

SEQ ID NO: 718669 - RNA, 19 nt, Homo sapiens
  misc_RNA (1)...(19): siRNA sense strand
acacugggaaacaucauua

SEQ ID NO: 718670 - RNA, 19 nt, Homo sapiens
  misc_RNA (1)...(19): siRNA sense strand
ggaaacaucauuaaaucac

SEQ ID NO: 718671 - RNA, 19 nt, Homo sapiens
  misc_RNA (1)...(19): siRNA sense strand
gggaaacaucauuaaauca

SEQ ID NO: 718672 - RNA, 19 nt, Homo sapiens
  misc_RNA (1)...(19): siRNA sense strand
ggacaccaagguacccaau

SEQ ID NO: 718673 - RNA, 19 nt, Homo sapiens
  misc_RNA (1)...(19): siRNA sense strand
acaccaagguacccaaugc

SEQ ID NO: 718674 - RNA, 19 nt, Homo sapiens
  misc_RNA (1)...(19): siRNA sense strand
uauucaccaucaacaaaga

SEQ ID NO: 718675 - RNA, 19 nt, Homo sapiens
  misc_RNA (1)...(19): siRNA sense strand
cugggaaacaucauuaaau

SEQ ID NO: 718676 - RNA, 19 nt, Homo sapiens
  misc_RNA (1)...(19): siRNA sense strand
agaucaccauuaacaagga

SEQ ID NO: 718677 - RNA, 19 nt, Homo sapiens
  misc_RNA (1)...(19): siRNA sense strand
acccaaugccuguuuauuc

SEQ ID NO: 718678 - RNA, 19 nt, Homo sapiens
  misc_RNA (1)...(19): siRNA sense strand
gaccacacacugggaaaca

SEQ ID NO: 718679 - RNA, 19 nt, Homo sapiens
  misc_RNA (1)...(19): siRNA sense strand
agaagaucaccauuaacaa

SEQ ID NO: 718680 - RNA, 19 nt, Homo sapiens
  misc_RNA (1)...(19): siRNA sense strand
caagagaucugccauccua

SEQ ID NO: 718681 - RNA, 19 nt, Homo sapiens
  misc_RNA (1)...(19): siRNA sense strand
agaaauacauggaguuuga

SEQ ID NO: 718682 - RNA, 19 nt, Homo sapiens
  misc_RNA (1)...(19): siRNA sense strand
uaauggaaauggcgauauu

SEQ ID NO: 718683 - RNA, 19 nt, Homo sapiens
  misc_RNA (1)...(19): siRNA sense strand
ccaagaaagcuaucucuga

SEQ ID NO: 718684 - RNA, 19 nt, Homo sapiens
  misc_RNA (1)...(19): siRNA sense strand
agaaagcuaucucugaguu

SEQ ID NO: 718685 - RNA, 19 nt, Homo sapiens
  misc_RNA (1)...(19): siRNA sense strand
ugaaacgaaugcuggagaa

SEQ ID NO: 718686 - RNA, 19 nt, Homo sapiens
  misc_RNA (1)...(19): siRNA sense strand
acauggaguuugaccuuaa

SEQ ID NO: 718687 - RNA, 19 nt, Homo sapiens
  misc_RNA (1)...(19): siRNA sense strand
gauaucaugucccugaaac

SEQ ID NO: 718688 - RNA, 19 nt, Homo sapiens
  misc_RNA (1)...(19): siRNA sense strand
agacucaccuagagcuaaa

SEQ ID NO: 718689 - RNA, 19 nt, Homo sapiens
  misc_RNA (1)...(19): siRNA sense strand
accuagagcuaaagaaauu

SEQ ID NO: 718690 - RNA, 19 nt, Homo sapiens
  misc_RNA (1)...(19): siRNA sense strand
ucaccuagagcuaaagaaa

SEQ ID NO: 718691 - RNA, 19 nt, Homo sapiens
  misc_RNA (1)...(19): siRNA sense strand
gaguuugaccuuaauggaa

SEQ ID NO: 718692 - RNA, 19 nt, Homo sapiens
  misc_RNA (1)...(19): siRNA sense strand
uacauggaguuugaccuua

SEQ ID NO: 718693 - RNA, 19 nt, Homo sapiens
  misc_RNA (1)...(19): siRNA sense strand
gaaagcuaucucugaguug

SEQ ID NO: 718694 - RNA, 19 nt, Homo sapiens
  misc_RNA (1)...(19): siRNA sense strand
gaaacgaaugcuggagaaa

SEQ ID NO: 718695 - RNA, 19 nt, Homo sapiens
  misc_RNA (1)...(19): siRNA sense strand
ggaguuugaccuuaaugga

SEQ ID NO: 718696 - RNA, 19 nt, Homo sapiens
  misc_RNA (1)...(19): siRNA sense strand
aguuugaccuuaauggaaa

SEQ ID NO: 718697 - RNA, 19 nt, Homo sapiens
  misc_RNA (1)...(19): siRNA sense strand
ucaugucccugaaacgaau

SEQ ID NO: 718698 - RNA, 19 nt, Homo sapiens
  misc_RNA (1)...(19): siRNA sense strand
cagcuacccugacuuucuc

SEQ ID NO: 718699 - RNA, 19 nt, Homo sapiens
  misc_RNA (1)...(19): siRNA sense strand
gagaaauacauggaguuug

SEQ ID NO: 718700 - RNA, 19 nt, Homo sapiens
  misc_RNA (1)...(19): siRNA sense strand
agagaaauacauggaguuu

SEQ ID NO: 718701 - RNA, 19 nt, Homo sapiens
  misc_RNA (1)...(19): siRNA sense strand
ggaugaugcugggcaagag

SEQ ID NO: 718702 - RNA, 19 nt, Homo sapiens
  misc_RNA (1)...(19): siRNA sense strand
cauggaguuugaccuuaau

SEQ ID NO: 718703 - RNA, 19 nt, Homo sapiens
  misc_RNA (1)...(19): siRNA sense strand
caagacucaccuagagcua

SEQ ID NO: 718704 - RNA, 19 nt, Homo sapiens
  misc_RNA (1)...(19): siRNA sense strand
agagaucugccauccuaaa

SEQ ID NO: 718705 - RNA, 19 nt, Homo sapiens
  misc_RNA (1)...(19): siRNA sense strand
cgaaugcuggagaaacuug

SEQ ID NO: 718706 - RNA, 19 nt, Homo sapiens
  misc_RNA (1)...(19): siRNA sense strand
gaugaugcugggcaagaga

SEQ ID NO: 718707 - RNA, 19 nt, Homo sapiens
  misc_RNA (1)...(19): siRNA sense strand
uaucaugucccugaaacga

SEQ ID NO: 718708 - RNA, 19 nt, Homo sapiens
  misc_RNA (1)...(19): siRNA sense strand
aacgaaugcuggagaaacu

SEQ ID NO: 718709 - RNA, 19 nt, Homo sapiens
  misc_RNA (1)...(19): siRNA sense strand
auacauggaguuugaccuu

SEQ ID NO: 718710 - RNA, 19 nt, Homo sapiens
  misc_RNA (1)...(19): siRNA sense strand
caagagaucugccauccua

SEQ ID NO: 718711 - RNA, 19 nt, Homo sapiens
  misc_RNA (1)...(19): siRNA sense strand
uaauggaaauggcgauauu

SEQ ID NO: 718712 - RNA, 19 nt, Homo sapiens
  misc_RNA (1)...(19): siRNA sense strand
ugaaacgaaugcuggagaa

SEQ ID NO: 718713 - RNA, 19 nt, Homo sapiens
  misc_RNA (1)...(19): siRNA sense strand
gauaucaugucccugaaac

SEQ ID NO: 718714 - RNA, 19 nt, Homo sapiens
  misc_RNA (1)...(19): siRNA sense strand
agacucaccuagagcuaaa

SEQ ID NO: 718715 - RNA, 19 nt, Homo sapiens
  misc_RNA (1)...(19): siRNA sense strand
accuagagcuaaagaaauu

SEQ ID NO: 718716 - RNA, 19 nt, Homo sapiens
  misc_RNA (1)...(19): siRNA sense strand
ucaccuagagcuaaagaaa

SEQ ID NO: 718717 - RNA, 19 nt, Homo sapiens
  misc_RNA (1)...(19): siRNA sense strand
gaguuugaccuuaauggaa

SEQ ID NO: 718718 - RNA, 19 nt, Homo sapiens
  misc_RNA (1)...(19): siRNA sense strand
gaaacgaaugcuggagaaa

SEQ ID NO: 718719 - RNA, 19 nt, Homo sapiens
  misc_RNA (1)...(19): siRNA sense strand
aguuugaccuuaauggaaa

SEQ ID NO: 718720 - RNA, 19 nt, Homo sapiens
  misc_RNA (1)...(19): siRNA sense strand
ggaguuugaccuuaaugga

SEQ ID NO: 718721 - RNA, 19 nt, Homo sapiens
  misc_RNA (1)...(19): siRNA sense strand
ucaugucccugaaacgaau

SEQ ID NO: 718722 - RNA, 19 nt, Homo sapiens
  misc_RNA (1)...(19): siRNA sense strand
cagcuacccugacuuucuc

SEQ ID NO: 718723 - RNA, 19 nt, Homo sapiens
  misc_RNA (1)...(19): siRNA sense strand
ggaugaugcugggcaagag

SEQ ID NO: 718724 - RNA, 19 nt, Homo sapiens
  misc_RNA (1)...(19): siRNA sense strand
caagacucaccuagagcua

SEQ ID NO: 718725 - RNA, 19 nt, Homo sapiens
  misc_RNA (1)...(19): siRNA sense strand
agagaucugccauccuaaa

SEQ ID NO: 718726 - RNA, 19 nt, Homo sapiens
  misc_RNA (1)...(19): siRNA sense strand
cgaaugcuggagaaacuug

SEQ ID NO: 718727 - RNA, 19 nt, Homo sapiens
  misc_RNA (1)...(19): siRNA sense strand
gaugaugcugggcaagaga

SEQ ID NO: 718728 - RNA, 19 nt, Homo sapiens
  misc_RNA (1)...(19): siRNA sense strand
uaucaugucccugaaacga

SEQ ID NO: 718729 - RNA, 19 nt, Homo sapiens
  misc_RNA (1)...(19): siRNA sense strand
aacgaaugcuggagaaacu

SEQ ID NO: 718730 - RNA, 19 nt, Homo sapiens
  misc_RNA (1)...(19): siRNA sense strand
caagagaucugccauccua

SEQ ID NO: 718731 - RNA, 19 nt, Homo sapiens
  misc_RNA (1)...(19): siRNA sense strand
uaauggaaauggcgauauu

SEQ ID NO: 718732 - RNA, 19 nt, Homo sapiens
  misc_RNA (1)...(19): siRNA sense strand
ccaagaaagcuaucucuga

SEQ ID NO: 718733 - RNA, 19 nt, Homo sapiens
  misc_RNA (1)...(19): siRNA sense strand
agaaagcuaucucugaguu

SEQ ID NO: 718734 - RNA, 19 nt, Homo sapiens
  misc_RNA (1)...(19): siRNA sense strand
ugaaacgaaugcuggagaa

SEQ ID NO: 718735 - RNA, 19 nt, Homo sapiens
  misc_RNA (1)...(19): siRNA sense strand
gauaucaugucccugaaac

SEQ ID NO: 718736 - RNA, 19 nt, Homo sapiens
  misc_RNA (1)...(19): siRNA sense strand
agacucaccuagagcuaaa

SEQ ID NO: 718737 - RNA, 19 nt, Homo sapiens
  misc_RNA (1)...(19): siRNA sense strand
accuagagcuaaagaaauu

SEQ ID NO: 718738 - RNA, 19 nt, Homo sapiens
  misc_RNA (1)...(19): siRNA sense strand
ucaccuagagcuaaagaaa

SEQ ID NO: 718739 - RNA, 19 nt, Homo sapiens
  misc_RNA (1)...(19): siRNA sense strand
gaguuugaccuuaauggaa

SEQ ID NO: 718740 - RNA, 19 nt, Homo sapiens
  misc_RNA (1)...(19): siRNA sense strand
gaaacgaaugcuggagaaa

SEQ ID NO: 718741 - RNA, 19 nt, Homo sapiens
  misc_RNA (1)...(19): siRNA sense strand
gaaagcuaucucugaguug

SEQ ID NO: 718742 - RNA, 19 nt, Homo sapiens
  misc_RNA (1)...(19): siRNA sense strand
ggaguuugaccuuaaugga

SEQ ID NO: 718743 - RNA, 19 nt, Homo sapiens
  misc_RNA (1)...(19): siRNA sense strand
aguuugaccuuaauggaaa

SEQ ID NO: 718744 - RNA, 19 nt, Homo sapiens
  misc_RNA (1)...(19): siRNA sense strand
ucaugucccugaaacgaau

SEQ ID NO: 718745 - RNA, 19 nt, Homo sapiens
  misc_RNA (1)...(19): siRNA sense strand
cagcuacccugacuuucuc

SEQ ID NO: 718746 - RNA, 19 nt, Homo sapiens
  misc_RNA (1)...(19): siRNA sense strand
ggaugaugcugggcaagag

SEQ ID NO: 718747 - RNA, 19 nt, Homo sapiens
  misc_RNA (1)...(19): siRNA sense strand
caagacucaccuagagcua

SEQ ID NO: 718748 - RNA, 19 nt, Homo sapiens
  misc_RNA (1)...(19): siRNA sense strand
agagaucugccauccuaaa

SEQ ID NO: 718749 - RNA, 19 nt, Homo sapiens
  misc_RNA (1)...(19): siRNA sense strand
cgaaugcuggagaaacuug

SEQ ID NO: 718750 - RNA, 19 nt, Homo sapiens
  misc_RNA (1)...(19): siRNA sense strand
gaugaugcugggcaagaga

SEQ ID NO: 718751 - RNA, 19 nt, Homo sapiens
  misc_RNA (1)...(19): siRNA sense strand
uaucaugucccugaaacga

SEQ ID NO: 718752 - RNA, 19 nt, Homo sapiens
  misc_RNA (1)...(19): siRNA sense strand
aacgaaugcuggagaaacu

SEQ ID NO: 718753 - RNA, 19 nt, Homo sapiens
  misc_RNA (1)...(19): siRNA sense strand
aaagauagcuggcuucuaa

SEQ ID NO: 718754 - RNA, 19 nt, Homo sapiens
  misc_RNA (1)...(19): siRNA sense strand
gaaggagccuguucagaua

SEQ ID NO: 718755 - RNA, 19 nt, Homo sapiens
  misc_RNA (1)...(19): siRNA sense strand
gcaguuauguggccucuaa

SEQ ID NO: 718756 - RNA, 19 nt, Homo sapiens
  misc_RNA (1)...(19): siRNA sense strand
caacgaaucuacccauauu

SEQ ID NO: 718757 - RNA, 19 nt, Homo sapiens
  misc_RNA (1)...(19): siRNA sense strand
ggaaauugaugaagaugaa

SEQ ID NO: 718758 - RNA, 19 nt, Homo sapiens
  misc_RNA (1)...(19): siRNA sense strand
ugaagagucugcugauaua

SEQ ID NO: 718759 - RNA, 19 nt, Homo sapiens
  misc_RNA (1)...(19): siRNA sense strand
gaaggaaccuguugagaag

SEQ ID NO: 718760 - RNA, 19 nt, Homo sapiens
  misc_RNA (1)...(19): siRNA sense strand
ggauguggcuggaaagaaa

SEQ ID NO: 718761 - RNA, 19 nt, Homo sapiens
  misc_RNA (1)...(19): siRNA sense strand
caacacaggugaaggaaau

SEQ ID NO: 718762 - RNA, 19 nt, Homo sapiens
  misc_RNA (1)...(19): siRNA sense strand
uaacagaggugaaagagau

SEQ ID NO: 718763 - RNA, 19 nt, Homo sapiens
  misc_RNA (1)...(19): siRNA sense strand
gaaggagccuguucagaug

SEQ ID NO: 718764 - RNA, 19 nt, Homo sapiens
  misc_RNA (1)...(19): siRNA sense strand
gaaggagccuguucagaug

SEQ ID NO: 718765 - RNA, 19 nt, Homo sapiens
  misc_RNA (1)...(19): siRNA sense strand
ggagaacgcccauauaaau

SEQ ID NO: 718766 - RNA, 19 nt, Homo sapiens
  misc_RNA (1)...(19): siRNA sense strand
aaaggaagcuggaaguuga

SEQ ID NO: 718767 - RNA, 19 nt, Homo sapiens
  misc_RNA (1)...(19): siRNA sense strand
ugacuugccugauaauauu

SEQ ID NO: 718768 - RNA, 19 nt, Homo sapiens
  misc_RNA (1)...(19): siRNA sense strand
ggugaaacuuuaaauggua

SEQ ID NO: 718769 - RNA, 19 nt, Homo sapiens
  misc_RNA (1)...(19): siRNA sense strand
gauggagggugcccagaua

SEQ ID NO: 718770 - RNA, 19 nt, Homo sapiens
  misc_RNA (1)...(19): siRNA sense strand
gaaucucacugguauaaau

SEQ ID NO: 718771 - RNA, 19 nt, Homo sapiens
  misc_RNA (1)...(19): siRNA sense strand
ggaggaaacauuuaagaaa

SEQ ID NO: 718772 - RNA, 19 nt, Homo sapiens
  misc_RNA (1)...(19): siRNA sense strand
gcaguaagccuccucagaa

SEQ ID NO: 718773 - RNA, 19 nt, Homo sapiens
  misc_RNA (1)...(19): siRNA sense strand
gcaaaguggaggagaauaa

SEQ ID NO: 718774 - RNA, 19 nt, Homo sapiens
  misc_RNA (1)...(19): siRNA sense strand
caagacagguucacaaugg

SEQ ID NO: 718775 - RNA, 19 nt, Homo sapiens
  misc_RNA (1)...(19): siRNA sense strand
ucacagugcuaagaaauuu

SEQ ID NO: 718776 - RNA, 19 nt, Homo sapiens
  misc_RNA (1)...(19): siRNA sense strand
gccagagggugaaacuuua

SEQ ID NO: 718777 - RNA, 19 nt, Homo sapiens
  misc_RNA (1)...(19): siRNA sense strand
ccacaagaaucuagcagaa

SEQ ID NO: 718778 - RNA, 19 nt, Homo sapiens
  misc_RNA (1)...(19): siRNA sense strand
gcaguucaauugcccugua

SEQ ID NO: 718779 - RNA, 19 nt, Homo sapiens
  misc_RNA (1)...(19): siRNA sense strand
gaugaggaaucuucaacaa

SEQ ID NO: 718780 - RNA, 19 nt, Homo sapiens
  misc_RNA (1)...(19): siRNA sense strand
cauccuacuuguccuaaua

SEQ ID NO: 718781 - RNA, 19 nt, Homo sapiens
  misc_RNA (1)...(19): siRNA sense strand
gaucagaacacaagagaga

SEQ ID NO: 718782 - RNA, 19 nt, Homo sapiens
  misc_RNA (1)...(19): siRNA sense strand
gaagugaccuaagugacaa

SEQ ID NO: 718783 - RNA, 19 nt, Homo sapiens
  misc_RNA (1)...(19): siRNA sense strand
gaaguaacccgccaugcaa

SEQ ID NO: 718784 - RNA, 19 nt, Homo sapiens
  misc_RNA (1)...(19): siRNA sense strand
gcaaguccuuauugaaguu

SEQ ID NO: 718785 - RNA, 19 nt, Homo sapiens
  misc_RNA (1)...(19): siRNA sense strand
gaggaaacauuuaagaaac

SEQ ID NO: 718786 - RNA, 19 nt, Homo sapiens
  misc_RNA (1)...(19): siRNA sense strand
ccauagaggugguccagaa

SEQ ID NO: 718787 - RNA, 19 nt, Homo sapiens
  misc_RNA (1)...(19): siRNA sense strand
caaggaaaguauacacaug

SEQ ID NO: 718788 - RNA, 19 nt, Homo sapiens
  misc_RNA (1)...(19): siRNA sense strand
ggccuaaaccucuuaauug

SEQ ID NO: 718789 - RNA, 19 nt, Homo sapiens
  misc_RNA (1)...(19): siRNA sense strand
caguauaguuugugaaaug

SEQ ID NO: 718790 - RNA, 19 nt, Homo sapiens
  misc_RNA (1)...(19): siRNA sense strand
caggagaacgcccauauaa

SEQ ID NO: 718791 - RNA, 19 nt, Homo sapiens
  misc_RNA (1)...(19): siRNA sense strand
gaauggcccugccuaacga

SEQ ID NO: 718792 - RNA, 19 nt, Homo sapiens
  misc_RNA (1)...(19): siRNA sense strand
gaaaguaggagcagaagag

SEQ ID NO: 718793 - RNA, 19 nt, Homo sapiens
  misc_RNA (1)...(19): siRNA sense strand
acaauuauguucagcaugu

SEQ ID NO: 718794 - RNA, 19 nt, Homo sapiens
  misc_RNA (1)...(19): siRNA sense strand
ccacagaggcgguucagaa

SEQ ID NO: 718795 - RNA, 19 nt, Homo sapiens
  misc_RNA (1)...(19): siRNA sense strand
caguaucacuucaaaucua

SEQ ID NO: 718796 - RNA, 19 nt, Homo sapiens
  misc_RNA (1)...(19): siRNA sense strand
aaugugaacuuuguccuua

SEQ ID NO: 718797 - RNA, 19 nt, Homo sapiens
  misc_RNA (1)...(19): siRNA sense strand
ggaagagagugcagagaag

SEQ ID NO: 718798 - RNA, 19 nt, Homo sapiens
  misc_RNA (1)...(19): siRNA sense strand
ugaaggaagugaccuaagu

SEQ ID NO: 718799 - RNA, 19 nt, Homo sapiens
  misc_RNA (1)...(19): siRNA sense strand
gauggagguugcccaggua

SEQ ID NO: 718800 - RNA, 19 nt, Homo sapiens
  misc_RNA (1)...(19): siRNA sense strand
gauggacccuccucagaug

SEQ ID NO: 718801 - RNA, 19 nt, Homo sapiens
  misc_RNA (1)...(19): siRNA sense strand
gccaaagggugacagcaaa

SEQ ID NO: 718802 - RNA, 19 nt, Homo sapiens
  misc_RNA (1)...(19): siRNA sense strand
ugacgagccuguucagaug

SEQ ID NO: 718803 - RNA, 19 nt, Homo sapiens
  misc_RNA (1)...(19): siRNA sense strand
gggaaaagauuacagcaaa

SEQ ID NO: 718804 - RNA, 19 nt, Homo sapiens
  misc_RNA (1)...(19): siRNA sense strand
cauggaaccugcucagaug

SEQ ID NO: 718805 - RNA, 19 nt, Homo sapiens
  misc_RNA (1)...(19): siRNA sense strand
guuaauguguacuaucuug

SEQ ID NO: 718806 - RNA, 19 nt, Homo sapiens
  misc_RNA (1)...(19): siRNA sense strand
gagcagaagaggcagauga

SEQ ID NO: 718807 - RNA, 19 nt, Homo sapiens
  misc_RNA (1)...(19): siRNA sense strand
ggaggaggagggcuguuua

SEQ ID NO: 718808 - RNA, 19 nt, Homo sapiens
  misc_RNA (1)...(19): siRNA sense strand
gaacgcccauauaaaugug

SEQ ID NO: 718809 - RNA, 19 nt, Homo sapiens
  misc_RNA (1)...(19): siRNA sense strand
ggaagugaccuaagugaca

SEQ ID NO: 718810 - RNA, 19 nt, Homo sapiens
  misc_RNA (1)...(19): siRNA sense strand
agacggagguugcccaaau

SEQ ID NO: 718811 - RNA, 19 nt, Homo sapiens
  misc_RNA (1)...(19): siRNA sense strand
gcuacaauacuaaucgaua

SEQ ID NO: 718812 - RNA, 19 nt, Homo sapiens
  misc_RNA (1)...(19): siRNA sense strand
gagcaaguccuuauugaag

SEQ ID NO: 718813 - RNA, 19 nt, Homo sapiens
  misc_RNA (1)...(19): siRNA sense strand
agacauaugcguacucauu

SEQ ID NO: 718814 - RNA, 19 nt, Homo sapiens
  misc_RNA (1)...(19): siRNA sense strand
ucagaagacucaucuaacu

SEQ ID NO: 718815 - RNA, 19 nt, Homo sapiens
  misc_RNA (1)...(19): siRNA sense strand
ggugagaagccauuuaaau

SEQ ID NO: 718816 - RNA, 19 nt, Homo sapiens
  misc_RNA (1)...(19): siRNA sense strand
ugaccuaagugacaacaug

SEQ ID NO: 718817 - RNA, 19 nt, Homo sapiens
  misc_RNA (1)...(19): siRNA sense strand
gaggaucucucaccaccau

SEQ ID NO: 718818 - RNA, 19 nt, Homo sapiens
  misc_RNA (1)...(19): siRNA sense strand
ugacagccauucuuuacau

SEQ ID NO: 718819 - RNA, 19 nt, Homo sapiens
  misc_RNA (1)...(19): siRNA sense strand
ucaauugcccuguauguga

SEQ ID NO: 718820 - RNA, 19 nt, Homo sapiens
  misc_RNA (1)...(19): siRNA sense strand
ccacagccaugaaggaagu

SEQ ID NO: 718821 - RNA, 19 nt, Homo sapiens
  misc_RNA (1)...(19): siRNA sense strand
gagaacgcccauauaaaug

SEQ ID NO: 718822 - RNA, 19 nt, Homo sapiens
  misc_RNA (1)...(19): siRNA sense strand
gaaccaguuucaccaaugc

SEQ ID NO: 718823 - RNA, 19 nt, Homo sapiens
  misc_RNA (1)...(19): siRNA sense strand
cgacauguaugacuugcau

SEQ ID NO: 718824 - RNA, 19 nt, Homo sapiens
  misc_RNA (1)...(19): siRNA sense strand
gacaguauaguuugugaaa

SEQ ID NO: 718825 - RNA, 19 nt, Homo sapiens
  misc_RNA (1)...(19): siRNA sense strand
ccagauauuuacaguucaa

SEQ ID NO: 718826 - RNA, 19 nt, Homo sapiens
  misc_RNA (1)...(19): siRNA sense strand
gaagaaccaguuucaccaa

SEQ ID NO: 718827 - RNA, 19 nt, Homo sapiens
  misc_RNA (1)...(19): siRNA sense strand
agaaggaaccuguugagaa

SEQ ID NO: 718828 - RNA, 19 nt, Homo sapiens
  misc_RNA (1)...(19): siRNA sense strand
gaaguugacagccauucuu

SEQ ID NO: 718829 - RNA, 19 nt, Homo sapiens
  misc_RNA (1)...(19): siRNA sense strand
gggccuaaaccucuuaauu

SEQ ID NO: 718830 - RNA, 19 nt, Homo sapiens
  misc_RNA (1)...(19): siRNA sense strand
gcuguaagccaugccaaua

SEQ ID NO: 718831 - RNA, 19 nt, Homo sapiens
  misc_RNA (1)...(19): siRNA sense strand
acacaacagugagcgagua

SEQ ID NO: 718832 - RNA, 19 nt, Homo sapiens
  misc_RNA (1)...(19): siRNA sense strand
uaccuggucuugcugcuaa

SEQ ID NO: 718833 - RNA, 19 nt, Homo sapiens
  misc_RNA (1)...(19): siRNA sense strand
ugaggaaucuucaacaaaa

SEQ ID NO: 718834 - RNA, 19 nt, Homo sapiens
  misc_RNA (1)...(19): siRNA sense strand
aaucuaagcauccuacuug

SEQ ID NO: 718835 - RNA, 19 nt, Homo sapiens
  misc_RNA (1)...(19): siRNA sense strand
caacagugagcgaguauca

SEQ ID NO: 718836 - RNA, 19 nt, Homo sapiens
  misc_RNA (1)...(19): siRNA sense strand
ucaggaaauugaugaagau

SEQ ID NO: 718837 - RNA, 19 nt, Homo sapiens
  misc_RNA (1)...(19): siRNA sense strand
ggagcaaguccuuauugaa

SEQ ID NO: 718838 - RNA, 19 nt, Homo sapiens
  misc_RNA (1)...(19): siRNA sense strand
cuaauaaugugucagugau

SEQ ID NO: 718839 - RNA, 19 nt, Homo sapiens
  misc_RNA (1)...(19): siRNA sense strand
ggaacucagcgucguagaa

SEQ ID NO: 718840 - RNA, 19 nt, Homo sapiens
  misc_RNA (1)...(19): siRNA sense strand
agucuaacaugcagaguga

SEQ ID NO: 718841 - RNA, 19 nt, Homo sapiens
  misc_RNA (1)...(19): siRNA sense strand
gcuggcaaauguggccuua

SEQ ID NO: 718842 - RNA, 19 nt, Homo sapiens
  misc_RNA (1)...(19): siRNA sense strand
aagaacaguuugugcauca

SEQ ID NO: 718843 - RNA, 19 nt, Homo sapiens
  misc_RNA (1)...(19): siRNA sense strand
caggugcuccagauauuua

SEQ ID NO: 718844 - RNA, 19 nt, Homo sapiens
  misc_RNA (1)...(19): siRNA sense strand
cguagaaccucagccugua

SEQ ID NO: 718845 - RNA, 19 nt, Homo sapiens
  misc_RNA (1)...(19): siRNA sense strand
ccaaacccuuucgcuguaa

SEQ ID NO: 718846 - RNA, 19 nt, Homo sapiens
  misc_RNA (1)...(19): siRNA sense strand
gggugaaacuuuaaauggu

SEQ ID NO: 718847 - RNA, 19 nt, Homo sapiens
  misc_RNA (1)...(19): siRNA sense strand
caggugagaagccauuuaa

SEQ ID NO: 718848 - RNA, 19 nt, Homo sapiens
  misc_RNA (1)...(19): siRNA sense strand
gcaaauguggccuuaacug

SEQ ID NO: 718849 - RNA, 19 nt, Homo sapiens
  misc_RNA (1)...(19): siRNA sense strand
gaguaucacuggaggaaac

SEQ ID NO: 718850 - RNA, 19 nt, Homo sapiens
  misc_RNA (1)...(19): siRNA sense strand
ggacacugaucagaacaca

SEQ ID NO: 718851 - RNA, 19 nt, Homo sapiens
  misc_RNA (1)...(19): siRNA sense strand
guuuguaucuucugugauc

SEQ ID NO: 718852 - RNA, 19 nt, Homo sapiens
  misc_RNA (1)...(19): siRNA sense strand
gaaggaagugaccuaagug

SEQ ID NO: 718853 - RNA, 19 nt, Homo sapiens
  misc_RNA (1)...(19): siRNA sense strand
gaaagugguugauccauuu

SEQ ID NO: 718854 - RNA, 19 nt, Homo sapiens
  misc_RNA (1)...(19): siRNA sense strand
ugaaagaaguggucaauaa

SEQ ID NO: 718855 - RNA, 19 nt, Homo sapiens
  misc_RNA (1)...(19): siRNA sense strand
gaaagaaguggucaauaaa

SEQ ID NO: 718856 - RNA, 19 nt, Homo sapiens
  misc_RNA (1)...(19): siRNA sense strand
ugaacgagcugauggauau

SEQ ID NO: 718857 - RNA, 19 nt, Homo sapiens
  misc_RNA (1)...(19): siRNA sense strand
cgagacaggugcuaaaguu

SEQ ID NO: 718858 - RNA, 19 nt, Homo sapiens
  misc_RNA (1)...(19): siRNA sense strand
ugaagaagcccaaguuuga

SEQ ID NO: 718859 - RNA, 19 nt, Homo sapiens
  misc_RNA (1)...(19): siRNA sense strand
gaacaagcgccuuacgaaa

SEQ ID NO: 718860 - RNA, 19 nt, Homo sapiens
  misc_RNA (1)...(19): siRNA sense strand
gauugaagcucacguugau

SEQ ID NO: 718861 - RNA, 19 nt, Homo sapiens
  misc_RNA (1)...(19): siRNA sense strand
ucucaagggucguguguuu

SEQ ID NO: 718862 - RNA, 19 nt, Homo sapiens
  misc_RNA (1)...(19): siRNA sense strand
ccugcuauguucaauauaa

SEQ ID NO: 718863 - RNA, 19 nt, Homo sapiens
  misc_RNA (1)...(19): siRNA sense strand
gaagugagucuugcugauu

SEQ ID NO: 718864 - RNA, 19 nt, Homo sapiens
  misc_RNA (1)...(19): siRNA sense strand
gcagaaugaugaaguugca

SEQ ID NO: 718865 - RNA, 19 nt, Homo sapiens
  misc_RNA (1)...(19): siRNA sense strand
caugaugucuucguuagaa

SEQ ID NO: 718866 - RNA, 19 nt, Homo sapiens
  misc_RNA (1)...(19): siRNA sense strand
agaaagugguugauccauu

SEQ ID NO: 718867 - RNA, 19 nt, Homo sapiens
  misc_RNA (1)...(19): siRNA sense strand
gaaaaggcuugccaaucua

SEQ ID NO: 718868 - RNA, 19 nt, Homo sapiens
  misc_RNA (1)...(19): siRNA sense strand
aauucaagcugauuacuga

SEQ ID NO: 718869 - RNA, 19 nt, Homo sapiens
  misc_RNA (1)...(19): siRNA sense strand
gacaggugcuaaaguugaa

SEQ ID NO: 718870 - RNA, 19 nt, Homo sapiens
  misc_RNA (1)...(19): siRNA sense strand
caccugcuauguucaauau

SEQ ID NO: 718871 - RNA, 19 nt, Homo sapiens
  misc_RNA (1)...(19): siRNA sense strand
ggacgagacaggugcuaaa

SEQ ID NO: 718872 - RNA, 19 nt, Homo sapiens
  misc_RNA (1)...(19): siRNA sense strand
ucaagacuaccgaugguua

SEQ ID NO: 718873 - RNA, 19 nt, Homo sapiens
  misc_RNA (1)...(19): siRNA sense strand
ugaugaaguugcauuuaga

SEQ ID NO: 718874 - RNA, 19 nt, Homo sapiens
  misc_RNA (1)...(19): siRNA sense strand
gaagaagcccaaguuugaa

SEQ ID NO: 718875 - RNA, 19 nt, Homo sapiens
  misc_RNA (1)...(19): siRNA sense strand
ggcaagaacaagcgccuua

SEQ ID NO: 718876 - RNA, 19 nt, Homo sapiens
  misc_RNA (1)...(19): siRNA sense strand
ggucguguguuugaaguga

SEQ ID NO: 718877 - RNA, 19 nt, Homo sapiens
  misc_RNA (1)...(19): siRNA sense strand
gacuaccgaugguuacuug

SEQ ID NO: 718878 - RNA, 19 nt, Homo sapiens
  misc_RNA (1)...(19): siRNA sense strand
aagugagucuugcugauuu

SEQ ID NO: 718879 - RNA, 19 nt, Homo sapiens
  misc_RNA (1)...(19): siRNA sense strand
gcaccugcuauguucaaua

SEQ ID NO: 718880 - RNA, 19 nt, Homo sapiens
  misc_RNA (1)...(19): siRNA sense strand
gaaggcaguaguucuggaa

SEQ ID NO: 718881 - RNA, 19 nt, Homo sapiens
  misc_RNA (1)...(19): siRNA sense strand
ucaagcugauuacugaaga

SEQ ID NO: 718882 - RNA, 19 nt, Homo sapiens
  misc_RNA (1)...(19): siRNA sense strand
cuauuuauccucuccauga

SEQ ID NO: 718883 - RNA, 19 nt, Homo sapiens
  misc_RNA (1)...(19): siRNA sense strand
gaagaaagugguugaucca

SEQ ID NO: 718884 - RNA, 19 nt, Homo sapiens
  misc_RNA (1)...(19): siRNA sense strand
agauugguaugaugugaaa

SEQ ID NO: 718885 - RNA, 19 nt, Homo sapiens
  misc_RNA (1)...(19): siRNA sense strand
ccaagaagaaagugguuga

SEQ ID NO: 718886 - RNA, 19 nt, Homo sapiens
  misc_RNA (1)...(19): siRNA sense strand
aagaaagauugguaugaug

SEQ ID NO: 718887 - RNA, 19 nt, Homo sapiens
  misc_RNA (1)...(19): siRNA sense strand
gaugaaguugcauuuagaa

SEQ ID NO: 718888 - RNA, 19 nt, Homo sapiens
  misc_RNA (1)...(19): siRNA sense strand
uugcugauuugcagaauga

SEQ ID NO: 718889 - RNA, 19 nt, Homo sapiens
  misc_RNA (1)...(19): siRNA sense strand
aaagauugguaugauguga

SEQ ID NO: 718890 - RNA, 19 nt, Homo sapiens
  misc_RNA (1)...(19): siRNA sense strand
aaagggagccaagaagaaa

SEQ ID NO: 718891 - RNA, 19 nt, Homo sapiens
  misc_RNA (1)...(19): siRNA sense strand
gaagcccaaguuugaauug

SEQ ID NO: 718892 - RNA, 19 nt, Homo sapiens
  misc_RNA (1)...(19): siRNA sense strand
gaaagauugguaugaugug

SEQ ID NO: 718893 - RNA, 19 nt, Homo sapiens
  misc_RNA (1)...(19): siRNA sense strand
gcugaagaagcccaaguuu

SEQ ID NO: 718894 - RNA, 19 nt, Homo sapiens
  misc_RNA (1)...(19): siRNA sense strand
caacagguccgccaaaucc

SEQ ID NO: 718895 - RNA, 19 nt, Homo sapiens
  misc_RNA (1)...(19): siRNA sense strand
agaaaaggcuugccaaucu

SEQ ID NO: 718896 - RNA, 19 nt, Homo sapiens
  misc_RNA (1)...(19): siRNA sense strand
agaacaagcgccuuacgaa

SEQ ID NO: 718897 - RNA, 19 nt, Homo sapiens
  misc_RNA (1)...(19): siRNA sense strand
cuaagaaagauugguauga

SEQ ID NO: 718898 - RNA, 19 nt, Homo sapiens
  misc_RNA (1)...(19): siRNA sense strand
agacaggugcuaaaguuga

SEQ ID NO: 718899 - RNA, 19 nt, Homo sapiens
  misc_RNA (1)...(19): siRNA sense strand
ugaagugagucuugcugau

SEQ ID NO: 718900 - RNA, 19 nt, Homo sapiens
  misc_RNA (1)...(19): siRNA sense strand
gagacaggugcuaaaguug

SEQ ID NO: 718901 - RNA, 19 nt, Homo sapiens
  misc_RNA (1)...(19): siRNA sense strand
agaaagauugguaugaugu

SEQ ID NO: 718902 - RNA, 19 nt, Homo sapiens
  misc_RNA (1)...(19): siRNA sense strand
caagggucguguguuugaa

SEQ ID NO: 718903 - RNA, 19 nt, Homo sapiens
  misc_RNA (1)...(19): siRNA sense strand
gaagcucacguugauguca

SEQ ID NO: 718904 - RNA, 19 nt, Homo sapiens
  misc_RNA (1)...(19): siRNA sense strand
ggaucuuacccgugacaaa

SEQ ID NO: 718905 - RNA, 19 nt, Homo sapiens
  misc_RNA (1)...(19): siRNA sense strand
augaugaaguugcauuuag

SEQ ID NO: 718906 - RNA, 19 nt, Homo sapiens
  misc_RNA (1)...(19): siRNA sense strand
guugauccauuuucuaaga

SEQ ID NO: 718907 - RNA, 19 nt, Homo sapiens
  misc_RNA (1)...(19): siRNA sense strand
aguccaagaaucuguuuaa

SEQ ID NO: 718908 - RNA, 19 nt, Homo sapiens
  misc_RNA (1)...(19): siRNA sense strand
ggugaaggcaguaguucug

SEQ ID NO: 718909 - RNA, 19 nt, Homo sapiens
  misc_RNA (1)...(19): siRNA sense strand
aaaacugccugacuaacuu

SEQ ID NO: 718910 - RNA, 19 nt, Homo sapiens
  misc_RNA (1)...(19): siRNA sense strand
aggcuugccaaucuauuua

SEQ ID NO: 718911 - RNA, 19 nt, Homo sapiens
  misc_RNA (1)...(19): siRNA sense strand
ugauugaagcucacguuga

SEQ ID NO: 718912 - RNA, 19 nt, Homo sapiens
  misc_RNA (1)...(19): siRNA sense strand
cugaagaagcccaaguuug

SEQ ID NO: 718913 - RNA, 19 nt, Homo sapiens
  misc_RNA (1)...(19): siRNA sense strand
uuuauccucuccaugaugu

SEQ ID NO: 718914 - RNA, 19 nt, Homo sapiens
  misc_RNA (1)...(19): siRNA sense strand
uccaugaugucuucguuag

SEQ ID NO: 718915 - RNA, 19 nt, Homo sapiens
  misc_RNA (1)...(19): siRNA sense strand
ugucaagacuaccgauggu

SEQ ID NO: 718916 - RNA, 19 nt, Homo sapiens
  misc_RNA (1)...(19): siRNA sense strand
gcuugccaaucuauuuauc

SEQ ID NO: 718917 - RNA, 19 nt, Homo sapiens
  misc_RNA (1)...(19): siRNA sense strand
aacaagcgccuuacgaaag

SEQ ID NO: 718918 - RNA, 19 nt, Homo sapiens
  misc_RNA (1)...(19): siRNA sense strand
uaccgaugguuacuugcuu

SEQ ID NO: 718919 - RNA, 19 nt, Homo sapiens
  misc_RNA (1)...(19): siRNA sense strand
cugauuugcagaaugauga

SEQ ID NO: 718920 - RNA, 19 nt, Homo sapiens
  misc_RNA (1)...(19): siRNA sense strand
gggacgagacaggugcuaa

SEQ ID NO: 718921 - RNA, 19 nt, Homo sapiens
  misc_RNA (1)...(19): siRNA sense strand
ucuccaugaugucuucguu

SEQ ID NO: 718922 - RNA, 19 nt, Homo sapiens
  misc_RNA (1)...(19): siRNA sense strand
aaacgcaacaaucagauac

SEQ ID NO: 718923 - RNA, 19 nt, Homo sapiens
  misc_RNA (1)...(19): siRNA sense strand
ccaacagguccgccaaauc

SEQ ID NO: 718924 - RNA, 19 nt, Homo sapiens
  misc_RNA (1)...(19): siRNA sense strand
gaaagugguugauccauuu

SEQ ID NO: 718925 - RNA, 19 nt, Homo sapiens
  misc_RNA (1)...(19): siRNA sense strand
ugaaagaaguggucaauaa

SEQ ID NO: 718926 - RNA, 19 nt, Homo sapiens
  misc_RNA (1)...(19): siRNA sense strand
gaaagaaguggucaauaaa

SEQ ID NO: 718927 - RNA, 19 nt, Homo sapiens
  misc_RNA (1)...(19): siRNA sense strand
ugaacgagcugauggauau

SEQ ID NO: 718928 - RNA, 19 nt, Homo sapiens
  misc_RNA (1)...(19): siRNA sense strand
cgagacaggugcuaaaguu

SEQ ID NO: 718929 - RNA, 19 nt, Homo sapiens
  misc_RNA (1)...(19): siRNA sense strand
ugaagaagcccaaguuuga

SEQ ID NO: 718930 - RNA, 19 nt, Homo sapiens
  misc_RNA (1)...(19): siRNA sense strand
gaacaagcgccuuacgaaa

SEQ ID NO: 718931 - RNA, 19 nt, Homo sapiens
  misc_RNA (1)...(19): siRNA sense strand
gauugaagcucacguugau

SEQ ID NO: 718932 - RNA, 19 nt, Homo sapiens
  misc_RNA (1)...(19): siRNA sense strand
ucucaagggucguguguuu

SEQ ID NO: 718933 - RNA, 19 nt, Homo sapiens
  misc_RNA (1)...(19): siRNA sense strand
ccugcuauguucaauauaa

SEQ ID NO: 718934 - RNA, 19 nt, Homo sapiens
  misc_RNA (1)...(19): siRNA sense strand
gaagugagucuugcugauu

SEQ ID NO: 718935 - RNA, 19 nt, Homo sapiens
  misc_RNA (1)...(19): siRNA sense strand
gcagaaugaugaaguugca

SEQ ID NO: 718936 - RNA, 19 nt, Homo sapiens
  misc_RNA (1)...(19): siRNA sense strand
caugaugucuucguuagaa

SEQ ID NO: 718937 - RNA, 19 nt, Homo sapiens
  misc_RNA (1)...(19): siRNA sense strand
agaaagugguugauccauu

SEQ ID NO: 718938 - RNA, 19 nt, Homo sapiens
  misc_RNA (1)...(19): siRNA sense strand
gaaaaggcuugccaaucua

SEQ ID NO: 718939 - RNA, 19 nt, Homo sapiens
  misc_RNA (1)...(19): siRNA sense strand
aauucaagcugauuacuga

SEQ ID NO: 718940 - RNA, 19 nt, Homo sapiens
  misc_RNA (1)...(19): siRNA sense strand
gacaggugcuaaaguugaa

SEQ ID NO: 718941 - RNA, 19 nt, Homo sapiens
  misc_RNA (1)...(19): siRNA sense strand
caccugcuauguucaauau

SEQ ID NO: 718942 - RNA, 19 nt, Homo sapiens
  misc_RNA (1)...(19): siRNA sense strand
ggacgagacaggugcuaaa

SEQ ID NO: 718943 - RNA, 19 nt, Homo sapiens
  misc_RNA (1)...(19): siRNA sense strand
ucaagacuaccgaugguua

SEQ ID NO: 718944 - RNA, 19 nt, Homo sapiens
  misc_RNA (1)...(19): siRNA sense strand
ugaugaaguugcauuuaga

SEQ ID NO: 718945 - RNA, 19 nt, Homo sapiens
  misc_RNA (1)...(19): siRNA sense strand
gaagaagcccaaguuugaa

SEQ ID NO: 718946 - RNA, 19 nt, Homo sapiens
  misc_RNA (1)...(19): siRNA sense strand
ggcaagaacaagcgccuua

SEQ ID NO: 718947 - RNA, 19 nt, Homo sapiens
  misc_RNA (1)...(19): siRNA sense strand
ggucguguguuugaaguga

SEQ ID NO: 718948 - RNA, 19 nt, Homo sapiens
  misc_RNA (1)...(19): siRNA sense strand
gacuaccgaugguuacuug

SEQ ID NO: 718949 - RNA, 19 nt, Homo sapiens
  misc_RNA (1)...(19): siRNA sense strand
aagugagucuugcugauuu

SEQ ID NO: 718950 - RNA, 19 nt, Homo sapiens
  misc_RNA (1)...(19): siRNA sense strand
gcaccugcuauguucaaua

SEQ ID NO: 718951 - RNA, 19 nt, Homo sapiens
  misc_RNA (1)...(19): siRNA sense strand
gaaggcaguaguucuggaa

SEQ ID NO: 718952 - RNA, 19 nt, Homo sapiens
  misc_RNA (1)...(19): siRNA sense strand
ucaagcugauuacugaaga

SEQ ID NO: 718953 - RNA, 19 nt, Homo sapiens
  misc_RNA (1)...(19): siRNA sense strand
cuauuuauccucuccauga

SEQ ID NO: 718954 - RNA, 19 nt, Homo sapiens
  misc_RNA (1)...(19): siRNA sense strand
gaagaaagugguugaucca

SEQ ID NO: 718955 - RNA, 19 nt, Homo sapiens
  misc_RNA (1)...(19): siRNA sense strand
agauugguaugaugugaaa

SEQ ID NO: 718956 - RNA, 19 nt, Homo sapiens
  misc_RNA (1)...(19): siRNA sense strand
ccaagaagaaagugguuga

SEQ ID NO: 718957 - RNA, 19 nt, Homo sapiens
  misc_RNA (1)...(19): siRNA sense strand
aagaaagauugguaugaug

SEQ ID NO: 718958 - RNA, 19 nt, Homo sapiens
  misc_RNA (1)...(19): siRNA sense strand
gaugaaguugcauuuagaa

SEQ ID NO: 718959 - RNA, 19 nt, Homo sapiens
  misc_RNA (1)...(19): siRNA sense strand
uugcugauuugcagaauga

SEQ ID NO: 718960 - RNA, 19 nt, Homo sapiens
  misc_RNA (1)...(19): siRNA sense strand
aaagauugguaugauguga

SEQ ID NO: 718961 - RNA, 19 nt, Homo sapiens
  misc_RNA (1)...(19): siRNA sense strand
aaagggagccaagaagaaa

SEQ ID NO: 718962 - RNA, 19 nt, Homo sapiens
  misc_RNA (1)...(19): siRNA sense strand
gaagcccaaguuugaauug

SEQ ID NO: 718963 - RNA, 19 nt, Homo sapiens
  misc_RNA (1)...(19): siRNA sense strand
gaaagauugguaugaugug

SEQ ID NO: 718964 - RNA, 19 nt, Homo sapiens
  misc_RNA (1)...(19): siRNA sense strand
gcugaagaagcccaaguuu

SEQ ID NO: 718965 - RNA, 19 nt, Homo sapiens
  misc_RNA (1)...(19): siRNA sense strand
caacagguccgccaaaucc

SEQ ID NO: 718966 - RNA, 19 nt, Homo sapiens
  misc_RNA (1)...(19): siRNA sense strand
agaaaaggcuugccaaucu

SEQ ID NO: 718967 - RNA, 19 nt, Homo sapiens
  misc_RNA (1)...(19): siRNA sense strand
agaacaagcgccuuacgaa

SEQ ID NO: 718968 - RNA, 19 nt, Homo sapiens
  misc_RNA (1)...(19): siRNA sense strand
cuaagaaagauugguauga

SEQ ID NO: 718969 - RNA, 19 nt, Homo sapiens
  misc_RNA (1)...(19): siRNA sense strand
agacaggugcuaaaguuga

SEQ ID NO: 718970 - RNA, 19 nt, Homo sapiens
  misc_RNA (1)...(19): siRNA sense strand
ugaagugagucuugcugau

SEQ ID NO: 718971 - RNA, 19 nt, Homo sapiens
  misc_RNA (1)...(19): siRNA sense strand
gagacaggugcuaaaguug

SEQ ID NO: 718972 - RNA, 19 nt, Homo sapiens
  misc_RNA (1)...(19): siRNA sense strand
agaaagauugguaugaugu

SEQ ID NO: 718973 - RNA, 19 nt, Homo sapiens
  misc_RNA (1)...(19): siRNA sense strand
caagggucguguguuugaa

SEQ ID NO: 718974 - RNA, 19 nt, Homo sapiens
  misc_RNA (1)...(19): siRNA sense strand
gaagcucacguugauguca

SEQ ID NO: 718975 - RNA, 19 nt, Homo sapiens
  misc_RNA (1)...(19): siRNA sense strand
ggaucuuacccgugacaaa

SEQ ID NO: 718976 - RNA, 19 nt, Homo sapiens
  misc_RNA (1)...(19): siRNA sense strand
augaugaaguugcauuuag

SEQ ID NO: 718977 - RNA, 19 nt, Homo sapiens
  misc_RNA (1)...(19): siRNA sense strand
guugauccauuuucuaaga

SEQ ID NO: 718978 - RNA, 19 nt, Homo sapiens
  misc_RNA (1)...(19): siRNA sense strand
aguccaagaaucuguuuaa

SEQ ID NO: 718979 - RNA, 19 nt, Homo sapiens
  misc_RNA (1)...(19): siRNA sense strand
ggugaaggcaguaguucug

SEQ ID NO: 718980 - RNA, 19 nt, Homo sapiens
  misc_RNA (1)...(19): siRNA sense strand
aaaacugccugacuaacuu

SEQ ID NO: 718981 - RNA, 19 nt, Homo sapiens
  misc_RNA (1)...(19): siRNA sense strand
aggcuugccaaucuauuua

SEQ ID NO: 718982 - RNA, 19 nt, Homo sapiens
  misc_RNA (1)...(19): siRNA sense strand
ugauugaagcucacguuga

SEQ ID NO: 718983 - RNA, 19 nt, Homo sapiens
  misc_RNA (1)...(19): siRNA sense strand
cugaagaagcccaaguuug

SEQ ID NO: 718984 - RNA, 19 nt, Homo sapiens
  misc_RNA (1)...(19): siRNA sense strand
uuuauccucuccaugaugu

SEQ ID NO: 718985 - RNA, 19 nt, Homo sapiens
  misc_RNA (1)...(19): siRNA sense strand
uccaugaugucuucguuag

SEQ ID NO: 718986 - RNA, 19 nt, Homo sapiens
  misc_RNA (1)...(19): siRNA sense strand
ugucaagacuaccgauggu

SEQ ID NO: 718987 - RNA, 19 nt, Homo sapiens
  misc_RNA (1)...(19): siRNA sense strand
gcuugccaaucuauuuauc

SEQ ID NO: 718988 - RNA, 19 nt, Homo sapiens
  misc_RNA (1)...(19): siRNA sense strand
aacaagcgccuuacgaaag

SEQ ID NO: 718989 - RNA, 19 nt, Homo sapiens
  misc_RNA (1)...(19): siRNA sense strand
uaccgaugguuacuugcuu

SEQ ID NO: 718990 - RNA, 19 nt, Homo sapiens
  misc_RNA (1)...(19): siRNA sense strand
cugauuugcagaaugauga

SEQ ID NO: 718991 - RNA, 19 nt, Homo sapiens
  misc_RNA (1)...(19): siRNA sense strand
gggacgagacaggugcuaa

SEQ ID NO: 718992 - RNA, 19 nt, Homo sapiens
  misc_RNA (1)...(19): siRNA sense strand
ucuccaugaugucuucguu

SEQ ID NO: 718993 - RNA, 19 nt, Homo sapiens
  misc_RNA (1)...(19): siRNA sense strand
aaacgcaacaaucagauac

SEQ ID NO: 718994 - RNA, 19 nt, Homo sapiens
  misc_RNA (1)...(19): siRNA sense strand
ccaacagguccgccaaauc

SEQ ID NO: 718995 - RNA, 19 nt, Homo sapiens
  misc_RNA (1)...(19): siRNA sense strand
gauacgggcuccugguugu

SEQ ID NO: 718996 - RNA, 19 nt, Homo sapiens
  misc_RNA (1)...(19): siRNA sense strand
gaaaggccuucugcauggu

SEQ ID NO: 718997 - RNA, 19 nt, Homo sapiens
  misc_RNA (1)...(19): siRNA sense strand
ccauuggccuggaggacuu

SEQ ID NO: 718998 - RNA, 19 nt, Homo sapiens
  misc_RNA (1)...(19): siRNA sense strand
ggccagcucgcacuucuug

SEQ ID NO: 718999 - RNA, 19 nt, Homo sapiens
  misc_RNA (1)...(19): siRNA sense strand
gcggaaaggccuucugcau

SEQ ID NO: 719000 - RNA, 19 nt, Homo sapiens
  misc_RNA (1)...(19): siRNA sense strand
cacagguuauggccacaug

SEQ ID NO: 719001 - RNA, 19 nt, Homo sapiens
  misc_RNA (1)...(19): siRNA sense strand
ggaccaagguggcauccua

SEQ ID NO: 719002 - RNA, 19 nt, Homo sapiens
  misc_RNA (1)...(19): siRNA sense strand
gauacgggcuccugguugu

SEQ ID NO: 719003 - RNA, 19 nt, Homo sapiens
  misc_RNA (1)...(19): siRNA sense strand
gaaaggccuucugcauggu

SEQ ID NO: 719004 - RNA, 19 nt, Homo sapiens
  misc_RNA (1)...(19): siRNA sense strand
ccauuggccuggaggacuu

SEQ ID NO: 719005 - RNA, 19 nt, Homo sapiens
  misc_RNA (1)...(19): siRNA sense strand
ggccagcucgcacuucuug

SEQ ID NO: 719006 - RNA, 19 nt, Homo sapiens
  misc_RNA (1)...(19): siRNA sense strand
gcggaaaggccuucugcau

SEQ ID NO: 719007 - RNA, 19 nt, Homo sapiens
  misc_RNA (1)...(19): siRNA sense strand
cacagguuauggccacaug

SEQ ID NO: 719008 - RNA, 19 nt, Homo sapiens
  misc_RNA (1)...(19): siRNA sense strand
gauacgggcuccugguugu

SEQ ID NO: 719009 - RNA, 19 nt, Homo sapiens
  misc_RNA (1)...(19): siRNA sense strand
gaaaggccuucugcauggu

SEQ ID NO: 719010 - RNA, 19 nt, Homo sapiens
  misc_RNA (1)...(19): siRNA sense strand
ccauuggccuggaggacuu

SEQ ID NO: 719011 - RNA, 19 nt, Homo sapiens
  misc_RNA (1)...(19): siRNA sense strand
ggccagcucgcacuucuug

SEQ ID NO: 719012 - RNA, 19 nt, Homo sapiens
  misc_RNA (1)...(19): siRNA sense strand
gcggaaaggccuucugcau

SEQ ID NO: 719013 - RNA, 19 nt, Homo sapiens
  misc_RNA (1)...(19): siRNA sense strand
cacagguuauggccacaug

SEQ ID NO: 719014 - RNA, 19 nt, Homo sapiens
  misc_RNA (1)...(19): siRNA sense strand
gauacgggcuccugguugu

SEQ ID NO: 719015 - RNA, 19 nt, Homo sapiens
  misc_RNA (1)...(19): siRNA sense strand
gaaaggccuucugcauggu

SEQ ID NO: 719016 - RNA, 19 nt, Homo sapiens
  misc_RNA (1)...(19): siRNA sense strand
ccauuggccuggaggacuu

SEQ ID NO: 719017 - RNA, 19 nt, Homo sapiens
  misc_RNA (1)...(19): siRNA sense strand
ggccagcucgcacuucuug

SEQ ID NO: 719018 - RNA, 19 nt, Homo sapiens
  misc_RNA (1)...(19): siRNA sense strand
gcggaaaggccuucugcau

SEQ ID NO: 719019 - RNA, 19 nt, Homo sapiens
  misc_RNA (1)...(19): siRNA sense strand
cacagguuauggccacaug

SEQ ID NO: 719020 - RNA, 19 nt, Homo sapiens
  misc_RNA (1)...(19): siRNA sense strand
gauacgggcuccugguugu

SEQ ID NO: 719021 - RNA, 19 nt, Homo sapiens
  misc_RNA (1)...(19): siRNA sense strand
gaaaggccuucugcauggu

SEQ ID NO: 719022 - RNA, 19 nt, Homo sapiens
  misc_RNA (1)...(19): siRNA sense strand
ccauuggccuggaggacuu

SEQ ID NO: 719023 - RNA, 19 nt, Homo sapiens
  misc_RNA (1)...(19): siRNA sense strand
ggccagcucgcacuucuug

SEQ ID NO: 719024 - RNA, 19 nt, Homo sapiens
  misc_RNA (1)...(19): siRNA sense strand
gcggaaaggccuucugcau

SEQ ID NO: 719025 - RNA, 19 nt, Homo sapiens
  misc_RNA (1)...(19): siRNA sense strand
cacagguuauggccacaug

SEQ ID NO: 719026 - RNA, 19 nt, Homo sapiens
  misc_RNA (1)...(19): siRNA sense strand
gauacgggcuccugguugu

SEQ ID NO: 719027 - RNA, 19 nt, Homo sapiens
  misc_RNA (1)...(19): siRNA sense strand
gaaaggccuucugcauggu

SEQ ID NO: 719028 - RNA, 19 nt, Homo sapiens
  misc_RNA (1)...(19): siRNA sense strand
ccauuggccuggaggacuu

SEQ ID NO: 719029 - RNA, 19 nt, Homo sapiens
  misc_RNA (1)...(19): siRNA sense strand
ggccagcucgcacuucuug

SEQ ID NO: 719030 - RNA, 19 nt, Homo sapiens
  misc_RNA (1)...(19): siRNA sense strand
gcggaaaggccuucugcau

SEQ ID NO: 719031 - RNA, 19 nt, Homo sapiens
  misc_RNA (1)...(19): siRNA sense strand
cacagguuauggccacaug

SEQ ID NO: 719032 - RNA, 19 nt, Homo sapiens
  misc_RNA (1)...(19): siRNA sense strand
ggaccaagguggcauccua

SEQ ID NO: 719033 - RNA, 19 nt, Homo sapiens
  misc_RNA (1)...(19): siRNA sense strand
gauacgggcuccugguugu

SEQ ID NO: 719034 - RNA, 19 nt, Homo sapiens
  misc_RNA (1)...(19): siRNA sense strand
gaaaggccuucugcauggu

SEQ ID NO: 719035 - RNA, 19 nt, Homo sapiens
  misc_RNA (1)...(19): siRNA sense strand
ccauuggccuggaggacuu

SEQ ID NO: 719036 - RNA, 19 nt, Homo sapiens
  misc_RNA (1)...(19): siRNA sense strand
ggccagcucgcacuucuug

SEQ ID NO: 719037 - RNA, 19 nt, Homo sapiens
  misc_RNA (1)...(19): siRNA sense strand
gcggaaaggccuucugcau

SEQ ID NO: 719038 - RNA, 19 nt, Homo sapiens
  misc_RNA (1)...(19): siRNA sense strand
cacagguuauggccacaug

SEQ ID NO: 719039 - RNA, 19 nt, Homo sapiens
  misc_RNA (1)...(19): siRNA sense strand
gauacgggcuccugguugu

SEQ ID NO: 719040 - RNA, 19 nt, Homo sapiens
  misc_RNA (1)...(19): siRNA sense strand
gaaaggccuucugcauggu

SEQ ID NO: 719041 - RNA, 19 nt, Homo sapiens
  misc_RNA (1)...(19): siRNA sense strand
ccauuggccuggaggacuu

SEQ ID NO: 719042 - RNA, 19 nt, Homo sapiens
  misc_RNA (1)...(19): siRNA sense strand
ggccagcucgcacuucuug

SEQ ID NO: 719043 - RNA, 19 nt, Homo sapiens
  misc_RNA (1)...(19): siRNA sense strand
gcggaaaggccuucugcau

SEQ ID NO: 719044 - RNA, 19 nt, Homo sapiens
  misc_RNA (1)...(19): siRNA sense strand
cacagguuauggccacaug

SEQ ID NO: 719045 - RNA, 19 nt, Homo sapiens
  misc_RNA (1)...(19): siRNA sense strand
gauacgggcuccugguugu

SEQ ID NO: 719046 - RNA, 19 nt, Homo sapiens
  misc_RNA (1)...(19): siRNA sense strand
gaaaggccuucugcauggu

SEQ ID NO: 719047 - RNA, 19 nt, Homo sapiens
  misc_RNA (1)...(19): siRNA sense strand
ccauuggccuggaggacuu

SEQ ID NO: 719048 - RNA, 19 nt, Homo sapiens
  misc_RNA (1)...(19): siRNA sense strand
ggccagcucgcacuucuug

SEQ ID NO: 719049 - RNA, 19 nt, Homo sapiens
  misc_RNA (1)...(19): siRNA sense strand
gcggaaaggccuucugcau

SEQ ID NO: 719050 - RNA, 19 nt, Homo sapiens
  misc_RNA (1)...(19): siRNA sense strand
cacagguuauggccacaug

SEQ ID NO: 719051 - RNA, 19 nt, Homo sapiens
  misc_RNA (1)...(19): siRNA sense strand
gauacgggcuccugguugu

SEQ ID NO: 719052 - RNA, 19 nt, Homo sapiens
  misc_RNA (1)...(19): siRNA sense strand
gaaaggccuucugcauggu

SEQ ID NO: 719053 - RNA, 19 nt, Homo sapiens
  misc_RNA (1)...(19): siRNA sense strand
ccauuggccuggaggacuu

SEQ ID NO: 719054 - RNA, 19 nt, Homo sapiens
  misc_RNA (1)...(19): siRNA sense strand
ggccagcucgcacuucuug

SEQ ID NO: 719055 - RNA, 19 nt, Homo sapiens
  misc_RNA (1)...(19): siRNA sense strand
gcggaaaggccuucugcau

SEQ ID NO: 719056 - RNA, 19 nt, Homo sapiens
  misc_RNA (1)...(19): siRNA sense strand
cacagguuauggccacaug

SEQ ID NO: 719057 - RNA, 19 nt, Homo sapiens
  misc_RNA (1)...(19): siRNA sense strand
gguguaagcucuagcaauu

SEQ ID NO: 719058 - RNA, 19 nt, Homo sapiens
  misc_RNA (1)...(19): siRNA sense strand
ggaaacagcuacauugaag

SEQ ID NO: 719059 - RNA, 19 nt, Homo sapiens
  misc_RNA (1)...(19): siRNA sense strand
caauggagguccugaugua

SEQ ID NO: 719060 - RNA, 19 nt, Homo sapiens
  misc_RNA (1)...(19): siRNA sense strand
uguaagcucuagcaauuua

SEQ ID NO: 719061 - RNA, 19 nt, Homo sapiens
  misc_RNA (1)...(19): siRNA sense strand
aaauggagcucucuaugaa

SEQ ID NO: 719062 - RNA, 19 nt, Homo sapiens
  misc_RNA (1)...(19): siRNA sense strand
gcagucagauucacauauc

SEQ ID NO: 719063 - RNA, 19 nt, Homo sapiens
  misc_RNA (1)...(19): siRNA sense strand
ggcaccaaguggaauauua

SEQ ID NO: 719064 - RNA, 19 nt, Homo sapiens
  misc_RNA (1)...(19): siRNA sense strand
caucauucuugucacauua

SEQ ID NO: 719065 - RNA, 19 nt, Homo sapiens
  misc_RNA (1)...(19): siRNA sense strand
ggcagaagcuguauuaaac

SEQ ID NO: 719066 - RNA, 19 nt, Homo sapiens
  misc_RNA (1)...(19): siRNA sense strand
gaagauugucauucugaua

SEQ ID NO: 719067 - RNA, 19 nt, Homo sapiens
  misc_RNA (1)...(19): siRNA sense strand
uggcagaucucuuguccua

SEQ ID NO: 719068 - RNA, 19 nt, Homo sapiens
  misc_RNA (1)...(19): siRNA sense strand
gggcagaagcuguauuaaa

SEQ ID NO: 719069 - RNA, 19 nt, Homo sapiens
  misc_RNA (1)...(19): siRNA sense strand
aaacucaucuggauacauc

SEQ ID NO: 719070 - RNA, 19 nt, Homo sapiens
  misc_RNA (1)...(19): siRNA sense strand
caacaaacucaucuggaua

SEQ ID NO: 719071 - RNA, 19 nt, Homo sapiens
  misc_RNA (1)...(19): siRNA sense strand
gaagcuguauuaaacuugu

SEQ ID NO: 719072 - RNA, 19 nt, Homo sapiens
  misc_RNA (1)...(19): siRNA sense strand
caaaucaacuggugagacu

SEQ ID NO: 719073 - RNA, 19 nt, Homo sapiens
  misc_RNA (1)...(19): siRNA sense strand
cagagcagaugaugaugaa

SEQ ID NO: 719074 - RNA, 19 nt, Homo sapiens
  misc_RNA (1)...(19): siRNA sense strand
acagcuacauugaagauaa

SEQ ID NO: 719075 - RNA, 19 nt, Homo sapiens
  misc_RNA (1)...(19): siRNA sense strand
ugaaaguccugcugaaaca

SEQ ID NO: 719076 - RNA, 19 nt, Homo sapiens
  misc_RNA (1)...(19): siRNA sense strand
ccacuugacuauaaauaca

SEQ ID NO: 719077 - RNA, 19 nt, Homo sapiens
  misc_RNA (1)...(19): siRNA sense strand
uaccaggacugaugcaauu

SEQ ID NO: 719078 - RNA, 19 nt, Homo sapiens
  misc_RNA (1)...(19): siRNA sense strand
ccagagacccugaaauaug

SEQ ID NO: 719079 - RNA, 19 nt, Homo sapiens
  misc_RNA (1)...(19): siRNA sense strand
gcagaucucuuguccuacu

SEQ ID NO: 719080 - RNA, 19 nt, Homo sapiens
  misc_RNA (1)...(19): siRNA sense strand
ucaacaaacucaucuggau

SEQ ID NO: 719081 - RNA, 19 nt, Homo sapiens
  misc_RNA (1)...(19): siRNA sense strand
gagcagaugaugaugaaga

SEQ ID NO: 719082 - RNA, 19 nt, Homo sapiens
  misc_RNA (1)...(19): siRNA sense strand
ggaacagucucuugauggu

SEQ ID NO: 719083 - RNA, 19 nt, Homo sapiens
  misc_RNA (1)...(19): siRNA sense strand
gauggguggugucuaguga

SEQ ID NO: 719084 - RNA, 19 nt, Homo sapiens
  misc_RNA (1)...(19): siRNA sense strand
cagagacccugaaauaugg

SEQ ID NO: 719085 - RNA, 19 nt, Homo sapiens
  misc_RNA (1)...(19): siRNA sense strand
ugaggaagauugucauucu

SEQ ID NO: 719086 - RNA, 19 nt, Homo sapiens
  misc_RNA (1)...(19): siRNA sense strand
ggcagaagcugaggaagau

SEQ ID NO: 719087 - RNA, 19 nt, Homo sapiens
  misc_RNA (1)...(19): siRNA sense strand
cagaagcuguauuaaacuu

SEQ ID NO: 719088 - RNA, 19 nt, Homo sapiens
  misc_RNA (1)...(19): siRNA sense strand
ugccagagacccugaaaua

SEQ ID NO: 719089 - RNA, 19 nt, Homo sapiens
  misc_RNA (1)...(19): siRNA sense strand
ugaacuugcuccaggugua

SEQ ID NO: 719090 - RNA, 19 nt, Homo sapiens
  misc_RNA (1)...(19): siRNA sense strand
gaacuugcuccagguguaa

SEQ ID NO: 719091 - RNA, 19 nt, Homo sapiens
  misc_RNA (1)...(19): siRNA sense strand
gguggugucuagugacuug

SEQ ID NO: 719092 - RNA, 19 nt, Homo sapiens
  misc_RNA (1)...(19): siRNA sense strand
uaucagugcugccaaugga

SEQ ID NO: 719093 - RNA, 19 nt, Homo sapiens
  misc_RNA (1)...(19): siRNA sense strand
ggauacaucauucuuguca

SEQ ID NO: 719094 - RNA, 19 nt, Homo sapiens
  misc_RNA (1)...(19): siRNA sense strand
gagccucaguccauuguuc

SEQ ID NO: 719095 - RNA, 19 nt, Homo sapiens
  misc_RNA (1)...(19): siRNA sense strand
ggaagauugucauucugau

SEQ ID NO: 719096 - RNA, 19 nt, Homo sapiens
  misc_RNA (1)...(19): siRNA sense strand
guccauuguuccacguuua

SEQ ID NO: 719097 - RNA, 19 nt, Homo sapiens
  misc_RNA (1)...(19): siRNA sense strand
cuaugaagccaucaaguuu

SEQ ID NO: 719098 - RNA, 19 nt, Homo sapiens
  misc_RNA (1)...(19): siRNA sense strand
aacagucucuugaugguuu

SEQ ID NO: 719099 - RNA, 19 nt, Homo sapiens
  misc_RNA (1)...(19): siRNA sense strand
gauggcguguauaucagua

SEQ ID NO: 719100 - RNA, 19 nt, Homo sapiens
  misc_RNA (1)...(19): siRNA sense strand
ucaggagucugugcuuaaa

SEQ ID NO: 719101 - RNA, 19 nt, Homo sapiens
  misc_RNA (1)...(19): siRNA sense strand
uaaugaugaugacagcaaa

SEQ ID NO: 719102 - RNA, 19 nt, Homo sapiens
  misc_RNA (1)...(19): siRNA sense strand
caccagagguucaacaaac

SEQ ID NO: 719103 - RNA, 19 nt, Homo sapiens
  misc_RNA (1)...(19): siRNA sense strand
caaucagaccaaaguauuu

SEQ ID NO: 719104 - RNA, 19 nt, Homo sapiens
  misc_RNA (1)...(19): siRNA sense strand
ugaagagccucaguccauu

SEQ ID NO: 719105 - RNA, 19 nt, Homo sapiens
  misc_RNA (1)...(19): siRNA sense strand
gaagagccucaguccauug

SEQ ID NO: 719106 - RNA, 19 nt, Homo sapiens
  misc_RNA (1)...(19): siRNA sense strand
caaaauggcagaucucuug

SEQ ID NO: 719107 - RNA, 19 nt, Homo sapiens
  misc_RNA (1)...(19): siRNA sense strand
aggcacaacuccagauguu

SEQ ID NO: 719108 - RNA, 19 nt, Homo sapiens
  misc_RNA (1)...(19): siRNA sense strand
ucagaucauuggagcaguu

SEQ ID NO: 719109 - RNA, 19 nt, Homo sapiens
  misc_RNA (1)...(19): siRNA sense strand
aaaugaaaguccugcugaa

SEQ ID NO: 719110 - RNA, 19 nt, Homo sapiens
  misc_RNA (1)...(19): siRNA sense strand
gcaacuuguaccugauaua

SEQ ID NO: 719111 - RNA, 19 nt, Homo sapiens
  misc_RNA (1)...(19): siRNA sense strand
gcucgagaacucuuccuaa

SEQ ID NO: 719112 - RNA, 19 nt, Homo sapiens
  misc_RNA (1)...(19): siRNA sense strand
ggaauauuacagguacaua

SEQ ID NO: 719113 - RNA, 19 nt, Homo sapiens
  misc_RNA (1)...(19): siRNA sense strand
guagggcuaugcaacuugu

SEQ ID NO: 719114 - RNA, 19 nt, Homo sapiens
  misc_RNA (1)...(19): siRNA sense strand
gagcucaguggauguuuga

SEQ ID NO: 719115 - RNA, 19 nt, Homo sapiens
  misc_RNA (1)...(19): siRNA sense strand
acaaucagaccaaaguauu

SEQ ID NO: 719116 - RNA, 19 nt, Homo sapiens
  misc_RNA (1)...(19): siRNA sense strand
gaggaagauugucauucug

SEQ ID NO: 719117 - RNA, 19 nt, Homo sapiens
  misc_RNA (1)...(19): siRNA sense strand
cagcuacauugaagauaau

SEQ ID NO: 719118 - RNA, 19 nt, Homo sapiens
  misc_RNA (1)...(19): siRNA sense strand
cucgagaacucuuccuaaa

SEQ ID NO: 719119 - RNA, 19 nt, Homo sapiens
  misc_RNA (1)...(19): siRNA sense strand
cagaaaacaucggcagaua

SEQ ID NO: 719120 - RNA, 19 nt, Homo sapiens
  misc_RNA (1)...(19): siRNA sense strand
gacaaucagaccaaaguau

SEQ ID NO: 719121 - RNA, 19 nt, Homo sapiens
  misc_RNA (1)...(19): siRNA sense strand
gagcagucagauucacaua

SEQ ID NO: 719122 - RNA, 19 nt, Homo sapiens
  misc_RNA (1)...(19): siRNA sense strand
caacuuguaccugauauag

SEQ ID NO: 719123 - RNA, 19 nt, Homo sapiens
  misc_RNA (1)...(19): siRNA sense strand
gaaacagcuacauugaaga

SEQ ID NO: 719124 - RNA, 19 nt, Homo sapiens
  misc_RNA (1)...(19): siRNA sense strand
caggacugaugcaauucua

SEQ ID NO: 719125 - RNA, 19 nt, Homo sapiens
  misc_RNA (1)...(19): siRNA sense strand
cggcagauaccaaaggaaa

SEQ ID NO: 719126 - RNA, 19 nt, Homo sapiens
  misc_RNA (1)...(19): siRNA sense strand
acaagaagcagaucagagu

SEQ ID NO: 719127 - RNA, 19 nt, Homo sapiens
  misc_RNA (1)...(19): siRNA sense strand
ugacuuggaccucagauca

SEQ ID NO: 719128 - RNA, 19 nt, Homo sapiens
  misc_RNA (1)...(19): siRNA sense strand
guuggaaacagcuacauug

SEQ ID NO: 719129 - RNA, 19 nt, Homo sapiens
  misc_RNA (1)...(19): siRNA sense strand
cguuuaagaacuaggaaua

SEQ ID NO: 719130 - RNA, 19 nt, Homo sapiens
  misc_RNA (1)...(19): siRNA sense strand
aaacaucggcagauaccaa

SEQ ID NO: 719131 - RNA, 19 nt, Homo sapiens
  misc_RNA (1)...(19): siRNA sense strand
gcaccaaguggaauauuac

SEQ ID NO: 719132 - RNA, 19 nt, Homo sapiens
  misc_RNA (1)...(19): siRNA sense strand
gaacagucucuugaugguu

SEQ ID NO: 719133 - RNA, 19 nt, Homo sapiens
  misc_RNA (1)...(19): siRNA sense strand
cgagaacucuuccuaaaag

SEQ ID NO: 719134 - RNA, 19 nt, Homo sapiens
  misc_RNA (1)...(19): siRNA sense strand
cgagcucaguggauguuug

SEQ ID NO: 719135 - RNA, 19 nt, Homo sapiens
  misc_RNA (1)...(19): siRNA sense strand
uuucaggagucugugcuua

SEQ ID NO: 719136 - RNA, 19 nt, Homo sapiens
  misc_RNA (1)...(19): siRNA sense strand
aaacagcuacauugaagau

SEQ ID NO: 719137 - RNA, 19 nt, Homo sapiens
  misc_RNA (1)...(19): siRNA sense strand
uaaaagcaguagaagaaga

SEQ ID NO: 719138 - RNA, 19 nt, Homo sapiens
  misc_RNA (1)...(19): siRNA sense strand
ucuaugaagccaucaaguu

SEQ ID NO: 719139 - RNA, 19 nt, Homo sapiens
  misc_RNA (1)...(19): siRNA sense strand
caguggauguuugaacuug

SEQ ID NO: 719140 - RNA, 19 nt, Homo sapiens
  misc_RNA (1)...(19): siRNA sense strand
cagcagcaacucacauuuc

SEQ ID NO: 719141 - RNA, 19 nt, Homo sapiens
  misc_RNA (1)...(19): siRNA sense strand
cagaagcugaggaagauug

SEQ ID NO: 719142 - RNA, 19 nt, Homo sapiens
  misc_RNA (1)...(19): siRNA sense strand
cuggauacaucauucuugu

SEQ ID NO: 719143 - RNA, 19 nt, Homo sapiens
  misc_RNA (1)...(19): siRNA sense strand
cacaagacacagacaauca

SEQ ID NO: 719144 - RNA, 19 nt, Homo sapiens
  misc_RNA (1)...(19): siRNA sense strand
cgucuggccugcuugaaag

SEQ ID NO: 719145 - RNA, 19 nt, Homo sapiens
  misc_RNA (1)...(19): siRNA sense strand
ugucagagcagaugaugau

SEQ ID NO: 719146 - RNA, 19 nt, Homo sapiens
  misc_RNA (1)...(19): siRNA sense strand
ucagagcagaugaugauga

SEQ ID NO: 719147 - RNA, 19 nt, Homo sapiens
  misc_RNA (1)...(19): siRNA sense strand
auacaucauucuugucaca

SEQ ID NO: 719148 - RNA, 19 nt, Homo sapiens
  misc_RNA (1)...(19): siRNA sense strand
aagaagcagaucagaguuu

SEQ ID NO: 719149 - RNA, 19 nt, Homo sapiens
  misc_RNA (1)...(19): siRNA sense strand
ccuaaaagcaguagaagaa

SEQ ID NO: 719150 - RNA, 19 nt, Homo sapiens
  misc_RNA (1)...(19): siRNA sense strand
guacaagaagcagaucaga

SEQ ID NO: 719151 - RNA, 19 nt, Homo sapiens
  misc_RNA (1)...(19): siRNA sense strand
ucgugucccuguacaagaa

SEQ ID NO: 719152 - RNA, 19 nt, Homo sapiens
  misc_RNA (1)...(19): siRNA sense strand
caagacacagacaaucaga

SEQ ID NO: 719153 - RNA, 19 nt, Homo sapiens
  misc_RNA (1)...(19): siRNA sense strand
gagcuugagagcagucaga

SEQ ID NO: 719154 - RNA, 19 nt, Homo sapiens
  misc_RNA (1)...(19): siRNA sense strand
uaccugauauagaguucaa

SEQ ID NO: 719155 - RNA, 19 nt, Homo sapiens
  misc_RNA (1)...(19): siRNA sense strand
acacagacaaucagaccaa

SEQ ID NO: 719156 - RNA, 19 nt, Homo sapiens
  misc_RNA (1)...(19): siRNA sense strand
caagaagcagaucagaguu

SEQ ID NO: 719157 - RNA, 19 nt, Homo sapiens
  misc_RNA (1)...(19): siRNA sense strand
gguguaagcucuagcaauu

SEQ ID NO: 719158 - RNA, 19 nt, Homo sapiens
  misc_RNA (1)...(19): siRNA sense strand
ggaaacagcuacauugaag

SEQ ID NO: 719159 - RNA, 19 nt, Homo sapiens
  misc_RNA (1)...(19): siRNA sense strand
caauggagguccugaugua

SEQ ID NO: 719160 - RNA, 19 nt, Homo sapiens
  misc_RNA (1)...(19): siRNA sense strand
uguaagcucuagcaauuua

SEQ ID NO: 719161 - RNA, 19 nt, Homo sapiens
  misc_RNA (1)...(19): siRNA sense strand
aaauggagcucucuaugaa

SEQ ID NO: 719162 - RNA, 19 nt, Homo sapiens
  misc_RNA (1)...(19): siRNA sense strand
gcagucagauucacauauc

SEQ ID NO: 719163 - RNA, 19 nt, Homo sapiens
  misc_RNA (1)...(19): siRNA sense strand
ggcaccaaguggaauauua

SEQ ID NO: 719164 - RNA, 19 nt, Homo sapiens
  misc_RNA (1)...(19): siRNA sense strand
caucauucuugucacauua

SEQ ID NO: 719165 - RNA, 19 nt, Homo sapiens
  misc_RNA (1)...(19): siRNA sense strand
ggcagaagcuguauuaaac

SEQ ID NO: 719166 - RNA, 19 nt, Homo sapiens
  misc_RNA (1)...(19): siRNA sense strand
gaagauugucauucugaua

SEQ ID NO: 719167 - RNA, 19 nt, Homo sapiens
  misc_RNA (1)...(19): siRNA sense strand
uggcagaucucuuguccua

SEQ ID NO: 719168 - RNA, 19 nt, Homo sapiens
  misc_RNA (1)...(19): siRNA sense strand
gggcagaagcuguauuaaa

SEQ ID NO: 719169 - RNA, 19 nt, Homo sapiens
  misc_RNA (1)...(19): siRNA sense strand
aaacucaucuggauacauc

SEQ ID NO: 719170 - RNA, 19 nt, Homo sapiens
  misc_RNA (1)...(19): siRNA sense strand
caacaaacucaucuggaua

SEQ ID NO: 719171 - RNA, 19 nt, Homo sapiens
  misc_RNA (1)...(19): siRNA sense strand
gaagcuguauuaaacuugu

SEQ ID NO: 719172 - RNA, 19 nt, Homo sapiens
  misc_RNA (1)...(19): siRNA sense strand
caaaucaacuggugagacu

SEQ ID NO: 719173 - RNA, 19 nt, Homo sapiens
  misc_RNA (1)...(19): siRNA sense strand
cagagcagaugaugaugaa

SEQ ID NO: 719174 - RNA, 19 nt, Homo sapiens
  misc_RNA (1)...(19): siRNA sense strand
acagcuacauugaagauaa

SEQ ID NO: 719175 - RNA, 19 nt, Homo sapiens
  misc_RNA (1)...(19): siRNA sense strand
ugaaaguccugcugaaaca

SEQ ID NO: 719176 - RNA, 19 nt, Homo sapiens
  misc_RNA (1)...(19): siRNA sense strand
ccacuugacuauaaauaca

SEQ ID NO: 719177 - RNA, 19 nt, Homo sapiens
  misc_RNA (1)...(19): siRNA sense strand
uaccaggacugaugcaauu

SEQ ID NO: 719178 - RNA, 19 nt, Homo sapiens
  misc_RNA (1)...(19): siRNA sense strand
ccagagacccugaaauaug

SEQ ID NO: 719179 - RNA, 19 nt, Homo sapiens
  misc_RNA (1)...(19): siRNA sense strand
gcagaucucuuguccuacu

SEQ ID NO: 719180 - RNA, 19 nt, Homo sapiens
  misc_RNA (1)...(19): siRNA sense strand
ucaacaaacucaucuggau

SEQ ID NO: 719181 - RNA, 19 nt, Homo sapiens
  misc_RNA (1)...(19): siRNA sense strand
gagcagaugaugaugaaga

SEQ ID NO: 719182 - RNA, 19 nt, Homo sapiens
  misc_RNA (1)...(19): siRNA sense strand
ggaacagucucuugauggu

SEQ ID NO: 719183 - RNA, 19 nt, Homo sapiens
  misc_RNA (1)...(19): siRNA sense strand
gauggguggugucuaguga

SEQ ID NO: 719184 - RNA, 19 nt, Homo sapiens
  misc_RNA (1)...(19): siRNA sense strand
cagagacccugaaauaugg

SEQ ID NO: 719185 - RNA, 19 nt, Homo sapiens
  misc_RNA (1)...(19): siRNA sense strand
ugaggaagauugucauucu

SEQ ID NO: 719186 - RNA, 19 nt, Homo sapiens
  misc_RNA (1)...(19): siRNA sense strand
ggcagaagcugaggaagau

SEQ ID NO: 719187 - RNA, 19 nt, Homo sapiens
  misc_RNA (1)...(19): siRNA sense strand
cagaagcuguauuaaacuu

SEQ ID NO: 719188 - RNA, 19 nt, Homo sapiens
  misc_RNA (1)...(19): siRNA sense strand
ugccagagacccugaaaua

SEQ ID NO: 719189 - RNA, 19 nt, Homo sapiens
  misc_RNA (1)...(19): siRNA sense strand
ugaacuugcuccaggugua

SEQ ID NO: 719190 - RNA, 19 nt, Homo sapiens
  misc_RNA (1)...(19): siRNA sense strand
gaacuugcuccagguguaa

SEQ ID NO: 719191 - RNA, 19 nt, Homo sapiens
  misc_RNA (1)...(19): siRNA sense strand
gguggugucuagugacuug

SEQ ID NO: 719192 - RNA, 19 nt, Homo sapiens
  misc_RNA (1)...(19): siRNA sense strand
uaucagugcugccaaugga

SEQ ID NO: 719193 - RNA, 19 nt, Homo sapiens
  misc_RNA (1)...(19): siRNA sense strand
ggauacaucauucuuguca

SEQ ID NO: 719194 - RNA, 19 nt, Homo sapiens
  misc_RNA (1)...(19): siRNA sense strand
gagccucaguccauuguuc

SEQ ID NO: 719195 - RNA, 19 nt, Homo sapiens
  misc_RNA (1)...(19): siRNA sense strand
ggaagauugucauucugau

SEQ ID NO: 719196 - RNA, 19 nt, Homo sapiens
  misc_RNA (1)...(19): siRNA sense strand
guccauuguuccacguuua

SEQ ID NO: 719197 - RNA, 19 nt, Homo sapiens
  misc_RNA (1)...(19): siRNA sense strand
cuaugaagccaucaaguuu

SEQ ID NO: 719198 - RNA, 19 nt, Homo sapiens
  misc_RNA (1)...(19): siRNA sense strand
aacagucucuugaugguuu

SEQ ID NO: 719199 - RNA, 19 nt, Homo sapiens
  misc_RNA (1)...(19): siRNA sense strand
gauggcguguauaucagua

SEQ ID NO: 719200 - RNA, 19 nt, Homo sapiens
  misc_RNA (1)...(19): siRNA sense strand
ucaggagucugugcuuaaa

SEQ ID NO: 719201 - RNA, 19 nt, Homo sapiens
  misc_RNA (1)...(19): siRNA sense strand
uaaugaugaugacagcaaa

SEQ ID NO: 719202 - RNA, 19 nt, Homo sapiens
  misc_RNA (1)...(19): siRNA sense strand
caccagagguucaacaaac

SEQ ID NO: 719203 - RNA, 19 nt, Homo sapiens
  misc_RNA (1)...(19): siRNA sense strand
caaucagaccaaaguauuu

SEQ ID NO: 719204 - RNA, 19 nt, Homo sapiens
  misc_RNA (1)...(19): siRNA sense strand
ugaagagccucaguccauu

SEQ ID NO: 719205 - RNA, 19 nt, Homo sapiens
  misc_RNA (1)...(19): siRNA sense strand
gaagagccucaguccauug

SEQ ID NO: 719206 - RNA, 19 nt, Homo sapiens
  misc_RNA (1)...(19): siRNA sense strand
caaaauggcagaucucuug

SEQ ID NO: 719207 - RNA, 19 nt, Homo sapiens
  misc_RNA (1)...(19): siRNA sense strand
aggcacaacuccagauguu

SEQ ID NO: 719208 - RNA, 19 nt, Homo sapiens
  misc_RNA (1)...(19): siRNA sense strand
ucagaucauuggagcaguu

SEQ ID NO: 719209 - RNA, 19 nt, Homo sapiens
  misc_RNA (1)...(19): siRNA sense strand
aaaugaaaguccugcugaa

SEQ ID NO: 719210 - RNA, 19 nt, Homo sapiens
  misc_RNA (1)...(19): siRNA sense strand
gcaacuuguaccugauaua

SEQ ID NO: 719211 - RNA, 19 nt, Homo sapiens
  misc_RNA (1)...(19): siRNA sense strand
gcucgagaacucuuccuaa

SEQ ID NO: 719212 - RNA, 19 nt, Homo sapiens
  misc_RNA (1)...(19): siRNA sense strand
ggaauauuacagguacaua

SEQ ID NO: 719213 - RNA, 19 nt, Homo sapiens
  misc_RNA (1)...(19): siRNA sense strand
guagggcuaugcaacuugu

SEQ ID NO: 719214 - RNA, 19 nt, Homo sapiens
  misc_RNA (1)...(19): siRNA sense strand
gagcucaguggauguuuga

SEQ ID NO: 719215 - RNA, 19 nt, Homo sapiens
  misc_RNA (1)...(19): siRNA sense strand
acaaucagaccaaaguauu

SEQ ID NO: 719216 - RNA, 19 nt, Homo sapiens
  misc_RNA (1)...(19): siRNA sense strand
gaggaagauugucauucug

SEQ ID NO: 719217 - RNA, 19 nt, Homo sapiens
  misc_RNA (1)...(19): siRNA sense strand
cagcuacauugaagauaau

SEQ ID NO: 719218 - RNA, 19 nt, Homo sapiens
  misc_RNA (1)...(19): siRNA sense strand
cucgagaacucuuccuaaa

SEQ ID NO: 719219 - RNA, 19 nt, Homo sapiens
  misc_RNA (1)...(19): siRNA sense strand
cagaaaacaucggcagaua

SEQ ID NO: 719220 - RNA, 19 nt, Homo sapiens
  misc_RNA (1)...(19): siRNA sense strand
gacaaucagaccaaaguau

SEQ ID NO: 719221 - RNA, 19 nt, Homo sapiens
  misc_RNA (1)...(19): siRNA sense strand
gagcagucagauucacaua

SEQ ID NO: 719222 - RNA, 19 nt, Homo sapiens
  misc_RNA (1)...(19): siRNA sense strand
caacuuguaccugauauag

SEQ ID NO: 719223 - RNA, 19 nt, Homo sapiens
  misc_RNA (1)...(19): siRNA sense strand
gaaacagcuacauugaaga

SEQ ID NO: 719224 - RNA, 19 nt, Homo sapiens
  misc_RNA (1)...(19): siRNA sense strand
caggacugaugcaauucua

SEQ ID NO: 719225 - RNA, 19 nt, Homo sapiens
  misc_RNA (1)...(19): siRNA sense strand
cggcagauaccaaaggaaa

SEQ ID NO: 719226 - RNA, 19 nt, Homo sapiens
  misc_RNA (1)...(19): siRNA sense strand
acaagaagcagaucagagu

SEQ ID NO: 719227 - RNA, 19 nt, Homo sapiens
  misc_RNA (1)...(19): siRNA sense strand
ugacuuggaccucagauca

SEQ ID NO: 719228 - RNA, 19 nt, Homo sapiens
  misc_RNA (1)...(19): siRNA sense strand
guuggaaacagcuacauug

SEQ ID NO: 719229 - RNA, 19 nt, Homo sapiens
  misc_RNA (1)...(19): siRNA sense strand
cguuuaagaacuaggaaua

SEQ ID NO: 719230 - RNA, 19 nt, Homo sapiens
  misc_RNA (1)...(19): siRNA sense strand
aaacaucggcagauaccaa

SEQ ID NO: 719231 - RNA, 19 nt, Homo sapiens
  misc_RNA (1)...(19): siRNA sense strand
gcaccaaguggaauauuac

SEQ ID NO: 719232 - RNA, 19 nt, Homo sapiens
  misc_RNA (1)...(19): siRNA sense strand
gaacagucucuugaugguu

SEQ ID NO: 719233 - RNA, 19 nt, Homo sapiens
  misc_RNA (1)...(19): siRNA sense strand
cgagaacucuuccuaaaag

SEQ ID NO: 719234 - RNA, 19 nt, Homo sapiens
  misc_RNA (1)...(19): siRNA sense strand
cgagcucaguggauguuug

SEQ ID NO: 719235 - RNA, 19 nt, Homo sapiens
  misc_RNA (1)...(19): siRNA sense strand
uuucaggagucugugcuua

SEQ ID NO: 719236 - RNA, 19 nt, Homo sapiens
  misc_RNA (1)...(19): siRNA sense strand
aaacagcuacauugaagau

SEQ ID NO: 719237 - RNA, 19 nt, Homo sapiens
  misc_RNA (1)...(19): siRNA sense strand
uaaaagcaguagaagaaga

SEQ ID NO: 719238 - RNA, 19 nt, Homo sapiens
  misc_RNA (1)...(19): siRNA sense strand
ucuaugaagccaucaaguu

SEQ ID NO: 719239 - RNA, 19 nt, Homo sapiens
  misc_RNA (1)...(19): siRNA sense strand
caguggauguuugaacuug

SEQ ID NO: 719240 - RNA, 19 nt, Homo sapiens
  misc_RNA (1)...(19): siRNA sense strand
cagcagcaacucacauuuc

SEQ ID NO: 719241 - RNA, 19 nt, Homo sapiens
  misc_RNA (1)...(19): siRNA sense strand
cagaagcugaggaagauug

SEQ ID NO: 719242 - RNA, 19 nt, Homo sapiens
  misc_RNA (1)...(19): siRNA sense strand
cuggauacaucauucuugu

SEQ ID NO: 719243 - RNA, 19 nt, Homo sapiens
  misc_RNA (1)...(19): siRNA sense strand
cacaagacacagacaauca

SEQ ID NO: 719244 - RNA, 19 nt, Homo sapiens
  misc_RNA (1)...(19): siRNA sense strand
cgucuggccugcuugaaag

SEQ ID NO: 719245 - RNA, 19 nt, Homo sapiens
  misc_RNA (1)...(19): siRNA sense strand
ugucagagcagaugaugau

SEQ ID NO: 719246 - RNA, 19 nt, Homo sapiens
  misc_RNA (1)...(19): siRNA sense strand
ucagagcagaugaugauga

SEQ ID NO: 719247 - RNA, 19 nt, Homo sapiens
  misc_RNA (1)...(19): siRNA sense strand
auacaucauucuugucaca

SEQ ID NO: 719248 - RNA, 19 nt, Homo sapiens
  misc_RNA (1)...(19): siRNA sense strand
aagaagcagaucagaguuu

SEQ ID NO: 719249 - RNA, 19 nt, Homo sapiens
  misc_RNA (1)...(19): siRNA sense strand
ccuaaaagcaguagaagaa

SEQ ID NO: 719250 - RNA, 19 nt, Homo sapiens
  misc_RNA (1)...(19): siRNA sense strand
guacaagaagcagaucaga

SEQ ID NO: 719251 - RNA, 19 nt, Homo sapiens
  misc_RNA (1)...(19): siRNA sense strand
ucgugucccuguacaagaa

SEQ ID NO: 719252 - RNA, 19 nt, Homo sapiens
  misc_RNA (1)...(19): siRNA sense strand
caagacacagacaaucaga

SEQ ID NO: 719253 - RNA, 19 nt, Homo sapiens
  misc_RNA (1)...(19): siRNA sense strand
gagcuugagagcagucaga

SEQ ID NO: 719254 - RNA, 19 nt, Homo sapiens
  misc_RNA (1)...(19): siRNA sense strand
uaccugauauagaguucaa

SEQ ID NO: 719255 - RNA, 19 nt, Homo sapiens
  misc_RNA (1)...(19): siRNA sense strand
acacagacaaucagaccaa

SEQ ID NO: 719256 - RNA, 19 nt, Homo sapiens
  misc_RNA (1)...(19): siRNA sense strand
caagaagcagaucagaguu

SEQ ID NO: 719257 - RNA, 19 nt, Homo sapiens
  misc_RNA (1)...(19): siRNA sense strand
ggaaacagcuacauugaag

SEQ ID NO: 719258 - RNA, 19 nt, Homo sapiens
  misc_RNA (1)...(19): siRNA sense strand
caauggagguccugaugua

SEQ ID NO: 719259 - RNA, 19 nt, Homo sapiens
  misc_RNA (1)...(19): siRNA sense strand
gcagucagauucacauauc

SEQ ID NO: 719260 - RNA, 19 nt, Homo sapiens
  misc_RNA (1)...(19): siRNA sense strand
ggcaccaaguggaauauua

SEQ ID NO: 719261 - RNA, 19 nt, Homo sapiens
  misc_RNA (1)...(19): siRNA sense strand
caucauucuugucacauua

SEQ ID NO: 719262 - RNA, 19 nt, Homo sapiens
  misc_RNA (1)...(19): siRNA sense strand
ggcagaagcuguauuaaac

SEQ ID NO: 719263 - RNA, 19 nt, Homo sapiens
  misc_RNA (1)...(19): siRNA sense strand
uggcagaucucuuguccua

SEQ ID NO: 719264 - RNA, 19 nt, Homo sapiens
  misc_RNA (1)...(19): siRNA sense strand
gggcagaagcuguauuaaa

SEQ ID NO: 719265 - RNA, 19 nt, Homo sapiens
  misc_RNA (1)...(19): siRNA sense strand
aaacucaucuggauacauc

SEQ ID NO: 719266 - RNA, 19 nt, Homo sapiens
  misc_RNA (1)...(19): siRNA sense strand
caacaaacucaucuggaua

SEQ ID NO: 719267 - RNA, 19 nt, Homo sapiens
  misc_RNA (1)...(19): siRNA sense strand
gaagcuguauuaaacuugu

SEQ ID NO: 719268 - RNA, 19 nt, Homo sapiens
  misc_RNA (1)...(19): siRNA sense strand
caaaucaacuggugagacu

SEQ ID NO: 719269 - RNA, 19 nt, Homo sapiens
  misc_RNA (1)...(19): siRNA sense strand
acagcuacauugaagauaa

SEQ ID NO: 719270 - RNA, 19 nt, Homo sapiens
  misc_RNA (1)...(19): siRNA sense strand
ccagagacccugaaauaug

SEQ ID NO: 719271 - RNA, 19 nt, Homo sapiens
  misc_RNA (1)...(19): siRNA sense strand
ccacuugacuauaaauaca

SEQ ID NO: 719272 - RNA, 19 nt, Homo sapiens
  misc_RNA (1)...(19): siRNA sense strand
uaccaggacugaugcaauu

SEQ ID NO: 719273 - RNA, 19 nt, Homo sapiens
  misc_RNA (1)...(19): siRNA sense strand
gcagaucucuuguccuacu

SEQ ID NO: 719274 - RNA, 19 nt, Homo sapiens
  misc_RNA (1)...(19): siRNA sense strand
ucaacaaacucaucuggau

SEQ ID NO: 719275 - RNA, 19 nt, Homo sapiens
  misc_RNA (1)...(19): siRNA sense strand
gauggguggugucuaguga

SEQ ID NO: 719276 - RNA, 19 nt, Homo sapiens
  misc_RNA (1)...(19): siRNA sense strand
ggaacagucucuugauggu

SEQ ID NO: 719277 - RNA, 19 nt, Homo sapiens
  misc_RNA (1)...(19): siRNA sense strand
cagagacccugaaauaugg

SEQ ID NO: 719278 - RNA, 19 nt, Homo sapiens
  misc_RNA (1)...(19): siRNA sense strand
ugccagagacccugaaaua

SEQ ID NO: 719279 - RNA, 19 nt, Homo sapiens
  misc_RNA (1)...(19): siRNA sense strand
cagaagcuguauuaaacuu

SEQ ID NO: 719280 - RNA, 19 nt, Homo sapiens
  misc_RNA (1)...(19): siRNA sense strand
gguggugucuagugacuug

SEQ ID NO: 719281 - RNA, 19 nt, Homo sapiens
  misc_RNA (1)...(19): siRNA sense strand
uaucagugcugccaaugga

SEQ ID NO: 719282 - RNA, 19 nt, Homo sapiens
  misc_RNA (1)...(19): siRNA sense strand
ggauacaucauucuuguca

SEQ ID NO: 719283 - RNA, 19 nt, Homo sapiens
  misc_RNA (1)...(19): siRNA sense strand
gagccucaguccauuguuc

SEQ ID NO: 719284 - RNA, 19 nt, Homo sapiens
  misc_RNA (1)...(19): siRNA sense strand
guccauuguuccacguuua

SEQ ID NO: 719285 - RNA, 19 nt, Homo sapiens
  misc_RNA (1)...(19): siRNA sense strand
ucaggagucugugcuuaaa

SEQ ID NO: 719286 - RNA, 19 nt, Homo sapiens
  misc_RNA (1)...(19): siRNA sense strand
aacagucucuugaugguuu

SEQ ID NO: 719287 - RNA, 19 nt, Homo sapiens
  misc_RNA (1)...(19): siRNA sense strand
gauggcguguauaucagua

SEQ ID NO: 719288 - RNA, 19 nt, Homo sapiens
  misc_RNA (1)...(19): siRNA sense strand
uaaugaugaugacagcaaa

SEQ ID NO: 719289 - RNA, 19 nt, Homo sapiens
  misc_RNA (1)...(19): siRNA sense strand
caccagagguucaacaaac

SEQ ID NO: 719290 - RNA, 19 nt, Homo sapiens
  misc_RNA (1)...(19): siRNA sense strand
caaucagaccaaaguauuu

SEQ ID NO: 719291 - RNA, 19 nt, Homo sapiens
  misc_RNA (1)...(19): siRNA sense strand
ugaagagccucaguccauu

SEQ ID NO: 719292 - RNA, 19 nt, Homo sapiens
  misc_RNA (1)...(19): siRNA sense strand
gaagagccucaguccauug

SEQ ID NO: 719293 - RNA, 19 nt, Homo sapiens
  misc_RNA (1)...(19): siRNA sense strand
caaaauggcagaucucuug

SEQ ID NO: 719294 - RNA, 19 nt, Homo sapiens
  misc_RNA (1)...(19): siRNA sense strand
ucagaucauuggagcaguu

SEQ ID NO: 719295 - RNA, 19 nt, Homo sapiens
  misc_RNA (1)...(19): siRNA sense strand
gcaacuuguaccugauaua

SEQ ID NO: 719296 - RNA, 19 nt, Homo sapiens
  misc_RNA (1)...(19): siRNA sense strand
ggaauauuacagguacaua

SEQ ID NO: 719297 - RNA, 19 nt, Homo sapiens
  misc_RNA (1)...(19): siRNA sense strand
cagcuacauugaagauaau

SEQ ID NO: 719298 - RNA, 19 nt, Homo sapiens
  misc_RNA (1)...(19): siRNA sense strand
acaaucagaccaaaguauu

SEQ ID NO: 719299 - RNA, 19 nt, Homo sapiens
  misc_RNA (1)...(19): siRNA sense strand
gagcagucagauucacaua

SEQ ID NO: 719300 - RNA, 19 nt, Homo sapiens
  misc_RNA (1)...(19): siRNA sense strand
gacaaucagaccaaaguau

SEQ ID NO: 719301 - RNA, 19 nt, Homo sapiens
  misc_RNA (1)...(19): siRNA sense strand
caacuuguaccugauauag

SEQ ID NO: 719302 - RNA, 19 nt, Homo sapiens
  misc_RNA (1)...(19): siRNA sense strand
caggacugaugcaauucua

SEQ ID NO: 719303 - RNA, 19 nt, Homo sapiens
  misc_RNA (1)...(19): siRNA sense strand
gaaacagcuacauugaaga

SEQ ID NO: 719304 - RNA, 19 nt, Homo sapiens
  misc_RNA (1)...(19): siRNA sense strand
ugacuuggaccucagauca

SEQ ID NO: 719305 - RNA, 19 nt, Homo sapiens
  misc_RNA (1)...(19): siRNA sense strand
acaagaagcagaucagagu

SEQ ID NO: 719306 - RNA, 19 nt, Homo sapiens
  misc_RNA (1)...(19): siRNA sense strand
guuggaaacagcuacauug

SEQ ID NO: 719307 - RNA, 19 nt, Homo sapiens
  misc_RNA (1)...(19): siRNA sense strand
cguuuaagaacuaggaaua

SEQ ID NO: 719308 - RNA, 19 nt, Homo sapiens
  misc_RNA (1)...(19): siRNA sense strand
gaacagucucuugaugguu

SEQ ID NO: 719309 - RNA, 19 nt, Homo sapiens
  misc_RNA (1)...(19): siRNA sense strand
gcaccaaguggaauauuac

SEQ ID NO: 719310 - RNA, 19 nt, Homo sapiens
  misc_RNA (1)...(19): siRNA sense strand
uuucaggagucugugcuua

SEQ ID NO: 719311 - RNA, 19 nt, Homo sapiens
  misc_RNA (1)...(19): siRNA sense strand
aaacagcuacauugaagau

SEQ ID NO: 719312 - RNA, 19 nt, Homo sapiens
  misc_RNA (1)...(19): siRNA sense strand
cagcagcaacucacauuuc

SEQ ID NO: 719313 - RNA, 19 nt, Homo sapiens
  misc_RNA (1)...(19): siRNA sense strand
cgucuggccugcuugaaag

SEQ ID NO: 719314 - RNA, 19 nt, Homo sapiens
  misc_RNA (1)...(19): siRNA sense strand
cuggauacaucauucuugu

SEQ ID NO: 719315 - RNA, 19 nt, Homo sapiens
  misc_RNA (1)...(19): siRNA sense strand
cacaagacacagacaauca

SEQ ID NO: 719316 - RNA, 19 nt, Homo sapiens
  misc_RNA (1)...(19): siRNA sense strand
aagaagcagaucagaguuu

SEQ ID NO: 719317 - RNA, 19 nt, Homo sapiens
  misc_RNA (1)...(19): siRNA sense strand
auacaucauucuugucaca

SEQ ID NO: 719318 - RNA, 19 nt, Homo sapiens
  misc_RNA (1)...(19): siRNA sense strand
gagcuugagagcagucaga

SEQ ID NO: 719319 - RNA, 19 nt, Homo sapiens
  misc_RNA (1)...(19): siRNA sense strand
uaccugauauagaguucaa

SEQ ID NO: 719320 - RNA, 19 nt, Homo sapiens
  misc_RNA (1)...(19): siRNA sense strand
guacaagaagcagaucaga

SEQ ID NO: 719321 - RNA, 19 nt, Homo sapiens
  misc_RNA (1)...(19): siRNA sense strand
ucgugucccuguacaagaa

SEQ ID NO: 719322 - RNA, 19 nt, Homo sapiens
  misc_RNA (1)...(19): siRNA sense strand
caagacacagacaaucaga

SEQ ID NO: 719323 - RNA, 19 nt, Homo sapiens
  misc_RNA (1)...(19): siRNA sense strand
gaagauaaugaugaugaca

SEQ ID NO: 719324 - RNA, 19 nt, Homo sapiens
  misc_RNA (1)...(19): siRNA sense strand
caagaagcagaucagaguu

SEQ ID NO: 719325 - RNA, 19 nt, Homo sapiens
  misc_RNA (1)...(19): siRNA sense strand
acacagacaaucagaccaa

SEQ ID NO: 719326 - RNA, 19 nt, Homo sapiens
  misc_RNA (1)...(19): siRNA sense strand
gguuugauggcguguauau

SEQ ID NO: 719327 - RNA, 19 nt, Homo sapiens
  misc_RNA (1)...(19): siRNA sense strand
gccagagacccugaaauau

SEQ ID NO: 719328 - RNA, 19 nt, Homo sapiens
  misc_RNA (1)...(19): siRNA sense strand
cuugagagcagucagauuc

SEQ ID NO: 719329 - RNA, 19 nt, Homo sapiens
  misc_RNA (1)...(19): siRNA sense strand
acaucauucuugucacauu

SEQ ID NO: 719330 - RNA, 19 nt, Homo sapiens
  misc_RNA (1)...(19): siRNA sense strand
ggacugaugcaauucuacu

SEQ ID NO: 719331 - RNA, 19 nt, Homo sapiens
  misc_RNA (1)...(19): siRNA sense strand
ucacauuucaggagucugu

SEQ ID NO: 719332 - RNA, 19 nt, Homo sapiens
  misc_RNA (1)...(19): siRNA sense strand
cagacaaucagaccaaagu

SEQ ID NO: 719333 - RNA, 19 nt, Homo sapiens
  misc_RNA (1)...(19): siRNA sense strand
caauucuacugggucacua

SEQ ID NO: 719334 - RNA, 19 nt, Homo sapiens
  misc_RNA (1)...(19): siRNA sense strand
gcagaagcuguauuaaacu

SEQ ID NO: 719335 - RNA, 19 nt, Homo sapiens
  misc_RNA (1)...(19): siRNA sense strand
gccaauggagguccugaug

SEQ ID NO: 719336 - RNA, 19 nt, Homo sapiens
  misc_RNA (1)...(19): siRNA sense strand
uggcguguauaucaguaaa

SEQ ID NO: 719337 - RNA, 19 nt, Homo sapiens
  misc_RNA (1)...(19): siRNA sense strand
agcagcaacucacauuuca

SEQ ID NO: 719338 - RNA, 19 nt, Homo sapiens
  misc_RNA (1)...(19): siRNA sense strand
gcgucuggccugcuugaaa

SEQ ID NO: 719339 - RNA, 19 nt, Homo sapiens
  misc_RNA (1)...(19): siRNA sense strand
ggugauggcguuggaaaca

SEQ ID NO: 719340 - RNA, 19 nt, Homo sapiens
  misc_RNA (1)...(19): siRNA sense strand
acauaucagugcugccaau

SEQ ID NO: 719341 - RNA, 19 nt, Homo sapiens
  misc_RNA (1)...(19): siRNA sense strand
ucaucuggauacaucauuc

SEQ ID NO: 719342 - RNA, 19 nt, Homo sapiens
  misc_RNA (1)...(19): siRNA sense strand
uggaaacagcuacauugaa

SEQ ID NO: 719343 - RNA, 19 nt, Homo sapiens
  misc_RNA (1)...(19): siRNA sense strand
cacagacaaucagaccaaa

SEQ ID NO: 719344 - RNA, 19 nt, Homo sapiens
  misc_RNA (1)...(19): siRNA sense strand
aggaauaccaggacugaug

SEQ ID NO: 719345 - RNA, 19 nt, Homo sapiens
  misc_RNA (1)...(19): siRNA sense strand
uuacagguacauaagauuc

SEQ ID NO: 719346 - RNA, 19 nt, Homo sapiens
  misc_RNA (1)...(19): siRNA sense strand
uauacccggucuccagaug

SEQ ID NO: 719347 - RNA, 19 nt, Homo sapiens
  misc_RNA (1)...(19): siRNA sense strand
gcuacacagcuuucucaga

SEQ ID NO: 719348 - RNA, 19 nt, Homo sapiens
  misc_RNA (1)...(19): siRNA sense strand
gagauugacaagauguaca

SEQ ID NO: 719349 - RNA, 19 nt, Homo sapiens
  misc_RNA (1)...(19): siRNA sense strand
agacaaucagaccaaagua

SEQ ID NO: 719350 - RNA, 19 nt, Homo sapiens
  misc_RNA (1)...(19): siRNA sense strand
gagagcagucagauucaca

SEQ ID NO: 719351 - RNA, 19 nt, Homo sapiens
  misc_RNA (1)...(19): siRNA sense strand
acuuguaccugauauagag

SEQ ID NO: 719352 - RNA, 19 nt, Homo sapiens
  misc_RNA (1)...(19): siRNA sense strand
ggccaugugaugauguuga

SEQ ID NO: 719353 - RNA, 19 nt, Homo sapiens
  misc_RNA (1)...(19): siRNA sense strand
gaucauuggagcaguuguc

SEQ ID NO: 719354 - RNA, 19 nt, Homo sapiens
  misc_RNA (1)...(19): siRNA sense strand
cuauagagccuggcaccaa

SEQ ID NO: 719355 - RNA, 19 nt, Homo sapiens
  misc_RNA (1)...(19): siRNA sense strand
agucagugcuuuugagauu

SEQ ID NO: 719356 - RNA, 19 nt, Homo sapiens
  misc_RNA (1)...(19): siRNA sense strand
ccagcagcaacucacauuu

SEQ ID NO: 719357 - RNA, 19 nt, Homo sapiens
  misc_RNA (1)...(19): siRNA sense strand
gguguaagcucuagcaauu

SEQ ID NO: 719358 - RNA, 19 nt, Homo sapiens
  misc_RNA (1)...(19): siRNA sense strand
ggaaacagcuacauugaag

SEQ ID NO: 719359 - RNA, 19 nt, Homo sapiens
  misc_RNA (1)...(19): siRNA sense strand
caauggagguccugaugua

SEQ ID NO: 719360 - RNA, 19 nt, Homo sapiens
  misc_RNA (1)...(19): siRNA sense strand
uguaagcucuagcaauuua

SEQ ID NO: 719361 - RNA, 19 nt, Homo sapiens
  misc_RNA (1)...(19): siRNA sense strand
aaauggagcucucuaugaa

SEQ ID NO: 719362 - RNA, 19 nt, Homo sapiens
  misc_RNA (1)...(19): siRNA sense strand
gcagucagauucacauauc

SEQ ID NO: 719363 - RNA, 19 nt, Homo sapiens
  misc_RNA (1)...(19): siRNA sense strand
ggcaccaaguggaauauua

SEQ ID NO: 719364 - RNA, 19 nt, Homo sapiens
  misc_RNA (1)...(19): siRNA sense strand
caucauucuugucacauua

SEQ ID NO: 719365 - RNA, 19 nt, Homo sapiens
  misc_RNA (1)...(19): siRNA sense strand
ggcagaagcuguauuaaac

SEQ ID NO: 719366 - RNA, 19 nt, Homo sapiens
  misc_RNA (1)...(19): siRNA sense strand
gaagauugucauucugaua

SEQ ID NO: 719367 - RNA, 19 nt, Homo sapiens
  misc_RNA (1)...(19): siRNA sense strand
uggcagaucucuuguccua

SEQ ID NO: 719368 - RNA, 19 nt, Homo sapiens
  misc_RNA (1)...(19): siRNA sense strand
gggcagaagcuguauuaaa

SEQ ID NO: 719369 - RNA, 19 nt, Homo sapiens
  misc_RNA (1)...(19): siRNA sense strand
aaacucaucuggauacauc

SEQ ID NO: 719370 - RNA, 19 nt, Homo sapiens
  misc_RNA (1)...(19): siRNA sense strand
caacaaacucaucuggaua

SEQ ID NO: 719371 - RNA, 19 nt, Homo sapiens
  misc_RNA (1)...(19): siRNA sense strand
gaagcuguauuaaacuugu

SEQ ID NO: 719372 - RNA, 19 nt, Homo sapiens
  misc_RNA (1)...(19): siRNA sense strand
caaaucaacuggugagacu

SEQ ID NO: 719373 - RNA, 19 nt, Homo sapiens
  misc_RNA (1)...(19): siRNA sense strand
cagagcagaugaugaugaa

SEQ ID NO: 719374 - RNA, 19 nt, Homo sapiens
  misc_RNA (1)...(19): siRNA sense strand
acagcuacauugaagauaa

SEQ ID NO: 719375 - RNA, 19 nt, Homo sapiens
  misc_RNA (1)...(19): siRNA sense strand
ugaaaguccugcugaaaca

SEQ ID NO: 719376 - RNA, 19 nt, Homo sapiens
  misc_RNA (1)...(19): siRNA sense strand
ccacuugacuauaaauaca

SEQ ID NO: 719377 - RNA, 19 nt, Homo sapiens
  misc_RNA (1)...(19): siRNA sense strand
uaccaggacugaugcaauu

SEQ ID NO: 719378 - RNA, 19 nt, Homo sapiens
  misc_RNA (1)...(19): siRNA sense strand
ccagagacccugaaauaug

SEQ ID NO: 719379 - RNA, 19 nt, Homo sapiens
  misc_RNA (1)...(19): siRNA sense strand
gcagaucucuuguccuacu

SEQ ID NO: 719380 - RNA, 19 nt, Homo sapiens
  misc_RNA (1)...(19): siRNA sense strand
ucaacaaacucaucuggau

SEQ ID NO: 719381 - RNA, 19 nt, Homo sapiens
  misc_RNA (1)...(19): siRNA sense strand
gagcagaugaugaugaaga

SEQ ID NO: 719382 - RNA, 19 nt, Homo sapiens
  misc_RNA (1)...(19): siRNA sense strand
ggaacagucucuugauggu

SEQ ID NO: 719383 - RNA, 19 nt, Homo sapiens
  misc_RNA (1)...(19): siRNA sense strand
gauggguggugucuaguga

SEQ ID NO: 719384 - RNA, 19 nt, Homo sapiens
  misc_RNA (1)...(19): siRNA sense strand
cagagacccugaaauaugg

SEQ ID NO: 719385 - RNA, 19 nt, Homo sapiens
  misc_RNA (1)...(19): siRNA sense strand
ugaggaagauugucauucu

SEQ ID NO: 719386 - RNA, 19 nt, Homo sapiens
  misc_RNA (1)...(19): siRNA sense strand
ggcagaagcugaggaagau

SEQ ID NO: 719387 - RNA, 19 nt, Homo sapiens
  misc_RNA (1)...(19): siRNA sense strand
cagaagcuguauuaaacuu

SEQ ID NO: 719388 - RNA, 19 nt, Homo sapiens
  misc_RNA (1)...(19): siRNA sense strand
ugccagagacccugaaaua

SEQ ID NO: 719389 - RNA, 19 nt, Homo sapiens
  misc_RNA (1)...(19): siRNA sense strand
ugaacuugcuccaggugua

SEQ ID NO: 719390 - RNA, 19 nt, Homo sapiens
  misc_RNA (1)...(19): siRNA sense strand
gaacuugcuccagguguaa

SEQ ID NO: 719391 - RNA, 19 nt, Homo sapiens
  misc_RNA (1)...(19): siRNA sense strand
gguggugucuagugacuug

SEQ ID NO: 719392 - RNA, 19 nt, Homo sapiens
  misc_RNA (1)...(19): siRNA sense strand
uaucagugcugccaaugga

SEQ ID NO: 719393 - RNA, 19 nt, Homo sapiens
  misc_RNA (1)...(19): siRNA sense strand
ggauacaucauucuuguca

SEQ ID NO: 719394 - RNA, 19 nt, Homo sapiens
  misc_RNA (1)...(19): siRNA sense strand
gagccucaguccauuguuc

SEQ ID NO: 719395 - RNA, 19 nt, Homo sapiens
  misc_RNA (1)...(19): siRNA sense strand
ggaagauugucauucugau

SEQ ID NO: 719396 - RNA, 19 nt, Homo sapiens
  misc_RNA (1)...(19): siRNA sense strand
guccauuguuccacguuua

SEQ ID NO: 719397 - RNA, 19 nt, Homo sapiens
  misc_RNA (1)...(19): siRNA sense strand
cuaugaagccaucaaguuu

SEQ ID NO: 719398 - RNA, 19 nt, Homo sapiens
  misc_RNA (1)...(19): siRNA sense strand
aacagucucuugaugguuu

SEQ ID NO: 719399 - RNA, 19 nt, Homo sapiens
  misc_RNA (1)...(19): siRNA sense strand
gauggcguguauaucagua

SEQ ID NO: 719400 - RNA, 19 nt, Homo sapiens
  misc_RNA (1)...(19): siRNA sense strand
ucaggagucugugcuuaaa

SEQ ID NO: 719401 - RNA, 19 nt, Homo sapiens
  misc_RNA (1)...(19): siRNA sense strand
uaaugaugaugacagcaaa

SEQ ID NO: 719402 - RNA, 19 nt, Homo sapiens
  misc_RNA (1)...(19): siRNA sense strand
caccagagguucaacaaac

SEQ ID NO: 719403 - RNA, 19 nt, Homo sapiens
  misc_RNA (1)...(19): siRNA sense strand
caaucagaccaaaguauuu

SEQ ID NO: 719404 - RNA, 19 nt, Homo sapiens
  misc_RNA (1)...(19): siRNA sense strand
ugaagagccucaguccauu

SEQ ID NO: 719405 - RNA, 19 nt, Homo sapiens
  misc_RNA (1)...(19): siRNA sense strand
gaagagccucaguccauug

SEQ ID NO: 719406 - RNA, 19 nt, Homo sapiens
  misc_RNA (1)...(19): siRNA sense strand
caaaauggcagaucucuug

SEQ ID NO: 719407 - RNA, 19 nt, Homo sapiens
  misc_RNA (1)...(19): siRNA sense strand
aggcacaacuccagauguu

SEQ ID NO: 719408 - RNA, 19 nt, Homo sapiens
  misc_RNA (1)...(19): siRNA sense strand
ucagaucauuggagcaguu

SEQ ID NO: 719409 - RNA, 19 nt, Homo sapiens
  misc_RNA (1)...(19): siRNA sense strand
aaaugaaaguccugcugaa

SEQ ID NO: 719410 - RNA, 19 nt, Homo sapiens
  misc_RNA (1)...(19): siRNA sense strand
gcaacuuguaccugauaua

SEQ ID NO: 719411 - RNA, 19 nt, Homo sapiens
  misc_RNA (1)...(19): siRNA sense strand
gcucgagaacucuuccuaa

SEQ ID NO: 719412 - RNA, 19 nt, Homo sapiens
  misc_RNA (1)...(19): siRNA sense strand
ggaauauuacagguacaua

SEQ ID NO: 719413 - RNA, 19 nt, Homo sapiens
  misc_RNA (1)...(19): siRNA sense strand
guagggcuaugcaacuugu

SEQ ID NO: 719414 - RNA, 19 nt, Homo sapiens
  misc_RNA (1)...(19): siRNA sense strand
gagcucaguggauguuuga

SEQ ID NO: 719415 - RNA, 19 nt, Homo sapiens
  misc_RNA (1)...(19): siRNA sense strand
acaaucagaccaaaguauu

SEQ ID NO: 719416 - RNA, 19 nt, Homo sapiens
  misc_RNA (1)...(19): siRNA sense strand
gaggaagauugucauucug

SEQ ID NO: 719417 - RNA, 19 nt, Homo sapiens
  misc_RNA (1)...(19): siRNA sense strand
cagcuacauugaagauaau

SEQ ID NO: 719418 - RNA, 19 nt, Homo sapiens
  misc_RNA (1)...(19): siRNA sense strand
cucgagaacucuuccuaaa

SEQ ID NO: 719419 - RNA, 19 nt, Homo sapiens
  misc_RNA (1)...(19): siRNA sense strand
cagaaaacaucggcagaua

SEQ ID NO: 719420 - RNA, 19 nt, Homo sapiens
  misc_RNA (1)...(19): siRNA sense strand
gacaaucagaccaaaguau

SEQ ID NO: 719421 - RNA, 19 nt, Homo sapiens
  misc_RNA (1)...(19): siRNA sense strand
gagcagucagauucacaua

SEQ ID NO: 719422 - RNA, 19 nt, Homo sapiens
  misc_RNA (1)...(19): siRNA sense strand
caacuuguaccugauauag

SEQ ID NO: 719423 - RNA, 19 nt, Homo sapiens
  misc_RNA (1)...(19): siRNA sense strand
gaaacagcuacauugaaga

SEQ ID NO: 719424 - RNA, 19 nt, Homo sapiens
  misc_RNA (1)...(19): siRNA sense strand
caggacugaugcaauucua

SEQ ID NO: 719425 - RNA, 19 nt, Homo sapiens
  misc_RNA (1)...(19): siRNA sense strand
cggcagauaccaaaggaaa

SEQ ID NO: 719426 - RNA, 19 nt, Homo sapiens
  misc_RNA (1)...(19): siRNA sense strand
acaagaagcagaucagagu

SEQ ID NO: 719427 - RNA, 19 nt, Homo sapiens
  misc_RNA (1)...(19): siRNA sense strand
ugacuuggaccucagauca

SEQ ID NO: 719428 - RNA, 19 nt, Homo sapiens
  misc_RNA (1)...(19): siRNA sense strand
guuggaaacagcuacauug

SEQ ID NO: 719429 - RNA, 19 nt, Homo sapiens
  misc_RNA (1)...(19): siRNA sense strand
cguuuaagaacuaggaaua

SEQ ID NO: 719430 - RNA, 19 nt, Homo sapiens
  misc_RNA (1)...(19): siRNA sense strand
aaacaucggcagauaccaa

SEQ ID NO: 719431 - RNA, 19 nt, Homo sapiens
  misc_RNA (1)...(19): siRNA sense strand
gcaccaaguggaauauuac

SEQ ID NO: 719432 - RNA, 19 nt, Homo sapiens
  misc_RNA (1)...(19): siRNA sense strand
gaacagucucuugaugguu

SEQ ID NO: 719433 - RNA, 19 nt, Homo sapiens
  misc_RNA (1)...(19): siRNA sense strand
cgagaacucuuccuaaaag

SEQ ID NO: 719434 - RNA, 19 nt, Homo sapiens
  misc_RNA (1)...(19): siRNA sense strand
cgagcucaguggauguuug

SEQ ID NO: 719435 - RNA, 19 nt, Homo sapiens
  misc_RNA (1)...(19): siRNA sense strand
uuucaggagucugugcuua

SEQ ID NO: 719436 - RNA, 19 nt, Homo sapiens
  misc_RNA (1)...(19): siRNA sense strand
aaacagcuacauugaagau

SEQ ID NO: 719437 - RNA, 19 nt, Homo sapiens
  misc_RNA (1)...(19): siRNA sense strand
uaaaagcaguagaagaaga

SEQ ID NO: 719438 - RNA, 19 nt, Homo sapiens
  misc_RNA (1)...(19): siRNA sense strand
ucuaugaagccaucaaguu

SEQ ID NO: 719439 - RNA, 19 nt, Homo sapiens
  misc_RNA (1)...(19): siRNA sense strand
caguggauguuugaacuug

SEQ ID NO: 719440 - RNA, 19 nt, Homo sapiens
  misc_RNA (1)...(19): siRNA sense strand
cagcagcaacucacauuuc

SEQ ID NO: 719441 - RNA, 19 nt, Homo sapiens
  misc_RNA (1)...(19): siRNA sense strand
cagaagcugaggaagauug

SEQ ID NO: 719442 - RNA, 19 nt, Homo sapiens
  misc_RNA (1)...(19): siRNA sense strand
cuggauacaucauucuugu

SEQ ID NO: 719443 - RNA, 19 nt, Homo sapiens
  misc_RNA (1)...(19): siRNA sense strand
cacaagacacagacaauca

SEQ ID NO: 719444 - RNA, 19 nt, Homo sapiens
  misc_RNA (1)...(19): siRNA sense strand
cgucuggccugcuugaaag

SEQ ID NO: 719445 - RNA, 19 nt, Homo sapiens
  misc_RNA (1)...(19): siRNA sense strand
ugucagagcagaugaugau

SEQ ID NO: 719446 - RNA, 19 nt, Homo sapiens
  misc_RNA (1)...(19): siRNA sense strand
ucagagcagaugaugauga

SEQ ID NO: 719447 - RNA, 19 nt, Homo sapiens
  misc_RNA (1)...(19): siRNA sense strand
auacaucauucuugucaca

SEQ ID NO: 719448 - RNA, 19 nt, Homo sapiens
  misc_RNA (1)...(19): siRNA sense strand
aagaagcagaucagaguuu

SEQ ID NO: 719449 - RNA, 19 nt, Homo sapiens
  misc_RNA (1)...(19): siRNA sense strand
ccuaaaagcaguagaagaa

SEQ ID NO: 719450 - RNA, 19 nt, Homo sapiens
  misc_RNA (1)...(19): siRNA sense strand
guacaagaagcagaucaga

SEQ ID NO: 719451 - RNA, 19 nt, Homo sapiens
  misc_RNA (1)...(19): siRNA sense strand
ucgugucccuguacaagaa

SEQ ID NO: 719452 - RNA, 19 nt, Homo sapiens
  misc_RNA (1)...(19): siRNA sense strand
caagacacagacaaucaga

SEQ ID NO: 719453 - RNA, 19 nt, Homo sapiens
  misc_RNA (1)...(19): siRNA sense strand
gagcuugagagcagucaga

SEQ ID NO: 719454 - RNA, 19 nt, Homo sapiens
  misc_RNA (1)...(19): siRNA sense strand
uaccugauauagaguucaa

SEQ ID NO: 719455 - RNA, 19 nt, Homo sapiens
  misc_RNA (1)...(19): siRNA sense strand
acacagacaaucagaccaa

SEQ ID NO: 719456 - RNA, 19 nt, Homo sapiens
  misc_RNA (1)...(19): siRNA sense strand
caagaagcagaucagaguu

SEQ ID NO: 719457 - RNA, 19 nt, Homo sapiens
  misc_RNA (1)...(19): siRNA sense strand
gguguaagcucuagcaauu

SEQ ID NO: 719458 - RNA, 19 nt, Homo sapiens
  misc_RNA (1)...(19): siRNA sense strand
ggaaacagcuacauugaag

SEQ ID NO: 719459 - RNA, 19 nt, Homo sapiens
  misc_RNA (1)...(19): siRNA sense strand
caauggagguccugaugua

SEQ ID NO: 719460 - RNA, 19 nt, Homo sapiens
  misc_RNA (1)...(19): siRNA sense strand
uguaagcucuagcaauuua

SEQ ID NO: 719461 - RNA, 19 nt, Homo sapiens
  misc_RNA (1)...(19): siRNA sense strand
aaauggagcucucuaugaa

SEQ ID NO: 719462 - RNA, 19 nt, Homo sapiens
  misc_RNA (1)...(19): siRNA sense strand
gcagucagauucacauauc

SEQ ID NO: 719463 - RNA, 19 nt, Homo sapiens
  misc_RNA (1)...(19): siRNA sense strand
ggcaccaaguggaauauua

SEQ ID NO: 719464 - RNA, 19 nt, Homo sapiens
  misc_RNA (1)...(19): siRNA sense strand
caucauucuugucacauua

SEQ ID NO: 719465 - RNA, 19 nt, Homo sapiens
  misc_RNA (1)...(19): siRNA sense strand
ggcagaagcuguauuaaac

SEQ ID NO: 719466 - RNA, 19 nt, Homo sapiens
  misc_RNA (1)...(19): siRNA sense strand
gaagauugucauucugaua

SEQ ID NO: 719467 - RNA, 19 nt, Homo sapiens
  misc_RNA (1)...(19): siRNA sense strand
uggcagaucucuuguccua

SEQ ID NO: 719468 - RNA, 19 nt, Homo sapiens
  misc_RNA (1)...(19): siRNA sense strand
gggcagaagcuguauuaaa

SEQ ID NO: 719469 - RNA, 19 nt, Homo sapiens
  misc_RNA (1)...(19): siRNA sense strand
aaacucaucuggauacauc

SEQ ID NO: 719470 - RNA, 19 nt, Homo sapiens
  misc_RNA (1)...(19): siRNA sense strand
caacaaacucaucuggaua

SEQ ID NO: 719471 - RNA, 19 nt, Homo sapiens
  misc_RNA (1)...(19): siRNA sense strand
gaagcuguauuaaacuugu

SEQ ID NO: 719472 - RNA, 19 nt, Homo sapiens
  misc_RNA (1)...(19): siRNA sense strand
caaaucaacuggugagacu

SEQ ID NO: 719473 - RNA, 19 nt, Homo sapiens
  misc_RNA (1)...(19): siRNA sense strand
cagagcagaugaugaugaa

SEQ ID NO: 719474 - RNA, 19 nt, Homo sapiens
  misc_RNA (1)...(19): siRNA sense strand
acagcuacauugaagauaa

SEQ ID NO: 719475 - RNA, 19 nt, Homo sapiens
  misc_RNA (1)...(19): siRNA sense strand
ugaaaguccugcugaaaca

SEQ ID NO: 719476 - RNA, 19 nt, Homo sapiens
  misc_RNA (1)...(19): siRNA sense strand
ccacuugacuauaaauaca

SEQ ID NO: 719477 - RNA, 19 nt, Homo sapiens
  misc_RNA (1)...(19): siRNA sense strand
uaccaggacugaugcaauu

SEQ ID NO: 719478 - RNA, 19 nt, Homo sapiens
  misc_RNA (1)...(19): siRNA sense strand
ccagagacccugaaauaug

SEQ ID NO: 719479 - RNA, 19 nt, Homo sapiens
  misc_RNA (1)...(19): siRNA sense strand
gcagaucucuuguccuacu

SEQ ID NO: 719480 - RNA, 19 nt, Homo sapiens
  misc_RNA (1)...(19): siRNA sense strand
ucaacaaacucaucuggau

SEQ ID NO: 719481 - RNA, 19 nt, Homo sapiens
  misc_RNA (1)...(19): siRNA sense strand
gagcagaugaugaugaaga

SEQ ID NO: 719482 - RNA, 19 nt, Homo sapiens
  misc_RNA (1)...(19): siRNA sense strand
ggaacagucucuugauggu

SEQ ID NO: 719483 - RNA, 19 nt, Homo sapiens
  misc_RNA (1)...(19): siRNA sense strand
gauggguggugucuaguga

SEQ ID NO: 719484 - RNA, 19 nt, Homo sapiens
  misc_RNA (1)...(19): siRNA sense strand
cagagacccugaaauaugg

SEQ ID NO: 719485 - RNA, 19 nt, Homo sapiens
  misc_RNA (1)...(19): siRNA sense strand
ugaggaagauugucauucu

SEQ ID NO: 719486 - RNA, 19 nt, Homo sapiens
  misc_RNA (1)...(19): siRNA sense strand
ggcagaagcugaggaagau

SEQ ID NO: 719487 - RNA, 19 nt, Homo sapiens
  misc_RNA (1)...(19): siRNA sense strand
cagaagcuguauuaaacuu

SEQ ID NO: 719488 - RNA, 19 nt, Homo sapiens
  misc_RNA (1)...(19): siRNA sense strand
ugccagagacccugaaaua

SEQ ID NO: 719489 - RNA, 19 nt, Homo sapiens
  misc_RNA (1)...(19): siRNA sense strand
ugaacuugcuccaggugua

SEQ ID NO: 719490 - RNA, 19 nt, Homo sapiens
  misc_RNA (1)...(19): siRNA sense strand
gaacuugcuccagguguaa

SEQ ID NO: 719491 - RNA, 19 nt, Homo sapiens
  misc_RNA (1)...(19): siRNA sense strand
gguggugucuagugacuug

SEQ ID NO: 719492 - RNA, 19 nt, Homo sapiens
  misc_RNA (1)...(19): siRNA sense strand
uaucagugcugccaaugga

SEQ ID NO: 719493 - RNA, 19 nt, Homo sapiens
  misc_RNA (1)...(19): siRNA sense strand
ggauacaucauucuuguca

SEQ ID NO: 719494 - RNA, 19 nt, Homo sapiens
  misc_RNA (1)...(19): siRNA sense strand
gagccucaguccauuguuc

SEQ ID NO: 719495 - RNA, 19 nt, Homo sapiens
  misc_RNA (1)...(19): siRNA sense strand
ggaagauugucauucugau

SEQ ID NO: 719496 - RNA, 19 nt, Homo sapiens
  misc_RNA (1)...(19): siRNA sense strand
guccauuguuccacguuua

SEQ ID NO: 719497 - RNA, 19 nt, Homo sapiens
  misc_RNA (1)...(19): siRNA sense strand
cuaugaagccaucaaguuu

SEQ ID NO: 719498 - RNA, 19 nt, Homo sapiens
  misc_RNA (1)...(19): siRNA sense strand
aacagucucuugaugguuu

SEQ ID NO: 719499 - RNA, 19 nt, Homo sapiens
  misc_RNA (1)...(19): siRNA sense strand
gauggcguguauaucagua

SEQ ID NO: 719500 - RNA, 19 nt, Homo sapiens
  misc_RNA (1)...(19): siRNA sense strand
ucaggagucugugcuuaaa

SEQ ID NO: 719501 - RNA, 19 nt, Homo sapiens
  misc_RNA (1)...(19): siRNA sense strand
uaaugaugaugacagcaaa

SEQ ID NO: 719502 - RNA, 19 nt, Homo sapiens
  misc_RNA (1)...(19): siRNA sense strand
caccagagguucaacaaac

SEQ ID NO: 719503 - RNA, 19 nt, Homo sapiens
  misc_RNA (1)...(19): siRNA sense strand
caaucagaccaaaguauuu

SEQ ID NO: 719504 - RNA, 19 nt, Homo sapiens
  misc_RNA (1)...(19): siRNA sense strand
ugaagagccucaguccauu

SEQ ID NO: 719505 - RNA, 19 nt, Homo sapiens
  misc_RNA (1)...(19): siRNA sense strand
gaagagccucaguccauug

SEQ ID NO: 719506 - RNA, 19 nt, Homo sapiens
  misc_RNA (1)...(19): siRNA sense strand
caaaauggcagaucucuug

SEQ ID NO: 719507 - RNA, 19 nt, Homo sapiens
  misc_RNA (1)...(19): siRNA sense strand
aggcacaacuccagauguu

SEQ ID NO: 719508 - RNA, 19 nt, Homo sapiens
  misc_RNA (1)...(19): siRNA sense strand
ucagaucauuggagcaguu

SEQ ID NO: 719509 - RNA, 19 nt, Homo sapiens
  misc_RNA (1)...(19): siRNA sense strand
aaaugaaaguccugcugaa

SEQ ID NO: 719510 - RNA, 19 nt, Homo sapiens
  misc_RNA (1)...(19): siRNA sense strand
gcaacuuguaccugauaua

SEQ ID NO: 719511 - RNA, 19 nt, Homo sapiens
  misc_RNA (1)...(19): siRNA sense strand
gcucgagaacucuuccuaa

SEQ ID NO: 719512 - RNA, 19 nt, Homo sapiens
  misc_RNA (1)...(19): siRNA sense strand
ggaauauuacagguacaua

SEQ ID NO: 719513 - RNA, 19 nt, Homo sapiens
  misc_RNA (1)...(19): siRNA sense strand
guagggcuaugcaacuugu

SEQ ID NO: 719514 - RNA, 19 nt, Homo sapiens
  misc_RNA (1)...(19): siRNA sense strand
gagcucaguggauguuuga

SEQ ID NO: 719515 - RNA, 19 nt, Homo sapiens
  misc_RNA (1)...(19): siRNA sense strand
acaaucagaccaaaguauu

SEQ ID NO: 719516 - RNA, 19 nt, Homo sapiens
  misc_RNA (1)...(19): siRNA sense strand
gaggaagauugucauucug

SEQ ID NO: 719517 - RNA, 19 nt, Homo sapiens
  misc_RNA (1)...(19): siRNA sense strand
cagcuacauugaagauaau

SEQ ID NO: 719518 - RNA, 19 nt, Homo sapiens
  misc_RNA (1)...(19): siRNA sense strand
cucgagaacucuuccuaaa

SEQ ID NO: 719519 - RNA, 19 nt, Homo sapiens
  misc_RNA (1)...(19): siRNA sense strand
cagaaaacaucggcagaua

SEQ ID NO: 719520 - RNA, 19 nt, Homo sapiens
  misc_RNA (1)...(19): siRNA sense strand
gacaaucagaccaaaguau

SEQ ID NO: 719521 - RNA, 19 nt, Homo sapiens
  misc_RNA (1)...(19): siRNA sense strand
gagcagucagauucacaua

SEQ ID NO: 719522 - RNA, 19 nt, Homo sapiens
  misc_RNA (1)...(19): siRNA sense strand
caacuuguaccugauauag

SEQ ID NO: 719523 - RNA, 19 nt, Homo sapiens
  misc_RNA (1)...(19): siRNA sense strand
gaaacagcuacauugaaga

SEQ ID NO: 719524 - RNA, 19 nt, Homo sapiens
  misc_RNA (1)...(19): siRNA sense strand
caggacugaugcaauucua

SEQ ID NO: 719525 - RNA, 19 nt, Homo sapiens
  misc_RNA (1)...(19): siRNA sense strand
cggcagauaccaaaggaaa

SEQ ID NO: 719526 - RNA, 19 nt, Homo sapiens
  misc_RNA (1)...(19): siRNA sense strand
acaagaagcagaucagagu

SEQ ID NO: 719527 - RNA, 19 nt, Homo sapiens
  misc_RNA (1)...(19): siRNA sense strand
ugacuuggaccucagauca

SEQ ID NO: 719528 - RNA, 19 nt, Homo sapiens
  misc_RNA (1)...(19): siRNA sense strand
guuggaaacagcuacauug

SEQ ID NO: 719529 - RNA, 19 nt, Homo sapiens
  misc_RNA (1)...(19): siRNA sense strand
cguuuaagaacuaggaaua

SEQ ID NO: 719530 - RNA, 19 nt, Homo sapiens
  misc_RNA (1)...(19): siRNA sense strand
aaacaucggcagauaccaa

SEQ ID NO: 719531 - RNA, 19 nt, Homo sapiens
  misc_RNA (1)...(19): siRNA sense strand
gcaccaaguggaauauuac

SEQ ID NO: 719532 - RNA, 19 nt, Homo sapiens
  misc_RNA (1)...(19): siRNA sense strand
gaacagucucuugaugguu

SEQ ID NO: 719533 - RNA, 19 nt, Homo sapiens
  misc_RNA (1)...(19): siRNA sense strand
cgagaacucuuccuaaaag

SEQ ID NO: 719534 - RNA, 19 nt, Homo sapiens
  misc_RNA (1)...(19): siRNA sense strand
cgagcucaguggauguuug

SEQ ID NO: 719535 - RNA, 19 nt, Homo sapiens
  misc_RNA (1)...(19): siRNA sense strand
uuucaggagucugugcuua

SEQ ID NO: 719536 - RNA, 19 nt, Homo sapiens
  misc_RNA (1)...(19): siRNA sense strand
aaacagcuacauugaagau

SEQ ID NO: 719537 - RNA, 19 nt, Homo sapiens
  misc_RNA (1)...(19): siRNA sense strand
uaaaagcaguagaagaaga

SEQ ID NO: 719538 - RNA, 19 nt, Homo sapiens
  misc_RNA (1)...(19): siRNA sense strand
ucuaugaagccaucaaguu

SEQ ID NO: 719539 - RNA, 19 nt, Homo sapiens
  misc_RNA (1)...(19): siRNA sense strand
caguggauguuugaacuug

SEQ ID NO: 719540 - RNA, 19 nt, Homo sapiens
  misc_RNA (1)...(19): siRNA sense strand
cagcagcaacucacauuuc

SEQ ID NO: 719541 - RNA, 19 nt, Homo sapiens
  misc_RNA (1)...(19): siRNA sense strand
cagaagcugaggaagauug

SEQ ID NO: 719542 - RNA, 19 nt, Homo sapiens
  misc_RNA (1)...(19): siRNA sense strand
cuggauacaucauucuugu

SEQ ID NO: 719543 - RNA, 19 nt, Homo sapiens
  misc_RNA (1)...(19): siRNA sense strand
cacaagacacagacaauca

SEQ ID NO: 719544 - RNA, 19 nt, Homo sapiens
  misc_RNA (1)...(19): siRNA sense strand
cgucuggccugcuugaaag

SEQ ID NO: 719545 - RNA, 19 nt, Homo sapiens
  misc_RNA (1)...(19): siRNA sense strand
ugucagagcagaugaugau

SEQ ID NO: 719546 - RNA, 19 nt, Homo sapiens
  misc_RNA (1)...(19): siRNA sense strand
ucagagcagaugaugauga

SEQ ID NO: 719547 - RNA, 19 nt, Homo sapiens
  misc_RNA (1)...(19): siRNA sense strand
auacaucauucuugucaca

SEQ ID NO: 719548 - RNA, 19 nt, Homo sapiens
  misc_RNA (1)...(19): siRNA sense strand
aagaagcagaucagaguuu

SEQ ID NO: 719549 - RNA, 19 nt, Homo sapiens
  misc_RNA (1)...(19): siRNA sense strand
ccuaaaagcaguagaagaa

SEQ ID NO: 719550 - RNA, 19 nt, Homo sapiens
  misc_RNA (1)...(19): siRNA sense strand
guacaagaagcagaucaga

SEQ ID NO: 719551 - RNA, 19 nt, Homo sapiens
  misc_RNA (1)...(19): siRNA sense strand
ucgugucccuguacaagaa

SEQ ID NO: 719552 - RNA, 19 nt, Homo sapiens
  misc_RNA (1)...(19): siRNA sense strand
caagacacagacaaucaga

SEQ ID NO: 719553 - RNA, 19 nt, Homo sapiens
  misc_RNA (1)...(19): siRNA sense strand
gagcuugagagcagucaga

SEQ ID NO: 719554 - RNA, 19 nt, Homo sapiens
  misc_RNA (1)...(19): siRNA sense strand
uaccugauauagaguucaa

SEQ ID NO: 719555 - RNA, 19 nt, Homo sapiens
  misc_RNA (1)...(19): siRNA sense strand
acacagacaaucagaccaa

SEQ ID NO: 719556 - RNA, 19 nt, Homo sapiens
  misc_RNA (1)...(19): siRNA sense strand
caagaagcagaucagaguu

SEQ ID NO: 719557 - RNA, 19 nt, Homo sapiens
  misc_RNA (1)...(19): siRNA sense strand
ggaaacagcuacauugaag

SEQ ID NO: 719558 - RNA, 19 nt, Homo sapiens
  misc_RNA (1)...(19): siRNA sense strand
caauggagguccugaugua

SEQ ID NO: 719559 - RNA, 19 nt, Homo sapiens
  misc_RNA (1)...(19): siRNA sense strand
gcagucagauucacauauc

SEQ ID NO: 719560 - RNA, 19 nt, Homo sapiens
  misc_RNA (1)...(19): siRNA sense strand
ggcaccaaguggaauauua

SEQ ID NO: 719561 - RNA, 19 nt, Homo sapiens
  misc_RNA (1)...(19): siRNA sense strand
caucauucuugucacauua

SEQ ID NO: 719562 - RNA, 19 nt, Homo sapiens
  misc_RNA (1)...(19): siRNA sense strand
ggcagaagcuguauuaaac

SEQ ID NO: 719563 - RNA, 19 nt, Homo sapiens
  misc_RNA (1)...(19): siRNA sense strand
uggcagaucucuuguccua

SEQ ID NO: 719564 - RNA, 19 nt, Homo sapiens
  misc_RNA (1)...(19): siRNA sense strand
gggcagaagcuguauuaaa

SEQ ID NO: 719565 - RNA, 19 nt, Homo sapiens
  misc_RNA (1)...(19): siRNA sense strand
aaacucaucuggauacauc

SEQ ID NO: 719566 - RNA, 19 nt, Homo sapiens
  misc_RNA (1)...(19): siRNA sense strand
caacaaacucaucuggaua

SEQ ID NO: 719567 - RNA, 19 nt, Homo sapiens
  misc_RNA (1)...(19): siRNA sense strand
gaagcuguauuaaacuugu

SEQ ID NO: 719568 - RNA, 19 nt, Homo sapiens
  misc_RNA (1)...(19): siRNA sense strand
caaaucaacuggugagacu

SEQ ID NO: 719569 - RNA, 19 nt, Homo sapiens
  misc_RNA (1)...(19): siRNA sense strand
acagcuacauugaagauaa

SEQ ID NO: 719570 - RNA, 19 nt, Homo sapiens
  misc_RNA (1)...(19): siRNA sense strand
ccagagacccugaaauaug

SEQ ID NO: 719571 - RNA, 19 nt, Homo sapiens
  misc_RNA (1)...(19): siRNA sense strand
ccacuugacuauaaauaca

SEQ ID NO: 719572 - RNA, 19 nt, Homo sapiens
  misc_RNA (1)...(19): siRNA sense strand
uaccaggacugaugcaauu

SEQ ID NO: 719573 - RNA, 19 nt, Homo sapiens
  misc_RNA (1)...(19): siRNA sense strand
gcagaucucuuguccuacu

SEQ ID NO: 719574 - RNA, 19 nt, Homo sapiens
  misc_RNA (1)...(19): siRNA sense strand
ucaacaaacucaucuggau

SEQ ID NO: 719575 - RNA, 19 nt, Homo sapiens
  misc_RNA (1)...(19): siRNA sense strand
gauggguggugucuaguga

SEQ ID NO: 719576 - RNA, 19 nt, Homo sapiens
  misc_RNA (1)...(19): siRNA sense strand
ggaacagucucuugauggu

SEQ ID NO: 719577 - RNA, 19 nt, Homo sapiens
  misc_RNA (1)...(19): siRNA sense strand
cagagacccugaaauaugg

SEQ ID NO: 719578 - RNA, 19 nt, Homo sapiens
  misc_RNA (1)...(19): siRNA sense strand
ugccagagacccugaaaua

SEQ ID NO: 719579 - RNA, 19 nt, Homo sapiens
  misc_RNA (1)...(19): siRNA sense strand
cagaagcuguauuaaacuu

SEQ ID NO: 719580 - RNA, 19 nt, Homo sapiens
  misc_RNA (1)...(19): siRNA sense strand
gguggugucuagugacuug

SEQ ID NO: 719581 - RNA, 19 nt, Homo sapiens
  misc_RNA (1)...(19): siRNA sense strand
uaucagugcugccaaugga

SEQ ID NO: 719582 - RNA, 19 nt, Homo sapiens
  misc_RNA (1)...(19): siRNA sense strand
ggauacaucauucuuguca

SEQ ID NO: 719583 - RNA, 19 nt, Homo sapiens
  misc_RNA (1)...(19): siRNA sense strand
gagccucaguccauuguuc

SEQ ID NO: 719584 - RNA, 19 nt, Homo sapiens
  misc_RNA (1)...(19): siRNA sense strand
guccauuguuccacguuua

SEQ ID NO: 719585 - RNA, 19 nt, Homo sapiens
  misc_RNA (1)...(19): siRNA sense strand
ucaggagucugugcuuaaa

SEQ ID NO: 719586 - RNA, 19 nt, Homo sapiens
  misc_RNA (1)...(19): siRNA sense strand
aacagucucuugaugguuu

SEQ ID NO: 719587 - RNA, 19 nt, Homo sapiens
  misc_RNA (1)...(19): siRNA sense strand
gauggcguguauaucagua

SEQ ID NO: 719588 - RNA, 19 nt, Homo sapiens
  misc_RNA (1)...(19): siRNA sense strand
uaaugaugaugacagcaaa

SEQ ID NO: 719589 - RNA, 19 nt, Homo sapiens
  misc_RNA (1)...(19): siRNA sense strand
caccagagguucaacaaac

SEQ ID NO: 719590 - RNA, 19 nt, Homo sapiens
  misc_RNA (1)...(19): siRNA sense strand
caaucagaccaaaguauuu

SEQ ID NO: 719591 - RNA, 19 nt, Homo sapiens
  misc_RNA (1)...(19): siRNA sense strand
ugaagagccucaguccauu

SEQ ID NO: 719592 - RNA, 19 nt, Homo sapiens
  misc_RNA (1)...(19): siRNA sense strand
gaagagccucaguccauug

SEQ ID NO: 719593 - RNA, 19 nt, Homo sapiens
  misc_RNA (1)...(19): siRNA sense strand
caaaauggcagaucucuug

SEQ ID NO: 719594 - RNA, 19 nt, Homo sapiens
  misc_RNA (1)...(19): siRNA sense strand
ucagaucauuggagcaguu

SEQ ID NO: 719595 - RNA, 19 nt, Homo sapiens
  misc_RNA (1)...(19): siRNA sense strand
gcaacuuguaccugauaua

SEQ ID NO: 719596 - RNA, 19 nt, Homo sapiens
  misc_RNA (1)...(19): siRNA sense strand
ggaauauuacagguacaua

SEQ ID NO: 719597 - RNA, 19 nt, Homo sapiens
  misc_RNA (1)...(19): siRNA sense strand
cagcuacauugaagauaau

SEQ ID NO: 719598 - RNA, 19 nt, Homo sapiens
  misc_RNA (1)...(19): siRNA sense strand
acaaucagaccaaaguauu

SEQ ID NO: 719599 - RNA, 19 nt, Homo sapiens
  misc_RNA (1)...(19): siRNA sense strand
gagcagucagauucacaua

SEQ ID NO: 719600 - RNA, 19 nt, Homo sapiens
  misc_RNA (1)...(19): siRNA sense strand
gacaaucagaccaaaguau

SEQ ID NO: 719601 - RNA, 19 nt, Homo sapiens
  misc_RNA (1)...(19): siRNA sense strand
caacuuguaccugauauag

SEQ ID NO: 719602 - RNA, 19 nt, Homo sapiens
  misc_RNA (1)...(19): siRNA sense strand
caggacugaugcaauucua

SEQ ID NO: 719603 - RNA, 19 nt, Homo sapiens
  misc_RNA (1)...(19): siRNA sense strand
gaaacagcuacauugaaga

SEQ ID NO: 719604 - RNA, 19 nt, Homo sapiens
  misc_RNA (1)...(19): siRNA sense strand
ugacuuggaccucagauca

SEQ ID NO: 719605 - RNA, 19 nt, Homo sapiens
  misc_RNA (1)...(19): siRNA sense strand
acaagaagcagaucagagu

SEQ ID NO: 719606 - RNA, 19 nt, Homo sapiens
  misc_RNA (1)...(19): siRNA sense strand
guuggaaacagcuacauug

SEQ ID NO: 719607 - RNA, 19 nt, Homo sapiens
  misc_RNA (1)...(19): siRNA sense strand
cguuuaagaacuaggaaua

SEQ ID NO: 719608 - RNA, 19 nt, Homo sapiens
  misc_RNA (1)...(19): siRNA sense strand
gaacagucucuugaugguu

SEQ ID NO: 719609 - RNA, 19 nt, Homo sapiens
  misc_RNA (1)...(19): siRNA sense strand
gcaccaaguggaauauuac

SEQ ID NO: 719610 - RNA, 19 nt, Homo sapiens
  misc_RNA (1)...(19): siRNA sense strand
uuucaggagucugugcuua

SEQ ID NO: 719611 - RNA, 19 nt, Homo sapiens
  misc_RNA (1)...(19): siRNA sense strand
aaacagcuacauugaagau

SEQ ID NO: 719612 - RNA, 19 nt, Homo sapiens
  misc_RNA (1)...(19): siRNA sense strand
cagcagcaacucacauuuc

SEQ ID NO: 719613 - RNA, 19 nt, Homo sapiens
  misc_RNA (1)...(19): siRNA sense strand
cgucuggccugcuugaaag

SEQ ID NO: 719614 - RNA, 19 nt, Homo sapiens
  misc_RNA (1)...(19): siRNA sense strand
cuggauacaucauucuugu

SEQ ID NO: 719615 - RNA, 19 nt, Homo sapiens
  misc_RNA (1)...(19): siRNA sense strand
cacaagacacagacaauca

SEQ ID NO: 719616 - RNA, 19 nt, Homo sapiens
  misc_RNA (1)...(19): siRNA sense strand
aagaagcagaucagaguuu

SEQ ID NO: 719617 - RNA, 19 nt, Homo sapiens
  misc_RNA (1)...(19): siRNA sense strand
auacaucauucuugucaca

SEQ ID NO: 719618 - RNA, 19 nt, Homo sapiens
  misc_RNA (1)...(19): siRNA sense strand
gagcuugagagcagucaga

SEQ ID NO: 719619 - RNA, 19 nt, Homo sapiens
  misc_RNA (1)...(19): siRNA sense strand
uaccugauauagaguucaa

SEQ ID NO: 719620 - RNA, 19 nt, Homo sapiens
  misc_RNA (1)...(19): siRNA sense strand
guacaagaagcagaucaga

SEQ ID NO: 719621 - RNA, 19 nt, Homo sapiens
  misc_RNA (1)...(19): siRNA sense strand
ucgugucccuguacaagaa

SEQ ID NO: 719622 - RNA, 19 nt, Homo sapiens
  misc_RNA (1)...(19): siRNA sense strand
caagacacagacaaucaga

SEQ ID NO: 719623 - RNA, 19 nt, Homo sapiens
  misc_RNA (1)...(19): siRNA sense strand
gaagauaaugaugaugaca

SEQ ID NO: 719624 - RNA, 19 nt, Homo sapiens
  misc_RNA (1)...(19): siRNA sense strand
caagaagcagaucagaguu

SEQ ID NO: 719625 - RNA, 19 nt, Homo sapiens
  misc_RNA (1)...(19): siRNA sense strand
acacagacaaucagaccaa

SEQ ID NO: 719626 - RNA, 19 nt, Homo sapiens
  misc_RNA (1)...(19): siRNA sense strand
gguuugauggcguguauau

SEQ ID NO: 719627 - RNA, 19 nt, Homo sapiens
  misc_RNA (1)...(19): siRNA sense strand
gccagagacccugaaauau

SEQ ID NO: 719628 - RNA, 19 nt, Homo sapiens
  misc_RNA (1)...(19): siRNA sense strand
cuugagagcagucagauuc

SEQ ID NO: 719629 - RNA, 19 nt, Homo sapiens
  misc_RNA (1)...(19): siRNA sense strand
acaucauucuugucacauu

SEQ ID NO: 719630 - RNA, 19 nt, Homo sapiens
  misc_RNA (1)...(19): siRNA sense strand
ggacugaugcaauucuacu

SEQ ID NO: 719631 - RNA, 19 nt, Homo sapiens
  misc_RNA (1)...(19): siRNA sense strand
ucacauuucaggagucugu

SEQ ID NO: 719632 - RNA, 19 nt, Homo sapiens
  misc_RNA (1)...(19): siRNA sense strand
cagacaaucagaccaaagu

SEQ ID NO: 719633 - RNA, 19 nt, Homo sapiens
  misc_RNA (1)...(19): siRNA sense strand
caauucuacugggucacua

SEQ ID NO: 719634 - RNA, 19 nt, Homo sapiens
  misc_RNA (1)...(19): siRNA sense strand
gcagaagcuguauuaaacu

SEQ ID NO: 719635 - RNA, 19 nt, Homo sapiens
  misc_RNA (1)...(19): siRNA sense strand
gccaauggagguccugaug

SEQ ID NO: 719636 - RNA, 19 nt, Homo sapiens
  misc_RNA (1)...(19): siRNA sense strand
uggcguguauaucaguaaa

SEQ ID NO: 719637 - RNA, 19 nt, Homo sapiens
  misc_RNA (1)...(19): siRNA sense strand
agcagcaacucacauuuca

SEQ ID NO: 719638 - RNA, 19 nt, Homo sapiens
  misc_RNA (1)...(19): siRNA sense strand
gcgucuggccugcuugaaa

SEQ ID NO: 719639 - RNA, 19 nt, Homo sapiens
  misc_RNA (1)...(19): siRNA sense strand
ggugauggcguuggaaaca

SEQ ID NO: 719640 - RNA, 19 nt, Homo sapiens
  misc_RNA (1)...(19): siRNA sense strand
acauaucagugcugccaau

SEQ ID NO: 719641 - RNA, 19 nt, Homo sapiens
  misc_RNA (1)...(19): siRNA sense strand
ucaucuggauacaucauuc

SEQ ID NO: 719642 - RNA, 19 nt, Homo sapiens
  misc_RNA (1)...(19): siRNA sense strand
uggaaacagcuacauugaa

SEQ ID NO: 719643 - RNA, 19 nt, Homo sapiens
  misc_RNA (1)...(19): siRNA sense strand
cacagacaaucagaccaaa

SEQ ID NO: 719644 - RNA, 19 nt, Homo sapiens
  misc_RNA (1)...(19): siRNA sense strand
aggaauaccaggacugaug

SEQ ID NO: 719645 - RNA, 19 nt, Homo sapiens
  misc_RNA (1)...(19): siRNA sense strand
uuacagguacauaagauuc

SEQ ID NO: 719646 - RNA, 19 nt, Homo sapiens
  misc_RNA (1)...(19): siRNA sense strand
uauacccggucuccagaug

SEQ ID NO: 719647 - RNA, 19 nt, Homo sapiens
  misc_RNA (1)...(19): siRNA sense strand
gcuacacagcuuucucaga

SEQ ID NO: 719648 - RNA, 19 nt, Homo sapiens
  misc_RNA (1)...(19): siRNA sense strand
gagauugacaagauguaca

SEQ ID NO: 719649 - RNA, 19 nt, Homo sapiens
  misc_RNA (1)...(19): siRNA sense strand
agacaaucagaccaaagua

SEQ ID NO: 719650 - RNA, 19 nt, Homo sapiens
  misc_RNA (1)...(19): siRNA sense strand
gagagcagucagauucaca

SEQ ID NO: 719651 - RNA, 19 nt, Homo sapiens
  misc_RNA (1)...(19): siRNA sense strand
acuuguaccugauauagag

SEQ ID NO: 719652 - RNA, 19 nt, Homo sapiens
  misc_RNA (1)...(19): siRNA sense strand
ggccaugugaugauguuga

SEQ ID NO: 719653 - RNA, 19 nt, Homo sapiens
  misc_RNA (1)...(19): siRNA sense strand
gaucauuggagcaguuguc

SEQ ID NO: 719654 - RNA, 19 nt, Homo sapiens
  misc_RNA (1)...(19): siRNA sense strand
cuauagagccuggcaccaa

SEQ ID NO: 719655 - RNA, 19 nt, Homo sapiens
  misc_RNA (1)...(19): siRNA sense strand
agucagugcuuuugagauu

SEQ ID NO: 719656 - RNA, 19 nt, Homo sapiens
  misc_RNA (1)...(19): siRNA sense strand
ccagcagcaacucacauuu

SEQ ID NO: 719657 - RNA, 19 nt, Homo sapiens
  misc_RNA (1)...(19): siRNA sense strand
gcuaacaacugcccagcuu

SEQ ID NO: 719658 - RNA, 19 nt, Homo sapiens
  misc_RNA (1)...(19): siRNA sense strand
aaacugguguccaucacua

SEQ ID NO: 719659 - RNA, 19 nt, Homo sapiens
  misc_RNA (1)...(19): siRNA sense strand
gaucaacucuaggcuccaa

SEQ ID NO: 719660 - RNA, 19 nt, Homo sapiens
  misc_RNA (1)...(19): siRNA sense strand
agaguacuaugcuauguug

SEQ ID NO: 719661 - RNA, 19 nt, Homo sapiens
  misc_RNA (1)...(19): siRNA sense strand
uaacaacugcccagcuuug

SEQ ID NO: 719662 - RNA, 19 nt, Homo sapiens
  misc_RNA (1)...(19): siRNA sense strand
ggaaaauacuacagagugu

SEQ ID NO: 719663 - RNA, 19 nt, Homo sapiens
  misc_RNA (1)...(19): siRNA sense strand
acuaugcuauguuggcuaa

SEQ ID NO: 719664 - RNA, 19 nt, Homo sapiens
  misc_RNA (1)...(19): siRNA sense strand
gaugaucagacaaggcaaa

SEQ ID NO: 719665 - RNA, 19 nt, Homo sapiens
  misc_RNA (1)...(19): siRNA sense strand
gacaaggcaaagcgaaauu

SEQ ID NO: 719666 - RNA, 19 nt, Homo sapiens
  misc_RNA (1)...(19): siRNA sense strand
gcuccaacucguuaugaaa

SEQ ID NO: 719667 - RNA, 19 nt, Homo sapiens
  misc_RNA (1)...(19): siRNA sense strand
aaagcgaaauuggucauuc

SEQ ID NO: 719668 - RNA, 19 nt, Homo sapiens
  misc_RNA (1)...(19): siRNA sense strand
ucuaggcuccaacucguua

SEQ ID NO: 719669 - RNA, 19 nt, Homo sapiens
  misc_RNA (1)...(19): siRNA sense strand
aaaagucgcuggagucgau

SEQ ID NO: 719670 - RNA, 19 nt, Homo sapiens
  misc_RNA (1)...(19): siRNA sense strand
gcaaagcgaaauuggucau

SEQ ID NO: 719671 - RNA, 19 nt, Homo sapiens
  misc_RNA (1)...(19): siRNA sense strand
cagacaaggcaaagcgaaa

SEQ ID NO: 719672 - RNA, 19 nt, Homo sapiens
  misc_RNA (1)...(19): siRNA sense strand
aagcgaaauuggucauucu

SEQ ID NO: 719673 - RNA, 19 nt, Homo sapiens
  misc_RNA (1)...(19): siRNA sense strand
ggcuccaacucguuaugaa

SEQ ID NO: 719674 - RNA, 19 nt, Homo sapiens
  misc_RNA (1)...(19): siRNA sense strand
caaagcgaaauuggucauu

SEQ ID NO: 719675 - RNA, 19 nt, Homo sapiens
  misc_RNA (1)...(19): siRNA sense strand
gcacagcaugcggaaaaua

SEQ ID NO: 719676 - RNA, 19 nt, Homo sapiens
  misc_RNA (1)...(19): siRNA sense strand
uagaguacuaugcuauguu

SEQ ID NO: 719677 - RNA, 19 nt, Homo sapiens
  misc_RNA (1)...(19): siRNA sense strand
acagacuggugaaaaguaa

SEQ ID NO: 719678 - RNA, 19 nt, Homo sapiens
  misc_RNA (1)...(19): siRNA sense strand
gaaugaaacuguaagagau

SEQ ID NO: 719679 - RNA, 19 nt, Homo sapiens
  misc_RNA (1)...(19): siRNA sense strand
gaacaaccaacauaaauuc

SEQ ID NO: 719680 - RNA, 19 nt, Homo sapiens
  misc_RNA (1)...(19): siRNA sense strand
gaaccacgauuugcuaugu

SEQ ID NO: 719681 - RNA, 19 nt, Homo sapiens
  misc_RNA (1)...(19): siRNA sense strand
ggaaugaaacuguaagaga

SEQ ID NO: 719682 - RNA, 19 nt, Homo sapiens
  misc_RNA (1)...(19): siRNA sense strand
ugagggaucuuccuucuug

SEQ ID NO: 719683 - RNA, 19 nt, Homo sapiens
  misc_RNA (1)...(19): siRNA sense strand
gaauaccucuuugguguug

SEQ ID NO: 719684 - RNA, 19 nt, Homo sapiens
  misc_RNA (1)...(19): siRNA sense strand
gcagauugaugguauugga

SEQ ID NO: 719685 - RNA, 19 nt, Homo sapiens
  misc_RNA (1)...(19): siRNA sense strand
gagcauacaagugcaguua

SEQ ID NO: 719686 - RNA, 19 nt, Homo sapiens
  misc_RNA (1)...(19): siRNA sense strand
ggaagccgguacaguguga

SEQ ID NO: 719687 - RNA, 19 nt, Homo sapiens
  misc_RNA (1)...(19): siRNA sense strand
ggucacugauggugcauuu

SEQ ID NO: 719688 - RNA, 19 nt, Homo sapiens
  misc_RNA (1)...(19): siRNA sense strand
gaccagguuuggaagaauu

SEQ ID NO: 719689 - RNA, 19 nt, Homo sapiens
  misc_RNA (1)...(19): siRNA sense strand
caagugcaguuaacaagau

SEQ ID NO: 719690 - RNA, 19 nt, Homo sapiens
  misc_RNA (1)...(19): siRNA sense strand
guucaucuauguugcaaau

SEQ ID NO: 719691 - RNA, 19 nt, Homo sapiens
  misc_RNA (1)...(19): siRNA sense strand
ggucuucuguugacuggaa

SEQ ID NO: 719692 - RNA, 19 nt, Homo sapiens
  misc_RNA (1)...(19): siRNA sense strand
cgauugauguacagcuaua

SEQ ID NO: 719693 - RNA, 19 nt, Homo sapiens
  misc_RNA (1)...(19): siRNA sense strand
guauggagcugucacuucu

SEQ ID NO: 719694 - RNA, 19 nt, Homo sapiens
  misc_RNA (1)...(19): siRNA sense strand
gauguucagucgacacaau

SEQ ID NO: 719695 - RNA, 19 nt, Homo sapiens
  misc_RNA (1)...(19): siRNA sense strand
uguaagagauccaauucug

SEQ ID NO: 719696 - RNA, 19 nt, Homo sapiens
  misc_RNA (1)...(19): siRNA sense strand
cuacauggcagucuauaga

SEQ ID NO: 719697 - RNA, 19 nt, Homo sapiens
  misc_RNA (1)...(19): siRNA sense strand
gguauuggaucaggaguca

SEQ ID NO: 719698 - RNA, 19 nt, Homo sapiens
  misc_RNA (1)...(19): siRNA sense strand
caaccaacauaaauucaac

SEQ ID NO: 719699 - RNA, 19 nt, Homo sapiens
  misc_RNA (1)...(19): siRNA sense strand
caaaugcugaagcucauaa

SEQ ID NO: 719700 - RNA, 19 nt, Homo sapiens
  misc_RNA (1)...(19): siRNA sense strand
gcauacaagugcaguuaac

SEQ ID NO: 719701 - RNA, 19 nt, Homo sapiens
  misc_RNA (1)...(19): siRNA sense strand
agaaugugcuguccauaca

SEQ ID NO: 719702 - RNA, 19 nt, Homo sapiens
  misc_RNA (1)...(19): siRNA sense strand
gccgauugauguacagcua

SEQ ID NO: 719703 - RNA, 19 nt, Homo sapiens
  misc_RNA (1)...(19): siRNA sense strand
agaggcagauugaugguau

SEQ ID NO: 719704 - RNA, 19 nt, Homo sapiens
  misc_RNA (1)...(19): siRNA sense strand
cagaaugaaccacgauuug

SEQ ID NO: 719705 - RNA, 19 nt, Homo sapiens
  misc_RNA (1)...(19): siRNA sense strand
ggaccagguuuggaagaau

SEQ ID NO: 719706 - RNA, 19 nt, Homo sapiens
  misc_RNA (1)...(19): siRNA sense strand
gaucaggagucaauuuuca

SEQ ID NO: 719707 - RNA, 19 nt, Homo sapiens
  misc_RNA (1)...(19): siRNA sense strand
guguugagcuugaugucuu

SEQ ID NO: 719708 - RNA, 19 nt, Homo sapiens
  misc_RNA (1)...(19): siRNA sense strand
agaauugaauaccucuuug

SEQ ID NO: 719709 - RNA, 19 nt, Homo sapiens
  misc_RNA (1)...(19): siRNA sense strand
cuugaugucuucagaggaa

SEQ ID NO: 719710 - RNA, 19 nt, Homo sapiens
  misc_RNA (1)...(19): siRNA sense strand
gaucuuccuucuuggucuu

SEQ ID NO: 719711 - RNA, 19 nt, Homo sapiens
  misc_RNA (1)...(19): siRNA sense strand
aaaagugugugaaguugua

SEQ ID NO: 719712 - RNA, 19 nt, Homo sapiens
  misc_RNA (1)...(19): siRNA sense strand
ccaauucuguggagauacu

SEQ ID NO: 719713 - RNA, 19 nt, Homo sapiens
  misc_RNA (1)...(19): siRNA sense strand
gcaaaugcugaagcucaua

SEQ ID NO: 719714 - RNA, 19 nt, Homo sapiens
  misc_RNA (1)...(19): siRNA sense strand
ucaacuaccagaaaggaaa

SEQ ID NO: 719715 - RNA, 19 nt, Homo sapiens
  misc_RNA (1)...(19): siRNA sense strand
uauagaaugugcuguccau

SEQ ID NO: 719716 - RNA, 19 nt, Homo sapiens
  misc_RNA (1)...(19): siRNA sense strand
ucagaaugaaccacgauuu

SEQ ID NO: 719717 - RNA, 19 nt, Homo sapiens
  misc_RNA (1)...(19): siRNA sense strand
gaggcagauugaugguauu

SEQ ID NO: 719718 - RNA, 19 nt, Homo sapiens
  misc_RNA (1)...(19): siRNA sense strand
guaagagauccaauucugu

SEQ ID NO: 719719 - RNA, 19 nt, Homo sapiens
  misc_RNA (1)...(19): siRNA sense strand
caacaaggaagccgguaca

SEQ ID NO: 719720 - RNA, 19 nt, Homo sapiens
  misc_RNA (1)...(19): siRNA sense strand
ugggaaguacaaaucauua

SEQ ID NO: 719721 - RNA, 19 nt, Homo sapiens
  misc_RNA (1)...(19): siRNA sense strand
gcaagggaagagcauacaa

SEQ ID NO: 719722 - RNA, 19 nt, Homo sapiens
  misc_RNA (1)...(19): siRNA sense strand
gggaaguacaaaucauuau

SEQ ID NO: 719723 - RNA, 19 nt, Homo sapiens
  misc_RNA (1)...(19): siRNA sense strand
guugagggaucuuccuucu

SEQ ID NO: 719724 - RNA, 19 nt, Homo sapiens
  misc_RNA (1)...(19): siRNA sense strand
gaggaacuuugcccaacag

SEQ ID NO: 719725 - RNA, 19 nt, Homo sapiens
  misc_RNA (1)...(19): siRNA sense strand
ugagcuugaugucuucaga

SEQ ID NO: 719726 - RNA, 19 nt, Homo sapiens
  misc_RNA (1)...(19): siRNA sense strand
uacacucccugaucauuca

SEQ ID NO: 719727 - RNA, 19 nt, Homo sapiens
  misc_RNA (1)...(19): siRNA sense strand
cagaaaggaaagagauaga

SEQ ID NO: 719728 - RNA, 19 nt, Homo sapiens
  misc_RNA (1)...(19): siRNA sense strand
gaaugaaccacgauuugcu

SEQ ID NO: 719729 - RNA, 19 nt, Homo sapiens
  misc_RNA (1)...(19): siRNA sense strand
auggagcugucacuucuuu

SEQ ID NO: 719730 - RNA, 19 nt, Homo sapiens
  misc_RNA (1)...(19): siRNA sense strand
gaauugaauaccucuuugg

SEQ ID NO: 719731 - RNA, 19 nt, Homo sapiens
  misc_RNA (1)...(19): siRNA sense strand
ccucuuugguguugagcuu

SEQ ID NO: 719732 - RNA, 19 nt, Homo sapiens
  misc_RNA (1)...(19): siRNA sense strand
caagggaagagcauacaag

SEQ ID NO: 719733 - RNA, 19 nt, Homo sapiens
  misc_RNA (1)...(19): siRNA sense strand
agaggaacuuugcccaaca

SEQ ID NO: 719734 - RNA, 19 nt, Homo sapiens
  misc_RNA (1)...(19): siRNA sense strand
gaaacuguaagagauccaa

SEQ ID NO: 719735 - RNA, 19 nt, Homo sapiens
  misc_RNA (1)...(19): siRNA sense strand
ucaucuauguugcaaaugc

SEQ ID NO: 719736 - RNA, 19 nt, Homo sapiens
  misc_RNA (1)...(19): siRNA sense strand
gagcaagggaagagcauac

SEQ ID NO: 719737 - RNA, 19 nt, Homo sapiens
  misc_RNA (1)...(19): siRNA sense strand
cucaugaucugugucaguu

SEQ ID NO: 719738 - RNA, 19 nt, Homo sapiens
  misc_RNA (1)...(19): siRNA sense strand
aaauccagccguccuaugu

SEQ ID NO: 719739 - RNA, 19 nt, Homo sapiens
  misc_RNA (1)...(19): siRNA sense strand
acauggcagucuauagaau

SEQ ID NO: 719740 - RNA, 19 nt, Homo sapiens
  misc_RNA (1)...(19): siRNA sense strand
gugauuccacagauucaaa

SEQ ID NO: 719741 - RNA, 19 nt, Homo sapiens
  misc_RNA (1)...(19): siRNA sense strand
accacgauuugcuauguuu

SEQ ID NO: 719742 - RNA, 19 nt, Homo sapiens
  misc_RNA (1)...(19): siRNA sense strand
aaugaaccacgauuugcua

SEQ ID NO: 719743 - RNA, 19 nt, Homo sapiens
  misc_RNA (1)...(19): siRNA sense strand
ggcagucagugagcaagga

SEQ ID NO: 719744 - RNA, 19 nt, Homo sapiens
  misc_RNA (1)...(19): siRNA sense strand
gguuuggaagaauugaaua

SEQ ID NO: 719745 - RNA, 19 nt, Homo sapiens
  misc_RNA (1)...(19): siRNA sense strand
uggaccagguuuggaagaa

SEQ ID NO: 719746 - RNA, 19 nt, Homo sapiens
  misc_RNA (1)...(19): siRNA sense strand
acaagugcaguuaacaaga

SEQ ID NO: 719747 - RNA, 19 nt, Homo sapiens
  misc_RNA (1)...(19): siRNA sense strand
ccagaaaggaaagagauag

SEQ ID NO: 719748 - RNA, 19 nt, Homo sapiens
  misc_RNA (1)...(19): siRNA sense strand
acagcugguuugccucaga

SEQ ID NO: 719749 - RNA, 19 nt, Homo sapiens
  misc_RNA (1)...(19): siRNA sense strand
cauggcagucuauagaaug

SEQ ID NO: 719750 - RNA, 19 nt, Homo sapiens
  misc_RNA (1)...(19): siRNA sense strand
guugggaaguacaaaucau

SEQ ID NO: 719751 - RNA, 19 nt, Homo sapiens
  misc_RNA (1)...(19): siRNA sense strand
gccuauaucugaggucacu

SEQ ID NO: 719752 - RNA, 19 nt, Homo sapiens
  misc_RNA (1)...(19): siRNA sense strand
uagaaugugcuguccauac

SEQ ID NO: 719753 - RNA, 19 nt, Homo sapiens
  misc_RNA (1)...(19): siRNA sense strand
ugaauaccucuuugguguu

SEQ ID NO: 719754 - RNA, 19 nt, Homo sapiens
  misc_RNA (1)...(19): siRNA sense strand
auacaagugcaguuaacaa

SEQ ID NO: 719755 - RNA, 19 nt, Homo sapiens
  misc_RNA (1)...(19): siRNA sense strand
caacuaccagaaaggaaag

SEQ ID NO: 719756 - RNA, 19 nt, Homo sapiens
  misc_RNA (1)...(19): siRNA sense strand
gaaugaaacuguaagagau

SEQ ID NO: 719757 - RNA, 19 nt, Homo sapiens
  misc_RNA (1)...(19): siRNA sense strand
gaacaaccaacauaaauuc

SEQ ID NO: 719758 - RNA, 19 nt, Homo sapiens
  misc_RNA (1)...(19): siRNA sense strand
gaaccacgauuugcuaugu

SEQ ID NO: 719759 - RNA, 19 nt, Homo sapiens
  misc_RNA (1)...(19): siRNA sense strand
ggaaugaaacuguaagaga

SEQ ID NO: 719760 - RNA, 19 nt, Homo sapiens
  misc_RNA (1)...(19): siRNA sense strand
ugagggaucuuccuucuug

SEQ ID NO: 719761 - RNA, 19 nt, Homo sapiens
  misc_RNA (1)...(19): siRNA sense strand
gaauaccucuuugguguug

SEQ ID NO: 719762 - RNA, 19 nt, Homo sapiens
  misc_RNA (1)...(19): siRNA sense strand
gcagauugaugguauugga

SEQ ID NO: 719763 - RNA, 19 nt, Homo sapiens
  misc_RNA (1)...(19): siRNA sense strand
gagcauacaagugcaguua

SEQ ID NO: 719764 - RNA, 19 nt, Homo sapiens
  misc_RNA (1)...(19): siRNA sense strand
ggaagccgguacaguguga

SEQ ID NO: 719765 - RNA, 19 nt, Homo sapiens
  misc_RNA (1)...(19): siRNA sense strand
ggucacugauggugcauuu

SEQ ID NO: 719766 - RNA, 19 nt, Homo sapiens
  misc_RNA (1)...(19): siRNA sense strand
gaccagguuuggaagaauu

SEQ ID NO: 719767 - RNA, 19 nt, Homo sapiens
  misc_RNA (1)...(19): siRNA sense strand
caagugcaguuaacaagau

SEQ ID NO: 719768 - RNA, 19 nt, Homo sapiens
  misc_RNA (1)...(19): siRNA sense strand
guucaucuauguugcaaau

SEQ ID NO: 719769 - RNA, 19 nt, Homo sapiens
  misc_RNA (1)...(19): siRNA sense strand
ggucuucuguugacuggaa

SEQ ID NO: 719770 - RNA, 19 nt, Homo sapiens
  misc_RNA (1)...(19): siRNA sense strand
cgauugauguacagcuaua

SEQ ID NO: 719771 - RNA, 19 nt, Homo sapiens
  misc_RNA (1)...(19): siRNA sense strand
guauggagcugucacuucu

SEQ ID NO: 719772 - RNA, 19 nt, Homo sapiens
  misc_RNA (1)...(19): siRNA sense strand
gauguucagucgacacaau

SEQ ID NO: 719773 - RNA, 19 nt, Homo sapiens
  misc_RNA (1)...(19): siRNA sense strand
uguaagagauccaauucug

SEQ ID NO: 719774 - RNA, 19 nt, Homo sapiens
  misc_RNA (1)...(19): siRNA sense strand
cuacauggcagucuauaga

SEQ ID NO: 719775 - RNA, 19 nt, Homo sapiens
  misc_RNA (1)...(19): siRNA sense strand
gguauuggaucaggaguca

SEQ ID NO: 719776 - RNA, 19 nt, Homo sapiens
  misc_RNA (1)...(19): siRNA sense strand
caaccaacauaaauucaac

SEQ ID NO: 719777 - RNA, 19 nt, Homo sapiens
  misc_RNA (1)...(19): siRNA sense strand
caaaugcugaagcucauaa

SEQ ID NO: 719778 - RNA, 19 nt, Homo sapiens
  misc_RNA (1)...(19): siRNA sense strand
gcauacaagugcaguuaac

SEQ ID NO: 719779 - RNA, 19 nt, Homo sapiens
  misc_RNA (1)...(19): siRNA sense strand
agaaugugcuguccauaca

SEQ ID NO: 719780 - RNA, 19 nt, Homo sapiens
  misc_RNA (1)...(19): siRNA sense strand
gccgauugauguacagcua

SEQ ID NO: 719781 - RNA, 19 nt, Homo sapiens
  misc_RNA (1)...(19): siRNA sense strand
agaggcagauugaugguau

SEQ ID NO: 719782 - RNA, 19 nt, Homo sapiens
  misc_RNA (1)...(19): siRNA sense strand
cagaaugaaccacgauuug

SEQ ID NO: 719783 - RNA, 19 nt, Homo sapiens
  misc_RNA (1)...(19): siRNA sense strand
ggaccagguuuggaagaau

SEQ ID NO: 719784 - RNA, 19 nt, Homo sapiens
  misc_RNA (1)...(19): siRNA sense strand
gaucaggagucaauuuuca

SEQ ID NO: 719785 - RNA, 19 nt, Homo sapiens
  misc_RNA (1)...(19): siRNA sense strand
guguugagcuugaugucuu

SEQ ID NO: 719786 - RNA, 19 nt, Homo sapiens
  misc_RNA (1)...(19): siRNA sense strand
agaauugaauaccucuuug

SEQ ID NO: 719787 - RNA, 19 nt, Homo sapiens
  misc_RNA (1)...(19): siRNA sense strand
cuugaugucuucagaggaa

SEQ ID NO: 719788 - RNA, 19 nt, Homo sapiens
  misc_RNA (1)...(19): siRNA sense strand
gaucuuccuucuuggucuu

SEQ ID NO: 719789 - RNA, 19 nt, Homo sapiens
  misc_RNA (1)...(19): siRNA sense strand
aaaagugugugaaguugua

SEQ ID NO: 719790 - RNA, 19 nt, Homo sapiens
  misc_RNA (1)...(19): siRNA sense strand
ccaauucuguggagauacu

SEQ ID NO: 719791 - RNA, 19 nt, Homo sapiens
  misc_RNA (1)...(19): siRNA sense strand
gcaaaugcugaagcucaua

SEQ ID NO: 719792 - RNA, 19 nt, Homo sapiens
  misc_RNA (1)...(19): siRNA sense strand
ucaacuaccagaaaggaaa

SEQ ID NO: 719793 - RNA, 19 nt, Homo sapiens
  misc_RNA (1)...(19): siRNA sense strand
uauagaaugugcuguccau

SEQ ID NO: 719794 - RNA, 19 nt, Homo sapiens
  misc_RNA (1)...(19): siRNA sense strand
ucagaaugaaccacgauuu

SEQ ID NO: 719795 - RNA, 19 nt, Homo sapiens
  misc_RNA (1)...(19): siRNA sense strand
gaggcagauugaugguauu

SEQ ID NO: 719796 - RNA, 19 nt, Homo sapiens
  misc_RNA (1)...(19): siRNA sense strand
guaagagauccaauucugu

SEQ ID NO: 719797 - RNA, 19 nt, Homo sapiens
  misc_RNA (1)...(19): siRNA sense strand
caacaaggaagccgguaca

SEQ ID NO: 719798 - RNA, 19 nt, Homo sapiens
  misc_RNA (1)...(19): siRNA sense strand
ugggaaguacaaaucauua

SEQ ID NO: 719799 - RNA, 19 nt, Homo sapiens
  misc_RNA (1)...(19): siRNA sense strand
gcaagggaagagcauacaa

SEQ ID NO: 719800 - RNA, 19 nt, Homo sapiens
  misc_RNA (1)...(19): siRNA sense strand
gggaaguacaaaucauuau

SEQ ID NO: 719801 - RNA, 19 nt, Homo sapiens
  misc_RNA (1)...(19): siRNA sense strand
guugagggaucuuccuucu

SEQ ID NO: 719802 - RNA, 19 nt, Homo sapiens
  misc_RNA (1)...(19): siRNA sense strand
gaggaacuuugcccaacag

SEQ ID NO: 719803 - RNA, 19 nt, Homo sapiens
  misc_RNA (1)...(19): siRNA sense strand
ugagcuugaugucuucaga

SEQ ID NO: 719804 - RNA, 19 nt, Homo sapiens
  misc_RNA (1)...(19): siRNA sense strand
uacacucccugaucauuca

SEQ ID NO: 719805 - RNA, 19 nt, Homo sapiens
  misc_RNA (1)...(19): siRNA sense strand
cagaaaggaaagagauaga

SEQ ID NO: 719806 - RNA, 19 nt, Homo sapiens
  misc_RNA (1)...(19): siRNA sense strand
gaaugaaccacgauuugcu

SEQ ID NO: 719807 - RNA, 19 nt, Homo sapiens
  misc_RNA (1)...(19): siRNA sense strand
auggagcugucacuucuuu

SEQ ID NO: 719808 - RNA, 19 nt, Homo sapiens
  misc_RNA (1)...(19): siRNA sense strand
gaauugaauaccucuuugg

SEQ ID NO: 719809 - RNA, 19 nt, Homo sapiens
  misc_RNA (1)...(19): siRNA sense strand
ccucuuugguguugagcuu

SEQ ID NO: 719810 - RNA, 19 nt, Homo sapiens
  misc_RNA (1)...(19): siRNA sense strand
caagggaagagcauacaag

SEQ ID NO: 719811 - RNA, 19 nt, Homo sapiens
  misc_RNA (1)...(19): siRNA sense strand
agaggaacuuugcccaaca

SEQ ID NO: 719812 - RNA, 19 nt, Homo sapiens
  misc_RNA (1)...(19): siRNA sense strand
gaaacuguaagagauccaa

SEQ ID NO: 719813 - RNA, 19 nt, Homo sapiens
  misc_RNA (1)...(19): siRNA sense strand
ucaucuauguugcaaaugc

SEQ ID NO: 719814 - RNA, 19 nt, Homo sapiens
  misc_RNA (1)...(19): siRNA sense strand
gagcaagggaagagcauac

SEQ ID NO: 719815 - RNA, 19 nt, Homo sapiens
  misc_RNA (1)...(19): siRNA sense strand
cucaugaucugugucaguu

SEQ ID NO: 719816 - RNA, 19 nt, Homo sapiens
  misc_RNA (1)...(19): siRNA sense strand
aaauccagccguccuaugu

SEQ ID NO: 719817 - RNA, 19 nt, Homo sapiens
  misc_RNA (1)...(19): siRNA sense strand
acauggcagucuauagaau

SEQ ID NO: 719818 - RNA, 19 nt, Homo sapiens
  misc_RNA (1)...(19): siRNA sense strand
gugauuccacagauucaaa

SEQ ID NO: 719819 - RNA, 19 nt, Homo sapiens
  misc_RNA (1)...(19): siRNA sense strand
accacgauuugcuauguuu

SEQ ID NO: 719820 - RNA, 19 nt, Homo sapiens
  misc_RNA (1)...(19): siRNA sense strand
aaugaaccacgauuugcua

SEQ ID NO: 719821 - RNA, 19 nt, Homo sapiens
  misc_RNA (1)...(19): siRNA sense strand
ggcagucagugagcaagga

SEQ ID NO: 719822 - RNA, 19 nt, Homo sapiens
  misc_RNA (1)...(19): siRNA sense strand
gguuuggaagaauugaaua

SEQ ID NO: 719823 - RNA, 19 nt, Homo sapiens
  misc_RNA (1)...(19): siRNA sense strand
uggaccagguuuggaagaa

SEQ ID NO: 719824 - RNA, 19 nt, Homo sapiens
  misc_RNA (1)...(19): siRNA sense strand
acaagugcaguuaacaaga

SEQ ID NO: 719825 - RNA, 19 nt, Homo sapiens
  misc_RNA (1)...(19): siRNA sense strand
ccagaaaggaaagagauag

SEQ ID NO: 719826 - RNA, 19 nt, Homo sapiens
  misc_RNA (1)...(19): siRNA sense strand
acagcugguuugccucaga

SEQ ID NO: 719827 - RNA, 19 nt, Homo sapiens
  misc_RNA (1)...(19): siRNA sense strand
cauggcagucuauagaaug

SEQ ID NO: 719828 - RNA, 19 nt, Homo sapiens
  misc_RNA (1)...(19): siRNA sense strand
guugggaaguacaaaucau

SEQ ID NO: 719829 - RNA, 19 nt, Homo sapiens
  misc_RNA (1)...(19): siRNA sense strand
gccuauaucugaggucacu

SEQ ID NO: 719830 - RNA, 19 nt, Homo sapiens
  misc_RNA (1)...(19): siRNA sense strand
uagaaugugcuguccauac

SEQ ID NO: 719831 - RNA, 19 nt, Homo sapiens
  misc_RNA (1)...(19): siRNA sense strand
ugaauaccucuuugguguu

SEQ ID NO: 719832 - RNA, 19 nt, Homo sapiens
  misc_RNA (1)...(19): siRNA sense strand
auacaagugcaguuaacaa

SEQ ID NO: 719833 - RNA, 19 nt, Homo sapiens
  misc_RNA (1)...(19): siRNA sense strand
caacuaccagaaaggaaag

SEQ ID NO: 719834 - RNA, 19 nt, Homo sapiens
  misc_RNA (1)...(19): siRNA sense strand
gcacagcccugcucaacaa

SEQ ID NO: 719835 - RNA, 19 nt, Homo sapiens
  misc_RNA (1)...(19): siRNA sense strand
caacaaggagaacaaauuc

SEQ ID NO: 719836 - RNA, 19 nt, Homo sapiens
  misc_RNA (1)...(19): siRNA sense strand
acaacaugcuggacaagaa

SEQ ID NO: 719837 - RNA, 19 nt, Homo sapiens
  misc_RNA (1)...(19): siRNA sense strand
ucaacaaggagaacaaauu

SEQ ID NO: 719838 - RNA, 19 nt, Homo sapiens
  misc_RNA (1)...(19): siRNA sense strand
ugaacaacaugcuggacaa

SEQ ID NO: 719839 - RNA, 19 nt, Homo sapiens
  misc_RNA (1)...(19): siRNA sense strand
gagcucagcagccucauca

SEQ ID NO: 719840 - RNA, 19 nt, Homo sapiens
  misc_RNA (1)...(19): siRNA sense strand
cauccagacccacaacuuu

SEQ ID NO: 719841 - RNA, 19 nt, Homo sapiens
  misc_RNA (1)...(19): siRNA sense strand
cuucuacgaugucgacuuc

SEQ ID NO: 719842 - RNA, 19 nt, Homo sapiens
  misc_RNA (1)...(19): siRNA sense strand
ggaccgcgacagcuaccua

SEQ ID NO: 719843 - RNA, 19 nt, Homo sapiens
  misc_RNA (1)...(19): siRNA sense strand
ugacucgccauccgaagua

SEQ ID NO: 719844 - RNA, 19 nt, Homo sapiens
  misc_RNA (1)...(19): siRNA sense strand
agaaaucccuggccaaccu

SEQ ID NO: 719845 - RNA, 19 nt, Homo sapiens
  misc_RNA (1)...(19): siRNA sense strand
uggccaaccucaaccugaa

SEQ ID NO: 719846 - RNA, 19 nt, Homo sapiens
  misc_RNA (1)...(19): siRNA sense strand
gcucaacaaggagaacaaa

SEQ ID NO: 719847 - RNA, 19 nt, Homo sapiens
  misc_RNA (1)...(19): siRNA sense strand
cagcccugcucaacaagga

SEQ ID NO: 719848 - RNA, 19 nt, Homo sapiens
  misc_RNA (1)...(19): siRNA sense strand
gaacaacaugcuggacaag

SEQ ID NO: 719849 - RNA, 19 nt, Homo sapiens
  misc_RNA (1)...(19): siRNA sense strand
ucuacgaugucgacuucuu

SEQ ID NO: 719850 - RNA, 19 nt, Homo sapiens
  misc_RNA (1)...(19): siRNA sense strand
gaccgcgacagcuaccuaa

SEQ ID NO: 719851 - RNA, 19 nt, Homo sapiens
  misc_RNA (1)...(19): siRNA sense strand
gagcggcacgugcaaguac

SEQ ID NO: 719852 - RNA, 19 nt, Homo sapiens
  misc_RNA (1)...(19): siRNA sense strand
caacaugcuggacaagaag

SEQ ID NO: 719853 - RNA, 19 nt, Homo sapiens
  misc_RNA (1)...(19): siRNA sense strand
gagagcggcacgugcaagu

SEQ ID NO: 719854 - RNA, 19 nt, Homo sapiens
  misc_RNA (1)...(19): siRNA sense strand
gcagcugcucgcccaaguu

SEQ ID NO: 719855 - RNA, 19 nt, Homo sapiens
  misc_RNA (1)...(19): siRNA sense strand
caacuccacgcgcuacaag

SEQ ID NO: 719856 - RNA, 19 nt, Homo sapiens
  misc_RNA (1)...(19): siRNA sense strand
cagcugcucgcccaaguuc

SEQ ID NO: 719857 - RNA, 19 nt, Homo sapiens
  misc_RNA (1)...(19): siRNA sense strand
gcaaguacggcgaaaagug

SEQ ID NO: 719858 - RNA, 19 nt, Homo sapiens
  misc_RNA (1)...(19): siRNA sense strand
cuacgaugucgacuucuug

SEQ ID NO: 719859 - RNA, 19 nt, Homo sapiens
  misc_RNA (1)...(19): siRNA sense strand
caccacagccucagcuucu

SEQ ID NO: 719860 - RNA, 19 nt, Homo sapiens
  misc_RNA (1)...(19): siRNA sense strand
gaaacgacaucgagaagaa

SEQ ID NO: 719861 - RNA, 19 nt, Homo sapiens
  misc_RNA (1)...(19): siRNA sense strand
gcaaaugucucggaaagaa

SEQ ID NO: 719862 - RNA, 19 nt, Homo sapiens
  misc_RNA (1)...(19): siRNA sense strand
gaaaacagaugaaauugug

SEQ ID NO: 719863 - RNA, 19 nt, Homo sapiens
  misc_RNA (1)...(19): siRNA sense strand
gcauggagaucacaauaag

SEQ ID NO: 719864 - RNA, 19 nt, Homo sapiens
  misc_RNA (1)...(19): siRNA sense strand
gagcaccagugaagaauca

SEQ ID NO: 719865 - RNA, 19 nt, Homo sapiens
  misc_RNA (1)...(19): siRNA sense strand
ugaaacaccugcacgacaa

SEQ ID NO: 719866 - RNA, 19 nt, Homo sapiens
  misc_RNA (1)...(19): siRNA sense strand
gaaaaggacucuuggaaag

SEQ ID NO: 719867 - RNA, 19 nt, Homo sapiens
  misc_RNA (1)...(19): siRNA sense strand
uaaagcggcugaagaugga

SEQ ID NO: 719868 - RNA, 19 nt, Homo sapiens
  misc_RNA (1)...(19): siRNA sense strand
agaaaugagugaagaugaa

SEQ ID NO: 719869 - RNA, 19 nt, Homo sapiens
  misc_RNA (1)...(19): siRNA sense strand
gagugaagaugaagaacga

SEQ ID NO: 719870 - RNA, 19 nt, Homo sapiens
  misc_RNA (1)...(19): siRNA sense strand
gcagcaacauggacaagau

SEQ ID NO: 719871 - RNA, 19 nt, Homo sapiens
  misc_RNA (1)...(19): siRNA sense strand
gaagggagcaccagugaag

SEQ ID NO: 719872 - RNA, 19 nt, Homo sapiens
  misc_RNA (1)...(19): siRNA sense strand
ggaaggaacaagaggagaa

SEQ ID NO: 719873 - RNA, 19 nt, Homo sapiens
  misc_RNA (1)...(19): siRNA sense strand
ggaguggucuacagagcaa

SEQ ID NO: 719874 - RNA, 19 nt, Homo sapiens
  misc_RNA (1)...(19): siRNA sense strand
gaagaugaagaacgagaaa

SEQ ID NO: 719875 - RNA, 19 nt, Homo sapiens
  misc_RNA (1)...(19): siRNA sense strand
gcacgaacgucggaaacga

SEQ ID NO: 719876 - RNA, 19 nt, Homo sapiens
  misc_RNA (1)...(19): siRNA sense strand
gagaagacucuauggaaga

SEQ ID NO: 719877 - RNA, 19 nt, Homo sapiens
  misc_RNA (1)...(19): siRNA sense strand
cagcaaaugucucggaaag

SEQ ID NO: 719878 - RNA, 19 nt, Homo sapiens
  misc_RNA (1)...(19): siRNA sense strand
cagaaaagaugaaaagaga

SEQ ID NO: 719879 - RNA, 19 nt, Homo sapiens
  misc_RNA (1)...(19): siRNA sense strand
gaagaaaugagugaagaug

SEQ ID NO: 719880 - RNA, 19 nt, Homo sapiens
  misc_RNA (1)...(19): siRNA sense strand
agaaguaagugaggaagaa

SEQ ID NO: 719881 - RNA, 19 nt, Homo sapiens
  misc_RNA (1)...(19): siRNA sense strand
ggaagacagaggagaagaa

SEQ ID NO: 719882 - RNA, 19 nt, Homo sapiens
  misc_RNA (1)...(19): siRNA sense strand
gaaggaacaagaggagaaa

SEQ ID NO: 719883 - RNA, 19 nt, Homo sapiens
  misc_RNA (1)...(19): siRNA sense strand
ugacagagggcgacuaugu

SEQ ID NO: 719884 - RNA, 19 nt, Homo sapiens
  misc_RNA (1)...(19): siRNA sense strand
ggagaaagcagagauaaaa

SEQ ID NO: 719885 - RNA, 19 nt, Homo sapiens
  misc_RNA (1)...(19): siRNA sense strand
gagaagaacaggauaaagc

SEQ ID NO: 719886 - RNA, 19 nt, Homo sapiens
  misc_RNA (1)...(19): siRNA sense strand
gaggagaaagcagagauaa

SEQ ID NO: 719887 - RNA, 19 nt, Homo sapiens
  misc_RNA (1)...(19): siRNA sense strand
ugaagaagcagaggaagaa

SEQ ID NO: 719888 - RNA, 19 nt, Homo sapiens
  misc_RNA (1)...(19): siRNA sense strand
gagcauuccaggagagaaa

SEQ ID NO: 719889 - RNA, 19 nt, Homo sapiens
  misc_RNA (1)...(19): siRNA sense strand
aaggagggcuucccgauca

SEQ ID NO: 719890 - RNA, 19 nt, Homo sapiens
  misc_RNA (1)...(19): siRNA sense strand
gcuucgaccucaugaacaa

SEQ ID NO: 719891 - RNA, 19 nt, Homo sapiens
  misc_RNA (1)...(19): siRNA sense strand
gaaguaagugaggaagaaa

SEQ ID NO: 719892 - RNA, 19 nt, Homo sapiens
  misc_RNA (1)...(19): siRNA sense strand
caacaucgucaccguuaga

SEQ ID NO: 719893 - RNA, 19 nt, Homo sapiens
  misc_RNA (1)...(19): siRNA sense strand
ugagggagaucaacaccau

SEQ ID NO: 719894 - RNA, 19 nt, Homo sapiens
  misc_RNA (1)...(19): siRNA sense strand
aaaggacucuuggaaagug

SEQ ID NO: 719895 - RNA, 19 nt, Homo sapiens
  misc_RNA (1)...(19): siRNA sense strand
gcucuaaagcggcugaaga

SEQ ID NO: 719896 - RNA, 19 nt, Homo sapiens
  misc_RNA (1)...(19): siRNA sense strand
ggcugaagauggagaagga

SEQ ID NO: 719897 - RNA, 19 nt, Homo sapiens
  misc_RNA (1)...(19): siRNA sense strand
agacagaggagaagaagau

SEQ ID NO: 719898 - RNA, 19 nt, Homo sapiens
  misc_RNA (1)...(19): siRNA sense strand
gaucaacaccauccucaag

SEQ ID NO: 719899 - RNA, 19 nt, Homo sapiens
  misc_RNA (1)...(19): siRNA sense strand
gaugaaauuguggcucuaa

SEQ ID NO: 719900 - RNA, 19 nt, Homo sapiens
  misc_RNA (1)...(19): siRNA sense strand
gaaucaggcucagguucug

SEQ ID NO: 719901 - RNA, 19 nt, Homo sapiens
  misc_RNA (1)...(19): siRNA sense strand
gaggugaagacccugauga

SEQ ID NO: 719902 - RNA, 19 nt, Homo sapiens
  misc_RNA (1)...(19): siRNA sense strand
ggaggaggaggaagaggaa

SEQ ID NO: 719903 - RNA, 19 nt, Homo sapiens
  misc_RNA (1)...(19): siRNA sense strand
ggaaacgacaucgagaaga

SEQ ID NO: 719904 - RNA, 19 nt, Homo sapiens
  misc_RNA (1)...(19): siRNA sense strand
agucagaaaucgaucagau

SEQ ID NO: 719905 - RNA, 19 nt, Homo sapiens
  misc_RNA (1)...(19): siRNA sense strand
ucacgucgcugagggagau

SEQ ID NO: 719906 - RNA, 19 nt, Homo sapiens
  misc_RNA (1)...(19): siRNA sense strand
gaaauuguggcucuaaagc

SEQ ID NO: 719907 - RNA, 19 nt, Homo sapiens
  misc_RNA (1)...(19): siRNA sense strand
gucaguggguugcaucuuc

SEQ ID NO: 719908 - RNA, 19 nt, Homo sapiens
  misc_RNA (1)...(19): siRNA sense strand
ugaagacccugaugaucca

SEQ ID NO: 719909 - RNA, 19 nt, Homo sapiens
  misc_RNA (1)...(19): siRNA sense strand
gaagacagaggagaagaag

SEQ ID NO: 719910 - RNA, 19 nt, Homo sapiens
  misc_RNA (1)...(19): siRNA sense strand
gaagaacgagaaaaugaaa

SEQ ID NO: 719911 - RNA, 19 nt, Homo sapiens
  misc_RNA (1)...(19): siRNA sense strand
ggaagaaaugagugaagau

SEQ ID NO: 719912 - RNA, 19 nt, Homo sapiens
  misc_RNA (1)...(19): siRNA sense strand
agacagaagagaagggaaa

SEQ ID NO: 719913 - RNA, 19 nt, Homo sapiens
  misc_RNA (1)...(19): siRNA sense strand
gaaugggaaagacagaaga

SEQ ID NO: 719914 - RNA, 19 nt, Homo sapiens
  misc_RNA (1)...(19): siRNA sense strand
caaaugucucggaaagaaa

SEQ ID NO: 719915 - RNA, 19 nt, Homo sapiens
  misc_RNA (1)...(19): siRNA sense strand
gaggagaagaagaugauuc

SEQ ID NO: 719916 - RNA, 19 nt, Homo sapiens
  misc_RNA (1)...(19): siRNA sense strand
gcaacauggacaagaucua

SEQ ID NO: 719917 - RNA, 19 nt, Homo sapiens
  misc_RNA (1)...(19): siRNA sense strand
aggaagaaaugagugaaga

SEQ ID NO: 719918 - RNA, 19 nt, Homo sapiens
  misc_RNA (1)...(19): siRNA sense strand
auaaggaacuccccguaua

SEQ ID NO: 719919 - RNA, 19 nt, Homo sapiens
  misc_RNA (1)...(19): siRNA sense strand
gagugaagaagcagaggaa

SEQ ID NO: 719920 - RNA, 19 nt, Homo sapiens
  misc_RNA (1)...(19): siRNA sense strand
ggaagucagaaaucgauca

SEQ ID NO: 719921 - RNA, 19 nt, Homo sapiens
  misc_RNA (1)...(19): siRNA sense strand
cccaacaucgucaccguua

SEQ ID NO: 719922 - RNA, 19 nt, Homo sapiens
  misc_RNA (1)...(19): siRNA sense strand
gggaaagacagaagagaag

SEQ ID NO: 719923 - RNA, 19 nt, Homo sapiens
  misc_RNA (1)...(19): siRNA sense strand
caaaagacaagaaaacaga

SEQ ID NO: 719924 - RNA, 19 nt, Homo sapiens
  misc_RNA (1)...(19): siRNA sense strand
gaucgaggagggcaccuau

SEQ ID NO: 719925 - RNA, 19 nt, Homo sapiens
  misc_RNA (1)...(19): siRNA sense strand
gaaaugagugaagaugaag

SEQ ID NO: 719926 - RNA, 19 nt, Homo sapiens
  misc_RNA (1)...(19): siRNA sense strand
ggaagaggaggaggaggaa

SEQ ID NO: 719927 - RNA, 19 nt, Homo sapiens
  misc_RNA (1)...(19): siRNA sense strand
caugcuagagugaaagaaa

SEQ ID NO: 719928 - RNA, 19 nt, Homo sapiens
  misc_RNA (1)...(19): siRNA sense strand
gaagagaaaauggaagaaa

SEQ ID NO: 719929 - RNA, 19 nt, Homo sapiens
  misc_RNA (1)...(19): siRNA sense strand
ggaaugggaaagacagaag

SEQ ID NO: 719930 - RNA, 19 nt, Homo sapiens
  misc_RNA (1)...(19): siRNA sense strand
cgucaccguuagagagauu

SEQ ID NO: 719931 - RNA, 19 nt, Homo sapiens
  misc_RNA (1)...(19): siRNA sense strand
gugaagaagcagaggaaga

SEQ ID NO: 719932 - RNA, 19 nt, Homo sapiens
  misc_RNA (1)...(19): siRNA sense strand
cgaagaaguaagugaggaa

SEQ ID NO: 719933 - RNA, 19 nt, Homo sapiens
  misc_RNA (1)...(19): siRNA sense strand
caacauggacaagaucuac

SEQ ID NO: 719934 - RNA, 19 nt, Homo sapiens
  misc_RNA (1)...(19): siRNA sense strand
ggaacaagaggagaaagca

SEQ ID NO: 719935 - RNA, 19 nt, Homo sapiens
  misc_RNA (1)...(19): siRNA sense strand
gaaacgaaggaaggaacaa

SEQ ID NO: 719936 - RNA, 19 nt, Homo sapiens
  misc_RNA (1)...(19): siRNA sense strand
ggaagggagcaccagugaa

SEQ ID NO: 719937 - RNA, 19 nt, Homo sapiens
  misc_RNA (1)...(19): siRNA sense strand
cagaggagaagaagaugau

SEQ ID NO: 719938 - RNA, 19 nt, Homo sapiens
  misc_RNA (1)...(19): siRNA sense strand
guaagugaggaagaaauga

SEQ ID NO: 719939 - RNA, 19 nt, Homo sapiens
  misc_RNA (1)...(19): siRNA sense strand
gcagaaucaggcucagguu

SEQ ID NO: 719940 - RNA, 19 nt, Homo sapiens
  misc_RNA (1)...(19): siRNA sense strand
cagaagagaagggaaaugg

SEQ ID NO: 719941 - RNA, 19 nt, Homo sapiens
  misc_RNA (1)...(19): siRNA sense strand
aggacggccucaagcauga

SEQ ID NO: 719942 - RNA, 19 nt, Homo sapiens
  misc_RNA (1)...(19): siRNA sense strand
gcaccuauggaguggucua

SEQ ID NO: 719943 - RNA, 19 nt, Homo sapiens
  misc_RNA (1)...(19): siRNA sense strand
gacagagggcgacuaugug

SEQ ID NO: 719944 - RNA, 19 nt, Homo sapiens
  misc_RNA (1)...(19): siRNA sense strand
aagaaaugagugaagauga

SEQ ID NO: 719945 - RNA, 19 nt, Homo sapiens
  misc_RNA (1)...(19): siRNA sense strand
ggaaauggcaagggagcau

SEQ ID NO: 719946 - RNA, 19 nt, Homo sapiens
  misc_RNA (1)...(19): siRNA sense strand
agaggagaaagcagagaua

SEQ ID NO: 719947 - RNA, 19 nt, Homo sapiens
  misc_RNA (1)...(19): siRNA sense strand
gaagauggagaaggagaag

SEQ ID NO: 719948 - RNA, 19 nt, Homo sapiens
  misc_RNA (1)...(19): siRNA sense strand
gaggagaccggcagcaacu

SEQ ID NO: 719949 - RNA, 19 nt, Homo sapiens
  misc_RNA (1)...(19): siRNA sense strand
agaaagagagcacgaacgu

SEQ ID NO: 719950 - RNA, 19 nt, Homo sapiens
  misc_RNA (1)...(19): siRNA sense strand
gaggaagaaaugagugaag

SEQ ID NO: 719951 - RNA, 19 nt, Homo sapiens
  misc_RNA (1)...(19): siRNA sense strand
gcagagauaaaacgcuuaa

SEQ ID NO: 719952 - RNA, 19 nt, Homo sapiens
  misc_RNA (1)...(19): siRNA sense strand
ugggaaagacagaagagaa

SEQ ID NO: 719953 - RNA, 19 nt, Homo sapiens
  misc_RNA (1)...(19): siRNA sense strand
ucccagcagucaagaagau

SEQ ID NO: 719954 - RNA, 19 nt, Homo sapiens
  misc_RNA (1)...(19): siRNA sense strand
agaagcagaggaagaagug

SEQ ID NO: 719955 - RNA, 19 nt, Homo sapiens
  misc_RNA (1)...(19): siRNA sense strand
uauggaagacagaggagaa

SEQ ID NO: 719956 - RNA, 19 nt, Homo sapiens
  misc_RNA (1)...(19): siRNA sense strand
ugaagaugaagaacgagaa

SEQ ID NO: 719957 - RNA, 19 nt, Homo sapiens
  misc_RNA (1)...(19): siRNA sense strand
gugaggaagaaaugaguga

SEQ ID NO: 719958 - RNA, 19 nt, Homo sapiens
  misc_RNA (1)...(19): siRNA sense strand
gaacuccccguauagaaga

SEQ ID NO: 719959 - RNA, 19 nt, Homo sapiens
  misc_RNA (1)...(19): siRNA sense strand
ugaaaaggacucuuggaaa

SEQ ID NO: 719960 - RNA, 19 nt, Homo sapiens
  misc_RNA (1)...(19): siRNA sense strand
gaaacgacaucgagaagaa

SEQ ID NO: 719961 - RNA, 19 nt, Homo sapiens
  misc_RNA (1)...(19): siRNA sense strand
gcaaaugucucggaaagaa

SEQ ID NO: 719962 - RNA, 19 nt, Homo sapiens
  misc_RNA (1)...(19): siRNA sense strand
gaaaacagaugaaauugug

SEQ ID NO: 719963 - RNA, 19 nt, Homo sapiens
  misc_RNA (1)...(19): siRNA sense strand
gcauggagaucacaauaag

SEQ ID NO: 719964 - RNA, 19 nt, Homo sapiens
  misc_RNA (1)...(19): siRNA sense strand
gagcaccagugaagaauca

SEQ ID NO: 719965 - RNA, 19 nt, Homo sapiens
  misc_RNA (1)...(19): siRNA sense strand
ugaaacaccugcacgacaa

SEQ ID NO: 719966 - RNA, 19 nt, Homo sapiens
  misc_RNA (1)...(19): siRNA sense strand
gaaaaggacucuuggaaag

SEQ ID NO: 719967 - RNA, 19 nt, Homo sapiens
  misc_RNA (1)...(19): siRNA sense strand
uaaagcggcugaagaugga

SEQ ID NO: 719968 - RNA, 19 nt, Homo sapiens
  misc_RNA (1)...(19): siRNA sense strand
agaaaugagugaagaugaa

SEQ ID NO: 719969 - RNA, 19 nt, Homo sapiens
  misc_RNA (1)...(19): siRNA sense strand
gagugaagaugaagaacga

SEQ ID NO: 719970 - RNA, 19 nt, Homo sapiens
  misc_RNA (1)...(19): siRNA sense strand
gcagcaacauggacaagau

SEQ ID NO: 719971 - RNA, 19 nt, Homo sapiens
  misc_RNA (1)...(19): siRNA sense strand
gaagggagcaccagugaag

SEQ ID NO: 719972 - RNA, 19 nt, Homo sapiens
  misc_RNA (1)...(19): siRNA sense strand
ggaaggaacaagaggagaa

SEQ ID NO: 719973 - RNA, 19 nt, Homo sapiens
  misc_RNA (1)...(19): siRNA sense strand
ggaguggucuacagagcaa

SEQ ID NO: 719974 - RNA, 19 nt, Homo sapiens
  misc_RNA (1)...(19): siRNA sense strand
gaagaugaagaacgagaaa

SEQ ID NO: 719975 - RNA, 19 nt, Homo sapiens
  misc_RNA (1)...(19): siRNA sense strand
gcacgaacgucggaaacga

SEQ ID NO: 719976 - RNA, 19 nt, Homo sapiens
  misc_RNA (1)...(19): siRNA sense strand
gagaagacucuauggaaga

SEQ ID NO: 719977 - RNA, 19 nt, Homo sapiens
  misc_RNA (1)...(19): siRNA sense strand
cagcaaaugucucggaaag

SEQ ID NO: 719978 - RNA, 19 nt, Homo sapiens
  misc_RNA (1)...(19): siRNA sense strand
cagaaaagaugaaaagaga

SEQ ID NO: 719979 - RNA, 19 nt, Homo sapiens
  misc_RNA (1)...(19): siRNA sense strand
gaagaaaugagugaagaug

SEQ ID NO: 719980 - RNA, 19 nt, Homo sapiens
  misc_RNA (1)...(19): siRNA sense strand
agaaguaagugaggaagaa

SEQ ID NO: 719981 - RNA, 19 nt, Homo sapiens
  misc_RNA (1)...(19): siRNA sense strand
ggaagacagaggagaagaa

SEQ ID NO: 719982 - RNA, 19 nt, Homo sapiens
  misc_RNA (1)...(19): siRNA sense strand
gaaggaacaagaggagaaa

SEQ ID NO: 719983 - RNA, 19 nt, Homo sapiens
  misc_RNA (1)...(19): siRNA sense strand
ugacagagggcgacuaugu

SEQ ID NO: 719984 - RNA, 19 nt, Homo sapiens
  misc_RNA (1)...(19): siRNA sense strand
ggagaaagcagagauaaaa

SEQ ID NO: 719985 - RNA, 19 nt, Homo sapiens
  misc_RNA (1)...(19): siRNA sense strand
gagaagaacaggauaaagc

SEQ ID NO: 719986 - RNA, 19 nt, Homo sapiens
  misc_RNA (1)...(19): siRNA sense strand
gaggagaaagcagagauaa

SEQ ID NO: 719987 - RNA, 19 nt, Homo sapiens
  misc_RNA (1)...(19): siRNA sense strand
ugaagaagcagaggaagaa

SEQ ID NO: 719988 - RNA, 19 nt, Homo sapiens
  misc_RNA (1)...(19): siRNA sense strand
gagcauuccaggagagaaa

SEQ ID NO: 719989 - RNA, 19 nt, Homo sapiens
  misc_RNA (1)...(19): siRNA sense strand
aaggagggcuucccgauca

SEQ ID NO: 719990 - RNA, 19 nt, Homo sapiens
  misc_RNA (1)...(19): siRNA sense strand
gcuucgaccucaugaacaa

SEQ ID NO: 719991 - RNA, 19 nt, Homo sapiens
  misc_RNA (1)...(19): siRNA sense strand
gaaguaagugaggaagaaa

SEQ ID NO: 719992 - RNA, 19 nt, Homo sapiens
  misc_RNA (1)...(19): siRNA sense strand
caacaucgucaccguuaga

SEQ ID NO: 719993 - RNA, 19 nt, Homo sapiens
  misc_RNA (1)...(19): siRNA sense strand
ugagggagaucaacaccau

SEQ ID NO: 719994 - RNA, 19 nt, Homo sapiens
  misc_RNA (1)...(19): siRNA sense strand
aaaggacucuuggaaagug

SEQ ID NO: 719995 - RNA, 19 nt, Homo sapiens
  misc_RNA (1)...(19): siRNA sense strand
gcucuaaagcggcugaaga

SEQ ID NO: 719996 - RNA, 19 nt, Homo sapiens
  misc_RNA (1)...(19): siRNA sense strand
ggcugaagauggagaagga

SEQ ID NO: 719997 - RNA, 19 nt, Homo sapiens
  misc_RNA (1)...(19): siRNA sense strand
agacagaggagaagaagau

SEQ ID NO: 719998 - RNA, 19 nt, Homo sapiens
  misc_RNA (1)...(19): siRNA sense strand
gaucaacaccauccucaag

SEQ ID NO: 719999 - RNA, 19 nt, Homo sapiens
  misc_RNA (1)...(19): siRNA sense strand
gaugaaauuguggcucuaa

SEQ ID NO: 720000 - RNA, 19 nt, Homo sapiens
  misc_RNA (1)...(19): siRNA sense strand
gaaucaggcucagguucug

SEQ ID NO: 720001 - RNA, 19 nt, Homo sapiens
  misc_RNA (1)...(19): siRNA sense strand
gaggugaagacccugauga

SEQ ID NO: 720002 - RNA, 19 nt, Homo sapiens
  misc_RNA (1)...(19): siRNA sense strand
ggaggaggaggaagaggaa

SEQ ID NO: 720003 - RNA, 19 nt, Homo sapiens
  misc_RNA (1)...(19): siRNA sense strand
ggaaacgacaucgagaaga

SEQ ID NO: 720004 - RNA, 19 nt, Homo sapiens
  misc_RNA (1)...(19): siRNA sense strand
agucagaaaucgaucagau

SEQ ID NO: 720005 - RNA, 19 nt, Homo sapiens
  misc_RNA (1)...(19): siRNA sense strand
ucacgucgcugagggagau

SEQ ID NO: 720006 - RNA, 19 nt, Homo sapiens
  misc_RNA (1)...(19): siRNA sense strand
gaaauuguggcucuaaagc

SEQ ID NO: 720007 - RNA, 19 nt, Homo sapiens
  misc_RNA (1)...(19): siRNA sense strand
gucaguggguugcaucuuc

SEQ ID NO: 720008 - RNA, 19 nt, Homo sapiens
  misc_RNA (1)...(19): siRNA sense strand
ugaagacccugaugaucca

SEQ ID NO: 720009 - RNA, 19 nt, Homo sapiens
  misc_RNA (1)...(19): siRNA sense strand
gaagacagaggagaagaag

SEQ ID NO: 720010 - RNA, 19 nt, Homo sapiens
  misc_RNA (1)...(19): siRNA sense strand
gaagaacgagaaaaugaaa

SEQ ID NO: 720011 - RNA, 19 nt, Homo sapiens
  misc_RNA (1)...(19): siRNA sense strand
ggaagaaaugagugaagau

SEQ ID NO: 720012 - RNA, 19 nt, Homo sapiens
  misc_RNA (1)...(19): siRNA sense strand
agacagaagagaagggaaa

SEQ ID NO: 720013 - RNA, 19 nt, Homo sapiens
  misc_RNA (1)...(19): siRNA sense strand
gaaugggaaagacagaaga

SEQ ID NO: 720014 - RNA, 19 nt, Homo sapiens
  misc_RNA (1)...(19): siRNA sense strand
caaaugucucggaaagaaa

SEQ ID NO: 720015 - RNA, 19 nt, Homo sapiens
  misc_RNA (1)...(19): siRNA sense strand
gaggagaagaagaugauuc

SEQ ID NO: 720016 - RNA, 19 nt, Homo sapiens
  misc_RNA (1)...(19): siRNA sense strand
gcaacauggacaagaucua

SEQ ID NO: 720017 - RNA, 19 nt, Homo sapiens
  misc_RNA (1)...(19): siRNA sense strand
aggaagaaaugagugaaga

SEQ ID NO: 720018 - RNA, 19 nt, Homo sapiens
  misc_RNA (1)...(19): siRNA sense strand
auaaggaacuccccguaua

SEQ ID NO: 720019 - RNA, 19 nt, Homo sapiens
  misc_RNA (1)...(19): siRNA sense strand
gagugaagaagcagaggaa

SEQ ID NO: 720020 - RNA, 19 nt, Homo sapiens
  misc_RNA (1)...(19): siRNA sense strand
ggaagucagaaaucgauca

SEQ ID NO: 720021 - RNA, 19 nt, Homo sapiens
  misc_RNA (1)...(19): siRNA sense strand
cccaacaucgucaccguua

SEQ ID NO: 720022 - RNA, 19 nt, Homo sapiens
  misc_RNA (1)...(19): siRNA sense strand
gggaaagacagaagagaag

SEQ ID NO: 720023 - RNA, 19 nt, Homo sapiens
  misc_RNA (1)...(19): siRNA sense strand
caaaagacaagaaaacaga

SEQ ID NO: 720024 - RNA, 19 nt, Homo sapiens
  misc_RNA (1)...(19): siRNA sense strand
gaucgaggagggcaccuau

SEQ ID NO: 720025 - RNA, 19 nt, Homo sapiens
  misc_RNA (1)...(19): siRNA sense strand
gaaaugagugaagaugaag

SEQ ID NO: 720026 - RNA, 19 nt, Homo sapiens
  misc_RNA (1)...(19): siRNA sense strand
ggaagaggaggaggaggaa

SEQ ID NO: 720027 - RNA, 19 nt, Homo sapiens
  misc_RNA (1)...(19): siRNA sense strand
caugcuagagugaaagaaa

SEQ ID NO: 720028 - RNA, 19 nt, Homo sapiens
  misc_RNA (1)...(19): siRNA sense strand
gaagagaaaauggaagaaa

SEQ ID NO: 720029 - RNA, 19 nt, Homo sapiens
  misc_RNA (1)...(19): siRNA sense strand
ggaaugggaaagacagaag

SEQ ID NO: 720030 - RNA, 19 nt, Homo sapiens
  misc_RNA (1)...(19): siRNA sense strand
cgucaccguuagagagauu

SEQ ID NO: 720031 - RNA, 19 nt, Homo sapiens
  misc_RNA (1)...(19): siRNA sense strand
gugaagaagcagaggaaga

SEQ ID NO: 720032 - RNA, 19 nt, Homo sapiens
  misc_RNA (1)...(19): siRNA sense strand
cgaagaaguaagugaggaa

SEQ ID NO: 720033 - RNA, 19 nt, Homo sapiens
  misc_RNA (1)...(19): siRNA sense strand
caacauggacaagaucuac

SEQ ID NO: 720034 - RNA, 19 nt, Homo sapiens
  misc_RNA (1)...(19): siRNA sense strand
ggaacaagaggagaaagca

SEQ ID NO: 720035 - RNA, 19 nt, Homo sapiens
  misc_RNA (1)...(19): siRNA sense strand
gaaacgaaggaaggaacaa

SEQ ID NO: 720036 - RNA, 19 nt, Homo sapiens
  misc_RNA (1)...(19): siRNA sense strand
ggaagggagcaccagugaa

SEQ ID NO: 720037 - RNA, 19 nt, Homo sapiens
  misc_RNA (1)...(19): siRNA sense strand
cagaggagaagaagaugau

SEQ ID NO: 720038 - RNA, 19 nt, Homo sapiens
  misc_RNA (1)...(19): siRNA sense strand
guaagugaggaagaaauga

SEQ ID NO: 720039 - RNA, 19 nt, Homo sapiens
  misc_RNA (1)...(19): siRNA sense strand
gcagaaucaggcucagguu

SEQ ID NO: 720040 - RNA, 19 nt, Homo sapiens
  misc_RNA (1)...(19): siRNA sense strand
cagaagagaagggaaaugg

SEQ ID NO: 720041 - RNA, 19 nt, Homo sapiens
  misc_RNA (1)...(19): siRNA sense strand
aggacggccucaagcauga

SEQ ID NO: 720042 - RNA, 19 nt, Homo sapiens
  misc_RNA (1)...(19): siRNA sense strand
gcaccuauggaguggucua

SEQ ID NO: 720043 - RNA, 19 nt, Homo sapiens
  misc_RNA (1)...(19): siRNA sense strand
gacagagggcgacuaugug

SEQ ID NO: 720044 - RNA, 19 nt, Homo sapiens
  misc_RNA (1)...(19): siRNA sense strand
aagaaaugagugaagauga

SEQ ID NO: 720045 - RNA, 19 nt, Homo sapiens
  misc_RNA (1)...(19): siRNA sense strand
ggaaauggcaagggagcau

SEQ ID NO: 720046 - RNA, 19 nt, Homo sapiens
  misc_RNA (1)...(19): siRNA sense strand
agaggagaaagcagagaua

SEQ ID NO: 720047 - RNA, 19 nt, Homo sapiens
  misc_RNA (1)...(19): siRNA sense strand
gaagauggagaaggagaag

SEQ ID NO: 720048 - RNA, 19 nt, Homo sapiens
  misc_RNA (1)...(19): siRNA sense strand
gaggagaccggcagcaacu

SEQ ID NO: 720049 - RNA, 19 nt, Homo sapiens
  misc_RNA (1)...(19): siRNA sense strand
agaaagagagcacgaacgu

SEQ ID NO: 720050 - RNA, 19 nt, Homo sapiens
  misc_RNA (1)...(19): siRNA sense strand
gaggaagaaaugagugaag

SEQ ID NO: 720051 - RNA, 19 nt, Homo sapiens
  misc_RNA (1)...(19): siRNA sense strand
gcagagauaaaacgcuuaa

SEQ ID NO: 720052 - RNA, 19 nt, Homo sapiens
  misc_RNA (1)...(19): siRNA sense strand
ugggaaagacagaagagaa

SEQ ID NO: 720053 - RNA, 19 nt, Homo sapiens
  misc_RNA (1)...(19): siRNA sense strand
ucccagcagucaagaagau

SEQ ID NO: 720054 - RNA, 19 nt, Homo sapiens
  misc_RNA (1)...(19): siRNA sense strand
agaagcagaggaagaagug

SEQ ID NO: 720055 - RNA, 19 nt, Homo sapiens
  misc_RNA (1)...(19): siRNA sense strand
uauggaagacagaggagaa

SEQ ID NO: 720056 - RNA, 19 nt, Homo sapiens
  misc_RNA (1)...(19): siRNA sense strand
ugaagaugaagaacgagaa

SEQ ID NO: 720057 - RNA, 19 nt, Homo sapiens
  misc_RNA (1)...(19): siRNA sense strand
gugaggaagaaaugaguga

SEQ ID NO: 720058 - RNA, 19 nt, Homo sapiens
  misc_RNA (1)...(19): siRNA sense strand
gaacuccccguauagaaga

SEQ ID NO: 720059 - RNA, 19 nt, Homo sapiens
  misc_RNA (1)...(19): siRNA sense strand
ugaaaaggacucuuggaaa

SEQ ID NO: 720060 - RNA, 19 nt, Homo sapiens
  misc_RNA (1)...(19): siRNA sense strand
gaaaacagaugaaauugug

SEQ ID NO: 720061 - RNA, 19 nt, Homo sapiens
  misc_RNA (1)...(19): siRNA sense strand
gagcaccagugaagaauca

SEQ ID NO: 720062 - RNA, 19 nt, Homo sapiens
  misc_RNA (1)...(19): siRNA sense strand
ugaaacaccugcacgacaa

SEQ ID NO: 720063 - RNA, 19 nt, Homo sapiens
  misc_RNA (1)...(19): siRNA sense strand
uaaagcggcugaagaugga

SEQ ID NO: 720064 - RNA, 19 nt, Homo sapiens
  misc_RNA (1)...(19): siRNA sense strand
agaaaugagugaagaugaa

SEQ ID NO: 720065 - RNA, 19 nt, Homo sapiens
  misc_RNA (1)...(19): siRNA sense strand
gagugaagaugaagaacga

SEQ ID NO: 720066 - RNA, 19 nt, Homo sapiens
  misc_RNA (1)...(19): siRNA sense strand
gcagcaacauggacaagau

SEQ ID NO: 720067 - RNA, 19 nt, Homo sapiens
  misc_RNA (1)...(19): siRNA sense strand
gaagggagcaccagugaag

SEQ ID NO: 720068 - RNA, 19 nt, Homo sapiens
  misc_RNA (1)...(19): siRNA sense strand
gaagaugaagaacgagaaa

SEQ ID NO: 720069 - RNA, 19 nt, Homo sapiens
  misc_RNA (1)...(19): siRNA sense strand
ggaguggucuacagagcaa

SEQ ID NO: 720070 - RNA, 19 nt, Homo sapiens
  misc_RNA (1)...(19): siRNA sense strand
gaagaaaugagugaagaug

SEQ ID NO: 720071 - RNA, 19 nt, Homo sapiens
  misc_RNA (1)...(19): siRNA sense strand
agaaguaagugaggaagaa

SEQ ID NO: 720072 - RNA, 19 nt, Homo sapiens
  misc_RNA (1)...(19): siRNA sense strand
ugacagagggcgacuaugu

SEQ ID NO: 720073 - RNA, 19 nt, Homo sapiens
  misc_RNA (1)...(19): siRNA sense strand
ugaagaagcagaggaagaa

SEQ ID NO: 720074 - RNA, 19 nt, Homo sapiens
  misc_RNA (1)...(19): siRNA sense strand
aaggagggcuucccgauca

SEQ ID NO: 720075 - RNA, 19 nt, Homo sapiens
  misc_RNA (1)...(19): siRNA sense strand
gcuucgaccucaugaacaa

SEQ ID NO: 720076 - RNA, 19 nt, Homo sapiens
  misc_RNA (1)...(19): siRNA sense strand
gaaguaagugaggaagaaa

SEQ ID NO: 720077 - RNA, 19 nt, Homo sapiens
  misc_RNA (1)...(19): siRNA sense strand
caacaucgucaccguuaga

SEQ ID NO: 720078 - RNA, 19 nt, Homo sapiens
  misc_RNA (1)...(19): siRNA sense strand
ugagggagaucaacaccau

SEQ ID NO: 720079 - RNA, 19 nt, Homo sapiens
  misc_RNA (1)...(19): siRNA sense strand
gcucuaaagcggcugaaga

SEQ ID NO: 720080 - RNA, 19 nt, Homo sapiens
  misc_RNA (1)...(19): siRNA sense strand
ggcugaagauggagaagga

SEQ ID NO: 720081 - RNA, 19 nt, Homo sapiens
  misc_RNA (1)...(19): siRNA sense strand
gaugaaauuguggcucuaa

SEQ ID NO: 720082 - RNA, 19 nt, Homo sapiens
  misc_RNA (1)...(19): siRNA sense strand
gaucaacaccauccucaag

SEQ ID NO: 720083 - RNA, 19 nt, Homo sapiens
  misc_RNA (1)...(19): siRNA sense strand
ggaggaggaggaagaggaa

SEQ ID NO: 720084 - RNA, 19 nt, Homo sapiens
  misc_RNA (1)...(19): siRNA sense strand
gaggugaagacccugauga

SEQ ID NO: 720085 - RNA, 19 nt, Homo sapiens
  misc_RNA (1)...(19): siRNA sense strand
gaaucaggcucagguucug

SEQ ID NO: 720086 - RNA, 19 nt, Homo sapiens
  misc_RNA (1)...(19): siRNA sense strand
ucacgucgcugagggagau

SEQ ID NO: 720087 - RNA, 19 nt, Homo sapiens
  misc_RNA (1)...(19): siRNA sense strand
agucagaaaucgaucagau

SEQ ID NO: 720088 - RNA, 19 nt, Homo sapiens
  misc_RNA (1)...(19): siRNA sense strand
gaaauuguggcucuaaagc

SEQ ID NO: 720089 - RNA, 19 nt, Homo sapiens
  misc_RNA (1)...(19): siRNA sense strand
gucaguggguugcaucuuc

SEQ ID NO: 720090 - RNA, 19 nt, Homo sapiens
  misc_RNA (1)...(19): siRNA sense strand
ugaagacccugaugaucca

SEQ ID NO: 720091 - RNA, 19 nt, Homo sapiens
  misc_RNA (1)...(19): siRNA sense strand
ggaagaaaugagugaagau

SEQ ID NO: 720092 - RNA, 19 nt, Homo sapiens
  misc_RNA (1)...(19): siRNA sense strand
gaagaacgagaaaaugaaa

SEQ ID NO: 720093 - RNA, 19 nt, Homo sapiens
  misc_RNA (1)...(19): siRNA sense strand
aggaagaaaugagugaaga

SEQ ID NO: 720094 - RNA, 19 nt, Homo sapiens
  misc_RNA (1)...(19): siRNA sense strand
gcaacauggacaagaucua

SEQ ID NO: 720095 - RNA, 19 nt, Homo sapiens
  misc_RNA (1)...(19): siRNA sense strand
gagugaagaagcagaggaa

SEQ ID NO: 720096 - RNA, 19 nt, Homo sapiens
  misc_RNA (1)...(19): siRNA sense strand
ggaagucagaaaucgauca

SEQ ID NO: 720097 - RNA, 19 nt, Homo sapiens
  misc_RNA (1)...(19): siRNA sense strand
cccaacaucgucaccguua

SEQ ID NO: 720098 - RNA, 19 nt, Homo sapiens
  misc_RNA (1)...(19): siRNA sense strand
gaaaugagugaagaugaag

SEQ ID NO: 720099 - RNA, 19 nt, Homo sapiens
  misc_RNA (1)...(19): siRNA sense strand
ggaagaggaggaggaggaa

SEQ ID NO: 720100 - RNA, 19 nt, Homo sapiens
  misc_RNA (1)...(19): siRNA sense strand
caaaagacaagaaaacaga

SEQ ID NO: 720101 - RNA, 19 nt, Homo sapiens
  misc_RNA (1)...(19): siRNA sense strand
gaucgaggagggcaccuau

SEQ ID NO: 720102 - RNA, 19 nt, Homo sapiens
  misc_RNA (1)...(19): siRNA sense strand
cgaagaaguaagugaggaa

SEQ ID NO: 720103 - RNA, 19 nt, Homo sapiens
  misc_RNA (1)...(19): siRNA sense strand
cgucaccguuagagagauu

SEQ ID NO: 720104 - RNA, 19 nt, Homo sapiens
  misc_RNA (1)...(19): siRNA sense strand
gugaagaagcagaggaaga

SEQ ID NO: 720105 - RNA, 19 nt, Homo sapiens
  misc_RNA (1)...(19): siRNA sense strand
caacauggacaagaucuac

SEQ ID NO: 720106 - RNA, 19 nt, Homo sapiens
  misc_RNA (1)...(19): siRNA sense strand
ggaagggagcaccagugaa

SEQ ID NO: 720107 - RNA, 19 nt, Homo sapiens
  misc_RNA (1)...(19): siRNA sense strand
gcagaaucaggcucagguu

SEQ ID NO: 720108 - RNA, 19 nt, Homo sapiens
  misc_RNA (1)...(19): siRNA sense strand
guaagugaggaagaaauga

SEQ ID NO: 720109 - RNA, 19 nt, Homo sapiens
  misc_RNA (1)...(19): siRNA sense strand
aagaaaugagugaagauga

SEQ ID NO: 720110 - RNA, 19 nt, Homo sapiens
  misc_RNA (1)...(19): siRNA sense strand
aggacggccucaagcauga

SEQ ID NO: 720111 - RNA, 19 nt, Homo sapiens
  misc_RNA (1)...(19): siRNA sense strand
gcaccuauggaguggucua

SEQ ID NO: 720112 - RNA, 19 nt, Homo sapiens
  misc_RNA (1)...(19): siRNA sense strand
gacagagggcgacuaugug

SEQ ID NO: 720113 - RNA, 19 nt, Homo sapiens
  misc_RNA (1)...(19): siRNA sense strand
gaggagaccggcagcaacu

SEQ ID NO: 720114 - RNA, 19 nt, Homo sapiens
  misc_RNA (1)...(19): siRNA sense strand
gaagauggagaaggagaag

SEQ ID NO: 720115 - RNA, 19 nt, Homo sapiens
  misc_RNA (1)...(19): siRNA sense strand
gaggaagaaaugagugaag

SEQ ID NO: 720116 - RNA, 19 nt, Homo sapiens
  misc_RNA (1)...(19): siRNA sense strand
ugaagaugaagaacgagaa

SEQ ID NO: 720117 - RNA, 19 nt, Homo sapiens
  misc_RNA (1)...(19): siRNA sense strand
ucccagcagucaagaagau

SEQ ID NO: 720118 - RNA, 19 nt, Homo sapiens
  misc_RNA (1)...(19): siRNA sense strand
agaagcagaggaagaagug

SEQ ID NO: 720119 - RNA, 19 nt, Homo sapiens
  misc_RNA (1)...(19): siRNA sense strand
gugaggaagaaaugaguga

SEQ ID NO: 720120 - RNA, 19 nt, Homo sapiens
  misc_RNA (1)...(19): siRNA sense strand
gcaccagugaagaaucaga

SEQ ID NO: 720121 - RNA, 19 nt, Homo sapiens
  misc_RNA (1)...(19): siRNA sense strand
ugaagauggagaaggagaa

SEQ ID NO: 720122 - RNA, 19 nt, Homo sapiens
  misc_RNA (1)...(19): siRNA sense strand
aagaggaggaggaggaaga

SEQ ID NO: 720123 - RNA, 19 nt, Homo sapiens
  misc_RNA (1)...(19): siRNA sense strand
acaagguguucaaggaucu

SEQ ID NO: 720124 - RNA, 19 nt, Homo sapiens
  misc_RNA (1)...(19): siRNA sense strand
gaguacggauccccucuga

SEQ ID NO: 720125 - RNA, 19 nt, Homo sapiens
  misc_RNA (1)...(19): siRNA sense strand
ccaacaucgucaccguuag

SEQ ID NO: 720126 - RNA, 19 nt, Homo sapiens
  misc_RNA (1)...(19): siRNA sense strand
gaagucagaaaucgaucag

SEQ ID NO: 720127 - RNA, 19 nt, Homo sapiens
  misc_RNA (1)...(19): siRNA sense strand
ggugaagacccugaugauc

SEQ ID NO: 720128 - RNA, 19 nt, Homo sapiens
  misc_RNA (1)...(19): siRNA sense strand
ugaaauuguggcucuaaag

SEQ ID NO: 720129 - RNA, 19 nt, Homo sapiens
  misc_RNA (1)...(19): siRNA sense strand
gggcuucgaccucaugaac

SEQ ID NO: 720130 - RNA, 19 nt, Homo sapiens
  misc_RNA (1)...(19): siRNA sense strand
ggaggugaagacccugaug

SEQ ID NO: 720131 - RNA, 19 nt, Homo sapiens
  misc_RNA (1)...(19): siRNA sense strand
ggagaccggcagcaacucu

SEQ ID NO: 720132 - RNA, 19 nt, Homo sapiens
  misc_RNA (1)...(19): siRNA sense strand
gaaacgacaucgagaagaa

SEQ ID NO: 720133 - RNA, 19 nt, Homo sapiens
  misc_RNA (1)...(19): siRNA sense strand
gcaaaugucucggaaagaa

SEQ ID NO: 720134 - RNA, 19 nt, Homo sapiens
  misc_RNA (1)...(19): siRNA sense strand
gaaaacagaugaaauugug

SEQ ID NO: 720135 - RNA, 19 nt, Homo sapiens
  misc_RNA (1)...(19): siRNA sense strand
gcauggagaucacaauaag

SEQ ID NO: 720136 - RNA, 19 nt, Homo sapiens
  misc_RNA (1)...(19): siRNA sense strand
gagcaccagugaagaauca

SEQ ID NO: 720137 - RNA, 19 nt, Homo sapiens
  misc_RNA (1)...(19): siRNA sense strand
ugaaacaccugcacgacaa

SEQ ID NO: 720138 - RNA, 19 nt, Homo sapiens
  misc_RNA (1)...(19): siRNA sense strand
uaaagcggcugaagaugga

SEQ ID NO: 720139 - RNA, 19 nt, Homo sapiens
  misc_RNA (1)...(19): siRNA sense strand
agaaaugagugaagaugaa

SEQ ID NO: 720140 - RNA, 19 nt, Homo sapiens
  misc_RNA (1)...(19): siRNA sense strand
gagugaagaugaagaacga

SEQ ID NO: 720141 - RNA, 19 nt, Homo sapiens
  misc_RNA (1)...(19): siRNA sense strand
gcagcaacauggacaagau

SEQ ID NO: 720142 - RNA, 19 nt, Homo sapiens
  misc_RNA (1)...(19): siRNA sense strand
gaagggagcaccagugaag

SEQ ID NO: 720143 - RNA, 19 nt, Homo sapiens
  misc_RNA (1)...(19): siRNA sense strand
gagaagacucuauggaaga

SEQ ID NO: 720144 - RNA, 19 nt, Homo sapiens
  misc_RNA (1)...(19): siRNA sense strand
ggaguggucuacagagcaa

SEQ ID NO: 720145 - RNA, 19 nt, Homo sapiens
  misc_RNA (1)...(19): siRNA sense strand
gaagaugaagaacgagaaa

SEQ ID NO: 720146 - RNA, 19 nt, Homo sapiens
  misc_RNA (1)...(19): siRNA sense strand
gcacgaacgucggaaacga

SEQ ID NO: 720147 - RNA, 19 nt, Homo sapiens
  misc_RNA (1)...(19): siRNA sense strand
cagcaaaugucucggaaag

SEQ ID NO: 720148 - RNA, 19 nt, Homo sapiens
  misc_RNA (1)...(19): siRNA sense strand
cagaaaagaugaaaagaga

SEQ ID NO: 720149 - RNA, 19 nt, Homo sapiens
  misc_RNA (1)...(19): siRNA sense strand
gaagaaaugagugaagaug

SEQ ID NO: 720150 - RNA, 19 nt, Homo sapiens
  misc_RNA (1)...(19): siRNA sense strand
agaaguaagugaggaagaa

SEQ ID NO: 720151 - RNA, 19 nt, Homo sapiens
  misc_RNA (1)...(19): siRNA sense strand
ggaagacagaggagaagaa

SEQ ID NO: 720152 - RNA, 19 nt, Homo sapiens
  misc_RNA (1)...(19): siRNA sense strand
ugacagagggcgacuaugu

SEQ ID NO: 720153 - RNA, 19 nt, Homo sapiens
  misc_RNA (1)...(19): siRNA sense strand
gagaagaacaggauaaagc

SEQ ID NO: 720154 - RNA, 19 nt, Homo sapiens
  misc_RNA (1)...(19): siRNA sense strand
gagcauuccaggagagaaa

SEQ ID NO: 720155 - RNA, 19 nt, Homo sapiens
  misc_RNA (1)...(19): siRNA sense strand
ugaagaagcagaggaagaa

SEQ ID NO: 720156 - RNA, 19 nt, Homo sapiens
  misc_RNA (1)...(19): siRNA sense strand
aaggagggcuucccgauca

SEQ ID NO: 720157 - RNA, 19 nt, Homo sapiens
  misc_RNA (1)...(19): siRNA sense strand
gcuucgaccucaugaacaa

SEQ ID NO: 720158 - RNA, 19 nt, Homo sapiens
  misc_RNA (1)...(19): siRNA sense strand
gaaguaagugaggaagaaa

SEQ ID NO: 720159 - RNA, 19 nt, Homo sapiens
  misc_RNA (1)...(19): siRNA sense strand
caacaucgucaccguuaga

SEQ ID NO: 720160 - RNA, 19 nt, Homo sapiens
  misc_RNA (1)...(19): siRNA sense strand
ugagggagaucaacaccau

SEQ ID NO: 720161 - RNA, 19 nt, Homo sapiens
  misc_RNA (1)...(19): siRNA sense strand
gcucuaaagcggcugaaga

SEQ ID NO: 720162 - RNA, 19 nt, Homo sapiens
  misc_RNA (1)...(19): siRNA sense strand
ggcugaagauggagaagga

SEQ ID NO: 720163 - RNA, 19 nt, Homo sapiens
  misc_RNA (1)...(19): siRNA sense strand
agacagaggagaagaagau

SEQ ID NO: 720164 - RNA, 19 nt, Homo sapiens
  misc_RNA (1)...(19): siRNA sense strand
gaucaacaccauccucaag

SEQ ID NO: 720165 - RNA, 19 nt, Homo sapiens
  misc_RNA (1)...(19): siRNA sense strand
gaugaaauuguggcucuaa

SEQ ID NO: 720166 - RNA, 19 nt, Homo sapiens
  misc_RNA (1)...(19): siRNA sense strand
gaaucaggcucagguucug

SEQ ID NO: 720167 - RNA, 19 nt, Homo sapiens
  misc_RNA (1)...(19): siRNA sense strand
gaggugaagacccugauga

SEQ ID NO: 720168 - RNA, 19 nt, Homo sapiens
  misc_RNA (1)...(19): siRNA sense strand
ggaggaggaggaagaggaa

SEQ ID NO: 720169 - RNA, 19 nt, Homo sapiens
  misc_RNA (1)...(19): siRNA sense strand
ggaaacgacaucgagaaga

SEQ ID NO: 720170 - RNA, 19 nt, Homo sapiens
  misc_RNA (1)...(19): siRNA sense strand
agucagaaaucgaucagau

SEQ ID NO: 720171 - RNA, 19 nt, Homo sapiens
  misc_RNA (1)...(19): siRNA sense strand
ucacgucgcugagggagau

SEQ ID NO: 720172 - RNA, 19 nt, Homo sapiens
  misc_RNA (1)...(19): siRNA sense strand
gaaauuguggcucuaaagc

SEQ ID NO: 720173 - RNA, 19 nt, Homo sapiens
  misc_RNA (1)...(19): siRNA sense strand
gucaguggguugcaucuuc

SEQ ID NO: 720174 - RNA, 19 nt, Homo sapiens
  misc_RNA (1)...(19): siRNA sense strand
ugaagacccugaugaucca

SEQ ID NO: 720175 - RNA, 19 nt, Homo sapiens
  misc_RNA (1)...(19): siRNA sense strand
caaaugucucggaaagaaa

SEQ ID NO: 720176 - RNA, 19 nt, Homo sapiens
  misc_RNA (1)...(19): siRNA sense strand
gaagaacgagaaaaugaaa

SEQ ID NO: 720177 - RNA, 19 nt, Homo sapiens
  misc_RNA (1)...(19): siRNA sense strand
ggaagaaaugagugaagau

SEQ ID NO: 720178 - RNA, 19 nt, Homo sapiens
  misc_RNA (1)...(19): siRNA sense strand
gaagacagaggagaagaag

SEQ ID NO: 720179 - RNA, 19 nt, Homo sapiens
  misc_RNA (1)...(19): siRNA sense strand
agacagaagagaagggaaa

SEQ ID NO: 720180 - RNA, 19 nt, Homo sapiens
  misc_RNA (1)...(19): siRNA sense strand
gaaugggaaagacagaaga

SEQ ID NO: 720181 - RNA, 19 nt, Homo sapiens
  misc_RNA (1)...(19): siRNA sense strand
aggaagaaaugagugaaga

SEQ ID NO: 720182 - RNA, 19 nt, Homo sapiens
  misc_RNA (1)...(19): siRNA sense strand
gaggagaagaagaugauuc

SEQ ID NO: 720183 - RNA, 19 nt, Homo sapiens
  misc_RNA (1)...(19): siRNA sense strand
gcaacauggacaagaucua

SEQ ID NO: 720184 - RNA, 19 nt, Homo sapiens
  misc_RNA (1)...(19): siRNA sense strand
auaaggaacuccccguaua

SEQ ID NO: 720185 - RNA, 19 nt, Homo sapiens
  misc_RNA (1)...(19): siRNA sense strand
gagugaagaagcagaggaa

SEQ ID NO: 720186 - RNA, 19 nt, Homo sapiens
  misc_RNA (1)...(19): siRNA sense strand
ggaagucagaaaucgauca

SEQ ID NO: 720187 - RNA, 19 nt, Homo sapiens
  misc_RNA (1)...(19): siRNA sense strand
cccaacaucgucaccguua

SEQ ID NO: 720188 - RNA, 19 nt, Homo sapiens
  misc_RNA (1)...(19): siRNA sense strand
gggaaagacagaagagaag

SEQ ID NO: 720189 - RNA, 19 nt, Homo sapiens
  misc_RNA (1)...(19): siRNA sense strand
caaaagacaagaaaacaga

SEQ ID NO: 720190 - RNA, 19 nt, Homo sapiens
  misc_RNA (1)...(19): siRNA sense strand
gaucgaggagggcaccuau

SEQ ID NO: 720191 - RNA, 19 nt, Homo sapiens
  misc_RNA (1)...(19): siRNA sense strand
gaaaugagugaagaugaag

SEQ ID NO: 720192 - RNA, 19 nt, Homo sapiens
  misc_RNA (1)...(19): siRNA sense strand
ggaagaggaggaggaggaa

SEQ ID NO: 720193 - RNA, 19 nt, Homo sapiens
  misc_RNA (1)...(19): siRNA sense strand
caugcuagagugaaagaaa

SEQ ID NO: 720194 - RNA, 19 nt, Homo sapiens
  misc_RNA (1)...(19): siRNA sense strand
gaagagaaaauggaagaaa

SEQ ID NO: 720195 - RNA, 19 nt, Homo sapiens
  misc_RNA (1)...(19): siRNA sense strand
ggaaugggaaagacagaag

SEQ ID NO: 720196 - RNA, 19 nt, Homo sapiens
  misc_RNA (1)...(19): siRNA sense strand
cgucaccguuagagagauu

SEQ ID NO: 720197 - RNA, 19 nt, Homo sapiens
  misc_RNA (1)...(19): siRNA sense strand
gugaagaagcagaggaaga

SEQ ID NO: 720198 - RNA, 19 nt, Homo sapiens
  misc_RNA (1)...(19): siRNA sense strand
cgaagaaguaagugaggaa

SEQ ID NO: 720199 - RNA, 19 nt, Homo sapiens
  misc_RNA (1)...(19): siRNA sense strand
caacauggacaagaucuac

SEQ ID NO: 720200 - RNA, 19 nt, Homo sapiens
  misc_RNA (1)...(19): siRNA sense strand
ggaagggagcaccagugaa

SEQ ID NO: 720201 - RNA, 19 nt, Homo sapiens
  misc_RNA (1)...(19): siRNA sense strand
gcagaaucaggcucagguu

SEQ ID NO: 720202 - RNA, 19 nt, Homo sapiens
  misc_RNA (1)...(19): siRNA sense strand
cagaggagaagaagaugau

SEQ ID NO: 720203 - RNA, 19 nt, Homo sapiens
  misc_RNA (1)...(19): siRNA sense strand
guaagugaggaagaaauga

SEQ ID NO: 720204 - RNA, 19 nt, Homo sapiens
  misc_RNA (1)...(19): siRNA sense strand
cagaagagaagggaaaugg

SEQ ID NO: 720205 - RNA, 19 nt, Homo sapiens
  misc_RNA (1)...(19): siRNA sense strand
aggacggccucaagcauga

SEQ ID NO: 720206 - RNA, 19 nt, Homo sapiens
  misc_RNA (1)...(19): siRNA sense strand
gcaccuauggaguggucua

SEQ ID NO: 720207 - RNA, 19 nt, Homo sapiens
  misc_RNA (1)...(19): siRNA sense strand
gacagagggcgacuaugug

SEQ ID NO: 720208 - RNA, 19 nt, Homo sapiens
  misc_RNA (1)...(19): siRNA sense strand
aagaaaugagugaagauga

SEQ ID NO: 720209 - RNA, 19 nt, Homo sapiens
  misc_RNA (1)...(19): siRNA sense strand
ggaaauggcaagggagcau

SEQ ID NO: 720210 - RNA, 19 nt, Homo sapiens
  misc_RNA (1)...(19): siRNA sense strand
gaagauggagaaggagaag

SEQ ID NO: 720211 - RNA, 19 nt, Homo sapiens
  misc_RNA (1)...(19): siRNA sense strand
gaggagaccggcagcaacu

SEQ ID NO: 720212 - RNA, 19 nt, Homo sapiens
  misc_RNA (1)...(19): siRNA sense strand
gaggaagaaaugagugaag

SEQ ID NO: 720213 - RNA, 19 nt, Homo sapiens
  misc_RNA (1)...(19): siRNA sense strand
agaaagagagcacgaacgu

SEQ ID NO: 720214 - RNA, 19 nt, Homo sapiens
  misc_RNA (1)...(19): siRNA sense strand
ugggaaagacagaagagaa

SEQ ID NO: 720215 - RNA, 19 nt, Homo sapiens
  misc_RNA (1)...(19): siRNA sense strand
ucccagcagucaagaagau

SEQ ID NO: 720216 - RNA, 19 nt, Homo sapiens
  misc_RNA (1)...(19): siRNA sense strand
uauggaagacagaggagaa

SEQ ID NO: 720217 - RNA, 19 nt, Homo sapiens
  misc_RNA (1)...(19): siRNA sense strand
agaagcagaggaagaagug

SEQ ID NO: 720218 - RNA, 19 nt, Homo sapiens
  misc_RNA (1)...(19): siRNA sense strand
ugaagaugaagaacgagaa

SEQ ID NO: 720219 - RNA, 19 nt, Homo sapiens
  misc_RNA (1)...(19): siRNA sense strand
gugaggaagaaaugaguga

SEQ ID NO: 720220 - RNA, 19 nt, Homo sapiens
  misc_RNA (1)...(19): siRNA sense strand
gaacuccccguauagaaga

SEQ ID NO: 720221 - RNA, 19 nt, Homo sapiens
  misc_RNA (1)...(19): siRNA sense strand
gcaccagugaagaaucaga

SEQ ID NO: 720222 - RNA, 19 nt, Homo sapiens
  misc_RNA (1)...(19): siRNA sense strand
gaugaaaagagaaaagaga

SEQ ID NO: 720223 - RNA, 19 nt, Homo sapiens
  misc_RNA (1)...(19): siRNA sense strand
caucgagaagaacaggaua

SEQ ID NO: 720224 - RNA, 19 nt, Homo sapiens
  misc_RNA (1)...(19): siRNA sense strand
aagaggaggaggaggaaga

SEQ ID NO: 720225 - RNA, 19 nt, Homo sapiens
  misc_RNA (1)...(19): siRNA sense strand
acaagguguucaaggaucu

SEQ ID NO: 720226 - RNA, 19 nt, Homo sapiens
  misc_RNA (1)...(19): siRNA sense strand
gaguacggauccccucuga

SEQ ID NO: 720227 - RNA, 19 nt, Homo sapiens
  misc_RNA (1)...(19): siRNA sense strand
ugaagauggagaaggagaa

SEQ ID NO: 720228 - RNA, 19 nt, Homo sapiens
  misc_RNA (1)...(19): siRNA sense strand
ccaacaucgucaccguuag

SEQ ID NO: 720229 - RNA, 19 nt, Homo sapiens
  misc_RNA (1)...(19): siRNA sense strand
gaagucagaaaucgaucag

SEQ ID NO: 720230 - RNA, 19 nt, Homo sapiens
  misc_RNA (1)...(19): siRNA sense strand
ggugaagacccugaugauc

SEQ ID NO: 720231 - RNA, 19 nt, Homo sapiens
  misc_RNA (1)...(19): siRNA sense strand
gggcuucgaccucaugaac

SEQ ID NO: 720232 - RNA, 19 nt, Homo sapiens
  misc_RNA (1)...(19): siRNA sense strand
gaaacgacaucgagaagaa

SEQ ID NO: 720233 - RNA, 19 nt, Homo sapiens
  misc_RNA (1)...(19): siRNA sense strand
gcaaaugucucggaaagaa

SEQ ID NO: 720234 - RNA, 19 nt, Homo sapiens
  misc_RNA (1)...(19): siRNA sense strand
gaaaacagaugaaauugug

SEQ ID NO: 720235 - RNA, 19 nt, Homo sapiens
  misc_RNA (1)...(19): siRNA sense strand
gcauggagaucacaauaag

SEQ ID NO: 720236 - RNA, 19 nt, Homo sapiens
  misc_RNA (1)...(19): siRNA sense strand
gagcaccagugaagaauca

SEQ ID NO: 720237 - RNA, 19 nt, Homo sapiens
  misc_RNA (1)...(19): siRNA sense strand
ugaaacaccugcacgacaa

SEQ ID NO: 720238 - RNA, 19 nt, Homo sapiens
  misc_RNA (1)...(19): siRNA sense strand
uaaagcggcugaagaugga

SEQ ID NO: 720239 - RNA, 19 nt, Homo sapiens
  misc_RNA (1)...(19): siRNA sense strand
agaaaugagugaagaugaa

SEQ ID NO: 720240 - RNA, 19 nt, Homo sapiens
  misc_RNA (1)...(19): siRNA sense strand
gagugaagaugaagaacga

SEQ ID NO: 720241 - RNA, 19 nt, Homo sapiens
  misc_RNA (1)...(19): siRNA sense strand
gcagcaacauggacaagau

SEQ ID NO: 720242 - RNA, 19 nt, Homo sapiens
  misc_RNA (1)...(19): siRNA sense strand
gaagggagcaccagugaag

SEQ ID NO: 720243 - RNA, 19 nt, Homo sapiens
  misc_RNA (1)...(19): siRNA sense strand
gagaagacucuauggaaga

SEQ ID NO: 720244 - RNA, 19 nt, Homo sapiens
  misc_RNA (1)...(19): siRNA sense strand
ggaguggucuacagagcaa

SEQ ID NO: 720245 - RNA, 19 nt, Homo sapiens
  misc_RNA (1)...(19): siRNA sense strand
gaagaugaagaacgagaaa

SEQ ID NO: 720246 - RNA, 19 nt, Homo sapiens
  misc_RNA (1)...(19): siRNA sense strand
gcacgaacgucggaaacga

SEQ ID NO: 720247 - RNA, 19 nt, Homo sapiens
  misc_RNA (1)...(19): siRNA sense strand
cagcaaaugucucggaaag

SEQ ID NO: 720248 - RNA, 19 nt, Homo sapiens
  misc_RNA (1)...(19): siRNA sense strand
cagaaaagaugaaaagaga

SEQ ID NO: 720249 - RNA, 19 nt, Homo sapiens
  misc_RNA (1)...(19): siRNA sense strand
gaagaaaugagugaagaug

SEQ ID NO: 720250 - RNA, 19 nt, Homo sapiens
  misc_RNA (1)...(19): siRNA sense strand
agaaguaagugaggaagaa

SEQ ID NO: 720251 - RNA, 19 nt, Homo sapiens
  misc_RNA (1)...(19): siRNA sense strand
ggaagacagaggagaagaa

SEQ ID NO: 720252 - RNA, 19 nt, Homo sapiens
  misc_RNA (1)...(19): siRNA sense strand
ugacagagggcgacuaugu

SEQ ID NO: 720253 - RNA, 19 nt, Homo sapiens
  misc_RNA (1)...(19): siRNA sense strand
gagaagaacaggauaaagc

SEQ ID NO: 720254 - RNA, 19 nt, Homo sapiens
  misc_RNA (1)...(19): siRNA sense strand
gagcauuccaggagagaaa

SEQ ID NO: 720255 - RNA, 19 nt, Homo sapiens
  misc_RNA (1)...(19): siRNA sense strand
ugaagaagcagaggaagaa

SEQ ID NO: 720256 - RNA, 19 nt, Homo sapiens
  misc_RNA (1)...(19): siRNA sense strand
aaggagggcuucccgauca

SEQ ID NO: 720257 - RNA, 19 nt, Homo sapiens
  misc_RNA (1)...(19): siRNA sense strand
gcuucgaccucaugaacaa

SEQ ID NO: 720258 - RNA, 19 nt, Homo sapiens
  misc_RNA (1)...(19): siRNA sense strand
gaaguaagugaggaagaaa

SEQ ID NO: 720259 - RNA, 19 nt, Homo sapiens
  misc_RNA (1)...(19): siRNA sense strand
caacaucgucaccguuaga

SEQ ID NO: 720260 - RNA, 19 nt, Homo sapiens
  misc_RNA (1)...(19): siRNA sense strand
ugagggagaucaacaccau

SEQ ID NO: 720261 - RNA, 19 nt, Homo sapiens
  misc_RNA (1)...(19): siRNA sense strand
gcucuaaagcggcugaaga

SEQ ID NO: 720262 - RNA, 19 nt, Homo sapiens
  misc_RNA (1)...(19): siRNA sense strand
ggcugaagauggagaagga

SEQ ID NO: 720263 - RNA, 19 nt, Homo sapiens
  misc_RNA (1)...(19): siRNA sense strand
agacagaggagaagaagau

SEQ ID NO: 720264 - RNA, 19 nt, Homo sapiens
  misc_RNA (1)...(19): siRNA sense strand
gaucaacaccauccucaag

SEQ ID NO: 720265 - RNA, 19 nt, Homo sapiens
  misc_RNA (1)...(19): siRNA sense strand
gaugaaauuguggcucuaa

SEQ ID NO: 720266 - RNA, 19 nt, Homo sapiens
  misc_RNA (1)...(19): siRNA sense strand
gaaucaggcucagguucug

SEQ ID NO: 720267 - RNA, 19 nt, Homo sapiens
  misc_RNA (1)...(19): siRNA sense strand
gaggugaagacccugauga

SEQ ID NO: 720268 - RNA, 19 nt, Homo sapiens
  misc_RNA (1)...(19): siRNA sense strand
ggaggaggaggaagaggaa

SEQ ID NO: 720269 - RNA, 19 nt, Homo sapiens
  misc_RNA (1)...(19): siRNA sense strand
ggaaacgacaucgagaaga

SEQ ID NO: 720270 - RNA, 19 nt, Homo sapiens
  misc_RNA (1)...(19): siRNA sense strand
agucagaaaucgaucagau

SEQ ID NO: 720271 - RNA, 19 nt, Homo sapiens
  misc_RNA (1)...(19): siRNA sense strand
ucacgucgcugagggagau

SEQ ID NO: 720272 - RNA, 19 nt, Homo sapiens
  misc_RNA (1)...(19): siRNA sense strand
gaaauuguggcucuaaagc

SEQ ID NO: 720273 - RNA, 19 nt, Homo sapiens
  misc_RNA (1)...(19): siRNA sense strand
gucaguggguugcaucuuc

SEQ ID NO: 720274 - RNA, 19 nt, Homo sapiens
  misc_RNA (1)...(19): siRNA sense strand
ugaagacccugaugaucca

SEQ ID NO: 720275 - RNA, 19 nt, Homo sapiens
  misc_RNA (1)...(19): siRNA sense strand
caaaugucucggaaagaaa

SEQ ID NO: 720276 - RNA, 19 nt, Homo sapiens
  misc_RNA (1)...(19): siRNA sense strand
gaagaacgagaaaaugaaa

SEQ ID NO: 720277 - RNA, 19 nt, Homo sapiens
  misc_RNA (1)...(19): siRNA sense strand
ggaagaaaugagugaagau

SEQ ID NO: 720278 - RNA, 19 nt, Homo sapiens
  misc_RNA (1)...(19): siRNA sense strand
gaagacagaggagaagaag

SEQ ID NO: 720279 - RNA, 19 nt, Homo sapiens
  misc_RNA (1)...(19): siRNA sense strand
agacagaagagaagggaaa

SEQ ID NO: 720280 - RNA, 19 nt, Homo sapiens
  misc_RNA (1)...(19): siRNA sense strand
gaaugggaaagacagaaga

SEQ ID NO: 720281 - RNA, 19 nt, Homo sapiens
  misc_RNA (1)...(19): siRNA sense strand
aggaagaaaugagugaaga

SEQ ID NO: 720282 - RNA, 19 nt, Homo sapiens
  misc_RNA (1)...(19): siRNA sense strand
gaggagaagaagaugauuc

SEQ ID NO: 720283 - RNA, 19 nt, Homo sapiens
  misc_RNA (1)...(19): siRNA sense strand
gcaacauggacaagaucua

SEQ ID NO: 720284 - RNA, 19 nt, Homo sapiens
  misc_RNA (1)...(19): siRNA sense strand
auaaggaacuccccguaua

SEQ ID NO: 720285 - RNA, 19 nt, Homo sapiens
  misc_RNA (1)...(19): siRNA sense strand
gagugaagaagcagaggaa

SEQ ID NO: 720286 - RNA, 19 nt, Homo sapiens
  misc_RNA (1)...(19): siRNA sense strand
ggaagucagaaaucgauca

SEQ ID NO: 720287 - RNA, 19 nt, Homo sapiens
  misc_RNA (1)...(19): siRNA sense strand
cccaacaucgucaccguua

SEQ ID NO: 720288 - RNA, 19 nt, Homo sapiens
  misc_RNA (1)...(19): siRNA sense strand
gggaaagacagaagagaag

SEQ ID NO: 720289 - RNA, 19 nt, Homo sapiens
  misc_RNA (1)...(19): siRNA sense strand
caaaagacaagaaaacaga

SEQ ID NO: 720290 - RNA, 19 nt, Homo sapiens
  misc_RNA (1)...(19): siRNA sense strand
gaucgaggagggcaccuau

SEQ ID NO: 720291 - RNA, 19 nt, Homo sapiens
  misc_RNA (1)...(19): siRNA sense strand
gaaaugagugaagaugaag

SEQ ID NO: 720292 - RNA, 19 nt, Homo sapiens
  misc_RNA (1)...(19): siRNA sense strand
ggaagaggaggaggaggaa

SEQ ID NO: 720293 - RNA, 19 nt, Homo sapiens
  misc_RNA (1)...(19): siRNA sense strand
caugcuagagugaaagaaa

SEQ ID NO: 720294 - RNA, 19 nt, Homo sapiens
  misc_RNA (1)...(19): siRNA sense strand
gaagagaaaauggaagaaa

SEQ ID NO: 720295 - RNA, 19 nt, Homo sapiens
  misc_RNA (1)...(19): siRNA sense strand
ggaaugggaaagacagaag

SEQ ID NO: 720296 - RNA, 19 nt, Homo sapiens
  misc_RNA (1)...(19): siRNA sense strand
cgucaccguuagagagauu

SEQ ID NO: 720297 - RNA, 19 nt, Homo sapiens
  misc_RNA (1)...(19): siRNA sense strand
gugaagaagcagaggaaga

SEQ ID NO: 720298 - RNA, 19 nt, Homo sapiens
  misc_RNA (1)...(19): siRNA sense strand
cgaagaaguaagugaggaa

SEQ ID NO: 720299 - RNA, 19 nt, Homo sapiens
  misc_RNA (1)...(19): siRNA sense strand
caacauggacaagaucuac

SEQ ID NO: 720300 - RNA, 19 nt, Homo sapiens
  misc_RNA (1)...(19): siRNA sense strand
ggaagggagcaccagugaa

SEQ ID NO: 720301 - RNA, 19 nt, Homo sapiens
  misc_RNA (1)...(19): siRNA sense strand
gcagaaucaggcucagguu

SEQ ID NO: 720302 - RNA, 19 nt, Homo sapiens
  misc_RNA (1)...(19): siRNA sense strand
cagaggagaagaagaugau

SEQ ID NO: 720303 - RNA, 19 nt, Homo sapiens
  misc_RNA (1)...(19): siRNA sense strand
guaagugaggaagaaauga

SEQ ID NO: 720304 - RNA, 19 nt, Homo sapiens
  misc_RNA (1)...(19): siRNA sense strand
cagaagagaagggaaaugg

SEQ ID NO: 720305 - RNA, 19 nt, Homo sapiens
  misc_RNA (1)...(19): siRNA sense strand
aggacggccucaagcauga

SEQ ID NO: 720306 - RNA, 19 nt, Homo sapiens
  misc_RNA (1)...(19): siRNA sense strand
gcaccuauggaguggucua

SEQ ID NO: 720307 - RNA, 19 nt, Homo sapiens
  misc_RNA (1)...(19): siRNA sense strand
gacagagggcgacuaugug

SEQ ID NO: 720308 - RNA, 19 nt, Homo sapiens
  misc_RNA (1)...(19): siRNA sense strand
aagaaaugagugaagauga

SEQ ID NO: 720309 - RNA, 19 nt, Homo sapiens
  misc_RNA (1)...(19): siRNA sense strand
ggaaauggcaagggagcau

SEQ ID NO: 720310 - RNA, 19 nt, Homo sapiens
  misc_RNA (1)...(19): siRNA sense strand
gaagauggagaaggagaag

SEQ ID NO: 720311 - RNA, 19 nt, Homo sapiens
  misc_RNA (1)...(19): siRNA sense strand
gaggagaccggcagcaacu

SEQ ID NO: 720312 - RNA, 19 nt, Homo sapiens
  misc_RNA (1)...(19): siRNA sense strand
gaggaagaaaugagugaag

SEQ ID NO: 720313 - RNA, 19 nt, Homo sapiens
  misc_RNA (1)...(19): siRNA sense strand
agaaagagagcacgaacgu

SEQ ID NO: 720314 - RNA, 19 nt, Homo sapiens
  misc_RNA (1)...(19): siRNA sense strand
ugggaaagacagaagagaa

SEQ ID NO: 720315 - RNA, 19 nt, Homo sapiens
  misc_RNA (1)...(19): siRNA sense strand
ucccagcagucaagaagau

SEQ ID NO: 720316 - RNA, 19 nt, Homo sapiens
  misc_RNA (1)...(19): siRNA sense strand
uauggaagacagaggagaa

SEQ ID NO: 720317 - RNA, 19 nt, Homo sapiens
  misc_RNA (1)...(19): siRNA sense strand
agaagcagaggaagaagug

SEQ ID NO: 720318 - RNA, 19 nt, Homo sapiens
  misc_RNA (1)...(19): siRNA sense strand
ugaagaugaagaacgagaa

SEQ ID NO: 720319 - RNA, 19 nt, Homo sapiens
  misc_RNA (1)...(19): siRNA sense strand
gugaggaagaaaugaguga

SEQ ID NO: 720320 - RNA, 19 nt, Homo sapiens
  misc_RNA (1)...(19): siRNA sense strand
gaacuccccguauagaaga

SEQ ID NO: 720321 - RNA, 19 nt, Homo sapiens
  misc_RNA (1)...(19): siRNA sense strand
gcaccagugaagaaucaga

SEQ ID NO: 720322 - RNA, 19 nt, Homo sapiens
  misc_RNA (1)...(19): siRNA sense strand
gaugaaaagagaaaagaga

SEQ ID NO: 720323 - RNA, 19 nt, Homo sapiens
  misc_RNA (1)...(19): siRNA sense strand
caucgagaagaacaggaua

SEQ ID NO: 720324 - RNA, 19 nt, Homo sapiens
  misc_RNA (1)...(19): siRNA sense strand
aagaggaggaggaggaaga

SEQ ID NO: 720325 - RNA, 19 nt, Homo sapiens
  misc_RNA (1)...(19): siRNA sense strand
acaagguguucaaggaucu

SEQ ID NO: 720326 - RNA, 19 nt, Homo sapiens
  misc_RNA (1)...(19): siRNA sense strand
gaguacggauccccucuga

SEQ ID NO: 720327 - RNA, 19 nt, Homo sapiens
  misc_RNA (1)...(19): siRNA sense strand
ugaagauggagaaggagaa

SEQ ID NO: 720328 - RNA, 19 nt, Homo sapiens
  misc_RNA (1)...(19): siRNA sense strand
ccaacaucgucaccguuag

SEQ ID NO: 720329 - RNA, 19 nt, Homo sapiens
  misc_RNA (1)...(19): siRNA sense strand
gaagucagaaaucgaucag

SEQ ID NO: 720330 - RNA, 19 nt, Homo sapiens
  misc_RNA (1)...(19): siRNA sense strand
ggugaagacccugaugauc

SEQ ID NO: 720331 - RNA, 19 nt, Homo sapiens
  misc_RNA (1)...(19): siRNA sense strand
gggcuucgaccucaugaac

SEQ ID NO: 720332 - RNA, 19 nt, Homo sapiens
  misc_RNA (1)...(19): siRNA sense strand
gaaaacagaugaaauugug

SEQ ID NO: 720333 - RNA, 19 nt, Homo sapiens
  misc_RNA (1)...(19): siRNA sense strand
gagcaccagugaagaauca

SEQ ID NO: 720334 - RNA, 19 nt, Homo sapiens
  misc_RNA (1)...(19): siRNA sense strand
ugaaacaccugcacgacaa

SEQ ID NO: 720335 - RNA, 19 nt, Homo sapiens
  misc_RNA (1)...(19): siRNA sense strand
uaaagcggcugaagaugga

SEQ ID NO: 720336 - RNA, 19 nt, Homo sapiens
  misc_RNA (1)...(19): siRNA sense strand
agaaaugagugaagaugaa

SEQ ID NO: 720337 - RNA, 19 nt, Homo sapiens
  misc_RNA (1)...(19): siRNA sense strand
gagugaagaugaagaacga

SEQ ID NO: 720338 - RNA, 19 nt, Homo sapiens
  misc_RNA (1)...(19): siRNA sense strand
gcagcaacauggacaagau

SEQ ID NO: 720339 - RNA, 19 nt, Homo sapiens
  misc_RNA (1)...(19): siRNA sense strand
gaagggagcaccagugaag

SEQ ID NO: 720340 - RNA, 19 nt, Homo sapiens
  misc_RNA (1)...(19): siRNA sense strand
gaagaugaagaacgagaaa

SEQ ID NO: 720341 - RNA, 19 nt, Homo sapiens
  misc_RNA (1)...(19): siRNA sense strand
ggaguggucuacagagcaa

SEQ ID NO: 720342 - RNA, 19 nt, Homo sapiens
  misc_RNA (1)...(19): siRNA sense strand
gaagaaaugagugaagaug

SEQ ID NO: 720343 - RNA, 19 nt, Homo sapiens
  misc_RNA (1)...(19): siRNA sense strand
agaaguaagugaggaagaa

SEQ ID NO: 720344 - RNA, 19 nt, Homo sapiens
  misc_RNA (1)...(19): siRNA sense strand
ugacagagggcgacuaugu

SEQ ID NO: 720345 - RNA, 19 nt, Homo sapiens
  misc_RNA (1)...(19): siRNA sense strand
ugaagaagcagaggaagaa

SEQ ID NO: 720346 - RNA, 19 nt, Homo sapiens
  misc_RNA (1)...(19): siRNA sense strand
aaggagggcuucccgauca

SEQ ID NO: 720347 - RNA, 19 nt, Homo sapiens
  misc_RNA (1)...(19): siRNA sense strand
gcuucgaccucaugaacaa

SEQ ID NO: 720348 - RNA, 19 nt, Homo sapiens
  misc_RNA (1)...(19): siRNA sense strand
gaaguaagugaggaagaaa

SEQ ID NO: 720349 - RNA, 19 nt, Homo sapiens
  misc_RNA (1)...(19): siRNA sense strand
caacaucgucaccguuaga

SEQ ID NO: 720350 - RNA, 19 nt, Homo sapiens
  misc_RNA (1)...(19): siRNA sense strand
ugagggagaucaacaccau

SEQ ID NO: 720351 - RNA, 19 nt, Homo sapiens
  misc_RNA (1)...(19): siRNA sense strand
gcucuaaagcggcugaaga

SEQ ID NO: 720352 - RNA, 19 nt, Homo sapiens
  misc_RNA (1)...(19): siRNA sense strand
ggcugaagauggagaagga

SEQ ID NO: 720353 - RNA, 19 nt, Homo sapiens
  misc_RNA (1)...(19): siRNA sense strand
gaugaaauuguggcucuaa

SEQ ID NO: 720354 - RNA, 19 nt, Homo sapiens
  misc_RNA (1)...(19): siRNA sense strand
gaucaacaccauccucaag

SEQ ID NO: 720355 - RNA, 19 nt, Homo sapiens
  misc_RNA (1)...(19): siRNA sense strand
ggaggaggaggaagaggaa

SEQ ID NO: 720356 - RNA, 19 nt, Homo sapiens
  misc_RNA (1)...(19): siRNA sense strand
gaggugaagacccugauga

SEQ ID NO: 720357 - RNA, 19 nt, Homo sapiens
  misc_RNA (1)...(19): siRNA sense strand
gaaucaggcucagguucug

SEQ ID NO: 720358 - RNA, 19 nt, Homo sapiens
  misc_RNA (1)...(19): siRNA sense strand
ucacgucgcugagggagau

SEQ ID NO: 720359 - RNA, 19 nt, Homo sapiens
  misc_RNA (1)...(19): siRNA sense strand
agucagaaaucgaucagau

SEQ ID NO: 720360 - RNA, 19 nt, Homo sapiens
  misc_RNA (1)...(19): siRNA sense strand
gaaauuguggcucuaaagc

SEQ ID NO: 720361 - RNA, 19 nt, Homo sapiens
  misc_RNA (1)...(19): siRNA sense strand
gucaguggguugcaucuuc

SEQ ID NO: 720362 - RNA, 19 nt, Homo sapiens
  misc_RNA (1)...(19): siRNA sense strand
ugaagacccugaugaucca

SEQ ID NO: 720363 - RNA, 19 nt, Homo sapiens
  misc_RNA (1)...(19): siRNA sense strand
ggaagaaaugagugaagau

SEQ ID NO: 720364 - RNA, 19 nt, Homo sapiens
  misc_RNA (1)...(19): siRNA sense strand
gaagaacgagaaaaugaaa

SEQ ID NO: 720365 - RNA, 19 nt, Homo sapiens
  misc_RNA (1)...(19): siRNA sense strand
aggaagaaaugagugaaga

SEQ ID NO: 720366 - RNA, 19 nt, Homo sapiens
  misc_RNA (1)...(19): siRNA sense strand
gcaacauggacaagaucua

SEQ ID NO: 720367 - RNA, 19 nt, Homo sapiens
  misc_RNA (1)...(19): siRNA sense strand
gagugaagaagcagaggaa

SEQ ID NO: 720368 - RNA, 19 nt, Homo sapiens
  misc_RNA (1)...(19): siRNA sense strand
ggaagucagaaaucgauca

SEQ ID NO: 720369 - RNA, 19 nt, Homo sapiens
  misc_RNA (1)...(19): siRNA sense strand
cccaacaucgucaccguua

SEQ ID NO: 720370 - RNA, 19 nt, Homo sapiens
  misc_RNA (1)...(19): siRNA sense strand
gaaaugagugaagaugaag

SEQ ID NO: 720371 - RNA, 19 nt, Homo sapiens
  misc_RNA (1)...(19): siRNA sense strand
ggaagaggaggaggaggaa

SEQ ID NO: 720372 - RNA, 19 nt, Homo sapiens
  misc_RNA (1)...(19): siRNA sense strand
caaaagacaagaaaacaga

SEQ ID NO: 720373 - RNA, 19 nt, Homo sapiens
  misc_RNA (1)...(19): siRNA sense strand
gaucgaggagggcaccuau

SEQ ID NO: 720374 - RNA, 19 nt, Homo sapiens
  misc_RNA (1)...(19): siRNA sense strand
gaagagaaaauggaagaaa

SEQ ID NO: 720375 - RNA, 19 nt, Homo sapiens
  misc_RNA (1)...(19): siRNA sense strand
cgaagaaguaagugaggaa

SEQ ID NO: 720376 - RNA, 19 nt, Homo sapiens
  misc_RNA (1)...(19): siRNA sense strand
cgucaccguuagagagauu

SEQ ID NO: 720377 - RNA, 19 nt, Homo sapiens
  misc_RNA (1)...(19): siRNA sense strand
gugaagaagcagaggaaga

SEQ ID NO: 720378 - RNA, 19 nt, Homo sapiens
  misc_RNA (1)...(19): siRNA sense strand
caacauggacaagaucuac

SEQ ID NO: 720379 - RNA, 19 nt, Homo sapiens
  misc_RNA (1)...(19): siRNA sense strand
ggaagggagcaccagugaa

SEQ ID NO: 720380 - RNA, 19 nt, Homo sapiens
  misc_RNA (1)...(19): siRNA sense strand
guaagugaggaagaaauga

SEQ ID NO: 720381 - RNA, 19 nt, Homo sapiens
  misc_RNA (1)...(19): siRNA sense strand
gcagaaucaggcucagguu

SEQ ID NO: 720382 - RNA, 19 nt, Homo sapiens
  misc_RNA (1)...(19): siRNA sense strand
aagaaaugagugaagauga

SEQ ID NO: 720383 - RNA, 19 nt, Homo sapiens
  misc_RNA (1)...(19): siRNA sense strand
aggacggccucaagcauga

SEQ ID NO: 720384 - RNA, 19 nt, Homo sapiens
  misc_RNA (1)...(19): siRNA sense strand
gcaccuauggaguggucua

SEQ ID NO: 720385 - RNA, 19 nt, Homo sapiens
  misc_RNA (1)...(19): siRNA sense strand
gacagagggcgacuaugug

SEQ ID NO: 720386 - RNA, 19 nt, Homo sapiens
  misc_RNA (1)...(19): siRNA sense strand
gaggagaccggcagcaacu

SEQ ID NO: 720387 - RNA, 19 nt, Homo sapiens
  misc_RNA (1)...(19): siRNA sense strand
gaagauggagaaggagaag

SEQ ID NO: 720388 - RNA, 19 nt, Homo sapiens
  misc_RNA (1)...(19): siRNA sense strand
gaggaagaaaugagugaag

SEQ ID NO: 720389 - RNA, 19 nt, Homo sapiens
  misc_RNA (1)...(19): siRNA sense strand
gugaggaagaaaugaguga

SEQ ID NO: 720390 - RNA, 19 nt, Homo sapiens
  misc_RNA (1)...(19): siRNA sense strand
ucccagcagucaagaagau

SEQ ID NO: 720391 - RNA, 19 nt, Homo sapiens
  misc_RNA (1)...(19): siRNA sense strand
agaagcagaggaagaagug

SEQ ID NO: 720392 - RNA, 19 nt, Homo sapiens
  misc_RNA (1)...(19): siRNA sense strand
ugaagaugaagaacgagaa

SEQ ID NO: 720393 - RNA, 19 nt, Homo sapiens
  misc_RNA (1)...(19): siRNA sense strand
gcaccagugaagaaucaga

SEQ ID NO: 720394 - RNA, 19 nt, Homo sapiens
  misc_RNA (1)...(19): siRNA sense strand
aagaggaggaggaggaaga

SEQ ID NO: 720395 - RNA, 19 nt, Homo sapiens
  misc_RNA (1)...(19): siRNA sense strand
acaagguguucaaggaucu

SEQ ID NO: 720396 - RNA, 19 nt, Homo sapiens
  misc_RNA (1)...(19): siRNA sense strand
gaguacggauccccucuga

SEQ ID NO: 720397 - RNA, 19 nt, Homo sapiens
  misc_RNA (1)...(19): siRNA sense strand
ugaagauggagaaggagaa

SEQ ID NO: 720398 - RNA, 19 nt, Homo sapiens
  misc_RNA (1)...(19): siRNA sense strand
ccaacaucgucaccguuag

SEQ ID NO: 720399 - RNA, 19 nt, Homo sapiens
  misc_RNA (1)...(19): siRNA sense strand
gaagucagaaaucgaucag

SEQ ID NO: 720400 - RNA, 19 nt, Homo sapiens
  misc_RNA (1)...(19): siRNA sense strand
ggugaagacccugaugauc

SEQ ID NO: 720401 - RNA, 19 nt, Homo sapiens
  misc_RNA (1)...(19): siRNA sense strand
ugaaauuguggcucuaaag

SEQ ID NO: 720402 - RNA, 19 nt, Homo sapiens
  misc_RNA (1)...(19): siRNA sense strand
gggcuucgaccucaugaac

SEQ ID NO: 720403 - RNA, 19 nt, Homo sapiens
  misc_RNA (1)...(19): siRNA sense strand
ggagaccggcagcaacucu

SEQ ID NO: 720404 - RNA, 19 nt, Homo sapiens
  misc_RNA (1)...(19): siRNA sense strand
ggaggugaagacccugaug

SEQ ID NO: 720405 - RNA, 19 nt, Homo sapiens
  misc_RNA (1)...(19): siRNA sense strand
gaaacgacaucgagaagaa

SEQ ID NO: 720406 - RNA, 19 nt, Homo sapiens
  misc_RNA (1)...(19): siRNA sense strand
gcaaaugucucggaaagaa

SEQ ID NO: 720407 - RNA, 19 nt, Homo sapiens
  misc_RNA (1)...(19): siRNA sense strand
gaaaacagaugaaauugug

SEQ ID NO: 720408 - RNA, 19 nt, Homo sapiens
  misc_RNA (1)...(19): siRNA sense strand
gcauggagaucacaauaag

SEQ ID NO: 720409 - RNA, 19 nt, Homo sapiens
  misc_RNA (1)...(19): siRNA sense strand
gagcaccagugaagaauca

SEQ ID NO: 720410 - RNA, 19 nt, Homo sapiens
  misc_RNA (1)...(19): siRNA sense strand
ugaaacaccugcacgacaa

SEQ ID NO: 720411 - RNA, 19 nt, Homo sapiens
  misc_RNA (1)...(19): siRNA sense strand
gaaaaggacucuuggaaag

SEQ ID NO: 720412 - RNA, 19 nt, Homo sapiens
  misc_RNA (1)...(19): siRNA sense strand
uaaagcggcugaagaugga

SEQ ID NO: 720413 - RNA, 19 nt, Homo sapiens
  misc_RNA (1)...(19): siRNA sense strand
agaaaugagugaagaugaa

SEQ ID NO: 720414 - RNA, 19 nt, Homo sapiens
  misc_RNA (1)...(19): siRNA sense strand
gagugaagaugaagaacga

SEQ ID NO: 720415 - RNA, 19 nt, Homo sapiens
  misc_RNA (1)...(19): siRNA sense strand
gcagcaacauggacaagau

SEQ ID NO: 720416 - RNA, 19 nt, Homo sapiens
  misc_RNA (1)...(19): siRNA sense strand
gaagggagcaccagugaag

SEQ ID NO: 720417 - RNA, 19 nt, Homo sapiens
  misc_RNA (1)...(19): siRNA sense strand
ggaaggaacaagaggagaa

SEQ ID NO: 720418 - RNA, 19 nt, Homo sapiens
  misc_RNA (1)...(19): siRNA sense strand
ggaguggucuacagagcaa

SEQ ID NO: 720419 - RNA, 19 nt, Homo sapiens
  misc_RNA (1)...(19): siRNA sense strand
gaagaugaagaacgagaaa

SEQ ID NO: 720420 - RNA, 19 nt, Homo sapiens
  misc_RNA (1)...(19): siRNA sense strand
gcacgaacgucggaaacga

SEQ ID NO: 720421 - RNA, 19 nt, Homo sapiens
  misc_RNA (1)...(19): siRNA sense strand
gagaagacucuauggaaga

SEQ ID NO: 720422 - RNA, 19 nt, Homo sapiens
  misc_RNA (1)...(19): siRNA sense strand
cagcaaaugucucggaaag

SEQ ID NO: 720423 - RNA, 19 nt, Homo sapiens
  misc_RNA (1)...(19): siRNA sense strand
cagaaaagaugaaaagaga

SEQ ID NO: 720424 - RNA, 19 nt, Homo sapiens
  misc_RNA (1)...(19): siRNA sense strand
gaagaaaugagugaagaug

SEQ ID NO: 720425 - RNA, 19 nt, Homo sapiens
  misc_RNA (1)...(19): siRNA sense strand
agaaguaagugaggaagaa

SEQ ID NO: 720426 - RNA, 19 nt, Homo sapiens
  misc_RNA (1)...(19): siRNA sense strand
ggaagacagaggagaagaa

SEQ ID NO: 720427 - RNA, 19 nt, Homo sapiens
  misc_RNA (1)...(19): siRNA sense strand
gaaggaacaagaggagaaa

SEQ ID NO: 720428 - RNA, 19 nt, Homo sapiens
  misc_RNA (1)...(19): siRNA sense strand
ugacagagggcgacuaugu

SEQ ID NO: 720429 - RNA, 19 nt, Homo sapiens
  misc_RNA (1)...(19): siRNA sense strand
ggagaaagcagagauaaaa

SEQ ID NO: 720430 - RNA, 19 nt, Homo sapiens
  misc_RNA (1)...(19): siRNA sense strand
gagaagaacaggauaaagc

SEQ ID NO: 720431 - RNA, 19 nt, Homo sapiens
  misc_RNA (1)...(19): siRNA sense strand
gaggagaaagcagagauaa

SEQ ID NO: 720432 - RNA, 19 nt, Homo sapiens
  misc_RNA (1)...(19): siRNA sense strand
ugaagaagcagaggaagaa

SEQ ID NO: 720433 - RNA, 19 nt, Homo sapiens
  misc_RNA (1)...(19): siRNA sense strand
gagcauuccaggagagaaa

SEQ ID NO: 720434 - RNA, 19 nt, Homo sapiens
  misc_RNA (1)...(19): siRNA sense strand
aaggagggcuucccgauca

SEQ ID NO: 720435 - RNA, 19 nt, Homo sapiens
  misc_RNA (1)...(19): siRNA sense strand
gcuucgaccucaugaacaa

SEQ ID NO: 720436 - RNA, 19 nt, Homo sapiens
  misc_RNA (1)...(19): siRNA sense strand
gaaguaagugaggaagaaa

SEQ ID NO: 720437 - RNA, 19 nt, Homo sapiens
  misc_RNA (1)...(19): siRNA sense strand
caacaucgucaccguuaga

SEQ ID NO: 720438 - RNA, 19 nt, Homo sapiens
  misc_RNA (1)...(19): siRNA sense strand
ugagggagaucaacaccau

SEQ ID NO: 720439 - RNA, 19 nt, Homo sapiens
  misc_RNA (1)...(19): siRNA sense strand
aaaggacucuuggaaagug

SEQ ID NO: 720440 - RNA, 19 nt, Homo sapiens
  misc_RNA (1)...(19): siRNA sense strand
gcucuaaagcggcugaaga

SEQ ID NO: 720441 - RNA, 19 nt, Homo sapiens
  misc_RNA (1)...(19): siRNA sense strand
ggcugaagauggagaagga

SEQ ID NO: 720442 - RNA, 19 nt, Homo sapiens
  misc_RNA (1)...(19): siRNA sense strand
agacagaggagaagaagau

SEQ ID NO: 720443 - RNA, 19 nt, Homo sapiens
  misc_RNA (1)...(19): siRNA sense strand
gaucaacaccauccucaag

SEQ ID NO: 720444 - RNA, 19 nt, Homo sapiens
  misc_RNA (1)...(19): siRNA sense strand
gaugaaauuguggcucuaa

SEQ ID NO: 720445 - RNA, 19 nt, Homo sapiens
  misc_RNA (1)...(19): siRNA sense strand
gaaucaggcucagguucug

SEQ ID NO: 720446 - RNA, 19 nt, Homo sapiens
  misc_RNA (1)...(19): siRNA sense strand
gaggugaagacccugauga

SEQ ID NO: 720447 - RNA, 19 nt, Homo sapiens
  misc_RNA (1)...(19): siRNA sense strand
ggaggaggaggaagaggaa

SEQ ID NO: 720448 - RNA, 19 nt, Homo sapiens
  misc_RNA (1)...(19): siRNA sense strand
ggaaacgacaucgagaaga

SEQ ID NO: 720449 - RNA, 19 nt, Homo sapiens
  misc_RNA (1)...(19): siRNA sense strand
agucagaaaucgaucagau

SEQ ID NO: 720450 - RNA, 19 nt, Homo sapiens
  misc_RNA (1)...(19): siRNA sense strand
ucacgucgcugagggagau

SEQ ID NO: 720451 - RNA, 19 nt, Homo sapiens
  misc_RNA (1)...(19): siRNA sense strand
gaaauuguggcucuaaagc

SEQ ID NO: 720452 - RNA, 19 nt, Homo sapiens
  misc_RNA (1)...(19): siRNA sense strand
gucaguggguugcaucuuc

SEQ ID NO: 720453 - RNA, 19 nt, Homo sapiens
  misc_RNA (1)...(19): siRNA sense strand
ugaagacccugaugaucca

SEQ ID NO: 720454 - RNA, 19 nt, Homo sapiens
  misc_RNA (1)...(19): siRNA sense strand
gaagacagaggagaagaag

SEQ ID NO: 720455 - RNA, 19 nt, Homo sapiens
  misc_RNA (1)...(19): siRNA sense strand
gaagaacgagaaaaugaaa

SEQ ID NO: 720456 - RNA, 19 nt, Homo sapiens
  misc_RNA (1)...(19): siRNA sense strand
ggaagaaaugagugaagau

SEQ ID NO: 720457 - RNA, 19 nt, Homo sapiens
  misc_RNA (1)...(19): siRNA sense strand
agacagaagagaagggaaa

SEQ ID NO: 720458 - RNA, 19 nt, Homo sapiens
  misc_RNA (1)...(19): siRNA sense strand
gaaugggaaagacagaaga

SEQ ID NO: 720459 - RNA, 19 nt, Homo sapiens
  misc_RNA (1)...(19): siRNA sense strand
caaaugucucggaaagaaa

SEQ ID NO: 720460 - RNA, 19 nt, Homo sapiens
  misc_RNA (1)...(19): siRNA sense strand
gaggagaagaagaugauuc

SEQ ID NO: 720461 - RNA, 19 nt, Homo sapiens
  misc_RNA (1)...(19): siRNA sense strand
gcaacauggacaagaucua

SEQ ID NO: 720462 - RNA, 19 nt, Homo sapiens
  misc_RNA (1)...(19): siRNA sense strand
aggaagaaaugagugaaga

SEQ ID NO: 720463 - RNA, 19 nt, Homo sapiens
  misc_RNA (1)...(19): siRNA sense strand
auaaggaacuccccguaua

SEQ ID NO: 720464 - RNA, 19 nt, Homo sapiens
  misc_RNA (1)...(19): siRNA sense strand
gagugaagaagcagaggaa

SEQ ID NO: 720465 - RNA, 19 nt, Homo sapiens
  misc_RNA (1)...(19): siRNA sense strand
ggaagucagaaaucgauca

SEQ ID NO: 720466 - RNA, 19 nt, Homo sapiens
  misc_RNA (1)...(19): siRNA sense strand
cccaacaucgucaccguua

SEQ ID NO: 720467 - RNA, 19 nt, Homo sapiens
  misc_RNA (1)...(19): siRNA sense strand
gggaaagacagaagagaag

SEQ ID NO: 720468 - RNA, 19 nt, Homo sapiens
  misc_RNA (1)...(19): siRNA sense strand
caaaagacaagaaaacaga

SEQ ID NO: 720469 - RNA, 19 nt, Homo sapiens
  misc_RNA (1)...(19): siRNA sense strand
gaucgaggagggcaccuau

SEQ ID NO: 720470 - RNA, 19 nt, Homo sapiens
  misc_RNA (1)...(19): siRNA sense strand
gaaaugagugaagaugaag

SEQ ID NO: 720471 - RNA, 19 nt, Homo sapiens
  misc_RNA (1)...(19): siRNA sense strand
ggaagaggaggaggaggaa

SEQ ID NO: 720472 - RNA, 19 nt, Homo sapiens
  misc_RNA (1)...(19): siRNA sense strand
caugcuagagugaaagaaa

SEQ ID NO: 720473 - RNA, 19 nt, Homo sapiens
  misc_RNA (1)...(19): siRNA sense strand
gaagagaaaauggaagaaa

SEQ ID NO: 720474 - RNA, 19 nt, Homo sapiens
  misc_RNA (1)...(19): siRNA sense strand
ggaaugggaaagacagaag

SEQ ID NO: 720475 - RNA, 19 nt, Homo sapiens
  misc_RNA (1)...(19): siRNA sense strand
cgucaccguuagagagauu

SEQ ID NO: 720476 - RNA, 19 nt, Homo sapiens
  misc_RNA (1)...(19): siRNA sense strand
gugaagaagcagaggaaga

SEQ ID NO: 720477 - RNA, 19 nt, Homo sapiens
  misc_RNA (1)...(19): siRNA sense strand
cgaagaaguaagugaggaa

SEQ ID NO: 720478 - RNA, 19 nt, Homo sapiens
  misc_RNA (1)...(19): siRNA sense strand
caacauggacaagaucuac

SEQ ID NO: 720479 - RNA, 19 nt, Homo sapiens
  misc_RNA (1)...(19): siRNA sense strand
ggaacaagaggagaaagca

SEQ ID NO: 720480 - RNA, 19 nt, Homo sapiens
  misc_RNA (1)...(19): siRNA sense strand
gaaacgaaggaaggaacaa

SEQ ID NO: 720481 - RNA, 19 nt, Homo sapiens
  misc_RNA (1)...(19): siRNA sense strand
ggaagggagcaccagugaa

SEQ ID NO: 720482 - RNA, 19 nt, Homo sapiens
  misc_RNA (1)...(19): siRNA sense strand
cagaggagaagaagaugau

SEQ ID NO: 720483 - RNA, 19 nt, Homo sapiens
  misc_RNA (1)...(19): siRNA sense strand
guaagugaggaagaaauga

SEQ ID NO: 720484 - RNA, 19 nt, Homo sapiens
  misc_RNA (1)...(19): siRNA sense strand
gcagaaucaggcucagguu

SEQ ID NO: 720485 - RNA, 19 nt, Homo sapiens
  misc_RNA (1)...(19): siRNA sense strand
cagaagagaagggaaaugg

SEQ ID NO: 720486 - RNA, 19 nt, Homo sapiens
  misc_RNA (1)...(19): siRNA sense strand
aggacggccucaagcauga

SEQ ID NO: 720487 - RNA, 19 nt, Homo sapiens
  misc_RNA (1)...(19): siRNA sense strand
gcaccuauggaguggucua

SEQ ID NO: 720488 - RNA, 19 nt, Homo sapiens
  misc_RNA (1)...(19): siRNA sense strand
gacagagggcgacuaugug

SEQ ID NO: 720489 - RNA, 19 nt, Homo sapiens
  misc_RNA (1)...(19): siRNA sense strand
aagaaaugagugaagauga

SEQ ID NO: 720490 - RNA, 19 nt, Homo sapiens
  misc_RNA (1)...(19): siRNA sense strand
ggaaauggcaagggagcau

SEQ ID NO: 720491 - RNA, 19 nt, Homo sapiens
  misc_RNA (1)...(19): siRNA sense strand
agaggagaaagcagagaua

SEQ ID NO: 720492 - RNA, 19 nt, Homo sapiens
  misc_RNA (1)...(19): siRNA sense strand
gaagauggagaaggagaag

SEQ ID NO: 720493 - RNA, 19 nt, Homo sapiens
  misc_RNA (1)...(19): siRNA sense strand
gaggagaccggcagcaacu

SEQ ID NO: 720494 - RNA, 19 nt, Homo sapiens
  misc_RNA (1)...(19): siRNA sense strand
agaaagagagcacgaacgu

SEQ ID NO: 720495 - RNA, 19 nt, Homo sapiens
  misc_RNA (1)...(19): siRNA sense strand
gaggaagaaaugagugaag

SEQ ID NO: 720496 - RNA, 19 nt, Homo sapiens
  misc_RNA (1)...(19): siRNA sense strand
gcagagauaaaacgcuuaa

SEQ ID NO: 720497 - RNA, 19 nt, Homo sapiens
  misc_RNA (1)...(19): siRNA sense strand
ugggaaagacagaagagaa

SEQ ID NO: 720498 - RNA, 19 nt, Homo sapiens
  misc_RNA (1)...(19): siRNA sense strand
ucccagcagucaagaagau

SEQ ID NO: 720499 - RNA, 19 nt, Homo sapiens
  misc_RNA (1)...(19): siRNA sense strand
agaagcagaggaagaagug

SEQ ID NO: 720500 - RNA, 19 nt, Homo sapiens
  misc_RNA (1)...(19): siRNA sense strand
uauggaagacagaggagaa

SEQ ID NO: 720501 - RNA, 19 nt, Homo sapiens
  misc_RNA (1)...(19): siRNA sense strand
ugaagaugaagaacgagaa

SEQ ID NO: 720502 - RNA, 19 nt, Homo sapiens
  misc_RNA (1)...(19): siRNA sense strand
gugaggaagaaaugaguga

SEQ ID NO: 720503 - RNA, 19 nt, Homo sapiens
  misc_RNA (1)...(19): siRNA sense strand
gaacuccccguauagaaga

SEQ ID NO: 720504 - RNA, 19 nt, Homo sapiens
  misc_RNA (1)...(19): siRNA sense strand
ugaaaaggacucuuggaaa

SEQ ID NO: 720505 - RNA, 19 nt, Homo sapiens
  misc_RNA (1)...(19): siRNA sense strand
gaaacgacaucgagaagaa

SEQ ID NO: 720506 - RNA, 19 nt, Homo sapiens
  misc_RNA (1)...(19): siRNA sense strand
gcaaaugucucggaaagaa

SEQ ID NO: 720507 - RNA, 19 nt, Homo sapiens
  misc_RNA (1)...(19): siRNA sense strand
gaaaacagaugaaauugug

SEQ ID NO: 720508 - RNA, 19 nt, Homo sapiens
  misc_RNA (1)...(19): siRNA sense strand
gcauggagaucacaauaag

SEQ ID NO: 720509 - RNA, 19 nt, Homo sapiens
  misc_RNA (1)...(19): siRNA sense strand
gagcaccagugaagaauca

SEQ ID NO: 720510 - RNA, 19 nt, Homo sapiens
  misc_RNA (1)...(19): siRNA sense strand
ugaaacaccugcacgacaa

SEQ ID NO: 720511 - RNA, 19 nt, Homo sapiens
  misc_RNA (1)...(19): siRNA sense strand
gaaaaggacucuuggaaag

SEQ ID NO: 720512 - RNA, 19 nt, Homo sapiens
  misc_RNA (1)...(19): siRNA sense strand
uaaagcggcugaagaugga

SEQ ID NO: 720513 - RNA, 19 nt, Homo sapiens
  misc_RNA (1)...(19): siRNA sense strand
agaaaugagugaagaugaa

SEQ ID NO: 720514 - RNA, 19 nt, Homo sapiens
  misc_RNA (1)...(19): siRNA sense strand
gagugaagaugaagaacga

SEQ ID NO: 720515 - RNA, 19 nt, Homo sapiens
  misc_RNA (1)...(19): siRNA sense strand
gcagcaacauggacaagau

SEQ ID NO: 720516 - RNA, 19 nt, Homo sapiens
  misc_RNA (1)...(19): siRNA sense strand
gaagggagcaccagugaag

SEQ ID NO: 720517 - RNA, 19 nt, Homo sapiens
  misc_RNA (1)...(19): siRNA sense strand
ggaaggaacaagaggagaa

SEQ ID NO: 720518 - RNA, 19 nt, Homo sapiens
  misc_RNA (1)...(19): siRNA sense strand
ggaguggucuacagagcaa

SEQ ID NO: 720519 - RNA, 19 nt, Homo sapiens
  misc_RNA (1)...(19): siRNA sense strand
gaagaugaagaacgagaaa

SEQ ID NO: 720520 - RNA, 19 nt, Homo sapiens
  misc_RNA (1)...(19): siRNA sense strand
gcacgaacgucggaaacga

SEQ ID NO: 720521 - RNA, 19 nt, Homo sapiens
  misc_RNA (1)...(19): siRNA sense strand
gagaagacucuauggaaga

SEQ ID NO: 720522 - RNA, 19 nt, Homo sapiens
  misc_RNA (1)...(19): siRNA sense strand
cagcaaaugucucggaaag

SEQ ID NO: 720523 - RNA, 19 nt, Homo sapiens
  misc_RNA (1)...(19): siRNA sense strand
cagaaaagaugaaaagaga

SEQ ID NO: 720524 - RNA, 19 nt, Homo sapiens
  misc_RNA (1)...(19): siRNA sense strand
gaagaaaugagugaagaug

SEQ ID NO: 720525 - RNA, 19 nt, Homo sapiens
  misc_RNA (1)...(19): siRNA sense strand
agaaguaagugaggaagaa

SEQ ID NO: 720526 - RNA, 19 nt, Homo sapiens
  misc_RNA (1)...(19): siRNA sense strand
ggaagacagaggagaagaa

SEQ ID NO: 720527 - RNA, 19 nt, Homo sapiens
  misc_RNA (1)...(19): siRNA sense strand
gaaggaacaagaggagaaa

SEQ ID NO: 720528 - RNA, 19 nt, Homo sapiens
  misc_RNA (1)...(19): siRNA sense strand
ugacagagggcgacuaugu

SEQ ID NO: 720529 - RNA, 19 nt, Homo sapiens
  misc_RNA (1)...(19): siRNA sense strand
ggagaaagcagagauaaaa

SEQ ID NO: 720530 - RNA, 19 nt, Homo sapiens
  misc_RNA (1)...(19): siRNA sense strand
gagaagaacaggauaaagc

SEQ ID NO: 720531 - RNA, 19 nt, Homo sapiens
  misc_RNA (1)...(19): siRNA sense strand
gaggagaaagcagagauaa

SEQ ID NO: 720532 - RNA, 19 nt, Homo sapiens
  misc_RNA (1)...(19): siRNA sense strand
ugaagaagcagaggaagaa

SEQ ID NO: 720533 - RNA, 19 nt, Homo sapiens
  misc_RNA (1)...(19): siRNA sense strand
gagcauuccaggagagaaa

SEQ ID NO: 720534 - RNA, 19 nt, Homo sapiens
  misc_RNA (1)...(19): siRNA sense strand
aaggagggcuucccgauca

SEQ ID NO: 720535 - RNA, 19 nt, Homo sapiens
  misc_RNA (1)...(19): siRNA sense strand
gcuucgaccucaugaacaa

SEQ ID NO: 720536 - RNA, 19 nt, Homo sapiens
  misc_RNA (1)...(19): siRNA sense strand
gaaguaagugaggaagaaa

SEQ ID NO: 720537 - RNA, 19 nt, Homo sapiens
  misc_RNA (1)...(19): siRNA sense strand
caacaucgucaccguuaga

SEQ ID NO: 720538 - RNA, 19 nt, Homo sapiens
  misc_RNA (1)...(19): siRNA sense strand
ugagggagaucaacaccau

SEQ ID NO: 720539 - RNA, 19 nt, Homo sapiens
  misc_RNA (1)...(19): siRNA sense strand
aaaggacucuuggaaagug

SEQ ID NO: 720540 - RNA, 19 nt, Homo sapiens
  misc_RNA (1)...(19): siRNA sense strand
gcucuaaagcggcugaaga

SEQ ID NO: 720541 - RNA, 19 nt, Homo sapiens
  misc_RNA (1)...(19): siRNA sense strand
ggcugaagauggagaagga

SEQ ID NO: 720542 - RNA, 19 nt, Homo sapiens
  misc_RNA (1)...(19): siRNA sense strand
agacagaggagaagaagau

SEQ ID NO: 720543 - RNA, 19 nt, Homo sapiens
  misc_RNA (1)...(19): siRNA sense strand
gaucaacaccauccucaag

SEQ ID NO: 720544 - RNA, 19 nt, Homo sapiens
  misc_RNA (1)...(19): siRNA sense strand
gaugaaauuguggcucuaa

SEQ ID NO: 720545 - RNA, 19 nt, Homo sapiens
  misc_RNA (1)...(19): siRNA sense strand
gaaucaggcucagguucug

SEQ ID NO: 720546 - RNA, 19 nt, Homo sapiens
  misc_RNA (1)...(19): siRNA sense strand
gaggugaagacccugauga

SEQ ID NO: 720547 - RNA, 19 nt, Homo sapiens
  misc_RNA (1)...(19): siRNA sense strand
ggaggaggaggaagaggaa

SEQ ID NO: 720548 - RNA, 19 nt, Homo sapiens
  misc_RNA (1)...(19): siRNA sense strand
ggaaacgacaucgagaaga

SEQ ID NO: 720549 - RNA, 19 nt, Homo sapiens
  misc_RNA (1)...(19): siRNA sense strand
agucagaaaucgaucagau

SEQ ID NO: 720550 - RNA, 19 nt, Homo sapiens
  misc_RNA (1)...(19): siRNA sense strand
ucacgucgcugagggagau

SEQ ID NO: 720551 - RNA, 19 nt, Homo sapiens
  misc_RNA (1)...(19): siRNA sense strand
gaaauuguggcucuaaagc

SEQ ID NO: 720552 - RNA, 19 nt, Homo sapiens
  misc_RNA (1)...(19): siRNA sense strand
gucaguggguugcaucuuc

SEQ ID NO: 720553 - RNA, 19 nt, Homo sapiens
  misc_RNA (1)...(19): siRNA sense strand
ugaagacccugaugaucca

SEQ ID NO: 720554 - RNA, 19 nt, Homo sapiens
  misc_RNA (1)...(19): siRNA sense strand
gaagacagaggagaagaag

SEQ ID NO: 720555 - RNA, 19 nt, Homo sapiens
  misc_RNA (1)...(19): siRNA sense strand
gaagaacgagaaaaugaaa

SEQ ID NO: 720556 - RNA, 19 nt, Homo sapiens
  misc_RNA (1)...(19): siRNA sense strand
ggaagaaaugagugaagau

SEQ ID NO: 720557 - RNA, 19 nt, Homo sapiens
  misc_RNA (1)...(19): siRNA sense strand
agacagaagagaagggaaa

SEQ ID NO: 720558 - RNA, 19 nt, Homo sapiens
  misc_RNA (1)...(19): siRNA sense strand
gaaugggaaagacagaaga

SEQ ID NO: 720559 - RNA, 19 nt, Homo sapiens
  misc_RNA (1)...(19): siRNA sense strand
caaaugucucggaaagaaa

SEQ ID NO: 720560 - RNA, 19 nt, Homo sapiens
  misc_RNA (1)...(19): siRNA sense strand
gaggagaagaagaugauuc

SEQ ID NO: 720561 - RNA, 19 nt, Homo sapiens
  misc_RNA (1)...(19): siRNA sense strand
gcaacauggacaagaucua

SEQ ID NO: 720562 - RNA, 19 nt, Homo sapiens
  misc_RNA (1)...(19): siRNA sense strand
aggaagaaaugagugaaga

SEQ ID NO: 720563 - RNA, 19 nt, Homo sapiens
  misc_RNA (1)...(19): siRNA sense strand
auaaggaacuccccguaua

SEQ ID NO: 720564 - RNA, 19 nt, Homo sapiens
  misc_RNA (1)...(19): siRNA sense strand
gagugaagaagcagaggaa

SEQ ID NO: 720565 - RNA, 19 nt, Homo sapiens
  misc_RNA (1)...(19): siRNA sense strand
ggaagucagaaaucgauca

SEQ ID NO: 720566 - RNA, 19 nt, Homo sapiens
  misc_RNA (1)...(19): siRNA sense strand
cccaacaucgucaccguua

SEQ ID NO: 720567 - RNA, 19 nt, Homo sapiens
  misc_RNA (1)...(19): siRNA sense strand
gggaaagacagaagagaag

SEQ ID NO: 720568 - RNA, 19 nt, Homo sapiens
  misc_RNA (1)...(19): siRNA sense strand
caaaagacaagaaaacaga

SEQ ID NO: 720569 - RNA, 19 nt, Homo sapiens
  misc_RNA (1)...(19): siRNA sense strand
gaucgaggagggcaccuau

SEQ ID NO: 720570 - RNA, 19 nt, Homo sapiens
  misc_RNA (1)...(19): siRNA sense strand
gaaaugagugaagaugaag

SEQ ID NO: 720571 - RNA, 19 nt, Homo sapiens
  misc_RNA (1)...(19): siRNA sense strand
ggaagaggaggaggaggaa

SEQ ID NO: 720572 - RNA, 19 nt, Homo sapiens
  misc_RNA (1)...(19): siRNA sense strand
caugcuagagugaaagaaa

SEQ ID NO: 720573 - RNA, 19 nt, Homo sapiens
  misc_RNA (1)...(19): siRNA sense strand
gaagagaaaauggaagaaa

SEQ ID NO: 720574 - RNA, 19 nt, Homo sapiens
  misc_RNA (1)...(19): siRNA sense strand
ggaaugggaaagacagaag

SEQ ID NO: 720575 - RNA, 19 nt, Homo sapiens
  misc_RNA (1)...(19): siRNA sense strand
cgucaccguuagagagauu

SEQ ID NO: 720576 - RNA, 19 nt, Homo sapiens
  misc_RNA (1)...(19): siRNA sense strand
gugaagaagcagaggaaga

SEQ ID NO: 720577 - RNA, 19 nt, Homo sapiens
  misc_RNA (1)...(19): siRNA sense strand
cgaagaaguaagugaggaa

SEQ ID NO: 720578 - RNA, 19 nt, Homo sapiens
  misc_RNA (1)...(19): siRNA sense strand
caacauggacaagaucuac

SEQ ID NO: 720579 - RNA, 19 nt, Homo sapiens
  misc_RNA (1)...(19): siRNA sense strand
ggaacaagaggagaaagca

SEQ ID NO: 720580 - RNA, 19 nt, Homo sapiens
  misc_RNA (1)...(19): siRNA sense strand
gaaacgaaggaaggaacaa

SEQ ID NO: 720581 - RNA, 19 nt, Homo sapiens
  misc_RNA (1)...(19): siRNA sense strand
ggaagggagcaccagugaa

SEQ ID NO: 720582 - RNA, 19 nt, Homo sapiens
  misc_RNA (1)...(19): siRNA sense strand
cagaggagaagaagaugau

SEQ ID NO: 720583 - RNA, 19 nt, Homo sapiens
  misc_RNA (1)...(19): siRNA sense strand
guaagugaggaagaaauga

SEQ ID NO: 720584 - RNA, 19 nt, Homo sapiens
  misc_RNA (1)...(19): siRNA sense strand
gcagaaucaggcucagguu

SEQ ID NO: 720585 - RNA, 19 nt, Homo sapiens
  misc_RNA (1)...(19): siRNA sense strand
cagaagagaagggaaaugg

SEQ ID NO: 720586 - RNA, 19 nt, Homo sapiens
  misc_RNA (1)...(19): siRNA sense strand
aggacggccucaagcauga

SEQ ID NO: 720587 - RNA, 19 nt, Homo sapiens
  misc_RNA (1)...(19): siRNA sense strand
gcaccuauggaguggucua

SEQ ID NO: 720588 - RNA, 19 nt, Homo sapiens
  misc_RNA (1)...(19): siRNA sense strand
gacagagggcgacuaugug

SEQ ID NO: 720589 - RNA, 19 nt, Homo sapiens
  misc_RNA (1)...(19): siRNA sense strand
aagaaaugagugaagauga

SEQ ID NO: 720590 - RNA, 19 nt, Homo sapiens
  misc_RNA (1)...(19): siRNA sense strand
ggaaauggcaagggagcau

SEQ ID NO: 720591 - RNA, 19 nt, Homo sapiens
  misc_RNA (1)...(19): siRNA sense strand
agaggagaaagcagagaua

SEQ ID NO: 720592 - RNA, 19 nt, Homo sapiens
  misc_RNA (1)...(19): siRNA sense strand
gaagauggagaaggagaag

SEQ ID NO: 720593 - RNA, 19 nt, Homo sapiens
  misc_RNA (1)...(19): siRNA sense strand
gaggagaccggcagcaacu

SEQ ID NO: 720594 - RNA, 19 nt, Homo sapiens
  misc_RNA (1)...(19): siRNA sense strand
agaaagagagcacgaacgu

SEQ ID NO: 720595 - RNA, 19 nt, Homo sapiens
  misc_RNA (1)...(19): siRNA sense strand
gaggaagaaaugagugaag

SEQ ID NO: 720596 - RNA, 19 nt, Homo sapiens
  misc_RNA (1)...(19): siRNA sense strand
gcagagauaaaacgcuuaa

SEQ ID NO: 720597 - RNA, 19 nt, Homo sapiens
  misc_RNA (1)...(19): siRNA sense strand
ugggaaagacagaagagaa

SEQ ID NO: 720598 - RNA, 19 nt, Homo sapiens
  misc_RNA (1)...(19): siRNA sense strand
ucccagcagucaagaagau

SEQ ID NO: 720599 - RNA, 19 nt, Homo sapiens
  misc_RNA (1)...(19): siRNA sense strand
agaagcagaggaagaagug

SEQ ID NO: 720600 - RNA, 19 nt, Homo sapiens
  misc_RNA (1)...(19): siRNA sense strand
uauggaagacagaggagaa

SEQ ID NO: 720601 - RNA, 19 nt, Homo sapiens
  misc_RNA (1)...(19): siRNA sense strand
ugaagaugaagaacgagaa

SEQ ID NO: 720602 - RNA, 19 nt, Homo sapiens
  misc_RNA (1)...(19): siRNA sense strand
gugaggaagaaaugaguga

SEQ ID NO: 720603 - RNA, 19 nt, Homo sapiens
  misc_RNA (1)...(19): siRNA sense strand
gaacuccccguauagaaga

SEQ ID NO: 720604 - RNA, 19 nt, Homo sapiens
  misc_RNA (1)...(19): siRNA sense strand
ugaaaaggacucuuggaaa

SEQ ID NO: 720605 - RNA, 19 nt, Homo sapiens
  misc_RNA (1)...(19): siRNA sense strand
gggaagagcuguuugauca

SEQ ID NO: 720606 - RNA, 19 nt, Homo sapiens
  misc_RNA (1)...(19): siRNA sense strand
ggaaggagaugaagaaugg

SEQ ID NO: 720607 - RNA, 19 nt, Homo sapiens
  misc_RNA (1)...(19): siRNA sense strand
gcaagugaaucaugagaaa

SEQ ID NO: 720608 - RNA, 19 nt, Homo sapiens
  misc_RNA (1)...(19): siRNA sense strand
gggaggauguguaucaaua

SEQ ID NO: 720609 - RNA, 19 nt, Homo sapiens
  misc_RNA (1)...(19): siRNA sense strand
gaaguuaccugugggauuc

SEQ ID NO: 720610 - RNA, 19 nt, Homo sapiens
  misc_RNA (1)...(19): siRNA sense strand
gcacaacaaugccgugguu

SEQ ID NO: 720611 - RNA, 19 nt, Homo sapiens
  misc_RNA (1)...(19): siRNA sense strand
ugaaggaacugucaccaaa

SEQ ID NO: 720612 - RNA, 19 nt, Homo sapiens
  misc_RNA (1)...(19): siRNA sense strand
uggagacgauggaucauua

SEQ ID NO: 720613 - RNA, 19 nt, Homo sapiens
  misc_RNA (1)...(19): siRNA sense strand
cgacggaucucuuuacaag

SEQ ID NO: 720614 - RNA, 19 nt, Homo sapiens
  misc_RNA (1)...(19): siRNA sense strand
gagcagauguggucaaacu

SEQ ID NO: 720615 - RNA, 19 nt, Homo sapiens
  misc_RNA (1)...(19): siRNA sense strand
gaucaaggacaagaaguua

SEQ ID NO: 720616 - RNA, 19 nt, Homo sapiens
  misc_RNA (1)...(19): siRNA sense strand
gagaagaugaucaguggua

SEQ ID NO: 720617 - RNA, 19 nt, Homo sapiens
  misc_RNA (1)...(19): siRNA sense strand
aaacaaagguaugagaaga

SEQ ID NO: 720618 - RNA, 19 nt, Homo sapiens
  misc_RNA (1)...(19): siRNA sense strand
gcacauugaucugguggaa

SEQ ID NO: 720619 - RNA, 19 nt, Homo sapiens
  misc_RNA (1)...(19): siRNA sense strand
aaaggaagaucaaggacaa

SEQ ID NO: 720620 - RNA, 19 nt, Homo sapiens
  misc_RNA (1)...(19): siRNA sense strand
gaacugaggcacauugauc

SEQ ID NO: 720621 - RNA, 19 nt, Homo sapiens
  misc_RNA (1)...(19): siRNA sense strand
gaagagcuguuugaucaca

SEQ ID NO: 720622 - RNA, 19 nt, Homo sapiens
  misc_RNA (1)...(19): siRNA sense strand
ggaaacaaagguaugagaa

SEQ ID NO: 720623 - RNA, 19 nt, Homo sapiens
  misc_RNA (1)...(19): siRNA sense strand
ggacaaagcgauuuaaagc

SEQ ID NO: 720624 - RNA, 19 nt, Homo sapiens
  misc_RNA (1)...(19): siRNA sense strand
ggaagcagacgcacaacaa

SEQ ID NO: 720625 - RNA, 19 nt, Homo sapiens
  misc_RNA (1)...(19): siRNA sense strand
gaagacauccggacagagu

SEQ ID NO: 720626 - RNA, 19 nt, Homo sapiens
  misc_RNA (1)...(19): siRNA sense strand
caucguagcuguggugaau

SEQ ID NO: 720627 - RNA, 19 nt, Homo sapiens
  misc_RNA (1)...(19): siRNA sense strand
ggacuggaccgucugaaug

SEQ ID NO: 720628 - RNA, 19 nt, Homo sapiens
  misc_RNA (1)...(19): siRNA sense strand
gaucuacgccauuccuauu

SEQ ID NO: 720629 - RNA, 19 nt, Homo sapiens
  misc_RNA (1)...(19): siRNA sense strand
gaugaucagugguauguac

SEQ ID NO: 720630 - RNA, 19 nt, Homo sapiens
  misc_RNA (1)...(19): siRNA sense strand
gacgauggaucauuagaag

SEQ ID NO: 720631 - RNA, 19 nt, Homo sapiens
  misc_RNA (1)...(19): siRNA sense strand
gcacagaggcaagcagcua

SEQ ID NO: 720632 - RNA, 19 nt, Homo sapiens
  misc_RNA (1)...(19): siRNA sense strand
cugcaucucugacuucuug

SEQ ID NO: 720633 - RNA, 19 nt, Homo sapiens
  misc_RNA (1)...(19): siRNA sense strand
gaguggagccguccgauga

SEQ ID NO: 720634 - RNA, 19 nt, Homo sapiens
  misc_RNA (1)...(19): siRNA sense strand
gaaacucucauagauauca

SEQ ID NO: 720635 - RNA, 19 nt, Homo sapiens
  misc_RNA (1)...(19): siRNA sense strand
caccaaugcuugcuacaug

SEQ ID NO: 720636 - RNA, 19 nt, Homo sapiens
  misc_RNA (1)...(19): siRNA sense strand
gaaaauccguagugggaaa

SEQ ID NO: 720637 - RNA, 19 nt, Homo sapiens
  misc_RNA (1)...(19): siRNA sense strand
uggcugcgguuguggauaa

SEQ ID NO: 720638 - RNA, 19 nt, Homo sapiens
  misc_RNA (1)...(19): siRNA sense strand
gggcuucacguucucauuu

SEQ ID NO: 720639 - RNA, 19 nt, Homo sapiens
  misc_RNA (1)...(19): siRNA sense strand
gagguuggacucauuguug

SEQ ID NO: 720640 - RNA, 19 nt, Homo sapiens
  misc_RNA (1)...(19): siRNA sense strand
gagcagcaccggcagauag

SEQ ID NO: 720641 - RNA, 19 nt, Homo sapiens
  misc_RNA (1)...(19): siRNA sense strand
gauaagauccgcgagaaca

SEQ ID NO: 720642 - RNA, 19 nt, Homo sapiens
  misc_RNA (1)...(19): siRNA sense strand
gaaaucguccgcaacaucu

SEQ ID NO: 720643 - RNA, 19 nt, Homo sapiens
  misc_RNA (1)...(19): siRNA sense strand
gaggagacccuggcucauu

SEQ ID NO: 720644 - RNA, 19 nt, Homo sapiens
  misc_RNA (1)...(19): siRNA sense strand
ggucaaacugcuuaacaaa

SEQ ID NO: 720645 - RNA, 19 nt, Homo sapiens
  misc_RNA (1)...(19): siRNA sense strand
ccaaguuucucucucagau

SEQ ID NO: 720646 - RNA, 19 nt, Homo sapiens
  misc_RNA (1)...(19): siRNA sense strand
guauguaccugggugaaau

SEQ ID NO: 720647 - RNA, 19 nt, Homo sapiens
  misc_RNA (1)...(19): siRNA sense strand
gaaacaaagguaugagaag

SEQ ID NO: 720648 - RNA, 19 nt, Homo sapiens
  misc_RNA (1)...(19): siRNA sense strand
gaccgagaauggugacuuc

SEQ ID NO: 720649 - RNA, 19 nt, Homo sapiens
  misc_RNA (1)...(19): siRNA sense strand
gauguggucaaacugcuua

SEQ ID NO: 720650 - RNA, 19 nt, Homo sapiens
  misc_RNA (1)...(19): siRNA sense strand
ccaugcggcucuccgauga

SEQ ID NO: 720651 - RNA, 19 nt, Homo sapiens
  misc_RNA (1)...(19): siRNA sense strand
caacaagaucuacgccauu

SEQ ID NO: 720652 - RNA, 19 nt, Homo sapiens
  misc_RNA (1)...(19): siRNA sense strand
ggagagcugguucgacuga

SEQ ID NO: 720653 - RNA, 19 nt, Homo sapiens
  misc_RNA (1)...(19): siRNA sense strand
uuaaucgacuucaccaaga

SEQ ID NO: 720654 - RNA, 19 nt, Homo sapiens
  misc_RNA (1)...(19): siRNA sense strand
gaaaugcacaacaagaucu

SEQ ID NO: 720655 - RNA, 19 nt, Homo sapiens
  misc_RNA (1)...(19): siRNA sense strand
ggaaaugcacaacaagauc

SEQ ID NO: 720656 - RNA, 19 nt, Homo sapiens
  misc_RNA (1)...(19): siRNA sense strand
aggagacccuggcucauuu

SEQ ID NO: 720657 - RNA, 19 nt, Homo sapiens
  misc_RNA (1)...(19): siRNA sense strand
gaagaucaaggacaagaag

SEQ ID NO: 720658 - RNA, 19 nt, Homo sapiens
  misc_RNA (1)...(19): siRNA sense strand
agaccaaguuucucucuca

SEQ ID NO: 720659 - RNA, 19 nt, Homo sapiens
  misc_RNA (1)...(19): siRNA sense strand
ccacaaugccaaagaaauc

SEQ ID NO: 720660 - RNA, 19 nt, Homo sapiens
  misc_RNA (1)...(19): siRNA sense strand
uaaggaaggccuccacaau

SEQ ID NO: 720661 - RNA, 19 nt, Homo sapiens
  misc_RNA (1)...(19): siRNA sense strand
uagaagacauccggacaga

SEQ ID NO: 720662 - RNA, 19 nt, Homo sapiens
  misc_RNA (1)...(19): siRNA sense strand
cagcagcuaggucugaaua

SEQ ID NO: 720663 - RNA, 19 nt, Homo sapiens
  misc_RNA (1)...(19): siRNA sense strand
gggugcaagugaaucauga

SEQ ID NO: 720664 - RNA, 19 nt, Homo sapiens
  misc_RNA (1)...(19): siRNA sense strand
uaaucgacuucaccaagaa

SEQ ID NO: 720665 - RNA, 19 nt, Homo sapiens
  misc_RNA (1)...(19): siRNA sense strand
acaaagguaugagaagaug

SEQ ID NO: 720666 - RNA, 19 nt, Homo sapiens
  misc_RNA (1)...(19): siRNA sense strand
ccuaaaugcugggaaacaa

SEQ ID NO: 720667 - RNA, 19 nt, Homo sapiens
  misc_RNA (1)...(19): siRNA sense strand
acaagacgcacccacagua

SEQ ID NO: 720668 - RNA, 19 nt, Homo sapiens
  misc_RNA (1)...(19): siRNA sense strand
ucaggaaggagaugaagaa

SEQ ID NO: 720669 - RNA, 19 nt, Homo sapiens
  misc_RNA (1)...(19): siRNA sense strand
ugaagaacguggagauggu

SEQ ID NO: 720670 - RNA, 19 nt, Homo sapiens
  misc_RNA (1)...(19): siRNA sense strand
acaaugccgugguuaagau

SEQ ID NO: 720671 - RNA, 19 nt, Homo sapiens
  misc_RNA (1)...(19): siRNA sense strand
ggaaguuuaacaccaguga

SEQ ID NO: 720672 - RNA, 19 nt, Homo sapiens
  misc_RNA (1)...(19): siRNA sense strand
ggaagaucaaggacaagaa

SEQ ID NO: 720673 - RNA, 19 nt, Homo sapiens
  misc_RNA (1)...(19): siRNA sense strand
gaagcagacgcacaacaau

SEQ ID NO: 720674 - RNA, 19 nt, Homo sapiens
  misc_RNA (1)...(19): siRNA sense strand
caucggcacuggcaccaau

SEQ ID NO: 720675 - RNA, 19 nt, Homo sapiens
  misc_RNA (1)...(19): siRNA sense strand
gauggucaguggcauguac

SEQ ID NO: 720676 - RNA, 19 nt, Homo sapiens
  misc_RNA (1)...(19): siRNA sense strand
gacaguauccucgucaaga

SEQ ID NO: 720677 - RNA, 19 nt, Homo sapiens
  misc_RNA (1)...(19): siRNA sense strand
aaagagaacgguggaaaug

SEQ ID NO: 720678 - RNA, 19 nt, Homo sapiens
  misc_RNA (1)...(19): siRNA sense strand
caacagccacagucaagau

SEQ ID NO: 720679 - RNA, 19 nt, Homo sapiens
  misc_RNA (1)...(19): siRNA sense strand
ucucugacuucuuggacua

SEQ ID NO: 720680 - RNA, 19 nt, Homo sapiens
  misc_RNA (1)...(19): siRNA sense strand
uuaagaugcugcccuccuu

SEQ ID NO: 720681 - RNA, 19 nt, Homo sapiens
  misc_RNA (1)...(19): siRNA sense strand
cagcacguuugcaccauug

SEQ ID NO: 720682 - RNA, 19 nt, Homo sapiens
  misc_RNA (1)...(19): siRNA sense strand
gaugauaucaggacacacu

SEQ ID NO: 720683 - RNA, 19 nt, Homo sapiens
  misc_RNA (1)...(19): siRNA sense strand
ggacgggacacucuacaag

SEQ ID NO: 720684 - RNA, 19 nt, Homo sapiens
  misc_RNA (1)...(19): siRNA sense strand
gaggaacugaggcacauug

SEQ ID NO: 720685 - RNA, 19 nt, Homo sapiens
  misc_RNA (1)...(19): siRNA sense strand
gaagaugaucagugguaug

SEQ ID NO: 720686 - RNA, 19 nt, Homo sapiens
  misc_RNA (1)...(19): siRNA sense strand
gggaaacaaagguaugaga

SEQ ID NO: 720687 - RNA, 19 nt, Homo sapiens
  misc_RNA (1)...(19): siRNA sense strand
caugaugaccugugcuuau

SEQ ID NO: 720688 - RNA, 19 nt, Homo sapiens
  misc_RNA (1)...(19): siRNA sense strand
agagaacgguggaaaugca

SEQ ID NO: 720689 - RNA, 19 nt, Homo sapiens
  misc_RNA (1)...(19): siRNA sense strand
ugaaccgccugcgugauaa

SEQ ID NO: 720690 - RNA, 19 nt, Homo sapiens
  misc_RNA (1)...(19): siRNA sense strand
ugggagauuucauggagaa

SEQ ID NO: 720691 - RNA, 19 nt, Homo sapiens
  misc_RNA (1)...(19): siRNA sense strand
ggugaaaucguccgcaaca

SEQ ID NO: 720692 - RNA, 19 nt, Homo sapiens
  misc_RNA (1)...(19): siRNA sense strand
caacgggugucuggaugau

SEQ ID NO: 720693 - RNA, 19 nt, Homo sapiens
  misc_RNA (1)...(19): siRNA sense strand
ucacauggaguccgagguu

SEQ ID NO: 720694 - RNA, 19 nt, Homo sapiens
  misc_RNA (1)...(19): siRNA sense strand
ucacguggacaaaggguuu

SEQ ID NO: 720695 - RNA, 19 nt, Homo sapiens
  misc_RNA (1)...(19): siRNA sense strand
caacaaugccgugguuaag

SEQ ID NO: 720696 - RNA, 19 nt, Homo sapiens
  misc_RNA (1)...(19): siRNA sense strand
ucguagcuguggugaauga

SEQ ID NO: 720697 - RNA, 19 nt, Homo sapiens
  misc_RNA (1)...(19): siRNA sense strand
cacauugucuccugcaucu

SEQ ID NO: 720698 - RNA, 19 nt, Homo sapiens
  misc_RNA (1)...(19): siRNA sense strand
cagccacagucaagauguu

SEQ ID NO: 720699 - RNA, 19 nt, Homo sapiens
  misc_RNA (1)...(19): siRNA sense strand
caagacgcacccacaguau

SEQ ID NO: 720700 - RNA, 19 nt, Homo sapiens
  misc_RNA (1)...(19): siRNA sense strand
ccagcacguuugcaccauu

SEQ ID NO: 720701 - RNA, 19 nt, Homo sapiens
  misc_RNA (1)...(19): siRNA sense strand
ccuccacaaugccaaagaa

SEQ ID NO: 720702 - RNA, 19 nt, Homo sapiens
  misc_RNA (1)...(19): siRNA sense strand
caugaugaccuguggcuau

SEQ ID NO: 720703 - RNA, 19 nt, Homo sapiens
  misc_RNA (1)...(19): siRNA sense strand
caagcuucauccacacuuc

SEQ ID NO: 720704 - RNA, 19 nt, Homo sapiens
  misc_RNA (1)...(19): siRNA sense strand
gaacugucaccaaaaugua

SEQ ID NO: 720705 - RNA, 19 nt, Homo sapiens
  misc_RNA (1)...(19): siRNA sense strand
gggaagagcuguuugauca

SEQ ID NO: 720706 - RNA, 19 nt, Homo sapiens
  misc_RNA (1)...(19): siRNA sense strand
ggaaggagaugaagaaugg

SEQ ID NO: 720707 - RNA, 19 nt, Homo sapiens
  misc_RNA (1)...(19): siRNA sense strand
gcaagugaaucaugagaaa

SEQ ID NO: 720708 - RNA, 19 nt, Homo sapiens
  misc_RNA (1)...(19): siRNA sense strand
gggaggauguguaucaaua

SEQ ID NO: 720709 - RNA, 19 nt, Homo sapiens
  misc_RNA (1)...(19): siRNA sense strand
gaaguuaccugugggauuc

SEQ ID NO: 720710 - RNA, 19 nt, Homo sapiens
  misc_RNA (1)...(19): siRNA sense strand
gcacaacaaugccgugguu

SEQ ID NO: 720711 - RNA, 19 nt, Homo sapiens
  misc_RNA (1)...(19): siRNA sense strand
ugaaggaacugucaccaaa

SEQ ID NO: 720712 - RNA, 19 nt, Homo sapiens
  misc_RNA (1)...(19): siRNA sense strand
uggagacgauggaucauua

SEQ ID NO: 720713 - RNA, 19 nt, Homo sapiens
  misc_RNA (1)...(19): siRNA sense strand
cgacggaucucuuuacaag

SEQ ID NO: 720714 - RNA, 19 nt, Homo sapiens
  misc_RNA (1)...(19): siRNA sense strand
gagcagauguggucaaacu

SEQ ID NO: 720715 - RNA, 19 nt, Homo sapiens
  misc_RNA (1)...(19): siRNA sense strand
gaucaaggacaagaaguua

SEQ ID NO: 720716 - RNA, 19 nt, Homo sapiens
  misc_RNA (1)...(19): siRNA sense strand
gagaagaugaucaguggua

SEQ ID NO: 720717 - RNA, 19 nt, Homo sapiens
  misc_RNA (1)...(19): siRNA sense strand
aaacaaagguaugagaaga

SEQ ID NO: 720718 - RNA, 19 nt, Homo sapiens
  misc_RNA (1)...(19): siRNA sense strand
gcacauugaucugguggaa

SEQ ID NO: 720719 - RNA, 19 nt, Homo sapiens
  misc_RNA (1)...(19): siRNA sense strand
aaaggaagaucaaggacaa

SEQ ID NO: 720720 - RNA, 19 nt, Homo sapiens
  misc_RNA (1)...(19): siRNA sense strand
gaacugaggcacauugauc

SEQ ID NO: 720721 - RNA, 19 nt, Homo sapiens
  misc_RNA (1)...(19): siRNA sense strand
gaagagcuguuugaucaca

SEQ ID NO: 720722 - RNA, 19 nt, Homo sapiens
  misc_RNA (1)...(19): siRNA sense strand
ggaaacaaagguaugagaa

SEQ ID NO: 720723 - RNA, 19 nt, Homo sapiens
  misc_RNA (1)...(19): siRNA sense strand
ggacaaagcgauuuaaagc

SEQ ID NO: 720724 - RNA, 19 nt, Homo sapiens
  misc_RNA (1)...(19): siRNA sense strand
ggaagcagacgcacaacaa

SEQ ID NO: 720725 - RNA, 19 nt, Homo sapiens
  misc_RNA (1)...(19): siRNA sense strand
gaagacauccggacagagu

SEQ ID NO: 720726 - RNA, 19 nt, Homo sapiens
  misc_RNA (1)...(19): siRNA sense strand
caucguagcuguggugaau

SEQ ID NO: 720727 - RNA, 19 nt, Homo sapiens
  misc_RNA (1)...(19): siRNA sense strand
ggacuggaccgucugaaug

SEQ ID NO: 720728 - RNA, 19 nt, Homo sapiens
  misc_RNA (1)...(19): siRNA sense strand
gaucuacgccauuccuauu

SEQ ID NO: 720729 - RNA, 19 nt, Homo sapiens
  misc_RNA (1)...(19): siRNA sense strand
gaugaucagugguauguac

SEQ ID NO: 720730 - RNA, 19 nt, Homo sapiens
  misc_RNA (1)...(19): siRNA sense strand
gacgauggaucauuagaag

SEQ ID NO: 720731 - RNA, 19 nt, Homo sapiens
  misc_RNA (1)...(19): siRNA sense strand
gcacagaggcaagcagcua

SEQ ID NO: 720732 - RNA, 19 nt, Homo sapiens
  misc_RNA (1)...(19): siRNA sense strand
cugcaucucugacuucuug

SEQ ID NO: 720733 - RNA, 19 nt, Homo sapiens
  misc_RNA (1)...(19): siRNA sense strand
gaguggagccguccgauga

SEQ ID NO: 720734 - RNA, 19 nt, Homo sapiens
  misc_RNA (1)...(19): siRNA sense strand
gaaacucucauagauauca

SEQ ID NO: 720735 - RNA, 19 nt, Homo sapiens
  misc_RNA (1)...(19): siRNA sense strand
caccaaugcuugcuacaug

SEQ ID NO: 720736 - RNA, 19 nt, Homo sapiens
  misc_RNA (1)...(19): siRNA sense strand
gaaaauccguagugggaaa

SEQ ID NO: 720737 - RNA, 19 nt, Homo sapiens
  misc_RNA (1)...(19): siRNA sense strand
uggcugcgguuguggauaa

SEQ ID NO: 720738 - RNA, 19 nt, Homo sapiens
  misc_RNA (1)...(19): siRNA sense strand
gggcuucacguucucauuu

SEQ ID NO: 720739 - RNA, 19 nt, Homo sapiens
  misc_RNA (1)...(19): siRNA sense strand
gagguuggacucauuguug

SEQ ID NO: 720740 - RNA, 19 nt, Homo sapiens
  misc_RNA (1)...(19): siRNA sense strand
gagcagcaccggcagauag

SEQ ID NO: 720741 - RNA, 19 nt, Homo sapiens
  misc_RNA (1)...(19): siRNA sense strand
gauaagauccgcgagaaca

SEQ ID NO: 720742 - RNA, 19 nt, Homo sapiens
  misc_RNA (1)...(19): siRNA sense strand
gaaaucguccgcaacaucu

SEQ ID NO: 720743 - RNA, 19 nt, Homo sapiens
  misc_RNA (1)...(19): siRNA sense strand
gaggagacccuggcucauu

SEQ ID NO: 720744 - RNA, 19 nt, Homo sapiens
  misc_RNA (1)...(19): siRNA sense strand
ggucaaacugcuuaacaaa

SEQ ID NO: 720745 - RNA, 19 nt, Homo sapiens
  misc_RNA (1)...(19): siRNA sense strand
ccaaguuucucucucagau

SEQ ID NO: 720746 - RNA, 19 nt, Homo sapiens
  misc_RNA (1)...(19): siRNA sense strand
guauguaccugggugaaau

SEQ ID NO: 720747 - RNA, 19 nt, Homo sapiens
  misc_RNA (1)...(19): siRNA sense strand
gaaacaaagguaugagaag

SEQ ID NO: 720748 - RNA, 19 nt, Homo sapiens
  misc_RNA (1)...(19): siRNA sense strand
gaccgagaauggugacuuc

SEQ ID NO: 720749 - RNA, 19 nt, Homo sapiens
  misc_RNA (1)...(19): siRNA sense strand
gauguggucaaacugcuua

SEQ ID NO: 720750 - RNA, 19 nt, Homo sapiens
  misc_RNA (1)...(19): siRNA sense strand
ccaugcggcucuccgauga

SEQ ID NO: 720751 - RNA, 19 nt, Homo sapiens
  misc_RNA (1)...(19): siRNA sense strand
caacaagaucuacgccauu

SEQ ID NO: 720752 - RNA, 19 nt, Homo sapiens
  misc_RNA (1)...(19): siRNA sense strand
ggagagcugguucgacuga

SEQ ID NO: 720753 - RNA, 19 nt, Homo sapiens
  misc_RNA (1)...(19): siRNA sense strand
uuaaucgacuucaccaaga

SEQ ID NO: 720754 - RNA, 19 nt, Homo sapiens
  misc_RNA (1)...(19): siRNA sense strand
gaaaugcacaacaagaucu

SEQ ID NO: 720755 - RNA, 19 nt, Homo sapiens
  misc_RNA (1)...(19): siRNA sense strand
ggaaaugcacaacaagauc

SEQ ID NO: 720756 - RNA, 19 nt, Homo sapiens
  misc_RNA (1)...(19): siRNA sense strand
aggagacccuggcucauuu

SEQ ID NO: 720757 - RNA, 19 nt, Homo sapiens
  misc_RNA (1)...(19): siRNA sense strand
gaagaucaaggacaagaag

SEQ ID NO: 720758 - RNA, 19 nt, Homo sapiens
  misc_RNA (1)...(19): siRNA sense strand
agaccaaguuucucucuca

SEQ ID NO: 720759 - RNA, 19 nt, Homo sapiens
  misc_RNA (1)...(19): siRNA sense strand
ccacaaugccaaagaaauc

SEQ ID NO: 720760 - RNA, 19 nt, Homo sapiens
  misc_RNA (1)...(19): siRNA sense strand
uaaggaaggccuccacaau

SEQ ID NO: 720761 - RNA, 19 nt, Homo sapiens
  misc_RNA (1)...(19): siRNA sense strand
uagaagacauccggacaga

SEQ ID NO: 720762 - RNA, 19 nt, Homo sapiens
  misc_RNA (1)...(19): siRNA sense strand
cagcagcuaggucugaaua

SEQ ID NO: 720763 - RNA, 19 nt, Homo sapiens
  misc_RNA (1)...(19): siRNA sense strand
gggugcaagugaaucauga

SEQ ID NO: 720764 - RNA, 19 nt, Homo sapiens
  misc_RNA (1)...(19): siRNA sense strand
uaaucgacuucaccaagaa

SEQ ID NO: 720765 - RNA, 19 nt, Homo sapiens
  misc_RNA (1)...(19): siRNA sense strand
acaaagguaugagaagaug

SEQ ID NO: 720766 - RNA, 19 nt, Homo sapiens
  misc_RNA (1)...(19): siRNA sense strand
ccuaaaugcugggaaacaa

SEQ ID NO: 720767 - RNA, 19 nt, Homo sapiens
  misc_RNA (1)...(19): siRNA sense strand
acaagacgcacccacagua

SEQ ID NO: 720768 - RNA, 19 nt, Homo sapiens
  misc_RNA (1)...(19): siRNA sense strand
ucaggaaggagaugaagaa

SEQ ID NO: 720769 - RNA, 19 nt, Homo sapiens
  misc_RNA (1)...(19): siRNA sense strand
ugaagaacguggagauggu

SEQ ID NO: 720770 - RNA, 19 nt, Homo sapiens
  misc_RNA (1)...(19): siRNA sense strand
acaaugccgugguuaagau

SEQ ID NO: 720771 - RNA, 19 nt, Homo sapiens
  misc_RNA (1)...(19): siRNA sense strand
ggaaguuuaacaccaguga

SEQ ID NO: 720772 - RNA, 19 nt, Homo sapiens
  misc_RNA (1)...(19): siRNA sense strand
ggaagaucaaggacaagaa

SEQ ID NO: 720773 - RNA, 19 nt, Homo sapiens
  misc_RNA (1)...(19): siRNA sense strand
gaagcagacgcacaacaau

SEQ ID NO: 720774 - RNA, 19 nt, Homo sapiens
  misc_RNA (1)...(19): siRNA sense strand
caucggcacuggcaccaau

SEQ ID NO: 720775 - RNA, 19 nt, Homo sapiens
  misc_RNA (1)...(19): siRNA sense strand
gauggucaguggcauguac

SEQ ID NO: 720776 - RNA, 19 nt, Homo sapiens
  misc_RNA (1)...(19): siRNA sense strand
gacaguauccucgucaaga

SEQ ID NO: 720777 - RNA, 19 nt, Homo sapiens
  misc_RNA (1)...(19): siRNA sense strand
aaagagaacgguggaaaug

SEQ ID NO: 720778 - RNA, 19 nt, Homo sapiens
  misc_RNA (1)...(19): siRNA sense strand
caacagccacagucaagau

SEQ ID NO: 720779 - RNA, 19 nt, Homo sapiens
  misc_RNA (1)...(19): siRNA sense strand
ucucugacuucuuggacua

SEQ ID NO: 720780 - RNA, 19 nt, Homo sapiens
  misc_RNA (1)...(19): siRNA sense strand
uuaagaugcugcccuccuu

SEQ ID NO: 720781 - RNA, 19 nt, Homo sapiens
  misc_RNA (1)...(19): siRNA sense strand
cagcacguuugcaccauug

SEQ ID NO: 720782 - RNA, 19 nt, Homo sapiens
  misc_RNA (1)...(19): siRNA sense strand
gaugauaucaggacacacu

SEQ ID NO: 720783 - RNA, 19 nt, Homo sapiens
  misc_RNA (1)...(19): siRNA sense strand
ggacgggacacucuacaag

SEQ ID NO: 720784 - RNA, 19 nt, Homo sapiens
  misc_RNA (1)...(19): siRNA sense strand
gaggaacugaggcacauug

SEQ ID NO: 720785 - RNA, 19 nt, Homo sapiens
  misc_RNA (1)...(19): siRNA sense strand
gaagaugaucagugguaug

SEQ ID NO: 720786 - RNA, 19 nt, Homo sapiens
  misc_RNA (1)...(19): siRNA sense strand
gggaaacaaagguaugaga

SEQ ID NO: 720787 - RNA, 19 nt, Homo sapiens
  misc_RNA (1)...(19): siRNA sense strand
caugaugaccugugcuuau

SEQ ID NO: 720788 - RNA, 19 nt, Homo sapiens
  misc_RNA (1)...(19): siRNA sense strand
agagaacgguggaaaugca

SEQ ID NO: 720789 - RNA, 19 nt, Homo sapiens
  misc_RNA (1)...(19): siRNA sense strand
ugaaccgccugcgugauaa

SEQ ID NO: 720790 - RNA, 19 nt, Homo sapiens
  misc_RNA (1)...(19): siRNA sense strand
ugggagauuucauggagaa

SEQ ID NO: 720791 - RNA, 19 nt, Homo sapiens
  misc_RNA (1)...(19): siRNA sense strand
ggugaaaucguccgcaaca

SEQ ID NO: 720792 - RNA, 19 nt, Homo sapiens
  misc_RNA (1)...(19): siRNA sense strand
caacgggugucuggaugau

SEQ ID NO: 720793 - RNA, 19 nt, Homo sapiens
  misc_RNA (1)...(19): siRNA sense strand
ucacauggaguccgagguu

SEQ ID NO: 720794 - RNA, 19 nt, Homo sapiens
  misc_RNA (1)...(19): siRNA sense strand
ucacguggacaaaggguuu

SEQ ID NO: 720795 - RNA, 19 nt, Homo sapiens
  misc_RNA (1)...(19): siRNA sense strand
caacaaugccgugguuaag

SEQ ID NO: 720796 - RNA, 19 nt, Homo sapiens
  misc_RNA (1)...(19): siRNA sense strand
ucguagcuguggugaauga

SEQ ID NO: 720797 - RNA, 19 nt, Homo sapiens
  misc_RNA (1)...(19): siRNA sense strand
cacauugucuccugcaucu

SEQ ID NO: 720798 - RNA, 19 nt, Homo sapiens
  misc_RNA (1)...(19): siRNA sense strand
cagccacagucaagauguu

SEQ ID NO: 720799 - RNA, 19 nt, Homo sapiens
  misc_RNA (1)...(19): siRNA sense strand
caagacgcacccacaguau

SEQ ID NO: 720800 - RNA, 19 nt, Homo sapiens
  misc_RNA (1)...(19): siRNA sense strand
ccagcacguuugcaccauu

SEQ ID NO: 720801 - RNA, 19 nt, Homo sapiens
  misc_RNA (1)...(19): siRNA sense strand
ccuccacaaugccaaagaa

SEQ ID NO: 720802 - RNA, 19 nt, Homo sapiens
  misc_RNA (1)...(19): siRNA sense strand
caugaugaccuguggcuau

SEQ ID NO: 720803 - RNA, 19 nt, Homo sapiens
  misc_RNA (1)...(19): siRNA sense strand
caagcuucauccacacuuc

SEQ ID NO: 720804 - RNA, 19 nt, Homo sapiens
  misc_RNA (1)...(19): siRNA sense strand
gaacugucaccaaaaugua

SEQ ID NO: 720805 - RNA, 19 nt, Homo sapiens
  misc_RNA (1)...(19): siRNA sense strand
gggaagagcuguuugauca

SEQ ID NO: 720806 - RNA, 19 nt, Homo sapiens
  misc_RNA (1)...(19): siRNA sense strand
ggaaggagaugaagaaugg

SEQ ID NO: 720807 - RNA, 19 nt, Homo sapiens
  misc_RNA (1)...(19): siRNA sense strand
gcaagugaaucaugagaaa

SEQ ID NO: 720808 - RNA, 19 nt, Homo sapiens
  misc_RNA (1)...(19): siRNA sense strand
gggaggauguguaucaaua

SEQ ID NO: 720809 - RNA, 19 nt, Homo sapiens
  misc_RNA (1)...(19): siRNA sense strand
gaaguuaccugugggauuc

SEQ ID NO: 720810 - RNA, 19 nt, Homo sapiens
  misc_RNA (1)...(19): siRNA sense strand
gcacaacaaugccgugguu

SEQ ID NO: 720811 - RNA, 19 nt, Homo sapiens
  misc_RNA (1)...(19): siRNA sense strand
ugaaggaacugucaccaaa

SEQ ID NO: 720812 - RNA, 19 nt, Homo sapiens
  misc_RNA (1)...(19): siRNA sense strand
uggagacgauggaucauua

SEQ ID NO: 720813 - RNA, 19 nt, Homo sapiens
  misc_RNA (1)...(19): siRNA sense strand
cgacggaucucuuuacaag

SEQ ID NO: 720814 - RNA, 19 nt, Homo sapiens
  misc_RNA (1)...(19): siRNA sense strand
gagcagauguggucaaacu

SEQ ID NO: 720815 - RNA, 19 nt, Homo sapiens
  misc_RNA (1)...(19): siRNA sense strand
gaucaaggacaagaaguua

SEQ ID NO: 720816 - RNA, 19 nt, Homo sapiens
  misc_RNA (1)...(19): siRNA sense strand
gagaagaugaucaguggua

SEQ ID NO: 720817 - RNA, 19 nt, Homo sapiens
  misc_RNA (1)...(19): siRNA sense strand
aaacaaagguaugagaaga

SEQ ID NO: 720818 - RNA, 19 nt, Homo sapiens
  misc_RNA (1)...(19): siRNA sense strand
gcacauugaucugguggaa

SEQ ID NO: 720819 - RNA, 19 nt, Homo sapiens
  misc_RNA (1)...(19): siRNA sense strand
aaaggaagaucaaggacaa

SEQ ID NO: 720820 - RNA, 19 nt, Homo sapiens
  misc_RNA (1)...(19): siRNA sense strand
gaacugaggcacauugauc

SEQ ID NO: 720821 - RNA, 19 nt, Homo sapiens
  misc_RNA (1)...(19): siRNA sense strand
gaagagcuguuugaucaca

SEQ ID NO: 720822 - RNA, 19 nt, Homo sapiens
  misc_RNA (1)...(19): siRNA sense strand
ggaaacaaagguaugagaa

SEQ ID NO: 720823 - RNA, 19 nt, Homo sapiens
  misc_RNA (1)...(19): siRNA sense strand
ggacaaagcgauuuaaagc

SEQ ID NO: 720824 - RNA, 19 nt, Homo sapiens
  misc_RNA (1)...(19): siRNA sense strand
ggaagcagacgcacaacaa

SEQ ID NO: 720825 - RNA, 19 nt, Homo sapiens
  misc_RNA (1)...(19): siRNA sense strand
gaagacauccggacagagu

SEQ ID NO: 720826 - RNA, 19 nt, Homo sapiens
  misc_RNA (1)...(19): siRNA sense strand
caucguagcuguggugaau

SEQ ID NO: 720827 - RNA, 19 nt, Homo sapiens
  misc_RNA (1)...(19): siRNA sense strand
ggacuggaccgucugaaug

SEQ ID NO: 720828 - RNA, 19 nt, Homo sapiens
  misc_RNA (1)...(19): siRNA sense strand
gaucuacgccauuccuauu

SEQ ID NO: 720829 - RNA, 19 nt, Homo sapiens
  misc_RNA (1)...(19): siRNA sense strand
gaugaucagugguauguac

SEQ ID NO: 720830 - RNA, 19 nt, Homo sapiens
  misc_RNA (1)...(19): siRNA sense strand
gacgauggaucauuagaag

SEQ ID NO: 720831 - RNA, 19 nt, Homo sapiens
  misc_RNA (1)...(19): siRNA sense strand
gcacagaggcaagcagcua

SEQ ID NO: 720832 - RNA, 19 nt, Homo sapiens
  misc_RNA (1)...(19): siRNA sense strand
cugcaucucugacuucuug

SEQ ID NO: 720833 - RNA, 19 nt, Homo sapiens
  misc_RNA (1)...(19): siRNA sense strand
gaguggagccguccgauga

SEQ ID NO: 720834 - RNA, 19 nt, Homo sapiens
  misc_RNA (1)...(19): siRNA sense strand
gaaacucucauagauauca

SEQ ID NO: 720835 - RNA, 19 nt, Homo sapiens
  misc_RNA (1)...(19): siRNA sense strand
caccaaugcuugcuacaug

SEQ ID NO: 720836 - RNA, 19 nt, Homo sapiens
  misc_RNA (1)...(19): siRNA sense strand
gaaaauccguagugggaaa

SEQ ID NO: 720837 - RNA, 19 nt, Homo sapiens
  misc_RNA (1)...(19): siRNA sense strand
uggcugcgguuguggauaa

SEQ ID NO: 720838 - RNA, 19 nt, Homo sapiens
  misc_RNA (1)...(19): siRNA sense strand
gggcuucacguucucauuu

SEQ ID NO: 720839 - RNA, 19 nt, Homo sapiens
  misc_RNA (1)...(19): siRNA sense strand
gagguuggacucauuguug

SEQ ID NO: 720840 - RNA, 19 nt, Homo sapiens
  misc_RNA (1)...(19): siRNA sense strand
gagcagcaccggcagauag

SEQ ID NO: 720841 - RNA, 19 nt, Homo sapiens
  misc_RNA (1)...(19): siRNA sense strand
gauaagauccgcgagaaca

SEQ ID NO: 720842 - RNA, 19 nt, Homo sapiens
  misc_RNA (1)...(19): siRNA sense strand
gaaaucguccgcaacaucu

SEQ ID NO: 720843 - RNA, 19 nt, Homo sapiens
  misc_RNA (1)...(19): siRNA sense strand
gaggagacccuggcucauu

SEQ ID NO: 720844 - RNA, 19 nt, Homo sapiens
  misc_RNA (1)...(19): siRNA sense strand
ggucaaacugcuuaacaaa

SEQ ID NO: 720845 - RNA, 19 nt, Homo sapiens
  misc_RNA (1)...(19): siRNA sense strand
ccaaguuucucucucagau

SEQ ID NO: 720846 - RNA, 19 nt, Homo sapiens
  misc_RNA (1)...(19): siRNA sense strand
guauguaccugggugaaau

SEQ ID NO: 720847 - RNA, 19 nt, Homo sapiens
  misc_RNA (1)...(19): siRNA sense strand
gaaacaaagguaugagaag

SEQ ID NO: 720848 - RNA, 19 nt, Homo sapiens
  misc_RNA (1)...(19): siRNA sense strand
gaccgagaauggugacuuc

SEQ ID NO: 720849 - RNA, 19 nt, Homo sapiens
  misc_RNA (1)...(19): siRNA sense strand
gauguggucaaacugcuua

SEQ ID NO: 720850 - RNA, 19 nt, Homo sapiens
  misc_RNA (1)...(19): siRNA sense strand
ccaugcggcucuccgauga

SEQ ID NO: 720851 - RNA, 19 nt, Homo sapiens
  misc_RNA (1)...(19): siRNA sense strand
caacaagaucuacgccauu

SEQ ID NO: 720852 - RNA, 19 nt, Homo sapiens
  misc_RNA (1)...(19): siRNA sense strand
ggagagcugguucgacuga

SEQ ID NO: 720853 - RNA, 19 nt, Homo sapiens
  misc_RNA (1)...(19): siRNA sense strand
uuaaucgacuucaccaaga

SEQ ID NO: 720854 - RNA, 19 nt, Homo sapiens
  misc_RNA (1)...(19): siRNA sense strand
gaaaugcacaacaagaucu

SEQ ID NO: 720855 - RNA, 19 nt, Homo sapiens
  misc_RNA (1)...(19): siRNA sense strand
ggaaaugcacaacaagauc

SEQ ID NO: 720856 - RNA, 19 nt, Homo sapiens
  misc_RNA (1)...(19): siRNA sense strand
aggagacccuggcucauuu

SEQ ID NO: 720857 - RNA, 19 nt, Homo sapiens
  misc_RNA (1)...(19): siRNA sense strand
gaagaucaaggacaagaag

SEQ ID NO: 720858 - RNA, 19 nt, Homo sapiens
  misc_RNA (1)...(19): siRNA sense strand
agaccaaguuucucucuca

SEQ ID NO: 720859 - RNA, 19 nt, Homo sapiens
  misc_RNA (1)...(19): siRNA sense strand
ccacaaugccaaagaaauc

SEQ ID NO: 720860 - RNA, 19 nt, Homo sapiens
  misc_RNA (1)...(19): siRNA sense strand
uaaggaaggccuccacaau

SEQ ID NO: 720861 - RNA, 19 nt, Homo sapiens
  misc_RNA (1)...(19): siRNA sense strand
uagaagacauccggacaga

SEQ ID NO: 720862 - RNA, 19 nt, Homo sapiens
  misc_RNA (1)...(19): siRNA sense strand
cagcagcuaggucugaaua

SEQ ID NO: 720863 - RNA, 19 nt, Homo sapiens
  misc_RNA (1)...(19): siRNA sense strand
gggugcaagugaaucauga

SEQ ID NO: 720864 - RNA, 19 nt, Homo sapiens
  misc_RNA (1)...(19): siRNA sense strand
uaaucgacuucaccaagaa

SEQ ID NO: 720865 - RNA, 19 nt, Homo sapiens
  misc_RNA (1)...(19): siRNA sense strand
acaaagguaugagaagaug

SEQ ID NO: 720866 - RNA, 19 nt, Homo sapiens
  misc_RNA (1)...(19): siRNA sense strand
ccuaaaugcugggaaacaa

SEQ ID NO: 720867 - RNA, 19 nt, Homo sapiens
  misc_RNA (1)...(19): siRNA sense strand
acaagacgcacccacagua

SEQ ID NO: 720868 - RNA, 19 nt, Homo sapiens
  misc_RNA (1)...(19): siRNA sense strand
ucaggaaggagaugaagaa

SEQ ID NO: 720869 - RNA, 19 nt, Homo sapiens
  misc_RNA (1)...(19): siRNA sense strand
ugaagaacguggagauggu

SEQ ID NO: 720870 - RNA, 19 nt, Homo sapiens
  misc_RNA (1)...(19): siRNA sense strand
acaaugccgugguuaagau

SEQ ID NO: 720871 - RNA, 19 nt, Homo sapiens
  misc_RNA (1)...(19): siRNA sense strand
ggaaguuuaacaccaguga

SEQ ID NO: 720872 - RNA, 19 nt, Homo sapiens
  misc_RNA (1)...(19): siRNA sense strand
ggaagaucaaggacaagaa

SEQ ID NO: 720873 - RNA, 19 nt, Homo sapiens
  misc_RNA (1)...(19): siRNA sense strand
gaagcagacgcacaacaau

SEQ ID NO: 720874 - RNA, 19 nt, Homo sapiens
  misc_RNA (1)...(19): siRNA sense strand
caucggcacuggcaccaau

SEQ ID NO: 720875 - RNA, 19 nt, Homo sapiens
  misc_RNA (1)...(19): siRNA sense strand
gauggucaguggcauguac

SEQ ID NO: 720876 - RNA, 19 nt, Homo sapiens
  misc_RNA (1)...(19): siRNA sense strand
gacaguauccucgucaaga

SEQ ID NO: 720877 - RNA, 19 nt, Homo sapiens
  misc_RNA (1)...(19): siRNA sense strand
aaagagaacgguggaaaug

SEQ ID NO: 720878 - RNA, 19 nt, Homo sapiens
  misc_RNA (1)...(19): siRNA sense strand
caacagccacagucaagau

SEQ ID NO: 720879 - RNA, 19 nt, Homo sapiens
  misc_RNA (1)...(19): siRNA sense strand
ucucugacuucuuggacua

SEQ ID NO: 720880 - RNA, 19 nt, Homo sapiens
  misc_RNA (1)...(19): siRNA sense strand
uuaagaugcugcccuccuu

SEQ ID NO: 720881 - RNA, 19 nt, Homo sapiens
  misc_RNA (1)...(19): siRNA sense strand
cagcacguuugcaccauug

SEQ ID NO: 720882 - RNA, 19 nt, Homo sapiens
  misc_RNA (1)...(19): siRNA sense strand
gaugauaucaggacacacu

SEQ ID NO: 720883 - RNA, 19 nt, Homo sapiens
  misc_RNA (1)...(19): siRNA sense strand
ggacgggacacucuacaag

SEQ ID NO: 720884 - RNA, 19 nt, Homo sapiens
  misc_RNA (1)...(19): siRNA sense strand
gaggaacugaggcacauug

SEQ ID NO: 720885 - RNA, 19 nt, Homo sapiens
  misc_RNA (1)...(19): siRNA sense strand
gaagaugaucagugguaug

SEQ ID NO: 720886 - RNA, 19 nt, Homo sapiens
  misc_RNA (1)...(19): siRNA sense strand
gggaaacaaagguaugaga

SEQ ID NO: 720887 - RNA, 19 nt, Homo sapiens
  misc_RNA (1)...(19): siRNA sense strand
caugaugaccugugcuuau

SEQ ID NO: 720888 - RNA, 19 nt, Homo sapiens
  misc_RNA (1)...(19): siRNA sense strand
agagaacgguggaaaugca

SEQ ID NO: 720889 - RNA, 19 nt, Homo sapiens
  misc_RNA (1)...(19): siRNA sense strand
ugaaccgccugcgugauaa

SEQ ID NO: 720890 - RNA, 19 nt, Homo sapiens
  misc_RNA (1)...(19): siRNA sense strand
ugggagauuucauggagaa

SEQ ID NO: 720891 - RNA, 19 nt, Homo sapiens
  misc_RNA (1)...(19): siRNA sense strand
ggugaaaucguccgcaaca

SEQ ID NO: 720892 - RNA, 19 nt, Homo sapiens
  misc_RNA (1)...(19): siRNA sense strand
caacgggugucuggaugau

SEQ ID NO: 720893 - RNA, 19 nt, Homo sapiens
  misc_RNA (1)...(19): siRNA sense strand
ucacauggaguccgagguu

SEQ ID NO: 720894 - RNA, 19 nt, Homo sapiens
  misc_RNA (1)...(19): siRNA sense strand
ucacguggacaaaggguuu

SEQ ID NO: 720895 - RNA, 19 nt, Homo sapiens
  misc_RNA (1)...(19): siRNA sense strand
caacaaugccgugguuaag

SEQ ID NO: 720896 - RNA, 19 nt, Homo sapiens
  misc_RNA (1)...(19): siRNA sense strand
ucguagcuguggugaauga

SEQ ID NO: 720897 - RNA, 19 nt, Homo sapiens
  misc_RNA (1)...(19): siRNA sense strand
cacauugucuccugcaucu

SEQ ID NO: 720898 - RNA, 19 nt, Homo sapiens
  misc_RNA (1)...(19): siRNA sense strand
cagccacagucaagauguu

SEQ ID NO: 720899 - RNA, 19 nt, Homo sapiens
  misc_RNA (1)...(19): siRNA sense strand
caagacgcacccacaguau

SEQ ID NO: 720900 - RNA, 19 nt, Homo sapiens
  misc_RNA (1)...(19): siRNA sense strand
ccagcacguuugcaccauu

SEQ ID NO: 720901 - RNA, 19 nt, Homo sapiens
  misc_RNA (1)...(19): siRNA sense strand
ccuccacaaugccaaagaa

SEQ ID NO: 720902 - RNA, 19 nt, Homo sapiens
  misc_RNA (1)...(19): siRNA sense strand
caugaugaccuguggcuau

SEQ ID NO: 720903 - RNA, 19 nt, Homo sapiens
  misc_RNA (1)...(19): siRNA sense strand
caagcuucauccacacuuc

SEQ ID NO: 720904 - RNA, 19 nt, Homo sapiens
  misc_RNA (1)...(19): siRNA sense strand
gaacugucaccaaaaugua

SEQ ID NO: 720905 - RNA, 19 nt, Homo sapiens
  misc_RNA (1)...(19): siRNA sense strand
gggaagagcuguuugauca

SEQ ID NO: 720906 - RNA, 19 nt, Homo sapiens
  misc_RNA (1)...(19): siRNA sense strand
ggaaggagaugaagaaugg

SEQ ID NO: 720907 - RNA, 19 nt, Homo sapiens
  misc_RNA (1)...(19): siRNA sense strand
gcaagugaaucaugagaaa

SEQ ID NO: 720908 - RNA, 19 nt, Homo sapiens
  misc_RNA (1)...(19): siRNA sense strand
gggaggauguguaucaaua

SEQ ID NO: 720909 - RNA, 19 nt, Homo sapiens
  misc_RNA (1)...(19): siRNA sense strand
gaaguuaccugugggauuc

SEQ ID NO: 720910 - RNA, 19 nt, Homo sapiens
  misc_RNA (1)...(19): siRNA sense strand
gcacaacaaugccgugguu

SEQ ID NO: 720911 - RNA, 19 nt, Homo sapiens
  misc_RNA (1)...(19): siRNA sense strand
ugaaggaacugucaccaaa

SEQ ID NO: 720912 - RNA, 19 nt, Homo sapiens
  misc_RNA (1)...(19): siRNA sense strand
uggagacgauggaucauua

SEQ ID NO: 720913 - RNA, 19 nt, Homo sapiens
  misc_RNA (1)...(19): siRNA sense strand
cgacggaucucuuuacaag

SEQ ID NO: 720914 - RNA, 19 nt, Homo sapiens
  misc_RNA (1)...(19): siRNA sense strand
gagcagauguggucaaacu

SEQ ID NO: 720915 - RNA, 19 nt, Homo sapiens
  misc_RNA (1)...(19): siRNA sense strand
gaucaaggacaagaaguua

SEQ ID NO: 720916 - RNA, 19 nt, Homo sapiens
  misc_RNA (1)...(19): siRNA sense strand
gagaagaugaucaguggua

SEQ ID NO: 720917 - RNA, 19 nt, Homo sapiens
  misc_RNA (1)...(19): siRNA sense strand
aaacaaagguaugagaaga

SEQ ID NO: 720918 - RNA, 19 nt, Homo sapiens
  misc_RNA (1)...(19): siRNA sense strand
gcacauugaucugguggaa

SEQ ID NO: 720919 - RNA, 19 nt, Homo sapiens
  misc_RNA (1)...(19): siRNA sense strand
aaaggaagaucaaggacaa

SEQ ID NO: 720920 - RNA, 19 nt, Homo sapiens
  misc_RNA (1)...(19): siRNA sense strand
gaacugaggcacauugauc

SEQ ID NO: 720921 - RNA, 19 nt, Homo sapiens
  misc_RNA (1)...(19): siRNA sense strand
gaagagcuguuugaucaca

SEQ ID NO: 720922 - RNA, 19 nt, Homo sapiens
  misc_RNA (1)...(19): siRNA sense strand
ggaaacaaagguaugagaa

SEQ ID NO: 720923 - RNA, 19 nt, Homo sapiens
  misc_RNA (1)...(19): siRNA sense strand
ggacaaagcgauuuaaagc

SEQ ID NO: 720924 - RNA, 19 nt, Homo sapiens
  misc_RNA (1)...(19): siRNA sense strand
ggaagcagacgcacaacaa

SEQ ID NO: 720925 - RNA, 19 nt, Homo sapiens
  misc_RNA (1)...(19): siRNA sense strand
gaagacauccggacagagu

SEQ ID NO: 720926 - RNA, 19 nt, Homo sapiens
  misc_RNA (1)...(19): siRNA sense strand
caucguagcuguggugaau

SEQ ID NO: 720927 - RNA, 19 nt, Homo sapiens
  misc_RNA (1)...(19): siRNA sense strand
ggacuggaccgucugaaug

SEQ ID NO: 720928 - RNA, 19 nt, Homo sapiens
  misc_RNA (1)...(19): siRNA sense strand
gaucuacgccauuccuauu

SEQ ID NO: 720929 - RNA, 19 nt, Homo sapiens
  misc_RNA (1)...(19): siRNA sense strand
gaugaucagugguauguac

SEQ ID NO: 720930 - RNA, 19 nt, Homo sapiens
  misc_RNA (1)...(19): siRNA sense strand
gacgauggaucauuagaag

SEQ ID NO: 720931 - RNA, 19 nt, Homo sapiens
  misc_RNA (1)...(19): siRNA sense strand
gcacagaggcaagcagcua

SEQ ID NO: 720932 - RNA, 19 nt, Homo sapiens
  misc_RNA (1)...(19): siRNA sense strand
cugcaucucugacuucuug

SEQ ID NO: 720933 - RNA, 19 nt, Homo sapiens
  misc_RNA (1)...(19): siRNA sense strand
gaguggagccguccgauga

SEQ ID NO: 720934 - RNA, 19 nt, Homo sapiens
  misc_RNA (1)...(19): siRNA sense strand
gaaacucucauagauauca

SEQ ID NO: 720935 - RNA, 19 nt, Homo sapiens
  misc_RNA (1)...(19): siRNA sense strand
caccaaugcuugcuacaug

SEQ ID NO: 720936 - RNA, 19 nt, Homo sapiens
  misc_RNA (1)...(19): siRNA sense strand
gaaaauccguagugggaaa

SEQ ID NO: 720937 - RNA, 19 nt, Homo sapiens
  misc_RNA (1)...(19): siRNA sense strand
uggcugcgguuguggauaa

SEQ ID NO: 720938 - RNA, 19 nt, Homo sapiens
  misc_RNA (1)...(19): siRNA sense strand
gggcuucacguucucauuu

SEQ ID NO: 720939 - RNA, 19 nt, Homo sapiens
  misc_RNA (1)...(19): siRNA sense strand
gagguuggacucauuguug

SEQ ID NO: 720940 - RNA, 19 nt, Homo sapiens
  misc_RNA (1)...(19): siRNA sense strand
gagcagcaccggcagauag

SEQ ID NO: 720941 - RNA, 19 nt, Homo sapiens
  misc_RNA (1)...(19): siRNA sense strand
gauaagauccgcgagaaca

SEQ ID NO: 720942 - RNA, 19 nt, Homo sapiens
  misc_RNA (1)...(19): siRNA sense strand
gaaaucguccgcaacaucu

SEQ ID NO: 720943 - RNA, 19 nt, Homo sapiens
  misc_RNA (1)...(19): siRNA sense strand
gaggagacccuggcucauu

SEQ ID NO: 720944 - RNA, 19 nt, Homo sapiens
  misc_RNA (1)...(19): siRNA sense strand
ggucaaacugcuuaacaaa

SEQ ID NO: 720945 - RNA, 19 nt, Homo sapiens
  misc_RNA (1)...(19): siRNA sense strand
ccaaguuucucucucagau

SEQ ID NO: 720946 - RNA, 19 nt, Homo sapiens
  misc_RNA (1)...(19): siRNA sense strand
guauguaccugggugaaau

SEQ ID NO: 720947 - RNA, 19 nt, Homo sapiens
  misc_RNA (1)...(19): siRNA sense strand
gaaacaaagguaugagaag

SEQ ID NO: 720948 - RNA, 19 nt, Homo sapiens
  misc_RNA (1)...(19): siRNA sense strand
gaccgagaauggugacuuc

SEQ ID NO: 720949 - RNA, 19 nt, Homo sapiens
  misc_RNA (1)...(19): siRNA sense strand
gauguggucaaacugcuua

SEQ ID NO: 720950 - RNA, 19 nt, Homo sapiens
  misc_RNA (1)...(19): siRNA sense strand
ccaugcggcucuccgauga

SEQ ID NO: 720951 - RNA, 19 nt, Homo sapiens
  misc_RNA (1)...(19): siRNA sense strand
caacaagaucuacgccauu

SEQ ID NO: 720952 - RNA, 19 nt, Homo sapiens
  misc_RNA (1)...(19): siRNA sense strand
ggagagcugguucgacuga

SEQ ID NO: 720953 - RNA, 19 nt, Homo sapiens
  misc_RNA (1)...(19): siRNA sense strand
uuaaucgacuucaccaaga

SEQ ID NO: 720954 - RNA, 19 nt, Homo sapiens
  misc_RNA (1)...(19): siRNA sense strand
gaaaugcacaacaagaucu

SEQ ID NO: 720955 - RNA, 19 nt, Homo sapiens
  misc_RNA (1)...(19): siRNA sense strand
ggaaaugcacaacaagauc

SEQ ID NO: 720956 - RNA, 19 nt, Homo sapiens
  misc_RNA (1)...(19): siRNA sense strand
aggagacccuggcucauuu

SEQ ID NO: 720957 - RNA, 19 nt, Homo sapiens
  misc_RNA (1)...(19): siRNA sense strand
gaagaucaaggacaagaag

SEQ ID NO: 720958 - RNA, 19 nt, Homo sapiens
  misc_RNA (1)...(19): siRNA sense strand
agaccaaguuucucucuca

SEQ ID NO: 720959 - RNA, 19 nt, Homo sapiens
  misc_RNA (1)...(19): siRNA sense strand
ccacaaugccaaagaaauc

SEQ ID NO: 720960 - RNA, 19 nt, Homo sapiens
  misc_RNA (1)...(19): siRNA sense strand
uaaggaaggccuccacaau

SEQ ID NO: 720961 - RNA, 19 nt, Homo sapiens
  misc_RNA (1)...(19): siRNA sense strand
uagaagacauccggacaga

SEQ ID NO: 720962 - RNA, 19 nt, Homo sapiens
  misc_RNA (1)...(19): siRNA sense strand
cagcagcuaggucugaaua

SEQ ID NO: 720963 - RNA, 19 nt, Homo sapiens
  misc_RNA (1)...(19): siRNA sense strand
gggugcaagugaaucauga

SEQ ID NO: 720964 - RNA, 19 nt, Homo sapiens
  misc_RNA (1)...(19): siRNA sense strand
uaaucgacuucaccaagaa

SEQ ID NO: 720965 - RNA, 19 nt, Homo sapiens
  misc_RNA (1)...(19): siRNA sense strand
acaaagguaugagaagaug

SEQ ID NO: 720966 - RNA, 19 nt, Homo sapiens
  misc_RNA (1)...(19): siRNA sense strand
ccuaaaugcugggaaacaa

SEQ ID NO: 720967 - RNA, 19 nt, Homo sapiens
  misc_RNA (1)...(19): siRNA sense strand
acaagacgcacccacagua

SEQ ID NO: 720968 - RNA, 19 nt, Homo sapiens
  misc_RNA (1)...(19): siRNA sense strand
ucaggaaggagaugaagaa

SEQ ID NO: 720969 - RNA, 19 nt, Homo sapiens
  misc_RNA (1)...(19): siRNA sense strand
ugaagaacguggagauggu

SEQ ID NO: 720970 - RNA, 19 nt, Homo sapiens
  misc_RNA (1)...(19): siRNA sense strand
acaaugccgugguuaagau

SEQ ID NO: 720971 - RNA, 19 nt, Homo sapiens
  misc_RNA (1)...(19): siRNA sense strand
ggaaguuuaacaccaguga

SEQ ID NO: 720972 - RNA, 19 nt, Homo sapiens
  misc_RNA (1)...(19): siRNA sense strand
ggaagaucaaggacaagaa

SEQ ID NO: 720973 - RNA, 19 nt, Homo sapiens
  misc_RNA (1)...(19): siRNA sense strand
gaagcagacgcacaacaau

SEQ ID NO: 720974 - RNA, 19 nt, Homo sapiens
  misc_RNA (1)...(19): siRNA sense strand
caucggcacuggcaccaau

SEQ ID NO: 720975 - RNA, 19 nt, Homo sapiens
  misc_RNA (1)...(19): siRNA sense strand
gauggucaguggcauguac

SEQ ID NO: 720976 - RNA, 19 nt, Homo sapiens
  misc_RNA (1)...(19): siRNA sense strand
gacaguauccucgucaaga

SEQ ID NO: 720977 - RNA, 19 nt, Homo sapiens
  misc_RNA (1)...(19): siRNA sense strand
aaagagaacgguggaaaug

SEQ ID NO: 720978 - RNA, 19 nt, Homo sapiens
  misc_RNA (1)...(19): siRNA sense strand
caacagccacagucaagau

SEQ ID NO: 720979 - RNA, 19 nt, Homo sapiens
  misc_RNA (1)...(19): siRNA sense strand
ucucugacuucuuggacua

SEQ ID NO: 720980 - RNA, 19 nt, Homo sapiens
  misc_RNA (1)...(19): siRNA sense strand
uuaagaugcugcccuccuu

SEQ ID NO: 720981 - RNA, 19 nt, Homo sapiens
  misc_RNA (1)...(19): siRNA sense strand
cagcacguuugcaccauug

SEQ ID NO: 720982 - RNA, 19 nt, Homo sapiens
  misc_RNA (1)...(19): siRNA sense strand
gaugauaucaggacacacu

SEQ ID NO: 720983 - RNA, 19 nt, Homo sapiens
  misc_RNA (1)...(19): siRNA sense strand
ggacgggacacucuacaag

SEQ ID NO: 720984 - RNA, 19 nt, Homo sapiens
  misc_RNA (1)...(19): siRNA sense strand
gaggaacugaggcacauug

SEQ ID NO: 720985 - RNA, 19 nt, Homo sapiens
  misc_RNA (1)...(19): siRNA sense strand
gaagaugaucagugguaug

SEQ ID NO: 720986 - RNA, 19 nt, Homo sapiens
  misc_RNA (1)...(19): siRNA sense strand
gggaaacaaagguaugaga

SEQ ID NO: 720987 - RNA, 19 nt, Homo sapiens
  misc_RNA (1)...(19): siRNA sense strand
caugaugaccugugcuuau

SEQ ID NO: 720988 - RNA, 19 nt, Homo sapiens
  misc_RNA (1)...(19): siRNA sense strand
agagaacgguggaaaugca

SEQ ID NO: 720989 - RNA, 19 nt, Homo sapiens
  misc_RNA (1)...(19): siRNA sense strand
ugaaccgccugcgugauaa

SEQ ID NO: 720990 - RNA, 19 nt, Homo sapiens
  misc_RNA (1)...(19): siRNA sense strand
ugggagauuucauggagaa

SEQ ID NO: 720991 - RNA, 19 nt, Homo sapiens
  misc_RNA (1)...(19): siRNA sense strand
ggugaaaucguccgcaaca

SEQ ID NO: 720992 - RNA, 19 nt, Homo sapiens
  misc_RNA (1)...(19): siRNA sense strand
caacgggugucuggaugau

SEQ ID NO: 720993 - RNA, 19 nt, Homo sapiens
  misc_RNA (1)...(19): siRNA sense strand
ucacauggaguccgagguu

SEQ ID NO: 720994 - RNA, 19 nt, Homo sapiens
  misc_RNA (1)...(19): siRNA sense strand
ucacguggacaaaggguuu

SEQ ID NO: 720995 - RNA, 19 nt, Homo sapiens
  misc_RNA (1)...(19): siRNA sense strand
caacaaugccgugguuaag

SEQ ID NO: 720996 - RNA, 19 nt, Homo sapiens
  misc_RNA (1)...(19): siRNA sense strand
ucguagcuguggugaauga

SEQ ID NO: 720997 - RNA, 19 nt, Homo sapiens
  misc_RNA (1)...(19): siRNA sense strand
cacauugucuccugcaucu

SEQ ID NO: 720998 - RNA, 19 nt, Homo sapiens
  misc_RNA (1)...(19): siRNA sense strand
cagccacagucaagauguu

SEQ ID NO: 720999 - RNA, 19 nt, Homo sapiens
  misc_RNA (1)...(19): siRNA sense strand
caagacgcacccacaguau

SEQ ID NO: 721000 - RNA, 19 nt, Homo sapiens
  misc_RNA (1)...(19): siRNA sense strand
ccagcacguuugcaccauu

SEQ ID NO: 721001 - RNA, 19 nt, Homo sapiens
  misc_RNA (1)...(19): siRNA sense strand
ccuccacaaugccaaagaa

SEQ ID NO: 721002 - RNA, 19 nt, Homo sapiens
  misc_RNA (1)...(19): siRNA sense strand
caugaugaccuguggcuau

SEQ ID NO: 721003 - RNA, 19 nt, Homo sapiens
  misc_RNA (1)...(19): siRNA sense strand
caagcuucauccacacuuc

SEQ ID NO: 721004 - RNA, 19 nt, Homo sapiens
  misc_RNA (1)...(19): siRNA sense strand
gaacugucaccaaaaugua

SEQ ID NO: 721005 - RNA, 19 nt, Homo sapiens
  misc_RNA (1)...(19): siRNA sense strand
gggaagagcuguuugauca

SEQ ID NO: 721006 - RNA, 19 nt, Homo sapiens
  misc_RNA (1)...(19): siRNA sense strand
ggaaggagaugaagaaugg

SEQ ID NO: 721007 - RNA, 19 nt, Homo sapiens
  misc_RNA (1)...(19): siRNA sense strand
gcaagugaaucaugagaaa

SEQ ID NO: 721008 - RNA, 19 nt, Homo sapiens
  misc_RNA (1)...(19): siRNA sense strand
gggaggauguguaucaaua

SEQ ID NO: 721009 - RNA, 19 nt, Homo sapiens
  misc_RNA (1)...(19): siRNA sense strand
gaaguuaccugugggauuc

SEQ ID NO: 721010 - RNA, 19 nt, Homo sapiens
  misc_RNA (1)...(19): siRNA sense strand
gcacaacaaugccgugguu

SEQ ID NO: 721011 - RNA, 19 nt, Homo sapiens
  misc_RNA (1)...(19): siRNA sense strand
ugaaggaacugucaccaaa

SEQ ID NO: 721012 - RNA, 19 nt, Homo sapiens
  misc_RNA (1)...(19): siRNA sense strand
uggagacgauggaucauua

SEQ ID NO: 721013 - RNA, 19 nt, Homo sapiens
  misc_RNA (1)...(19): siRNA sense strand
cgacggaucucuuuacaag

SEQ ID NO: 721014 - RNA, 19 nt, Homo sapiens
  misc_RNA (1)...(19): siRNA sense strand
gagcagauguggucaaacu

SEQ ID NO: 721015 - RNA, 19 nt, Homo sapiens
  misc_RNA (1)...(19): siRNA sense strand
gaucaaggacaagaaguua

SEQ ID NO: 721016 - RNA, 19 nt, Homo sapiens
  misc_RNA (1)...(19): siRNA sense strand
gagaagaugaucaguggua

SEQ ID NO: 721017 - RNA, 19 nt, Homo sapiens
  misc_RNA (1)...(19): siRNA sense strand
aaacaaagguaugagaaga

SEQ ID NO: 721018 - RNA, 19 nt, Homo sapiens
  misc_RNA (1)...(19): siRNA sense strand
gcacauugaucugguggaa

SEQ ID NO: 721019 - RNA, 19 nt, Homo sapiens
  misc_RNA (1)...(19): siRNA sense strand
aaaggaagaucaaggacaa

SEQ ID NO: 721020 - RNA, 19 nt, Homo sapiens
  misc_RNA (1)...(19): siRNA sense strand
gaacugaggcacauugauc

SEQ ID NO: 721021 - RNA, 19 nt, Homo sapiens
  misc_RNA (1)...(19): siRNA sense strand
gaagagcuguuugaucaca

SEQ ID NO: 721022 - RNA, 19 nt, Homo sapiens
  misc_RNA (1)...(19): siRNA sense strand
ggaaacaaagguaugagaa

SEQ ID NO: 721023 - RNA, 19 nt, Homo sapiens
  misc_RNA (1)...(19): siRNA sense strand
ggacaaagcgauuuaaagc

SEQ ID NO: 721024 - RNA, 19 nt, Homo sapiens
  misc_RNA (1)...(19): siRNA sense strand
ggaagcagacgcacaacaa

SEQ ID NO: 721025 - RNA, 19 nt, Homo sapiens
  misc_RNA (1)...(19): siRNA sense strand
gaagacauccggacagagu

SEQ ID NO: 721026 - RNA, 19 nt, Homo sapiens
  misc_RNA (1)...(19): siRNA sense strand
caucguagcuguggugaau

SEQ ID NO: 721027 - RNA, 19 nt, Homo sapiens
  misc_RNA (1)...(19): siRNA sense strand
ggacuggaccgucugaaug

SEQ ID NO: 721028 - RNA, 19 nt, Homo sapiens
  misc_RNA (1)...(19): siRNA sense strand
gaucuacgccauuccuauu

SEQ ID NO: 721029 - RNA, 19 nt, Homo sapiens
  misc_RNA (1)...(19): siRNA sense strand
gaugaucagugguauguac

SEQ ID NO: 721030 - RNA, 19 nt, Homo sapiens
  misc_RNA (1)...(19): siRNA sense strand
gacgauggaucauuagaag

SEQ ID NO: 721031 - RNA, 19 nt, Homo sapiens
  misc_RNA (1)...(19): siRNA sense strand
gcacagaggcaagcagcua

SEQ ID NO: 721032 - RNA, 19 nt, Homo sapiens
  misc_RNA (1)...(19): siRNA sense strand
cugcaucucugacuucuug

SEQ ID NO: 721033 - RNA, 19 nt, Homo sapiens
  misc_RNA (1)...(19): siRNA sense strand
gaguggagccguccgauga

SEQ ID NO: 721034 - RNA, 19 nt, Homo sapiens
  misc_RNA (1)...(19): siRNA sense strand
gaaacucucauagauauca

SEQ ID NO: 721035 - RNA, 19 nt, Homo sapiens
  misc_RNA (1)...(19): siRNA sense strand
caccaaugcuugcuacaug

SEQ ID NO: 721036 - RNA, 19 nt, Homo sapiens
  misc_RNA (1)...(19): siRNA sense strand
gaaaauccguagugggaaa

SEQ ID NO: 721037 - RNA, 19 nt, Homo sapiens
  misc_RNA (1)...(19): siRNA sense strand
uggcugcgguuguggauaa

SEQ ID NO: 721038 - RNA, 19 nt, Homo sapiens
  misc_RNA (1)...(19): siRNA sense strand
gggcuucacguucucauuu

SEQ ID NO: 721039 - RNA, 19 nt, Homo sapiens
  misc_RNA (1)...(19): siRNA sense strand
gagguuggacucauuguug

SEQ ID NO: 721040 - RNA, 19 nt, Homo sapiens
  misc_RNA (1)...(19): siRNA sense strand
gagcagcaccggcagauag

SEQ ID NO: 721041 - RNA, 19 nt, Homo sapiens
  misc_RNA (1)...(19): siRNA sense strand
gauaagauccgcgagaaca

SEQ ID NO: 721042 - RNA, 19 nt, Homo sapiens
  misc_RNA (1)...(19): siRNA sense strand
gaaaucguccgcaacaucu

SEQ ID NO: 721043 - RNA, 19 nt, Homo sapiens
  misc_RNA (1)...(19): siRNA sense strand
gaggagacccuggcucauu

SEQ ID NO: 721044 - RNA, 19 nt, Homo sapiens
  misc_RNA (1)...(19): siRNA sense strand
ggucaaacugcuuaacaaa

SEQ ID NO: 721045 - RNA, 19 nt, Homo sapiens
  misc_RNA (1)...(19): siRNA sense strand
ccaaguuucucucucagau

SEQ ID NO: 721046 - RNA, 19 nt, Homo sapiens
  misc_RNA (1)...(19): siRNA sense strand
guauguaccugggugaaau

SEQ ID NO: 721047 - RNA, 19 nt, Homo sapiens
  misc_RNA (1)...(19): siRNA sense strand
gaaacaaagguaugagaag

SEQ ID NO: 721048 - RNA, 19 nt, Homo sapiens
  misc_RNA (1)...(19): siRNA sense strand
gaccgagaauggugacuuc

SEQ ID NO: 721049 - RNA, 19 nt, Homo sapiens
  misc_RNA (1)...(19): siRNA sense strand
gauguggucaaacugcuua

SEQ ID NO: 721050 - RNA, 19 nt, Homo sapiens
  misc_RNA (1)...(19): siRNA sense strand
ccaugcggcucuccgauga

SEQ ID NO: 721051 - RNA, 19 nt, Homo sapiens
  misc_RNA (1)...(19): siRNA sense strand
caacaagaucuacgccauu

SEQ ID NO: 721052 - RNA, 19 nt, Homo sapiens
  misc_RNA (1)...(19): siRNA sense strand
ggagagcugguucgacuga

SEQ ID NO: 721053 - RNA, 19 nt, Homo sapiens
  misc_RNA (1)...(19): siRNA sense strand
uuaaucgacuucaccaaga

SEQ ID NO: 721054 - RNA, 19 nt, Homo sapiens
  misc_RNA (1)...(19): siRNA sense strand
gaaaugcacaacaagaucu

SEQ ID NO: 721055 - RNA, 19 nt, Homo sapiens
  misc_RNA (1)...(19): siRNA sense strand
ggaaaugcacaacaagauc

SEQ ID NO: 721056 - RNA, 19 nt, Homo sapiens
  misc_RNA (1)...(19): siRNA sense strand
aggagacccuggcucauuu

SEQ ID NO: 721057 - RNA, 19 nt, Homo sapiens
  misc_RNA (1)...(19): siRNA sense strand
gaagaucaaggacaagaag

SEQ ID NO: 721058 - RNA, 19 nt, Homo sapiens
  misc_RNA (1)...(19): siRNA sense strand
agaccaaguuucucucuca

SEQ ID NO: 721059 - RNA, 19 nt, Homo sapiens
  misc_RNA (1)...(19): siRNA sense strand
ccacaaugccaaagaaauc

SEQ ID NO: 721060 - RNA, 19 nt, Homo sapiens
  misc_RNA (1)...(19): siRNA sense strand
uaaggaaggccuccacaau

SEQ ID NO: 721061 - RNA, 19 nt, Homo sapiens
  misc_RNA (1)...(19): siRNA sense strand
uagaagacauccggacaga

SEQ ID NO: 721062 - RNA, 19 nt, Homo sapiens
  misc_RNA (1)...(19): siRNA sense strand
cagcagcuaggucugaaua

SEQ ID NO: 721063 - RNA, 19 nt, Homo sapiens
  misc_RNA (1)...(19): siRNA sense strand
gggugcaagugaaucauga

SEQ ID NO: 721064 - RNA, 19 nt, Homo sapiens
  misc_RNA (1)...(19): siRNA sense strand
uaaucgacuucaccaagaa

SEQ ID NO: 721065 - RNA, 19 nt, Homo sapiens
  misc_RNA (1)...(19): siRNA sense strand
acaaagguaugagaagaug

SEQ ID NO: 721066 - RNA, 19 nt, Homo sapiens
  misc_RNA (1)...(19): siRNA sense strand
ccuaaaugcugggaaacaa

SEQ ID NO: 721067 - RNA, 19 nt, Homo sapiens
  misc_RNA (1)...(19): siRNA sense strand
acaagacgcacccacagua

SEQ ID NO: 721068 - RNA, 19 nt, Homo sapiens
  misc_RNA (1)...(19): siRNA sense strand
ucaggaaggagaugaagaa

SEQ ID NO: 721069 - RNA, 19 nt, Homo sapiens
  misc_RNA (1)...(19): siRNA sense strand
ugaagaacguggagauggu

SEQ ID NO: 721070 - RNA, 19 nt, Homo sapiens
  misc_RNA (1)...(19): siRNA sense strand
acaaugccgugguuaagau

SEQ ID NO: 721071 - RNA, 19 nt, Homo sapiens
  misc_RNA (1)...(19): siRNA sense strand
ggaaguuuaacaccaguga

SEQ ID NO: 721072 - RNA, 19 nt, Homo sapiens
  misc_RNA (1)...(19): siRNA sense strand
ggaagaucaaggacaagaa

SEQ ID NO: 721073 - RNA, 19 nt, Homo sapiens
  misc_RNA (1)...(19): siRNA sense strand
gaagcagacgcacaacaau

SEQ ID NO: 721074 - RNA, 19 nt, Homo sapiens
  misc_RNA (1)...(19): siRNA sense strand
caucggcacuggcaccaau

SEQ ID NO: 721075 - RNA, 19 nt, Homo sapiens
  misc_RNA (1)...(19): siRNA sense strand
gauggucaguggcauguac

SEQ ID NO: 721076 - RNA, 19 nt, Homo sapiens
  misc_RNA (1)...(19): siRNA sense strand
gacaguauccucgucaaga

SEQ ID NO: 721077 - RNA, 19 nt, Homo sapiens
  misc_RNA (1)...(19): siRNA sense strand
aaagagaacgguggaaaug

SEQ ID NO: 721078 - RNA, 19 nt, Homo sapiens
  misc_RNA (1)...(19): siRNA sense strand
caacagccacagucaagau

SEQ ID NO: 721079 - RNA, 19 nt, Homo sapiens
  misc_RNA (1)...(19): siRNA sense strand
ucucugacuucuuggacua

SEQ ID NO: 721080 - RNA, 19 nt, Homo sapiens
  misc_RNA (1)...(19): siRNA sense strand
uuaagaugcugcccuccuu

SEQ ID NO: 721081 - RNA, 19 nt, Homo sapiens
  misc_RNA (1)...(19): siRNA sense strand
cagcacguuugcaccauug

SEQ ID NO: 721082 - RNA, 19 nt, Homo sapiens
  misc_RNA (1)...(19): siRNA sense strand
gaugauaucaggacacacu

SEQ ID NO: 721083 - RNA, 19 nt, Homo sapiens
  misc_RNA (1)...(19): siRNA sense strand
ggacgggacacucuacaag

SEQ ID NO: 721084 - RNA, 19 nt, Homo sapiens
  misc_RNA (1)...(19): siRNA sense strand
gaggaacugaggcacauug

SEQ ID NO: 721085 - RNA, 19 nt, Homo sapiens
  misc_RNA (1)...(19): siRNA sense strand
gaagaugaucagugguaug

SEQ ID NO: 721086 - RNA, 19 nt, Homo sapiens
  misc_RNA (1)...(19): siRNA sense strand
gggaaacaaagguaugaga

SEQ ID NO: 721087 - RNA, 19 nt, Homo sapiens
  misc_RNA (1)...(19): siRNA sense strand
caugaugaccugugcuuau

SEQ ID NO: 721088 - RNA, 19 nt, Homo sapiens
  misc_RNA (1)...(19): siRNA sense strand
agagaacgguggaaaugca

SEQ ID NO: 721089 - RNA, 19 nt, Homo sapiens
  misc_RNA (1)...(19): siRNA sense strand
ugaaccgccugcgugauaa

SEQ ID NO: 721090 - RNA, 19 nt, Homo sapiens
  misc_RNA (1)...(19): siRNA sense strand
ugggagauuucauggagaa

SEQ ID NO: 721091 - RNA, 19 nt, Homo sapiens
  misc_RNA (1)...(19): siRNA sense strand
ggugaaaucguccgcaaca

SEQ ID NO: 721092 - RNA, 19 nt, Homo sapiens
  misc_RNA (1)...(19): siRNA sense strand
caacgggugucuggaugau

SEQ ID NO: 721093 - RNA, 19 nt, Homo sapiens
  misc_RNA (1)...(19): siRNA sense strand
ucacauggaguccgagguu

SEQ ID NO: 721094 - RNA, 19 nt, Homo sapiens
  misc_RNA (1)...(19): siRNA sense strand
ucacguggacaaaggguuu

SEQ ID NO: 721095 - RNA, 19 nt, Homo sapiens
  misc_RNA (1)...(19): siRNA sense strand
caacaaugccgugguuaag

SEQ ID NO: 721096 - RNA, 19 nt, Homo sapiens
  misc_RNA (1)...(19): siRNA sense strand
ucguagcuguggugaauga

SEQ ID NO: 721097 - RNA, 19 nt, Homo sapiens
  misc_RNA (1)...(19): siRNA sense strand
cacauugucuccugcaucu

SEQ ID NO: 721098 - RNA, 19 nt, Homo sapiens
  misc_RNA (1)...(19): siRNA sense strand
cagccacagucaagauguu

SEQ ID NO: 721099 - RNA, 19 nt, Homo sapiens
  misc_RNA (1)...(19): siRNA sense strand
caagacgcacccacaguau

SEQ ID NO: 721100 - RNA, 19 nt, Homo sapiens
  misc_RNA (1)...(19): siRNA sense strand
ccagcacguuugcaccauu

SEQ ID NO: 721101 - RNA, 19 nt, Homo sapiens
  misc_RNA (1)...(19): siRNA sense strand
ccuccacaaugccaaagaa

SEQ ID NO: 721102 - RNA, 19 nt, Homo sapiens
  misc_RNA (1)...(19): siRNA sense strand
caugaugaccuguggcuau

SEQ ID NO: 721103 - RNA, 19 nt, Homo sapiens
  misc_RNA (1)...(19): siRNA sense strand
caagcuucauccacacuuc

SEQ ID NO: 721104 - RNA, 19 nt, Homo sapiens
  misc_RNA (1)...(19): siRNA sense strand
gaacugucaccaaaaugua

SEQ ID NO: 721105 - RNA, 19 nt, Homo sapiens
  misc_RNA (1)...(19): siRNA sense strand
gaaagaaacuggauucacu

SEQ ID NO: 721106 - RNA, 19 nt, Homo sapiens
  misc_RNA (1)...(19): siRNA sense strand
gaaacuggauucacuagga

SEQ ID NO: 721107 - RNA, 19 nt, Homo sapiens
  misc_RNA (1)...(19): siRNA sense strand
aaacuuagccaccauauuu

SEQ ID NO: 721108 - RNA, 19 nt, Homo sapiens
  misc_RNA (1)...(19): siRNA sense strand
aaagaacucucaagcagua

SEQ ID NO: 721109 - RNA, 19 nt, Homo sapiens
  misc_RNA (1)...(19): siRNA sense strand
guacacagcuuucaucaac

SEQ ID NO: 721110 - RNA, 19 nt, Homo sapiens
  misc_RNA (1)...(19): siRNA sense strand
aagaaaggcuucccaauca

SEQ ID NO: 721111 - RNA, 19 nt, Homo sapiens
  misc_RNA (1)...(19): siRNA sense strand
caucaucgcuguugugcaa

SEQ ID NO: 721112 - RNA, 19 nt, Homo sapiens
  misc_RNA (1)...(19): siRNA sense strand
gaagucaucagacaaagaa

SEQ ID NO: 721113 - RNA, 19 nt, Homo sapiens
  misc_RNA (1)...(19): siRNA sense strand
gacaaagaauucucaguuc

SEQ ID NO: 721114 - RNA, 19 nt, Homo sapiens
  misc_RNA (1)...(19): siRNA sense strand
gcagaagucaucagacaaa

SEQ ID NO: 721115 - RNA, 19 nt, Homo sapiens
  misc_RNA (1)...(19): siRNA sense strand
acuagaagcuuuacaacuu

SEQ ID NO: 721116 - RNA, 19 nt, Homo sapiens
  misc_RNA (1)...(19): siRNA sense strand
aaagagagugagacaauua

SEQ ID NO: 721117 - RNA, 19 nt, Homo sapiens
  misc_RNA (1)...(19): siRNA sense strand
cgaaugacagggccuauaa

SEQ ID NO: 721118 - RNA, 19 nt, Homo sapiens
  misc_RNA (1)...(19): siRNA sense strand
cuagaagcuuuacaacuuu

SEQ ID NO: 721119 - RNA, 19 nt, Homo sapiens
  misc_RNA (1)...(19): siRNA sense strand
ucaccgaucuugaugacaa

SEQ ID NO: 721120 - RNA, 19 nt, Homo sapiens
  misc_RNA (1)...(19): siRNA sense strand
ccuugcagcuccucauaua

SEQ ID NO: 721121 - RNA, 19 nt, Homo sapiens
  misc_RNA (1)...(19): siRNA sense strand
acaaagaauucucaguuca

SEQ ID NO: 721122 - RNA, 19 nt, Homo sapiens
  misc_RNA (1)...(19): siRNA sense strand
gcccuuaucccaagucauu

SEQ ID NO: 721123 - RNA, 19 nt, Homo sapiens
  misc_RNA (1)...(19): siRNA sense strand
agacaaagaauucucaguu

SEQ ID NO: 721124 - RNA, 19 nt, Homo sapiens
  misc_RNA (1)...(19): siRNA sense strand
gacagggccuauaaacuca

SEQ ID NO: 721125 - RNA, 19 nt, Homo sapiens
  misc_RNA (1)...(19): siRNA sense strand
caagaggucacugggaaua

SEQ ID NO: 721126 - RNA, 19 nt, Homo sapiens
  misc_RNA (1)...(19): siRNA sense strand
gacccaaccugcugcacaa

SEQ ID NO: 721127 - RNA, 19 nt, Homo sapiens
  misc_RNA (1)...(19): siRNA sense strand
aaacuggauucacuaggaa

SEQ ID NO: 721128 - RNA, 19 nt, Homo sapiens
  misc_RNA (1)...(19): siRNA sense strand
gaucaccauucccaaagau

SEQ ID NO: 721129 - RNA, 19 nt, Homo sapiens
  misc_RNA (1)...(19): siRNA sense strand
ggaauuugaccgugggauu

SEQ ID NO: 721130 - RNA, 19 nt, Homo sapiens
  misc_RNA (1)...(19): siRNA sense strand
gcagagggacgagcagaaa

SEQ ID NO: 721131 - RNA, 19 nt, Homo sapiens
  misc_RNA (1)...(19): siRNA sense strand
ggaauaaaaugacaucucu

SEQ ID NO: 721132 - RNA, 19 nt, Homo sapiens
  misc_RNA (1)...(19): siRNA sense strand
uaagaaagaaacuggauuc

SEQ ID NO: 721133 - RNA, 19 nt, Homo sapiens
  misc_RNA (1)...(19): siRNA sense strand
gaauuugaccgugggauug

SEQ ID NO: 721134 - RNA, 19 nt, Homo sapiens
  misc_RNA (1)...(19): siRNA sense strand
aaagaauucucaguucaga

SEQ ID NO: 721135 - RNA, 19 nt, Homo sapiens
  misc_RNA (1)...(19): siRNA sense strand
aagcagaagucaucagaca

SEQ ID NO: 721136 - RNA, 19 nt, Homo sapiens
  misc_RNA (1)...(19): siRNA sense strand
cagcaaagaugggcaagag

SEQ ID NO: 721137 - RNA, 19 nt, Homo sapiens
  misc_RNA (1)...(19): siRNA sense strand
ugacagggccuauaaacuc

SEQ ID NO: 721138 - RNA, 19 nt, Homo sapiens
  misc_RNA (1)...(19): siRNA sense strand
gaaaggcuucccaaucauc

SEQ ID NO: 721139 - RNA, 19 nt, Homo sapiens
  misc_RNA (1)...(19): siRNA sense strand
ccaugucaguggauucuau

SEQ ID NO: 721140 - RNA, 19 nt, Homo sapiens
  misc_RNA (1)...(19): siRNA sense strand
gaaugacagggccuauaaa

SEQ ID NO: 721141 - RNA, 19 nt, Homo sapiens
  misc_RNA (1)...(19): siRNA sense strand
ggagcacaguguucaugau

SEQ ID NO: 721142 - RNA, 19 nt, Homo sapiens
  misc_RNA (1)...(19): siRNA sense strand
gagcacaguguucaugaug

SEQ ID NO: 721143 - RNA, 19 nt, Homo sapiens
  misc_RNA (1)...(19): siRNA sense strand
ccucagaaacaccgaauga

SEQ ID NO: 721144 - RNA, 19 nt, Homo sapiens
  misc_RNA (1)...(19): siRNA sense strand
agaggucacugggaauaaa

SEQ ID NO: 721145 - RNA, 19 nt, Homo sapiens
  misc_RNA (1)...(19): siRNA sense strand
ugaauccuauuuacagaca

SEQ ID NO: 721146 - RNA, 19 nt, Homo sapiens
  misc_RNA (1)...(19): siRNA sense strand
gaggagagcacggccauca

SEQ ID NO: 721147 - RNA, 19 nt, Homo sapiens
  misc_RNA (1)...(19): siRNA sense strand
ggagagcacggccaucauc

SEQ ID NO: 721148 - RNA, 19 nt, Homo sapiens
  misc_RNA (1)...(19): siRNA sense strand
caaagacaaagaauucauc

SEQ ID NO: 721149 - RNA, 19 nt, Homo sapiens
  misc_RNA (1)...(19): siRNA sense strand
aaagaaacuggauucacua

SEQ ID NO: 721150 - RNA, 19 nt, Homo sapiens
  misc_RNA (1)...(19): siRNA sense strand
agcaguaacucaucucuca

SEQ ID NO: 721151 - RNA, 19 nt, Homo sapiens
  misc_RNA (1)...(19): siRNA sense strand
gcgaaugacagggccuaua

SEQ ID NO: 721152 - RNA, 19 nt, Homo sapiens
  misc_RNA (1)...(19): siRNA sense strand
cugaugucguggacuauuu

SEQ ID NO: 721153 - RNA, 19 nt, Homo sapiens
  misc_RNA (1)...(19): siRNA sense strand
uggcuucccuccucccauu

SEQ ID NO: 721154 - RNA, 19 nt, Homo sapiens
  misc_RNA (1)...(19): siRNA sense strand
ggacaaaagagaaagaaau

SEQ ID NO: 721155 - RNA, 19 nt, Homo sapiens
  misc_RNA (1)...(19): siRNA sense strand
gagauaagaaacucagucu

SEQ ID NO: 721156 - RNA, 19 nt, Homo sapiens
  misc_RNA (1)...(19): siRNA sense strand
cagcucaaccucagaaaca

SEQ ID NO: 721157 - RNA, 19 nt, Homo sapiens
  misc_RNA (1)...(19): siRNA sense strand
ucagaucaccauucccaaa

SEQ ID NO: 721158 - RNA, 19 nt, Homo sapiens
  misc_RNA (1)...(19): siRNA sense strand
cguggacuauuuacucaga

SEQ ID NO: 721159 - RNA, 19 nt, Homo sapiens
  misc_RNA (1)...(19): siRNA sense strand
ucagaaacaccgaaugagu

SEQ ID NO: 721160 - RNA, 19 nt, Homo sapiens
  misc_RNA (1)...(19): siRNA sense strand
ugaugucguggacuauuua

SEQ ID NO: 721161 - RNA, 19 nt, Homo sapiens
  misc_RNA (1)...(19): siRNA sense strand
ggaggaggagcacaguguu

SEQ ID NO: 721162 - RNA, 19 nt, Homo sapiens
  misc_RNA (1)...(19): siRNA sense strand
gaggaggggugccauguca

SEQ ID NO: 721163 - RNA, 19 nt, Homo sapiens
  misc_RNA (1)...(19): siRNA sense strand
uaaacuuagccaccauauu

SEQ ID NO: 721164 - RNA, 19 nt, Homo sapiens
  misc_RNA (1)...(19): siRNA sense strand
uagaagcuuuacaacuuuc

SEQ ID NO: 721165 - RNA, 19 nt, Homo sapiens
  misc_RNA (1)...(19): siRNA sense strand
gcaagaggucacugggaau

SEQ ID NO: 721166 - RNA, 19 nt, Homo sapiens
  misc_RNA (1)...(19): siRNA sense strand
ggacuauuuacucagaaga

SEQ ID NO: 721167 - RNA, 19 nt, Homo sapiens
  misc_RNA (1)...(19): siRNA sense strand
cugaucagccuguuagaga

SEQ ID NO: 721168 - RNA, 19 nt, Homo sapiens
  misc_RNA (1)...(19): siRNA sense strand
gagacaauuacgugaggaa

SEQ ID NO: 721169 - RNA, 19 nt, Homo sapiens
  misc_RNA (1)...(19): siRNA sense strand
caaagaauucucaguucag

SEQ ID NO: 721170 - RNA, 19 nt, Homo sapiens
  misc_RNA (1)...(19): siRNA sense strand
acaagcagaagucaucaga

SEQ ID NO: 721171 - RNA, 19 nt, Homo sapiens
  misc_RNA (1)...(19): siRNA sense strand
agaaacaccgaaugaguca

SEQ ID NO: 721172 - RNA, 19 nt, Homo sapiens
  misc_RNA (1)...(19): siRNA sense strand
agaaaggcuucccaaucau

SEQ ID NO: 721173 - RNA, 19 nt, Homo sapiens
  misc_RNA (1)...(19): siRNA sense strand
gucguggacuauuuacuca

SEQ ID NO: 721174 - RNA, 19 nt, Homo sapiens
  misc_RNA (1)...(19): siRNA sense strand
gcacaagcagaagucauca

SEQ ID NO: 721175 - RNA, 19 nt, Homo sapiens
  misc_RNA (1)...(19): siRNA sense strand
gaggagcacaguguucaug

SEQ ID NO: 721176 - RNA, 19 nt, Homo sapiens
  misc_RNA (1)...(19): siRNA sense strand
gaggaggagcacaguguuc

SEQ ID NO: 721177 - RNA, 19 nt, Homo sapiens
  misc_RNA (1)...(19): siRNA sense strand
gacuauuuacucagaagaa

SEQ ID NO: 721178 - RNA, 19 nt, Homo sapiens
  misc_RNA (1)...(19): siRNA sense strand
aggaacagcugggcaccuu

SEQ ID NO: 721179 - RNA, 19 nt, Homo sapiens
  misc_RNA (1)...(19): siRNA sense strand
agaucaccauucccaaaga

SEQ ID NO: 721180 - RNA, 19 nt, Homo sapiens
  misc_RNA (1)...(19): siRNA sense strand
agagaccgauccugauguc

SEQ ID NO: 721181 - RNA, 19 nt, Homo sapiens
  misc_RNA (1)...(19): siRNA sense strand
cagcuuucaucaacacucu

SEQ ID NO: 721182 - RNA, 19 nt, Homo sapiens
  misc_RNA (1)...(19): siRNA sense strand
gcugucagaucaccauucc

SEQ ID NO: 721183 - RNA, 19 nt, Homo sapiens
  misc_RNA (1)...(19): siRNA sense strand
gucaucagacaaagaauuc

SEQ ID NO: 721184 - RNA, 19 nt, Homo sapiens
  misc_RNA (1)...(19): siRNA sense strand
caccuugcagcuccucaua

SEQ ID NO: 721185 - RNA, 19 nt, Homo sapiens
  misc_RNA (1)...(19): siRNA sense strand
uggauucuaucaccgaucu

SEQ ID NO: 721186 - RNA, 19 nt, Homo sapiens
  misc_RNA (1)...(19): siRNA sense strand
uuagagaccgauccugaug

SEQ ID NO: 721187 - RNA, 19 nt, Homo sapiens
  misc_RNA (1)...(19): siRNA sense strand
agaauucucaguucagagu

SEQ ID NO: 721188 - RNA, 19 nt, Homo sapiens
  misc_RNA (1)...(19): siRNA sense strand
uggauucacuaggaaagga

SEQ ID NO: 721189 - RNA, 19 nt, Homo sapiens
  misc_RNA (1)...(19): siRNA sense strand
gaaugcccuuaucccaagu

SEQ ID NO: 721190 - RNA, 19 nt, Homo sapiens
  misc_RNA (1)...(19): siRNA sense strand
aaaagagagugagacaauu

SEQ ID NO: 721191 - RNA, 19 nt, Homo sapiens
  misc_RNA (1)...(19): siRNA sense strand
gauucuaucaccgaucuug

SEQ ID NO: 721192 - RNA, 19 nt, Homo sapiens
  misc_RNA (1)...(19): siRNA sense strand
aacauggccuccagacagu

SEQ ID NO: 721193 - RNA, 19 nt, Homo sapiens
  misc_RNA (1)...(19): siRNA sense strand
cagaagucaucagacaaag

SEQ ID NO: 721194 - RNA, 19 nt, Homo sapiens
  misc_RNA (1)...(19): siRNA sense strand
ugacaacaucagcaaagau

SEQ ID NO: 721195 - RNA, 19 nt, Homo sapiens
  misc_RNA (1)...(19): siRNA sense strand
agagggacgagcagaaaga

SEQ ID NO: 721196 - RNA, 19 nt, Homo sapiens
  misc_RNA (1)...(19): siRNA sense strand
acacagcuuucaucaacac

SEQ ID NO: 721197 - RNA, 19 nt, Homo sapiens
  misc_RNA (1)...(19): siRNA sense strand
agucaucagacaaagaauu

SEQ ID NO: 721198 - RNA, 19 nt, Homo sapiens
  misc_RNA (1)...(19): siRNA sense strand
gaaagaaacuggauucacu

SEQ ID NO: 721199 - RNA, 19 nt, Homo sapiens
  misc_RNA (1)...(19): siRNA sense strand
gaaacuggauucacuagga

SEQ ID NO: 721200 - RNA, 19 nt, Homo sapiens
  misc_RNA (1)...(19): siRNA sense strand
aaacuuagccaccauauuu

SEQ ID NO: 721201 - RNA, 19 nt, Homo sapiens
  misc_RNA (1)...(19): siRNA sense strand
aaagaacucucaagcagua

SEQ ID NO: 721202 - RNA, 19 nt, Homo sapiens
  misc_RNA (1)...(19): siRNA sense strand
guacacagcuuucaucaac

SEQ ID NO: 721203 - RNA, 19 nt, Homo sapiens
  misc_RNA (1)...(19): siRNA sense strand
aagaaaggcuucccaauca

SEQ ID NO: 721204 - RNA, 19 nt, Homo sapiens
  misc_RNA (1)...(19): siRNA sense strand
caucaucgcuguugugcaa

SEQ ID NO: 721205 - RNA, 19 nt, Homo sapiens
  misc_RNA (1)...(19): siRNA sense strand
gaagucaucagacaaagaa

SEQ ID NO: 721206 - RNA, 19 nt, Homo sapiens
  misc_RNA (1)...(19): siRNA sense strand
gacaaagaauucucaguuc

SEQ ID NO: 721207 - RNA, 19 nt, Homo sapiens
  misc_RNA (1)...(19): siRNA sense strand
gcagaagucaucagacaaa

SEQ ID NO: 721208 - RNA, 19 nt, Homo sapiens
  misc_RNA (1)...(19): siRNA sense strand
acuagaagcuuuacaacuu

SEQ ID NO: 721209 - RNA, 19 nt, Homo sapiens
  misc_RNA (1)...(19): siRNA sense strand
aaagagagugagacaauua

SEQ ID NO: 721210 - RNA, 19 nt, Homo sapiens
  misc_RNA (1)...(19): siRNA sense strand
cgaaugacagggccuauaa

SEQ ID NO: 721211 - RNA, 19 nt, Homo sapiens
  misc_RNA (1)...(19): siRNA sense strand
cuagaagcuuuacaacuuu

SEQ ID NO: 721212 - RNA, 19 nt, Homo sapiens
  misc_RNA (1)...(19): siRNA sense strand
cggagaagcuuuacagagu

SEQ ID NO: 721213 - RNA, 19 nt, Homo sapiens
  misc_RNA (1)...(19): siRNA sense strand
ucaccgaucuugaugacaa

SEQ ID NO: 721214 - RNA, 19 nt, Homo sapiens
  misc_RNA (1)...(19): siRNA sense strand
ccuugcagcuccucauaua

SEQ ID NO: 721215 - RNA, 19 nt, Homo sapiens
  misc_RNA (1)...(19): siRNA sense strand
acaaagaauucucaguuca

SEQ ID NO: 721216 - RNA, 19 nt, Homo sapiens
  misc_RNA (1)...(19): siRNA sense strand
ggagggaggcauucaucua

SEQ ID NO: 721217 - RNA, 19 nt, Homo sapiens
  misc_RNA (1)...(19): siRNA sense strand
gcccuuaucccaagucauu

SEQ ID NO: 721218 - RNA, 19 nt, Homo sapiens
  misc_RNA (1)...(19): siRNA sense strand
agacaaagaauucucaguu

SEQ ID NO: 721219 - RNA, 19 nt, Homo sapiens
  misc_RNA (1)...(19): siRNA sense strand
gacagggccuauaaacuca

SEQ ID NO: 721220 - RNA, 19 nt, Homo sapiens
  misc_RNA (1)...(19): siRNA sense strand
caagaggucacugggaaua

SEQ ID NO: 721221 - RNA, 19 nt, Homo sapiens
  misc_RNA (1)...(19): siRNA sense strand
gacccaaccugcugcacaa

SEQ ID NO: 721222 - RNA, 19 nt, Homo sapiens
  misc_RNA (1)...(19): siRNA sense strand
aaacuggauucacuaggaa

SEQ ID NO: 721223 - RNA, 19 nt, Homo sapiens
  misc_RNA (1)...(19): siRNA sense strand
ggaauuugaccgugggauu

SEQ ID NO: 721224 - RNA, 19 nt, Homo sapiens
  misc_RNA (1)...(19): siRNA sense strand
gaucaccauucccaaagau

SEQ ID NO: 721225 - RNA, 19 nt, Homo sapiens
  misc_RNA (1)...(19): siRNA sense strand
gcagagggacgagcagaaa

SEQ ID NO: 721226 - RNA, 19 nt, Homo sapiens
  misc_RNA (1)...(19): siRNA sense strand
ggaauaaaaugacaucucu

SEQ ID NO: 721227 - RNA, 19 nt, Homo sapiens
  misc_RNA (1)...(19): siRNA sense strand
uaagaaagaaacuggauuc

SEQ ID NO: 721228 - RNA, 19 nt, Homo sapiens
  misc_RNA (1)...(19): siRNA sense strand
gaauuugaccgugggauug

SEQ ID NO: 721229 - RNA, 19 nt, Homo sapiens
  misc_RNA (1)...(19): siRNA sense strand
aaagaauucucaguucaga

SEQ ID NO: 721230 - RNA, 19 nt, Homo sapiens
  misc_RNA (1)...(19): siRNA sense strand
aagcagaagucaucagaca

SEQ ID NO: 721231 - RNA, 19 nt, Homo sapiens
  misc_RNA (1)...(19): siRNA sense strand
cagcaaagaugggcaagag

SEQ ID NO: 721232 - RNA, 19 nt, Homo sapiens
  misc_RNA (1)...(19): siRNA sense strand
ugacagggccuauaaacuc

SEQ ID NO: 721233 - RNA, 19 nt, Homo sapiens
  misc_RNA (1)...(19): siRNA sense strand
gaaaggcuucccaaucauc

SEQ ID NO: 721234 - RNA, 19 nt, Homo sapiens
  misc_RNA (1)...(19): siRNA sense strand
ccaugucaguggauucuau

SEQ ID NO: 721235 - RNA, 19 nt, Homo sapiens
  misc_RNA (1)...(19): siRNA sense strand
gaaugacagggccuauaaa

SEQ ID NO: 721236 - RNA, 19 nt, Homo sapiens
  misc_RNA (1)...(19): siRNA sense strand
ggagcacaguguucaugau

SEQ ID NO: 721237 - RNA, 19 nt, Homo sapiens
  misc_RNA (1)...(19): siRNA sense strand
gagcacaguguucaugaug

SEQ ID NO: 721238 - RNA, 19 nt, Homo sapiens
  misc_RNA (1)...(19): siRNA sense strand
ccucagaaacaccgaauga

SEQ ID NO: 721239 - RNA, 19 nt, Homo sapiens
  misc_RNA (1)...(19): siRNA sense strand
agaggucacugggaauaaa

SEQ ID NO: 721240 - RNA, 19 nt, Homo sapiens
  misc_RNA (1)...(19): siRNA sense strand
ugaauccuauuuacagaca

SEQ ID NO: 721241 - RNA, 19 nt, Homo sapiens
  misc_RNA (1)...(19): siRNA sense strand
caaagucaagggaaaguuc

SEQ ID NO: 721242 - RNA, 19 nt, Homo sapiens
  misc_RNA (1)...(19): siRNA sense strand
gaggagagcacggccauca

SEQ ID NO: 721243 - RNA, 19 nt, Homo sapiens
  misc_RNA (1)...(19): siRNA sense strand
ggagagcacggccaucauc

SEQ ID NO: 721244 - RNA, 19 nt, Homo sapiens
  misc_RNA (1)...(19): siRNA sense strand
caaagacaaagaauucauc

SEQ ID NO: 721245 - RNA, 19 nt, Homo sapiens
  misc_RNA (1)...(19): siRNA sense strand
agcaguaacucaucucuca

SEQ ID NO: 721246 - RNA, 19 nt, Homo sapiens
  misc_RNA (1)...(19): siRNA sense strand
aaagaaacuggauucacua

SEQ ID NO: 721247 - RNA, 19 nt, Homo sapiens
  misc_RNA (1)...(19): siRNA sense strand
gcgaaugacagggccuaua

SEQ ID NO: 721248 - RNA, 19 nt, Homo sapiens
  misc_RNA (1)...(19): siRNA sense strand
cugaugucguggacuauuu

SEQ ID NO: 721249 - RNA, 19 nt, Homo sapiens
  misc_RNA (1)...(19): siRNA sense strand
uggcuucccuccucccauu

SEQ ID NO: 721250 - RNA, 19 nt, Homo sapiens
  misc_RNA (1)...(19): siRNA sense strand
ggacaaaagagaaagaaau

SEQ ID NO: 721251 - RNA, 19 nt, Homo sapiens
  misc_RNA (1)...(19): siRNA sense strand
gagauaagaaacucagucu

SEQ ID NO: 721252 - RNA, 19 nt, Homo sapiens
  misc_RNA (1)...(19): siRNA sense strand
cagcucaaccucagaaaca

SEQ ID NO: 721253 - RNA, 19 nt, Homo sapiens
  misc_RNA (1)...(19): siRNA sense strand
ucagaucaccauucccaaa

SEQ ID NO: 721254 - RNA, 19 nt, Homo sapiens
  misc_RNA (1)...(19): siRNA sense strand
cguggacuauuuacucaga

SEQ ID NO: 721255 - RNA, 19 nt, Homo sapiens
  misc_RNA (1)...(19): siRNA sense strand
ucagaaacaccgaaugagu

SEQ ID NO: 721256 - RNA, 19 nt, Homo sapiens
  misc_RNA (1)...(19): siRNA sense strand
ugaugucguggacuauuua

SEQ ID NO: 721257 - RNA, 19 nt, Homo sapiens
  misc_RNA (1)...(19): siRNA sense strand
ggaggaggagcacaguguu

SEQ ID NO: 721258 - RNA, 19 nt, Homo sapiens
  misc_RNA (1)...(19): siRNA sense strand
gagggaggcauucaucuac

SEQ ID NO: 721259 - RNA, 19 nt, Homo sapiens
  misc_RNA (1)...(19): siRNA sense strand
gaggaggggugccauguca

SEQ ID NO: 721260 - RNA, 19 nt, Homo sapiens
  misc_RNA (1)...(19): siRNA sense strand
uaaacuuagccaccauauu

SEQ ID NO: 721261 - RNA, 19 nt, Homo sapiens
  misc_RNA (1)...(19): siRNA sense strand
uagaagcuuuacaacuuuc

SEQ ID NO: 721262 - RNA, 19 nt, Homo sapiens
  misc_RNA (1)...(19): siRNA sense strand
gcaagaggucacugggaau

SEQ ID NO: 721263 - RNA, 19 nt, Homo sapiens
  misc_RNA (1)...(19): siRNA sense strand
ggacuauuuacucagaaga

SEQ ID NO: 721264 - RNA, 19 nt, Homo sapiens
  misc_RNA (1)...(19): siRNA sense strand
cugaucagccuguuagaga

SEQ ID NO: 721265 - RNA, 19 nt, Homo sapiens
  misc_RNA (1)...(19): siRNA sense strand
gagacaauuacgugaggaa

SEQ ID NO: 721266 - RNA, 19 nt, Homo sapiens
  misc_RNA (1)...(19): siRNA sense strand
caaagaauucucaguucag

SEQ ID NO: 721267 - RNA, 19 nt, Homo sapiens
  misc_RNA (1)...(19): siRNA sense strand
acaagcagaagucaucaga

SEQ ID NO: 721268 - RNA, 19 nt, Homo sapiens
  misc_RNA (1)...(19): siRNA sense strand
agaaacaccgaaugaguca

SEQ ID NO: 721269 - RNA, 19 nt, Homo sapiens
  misc_RNA (1)...(19): siRNA sense strand
agaaaggcuucccaaucau

SEQ ID NO: 721270 - RNA, 19 nt, Homo sapiens
  misc_RNA (1)...(19): siRNA sense strand
gucguggacuauuuacuca

SEQ ID NO: 721271 - RNA, 19 nt, Homo sapiens
  misc_RNA (1)...(19): siRNA sense strand
gcacaagcagaagucauca

SEQ ID NO: 721272 - RNA, 19 nt, Homo sapiens
  misc_RNA (1)...(19): siRNA sense strand
gaggagcacaguguucaug

SEQ ID NO: 721273 - RNA, 19 nt, Homo sapiens
  misc_RNA (1)...(19): siRNA sense strand
gaggaggagcacaguguuc

SEQ ID NO: 721274 - RNA, 19 nt, Homo sapiens
  misc_RNA (1)...(19): siRNA sense strand
ggaggcauucaucuacaga

SEQ ID NO: 721275 - RNA, 19 nt, Homo sapiens
  misc_RNA (1)...(19): siRNA sense strand
gacuauuuacucagaagaa

SEQ ID NO: 721276 - RNA, 19 nt, Homo sapiens
  misc_RNA (1)...(19): siRNA sense strand
aggaacagcugggcaccuu

SEQ ID NO: 721277 - RNA, 19 nt, Homo sapiens
  misc_RNA (1)...(19): siRNA sense strand
gcugucagaucaccauucc

SEQ ID NO: 721278 - RNA, 19 nt, Homo sapiens
  misc_RNA (1)...(19): siRNA sense strand
agagaccgauccugauguc

SEQ ID NO: 721279 - RNA, 19 nt, Homo sapiens
  misc_RNA (1)...(19): siRNA sense strand
cagcuuucaucaacacucu

SEQ ID NO: 721280 - RNA, 19 nt, Homo sapiens
  misc_RNA (1)...(19): siRNA sense strand
agaucaccauucccaaaga

SEQ ID NO: 721281 - RNA, 19 nt, Homo sapiens
  misc_RNA (1)...(19): siRNA sense strand
gucaucagacaaagaauuc

SEQ ID NO: 721282 - RNA, 19 nt, Homo sapiens
  misc_RNA (1)...(19): siRNA sense strand
gcucggagaagcuuuacag

SEQ ID NO: 721283 - RNA, 19 nt, Homo sapiens
  misc_RNA (1)...(19): siRNA sense strand
gggaggcauucaucuacag

SEQ ID NO: 721284 - RNA, 19 nt, Homo sapiens
  misc_RNA (1)...(19): siRNA sense strand
caccuugcagcuccucaua

SEQ ID NO: 721285 - RNA, 19 nt, Homo sapiens
  misc_RNA (1)...(19): siRNA sense strand
uggauucuaucaccgaucu

SEQ ID NO: 721286 - RNA, 19 nt, Homo sapiens
  misc_RNA (1)...(19): siRNA sense strand
gaaugcccuuaucccaagu

SEQ ID NO: 721287 - RNA, 19 nt, Homo sapiens
  misc_RNA (1)...(19): siRNA sense strand
uuagagaccgauccugaug

SEQ ID NO: 721288 - RNA, 19 nt, Homo sapiens
  misc_RNA (1)...(19): siRNA sense strand
agaauucucaguucagagu

SEQ ID NO: 721289 - RNA, 19 nt, Homo sapiens
  misc_RNA (1)...(19): siRNA sense strand
aaaagagagugagacaauu

SEQ ID NO: 721290 - RNA, 19 nt, Homo sapiens
  misc_RNA (1)...(19): siRNA sense strand
uggauucacuaggaaagga

SEQ ID NO: 721291 - RNA, 19 nt, Homo sapiens
  misc_RNA (1)...(19): siRNA sense strand
gauucuaucaccgaucuug

SEQ ID NO: 721292 - RNA, 19 nt, Homo sapiens
  misc_RNA (1)...(19): siRNA sense strand
aacauggccuccagacagu

SEQ ID NO: 721293 - RNA, 19 nt, Homo sapiens
  misc_RNA (1)...(19): siRNA sense strand
caucuacagacuccaacaa

SEQ ID NO: 721294 - RNA, 19 nt, Homo sapiens
  misc_RNA (1)...(19): siRNA sense strand
agagggacgagcagaaaga

SEQ ID NO: 721295 - RNA, 19 nt, Homo sapiens
  misc_RNA (1)...(19): siRNA sense strand
cagaagucaucagacaaag

SEQ ID NO: 721296 - RNA, 19 nt, Homo sapiens
  misc_RNA (1)...(19): siRNA sense strand
ugacaacaucagcaaagau

SEQ ID NO: 721297 - RNA, 19 nt, Homo sapiens
  misc_RNA (1)...(19): siRNA sense strand
acacagcuuucaucaacac

SEQ ID NO: 721298 - RNA, 19 nt, Homo sapiens
  misc_RNA (1)...(19): siRNA sense strand
gaaagaaacuggauucacu

SEQ ID NO: 721299 - RNA, 19 nt, Homo sapiens
  misc_RNA (1)...(19): siRNA sense strand
gaaacuggauucacuagga

SEQ ID NO: 721300 - RNA, 19 nt, Homo sapiens
  misc_RNA (1)...(19): siRNA sense strand
aaacuuagccaccauauuu

SEQ ID NO: 721301 - RNA, 19 nt, Homo sapiens
  misc_RNA (1)...(19): siRNA sense strand
aaagaacucucaagcagua

SEQ ID NO: 721302 - RNA, 19 nt, Homo sapiens
  misc_RNA (1)...(19): siRNA sense strand
guacacagcuuucaucaac

SEQ ID NO: 721303 - RNA, 19 nt, Homo sapiens
  misc_RNA (1)...(19): siRNA sense strand
aagaaaggcuucccaauca

SEQ ID NO: 721304 - RNA, 19 nt, Homo sapiens
  misc_RNA (1)...(19): siRNA sense strand
caucaucgcuguugugcaa

SEQ ID NO: 721305 - RNA, 19 nt, Homo sapiens
  misc_RNA (1)...(19): siRNA sense strand
gaagucaucagacaaagaa

SEQ ID NO: 721306 - RNA, 19 nt, Homo sapiens
  misc_RNA (1)...(19): siRNA sense strand
gacaaagaauucucaguuc

SEQ ID NO: 721307 - RNA, 19 nt, Homo sapiens
  misc_RNA (1)...(19): siRNA sense strand
gcagaagucaucagacaaa

SEQ ID NO: 721308 - RNA, 19 nt, Homo sapiens
  misc_RNA (1)...(19): siRNA sense strand
acuagaagcuuuacaacuu

SEQ ID NO: 721309 - RNA, 19 nt, Homo sapiens
  misc_RNA (1)...(19): siRNA sense strand
aaagagagugagacaauua

SEQ ID NO: 721310 - RNA, 19 nt, Homo sapiens
  misc_RNA (1)...(19): siRNA sense strand
cgaaugacagggccuauaa

SEQ ID NO: 721311 - RNA, 19 nt, Homo sapiens
  misc_RNA (1)...(19): siRNA sense strand
cuagaagcuuuacaacuuu

SEQ ID NO: 721312 - RNA, 19 nt, Homo sapiens
  misc_RNA (1)...(19): siRNA sense strand
cggagaagcuuuacagagu

SEQ ID NO: 721313 - RNA, 19 nt, Homo sapiens
  misc_RNA (1)...(19): siRNA sense strand
ucaccgaucuugaugacaa

SEQ ID NO: 721314 - RNA, 19 nt, Homo sapiens
  misc_RNA (1)...(19): siRNA sense strand
ccuugcagcuccucauaua

SEQ ID NO: 721315 - RNA, 19 nt, Homo sapiens
  misc_RNA (1)...(19): siRNA sense strand
acaaagaauucucaguuca

SEQ ID NO: 721316 - RNA, 19 nt, Homo sapiens
  misc_RNA (1)...(19): siRNA sense strand
ggagggaggcauucaucua

SEQ ID NO: 721317 - RNA, 19 nt, Homo sapiens
  misc_RNA (1)...(19): siRNA sense strand
gcccuuaucccaagucauu

SEQ ID NO: 721318 - RNA, 19 nt, Homo sapiens
  misc_RNA (1)...(19): siRNA sense strand
agacaaagaauucucaguu

SEQ ID NO: 721319 - RNA, 19 nt, Homo sapiens
  misc_RNA (1)...(19): siRNA sense strand
gacagggccuauaaacuca

SEQ ID NO: 721320 - RNA, 19 nt, Homo sapiens
  misc_RNA (1)...(19): siRNA sense strand
caagaggucacugggaaua

SEQ ID NO: 721321 - RNA, 19 nt, Homo sapiens
  misc_RNA (1)...(19): siRNA sense strand
gacccaaccugcugcacaa

SEQ ID NO: 721322 - RNA, 19 nt, Homo sapiens
  misc_RNA (1)...(19): siRNA sense strand
aaacuggauucacuaggaa

SEQ ID NO: 721323 - RNA, 19 nt, Homo sapiens
  misc_RNA (1)...(19): siRNA sense strand
ggaauuugaccgugggauu

SEQ ID NO: 721324 - RNA, 19 nt, Homo sapiens
  misc_RNA (1)...(19): siRNA sense strand
gaucaccauucccaaagau

SEQ ID NO: 721325 - RNA, 19 nt, Homo sapiens
  misc_RNA (1)...(19): siRNA sense strand
gcagagggacgagcagaaa

SEQ ID NO: 721326 - RNA, 19 nt, Homo sapiens
  misc_RNA (1)...(19): siRNA sense strand
ggaauaaaaugacaucucu

SEQ ID NO: 721327 - RNA, 19 nt, Homo sapiens
  misc_RNA (1)...(19): siRNA sense strand
uaagaaagaaacuggauuc

SEQ ID NO: 721328 - RNA, 19 nt, Homo sapiens
  misc_RNA (1)...(19): siRNA sense strand
gaauuugaccgugggauug

SEQ ID NO: 721329 - RNA, 19 nt, Homo sapiens
  misc_RNA (1)...(19): siRNA sense strand
aaagaauucucaguucaga

SEQ ID NO: 721330 - RNA, 19 nt, Homo sapiens
  misc_RNA (1)...(19): siRNA sense strand
aagcagaagucaucagaca

SEQ ID NO: 721331 - RNA, 19 nt, Homo sapiens
  misc_RNA (1)...(19): siRNA sense strand
cagcaaagaugggcaagag

SEQ ID NO: 721332 - RNA, 19 nt, Homo sapiens
  misc_RNA (1)...(19): siRNA sense strand
ugacagggccuauaaacuc

SEQ ID NO: 721333 - RNA, 19 nt, Homo sapiens
  misc_RNA (1)...(19): siRNA sense strand
gaaaggcuucccaaucauc

SEQ ID NO: 721334 - RNA, 19 nt, Homo sapiens
  misc_RNA (1)...(19): siRNA sense strand
ccaugucaguggauucuau

SEQ ID NO: 721335 - RNA, 19 nt, Homo sapiens
  misc_RNA (1)...(19): siRNA sense strand
gaaugacagggccuauaaa

SEQ ID NO: 721336 - RNA, 19 nt, Homo sapiens
  misc_RNA (1)...(19): siRNA sense strand
ggagcacaguguucaugau

SEQ ID NO: 721337 - RNA, 19 nt, Homo sapiens
  misc_RNA (1)...(19): siRNA sense strand
gagcacaguguucaugaug

SEQ ID NO: 721338 - RNA, 19 nt, Homo sapiens
  misc_RNA (1)...(19): siRNA sense strand
ccucagaaacaccgaauga

SEQ ID NO: 721339 - RNA, 19 nt, Homo sapiens
  misc_RNA (1)...(19): siRNA sense strand
agaggucacugggaauaaa

SEQ ID NO: 721340 - RNA, 19 nt, Homo sapiens
  misc_RNA (1)...(19): siRNA sense strand
ugaauccuauuuacagaca

SEQ ID NO: 721341 - RNA, 19 nt, Homo sapiens
  misc_RNA (1)...(19): siRNA sense strand
caaagucaagggaaaguuc

SEQ ID NO: 721342 - RNA, 19 nt, Homo sapiens
  misc_RNA (1)...(19): siRNA sense strand
gaggagagcacggccauca

SEQ ID NO: 721343 - RNA, 19 nt, Homo sapiens
  misc_RNA (1)...(19): siRNA sense strand
ggagagcacggccaucauc

SEQ ID NO: 721344 - RNA, 19 nt, Homo sapiens
  misc_RNA (1)...(19): siRNA sense strand
agcaguaacucaucucuca

SEQ ID NO: 721345 - RNA, 19 nt, Homo sapiens
  misc_RNA (1)...(19): siRNA sense strand
caaagacaaagaauucauc

SEQ ID NO: 721346 - RNA, 19 nt, Homo sapiens
  misc_RNA (1)...(19): siRNA sense strand
aaagaaacuggauucacua

SEQ ID NO: 721347 - RNA, 19 nt, Homo sapiens
  misc_RNA (1)...(19): siRNA sense strand
gcgaaugacagggccuaua

SEQ ID NO: 721348 - RNA, 19 nt, Homo sapiens
  misc_RNA (1)...(19): siRNA sense strand
cugaugucguggacuauuu

SEQ ID NO: 721349 - RNA, 19 nt, Homo sapiens
  misc_RNA (1)...(19): siRNA sense strand
uggcuucccuccucccauu

SEQ ID NO: 721350 - RNA, 19 nt, Homo sapiens
  misc_RNA (1)...(19): siRNA sense strand
ggacaaaagagaaagaaau

SEQ ID NO: 721351 - RNA, 19 nt, Homo sapiens
  misc_RNA (1)...(19): siRNA sense strand
gagauaagaaacucagucu

SEQ ID NO: 721352 - RNA, 19 nt, Homo sapiens
  misc_RNA (1)...(19): siRNA sense strand
cagcucaaccucagaaaca

SEQ ID NO: 721353 - RNA, 19 nt, Homo sapiens
  misc_RNA (1)...(19): siRNA sense strand
ucagaucaccauucccaaa

SEQ ID NO: 721354 - RNA, 19 nt, Homo sapiens
  misc_RNA (1)...(19): siRNA sense strand
cguggacuauuuacucaga

SEQ ID NO: 721355 - RNA, 19 nt, Homo sapiens
  misc_RNA (1)...(19): siRNA sense strand
ucagaaacaccgaaugagu

SEQ ID NO: 721356 - RNA, 19 nt, Homo sapiens
  misc_RNA (1)...(19): siRNA sense strand
ugaugucguggacuauuua

SEQ ID NO: 721357 - RNA, 19 nt, Homo sapiens
  misc_RNA (1)...(19): siRNA sense strand
ggaggaggagcacaguguu

SEQ ID NO: 721358 - RNA, 19 nt, Homo sapiens
  misc_RNA (1)...(19): siRNA sense strand
gagggaggcauucaucuac

SEQ ID NO: 721359 - RNA, 19 nt, Homo sapiens
  misc_RNA (1)...(19): siRNA sense strand
gaggaggggugccauguca

SEQ ID NO: 721360 - RNA, 19 nt, Homo sapiens
  misc_RNA (1)...(19): siRNA sense strand
uaaacuuagccaccauauu

SEQ ID NO: 721361 - RNA, 19 nt, Homo sapiens
  misc_RNA (1)...(19): siRNA sense strand
uagaagcuuuacaacuuuc

SEQ ID NO: 721362 - RNA, 19 nt, Homo sapiens
  misc_RNA (1)...(19): siRNA sense strand
gcaagaggucacugggaau

SEQ ID NO: 721363 - RNA, 19 nt, Homo sapiens
  misc_RNA (1)...(19): siRNA sense strand
ggacuauuuacucagaaga

SEQ ID NO: 721364 - RNA, 19 nt, Homo sapiens
  misc_RNA (1)...(19): siRNA sense strand
cugaucagccuguuagaga

SEQ ID NO: 721365 - RNA, 19 nt, Homo sapiens
  misc_RNA (1)...(19): siRNA sense strand
gagacaauuacgugaggaa

SEQ ID NO: 721366 - RNA, 19 nt, Homo sapiens
  misc_RNA (1)...(19): siRNA sense strand
caaagaauucucaguucag

SEQ ID NO: 721367 - RNA, 19 nt, Homo sapiens
  misc_RNA (1)...(19): siRNA sense strand
acaagcagaagucaucaga

SEQ ID NO: 721368 - RNA, 19 nt, Homo sapiens
  misc_RNA (1)...(19): siRNA sense strand
agaaacaccgaaugaguca

SEQ ID NO: 721369 - RNA, 19 nt, Homo sapiens
  misc_RNA (1)...(19): siRNA sense strand
agaaaggcuucccaaucau

SEQ ID NO: 721370 - RNA, 19 nt, Homo sapiens
  misc_RNA (1)...(19): siRNA sense strand
gucguggacuauuuacuca

SEQ ID NO: 721371 - RNA, 19 nt, Homo sapiens
  misc_RNA (1)...(19): siRNA sense strand
gcacaagcagaagucauca

SEQ ID NO: 721372 - RNA, 19 nt, Homo sapiens
  misc_RNA (1)...(19): siRNA sense strand
gaggagcacaguguucaug

SEQ ID NO: 721373 - RNA, 19 nt, Homo sapiens
  misc_RNA (1)...(19): siRNA sense strand
gaggaggagcacaguguuc

SEQ ID NO: 721374 - RNA, 19 nt, Homo sapiens
  misc_RNA (1)...(19): siRNA sense strand
ggaggcauucaucuacaga

SEQ ID NO: 721375 - RNA, 19 nt, Homo sapiens
  misc_RNA (1)...(19): siRNA sense strand
gacuauuuacucagaagaa

SEQ ID NO: 721376 - RNA, 19 nt, Homo sapiens
  misc_RNA (1)...(19): siRNA sense strand
aggaacagcugggcaccuu

SEQ ID NO: 721377 - RNA, 19 nt, Homo sapiens
  misc_RNA (1)...(19): siRNA sense strand
cagcuuucaucaacacucu

SEQ ID NO: 721378 - RNA, 19 nt, Homo sapiens
  misc_RNA (1)...(19): siRNA sense strand
agagaccgauccugauguc

SEQ ID NO: 721379 - RNA, 19 nt, Homo sapiens
  misc_RNA (1)...(19): siRNA sense strand
gcugucagaucaccauucc

SEQ ID NO: 721380 - RNA, 19 nt, Homo sapiens
  misc_RNA (1)...(19): siRNA sense strand
agaucaccauucccaaaga

SEQ ID NO: 721381 - RNA, 19 nt, Homo sapiens
  misc_RNA (1)...(19): siRNA sense strand
gucaucagacaaagaauuc

SEQ ID NO: 721382 - RNA, 19 nt, Homo sapiens
  misc_RNA (1)...(19): siRNA sense strand
gcucggagaagcuuuacag

SEQ ID NO: 721383 - RNA, 19 nt, Homo sapiens
  misc_RNA (1)...(19): siRNA sense strand
gggaggcauucaucuacag

SEQ ID NO: 721384 - RNA, 19 nt, Homo sapiens
  misc_RNA (1)...(19): siRNA sense strand
caccuugcagcuccucaua

SEQ ID NO: 721385 - RNA, 19 nt, Homo sapiens
  misc_RNA (1)...(19): siRNA sense strand
uggauucuaucaccgaucu

SEQ ID NO: 721386 - RNA, 19 nt, Homo sapiens
  misc_RNA (1)...(19): siRNA sense strand
uuagagaccgauccugaug

SEQ ID NO: 721387 - RNA, 19 nt, Homo sapiens
  misc_RNA (1)...(19): siRNA sense strand
agaauucucaguucagagu

SEQ ID NO: 721388 - RNA, 19 nt, Homo sapiens
  misc_RNA (1)...(19): siRNA sense strand
uggauucacuaggaaagga

SEQ ID NO: 721389 - RNA, 19 nt, Homo sapiens
  misc_RNA (1)...(19): siRNA sense strand
gaaugcccuuaucccaagu

SEQ ID NO: 721390 - RNA, 19 nt, Homo sapiens
  misc_RNA (1)...(19): siRNA sense strand
aaaagagagugagacaauu

SEQ ID NO: 721391 - RNA, 19 nt, Homo sapiens
  misc_RNA (1)...(19): siRNA sense strand
gauucuaucaccgaucuug

SEQ ID NO: 721392 - RNA, 19 nt, Homo sapiens
  misc_RNA (1)...(19): siRNA sense strand
agagggacgagcagaaaga

SEQ ID NO: 721393 - RNA, 19 nt, Homo sapiens
  misc_RNA (1)...(19): siRNA sense strand
caucuacagacuccaacaa

SEQ ID NO: 721394 - RNA, 19 nt, Homo sapiens
  misc_RNA (1)...(19): siRNA sense strand
cagaagucaucagacaaag

SEQ ID NO: 721395 - RNA, 19 nt, Homo sapiens
  misc_RNA (1)...(19): siRNA sense strand
ugacaacaucagcaaagau

SEQ ID NO: 721396 - RNA, 19 nt, Homo sapiens
  misc_RNA (1)...(19): siRNA sense strand
acacagcuuucaucaacac

SEQ ID NO: 721397 - RNA, 19 nt, Homo sapiens
  misc_RNA (1)...(19): siRNA sense strand
aacauggccuccagacagu

SEQ ID NO: 721398 - RNA, 19 nt, Homo sapiens
  misc_RNA (1)...(19): siRNA sense strand
gaaagaaacuggauucacu

SEQ ID NO: 721399 - RNA, 19 nt, Homo sapiens
  misc_RNA (1)...(19): siRNA sense strand
gaaacuggauucacuagga

SEQ ID NO: 721400 - RNA, 19 nt, Homo sapiens
  misc_RNA (1)...(19): siRNA sense strand
aaacuuagccaccauauuu

SEQ ID NO: 721401 - RNA, 19 nt, Homo sapiens
  misc_RNA (1)...(19): siRNA sense strand
aaagaacucucaagcagua

SEQ ID NO: 721402 - RNA, 19 nt, Homo sapiens
  misc_RNA (1)...(19): siRNA sense strand
guacacagcuuucaucaac

SEQ ID NO: 721403 - RNA, 19 nt, Homo sapiens
  misc_RNA (1)...(19): siRNA sense strand
aagaaaggcuucccaauca

SEQ ID NO: 721404 - RNA, 19 nt, Homo sapiens
  misc_RNA (1)...(19): siRNA sense strand
caucaucgcuguugugcaa

SEQ ID NO: 721405 - RNA, 19 nt, Homo sapiens
  misc_RNA (1)...(19): siRNA sense strand
gaagucaucagacaaagaa

SEQ ID NO: 721406 - RNA, 19 nt, Homo sapiens
  misc_RNA (1)...(19): siRNA sense strand
gacaaagaauucucaguuc

SEQ ID NO: 721407 - RNA, 19 nt, Homo sapiens
  misc_RNA (1)...(19): siRNA sense strand
gcagaagucaucagacaaa

SEQ ID NO: 721408 - RNA, 19 nt, Homo sapiens
  misc_RNA (1)...(19): siRNA sense strand
acuagaagcuuuacaacuu

SEQ ID NO: 721409 - RNA, 19 nt, Homo sapiens
  misc_RNA (1)...(19): siRNA sense strand
aaagagagugagacaauua

SEQ ID NO: 721410 - RNA, 19 nt, Homo sapiens
  misc_RNA (1)...(19): siRNA sense strand
cgaaugacagggccuauaa

SEQ ID NO: 721411 - RNA, 19 nt, Homo sapiens
  misc_RNA (1)...(19): siRNA sense strand
cuagaagcuuuacaacuuu

SEQ ID NO: 721412 - RNA, 19 nt, Homo sapiens
  misc_RNA (1)...(19): siRNA sense strand
cggagaagcuuuacagagu

SEQ ID NO: 721413 - RNA, 19 nt, Homo sapiens
  misc_RNA (1)...(19): siRNA sense strand
ucaccgaucuugaugacaa

SEQ ID NO: 721414 - RNA, 19 nt, Homo sapiens
  misc_RNA (1)...(19): siRNA sense strand
ccuugcagcuccucauaua

SEQ ID NO: 721415 - RNA, 19 nt, Homo sapiens
  misc_RNA (1)...(19): siRNA sense strand
acaaagaauucucaguuca

SEQ ID NO: 721416 - RNA, 19 nt, Homo sapiens
  misc_RNA (1)...(19): siRNA sense strand
ggagggaggcauucaucua

SEQ ID NO: 721417 - RNA, 19 nt, Homo sapiens
  misc_RNA (1)...(19): siRNA sense strand
gcccuuaucccaagucauu

SEQ ID NO: 721418 - RNA, 19 nt, Homo sapiens
  misc_RNA (1)...(19): siRNA sense strand
agacaaagaauucucaguu

SEQ ID NO: 721419 - RNA, 19 nt, Homo sapiens
  misc_RNA (1)...(19): siRNA sense strand
gacagggccuauaaacuca

SEQ ID NO: 721420 - RNA, 19 nt, Homo sapiens
  misc_RNA (1)...(19): siRNA sense strand
caagaggucacugggaaua

SEQ ID NO: 721421 - RNA, 19 nt, Homo sapiens
  misc_RNA (1)...(19): siRNA sense strand
gacccaaccugcugcacaa

SEQ ID NO: 721422 - RNA, 19 nt, Homo sapiens
  misc_RNA (1)...(19): siRNA sense strand
aaacuggauucacuaggaa

SEQ ID NO: 721423 - RNA, 19 nt, Homo sapiens
  misc_RNA (1)...(19): siRNA sense strand
ggaauuugaccgugggauu

SEQ ID NO: 721424 - RNA, 19 nt, Homo sapiens
  misc_RNA (1)...(19): siRNA sense strand
gaucaccauucccaaagau

SEQ ID NO: 721425 - RNA, 19 nt, Homo sapiens
  misc_RNA (1)...(19): siRNA sense strand
gcagagggacgagcagaaa

SEQ ID NO: 721426 - RNA, 19 nt, Homo sapiens
  misc_RNA (1)...(19): siRNA sense strand
ggaauaaaaugacaucucu

SEQ ID NO: 721427 - RNA, 19 nt, Homo sapiens
  misc_RNA (1)...(19): siRNA sense strand
uaagaaagaaacuggauuc

SEQ ID NO: 721428 - RNA, 19 nt, Homo sapiens
  misc_RNA (1)...(19): siRNA sense strand
gaauuugaccgugggauug

SEQ ID NO: 721429 - RNA, 19 nt, Homo sapiens
  misc_RNA (1)...(19): siRNA sense strand
aaagaauucucaguucaga

SEQ ID NO: 721430 - RNA, 19 nt, Homo sapiens
  misc_RNA (1)...(19): siRNA sense strand
aagcagaagucaucagaca

SEQ ID NO: 721431 - RNA, 19 nt, Homo sapiens
  misc_RNA (1)...(19): siRNA sense strand
cagcaaagaugggcaagag

SEQ ID NO: 721432 - RNA, 19 nt, Homo sapiens
  misc_RNA (1)...(19): siRNA sense strand
ugacagggccuauaaacuc

SEQ ID NO: 721433 - RNA, 19 nt, Homo sapiens
  misc_RNA (1)...(19): siRNA sense strand
gaaaggcuucccaaucauc

SEQ ID NO: 721434 - RNA, 19 nt, Homo sapiens
  misc_RNA (1)...(19): siRNA sense strand
ccaugucaguggauucuau

SEQ ID NO: 721435 - RNA, 19 nt, Homo sapiens
  misc_RNA (1)...(19): siRNA sense strand
gaaugacagggccuauaaa

SEQ ID NO: 721436 - RNA, 19 nt, Homo sapiens
  misc_RNA (1)...(19): siRNA sense strand
ggagcacaguguucaugau

SEQ ID NO: 721437 - RNA, 19 nt, Homo sapiens
  misc_RNA (1)...(19): siRNA sense strand
gagcacaguguucaugaug

SEQ ID NO: 721438 - RNA, 19 nt, Homo sapiens
  misc_RNA (1)...(19): siRNA sense strand
ccucagaaacaccgaauga

SEQ ID NO: 721439 - RNA, 19 nt, Homo sapiens
  misc_RNA (1)...(19): siRNA sense strand
agaggucacugggaauaaa

SEQ ID NO: 721440 - RNA, 19 nt, Homo sapiens
  misc_RNA (1)...(19): siRNA sense strand
ugaauccuauuuacagaca

SEQ ID NO: 721441 - RNA, 19 nt, Homo sapiens
  misc_RNA (1)...(19): siRNA sense strand
caaagucaagggaaaguuc

SEQ ID NO: 721442 - RNA, 19 nt, Homo sapiens
  misc_RNA (1)...(19): siRNA sense strand
gaggagagcacggccauca

SEQ ID NO: 721443 - RNA, 19 nt, Homo sapiens
  misc_RNA (1)...(19): siRNA sense strand
ggagagcacggccaucauc

SEQ ID NO: 721444 - RNA, 19 nt, Homo sapiens
  misc_RNA (1)...(19): siRNA sense strand
agcaguaacucaucucuca

SEQ ID NO: 721445 - RNA, 19 nt, Homo sapiens
  misc_RNA (1)...(19): siRNA sense strand
caaagacaaagaauucauc

SEQ ID NO: 721446 - RNA, 19 nt, Homo sapiens
  misc_RNA (1)...(19): siRNA sense strand
aaagaaacuggauucacua

SEQ ID NO: 721447 - RNA, 19 nt, Homo sapiens
  misc_RNA (1)...(19): siRNA sense strand
gcgaaugacagggccuaua

SEQ ID NO: 721448 - RNA, 19 nt, Homo sapiens
  misc_RNA (1)...(19): siRNA sense strand
cugaugucguggacuauuu

SEQ ID NO: 721449 - RNA, 19 nt, Homo sapiens
  misc_RNA (1)...(19): siRNA sense strand
uggcuucccuccucccauu

SEQ ID NO: 721450 - RNA, 19 nt, Homo sapiens
  misc_RNA (1)...(19): siRNA sense strand
ggacaaaagagaaagaaau

SEQ ID NO: 721451 - RNA, 19 nt, Homo sapiens
  misc_RNA (1)...(19): siRNA sense strand
gagauaagaaacucagucu

SEQ ID NO: 721452 - RNA, 19 nt, Homo sapiens
  misc_RNA (1)...(19): siRNA sense strand
cagcucaaccucagaaaca

SEQ ID NO: 721453 - RNA, 19 nt, Homo sapiens
  misc_RNA (1)...(19): siRNA sense strand
ucagaucaccauucccaaa

SEQ ID NO: 721454 - RNA, 19 nt, Homo sapiens
  misc_RNA (1)...(19): siRNA sense strand
cguggacuauuuacucaga

SEQ ID NO: 721455 - RNA, 19 nt, Homo sapiens
  misc_RNA (1)...(19): siRNA sense strand
ucagaaacaccgaaugagu

SEQ ID NO: 721456 - RNA, 19 nt, Homo sapiens
  misc_RNA (1)...(19): siRNA sense strand
ugaugucguggacuauuua

SEQ ID NO: 721457 - RNA, 19 nt, Homo sapiens
  misc_RNA (1)...(19): siRNA sense strand
ggaggaggagcacaguguu

SEQ ID NO: 721458 - RNA, 19 nt, Homo sapiens
  misc_RNA (1)...(19): siRNA sense strand
gagggaggcauucaucuac

SEQ ID NO: 721459 - RNA, 19 nt, Homo sapiens
  misc_RNA (1)...(19): siRNA sense strand
gaggaggggugccauguca

SEQ ID NO: 721460 - RNA, 19 nt, Homo sapiens
  misc_RNA (1)...(19): siRNA sense strand
uaaacuuagccaccauauu

SEQ ID NO: 721461 - RNA, 19 nt, Homo sapiens
  misc_RNA (1)...(19): siRNA sense strand
uagaagcuuuacaacuuuc

SEQ ID NO: 721462 - RNA, 19 nt, Homo sapiens
  misc_RNA (1)...(19): siRNA sense strand
gcaagaggucacugggaau

SEQ ID NO: 721463 - RNA, 19 nt, Homo sapiens
  misc_RNA (1)...(19): siRNA sense strand
ggacuauuuacucagaaga

SEQ ID NO: 721464 - RNA, 19 nt, Homo sapiens
  misc_RNA (1)...(19): siRNA sense strand
cugaucagccuguuagaga

SEQ ID NO: 721465 - RNA, 19 nt, Homo sapiens
  misc_RNA (1)...(19): siRNA sense strand
gagacaauuacgugaggaa

SEQ ID NO: 721466 - RNA, 19 nt, Homo sapiens
  misc_RNA (1)...(19): siRNA sense strand
caaagaauucucaguucag

SEQ ID NO: 721467 - RNA, 19 nt, Homo sapiens
  misc_RNA (1)...(19): siRNA sense strand
acaagcagaagucaucaga

SEQ ID NO: 721468 - RNA, 19 nt, Homo sapiens
  misc_RNA (1)...(19): siRNA sense strand
agaaacaccgaaugaguca

SEQ ID NO: 721469 - RNA, 19 nt, Homo sapiens
  misc_RNA (1)...(19): siRNA sense strand
agaaaggcuucccaaucau

SEQ ID NO: 721470 - RNA, 19 nt, Homo sapiens
  misc_RNA (1)...(19): siRNA sense strand
gucguggacuauuuacuca

SEQ ID NO: 721471 - RNA, 19 nt, Homo sapiens
  misc_RNA (1)...(19): siRNA sense strand
gcacaagcagaagucauca

SEQ ID NO: 721472 - RNA, 19 nt, Homo sapiens
  misc_RNA (1)...(19): siRNA sense strand
gaggagcacaguguucaug

SEQ ID NO: 721473 - RNA, 19 nt, Homo sapiens
  misc_RNA (1)...(19): siRNA sense strand
gaggaggagcacaguguuc

SEQ ID NO: 721474 - RNA, 19 nt, Homo sapiens
  misc_RNA (1)...(19): siRNA sense strand
ggaggcauucaucuacaga

SEQ ID NO: 721475 - RNA, 19 nt, Homo sapiens
  misc_RNA (1)...(19): siRNA sense strand
gacuauuuacucagaagaa

SEQ ID NO: 721476 - RNA, 19 nt, Homo sapiens
  misc_RNA (1)...(19): siRNA sense strand
aggaacagcugggcaccuu

SEQ ID NO: 721477 - RNA, 19 nt, Homo sapiens
  misc_RNA (1)...(19): siRNA sense strand
cagcuuucaucaacacucu

SEQ ID NO: 721478 - RNA, 19 nt, Homo sapiens
  misc_RNA (1)...(19): siRNA sense strand
agagaccgauccugauguc

SEQ ID NO: 721479 - RNA, 19 nt, Homo sapiens
  misc_RNA (1)...(19): siRNA sense strand
gcugucagaucaccauucc

SEQ ID NO: 721480 - RNA, 19 nt, Homo sapiens
  misc_RNA (1)...(19): siRNA sense strand
agaucaccauucccaaaga

SEQ ID NO: 721481 - RNA, 19 nt, Homo sapiens
  misc_RNA (1)...(19): siRNA sense strand
gucaucagacaaagaauuc

SEQ ID NO: 721482 - RNA, 19 nt, Homo sapiens
  misc_RNA (1)...(19): siRNA sense strand
gcucggagaagcuuuacag

SEQ ID NO: 721483 - RNA, 19 nt, Homo sapiens
  misc_RNA (1)...(19): siRNA sense strand
gggaggcauucaucuacag

SEQ ID NO: 721484 - RNA, 19 nt, Homo sapiens
  misc_RNA (1)...(19): siRNA sense strand
caccuugcagcuccucaua

SEQ ID NO: 721485 - RNA, 19 nt, Homo sapiens
  misc_RNA (1)...(19): siRNA sense strand
uggauucuaucaccgaucu

SEQ ID NO: 721486 - RNA, 19 nt, Homo sapiens
  misc_RNA (1)...(19): siRNA sense strand
uuagagaccgauccugaug

SEQ ID NO: 721487 - RNA, 19 nt, Homo sapiens
  misc_RNA (1)...(19): siRNA sense strand
agaauucucaguucagagu

SEQ ID NO: 721488 - RNA, 19 nt, Homo sapiens
  misc_RNA (1)...(19): siRNA sense strand
uggauucacuaggaaagga

SEQ ID NO: 721489 - RNA, 19 nt, Homo sapiens
  misc_RNA (1)...(19): siRNA sense strand
gaaugcccuuaucccaagu

SEQ ID NO: 721490 - RNA, 19 nt, Homo sapiens
  misc_RNA (1)...(19): siRNA sense strand
aaaagagagugagacaauu

SEQ ID NO: 721491 - RNA, 19 nt, Homo sapiens
  misc_RNA (1)...(19): siRNA sense strand
gauucuaucaccgaucuug

SEQ ID NO: 721492 - RNA, 19 nt, Homo sapiens
  misc_RNA (1)...(19): siRNA sense strand
agagggacgagcagaaaga

SEQ ID NO: 721493 - RNA, 19 nt, Homo sapiens
  misc_RNA (1)...(19): siRNA sense strand
caucuacagacuccaacaa

SEQ ID NO: 721494 - RNA, 19 nt, Homo sapiens
  misc_RNA (1)...(19): siRNA sense strand
cagaagucaucagacaaag

SEQ ID NO: 721495 - RNA, 19 nt, Homo sapiens
  misc_RNA (1)...(19): siRNA sense strand
ugacaacaucagcaaagau

SEQ ID NO: 721496 - RNA, 19 nt, Homo sapiens
  misc_RNA (1)...(19): siRNA sense strand
acacagcuuucaucaacac

SEQ ID NO: 721497 - RNA, 19 nt, Homo sapiens
  misc_RNA (1)...(19): siRNA sense strand
aacauggccuccagacagu

SEQ ID NO: 721498 - RNA, 19 nt, Homo sapiens
  misc_RNA (1)...(19): siRNA sense strand
gaaagaaacuggauucacu

SEQ ID NO: 721499 - RNA, 19 nt, Homo sapiens
  misc_RNA (1)...(19): siRNA sense strand
gaaacuggauucacuagga

SEQ ID NO: 721500 - RNA, 19 nt, Homo sapiens
  misc_RNA (1)...(19): siRNA sense strand
aaacuuagccaccauauuu

SEQ ID NO: 721501 - RNA, 19 nt, Homo sapiens
  misc_RNA (1)...(19): siRNA sense strand
aaagaacucucaagcagua

SEQ ID NO: 721502 - RNA, 19 nt, Homo sapiens
  misc_RNA (1)...(19): siRNA sense strand
guacacagcuuucaucaac

SEQ ID NO: 721503 - RNA, 19 nt, Homo sapiens
  misc_RNA (1)...(19): siRNA sense strand
aagaaaggcuucccaauca

SEQ ID NO: 721504 - RNA, 19 nt, Homo sapiens
  misc_RNA (1)...(19): siRNA sense strand
caucaucgcuguugugcaa

SEQ ID NO: 721505 - RNA, 19 nt, Homo sapiens
  misc_RNA (1)...(19): siRNA sense strand
gaagucaucagacaaagaa

SEQ ID NO: 721506 - RNA, 19 nt, Homo sapiens
  misc_RNA (1)...(19): siRNA sense strand
gacaaagaauucucaguuc

SEQ ID NO: 721507 - RNA, 19 nt, Homo sapiens
  misc_RNA (1)...(19): siRNA sense strand
gcagaagucaucagacaaa

SEQ ID NO: 721508 - RNA, 19 nt, Homo sapiens
  misc_RNA (1)...(19): siRNA sense strand
acuagaagcuuuacaacuu

SEQ ID NO: 721509 - RNA, 19 nt, Homo sapiens
  misc_RNA (1)...(19): siRNA sense strand
aaagagagugagacaauua

SEQ ID NO: 721510 - RNA, 19 nt, Homo sapiens
  misc_RNA (1)...(19): siRNA sense strand
cgaaugacagggccuauaa

SEQ ID NO: 721511 - RNA, 19 nt, Homo sapiens
  misc_RNA (1)...(19): siRNA sense strand
cuagaagcuuuacaacuuu

SEQ ID NO: 721512 - RNA, 19 nt, Homo sapiens
  misc_RNA (1)...(19): siRNA sense strand
cggagaagcuuuacagagu

SEQ ID NO: 721513 - RNA, 19 nt, Homo sapiens
  misc_RNA (1)...(19): siRNA sense strand
ucaccgaucuugaugacaa

SEQ ID NO: 721514 - RNA, 19 nt, Homo sapiens
  misc_RNA (1)...(19): siRNA sense strand
ccuugcagcuccucauaua

SEQ ID NO: 721515 - RNA, 19 nt, Homo sapiens
  misc_RNA (1)...(19): siRNA sense strand
acaaagaauucucaguuca

SEQ ID NO: 721516 - RNA, 19 nt, Homo sapiens
  misc_RNA (1)...(19): siRNA sense strand
ggagggaggcauucaucua

SEQ ID NO: 721517 - RNA, 19 nt, Homo sapiens
  misc_RNA (1)...(19): siRNA sense strand
gcccuuaucccaagucauu

SEQ ID NO: 721518 - RNA, 19 nt, Homo sapiens
  misc_RNA (1)...(19): siRNA sense strand
agacaaagaauucucaguu

SEQ ID NO: 721519 - RNA, 19 nt, Homo sapiens
  misc_RNA (1)...(19): siRNA sense strand
gacagggccuauaaacuca

SEQ ID NO: 721520 - RNA, 19 nt, Homo sapiens
  misc_RNA (1)...(19): siRNA sense strand
caagaggucacugggaaua

SEQ ID NO: 721521 - RNA, 19 nt, Homo sapiens
  misc_RNA (1)...(19): siRNA sense strand
gacccaaccugcugcacaa

SEQ ID NO: 721522 - RNA, 19 nt, Homo sapiens
  misc_RNA (1)...(19): siRNA sense strand
aaacuggauucacuaggaa

SEQ ID NO: 721523 - RNA, 19 nt, Homo sapiens
  misc_RNA (1)...(19): siRNA sense strand
ggaauuugaccgugggauu

SEQ ID NO: 721524 - RNA, 19 nt, Homo sapiens
  misc_RNA (1)...(19): siRNA sense strand
gaucaccauucccaaagau

SEQ ID NO: 721525 - RNA, 19 nt, Homo sapiens
  misc_RNA (1)...(19): siRNA sense strand
gcagagggacgagcagaaa

SEQ ID NO: 721526 - RNA, 19 nt, Homo sapiens
  misc_RNA (1)...(19): siRNA sense strand
ggaauaaaaugacaucucu

SEQ ID NO: 721527 - RNA, 19 nt, Homo sapiens
  misc_RNA (1)...(19): siRNA sense strand
uaagaaagaaacuggauuc

SEQ ID NO: 721528 - RNA, 19 nt, Homo sapiens
  misc_RNA (1)...(19): siRNA sense strand
gaauuugaccgugggauug

SEQ ID NO: 721529 - RNA, 19 nt, Homo sapiens
  misc_RNA (1)...(19): siRNA sense strand
aaagaauucucaguucaga

SEQ ID NO: 721530 - RNA, 19 nt, Homo sapiens
  misc_RNA (1)...(19): siRNA sense strand
aagcagaagucaucagaca

SEQ ID NO: 721531 - RNA, 19 nt, Homo sapiens
  misc_RNA (1)...(19): siRNA sense strand
cagcaaagaugggcaagag

SEQ ID NO: 721532 - RNA, 19 nt, Homo sapiens
  misc_RNA (1)...(19): siRNA sense strand
ugacagggccuauaaacuc

SEQ ID NO: 721533 - RNA, 19 nt, Homo sapiens
  misc_RNA (1)...(19): siRNA sense strand
gaaaggcuucccaaucauc

SEQ ID NO: 721534 - RNA, 19 nt, Homo sapiens
  misc_RNA (1)...(19): siRNA sense strand
ccaugucaguggauucuau

SEQ ID NO: 721535 - RNA, 19 nt, Homo sapiens
  misc_RNA (1)...(19): siRNA sense strand
gaaugacagggccuauaaa

SEQ ID NO: 721536 - RNA, 19 nt, Homo sapiens
  misc_RNA (1)...(19): siRNA sense strand
ggagcacaguguucaugau

SEQ ID NO: 721537 - RNA, 19 nt, Homo sapiens
  misc_RNA (1)...(19): siRNA sense strand
gagcacaguguucaugaug

SEQ ID NO: 721538 - RNA, 19 nt, Homo sapiens
  misc_RNA (1)...(19): siRNA sense strand
ccucagaaacaccgaauga

SEQ ID NO: 721539 - RNA, 19 nt, Homo sapiens
  misc_RNA (1)...(19): siRNA sense strand
agaggucacugggaauaaa

SEQ ID NO: 721540 - RNA, 19 nt, Homo sapiens
  misc_RNA (1)...(19): siRNA sense strand
ugaauccuauuuacagaca

SEQ ID NO: 721541 - RNA, 19 nt, Homo sapiens
  misc_RNA (1)...(19): siRNA sense strand
caaagucaagggaaaguuc

SEQ ID NO: 721542 - RNA, 19 nt, Homo sapiens
  misc_RNA (1)...(19): siRNA sense strand
gaggagagcacggccauca

SEQ ID NO: 721543 - RNA, 19 nt, Homo sapiens
  misc_RNA (1)...(19): siRNA sense strand
ggagagcacggccaucauc

SEQ ID NO: 721544 - RNA, 19 nt, Homo sapiens
  misc_RNA (1)...(19): siRNA sense strand
caaagacaaagaauucauc

SEQ ID NO: 721545 - RNA, 19 nt, Homo sapiens
  misc_RNA (1)...(19): siRNA sense strand
agcaguaacucaucucuca

SEQ ID NO: 721546 - RNA, 19 nt, Homo sapiens
  misc_RNA (1)...(19): siRNA sense strand
aaagaaacuggauucacua

SEQ ID NO: 721547 - RNA, 19 nt, Homo sapiens
  misc_RNA (1)...(19): siRNA sense strand
gcgaaugacagggccuaua

SEQ ID NO: 721548 - RNA, 19 nt, Homo sapiens
  misc_RNA (1)...(19): siRNA sense strand
cugaugucguggacuauuu

SEQ ID NO: 721549 - RNA, 19 nt, Homo sapiens
  misc_RNA (1)...(19): siRNA sense strand
uggcuucccuccucccauu

SEQ ID NO: 721550 - RNA, 19 nt, Homo sapiens
  misc_RNA (1)...(19): siRNA sense strand
ggacaaaagagaaagaaau

SEQ ID NO: 721551 - RNA, 19 nt, Homo sapiens
  misc_RNA (1)...(19): siRNA sense strand
gagauaagaaacucagucu

SEQ ID NO: 721552 - RNA, 19 nt, Homo sapiens
  misc_RNA (1)...(19): siRNA sense strand
cagcucaaccucagaaaca

SEQ ID NO: 721553 - RNA, 19 nt, Homo sapiens
  misc_RNA (1)...(19): siRNA sense strand
ucagaucaccauucccaaa

SEQ ID NO: 721554 - RNA, 19 nt, Homo sapiens
  misc_RNA (1)...(19): siRNA sense strand
cguggacuauuuacucaga

SEQ ID NO: 721555 - RNA, 19 nt, Homo sapiens
  misc_RNA (1)...(19): siRNA sense strand
ucagaaacaccgaaugagu

SEQ ID NO: 721556 - RNA, 19 nt, Homo sapiens
  misc_RNA (1)...(19): siRNA sense strand
ugaugucguggacuauuua

SEQ ID NO: 721557 - RNA, 19 nt, Homo sapiens
  misc_RNA (1)...(19): siRNA sense strand
ggaggaggagcacaguguu

SEQ ID NO: 721558 - RNA, 19 nt, Homo sapiens
  misc_RNA (1)...(19): siRNA sense strand
gagggaggcauucaucuac

SEQ ID NO: 721559 - RNA, 19 nt, Homo sapiens
  misc_RNA (1)...(19): siRNA sense strand
gaggaggggugccauguca

SEQ ID NO: 721560 - RNA, 19 nt, Homo sapiens
  misc_RNA (1)...(19): siRNA sense strand
uaaacuuagccaccauauu

SEQ ID NO: 721561 - RNA, 19 nt, Homo sapiens
  misc_RNA (1)...(19): siRNA sense strand
uagaagcuuuacaacuuuc

SEQ ID NO: 721562 - RNA, 19 nt, Homo sapiens
  misc_RNA (1)...(19): siRNA sense strand
gcaagaggucacugggaau

SEQ ID NO: 721563 - RNA, 19 nt, Homo sapiens
  misc_RNA (1)...(19): siRNA sense strand
ggacuauuuacucagaaga

SEQ ID NO: 721564 - RNA, 19 nt, Homo sapiens
  misc_RNA (1)...(19): siRNA sense strand
cugaucagccuguuagaga

SEQ ID NO: 721565 - RNA, 19 nt, Homo sapiens
  misc_RNA (1)...(19): siRNA sense strand
gagacaauuacgugaggaa

SEQ ID NO: 721566 - RNA, 19 nt, Homo sapiens
  misc_RNA (1)...(19): siRNA sense strand
caaagaauucucaguucag

SEQ ID NO: 721567 - RNA, 19 nt, Homo sapiens
  misc_RNA (1)...(19): siRNA sense strand
acaagcagaagucaucaga

SEQ ID NO: 721568 - RNA, 19 nt, Homo sapiens
  misc_RNA (1)...(19): siRNA sense strand
agaaacaccgaaugaguca

SEQ ID NO: 721569 - RNA, 19 nt, Homo sapiens
  misc_RNA (1)...(19): siRNA sense strand
agaaaggcuucccaaucau

SEQ ID NO: 721570 - RNA, 19 nt, Homo sapiens
  misc_RNA (1)...(19): siRNA sense strand
gucguggacuauuuacuca

SEQ ID NO: 721571 - RNA, 19 nt, Homo sapiens
  misc_RNA (1)...(19): siRNA sense strand
gcacaagcagaagucauca

SEQ ID NO: 721572 - RNA, 19 nt, Homo sapiens
  misc_RNA (1)...(19): siRNA sense strand
gaggagcacaguguucaug

SEQ ID NO: 721573 - RNA, 19 nt, Homo sapiens
  misc_RNA (1)...(19): siRNA sense strand
gaggaggagcacaguguuc

SEQ ID NO: 721574 - RNA, 19 nt, Homo sapiens
  misc_RNA (1)...(19): siRNA sense strand
ggaggcauucaucuacaga

SEQ ID NO: 721575 - RNA, 19 nt, Homo sapiens
  misc_RNA (1)...(19): siRNA sense strand
gacuauuuacucagaagaa

SEQ ID NO: 721576 - RNA, 19 nt, Homo sapiens
  misc_RNA (1)...(19): siRNA sense strand
aggaacagcugggcaccuu

SEQ ID NO: 721577 - RNA, 19 nt, Homo sapiens
  misc_RNA (1)...(19): siRNA sense strand
gcugucagaucaccauucc

SEQ ID NO: 721578 - RNA, 19 nt, Homo sapiens
  misc_RNA (1)...(19): siRNA sense strand
agagaccgauccugauguc

SEQ ID NO: 721579 - RNA, 19 nt, Homo sapiens
  misc_RNA (1)...(19): siRNA sense strand
cagcuuucaucaacacucu

SEQ ID NO: 721580 - RNA, 19 nt, Homo sapiens
  misc_RNA (1)...(19): siRNA sense strand
agaucaccauucccaaaga

SEQ ID NO: 721581 - RNA, 19 nt, Homo sapiens
  misc_RNA (1)...(19): siRNA sense strand
gucaucagacaaagaauuc

SEQ ID NO: 721582 - RNA, 19 nt, Homo sapiens
  misc_RNA (1)...(19): siRNA sense strand
gcucggagaagcuuuacag

SEQ ID NO: 721583 - RNA, 19 nt, Homo sapiens
  misc_RNA (1)...(19): siRNA sense strand
gggaggcauucaucuacag

SEQ ID NO: 721584 - RNA, 19 nt, Homo sapiens
  misc_RNA (1)...(19): siRNA sense strand
caccuugcagcuccucaua

SEQ ID NO: 721585 - RNA, 19 nt, Homo sapiens
  misc_RNA (1)...(19): siRNA sense strand
uggauucuaucaccgaucu

SEQ ID NO: 721586 - RNA, 19 nt, Homo sapiens
  misc_RNA (1)...(19): siRNA sense strand
gaaugcccuuaucccaagu

SEQ ID NO: 721587 - RNA, 19 nt, Homo sapiens
  misc_RNA (1)...(19): siRNA sense strand
uuagagaccgauccugaug

SEQ ID NO: 721588 - RNA, 19 nt, Homo sapiens
  misc_RNA (1)...(19): siRNA sense strand
agaauucucaguucagagu

SEQ ID NO: 721589 - RNA, 19 nt, Homo sapiens
  misc_RNA (1)...(19): siRNA sense strand
aaaagagagugagacaauu

SEQ ID NO: 721590 - RNA, 19 nt, Homo sapiens
  misc_RNA (1)...(19): siRNA sense strand
uggauucacuaggaaagga

SEQ ID NO: 721591 - RNA, 19 nt, Homo sapiens
  misc_RNA (1)...(19): siRNA sense strand
gauucuaucaccgaucuug

SEQ ID NO: 721592 - RNA, 19 nt, Homo sapiens
  misc_RNA (1)...(19): siRNA sense strand
aacauggccuccagacagu

SEQ ID NO: 721593 - RNA, 19 nt, Homo sapiens
  misc_RNA (1)...(19): siRNA sense strand
caucuacagacuccaacaa

SEQ ID NO: 721594 - RNA, 19 nt, Homo sapiens
  misc_RNA (1)...(19): siRNA sense strand
agagggacgagcagaaaga

SEQ ID NO: 721595 - RNA, 19 nt, Homo sapiens
  misc_RNA (1)...(19): siRNA sense strand
cagaagucaucagacaaag

SEQ ID NO: 721596 - RNA, 19 nt, Homo sapiens
  misc_RNA (1)...(19): siRNA sense strand
ugacaacaucagcaaagau

SEQ ID NO: 721597 - RNA, 19 nt, Homo sapiens
  misc_RNA (1)...(19): siRNA sense strand
acacagcuuucaucaacac

SEQ ID NO: 721598 - RNA, 19 nt, Homo sapiens
  misc_RNA (1)...(19): siRNA sense strand
ggaagugccugcugauugu

SEQ ID NO: 721599 - RNA, 19 nt, Homo sapiens
  misc_RNA (1)...(19): siRNA sense strand
caacaaaggucccucaaac

SEQ ID NO: 721600 - RNA, 19 nt, Homo sapiens
  misc_RNA (1)...(19): siRNA sense strand
gaccaggcauucacagaaa

SEQ ID NO: 721601 - RNA, 19 nt, Homo sapiens
  misc_RNA (1)...(19): siRNA sense strand
gaaccacccuuggaucaug

SEQ ID NO: 721602 - RNA, 19 nt, Homo sapiens
  misc_RNA (1)...(19): siRNA sense strand
gaaugaccaucaccgaguu

SEQ ID NO: 721603 - RNA, 19 nt, Homo sapiens
  misc_RNA (1)...(19): siRNA sense strand
gaagaacgccaucaucgau

SEQ ID NO: 721604 - RNA, 19 nt, Homo sapiens
  misc_RNA (1)...(19): siRNA sense strand
ggagaaauucgcccucaaa

SEQ ID NO: 721605 - RNA, 19 nt, Homo sapiens
  misc_RNA (1)...(19): siRNA sense strand
gaaauucgcccucaaaaug

SEQ ID NO: 721606 - RNA, 19 nt, Homo sapiens
  misc_RNA (1)...(19): siRNA sense strand
gaaagagaagcauccgaaa

SEQ ID NO: 721607 - RNA, 19 nt, Homo sapiens
  misc_RNA (1)...(19): siRNA sense strand
gaagugaagaugcucauuc

SEQ ID NO: 721608 - RNA, 19 nt, Homo sapiens
  misc_RNA (1)...(19): siRNA sense strand
gaaugggccaguaugaauu

SEQ ID NO: 721609 - RNA, 19 nt, Homo sapiens
  misc_RNA (1)...(19): siRNA sense strand
ggacgguggagaacucuuu

SEQ ID NO: 721610 - RNA, 19 nt, Homo sapiens
  misc_RNA (1)...(19): siRNA sense strand
ugacaaguccugugacaug

SEQ ID NO: 721611 - RNA, 19 nt, Homo sapiens
  misc_RNA (1)...(19): siRNA sense strand
caagaggacccaggagaaa

SEQ ID NO: 721612 - RNA, 19 nt, Homo sapiens
  misc_RNA (1)...(19): siRNA sense strand
gggcaucaacggcaaaguu

SEQ ID NO: 721613 - RNA, 19 nt, Homo sapiens
  misc_RNA (1)...(19): siRNA sense strand
ccagaauggucagaaguau

SEQ ID NO: 721614 - RNA, 19 nt, Homo sapiens
  misc_RNA (1)...(19): siRNA sense strand
uccaguaucugcauucaau

SEQ ID NO: 721615 - RNA, 19 nt, Homo sapiens
  misc_RNA (1)...(19): siRNA sense strand
cuauguggcuccagaagug

SEQ ID NO: 721616 - RNA, 19 nt, Homo sapiens
  misc_RNA (1)...(19): siRNA sense strand
gcccaacgccauccugaaa

SEQ ID NO: 721617 - RNA, 19 nt, Homo sapiens
  misc_RNA (1)...(19): siRNA sense strand
cgaaugggccaguaugaau

SEQ ID NO: 721618 - RNA, 19 nt, Homo sapiens
  misc_RNA (1)...(19): siRNA sense strand
guuauacaccguacuaugu

SEQ ID NO: 721619 - RNA, 19 nt, Homo sapiens
  misc_RNA (1)...(19): siRNA sense strand
gaccacuccuuguuauaca

SEQ ID NO: 721620 - RNA, 19 nt, Homo sapiens
  misc_RNA (1)...(19): siRNA sense strand
ugauugucauggaauguuu

SEQ ID NO: 721621 - RNA, 19 nt, Homo sapiens
  misc_RNA (1)...(19): siRNA sense strand
gagcccacccagagaauga

SEQ ID NO: 721622 - RNA, 19 nt, Homo sapiens
  misc_RNA (1)...(19): siRNA sense strand
gacaaguccugugacaugu

SEQ ID NO: 721623 - RNA, 19 nt, Homo sapiens
  misc_RNA (1)...(19): siRNA sense strand
gccugcagaucaagaagaa

SEQ ID NO: 721624 - RNA, 19 nt, Homo sapiens
  misc_RNA (1)...(19): siRNA sense strand
ggcaucaacggcaaaguuu

SEQ ID NO: 721625 - RNA, 19 nt, Homo sapiens
  misc_RNA (1)...(19): siRNA sense strand
cauccgaaaucaugaagag

SEQ ID NO: 721626 - RNA, 19 nt, Homo sapiens
  misc_RNA (1)...(19): siRNA sense strand
ccaccagccacaacucuuu

SEQ ID NO: 721627 - RNA, 19 nt, Homo sapiens
  misc_RNA (1)...(19): siRNA sense strand
agaagcauccgaaaucaug

SEQ ID NO: 721628 - RNA, 19 nt, Homo sapiens
  misc_RNA (1)...(19): siRNA sense strand
caagaagaacgccaucauc

SEQ ID NO: 721629 - RNA, 19 nt, Homo sapiens
  misc_RNA (1)...(19): siRNA sense strand
aagagaagcauccgaaauc

SEQ ID NO: 721630 - RNA, 19 nt, Homo sapiens
  misc_RNA (1)...(19): siRNA sense strand
gaucaugcaaucaacaaag

SEQ ID NO: 721631 - RNA, 19 nt, Homo sapiens
  misc_RNA (1)...(19): siRNA sense strand
ucaccgaguuuaugaacca

SEQ ID NO: 721632 - RNA, 19 nt, Homo sapiens
  misc_RNA (1)...(19): siRNA sense strand
agaauggucagaaguauca

SEQ ID NO: 721633 - RNA, 19 nt, Homo sapiens
  misc_RNA (1)...(19): siRNA sense strand
agagaagcauccgaaauca

SEQ ID NO: 721634 - RNA, 19 nt, Homo sapiens
  misc_RNA (1)...(19): siRNA sense strand
gaccaucaccgaguuuaug

SEQ ID NO: 721635 - RNA, 19 nt, Homo sapiens
  misc_RNA (1)...(19): siRNA sense strand
ccagagaaguaugacaagu

SEQ ID NO: 721636 - RNA, 19 nt, Homo sapiens
  misc_RNA (1)...(19): siRNA sense strand
guacggaucguggaugugu

SEQ ID NO: 721637 - RNA, 19 nt, Homo sapiens
  misc_RNA (1)...(19): siRNA sense strand
uaugacaaguccugugaca

SEQ ID NO: 721638 - RNA, 19 nt, Homo sapiens
  misc_RNA (1)...(19): siRNA sense strand
gaagcauccgaaaucauga

SEQ ID NO: 721639 - RNA, 19 nt, Homo sapiens
  misc_RNA (1)...(19): siRNA sense strand
aaagagaagcauccgaaau

SEQ ID NO: 721640 - RNA, 19 nt, Homo sapiens
  misc_RNA (1)...(19): siRNA sense strand
gugaggccauccaguaucu

SEQ ID NO: 721641 - RNA, 19 nt, Homo sapiens
  misc_RNA (1)...(19): siRNA sense strand
gaauuucccaacccagaau

SEQ ID NO: 721642 - RNA, 19 nt, Homo sapiens
  misc_RNA (1)...(19): siRNA sense strand
gacgguggagaacucuuua

SEQ ID NO: 721643 - RNA, 19 nt, Homo sapiens
  misc_RNA (1)...(19): siRNA sense strand
ucaacaaaggucccucaaa

SEQ ID NO: 721644 - RNA, 19 nt, Homo sapiens
  misc_RNA (1)...(19): siRNA sense strand
gaggaagugccugcugauu

SEQ ID NO: 721645 - RNA, 19 nt, Homo sapiens
  misc_RNA (1)...(19): siRNA sense strand
acaagaggacccaggagaa

SEQ ID NO: 721646 - RNA, 19 nt, Homo sapiens
  misc_RNA (1)...(19): siRNA sense strand
uaucugcauucaaucaaca

SEQ ID NO: 721647 - RNA, 19 nt, Homo sapiens
  misc_RNA (1)...(19): siRNA sense strand
ggcauucacagaaagagaa

SEQ ID NO: 721648 - RNA, 19 nt, Homo sapiens
  misc_RNA (1)...(19): siRNA sense strand
cagaggaagugaagaugcu

SEQ ID NO: 721649 - RNA, 19 nt, Homo sapiens
  misc_RNA (1)...(19): siRNA sense strand
uaucagaggaagugaagau

SEQ ID NO: 721650 - RNA, 19 nt, Homo sapiens
  misc_RNA (1)...(19): siRNA sense strand
gaaaccaccagccacaacu

SEQ ID NO: 721651 - RNA, 19 nt, Homo sapiens
  misc_RNA (1)...(19): siRNA sense strand
ccaacgccauccugaaacu

SEQ ID NO: 721652 - RNA, 19 nt, Homo sapiens
  misc_RNA (1)...(19): siRNA sense strand
agaggacccaggagaaauu

SEQ ID NO: 721653 - RNA, 19 nt, Homo sapiens
  misc_RNA (1)...(19): siRNA sense strand
gagaccaggcauucacaga

SEQ ID NO: 721654 - RNA, 19 nt, Homo sapiens
  misc_RNA (1)...(19): siRNA sense strand
ggaagugaagaugcucauu

SEQ ID NO: 721655 - RNA, 19 nt, Homo sapiens
  misc_RNA (1)...(19): siRNA sense strand
ucggugaggccauccagua

SEQ ID NO: 721656 - RNA, 19 nt, Homo sapiens
  misc_RNA (1)...(19): siRNA sense strand
cccagaauggucagaagua

SEQ ID NO: 721657 - RNA, 19 nt, Homo sapiens
  misc_RNA (1)...(19): siRNA sense strand
guccagagaaguaugacaa

SEQ ID NO: 721658 - RNA, 19 nt, Homo sapiens
  misc_RNA (1)...(19): siRNA sense strand
ggaaaccaccagccacaac

SEQ ID NO: 721659 - RNA, 19 nt, Homo sapiens
  misc_RNA (1)...(19): siRNA sense strand
aggaagugccugcugauug

SEQ ID NO: 721660 - RNA, 19 nt, Homo sapiens
  misc_RNA (1)...(19): siRNA sense strand
ggaucaugcaaucaacaaa

SEQ ID NO: 721661 - RNA, 19 nt, Homo sapiens
  misc_RNA (1)...(19): siRNA sense strand
ccacggccuugccaucucu

SEQ ID NO: 721662 - RNA, 19 nt, Homo sapiens
  misc_RNA (1)...(19): siRNA sense strand
ccugaaacucacugacuuu

SEQ ID NO: 721663 - RNA, 19 nt, Homo sapiens
  misc_RNA (1)...(19): siRNA sense strand
gagaagcauccgaaaucau

SEQ ID NO: 721664 - RNA, 19 nt, Homo sapiens
  misc_RNA (1)...(19): siRNA sense strand
agaccaggcauucacagaa

SEQ ID NO: 721665 - RNA, 19 nt, Homo sapiens
  misc_RNA (1)...(19): siRNA sense strand
ucaagaagaacgccaucau

SEQ ID NO: 721666 - RNA, 19 nt, Homo sapiens
  misc_RNA (1)...(19): siRNA sense strand
agaaguaucagaggaagug

SEQ ID NO: 721667 - RNA, 19 nt, Homo sapiens
  misc_RNA (1)...(19): siRNA sense strand
gaagacucgcauccgaaug

SEQ ID NO: 721668 - RNA, 19 nt, Homo sapiens
  misc_RNA (1)...(19): siRNA sense strand
gucccugggugucaucaug

SEQ ID NO: 721669 - RNA, 19 nt, Homo sapiens
  misc_RNA (1)...(19): siRNA sense strand
cagagaaguaugacaaguc

SEQ ID NO: 721670 - RNA, 19 nt, Homo sapiens
  misc_RNA (1)...(19): siRNA sense strand
gcauccgaaugggccagua

SEQ ID NO: 721671 - RNA, 19 nt, Homo sapiens
  misc_RNA (1)...(19): siRNA sense strand
gccauccaguaucugcauu

SEQ ID NO: 721672 - RNA, 19 nt, Homo sapiens
  misc_RNA (1)...(19): siRNA sense strand
ugaauuucccaacccagaa

SEQ ID NO: 721673 - RNA, 19 nt, Homo sapiens
  misc_RNA (1)...(19): siRNA sense strand
aaugggccaguaugaauuu

SEQ ID NO: 721674 - RNA, 19 nt, Homo sapiens
  misc_RNA (1)...(19): siRNA sense strand
ggaggaagugccugcugau

SEQ ID NO: 721675 - RNA, 19 nt, Homo sapiens
  misc_RNA (1)...(19): siRNA sense strand
ugaagacucgcauccgaau

SEQ ID NO: 721676 - RNA, 19 nt, Homo sapiens
  misc_RNA (1)...(19): siRNA sense strand
uuugaccacuccuuguuau

SEQ ID NO: 721677 - RNA, 19 nt, Homo sapiens
  misc_RNA (1)...(19): siRNA sense strand
cauccaguaucugcauuca

SEQ ID NO: 721678 - RNA, 19 nt, Homo sapiens
  misc_RNA (1)...(19): siRNA sense strand
ggaugucaagccugagaau

SEQ ID NO: 721679 - RNA, 19 nt, Homo sapiens
  misc_RNA (1)...(19): siRNA sense strand
caacccagaauggucagaa

SEQ ID NO: 721680 - RNA, 19 nt, Homo sapiens
  misc_RNA (1)...(19): siRNA sense strand
guacuauguggcuccagaa

SEQ ID NO: 721681 - RNA, 19 nt, Homo sapiens
  misc_RNA (1)...(19): siRNA sense strand
guaucugcauucaaucaac

SEQ ID NO: 721682 - RNA, 19 nt, Homo sapiens
  misc_RNA (1)...(19): siRNA sense strand
gagaaauucgcccucaaaa

SEQ ID NO: 721683 - RNA, 19 nt, Homo sapiens
  misc_RNA (1)...(19): siRNA sense strand
acagagcccacccagagaa

SEQ ID NO: 721684 - RNA, 19 nt, Homo sapiens
  misc_RNA (1)...(19): siRNA sense strand
agaagaacgccaucaucga

SEQ ID NO: 721685 - RNA, 19 nt, Homo sapiens
  misc_RNA (1)...(19): siRNA sense strand
ccgaaaucaugaagagcau

SEQ ID NO: 721686 - RNA, 19 nt, Homo sapiens
  misc_RNA (1)...(19): siRNA sense strand
uccugaaacucacugacuu

SEQ ID NO: 721687 - RNA, 19 nt, Homo sapiens
  misc_RNA (1)...(19): siRNA sense strand
ggaagugccugcugauugu

SEQ ID NO: 721688 - RNA, 19 nt, Homo sapiens
  misc_RNA (1)...(19): siRNA sense strand
caacaaaggucccucaaac

SEQ ID NO: 721689 - RNA, 19 nt, Homo sapiens
  misc_RNA (1)...(19): siRNA sense strand
gaccaggcauucacagaaa

SEQ ID NO: 721690 - RNA, 19 nt, Homo sapiens
  misc_RNA (1)...(19): siRNA sense strand
gaaccacccuuggaucaug

SEQ ID NO: 721691 - RNA, 19 nt, Homo sapiens
  misc_RNA (1)...(19): siRNA sense strand
gaaugaccaucaccgaguu

SEQ ID NO: 721692 - RNA, 19 nt, Homo sapiens
  misc_RNA (1)...(19): siRNA sense strand
gaagaacgccaucaucgau

SEQ ID NO: 721693 - RNA, 19 nt, Homo sapiens
  misc_RNA (1)...(19): siRNA sense strand
ggagaaauucgcccucaaa

SEQ ID NO: 721694 - RNA, 19 nt, Homo sapiens
  misc_RNA (1)...(19): siRNA sense strand
gaaauucgcccucaaaaug

SEQ ID NO: 721695 - RNA, 19 nt, Homo sapiens
  misc_RNA (1)...(19): siRNA sense strand
gaaagagaagcauccgaaa

SEQ ID NO: 721696 - RNA, 19 nt, Homo sapiens
  misc_RNA (1)...(19): siRNA sense strand
gaagugaagaugcucauuc

SEQ ID NO: 721697 - RNA, 19 nt, Homo sapiens
  misc_RNA (1)...(19): siRNA sense strand
gaaugggccaguaugaauu

SEQ ID NO: 721698 - RNA, 19 nt, Homo sapiens
  misc_RNA (1)...(19): siRNA sense strand
ggacgguggagaacucuuu

SEQ ID NO: 721699 - RNA, 19 nt, Homo sapiens
  misc_RNA (1)...(19): siRNA sense strand
ugacaaguccugugacaug

SEQ ID NO: 721700 - RNA, 19 nt, Homo sapiens
  misc_RNA (1)...(19): siRNA sense strand
caagaggacccaggagaaa

SEQ ID NO: 721701 - RNA, 19 nt, Homo sapiens
  misc_RNA (1)...(19): siRNA sense strand
acgagcagaucaagauaaa

SEQ ID NO: 721702 - RNA, 19 nt, Homo sapiens
  misc_RNA (1)...(19): siRNA sense strand
ccacaaugcgcguugacua

SEQ ID NO: 721703 - RNA, 19 nt, Homo sapiens
  misc_RNA (1)...(19): siRNA sense strand
gggcaucaacggcaaaguu

SEQ ID NO: 721704 - RNA, 19 nt, Homo sapiens
  misc_RNA (1)...(19): siRNA sense strand
ccagaauggucagaaguau

SEQ ID NO: 721705 - RNA, 19 nt, Homo sapiens
  misc_RNA (1)...(19): siRNA sense strand
uccaguaucugcauucaau

SEQ ID NO: 721706 - RNA, 19 nt, Homo sapiens
  misc_RNA (1)...(19): siRNA sense strand
cuauguggcuccagaagug

SEQ ID NO: 721707 - RNA, 19 nt, Homo sapiens
  misc_RNA (1)...(19): siRNA sense strand
gcccaacgccauccugaaa

SEQ ID NO: 721708 - RNA, 19 nt, Homo sapiens
  misc_RNA (1)...(19): siRNA sense strand
cgaaugggccaguaugaau

SEQ ID NO: 721709 - RNA, 19 nt, Homo sapiens
  misc_RNA (1)...(19): siRNA sense strand
guuauacaccguacuaugu

SEQ ID NO: 721710 - RNA, 19 nt, Homo sapiens
  misc_RNA (1)...(19): siRNA sense strand
gaccacuccuuguuauaca

SEQ ID NO: 721711 - RNA, 19 nt, Homo sapiens
  misc_RNA (1)...(19): siRNA sense strand
ugauugucauggaauguuu

SEQ ID NO: 721712 - RNA, 19 nt, Homo sapiens
  misc_RNA (1)...(19): siRNA sense strand
gagcccacccagagaauga

SEQ ID NO: 721713 - RNA, 19 nt, Homo sapiens
  misc_RNA (1)...(19): siRNA sense strand
gccugcagaucaagaagaa

SEQ ID NO: 721714 - RNA, 19 nt, Homo sapiens
  misc_RNA (1)...(19): siRNA sense strand
gacaaguccugugacaugu

SEQ ID NO: 721715 - RNA, 19 nt, Homo sapiens
  misc_RNA (1)...(19): siRNA sense strand
ggcaucaacggcaaaguuu

SEQ ID NO: 721716 - RNA, 19 nt, Homo sapiens
  misc_RNA (1)...(19): siRNA sense strand
cauccgaaaucaugaagag

SEQ ID NO: 721717 - RNA, 19 nt, Homo sapiens
  misc_RNA (1)...(19): siRNA sense strand
ccaccagccacaacucuuu

SEQ ID NO: 721718 - RNA, 19 nt, Homo sapiens
  misc_RNA (1)...(19): siRNA sense strand
agaagcauccgaaaucaug

SEQ ID NO: 721719 - RNA, 19 nt, Homo sapiens
  misc_RNA (1)...(19): siRNA sense strand
caagaagaacgccaucauc

SEQ ID NO: 721720 - RNA, 19 nt, Homo sapiens
  misc_RNA (1)...(19): siRNA sense strand
aagagaagcauccgaaauc

SEQ ID NO: 721721 - RNA, 19 nt, Homo sapiens
  misc_RNA (1)...(19): siRNA sense strand
gaucaugcaaucaacaaag

SEQ ID NO: 721722 - RNA, 19 nt, Homo sapiens
  misc_RNA (1)...(19): siRNA sense strand
ucaccgaguuuaugaacca

SEQ ID NO: 721723 - RNA, 19 nt, Homo sapiens
  misc_RNA (1)...(19): siRNA sense strand
agaauggucagaaguauca

SEQ ID NO: 721724 - RNA, 19 nt, Homo sapiens
  misc_RNA (1)...(19): siRNA sense strand
agagaagcauccgaaauca

SEQ ID NO: 721725 - RNA, 19 nt, Homo sapiens
  misc_RNA (1)...(19): siRNA sense strand
gaccaucaccgaguuuaug

SEQ ID NO: 721726 - RNA, 19 nt, Homo sapiens
  misc_RNA (1)...(19): siRNA sense strand
ccagagaaguaugacaagu

SEQ ID NO: 721727 - RNA, 19 nt, Homo sapiens
  misc_RNA (1)...(19): siRNA sense strand
ccaacccucugcugcugaa

SEQ ID NO: 721728 - RNA, 19 nt, Homo sapiens
  misc_RNA (1)...(19): siRNA sense strand
guacggaucguggaugugu

SEQ ID NO: 721729 - RNA, 19 nt, Homo sapiens
  misc_RNA (1)...(19): siRNA sense strand
uaugacaaguccugugaca

SEQ ID NO: 721730 - RNA, 19 nt, Homo sapiens
  misc_RNA (1)...(19): siRNA sense strand
gaagcauccgaaaucauga

SEQ ID NO: 721731 - RNA, 19 nt, Homo sapiens
  misc_RNA (1)...(19): siRNA sense strand
aaagagaagcauccgaaau

SEQ ID NO: 721732 - RNA, 19 nt, Homo sapiens
  misc_RNA (1)...(19): siRNA sense strand
gugaggccauccaguaucu

SEQ ID NO: 721733 - RNA, 19 nt, Homo sapiens
  misc_RNA (1)...(19): siRNA sense strand
gaauuucccaacccagaau

SEQ ID NO: 721734 - RNA, 19 nt, Homo sapiens
  misc_RNA (1)...(19): siRNA sense strand
gacgguggagaacucuuua

SEQ ID NO: 721735 - RNA, 19 nt, Homo sapiens
  misc_RNA (1)...(19): siRNA sense strand
ucaacaaaggucccucaaa

SEQ ID NO: 721736 - RNA, 19 nt, Homo sapiens
  misc_RNA (1)...(19): siRNA sense strand
gaggaagugccugcugauu

SEQ ID NO: 721737 - RNA, 19 nt, Homo sapiens
  misc_RNA (1)...(19): siRNA sense strand
uaucugcauucaaucaaca

SEQ ID NO: 721738 - RNA, 19 nt, Homo sapiens
  misc_RNA (1)...(19): siRNA sense strand
acaagaggacccaggagaa

SEQ ID NO: 721739 - RNA, 19 nt, Homo sapiens
  misc_RNA (1)...(19): siRNA sense strand
ggcauucacagaaagagaa

SEQ ID NO: 721740 - RNA, 19 nt, Homo sapiens
  misc_RNA (1)...(19): siRNA sense strand
agaggacccaggagaaauu

SEQ ID NO: 721741 - RNA, 19 nt, Homo sapiens
  misc_RNA (1)...(19): siRNA sense strand
cagaggaagugaagaugcu

SEQ ID NO: 721742 - RNA, 19 nt, Homo sapiens
  misc_RNA (1)...(19): siRNA sense strand
uaucagaggaagugaagau

SEQ ID NO: 721743 - RNA, 19 nt, Homo sapiens
  misc_RNA (1)...(19): siRNA sense strand
gaaaccaccagccacaacu

SEQ ID NO: 721744 - RNA, 19 nt, Homo sapiens
  misc_RNA (1)...(19): siRNA sense strand
ccaacgccauccugaaacu

SEQ ID NO: 721745 - RNA, 19 nt, Homo sapiens
  misc_RNA (1)...(19): siRNA sense strand
gagaccaggcauucacaga

SEQ ID NO: 721746 - RNA, 19 nt, Homo sapiens
  misc_RNA (1)...(19): siRNA sense strand
ccagugccuuggccacaau

SEQ ID NO: 721747 - RNA, 19 nt, Homo sapiens
  misc_RNA (1)...(19): siRNA sense strand
ggaagugaagaugcucauu

SEQ ID NO: 721748 - RNA, 19 nt, Homo sapiens
  misc_RNA (1)...(19): siRNA sense strand
ucggugaggccauccagua

SEQ ID NO: 721749 - RNA, 19 nt, Homo sapiens
  misc_RNA (1)...(19): siRNA sense strand
cuacgagcagaucaagaua

SEQ ID NO: 721750 - RNA, 19 nt, Homo sapiens
  misc_RNA (1)...(19): siRNA sense strand
cccagaauggucagaagua

SEQ ID NO: 721751 - RNA, 19 nt, Homo sapiens
  misc_RNA (1)...(19): siRNA sense strand
guccagagaaguaugacaa

SEQ ID NO: 721752 - RNA, 19 nt, Homo sapiens
  misc_RNA (1)...(19): siRNA sense strand
ggaaaccaccagccacaac

SEQ ID NO: 721753 - RNA, 19 nt, Homo sapiens
  misc_RNA (1)...(19): siRNA sense strand
caaugcgcguugacuacga

SEQ ID NO: 721754 - RNA, 19 nt, Homo sapiens
  misc_RNA (1)...(19): siRNA sense strand
agaccaggcauucacagaa

SEQ ID NO: 721755 - RNA, 19 nt, Homo sapiens
  misc_RNA (1)...(19): siRNA sense strand
ggaucaugcaaucaacaaa

SEQ ID NO: 721756 - RNA, 19 nt, Homo sapiens
  misc_RNA (1)...(19): siRNA sense strand
ccacggccuugccaucucu

SEQ ID NO: 721757 - RNA, 19 nt, Homo sapiens
  misc_RNA (1)...(19): siRNA sense strand
ccugaaacucacugacuuu

SEQ ID NO: 721758 - RNA, 19 nt, Homo sapiens
  misc_RNA (1)...(19): siRNA sense strand
gagaagcauccgaaaucau

SEQ ID NO: 721759 - RNA, 19 nt, Homo sapiens
  misc_RNA (1)...(19): siRNA sense strand
aggaagugccugcugauug

SEQ ID NO: 721760 - RNA, 19 nt, Homo sapiens
  misc_RNA (1)...(19): siRNA sense strand
ucaagaagaacgccaucau

SEQ ID NO: 721761 - RNA, 19 nt, Homo sapiens
  misc_RNA (1)...(19): siRNA sense strand
agaaguaucagaggaagug

SEQ ID NO: 721762 - RNA, 19 nt, Homo sapiens
  misc_RNA (1)...(19): siRNA sense strand
gaagacucgcauccgaaug

SEQ ID NO: 721763 - RNA, 19 nt, Homo sapiens
  misc_RNA (1)...(19): siRNA sense strand
gucccugggugucaucaug

SEQ ID NO: 721764 - RNA, 19 nt, Homo sapiens
  misc_RNA (1)...(19): siRNA sense strand
cagagaaguaugacaaguc

SEQ ID NO: 721765 - RNA, 19 nt, Homo sapiens
  misc_RNA (1)...(19): siRNA sense strand
gcauccgaaugggccagua

SEQ ID NO: 721766 - RNA, 19 nt, Homo sapiens
  misc_RNA (1)...(19): siRNA sense strand
gccauccaguaucugcauu

SEQ ID NO: 721767 - RNA, 19 nt, Homo sapiens
  misc_RNA (1)...(19): siRNA sense strand
ugaauuucccaacccagaa

SEQ ID NO: 721768 - RNA, 19 nt, Homo sapiens
  misc_RNA (1)...(19): siRNA sense strand
aaugggccaguaugaauuu

SEQ ID NO: 721769 - RNA, 19 nt, Homo sapiens
  misc_RNA (1)...(19): siRNA sense strand
ugaagacucgcauccgaau

SEQ ID NO: 721770 - RNA, 19 nt, Homo sapiens
  misc_RNA (1)...(19): siRNA sense strand
ggaggaagugccugcugau

SEQ ID NO: 721771 - RNA, 19 nt, Homo sapiens
  misc_RNA (1)...(19): siRNA sense strand
uuugaccacuccuuguuau

SEQ ID NO: 721772 - RNA, 19 nt, Homo sapiens
  misc_RNA (1)...(19): siRNA sense strand
cauccaguaucugcauuca

SEQ ID NO: 721773 - RNA, 19 nt, Homo sapiens
  misc_RNA (1)...(19): siRNA sense strand
ggaugucaagccugagaau

SEQ ID NO: 721774 - RNA, 19 nt, Homo sapiens
  misc_RNA (1)...(19): siRNA sense strand
ugaagaggcggaagaaagc

SEQ ID NO: 721775 - RNA, 19 nt, Homo sapiens
  misc_RNA (1)...(19): siRNA sense strand
cugaagaggcggaagaaag

SEQ ID NO: 721776 - RNA, 19 nt, Homo sapiens
  misc_RNA (1)...(19): siRNA sense strand
caacccagaauggucagaa

SEQ ID NO: 721777 - RNA, 19 nt, Homo sapiens
  misc_RNA (1)...(19): siRNA sense strand
guacuauguggcuccagaa

SEQ ID NO: 721778 - RNA, 19 nt, Homo sapiens
  misc_RNA (1)...(19): siRNA sense strand
guaucugcauucaaucaac

SEQ ID NO: 721779 - RNA, 19 nt, Homo sapiens
  misc_RNA (1)...(19): siRNA sense strand
uacgagcagaucaagauaa

SEQ ID NO: 721780 - RNA, 19 nt, Homo sapiens
  misc_RNA (1)...(19): siRNA sense strand
acagagcccacccagagaa

SEQ ID NO: 721781 - RNA, 19 nt, Homo sapiens
  misc_RNA (1)...(19): siRNA sense strand
agaagaacgccaucaucga

SEQ ID NO: 721782 - RNA, 19 nt, Homo sapiens
  misc_RNA (1)...(19): siRNA sense strand
gagaaauucgcccucaaaa

SEQ ID NO: 721783 - RNA, 19 nt, Homo sapiens
  misc_RNA (1)...(19): siRNA sense strand
ccgaaaucaugaagagcau

SEQ ID NO: 721784 - RNA, 19 nt, Homo sapiens
  misc_RNA (1)...(19): siRNA sense strand
uccugaaacucacugacuu

SEQ ID NO: 721785 - RNA, 19 nt, Homo sapiens
  misc_RNA (1)...(19): siRNA sense strand
agaagaagcucaacaucua

SEQ ID NO: 721786 - RNA, 19 nt, Homo sapiens
  misc_RNA (1)...(19): siRNA sense strand
gaauaucgcugaagaucug

SEQ ID NO: 721787 - RNA, 19 nt, Homo sapiens
  misc_RNA (1)...(19): siRNA sense strand
gugcagagcuccaauguac

SEQ ID NO: 721788 - RNA, 19 nt, Homo sapiens
  misc_RNA (1)...(19): siRNA sense strand
gcaggaacauggcacuuuc

SEQ ID NO: 721789 - RNA, 19 nt, Homo sapiens
  misc_RNA (1)...(19): siRNA sense strand
guacaagugucggauguga

SEQ ID NO: 721790 - RNA, 19 nt, Homo sapiens
  misc_RNA (1)...(19): siRNA sense strand
gaaaauagaccgcgaacaa

SEQ ID NO: 721791 - RNA, 19 nt, Homo sapiens
  misc_RNA (1)...(19): siRNA sense strand
gcaacgaaaugaaccucuu

SEQ ID NO: 721792 - RNA, 19 nt, Homo sapiens
  misc_RNA (1)...(19): siRNA sense strand
gaauuacugcuaucaggua

SEQ ID NO: 721793 - RNA, 19 nt, Homo sapiens
  misc_RNA (1)...(19): siRNA sense strand
gcuccaauguacccaguaa

SEQ ID NO: 721794 - RNA, 19 nt, Homo sapiens
  misc_RNA (1)...(19): siRNA sense strand
caaccagaauuacugcuau

SEQ ID NO: 721795 - RNA, 19 nt, Homo sapiens
  misc_RNA (1)...(19): siRNA sense strand
ggacuccaaugacaaugug

SEQ ID NO: 721796 - RNA, 19 nt, Homo sapiens
  misc_RNA (1)...(19): siRNA sense strand
gcaugagcgucuucaccua

SEQ ID NO: 721797 - RNA, 19 nt, Homo sapiens
  misc_RNA (1)...(19): siRNA sense strand
guaagucgauccagguaca

SEQ ID NO: 721798 - RNA, 19 nt, Homo sapiens
  misc_RNA (1)...(19): siRNA sense strand
gcggcgaguuggacuauga

SEQ ID NO: 721799 - RNA, 19 nt, Homo sapiens
  misc_RNA (1)...(19): siRNA sense strand
gaagaaacucagcaaguca

SEQ ID NO: 721800 - RNA, 19 nt, Homo sapiens
  misc_RNA (1)...(19): siRNA sense strand
gaucugggucuggacauua

SEQ ID NO: 721801 - RNA, 19 nt, Homo sapiens
  misc_RNA (1)...(19): siRNA sense strand
ggagguaagcggcgaguug

SEQ ID NO: 721802 - RNA, 19 nt, Homo sapiens
  misc_RNA (1)...(19): siRNA sense strand
ucgaggugcuggacauuaa

SEQ ID NO: 721803 - RNA, 19 nt, Homo sapiens
  misc_RNA (1)...(19): siRNA sense strand
uaacgccacugucaacauc

SEQ ID NO: 721804 - RNA, 19 nt, Homo sapiens
  misc_RNA (1)...(19): siRNA sense strand
gagaagaagcucaacaucu

SEQ ID NO: 721805 - RNA, 19 nt, Homo sapiens
  misc_RNA (1)...(19): siRNA sense strand
gaagaagcucaacaucuau

SEQ ID NO: 721806 - RNA, 19 nt, Homo sapiens
  misc_RNA (1)...(19): siRNA sense strand
ccucaagucuuccuuuaag

SEQ ID NO: 721807 - RNA, 19 nt, Homo sapiens
  misc_RNA (1)...(19): siRNA sense strand
gcaagaagaaacucagcaa

SEQ ID NO: 721808 - RNA, 19 nt, Homo sapiens
  misc_RNA (1)...(19): siRNA sense strand
gcgaacaaaucugcaaaca

SEQ ID NO: 721809 - RNA, 19 nt, Homo sapiens
  misc_RNA (1)...(19): siRNA sense strand
ucaccuacguuucuaucaa

SEQ ID NO: 721810 - RNA, 19 nt, Homo sapiens
  misc_RNA (1)...(19): siRNA sense strand
caacgaaaugaaccucuuu

SEQ ID NO: 721811 - RNA, 19 nt, Homo sapiens
  misc_RNA (1)...(19): siRNA sense strand
gaccugauguuucuuaagc

SEQ ID NO: 721812 - RNA, 19 nt, Homo sapiens
  misc_RNA (1)...(19): siRNA sense strand
gaugguggaaggagucuuu

SEQ ID NO: 721813 - RNA, 19 nt, Homo sapiens
  misc_RNA (1)...(19): siRNA sense strand
gcacggcccuacucaccau

SEQ ID NO: 721814 - RNA, 19 nt, Homo sapiens
  misc_RNA (1)...(19): siRNA sense strand
agaagaaacucagcaaguc

SEQ ID NO: 721815 - RNA, 19 nt, Homo sapiens
  misc_RNA (1)...(19): siRNA sense strand
ugaaggaagcggugaguga

SEQ ID NO: 721816 - RNA, 19 nt, Homo sapiens
  misc_RNA (1)...(19): siRNA sense strand
cgccucaagucuuccuuua

SEQ ID NO: 721817 - RNA, 19 nt, Homo sapiens
  misc_RNA (1)...(19): siRNA sense strand
cuuaugagcuggugaucga

SEQ ID NO: 721818 - RNA, 19 nt, Homo sapiens
  misc_RNA (1)...(19): siRNA sense strand
caagaccgaccugauguuu

SEQ ID NO: 721819 - RNA, 19 nt, Homo sapiens
  misc_RNA (1)...(19): siRNA sense strand
guacggacacugagcacaa

SEQ ID NO: 721820 - RNA, 19 nt, Homo sapiens
  misc_RNA (1)...(19): siRNA sense strand
agaccgaccugauguuucu

SEQ ID NO: 721821 - RNA, 19 nt, Homo sapiens
  misc_RNA (1)...(19): siRNA sense strand
gggccaucgucaccgguua

SEQ ID NO: 721822 - RNA, 19 nt, Homo sapiens
  misc_RNA (1)...(19): siRNA sense strand
ccagcagccugauaucauc

SEQ ID NO: 721823 - RNA, 19 nt, Homo sapiens
  misc_RNA (1)...(19): siRNA sense strand
gcacugugguggcccuuuu

SEQ ID NO: 721824 - RNA, 19 nt, Homo sapiens
  misc_RNA (1)...(19): siRNA sense strand
gaauuacuacaccaucguu

SEQ ID NO: 721825 - RNA, 19 nt, Homo sapiens
  misc_RNA (1)...(19): siRNA sense strand
aaauagaccgcgaacaaau

SEQ ID NO: 721826 - RNA, 19 nt, Homo sapiens
  misc_RNA (1)...(19): siRNA sense strand
cagcaagucagacaucaug

SEQ ID NO: 721827 - RNA, 19 nt, Homo sapiens
  misc_RNA (1)...(19): siRNA sense strand
ugacaacgcgccagagauc

SEQ ID NO: 721828 - RNA, 19 nt, Homo sapiens
  misc_RNA (1)...(19): siRNA sense strand
cgacguguaugugacugaa

SEQ ID NO: 721829 - RNA, 19 nt, Homo sapiens
  misc_RNA (1)...(19): siRNA sense strand
gaguuggacuaugaagaga

SEQ ID NO: 721830 - RNA, 19 nt, Homo sapiens
  misc_RNA (1)...(19): siRNA sense strand
gggaauaucgcugaagauc

SEQ ID NO: 721831 - RNA, 19 nt, Homo sapiens
  misc_RNA (1)...(19): siRNA sense strand
gaacggugaggucguguac

SEQ ID NO: 721832 - RNA, 19 nt, Homo sapiens
  misc_RNA (1)...(19): siRNA sense strand
aagaagcucaacaucuaua

SEQ ID NO: 721833 - RNA, 19 nt, Homo sapiens
  misc_RNA (1)...(19): siRNA sense strand
ccugcgcucuccaccagua

SEQ ID NO: 721834 - RNA, 19 nt, Homo sapiens
  misc_RNA (1)...(19): siRNA sense strand
gcugguaacgccacuguca

SEQ ID NO: 721835 - RNA, 19 nt, Homo sapiens
  misc_RNA (1)...(19): siRNA sense strand
gcaggugcagugcgagcua

SEQ ID NO: 721836 - RNA, 19 nt, Homo sapiens
  misc_RNA (1)...(19): siRNA sense strand
ggaauaucgcugaagaucu

SEQ ID NO: 721837 - RNA, 19 nt, Homo sapiens
  misc_RNA (1)...(19): siRNA sense strand
gggaggaguaggagaagga

SEQ ID NO: 721838 - RNA, 19 nt, Homo sapiens
  misc_RNA (1)...(19): siRNA sense strand
ugagaacggcuacuuguac

SEQ ID NO: 721839 - RNA, 19 nt, Homo sapiens
  misc_RNA (1)...(19): siRNA sense strand
gcucaacaucuauacuugu

SEQ ID NO: 721840 - RNA, 19 nt, Homo sapiens
  misc_RNA (1)...(19): siRNA sense strand
cgaguuggacuaugaagag

SEQ ID NO: 721841 - RNA, 19 nt, Homo sapiens
  misc_RNA (1)...(19): siRNA sense strand
gaccagcagccugauauca

SEQ ID NO: 721842 - RNA, 19 nt, Homo sapiens
  misc_RNA (1)...(19): siRNA sense strand
aaacucagcaagucagaca

SEQ ID NO: 721843 - RNA, 19 nt, Homo sapiens
  misc_RNA (1)...(19): siRNA sense strand
aagaagaaacucagcaagu

SEQ ID NO: 721844 - RNA, 19 nt, Homo sapiens
  misc_RNA (1)...(19): siRNA sense strand
acuaugagcagcugaagga

SEQ ID NO: 721845 - RNA, 19 nt, Homo sapiens
  misc_RNA (1)...(19): siRNA sense strand
cuacguuucuaucaacucu

SEQ ID NO: 721846 - RNA, 19 nt, Homo sapiens
  misc_RNA (1)...(19): siRNA sense strand
ugcgaguacuggaugcuaa

SEQ ID NO: 721847 - RNA, 19 nt, Homo sapiens
  misc_RNA (1)...(19): siRNA sense strand
gaguacuggaugcuaauga

SEQ ID NO: 721848 - RNA, 19 nt, Homo sapiens
  misc_RNA (1)...(19): siRNA sense strand
augagcagcugaaggacuu

SEQ ID NO: 721849 - RNA, 19 nt, Homo sapiens
  misc_RNA (1)...(19): siRNA sense strand
guacgugaacgagaaaaua

SEQ ID NO: 721850 - RNA, 19 nt, Homo sapiens
  misc_RNA (1)...(19): siRNA sense strand
gccaagaccgaccugaugu

SEQ ID NO: 721851 - RNA, 19 nt, Homo sapiens
  misc_RNA (1)...(19): siRNA sense strand
cagcuugccuacucuaucc

SEQ ID NO: 721852 - RNA, 19 nt, Homo sapiens
  misc_RNA (1)...(19): siRNA sense strand
ccgaccugauguuucuuaa

SEQ ID NO: 721853 - RNA, 19 nt, Homo sapiens
  misc_RNA (1)...(19): siRNA sense strand
gcacuuucguggggaauau

SEQ ID NO: 721854 - RNA, 19 nt, Homo sapiens
  misc_RNA (1)...(19): siRNA sense strand
ccaagaccgaccugauguu

SEQ ID NO: 721855 - RNA, 19 nt, Homo sapiens
  misc_RNA (1)...(19): siRNA sense strand
acaaccagaauuacugcua

SEQ ID NO: 721856 - RNA, 19 nt, Homo sapiens
  misc_RNA (1)...(19): siRNA sense strand
aagcucaacaucuauacuu

SEQ ID NO: 721857 - RNA, 19 nt, Homo sapiens
  misc_RNA (1)...(19): siRNA sense strand
gaucgaggugcuggacauu

SEQ ID NO: 721858 - RNA, 19 nt, Homo sapiens
  misc_RNA (1)...(19): siRNA sense strand
ggugcagagcuccaaugua

SEQ ID NO: 721859 - RNA, 19 nt, Homo sapiens
  misc_RNA (1)...(19): siRNA sense strand
gcgaguuggacuaugaaga

SEQ ID NO: 721860 - RNA, 19 nt, Homo sapiens
  misc_RNA (1)...(19): siRNA sense strand
cccaggcacucucgugauc

SEQ ID NO: 721861 - RNA, 19 nt, Homo sapiens
  misc_RNA (1)...(19): siRNA sense strand
cgaccaacccgucuacacu

SEQ ID NO: 721862 - RNA, 19 nt, Homo sapiens
  misc_RNA (1)...(19): siRNA sense strand
gaggugcuggacauuaaug

SEQ ID NO: 721863 - RNA, 19 nt, Homo sapiens
  misc_RNA (1)...(19): siRNA sense strand
agccugauaucaucuccaa

SEQ ID NO: 721864 - RNA, 19 nt, Homo sapiens
  misc_RNA (1)...(19): siRNA sense strand
caccuacguuucuaucaac

SEQ ID NO: 721865 - RNA, 19 nt, Homo sapiens
  misc_RNA (1)...(19): siRNA sense strand
gccucaagucuuccuuuaa

SEQ ID NO: 721866 - RNA, 19 nt, Homo sapiens
  misc_RNA (1)...(19): siRNA sense strand
gaggucguguacuccuuca

SEQ ID NO: 721867 - RNA, 19 nt, Homo sapiens
  misc_RNA (1)...(19): siRNA sense strand
ccaacuccuugcgcgacua

SEQ ID NO: 721868 - RNA, 19 nt, Homo sapiens
  misc_RNA (1)...(19): siRNA sense strand
aaagagaagaagcucaaca

SEQ ID NO: 721869 - RNA, 19 nt, Homo sapiens
  misc_RNA (1)...(19): siRNA sense strand
gugcguggcaacgaaauga

SEQ ID NO: 721870 - RNA, 19 nt, Homo sapiens
  misc_RNA (1)...(19): siRNA sense strand
acguuucuaucaacucuga

SEQ ID NO: 721871 - RNA, 19 nt, Homo sapiens
  misc_RNA (1)...(19): siRNA sense strand
caguaagucgauccaggua

SEQ ID NO: 721872 - RNA, 19 nt, Homo sapiens
  misc_RNA (1)...(19): siRNA sense strand
augacaaugugcccgcuuu

SEQ ID NO: 721873 - RNA, 19 nt, Homo sapiens
  misc_RNA (1)...(19): siRNA sense strand
gugcuggacauuaaugaca

SEQ ID NO: 721874 - RNA, 19 nt, Homo sapiens
  misc_RNA (1)...(19): siRNA sense strand
guaacgccacugucaacau

SEQ ID NO: 721875 - RNA, 19 nt, Homo sapiens
  misc_RNA (1)...(19): siRNA sense strand
cugagaacggcuacuugua

SEQ ID NO: 721876 - RNA, 19 nt, Homo sapiens
  misc_RNA (1)...(19): siRNA sense strand
gagcgucuucaccuacguu

SEQ ID NO: 721877 - RNA, 19 nt, Homo sapiens
  misc_RNA (1)...(19): siRNA sense strand
gugaggucguguacuccuu

SEQ ID NO: 721878 - RNA, 19 nt, Homo sapiens
  misc_RNA (1)...(19): siRNA sense strand
agaagaagcucaacaucua

SEQ ID NO: 721879 - RNA, 19 nt, Homo sapiens
  misc_RNA (1)...(19): siRNA sense strand
gaauaucgcugaagaucug

SEQ ID NO: 721880 - RNA, 19 nt, Homo sapiens
  misc_RNA (1)...(19): siRNA sense strand
gugcagagcuccaauguac

SEQ ID NO: 721881 - RNA, 19 nt, Homo sapiens
  misc_RNA (1)...(19): siRNA sense strand
gcaggaacauggcacuuuc

SEQ ID NO: 721882 - RNA, 19 nt, Homo sapiens
  misc_RNA (1)...(19): siRNA sense strand
guacaagugucggauguga

SEQ ID NO: 721883 - RNA, 19 nt, Homo sapiens
  misc_RNA (1)...(19): siRNA sense strand
gaaaauagaccgcgaacaa

SEQ ID NO: 721884 - RNA, 19 nt, Homo sapiens
  misc_RNA (1)...(19): siRNA sense strand
gcaacgaaaugaaccucuu

SEQ ID NO: 721885 - RNA, 19 nt, Homo sapiens
  misc_RNA (1)...(19): siRNA sense strand
gaauuacugcuaucaggua

SEQ ID NO: 721886 - RNA, 19 nt, Homo sapiens
  misc_RNA (1)...(19): siRNA sense strand
gcuccaauguacccaguaa

SEQ ID NO: 721887 - RNA, 19 nt, Homo sapiens
  misc_RNA (1)...(19): siRNA sense strand
caaccagaauuacugcuau

SEQ ID NO: 721888 - RNA, 19 nt, Homo sapiens
  misc_RNA (1)...(19): siRNA sense strand
ggacuccaaugacaaugug

SEQ ID NO: 721889 - RNA, 19 nt, Homo sapiens
  misc_RNA (1)...(19): siRNA sense strand
gcaugagcgucuucaccua

SEQ ID NO: 721890 - RNA, 19 nt, Homo sapiens
  misc_RNA (1)...(19): siRNA sense strand
guaagucgauccagguaca

SEQ ID NO: 721891 - RNA, 19 nt, Homo sapiens
  misc_RNA (1)...(19): siRNA sense strand
gcggcgaguuggacuauga

SEQ ID NO: 721892 - RNA, 19 nt, Homo sapiens
  misc_RNA (1)...(19): siRNA sense strand
gaagaaacucagcaaguca

SEQ ID NO: 721893 - RNA, 19 nt, Homo sapiens
  misc_RNA (1)...(19): siRNA sense strand
gaucugggucuggacauua

SEQ ID NO: 721894 - RNA, 19 nt, Homo sapiens
  misc_RNA (1)...(19): siRNA sense strand
ggagguaagcggcgaguug

SEQ ID NO: 721895 - RNA, 19 nt, Homo sapiens
  misc_RNA (1)...(19): siRNA sense strand
ucgaggugcuggacauuaa

SEQ ID NO: 721896 - RNA, 19 nt, Homo sapiens
  misc_RNA (1)...(19): siRNA sense strand
uaacgccacugucaacauc

SEQ ID NO: 721897 - RNA, 19 nt, Homo sapiens
  misc_RNA (1)...(19): siRNA sense strand
gagaagaagcucaacaucu

SEQ ID NO: 721898 - RNA, 19 nt, Homo sapiens
  misc_RNA (1)...(19): siRNA sense strand
gaagaagcucaacaucuau

SEQ ID NO: 721899 - RNA, 19 nt, Homo sapiens
  misc_RNA (1)...(19): siRNA sense strand
ccucaagucuuccuuuaag

SEQ ID NO: 721900 - RNA, 19 nt, Homo sapiens
  misc_RNA (1)...(19): siRNA sense strand
gcaagaagaaacucagcaa

SEQ ID NO: 721901 - RNA, 19 nt, Homo sapiens
  misc_RNA (1)...(19): siRNA sense strand
gcgaacaaaucugcaaaca

SEQ ID NO: 721902 - RNA, 19 nt, Homo sapiens
  misc_RNA (1)...(19): siRNA sense strand
ucaccuacguuucuaucaa

SEQ ID NO: 721903 - RNA, 19 nt, Homo sapiens
  misc_RNA (1)...(19): siRNA sense strand
caacgaaaugaaccucuuu

SEQ ID NO: 721904 - RNA, 19 nt, Homo sapiens
  misc_RNA (1)...(19): siRNA sense strand
gaccugauguuucuuaagc

SEQ ID NO: 721905 - RNA, 19 nt, Homo sapiens
  misc_RNA (1)...(19): siRNA sense strand
gaugguggaaggagucuuu

SEQ ID NO: 721906 - RNA, 19 nt, Homo sapiens
  misc_RNA (1)...(19): siRNA sense strand
gcacggcccuacucaccau

SEQ ID NO: 721907 - RNA, 19 nt, Homo sapiens
  misc_RNA (1)...(19): siRNA sense strand
agaagaaacucagcaaguc

SEQ ID NO: 721908 - RNA, 19 nt, Homo sapiens
  misc_RNA (1)...(19): siRNA sense strand
ugaaggaagcggugaguga

SEQ ID NO: 721909 - RNA, 19 nt, Homo sapiens
  misc_RNA (1)...(19): siRNA sense strand
cgccucaagucuuccuuua

SEQ ID NO: 721910 - RNA, 19 nt, Homo sapiens
  misc_RNA (1)...(19): siRNA sense strand
cuuaugagcuggugaucga

SEQ ID NO: 721911 - RNA, 19 nt, Homo sapiens
  misc_RNA (1)...(19): siRNA sense strand
caagaccgaccugauguuu

SEQ ID NO: 721912 - RNA, 19 nt, Homo sapiens
  misc_RNA (1)...(19): siRNA sense strand
guacggacacugagcacaa

SEQ ID NO: 721913 - RNA, 19 nt, Homo sapiens
  misc_RNA (1)...(19): siRNA sense strand
agaccgaccugauguuucu

SEQ ID NO: 721914 - RNA, 19 nt, Homo sapiens
  misc_RNA (1)...(19): siRNA sense strand
gggccaucgucaccgguua

SEQ ID NO: 721915 - RNA, 19 nt, Homo sapiens
  misc_RNA (1)...(19): siRNA sense strand
ccagcagccugauaucauc

SEQ ID NO: 721916 - RNA, 19 nt, Homo sapiens
  misc_RNA (1)...(19): siRNA sense strand
gcacugugguggcccuuuu

SEQ ID NO: 721917 - RNA, 19 nt, Homo sapiens
  misc_RNA (1)...(19): siRNA sense strand
gaauuacuacaccaucguu

SEQ ID NO: 721918 - RNA, 19 nt, Homo sapiens
  misc_RNA (1)...(19): siRNA sense strand
aaauagaccgcgaacaaau

SEQ ID NO: 721919 - RNA, 19 nt, Homo sapiens
  misc_RNA (1)...(19): siRNA sense strand
cagcaagucagacaucaug

SEQ ID NO: 721920 - RNA, 19 nt, Homo sapiens
  misc_RNA (1)...(19): siRNA sense strand
ugacaacgcgccagagauc

SEQ ID NO: 721921 - RNA, 19 nt, Homo sapiens
  misc_RNA (1)...(19): siRNA sense strand
cgacguguaugugacugaa

SEQ ID NO: 721922 - RNA, 19 nt, Homo sapiens
  misc_RNA (1)...(19): siRNA sense strand
gaguuggacuaugaagaga

SEQ ID NO: 721923 - RNA, 19 nt, Homo sapiens
  misc_RNA (1)...(19): siRNA sense strand
gggaauaucgcugaagauc

SEQ ID NO: 721924 - RNA, 19 nt, Homo sapiens
  misc_RNA (1)...(19): siRNA sense strand
gaacggugaggucguguac

SEQ ID NO: 721925 - RNA, 19 nt, Homo sapiens
  misc_RNA (1)...(19): siRNA sense strand
aagaagcucaacaucuaua

SEQ ID NO: 721926 - RNA, 19 nt, Homo sapiens
  misc_RNA (1)...(19): siRNA sense strand
ccugcgcucuccaccagua

SEQ ID NO: 721927 - RNA, 19 nt, Homo sapiens
  misc_RNA (1)...(19): siRNA sense strand
gcugguaacgccacuguca

SEQ ID NO: 721928 - RNA, 19 nt, Homo sapiens
  misc_RNA (1)...(19): siRNA sense strand
gcaggugcagugcgagcua

SEQ ID NO: 721929 - RNA, 19 nt, Homo sapiens
  misc_RNA (1)...(19): siRNA sense strand
ggaauaucgcugaagaucu

SEQ ID NO: 721930 - RNA, 19 nt, Homo sapiens
  misc_RNA (1)...(19): siRNA sense strand
gggaggaguaggagaagga

SEQ ID NO: 721931 - RNA, 19 nt, Homo sapiens
  misc_RNA (1)...(19): siRNA sense strand
ugagaacggcuacuuguac

SEQ ID NO: 721932 - RNA, 19 nt, Homo sapiens
  misc_RNA (1)...(19): siRNA sense strand
gcucaacaucuauacuugu

SEQ ID NO: 721933 - RNA, 19 nt, Homo sapiens
  misc_RNA (1)...(19): siRNA sense strand
cgaguuggacuaugaagag

SEQ ID NO: 721934 - RNA, 19 nt, Homo sapiens
  misc_RNA (1)...(19): siRNA sense strand
gaccagcagccugauauca

SEQ ID NO: 721935 - RNA, 19 nt, Homo sapiens
  misc_RNA (1)...(19): siRNA sense strand
aaacucagcaagucagaca

SEQ ID NO: 721936 - RNA, 19 nt, Homo sapiens
  misc_RNA (1)...(19): siRNA sense strand
aagaagaaacucagcaagu

SEQ ID NO: 721937 - RNA, 19 nt, Homo sapiens
  misc_RNA (1)...(19): siRNA sense strand
acuaugagcagcugaagga

SEQ ID NO: 721938 - RNA, 19 nt, Homo sapiens
  misc_RNA (1)...(19): siRNA sense strand
cuacguuucuaucaacucu

SEQ ID NO: 721939 - RNA, 19 nt, Homo sapiens
  misc_RNA (1)...(19): siRNA sense strand
ugcgaguacuggaugcuaa

SEQ ID NO: 721940 - RNA, 19 nt, Homo sapiens
  misc_RNA (1)...(19): siRNA sense strand
gaguacuggaugcuaauga

SEQ ID NO: 721941 - RNA, 19 nt, Homo sapiens
  misc_RNA (1)...(19): siRNA sense strand
augagcagcugaaggacuu

SEQ ID NO: 721942 - RNA, 19 nt, Homo sapiens
  misc_RNA (1)...(19): siRNA sense strand
guacgugaacgagaaaaua

SEQ ID NO: 721943 - RNA, 19 nt, Homo sapiens
  misc_RNA (1)...(19): siRNA sense strand
gccaagaccgaccugaugu

SEQ ID NO: 721944 - RNA, 19 nt, Homo sapiens
  misc_RNA (1)...(19): siRNA sense strand
cagcuugccuacucuaucc

SEQ ID NO: 721945 - RNA, 19 nt, Homo sapiens
  misc_RNA (1)...(19): siRNA sense strand
ccgaccugauguuucuuaa

SEQ ID NO: 721946 - RNA, 19 nt, Homo sapiens
  misc_RNA (1)...(19): siRNA sense strand
gcacuuucguggggaauau

SEQ ID NO: 721947 - RNA, 19 nt, Homo sapiens
  misc_RNA (1)...(19): siRNA sense strand
ccaagaccgaccugauguu

SEQ ID NO: 721948 - RNA, 19 nt, Homo sapiens
  misc_RNA (1)...(19): siRNA sense strand
acaaccagaauuacugcua

SEQ ID NO: 721949 - RNA, 19 nt, Homo sapiens
  misc_RNA (1)...(19): siRNA sense strand
aagcucaacaucuauacuu

SEQ ID NO: 721950 - RNA, 19 nt, Homo sapiens
  misc_RNA (1)...(19): siRNA sense strand
gaucgaggugcuggacauu

SEQ ID NO: 721951 - RNA, 19 nt, Homo sapiens
  misc_RNA (1)...(19): siRNA sense strand
ggugcagagcuccaaugua

SEQ ID NO: 721952 - RNA, 19 nt, Homo sapiens
  misc_RNA (1)...(19): siRNA sense strand
gcgaguuggacuaugaaga

SEQ ID NO: 721953 - RNA, 19 nt, Homo sapiens
  misc_RNA (1)...(19): siRNA sense strand
cccaggcacucucgugauc

SEQ ID NO: 721954 - RNA, 19 nt, Homo sapiens
  misc_RNA (1)...(19): siRNA sense strand
cgaccaacccgucuacacu

SEQ ID NO: 721955 - RNA, 19 nt, Homo sapiens
  misc_RNA (1)...(19): siRNA sense strand
gaggugcuggacauuaaug

SEQ ID NO: 721956 - RNA, 19 nt, Homo sapiens
  misc_RNA (1)...(19): siRNA sense strand
agccugauaucaucuccaa

SEQ ID NO: 721957 - RNA, 19 nt, Homo sapiens
  misc_RNA (1)...(19): siRNA sense strand
caccuacguuucuaucaac

SEQ ID NO: 721958 - RNA, 19 nt, Homo sapiens
  misc_RNA (1)...(19): siRNA sense strand
gccucaagucuuccuuuaa

SEQ ID NO: 721959 - RNA, 19 nt, Homo sapiens
  misc_RNA (1)...(19): siRNA sense strand
gaggucguguacuccuuca

SEQ ID NO: 721960 - RNA, 19 nt, Homo sapiens
  misc_RNA (1)...(19): siRNA sense strand
ccaacuccuugcgcgacua

SEQ ID NO: 721961 - RNA, 19 nt, Homo sapiens
  misc_RNA (1)...(19): siRNA sense strand
aaagagaagaagcucaaca

SEQ ID NO: 721962 - RNA, 19 nt, Homo sapiens
  misc_RNA (1)...(19): siRNA sense strand
gugcguggcaacgaaauga

SEQ ID NO: 721963 - RNA, 19 nt, Homo sapiens
  misc_RNA (1)...(19): siRNA sense strand
acguuucuaucaacucuga

SEQ ID NO: 721964 - RNA, 19 nt, Homo sapiens
  misc_RNA (1)...(19): siRNA sense strand
caguaagucgauccaggua

SEQ ID NO: 721965 - RNA, 19 nt, Homo sapiens
  misc_RNA (1)...(19): siRNA sense strand
augacaaugugcccgcuuu

SEQ ID NO: 721966 - RNA, 19 nt, Homo sapiens
  misc_RNA (1)...(19): siRNA sense strand
gugcuggacauuaaugaca

SEQ ID NO: 721967 - RNA, 19 nt, Homo sapiens
  misc_RNA (1)...(19): siRNA sense strand
guaacgccacugucaacau

SEQ ID NO: 721968 - RNA, 19 nt, Homo sapiens
  misc_RNA (1)...(19): siRNA sense strand
cugagaacggcuacuugua

SEQ ID NO: 721969 - RNA, 19 nt, Homo sapiens
  misc_RNA (1)...(19): siRNA sense strand
gagcgucuucaccuacguu

SEQ ID NO: 721970 - RNA, 19 nt, Homo sapiens
  misc_RNA (1)...(19): siRNA sense strand
gugaggucguguacuccuu

SEQ ID NO: 721971 - RNA, 19 nt, Homo sapiens
  misc_RNA (1)...(19): siRNA sense strand
gcacauggauuucuuauua

SEQ ID NO: 721972 - RNA, 19 nt, Homo sapiens
  misc_RNA (1)...(19): siRNA sense strand
ggacagaguaucauaauua

SEQ ID NO: 721973 - RNA, 19 nt, Homo sapiens
  misc_RNA (1)...(19): siRNA sense strand
ccaaggaccucaaggcuua

SEQ ID NO: 721974 - RNA, 19 nt, Homo sapiens
  misc_RNA (1)...(19): siRNA sense strand
gcagaucagugaacagaaa

SEQ ID NO: 721975 - RNA, 19 nt, Homo sapiens
  misc_RNA (1)...(19): siRNA sense strand
gaaccagguaguauaauua

SEQ ID NO: 721976 - RNA, 19 nt, Homo sapiens
  misc_RNA (1)...(19): siRNA sense strand
gaaaggacccaguggagua

SEQ ID NO: 721977 - RNA, 19 nt, Homo sapiens
  misc_RNA (1)...(19): siRNA sense strand
gaaaggagaucagggacuu

SEQ ID NO: 721978 - RNA, 19 nt, Homo sapiens
  misc_RNA (1)...(19): siRNA sense strand
caacuuugcuucaagaaau

SEQ ID NO: 721979 - RNA, 19 nt, Homo sapiens
  misc_RNA (1)...(19): siRNA sense strand
ucagaaaggugaugaagga

SEQ ID NO: 721980 - RNA, 19 nt, Homo sapiens
  misc_RNA (1)...(19): siRNA sense strand
ggaauaugggcuuaaauuu

SEQ ID NO: 721981 - RNA, 19 nt, Homo sapiens
  misc_RNA (1)...(19): siRNA sense strand
gagagaggguuuccagguu

SEQ ID NO: 721982 - RNA, 19 nt, Homo sapiens
  misc_RNA (1)...(19): siRNA sense strand
aaagggugauggaggauua

SEQ ID NO: 721983 - RNA, 19 nt, Homo sapiens
  misc_RNA (1)...(19): siRNA sense strand
gaauaugggcuuaaauuuc

SEQ ID NO: 721984 - RNA, 19 nt, Homo sapiens
  misc_RNA (1)...(19): siRNA sense strand
gaacacuucaggucuauga

SEQ ID NO: 721985 - RNA, 19 nt, Homo sapiens
  misc_RNA (1)...(19): siRNA sense strand
ggaaggacacccaggauug

SEQ ID NO: 721986 - RNA, 19 nt, Homo sapiens
  misc_RNA (1)...(19): siRNA sense strand
ggaaauggagguauuaaag

SEQ ID NO: 721987 - RNA, 19 nt, Homo sapiens
  misc_RNA (1)...(19): siRNA sense strand
caaaggugauccugguauu

SEQ ID NO: 721988 - RNA, 19 nt, Homo sapiens
  misc_RNA (1)...(19): siRNA sense strand
gggaauaugggcuuaaauu

SEQ ID NO: 721989 - RNA, 19 nt, Homo sapiens
  misc_RNA (1)...(19): siRNA sense strand
aggcagagauggugaugua

SEQ ID NO: 721990 - RNA, 19 nt, Homo sapiens
  misc_RNA (1)...(19): siRNA sense strand
gcagaaggcucaggucaag

SEQ ID NO: 721991 - RNA, 19 nt, Homo sapiens
  misc_RNA (1)...(19): siRNA sense strand
caagggagaacguggauuu

SEQ ID NO: 721992 - RNA, 19 nt, Homo sapiens
  misc_RNA (1)...(19): siRNA sense strand
ugaaccagguaguauaauu

SEQ ID NO: 721993 - RNA, 19 nt, Homo sapiens
  misc_RNA (1)...(19): siRNA sense strand
gcugaaagcaggagacuug

SEQ ID NO: 721994 - RNA, 19 nt, Homo sapiens
  misc_RNA (1)...(19): siRNA sense strand
uauaggaccuccaggauca

SEQ ID NO: 721995 - RNA, 19 nt, Homo sapiens
  misc_RNA (1)...(19): siRNA sense strand
caccaggacuuccagguuu

SEQ ID NO: 721996 - RNA, 19 nt, Homo sapiens
  misc_RNA (1)...(19): siRNA sense strand
gaaaagaccaauugaugua

SEQ ID NO: 721997 - RNA, 19 nt, Homo sapiens
  misc_RNA (1)...(19): siRNA sense strand
gaacagaaaagaccaauug

SEQ ID NO: 721998 - RNA, 19 nt, Homo sapiens
  misc_RNA (1)...(19): siRNA sense strand
gcaaggagagccaggcaaa

SEQ ID NO: 721999 - RNA, 19 nt, Homo sapiens
  misc_RNA (1)...(19): siRNA sense strand
gaaggaccaccuggaauuu

SEQ ID NO: 722000 - RNA, 19 nt, Homo sapiens
  misc_RNA (1)...(19): siRNA sense strand
cgaauuagccgaugucaag

SEQ ID NO: 722001 - RNA, 19 nt, Homo sapiens
  misc_RNA (1)...(19): siRNA sense strand
gacuugaggacacgaauua

SEQ ID NO: 722002 - RNA, 19 nt, Homo sapiens
  misc_RNA (1)...(19): siRNA sense strand
caccaggacuccaggguaa

SEQ ID NO: 722003 - RNA, 19 nt, Homo sapiens
  misc_RNA (1)...(19): siRNA sense strand
caacuggucccaaaggauu

SEQ ID NO: 722004 - RNA, 19 nt, Homo sapiens
  misc_RNA (1)...(19): siRNA sense strand
aggauuaccuggacagaaa

SEQ ID NO: 722005 - RNA, 19 nt, Homo sapiens
  misc_RNA (1)...(19): siRNA sense strand
gaaccaggauuugcauuac

SEQ ID NO: 722006 - RNA, 19 nt, Homo sapiens
  misc_RNA (1)...(19): siRNA sense strand
gaaaugacuauucuuacug

SEQ ID NO: 722007 - RNA, 19 nt, Homo sapiens
  misc_RNA (1)...(19): siRNA sense strand
caauugauguagaguuuca

SEQ ID NO: 722008 - RNA, 19 nt, Homo sapiens
  misc_RNA (1)...(19): siRNA sense strand
gcaggugccucuggauuuc

SEQ ID NO: 722009 - RNA, 19 nt, Homo sapiens
  misc_RNA (1)...(19): siRNA sense strand
cggagcaccugguccuaua

SEQ ID NO: 722010 - RNA, 19 nt, Homo sapiens
  misc_RNA (1)...(19): siRNA sense strand
uggaagaauuggucuagaa

SEQ ID NO: 722011 - RNA, 19 nt, Homo sapiens
  misc_RNA (1)...(19): siRNA sense strand
cauuggaacugguauuuca

SEQ ID NO: 722012 - RNA, 19 nt, Homo sapiens
  misc_RNA (1)...(19): siRNA sense strand
aaagggugaugauggaauu

SEQ ID NO: 722013 - RNA, 19 nt, Homo sapiens
  misc_RNA (1)...(19): siRNA sense strand
ccuggaaccuccucuguug

SEQ ID NO: 722014 - RNA, 19 nt, Homo sapiens
  misc_RNA (1)...(19): siRNA sense strand
aaauggagguauuaaagga

SEQ ID NO: 722015 - RNA, 19 nt, Homo sapiens
  misc_RNA (1)...(19): siRNA sense strand
ggacagccaggucuuauag

SEQ ID NO: 722016 - RNA, 19 nt, Homo sapiens
  misc_RNA (1)...(19): siRNA sense strand
ucaggucuaugaaggcuuu

SEQ ID NO: 722017 - RNA, 19 nt, Homo sapiens
  misc_RNA (1)...(19): siRNA sense strand
agagaggguuuccagguuu

SEQ ID NO: 722018 - RNA, 19 nt, Homo sapiens
  misc_RNA (1)...(19): siRNA sense strand
ugaaccaggauuugcauua

SEQ ID NO: 722019 - RNA, 19 nt, Homo sapiens
  misc_RNA (1)...(19): siRNA sense strand
ggugaaccagguaguauaa

SEQ ID NO: 722020 - RNA, 19 nt, Homo sapiens
  misc_RNA (1)...(19): siRNA sense strand
gacaacggaugcaccacaa

SEQ ID NO: 722021 - RNA, 19 nt, Homo sapiens
  misc_RNA (1)...(19): siRNA sense strand
gagaggguuuccagguuug

SEQ ID NO: 722022 - RNA, 19 nt, Homo sapiens
  misc_RNA (1)...(19): siRNA sense strand
uggcuugccugguuugaaa

SEQ ID NO: 722023 - RNA, 19 nt, Homo sapiens
  misc_RNA (1)...(19): siRNA sense strand
cuaccuggcuugccugguu

SEQ ID NO: 722024 - RNA, 19 nt, Homo sapiens
  misc_RNA (1)...(19): siRNA sense strand
gaguggacaaccuggauua

SEQ ID NO: 722025 - RNA, 19 nt, Homo sapiens
  misc_RNA (1)...(19): siRNA sense strand
caaaucuucugggcucaaa

SEQ ID NO: 722026 - RNA, 19 nt, Homo sapiens
  misc_RNA (1)...(19): siRNA sense strand
gaugaaggaccaccuggaa

SEQ ID NO: 722027 - RNA, 19 nt, Homo sapiens
  misc_RNA (1)...(19): siRNA sense strand
gaaaauggccaaccaggaa

SEQ ID NO: 722028 - RNA, 19 nt, Homo sapiens
  misc_RNA (1)...(19): siRNA sense strand
ugaaggaccaccuggaauu

SEQ ID NO: 722029 - RNA, 19 nt, Homo sapiens
  misc_RNA (1)...(19): siRNA sense strand
gagcauccagccauucauu

SEQ ID NO: 722030 - RNA, 19 nt, Homo sapiens
  misc_RNA (1)...(19): siRNA sense strand
gaaauggagguauuaaagg

SEQ ID NO: 722031 - RNA, 19 nt, Homo sapiens
  misc_RNA (1)...(19): siRNA sense strand
ugggacaccuggaagaauu

SEQ ID NO: 722032 - RNA, 19 nt, Homo sapiens
  misc_RNA (1)...(19): siRNA sense strand
ggauccaggucagacuaua

SEQ ID NO: 722033 - RNA, 19 nt, Homo sapiens
  misc_RNA (1)...(19): siRNA sense strand
ggagagccugguggaauua

SEQ ID NO: 722034 - RNA, 19 nt, Homo sapiens
  misc_RNA (1)...(19): siRNA sense strand
ccagagcccaugccaauga

SEQ ID NO: 722035 - RNA, 19 nt, Homo sapiens
  misc_RNA (1)...(19): siRNA sense strand
caguaaaccucagucagaa

SEQ ID NO: 722036 - RNA, 19 nt, Homo sapiens
  misc_RNA (1)...(19): siRNA sense strand
ucaguaaaccucagucaga

SEQ ID NO: 722037 - RNA, 19 nt, Homo sapiens
  misc_RNA (1)...(19): siRNA sense strand
aaugaagggugacaaagga

SEQ ID NO: 722038 - RNA, 19 nt, Homo sapiens
  misc_RNA (1)...(19): siRNA sense strand
gcuggcaacuguagaugug

SEQ ID NO: 722039 - RNA, 19 nt, Homo sapiens
  misc_RNA (1)...(19): siRNA sense strand
gauccaggucagacuauaa

SEQ ID NO: 722040 - RNA, 19 nt, Homo sapiens
  misc_RNA (1)...(19): siRNA sense strand
aaagaccaauugauguaga

SEQ ID NO: 722041 - RNA, 19 nt, Homo sapiens
  misc_RNA (1)...(19): siRNA sense strand
ucagacauguucaguaaac

SEQ ID NO: 722042 - RNA, 19 nt, Homo sapiens
  misc_RNA (1)...(19): siRNA sense strand
uggauuaccugguccuuca

SEQ ID NO: 722043 - RNA, 19 nt, Homo sapiens
  misc_RNA (1)...(19): siRNA sense strand
uuacuggcccugagucuuu

SEQ ID NO: 722044 - RNA, 19 nt, Homo sapiens
  misc_RNA (1)...(19): siRNA sense strand
ugucaagugugcaugaaga

SEQ ID NO: 722045 - RNA, 19 nt, Homo sapiens
  misc_RNA (1)...(19): siRNA sense strand
ugguguaccuggucuuaaa

SEQ ID NO: 722046 - RNA, 19 nt, Homo sapiens
  misc_RNA (1)...(19): siRNA sense strand
gaaugaagggugacaaagg

SEQ ID NO: 722047 - RNA, 19 nt, Homo sapiens
  misc_RNA (1)...(19): siRNA sense strand
ccagguaguauaauuaugu

SEQ ID NO: 722048 - RNA, 19 nt, Homo sapiens
  misc_RNA (1)...(19): siRNA sense strand
gaugucaagugugcaugaa

SEQ ID NO: 722049 - RNA, 19 nt, Homo sapiens
  misc_RNA (1)...(19): siRNA sense strand
caacggaugcaccacaaug

SEQ ID NO: 722050 - RNA, 19 nt, Homo sapiens
  misc_RNA (1)...(19): siRNA sense strand
gaaaggcgacaaaggugau

SEQ ID NO: 722051 - RNA, 19 nt, Homo sapiens
  misc_RNA (1)...(19): siRNA sense strand
aaaggaaccaucggugaua

SEQ ID NO: 722052 - RNA, 19 nt, Homo sapiens
  misc_RNA (1)...(19): siRNA sense strand
ugagaagggugagcaagga

SEQ ID NO: 722053 - RNA, 19 nt, Homo sapiens
  misc_RNA (1)...(19): siRNA sense strand
accaauugauguagaguuu

SEQ ID NO: 722054 - RNA, 19 nt, Homo sapiens
  misc_RNA (1)...(19): siRNA sense strand
caaaggagaaccagguauc

SEQ ID NO: 722055 - RNA, 19 nt, Homo sapiens
  misc_RNA (1)...(19): siRNA sense strand
gggaacacuucaggucuau

SEQ ID NO: 722056 - RNA, 19 nt, Homo sapiens
  misc_RNA (1)...(19): siRNA sense strand
ccugguauuucaagcauug

SEQ ID NO: 722057 - RNA, 19 nt, Homo sapiens
  misc_RNA (1)...(19): siRNA sense strand
caccaggucccaaagguaa

SEQ ID NO: 722058 - RNA, 19 nt, Homo sapiens
  misc_RNA (1)...(19): siRNA sense strand
caaaggauuaccaggcauu

SEQ ID NO: 722059 - RNA, 19 nt, Homo sapiens
  misc_RNA (1)...(19): siRNA sense strand
ggaauaccagguccuaaag

SEQ ID NO: 722060 - RNA, 19 nt, Homo sapiens
  misc_RNA (1)...(19): siRNA sense strand
aggagagccugguggaauu

SEQ ID NO: 722061 - RNA, 19 nt, Homo sapiens
  misc_RNA (1)...(19): siRNA sense strand
ugugggagauccugguuug

SEQ ID NO: 722062 - RNA, 19 nt, Homo sapiens
  misc_RNA (1)...(19): siRNA sense strand
caaagguucugugggagau

SEQ ID NO: 722063 - RNA, 19 nt, Homo sapiens
  misc_RNA (1)...(19): siRNA sense strand
uggacaaccuggaccaaug

SEQ ID NO: 722064 - RNA, 19 nt, Homo sapiens
  misc_RNA (1)...(19): siRNA sense strand
gggugaaccagguaguaua

SEQ ID NO: 722065 - RNA, 19 nt, Homo sapiens
  misc_RNA (1)...(19): siRNA sense strand
cagcugccuucgucgcuuu

SEQ ID NO: 722066 - RNA, 19 nt, Homo sapiens
  misc_RNA (1)...(19): siRNA sense strand
ggaagaauuggucuagaag

SEQ ID NO: 722067 - RNA, 19 nt, Homo sapiens
  misc_RNA (1)...(19): siRNA sense strand
gcaaaggagaaccagguau

SEQ ID NO: 722068 - RNA, 19 nt, Homo sapiens
  misc_RNA (1)...(19): siRNA sense strand
uacaagguguggcaggaaa

SEQ ID NO: 722069 - RNA, 19 nt, Homo sapiens
  misc_RNA (1)...(19): siRNA sense strand
gagguaaaccaggcaaaga

SEQ ID NO: 722070 - RNA, 19 nt, Homo sapiens
  misc_RNA (1)...(19): siRNA sense strand
gggcagaucagugaacaga

SEQ ID NO: 722071 - RNA, 19 nt, Homo sapiens
  misc_RNA (1)...(19): siRNA sense strand
gcacauggauuucuuauua

SEQ ID NO: 722072 - RNA, 19 nt, Homo sapiens
  misc_RNA (1)...(19): siRNA sense strand
ggacagaguaucauaauua

SEQ ID NO: 722073 - RNA, 19 nt, Homo sapiens
  misc_RNA (1)...(19): siRNA sense strand
ccaaggaccucaaggcuua

SEQ ID NO: 722074 - RNA, 19 nt, Homo sapiens
  misc_RNA (1)...(19): siRNA sense strand
gcagaucagugaacagaaa

SEQ ID NO: 722075 - RNA, 19 nt, Homo sapiens
  misc_RNA (1)...(19): siRNA sense strand
gaaccagguaguauaauua

SEQ ID NO: 722076 - RNA, 19 nt, Homo sapiens
  misc_RNA (1)...(19): siRNA sense strand
gaaaggacccaguggagua

SEQ ID NO: 722077 - RNA, 19 nt, Homo sapiens
  misc_RNA (1)...(19): siRNA sense strand
gaaaggagaucagggacuu

SEQ ID NO: 722078 - RNA, 19 nt, Homo sapiens
  misc_RNA (1)...(19): siRNA sense strand
caacuuugcuucaagaaau

SEQ ID NO: 722079 - RNA, 19 nt, Homo sapiens
  misc_RNA (1)...(19): siRNA sense strand
ucagaaaggugaugaagga

SEQ ID NO: 722080 - RNA, 19 nt, Homo sapiens
  misc_RNA (1)...(19): siRNA sense strand
ggaauaugggcuuaaauuu

SEQ ID NO: 722081 - RNA, 19 nt, Homo sapiens
  misc_RNA (1)...(19): siRNA sense strand
gagagaggguuuccagguu

SEQ ID NO: 722082 - RNA, 19 nt, Homo sapiens
  misc_RNA (1)...(19): siRNA sense strand
aaagggugauggaggauua

SEQ ID NO: 722083 - RNA, 19 nt, Homo sapiens
  misc_RNA (1)...(19): siRNA sense strand
gaauaugggcuuaaauuuc

SEQ ID NO: 722084 - RNA, 19 nt, Homo sapiens
  misc_RNA (1)...(19): siRNA sense strand
gaacacuucaggucuauga

SEQ ID NO: 722085 - RNA, 19 nt, Homo sapiens
  misc_RNA (1)...(19): siRNA sense strand
ggaaggacacccaggauug

SEQ ID NO: 722086 - RNA, 19 nt, Homo sapiens
  misc_RNA (1)...(19): siRNA sense strand
ggaaauggagguauuaaag

SEQ ID NO: 722087 - RNA, 19 nt, Homo sapiens
  misc_RNA (1)...(19): siRNA sense strand
caaaggugauccugguauu

SEQ ID NO: 722088 - RNA, 19 nt, Homo sapiens
  misc_RNA (1)...(19): siRNA sense strand
gggaauaugggcuuaaauu

SEQ ID NO: 722089 - RNA, 19 nt, Homo sapiens
  misc_RNA (1)...(19): siRNA sense strand
aggcagagauggugaugua

SEQ ID NO: 722090 - RNA, 19 nt, Homo sapiens
  misc_RNA (1)...(19): siRNA sense strand
gcagaaggcucaggucaag

SEQ ID NO: 722091 - RNA, 19 nt, Homo sapiens
  misc_RNA (1)...(19): siRNA sense strand
caagggagaacguggauuu

SEQ ID NO: 722092 - RNA, 19 nt, Homo sapiens
  misc_RNA (1)...(19): siRNA sense strand
ugaaccagguaguauaauu

SEQ ID NO: 722093 - RNA, 19 nt, Homo sapiens
  misc_RNA (1)...(19): siRNA sense strand
gcugaaagcaggagacuug

SEQ ID NO: 722094 - RNA, 19 nt, Homo sapiens
  misc_RNA (1)...(19): siRNA sense strand
uauaggaccuccaggauca

SEQ ID NO: 722095 - RNA, 19 nt, Homo sapiens
  misc_RNA (1)...(19): siRNA sense strand
caccaggacuuccagguuu

SEQ ID NO: 722096 - RNA, 19 nt, Homo sapiens
  misc_RNA (1)...(19): siRNA sense strand
gaaaagaccaauugaugua

SEQ ID NO: 722097 - RNA, 19 nt, Homo sapiens
  misc_RNA (1)...(19): siRNA sense strand
gaacagaaaagaccaauug

SEQ ID NO: 722098 - RNA, 19 nt, Homo sapiens
  misc_RNA (1)...(19): siRNA sense strand
gcaaggagagccaggcaaa

SEQ ID NO: 722099 - RNA, 19 nt, Homo sapiens
  misc_RNA (1)...(19): siRNA sense strand
gaaggaccaccuggaauuu

SEQ ID NO: 722100 - RNA, 19 nt, Homo sapiens
  misc_RNA (1)...(19): siRNA sense strand
cgaauuagccgaugucaag

SEQ ID NO: 722101 - RNA, 19 nt, Homo sapiens
  misc_RNA (1)...(19): siRNA sense strand
gacuugaggacacgaauua

SEQ ID NO: 722102 - RNA, 19 nt, Homo sapiens
  misc_RNA (1)...(19): siRNA sense strand
caccaggacuccaggguaa

SEQ ID NO: 722103 - RNA, 19 nt, Homo sapiens
  misc_RNA (1)...(19): siRNA sense strand
caacuggucccaaaggauu

SEQ ID NO: 722104 - RNA, 19 nt, Homo sapiens
  misc_RNA (1)...(19): siRNA sense strand
aggauuaccuggacagaaa

SEQ ID NO: 722105 - RNA, 19 nt, Homo sapiens
  misc_RNA (1)...(19): siRNA sense strand
gaaccaggauuugcauuac

SEQ ID NO: 722106 - RNA, 19 nt, Homo sapiens
  misc_RNA (1)...(19): siRNA sense strand
gaaaugacuauucuuacug

SEQ ID NO: 722107 - RNA, 19 nt, Homo sapiens
  misc_RNA (1)...(19): siRNA sense strand
caauugauguagaguuuca

SEQ ID NO: 722108 - RNA, 19 nt, Homo sapiens
  misc_RNA (1)...(19): siRNA sense strand
gcaggugccucuggauuuc

SEQ ID NO: 722109 - RNA, 19 nt, Homo sapiens
  misc_RNA (1)...(19): siRNA sense strand
cggagcaccugguccuaua

SEQ ID NO: 722110 - RNA, 19 nt, Homo sapiens
  misc_RNA (1)...(19): siRNA sense strand
uggaagaauuggucuagaa

SEQ ID NO: 722111 - RNA, 19 nt, Homo sapiens
  misc_RNA (1)...(19): siRNA sense strand
cauuggaacugguauuuca

SEQ ID NO: 722112 - RNA, 19 nt, Homo sapiens
  misc_RNA (1)...(19): siRNA sense strand
aaagggugaugauggaauu

SEQ ID NO: 722113 - RNA, 19 nt, Homo sapiens
  misc_RNA (1)...(19): siRNA sense strand
ccuggaaccuccucuguug

SEQ ID NO: 722114 - RNA, 19 nt, Homo sapiens
  misc_RNA (1)...(19): siRNA sense strand
aaauggagguauuaaagga

SEQ ID NO: 722115 - RNA, 19 nt, Homo sapiens
  misc_RNA (1)...(19): siRNA sense strand
ggacagccaggucuuauag

SEQ ID NO: 722116 - RNA, 19 nt, Homo sapiens
  misc_RNA (1)...(19): siRNA sense strand
ucaggucuaugaaggcuuu

SEQ ID NO: 722117 - RNA, 19 nt, Homo sapiens
  misc_RNA (1)...(19): siRNA sense strand
agagaggguuuccagguuu

SEQ ID NO: 722118 - RNA, 19 nt, Homo sapiens
  misc_RNA (1)...(19): siRNA sense strand
ugaaccaggauuugcauua

SEQ ID NO: 722119 - RNA, 19 nt, Homo sapiens
  misc_RNA (1)...(19): siRNA sense strand
ggugaaccagguaguauaa

SEQ ID NO: 722120 - RNA, 19 nt, Homo sapiens
  misc_RNA (1)...(19): siRNA sense strand
gacaacggaugcaccacaa

SEQ ID NO: 722121 - RNA, 19 nt, Homo sapiens
  misc_RNA (1)...(19): siRNA sense strand
gagaggguuuccagguuug

SEQ ID NO: 722122 - RNA, 19 nt, Homo sapiens
  misc_RNA (1)...(19): siRNA sense strand
uggcuugccugguuugaaa

SEQ ID NO: 722123 - RNA, 19 nt, Homo sapiens
  misc_RNA (1)...(19): siRNA sense strand
cuaccuggcuugccugguu

SEQ ID NO: 722124 - RNA, 19 nt, Homo sapiens
  misc_RNA (1)...(19): siRNA sense strand
gaguggacaaccuggauua

SEQ ID NO: 722125 - RNA, 19 nt, Homo sapiens
  misc_RNA (1)...(19): siRNA sense strand
caaaucuucugggcucaaa

SEQ ID NO: 722126 - RNA, 19 nt, Homo sapiens
  misc_RNA (1)...(19): siRNA sense strand
gaugaaggaccaccuggaa

SEQ ID NO: 722127 - RNA, 19 nt, Homo sapiens
  misc_RNA (1)...(19): siRNA sense strand
gaaaauggccaaccaggaa

SEQ ID NO: 722128 - RNA, 19 nt, Homo sapiens
  misc_RNA (1)...(19): siRNA sense strand
ugaaggaccaccuggaauu

SEQ ID NO: 722129 - RNA, 19 nt, Homo sapiens
  misc_RNA (1)...(19): siRNA sense strand
gagcauccagccauucauu

SEQ ID NO: 722130 - RNA, 19 nt, Homo sapiens
  misc_RNA (1)...(19): siRNA sense strand
gaaauggagguauuaaagg

SEQ ID NO: 722131 - RNA, 19 nt, Homo sapiens
  misc_RNA (1)...(19): siRNA sense strand
ugggacaccuggaagaauu

SEQ ID NO: 722132 - RNA, 19 nt, Homo sapiens
  misc_RNA (1)...(19): siRNA sense strand
ggauccaggucagacuaua

SEQ ID NO: 722133 - RNA, 19 nt, Homo sapiens
  misc_RNA (1)...(19): siRNA sense strand
ggagagccugguggaauua

SEQ ID NO: 722134 - RNA, 19 nt, Homo sapiens
  misc_RNA (1)...(19): siRNA sense strand
ccagagcccaugccaauga

SEQ ID NO: 722135 - RNA, 19 nt, Homo sapiens
  misc_RNA (1)...(19): siRNA sense strand
caguaaaccucagucagaa

SEQ ID NO: 722136 - RNA, 19 nt, Homo sapiens
  misc_RNA (1)...(19): siRNA sense strand
ucaguaaaccucagucaga

SEQ ID NO: 722137 - RNA, 19 nt, Homo sapiens
  misc_RNA (1)...(19): siRNA sense strand
aaugaagggugacaaagga

SEQ ID NO: 722138 - RNA, 19 nt, Homo sapiens
  misc_RNA (1)...(19): siRNA sense strand
gcuggcaacuguagaugug

SEQ ID NO: 722139 - RNA, 19 nt, Homo sapiens
  misc_RNA (1)...(19): siRNA sense strand
gauccaggucagacuauaa

SEQ ID NO: 722140 - RNA, 19 nt, Homo sapiens
  misc_RNA (1)...(19): siRNA sense strand
aaagaccaauugauguaga

SEQ ID NO: 722141 - RNA, 19 nt, Homo sapiens
  misc_RNA (1)...(19): siRNA sense strand
ucagacauguucaguaaac

SEQ ID NO: 722142 - RNA, 19 nt, Homo sapiens
  misc_RNA (1)...(19): siRNA sense strand
uggauuaccugguccuuca

SEQ ID NO: 722143 - RNA, 19 nt, Homo sapiens
  misc_RNA (1)...(19): siRNA sense strand
uuacuggcccugagucuuu

SEQ ID NO: 722144 - RNA, 19 nt, Homo sapiens
  misc_RNA (1)...(19): siRNA sense strand
ugucaagugugcaugaaga

SEQ ID NO: 722145 - RNA, 19 nt, Homo sapiens
  misc_RNA (1)...(19): siRNA sense strand
ugguguaccuggucuuaaa

SEQ ID NO: 722146 - RNA, 19 nt, Homo sapiens
  misc_RNA (1)...(19): siRNA sense strand
gaaugaagggugacaaagg

SEQ ID NO: 722147 - RNA, 19 nt, Homo sapiens
  misc_RNA (1)...(19): siRNA sense strand
ccagguaguauaauuaugu

SEQ ID NO: 722148 - RNA, 19 nt, Homo sapiens
  misc_RNA (1)...(19): siRNA sense strand
gaugucaagugugcaugaa

SEQ ID NO: 722149 - RNA, 19 nt, Homo sapiens
  misc_RNA (1)...(19): siRNA sense strand
caacggaugcaccacaaug

SEQ ID NO: 722150 - RNA, 19 nt, Homo sapiens
  misc_RNA (1)...(19): siRNA sense strand
gaaaggcgacaaaggugau

SEQ ID NO: 722151 - RNA, 19 nt, Homo sapiens
  misc_RNA (1)...(19): siRNA sense strand
aaaggaaccaucggugaua

SEQ ID NO: 722152 - RNA, 19 nt, Homo sapiens
  misc_RNA (1)...(19): siRNA sense strand
ugagaagggugagcaagga

SEQ ID NO: 722153 - RNA, 19 nt, Homo sapiens
  misc_RNA (1)...(19): siRNA sense strand
accaauugauguagaguuu

SEQ ID NO: 722154 - RNA, 19 nt, Homo sapiens
  misc_RNA (1)...(19): siRNA sense strand
caaaggagaaccagguauc

SEQ ID NO: 722155 - RNA, 19 nt, Homo sapiens
  misc_RNA (1)...(19): siRNA sense strand
gggaacacuucaggucuau

SEQ ID NO: 722156 - RNA, 19 nt, Homo sapiens
  misc_RNA (1)...(19): siRNA sense strand
ccugguauuucaagcauug

SEQ ID NO: 722157 - RNA, 19 nt, Homo sapiens
  misc_RNA (1)...(19): siRNA sense strand
caccaggucccaaagguaa

SEQ ID NO: 722158 - RNA, 19 nt, Homo sapiens
  misc_RNA (1)...(19): siRNA sense strand
caaaggauuaccaggcauu

SEQ ID NO: 722159 - RNA, 19 nt, Homo sapiens
  misc_RNA (1)...(19): siRNA sense strand
ggaauaccagguccuaaag

SEQ ID NO: 722160 - RNA, 19 nt, Homo sapiens
  misc_RNA (1)...(19): siRNA sense strand
aggagagccugguggaauu

SEQ ID NO: 722161 - RNA, 19 nt, Homo sapiens
  misc_RNA (1)...(19): siRNA sense strand
ugugggagauccugguuug

SEQ ID NO: 722162 - RNA, 19 nt, Homo sapiens
  misc_RNA (1)...(19): siRNA sense strand
caaagguucugugggagau

SEQ ID NO: 722163 - RNA, 19 nt, Homo sapiens
  misc_RNA (1)...(19): siRNA sense strand
uggacaaccuggaccaaug

SEQ ID NO: 722164 - RNA, 19 nt, Homo sapiens
  misc_RNA (1)...(19): siRNA sense strand
gggugaaccagguaguaua

SEQ ID NO: 722165 - RNA, 19 nt, Homo sapiens
  misc_RNA (1)...(19): siRNA sense strand
cagcugccuucgucgcuuu

SEQ ID NO: 722166 - RNA, 19 nt, Homo sapiens
  misc_RNA (1)...(19): siRNA sense strand
ggaagaauuggucuagaag

SEQ ID NO: 722167 - RNA, 19 nt, Homo sapiens
  misc_RNA (1)...(19): siRNA sense strand
gcaaaggagaaccagguau

SEQ ID NO: 722168 - RNA, 19 nt, Homo sapiens
  misc_RNA (1)...(19): siRNA sense strand
uacaagguguggcaggaaa

SEQ ID NO: 722169 - RNA, 19 nt, Homo sapiens
  misc_RNA (1)...(19): siRNA sense strand
gagguaaaccaggcaaaga

SEQ ID NO: 722170 - RNA, 19 nt, Homo sapiens
  misc_RNA (1)...(19): siRNA sense strand
gggcagaucagugaacaga

SEQ ID NO: 722171 - RNA, 19 nt, Homo sapiens
  misc_RNA (1)...(19): siRNA sense strand
gcacauggauuucuuauua

SEQ ID NO: 722172 - RNA, 19 nt, Homo sapiens
  misc_RNA (1)...(19): siRNA sense strand
ggacagaguaucauaauua

SEQ ID NO: 722173 - RNA, 19 nt, Homo sapiens
  misc_RNA (1)...(19): siRNA sense strand
ccaaggaccucaaggcuua

SEQ ID NO: 722174 - RNA, 19 nt, Homo sapiens
  misc_RNA (1)...(19): siRNA sense strand
gcagaucagugaacagaaa

SEQ ID NO: 722175 - RNA, 19 nt, Homo sapiens
  misc_RNA (1)...(19): siRNA sense strand
gaaccagguaguauaauua

SEQ ID NO: 722176 - RNA, 19 nt, Homo sapiens
  misc_RNA (1)...(19): siRNA sense strand
gaaaggacccaguggagua

SEQ ID NO: 722177 - RNA, 19 nt, Homo sapiens
  misc_RNA (1)...(19): siRNA sense strand
gaaaggagaucagggacuu

SEQ ID NO: 722178 - RNA, 19 nt, Homo sapiens
  misc_RNA (1)...(19): siRNA sense strand
caacuuugcuucaagaaau

SEQ ID NO: 722179 - RNA, 19 nt, Homo sapiens
  misc_RNA (1)...(19): siRNA sense strand
ucagaaaggugaugaagga

SEQ ID NO: 722180 - RNA, 19 nt, Homo sapiens
  misc_RNA (1)...(19): siRNA sense strand
ggaauaugggcuuaaauuu

SEQ ID NO: 722181 - RNA, 19 nt, Homo sapiens
  misc_RNA (1)...(19): siRNA sense strand
gagagaggguuuccagguu

SEQ ID NO: 722182 - RNA, 19 nt, Homo sapiens
  misc_RNA (1)...(19): siRNA sense strand
aaagggugauggaggauua

SEQ ID NO: 722183 - RNA, 19 nt, Homo sapiens
  misc_RNA (1)...(19): siRNA sense strand
gaauaugggcuuaaauuuc

SEQ ID NO: 722184 - RNA, 19 nt, Homo sapiens
  misc_RNA (1)...(19): siRNA sense strand
gaacacuucaggucuauga

SEQ ID NO: 722185 - RNA, 19 nt, Homo sapiens
  misc_RNA (1)...(19): siRNA sense strand
ggaaggacacccaggauug

SEQ ID NO: 722186 - RNA, 19 nt, Homo sapiens
  misc_RNA (1)...(19): siRNA sense strand
ggaaauggagguauuaaag

SEQ ID NO: 722187 - RNA, 19 nt, Homo sapiens
  misc_RNA (1)...(19): siRNA sense strand
caaaggugauccugguauu

SEQ ID NO: 722188 - RNA, 19 nt, Homo sapiens
  misc_RNA (1)...(19): siRNA sense strand
gggaauaugggcuuaaauu

SEQ ID NO: 722189 - RNA, 19 nt, Homo sapiens
  misc_RNA (1)...(19): siRNA sense strand
aggcagagauggugaugua

SEQ ID NO: 722190 - RNA, 19 nt, Homo sapiens
  misc_RNA (1)...(19): siRNA sense strand
gcagaaggcucaggucaag

SEQ ID NO: 722191 - RNA, 19 nt, Homo sapiens
  misc_RNA (1)...(19): siRNA sense strand
caagggagaacguggauuu

SEQ ID NO: 722192 - RNA, 19 nt, Homo sapiens
  misc_RNA (1)...(19): siRNA sense strand
ugaaccagguaguauaauu

SEQ ID NO: 722193 - RNA, 19 nt, Homo sapiens
  misc_RNA (1)...(19): siRNA sense strand
gcugaaagcaggagacuug

SEQ ID NO: 722194 - RNA, 19 nt, Homo sapiens
  misc_RNA (1)...(19): siRNA sense strand
uauaggaccuccaggauca

SEQ ID NO: 722195 - RNA, 19 nt, Homo sapiens
  misc_RNA (1)...(19): siRNA sense strand
caccaggacuuccagguuu

SEQ ID NO: 722196 - RNA, 19 nt, Homo sapiens
  misc_RNA (1)...(19): siRNA sense strand
gaaaagaccaauugaugua

SEQ ID NO: 722197 - RNA, 19 nt, Homo sapiens
  misc_RNA (1)...(19): siRNA sense strand
gaacagaaaagaccaauug

SEQ ID NO: 722198 - RNA, 19 nt, Homo sapiens
  misc_RNA (1)...(19): siRNA sense strand
gcaaggagagccaggcaaa

SEQ ID NO: 722199 - RNA, 19 nt, Homo sapiens
  misc_RNA (1)...(19): siRNA sense strand
gaaggaccaccuggaauuu

SEQ ID NO: 722200 - RNA, 19 nt, Homo sapiens
  misc_RNA (1)...(19): siRNA sense strand
cgaauuagccgaugucaag

SEQ ID NO: 722201 - RNA, 19 nt, Homo sapiens
  misc_RNA (1)...(19): siRNA sense strand
gacuugaggacacgaauua

SEQ ID NO: 722202 - RNA, 19 nt, Homo sapiens
  misc_RNA (1)...(19): siRNA sense strand
caccaggacuccaggguaa

SEQ ID NO: 722203 - RNA, 19 nt, Homo sapiens
  misc_RNA (1)...(19): siRNA sense strand
caacuggucccaaaggauu

SEQ ID NO: 722204 - RNA, 19 nt, Homo sapiens
  misc_RNA (1)...(19): siRNA sense strand
aggauuaccuggacagaaa

SEQ ID NO: 722205 - RNA, 19 nt, Homo sapiens
  misc_RNA (1)...(19): siRNA sense strand
gaaccaggauuugcauuac

SEQ ID NO: 722206 - RNA, 19 nt, Homo sapiens
  misc_RNA (1)...(19): siRNA sense strand
gaaaugacuauucuuacug

SEQ ID NO: 722207 - RNA, 19 nt, Homo sapiens
  misc_RNA (1)...(19): siRNA sense strand
caauugauguagaguuuca

SEQ ID NO: 722208 - RNA, 19 nt, Homo sapiens
  misc_RNA (1)...(19): siRNA sense strand
gcaggugccucuggauuuc

SEQ ID NO: 722209 - RNA, 19 nt, Homo sapiens
  misc_RNA (1)...(19): siRNA sense strand
cggagcaccugguccuaua

SEQ ID NO: 722210 - RNA, 19 nt, Homo sapiens
  misc_RNA (1)...(19): siRNA sense strand
uggaagaauuggucuagaa

SEQ ID NO: 722211 - RNA, 19 nt, Homo sapiens
  misc_RNA (1)...(19): siRNA sense strand
cauuggaacugguauuuca

SEQ ID NO: 722212 - RNA, 19 nt, Homo sapiens
  misc_RNA (1)...(19): siRNA sense strand
aaagggugaugauggaauu

SEQ ID NO: 722213 - RNA, 19 nt, Homo sapiens
  misc_RNA (1)...(19): siRNA sense strand
ccuggaaccuccucuguug

SEQ ID NO: 722214 - RNA, 19 nt, Homo sapiens
  misc_RNA (1)...(19): siRNA sense strand
aaauggagguauuaaagga

SEQ ID NO: 722215 - RNA, 19 nt, Homo sapiens
  misc_RNA (1)...(19): siRNA sense strand
ggacagccaggucuuauag

SEQ ID NO: 722216 - RNA, 19 nt, Homo sapiens
  misc_RNA (1)...(19): siRNA sense strand
ucaggucuaugaaggcuuu

SEQ ID NO: 722217 - RNA, 19 nt, Homo sapiens
  misc_RNA (1)...(19): siRNA sense strand
agagaggguuuccagguuu

SEQ ID NO: 722218 - RNA, 19 nt, Homo sapiens
  misc_RNA (1)...(19): siRNA sense strand
ugaaccaggauuugcauua

SEQ ID NO: 722219 - RNA, 19 nt, Homo sapiens
  misc_RNA (1)...(19): siRNA sense strand
ggugaaccagguaguauaa

SEQ ID NO: 722220 - RNA, 19 nt, Homo sapiens
  misc_RNA (1)...(19): siRNA sense strand
gacaacggaugcaccacaa

SEQ ID NO: 722221 - RNA, 19 nt, Homo sapiens
  misc_RNA (1)...(19): siRNA sense strand
gagaggguuuccagguuug

SEQ ID NO: 722222 - RNA, 19 nt, Homo sapiens
  misc_RNA (1)...(19): siRNA sense strand
uggcuugccugguuugaaa

SEQ ID NO: 722223 - RNA, 19 nt, Homo sapiens
  misc_RNA (1)...(19): siRNA sense strand
cuaccuggcuugccugguu

SEQ ID NO: 722224 - RNA, 19 nt, Homo sapiens
  misc_RNA (1)...(19): siRNA sense strand
gaguggacaaccuggauua

SEQ ID NO: 722225 - RNA, 19 nt, Homo sapiens
  misc_RNA (1)...(19): siRNA sense strand
caaaucuucugggcucaaa

SEQ ID NO: 722226 - RNA, 19 nt, Homo sapiens
  misc_RNA (1)...(19): siRNA sense strand
gaugaaggaccaccuggaa

SEQ ID NO: 722227 - RNA, 19 nt, Homo sapiens
  misc_RNA (1)...(19): siRNA sense strand
gaaaauggccaaccaggaa

SEQ ID NO: 722228 - RNA, 19 nt, Homo sapiens
  misc_RNA (1)...(19): siRNA sense strand
ugaaggaccaccuggaauu

SEQ ID NO: 722229 - RNA, 19 nt, Homo sapiens
  misc_RNA (1)...(19): siRNA sense strand
gagcauccagccauucauu

SEQ ID NO: 722230 - RNA, 19 nt, Homo sapiens
  misc_RNA (1)...(19): siRNA sense strand
gaaauggagguauuaaagg

SEQ ID NO: 722231 - RNA, 19 nt, Homo sapiens
  misc_RNA (1)...(19): siRNA sense strand
ugggacaccuggaagaauu

SEQ ID NO: 722232 - RNA, 19 nt, Homo sapiens
  misc_RNA (1)...(19): siRNA sense strand
ggauccaggucagacuaua

SEQ ID NO: 722233 - RNA, 19 nt, Homo sapiens
  misc_RNA (1)...(19): siRNA sense strand
ggagagccugguggaauua

SEQ ID NO: 722234 - RNA, 19 nt, Homo sapiens
  misc_RNA (1)...(19): siRNA sense strand
ccagagcccaugccaauga

SEQ ID NO: 722235 - RNA, 19 nt, Homo sapiens
  misc_RNA (1)...(19): siRNA sense strand
caguaaaccucagucagaa

SEQ ID NO: 722236 - RNA, 19 nt, Homo sapiens
  misc_RNA (1)...(19): siRNA sense strand
ucaguaaaccucagucaga

SEQ ID NO: 722237 - RNA, 19 nt, Homo sapiens
  misc_RNA (1)...(19): siRNA sense strand
aaugaagggugacaaagga

SEQ ID NO: 722238 - RNA, 19 nt, Homo sapiens
  misc_RNA (1)...(19): siRNA sense strand
gcuggcaacuguagaugug

SEQ ID NO: 722239 - RNA, 19 nt, Homo sapiens
  misc_RNA (1)...(19): siRNA sense strand
gauccaggucagacuauaa

SEQ ID NO: 722240 - RNA, 19 nt, Homo sapiens
  misc_RNA (1)...(19): siRNA sense strand
aaagaccaauugauguaga

SEQ ID NO: 722241 - RNA, 19 nt, Homo sapiens
  misc_RNA (1)...(19): siRNA sense strand
ucagacauguucaguaaac

SEQ ID NO: 722242 - RNA, 19 nt, Homo sapiens
  misc_RNA (1)...(19): siRNA sense strand
uggauuaccugguccuuca

SEQ ID NO: 722243 - RNA, 19 nt, Homo sapiens
  misc_RNA (1)...(19): siRNA sense strand
uuacuggcccugagucuuu

SEQ ID NO: 722244 - RNA, 19 nt, Homo sapiens
  misc_RNA (1)...(19): siRNA sense strand
ugucaagugugcaugaaga

SEQ ID NO: 722245 - RNA, 19 nt, Homo sapiens
  misc_RNA (1)...(19): siRNA sense strand
ugguguaccuggucuuaaa

SEQ ID NO: 722246 - RNA, 19 nt, Homo sapiens
  misc_RNA (1)...(19): siRNA sense strand
gaaugaagggugacaaagg

SEQ ID NO: 722247 - RNA, 19 nt, Homo sapiens
  misc_RNA (1)...(19): siRNA sense strand
ccagguaguauaauuaugu

SEQ ID NO: 722248 - RNA, 19 nt, Homo sapiens
  misc_RNA (1)...(19): siRNA sense strand
gaugucaagugugcaugaa

SEQ ID NO: 722249 - RNA, 19 nt, Homo sapiens
  misc_RNA (1)...(19): siRNA sense strand
caacggaugcaccacaaug

SEQ ID NO: 722250 - RNA, 19 nt, Homo sapiens
  misc_RNA (1)...(19): siRNA sense strand
gaaaggcgacaaaggugau

SEQ ID NO: 722251 - RNA, 19 nt, Homo sapiens
  misc_RNA (1)...(19): siRNA sense strand
aaaggaaccaucggugaua

SEQ ID NO: 722252 - RNA, 19 nt, Homo sapiens
  misc_RNA (1)...(19): siRNA sense strand
ugagaagggugagcaagga

SEQ ID NO: 722253 - RNA, 19 nt, Homo sapiens
  misc_RNA (1)...(19): siRNA sense strand
accaauugauguagaguuu

SEQ ID NO: 722254 - RNA, 19 nt, Homo sapiens
  misc_RNA (1)...(19): siRNA sense strand
caaaggagaaccagguauc

SEQ ID NO: 722255 - RNA, 19 nt, Homo sapiens
  misc_RNA (1)...(19): siRNA sense strand
gggaacacuucaggucuau

SEQ ID NO: 722256 - RNA, 19 nt, Homo sapiens
  misc_RNA (1)...(19): siRNA sense strand
ccugguauuucaagcauug

SEQ ID NO: 722257 - RNA, 19 nt, Homo sapiens
  misc_RNA (1)...(19): siRNA sense strand
caccaggucccaaagguaa

SEQ ID NO: 722258 - RNA, 19 nt, Homo sapiens
  misc_RNA (1)...(19): siRNA sense strand
caaaggauuaccaggcauu

SEQ ID NO: 722259 - RNA, 19 nt, Homo sapiens
  misc_RNA (1)...(19): siRNA sense strand
ggaauaccagguccuaaag

SEQ ID NO: 722260 - RNA, 19 nt, Homo sapiens
  misc_RNA (1)...(19): siRNA sense strand
aggagagccugguggaauu

SEQ ID NO: 722261 - RNA, 19 nt, Homo sapiens
  misc_RNA (1)...(19): siRNA sense strand
ugugggagauccugguuug

SEQ ID NO: 722262 - RNA, 19 nt, Homo sapiens
  misc_RNA (1)...(19): siRNA sense strand
caaagguucugugggagau

SEQ ID NO: 722263 - RNA, 19 nt, Homo sapiens
  misc_RNA (1)...(19): siRNA sense strand
uggacaaccuggaccaaug

SEQ ID NO: 722264 - RNA, 19 nt, Homo sapiens
  misc_RNA (1)...(19): siRNA sense strand
gggugaaccagguaguaua

SEQ ID NO: 722265 - RNA, 19 nt, Homo sapiens
  misc_RNA (1)...(19): siRNA sense strand
cagcugccuucgucgcuuu

SEQ ID NO: 722266 - RNA, 19 nt, Homo sapiens
  misc_RNA (1)...(19): siRNA sense strand
ggaagaauuggucuagaag

SEQ ID NO: 722267 - RNA, 19 nt, Homo sapiens
  misc_RNA (1)...(19): siRNA sense strand
gcaaaggagaaccagguau

SEQ ID NO: 722268 - RNA, 19 nt, Homo sapiens
  misc_RNA (1)...(19): siRNA sense strand
uacaagguguggcaggaaa

SEQ ID NO: 722269 - RNA, 19 nt, Homo sapiens
  misc_RNA (1)...(19): siRNA sense strand
gagguaaaccaggcaaaga

SEQ ID NO: 722270 - RNA, 19 nt, Homo sapiens
  misc_RNA (1)...(19): siRNA sense strand
gggcagaucagugaacaga

SEQ ID NO: 722271 - RNA, 19 nt, Homo sapiens
  misc_RNA (1)...(19): siRNA sense strand
gcacauggauuucuuauua

SEQ ID NO: 722272 - RNA, 19 nt, Homo sapiens
  misc_RNA (1)...(19): siRNA sense strand
ggacagaguaucauaauua

SEQ ID NO: 722273 - RNA, 19 nt, Homo sapiens
  misc_RNA (1)...(19): siRNA sense strand
ccaaggaccucaaggcuua

SEQ ID NO: 722274 - RNA, 19 nt, Homo sapiens
  misc_RNA (1)...(19): siRNA sense strand
gcagaucagugaacagaaa

SEQ ID NO: 722275 - RNA, 19 nt, Homo sapiens
  misc_RNA (1)...(19): siRNA sense strand
gaaccagguaguauaauua

SEQ ID NO: 722276 - RNA, 19 nt, Homo sapiens
  misc_RNA (1)...(19): siRNA sense strand
gaaaggacccaguggagua

SEQ ID NO: 722277 - RNA, 19 nt, Homo sapiens
  misc_RNA (1)...(19): siRNA sense strand
gaaaggagaucagggacuu

SEQ ID NO: 722278 - RNA, 19 nt, Homo sapiens
  misc_RNA (1)...(19): siRNA sense strand
caacuuugcuucaagaaau

SEQ ID NO: 722279 - RNA, 19 nt, Homo sapiens
  misc_RNA (1)...(19): siRNA sense strand
ucagaaaggugaugaagga

SEQ ID NO: 722280 - RNA, 19 nt, Homo sapiens
  misc_RNA (1)...(19): siRNA sense strand
ggaauaugggcuuaaauuu

SEQ ID NO: 722281 - RNA, 19 nt, Homo sapiens
  misc_RNA (1)...(19): siRNA sense strand
gagagaggguuuccagguu

SEQ ID NO: 722282 - RNA, 19 nt, Homo sapiens
  misc_RNA (1)...(19): siRNA sense strand
aaagggugauggaggauua

SEQ ID NO: 722283 - RNA, 19 nt, Homo sapiens
  misc_RNA (1)...(19): siRNA sense strand
gaauaugggcuuaaauuuc

SEQ ID NO: 722284 - RNA, 19 nt, Homo sapiens
  misc_RNA (1)...(19): siRNA sense strand
gaacacuucaggucuauga

SEQ ID NO: 722285 - RNA, 19 nt, Homo sapiens
  misc_RNA (1)...(19): siRNA sense strand
ggaaggacacccaggauug

SEQ ID NO: 722286 - RNA, 19 nt, Homo sapiens
  misc_RNA (1)...(19): siRNA sense strand
ggaaauggagguauuaaag

SEQ ID NO: 722287 - RNA, 19 nt, Homo sapiens
  misc_RNA (1)...(19): siRNA sense strand
caaaggugauccugguauu

SEQ ID NO: 722288 - RNA, 19 nt, Homo sapiens
  misc_RNA (1)...(19): siRNA sense strand
gggaauaugggcuuaaauu

SEQ ID NO: 722289 - RNA, 19 nt, Homo sapiens
  misc_RNA (1)...(19): siRNA sense strand
aggcagagauggugaugua

SEQ ID NO: 722290 - RNA, 19 nt, Homo sapiens
  misc_RNA (1)...(19): siRNA sense strand
gcagaaggcucaggucaag

SEQ ID NO: 722291 - RNA, 19 nt, Homo sapiens
  misc_RNA (1)...(19): siRNA sense strand
caagggagaacguggauuu

SEQ ID NO: 722292 - RNA, 19 nt, Homo sapiens
  misc_RNA (1)...(19): siRNA sense strand
ugaaccagguaguauaauu

SEQ ID NO: 722293 - RNA, 19 nt, Homo sapiens
  misc_RNA (1)...(19): siRNA sense strand
gcugaaagcaggagacuug

SEQ ID NO: 722294 - RNA, 19 nt, Homo sapiens
  misc_RNA (1)...(19): siRNA sense strand
uauaggaccuccaggauca

SEQ ID NO: 722295 - RNA, 19 nt, Homo sapiens
  misc_RNA (1)...(19): siRNA sense strand
caccaggacuuccagguuu

SEQ ID NO: 722296 - RNA, 19 nt, Homo sapiens
  misc_RNA (1)...(19): siRNA sense strand
gaaaagaccaauugaugua

SEQ ID NO: 722297 - RNA, 19 nt, Homo sapiens
  misc_RNA (1)...(19): siRNA sense strand
gaacagaaaagaccaauug

SEQ ID NO: 722298 - RNA, 19 nt, Homo sapiens
  misc_RNA (1)...(19): siRNA sense strand
gcaaggagagccaggcaaa

SEQ ID NO: 722299 - RNA, 19 nt, Homo sapiens
  misc_RNA (1)...(19): siRNA sense strand
gaaggaccaccuggaauuu

SEQ ID NO: 722300 - RNA, 19 nt, Homo sapiens
  misc_RNA (1)...(19): siRNA sense strand
cgaauuagccgaugucaag

SEQ ID NO: 722301 - RNA, 19 nt, Homo sapiens
  misc_RNA (1)...(19): siRNA sense strand
gacuugaggacacgaauua

SEQ ID NO: 722302 - RNA, 19 nt, Homo sapiens
  misc_RNA (1)...(19): siRNA sense strand
caccaggacuccaggguaa

SEQ ID NO: 722303 - RNA, 19 nt, Homo sapiens
  misc_RNA (1)...(19): siRNA sense strand
caacuggucccaaaggauu

SEQ ID NO: 722304 - RNA, 19 nt, Homo sapiens
  misc_RNA (1)...(19): siRNA sense strand
aggauuaccuggacagaaa

SEQ ID NO: 722305 - RNA, 19 nt, Homo sapiens
  misc_RNA (1)...(19): siRNA sense strand
gaaccaggauuugcauuac

SEQ ID NO: 722306 - RNA, 19 nt, Homo sapiens
  misc_RNA (1)...(19): siRNA sense strand
gaaaugacuauucuuacug

SEQ ID NO: 722307 - RNA, 19 nt, Homo sapiens
  misc_RNA (1)...(19): siRNA sense strand
caauugauguagaguuuca

SEQ ID NO: 722308 - RNA, 19 nt, Homo sapiens
  misc_RNA (1)...(19): siRNA sense strand
gcaggugccucuggauuuc

SEQ ID NO: 722309 - RNA, 19 nt, Homo sapiens
  misc_RNA (1)...(19): siRNA sense strand
cggagcaccugguccuaua

SEQ ID NO: 722310 - RNA, 19 nt, Homo sapiens
  misc_RNA (1)...(19): siRNA sense strand
uggaagaauuggucuagaa

SEQ ID NO: 722311 - RNA, 19 nt, Homo sapiens
  misc_RNA (1)...(19): siRNA sense strand
cauuggaacugguauuuca

SEQ ID NO: 722312 - RNA, 19 nt, Homo sapiens
  misc_RNA (1)...(19): siRNA sense strand
aaagggugaugauggaauu

SEQ ID NO: 722313 - RNA, 19 nt, Homo sapiens
  misc_RNA (1)...(19): siRNA sense strand
ccuggaaccuccucuguug

SEQ ID NO: 722314 - RNA, 19 nt, Homo sapiens
  misc_RNA (1)...(19): siRNA sense strand
aaauggagguauuaaagga

SEQ ID NO: 722315 - RNA, 19 nt, Homo sapiens
  misc_RNA (1)...(19): siRNA sense strand
ggacagccaggucuuauag

SEQ ID NO: 722316 - RNA, 19 nt, Homo sapiens
  misc_RNA (1)...(19): siRNA sense strand
ucaggucuaugaaggcuuu

SEQ ID NO: 722317 - RNA, 19 nt, Homo sapiens
  misc_RNA (1)...(19): siRNA sense strand
agagaggguuuccagguuu

SEQ ID NO: 722318 - RNA, 19 nt, Homo sapiens
  misc_RNA (1)...(19): siRNA sense strand
ugaaccaggauuugcauua

SEQ ID NO: 722319 - RNA, 19 nt, Homo sapiens
  misc_RNA (1)...(19): siRNA sense strand
ggugaaccagguaguauaa

SEQ ID NO: 722320 - RNA, 19 nt, Homo sapiens
  misc_RNA (1)...(19): siRNA sense strand
gacaacggaugcaccacaa

SEQ ID NO: 722321 - RNA, 19 nt, Homo sapiens
  misc_RNA (1)...(19): siRNA sense strand
gagaggguuuccagguuug

SEQ ID NO: 722322 - RNA, 19 nt, Homo sapiens
  misc_RNA (1)...(19): siRNA sense strand
uggcuugccugguuugaaa

SEQ ID NO: 722323 - RNA, 19 nt, Homo sapiens
  misc_RNA (1)...(19): siRNA sense strand
cuaccuggcuugccugguu

SEQ ID NO: 722324 - RNA, 19 nt, Homo sapiens
  misc_RNA (1)...(19): siRNA sense strand
gaguggacaaccuggauua

SEQ ID NO: 722325 - RNA, 19 nt, Homo sapiens
  misc_RNA (1)...(19): siRNA sense strand
caaaucuucugggcucaaa

SEQ ID NO: 722326 - RNA, 19 nt, Homo sapiens
  misc_RNA (1)...(19): siRNA sense strand
gaugaaggaccaccuggaa

SEQ ID NO: 722327 - RNA, 19 nt, Homo sapiens
  misc_RNA (1)...(19): siRNA sense strand
gaaaauggccaaccaggaa

SEQ ID NO: 722328 - RNA, 19 nt, Homo sapiens
  misc_RNA (1)...(19): siRNA sense strand
ugaaggaccaccuggaauu

SEQ ID NO: 722329 - RNA, 19 nt, Homo sapiens
  misc_RNA (1)...(19): siRNA sense strand
gagcauccagccauucauu

SEQ ID NO: 722330 - RNA, 19 nt, Homo sapiens
  misc_RNA (1)...(19): siRNA sense strand
gaaauggagguauuaaagg

SEQ ID NO: 722331 - RNA, 19 nt, Homo sapiens
  misc_RNA (1)...(19): siRNA sense strand
ugggacaccuggaagaauu

SEQ ID NO: 722332 - RNA, 19 nt, Homo sapiens
  misc_RNA (1)...(19): siRNA sense strand
ggauccaggucagacuaua

SEQ ID NO: 722333 - RNA, 19 nt, Homo sapiens
  misc_RNA (1)...(19): siRNA sense strand
ggagagccugguggaauua

SEQ ID NO: 722334 - RNA, 19 nt, Homo sapiens
  misc_RNA (1)...(19): siRNA sense strand
ccagagcccaugccaauga

SEQ ID NO: 722335 - RNA, 19 nt, Homo sapiens
  misc_RNA (1)...(19): siRNA sense strand
caguaaaccucagucagaa

SEQ ID NO: 722336 - RNA, 19 nt, Homo sapiens
  misc_RNA (1)...(19): siRNA sense strand
ucaguaaaccucagucaga

SEQ ID NO: 722337 - RNA, 19 nt, Homo sapiens
  misc_RNA (1)...(19): siRNA sense strand
aaugaagggugacaaagga

SEQ ID NO: 722338 - RNA, 19 nt, Homo sapiens
  misc_RNA (1)...(19): siRNA sense strand
gcuggcaacuguagaugug

SEQ ID NO: 722339 - RNA, 19 nt, Homo sapiens
  misc_RNA (1)...(19): siRNA sense strand
gauccaggucagacuauaa

SEQ ID NO: 722340 - RNA, 19 nt, Homo sapiens
  misc_RNA (1)...(19): siRNA sense strand
aaagaccaauugauguaga

SEQ ID NO: 722341 - RNA, 19 nt, Homo sapiens
  misc_RNA (1)...(19): siRNA sense strand
ucagacauguucaguaaac

SEQ ID NO: 722342 - RNA, 19 nt, Homo sapiens
  misc_RNA (1)...(19): siRNA sense strand
uggauuaccugguccuuca

SEQ ID NO: 722343 - RNA, 19 nt, Homo sapiens
  misc_RNA (1)...(19): siRNA sense strand
uuacuggcccugagucuuu

SEQ ID NO: 722344 - RNA, 19 nt, Homo sapiens
  misc_RNA (1)...(19): siRNA sense strand
ugucaagugugcaugaaga

SEQ ID NO: 722345 - RNA, 19 nt, Homo sapiens
  misc_RNA (1)...(19): siRNA sense strand
ugguguaccuggucuuaaa

SEQ ID NO: 722346 - RNA, 19 nt, Homo sapiens
  misc_RNA (1)...(19): siRNA sense strand
gaaugaagggugacaaagg

SEQ ID NO: 722347 - RNA, 19 nt, Homo sapiens
  misc_RNA (1)...(19): siRNA sense strand
ccagguaguauaauuaugu

SEQ ID NO: 722348 - RNA, 19 nt, Homo sapiens
  misc_RNA (1)...(19): siRNA sense strand
gaugucaagugugcaugaa

SEQ ID NO: 722349 - RNA, 19 nt, Homo sapiens
  misc_RNA (1)...(19): siRNA sense strand
caacggaugcaccacaaug

SEQ ID NO: 722350 - RNA, 19 nt, Homo sapiens
  misc_RNA (1)...(19): siRNA sense strand
gaaaggcgacaaaggugau

SEQ ID NO: 722351 - RNA, 19 nt, Homo sapiens
  misc_RNA (1)...(19): siRNA sense strand
aaaggaaccaucggugaua

SEQ ID NO: 722352 - RNA, 19 nt, Homo sapiens
  misc_RNA (1)...(19): siRNA sense strand
ugagaagggugagcaagga

SEQ ID NO: 722353 - RNA, 19 nt, Homo sapiens
  misc_RNA (1)...(19): siRNA sense strand
accaauugauguagaguuu

SEQ ID NO: 722354 - RNA, 19 nt, Homo sapiens
  misc_RNA (1)...(19): siRNA sense strand
caaaggagaaccagguauc

SEQ ID NO: 722355 - RNA, 19 nt, Homo sapiens
  misc_RNA (1)...(19): siRNA sense strand
gggaacacuucaggucuau

SEQ ID NO: 722356 - RNA, 19 nt, Homo sapiens
  misc_RNA (1)...(19): siRNA sense strand
ccugguauuucaagcauug

SEQ ID NO: 722357 - RNA, 19 nt, Homo sapiens
  misc_RNA (1)...(19): siRNA sense strand
caccaggucccaaagguaa

SEQ ID NO: 722358 - RNA, 19 nt, Homo sapiens
  misc_RNA (1)...(19): siRNA sense strand
caaaggauuaccaggcauu

SEQ ID NO: 722359 - RNA, 19 nt, Homo sapiens
  misc_RNA (1)...(19): siRNA sense strand
ggaauaccagguccuaaag

SEQ ID NO: 722360 - RNA, 19 nt, Homo sapiens
  misc_RNA (1)...(19): siRNA sense strand
aggagagccugguggaauu

SEQ ID NO: 722361 - RNA, 19 nt, Homo sapiens
  misc_RNA (1)...(19): siRNA sense strand
ugugggagauccugguuug

SEQ ID NO: 722362 - RNA, 19 nt, Homo sapiens
  misc_RNA (1)...(19): siRNA sense strand
caaagguucugugggagau

SEQ ID NO: 722363 - RNA, 19 nt, Homo sapiens
  misc_RNA (1)...(19): siRNA sense strand
uggacaaccuggaccaaug

SEQ ID NO: 722364 - RNA, 19 nt, Homo sapiens
  misc_RNA (1)...(19): siRNA sense strand
gggugaaccagguaguaua

SEQ ID NO: 722365 - RNA, 19 nt, Homo sapiens
  misc_RNA (1)...(19): siRNA sense strand
cagcugccuucgucgcuuu

SEQ ID NO: 722366 - RNA, 19 nt, Homo sapiens
  misc_RNA (1)...(19): siRNA sense strand
ggaagaauuggucuagaag

SEQ ID NO: 722367 - RNA, 19 nt, Homo sapiens
  misc_RNA (1)...(19): siRNA sense strand
gcaaaggagaaccagguau

SEQ ID NO: 722368 - RNA, 19 nt, Homo sapiens
  misc_RNA (1)...(19): siRNA sense strand
uacaagguguggcaggaaa

SEQ ID NO: 722369 - RNA, 19 nt, Homo sapiens
  misc_RNA (1)...(19): siRNA sense strand
gagguaaaccaggcaaaga

SEQ ID NO: 722370 - RNA, 19 nt, Homo sapiens
  misc_RNA (1)...(19): siRNA sense strand
gggcagaucagugaacaga

SEQ ID NO: 722371 - RNA, 19 nt, Homo sapiens
  misc_RNA (1)...(19): siRNA sense strand
gcacauggauuucuuauua

SEQ ID NO: 722372 - RNA, 19 nt, Homo sapiens
  misc_RNA (1)...(19): siRNA sense strand
ggacagaguaucauaauua

SEQ ID NO: 722373 - RNA, 19 nt, Homo sapiens
  misc_RNA (1)...(19): siRNA sense strand
ccaaggaccucaaggcuua

SEQ ID NO: 722374 - RNA, 19 nt, Homo sapiens
  misc_RNA (1)...(19): siRNA sense strand
gcagaucagugaacagaaa

SEQ ID NO: 722375 - RNA, 19 nt, Homo sapiens
  misc_RNA (1)...(19): siRNA sense strand
gaaccagguaguauaauua

SEQ ID NO: 722376 - RNA, 19 nt, Homo sapiens
  misc_RNA (1)...(19): siRNA sense strand
gaaaggacccaguggagua

SEQ ID NO: 722377 - RNA, 19 nt, Homo sapiens
  misc_RNA (1)...(19): siRNA sense strand
gaaaggagaucagggacuu

SEQ ID NO: 722378 - RNA, 19 nt, Homo sapiens
  misc_RNA (1)...(19): siRNA sense strand
caacuuugcuucaagaaau

SEQ ID NO: 722379 - RNA, 19 nt, Homo sapiens
  misc_RNA (1)...(19): siRNA sense strand
ucagaaaggugaugaagga

SEQ ID NO: 722380 - RNA, 19 nt, Homo sapiens
  misc_RNA (1)...(19): siRNA sense strand
ggaauaugggcuuaaauuu

SEQ ID NO: 722381 - RNA, 19 nt, Homo sapiens
  misc_RNA (1)...(19): siRNA sense strand
gagagaggguuuccagguu

SEQ ID NO: 722382 - RNA, 19 nt, Homo sapiens
  misc_RNA (1)...(19): siRNA sense strand
aaagggugauggaggauua

SEQ ID NO: 722383 - RNA, 19 nt, Homo sapiens
  misc_RNA (1)...(19): siRNA sense strand
gaauaugggcuuaaauuuc

SEQ ID NO: 722384 - RNA, 19 nt, Homo sapiens
  misc_RNA (1)...(19): siRNA sense strand
gaacacuucaggucuauga

SEQ ID NO: 722385 - RNA, 19 nt, Homo sapiens
  misc_RNA (1)...(19): siRNA sense strand
ggaaggacacccaggauug

SEQ ID NO: 722386 - RNA, 19 nt, Homo sapiens
  misc_RNA (1)...(19): siRNA sense strand
ggaaauggagguauuaaag

SEQ ID NO: 722387 - RNA, 19 nt, Homo sapiens
  misc_RNA (1)...(19): siRNA sense strand
caaaggugauccugguauu

SEQ ID NO: 722388 - RNA, 19 nt, Homo sapiens
  misc_RNA (1)...(19): siRNA sense strand
gggaauaugggcuuaaauu

SEQ ID NO: 722389 - RNA, 19 nt, Homo sapiens
  misc_RNA (1)...(19): siRNA sense strand
aggcagagauggugaugua

SEQ ID NO: 722390 - RNA, 19 nt, Homo sapiens
  misc_RNA (1)...(19): siRNA sense strand
gcagaaggcucaggucaag

SEQ ID NO: 722391 - RNA, 19 nt, Homo sapiens
  misc_RNA (1)...(19): siRNA sense strand
caagggagaacguggauuu

SEQ ID NO: 722392 - RNA, 19 nt, Homo sapiens
  misc_RNA (1)...(19): siRNA sense strand
ugaaccagguaguauaauu

SEQ ID NO: 722393 - RNA, 19 nt, Homo sapiens
  misc_RNA (1)...(19): siRNA sense strand
gcugaaagcaggagacuug

SEQ ID NO: 722394 - RNA, 19 nt, Homo sapiens
  misc_RNA (1)...(19): siRNA sense strand
uauaggaccuccaggauca

SEQ ID NO: 722395 - RNA, 19 nt, Homo sapiens
  misc_RNA (1)...(19): siRNA sense strand
caccaggacuuccagguuu

SEQ ID NO: 722396 - RNA, 19 nt, Homo sapiens
  misc_RNA (1)...(19): siRNA sense strand
gaaaagaccaauugaugua

SEQ ID NO: 722397 - RNA, 19 nt, Homo sapiens
  misc_RNA (1)...(19): siRNA sense strand
gaacagaaaagaccaauug

SEQ ID NO: 722398 - RNA, 19 nt, Homo sapiens
  misc_RNA (1)...(19): siRNA sense strand
gcaaggagagccaggcaaa

SEQ ID NO: 722399 - RNA, 19 nt, Homo sapiens
  misc_RNA (1)...(19): siRNA sense strand
gaaggaccaccuggaauuu

SEQ ID NO: 722400 - RNA, 19 nt, Homo sapiens
  misc_RNA (1)...(19): siRNA sense strand
cgaauuagccgaugucaag

SEQ ID NO: 722401 - RNA, 19 nt, Homo sapiens
  misc_RNA (1)...(19): siRNA sense strand
gacuugaggacacgaauua

SEQ ID NO: 722402 - RNA, 19 nt, Homo sapiens
  misc_RNA (1)...(19): siRNA sense strand
caccaggacuccaggguaa

SEQ ID NO: 722403 - RNA, 19 nt, Homo sapiens
  misc_RNA (1)...(19): siRNA sense strand
caacuggucccaaaggauu

SEQ ID NO: 722404 - RNA, 19 nt, Homo sapiens
  misc_RNA (1)...(19): siRNA sense strand
aggauuaccuggacagaaa

SEQ ID NO: 722405 - RNA, 19 nt, Homo sapiens
  misc_RNA (1)...(19): siRNA sense strand
gaaccaggauuugcauuac

SEQ ID NO: 722406 - RNA, 19 nt, Homo sapiens
  misc_RNA (1)...(19): siRNA sense strand
gaaaugacuauucuuacug

SEQ ID NO: 722407 - RNA, 19 nt, Homo sapiens
  misc_RNA (1)...(19): siRNA sense strand
caauugauguagaguuuca

SEQ ID NO: 722408 - RNA, 19 nt, Homo sapiens
  misc_RNA (1)...(19): siRNA sense strand
gcaggugccucuggauuuc

SEQ ID NO: 722409 - RNA, 19 nt, Homo sapiens
  misc_RNA (1)...(19): siRNA sense strand
cggagcaccugguccuaua

SEQ ID NO: 722410 - RNA, 19 nt, Homo sapiens
  misc_RNA (1)...(19): siRNA sense strand
uggaagaauuggucuagaa

SEQ ID NO: 722411 - RNA, 19 nt, Homo sapiens
  misc_RNA (1)...(19): siRNA sense strand
cauuggaacugguauuuca

SEQ ID NO: 722412 - RNA, 19 nt, Homo sapiens
  misc_RNA (1)...(19): siRNA sense strand
aaagggugaugauggaauu

SEQ ID NO: 722413 - RNA, 19 nt, Homo sapiens
  misc_RNA (1)...(19): siRNA sense strand
ccuggaaccuccucuguug

SEQ ID NO: 722414 - RNA, 19 nt, Homo sapiens
  misc_RNA (1)...(19): siRNA sense strand
aaauggagguauuaaagga

SEQ ID NO: 722415 - RNA, 19 nt, Homo sapiens
  misc_RNA (1)...(19): siRNA sense strand
ggacagccaggucuuauag

SEQ ID NO: 722416 - RNA, 19 nt, Homo sapiens
  misc_RNA (1)...(19): siRNA sense strand
ucaggucuaugaaggcuuu

SEQ ID NO: 722417 - RNA, 19 nt, Homo sapiens
  misc_RNA (1)...(19): siRNA sense strand
agagaggguuuccagguuu

SEQ ID NO: 722418 - RNA, 19 nt, Homo sapiens
  misc_RNA (1)...(19): siRNA sense strand
ugaaccaggauuugcauua

SEQ ID NO: 722419 - RNA, 19 nt, Homo sapiens
  misc_RNA (1)...(19): siRNA sense strand
ggugaaccagguaguauaa

SEQ ID NO: 722420 - RNA, 19 nt, Homo sapiens
  misc_RNA (1)...(19): siRNA sense strand
gacaacggaugcaccacaa

SEQ ID NO: 722421 - RNA, 19 nt, Homo sapiens
  misc_RNA (1)...(19): siRNA sense strand
gagaggguuuccagguuug

SEQ ID NO: 722422 - RNA, 19 nt, Homo sapiens
  misc_RNA (1)...(19): siRNA sense strand
uggcuugccugguuugaaa

SEQ ID NO: 722423 - RNA, 19 nt, Homo sapiens
  misc_RNA (1)...(19): siRNA sense strand
cuaccuggcuugccugguu

SEQ ID NO: 722424 - RNA, 19 nt, Homo sapiens
  misc_RNA (1)...(19): siRNA sense strand
gaguggacaaccuggauua

SEQ ID NO: 722425 - RNA, 19 nt, Homo sapiens
  misc_RNA (1)...(19): siRNA sense strand
caaaucuucugggcucaaa

SEQ ID NO: 722426 - RNA, 19 nt, Homo sapiens
  misc_RNA (1)...(19): siRNA sense strand
gaugaaggaccaccuggaa

SEQ ID NO: 722427 - RNA, 19 nt, Homo sapiens
  misc_RNA (1)...(19): siRNA sense strand
gaaaauggccaaccaggaa

SEQ ID NO: 722428 - RNA, 19 nt, Homo sapiens
  misc_RNA (1)...(19): siRNA sense strand
ugaaggaccaccuggaauu

SEQ ID NO: 722429 - RNA, 19 nt, Homo sapiens
  misc_RNA (1)...(19): siRNA sense strand
gagcauccagccauucauu

SEQ ID NO: 722430 - RNA, 19 nt, Homo sapiens
  misc_RNA (1)...(19): siRNA sense strand
gaaauggagguauuaaagg

SEQ ID NO: 722431 - RNA, 19 nt, Homo sapiens
  misc_RNA (1)...(19): siRNA sense strand
ugggacaccuggaagaauu

SEQ ID NO: 722432 - RNA, 19 nt, Homo sapiens
  misc_RNA (1)...(19): siRNA sense strand
ggauccaggucagacuaua

SEQ ID NO: 722433 - RNA, 19 nt, Homo sapiens
  misc_RNA (1)...(19): siRNA sense strand
ggagagccugguggaauua

SEQ ID NO: 722434 - RNA, 19 nt, Homo sapiens
  misc_RNA (1)...(19): siRNA sense strand
ccagagcccaugccaauga

SEQ ID NO: 722435 - RNA, 19 nt, Homo sapiens
  misc_RNA (1)...(19): siRNA sense strand
caguaaaccucagucagaa

SEQ ID NO: 722436 - RNA, 19 nt, Homo sapiens
  misc_RNA (1)...(19): siRNA sense strand
ucaguaaaccucagucaga

SEQ ID NO: 722437 - RNA, 19 nt, Homo sapiens
  misc_RNA (1)...(19): siRNA sense strand
aaugaagggugacaaagga

SEQ ID NO: 722438 - RNA, 19 nt, Homo sapiens
  misc_RNA (1)...(19): siRNA sense strand
gcuggcaacuguagaugug

SEQ ID NO: 722439 - RNA, 19 nt, Homo sapiens
  misc_RNA (1)...(19): siRNA sense strand
gauccaggucagacuauaa

SEQ ID NO: 722440 - RNA, 19 nt, Homo sapiens
  misc_RNA (1)...(19): siRNA sense strand
aaagaccaauugauguaga

SEQ ID NO: 722441 - RNA, 19 nt, Homo sapiens
  misc_RNA (1)...(19): siRNA sense strand
ucagacauguucaguaaac

SEQ ID NO: 722442 - RNA, 19 nt, Homo sapiens
  misc_RNA (1)...(19): siRNA sense strand
uggauuaccugguccuuca

SEQ ID NO: 722443 - RNA, 19 nt, Homo sapiens
  misc_RNA (1)...(19): siRNA sense strand
uuacuggcccugagucuuu

SEQ ID NO: 722444 - RNA, 19 nt, Homo sapiens
  misc_RNA (1)...(19): siRNA sense strand
ugucaagugugcaugaaga

SEQ ID NO: 722445 - RNA, 19 nt, Homo sapiens
  misc_RNA (1)...(19): siRNA sense strand
ugguguaccuggucuuaaa

SEQ ID NO: 722446 - RNA, 19 nt, Homo sapiens
  misc_RNA (1)...(19): siRNA sense strand
gaaugaagggugacaaagg

SEQ ID NO: 722447 - RNA, 19 nt, Homo sapiens
  misc_RNA (1)...(19): siRNA sense strand
ccagguaguauaauuaugu

SEQ ID NO: 722448 - RNA, 19 nt, Homo sapiens
  misc_RNA (1)...(19): siRNA sense strand
gaugucaagugugcaugaa

SEQ ID NO: 722449 - RNA, 19 nt, Homo sapiens
  misc_RNA (1)...(19): siRNA sense strand
caacggaugcaccacaaug

SEQ ID NO: 722450 - RNA, 19 nt, Homo sapiens
  misc_RNA (1)...(19): siRNA sense strand
gaaaggcgacaaaggugau

SEQ ID NO: 722451 - RNA, 19 nt, Homo sapiens
  misc_RNA (1)...(19): siRNA sense strand
aaaggaaccaucggugaua

SEQ ID NO: 722452 - RNA, 19 nt, Homo sapiens
  misc_RNA (1)...(19): siRNA sense strand
ugagaagggugagcaagga

SEQ ID NO: 722453 - RNA, 19 nt, Homo sapiens
  misc_RNA (1)...(19): siRNA sense strand
accaauugauguagaguuu

SEQ ID NO: 722454 - RNA, 19 nt, Homo sapiens
  misc_RNA (1)...(19): siRNA sense strand
caaaggagaaccagguauc

SEQ ID NO: 722455 - RNA, 19 nt, Homo sapiens
  misc_RNA (1)...(19): siRNA sense strand
gggaacacuucaggucuau

SEQ ID NO: 722456 - RNA, 19 nt, Homo sapiens
  misc_RNA (1)...(19): siRNA sense strand
ccugguauuucaagcauug

SEQ ID NO: 722457 - RNA, 19 nt, Homo sapiens
  misc_RNA (1)...(19): siRNA sense strand
caccaggucccaaagguaa

SEQ ID NO: 722458 - RNA, 19 nt, Homo sapiens
  misc_RNA (1)...(19): siRNA sense strand
caaaggauuaccaggcauu

SEQ ID NO: 722459 - RNA, 19 nt, Homo sapiens
  misc_RNA (1)...(19): siRNA sense strand
ggaauaccagguccuaaag

SEQ ID NO: 722460 - RNA, 19 nt, Homo sapiens
  misc_RNA (1)...(19): siRNA sense strand
aggagagccugguggaauu

SEQ ID NO: 722461 - RNA, 19 nt, Homo sapiens
  misc_RNA (1)...(19): siRNA sense strand
ugugggagauccugguuug

SEQ ID NO: 722462 - RNA, 19 nt, Homo sapiens
  misc_RNA (1)...(19): siRNA sense strand
caaagguucugugggagau

SEQ ID NO: 722463 - RNA, 19 nt, Homo sapiens
  misc_RNA (1)...(19): siRNA sense strand
uggacaaccuggaccaaug

SEQ ID NO: 722464 - RNA, 19 nt, Homo sapiens
  misc_RNA (1)...(19): siRNA sense strand
gggugaaccagguaguaua

SEQ ID NO: 722465 - RNA, 19 nt, Homo sapiens
  misc_RNA (1)...(19): siRNA sense strand
cagcugccuucgucgcuuu

SEQ ID NO: 722466 - RNA, 19 nt, Homo sapiens
  misc_RNA (1)...(19): siRNA sense strand
ggaagaauuggucuagaag

SEQ ID NO: 722467 - RNA, 19 nt, Homo sapiens
  misc_RNA (1)...(19): siRNA sense strand
gcaaaggagaaccagguau

SEQ ID NO: 722468 - RNA, 19 nt, Homo sapiens
  misc_RNA (1)...(19): siRNA sense strand
uacaagguguggcaggaaa

SEQ ID NO: 722469 - RNA, 19 nt, Homo sapiens
  misc_RNA (1)...(19): siRNA sense strand
gagguaaaccaggcaaaga

SEQ ID NO: 722470 - RNA, 19 nt, Homo sapiens
  misc_RNA (1)...(19): siRNA sense strand
gggcagaucagugaacaga

SEQ ID NO: 722471 - RNA, 19 nt, Homo sapiens
  misc_RNA (1)...(19): siRNA sense strand
gcacauggauuucuuauua

SEQ ID NO: 722472 - RNA, 19 nt, Homo sapiens
  misc_RNA (1)...(19): siRNA sense strand
ggacagaguaucauaauua

SEQ ID NO: 722473 - RNA, 19 nt, Homo sapiens
  misc_RNA (1)...(19): siRNA sense strand
ccaaggaccucaaggcuua

SEQ ID NO: 722474 - RNA, 19 nt, Homo sapiens
  misc_RNA (1)...(19): siRNA sense strand
gcagaucagugaacagaaa

SEQ ID NO: 722475 - RNA, 19 nt, Homo sapiens
  misc_RNA (1)...(19): siRNA sense strand
gaaccagguaguauaauua

SEQ ID NO: 722476 - RNA, 19 nt, Homo sapiens
  misc_RNA (1)...(19): siRNA sense strand
gaaaggacccaguggagua

SEQ ID NO: 722477 - RNA, 19 nt, Homo sapiens
  misc_RNA (1)...(19): siRNA sense strand
gaaaggagaucagggacuu

SEQ ID NO: 722478 - RNA, 19 nt, Homo sapiens
  misc_RNA (1)...(19): siRNA sense strand
caacuuugcuucaagaaau

SEQ ID NO: 722479 - RNA, 19 nt, Homo sapiens
  misc_RNA (1)...(19): siRNA sense strand
ucagaaaggugaugaagga

SEQ ID NO: 722480 - RNA, 19 nt, Homo sapiens
  misc_RNA (1)...(19): siRNA sense strand
ggaauaugggcuuaaauuu

SEQ ID NO: 722481 - RNA, 19 nt, Homo sapiens
  misc_RNA (1)...(19): siRNA sense strand
gagagaggguuuccagguu

SEQ ID NO: 722482 - RNA, 19 nt, Homo sapiens
  misc_RNA (1)...(19): siRNA sense strand
aaagggugauggaggauua

SEQ ID NO: 722483 - RNA, 19 nt, Homo sapiens
  misc_RNA (1)...(19): siRNA sense strand
gaauaugggcuuaaauuuc

SEQ ID NO: 722484 - RNA, 19 nt, Homo sapiens
  misc_RNA (1)...(19): siRNA sense strand
gaacacuucaggucuauga

SEQ ID NO: 722485 - RNA, 19 nt, Homo sapiens
  misc_RNA (1)...(19): siRNA sense strand
ggaaggacacccaggauug

SEQ ID NO: 722486 - RNA, 19 nt, Homo sapiens
  misc_RNA (1)...(19): siRNA sense strand
ggaaauggagguauuaaag

SEQ ID NO: 722487 - RNA, 19 nt, Homo sapiens
  misc_RNA (1)...(19): siRNA sense strand
caaaggugauccugguauu

SEQ ID NO: 722488 - RNA, 19 nt, Homo sapiens
  misc_RNA (1)...(19): siRNA sense strand
gggaauaugggcuuaaauu

SEQ ID NO: 722489 - RNA, 19 nt, Homo sapiens
  misc_RNA (1)...(19): siRNA sense strand
aggcagagauggugaugua

SEQ ID NO: 722490 - RNA, 19 nt, Homo sapiens
  misc_RNA (1)...(19): siRNA sense strand
gcagaaggcucaggucaag

SEQ ID NO: 722491 - RNA, 19 nt, Homo sapiens
  misc_RNA (1)...(19): siRNA sense strand
caagggagaacguggauuu

SEQ ID NO: 722492 - RNA, 19 nt, Homo sapiens
  misc_RNA (1)...(19): siRNA sense strand
ugaaccagguaguauaauu

SEQ ID NO: 722493 - RNA, 19 nt, Homo sapiens
  misc_RNA (1)...(19): siRNA sense strand
gcugaaagcaggagacuug

SEQ ID NO: 722494 - RNA, 19 nt, Homo sapiens
  misc_RNA (1)...(19): siRNA sense strand
uauaggaccuccaggauca

SEQ ID NO: 722495 - RNA, 19 nt, Homo sapiens
  misc_RNA (1)...(19): siRNA sense strand
caccaggacuuccagguuu

SEQ ID NO: 722496 - RNA, 19 nt, Homo sapiens
  misc_RNA (1)...(19): siRNA sense strand
gaaaagaccaauugaugua

SEQ ID NO: 722497 - RNA, 19 nt, Homo sapiens
  misc_RNA (1)...(19): siRNA sense strand
gaacagaaaagaccaauug

SEQ ID NO: 722498 - RNA, 19 nt, Homo sapiens
  misc_RNA (1)...(19): siRNA sense strand
gcaaggagagccaggcaaa

SEQ ID NO: 722499 - RNA, 19 nt, Homo sapiens
  misc_RNA (1)...(19): siRNA sense strand
gaaggaccaccuggaauuu

SEQ ID NO: 722500 - RNA, 19 nt, Homo sapiens
  misc_RNA (1)...(19): siRNA sense strand
cgaauuagccgaugucaag

SEQ ID NO: 722501 - RNA, 19 nt, Homo sapiens
  misc_RNA (1)...(19): siRNA sense strand
gacuugaggacacgaauua

SEQ ID NO: 722502 - RNA, 19 nt, Homo sapiens
  misc_RNA (1)...(19): siRNA sense strand
caccaggacuccaggguaa

SEQ ID NO: 722503 - RNA, 19 nt, Homo sapiens
  misc_RNA (1)...(19): siRNA sense strand
caacuggucccaaaggauu

SEQ ID NO: 722504 - RNA, 19 nt, Homo sapiens
  misc_RNA (1)...(19): siRNA sense strand
aggauuaccuggacagaaa

SEQ ID NO: 722505 - RNA, 19 nt, Homo sapiens
  misc_RNA (1)...(19): siRNA sense strand
gaaccaggauuugcauuac

SEQ ID NO: 722506 - RNA, 19 nt, Homo sapiens
  misc_RNA (1)...(19): siRNA sense strand
gaaaugacuauucuuacug

SEQ ID NO: 722507 - RNA, 19 nt, Homo sapiens
  misc_RNA (1)...(19): siRNA sense strand
caauugauguagaguuuca

SEQ ID NO: 722508 - RNA, 19 nt, Homo sapiens
  misc_RNA (1)...(19): siRNA sense strand
gcaggugccucuggauuuc

SEQ ID NO: 722509 - RNA, 19 nt, Homo sapiens
  misc_RNA (1)...(19): siRNA sense strand
cggagcaccugguccuaua

SEQ ID NO: 722510 - RNA, 19 nt, Homo sapiens
  misc_RNA (1)...(19): siRNA sense strand
uggaagaauuggucuagaa

SEQ ID NO: 722511 - RNA, 19 nt, Homo sapiens
  misc_RNA (1)...(19): siRNA sense strand
cauuggaacugguauuuca

SEQ ID NO: 722512 - RNA, 19 nt, Homo sapiens
  misc_RNA (1)...(19): siRNA sense strand
aaagggugaugauggaauu

SEQ ID NO: 722513 - RNA, 19 nt, Homo sapiens
  misc_RNA (1)...(19): siRNA sense strand
ccuggaaccuccucuguug

SEQ ID NO: 722514 - RNA, 19 nt, Homo sapiens
  misc_RNA (1)...(19): siRNA sense strand
aaauggagguauuaaagga

SEQ ID NO: 722515 - RNA, 19 nt, Homo sapiens
  misc_RNA (1)...(19): siRNA sense strand
ggacagccaggucuuauag

SEQ ID NO: 722516 - RNA, 19 nt, Homo sapiens
  misc_RNA (1)...(19): siRNA sense strand
ucaggucuaugaaggcuuu

SEQ ID NO: 722517 - RNA, 19 nt, Homo sapiens
  misc_RNA (1)...(19): siRNA sense strand
agagaggguuuccagguuu

SEQ ID NO: 722518 - RNA, 19 nt, Homo sapiens
  misc_RNA (1)...(19): siRNA sense strand
ugaaccaggauuugcauua

SEQ ID NO: 722519 - RNA, 19 nt, Homo sapiens
  misc_RNA (1)...(19): siRNA sense strand
ggugaaccagguaguauaa

SEQ ID NO: 722520 - RNA, 19 nt, Homo sapiens
  misc_RNA (1)...(19): siRNA sense strand
gacaacggaugcaccacaa

SEQ ID NO: 722521 - RNA, 19 nt, Homo sapiens
  misc_RNA (1)...(19): siRNA sense strand
gagaggguuuccagguuug

SEQ ID NO: 722522 - RNA, 19 nt, Homo sapiens
  misc_RNA (1)...(19): siRNA sense strand
uggcuugccugguuugaaa

SEQ ID NO: 722523 - RNA, 19 nt, Homo sapiens
  misc_RNA (1)...(19): siRNA sense strand
cuaccuggcuugccugguu

SEQ ID NO: 722524 - RNA, 19 nt, Homo sapiens
  misc_RNA (1)...(19): siRNA sense strand
gaguggacaaccuggauua

SEQ ID NO: 722525 - RNA, 19 nt, Homo sapiens
  misc_RNA (1)...(19): siRNA sense strand
caaaucuucugggcucaaa

SEQ ID NO: 722526 - RNA, 19 nt, Homo sapiens
  misc_RNA (1)...(19): siRNA sense strand
gaugaaggaccaccuggaa

SEQ ID NO: 722527 - RNA, 19 nt, Homo sapiens
  misc_RNA (1)...(19): siRNA sense strand
gaaaauggccaaccaggaa

SEQ ID NO: 722528 - RNA, 19 nt, Homo sapiens
  misc_RNA (1)...(19): siRNA sense strand
ugaaggaccaccuggaauu

SEQ ID NO: 722529 - RNA, 19 nt, Homo sapiens
  misc_RNA (1)...(19): siRNA sense strand
gagcauccagccauucauu

SEQ ID NO: 722530 - RNA, 19 nt, Homo sapiens
  misc_RNA (1)...(19): siRNA sense strand
gaaauggagguauuaaagg

SEQ ID NO: 722531 - RNA, 19 nt, Homo sapiens
  misc_RNA (1)...(19): siRNA sense strand
ugggacaccuggaagaauu

SEQ ID NO: 722532 - RNA, 19 nt, Homo sapiens
  misc_RNA (1)...(19): siRNA sense strand
ggauccaggucagacuaua

SEQ ID NO: 722533 - RNA, 19 nt, Homo sapiens
  misc_RNA (1)...(19): siRNA sense strand
ggagagccugguggaauua

SEQ ID NO: 722534 - RNA, 19 nt, Homo sapiens
  misc_RNA (1)...(19): siRNA sense strand
ccagagcccaugccaauga

SEQ ID NO: 722535 - RNA, 19 nt, Homo sapiens
  misc_RNA (1)...(19): siRNA sense strand
caguaaaccucagucagaa

SEQ ID NO: 722536 - RNA, 19 nt, Homo sapiens
  misc_RNA (1)...(19): siRNA sense strand
ucaguaaaccucagucaga

SEQ ID NO: 722537 - RNA, 19 nt, Homo sapiens
  misc_RNA (1)...(19): siRNA sense strand
aaugaagggugacaaagga

SEQ ID NO: 722538 - RNA, 19 nt, Homo sapiens
  misc_RNA (1)...(19): siRNA sense strand
gcuggcaacuguagaugug

SEQ ID NO: 722539 - RNA, 19 nt, Homo sapiens
  misc_RNA (1)...(19): siRNA sense strand
gauccaggucagacuauaa

SEQ ID NO: 722540 - RNA, 19 nt, Homo sapiens
  misc_RNA (1)...(19): siRNA sense strand
aaagaccaauugauguaga

SEQ ID NO: 722541 - RNA, 19 nt, Homo sapiens
  misc_RNA (1)...(19): siRNA sense strand
ucagacauguucaguaaac

SEQ ID NO: 722542 - RNA, 19 nt, Homo sapiens
  misc_RNA (1)...(19): siRNA sense strand
uggauuaccugguccuuca

SEQ ID NO: 722543 - RNA, 19 nt, Homo sapiens
  misc_RNA (1)...(19): siRNA sense strand
uuacuggcccugagucuuu

SEQ ID NO: 722544 - RNA, 19 nt, Homo sapiens
  misc_RNA (1)...(19): siRNA sense strand
ugucaagugugcaugaaga

SEQ ID NO: 722545 - RNA, 19 nt, Homo sapiens
  misc_RNA (1)...(19): siRNA sense strand
ugguguaccuggucuuaaa

SEQ ID NO: 722546 - RNA, 19 nt, Homo sapiens
  misc_RNA (1)...(19): siRNA sense strand
gaaugaagggugacaaagg

SEQ ID NO: 722547 - RNA, 19 nt, Homo sapiens
  misc_RNA (1)...(19): siRNA sense strand
ccagguaguauaauuaugu

SEQ ID NO: 722548 - RNA, 19 nt, Homo sapiens
  misc_RNA (1)...(19): siRNA sense strand
gaugucaagugugcaugaa

SEQ ID NO: 722549 - RNA, 19 nt, Homo sapiens
  misc_RNA (1)...(19): siRNA sense strand
caacggaugcaccacaaug

SEQ ID NO: 722550 - RNA, 19 nt, Homo sapiens
  misc_RNA (1)...(19): siRNA sense strand
gaaaggcgacaaaggugau

SEQ ID NO: 722551 - RNA, 19 nt, Homo sapiens
  misc_RNA (1)...(19): siRNA sense strand
aaaggaaccaucggugaua

SEQ ID NO: 722552 - RNA, 19 nt, Homo sapiens
  misc_RNA (1)...(19): siRNA sense strand
ugagaagggugagcaagga

SEQ ID NO: 722553 - RNA, 19 nt, Homo sapiens
  misc_RNA (1)...(19): siRNA sense strand
accaauugauguagaguuu

SEQ ID NO: 722554 - RNA, 19 nt, Homo sapiens
  misc_RNA (1)...(19): siRNA sense strand
caaaggagaaccagguauc

SEQ ID NO: 722555 - RNA, 19 nt, Homo sapiens
  misc_RNA (1)...(19): siRNA sense strand
gggaacacuucaggucuau

SEQ ID NO: 722556 - RNA, 19 nt, Homo sapiens
  misc_RNA (1)...(19): siRNA sense strand
ccugguauuucaagcauug

SEQ ID NO: 722557 - RNA, 19 nt, Homo sapiens
  misc_RNA (1)...(19): siRNA sense strand
caccaggucccaaagguaa

SEQ ID NO: 722558 - RNA, 19 nt, Homo sapiens
  misc_RNA (1)...(19): siRNA sense strand
caaaggauuaccaggcauu

SEQ ID NO: 722559 - RNA, 19 nt, Homo sapiens
  misc_RNA (1)...(19): siRNA sense strand
ggaauaccagguccuaaag

SEQ ID NO: 722560 - RNA, 19 nt, Homo sapiens
  misc_RNA (1)...(19): siRNA sense strand
aggagagccugguggaauu

SEQ ID NO: 722561 - RNA, 19 nt, Homo sapiens
  misc_RNA (1)...(19): siRNA sense strand
ugugggagauccugguuug

SEQ ID NO: 722562 - RNA, 19 nt, Homo sapiens
  misc_RNA (1)...(19): siRNA sense strand
caaagguucugugggagau

SEQ ID NO: 722563 - RNA, 19 nt, Homo sapiens
  misc_RNA (1)...(19): siRNA sense strand
uggacaaccuggaccaaug

SEQ ID NO: 722564 - RNA, 19 nt, Homo sapiens
  misc_RNA (1)...(19): siRNA sense strand
gggugaaccagguaguaua

SEQ ID NO: 722565 - RNA, 19 nt, Homo sapiens
  misc_RNA (1)...(19): siRNA sense strand
cagcugccuucgucgcuuu

SEQ ID NO: 722566 - RNA, 19 nt, Homo sapiens
  misc_RNA (1)...(19): siRNA sense strand
ggaagaauuggucuagaag

SEQ ID NO: 722567 - RNA, 19 nt, Homo sapiens
  misc_RNA (1)...(19): siRNA sense strand
gcaaaggagaaccagguau

SEQ ID NO: 722568 - RNA, 19 nt, Homo sapiens
  misc_RNA (1)...(19): siRNA sense strand
uacaagguguggcaggaaa

SEQ ID NO: 722569 - RNA, 19 nt, Homo sapiens
  misc_RNA (1)...(19): siRNA sense strand
gagguaaaccaggcaaaga

SEQ ID NO: 722570 - RNA, 19 nt, Homo sapiens
  misc_RNA (1)...(19): siRNA sense strand
gggcagaucagugaacaga

SEQ ID NO: 722571 - RNA, 19 nt, Homo sapiens
  misc_RNA (1)...(19): siRNA sense strand
ggaaagaacuguacaggaa

SEQ ID NO: 722572 - RNA, 19 nt, Homo sapiens
  misc_RNA (1)...(19): siRNA sense strand
gaaacucucucgccucuuu

SEQ ID NO: 722573 - RNA, 19 nt, Homo sapiens
  misc_RNA (1)...(19): siRNA sense strand
gaaccuaccagauguauuu

SEQ ID NO: 722574 - RNA, 19 nt, Homo sapiens
  misc_RNA (1)...(19): siRNA sense strand
gcaagugccacauucauua

SEQ ID NO: 722575 - RNA, 19 nt, Homo sapiens
  misc_RNA (1)...(19): siRNA sense strand
gaccaacacuucccuaugu

SEQ ID NO: 722576 - RNA, 19 nt, Homo sapiens
  misc_RNA (1)...(19): siRNA sense strand
gaaugacgacaguauguua

SEQ ID NO: 722577 - RNA, 19 nt, Homo sapiens
  misc_RNA (1)...(19): siRNA sense strand
gcacugaaccuaccagaug

SEQ ID NO: 722578 - RNA, 19 nt, Homo sapiens
  misc_RNA (1)...(19): siRNA sense strand
acaaagaucuucagaaacu

SEQ ID NO: 722579 - RNA, 19 nt, Homo sapiens
  misc_RNA (1)...(19): siRNA sense strand
aaugacagauuucccuuua

SEQ ID NO: 722580 - RNA, 19 nt, Homo sapiens
  misc_RNA (1)...(19): siRNA sense strand
gaaaccugauuguuguaaa

SEQ ID NO: 722581 - RNA, 19 nt, Homo sapiens
  misc_RNA (1)...(19): siRNA sense strand
uuagagaccuuguaucaau

SEQ ID NO: 722582 - RNA, 19 nt, Homo sapiens
  misc_RNA (1)...(19): siRNA sense strand
ugacagauuucccuuuaga

SEQ ID NO: 722583 - RNA, 19 nt, Homo sapiens
  misc_RNA (1)...(19): siRNA sense strand
gaacugaaacuacggaucu

SEQ ID NO: 722584 - RNA, 19 nt, Homo sapiens
  misc_RNA (1)...(19): siRNA sense strand
gaagaggcacauacaaaga

SEQ ID NO: 722585 - RNA, 19 nt, Homo sapiens
  misc_RNA (1)...(19): siRNA sense strand
agacacagauuggaaagaa

SEQ ID NO: 722586 - RNA, 19 nt, Homo sapiens
  misc_RNA (1)...(19): siRNA sense strand
ccaaucaguucacucauuc

SEQ ID NO: 722587 - RNA, 19 nt, Homo sapiens
  misc_RNA (1)...(19): siRNA sense strand
gaccaaagaccaacacuuc

SEQ ID NO: 722588 - RNA, 19 nt, Homo sapiens
  misc_RNA (1)...(19): siRNA sense strand
guugauacaucuucucaug

SEQ ID NO: 722589 - RNA, 19 nt, Homo sapiens
  misc_RNA (1)...(19): siRNA sense strand
gggugaauaugaccaaaga

SEQ ID NO: 722590 - RNA, 19 nt, Homo sapiens
  misc_RNA (1)...(19): siRNA sense strand
gaugaacaaccaagugauu

SEQ ID NO: 722591 - RNA, 19 nt, Homo sapiens
  misc_RNA (1)...(19): siRNA sense strand
acaaugagauuagaagugu

SEQ ID NO: 722592 - RNA, 19 nt, Homo sapiens
  misc_RNA (1)...(19): siRNA sense strand
gaagcugagucaauucaag

SEQ ID NO: 722593 - RNA, 19 nt, Homo sapiens
  misc_RNA (1)...(19): siRNA sense strand
ucaaucagcugacuguucu

SEQ ID NO: 722594 - RNA, 19 nt, Homo sapiens
  misc_RNA (1)...(19): siRNA sense strand
ggaagaggcacauacaaag

SEQ ID NO: 722595 - RNA, 19 nt, Homo sapiens
  misc_RNA (1)...(19): siRNA sense strand
gacuugauauguuugauuc

SEQ ID NO: 722596 - RNA, 19 nt, Homo sapiens
  misc_RNA (1)...(19): siRNA sense strand
gaauaugaccaaagaccaa

SEQ ID NO: 722597 - RNA, 19 nt, Homo sapiens
  misc_RNA (1)...(19): siRNA sense strand
cugagucaauucaagauaa

SEQ ID NO: 722598 - RNA, 19 nt, Homo sapiens
  misc_RNA (1)...(19): siRNA sense strand
ucuaauacccgauuuacaa

SEQ ID NO: 722599 - RNA, 19 nt, Homo sapiens
  misc_RNA (1)...(19): siRNA sense strand
ccacugagaccacgcuuug

SEQ ID NO: 722600 - RNA, 19 nt, Homo sapiens
  misc_RNA (1)...(19): siRNA sense strand
ggacuugauauguuugauu

SEQ ID NO: 722601 - RNA, 19 nt, Homo sapiens
  misc_RNA (1)...(19): siRNA sense strand
gaaagggcgguuugugaug

SEQ ID NO: 722602 - RNA, 19 nt, Homo sapiens
  misc_RNA (1)...(19): siRNA sense strand
gccaccagcuccaaucaga

SEQ ID NO: 722603 - RNA, 19 nt, Homo sapiens
  misc_RNA (1)...(19): siRNA sense strand
caacucacaccauuccauu

SEQ ID NO: 722604 - RNA, 19 nt, Homo sapiens
  misc_RNA (1)...(19): siRNA sense strand
aaagaacuguacaggaaga

SEQ ID NO: 722605 - RNA, 19 nt, Homo sapiens
  misc_RNA (1)...(19): siRNA sense strand
gacauuccagcgccuaaua

SEQ ID NO: 722606 - RNA, 19 nt, Homo sapiens
  misc_RNA (1)...(19): siRNA sense strand
ggagacgcccagccaguuu

SEQ ID NO: 722607 - RNA, 19 nt, Homo sapiens
  misc_RNA (1)...(19): siRNA sense strand
ucacaccauuccauucuau

SEQ ID NO: 722608 - RNA, 19 nt, Homo sapiens
  misc_RNA (1)...(19): siRNA sense strand
gaaacuaggggaaaaugua

SEQ ID NO: 722609 - RNA, 19 nt, Homo sapiens
  misc_RNA (1)...(19): siRNA sense strand
ggaaaccugauuguuguaa

SEQ ID NO: 722610 - RNA, 19 nt, Homo sapiens
  misc_RNA (1)...(19): siRNA sense strand
aaugaugccuugauagugu

SEQ ID NO: 722611 - RNA, 19 nt, Homo sapiens
  misc_RNA (1)...(19): siRNA sense strand
cauuagagaccuuguauca

SEQ ID NO: 722612 - RNA, 19 nt, Homo sapiens
  misc_RNA (1)...(19): siRNA sense strand
gaacccaugcucuguagug

SEQ ID NO: 722613 - RNA, 19 nt, Homo sapiens
  misc_RNA (1)...(19): siRNA sense strand
ugccaaugaugccuugaua

SEQ ID NO: 722614 - RNA, 19 nt, Homo sapiens
  misc_RNA (1)...(19): siRNA sense strand
ccggagaaguggaaguuga

SEQ ID NO: 722615 - RNA, 19 nt, Homo sapiens
  misc_RNA (1)...(19): siRNA sense strand
ugggaaaccugauuguugu

SEQ ID NO: 722616 - RNA, 19 nt, Homo sapiens
  misc_RNA (1)...(19): siRNA sense strand
cccaaucaguucacucauu

SEQ ID NO: 722617 - RNA, 19 nt, Homo sapiens
  misc_RNA (1)...(19): siRNA sense strand
ggauguucguuccgucuug

SEQ ID NO: 722618 - RNA, 19 nt, Homo sapiens
  misc_RNA (1)...(19): siRNA sense strand
uagccaacauauacaaaga

SEQ ID NO: 722619 - RNA, 19 nt, Homo sapiens
  misc_RNA (1)...(19): siRNA sense strand
agacuagcauacaggauga

SEQ ID NO: 722620 - RNA, 19 nt, Homo sapiens
  misc_RNA (1)...(19): siRNA sense strand
aagagaccuuggcuucaua

SEQ ID NO: 722621 - RNA, 19 nt, Homo sapiens
  misc_RNA (1)...(19): siRNA sense strand
auaaugagcaacccucuuu

SEQ ID NO: 722622 - RNA, 19 nt, Homo sapiens
  misc_RNA (1)...(19): siRNA sense strand
ggaaugacgacaguauguu

SEQ ID NO: 722623 - RNA, 19 nt, Homo sapiens
  misc_RNA (1)...(19): siRNA sense strand
ugacuguucugaugccaau

SEQ ID NO: 722624 - RNA, 19 nt, Homo sapiens
  misc_RNA (1)...(19): siRNA sense strand
ccgcuacucucaccugugu

SEQ ID NO: 722625 - RNA, 19 nt, Homo sapiens
  misc_RNA (1)...(19): siRNA sense strand
gccaacauauacaaagauc

SEQ ID NO: 722626 - RNA, 19 nt, Homo sapiens
  misc_RNA (1)...(19): siRNA sense strand
acaaccaagugauucauuc

SEQ ID NO: 722627 - RNA, 19 nt, Homo sapiens
  misc_RNA (1)...(19): siRNA sense strand
ucaagacacagauuggaaa

SEQ ID NO: 722628 - RNA, 19 nt, Homo sapiens
  misc_RNA (1)...(19): siRNA sense strand
ccucuuuacugcuucaaau

SEQ ID NO: 722629 - RNA, 19 nt, Homo sapiens
  misc_RNA (1)...(19): siRNA sense strand
ccaaugaugccuugauagu

SEQ ID NO: 722630 - RNA, 19 nt, Homo sapiens
  misc_RNA (1)...(19): siRNA sense strand
caagauaaugcgcauaugg

SEQ ID NO: 722631 - RNA, 19 nt, Homo sapiens
  misc_RNA (1)...(19): siRNA sense strand
ccgaaagggcgguuuguga

SEQ ID NO: 722632 - RNA, 19 nt, Homo sapiens
  misc_RNA (1)...(19): siRNA sense strand
agaggcacauacaaagaaa

SEQ ID NO: 722633 - RNA, 19 nt, Homo sapiens
  misc_RNA (1)...(19): siRNA sense strand
guuggagucagguuacaua

SEQ ID NO: 722634 - RNA, 19 nt, Homo sapiens
  misc_RNA (1)...(19): siRNA sense strand
cgaaagggcgguuugugau

SEQ ID NO: 722635 - RNA, 19 nt, Homo sapiens
  misc_RNA (1)...(19): siRNA sense strand
gcacauacaaagaaaagaa

SEQ ID NO: 722636 - RNA, 19 nt, Homo sapiens
  misc_RNA (1)...(19): siRNA sense strand
ccacagauucagagcauuc

SEQ ID NO: 722637 - RNA, 19 nt, Homo sapiens
  misc_RNA (1)...(19): siRNA sense strand
gguuugucgugaccucuuu

SEQ ID NO: 722638 - RNA, 19 nt, Homo sapiens
  misc_RNA (1)...(19): siRNA sense strand
gcugagucaauucaagaua

SEQ ID NO: 722639 - RNA, 19 nt, Homo sapiens
  misc_RNA (1)...(19): siRNA sense strand
uagcauacaggaugaacaa

SEQ ID NO: 722640 - RNA, 19 nt, Homo sapiens
  misc_RNA (1)...(19): siRNA sense strand
cccaugcucuguagugaau

SEQ ID NO: 722641 - RNA, 19 nt, Homo sapiens
  misc_RNA (1)...(19): siRNA sense strand
guacaggaagaggcacaua

SEQ ID NO: 722642 - RNA, 19 nt, Homo sapiens
  misc_RNA (1)...(19): siRNA sense strand
cauacaggaugaacaacca

SEQ ID NO: 722643 - RNA, 19 nt, Homo sapiens
  misc_RNA (1)...(19): siRNA sense strand
gacccaaucaguucacuca

SEQ ID NO: 722644 - RNA, 19 nt, Homo sapiens
  misc_RNA (1)...(19): siRNA sense strand
aggaagaggcacauacaaa

SEQ ID NO: 722645 - RNA, 19 nt, Homo sapiens
  misc_RNA (1)...(19): siRNA sense strand
gauuagaagugugaaaaga

SEQ ID NO: 722646 - RNA, 19 nt, Homo sapiens
  misc_RNA (1)...(19): siRNA sense strand
gaacaaccaagugauucau

SEQ ID NO: 722647 - RNA, 19 nt, Homo sapiens
  misc_RNA (1)...(19): siRNA sense strand
uggcagagggcacagguuu

SEQ ID NO: 722648 - RNA, 19 nt, Homo sapiens
  misc_RNA (1)...(19): siRNA sense strand
cgugaccucuuuacugcuu

SEQ ID NO: 722649 - RNA, 19 nt, Homo sapiens
  misc_RNA (1)...(19): siRNA sense strand
caacaaugagauuagaagu

SEQ ID NO: 722650 - RNA, 19 nt, Homo sapiens
  misc_RNA (1)...(19): siRNA sense strand
caaugacagauuucccuuu

SEQ ID NO: 722651 - RNA, 19 nt, Homo sapiens
  misc_RNA (1)...(19): siRNA sense strand
gcagagggcacagguuucu

SEQ ID NO: 722652 - RNA, 19 nt, Homo sapiens
  misc_RNA (1)...(19): siRNA sense strand
cauuccagcgccuaauaua

SEQ ID NO: 722653 - RNA, 19 nt, Homo sapiens
  misc_RNA (1)...(19): siRNA sense strand
uagagaccuuguaucaauc

SEQ ID NO: 722654 - RNA, 19 nt, Homo sapiens
  misc_RNA (1)...(19): siRNA sense strand
gaaaagaauccccgaaagg

SEQ ID NO: 722655 - RNA, 19 nt, Homo sapiens
  misc_RNA (1)...(19): siRNA sense strand
aagaggcacauacaaagaa

SEQ ID NO: 722656 - RNA, 19 nt, Homo sapiens
  misc_RNA (1)...(19): siRNA sense strand
gauguucguuccgucuugu

SEQ ID NO: 722657 - RNA, 19 nt, Homo sapiens
  misc_RNA (1)...(19): siRNA sense strand
agucugguguuuggaauga

SEQ ID NO: 722658 - RNA, 19 nt, Homo sapiens
  misc_RNA (1)...(19): siRNA sense strand
gggaaaccugauuguugua

SEQ ID NO: 722659 - RNA, 19 nt, Homo sapiens
  misc_RNA (1)...(19): siRNA sense strand
ggguguauaagcugcagua

SEQ ID NO: 722660 - RNA, 19 nt, Homo sapiens
  misc_RNA (1)...(19): siRNA sense strand
ucagggcaccgaagccaaa

SEQ ID NO: 722661 - RNA, 19 nt, Homo sapiens
  misc_RNA (1)...(19): siRNA sense strand
ucaagauaaugcgcauaug

SEQ ID NO: 722662 - RNA, 19 nt, Homo sapiens
  misc_RNA (1)...(19): siRNA sense strand
gugccacauucauuagaga

SEQ ID NO: 722663 - RNA, 19 nt, Homo sapiens
  misc_RNA (1)...(19): siRNA sense strand
cagauuggaaagaacugua

SEQ ID NO: 722664 - RNA, 19 nt, Homo sapiens
  misc_RNA (1)...(19): siRNA sense strand
acaauacugucagaguuca

SEQ ID NO: 722665 - RNA, 19 nt, Homo sapiens
  misc_RNA (1)...(19): siRNA sense strand
ccaaucagacuagcauaca

SEQ ID NO: 722666 - RNA, 19 nt, Homo sapiens
  misc_RNA (1)...(19): siRNA sense strand
cacugaaccuaccagaugu

SEQ ID NO: 722667 - RNA, 19 nt, Homo sapiens
  misc_RNA (1)...(19): siRNA sense strand
caagugccacauucauuag

SEQ ID NO: 722668 - RNA, 19 nt, Homo sapiens
  misc_RNA (1)...(19): siRNA sense strand
guaucaaucagcugacugu

SEQ ID NO: 722669 - RNA, 19 nt, Homo sapiens
  misc_RNA (1)...(19): siRNA sense strand
uuacauugaacuacaagga

SEQ ID NO: 722670 - RNA, 19 nt, Homo sapiens
  misc_RNA (1)...(19): siRNA sense strand
gaguucaagacacagauug

SEQ ID NO: 722671 - RNA, 19 nt, Homo sapiens
  misc_RNA (1)...(19): siRNA sense strand
gaagauacauugaccauua

SEQ ID NO: 722672 - RNA, 19 nt, Homo sapiens
  misc_RNA (1)...(19): siRNA sense strand
gggaugaucucaagaaaua

SEQ ID NO: 722673 - RNA, 19 nt, Homo sapiens
  misc_RNA (1)...(19): siRNA sense strand
gaaauacugucucccuuua

SEQ ID NO: 722674 - RNA, 19 nt, Homo sapiens
  misc_RNA (1)...(19): siRNA sense strand
ggaaaucucucuucauaga

SEQ ID NO: 722675 - RNA, 19 nt, Homo sapiens
  misc_RNA (1)...(19): siRNA sense strand
gacaagaucuuuaauguug

SEQ ID NO: 722676 - RNA, 19 nt, Homo sapiens
  misc_RNA (1)...(19): siRNA sense strand
gaacuuagcucuguacauc

SEQ ID NO: 722677 - RNA, 19 nt, Homo sapiens
  misc_RNA (1)...(19): siRNA sense strand
ucaaggaccuggaguaguu

SEQ ID NO: 722678 - RNA, 19 nt, Homo sapiens
  misc_RNA (1)...(19): siRNA sense strand
caggauacauggaaggaua

SEQ ID NO: 722679 - RNA, 19 nt, Homo sapiens
  misc_RNA (1)...(19): siRNA sense strand
gcauggcacugucuaauca

SEQ ID NO: 722680 - RNA, 19 nt, Homo sapiens
  misc_RNA (1)...(19): siRNA sense strand
uuggaaaucucucuucaua

SEQ ID NO: 722681 - RNA, 19 nt, Homo sapiens
  misc_RNA (1)...(19): siRNA sense strand
uggaguaguuggugaauuu

SEQ ID NO: 722682 - RNA, 19 nt, Homo sapiens
  misc_RNA (1)...(19): siRNA sense strand
gcaagcuuccugacgauua

SEQ ID NO: 722683 - RNA, 19 nt, Homo sapiens
  misc_RNA (1)...(19): siRNA sense strand
ccaaauggcucgaaaucca

SEQ ID NO: 722684 - RNA, 19 nt, Homo sapiens
  misc_RNA (1)...(19): siRNA sense strand
gacagucgcuauuggagaa

SEQ ID NO: 722685 - RNA, 19 nt, Homo sapiens
  misc_RNA (1)...(19): siRNA sense strand
ccauuaugcugcuauuaaa

SEQ ID NO: 722686 - RNA, 19 nt, Homo sapiens
  misc_RNA (1)...(19): siRNA sense strand
guuagugguuccuggguua

SEQ ID NO: 722687 - RNA, 19 nt, Homo sapiens
  misc_RNA (1)...(19): siRNA sense strand
gaaauccagcugcuauuga

SEQ ID NO: 722688 - RNA, 19 nt, Homo sapiens
  misc_RNA (1)...(19): siRNA sense strand
gcagagacagggacugaaa

SEQ ID NO: 722689 - RNA, 19 nt, Homo sapiens
  misc_RNA (1)...(19): siRNA sense strand
aauacuggcugauaucuga

SEQ ID NO: 722690 - RNA, 19 nt, Homo sapiens
  misc_RNA (1)...(19): siRNA sense strand
gacagggacugaaauacug

SEQ ID NO: 722691 - RNA, 19 nt, Homo sapiens
  misc_RNA (1)...(19): siRNA sense strand
ugagaaggccugucaguug

SEQ ID NO: 722692 - RNA, 19 nt, Homo sapiens
  misc_RNA (1)...(19): siRNA sense strand
gcugauaucugaggaagag

SEQ ID NO: 722693 - RNA, 19 nt, Homo sapiens
  misc_RNA (1)...(19): siRNA sense strand
caagcuuccugacgauuau

SEQ ID NO: 722694 - RNA, 19 nt, Homo sapiens
  misc_RNA (1)...(19): siRNA sense strand
guuuaccucuuaugucaaa

SEQ ID NO: 722695 - RNA, 19 nt, Homo sapiens
  misc_RNA (1)...(19): siRNA sense strand
cagcugcuauugacauguu

SEQ ID NO: 722696 - RNA, 19 nt, Homo sapiens
  misc_RNA (1)...(19): siRNA sense strand
aagaugcacuuccugagaa

SEQ ID NO: 722697 - RNA, 19 nt, Homo sapiens
  misc_RNA (1)...(19): siRNA sense strand
gaagaaucaguguuggaaa

SEQ ID NO: 722698 - RNA, 19 nt, Homo sapiens
  misc_RNA (1)...(19): siRNA sense strand
caggucggguauaugaaua

SEQ ID NO: 722699 - RNA, 19 nt, Homo sapiens
  misc_RNA (1)...(19): siRNA sense strand
ggagaauaacaaaugcuaa

SEQ ID NO: 722700 - RNA, 19 nt, Homo sapiens
  misc_RNA (1)...(19): siRNA sense strand
gagaccaaauuuucagaua

SEQ ID NO: 722701 - RNA, 19 nt, Homo sapiens
  misc_RNA (1)...(19): siRNA sense strand
ucauagauacuuacucuga

SEQ ID NO: 722702 - RNA, 19 nt, Homo sapiens
  misc_RNA (1)...(19): siRNA sense strand
aagaaucaguguuggaaau

SEQ ID NO: 722703 - RNA, 19 nt, Homo sapiens
  misc_RNA (1)...(19): siRNA sense strand
gcagagggccgaaacaaaa

SEQ ID NO: 722704 - RNA, 19 nt, Homo sapiens
  misc_RNA (1)...(19): siRNA sense strand
ugaaauacugucucccuuu

SEQ ID NO: 722705 - RNA, 19 nt, Homo sapiens
  misc_RNA (1)...(19): siRNA sense strand
gagaauaacaaaugcuaag

SEQ ID NO: 722706 - RNA, 19 nt, Homo sapiens
  misc_RNA (1)...(19): siRNA sense strand
caucaucagagaccaaauu

SEQ ID NO: 722707 - RNA, 19 nt, Homo sapiens
  misc_RNA (1)...(19): siRNA sense strand
cugacugguuuaccucuua

SEQ ID NO: 722708 - RNA, 19 nt, Homo sapiens
  misc_RNA (1)...(19): siRNA sense strand
gaagcauggcacugucuaa

SEQ ID NO: 722709 - RNA, 19 nt, Homo sapiens
  misc_RNA (1)...(19): siRNA sense strand
gcccaggucggguauauga

SEQ ID NO: 722710 - RNA, 19 nt, Homo sapiens
  misc_RNA (1)...(19): siRNA sense strand
ucacaauggacagaaguua

SEQ ID NO: 722711 - RNA, 19 nt, Homo sapiens
  misc_RNA (1)...(19): siRNA sense strand
cacauucucuacaacauca

SEQ ID NO: 722712 - RNA, 19 nt, Homo sapiens
  misc_RNA (1)...(19): siRNA sense strand
cccacuauuucuucacaua

SEQ ID NO: 722713 - RNA, 19 nt, Homo sapiens
  misc_RNA (1)...(19): siRNA sense strand
cuucauagauacuuacucu

SEQ ID NO: 722714 - RNA, 19 nt, Homo sapiens
  misc_RNA (1)...(19): siRNA sense strand
gaccaaauggcucgaaauc

SEQ ID NO: 722715 - RNA, 19 nt, Homo sapiens
  misc_RNA (1)...(19): siRNA sense strand
agagacagggacugaaaua

SEQ ID NO: 722716 - RNA, 19 nt, Homo sapiens
  misc_RNA (1)...(19): siRNA sense strand
agaccucgaugcuguggaa

SEQ ID NO: 722717 - RNA, 19 nt, Homo sapiens
  misc_RNA (1)...(19): siRNA sense strand
ggcacugucuaaucacuau

SEQ ID NO: 722718 - RNA, 19 nt, Homo sapiens
  misc_RNA (1)...(19): siRNA sense strand
gauacuuacucugauguag

SEQ ID NO: 722719 - RNA, 19 nt, Homo sapiens
  misc_RNA (1)...(19): siRNA sense strand
caacauucagggugucuau

SEQ ID NO: 722720 - RNA, 19 nt, Homo sapiens
  misc_RNA (1)...(19): siRNA sense strand
ugguuuaccucuuauguca

SEQ ID NO: 722721 - RNA, 19 nt, Homo sapiens
  misc_RNA (1)...(19): siRNA sense strand
cuaccaauguccagaccaa

SEQ ID NO: 722722 - RNA, 19 nt, Homo sapiens
  misc_RNA (1)...(19): siRNA sense strand
ucacuaucguucugaagau

SEQ ID NO: 722723 - RNA, 19 nt, Homo sapiens
  misc_RNA (1)...(19): siRNA sense strand
gaagagaaaacacagaaga

SEQ ID NO: 722724 - RNA, 19 nt, Homo sapiens
  misc_RNA (1)...(19): siRNA sense strand
gaccaaauuuucagauaug

SEQ ID NO: 722725 - RNA, 19 nt, Homo sapiens
  misc_RNA (1)...(19): siRNA sense strand
ggaagcauggcacugucua

SEQ ID NO: 722726 - RNA, 19 nt, Homo sapiens
  misc_RNA (1)...(19): siRNA sense strand
agagggugcucgagaggaa

SEQ ID NO: 722727 - RNA, 19 nt, Homo sapiens
  misc_RNA (1)...(19): siRNA sense strand
cacagaagaaucaguguug

SEQ ID NO: 722728 - RNA, 19 nt, Homo sapiens
  misc_RNA (1)...(19): siRNA sense strand
uuucagauauguucacgau

SEQ ID NO: 722729 - RNA, 19 nt, Homo sapiens
  misc_RNA (1)...(19): siRNA sense strand
cagaccaaauggcucgaaa

SEQ ID NO: 722730 - RNA, 19 nt, Homo sapiens
  misc_RNA (1)...(19): siRNA sense strand
guacauagcaguggaagcu

SEQ ID NO: 722731 - RNA, 19 nt, Homo sapiens
  misc_RNA (1)...(19): siRNA sense strand
cauagauacuuacucugau

SEQ ID NO: 722732 - RNA, 19 nt, Homo sapiens
  misc_RNA (1)...(19): siRNA sense strand
gaaucaguguuggaaaucu

SEQ ID NO: 722733 - RNA, 19 nt, Homo sapiens
  misc_RNA (1)...(19): siRNA sense strand
ggccugggaugaucucaag

SEQ ID NO: 722734 - RNA, 19 nt, Homo sapiens
  misc_RNA (1)...(19): siRNA sense strand
aaagaugcacuuccugaga

SEQ ID NO: 722735 - RNA, 19 nt, Homo sapiens
  misc_RNA (1)...(19): siRNA sense strand
cgaaauccagcugcuauug

SEQ ID NO: 722736 - RNA, 19 nt, Homo sapiens
  misc_RNA (1)...(19): siRNA sense strand
gauacauggaaggauauua

SEQ ID NO: 722737 - RNA, 19 nt, Homo sapiens
  misc_RNA (1)...(19): siRNA sense strand
acucugauguaggaagaua

SEQ ID NO: 722738 - RNA, 19 nt, Homo sapiens
  misc_RNA (1)...(19): siRNA sense strand
cacaagcuguaccacauuc

SEQ ID NO: 722739 - RNA, 19 nt, Homo sapiens
  misc_RNA (1)...(19): siRNA sense strand
cagcccaggucggguauau

SEQ ID NO: 722740 - RNA, 19 nt, Homo sapiens
  misc_RNA (1)...(19): siRNA sense strand
ucacauaccgaaucaggau

SEQ ID NO: 722741 - RNA, 19 nt, Homo sapiens
  misc_RNA (1)...(19): siRNA sense strand
gauccagaauguguagcaa

SEQ ID NO: 722742 - RNA, 19 nt, Homo sapiens
  misc_RNA (1)...(19): siRNA sense strand
uugcauacauacugguuug

SEQ ID NO: 722743 - RNA, 19 nt, Homo sapiens
  misc_RNA (1)...(19): siRNA sense strand
gauaucugaggaagagaaa

SEQ ID NO: 722744 - RNA, 19 nt, Homo sapiens
  misc_RNA (1)...(19): siRNA sense strand
guucauaccgaauucacaa

SEQ ID NO: 722745 - RNA, 19 nt, Homo sapiens
  misc_RNA (1)...(19): siRNA sense strand
ggaagauacauugaccauu

SEQ ID NO: 722746 - RNA, 19 nt, Homo sapiens
  misc_RNA (1)...(19): siRNA sense strand
gaccauuaugcugcuauua

SEQ ID NO: 722747 - RNA, 19 nt, Homo sapiens
  misc_RNA (1)...(19): siRNA sense strand
ccaauguccagaccaaaug

SEQ ID NO: 722748 - RNA, 19 nt, Homo sapiens
  misc_RNA (1)...(19): siRNA sense strand
guucugaagauuuguuaga

SEQ ID NO: 722749 - RNA, 19 nt, Homo sapiens
  misc_RNA (1)...(19): siRNA sense strand
gauuaucgauguucauacc

SEQ ID NO: 722750 - RNA, 19 nt, Homo sapiens
  misc_RNA (1)...(19): siRNA sense strand
auagauacuuacucugaug

SEQ ID NO: 722751 - RNA, 19 nt, Homo sapiens
  misc_RNA (1)...(19): siRNA sense strand
caacaucaggauacaugga

SEQ ID NO: 722752 - RNA, 19 nt, Homo sapiens
  misc_RNA (1)...(19): siRNA sense strand
ugacugguuuaccucuuau

SEQ ID NO: 722753 - RNA, 19 nt, Homo sapiens
  misc_RNA (1)...(19): siRNA sense strand
cagcagagacagggacuga

SEQ ID NO: 722754 - RNA, 19 nt, Homo sapiens
  misc_RNA (1)...(19): siRNA sense strand
uaaucacuaucguucugaa

SEQ ID NO: 722755 - RNA, 19 nt, Homo sapiens
  misc_RNA (1)...(19): siRNA sense strand
ucuaaucacuaucguucug

SEQ ID NO: 722756 - RNA, 19 nt, Homo sapiens
  misc_RNA (1)...(19): siRNA sense strand
ugaccauuaugcugcuauu

SEQ ID NO: 722757 - RNA, 19 nt, Homo sapiens
  misc_RNA (1)...(19): siRNA sense strand
uuacucugauguaggaaga

SEQ ID NO: 722758 - RNA, 19 nt, Homo sapiens
  misc_RNA (1)...(19): siRNA sense strand
ggacuaucgggaucuaauc

SEQ ID NO: 722759 - RNA, 19 nt, Homo sapiens
  misc_RNA (1)...(19): siRNA sense strand
cauacauacugguuugagu

SEQ ID NO: 722760 - RNA, 19 nt, Homo sapiens
  misc_RNA (1)...(19): siRNA sense strand
cagaauguguagcaacaac

SEQ ID NO: 722761 - RNA, 19 nt, Homo sapiens
  misc_RNA (1)...(19): siRNA sense strand
ccauauggcauguccaaca

SEQ ID NO: 722762 - RNA, 19 nt, Homo sapiens
  misc_RNA (1)...(19): siRNA sense strand
gaauguguagcaacaacug

SEQ ID NO: 722763 - RNA, 19 nt, Homo sapiens
  misc_RNA (1)...(19): siRNA sense strand
uacuuacucugauguagga

SEQ ID NO: 722764 - RNA, 19 nt, Homo sapiens
  misc_RNA (1)...(19): siRNA sense strand
agaagaaucaguguuggaa

SEQ ID NO: 722765 - RNA, 19 nt, Homo sapiens
  misc_RNA (1)...(19): siRNA sense strand
caucagagaccaaauuuuc

SEQ ID NO: 722766 - RNA, 19 nt, Homo sapiens
  misc_RNA (1)...(19): siRNA sense strand
accauuaugcugcuauuaa

SEQ ID NO: 722767 - RNA, 19 nt, Homo sapiens
  misc_RNA (1)...(19): siRNA sense strand
guggagaagacauugcaaa

SEQ ID NO: 722768 - RNA, 19 nt, Homo sapiens
  misc_RNA (1)...(19): siRNA sense strand
gauccgcuguggagaagac

SEQ ID NO: 722769 - RNA, 19 nt, Homo sapiens
  misc_RNA (1)...(19): siRNA sense strand
cuaucguucugaagauuug

SEQ ID NO: 722770 - RNA, 19 nt, Homo sapiens
  misc_RNA (1)...(19): siRNA sense strand
guaccacauucucuacaac

SEQ ID NO: 722771 - RNA, 19 nt, Homo sapiens
  misc_RNA (1)...(19): siRNA sense strand
gaagauacauugaccauua

SEQ ID NO: 722772 - RNA, 19 nt, Homo sapiens
  misc_RNA (1)...(19): siRNA sense strand
gggaugaucucaagaaaua

SEQ ID NO: 722773 - RNA, 19 nt, Homo sapiens
  misc_RNA (1)...(19): siRNA sense strand
gaaauacugucucccuuua

SEQ ID NO: 722774 - RNA, 19 nt, Homo sapiens
  misc_RNA (1)...(19): siRNA sense strand
ggaaaucucucuucauaga

SEQ ID NO: 722775 - RNA, 19 nt, Homo sapiens
  misc_RNA (1)...(19): siRNA sense strand
gacaagaucuuuaauguug

SEQ ID NO: 722776 - RNA, 19 nt, Homo sapiens
  misc_RNA (1)...(19): siRNA sense strand
gaacuuagcucuguacauc

SEQ ID NO: 722777 - RNA, 19 nt, Homo sapiens
  misc_RNA (1)...(19): siRNA sense strand
ucaaggaccuggaguaguu

SEQ ID NO: 722778 - RNA, 19 nt, Homo sapiens
  misc_RNA (1)...(19): siRNA sense strand
caggauacauggaaggaua

SEQ ID NO: 722779 - RNA, 19 nt, Homo sapiens
  misc_RNA (1)...(19): siRNA sense strand
gcauggcacugucuaauca

SEQ ID NO: 722780 - RNA, 19 nt, Homo sapiens
  misc_RNA (1)...(19): siRNA sense strand
uuggaaaucucucuucaua

SEQ ID NO: 722781 - RNA, 19 nt, Homo sapiens
  misc_RNA (1)...(19): siRNA sense strand
uggaguaguuggugaauuu

SEQ ID NO: 722782 - RNA, 19 nt, Homo sapiens
  misc_RNA (1)...(19): siRNA sense strand
gcaagcuuccugacgauua

SEQ ID NO: 722783 - RNA, 19 nt, Homo sapiens
  misc_RNA (1)...(19): siRNA sense strand
ccaaauggcucgaaaucca

SEQ ID NO: 722784 - RNA, 19 nt, Homo sapiens
  misc_RNA (1)...(19): siRNA sense strand
gacagucgcuauuggagaa

SEQ ID NO: 722785 - RNA, 19 nt, Homo sapiens
  misc_RNA (1)...(19): siRNA sense strand
ccauuaugcugcuauuaaa

SEQ ID NO: 722786 - RNA, 19 nt, Homo sapiens
  misc_RNA (1)...(19): siRNA sense strand
guuagugguuccuggguua

SEQ ID NO: 722787 - RNA, 19 nt, Homo sapiens
  misc_RNA (1)...(19): siRNA sense strand
gaaauccagcugcuauuga

SEQ ID NO: 722788 - RNA, 19 nt, Homo sapiens
  misc_RNA (1)...(19): siRNA sense strand
gcagagacagggacugaaa

SEQ ID NO: 722789 - RNA, 19 nt, Homo sapiens
  misc_RNA (1)...(19): siRNA sense strand
aauacuggcugauaucuga

SEQ ID NO: 722790 - RNA, 19 nt, Homo sapiens
  misc_RNA (1)...(19): siRNA sense strand
gacagggacugaaauacug

SEQ ID NO: 722791 - RNA, 19 nt, Homo sapiens
  misc_RNA (1)...(19): siRNA sense strand
ugagaaggccugucaguug

SEQ ID NO: 722792 - RNA, 19 nt, Homo sapiens
  misc_RNA (1)...(19): siRNA sense strand
gcugauaucugaggaagag

SEQ ID NO: 722793 - RNA, 19 nt, Homo sapiens
  misc_RNA (1)...(19): siRNA sense strand
caagcuuccugacgauuau

SEQ ID NO: 722794 - RNA, 19 nt, Homo sapiens
  misc_RNA (1)...(19): siRNA sense strand
guuuaccucuuaugucaaa

SEQ ID NO: 722795 - RNA, 19 nt, Homo sapiens
  misc_RNA (1)...(19): siRNA sense strand
cagcugcuauugacauguu

SEQ ID NO: 722796 - RNA, 19 nt, Homo sapiens
  misc_RNA (1)...(19): siRNA sense strand
aagaugcacuuccugagaa

SEQ ID NO: 722797 - RNA, 19 nt, Homo sapiens
  misc_RNA (1)...(19): siRNA sense strand
gaagaaucaguguuggaaa

SEQ ID NO: 722798 - RNA, 19 nt, Homo sapiens
  misc_RNA (1)...(19): siRNA sense strand
caggucggguauaugaaua

SEQ ID NO: 722799 - RNA, 19 nt, Homo sapiens
  misc_RNA (1)...(19): siRNA sense strand
ggagaauaacaaaugcuaa

SEQ ID NO: 722800 - RNA, 19 nt, Homo sapiens
  misc_RNA (1)...(19): siRNA sense strand
gagaccaaauuuucagaua

SEQ ID NO: 722801 - RNA, 19 nt, Homo sapiens
  misc_RNA (1)...(19): siRNA sense strand
ucauagauacuuacucuga

SEQ ID NO: 722802 - RNA, 19 nt, Homo sapiens
  misc_RNA (1)...(19): siRNA sense strand
aagaaucaguguuggaaau

SEQ ID NO: 722803 - RNA, 19 nt, Homo sapiens
  misc_RNA (1)...(19): siRNA sense strand
gcagagggccgaaacaaaa

SEQ ID NO: 722804 - RNA, 19 nt, Homo sapiens
  misc_RNA (1)...(19): siRNA sense strand
ugaaauacugucucccuuu

SEQ ID NO: 722805 - RNA, 19 nt, Homo sapiens
  misc_RNA (1)...(19): siRNA sense strand
gagaauaacaaaugcuaag

SEQ ID NO: 722806 - RNA, 19 nt, Homo sapiens
  misc_RNA (1)...(19): siRNA sense strand
caucaucagagaccaaauu

SEQ ID NO: 722807 - RNA, 19 nt, Homo sapiens
  misc_RNA (1)...(19): siRNA sense strand
cugacugguuuaccucuua

SEQ ID NO: 722808 - RNA, 19 nt, Homo sapiens
  misc_RNA (1)...(19): siRNA sense strand
gaagcauggcacugucuaa

SEQ ID NO: 722809 - RNA, 19 nt, Homo sapiens
  misc_RNA (1)...(19): siRNA sense strand
gcccaggucggguauauga

SEQ ID NO: 722810 - RNA, 19 nt, Homo sapiens
  misc_RNA (1)...(19): siRNA sense strand
ucacaauggacagaaguua

SEQ ID NO: 722811 - RNA, 19 nt, Homo sapiens
  misc_RNA (1)...(19): siRNA sense strand
cacauucucuacaacauca

SEQ ID NO: 722812 - RNA, 19 nt, Homo sapiens
  misc_RNA (1)...(19): siRNA sense strand
cccacuauuucuucacaua

SEQ ID NO: 722813 - RNA, 19 nt, Homo sapiens
  misc_RNA (1)...(19): siRNA sense strand
cuucauagauacuuacucu

SEQ ID NO: 722814 - RNA, 19 nt, Homo sapiens
  misc_RNA (1)...(19): siRNA sense strand
gaccaaauggcucgaaauc

SEQ ID NO: 722815 - RNA, 19 nt, Homo sapiens
  misc_RNA (1)...(19): siRNA sense strand
agagacagggacugaaaua

SEQ ID NO: 722816 - RNA, 19 nt, Homo sapiens
  misc_RNA (1)...(19): siRNA sense strand
agaccucgaugcuguggaa

SEQ ID NO: 722817 - RNA, 19 nt, Homo sapiens
  misc_RNA (1)...(19): siRNA sense strand
ggcacugucuaaucacuau

SEQ ID NO: 722818 - RNA, 19 nt, Homo sapiens
  misc_RNA (1)...(19): siRNA sense strand
gauacuuacucugauguag

SEQ ID NO: 722819 - RNA, 19 nt, Homo sapiens
  misc_RNA (1)...(19): siRNA sense strand
caacauucagggugucuau

SEQ ID NO: 722820 - RNA, 19 nt, Homo sapiens
  misc_RNA (1)...(19): siRNA sense strand
ugguuuaccucuuauguca

SEQ ID NO: 722821 - RNA, 19 nt, Homo sapiens
  misc_RNA (1)...(19): siRNA sense strand
cuaccaauguccagaccaa

SEQ ID NO: 722822 - RNA, 19 nt, Homo sapiens
  misc_RNA (1)...(19): siRNA sense strand
ucacuaucguucugaagau

SEQ ID NO: 722823 - RNA, 19 nt, Homo sapiens
  misc_RNA (1)...(19): siRNA sense strand
gaagagaaaacacagaaga

SEQ ID NO: 722824 - RNA, 19 nt, Homo sapiens
  misc_RNA (1)...(19): siRNA sense strand
gaccaaauuuucagauaug

SEQ ID NO: 722825 - RNA, 19 nt, Homo sapiens
  misc_RNA (1)...(19): siRNA sense strand
ggaagcauggcacugucua

SEQ ID NO: 722826 - RNA, 19 nt, Homo sapiens
  misc_RNA (1)...(19): siRNA sense strand
agagggugcucgagaggaa

SEQ ID NO: 722827 - RNA, 19 nt, Homo sapiens
  misc_RNA (1)...(19): siRNA sense strand
cacagaagaaucaguguug

SEQ ID NO: 722828 - RNA, 19 nt, Homo sapiens
  misc_RNA (1)...(19): siRNA sense strand
uuucagauauguucacgau

SEQ ID NO: 722829 - RNA, 19 nt, Homo sapiens
  misc_RNA (1)...(19): siRNA sense strand
cagaccaaauggcucgaaa

SEQ ID NO: 722830 - RNA, 19 nt, Homo sapiens
  misc_RNA (1)...(19): siRNA sense strand
guacauagcaguggaagcu

SEQ ID NO: 722831 - RNA, 19 nt, Homo sapiens
  misc_RNA (1)...(19): siRNA sense strand
cauagauacuuacucugau

SEQ ID NO: 722832 - RNA, 19 nt, Homo sapiens
  misc_RNA (1)...(19): siRNA sense strand
gaaucaguguuggaaaucu

SEQ ID NO: 722833 - RNA, 19 nt, Homo sapiens
  misc_RNA (1)...(19): siRNA sense strand
ggccugggaugaucucaag

SEQ ID NO: 722834 - RNA, 19 nt, Homo sapiens
  misc_RNA (1)...(19): siRNA sense strand
aaagaugcacuuccugaga

SEQ ID NO: 722835 - RNA, 19 nt, Homo sapiens
  misc_RNA (1)...(19): siRNA sense strand
cgaaauccagcugcuauug

SEQ ID NO: 722836 - RNA, 19 nt, Homo sapiens
  misc_RNA (1)...(19): siRNA sense strand
gauacauggaaggauauua

SEQ ID NO: 722837 - RNA, 19 nt, Homo sapiens
  misc_RNA (1)...(19): siRNA sense strand
acucugauguaggaagaua

SEQ ID NO: 722838 - RNA, 19 nt, Homo sapiens
  misc_RNA (1)...(19): siRNA sense strand
cacaagcuguaccacauuc

SEQ ID NO: 722839 - RNA, 19 nt, Homo sapiens
  misc_RNA (1)...(19): siRNA sense strand
cagcccaggucggguauau

SEQ ID NO: 722840 - RNA, 19 nt, Homo sapiens
  misc_RNA (1)...(19): siRNA sense strand
ucacauaccgaaucaggau

SEQ ID NO: 722841 - RNA, 19 nt, Homo sapiens
  misc_RNA (1)...(19): siRNA sense strand
gauccagaauguguagcaa

SEQ ID NO: 722842 - RNA, 19 nt, Homo sapiens
  misc_RNA (1)...(19): siRNA sense strand
uugcauacauacugguuug

SEQ ID NO: 722843 - RNA, 19 nt, Homo sapiens
  misc_RNA (1)...(19): siRNA sense strand
gauaucugaggaagagaaa

SEQ ID NO: 722844 - RNA, 19 nt, Homo sapiens
  misc_RNA (1)...(19): siRNA sense strand
guucauaccgaauucacaa

SEQ ID NO: 722845 - RNA, 19 nt, Homo sapiens
  misc_RNA (1)...(19): siRNA sense strand
ggaagauacauugaccauu

SEQ ID NO: 722846 - RNA, 19 nt, Homo sapiens
  misc_RNA (1)...(19): siRNA sense strand
gaccauuaugcugcuauua

SEQ ID NO: 722847 - RNA, 19 nt, Homo sapiens
  misc_RNA (1)...(19): siRNA sense strand
ccaauguccagaccaaaug

SEQ ID NO: 722848 - RNA, 19 nt, Homo sapiens
  misc_RNA (1)...(19): siRNA sense strand
guucugaagauuuguuaga

SEQ ID NO: 722849 - RNA, 19 nt, Homo sapiens
  misc_RNA (1)...(19): siRNA sense strand
gauuaucgauguucauacc

SEQ ID NO: 722850 - RNA, 19 nt, Homo sapiens
  misc_RNA (1)...(19): siRNA sense strand
auagauacuuacucugaug

SEQ ID NO: 722851 - RNA, 19 nt, Homo sapiens
  misc_RNA (1)...(19): siRNA sense strand
caacaucaggauacaugga

SEQ ID NO: 722852 - RNA, 19 nt, Homo sapiens
  misc_RNA (1)...(19): siRNA sense strand
ugacugguuuaccucuuau

SEQ ID NO: 722853 - RNA, 19 nt, Homo sapiens
  misc_RNA (1)...(19): siRNA sense strand
cagcagagacagggacuga

SEQ ID NO: 722854 - RNA, 19 nt, Homo sapiens
  misc_RNA (1)...(19): siRNA sense strand
uaaucacuaucguucugaa

SEQ ID NO: 722855 - RNA, 19 nt, Homo sapiens
  misc_RNA (1)...(19): siRNA sense strand
ucuaaucacuaucguucug

SEQ ID NO: 722856 - RNA, 19 nt, Homo sapiens
  misc_RNA (1)...(19): siRNA sense strand
ugaccauuaugcugcuauu

SEQ ID NO: 722857 - RNA, 19 nt, Homo sapiens
  misc_RNA (1)...(19): siRNA sense strand
uuacucugauguaggaaga

SEQ ID NO: 722858 - RNA, 19 nt, Homo sapiens
  misc_RNA (1)...(19): siRNA sense strand
ggacuaucgggaucuaauc

SEQ ID NO: 722859 - RNA, 19 nt, Homo sapiens
  misc_RNA (1)...(19): siRNA sense strand
cauacauacugguuugagu

SEQ ID NO: 722860 - RNA, 19 nt, Homo sapiens
  misc_RNA (1)...(19): siRNA sense strand
cagaauguguagcaacaac

SEQ ID NO: 722861 - RNA, 19 nt, Homo sapiens
  misc_RNA (1)...(19): siRNA sense strand
ccauauggcauguccaaca

SEQ ID NO: 722862 - RNA, 19 nt, Homo sapiens
  misc_RNA (1)...(19): siRNA sense strand
gaauguguagcaacaacug

SEQ ID NO: 722863 - RNA, 19 nt, Homo sapiens
  misc_RNA (1)...(19): siRNA sense strand
uacuuacucugauguagga

SEQ ID NO: 722864 - RNA, 19 nt, Homo sapiens
  misc_RNA (1)...(19): siRNA sense strand
agaagaaucaguguuggaa

SEQ ID NO: 722865 - RNA, 19 nt, Homo sapiens
  misc_RNA (1)...(19): siRNA sense strand
caucagagaccaaauuuuc

SEQ ID NO: 722866 - RNA, 19 nt, Homo sapiens
  misc_RNA (1)...(19): siRNA sense strand
accauuaugcugcuauuaa

SEQ ID NO: 722867 - RNA, 19 nt, Homo sapiens
  misc_RNA (1)...(19): siRNA sense strand
guggagaagacauugcaaa

SEQ ID NO: 722868 - RNA, 19 nt, Homo sapiens
  misc_RNA (1)...(19): siRNA sense strand
gauccgcuguggagaagac

SEQ ID NO: 722869 - RNA, 19 nt, Homo sapiens
  misc_RNA (1)...(19): siRNA sense strand
cuaucguucugaagauuug

SEQ ID NO: 722870 - RNA, 19 nt, Homo sapiens
  misc_RNA (1)...(19): siRNA sense strand
guaccacauucucuacaac

SEQ ID NO: 722871 - RNA, 19 nt, Homo sapiens
  misc_RNA (1)...(19): siRNA sense strand
gaagacagcuccaaugaca

SEQ ID NO: 722872 - RNA, 19 nt, Homo sapiens
  misc_RNA (1)...(19): siRNA sense strand
gaaaucaggugcugcuuga

SEQ ID NO: 722873 - RNA, 19 nt, Homo sapiens
  misc_RNA (1)...(19): siRNA sense strand
ggaagaauguugccuauca

SEQ ID NO: 722874 - RNA, 19 nt, Homo sapiens
  misc_RNA (1)...(19): siRNA sense strand
ggacuuugcugcuuauuug

SEQ ID NO: 722875 - RNA, 19 nt, Homo sapiens
  misc_RNA (1)...(19): siRNA sense strand
gaaaagaacucaacauaga

SEQ ID NO: 722876 - RNA, 19 nt, Homo sapiens
  misc_RNA (1)...(19): siRNA sense strand
gaacaacaaucauuagaag

SEQ ID NO: 722877 - RNA, 19 nt, Homo sapiens
  misc_RNA (1)...(19): siRNA sense strand
caagagagcuacagucguu

SEQ ID NO: 722878 - RNA, 19 nt, Homo sapiens
  misc_RNA (1)...(19): siRNA sense strand
gugcagaacuuccagauga

SEQ ID NO: 722879 - RNA, 19 nt, Homo sapiens
  misc_RNA (1)...(19): siRNA sense strand
gaauuugaccggccucuua

SEQ ID NO: 722880 - RNA, 19 nt, Homo sapiens
  misc_RNA (1)...(19): siRNA sense strand
gaugacagcuugugaucuu

SEQ ID NO: 722881 - RNA, 19 nt, Homo sapiens
  misc_RNA (1)...(19): siRNA sense strand
ggaagagguuguuggugua

SEQ ID NO: 722882 - RNA, 19 nt, Homo sapiens
  misc_RNA (1)...(19): siRNA sense strand
ggaagaaguuucaaauaac

SEQ ID NO: 722883 - RNA, 19 nt, Homo sapiens
  misc_RNA (1)...(19): siRNA sense strand
gagaagaugcugauuaaug

SEQ ID NO: 722884 - RNA, 19 nt, Homo sapiens
  misc_RNA (1)...(19): siRNA sense strand
cuagauggcugcagaaaga

SEQ ID NO: 722885 - RNA, 19 nt, Homo sapiens
  misc_RNA (1)...(19): siRNA sense strand
gaauaacucuuacauacag

SEQ ID NO: 722886 - RNA, 19 nt, Homo sapiens
  misc_RNA (1)...(19): siRNA sense strand
ggaacaugaugcaaacaaa

SEQ ID NO: 722887 - RNA, 19 nt, Homo sapiens
  misc_RNA (1)...(19): siRNA sense strand
gaaagaacaggcagaaaug

SEQ ID NO: 722888 - RNA, 19 nt, Homo sapiens
  misc_RNA (1)...(19): siRNA sense strand
ggagaauacuggcaagguu

SEQ ID NO: 722889 - RNA, 19 nt, Homo sapiens
  misc_RNA (1)...(19): siRNA sense strand
gugaauaacucuuacauac

SEQ ID NO: 722890 - RNA, 19 nt, Homo sapiens
  misc_RNA (1)...(19): siRNA sense strand
caaguuggguucauagaug

SEQ ID NO: 722891 - RNA, 19 nt, Homo sapiens
  misc_RNA (1)...(19): siRNA sense strand
ugaaggauauuucuaguca

SEQ ID NO: 722892 - RNA, 19 nt, Homo sapiens
  misc_RNA (1)...(19): siRNA sense strand
uuaauaagauggaggagaa

SEQ ID NO: 722893 - RNA, 19 nt, Homo sapiens
  misc_RNA (1)...(19): siRNA sense strand
gaaaaucucugccucugaa

SEQ ID NO: 722894 - RNA, 19 nt, Homo sapiens
  misc_RNA (1)...(19): siRNA sense strand
ggugggacauuuacugaaa

SEQ ID NO: 722895 - RNA, 19 nt, Homo sapiens
  misc_RNA (1)...(19): siRNA sense strand
ggaaacggugggacauuua

SEQ ID NO: 722896 - RNA, 19 nt, Homo sapiens
  misc_RNA (1)...(19): siRNA sense strand
ggauauuucuagucauuug

SEQ ID NO: 722897 - RNA, 19 nt, Homo sapiens
  misc_RNA (1)...(19): siRNA sense strand
gagaauacuggcaagguua

SEQ ID NO: 722898 - RNA, 19 nt, Homo sapiens
  misc_RNA (1)...(19): siRNA sense strand
aggagaagaugcugauuaa

SEQ ID NO: 722899 - RNA, 19 nt, Homo sapiens
  misc_RNA (1)...(19): siRNA sense strand
gcagaaguugaccaaauua

SEQ ID NO: 722900 - RNA, 19 nt, Homo sapiens
  misc_RNA (1)...(19): siRNA sense strand
ggaagaaacaagagagcua

SEQ ID NO: 722901 - RNA, 19 nt, Homo sapiens
  misc_RNA (1)...(19): siRNA sense strand
ggugagcccuugaacauca

SEQ ID NO: 722902 - RNA, 19 nt, Homo sapiens
  misc_RNA (1)...(19): siRNA sense strand
caauucggauguuuacuga

SEQ ID NO: 722903 - RNA, 19 nt, Homo sapiens
  misc_RNA (1)...(19): siRNA sense strand
gaccuagcacuguacauua

SEQ ID NO: 722904 - RNA, 19 nt, Homo sapiens
  misc_RNA (1)...(19): siRNA sense strand
aaauaacuguauccgcuua

SEQ ID NO: 722905 - RNA, 19 nt, Homo sapiens
  misc_RNA (1)...(19): siRNA sense strand
gaauauaagaccacguuga

SEQ ID NO: 722906 - RNA, 19 nt, Homo sapiens
  misc_RNA (1)...(19): siRNA sense strand
gaagaauuaucggaagaau

SEQ ID NO: 722907 - RNA, 19 nt, Homo sapiens
  misc_RNA (1)...(19): siRNA sense strand
uuacauguaugcucaguau

SEQ ID NO: 722908 - RNA, 19 nt, Homo sapiens
  misc_RNA (1)...(19): siRNA sense strand
ugaccuugcuaguuuaauu

SEQ ID NO: 722909 - RNA, 19 nt, Homo sapiens
  misc_RNA (1)...(19): siRNA sense strand
cauggagugugaggaauua

SEQ ID NO: 722910 - RNA, 19 nt, Homo sapiens
  misc_RNA (1)...(19): siRNA sense strand
uaucauaauuggagacaug

SEQ ID NO: 722911 - RNA, 19 nt, Homo sapiens
  misc_RNA (1)...(19): siRNA sense strand
gauaucugcugaccgcuau

SEQ ID NO: 722912 - RNA, 19 nt, Homo sapiens
  misc_RNA (1)...(19): siRNA sense strand
gagaaaagaacucaacaua

SEQ ID NO: 722913 - RNA, 19 nt, Homo sapiens
  misc_RNA (1)...(19): siRNA sense strand
ucaguggccucuccauuga

SEQ ID NO: 722914 - RNA, 19 nt, Homo sapiens
  misc_RNA (1)...(19): siRNA sense strand
gcccagacccuuaaaauua

SEQ ID NO: 722915 - RNA, 19 nt, Homo sapiens
  misc_RNA (1)...(19): siRNA sense strand
guaaaccagcagugcauua

SEQ ID NO: 722916 - RNA, 19 nt, Homo sapiens
  misc_RNA (1)...(19): siRNA sense strand
agacuucacugcuggagaa

SEQ ID NO: 722917 - RNA, 19 nt, Homo sapiens
  misc_RNA (1)...(19): siRNA sense strand
caggagaagaugcugauua

SEQ ID NO: 722918 - RNA, 19 nt, Homo sapiens
  misc_RNA (1)...(19): siRNA sense strand
gaagaauguugccuaucau

SEQ ID NO: 722919 - RNA, 19 nt, Homo sapiens
  misc_RNA (1)...(19): siRNA sense strand
gaugaaacaugagguucuu

SEQ ID NO: 722920 - RNA, 19 nt, Homo sapiens
  misc_RNA (1)...(19): siRNA sense strand
gaugaagauugcuccgauu

SEQ ID NO: 722921 - RNA, 19 nt, Homo sapiens
  misc_RNA (1)...(19): siRNA sense strand
gaagaacaacaaucauuag

SEQ ID NO: 722922 - RNA, 19 nt, Homo sapiens
  misc_RNA (1)...(19): siRNA sense strand
gcuauucccuguuccuugu

SEQ ID NO: 722923 - RNA, 19 nt, Homo sapiens
  misc_RNA (1)...(19): siRNA sense strand
agaagaugcugauuaaugg

SEQ ID NO: 722924 - RNA, 19 nt, Homo sapiens
  misc_RNA (1)...(19): siRNA sense strand
gaacuuguagcaacugaau

SEQ ID NO: 722925 - RNA, 19 nt, Homo sapiens
  misc_RNA (1)...(19): siRNA sense strand
gaauguugccuaucauaau

SEQ ID NO: 722926 - RNA, 19 nt, Homo sapiens
  misc_RNA (1)...(19): siRNA sense strand
gcagaguccucgugcagau

SEQ ID NO: 722927 - RNA, 19 nt, Homo sapiens
  misc_RNA (1)...(19): siRNA sense strand
caaauuacaggcuacaaga

SEQ ID NO: 722928 - RNA, 19 nt, Homo sapiens
  misc_RNA (1)...(19): siRNA sense strand
guucaacacuggaagaagu

SEQ ID NO: 722929 - RNA, 19 nt, Homo sapiens
  misc_RNA (1)...(19): siRNA sense strand
caagggaacaugaugcaaa

SEQ ID NO: 722930 - RNA, 19 nt, Homo sapiens
  misc_RNA (1)...(19): siRNA sense strand
ccacugaucuaaugaacag

SEQ ID NO: 722931 - RNA, 19 nt, Homo sapiens
  misc_RNA (1)...(19): siRNA sense strand
gcagauggauuuuaagugu

SEQ ID NO: 722932 - RNA, 19 nt, Homo sapiens
  misc_RNA (1)...(19): siRNA sense strand
ccagaugucaguaaggaua

SEQ ID NO: 722933 - RNA, 19 nt, Homo sapiens
  misc_RNA (1)...(19): siRNA sense strand
gaccagugcucaagacucu

SEQ ID NO: 722934 - RNA, 19 nt, Homo sapiens
  misc_RNA (1)...(19): siRNA sense strand
uuacugaccucaaccuugu

SEQ ID NO: 722935 - RNA, 19 nt, Homo sapiens
  misc_RNA (1)...(19): siRNA sense strand
cagcuccaaugacaaguuu

SEQ ID NO: 722936 - RNA, 19 nt, Homo sapiens
  misc_RNA (1)...(19): siRNA sense strand
ggagacaugccuuuaauac

SEQ ID NO: 722937 - RNA, 19 nt, Homo sapiens
  misc_RNA (1)...(19): siRNA sense strand
uaagaggcgaggagaauuu

SEQ ID NO: 722938 - RNA, 19 nt, Homo sapiens
  misc_RNA (1)...(19): siRNA sense strand
agacaugccuuuaauacag

SEQ ID NO: 722939 - RNA, 19 nt, Homo sapiens
  misc_RNA (1)...(19): siRNA sense strand
ugcagaaguugaccaaauu

SEQ ID NO: 722940 - RNA, 19 nt, Homo sapiens
  misc_RNA (1)...(19): siRNA sense strand
gcagaaagaacaggcagaa

SEQ ID NO: 722941 - RNA, 19 nt, Homo sapiens
  misc_RNA (1)...(19): siRNA sense strand
caacauagaacccacugau

SEQ ID NO: 722942 - RNA, 19 nt, Homo sapiens
  misc_RNA (1)...(19): siRNA sense strand
agaauuaucggaagaaugu

SEQ ID NO: 722943 - RNA, 19 nt, Homo sapiens
  misc_RNA (1)...(19): siRNA sense strand
gugaagacagcuccaauga

SEQ ID NO: 722944 - RNA, 19 nt, Homo sapiens
  misc_RNA (1)...(19): siRNA sense strand
ugugaucuuucugcaauua

SEQ ID NO: 722945 - RNA, 19 nt, Homo sapiens
  misc_RNA (1)...(19): siRNA sense strand
caccgaaucuugcucuugu

SEQ ID NO: 722946 - RNA, 19 nt, Homo sapiens
  misc_RNA (1)...(19): siRNA sense strand
gacuuuagcuucagugacu

SEQ ID NO: 722947 - RNA, 19 nt, Homo sapiens
  misc_RNA (1)...(19): siRNA sense strand
caaccgaaaugacgaacag

SEQ ID NO: 722948 - RNA, 19 nt, Homo sapiens
  misc_RNA (1)...(19): siRNA sense strand
gcagugcauuagaaguuug

SEQ ID NO: 722949 - RNA, 19 nt, Homo sapiens
  misc_RNA (1)...(19): siRNA sense strand
guaugccaauuaagaauca

SEQ ID NO: 722950 - RNA, 19 nt, Homo sapiens
  misc_RNA (1)...(19): siRNA sense strand
agaaagaacaggcagaaau

SEQ ID NO: 722951 - RNA, 19 nt, Homo sapiens
  misc_RNA (1)...(19): siRNA sense strand
gcuugaccuugcuaguuua

SEQ ID NO: 722952 - RNA, 19 nt, Homo sapiens
  misc_RNA (1)...(19): siRNA sense strand
ccucuuagacccauuguug

SEQ ID NO: 722953 - RNA, 19 nt, Homo sapiens
  misc_RNA (1)...(19): siRNA sense strand
gaccagugccugaugauuc

SEQ ID NO: 722954 - RNA, 19 nt, Homo sapiens
  misc_RNA (1)...(19): siRNA sense strand
gcacuaagccacgauuugg

SEQ ID NO: 722955 - RNA, 19 nt, Homo sapiens
  misc_RNA (1)...(19): siRNA sense strand
auacuugcauugcugauug

SEQ ID NO: 722956 - RNA, 19 nt, Homo sapiens
  misc_RNA (1)...(19): siRNA sense strand
gugguauuguucuucauaa

SEQ ID NO: 722957 - RNA, 19 nt, Homo sapiens
  misc_RNA (1)...(19): siRNA sense strand
ggaauuagugaaggauauu

SEQ ID NO: 722958 - RNA, 19 nt, Homo sapiens
  misc_RNA (1)...(19): siRNA sense strand
uuacugccauucaaucaug

SEQ ID NO: 722959 - RNA, 19 nt, Homo sapiens
  misc_RNA (1)...(19): siRNA sense strand
gaaacaagagagcuacagu

SEQ ID NO: 722960 - RNA, 19 nt, Homo sapiens
  misc_RNA (1)...(19): siRNA sense strand
gauaacagugucccuggaa

SEQ ID NO: 722961 - RNA, 19 nt, Homo sapiens
  misc_RNA (1)...(19): siRNA sense strand
agaacccacugaucuaaug

SEQ ID NO: 722962 - RNA, 19 nt, Homo sapiens
  misc_RNA (1)...(19): siRNA sense strand
ugagcugucugaucuggaa

SEQ ID NO: 722963 - RNA, 19 nt, Homo sapiens
  misc_RNA (1)...(19): siRNA sense strand
cagcagugcauuagaaguu

SEQ ID NO: 722964 - RNA, 19 nt, Homo sapiens
  misc_RNA (1)...(19): siRNA sense strand
ggagugugaggaauuagaa

SEQ ID NO: 722965 - RNA, 19 nt, Homo sapiens
  misc_RNA (1)...(19): siRNA sense strand
ccaaugacaaguuucuuau

SEQ ID NO: 722966 - RNA, 19 nt, Homo sapiens
  misc_RNA (1)...(19): siRNA sense strand
agaacacgcagauguauga

SEQ ID NO: 722967 - RNA, 19 nt, Homo sapiens
  misc_RNA (1)...(19): siRNA sense strand
cagaacagcaggagaagau

SEQ ID NO: 722968 - RNA, 19 nt, Homo sapiens
  misc_RNA (1)...(19): siRNA sense strand
gaucaaggagacagagaga

SEQ ID NO: 722969 - RNA, 19 nt, Homo sapiens
  misc_RNA (1)...(19): siRNA sense strand
aauauaagaccacguugaa

SEQ ID NO: 722970 - RNA, 19 nt, Homo sapiens
  misc_RNA (1)...(19): siRNA sense strand
aagaagaauuaucggaaga

SEQ ID NO: 722971 - RNA, 19 nt, Homo sapiens
  misc_RNA (1)...(19): siRNA sense strand
gaagacagcuccaaugaca

SEQ ID NO: 722972 - RNA, 19 nt, Homo sapiens
  misc_RNA (1)...(19): siRNA sense strand
gaaaucaggugcugcuuga

SEQ ID NO: 722973 - RNA, 19 nt, Homo sapiens
  misc_RNA (1)...(19): siRNA sense strand
ggaagaauguugccuauca

SEQ ID NO: 722974 - RNA, 19 nt, Homo sapiens
  misc_RNA (1)...(19): siRNA sense strand
ggacuuugcugcuuauuug

SEQ ID NO: 722975 - RNA, 19 nt, Homo sapiens
  misc_RNA (1)...(19): siRNA sense strand
gaaaagaacucaacauaga

SEQ ID NO: 722976 - RNA, 19 nt, Homo sapiens
  misc_RNA (1)...(19): siRNA sense strand
gaacaacaaucauuagaag

SEQ ID NO: 722977 - RNA, 19 nt, Homo sapiens
  misc_RNA (1)...(19): siRNA sense strand
caagagagcuacagucguu

SEQ ID NO: 722978 - RNA, 19 nt, Homo sapiens
  misc_RNA (1)...(19): siRNA sense strand
gugcagaacuuccagauga

SEQ ID NO: 722979 - RNA, 19 nt, Homo sapiens
  misc_RNA (1)...(19): siRNA sense strand
gaauuugaccggccucuua

SEQ ID NO: 722980 - RNA, 19 nt, Homo sapiens
  misc_RNA (1)...(19): siRNA sense strand
gaugacagcuugugaucuu

SEQ ID NO: 722981 - RNA, 19 nt, Homo sapiens
  misc_RNA (1)...(19): siRNA sense strand
ggaagagguuguuggugua

SEQ ID NO: 722982 - RNA, 19 nt, Homo sapiens
  misc_RNA (1)...(19): siRNA sense strand
ggaagaaguuucaaauaac

SEQ ID NO: 722983 - RNA, 19 nt, Homo sapiens
  misc_RNA (1)...(19): siRNA sense strand
gagaagaugcugauuaaug

SEQ ID NO: 722984 - RNA, 19 nt, Homo sapiens
  misc_RNA (1)...(19): siRNA sense strand
cuagauggcugcagaaaga

SEQ ID NO: 722985 - RNA, 19 nt, Homo sapiens
  misc_RNA (1)...(19): siRNA sense strand
gaauaacucuuacauacag

SEQ ID NO: 722986 - RNA, 19 nt, Homo sapiens
  misc_RNA (1)...(19): siRNA sense strand
ggaacaugaugcaaacaaa

SEQ ID NO: 722987 - RNA, 19 nt, Homo sapiens
  misc_RNA (1)...(19): siRNA sense strand
gaaagaacaggcagaaaug

SEQ ID NO: 722988 - RNA, 19 nt, Homo sapiens
  misc_RNA (1)...(19): siRNA sense strand
ggagaauacuggcaagguu

SEQ ID NO: 722989 - RNA, 19 nt, Homo sapiens
  misc_RNA (1)...(19): siRNA sense strand
gugaauaacucuuacauac

SEQ ID NO: 722990 - RNA, 19 nt, Homo sapiens
  misc_RNA (1)...(19): siRNA sense strand
caaguuggguucauagaug

SEQ ID NO: 722991 - RNA, 19 nt, Homo sapiens
  misc_RNA (1)...(19): siRNA sense strand
ugaaggauauuucuaguca

SEQ ID NO: 722992 - RNA, 19 nt, Homo sapiens
  misc_RNA (1)...(19): siRNA sense strand
uuaauaagauggaggagaa

SEQ ID NO: 722993 - RNA, 19 nt, Homo sapiens
  misc_RNA (1)...(19): siRNA sense strand
gaaaaucucugccucugaa

SEQ ID NO: 722994 - RNA, 19 nt, Homo sapiens
  misc_RNA (1)...(19): siRNA sense strand
ggugggacauuuacugaaa

SEQ ID NO: 722995 - RNA, 19 nt, Homo sapiens
  misc_RNA (1)...(19): siRNA sense strand
ggaaacggugggacauuua

SEQ ID NO: 722996 - RNA, 19 nt, Homo sapiens
  misc_RNA (1)...(19): siRNA sense strand
ggauauuucuagucauuug

SEQ ID NO: 722997 - RNA, 19 nt, Homo sapiens
  misc_RNA (1)...(19): siRNA sense strand
gagaauacuggcaagguua

SEQ ID NO: 722998 - RNA, 19 nt, Homo sapiens
  misc_RNA (1)...(19): siRNA sense strand
aggagaagaugcugauuaa

SEQ ID NO: 722999 - RNA, 19 nt, Homo sapiens
  misc_RNA (1)...(19): siRNA sense strand
gcagaaguugaccaaauua

SEQ ID NO: 723000 - RNA, 19 nt, Homo sapiens
  misc_RNA (1)...(19): siRNA sense strand
ggaagaaacaagagagcua

SEQ ID NO: 723001 - RNA, 19 nt, Homo sapiens
  misc_RNA (1)...(19): siRNA sense strand
ggugagcccuugaacauca

SEQ ID NO: 723002 - RNA, 19 nt, Homo sapiens
  misc_RNA (1)...(19): siRNA sense strand
caauucggauguuuacuga

SEQ ID NO: 723003 - RNA, 19 nt, Homo sapiens
  misc_RNA (1)...(19): siRNA sense strand
gaccuagcacuguacauua

SEQ ID NO: 723004 - RNA, 19 nt, Homo sapiens
  misc_RNA (1)...(19): siRNA sense strand
aaauaacuguauccgcuua

SEQ ID NO: 723005 - RNA, 19 nt, Homo sapiens
  misc_RNA (1)...(19): siRNA sense strand
gaauauaagaccacguuga

SEQ ID NO: 723006 - RNA, 19 nt, Homo sapiens
  misc_RNA (1)...(19): siRNA sense strand
gaagaauuaucggaagaau

SEQ ID NO: 723007 - RNA, 19 nt, Homo sapiens
  misc_RNA (1)...(19): siRNA sense strand
uuacauguaugcucaguau

SEQ ID NO: 723008 - RNA, 19 nt, Homo sapiens
  misc_RNA (1)...(19): siRNA sense strand
ugaccuugcuaguuuaauu

SEQ ID NO: 723009 - RNA, 19 nt, Homo sapiens
  misc_RNA (1)...(19): siRNA sense strand
cauggagugugaggaauua

SEQ ID NO: 723010 - RNA, 19 nt, Homo sapiens
  misc_RNA (1)...(19): siRNA sense strand
uaucauaauuggagacaug

SEQ ID NO: 723011 - RNA, 19 nt, Homo sapiens
  misc_RNA (1)...(19): siRNA sense strand
gauaucugcugaccgcuau

SEQ ID NO: 723012 - RNA, 19 nt, Homo sapiens
  misc_RNA (1)...(19): siRNA sense strand
gagaaaagaacucaacaua

SEQ ID NO: 723013 - RNA, 19 nt, Homo sapiens
  misc_RNA (1)...(19): siRNA sense strand
ucaguggccucuccauuga

SEQ ID NO: 723014 - RNA, 19 nt, Homo sapiens
  misc_RNA (1)...(19): siRNA sense strand
gcccagacccuuaaaauua

SEQ ID NO: 723015 - RNA, 19 nt, Homo sapiens
  misc_RNA (1)...(19): siRNA sense strand
guaaaccagcagugcauua

SEQ ID NO: 723016 - RNA, 19 nt, Homo sapiens
  misc_RNA (1)...(19): siRNA sense strand
agacuucacugcuggagaa

SEQ ID NO: 723017 - RNA, 19 nt, Homo sapiens
  misc_RNA (1)...(19): siRNA sense strand
caggagaagaugcugauua

SEQ ID NO: 723018 - RNA, 19 nt, Homo sapiens
  misc_RNA (1)...(19): siRNA sense strand
gaagaauguugccuaucau

SEQ ID NO: 723019 - RNA, 19 nt, Homo sapiens
  misc_RNA (1)...(19): siRNA sense strand
gaugaaacaugagguucuu

SEQ ID NO: 723020 - RNA, 19 nt, Homo sapiens
  misc_RNA (1)...(19): siRNA sense strand
gaugaagauugcuccgauu

SEQ ID NO: 723021 - RNA, 19 nt, Homo sapiens
  misc_RNA (1)...(19): siRNA sense strand
gaagaacaacaaucauuag

SEQ ID NO: 723022 - RNA, 19 nt, Homo sapiens
  misc_RNA (1)...(19): siRNA sense strand
gcuauucccuguuccuugu

SEQ ID NO: 723023 - RNA, 19 nt, Homo sapiens
  misc_RNA (1)...(19): siRNA sense strand
agaagaugcugauuaaugg

SEQ ID NO: 723024 - RNA, 19 nt, Homo sapiens
  misc_RNA (1)...(19): siRNA sense strand
gaacuuguagcaacugaau

SEQ ID NO: 723025 - RNA, 19 nt, Homo sapiens
  misc_RNA (1)...(19): siRNA sense strand
gaauguugccuaucauaau

SEQ ID NO: 723026 - RNA, 19 nt, Homo sapiens
  misc_RNA (1)...(19): siRNA sense strand
gcagaguccucgugcagau

SEQ ID NO: 723027 - RNA, 19 nt, Homo sapiens
  misc_RNA (1)...(19): siRNA sense strand
caaauuacaggcuacaaga

SEQ ID NO: 723028 - RNA, 19 nt, Homo sapiens
  misc_RNA (1)...(19): siRNA sense strand
guucaacacuggaagaagu

SEQ ID NO: 723029 - RNA, 19 nt, Homo sapiens
  misc_RNA (1)...(19): siRNA sense strand
caagggaacaugaugcaaa

SEQ ID NO: 723030 - RNA, 19 nt, Homo sapiens
  misc_RNA (1)...(19): siRNA sense strand
ccacugaucuaaugaacag

SEQ ID NO: 723031 - RNA, 19 nt, Homo sapiens
  misc_RNA (1)...(19): siRNA sense strand
gcagauggauuuuaagugu

SEQ ID NO: 723032 - RNA, 19 nt, Homo sapiens
  misc_RNA (1)...(19): siRNA sense strand
ccagaugucaguaaggaua

SEQ ID NO: 723033 - RNA, 19 nt, Homo sapiens
  misc_RNA (1)...(19): siRNA sense strand
gaccagugcucaagacucu

SEQ ID NO: 723034 - RNA, 19 nt, Homo sapiens
  misc_RNA (1)...(19): siRNA sense strand
uuacugaccucaaccuugu

SEQ ID NO: 723035 - RNA, 19 nt, Homo sapiens
  misc_RNA (1)...(19): siRNA sense strand
cagcuccaaugacaaguuu

SEQ ID NO: 723036 - RNA, 19 nt, Homo sapiens
  misc_RNA (1)...(19): siRNA sense strand
ggagacaugccuuuaauac

SEQ ID NO: 723037 - RNA, 19 nt, Homo sapiens
  misc_RNA (1)...(19): siRNA sense strand
uaagaggcgaggagaauuu

SEQ ID NO: 723038 - RNA, 19 nt, Homo sapiens
  misc_RNA (1)...(19): siRNA sense strand
agacaugccuuuaauacag

SEQ ID NO: 723039 - RNA, 19 nt, Homo sapiens
  misc_RNA (1)...(19): siRNA sense strand
ugcagaaguugaccaaauu

SEQ ID NO: 723040 - RNA, 19 nt, Homo sapiens
  misc_RNA (1)...(19): siRNA sense strand
gcagaaagaacaggcagaa

SEQ ID NO: 723041 - RNA, 19 nt, Homo sapiens
  misc_RNA (1)...(19): siRNA sense strand
caacauagaacccacugau

SEQ ID NO: 723042 - RNA, 19 nt, Homo sapiens
  misc_RNA (1)...(19): siRNA sense strand
agaauuaucggaagaaugu

SEQ ID NO: 723043 - RNA, 19 nt, Homo sapiens
  misc_RNA (1)...(19): siRNA sense strand
gugaagacagcuccaauga

SEQ ID NO: 723044 - RNA, 19 nt, Homo sapiens
  misc_RNA (1)...(19): siRNA sense strand
ugugaucuuucugcaauua

SEQ ID NO: 723045 - RNA, 19 nt, Homo sapiens
  misc_RNA (1)...(19): siRNA sense strand
caccgaaucuugcucuugu

SEQ ID NO: 723046 - RNA, 19 nt, Homo sapiens
  misc_RNA (1)...(19): siRNA sense strand
gacuuuagcuucagugacu

SEQ ID NO: 723047 - RNA, 19 nt, Homo sapiens
  misc_RNA (1)...(19): siRNA sense strand
caaccgaaaugacgaacag

SEQ ID NO: 723048 - RNA, 19 nt, Homo sapiens
  misc_RNA (1)...(19): siRNA sense strand
gcagugcauuagaaguuug

SEQ ID NO: 723049 - RNA, 19 nt, Homo sapiens
  misc_RNA (1)...(19): siRNA sense strand
guaugccaauuaagaauca

SEQ ID NO: 723050 - RNA, 19 nt, Homo sapiens
  misc_RNA (1)...(19): siRNA sense strand
agaaagaacaggcagaaau

SEQ ID NO: 723051 - RNA, 19 nt, Homo sapiens
  misc_RNA (1)...(19): siRNA sense strand
gcuugaccuugcuaguuua

SEQ ID NO: 723052 - RNA, 19 nt, Homo sapiens
  misc_RNA (1)...(19): siRNA sense strand
ccucuuagacccauuguug

SEQ ID NO: 723053 - RNA, 19 nt, Homo sapiens
  misc_RNA (1)...(19): siRNA sense strand
gaccagugccugaugauuc

SEQ ID NO: 723054 - RNA, 19 nt, Homo sapiens
  misc_RNA (1)...(19): siRNA sense strand
gcacuaagccacgauuugg

SEQ ID NO: 723055 - RNA, 19 nt, Homo sapiens
  misc_RNA (1)...(19): siRNA sense strand
auacuugcauugcugauug

SEQ ID NO: 723056 - RNA, 19 nt, Homo sapiens
  misc_RNA (1)...(19): siRNA sense strand
gugguauuguucuucauaa

SEQ ID NO: 723057 - RNA, 19 nt, Homo sapiens
  misc_RNA (1)...(19): siRNA sense strand
ggaauuagugaaggauauu

SEQ ID NO: 723058 - RNA, 19 nt, Homo sapiens
  misc_RNA (1)...(19): siRNA sense strand
uuacugccauucaaucaug

SEQ ID NO: 723059 - RNA, 19 nt, Homo sapiens
  misc_RNA (1)...(19): siRNA sense strand
gaaacaagagagcuacagu

SEQ ID NO: 723060 - RNA, 19 nt, Homo sapiens
  misc_RNA (1)...(19): siRNA sense strand
gauaacagugucccuggaa

SEQ ID NO: 723061 - RNA, 19 nt, Homo sapiens
  misc_RNA (1)...(19): siRNA sense strand
agaacccacugaucuaaug

SEQ ID NO: 723062 - RNA, 19 nt, Homo sapiens
  misc_RNA (1)...(19): siRNA sense strand
ugagcugucugaucuggaa

SEQ ID NO: 723063 - RNA, 19 nt, Homo sapiens
  misc_RNA (1)...(19): siRNA sense strand
cagcagugcauuagaaguu

SEQ ID NO: 723064 - RNA, 19 nt, Homo sapiens
  misc_RNA (1)...(19): siRNA sense strand
ggagugugaggaauuagaa

SEQ ID NO: 723065 - RNA, 19 nt, Homo sapiens
  misc_RNA (1)...(19): siRNA sense strand
ccaaugacaaguuucuuau

SEQ ID NO: 723066 - RNA, 19 nt, Homo sapiens
  misc_RNA (1)...(19): siRNA sense strand
agaacacgcagauguauga

SEQ ID NO: 723067 - RNA, 19 nt, Homo sapiens
  misc_RNA (1)...(19): siRNA sense strand
cagaacagcaggagaagau

SEQ ID NO: 723068 - RNA, 19 nt, Homo sapiens
  misc_RNA (1)...(19): siRNA sense strand
gaucaaggagacagagaga

SEQ ID NO: 723069 - RNA, 19 nt, Homo sapiens
  misc_RNA (1)...(19): siRNA sense strand
aauauaagaccacguugaa

SEQ ID NO: 723070 - RNA, 19 nt, Homo sapiens
  misc_RNA (1)...(19): siRNA sense strand
aagaagaauuaucggaaga

SEQ ID NO: 723071 - RNA, 19 nt, Homo sapiens
  misc_RNA (1)...(19): siRNA sense strand
gaagacagcuccaaugaca

SEQ ID NO: 723072 - RNA, 19 nt, Homo sapiens
  misc_RNA (1)...(19): siRNA sense strand
gaaaucaggugcugcuuga

SEQ ID NO: 723073 - RNA, 19 nt, Homo sapiens
  misc_RNA (1)...(19): siRNA sense strand
ggaagaauguugccuauca

SEQ ID NO: 723074 - RNA, 19 nt, Homo sapiens
  misc_RNA (1)...(19): siRNA sense strand
ggacuuugcugcuuauuug

SEQ ID NO: 723075 - RNA, 19 nt, Homo sapiens
  misc_RNA (1)...(19): siRNA sense strand
gaaaagaacucaacauaga

SEQ ID NO: 723076 - RNA, 19 nt, Homo sapiens
  misc_RNA (1)...(19): siRNA sense strand
gaacaacaaucauuagaag

SEQ ID NO: 723077 - RNA, 19 nt, Homo sapiens
  misc_RNA (1)...(19): siRNA sense strand
caagagagcuacagucguu

SEQ ID NO: 723078 - RNA, 19 nt, Homo sapiens
  misc_RNA (1)...(19): siRNA sense strand
gugcagaacuuccagauga

SEQ ID NO: 723079 - RNA, 19 nt, Homo sapiens
  misc_RNA (1)...(19): siRNA sense strand
gaauuugaccggccucuua

SEQ ID NO: 723080 - RNA, 19 nt, Homo sapiens
  misc_RNA (1)...(19): siRNA sense strand
gaugacagcuugugaucuu

SEQ ID NO: 723081 - RNA, 19 nt, Homo sapiens
  misc_RNA (1)...(19): siRNA sense strand
ggaagagguuguuggugua

SEQ ID NO: 723082 - RNA, 19 nt, Homo sapiens
  misc_RNA (1)...(19): siRNA sense strand
ggaagaaguuucaaauaac

SEQ ID NO: 723083 - RNA, 19 nt, Homo sapiens
  misc_RNA (1)...(19): siRNA sense strand
gagaagaugcugauuaaug

SEQ ID NO: 723084 - RNA, 19 nt, Homo sapiens
  misc_RNA (1)...(19): siRNA sense strand
cuagauggcugcagaaaga

SEQ ID NO: 723085 - RNA, 19 nt, Homo sapiens
  misc_RNA (1)...(19): siRNA sense strand
gaauaacucuuacauacag

SEQ ID NO: 723086 - RNA, 19 nt, Homo sapiens
  misc_RNA (1)...(19): siRNA sense strand
ggaacaugaugcaaacaaa

SEQ ID NO: 723087 - RNA, 19 nt, Homo sapiens
  misc_RNA (1)...(19): siRNA sense strand
gaaagaacaggcagaaaug

SEQ ID NO: 723088 - RNA, 19 nt, Homo sapiens
  misc_RNA (1)...(19): siRNA sense strand
ggagaauacuggcaagguu

SEQ ID NO: 723089 - RNA, 19 nt, Homo sapiens
  misc_RNA (1)...(19): siRNA sense strand
gugaauaacucuuacauac

SEQ ID NO: 723090 - RNA, 19 nt, Homo sapiens
  misc_RNA (1)...(19): siRNA sense strand
caaguuggguucauagaug

SEQ ID NO: 723091 - RNA, 19 nt, Homo sapiens
  misc_RNA (1)...(19): siRNA sense strand
ugaaggauauuucuaguca

SEQ ID NO: 723092 - RNA, 19 nt, Homo sapiens
  misc_RNA (1)...(19): siRNA sense strand
uuaauaagauggaggagaa

SEQ ID NO: 723093 - RNA, 19 nt, Homo sapiens
  misc_RNA (1)...(19): siRNA sense strand
gaaaaucucugccucugaa

SEQ ID NO: 723094 - RNA, 19 nt, Homo sapiens
  misc_RNA (1)...(19): siRNA sense strand
ggugggacauuuacugaaa

SEQ ID NO: 723095 - RNA, 19 nt, Homo sapiens
  misc_RNA (1)...(19): siRNA sense strand
ggaaacggugggacauuua

SEQ ID NO: 723096 - RNA, 19 nt, Homo sapiens
  misc_RNA (1)...(19): siRNA sense strand
ggauauuucuagucauuug

SEQ ID NO: 723097 - RNA, 19 nt, Homo sapiens
  misc_RNA (1)...(19): siRNA sense strand
gagaauacuggcaagguua

SEQ ID NO: 723098 - RNA, 19 nt, Homo sapiens
  misc_RNA (1)...(19): siRNA sense strand
aggagaagaugcugauuaa

SEQ ID NO: 723099 - RNA, 19 nt, Homo sapiens
  misc_RNA (1)...(19): siRNA sense strand
gcagaaguugaccaaauua

SEQ ID NO: 723100 - RNA, 19 nt, Homo sapiens
  misc_RNA (1)...(19): siRNA sense strand
ggaagaaacaagagagcua

SEQ ID NO: 723101 - RNA, 19 nt, Homo sapiens
  misc_RNA (1)...(19): siRNA sense strand
ggugagcccuugaacauca

SEQ ID NO: 723102 - RNA, 19 nt, Homo sapiens
  misc_RNA (1)...(19): siRNA sense strand
caauucggauguuuacuga

SEQ ID NO: 723103 - RNA, 19 nt, Homo sapiens
  misc_RNA (1)...(19): siRNA sense strand
gaccuagcacuguacauua

SEQ ID NO: 723104 - RNA, 19 nt, Homo sapiens
  misc_RNA (1)...(19): siRNA sense strand
aaauaacuguauccgcuua

SEQ ID NO: 723105 - RNA, 19 nt, Homo sapiens
  misc_RNA (1)...(19): siRNA sense strand
gaauauaagaccacguuga

SEQ ID NO: 723106 - RNA, 19 nt, Homo sapiens
  misc_RNA (1)...(19): siRNA sense strand
gaagaauuaucggaagaau

SEQ ID NO: 723107 - RNA, 19 nt, Homo sapiens
  misc_RNA (1)...(19): siRNA sense strand
uuacauguaugcucaguau

SEQ ID NO: 723108 - RNA, 19 nt, Homo sapiens
  misc_RNA (1)...(19): siRNA sense strand
ugaccuugcuaguuuaauu

SEQ ID NO: 723109 - RNA, 19 nt, Homo sapiens
  misc_RNA (1)...(19): siRNA sense strand
cauggagugugaggaauua

SEQ ID NO: 723110 - RNA, 19 nt, Homo sapiens
  misc_RNA (1)...(19): siRNA sense strand
uaucauaauuggagacaug

SEQ ID NO: 723111 - RNA, 19 nt, Homo sapiens
  misc_RNA (1)...(19): siRNA sense strand
gauaucugcugaccgcuau

SEQ ID NO: 723112 - RNA, 19 nt, Homo sapiens
  misc_RNA (1)...(19): siRNA sense strand
gagaaaagaacucaacaua

SEQ ID NO: 723113 - RNA, 19 nt, Homo sapiens
  misc_RNA (1)...(19): siRNA sense strand
ucaguggccucuccauuga

SEQ ID NO: 723114 - RNA, 19 nt, Homo sapiens
  misc_RNA (1)...(19): siRNA sense strand
gcccagacccuuaaaauua

SEQ ID NO: 723115 - RNA, 19 nt, Homo sapiens
  misc_RNA (1)...(19): siRNA sense strand
guaaaccagcagugcauua

SEQ ID NO: 723116 - RNA, 19 nt, Homo sapiens
  misc_RNA (1)...(19): siRNA sense strand
agacuucacugcuggagaa

SEQ ID NO: 723117 - RNA, 19 nt, Homo sapiens
  misc_RNA (1)...(19): siRNA sense strand
caggagaagaugcugauua

SEQ ID NO: 723118 - RNA, 19 nt, Homo sapiens
  misc_RNA (1)...(19): siRNA sense strand
gaagaauguugccuaucau

SEQ ID NO: 723119 - RNA, 19 nt, Homo sapiens
  misc_RNA (1)...(19): siRNA sense strand
gaugaaacaugagguucuu

SEQ ID NO: 723120 - RNA, 19 nt, Homo sapiens
  misc_RNA (1)...(19): siRNA sense strand
gaugaagauugcuccgauu

SEQ ID NO: 723121 - RNA, 19 nt, Homo sapiens
  misc_RNA (1)...(19): siRNA sense strand
gaagaacaacaaucauuag

SEQ ID NO: 723122 - RNA, 19 nt, Homo sapiens
  misc_RNA (1)...(19): siRNA sense strand
gcuauucccuguuccuugu

SEQ ID NO: 723123 - RNA, 19 nt, Homo sapiens
  misc_RNA (1)...(19): siRNA sense strand
agaagaugcugauuaaugg

SEQ ID NO: 723124 - RNA, 19 nt, Homo sapiens
  misc_RNA (1)...(19): siRNA sense strand
gaacuuguagcaacugaau

SEQ ID NO: 723125 - RNA, 19 nt, Homo sapiens
  misc_RNA (1)...(19): siRNA sense strand
gaauguugccuaucauaau

SEQ ID NO: 723126 - RNA, 19 nt, Homo sapiens
  misc_RNA (1)...(19): siRNA sense strand
gcagaguccucgugcagau

SEQ ID NO: 723127 - RNA, 19 nt, Homo sapiens
  misc_RNA (1)...(19): siRNA sense strand
caaauuacaggcuacaaga

SEQ ID NO: 723128 - RNA, 19 nt, Homo sapiens
  misc_RNA (1)...(19): siRNA sense strand
guucaacacuggaagaagu

SEQ ID NO: 723129 - RNA, 19 nt, Homo sapiens
  misc_RNA (1)...(19): siRNA sense strand
caagggaacaugaugcaaa

SEQ ID NO: 723130 - RNA, 19 nt, Homo sapiens
  misc_RNA (1)...(19): siRNA sense strand
ccacugaucuaaugaacag

SEQ ID NO: 723131 - RNA, 19 nt, Homo sapiens
  misc_RNA (1)...(19): siRNA sense strand
gcagauggauuuuaagugu

SEQ ID NO: 723132 - RNA, 19 nt, Homo sapiens
  misc_RNA (1)...(19): siRNA sense strand
ccagaugucaguaaggaua

SEQ ID NO: 723133 - RNA, 19 nt, Homo sapiens
  misc_RNA (1)...(19): siRNA sense strand
gaccagugcucaagacucu

SEQ ID NO: 723134 - RNA, 19 nt, Homo sapiens
  misc_RNA (1)...(19): siRNA sense strand
uuacugaccucaaccuugu

SEQ ID NO: 723135 - RNA, 19 nt, Homo sapiens
  misc_RNA (1)...(19): siRNA sense strand
cagcuccaaugacaaguuu

SEQ ID NO: 723136 - RNA, 19 nt, Homo sapiens
  misc_RNA (1)...(19): siRNA sense strand
ggagacaugccuuuaauac

SEQ ID NO: 723137 - RNA, 19 nt, Homo sapiens
  misc_RNA (1)...(19): siRNA sense strand
uaagaggcgaggagaauuu

SEQ ID NO: 723138 - RNA, 19 nt, Homo sapiens
  misc_RNA (1)...(19): siRNA sense strand
agacaugccuuuaauacag

SEQ ID NO: 723139 - RNA, 19 nt, Homo sapiens
  misc_RNA (1)...(19): siRNA sense strand
ugcagaaguugaccaaauu

SEQ ID NO: 723140 - RNA, 19 nt, Homo sapiens
  misc_RNA (1)...(19): siRNA sense strand
gcagaaagaacaggcagaa

SEQ ID NO: 723141 - RNA, 19 nt, Homo sapiens
  misc_RNA (1)...(19): siRNA sense strand
caacauagaacccacugau

SEQ ID NO: 723142 - RNA, 19 nt, Homo sapiens
  misc_RNA (1)...(19): siRNA sense strand
agaauuaucggaagaaugu

SEQ ID NO: 723143 - RNA, 19 nt, Homo sapiens
  misc_RNA (1)...(19): siRNA sense strand
gugaagacagcuccaauga

SEQ ID NO: 723144 - RNA, 19 nt, Homo sapiens
  misc_RNA (1)...(19): siRNA sense strand
ugugaucuuucugcaauua

SEQ ID NO: 723145 - RNA, 19 nt, Homo sapiens
  misc_RNA (1)...(19): siRNA sense strand
caccgaaucuugcucuugu

SEQ ID NO: 723146 - RNA, 19 nt, Homo sapiens
  misc_RNA (1)...(19): siRNA sense strand
gacuuuagcuucagugacu

SEQ ID NO: 723147 - RNA, 19 nt, Homo sapiens
  misc_RNA (1)...(19): siRNA sense strand
caaccgaaaugacgaacag

SEQ ID NO: 723148 - RNA, 19 nt, Homo sapiens
  misc_RNA (1)...(19): siRNA sense strand
gcagugcauuagaaguuug

SEQ ID NO: 723149 - RNA, 19 nt, Homo sapiens
  misc_RNA (1)...(19): siRNA sense strand
guaugccaauuaagaauca

SEQ ID NO: 723150 - RNA, 19 nt, Homo sapiens
  misc_RNA (1)...(19): siRNA sense strand
agaaagaacaggcagaaau

SEQ ID NO: 723151 - RNA, 19 nt, Homo sapiens
  misc_RNA (1)...(19): siRNA sense strand
gcuugaccuugcuaguuua

SEQ ID NO: 723152 - RNA, 19 nt, Homo sapiens
  misc_RNA (1)...(19): siRNA sense strand
ccucuuagacccauuguug

SEQ ID NO: 723153 - RNA, 19 nt, Homo sapiens
  misc_RNA (1)...(19): siRNA sense strand
gaccagugccugaugauuc

SEQ ID NO: 723154 - RNA, 19 nt, Homo sapiens
  misc_RNA (1)...(19): siRNA sense strand
gcacuaagccacgauuugg

SEQ ID NO: 723155 - RNA, 19 nt, Homo sapiens
  misc_RNA (1)...(19): siRNA sense strand
auacuugcauugcugauug

SEQ ID NO: 723156 - RNA, 19 nt, Homo sapiens
  misc_RNA (1)...(19): siRNA sense strand
gugguauuguucuucauaa

SEQ ID NO: 723157 - RNA, 19 nt, Homo sapiens
  misc_RNA (1)...(19): siRNA sense strand
ggaauuagugaaggauauu

SEQ ID NO: 723158 - RNA, 19 nt, Homo sapiens
  misc_RNA (1)...(19): siRNA sense strand
uuacugccauucaaucaug

SEQ ID NO: 723159 - RNA, 19 nt, Homo sapiens
  misc_RNA (1)...(19): siRNA sense strand
gaaacaagagagcuacagu

SEQ ID NO: 723160 - RNA, 19 nt, Homo sapiens
  misc_RNA (1)...(19): siRNA sense strand
gauaacagugucccuggaa

SEQ ID NO: 723161 - RNA, 19 nt, Homo sapiens
  misc_RNA (1)...(19): siRNA sense strand
agaacccacugaucuaaug

SEQ ID NO: 723162 - RNA, 19 nt, Homo sapiens
  misc_RNA (1)...(19): siRNA sense strand
ugagcugucugaucuggaa

SEQ ID NO: 723163 - RNA, 19 nt, Homo sapiens
  misc_RNA (1)...(19): siRNA sense strand
cagcagugcauuagaaguu

SEQ ID NO: 723164 - RNA, 19 nt, Homo sapiens
  misc_RNA (1)...(19): siRNA sense strand
ggagugugaggaauuagaa

SEQ ID NO: 723165 - RNA, 19 nt, Homo sapiens
  misc_RNA (1)...(19): siRNA sense strand
ccaaugacaaguuucuuau

SEQ ID NO: 723166 - RNA, 19 nt, Homo sapiens
  misc_RNA (1)...(19): siRNA sense strand
agaacacgcagauguauga

SEQ ID NO: 723167 - RNA, 19 nt, Homo sapiens
  misc_RNA (1)...(19): siRNA sense strand
cagaacagcaggagaagau

SEQ ID NO: 723168 - RNA, 19 nt, Homo sapiens
  misc_RNA (1)...(19): siRNA sense strand
gaucaaggagacagagaga

SEQ ID NO: 723169 - RNA, 19 nt, Homo sapiens
  misc_RNA (1)...(19): siRNA sense strand
aauauaagaccacguugaa

SEQ ID NO: 723170 - RNA, 19 nt, Homo sapiens
  misc_RNA (1)...(19): siRNA sense strand
aagaagaauuaucggaaga

SEQ ID NO: 723171 - RNA, 19 nt, Homo sapiens
  misc_RNA (1)...(19): siRNA sense strand
gaagacagcuccaaugaca

SEQ ID NO: 723172 - RNA, 19 nt, Homo sapiens
  misc_RNA (1)...(19): siRNA sense strand
gaaaucaggugcugcuuga

SEQ ID NO: 723173 - RNA, 19 nt, Homo sapiens
  misc_RNA (1)...(19): siRNA sense strand
ggaagaauguugccuauca

SEQ ID NO: 723174 - RNA, 19 nt, Homo sapiens
  misc_RNA (1)...(19): siRNA sense strand
ggacuuugcugcuuauuug

SEQ ID NO: 723175 - RNA, 19 nt, Homo sapiens
  misc_RNA (1)...(19): siRNA sense strand
gaaaagaacucaacauaga

SEQ ID NO: 723176 - RNA, 19 nt, Homo sapiens
  misc_RNA (1)...(19): siRNA sense strand
gaacaacaaucauuagaag

SEQ ID NO: 723177 - RNA, 19 nt, Homo sapiens
  misc_RNA (1)...(19): siRNA sense strand
caagagagcuacagucguu

SEQ ID NO: 723178 - RNA, 19 nt, Homo sapiens
  misc_RNA (1)...(19): siRNA sense strand
gugcagaacuuccagauga

SEQ ID NO: 723179 - RNA, 19 nt, Homo sapiens
  misc_RNA (1)...(19): siRNA sense strand
gaauuugaccggccucuua

SEQ ID NO: 723180 - RNA, 19 nt, Homo sapiens
  misc_RNA (1)...(19): siRNA sense strand
gaugacagcuugugaucuu

SEQ ID NO: 723181 - RNA, 19 nt, Homo sapiens
  misc_RNA (1)...(19): siRNA sense strand
ggaagagguuguuggugua

SEQ ID NO: 723182 - RNA, 19 nt, Homo sapiens
  misc_RNA (1)...(19): siRNA sense strand
ggaagaaguuucaaauaac

SEQ ID NO: 723183 - RNA, 19 nt, Homo sapiens
  misc_RNA (1)...(19): siRNA sense strand
gagaagaugcugauuaaug

SEQ ID NO: 723184 - RNA, 19 nt, Homo sapiens
  misc_RNA (1)...(19): siRNA sense strand
cuagauggcugcagaaaga

SEQ ID NO: 723185 - RNA, 19 nt, Homo sapiens
  misc_RNA (1)...(19): siRNA sense strand
gaauaacucuuacauacag

SEQ ID NO: 723186 - RNA, 19 nt, Homo sapiens
  misc_RNA (1)...(19): siRNA sense strand
ggaacaugaugcaaacaaa

SEQ ID NO: 723187 - RNA, 19 nt, Homo sapiens
  misc_RNA (1)...(19): siRNA sense strand
gaaagaacaggcagaaaug

SEQ ID NO: 723188 - RNA, 19 nt, Homo sapiens
  misc_RNA (1)...(19): siRNA sense strand
ggagaauacuggcaagguu

SEQ ID NO: 723189 - RNA, 19 nt, Homo sapiens
  misc_RNA (1)...(19): siRNA sense strand
gugaauaacucuuacauac

SEQ ID NO: 723190 - RNA, 19 nt, Homo sapiens
  misc_RNA (1)...(19): siRNA sense strand
caaguuggguucauagaug

SEQ ID NO: 723191 - RNA, 19 nt, Homo sapiens
  misc_RNA (1)...(19): siRNA sense strand
ugaaggauauuucuaguca

SEQ ID NO: 723192 - RNA, 19 nt, Homo sapiens
  misc_RNA (1)...(19): siRNA sense strand
uuaauaagauggaggagaa

SEQ ID NO: 723193 - RNA, 19 nt, Homo sapiens
  misc_RNA (1)...(19): siRNA sense strand
gaaaaucucugccucugaa

SEQ ID NO: 723194 - RNA, 19 nt, Homo sapiens
  misc_RNA (1)...(19): siRNA sense strand
ggugggacauuuacugaaa

SEQ ID NO: 723195 - RNA, 19 nt, Homo sapiens
  misc_RNA (1)...(19): siRNA sense strand
ggaaacggugggacauuua

SEQ ID NO: 723196 - RNA, 19 nt, Homo sapiens
  misc_RNA (1)...(19): siRNA sense strand
ggauauuucuagucauuug

SEQ ID NO: 723197 - RNA, 19 nt, Homo sapiens
  misc_RNA (1)...(19): siRNA sense strand
gagaauacuggcaagguua

SEQ ID NO: 723198 - RNA, 19 nt, Homo sapiens
  misc_RNA (1)...(19): siRNA sense strand
aggagaagaugcugauuaa

SEQ ID NO: 723199 - RNA, 19 nt, Homo sapiens
  misc_RNA (1)...(19): siRNA sense strand
gcagaaguugaccaaauua

SEQ ID NO: 723200 - RNA, 19 nt, Homo sapiens
  misc_RNA (1)...(19): siRNA sense strand
ggaagaaacaagagagcua

SEQ ID NO: 723201 - RNA, 19 nt, Homo sapiens
  misc_RNA (1)...(19): siRNA sense strand
ggugagcccuugaacauca

SEQ ID NO: 723202 - RNA, 19 nt, Homo sapiens
  misc_RNA (1)...(19): siRNA sense strand
caauucggauguuuacuga

SEQ ID NO: 723203 - RNA, 19 nt, Homo sapiens
  misc_RNA (1)...(19): siRNA sense strand
gaccuagcacuguacauua

SEQ ID NO: 723204 - RNA, 19 nt, Homo sapiens
  misc_RNA (1)...(19): siRNA sense strand
aaauaacuguauccgcuua

SEQ ID NO: 723205 - RNA, 19 nt, Homo sapiens
  misc_RNA (1)...(19): siRNA sense strand
gaauauaagaccacguuga

SEQ ID NO: 723206 - RNA, 19 nt, Homo sapiens
  misc_RNA (1)...(19): siRNA sense strand
gaagaauuaucggaagaau

SEQ ID NO: 723207 - RNA, 19 nt, Homo sapiens
  misc_RNA (1)...(19): siRNA sense strand
uuacauguaugcucaguau

SEQ ID NO: 723208 - RNA, 19 nt, Homo sapiens
  misc_RNA (1)...(19): siRNA sense strand
ugaccuugcuaguuuaauu

SEQ ID NO: 723209 - RNA, 19 nt, Homo sapiens
  misc_RNA (1)...(19): siRNA sense strand
cauggagugugaggaauua

SEQ ID NO: 723210 - RNA, 19 nt, Homo sapiens
  misc_RNA (1)...(19): siRNA sense strand
uaucauaauuggagacaug

SEQ ID NO: 723211 - RNA, 19 nt, Homo sapiens
  misc_RNA (1)...(19): siRNA sense strand
gauaucugcugaccgcuau

SEQ ID NO: 723212 - RNA, 19 nt, Homo sapiens
  misc_RNA (1)...(19): siRNA sense strand
gagaaaagaacucaacaua

SEQ ID NO: 723213 - RNA, 19 nt, Homo sapiens
  misc_RNA (1)...(19): siRNA sense strand
ucaguggccucuccauuga

SEQ ID NO: 723214 - RNA, 19 nt, Homo sapiens
  misc_RNA (1)...(19): siRNA sense strand
gcccagacccuuaaaauua

SEQ ID NO: 723215 - RNA, 19 nt, Homo sapiens
  misc_RNA (1)...(19): siRNA sense strand
guaaaccagcagugcauua

SEQ ID NO: 723216 - RNA, 19 nt, Homo sapiens
  misc_RNA (1)...(19): siRNA sense strand
agacuucacugcuggagaa

SEQ ID NO: 723217 - RNA, 19 nt, Homo sapiens
  misc_RNA (1)...(19): siRNA sense strand
caggagaagaugcugauua

SEQ ID NO: 723218 - RNA, 19 nt, Homo sapiens
  misc_RNA (1)...(19): siRNA sense strand
gaagaauguugccuaucau

SEQ ID NO: 723219 - RNA, 19 nt, Homo sapiens
  misc_RNA (1)...(19): siRNA sense strand
gaugaaacaugagguucuu

SEQ ID NO: 723220 - RNA, 19 nt, Homo sapiens
  misc_RNA (1)...(19): siRNA sense strand
gaugaagauugcuccgauu

SEQ ID NO: 723221 - RNA, 19 nt, Homo sapiens
  misc_RNA (1)...(19): siRNA sense strand
gaagaacaacaaucauuag

SEQ ID NO: 723222 - RNA, 19 nt, Homo sapiens
  misc_RNA (1)...(19): siRNA sense strand
gcuauucccuguuccuugu

SEQ ID NO: 723223 - RNA, 19 nt, Homo sapiens
  misc_RNA (1)...(19): siRNA sense strand
agaagaugcugauuaaugg

SEQ ID NO: 723224 - RNA, 19 nt, Homo sapiens
  misc_RNA (1)...(19): siRNA sense strand
gaacuuguagcaacugaau

SEQ ID NO: 723225 - RNA, 19 nt, Homo sapiens
  misc_RNA (1)...(19): siRNA sense strand
gcagaguccucgugcagau

SEQ ID NO: 723226 - RNA, 19 nt, Homo sapiens
  misc_RNA (1)...(19): siRNA sense strand
gaauguugccuaucauaau

SEQ ID NO: 723227 - RNA, 19 nt, Homo sapiens
  misc_RNA (1)...(19): siRNA sense strand
caaauuacaggcuacaaga

SEQ ID NO: 723228 - RNA, 19 nt, Homo sapiens
  misc_RNA (1)...(19): siRNA sense strand
guucaacacuggaagaagu

SEQ ID NO: 723229 - RNA, 19 nt, Homo sapiens
  misc_RNA (1)...(19): siRNA sense strand
caagggaacaugaugcaaa

SEQ ID NO: 723230 - RNA, 19 nt, Homo sapiens
  misc_RNA (1)...(19): siRNA sense strand
ccacugaucuaaugaacag

SEQ ID NO: 723231 - RNA, 19 nt, Homo sapiens
  misc_RNA (1)...(19): siRNA sense strand
gcagauggauuuuaagugu

SEQ ID NO: 723232 - RNA, 19 nt, Homo sapiens
  misc_RNA (1)...(19): siRNA sense strand
ccagaugucaguaaggaua

SEQ ID NO: 723233 - RNA, 19 nt, Homo sapiens
  misc_RNA (1)...(19): siRNA sense strand
gaccagugcucaagacucu

SEQ ID NO: 723234 - RNA, 19 nt, Homo sapiens
  misc_RNA (1)...(19): siRNA sense strand
uuacugaccucaaccuugu

SEQ ID NO: 723235 - RNA, 19 nt, Homo sapiens
  misc_RNA (1)...(19): siRNA sense strand
cagcuccaaugacaaguuu

SEQ ID NO: 723236 - RNA, 19 nt, Homo sapiens
  misc_RNA (1)...(19): siRNA sense strand
ggagacaugccuuuaauac

SEQ ID NO: 723237 - RNA, 19 nt, Homo sapiens
  misc_RNA (1)...(19): siRNA sense strand
uaagaggcgaggagaauuu

SEQ ID NO: 723238 - RNA, 19 nt, Homo sapiens
  misc_RNA (1)...(19): siRNA sense strand
agacaugccuuuaauacag

SEQ ID NO: 723239 - RNA, 19 nt, Homo sapiens
  misc_RNA (1)...(19): siRNA sense strand
ugcagaaguugaccaaauu

SEQ ID NO: 723240 - RNA, 19 nt, Homo sapiens
  misc_RNA (1)...(19): siRNA sense strand
gcagaaagaacaggcagaa

SEQ ID NO: 723241 - RNA, 19 nt, Homo sapiens
  misc_RNA (1)...(19): siRNA sense strand
caacauagaacccacugau

SEQ ID NO: 723242 - RNA, 19 nt, Homo sapiens
  misc_RNA (1)...(19): siRNA sense strand
agaauuaucggaagaaugu

SEQ ID NO: 723243 - RNA, 19 nt, Homo sapiens
  misc_RNA (1)...(19): siRNA sense strand
gugaagacagcuccaauga

SEQ ID NO: 723244 - RNA, 19 nt, Homo sapiens
  misc_RNA (1)...(19): siRNA sense strand
caccgaaucuugcucuugu

SEQ ID NO: 723245 - RNA, 19 nt, Homo sapiens
  misc_RNA (1)...(19): siRNA sense strand
ugugaucuuucugcaauua

SEQ ID NO: 723246 - RNA, 19 nt, Homo sapiens
  misc_RNA (1)...(19): siRNA sense strand
gacuuuagcuucagugacu

SEQ ID NO: 723247 - RNA, 19 nt, Homo sapiens
  misc_RNA (1)...(19): siRNA sense strand
caaccgaaaugacgaacag

SEQ ID NO: 723248 - RNA, 19 nt, Homo sapiens
  misc_RNA (1)...(19): siRNA sense strand
gcagugcauuagaaguuug

SEQ ID NO: 723249 - RNA, 19 nt, Homo sapiens
  misc_RNA (1)...(19): siRNA sense strand
guaugccaauuaagaauca

SEQ ID NO: 723250 - RNA, 19 nt, Homo sapiens
  misc_RNA (1)...(19): siRNA sense strand
agaaagaacaggcagaaau

SEQ ID NO: 723251 - RNA, 19 nt, Homo sapiens
  misc_RNA (1)...(19): siRNA sense strand
gcuugaccuugcuaguuua

SEQ ID NO: 723252 - RNA, 19 nt, Homo sapiens
  misc_RNA (1)...(19): siRNA sense strand
gugguauuguucuucauaa

SEQ ID NO: 723253 - RNA, 19 nt, Homo sapiens
  misc_RNA (1)...(19): siRNA sense strand
gaccagugccugaugauuc

SEQ ID NO: 723254 - RNA, 19 nt, Homo sapiens
  misc_RNA (1)...(19): siRNA sense strand
gcacuaagccacgauuugg

SEQ ID NO: 723255 - RNA, 19 nt, Homo sapiens
  misc_RNA (1)...(19): siRNA sense strand
auacuugcauugcugauug

SEQ ID NO: 723256 - RNA, 19 nt, Homo sapiens
  misc_RNA (1)...(19): siRNA sense strand
ccucuuagacccauuguug

SEQ ID NO: 723257 - RNA, 19 nt, Homo sapiens
  misc_RNA (1)...(19): siRNA sense strand
ggaauuagugaaggauauu

SEQ ID NO: 723258 - RNA, 19 nt, Homo sapiens
  misc_RNA (1)...(19): siRNA sense strand
uuacugccauucaaucaug

SEQ ID NO: 723259 - RNA, 19 nt, Homo sapiens
  misc_RNA (1)...(19): siRNA sense strand
gaaacaagagagcuacagu

SEQ ID NO: 723260 - RNA, 19 nt, Homo sapiens
  misc_RNA (1)...(19): siRNA sense strand
ccaaugacaaguuucuuau

SEQ ID NO: 723261 - RNA, 19 nt, Homo sapiens
  misc_RNA (1)...(19): siRNA sense strand
agaacccacugaucuaaug

SEQ ID NO: 723262 - RNA, 19 nt, Homo sapiens
  misc_RNA (1)...(19): siRNA sense strand
ugagcugucugaucuggaa

SEQ ID NO: 723263 - RNA, 19 nt, Homo sapiens
  misc_RNA (1)...(19): siRNA sense strand
cagcagugcauuagaaguu

SEQ ID NO: 723264 - RNA, 19 nt, Homo sapiens
  misc_RNA (1)...(19): siRNA sense strand
ggagugugaggaauuagaa

SEQ ID NO: 723265 - RNA, 19 nt, Homo sapiens
  misc_RNA (1)...(19): siRNA sense strand
gauaacagugucccuggaa

SEQ ID NO: 723266 - RNA, 19 nt, Homo sapiens
  misc_RNA (1)...(19): siRNA sense strand
agaacacgcagauguauga

SEQ ID NO: 723267 - RNA, 19 nt, Homo sapiens
  misc_RNA (1)...(19): siRNA sense strand
cagaacagcaggagaagau

SEQ ID NO: 723268 - RNA, 19 nt, Homo sapiens
  misc_RNA (1)...(19): siRNA sense strand
gaucaaggagacagagaga

SEQ ID NO: 723269 - RNA, 19 nt, Homo sapiens
  misc_RNA (1)...(19): siRNA sense strand
aauauaagaccacguugaa

SEQ ID NO: 723270 - RNA, 19 nt, Homo sapiens
  misc_RNA (1)...(19): siRNA sense strand
aagaagaauuaucggaaga

SEQ ID NO: 723271 - RNA, 19 nt, Homo sapiens
  misc_RNA (1)...(19): siRNA sense strand
gaagacagcuccaaugaca

SEQ ID NO: 723272 - RNA, 19 nt, Homo sapiens
  misc_RNA (1)...(19): siRNA sense strand
gaaaucaggugcugcuuga

SEQ ID NO: 723273 - RNA, 19 nt, Homo sapiens
  misc_RNA (1)...(19): siRNA sense strand
ggaagaauguugccuauca

SEQ ID NO: 723274 - RNA, 19 nt, Homo sapiens
  misc_RNA (1)...(19): siRNA sense strand
ggacuuugcugcuuauuug

SEQ ID NO: 723275 - RNA, 19 nt, Homo sapiens
  misc_RNA (1)...(19): siRNA sense strand
gaaaagaacucaacauaga

SEQ ID NO: 723276 - RNA, 19 nt, Homo sapiens
  misc_RNA (1)...(19): siRNA sense strand
gaacaacaaucauuagaag

SEQ ID NO: 723277 - RNA, 19 nt, Homo sapiens
  misc_RNA (1)...(19): siRNA sense strand
caagagagcuacagucguu

SEQ ID NO: 723278 - RNA, 19 nt, Homo sapiens
  misc_RNA (1)...(19): siRNA sense strand
gugcagaacuuccagauga

SEQ ID NO: 723279 - RNA, 19 nt, Homo sapiens
  misc_RNA (1)...(19): siRNA sense strand
gaauuugaccggccucuua

SEQ ID NO: 723280 - RNA, 19 nt, Homo sapiens
  misc_RNA (1)...(19): siRNA sense strand
gaugacagcuugugaucuu

SEQ ID NO: 723281 - RNA, 19 nt, Homo sapiens
  misc_RNA (1)...(19): siRNA sense strand
ggaagagguuguuggugua

SEQ ID NO: 723282 - RNA, 19 nt, Homo sapiens
  misc_RNA (1)...(19): siRNA sense strand
ggaagaaguuucaaauaac

SEQ ID NO: 723283 - RNA, 19 nt, Homo sapiens
  misc_RNA (1)...(19): siRNA sense strand
gagaagaugcugauuaaug

SEQ ID NO: 723284 - RNA, 19 nt, Homo sapiens
  misc_RNA (1)...(19): siRNA sense strand
cuagauggcugcagaaaga

SEQ ID NO: 723285 - RNA, 19 nt, Homo sapiens
  misc_RNA (1)...(19): siRNA sense strand
gaauaacucuuacauacag

SEQ ID NO: 723286 - RNA, 19 nt, Homo sapiens
  misc_RNA (1)...(19): siRNA sense strand
ggaacaugaugcaaacaaa

SEQ ID NO: 723287 - RNA, 19 nt, Homo sapiens
  misc_RNA (1)...(19): siRNA sense strand
gaaagaacaggcagaaaug

SEQ ID NO: 723288 - RNA, 19 nt, Homo sapiens
  misc_RNA (1)...(19): siRNA sense strand
ggagaauacuggcaagguu

SEQ ID NO: 723289 - RNA, 19 nt, Homo sapiens
  misc_RNA (1)...(19): siRNA sense strand
gugaauaacucuuacauac

SEQ ID NO: 723290 - RNA, 19 nt, Homo sapiens
  misc_RNA (1)...(19): siRNA sense strand
caaguuggguucauagaug

SEQ ID NO: 723291 - RNA, 19 nt, Homo sapiens
  misc_RNA (1)...(19): siRNA sense strand
ugaaggauauuucuaguca

SEQ ID NO: 723292 - RNA, 19 nt, Homo sapiens
  misc_RNA (1)...(19): siRNA sense strand
uuaauaagauggaggagaa

SEQ ID NO: 723293 - RNA, 19 nt, Homo sapiens
  misc_RNA (1)...(19): siRNA sense strand
gaaaaucucugccucugaa

SEQ ID NO: 723294 - RNA, 19 nt, Homo sapiens
  misc_RNA (1)...(19): siRNA sense strand
ggugggacauuuacugaaa

SEQ ID NO: 723295 - RNA, 19 nt, Homo sapiens
  misc_RNA (1)...(19): siRNA sense strand
ggaaacggugggacauuua

SEQ ID NO: 723296 - RNA, 19 nt, Homo sapiens
  misc_RNA (1)...(19): siRNA sense strand
ggauauuucuagucauuug

SEQ ID NO: 723297 - RNA, 19 nt, Homo sapiens
  misc_RNA (1)...(19): siRNA sense strand
gagaauacuggcaagguua

SEQ ID NO: 723298 - RNA, 19 nt, Homo sapiens
  misc_RNA (1)...(19): siRNA sense strand
aggagaagaugcugauuaa

SEQ ID NO: 723299 - RNA, 19 nt, Homo sapiens
  misc_RNA (1)...(19): siRNA sense strand
gcagaaguugaccaaauua

SEQ ID NO: 723300 - RNA, 19 nt, Homo sapiens
  misc_RNA (1)...(19): siRNA sense strand
ggaagaaacaagagagcua

SEQ ID NO: 723301 - RNA, 19 nt, Homo sapiens
  misc_RNA (1)...(19): siRNA sense strand
ggugagcccuugaacauca

SEQ ID NO: 723302 - RNA, 19 nt, Homo sapiens
  misc_RNA (1)...(19): siRNA sense strand
caauucggauguuuacuga

SEQ ID NO: 723303 - RNA, 19 nt, Homo sapiens
  misc_RNA (1)...(19): siRNA sense strand
gaccuagcacuguacauua

SEQ ID NO: 723304 - RNA, 19 nt, Homo sapiens
  misc_RNA (1)...(19): siRNA sense strand
aaauaacuguauccgcuua

SEQ ID NO: 723305 - RNA, 19 nt, Homo sapiens
  misc_RNA (1)...(19): siRNA sense strand
gaauauaagaccacguuga

SEQ ID NO: 723306 - RNA, 19 nt, Homo sapiens
  misc_RNA (1)...(19): siRNA sense strand
gaagaauuaucggaagaau

SEQ ID NO: 723307 - RNA, 19 nt, Homo sapiens
  misc_RNA (1)...(19): siRNA sense strand
uuacauguaugcucaguau

SEQ ID NO: 723308 - RNA, 19 nt, Homo sapiens
  misc_RNA (1)...(19): siRNA sense strand
ugaccuugcuaguuuaauu

SEQ ID NO: 723309 - RNA, 19 nt, Homo sapiens
  misc_RNA (1)...(19): siRNA sense strand
cauggagugugaggaauua

SEQ ID NO: 723310 - RNA, 19 nt, Homo sapiens
  misc_RNA (1)...(19): siRNA sense strand
uaucauaauuggagacaug

SEQ ID NO: 723311 - RNA, 19 nt, Homo sapiens
  misc_RNA (1)...(19): siRNA sense strand
gauaucugcugaccgcuau

SEQ ID NO: 723312 - RNA, 19 nt, Homo sapiens
  misc_RNA (1)...(19): siRNA sense strand
gagaaaagaacucaacaua

SEQ ID NO: 723313 - RNA, 19 nt, Homo sapiens
  misc_RNA (1)...(19): siRNA sense strand
ucaguggccucuccauuga

SEQ ID NO: 723314 - RNA, 19 nt, Homo sapiens
  misc_RNA (1)...(19): siRNA sense strand
gcccagacccuuaaaauua

SEQ ID NO: 723315 - RNA, 19 nt, Homo sapiens
  misc_RNA (1)...(19): siRNA sense strand
guaaaccagcagugcauua

SEQ ID NO: 723316 - RNA, 19 nt, Homo sapiens
  misc_RNA (1)...(19): siRNA sense strand
agacuucacugcuggagaa

SEQ ID NO: 723317 - RNA, 19 nt, Homo sapiens
  misc_RNA (1)...(19): siRNA sense strand
caggagaagaugcugauua

SEQ ID NO: 723318 - RNA, 19 nt, Homo sapiens
  misc_RNA (1)...(19): siRNA sense strand
gaagaauguugccuaucau

SEQ ID NO: 723319 - RNA, 19 nt, Homo sapiens
  misc_RNA (1)...(19): siRNA sense strand
gaugaaacaugagguucuu

SEQ ID NO: 723320 - RNA, 19 nt, Homo sapiens
  misc_RNA (1)...(19): siRNA sense strand
gaugaagauugcuccgauu

SEQ ID NO: 723321 - RNA, 19 nt, Homo sapiens
  misc_RNA (1)...(19): siRNA sense strand
gaagaacaacaaucauuag

SEQ ID NO: 723322 - RNA, 19 nt, Homo sapiens
  misc_RNA (1)...(19): siRNA sense strand
gcuauucccuguuccuugu

SEQ ID NO: 723323 - RNA, 19 nt, Homo sapiens
  misc_RNA (1)...(19): siRNA sense strand
agaagaugcugauuaaugg

SEQ ID NO: 723324 - RNA, 19 nt, Homo sapiens
  misc_RNA (1)...(19): siRNA sense strand
gaacuuguagcaacugaau

SEQ ID NO: 723325 - RNA, 19 nt, Homo sapiens
  misc_RNA (1)...(19): siRNA sense strand
gaauguugccuaucauaau

SEQ ID NO: 723326 - RNA, 19 nt, Homo sapiens
  misc_RNA (1)...(19): siRNA sense strand
gcagaguccucgugcagau

SEQ ID NO: 723327 - RNA, 19 nt, Homo sapiens
  misc_RNA (1)...(19): siRNA sense strand
caaauuacaggcuacaaga

SEQ ID NO: 723328 - RNA, 19 nt, Homo sapiens
  misc_RNA (1)...(19): siRNA sense strand
guucaacacuggaagaagu

SEQ ID NO: 723329 - RNA, 19 nt, Homo sapiens
  misc_RNA (1)...(19): siRNA sense strand
caagggaacaugaugcaaa

SEQ ID NO: 723330 - RNA, 19 nt, Homo sapiens
  misc_RNA (1)...(19): siRNA sense strand
ccacugaucuaaugaacag

SEQ ID NO: 723331 - RNA, 19 nt, Homo sapiens
  misc_RNA (1)...(19): siRNA sense strand
gcagauggauuuuaagugu

SEQ ID NO: 723332 - RNA, 19 nt, Homo sapiens
  misc_RNA (1)...(19): siRNA sense strand
ccagaugucaguaaggaua

SEQ ID NO: 723333 - RNA, 19 nt, Homo sapiens
  misc_RNA (1)...(19): siRNA sense strand
gaccagugcucaagacucu

SEQ ID NO: 723334 - RNA, 19 nt, Homo sapiens
  misc_RNA (1)...(19): siRNA sense strand
uuacugaccucaaccuugu

SEQ ID NO: 723335 - RNA, 19 nt, Homo sapiens
  misc_RNA (1)...(19): siRNA sense strand
cagcuccaaugacaaguuu

SEQ ID NO: 723336 - RNA, 19 nt, Homo sapiens
  misc_RNA (1)...(19): siRNA sense strand
ggagacaugccuuuaauac

SEQ ID NO: 723337 - RNA, 19 nt, Homo sapiens
  misc_RNA (1)...(19): siRNA sense strand
uaagaggcgaggagaauuu

SEQ ID NO: 723338 - RNA, 19 nt, Homo sapiens
  misc_RNA (1)...(19): siRNA sense strand
agacaugccuuuaauacag

SEQ ID NO: 723339 - RNA, 19 nt, Homo sapiens
  misc_RNA (1)...(19): siRNA sense strand
ugcagaaguugaccaaauu

SEQ ID NO: 723340 - RNA, 19 nt, Homo sapiens
  misc_RNA (1)...(19): siRNA sense strand
gcagaaagaacaggcagaa

SEQ ID NO: 723341 - RNA, 19 nt, Homo sapiens
  misc_RNA (1)...(19): siRNA sense strand
caacauagaacccacugau

SEQ ID NO: 723342 - RNA, 19 nt, Homo sapiens
  misc_RNA (1)...(19): siRNA sense strand
agaauuaucggaagaaugu

SEQ ID NO: 723343 - RNA, 19 nt, Homo sapiens
  misc_RNA (1)...(19): siRNA sense strand
gugaagacagcuccaauga

SEQ ID NO: 723344 - RNA, 19 nt, Homo sapiens
  misc_RNA (1)...(19): siRNA sense strand
ugugaucuuucugcaauua

SEQ ID NO: 723345 - RNA, 19 nt, Homo sapiens
  misc_RNA (1)...(19): siRNA sense strand
caccgaaucuugcucuugu

SEQ ID NO: 723346 - RNA, 19 nt, Homo sapiens
  misc_RNA (1)...(19): siRNA sense strand
gacuuuagcuucagugacu

SEQ ID NO: 723347 - RNA, 19 nt, Homo sapiens
  misc_RNA (1)...(19): siRNA sense strand
caaccgaaaugacgaacag

SEQ ID NO: 723348 - RNA, 19 nt, Homo sapiens
  misc_RNA (1)...(19): siRNA sense strand
gcagugcauuagaaguuug

SEQ ID NO: 723349 - RNA, 19 nt, Homo sapiens
  misc_RNA (1)...(19): siRNA sense strand
guaugccaauuaagaauca

SEQ ID NO: 723350 - RNA, 19 nt, Homo sapiens
  misc_RNA (1)...(19): siRNA sense strand
agaaagaacaggcagaaau

SEQ ID NO: 723351 - RNA, 19 nt, Homo sapiens
  misc_RNA (1)...(19): siRNA sense strand
gcuugaccuugcuaguuua

SEQ ID NO: 723352 - RNA, 19 nt, Homo sapiens
  misc_RNA (1)...(19): siRNA sense strand
ccucuuagacccauuguug

SEQ ID NO: 723353 - RNA, 19 nt, Homo sapiens
  misc_RNA (1)...(19): siRNA sense strand
gaccagugccugaugauuc

SEQ ID NO: 723354 - RNA, 19 nt, Homo sapiens
  misc_RNA (1)...(19): siRNA sense strand
gcacuaagccacgauuugg

SEQ ID NO: 723355 - RNA, 19 nt, Homo sapiens
  misc_RNA (1)...(19): siRNA sense strand
auacuugcauugcugauug

SEQ ID NO: 723356 - RNA, 19 nt, Homo sapiens
  misc_RNA (1)...(19): siRNA sense strand
gugguauuguucuucauaa

SEQ ID NO: 723357 - RNA, 19 nt, Homo sapiens
  misc_RNA (1)...(19): siRNA sense strand
ggaauuagugaaggauauu

SEQ ID NO: 723358 - RNA, 19 nt, Homo sapiens
  misc_RNA (1)...(19): siRNA sense strand
uuacugccauucaaucaug

SEQ ID NO: 723359 - RNA, 19 nt, Homo sapiens
  misc_RNA (1)...(19): siRNA sense strand
gaaacaagagagcuacagu

SEQ ID NO: 723360 - RNA, 19 nt, Homo sapiens
  misc_RNA (1)...(19): siRNA sense strand
gauaacagugucccuggaa

SEQ ID NO: 723361 - RNA, 19 nt, Homo sapiens
  misc_RNA (1)...(19): siRNA sense strand
agaacccacugaucuaaug

SEQ ID NO: 723362 - RNA, 19 nt, Homo sapiens
  misc_RNA (1)...(19): siRNA sense strand
ugagcugucugaucuggaa

SEQ ID NO: 723363 - RNA, 19 nt, Homo sapiens
  misc_RNA (1)...(19): siRNA sense strand
cagcagugcauuagaaguu

SEQ ID NO: 723364 - RNA, 19 nt, Homo sapiens
  misc_RNA (1)...(19): siRNA sense strand
ggagugugaggaauuagaa

SEQ ID NO: 723365 - RNA, 19 nt, Homo sapiens
  misc_RNA (1)...(19): siRNA sense strand
ccaaugacaaguuucuuau

SEQ ID NO: 723366 - RNA, 19 nt, Homo sapiens
  misc_RNA (1)...(19): siRNA sense strand
agaacacgcagauguauga

SEQ ID NO: 723367 - RNA, 19 nt, Homo sapiens
  misc_RNA (1)...(19): siRNA sense strand
cagaacagcaggagaagau

SEQ ID NO: 723368 - RNA, 19 nt, Homo sapiens
  misc_RNA (1)...(19): siRNA sense strand
gaucaaggagacagagaga

SEQ ID NO: 723369 - RNA, 19 nt, Homo sapiens
  misc_RNA (1)...(19): siRNA sense strand
aauauaagaccacguugaa

SEQ ID NO: 723370 - RNA, 19 nt, Homo sapiens
  misc_RNA (1)...(19): siRNA sense strand
aagaagaauuaucggaaga

SEQ ID NO: 723371 - RNA, 19 nt, Homo sapiens
  misc_RNA (1)...(19): siRNA sense strand
gaagacagcuccaaugaca

SEQ ID NO: 723372 - RNA, 19 nt, Homo sapiens
  misc_RNA (1)...(19): siRNA sense strand
gaaaucaggugcugcuuga

SEQ ID NO: 723373 - RNA, 19 nt, Homo sapiens
  misc_RNA (1)...(19): siRNA sense strand
ggaagaauguugccuauca

SEQ ID NO: 723374 - RNA, 19 nt, Homo sapiens
  misc_RNA (1)...(19): siRNA sense strand
ggacuuugcugcuuauuug

SEQ ID NO: 723375 - RNA, 19 nt, Homo sapiens
  misc_RNA (1)...(19): siRNA sense strand
gaaaagaacucaacauaga

SEQ ID NO: 723376 - RNA, 19 nt, Homo sapiens
  misc_RNA (1)...(19): siRNA sense strand
gaacaacaaucauuagaag

SEQ ID NO: 723377 - RNA, 19 nt, Homo sapiens
  misc_RNA (1)...(19): siRNA sense strand
caagagagcuacagucguu

SEQ ID NO: 723378 - RNA, 19 nt, Homo sapiens
  misc_RNA (1)...(19): siRNA sense strand
gugcagaacuuccagauga

SEQ ID NO: 723379 - RNA, 19 nt, Homo sapiens
  misc_RNA (1)...(19): siRNA sense strand
gaauuugaccggccucuua

SEQ ID NO: 723380 - RNA, 19 nt, Homo sapiens
  misc_RNA (1)...(19): siRNA sense strand
gaugacagcuugugaucuu

SEQ ID NO: 723381 - RNA, 19 nt, Homo sapiens
  misc_RNA (1)...(19): siRNA sense strand
ggaagagguuguuggugua

SEQ ID NO: 723382 - RNA, 19 nt, Homo sapiens
  misc_RNA (1)...(19): siRNA sense strand
ggaagaaguuucaaauaac

SEQ ID NO: 723383 - RNA, 19 nt, Homo sapiens
  misc_RNA (1)...(19): siRNA sense strand
gagaagaugcugauuaaug

SEQ ID NO: 723384 - RNA, 19 nt, Homo sapiens
  misc_RNA (1)...(19): siRNA sense strand
cuagauggcugcagaaaga

SEQ ID NO: 723385 - RNA, 19 nt, Homo sapiens
  misc_RNA (1)...(19): siRNA sense strand
gaauaacucuuacauacag

SEQ ID NO: 723386 - RNA, 19 nt, Homo sapiens
  misc_RNA (1)...(19): siRNA sense strand
ggaacaugaugcaaacaaa

SEQ ID NO: 723387 - RNA, 19 nt, Homo sapiens
  misc_RNA (1)...(19): siRNA sense strand
gaaagaacaggcagaaaug

SEQ ID NO: 723388 - RNA, 19 nt, Homo sapiens
  misc_RNA (1)...(19): siRNA sense strand
ggagaauacuggcaagguu

SEQ ID NO: 723389 - RNA, 19 nt, Homo sapiens
  misc_RNA (1)...(19): siRNA sense strand
gugaauaacucuuacauac

SEQ ID NO: 723390 - RNA, 19 nt, Homo sapiens
  misc_RNA (1)...(19): siRNA sense strand
caaguuggguucauagaug

SEQ ID NO: 723391 - RNA, 19 nt, Homo sapiens
  misc_RNA (1)...(19): siRNA sense strand
ugaaggauauuucuaguca

SEQ ID NO: 723392 - RNA, 19 nt, Homo sapiens
  misc_RNA (1)...(19): siRNA sense strand
uuaauaagauggaggagaa

SEQ ID NO: 723393 - RNA, 19 nt, Homo sapiens
  misc_RNA (1)...(19): siRNA sense strand
gaaaaucucugccucugaa

SEQ ID NO: 723394 - RNA, 19 nt, Homo sapiens
  misc_RNA (1)...(19): siRNA sense strand
ggugggacauuuacugaaa

SEQ ID NO: 723395 - RNA, 19 nt, Homo sapiens
  misc_RNA (1)...(19): siRNA sense strand
ggaaacggugggacauuua

SEQ ID NO: 723396 - RNA, 19 nt, Homo sapiens
  misc_RNA (1)...(19): siRNA sense strand
ggauauuucuagucauuug

SEQ ID NO: 723397 - RNA, 19 nt, Homo sapiens
  misc_RNA (1)...(19): siRNA sense strand
gagaauacuggcaagguua

SEQ ID NO: 723398 - RNA, 19 nt, Homo sapiens
  misc_RNA (1)...(19): siRNA sense strand
aggagaagaugcugauuaa

SEQ ID NO: 723399 - RNA, 19 nt, Homo sapiens
  misc_RNA (1)...(19): siRNA sense strand
gcagaaguugaccaaauua

SEQ ID NO: 723400 - RNA, 19 nt, Homo sapiens
  misc_RNA (1)...(19): siRNA sense strand
ggaagaaacaagagagcua

SEQ ID NO: 723401 - RNA, 19 nt, Homo sapiens
  misc_RNA (1)...(19): siRNA sense strand
ggugagcccuugaacauca

SEQ ID NO: 723402 - RNA, 19 nt, Homo sapiens
  misc_RNA (1)...(19): siRNA sense strand
caauucggauguuuacuga

SEQ ID NO: 723403 - RNA, 19 nt, Homo sapiens
  misc_RNA (1)...(19): siRNA sense strand
gaccuagcacuguacauua

SEQ ID NO: 723404 - RNA, 19 nt, Homo sapiens
  misc_RNA (1)...(19): siRNA sense strand
aaauaacuguauccgcuua

SEQ ID NO: 723405 - RNA, 19 nt, Homo sapiens
  misc_RNA (1)...(19): siRNA sense strand
gaauauaagaccacguuga

SEQ ID NO: 723406 - RNA, 19 nt, Homo sapiens
  misc_RNA (1)...(19): siRNA sense strand
gaagaauuaucggaagaau

SEQ ID NO: 723407 - RNA, 19 nt, Homo sapiens
  misc_RNA (1)...(19): siRNA sense strand
uuacauguaugcucaguau

SEQ ID NO: 723408 - RNA, 19 nt, Homo sapiens
  misc_RNA (1)...(19): siRNA sense strand
ugaccuugcuaguuuaauu

SEQ ID NO: 723409 - RNA, 19 nt, Homo sapiens
  misc_RNA (1)...(19): siRNA sense strand
cauggagugugaggaauua

SEQ ID NO: 723410 - RNA, 19 nt, Homo sapiens
  misc_RNA (1)...(19): siRNA sense strand
uaucauaauuggagacaug

SEQ ID NO: 723411 - RNA, 19 nt, Homo sapiens
  misc_RNA (1)...(19): siRNA sense strand
gauaucugcugaccgcuau

SEQ ID NO: 723412 - RNA, 19 nt, Homo sapiens
  misc_RNA (1)...(19): siRNA sense strand
gagaaaagaacucaacaua

SEQ ID NO: 723413 - RNA, 19 nt, Homo sapiens
  misc_RNA (1)...(19): siRNA sense strand
ucaguggccucuccauuga

SEQ ID NO: 723414 - RNA, 19 nt, Homo sapiens
  misc_RNA (1)...(19): siRNA sense strand
gcccagacccuuaaaauua

SEQ ID NO: 723415 - RNA, 19 nt, Homo sapiens
  misc_RNA (1)...(19): siRNA sense strand
guaaaccagcagugcauua

SEQ ID NO: 723416 - RNA, 19 nt, Homo sapiens
  misc_RNA (1)...(19): siRNA sense strand
agacuucacugcuggagaa

SEQ ID NO: 723417 - RNA, 19 nt, Homo sapiens
  misc_RNA (1)...(19): siRNA sense strand
caggagaagaugcugauua

SEQ ID NO: 723418 - RNA, 19 nt, Homo sapiens
  misc_RNA (1)...(19): siRNA sense strand
gaagaauguugccuaucau

SEQ ID NO: 723419 - RNA, 19 nt, Homo sapiens
  misc_RNA (1)...(19): siRNA sense strand
gaugaaacaugagguucuu

SEQ ID NO: 723420 - RNA, 19 nt, Homo sapiens
  misc_RNA (1)...(19): siRNA sense strand
gaugaagauugcuccgauu

SEQ ID NO: 723421 - RNA, 19 nt, Homo sapiens
  misc_RNA (1)...(19): siRNA sense strand
gaagaacaacaaucauuag

SEQ ID NO: 723422 - RNA, 19 nt, Homo sapiens
  misc_RNA (1)...(19): siRNA sense strand
gcuauucccuguuccuugu

SEQ ID NO: 723423 - RNA, 19 nt, Homo sapiens
  misc_RNA (1)...(19): siRNA sense strand
agaagaugcugauuaaugg

SEQ ID NO: 723424 - RNA, 19 nt, Homo sapiens
  misc_RNA (1)...(19): siRNA sense strand
gaacuuguagcaacugaau

SEQ ID NO: 723425 - RNA, 19 nt, Homo sapiens
  misc_RNA (1)...(19): siRNA sense strand
gaauguugccuaucauaau

SEQ ID NO: 723426 - RNA, 19 nt, Homo sapiens
  misc_RNA (1)...(19): siRNA sense strand
gcagaguccucgugcagau

SEQ ID NO: 723427 - RNA, 19 nt, Homo sapiens
  misc_RNA (1)...(19): siRNA sense strand
caaauuacaggcuacaaga

SEQ ID NO: 723428 - RNA, 19 nt, Homo sapiens
  misc_RNA (1)...(19): siRNA sense strand
guucaacacuggaagaagu

SEQ ID NO: 723429 - RNA, 19 nt, Homo sapiens
  misc_RNA (1)...(19): siRNA sense strand
caagggaacaugaugcaaa

SEQ ID NO: 723430 - RNA, 19 nt, Homo sapiens
  misc_RNA (1)...(19): siRNA sense strand
ccacugaucuaaugaacag

SEQ ID NO: 723431 - RNA, 19 nt, Homo sapiens
  misc_RNA (1)...(19): siRNA sense strand
gcagauggauuuuaagugu

SEQ ID NO: 723432 - RNA, 19 nt, Homo sapiens
  misc_RNA (1)...(19): siRNA sense strand
ccagaugucaguaaggaua

SEQ ID NO: 723433 - RNA, 19 nt, Homo sapiens
  misc_RNA (1)...(19): siRNA sense strand
gaccagugcucaagacucu

SEQ ID NO: 723434 - RNA, 19 nt, Homo sapiens
  misc_RNA (1)...(19): siRNA sense strand
uuacugaccucaaccuugu

SEQ ID NO: 723435 - RNA, 19 nt, Homo sapiens
  misc_RNA (1)...(19): siRNA sense strand
cagcuccaaugacaaguuu

SEQ ID NO: 723436 - RNA, 19 nt, Homo sapiens
  misc_RNA (1)...(19): siRNA sense strand
ggagacaugccuuuaauac

SEQ ID NO: 723437 - RNA, 19 nt, Homo sapiens
  misc_RNA (1)...(19): siRNA sense strand
uaagaggcgaggagaauuu

SEQ ID NO: 723438 - RNA, 19 nt, Homo sapiens
  misc_RNA (1)...(19): siRNA sense strand
agacaugccuuuaauacag

SEQ ID NO: 723439 - RNA, 19 nt, Homo sapiens
  misc_RNA (1)...(19): siRNA sense strand
ugcagaaguugaccaaauu

SEQ ID NO: 723440 - RNA, 19 nt, Homo sapiens
  misc_RNA (1)...(19): siRNA sense strand
gcagaaagaacaggcagaa

SEQ ID NO: 723441 - RNA, 19 nt, Homo sapiens
  misc_RNA (1)...(19): siRNA sense strand
caacauagaacccacugau

SEQ ID NO: 723442 - RNA, 19 nt, Homo sapiens
  misc_RNA (1)...(19): siRNA sense strand
agaauuaucggaagaaugu

SEQ ID NO: 723443 - RNA, 19 nt, Homo sapiens
  misc_RNA (1)...(19): siRNA sense strand
gugaagacagcuccaauga

SEQ ID NO: 723444 - RNA, 19 nt, Homo sapiens
  misc_RNA (1)...(19): siRNA sense strand
ugugaucuuucugcaauua

SEQ ID NO: 723445 - RNA, 19 nt, Homo sapiens
  misc_RNA (1)...(19): siRNA sense strand
caccgaaucuugcucuugu

SEQ ID NO: 723446 - RNA, 19 nt, Homo sapiens
  misc_RNA (1)...(19): siRNA sense strand
gacuuuagcuucagugacu

SEQ ID NO: 723447 - RNA, 19 nt, Homo sapiens
  misc_RNA (1)...(19): siRNA sense strand
caaccgaaaugacgaacag

SEQ ID NO: 723448 - RNA, 19 nt, Homo sapiens
  misc_RNA (1)...(19): siRNA sense strand
gcagugcauuagaaguuug

SEQ ID NO: 723449 - RNA, 19 nt, Homo sapiens
  misc_RNA (1)...(19): siRNA sense strand
guaugccaauuaagaauca

SEQ ID NO: 723450 - RNA, 19 nt, Homo sapiens
  misc_RNA (1)...(19): siRNA sense strand
agaaagaacaggcagaaau

SEQ ID NO: 723451 - RNA, 19 nt, Homo sapiens
  misc_RNA (1)...(19): siRNA sense strand
gcuugaccuugcuaguuua

SEQ ID NO: 723452 - RNA, 19 nt, Homo sapiens
  misc_RNA (1)...(19): siRNA sense strand
ccucuuagacccauuguug

SEQ ID NO: 723453 - RNA, 19 nt, Homo sapiens
  misc_RNA (1)...(19): siRNA sense strand
gaccagugccugaugauuc

SEQ ID NO: 723454 - RNA, 19 nt, Homo sapiens
  misc_RNA (1)...(19): siRNA sense strand
gcacuaagccacgauuugg

SEQ ID NO: 723455 - RNA, 19 nt, Homo sapiens
  misc_RNA (1)...(19): siRNA sense strand
auacuugcauugcugauug

SEQ ID NO: 723456 - RNA, 19 nt, Homo sapiens
  misc_RNA (1)...(19): siRNA sense strand
gugguauuguucuucauaa

SEQ ID NO: 723457 - RNA, 19 nt, Homo sapiens
  misc_RNA (1)...(19): siRNA sense strand
ggaauuagugaaggauauu

SEQ ID NO: 723458 - RNA, 19 nt, Homo sapiens
  misc_RNA (1)...(19): siRNA sense strand
uuacugccauucaaucaug

SEQ ID NO: 723459 - RNA, 19 nt, Homo sapiens
  misc_RNA (1)...(19): siRNA sense strand
gaaacaagagagcuacagu

SEQ ID NO: 723460 - RNA, 19 nt, Homo sapiens
  misc_RNA (1)...(19): siRNA sense strand
gauaacagugucccuggaa

SEQ ID NO: 723461 - RNA, 19 nt, Homo sapiens
  misc_RNA (1)...(19): siRNA sense strand
agaacccacugaucuaaug

SEQ ID NO: 723462 - RNA, 19 nt, Homo sapiens
  misc_RNA (1)...(19): siRNA sense strand
ugagcugucugaucuggaa

SEQ ID NO: 723463 - RNA, 19 nt, Homo sapiens
  misc_RNA (1)...(19): siRNA sense strand
cagcagugcauuagaaguu

SEQ ID NO: 723464 - RNA, 19 nt, Homo sapiens
  misc_RNA (1)...(19): siRNA sense strand
ggagugugaggaauuagaa

SEQ ID NO: 723465 - RNA, 19 nt, Homo sapiens
  misc_RNA (1)...(19): siRNA sense strand
ccaaugacaaguuucuuau

SEQ ID NO: 723466 - RNA, 19 nt, Homo sapiens
  misc_RNA (1)...(19): siRNA sense strand
agaacacgcagauguauga

SEQ ID NO: 723467 - RNA, 19 nt, Homo sapiens
  misc_RNA (1)...(19): siRNA sense strand
cagaacagcaggagaagau

SEQ ID NO: 723468 - RNA, 19 nt, Homo sapiens
  misc_RNA (1)...(19): siRNA sense strand
gaucaaggagacagagaga

SEQ ID NO: 723469 - RNA, 19 nt, Homo sapiens
  misc_RNA (1)...(19): siRNA sense strand
aauauaagaccacguugaa

SEQ ID NO: 723470 - RNA, 19 nt, Homo sapiens
  misc_RNA (1)...(19): siRNA sense strand
aagaagaauuaucggaaga

SEQ ID NO: 723471 - RNA, 19 nt, Homo sapiens
  misc_RNA (1)...(19): siRNA sense strand
gaagacagcuccaaugaca

SEQ ID NO: 723472 - RNA, 19 nt, Homo sapiens
  misc_RNA (1)...(19): siRNA sense strand
gaaaucaggugcugcuuga

SEQ ID NO: 723473 - RNA, 19 nt, Homo sapiens
  misc_RNA (1)...(19): siRNA sense strand
ggaagaauguugccuauca

SEQ ID NO: 723474 - RNA, 19 nt, Homo sapiens
  misc_RNA (1)...(19): siRNA sense strand
ggacuuugcugcuuauuug

SEQ ID NO: 723475 - RNA, 19 nt, Homo sapiens
  misc_RNA (1)...(19): siRNA sense strand
gaaaagaacucaacauaga

SEQ ID NO: 723476 - RNA, 19 nt, Homo sapiens
  misc_RNA (1)...(19): siRNA sense strand
gaacaacaaucauuagaag

SEQ ID NO: 723477 - RNA, 19 nt, Homo sapiens
  misc_RNA (1)...(19): siRNA sense strand
caagagagcuacagucguu

SEQ ID NO: 723478 - RNA, 19 nt, Homo sapiens
  misc_RNA (1)...(19): siRNA sense strand
gugcagaacuuccagauga

SEQ ID NO: 723479 - RNA, 19 nt, Homo sapiens
  misc_RNA (1)...(19): siRNA sense strand
gaauuugaccggccucuua

SEQ ID NO: 723480 - RNA, 19 nt, Homo sapiens
  misc_RNA (1)...(19): siRNA sense strand
gaugacagcuugugaucuu

SEQ ID NO: 723481 - RNA, 19 nt, Homo sapiens
  misc_RNA (1)...(19): siRNA sense strand
ggaagagguuguuggugua

SEQ ID NO: 723482 - RNA, 19 nt, Homo sapiens
  misc_RNA (1)...(19): siRNA sense strand
ggaagaaguuucaaauaac

SEQ ID NO: 723483 - RNA, 19 nt, Homo sapiens
  misc_RNA (1)...(19): siRNA sense strand
gagaagaugcugauuaaug

SEQ ID NO: 723484 - RNA, 19 nt, Homo sapiens
  misc_RNA (1)...(19): siRNA sense strand
cuagauggcugcagaaaga

SEQ ID NO: 723485 - RNA, 19 nt, Homo sapiens
  misc_RNA (1)...(19): siRNA sense strand
gaauaacucuuacauacag

SEQ ID NO: 723486 - RNA, 19 nt, Homo sapiens
  misc_RNA (1)...(19): siRNA sense strand
ggaacaugaugcaaacaaa

SEQ ID NO: 723487 - RNA, 19 nt, Homo sapiens
  misc_RNA (1)...(19): siRNA sense strand
gaaagaacaggcagaaaug

SEQ ID NO: 723488 - RNA, 19 nt, Homo sapiens
  misc_RNA (1)...(19): siRNA sense strand
ggagaauacuggcaagguu

SEQ ID NO: 723489 - RNA, 19 nt, Homo sapiens
  misc_RNA (1)...(19): siRNA sense strand
gugaauaacucuuacauac

SEQ ID NO: 723490 - RNA, 19 nt, Homo sapiens
  misc_RNA (1)...(19): siRNA sense strand
caaguuggguucauagaug

SEQ ID NO: 723491 - RNA, 19 nt, Homo sapiens
  misc_RNA (1)...(19): siRNA sense strand
ugaaggauauuucuaguca

SEQ ID NO: 723492 - RNA, 19 nt, Homo sapiens
  misc_RNA (1)...(19): siRNA sense strand
uuaauaagauggaggagaa

SEQ ID NO: 723493 - RNA, 19 nt, Homo sapiens
  misc_RNA (1)...(19): siRNA sense strand
gaaaaucucugccucugaa

SEQ ID NO: 723494 - RNA, 19 nt, Homo sapiens
  misc_RNA (1)...(19): siRNA sense strand
ggugggacauuuacugaaa

SEQ ID NO: 723495 - RNA, 19 nt, Homo sapiens
  misc_RNA (1)...(19): siRNA sense strand
ggaaacggugggacauuua

SEQ ID NO: 723496 - RNA, 19 nt, Homo sapiens
  misc_RNA (1)...(19): siRNA sense strand
ggauauuucuagucauuug

SEQ ID NO: 723497 - RNA, 19 nt, Homo sapiens
  misc_RNA (1)...(19): siRNA sense strand
gagaauacuggcaagguua

SEQ ID NO: 723498 - RNA, 19 nt, Homo sapiens
  misc_RNA (1)...(19): siRNA sense strand
aggagaagaugcugauuaa

SEQ ID NO: 723499 - RNA, 19 nt, Homo sapiens
  misc_RNA (1)...(19): siRNA sense strand
gcagaaguugaccaaauua

SEQ ID NO: 723500 - RNA, 19 nt, Homo sapiens
  misc_RNA (1)...(19): siRNA sense strand
ggaagaaacaagagagcua

SEQ ID NO: 723501 - RNA, 19 nt, Homo sapiens
  misc_RNA (1)...(19): siRNA sense strand
ggugagcccuugaacauca

SEQ ID NO: 723502 - RNA, 19 nt, Homo sapiens
  misc_RNA (1)...(19): siRNA sense strand
caauucggauguuuacuga

SEQ ID NO: 723503 - RNA, 19 nt, Homo sapiens
  misc_RNA (1)...(19): siRNA sense strand
gaccuagcacuguacauua

SEQ ID NO: 723504 - RNA, 19 nt, Homo sapiens
  misc_RNA (1)...(19): siRNA sense strand
aaauaacuguauccgcuua

SEQ ID NO: 723505 - RNA, 19 nt, Homo sapiens
  misc_RNA (1)...(19): siRNA sense strand
gaauauaagaccacguuga

SEQ ID NO: 723506 - RNA, 19 nt, Homo sapiens
  misc_RNA (1)...(19): siRNA sense strand
gaagaauuaucggaagaau

SEQ ID NO: 723507 - RNA, 19 nt, Homo sapiens
  misc_RNA (1)...(19): siRNA sense strand
uuacauguaugcucaguau

SEQ ID NO: 723508 - RNA, 19 nt, Homo sapiens
  misc_RNA (1)...(19): siRNA sense strand
ugaccuugcuaguuuaauu

SEQ ID NO: 723509 - RNA, 19 nt, Homo sapiens
  misc_RNA (1)...(19): siRNA sense strand
cauggagugugaggaauua

SEQ ID NO: 723510 - RNA, 19 nt, Homo sapiens
  misc_RNA (1)...(19): siRNA sense strand
uaucauaauuggagacaug

SEQ ID NO: 723511 - RNA, 19 nt, Homo sapiens
  misc_RNA (1)...(19): siRNA sense strand
gauaucugcugaccgcuau

SEQ ID NO: 723512 - RNA, 19 nt, Homo sapiens
  misc_RNA (1)...(19): siRNA sense strand
gagaaaagaacucaacaua

SEQ ID NO: 723513 - RNA, 19 nt, Homo sapiens
  misc_RNA (1)...(19): siRNA sense strand
ucaguggccucuccauuga

SEQ ID NO: 723514 - RNA, 19 nt, Homo sapiens
  misc_RNA (1)...(19): siRNA sense strand
gcccagacccuuaaaauua

SEQ ID NO: 723515 - RNA, 19 nt, Homo sapiens
  misc_RNA (1)...(19): siRNA sense strand
guaaaccagcagugcauua

SEQ ID NO: 723516 - RNA, 19 nt, Homo sapiens
  misc_RNA (1)...(19): siRNA sense strand
agacuucacugcuggagaa

SEQ ID NO: 723517 - RNA, 19 nt, Homo sapiens
  misc_RNA (1)...(19): siRNA sense strand
caggagaagaugcugauua

SEQ ID NO: 723518 - RNA, 19 nt, Homo sapiens
  misc_RNA (1)...(19): siRNA sense strand
gaagaauguugccuaucau

SEQ ID NO: 723519 - RNA, 19 nt, Homo sapiens
  misc_RNA (1)...(19): siRNA sense strand
gaugaaacaugagguucuu

SEQ ID NO: 723520 - RNA, 19 nt, Homo sapiens
  misc_RNA (1)...(19): siRNA sense strand
gaugaagauugcuccgauu

SEQ ID NO: 723521 - RNA, 19 nt, Homo sapiens
  misc_RNA (1)...(19): siRNA sense strand
gaagaacaacaaucauuag

SEQ ID NO: 723522 - RNA, 19 nt, Homo sapiens
  misc_RNA (1)...(19): siRNA sense strand
gcuauucccuguuccuugu

SEQ ID NO: 723523 - RNA, 19 nt, Homo sapiens
  misc_RNA (1)...(19): siRNA sense strand
agaagaugcugauuaaugg

SEQ ID NO: 723524 - RNA, 19 nt, Homo sapiens
  misc_RNA (1)...(19): siRNA sense strand
gaacuuguagcaacugaau

SEQ ID NO: 723525 - RNA, 19 nt, Homo sapiens
  misc_RNA (1)...(19): siRNA sense strand
gaauguugccuaucauaau

SEQ ID NO: 723526 - RNA, 19 nt, Homo sapiens
  misc_RNA (1)...(19): siRNA sense strand
gcagaguccucgugcagau

SEQ ID NO: 723527 - RNA, 19 nt, Homo sapiens
  misc_RNA (1)...(19): siRNA sense strand
caaauuacaggcuacaaga

SEQ ID NO: 723528 - RNA, 19 nt, Homo sapiens
  misc_RNA (1)...(19): siRNA sense strand
guucaacacuggaagaagu

SEQ ID NO: 723529 - RNA, 19 nt, Homo sapiens
  misc_RNA (1)...(19): siRNA sense strand
caagggaacaugaugcaaa

SEQ ID NO: 723530 - RNA, 19 nt, Homo sapiens
  misc_RNA (1)...(19): siRNA sense strand
ccacugaucuaaugaacag

SEQ ID NO: 723531 - RNA, 19 nt, Homo sapiens
  misc_RNA (1)...(19): siRNA sense strand
gcagauggauuuuaagugu

SEQ ID NO: 723532 - RNA, 19 nt, Homo sapiens
  misc_RNA (1)...(19): siRNA sense strand
ccagaugucaguaaggaua

SEQ ID NO: 723533 - RNA, 19 nt, Homo sapiens
  misc_RNA (1)...(19): siRNA sense strand
gaccagugcucaagacucu

SEQ ID NO: 723534 - RNA, 19 nt, Homo sapiens
  misc_RNA (1)...(19): siRNA sense strand
uuacugaccucaaccuugu

SEQ ID NO: 723535 - RNA, 19 nt, Homo sapiens
  misc_RNA (1)...(19): siRNA sense strand
cagcuccaaugacaaguuu

SEQ ID NO: 723536 - RNA, 19 nt, Homo sapiens
  misc_RNA (1)...(19): siRNA sense strand
ggagacaugccuuuaauac

SEQ ID NO: 723537 - RNA, 19 nt, Homo sapiens
  misc_RNA (1)...(19): siRNA sense strand
uaagaggcgaggagaauuu

SEQ ID NO: 723538 - RNA, 19 nt, Homo sapiens
  misc_RNA (1)...(19): siRNA sense strand
agacaugccuuuaauacag

SEQ ID NO: 723539 - RNA, 19 nt, Homo sapiens
  misc_RNA (1)...(19): siRNA sense strand
ugcagaaguugaccaaauu

SEQ ID NO: 723540 - RNA, 19 nt, Homo sapiens
  misc_RNA (1)...(19): siRNA sense strand
gcagaaagaacaggcagaa

SEQ ID NO: 723541 - RNA, 19 nt, Homo sapiens
  misc_RNA (1)...(19): siRNA sense strand
caacauagaacccacugau

SEQ ID NO: 723542 - RNA, 19 nt, Homo sapiens
  misc_RNA (1)...(19): siRNA sense strand
agaauuaucggaagaaugu

SEQ ID NO: 723543 - RNA, 19 nt, Homo sapiens
  misc_RNA (1)...(19): siRNA sense strand
gugaagacagcuccaauga

SEQ ID NO: 723544 - RNA, 19 nt, Homo sapiens
  misc_RNA (1)...(19): siRNA sense strand
ugugaucuuucugcaauua

SEQ ID NO: 723545 - RNA, 19 nt, Homo sapiens
  misc_RNA (1)...(19): siRNA sense strand
caccgaaucuugcucuugu

SEQ ID NO: 723546 - RNA, 19 nt, Homo sapiens
  misc_RNA (1)...(19): siRNA sense strand
gacuuuagcuucagugacu

SEQ ID NO: 723547 - RNA, 19 nt, Homo sapiens
  misc_RNA (1)...(19): siRNA sense strand
caaccgaaaugacgaacag

SEQ ID NO: 723548 - RNA, 19 nt, Homo sapiens
  misc_RNA (1)...(19): siRNA sense strand
gcagugcauuagaaguuug

SEQ ID NO: 723549 - RNA, 19 nt, Homo sapiens
  misc_RNA (1)...(19): siRNA sense strand
guaugccaauuaagaauca

SEQ ID NO: 723550 - RNA, 19 nt, Homo sapiens
  misc_RNA (1)...(19): siRNA sense strand
agaaagaacaggcagaaau

SEQ ID NO: 723551 - RNA, 19 nt, Homo sapiens
  misc_RNA (1)...(19): siRNA sense strand
gcuugaccuugcuaguuua

SEQ ID NO: 723552 - RNA, 19 nt, Homo sapiens
  misc_RNA (1)...(19): siRNA sense strand
ccucuuagacccauuguug

SEQ ID NO: 723553 - RNA, 19 nt, Homo sapiens
  misc_RNA (1)...(19): siRNA sense strand
gaccagugccugaugauuc

SEQ ID NO: 723554 - RNA, 19 nt, Homo sapiens
  misc_RNA (1)...(19): siRNA sense strand
gcacuaagccacgauuugg

SEQ ID NO: 723555 - RNA, 19 nt, Homo sapiens
  misc_RNA (1)...(19): siRNA sense strand
auacuugcauugcugauug

SEQ ID NO: 723556 - RNA, 19 nt, Homo sapiens
  misc_RNA (1)...(19): siRNA sense strand
gugguauuguucuucauaa

SEQ ID NO: 723557 - RNA, 19 nt, Homo sapiens
  misc_RNA (1)...(19): siRNA sense strand
ggaauuagugaaggauauu

SEQ ID NO: 723558 - RNA, 19 nt, Homo sapiens
  misc_RNA (1)...(19): siRNA sense strand
uuacugccauucaaucaug

SEQ ID NO: 723559 - RNA, 19 nt, Homo sapiens
  misc_RNA (1)...(19): siRNA sense strand
gaaacaagagagcuacagu

SEQ ID NO: 723560 - RNA, 19 nt, Homo sapiens
  misc_RNA (1)...(19): siRNA sense strand
gauaacagugucccuggaa

SEQ ID NO: 723561 - RNA, 19 nt, Homo sapiens
  misc_RNA (1)...(19): siRNA sense strand
agaacccacugaucuaaug

SEQ ID NO: 723562 - RNA, 19 nt, Homo sapiens
  misc_RNA (1)...(19): siRNA sense strand
ugagcugucugaucuggaa

SEQ ID NO: 723563 - RNA, 19 nt, Homo sapiens
  misc_RNA (1)...(19): siRNA sense strand
cagcagugcauuagaaguu

SEQ ID NO: 723564 - RNA, 19 nt, Homo sapiens
  misc_RNA (1)...(19): siRNA sense strand
ggagugugaggaauuagaa

SEQ ID NO: 723565 - RNA, 19 nt, Homo sapiens
  misc_RNA (1)...(19): siRNA sense strand
ccaaugacaaguuucuuau

SEQ ID NO: 723566 - RNA, 19 nt, Homo sapiens
  misc_RNA (1)...(19): siRNA sense strand
agaacacgcagauguauga

SEQ ID NO: 723567 - RNA, 19 nt, Homo sapiens
  misc_RNA (1)...(19): siRNA sense strand
cagaacagcaggagaagau

SEQ ID NO: 723568 - RNA, 19 nt, Homo sapiens
  misc_RNA (1)...(19): siRNA sense strand
gaucaaggagacagagaga

SEQ ID NO: 723569 - RNA, 19 nt, Homo sapiens
  misc_RNA (1)...(19): siRNA sense strand
aauauaagaccacguugaa

SEQ ID NO: 723570 - RNA, 19 nt, Homo sapiens
  misc_RNA (1)...(19): siRNA sense strand
aagaagaauuaucggaaga

SEQ ID NO: 723571 - RNA, 19 nt, Homo sapiens
  misc_RNA (1)...(19): siRNA sense strand
gaagacagcuccaaugaca

SEQ ID NO: 723572 - RNA, 19 nt, Homo sapiens
  misc_RNA (1)...(19): siRNA sense strand
gaaaucaggugcugcuuga

SEQ ID NO: 723573 - RNA, 19 nt, Homo sapiens
  misc_RNA (1)...(19): siRNA sense strand
ggaagaauguugccuauca

SEQ ID NO: 723574 - RNA, 19 nt, Homo sapiens
  misc_RNA (1)...(19): siRNA sense strand
ggacuuugcugcuuauuug

SEQ ID NO: 723575 - RNA, 19 nt, Homo sapiens
  misc_RNA (1)...(19): siRNA sense strand
gaaaagaacucaacauaga

SEQ ID NO: 723576 - RNA, 19 nt, Homo sapiens
  misc_RNA (1)...(19): siRNA sense strand
gaacaacaaucauuagaag

SEQ ID NO: 723577 - RNA, 19 nt, Homo sapiens
  misc_RNA (1)...(19): siRNA sense strand
caagagagcuacagucguu

SEQ ID NO: 723578 - RNA, 19 nt, Homo sapiens
  misc_RNA (1)...(19): siRNA sense strand
gugcagaacuuccagauga

SEQ ID NO: 723579 - RNA, 19 nt, Homo sapiens
  misc_RNA (1)...(19): siRNA sense strand
gaauuugaccggccucuua

SEQ ID NO: 723580 - RNA, 19 nt, Homo sapiens
  misc_RNA (1)...(19): siRNA sense strand
gaugacagcuugugaucuu

SEQ ID NO: 723581 - RNA, 19 nt, Homo sapiens
  misc_RNA (1)...(19): siRNA sense strand
ggaagagguuguuggugua

SEQ ID NO: 723582 - RNA, 19 nt, Homo sapiens
  misc_RNA (1)...(19): siRNA sense strand
ggaagaaguuucaaauaac

SEQ ID NO: 723583 - RNA, 19 nt, Homo sapiens
  misc_RNA (1)...(19): siRNA sense strand
gagaagaugcugauuaaug

SEQ ID NO: 723584 - RNA, 19 nt, Homo sapiens
  misc_RNA (1)...(19): siRNA sense strand
cuagauggcugcagaaaga

SEQ ID NO: 723585 - RNA, 19 nt, Homo sapiens
  misc_RNA (1)...(19): siRNA sense strand
gaauaacucuuacauacag

SEQ ID NO: 723586 - RNA, 19 nt, Homo sapiens
  misc_RNA (1)...(19): siRNA sense strand
ggaacaugaugcaaacaaa

SEQ ID NO: 723587 - RNA, 19 nt, Homo sapiens
  misc_RNA (1)...(19): siRNA sense strand
gaaagaacaggcagaaaug

SEQ ID NO: 723588 - RNA, 19 nt, Homo sapiens
  misc_RNA (1)...(19): siRNA sense strand
ggagaauacuggcaagguu

SEQ ID NO: 723589 - RNA, 19 nt, Homo sapiens
  misc_RNA (1)...(19): siRNA sense strand
gugaauaacucuuacauac

SEQ ID NO: 723590 - RNA, 19 nt, Homo sapiens
  misc_RNA (1)...(19): siRNA sense strand
caaguuggguucauagaug

SEQ ID NO: 723591 - RNA, 19 nt, Homo sapiens
  misc_RNA (1)...(19): siRNA sense strand
ugaaggauauuucuaguca

SEQ ID NO: 723592 - RNA, 19 nt, Homo sapiens
  misc_RNA (1)...(19): siRNA sense strand
uuaauaagauggaggagaa

SEQ ID NO: 723593 - RNA, 19 nt, Homo sapiens
  misc_RNA (1)...(19): siRNA sense strand
gaaaaucucugccucugaa

SEQ ID NO: 723594 - RNA, 19 nt, Homo sapiens
  misc_RNA (1)...(19): siRNA sense strand
ggugggacauuuacugaaa

SEQ ID NO: 723595 - RNA, 19 nt, Homo sapiens
  misc_RNA (1)...(19): siRNA sense strand
ggaaacggugggacauuua

SEQ ID NO: 723596 - RNA, 19 nt, Homo sapiens
  misc_RNA (1)...(19): siRNA sense strand
ggauauuucuagucauuug

SEQ ID NO: 723597 - RNA, 19 nt, Homo sapiens
  misc_RNA (1)...(19): siRNA sense strand
gagaauacuggcaagguua

SEQ ID NO: 723598 - RNA, 19 nt, Homo sapiens
  misc_RNA (1)...(19): siRNA sense strand
aggagaagaugcugauuaa

SEQ ID NO: 723599 - RNA, 19 nt, Homo sapiens
  misc_RNA (1)...(19): siRNA sense strand
gcagaaguugaccaaauua

SEQ ID NO: 723600 - RNA, 19 nt, Homo sapiens
  misc_RNA (1)...(19): siRNA sense strand
ggaagaaacaagagagcua

SEQ ID NO: 723601 - RNA, 19 nt, Homo sapiens
  misc_RNA (1)...(19): siRNA sense strand
ggugagcccuugaacauca

SEQ ID NO: 723602 - RNA, 19 nt, Homo sapiens
  misc_RNA (1)...(19): siRNA sense strand
caauucggauguuuacuga

SEQ ID NO: 723603 - RNA, 19 nt, Homo sapiens
  misc_RNA (1)...(19): siRNA sense strand
gaccuagcacuguacauua

SEQ ID NO: 723604 - RNA, 19 nt, Homo sapiens
  misc_RNA (1)...(19): siRNA sense strand
aaauaacuguauccgcuua

SEQ ID NO: 723605 - RNA, 19 nt, Homo sapiens
  misc_RNA (1)...(19): siRNA sense strand
gaauauaagaccacguuga

SEQ ID NO: 723606 - RNA, 19 nt, Homo sapiens
  misc_RNA (1)...(19): siRNA sense strand
gaagaauuaucggaagaau

SEQ ID NO: 723607 - RNA, 19 nt, Homo sapiens
  misc_RNA (1)...(19): siRNA sense strand
uuacauguaugcucaguau

SEQ ID NO: 723608 - RNA, 19 nt, Homo sapiens
  misc_RNA (1)...(19): siRNA sense strand
ugaccuugcuaguuuaauu

SEQ ID NO: 723609 - RNA, 19 nt, Homo sapiens
  misc_RNA (1)...(19): siRNA sense strand
cauggagugugaggaauua

SEQ ID NO: 723610 - RNA, 19 nt, Homo sapiens
  misc_RNA (1)...(19): siRNA sense strand
uaucauaauuggagacaug

SEQ ID NO: 723611 - RNA, 19 nt, Homo sapiens
  misc_RNA (1)...(19): siRNA sense strand
gauaucugcugaccgcuau

SEQ ID NO: 723612 - RNA, 19 nt, Homo sapiens
  misc_RNA (1)...(19): siRNA sense strand
gagaaaagaacucaacaua

SEQ ID NO: 723613 - RNA, 19 nt, Homo sapiens
  misc_RNA (1)...(19): siRNA sense strand
ucaguggccucuccauuga

SEQ ID NO: 723614 - RNA, 19 nt, Homo sapiens
  misc_RNA (1)...(19): siRNA sense strand
gcccagacccuuaaaauua

SEQ ID NO: 723615 - RNA, 19 nt, Homo sapiens
  misc_RNA (1)...(19): siRNA sense strand
guaaaccagcagugcauua

SEQ ID NO: 723616 - RNA, 19 nt, Homo sapiens
  misc_RNA (1)...(19): siRNA sense strand
agacuucacugcuggagaa

SEQ ID NO: 723617 - RNA, 19 nt, Homo sapiens
  misc_RNA (1)...(19): siRNA sense strand
caggagaagaugcugauua

SEQ ID NO: 723618 - RNA, 19 nt, Homo sapiens
  misc_RNA (1)...(19): siRNA sense strand
gaagaauguugccuaucau

SEQ ID NO: 723619 - RNA, 19 nt, Homo sapiens
  misc_RNA (1)...(19): siRNA sense strand
gaugaaacaugagguucuu

SEQ ID NO: 723620 - RNA, 19 nt, Homo sapiens
  misc_RNA (1)...(19): siRNA sense strand
gaugaagauugcuccgauu

SEQ ID NO: 723621 - RNA, 19 nt, Homo sapiens
  misc_RNA (1)...(19): siRNA sense strand
gaagaacaacaaucauuag

SEQ ID NO: 723622 - RNA, 19 nt, Homo sapiens
  misc_RNA (1)...(19): siRNA sense strand
gcuauucccuguuccuugu

SEQ ID NO: 723623 - RNA, 19 nt, Homo sapiens
  misc_RNA (1)...(19): siRNA sense strand
agaagaugcugauuaaugg

SEQ ID NO: 723624 - RNA, 19 nt, Homo sapiens
  misc_RNA (1)...(19): siRNA sense strand
gaacuuguagcaacugaau

SEQ ID NO: 723625 - RNA, 19 nt, Homo sapiens
  misc_RNA (1)...(19): siRNA sense strand
gcagaguccucgugcagau

SEQ ID NO: 723626 - RNA, 19 nt, Homo sapiens
  misc_RNA (1)...(19): siRNA sense strand
gaauguugccuaucauaau

SEQ ID NO: 723627 - RNA, 19 nt, Homo sapiens
  misc_RNA (1)...(19): siRNA sense strand
caaauuacaggcuacaaga

SEQ ID NO: 723628 - RNA, 19 nt, Homo sapiens
  misc_RNA (1)...(19): siRNA sense strand
guucaacacuggaagaagu

SEQ ID NO: 723629 - RNA, 19 nt, Homo sapiens
  misc_RNA (1)...(19): siRNA sense strand
caagggaacaugaugcaaa

SEQ ID NO: 723630 - RNA, 19 nt, Homo sapiens
  misc_RNA (1)...(19): siRNA sense strand
ccacugaucuaaugaacag

SEQ ID NO: 723631 - RNA, 19 nt, Homo sapiens
  misc_RNA (1)...(19): siRNA sense strand
gcagauggauuuuaagugu

SEQ ID NO: 723632 - RNA, 19 nt, Homo sapiens
  misc_RNA (1)...(19): siRNA sense strand
ccagaugucaguaaggaua

SEQ ID NO: 723633 - RNA, 19 nt, Homo sapiens
  misc_RNA (1)...(19): siRNA sense strand
gaccagugcucaagacucu

SEQ ID NO: 723634 - RNA, 19 nt, Homo sapiens
  misc_RNA (1)...(19): siRNA sense strand
uuacugaccucaaccuugu

SEQ ID NO: 723635 - RNA, 19 nt, Homo sapiens
  misc_RNA (1)...(19): siRNA sense strand
cagcuccaaugacaaguuu

SEQ ID NO: 723636 - RNA, 19 nt, Homo sapiens
  misc_RNA (1)...(19): siRNA sense strand
ggagacaugccuuuaauac

SEQ ID NO: 723637 - RNA, 19 nt, Homo sapiens
  misc_RNA (1)...(19): siRNA sense strand
uaagaggcgaggagaauuu

SEQ ID NO: 723638 - RNA, 19 nt, Homo sapiens
  misc_RNA (1)...(19): siRNA sense strand
agacaugccuuuaauacag

SEQ ID NO: 723639 - RNA, 19 nt, Homo sapiens
  misc_RNA (1)...(19): siRNA sense strand
ugcagaaguugaccaaauu

SEQ ID NO: 723640 - RNA, 19 nt, Homo sapiens
  misc_RNA (1)...(19): siRNA sense strand
gcagaaagaacaggcagaa

SEQ ID NO: 723641 - RNA, 19 nt, Homo sapiens
  misc_RNA (1)...(19): siRNA sense strand
caacauagaacccacugau

SEQ ID NO: 723642 - RNA, 19 nt, Homo sapiens
  misc_RNA (1)...(19): siRNA sense strand
agaauuaucggaagaaugu

SEQ ID NO: 723643 - RNA, 19 nt, Homo sapiens
  misc_RNA (1)...(19): siRNA sense strand
gugaagacagcuccaauga

SEQ ID NO: 723644 - RNA, 19 nt, Homo sapiens
  misc_RNA (1)...(19): siRNA sense strand
caccgaaucuugcucuugu

SEQ ID NO: 723645 - RNA, 19 nt, Homo sapiens
  misc_RNA (1)...(19): siRNA sense strand
ugugaucuuucugcaauua

SEQ ID NO: 723646 - RNA, 19 nt, Homo sapiens
  misc_RNA (1)...(19): siRNA sense strand
gacuuuagcuucagugacu

SEQ ID NO: 723647 - RNA, 19 nt, Homo sapiens
  misc_RNA (1)...(19): siRNA sense strand
caaccgaaaugacgaacag

SEQ ID NO: 723648 - RNA, 19 nt, Homo sapiens
  misc_RNA (1)...(19): siRNA sense strand
gcagugcauuagaaguuug

SEQ ID NO: 723649 - RNA, 19 nt, Homo sapiens
  misc_RNA (1)...(19): siRNA sense strand
guaugccaauuaagaauca

SEQ ID NO: 723650 - RNA, 19 nt, Homo sapiens
  misc_RNA (1)...(19): siRNA sense strand
agaaagaacaggcagaaau

SEQ ID NO: 723651 - RNA, 19 nt, Homo sapiens
  misc_RNA (1)...(19): siRNA sense strand
gcuugaccuugcuaguuua

SEQ ID NO: 723652 - RNA, 19 nt, Homo sapiens
  misc_RNA (1)...(19): siRNA sense strand
gugguauuguucuucauaa

SEQ ID NO: 723653 - RNA, 19 nt, Homo sapiens
  misc_RNA (1)...(19): siRNA sense strand
gaccagugccugaugauuc

SEQ ID NO: 723654 - RNA, 19 nt, Homo sapiens
  misc_RNA (1)...(19): siRNA sense strand
gcacuaagccacgauuugg

SEQ ID NO: 723655 - RNA, 19 nt, Homo sapiens
  misc_RNA (1)...(19): siRNA sense strand
auacuugcauugcugauug

SEQ ID NO: 723656 - RNA, 19 nt, Homo sapiens
  misc_RNA (1)...(19): siRNA sense strand
ccucuuagacccauuguug

SEQ ID NO: 723657 - RNA, 19 nt, Homo sapiens
  misc_RNA (1)...(19): siRNA sense strand
ggaauuagugaaggauauu

SEQ ID NO: 723658 - RNA, 19 nt, Homo sapiens
  misc_RNA (1)...(19): siRNA sense strand
uuacugccauucaaucaug

SEQ ID NO: 723659 - RNA, 19 nt, Homo sapiens
  misc_RNA (1)...(19): siRNA sense strand
gaaacaagagagcuacagu

SEQ ID NO: 723660 - RNA, 19 nt, Homo sapiens
  misc_RNA (1)...(19): siRNA sense strand
ccaaugacaaguuucuuau

SEQ ID NO: 723661 - RNA, 19 nt, Homo sapiens
  misc_RNA (1)...(19): siRNA sense strand
agaacccacugaucuaaug

SEQ ID NO: 723662 - RNA, 19 nt, Homo sapiens
  misc_RNA (1)...(19): siRNA sense strand
ugagcugucugaucuggaa

SEQ ID NO: 723663 - RNA, 19 nt, Homo sapiens
  misc_RNA (1)...(19): siRNA sense strand
cagcagugcauuagaaguu

SEQ ID NO: 723664 - RNA, 19 nt, Homo sapiens
  misc_RNA (1)...(19): siRNA sense strand
ggagugugaggaauuagaa

SEQ ID NO: 723665 - RNA, 19 nt, Homo sapiens
  misc_RNA (1)...(19): siRNA sense strand
gauaacagugucccuggaa

SEQ ID NO: 723666 - RNA, 19 nt, Homo sapiens
  misc_RNA (1)...(19): siRNA sense strand
agaacacgcagauguauga

SEQ ID NO: 723667 - RNA, 19 nt, Homo sapiens
  misc_RNA (1)...(19): siRNA sense strand
cagaacagcaggagaagau

SEQ ID NO: 723668 - RNA, 19 nt, Homo sapiens
  misc_RNA (1)...(19): siRNA sense strand
gaucaaggagacagagaga

SEQ ID NO: 723669 - RNA, 19 nt, Homo sapiens
  misc_RNA (1)...(19): siRNA sense strand
aauauaagaccacguugaa

SEQ ID NO: 723670 - RNA, 19 nt, Homo sapiens
  misc_RNA (1)...(19): siRNA sense strand
aagaagaauuaucggaaga

SEQ ID NO: 723671 - RNA, 19 nt, Homo sapiens
  misc_RNA (1)...(19): siRNA sense strand
gaagacagcuccaaugaca

SEQ ID NO: 723672 - RNA, 19 nt, Homo sapiens
  misc_RNA (1)...(19): siRNA sense strand
gaaaucaggugcugcuuga

SEQ ID NO: 723673 - RNA, 19 nt, Homo sapiens
  misc_RNA (1)...(19): siRNA sense strand
ggaagaauguugccuauca

SEQ ID NO: 723674 - RNA, 19 nt, Homo sapiens
  misc_RNA (1)...(19): siRNA sense strand
ggacuuugcugcuuauuug

SEQ ID NO: 723675 - RNA, 19 nt, Homo sapiens
  misc_RNA (1)...(19): siRNA sense strand
gaaaagaacucaacauaga

SEQ ID NO: 723676 - RNA, 19 nt, Homo sapiens
  misc_RNA (1)...(19): siRNA sense strand
gaacaacaaucauuagaag

SEQ ID NO: 723677 - RNA, 19 nt, Homo sapiens
  misc_RNA (1)...(19): siRNA sense strand
caagagagcuacagucguu

SEQ ID NO: 723678 - RNA, 19 nt, Homo sapiens
  misc_RNA (1)...(19): siRNA sense strand
gugcagaacuuccagauga

SEQ ID NO: 723679 - RNA, 19 nt, Homo sapiens
  misc_RNA (1)...(19): siRNA sense strand
gaauuugaccggccucuua

SEQ ID NO: 723680 - RNA, 19 nt, Homo sapiens
  misc_RNA (1)...(19): siRNA sense strand
gaugacagcuugugaucuu

SEQ ID NO: 723681 - RNA, 19 nt, Homo sapiens
  misc_RNA (1)...(19): siRNA sense strand
ggaagagguuguuggugua

SEQ ID NO: 723682 - RNA, 19 nt, Homo sapiens
  misc_RNA (1)...(19): siRNA sense strand
ggaagaaguuucaaauaac

SEQ ID NO: 723683 - RNA, 19 nt, Homo sapiens
  misc_RNA (1)...(19): siRNA sense strand
gagaagaugcugauuaaug

SEQ ID NO: 723684 - RNA, 19 nt, Homo sapiens
  misc_RNA (1)...(19): siRNA sense strand
cuagauggcugcagaaaga

SEQ ID NO: 723685 - RNA, 19 nt, Homo sapiens
  misc_RNA (1)...(19): siRNA sense strand
gaauaacucuuacauacag

SEQ ID NO: 723686 - RNA, 19 nt, Homo sapiens
  misc_RNA (1)...(19): siRNA sense strand
ggaacaugaugcaaacaaa

SEQ ID NO: 723687 - RNA, 19 nt, Homo sapiens
  misc_RNA (1)...(19): siRNA sense strand
gaaagaacaggcagaaaug

SEQ ID NO: 723688 - RNA, 19 nt, Homo sapiens
  misc_RNA (1)...(19): siRNA sense strand
ggagaauacuggcaagguu

SEQ ID NO: 723689 - RNA, 19 nt, Homo sapiens
  misc_RNA (1)...(19): siRNA sense strand
gugaauaacucuuacauac

SEQ ID NO: 723690 - RNA, 19 nt, Homo sapiens
  misc_RNA (1)...(19): siRNA sense strand
caaguuggguucauagaug

SEQ ID NO: 723691 - RNA, 19 nt, Homo sapiens
  misc_RNA (1)...(19): siRNA sense strand
ugaaggauauuucuaguca

SEQ ID NO: 723692 - RNA, 19 nt, Homo sapiens
  misc_RNA (1)...(19): siRNA sense strand
uuaauaagauggaggagaa

SEQ ID NO: 723693 - RNA, 19 nt, Homo sapiens
  misc_RNA (1)...(19): siRNA sense strand
gaaaaucucugccucugaa

SEQ ID NO: 723694 - RNA, 19 nt, Homo sapiens
  misc_RNA (1)...(19): siRNA sense strand
ggugggacauuuacugaaa

SEQ ID NO: 723695 - RNA, 19 nt, Homo sapiens
  misc_RNA (1)...(19): siRNA sense strand
ggaaacggugggacauuua

SEQ ID NO: 723696 - RNA, 19 nt, Homo sapiens
  misc_RNA (1)...(19): siRNA sense strand
ggauauuucuagucauuug

SEQ ID NO: 723697 - RNA, 19 nt, Homo sapiens
  misc_RNA (1)...(19): siRNA sense strand
gagaauacuggcaagguua

SEQ ID NO: 723698 - RNA, 19 nt, Homo sapiens
  misc_RNA (1)...(19): siRNA sense strand
aggagaagaugcugauuaa

SEQ ID NO: 723699 - RNA, 19 nt, Homo sapiens
  misc_RNA (1)...(19): siRNA sense strand
gcagaaguugaccaaauua

SEQ ID NO: 723700 - RNA, 19 nt, Homo sapiens
  misc_RNA (1)...(19): siRNA sense strand
ggaagaaacaagagagcua

SEQ ID NO: 723701 - RNA, 19 nt, Homo sapiens
  misc_RNA (1)...(19): siRNA sense strand
ggugagcccuugaacauca

SEQ ID NO: 723702 - RNA, 19 nt, Homo sapiens
  misc_RNA (1)...(19): siRNA sense strand
caauucggauguuuacuga

SEQ ID NO: 723703 - RNA, 19 nt, Homo sapiens
  misc_RNA (1)...(19): siRNA sense strand
gaccuagcacuguacauua

SEQ ID NO: 723704 - RNA, 19 nt, Homo sapiens
  misc_RNA (1)...(19): siRNA sense strand
aaauaacuguauccgcuua

SEQ ID NO: 723705 - RNA, 19 nt, Homo sapiens
  misc_RNA (1)...(19): siRNA sense strand
gaauauaagaccacguuga

SEQ ID NO: 723706 - RNA, 19 nt, Homo sapiens
  misc_RNA (1)...(19): siRNA sense strand
gaagaauuaucggaagaau

SEQ ID NO: 723707 - RNA, 19 nt, Homo sapiens
  misc_RNA (1)...(19): siRNA sense strand
uuacauguaugcucaguau

SEQ ID NO: 723708 - RNA, 19 nt, Homo sapiens
  misc_RNA (1)...(19): siRNA sense strand
ugaccuugcuaguuuaauu

SEQ ID NO: 723709 - RNA, 19 nt, Homo sapiens
  misc_RNA (1)...(19): siRNA sense strand
cauggagugugaggaauua

SEQ ID NO: 723710 - RNA, 19 nt, Homo sapiens
  misc_RNA (1)...(19): siRNA sense strand
uaucauaauuggagacaug

SEQ ID NO: 723711 - RNA, 19 nt, Homo sapiens
  misc_RNA (1)...(19): siRNA sense strand
gauaucugcugaccgcuau

SEQ ID NO: 723712 - RNA, 19 nt, Homo sapiens
  misc_RNA (1)...(19): siRNA sense strand
gagaaaagaacucaacaua

SEQ ID NO: 723713 - RNA, 19 nt, Homo sapiens
  misc_RNA (1)...(19): siRNA sense strand
ucaguggccucuccauuga

SEQ ID NO: 723714 - RNA, 19 nt, Homo sapiens
  misc_RNA (1)...(19): siRNA sense strand
gcccagacccuuaaaauua

SEQ ID NO: 723715 - RNA, 19 nt, Homo sapiens
  misc_RNA (1)...(19): siRNA sense strand
guaaaccagcagugcauua

SEQ ID NO: 723716 - RNA, 19 nt, Homo sapiens
  misc_RNA (1)...(19): siRNA sense strand
agacuucacugcuggagaa

SEQ ID NO: 723717 - RNA, 19 nt, Homo sapiens
  misc_RNA (1)...(19): siRNA sense strand
caggagaagaugcugauua

SEQ ID NO: 723718 - RNA, 19 nt, Homo sapiens
  misc_RNA (1)...(19): siRNA sense strand
gaagaauguugccuaucau

SEQ ID NO: 723719 - RNA, 19 nt, Homo sapiens
  misc_RNA (1)...(19): siRNA sense strand
gaugaaacaugagguucuu

SEQ ID NO: 723720 - RNA, 19 nt, Homo sapiens
  misc_RNA (1)...(19): siRNA sense strand
gaugaagauugcuccgauu

SEQ ID NO: 723721 - RNA, 19 nt, Homo sapiens
  misc_RNA (1)...(19): siRNA sense strand
gaagaacaacaaucauuag

SEQ ID NO: 723722 - RNA, 19 nt, Homo sapiens
  misc_RNA (1)...(19): siRNA sense strand
gcuauucccuguuccuugu

SEQ ID NO: 723723 - RNA, 19 nt, Homo sapiens
  misc_RNA (1)...(19): siRNA sense strand
agaagaugcugauuaaugg

SEQ ID NO: 723724 - RNA, 19 nt, Homo sapiens
  misc_RNA (1)...(19): siRNA sense strand
gaacuuguagcaacugaau

SEQ ID NO: 723725 - RNA, 19 nt, Homo sapiens
  misc_RNA (1)...(19): siRNA sense strand
gaauguugccuaucauaau

SEQ ID NO: 723726 - RNA, 19 nt, Homo sapiens
  misc_RNA (1)...(19): siRNA sense strand
gcagaguccucgugcagau

SEQ ID NO: 723727 - RNA, 19 nt, Homo sapiens
  misc_RNA (1)...(19): siRNA sense strand
caaauuacaggcuacaaga

SEQ ID NO: 723728 - RNA, 19 nt, Homo sapiens
  misc_RNA (1)...(19): siRNA sense strand
guucaacacuggaagaagu

SEQ ID NO: 723729 - RNA, 19 nt, Homo sapiens
  misc_RNA (1)...(19): siRNA sense strand
caagggaacaugaugcaaa

SEQ ID NO: 723730 - RNA, 19 nt, Homo sapiens
  misc_RNA (1)...(19): siRNA sense strand
ccacugaucuaaugaacag

SEQ ID NO: 723731 - RNA, 19 nt, Homo sapiens
  misc_RNA (1)...(19): siRNA sense strand
gcagauggauuuuaagugu

SEQ ID NO: 723732 - RNA, 19 nt, Homo sapiens
  misc_RNA (1)...(19): siRNA sense strand
ccagaugucaguaaggaua

SEQ ID NO: 723733 - RNA, 19 nt, Homo sapiens
  misc_RNA (1)...(19): siRNA sense strand
gaccagugcucaagacucu

SEQ ID NO: 723734 - RNA, 19 nt, Homo sapiens
  misc_RNA (1)...(19): siRNA sense strand
uuacugaccucaaccuugu

SEQ ID NO: 723735 - RNA, 19 nt, Homo sapiens
  misc_RNA (1)...(19): siRNA sense strand
cagcuccaaugacaaguuu

SEQ ID NO: 723736 - RNA, 19 nt, Homo sapiens
  misc_RNA (1)...(19): siRNA sense strand
ggagacaugccuuuaauac

SEQ ID NO: 723737 - RNA, 19 nt, Homo sapiens
  misc_RNA (1)...(19): siRNA sense strand
uaagaggcgaggagaauuu

SEQ ID NO: 723738 - RNA, 19 nt, Homo sapiens
  misc_RNA (1)...(19): siRNA sense strand
agacaugccuuuaauacag

SEQ ID NO: 723739 - RNA, 19 nt, Homo sapiens
  misc_RNA (1)...(19): siRNA sense strand
ugcagaaguugaccaaauu

SEQ ID NO: 723740 - RNA, 19 nt, Homo sapiens
  misc_RNA (1)...(19): siRNA sense strand
gcagaaagaacaggcagaa

SEQ ID NO: 723741 - RNA, 19 nt, Homo sapiens
  misc_RNA (1)...(19): siRNA sense strand
caacauagaacccacugau

SEQ ID NO: 723742 - RNA, 19 nt, Homo sapiens
  misc_RNA (1)...(19): siRNA sense strand
agaauuaucggaagaaugu

SEQ ID NO: 723743 - RNA, 19 nt, Homo sapiens
  misc_RNA (1)...(19): siRNA sense strand
gugaagacagcuccaauga

SEQ ID NO: 723744 - RNA, 19 nt, Homo sapiens
  misc_RNA (1)...(19): siRNA sense strand
ugugaucuuucugcaauua

SEQ ID NO: 723745 - RNA, 19 nt, Homo sapiens
  misc_RNA (1)...(19): siRNA sense strand
caccgaaucuugcucuugu

SEQ ID NO: 723746 - RNA, 19 nt, Homo sapiens
  misc_RNA (1)...(19): siRNA sense strand
gacuuuagcuucagugacu

SEQ ID NO: 723747 - RNA, 19 nt, Homo sapiens
  misc_RNA (1)...(19): siRNA sense strand
caaccgaaaugacgaacag

SEQ ID NO: 723748 - RNA, 19 nt, Homo sapiens
  misc_RNA (1)...(19): siRNA sense strand
gcagugcauuagaaguuug

SEQ ID NO: 723749 - RNA, 19 nt, Homo sapiens
  misc_RNA (1)...(19): siRNA sense strand
guaugccaauuaagaauca

SEQ ID NO: 723750 - RNA, 19 nt, Homo sapiens
  misc_RNA (1)...(19): siRNA sense strand
agaaagaacaggcagaaau

SEQ ID NO: 723751 - RNA, 19 nt, Homo sapiens
  misc_RNA (1)...(19): siRNA sense strand
gcuugaccuugcuaguuua

SEQ ID NO: 723752 - RNA, 19 nt, Homo sapiens
  misc_RNA (1)...(19): siRNA sense strand
ccucuuagacccauuguug

SEQ ID NO: 723753 - RNA, 19 nt, Homo sapiens
  misc_RNA (1)...(19): siRNA sense strand
gaccagugccugaugauuc

SEQ ID NO: 723754 - RNA, 19 nt, Homo sapiens
  misc_RNA (1)...(19): siRNA sense strand
gcacuaagccacgauuugg

SEQ ID NO: 723755 - RNA, 19 nt, Homo sapiens
  misc_RNA (1)...(19): siRNA sense strand
auacuugcauugcugauug

SEQ ID NO: 723756 - RNA, 19 nt, Homo sapiens
  misc_RNA (1)...(19): siRNA sense strand
gugguauuguucuucauaa

SEQ ID NO: 723757 - RNA, 19 nt, Homo sapiens
  misc_RNA (1)...(19): siRNA sense strand
ggaauuagugaaggauauu

SEQ ID NO: 723758 - RNA, 19 nt, Homo sapiens
  misc_RNA (1)...(19): siRNA sense strand
uuacugccauucaaucaug

SEQ ID NO: 723759 - RNA, 19 nt, Homo sapiens
  misc_RNA (1)...(19): siRNA sense strand
gaaacaagagagcuacagu

SEQ ID NO: 723760 - RNA, 19 nt, Homo sapiens
  misc_RNA (1)...(19): siRNA sense strand
gauaacagugucccuggaa

SEQ ID NO: 723761 - RNA, 19 nt, Homo sapiens
  misc_RNA (1)...(19): siRNA sense strand
agaacccacugaucuaaug

SEQ ID NO: 723762 - RNA, 19 nt, Homo sapiens
  misc_RNA (1)...(19): siRNA sense strand
ugagcugucugaucuggaa

SEQ ID NO: 723763 - RNA, 19 nt, Homo sapiens
  misc_RNA (1)...(19): siRNA sense strand
cagcagugcauuagaaguu

SEQ ID NO: 723764 - RNA, 19 nt, Homo sapiens
  misc_RNA (1)...(19): siRNA sense strand
ggagugugaggaauuagaa

SEQ ID NO: 723765 - RNA, 19 nt, Homo sapiens
  misc_RNA (1)...(19): siRNA sense strand
ccaaugacaaguuucuuau

SEQ ID NO: 723766 - RNA, 19 nt, Homo sapiens
  misc_RNA (1)...(19): siRNA sense strand
agaacacgcagauguauga

SEQ ID NO: 723767 - RNA, 19 nt, Homo sapiens
  misc_RNA (1)...(19): siRNA sense strand
cagaacagcaggagaagau

SEQ ID NO: 723768 - RNA, 19 nt, Homo sapiens
  misc_RNA (1)...(19): siRNA sense strand
gaucaaggagacagagaga

SEQ ID NO: 723769 - RNA, 19 nt, Homo sapiens
  misc_RNA (1)...(19): siRNA sense strand
aauauaagaccacguugaa

SEQ ID NO: 723770 - RNA, 19 nt, Homo sapiens
  misc_RNA (1)...(19): siRNA sense strand
aagaagaauuaucggaaga

SEQ ID NO: 723771 - RNA, 19 nt, Homo sapiens
  misc_RNA (1)...(19): siRNA sense strand
gaagacagcuccaaugaca

SEQ ID NO: 723772 - RNA, 19 nt, Homo sapiens
  misc_RNA (1)...(19): siRNA sense strand
gaaaucaggugcugcuuga

SEQ ID NO: 723773 - RNA, 19 nt, Homo sapiens
  misc_RNA (1)...(19): siRNA sense strand
ggaagaauguugccuauca

SEQ ID NO: 723774 - RNA, 19 nt, Homo sapiens
  misc_RNA (1)...(19): siRNA sense strand
ggacuuugcugcuuauuug

SEQ ID NO: 723775 - RNA, 19 nt, Homo sapiens
  misc_RNA (1)...(19): siRNA sense strand
gaaaagaacucaacauaga

SEQ ID NO: 723776 - RNA, 19 nt, Homo sapiens
  misc_RNA (1)...(19): siRNA sense strand
gaacaacaaucauuagaag

SEQ ID NO: 723777 - RNA, 19 nt, Homo sapiens
  misc_RNA (1)...(19): siRNA sense strand
caagagagcuacagucguu

SEQ ID NO: 723778 - RNA, 19 nt, Homo sapiens
  misc_RNA (1)...(19): siRNA sense strand
gugcagaacuuccagauga

SEQ ID NO: 723779 - RNA, 19 nt, Homo sapiens
  misc_RNA (1)...(19): siRNA sense strand
gaauuugaccggccucuua

SEQ ID NO: 723780 - RNA, 19 nt, Homo sapiens
  misc_RNA (1)...(19): siRNA sense strand
gaugacagcuugugaucuu

SEQ ID NO: 723781 - RNA, 19 nt, Homo sapiens
  misc_RNA (1)...(19): siRNA sense strand
ggaagagguuguuggugua

SEQ ID NO: 723782 - RNA, 19 nt, Homo sapiens
  misc_RNA (1)...(19): siRNA sense strand
ggaagaaguuucaaauaac

SEQ ID NO: 723783 - RNA, 19 nt, Homo sapiens
  misc_RNA (1)...(19): siRNA sense strand
gagaagaugcugauuaaug

SEQ ID NO: 723784 - RNA, 19 nt, Homo sapiens
  misc_RNA (1)...(19): siRNA sense strand
cuagauggcugcagaaaga

SEQ ID NO: 723785 - RNA, 19 nt, Homo sapiens
  misc_RNA (1)...(19): siRNA sense strand
gaauaacucuuacauacag

SEQ ID NO: 723786 - RNA, 19 nt, Homo sapiens
  misc_RNA (1)...(19): siRNA sense strand
ggaacaugaugcaaacaaa

SEQ ID NO: 723787 - RNA, 19 nt, Homo sapiens
  misc_RNA (1)...(19): siRNA sense strand
gaaagaacaggcagaaaug

SEQ ID NO: 723788 - RNA, 19 nt, Homo sapiens
  misc_RNA (1)...(19): siRNA sense strand
ggagaauacuggcaagguu

SEQ ID NO: 723789 - RNA, 19 nt, Homo sapiens
  misc_RNA (1)...(19): siRNA sense strand
gugaauaacucuuacauac

SEQ ID NO: 723790 - RNA, 19 nt, Homo sapiens
  misc_RNA (1)...(19): siRNA sense strand
caaguuggguucauagaug

SEQ ID NO: 723791 - RNA, 19 nt, Homo sapiens
  misc_RNA (1)...(19): siRNA sense strand
ugaaggauauuucuaguca

SEQ ID NO: 723792 - RNA, 19 nt, Homo sapiens
  misc_RNA (1)...(19): siRNA sense strand
uuaauaagauggaggagaa

SEQ ID NO: 723793 - RNA, 19 nt, Homo sapiens
  misc_RNA (1)...(19): siRNA sense strand
gaaaaucucugccucugaa

SEQ ID NO: 723794 - RNA, 19 nt, Homo sapiens
  misc_RNA (1)...(19): siRNA sense strand
ggugggacauuuacugaaa

SEQ ID NO: 723795 - RNA, 19 nt, Homo sapiens
  misc_RNA (1)...(19): siRNA sense strand
ggaaacggugggacauuua

SEQ ID NO: 723796 - RNA, 19 nt, Homo sapiens
  misc_RNA (1)...(19): siRNA sense strand
ggauauuucuagucauuug

SEQ ID NO: 723797 - RNA, 19 nt, Homo sapiens
  misc_RNA (1)...(19): siRNA sense strand
gagaauacuggcaagguua

SEQ ID NO: 723798 - RNA, 19 nt, Homo sapiens
  misc_RNA (1)...(19): siRNA sense strand
aggagaagaugcugauuaa

SEQ ID NO: 723799 - RNA, 19 nt, Homo sapiens
  misc_RNA (1)...(19): siRNA sense strand
gcagaaguugaccaaauua

SEQ ID NO: 723800 - RNA, 19 nt, Homo sapiens
  misc_RNA (1)...(19): siRNA sense strand
ggaagaaacaagagagcua

SEQ ID NO: 723801 - RNA, 19 nt, Homo sapiens
  misc_RNA (1)...(19): siRNA sense strand
ggugagcccuugaacauca

SEQ ID NO: 723802 - RNA, 19 nt, Homo sapiens
  misc_RNA (1)...(19): siRNA sense strand
caauucggauguuuacuga

SEQ ID NO: 723803 - RNA, 19 nt, Homo sapiens
  misc_RNA (1)...(19): siRNA sense strand
gaccuagcacuguacauua

SEQ ID NO: 723804 - RNA, 19 nt, Homo sapiens
  misc_RNA (1)...(19): siRNA sense strand
aaauaacuguauccgcuua

SEQ ID NO: 723805 - RNA, 19 nt, Homo sapiens
  misc_RNA (1)...(19): siRNA sense strand
gaauauaagaccacguuga

SEQ ID NO: 723806 - RNA, 19 nt, Homo sapiens
  misc_RNA (1)...(19): siRNA sense strand
gaagaauuaucggaagaau

SEQ ID NO: 723807 - RNA, 19 nt, Homo sapiens
  misc_RNA (1)...(19): siRNA sense strand
uuacauguaugcucaguau

SEQ ID NO: 723808 - RNA, 19 nt, Homo sapiens
  misc_RNA (1)...(19): siRNA sense strand
ugaccuugcuaguuuaauu

SEQ ID NO: 723809 - RNA, 19 nt, Homo sapiens
  misc_RNA (1)...(19): siRNA sense strand
cauggagugugaggaauua

SEQ ID NO: 723810 - RNA, 19 nt, Homo sapiens
  misc_RNA (1)...(19): siRNA sense strand
uaucauaauuggagacaug

SEQ ID NO: 723811 - RNA, 19 nt, Homo sapiens
  misc_RNA (1)...(19): siRNA sense strand
gauaucugcugaccgcuau

SEQ ID NO: 723812 - RNA, 19 nt, Homo sapiens
  misc_RNA (1)...(19): siRNA sense strand
gagaaaagaacucaacaua

SEQ ID NO: 723813 - RNA, 19 nt, Homo sapiens
  misc_RNA (1)...(19): siRNA sense strand
ucaguggccucuccauuga

SEQ ID NO: 723814 - RNA, 19 nt, Homo sapiens
  misc_RNA (1)...(19): siRNA sense strand
gcccagacccuuaaaauua

SEQ ID NO: 723815 - RNA, 19 nt, Homo sapiens
  misc_RNA (1)...(19): siRNA sense strand
guaaaccagcagugcauua

SEQ ID NO: 723816 - RNA, 19 nt, Homo sapiens
  misc_RNA (1)...(19): siRNA sense strand
agacuucacugcuggagaa

SEQ ID NO: 723817 - RNA, 19 nt, Homo sapiens
  misc_RNA (1)...(19): siRNA sense strand
caggagaagaugcugauua

SEQ ID NO: 723818 - RNA, 19 nt, Homo sapiens
  misc_RNA (1)...(19): siRNA sense strand
gaagaauguugccuaucau

SEQ ID NO: 723819 - RNA, 19 nt, Homo sapiens
  misc_RNA (1)...(19): siRNA sense strand
gaugaaacaugagguucuu

SEQ ID NO: 723820 - RNA, 19 nt, Homo sapiens
  misc_RNA (1)...(19): siRNA sense strand
gaugaagauugcuccgauu

SEQ ID NO: 723821 - RNA, 19 nt, Homo sapiens
  misc_RNA (1)...(19): siRNA sense strand
gaagaacaacaaucauuag

SEQ ID NO: 723822 - RNA, 19 nt, Homo sapiens
  misc_RNA (1)...(19): siRNA sense strand
gcuauucccuguuccuugu

SEQ ID NO: 723823 - RNA, 19 nt, Homo sapiens
  misc_RNA (1)...(19): siRNA sense strand
agaagaugcugauuaaugg

SEQ ID NO: 723824 - RNA, 19 nt, Homo sapiens
  misc_RNA (1)...(19): siRNA sense strand
gaacuuguagcaacugaau

SEQ ID NO: 723825 - RNA, 19 nt, Homo sapiens
  misc_RNA (1)...(19): siRNA sense strand
gaauguugccuaucauaau

SEQ ID NO: 723826 - RNA, 19 nt, Homo sapiens
  misc_RNA (1)...(19): siRNA sense strand
gcagaguccucgugcagau

SEQ ID NO: 723827 - RNA, 19 nt, Homo sapiens
  misc_RNA (1)...(19): siRNA sense strand
caaauuacaggcuacaaga

SEQ ID NO: 723828 - RNA, 19 nt, Homo sapiens
  misc_RNA (1)...(19): siRNA sense strand
guucaacacuggaagaagu

SEQ ID NO: 723829 - RNA, 19 nt, Homo sapiens
  misc_RNA (1)...(19): siRNA sense strand
caagggaacaugaugcaaa

SEQ ID NO: 723830 - RNA, 19 nt, Homo sapiens
  misc_RNA (1)...(19): siRNA sense strand
ccacugaucuaaugaacag

SEQ ID NO: 723831 - RNA, 19 nt, Homo sapiens
  misc_RNA (1)...(19): siRNA sense strand
gcagauggauuuuaagugu

SEQ ID NO: 723832 - RNA, 19 nt, Homo sapiens
  misc_RNA (1)...(19): siRNA sense strand
ccagaugucaguaaggaua

SEQ ID NO: 723833 - RNA, 19 nt, Homo sapiens
  misc_RNA (1)...(19): siRNA sense strand
gaccagugcucaagacucu

SEQ ID NO: 723834 - RNA, 19 nt, Homo sapiens
  misc_RNA (1)...(19): siRNA sense strand
uuacugaccucaaccuugu

SEQ ID NO: 723835 - RNA, 19 nt, Homo sapiens
  misc_RNA (1)...(19): siRNA sense strand
cagcuccaaugacaaguuu

SEQ ID NO: 723836 - RNA, 19 nt, Homo sapiens
  misc_RNA (1)...(19): siRNA sense strand
ggagacaugccuuuaauac

SEQ ID NO: 723837 - RNA, 19 nt, Homo sapiens
  misc_RNA (1)...(19): siRNA sense strand
uaagaggcgaggagaauuu

SEQ ID NO: 723838 - RNA, 19 nt, Homo sapiens
  misc_RNA (1)...(19): siRNA sense strand
agacaugccuuuaauacag

SEQ ID NO: 723839 - RNA, 19 nt, Homo sapiens
  misc_RNA (1)...(19): siRNA sense strand
ugcagaaguugaccaaauu

SEQ ID NO: 723840 - RNA, 19 nt, Homo sapiens
  misc_RNA (1)...(19): siRNA sense strand
gcagaaagaacaggcagaa

SEQ ID NO: 723841 - RNA, 19 nt, Homo sapiens
  misc_RNA (1)...(19): siRNA sense strand
caacauagaacccacugau

SEQ ID NO: 723842 - RNA, 19 nt, Homo sapiens
  misc_RNA (1)...(19): siRNA sense strand
agaauuaucggaagaaugu

SEQ ID NO: 723843 - RNA, 19 nt, Homo sapiens
  misc_RNA (1)...(19): siRNA sense strand
gugaagacagcuccaauga

SEQ ID NO: 723844 - RNA, 19 nt, Homo sapiens
  misc_RNA (1)...(19): siRNA sense strand
ugugaucuuucugcaauua

SEQ ID NO: 723845 - RNA, 19 nt, Homo sapiens
  misc_RNA (1)...(19): siRNA sense strand
caccgaaucuugcucuugu

SEQ ID NO: 723846 - RNA, 19 nt, Homo sapiens
  misc_RNA (1)...(19): siRNA sense strand
gacuuuagcuucagugacu

SEQ ID NO: 723847 - RNA, 19 nt, Homo sapiens
  misc_RNA (1)...(19): siRNA sense strand
caaccgaaaugacgaacag

SEQ ID NO: 723848 - RNA, 19 nt, Homo sapiens
  misc_RNA (1)...(19): siRNA sense strand
gcagugcauuagaaguuug

SEQ ID NO: 723849 - RNA, 19 nt, Homo sapiens
  misc_RNA (1)...(19): siRNA sense strand
guaugccaauuaagaauca

SEQ ID NO: 723850 - RNA, 19 nt, Homo sapiens
  misc_RNA (1)...(19): siRNA sense strand
agaaagaacaggcagaaau

SEQ ID NO: 723851 - RNA, 19 nt, Homo sapiens
  misc_RNA (1)...(19): siRNA sense strand
gcuugaccuugcuaguuua

SEQ ID NO: 723852 - RNA, 19 nt, Homo sapiens
  misc_RNA (1)...(19): siRNA sense strand
ccucuuagacccauuguug

SEQ ID NO: 723853 - RNA, 19 nt, Homo sapiens
  misc_RNA (1)...(19): siRNA sense strand
gaccagugccugaugauuc

SEQ ID NO: 723854 - RNA, 19 nt, Homo sapiens
  misc_RNA (1)...(19): siRNA sense strand
gcacuaagccacgauuugg

SEQ ID NO: 723855 - RNA, 19 nt, Homo sapiens
  misc_RNA (1)...(19): siRNA sense strand
auacuugcauugcugauug

SEQ ID NO: 723856 - RNA, 19 nt, Homo sapiens
  misc_RNA (1)...(19): siRNA sense strand
gugguauuguucuucauaa

SEQ ID NO: 723857 - RNA, 19 nt, Homo sapiens
  misc_RNA (1)...(19): siRNA sense strand
ggaauuagugaaggauauu

SEQ ID NO: 723858 - RNA, 19 nt, Homo sapiens
  misc_RNA (1)...(19): siRNA sense strand
uuacugccauucaaucaug

SEQ ID NO: 723859 - RNA, 19 nt, Homo sapiens
  misc_RNA (1)...(19): siRNA sense strand
gaaacaagagagcuacagu

SEQ ID NO: 723860 - RNA, 19 nt, Homo sapiens
  misc_RNA (1)...(19): siRNA sense strand
gauaacagugucccuggaa

SEQ ID NO: 723861 - RNA, 19 nt, Homo sapiens
  misc_RNA (1)...(19): siRNA sense strand
agaacccacugaucuaaug

SEQ ID NO: 723862 - RNA, 19 nt, Homo sapiens
  misc_RNA (1)...(19): siRNA sense strand
ugagcugucugaucuggaa

SEQ ID NO: 723863 - RNA, 19 nt, Homo sapiens
  misc_RNA (1)...(19): siRNA sense strand
cagcagugcauuagaaguu

SEQ ID NO: 723864 - RNA, 19 nt, Homo sapiens
  misc_RNA (1)...(19): siRNA sense strand
ggagugugaggaauuagaa

SEQ ID NO: 723865 - RNA, 19 nt, Homo sapiens
  misc_RNA (1)...(19): siRNA sense strand
ccaaugacaaguuucuuau

SEQ ID NO: 723866 - RNA, 19 nt, Homo sapiens
  misc_RNA (1)...(19): siRNA sense strand
agaacacgcagauguauga

SEQ ID NO: 723867 - RNA, 19 nt, Homo sapiens
  misc_RNA (1)...(19): siRNA sense strand
cagaacagcaggagaagau

SEQ ID NO: 723868 - RNA, 19 nt, Homo sapiens
  misc_RNA (1)...(19): siRNA sense strand
gaucaaggagacagagaga

SEQ ID NO: 723869 - RNA, 19 nt, Homo sapiens
  misc_RNA (1)...(19): siRNA sense strand
aauauaagaccacguugaa

SEQ ID NO: 723870 - RNA, 19 nt, Homo sapiens
  misc_RNA (1)...(19): siRNA sense strand
aagaagaauuaucggaaga

SEQ ID NO: 723871 - RNA, 19 nt, Homo sapiens
  misc_RNA (1)...(19): siRNA sense strand
gaagacagcuccaaugaca

SEQ ID NO: 723872 - RNA, 19 nt, Homo sapiens
  misc_RNA (1)...(19): siRNA sense strand
gaaaucaggugcugcuuga

SEQ ID NO: 723873 - RNA, 19 nt, Homo sapiens
  misc_RNA (1)...(19): siRNA sense strand
ggaagaauguugccuauca

SEQ ID NO: 723874 - RNA, 19 nt, Homo sapiens
  misc_RNA (1)...(19): siRNA sense strand
ggacuuugcugcuuauuug

SEQ ID NO: 723875 - RNA, 19 nt, Homo sapiens
  misc_RNA (1)...(19): siRNA sense strand
gaaaagaacucaacauaga

SEQ ID NO: 723876 - RNA, 19 nt, Homo sapiens
  misc_RNA (1)...(19): siRNA sense strand
gaacaacaaucauuagaag

SEQ ID NO: 723877 - RNA, 19 nt, Homo sapiens
  misc_RNA (1)...(19): siRNA sense strand
caagagagcuacagucguu

SEQ ID NO: 723878 - RNA, 19 nt, Homo sapiens
  misc_RNA (1)...(19): siRNA sense strand
gugcagaacuuccagauga

SEQ ID NO: 723879 - RNA, 19 nt, Homo sapiens
  misc_RNA (1)...(19): siRNA sense strand
gaauuugaccggccucuua

SEQ ID NO: 723880 - RNA, 19 nt, Homo sapiens
  misc_RNA (1)...(19): siRNA sense strand
gaugacagcuugugaucuu

SEQ ID NO: 723881 - RNA, 19 nt, Homo sapiens
  misc_RNA (1)...(19): siRNA sense strand
ggaagagguuguuggugua

SEQ ID NO: 723882 - RNA, 19 nt, Homo sapiens
  misc_RNA (1)...(19): siRNA sense strand
ggaagaaguuucaaauaac

SEQ ID NO: 723883 - RNA, 19 nt, Homo sapiens
  misc_RNA (1)...(19): siRNA sense strand
gagaagaugcugauuaaug

SEQ ID NO: 723884 - RNA, 19 nt, Homo sapiens
  misc_RNA (1)...(19): siRNA sense strand
cuagauggcugcagaaaga

SEQ ID NO: 723885 - RNA, 19 nt, Homo sapiens
  misc_RNA (1)...(19): siRNA sense strand
gaauaacucuuacauacag

SEQ ID NO: 723886 - RNA, 19 nt, Homo sapiens
  misc_RNA (1)...(19): siRNA sense strand
ggaacaugaugcaaacaaa

SEQ ID NO: 723887 - RNA, 19 nt, Homo sapiens
  misc_RNA (1)...(19): siRNA sense strand
gaaagaacaggcagaaaug

SEQ ID NO: 723888 - RNA, 19 nt, Homo sapiens
  misc_RNA (1)...(19): siRNA sense strand
ggagaauacuggcaagguu

SEQ ID NO: 723889 - RNA, 19 nt, Homo sapiens
  misc_RNA (1)...(19): siRNA sense strand
gugaauaacucuuacauac

SEQ ID NO: 723890 - RNA, 19 nt, Homo sapiens
  misc_RNA (1)...(19): siRNA sense strand
caaguuggguucauagaug

SEQ ID NO: 723891 - RNA, 19 nt, Homo sapiens
  misc_RNA (1)...(19): siRNA sense strand
ugaaggauauuucuaguca

SEQ ID NO: 723892 - RNA, 19 nt, Homo sapiens
  misc_RNA (1)...(19): siRNA sense strand
uuaauaagauggaggagaa

SEQ ID NO: 723893 - RNA, 19 nt, Homo sapiens
  misc_RNA (1)...(19): siRNA sense strand
gaaaaucucugccucugaa

SEQ ID NO: 723894 - RNA, 19 nt, Homo sapiens
  misc_RNA (1)...(19): siRNA sense strand
ggugggacauuuacugaaa

SEQ ID NO: 723895 - RNA, 19 nt, Homo sapiens
  misc_RNA (1)...(19): siRNA sense strand
ggaaacggugggacauuua

SEQ ID NO: 723896 - RNA, 19 nt, Homo sapiens
  misc_RNA (1)...(19): siRNA sense strand
ggauauuucuagucauuug

SEQ ID NO: 723897 - RNA, 19 nt, Homo sapiens
  misc_RNA (1)...(19): siRNA sense strand
gagaauacuggcaagguua

SEQ ID NO: 723898 - RNA, 19 nt, Homo sapiens
  misc_RNA (1)...(19): siRNA sense strand
aggagaagaugcugauuaa

SEQ ID NO: 723899 - RNA, 19 nt, Homo sapiens
  misc_RNA (1)...(19): siRNA sense strand
gcagaaguugaccaaauua

SEQ ID NO: 723900 - RNA, 19 nt, Homo sapiens
  misc_RNA (1)...(19): siRNA sense strand
ggaagaaacaagagagcua

SEQ ID NO: 723901 - RNA, 19 nt, Homo sapiens
  misc_RNA (1)...(19): siRNA sense strand
ggugagcccuugaacauca

SEQ ID NO: 723902 - RNA, 19 nt, Homo sapiens
  misc_RNA (1)...(19): siRNA sense strand
caauucggauguuuacuga

SEQ ID NO: 723903 - RNA, 19 nt, Homo sapiens
  misc_RNA (1)...(19): siRNA sense strand
gaccuagcacuguacauua

SEQ ID NO: 723904 - RNA, 19 nt, Homo sapiens
  misc_RNA (1)...(19): siRNA sense strand
aaauaacuguauccgcuua

SEQ ID NO: 723905 - RNA, 19 nt, Homo sapiens
  misc_RNA (1)...(19): siRNA sense strand
gaauauaagaccacguuga

SEQ ID NO: 723906 - RNA, 19 nt, Homo sapiens
  misc_RNA (1)...(19): siRNA sense strand
gaagaauuaucggaagaau

SEQ ID NO: 723907 - RNA, 19 nt, Homo sapiens
  misc_RNA (1)...(19): siRNA sense strand
uuacauguaugcucaguau

SEQ ID NO: 723908 - RNA, 19 nt, Homo sapiens
  misc_RNA (1)...(19): siRNA sense strand
ugaccuugcuaguuuaauu

SEQ ID NO: 723909 - RNA, 19 nt, Homo sapiens
  misc_RNA (1)...(19): siRNA sense strand
cauggagugugaggaauua

SEQ ID NO: 723910 - RNA, 19 nt, Homo sapiens
  misc_RNA (1)...(19): siRNA sense strand
uaucauaauuggagacaug

SEQ ID NO: 723911 - RNA, 19 nt, Homo sapiens
  misc_RNA (1)...(19): siRNA sense strand
gauaucugcugaccgcuau

SEQ ID NO: 723912 - RNA, 19 nt, Homo sapiens
  misc_RNA (1)...(19): siRNA sense strand
gagaaaagaacucaacaua

SEQ ID NO: 723913 - RNA, 19 nt, Homo sapiens
  misc_RNA (1)...(19): siRNA sense strand
ucaguggccucuccauuga

SEQ ID NO: 723914 - RNA, 19 nt, Homo sapiens
  misc_RNA (1)...(19): siRNA sense strand
gcccagacccuuaaaauua

SEQ ID NO: 723915 - RNA, 19 nt, Homo sapiens
  misc_RNA (1)...(19): siRNA sense strand
guaaaccagcagugcauua

SEQ ID NO: 723916 - RNA, 19 nt, Homo sapiens
  misc_RNA (1)...(19): siRNA sense strand
agacuucacugcuggagaa

SEQ ID NO: 723917 - RNA, 19 nt, Homo sapiens
  misc_RNA (1)...(19): siRNA sense strand
caggagaagaugcugauua

SEQ ID NO: 723918 - RNA, 19 nt, Homo sapiens
  misc_RNA (1)...(19): siRNA sense strand
gaagaauguugccuaucau

SEQ ID NO: 723919 - RNA, 19 nt, Homo sapiens
  misc_RNA (1)...(19): siRNA sense strand
gaugaaacaugagguucuu

SEQ ID NO: 723920 - RNA, 19 nt, Homo sapiens
  misc_RNA (1)...(19): siRNA sense strand
gaugaagauugcuccgauu

SEQ ID NO: 723921 - RNA, 19 nt, Homo sapiens
  misc_RNA (1)...(19): siRNA sense strand
gaagaacaacaaucauuag

SEQ ID NO: 723922 - RNA, 19 nt, Homo sapiens
  misc_RNA (1)...(19): siRNA sense strand
gcuauucccuguuccuugu

SEQ ID NO: 723923 - RNA, 19 nt, Homo sapiens
  misc_RNA (1)...(19): siRNA sense strand
agaagaugcugauuaaugg

SEQ ID NO: 723924 - RNA, 19 nt, Homo sapiens
  misc_RNA (1)...(19): siRNA sense strand
gaacuuguagcaacugaau

SEQ ID NO: 723925 - RNA, 19 nt, Homo sapiens
  misc_RNA (1)...(19): siRNA sense strand
gaauguugccuaucauaau

SEQ ID NO: 723926 - RNA, 19 nt, Homo sapiens
  misc_RNA (1)...(19): siRNA sense strand
gcagaguccucgugcagau

SEQ ID NO: 723927 - RNA, 19 nt, Homo sapiens
  misc_RNA (1)...(19): siRNA sense strand
caaauuacaggcuacaaga

SEQ ID NO: 723928 - RNA, 19 nt, Homo sapiens
  misc_RNA (1)...(19): siRNA sense strand
guucaacacuggaagaagu

SEQ ID NO: 723929 - RNA, 19 nt, Homo sapiens
  misc_RNA (1)...(19): siRNA sense strand
caagggaacaugaugcaaa

SEQ ID NO: 723930 - RNA, 19 nt, Homo sapiens
  misc_RNA (1)...(19): siRNA sense strand
ccacugaucuaaugaacag

SEQ ID NO: 723931 - RNA, 19 nt, Homo sapiens
  misc_RNA (1)...(19): siRNA sense strand
gcagauggauuuuaagugu

SEQ ID NO: 723932 - RNA, 19 nt, Homo sapiens
  misc_RNA (1)...(19): siRNA sense strand
ccagaugucaguaaggaua

SEQ ID NO: 723933 - RNA, 19 nt, Homo sapiens
  misc_RNA (1)...(19): siRNA sense strand
gaccagugcucaagacucu

SEQ ID NO: 723934 - RNA, 19 nt, Homo sapiens
  misc_RNA (1)...(19): siRNA sense strand
uuacugaccucaaccuugu

SEQ ID NO: 723935 - RNA, 19 nt, Homo sapiens
  misc_RNA (1)...(19): siRNA sense strand
cagcuccaaugacaaguuu

SEQ ID NO: 723936 - RNA, 19 nt, Homo sapiens
  misc_RNA (1)...(19): siRNA sense strand
ggagacaugccuuuaauac

SEQ ID NO: 723937 - RNA, 19 nt, Homo sapiens
  misc_RNA (1)...(19): siRNA sense strand
uaagaggcgaggagaauuu

SEQ ID NO: 723938 - RNA, 19 nt, Homo sapiens
  misc_RNA (1)...(19): siRNA sense strand
agacaugccuuuaauacag

SEQ ID NO: 723939 - RNA, 19 nt, Homo sapiens
  misc_RNA (1)...(19): siRNA sense strand
ugcagaaguugaccaaauu

SEQ ID NO: 723940 - RNA, 19 nt, Homo sapiens
  misc_RNA (1)...(19): siRNA sense strand
gcagaaagaacaggcagaa

SEQ ID NO: 723941 - RNA, 19 nt, Homo sapiens
  misc_RNA (1)...(19): siRNA sense strand
caacauagaacccacugau

SEQ ID NO: 723942 - RNA, 19 nt, Homo sapiens
  misc_RNA (1)...(19): siRNA sense strand
agaauuaucggaagaaugu

SEQ ID NO: 723943 - RNA, 19 nt, Homo sapiens
  misc_RNA (1)...(19): siRNA sense strand
gugaagacagcuccaauga

SEQ ID NO: 723944 - RNA, 19 nt, Homo sapiens
  misc_RNA (1)...(19): siRNA sense strand
ugugaucuuucugcaauua

SEQ ID NO: 723945 - RNA, 19 nt, Homo sapiens
  misc_RNA (1)...(19): siRNA sense strand
caccgaaucuugcucuugu

SEQ ID NO: 723946 - RNA, 19 nt, Homo sapiens
  misc_RNA (1)...(19): siRNA sense strand
gacuuuagcuucagugacu

SEQ ID NO: 723947 - RNA, 19 nt, Homo sapiens
  misc_RNA (1)...(19): siRNA sense strand
caaccgaaaugacgaacag

SEQ ID NO: 723948 - RNA, 19 nt, Homo sapiens
  misc_RNA (1)...(19): siRNA sense strand
gcagugcauuagaaguuug

SEQ ID NO: 723949 - RNA, 19 nt, Homo sapiens
  misc_RNA (1)...(19): siRNA sense strand
guaugccaauuaagaauca

SEQ ID NO: 723950 - RNA, 19 nt, Homo sapiens
  misc_RNA (1)...(19): siRNA sense strand
agaaagaacaggcagaaau

SEQ ID NO: 723951 - RNA, 19 nt, Homo sapiens
  misc_RNA (1)...(19): siRNA sense strand
gcuugaccuugcuaguuua

SEQ ID NO: 723952 - RNA, 19 nt, Homo sapiens
  misc_RNA (1)...(19): siRNA sense strand
ccucuuagacccauuguug

SEQ ID NO: 723953 - RNA, 19 nt, Homo sapiens
  misc_RNA (1)...(19): siRNA sense strand
gaccagugccugaugauuc

SEQ ID NO: 723954 - RNA, 19 nt, Homo sapiens
  misc_RNA (1)...(19): siRNA sense strand
gcacuaagccacgauuugg

SEQ ID NO: 723955 - RNA, 19 nt, Homo sapiens
  misc_RNA (1)...(19): siRNA sense strand
auacuugcauugcugauug

SEQ ID NO: 723956 - RNA, 19 nt, Homo sapiens
  misc_RNA (1)...(19): siRNA sense strand
gugguauuguucuucauaa

SEQ ID NO: 723957 - RNA, 19 nt, Homo sapiens
  misc_RNA (1)...(19): siRNA sense strand
ggaauuagugaaggauauu

SEQ ID NO: 723958 - RNA, 19 nt, Homo sapiens
  misc_RNA (1)...(19): siRNA sense strand
uuacugccauucaaucaug

SEQ ID NO: 723959 - RNA, 19 nt, Homo sapiens
  misc_RNA (1)...(19): siRNA sense strand
gaaacaagagagcuacagu

SEQ ID NO: 723960 - RNA, 19 nt, Homo sapiens
  misc_RNA (1)...(19): siRNA sense strand
gauaacagugucccuggaa

SEQ ID NO: 723961 - RNA, 19 nt, Homo sapiens
  misc_RNA (1)...(19): siRNA sense strand
agaacccacugaucuaaug

SEQ ID NO: 723962 - RNA, 19 nt, Homo sapiens
  misc_RNA (1)...(19): siRNA sense strand
ugagcugucugaucuggaa

SEQ ID NO: 723963 - RNA, 19 nt, Homo sapiens
  misc_RNA (1)...(19): siRNA sense strand
cagcagugcauuagaaguu

SEQ ID NO: 723964 - RNA, 19 nt, Homo sapiens
  misc_RNA (1)...(19): siRNA sense strand
ggagugugaggaauuagaa

SEQ ID NO: 723965 - RNA, 19 nt, Homo sapiens
  misc_RNA (1)...(19): siRNA sense strand
ccaaugacaaguuucuuau

SEQ ID NO: 723966 - RNA, 19 nt, Homo sapiens
  misc_RNA (1)...(19): siRNA sense strand
agaacacgcagauguauga

SEQ ID NO: 723967 - RNA, 19 nt, Homo sapiens
  misc_RNA (1)...(19): siRNA sense strand
cagaacagcaggagaagau

SEQ ID NO: 723968 - RNA, 19 nt, Homo sapiens
  misc_RNA (1)...(19): siRNA sense strand
gaucaaggagacagagaga

SEQ ID NO: 723969 - RNA, 19 nt, Homo sapiens
  misc_RNA (1)...(19): siRNA sense strand
aauauaagaccacguugaa

SEQ ID NO: 723970 - RNA, 19 nt, Homo sapiens
  misc_RNA (1)...(19): siRNA sense strand
aagaagaauuaucggaaga

SEQ ID NO: 723971 - RNA, 19 nt, Homo sapiens
  misc_RNA (1)...(19): siRNA sense strand
gaagacagcuccaaugaca

SEQ ID NO: 723972 - RNA, 19 nt, Homo sapiens
  misc_RNA (1)...(19): siRNA sense strand
gaaaucaggugcugcuuga

SEQ ID NO: 723973 - RNA, 19 nt, Homo sapiens
  misc_RNA (1)...(19): siRNA sense strand
ggaagaauguugccuauca

SEQ ID NO: 723974 - RNA, 19 nt, Homo sapiens
  misc_RNA (1)...(19): siRNA sense strand
ggacuuugcugcuuauuug

SEQ ID NO: 723975 - RNA, 19 nt, Homo sapiens
  misc_RNA (1)...(19): siRNA sense strand
gaaaagaacucaacauaga

SEQ ID NO: 723976 - RNA, 19 nt, Homo sapiens
  misc_RNA (1)...(19): siRNA sense strand
gaacaacaaucauuagaag

SEQ ID NO: 723977 - RNA, 19 nt, Homo sapiens
  misc_RNA (1)...(19): siRNA sense strand
caagagagcuacagucguu

SEQ ID NO: 723978 - RNA, 19 nt, Homo sapiens
  misc_RNA (1)...(19): siRNA sense strand
gugcagaacuuccagauga

SEQ ID NO: 723979 - RNA, 19 nt, Homo sapiens
  misc_RNA (1)...(19): siRNA sense strand
gaauuugaccggccucuua

SEQ ID NO: 723980 - RNA, 19 nt, Homo sapiens
  misc_RNA (1)...(19): siRNA sense strand
gaugacagcuugugaucuu

SEQ ID NO: 723981 - RNA, 19 nt, Homo sapiens
  misc_RNA (1)...(19): siRNA sense strand
ggaagagguuguuggugua

SEQ ID NO: 723982 - RNA, 19 nt, Homo sapiens
  misc_RNA (1)...(19): siRNA sense strand
ggaagaaguuucaaauaac

SEQ ID NO: 723983 - RNA, 19 nt, Homo sapiens
  misc_RNA (1)...(19): siRNA sense strand
gagaagaugcugauuaaug

SEQ ID NO: 723984 - RNA, 19 nt, Homo sapiens
  misc_RNA (1)...(19): siRNA sense strand
cuagauggcugcagaaaga

SEQ ID NO: 723985 - RNA, 19 nt, Homo sapiens
  misc_RNA (1)...(19): siRNA sense strand
gaauaacucuuacauacag

SEQ ID NO: 723986 - RNA, 19 nt, Homo sapiens
  misc_RNA (1)...(19): siRNA sense strand
ggaacaugaugcaaacaaa

SEQ ID NO: 723987 - RNA, 19 nt, Homo sapiens
  misc_RNA (1)...(19): siRNA sense strand
gaaagaacaggcagaaaug

SEQ ID NO: 723988 - RNA, 19 nt, Homo sapiens
  misc_RNA (1)...(19): siRNA sense strand
ggagaauacuggcaagguu

SEQ ID NO: 723989 - RNA, 19 nt, Homo sapiens
  misc_RNA (1)...(19): siRNA sense strand
gugaauaacucuuacauac

SEQ ID NO: 723990 - RNA, 19 nt, Homo sapiens
  misc_RNA (1)...(19): siRNA sense strand
caaguuggguucauagaug

SEQ ID NO: 723991 - RNA, 19 nt, Homo sapiens
  misc_RNA (1)...(19): siRNA sense strand
ugaaggauauuucuaguca

SEQ ID NO: 723992 - RNA, 19 nt, Homo sapiens
  misc_RNA (1)...(19): siRNA sense strand
uuaauaagauggaggagaa

SEQ ID NO: 723993 - RNA, 19 nt, Homo sapiens
  misc_RNA (1)...(19): siRNA sense strand
gaaaaucucugccucugaa

SEQ ID NO: 723994 - RNA, 19 nt, Homo sapiens
  misc_RNA (1)...(19): siRNA sense strand
ggugggacauuuacugaaa

SEQ ID NO: 723995 - RNA, 19 nt, Homo sapiens
  misc_RNA (1)...(19): siRNA sense strand
ggaaacggugggacauuua

SEQ ID NO: 723996 - RNA, 19 nt, Homo sapiens
  misc_RNA (1)...(19): siRNA sense strand
ggauauuucuagucauuug

SEQ ID NO: 723997 - RNA, 19 nt, Homo sapiens
  misc_RNA (1)...(19): siRNA sense strand
gagaauacuggcaagguua

SEQ ID NO: 723998 - RNA, 19 nt, Homo sapiens
  misc_RNA (1)...(19): siRNA sense strand
aggagaagaugcugauuaa

SEQ ID NO: 723999 - RNA, 19 nt, Homo sapiens
  misc_RNA (1)...(19): siRNA sense strand
gcagaaguugaccaaauua

SEQ ID NO: 724000 - RNA, 19 nt, Homo sapiens
  misc_RNA (1)...(19): siRNA sense strand
ggaagaaacaagagagcua

SEQ ID NO: 724001 - RNA, 19 nt, Homo sapiens
  misc_RNA (1)...(19): siRNA sense strand
ggugagcccuugaacauca

SEQ ID NO: 724002 - RNA, 19 nt, Homo sapiens
  misc_RNA (1)...(19): siRNA sense strand
caauucggauguuuacuga

SEQ ID NO: 724003 - RNA, 19 nt, Homo sapiens
  misc_RNA (1)...(19): siRNA sense strand
gaccuagcacuguacauua

SEQ ID NO: 724004 - RNA, 19 nt, Homo sapiens
  misc_RNA (1)...(19): siRNA sense strand
aaauaacuguauccgcuua

SEQ ID NO: 724005 - RNA, 19 nt, Homo sapiens
  misc_RNA (1)...(19): siRNA sense strand
gaauauaagaccacguuga

SEQ ID NO: 724006 - RNA, 19 nt, Homo sapiens
  misc_RNA (1)...(19): siRNA sense strand
gaagaauuaucggaagaau

SEQ ID NO: 724007 - RNA, 19 nt, Homo sapiens
  misc_RNA (1)...(19): siRNA sense strand
uuacauguaugcucaguau

SEQ ID NO: 724008 - RNA, 19 nt, Homo sapiens
  misc_RNA (1)...(19): siRNA sense strand
ugaccuugcuaguuuaauu

SEQ ID NO: 724009 - RNA, 19 nt, Homo sapiens
  misc_RNA (1)...(19): siRNA sense strand
cauggagugugaggaauua

SEQ ID NO: 724010 - RNA, 19 nt, Homo sapiens
  misc_RNA (1)...(19): siRNA sense strand
uaucauaauuggagacaug

SEQ ID NO: 724011 - RNA, 19 nt, Homo sapiens
  misc_RNA (1)...(19): siRNA sense strand
gauaucugcugaccgcuau

SEQ ID NO: 724012 - RNA, 19 nt, Homo sapiens
  misc_RNA (1)...(19): siRNA sense strand
gagaaaagaacucaacaua

SEQ ID NO: 724013 - RNA, 19 nt, Homo sapiens
  misc_RNA (1)...(19): siRNA sense strand
ucaguggccucuccauuga

SEQ ID NO: 724014 - RNA, 19 nt, Homo sapiens
  misc_RNA (1)...(19): siRNA sense strand
gcccagacccuuaaaauua

SEQ ID NO: 724015 - RNA, 19 nt, Homo sapiens
  misc_RNA (1)...(19): siRNA sense strand
guaaaccagcagugcauua

SEQ ID NO: 724016 - RNA, 19 nt, Homo sapiens
  misc_RNA (1)...(19): siRNA sense strand
agacuucacugcuggagaa

SEQ ID NO: 724017 - RNA, 19 nt, Homo sapiens
  misc_RNA (1)...(19): siRNA sense strand
caggagaagaugcugauua

SEQ ID NO: 724018 - RNA, 19 nt, Homo sapiens
  misc_RNA (1)...(19): siRNA sense strand
gaagaauguugccuaucau

SEQ ID NO: 724019 - RNA, 19 nt, Homo sapiens
  misc_RNA (1)...(19): siRNA sense strand
gaugaaacaugagguucuu

SEQ ID NO: 724020 - RNA, 19 nt, Homo sapiens
  misc_RNA (1)...(19): siRNA sense strand
gaugaagauugcuccgauu

SEQ ID NO: 724021 - RNA, 19 nt, Homo sapiens
  misc_RNA (1)...(19): siRNA sense strand
gaagaacaacaaucauuag

SEQ ID NO: 724022 - RNA, 19 nt, Homo sapiens
  misc_RNA (1)...(19): siRNA sense strand
gcuauucccuguuccuugu

SEQ ID NO: 724023 - RNA, 19 nt, Homo sapiens
  misc_RNA (1)...(19): siRNA sense strand
agaagaugcugauuaaugg

SEQ ID NO: 724024 - RNA, 19 nt, Homo sapiens
  misc_RNA (1)...(19): siRNA sense strand
gaacuuguagcaacugaau

SEQ ID NO: 724025 - RNA, 19 nt, Homo sapiens
  misc_RNA (1)...(19): siRNA sense strand
gcagaguccucgugcagau

SEQ ID NO: 724026 - RNA, 19 nt, Homo sapiens
  misc_RNA (1)...(19): siRNA sense strand
gaauguugccuaucauaau

SEQ ID NO: 724027 - RNA, 19 nt, Homo sapiens
  misc_RNA (1)...(19): siRNA sense strand
caaauuacaggcuacaaga

SEQ ID NO: 724028 - RNA, 19 nt, Homo sapiens
  misc_RNA (1)...(19): siRNA sense strand
guucaacacuggaagaagu

SEQ ID NO: 724029 - RNA, 19 nt, Homo sapiens
  misc_RNA (1)...(19): siRNA sense strand
caagggaacaugaugcaaa

SEQ ID NO: 724030 - RNA, 19 nt, Homo sapiens
  misc_RNA (1)...(19): siRNA sense strand
ccacugaucuaaugaacag

SEQ ID NO: 724031 - RNA, 19 nt, Homo sapiens
  misc_RNA (1)...(19): siRNA sense strand
gcagauggauuuuaagugu

SEQ ID NO: 724032 - RNA, 19 nt, Homo sapiens
  misc_RNA (1)...(19): siRNA sense strand
ccagaugucaguaaggaua

SEQ ID NO: 724033 - RNA, 19 nt, Homo sapiens
  misc_RNA (1)...(19): siRNA sense strand
gaccagugcucaagacucu

SEQ ID NO: 724034 - RNA, 19 nt, Homo sapiens
  misc_RNA (1)...(19): siRNA sense strand
uuacugaccucaaccuugu

SEQ ID NO: 724035 - RNA, 19 nt, Homo sapiens
  misc_RNA (1)...(19): siRNA sense strand
cagcuccaaugacaaguuu

SEQ ID NO: 724036 - RNA, 19 nt, Homo sapiens
  misc_RNA (1)...(19): siRNA sense strand
ggagacaugccuuuaauac

SEQ ID NO: 724037 - RNA, 19 nt, Homo sapiens
  misc_RNA (1)...(19): siRNA sense strand
uaagaggcgaggagaauuu

SEQ ID NO: 724038 - RNA, 19 nt, Homo sapiens
  misc_RNA (1)...(19): siRNA sense strand
agacaugccuuuaauacag

SEQ ID NO: 724039 - RNA, 19 nt, Homo sapiens
  misc_RNA (1)...(19): siRNA sense strand
ugcagaaguugaccaaauu

SEQ ID NO: 724040 - RNA, 19 nt, Homo sapiens
  misc_RNA (1)...(19): siRNA sense strand
gcagaaagaacaggcagaa

SEQ ID NO: 724041 - RNA, 19 nt, Homo sapiens
  misc_RNA (1)...(19): siRNA sense strand
caacauagaacccacugau

SEQ ID NO: 724042 - RNA, 19 nt, Homo sapiens
  misc_RNA (1)...(19): siRNA sense strand
agaauuaucggaagaaugu

SEQ ID NO: 724043 - RNA, 19 nt, Homo sapiens
  misc_RNA (1)...(19): siRNA sense strand
gugaagacagcuccaauga

SEQ ID NO: 724044 - RNA, 19 nt, Homo sapiens
  misc_RNA (1)...(19): siRNA sense strand
caccgaaucuugcucuugu

SEQ ID NO: 724045 - RNA, 19 nt, Homo sapiens
  misc_RNA (1)...(19): siRNA sense strand
ugugaucuuucugcaauua

SEQ ID NO: 724046 - RNA, 19 nt, Homo sapiens
  misc_RNA (1)...(19): siRNA sense strand
gacuuuagcuucagugacu

SEQ ID NO: 724047 - RNA, 19 nt, Homo sapiens
  misc_RNA (1)...(19): siRNA sense strand
caaccgaaaugacgaacag

SEQ ID NO: 724048 - RNA, 19 nt, Homo sapiens
  misc_RNA (1)...(19): siRNA sense strand
gcagugcauuagaaguuug

SEQ ID NO: 724049 - RNA, 19 nt, Homo sapiens
  misc_RNA (1)...(19): siRNA sense strand
guaugccaauuaagaauca

SEQ ID NO: 724050 - RNA, 19 nt, Homo sapiens
  misc_RNA (1)...(19): siRNA sense strand
agaaagaacaggcagaaau

SEQ ID NO: 724051 - RNA, 19 nt, Homo sapiens
  misc_RNA (1)...(19): siRNA sense strand
gcuugaccuugcuaguuua

SEQ ID NO: 724052 - RNA, 19 nt, Homo sapiens
  misc_RNA (1)...(19): siRNA sense strand
gugguauuguucuucauaa

SEQ ID NO: 724053 - RNA, 19 nt, Homo sapiens
  misc_RNA (1)...(19): siRNA sense strand
gaccagugccugaugauuc

SEQ ID NO: 724054 - RNA, 19 nt, Homo sapiens
  misc_RNA (1)...(19): siRNA sense strand
gcacuaagccacgauuugg

SEQ ID NO: 724055 - RNA, 19 nt, Homo sapiens
  misc_RNA (1)...(19): siRNA sense strand
auacuugcauugcugauug

SEQ ID NO: 724056 - RNA, 19 nt, Homo sapiens
  misc_RNA (1)...(19): siRNA sense strand
ccucuuagacccauuguug

SEQ ID NO: 724057 - RNA, 19 nt, Homo sapiens
  misc_RNA (1)...(19): siRNA sense strand
ggaauuagugaaggauauu

SEQ ID NO: 724058 - RNA, 19 nt, Homo sapiens
  misc_RNA (1)...(19): siRNA sense strand
uuacugccauucaaucaug

SEQ ID NO: 724059 - RNA, 19 nt, Homo sapiens
  misc_RNA (1)...(19): siRNA sense strand
gaaacaagagagcuacagu

SEQ ID NO: 724060 - RNA, 19 nt, Homo sapiens
  misc_RNA (1)...(19): siRNA sense strand
ccaaugacaaguuucuuau

SEQ ID NO: 724061 - RNA, 19 nt, Homo sapiens
  misc_RNA (1)...(19): siRNA sense strand
agaacccacugaucuaaug

SEQ ID NO: 724062 - RNA, 19 nt, Homo sapiens
  misc_RNA (1)...(19): siRNA sense strand
ugagcugucugaucuggaa

SEQ ID NO: 724063 - RNA, 19 nt, Homo sapiens
  misc_RNA (1)...(19): siRNA sense strand
cagcagugcauuagaaguu

SEQ ID NO: 724064 - RNA, 19 nt, Homo sapiens
  misc_RNA (1)...(19): siRNA sense strand
ggagugugaggaauuagaa

SEQ ID NO: 724065 - RNA, 19 nt, Homo sapiens
  misc_RNA (1)...(19): siRNA sense strand
gauaacagugucccuggaa

SEQ ID NO: 724066 - RNA, 19 nt, Homo sapiens
  misc_RNA (1)...(19): siRNA sense strand
agaacacgcagauguauga

SEQ ID NO: 724067 - RNA, 19 nt, Homo sapiens
  misc_RNA (1)...(19): siRNA sense strand
cagaacagcaggagaagau

SEQ ID NO: 724068 - RNA, 19 nt, Homo sapiens
  misc_RNA (1)...(19): siRNA sense strand
gaucaaggagacagagaga

SEQ ID NO: 724069 - RNA, 19 nt, Homo sapiens
  misc_RNA (1)...(19): siRNA sense strand
aauauaagaccacguugaa

SEQ ID NO: 724070 - RNA, 19 nt, Homo sapiens
  misc_RNA (1)...(19): siRNA sense strand
aagaagaauuaucggaaga

SEQ ID NO: 724071 - RNA, 19 nt, Homo sapiens
  misc_RNA (1)...(19): siRNA sense strand
gaagacagcuccaaugaca

SEQ ID NO: 724072 - RNA, 19 nt, Homo sapiens
  misc_RNA (1)...(19): siRNA sense strand
gaaaucaggugcugcuuga

SEQ ID NO: 724073 - RNA, 19 nt, Homo sapiens
  misc_RNA (1)...(19): siRNA sense strand
ggaagaauguugccuauca

SEQ ID NO: 724074 - RNA, 19 nt, Homo sapiens
  misc_RNA (1)...(19): siRNA sense strand
ggacuuugcugcuuauuug

SEQ ID NO: 724075 - RNA, 19 nt, Homo sapiens
  misc_RNA (1)...(19): siRNA sense strand
gaaaagaacucaacauaga

SEQ ID NO: 724076 - RNA, 19 nt, Homo sapiens
  misc_RNA (1)...(19): siRNA sense strand
gaacaacaaucauuagaag

SEQ ID NO: 724077 - RNA, 19 nt, Homo sapiens
  misc_RNA (1)...(19): siRNA sense strand
caagagagcuacagucguu

SEQ ID NO: 724078 - RNA, 19 nt, Homo sapiens
  misc_RNA (1)...(19): siRNA sense strand
gugcagaacuuccagauga

SEQ ID NO: 724079 - RNA, 19 nt, Homo sapiens
  misc_RNA (1)...(19): siRNA sense strand
gaauuugaccggccucuua

SEQ ID NO: 724080 - RNA, 19 nt, Homo sapiens
  misc_RNA (1)...(19): siRNA sense strand
gaugacagcuugugaucuu

SEQ ID NO: 724081 - RNA, 19 nt, Homo sapiens
  misc_RNA (1)...(19): siRNA sense strand
ggaagagguuguuggugua

SEQ ID NO: 724082 - RNA, 19 nt, Homo sapiens
  misc_RNA (1)...(19): siRNA sense strand
ggaagaaguuucaaauaac

SEQ ID NO: 724083 - RNA, 19 nt, Homo sapiens
  misc_RNA (1)...(19): siRNA sense strand
gagaagaugcugauuaaug

SEQ ID NO: 724084 - RNA, 19 nt, Homo sapiens
  misc_RNA (1)...(19): siRNA sense strand
cuagauggcugcagaaaga

SEQ ID NO: 724085 - RNA, 19 nt, Homo sapiens
  misc_RNA (1)...(19): siRNA sense strand
gaauaacucuuacauacag

SEQ ID NO: 724086 - RNA, 19 nt, Homo sapiens
  misc_RNA (1)...(19): siRNA sense strand
ggaacaugaugcaaacaaa

SEQ ID NO: 724087 - RNA, 19 nt, Homo sapiens
  misc_RNA (1)...(19): siRNA sense strand
gaaagaacaggcagaaaug

SEQ ID NO: 724088 - RNA, 19 nt, Homo sapiens
  misc_RNA (1)...(19): siRNA sense strand
ggagaauacuggcaagguu

SEQ ID NO: 724089 - RNA, 19 nt, Homo sapiens
  misc_RNA (1)...(19): siRNA sense strand
gugaauaacucuuacauac

SEQ ID NO: 724090 - RNA, 19 nt, Homo sapiens
  misc_RNA (1)...(19): siRNA sense strand
caaguuggguucauagaug

SEQ ID NO: 724091 - RNA, 19 nt, Homo sapiens
  misc_RNA (1)...(19): siRNA sense strand
ugaaggauauuucuaguca

SEQ ID NO: 724092 - RNA, 19 nt, Homo sapiens
  misc_RNA (1)...(19): siRNA sense strand
uuaauaagauggaggagaa

SEQ ID NO: 724093 - RNA, 19 nt, Homo sapiens
  misc_RNA (1)...(19): siRNA sense strand
gaaaaucucugccucugaa

SEQ ID NO: 724094 - RNA, 19 nt, Homo sapiens
  misc_RNA (1)...(19): siRNA sense strand
ggugggacauuuacugaaa

SEQ ID NO: 724095 - RNA, 19 nt, Homo sapiens
  misc_RNA (1)...(19): siRNA sense strand
ggaaacggugggacauuua

SEQ ID NO: 724096 - RNA, 19 nt, Homo sapiens
  misc_RNA (1)...(19): siRNA sense strand
ggauauuucuagucauuug

SEQ ID NO: 724097 - RNA, 19 nt, Homo sapiens
  misc_RNA (1)...(19): siRNA sense strand
gagaauacuggcaagguua

SEQ ID NO: 724098 - RNA, 19 nt, Homo sapiens
  misc_RNA (1)...(19): siRNA sense strand
aggagaagaugcugauuaa

SEQ ID NO: 724099 - RNA, 19 nt, Homo sapiens
  misc_RNA (1)...(19): siRNA sense strand
gcagaaguugaccaaauua

SEQ ID NO: 724100 - RNA, 19 nt, Homo sapiens
  misc_RNA (1)...(19): siRNA sense strand
ggaagaaacaagagagcua

SEQ ID NO: 724101 - RNA, 19 nt, Homo sapiens
  misc_RNA (1)...(19): siRNA sense strand
ggugagcccuugaacauca

SEQ ID NO: 724102 - RNA, 19 nt, Homo sapiens
  misc_RNA (1)...(19): siRNA sense strand
caauucggauguuuacuga

SEQ ID NO: 724103 - RNA, 19 nt, Homo sapiens
  misc_RNA (1)...(19): siRNA sense strand
gaccuagcacuguacauua

SEQ ID NO: 724104 - RNA, 19 nt, Homo sapiens
  misc_RNA (1)...(19): siRNA sense strand
aaauaacuguauccgcuua

SEQ ID NO: 724105 - RNA, 19 nt, Homo sapiens
  misc_RNA (1)...(19): siRNA sense strand
gaauauaagaccacguuga

SEQ ID NO: 724106 - RNA, 19 nt, Homo sapiens
  misc_RNA (1)...(19): siRNA sense strand
gaagaauuaucggaagaau

SEQ ID NO: 724107 - RNA, 19 nt, Homo sapiens
  misc_RNA (1)...(19): siRNA sense strand
uuacauguaugcucaguau

SEQ ID NO: 724108 - RNA, 19 nt, Homo sapiens
  misc_RNA (1)...(19): siRNA sense strand
ugaccuugcuaguuuaauu

SEQ ID NO: 724109 - RNA, 19 nt, Homo sapiens
  misc_RNA (1)...(19): siRNA sense strand
cauggagugugaggaauua

SEQ ID NO: 724110 - RNA, 19 nt, Homo sapiens
  misc_RNA (1)...(19): siRNA sense strand
uaucauaauuggagacaug

SEQ ID NO: 724111 - RNA, 19 nt, Homo sapiens
  misc_RNA (1)...(19): siRNA sense strand
gauaucugcugaccgcuau

SEQ ID NO: 724112 - RNA, 19 nt, Homo sapiens
  misc_RNA (1)...(19): siRNA sense strand
gagaaaagaacucaacaua

SEQ ID NO: 724113 - RNA, 19 nt, Homo sapiens
  misc_RNA (1)...(19): siRNA sense strand
ucaguggccucuccauuga

SEQ ID NO: 724114 - RNA, 19 nt, Homo sapiens
  misc_RNA (1)...(19): siRNA sense strand
gcccagacccuuaaaauua

SEQ ID NO: 724115 - RNA, 19 nt, Homo sapiens
  misc_RNA (1)...(19): siRNA sense strand
guaaaccagcagugcauua

SEQ ID NO: 724116 - RNA, 19 nt, Homo sapiens
  misc_RNA (1)...(19): siRNA sense strand
agacuucacugcuggagaa

SEQ ID NO: 724117 - RNA, 19 nt, Homo sapiens
  misc_RNA (1)...(19): siRNA sense strand
caggagaagaugcugauua

SEQ ID NO: 724118 - RNA, 19 nt, Homo sapiens
  misc_RNA (1)...(19): siRNA sense strand
gaagaauguugccuaucau

SEQ ID NO: 724119 - RNA, 19 nt, Homo sapiens
  misc_RNA (1)...(19): siRNA sense strand
gaugaaacaugagguucuu

SEQ ID NO: 724120 - RNA, 19 nt, Homo sapiens
  misc_RNA (1)...(19): siRNA sense strand
gaugaagauugcuccgauu

SEQ ID NO: 724121 - RNA, 19 nt, Homo sapiens
  misc_RNA (1)...(19): siRNA sense strand
gaagaacaacaaucauuag

SEQ ID NO: 724122 - RNA, 19 nt, Homo sapiens
  misc_RNA (1)...(19): siRNA sense strand
gcuauucccuguuccuugu

SEQ ID NO: 724123 - RNA, 19 nt, Homo sapiens
  misc_RNA (1)...(19): siRNA sense strand
agaagaugcugauuaaugg

SEQ ID NO: 724124 - RNA, 19 nt, Homo sapiens
  misc_RNA (1)...(19): siRNA sense strand
gaacuuguagcaacugaau

SEQ ID NO: 724125 - RNA, 19 nt, Homo sapiens
  misc_RNA (1)...(19): siRNA sense strand
gaauguugccuaucauaau

SEQ ID NO: 724126 - RNA, 19 nt, Homo sapiens
  misc_RNA (1)...(19): siRNA sense strand
gcagaguccucgugcagau

SEQ ID NO: 724127 - RNA, 19 nt, Homo sapiens
  misc_RNA (1)...(19): siRNA sense strand
caaauuacaggcuacaaga

SEQ ID NO: 724128 - RNA, 19 nt, Homo sapiens
  misc_RNA (1)...(19): siRNA sense strand
guucaacacuggaagaagu

SEQ ID NO: 724129 - RNA, 19 nt, Homo sapiens
  misc_RNA (1)...(19): siRNA sense strand
caagggaacaugaugcaaa

SEQ ID NO: 724130 - RNA, 19 nt, Homo sapiens
  misc_RNA (1)...(19): siRNA sense strand
ccacugaucuaaugaacag

SEQ ID NO: 724131 - RNA, 19 nt, Homo sapiens
  misc_RNA (1)...(19): siRNA sense strand
gcagauggauuuuaagugu

SEQ ID NO: 724132 - RNA, 19 nt, Homo sapiens
  misc_RNA (1)...(19): siRNA sense strand
ccagaugucaguaaggaua

SEQ ID NO: 724133 - RNA, 19 nt, Homo sapiens
  misc_RNA (1)...(19): siRNA sense strand
gaccagugcucaagacucu

SEQ ID NO: 724134 - RNA, 19 nt, Homo sapiens
  misc_RNA (1)...(19): siRNA sense strand
uuacugaccucaaccuugu

SEQ ID NO: 724135 - RNA, 19 nt, Homo sapiens
  misc_RNA (1)...(19): siRNA sense strand
cagcuccaaugacaaguuu

SEQ ID NO: 724136 - RNA, 19 nt, Homo sapiens
  misc_RNA (1)...(19): siRNA sense strand
ggagacaugccuuuaauac

SEQ ID NO: 724137 - RNA, 19 nt, Homo sapiens
  misc_RNA (1)...(19): siRNA sense strand
uaagaggcgaggagaauuu

SEQ ID NO: 724138 - RNA, 19 nt, Homo sapiens
  misc_RNA (1)...(19): siRNA sense strand
agacaugccuuuaauacag

SEQ ID NO: 724139 - RNA, 19 nt, Homo sapiens
  misc_RNA (1)...(19): siRNA sense strand
ugcagaaguugaccaaauu

SEQ ID NO: 724140 - RNA, 19 nt, Homo sapiens
  misc_RNA (1)...(19): siRNA sense strand
gcagaaagaacaggcagaa

SEQ ID NO: 724141 - RNA, 19 nt, Homo sapiens
  misc_RNA (1)...(19): siRNA sense strand
caacauagaacccacugau

SEQ ID NO: 724142 - RNA, 19 nt, Homo sapiens
  misc_RNA (1)...(19): siRNA sense strand
agaauuaucggaagaaugu

SEQ ID NO: 724143 - RNA, 19 nt, Homo sapiens
  misc_RNA (1)...(19): siRNA sense strand
gugaagacagcuccaauga

SEQ ID NO: 724144 - RNA, 19 nt, Homo sapiens
  misc_RNA (1)...(19): siRNA sense strand
ugugaucuuucugcaauua

SEQ ID NO: 724145 - RNA, 19 nt, Homo sapiens
  misc_RNA (1)...(19): siRNA sense strand
caccgaaucuugcucuugu

SEQ ID NO: 724146 - RNA, 19 nt, Homo sapiens
  misc_RNA (1)...(19): siRNA sense strand
gacuuuagcuucagugacu

SEQ ID NO: 724147 - RNA, 19 nt, Homo sapiens
  misc_RNA (1)...(19): siRNA sense strand
caaccgaaaugacgaacag

SEQ ID NO: 724148 - RNA, 19 nt, Homo sapiens
  misc_RNA (1)...(19): siRNA sense strand
gcagugcauuagaaguuug

SEQ ID NO: 724149 - RNA, 19 nt, Homo sapiens
  misc_RNA (1)...(19): siRNA sense strand
guaugccaauuaagaauca

SEQ ID NO: 724150 - RNA, 19 nt, Homo sapiens
  misc_RNA (1)...(19): siRNA sense strand
agaaagaacaggcagaaau

SEQ ID NO: 724151 - RNA, 19 nt, Homo sapiens
  misc_RNA (1)...(19): siRNA sense strand
gcuugaccuugcuaguuua

SEQ ID NO: 724152 - RNA, 19 nt, Homo sapiens
  misc_RNA (1)...(19): siRNA sense strand
ccucuuagacccauuguug

SEQ ID NO: 724153 - RNA, 19 nt, Homo sapiens
  misc_RNA (1)...(19): siRNA sense strand
gaccagugccugaugauuc

SEQ ID NO: 724154 - RNA, 19 nt, Homo sapiens
  misc_RNA (1)...(19): siRNA sense strand
gcacuaagccacgauuugg

SEQ ID NO: 724155 - RNA, 19 nt, Homo sapiens
  misc_RNA (1)...(19): siRNA sense strand
auacuugcauugcugauug

SEQ ID NO: 724156 - RNA, 19 nt, Homo sapiens
  misc_RNA (1)...(19): siRNA sense strand
gugguauuguucuucauaa

SEQ ID NO: 724157 - RNA, 19 nt, Homo sapiens
  misc_RNA (1)...(19): siRNA sense strand
ggaauuagugaaggauauu

SEQ ID NO: 724158 - RNA, 19 nt, Homo sapiens
  misc_RNA (1)...(19): siRNA sense strand
uuacugccauucaaucaug

SEQ ID NO: 724159 - RNA, 19 nt, Homo sapiens
  misc_RNA (1)...(19): siRNA sense strand
gaaacaagagagcuacagu

SEQ ID NO: 724160 - RNA, 19 nt, Homo sapiens
  misc_RNA (1)...(19): siRNA sense strand
gauaacagugucccuggaa

SEQ ID NO: 724161 - RNA, 19 nt, Homo sapiens
  misc_RNA (1)...(19): siRNA sense strand
agaacccacugaucuaaug

SEQ ID NO: 724162 - RNA, 19 nt, Homo sapiens
  misc_RNA (1)...(19): siRNA sense strand
ugagcugucugaucuggaa

SEQ ID NO: 724163 - RNA, 19 nt, Homo sapiens
  misc_RNA (1)...(19): siRNA sense strand
cagcagugcauuagaaguu

SEQ ID NO: 724164 - RNA, 19 nt, Homo sapiens
  misc_RNA (1)...(19): siRNA sense strand
ggagugugaggaauuagaa

SEQ ID NO: 724165 - RNA, 19 nt, Homo sapiens
  misc_RNA (1)...(19): siRNA sense strand
ccaaugacaaguuucuuau

SEQ ID NO: 724166 - RNA, 19 nt, Homo sapiens
  misc_RNA (1)...(19): siRNA sense strand
agaacacgcagauguauga

SEQ ID NO: 724167 - RNA, 19 nt, Homo sapiens
  misc_RNA (1)...(19): siRNA sense strand
cagaacagcaggagaagau

SEQ ID NO: 724168 - RNA, 19 nt, Homo sapiens
  misc_RNA (1)...(19): siRNA sense strand
gaucaaggagacagagaga

SEQ ID NO: 724169 - RNA, 19 nt, Homo sapiens
  misc_RNA (1)...(19): siRNA sense strand
aauauaagaccacguugaa

SEQ ID NO: 724170 - RNA, 19 nt, Homo sapiens
  misc_RNA (1)...(19): siRNA sense strand
aagaagaauuaucggaaga

SEQ ID NO: 724171 - RNA, 19 nt, Homo sapiens
  misc_RNA (1)...(19): siRNA sense strand
gaagacagcuccaaugaca

SEQ ID NO: 724172 - RNA, 19 nt, Homo sapiens
  misc_RNA (1)...(19): siRNA sense strand
gaaaucaggugcugcuuga

SEQ ID NO: 724173 - RNA, 19 nt, Homo sapiens
  misc_RNA (1)...(19): siRNA sense strand
ggaagaauguugccuauca

SEQ ID NO: 724174 - RNA, 19 nt, Homo sapiens
  misc_RNA (1)...(19): siRNA sense strand
ggacuuugcugcuuauuug

SEQ ID NO: 724175 - RNA, 19 nt, Homo sapiens
  misc_RNA (1)...(19): siRNA sense strand
gaaaagaacucaacauaga

SEQ ID NO: 724176 - RNA, 19 nt, Homo sapiens
  misc_RNA (1)...(19): siRNA sense strand
gaacaacaaucauuagaag

SEQ ID NO: 724177 - RNA, 19 nt, Homo sapiens
  misc_RNA (1)...(19): siRNA sense strand
caagagagcuacagucguu

SEQ ID NO: 724178 - RNA, 19 nt, Homo sapiens
  misc_RNA (1)...(19): siRNA sense strand
gugcagaacuuccagauga

SEQ ID NO: 724179 - RNA, 19 nt, Homo sapiens
  misc_RNA (1)...(19): siRNA sense strand
gaauuugaccggccucuua

SEQ ID NO: 724180 - RNA, 19 nt, Homo sapiens
  misc_RNA (1)...(19): siRNA sense strand
gaugacagcuugugaucuu

SEQ ID NO: 724181 - RNA, 19 nt, Homo sapiens
  misc_RNA (1)...(19): siRNA sense strand
ggaagagguuguuggugua

SEQ ID NO: 724182 - RNA, 19 nt, Homo sapiens
  misc_RNA (1)...(19): siRNA sense strand
ggaagaaguuucaaauaac

SEQ ID NO: 724183 - RNA, 19 nt, Homo sapiens
  misc_RNA (1)...(19): siRNA sense strand
gagaagaugcugauuaaug

SEQ ID NO: 724184 - RNA, 19 nt, Homo sapiens
  misc_RNA (1)...(19): siRNA sense strand
cuagauggcugcagaaaga

SEQ ID NO: 724185 - RNA, 19 nt, Homo sapiens
  misc_RNA (1)...(19): siRNA sense strand
gaauaacucuuacauacag

SEQ ID NO: 724186 - RNA, 19 nt, Homo sapiens
  misc_RNA (1)...(19): siRNA sense strand
ggaacaugaugcaaacaaa

SEQ ID NO: 724187 - RNA, 19 nt, Homo sapiens
  misc_RNA (1)...(19): siRNA sense strand
gaaagaacaggcagaaaug

SEQ ID NO: 724188 - RNA, 19 nt, Homo sapiens
  misc_RNA (1)...(19): siRNA sense strand
ggagaauacuggcaagguu

SEQ ID NO: 724189 - RNA, 19 nt, Homo sapiens
  misc_RNA (1)...(19): siRNA sense strand
gugaauaacucuuacauac

SEQ ID NO: 724190 - RNA, 19 nt, Homo sapiens
  misc_RNA (1)...(19): siRNA sense strand
caaguuggguucauagaug

SEQ ID NO: 724191 - RNA, 19 nt, Homo sapiens
  misc_RNA (1)...(19): siRNA sense strand
ugaaggauauuucuaguca

SEQ ID NO: 724192 - RNA, 19 nt, Homo sapiens
  misc_RNA (1)...(19): siRNA sense strand
uuaauaagauggaggagaa

SEQ ID NO: 724193 - RNA, 19 nt, Homo sapiens
  misc_RNA (1)...(19): siRNA sense strand
gaaaaucucugccucugaa

SEQ ID NO: 724194 - RNA, 19 nt, Homo sapiens
  misc_RNA (1)...(19): siRNA sense strand
ggugggacauuuacugaaa

SEQ ID NO: 724195 - RNA, 19 nt, Homo sapiens
  misc_RNA (1)...(19): siRNA sense strand
ggaaacggugggacauuua

SEQ ID NO: 724196 - RNA, 19 nt, Homo sapiens
  misc_RNA (1)...(19): siRNA sense strand
ggauauuucuagucauuug

SEQ ID NO: 724197 - RNA, 19 nt, Homo sapiens
  misc_RNA (1)...(19): siRNA sense strand
gagaauacuggcaagguua

SEQ ID NO: 724198 - RNA, 19 nt, Homo sapiens
  misc_RNA (1)...(19): siRNA sense strand
aggagaagaugcugauuaa

SEQ ID NO: 724199 - RNA, 19 nt, Homo sapiens
  misc_RNA (1)...(19): siRNA sense strand
gcagaaguugaccaaauua

SEQ ID NO: 724200 - RNA, 19 nt, Homo sapiens
  misc_RNA (1)...(19): siRNA sense strand
ggaagaaacaagagagcua

SEQ ID NO: 724201 - RNA, 19 nt, Homo sapiens
  misc_RNA (1)...(19): siRNA sense strand
ggugagcccuugaacauca

SEQ ID NO: 724202 - RNA, 19 nt, Homo sapiens
  misc_RNA (1)...(19): siRNA sense strand
caauucggauguuuacuga

SEQ ID NO: 724203 - RNA, 19 nt, Homo sapiens
  misc_RNA (1)...(19): siRNA sense strand
gaccuagcacuguacauua

SEQ ID NO: 724204 - RNA, 19 nt, Homo sapiens
  misc_RNA (1)...(19): siRNA sense strand
aaauaacuguauccgcuua

SEQ ID NO: 724205 - RNA, 19 nt, Homo sapiens
  misc_RNA (1)...(19): siRNA sense strand
gaauauaagaccacguuga

SEQ ID NO: 724206 - RNA, 19 nt, Homo sapiens
  misc_RNA (1)...(19): siRNA sense strand
gaagaauuaucggaagaau

SEQ ID NO: 724207 - RNA, 19 nt, Homo sapiens
  misc_RNA (1)...(19): siRNA sense strand
uuacauguaugcucaguau

SEQ ID NO: 724208 - RNA, 19 nt, Homo sapiens
  misc_RNA (1)...(19): siRNA sense strand
ugaccuugcuaguuuaauu

SEQ ID NO: 724209 - RNA, 19 nt, Homo sapiens
  misc_RNA (1)...(19): siRNA sense strand
cauggagugugaggaauua

SEQ ID NO: 724210 - RNA, 19 nt, Homo sapiens
  misc_RNA (1)...(19): siRNA sense strand
uaucauaauuggagacaug

SEQ ID NO: 724211 - RNA, 19 nt, Homo sapiens
  misc_RNA (1)...(19): siRNA sense strand
gauaucugcugaccgcuau

SEQ ID NO: 724212 - RNA, 19 nt, Homo sapiens
  misc_RNA (1)...(19): siRNA sense strand
gagaaaagaacucaacaua

SEQ ID NO: 724213 - RNA, 19 nt, Homo sapiens
  misc_RNA (1)...(19): siRNA sense strand
ucaguggccucuccauuga

SEQ ID NO: 724214 - RNA, 19 nt, Homo sapiens
  misc_RNA (1)...(19): siRNA sense strand
gcccagacccuuaaaauua

SEQ ID NO: 724215 - RNA, 19 nt, Homo sapiens
  misc_RNA (1)...(19): siRNA sense strand
guaaaccagcagugcauua

SEQ ID NO: 724216 - RNA, 19 nt, Homo sapiens
  misc_RNA (1)...(19): siRNA sense strand
agacuucacugcuggagaa

SEQ ID NO: 724217 - RNA, 19 nt, Homo sapiens
  misc_RNA (1)...(19): siRNA sense strand
caggagaagaugcugauua

SEQ ID NO: 724218 - RNA, 19 nt, Homo sapiens
  misc_RNA (1)...(19): siRNA sense strand
gaagaauguugccuaucau

SEQ ID NO: 724219 - RNA, 19 nt, Homo sapiens
  misc_RNA (1)...(19): siRNA sense strand
gaugaaacaugagguucuu

SEQ ID NO: 724220 - RNA, 19 nt, Homo sapiens
  misc_RNA (1)...(19): siRNA sense strand
gaugaagauugcuccgauu

SEQ ID NO: 724221 - RNA, 19 nt, Homo sapiens
  misc_RNA (1)...(19): siRNA sense strand
gaagaacaacaaucauuag

SEQ ID NO: 724222 - RNA, 19 nt, Homo sapiens
  misc_RNA (1)...(19): siRNA sense strand
gcuauucccuguuccuugu

SEQ ID NO: 724223 - RNA, 19 nt, Homo sapiens
  misc_RNA (1)...(19): siRNA sense strand
agaagaugcugauuaaugg

SEQ ID NO: 724224 - RNA, 19 nt, Homo sapiens
  misc_RNA (1)...(19): siRNA sense strand
gaacuuguagcaacugaau

SEQ ID NO: 724225 - RNA, 19 nt, Homo sapiens
  misc_RNA (1)...(19): siRNA sense strand
gaauguugccuaucauaau

SEQ ID NO: 724226 - RNA, 19 nt, Homo sapiens
  misc_RNA (1)...(19): siRNA sense strand
gcagaguccucgugcagau

SEQ ID NO: 724227 - RNA, 19 nt, Homo sapiens
  misc_RNA (1)...(19): siRNA sense strand
caaauuacaggcuacaaga

SEQ ID NO: 724228 - RNA, 19 nt, Homo sapiens
  misc_RNA (1)...(19): siRNA sense strand
guucaacacuggaagaagu

SEQ ID NO: 724229 - RNA, 19 nt, Homo sapiens
  misc_RNA (1)...(19): siRNA sense strand
caagggaacaugaugcaaa

SEQ ID NO: 724230 - RNA, 19 nt, Homo sapiens
  misc_RNA (1)...(19): siRNA sense strand
ccacugaucuaaugaacag

SEQ ID NO: 724231 - RNA, 19 nt, Homo sapiens
  misc_RNA (1)...(19): siRNA sense strand
gcagauggauuuuaagugu

SEQ ID NO: 724232 - RNA, 19 nt, Homo sapiens
  misc_RNA (1)...(19): siRNA sense strand
ccagaugucaguaaggaua

SEQ ID NO: 724233 - RNA, 19 nt, Homo sapiens
  misc_RNA (1)...(19): siRNA sense strand
gaccagugcucaagacucu

SEQ ID NO: 724234 - RNA, 19 nt, Homo sapiens
  misc_RNA (1)...(19): siRNA sense strand
uuacugaccucaaccuugu

SEQ ID NO: 724235 - RNA, 19 nt, Homo sapiens
  misc_RNA (1)...(19): siRNA sense strand
cagcuccaaugacaaguuu

SEQ ID NO: 724236 - RNA, 19 nt, Homo sapiens
  misc_RNA (1)...(19): siRNA sense strand
ggagacaugccuuuaauac

SEQ ID NO: 724237 - RNA, 19 nt, Homo sapiens
  misc_RNA (1)...(19): siRNA sense strand
uaagaggcgaggagaauuu

SEQ ID NO: 724238 - RNA, 19 nt, Homo sapiens
  misc_RNA (1)...(19): siRNA sense strand
agacaugccuuuaauacag

SEQ ID NO: 724239 - RNA, 19 nt, Homo sapiens
  misc_RNA (1)...(19): siRNA sense strand
ugcagaaguugaccaaauu

SEQ ID NO: 724240 - RNA, 19 nt, Homo sapiens
  misc_RNA (1)...(19): siRNA sense strand
gcagaaagaacaggcagaa

SEQ ID NO: 724241 - RNA, 19 nt, Homo sapiens
  misc_RNA (1)...(19): siRNA sense strand
caacauagaacccacugau

SEQ ID NO: 724242 - RNA, 19 nt, Homo sapiens
  misc_RNA (1)...(19): siRNA sense strand
agaauuaucggaagaaugu

SEQ ID NO: 724243 - RNA, 19 nt, Homo sapiens
  misc_RNA (1)...(19): siRNA sense strand
gugaagacagcuccaauga

SEQ ID NO: 724244 - RNA, 19 nt, Homo sapiens
  misc_RNA (1)...(19): siRNA sense strand
ugugaucuuucugcaauua

SEQ ID NO: 724245 - RNA, 19 nt, Homo sapiens
  misc_RNA (1)...(19): siRNA sense strand
caccgaaucuugcucuugu

SEQ ID NO: 724246 - RNA, 19 nt, Homo sapiens
  misc_RNA (1)...(19): siRNA sense strand
gacuuuagcuucagugacu

SEQ ID NO: 724247 - RNA, 19 nt, Homo sapiens
  misc_RNA (1)...(19): siRNA sense strand
caaccgaaaugacgaacag

SEQ ID NO: 724248 - RNA, 19 nt, Homo sapiens
  misc_RNA (1)...(19): siRNA sense strand
gcagugcauuagaaguuug

SEQ ID NO: 724249 - RNA, 19 nt, Homo sapiens
  misc_RNA (1)...(19): siRNA sense strand
guaugccaauuaagaauca

SEQ ID NO: 724250 - RNA, 19 nt, Homo sapiens
  misc_RNA (1)...(19): siRNA sense strand
agaaagaacaggcagaaau

SEQ ID NO: 724251 - RNA, 19 nt, Homo sapiens
  misc_RNA (1)...(19): siRNA sense strand
gcuugaccuugcuaguuua

SEQ ID NO: 724252 - RNA, 19 nt, Homo sapiens
  misc_RNA (1)...(19): siRNA sense strand
ccucuuagacccauuguug

SEQ ID NO: 724253 - RNA, 19 nt, Homo sapiens
  misc_RNA (1)...(19): siRNA sense strand
gaccagugccugaugauuc

SEQ ID NO: 724254 - RNA, 19 nt, Homo sapiens
  misc_RNA (1)...(19): siRNA sense strand
gcacuaagccacgauuugg

SEQ ID NO: 724255 - RNA, 19 nt, Homo sapiens
  misc_RNA (1)...(19): siRNA sense strand
auacuugcauugcugauug

SEQ ID NO: 724256 - RNA, 19 nt, Homo sapiens
  misc_RNA (1)...(19): siRNA sense strand
gugguauuguucuucauaa

SEQ ID NO: 724257 - RNA, 19 nt, Homo sapiens
  misc_RNA (1)...(19): siRNA sense strand
ggaauuagugaaggauauu

SEQ ID NO: 724258 - RNA, 19 nt, Homo sapiens
  misc_RNA (1)...(19): siRNA sense strand
uuacugccauucaaucaug

SEQ ID NO: 724259 - RNA, 19 nt, Homo sapiens
  misc_RNA (1)...(19): siRNA sense strand
gaaacaagagagcuacagu

SEQ ID NO: 724260 - RNA, 19 nt, Homo sapiens
  misc_RNA (1)...(19): siRNA sense strand
gauaacagugucccuggaa

SEQ ID NO: 724261 - RNA, 19 nt, Homo sapiens
  misc_RNA (1)...(19): siRNA sense strand
agaacccacugaucuaaug

SEQ ID NO: 724262 - RNA, 19 nt, Homo sapiens
  misc_RNA (1)...(19): siRNA sense strand
ugagcugucugaucuggaa

SEQ ID NO: 724263 - RNA, 19 nt, Homo sapiens
  misc_RNA (1)...(19): siRNA sense strand
cagcagugcauuagaaguu

SEQ ID NO: 724264 - RNA, 19 nt, Homo sapiens
  misc_RNA (1)...(19): siRNA sense strand
ggagugugaggaauuagaa

SEQ ID NO: 724265 - RNA, 19 nt, Homo sapiens
  misc_RNA (1)...(19): siRNA sense strand
ccaaugacaaguuucuuau

SEQ ID NO: 724266 - RNA, 19 nt, Homo sapiens
  misc_RNA (1)...(19): siRNA sense strand
agaacacgcagauguauga

SEQ ID NO: 724267 - RNA, 19 nt, Homo sapiens
  misc_RNA (1)...(19): siRNA sense strand
cagaacagcaggagaagau

SEQ ID NO: 724268 - RNA, 19 nt, Homo sapiens
  misc_RNA (1)...(19): siRNA sense strand
gaucaaggagacagagaga

SEQ ID NO: 724269 - RNA, 19 nt, Homo sapiens
  misc_RNA (1)...(19): siRNA sense strand
aauauaagaccacguugaa

SEQ ID NO: 724270 - RNA, 19 nt, Homo sapiens
  misc_RNA (1)...(19): siRNA sense strand
aagaagaauuaucggaaga

SEQ ID NO: 724271 - RNA, 19 nt, Homo sapiens
  misc_RNA (1)...(19): siRNA sense strand
gaagacagcuccaaugaca

SEQ ID NO: 724272 - RNA, 19 nt, Homo sapiens
  misc_RNA (1)...(19): siRNA sense strand
gaaaucaggugcugcuuga

SEQ ID NO: 724273 - RNA, 19 nt, Homo sapiens
  misc_RNA (1)...(19): siRNA sense strand
ggaagaauguugccuauca

SEQ ID NO: 724274 - RNA, 19 nt, Homo sapiens
  misc_RNA (1)...(19): siRNA sense strand
ggacuuugcugcuuauuug

SEQ ID NO: 724275 - RNA, 19 nt, Homo sapiens
  misc_RNA (1)...(19): siRNA sense strand
gaaaagaacucaacauaga

SEQ ID NO: 724276 - RNA, 19 nt, Homo sapiens
  misc_RNA (1)...(19): siRNA sense strand
gaacaacaaucauuagaag

SEQ ID NO: 724277 - RNA, 19 nt, Homo sapiens
  misc_RNA (1)...(19): siRNA sense strand
caagagagcuacagucguu

SEQ ID NO: 724278 - RNA, 19 nt, Homo sapiens
  misc_RNA (1)...(19): siRNA sense strand
gugcagaacuuccagauga

SEQ ID NO: 724279 - RNA, 19 nt, Homo sapiens
  misc_RNA (1)...(19): siRNA sense strand
gaauuugaccggccucuua

SEQ ID NO: 724280 - RNA, 19 nt, Homo sapiens
  misc_RNA (1)...(19): siRNA sense strand
gaugacagcuugugaucuu

SEQ ID NO: 724281 - RNA, 19 nt, Homo sapiens
  misc_RNA (1)...(19): siRNA sense strand
ggaagagguuguuggugua

SEQ ID NO: 724282 - RNA, 19 nt, Homo sapiens
  misc_RNA (1)...(19): siRNA sense strand
ggaagaaguuucaaauaac

SEQ ID NO: 724283 - RNA, 19 nt, Homo sapiens
  misc_RNA (1)...(19): siRNA sense strand
gagaagaugcugauuaaug

SEQ ID NO: 724284 - RNA, 19 nt, Homo sapiens
  misc_RNA (1)...(19): siRNA sense strand
cuagauggcugcagaaaga

SEQ ID NO: 724285 - RNA, 19 nt, Homo sapiens
  misc_RNA (1)...(19): siRNA sense strand
gaauaacucuuacauacag

SEQ ID NO: 724286 - RNA, 19 nt, Homo sapiens
  misc_RNA (1)...(19): siRNA sense strand
ggaacaugaugcaaacaaa

SEQ ID NO: 724287 - RNA, 19 nt, Homo sapiens
  misc_RNA (1)...(19): siRNA sense strand
gaaagaacaggcagaaaug

SEQ ID NO: 724288 - RNA, 19 nt, Homo sapiens
  misc_RNA (1)...(19): siRNA sense strand
ggagaauacuggcaagguu

SEQ ID NO: 724289 - RNA, 19 nt, Homo sapiens
  misc_RNA (1)...(19): siRNA sense strand
gugaauaacucuuacauac

SEQ ID NO: 724290 - RNA, 19 nt, Homo sapiens
  misc_RNA (1)...(19): siRNA sense strand
caaguuggguucauagaug

SEQ ID NO: 724291 - RNA, 19 nt, Homo sapiens
  misc_RNA (1)...(19): siRNA sense strand
ugaaggauauuucuaguca

SEQ ID NO: 724292 - RNA, 19 nt, Homo sapiens
  misc_RNA (1)...(19): siRNA sense strand
uuaauaagauggaggagaa

SEQ ID NO: 724293 - RNA, 19 nt, Homo sapiens
  misc_RNA (1)...(19): siRNA sense strand
gaaaaucucugccucugaa

SEQ ID NO: 724294 - RNA, 19 nt, Homo sapiens
  misc_RNA (1)...(19): siRNA sense strand
ggugggacauuuacugaaa

SEQ ID NO: 724295 - RNA, 19 nt, Homo sapiens
  misc_RNA (1)...(19): siRNA sense strand
ggaaacggugggacauuua

SEQ ID NO: 724296 - RNA, 19 nt, Homo sapiens
  misc_RNA (1)...(19): siRNA sense strand
ggauauuucuagucauuug

SEQ ID NO: 724297 - RNA, 19 nt, Homo sapiens
  misc_RNA (1)...(19): siRNA sense strand
gagaauacuggcaagguua

SEQ ID NO: 724298 - RNA, 19 nt, Homo sapiens
  misc_RNA (1)...(19): siRNA sense strand
aggagaagaugcugauuaa

SEQ ID NO: 724299 - RNA, 19 nt, Homo sapiens
  misc_RNA (1)...(19): siRNA sense strand
gcagaaguugaccaaauua

SEQ ID NO: 724300 - RNA, 19 nt, Homo sapiens
  misc_RNA (1)...(19): siRNA sense strand
ggaagaaacaagagagcua

SEQ ID NO: 724301 - RNA, 19 nt, Homo sapiens
  misc_RNA (1)...(19): siRNA sense strand
ggugagcccuugaacauca

SEQ ID NO: 724302 - RNA, 19 nt, Homo sapiens
  misc_RNA (1)...(19): siRNA sense strand
caauucggauguuuacuga

SEQ ID NO: 724303 - RNA, 19 nt, Homo sapiens
  misc_RNA (1)...(19): siRNA sense strand
gaccuagcacuguacauua

SEQ ID NO: 724304 - RNA, 19 nt, Homo sapiens
  misc_RNA (1)...(19): siRNA sense strand
aaauaacuguauccgcuua

SEQ ID NO: 724305 - RNA, 19 nt, Homo sapiens
  misc_RNA (1)...(19): siRNA sense strand
gaauauaagaccacguuga

SEQ ID NO: 724306 - RNA, 19 nt, Homo sapiens
  misc_RNA (1)...(19): siRNA sense strand
gaagaauuaucggaagaau

SEQ ID NO: 724307 - RNA, 19 nt, Homo sapiens
  misc_RNA (1)...(19): siRNA sense strand
uuacauguaugcucaguau

SEQ ID NO: 724308 - RNA, 19 nt, Homo sapiens
  misc_RNA (1)...(19): siRNA sense strand
ugaccuugcuaguuuaauu

SEQ ID NO: 724309 - RNA, 19 nt, Homo sapiens
  misc_RNA (1)...(19): siRNA sense strand
cauggagugugaggaauua

SEQ ID NO: 724310 - RNA, 19 nt, Homo sapiens
  misc_RNA (1)...(19): siRNA sense strand
uaucauaauuggagacaug

SEQ ID NO: 724311 - RNA, 19 nt, Homo sapiens
  misc_RNA (1)...(19): siRNA sense strand
gauaucugcugaccgcuau

SEQ ID NO: 724312 - RNA, 19 nt, Homo sapiens
  misc_RNA (1)...(19): siRNA sense strand
gagaaaagaacucaacaua

SEQ ID NO: 724313 - RNA, 19 nt, Homo sapiens
  misc_RNA (1)...(19): siRNA sense strand
ucaguggccucuccauuga

SEQ ID NO: 724314 - RNA, 19 nt, Homo sapiens
  misc_RNA (1)...(19): siRNA sense strand
gcccagacccuuaaaauua

SEQ ID NO: 724315 - RNA, 19 nt, Homo sapiens
  misc_RNA (1)...(19): siRNA sense strand
guaaaccagcagugcauua

SEQ ID NO: 724316 - RNA, 19 nt, Homo sapiens
  misc_RNA (1)...(19): siRNA sense strand
agacuucacugcuggagaa

SEQ ID NO: 724317 - RNA, 19 nt, Homo sapiens
  misc_RNA (1)...(19): siRNA sense strand
caggagaagaugcugauua

SEQ ID NO: 724318 - RNA, 19 nt, Homo sapiens
  misc_RNA (1)...(19): siRNA sense strand
gaagaauguugccuaucau

SEQ ID NO: 724319 - RNA, 19 nt, Homo sapiens
  misc_RNA (1)...(19): siRNA sense strand
gaugaaacaugagguucuu

SEQ ID NO: 724320 - RNA, 19 nt, Homo sapiens
  misc_RNA (1)...(19): siRNA sense strand
gaugaagauugcuccgauu

SEQ ID NO: 724321 - RNA, 19 nt, Homo sapiens
  misc_RNA (1)...(19): siRNA sense strand
gaagaacaacaaucauuag

SEQ ID NO: 724322 - RNA, 19 nt, Homo sapiens
  misc_RNA (1)...(19): siRNA sense strand
gcuauucccuguuccuugu

SEQ ID NO: 724323 - RNA, 19 nt, Homo sapiens
  misc_RNA (1)...(19): siRNA sense strand
agaagaugcugauuaaugg

SEQ ID NO: 724324 - RNA, 19 nt, Homo sapiens
  misc_RNA (1)...(19): siRNA sense strand
gaacuuguagcaacugaau

SEQ ID NO: 724325 - RNA, 19 nt, Homo sapiens
  misc_RNA (1)...(19): siRNA sense strand
gaauguugccuaucauaau

SEQ ID NO: 724326 - RNA, 19 nt, Homo sapiens
  misc_RNA (1)...(19): siRNA sense strand
gcagaguccucgugcagau

SEQ ID NO: 724327 - RNA, 19 nt, Homo sapiens
  misc_RNA (1)...(19): siRNA sense strand
caaauuacaggcuacaaga

SEQ ID NO: 724328 - RNA, 19 nt, Homo sapiens
  misc_RNA (1)...(19): siRNA sense strand
guucaacacuggaagaagu

SEQ ID NO: 724329 - RNA, 19 nt, Homo sapiens
  misc_RNA (1)...(19): siRNA sense strand
caagggaacaugaugcaaa

SEQ ID NO: 724330 - RNA, 19 nt, Homo sapiens
  misc_RNA (1)...(19): siRNA sense strand
ccacugaucuaaugaacag

SEQ ID NO: 724331 - RNA, 19 nt, Homo sapiens
  misc_RNA (1)...(19): siRNA sense strand
gcagauggauuuuaagugu

SEQ ID NO: 724332 - RNA, 19 nt, Homo sapiens
  misc_RNA (1)...(19): siRNA sense strand
ccagaugucaguaaggaua

SEQ ID NO: 724333 - RNA, 19 nt, Homo sapiens
  misc_RNA (1)...(19): siRNA sense strand
gaccagugcucaagacucu

SEQ ID NO: 724334 - RNA, 19 nt, Homo sapiens
  misc_RNA (1)...(19): siRNA sense strand
uuacugaccucaaccuugu

SEQ ID NO: 724335 - RNA, 19 nt, Homo sapiens
  misc_RNA (1)...(19): siRNA sense strand
cagcuccaaugacaaguuu

SEQ ID NO: 724336 - RNA, 19 nt, Homo sapiens
  misc_RNA (1)...(19): siRNA sense strand
ggagacaugccuuuaauac

SEQ ID NO: 724337 - RNA, 19 nt, Homo sapiens
  misc_RNA (1)...(19): siRNA sense strand
uaagaggcgaggagaauuu

SEQ ID NO: 724338 - RNA, 19 nt, Homo sapiens
  misc_RNA (1)...(19): siRNA sense strand
agacaugccuuuaauacag

SEQ ID NO: 724339 - RNA, 19 nt, Homo sapiens
  misc_RNA (1)...(19): siRNA sense strand
ugcagaaguugaccaaauu

SEQ ID NO: 724340 - RNA, 19 nt, Homo sapiens
  misc_RNA (1)...(19): siRNA sense strand
gcagaaagaacaggcagaa

SEQ ID NO: 724341 - RNA, 19 nt, Homo sapiens
  misc_RNA (1)...(19): siRNA sense strand
caacauagaacccacugau

SEQ ID NO: 724342 - RNA, 19 nt, Homo sapiens
  misc_RNA (1)...(19): siRNA sense strand
agaauuaucggaagaaugu

SEQ ID NO: 724343 - RNA, 19 nt, Homo sapiens
  misc_RNA (1)...(19): siRNA sense strand
gugaagacagcuccaauga

SEQ ID NO: 724344 - RNA, 19 nt, Homo sapiens
  misc_RNA (1)...(19): siRNA sense strand
ugugaucuuucugcaauua

SEQ ID NO: 724345 - RNA, 19 nt, Homo sapiens
  misc_RNA (1)...(19): siRNA sense strand
caccgaaucuugcucuugu

SEQ ID NO: 724346 - RNA, 19 nt, Homo sapiens
  misc_RNA (1)...(19): siRNA sense strand
gacuuuagcuucagugacu

SEQ ID NO: 724347 - RNA, 19 nt, Homo sapiens
  misc_RNA (1)...(19): siRNA sense strand
caaccgaaaugacgaacag

SEQ ID NO: 724348 - RNA, 19 nt, Homo sapiens
  misc_RNA (1)...(19): siRNA sense strand
gcagugcauuagaaguuug

SEQ ID NO: 724349 - RNA, 19 nt, Homo sapiens
  misc_RNA (1)...(19): siRNA sense strand
guaugccaauuaagaauca

SEQ ID NO: 724350 - RNA, 19 nt, Homo sapiens
  misc_RNA (1)...(19): siRNA sense strand
agaaagaacaggcagaaau

SEQ ID NO: 724351 - RNA, 19 nt, Homo sapiens
  misc_RNA (1)...(19): siRNA sense strand
gcuugaccuugcuaguuua

SEQ ID NO: 724352 - RNA, 19 nt, Homo sapiens
  misc_RNA (1)...(19): siRNA sense strand
ccucuuagacccauuguug

SEQ ID NO: 724353 - RNA, 19 nt, Homo sapiens
  misc_RNA (1)...(19): siRNA sense strand
gaccagugccugaugauuc

SEQ ID NO: 724354 - RNA, 19 nt, Homo sapiens
  misc_RNA (1)...(19): siRNA sense strand
gcacuaagccacgauuugg

SEQ ID NO: 724355 - RNA, 19 nt, Homo sapiens
  misc_RNA (1)...(19): siRNA sense strand
auacuugcauugcugauug

SEQ ID NO: 724356 - RNA, 19 nt, Homo sapiens
  misc_RNA (1)...(19): siRNA sense strand
gugguauuguucuucauaa

SEQ ID NO: 724357 - RNA, 19 nt, Homo sapiens
  misc_RNA (1)...(19): siRNA sense strand
ggaauuagugaaggauauu

SEQ ID NO: 724358 - RNA, 19 nt, Homo sapiens
  misc_RNA (1)...(19): siRNA sense strand
uuacugccauucaaucaug

SEQ ID NO: 724359 - RNA, 19 nt, Homo sapiens
  misc_RNA (1)...(19): siRNA sense strand
gaaacaagagagcuacagu

SEQ ID NO: 724360 - RNA, 19 nt, Homo sapiens
  misc_RNA (1)...(19): siRNA sense strand
gauaacagugucccuggaa

SEQ ID NO: 724361 - RNA, 19 nt, Homo sapiens
  misc_RNA (1)...(19): siRNA sense strand
agaacccacugaucuaaug

SEQ ID NO: 724362 - RNA, 19 nt, Homo sapiens
  misc_RNA (1)...(19): siRNA sense strand
ugagcugucugaucuggaa

SEQ ID NO: 724363 - RNA, 19 nt, Homo sapiens
  misc_RNA (1)...(19): siRNA sense strand
cagcagugcauuagaaguu

SEQ ID NO: 724364 - RNA, 19 nt, Homo sapiens
  misc_RNA (1)...(19): siRNA sense strand
ggagugugaggaauuagaa

SEQ ID NO: 724365 - RNA, 19 nt, Homo sapiens
  misc_RNA (1)...(19): siRNA sense strand
ccaaugacaaguuucuuau

SEQ ID NO: 724366 - RNA, 19 nt, Homo sapiens
  misc_RNA (1)...(19): siRNA sense strand
agaacacgcagauguauga

SEQ ID NO: 724367 - RNA, 19 nt, Homo sapiens
  misc_RNA (1)...(19): siRNA sense strand
cagaacagcaggagaagau

SEQ ID NO: 724368 - RNA, 19 nt, Homo sapiens
  misc_RNA (1)...(19): siRNA sense strand
gaucaaggagacagagaga

SEQ ID NO: 724369 - RNA, 19 nt, Homo sapiens
  misc_RNA (1)...(19): siRNA sense strand
aauauaagaccacguugaa

SEQ ID NO: 724370 - RNA, 19 nt, Homo sapiens
  misc_RNA (1)...(19): siRNA sense strand
aagaagaauuaucggaaga

SEQ ID NO: 724371 - RNA, 19 nt, Homo sapiens
  misc_RNA (1)...(19): siRNA sense strand
gaagacagcuccaaugaca

SEQ ID NO: 724372 - RNA, 19 nt, Homo sapiens
  misc_RNA (1)...(19): siRNA sense strand
gaaaucaggugcugcuuga

SEQ ID NO: 724373 - RNA, 19 nt, Homo sapiens
  misc_RNA (1)...(19): siRNA sense strand
ggaagaauguugccuauca

SEQ ID NO: 724374 - RNA, 19 nt, Homo sapiens
  misc_RNA (1)...(19): siRNA sense strand
ggacuuugcugcuuauuug

SEQ ID NO: 724375 - RNA, 19 nt, Homo sapiens
  misc_RNA (1)...(19): siRNA sense strand
gaaaagaacucaacauaga

SEQ ID NO: 724376 - RNA, 19 nt, Homo sapiens
  misc_RNA (1)...(19): siRNA sense strand
gaacaacaaucauuagaag

SEQ ID NO: 724377 - RNA, 19 nt, Homo sapiens
  misc_RNA (1)...(19): siRNA sense strand
caagagagcuacagucguu

SEQ ID NO: 724378 - RNA, 19 nt, Homo sapiens
  misc_RNA (1)...(19): siRNA sense strand
gugcagaacuuccagauga

SEQ ID NO: 724379 - RNA, 19 nt, Homo sapiens
  misc_RNA (1)...(19): siRNA sense strand
gaauuugaccggccucuua

SEQ ID NO: 724380 - RNA, 19 nt, Homo sapiens
  misc_RNA (1)...(19): siRNA sense strand
gaugacagcuugugaucuu

SEQ ID NO: 724381 - RNA, 19 nt, Homo sapiens
  misc_RNA (1)...(19): siRNA sense strand
ggaagagguuguuggugua

SEQ ID NO: 724382 - RNA, 19 nt, Homo sapiens
  misc_RNA (1)...(19): siRNA sense strand
ggaagaaguuucaaauaac

SEQ ID NO: 724383 - RNA, 19 nt, Homo sapiens
  misc_RNA (1)...(19): siRNA sense strand
gagaagaugcugauuaaug

SEQ ID NO: 724384 - RNA, 19 nt, Homo sapiens
  misc_RNA (1)...(19): siRNA sense strand
cuagauggcugcagaaaga

SEQ ID NO: 724385 - RNA, 19 nt, Homo sapiens
  misc_RNA (1)...(19): siRNA sense strand
gaauaacucuuacauacag

SEQ ID NO: 724386 - RNA, 19 nt, Homo sapiens
  misc_RNA (1)...(19): siRNA sense strand
ggaacaugaugcaaacaaa

SEQ ID NO: 724387 - RNA, 19 nt, Homo sapiens
  misc_RNA (1)...(19): siRNA sense strand
gaaagaacaggcagaaaug

SEQ ID NO: 724388 - RNA, 19 nt, Homo sapiens
  misc_RNA (1)...(19): siRNA sense strand
ggagaauacuggcaagguu

SEQ ID NO: 724389 - RNA, 19 nt, Homo sapiens
  misc_RNA (1)...(19): siRNA sense strand
gugaauaacucuuacauac

SEQ ID NO: 724390 - RNA, 19 nt, Homo sapiens
  misc_RNA (1)...(19): siRNA sense strand
caaguuggguucauagaug

SEQ ID NO: 724391 - RNA, 19 nt, Homo sapiens
  misc_RNA (1)...(19): siRNA sense strand
ugaaggauauuucuaguca

SEQ ID NO: 724392 - RNA, 19 nt, Homo sapiens
  misc_RNA (1)...(19): siRNA sense strand
uuaauaagauggaggagaa

SEQ ID NO: 724393 - RNA, 19 nt, Homo sapiens
  misc_RNA (1)...(19): siRNA sense strand
gaaaaucucugccucugaa

SEQ ID NO: 724394 - RNA, 19 nt, Homo sapiens
  misc_RNA (1)...(19): siRNA sense strand
ggugggacauuuacugaaa

SEQ ID NO: 724395 - RNA, 19 nt, Homo sapiens
  misc_RNA (1)...(19): siRNA sense strand
ggaaacggugggacauuua

SEQ ID NO: 724396 - RNA, 19 nt, Homo sapiens
  misc_RNA (1)...(19): siRNA sense strand
ggauauuucuagucauuug

SEQ ID NO: 724397 - RNA, 19 nt, Homo sapiens
  misc_RNA (1)...(19): siRNA sense strand
gagaauacuggcaagguua

SEQ ID NO: 724398 - RNA, 19 nt, Homo sapiens
  misc_RNA (1)...(19): siRNA sense strand
aggagaagaugcugauuaa

SEQ ID NO: 724399 - RNA, 19 nt, Homo sapiens
  misc_RNA (1)...(19): siRNA sense strand
gcagaaguugaccaaauua

SEQ ID NO: 724400 - RNA, 19 nt, Homo sapiens
  misc_RNA (1)...(19): siRNA sense strand
ggaagaaacaagagagcua

SEQ ID NO: 724401 - RNA, 19 nt, Homo sapiens
  misc_RNA (1)...(19): siRNA sense strand
ggugagcccuugaacauca

SEQ ID NO: 724402 - RNA, 19 nt, Homo sapiens
  misc_RNA (1)...(19): siRNA sense strand
caauucggauguuuacuga

SEQ ID NO: 724403 - RNA, 19 nt, Homo sapiens
  misc_RNA (1)...(19): siRNA sense strand
gaccuagcacuguacauua

SEQ ID NO: 724404 - RNA, 19 nt, Homo sapiens
  misc_RNA (1)...(19): siRNA sense strand
aaauaacuguauccgcuua

SEQ ID NO: 724405 - RNA, 19 nt, Homo sapiens
  misc_RNA (1)...(19): siRNA sense strand
gaauauaagaccacguuga

SEQ ID NO: 724406 - RNA, 19 nt, Homo sapiens
  misc_RNA (1)...(19): siRNA sense strand
gaagaauuaucggaagaau

SEQ ID NO: 724407 - RNA, 19 nt, Homo sapiens
  misc_RNA (1)...(19): siRNA sense strand
uuacauguaugcucaguau

SEQ ID NO: 724408 - RNA, 19 nt, Homo sapiens
  misc_RNA (1)...(19): siRNA sense strand
ugaccuugcuaguuuaauu

SEQ ID NO: 724409 - RNA, 19 nt, Homo sapiens
  misc_RNA (1)...(19): siRNA sense strand
cauggagugugaggaauua

SEQ ID NO: 724410 - RNA, 19 nt, Homo sapiens
  misc_RNA (1)...(19): siRNA sense strand
uaucauaauuggagacaug

SEQ ID NO: 724411 - RNA, 19 nt, Homo sapiens
  misc_RNA (1)...(19): siRNA sense strand
gauaucugcugaccgcuau

SEQ ID NO: 724412 - RNA, 19 nt, Homo sapiens
  misc_RNA (1)...(19): siRNA sense strand
gagaaaagaacucaacaua

SEQ ID NO: 724413 - RNA, 19 nt, Homo sapiens
  misc_RNA (1)...(19): siRNA sense strand
ucaguggccucuccauuga

SEQ ID NO: 724414 - RNA, 19 nt, Homo sapiens
  misc_RNA (1)...(19): siRNA sense strand
gcccagacccuuaaaauua

SEQ ID NO: 724415 - RNA, 19 nt, Homo sapiens
  misc_RNA (1)...(19): siRNA sense strand
guaaaccagcagugcauua

SEQ ID NO: 724416 - RNA, 19 nt, Homo sapiens
  misc_RNA (1)...(19): siRNA sense strand
agacuucacugcuggagaa

SEQ ID NO: 724417 - RNA, 19 nt, Homo sapiens
  misc_RNA (1)...(19): siRNA sense strand
caggagaagaugcugauua

SEQ ID NO: 724418 - RNA, 19 nt, Homo sapiens
  misc_RNA (1)...(19): siRNA sense strand
gaagaauguugccuaucau

SEQ ID NO: 724419 - RNA, 19 nt, Homo sapiens
  misc_RNA (1)...(19): siRNA sense strand
gaugaaacaugagguucuu

SEQ ID NO: 724420 - RNA, 19 nt, Homo sapiens
  misc_RNA (1)...(19): siRNA sense strand
gaugaagauugcuccgauu

SEQ ID NO: 724421 - RNA, 19 nt, Homo sapiens
  misc_RNA (1)...(19): siRNA sense strand
gaagaacaacaaucauuag

SEQ ID NO: 724422 - RNA, 19 nt, Homo sapiens
  misc_RNA (1)...(19): siRNA sense strand
gcuauucccuguuccuugu

SEQ ID NO: 724423 - RNA, 19 nt, Homo sapiens
  misc_RNA (1)...(19): siRNA sense strand
agaagaugcugauuaaugg

SEQ ID NO: 724424 - RNA, 19 nt, Homo sapiens
  misc_RNA (1)...(19): siRNA sense strand
gaacuuguagcaacugaau

SEQ ID NO: 724425 - RNA, 19 nt, Homo sapiens
  misc_RNA (1)...(19): siRNA sense strand
gcagaguccucgugcagau

SEQ ID NO: 724426 - RNA, 19 nt, Homo sapiens
  misc_RNA (1)...(19): siRNA sense strand
gaauguugccuaucauaau

SEQ ID NO: 724427 - RNA, 19 nt, Homo sapiens
  misc_RNA (1)...(19): siRNA sense strand
caaauuacaggcuacaaga

SEQ ID NO: 724428 - RNA, 19 nt, Homo sapiens
  misc_RNA (1)...(19): siRNA sense strand
guucaacacuggaagaagu

SEQ ID NO: 724429 - RNA, 19 nt, Homo sapiens
  misc_RNA (1)...(19): siRNA sense strand
caagggaacaugaugcaaa

SEQ ID NO: 724430 - RNA, 19 nt, Homo sapiens
  misc_RNA (1)...(19): siRNA sense strand
ccacugaucuaaugaacag

SEQ ID NO: 724431 - RNA, 19 nt, Homo sapiens
  misc_RNA (1)...(19): siRNA sense strand
gcagauggauuuuaagugu

SEQ ID NO: 724432 - RNA, 19 nt, Homo sapiens
  misc_RNA (1)...(19): siRNA sense strand
ccagaugucaguaaggaua

SEQ ID NO: 724433 - RNA, 19 nt, Homo sapiens
  misc_RNA (1)...(19): siRNA sense strand
gaccagugcucaagacucu

SEQ ID NO: 724434 - RNA, 19 nt, Homo sapiens
  misc_RNA (1)...(19): siRNA sense strand
uuacugaccucaaccuugu

SEQ ID NO: 724435 - RNA, 19 nt, Homo sapiens
  misc_RNA (1)...(19): siRNA sense strand
cagcuccaaugacaaguuu

SEQ ID NO: 724436 - RNA, 19 nt, Homo sapiens
  misc_RNA (1)...(19): siRNA sense strand
ggagacaugccuuuaauac

SEQ ID NO: 724437 - RNA, 19 nt, Homo sapiens
  misc_RNA (1)...(19): siRNA sense strand
uaagaggcgaggagaauuu

SEQ ID NO: 724438 - RNA, 19 nt, Homo sapiens
  misc_RNA (1)...(19): siRNA sense strand
agacaugccuuuaauacag

SEQ ID NO: 724439 - RNA, 19 nt, Homo sapiens
  misc_RNA (1)...(19): siRNA sense strand
ugcagaaguugaccaaauu

SEQ ID NO: 724440 - RNA, 19 nt, Homo sapiens
  misc_RNA (1)...(19): siRNA sense strand
gcagaaagaacaggcagaa

SEQ ID NO: 724441 - RNA, 19 nt, Homo sapiens
  misc_RNA (1)...(19): siRNA sense strand
caacauagaacccacugau

SEQ ID NO: 724442 - RNA, 19 nt, Homo sapiens
  misc_RNA (1)...(19): siRNA sense strand
agaauuaucggaagaaugu

SEQ ID NO: 724443 - RNA, 19 nt, Homo sapiens
  misc_RNA (1)...(19): siRNA sense strand
gugaagacagcuccaauga

SEQ ID NO: 724444 - RNA, 19 nt, Homo sapiens
  misc_RNA (1)...(19): siRNA sense strand
caccgaaucuugcucuugu

SEQ ID NO: 724445 - RNA, 19 nt, Homo sapiens
  misc_RNA (1)...(19): siRNA sense strand
ugugaucuuucugcaauua

SEQ ID NO: 724446 - RNA, 19 nt, Homo sapiens
  misc_RNA (1)...(19): siRNA sense strand
gacuuuagcuucagugacu

SEQ ID NO: 724447 - RNA, 19 nt, Homo sapiens
  misc_RNA (1)...(19): siRNA sense strand
caaccgaaaugacgaacag

SEQ ID NO: 724448 - RNA, 19 nt, Homo sapiens
  misc_RNA (1)...(19): siRNA sense strand
gcagugcauuagaaguuug

SEQ ID NO: 724449 - RNA, 19 nt, Homo sapiens
  misc_RNA (1)...(19): siRNA sense strand
guaugccaauuaagaauca

SEQ ID NO: 724450 - RNA, 19 nt, Homo sapiens
  misc_RNA (1)...(19): siRNA sense strand
agaaagaacaggcagaaau

SEQ ID NO: 724451 - RNA, 19 nt, Homo sapiens
  misc_RNA (1)...(19): siRNA sense strand
gcuugaccuugcuaguuua

SEQ ID NO: 724452 - RNA, 19 nt, Homo sapiens
  misc_RNA (1)...(19): siRNA sense strand
gugguauuguucuucauaa

SEQ ID NO: 724453 - RNA, 19 nt, Homo sapiens
  misc_RNA (1)...(19): siRNA sense strand
gaccagugccugaugauuc

SEQ ID NO: 724454 - RNA, 19 nt, Homo sapiens
  misc_RNA (1)...(19): siRNA sense strand
gcacuaagccacgauuugg

SEQ ID NO: 724455 - RNA, 19 nt, Homo sapiens
  misc_RNA (1)...(19): siRNA sense strand
auacuugcauugcugauug

SEQ ID NO: 724456 - RNA, 19 nt, Homo sapiens
  misc_RNA (1)...(19): siRNA sense strand
ccucuuagacccauuguug

SEQ ID NO: 724457 - RNA, 19 nt, Homo sapiens
  misc_RNA (1)...(19): siRNA sense strand
ggaauuagugaaggauauu

SEQ ID NO: 724458 - RNA, 19 nt, Homo sapiens
  misc_RNA (1)...(19): siRNA sense strand
uuacugccauucaaucaug

SEQ ID NO: 724459 - RNA, 19 nt, Homo sapiens
  misc_RNA (1)...(19): siRNA sense strand
gaaacaagagagcuacagu

SEQ ID NO: 724460 - RNA, 19 nt, Homo sapiens
  misc_RNA (1)...(19): siRNA sense strand
ccaaugacaaguuucuuau

SEQ ID NO: 724461 - RNA, 19 nt, Homo sapiens
  misc_RNA (1)...(19): siRNA sense strand
agaacccacugaucuaaug

SEQ ID NO: 724462 - RNA, 19 nt, Homo sapiens
  misc_RNA (1)...(19): siRNA sense strand
ugagcugucugaucuggaa

SEQ ID NO: 724463 - RNA, 19 nt, Homo sapiens
  misc_RNA (1)...(19): siRNA sense strand
cagcagugcauuagaaguu

SEQ ID NO: 724464 - RNA, 19 nt, Homo sapiens
  misc_RNA (1)...(19): siRNA sense strand
ggagugugaggaauuagaa

SEQ ID NO: 724465 - RNA, 19 nt, Homo sapiens
  misc_RNA (1)...(19): siRNA sense strand
gauaacagugucccuggaa

SEQ ID NO: 724466 - RNA, 19 nt, Homo sapiens
  misc_RNA (1)...(19): siRNA sense strand
agaacacgcagauguauga

SEQ ID NO: 724467 - RNA, 19 nt, Homo sapiens
  misc_RNA (1)...(19): siRNA sense strand
cagaacagcaggagaagau

SEQ ID NO: 724468 - RNA, 19 nt, Homo sapiens
  misc_RNA (1)...(19): siRNA sense strand
gaucaaggagacagagaga

SEQ ID NO: 724469 - RNA, 19 nt, Homo sapiens
  misc_RNA (1)...(19): siRNA sense strand
aauauaagaccacguugaa

SEQ ID NO: 724470 - RNA, 19 nt, Homo sapiens
  misc_RNA (1)...(19): siRNA sense strand
aagaagaauuaucggaaga

SEQ ID NO: 724471 - RNA, 19 nt, Homo sapiens
  misc_RNA (1)...(19): siRNA sense strand
ggacccaacugguaagauu

SEQ ID NO: 724472 - RNA, 19 nt, Homo sapiens
  misc_RNA (1)...(19): siRNA sense strand
gugcaaauauccaagaaga

SEQ ID NO: 724473 - RNA, 19 nt, Homo sapiens
  misc_RNA (1)...(19): siRNA sense strand
gcggagacccuguuaacua

SEQ ID NO: 724474 - RNA, 19 nt, Homo sapiens
  misc_RNA (1)...(19): siRNA sense strand
cuaaauccaugaaguuugu

SEQ ID NO: 724475 - RNA, 19 nt, Homo sapiens
  misc_RNA (1)...(19): siRNA sense strand
ggaguugaggugcgaguua

SEQ ID NO: 724476 - RNA, 19 nt, Homo sapiens
  misc_RNA (1)...(19): siRNA sense strand
gagacccuguuaacuacua

SEQ ID NO: 724477 - RNA, 19 nt, Homo sapiens
  misc_RNA (1)...(19): siRNA sense strand
cagaagagguuuggcuuuc

SEQ ID NO: 724478 - RNA, 19 nt, Homo sapiens
  misc_RNA (1)...(19): siRNA sense strand
gaagagguuuggcuuucca

SEQ ID NO: 724479 - RNA, 19 nt, Homo sapiens
  misc_RNA (1)...(19): siRNA sense strand
ccaagaagaggaaguuugu

SEQ ID NO: 724480 - RNA, 19 nt, Homo sapiens
  misc_RNA (1)...(19): siRNA sense strand
gcaucaaggugaagaucau

SEQ ID NO: 724481 - RNA, 19 nt, Homo sapiens
  misc_RNA (1)...(19): siRNA sense strand
ggacagagggcuaaaucca

SEQ ID NO: 724482 - RNA, 19 nt, Homo sapiens
  misc_RNA (1)...(19): siRNA sense strand
gggcuaaauccaugaaguu

SEQ ID NO: 724483 - RNA, 19 nt, Homo sapiens
  misc_RNA (1)...(19): siRNA sense strand
ugacugcuguaguucagaa

SEQ ID NO: 724484 - RNA, 19 nt, Homo sapiens
  misc_RNA (1)...(19): siRNA sense strand
ggaacccaaagaugagaua

SEQ ID NO: 724485 - RNA, 19 nt, Homo sapiens
  misc_RNA (1)...(19): siRNA sense strand
ggccaaaggcugcgagguu

SEQ ID NO: 724486 - RNA, 19 nt, Homo sapiens
  misc_RNA (1)...(19): siRNA sense strand
gguaagauuggcccuaaga

SEQ ID NO: 724487 - RNA, 19 nt, Homo sapiens
  misc_RNA (1)...(19): siRNA sense strand
guagagcuuuaugcugaaa

SEQ ID NO: 724488 - RNA, 19 nt, Homo sapiens
  misc_RNA (1)...(19): siRNA sense strand
gaggacagagggcuaaauc

SEQ ID NO: 724489 - RNA, 19 nt, Homo sapiens
  misc_RNA (1)...(19): siRNA sense strand
ucaaagcugaacugaauga

SEQ ID NO: 724490 - RNA, 19 nt, Homo sapiens
  misc_RNA (1)...(19): siRNA sense strand
gcagugcaaauauccaaga

SEQ ID NO: 724491 - RNA, 19 nt, Homo sapiens
  misc_RNA (1)...(19): siRNA sense strand
gcuaaauccaugaaguuug

SEQ ID NO: 724492 - RNA, 19 nt, Homo sapiens
  misc_RNA (1)...(19): siRNA sense strand
cggagacccuguuaacuac

SEQ ID NO: 724493 - RNA, 19 nt, Homo sapiens
  misc_RNA (1)...(19): siRNA sense strand
gaggaaguuugucgcugau

SEQ ID NO: 724494 - RNA, 19 nt, Homo sapiens
  misc_RNA (1)...(19): siRNA sense strand
acaccaaccaggacagaaa

SEQ ID NO: 724495 - RNA, 19 nt, Homo sapiens
  misc_RNA (1)...(19): siRNA sense strand
ucagaagagguuuggcuuu

SEQ ID NO: 724496 - RNA, 19 nt, Homo sapiens
  misc_RNA (1)...(19): siRNA sense strand
cugguaagauuggcccuaa

SEQ ID NO: 724497 - RNA, 19 nt, Homo sapiens
  misc_RNA (1)...(19): siRNA sense strand
cucgggagcuggcugaaga

SEQ ID NO: 724498 - RNA, 19 nt, Homo sapiens
  misc_RNA (1)...(19): siRNA sense strand
gagcauuguggaacccaaa

SEQ ID NO: 724499 - RNA, 19 nt, Homo sapiens
  misc_RNA (1)...(19): siRNA sense strand
guaagauuggcccuaagaa

SEQ ID NO: 724500 - RNA, 19 nt, Homo sapiens
  misc_RNA (1)...(19): siRNA sense strand
cagugcaaauauccaagaa

SEQ ID NO: 724501 - RNA, 19 nt, Homo sapiens
  misc_RNA (1)...(19): siRNA sense strand
ggcuaaauccaugaaguuu

SEQ ID NO: 724502 - RNA, 19 nt, Homo sapiens
  misc_RNA (1)...(19): siRNA sense strand
guuuguggauggccugaug

SEQ ID NO: 724503 - RNA, 19 nt, Homo sapiens
  misc_RNA (1)...(19): siRNA sense strand
ggcugaagauggcuacucu

SEQ ID NO: 724504 - RNA, 19 nt, Homo sapiens
  misc_RNA (1)...(19): siRNA sense strand
gaguugaggugcgaguuac

SEQ ID NO: 724505 - RNA, 19 nt, Homo sapiens
  misc_RNA (1)...(19): siRNA sense strand
uaagauuggcccuaagaag

SEQ ID NO: 724506 - RNA, 19 nt, Homo sapiens
  misc_RNA (1)...(19): siRNA sense strand
aaccaggacagaaaucauu

SEQ ID NO: 724507 - RNA, 19 nt, Homo sapiens
  misc_RNA (1)...(19): siRNA sense strand
agagggcaguguagagcuu

SEQ ID NO: 724508 - RNA, 19 nt, Homo sapiens
  misc_RNA (1)...(19): siRNA sense strand
uaacuacuacguugacacu

SEQ ID NO: 724509 - RNA, 19 nt, Homo sapiens
  misc_RNA (1)...(19): siRNA sense strand
agaggucugugugccauug

SEQ ID NO: 724510 - RNA, 19 nt, Homo sapiens
  misc_RNA (1)...(19): siRNA sense strand
gacagagggcuaaauccau

SEQ ID NO: 724511 - RNA, 19 nt, Homo sapiens
  misc_RNA (1)...(19): siRNA sense strand
acccaaagaugagauacug

SEQ ID NO: 724512 - RNA, 19 nt, Homo sapiens
  misc_RNA (1)...(19): siRNA sense strand
aaauauccaagaagaggaa

SEQ ID NO: 724513 - RNA, 19 nt, Homo sapiens
  misc_RNA (1)...(19): siRNA sense strand
uguagagcuuuaugcugaa

SEQ ID NO: 724514 - RNA, 19 nt, Homo sapiens
  misc_RNA (1)...(19): siRNA sense strand
gacccaacugguaagauug

SEQ ID NO: 724515 - RNA, 19 nt, Homo sapiens
  misc_RNA (1)...(19): siRNA sense strand
cagcggagacccuguuaac

SEQ ID NO: 724516 - RNA, 19 nt, Homo sapiens
  misc_RNA (1)...(19): siRNA sense strand
ccaccagaacacagaaugu

SEQ ID NO: 724517 - RNA, 19 nt, Homo sapiens
  misc_RNA (1)...(19): siRNA sense strand
gaacagggaugaagucuug

SEQ ID NO: 724518 - RNA, 19 nt, Homo sapiens
  misc_RNA (1)...(19): siRNA sense strand
caaggaagcugcggcauug

SEQ ID NO: 724519 - RNA, 19 nt, Homo sapiens
  misc_RNA (1)...(19): siRNA sense strand
gaagcaggccaaagaagaa

SEQ ID NO: 724520 - RNA, 19 nt, Homo sapiens
  misc_RNA (1)...(19): siRNA sense strand
gggaugaagucuuggacaa

SEQ ID NO: 724521 - RNA, 19 nt, Homo sapiens
  misc_RNA (1)...(19): siRNA sense strand
ugaccauccuccagacaua

SEQ ID NO: 724522 - RNA, 19 nt, Homo sapiens
  misc_RNA (1)...(19): siRNA sense strand
aggcugaaauugaacagua

SEQ ID NO: 724523 - RNA, 19 nt, Homo sapiens
  misc_RNA (1)...(19): siRNA sense strand
gaaagaaccggaggcugaa

SEQ ID NO: 724524 - RNA, 19 nt, Homo sapiens
  misc_RNA (1)...(19): siRNA sense strand
gcagagggagaaagaauuc

SEQ ID NO: 724525 - RNA, 19 nt, Homo sapiens
  misc_RNA (1)...(19): siRNA sense strand
uggacaaccucuuggcuuu

SEQ ID NO: 724526 - RNA, 19 nt, Homo sapiens
  misc_RNA (1)...(19): siRNA sense strand
caugaaaacuaccgcauaa

SEQ ID NO: 724527 - RNA, 19 nt, Homo sapiens
  misc_RNA (1)...(19): siRNA sense strand
ccaaggaagcugcggcauu

SEQ ID NO: 724528 - RNA, 19 nt, Homo sapiens
  misc_RNA (1)...(19): siRNA sense strand
ggccagaaauccaugaaaa

SEQ ID NO: 724529 - RNA, 19 nt, Homo sapiens
  misc_RNA (1)...(19): siRNA sense strand
agaaggagacccaggagaa

SEQ ID NO: 724530 - RNA, 19 nt, Homo sapiens
  misc_RNA (1)...(19): siRNA sense strand
ugaagcaggccaaagaaga

SEQ ID NO: 724531 - RNA, 19 nt, Homo sapiens
  misc_RNA (1)...(19): siRNA sense strand
agacauacuuccggcagaa

SEQ ID NO: 724532 - RNA, 19 nt, Homo sapiens
  misc_RNA (1)...(19): siRNA sense strand
gaaaacuaccgcauaaaug

SEQ ID NO: 724533 - RNA, 19 nt, Homo sapiens
  misc_RNA (1)...(19): siRNA sense strand
gcagaacagggaugaaguc

SEQ ID NO: 724534 - RNA, 19 nt, Homo sapiens
  misc_RNA (1)...(19): siRNA sense strand
gaaggagacccaggagaag

SEQ ID NO: 724535 - RNA, 19 nt, Homo sapiens
  misc_RNA (1)...(19): siRNA sense strand
gcugaagcaggccaaagaa

SEQ ID NO: 724536 - RNA, 19 nt, Homo sapiens
  misc_RNA (1)...(19): siRNA sense strand
ggcugaagcaggccaaaga

SEQ ID NO: 724537 - RNA, 19 nt, Homo sapiens
  misc_RNA (1)...(19): siRNA sense strand
ccucuuggcuuuugucugu

SEQ ID NO: 724538 - RNA, 19 nt, Homo sapiens
  misc_RNA (1)...(19): siRNA sense strand
gacaaccucuuggcuuuug

SEQ ID NO: 724539 - RNA, 19 nt, Homo sapiens
  misc_RNA (1)...(19): siRNA sense strand
aaacuaccgcauaaaugga

SEQ ID NO: 724540 - RNA, 19 nt, Homo sapiens
  misc_RNA (1)...(19): siRNA sense strand
agaauucaaggccaaggaa

SEQ ID NO: 724541 - RNA, 19 nt, Homo sapiens
  misc_RNA (1)...(19): siRNA sense strand
agaaauccaugaaaacuac

SEQ ID NO: 724542 - RNA, 19 nt, Homo sapiens
  misc_RNA (1)...(19): siRNA sense strand
ugaagaagauuguugcaaa

SEQ ID NO: 724543 - RNA, 19 nt, Homo sapiens
  misc_RNA (1)...(19): siRNA sense strand
caagaacaguuuaugaaga

SEQ ID NO: 724544 - RNA, 19 nt, Homo sapiens
  misc_RNA (1)...(19): siRNA sense strand
caagaaggcucugugcauu

SEQ ID NO: 724545 - RNA, 19 nt, Homo sapiens
  misc_RNA (1)...(19): siRNA sense strand
gaauugagaagguugauga

SEQ ID NO: 724546 - RNA, 19 nt, Homo sapiens
  misc_RNA (1)...(19): siRNA sense strand
cacaaacgcuaucugcuaa

SEQ ID NO: 724547 - RNA, 19 nt, Homo sapiens
  misc_RNA (1)...(19): siRNA sense strand
caccaacuaugaugucuuu

SEQ ID NO: 724548 - RNA, 19 nt, Homo sapiens
  misc_RNA (1)...(19): siRNA sense strand
gaagaacacuuggagaaac

SEQ ID NO: 724549 - RNA, 19 nt, Homo sapiens
  misc_RNA (1)...(19): siRNA sense strand
gauccgcaguuaugaagaa

SEQ ID NO: 724550 - RNA, 19 nt, Homo sapiens
  misc_RNA (1)...(19): siRNA sense strand
gcucaaagacuaccagaau

SEQ ID NO: 724551 - RNA, 19 nt, Homo sapiens
  misc_RNA (1)...(19): siRNA sense strand
ggaaauggccaacaagaag

SEQ ID NO: 724552 - RNA, 19 nt, Homo sapiens
  misc_RNA (1)...(19): siRNA sense strand
gaagaagauuguugcaaac

SEQ ID NO: 724553 - RNA, 19 nt, Homo sapiens
  misc_RNA (1)...(19): siRNA sense strand
ccacaaacgcuaucugcua

SEQ ID NO: 724554 - RNA, 19 nt, Homo sapiens
  misc_RNA (1)...(19): siRNA sense strand
gaaugucccuggaauugag

SEQ ID NO: 724555 - RNA, 19 nt, Homo sapiens
  misc_RNA (1)...(19): siRNA sense strand
ccuggaggcucgaauuauu

SEQ ID NO: 724556 - RNA, 19 nt, Homo sapiens
  misc_RNA (1)...(19): siRNA sense strand
ggaggacgcugaguuugau

SEQ ID NO: 724557 - RNA, 19 nt, Homo sapiens
  misc_RNA (1)...(19): siRNA sense strand
cuucuacgcugcucaaaga

SEQ ID NO: 724558 - RNA, 19 nt, Homo sapiens
  misc_RNA (1)...(19): siRNA sense strand
agucuaggcuggaugauga

SEQ ID NO: 724559 - RNA, 19 nt, Homo sapiens
  misc_RNA (1)...(19): siRNA sense strand
gaagcgaagaagagccuua

SEQ ID NO: 724560 - RNA, 19 nt, Homo sapiens
  misc_RNA (1)...(19): siRNA sense strand
gcaagaacaguuuaugaag

SEQ ID NO: 724561 - RNA, 19 nt, Homo sapiens
  misc_RNA (1)...(19): siRNA sense strand
ccaaagacacucaaagaca

SEQ ID NO: 724562 - RNA, 19 nt, Homo sapiens
  misc_RNA (1)...(19): siRNA sense strand
caacuaugaugucuuugag

SEQ ID NO: 724563 - RNA, 19 nt, Homo sapiens
  misc_RNA (1)...(19): siRNA sense strand
caaacgcuaucugcuaaug

SEQ ID NO: 724564 - RNA, 19 nt, Homo sapiens
  misc_RNA (1)...(19): siRNA sense strand
acucaaagacagccaauaa

SEQ ID NO: 724565 - RNA, 19 nt, Homo sapiens
  misc_RNA (1)...(19): siRNA sense strand
gaacaguuuaugaagaaga

SEQ ID NO: 724566 - RNA, 19 nt, Homo sapiens
  misc_RNA (1)...(19): siRNA sense strand
cuacgcugcucaaagacua

SEQ ID NO: 724567 - RNA, 19 nt, Homo sapiens
  misc_RNA (1)...(19): siRNA sense strand
gcgccaaguuuccuuucaa

SEQ ID NO: 724568 - RNA, 19 nt, Homo sapiens
  misc_RNA (1)...(19): siRNA sense strand
cagaaugucccuggaauug

SEQ ID NO: 724569 - RNA, 19 nt, Homo sapiens
  misc_RNA (1)...(19): siRNA sense strand
acuaugaugucuuugagaa

SEQ ID NO: 724570 - RNA, 19 nt, Homo sapiens
  misc_RNA (1)...(19): siRNA sense strand
gaaaggacaaagcccacaa

SEQ ID NO: 724571 - RNA, 19 nt, Homo sapiens
  misc_RNA (1)...(19): siRNA sense strand
gaugaugacccaccuccuu

SEQ ID NO: 724572 - RNA, 19 nt, Homo sapiens
  misc_RNA (1)...(19): siRNA sense strand
uugagaagguugaugaugu

SEQ ID NO: 724573 - RNA, 19 nt, Homo sapiens
  misc_RNA (1)...(19): siRNA sense strand
gguugaugaugucgugaaa

SEQ ID NO: 724574 - RNA, 19 nt, Homo sapiens
  misc_RNA (1)...(19): siRNA sense strand
ggaaaccagcccagucuag

SEQ ID NO: 724575 - RNA, 19 nt, Homo sapiens
  misc_RNA (1)...(19): siRNA sense strand
gccaaagccauaccaaaga

SEQ ID NO: 724576 - RNA, 19 nt, Homo sapiens
  misc_RNA (1)...(19): siRNA sense strand
ccaacuaugaugucuuuga

SEQ ID NO: 724577 - RNA, 19 nt, Homo sapiens
  misc_RNA (1)...(19): siRNA sense strand
gucaagauccgcaguuaug

SEQ ID NO: 724578 - RNA, 19 nt, Homo sapiens
  misc_RNA (1)...(19): siRNA sense strand
acaagaaggagaugcuaaa

SEQ ID NO: 724579 - RNA, 19 nt, Homo sapiens
  misc_RNA (1)...(19): siRNA sense strand
uaccaaagacacucaaaga

SEQ ID NO: 724580 - RNA, 19 nt, Homo sapiens
  misc_RNA (1)...(19): siRNA sense strand
ucaaagacuaccagaaugu

SEQ ID NO: 724581 - RNA, 19 nt, Homo sapiens
  misc_RNA (1)...(19): siRNA sense strand
gcgaagaagagccuuaaag

SEQ ID NO: 724582 - RNA, 19 nt, Homo sapiens
  misc_RNA (1)...(19): siRNA sense strand
gaagagcccaccgccgauu

SEQ ID NO: 724583 - RNA, 19 nt, Homo sapiens
  misc_RNA (1)...(19): siRNA sense strand
ugaagaacacuuggagaaa

SEQ ID NO: 724584 - RNA, 19 nt, Homo sapiens
  misc_RNA (1)...(19): siRNA sense strand
ugagaagguugaugauguc

SEQ ID NO: 724585 - RNA, 19 nt, Homo sapiens
  misc_RNA (1)...(19): siRNA sense strand
caagauccgcaguuaugaa

SEQ ID NO: 724586 - RNA, 19 nt, Homo sapiens
  misc_RNA (1)...(19): siRNA sense strand
caacaagaaggagaugcua

SEQ ID NO: 724587 - RNA, 19 nt, Homo sapiens
  misc_RNA (1)...(19): siRNA sense strand
gcucugugcauucggguuu

SEQ ID NO: 724588 - RNA, 19 nt, Homo sapiens
  misc_RNA (1)...(19): siRNA sense strand
ccaaagccauaccaaagac

SEQ ID NO: 724589 - RNA, 19 nt, Homo sapiens
  misc_RNA (1)...(19): siRNA sense strand
aagaacacuuggagaaaca

SEQ ID NO: 724590 - RNA, 19 nt, Homo sapiens
  misc_RNA (1)...(19): siRNA sense strand
ccaagaaggcucugugcau

SEQ ID NO: 724591 - RNA, 19 nt, Homo sapiens
  misc_RNA (1)...(19): siRNA sense strand
aaucaagcaagaacaguuu

SEQ ID NO: 724592 - RNA, 19 nt, Homo sapiens
  misc_RNA (1)...(19): siRNA sense strand
gccgauucgugaccaagaa

SEQ ID NO: 724593 - RNA, 19 nt, Homo sapiens
  misc_RNA (1)...(19): siRNA sense strand
aagcaagaacaguuuauga

SEQ ID NO: 724594 - RNA, 19 nt, Homo sapiens
  misc_RNA (1)...(19): siRNA sense strand
acucuugucuuuggaaaug

SEQ ID NO: 724595 - RNA, 19 nt, Homo sapiens
  misc_RNA (1)...(19): siRNA sense strand
gagcauugaccagaggaaa

SEQ ID NO: 724596 - RNA, 19 nt, Homo sapiens
  misc_RNA (1)...(19): siRNA sense strand
gcaguuaugaagaacacuu

SEQ ID NO: 724597 - RNA, 19 nt, Homo sapiens
  misc_RNA (1)...(19): siRNA sense strand
gaauuauugccuugucugu

SEQ ID NO: 724598 - RNA, 19 nt, Homo sapiens
  misc_RNA (1)...(19): siRNA sense strand
ggugggagcgccaaguuuc

SEQ ID NO: 724599 - RNA, 19 nt, Homo sapiens
  misc_RNA (1)...(19): siRNA sense strand
gaugacccaccuccuucua

SEQ ID NO: 724600 - RNA, 19 nt, Homo sapiens
  misc_RNA (1)...(19): siRNA sense strand
auuauugccuugucuguca

SEQ ID NO: 724601 - RNA, 19 nt, Homo sapiens
  misc_RNA (1)...(19): siRNA sense strand
ggagcgccaaguuuccuuu

SEQ ID NO: 724602 - RNA, 19 nt, Homo sapiens
  misc_RNA (1)...(19): siRNA sense strand
cucaaagacuaccagaaug

SEQ ID NO: 724603 - RNA, 19 nt, Homo sapiens
  misc_RNA (1)...(19): siRNA sense strand
caagcaagaacaguuuaug

SEQ ID NO: 724604 - RNA, 19 nt, Homo sapiens
  misc_RNA (1)...(19): siRNA sense strand
uaacaccaacuaugauguc

SEQ ID NO: 724605 - RNA, 19 nt, Homo sapiens
  misc_RNA (1)...(19): siRNA sense strand
cugucaagauccgcaguua

SEQ ID NO: 724606 - RNA, 19 nt, Homo sapiens
  misc_RNA (1)...(19): siRNA sense strand
uggaaauggccaacaagaa

SEQ ID NO: 724607 - RNA, 19 nt, Homo sapiens
  misc_RNA (1)...(19): siRNA sense strand
gcugaagaagcgaagaaga

SEQ ID NO: 724608 - RNA, 19 nt, Homo sapiens
  misc_RNA (1)...(19): siRNA sense strand
cguggaggacgcugaguuu

SEQ ID NO: 724609 - RNA, 19 nt, Homo sapiens
  misc_RNA (1)...(19): siRNA sense strand
uggaggacgcugaguuuga

SEQ ID NO: 724610 - RNA, 19 nt, Homo sapiens
  misc_RNA (1)...(19): siRNA sense strand
agcaagaacaguuuaugaa

SEQ ID NO: 724611 - RNA, 19 nt, Homo sapiens
  misc_RNA (1)...(19): siRNA sense strand
guaacaccaacuaugaugu

SEQ ID NO: 724612 - RNA, 19 nt, Homo sapiens
  misc_RNA (1)...(19): siRNA sense strand
aaaggacaaagcccacaaa

SEQ ID NO: 724613 - RNA, 19 nt, Homo sapiens
  misc_RNA (1)...(19): siRNA sense strand
agaaacaucgaaaggacaa

SEQ ID NO: 724614 - RNA, 19 nt, Homo sapiens
  misc_RNA (1)...(19): siRNA sense strand
ggauaugucguccggaaac

SEQ ID NO: 724615 - RNA, 19 nt, Homo sapiens
  misc_RNA (1)...(19): siRNA sense strand
aaaucaagcaagaacaguu

SEQ ID NO: 724616 - RNA, 19 nt, Homo sapiens
  misc_RNA (1)...(19): siRNA sense strand
ccaaguuuccuuucaacca

SEQ ID NO: 724617 - RNA, 19 nt, Homo sapiens
  misc_RNA (1)...(19): siRNA sense strand
ccagacagcccugccaaag

SEQ ID NO: 724618 - RNA, 19 nt, Homo sapiens
  misc_RNA (1)...(19): siRNA sense strand
gaacacuuggagaaacauc

SEQ ID NO: 724619 - RNA, 19 nt, Homo sapiens
  misc_RNA (1)...(19): siRNA sense strand
ucaagauccgcaguuauga

SEQ ID NO: 724620 - RNA, 19 nt, Homo sapiens
  misc_RNA (1)...(19): siRNA sense strand
ucaagcaagaacaguuuau

SEQ ID NO: 724621 - RNA, 19 nt, Homo sapiens
  misc_RNA (1)...(19): siRNA sense strand
ggaauugagaagguugaug

SEQ ID NO: 724622 - RNA, 19 nt, Homo sapiens
  misc_RNA (1)...(19): siRNA sense strand
cguaacaccaacuaugaug

SEQ ID NO: 724623 - RNA, 19 nt, Homo sapiens
  misc_RNA (1)...(19): siRNA sense strand
caaagcccacaaacgcuau

SEQ ID NO: 724624 - RNA, 19 nt, Homo sapiens
  misc_RNA (1)...(19): siRNA sense strand
augaagaacacuuggagaa

SEQ ID NO: 724625 - RNA, 19 nt, Homo sapiens
  misc_RNA (1)...(19): siRNA sense strand
ucccuggaggcucgaauua

SEQ ID NO: 724626 - RNA, 19 nt, Homo sapiens
  misc_RNA (1)...(19): siRNA sense strand
uccguaacaccaacuauga

SEQ ID NO: 724627 - RNA, 19 nt, Homo sapiens
  misc_RNA (1)...(19): siRNA sense strand
aaacgcuaucugcuaauga

SEQ ID NO: 724628 - RNA, 19 nt, Homo sapiens
  misc_RNA (1)...(19): siRNA sense strand
caaagacuaccagaauguc

SEQ ID NO: 724629 - RNA, 19 nt, Homo sapiens
  misc_RNA (1)...(19): siRNA sense strand
ugccaaagccauaccaaag

SEQ ID NO: 724630 - RNA, 19 nt, Homo sapiens
  misc_RNA (1)...(19): siRNA sense strand
aagcgaagaagagccuuaa

SEQ ID NO: 724631 - RNA, 19 nt, Homo sapiens
  misc_RNA (1)...(19): siRNA sense strand
gaaggacucucgucucaug

SEQ ID NO: 724632 - RNA, 19 nt, Homo sapiens
  misc_RNA (1)...(19): siRNA sense strand
guaaauacauagcuucuca

SEQ ID NO: 724633 - RNA, 19 nt, Homo sapiens
  misc_RNA (1)...(19): siRNA sense strand
ggagaugacaaacugauua

SEQ ID NO: 724634 - RNA, 19 nt, Homo sapiens
  misc_RNA (1)...(19): siRNA sense strand
gcagauggccggagaagaa

SEQ ID NO: 724635 - RNA, 19 nt, Homo sapiens
  misc_RNA (1)...(19): siRNA sense strand
gauauuuccuggacucuga

SEQ ID NO: 724636 - RNA, 19 nt, Homo sapiens
  misc_RNA (1)...(19): siRNA sense strand
gaagauaucaggaagaauc

SEQ ID NO: 724637 - RNA, 19 nt, Homo sapiens
  misc_RNA (1)...(19): siRNA sense strand
gugguaagcuugccaaugu

SEQ ID NO: 724638 - RNA, 19 nt, Homo sapiens
  misc_RNA (1)...(19): siRNA sense strand
gaaauucuagcuacucuga

SEQ ID NO: 724639 - RNA, 19 nt, Homo sapiens
  misc_RNA (1)...(19): siRNA sense strand
gcgauucugucaauaaaga

SEQ ID NO: 724640 - RNA, 19 nt, Homo sapiens
  misc_RNA (1)...(19): siRNA sense strand
ggauaacacugucgucauc

SEQ ID NO: 724641 - RNA, 19 nt, Homo sapiens
  misc_RNA (1)...(19): siRNA sense strand
gggaaggcguacugcuuua

SEQ ID NO: 724642 - RNA, 19 nt, Homo sapiens
  misc_RNA (1)...(19): siRNA sense strand
gcacugaagcugccaauuc

SEQ ID NO: 724643 - RNA, 19 nt, Homo sapiens
  misc_RNA (1)...(19): siRNA sense strand
gcaccaugcucucuucuca

SEQ ID NO: 724644 - RNA, 19 nt, Homo sapiens
  misc_RNA (1)...(19): siRNA sense strand
gcuguaaaguucccagaaa

SEQ ID NO: 724645 - RNA, 19 nt, Homo sapiens
  misc_RNA (1)...(19): siRNA sense strand
guugugaucuggaauaugu

SEQ ID NO: 724646 - RNA, 19 nt, Homo sapiens
  misc_RNA (1)...(19): siRNA sense strand
ccagauggacaaucacuua

SEQ ID NO: 724647 - RNA, 19 nt, Homo sapiens
  misc_RNA (1)...(19): siRNA sense strand
ccacagccgucauugagaa

SEQ ID NO: 724648 - RNA, 19 nt, Homo sapiens
  misc_RNA (1)...(19): siRNA sense strand
cgacagcuguggaaagguu

SEQ ID NO: 724649 - RNA, 19 nt, Homo sapiens
  misc_RNA (1)...(19): siRNA sense strand
ggaagguugugaucuggaa

SEQ ID NO: 724650 - RNA, 19 nt, Homo sapiens
  misc_RNA (1)...(19): siRNA sense strand
agagggagcugcugaagga

SEQ ID NO: 724651 - RNA, 19 nt, Homo sapiens
  misc_RNA (1)...(19): siRNA sense strand
ggacggcucuguggcauuc

SEQ ID NO: 724652 - RNA, 19 nt, Homo sapiens
  misc_RNA (1)...(19): siRNA sense strand
gaauaccgacuucgagaaa

SEQ ID NO: 724653 - RNA, 19 nt, Homo sapiens
  misc_RNA (1)...(19): siRNA sense strand
caagaugcuuugccagaug

SEQ ID NO: 724654 - RNA, 19 nt, Homo sapiens
  misc_RNA (1)...(19): siRNA sense strand
caagaucgaacccaugaaa

SEQ ID NO: 724655 - RNA, 19 nt, Homo sapiens
  misc_RNA (1)...(19): siRNA sense strand
gacaaucacuuagcaugug

SEQ ID NO: 724656 - RNA, 19 nt, Homo sapiens
  misc_RNA (1)...(19): siRNA sense strand
auaccgacuucgagaaaua

SEQ ID NO: 724657 - RNA, 19 nt, Homo sapiens
  misc_RNA (1)...(19): siRNA sense strand
gcuccgauccuuccaugua

SEQ ID NO: 724658 - RNA, 19 nt, Homo sapiens
  misc_RNA (1)...(19): siRNA sense strand
caaacagugggauguauuu

SEQ ID NO: 724659 - RNA, 19 nt, Homo sapiens
  misc_RNA (1)...(19): siRNA sense strand
gcaagagccuagccaucau

SEQ ID NO: 724660 - RNA, 19 nt, Homo sapiens
  misc_RNA (1)...(19): siRNA sense strand
agaaauaugcaaggacuua

SEQ ID NO: 724661 - RNA, 19 nt, Homo sapiens
  misc_RNA (1)...(19): siRNA sense strand
cggaaggacucucgucuca

SEQ ID NO: 724662 - RNA, 19 nt, Homo sapiens
  misc_RNA (1)...(19): siRNA sense strand
cgagaaggaugaaaauauu

SEQ ID NO: 724663 - RNA, 19 nt, Homo sapiens
  misc_RNA (1)...(19): siRNA sense strand
cagcauggaaucccaguaa

SEQ ID NO: 724664 - RNA, 19 nt, Homo sapiens
  misc_RNA (1)...(19): siRNA sense strand
gcaaggaccgcucgcuuuc

SEQ ID NO: 724665 - RNA, 19 nt, Homo sapiens
  misc_RNA (1)...(19): siRNA sense strand
gauggacaaucacuuagca

SEQ ID NO: 724666 - RNA, 19 nt, Homo sapiens
  misc_RNA (1)...(19): siRNA sense strand
gaagaaacaaguugagacu

SEQ ID NO: 724667 - RNA, 19 nt, Homo sapiens
  misc_RNA (1)...(19): siRNA sense strand
ggacaaucacuuagcaugu

SEQ ID NO: 724668 - RNA, 19 nt, Homo sapiens
  misc_RNA (1)...(19): siRNA sense strand
uagcaugugugaacugugu

SEQ ID NO: 724669 - RNA, 19 nt, Homo sapiens
  misc_RNA (1)...(19): siRNA sense strand
aaaggaugcugucaguguu

SEQ ID NO: 724670 - RNA, 19 nt, Homo sapiens
  misc_RNA (1)...(19): siRNA sense strand
gagcagaaccuugugaaag

SEQ ID NO: 724671 - RNA, 19 nt, Homo sapiens
  misc_RNA (1)...(19): siRNA sense strand
auugucaccuucuguguua

SEQ ID NO: 724672 - RNA, 19 nt, Homo sapiens
  misc_RNA (1)...(19): siRNA sense strand
gcaggcgauucugucaaua

SEQ ID NO: 724673 - RNA, 19 nt, Homo sapiens
  misc_RNA (1)...(19): siRNA sense strand
gauggaagaccaacaugga

SEQ ID NO: 724674 - RNA, 19 nt, Homo sapiens
  misc_RNA (1)...(19): siRNA sense strand
gaacgggagggauggaaga

SEQ ID NO: 724675 - RNA, 19 nt, Homo sapiens
  misc_RNA (1)...(19): siRNA sense strand
guaaaguucccagaaauuc

SEQ ID NO: 724676 - RNA, 19 nt, Homo sapiens
  misc_RNA (1)...(19): siRNA sense strand
gcugugacguggugugugu

SEQ ID NO: 724677 - RNA, 19 nt, Homo sapiens
  misc_RNA (1)...(19): siRNA sense strand
caccagcacuugcacugaa

SEQ ID NO: 724678 - RNA, 19 nt, Homo sapiens
  misc_RNA (1)...(19): siRNA sense strand
gcuaaggcuuccucacugu

SEQ ID NO: 724679 - RNA, 19 nt, Homo sapiens
  misc_RNA (1)...(19): siRNA sense strand
agcagaaccuugugaaaga

SEQ ID NO: 724680 - RNA, 19 nt, Homo sapiens
  misc_RNA (1)...(19): siRNA sense strand
accaugcucucuucucaua

SEQ ID NO: 724681 - RNA, 19 nt, Homo sapiens
  misc_RNA (1)...(19): siRNA sense strand
gaugacaaacugauuaugg

SEQ ID NO: 724682 - RNA, 19 nt, Homo sapiens
  misc_RNA (1)...(19): siRNA sense strand
ugacagcgaugagaaaguc

SEQ ID NO: 724683 - RNA, 19 nt, Homo sapiens
  misc_RNA (1)...(19): siRNA sense strand
gcaggauucugggaagguu

SEQ ID NO: 724684 - RNA, 19 nt, Homo sapiens
  misc_RNA (1)...(19): siRNA sense strand
caugggacccuguugguaa

SEQ ID NO: 724685 - RNA, 19 nt, Homo sapiens
  misc_RNA (1)...(19): siRNA sense strand
caucuggaaugcuguaaag

SEQ ID NO: 724686 - RNA, 19 nt, Homo sapiens
  misc_RNA (1)...(19): siRNA sense strand
gagaugacaaacugauuau

SEQ ID NO: 724687 - RNA, 19 nt, Homo sapiens
  misc_RNA (1)...(19): siRNA sense strand
guucgcaacuggaggacaa

SEQ ID NO: 724688 - RNA, 19 nt, Homo sapiens
  misc_RNA (1)...(19): siRNA sense strand
gcagugacagcgaugagaa

SEQ ID NO: 724689 - RNA, 19 nt, Homo sapiens
  misc_RNA (1)...(19): siRNA sense strand
ugaaugggcugggcaucuu

SEQ ID NO: 724690 - RNA, 19 nt, Homo sapiens
  misc_RNA (1)...(19): siRNA sense strand
gaagcgggcuacguacauc

SEQ ID NO: 724691 - RNA, 19 nt, Homo sapiens
  misc_RNA (1)...(19): siRNA sense strand
cauggaaucccaguaauga

SEQ ID NO: 724692 - RNA, 19 nt, Homo sapiens
  misc_RNA (1)...(19): siRNA sense strand
gggacccuguugguaaaua

SEQ ID NO: 724693 - RNA, 19 nt, Homo sapiens
  misc_RNA (1)...(19): siRNA sense strand
ggaaggcguacugcuuuaa

SEQ ID NO: 724694 - RNA, 19 nt, Homo sapiens
  misc_RNA (1)...(19): siRNA sense strand
uagagacaguagagaagaa

SEQ ID NO: 724695 - RNA, 19 nt, Homo sapiens
  misc_RNA (1)...(19): siRNA sense strand
uccaugaacuguuugacaa

SEQ ID NO: 724696 - RNA, 19 nt, Homo sapiens
  misc_RNA (1)...(19): siRNA sense strand
agaccaacauggacuuugu

SEQ ID NO: 724697 - RNA, 19 nt, Homo sapiens
  misc_RNA (1)...(19): siRNA sense strand
gaagaccaacauggacuuu

SEQ ID NO: 724698 - RNA, 19 nt, Homo sapiens
  misc_RNA (1)...(19): siRNA sense strand
gaggaacgacccauguguu

SEQ ID NO: 724699 - RNA, 19 nt, Homo sapiens
  misc_RNA (1)...(19): siRNA sense strand
ucaggaccguuagccauaa

SEQ ID NO: 724700 - RNA, 19 nt, Homo sapiens
  misc_RNA (1)...(19): siRNA sense strand
gcauggaaucccaguaaug

SEQ ID NO: 724701 - RNA, 19 nt, Homo sapiens
  misc_RNA (1)...(19): siRNA sense strand
ccaggaggaugacgagaag

SEQ ID NO: 724702 - RNA, 19 nt, Homo sapiens
  misc_RNA (1)...(19): siRNA sense strand
ggcaagagccuagccauca

SEQ ID NO: 724703 - RNA, 19 nt, Homo sapiens
  misc_RNA (1)...(19): siRNA sense strand
ggucaaacagugggaugua

SEQ ID NO: 724704 - RNA, 19 nt, Homo sapiens
  misc_RNA (1)...(19): siRNA sense strand
ggaagagggagcugcugaa

SEQ ID NO: 724705 - RNA, 19 nt, Homo sapiens
  misc_RNA (1)...(19): siRNA sense strand
gcugugcucaggaccguua

SEQ ID NO: 724706 - RNA, 19 nt, Homo sapiens
  misc_RNA (1)...(19): siRNA sense strand
gaaggcguacugcuuuaau

SEQ ID NO: 724707 - RNA, 19 nt, Homo sapiens
  misc_RNA (1)...(19): siRNA sense strand
caguagagaagaagaagaa

SEQ ID NO: 724708 - RNA, 19 nt, Homo sapiens
  misc_RNA (1)...(19): siRNA sense strand
uugaagauaucaggaagaa

SEQ ID NO: 724709 - RNA, 19 nt, Homo sapiens
  misc_RNA (1)...(19): siRNA sense strand
ccaagaugcuuugccagau

SEQ ID NO: 724710 - RNA, 19 nt, Homo sapiens
  misc_RNA (1)...(19): siRNA sense strand
guguucggcuccaguggua

SEQ ID NO: 724711 - RNA, 19 nt, Homo sapiens
  misc_RNA (1)...(19): siRNA sense strand
gacaggugguuguggugaa

SEQ ID NO: 724712 - RNA, 19 nt, Homo sapiens
  misc_RNA (1)...(19): siRNA sense strand
cacaauggcaagccgauuu

SEQ ID NO: 724713 - RNA, 19 nt, Homo sapiens
  misc_RNA (1)...(19): siRNA sense strand
cuggaaugcuguaaaguuc

SEQ ID NO: 724714 - RNA, 19 nt, Homo sapiens
  misc_RNA (1)...(19): siRNA sense strand
ccagugggagucaacagua

SEQ ID NO: 724715 - RNA, 19 nt, Homo sapiens
  misc_RNA (1)...(19): siRNA sense strand
gcagaaccuugugaaagag

SEQ ID NO: 724716 - RNA, 19 nt, Homo sapiens
  misc_RNA (1)...(19): siRNA sense strand
gaggagaagagccgcauuc

SEQ ID NO: 724717 - RNA, 19 nt, Homo sapiens
  misc_RNA (1)...(19): siRNA sense strand
gguggagaaugaagugaca

SEQ ID NO: 724718 - RNA, 19 nt, Homo sapiens
  misc_RNA (1)...(19): siRNA sense strand
ucacagagcgguccaaagc

SEQ ID NO: 724719 - RNA, 19 nt, Homo sapiens
  misc_RNA (1)...(19): siRNA sense strand
gcauucaccaguccaccua

SEQ ID NO: 724720 - RNA, 19 nt, Homo sapiens
  misc_RNA (1)...(19): siRNA sense strand
aaacagugggauguauuua

SEQ ID NO: 724721 - RNA, 19 nt, Homo sapiens
  misc_RNA (1)...(19): siRNA sense strand
guugguaaauacauagcuu

SEQ ID NO: 724722 - RNA, 19 nt, Homo sapiens
  misc_RNA (1)...(19): siRNA sense strand
aaagacaguaugaaugcua

SEQ ID NO: 724723 - RNA, 19 nt, Homo sapiens
  misc_RNA (1)...(19): siRNA sense strand
gucaauaaagacaguauga

SEQ ID NO: 724724 - RNA, 19 nt, Homo sapiens
  misc_RNA (1)...(19): siRNA sense strand
aggcgauucugucaauaaa

SEQ ID NO: 724725 - RNA, 19 nt, Homo sapiens
  misc_RNA (1)...(19): siRNA sense strand
gggcugggcaucuugguau

SEQ ID NO: 724726 - RNA, 19 nt, Homo sapiens
  misc_RNA (1)...(19): siRNA sense strand
ggaagaccaacauggacuu

SEQ ID NO: 724727 - RNA, 19 nt, Homo sapiens
  misc_RNA (1)...(19): siRNA sense strand
ggaggaacgacccaugugu

SEQ ID NO: 724728 - RNA, 19 nt, Homo sapiens
  misc_RNA (1)...(19): siRNA sense strand
ggacccuguugguaaauac

SEQ ID NO: 724729 - RNA, 19 nt, Homo sapiens
  misc_RNA (1)...(19): siRNA sense strand
ucaaacagugggauguauu

SEQ ID NO: 724730 - RNA, 19 nt, Homo sapiens
  misc_RNA (1)...(19): siRNA sense strand
ggaagugauaugacgguau

SEQ ID NO: 724731 - RNA, 19 nt, Homo sapiens
  misc_RNA (1)...(19): siRNA sense strand
gaagaaagcauuaaugaug

SEQ ID NO: 724732 - RNA, 19 nt, Homo sapiens
  misc_RNA (1)...(19): siRNA sense strand
uaauagaucuucagcagua

SEQ ID NO: 724733 - RNA, 19 nt, Homo sapiens
  misc_RNA (1)...(19): siRNA sense strand
gcagagaccgaacuuauua

SEQ ID NO: 724734 - RNA, 19 nt, Homo sapiens
  misc_RNA (1)...(19): siRNA sense strand
gaaaggagaugcacacagu

SEQ ID NO: 724735 - RNA, 19 nt, Homo sapiens
  misc_RNA (1)...(19): siRNA sense strand
caacauuccugaacuugua

SEQ ID NO: 724736 - RNA, 19 nt, Homo sapiens
  misc_RNA (1)...(19): siRNA sense strand
gagauguggugaagauuua

SEQ ID NO: 724737 - RNA, 19 nt, Homo sapiens
  misc_RNA (1)...(19): siRNA sense strand
caaaggccuuccugauuua

SEQ ID NO: 724738 - RNA, 19 nt, Homo sapiens
  misc_RNA (1)...(19): siRNA sense strand
gcaaagcacaucaagauuu

SEQ ID NO: 724739 - RNA, 19 nt, Homo sapiens
  misc_RNA (1)...(19): siRNA sense strand
gaaacauuaucacgacuuu

SEQ ID NO: 724740 - RNA, 19 nt, Homo sapiens
  misc_RNA (1)...(19): siRNA sense strand
acaaaggccuuccugauuu

SEQ ID NO: 724741 - RNA, 19 nt, Homo sapiens
  misc_RNA (1)...(19): siRNA sense strand
uaauggaacuuguggagua

SEQ ID NO: 724742 - RNA, 19 nt, Homo sapiens
  misc_RNA (1)...(19): siRNA sense strand
ucagggagauggugaaauu

SEQ ID NO: 724743 - RNA, 19 nt, Homo sapiens
  misc_RNA (1)...(19): siRNA sense strand
gaaauggcuuugucuaaca

SEQ ID NO: 724744 - RNA, 19 nt, Homo sapiens
  misc_RNA (1)...(19): siRNA sense strand
gaaaggagauguggugaag

SEQ ID NO: 724745 - RNA, 19 nt, Homo sapiens
  misc_RNA (1)...(19): siRNA sense strand
ggugauaacuaugaaauga

SEQ ID NO: 724746 - RNA, 19 nt, Homo sapiens
  misc_RNA (1)...(19): siRNA sense strand
gcauuugacuuguuugaug

SEQ ID NO: 724747 - RNA, 19 nt, Homo sapiens
  misc_RNA (1)...(19): siRNA sense strand
gagaaaaggugauaacuau

SEQ ID NO: 724748 - RNA, 19 nt, Homo sapiens
  misc_RNA (1)...(19): siRNA sense strand
ugaaggacuuggcacaaua

SEQ ID NO: 724749 - RNA, 19 nt, Homo sapiens
  misc_RNA (1)...(19): siRNA sense strand
aggcauaucuucuuauuug

SEQ ID NO: 724750 - RNA, 19 nt, Homo sapiens
  misc_RNA (1)...(19): siRNA sense strand
gcagugaucguauguaaga

SEQ ID NO: 724751 - RNA, 19 nt, Homo sapiens
  misc_RNA (1)...(19): siRNA sense strand
gcaauuagcauuaaguaca

SEQ ID NO: 724752 - RNA, 19 nt, Homo sapiens
  misc_RNA (1)...(19): siRNA sense strand
agaaauggcuagaacaguu

SEQ ID NO: 724753 - RNA, 19 nt, Homo sapiens
  misc_RNA (1)...(19): siRNA sense strand
agaccgaacuuauuaauag

SEQ ID NO: 724754 - RNA, 19 nt, Homo sapiens
  misc_RNA (1)...(19): siRNA sense strand
caagagauaugagagaguu

SEQ ID NO: 724755 - RNA, 19 nt, Homo sapiens
  misc_RNA (1)...(19): siRNA sense strand
gcgaagaacuccuaaacag

SEQ ID NO: 724756 - RNA, 19 nt, Homo sapiens
  misc_RNA (1)...(19): siRNA sense strand
acacaaagaugagugcaaa

SEQ ID NO: 724757 - RNA, 19 nt, Homo sapiens
  misc_RNA (1)...(19): siRNA sense strand
gggcagaaauuuagcaucu

SEQ ID NO: 724758 - RNA, 19 nt, Homo sapiens
  misc_RNA (1)...(19): siRNA sense strand
caaagagucaggagaauau

SEQ ID NO: 724759 - RNA, 19 nt, Homo sapiens
  misc_RNA (1)...(19): siRNA sense strand
gaaauggcuagaacaguuu

SEQ ID NO: 724760 - RNA, 19 nt, Homo sapiens
  misc_RNA (1)...(19): siRNA sense strand
ugagagaguuguccuuguu

SEQ ID NO: 724761 - RNA, 19 nt, Homo sapiens
  misc_RNA (1)...(19): siRNA sense strand
gauccagguuuaccaaaga

SEQ ID NO: 724762 - RNA, 19 nt, Homo sapiens
  misc_RNA (1)...(19): siRNA sense strand
acagguggauccagguuua

SEQ ID NO: 724763 - RNA, 19 nt, Homo sapiens
  misc_RNA (1)...(19): siRNA sense strand
cagaagaaagcauuaauga

SEQ ID NO: 724764 - RNA, 19 nt, Homo sapiens
  misc_RNA (1)...(19): siRNA sense strand
ggagauguggugaagauuu

SEQ ID NO: 724765 - RNA, 19 nt, Homo sapiens
  misc_RNA (1)...(19): siRNA sense strand
uaacauaagaccagacuau

SEQ ID NO: 724766 - RNA, 19 nt, Homo sapiens
  misc_RNA (1)...(19): siRNA sense strand
ggacucggcucagguguuc

SEQ ID NO: 724767 - RNA, 19 nt, Homo sapiens
  misc_RNA (1)...(19): siRNA sense strand
ccaaagaugcaggucauua

SEQ ID NO: 724768 - RNA, 19 nt, Homo sapiens
  misc_RNA (1)...(19): siRNA sense strand
gagcaaauaaugggaaauu

SEQ ID NO: 724769 - RNA, 19 nt, Homo sapiens
  misc_RNA (1)...(19): siRNA sense strand
gaagaugucaaacugaaau

SEQ ID NO: 724770 - RNA, 19 nt, Homo sapiens
  misc_RNA (1)...(19): siRNA sense strand
gugaagauuuacacaaaga

SEQ ID NO: 724771 - RNA, 19 nt, Homo sapiens
  misc_RNA (1)...(19): siRNA sense strand
gcacaggaccaaagaguca

SEQ ID NO: 724772 - RNA, 19 nt, Homo sapiens
  misc_RNA (1)...(19): siRNA sense strand
gaaauuaagcagacagaag

SEQ ID NO: 724773 - RNA, 19 nt, Homo sapiens
  misc_RNA (1)...(19): siRNA sense strand
ucaggagaauaugcaauua

SEQ ID NO: 724774 - RNA, 19 nt, Homo sapiens
  misc_RNA (1)...(19): siRNA sense strand
ccaaaccaguagauuauuc

SEQ ID NO: 724775 - RNA, 19 nt, Homo sapiens
  misc_RNA (1)...(19): siRNA sense strand
ccacugauccgacugagaa

SEQ ID NO: 724776 - RNA, 19 nt, Homo sapiens
  misc_RNA (1)...(19): siRNA sense strand
cgaggcauuugacuuguuu

SEQ ID NO: 724777 - RNA, 19 nt, Homo sapiens
  misc_RNA (1)...(19): siRNA sense strand
caaagcacaucaagauuuu

SEQ ID NO: 724778 - RNA, 19 nt, Homo sapiens
  misc_RNA (1)...(19): siRNA sense strand
guacaauaaugaagcaaag

SEQ ID NO: 724779 - RNA, 19 nt, Homo sapiens
  misc_RNA (1)...(19): siRNA sense strand
gaaccuaaugcaagagauu

SEQ ID NO: 724780 - RNA, 19 nt, Homo sapiens
  misc_RNA (1)...(19): siRNA sense strand
ggaagcacaucagcccaaa

SEQ ID NO: 724781 - RNA, 19 nt, Homo sapiens
  misc_RNA (1)...(19): siRNA sense strand
ugcaagagauucaugauuc

SEQ ID NO: 724782 - RNA, 19 nt, Homo sapiens
  misc_RNA (1)...(19): siRNA sense strand
gagaccgaacuuauuaaua

SEQ ID NO: 724783 - RNA, 19 nt, Homo sapiens
  misc_RNA (1)...(19): siRNA sense strand
gauggugaaauucgaauaa

SEQ ID NO: 724784 - RNA, 19 nt, Homo sapiens
  misc_RNA (1)...(19): siRNA sense strand
aagaagaugucaaacugaa

SEQ ID NO: 724785 - RNA, 19 nt, Homo sapiens
  misc_RNA (1)...(19): siRNA sense strand
gaaggcaaaucugaaacug

SEQ ID NO: 724786 - RNA, 19 nt, Homo sapiens
  misc_RNA (1)...(19): siRNA sense strand
ggacugcgaagaacuccua

SEQ ID NO: 724787 - RNA, 19 nt, Homo sapiens
  misc_RNA (1)...(19): siRNA sense strand
aguacaagauagccaauaa

SEQ ID NO: 724788 - RNA, 19 nt, Homo sapiens
  misc_RNA (1)...(19): siRNA sense strand
uggcagugaucguauguaa

SEQ ID NO: 724789 - RNA, 19 nt, Homo sapiens
  misc_RNA (1)...(19): siRNA sense strand
caacagaagaaagcauuaa

SEQ ID NO: 724790 - RNA, 19 nt, Homo sapiens
  misc_RNA (1)...(19): siRNA sense strand
gaccaaagagucaggagaa

SEQ ID NO: 724791 - RNA, 19 nt, Homo sapiens
  misc_RNA (1)...(19): siRNA sense strand
gaaaaggugauaacuauga

SEQ ID NO: 724792 - RNA, 19 nt, Homo sapiens
  misc_RNA (1)...(19): siRNA sense strand
ggaaagauugguuauuuac

SEQ ID NO: 724793 - RNA, 19 nt, Homo sapiens
  misc_RNA (1)...(19): siRNA sense strand
ccaaagagucaggagaaua

SEQ ID NO: 724794 - RNA, 19 nt, Homo sapiens
  misc_RNA (1)...(19): siRNA sense strand
gaacaagggacacucaaac

SEQ ID NO: 724795 - RNA, 19 nt, Homo sapiens
  misc_RNA (1)...(19): siRNA sense strand
ucgaacaccuauagcauug

SEQ ID NO: 724796 - RNA, 19 nt, Homo sapiens
  misc_RNA (1)...(19): siRNA sense strand
gagcacacaaagaauguuu

SEQ ID NO: 724797 - RNA, 19 nt, Homo sapiens
  misc_RNA (1)...(19): siRNA sense strand
gaauaaccacucuagacaa

SEQ ID NO: 724798 - RNA, 19 nt, Homo sapiens
  misc_RNA (1)...(19): siRNA sense strand
caucaacauuccugaacuu

SEQ ID NO: 724799 - RNA, 19 nt, Homo sapiens
  misc_RNA (1)...(19): siRNA sense strand
ugaagaacauaaggacauu

SEQ ID NO: 724800 - RNA, 19 nt, Homo sapiens
  misc_RNA (1)...(19): siRNA sense strand
ugaagaagaucucuaugac

SEQ ID NO: 724801 - RNA, 19 nt, Homo sapiens
  misc_RNA (1)...(19): siRNA sense strand
gauucaugauuccauugua

SEQ ID NO: 724802 - RNA, 19 nt, Homo sapiens
  misc_RNA (1)...(19): siRNA sense strand
gcccaaaccaguagauuau

SEQ ID NO: 724803 - RNA, 19 nt, Homo sapiens
  misc_RNA (1)...(19): siRNA sense strand
cgcaguggcucauccauug

SEQ ID NO: 724804 - RNA, 19 nt, Homo sapiens
  misc_RNA (1)...(19): siRNA sense strand
agucagccaucucuaguuu

SEQ ID NO: 724805 - RNA, 19 nt, Homo sapiens
  misc_RNA (1)...(19): siRNA sense strand
gaauuugaaccaaccaguu

SEQ ID NO: 724806 - RNA, 19 nt, Homo sapiens
  misc_RNA (1)...(19): siRNA sense strand
uggugaagauuuacacaaa

SEQ ID NO: 724807 - RNA, 19 nt, Homo sapiens
  misc_RNA (1)...(19): siRNA sense strand
gcuagaacaguuugaaaug

SEQ ID NO: 724808 - RNA, 19 nt, Homo sapiens
  misc_RNA (1)...(19): siRNA sense strand
gaagaaauggcuagaacag

SEQ ID NO: 724809 - RNA, 19 nt, Homo sapiens
  misc_RNA (1)...(19): siRNA sense strand
uacaaaggccuuccugauu

SEQ ID NO: 724810 - RNA, 19 nt, Homo sapiens
  misc_RNA (1)...(19): siRNA sense strand
gaagauuuacacaaagaug

SEQ ID NO: 724811 - RNA, 19 nt, Homo sapiens
  misc_RNA (1)...(19): siRNA sense strand
gacaauuguggcagaguua

SEQ ID NO: 724812 - RNA, 19 nt, Homo sapiens
  misc_RNA (1)...(19): siRNA sense strand
gaaaggcauaucuucuuau

SEQ ID NO: 724813 - RNA, 19 nt, Homo sapiens
  misc_RNA (1)...(19): siRNA sense strand
agacaagcauaccaaacaa

SEQ ID NO: 724814 - RNA, 19 nt, Homo sapiens
  misc_RNA (1)...(19): siRNA sense strand
gaaggacuuggcacaauau

SEQ ID NO: 724815 - RNA, 19 nt, Homo sapiens
  misc_RNA (1)...(19): siRNA sense strand
ggucaaacauaccacugau

SEQ ID NO: 724816 - RNA, 19 nt, Homo sapiens
  misc_RNA (1)...(19): siRNA sense strand
cagaaacuuuggagucaau

SEQ ID NO: 724817 - RNA, 19 nt, Homo sapiens
  misc_RNA (1)...(19): siRNA sense strand
uaacuacaaggaaagauug

SEQ ID NO: 724818 - RNA, 19 nt, Homo sapiens
  misc_RNA (1)...(19): siRNA sense strand
gcaucauucucucaaggaa

SEQ ID NO: 724819 - RNA, 19 nt, Homo sapiens
  misc_RNA (1)...(19): siRNA sense strand
gaagcaaagcacaucaaga

SEQ ID NO: 724820 - RNA, 19 nt, Homo sapiens
  misc_RNA (1)...(19): siRNA sense strand
caguuucucuguuugaaga

SEQ ID NO: 724821 - RNA, 19 nt, Homo sapiens
  misc_RNA (1)...(19): siRNA sense strand
uauacgaaguuguugucua

SEQ ID NO: 724822 - RNA, 19 nt, Homo sapiens
  misc_RNA (1)...(19): siRNA sense strand
aagcaaagcacaucaagau

SEQ ID NO: 724823 - RNA, 19 nt, Homo sapiens
  misc_RNA (1)...(19): siRNA sense strand
ugaaauggcuuugucuaac

SEQ ID NO: 724824 - RNA, 19 nt, Homo sapiens
  misc_RNA (1)...(19): siRNA sense strand
gaacauaaggacauuucuc

SEQ ID NO: 724825 - RNA, 19 nt, Homo sapiens
  misc_RNA (1)...(19): siRNA sense strand
ugagacccuucgugaaauu

SEQ ID NO: 724826 - RNA, 19 nt, Homo sapiens
  misc_RNA (1)...(19): siRNA sense strand
aaugagacccuucgugaaa

SEQ ID NO: 724827 - RNA, 19 nt, Homo sapiens
  misc_RNA (1)...(19): siRNA sense strand
aaauuaagcagacagaaga

SEQ ID NO: 724828 - RNA, 19 nt, Homo sapiens
  misc_RNA (1)...(19): siRNA sense strand
auacgaaguuguugucuag

SEQ ID NO: 724829 - RNA, 19 nt, Homo sapiens
  misc_RNA (1)...(19): siRNA sense strand
ccagagaaacggaccaaug

SEQ ID NO: 724830 - RNA, 19 nt, Homo sapiens
  misc_RNA (1)...(19): siRNA sense strand
acaaggagccagaacauuc

SEQ ID NO: 724831 - RNA, 19 nt, Homo sapiens
  misc_RNA (1)...(19): siRNA sense strand
ggaauuuaaugcagaagua

SEQ ID NO: 724832 - RNA, 19 nt, Homo sapiens
  misc_RNA (1)...(19): siRNA sense strand
gccagaauguugcagauua

SEQ ID NO: 724833 - RNA, 19 nt, Homo sapiens
  misc_RNA (1)...(19): siRNA sense strand
gaagggagcuguggaugga

SEQ ID NO: 724834 - RNA, 19 nt, Homo sapiens
  misc_RNA (1)...(19): siRNA sense strand
ugaagaugcuuacaagaaa

SEQ ID NO: 724835 - RNA, 19 nt, Homo sapiens
  misc_RNA (1)...(19): siRNA sense strand
acaguucucucaauacaua

SEQ ID NO: 724836 - RNA, 19 nt, Homo sapiens
  misc_RNA (1)...(19): siRNA sense strand
ggaggugacuggugaugaa

SEQ ID NO: 724837 - RNA, 19 nt, Homo sapiens
  misc_RNA (1)...(19): siRNA sense strand
gaaagcucaugcugcuaua

SEQ ID NO: 724838 - RNA, 19 nt, Homo sapiens
  misc_RNA (1)...(19): siRNA sense strand
gagagaauccagucuauga

SEQ ID NO: 724839 - RNA, 19 nt, Homo sapiens
  misc_RNA (1)...(19): siRNA sense strand
gaacuaccacuggcaauaa

SEQ ID NO: 724840 - RNA, 19 nt, Homo sapiens
  misc_RNA (1)...(19): siRNA sense strand
ggaagaagaugaagaugcu

SEQ ID NO: 724841 - RNA, 19 nt, Homo sapiens
  misc_RNA (1)...(19): siRNA sense strand
gaugauaguucgugugaca

SEQ ID NO: 724842 - RNA, 19 nt, Homo sapiens
  misc_RNA (1)...(19): siRNA sense strand
gaauaaggccuacuuuaag

SEQ ID NO: 724843 - RNA, 19 nt, Homo sapiens
  misc_RNA (1)...(19): siRNA sense strand
agaauaaggccuacuuuaa

SEQ ID NO: 724844 - RNA, 19 nt, Homo sapiens
  misc_RNA (1)...(19): siRNA sense strand
uaagagauaccaagugaaa

SEQ ID NO: 724845 - RNA, 19 nt, Homo sapiens
  misc_RNA (1)...(19): siRNA sense strand
cagcguaacuccagacaug

SEQ ID NO: 724846 - RNA, 19 nt, Homo sapiens
  misc_RNA (1)...(19): siRNA sense strand
ccaaacgauucccugguua

SEQ ID NO: 724847 - RNA, 19 nt, Homo sapiens
  misc_RNA (1)...(19): siRNA sense strand
uggaggagauguauaagaa

SEQ ID NO: 724848 - RNA, 19 nt, Homo sapiens
  misc_RNA (1)...(19): siRNA sense strand
acagagauaucauuuguca

SEQ ID NO: 724849 - RNA, 19 nt, Homo sapiens
  misc_RNA (1)...(19): siRNA sense strand
aauaaggccuacuuuaaga

SEQ ID NO: 724850 - RNA, 19 nt, Homo sapiens
  misc_RNA (1)...(19): siRNA sense strand
aaacaguucucucaauaca

SEQ ID NO: 724851 - RNA, 19 nt, Homo sapiens
  misc_RNA (1)...(19): siRNA sense strand
gaaagcaaggaauuuaaug

SEQ ID NO: 724852 - RNA, 19 nt, Homo sapiens
  misc_RNA (1)...(19): siRNA sense strand
gaggagauguauaagaaag

SEQ ID NO: 724853 - RNA, 19 nt, Homo sapiens
  misc_RNA (1)...(19): siRNA sense strand
caaggaauuuaaugcagaa

SEQ ID NO: 724854 - RNA, 19 nt, Homo sapiens
  misc_RNA (1)...(19): siRNA sense strand
gauaccaagugaaauuuag

SEQ ID NO: 724855 - RNA, 19 nt, Homo sapiens
  misc_RNA (1)...(19): siRNA sense strand
gagaauccagucuaugaaa

SEQ ID NO: 724856 - RNA, 19 nt, Homo sapiens
  misc_RNA (1)...(19): siRNA sense strand
uuuaagagauaccaaguga

SEQ ID NO: 724857 - RNA, 19 nt, Homo sapiens
  misc_RNA (1)...(19): siRNA sense strand
gcaggcuucucaauagguu

SEQ ID NO: 724858 - RNA, 19 nt, Homo sapiens
  misc_RNA (1)...(19): siRNA sense strand
gaagaaggaucggguagcu

SEQ ID NO: 724859 - RNA, 19 nt, Homo sapiens
  misc_RNA (1)...(19): siRNA sense strand
gcauggacaagaucuauga

SEQ ID NO: 724860 - RNA, 19 nt, Homo sapiens
  misc_RNA (1)...(19): siRNA sense strand
ggaaacgcuuggugauaca

SEQ ID NO: 724861 - RNA, 19 nt, Homo sapiens
  misc_RNA (1)...(19): siRNA sense strand
agguuggccugacaaauua

SEQ ID NO: 724862 - RNA, 19 nt, Homo sapiens
  misc_RNA (1)...(19): siRNA sense strand
aagaauaaggccuacuuua

SEQ ID NO: 724863 - RNA, 19 nt, Homo sapiens
  misc_RNA (1)...(19): siRNA sense strand
gaagaugcuuacaagaaac

SEQ ID NO: 724864 - RNA, 19 nt, Homo sapiens
  misc_RNA (1)...(19): siRNA sense strand
ugauggaggagauguauaa

SEQ ID NO: 724865 - RNA, 19 nt, Homo sapiens
  misc_RNA (1)...(19): siRNA sense strand
aaaugucccuugcucagaa

SEQ ID NO: 724866 - RNA, 19 nt, Homo sapiens
  misc_RNA (1)...(19): siRNA sense strand
agagauaccaagugaaauu

SEQ ID NO: 724867 - RNA, 19 nt, Homo sapiens
  misc_RNA (1)...(19): siRNA sense strand
gagauaccaagugaaauuu

SEQ ID NO: 724868 - RNA, 19 nt, Homo sapiens
  misc_RNA (1)...(19): siRNA sense strand
gacaaacagagauaucauu

SEQ ID NO: 724869 - RNA, 19 nt, Homo sapiens
  misc_RNA (1)...(19): siRNA sense strand
agagauaucauuugucaga

SEQ ID NO: 724870 - RNA, 19 nt, Homo sapiens
  misc_RNA (1)...(19): siRNA sense strand
gauuacaugcgcuacuuaa

SEQ ID NO: 724871 - RNA, 19 nt, Homo sapiens
  misc_RNA (1)...(19): siRNA sense strand
aaaagaagcccaagaaaga

SEQ ID NO: 724872 - RNA, 19 nt, Homo sapiens
  misc_RNA (1)...(19): siRNA sense strand
gcccgcaggcuucucaaua

SEQ ID NO: 724873 - RNA, 19 nt, Homo sapiens
  misc_RNA (1)...(19): siRNA sense strand
cagauuacaugcgcuacuu

SEQ ID NO: 724874 - RNA, 19 nt, Homo sapiens
  misc_RNA (1)...(19): siRNA sense strand
cacacgaacugccaaaaua

SEQ ID NO: 724875 - RNA, 19 nt, Homo sapiens
  misc_RNA (1)...(19): siRNA sense strand
gaaacaguucucucaauac

SEQ ID NO: 724876 - RNA, 19 nt, Homo sapiens
  misc_RNA (1)...(19): siRNA sense strand
ccaaauacaggaugauagu

SEQ ID NO: 724877 - RNA, 19 nt, Homo sapiens
  misc_RNA (1)...(19): siRNA sense strand
aagguuggccugacaaauu

SEQ ID NO: 724878 - RNA, 19 nt, Homo sapiens
  misc_RNA (1)...(19): siRNA sense strand
gaaaagaagcccaagaaag

SEQ ID NO: 724879 - RNA, 19 nt, Homo sapiens
  misc_RNA (1)...(19): siRNA sense strand
ucugaaagcaaggaauuua

SEQ ID NO: 724880 - RNA, 19 nt, Homo sapiens
  misc_RNA (1)...(19): siRNA sense strand
aagaagaugaagaugcuua

SEQ ID NO: 724881 - RNA, 19 nt, Homo sapiens
  misc_RNA (1)...(19): siRNA sense strand
ggaggagauguauaagaaa

SEQ ID NO: 724882 - RNA, 19 nt, Homo sapiens
  misc_RNA (1)...(19): siRNA sense strand
uaagaauaaggccuacuuu

SEQ ID NO: 724883 - RNA, 19 nt, Homo sapiens
  misc_RNA (1)...(19): siRNA sense strand
agaugaagaugcuuacaag

SEQ ID NO: 724884 - RNA, 19 nt, Homo sapiens
  misc_RNA (1)...(19): siRNA sense strand
cggaaacgcuuggugauac

SEQ ID NO: 724885 - RNA, 19 nt, Homo sapiens
  misc_RNA (1)...(19): siRNA sense strand
aggccuacuuuaagagaua

SEQ ID NO: 724886 - RNA, 19 nt, Homo sapiens
  misc_RNA (1)...(19): siRNA sense strand
uacaugcgcuacuuaaugg

SEQ ID NO: 724887 - RNA, 19 nt, Homo sapiens
  misc_RNA (1)...(19): siRNA sense strand
uuacaugcgcuacuuaaug

SEQ ID NO: 724888 - RNA, 19 nt, Homo sapiens
  misc_RNA (1)...(19): siRNA sense strand
uaaauacaacacacccaaa

SEQ ID NO: 724889 - RNA, 19 nt, Homo sapiens
  misc_RNA (1)...(19): siRNA sense strand
gcuacuuaauggaagaaga

SEQ ID NO: 724890 - RNA, 19 nt, Homo sapiens
  misc_RNA (1)...(19): siRNA sense strand
guacaucggaagcacauca

SEQ ID NO: 724891 - RNA, 19 nt, Homo sapiens
  misc_RNA (1)...(19): siRNA sense strand
ggugacuggugaugaauac

SEQ ID NO: 724892 - RNA, 19 nt, Homo sapiens
  misc_RNA (1)...(19): siRNA sense strand
aauacaacacacccaaaua

SEQ ID NO: 724893 - RNA, 19 nt, Homo sapiens
  misc_RNA (1)...(19): siRNA sense strand
ccagaauguugcagauuac

SEQ ID NO: 724894 - RNA, 19 nt, Homo sapiens
  misc_RNA (1)...(19): siRNA sense strand
gcacaucaugggccagaau

SEQ ID NO: 724895 - RNA, 19 nt, Homo sapiens
  misc_RNA (1)...(19): siRNA sense strand
caaacgauucccugguuau

SEQ ID NO: 724896 - RNA, 19 nt, Homo sapiens
  misc_RNA (1)...(19): siRNA sense strand
gcccaagaaagaaguuaaa

SEQ ID NO: 724897 - RNA, 19 nt, Homo sapiens
  misc_RNA (1)...(19): siRNA sense strand
gagauaucauuugucagau

SEQ ID NO: 724898 - RNA, 19 nt, Homo sapiens
  misc_RNA (1)...(19): siRNA sense strand
agaaagcucaugcugcuau

SEQ ID NO: 724899 - RNA, 19 nt, Homo sapiens
  misc_RNA (1)...(19): siRNA sense strand
ggagauguauaagaaagcu

SEQ ID NO: 724900 - RNA, 19 nt, Homo sapiens
  misc_RNA (1)...(19): siRNA sense strand
acacccaaauacaggauga

SEQ ID NO: 724901 - RNA, 19 nt, Homo sapiens
  misc_RNA (1)...(19): siRNA sense strand
ucaauagguuuggcaugga

SEQ ID NO: 724902 - RNA, 19 nt, Homo sapiens
  misc_RNA (1)...(19): siRNA sense strand
aaagaagcccaagaaagaa

SEQ ID NO: 724903 - RNA, 19 nt, Homo sapiens
  misc_RNA (1)...(19): siRNA sense strand
gaugaagaugcuuacaaga

SEQ ID NO: 724904 - RNA, 19 nt, Homo sapiens
  misc_RNA (1)...(19): siRNA sense strand
agaacuaccacuggcaaua

SEQ ID NO: 724905 - RNA, 19 nt, Homo sapiens
  misc_RNA (1)...(19): siRNA sense strand
gacuggugaugaauacaau

SEQ ID NO: 724906 - RNA, 19 nt, Homo sapiens
  misc_RNA (1)...(19): siRNA sense strand
gaagguuggccugacaaau

SEQ ID NO: 724907 - RNA, 19 nt, Homo sapiens
  misc_RNA (1)...(19): siRNA sense strand
acgagagaauccagucuau

SEQ ID NO: 724908 - RNA, 19 nt, Homo sapiens
  misc_RNA (1)...(19): siRNA sense strand
aaauacaggaugauaguuc

SEQ ID NO: 724909 - RNA, 19 nt, Homo sapiens
  misc_RNA (1)...(19): siRNA sense strand
gguuuggcauggacaagau

SEQ ID NO: 724910 - RNA, 19 nt, Homo sapiens
  misc_RNA (1)...(19): siRNA sense strand
gaucuaugaaggccaagug

SEQ ID NO: 724911 - RNA, 19 nt, Homo sapiens
  misc_RNA (1)...(19): siRNA sense strand
gggccagaauguugcagau

SEQ ID NO: 724912 - RNA, 19 nt, Homo sapiens
  misc_RNA (1)...(19): siRNA sense strand
ucacaguaccaaacgauuc

SEQ ID NO: 724913 - RNA, 19 nt, Homo sapiens
  misc_RNA (1)...(19): siRNA sense strand
cugaaagcaaggaauuuaa

SEQ ID NO: 724914 - RNA, 19 nt, Homo sapiens
  misc_RNA (1)...(19): siRNA sense strand
gagguggaaccgucccaaa

SEQ ID NO: 724915 - RNA, 19 nt, Homo sapiens
  misc_RNA (1)...(19): siRNA sense strand
ugauuauuaugcucggaaa

SEQ ID NO: 724916 - RNA, 19 nt, Homo sapiens
  misc_RNA (1)...(19): siRNA sense strand
augaagaugcuuacaagaa

SEQ ID NO: 724917 - RNA, 19 nt, Homo sapiens
  misc_RNA (1)...(19): siRNA sense strand
aaauacaacacacccaaau

SEQ ID NO: 724918 - RNA, 19 nt, Homo sapiens
  misc_RNA (1)...(19): siRNA sense strand
caucaugggccagaauguu

SEQ ID NO: 724919 - RNA, 19 nt, Homo sapiens
  misc_RNA (1)...(19): siRNA sense strand
acgauucccugguuaugau

SEQ ID NO: 724920 - RNA, 19 nt, Homo sapiens
  misc_RNA (1)...(19): siRNA sense strand
gcgggcugcugagagcuaa

SEQ ID NO: 724921 - RNA, 19 nt, Homo sapiens
  misc_RNA (1)...(19): siRNA sense strand
uuaagaauaaggccuacuu

SEQ ID NO: 724922 - RNA, 19 nt, Homo sapiens
  misc_RNA (1)...(19): siRNA sense strand
caaauacaggaugauaguu

SEQ ID NO: 724923 - RNA, 19 nt, Homo sapiens
  misc_RNA (1)...(19): siRNA sense strand
cccgcaggcuucucaauag

SEQ ID NO: 724924 - RNA, 19 nt, Homo sapiens
  misc_RNA (1)...(19): siRNA sense strand
uaaggccuacuuuaagaga

SEQ ID NO: 724925 - RNA, 19 nt, Homo sapiens
  misc_RNA (1)...(19): siRNA sense strand
guuaugauucugaaagcaa

SEQ ID NO: 724926 - RNA, 19 nt, Homo sapiens
  misc_RNA (1)...(19): siRNA sense strand
ugacuggugaugaauacaa

SEQ ID NO: 724927 - RNA, 19 nt, Homo sapiens
  misc_RNA (1)...(19): siRNA sense strand
aacuaccacuggcaauaaa

SEQ ID NO: 724928 - RNA, 19 nt, Homo sapiens
  misc_RNA (1)...(19): siRNA sense strand
ucggaaacgcuuggugaua

SEQ ID NO: 724929 - RNA, 19 nt, Homo sapiens
  misc_RNA (1)...(19): siRNA sense strand
gaagaugaagaugcuuaca

SEQ ID NO: 724930 - RNA, 19 nt, Homo sapiens
  misc_RNA (1)...(19): siRNA sense strand
cuuaauggaagaagaugaa

SEQ ID NO: 724931 - RNA, 19 nt, Homo sapiens
  misc_RNA (1)...(19): siRNA sense strand
ccaacugccuggaggauga

SEQ ID NO: 724932 - RNA, 19 nt, Homo sapiens
  misc_RNA (1)...(19): siRNA sense strand
caacaucauccaagacuuc

SEQ ID NO: 724933 - RNA, 19 nt, Homo sapiens
  misc_RNA (1)...(19): siRNA sense strand
gcacagacaagccuuacuc

SEQ ID NO: 724934 - RNA, 19 nt, Homo sapiens
  misc_RNA (1)...(19): siRNA sense strand
cauccaagacuucuacaau

SEQ ID NO: 724935 - RNA, 19 nt, Homo sapiens
  misc_RNA (1)...(19): siRNA sense strand
ugggagggccuauggauga

SEQ ID NO: 724936 - RNA, 19 nt, Homo sapiens
  misc_RNA (1)...(19): siRNA sense strand
gggagggccuauggaugaa

SEQ ID NO: 724937 - RNA, 19 nt, Homo sapiens
  misc_RNA (1)...(19): siRNA sense strand
ggacggcccacaacaucau

SEQ ID NO: 724938 - RNA, 19 nt, Homo sapiens
  misc_RNA (1)...(19): siRNA sense strand
cccacaacaucauccaaga

SEQ ID NO: 724939 - RNA, 19 nt, Homo sapiens
  misc_RNA (1)...(19): siRNA sense strand
gccaaggccaagaccauga

SEQ ID NO: 724940 - RNA, 19 nt, Homo sapiens
  misc_RNA (1)...(19): siRNA sense strand
gggcgugguguuccuguug

SEQ ID NO: 724941 - RNA, 19 nt, Homo sapiens
  misc_RNA (1)...(19): siRNA sense strand
ugccagcaacuacguguaa

SEQ ID NO: 724942 - RNA, 19 nt, Homo sapiens
  misc_RNA (1)...(19): siRNA sense strand
gaaagcgccaaggccaaga

SEQ ID NO: 724943 - RNA, 19 nt, Homo sapiens
  misc_RNA (1)...(19): siRNA sense strand
auccaagacuucuacaauc

SEQ ID NO: 724944 - RNA, 19 nt, Homo sapiens
  misc_RNA (1)...(19): siRNA sense strand
gagggccuauggaugaacu

SEQ ID NO: 724945 - RNA, 19 nt, Homo sapiens
  misc_RNA (1)...(19): siRNA sense strand
cuucaucggcagcaacauu

SEQ ID NO: 724946 - RNA, 19 nt, Homo sapiens
  misc_RNA (1)...(19): siRNA sense strand
acaacaucauccaagacuu

SEQ ID NO: 724947 - RNA, 19 nt, Homo sapiens
  misc_RNA (1)...(19): siRNA sense strand
ucaaggacaugaaggagaa

SEQ ID NO: 724948 - RNA, 19 nt, Homo sapiens
  misc_RNA (1)...(19): siRNA sense strand
gucagcggauuauggauua

SEQ ID NO: 724949 - RNA, 19 nt, Homo sapiens
  misc_RNA (1)...(19): siRNA sense strand
gauuauggauuacuaugag

SEQ ID NO: 724950 - RNA, 19 nt, Homo sapiens
  misc_RNA (1)...(19): siRNA sense strand
ggacaugaaggagaacuga

SEQ ID NO: 724951 - RNA, 19 nt, Homo sapiens
  misc_RNA (1)...(19): siRNA sense strand
ggauuauggauuacuauga

SEQ ID NO: 724952 - RNA, 19 nt, Homo sapiens
  misc_RNA (1)...(19): siRNA sense strand
gaauugucuucaucaccaa

SEQ ID NO: 724953 - RNA, 19 nt, Homo sapiens
  misc_RNA (1)...(19): siRNA sense strand
gcccggaauugucuucauc

SEQ ID NO: 724954 - RNA, 19 nt, Homo sapiens
  misc_RNA (1)...(19): siRNA sense strand
ucaccuacacuaccuacaa

SEQ ID NO: 724955 - RNA, 19 nt, Homo sapiens
  misc_RNA (1)...(19): siRNA sense strand
gcuccaagcccggaauugu

SEQ ID NO: 724956 - RNA, 19 nt, Homo sapiens
  misc_RNA (1)...(19): siRNA sense strand
caccuacacuaccuacaag

SEQ ID NO: 724957 - RNA, 19 nt, Homo sapiens
  misc_RNA (1)...(19): siRNA sense strand
cgucagcggauuauggauu

SEQ ID NO: 724958 - RNA, 19 nt, Homo sapiens
  misc_RNA (1)...(19): siRNA sense strand
gacuauaucaaggacauga

SEQ ID NO: 724959 - RNA, 19 nt, Homo sapiens
  misc_RNA (1)...(19): siRNA sense strand
gagugcugcuucaccuaca

SEQ ID NO: 724960 - RNA, 19 nt, Homo sapiens
  misc_RNA (1)...(19): siRNA sense strand
gccauuccgucuguaccaa

SEQ ID NO: 724961 - RNA, 19 nt, Homo sapiens
  misc_RNA (1)...(19): siRNA sense strand
ucaaggacaugaaggagaa

SEQ ID NO: 724962 - RNA, 19 nt, Homo sapiens
  misc_RNA (1)...(19): siRNA sense strand
gucagcggauuauggauua

SEQ ID NO: 724963 - RNA, 19 nt, Homo sapiens
  misc_RNA (1)...(19): siRNA sense strand
gauuauggauuacuaugag

SEQ ID NO: 724964 - RNA, 19 nt, Homo sapiens
  misc_RNA (1)...(19): siRNA sense strand
ggacaugaaggagaacuga

SEQ ID NO: 724965 - RNA, 19 nt, Homo sapiens
  misc_RNA (1)...(19): siRNA sense strand
ggauuauggauuacuauga

SEQ ID NO: 724966 - RNA, 19 nt, Homo sapiens
  misc_RNA (1)...(19): siRNA sense strand
gaauugucuucaucaccaa

SEQ ID NO: 724967 - RNA, 19 nt, Homo sapiens
  misc_RNA (1)...(19): siRNA sense strand
gcccggaauugucuucauc

SEQ ID NO: 724968 - RNA, 19 nt, Homo sapiens
  misc_RNA (1)...(19): siRNA sense strand
ucaccuacacuaccuacaa

SEQ ID NO: 724969 - RNA, 19 nt, Homo sapiens
  misc_RNA (1)...(19): siRNA sense strand
gcuccaagcccggaauugu

SEQ ID NO: 724970 - RNA, 19 nt, Homo sapiens
  misc_RNA (1)...(19): siRNA sense strand
caccuacacuaccuacaag

SEQ ID NO: 724971 - RNA, 19 nt, Homo sapiens
  misc_RNA (1)...(19): siRNA sense strand
cgucagcggauuauggauu

SEQ ID NO: 724972 - RNA, 19 nt, Homo sapiens
  misc_RNA (1)...(19): siRNA sense strand
gacuauaucaaggacauga

SEQ ID NO: 724973 - RNA, 19 nt, Homo sapiens
  misc_RNA (1)...(19): siRNA sense strand
gagugcugcuucaccuaca

SEQ ID NO: 724974 - RNA, 19 nt, Homo sapiens
  misc_RNA (1)...(19): siRNA sense strand
gccauuccgucuguaccaa

SEQ ID NO: 724975 - RNA, 19 nt, Homo sapiens
  misc_RNA (1)...(19): siRNA sense strand
ucaaggacaugaaggagaa

SEQ ID NO: 724976 - RNA, 19 nt, Homo sapiens
  misc_RNA (1)...(19): siRNA sense strand
gucagcggauuauggauua

SEQ ID NO: 724977 - RNA, 19 nt, Homo sapiens
  misc_RNA (1)...(19): siRNA sense strand
gauuauggauuacuaugag

SEQ ID NO: 724978 - RNA, 19 nt, Homo sapiens
  misc_RNA (1)...(19): siRNA sense strand
ggacaugaaggagaacuga

SEQ ID NO: 724979 - RNA, 19 nt, Homo sapiens
  misc_RNA (1)...(19): siRNA sense strand
ggauuauggauuacuauga

SEQ ID NO: 724980 - RNA, 19 nt, Homo sapiens
  misc_RNA (1)...(19): siRNA sense strand
gaauugucuucaucaccaa

SEQ ID NO: 724981 - RNA, 19 nt, Homo sapiens
  misc_RNA (1)...(19): siRNA sense strand
gcccggaauugucuucauc

SEQ ID NO: 724982 - RNA, 19 nt, Homo sapiens
  misc_RNA (1)...(19): siRNA sense strand
ucaccuacacuaccuacaa

SEQ ID NO: 724983 - RNA, 19 nt, Homo sapiens
  misc_RNA (1)...(19): siRNA sense strand
gcuccaagcccggaauugu

SEQ ID NO: 724984 - RNA, 19 nt, Homo sapiens
  misc_RNA (1)...(19): siRNA sense strand
caccuacacuaccuacaag

SEQ ID NO: 724985 - RNA, 19 nt, Homo sapiens
  misc_RNA (1)...(19): siRNA sense strand
cgucagcggauuauggauu

SEQ ID NO: 724986 - RNA, 19 nt, Homo sapiens
  misc_RNA (1)...(19): siRNA sense strand
gacuauaucaaggacauga

SEQ ID NO: 724987 - RNA, 19 nt, Homo sapiens
  misc_RNA (1)...(19): siRNA sense strand
gagugcugcuucaccuaca

SEQ ID NO: 724988 - RNA, 19 nt, Homo sapiens
  misc_RNA (1)...(19): siRNA sense strand
gccauuccgucuguaccaa

SEQ ID NO: 724989 - RNA, 19 nt, Homo sapiens
  misc_RNA (1)...(19): siRNA sense strand
ucaaggacaugaaggagaa

SEQ ID NO: 724990 - RNA, 19 nt, Homo sapiens
  misc_RNA (1)...(19): siRNA sense strand
gucagcggauuauggauua

SEQ ID NO: 724991 - RNA, 19 nt, Homo sapiens
  misc_RNA (1)...(19): siRNA sense strand
gauuauggauuacuaugag

SEQ ID NO: 724992 - RNA, 19 nt, Homo sapiens
  misc_RNA (1)...(19): siRNA sense strand
ggacaugaaggagaacuga

SEQ ID NO: 724993 - RNA, 19 nt, Homo sapiens
  misc_RNA (1)...(19): siRNA sense strand
ggauuauggauuacuauga

SEQ ID NO: 724994 - RNA, 19 nt, Homo sapiens
  misc_RNA (1)...(19): siRNA sense strand
gaauugucuucaucaccaa

SEQ ID NO: 724995 - RNA, 19 nt, Homo sapiens
  misc_RNA (1)...(19): siRNA sense strand
gcccggaauugucuucauc

SEQ ID NO: 724996 - RNA, 19 nt, Homo sapiens
  misc_RNA (1)...(19): siRNA sense strand
ucaccuacacuaccuacaa

SEQ ID NO: 724997 - RNA, 19 nt, Homo sapiens
  misc_RNA (1)...(19): siRNA sense strand
gcuccaagcccggaauugu

SEQ ID NO: 724998 - RNA, 19 nt, Homo sapiens
  misc_RNA (1)...(19): siRNA sense strand
caccuacacuaccuacaag

SEQ ID NO: 724999 - RNA, 19 nt, Homo sapiens
  misc_RNA (1)...(19): siRNA sense strand
cgucagcggauuauggauu

SEQ ID NO: 725000 - RNA, 19 nt, Homo sapiens
  misc_RNA (1)...(19): siRNA sense strand
gacuauaucaaggacauga

SEQ ID NO: 725001 - RNA, 19 nt, Homo sapiens
  misc_RNA (1)...(19): siRNA sense strand
gagugcugcuucaccuaca

SEQ ID NO: 725002 - RNA, 19 nt, Homo sapiens
  misc_RNA (1)...(19): siRNA sense strand
gccauuccgucuguaccaa

SEQ ID NO: 725003 - RNA, 19 nt, Homo sapiens
  misc_RNA (1)...(19): siRNA sense strand
ucaaggacaugaaggagaa

SEQ ID NO: 725004 - RNA, 19 nt, Homo sapiens
  misc_RNA (1)...(19): siRNA sense strand
gucagcggauuauggauua

SEQ ID NO: 725005 - RNA, 19 nt, Homo sapiens
  misc_RNA (1)...(19): siRNA sense strand
gauuauggauuacuaugag

SEQ ID NO: 725006 - RNA, 19 nt, Homo sapiens
  misc_RNA (1)...(19): siRNA sense strand
ggacaugaaggagaacuga

SEQ ID NO: 725007 - RNA, 19 nt, Homo sapiens
  misc_RNA (1)...(19): siRNA sense strand
ggauuauggauuacuauga

SEQ ID NO: 725008 - RNA, 19 nt, Homo sapiens
  misc_RNA (1)...(19): siRNA sense strand
gaauugucuucaucaccaa

SEQ ID NO: 725009 - RNA, 19 nt, Homo sapiens
  misc_RNA (1)...(19): siRNA sense strand
gcccggaauugucuucauc

SEQ ID NO: 725010 - RNA, 19 nt, Homo sapiens
  misc_RNA (1)...(19): siRNA sense strand
ucaccuacacuaccuacaa

SEQ ID NO: 725011 - RNA, 19 nt, Homo sapiens
  misc_RNA (1)...(19): siRNA sense strand
gcuccaagcccggaauugu

SEQ ID NO: 725012 - RNA, 19 nt, Homo sapiens
  misc_RNA (1)...(19): siRNA sense strand
caccuacacuaccuacaag

SEQ ID NO: 725013 - RNA, 19 nt, Homo sapiens
  misc_RNA (1)...(19): siRNA sense strand
cgucagcggauuauggauu

SEQ ID NO: 725014 - RNA, 19 nt, Homo sapiens
  misc_RNA (1)...(19): siRNA sense strand
gacuauaucaaggacauga

SEQ ID NO: 725015 - RNA, 19 nt, Homo sapiens
  misc_RNA (1)...(19): siRNA sense strand
gagugcugcuucaccuaca

SEQ ID NO: 725016 - RNA, 19 nt, Homo sapiens
  misc_RNA (1)...(19): siRNA sense strand
gccauuccgucuguaccaa

SEQ ID NO: 725017 - RNA, 19 nt, Homo sapiens
  misc_RNA (1)...(19): siRNA sense strand
ucaaggacaugaaggagaa

SEQ ID NO: 725018 - RNA, 19 nt, Homo sapiens
  misc_RNA (1)...(19): siRNA sense strand
gucagcggauuauggauua

SEQ ID NO: 725019 - RNA, 19 nt, Homo sapiens
  misc_RNA (1)...(19): siRNA sense strand
gauuauggauuacuaugag

SEQ ID NO: 725020 - RNA, 19 nt, Homo sapiens
  misc_RNA (1)...(19): siRNA sense strand
ggacaugaaggagaacuga

SEQ ID NO: 725021 - RNA, 19 nt, Homo sapiens
  misc_RNA (1)...(19): siRNA sense strand
ggauuauggauuacuauga

SEQ ID NO: 725022 - RNA, 19 nt, Homo sapiens
  misc_RNA (1)...(19): siRNA sense strand
gaauugucuucaucaccaa

SEQ ID NO: 725023 - RNA, 19 nt, Homo sapiens
  misc_RNA (1)...(19): siRNA sense strand
gcccggaauugucuucauc

SEQ ID NO: 725024 - RNA, 19 nt, Homo sapiens
  misc_RNA (1)...(19): siRNA sense strand
ucaccuacacuaccuacaa

SEQ ID NO: 725025 - RNA, 19 nt, Homo sapiens
  misc_RNA (1)...(19): siRNA sense strand
gcuccaagcccggaauugu

SEQ ID NO: 725026 - RNA, 19 nt, Homo sapiens
  misc_RNA (1)...(19): siRNA sense strand
caccuacacuaccuacaag

SEQ ID NO: 725027 - RNA, 19 nt, Homo sapiens
  misc_RNA (1)...(19): siRNA sense strand
cgucagcggauuauggauu

SEQ ID NO: 725028 - RNA, 19 nt, Homo sapiens
  misc_RNA (1)...(19): siRNA sense strand
gacuauaucaaggacauga

SEQ ID NO: 725029 - RNA, 19 nt, Homo sapiens
  misc_RNA (1)...(19): siRNA sense strand
gagugcugcuucaccuaca

SEQ ID NO: 725030 - RNA, 19 nt, Homo sapiens
  misc_RNA (1)...(19): siRNA sense strand
gccauuccgucuguaccaa

SEQ ID NO: 725031 - RNA, 19 nt, Homo sapiens
  misc_RNA (1)...(19): siRNA sense strand
ggaaggagcuacagucaga

SEQ ID NO: 725032 - RNA, 19 nt, Homo sapiens
  misc_RNA (1)...(19): siRNA sense strand
ggaacaaguuuaccaaaga

SEQ ID NO: 725033 - RNA, 19 nt, Homo sapiens
  misc_RNA (1)...(19): siRNA sense strand
gaaauuccgucuccucuuc

SEQ ID NO: 725034 - RNA, 19 nt, Homo sapiens
  misc_RNA (1)...(19): siRNA sense strand
ggauggagaugcugacaga

SEQ ID NO: 725035 - RNA, 19 nt, Homo sapiens
  misc_RNA (1)...(19): siRNA sense strand
gcuggucccuuauaaacua

SEQ ID NO: 725036 - RNA, 19 nt, Homo sapiens
  misc_RNA (1)...(19): siRNA sense strand
uuaagaggauguuugauga

SEQ ID NO: 725037 - RNA, 19 nt, Homo sapiens
  misc_RNA (1)...(19): siRNA sense strand
gggagaauguuccugaaug

SEQ ID NO: 725038 - RNA, 19 nt, Homo sapiens
  misc_RNA (1)...(19): siRNA sense strand
caauguacaugguggacua

SEQ ID NO: 725039 - RNA, 19 nt, Homo sapiens
  misc_RNA (1)...(19): siRNA sense strand
gcucagcgcuguccaaacu

SEQ ID NO: 725040 - RNA, 19 nt, Homo sapiens
  misc_RNA (1)...(19): siRNA sense strand
ucacgggucugccugauga

SEQ ID NO: 725041 - RNA, 19 nt, Homo sapiens
  misc_RNA (1)...(19): siRNA sense strand
aguauccacuucaucauua

SEQ ID NO: 725042 - RNA, 19 nt, Homo sapiens
  misc_RNA (1)...(19): siRNA sense strand
acaagcggaucaagaguaa

SEQ ID NO: 725043 - RNA, 19 nt, Homo sapiens
  misc_RNA (1)...(19): siRNA sense strand
uagaggagguguuugaugu

SEQ ID NO: 725044 - RNA, 19 nt, Homo sapiens
  misc_RNA (1)...(19): siRNA sense strand
gaacaaguuuaccaaagac

SEQ ID NO: 725045 - RNA, 19 nt, Homo sapiens
  misc_RNA (1)...(19): siRNA sense strand
gcaacagcauccaguuugu

SEQ ID NO: 725046 - RNA, 19 nt, Homo sapiens
  misc_RNA (1)...(19): siRNA sense strand
cgacaucgccaacacacua

SEQ ID NO: 725047 - RNA, 19 nt, Homo sapiens
  misc_RNA (1)...(19): siRNA sense strand
caucggaggauucugguua

SEQ ID NO: 725048 - RNA, 19 nt, Homo sapiens
  misc_RNA (1)...(19): siRNA sense strand
gaagagacagggcuuucaa

SEQ ID NO: 725049 - RNA, 19 nt, Homo sapiens
  misc_RNA (1)...(19): siRNA sense strand
gggaacaaguuuaccaaag

SEQ ID NO: 725050 - RNA, 19 nt, Homo sapiens
  misc_RNA (1)...(19): siRNA sense strand
gguguuugauguucuuuau

SEQ ID NO: 725051 - RNA, 19 nt, Homo sapiens
  misc_RNA (1)...(19): siRNA sense strand
gcucagauguguaccuucu

SEQ ID NO: 725052 - RNA, 19 nt, Homo sapiens
  misc_RNA (1)...(19): siRNA sense strand
cgggaccucuuaauuacua

SEQ ID NO: 725053 - RNA, 19 nt, Homo sapiens
  misc_RNA (1)...(19): siRNA sense strand
gaacggugucucccugauu

SEQ ID NO: 725054 - RNA, 19 nt, Homo sapiens
  misc_RNA (1)...(19): siRNA sense strand
gaaggccagccgaguauga

SEQ ID NO: 725055 - RNA, 19 nt, Homo sapiens
  misc_RNA (1)...(19): siRNA sense strand
ggagaauguuccugaaugc

SEQ ID NO: 725056 - RNA, 19 nt, Homo sapiens
  misc_RNA (1)...(19): siRNA sense strand
gugugcagauccuguuuaa

SEQ ID NO: 725057 - RNA, 19 nt, Homo sapiens
  misc_RNA (1)...(19): siRNA sense strand
ggagguguuugauguucuu

SEQ ID NO: 725058 - RNA, 19 nt, Homo sapiens
  misc_RNA (1)...(19): siRNA sense strand
gauguuugaugagcgaauu

SEQ ID NO: 725059 - RNA, 19 nt, Homo sapiens
  misc_RNA (1)...(19): siRNA sense strand
gagacagggcuuucaagaa

SEQ ID NO: 725060 - RNA, 19 nt, Homo sapiens
  misc_RNA (1)...(19): siRNA sense strand
gaggagguguuugauguuc

SEQ ID NO: 725061 - RNA, 19 nt, Homo sapiens
  misc_RNA (1)...(19): siRNA sense strand
ggaaugcucggucagacaa

SEQ ID NO: 725062 - RNA, 19 nt, Homo sapiens
  misc_RNA (1)...(19): siRNA sense strand
guauccacuucaucauuaa

SEQ ID NO: 725063 - RNA, 19 nt, Homo sapiens
  misc_RNA (1)...(19): siRNA sense strand
gaugguagaggagguguuu

SEQ ID NO: 725064 - RNA, 19 nt, Homo sapiens
  misc_RNA (1)...(19): siRNA sense strand
cauaguauccacuucauca

SEQ ID NO: 725065 - RNA, 19 nt, Homo sapiens
  misc_RNA (1)...(19): siRNA sense strand
ucccgggaccucuuaauua

SEQ ID NO: 725066 - RNA, 19 nt, Homo sapiens
  misc_RNA (1)...(19): siRNA sense strand
gcuccaacccuuugcagaa

SEQ ID NO: 725067 - RNA, 19 nt, Homo sapiens
  misc_RNA (1)...(19): siRNA sense strand
cccaaagccugaugaagau

SEQ ID NO: 725068 - RNA, 19 nt, Homo sapiens
  misc_RNA (1)...(19): siRNA sense strand
uccaaggacucaucccaaa

SEQ ID NO: 725069 - RNA, 19 nt, Homo sapiens
  misc_RNA (1)...(19): siRNA sense strand
ucccaaagccugaugaaga

SEQ ID NO: 725070 - RNA, 19 nt, Homo sapiens
  misc_RNA (1)...(19): siRNA sense strand
ucauuaagaggauguuuga

SEQ ID NO: 725071 - RNA, 19 nt, Homo sapiens
  misc_RNA (1)...(19): siRNA sense strand
gcauccaguuugucaucaa

SEQ ID NO: 725072 - RNA, 19 nt, Homo sapiens
  misc_RNA (1)...(19): siRNA sense strand
cagcaacagcauccaguuu

SEQ ID NO: 725073 - RNA, 19 nt, Homo sapiens
  misc_RNA (1)...(19): siRNA sense strand
aagaucaaguucacaguca

SEQ ID NO: 725074 - RNA, 19 nt, Homo sapiens
  misc_RNA (1)...(19): siRNA sense strand
uccaggaccuuuucaauaa

SEQ ID NO: 725075 - RNA, 19 nt, Homo sapiens
  misc_RNA (1)...(19): siRNA sense strand
ucacugagggagucaaaga

SEQ ID NO: 725076 - RNA, 19 nt, Homo sapiens
  misc_RNA (1)...(19): siRNA sense strand
gccaagcuccggaagauuc

SEQ ID NO: 725077 - RNA, 19 nt, Homo sapiens
  misc_RNA (1)...(19): siRNA sense strand
gggagcaggugaaggaacu

SEQ ID NO: 725078 - RNA, 19 nt, Homo sapiens
  misc_RNA (1)...(19): siRNA sense strand
caaagccugaugaagauga

SEQ ID NO: 725079 - RNA, 19 nt, Homo sapiens
  misc_RNA (1)...(19): siRNA sense strand
ccaaggugccagccaaaga

SEQ ID NO: 725080 - RNA, 19 nt, Homo sapiens
  misc_RNA (1)...(19): siRNA sense strand
uaaaggaaaccgaggacau

SEQ ID NO: 725081 - RNA, 19 nt, Homo sapiens
  misc_RNA (1)...(19): siRNA sense strand
uggaggagcgccauaguau

SEQ ID NO: 725082 - RNA, 19 nt, Homo sapiens
  misc_RNA (1)...(19): siRNA sense strand
guagaggagguguuugaug

SEQ ID NO: 725083 - RNA, 19 nt, Homo sapiens
  misc_RNA (1)...(19): siRNA sense strand
ggaacucuucaacgagaaa

SEQ ID NO: 725084 - RNA, 19 nt, Homo sapiens
  misc_RNA (1)...(19): siRNA sense strand
ggacgagagccugaagaga

SEQ ID NO: 725085 - RNA, 19 nt, Homo sapiens
  misc_RNA (1)...(19): siRNA sense strand
uggagaugcugacagacaa

SEQ ID NO: 725086 - RNA, 19 nt, Homo sapiens
  misc_RNA (1)...(19): siRNA sense strand
ccaaagacaccacgaagcu

SEQ ID NO: 725087 - RNA, 19 nt, Homo sapiens
  misc_RNA (1)...(19): siRNA sense strand
ccucauggccauccuggaa

SEQ ID NO: 725088 - RNA, 19 nt, Homo sapiens
  misc_RNA (1)...(19): siRNA sense strand
uacaagcggaucaagagua

SEQ ID NO: 725089 - RNA, 19 nt, Homo sapiens
  misc_RNA (1)...(19): siRNA sense strand
ggagaugcugacagacaaa

SEQ ID NO: 725090 - RNA, 19 nt, Homo sapiens
  misc_RNA (1)...(19): siRNA sense strand
gcacgaugagagcgccuuu

SEQ ID NO: 725091 - RNA, 19 nt, Homo sapiens
  misc_RNA (1)...(19): siRNA sense strand
caagacuucuccgacuguu

SEQ ID NO: 725092 - RNA, 19 nt, Homo sapiens
  misc_RNA (1)...(19): siRNA sense strand
ggaaaccgaggacaucaac

SEQ ID NO: 725093 - RNA, 19 nt, Homo sapiens
  misc_RNA (1)...(19): siRNA sense strand
gccaaagacagcagcauuc

SEQ ID NO: 725094 - RNA, 19 nt, Homo sapiens
  misc_RNA (1)...(19): siRNA sense strand
accggaagauugccuguga

SEQ ID NO: 725095 - RNA, 19 nt, Homo sapiens
  misc_RNA (1)...(19): siRNA sense strand
gcaaagacgagaucaucac

SEQ ID NO: 725096 - RNA, 19 nt, Homo sapiens
  misc_RNA (1)...(19): siRNA sense strand
gcaauggccaauguacaug

SEQ ID NO: 725097 - RNA, 19 nt, Homo sapiens
  misc_RNA (1)...(19): siRNA sense strand
ccagaucucacucgugcaa

SEQ ID NO: 725098 - RNA, 19 nt, Homo sapiens
  misc_RNA (1)...(19): siRNA sense strand
ucacagggaacaaguuuac

SEQ ID NO: 725099 - RNA, 19 nt, Homo sapiens
  misc_RNA (1)...(19): siRNA sense strand
gugggccucucauccagaa

SEQ ID NO: 725100 - RNA, 19 nt, Homo sapiens
  misc_RNA (1)...(19): siRNA sense strand
gggcaucccggacaagauc

SEQ ID NO: 725101 - RNA, 19 nt, Homo sapiens
  misc_RNA (1)...(19): siRNA sense strand
cuccaacccuuugcagaaa

SEQ ID NO: 725102 - RNA, 19 nt, Homo sapiens
  misc_RNA (1)...(19): siRNA sense strand
guccgcauggucaucauua

SEQ ID NO: 725103 - RNA, 19 nt, Homo sapiens
  misc_RNA (1)...(19): siRNA sense strand
ucaaggugccguacuccaa

SEQ ID NO: 725104 - RNA, 19 nt, Homo sapiens
  misc_RNA (1)...(19): siRNA sense strand
gugggacgccuucauaaag

SEQ ID NO: 725105 - RNA, 19 nt, Homo sapiens
  misc_RNA (1)...(19): siRNA sense strand
ugaagaugacgccaacaga

SEQ ID NO: 725106 - RNA, 19 nt, Homo sapiens
  misc_RNA (1)...(19): siRNA sense strand
gacaucgccaacacacuaa

SEQ ID NO: 725107 - RNA, 19 nt, Homo sapiens
  misc_RNA (1)...(19): siRNA sense strand
gccauaguauccacuucau

SEQ ID NO: 725108 - RNA, 19 nt, Homo sapiens
  misc_RNA (1)...(19): siRNA sense strand
ccuggaacauggcucagau

SEQ ID NO: 725109 - RNA, 19 nt, Homo sapiens
  misc_RNA (1)...(19): siRNA sense strand
cccgggaccucuuaauuac

SEQ ID NO: 725110 - RNA, 19 nt, Homo sapiens
  misc_RNA (1)...(19): siRNA sense strand
ccucuaacccggauucagu

SEQ ID NO: 725111 - RNA, 19 nt, Homo sapiens
  misc_RNA (1)...(19): siRNA sense strand
ucgccaagcuccggaagau

SEQ ID NO: 725112 - RNA, 19 nt, Homo sapiens
  misc_RNA (1)...(19): siRNA sense strand
gaggagcgccauaguaucc

SEQ ID NO: 725113 - RNA, 19 nt, Homo sapiens
  misc_RNA (1)...(19): siRNA sense strand
guacuccaaguuucugaug

SEQ ID NO: 725114 - RNA, 19 nt, Homo sapiens
  misc_RNA (1)...(19): siRNA sense strand
agaucucacucgugcaaug

SEQ ID NO: 725115 - RNA, 19 nt, Homo sapiens
  misc_RNA (1)...(19): siRNA sense strand
ccaacccuuugcagaaauc

SEQ ID NO: 725116 - RNA, 19 nt, Homo sapiens
  misc_RNA (1)...(19): siRNA sense strand
uaaccagcuccaacccuuu

SEQ ID NO: 725117 - RNA, 19 nt, Homo sapiens
  misc_RNA (1)...(19): siRNA sense strand
agagacagggcuuucaaga

SEQ ID NO: 725118 - RNA, 19 nt, Homo sapiens
  misc_RNA (1)...(19): siRNA sense strand
agacuucuccgacuguugu

SEQ ID NO: 725119 - RNA, 19 nt, Homo sapiens
  misc_RNA (1)...(19): siRNA sense strand
aagcgggucucggaaggaa

SEQ ID NO: 725120 - RNA, 19 nt, Homo sapiens
  misc_RNA (1)...(19): siRNA sense strand
gggaagccuugggcaucaa

SEQ ID NO: 725121 - RNA, 19 nt, Homo sapiens
  misc_RNA (1)...(19): siRNA sense strand
acgagagccugaagagaca

SEQ ID NO: 725122 - RNA, 19 nt, Homo sapiens
  misc_RNA (1)...(19): siRNA sense strand
guuaugggauggagaugcu

SEQ ID NO: 725123 - RNA, 19 nt, Homo sapiens
  misc_RNA (1)...(19): siRNA sense strand
aaauugagccagaggaucu

SEQ ID NO: 725124 - RNA, 19 nt, Homo sapiens
  misc_RNA (1)...(19): siRNA sense strand
gaagacugugggccaggaa

SEQ ID NO: 725125 - RNA, 19 nt, Homo sapiens
  misc_RNA (1)...(19): siRNA sense strand
uaguauccacuucaucauu

SEQ ID NO: 725126 - RNA, 19 nt, Homo sapiens
  misc_RNA (1)...(19): siRNA sense strand
ggaggagcgccauaguauc

SEQ ID NO: 725127 - RNA, 19 nt, Homo sapiens
  misc_RNA (1)...(19): siRNA sense strand
cagcucccgggaccucuua

SEQ ID NO: 725128 - RNA, 19 nt, Homo sapiens
  misc_RNA (1)...(19): siRNA sense strand
cggugcuggucccuuauaa

SEQ ID NO: 725129 - RNA, 19 nt, Homo sapiens
  misc_RNA (1)...(19): siRNA sense strand
gaggaucuggacaucauuc

SEQ ID NO: 725130 - RNA, 19 nt, Homo sapiens
  misc_RNA (1)...(19): siRNA sense strand
gggcugaggccgaucaaaa

SEQ ID NO: 725131 - RNA, 19 nt, Homo sapiens
  misc_RNA (1)...(19): siRNA sense strand
ggaaggagcuacagucaga

SEQ ID NO: 725132 - RNA, 19 nt, Homo sapiens
  misc_RNA (1)...(19): siRNA sense strand
ggaacaaguuuaccaaaga

SEQ ID NO: 725133 - RNA, 19 nt, Homo sapiens
  misc_RNA (1)...(19): siRNA sense strand
gaaauuccgucuccucuuc

SEQ ID NO: 725134 - RNA, 19 nt, Homo sapiens
  misc_RNA (1)...(19): siRNA sense strand
ggauggagaugcugacaga

SEQ ID NO: 725135 - RNA, 19 nt, Homo sapiens
  misc_RNA (1)...(19): siRNA sense strand
gcuggucccuuauaaacua

SEQ ID NO: 725136 - RNA, 19 nt, Homo sapiens
  misc_RNA (1)...(19): siRNA sense strand
uuaagaggauguuugauga

SEQ ID NO: 725137 - RNA, 19 nt, Homo sapiens
  misc_RNA (1)...(19): siRNA sense strand
gggagaauguuccugaaug

SEQ ID NO: 725138 - RNA, 19 nt, Homo sapiens
  misc_RNA (1)...(19): siRNA sense strand
caauguacaugguggacua

SEQ ID NO: 725139 - RNA, 19 nt, Homo sapiens
  misc_RNA (1)...(19): siRNA sense strand
gcucagcgcuguccaaacu

SEQ ID NO: 725140 - RNA, 19 nt, Homo sapiens
  misc_RNA (1)...(19): siRNA sense strand
ucacgggucugccugauga

SEQ ID NO: 725141 - RNA, 19 nt, Homo sapiens
  misc_RNA (1)...(19): siRNA sense strand
aguauccacuucaucauua

SEQ ID NO: 725142 - RNA, 19 nt, Homo sapiens
  misc_RNA (1)...(19): siRNA sense strand
acaagcggaucaagaguaa

SEQ ID NO: 725143 - RNA, 19 nt, Homo sapiens
  misc_RNA (1)...(19): siRNA sense strand
uagaggagguguuugaugu

SEQ ID NO: 725144 - RNA, 19 nt, Homo sapiens
  misc_RNA (1)...(19): siRNA sense strand
gaacaaguuuaccaaagac

SEQ ID NO: 725145 - RNA, 19 nt, Homo sapiens
  misc_RNA (1)...(19): siRNA sense strand
gcaacagcauccaguuugu

SEQ ID NO: 725146 - RNA, 19 nt, Homo sapiens
  misc_RNA (1)...(19): siRNA sense strand
cgacaucgccaacacacua

SEQ ID NO: 725147 - RNA, 19 nt, Homo sapiens
  misc_RNA (1)...(19): siRNA sense strand
caucggaggauucugguua

SEQ ID NO: 725148 - RNA, 19 nt, Homo sapiens
  misc_RNA (1)...(19): siRNA sense strand
gaagagacagggcuuucaa

SEQ ID NO: 725149 - RNA, 19 nt, Homo sapiens
  misc_RNA (1)...(19): siRNA sense strand
gggaacaaguuuaccaaag

SEQ ID NO: 725150 - RNA, 19 nt, Homo sapiens
  misc_RNA (1)...(19): siRNA sense strand
gguguuugauguucuuuau

SEQ ID NO: 725151 - RNA, 19 nt, Homo sapiens
  misc_RNA (1)...(19): siRNA sense strand
gcucagauguguaccuucu

SEQ ID NO: 725152 - RNA, 19 nt, Homo sapiens
  misc_RNA (1)...(19): siRNA sense strand
cgggaccucuuaauuacua

SEQ ID NO: 725153 - RNA, 19 nt, Homo sapiens
  misc_RNA (1)...(19): siRNA sense strand
gaacggugucucccugauu

SEQ ID NO: 725154 - RNA, 19 nt, Homo sapiens
  misc_RNA (1)...(19): siRNA sense strand
gaaggccagccgaguauga

SEQ ID NO: 725155 - RNA, 19 nt, Homo sapiens
  misc_RNA (1)...(19): siRNA sense strand
ggagaauguuccugaaugc

SEQ ID NO: 725156 - RNA, 19 nt, Homo sapiens
  misc_RNA (1)...(19): siRNA sense strand
gugugcagauccuguuuaa

SEQ ID NO: 725157 - RNA, 19 nt, Homo sapiens
  misc_RNA (1)...(19): siRNA sense strand
ggagguguuugauguucuu

SEQ ID NO: 725158 - RNA, 19 nt, Homo sapiens
  misc_RNA (1)...(19): siRNA sense strand
gauguuugaugagcgaauu

SEQ ID NO: 725159 - RNA, 19 nt, Homo sapiens
  misc_RNA (1)...(19): siRNA sense strand
gagacagggcuuucaagaa

SEQ ID NO: 725160 - RNA, 19 nt, Homo sapiens
  misc_RNA (1)...(19): siRNA sense strand
gaggagguguuugauguuc

SEQ ID NO: 725161 - RNA, 19 nt, Homo sapiens
  misc_RNA (1)...(19): siRNA sense strand
ggaaugcucggucagacaa

SEQ ID NO: 725162 - RNA, 19 nt, Homo sapiens
  misc_RNA (1)...(19): siRNA sense strand
guauccacuucaucauuaa

SEQ ID NO: 725163 - RNA, 19 nt, Homo sapiens
  misc_RNA (1)...(19): siRNA sense strand
gaugguagaggagguguuu

SEQ ID NO: 725164 - RNA, 19 nt, Homo sapiens
  misc_RNA (1)...(19): siRNA sense strand
cauaguauccacuucauca

SEQ ID NO: 725165 - RNA, 19 nt, Homo sapiens
  misc_RNA (1)...(19): siRNA sense strand
ucccgggaccucuuaauua

SEQ ID NO: 725166 - RNA, 19 nt, Homo sapiens
  misc_RNA (1)...(19): siRNA sense strand
gcuccaacccuuugcagaa

SEQ ID NO: 725167 - RNA, 19 nt, Homo sapiens
  misc_RNA (1)...(19): siRNA sense strand
cccaaagccugaugaagau

SEQ ID NO: 725168 - RNA, 19 nt, Homo sapiens
  misc_RNA (1)...(19): siRNA sense strand
uccaaggacucaucccaaa

SEQ ID NO: 725169 - RNA, 19 nt, Homo sapiens
  misc_RNA (1)...(19): siRNA sense strand
ucccaaagccugaugaaga

SEQ ID NO: 725170 - RNA, 19 nt, Homo sapiens
  misc_RNA (1)...(19): siRNA sense strand
ucauuaagaggauguuuga

SEQ ID NO: 725171 - RNA, 19 nt, Homo sapiens
  misc_RNA (1)...(19): siRNA sense strand
gcauccaguuugucaucaa

SEQ ID NO: 725172 - RNA, 19 nt, Homo sapiens
  misc_RNA (1)...(19): siRNA sense strand
cagcaacagcauccaguuu

SEQ ID NO: 725173 - RNA, 19 nt, Homo sapiens
  misc_RNA (1)...(19): siRNA sense strand
aagaucaaguucacaguca

SEQ ID NO: 725174 - RNA, 19 nt, Homo sapiens
  misc_RNA (1)...(19): siRNA sense strand
uccaggaccuuuucaauaa

SEQ ID NO: 725175 - RNA, 19 nt, Homo sapiens
  misc_RNA (1)...(19): siRNA sense strand
ucacugagggagucaaaga

SEQ ID NO: 725176 - RNA, 19 nt, Homo sapiens
  misc_RNA (1)...(19): siRNA sense strand
gccaagcuccggaagauuc

SEQ ID NO: 725177 - RNA, 19 nt, Homo sapiens
  misc_RNA (1)...(19): siRNA sense strand
gggagcaggugaaggaacu

SEQ ID NO: 725178 - RNA, 19 nt, Homo sapiens
  misc_RNA (1)...(19): siRNA sense strand
caaagccugaugaagauga

SEQ ID NO: 725179 - RNA, 19 nt, Homo sapiens
  misc_RNA (1)...(19): siRNA sense strand
ccaaggugccagccaaaga

SEQ ID NO: 725180 - RNA, 19 nt, Homo sapiens
  misc_RNA (1)...(19): siRNA sense strand
uaaaggaaaccgaggacau

SEQ ID NO: 725181 - RNA, 19 nt, Homo sapiens
  misc_RNA (1)...(19): siRNA sense strand
uggaggagcgccauaguau

SEQ ID NO: 725182 - RNA, 19 nt, Homo sapiens
  misc_RNA (1)...(19): siRNA sense strand
guagaggagguguuugaug

SEQ ID NO: 725183 - RNA, 19 nt, Homo sapiens
  misc_RNA (1)...(19): siRNA sense strand
ggaacucuucaacgagaaa

SEQ ID NO: 725184 - RNA, 19 nt, Homo sapiens
  misc_RNA (1)...(19): siRNA sense strand
ggacgagagccugaagaga

SEQ ID NO: 725185 - RNA, 19 nt, Homo sapiens
  misc_RNA (1)...(19): siRNA sense strand
uggagaugcugacagacaa

SEQ ID NO: 725186 - RNA, 19 nt, Homo sapiens
  misc_RNA (1)...(19): siRNA sense strand
ccaaagacaccacgaagcu

SEQ ID NO: 725187 - RNA, 19 nt, Homo sapiens
  misc_RNA (1)...(19): siRNA sense strand
ccucauggccauccuggaa

SEQ ID NO: 725188 - RNA, 19 nt, Homo sapiens
  misc_RNA (1)...(19): siRNA sense strand
uacaagcggaucaagagua

SEQ ID NO: 725189 - RNA, 19 nt, Homo sapiens
  misc_RNA (1)...(19): siRNA sense strand
ggagaugcugacagacaaa

SEQ ID NO: 725190 - RNA, 19 nt, Homo sapiens
  misc_RNA (1)...(19): siRNA sense strand
gcacgaugagagcgccuuu

SEQ ID NO: 725191 - RNA, 19 nt, Homo sapiens
  misc_RNA (1)...(19): siRNA sense strand
caagacuucuccgacuguu

SEQ ID NO: 725192 - RNA, 19 nt, Homo sapiens
  misc_RNA (1)...(19): siRNA sense strand
ggaaaccgaggacaucaac

SEQ ID NO: 725193 - RNA, 19 nt, Homo sapiens
  misc_RNA (1)...(19): siRNA sense strand
gccaaagacagcagcauuc

SEQ ID NO: 725194 - RNA, 19 nt, Homo sapiens
  misc_RNA (1)...(19): siRNA sense strand
accggaagauugccuguga

SEQ ID NO: 725195 - RNA, 19 nt, Homo sapiens
  misc_RNA (1)...(19): siRNA sense strand
gcaaagacgagaucaucac

SEQ ID NO: 725196 - RNA, 19 nt, Homo sapiens
  misc_RNA (1)...(19): siRNA sense strand
gcaauggccaauguacaug

SEQ ID NO: 725197 - RNA, 19 nt, Homo sapiens
  misc_RNA (1)...(19): siRNA sense strand
ccagaucucacucgugcaa

SEQ ID NO: 725198 - RNA, 19 nt, Homo sapiens
  misc_RNA (1)...(19): siRNA sense strand
ucacagggaacaaguuuac

SEQ ID NO: 725199 - RNA, 19 nt, Homo sapiens
  misc_RNA (1)...(19): siRNA sense strand
gugggccucucauccagaa

SEQ ID NO: 725200 - RNA, 19 nt, Homo sapiens
  misc_RNA (1)...(19): siRNA sense strand
gggcaucccggacaagauc

SEQ ID NO: 725201 - RNA, 19 nt, Homo sapiens
  misc_RNA (1)...(19): siRNA sense strand
cuccaacccuuugcagaaa

SEQ ID NO: 725202 - RNA, 19 nt, Homo sapiens
  misc_RNA (1)...(19): siRNA sense strand
guccgcauggucaucauua

SEQ ID NO: 725203 - RNA, 19 nt, Homo sapiens
  misc_RNA (1)...(19): siRNA sense strand
ucaaggugccguacuccaa

SEQ ID NO: 725204 - RNA, 19 nt, Homo sapiens
  misc_RNA (1)...(19): siRNA sense strand
gugggacgccuucauaaag

SEQ ID NO: 725205 - RNA, 19 nt, Homo sapiens
  misc_RNA (1)...(19): siRNA sense strand
ugaagaugacgccaacaga

SEQ ID NO: 725206 - RNA, 19 nt, Homo sapiens
  misc_RNA (1)...(19): siRNA sense strand
gacaucgccaacacacuaa

SEQ ID NO: 725207 - RNA, 19 nt, Homo sapiens
  misc_RNA (1)...(19): siRNA sense strand
gccauaguauccacuucau

SEQ ID NO: 725208 - RNA, 19 nt, Homo sapiens
  misc_RNA (1)...(19): siRNA sense strand
ccuggaacauggcucagau

SEQ ID NO: 725209 - RNA, 19 nt, Homo sapiens
  misc_RNA (1)...(19): siRNA sense strand
cccgggaccucuuaauuac

SEQ ID NO: 725210 - RNA, 19 nt, Homo sapiens
  misc_RNA (1)...(19): siRNA sense strand
ccucuaacccggauucagu

SEQ ID NO: 725211 - RNA, 19 nt, Homo sapiens
  misc_RNA (1)...(19): siRNA sense strand
ucgccaagcuccggaagau

SEQ ID NO: 725212 - RNA, 19 nt, Homo sapiens
  misc_RNA (1)...(19): siRNA sense strand
gaggagcgccauaguaucc

SEQ ID NO: 725213 - RNA, 19 nt, Homo sapiens
  misc_RNA (1)...(19): siRNA sense strand
guacuccaaguuucugaug

SEQ ID NO: 725214 - RNA, 19 nt, Homo sapiens
  misc_RNA (1)...(19): siRNA sense strand
agaucucacucgugcaaug

SEQ ID NO: 725215 - RNA, 19 nt, Homo sapiens
  misc_RNA (1)...(19): siRNA sense strand
ccaacccuuugcagaaauc

SEQ ID NO: 725216 - RNA, 19 nt, Homo sapiens
  misc_RNA (1)...(19): siRNA sense strand
uaaccagcuccaacccuuu

SEQ ID NO: 725217 - RNA, 19 nt, Homo sapiens
  misc_RNA (1)...(19): siRNA sense strand
agagacagggcuuucaaga

SEQ ID NO: 725218 - RNA, 19 nt, Homo sapiens
  misc_RNA (1)...(19): siRNA sense strand
agacuucuccgacuguugu

SEQ ID NO: 725219 - RNA, 19 nt, Homo sapiens
  misc_RNA (1)...(19): siRNA sense strand
aagcgggucucggaaggaa

SEQ ID NO: 725220 - RNA, 19 nt, Homo sapiens
  misc_RNA (1)...(19): siRNA sense strand
gggaagccuugggcaucaa

SEQ ID NO: 725221 - RNA, 19 nt, Homo sapiens
  misc_RNA (1)...(19): siRNA sense strand
acgagagccugaagagaca

SEQ ID NO: 725222 - RNA, 19 nt, Homo sapiens
  misc_RNA (1)...(19): siRNA sense strand
guuaugggauggagaugcu

SEQ ID NO: 725223 - RNA, 19 nt, Homo sapiens
  misc_RNA (1)...(19): siRNA sense strand
aaauugagccagaggaucu

SEQ ID NO: 725224 - RNA, 19 nt, Homo sapiens
  misc_RNA (1)...(19): siRNA sense strand
gaagacugugggccaggaa

SEQ ID NO: 725225 - RNA, 19 nt, Homo sapiens
  misc_RNA (1)...(19): siRNA sense strand
uaguauccacuucaucauu

SEQ ID NO: 725226 - RNA, 19 nt, Homo sapiens
  misc_RNA (1)...(19): siRNA sense strand
ggaggagcgccauaguauc

SEQ ID NO: 725227 - RNA, 19 nt, Homo sapiens
  misc_RNA (1)...(19): siRNA sense strand
cagcucccgggaccucuua

SEQ ID NO: 725228 - RNA, 19 nt, Homo sapiens
  misc_RNA (1)...(19): siRNA sense strand
cggugcuggucccuuauaa

SEQ ID NO: 725229 - RNA, 19 nt, Homo sapiens
  misc_RNA (1)...(19): siRNA sense strand
gaggaucuggacaucauuc

SEQ ID NO: 725230 - RNA, 19 nt, Homo sapiens
  misc_RNA (1)...(19): siRNA sense strand
gggcugaggccgaucaaaa

SEQ ID NO: 725231 - RNA, 19 nt, Homo sapiens
  misc_RNA (1)...(19): siRNA sense strand
gcugaagcccuacucaaua

SEQ ID NO: 725232 - RNA, 19 nt, Homo sapiens
  misc_RNA (1)...(19): siRNA sense strand
gcagagacagaguuaauga

SEQ ID NO: 725233 - RNA, 19 nt, Homo sapiens
  misc_RNA (1)...(19): siRNA sense strand
caagccaggugucauauuc

SEQ ID NO: 725234 - RNA, 19 nt, Homo sapiens
  misc_RNA (1)...(19): siRNA sense strand
gaagcccuacucaauauaa

SEQ ID NO: 725235 - RNA, 19 nt, Homo sapiens
  misc_RNA (1)...(19): siRNA sense strand
gaacagcuuucacuuugcu

SEQ ID NO: 725236 - RNA, 19 nt, Homo sapiens
  misc_RNA (1)...(19): siRNA sense strand
gagacagaguuaaugaugu

SEQ ID NO: 725237 - RNA, 19 nt, Homo sapiens
  misc_RNA (1)...(19): siRNA sense strand
ucacaaagcaucccguguu

SEQ ID NO: 725238 - RNA, 19 nt, Homo sapiens
  misc_RNA (1)...(19): siRNA sense strand
ucauauuccucaccaagaa

SEQ ID NO: 725239 - RNA, 19 nt, Homo sapiens
  misc_RNA (1)...(19): siRNA sense strand
cagaguuaaugaugucaaa

SEQ ID NO: 725240 - RNA, 19 nt, Homo sapiens
  misc_RNA (1)...(19): siRNA sense strand
cugaagcccuacucaauau

SEQ ID NO: 725241 - RNA, 19 nt, Homo sapiens
  misc_RNA (1)...(19): siRNA sense strand
cacaaagcaucccguguuc

SEQ ID NO: 725242 - RNA, 19 nt, Homo sapiens
  misc_RNA (1)...(19): siRNA sense strand
ggaguucaggauugcauga

SEQ ID NO: 725243 - RNA, 19 nt, Homo sapiens
  misc_RNA (1)...(19): siRNA sense strand
gcuuguugcuguccuugga

SEQ ID NO: 725244 - RNA, 19 nt, Homo sapiens
  misc_RNA (1)...(19): siRNA sense strand
guccgggaguucaggauug

SEQ ID NO: 725245 - RNA, 19 nt, Homo sapiens
  misc_RNA (1)...(19): siRNA sense strand
agagacagaguuaaugaug

SEQ ID NO: 725246 - RNA, 19 nt, Homo sapiens
  misc_RNA (1)...(19): siRNA sense strand
ugaugcagagacagaguua

SEQ ID NO: 725247 - RNA, 19 nt, Homo sapiens
  misc_RNA (1)...(19): siRNA sense strand
gaaaauccaguaguucuga

SEQ ID NO: 725248 - RNA, 19 nt, Homo sapiens
  misc_RNA (1)...(19): siRNA sense strand
ccuccuacaucucacaaag

SEQ ID NO: 725249 - RNA, 19 nt, Homo sapiens
  misc_RNA (1)...(19): siRNA sense strand
ccaagccaggugucauauu

SEQ ID NO: 725250 - RNA, 19 nt, Homo sapiens
  misc_RNA (1)...(19): siRNA sense strand
ugaagcccuacucaauaua

SEQ ID NO: 725251 - RNA, 19 nt, Homo sapiens
  misc_RNA (1)...(19): siRNA sense strand
caucccguguucacucaug

SEQ ID NO: 725252 - RNA, 19 nt, Homo sapiens
  misc_RNA (1)...(19): siRNA sense strand
caaagcaucccguguucac

SEQ ID NO: 725253 - RNA, 19 nt, Homo sapiens
  misc_RNA (1)...(19): siRNA sense strand
cuccaagccaggugucaua

SEQ ID NO: 725254 - RNA, 19 nt, Homo sapiens
  misc_RNA (1)...(19): siRNA sense strand
gcugaagcccuacucaaua

SEQ ID NO: 725255 - RNA, 19 nt, Homo sapiens
  misc_RNA (1)...(19): siRNA sense strand
gcagagacagaguuaauga

SEQ ID NO: 725256 - RNA, 19 nt, Homo sapiens
  misc_RNA (1)...(19): siRNA sense strand
caagccaggugucauauuc

SEQ ID NO: 725257 - RNA, 19 nt, Homo sapiens
  misc_RNA (1)...(19): siRNA sense strand
gaagcccuacucaauauaa

SEQ ID NO: 725258 - RNA, 19 nt, Homo sapiens
  misc_RNA (1)...(19): siRNA sense strand
gaacagcuuucacuuugcu

SEQ ID NO: 725259 - RNA, 19 nt, Homo sapiens
  misc_RNA (1)...(19): siRNA sense strand
gagacagaguuaaugaugu

SEQ ID NO: 725260 - RNA, 19 nt, Homo sapiens
  misc_RNA (1)...(19): siRNA sense strand
ucacaaagcaucccguguu

SEQ ID NO: 725261 - RNA, 19 nt, Homo sapiens
  misc_RNA (1)...(19): siRNA sense strand
ucauauuccucaccaagaa

SEQ ID NO: 725262 - RNA, 19 nt, Homo sapiens
  misc_RNA (1)...(19): siRNA sense strand
cagaguuaaugaugucaaa

SEQ ID NO: 725263 - RNA, 19 nt, Homo sapiens
  misc_RNA (1)...(19): siRNA sense strand
cugaagcccuacucaauau

SEQ ID NO: 725264 - RNA, 19 nt, Homo sapiens
  misc_RNA (1)...(19): siRNA sense strand
cacaaagcaucccguguuc

SEQ ID NO: 725265 - RNA, 19 nt, Homo sapiens
  misc_RNA (1)...(19): siRNA sense strand
ggaguucaggauugcauga

SEQ ID NO: 725266 - RNA, 19 nt, Homo sapiens
  misc_RNA (1)...(19): siRNA sense strand
gcuuguugcuguccuugga

SEQ ID NO: 725267 - RNA, 19 nt, Homo sapiens
  misc_RNA (1)...(19): siRNA sense strand
guccgggaguucaggauug

SEQ ID NO: 725268 - RNA, 19 nt, Homo sapiens
  misc_RNA (1)...(19): siRNA sense strand
agagacagaguuaaugaug

SEQ ID NO: 725269 - RNA, 19 nt, Homo sapiens
  misc_RNA (1)...(19): siRNA sense strand
ugaugcagagacagaguua

SEQ ID NO: 725270 - RNA, 19 nt, Homo sapiens
  misc_RNA (1)...(19): siRNA sense strand
gaaaauccaguaguucuga

SEQ ID NO: 725271 - RNA, 19 nt, Homo sapiens
  misc_RNA (1)...(19): siRNA sense strand
ccuccuacaucucacaaag

SEQ ID NO: 725272 - RNA, 19 nt, Homo sapiens
  misc_RNA (1)...(19): siRNA sense strand
ccaagccaggugucauauu

SEQ ID NO: 725273 - RNA, 19 nt, Homo sapiens
  misc_RNA (1)...(19): siRNA sense strand
ugaagcccuacucaauaua

SEQ ID NO: 725274 - RNA, 19 nt, Homo sapiens
  misc_RNA (1)...(19): siRNA sense strand
caucccguguucacucaug

SEQ ID NO: 725275 - RNA, 19 nt, Homo sapiens
  misc_RNA (1)...(19): siRNA sense strand
caaagcaucccguguucac

SEQ ID NO: 725276 - RNA, 19 nt, Homo sapiens
  misc_RNA (1)...(19): siRNA sense strand
cuccaagccaggugucaua

SEQ ID NO: 725277 - RNA, 19 nt, Homo sapiens
  misc_RNA (1)...(19): siRNA sense strand
gcugaagcccuacucaaua

SEQ ID NO: 725278 - RNA, 19 nt, Homo sapiens
  misc_RNA (1)...(19): siRNA sense strand
gcagagacagaguuaauga

SEQ ID NO: 725279 - RNA, 19 nt, Homo sapiens
  misc_RNA (1)...(19): siRNA sense strand
caagccaggugucauauuc

SEQ ID NO: 725280 - RNA, 19 nt, Homo sapiens
  misc_RNA (1)...(19): siRNA sense strand
gaagcccuacucaauauaa

SEQ ID NO: 725281 - RNA, 19 nt, Homo sapiens
  misc_RNA (1)...(19): siRNA sense strand
gaacagcuuucacuuugcu

SEQ ID NO: 725282 - RNA, 19 nt, Homo sapiens
  misc_RNA (1)...(19): siRNA sense strand
gagacagaguuaaugaugu

SEQ ID NO: 725283 - RNA, 19 nt, Homo sapiens
  misc_RNA (1)...(19): siRNA sense strand
ucacaaagcaucccguguu

SEQ ID NO: 725284 - RNA, 19 nt, Homo sapiens
  misc_RNA (1)...(19): siRNA sense strand
ucauauuccucaccaagaa

SEQ ID NO: 725285 - RNA, 19 nt, Homo sapiens
  misc_RNA (1)...(19): siRNA sense strand
cagaguuaaugaugucaaa

SEQ ID NO: 725286 - RNA, 19 nt, Homo sapiens
  misc_RNA (1)...(19): siRNA sense strand
cugaagcccuacucaauau

SEQ ID NO: 725287 - RNA, 19 nt, Homo sapiens
  misc_RNA (1)...(19): siRNA sense strand
cacaaagcaucccguguuc

SEQ ID NO: 725288 - RNA, 19 nt, Homo sapiens
  misc_RNA (1)...(19): siRNA sense strand
ggaguucaggauugcauga

SEQ ID NO: 725289 - RNA, 19 nt, Homo sapiens
  misc_RNA (1)...(19): siRNA sense strand
gcuuguugcuguccuugga

SEQ ID NO: 725290 - RNA, 19 nt, Homo sapiens
  misc_RNA (1)...(19): siRNA sense strand
guccgggaguucaggauug

SEQ ID NO: 725291 - RNA, 19 nt, Homo sapiens
  misc_RNA (1)...(19): siRNA sense strand
agagacagaguuaaugaug

SEQ ID NO: 725292 - RNA, 19 nt, Homo sapiens
  misc_RNA (1)...(19): siRNA sense strand
ugaugcagagacagaguua

SEQ ID NO: 725293 - RNA, 19 nt, Homo sapiens
  misc_RNA (1)...(19): siRNA sense strand
gaaaauccaguaguucuga

SEQ ID NO: 725294 - RNA, 19 nt, Homo sapiens
  misc_RNA (1)...(19): siRNA sense strand
ccuccuacaucucacaaag

SEQ ID NO: 725295 - RNA, 19 nt, Homo sapiens
  misc_RNA (1)...(19): siRNA sense strand
ccaagccaggugucauauu

SEQ ID NO: 725296 - RNA, 19 nt, Homo sapiens
  misc_RNA (1)...(19): siRNA sense strand
ugaagcccuacucaauaua

SEQ ID NO: 725297 - RNA, 19 nt, Homo sapiens
  misc_RNA (1)...(19): siRNA sense strand
caucccguguucacucaug

SEQ ID NO: 725298 - RNA, 19 nt, Homo sapiens
  misc_RNA (1)...(19): siRNA sense strand
caaagcaucccguguucac

SEQ ID NO: 725299 - RNA, 19 nt, Homo sapiens
  misc_RNA (1)...(19): siRNA sense strand
cuccaagccaggugucaua

SEQ ID NO: 725300 - RNA, 19 nt, Homo sapiens
  misc_RNA (1)...(19): siRNA sense strand
caaagaggcugcugcuguu

SEQ ID NO: 725301 - RNA, 19 nt, Homo sapiens
  misc_RNA (1)...(19): siRNA sense strand
gaagauaucccgcuaagag

SEQ ID NO: 725302 - RNA, 19 nt, Homo sapiens
  misc_RNA (1)...(19): siRNA sense strand
gcucucagcugucaaugug

SEQ ID NO: 725303 - RNA, 19 nt, Homo sapiens
  misc_RNA (1)...(19): siRNA sense strand
gagagagacaugucaaaga

SEQ ID NO: 725304 - RNA, 19 nt, Homo sapiens
  misc_RNA (1)...(19): siRNA sense strand
agagagacaugucaaagag

SEQ ID NO: 725305 - RNA, 19 nt, Homo sapiens
  misc_RNA (1)...(19): siRNA sense strand
cggaagauaucccgcuaag

SEQ ID NO: 725306 - RNA, 19 nt, Homo sapiens
  misc_RNA (1)...(19): siRNA sense strand
gauaucccgcuaagagaga

SEQ ID NO: 725307 - RNA, 19 nt, Homo sapiens
  misc_RNA (1)...(19): siRNA sense strand
ucccagugcuugcggaaga

SEQ ID NO: 725308 - RNA, 19 nt, Homo sapiens
  misc_RNA (1)...(19): siRNA sense strand
uaagagagagacaugucaa

SEQ ID NO: 725309 - RNA, 19 nt, Homo sapiens
  misc_RNA (1)...(19): siRNA sense strand
gcuaagagagagacauguc

SEQ ID NO: 725310 - RNA, 19 nt, Homo sapiens
  misc_RNA (1)...(19): siRNA sense strand
ggaagauaucccgcuaaga

SEQ ID NO: 725311 - RNA, 19 nt, Homo sapiens
  misc_RNA (1)...(19): siRNA sense strand
cgucaacaccaccaucugu

SEQ ID NO: 725312 - RNA, 19 nt, Homo sapiens
  misc_RNA (1)...(19): siRNA sense strand
gaagauaucccgcuaagag

SEQ ID NO: 725313 - RNA, 19 nt, Homo sapiens
  misc_RNA (1)...(19): siRNA sense strand
gcucucagcugucaaugug

SEQ ID NO: 725314 - RNA, 19 nt, Homo sapiens
  misc_RNA (1)...(19): siRNA sense strand
caaaggggcugcugcuguu

SEQ ID NO: 725315 - RNA, 19 nt, Homo sapiens
  misc_RNA (1)...(19): siRNA sense strand
cggaagauaucccgcuaag

SEQ ID NO: 725316 - RNA, 19 nt, Homo sapiens
  misc_RNA (1)...(19): siRNA sense strand
gagagagacaugucaaagg

SEQ ID NO: 725317 - RNA, 19 nt, Homo sapiens
  misc_RNA (1)...(19): siRNA sense strand
gauaucccgcuaagagaga

SEQ ID NO: 725318 - RNA, 19 nt, Homo sapiens
  misc_RNA (1)...(19): siRNA sense strand
uaagagagagacaugucaa

SEQ ID NO: 725319 - RNA, 19 nt, Homo sapiens
  misc_RNA (1)...(19): siRNA sense strand
gcuaagagagagacauguc

SEQ ID NO: 725320 - RNA, 19 nt, Homo sapiens
  misc_RNA (1)...(19): siRNA sense strand
ggaagauaucccgcuaaga

SEQ ID NO: 725321 - RNA, 19 nt, Homo sapiens
  misc_RNA (1)...(19): siRNA sense strand
cgucaacaccaccaucugu

SEQ ID NO: 725322 - RNA, 19 nt, Homo sapiens
  misc_RNA (1)...(19): siRNA sense strand
gagauuuccucuacagaug

SEQ ID NO: 725323 - RNA, 19 nt, Homo sapiens
  misc_RNA (1)...(19): siRNA sense strand
ccaugaagauccucaacaa

SEQ ID NO: 725324 - RNA, 19 nt, Homo sapiens
  misc_RNA (1)...(19): siRNA sense strand
gagcaaaggcuacaacaag

SEQ ID NO: 725325 - RNA, 19 nt, Homo sapiens
  misc_RNA (1)...(19): siRNA sense strand
ggacaacuccuaccuguac

SEQ ID NO: 725326 - RNA, 19 nt, Homo sapiens
  misc_RNA (1)...(19): siRNA sense strand
ccaguaacuuugacgacua

SEQ ID NO: 725327 - RNA, 19 nt, Homo sapiens
  misc_RNA (1)...(19): siRNA sense strand
gaagugugccaaggaguuu

SEQ ID NO: 725328 - RNA, 19 nt, Homo sapiens
  misc_RNA (1)...(19): siRNA sense strand
ggagauuuccucuacagau

SEQ ID NO: 725329 - RNA, 19 nt, Homo sapiens
  misc_RNA (1)...(19): siRNA sense strand
ggaucgccaucuaugagaa

SEQ ID NO: 725330 - RNA, 19 nt, Homo sapiens
  misc_RNA (1)...(19): siRNA sense strand
ccagcuggaucgccaucua

SEQ ID NO: 725331 - RNA, 19 nt, Homo sapiens
  misc_RNA (1)...(19): siRNA sense strand
ugaagauccucaacaagca

SEQ ID NO: 725332 - RNA, 19 nt, Homo sapiens
  misc_RNA (1)...(19): siRNA sense strand
gagaucauccugagcaaag

SEQ ID NO: 725333 - RNA, 19 nt, Homo sapiens
  misc_RNA (1)...(19): siRNA sense strand
aagcuccaguucuccuuua

SEQ ID NO: 725334 - RNA, 19 nt, Homo sapiens
  misc_RNA (1)...(19): siRNA sense strand
agaagguggugaagaugaa

SEQ ID NO: 725335 - RNA, 19 nt, Homo sapiens
  misc_RNA (1)...(19): siRNA sense strand
gaagcaggucgagcacaua

SEQ ID NO: 725336 - RNA, 19 nt, Homo sapiens
  misc_RNA (1)...(19): siRNA sense strand
ucaccaagcgcuucggaaa

SEQ ID NO: 725337 - RNA, 19 nt, Homo sapiens
  misc_RNA (1)...(19): siRNA sense strand
ccaaggaguuuucugaguu

SEQ ID NO: 725338 - RNA, 19 nt, Homo sapiens
  misc_RNA (1)...(19): siRNA sense strand
ugaagcaggucgagcacau

SEQ ID NO: 725339 - RNA, 19 nt, Homo sapiens
  misc_RNA (1)...(19): siRNA sense strand
ccauccagaucuacgagaa

SEQ ID NO: 725340 - RNA, 19 nt, Homo sapiens
  misc_RNA (1)...(19): siRNA sense strand
caaggaguuuucugaguuu

SEQ ID NO: 725341 - RNA, 19 nt, Homo sapiens
  misc_RNA (1)...(19): siRNA sense strand
cagaagguggugaagauga

SEQ ID NO: 725342 - RNA, 19 nt, Homo sapiens
  misc_RNA (1)...(19): siRNA sense strand
cuccggaucuccaucaaug

SEQ ID NO: 725343 - RNA, 19 nt, Homo sapiens
  misc_RNA (1)...(19): siRNA sense strand
gcacauacugaacgagaag

SEQ ID NO: 725344 - RNA, 19 nt, Homo sapiens
  misc_RNA (1)...(19): siRNA sense strand
gggaugccaguaacuuuga

SEQ ID NO: 725345 - RNA, 19 nt, Homo sapiens
  misc_RNA (1)...(19): siRNA sense strand
gaacgggguuggcgacauc

SEQ ID NO: 725346 - RNA, 19 nt, Homo sapiens
  misc_RNA (1)...(19): siRNA sense strand
gcaggucgagcacauacug

SEQ ID NO: 725347 - RNA, 19 nt, Homo sapiens
  misc_RNA (1)...(19): siRNA sense strand
cagcgcgucggaagguuua

SEQ ID NO: 725348 - RNA, 19 nt, Homo sapiens
  misc_RNA (1)...(19): siRNA sense strand
agcagaagguggugaagau

SEQ ID NO: 725349 - RNA, 19 nt, Homo sapiens
  misc_RNA (1)...(19): siRNA sense strand
cagcucggaucaguucgaa

SEQ ID NO: 725350 - RNA, 19 nt, Homo sapiens
  misc_RNA (1)...(19): siRNA sense strand
gcagaagguggugaagaug

SEQ ID NO: 725351 - RNA, 19 nt, Homo sapiens
  misc_RNA (1)...(19): siRNA sense strand
ccaaagccagaggagauuu

SEQ ID NO: 725352 - RNA, 19 nt, Homo sapiens
  misc_RNA (1)...(19): siRNA sense strand
caagcuccaguucuccuuu

SEQ ID NO: 725353 - RNA, 19 nt, Homo sapiens
  misc_RNA (1)...(19): siRNA sense strand
caaagccagaggagauuuc

SEQ ID NO: 725354 - RNA, 19 nt, Homo sapiens
  misc_RNA (1)...(19): siRNA sense strand
gagcuccggaucuccauca

SEQ ID NO: 725355 - RNA, 19 nt, Homo sapiens
  misc_RNA (1)...(19): siRNA sense strand
gcuggaucgccaucuauga

SEQ ID NO: 725356 - RNA, 19 nt, Homo sapiens
  misc_RNA (1)...(19): siRNA sense strand
gaccagcccauccagaucu

SEQ ID NO: 725357 - RNA, 19 nt, Homo sapiens
  misc_RNA (1)...(19): siRNA sense strand
agaagugugccaaggaguu

SEQ ID NO: 725358 - RNA, 19 nt, Homo sapiens
  misc_RNA (1)...(19): siRNA sense strand
gaggaagagcuccggaucu

SEQ ID NO: 725359 - RNA, 19 nt, Homo sapiens
  misc_RNA (1)...(19): siRNA sense strand
ccacuacgccaugaagauc

SEQ ID NO: 725360 - RNA, 19 nt, Homo sapiens
  misc_RNA (1)...(19): siRNA sense strand
gccaaagccagaggagauu

SEQ ID NO: 725361 - RNA, 19 nt, Homo sapiens
  misc_RNA (1)...(19): siRNA sense strand
aggagagcgugaacgaguu

SEQ ID NO: 725362 - RNA, 19 nt, Homo sapiens
  misc_RNA (1)...(19): siRNA sense strand
aggaagagcuccggaucuc

SEQ ID NO: 725363 - RNA, 19 nt, Homo sapiens
  misc_RNA (1)...(19): siRNA sense strand
gauguucucccgccuacag

SEQ ID NO: 725364 - RNA, 19 nt, Homo sapiens
  misc_RNA (1)...(19): siRNA sense strand
ggugcgguuucccuccaaa

SEQ ID NO: 725365 - RNA, 19 nt, Homo sapiens
  misc_RNA (1)...(19): siRNA sense strand
caguaacuuugacgacuac

SEQ ID NO: 725366 - RNA, 19 nt, Homo sapiens
  misc_RNA (1)...(19): siRNA sense strand
ggaguuuucugaguuuuag

SEQ ID NO: 725367 - RNA, 19 nt, Homo sapiens
  misc_RNA (1)...(19): siRNA sense strand
caaauaaucuggaaaccua

SEQ ID NO: 725368 - RNA, 19 nt, Homo sapiens
  misc_RNA (1)...(19): siRNA sense strand
gaagaaacgaggaauaaua

SEQ ID NO: 725369 - RNA, 19 nt, Homo sapiens
  misc_RNA (1)...(19): siRNA sense strand
gaaacucucucaucccaaa

SEQ ID NO: 725370 - RNA, 19 nt, Homo sapiens
  misc_RNA (1)...(19): siRNA sense strand
aagaacagcucaucaagaa

SEQ ID NO: 725371 - RNA, 19 nt, Homo sapiens
  misc_RNA (1)...(19): siRNA sense strand
ggaaugggcaugaaggaua

SEQ ID NO: 725372 - RNA, 19 nt, Homo sapiens
  misc_RNA (1)...(19): siRNA sense strand
gaacagcucaucaagaaau

SEQ ID NO: 725373 - RNA, 19 nt, Homo sapiens
  misc_RNA (1)...(19): siRNA sense strand
gaacuucucccucgaacuu

SEQ ID NO: 725374 - RNA, 19 nt, Homo sapiens
  misc_RNA (1)...(19): siRNA sense strand
gaacaaucccuguauaaag

SEQ ID NO: 725375 - RNA, 19 nt, Homo sapiens
  misc_RNA (1)...(19): siRNA sense strand
acacacgucuaccagauua

SEQ ID NO: 725376 - RNA, 19 nt, Homo sapiens
  misc_RNA (1)...(19): siRNA sense strand
ugaagaaacuguggucauu

SEQ ID NO: 725377 - RNA, 19 nt, Homo sapiens
  misc_RNA (1)...(19): siRNA sense strand
gaaugggcaugaaggauau

SEQ ID NO: 725378 - RNA, 19 nt, Homo sapiens
  misc_RNA (1)...(19): siRNA sense strand
gagaacaaucccuguauaa

SEQ ID NO: 725379 - RNA, 19 nt, Homo sapiens
  misc_RNA (1)...(19): siRNA sense strand
ugagaacaaucccuguaua

SEQ ID NO: 725380 - RNA, 19 nt, Homo sapiens
  misc_RNA (1)...(19): siRNA sense strand
gaagaacagcucaucaaga

SEQ ID NO: 725381 - RNA, 19 nt, Homo sapiens
  misc_RNA (1)...(19): siRNA sense strand
ccaaggcuguuguaaguga

SEQ ID NO: 725382 - RNA, 19 nt, Homo sapiens
  misc_RNA (1)...(19): siRNA sense strand
gcaguuaucugguggaaaa

SEQ ID NO: 725383 - RNA, 19 nt, Homo sapiens
  misc_RNA (1)...(19): siRNA sense strand
acaacuaccuccuauaugu

SEQ ID NO: 725384 - RNA, 19 nt, Homo sapiens
  misc_RNA (1)...(19): siRNA sense strand
ggacaggaaugggcaugaa

SEQ ID NO: 725385 - RNA, 19 nt, Homo sapiens
  misc_RNA (1)...(19): siRNA sense strand
ggaaagagagaccagaaga

SEQ ID NO: 725386 - RNA, 19 nt, Homo sapiens
  misc_RNA (1)...(19): siRNA sense strand
acaguuuggugccuaaaua

SEQ ID NO: 725387 - RNA, 19 nt, Homo sapiens
  misc_RNA (1)...(19): siRNA sense strand
agaggaggcugaaguaaug

SEQ ID NO: 725388 - RNA, 19 nt, Homo sapiens
  misc_RNA (1)...(19): siRNA sense strand
gcuacuggcucaacaagga

SEQ ID NO: 725389 - RNA, 19 nt, Homo sapiens
  misc_RNA (1)...(19): siRNA sense strand
ccaagaaugcuucaaagaa

SEQ ID NO: 725390 - RNA, 19 nt, Homo sapiens
  misc_RNA (1)...(19): siRNA sense strand
caccaaggcuguuguaagu

SEQ ID NO: 725391 - RNA, 19 nt, Homo sapiens
  misc_RNA (1)...(19): siRNA sense strand
gacaacaggcgaccacuuu

SEQ ID NO: 725392 - RNA, 19 nt, Homo sapiens
  misc_RNA (1)...(19): siRNA sense strand
ggacaagguggcuaucaaa

SEQ ID NO: 725393 - RNA, 19 nt, Homo sapiens
  misc_RNA (1)...(19): siRNA sense strand
caaccaagaaugcuucaaa

SEQ ID NO: 725394 - RNA, 19 nt, Homo sapiens
  misc_RNA (1)...(19): siRNA sense strand
gaaacgaggaauaauaaca

SEQ ID NO: 725395 - RNA, 19 nt, Homo sapiens
  misc_RNA (1)...(19): siRNA sense strand
agacaucaguaccggauuu

SEQ ID NO: 725396 - RNA, 19 nt, Homo sapiens
  misc_RNA (1)...(19): siRNA sense strand
ggacacaggcaaagaagga

SEQ ID NO: 725397 - RNA, 19 nt, Homo sapiens
  misc_RNA (1)...(19): siRNA sense strand
ccauugagcucucccgaau

SEQ ID NO: 725398 - RNA, 19 nt, Homo sapiens
  misc_RNA (1)...(19): siRNA sense strand
cgacuccgguauccaguuu

SEQ ID NO: 725399 - RNA, 19 nt, Homo sapiens
  misc_RNA (1)...(19): siRNA sense strand
ucaacuaucaccaacauaa

SEQ ID NO: 725400 - RNA, 19 nt, Homo sapiens
  misc_RNA (1)...(19): siRNA sense strand
gggcauggccuaccuggaa

SEQ ID NO: 725401 - RNA, 19 nt, Homo sapiens
  misc_RNA (1)...(19): siRNA sense strand
gaugaucaguacaccaguu

SEQ ID NO: 725402 - RNA, 19 nt, Homo sapiens
  misc_RNA (1)...(19): siRNA sense strand
ugacaacuaccuccuauau

SEQ ID NO: 725403 - RNA, 19 nt, Homo sapiens
  misc_RNA (1)...(19): siRNA sense strand
ggaagaggcaugugucauc

SEQ ID NO: 725404 - RNA, 19 nt, Homo sapiens
  misc_RNA (1)...(19): siRNA sense strand
cgaggaauaauaacaguuu

SEQ ID NO: 725405 - RNA, 19 nt, Homo sapiens
  misc_RNA (1)...(19): siRNA sense strand
caagguucguucuggauga

SEQ ID NO: 725406 - RNA, 19 nt, Homo sapiens
  misc_RNA (1)...(19): siRNA sense strand
ccaaacuggugcagcugua

SEQ ID NO: 725407 - RNA, 19 nt, Homo sapiens
  misc_RNA (1)...(19): siRNA sense strand
ggaaacaaaugacaauccu

SEQ ID NO: 725408 - RNA, 19 nt, Homo sapiens
  misc_RNA (1)...(19): siRNA sense strand
gcugggugcuggcccuuaa

SEQ ID NO: 725409 - RNA, 19 nt, Homo sapiens
  misc_RNA (1)...(19): siRNA sense strand
ccacacacgucuaccagau

SEQ ID NO: 725410 - RNA, 19 nt, Homo sapiens
  misc_RNA (1)...(19): siRNA sense strand
gugcugaugugggaaguuu

SEQ ID NO: 725411 - RNA, 19 nt, Homo sapiens
  misc_RNA (1)...(19): siRNA sense strand
gcuggacaguucugagauu

SEQ ID NO: 725412 - RNA, 19 nt, Homo sapiens
  misc_RNA (1)...(19): siRNA sense strand
gaaguaaugaugaaacucu

SEQ ID NO: 725413 - RNA, 19 nt, Homo sapiens
  misc_RNA (1)...(19): siRNA sense strand
gaaagagagaccagaagau

SEQ ID NO: 725414 - RNA, 19 nt, Homo sapiens
  misc_RNA (1)...(19): siRNA sense strand
acucagaggugguggaaga

SEQ ID NO: 725415 - RNA, 19 nt, Homo sapiens
  misc_RNA (1)...(19): siRNA sense strand
aaagaagaaacgaggaaua

SEQ ID NO: 725416 - RNA, 19 nt, Homo sapiens
  misc_RNA (1)...(19): siRNA sense strand
caucaacuaucaccaacau

SEQ ID NO: 725417 - RNA, 19 nt, Homo sapiens
  misc_RNA (1)...(19): siRNA sense strand
gaagaaacuguggucauug

SEQ ID NO: 725418 - RNA, 19 nt, Homo sapiens
  misc_RNA (1)...(19): siRNA sense strand
gaggaauaauaacaguuug

SEQ ID NO: 725419 - RNA, 19 nt, Homo sapiens
  misc_RNA (1)...(19): siRNA sense strand
caugacaacuaccuccuau

SEQ ID NO: 725420 - RNA, 19 nt, Homo sapiens
  misc_RNA (1)...(19): siRNA sense strand
ucaacuggcugaaauugca

SEQ ID NO: 725421 - RNA, 19 nt, Homo sapiens
  misc_RNA (1)...(19): siRNA sense strand
ccuaugagugguacaauaa

SEQ ID NO: 725422 - RNA, 19 nt, Homo sapiens
  misc_RNA (1)...(19): siRNA sense strand
gauauguaccaagcaguua

SEQ ID NO: 725423 - RNA, 19 nt, Homo sapiens
  misc_RNA (1)...(19): siRNA sense strand
aagaagaaacgaggaauaa

SEQ ID NO: 725424 - RNA, 19 nt, Homo sapiens
  misc_RNA (1)...(19): siRNA sense strand
gaaacaaaugacaauccua

SEQ ID NO: 725425 - RNA, 19 nt, Homo sapiens
  misc_RNA (1)...(19): siRNA sense strand
ggauauguaccaagcaguu

SEQ ID NO: 725426 - RNA, 19 nt, Homo sapiens
  misc_RNA (1)...(19): siRNA sense strand
cauagaggaggcugaagua

SEQ ID NO: 725427 - RNA, 19 nt, Homo sapiens
  misc_RNA (1)...(19): siRNA sense strand
ggaagaacagcucaucaag

SEQ ID NO: 725428 - RNA, 19 nt, Homo sapiens
  misc_RNA (1)...(19): siRNA sense strand
gauacuauguggcugaaaa

SEQ ID NO: 725429 - RNA, 19 nt, Homo sapiens
  misc_RNA (1)...(19): siRNA sense strand
caaggaaacaaaugacaau

SEQ ID NO: 725430 - RNA, 19 nt, Homo sapiens
  misc_RNA (1)...(19): siRNA sense strand
ccaucugccugguguuuga

SEQ ID NO: 725431 - RNA, 19 nt, Homo sapiens
  misc_RNA (1)...(19): siRNA sense strand
aaucacugcuggaaagaga

SEQ ID NO: 725432 - RNA, 19 nt, Homo sapiens
  misc_RNA (1)...(19): siRNA sense strand
caucaaggugucugacuuu

SEQ ID NO: 725433 - RNA, 19 nt, Homo sapiens
  misc_RNA (1)...(19): siRNA sense strand
gugccuaaauaucauccua

SEQ ID NO: 725434 - RNA, 19 nt, Homo sapiens
  misc_RNA (1)...(19): siRNA sense strand
gcaaaaucccguaugaaaa

SEQ ID NO: 725435 - RNA, 19 nt, Homo sapiens
  misc_RNA (1)...(19): siRNA sense strand
ccucagagcucacuuuugu

SEQ ID NO: 725436 - RNA, 19 nt, Homo sapiens
  misc_RNA (1)...(19): siRNA sense strand
uaugagugguacaauaaga

SEQ ID NO: 725437 - RNA, 19 nt, Homo sapiens
  misc_RNA (1)...(19): siRNA sense strand
ucccaugccacuauaaaua

SEQ ID NO: 725438 - RNA, 19 nt, Homo sapiens
  misc_RNA (1)...(19): siRNA sense strand
ccaaauucccggugaagug

SEQ ID NO: 725439 - RNA, 19 nt, Homo sapiens
  misc_RNA (1)...(19): siRNA sense strand
gggcugagauacgggaaau

SEQ ID NO: 725440 - RNA, 19 nt, Homo sapiens
  misc_RNA (1)...(19): siRNA sense strand
aauaugauccaaccaagaa

SEQ ID NO: 725441 - RNA, 19 nt, Homo sapiens
  misc_RNA (1)...(19): siRNA sense strand
gccuaaauaucauccuaau

SEQ ID NO: 725442 - RNA, 19 nt, Homo sapiens
  misc_RNA (1)...(19): siRNA sense strand
ggugcuggcccuuaaagaa

SEQ ID NO: 725443 - RNA, 19 nt, Homo sapiens
  misc_RNA (1)...(19): siRNA sense strand
gcagaaagccccaguuaca

SEQ ID NO: 725444 - RNA, 19 nt, Homo sapiens
  misc_RNA (1)...(19): siRNA sense strand
aaaaguauguguucgauuc

SEQ ID NO: 725445 - RNA, 19 nt, Homo sapiens
  misc_RNA (1)...(19): siRNA sense strand
gaguaucagccgagacaaa

SEQ ID NO: 725446 - RNA, 19 nt, Homo sapiens
  misc_RNA (1)...(19): siRNA sense strand
acggcugccugucagauua

SEQ ID NO: 725447 - RNA, 19 nt, Homo sapiens
  misc_RNA (1)...(19): siRNA sense strand
gcaugacaacuaccuccua

SEQ ID NO: 725448 - RNA, 19 nt, Homo sapiens
  misc_RNA (1)...(19): siRNA sense strand
aucaagaaaucccaacaaa

SEQ ID NO: 725449 - RNA, 19 nt, Homo sapiens
  misc_RNA (1)...(19): siRNA sense strand
caagaaaucccaacaaaag

SEQ ID NO: 725450 - RNA, 19 nt, Homo sapiens
  misc_RNA (1)...(19): siRNA sense strand
caaauguguugagauugug

SEQ ID NO: 725451 - RNA, 19 nt, Homo sapiens
  misc_RNA (1)...(19): siRNA sense strand
uggcugaaauugcagaauc

SEQ ID NO: 725452 - RNA, 19 nt, Homo sapiens
  misc_RNA (1)...(19): siRNA sense strand
caacuaucaccaacauaau

SEQ ID NO: 725453 - RNA, 19 nt, Homo sapiens
  misc_RNA (1)...(19): siRNA sense strand
gaagaucgucaugggaaga

SEQ ID NO: 725454 - RNA, 19 nt, Homo sapiens
  misc_RNA (1)...(19): siRNA sense strand
agaacaaucccuguauaaa

SEQ ID NO: 725455 - RNA, 19 nt, Homo sapiens
  misc_RNA (1)...(19): siRNA sense strand
ucaucaaggugucugacuu

SEQ ID NO: 725456 - RNA, 19 nt, Homo sapiens
  misc_RNA (1)...(19): siRNA sense strand
ucacaucaaggaaacaaau

SEQ ID NO: 725457 - RNA, 19 nt, Homo sapiens
  misc_RNA (1)...(19): siRNA sense strand
ggaaggggcuaugucagaa

SEQ ID NO: 725458 - RNA, 19 nt, Homo sapiens
  misc_RNA (1)...(19): siRNA sense strand
cguuucagguggugcauga

SEQ ID NO: 725459 - RNA, 19 nt, Homo sapiens
  misc_RNA (1)...(19): siRNA sense strand
ggcugaaauugcagaauca

SEQ ID NO: 725460 - RNA, 19 nt, Homo sapiens
  misc_RNA (1)...(19): siRNA sense strand
gggcaugugucuggaugug

SEQ ID NO: 725461 - RNA, 19 nt, Homo sapiens
  misc_RNA (1)...(19): siRNA sense strand
caauaugauccaaccaaga

SEQ ID NO: 725462 - RNA, 19 nt, Homo sapiens
  misc_RNA (1)...(19): siRNA sense strand
aaagagagaccagaagauc

SEQ ID NO: 725463 - RNA, 19 nt, Homo sapiens
  misc_RNA (1)...(19): siRNA sense strand
ggcaaaaucccguaugaaa

SEQ ID NO: 725464 - RNA, 19 nt, Homo sapiens
  misc_RNA (1)...(19): siRNA sense strand
gcgauacuauguggcugaa

SEQ ID NO: 725465 - RNA, 19 nt, Homo sapiens
  misc_RNA (1)...(19): siRNA sense strand
ucaaggaaacaaaugacaa

SEQ ID NO: 725466 - RNA, 19 nt, Homo sapiens
  misc_RNA (1)...(19): siRNA sense strand
ggacaguucugagauucac

SEQ ID NO: 725467 - RNA, 19 nt, Homo sapiens
  misc_RNA (1)...(19): siRNA sense strand
gaaacugccaucaauauua

SEQ ID NO: 725468 - RNA, 19 nt, Homo sapiens
  misc_RNA (1)...(19): siRNA sense strand
gaaugaaacugccaucaau

SEQ ID NO: 725469 - RNA, 19 nt, Homo sapiens
  misc_RNA (1)...(19): siRNA sense strand
caacuacagugaaauccua

SEQ ID NO: 725470 - RNA, 19 nt, Homo sapiens
  misc_RNA (1)...(19): siRNA sense strand
gcuggaagcugagaucauu

SEQ ID NO: 725471 - RNA, 19 nt, Homo sapiens
  misc_RNA (1)...(19): siRNA sense strand
gauggacacugcaaagaga

SEQ ID NO: 725472 - RNA, 19 nt, Homo sapiens
  misc_RNA (1)...(19): siRNA sense strand
agaccgagguggacuguaa

SEQ ID NO: 725473 - RNA, 19 nt, Homo sapiens
  misc_RNA (1)...(19): siRNA sense strand
gugaaauccuagacaagua

SEQ ID NO: 725474 - RNA, 19 nt, Homo sapiens
  misc_RNA (1)...(19): siRNA sense strand
gagaagaaauccguaaguc

SEQ ID NO: 725475 - RNA, 19 nt, Homo sapiens
  misc_RNA (1)...(19): siRNA sense strand
aggaggagaugaccagaua

SEQ ID NO: 725476 - RNA, 19 nt, Homo sapiens
  misc_RNA (1)...(19): siRNA sense strand
gaacuuugauaauggugau

SEQ ID NO: 725477 - RNA, 19 nt, Homo sapiens
  misc_RNA (1)...(19): siRNA sense strand
ccaucaauauuacaacgua

SEQ ID NO: 725478 - RNA, 19 nt, Homo sapiens
  misc_RNA (1)...(19): siRNA sense strand
ccagugaauuccugaaguu

SEQ ID NO: 725479 - RNA, 19 nt, Homo sapiens
  misc_RNA (1)...(19): siRNA sense strand
caagaucugugccaaugug

SEQ ID NO: 725480 - RNA, 19 nt, Homo sapiens
  misc_RNA (1)...(19): siRNA sense strand
gaucugugccaauguguuu

SEQ ID NO: 725481 - RNA, 19 nt, Homo sapiens
  misc_RNA (1)...(19): siRNA sense strand
ggcagcaacuacagugaaa

SEQ ID NO: 725482 - RNA, 19 nt, Homo sapiens
  misc_RNA (1)...(19): siRNA sense strand
gaaaagaccaagagaguga

SEQ ID NO: 725483 - RNA, 19 nt, Homo sapiens
  misc_RNA (1)...(19): siRNA sense strand
gugaauuccugaaguuugu

SEQ ID NO: 725484 - RNA, 19 nt, Homo sapiens
  misc_RNA (1)...(19): siRNA sense strand
gcaguaauggcaagaccua

SEQ ID NO: 725485 - RNA, 19 nt, Homo sapiens
  misc_RNA (1)...(19): siRNA sense strand
gaagagcuaaggagcaaau

SEQ ID NO: 725486 - RNA, 19 nt, Homo sapiens
  misc_RNA (1)...(19): siRNA sense strand
gaugaaacguaugcagaug

SEQ ID NO: 725487 - RNA, 19 nt, Homo sapiens
  misc_RNA (1)...(19): siRNA sense strand
aaacugccaucaauauuac

SEQ ID NO: 725488 - RNA, 19 nt, Homo sapiens
  misc_RNA (1)...(19): siRNA sense strand
ccaccugucucugcauuga

SEQ ID NO: 725489 - RNA, 19 nt, Homo sapiens
  misc_RNA (1)...(19): siRNA sense strand
gagcaaauccaagaucugu

SEQ ID NO: 725490 - RNA, 19 nt, Homo sapiens
  misc_RNA (1)...(19): siRNA sense strand
gcugagaucauuccagaug

SEQ ID NO: 725491 - RNA, 19 nt, Homo sapiens
  misc_RNA (1)...(19): siRNA sense strand
acagugaaauccuagacaa

SEQ ID NO: 725492 - RNA, 19 nt, Homo sapiens
  misc_RNA (1)...(19): siRNA sense strand
ugaaaaugcugauuggaaa

SEQ ID NO: 725493 - RNA, 19 nt, Homo sapiens
  misc_RNA (1)...(19): siRNA sense strand
ugaaguuuguggaacagaa

SEQ ID NO: 725494 - RNA, 19 nt, Homo sapiens
  misc_RNA (1)...(19): siRNA sense strand
ugaaacguaugcagaugga

SEQ ID NO: 725495 - RNA, 19 nt, Homo sapiens
  misc_RNA (1)...(19): siRNA sense strand
uccaagaguuucucaagug

SEQ ID NO: 725496 - RNA, 19 nt, Homo sapiens
  misc_RNA (1)...(19): siRNA sense strand
gaggagaugaccagauaug

SEQ ID NO: 725497 - RNA, 19 nt, Homo sapiens
  misc_RNA (1)...(19): siRNA sense strand
cuaaggagcaaauccaaga

SEQ ID NO: 725498 - RNA, 19 nt, Homo sapiens
  misc_RNA (1)...(19): siRNA sense strand
aaagagaagaaauccguaa

SEQ ID NO: 725499 - RNA, 19 nt, Homo sapiens
  misc_RNA (1)...(19): siRNA sense strand
ggaugaaacguaugcagau

SEQ ID NO: 725500 - RNA, 19 nt, Homo sapiens
  misc_RNA (1)...(19): siRNA sense strand
gaaacucagcuuccaagag

SEQ ID NO: 725501 - RNA, 19 nt, Homo sapiens
  misc_RNA (1)...(19): siRNA sense strand
ugaaacugccaucaauauu

SEQ ID NO: 725502 - RNA, 19 nt, Homo sapiens
  misc_RNA (1)...(19): siRNA sense strand
gaaauccuagacaaguauu

SEQ ID NO: 725503 - RNA, 19 nt, Homo sapiens
  misc_RNA (1)...(19): siRNA sense strand
ccagguugauuacgaugga

SEQ ID NO: 725504 - RNA, 19 nt, Homo sapiens
  misc_RNA (1)...(19): siRNA sense strand
ggagaugaccagauauguc

SEQ ID NO: 725505 - RNA, 19 nt, Homo sapiens
  misc_RNA (1)...(19): siRNA sense strand
caagagagugagcaccaaa

SEQ ID NO: 725506 - RNA, 19 nt, Homo sapiens
  misc_RNA (1)...(19): siRNA sense strand
agagugagcaccaaagaga

SEQ ID NO: 725507 - RNA, 19 nt, Homo sapiens
  misc_RNA (1)...(19): siRNA sense strand
caaccacugugaacugcau

SEQ ID NO: 725508 - RNA, 19 nt, Homo sapiens
  misc_RNA (1)...(19): siRNA sense strand
gcuccgacgucgcaucauc

SEQ ID NO: 725509 - RNA, 19 nt, Homo sapiens
  misc_RNA (1)...(19): siRNA sense strand
gauggcugguucucuaaag

SEQ ID NO: 725510 - RNA, 19 nt, Homo sapiens
  misc_RNA (1)...(19): siRNA sense strand
uccaagaucugugccaaug

SEQ ID NO: 725511 - RNA, 19 nt, Homo sapiens
  misc_RNA (1)...(19): siRNA sense strand
ccuggaggaugaaacguau

SEQ ID NO: 725512 - RNA, 19 nt, Homo sapiens
  misc_RNA (1)...(19): siRNA sense strand
gauccaaaauccagguuga

SEQ ID NO: 725513 - RNA, 19 nt, Homo sapiens
  misc_RNA (1)...(19): siRNA sense strand
gaaguuuguggaacagaau

SEQ ID NO: 725514 - RNA, 19 nt, Homo sapiens
  misc_RNA (1)...(19): siRNA sense strand
gagcaccaaagagaucuaa

SEQ ID NO: 725515 - RNA, 19 nt, Homo sapiens
  misc_RNA (1)...(19): siRNA sense strand
cagcccaguuguuugcuau

SEQ ID NO: 725516 - RNA, 19 nt, Homo sapiens
  misc_RNA (1)...(19): siRNA sense strand
gcaaugcaaaccucacaag

SEQ ID NO: 725517 - RNA, 19 nt, Homo sapiens
  misc_RNA (1)...(19): siRNA sense strand
ccaagagagugagcaccaa

SEQ ID NO: 725518 - RNA, 19 nt, Homo sapiens
  misc_RNA (1)...(19): siRNA sense strand
aaugaaacugccaucaaua

SEQ ID NO: 725519 - RNA, 19 nt, Homo sapiens
  misc_RNA (1)...(19): siRNA sense strand
agaaugaaacugccaucaa

SEQ ID NO: 725520 - RNA, 19 nt, Homo sapiens
  misc_RNA (1)...(19): siRNA sense strand
aggaagagcuaaggagcaa

SEQ ID NO: 725521 - RNA, 19 nt, Homo sapiens
  misc_RNA (1)...(19): siRNA sense strand
ccaguuguuugcuaucagu

SEQ ID NO: 725522 - RNA, 19 nt, Homo sapiens
  misc_RNA (1)...(19): siRNA sense strand
ggaaauugggucuguacag

SEQ ID NO: 725523 - RNA, 19 nt, Homo sapiens
  misc_RNA (1)...(19): siRNA sense strand
ugaaauccuagacaaguau

SEQ ID NO: 725524 - RNA, 19 nt, Homo sapiens
  misc_RNA (1)...(19): siRNA sense strand
gagcuccgacgucgcauca

SEQ ID NO: 725525 - RNA, 19 nt, Homo sapiens
  misc_RNA (1)...(19): siRNA sense strand
caaugcaaaccucacaaga

SEQ ID NO: 725526 - RNA, 19 nt, Homo sapiens
  misc_RNA (1)...(19): siRNA sense strand
gagcaaugcaaaccucaca

SEQ ID NO: 725527 - RNA, 19 nt, Homo sapiens
  misc_RNA (1)...(19): siRNA sense strand
ugaacugucugaugaaaau

SEQ ID NO: 725528 - RNA, 19 nt, Homo sapiens
  misc_RNA (1)...(19): siRNA sense strand
gagcuaaggagcaaaucca

SEQ ID NO: 725529 - RNA, 19 nt, Homo sapiens
  misc_RNA (1)...(19): siRNA sense strand
agugugcccuggaggauga

SEQ ID NO: 725530 - RNA, 19 nt, Homo sapiens
  misc_RNA (1)...(19): siRNA sense strand
gaagugugcccuggaggau

SEQ ID NO: 725531 - RNA, 19 nt, Homo sapiens
  misc_RNA (1)...(19): siRNA sense strand
gcccaguuguuugcuauca

SEQ ID NO: 725532 - RNA, 19 nt, Homo sapiens
  misc_RNA (1)...(19): siRNA sense strand
ccagcccaguuguuugcua

SEQ ID NO: 725533 - RNA, 19 nt, Homo sapiens
  misc_RNA (1)...(19): siRNA sense strand
uuucaacccuccugagaag

SEQ ID NO: 725534 - RNA, 19 nt, Homo sapiens
  misc_RNA (1)...(19): siRNA sense strand
ucaacccuccugagaagaa

SEQ ID NO: 725535 - RNA, 19 nt, Homo sapiens
  misc_RNA (1)...(19): siRNA sense strand
cagcaacuacagugaaauc

SEQ ID NO: 725536 - RNA, 19 nt, Homo sapiens
  misc_RNA (1)...(19): siRNA sense strand
uguugaugcucucauugaa

SEQ ID NO: 725537 - RNA, 19 nt, Homo sapiens
  misc_RNA (1)...(19): siRNA sense strand
ggacacugcaaagagaaga

SEQ ID NO: 725538 - RNA, 19 nt, Homo sapiens
  misc_RNA (1)...(19): siRNA sense strand
cugccucacuggauccaaa

SEQ ID NO: 725539 - RNA, 19 nt, Homo sapiens
  misc_RNA (1)...(19): siRNA sense strand
guguugaugcucucauuga

SEQ ID NO: 725540 - RNA, 19 nt, Homo sapiens
  misc_RNA (1)...(19): siRNA sense strand
gaccugugacggaaagaau

SEQ ID NO: 725541 - RNA, 19 nt, Homo sapiens
  misc_RNA (1)...(19): siRNA sense strand
cagauggcugguucucuaa

SEQ ID NO: 725542 - RNA, 19 nt, Homo sapiens
  misc_RNA (1)...(19): siRNA sense strand
gucugugccuguggaaauu

SEQ ID NO: 725543 - RNA, 19 nt, Homo sapiens
  misc_RNA (1)...(19): siRNA sense strand
caugaccugugacggaaag

SEQ ID NO: 725544 - RNA, 19 nt, Homo sapiens
  misc_RNA (1)...(19): siRNA sense strand
gaaauccguaaguccaucu

SEQ ID NO: 725545 - RNA, 19 nt, Homo sapiens
  misc_RNA (1)...(19): siRNA sense strand
uaaaggcagcaacuacagu

SEQ ID NO: 725546 - RNA, 19 nt, Homo sapiens
  misc_RNA (1)...(19): siRNA sense strand
ggagcaaauccaagaucug

SEQ ID NO: 725547 - RNA, 19 nt, Homo sapiens
  misc_RNA (1)...(19): siRNA sense strand
ccaaaagcaucaggaaaca

SEQ ID NO: 725548 - RNA, 19 nt, Homo sapiens
  misc_RNA (1)...(19): siRNA sense strand
augaaacugccaucaauau

SEQ ID NO: 725549 - RNA, 19 nt, Homo sapiens
  misc_RNA (1)...(19): siRNA sense strand
gacuguaaccgcugugucu

SEQ ID NO: 725550 - RNA, 19 nt, Homo sapiens
  misc_RNA (1)...(19): siRNA sense strand
agagagugagcaccaaaga

SEQ ID NO: 725551 - RNA, 19 nt, Homo sapiens
  misc_RNA (1)...(19): siRNA sense strand
ggaggagaugaccagauau

SEQ ID NO: 725552 - RNA, 19 nt, Homo sapiens
  misc_RNA (1)...(19): siRNA sense strand
gaggaggagaugaccagau

SEQ ID NO: 725553 - RNA, 19 nt, Homo sapiens
  misc_RNA (1)...(19): siRNA sense strand
guacagaucuccagaagua

SEQ ID NO: 725554 - RNA, 19 nt, Homo sapiens
  misc_RNA (1)...(19): siRNA sense strand
gaucaacucuucaggauuu

SEQ ID NO: 725555 - RNA, 19 nt, Homo sapiens
  misc_RNA (1)...(19): siRNA sense strand
ccauggaucugaagaaaua

SEQ ID NO: 725556 - RNA, 19 nt, Homo sapiens
  misc_RNA (1)...(19): siRNA sense strand
gguuauaucucaucuuuga

SEQ ID NO: 725557 - RNA, 19 nt, Homo sapiens
  misc_RNA (1)...(19): siRNA sense strand
guacauggauucuucacuu

SEQ ID NO: 725558 - RNA, 19 nt, Homo sapiens
  misc_RNA (1)...(19): siRNA sense strand
gaagguaccuauggaguug

SEQ ID NO: 725559 - RNA, 19 nt, Homo sapiens
  misc_RNA (1)...(19): siRNA sense strand
ggccagaaguggaaucuuu

SEQ ID NO: 725560 - RNA, 19 nt, Homo sapiens
  misc_RNA (1)...(19): siRNA sense strand
cagguuauaucucaucuuu

SEQ ID NO: 725561 - RNA, 19 nt, Homo sapiens
  misc_RNA (1)...(19): siRNA sense strand
gaguauaggcaccauauuu

SEQ ID NO: 725562 - RNA, 19 nt, Homo sapiens
  misc_RNA (1)...(19): siRNA sense strand
ccuauggaguuguguauaa

SEQ ID NO: 725563 - RNA, 19 nt, Homo sapiens
  misc_RNA (1)...(19): siRNA sense strand
ucgggaaauuucucuauua

SEQ ID NO: 725564 - RNA, 19 nt, Homo sapiens
  misc_RNA (1)...(19): siRNA sense strand
guauaaggguagacacaaa

SEQ ID NO: 725565 - RNA, 19 nt, Homo sapiens
  misc_RNA (1)...(19): siRNA sense strand
caaacgaauuucuggcaaa

SEQ ID NO: 725566 - RNA, 19 nt, Homo sapiens
  misc_RNA (1)...(19): siRNA sense strand
cgggaaauuucucuauuaa

SEQ ID NO: 725567 - RNA, 19 nt, Homo sapiens
  misc_RNA (1)...(19): siRNA sense strand
caccauauuugcugaacua

SEQ ID NO: 725568 - RNA, 19 nt, Homo sapiens
  misc_RNA (1)...(19): siRNA sense strand
agaaauugaucaacucuuc

SEQ ID NO: 725569 - RNA, 19 nt, Homo sapiens
  misc_RNA (1)...(19): siRNA sense strand
gcacugaaucauccauauu

SEQ ID NO: 725570 - RNA, 19 nt, Homo sapiens
  misc_RNA (1)...(19): siRNA sense strand
ccaaauauagucagucuuc

SEQ ID NO: 725571 - RNA, 19 nt, Homo sapiens
  misc_RNA (1)...(19): siRNA sense strand
gcaacuaagaaaccacuuu

SEQ ID NO: 725572 - RNA, 19 nt, Homo sapiens
  misc_RNA (1)...(19): siRNA sense strand
uaugcaggauuccagguua

SEQ ID NO: 725573 - RNA, 19 nt, Homo sapiens
  misc_RNA (1)...(19): siRNA sense strand
gauuccagguuauaucuca

SEQ ID NO: 725574 - RNA, 19 nt, Homo sapiens
  misc_RNA (1)...(19): siRNA sense strand
ugaacuagcaacuaagaaa

SEQ ID NO: 725575 - RNA, 19 nt, Homo sapiens
  misc_RNA (1)...(19): siRNA sense strand
gccagaaguggaaucuuua

SEQ ID NO: 725576 - RNA, 19 nt, Homo sapiens
  misc_RNA (1)...(19): siRNA sense strand
gauccagccaaacgaauuu

SEQ ID NO: 725577 - RNA, 19 nt, Homo sapiens
  misc_RNA (1)...(19): siRNA sense strand
guacugcaauucgggaaau

SEQ ID NO: 725578 - RNA, 19 nt, Homo sapiens
  misc_RNA (1)...(19): siRNA sense strand
ccaguugacauuuggagua

SEQ ID NO: 725579 - RNA, 19 nt, Homo sapiens
  misc_RNA (1)...(19): siRNA sense strand
gucaguacauggauucuuc

SEQ ID NO: 725580 - RNA, 19 nt, Homo sapiens
  misc_RNA (1)...(19): siRNA sense strand
cugaagaaauacuuggauu

SEQ ID NO: 725581 - RNA, 19 nt, Homo sapiens
  misc_RNA (1)...(19): siRNA sense strand
acuagaaagugaagaggaa

SEQ ID NO: 725582 - RNA, 19 nt, Homo sapiens
  misc_RNA (1)...(19): siRNA sense strand
gaaauugaucaacucuuca

SEQ ID NO: 725583 - RNA, 19 nt, Homo sapiens
  misc_RNA (1)...(19): siRNA sense strand
guugacauuuggaguauag

SEQ ID NO: 725584 - RNA, 19 nt, Homo sapiens
  misc_RNA (1)...(19): siRNA sense strand
cauggauucuucacuuguu

SEQ ID NO: 725585 - RNA, 19 nt, Homo sapiens
  misc_RNA (1)...(19): siRNA sense strand
aaaucagacuagaaaguga

SEQ ID NO: 725586 - RNA, 19 nt, Homo sapiens
  misc_RNA (1)...(19): siRNA sense strand
gaacuagcaacuaagaaac

SEQ ID NO: 725587 - RNA, 19 nt, Homo sapiens
  misc_RNA (1)...(19): siRNA sense strand
caaauauagucagucuuca

SEQ ID NO: 725588 - RNA, 19 nt, Homo sapiens
  misc_RNA (1)...(19): siRNA sense strand
cacugaaucauccauauuu

SEQ ID NO: 725589 - RNA, 19 nt, Homo sapiens
  misc_RNA (1)...(19): siRNA sense strand
ggcacugaaucauccauau

SEQ ID NO: 725590 - RNA, 19 nt, Homo sapiens
  misc_RNA (1)...(19): siRNA sense strand
gaaauacuuggauucuauc

SEQ ID NO: 725591 - RNA, 19 nt, Homo sapiens
  misc_RNA (1)...(19): siRNA sense strand
ccuagcaucccaugucaaa

SEQ ID NO: 725592 - RNA, 19 nt, Homo sapiens
  misc_RNA (1)...(19): siRNA sense strand
aaucuaugauccagccaaa

SEQ ID NO: 725593 - RNA, 19 nt, Homo sapiens
  misc_RNA (1)...(19): siRNA sense strand
gcuuggauuugcucucgaa

SEQ ID NO: 725594 - RNA, 19 nt, Homo sapiens
  misc_RNA (1)...(19): siRNA sense strand
gcugaacuagcaacuaaga

SEQ ID NO: 725595 - RNA, 19 nt, Homo sapiens
  misc_RNA (1)...(19): siRNA sense strand
aacuacaggucaaguggua

SEQ ID NO: 725596 - RNA, 19 nt, Homo sapiens
  misc_RNA (1)...(19): siRNA sense strand
uauagucagucuucaggau

SEQ ID NO: 725597 - RNA, 19 nt, Homo sapiens
  misc_RNA (1)...(19): siRNA sense strand
uggagaagguaccuaugga

SEQ ID NO: 725598 - RNA, 19 nt, Homo sapiens
  misc_RNA (1)...(19): siRNA sense strand
uacauggauucuucacuug

SEQ ID NO: 725599 - RNA, 19 nt, Homo sapiens
  misc_RNA (1)...(19): siRNA sense strand
caguugacauuuggaguau

SEQ ID NO: 725600 - RNA, 19 nt, Homo sapiens
  misc_RNA (1)...(19): siRNA sense strand
ggaguauaggcaccauauu

SEQ ID NO: 725601 - RNA, 19 nt, Homo sapiens
  misc_RNA (1)...(19): siRNA sense strand
ccauggggauucagaaauu

SEQ ID NO: 725602 - RNA, 19 nt, Homo sapiens
  misc_RNA (1)...(19): siRNA sense strand
ucaagugguagccaugaaa

SEQ ID NO: 725603 - RNA, 19 nt, Homo sapiens
  misc_RNA (1)...(19): siRNA sense strand
guaguaacacucugguaca

SEQ ID NO: 725604 - RNA, 19 nt, Homo sapiens
  misc_RNA (1)...(19): siRNA sense strand
ugaagaaauacuuggauuc

SEQ ID NO: 725605 - RNA, 19 nt, Homo sapiens
  misc_RNA (1)...(19): siRNA sense strand
gcaggauuccagguuauau

SEQ ID NO: 725606 - RNA, 19 nt, Homo sapiens
  misc_RNA (1)...(19): siRNA sense strand
guaccuauggaguugugua

SEQ ID NO: 725607 - RNA, 19 nt, Homo sapiens
  misc_RNA (1)...(19): siRNA sense strand
uggaaucuuuacaggacua

SEQ ID NO: 725608 - RNA, 19 nt, Homo sapiens
  misc_RNA (1)...(19): siRNA sense strand
caacuaagaaaccacuuuu

SEQ ID NO: 725609 - RNA, 19 nt, Homo sapiens
  misc_RNA (1)...(19): siRNA sense strand
acagaucuccagaaguauu

SEQ ID NO: 725610 - RNA, 19 nt, Homo sapiens
  misc_RNA (1)...(19): siRNA sense strand
aguauaggcaccauauuug

SEQ ID NO: 725611 - RNA, 19 nt, Homo sapiens
  misc_RNA (1)...(19): siRNA sense strand
gaaaccaggaagccuagca

SEQ ID NO: 725612 - RNA, 19 nt, Homo sapiens
  misc_RNA (1)...(19): siRNA sense strand
ggggucagcucguuacuca

SEQ ID NO: 725613 - RNA, 19 nt, Homo sapiens
  misc_RNA (1)...(19): siRNA sense strand
uugaucaacucuucaggau

SEQ ID NO: 725614 - RNA, 19 nt, Homo sapiens
  misc_RNA (1)...(19): siRNA sense strand
gucaagugguagccaugaa

SEQ ID NO: 725615 - RNA, 19 nt, Homo sapiens
  misc_RNA (1)...(19): siRNA sense strand
uuccauggaucugaagaaa

SEQ ID NO: 725616 - RNA, 19 nt, Homo sapiens
  misc_RNA (1)...(19): siRNA sense strand
agaagguaccuauggaguu

SEQ ID NO: 725617 - RNA, 19 nt, Homo sapiens
  misc_RNA (1)...(19): siRNA sense strand
ggaugaaaauggcuuggau

SEQ ID NO: 725618 - RNA, 19 nt, Homo sapiens
  misc_RNA (1)...(19): siRNA sense strand
gcacucccaauaaugaagu

SEQ ID NO: 725619 - RNA, 19 nt, Homo sapiens
  misc_RNA (1)...(19): siRNA sense strand
ggauucagaaauugaucaa

SEQ ID NO: 725620 - RNA, 19 nt, Homo sapiens
  misc_RNA (1)...(19): siRNA sense strand
auggauucuucacuuguua

SEQ ID NO: 725621 - RNA, 19 nt, Homo sapiens
  misc_RNA (1)...(19): siRNA sense strand
ggucagcucguuacucaac

SEQ ID NO: 725622 - RNA, 19 nt, Homo sapiens
  misc_RNA (1)...(19): siRNA sense strand
ggucaagugguagccauga

SEQ ID NO: 725623 - RNA, 19 nt, Homo sapiens
  misc_RNA (1)...(19): siRNA sense strand
gcaaaauggcacugaauca

SEQ ID NO: 725624 - RNA, 19 nt, Homo sapiens
  misc_RNA (1)...(19): siRNA sense strand
acacaaaacuacaggucaa

SEQ ID NO: 725625 - RNA, 19 nt, Homo sapiens
  misc_RNA (1)...(19): siRNA sense strand
gcaccauauuugcugaacu

SEQ ID NO: 725626 - RNA, 19 nt, Homo sapiens
  misc_RNA (1)...(19): siRNA sense strand
aaacgaauuucuggcaaaa

SEQ ID NO: 725627 - RNA, 19 nt, Homo sapiens
  misc_RNA (1)...(19): siRNA sense strand
cagaucuccagaaguauug

SEQ ID NO: 725628 - RNA, 19 nt, Homo sapiens
  misc_RNA (1)...(19): siRNA sense strand
aaugaaguguggccagaag

SEQ ID NO: 725629 - RNA, 19 nt, Homo sapiens
  misc_RNA (1)...(19): siRNA sense strand
uagucagucuucaggaugu

SEQ ID NO: 725630 - RNA, 19 nt, Homo sapiens
  misc_RNA (1)...(19): siRNA sense strand
gggcacucccaauaaugaa

SEQ ID NO: 725631 - RNA, 19 nt, Homo sapiens
  misc_RNA (1)...(19): siRNA sense strand
ugauccagccaaacgaauu

SEQ ID NO: 725632 - RNA, 19 nt, Homo sapiens
  misc_RNA (1)...(19): siRNA sense strand
ccuggucaguacauggauu

SEQ ID NO: 725633 - RNA, 19 nt, Homo sapiens
  misc_RNA (1)...(19): siRNA sense strand
gggauucagaaauugauca

SEQ ID NO: 725634 - RNA, 19 nt, Homo sapiens
  misc_RNA (1)...(19): siRNA sense strand
uucgggaaauuucucuauu

SEQ ID NO: 725635 - RNA, 19 nt, Homo sapiens
  misc_RNA (1)...(19): siRNA sense strand
uggaguauaggcaccauau

SEQ ID NO: 725636 - RNA, 19 nt, Homo sapiens
  misc_RNA (1)...(19): siRNA sense strand
ugguacagaucuccagaag

SEQ ID NO: 725637 - RNA, 19 nt, Homo sapiens
  misc_RNA (1)...(19): siRNA sense strand
guacagaucuccagaagua

SEQ ID NO: 725638 - RNA, 19 nt, Homo sapiens
  misc_RNA (1)...(19): siRNA sense strand
gaucaacucuucaggauuu

SEQ ID NO: 725639 - RNA, 19 nt, Homo sapiens
  misc_RNA (1)...(19): siRNA sense strand
ccauggaucugaagaaaua

SEQ ID NO: 725640 - RNA, 19 nt, Homo sapiens
  misc_RNA (1)...(19): siRNA sense strand
gguuauaucucaucuuuga

SEQ ID NO: 725641 - RNA, 19 nt, Homo sapiens
  misc_RNA (1)...(19): siRNA sense strand
guacauggauucuucacuu

SEQ ID NO: 725642 - RNA, 19 nt, Homo sapiens
  misc_RNA (1)...(19): siRNA sense strand
gaagguaccuauggaguug

SEQ ID NO: 725643 - RNA, 19 nt, Homo sapiens
  misc_RNA (1)...(19): siRNA sense strand
ggccagaaguggaaucuuu

SEQ ID NO: 725644 - RNA, 19 nt, Homo sapiens
  misc_RNA (1)...(19): siRNA sense strand
cagguuauaucucaucuuu

SEQ ID NO: 725645 - RNA, 19 nt, Homo sapiens
  misc_RNA (1)...(19): siRNA sense strand
gaguauaggcaccauauuu

SEQ ID NO: 725646 - RNA, 19 nt, Homo sapiens
  misc_RNA (1)...(19): siRNA sense strand
ccuauggaguuguguauaa

SEQ ID NO: 725647 - RNA, 19 nt, Homo sapiens
  misc_RNA (1)...(19): siRNA sense strand
ucgggaaauuucucuauua

SEQ ID NO: 725648 - RNA, 19 nt, Homo sapiens
  misc_RNA (1)...(19): siRNA sense strand
guauaaggguagacacaaa

SEQ ID NO: 725649 - RNA, 19 nt, Homo sapiens
  misc_RNA (1)...(19): siRNA sense strand
caaacgaauuucuggcaaa

SEQ ID NO: 725650 - RNA, 19 nt, Homo sapiens
  misc_RNA (1)...(19): siRNA sense strand
cgggaaauuucucuauuaa

SEQ ID NO: 725651 - RNA, 19 nt, Homo sapiens
  misc_RNA (1)...(19): siRNA sense strand
caccauauuugcugaacua

SEQ ID NO: 725652 - RNA, 19 nt, Homo sapiens
  misc_RNA (1)...(19): siRNA sense strand
agaaauugaucaacucuuc

SEQ ID NO: 725653 - RNA, 19 nt, Homo sapiens
  misc_RNA (1)...(19): siRNA sense strand
gcacugaaucauccauauu

SEQ ID NO: 725654 - RNA, 19 nt, Homo sapiens
  misc_RNA (1)...(19): siRNA sense strand
ccaaauauagucagucuuc

SEQ ID NO: 725655 - RNA, 19 nt, Homo sapiens
  misc_RNA (1)...(19): siRNA sense strand
gcaacuaagaaaccacuuu

SEQ ID NO: 725656 - RNA, 19 nt, Homo sapiens
  misc_RNA (1)...(19): siRNA sense strand
uaugcaggauuccagguua

SEQ ID NO: 725657 - RNA, 19 nt, Homo sapiens
  misc_RNA (1)...(19): siRNA sense strand
gauuccagguuauaucuca

SEQ ID NO: 725658 - RNA, 19 nt, Homo sapiens
  misc_RNA (1)...(19): siRNA sense strand
ugaacuagcaacuaagaaa

SEQ ID NO: 725659 - RNA, 19 nt, Homo sapiens
  misc_RNA (1)...(19): siRNA sense strand
gccagaaguggaaucuuua

SEQ ID NO: 725660 - RNA, 19 nt, Homo sapiens
  misc_RNA (1)...(19): siRNA sense strand
gauccagccaaacgaauuu

SEQ ID NO: 725661 - RNA, 19 nt, Homo sapiens
  misc_RNA (1)...(19): siRNA sense strand
guacugcaauucgggaaau

SEQ ID NO: 725662 - RNA, 19 nt, Homo sapiens
  misc_RNA (1)...(19): siRNA sense strand
ccaguugacauuuggagua

SEQ ID NO: 725663 - RNA, 19 nt, Homo sapiens
  misc_RNA (1)...(19): siRNA sense strand
gucaguacauggauucuuc

SEQ ID NO: 725664 - RNA, 19 nt, Homo sapiens
  misc_RNA (1)...(19): siRNA sense strand
cugaagaaauacuuggauu

SEQ ID NO: 725665 - RNA, 19 nt, Homo sapiens
  misc_RNA (1)...(19): siRNA sense strand
acuagaaagugaagaggaa

SEQ ID NO: 725666 - RNA, 19 nt, Homo sapiens
  misc_RNA (1)...(19): siRNA sense strand
gaaauugaucaacucuuca

SEQ ID NO: 725667 - RNA, 19 nt, Homo sapiens
  misc_RNA (1)...(19): siRNA sense strand
guugacauuuggaguauag

SEQ ID NO: 725668 - RNA, 19 nt, Homo sapiens
  misc_RNA (1)...(19): siRNA sense strand
cauggauucuucacuuguu

SEQ ID NO: 725669 - RNA, 19 nt, Homo sapiens
  misc_RNA (1)...(19): siRNA sense strand
aaaucagacuagaaaguga

SEQ ID NO: 725670 - RNA, 19 nt, Homo sapiens
  misc_RNA (1)...(19): siRNA sense strand
gaacuagcaacuaagaaac

SEQ ID NO: 725671 - RNA, 19 nt, Homo sapiens
  misc_RNA (1)...(19): siRNA sense strand
caaauauagucagucuuca

SEQ ID NO: 725672 - RNA, 19 nt, Homo sapiens
  misc_RNA (1)...(19): siRNA sense strand
cacugaaucauccauauuu

SEQ ID NO: 725673 - RNA, 19 nt, Homo sapiens
  misc_RNA (1)...(19): siRNA sense strand
ggcacugaaucauccauau

SEQ ID NO: 725674 - RNA, 19 nt, Homo sapiens
  misc_RNA (1)...(19): siRNA sense strand
gaaauacuuggauucuauc

SEQ ID NO: 725675 - RNA, 19 nt, Homo sapiens
  misc_RNA (1)...(19): siRNA sense strand
ccuagcaucccaugucaaa

SEQ ID NO: 725676 - RNA, 19 nt, Homo sapiens
  misc_RNA (1)...(19): siRNA sense strand
aaucuaugauccagccaaa

SEQ ID NO: 725677 - RNA, 19 nt, Homo sapiens
  misc_RNA (1)...(19): siRNA sense strand
gcuuggauuugcucucgaa

SEQ ID NO: 725678 - RNA, 19 nt, Homo sapiens
  misc_RNA (1)...(19): siRNA sense strand
gcugaacuagcaacuaaga

SEQ ID NO: 725679 - RNA, 19 nt, Homo sapiens
  misc_RNA (1)...(19): siRNA sense strand
aacuacaggucaaguggua

SEQ ID NO: 725680 - RNA, 19 nt, Homo sapiens
  misc_RNA (1)...(19): siRNA sense strand
uauagucagucuucaggau

SEQ ID NO: 725681 - RNA, 19 nt, Homo sapiens
  misc_RNA (1)...(19): siRNA sense strand
uggagaagguaccuaugga

SEQ ID NO: 725682 - RNA, 19 nt, Homo sapiens
  misc_RNA (1)...(19): siRNA sense strand
uacauggauucuucacuug

SEQ ID NO: 725683 - RNA, 19 nt, Homo sapiens
  misc_RNA (1)...(19): siRNA sense strand
caguugacauuuggaguau

SEQ ID NO: 725684 - RNA, 19 nt, Homo sapiens
  misc_RNA (1)...(19): siRNA sense strand
ggaguauaggcaccauauu

SEQ ID NO: 725685 - RNA, 19 nt, Homo sapiens
  misc_RNA (1)...(19): siRNA sense strand
ccauggggauucagaaauu

SEQ ID NO: 725686 - RNA, 19 nt, Homo sapiens
  misc_RNA (1)...(19): siRNA sense strand
ucaagugguagccaugaaa

SEQ ID NO: 725687 - RNA, 19 nt, Homo sapiens
  misc_RNA (1)...(19): siRNA sense strand
guaguaacacucugguaca

SEQ ID NO: 725688 - RNA, 19 nt, Homo sapiens
  misc_RNA (1)...(19): siRNA sense strand
ugaagaaauacuuggauuc

SEQ ID NO: 725689 - RNA, 19 nt, Homo sapiens
  misc_RNA (1)...(19): siRNA sense strand
gcaggauuccagguuauau

SEQ ID NO: 725690 - RNA, 19 nt, Homo sapiens
  misc_RNA (1)...(19): siRNA sense strand
guaccuauggaguugugua

SEQ ID NO: 725691 - RNA, 19 nt, Homo sapiens
  misc_RNA (1)...(19): siRNA sense strand
uggaaucuuuacaggacua

SEQ ID NO: 725692 - RNA, 19 nt, Homo sapiens
  misc_RNA (1)...(19): siRNA sense strand
caacuaagaaaccacuuuu

SEQ ID NO: 725693 - RNA, 19 nt, Homo sapiens
  misc_RNA (1)...(19): siRNA sense strand
acagaucuccagaaguauu

SEQ ID NO: 725694 - RNA, 19 nt, Homo sapiens
  misc_RNA (1)...(19): siRNA sense strand
aguauaggcaccauauuug

SEQ ID NO: 725695 - RNA, 19 nt, Homo sapiens
  misc_RNA (1)...(19): siRNA sense strand
gaaaccaggaagccuagca

SEQ ID NO: 725696 - RNA, 19 nt, Homo sapiens
  misc_RNA (1)...(19): siRNA sense strand
ggggucagcucguuacuca

SEQ ID NO: 725697 - RNA, 19 nt, Homo sapiens
  misc_RNA (1)...(19): siRNA sense strand
uugaucaacucuucaggau

SEQ ID NO: 725698 - RNA, 19 nt, Homo sapiens
  misc_RNA (1)...(19): siRNA sense strand
gucaagugguagccaugaa

SEQ ID NO: 725699 - RNA, 19 nt, Homo sapiens
  misc_RNA (1)...(19): siRNA sense strand
uuccauggaucugaagaaa

SEQ ID NO: 725700 - RNA, 19 nt, Homo sapiens
  misc_RNA (1)...(19): siRNA sense strand
agaagguaccuauggaguu

SEQ ID NO: 725701 - RNA, 19 nt, Homo sapiens
  misc_RNA (1)...(19): siRNA sense strand
ggaugaaaauggcuuggau

SEQ ID NO: 725702 - RNA, 19 nt, Homo sapiens
  misc_RNA (1)...(19): siRNA sense strand
gcacucccaauaaugaagu

SEQ ID NO: 725703 - RNA, 19 nt, Homo sapiens
  misc_RNA (1)...(19): siRNA sense strand
ggauucagaaauugaucaa

SEQ ID NO: 725704 - RNA, 19 nt, Homo sapiens
  misc_RNA (1)...(19): siRNA sense strand
auggauucuucacuuguua

SEQ ID NO: 725705 - RNA, 19 nt, Homo sapiens
  misc_RNA (1)...(19): siRNA sense strand
ggucagcucguuacucaac

SEQ ID NO: 725706 - RNA, 19 nt, Homo sapiens
  misc_RNA (1)...(19): siRNA sense strand
ggucaagugguagccauga

SEQ ID NO: 725707 - RNA, 19 nt, Homo sapiens
  misc_RNA (1)...(19): siRNA sense strand
gcaaaauggcacugaauca

SEQ ID NO: 725708 - RNA, 19 nt, Homo sapiens
  misc_RNA (1)...(19): siRNA sense strand
acacaaaacuacaggucaa

SEQ ID NO: 725709 - RNA, 19 nt, Homo sapiens
  misc_RNA (1)...(19): siRNA sense strand
gcaccauauuugcugaacu

SEQ ID NO: 725710 - RNA, 19 nt, Homo sapiens
  misc_RNA (1)...(19): siRNA sense strand
aaacgaauuucuggcaaaa

SEQ ID NO: 725711 - RNA, 19 nt, Homo sapiens
  misc_RNA (1)...(19): siRNA sense strand
cagaucuccagaaguauug

SEQ ID NO: 725712 - RNA, 19 nt, Homo sapiens
  misc_RNA (1)...(19): siRNA sense strand
aaugaaguguggccagaag

SEQ ID NO: 725713 - RNA, 19 nt, Homo sapiens
  misc_RNA (1)...(19): siRNA sense strand
uagucagucuucaggaugu

SEQ ID NO: 725714 - RNA, 19 nt, Homo sapiens
  misc_RNA (1)...(19): siRNA sense strand
gggcacucccaauaaugaa

SEQ ID NO: 725715 - RNA, 19 nt, Homo sapiens
  misc_RNA (1)...(19): siRNA sense strand
ugauccagccaaacgaauu

SEQ ID NO: 725716 - RNA, 19 nt, Homo sapiens
  misc_RNA (1)...(19): siRNA sense strand
ccuggucaguacauggauu

SEQ ID NO: 725717 - RNA, 19 nt, Homo sapiens
  misc_RNA (1)...(19): siRNA sense strand
gggauucagaaauugauca

SEQ ID NO: 725718 - RNA, 19 nt, Homo sapiens
  misc_RNA (1)...(19): siRNA sense strand
uucgggaaauuucucuauu

SEQ ID NO: 725719 - RNA, 19 nt, Homo sapiens
  misc_RNA (1)...(19): siRNA sense strand
uggaguauaggcaccauau

SEQ ID NO: 725720 - RNA, 19 nt, Homo sapiens
  misc_RNA (1)...(19): siRNA sense strand
ugguacagaucuccagaag

SEQ ID NO: 725721 - RNA, 19 nt, Homo sapiens
  misc_RNA (1)...(19): siRNA sense strand
acaauaggcugcagcaaga

SEQ ID NO: 725722 - RNA, 19 nt, Homo sapiens
  misc_RNA (1)...(19): siRNA sense strand
ucacugugguggaucauaa

SEQ ID NO: 725723 - RNA, 19 nt, Homo sapiens
  misc_RNA (1)...(19): siRNA sense strand
ccacaugcaccucuucaua

SEQ ID NO: 725724 - RNA, 19 nt, Homo sapiens
  misc_RNA (1)...(19): siRNA sense strand
ggaacuacauccacaugca

SEQ ID NO: 725725 - RNA, 19 nt, Homo sapiens
  misc_RNA (1)...(19): siRNA sense strand
ugacagcaguccauacuca

SEQ ID NO: 725726 - RNA, 19 nt, Homo sapiens
  misc_RNA (1)...(19): siRNA sense strand
ggaggagugugacuaugug

SEQ ID NO: 725727 - RNA, 19 nt, Homo sapiens
  misc_RNA (1)...(19): siRNA sense strand
ugucauggcuaacuucuuc

SEQ ID NO: 725728 - RNA, 19 nt, Homo sapiens
  misc_RNA (1)...(19): siRNA sense strand
gcuggagaaugagacaaua

SEQ ID NO: 725729 - RNA, 19 nt, Homo sapiens
  misc_RNA (1)...(19): siRNA sense strand
aauauugugucauggcuaa

SEQ ID NO: 725730 - RNA, 19 nt, Homo sapiens
  misc_RNA (1)...(19): siRNA sense strand
gcagcaagaugugggacaa

SEQ ID NO: 725731 - RNA, 19 nt, Homo sapiens
  misc_RNA (1)...(19): siRNA sense strand
gcacgcagguuuccaugcu

SEQ ID NO: 725732 - RNA, 19 nt, Homo sapiens
  misc_RNA (1)...(19): siRNA sense strand
gcaggaggagugugacuau

SEQ ID NO: 725733 - RNA, 19 nt, Homo sapiens
  misc_RNA (1)...(19): siRNA sense strand
aggcccagcuggagaauga

SEQ ID NO: 725734 - RNA, 19 nt, Homo sapiens
  misc_RNA (1)...(19): siRNA sense strand
ucaccuccaucuugguaaa

SEQ ID NO: 725735 - RNA, 19 nt, Homo sapiens
  misc_RNA (1)...(19): siRNA sense strand
caucauguucgccuucuuu

SEQ ID NO: 725736 - RNA, 19 nt, Homo sapiens
  misc_RNA (1)...(19): siRNA sense strand
guucuacgguucugugaag

SEQ ID NO: 725737 - RNA, 19 nt, Homo sapiens
  misc_RNA (1)...(19): siRNA sense strand
auucaaggccgcaauguaa

SEQ ID NO: 725738 - RNA, 19 nt, Homo sapiens
  misc_RNA (1)...(19): siRNA sense strand
uaaggcagccauggucuuu

SEQ ID NO: 725739 - RNA, 19 nt, Homo sapiens
  misc_RNA (1)...(19): siRNA sense strand
gaauccugcuucagaaacu

SEQ ID NO: 725740 - RNA, 19 nt, Homo sapiens
  misc_RNA (1)...(19): siRNA sense strand
gcucuucuccuccauucaa

SEQ ID NO: 725741 - RNA, 19 nt, Homo sapiens
  misc_RNA (1)...(19): siRNA sense strand
cgaagucucccuggucuga

SEQ ID NO: 725742 - RNA, 19 nt, Homo sapiens
  misc_RNA (1)...(19): siRNA sense strand
gugacuaugugcagaugau

SEQ ID NO: 725743 - RNA, 19 nt, Homo sapiens
  misc_RNA (1)...(19): siRNA sense strand
cacaugcaccucuucauau

SEQ ID NO: 725744 - RNA, 19 nt, Homo sapiens
  misc_RNA (1)...(19): siRNA sense strand
ucucugagcggaaguacuu

SEQ ID NO: 725745 - RNA, 19 nt, Homo sapiens
  misc_RNA (1)...(19): siRNA sense strand
ugacaaggcagcgaguuug

SEQ ID NO: 725746 - RNA, 19 nt, Homo sapiens
  misc_RNA (1)...(19): siRNA sense strand
cauccucaccuccaucuug

SEQ ID NO: 725747 - RNA, 19 nt, Homo sapiens
  misc_RNA (1)...(19): siRNA sense strand
acaugcaccucuucauauc

SEQ ID NO: 725748 - RNA, 19 nt, Homo sapiens
  misc_RNA (1)...(19): siRNA sense strand
gguccacacuccugcugau

SEQ ID NO: 725749 - RNA, 19 nt, Homo sapiens
  misc_RNA (1)...(19): siRNA sense strand
uuuccaauauugugucaug

SEQ ID NO: 725750 - RNA, 19 nt, Homo sapiens
  misc_RNA (1)...(19): siRNA sense strand
gauaucaggaagagugaca

SEQ ID NO: 725751 - RNA, 19 nt, Homo sapiens
  misc_RNA (1)...(19): siRNA sense strand
caaggcagcgaguuuggau

SEQ ID NO: 725752 - RNA, 19 nt, Homo sapiens
  misc_RNA (1)...(19): siRNA sense strand
ccucaccuccaucuuggua

SEQ ID NO: 725753 - RNA, 19 nt, Homo sapiens
  misc_RNA (1)...(19): siRNA sense strand
gaugagcagcagaccaugu

SEQ ID NO: 725754 - RNA, 19 nt, Homo sapiens
  misc_RNA (1)...(19): siRNA sense strand
uggaguacacuacaucaug

SEQ ID NO: 725755 - RNA, 19 nt, Homo sapiens
  misc_RNA (1)...(19): siRNA sense strand
guaaggcagccauggucuu

SEQ ID NO: 725756 - RNA, 19 nt, Homo sapiens
  misc_RNA (1)...(19): siRNA sense strand
gccgcugucuucaucaaag

SEQ ID NO: 725757 - RNA, 19 nt, Homo sapiens
  misc_RNA (1)...(19): siRNA sense strand
uggcuauccucuacugcuu

SEQ ID NO: 725758 - RNA, 19 nt, Homo sapiens
  misc_RNA (1)...(19): siRNA sense strand
accaucaacuccucacugu

SEQ ID NO: 725759 - RNA, 19 nt, Homo sapiens
  misc_RNA (1)...(19): siRNA sense strand
aagcucuucuccuccauuc

SEQ ID NO: 725760 - RNA, 19 nt, Homo sapiens
  misc_RNA (1)...(19): siRNA sense strand
gcagcacgcagguuuccau

SEQ ID NO: 725761 - RNA, 19 nt, Homo sapiens
  misc_RNA (1)...(19): siRNA sense strand
caggaggagugugacuaug

SEQ ID NO: 725762 - RNA, 19 nt, Homo sapiens
  misc_RNA (1)...(19): siRNA sense strand
cagcuauccugagccuguu

SEQ ID NO: 725763 - RNA, 19 nt, Homo sapiens
  misc_RNA (1)...(19): siRNA sense strand
uccgaauccugcuucagaa

SEQ ID NO: 725764 - RNA, 19 nt, Homo sapiens
  misc_RNA (1)...(19): siRNA sense strand
ugguaaacuucauccuguu

SEQ ID NO: 725765 - RNA, 19 nt, Homo sapiens
  misc_RNA (1)...(19): siRNA sense strand
gcggaacuacauccacaug

SEQ ID NO: 725766 - RNA, 19 nt, Homo sapiens
  misc_RNA (1)...(19): siRNA sense strand
aggcagcgaguuuggauga

SEQ ID NO: 725767 - RNA, 19 nt, Homo sapiens
  misc_RNA (1)...(19): siRNA sense strand
ugugguggcuauccucuac

SEQ ID NO: 725768 - RNA, 19 nt, Homo sapiens
  misc_RNA (1)...(19): siRNA sense strand
gaaagcaacuguuugagaa

SEQ ID NO: 725769 - RNA, 19 nt, Homo sapiens
  misc_RNA (1)...(19): siRNA sense strand
ucacggagcucaaccauga

SEQ ID NO: 725770 - RNA, 19 nt, Homo sapiens
  misc_RNA (1)...(19): siRNA sense strand
gggcggauguguaucaaua

SEQ ID NO: 725771 - RNA, 19 nt, Homo sapiens
  misc_RNA (1)...(19): siRNA sense strand
gaaguuggccucauuguug

SEQ ID NO: 725772 - RNA, 19 nt, Homo sapiens
  misc_RNA (1)...(19): siRNA sense strand
gcaaggagauggagaaagg

SEQ ID NO: 725773 - RNA, 19 nt, Homo sapiens
  misc_RNA (1)...(19): siRNA sense strand
gcagaagguugaccaguau

SEQ ID NO: 725774 - RNA, 19 nt, Homo sapiens
  misc_RNA (1)...(19): siRNA sense strand
caagcuacauccucacuuu

SEQ ID NO: 725775 - RNA, 19 nt, Homo sapiens
  misc_RNA (1)...(19): siRNA sense strand
guaacauucucaucgauuu

SEQ ID NO: 725776 - RNA, 19 nt, Homo sapiens
  misc_RNA (1)...(19): siRNA sense strand
ggacuuugauaucgacauu

SEQ ID NO: 725777 - RNA, 19 nt, Homo sapiens
  misc_RNA (1)...(19): siRNA sense strand
gacgacagcaucauuguua

SEQ ID NO: 725778 - RNA, 19 nt, Homo sapiens
  misc_RNA (1)...(19): siRNA sense strand
gacaauggaugccuagaug

SEQ ID NO: 725779 - RNA, 19 nt, Homo sapiens
  misc_RNA (1)...(19): siRNA sense strand
cggcugcgcucuacuauug

SEQ ID NO: 725780 - RNA, 19 nt, Homo sapiens
  misc_RNA (1)...(19): siRNA sense strand
ggaaagcaacuguuugaga

SEQ ID NO: 725781 - RNA, 19 nt, Homo sapiens
  misc_RNA (1)...(19): siRNA sense strand
ggaccuggcuccgaaaugu

SEQ ID NO: 725782 - RNA, 19 nt, Homo sapiens
  misc_RNA (1)...(19): siRNA sense strand
gaguggagaugcacaacaa

SEQ ID NO: 725783 - RNA, 19 nt, Homo sapiens
  misc_RNA (1)...(19): siRNA sense strand
aaagacaucucagacauug

SEQ ID NO: 725784 - RNA, 19 nt, Homo sapiens
  misc_RNA (1)...(19): siRNA sense strand
ccaaagacaucucagacau

SEQ ID NO: 725785 - RNA, 19 nt, Homo sapiens
  misc_RNA (1)...(19): siRNA sense strand
ggaugaagguagaaaugga

SEQ ID NO: 725786 - RNA, 19 nt, Homo sapiens
  misc_RNA (1)...(19): siRNA sense strand
gcuggacgcucucaaagug

SEQ ID NO: 725787 - RNA, 19 nt, Homo sapiens
  misc_RNA (1)...(19): siRNA sense strand
ucaagaugcugcccaccua

SEQ ID NO: 725788 - RNA, 19 nt, Homo sapiens
  misc_RNA (1)...(19): siRNA sense strand
gcucaaccaugaccaagug

SEQ ID NO: 725789 - RNA, 19 nt, Homo sapiens
  misc_RNA (1)...(19): siRNA sense strand
gaauguaccugggugagau

SEQ ID NO: 725790 - RNA, 19 nt, Homo sapiens
  misc_RNA (1)...(19): siRNA sense strand
gagauuguccguaacauuc

SEQ ID NO: 725791 - RNA, 19 nt, Homo sapiens
  misc_RNA (1)...(19): siRNA sense strand
ggacagaacacggagaguu

SEQ ID NO: 725792 - RNA, 19 nt, Homo sapiens
  misc_RNA (1)...(19): siRNA sense strand
cgaaaugugaugugucuuu

SEQ ID NO: 725793 - RNA, 19 nt, Homo sapiens
  misc_RNA (1)...(19): siRNA sense strand
ccgaaugccuggcuaacuu

SEQ ID NO: 725794 - RNA, 19 nt, Homo sapiens
  misc_RNA (1)...(19): siRNA sense strand
ggauguguaucaauaugga

SEQ ID NO: 725795 - RNA, 19 nt, Homo sapiens
  misc_RNA (1)...(19): siRNA sense strand
uggcuaacuucauggauaa

SEQ ID NO: 725796 - RNA, 19 nt, Homo sapiens
  misc_RNA (1)...(19): siRNA sense strand
ugcagaagguugaccagua

SEQ ID NO: 725797 - RNA, 19 nt, Homo sapiens
  misc_RNA (1)...(19): siRNA sense strand
gcaagcagagguucgagaa

SEQ ID NO: 725798 - RNA, 19 nt, Homo sapiens
  misc_RNA (1)...(19): siRNA sense strand
gaugaccuguggcuuugaa

SEQ ID NO: 725799 - RNA, 19 nt, Homo sapiens
  misc_RNA (1)...(19): siRNA sense strand
gcccagagcuucucaacac

SEQ ID NO: 725800 - RNA, 19 nt, Homo sapiens
  misc_RNA (1)...(19): siRNA sense strand
acaaugggcuccagaaggu

SEQ ID NO: 725801 - RNA, 19 nt, Homo sapiens
  misc_RNA (1)...(19): siRNA sense strand
ugggugagauuguccguaa

SEQ ID NO: 725802 - RNA, 19 nt, Homo sapiens
  misc_RNA (1)...(19): siRNA sense strand
gauggagaaucagaucuau

SEQ ID NO: 725803 - RNA, 19 nt, Homo sapiens
  misc_RNA (1)...(19): siRNA sense strand
gaccuuggaggaacaaauu

SEQ ID NO: 725804 - RNA, 19 nt, Homo sapiens
  misc_RNA (1)...(19): siRNA sense strand
caaagacaucucagacauu

SEQ ID NO: 725805 - RNA, 19 nt, Homo sapiens
  misc_RNA (1)...(19): siRNA sense strand
caacaccggucgcuuugag

SEQ ID NO: 725806 - RNA, 19 nt, Homo sapiens
  misc_RNA (1)...(19): siRNA sense strand
ugaagaugcugcccaccuu

SEQ ID NO: 725807 - RNA, 19 nt, Homo sapiens
  misc_RNA (1)...(19): siRNA sense strand
gaagaugcugcccaccuuu

SEQ ID NO: 725808 - RNA, 19 nt, Homo sapiens
  misc_RNA (1)...(19): siRNA sense strand
gcggauguguaucaauaug

SEQ ID NO: 725809 - RNA, 19 nt, Homo sapiens
  misc_RNA (1)...(19): siRNA sense strand
cuggcuaacuucauggaua

SEQ ID NO: 725810 - RNA, 19 nt, Homo sapiens
  misc_RNA (1)...(19): siRNA sense strand
ggacaauggaugccuagau

SEQ ID NO: 725811 - RNA, 19 nt, Homo sapiens
  misc_RNA (1)...(19): siRNA sense strand
gaugaccugugguuaugau

SEQ ID NO: 725812 - RNA, 19 nt, Homo sapiens
  misc_RNA (1)...(19): siRNA sense strand
gaggaugaagguagaaaug

SEQ ID NO: 725813 - RNA, 19 nt, Homo sapiens
  misc_RNA (1)...(19): siRNA sense strand
ucaacgacauucgcacuga

SEQ ID NO: 725814 - RNA, 19 nt, Homo sapiens
  misc_RNA (1)...(19): siRNA sense strand
ugacuuccgcacagaauuu

SEQ ID NO: 725815 - RNA, 19 nt, Homo sapiens
  misc_RNA (1)...(19): siRNA sense strand
gcaacuguuugagaagaug

SEQ ID NO: 725816 - RNA, 19 nt, Homo sapiens
  misc_RNA (1)...(19): siRNA sense strand
uaugaugaccuguggcuuu

SEQ ID NO: 725817 - RNA, 19 nt, Homo sapiens
  misc_RNA (1)...(19): siRNA sense strand
agacaucucagacauugaa

SEQ ID NO: 725818 - RNA, 19 nt, Homo sapiens
  misc_RNA (1)...(19): siRNA sense strand
uuaaggaggugugcacugu

SEQ ID NO: 725819 - RNA, 19 nt, Homo sapiens
  misc_RNA (1)...(19): siRNA sense strand
gagccauccugcaacacuu

SEQ ID NO: 725820 - RNA, 19 nt, Homo sapiens
  misc_RNA (1)...(19): siRNA sense strand
gagagcauccuccucaagu

SEQ ID NO: 725821 - RNA, 19 nt, Homo sapiens
  misc_RNA (1)...(19): siRNA sense strand
gccaagcgucuacauaaga

SEQ ID NO: 725822 - RNA, 19 nt, Homo sapiens
  misc_RNA (1)...(19): siRNA sense strand
gacacagucggaacuauga

SEQ ID NO: 725823 - RNA, 19 nt, Homo sapiens
  misc_RNA (1)...(19): siRNA sense strand
agaggaggaugaagguaga

SEQ ID NO: 725824 - RNA, 19 nt, Homo sapiens
  misc_RNA (1)...(19): siRNA sense strand
caacuuccgugugcuuugg

SEQ ID NO: 725825 - RNA, 19 nt, Homo sapiens
  misc_RNA (1)...(19): siRNA sense strand
ucgcggacuuccucgagua

SEQ ID NO: 725826 - RNA, 19 nt, Homo sapiens
  misc_RNA (1)...(19): siRNA sense strand
ggauggcaguggcaaaggu

SEQ ID NO: 725827 - RNA, 19 nt, Homo sapiens
  misc_RNA (1)...(19): siRNA sense strand
gaugaucagugggauguac

SEQ ID NO: 725828 - RNA, 19 nt, Homo sapiens
  misc_RNA (1)...(19): siRNA sense strand
cgggaaagcaacuguuuga

SEQ ID NO: 725829 - RNA, 19 nt, Homo sapiens
  misc_RNA (1)...(19): siRNA sense strand
caugaugaccugugguuau

SEQ ID NO: 725830 - RNA, 19 nt, Homo sapiens
  misc_RNA (1)...(19): siRNA sense strand
ggagauggagaaucagauc

SEQ ID NO: 725831 - RNA, 19 nt, Homo sapiens
  misc_RNA (1)...(19): siRNA sense strand
gcuccgaaaugugaugugu

SEQ ID NO: 725832 - RNA, 19 nt, Homo sapiens
  misc_RNA (1)...(19): siRNA sense strand
cgacauucgcacugaguuu

SEQ ID NO: 725833 - RNA, 19 nt, Homo sapiens
  misc_RNA (1)...(19): siRNA sense strand
ccagcuguuugaccacauu

SEQ ID NO: 725834 - RNA, 19 nt, Homo sapiens
  misc_RNA (1)...(19): siRNA sense strand
ggaauguaccugggugaga

SEQ ID NO: 725835 - RNA, 19 nt, Homo sapiens
  misc_RNA (1)...(19): siRNA sense strand
gggcggaugugugugaaca

SEQ ID NO: 725836 - RNA, 19 nt, Homo sapiens
  misc_RNA (1)...(19): siRNA sense strand
cgagcucuuugaccacauu

SEQ ID NO: 725837 - RNA, 19 nt, Homo sapiens
  misc_RNA (1)...(19): siRNA sense strand
ggagaugcacaacaagauc

SEQ ID NO: 725838 - RNA, 19 nt, Homo sapiens
  misc_RNA (1)...(19): siRNA sense strand
ucucaacaccggucgcuuu

SEQ ID NO: 725839 - RNA, 19 nt, Homo sapiens
  misc_RNA (1)...(19): siRNA sense strand
uaacuucauggauaagcua

SEQ ID NO: 725840 - RNA, 19 nt, Homo sapiens
  misc_RNA (1)...(19): siRNA sense strand
aagcaacuguuugagaaga

SEQ ID NO: 725841 - RNA, 19 nt, Homo sapiens
  misc_RNA (1)...(19): siRNA sense strand
agaguuuccuggucucaug

SEQ ID NO: 725842 - RNA, 19 nt, Homo sapiens
  misc_RNA (1)...(19): siRNA sense strand
ggacaaugggcuccagaag

SEQ ID NO: 725843 - RNA, 19 nt, Homo sapiens
  misc_RNA (1)...(19): siRNA sense strand
caacgccugcuacauggaa

SEQ ID NO: 725844 - RNA, 19 nt, Homo sapiens
  misc_RNA (1)...(19): siRNA sense strand
ggaccaagggauucaaguc

SEQ ID NO: 725845 - RNA, 19 nt, Homo sapiens
  misc_RNA (1)...(19): siRNA sense strand
ggaacugguggaaggagaa

SEQ ID NO: 725846 - RNA, 19 nt, Homo sapiens
  misc_RNA (1)...(19): siRNA sense strand
cacaugcgccucucugaug

SEQ ID NO: 725847 - RNA, 19 nt, Homo sapiens
  misc_RNA (1)...(19): siRNA sense strand
ugucuuuccugcagucaga

SEQ ID NO: 725848 - RNA, 19 nt, Homo sapiens
  misc_RNA (1)...(19): siRNA sense strand
gcaucugcuugccuacuuc

SEQ ID NO: 725849 - RNA, 19 nt, Homo sapiens
  misc_RNA (1)...(19): siRNA sense strand
ggaggaugaagguagaaau

SEQ ID NO: 725850 - RNA, 19 nt, Homo sapiens
  misc_RNA (1)...(19): siRNA sense strand
acaugcgccucucugauga

SEQ ID NO: 725851 - RNA, 19 nt, Homo sapiens
  misc_RNA (1)...(19): siRNA sense strand
agguggagauggagaauca

SEQ ID NO: 725852 - RNA, 19 nt, Homo sapiens
  misc_RNA (1)...(19): siRNA sense strand
ccaccagacuaaacuagac

SEQ ID NO: 725853 - RNA, 19 nt, Homo sapiens
  misc_RNA (1)...(19): siRNA sense strand
gaaggaccuggcuccgaaa

SEQ ID NO: 725854 - RNA, 19 nt, Homo sapiens
  misc_RNA (1)...(19): siRNA sense strand
ugagauuguccguaacauu

SEQ ID NO: 725855 - RNA, 19 nt, Homo sapiens
  misc_RNA (1)...(19): siRNA sense strand
gaggucaagaggaggauga

SEQ ID NO: 725856 - RNA, 19 nt, Homo sapiens
  misc_RNA (1)...(19): siRNA sense strand
uugccaagcgucuacauaa

SEQ ID NO: 725857 - RNA, 19 nt, Homo sapiens
  misc_RNA (1)...(19): siRNA sense strand
uggugaagauggccaagga

SEQ ID NO: 725858 - RNA, 19 nt, Homo sapiens
  misc_RNA (1)...(19): siRNA sense strand
cauuguggcuguggugaau

SEQ ID NO: 725859 - RNA, 19 nt, Homo sapiens
  misc_RNA (1)...(19): siRNA sense strand
ggaaggcagagacguugug

SEQ ID NO: 725860 - RNA, 19 nt, Homo sapiens
  misc_RNA (1)...(19): siRNA sense strand
ucucauggaccaagggauu

SEQ ID NO: 725861 - RNA, 19 nt, Homo sapiens
  misc_RNA (1)...(19): siRNA sense strand
ggaugggacccucuacaag

SEQ ID NO: 725862 - RNA, 19 nt, Homo sapiens
  misc_RNA (1)...(19): siRNA sense strand
gggugaaaguaacggacaa

SEQ ID NO: 725863 - RNA, 19 nt, Homo sapiens
  misc_RNA (1)...(19): siRNA sense strand
aaugaucaguggaauguac

SEQ ID NO: 725864 - RNA, 19 nt, Homo sapiens
  misc_RNA (1)...(19): siRNA sense strand
ugaaguuggccucauuguu

SEQ ID NO: 725865 - RNA, 19 nt, Homo sapiens
  misc_RNA (1)...(19): siRNA sense strand
gacauucgcacugaguuug

SEQ ID NO: 725866 - RNA, 19 nt, Homo sapiens
  misc_RNA (1)...(19): siRNA sense strand
guaccugggugagauuguc

SEQ ID NO: 725867 - RNA, 19 nt, Homo sapiens
  misc_RNA (1)...(19): siRNA sense strand
acgacagcaucauuguuaa

SEQ ID NO: 725868 - RNA, 19 nt, Homo sapiens
  misc_RNA (1)...(19): siRNA sense strand
ggacauagcucugaauuac

SEQ ID NO: 725869 - RNA, 19 nt, Homo sapiens
  misc_RNA (1)...(19): siRNA sense strand
gcaaacuggagcugaauuu

SEQ ID NO: 725870 - RNA, 19 nt, Homo sapiens
  misc_RNA (1)...(19): siRNA sense strand
uugaacagcuuccggauga

SEQ ID NO: 725871 - RNA, 19 nt, Homo sapiens
  misc_RNA (1)...(19): siRNA sense strand
uuucaaagcuggagaugug

SEQ ID NO: 725872 - RNA, 19 nt, Homo sapiens
  misc_RNA (1)...(19): siRNA sense strand
ucaucgaggugaagacaaa

SEQ ID NO: 725873 - RNA, 19 nt, Homo sapiens
  misc_RNA (1)...(19): siRNA sense strand
ggacaucgcgguggaggaa

SEQ ID NO: 725874 - RNA, 19 nt, Homo sapiens
  misc_RNA (1)...(19): siRNA sense strand
ucagucggaucaacaaaga

SEQ ID NO: 725875 - RNA, 19 nt, Homo sapiens
  misc_RNA (1)...(19): siRNA sense strand
gcggauaccugcccucaac

SEQ ID NO: 725876 - RNA, 19 nt, Homo sapiens
  misc_RNA (1)...(19): siRNA sense strand
ugaagauccucaaagacuu

SEQ ID NO: 725877 - RNA, 19 nt, Homo sapiens
  misc_RNA (1)...(19): siRNA sense strand
cuauuugacuucacuggaa

SEQ ID NO: 725878 - RNA, 19 nt, Homo sapiens
  misc_RNA (1)...(19): siRNA sense strand
ggacguccggaucuucuuu

SEQ ID NO: 725879 - RNA, 19 nt, Homo sapiens
  misc_RNA (1)...(19): siRNA sense strand
gaggacauagcucugaauu

SEQ ID NO: 725880 - RNA, 19 nt, Homo sapiens
  misc_RNA (1)...(19): siRNA sense strand
ucgugaagauccucaaaga

SEQ ID NO: 725881 - RNA, 19 nt, Homo sapiens
  misc_RNA (1)...(19): siRNA sense strand
cagcagcacuccccuauug

SEQ ID NO: 725882 - RNA, 19 nt, Homo sapiens
  misc_RNA (1)...(19): siRNA sense strand
gaacagcuuccggaugaug

SEQ ID NO: 725883 - RNA, 19 nt, Homo sapiens
  misc_RNA (1)...(19): siRNA sense strand
ggccgagagugacuuugaa

SEQ ID NO: 725884 - RNA, 19 nt, Homo sapiens
  misc_RNA (1)...(19): siRNA sense strand
ucacgcagaaggacaacua

SEQ ID NO: 725885 - RNA, 19 nt, Homo sapiens
  misc_RNA (1)...(19): siRNA sense strand
gauccaaguaccucaucua

SEQ ID NO: 725886 - RNA, 19 nt, Homo sapiens
  misc_RNA (1)...(19): siRNA sense strand
gcacuccccuauugaaaga

SEQ ID NO: 725887 - RNA, 19 nt, Homo sapiens
  misc_RNA (1)...(19): siRNA sense strand
ggcgggaguuccagagaga

SEQ ID NO: 725888 - RNA, 19 nt, Homo sapiens
  misc_RNA (1)...(19): siRNA sense strand
ucugggugcugauggauga

SEQ ID NO: 725889 - RNA, 19 nt, Homo sapiens
  misc_RNA (1)...(19): siRNA sense strand
gggccgagagugacuuuga

SEQ ID NO: 725890 - RNA, 19 nt, Homo sapiens
  misc_RNA (1)...(19): siRNA sense strand
gugaagauccucaaagacu

SEQ ID NO: 725891 - RNA, 19 nt, Homo sapiens
  misc_RNA (1)...(19): siRNA sense strand
gcugucggaugaggacgua

SEQ ID NO: 725892 - RNA, 19 nt, Homo sapiens
  misc_RNA (1)...(19): siRNA sense strand
ccucaacgccuacaugaag

SEQ ID NO: 725893 - RNA, 19 nt, Homo sapiens
  misc_RNA (1)...(19): siRNA sense strand
uauuugacuucacuggaaa

SEQ ID NO: 725894 - RNA, 19 nt, Homo sapiens
  misc_RNA (1)...(19): siRNA sense strand
ggccaacauugcugacauc

SEQ ID NO: 725895 - RNA, 19 nt, Homo sapiens
  misc_RNA (1)...(19): siRNA sense strand
uugcugacaucgaggagaa

SEQ ID NO: 725896 - RNA, 19 nt, Homo sapiens
  misc_RNA (1)...(19): siRNA sense strand
gagugacuuugaacagcuu

SEQ ID NO: 725897 - RNA, 19 nt, Homo sapiens
  misc_RNA (1)...(19): siRNA sense strand
aacaggagaucgccgagau

SEQ ID NO: 725898 - RNA, 19 nt, Homo sapiens
  misc_RNA (1)...(19): siRNA sense strand
gaauuucaaagcuggagau

SEQ ID NO: 725899 - RNA, 19 nt, Homo sapiens
  misc_RNA (1)...(19): siRNA sense strand
gcccucaacgccuacauga

SEQ ID NO: 725900 - RNA, 19 nt, Homo sapiens
  misc_RNA (1)...(19): siRNA sense strand
gaugaggacguccggaucu

SEQ ID NO: 725901 - RNA, 19 nt, Homo sapiens
  misc_RNA (1)...(19): siRNA sense strand
ugacaucgaggagaagaga

SEQ ID NO: 725902 - RNA, 19 nt, Homo sapiens
  misc_RNA (1)...(19): siRNA sense strand
ccagagagaggacauagcu

SEQ ID NO: 725903 - RNA, 19 nt, Homo sapiens
  misc_RNA (1)...(19): siRNA sense strand
caaaaggaggauccaagua

SEQ ID NO: 725904 - RNA, 19 nt, Homo sapiens
  misc_RNA (1)...(19): siRNA sense strand
gaggcucuauuugacuuca

SEQ ID NO: 725905 - RNA, 19 nt, Homo sapiens
  misc_RNA (1)...(19): siRNA sense strand
caaacuggagcugaauuuc

SEQ ID NO: 725906 - RNA, 19 nt, Homo sapiens
  misc_RNA (1)...(19): siRNA sense strand
ccuggaagcugcacaucac

SEQ ID NO: 725907 - RNA, 19 nt, Homo sapiens
  misc_RNA (1)...(19): siRNA sense strand
ggacaacuacagggucuac

SEQ ID NO: 725908 - RNA, 19 nt, Homo sapiens
  misc_RNA (1)...(19): siRNA sense strand
ucacaaggcgggaguucca

SEQ ID NO: 725909 - RNA, 19 nt, Homo sapiens
  misc_RNA (1)...(19): siRNA sense strand
ggauccaaguaccucaucu

SEQ ID NO: 725910 - RNA, 19 nt, Homo sapiens
  misc_RNA (1)...(19): siRNA sense strand
cuacaacacgaugccauga

SEQ ID NO: 725911 - RNA, 19 nt, Homo sapiens
  misc_RNA (1)...(19): siRNA sense strand
cuacgugggugugaaacag

SEQ ID NO: 725912 - RNA, 19 nt, Homo sapiens
  misc_RNA (1)...(19): siRNA sense strand
caacuacagggucuacaac

SEQ ID NO: 725913 - RNA, 19 nt, Homo sapiens
  misc_RNA (1)...(19): siRNA sense strand
aggacauagcucugaauua

SEQ ID NO: 725914 - RNA, 19 nt, Homo sapiens
  misc_RNA (1)...(19): siRNA sense strand
gacaccaucagcaccauca

SEQ ID NO: 725915 - RNA, 19 nt, Homo sapiens
  misc_RNA (1)...(19): siRNA sense strand
gcaaacuggagcugaauuu

SEQ ID NO: 725916 - RNA, 19 nt, Homo sapiens
  misc_RNA (1)...(19): siRNA sense strand
uugaacagcuuccggauga

SEQ ID NO: 725917 - RNA, 19 nt, Homo sapiens
  misc_RNA (1)...(19): siRNA sense strand
uuucaaagcuggagaugug

SEQ ID NO: 725918 - RNA, 19 nt, Homo sapiens
  misc_RNA (1)...(19): siRNA sense strand
ucaucgaggugaagacaaa

SEQ ID NO: 725919 - RNA, 19 nt, Homo sapiens
  misc_RNA (1)...(19): siRNA sense strand
ggacaucgcgguggaggaa

SEQ ID NO: 725920 - RNA, 19 nt, Homo sapiens
  misc_RNA (1)...(19): siRNA sense strand
ucagucggaucaacaaaga

SEQ ID NO: 725921 - RNA, 19 nt, Homo sapiens
  misc_RNA (1)...(19): siRNA sense strand
gcggauaccugcccucaac

SEQ ID NO: 725922 - RNA, 19 nt, Homo sapiens
  misc_RNA (1)...(19): siRNA sense strand
ugaagauccucaaagacuu

SEQ ID NO: 725923 - RNA, 19 nt, Homo sapiens
  misc_RNA (1)...(19): siRNA sense strand
cuauuugacuucacuggaa

SEQ ID NO: 725924 - RNA, 19 nt, Homo sapiens
  misc_RNA (1)...(19): siRNA sense strand
ggacguccggaucuucuuu

SEQ ID NO: 725925 - RNA, 19 nt, Homo sapiens
  misc_RNA (1)...(19): siRNA sense strand
gaacagcuuccggaugaug

SEQ ID NO: 725926 - RNA, 19 nt, Homo sapiens
  misc_RNA (1)...(19): siRNA sense strand
cagcagcacuccccuauug

SEQ ID NO: 725927 - RNA, 19 nt, Homo sapiens
  misc_RNA (1)...(19): siRNA sense strand
ucgugaagauccucaaaga

SEQ ID NO: 725928 - RNA, 19 nt, Homo sapiens
  misc_RNA (1)...(19): siRNA sense strand
ggccgagagugacuuugaa

SEQ ID NO: 725929 - RNA, 19 nt, Homo sapiens
  misc_RNA (1)...(19): siRNA sense strand
gauccaaguaccucaucua

SEQ ID NO: 725930 - RNA, 19 nt, Homo sapiens
  misc_RNA (1)...(19): siRNA sense strand
ucugggugcugauggauga

SEQ ID NO: 725931 - RNA, 19 nt, Homo sapiens
  misc_RNA (1)...(19): siRNA sense strand
gugaagauccucaaagacu

SEQ ID NO: 725932 - RNA, 19 nt, Homo sapiens
  misc_RNA (1)...(19): siRNA sense strand
gggccgagagugacuuuga

SEQ ID NO: 725933 - RNA, 19 nt, Homo sapiens
  misc_RNA (1)...(19): siRNA sense strand
ccucaacgccuacaugaag

SEQ ID NO: 725934 - RNA, 19 nt, Homo sapiens
  misc_RNA (1)...(19): siRNA sense strand
ggccaacauugcugacauc

SEQ ID NO: 725935 - RNA, 19 nt, Homo sapiens
  misc_RNA (1)...(19): siRNA sense strand
uauuugacuucacuggaaa

SEQ ID NO: 725936 - RNA, 19 nt, Homo sapiens
  misc_RNA (1)...(19): siRNA sense strand
uugcugacaucgaggagaa

SEQ ID NO: 725937 - RNA, 19 nt, Homo sapiens
  misc_RNA (1)...(19): siRNA sense strand
gagugacuuugaacagcuu

SEQ ID NO: 725938 - RNA, 19 nt, Homo sapiens
  misc_RNA (1)...(19): siRNA sense strand
aacaggagaucgccgagau

SEQ ID NO: 725939 - RNA, 19 nt, Homo sapiens
  misc_RNA (1)...(19): siRNA sense strand
gaauuucaaagcuggagau

SEQ ID NO: 725940 - RNA, 19 nt, Homo sapiens
  misc_RNA (1)...(19): siRNA sense strand
gcccucaacgccuacauga

SEQ ID NO: 725941 - RNA, 19 nt, Homo sapiens
  misc_RNA (1)...(19): siRNA sense strand
gaugaggacguccggaucu

SEQ ID NO: 725942 - RNA, 19 nt, Homo sapiens
  misc_RNA (1)...(19): siRNA sense strand
ugacaucgaggagaagaga

SEQ ID NO: 725943 - RNA, 19 nt, Homo sapiens
  misc_RNA (1)...(19): siRNA sense strand
caaaaggaggauccaagua

SEQ ID NO: 725944 - RNA, 19 nt, Homo sapiens
  misc_RNA (1)...(19): siRNA sense strand
gaggcucuauuugacuuca

SEQ ID NO: 725945 - RNA, 19 nt, Homo sapiens
  misc_RNA (1)...(19): siRNA sense strand
caaacuggagcugaauuuc

SEQ ID NO: 725946 - RNA, 19 nt, Homo sapiens
  misc_RNA (1)...(19): siRNA sense strand
ggauccaaguaccucaucu

SEQ ID NO: 725947 - RNA, 19 nt, Homo sapiens
  misc_RNA (1)...(19): siRNA sense strand
cuacgugggugugaaacag

SEQ ID NO: 725948 - RNA, 19 nt, Homo sapiens
  misc_RNA (1)...(19): siRNA sense strand
gacaccaucagcaccauca

SEQ ID NO: 725949 - RNA, 19 nt, Homo sapiens
  misc_RNA (1)...(19): siRNA sense strand
gaacauaucugaauagugu

SEQ ID NO: 725950 - RNA, 19 nt, Homo sapiens
  misc_RNA (1)...(19): siRNA sense strand
gcacgugacuggacaauuu

SEQ ID NO: 725951 - RNA, 19 nt, Homo sapiens
  misc_RNA (1)...(19): siRNA sense strand
ggaagaagaugaaacugua

SEQ ID NO: 725952 - RNA, 19 nt, Homo sapiens
  misc_RNA (1)...(19): siRNA sense strand
gaaggaacauaucugaaua

SEQ ID NO: 725953 - RNA, 19 nt, Homo sapiens
  misc_RNA (1)...(19): siRNA sense strand
caacggaggugacagauuu

SEQ ID NO: 725954 - RNA, 19 nt, Homo sapiens
  misc_RNA (1)...(19): siRNA sense strand
gaagggaucugaacuggaa

SEQ ID NO: 725955 - RNA, 19 nt, Homo sapiens
  misc_RNA (1)...(19): siRNA sense strand
gagcaauugugaugagaua

SEQ ID NO: 725956 - RNA, 19 nt, Homo sapiens
  misc_RNA (1)...(19): siRNA sense strand
gaguggaagucuacuguua

SEQ ID NO: 725957 - RNA, 19 nt, Homo sapiens
  misc_RNA (1)...(19): siRNA sense strand
gaucugaacuggaaauuac

SEQ ID NO: 725958 - RNA, 19 nt, Homo sapiens
  misc_RNA (1)...(19): siRNA sense strand
caacuggacugccucacua

SEQ ID NO: 725959 - RNA, 19 nt, Homo sapiens
  misc_RNA (1)...(19): siRNA sense strand
gugcauaugucaaucuuaa

SEQ ID NO: 725960 - RNA, 19 nt, Homo sapiens
  misc_RNA (1)...(19): siRNA sense strand
ucaagauccuucaguauuu

SEQ ID NO: 725961 - RNA, 19 nt, Homo sapiens
  misc_RNA (1)...(19): siRNA sense strand
agacugaaauggcagcuua

SEQ ID NO: 725962 - RNA, 19 nt, Homo sapiens
  misc_RNA (1)...(19): siRNA sense strand
gugaagacuuugaauauga

SEQ ID NO: 725963 - RNA, 19 nt, Homo sapiens
  misc_RNA (1)...(19): siRNA sense strand
ugaacaagguggaguauug

SEQ ID NO: 725964 - RNA, 19 nt, Homo sapiens
  misc_RNA (1)...(19): siRNA sense strand
ccaccaagcuccuuacuuc

SEQ ID NO: 725965 - RNA, 19 nt, Homo sapiens
  misc_RNA (1)...(19): siRNA sense strand
gagaagaauugauugacaa

SEQ ID NO: 725966 - RNA, 19 nt, Homo sapiens
  misc_RNA (1)...(19): siRNA sense strand
gaaaucacaguguacuaua

SEQ ID NO: 725967 - RNA, 19 nt, Homo sapiens
  misc_RNA (1)...(19): siRNA sense strand
ccacacagaguucauauuu

SEQ ID NO: 725968 - RNA, 19 nt, Homo sapiens
  misc_RNA (1)...(19): siRNA sense strand
ccgcaucucugaaguguuu

SEQ ID NO: 725969 - RNA, 19 nt, Homo sapiens
  misc_RNA (1)...(19): siRNA sense strand
ugucagcccucuauaaauu

SEQ ID NO: 725970 - RNA, 19 nt, Homo sapiens
  misc_RNA (1)...(19): siRNA sense strand
ccaccaaggucuucuguau

SEQ ID NO: 725971 - RNA, 19 nt, Homo sapiens
  misc_RNA (1)...(19): siRNA sense strand
gaaagaaauugugguuauc

SEQ ID NO: 725972 - RNA, 19 nt, Homo sapiens
  misc_RNA (1)...(19): siRNA sense strand
ggucaaguuuguagauauu

SEQ ID NO: 725973 - RNA, 19 nt, Homo sapiens
  misc_RNA (1)...(19): siRNA sense strand
gcaaucugguuccaacuga

SEQ ID NO: 725974 - RNA, 19 nt, Homo sapiens
  misc_RNA (1)...(19): siRNA sense strand
gugaggagcuggagcaguu

SEQ ID NO: 725975 - RNA, 19 nt, Homo sapiens
  misc_RNA (1)...(19): siRNA sense strand
gaaggaggaagaaauagaa

SEQ ID NO: 725976 - RNA, 19 nt, Homo sapiens
  misc_RNA (1)...(19): siRNA sense strand
ccagaaggaggaagaaaua

SEQ ID NO: 725977 - RNA, 19 nt, Homo sapiens
  misc_RNA (1)...(19): siRNA sense strand
ccacaagaguguuuaaugg

SEQ ID NO: 725978 - RNA, 19 nt, Homo sapiens
  misc_RNA (1)...(19): siRNA sense strand
agaggacgauuacucauuu

SEQ ID NO: 725979 - RNA, 19 nt, Homo sapiens
  misc_RNA (1)...(19): siRNA sense strand
ucaagucuuuggagaagua

SEQ ID NO: 725980 - RNA, 19 nt, Homo sapiens
  misc_RNA (1)...(19): siRNA sense strand
caaugccuaucgcuucuua

SEQ ID NO: 725981 - RNA, 19 nt, Homo sapiens
  misc_RNA (1)...(19): siRNA sense strand
cagaguggguuucauguug

SEQ ID NO: 725982 - RNA, 19 nt, Homo sapiens
  misc_RNA (1)...(19): siRNA sense strand
gauggaggauugugucaug

SEQ ID NO: 725983 - RNA, 19 nt, Homo sapiens
  misc_RNA (1)...(19): siRNA sense strand
ugagauccuugaaagauuu

SEQ ID NO: 725984 - RNA, 19 nt, Homo sapiens
  misc_RNA (1)...(19): siRNA sense strand
gcauguaacacuccacuuu

SEQ ID NO: 725985 - RNA, 19 nt, Homo sapiens
  misc_RNA (1)...(19): siRNA sense strand
guucauauuuaccaccaua

SEQ ID NO: 725986 - RNA, 19 nt, Homo sapiens
  misc_RNA (1)...(19): siRNA sense strand
aaaccaaacugacuuacug

SEQ ID NO: 725987 - RNA, 19 nt, Homo sapiens
  misc_RNA (1)...(19): siRNA sense strand
ggaaauuggcugaaagaug

SEQ ID NO: 725988 - RNA, 19 nt, Homo sapiens
  misc_RNA (1)...(19): siRNA sense strand
gaauugauguaccagaauc

SEQ ID NO: 725989 - RNA, 19 nt, Homo sapiens
  misc_RNA (1)...(19): siRNA sense strand
uagauauucugaccaauug

SEQ ID NO: 725990 - RNA, 19 nt, Homo sapiens
  misc_RNA (1)...(19): siRNA sense strand
gcagaaaaccuccgcuuua

SEQ ID NO: 725991 - RNA, 19 nt, Homo sapiens
  misc_RNA (1)...(19): siRNA sense strand
gccgauggauugacuuuga

SEQ ID NO: 725992 - RNA, 19 nt, Homo sapiens
  misc_RNA (1)...(19): siRNA sense strand
cuaaagcuguuucugaaug

SEQ ID NO: 725993 - RNA, 19 nt, Homo sapiens
  misc_RNA (1)...(19): siRNA sense strand
acacagaguucauauuuac

SEQ ID NO: 725994 - RNA, 19 nt, Homo sapiens
  misc_RNA (1)...(19): siRNA sense strand
gaagaacugucaggagcaa

SEQ ID NO: 725995 - RNA, 19 nt, Homo sapiens
  misc_RNA (1)...(19): siRNA sense strand
ggacaaccgccuuucaaga

SEQ ID NO: 725996 - RNA, 19 nt, Homo sapiens
  misc_RNA (1)...(19): siRNA sense strand
uaaagcuguuucugaauga

SEQ ID NO: 725997 - RNA, 19 nt, Homo sapiens
  misc_RNA (1)...(19): siRNA sense strand
cacacagaguucauauuua

SEQ ID NO: 725998 - RNA, 19 nt, Homo sapiens
  misc_RNA (1)...(19): siRNA sense strand
gcaauugugaugagauauu

SEQ ID NO: 725999 - RNA, 19 nt, Homo sapiens
  misc_RNA (1)...(19): siRNA sense strand
guagauauucugaccaauu

SEQ ID NO: 726000 - RNA, 19 nt, Homo sapiens
  misc_RNA (1)...(19): siRNA sense strand
gacaaccgccuuucaagaa

SEQ ID NO: 726001 - RNA, 19 nt, Homo sapiens
  misc_RNA (1)...(19): siRNA sense strand
cagacacuccucuaauuua

SEQ ID NO: 726002 - RNA, 19 nt, Homo sapiens
  misc_RNA (1)...(19): siRNA sense strand
gaacuggaaauuacacuca

SEQ ID NO: 726003 - RNA, 19 nt, Homo sapiens
  misc_RNA (1)...(19): siRNA sense strand
gaaagacucacucccuguu

SEQ ID NO: 726004 - RNA, 19 nt, Homo sapiens
  misc_RNA (1)...(19): siRNA sense strand
caauugguauguuagaaug

SEQ ID NO: 726005 - RNA, 19 nt, Homo sapiens
  misc_RNA (1)...(19): siRNA sense strand
caucaggacuuugaaggaa

SEQ ID NO: 726006 - RNA, 19 nt, Homo sapiens
  misc_RNA (1)...(19): siRNA sense strand
gauaagacacugggaauca

SEQ ID NO: 726007 - RNA, 19 nt, Homo sapiens
  misc_RNA (1)...(19): siRNA sense strand
cgagaagaauugauugaca

SEQ ID NO: 726008 - RNA, 19 nt, Homo sapiens
  misc_RNA (1)...(19): siRNA sense strand
caagauccuucaguauuug

SEQ ID NO: 726009 - RNA, 19 nt, Homo sapiens
  misc_RNA (1)...(19): siRNA sense strand
cuaguacucuucuuuguca

SEQ ID NO: 726010 - RNA, 19 nt, Homo sapiens
  misc_RNA (1)...(19): siRNA sense strand
caacaguucuaguacucuu

SEQ ID NO: 726011 - RNA, 19 nt, Homo sapiens
  misc_RNA (1)...(19): siRNA sense strand
gaucagacacuccucuaau

SEQ ID NO: 726012 - RNA, 19 nt, Homo sapiens
  misc_RNA (1)...(19): siRNA sense strand
gccaugaauugcacgauga

SEQ ID NO: 726013 - RNA, 19 nt, Homo sapiens
  misc_RNA (1)...(19): siRNA sense strand
ucaagaacguaauugugaa

SEQ ID NO: 726014 - RNA, 19 nt, Homo sapiens
  misc_RNA (1)...(19): siRNA sense strand
ccagaaaugcaauauguga

SEQ ID NO: 726015 - RNA, 19 nt, Homo sapiens
  misc_RNA (1)...(19): siRNA sense strand
accaaggucuucuguauga

SEQ ID NO: 726016 - RNA, 19 nt, Homo sapiens
  misc_RNA (1)...(19): siRNA sense strand
agagaaagccccaacauua

SEQ ID NO: 726017 - RNA, 19 nt, Homo sapiens
  misc_RNA (1)...(19): siRNA sense strand
uggcuuaccuguggaauau

SEQ ID NO: 726018 - RNA, 19 nt, Homo sapiens
  misc_RNA (1)...(19): siRNA sense strand
aaugguagaugaaggaaug

SEQ ID NO: 726019 - RNA, 19 nt, Homo sapiens
  misc_RNA (1)...(19): siRNA sense strand
ggagaaguauaucauugag

SEQ ID NO: 726020 - RNA, 19 nt, Homo sapiens
  misc_RNA (1)...(19): siRNA sense strand
gauugacccuguuucuguu

SEQ ID NO: 726021 - RNA, 19 nt, Homo sapiens
  misc_RNA (1)...(19): siRNA sense strand
gaaugaaccgcagaagauu

SEQ ID NO: 726022 - RNA, 19 nt, Homo sapiens
  misc_RNA (1)...(19): siRNA sense strand
gcggguacaauuaaagaua

SEQ ID NO: 726023 - RNA, 19 nt, Homo sapiens
  misc_RNA (1)...(19): siRNA sense strand
ugugaaggaugcugacaaa

SEQ ID NO: 726024 - RNA, 19 nt, Homo sapiens
  misc_RNA (1)...(19): siRNA sense strand
acaacuaugugaaggaaga

SEQ ID NO: 726025 - RNA, 19 nt, Homo sapiens
  misc_RNA (1)...(19): siRNA sense strand
ugacaacuaugugaaggaa

SEQ ID NO: 726026 - RNA, 19 nt, Homo sapiens
  misc_RNA (1)...(19): siRNA sense strand
gcuuaccuguggaauauga

SEQ ID NO: 726027 - RNA, 19 nt, Homo sapiens
  misc_RNA (1)...(19): siRNA sense strand
ucuauaaauuggagaguga

SEQ ID NO: 726028 - RNA, 19 nt, Homo sapiens
  misc_RNA (1)...(19): siRNA sense strand
caacaacagcagacuucua

SEQ ID NO: 726029 - RNA, 19 nt, Homo sapiens
  misc_RNA (1)...(19): siRNA sense strand
ggaaauuacagaagacauc

SEQ ID NO: 726030 - RNA, 19 nt, Homo sapiens
  misc_RNA (1)...(19): siRNA sense strand
gaucaacaguucuaguacu

SEQ ID NO: 726031 - RNA, 19 nt, Homo sapiens
  misc_RNA (1)...(19): siRNA sense strand
ugacguccaucaagcaguu

SEQ ID NO: 726032 - RNA, 19 nt, Homo sapiens
  misc_RNA (1)...(19): siRNA sense strand
agacuuggccgauggauug

SEQ ID NO: 726033 - RNA, 19 nt, Homo sapiens
  misc_RNA (1)...(19): siRNA sense strand
ugaagacuguguauguuuc

SEQ ID NO: 726034 - RNA, 19 nt, Homo sapiens
  misc_RNA (1)...(19): siRNA sense strand
gaacuuggaagagugauca

SEQ ID NO: 726035 - RNA, 19 nt, Homo sapiens
  misc_RNA (1)...(19): siRNA sense strand
ccuaugcucagguucauua

SEQ ID NO: 726036 - RNA, 19 nt, Homo sapiens
  misc_RNA (1)...(19): siRNA sense strand
gaaggaugcugacaaaagu

SEQ ID NO: 726037 - RNA, 19 nt, Homo sapiens
  misc_RNA (1)...(19): siRNA sense strand
ucgagucacaccagaauua

SEQ ID NO: 726038 - RNA, 19 nt, Homo sapiens
  misc_RNA (1)...(19): siRNA sense strand
gcaaauggcagugaacaag

SEQ ID NO: 726039 - RNA, 19 nt, Homo sapiens
  misc_RNA (1)...(19): siRNA sense strand
ugaaggaacauaucugaau

SEQ ID NO: 726040 - RNA, 19 nt, Homo sapiens
  misc_RNA (1)...(19): siRNA sense strand
ggaagucaucaaucgcaua

SEQ ID NO: 726041 - RNA, 19 nt, Homo sapiens
  misc_RNA (1)...(19): siRNA sense strand
cagaaaaccuccgcuuuaa

SEQ ID NO: 726042 - RNA, 19 nt, Homo sapiens
  misc_RNA (1)...(19): siRNA sense strand
ggaacaaugaccugugcua

SEQ ID NO: 726043 - RNA, 19 nt, Homo sapiens
  misc_RNA (1)...(19): siRNA sense strand
acuauuuccugaaguguaa

SEQ ID NO: 726044 - RNA, 19 nt, Homo sapiens
  misc_RNA (1)...(19): siRNA sense strand
gauugucagcccucuauaa

SEQ ID NO: 726045 - RNA, 19 nt, Homo sapiens
  misc_RNA (1)...(19): siRNA sense strand
gauauucugcugaguggaa

SEQ ID NO: 726046 - RNA, 19 nt, Homo sapiens
  misc_RNA (1)...(19): siRNA sense strand
ggaucugaacuggaaauua

SEQ ID NO: 726047 - RNA, 19 nt, Homo sapiens
  misc_RNA (1)...(19): siRNA sense strand
ucagacacuccucuaauuu

SEQ ID NO: 726048 - RNA, 19 nt, Homo sapiens
  misc_RNA (1)...(19): siRNA sense strand
acacuccacuuuccaacuu

SEQ ID NO: 726049 - RNA, 19 nt, Homo sapiens
  misc_RNA (1)...(19): siRNA sense strand
gaacauaucugaauagugu

SEQ ID NO: 726050 - RNA, 19 nt, Homo sapiens
  misc_RNA (1)...(19): siRNA sense strand
gcacgugacuggacaauuu

SEQ ID NO: 726051 - RNA, 19 nt, Homo sapiens
  misc_RNA (1)...(19): siRNA sense strand
ggaagaagaugaaacugua

SEQ ID NO: 726052 - RNA, 19 nt, Homo sapiens
  misc_RNA (1)...(19): siRNA sense strand
gaaggaacauaucugaaua

SEQ ID NO: 726053 - RNA, 19 nt, Homo sapiens
  misc_RNA (1)...(19): siRNA sense strand
caacggaggugacagauuu

SEQ ID NO: 726054 - RNA, 19 nt, Homo sapiens
  misc_RNA (1)...(19): siRNA sense strand
gaagggaucugaacuggaa

SEQ ID NO: 726055 - RNA, 19 nt, Homo sapiens
  misc_RNA (1)...(19): siRNA sense strand
gagcaauugugaugagaua

SEQ ID NO: 726056 - RNA, 19 nt, Homo sapiens
  misc_RNA (1)...(19): siRNA sense strand
gaguggaagucuacuguua

SEQ ID NO: 726057 - RNA, 19 nt, Homo sapiens
  misc_RNA (1)...(19): siRNA sense strand
gaucugaacuggaaauuac

SEQ ID NO: 726058 - RNA, 19 nt, Homo sapiens
  misc_RNA (1)...(19): siRNA sense strand
caacuggacugccucacua

SEQ ID NO: 726059 - RNA, 19 nt, Homo sapiens
  misc_RNA (1)...(19): siRNA sense strand
gugcauaugucaaucuuaa

SEQ ID NO: 726060 - RNA, 19 nt, Homo sapiens
  misc_RNA (1)...(19): siRNA sense strand
ucaagauccuucaguauuu

SEQ ID NO: 726061 - RNA, 19 nt, Homo sapiens
  misc_RNA (1)...(19): siRNA sense strand
agacugaaauggcagcuua

SEQ ID NO: 726062 - RNA, 19 nt, Homo sapiens
  misc_RNA (1)...(19): siRNA sense strand
gugaagacuuugaauauga

SEQ ID NO: 726063 - RNA, 19 nt, Homo sapiens
  misc_RNA (1)...(19): siRNA sense strand
ugaacaagguggaguauug

SEQ ID NO: 726064 - RNA, 19 nt, Homo sapiens
  misc_RNA (1)...(19): siRNA sense strand
ccaccaagcuccuuacuuc

SEQ ID NO: 726065 - RNA, 19 nt, Homo sapiens
  misc_RNA (1)...(19): siRNA sense strand
gagaagaauugauugacaa

SEQ ID NO: 726066 - RNA, 19 nt, Homo sapiens
  misc_RNA (1)...(19): siRNA sense strand
gaaaucacaguguacuaua

SEQ ID NO: 726067 - RNA, 19 nt, Homo sapiens
  misc_RNA (1)...(19): siRNA sense strand
ccacacagaguucauauuu

SEQ ID NO: 726068 - RNA, 19 nt, Homo sapiens
  misc_RNA (1)...(19): siRNA sense strand
ccgcaucucugaaguguuu

SEQ ID NO: 726069 - RNA, 19 nt, Homo sapiens
  misc_RNA (1)...(19): siRNA sense strand
ugucagcccucuauaaauu

SEQ ID NO: 726070 - RNA, 19 nt, Homo sapiens
  misc_RNA (1)...(19): siRNA sense strand
ccaccaaggucuucuguau

SEQ ID NO: 726071 - RNA, 19 nt, Homo sapiens
  misc_RNA (1)...(19): siRNA sense strand
gaaagaaauugugguuauc

SEQ ID NO: 726072 - RNA, 19 nt, Homo sapiens
  misc_RNA (1)...(19): siRNA sense strand
ggucaaguuuguagauauu

SEQ ID NO: 726073 - RNA, 19 nt, Homo sapiens
  misc_RNA (1)...(19): siRNA sense strand
gcaaucugguuccaacuga

SEQ ID NO: 726074 - RNA, 19 nt, Homo sapiens
  misc_RNA (1)...(19): siRNA sense strand
gugaggagcuggagcaguu

SEQ ID NO: 726075 - RNA, 19 nt, Homo sapiens
  misc_RNA (1)...(19): siRNA sense strand
gaaggaggaagaaauagaa

SEQ ID NO: 726076 - RNA, 19 nt, Homo sapiens
  misc_RNA (1)...(19): siRNA sense strand
ccagaaggaggaagaaaua

SEQ ID NO: 726077 - RNA, 19 nt, Homo sapiens
  misc_RNA (1)...(19): siRNA sense strand
ccacaagaguguuuaaugg

SEQ ID NO: 726078 - RNA, 19 nt, Homo sapiens
  misc_RNA (1)...(19): siRNA sense strand
agaggacgauuacucauuu

SEQ ID NO: 726079 - RNA, 19 nt, Homo sapiens
  misc_RNA (1)...(19): siRNA sense strand
ucaagucuuuggagaagua

SEQ ID NO: 726080 - RNA, 19 nt, Homo sapiens
  misc_RNA (1)...(19): siRNA sense strand
caaugccuaucgcuucuua

SEQ ID NO: 726081 - RNA, 19 nt, Homo sapiens
  misc_RNA (1)...(19): siRNA sense strand
cagaguggguuucauguug

SEQ ID NO: 726082 - RNA, 19 nt, Homo sapiens
  misc_RNA (1)...(19): siRNA sense strand
gauggaggauugugucaug

SEQ ID NO: 726083 - RNA, 19 nt, Homo sapiens
  misc_RNA (1)...(19): siRNA sense strand
ugagauccuugaaagauuu

SEQ ID NO: 726084 - RNA, 19 nt, Homo sapiens
  misc_RNA (1)...(19): siRNA sense strand
gcauguaacacuccacuuu

SEQ ID NO: 726085 - RNA, 19 nt, Homo sapiens
  misc_RNA (1)...(19): siRNA sense strand
guucauauuuaccaccaua

SEQ ID NO: 726086 - RNA, 19 nt, Homo sapiens
  misc_RNA (1)...(19): siRNA sense strand
aaaccaaacugacuuacug

SEQ ID NO: 726087 - RNA, 19 nt, Homo sapiens
  misc_RNA (1)...(19): siRNA sense strand
ggaaauuggcugaaagaug

SEQ ID NO: 726088 - RNA, 19 nt, Homo sapiens
  misc_RNA (1)...(19): siRNA sense strand
gaauugauguaccagaauc

SEQ ID NO: 726089 - RNA, 19 nt, Homo sapiens
  misc_RNA (1)...(19): siRNA sense strand
uagauauucugaccaauug

SEQ ID NO: 726090 - RNA, 19 nt, Homo sapiens
  misc_RNA (1)...(19): siRNA sense strand
gcagaaaaccuccgcuuua

SEQ ID NO: 726091 - RNA, 19 nt, Homo sapiens
  misc_RNA (1)...(19): siRNA sense strand
gccgauggauugacuuuga

SEQ ID NO: 726092 - RNA, 19 nt, Homo sapiens
  misc_RNA (1)...(19): siRNA sense strand
cuaaagcuguuucugaaug

SEQ ID NO: 726093 - RNA, 19 nt, Homo sapiens
  misc_RNA (1)...(19): siRNA sense strand
acacagaguucauauuuac

SEQ ID NO: 726094 - RNA, 19 nt, Homo sapiens
  misc_RNA (1)...(19): siRNA sense strand
gaagaacugucaggagcaa

SEQ ID NO: 726095 - RNA, 19 nt, Homo sapiens
  misc_RNA (1)...(19): siRNA sense strand
ggacaaccgccuuucaaga

SEQ ID NO: 726096 - RNA, 19 nt, Homo sapiens
  misc_RNA (1)...(19): siRNA sense strand
uaaagcuguuucugaauga

SEQ ID NO: 726097 - RNA, 19 nt, Homo sapiens
  misc_RNA (1)...(19): siRNA sense strand
cacacagaguucauauuua

SEQ ID NO: 726098 - RNA, 19 nt, Homo sapiens
  misc_RNA (1)...(19): siRNA sense strand
gcaauugugaugagauauu

SEQ ID NO: 726099 - RNA, 19 nt, Homo sapiens
  misc_RNA (1)...(19): siRNA sense strand
guagauauucugaccaauu

SEQ ID NO: 726100 - RNA, 19 nt, Homo sapiens
  misc_RNA (1)...(19): siRNA sense strand
gacaaccgccuuucaagaa

SEQ ID NO: 726101 - RNA, 19 nt, Homo sapiens
  misc_RNA (1)...(19): siRNA sense strand
cagacacuccucuaauuua

SEQ ID NO: 726102 - RNA, 19 nt, Homo sapiens
  misc_RNA (1)...(19): siRNA sense strand
gaacuggaaauuacacuca

SEQ ID NO: 726103 - RNA, 19 nt, Homo sapiens
  misc_RNA (1)...(19): siRNA sense strand
gaaagacucacucccuguu

SEQ ID NO: 726104 - RNA, 19 nt, Homo sapiens
  misc_RNA (1)...(19): siRNA sense strand
caauugguauguuagaaug

SEQ ID NO: 726105 - RNA, 19 nt, Homo sapiens
  misc_RNA (1)...(19): siRNA sense strand
caucaggacuuugaaggaa

SEQ ID NO: 726106 - RNA, 19 nt, Homo sapiens
  misc_RNA (1)...(19): siRNA sense strand
gauaagacacugggaauca

SEQ ID NO: 726107 - RNA, 19 nt, Homo sapiens
  misc_RNA (1)...(19): siRNA sense strand
cgagaagaauugauugaca

SEQ ID NO: 726108 - RNA, 19 nt, Homo sapiens
  misc_RNA (1)...(19): siRNA sense strand
caagauccuucaguauuug

SEQ ID NO: 726109 - RNA, 19 nt, Homo sapiens
  misc_RNA (1)...(19): siRNA sense strand
cuaguacucuucuuuguca

SEQ ID NO: 726110 - RNA, 19 nt, Homo sapiens
  misc_RNA (1)...(19): siRNA sense strand
caacaguucuaguacucuu

SEQ ID NO: 726111 - RNA, 19 nt, Homo sapiens
  misc_RNA (1)...(19): siRNA sense strand
gaucagacacuccucuaau

SEQ ID NO: 726112 - RNA, 19 nt, Homo sapiens
  misc_RNA (1)...(19): siRNA sense strand
gccaugaauugcacgauga

SEQ ID NO: 726113 - RNA, 19 nt, Homo sapiens
  misc_RNA (1)...(19): siRNA sense strand
ucaagaacguaauugugaa

SEQ ID NO: 726114 - RNA, 19 nt, Homo sapiens
  misc_RNA (1)...(19): siRNA sense strand
ccagaaaugcaauauguga

SEQ ID NO: 726115 - RNA, 19 nt, Homo sapiens
  misc_RNA (1)...(19): siRNA sense strand
accaaggucuucuguauga

SEQ ID NO: 726116 - RNA, 19 nt, Homo sapiens
  misc_RNA (1)...(19): siRNA sense strand
agagaaagccccaacauua

SEQ ID NO: 726117 - RNA, 19 nt, Homo sapiens
  misc_RNA (1)...(19): siRNA sense strand
uggcuuaccuguggaauau

SEQ ID NO: 726118 - RNA, 19 nt, Homo sapiens
  misc_RNA (1)...(19): siRNA sense strand
aaugguagaugaaggaaug

SEQ ID NO: 726119 - RNA, 19 nt, Homo sapiens
  misc_RNA (1)...(19): siRNA sense strand
ggagaaguauaucauugag

SEQ ID NO: 726120 - RNA, 19 nt, Homo sapiens
  misc_RNA (1)...(19): siRNA sense strand
gauugacccuguuucuguu

SEQ ID NO: 726121 - RNA, 19 nt, Homo sapiens
  misc_RNA (1)...(19): siRNA sense strand
gaaugaaccgcagaagauu

SEQ ID NO: 726122 - RNA, 19 nt, Homo sapiens
  misc_RNA (1)...(19): siRNA sense strand
gcggguacaauuaaagaua

SEQ ID NO: 726123 - RNA, 19 nt, Homo sapiens
  misc_RNA (1)...(19): siRNA sense strand
ugugaaggaugcugacaaa

SEQ ID NO: 726124 - RNA, 19 nt, Homo sapiens
  misc_RNA (1)...(19): siRNA sense strand
acaacuaugugaaggaaga

SEQ ID NO: 726125 - RNA, 19 nt, Homo sapiens
  misc_RNA (1)...(19): siRNA sense strand
ugacaacuaugugaaggaa

SEQ ID NO: 726126 - RNA, 19 nt, Homo sapiens
  misc_RNA (1)...(19): siRNA sense strand
gcuuaccuguggaauauga

SEQ ID NO: 726127 - RNA, 19 nt, Homo sapiens
  misc_RNA (1)...(19): siRNA sense strand
ucuauaaauuggagaguga

SEQ ID NO: 726128 - RNA, 19 nt, Homo sapiens
  misc_RNA (1)...(19): siRNA sense strand
caacaacagcagacuucua

SEQ ID NO: 726129 - RNA, 19 nt, Homo sapiens
  misc_RNA (1)...(19): siRNA sense strand
ggaaauuacagaagacauc

SEQ ID NO: 726130 - RNA, 19 nt, Homo sapiens
  misc_RNA (1)...(19): siRNA sense strand
gaucaacaguucuaguacu

SEQ ID NO: 726131 - RNA, 19 nt, Homo sapiens
  misc_RNA (1)...(19): siRNA sense strand
ugacguccaucaagcaguu

SEQ ID NO: 726132 - RNA, 19 nt, Homo sapiens
  misc_RNA (1)...(19): siRNA sense strand
agacuuggccgauggauug

SEQ ID NO: 726133 - RNA, 19 nt, Homo sapiens
  misc_RNA (1)...(19): siRNA sense strand
ugaagacuguguauguuuc

SEQ ID NO: 726134 - RNA, 19 nt, Homo sapiens
  misc_RNA (1)...(19): siRNA sense strand
gaacuuggaagagugauca

SEQ ID NO: 726135 - RNA, 19 nt, Homo sapiens
  misc_RNA (1)...(19): siRNA sense strand
ccuaugcucagguucauua

SEQ ID NO: 726136 - RNA, 19 nt, Homo sapiens
  misc_RNA (1)...(19): siRNA sense strand
gaaggaugcugacaaaagu

SEQ ID NO: 726137 - RNA, 19 nt, Homo sapiens
  misc_RNA (1)...(19): siRNA sense strand
ucgagucacaccagaauua

SEQ ID NO: 726138 - RNA, 19 nt, Homo sapiens
  misc_RNA (1)...(19): siRNA sense strand
gcaaauggcagugaacaag

SEQ ID NO: 726139 - RNA, 19 nt, Homo sapiens
  misc_RNA (1)...(19): siRNA sense strand
ugaaggaacauaucugaau

SEQ ID NO: 726140 - RNA, 19 nt, Homo sapiens
  misc_RNA (1)...(19): siRNA sense strand
ggaagucaucaaucgcaua

SEQ ID NO: 726141 - RNA, 19 nt, Homo sapiens
  misc_RNA (1)...(19): siRNA sense strand
cagaaaaccuccgcuuuaa

SEQ ID NO: 726142 - RNA, 19 nt, Homo sapiens
  misc_RNA (1)...(19): siRNA sense strand
ggaacaaugaccugugcua

SEQ ID NO: 726143 - RNA, 19 nt, Homo sapiens
  misc_RNA (1)...(19): siRNA sense strand
acuauuuccugaaguguaa

SEQ ID NO: 726144 - RNA, 19 nt, Homo sapiens
  misc_RNA (1)...(19): siRNA sense strand
gauugucagcccucuauaa

SEQ ID NO: 726145 - RNA, 19 nt, Homo sapiens
  misc_RNA (1)...(19): siRNA sense strand
gauauucugcugaguggaa

SEQ ID NO: 726146 - RNA, 19 nt, Homo sapiens
  misc_RNA (1)...(19): siRNA sense strand
ggaucugaacuggaaauua

SEQ ID NO: 726147 - RNA, 19 nt, Homo sapiens
  misc_RNA (1)...(19): siRNA sense strand
ucagacacuccucuaauuu

SEQ ID NO: 726148 - RNA, 19 nt, Homo sapiens
  misc_RNA (1)...(19): siRNA sense strand
acacuccacuuuccaacuu

SEQ ID NO: 726149 - RNA, 19 nt, Homo sapiens
  misc_RNA (1)...(19): siRNA sense strand
gcugaagcccuacucaaua

SEQ ID NO: 726150 - RNA, 19 nt, Homo sapiens
  misc_RNA (1)...(19): siRNA sense strand
gcagagacagaguuaauga

SEQ ID NO: 726151 - RNA, 19 nt, Homo sapiens
  misc_RNA (1)...(19): siRNA sense strand
caagccaggugucauauuc

SEQ ID NO: 726152 - RNA, 19 nt, Homo sapiens
  misc_RNA (1)...(19): siRNA sense strand
gaagcccuacucaauauaa

SEQ ID NO: 726153 - RNA, 19 nt, Homo sapiens
  misc_RNA (1)...(19): siRNA sense strand
gaacagcuuucacuuugcu

SEQ ID NO: 726154 - RNA, 19 nt, Homo sapiens
  misc_RNA (1)...(19): siRNA sense strand
gagacagaguuaaugaugu

SEQ ID NO: 726155 - RNA, 19 nt, Homo sapiens
  misc_RNA (1)...(19): siRNA sense strand
ucacaaagcaucccguguu

SEQ ID NO: 726156 - RNA, 19 nt, Homo sapiens
  misc_RNA (1)...(19): siRNA sense strand
ucauauuccucaccaagaa

SEQ ID NO: 726157 - RNA, 19 nt, Homo sapiens
  misc_RNA (1)...(19): siRNA sense strand
cagaguuaaugaugucaaa

SEQ ID NO: 726158 - RNA, 19 nt, Homo sapiens
  misc_RNA (1)...(19): siRNA sense strand
cugaagcccuacucaauau

SEQ ID NO: 726159 - RNA, 19 nt, Homo sapiens
  misc_RNA (1)...(19): siRNA sense strand
cacaaagcaucccguguuc

SEQ ID NO: 726160 - RNA, 19 nt, Homo sapiens
  misc_RNA (1)...(19): siRNA sense strand
ggaguucaggauugcauga

SEQ ID NO: 726161 - RNA, 19 nt, Homo sapiens
  misc_RNA (1)...(19): siRNA sense strand
gcuuguugcuguccuugga

SEQ ID NO: 726162 - RNA, 19 nt, Homo sapiens
  misc_RNA (1)...(19): siRNA sense strand
guccgggaguucaggauug

SEQ ID NO: 726163 - RNA, 19 nt, Homo sapiens
  misc_RNA (1)...(19): siRNA sense strand
agagacagaguuaaugaug

SEQ ID NO: 726164 - RNA, 19 nt, Homo sapiens
  misc_RNA (1)...(19): siRNA sense strand
ugaugcagagacagaguua

SEQ ID NO: 726165 - RNA, 19 nt, Homo sapiens
  misc_RNA (1)...(19): siRNA sense strand
gaaaauccaguaguucuga

SEQ ID NO: 726166 - RNA, 19 nt, Homo sapiens
  misc_RNA (1)...(19): siRNA sense strand
ccuccuacaucucacaaag

SEQ ID NO: 726167 - RNA, 19 nt, Homo sapiens
  misc_RNA (1)...(19): siRNA sense strand
ccaagccaggugucauauu

SEQ ID NO: 726168 - RNA, 19 nt, Homo sapiens
  misc_RNA (1)...(19): siRNA sense strand
ugaagcccuacucaauaua

SEQ ID NO: 726169 - RNA, 19 nt, Homo sapiens
  misc_RNA (1)...(19): siRNA sense strand
caucccguguucacucaug

SEQ ID NO: 726170 - RNA, 19 nt, Homo sapiens
  misc_RNA (1)...(19): siRNA sense strand
caaagcaucccguguucac

SEQ ID NO: 726171 - RNA, 19 nt, Homo sapiens
  misc_RNA (1)...(19): siRNA sense strand
cuccaagccaggugucaua

SEQ ID NO: 726172 - RNA, 19 nt, Homo sapiens
  misc_RNA (1)...(19): siRNA sense strand
gcugaagcccuacucaaua

SEQ ID NO: 726173 - RNA, 19 nt, Homo sapiens
  misc_RNA (1)...(19): siRNA sense strand
gcagagacagaguuaauga

SEQ ID NO: 726174 - RNA, 19 nt, Homo sapiens
  misc_RNA (1)...(19): siRNA sense strand
caagccaggugucauauuc

SEQ ID NO: 726175 - RNA, 19 nt, Homo sapiens
  misc_RNA (1)...(19): siRNA sense strand
gaagcccuacucaauauaa

SEQ ID NO: 726176 - RNA, 19 nt, Homo sapiens
  misc_RNA (1)...(19): siRNA sense strand
gaacagcuuucacuuugcu

SEQ ID NO: 726177 - RNA, 19 nt, Homo sapiens
  misc_RNA (1)...(19): siRNA sense strand
gagacagaguuaaugaugu

SEQ ID NO: 726178 - RNA, 19 nt, Homo sapiens
  misc_RNA (1)...(19): siRNA sense strand
ucacaaagcaucccguguu

SEQ ID NO: 726179 - RNA, 19 nt, Homo sapiens
  misc_RNA (1)...(19): siRNA sense strand
ucauauuccucaccaagaa

SEQ ID NO: 726180 - RNA, 19 nt, Homo sapiens
  misc_RNA (1)...(19): siRNA sense strand
cagaguuaaugaugucaaa

SEQ ID NO: 726181 - RNA, 19 nt, Homo sapiens
  misc_RNA (1)...(19): siRNA sense strand
cugaagcccuacucaauau

SEQ ID NO: 726182 - RNA, 19 nt, Homo sapiens
  misc_RNA (1)...(19): siRNA sense strand
cacaaagcaucccguguuc

SEQ ID NO: 726183 - RNA, 19 nt, Homo sapiens
  misc_RNA (1)...(19): siRNA sense strand
ggaguucaggauugcauga

SEQ ID NO: 726184 - RNA, 19 nt, Homo sapiens
  misc_RNA (1)...(19): siRNA sense strand
gcuuguugcuguccuugga

SEQ ID NO: 726185 - RNA, 19 nt, Homo sapiens
  misc_RNA (1)...(19): siRNA sense strand
guccgggaguucaggauug

SEQ ID NO: 726186 - RNA, 19 nt, Homo sapiens
  misc_RNA (1)...(19): siRNA sense strand
agagacagaguuaaugaug

SEQ ID NO: 726187 - RNA, 19 nt, Homo sapiens
  misc_RNA (1)...(19): siRNA sense strand
ugaugcagagacagaguua

SEQ ID NO: 726188 - RNA, 19 nt, Homo sapiens
  misc_RNA (1)...(19): siRNA sense strand
gaaaauccaguaguucuga

SEQ ID NO: 726189 - RNA, 19 nt, Homo sapiens
  misc_RNA (1)...(19): siRNA sense strand
ccuccuacaucucacaaag

SEQ ID NO: 726190 - RNA, 19 nt, Homo sapiens
  misc_RNA (1)...(19): siRNA sense strand
ccaagccaggugucauauu

SEQ ID NO: 726191 - RNA, 19 nt, Homo sapiens
  misc_RNA (1)...(19): siRNA sense strand
ugaagcccuacucaauaua

SEQ ID NO: 726192 - RNA, 19 nt, Homo sapiens
  misc_RNA (1)...(19): siRNA sense strand
caucccguguucacucaug

SEQ ID NO: 726193 - RNA, 19 nt, Homo sapiens
  misc_RNA (1)...(19): siRNA sense strand
caaagcaucccguguucac

SEQ ID NO: 726194 - RNA, 19 nt, Homo sapiens
  misc_RNA (1)...(19): siRNA sense strand
cuccaagccaggugucaua

SEQ ID NO: 726195 - RNA, 19 nt, Homo sapiens
  misc_RNA (1)...(19): siRNA sense strand
gcugaagcccuacucaaua

SEQ ID NO: 726196 - RNA, 19 nt, Homo sapiens
  misc_RNA (1)...(19): siRNA sense strand
gcagagacagaguuaauga

SEQ ID NO: 726197 - RNA, 19 nt, Homo sapiens
  misc_RNA (1)...(19): siRNA sense strand
caagccaggugucauauuc

SEQ ID NO: 726198 - RNA, 19 nt, Homo sapiens
  misc_RNA (1)...(19): siRNA sense strand
gaagcccuacucaauauaa

SEQ ID NO: 726199 - RNA, 19 nt, Homo sapiens
  misc_RNA (1)...(19): siRNA sense strand
gaacagcuuucacuuugcu

SEQ ID NO: 726200 - RNA, 19 nt, Homo sapiens
  misc_RNA (1)...(19): siRNA sense strand
gagacagaguuaaugaugu

SEQ ID NO: 726201 - RNA, 19 nt, Homo sapiens
  misc_RNA (1)...(19): siRNA sense strand
ucacaaagcaucccguguu

SEQ ID NO: 726202 - RNA, 19 nt, Homo sapiens
  misc_RNA (1)...(19): siRNA sense strand
ucauauuccucaccaagaa

SEQ ID NO: 726203 - RNA, 19 nt, Homo sapiens
  misc_RNA (1)...(19): siRNA sense strand
cagaguuaaugaugucaaa

SEQ ID NO: 726204 - RNA, 19 nt, Homo sapiens
  misc_RNA (1)...(19): siRNA sense strand
cugaagcccuacucaauau

SEQ ID NO: 726205 - RNA, 19 nt, Homo sapiens
  misc_RNA (1)...(19): siRNA sense strand
cacaaagcaucccguguuc

SEQ ID NO: 726206 - RNA, 19 nt, Homo sapiens
  misc_RNA (1)...(19): siRNA sense strand
ggaguucaggauugcauga

SEQ ID NO: 726207 - RNA, 19 nt, Homo sapiens
  misc_RNA (1)...(19): siRNA sense strand
gcuuguugcuguccuugga

SEQ ID NO: 726208 - RNA, 19 nt, Homo sapiens
  misc_RNA (1)...(19): siRNA sense strand
guccgggaguucaggauug

SEQ ID NO: 726209 - RNA, 19 nt, Homo sapiens
  misc_RNA (1)...(19): siRNA sense strand
agagacagaguuaaugaug

SEQ ID NO: 726210 - RNA, 19 nt, Homo sapiens
  misc_RNA (1)...(19): siRNA sense strand
ugaugcagagacagaguua

SEQ ID NO: 726211 - RNA, 19 nt, Homo sapiens
  misc_RNA (1)...(19): siRNA sense strand
gaaaauccaguaguucuga

SEQ ID NO: 726212 - RNA, 19 nt, Homo sapiens
  misc_RNA (1)...(19): siRNA sense strand
ccuccuacaucucacaaag

SEQ ID NO: 726213 - RNA, 19 nt, Homo sapiens
  misc_RNA (1)...(19): siRNA sense strand
ccaagccaggugucauauu

SEQ ID NO: 726214 - RNA, 19 nt, Homo sapiens
  misc_RNA (1)...(19): siRNA sense strand
ugaagcccuacucaauaua

SEQ ID NO: 726215 - RNA, 19 nt, Homo sapiens
  misc_RNA (1)...(19): siRNA sense strand
caucccguguucacucaug

SEQ ID NO: 726216 - RNA, 19 nt, Homo sapiens
  misc_RNA (1)...(19): siRNA sense strand
caaagcaucccguguucac

SEQ ID NO: 726217 - RNA, 19 nt, Homo sapiens
  misc_RNA (1)...(19): siRNA sense strand
cuccaagccaggugucaua

SEQ ID NO: 726218 - RNA, 19 nt, Homo sapiens
  misc_RNA (1)...(19): siRNA sense strand
gaggaugagugacgaguuu

SEQ ID NO: 726219 - RNA, 19 nt, Homo sapiens
  misc_RNA (1)...(19): siRNA sense strand
uuuguggacuccuuuaaga

SEQ ID NO: 726220 - RNA, 19 nt, Homo sapiens
  misc_RNA (1)...(19): siRNA sense strand
ggaggaugagugacgaguu

SEQ ID NO: 726221 - RNA, 19 nt, Homo sapiens
  misc_RNA (1)...(19): siRNA sense strand
ggaugagugacgaguuugu

SEQ ID NO: 726222 - RNA, 19 nt, Homo sapiens
  misc_RNA (1)...(19): siRNA sense strand
gggcacagcaacgcagaug

SEQ ID NO: 726223 - RNA, 19 nt, Homo sapiens
  misc_RNA (1)...(19): siRNA sense strand
gaggaugagugacgaguuu

SEQ ID NO: 726224 - RNA, 19 nt, Homo sapiens
  misc_RNA (1)...(19): siRNA sense strand
uuuguggacuccuuuaaga

SEQ ID NO: 726225 - RNA, 19 nt, Homo sapiens
  misc_RNA (1)...(19): siRNA sense strand
ggaggaugagugacgaguu

SEQ ID NO: 726226 - RNA, 19 nt, Homo sapiens
  misc_RNA (1)...(19): siRNA sense strand
ggaugagugacgaguuugu

SEQ ID NO: 726227 - RNA, 19 nt, Homo sapiens
  misc_RNA (1)...(19): siRNA sense strand
gggcacagcaacgcagaug

SEQ ID NO: 726228 - RNA, 19 nt, Homo sapiens
  misc_RNA (1)...(19): siRNA sense strand
ggacagauuggacaacuau

SEQ ID NO: 726229 - RNA, 19 nt, Homo sapiens
  misc_RNA (1)...(19): siRNA sense strand
caagagaaccaagcagaaa

SEQ ID NO: 726230 - RNA, 19 nt, Homo sapiens
  misc_RNA (1)...(19): siRNA sense strand
ccaccucucucaccacguu

SEQ ID NO: 726231 - RNA, 19 nt, Homo sapiens
  misc_RNA (1)...(19): siRNA sense strand
ugacgaagcugggcuguac

SEQ ID NO: 726232 - RNA, 19 nt, Homo sapiens
  misc_RNA (1)...(19): siRNA sense strand
ccacggagaccuuccuguu

SEQ ID NO: 726233 - RNA, 19 nt, Homo sapiens
  misc_RNA (1)...(19): siRNA sense strand
cagaaacgcaugccugguu

SEQ ID NO: 726234 - RNA, 19 nt, Homo sapiens
  misc_RNA (1)...(19): siRNA sense strand
ugaaggccguggacaauac

SEQ ID NO: 726235 - RNA, 19 nt, Homo sapiens
  misc_RNA (1)...(19): siRNA sense strand
acagauuggacaacuauaa

SEQ ID NO: 726236 - RNA, 19 nt, Homo sapiens
  misc_RNA (1)...(19): siRNA sense strand
ugauugcccugcacaaagu

SEQ ID NO: 726237 - RNA, 19 nt, Homo sapiens
  misc_RNA (1)...(19): siRNA sense strand
gcaggagcagucucucuga

SEQ ID NO: 726238 - RNA, 19 nt, Homo sapiens
  misc_RNA (1)...(19): siRNA sense strand
ccaagagaaccaagcagaa

SEQ ID NO: 726239 - RNA, 19 nt, Homo sapiens
  misc_RNA (1)...(19): siRNA sense strand
ccaaggccaucacaacaac

SEQ ID NO: 726240 - RNA, 19 nt, Homo sapiens
  misc_RNA (1)...(19): siRNA sense strand
gcgugaaguuccgcaguga

SEQ ID NO: 726241 - RNA, 19 nt, Homo sapiens
  misc_RNA (1)...(19): siRNA sense strand
ugucgcggcuccugacgaa

SEQ ID NO: 726242 - RNA, 19 nt, Homo sapiens
  misc_RNA (1)...(19): siRNA sense strand
ccucauggccuccuucaag

SEQ ID NO: 726243 - RNA, 19 nt, Homo sapiens
  misc_RNA (1)...(19): siRNA sense strand
gccaaggccaucacaacaa

SEQ ID NO: 726244 - RNA, 19 nt, Homo sapiens
  misc_RNA (1)...(19): siRNA sense strand
gcaguuccacggagaccuu

SEQ ID NO: 726245 - RNA, 19 nt, Homo sapiens
  misc_RNA (1)...(19): siRNA sense strand
gcugaaggccguggacaau

SEQ ID NO: 726246 - RNA, 19 nt, Homo sapiens
  misc_RNA (1)...(19): siRNA sense strand
ugacaagcaucuucuuccu

SEQ ID NO: 726247 - RNA, 19 nt, Homo sapiens
  misc_RNA (1)...(19): siRNA sense strand
gucuucaucuugcccuuug

SEQ ID NO: 726248 - RNA, 19 nt, Homo sapiens
  misc_RNA (1)...(19): siRNA sense strand
gagcagucucucugaguca

SEQ ID NO: 726249 - RNA, 19 nt, Homo sapiens
  misc_RNA (1)...(19): siRNA sense strand
gauuggacaacuauaacga

SEQ ID NO: 726250 - RNA, 19 nt, Homo sapiens
  misc_RNA (1)...(19): siRNA sense strand
uggacagauuggacaacua

SEQ ID NO: 726251 - RNA, 19 nt, Homo sapiens
  misc_RNA (1)...(19): siRNA sense strand
ggugacaagcaucuucuuc

SEQ ID NO: 726252 - RNA, 19 nt, Homo sapiens
  misc_RNA (1)...(19): siRNA sense strand
cuccuugccuugccagaga

SEQ ID NO: 726253 - RNA, 19 nt, Homo sapiens
  misc_RNA (1)...(19): siRNA sense strand
gaaacgcaugccugguuca

SEQ ID NO: 726254 - RNA, 19 nt, Homo sapiens
  misc_RNA (1)...(19): siRNA sense strand
gugauugcccugcacaaag

SEQ ID NO: 726255 - RNA, 19 nt, Homo sapiens
  misc_RNA (1)...(19): siRNA sense strand
cccgauuccucuaccaugu

SEQ ID NO: 726256 - RNA, 19 nt, Homo sapiens
  misc_RNA (1)...(19): siRNA sense strand
caagagaaccaagcagaaa

SEQ ID NO: 726257 - RNA, 19 nt, Homo sapiens
  misc_RNA (1)...(19): siRNA sense strand
ccaccucucucaccacguu

SEQ ID NO: 726258 - RNA, 19 nt, Homo sapiens
  misc_RNA (1)...(19): siRNA sense strand
ugacgaagcugggcuguac

SEQ ID NO: 726259 - RNA, 19 nt, Homo sapiens
  misc_RNA (1)...(19): siRNA sense strand
ccacggagaccuuccuguu

SEQ ID NO: 726260 - RNA, 19 nt, Homo sapiens
  misc_RNA (1)...(19): siRNA sense strand
cagaaacgcaugccugguu

SEQ ID NO: 726261 - RNA, 19 nt, Homo sapiens
  misc_RNA (1)...(19): siRNA sense strand
ugaaggccguggacaauac

SEQ ID NO: 726262 - RNA, 19 nt, Homo sapiens
  misc_RNA (1)...(19): siRNA sense strand
ugauugcccugcacaaagu

SEQ ID NO: 726263 - RNA, 19 nt, Homo sapiens
  misc_RNA (1)...(19): siRNA sense strand
gcaggagcagucucucuga

SEQ ID NO: 726264 - RNA, 19 nt, Homo sapiens
  misc_RNA (1)...(19): siRNA sense strand
ccaagagaaccaagcagaa

SEQ ID NO: 726265 - RNA, 19 nt, Homo sapiens
  misc_RNA (1)...(19): siRNA sense strand
ccaaggccaucacaacaac

SEQ ID NO: 726266 - RNA, 19 nt, Homo sapiens
  misc_RNA (1)...(19): siRNA sense strand
gcgugaaguuccgcaguga

SEQ ID NO: 726267 - RNA, 19 nt, Homo sapiens
  misc_RNA (1)...(19): siRNA sense strand
ugucgcggcuccugacgaa

SEQ ID NO: 726268 - RNA, 19 nt, Homo sapiens
  misc_RNA (1)...(19): siRNA sense strand
gcaguuccacggagaccuu

SEQ ID NO: 726269 - RNA, 19 nt, Homo sapiens
  misc_RNA (1)...(19): siRNA sense strand
gccaaggccaucacaacaa

SEQ ID NO: 726270 - RNA, 19 nt, Homo sapiens
  misc_RNA (1)...(19): siRNA sense strand
gcugaaggccguggacaau

SEQ ID NO: 726271 - RNA, 19 nt, Homo sapiens
  misc_RNA (1)...(19): siRNA sense strand
ugacaagcaucuucuuccu

SEQ ID NO: 726272 - RNA, 19 nt, Homo sapiens
  misc_RNA (1)...(19): siRNA sense strand
gucuucaucuugcccuuug

SEQ ID NO: 726273 - RNA, 19 nt, Homo sapiens
  misc_RNA (1)...(19): siRNA sense strand
gagcagucucucugaguca

SEQ ID NO: 726274 - RNA, 19 nt, Homo sapiens
  misc_RNA (1)...(19): siRNA sense strand
ggugacaagcaucuucuuc

SEQ ID NO: 726275 - RNA, 19 nt, Homo sapiens
  misc_RNA (1)...(19): siRNA sense strand
cuccuugccuugccagaga

SEQ ID NO: 726276 - RNA, 19 nt, Homo sapiens
  misc_RNA (1)...(19): siRNA sense strand
gaaacgcaugccugguuca

SEQ ID NO: 726277 - RNA, 19 nt, Homo sapiens
  misc_RNA (1)...(19): siRNA sense strand
gugauugcccugcacaaag

SEQ ID NO: 726278 - RNA, 19 nt, Homo sapiens
  misc_RNA (1)...(19): siRNA sense strand
cccgauuccucuaccaugu

SEQ ID NO: 726279 - RNA, 19 nt, Homo sapiens
  misc_RNA (1)...(19): siRNA sense strand
gggaagaagugcccagaag

SEQ ID NO: 726280 - RNA, 19 nt, Homo sapiens
  misc_RNA (1)...(19): siRNA sense strand
gaagaagugcccagaaggu

SEQ ID NO: 726281 - RNA, 19 nt, Homo sapiens
  misc_RNA (1)...(19): siRNA sense strand
ugaccaagauuaccaacca

SEQ ID NO: 726282 - RNA, 19 nt, Homo sapiens
  misc_RNA (1)...(19): siRNA sense strand
ggagauggagcacgucuag

SEQ ID NO: 726283 - RNA, 19 nt, Homo sapiens
  misc_RNA (1)...(19): siRNA sense strand
ugagcaagaugaacaagag

SEQ ID NO: 726284 - RNA, 19 nt, Homo sapiens
  misc_RNA (1)...(19): siRNA sense strand
ccugaacgccuucgacauu

SEQ ID NO: 726285 - RNA, 19 nt, Homo sapiens
  misc_RNA (1)...(19): siRNA sense strand
ucaagcagccggugaccaa

SEQ ID NO: 726286 - RNA, 19 nt, Homo sapiens
  misc_RNA (1)...(19): siRNA sense strand
cugaggagcuggucaagac

SEQ ID NO: 726287 - RNA, 19 nt, Homo sapiens
  misc_RNA (1)...(19): siRNA sense strand
ccacagggaugucuuuuac

SEQ ID NO: 726288 - RNA, 19 nt, Homo sapiens
  misc_RNA (1)...(19): siRNA sense strand
ccauggaccugagcaccuu

SEQ ID NO: 726289 - RNA, 19 nt, Homo sapiens
  misc_RNA (1)...(19): siRNA sense strand
acagggaugucuuuuacua

SEQ ID NO: 726290 - RNA, 19 nt, Homo sapiens
  misc_RNA (1)...(19): siRNA sense strand
cagccggugaccaagauua

SEQ ID NO: 726291 - RNA, 19 nt, Homo sapiens
  misc_RNA (1)...(19): siRNA sense strand
cugaacgccuucgacauug

SEQ ID NO: 726292 - RNA, 19 nt, Homo sapiens
  misc_RNA (1)...(19): siRNA sense strand
ugaggacgacgacgaggaa

SEQ ID NO: 726293 - RNA, 19 nt, Homo sapiens
  misc_RNA (1)...(19): siRNA sense strand
ggacaucaggaagcaggaa

SEQ ID NO: 726294 - RNA, 19 nt, Homo sapiens
  misc_RNA (1)...(19): siRNA sense strand
agggaugucuuuuacuaua

SEQ ID NO: 726295 - RNA, 19 nt, Homo sapiens
  misc_RNA (1)...(19): siRNA sense strand
ccugagcaccuucgacuuc

SEQ ID NO: 726296 - RNA, 19 nt, Homo sapiens
  misc_RNA (1)...(19): siRNA sense strand
cggcguccaucuucaagca

SEQ ID NO: 726297 - RNA, 19 nt, Homo sapiens
  misc_RNA (1)...(19): siRNA sense strand
caagagcgacccgcagaag

SEQ ID NO: 726298 - RNA, 19 nt, Homo sapiens
  misc_RNA (1)...(19): siRNA sense strand
gcugggagagggaagaagu

SEQ ID NO: 726299 - RNA, 19 nt, Homo sapiens
  misc_RNA (1)...(19): siRNA sense strand
ggacgacgacgaggaagac

SEQ ID NO: 726300 - RNA, 19 nt, Homo sapiens
  misc_RNA (1)...(19): siRNA sense strand
gcacgggcaagaugcugau

SEQ ID NO: 726301 - RNA, 19 nt, Homo sapiens
  misc_RNA (1)...(19): siRNA sense strand
caacaaagaccgcuacauc

SEQ ID NO: 726302 - RNA, 19 nt, Homo sapiens
  misc_RNA (1)...(19): siRNA sense strand
ugaaggagauguggacuga

SEQ ID NO: 726303 - RNA, 19 nt, Homo sapiens
  misc_RNA (1)...(19): siRNA sense strand
ucaacaagcccaagaguga

SEQ ID NO: 726304 - RNA, 19 nt, Homo sapiens
  misc_RNA (1)...(19): siRNA sense strand
caagaacaauacccaagug

SEQ ID NO: 726305 - RNA, 19 nt, Homo sapiens
  misc_RNA (1)...(19): siRNA sense strand
ccaagccagucaacaaaga

SEQ ID NO: 726306 - RNA, 19 nt, Homo sapiens
  misc_RNA (1)...(19): siRNA sense strand
uaacaccgguccacucucu

SEQ ID NO: 726307 - RNA, 19 nt, Homo sapiens
  misc_RNA (1)...(19): siRNA sense strand
ggagauguggacugaggua

SEQ ID NO: 726308 - RNA, 19 nt, Homo sapiens
  misc_RNA (1)...(19): siRNA sense strand
cacagucagucaagaacaa

SEQ ID NO: 726309 - RNA, 19 nt, Homo sapiens
  misc_RNA (1)...(19): siRNA sense strand
ucacacagucagucaagaa

SEQ ID NO: 726310 - RNA, 19 nt, Homo sapiens
  misc_RNA (1)...(19): siRNA sense strand
cccaagugcucaucaacug

SEQ ID NO: 726311 - RNA, 19 nt, Homo sapiens
  misc_RNA (1)...(19): siRNA sense strand
gcaagggcaagaagaaguc

SEQ ID NO: 726312 - RNA, 19 nt, Homo sapiens
  misc_RNA (1)...(19): siRNA sense strand
uggagaacgugaaggagau

SEQ ID NO: 726313 - RNA, 19 nt, Homo sapiens
  misc_RNA (1)...(19): siRNA sense strand
guccaagccagucaacaaa

SEQ ID NO: 726314 - RNA, 19 nt, Homo sapiens
  misc_RNA (1)...(19): siRNA sense strand
ucaagaacaauacccaagu

SEQ ID NO: 726315 - RNA, 19 nt, Homo sapiens
  misc_RNA (1)...(19): siRNA sense strand
acaaagaccgcuacaucuc

SEQ ID NO: 726316 - RNA, 19 nt, Homo sapiens
  misc_RNA (1)...(19): siRNA sense strand
gcucacacagucagucaag

SEQ ID NO: 726317 - RNA, 19 nt, Homo sapiens
  misc_RNA (1)...(19): siRNA sense strand
guggcaagggcaagaagaa

SEQ ID NO: 726318 - RNA, 19 nt, Homo sapiens
  misc_RNA (1)...(19): siRNA sense strand
ggcaagggcaagaagaagu

SEQ ID NO: 726319 - RNA, 19 nt, Homo sapiens
  misc_RNA (1)...(19): siRNA sense strand
caacaaagaccgcuacauc

SEQ ID NO: 726320 - RNA, 19 nt, Homo sapiens
  misc_RNA (1)...(19): siRNA sense strand
ugaaggagauguggacuga

SEQ ID NO: 726321 - RNA, 19 nt, Homo sapiens
  misc_RNA (1)...(19): siRNA sense strand
ucaacaagcccaagaguga

SEQ ID NO: 726322 - RNA, 19 nt, Homo sapiens
  misc_RNA (1)...(19): siRNA sense strand
caagaacaauacccaagug

SEQ ID NO: 726323 - RNA, 19 nt, Homo sapiens
  misc_RNA (1)...(19): siRNA sense strand
ccaagccagucaacaaaga

SEQ ID NO: 726324 - RNA, 19 nt, Homo sapiens
  misc_RNA (1)...(19): siRNA sense strand
uaacaccgguccacucucu

SEQ ID NO: 726325 - RNA, 19 nt, Homo sapiens
  misc_RNA (1)...(19): siRNA sense strand
ggagauguggacugaggua

SEQ ID NO: 726326 - RNA, 19 nt, Homo sapiens
  misc_RNA (1)...(19): siRNA sense strand
cacagucagucaagaacaa

SEQ ID NO: 726327 - RNA, 19 nt, Homo sapiens
  misc_RNA (1)...(19): siRNA sense strand
ucacacagucagucaagaa

SEQ ID NO: 726328 - RNA, 19 nt, Homo sapiens
  misc_RNA (1)...(19): siRNA sense strand
cccaagugcucaucaacug

SEQ ID NO: 726329 - RNA, 19 nt, Homo sapiens
  misc_RNA (1)...(19): siRNA sense strand
gcaagggcaagaagaaguc

SEQ ID NO: 726330 - RNA, 19 nt, Homo sapiens
  misc_RNA (1)...(19): siRNA sense strand
uggagaacgugaaggagau

SEQ ID NO: 726331 - RNA, 19 nt, Homo sapiens
  misc_RNA (1)...(19): siRNA sense strand
guccaagccagucaacaaa

SEQ ID NO: 726332 - RNA, 19 nt, Homo sapiens
  misc_RNA (1)...(19): siRNA sense strand
ucaagaacaauacccaagu

SEQ ID NO: 726333 - RNA, 19 nt, Homo sapiens
  misc_RNA (1)...(19): siRNA sense strand
acaaagaccgcuacaucuc

SEQ ID NO: 726334 - RNA, 19 nt, Homo sapiens
  misc_RNA (1)...(19): siRNA sense strand
gcucacacagucagucaag

SEQ ID NO: 726335 - RNA, 19 nt, Homo sapiens
  misc_RNA (1)...(19): siRNA sense strand
guggcaagggcaagaagaa

SEQ ID NO: 726336 - RNA, 19 nt, Homo sapiens
  misc_RNA (1)...(19): siRNA sense strand
ggcaagggcaagaagaagu

SEQ ID NO: 726337 - RNA, 19 nt, Homo sapiens
  misc_RNA (1)...(19): siRNA sense strand
caggaaagcuuuaagaaua

SEQ ID NO: 726338 - RNA, 19 nt, Homo sapiens
  misc_RNA (1)...(19): siRNA sense strand
gcaaugagcuucuugaauc

SEQ ID NO: 726339 - RNA, 19 nt, Homo sapiens
  misc_RNA (1)...(19): siRNA sense strand
gcuaagagcucaacaggaa

SEQ ID NO: 726340 - RNA, 19 nt, Homo sapiens
  misc_RNA (1)...(19): siRNA sense strand
aaacauguaugcccaaaua

SEQ ID NO: 726341 - RNA, 19 nt, Homo sapiens
  misc_RNA (1)...(19): siRNA sense strand
gaaaucaauugcaaaggua

SEQ ID NO: 726342 - RNA, 19 nt, Homo sapiens
  misc_RNA (1)...(19): siRNA sense strand
gcacaaggcucuggaagaa

SEQ ID NO: 726343 - RNA, 19 nt, Homo sapiens
  misc_RNA (1)...(19): siRNA sense strand
gcacugaccucaauacugu

SEQ ID NO: 726344 - RNA, 19 nt, Homo sapiens
  misc_RNA (1)...(19): siRNA sense strand
gaauguagaucaagcuauu

SEQ ID NO: 726345 - RNA, 19 nt, Homo sapiens
  misc_RNA (1)...(19): siRNA sense strand
gaacugauguuaaagaaag

SEQ ID NO: 726346 - RNA, 19 nt, Homo sapiens
  misc_RNA (1)...(19): siRNA sense strand
gaacacaaaccucauauug

SEQ ID NO: 726347 - RNA, 19 nt, Homo sapiens
  misc_RNA (1)...(19): siRNA sense strand
caaaggaacuggcagagaa

SEQ ID NO: 726348 - RNA, 19 nt, Homo sapiens
  misc_RNA (1)...(19): siRNA sense strand
gaauagugcugcugacauu

SEQ ID NO: 726349 - RNA, 19 nt, Homo sapiens
  misc_RNA (1)...(19): siRNA sense strand
caacaaagcuggcaaugag

SEQ ID NO: 726350 - RNA, 19 nt, Homo sapiens
  misc_RNA (1)...(19): siRNA sense strand
gaaaguagauggacugaac

SEQ ID NO: 726351 - RNA, 19 nt, Homo sapiens
  misc_RNA (1)...(19): siRNA sense strand
ggaagagacuuauaaucaa

SEQ ID NO: 726352 - RNA, 19 nt, Homo sapiens
  misc_RNA (1)...(19): siRNA sense strand
gcaagcagccuguguauga

SEQ ID NO: 726353 - RNA, 19 nt, Homo sapiens
  misc_RNA (1)...(19): siRNA sense strand
caaaggcuaugcugaauga

SEQ ID NO: 726354 - RNA, 19 nt, Homo sapiens
  misc_RNA (1)...(19): siRNA sense strand
caaagaaccaucagaaauu

SEQ ID NO: 726355 - RNA, 19 nt, Homo sapiens
  misc_RNA (1)...(19): siRNA sense strand
gaaagaagaauguagauca

SEQ ID NO: 726356 - RNA, 19 nt, Homo sapiens
  misc_RNA (1)...(19): siRNA sense strand
gaagcagagugucgacaua

SEQ ID NO: 726357 - RNA, 19 nt, Homo sapiens
  misc_RNA (1)...(19): siRNA sense strand
gaacauugaccgaguuaaa

SEQ ID NO: 726358 - RNA, 19 nt, Homo sapiens
  misc_RNA (1)...(19): siRNA sense strand
gaagacaguuaaagagaga

SEQ ID NO: 726359 - RNA, 19 nt, Homo sapiens
  misc_RNA (1)...(19): siRNA sense strand
ccacacagauuacagaguu

SEQ ID NO: 726360 - RNA, 19 nt, Homo sapiens
  misc_RNA (1)...(19): siRNA sense strand
gagaagggcuggauaaacu

SEQ ID NO: 726361 - RNA, 19 nt, Homo sapiens
  misc_RNA (1)...(19): siRNA sense strand
ggaccugguuggaugauaa

SEQ ID NO: 726362 - RNA, 19 nt, Homo sapiens
  misc_RNA (1)...(19): siRNA sense strand
gcaguaagauggaagaaag

SEQ ID NO: 726363 - RNA, 19 nt, Homo sapiens
  misc_RNA (1)...(19): siRNA sense strand
aaaaguagcucgugacaua

SEQ ID NO: 726364 - RNA, 19 nt, Homo sapiens
  misc_RNA (1)...(19): siRNA sense strand
gaacaaacaguguggcaaa

SEQ ID NO: 726365 - RNA, 19 nt, Homo sapiens
  misc_RNA (1)...(19): siRNA sense strand
gaaaucagccagaucaaga

SEQ ID NO: 726366 - RNA, 19 nt, Homo sapiens
  misc_RNA (1)...(19): siRNA sense strand
agaaagagcuggagaacau

SEQ ID NO: 726367 - RNA, 19 nt, Homo sapiens
  misc_RNA (1)...(19): siRNA sense strand
gaagauagucagaaacuug

SEQ ID NO: 726368 - RNA, 19 nt, Homo sapiens
  misc_RNA (1)...(19): siRNA sense strand
gggaacagcuugauacaca

SEQ ID NO: 726369 - RNA, 19 nt, Homo sapiens
  misc_RNA (1)...(19): siRNA sense strand
gaagagcauugaugagaug

SEQ ID NO: 726370 - RNA, 19 nt, Homo sapiens
  misc_RNA (1)...(19): siRNA sense strand
ugacggagauccaguguga

SEQ ID NO: 726371 - RNA, 19 nt, Homo sapiens
  misc_RNA (1)...(19): siRNA sense strand
gcaaagaaccaucagaaau

SEQ ID NO: 726372 - RNA, 19 nt, Homo sapiens
  misc_RNA (1)...(19): siRNA sense strand
gcucauagccaaucagaaa

SEQ ID NO: 726373 - RNA, 19 nt, Homo sapiens
  misc_RNA (1)...(19): siRNA sense strand
ggacucagaacuagagaua

SEQ ID NO: 726374 - RNA, 19 nt, Homo sapiens
  misc_RNA (1)...(19): siRNA sense strand
ccacaggcauguucaagaa

SEQ ID NO: 726375 - RNA, 19 nt, Homo sapiens
  misc_RNA (1)...(19): siRNA sense strand
gauaacacgucaggaguuu

SEQ ID NO: 726376 - RNA, 19 nt, Homo sapiens
  misc_RNA (1)...(19): siRNA sense strand
gccgagagcugauugagaa

SEQ ID NO: 726377 - RNA, 19 nt, Homo sapiens
  misc_RNA (1)...(19): siRNA sense strand
ccaccaagccugauucuaa

SEQ ID NO: 726378 - RNA, 19 nt, Homo sapiens
  misc_RNA (1)...(19): siRNA sense strand
gauagaagauuguaaagcu

SEQ ID NO: 726379 - RNA, 19 nt, Homo sapiens
  misc_RNA (1)...(19): siRNA sense strand
ggaccaggaugggaagaua

SEQ ID NO: 726380 - RNA, 19 nt, Homo sapiens
  misc_RNA (1)...(19): siRNA sense strand
gaucaaugcucgauggaau

SEQ ID NO: 726381 - RNA, 19 nt, Homo sapiens
  misc_RNA (1)...(19): siRNA sense strand
caaaggagacuugagauuu

SEQ ID NO: 726382 - RNA, 19 nt, Homo sapiens
  misc_RNA (1)...(19): siRNA sense strand
acacaaagauucaauggau

SEQ ID NO: 726383 - RNA, 19 nt, Homo sapiens
  misc_RNA (1)...(19): siRNA sense strand
ccaccuggcuuuaaaugaa

SEQ ID NO: 726384 - RNA, 19 nt, Homo sapiens
  misc_RNA (1)...(19): siRNA sense strand
ggaagagaccagugaaauu

SEQ ID NO: 726385 - RNA, 19 nt, Homo sapiens
  misc_RNA (1)...(19): siRNA sense strand
guacauccaugccaucuuc

SEQ ID NO: 726386 - RNA, 19 nt, Homo sapiens
  misc_RNA (1)...(19): siRNA sense strand
gaacuuagagagaaauuca

SEQ ID NO: 726387 - RNA, 19 nt, Homo sapiens
  misc_RNA (1)...(19): siRNA sense strand
ugucagaacugguggcuaa

SEQ ID NO: 726388 - RNA, 19 nt, Homo sapiens
  misc_RNA (1)...(19): siRNA sense strand
cagaaaugguugaaagaaa

SEQ ID NO: 726389 - RNA, 19 nt, Homo sapiens
  misc_RNA (1)...(19): siRNA sense strand
ggaggaagcccugcucuuu

SEQ ID NO: 726390 - RNA, 19 nt, Homo sapiens
  misc_RNA (1)...(19): siRNA sense strand
gacaaaggguggaugaaau

SEQ ID NO: 726391 - RNA, 19 nt, Homo sapiens
  misc_RNA (1)...(19): siRNA sense strand
gaagagaccagugaaauuc

SEQ ID NO: 726392 - RNA, 19 nt, Homo sapiens
  misc_RNA (1)...(19): siRNA sense strand
aaaggagacuugagauuug

SEQ ID NO: 726393 - RNA, 19 nt, Homo sapiens
  misc_RNA (1)...(19): siRNA sense strand
gagcagaucggagagaaua

SEQ ID NO: 726394 - RNA, 19 nt, Homo sapiens
  misc_RNA (1)...(19): siRNA sense strand
ugaaagaauuugccaacuu

SEQ ID NO: 726395 - RNA, 19 nt, Homo sapiens
  misc_RNA (1)...(19): siRNA sense strand
ggacagagacauuauacga

SEQ ID NO: 726396 - RNA, 19 nt, Homo sapiens
  misc_RNA (1)...(19): siRNA sense strand
ggaauuaaacccugaggaa

SEQ ID NO: 726397 - RNA, 19 nt, Homo sapiens
  misc_RNA (1)...(19): siRNA sense strand
gaucaaaggcuaugcugaa

SEQ ID NO: 726398 - RNA, 19 nt, Homo sapiens
  misc_RNA (1)...(19): siRNA sense strand
caagacagguuccauacug

SEQ ID NO: 726399 - RNA, 19 nt, Homo sapiens
  misc_RNA (1)...(19): siRNA sense strand
gaacucugguggaagaaau

SEQ ID NO: 726400 - RNA, 19 nt, Homo sapiens
  misc_RNA (1)...(19): siRNA sense strand
uaaagaaagcuacugauga

SEQ ID NO: 726401 - RNA, 19 nt, Homo sapiens
  misc_RNA (1)...(19): siRNA sense strand
acaaggaucuggcugcaaa

SEQ ID NO: 726402 - RNA, 19 nt, Homo sapiens
  misc_RNA (1)...(19): siRNA sense strand
cagcugagccuauuucuga

SEQ ID NO: 726403 - RNA, 19 nt, Homo sapiens
  misc_RNA (1)...(19): siRNA sense strand
uggcagaccuggaugauga

SEQ ID NO: 726404 - RNA, 19 nt, Homo sapiens
  misc_RNA (1)...(19): siRNA sense strand
caacagaugcugcaacaga

SEQ ID NO: 726405 - RNA, 19 nt, Homo sapiens
  misc_RNA (1)...(19): siRNA sense strand
cauaaggaauucaugaaga

SEQ ID NO: 726406 - RNA, 19 nt, Homo sapiens
  misc_RNA (1)...(19): siRNA sense strand
ccaaggaagagacuuauaa

SEQ ID NO: 726407 - RNA, 19 nt, Homo sapiens
  misc_RNA (1)...(19): siRNA sense strand
gaacagcuugauacacaua

SEQ ID NO: 726408 - RNA, 19 nt, Homo sapiens
  misc_RNA (1)...(19): siRNA sense strand
gcauugaugagaugaauaa

SEQ ID NO: 726409 - RNA, 19 nt, Homo sapiens
  misc_RNA (1)...(19): siRNA sense strand
ggaagagcauugaugagau

SEQ ID NO: 726410 - RNA, 19 nt, Homo sapiens
  misc_RNA (1)...(19): siRNA sense strand
aaagauaggcccacaacua

SEQ ID NO: 726411 - RNA, 19 nt, Homo sapiens
  misc_RNA (1)...(19): siRNA sense strand
ggacaaaggguggaugaaa

SEQ ID NO: 726412 - RNA, 19 nt, Homo sapiens
  misc_RNA (1)...(19): siRNA sense strand
ccucagaacuuuagagcaa

SEQ ID NO: 726413 - RNA, 19 nt, Homo sapiens
  misc_RNA (1)...(19): siRNA sense strand
ggaaagggccacugagguu

SEQ ID NO: 726414 - RNA, 19 nt, Homo sapiens
  misc_RNA (1)...(19): siRNA sense strand
gaaccuagauacucuugag

SEQ ID NO: 726415 - RNA, 19 nt, Homo sapiens
  misc_RNA (1)...(19): siRNA sense strand
ucacugaacugagcucuug

SEQ ID NO: 726416 - RNA, 19 nt, Homo sapiens
  misc_RNA (1)...(19): siRNA sense strand
gaaagagggcgaucacuag

SEQ ID NO: 726417 - RNA, 19 nt, Homo sapiens
  misc_RNA (1)...(19): siRNA sense strand
gccauuagccuacucaauu

SEQ ID NO: 726418 - RNA, 19 nt, Homo sapiens
  misc_RNA (1)...(19): siRNA sense strand
gcagagacagaaggaauua

SEQ ID NO: 726419 - RNA, 19 nt, Homo sapiens
  misc_RNA (1)...(19): siRNA sense strand
ccaaggcccucagaacuuu

SEQ ID NO: 726420 - RNA, 19 nt, Homo sapiens
  misc_RNA (1)...(19): siRNA sense strand
gaaaaggacucuacaaaac

SEQ ID NO: 726421 - RNA, 19 nt, Homo sapiens
  misc_RNA (1)...(19): siRNA sense strand
gaaagggccacugagguua

SEQ ID NO: 726422 - RNA, 19 nt, Homo sapiens
  misc_RNA (1)...(19): siRNA sense strand
gaaggcccgucaccaagaa

SEQ ID NO: 726423 - RNA, 19 nt, Homo sapiens
  misc_RNA (1)...(19): siRNA sense strand
ggagaugacucgcaaacag

SEQ ID NO: 726424 - RNA, 19 nt, Homo sapiens
  misc_RNA (1)...(19): siRNA sense strand
gcagaacauugaccgaguu

SEQ ID NO: 726425 - RNA, 19 nt, Homo sapiens
  misc_RNA (1)...(19): siRNA sense strand
gcagagcacugaaagaaaa

SEQ ID NO: 726426 - RNA, 19 nt, Homo sapiens
  misc_RNA (1)...(19): siRNA sense strand
gcuagaagaugcagagagu

SEQ ID NO: 726427 - RNA, 19 nt, Homo sapiens
  misc_RNA (1)...(19): siRNA sense strand
gaagagacuuauaaucaac

SEQ ID NO: 726428 - RNA, 19 nt, Homo sapiens
  misc_RNA (1)...(19): siRNA sense strand
gcaauuaagggaaucuauu

SEQ ID NO: 726429 - RNA, 19 nt, Homo sapiens
  misc_RNA (1)...(19): siRNA sense strand
gaggaaaugaggcaauuaa

SEQ ID NO: 726430 - RNA, 19 nt, Homo sapiens
  misc_RNA (1)...(19): siRNA sense strand
ugaaauugaugcugcuauu

SEQ ID NO: 726431 - RNA, 19 nt, Homo sapiens
  misc_RNA (1)...(19): siRNA sense strand
gccuauuucugacuucuua

SEQ ID NO: 726432 - RNA, 19 nt, Homo sapiens
  misc_RNA (1)...(19): siRNA sense strand
acaaagaauugcacagcua

SEQ ID NO: 726433 - RNA, 19 nt, Homo sapiens
  misc_RNA (1)...(19): siRNA sense strand
gaucugacuuggagcaguu

SEQ ID NO: 726434 - RNA, 19 nt, Homo sapiens
  misc_RNA (1)...(19): siRNA sense strand
ggcauugguugacugguua

SEQ ID NO: 726435 - RNA, 19 nt, Homo sapiens
  misc_RNA (1)...(19): siRNA sense strand
caacaaccgaugcagauaa

SEQ ID NO: 726436 - RNA, 19 nt, Homo sapiens
  misc_RNA (1)...(19): siRNA sense strand
caaaggaaacugaaugaug

SEQ ID NO: 726437 - RNA, 19 nt, Homo sapiens
  misc_RNA (1)...(19): siRNA sense strand
caggaaagcuuuaagaaua

SEQ ID NO: 726438 - RNA, 19 nt, Homo sapiens
  misc_RNA (1)...(19): siRNA sense strand
gcaaugagcuucuugaauc

SEQ ID NO: 726439 - RNA, 19 nt, Homo sapiens
  misc_RNA (1)...(19): siRNA sense strand
gcuaagagcucaacaggaa

SEQ ID NO: 726440 - RNA, 19 nt, Homo sapiens
  misc_RNA (1)...(19): siRNA sense strand
aaacauguaugcccaaaua

SEQ ID NO: 726441 - RNA, 19 nt, Homo sapiens
  misc_RNA (1)...(19): siRNA sense strand
gaaaucaauugcaaaggua

SEQ ID NO: 726442 - RNA, 19 nt, Homo sapiens
  misc_RNA (1)...(19): siRNA sense strand
gcacaaggcucuggaagaa

SEQ ID NO: 726443 - RNA, 19 nt, Homo sapiens
  misc_RNA (1)...(19): siRNA sense strand
gcacugaccucaauacugu

SEQ ID NO: 726444 - RNA, 19 nt, Homo sapiens
  misc_RNA (1)...(19): siRNA sense strand
gaauguagaucaagcuauu

SEQ ID NO: 726445 - RNA, 19 nt, Homo sapiens
  misc_RNA (1)...(19): siRNA sense strand
gaacugauguuaaagaaag

SEQ ID NO: 726446 - RNA, 19 nt, Homo sapiens
  misc_RNA (1)...(19): siRNA sense strand
gaacacaaaccucauauug

SEQ ID NO: 726447 - RNA, 19 nt, Homo sapiens
  misc_RNA (1)...(19): siRNA sense strand
caaaggaacuggcagagaa

SEQ ID NO: 726448 - RNA, 19 nt, Homo sapiens
  misc_RNA (1)...(19): siRNA sense strand
gaauagugcugcugacauu

SEQ ID NO: 726449 - RNA, 19 nt, Homo sapiens
  misc_RNA (1)...(19): siRNA sense strand
caacaaagcuggcaaugag

SEQ ID NO: 726450 - RNA, 19 nt, Homo sapiens
  misc_RNA (1)...(19): siRNA sense strand
gaaaguagauggacugaac

SEQ ID NO: 726451 - RNA, 19 nt, Homo sapiens
  misc_RNA (1)...(19): siRNA sense strand
ggaagagacuuauaaucaa

SEQ ID NO: 726452 - RNA, 19 nt, Homo sapiens
  misc_RNA (1)...(19): siRNA sense strand
gcaagcagccuguguauga

SEQ ID NO: 726453 - RNA, 19 nt, Homo sapiens
  misc_RNA (1)...(19): siRNA sense strand
caaaggcuaugcugaauga

SEQ ID NO: 726454 - RNA, 19 nt, Homo sapiens
  misc_RNA (1)...(19): siRNA sense strand
caaagaaccaucagaaauu

SEQ ID NO: 726455 - RNA, 19 nt, Homo sapiens
  misc_RNA (1)...(19): siRNA sense strand
gaaagaagaauguagauca

SEQ ID NO: 726456 - RNA, 19 nt, Homo sapiens
  misc_RNA (1)...(19): siRNA sense strand
gaagcagagugucgacaua

SEQ ID NO: 726457 - RNA, 19 nt, Homo sapiens
  misc_RNA (1)...(19): siRNA sense strand
gaacauugaccgaguuaaa

SEQ ID NO: 726458 - RNA, 19 nt, Homo sapiens
  misc_RNA (1)...(19): siRNA sense strand
gaagacaguuaaagagaga

SEQ ID NO: 726459 - RNA, 19 nt, Homo sapiens
  misc_RNA (1)...(19): siRNA sense strand
ccacacagauuacagaguu

SEQ ID NO: 726460 - RNA, 19 nt, Homo sapiens
  misc_RNA (1)...(19): siRNA sense strand
gagaagggcuggauaaacu

SEQ ID NO: 726461 - RNA, 19 nt, Homo sapiens
  misc_RNA (1)...(19): siRNA sense strand
ggaccugguuggaugauaa

SEQ ID NO: 726462 - RNA, 19 nt, Homo sapiens
  misc_RNA (1)...(19): siRNA sense strand
gcaguaagauggaagaaag

SEQ ID NO: 726463 - RNA, 19 nt, Homo sapiens
  misc_RNA (1)...(19): siRNA sense strand
aaaaguagcucgugacaua

SEQ ID NO: 726464 - RNA, 19 nt, Homo sapiens
  misc_RNA (1)...(19): siRNA sense strand
gaacaaacaguguggcaaa

SEQ ID NO: 726465 - RNA, 19 nt, Homo sapiens
  misc_RNA (1)...(19): siRNA sense strand
gaaaucagccagaucaaga

SEQ ID NO: 726466 - RNA, 19 nt, Homo sapiens
  misc_RNA (1)...(19): siRNA sense strand
agaaagagcuggagaacau

SEQ ID NO: 726467 - RNA, 19 nt, Homo sapiens
  misc_RNA (1)...(19): siRNA sense strand
gaagauagucagaaacuug

SEQ ID NO: 726468 - RNA, 19 nt, Homo sapiens
  misc_RNA (1)...(19): siRNA sense strand
gggaacagcuugauacaca

SEQ ID NO: 726469 - RNA, 19 nt, Homo sapiens
  misc_RNA (1)...(19): siRNA sense strand
gaagagcauugaugagaug

SEQ ID NO: 726470 - RNA, 19 nt, Homo sapiens
  misc_RNA (1)...(19): siRNA sense strand
ugacggagauccaguguga

SEQ ID NO: 726471 - RNA, 19 nt, Homo sapiens
  misc_RNA (1)...(19): siRNA sense strand
gcaaagaaccaucagaaau

SEQ ID NO: 726472 - RNA, 19 nt, Homo sapiens
  misc_RNA (1)...(19): siRNA sense strand
gcucauagccaaucagaaa

SEQ ID NO: 726473 - RNA, 19 nt, Homo sapiens
  misc_RNA (1)...(19): siRNA sense strand
ggacucagaacuagagaua

SEQ ID NO: 726474 - RNA, 19 nt, Homo sapiens
  misc_RNA (1)...(19): siRNA sense strand
ccacaggcauguucaagaa

SEQ ID NO: 726475 - RNA, 19 nt, Homo sapiens
  misc_RNA (1)...(19): siRNA sense strand
gauaacacgucaggaguuu

SEQ ID NO: 726476 - RNA, 19 nt, Homo sapiens
  misc_RNA (1)...(19): siRNA sense strand
gccgagagcugauugagaa

SEQ ID NO: 726477 - RNA, 19 nt, Homo sapiens
  misc_RNA (1)...(19): siRNA sense strand
ccaccaagccugauucuaa

SEQ ID NO: 726478 - RNA, 19 nt, Homo sapiens
  misc_RNA (1)...(19): siRNA sense strand
gauagaagauuguaaagcu

SEQ ID NO: 726479 - RNA, 19 nt, Homo sapiens
  misc_RNA (1)...(19): siRNA sense strand
ggaccaggaugggaagaua

SEQ ID NO: 726480 - RNA, 19 nt, Homo sapiens
  misc_RNA (1)...(19): siRNA sense strand
gaucaaugcucgauggaau

SEQ ID NO: 726481 - RNA, 19 nt, Homo sapiens
  misc_RNA (1)...(19): siRNA sense strand
caaaggagacuugagauuu

SEQ ID NO: 726482 - RNA, 19 nt, Homo sapiens
  misc_RNA (1)...(19): siRNA sense strand
acacaaagauucaauggau

SEQ ID NO: 726483 - RNA, 19 nt, Homo sapiens
  misc_RNA (1)...(19): siRNA sense strand
ccaccuggcuuuaaaugaa

SEQ ID NO: 726484 - RNA, 19 nt, Homo sapiens
  misc_RNA (1)...(19): siRNA sense strand
ggaagagaccagugaaauu

SEQ ID NO: 726485 - RNA, 19 nt, Homo sapiens
  misc_RNA (1)...(19): siRNA sense strand
guacauccaugccaucuuc

SEQ ID NO: 726486 - RNA, 19 nt, Homo sapiens
  misc_RNA (1)...(19): siRNA sense strand
gaacuuagagagaaauuca

SEQ ID NO: 726487 - RNA, 19 nt, Homo sapiens
  misc_RNA (1)...(19): siRNA sense strand
ugucagaacugguggcuaa

SEQ ID NO: 726488 - RNA, 19 nt, Homo sapiens
  misc_RNA (1)...(19): siRNA sense strand
cagaaaugguugaaagaaa

SEQ ID NO: 726489 - RNA, 19 nt, Homo sapiens
  misc_RNA (1)...(19): siRNA sense strand
ggaggaagcccugcucuuu

SEQ ID NO: 726490 - RNA, 19 nt, Homo sapiens
  misc_RNA (1)...(19): siRNA sense strand
gacaaaggguggaugaaau

SEQ ID NO: 726491 - RNA, 19 nt, Homo sapiens
  misc_RNA (1)...(19): siRNA sense strand
gaagagaccagugaaauuc

SEQ ID NO: 726492 - RNA, 19 nt, Homo sapiens
  misc_RNA (1)...(19): siRNA sense strand
aaaggagacuugagauuug

SEQ ID NO: 726493 - RNA, 19 nt, Homo sapiens
  misc_RNA (1)...(19): siRNA sense strand
gagcagaucggagagaaua

SEQ ID NO: 726494 - RNA, 19 nt, Homo sapiens
  misc_RNA (1)...(19): siRNA sense strand
ugaaagaauuugccaacuu

SEQ ID NO: 726495 - RNA, 19 nt, Homo sapiens
  misc_RNA (1)...(19): siRNA sense strand
ggacagagacauuauacga

SEQ ID NO: 726496 - RNA, 19 nt, Homo sapiens
  misc_RNA (1)...(19): siRNA sense strand
ggaauuaaacccugaggaa

SEQ ID NO: 726497 - RNA, 19 nt, Homo sapiens
  misc_RNA (1)...(19): siRNA sense strand
gaucaaaggcuaugcugaa

SEQ ID NO: 726498 - RNA, 19 nt, Homo sapiens
  misc_RNA (1)...(19): siRNA sense strand
caagacagguuccauacug

SEQ ID NO: 726499 - RNA, 19 nt, Homo sapiens
  misc_RNA (1)...(19): siRNA sense strand
gaacucugguggaagaaau

SEQ ID NO: 726500 - RNA, 19 nt, Homo sapiens
  misc_RNA (1)...(19): siRNA sense strand
uaaagaaagcuacugauga

SEQ ID NO: 726501 - RNA, 19 nt, Homo sapiens
  misc_RNA (1)...(19): siRNA sense strand
acaaggaucuggcugcaaa

SEQ ID NO: 726502 - RNA, 19 nt, Homo sapiens
  misc_RNA (1)...(19): siRNA sense strand
cagcugagccuauuucuga

SEQ ID NO: 726503 - RNA, 19 nt, Homo sapiens
  misc_RNA (1)...(19): siRNA sense strand
uggcagaccuggaugauga

SEQ ID NO: 726504 - RNA, 19 nt, Homo sapiens
  misc_RNA (1)...(19): siRNA sense strand
caacagaugcugcaacaga

SEQ ID NO: 726505 - RNA, 19 nt, Homo sapiens
  misc_RNA (1)...(19): siRNA sense strand
cauaaggaauucaugaaga

SEQ ID NO: 726506 - RNA, 19 nt, Homo sapiens
  misc_RNA (1)...(19): siRNA sense strand
ccaaggaagagacuuauaa

SEQ ID NO: 726507 - RNA, 19 nt, Homo sapiens
  misc_RNA (1)...(19): siRNA sense strand
gaacagcuugauacacaua

SEQ ID NO: 726508 - RNA, 19 nt, Homo sapiens
  misc_RNA (1)...(19): siRNA sense strand
gcauugaugagaugaauaa

SEQ ID NO: 726509 - RNA, 19 nt, Homo sapiens
  misc_RNA (1)...(19): siRNA sense strand
ggaagagcauugaugagau

SEQ ID NO: 726510 - RNA, 19 nt, Homo sapiens
  misc_RNA (1)...(19): siRNA sense strand
aaagauaggcccacaacua

SEQ ID NO: 726511 - RNA, 19 nt, Homo sapiens
  misc_RNA (1)...(19): siRNA sense strand
ggacaaaggguggaugaaa

SEQ ID NO: 726512 - RNA, 19 nt, Homo sapiens
  misc_RNA (1)...(19): siRNA sense strand
ccucagaacuuuagagcaa

SEQ ID NO: 726513 - RNA, 19 nt, Homo sapiens
  misc_RNA (1)...(19): siRNA sense strand
ggaaagggccacugagguu

SEQ ID NO: 726514 - RNA, 19 nt, Homo sapiens
  misc_RNA (1)...(19): siRNA sense strand
gaaccuagauacucuugag

SEQ ID NO: 726515 - RNA, 19 nt, Homo sapiens
  misc_RNA (1)...(19): siRNA sense strand
ucacugaacugagcucuug

SEQ ID NO: 726516 - RNA, 19 nt, Homo sapiens
  misc_RNA (1)...(19): siRNA sense strand
gaaagagggcgaucacuag

SEQ ID NO: 726517 - RNA, 19 nt, Homo sapiens
  misc_RNA (1)...(19): siRNA sense strand
gccauuagccuacucaauu

SEQ ID NO: 726518 - RNA, 19 nt, Homo sapiens
  misc_RNA (1)...(19): siRNA sense strand
gcagagacagaaggaauua

SEQ ID NO: 726519 - RNA, 19 nt, Homo sapiens
  misc_RNA (1)...(19): siRNA sense strand
ccaaggcccucagaacuuu

SEQ ID NO: 726520 - RNA, 19 nt, Homo sapiens
  misc_RNA (1)...(19): siRNA sense strand
gaaaaggacucuacaaaac

SEQ ID NO: 726521 - RNA, 19 nt, Homo sapiens
  misc_RNA (1)...(19): siRNA sense strand
gaaagggccacugagguua

SEQ ID NO: 726522 - RNA, 19 nt, Homo sapiens
  misc_RNA (1)...(19): siRNA sense strand
gaaggcccgucaccaagaa

SEQ ID NO: 726523 - RNA, 19 nt, Homo sapiens
  misc_RNA (1)...(19): siRNA sense strand
ggagaugacucgcaaacag

SEQ ID NO: 726524 - RNA, 19 nt, Homo sapiens
  misc_RNA (1)...(19): siRNA sense strand
gcagaacauugaccgaguu

SEQ ID NO: 726525 - RNA, 19 nt, Homo sapiens
  misc_RNA (1)...(19): siRNA sense strand
gcagagcacugaaagaaaa

SEQ ID NO: 726526 - RNA, 19 nt, Homo sapiens
  misc_RNA (1)...(19): siRNA sense strand
gcuagaagaugcagagagu

SEQ ID NO: 726527 - RNA, 19 nt, Homo sapiens
  misc_RNA (1)...(19): siRNA sense strand
gaagagacuuauaaucaac

SEQ ID NO: 726528 - RNA, 19 nt, Homo sapiens
  misc_RNA (1)...(19): siRNA sense strand
gcaauuaagggaaucuauu

SEQ ID NO: 726529 - RNA, 19 nt, Homo sapiens
  misc_RNA (1)...(19): siRNA sense strand
gaggaaaugaggcaauuaa

SEQ ID NO: 726530 - RNA, 19 nt, Homo sapiens
  misc_RNA (1)...(19): siRNA sense strand
ugaaauugaugcugcuauu

SEQ ID NO: 726531 - RNA, 19 nt, Homo sapiens
  misc_RNA (1)...(19): siRNA sense strand
gccuauuucugacuucuua

SEQ ID NO: 726532 - RNA, 19 nt, Homo sapiens
  misc_RNA (1)...(19): siRNA sense strand
acaaagaauugcacagcua

SEQ ID NO: 726533 - RNA, 19 nt, Homo sapiens
  misc_RNA (1)...(19): siRNA sense strand
gaucugacuuggagcaguu

SEQ ID NO: 726534 - RNA, 19 nt, Homo sapiens
  misc_RNA (1)...(19): siRNA sense strand
ggcauugguugacugguua

SEQ ID NO: 726535 - RNA, 19 nt, Homo sapiens
  misc_RNA (1)...(19): siRNA sense strand
caacaaccgaugcagauaa

SEQ ID NO: 726536 - RNA, 19 nt, Homo sapiens
  misc_RNA (1)...(19): siRNA sense strand
caaaggaaacugaaugaug

SEQ ID NO: 726537 - RNA, 19 nt, Homo sapiens
  misc_RNA (1)...(19): siRNA sense strand
gaaauuaugugcugguauc

SEQ ID NO: 726538 - RNA, 19 nt, Homo sapiens
  misc_RNA (1)...(19): siRNA sense strand
caagagaucuguuugcaau

SEQ ID NO: 726539 - RNA, 19 nt, Homo sapiens
  misc_RNA (1)...(19): siRNA sense strand
gaugguggcuuuccucaaa

SEQ ID NO: 726540 - RNA, 19 nt, Homo sapiens
  misc_RNA (1)...(19): siRNA sense strand
ggagaaaugugauguuaca

SEQ ID NO: 726541 - RNA, 19 nt, Homo sapiens
  misc_RNA (1)...(19): siRNA sense strand
caccauaacugucguugua

SEQ ID NO: 726542 - RNA, 19 nt, Homo sapiens
  misc_RNA (1)...(19): siRNA sense strand
gcaaugcucuucaucaaag

SEQ ID NO: 726543 - RNA, 19 nt, Homo sapiens
  misc_RNA (1)...(19): siRNA sense strand
ggagacaauucugcaguua

SEQ ID NO: 726544 - RNA, 19 nt, Homo sapiens
  misc_RNA (1)...(19): siRNA sense strand
uaacuacaccuacuacuuu

SEQ ID NO: 726545 - RNA, 19 nt, Homo sapiens
  misc_RNA (1)...(19): siRNA sense strand
ugaaagaccuuaacuuguc

SEQ ID NO: 726546 - RNA, 19 nt, Homo sapiens
  misc_RNA (1)...(19): siRNA sense strand
ugaagaaacuagauagaga

SEQ ID NO: 726547 - RNA, 19 nt, Homo sapiens
  misc_RNA (1)...(19): siRNA sense strand
ccaagaaacaggcaacaua

SEQ ID NO: 726548 - RNA, 19 nt, Homo sapiens
  misc_RNA (1)...(19): siRNA sense strand
gaaaguaaagguugaagau

SEQ ID NO: 726549 - RNA, 19 nt, Homo sapiens
  misc_RNA (1)...(19): siRNA sense strand
cagaugauguugacaguga

SEQ ID NO: 726550 - RNA, 19 nt, Homo sapiens
  misc_RNA (1)...(19): siRNA sense strand
caagaaacaggcaacauaa

SEQ ID NO: 726551 - RNA, 19 nt, Homo sapiens
  misc_RNA (1)...(19): siRNA sense strand
gcaguuacgcucuccauuu

SEQ ID NO: 726552 - RNA, 19 nt, Homo sapiens
  misc_RNA (1)...(19): siRNA sense strand
gagauuauuucaccucaau

SEQ ID NO: 726553 - RNA, 19 nt, Homo sapiens
  misc_RNA (1)...(19): siRNA sense strand
ccacuggacuuaucacaau

SEQ ID NO: 726554 - RNA, 19 nt, Homo sapiens
  misc_RNA (1)...(19): siRNA sense strand
gaaacagagucacacuaga

SEQ ID NO: 726555 - RNA, 19 nt, Homo sapiens
  misc_RNA (1)...(19): siRNA sense strand
gaccaaugcuacacugauu

SEQ ID NO: 726556 - RNA, 19 nt, Homo sapiens
  misc_RNA (1)...(19): siRNA sense strand
gcauugaucgugagaaauu

SEQ ID NO: 726557 - RNA, 19 nt, Homo sapiens
  misc_RNA (1)...(19): siRNA sense strand
gauguauccucaccaacua

SEQ ID NO: 726558 - RNA, 19 nt, Homo sapiens
  misc_RNA (1)...(19): siRNA sense strand
ggaauaaacggaguucaaa

SEQ ID NO: 726559 - RNA, 19 nt, Homo sapiens
  misc_RNA (1)...(19): siRNA sense strand
caacauugccaggagauua

SEQ ID NO: 726560 - RNA, 19 nt, Homo sapiens
  misc_RNA (1)...(19): siRNA sense strand
gaagaaacuagauagagaa

SEQ ID NO: 726561 - RNA, 19 nt, Homo sapiens
  misc_RNA (1)...(19): siRNA sense strand
caucacugcuguaguaaga

SEQ ID NO: 726562 - RNA, 19 nt, Homo sapiens
  misc_RNA (1)...(19): siRNA sense strand
uuucaucacugcuguagua

SEQ ID NO: 726563 - RNA, 19 nt, Homo sapiens
  misc_RNA (1)...(19): siRNA sense strand
uaacugauccugauuaugg

SEQ ID NO: 726564 - RNA, 19 nt, Homo sapiens
  misc_RNA (1)...(19): siRNA sense strand
caacaguuaucaacauauc

SEQ ID NO: 726565 - RNA, 19 nt, Homo sapiens
  misc_RNA (1)...(19): siRNA sense strand
ugacacaguuguucuuuca

SEQ ID NO: 726566 - RNA, 19 nt, Homo sapiens
  misc_RNA (1)...(19): siRNA sense strand
gguugaagaugguggcuuu

SEQ ID NO: 726567 - RNA, 19 nt, Homo sapiens
  misc_RNA (1)...(19): siRNA sense strand
gagaaauuaugugcuggua

SEQ ID NO: 726568 - RNA, 19 nt, Homo sapiens
  misc_RNA (1)...(19): siRNA sense strand
ggugucauccgaccaaaua

SEQ ID NO: 726569 - RNA, 19 nt, Homo sapiens
  misc_RNA (1)...(19): siRNA sense strand
caauggugcugguaaaugu

SEQ ID NO: 726570 - RNA, 19 nt, Homo sapiens
  misc_RNA (1)...(19): siRNA sense strand
ggacuuaucacaaucaaag

SEQ ID NO: 726571 - RNA, 19 nt, Homo sapiens
  misc_RNA (1)...(19): siRNA sense strand
ccacuucucuuucagcaau

SEQ ID NO: 726572 - RNA, 19 nt, Homo sapiens
  misc_RNA (1)...(19): siRNA sense strand
ucauaacugugacggauaa

SEQ ID NO: 726573 - RNA, 19 nt, Homo sapiens
  misc_RNA (1)...(19): siRNA sense strand
ccauaaaugugguugaugu

SEQ ID NO: 726574 - RNA, 19 nt, Homo sapiens
  misc_RNA (1)...(19): siRNA sense strand
gacaagaugccacaacuga

SEQ ID NO: 726575 - RNA, 19 nt, Homo sapiens
  misc_RNA (1)...(19): siRNA sense strand
ggaaacagagucacacuag

SEQ ID NO: 726576 - RNA, 19 nt, Homo sapiens
  misc_RNA (1)...(19): siRNA sense strand
ugacagugauggaaacaga

SEQ ID NO: 726577 - RNA, 19 nt, Homo sapiens
  misc_RNA (1)...(19): siRNA sense strand
caaaguaaccauaaaugug

SEQ ID NO: 726578 - RNA, 19 nt, Homo sapiens
  misc_RNA (1)...(19): siRNA sense strand
ccucaaagauccaguacug

SEQ ID NO: 726579 - RNA, 19 nt, Homo sapiens
  misc_RNA (1)...(19): siRNA sense strand
acaguggucuuucagguaa

SEQ ID NO: 726580 - RNA, 19 nt, Homo sapiens
  misc_RNA (1)...(19): siRNA sense strand
ucagaucccuacagcguuu

SEQ ID NO: 726581 - RNA, 19 nt, Homo sapiens
  misc_RNA (1)...(19): siRNA sense strand
cacuagaccuuccuauuga

SEQ ID NO: 726582 - RNA, 19 nt, Homo sapiens
  misc_RNA (1)...(19): siRNA sense strand
gaaaacaggcagaugauaa

SEQ ID NO: 726583 - RNA, 19 nt, Homo sapiens
  misc_RNA (1)...(19): siRNA sense strand
caagaugccacaacugauu

SEQ ID NO: 726584 - RNA, 19 nt, Homo sapiens
  misc_RNA (1)...(19): siRNA sense strand
caagaacugccucucgaua

SEQ ID NO: 726585 - RNA, 19 nt, Homo sapiens
  misc_RNA (1)...(19): siRNA sense strand
caaugacacuggcaugaau

SEQ ID NO: 726586 - RNA, 19 nt, Homo sapiens
  misc_RNA (1)...(19): siRNA sense strand
gaagucaguauaccagaaa

SEQ ID NO: 726587 - RNA, 19 nt, Homo sapiens
  misc_RNA (1)...(19): siRNA sense strand
gggaagagaaggauaccua

SEQ ID NO: 726588 - RNA, 19 nt, Homo sapiens
  misc_RNA (1)...(19): siRNA sense strand
ugccacagaugcugacaua

SEQ ID NO: 726589 - RNA, 19 nt, Homo sapiens
  misc_RNA (1)...(19): siRNA sense strand
ccuuaaggcugcucagaaa

SEQ ID NO: 726590 - RNA, 19 nt, Homo sapiens
  misc_RNA (1)...(19): siRNA sense strand
guugaaagaccuuaacuug

SEQ ID NO: 726591 - RNA, 19 nt, Homo sapiens
  misc_RNA (1)...(19): siRNA sense strand
uaagauacaucgucaaucc

SEQ ID NO: 726592 - RNA, 19 nt, Homo sapiens
  misc_RNA (1)...(19): siRNA sense strand
ggaaaguacaauuggguaa

SEQ ID NO: 726593 - RNA, 19 nt, Homo sapiens
  misc_RNA (1)...(19): siRNA sense strand
gauucucucuucaguguug

SEQ ID NO: 726594 - RNA, 19 nt, Homo sapiens
  misc_RNA (1)...(19): siRNA sense strand
gaaugacaauagcccaguu

SEQ ID NO: 726595 - RNA, 19 nt, Homo sapiens
  misc_RNA (1)...(19): siRNA sense strand
ggcaagugaugguggauug

SEQ ID NO: 726596 - RNA, 19 nt, Homo sapiens
  misc_RNA (1)...(19): siRNA sense strand
ucucuucaguguuguaauu

SEQ ID NO: 726597 - RNA, 19 nt, Homo sapiens
  misc_RNA (1)...(19): siRNA sense strand
gagacaagaugccacaacu

SEQ ID NO: 726598 - RNA, 19 nt, Homo sapiens
  misc_RNA (1)...(19): siRNA sense strand
acacuagaccuuccuauug

SEQ ID NO: 726599 - RNA, 19 nt, Homo sapiens
  misc_RNA (1)...(19): siRNA sense strand
gaguguuggucaaagcuaa

SEQ ID NO: 726600 - RNA, 19 nt, Homo sapiens
  misc_RNA (1)...(19): siRNA sense strand
ugacaaccacccagucuuu

SEQ ID NO: 726601 - RNA, 19 nt, Homo sapiens
  misc_RNA (1)...(19): siRNA sense strand
guacaagaccggagaugug

SEQ ID NO: 726602 - RNA, 19 nt, Homo sapiens
  misc_RNA (1)...(19): siRNA sense strand
cagccugccuuccaaauuc

SEQ ID NO: 726603 - RNA, 19 nt, Homo sapiens
  misc_RNA (1)...(19): siRNA sense strand
uuacagaccuugguuuaca

SEQ ID NO: 726604 - RNA, 19 nt, Homo sapiens
  misc_RNA (1)...(19): siRNA sense strand
gagguucguuacagcauug

SEQ ID NO: 726605 - RNA, 19 nt, Homo sapiens
  misc_RNA (1)...(19): siRNA sense strand
ugacaugcuucacagauca

SEQ ID NO: 726606 - RNA, 19 nt, Homo sapiens
  misc_RNA (1)...(19): siRNA sense strand
aaauugcucucauaacugu

SEQ ID NO: 726607 - RNA, 19 nt, Homo sapiens
  misc_RNA (1)...(19): siRNA sense strand
cagcaacaguuaucaacau

SEQ ID NO: 726608 - RNA, 19 nt, Homo sapiens
  misc_RNA (1)...(19): siRNA sense strand
ggaggaaacacaagagauc

SEQ ID NO: 726609 - RNA, 19 nt, Homo sapiens
  misc_RNA (1)...(19): siRNA sense strand
ugaggauggugguagagua

SEQ ID NO: 726610 - RNA, 19 nt, Homo sapiens
  misc_RNA (1)...(19): siRNA sense strand
uaaggccaguauucaguaa

SEQ ID NO: 726611 - RNA, 19 nt, Homo sapiens
  misc_RNA (1)...(19): siRNA sense strand
ggagaugugccacugauuc

SEQ ID NO: 726612 - RNA, 19 nt, Homo sapiens
  misc_RNA (1)...(19): siRNA sense strand
ucaaagaaccacuggauag

SEQ ID NO: 726613 - RNA, 19 nt, Homo sapiens
  misc_RNA (1)...(19): siRNA sense strand
ggaguuagauagggaagag

SEQ ID NO: 726614 - RNA, 19 nt, Homo sapiens
  misc_RNA (1)...(19): siRNA sense strand
augcuacacugauuaauga

SEQ ID NO: 726615 - RNA, 19 nt, Homo sapiens
  misc_RNA (1)...(19): siRNA sense strand
gguagaguaucacguucuu

SEQ ID NO: 726616 - RNA, 19 nt, Homo sapiens
  misc_RNA (1)...(19): siRNA sense strand
gauaggcgacuuguugaaa

SEQ ID NO: 726617 - RNA, 19 nt, Homo sapiens
  misc_RNA (1)...(19): siRNA sense strand
gcugauguauccucaccaa

SEQ ID NO: 726618 - RNA, 19 nt, Homo sapiens
  misc_RNA (1)...(19): siRNA sense strand
ucaaucuguucgugaauga

SEQ ID NO: 726619 - RNA, 19 nt, Homo sapiens
  misc_RNA (1)...(19): siRNA sense strand
ucgcauugaucgugagaaa

SEQ ID NO: 726620 - RNA, 19 nt, Homo sapiens
  misc_RNA (1)...(19): siRNA sense strand
guaacuacaccuacuacuu

SEQ ID NO: 726621 - RNA, 19 nt, Homo sapiens
  misc_RNA (1)...(19): siRNA sense strand
ccaaugcuacacugauuaa

SEQ ID NO: 726622 - RNA, 19 nt, Homo sapiens
  misc_RNA (1)...(19): siRNA sense strand
aaacaggcaacauaacauu

SEQ ID NO: 726623 - RNA, 19 nt, Homo sapiens
  misc_RNA (1)...(19): siRNA sense strand
gaaacaggcaacauaacau

SEQ ID NO: 726624 - RNA, 19 nt, Homo sapiens
  misc_RNA (1)...(19): siRNA sense strand
ggacuaaucacuguaacug

SEQ ID NO: 726625 - RNA, 19 nt, Homo sapiens
  misc_RNA (1)...(19): siRNA sense strand
caaaauugcucucauaacu

SEQ ID NO: 726626 - RNA, 19 nt, Homo sapiens
  misc_RNA (1)...(19): siRNA sense strand
acacaguuguucuuucaga

SEQ ID NO: 726627 - RNA, 19 nt, Homo sapiens
  misc_RNA (1)...(19): siRNA sense strand
ugaagucaguauaccagaa

SEQ ID NO: 726628 - RNA, 19 nt, Homo sapiens
  misc_RNA (1)...(19): siRNA sense strand
caucgucaauccugucaau

SEQ ID NO: 726629 - RNA, 19 nt, Homo sapiens
  misc_RNA (1)...(19): siRNA sense strand
ccaaaguaaccauaaaugu

SEQ ID NO: 726630 - RNA, 19 nt, Homo sapiens
  misc_RNA (1)...(19): siRNA sense strand
ggauggugguagaguauca

SEQ ID NO: 726631 - RNA, 19 nt, Homo sapiens
  misc_RNA (1)...(19): siRNA sense strand
caaugucacagucuuugua

SEQ ID NO: 726632 - RNA, 19 nt, Homo sapiens
  misc_RNA (1)...(19): siRNA sense strand
gcagacagugggccuaaug

SEQ ID NO: 726633 - RNA, 19 nt, Homo sapiens
  misc_RNA (1)...(19): siRNA sense strand
aaacuaaggcagaugaugu

SEQ ID NO: 726634 - RNA, 19 nt, Homo sapiens
  misc_RNA (1)...(19): siRNA sense strand
auacugagauagcugaugu

SEQ ID NO: 726635 - RNA, 19 nt, Homo sapiens
  misc_RNA (1)...(19): siRNA sense strand
gugccaaaguaaccauaaa

SEQ ID NO: 726636 - RNA, 19 nt, Homo sapiens
  misc_RNA (1)...(19): siRNA sense strand
guaggacuaaucacuguaa

SEQ ID NO: 726637 - RNA, 19 nt, Homo sapiens
  misc_RNA (1)...(19): siRNA sense strand
gaaauuaugugcugguauc

SEQ ID NO: 726638 - RNA, 19 nt, Homo sapiens
  misc_RNA (1)...(19): siRNA sense strand
caagagaucuguuugcaau

SEQ ID NO: 726639 - RNA, 19 nt, Homo sapiens
  misc_RNA (1)...(19): siRNA sense strand
gaugguggcuuuccucaaa

SEQ ID NO: 726640 - RNA, 19 nt, Homo sapiens
  misc_RNA (1)...(19): siRNA sense strand
ggagaaaugugauguuaca

SEQ ID NO: 726641 - RNA, 19 nt, Homo sapiens
  misc_RNA (1)...(19): siRNA sense strand
caccauaacugucguugua

SEQ ID NO: 726642 - RNA, 19 nt, Homo sapiens
  misc_RNA (1)...(19): siRNA sense strand
gcaaugcucuucaucaaag

SEQ ID NO: 726643 - RNA, 19 nt, Homo sapiens
  misc_RNA (1)...(19): siRNA sense strand
ggagacaauucugcaguua

SEQ ID NO: 726644 - RNA, 19 nt, Homo sapiens
  misc_RNA (1)...(19): siRNA sense strand
uaacuacaccuacuacuuu

SEQ ID NO: 726645 - RNA, 19 nt, Homo sapiens
  misc_RNA (1)...(19): siRNA sense strand
ugaaagaccuuaacuuguc

SEQ ID NO: 726646 - RNA, 19 nt, Homo sapiens
  misc_RNA (1)...(19): siRNA sense strand
ugaagaaacuagauagaga

SEQ ID NO: 726647 - RNA, 19 nt, Homo sapiens
  misc_RNA (1)...(19): siRNA sense strand
ccaagaaacaggcaacaua

SEQ ID NO: 726648 - RNA, 19 nt, Homo sapiens
  misc_RNA (1)...(19): siRNA sense strand
gaaaguaaagguugaagau

SEQ ID NO: 726649 - RNA, 19 nt, Homo sapiens
  misc_RNA (1)...(19): siRNA sense strand
cagaugauguugacaguga

SEQ ID NO: 726650 - RNA, 19 nt, Homo sapiens
  misc_RNA (1)...(19): siRNA sense strand
caagaaacaggcaacauaa

SEQ ID NO: 726651 - RNA, 19 nt, Homo sapiens
  misc_RNA (1)...(19): siRNA sense strand
gcaguuacgcucuccauuu

SEQ ID NO: 726652 - RNA, 19 nt, Homo sapiens
  misc_RNA (1)...(19): siRNA sense strand
gagauuauuucaccucaau

SEQ ID NO: 726653 - RNA, 19 nt, Homo sapiens
  misc_RNA (1)...(19): siRNA sense strand
ccacuggacuuaucacaau

SEQ ID NO: 726654 - RNA, 19 nt, Homo sapiens
  misc_RNA (1)...(19): siRNA sense strand
gaaacagagucacacuaga

SEQ ID NO: 726655 - RNA, 19 nt, Homo sapiens
  misc_RNA (1)...(19): siRNA sense strand
gaccaaugcuacacugauu

SEQ ID NO: 726656 - RNA, 19 nt, Homo sapiens
  misc_RNA (1)...(19): siRNA sense strand
gcauugaucgugagaaauu

SEQ ID NO: 726657 - RNA, 19 nt, Homo sapiens
  misc_RNA (1)...(19): siRNA sense strand
gauguauccucaccaacua

SEQ ID NO: 726658 - RNA, 19 nt, Homo sapiens
  misc_RNA (1)...(19): siRNA sense strand
ggaauaaacggaguucaaa

SEQ ID NO: 726659 - RNA, 19 nt, Homo sapiens
  misc_RNA (1)...(19): siRNA sense strand
caacauugccaggagauua

SEQ ID NO: 726660 - RNA, 19 nt, Homo sapiens
  misc_RNA (1)...(19): siRNA sense strand
gaagaaacuagauagagaa

SEQ ID NO: 726661 - RNA, 19 nt, Homo sapiens
  misc_RNA (1)...(19): siRNA sense strand
caucacugcuguaguaaga

SEQ ID NO: 726662 - RNA, 19 nt, Homo sapiens
  misc_RNA (1)...(19): siRNA sense strand
uuucaucacugcuguagua

SEQ ID NO: 726663 - RNA, 19 nt, Homo sapiens
  misc_RNA (1)...(19): siRNA sense strand
uaacugauccugauuaugg

SEQ ID NO: 726664 - RNA, 19 nt, Homo sapiens
  misc_RNA (1)...(19): siRNA sense strand
caacaguuaucaacauauc

SEQ ID NO: 726665 - RNA, 19 nt, Homo sapiens
  misc_RNA (1)...(19): siRNA sense strand
ugacacaguuguucuuuca

SEQ ID NO: 726666 - RNA, 19 nt, Homo sapiens
  misc_RNA (1)...(19): siRNA sense strand
gguugaagaugguggcuuu

SEQ ID NO: 726667 - RNA, 19 nt, Homo sapiens
  misc_RNA (1)...(19): siRNA sense strand
gagaaauuaugugcuggua

SEQ ID NO: 726668 - RNA, 19 nt, Homo sapiens
  misc_RNA (1)...(19): siRNA sense strand
ggugucauccgaccaaaua

SEQ ID NO: 726669 - RNA, 19 nt, Homo sapiens
  misc_RNA (1)...(19): siRNA sense strand
caauggugcugguaaaugu

SEQ ID NO: 726670 - RNA, 19 nt, Homo sapiens
  misc_RNA (1)...(19): siRNA sense strand
ggacuuaucacaaucaaag

SEQ ID NO: 726671 - RNA, 19 nt, Homo sapiens
  misc_RNA (1)...(19): siRNA sense strand
ccacuucucuuucagcaau

SEQ ID NO: 726672 - RNA, 19 nt, Homo sapiens
  misc_RNA (1)...(19): siRNA sense strand
ucauaacugugacggauaa

SEQ ID NO: 726673 - RNA, 19 nt, Homo sapiens
  misc_RNA (1)...(19): siRNA sense strand
ccauaaaugugguugaugu

SEQ ID NO: 726674 - RNA, 19 nt, Homo sapiens
  misc_RNA (1)...(19): siRNA sense strand
gacaagaugccacaacuga

SEQ ID NO: 726675 - RNA, 19 nt, Homo sapiens
  misc_RNA (1)...(19): siRNA sense strand
ggaaacagagucacacuag

SEQ ID NO: 726676 - RNA, 19 nt, Homo sapiens
  misc_RNA (1)...(19): siRNA sense strand
ugacagugauggaaacaga

SEQ ID NO: 726677 - RNA, 19 nt, Homo sapiens
  misc_RNA (1)...(19): siRNA sense strand
caaaguaaccauaaaugug

SEQ ID NO: 726678 - RNA, 19 nt, Homo sapiens
  misc_RNA (1)...(19): siRNA sense strand
ccucaaagauccaguacug

SEQ ID NO: 726679 - RNA, 19 nt, Homo sapiens
  misc_RNA (1)...(19): siRNA sense strand
acaguggucuuucagguaa

SEQ ID NO: 726680 - RNA, 19 nt, Homo sapiens
  misc_RNA (1)...(19): siRNA sense strand
ucagaucccuacagcguuu

SEQ ID NO: 726681 - RNA, 19 nt, Homo sapiens
  misc_RNA (1)...(19): siRNA sense strand
cacuagaccuuccuauuga

SEQ ID NO: 726682 - RNA, 19 nt, Homo sapiens
  misc_RNA (1)...(19): siRNA sense strand
gaaaacaggcagaugauaa

SEQ ID NO: 726683 - RNA, 19 nt, Homo sapiens
  misc_RNA (1)...(19): siRNA sense strand
caagaugccacaacugauu

SEQ ID NO: 726684 - RNA, 19 nt, Homo sapiens
  misc_RNA (1)...(19): siRNA sense strand
caagaacugccucucgaua

SEQ ID NO: 726685 - RNA, 19 nt, Homo sapiens
  misc_RNA (1)...(19): siRNA sense strand
caaugacacuggcaugaau

SEQ ID NO: 726686 - RNA, 19 nt, Homo sapiens
  misc_RNA (1)...(19): siRNA sense strand
gaagucaguauaccagaaa

SEQ ID NO: 726687 - RNA, 19 nt, Homo sapiens
  misc_RNA (1)...(19): siRNA sense strand
gggaagagaaggauaccua

SEQ ID NO: 726688 - RNA, 19 nt, Homo sapiens
  misc_RNA (1)...(19): siRNA sense strand
ugccacagaugcugacaua

SEQ ID NO: 726689 - RNA, 19 nt, Homo sapiens
  misc_RNA (1)...(19): siRNA sense strand
ccuuaaggcugcucagaaa

SEQ ID NO: 726690 - RNA, 19 nt, Homo sapiens
  misc_RNA (1)...(19): siRNA sense strand
guugaaagaccuuaacuug

SEQ ID NO: 726691 - RNA, 19 nt, Homo sapiens
  misc_RNA (1)...(19): siRNA sense strand
uaagauacaucgucaaucc

SEQ ID NO: 726692 - RNA, 19 nt, Homo sapiens
  misc_RNA (1)...(19): siRNA sense strand
ggaaaguacaauuggguaa

SEQ ID NO: 726693 - RNA, 19 nt, Homo sapiens
  misc_RNA (1)...(19): siRNA sense strand
gauucucucuucaguguug

SEQ ID NO: 726694 - RNA, 19 nt, Homo sapiens
  misc_RNA (1)...(19): siRNA sense strand
gaaugacaauagcccaguu

SEQ ID NO: 726695 - RNA, 19 nt, Homo sapiens
  misc_RNA (1)...(19): siRNA sense strand
ggcaagugaugguggauug

SEQ ID NO: 726696 - RNA, 19 nt, Homo sapiens
  misc_RNA (1)...(19): siRNA sense strand
ucucuucaguguuguaauu

SEQ ID NO: 726697 - RNA, 19 nt, Homo sapiens
  misc_RNA (1)...(19): siRNA sense strand
gagacaagaugccacaacu

SEQ ID NO: 726698 - RNA, 19 nt, Homo sapiens
  misc_RNA (1)...(19): siRNA sense strand
acacuagaccuuccuauug

SEQ ID NO: 726699 - RNA, 19 nt, Homo sapiens
  misc_RNA (1)...(19): siRNA sense strand
gaguguuggucaaagcuaa

SEQ ID NO: 726700 - RNA, 19 nt, Homo sapiens
  misc_RNA (1)...(19): siRNA sense strand
ugacaaccacccagucuuu

SEQ ID NO: 726701 - RNA, 19 nt, Homo sapiens
  misc_RNA (1)...(19): siRNA sense strand
guacaagaccggagaugug

SEQ ID NO: 726702 - RNA, 19 nt, Homo sapiens
  misc_RNA (1)...(19): siRNA sense strand
cagccugccuuccaaauuc

SEQ ID NO: 726703 - RNA, 19 nt, Homo sapiens
  misc_RNA (1)...(19): siRNA sense strand
uuacagaccuugguuuaca

SEQ ID NO: 726704 - RNA, 19 nt, Homo sapiens
  misc_RNA (1)...(19): siRNA sense strand
gagguucguuacagcauug

SEQ ID NO: 726705 - RNA, 19 nt, Homo sapiens
  misc_RNA (1)...(19): siRNA sense strand
ugacaugcuucacagauca

SEQ ID NO: 726706 - RNA, 19 nt, Homo sapiens
  misc_RNA (1)...(19): siRNA sense strand
aaauugcucucauaacugu

SEQ ID NO: 726707 - RNA, 19 nt, Homo sapiens
  misc_RNA (1)...(19): siRNA sense strand
cagcaacaguuaucaacau

SEQ ID NO: 726708 - RNA, 19 nt, Homo sapiens
  misc_RNA (1)...(19): siRNA sense strand
ggaggaaacacaagagauc

SEQ ID NO: 726709 - RNA, 19 nt, Homo sapiens
  misc_RNA (1)...(19): siRNA sense strand
ugaggauggugguagagua

SEQ ID NO: 726710 - RNA, 19 nt, Homo sapiens
  misc_RNA (1)...(19): siRNA sense strand
uaaggccaguauucaguaa

SEQ ID NO: 726711 - RNA, 19 nt, Homo sapiens
  misc_RNA (1)...(19): siRNA sense strand
ggagaugugccacugauuc

SEQ ID NO: 726712 - RNA, 19 nt, Homo sapiens
  misc_RNA (1)...(19): siRNA sense strand
ucaaagaaccacuggauag

SEQ ID NO: 726713 - RNA, 19 nt, Homo sapiens
  misc_RNA (1)...(19): siRNA sense strand
ggaguuagauagggaagag

SEQ ID NO: 726714 - RNA, 19 nt, Homo sapiens
  misc_RNA (1)...(19): siRNA sense strand
augcuacacugauuaauga

SEQ ID NO: 726715 - RNA, 19 nt, Homo sapiens
  misc_RNA (1)...(19): siRNA sense strand
gguagaguaucacguucuu

SEQ ID NO: 726716 - RNA, 19 nt, Homo sapiens
  misc_RNA (1)...(19): siRNA sense strand
gauaggcgacuuguugaaa

SEQ ID NO: 726717 - RNA, 19 nt, Homo sapiens
  misc_RNA (1)...(19): siRNA sense strand
gcugauguauccucaccaa

SEQ ID NO: 726718 - RNA, 19 nt, Homo sapiens
  misc_RNA (1)...(19): siRNA sense strand
ucaaucuguucgugaauga

SEQ ID NO: 726719 - RNA, 19 nt, Homo sapiens
  misc_RNA (1)...(19): siRNA sense strand
ucgcauugaucgugagaaa

SEQ ID NO: 726720 - RNA, 19 nt, Homo sapiens
  misc_RNA (1)...(19): siRNA sense strand
guaacuacaccuacuacuu

SEQ ID NO: 726721 - RNA, 19 nt, Homo sapiens
  misc_RNA (1)...(19): siRNA sense strand
ccaaugcuacacugauuaa

SEQ ID NO: 726722 - RNA, 19 nt, Homo sapiens
  misc_RNA (1)...(19): siRNA sense strand
aaacaggcaacauaacauu

SEQ ID NO: 726723 - RNA, 19 nt, Homo sapiens
  misc_RNA (1)...(19): siRNA sense strand
gaaacaggcaacauaacau

SEQ ID NO: 726724 - RNA, 19 nt, Homo sapiens
  misc_RNA (1)...(19): siRNA sense strand
ggacuaaucacuguaacug

SEQ ID NO: 726725 - RNA, 19 nt, Homo sapiens
  misc_RNA (1)...(19): siRNA sense strand
caaaauugcucucauaacu

SEQ ID NO: 726726 - RNA, 19 nt, Homo sapiens
  misc_RNA (1)...(19): siRNA sense strand
acacaguuguucuuucaga

SEQ ID NO: 726727 - RNA, 19 nt, Homo sapiens
  misc_RNA (1)...(19): siRNA sense strand
ugaagucaguauaccagaa

SEQ ID NO: 726728 - RNA, 19 nt, Homo sapiens
  misc_RNA (1)...(19): siRNA sense strand
caucgucaauccugucaau

SEQ ID NO: 726729 - RNA, 19 nt, Homo sapiens
  misc_RNA (1)...(19): siRNA sense strand
ccaaaguaaccauaaaugu

SEQ ID NO: 726730 - RNA, 19 nt, Homo sapiens
  misc_RNA (1)...(19): siRNA sense strand
ggauggugguagaguauca

SEQ ID NO: 726731 - RNA, 19 nt, Homo sapiens
  misc_RNA (1)...(19): siRNA sense strand
caaugucacagucuuugua

SEQ ID NO: 726732 - RNA, 19 nt, Homo sapiens
  misc_RNA (1)...(19): siRNA sense strand
gcagacagugggccuaaug

SEQ ID NO: 726733 - RNA, 19 nt, Homo sapiens
  misc_RNA (1)...(19): siRNA sense strand
aaacuaaggcagaugaugu

SEQ ID NO: 726734 - RNA, 19 nt, Homo sapiens
  misc_RNA (1)...(19): siRNA sense strand
auacugagauagcugaugu

SEQ ID NO: 726735 - RNA, 19 nt, Homo sapiens
  misc_RNA (1)...(19): siRNA sense strand
gugccaaaguaaccauaaa

SEQ ID NO: 726736 - RNA, 19 nt, Homo sapiens
  misc_RNA (1)...(19): siRNA sense strand
guaggacuaaucacuguaa

SEQ ID NO: 726737 - RNA, 19 nt, Homo sapiens
  misc_RNA (1)...(19): siRNA sense strand
gaaauuaugugcugguauc

SEQ ID NO: 726738 - RNA, 19 nt, Homo sapiens
  misc_RNA (1)...(19): siRNA sense strand
caagagaucuguuugcaau

SEQ ID NO: 726739 - RNA, 19 nt, Homo sapiens
  misc_RNA (1)...(19): siRNA sense strand
gaugguggcuuuccucaaa

SEQ ID NO: 726740 - RNA, 19 nt, Homo sapiens
  misc_RNA (1)...(19): siRNA sense strand
ggagaaaugugauguuaca

SEQ ID NO: 726741 - RNA, 19 nt, Homo sapiens
  misc_RNA (1)...(19): siRNA sense strand
caccauaacugucguugua

SEQ ID NO: 726742 - RNA, 19 nt, Homo sapiens
  misc_RNA (1)...(19): siRNA sense strand
gcaaugcucuucaucaaag

SEQ ID NO: 726743 - RNA, 19 nt, Homo sapiens
  misc_RNA (1)...(19): siRNA sense strand
ggagacaauucugcaguua

SEQ ID NO: 726744 - RNA, 19 nt, Homo sapiens
  misc_RNA (1)...(19): siRNA sense strand
uaacuacaccuacuacuuu

SEQ ID NO: 726745 - RNA, 19 nt, Homo sapiens
  misc_RNA (1)...(19): siRNA sense strand
ugaaagaccuuaacuuguc

SEQ ID NO: 726746 - RNA, 19 nt, Homo sapiens
  misc_RNA (1)...(19): siRNA sense strand
ugaagaaacuagauagaga

SEQ ID NO: 726747 - RNA, 19 nt, Homo sapiens
  misc_RNA (1)...(19): siRNA sense strand
ccaagaaacaggcaacaua

SEQ ID NO: 726748 - RNA, 19 nt, Homo sapiens
  misc_RNA (1)...(19): siRNA sense strand
gaaaguaaagguugaagau

SEQ ID NO: 726749 - RNA, 19 nt, Homo sapiens
  misc_RNA (1)...(19): siRNA sense strand
cagaugauguugacaguga

SEQ ID NO: 726750 - RNA, 19 nt, Homo sapiens
  misc_RNA (1)...(19): siRNA sense strand
caagaaacaggcaacauaa

SEQ ID NO: 726751 - RNA, 19 nt, Homo sapiens
  misc_RNA (1)...(19): siRNA sense strand
gcaguuacgcucuccauuu

SEQ ID NO: 726752 - RNA, 19 nt, Homo sapiens
  misc_RNA (1)...(19): siRNA sense strand
gagauuauuucaccucaau

SEQ ID NO: 726753 - RNA, 19 nt, Homo sapiens
  misc_RNA (1)...(19): siRNA sense strand
ccacuggacuuaucacaau

SEQ ID NO: 726754 - RNA, 19 nt, Homo sapiens
  misc_RNA (1)...(19): siRNA sense strand
gaaacagagucacacuaga

SEQ ID NO: 726755 - RNA, 19 nt, Homo sapiens
  misc_RNA (1)...(19): siRNA sense strand
gaccaaugcuacacugauu

SEQ ID NO: 726756 - RNA, 19 nt, Homo sapiens
  misc_RNA (1)...(19): siRNA sense strand
gcauugaucgugagaaauu

SEQ ID NO: 726757 - RNA, 19 nt, Homo sapiens
  misc_RNA (1)...(19): siRNA sense strand
gauguauccucaccaacua

SEQ ID NO: 726758 - RNA, 19 nt, Homo sapiens
  misc_RNA (1)...(19): siRNA sense strand
ggaauaaacggaguucaaa

SEQ ID NO: 726759 - RNA, 19 nt, Homo sapiens
  misc_RNA (1)...(19): siRNA sense strand
caacauugccaggagauua

SEQ ID NO: 726760 - RNA, 19 nt, Homo sapiens
  misc_RNA (1)...(19): siRNA sense strand
gaagaaacuagauagagaa

SEQ ID NO: 726761 - RNA, 19 nt, Homo sapiens
  misc_RNA (1)...(19): siRNA sense strand
caucacugcuguaguaaga

SEQ ID NO: 726762 - RNA, 19 nt, Homo sapiens
  misc_RNA (1)...(19): siRNA sense strand
uuucaucacugcuguagua

SEQ ID NO: 726763 - RNA, 19 nt, Homo sapiens
  misc_RNA (1)...(19): siRNA sense strand
uaacugauccugauuaugg

SEQ ID NO: 726764 - RNA, 19 nt, Homo sapiens
  misc_RNA (1)...(19): siRNA sense strand
caacaguuaucaacauauc

SEQ ID NO: 726765 - RNA, 19 nt, Homo sapiens
  misc_RNA (1)...(19): siRNA sense strand
ugacacaguuguucuuuca

SEQ ID NO: 726766 - RNA, 19 nt, Homo sapiens
  misc_RNA (1)...(19): siRNA sense strand
gguugaagaugguggcuuu

SEQ ID NO: 726767 - RNA, 19 nt, Homo sapiens
  misc_RNA (1)...(19): siRNA sense strand
gagaaauuaugugcuggua

SEQ ID NO: 726768 - RNA, 19 nt, Homo sapiens
  misc_RNA (1)...(19): siRNA sense strand
ggugucauccgaccaaaua

SEQ ID NO: 726769 - RNA, 19 nt, Homo sapiens
  misc_RNA (1)...(19): siRNA sense strand
caauggugcugguaaaugu

SEQ ID NO: 726770 - RNA, 19 nt, Homo sapiens
  misc_RNA (1)...(19): siRNA sense strand
ggacuuaucacaaucaaag

SEQ ID NO: 726771 - RNA, 19 nt, Homo sapiens
  misc_RNA (1)...(19): siRNA sense strand
ccacuucucuuucagcaau

SEQ ID NO: 726772 - RNA, 19 nt, Homo sapiens
  misc_RNA (1)...(19): siRNA sense strand
ucauaacugugacggauaa

SEQ ID NO: 726773 - RNA, 19 nt, Homo sapiens
  misc_RNA (1)...(19): siRNA sense strand
ccauaaaugugguugaugu

SEQ ID NO: 726774 - RNA, 19 nt, Homo sapiens
  misc_RNA (1)...(19): siRNA sense strand
gacaagaugccacaacuga

SEQ ID NO: 726775 - RNA, 19 nt, Homo sapiens
  misc_RNA (1)...(19): siRNA sense strand
ggaaacagagucacacuag

SEQ ID NO: 726776 - RNA, 19 nt, Homo sapiens
  misc_RNA (1)...(19): siRNA sense strand
ugacagugauggaaacaga

SEQ ID NO: 726777 - RNA, 19 nt, Homo sapiens
  misc_RNA (1)...(19): siRNA sense strand
caaaguaaccauaaaugug

SEQ ID NO: 726778 - RNA, 19 nt, Homo sapiens
  misc_RNA (1)...(19): siRNA sense strand
ccucaaagauccaguacug

SEQ ID NO: 726779 - RNA, 19 nt, Homo sapiens
  misc_RNA (1)...(19): siRNA sense strand
acaguggucuuucagguaa

SEQ ID NO: 726780 - RNA, 19 nt, Homo sapiens
  misc_RNA (1)...(19): siRNA sense strand
ucagaucccuacagcguuu

SEQ ID NO: 726781 - RNA, 19 nt, Homo sapiens
  misc_RNA (1)...(19): siRNA sense strand
cacuagaccuuccuauuga

SEQ ID NO: 726782 - RNA, 19 nt, Homo sapiens
  misc_RNA (1)...(19): siRNA sense strand
gaaaacaggcagaugauaa

SEQ ID NO: 726783 - RNA, 19 nt, Homo sapiens
  misc_RNA (1)...(19): siRNA sense strand
caagaugccacaacugauu

SEQ ID NO: 726784 - RNA, 19 nt, Homo sapiens
  misc_RNA (1)...(19): siRNA sense strand
caagaacugccucucgaua

SEQ ID NO: 726785 - RNA, 19 nt, Homo sapiens
  misc_RNA (1)...(19): siRNA sense strand
caaugacacuggcaugaau

SEQ ID NO: 726786 - RNA, 19 nt, Homo sapiens
  misc_RNA (1)...(19): siRNA sense strand
gaagucaguauaccagaaa

SEQ ID NO: 726787 - RNA, 19 nt, Homo sapiens
  misc_RNA (1)...(19): siRNA sense strand
gggaagagaaggauaccua

SEQ ID NO: 726788 - RNA, 19 nt, Homo sapiens
  misc_RNA (1)...(19): siRNA sense strand
ugccacagaugcugacaua

SEQ ID NO: 726789 - RNA, 19 nt, Homo sapiens
  misc_RNA (1)...(19): siRNA sense strand
ccuuaaggcugcucagaaa

SEQ ID NO: 726790 - RNA, 19 nt, Homo sapiens
  misc_RNA (1)...(19): siRNA sense strand
guugaaagaccuuaacuug

SEQ ID NO: 726791 - RNA, 19 nt, Homo sapiens
  misc_RNA (1)...(19): siRNA sense strand
uaagauacaucgucaaucc

SEQ ID NO: 726792 - RNA, 19 nt, Homo sapiens
  misc_RNA (1)...(19): siRNA sense strand
ggaaaguacaauuggguaa

SEQ ID NO: 726793 - RNA, 19 nt, Homo sapiens
  misc_RNA (1)...(19): siRNA sense strand
gauucucucuucaguguug

SEQ ID NO: 726794 - RNA, 19 nt, Homo sapiens
  misc_RNA (1)...(19): siRNA sense strand
gaaugacaauagcccaguu

SEQ ID NO: 726795 - RNA, 19 nt, Homo sapiens
  misc_RNA (1)...(19): siRNA sense strand
ggcaagugaugguggauug

SEQ ID NO: 726796 - RNA, 19 nt, Homo sapiens
  misc_RNA (1)...(19): siRNA sense strand
ucucuucaguguuguaauu

SEQ ID NO: 726797 - RNA, 19 nt, Homo sapiens
  misc_RNA (1)...(19): siRNA sense strand
gagacaagaugccacaacu

SEQ ID NO: 726798 - RNA, 19 nt, Homo sapiens
  misc_RNA (1)...(19): siRNA sense strand
acacuagaccuuccuauug

SEQ ID NO: 726799 - RNA, 19 nt, Homo sapiens
  misc_RNA (1)...(19): siRNA sense strand
gaguguuggucaaagcuaa

SEQ ID NO: 726800 - RNA, 19 nt, Homo sapiens
  misc_RNA (1)...(19): siRNA sense strand
ugacaaccacccagucuuu

SEQ ID NO: 726801 - RNA, 19 nt, Homo sapiens
  misc_RNA (1)...(19): siRNA sense strand
guacaagaccggagaugug

SEQ ID NO: 726802 - RNA, 19 nt, Homo sapiens
  misc_RNA (1)...(19): siRNA sense strand
cagccugccuuccaaauuc

SEQ ID NO: 726803 - RNA, 19 nt, Homo sapiens
  misc_RNA (1)...(19): siRNA sense strand
uuacagaccuugguuuaca

SEQ ID NO: 726804 - RNA, 19 nt, Homo sapiens
  misc_RNA (1)...(19): siRNA sense strand
gagguucguuacagcauug

SEQ ID NO: 726805 - RNA, 19 nt, Homo sapiens
  misc_RNA (1)...(19): siRNA sense strand
ugacaugcuucacagauca

SEQ ID NO: 726806 - RNA, 19 nt, Homo sapiens
  misc_RNA (1)...(19): siRNA sense strand
aaauugcucucauaacugu

SEQ ID NO: 726807 - RNA, 19 nt, Homo sapiens
  misc_RNA (1)...(19): siRNA sense strand
cagcaacaguuaucaacau

SEQ ID NO: 726808 - RNA, 19 nt, Homo sapiens
  misc_RNA (1)...(19): siRNA sense strand
ggaggaaacacaagagauc

SEQ ID NO: 726809 - RNA, 19 nt, Homo sapiens
  misc_RNA (1)...(19): siRNA sense strand
ugaggauggugguagagua

SEQ ID NO: 726810 - RNA, 19 nt, Homo sapiens
  misc_RNA (1)...(19): siRNA sense strand
uaaggccaguauucaguaa

SEQ ID NO: 726811 - RNA, 19 nt, Homo sapiens
  misc_RNA (1)...(19): siRNA sense strand
ggagaugugccacugauuc

SEQ ID NO: 726812 - RNA, 19 nt, Homo sapiens
  misc_RNA (1)...(19): siRNA sense strand
ucaaagaaccacuggauag

SEQ ID NO: 726813 - RNA, 19 nt, Homo sapiens
  misc_RNA (1)...(19): siRNA sense strand
ggaguuagauagggaagag

SEQ ID NO: 726814 - RNA, 19 nt, Homo sapiens
  misc_RNA (1)...(19): siRNA sense strand
augcuacacugauuaauga

SEQ ID NO: 726815 - RNA, 19 nt, Homo sapiens
  misc_RNA (1)...(19): siRNA sense strand
gguagaguaucacguucuu

SEQ ID NO: 726816 - RNA, 19 nt, Homo sapiens
  misc_RNA (1)...(19): siRNA sense strand
gauaggcgacuuguugaaa

SEQ ID NO: 726817 - RNA, 19 nt, Homo sapiens
  misc_RNA (1)...(19): siRNA sense strand
gcugauguauccucaccaa

SEQ ID NO: 726818 - RNA, 19 nt, Homo sapiens
  misc_RNA (1)...(19): siRNA sense strand
ucaaucuguucgugaauga

SEQ ID NO: 726819 - RNA, 19 nt, Homo sapiens
  misc_RNA (1)...(19): siRNA sense strand
ucgcauugaucgugagaaa

SEQ ID NO: 726820 - RNA, 19 nt, Homo sapiens
  misc_RNA (1)...(19): siRNA sense strand
guaacuacaccuacuacuu

SEQ ID NO: 726821 - RNA, 19 nt, Homo sapiens
  misc_RNA (1)...(19): siRNA sense strand
ccaaugcuacacugauuaa

SEQ ID NO: 726822 - RNA, 19 nt, Homo sapiens
  misc_RNA (1)...(19): siRNA sense strand
aaacaggcaacauaacauu

SEQ ID NO: 726823 - RNA, 19 nt, Homo sapiens
  misc_RNA (1)...(19): siRNA sense strand
gaaacaggcaacauaacau

SEQ ID NO: 726824 - RNA, 19 nt, Homo sapiens
  misc_RNA (1)...(19): siRNA sense strand
ggacuaaucacuguaacug

SEQ ID NO: 726825 - RNA, 19 nt, Homo sapiens
  misc_RNA (1)...(19): siRNA sense strand
caaaauugcucucauaacu

SEQ ID NO: 726826 - RNA, 19 nt, Homo sapiens
  misc_RNA (1)...(19): siRNA sense strand
acacaguuguucuuucaga

SEQ ID NO: 726827 - RNA, 19 nt, Homo sapiens
  misc_RNA (1)...(19): siRNA sense strand
ugaagucaguauaccagaa

SEQ ID NO: 726828 - RNA, 19 nt, Homo sapiens
  misc_RNA (1)...(19): siRNA sense strand
caucgucaauccugucaau

SEQ ID NO: 726829 - RNA, 19 nt, Homo sapiens
  misc_RNA (1)...(19): siRNA sense strand
ccaaaguaaccauaaaugu

SEQ ID NO: 726830 - RNA, 19 nt, Homo sapiens
  misc_RNA (1)...(19): siRNA sense strand
ggauggugguagaguauca

SEQ ID NO: 726831 - RNA, 19 nt, Homo sapiens
  misc_RNA (1)...(19): siRNA sense strand
caaugucacagucuuugua

SEQ ID NO: 726832 - RNA, 19 nt, Homo sapiens
  misc_RNA (1)...(19): siRNA sense strand
gcagacagugggccuaaug

SEQ ID NO: 726833 - RNA, 19 nt, Homo sapiens
  misc_RNA (1)...(19): siRNA sense strand
aaacuaaggcagaugaugu

SEQ ID NO: 726834 - RNA, 19 nt, Homo sapiens
  misc_RNA (1)...(19): siRNA sense strand
auacugagauagcugaugu

SEQ ID NO: 726835 - RNA, 19 nt, Homo sapiens
  misc_RNA (1)...(19): siRNA sense strand
gugccaaaguaaccauaaa

SEQ ID NO: 726836 - RNA, 19 nt, Homo sapiens
  misc_RNA (1)...(19): siRNA sense strand
guaggacuaaucacuguaa

SEQ ID NO: 726837 - RNA, 19 nt, Homo sapiens
  misc_RNA (1)...(19): siRNA sense strand
gaaauuaugugcugguauc

SEQ ID NO: 726838 - RNA, 19 nt, Homo sapiens
  misc_RNA (1)...(19): siRNA sense strand
caagagaucuguuugcaau

SEQ ID NO: 726839 - RNA, 19 nt, Homo sapiens
  misc_RNA (1)...(19): siRNA sense strand
gaugguggcuuuccucaaa

SEQ ID NO: 726840 - RNA, 19 nt, Homo sapiens
  misc_RNA (1)...(19): siRNA sense strand
ggagaaaugugauguuaca

SEQ ID NO: 726841 - RNA, 19 nt, Homo sapiens
  misc_RNA (1)...(19): siRNA sense strand
caccauaacugucguugua

SEQ ID NO: 726842 - RNA, 19 nt, Homo sapiens
  misc_RNA (1)...(19): siRNA sense strand
gcaaugcucuucaucaaag

SEQ ID NO: 726843 - RNA, 19 nt, Homo sapiens
  misc_RNA (1)...(19): siRNA sense strand
ggagacaauucugcaguua

SEQ ID NO: 726844 - RNA, 19 nt, Homo sapiens
  misc_RNA (1)...(19): siRNA sense strand
uaacuacaccuacuacuuu

SEQ ID NO: 726845 - RNA, 19 nt, Homo sapiens
  misc_RNA (1)...(19): siRNA sense strand
ugaaagaccuuaacuuguc

SEQ ID NO: 726846 - RNA, 19 nt, Homo sapiens
  misc_RNA (1)...(19): siRNA sense strand
ugaagaaacuagauagaga

SEQ ID NO: 726847 - RNA, 19 nt, Homo sapiens
  misc_RNA (1)...(19): siRNA sense strand
ccaagaaacaggcaacaua

SEQ ID NO: 726848 - RNA, 19 nt, Homo sapiens
  misc_RNA (1)...(19): siRNA sense strand
gaaaguaaagguugaagau

SEQ ID NO: 726849 - RNA, 19 nt, Homo sapiens
  misc_RNA (1)...(19): siRNA sense strand
cagaugauguugacaguga

SEQ ID NO: 726850 - RNA, 19 nt, Homo sapiens
  misc_RNA (1)...(19): siRNA sense strand
caagaaacaggcaacauaa

SEQ ID NO: 726851 - RNA, 19 nt, Homo sapiens
  misc_RNA (1)...(19): siRNA sense strand
gcaguuacgcucuccauuu

SEQ ID NO: 726852 - RNA, 19 nt, Homo sapiens
  misc_RNA (1)...(19): siRNA sense strand
gagauuauuucaccucaau

SEQ ID NO: 726853 - RNA, 19 nt, Homo sapiens
  misc_RNA (1)...(19): siRNA sense strand
ccacuggacuuaucacaau

SEQ ID NO: 726854 - RNA, 19 nt, Homo sapiens
  misc_RNA (1)...(19): siRNA sense strand
gaaacagagucacacuaga

SEQ ID NO: 726855 - RNA, 19 nt, Homo sapiens
  misc_RNA (1)...(19): siRNA sense strand
gaccaaugcuacacugauu

SEQ ID NO: 726856 - RNA, 19 nt, Homo sapiens
  misc_RNA (1)...(19): siRNA sense strand
gcauugaucgugagaaauu

SEQ ID NO: 726857 - RNA, 19 nt, Homo sapiens
  misc_RNA (1)...(19): siRNA sense strand
gauguauccucaccaacua

SEQ ID NO: 726858 - RNA, 19 nt, Homo sapiens
  misc_RNA (1)...(19): siRNA sense strand
ggaauaaacggaguucaaa

SEQ ID NO: 726859 - RNA, 19 nt, Homo sapiens
  misc_RNA (1)...(19): siRNA sense strand
caacauugccaggagauua

SEQ ID NO: 726860 - RNA, 19 nt, Homo sapiens
  misc_RNA (1)...(19): siRNA sense strand
gaagaaacuagauagagaa

SEQ ID NO: 726861 - RNA, 19 nt, Homo sapiens
  misc_RNA (1)...(19): siRNA sense strand
caucacugcuguaguaaga

SEQ ID NO: 726862 - RNA, 19 nt, Homo sapiens
  misc_RNA (1)...(19): siRNA sense strand
uuucaucacugcuguagua

SEQ ID NO: 726863 - RNA, 19 nt, Homo sapiens
  misc_RNA (1)...(19): siRNA sense strand
uaacugauccugauuaugg

SEQ ID NO: 726864 - RNA, 19 nt, Homo sapiens
  misc_RNA (1)...(19): siRNA sense strand
caacaguuaucaacauauc

SEQ ID NO: 726865 - RNA, 19 nt, Homo sapiens
  misc_RNA (1)...(19): siRNA sense strand
ugacacaguuguucuuuca

SEQ ID NO: 726866 - RNA, 19 nt, Homo sapiens
  misc_RNA (1)...(19): siRNA sense strand
gguugaagaugguggcuuu

SEQ ID NO: 726867 - RNA, 19 nt, Homo sapiens
  misc_RNA (1)...(19): siRNA sense strand
gagaaauuaugugcuggua

SEQ ID NO: 726868 - RNA, 19 nt, Homo sapiens
  misc_RNA (1)...(19): siRNA sense strand
ggugucauccgaccaaaua

SEQ ID NO: 726869 - RNA, 19 nt, Homo sapiens
  misc_RNA (1)...(19): siRNA sense strand
caauggugcugguaaaugu

SEQ ID NO: 726870 - RNA, 19 nt, Homo sapiens
  misc_RNA (1)...(19): siRNA sense strand
ggacuuaucacaaucaaag

SEQ ID NO: 726871 - RNA, 19 nt, Homo sapiens
  misc_RNA (1)...(19): siRNA sense strand
ccacuucucuuucagcaau

SEQ ID NO: 726872 - RNA, 19 nt, Homo sapiens
  misc_RNA (1)...(19): siRNA sense strand
ucauaacugugacggauaa

SEQ ID NO: 726873 - RNA, 19 nt, Homo sapiens
  misc_RNA (1)...(19): siRNA sense strand
ccauaaaugugguugaugu

SEQ ID NO: 726874 - RNA, 19 nt, Homo sapiens
  misc_RNA (1)...(19): siRNA sense strand
gacaagaugccacaacuga

SEQ ID NO: 726875 - RNA, 19 nt, Homo sapiens
  misc_RNA (1)...(19): siRNA sense strand
ggaaacagagucacacuag

SEQ ID NO: 726876 - RNA, 19 nt, Homo sapiens
  misc_RNA (1)...(19): siRNA sense strand
ugacagugauggaaacaga

SEQ ID NO: 726877 - RNA, 19 nt, Homo sapiens
  misc_RNA (1)...(19): siRNA sense strand
caaaguaaccauaaaugug

SEQ ID NO: 726878 - RNA, 19 nt, Homo sapiens
  misc_RNA (1)...(19): siRNA sense strand
ccucaaagauccaguacug

SEQ ID NO: 726879 - RNA, 19 nt, Homo sapiens
  misc_RNA (1)...(19): siRNA sense strand
acaguggucuuucagguaa

SEQ ID NO: 726880 - RNA, 19 nt, Homo sapiens
  misc_RNA (1)...(19): siRNA sense strand
ucagaucccuacagcguuu

SEQ ID NO: 726881 - RNA, 19 nt, Homo sapiens
  misc_RNA (1)...(19): siRNA sense strand
cacuagaccuuccuauuga

SEQ ID NO: 726882 - RNA, 19 nt, Homo sapiens
  misc_RNA (1)...(19): siRNA sense strand
gaaaacaggcagaugauaa

SEQ ID NO: 726883 - RNA, 19 nt, Homo sapiens
  misc_RNA (1)...(19): siRNA sense strand
caagaugccacaacugauu

SEQ ID NO: 726884 - RNA, 19 nt, Homo sapiens
  misc_RNA (1)...(19): siRNA sense strand
caagaacugccucucgaua

SEQ ID NO: 726885 - RNA, 19 nt, Homo sapiens
  misc_RNA (1)...(19): siRNA sense strand
caaugacacuggcaugaau

SEQ ID NO: 726886 - RNA, 19 nt, Homo sapiens
  misc_RNA (1)...(19): siRNA sense strand
gaagucaguauaccagaaa

SEQ ID NO: 726887 - RNA, 19 nt, Homo sapiens
  misc_RNA (1)...(19): siRNA sense strand
gggaagagaaggauaccua

SEQ ID NO: 726888 - RNA, 19 nt, Homo sapiens
  misc_RNA (1)...(19): siRNA sense strand
ugccacagaugcugacaua

SEQ ID NO: 726889 - RNA, 19 nt, Homo sapiens
  misc_RNA (1)...(19): siRNA sense strand
ccuuaaggcugcucagaaa

SEQ ID NO: 726890 - RNA, 19 nt, Homo sapiens
  misc_RNA (1)...(19): siRNA sense strand
guugaaagaccuuaacuug

SEQ ID NO: 726891 - RNA, 19 nt, Homo sapiens
  misc_RNA (1)...(19): siRNA sense strand
uaagauacaucgucaaucc

SEQ ID NO: 726892 - RNA, 19 nt, Homo sapiens
  misc_RNA (1)...(19): siRNA sense strand
ggaaaguacaauuggguaa

SEQ ID NO: 726893 - RNA, 19 nt, Homo sapiens
  misc_RNA (1)...(19): siRNA sense strand
gauucucucuucaguguug

SEQ ID NO: 726894 - RNA, 19 nt, Homo sapiens
  misc_RNA (1)...(19): siRNA sense strand
gaaugacaauagcccaguu

SEQ ID NO: 726895 - RNA, 19 nt, Homo sapiens
  misc_RNA (1)...(19): siRNA sense strand
ggcaagugaugguggauug

SEQ ID NO: 726896 - RNA, 19 nt, Homo sapiens
  misc_RNA (1)...(19): siRNA sense strand
ucucuucaguguuguaauu

SEQ ID NO: 726897 - RNA, 19 nt, Homo sapiens
  misc_RNA (1)...(19): siRNA sense strand
gagacaagaugccacaacu

SEQ ID NO: 726898 - RNA, 19 nt, Homo sapiens
  misc_RNA (1)...(19): siRNA sense strand
acacuagaccuuccuauug

SEQ ID NO: 726899 - RNA, 19 nt, Homo sapiens
  misc_RNA (1)...(19): siRNA sense strand
gaguguuggucaaagcuaa

SEQ ID NO: 726900 - RNA, 19 nt, Homo sapiens
  misc_RNA (1)...(19): siRNA sense strand
ugacaaccacccagucuuu

SEQ ID NO: 726901 - RNA, 19 nt, Homo sapiens
  misc_RNA (1)...(19): siRNA sense strand
guacaagaccggagaugug

SEQ ID NO: 726902 - RNA, 19 nt, Homo sapiens
  misc_RNA (1)...(19): siRNA sense strand
cagccugccuuccaaauuc

SEQ ID NO: 726903 - RNA, 19 nt, Homo sapiens
  misc_RNA (1)...(19): siRNA sense strand
uuacagaccuugguuuaca

SEQ ID NO: 726904 - RNA, 19 nt, Homo sapiens
  misc_RNA (1)...(19): siRNA sense strand
gagguucguuacagcauug

SEQ ID NO: 726905 - RNA, 19 nt, Homo sapiens
  misc_RNA (1)...(19): siRNA sense strand
ugacaugcuucacagauca

SEQ ID NO: 726906 - RNA, 19 nt, Homo sapiens
  misc_RNA (1)...(19): siRNA sense strand
aaauugcucucauaacugu

SEQ ID NO: 726907 - RNA, 19 nt, Homo sapiens
  misc_RNA (1)...(19): siRNA sense strand
cagcaacaguuaucaacau

SEQ ID NO: 726908 - RNA, 19 nt, Homo sapiens
  misc_RNA (1)...(19): siRNA sense strand
ggaggaaacacaagagauc

SEQ ID NO: 726909 - RNA, 19 nt, Homo sapiens
  misc_RNA (1)...(19): siRNA sense strand
ugaggauggugguagagua

SEQ ID NO: 726910 - RNA, 19 nt, Homo sapiens
  misc_RNA (1)...(19): siRNA sense strand
uaaggccaguauucaguaa

SEQ ID NO: 726911 - RNA, 19 nt, Homo sapiens
  misc_RNA (1)...(19): siRNA sense strand
ggagaugugccacugauuc

SEQ ID NO: 726912 - RNA, 19 nt, Homo sapiens
  misc_RNA (1)...(19): siRNA sense strand
ucaaagaaccacuggauag

SEQ ID NO: 726913 - RNA, 19 nt, Homo sapiens
  misc_RNA (1)...(19): siRNA sense strand
ggaguuagauagggaagag

SEQ ID NO: 726914 - RNA, 19 nt, Homo sapiens
  misc_RNA (1)...(19): siRNA sense strand
augcuacacugauuaauga

SEQ ID NO: 726915 - RNA, 19 nt, Homo sapiens
  misc_RNA (1)...(19): siRNA sense strand
gguagaguaucacguucuu

SEQ ID NO: 726916 - RNA, 19 nt, Homo sapiens
  misc_RNA (1)...(19): siRNA sense strand
gauaggcgacuuguugaaa

SEQ ID NO: 726917 - RNA, 19 nt, Homo sapiens
  misc_RNA (1)...(19): siRNA sense strand
gcugauguauccucaccaa

SEQ ID NO: 726918 - RNA, 19 nt, Homo sapiens
  misc_RNA (1)...(19): siRNA sense strand
ucaaucuguucgugaauga

SEQ ID NO: 726919 - RNA, 19 nt, Homo sapiens
  misc_RNA (1)...(19): siRNA sense strand
ucgcauugaucgugagaaa

SEQ ID NO: 726920 - RNA, 19 nt, Homo sapiens
  misc_RNA (1)...(19): siRNA sense strand
guaacuacaccuacuacuu

SEQ ID NO: 726921 - RNA, 19 nt, Homo sapiens
  misc_RNA (1)...(19): siRNA sense strand
ccaaugcuacacugauuaa

SEQ ID NO: 726922 - RNA, 19 nt, Homo sapiens
  misc_RNA (1)...(19): siRNA sense strand
aaacaggcaacauaacauu

SEQ ID NO: 726923 - RNA, 19 nt, Homo sapiens
  misc_RNA (1)...(19): siRNA sense strand
gaaacaggcaacauaacau

SEQ ID NO: 726924 - RNA, 19 nt, Homo sapiens
  misc_RNA (1)...(19): siRNA sense strand
ggacuaaucacuguaacug

SEQ ID NO: 726925 - RNA, 19 nt, Homo sapiens
  misc_RNA (1)...(19): siRNA sense strand
caaaauugcucucauaacu

SEQ ID NO: 726926 - RNA, 19 nt, Homo sapiens
  misc_RNA (1)...(19): siRNA sense strand
acacaguuguucuuucaga

SEQ ID NO: 726927 - RNA, 19 nt, Homo sapiens
  misc_RNA (1)...(19): siRNA sense strand
ugaagucaguauaccagaa

SEQ ID NO: 726928 - RNA, 19 nt, Homo sapiens
  misc_RNA (1)...(19): siRNA sense strand
caucgucaauccugucaau

SEQ ID NO: 726929 - RNA, 19 nt, Homo sapiens
  misc_RNA (1)...(19): siRNA sense strand
ccaaaguaaccauaaaugu

SEQ ID NO: 726930 - RNA, 19 nt, Homo sapiens
  misc_RNA (1)...(19): siRNA sense strand
ggauggugguagaguauca

SEQ ID NO: 726931 - RNA, 19 nt, Homo sapiens
  misc_RNA (1)...(19): siRNA sense strand
caaugucacagucuuugua

SEQ ID NO: 726932 - RNA, 19 nt, Homo sapiens
  misc_RNA (1)...(19): siRNA sense strand
gcagacagugggccuaaug

SEQ ID NO: 726933 - RNA, 19 nt, Homo sapiens
  misc_RNA (1)...(19): siRNA sense strand
aaacuaaggcagaugaugu

SEQ ID NO: 726934 - RNA, 19 nt, Homo sapiens
  misc_RNA (1)...(19): siRNA sense strand
auacugagauagcugaugu

SEQ ID NO: 726935 - RNA, 19 nt, Homo sapiens
  misc_RNA (1)...(19): siRNA sense strand
gugccaaaguaaccauaaa

SEQ ID NO: 726936 - RNA, 19 nt, Homo sapiens
  misc_RNA (1)...(19): siRNA sense strand
guaggacuaaucacuguaa

SEQ ID NO: 726937 - RNA, 19 nt, Homo sapiens
  misc_RNA (1)...(19): siRNA sense strand
gaaauuaugugcugguauc

SEQ ID NO: 726938 - RNA, 19 nt, Homo sapiens
  misc_RNA (1)...(19): siRNA sense strand
caagagaucuguuugcaau

SEQ ID NO: 726939 - RNA, 19 nt, Homo sapiens
  misc_RNA (1)...(19): siRNA sense strand
gaugguggcuuuccucaaa

SEQ ID NO: 726940 - RNA, 19 nt, Homo sapiens
  misc_RNA (1)...(19): siRNA sense strand
ggagaaaugugauguuaca

SEQ ID NO: 726941 - RNA, 19 nt, Homo sapiens
  misc_RNA (1)...(19): siRNA sense strand
caccauaacugucguugua

SEQ ID NO: 726942 - RNA, 19 nt, Homo sapiens
  misc_RNA (1)...(19): siRNA sense strand
gcaaugcucuucaucaaag

SEQ ID NO: 726943 - RNA, 19 nt, Homo sapiens
  misc_RNA (1)...(19): siRNA sense strand
ggagacaauucugcaguua

SEQ ID NO: 726944 - RNA, 19 nt, Homo sapiens
  misc_RNA (1)...(19): siRNA sense strand
uaacuacaccuacuacuuu

SEQ ID NO: 726945 - RNA, 19 nt, Homo sapiens
  misc_RNA (1)...(19): siRNA sense strand
ugaaagaccuuaacuuguc

SEQ ID NO: 726946 - RNA, 19 nt, Homo sapiens
  misc_RNA (1)...(19): siRNA sense strand
ugaagaaacuagauagaga

SEQ ID NO: 726947 - RNA, 19 nt, Homo sapiens
  misc_RNA (1)...(19): siRNA sense strand
ccaagaaacaggcaacaua

SEQ ID NO: 726948 - RNA, 19 nt, Homo sapiens
  misc_RNA (1)...(19): siRNA sense strand
gaaaguaaagguugaagau

SEQ ID NO: 726949 - RNA, 19 nt, Homo sapiens
  misc_RNA (1)...(19): siRNA sense strand
cagaugauguugacaguga

SEQ ID NO: 726950 - RNA, 19 nt, Homo sapiens
  misc_RNA (1)...(19): siRNA sense strand
caagaaacaggcaacauaa

SEQ ID NO: 726951 - RNA, 19 nt, Homo sapiens
  misc_RNA (1)...(19): siRNA sense strand
gcaguuacgcucuccauuu

SEQ ID NO: 726952 - RNA, 19 nt, Homo sapiens
  misc_RNA (1)...(19): siRNA sense strand
gagauuauuucaccucaau

SEQ ID NO: 726953 - RNA, 19 nt, Homo sapiens
  misc_RNA (1)...(19): siRNA sense strand
ccacuggacuuaucacaau

SEQ ID NO: 726954 - RNA, 19 nt, Homo sapiens
  misc_RNA (1)...(19): siRNA sense strand
gaaacagagucacacuaga

SEQ ID NO: 726955 - RNA, 19 nt, Homo sapiens
  misc_RNA (1)...(19): siRNA sense strand
gaccaaugcuacacugauu

SEQ ID NO: 726956 - RNA, 19 nt, Homo sapiens
  misc_RNA (1)...(19): siRNA sense strand
gcauugaucgugagaaauu

SEQ ID NO: 726957 - RNA, 19 nt, Homo sapiens
  misc_RNA (1)...(19): siRNA sense strand
gauguauccucaccaacua

SEQ ID NO: 726958 - RNA, 19 nt, Homo sapiens
  misc_RNA (1)...(19): siRNA sense strand
ggaauaaacggaguucaaa

SEQ ID NO: 726959 - RNA, 19 nt, Homo sapiens
  misc_RNA (1)...(19): siRNA sense strand
caacauugccaggagauua

SEQ ID NO: 726960 - RNA, 19 nt, Homo sapiens
  misc_RNA (1)...(19): siRNA sense strand
gaagaaacuagauagagaa

SEQ ID NO: 726961 - RNA, 19 nt, Homo sapiens
  misc_RNA (1)...(19): siRNA sense strand
caucacugcuguaguaaga

SEQ ID NO: 726962 - RNA, 19 nt, Homo sapiens
  misc_RNA (1)...(19): siRNA sense strand
uuucaucacugcuguagua

SEQ ID NO: 726963 - RNA, 19 nt, Homo sapiens
  misc_RNA (1)...(19): siRNA sense strand
uaacugauccugauuaugg

SEQ ID NO: 726964 - RNA, 19 nt, Homo sapiens
  misc_RNA (1)...(19): siRNA sense strand
caacaguuaucaacauauc

SEQ ID NO: 726965 - RNA, 19 nt, Homo sapiens
  misc_RNA (1)...(19): siRNA sense strand
ugacacaguuguucuuuca

SEQ ID NO: 726966 - RNA, 19 nt, Homo sapiens
  misc_RNA (1)...(19): siRNA sense strand
gguugaagaugguggcuuu

SEQ ID NO: 726967 - RNA, 19 nt, Homo sapiens
  misc_RNA (1)...(19): siRNA sense strand
gagaaauuaugugcuggua

SEQ ID NO: 726968 - RNA, 19 nt, Homo sapiens
  misc_RNA (1)...(19): siRNA sense strand
ggugucauccgaccaaaua

SEQ ID NO: 726969 - RNA, 19 nt, Homo sapiens
  misc_RNA (1)...(19): siRNA sense strand
caauggugcugguaaaugu

SEQ ID NO: 726970 - RNA, 19 nt, Homo sapiens
  misc_RNA (1)...(19): siRNA sense strand
ggacuuaucacaaucaaag

SEQ ID NO: 726971 - RNA, 19 nt, Homo sapiens
  misc_RNA (1)...(19): siRNA sense strand
ccacuucucuuucagcaau

SEQ ID NO: 726972 - RNA, 19 nt, Homo sapiens
  misc_RNA (1)...(19): siRNA sense strand
ucauaacugugacggauaa

SEQ ID NO: 726973 - RNA, 19 nt, Homo sapiens
  misc_RNA (1)...(19): siRNA sense strand
ccauaaaugugguugaugu

SEQ ID NO: 726974 - RNA, 19 nt, Homo sapiens
  misc_RNA (1)...(19): siRNA sense strand
gacaagaugccacaacuga

SEQ ID NO: 726975 - RNA, 19 nt, Homo sapiens
  misc_RNA (1)...(19): siRNA sense strand
ggaaacagagucacacuag

SEQ ID NO: 726976 - RNA, 19 nt, Homo sapiens
  misc_RNA (1)...(19): siRNA sense strand
ugacagugauggaaacaga

SEQ ID NO: 726977 - RNA, 19 nt, Homo sapiens
  misc_RNA (1)...(19): siRNA sense strand
caaaguaaccauaaaugug

SEQ ID NO: 726978 - RNA, 19 nt, Homo sapiens
  misc_RNA (1)...(19): siRNA sense strand
ccucaaagauccaguacug

SEQ ID NO: 726979 - RNA, 19 nt, Homo sapiens
  misc_RNA (1)...(19): siRNA sense strand
acaguggucuuucagguaa

SEQ ID NO: 726980 - RNA, 19 nt, Homo sapiens
  misc_RNA (1)...(19): siRNA sense strand
ucagaucccuacagcguuu

SEQ ID NO: 726981 - RNA, 19 nt, Homo sapiens
  misc_RNA (1)...(19): siRNA sense strand
cacuagaccuuccuauuga

SEQ ID NO: 726982 - RNA, 19 nt, Homo sapiens
  misc_RNA (1)...(19): siRNA sense strand
gaaaacaggcagaugauaa

SEQ ID NO: 726983 - RNA, 19 nt, Homo sapiens
  misc_RNA (1)...(19): siRNA sense strand
caagaugccacaacugauu

SEQ ID NO: 726984 - RNA, 19 nt, Homo sapiens
  misc_RNA (1)...(19): siRNA sense strand
caagaacugccucucgaua

SEQ ID NO: 726985 - RNA, 19 nt, Homo sapiens
  misc_RNA (1)...(19): siRNA sense strand
caaugacacuggcaugaau

SEQ ID NO: 726986 - RNA, 19 nt, Homo sapiens
  misc_RNA (1)...(19): siRNA sense strand
gaagucaguauaccagaaa

SEQ ID NO: 726987 - RNA, 19 nt, Homo sapiens
  misc_RNA (1)...(19): siRNA sense strand
gggaagagaaggauaccua

SEQ ID NO: 726988 - RNA, 19 nt, Homo sapiens
  misc_RNA (1)...(19): siRNA sense strand
ugccacagaugcugacaua

SEQ ID NO: 726989 - RNA, 19 nt, Homo sapiens
  misc_RNA (1)...(19): siRNA sense strand
ccuuaaggcugcucagaaa

SEQ ID NO: 726990 - RNA, 19 nt, Homo sapiens
  misc_RNA (1)...(19): siRNA sense strand
guugaaagaccuuaacuug

SEQ ID NO: 726991 - RNA, 19 nt, Homo sapiens
  misc_RNA (1)...(19): siRNA sense strand
uaagauacaucgucaaucc

SEQ ID NO: 726992 - RNA, 19 nt, Homo sapiens
  misc_RNA (1)...(19): siRNA sense strand
ggaaaguacaauuggguaa

SEQ ID NO: 726993 - RNA, 19 nt, Homo sapiens
  misc_RNA (1)...(19): siRNA sense strand
gauucucucuucaguguug

SEQ ID NO: 726994 - RNA, 19 nt, Homo sapiens
  misc_RNA (1)...(19): siRNA sense strand
gaaugacaauagcccaguu

SEQ ID NO: 726995 - RNA, 19 nt, Homo sapiens
  misc_RNA (1)...(19): siRNA sense strand
ggcaagugaugguggauug

SEQ ID NO: 726996 - RNA, 19 nt, Homo sapiens
  misc_RNA (1)...(19): siRNA sense strand
ucucuucaguguuguaauu

SEQ ID NO: 726997 - RNA, 19 nt, Homo sapiens
  misc_RNA (1)...(19): siRNA sense strand
gagacaagaugccacaacu

SEQ ID NO: 726998 - RNA, 19 nt, Homo sapiens
  misc_RNA (1)...(19): siRNA sense strand
acacuagaccuuccuauug

SEQ ID NO: 726999 - RNA, 19 nt, Homo sapiens
  misc_RNA (1)...(19): siRNA sense strand
gaguguuggucaaagcuaa

SEQ ID NO: 727000 - RNA, 19 nt, Homo sapiens
  misc_RNA (1)...(19): siRNA sense strand
ugacaaccacccagucuuu

SEQ ID NO: 727001 - RNA, 19 nt, Homo sapiens
  misc_RNA (1)...(19): siRNA sense strand
guacaagaccggagaugug

SEQ ID NO: 727002 - RNA, 19 nt, Homo sapiens
  misc_RNA (1)...(19): siRNA sense strand
cagccugccuuccaaauuc

SEQ ID NO: 727003 - RNA, 19 nt, Homo sapiens
  misc_RNA (1)...(19): siRNA sense strand
uuacagaccuugguuuaca

SEQ ID NO: 727004 - RNA, 19 nt, Homo sapiens
  misc_RNA (1)...(19): siRNA sense strand
gagguucguuacagcauug

SEQ ID NO: 727005 - RNA, 19 nt, Homo sapiens
  misc_RNA (1)...(19): siRNA sense strand
ugacaugcuucacagauca

SEQ ID NO: 727006 - RNA, 19 nt, Homo sapiens
  misc_RNA (1)...(19): siRNA sense strand
aaauugcucucauaacugu

SEQ ID NO: 727007 - RNA, 19 nt, Homo sapiens
  misc_RNA (1)...(19): siRNA sense strand
cagcaacaguuaucaacau

SEQ ID NO: 727008 - RNA, 19 nt, Homo sapiens
  misc_RNA (1)...(19): siRNA sense strand
ggaggaaacacaagagauc

SEQ ID NO: 727009 - RNA, 19 nt, Homo sapiens
  misc_RNA (1)...(19): siRNA sense strand
ugaggauggugguagagua

SEQ ID NO: 727010 - RNA, 19 nt, Homo sapiens
  misc_RNA (1)...(19): siRNA sense strand
uaaggccaguauucaguaa

SEQ ID NO: 727011 - RNA, 19 nt, Homo sapiens
  misc_RNA (1)...(19): siRNA sense strand
ggagaugugccacugauuc

SEQ ID NO: 727012 - RNA, 19 nt, Homo sapiens
  misc_RNA (1)...(19): siRNA sense strand
ucaaagaaccacuggauag

SEQ ID NO: 727013 - RNA, 19 nt, Homo sapiens
  misc_RNA (1)...(19): siRNA sense strand
ggaguuagauagggaagag

SEQ ID NO: 727014 - RNA, 19 nt, Homo sapiens
  misc_RNA (1)...(19): siRNA sense strand
augcuacacugauuaauga

SEQ ID NO: 727015 - RNA, 19 nt, Homo sapiens
  misc_RNA (1)...(19): siRNA sense strand
gguagaguaucacguucuu

SEQ ID NO: 727016 - RNA, 19 nt, Homo sapiens
  misc_RNA (1)...(19): siRNA sense strand
gauaggcgacuuguugaaa

SEQ ID NO: 727017 - RNA, 19 nt, Homo sapiens
  misc_RNA (1)...(19): siRNA sense strand
gcugauguauccucaccaa

SEQ ID NO: 727018 - RNA, 19 nt, Homo sapiens
  misc_RNA (1)...(19): siRNA sense strand
ucaaucuguucgugaauga

SEQ ID NO: 727019 - RNA, 19 nt, Homo sapiens
  misc_RNA (1)...(19): siRNA sense strand
ucgcauugaucgugagaaa

SEQ ID NO: 727020 - RNA, 19 nt, Homo sapiens
  misc_RNA (1)...(19): siRNA sense strand
guaacuacaccuacuacuu

SEQ ID NO: 727021 - RNA, 19 nt, Homo sapiens
  misc_RNA (1)...(19): siRNA sense strand
ccaaugcuacacugauuaa

SEQ ID NO: 727022 - RNA, 19 nt, Homo sapiens
  misc_RNA (1)...(19): siRNA sense strand
aaacaggcaacauaacauu

SEQ ID NO: 727023 - RNA, 19 nt, Homo sapiens
  misc_RNA (1)...(19): siRNA sense strand
gaaacaggcaacauaacau

SEQ ID NO: 727024 - RNA, 19 nt, Homo sapiens
  misc_RNA (1)...(19): siRNA sense strand
ggacuaaucacuguaacug

SEQ ID NO: 727025 - RNA, 19 nt, Homo sapiens
  misc_RNA (1)...(19): siRNA sense strand
caaaauugcucucauaacu

SEQ ID NO: 727026 - RNA, 19 nt, Homo sapiens
  misc_RNA (1)...(19): siRNA sense strand
acacaguuguucuuucaga

SEQ ID NO: 727027 - RNA, 19 nt, Homo sapiens
  misc_RNA (1)...(19): siRNA sense strand
ugaagucaguauaccagaa

SEQ ID NO: 727028 - RNA, 19 nt, Homo sapiens
  misc_RNA (1)...(19): siRNA sense strand
caucgucaauccugucaau

SEQ ID NO: 727029 - RNA, 19 nt, Homo sapiens
  misc_RNA (1)...(19): siRNA sense strand
ccaaaguaaccauaaaugu

SEQ ID NO: 727030 - RNA, 19 nt, Homo sapiens
  misc_RNA (1)...(19): siRNA sense strand
ggauggugguagaguauca

SEQ ID NO: 727031 - RNA, 19 nt, Homo sapiens
  misc_RNA (1)...(19): siRNA sense strand
caaugucacagucuuugua

SEQ ID NO: 727032 - RNA, 19 nt, Homo sapiens
  misc_RNA (1)...(19): siRNA sense strand
gcagacagugggccuaaug

SEQ ID NO: 727033 - RNA, 19 nt, Homo sapiens
  misc_RNA (1)...(19): siRNA sense strand
aaacuaaggcagaugaugu

SEQ ID NO: 727034 - RNA, 19 nt, Homo sapiens
  misc_RNA (1)...(19): siRNA sense strand
auacugagauagcugaugu

SEQ ID NO: 727035 - RNA, 19 nt, Homo sapiens
  misc_RNA (1)...(19): siRNA sense strand
gugccaaaguaaccauaaa

SEQ ID NO: 727036 - RNA, 19 nt, Homo sapiens
  misc_RNA (1)...(19): siRNA sense strand
guaggacuaaucacuguaa

SEQ ID NO: 727037 - RNA, 19 nt, Homo sapiens
  misc_RNA (1)...(19): siRNA sense strand
gaaauuaugugcugguauc

SEQ ID NO: 727038 - RNA, 19 nt, Homo sapiens
  misc_RNA (1)...(19): siRNA sense strand
caagagaucuguuugcaau

SEQ ID NO: 727039 - RNA, 19 nt, Homo sapiens
  misc_RNA (1)...(19): siRNA sense strand
gaugguggcuuuccucaaa

SEQ ID NO: 727040 - RNA, 19 nt, Homo sapiens
  misc_RNA (1)...(19): siRNA sense strand
ggagaaaugugauguuaca

SEQ ID NO: 727041 - RNA, 19 nt, Homo sapiens
  misc_RNA (1)...(19): siRNA sense strand
caccauaacugucguugua

SEQ ID NO: 727042 - RNA, 19 nt, Homo sapiens
  misc_RNA (1)...(19): siRNA sense strand
gcaaugcucuucaucaaag

SEQ ID NO: 727043 - RNA, 19 nt, Homo sapiens
  misc_RNA (1)...(19): siRNA sense strand
ggagacaauucugcaguua

SEQ ID NO: 727044 - RNA, 19 nt, Homo sapiens
  misc_RNA (1)...(19): siRNA sense strand
uaacuacaccuacuacuuu

SEQ ID NO: 727045 - RNA, 19 nt, Homo sapiens
  misc_RNA (1)...(19): siRNA sense strand
ugaaagaccuuaacuuguc

SEQ ID NO: 727046 - RNA, 19 nt, Homo sapiens
  misc_RNA (1)...(19): siRNA sense strand
ugaagaaacuagauagaga

SEQ ID NO: 727047 - RNA, 19 nt, Homo sapiens
  misc_RNA (1)...(19): siRNA sense strand
ccaagaaacaggcaacaua

SEQ ID NO: 727048 - RNA, 19 nt, Homo sapiens
  misc_RNA (1)...(19): siRNA sense strand
gaaaguaaagguugaagau

SEQ ID NO: 727049 - RNA, 19 nt, Homo sapiens
  misc_RNA (1)...(19): siRNA sense strand
cagaugauguugacaguga

SEQ ID NO: 727050 - RNA, 19 nt, Homo sapiens
  misc_RNA (1)...(19): siRNA sense strand
caagaaacaggcaacauaa

SEQ ID NO: 727051 - RNA, 19 nt, Homo sapiens
  misc_RNA (1)...(19): siRNA sense strand
gcaguuacgcucuccauuu

SEQ ID NO: 727052 - RNA, 19 nt, Homo sapiens
  misc_RNA (1)...(19): siRNA sense strand
gagauuauuucaccucaau

SEQ ID NO: 727053 - RNA, 19 nt, Homo sapiens
  misc_RNA (1)...(19): siRNA sense strand
ccacuggacuuaucacaau

SEQ ID NO: 727054 - RNA, 19 nt, Homo sapiens
  misc_RNA (1)...(19): siRNA sense strand
gaaacagagucacacuaga

SEQ ID NO: 727055 - RNA, 19 nt, Homo sapiens
  misc_RNA (1)...(19): siRNA sense strand
gaccaaugcuacacugauu

SEQ ID NO: 727056 - RNA, 19 nt, Homo sapiens
  misc_RNA (1)...(19): siRNA sense strand
gcauugaucgugagaaauu

SEQ ID NO: 727057 - RNA, 19 nt, Homo sapiens
  misc_RNA (1)...(19): siRNA sense strand
gauguauccucaccaacua

SEQ ID NO: 727058 - RNA, 19 nt, Homo sapiens
  misc_RNA (1)...(19): siRNA sense strand
ggaauaaacggaguucaaa

SEQ ID NO: 727059 - RNA, 19 nt, Homo sapiens
  misc_RNA (1)...(19): siRNA sense strand
caacauugccaggagauua

SEQ ID NO: 727060 - RNA, 19 nt, Homo sapiens
  misc_RNA (1)...(19): siRNA sense strand
gaagaaacuagauagagaa

SEQ ID NO: 727061 - RNA, 19 nt, Homo sapiens
  misc_RNA (1)...(19): siRNA sense strand
caucacugcuguaguaaga

SEQ ID NO: 727062 - RNA, 19 nt, Homo sapiens
  misc_RNA (1)...(19): siRNA sense strand
uuucaucacugcuguagua

SEQ ID NO: 727063 - RNA, 19 nt, Homo sapiens
  misc_RNA (1)...(19): siRNA sense strand
uaacugauccugauuaugg

SEQ ID NO: 727064 - RNA, 19 nt, Homo sapiens
  misc_RNA (1)...(19): siRNA sense strand
caacaguuaucaacauauc

SEQ ID NO: 727065 - RNA, 19 nt, Homo sapiens
  misc_RNA (1)...(19): siRNA sense strand
ugacacaguuguucuuuca

SEQ ID NO: 727066 - RNA, 19 nt, Homo sapiens
  misc_RNA (1)...(19): siRNA sense strand
gguugaagaugguggcuuu

SEQ ID NO: 727067 - RNA, 19 nt, Homo sapiens
  misc_RNA (1)...(19): siRNA sense strand
gagaaauuaugugcuggua

SEQ ID NO: 727068 - RNA, 19 nt, Homo sapiens
  misc_RNA (1)...(19): siRNA sense strand
ggugucauccgaccaaaua

SEQ ID NO: 727069 - RNA, 19 nt, Homo sapiens
  misc_RNA (1)...(19): siRNA sense strand
caauggugcugguaaaugu

SEQ ID NO: 727070 - RNA, 19 nt, Homo sapiens
  misc_RNA (1)...(19): siRNA sense strand
ggacuuaucacaaucaaag

SEQ ID NO: 727071 - RNA, 19 nt, Homo sapiens
  misc_RNA (1)...(19): siRNA sense strand
ccacuucucuuucagcaau

SEQ ID NO: 727072 - RNA, 19 nt, Homo sapiens
  misc_RNA (1)...(19): siRNA sense strand
ucauaacugugacggauaa

SEQ ID NO: 727073 - RNA, 19 nt, Homo sapiens
  misc_RNA (1)...(19): siRNA sense strand
ccauaaaugugguugaugu

SEQ ID NO: 727074 - RNA, 19 nt, Homo sapiens
  misc_RNA (1)...(19): siRNA sense strand
gacaagaugccacaacuga

SEQ ID NO: 727075 - RNA, 19 nt, Homo sapiens
  misc_RNA (1)...(19): siRNA sense strand
ggaaacagagucacacuag

SEQ ID NO: 727076 - RNA, 19 nt, Homo sapiens
  misc_RNA (1)...(19): siRNA sense strand
ugacagugauggaaacaga

SEQ ID NO: 727077 - RNA, 19 nt, Homo sapiens
  misc_RNA (1)...(19): siRNA sense strand
caaaguaaccauaaaugug

SEQ ID NO: 727078 - RNA, 19 nt, Homo sapiens
  misc_RNA (1)...(19): siRNA sense strand
ccucaaagauccaguacug

SEQ ID NO: 727079 - RNA, 19 nt, Homo sapiens
  misc_RNA (1)...(19): siRNA sense strand
acaguggucuuucagguaa

SEQ ID NO: 727080 - RNA, 19 nt, Homo sapiens
  misc_RNA (1)...(19): siRNA sense strand
ucagaucccuacagcguuu

SEQ ID NO: 727081 - RNA, 19 nt, Homo sapiens
  misc_RNA (1)...(19): siRNA sense strand
cacuagaccuuccuauuga

SEQ ID NO: 727082 - RNA, 19 nt, Homo sapiens
  misc_RNA (1)...(19): siRNA sense strand
gaaaacaggcagaugauaa

SEQ ID NO: 727083 - RNA, 19 nt, Homo sapiens
  misc_RNA (1)...(19): siRNA sense strand
caagaugccacaacugauu

SEQ ID NO: 727084 - RNA, 19 nt, Homo sapiens
  misc_RNA (1)...(19): siRNA sense strand
caagaacugccucucgaua

SEQ ID NO: 727085 - RNA, 19 nt, Homo sapiens
  misc_RNA (1)...(19): siRNA sense strand
caaugacacuggcaugaau

SEQ ID NO: 727086 - RNA, 19 nt, Homo sapiens
  misc_RNA (1)...(19): siRNA sense strand
gaagucaguauaccagaaa

SEQ ID NO: 727087 - RNA, 19 nt, Homo sapiens
  misc_RNA (1)...(19): siRNA sense strand
gggaagagaaggauaccua

SEQ ID NO: 727088 - RNA, 19 nt, Homo sapiens
  misc_RNA (1)...(19): siRNA sense strand
ugccacagaugcugacaua

SEQ ID NO: 727089 - RNA, 19 nt, Homo sapiens
  misc_RNA (1)...(19): siRNA sense strand
ccuuaaggcugcucagaaa

SEQ ID NO: 727090 - RNA, 19 nt, Homo sapiens
  misc_RNA (1)...(19): siRNA sense strand
guugaaagaccuuaacuug

SEQ ID NO: 727091 - RNA, 19 nt, Homo sapiens
  misc_RNA (1)...(19): siRNA sense strand
uaagauacaucgucaaucc

SEQ ID NO: 727092 - RNA, 19 nt, Homo sapiens
  misc_RNA (1)...(19): siRNA sense strand
ggaaaguacaauuggguaa

SEQ ID NO: 727093 - RNA, 19 nt, Homo sapiens
  misc_RNA (1)...(19): siRNA sense strand
gauucucucuucaguguug

SEQ ID NO: 727094 - RNA, 19 nt, Homo sapiens
  misc_RNA (1)...(19): siRNA sense strand
gaaugacaauagcccaguu

SEQ ID NO: 727095 - RNA, 19 nt, Homo sapiens
  misc_RNA (1)...(19): siRNA sense strand
ggcaagugaugguggauug

SEQ ID NO: 727096 - RNA, 19 nt, Homo sapiens
  misc_RNA (1)...(19): siRNA sense strand
ucucuucaguguuguaauu

SEQ ID NO: 727097 - RNA, 19 nt, Homo sapiens
  misc_RNA (1)...(19): siRNA sense strand
gagacaagaugccacaacu

SEQ ID NO: 727098 - RNA, 19 nt, Homo sapiens
  misc_RNA (1)...(19): siRNA sense strand
acacuagaccuuccuauug

SEQ ID NO: 727099 - RNA, 19 nt, Homo sapiens
  misc_RNA (1)...(19): siRNA sense strand
gaguguuggucaaagcuaa

SEQ ID NO: 727100 - RNA, 19 nt, Homo sapiens
  misc_RNA (1)...(19): siRNA sense strand
ugacaaccacccagucuuu

SEQ ID NO: 727101 - RNA, 19 nt, Homo sapiens
  misc_RNA (1)...(19): siRNA sense strand
guacaagaccggagaugug

SEQ ID NO: 727102 - RNA, 19 nt, Homo sapiens
  misc_RNA (1)...(19): siRNA sense strand
cagccugccuuccaaauuc

SEQ ID NO: 727103 - RNA, 19 nt, Homo sapiens
  misc_RNA (1)...(19): siRNA sense strand
uuacagaccuugguuuaca

SEQ ID NO: 727104 - RNA, 19 nt, Homo sapiens
  misc_RNA (1)...(19): siRNA sense strand
gagguucguuacagcauug

SEQ ID NO: 727105 - RNA, 19 nt, Homo sapiens
  misc_RNA (1)...(19): siRNA sense strand
ugacaugcuucacagauca

SEQ ID NO: 727106 - RNA, 19 nt, Homo sapiens
  misc_RNA (1)...(19): siRNA sense strand
aaauugcucucauaacugu

SEQ ID NO: 727107 - RNA, 19 nt, Homo sapiens
  misc_RNA (1)...(19): siRNA sense strand
cagcaacaguuaucaacau

SEQ ID NO: 727108 - RNA, 19 nt, Homo sapiens
  misc_RNA (1)...(19): siRNA sense strand
ggaggaaacacaagagauc

SEQ ID NO: 727109 - RNA, 19 nt, Homo sapiens
  misc_RNA (1)...(19): siRNA sense strand
ugaggauggugguagagua

SEQ ID NO: 727110 - RNA, 19 nt, Homo sapiens
  misc_RNA (1)...(19): siRNA sense strand
uaaggccaguauucaguaa

SEQ ID NO: 727111 - RNA, 19 nt, Homo sapiens
  misc_RNA (1)...(19): siRNA sense strand
ggagaugugccacugauuc

SEQ ID NO: 727112 - RNA, 19 nt, Homo sapiens
  misc_RNA (1)...(19): siRNA sense strand
ucaaagaaccacuggauag

SEQ ID NO: 727113 - RNA, 19 nt, Homo sapiens
  misc_RNA (1)...(19): siRNA sense strand
ggaguuagauagggaagag

SEQ ID NO: 727114 - RNA, 19 nt, Homo sapiens
  misc_RNA (1)...(19): siRNA sense strand
augcuacacugauuaauga

SEQ ID NO: 727115 - RNA, 19 nt, Homo sapiens
  misc_RNA (1)...(19): siRNA sense strand
gguagaguaucacguucuu

SEQ ID NO: 727116 - RNA, 19 nt, Homo sapiens
  misc_RNA (1)...(19): siRNA sense strand
gauaggcgacuuguugaaa

SEQ ID NO: 727117 - RNA, 19 nt, Homo sapiens
  misc_RNA (1)...(19): siRNA sense strand
gcugauguauccucaccaa

SEQ ID NO: 727118 - RNA, 19 nt, Homo sapiens
  misc_RNA (1)...(19): siRNA sense strand
ucaaucuguucgugaauga

SEQ ID NO: 727119 - RNA, 19 nt, Homo sapiens
  misc_RNA (1)...(19): siRNA sense strand
ucgcauugaucgugagaaa

SEQ ID NO: 727120 - RNA, 19 nt, Homo sapiens
  misc_RNA (1)...(19): siRNA sense strand
guaacuacaccuacuacuu

SEQ ID NO: 727121 - RNA, 19 nt, Homo sapiens
  misc_RNA (1)...(19): siRNA sense strand
ccaaugcuacacugauuaa

SEQ ID NO: 727122 - RNA, 19 nt, Homo sapiens
  misc_RNA (1)...(19): siRNA sense strand
aaacaggcaacauaacauu

SEQ ID NO: 727123 - RNA, 19 nt, Homo sapiens
  misc_RNA (1)...(19): siRNA sense strand
gaaacaggcaacauaacau

SEQ ID NO: 727124 - RNA, 19 nt, Homo sapiens
  misc_RNA (1)...(19): siRNA sense strand
ggacuaaucacuguaacug

SEQ ID NO: 727125 - RNA, 19 nt, Homo sapiens
  misc_RNA (1)...(19): siRNA sense strand
caaaauugcucucauaacu

SEQ ID NO: 727126 - RNA, 19 nt, Homo sapiens
  misc_RNA (1)...(19): siRNA sense strand
acacaguuguucuuucaga

SEQ ID NO: 727127 - RNA, 19 nt, Homo sapiens
  misc_RNA (1)...(19): siRNA sense strand
ugaagucaguauaccagaa

SEQ ID NO: 727128 - RNA, 19 nt, Homo sapiens
  misc_RNA (1)...(19): siRNA sense strand
caucgucaauccugucaau

SEQ ID NO: 727129 - RNA, 19 nt, Homo sapiens
  misc_RNA (1)...(19): siRNA sense strand
ccaaaguaaccauaaaugu

SEQ ID NO: 727130 - RNA, 19 nt, Homo sapiens
  misc_RNA (1)...(19): siRNA sense strand
ggauggugguagaguauca

SEQ ID NO: 727131 - RNA, 19 nt, Homo sapiens
  misc_RNA (1)...(19): siRNA sense strand
caaugucacagucuuugua

SEQ ID NO: 727132 - RNA, 19 nt, Homo sapiens
  misc_RNA (1)...(19): siRNA sense strand
gcagacagugggccuaaug

SEQ ID NO: 727133 - RNA, 19 nt, Homo sapiens
  misc_RNA (1)...(19): siRNA sense strand
aaacuaaggcagaugaugu

SEQ ID NO: 727134 - RNA, 19 nt, Homo sapiens
  misc_RNA (1)...(19): siRNA sense strand
auacugagauagcugaugu

SEQ ID NO: 727135 - RNA, 19 nt, Homo sapiens
  misc_RNA (1)...(19): siRNA sense strand
gugccaaaguaaccauaaa

SEQ ID NO: 727136 - RNA, 19 nt, Homo sapiens
  misc_RNA (1)...(19): siRNA sense strand
guaggacuaaucacuguaa

SEQ ID NO: 727137 - RNA, 19 nt, Homo sapiens
  misc_RNA (1)...(19): siRNA sense strand
gaaauuaugugcugguauc

SEQ ID NO: 727138 - RNA, 19 nt, Homo sapiens
  misc_RNA (1)...(19): siRNA sense strand
caagagaucuguuugcaau

SEQ ID NO: 727139 - RNA, 19 nt, Homo sapiens
  misc_RNA (1)...(19): siRNA sense strand
gaugguggcuuuccucaaa

SEQ ID NO: 727140 - RNA, 19 nt, Homo sapiens
  misc_RNA (1)...(19): siRNA sense strand
ggagaaaugugauguuaca

SEQ ID NO: 727141 - RNA, 19 nt, Homo sapiens
  misc_RNA (1)...(19): siRNA sense strand
caccauaacugucguugua

SEQ ID NO: 727142 - RNA, 19 nt, Homo sapiens
  misc_RNA (1)...(19): siRNA sense strand
gcaaugcucuucaucaaag

SEQ ID NO: 727143 - RNA, 19 nt, Homo sapiens
  misc_RNA (1)...(19): siRNA sense strand
ggagacaauucugcaguua

SEQ ID NO: 727144 - RNA, 19 nt, Homo sapiens
  misc_RNA (1)...(19): siRNA sense strand
uaacuacaccuacuacuuu

SEQ ID NO: 727145 - RNA, 19 nt, Homo sapiens
  misc_RNA (1)...(19): siRNA sense strand
ugaaagaccuuaacuuguc

SEQ ID NO: 727146 - RNA, 19 nt, Homo sapiens
  misc_RNA (1)...(19): siRNA sense strand
ugaagaaacuagauagaga

SEQ ID NO: 727147 - RNA, 19 nt, Homo sapiens
  misc_RNA (1)...(19): siRNA sense strand
ccaagaaacaggcaacaua

SEQ ID NO: 727148 - RNA, 19 nt, Homo sapiens
  misc_RNA (1)...(19): siRNA sense strand
gaaaguaaagguugaagau

SEQ ID NO: 727149 - RNA, 19 nt, Homo sapiens
  misc_RNA (1)...(19): siRNA sense strand
cagaugauguugacaguga

SEQ ID NO: 727150 - RNA, 19 nt, Homo sapiens
  misc_RNA (1)...(19): siRNA sense strand
caagaaacaggcaacauaa

SEQ ID NO: 727151 - RNA, 19 nt, Homo sapiens
  misc_RNA (1)...(19): siRNA sense strand
gcaguuacgcucuccauuu

SEQ ID NO: 727152 - RNA, 19 nt, Homo sapiens
  misc_RNA (1)...(19): siRNA sense strand
gagauuauuucaccucaau

SEQ ID NO: 727153 - RNA, 19 nt, Homo sapiens
  misc_RNA (1)...(19): siRNA sense strand
ccacuggacuuaucacaau

SEQ ID NO: 727154 - RNA, 19 nt, Homo sapiens
  misc_RNA (1)...(19): siRNA sense strand
gaaacagagucacacuaga

SEQ ID NO: 727155 - RNA, 19 nt, Homo sapiens
  misc_RNA (1)...(19): siRNA sense strand
gaccaaugcuacacugauu

SEQ ID NO: 727156 - RNA, 19 nt, Homo sapiens
  misc_RNA (1)...(19): siRNA sense strand
gcauugaucgugagaaauu

SEQ ID NO: 727157 - RNA, 19 nt, Homo sapiens
  misc_RNA (1)...(19): siRNA sense strand
gauguauccucaccaacua

SEQ ID NO: 727158 - RNA, 19 nt, Homo sapiens
  misc_RNA (1)...(19): siRNA sense strand
ggaauaaacggaguucaaa

SEQ ID NO: 727159 - RNA, 19 nt, Homo sapiens
  misc_RNA (1)...(19): siRNA sense strand
caacauugccaggagauua

SEQ ID NO: 727160 - RNA, 19 nt, Homo sapiens
  misc_RNA (1)...(19): siRNA sense strand
gaagaaacuagauagagaa

SEQ ID NO: 727161 - RNA, 19 nt, Homo sapiens
  misc_RNA (1)...(19): siRNA sense strand
caucacugcuguaguaaga

SEQ ID NO: 727162 - RNA, 19 nt, Homo sapiens
  misc_RNA (1)...(19): siRNA sense strand
uuucaucacugcuguagua

SEQ ID NO: 727163 - RNA, 19 nt, Homo sapiens
  misc_RNA (1)...(19): siRNA sense strand
uaacugauccugauuaugg

SEQ ID NO: 727164 - RNA, 19 nt, Homo sapiens
  misc_RNA (1)...(19): siRNA sense strand
caacaguuaucaacauauc

SEQ ID NO: 727165 - RNA, 19 nt, Homo sapiens
  misc_RNA (1)...(19): siRNA sense strand
ugacacaguuguucuuuca

SEQ ID NO: 727166 - RNA, 19 nt, Homo sapiens
  misc_RNA (1)...(19): siRNA sense strand
gguugaagaugguggcuuu

SEQ ID NO: 727167 - RNA, 19 nt, Homo sapiens
  misc_RNA (1)...(19): siRNA sense strand
gagaaauuaugugcuggua

SEQ ID NO: 727168 - RNA, 19 nt, Homo sapiens
  misc_RNA (1)...(19): siRNA sense strand
ggugucauccgaccaaaua

SEQ ID NO: 727169 - RNA, 19 nt, Homo sapiens
  misc_RNA (1)...(19): siRNA sense strand
caauggugcugguaaaugu

SEQ ID NO: 727170 - RNA, 19 nt, Homo sapiens
  misc_RNA (1)...(19): siRNA sense strand
ggacuuaucacaaucaaag

SEQ ID NO: 727171 - RNA, 19 nt, Homo sapiens
  misc_RNA (1)...(19): siRNA sense strand
ccacuucucuuucagcaau

SEQ ID NO: 727172 - RNA, 19 nt, Homo sapiens
  misc_RNA (1)...(19): siRNA sense strand
ucauaacugugacggauaa

SEQ ID NO: 727173 - RNA, 19 nt, Homo sapiens
  misc_RNA (1)...(19): siRNA sense strand
ccauaaaugugguugaugu

SEQ ID NO: 727174 - RNA, 19 nt, Homo sapiens
  misc_RNA (1)...(19): siRNA sense strand
gacaagaugccacaacuga

SEQ ID NO: 727175 - RNA, 19 nt, Homo sapiens
  misc_RNA (1)...(19): siRNA sense strand
ggaaacagagucacacuag

SEQ ID NO: 727176 - RNA, 19 nt, Homo sapiens
  misc_RNA (1)...(19): siRNA sense strand
ugacagugauggaaacaga

SEQ ID NO: 727177 - RNA, 19 nt, Homo sapiens
  misc_RNA (1)...(19): siRNA sense strand
caaaguaaccauaaaugug

SEQ ID NO: 727178 - RNA, 19 nt, Homo sapiens
  misc_RNA (1)...(19): siRNA sense strand
ccucaaagauccaguacug

SEQ ID NO: 727179 - RNA, 19 nt, Homo sapiens
  misc_RNA (1)...(19): siRNA sense strand
acaguggucuuucagguaa

SEQ ID NO: 727180 - RNA, 19 nt, Homo sapiens
  misc_RNA (1)...(19): siRNA sense strand
ucagaucccuacagcguuu

SEQ ID NO: 727181 - RNA, 19 nt, Homo sapiens
  misc_RNA (1)...(19): siRNA sense strand
cacuagaccuuccuauuga

SEQ ID NO: 727182 - RNA, 19 nt, Homo sapiens
  misc_RNA (1)...(19): siRNA sense strand
gaaaacaggcagaugauaa

SEQ ID NO: 727183 - RNA, 19 nt, Homo sapiens
  misc_RNA (1)...(19): siRNA sense strand
caagaugccacaacugauu

SEQ ID NO: 727184 - RNA, 19 nt, Homo sapiens
  misc_RNA (1)...(19): siRNA sense strand
caagaacugccucucgaua

SEQ ID NO: 727185 - RNA, 19 nt, Homo sapiens
  misc_RNA (1)...(19): siRNA sense strand
caaugacacuggcaugaau

SEQ ID NO: 727186 - RNA, 19 nt, Homo sapiens
  misc_RNA (1)...(19): siRNA sense strand
gaagucaguauaccagaaa

SEQ ID NO: 727187 - RNA, 19 nt, Homo sapiens
  misc_RNA (1)...(19): siRNA sense strand
gggaagagaaggauaccua

SEQ ID NO: 727188 - RNA, 19 nt, Homo sapiens
  misc_RNA (1)...(19): siRNA sense strand
ugccacagaugcugacaua

SEQ ID NO: 727189 - RNA, 19 nt, Homo sapiens
  misc_RNA (1)...(19): siRNA sense strand
ccuuaaggcugcucagaaa

SEQ ID NO: 727190 - RNA, 19 nt, Homo sapiens
  misc_RNA (1)...(19): siRNA sense strand
guugaaagaccuuaacuug

SEQ ID NO: 727191 - RNA, 19 nt, Homo sapiens
  misc_RNA (1)...(19): siRNA sense strand
uaagauacaucgucaaucc

SEQ ID NO: 727192 - RNA, 19 nt, Homo sapiens
  misc_RNA (1)...(19): siRNA sense strand
ggaaaguacaauuggguaa

SEQ ID NO: 727193 - RNA, 19 nt, Homo sapiens
  misc_RNA (1)...(19): siRNA sense strand
gauucucucuucaguguug

SEQ ID NO: 727194 - RNA, 19 nt, Homo sapiens
  misc_RNA (1)...(19): siRNA sense strand
gaaugacaauagcccaguu

SEQ ID NO: 727195 - RNA, 19 nt, Homo sapiens
  misc_RNA (1)...(19): siRNA sense strand
ggcaagugaugguggauug

SEQ ID NO: 727196 - RNA, 19 nt, Homo sapiens
  misc_RNA (1)...(19): siRNA sense strand
ucucuucaguguuguaauu

SEQ ID NO: 727197 - RNA, 19 nt, Homo sapiens
  misc_RNA (1)...(19): siRNA sense strand
gagacaagaugccacaacu

SEQ ID NO: 727198 - RNA, 19 nt, Homo sapiens
  misc_RNA (1)...(19): siRNA sense strand
acacuagaccuuccuauug

SEQ ID NO: 727199 - RNA, 19 nt, Homo sapiens
  misc_RNA (1)...(19): siRNA sense strand
gaguguuggucaaagcuaa

SEQ ID NO: 727200 - RNA, 19 nt, Homo sapiens
  misc_RNA (1)...(19): siRNA sense strand
ugacaaccacccagucuuu

SEQ ID NO: 727201 - RNA, 19 nt, Homo sapiens
  misc_RNA (1)...(19): siRNA sense strand
guacaagaccggagaugug

SEQ ID NO: 727202 - RNA, 19 nt, Homo sapiens
  misc_RNA (1)...(19): siRNA sense strand
cagccugccuuccaaauuc

SEQ ID NO: 727203 - RNA, 19 nt, Homo sapiens
  misc_RNA (1)...(19): siRNA sense strand
uuacagaccuugguuuaca

SEQ ID NO: 727204 - RNA, 19 nt, Homo sapiens
  misc_RNA (1)...(19): siRNA sense strand
gagguucguuacagcauug

SEQ ID NO: 727205 - RNA, 19 nt, Homo sapiens
  misc_RNA (1)...(19): siRNA sense strand
ugacaugcuucacagauca

SEQ ID NO: 727206 - RNA, 19 nt, Homo sapiens
  misc_RNA (1)...(19): siRNA sense strand
aaauugcucucauaacugu

SEQ ID NO: 727207 - RNA, 19 nt, Homo sapiens
  misc_RNA (1)...(19): siRNA sense strand
cagcaacaguuaucaacau

SEQ ID NO: 727208 - RNA, 19 nt, Homo sapiens
  misc_RNA (1)...(19): siRNA sense strand
ggaggaaacacaagagauc

SEQ ID NO: 727209 - RNA, 19 nt, Homo sapiens
  misc_RNA (1)...(19): siRNA sense strand
ugaggauggugguagagua

SEQ ID NO: 727210 - RNA, 19 nt, Homo sapiens
  misc_RNA (1)...(19): siRNA sense strand
uaaggccaguauucaguaa

SEQ ID NO: 727211 - RNA, 19 nt, Homo sapiens
  misc_RNA (1)...(19): siRNA sense strand
ggagaugugccacugauuc

SEQ ID NO: 727212 - RNA, 19 nt, Homo sapiens
  misc_RNA (1)...(19): siRNA sense strand
ucaaagaaccacuggauag

SEQ ID NO: 727213 - RNA, 19 nt, Homo sapiens
  misc_RNA (1)...(19): siRNA sense strand
ggaguuagauagggaagag

SEQ ID NO: 727214 - RNA, 19 nt, Homo sapiens
  misc_RNA (1)...(19): siRNA sense strand
augcuacacugauuaauga

SEQ ID NO: 727215 - RNA, 19 nt, Homo sapiens
  misc_RNA (1)...(19): siRNA sense strand
gguagaguaucacguucuu

SEQ ID NO: 727216 - RNA, 19 nt, Homo sapiens
  misc_RNA (1)...(19): siRNA sense strand
gauaggcgacuuguugaaa

SEQ ID NO: 727217 - RNA, 19 nt, Homo sapiens
  misc_RNA (1)...(19): siRNA sense strand
gcugauguauccucaccaa

SEQ ID NO: 727218 - RNA, 19 nt, Homo sapiens
  misc_RNA (1)...(19): siRNA sense strand
ucaaucuguucgugaauga

SEQ ID NO: 727219 - RNA, 19 nt, Homo sapiens
  misc_RNA (1)...(19): siRNA sense strand
ucgcauugaucgugagaaa

SEQ ID NO: 727220 - RNA, 19 nt, Homo sapiens
  misc_RNA (1)...(19): siRNA sense strand
guaacuacaccuacuacuu

SEQ ID NO: 727221 - RNA, 19 nt, Homo sapiens
  misc_RNA (1)...(19): siRNA sense strand
ccaaugcuacacugauuaa

SEQ ID NO: 727222 - RNA, 19 nt, Homo sapiens
  misc_RNA (1)...(19): siRNA sense strand
aaacaggcaacauaacauu

SEQ ID NO: 727223 - RNA, 19 nt, Homo sapiens
  misc_RNA (1)...(19): siRNA sense strand
gaaacaggcaacauaacau

SEQ ID NO: 727224 - RNA, 19 nt, Homo sapiens
  misc_RNA (1)...(19): siRNA sense strand
ggacuaaucacuguaacug

SEQ ID NO: 727225 - RNA, 19 nt, Homo sapiens
  misc_RNA (1)...(19): siRNA sense strand
caaaauugcucucauaacu

SEQ ID NO: 727226 - RNA, 19 nt, Homo sapiens
  misc_RNA (1)...(19): siRNA sense strand
acacaguuguucuuucaga

SEQ ID NO: 727227 - RNA, 19 nt, Homo sapiens
  misc_RNA (1)...(19): siRNA sense strand
ugaagucaguauaccagaa

SEQ ID NO: 727228 - RNA, 19 nt, Homo sapiens
  misc_RNA (1)...(19): siRNA sense strand
caucgucaauccugucaau

SEQ ID NO: 727229 - RNA, 19 nt, Homo sapiens
  misc_RNA (1)...(19): siRNA sense strand
ccaaaguaaccauaaaugu

SEQ ID NO: 727230 - RNA, 19 nt, Homo sapiens
  misc_RNA (1)...(19): siRNA sense strand
ggauggugguagaguauca

SEQ ID NO: 727231 - RNA, 19 nt, Homo sapiens
  misc_RNA (1)...(19): siRNA sense strand
caaugucacagucuuugua

SEQ ID NO: 727232 - RNA, 19 nt, Homo sapiens
  misc_RNA (1)...(19): siRNA sense strand
gcagacagugggccuaaug

SEQ ID NO: 727233 - RNA, 19 nt, Homo sapiens
  misc_RNA (1)...(19): siRNA sense strand
aaacuaaggcagaugaugu

SEQ ID NO: 727234 - RNA, 19 nt, Homo sapiens
  misc_RNA (1)...(19): siRNA sense strand
auacugagauagcugaugu

SEQ ID NO: 727235 - RNA, 19 nt, Homo sapiens
  misc_RNA (1)...(19): siRNA sense strand
gugccaaaguaaccauaaa

SEQ ID NO: 727236 - RNA, 19 nt, Homo sapiens
  misc_RNA (1)...(19): siRNA sense strand
guaggacuaaucacuguaa

SEQ ID NO: 727237 - RNA, 19 nt, Homo sapiens
  misc_RNA (1)...(19): siRNA sense strand
gaaauuaugugcugguauc

SEQ ID NO: 727238 - RNA, 19 nt, Homo sapiens
  misc_RNA (1)...(19): siRNA sense strand
caagagaucuguuugcaau

SEQ ID NO: 727239 - RNA, 19 nt, Homo sapiens
  misc_RNA (1)...(19): siRNA sense strand
gaugguggcuuuccucaaa

SEQ ID NO: 727240 - RNA, 19 nt, Homo sapiens
  misc_RNA (1)...(19): siRNA sense strand
ggagaaaugugauguuaca

SEQ ID NO: 727241 - RNA, 19 nt, Homo sapiens
  misc_RNA (1)...(19): siRNA sense strand
caccauaacugucguugua

SEQ ID NO: 727242 - RNA, 19 nt, Homo sapiens
  misc_RNA (1)...(19): siRNA sense strand
gcaaugcucuucaucaaag

SEQ ID NO: 727243 - RNA, 19 nt, Homo sapiens
  misc_RNA (1)...(19): siRNA sense strand
ggagacaauucugcaguua

SEQ ID NO: 727244 - RNA, 19 nt, Homo sapiens
  misc_RNA (1)...(19): siRNA sense strand
uaacuacaccuacuacuuu

SEQ ID NO: 727245 - RNA, 19 nt, Homo sapiens
  misc_RNA (1)...(19): siRNA sense strand
ugaaagaccuuaacuuguc

SEQ ID NO: 727246 - RNA, 19 nt, Homo sapiens
  misc_RNA (1)...(19): siRNA sense strand
ugaagaaacuagauagaga

SEQ ID NO: 727247 - RNA, 19 nt, Homo sapiens
  misc_RNA (1)...(19): siRNA sense strand
ccaagaaacaggcaacaua

SEQ ID NO: 727248 - RNA, 19 nt, Homo sapiens
  misc_RNA (1)...(19): siRNA sense strand
gaaaguaaagguugaagau

SEQ ID NO: 727249 - RNA, 19 nt, Homo sapiens
  misc_RNA (1)...(19): siRNA sense strand
cagaugauguugacaguga

SEQ ID NO: 727250 - RNA, 19 nt, Homo sapiens
  misc_RNA (1)...(19): siRNA sense strand
caagaaacaggcaacauaa

SEQ ID NO: 727251 - RNA, 19 nt, Homo sapiens
  misc_RNA (1)...(19): siRNA sense strand
gcaguuacgcucuccauuu

SEQ ID NO: 727252 - RNA, 19 nt, Homo sapiens
  misc_RNA (1)...(19): siRNA sense strand
gagauuauuucaccucaau

SEQ ID NO: 727253 - RNA, 19 nt, Homo sapiens
  misc_RNA (1)...(19): siRNA sense strand
ccacuggacuuaucacaau

SEQ ID NO: 727254 - RNA, 19 nt, Homo sapiens
  misc_RNA (1)...(19): siRNA sense strand
gaaacagagucacacuaga

SEQ ID NO: 727255 - RNA, 19 nt, Homo sapiens
  misc_RNA (1)...(19): siRNA sense strand
gaccaaugcuacacugauu

SEQ ID NO: 727256 - RNA, 19 nt, Homo sapiens
  misc_RNA (1)...(19): siRNA sense strand
gcauugaucgugagaaauu

SEQ ID NO: 727257 - RNA, 19 nt, Homo sapiens
  misc_RNA (1)...(19): siRNA sense strand
gauguauccucaccaacua

SEQ ID NO: 727258 - RNA, 19 nt, Homo sapiens
  misc_RNA (1)...(19): siRNA sense strand
ggaauaaacggaguucaaa

SEQ ID NO: 727259 - RNA, 19 nt, Homo sapiens
  misc_RNA (1)...(19): siRNA sense strand
caacauugccaggagauua

SEQ ID NO: 727260 - RNA, 19 nt, Homo sapiens
  misc_RNA (1)...(19): siRNA sense strand
gaagaaacuagauagagaa

SEQ ID NO: 727261 - RNA, 19 nt, Homo sapiens
  misc_RNA (1)...(19): siRNA sense strand
caucacugcuguaguaaga

SEQ ID NO: 727262 - RNA, 19 nt, Homo sapiens
  misc_RNA (1)...(19): siRNA sense strand
uuucaucacugcuguagua

SEQ ID NO: 727263 - RNA, 19 nt, Homo sapiens
  misc_RNA (1)...(19): siRNA sense strand
uaacugauccugauuaugg

SEQ ID NO: 727264 - RNA, 19 nt, Homo sapiens
  misc_RNA (1)...(19): siRNA sense strand
caacaguuaucaacauauc

SEQ ID NO: 727265 - RNA, 19 nt, Homo sapiens
  misc_RNA (1)...(19): siRNA sense strand
ugacacaguuguucuuuca

SEQ ID NO: 727266 - RNA, 19 nt, Homo sapiens
  misc_RNA (1)...(19): siRNA sense strand
gguugaagaugguggcuuu

SEQ ID NO: 727267 - RNA, 19 nt, Homo sapiens
  misc_RNA (1)...(19): siRNA sense strand
gagaaauuaugugcuggua

SEQ ID NO: 727268 - RNA, 19 nt, Homo sapiens
  misc_RNA (1)...(19): siRNA sense strand
ggugucauccgaccaaaua

SEQ ID NO: 727269 - RNA, 19 nt, Homo sapiens
  misc_RNA (1)...(19): siRNA sense strand
caauggugcugguaaaugu

SEQ ID NO: 727270 - RNA, 19 nt, Homo sapiens
  misc_RNA (1)...(19): siRNA sense strand
ggacuuaucacaaucaaag

SEQ ID NO: 727271 - RNA, 19 nt, Homo sapiens
  misc_RNA (1)...(19): siRNA sense strand
ccacuucucuuucagcaau

SEQ ID NO: 727272 - RNA, 19 nt, Homo sapiens
  misc_RNA (1)...(19): siRNA sense strand
ucauaacugugacggauaa

SEQ ID NO: 727273 - RNA, 19 nt, Homo sapiens
  misc_RNA (1)...(19): siRNA sense strand
ccauaaaugugguugaugu

SEQ ID NO: 727274 - RNA, 19 nt, Homo sapiens
  misc_RNA (1)...(19): siRNA sense strand
gacaagaugccacaacuga

SEQ ID NO: 727275 - RNA, 19 nt, Homo sapiens
  misc_RNA (1)...(19): siRNA sense strand
ggaaacagagucacacuag

SEQ ID NO: 727276 - RNA, 19 nt, Homo sapiens
  misc_RNA (1)...(19): siRNA sense strand
ugacagugauggaaacaga

SEQ ID NO: 727277 - RNA, 19 nt, Homo sapiens
  misc_RNA (1)...(19): siRNA sense strand
caaaguaaccauaaaugug

SEQ ID NO: 727278 - RNA, 19 nt, Homo sapiens
  misc_RNA (1)...(19): siRNA sense strand
ccucaaagauccaguacug

SEQ ID NO: 727279 - RNA, 19 nt, Homo sapiens
  misc_RNA (1)...(19): siRNA sense strand
acaguggucuuucagguaa

SEQ ID NO: 727280 - RNA, 19 nt, Homo sapiens
  misc_RNA (1)...(19): siRNA sense strand
ucagaucccuacagcguuu

SEQ ID NO: 727281 - RNA, 19 nt, Homo sapiens
  misc_RNA (1)...(19): siRNA sense strand
cacuagaccuuccuauuga

SEQ ID NO: 727282 - RNA, 19 nt, Homo sapiens
  misc_RNA (1)...(19): siRNA sense strand
gaaaacaggcagaugauaa

SEQ ID NO: 727283 - RNA, 19 nt, Homo sapiens
  misc_RNA (1)...(19): siRNA sense strand
caagaugccacaacugauu

SEQ ID NO: 727284 - RNA, 19 nt, Homo sapiens
  misc_RNA (1)...(19): siRNA sense strand
caagaacugccucucgaua

SEQ ID NO: 727285 - RNA, 19 nt, Homo sapiens
  misc_RNA (1)...(19): siRNA sense strand
caaugacacuggcaugaau

SEQ ID NO: 727286 - RNA, 19 nt, Homo sapiens
  misc_RNA (1)...(19): siRNA sense strand
gaagucaguauaccagaaa

SEQ ID NO: 727287 - RNA, 19 nt, Homo sapiens
  misc_RNA (1)...(19): siRNA sense strand
gggaagagaaggauaccua

SEQ ID NO: 727288 - RNA, 19 nt, Homo sapiens
  misc_RNA (1)...(19): siRNA sense strand
ugccacagaugcugacaua

SEQ ID NO: 727289 - RNA, 19 nt, Homo sapiens
  misc_RNA (1)...(19): siRNA sense strand
ccuuaaggcugcucagaaa

SEQ ID NO: 727290 - RNA, 19 nt, Homo sapiens
  misc_RNA (1)...(19): siRNA sense strand
guugaaagaccuuaacuug

SEQ ID NO: 727291 - RNA, 19 nt, Homo sapiens
  misc_RNA (1)...(19): siRNA sense strand
uaagauacaucgucaaucc

SEQ ID NO: 727292 - RNA, 19 nt, Homo sapiens
  misc_RNA (1)...(19): siRNA sense strand
ggaaaguacaauuggguaa

SEQ ID NO: 727293 - RNA, 19 nt, Homo sapiens
  misc_RNA (1)...(19): siRNA sense strand
gauucucucuucaguguug

SEQ ID NO: 727294 - RNA, 19 nt, Homo sapiens
  misc_RNA (1)...(19): siRNA sense strand
gaaugacaauagcccaguu

SEQ ID NO: 727295 - RNA, 19 nt, Homo sapiens
  misc_RNA (1)...(19): siRNA sense strand
ggcaagugaugguggauug

SEQ ID NO: 727296 - RNA, 19 nt, Homo sapiens
  misc_RNA (1)...(19): siRNA sense strand
ucucuucaguguuguaauu

SEQ ID NO: 727297 - RNA, 19 nt, Homo sapiens
  misc_RNA (1)...(19): siRNA sense strand
gagacaagaugccacaacu

SEQ ID NO: 727298 - RNA, 19 nt, Homo sapiens
  misc_RNA (1)...(19): siRNA sense strand
acacuagaccuuccuauug

SEQ ID NO: 727299 - RNA, 19 nt, Homo sapiens
  misc_RNA (1)...(19): siRNA sense strand
gaguguuggucaaagcuaa

SEQ ID NO: 727300 - RNA, 19 nt, Homo sapiens
  misc_RNA (1)...(19): siRNA sense strand
ugacaaccacccagucuuu

SEQ ID NO: 727301 - RNA, 19 nt, Homo sapiens
  misc_RNA (1)...(19): siRNA sense strand
guacaagaccggagaugug

SEQ ID NO: 727302 - RNA, 19 nt, Homo sapiens
  misc_RNA (1)...(19): siRNA sense strand
cagccugccuuccaaauuc

SEQ ID NO: 727303 - RNA, 19 nt, Homo sapiens
  misc_RNA (1)...(19): siRNA sense strand
uuacagaccuugguuuaca

SEQ ID NO: 727304 - RNA, 19 nt, Homo sapiens
  misc_RNA (1)...(19): siRNA sense strand
gagguucguuacagcauug

SEQ ID NO: 727305 - RNA, 19 nt, Homo sapiens
  misc_RNA (1)...(19): siRNA sense strand
ugacaugcuucacagauca

SEQ ID NO: 727306 - RNA, 19 nt, Homo sapiens
  misc_RNA (1)...(19): siRNA sense strand
aaauugcucucauaacugu

SEQ ID NO: 727307 - RNA, 19 nt, Homo sapiens
  misc_RNA (1)...(19): siRNA sense strand
cagcaacaguuaucaacau

SEQ ID NO: 727308 - RNA, 19 nt, Homo sapiens
  misc_RNA (1)...(19): siRNA sense strand
ggaggaaacacaagagauc

SEQ ID NO: 727309 - RNA, 19 nt, Homo sapiens
  misc_RNA (1)...(19): siRNA sense strand
ugaggauggugguagagua

SEQ ID NO: 727310 - RNA, 19 nt, Homo sapiens
  misc_RNA (1)...(19): siRNA sense strand
uaaggccaguauucaguaa

SEQ ID NO: 727311 - RNA, 19 nt, Homo sapiens
  misc_RNA (1)...(19): siRNA sense strand
ggagaugugccacugauuc

SEQ ID NO: 727312 - RNA, 19 nt, Homo sapiens
  misc_RNA (1)...(19): siRNA sense strand
ucaaagaaccacuggauag

SEQ ID NO: 727313 - RNA, 19 nt, Homo sapiens
  misc_RNA (1)...(19): siRNA sense strand
ggaguuagauagggaagag

SEQ ID NO: 727314 - RNA, 19 nt, Homo sapiens
  misc_RNA (1)...(19): siRNA sense strand
augcuacacugauuaauga

SEQ ID NO: 727315 - RNA, 19 nt, Homo sapiens
  misc_RNA (1)...(19): siRNA sense strand
gguagaguaucacguucuu

SEQ ID NO: 727316 - RNA, 19 nt, Homo sapiens
  misc_RNA (1)...(19): siRNA sense strand
gauaggcgacuuguugaaa

SEQ ID NO: 727317 - RNA, 19 nt, Homo sapiens
  misc_RNA (1)...(19): siRNA sense strand
gcugauguauccucaccaa

SEQ ID NO: 727318 - RNA, 19 nt, Homo sapiens
  misc_RNA (1)...(19): siRNA sense strand
ucaaucuguucgugaauga

SEQ ID NO: 727319 - RNA, 19 nt, Homo sapiens
  misc_RNA (1)...(19): siRNA sense strand
ucgcauugaucgugagaaa

SEQ ID NO: 727320 - RNA, 19 nt, Homo sapiens
  misc_RNA (1)...(19): siRNA sense strand
guaacuacaccuacuacuu

SEQ ID NO: 727321 - RNA, 19 nt, Homo sapiens
  misc_RNA (1)...(19): siRNA sense strand
ccaaugcuacacugauuaa

SEQ ID NO: 727322 - RNA, 19 nt, Homo sapiens
  misc_RNA (1)...(19): siRNA sense strand
aaacaggcaacauaacauu

SEQ ID NO: 727323 - RNA, 19 nt, Homo sapiens
  misc_RNA (1)...(19): siRNA sense strand
gaaacaggcaacauaacau

SEQ ID NO: 727324 - RNA, 19 nt, Homo sapiens
  misc_RNA (1)...(19): siRNA sense strand
ggacuaaucacuguaacug

SEQ ID NO: 727325 - RNA, 19 nt, Homo sapiens
  misc_RNA (1)...(19): siRNA sense strand
caaaauugcucucauaacu

SEQ ID NO: 727326 - RNA, 19 nt, Homo sapiens
  misc_RNA (1)...(19): siRNA sense strand
acacaguuguucuuucaga

SEQ ID NO: 727327 - RNA, 19 nt, Homo sapiens
  misc_RNA (1)...(19): siRNA sense strand
ugaagucaguauaccagaa

SEQ ID NO: 727328 - RNA, 19 nt, Homo sapiens
  misc_RNA (1)...(19): siRNA sense strand
caucgucaauccugucaau

SEQ ID NO: 727329 - RNA, 19 nt, Homo sapiens
  misc_RNA (1)...(19): siRNA sense strand
ccaaaguaaccauaaaugu

SEQ ID NO: 727330 - RNA, 19 nt, Homo sapiens
  misc_RNA (1)...(19): siRNA sense strand
ggauggugguagaguauca

SEQ ID NO: 727331 - RNA, 19 nt, Homo sapiens
  misc_RNA (1)...(19): siRNA sense strand
caaugucacagucuuugua

SEQ ID NO: 727332 - RNA, 19 nt, Homo sapiens
  misc_RNA (1)...(19): siRNA sense strand
gcagacagugggccuaaug

SEQ ID NO: 727333 - RNA, 19 nt, Homo sapiens
  misc_RNA (1)...(19): siRNA sense strand
aaacuaaggcagaugaugu

SEQ ID NO: 727334 - RNA, 19 nt, Homo sapiens
  misc_RNA (1)...(19): siRNA sense strand
auacugagauagcugaugu

SEQ ID NO: 727335 - RNA, 19 nt, Homo sapiens
  misc_RNA (1)...(19): siRNA sense strand
gugccaaaguaaccauaaa

SEQ ID NO: 727336 - RNA, 19 nt, Homo sapiens
  misc_RNA (1)...(19): siRNA sense strand
guaggacuaaucacuguaa

SEQ ID NO: 727337 - RNA, 19 nt, Homo sapiens
  misc_RNA (1)...(19): siRNA sense strand
gaaauuaugugcugguauc

SEQ ID NO: 727338 - RNA, 19 nt, Homo sapiens
  misc_RNA (1)...(19): siRNA sense strand
caagagaucuguuugcaau

SEQ ID NO: 727339 - RNA, 19 nt, Homo sapiens
  misc_RNA (1)...(19): siRNA sense strand
gaugguggcuuuccucaaa

SEQ ID NO: 727340 - RNA, 19 nt, Homo sapiens
  misc_RNA (1)...(19): siRNA sense strand
ggagaaaugugauguuaca

SEQ ID NO: 727341 - RNA, 19 nt, Homo sapiens
  misc_RNA (1)...(19): siRNA sense strand
caccauaacugucguugua

SEQ ID NO: 727342 - RNA, 19 nt, Homo sapiens
  misc_RNA (1)...(19): siRNA sense strand
gcaaugcucuucaucaaag

SEQ ID NO: 727343 - RNA, 19 nt, Homo sapiens
  misc_RNA (1)...(19): siRNA sense strand
ggagacaauucugcaguua

SEQ ID NO: 727344 - RNA, 19 nt, Homo sapiens
  misc_RNA (1)...(19): siRNA sense strand
uaacuacaccuacuacuuu

SEQ ID NO: 727345 - RNA, 19 nt, Homo sapiens
  misc_RNA (1)...(19): siRNA sense strand
ugaaagaccuuaacuuguc

SEQ ID NO: 727346 - RNA, 19 nt, Homo sapiens
  misc_RNA (1)...(19): siRNA sense strand
ugaagaaacuagauagaga

SEQ ID NO: 727347 - RNA, 19 nt, Homo sapiens
  misc_RNA (1)...(19): siRNA sense strand
ccaagaaacaggcaacaua

SEQ ID NO: 727348 - RNA, 19 nt, Homo sapiens
  misc_RNA (1)...(19): siRNA sense strand
gaaaguaaagguugaagau

SEQ ID NO: 727349 - RNA, 19 nt, Homo sapiens
  misc_RNA (1)...(19): siRNA sense strand
cagaugauguugacaguga

SEQ ID NO: 727350 - RNA, 19 nt, Homo sapiens
  misc_RNA (1)...(19): siRNA sense strand
caagaaacaggcaacauaa

SEQ ID NO: 727351 - RNA, 19 nt, Homo sapiens
  misc_RNA (1)...(19): siRNA sense strand
gcaguuacgcucuccauuu

SEQ ID NO: 727352 - RNA, 19 nt, Homo sapiens
  misc_RNA (1)...(19): siRNA sense strand
gagauuauuucaccucaau

SEQ ID NO: 727353 - RNA, 19 nt, Homo sapiens
  misc_RNA (1)...(19): siRNA sense strand
ccacuggacuuaucacaau

SEQ ID NO: 727354 - RNA, 19 nt, Homo sapiens
  misc_RNA (1)...(19): siRNA sense strand
gaaacagagucacacuaga

SEQ ID NO: 727355 - RNA, 19 nt, Homo sapiens
  misc_RNA (1)...(19): siRNA sense strand
gaccaaugcuacacugauu

SEQ ID NO: 727356 - RNA, 19 nt, Homo sapiens
  misc_RNA (1)...(19): siRNA sense strand
gcauugaucgugagaaauu

SEQ ID NO: 727357 - RNA, 19 nt, Homo sapiens
  misc_RNA (1)...(19): siRNA sense strand
gauguauccucaccaacua

SEQ ID NO: 727358 - RNA, 19 nt, Homo sapiens
  misc_RNA (1)...(19): siRNA sense strand
ggaauaaacggaguucaaa

SEQ ID NO: 727359 - RNA, 19 nt, Homo sapiens
  misc_RNA (1)...(19): siRNA sense strand
caacauugccaggagauua

SEQ ID NO: 727360 - RNA, 19 nt, Homo sapiens
  misc_RNA (1)...(19): siRNA sense strand
gaagaaacuagauagagaa

SEQ ID NO: 727361 - RNA, 19 nt, Homo sapiens
  misc_RNA (1)...(19): siRNA sense strand
caucacugcuguaguaaga

SEQ ID NO: 727362 - RNA, 19 nt, Homo sapiens
  misc_RNA (1)...(19): siRNA sense strand
uuucaucacugcuguagua

SEQ ID NO: 727363 - RNA, 19 nt, Homo sapiens
  misc_RNA (1)...(19): siRNA sense strand
uaacugauccugauuaugg

SEQ ID NO: 727364 - RNA, 19 nt, Homo sapiens
  misc_RNA (1)...(19): siRNA sense strand
caacaguuaucaacauauc

SEQ ID NO: 727365 - RNA, 19 nt, Homo sapiens
  misc_RNA (1)...(19): siRNA sense strand
ugacacaguuguucuuuca

SEQ ID NO: 727366 - RNA, 19 nt, Homo sapiens
  misc_RNA (1)...(19): siRNA sense strand
gguugaagaugguggcuuu

SEQ ID NO: 727367 - RNA, 19 nt, Homo sapiens
  misc_RNA (1)...(19): siRNA sense strand
gagaaauuaugugcuggua

SEQ ID NO: 727368 - RNA, 19 nt, Homo sapiens
  misc_RNA (1)...(19): siRNA sense strand
ggugucauccgaccaaaua

SEQ ID NO: 727369 - RNA, 19 nt, Homo sapiens
  misc_RNA (1)...(19): siRNA sense strand
caauggugcugguaaaugu

SEQ ID NO: 727370 - RNA, 19 nt, Homo sapiens
  misc_RNA (1)...(19): siRNA sense strand
ggacuuaucacaaucaaag

SEQ ID NO: 727371 - RNA, 19 nt, Homo sapiens
  misc_RNA (1)...(19): siRNA sense strand
ccacuucucuuucagcaau

SEQ ID NO: 727372 - RNA, 19 nt, Homo sapiens
  misc_RNA (1)...(19): siRNA sense strand
ucauaacugugacggauaa

SEQ ID NO: 727373 - RNA, 19 nt, Homo sapiens
  misc_RNA (1)...(19): siRNA sense strand
ccauaaaugugguugaugu

SEQ ID NO: 727374 - RNA, 19 nt, Homo sapiens
  misc_RNA (1)...(19): siRNA sense strand
gacaagaugccacaacuga

SEQ ID NO: 727375 - RNA, 19 nt, Homo sapiens
  misc_RNA (1)...(19): siRNA sense strand
ggaaacagagucacacuag

SEQ ID NO: 727376 - RNA, 19 nt, Homo sapiens
  misc_RNA (1)...(19): siRNA sense strand
ugacagugauggaaacaga

SEQ ID NO: 727377 - RNA, 19 nt, Homo sapiens
  misc_RNA (1)...(19): siRNA sense strand
caaaguaaccauaaaugug

SEQ ID NO: 727378 - RNA, 19 nt, Homo sapiens
  misc_RNA (1)...(19): siRNA sense strand
ccucaaagauccaguacug

SEQ ID NO: 727379 - RNA, 19 nt, Homo sapiens
  misc_RNA (1)...(19): siRNA sense strand
acaguggucuuucagguaa

SEQ ID NO: 727380 - RNA, 19 nt, Homo sapiens
  misc_RNA (1)...(19): siRNA sense strand
ucagaucccuacagcguuu

SEQ ID NO: 727381 - RNA, 19 nt, Homo sapiens
  misc_RNA (1)...(19): siRNA sense strand
cacuagaccuuccuauuga

SEQ ID NO: 727382 - RNA, 19 nt, Homo sapiens
  misc_RNA (1)...(19): siRNA sense strand
gaaaacaggcagaugauaa

SEQ ID NO: 727383 - RNA, 19 nt, Homo sapiens
  misc_RNA (1)...(19): siRNA sense strand
caagaugccacaacugauu

SEQ ID NO: 727384 - RNA, 19 nt, Homo sapiens
  misc_RNA (1)...(19): siRNA sense strand
caagaacugccucucgaua

SEQ ID NO: 727385 - RNA, 19 nt, Homo sapiens
  misc_RNA (1)...(19): siRNA sense strand
caaugacacuggcaugaau

SEQ ID NO: 727386 - RNA, 19 nt, Homo sapiens
  misc_RNA (1)...(19): siRNA sense strand
gaagucaguauaccagaaa

SEQ ID NO: 727387 - RNA, 19 nt, Homo sapiens
  misc_RNA (1)...(19): siRNA sense strand
gggaagagaaggauaccua

SEQ ID NO: 727388 - RNA, 19 nt, Homo sapiens
  misc_RNA (1)...(19): siRNA sense strand
ugccacagaugcugacaua

SEQ ID NO: 727389 - RNA, 19 nt, Homo sapiens
  misc_RNA (1)...(19): siRNA sense strand
ccuuaaggcugcucagaaa

SEQ ID NO: 727390 - RNA, 19 nt, Homo sapiens
  misc_RNA (1)...(19): siRNA sense strand
guugaaagaccuuaacuug

SEQ ID NO: 727391 - RNA, 19 nt, Homo sapiens
  misc_RNA (1)...(19): siRNA sense strand
uaagauacaucgucaaucc

SEQ ID NO: 727392 - RNA, 19 nt, Homo sapiens
  misc_RNA (1)...(19): siRNA sense strand
ggaaaguacaauuggguaa

SEQ ID NO: 727393 - RNA, 19 nt, Homo sapiens
  misc_RNA (1)...(19): siRNA sense strand
gauucucucuucaguguug

SEQ ID NO: 727394 - RNA, 19 nt, Homo sapiens
  misc_RNA (1)...(19): siRNA sense strand
gaaugacaauagcccaguu

SEQ ID NO: 727395 - RNA, 19 nt, Homo sapiens
  misc_RNA (1)...(19): siRNA sense strand
ggcaagugaugguggauug

SEQ ID NO: 727396 - RNA, 19 nt, Homo sapiens
  misc_RNA (1)...(19): siRNA sense strand
ucucuucaguguuguaauu

SEQ ID NO: 727397 - RNA, 19 nt, Homo sapiens
  misc_RNA (1)...(19): siRNA sense strand
gagacaagaugccacaacu

SEQ ID NO: 727398 - RNA, 19 nt, Homo sapiens
  misc_RNA (1)...(19): siRNA sense strand
acacuagaccuuccuauug

SEQ ID NO: 727399 - RNA, 19 nt, Homo sapiens
  misc_RNA (1)...(19): siRNA sense strand
gaguguuggucaaagcuaa

SEQ ID NO: 727400 - RNA, 19 nt, Homo sapiens
  misc_RNA (1)...(19): siRNA sense strand
ugacaaccacccagucuuu

SEQ ID NO: 727401 - RNA, 19 nt, Homo sapiens
  misc_RNA (1)...(19): siRNA sense strand
guacaagaccggagaugug

SEQ ID NO: 727402 - RNA, 19 nt, Homo sapiens
  misc_RNA (1)...(19): siRNA sense strand
cagccugccuuccaaauuc

SEQ ID NO: 727403 - RNA, 19 nt, Homo sapiens
  misc_RNA (1)...(19): siRNA sense strand
uuacagaccuugguuuaca

SEQ ID NO: 727404 - RNA, 19 nt, Homo sapiens
  misc_RNA (1)...(19): siRNA sense strand
gagguucguuacagcauug

SEQ ID NO: 727405 - RNA, 19 nt, Homo sapiens
  misc_RNA (1)...(19): siRNA sense strand
ugacaugcuucacagauca

SEQ ID NO: 727406 - RNA, 19 nt, Homo sapiens
  misc_RNA (1)...(19): siRNA sense strand
aaauugcucucauaacugu

SEQ ID NO: 727407 - RNA, 19 nt, Homo sapiens
  misc_RNA (1)...(19): siRNA sense strand
cagcaacaguuaucaacau

SEQ ID NO: 727408 - RNA, 19 nt, Homo sapiens
  misc_RNA (1)...(19): siRNA sense strand
ggaggaaacacaagagauc

SEQ ID NO: 727409 - RNA, 19 nt, Homo sapiens
  misc_RNA (1)...(19): siRNA sense strand
ugaggauggugguagagua

SEQ ID NO: 727410 - RNA, 19 nt, Homo sapiens
  misc_RNA (1)...(19): siRNA sense strand
uaaggccaguauucaguaa

SEQ ID NO: 727411 - RNA, 19 nt, Homo sapiens
  misc_RNA (1)...(19): siRNA sense strand
ggagaugugccacugauuc

SEQ ID NO: 727412 - RNA, 19 nt, Homo sapiens
  misc_RNA (1)...(19): siRNA sense strand
ucaaagaaccacuggauag

SEQ ID NO: 727413 - RNA, 19 nt, Homo sapiens
  misc_RNA (1)...(19): siRNA sense strand
ggaguuagauagggaagag

SEQ ID NO: 727414 - RNA, 19 nt, Homo sapiens
  misc_RNA (1)...(19): siRNA sense strand
augcuacacugauuaauga

SEQ ID NO: 727415 - RNA, 19 nt, Homo sapiens
  misc_RNA (1)...(19): siRNA sense strand
gguagaguaucacguucuu

SEQ ID NO: 727416 - RNA, 19 nt, Homo sapiens
  misc_RNA (1)...(19): siRNA sense strand
gauaggcgacuuguugaaa

SEQ ID NO: 727417 - RNA, 19 nt, Homo sapiens
  misc_RNA (1)...(19): siRNA sense strand
gcugauguauccucaccaa

SEQ ID NO: 727418 - RNA, 19 nt, Homo sapiens
  misc_RNA (1)...(19): siRNA sense strand
ucaaucuguucgugaauga

SEQ ID NO: 727419 - RNA, 19 nt, Homo sapiens
  misc_RNA (1)...(19): siRNA sense strand
ucgcauugaucgugagaaa

SEQ ID NO: 727420 - RNA, 19 nt, Homo sapiens
  misc_RNA (1)...(19): siRNA sense strand
guaacuacaccuacuacuu

SEQ ID NO: 727421 - RNA, 19 nt, Homo sapiens
  misc_RNA (1)...(19): siRNA sense strand
ccaaugcuacacugauuaa

SEQ ID NO: 727422 - RNA, 19 nt, Homo sapiens
  misc_RNA (1)...(19): siRNA sense strand
aaacaggcaacauaacauu

SEQ ID NO: 727423 - RNA, 19 nt, Homo sapiens
  misc_RNA (1)...(19): siRNA sense strand
gaaacaggcaacauaacau

SEQ ID NO: 727424 - RNA, 19 nt, Homo sapiens
  misc_RNA (1)...(19): siRNA sense strand
ggacuaaucacuguaacug

SEQ ID NO: 727425 - RNA, 19 nt, Homo sapiens
  misc_RNA (1)...(19): siRNA sense strand
caaaauugcucucauaacu

SEQ ID NO: 727426 - RNA, 19 nt, Homo sapiens
  misc_RNA (1)...(19): siRNA sense strand
acacaguuguucuuucaga

SEQ ID NO: 727427 - RNA, 19 nt, Homo sapiens
  misc_RNA (1)...(19): siRNA sense strand
ugaagucaguauaccagaa

SEQ ID NO: 727428 - RNA, 19 nt, Homo sapiens
  misc_RNA (1)...(19): siRNA sense strand
caucgucaauccugucaau

SEQ ID NO: 727429 - RNA, 19 nt, Homo sapiens
  misc_RNA (1)...(19): siRNA sense strand
ccaaaguaaccauaaaugu

SEQ ID NO: 727430 - RNA, 19 nt, Homo sapiens
  misc_RNA (1)...(19): siRNA sense strand
ggauggugguagaguauca

SEQ ID NO: 727431 - RNA, 19 nt, Homo sapiens
  misc_RNA (1)...(19): siRNA sense strand
caaugucacagucuuugua

SEQ ID NO: 727432 - RNA, 19 nt, Homo sapiens
  misc_RNA (1)...(19): siRNA sense strand
gcagacagugggccuaaug

SEQ ID NO: 727433 - RNA, 19 nt, Homo sapiens
  misc_RNA (1)...(19): siRNA sense strand
aaacuaaggcagaugaugu

SEQ ID NO: 727434 - RNA, 19 nt, Homo sapiens
  misc_RNA (1)...(19): siRNA sense strand
auacugagauagcugaugu

SEQ ID NO: 727435 - RNA, 19 nt, Homo sapiens
  misc_RNA (1)...(19): siRNA sense strand
gugccaaaguaaccauaaa

SEQ ID NO: 727436 - RNA, 19 nt, Homo sapiens
  misc_RNA (1)...(19): siRNA sense strand
guaggacuaaucacuguaa

SEQ ID NO: 727437 - RNA, 19 nt, Homo sapiens
  misc_RNA (1)...(19): siRNA sense strand
gaaauuaugugcugguauc

SEQ ID NO: 727438 - RNA, 19 nt, Homo sapiens
  misc_RNA (1)...(19): siRNA sense strand
caagagaucuguuugcaau

SEQ ID NO: 727439 - RNA, 19 nt, Homo sapiens
  misc_RNA (1)...(19): siRNA sense strand
gaugguggcuuuccucaaa

SEQ ID NO: 727440 - RNA, 19 nt, Homo sapiens
  misc_RNA (1)...(19): siRNA sense strand
ggagaaaugugauguuaca

SEQ ID NO: 727441 - RNA, 19 nt, Homo sapiens
  misc_RNA (1)...(19): siRNA sense strand
caccauaacugucguugua

SEQ ID NO: 727442 - RNA, 19 nt, Homo sapiens
  misc_RNA (1)...(19): siRNA sense strand
gcaaugcucuucaucaaag

SEQ ID NO: 727443 - RNA, 19 nt, Homo sapiens
  misc_RNA (1)...(19): siRNA sense strand
ggagacaauucugcaguua

SEQ ID NO: 727444 - RNA, 19 nt, Homo sapiens
  misc_RNA (1)...(19): siRNA sense strand
uaacuacaccuacuacuuu

SEQ ID NO: 727445 - RNA, 19 nt, Homo sapiens
  misc_RNA (1)...(19): siRNA sense strand
ugaaagaccuuaacuuguc

SEQ ID NO: 727446 - RNA, 19 nt, Homo sapiens
  misc_RNA (1)...(19): siRNA sense strand
ugaagaaacuagauagaga

SEQ ID NO: 727447 - RNA, 19 nt, Homo sapiens
  misc_RNA (1)...(19): siRNA sense strand
ccaagaaacaggcaacaua

SEQ ID NO: 727448 - RNA, 19 nt, Homo sapiens
  misc_RNA (1)...(19): siRNA sense strand
gaaaguaaagguugaagau

SEQ ID NO: 727449 - RNA, 19 nt, Homo sapiens
  misc_RNA (1)...(19): siRNA sense strand
cagaugauguugacaguga

SEQ ID NO: 727450 - RNA, 19 nt, Homo sapiens
  misc_RNA (1)...(19): siRNA sense strand
caagaaacaggcaacauaa

SEQ ID NO: 727451 - RNA, 19 nt, Homo sapiens
  misc_RNA (1)...(19): siRNA sense strand
gcaguuacgcucuccauuu

SEQ ID NO: 727452 - RNA, 19 nt, Homo sapiens
  misc_RNA (1)...(19): siRNA sense strand
gagauuauuucaccucaau

SEQ ID NO: 727453 - RNA, 19 nt, Homo sapiens
  misc_RNA (1)...(19): siRNA sense strand
ccacuggacuuaucacaau

SEQ ID NO: 727454 - RNA, 19 nt, Homo sapiens
  misc_RNA (1)...(19): siRNA sense strand
gaaacagagucacacuaga

SEQ ID NO: 727455 - RNA, 19 nt, Homo sapiens
  misc_RNA (1)...(19): siRNA sense strand
gaccaaugcuacacugauu

SEQ ID NO: 727456 - RNA, 19 nt, Homo sapiens
  misc_RNA (1)...(19): siRNA sense strand
gcauugaucgugagaaauu

SEQ ID NO: 727457 - RNA, 19 nt, Homo sapiens
  misc_RNA (1)...(19): siRNA sense strand
gauguauccucaccaacua

SEQ ID NO: 727458 - RNA, 19 nt, Homo sapiens
  misc_RNA (1)...(19): siRNA sense strand
ggaauaaacggaguucaaa

SEQ ID NO: 727459 - RNA, 19 nt, Homo sapiens
  misc_RNA (1)...(19): siRNA sense strand
caacauugccaggagauua

SEQ ID NO: 727460 - RNA, 19 nt, Homo sapiens
  misc_RNA (1)...(19): siRNA sense strand
gaagaaacuagauagagaa

SEQ ID NO: 727461 - RNA, 19 nt, Homo sapiens
  misc_RNA (1)...(19): siRNA sense strand
caucacugcuguaguaaga

SEQ ID NO: 727462 - RNA, 19 nt, Homo sapiens
  misc_RNA (1)...(19): siRNA sense strand
uuucaucacugcuguagua

SEQ ID NO: 727463 - RNA, 19 nt, Homo sapiens
  misc_RNA (1)...(19): siRNA sense strand
uaacugauccugauuaugg

SEQ ID NO: 727464 - RNA, 19 nt, Homo sapiens
  misc_RNA (1)...(19): siRNA sense strand
caacaguuaucaacauauc

SEQ ID NO: 727465 - RNA, 19 nt, Homo sapiens
  misc_RNA (1)...(19): siRNA sense strand
ugacacaguuguucuuuca

SEQ ID NO: 727466 - RNA, 19 nt, Homo sapiens
  misc_RNA (1)...(19): siRNA sense strand
gguugaagaugguggcuuu

SEQ ID NO: 727467 - RNA, 19 nt, Homo sapiens
  misc_RNA (1)...(19): siRNA sense strand
gagaaauuaugugcuggua

SEQ ID NO: 727468 - RNA, 19 nt, Homo sapiens
  misc_RNA (1)...(19): siRNA sense strand
ggugucauccgaccaaaua

SEQ ID NO: 727469 - RNA, 19 nt, Homo sapiens
  misc_RNA (1)...(19): siRNA sense strand
caauggugcugguaaaugu

SEQ ID NO: 727470 - RNA, 19 nt, Homo sapiens
  misc_RNA (1)...(19): siRNA sense strand
ggacuuaucacaaucaaag

SEQ ID NO: 727471 - RNA, 19 nt, Homo sapiens
  misc_RNA (1)...(19): siRNA sense strand
ccacuucucuuucagcaau

SEQ ID NO: 727472 - RNA, 19 nt, Homo sapiens
  misc_RNA (1)...(19): siRNA sense strand
ucauaacugugacggauaa

SEQ ID NO: 727473 - RNA, 19 nt, Homo sapiens
  misc_RNA (1)...(19): siRNA sense strand
ccauaaaugugguugaugu

SEQ ID NO: 727474 - RNA, 19 nt, Homo sapiens
  misc_RNA (1)...(19): siRNA sense strand
gacaagaugccacaacuga

SEQ ID NO: 727475 - RNA, 19 nt, Homo sapiens
  misc_RNA (1)...(19): siRNA sense strand
ggaaacagagucacacuag

SEQ ID NO: 727476 - RNA, 19 nt, Homo sapiens
  misc_RNA (1)...(19): siRNA sense strand
ugacagugauggaaacaga

SEQ ID NO: 727477 - RNA, 19 nt, Homo sapiens
  misc_RNA (1)...(19): siRNA sense strand
caaaguaaccauaaaugug

SEQ ID NO: 727478 - RNA, 19 nt, Homo sapiens
  misc_RNA (1)...(19): siRNA sense strand
ccucaaagauccaguacug

SEQ ID NO: 727479 - RNA, 19 nt, Homo sapiens
  misc_RNA (1)...(19): siRNA sense strand
acaguggucuuucagguaa

SEQ ID NO: 727480 - RNA, 19 nt, Homo sapiens
  misc_RNA (1)...(19): siRNA sense strand
ucagaucccuacagcguuu

SEQ ID NO: 727481 - RNA, 19 nt, Homo sapiens
  misc_RNA (1)...(19): siRNA sense strand
cacuagaccuuccuauuga

SEQ ID NO: 727482 - RNA, 19 nt, Homo sapiens
  misc_RNA (1)...(19): siRNA sense strand
gaaaacaggcagaugauaa

SEQ ID NO: 727483 - RNA, 19 nt, Homo sapiens
  misc_RNA (1)...(19): siRNA sense strand
caagaugccacaacugauu

SEQ ID NO: 727484 - RNA, 19 nt, Homo sapiens
  misc_RNA (1)...(19): siRNA sense strand
caagaacugccucucgaua

SEQ ID NO: 727485 - RNA, 19 nt, Homo sapiens
  misc_RNA (1)...(19): siRNA sense strand
caaugacacuggcaugaau

SEQ ID NO: 727486 - RNA, 19 nt, Homo sapiens
  misc_RNA (1)...(19): siRNA sense strand
gaagucaguauaccagaaa

SEQ ID NO: 727487 - RNA, 19 nt, Homo sapiens
  misc_RNA (1)...(19): siRNA sense strand
gggaagagaaggauaccua

SEQ ID NO: 727488 - RNA, 19 nt, Homo sapiens
  misc_RNA (1)...(19): siRNA sense strand
ugccacagaugcugacaua

SEQ ID NO: 727489 - RNA, 19 nt, Homo sapiens
  misc_RNA (1)...(19): siRNA sense strand
ccuuaaggcugcucagaaa

SEQ ID NO: 727490 - RNA, 19 nt, Homo sapiens
  misc_RNA (1)...(19): siRNA sense strand
guugaaagaccuuaacuug

SEQ ID NO: 727491 - RNA, 19 nt, Homo sapiens
  misc_RNA (1)...(19): siRNA sense strand
uaagauacaucgucaaucc

SEQ ID NO: 727492 - RNA, 19 nt, Homo sapiens
  misc_RNA (1)...(19): siRNA sense strand
ggaaaguacaauuggguaa

SEQ ID NO: 727493 - RNA, 19 nt, Homo sapiens
  misc_RNA (1)...(19): siRNA sense strand
gauucucucuucaguguug

SEQ ID NO: 727494 - RNA, 19 nt, Homo sapiens
  misc_RNA (1)...(19): siRNA sense strand
gaaugacaauagcccaguu

SEQ ID NO: 727495 - RNA, 19 nt, Homo sapiens
  misc_RNA (1)...(19): siRNA sense strand
ggcaagugaugguggauug

SEQ ID NO: 727496 - RNA, 19 nt, Homo sapiens
  misc_RNA (1)...(19): siRNA sense strand
ucucuucaguguuguaauu

SEQ ID NO: 727497 - RNA, 19 nt, Homo sapiens
  misc_RNA (1)...(19): siRNA sense strand
gagacaagaugccacaacu

SEQ ID NO: 727498 - RNA, 19 nt, Homo sapiens
  misc_RNA (1)...(19): siRNA sense strand
acacuagaccuuccuauug

SEQ ID NO: 727499 - RNA, 19 nt, Homo sapiens
  misc_RNA (1)...(19): siRNA sense strand
gaguguuggucaaagcuaa

SEQ ID NO: 727500 - RNA, 19 nt, Homo sapiens
  misc_RNA (1)...(19): siRNA sense strand
ugacaaccacccagucuuu

SEQ ID NO: 727501 - RNA, 19 nt, Homo sapiens
  misc_RNA (1)...(19): siRNA sense strand
guacaagaccggagaugug

SEQ ID NO: 727502 - RNA, 19 nt, Homo sapiens
  misc_RNA (1)...(19): siRNA sense strand
cagccugccuuccaaauuc

SEQ ID NO: 727503 - RNA, 19 nt, Homo sapiens
  misc_RNA (1)...(19): siRNA sense strand
uuacagaccuugguuuaca

SEQ ID NO: 727504 - RNA, 19 nt, Homo sapiens
  misc_RNA (1)...(19): siRNA sense strand
gagguucguuacagcauug

SEQ ID NO: 727505 - RNA, 19 nt, Homo sapiens
  misc_RNA (1)...(19): siRNA sense strand
ugacaugcuucacagauca

SEQ ID NO: 727506 - RNA, 19 nt, Homo sapiens
  misc_RNA (1)...(19): siRNA sense strand
aaauugcucucauaacugu

SEQ ID NO: 727507 - RNA, 19 nt, Homo sapiens
  misc_RNA (1)...(19): siRNA sense strand
cagcaacaguuaucaacau

SEQ ID NO: 727508 - RNA, 19 nt, Homo sapiens
  misc_RNA (1)...(19): siRNA sense strand
ggaggaaacacaagagauc

SEQ ID NO: 727509 - RNA, 19 nt, Homo sapiens
  misc_RNA (1)...(19): siRNA sense strand
ugaggauggugguagagua

SEQ ID NO: 727510 - RNA, 19 nt, Homo sapiens
  misc_RNA (1)...(19): siRNA sense strand
uaaggccaguauucaguaa

SEQ ID NO: 727511 - RNA, 19 nt, Homo sapiens
  misc_RNA (1)...(19): siRNA sense strand
ggagaugugccacugauuc

SEQ ID NO: 727512 - RNA, 19 nt, Homo sapiens
  misc_RNA (1)...(19): siRNA sense strand
ucaaagaaccacuggauag

SEQ ID NO: 727513 - RNA, 19 nt, Homo sapiens
  misc_RNA (1)...(19): siRNA sense strand
ggaguuagauagggaagag

SEQ ID NO: 727514 - RNA, 19 nt, Homo sapiens
  misc_RNA (1)...(19): siRNA sense strand
augcuacacugauuaauga

SEQ ID NO: 727515 - RNA, 19 nt, Homo sapiens
  misc_RNA (1)...(19): siRNA sense strand
gguagaguaucacguucuu

SEQ ID NO: 727516 - RNA, 19 nt, Homo sapiens
  misc_RNA (1)...(19): siRNA sense strand
gauaggcgacuuguugaaa

SEQ ID NO: 727517 - RNA, 19 nt, Homo sapiens
  misc_RNA (1)...(19): siRNA sense strand
gcugauguauccucaccaa

SEQ ID NO: 727518 - RNA, 19 nt, Homo sapiens
  misc_RNA (1)...(19): siRNA sense strand
ucaaucuguucgugaauga

SEQ ID NO: 727519 - RNA, 19 nt, Homo sapiens
  misc_RNA (1)...(19): siRNA sense strand
ucgcauugaucgugagaaa

SEQ ID NO: 727520 - RNA, 19 nt, Homo sapiens
  misc_RNA (1)...(19): siRNA sense strand
guaacuacaccuacuacuu

SEQ ID NO: 727521 - RNA, 19 nt, Homo sapiens
  misc_RNA (1)...(19): siRNA sense strand
ccaaugcuacacugauuaa

SEQ ID NO: 727522 - RNA, 19 nt, Homo sapiens
  misc_RNA (1)...(19): siRNA sense strand
aaacaggcaacauaacauu

SEQ ID NO: 727523 - RNA, 19 nt, Homo sapiens
  misc_RNA (1)...(19): siRNA sense strand
gaaacaggcaacauaacau

SEQ ID NO: 727524 - RNA, 19 nt, Homo sapiens
  misc_RNA (1)...(19): siRNA sense strand
ggacuaaucacuguaacug

SEQ ID NO: 727525 - RNA, 19 nt, Homo sapiens
  misc_RNA (1)...(19): siRNA sense strand
caaaauugcucucauaacu

SEQ ID NO: 727526 - RNA, 19 nt, Homo sapiens
  misc_RNA (1)...(19): siRNA sense strand
acacaguuguucuuucaga

SEQ ID NO: 727527 - RNA, 19 nt, Homo sapiens
  misc_RNA (1)...(19): siRNA sense strand
ugaagucaguauaccagaa

SEQ ID NO: 727528 - RNA, 19 nt, Homo sapiens
  misc_RNA (1)...(19): siRNA sense strand
caucgucaauccugucaau

SEQ ID NO: 727529 - RNA, 19 nt, Homo sapiens
  misc_RNA (1)...(19): siRNA sense strand
ccaaaguaaccauaaaugu

SEQ ID NO: 727530 - RNA, 19 nt, Homo sapiens
  misc_RNA (1)...(19): siRNA sense strand
ggauggugguagaguauca

SEQ ID NO: 727531 - RNA, 19 nt, Homo sapiens
  misc_RNA (1)...(19): siRNA sense strand
caaugucacagucuuugua

SEQ ID NO: 727532 - RNA, 19 nt, Homo sapiens
  misc_RNA (1)...(19): siRNA sense strand
gcagacagugggccuaaug

SEQ ID NO: 727533 - RNA, 19 nt, Homo sapiens
  misc_RNA (1)...(19): siRNA sense strand
aaacuaaggcagaugaugu

SEQ ID NO: 727534 - RNA, 19 nt, Homo sapiens
  misc_RNA (1)...(19): siRNA sense strand
auacugagauagcugaugu

SEQ ID NO: 727535 - RNA, 19 nt, Homo sapiens
  misc_RNA (1)...(19): siRNA sense strand
gugccaaaguaaccauaaa

SEQ ID NO: 727536 - RNA, 19 nt, Homo sapiens
  misc_RNA (1)...(19): siRNA sense strand
guaggacuaaucacuguaa

SEQ ID NO: 727537 - RNA, 19 nt, Homo sapiens
  misc_RNA (1)...(19): siRNA sense strand
gaaauuaugugcugguauc

SEQ ID NO: 727538 - RNA, 19 nt, Homo sapiens
  misc_RNA (1)...(19): siRNA sense strand
caagagaucuguuugcaau

SEQ ID NO: 727539 - RNA, 19 nt, Homo sapiens
  misc_RNA (1)...(19): siRNA sense strand
gaugguggcuuuccucaaa

SEQ ID NO: 727540 - RNA, 19 nt, Homo sapiens
  misc_RNA (1)...(19): siRNA sense strand
ggagaaaugugauguuaca

SEQ ID NO: 727541 - RNA, 19 nt, Homo sapiens
  misc_RNA (1)...(19): siRNA sense strand
caccauaacugucguugua

SEQ ID NO: 727542 - RNA, 19 nt, Homo sapiens
  misc_RNA (1)...(19): siRNA sense strand
gcaaugcucuucaucaaag

SEQ ID NO: 727543 - RNA, 19 nt, Homo sapiens
  misc_RNA (1)...(19): siRNA sense strand
ggagacaauucugcaguua

SEQ ID NO: 727544 - RNA, 19 nt, Homo sapiens
  misc_RNA (1)...(19): siRNA sense strand
uaacuacaccuacuacuuu

SEQ ID NO: 727545 - RNA, 19 nt, Homo sapiens
  misc_RNA (1)...(19): siRNA sense strand
ugaaagaccuuaacuuguc

SEQ ID NO: 727546 - RNA, 19 nt, Homo sapiens
  misc_RNA (1)...(19): siRNA sense strand
ugaagaaacuagauagaga

SEQ ID NO: 727547 - RNA, 19 nt, Homo sapiens
  misc_RNA (1)...(19): siRNA sense strand
ccaagaaacaggcaacaua

SEQ ID NO: 727548 - RNA, 19 nt, Homo sapiens
  misc_RNA (1)...(19): siRNA sense strand
gaaaguaaagguugaagau

SEQ ID NO: 727549 - RNA, 19 nt, Homo sapiens
  misc_RNA (1)...(19): siRNA sense strand
cagaugauguugacaguga

SEQ ID NO: 727550 - RNA, 19 nt, Homo sapiens
  misc_RNA (1)...(19): siRNA sense strand
caagaaacaggcaacauaa

SEQ ID NO: 727551 - RNA, 19 nt, Homo sapiens
  misc_RNA (1)...(19): siRNA sense strand
gcaguuacgcucuccauuu

SEQ ID NO: 727552 - RNA, 19 nt, Homo sapiens
  misc_RNA (1)...(19): siRNA sense strand
gagauuauuucaccucaau

SEQ ID NO: 727553 - RNA, 19 nt, Homo sapiens
  misc_RNA (1)...(19): siRNA sense strand
ccacuggacuuaucacaau

SEQ ID NO: 727554 - RNA, 19 nt, Homo sapiens
  misc_RNA (1)...(19): siRNA sense strand
gaaacagagucacacuaga

SEQ ID NO: 727555 - RNA, 19 nt, Homo sapiens
  misc_RNA (1)...(19): siRNA sense strand
gaccaaugcuacacugauu

SEQ ID NO: 727556 - RNA, 19 nt, Homo sapiens
  misc_RNA (1)...(19): siRNA sense strand
gcauugaucgugagaaauu

SEQ ID NO: 727557 - RNA, 19 nt, Homo sapiens
  misc_RNA (1)...(19): siRNA sense strand
gauguauccucaccaacua

SEQ ID NO: 727558 - RNA, 19 nt, Homo sapiens
  misc_RNA (1)...(19): siRNA sense strand
ggaauaaacggaguucaaa

SEQ ID NO: 727559 - RNA, 19 nt, Homo sapiens
  misc_RNA (1)...(19): siRNA sense strand
caacauugccaggagauua

SEQ ID NO: 727560 - RNA, 19 nt, Homo sapiens
  misc_RNA (1)...(19): siRNA sense strand
gaagaaacuagauagagaa

SEQ ID NO: 727561 - RNA, 19 nt, Homo sapiens
  misc_RNA (1)...(19): siRNA sense strand
caucacugcuguaguaaga

SEQ ID NO: 727562 - RNA, 19 nt, Homo sapiens
  misc_RNA (1)...(19): siRNA sense strand
uuucaucacugcuguagua

SEQ ID NO: 727563 - RNA, 19 nt, Homo sapiens
  misc_RNA (1)...(19): siRNA sense strand
uaacugauccugauuaugg

SEQ ID NO: 727564 - RNA, 19 nt, Homo sapiens
  misc_RNA (1)...(19): siRNA sense strand
caacaguuaucaacauauc

SEQ ID NO: 727565 - RNA, 19 nt, Homo sapiens
  misc_RNA (1)...(19): siRNA sense strand
ugacacaguuguucuuuca

SEQ ID NO: 727566 - RNA, 19 nt, Homo sapiens
  misc_RNA (1)...(19): siRNA sense strand
gguugaagaugguggcuuu

SEQ ID NO: 727567 - RNA, 19 nt, Homo sapiens
  misc_RNA (1)...(19): siRNA sense strand
gagaaauuaugugcuggua

SEQ ID NO: 727568 - RNA, 19 nt, Homo sapiens
  misc_RNA (1)...(19): siRNA sense strand
ggugucauccgaccaaaua

SEQ ID NO: 727569 - RNA, 19 nt, Homo sapiens
  misc_RNA (1)...(19): siRNA sense strand
caauggugcugguaaaugu

SEQ ID NO: 727570 - RNA, 19 nt, Homo sapiens
  misc_RNA (1)...(19): siRNA sense strand
ggacuuaucacaaucaaag

SEQ ID NO: 727571 - RNA, 19 nt, Homo sapiens
  misc_RNA (1)...(19): siRNA sense strand
ccacuucucuuucagcaau

SEQ ID NO: 727572 - RNA, 19 nt, Homo sapiens
  misc_RNA (1)...(19): siRNA sense strand
ucauaacugugacggauaa

SEQ ID NO: 727573 - RNA, 19 nt, Homo sapiens
  misc_RNA (1)...(19): siRNA sense strand
ccauaaaugugguugaugu

SEQ ID NO: 727574 - RNA, 19 nt, Homo sapiens
  misc_RNA (1)...(19): siRNA sense strand
gacaagaugccacaacuga

SEQ ID NO: 727575 - RNA, 19 nt, Homo sapiens
  misc_RNA (1)...(19): siRNA sense strand
ggaaacagagucacacuag

SEQ ID NO: 727576 - RNA, 19 nt, Homo sapiens
  misc_RNA (1)...(19): siRNA sense strand
ugacagugauggaaacaga

SEQ ID NO: 727577 - RNA, 19 nt, Homo sapiens
  misc_RNA (1)...(19): siRNA sense strand
caaaguaaccauaaaugug

SEQ ID NO: 727578 - RNA, 19 nt, Homo sapiens
  misc_RNA (1)...(19): siRNA sense strand
ccucaaagauccaguacug

SEQ ID NO: 727579 - RNA, 19 nt, Homo sapiens
  misc_RNA (1)...(19): siRNA sense strand
acaguggucuuucagguaa

SEQ ID NO: 727580 - RNA, 19 nt, Homo sapiens
  misc_RNA (1)...(19): siRNA sense strand
ucagaucccuacagcguuu

SEQ ID NO: 727581 - RNA, 19 nt, Homo sapiens
  misc_RNA (1)...(19): siRNA sense strand
cacuagaccuuccuauuga

SEQ ID NO: 727582 - RNA, 19 nt, Homo sapiens
  misc_RNA (1)...(19): siRNA sense strand
gaaaacaggcagaugauaa

SEQ ID NO: 727583 - RNA, 19 nt, Homo sapiens
  misc_RNA (1)...(19): siRNA sense strand
caagaugccacaacugauu

SEQ ID NO: 727584 - RNA, 19 nt, Homo sapiens
  misc_RNA (1)...(19): siRNA sense strand
caagaacugccucucgaua

SEQ ID NO: 727585 - RNA, 19 nt, Homo sapiens
  misc_RNA (1)...(19): siRNA sense strand
caaugacacuggcaugaau

SEQ ID NO: 727586 - RNA, 19 nt, Homo sapiens
  misc_RNA (1)...(19): siRNA sense strand
gaagucaguauaccagaaa

SEQ ID NO: 727587 - RNA, 19 nt, Homo sapiens
  misc_RNA (1)...(19): siRNA sense strand
gggaagagaaggauaccua

SEQ ID NO: 727588 - RNA, 19 nt, Homo sapiens
  misc_RNA (1)...(19): siRNA sense strand
ugccacagaugcugacaua

SEQ ID NO: 727589 - RNA, 19 nt, Homo sapiens
  misc_RNA (1)...(19): siRNA sense strand
ccuuaaggcugcucagaaa

SEQ ID NO: 727590 - RNA, 19 nt, Homo sapiens
  misc_RNA (1)...(19): siRNA sense strand
guugaaagaccuuaacuug

SEQ ID NO: 727591 - RNA, 19 nt, Homo sapiens
  misc_RNA (1)...(19): siRNA sense strand
uaagauacaucgucaaucc

SEQ ID NO: 727592 - RNA, 19 nt, Homo sapiens
  misc_RNA (1)...(19): siRNA sense strand
ggaaaguacaauuggguaa

SEQ ID NO: 727593 - RNA, 19 nt, Homo sapiens
  misc_RNA (1)...(19): siRNA sense strand
gauucucucuucaguguug

SEQ ID NO: 727594 - RNA, 19 nt, Homo sapiens
  misc_RNA (1)...(19): siRNA sense strand
gaaugacaauagcccaguu

SEQ ID NO: 727595 - RNA, 19 nt, Homo sapiens
  misc_RNA (1)...(19): siRNA sense strand
ggcaagugaugguggauug

SEQ ID NO: 727596 - RNA, 19 nt, Homo sapiens
  misc_RNA (1)...(19): siRNA sense strand
ucucuucaguguuguaauu

SEQ ID NO: 727597 - RNA, 19 nt, Homo sapiens
  misc_RNA (1)...(19): siRNA sense strand
gagacaagaugccacaacu

SEQ ID NO: 727598 - RNA, 19 nt, Homo sapiens
  misc_RNA (1)...(19): siRNA sense strand
acacuagaccuuccuauug

SEQ ID NO: 727599 - RNA, 19 nt, Homo sapiens
  misc_RNA (1)...(19): siRNA sense strand
gaguguuggucaaagcuaa

SEQ ID NO: 727600 - RNA, 19 nt, Homo sapiens
  misc_RNA (1)...(19): siRNA sense strand
ugacaaccacccagucuuu

SEQ ID NO: 727601 - RNA, 19 nt, Homo sapiens
  misc_RNA (1)...(19): siRNA sense strand
guacaagaccggagaugug

SEQ ID NO: 727602 - RNA, 19 nt, Homo sapiens
  misc_RNA (1)...(19): siRNA sense strand
cagccugccuuccaaauuc

SEQ ID NO: 727603 - RNA, 19 nt, Homo sapiens
  misc_RNA (1)...(19): siRNA sense strand
uuacagaccuugguuuaca

SEQ ID NO: 727604 - RNA, 19 nt, Homo sapiens
  misc_RNA (1)...(19): siRNA sense strand
gagguucguuacagcauug

SEQ ID NO: 727605 - RNA, 19 nt, Homo sapiens
  misc_RNA (1)...(19): siRNA sense strand
ugacaugcuucacagauca

SEQ ID NO: 727606 - RNA, 19 nt, Homo sapiens
  misc_RNA (1)...(19): siRNA sense strand
aaauugcucucauaacugu

SEQ ID NO: 727607 - RNA, 19 nt, Homo sapiens
  misc_RNA (1)...(19): siRNA sense strand
cagcaacaguuaucaacau

SEQ ID NO: 727608 - RNA, 19 nt, Homo sapiens
  misc_RNA (1)...(19): siRNA sense strand
ggaggaaacacaagagauc

SEQ ID NO: 727609 - RNA, 19 nt, Homo sapiens
  misc_RNA (1)...(19): siRNA sense strand
ugaggauggugguagagua

SEQ ID NO: 727610 - RNA, 19 nt, Homo sapiens
  misc_RNA (1)...(19): siRNA sense strand
uaaggccaguauucaguaa

SEQ ID NO: 727611 - RNA, 19 nt, Homo sapiens
  misc_RNA (1)...(19): siRNA sense strand
ggagaugugccacugauuc

SEQ ID NO: 727612 - RNA, 19 nt, Homo sapiens
  misc_RNA (1)...(19): siRNA sense strand
ucaaagaaccacuggauag

SEQ ID NO: 727613 - RNA, 19 nt, Homo sapiens
  misc_RNA (1)...(19): siRNA sense strand
ggaguuagauagggaagag

SEQ ID NO: 727614 - RNA, 19 nt, Homo sapiens
  misc_RNA (1)...(19): siRNA sense strand
augcuacacugauuaauga

SEQ ID NO: 727615 - RNA, 19 nt, Homo sapiens
  misc_RNA (1)...(19): siRNA sense strand
gguagaguaucacguucuu

SEQ ID NO: 727616 - RNA, 19 nt, Homo sapiens
  misc_RNA (1)...(19): siRNA sense strand
gauaggcgacuuguugaaa

SEQ ID NO: 727617 - RNA, 19 nt, Homo sapiens
  misc_RNA (1)...(19): siRNA sense strand
gcugauguauccucaccaa

SEQ ID NO: 727618 - RNA, 19 nt, Homo sapiens
  misc_RNA (1)...(19): siRNA sense strand
ucaaucuguucgugaauga

SEQ ID NO: 727619 - RNA, 19 nt, Homo sapiens
  misc_RNA (1)...(19): siRNA sense strand
ucgcauugaucgugagaaa

SEQ ID NO: 727620 - RNA, 19 nt, Homo sapiens
  misc_RNA (1)...(19): siRNA sense strand
guaacuacaccuacuacuu

SEQ ID NO: 727621 - RNA, 19 nt, Homo sapiens
  misc_RNA (1)...(19): siRNA sense strand
ccaaugcuacacugauuaa

SEQ ID NO: 727622 - RNA, 19 nt, Homo sapiens
  misc_RNA (1)...(19): siRNA sense strand
aaacaggcaacauaacauu

SEQ ID NO: 727623 - RNA, 19 nt, Homo sapiens
  misc_RNA (1)...(19): siRNA sense strand
gaaacaggcaacauaacau

SEQ ID NO: 727624 - RNA, 19 nt, Homo sapiens
  misc_RNA (1)...(19): siRNA sense strand
ggacuaaucacuguaacug

SEQ ID NO: 727625 - RNA, 19 nt, Homo sapiens
  misc_RNA (1)...(19): siRNA sense strand
caaaauugcucucauaacu

SEQ ID NO: 727626 - RNA, 19 nt, Homo sapiens
  misc_RNA (1)...(19): siRNA sense strand
acacaguuguucuuucaga

SEQ ID NO: 727627 - RNA, 19 nt, Homo sapiens
  misc_RNA (1)...(19): siRNA sense strand
ugaagucaguauaccagaa

SEQ ID NO: 727628 - RNA, 19 nt, Homo sapiens
  misc_RNA (1)...(19): siRNA sense strand
caucgucaauccugucaau

SEQ ID NO: 727629 - RNA, 19 nt, Homo sapiens
  misc_RNA (1)...(19): siRNA sense strand
ccaaaguaaccauaaaugu

SEQ ID NO: 727630 - RNA, 19 nt, Homo sapiens
  misc_RNA (1)...(19): siRNA sense strand
ggauggugguagaguauca

SEQ ID NO: 727631 - RNA, 19 nt, Homo sapiens
  misc_RNA (1)...(19): siRNA sense strand
caaugucacagucuuugua

SEQ ID NO: 727632 - RNA, 19 nt, Homo sapiens
  misc_RNA (1)...(19): siRNA sense strand
gcagacagugggccuaaug

SEQ ID NO: 727633 - RNA, 19 nt, Homo sapiens
  misc_RNA (1)...(19): siRNA sense strand
aaacuaaggcagaugaugu

SEQ ID NO: 727634 - RNA, 19 nt, Homo sapiens
  misc_RNA (1)...(19): siRNA sense strand
auacugagauagcugaugu

SEQ ID NO: 727635 - RNA, 19 nt, Homo sapiens
  misc_RNA (1)...(19): siRNA sense strand
gugccaaaguaaccauaaa

SEQ ID NO: 727636 - RNA, 19 nt, Homo sapiens
  misc_RNA (1)...(19): siRNA sense strand
guaggacuaaucacuguaa

SEQ ID NO: 727637 - RNA, 19 nt, Homo sapiens
  misc_RNA (1)...(19): siRNA sense strand
gaaauuaugugcugguauc

SEQ ID NO: 727638 - RNA, 19 nt, Homo sapiens
  misc_RNA (1)...(19): siRNA sense strand
caagagaucuguuugcaau

SEQ ID NO: 727639 - RNA, 19 nt, Homo sapiens
  misc_RNA (1)...(19): siRNA sense strand
gaugguggcuuuccucaaa

SEQ ID NO: 727640 - RNA, 19 nt, Homo sapiens
  misc_RNA (1)...(19): siRNA sense strand
ggagaaaugugauguuaca

SEQ ID NO: 727641 - RNA, 19 nt, Homo sapiens
  misc_RNA (1)...(19): siRNA sense strand
caccauaacugucguugua

SEQ ID NO: 727642 - RNA, 19 nt, Homo sapiens
  misc_RNA (1)...(19): siRNA sense strand
gcaaugcucuucaucaaag

SEQ ID NO: 727643 - RNA, 19 nt, Homo sapiens
  misc_RNA (1)...(19): siRNA sense strand
ggagacaauucugcaguua

SEQ ID NO: 727644 - RNA, 19 nt, Homo sapiens
  misc_RNA (1)...(19): siRNA sense strand
uaacuacaccuacuacuuu

SEQ ID NO: 727645 - RNA, 19 nt, Homo sapiens
  misc_RNA (1)...(19): siRNA sense strand
ugaaagaccuuaacuuguc

SEQ ID NO: 727646 - RNA, 19 nt, Homo sapiens
  misc_RNA (1)...(19): siRNA sense strand
ugaagaaacuagauagaga

SEQ ID NO: 727647 - RNA, 19 nt, Homo sapiens
  misc_RNA (1)...(19): siRNA sense strand
ccaagaaacaggcaacaua

SEQ ID NO: 727648 - RNA, 19 nt, Homo sapiens
  misc_RNA (1)...(19): siRNA sense strand
gaaaguaaagguugaagau

SEQ ID NO: 727649 - RNA, 19 nt, Homo sapiens
  misc_RNA (1)...(19): siRNA sense strand
cagaugauguugacaguga

SEQ ID NO: 727650 - RNA, 19 nt, Homo sapiens
  misc_RNA (1)...(19): siRNA sense strand
caagaaacaggcaacauaa

SEQ ID NO: 727651 - RNA, 19 nt, Homo sapiens
  misc_RNA (1)...(19): siRNA sense strand
gcaguuacgcucuccauuu

SEQ ID NO: 727652 - RNA, 19 nt, Homo sapiens
  misc_RNA (1)...(19): siRNA sense strand
gagauuauuucaccucaau

SEQ ID NO: 727653 - RNA, 19 nt, Homo sapiens
  misc_RNA (1)...(19): siRNA sense strand
ccacuggacuuaucacaau

SEQ ID NO: 727654 - RNA, 19 nt, Homo sapiens
  misc_RNA (1)...(19): siRNA sense strand
gaaacagagucacacuaga

SEQ ID NO: 727655 - RNA, 19 nt, Homo sapiens
  misc_RNA (1)...(19): siRNA sense strand
gaccaaugcuacacugauu

SEQ ID NO: 727656 - RNA, 19 nt, Homo sapiens
  misc_RNA (1)...(19): siRNA sense strand
gcauugaucgugagaaauu

SEQ ID NO: 727657 - RNA, 19 nt, Homo sapiens
  misc_RNA (1)...(19): siRNA sense strand
gauguauccucaccaacua

SEQ ID NO: 727658 - RNA, 19 nt, Homo sapiens
  misc_RNA (1)...(19): siRNA sense strand
ggaauaaacggaguucaaa

SEQ ID NO: 727659 - RNA, 19 nt, Homo sapiens
  misc_RNA (1)...(19): siRNA sense strand
caacauugccaggagauua

SEQ ID NO: 727660 - RNA, 19 nt, Homo sapiens
  misc_RNA (1)...(19): siRNA sense strand
gaagaaacuagauagagaa

SEQ ID NO: 727661 - RNA, 19 nt, Homo sapiens
  misc_RNA (1)...(19): siRNA sense strand
caucacugcuguaguaaga

SEQ ID NO: 727662 - RNA, 19 nt, Homo sapiens
  misc_RNA (1)...(19): siRNA sense strand
uuucaucacugcuguagua

SEQ ID NO: 727663 - RNA, 19 nt, Homo sapiens
  misc_RNA (1)...(19): siRNA sense strand
uaacugauccugauuaugg

SEQ ID NO: 727664 - RNA, 19 nt, Homo sapiens
  misc_RNA (1)...(19): siRNA sense strand
caacaguuaucaacauauc

SEQ ID NO: 727665 - RNA, 19 nt, Homo sapiens
  misc_RNA (1)...(19): siRNA sense strand
ugacacaguuguucuuuca

SEQ ID NO: 727666 - RNA, 19 nt, Homo sapiens
  misc_RNA (1)...(19): siRNA sense strand
gguugaagaugguggcuuu

SEQ ID NO: 727667 - RNA, 19 nt, Homo sapiens
  misc_RNA (1)...(19): siRNA sense strand
gagaaauuaugugcuggua

SEQ ID NO: 727668 - RNA, 19 nt, Homo sapiens
  misc_RNA (1)...(19): siRNA sense strand
ggugucauccgaccaaaua

SEQ ID NO: 727669 - RNA, 19 nt, Homo sapiens
  misc_RNA (1)...(19): siRNA sense strand
caauggugcugguaaaugu

SEQ ID NO: 727670 - RNA, 19 nt, Homo sapiens
  misc_RNA (1)...(19): siRNA sense strand
ggacuuaucacaaucaaag

SEQ ID NO: 727671 - RNA, 19 nt, Homo sapiens
  misc_RNA (1)...(19): siRNA sense strand
ccacuucucuuucagcaau

SEQ ID NO: 727672 - RNA, 19 nt, Homo sapiens
  misc_RNA (1)...(19): siRNA sense strand
ucauaacugugacggauaa

SEQ ID NO: 727673 - RNA, 19 nt, Homo sapiens
  misc_RNA (1)...(19): siRNA sense strand
ccauaaaugugguugaugu

SEQ ID NO: 727674 - RNA, 19 nt, Homo sapiens
  misc_RNA (1)...(19): siRNA sense strand
gacaagaugccacaacuga

SEQ ID NO: 727675 - RNA, 19 nt, Homo sapiens
  misc_RNA (1)...(19): siRNA sense strand
ggaaacagagucacacuag

SEQ ID NO: 727676 - RNA, 19 nt, Homo sapiens
  misc_RNA (1)...(19): siRNA sense strand
ugacagugauggaaacaga

SEQ ID NO: 727677 - RNA, 19 nt, Homo sapiens
  misc_RNA (1)...(19): siRNA sense strand
caaaguaaccauaaaugug

SEQ ID NO: 727678 - RNA, 19 nt, Homo sapiens
  misc_RNA (1)...(19): siRNA sense strand
ccucaaagauccaguacug

SEQ ID NO: 727679 - RNA, 19 nt, Homo sapiens
  misc_RNA (1)...(19): siRNA sense strand
acaguggucuuucagguaa

SEQ ID NO: 727680 - RNA, 19 nt, Homo sapiens
  misc_RNA (1)...(19): siRNA sense strand
ucagaucccuacagcguuu

SEQ ID NO: 727681 - RNA, 19 nt, Homo sapiens
  misc_RNA (1)...(19): siRNA sense strand
cacuagaccuuccuauuga

SEQ ID NO: 727682 - RNA, 19 nt, Homo sapiens
  misc_RNA (1)...(19): siRNA sense strand
gaaaacaggcagaugauaa

SEQ ID NO: 727683 - RNA, 19 nt, Homo sapiens
  misc_RNA (1)...(19): siRNA sense strand
caagaugccacaacugauu

SEQ ID NO: 727684 - RNA, 19 nt, Homo sapiens
  misc_RNA (1)...(19): siRNA sense strand
caagaacugccucucgaua

SEQ ID NO: 727685 - RNA, 19 nt, Homo sapiens
  misc_RNA (1)...(19): siRNA sense strand
caaugacacuggcaugaau

SEQ ID NO: 727686 - RNA, 19 nt, Homo sapiens
  misc_RNA (1)...(19): siRNA sense strand
gaagucaguauaccagaaa

SEQ ID NO: 727687 - RNA, 19 nt, Homo sapiens
  misc_RNA (1)...(19): siRNA sense strand
gggaagagaaggauaccua

SEQ ID NO: 727688 - RNA, 19 nt, Homo sapiens
  misc_RNA (1)...(19): siRNA sense strand
ugccacagaugcugacaua

SEQ ID NO: 727689 - RNA, 19 nt, Homo sapiens
  misc_RNA (1)...(19): siRNA sense strand
ccuuaaggcugcucagaaa

SEQ ID NO: 727690 - RNA, 19 nt, Homo sapiens
  misc_RNA (1)...(19): siRNA sense strand
guugaaagaccuuaacuug

SEQ ID NO: 727691 - RNA, 19 nt, Homo sapiens
  misc_RNA (1)...(19): siRNA sense strand
uaagauacaucgucaaucc

SEQ ID NO: 727692 - RNA, 19 nt, Homo sapiens
  misc_RNA (1)...(19): siRNA sense strand
ggaaaguacaauuggguaa

SEQ ID NO: 727693 - RNA, 19 nt, Homo sapiens
  misc_RNA (1)...(19): siRNA sense strand
gauucucucuucaguguug

SEQ ID NO: 727694 - RNA, 19 nt, Homo sapiens
  misc_RNA (1)...(19): siRNA sense strand
gaaugacaauagcccaguu

SEQ ID NO: 727695 - RNA, 19 nt, Homo sapiens
  misc_RNA (1)...(19): siRNA sense strand
ggcaagugaugguggauug

SEQ ID NO: 727696 - RNA, 19 nt, Homo sapiens
  misc_RNA (1)...(19): siRNA sense strand
ucucuucaguguuguaauu

SEQ ID NO: 727697 - RNA, 19 nt, Homo sapiens
  misc_RNA (1)...(19): siRNA sense strand
gagacaagaugccacaacu

SEQ ID NO: 727698 - RNA, 19 nt, Homo sapiens
  misc_RNA (1)...(19): siRNA sense strand
acacuagaccuuccuauug

SEQ ID NO: 727699 - RNA, 19 nt, Homo sapiens
  misc_RNA (1)...(19): siRNA sense strand
gaguguuggucaaagcuaa

SEQ ID NO: 727700 - RNA, 19 nt, Homo sapiens
  misc_RNA (1)...(19): siRNA sense strand
ugacaaccacccagucuuu

SEQ ID NO: 727701 - RNA, 19 nt, Homo sapiens
  misc_RNA (1)...(19): siRNA sense strand
guacaagaccggagaugug

SEQ ID NO: 727702 - RNA, 19 nt, Homo sapiens
  misc_RNA (1)...(19): siRNA sense strand
cagccugccuuccaaauuc

SEQ ID NO: 727703 - RNA, 19 nt, Homo sapiens
  misc_RNA (1)...(19): siRNA sense strand
uuacagaccuugguuuaca

SEQ ID NO: 727704 - RNA, 19 nt, Homo sapiens
  misc_RNA (1)...(19): siRNA sense strand
gagguucguuacagcauug

SEQ ID NO: 727705 - RNA, 19 nt, Homo sapiens
  misc_RNA (1)...(19): siRNA sense strand
ugacaugcuucacagauca

SEQ ID NO: 727706 - RNA, 19 nt, Homo sapiens
  misc_RNA (1)...(19): siRNA sense strand
aaauugcucucauaacugu

SEQ ID NO: 727707 - RNA, 19 nt, Homo sapiens
  misc_RNA (1)...(19): siRNA sense strand
cagcaacaguuaucaacau

SEQ ID NO: 727708 - RNA, 19 nt, Homo sapiens
  misc_RNA (1)...(19): siRNA sense strand
ggaggaaacacaagagauc

SEQ ID NO: 727709 - RNA, 19 nt, Homo sapiens
  misc_RNA (1)...(19): siRNA sense strand
ugaggauggugguagagua

SEQ ID NO: 727710 - RNA, 19 nt, Homo sapiens
  misc_RNA (1)...(19): siRNA sense strand
uaaggccaguauucaguaa

SEQ ID NO: 727711 - RNA, 19 nt, Homo sapiens
  misc_RNA (1)...(19): siRNA sense strand
ggagaugugccacugauuc

SEQ ID NO: 727712 - RNA, 19 nt, Homo sapiens
  misc_RNA (1)...(19): siRNA sense strand
ucaaagaaccacuggauag

SEQ ID NO: 727713 - RNA, 19 nt, Homo sapiens
  misc_RNA (1)...(19): siRNA sense strand
ggaguuagauagggaagag

SEQ ID NO: 727714 - RNA, 19 nt, Homo sapiens
  misc_RNA (1)...(19): siRNA sense strand
augcuacacugauuaauga

SEQ ID NO: 727715 - RNA, 19 nt, Homo sapiens
  misc_RNA (1)...(19): siRNA sense strand
gguagaguaucacguucuu

SEQ ID NO: 727716 - RNA, 19 nt, Homo sapiens
  misc_RNA (1)...(19): siRNA sense strand
gauaggcgacuuguugaaa

SEQ ID NO: 727717 - RNA, 19 nt, Homo sapiens
  misc_RNA (1)...(19): siRNA sense strand
gcugauguauccucaccaa

SEQ ID NO: 727718 - RNA, 19 nt, Homo sapiens
  misc_RNA (1)...(19): siRNA sense strand
ucaaucuguucgugaauga

SEQ ID NO: 727719 - RNA, 19 nt, Homo sapiens
  misc_RNA (1)...(19): siRNA sense strand
ucgcauugaucgugagaaa

SEQ ID NO: 727720 - RNA, 19 nt, Homo sapiens
  misc_RNA (1)...(19): siRNA sense strand
guaacuacaccuacuacuu

SEQ ID NO: 727721 - RNA, 19 nt, Homo sapiens
  misc_RNA (1)...(19): siRNA sense strand
ccaaugcuacacugauuaa

SEQ ID NO: 727722 - RNA, 19 nt, Homo sapiens
  misc_RNA (1)...(19): siRNA sense strand
aaacaggcaacauaacauu

SEQ ID NO: 727723 - RNA, 19 nt, Homo sapiens
  misc_RNA (1)...(19): siRNA sense strand
gaaacaggcaacauaacau

SEQ ID NO: 727724 - RNA, 19 nt, Homo sapiens
  misc_RNA (1)...(19): siRNA sense strand
ggacuaaucacuguaacug

SEQ ID NO: 727725 - RNA, 19 nt, Homo sapiens
  misc_RNA (1)...(19): siRNA sense strand
caaaauugcucucauaacu

SEQ ID NO: 727726 - RNA, 19 nt, Homo sapiens
  misc_RNA (1)...(19): siRNA sense strand
acacaguuguucuuucaga

SEQ ID NO: 727727 - RNA, 19 nt, Homo sapiens
  misc_RNA (1)...(19): siRNA sense strand
ugaagucaguauaccagaa

SEQ ID NO: 727728 - RNA, 19 nt, Homo sapiens
  misc_RNA (1)...(19): siRNA sense strand
caucgucaauccugucaau

SEQ ID NO: 727729 - RNA, 19 nt, Homo sapiens
  misc_RNA (1)...(19): siRNA sense strand
ccaaaguaaccauaaaugu

SEQ ID NO: 727730 - RNA, 19 nt, Homo sapiens
  misc_RNA (1)...(19): siRNA sense strand
ggauggugguagaguauca

SEQ ID NO: 727731 - RNA, 19 nt, Homo sapiens
  misc_RNA (1)...(19): siRNA sense strand
caaugucacagucuuugua

SEQ ID NO: 727732 - RNA, 19 nt, Homo sapiens
  misc_RNA (1)...(19): siRNA sense strand
gcagacagugggccuaaug

SEQ ID NO: 727733 - RNA, 19 nt, Homo sapiens
  misc_RNA (1)...(19): siRNA sense strand
aaacuaaggcagaugaugu

SEQ ID NO: 727734 - RNA, 19 nt, Homo sapiens
  misc_RNA (1)...(19): siRNA sense strand
auacugagauagcugaugu

SEQ ID NO: 727735 - RNA, 19 nt, Homo sapiens
  misc_RNA (1)...(19): siRNA sense strand
gugccaaaguaaccauaaa

SEQ ID NO: 727736 - RNA, 19 nt, Homo sapiens
  misc_RNA (1)...(19): siRNA sense strand
guaggacuaaucacuguaa

SEQ ID NO: 727737 - RNA, 19 nt, Homo sapiens
  misc_RNA (1)...(19): siRNA sense strand
caacacgucccuaacuugu

SEQ ID NO: 727738 - RNA, 19 nt, Homo sapiens
  misc_RNA (1)...(19): siRNA sense strand
gcaccagauuguccuugug

SEQ ID NO: 727739 - RNA, 19 nt, Homo sapiens
  misc_RNA (1)...(19): siRNA sense strand
gcgucaagcucaccguugu

SEQ ID NO: 727740 - RNA, 19 nt, Homo sapiens
  misc_RNA (1)...(19): siRNA sense strand
gugguccugugcacguuua

SEQ ID NO: 727741 - RNA, 19 nt, Homo sapiens
  misc_RNA (1)...(19): siRNA sense strand
uggcuacccugaaccagau

SEQ ID NO: 727742 - RNA, 19 nt, Homo sapiens
  misc_RNA (1)...(19): siRNA sense strand
ggccucaacacgucccuaa

SEQ ID NO: 727743 - RNA, 19 nt, Homo sapiens
  misc_RNA (1)...(19): siRNA sense strand
ucaacacgucccuaacuug

SEQ ID NO: 727744 - RNA, 19 nt, Homo sapiens
  misc_RNA (1)...(19): siRNA sense strand
guggccacgugcagaagaa

SEQ ID NO: 727745 - RNA, 19 nt, Homo sapiens
  misc_RNA (1)...(19): siRNA sense strand
cucaacacgucccuaacuu

SEQ ID NO: 727746 - RNA, 19 nt, Homo sapiens
  misc_RNA (1)...(19): siRNA sense strand
caacacgucccuaacuugu

SEQ ID NO: 727747 - RNA, 19 nt, Homo sapiens
  misc_RNA (1)...(19): siRNA sense strand
gcaccagauuguccuugug

SEQ ID NO: 727748 - RNA, 19 nt, Homo sapiens
  misc_RNA (1)...(19): siRNA sense strand
gcgucaagcucaccguugu

SEQ ID NO: 727749 - RNA, 19 nt, Homo sapiens
  misc_RNA (1)...(19): siRNA sense strand
gugguccugugcacguuua

SEQ ID NO: 727750 - RNA, 19 nt, Homo sapiens
  misc_RNA (1)...(19): siRNA sense strand
uggcuacccugaaccagau

SEQ ID NO: 727751 - RNA, 19 nt, Homo sapiens
  misc_RNA (1)...(19): siRNA sense strand
ggccucaacacgucccuaa

SEQ ID NO: 727752 - RNA, 19 nt, Homo sapiens
  misc_RNA (1)...(19): siRNA sense strand
ucaacacgucccuaacuug

SEQ ID NO: 727753 - RNA, 19 nt, Homo sapiens
  misc_RNA (1)...(19): siRNA sense strand
guggccacgugcagaagaa

SEQ ID NO: 727754 - RNA, 19 nt, Homo sapiens
  misc_RNA (1)...(19): siRNA sense strand
cucaacacgucccuaacuu

SEQ ID NO: 727755 - RNA, 19 nt, Homo sapiens
  misc_RNA (1)...(19): siRNA sense strand
caacacgucccuaacuugu

SEQ ID NO: 727756 - RNA, 19 nt, Homo sapiens
  misc_RNA (1)...(19): siRNA sense strand
gcaccagauuguccuugug

SEQ ID NO: 727757 - RNA, 19 nt, Homo sapiens
  misc_RNA (1)...(19): siRNA sense strand
gcgucaagcucaccguugu

SEQ ID NO: 727758 - RNA, 19 nt, Homo sapiens
  misc_RNA (1)...(19): siRNA sense strand
gugguccugugcacguuua

SEQ ID NO: 727759 - RNA, 19 nt, Homo sapiens
  misc_RNA (1)...(19): siRNA sense strand
uggcuacccugaaccagau

SEQ ID NO: 727760 - RNA, 19 nt, Homo sapiens
  misc_RNA (1)...(19): siRNA sense strand
ggccucaacacgucccuaa

SEQ ID NO: 727761 - RNA, 19 nt, Homo sapiens
  misc_RNA (1)...(19): siRNA sense strand
ucaacacgucccuaacuug

SEQ ID NO: 727762 - RNA, 19 nt, Homo sapiens
  misc_RNA (1)...(19): siRNA sense strand
guggccacgugcagaagaa

SEQ ID NO: 727763 - RNA, 19 nt, Homo sapiens
  misc_RNA (1)...(19): siRNA sense strand
cucaacacgucccuaacuu

SEQ ID NO: 727764 - RNA, 19 nt, Homo sapiens
  misc_RNA (1)...(19): siRNA sense strand
caagaagagucucagauau

SEQ ID NO: 727765 - RNA, 19 nt, Homo sapiens
  misc_RNA (1)...(19): siRNA sense strand
gcaagaaccaccugagaaa

SEQ ID NO: 727766 - RNA, 19 nt, Homo sapiens
  misc_RNA (1)...(19): siRNA sense strand
caacuuugauccagcagaa

SEQ ID NO: 727767 - RNA, 19 nt, Homo sapiens
  misc_RNA (1)...(19): siRNA sense strand
gaaaagugauccuaaacaa

SEQ ID NO: 727768 - RNA, 19 nt, Homo sapiens
  misc_RNA (1)...(19): siRNA sense strand
gagagcaaccggacaauau

SEQ ID NO: 727769 - RNA, 19 nt, Homo sapiens
  misc_RNA (1)...(19): siRNA sense strand
acaagaagagucucagaua

SEQ ID NO: 727770 - RNA, 19 nt, Homo sapiens
  misc_RNA (1)...(19): siRNA sense strand
aaagugauccuaaacaaga

SEQ ID NO: 727771 - RNA, 19 nt, Homo sapiens
  misc_RNA (1)...(19): siRNA sense strand
ccagagaggaggcaaagaa

SEQ ID NO: 727772 - RNA, 19 nt, Homo sapiens
  misc_RNA (1)...(19): siRNA sense strand
agagguugcugcugucaaa

SEQ ID NO: 727773 - RNA, 19 nt, Homo sapiens
  misc_RNA (1)...(19): siRNA sense strand
caacacccacuaccgaauu

SEQ ID NO: 727774 - RNA, 19 nt, Homo sapiens
  misc_RNA (1)...(19): siRNA sense strand
gacaucagucaccaucuua

SEQ ID NO: 727775 - RNA, 19 nt, Homo sapiens
  misc_RNA (1)...(19): siRNA sense strand
gagcaagaaccaccugaga

SEQ ID NO: 727776 - RNA, 19 nt, Homo sapiens
  misc_RNA (1)...(19): siRNA sense strand
agacaucagucaccaucuu

SEQ ID NO: 727777 - RNA, 19 nt, Homo sapiens
  misc_RNA (1)...(19): siRNA sense strand
cuauaacaaucaugcauuc

SEQ ID NO: 727778 - RNA, 19 nt, Homo sapiens
  misc_RNA (1)...(19): siRNA sense strand
ggaaggaggaagagacauc

SEQ ID NO: 727779 - RNA, 19 nt, Homo sapiens
  misc_RNA (1)...(19): siRNA sense strand
cuuagacucuucugaggaa

SEQ ID NO: 727780 - RNA, 19 nt, Homo sapiens
  misc_RNA (1)...(19): siRNA sense strand
agaagagucucagauaucu

SEQ ID NO: 727781 - RNA, 19 nt, Homo sapiens
  misc_RNA (1)...(19): siRNA sense strand
agagcaaccggacaauaua

SEQ ID NO: 727782 - RNA, 19 nt, Homo sapiens
  misc_RNA (1)...(19): siRNA sense strand
ugagaaaagugauccuaaa

SEQ ID NO: 727783 - RNA, 19 nt, Homo sapiens
  misc_RNA (1)...(19): siRNA sense strand
cggacaauauaccagcuuu

SEQ ID NO: 727784 - RNA, 19 nt, Homo sapiens
  misc_RNA (1)...(19): siRNA sense strand
cuaccgaauuccacaagga

SEQ ID NO: 727785 - RNA, 19 nt, Homo sapiens
  misc_RNA (1)...(19): siRNA sense strand
gaaggaggaagagacauca

SEQ ID NO: 727786 - RNA, 19 nt, Homo sapiens
  misc_RNA (1)...(19): siRNA sense strand
cacgcgagauucugagaga

SEQ ID NO: 727787 - RNA, 19 nt, Homo sapiens
  misc_RNA (1)...(19): siRNA sense strand
cagagaggaggcaaagaaa

SEQ ID NO: 727788 - RNA, 19 nt, Homo sapiens
  misc_RNA (1)...(19): siRNA sense strand
gagagaaaaccaacuuuga

SEQ ID NO: 727789 - RNA, 19 nt, Homo sapiens
  misc_RNA (1)...(19): siRNA sense strand
uuugagagccuucuagaga

SEQ ID NO: 727790 - RNA, 19 nt, Homo sapiens
  misc_RNA (1)...(19): siRNA sense strand
ccgaauuccacaaggauuu

SEQ ID NO: 727791 - RNA, 19 nt, Homo sapiens
  misc_RNA (1)...(19): siRNA sense strand
ugagagagcaaccggacaa

SEQ ID NO: 727792 - RNA, 19 nt, Homo sapiens
  misc_RNA (1)...(19): siRNA sense strand
gaggaagagacaucaguca

SEQ ID NO: 727793 - RNA, 19 nt, Homo sapiens
  misc_RNA (1)...(19): siRNA sense strand
aagaagagucucagauauc

SEQ ID NO: 727794 - RNA, 19 nt, Homo sapiens
  misc_RNA (1)...(19): siRNA sense strand
aaacaagaagagucucaga

SEQ ID NO: 727795 - RNA, 19 nt, Homo sapiens
  misc_RNA (1)...(19): siRNA sense strand
gagcaaccggacaauauac

SEQ ID NO: 727796 - RNA, 19 nt, Homo sapiens
  misc_RNA (1)...(19): siRNA sense strand
agagagcaaccggacaaua

SEQ ID NO: 727797 - RNA, 19 nt, Homo sapiens
  misc_RNA (1)...(19): siRNA sense strand
gaccgcuucuauaacaauc

SEQ ID NO: 727798 - RNA, 19 nt, Homo sapiens
  misc_RNA (1)...(19): siRNA sense strand
gagaggaggcaaagaaaau

SEQ ID NO: 727799 - RNA, 19 nt, Homo sapiens
  misc_RNA (1)...(19): siRNA sense strand
caucagucaccaucuuaga

SEQ ID NO: 727800 - RNA, 19 nt, Homo sapiens
  misc_RNA (1)...(19): siRNA sense strand
ucgauuccauucuccaaca

SEQ ID NO: 727801 - RNA, 19 nt, Homo sapiens
  misc_RNA (1)...(19): siRNA sense strand
gcagcagccuauuuugaga

SEQ ID NO: 727802 - RNA, 19 nt, Homo sapiens
  misc_RNA (1)...(19): siRNA sense strand
gaagagguugcugcuguca

SEQ ID NO: 727803 - RNA, 19 nt, Homo sapiens
  misc_RNA (1)...(19): siRNA sense strand
cgaauuccacaaggauuug

SEQ ID NO: 727804 - RNA, 19 nt, Homo sapiens
  misc_RNA (1)...(19): siRNA sense strand
gagaaaaccaacuuugauc
